United States Patent Application Publication US 2006/0003322 A1 - sequence listing, part 24

SEQ ID NO: 1015241 - RNA, 18 nt, Human
cugccaccaugcccaggu

SEQ ID NO: 1015242 - RNA, 23 nt, Human
cugccuuggcccccagaguagcu

SEQ ID NO: 1015243 - RNA, 19 nt, Human
cugcuuuuaaucccaacuu

SEQ ID NO: 1015244 - RNA, 24 nt, Human
cuggagugcaguggcaugaucuca

SEQ ID NO: 1015245 - RNA, 21 nt, Human
cuugcucuguugcccaggcug

SEQ ID NO: 1015246 - RNA, 24 nt, Human
cuuggcccccagaguagcugggau

SEQ ID NO: 1015247 - RNA, 21 nt, Human
gaaaaguaaacacaacuuggc

SEQ ID NO: 1015248 - RNA, 24 nt, Human
gaaaagugcugggauuacaggcgu

SEQ ID NO: 1015249 - RNA, 23 nt, Human
gaacuccuggccucaagcaaucc

SEQ ID NO: 1015250 - RNA, 19 nt, Human
gacccguugccccucacuc

SEQ ID NO: 1015251 - RNA, 23 nt, Human
gaccucaggugauuugcccgccu

SEQ ID NO: 1015252 - RNA, 18 nt, Human
gagaugggguuucaccau

SEQ ID NO: 1015253 - RNA, 24 nt, Human
gagaugggguuucaccauguuggc

SEQ ID NO: 1015254 - RNA, 21 nt, Human
gaggcgcugagcccuucuuuu

SEQ ID NO: 1015255 - RNA, 18 nt, Human
gagugcaguggcuccugu

SEQ ID NO: 1015256 - RNA, 18 nt, Human
gauuacagaugugagcca

SEQ ID NO: 1015257 - RNA, 23 nt, Human
gauuacagaugugagccauggca

SEQ ID NO: 1015258 - RNA, 27 nt, Human
gauuacagaugugagccauggcaccau

SEQ ID NO: 1015259 - RNA, 29 nt, Human
gauuacagaugugagccauggcaccaugc

SEQ ID NO: 1015260 - RNA, 24 nt, Human
gauuauaagcaccugccaccaugc

SEQ ID NO: 1015261 - RNA, 22 nt, Human
gcaaccuccaccuccuggguuc

SEQ ID NO: 1015262 - RNA, 22 nt, Human
gcaaccuccaucucccaggcuc

SEQ ID NO: 1015263 - RNA, 22 nt, Human
gcaauaggugucauaaugagaa

SEQ ID NO: 1015264 - RNA, 22 nt, Human
gcaauaggugucauaaugagaa

SEQ ID NO: 1015265 - RNA, 24 nt, Human
gcccaggcuggagugcaguggcau

SEQ ID NO: 1015266 - RNA, 22 nt, Human
gccccucacuccucccagaaac

SEQ ID NO: 1015267 - RNA, 23 nt, Human
gccucagccuccaaaagugcugg

SEQ ID NO: 1015268 - RNA, 23 nt, Human
gccuuggccucugaaaagugcug

SEQ ID NO: 1015269 - RNA, 25 nt, Human
gcucuguugcccaggcuggagugca

SEQ ID NO: 1015270 - RNA, 19 nt, Human
gcuggagugcaguggcaug

SEQ ID NO: 1015271 - RNA, 21 nt, Human
gcuggagugcaguggcuccug

SEQ ID NO: 1015272 - RNA, 23 nt, Human
gcuggucucgaacuccuggccuc

SEQ ID NO: 1015273 - RNA, 19 nt, Human
ggaaagcguuguaaaagua

SEQ ID NO: 1015274 - RNA, 18 nt, Human
ggcagagucuugcucugu

SEQ ID NO: 1015275 - RNA, 24 nt, Human
ggccucaagcaauccacccgccuc

SEQ ID NO: 1015276 - RNA, 19 nt, Human
ggccucugaaaagugcugg

SEQ ID NO: 1015277 - RNA, 24 nt, Human
ggcuggucucgaacuccuggccuc

SEQ ID NO: 1015278 - RNA, 22 nt, Human
gggguuucaccauguuggccag

SEQ ID NO: 1015279 - RNA, 23 nt, Human
guagagaugggguuucaccaugu

SEQ ID NO: 1015280 - RNA, 18 nt, Human
guagcugggauuauaagc

SEQ ID NO: 1015281 - RNA, 22 nt, Human
gucaaucuggaacauaauuacu

SEQ ID NO: 1015282 - RNA, 22 nt, Human
gugccucagccucucaaguagc

SEQ ID NO: 1015283 - RNA, 23 nt, Human
gugccucagccucucaaguagcu

SEQ ID NO: 1015284 - RNA, 23 nt, Human
uaaaaaaaagaacaugaaaaugc

SEQ ID NO: 1015285 - RNA, 18 nt, Human
uaaaaccagcaagcaucc

SEQ ID NO: 1015286 - RNA, 24 nt, Human
uaacagcauguucauauucacaaa

SEQ ID NO: 1015287 - RNA, 18 nt, Human
uaacuaauugacauuccu

SEQ ID NO: 1015288 - RNA, 19 nt, Human
uaacuaauugacauuccuc

SEQ ID NO: 1015289 - RNA, 22 nt, Human
uaacuaauugacauuccucaaa

SEQ ID NO: 1015290 - RNA, 24 nt, Human
uaauuuuugcauguuuaguagaga

SEQ ID NO: 1015291 - RNA, 19 nt, Human
uacaccacaucaagaauga

SEQ ID NO: 1015292 - RNA, 20 nt, Human
uacaccacaucaagaaugag

SEQ ID NO: 1015293 - RNA, 28 nt, Human
uagaaggcuaaaggcacaauuuuuauca

SEQ ID NO: 1015294 - RNA, 22 nt, Human
uagagaugggguuucaccaugu

SEQ ID NO: 1015295 - RNA, 18 nt, Human
uagcugggauuccaggca

SEQ ID NO: 1015296 - RNA, 24 nt, Human
uaguagagacagcguuucaccacg

SEQ ID NO: 1015297 - RNA, 24 nt, Human
uaguagagaugggguuucaccaug

SEQ ID NO: 1015298 - RNA, 25 nt, Human
uaguagagaugggguuucaccaugu

SEQ ID NO: 1015299 - RNA, 24 nt, Human
uauuuuuuuguauuuuaguagaga

SEQ ID NO: 1015300 - RNA, 23 nt, Human
ucaaaucuaguagaguaaccaaa

SEQ ID NO: 1015301 - RNA, 23 nt, Human
ucacacccuucaauuacaccaca

SEQ ID NO: 1015302 - RNA, 23 nt, Human
ucacacccuucaauuacaccaca

SEQ ID NO: 1015303 - RNA, 22 nt, Human
ucacccaggcuggagugcagug

SEQ ID NO: 1015304 - RNA, 24 nt, Human
ucacccaggcuggagugcaguggc

SEQ ID NO: 1015305 - RNA, 24 nt, Human
ucacucugucacccaggcuggagu

SEQ ID NO: 1015306 - RNA, 23 nt, Human
ucacugcaaccuccaccuccugg

SEQ ID NO: 1015307 - RNA, 24 nt, Human
ucacugcaaccuccaccuccuggg

SEQ ID NO: 1015308 - RNA, 25 nt, Human
ucacugcaaccuccaccuccugggu

SEQ ID NO: 1015309 - RNA, 26 nt, Human
ucacugcaaccuccaccuccuggguu

SEQ ID NO: 1015310 - RNA, 27 nt, Human
ucacugcaaccuccaccuccuggguuc

SEQ ID NO: 1015311 - RNA, 24 nt, Human
ucacugcaaccuccaucucccagg

SEQ ID NO: 1015312 - RNA, 25 nt, Human
ucacugcaaccuccaucucccaggc

SEQ ID NO: 1015313 - RNA, 26 nt, Human
ucagcucacugcaaccuccaucuccc

SEQ ID NO: 1015314 - RNA, 23 nt, Human
uccaaaagugcugggauuacaga

SEQ ID NO: 1015315 - RNA, 24 nt, Human
uccaaaagugcugggauuacagau

SEQ ID NO: 1015316 - RNA, 20 nt, Human
uccacccgccucagccucca

SEQ ID NO: 1015317 - RNA, 21 nt, Human
ucccagaaacggaaaauggcc

SEQ ID NO: 1015318 - RNA, 21 nt, Human
ucccaggcucaagcaauucuc

SEQ ID NO: 1015319 - RNA, 24 nt, Human
ucccaggcucaagcaauucuccug

SEQ ID NO: 1015320 - RNA, 21 nt, Human
uccuggguucaagcaauucuc

SEQ ID NO: 1015321 - RNA, 24 nt, Human
uccuggguucaagcaauucucgug

SEQ ID NO: 1015322 - RNA, 24 nt, Human
ucucaaguagcugggauuccaggc

SEQ ID NO: 1015323 - RNA, 23 nt, Human
ucucacucugucacccaggcugg

SEQ ID NO: 1015324 - RNA, 24 nt, Human
ucucacucugucacccaggcugga

SEQ ID NO: 1015325 - RNA, 26 nt, Human
ucucacucugucacccaggcuggagu

SEQ ID NO: 1015326 - RNA, 27 nt, Human
ucucacucugucacccaggcuggagug

SEQ ID NO: 1015327 - RNA, 24 nt, Human
ucucccaggcucaagcaauucucc

SEQ ID NO: 1015328 - RNA, 21 nt, Human
ucucgaacuccuggccucaag

SEQ ID NO: 1015329 - RNA, 24 nt, Human
ucugucacccaggcuggagugcag

SEQ ID NO: 1015330 - RNA, 19 nt, Human
ucuguguuuccgagacugc

SEQ ID NO: 1015331 - RNA, 18 nt, Human
ucuguugcccaggcugga

SEQ ID NO: 1015332 - RNA, 24 nt, Human
ucuguugcccaggcuggagugcag

SEQ ID NO: 1015333 - RNA, 23 nt, Human
ucuugcucuguugcccaggcugg

SEQ ID NO: 1015334 - RNA, 24 nt, Human
ucuugcucuguugcccaggcugga

SEQ ID NO: 1015335 - RNA, 22 nt, Human
ucuuuuuuccuuuuucuccgac

SEQ ID NO: 1015336 - RNA, 23 nt, Human
ugaaaccaagcacaguuauaguc

SEQ ID NO: 1015337 - RNA, 24 nt, Human
ugacaguaaugcuaaaaaaaagaa

SEQ ID NO: 1015338 - RNA, 18 nt, Human
ugaccucaggugauuugc

SEQ ID NO: 1015339 - RNA, 20 nt, Human
ugaccucaggugauuugccc

SEQ ID NO: 1015340 - RNA, 24 nt, Human
ugaccucaggugauuugcccgccu

SEQ ID NO: 1015341 - RNA, 21 nt, Human
ugagaauaacccaaacuggau

SEQ ID NO: 1015342 - RNA, 21 nt, Human
ugagaauaacccaaacuggau

SEQ ID NO: 1015343 - RNA, 18 nt, Human
ugagacagagucucacuc

SEQ ID NO: 1015344 - RNA, 22 nt, Human
ugagacagagucucacucuguc

SEQ ID NO: 1015345 - RNA, 20 nt, Human
ugagcaaccgcgcccagccc

SEQ ID NO: 1015346 - RNA, 22 nt, Human
ugaggcagagucuugcucuguu

SEQ ID NO: 1015347 - RNA, 22 nt, Human
ugcaguggcaugaucucagcuc

SEQ ID NO: 1015348 - RNA, 26 nt, Human
ugcaguggcuccugugaucuuggcuc

SEQ ID NO: 1015349 - RNA, 18 nt, Human
ugcccaggcuggagugca

SEQ ID NO: 1015350 - RNA, 21 nt, Human
ugcccaggcuggagugcagug

SEQ ID NO: 1015351 - RNA, 22 nt, Human
ugcccaggcuggagugcagugg

SEQ ID NO: 1015352 - RNA, 24 nt, Human
ugcccaggcuggagugcaguggca

SEQ ID NO: 1015353 - RNA, 24 nt, Human
ugccucagccucucaaguagcugg

SEQ ID NO: 1015354 - RNA, 21 nt, Human
ugccuuggcccccagaguagc

SEQ ID NO: 1015355 - RNA, 24 nt, Human
ugcucuguugcccaggcuggagug

SEQ ID NO: 1015356 - RNA, 18 nt, Human
ugcugggauuacagaugu

SEQ ID NO: 1015357 - RNA, 24 nt, Human
ugcugggauuacagaugugagcca

SEQ ID NO: 1015358 - RNA, 23 nt, Human
ugcugggauuacaggcgugagca

SEQ ID NO: 1015359 - RNA, 19 nt, Human
uggagugcaguggcaugau

SEQ ID NO: 1015360 - RNA, 24 nt, Human
uggagugcaguggcaugaucucag

SEQ ID NO: 1015361 - RNA, 24 nt, Human
uggagugcaguggcuccugugauc

SEQ ID NO: 1015362 - RNA, 27 nt, Human
uggagugcaguggcuccugugaucuug

SEQ ID NO: 1015363 - RNA, 28 nt, Human
uggagugcaguggcuccugugaucuugg

SEQ ID NO: 1015364 - RNA, 24 nt, Human
uggcaugaucucagcucacugcaa

SEQ ID NO: 1015365 - RNA, 24 nt, Human
uggccaggcuggucucaaacucuu

SEQ ID NO: 1015366 - RNA, 24 nt, Human
uggccaggcuggucucgaacuccu

SEQ ID NO: 1015367 - RNA, 22 nt, Human
uggccucaagcaauccacccgc

SEQ ID NO: 1015368 - RNA, 23 nt, Human
uggccucaagcaauccacccgcc

SEQ ID NO: 1015369 - RNA, 18 nt, Human
ugggauuacagaugugag

SEQ ID NO: 1015370 - RNA, 19 nt, Human
ugggauuacagaugugagc

SEQ ID NO: 1015371 - RNA, 21 nt, Human
ugggauuacagaugugagcca

SEQ ID NO: 1015372 - RNA, 22 nt, Human
ugggauuacagaugugagccau

SEQ ID NO: 1015373 - RNA, 22 nt, Human
ugggauuacagaugugagccau

SEQ ID NO: 1015374 - RNA, 30 nt, Human
ugggauuacagaugugagccauggcaccaa

SEQ ID NO: 1015375 - RNA, 18 nt, Human
ugggauuacaggcgugag

SEQ ID NO: 1015376 - RNA, 19 nt, Human
ugggauuacaggcgugagc

SEQ ID NO: 1015377 - RNA, 23 nt, Human
ugggauuacaggcgugagcaacc

SEQ ID NO: 1015378 - RNA, 24 nt, Human
ugggauuacaggcgugagcaaccg

SEQ ID NO: 1015379 - RNA, 27 nt, Human
ugggauuacaggcgugagcaaccgcgc

SEQ ID NO: 1015380 - RNA, 21 nt, Human
ugggauuauaagcaccugcca

SEQ ID NO: 1015381 - RNA, 22 nt, Human
ugggauuauaagcaccugccac

SEQ ID NO: 1015382 - RNA, 24 nt, Human
ugggauuauaagcaccugccacca

SEQ ID NO: 1015383 - RNA, 25 nt, Human
ugggauuauaagcaccugccaccau

SEQ ID NO: 1015384 - RNA, 23 nt, Human
ugggauuccaggcaugcacccca

SEQ ID NO: 1015385 - RNA, 24 nt, Human
ugggguuucaccauguuggccagg

SEQ ID NO: 1015386 - RNA, 19 nt, Human
uguccacggcccggcgggg

SEQ ID NO: 1015387 - RNA, 19 nt, Human
uguucauauucacaaaauc

SEQ ID NO: 1015388 - RNA, 21 nt, Human
uguugcccaggcuggagugca

SEQ ID NO: 1015389 - RNA, 24 nt, Human
uguuuaguagagaugggguuucac

SEQ ID NO: 1015390 - RNA, 22 nt, Human
uuaaauauucaucuguagaucc

SEQ ID NO: 1015391 - RNA, 18 nt, Human
uuaguagagacagcguuu

SEQ ID NO: 1015392 - RNA, 18 nt, Human
uuaguagagaugggguuu

SEQ ID NO: 1015393 - RNA, 22 nt, Human
uuaguagagaugggguuucacc

SEQ ID NO: 1015394 - RNA, 24 nt, Human
uuaguagagaugggguuucaccau

SEQ ID NO: 1015395 - RNA, 19 nt, Human
uuauaagcaccugccacca

SEQ ID NO: 1015396 - RNA, 24 nt, Human
uugcccaggcuggagugcaguggc

SEQ ID NO: 1015397 - RNA, 24 nt, Human
uugcucuguugcccaggcuggagu

SEQ ID NO: 1015398 - RNA, 21 nt, Human
uuggccucugaaaagugcugg

SEQ ID NO: 1015399 - RNA, 21 nt, Human
uuucaccacguuggccaggcu

SEQ ID NO: 1015400 - RNA, 24 nt, Human
uuucaccauguuggccaggcuggu

SEQ ID NO: 1015401 - RNA, 23 nt, Human
uuuuaguagagacagcguuucac

SEQ ID NO: 1015402 - RNA, 20 nt, Human
uuuuugcauguuuaguagag

SEQ ID NO: 1015403 - RNA, 20 nt, Human
uuuuuguauuuuaguagaga

SEQ ID NO: 1015404 - RNA, 20 nt, Human
uuuuuuguauuuuaguagag

SEQ ID NO: 1015405 - RNA, 24 nt, Human
uuuuuuuguauuuuaguagagaca

SEQ ID NO: 1015406 - RNA, 18 nt, Human
uuuuuuuuuuuuguuuuc

SEQ ID NO: 1015407 - RNA, 24 nt, Human
uuuuuuuuuuuuuuuuguuuucaa

SEQ ID NO: 1015408 - RNA, 18 nt, Human
uuuuuuuuuuuuuuuuug

SEQ ID NO: 1015409 - RNA, 24 nt, Human
uuuuuuuuuuuuuuuuuuuguuuu

SEQ ID NO: 1015410 - RNA, 24 nt, Human
ccaggagcagccgcuggagugcga

SEQ ID NO: 1015411 - RNA, 25 nt, Human
cucaauaauuauauaugaaauugcu

SEQ ID NO: 1015412 - RNA, 20 nt, Human
cucuucauugcagacaugua

SEQ ID NO: 1015413 - RNA, 20 nt, Human
gcaguuucuucaauuggugu

SEQ ID NO: 1015414 - RNA, 21 nt, Human
uauaaaacuggaccacuuuaa

SEQ ID NO: 1015415 - RNA, 24 nt, Human
ucacaguaauggcaguuucuucaa

SEQ ID NO: 1015416 - RNA, 24 nt, Human
uucaauugguguguaguccucaau

SEQ ID NO: 1015417 - RNA, 22 nt, Human
uucgggucucaaagacccacaa

SEQ ID NO: 1015418 - RNA, 19 nt, Human
aaaaaggaauacauuaaga

SEQ ID NO: 1015419 - RNA, 19 nt, Human
aaaagguuucuugaaggaa

SEQ ID NO: 1015420 - RNA, 23 nt, Human
aaacccccgaagaguaagggagg

SEQ ID NO: 1015421 - RNA, 18 nt, Human
aagagcauggaaaaguug

SEQ ID NO: 1015422 - RNA, 24 nt, Human
aauguccacuuuauuccauauaac

SEQ ID NO: 1015423 - RNA, 18 nt, Human
acaagaccuccguaugug

SEQ ID NO: 1015424 - RNA, 23 nt, Human
acaccaggaaggccaagacaaac

SEQ ID NO: 1015425 - RNA, 24 nt, Human
acaccaggaaggccaagacaaaca

SEQ ID NO: 1015426 - RNA, 22 nt, Human
agaacuacaaaggcaggaggug

SEQ ID NO: 1015427 - RNA, 22 nt, Human
agacaaacuggacacccucuca

SEQ ID NO: 1015428 - RNA, 26 nt, Human
aggaaggccaagacaaacacaaauca

SEQ ID NO: 1015429 - RNA, 19 nt, Human
aggcaggagguguaaguga

SEQ ID NO: 1015430 - RNA, 27 nt, Human
aggcaggagguguaagugaagggaccc

SEQ ID NO: 1015431 - RNA, 27 nt, Human
aggccaagacaaacacaaaucaaggaa

SEQ ID NO: 1015432 - RNA, 19 nt, Human
aguaaauucaccugucccu

SEQ ID NO: 1015433 - RNA, 18 nt, Human
auacacuuccaggcaucc

SEQ ID NO: 1015434 - RNA, 23 nt, Human
auuaagagcauggaaaaguugcu

SEQ ID NO: 1015435 - RNA, 19 nt, Human
caaaacacagucacuugca

SEQ ID NO: 1015436 - RNA, 23 nt, Human
caaaacacagucacuugcagaac

SEQ ID NO: 1015437 - RNA, 21 nt, Human
caagacaaacacaaaucaagg

SEQ ID NO: 1015438 - RNA, 22 nt, Human
caaucacuagacaaacuggaca

SEQ ID NO: 1015439 - RNA, 23 nt, Human
cacaccaggaaggccaagacaaa

SEQ ID NO: 1015440 - RNA, 22 nt, Human
cacaguaauacaaaacacaguc

SEQ ID NO: 1015441 - RNA, 22 nt, Human
cacccucucacaugugcacaaa

SEQ ID NO: 1015442 - RNA, 21 nt, Human
cagagauggcaagugcuuuuc

SEQ ID NO: 1015443 - RNA, 19 nt, Human
cagcagcaaauaaagagug

SEQ ID NO: 1015444 - RNA, 21 nt, Human
caguccaauuuuauacacuuc

SEQ ID NO: 1015445 - RNA, 29 nt, Human
caucccuagacaagugugucacaaugcac

SEQ ID NO: 1015446 - RNA, 24 nt, Human
cauuuuacauaaaagggaaguauc

SEQ ID NO: 1015447 - RNA, 22 nt, Human
ccaagacaaacacaaaucaagg

SEQ ID NO: 1015448 - RNA, 24 nt, Human
ccaagacaaacacaaaucaaggaa

SEQ ID NO: 1015449 - RNA, 18 nt, Human
ccggggccggggcggagg

SEQ ID NO: 1015450 - RNA, 21 nt, Human
cgcggggccggggccggggcg

SEQ ID NO: 1015451 - RNA, 24 nt, Human
gagacugaucuauaguaaaacacu

SEQ ID NO: 1015452 - RNA, 21 nt, Human
gccaagacaaacacaaaucaa

SEQ ID NO: 1015453 - RNA, 21 nt, Human
ggaaaaguugcuuacugaaag

SEQ ID NO: 1015454 - RNA, 22 nt, Human
ggaaauccaaguggaauaagga

SEQ ID NO: 1015455 - RNA, 27 nt, Human
gggccggggccggggcggagggcgagg

SEQ ID NO: 1015456 - RNA, 20 nt, Human
guaauacaaaacacagucac

SEQ ID NO: 1015457 - RNA, 20 nt, Human
guaauacaaaacacagucac

SEQ ID NO: 1015458 - RNA, 21 nt, Human
guacugcacaccaggaaggcc

SEQ ID NO: 1015459 - RNA, 20 nt, Human
uaaagugaauaccagaacua

SEQ ID NO: 1015460 - RNA, 23 nt, Human
uaaauaccagauacauuuuuagu

SEQ ID NO: 1015461 - RNA, 21 nt, Human
uaacaaucacuagacaaacuu

SEQ ID NO: 1015462 - RNA, 22 nt, Human
uaacacuuaaccagauaucauu

SEQ ID NO: 1015463 - RNA, 24 nt, Human
uaagaaaugcaguccaauuuuaua

SEQ ID NO: 1015464 - RNA, 20 nt, Human
uacaaagccauaguaaaugg

SEQ ID NO: 1015465 - RNA, 23 nt, Human
uacacaagaccuccguaugugau

SEQ ID NO: 1015466 - RNA, 23 nt, Human
uacaucugaggaagagauggccc

SEQ ID NO: 1015467 - RNA, 22 nt, Human
uaccagaacuacaaaggcagga

SEQ ID NO: 1015468 - RNA, 22 nt, Human
uaccagauacauuuuuaguccu

SEQ ID NO: 1015469 - RNA, 18 nt, Human
uacuuccggauuccuacu

SEQ ID NO: 1015470 - RNA, 23 nt, Human
uagacagagauggcaagugcuuu

SEQ ID NO: 1015471 - RNA, 24 nt, Human
ucaauaaacuuuagaaaguaguaa

SEQ ID NO: 1015472 - RNA, 20 nt, Human
ucacaaggcuuuuuugggac

SEQ ID NO: 1015473 - RNA, 22 nt, Human
uccccuuucuaguguauuaaga

SEQ ID NO: 1015474 - RNA, 23 nt, Human
ucccuuaaaauauggguaugcaa

SEQ ID NO: 1015475 - RNA, 21 nt, Human
ucuacagcaguacugcacacc

SEQ ID NO: 1015476 - RNA, 22 nt, Human
ugcaauuguuacaaagccauag

SEQ ID NO: 1015477 - RNA, 19 nt, Human
ugcauggaaaaguacuaaa

SEQ ID NO: 1015478 - RNA, 21 nt, Human
uggaaaaguacuaaaguuuua

SEQ ID NO: 1015479 - RNA, 18 nt, Human
ugggaggggagguuggcc

SEQ ID NO: 1015480 - RNA, 22 nt, Human
uuaaaauauggguaugcaauug

SEQ ID NO: 1015481 - RNA, 23 nt, Human
uuaaaauauggguaugcaauugu

SEQ ID NO: 1015482 - RNA, 22 nt, Human
uuuauacacuuccaggcauccc

SEQ ID NO: 1015483 - RNA, 23 nt, Human
aaaaaacaacccugguaggcuaa

SEQ ID NO: 1015484 - RNA, 20 nt, Human
aaaaacaauaaagugauaau

SEQ ID NO: 1015485 - RNA, 22 nt, Human
aaaaaccucaacacccacccau

SEQ ID NO: 1015486 - RNA, 22 nt, Human
aaaaacuggaaguguugucuuu

SEQ ID NO: 1015487 - RNA, 20 nt, Human
aaaaauaaaugcaaaaauua

SEQ ID NO: 1015488 - RNA, 19 nt, Human
aaaaaugugcccuagcccc

SEQ ID NO: 1015489 - RNA, 26 nt, Human
aaaagaaaaaagaagcaacaaaaaag

SEQ ID NO: 1015490 - RNA, 20 nt, Human
aaaagcagcaaaaggugccu

SEQ ID NO: 1015491 - RNA, 18 nt, Human
aaaaguagaauugauaag

SEQ ID NO: 1015492 - RNA, 24 nt, Human
aaaaguuuuuguuaaaaaaacaau

SEQ ID NO: 1015493 - RNA, 24 nt, Human
aaacaaaccaccacacauacccca

SEQ ID NO: 1015494 - RNA, 19 nt, Human
aaacaacccugguaggcua

SEQ ID NO: 1015495 - RNA, 22 nt, Human
aaacaacccugguaggcuaaac

SEQ ID NO: 1015496 - RNA, 25 nt, Human
aaacagacgcacaaagauaaaacaa

SEQ ID NO: 1015497 - RNA, 26 nt, Human
aaacagacgcacaaagauaaaacaau

SEQ ID NO: 1015498 - RNA, 26 nt, Human
aaacagacgcacaaagauaaaacuag

SEQ ID NO: 1015499 - RNA, 19 nt, Human
aaacucacaaaauucaggu

SEQ ID NO: 1015500 - RNA, 19 nt, Human
aaagagcaacagaaaaaau

SEQ ID NO: 1015501 - RNA, 24 nt, Human
aaagugcugggauuacaggcguga

SEQ ID NO: 1015502 - RNA, 23 nt, Human
aaauagucuuaccacacaagagu

SEQ ID NO: 1015503 - RNA, 19 nt, Human
aaaugugauuggccuaaaa

SEQ ID NO: 1015504 - RNA, 21 nt, Human
aacaaaggaaagcaaagaaaa

SEQ ID NO: 1015505 - RNA, 22 nt, Human
aacaaaggaaagcaaagaaaag

SEQ ID NO: 1015506 - RNA, 19 nt, Human
aacacugauaauugccauu

SEQ ID NO: 1015507 - RNA, 20 nt, Human
aacacugauaauugccauuu

SEQ ID NO: 1015508 - RNA, 18 nt, Human
aacagugccuugccaggc

SEQ ID NO: 1015509 - RNA, 20 nt, Human
aaccaccacacauaccccag

SEQ ID NO: 1015510 - RNA, 21 nt, Human
aaccccaugcuauuggcucuc

SEQ ID NO: 1015511 - RNA, 22 nt, Human
aaccucuaaauguacauuuuug

SEQ ID NO: 1015512 - RNA, 22 nt, Human
aagaaaaaaaaaguaugucaca

SEQ ID NO: 1015513 - RNA, 25 nt, Human
aagaaaaaaaaaguaugucacagaa

SEQ ID NO: 1015514 - RNA, 23 nt, Human
aagaagcaacaaaaaaccucaaa

SEQ ID NO: 1015515 - RNA, 23 nt, Human
aagagcaacagaaaaaaucuguu

SEQ ID NO: 1015516 - RNA, 24 nt, Human
aagcaaaaauaaaaguagaauuga

SEQ ID NO: 1015517 - RNA, 22 nt, Human
aagcaacaaaaaaccucaaacc

SEQ ID NO: 1015518 - RNA, 24 nt, Human
aagcaauccuccugccuuggccuc

SEQ ID NO: 1015519 - RNA, 25 nt, Human
aagcaauccuccugccuuggccucc

SEQ ID NO: 1015520 - RNA, 25 nt, Human
aagcaauccuccugccuuggccucc

SEQ ID NO: 1015521 - RNA, 22 nt, Human
aagcauuucacaaguuggaucc

SEQ ID NO: 1015522 - RNA, 18 nt, Human
aagccuaguuaugaucac

SEQ ID NO: 1015523 - RNA, 25 nt, Human
aaguaguuggaacuaaauccaacac

SEQ ID NO: 1015524 - RNA, 21 nt, Human
aaguaucugggacuacaggug

SEQ ID NO: 1015525 - RNA, 24 nt, Human
aaguaucugggacuacaggugugu

SEQ ID NO: 1015526 - RNA, 19 nt, Human
aagucagguaguacuucuc

SEQ ID NO: 1015527 - RNA, 19 nt, Human
aagugcugggauuacaggc

SEQ ID NO: 1015528 - RNA, 19 nt, Human
aagugcugggauuacaggc

SEQ ID NO: 1015529 - RNA, 19 nt, Human
aaguuuguugcuacccgac

SEQ ID NO: 1015530 - RNA, 19 nt, Human
aaugccaucuauucaaagc

SEQ ID NO: 1015531 - RNA, 22 nt, Human
acagagaaacuaguagcauggg

SEQ ID NO: 1015532 - RNA, 18 nt, Human
acagagaaggagcucuau

SEQ ID NO: 1015533 - RNA, 24 nt, Human
acaggcaacagagugcaaacaaag

SEQ ID NO: 1015534 - RNA, 18 nt, Human
acaggguuucaccauguu

SEQ ID NO: 1015535 - RNA, 23 nt, Human
acaggguuucaccauguuggcca

SEQ ID NO: 1015536 - RNA, 24 nt, Human
acaggguuucaccauguuggccag

SEQ ID NO: 1015537 - RNA, 21 nt, Human
acagugccuugccaggccaua

SEQ ID NO: 1015538 - RNA, 21 nt, Human
acauuauacaagauauuuggc

SEQ ID NO: 1015539 - RNA, 18 nt, Human
acauuucuuuuuuuuuuu

SEQ ID NO: 1015540 - RNA, 23 nt, Human
acauuucuuuuuuuuuuuuuuuu

SEQ ID NO: 1015541 - RNA, 24 nt, Human
accauguuggccaggcuggucucg

SEQ ID NO: 1015542 - RNA, 24 nt, Human
accauuacauuucuuuuuuuuuuu

SEQ ID NO: 1015543 - RNA, 22 nt, Human
acccaugggccuuguccuccuu

SEQ ID NO: 1015544 - RNA, 24 nt, Human
accccagggcaugcuggaaagaca

SEQ ID NO: 1015545 - RNA, 20 nt, Human
accucauuuuccuuccccuu

SEQ ID NO: 1015546 - RNA, 23 nt, Human
acgcugaagaucagcaaacagac

SEQ ID NO: 1015547 - RNA, 21 nt, Human
acuacaggugugugcuaccau

SEQ ID NO: 1015548 - RNA, 18 nt, Human
acucugucauccaggcug

SEQ ID NO: 1015549 - RNA, 25 nt, Human
acucugucauccaggcuggagugua

SEQ ID NO: 1015550 - RNA, 19 nt, Human
acugagcacacugucccug

SEQ ID NO: 1015551 - RNA, 20 nt, Human
acugagcacacugucccugg

SEQ ID NO: 1015552 - RNA, 24 nt, Human
agaaaaaaaaaguaugucacagaa

SEQ ID NO: 1015553 - RNA, 25 nt, Human
agaaaaaagaagcaacaaaaaaccu

SEQ ID NO: 1015554 - RNA, 19 nt, Human
agaaaaaggaggcuuuaaa

SEQ ID NO: 1015555 - RNA, 25 nt, Human
agaaaagaaaaaagaagcaacaaaa

SEQ ID NO: 1015556 - RNA, 28 nt, Human
agaaaagaaaaaagaagcaacaaaaaag

SEQ ID NO: 1015557 - RNA, 19 nt, Human
agaaagaaaagaaaaaaga

SEQ ID NO: 1015558 - RNA, 20 nt, Human
agaaagaaccacaaaucuag

SEQ ID NO: 1015559 - RNA, 23 nt, Human
agaacaaaggaaagcaaagaaaa

SEQ ID NO: 1015560 - RNA, 18 nt, Human
agagggggaaagaaagaa

SEQ ID NO: 1015561 - RNA, 22 nt, Human
agccacuuuccgugggccuggu

SEQ ID NO: 1015562 - RNA, 30 nt, Human
aggaaagcaaagaaaaguucacaucaaaag

SEQ ID NO: 1015563 - RNA, 23 nt, Human
aggagaaagaaaccauuuuuagg

SEQ ID NO: 1015564 - RNA, 26 nt, Human
aggcagaaaauauguguagugauuuu

SEQ ID NO: 1015565 - RNA, 21 nt, Human
aggggacauccaaaaaaaaga

SEQ ID NO: 1015566 - RNA, 24 nt, Human
aggugauccgcccaccuuggccuc

SEQ ID NO: 1015567 - RNA, 19 nt, Human
agguggagucugagaaaac

SEQ ID NO: 1015568 - RNA, 23 nt, Human
aguagcugggguuacuggcaugu

SEQ ID NO: 1015569 - RNA, 24 nt, Human
agugauucuccugccucagccucc

SEQ ID NO: 1015570 - RNA, 18 nt, Human
agugcagggaucccgaag

SEQ ID NO: 1015571 - RNA, 22 nt, Human
agugcaguggugccucauggcu

SEQ ID NO: 1015572 - RNA, 23 nt, Human
agugcaguggugccucauggcuc

SEQ ID NO: 1015573 - RNA, 20 nt, Human
agugggacacuauagaauuc

SEQ ID NO: 1015574 - RNA, 21 nt, Human
aguguaguggugcaaucucag

SEQ ID NO: 1015575 - RNA, 24 nt, Human
aguguaguggugcaaucucagcuc

SEQ ID NO: 1015576 - RNA, 21 nt, Human
auacacuguggacuuugugcu

SEQ ID NO: 1015577 - RNA, 27 nt, Human
auacagacacaaauaucuuacuaaaau

SEQ ID NO: 1015578 - RNA, 21 nt, Human
aucacuccuaaacccuccccc

SEQ ID NO: 1015579 - RNA, 21 nt, Human
aucacugguuaaaaacccacc

SEQ ID NO: 1015580 - RNA, 24 nt, Human
aucaggugauccgcccaccuuggc

SEQ ID NO: 1015581 - RNA, 18 nt, Human
aucauucuuaaaugagac

SEQ ID NO: 1015582 - RNA, 22 nt, Human
aucuauucaaagcucacacuca

SEQ ID NO: 1015583 - RNA, 24 nt, Human
auuggcucucucuucagguggcug

SEQ ID NO: 1015584 - RNA, 26 nt, Human
auuucuuuuuuuuuuuuuuuuuuuaa

SEQ ID NO: 1015585 - RNA, 21 nt, Human
auuugauaaguuugucagugg

SEQ ID NO: 1015586 - RNA, 21 nt, Human
caaaaaacaacccugguaggc

SEQ ID NO: 1015587 - RNA, 24 nt, Human
caaaaaacaacccugguaggcuaa

SEQ ID NO: 1015588 - RNA, 19 nt, Human
caaaaacagugagcuguag

SEQ ID NO: 1015589 - RNA, 21 nt, Human
caaaagcagcaaaaggugccu

SEQ ID NO: 1015590 - RNA, 24 nt, Human
caaagugcugggauuacaggcgug

SEQ ID NO: 1015591 - RNA, 19 nt, Human
caaaugugaacauaugaug

SEQ ID NO: 1015592 - RNA, 23 nt, Human
caacaaaaaaccucaaaccaaaa

SEQ ID NO: 1015593 - RNA, 20 nt, Human
caaccucugccucccggguu

SEQ ID NO: 1015594 - RNA, 22 nt, Human
caagcaauccuccugccuuggc

SEQ ID NO: 1015595 - RNA, 27 nt, Human
caagcaauccuccugccuuggccuccc

SEQ ID NO: 1015596 - RNA, 20 nt, Human
caagugauucuccugccuca

SEQ ID NO: 1015597 - RNA, 22 nt, Human
caagugauucuccugccucagc

SEQ ID NO: 1015598 - RNA, 18 nt, Human
caauuuuuguauuuuuag

SEQ ID NO: 1015599 - RNA, 21 nt, Human
cacagcugcucagagcugucu

SEQ ID NO: 1015600 - RNA, 21 nt, Human
caccauguuggccaggcuggu

SEQ ID NO: 1015601 - RNA, 24 nt, Human
caccauguuggccaggcuggucuc

SEQ ID NO: 1015602 - RNA, 27 nt, Human
caccauguuggccaggcuggucucgaa

SEQ ID NO: 1015603 - RNA, 18 nt, Human
caccccagggcaugcugg

SEQ ID NO: 1015604 - RNA, 26 nt, Human
caccccagggcaugcuggaaagacag

SEQ ID NO: 1015605 - RNA, 24 nt, Human
caccccaguugcugugacaaccaa

SEQ ID NO: 1015606 - RNA, 31 nt, Human
cacuaugccaccuagacugcuguacaccucu

SEQ ID NO: 1015607 - RNA, 23 nt, Human
cacucugucauccaggcuggagu

SEQ ID NO: 1015608 - RNA, 24 nt, Human
cacucugucauccaggcuggagug

SEQ ID NO: 1015609 - RNA, 21 nt, Human
cacugcaaccucugccucccg

SEQ ID NO: 1015610 - RNA, 23 nt, Human
cacugcaaccucugccucccggg

SEQ ID NO: 1015611 - RNA, 22 nt, Human
cacuugcuggaaaauacaggag

SEQ ID NO: 1015612 - RNA, 21 nt, Human
cagagcaccaaaaacagugag

SEQ ID NO: 1015613 - RNA, 23 nt, Human
cagcagugguaugaaaguuugca

SEQ ID NO: 1015614 - RNA, 19 nt, Human
cagccucagccaaaaggaa

SEQ ID NO: 1015615 - RNA, 21 nt, Human
cagccucagccaaaaggaaaa

SEQ ID NO: 1015616 - RNA, 22 nt, Human
cagcggcccgcgcggcucccac

SEQ ID NO: 1015617 - RNA, 24 nt, Human
caggaucuuguucucuugcccagg

SEQ ID NO: 1015618 - RNA, 18 nt, Human
caggccauauugcagccu

SEQ ID NO: 1015619 - RNA, 24 nt, Human
caggguuucaccauguuggccagg

SEQ ID NO: 1015620 - RNA, 19 nt, Human
cagugccuugccaggccau

SEQ ID NO: 1015621 - RNA, 20 nt, Human
caguggugccucauggcuca

SEQ ID NO: 1015622 - RNA, 19 nt, Human
cauaaaaagacccaccaaa

SEQ ID NO: 1015623 - RNA, 21 nt, Human
cauaaaaagacccaccaaaaa

SEQ ID NO: 1015624 - RNA, 25 nt, Human
cauauacuuaucaaaugugaacaua

SEQ ID NO: 1015625 - RNA, 24 nt, Human
cauccaggcuggaguguaguggug

SEQ ID NO: 1015626 - RNA, 23 nt, Human
cauggcucacugcagcccugacu

SEQ ID NO: 1015627 - RNA, 24 nt, Human
cauguuggccaggcuggucucgaa

SEQ ID NO: 1015628 - RNA, 20 nt, Human
ccaaaaaaaagagggggaaa

SEQ ID NO: 1015629 - RNA, 22 nt, Human
ccaaagugcugggauuacaggc

SEQ ID NO: 1015630 - RNA, 22 nt, Human
ccaaagugcugggauuacaggc

SEQ ID NO: 1015631 - RNA, 24 nt, Human
ccaaagugcugggauuacaggcgu

SEQ ID NO: 1015632 - RNA, 22 nt, Human
ccacacccagccaauuuuugua

SEQ ID NO: 1015633 - RNA, 22 nt, Human
ccacccaugggccuuguccucc

SEQ ID NO: 1015634 - RNA, 24 nt, Human
ccaccgugcccugccccuuuugga

SEQ ID NO: 1015635 - RNA, 25 nt, Human
ccagagcaccaaaaacagugagcug

SEQ ID NO: 1015636 - RNA, 24 nt, Human
ccagcagugguaugaaaguuugca

SEQ ID NO: 1015637 - RNA, 21 nt, Human
ccaggcuggaguguaguggug

SEQ ID NO: 1015638 - RNA, 23 nt, Human
ccauuucugcccuaagcugcaga

SEQ ID NO: 1015639 - RNA, 24 nt, Human
cccaaguaucugggacuacaggug

SEQ ID NO: 1015640 - RNA, 18 nt, Human
ccccaaagauccccuugc

SEQ ID NO: 1015641 - RNA, 20 nt, Human
ccccaacacucucaaacacc

SEQ ID NO: 1015642 - RNA, 21 nt, Human
cccccauuucugcccuaagcu

SEQ ID NO: 1015643 - RNA, 21 nt, Human
ccccccauuucugcccuaagc

SEQ ID NO: 1015644 - RNA, 23 nt, Human
ccccccguuuuucuguaagcaaa

SEQ ID NO: 1015645 - RNA, 23 nt, Human
cccggguucaagugauucuccuc

SEQ ID NO: 1015646 - RNA, 23 nt, Human
cccggguucaagugauucuccug

SEQ ID NO: 1015647 - RNA, 20 nt, Human
cccuaguagcugggguuacu

SEQ ID NO: 1015648 - RNA, 25 nt, Human
cccucuaaaaaacaaaccaccacac

SEQ ID NO: 1015649 - RNA, 22 nt, Human
ccgaccccuaauuccuugauuu

SEQ ID NO: 1015650 - RNA, 23 nt, Human
ccuagccccaacacucucaaaca

SEQ ID NO: 1015651 - RNA, 24 nt, Human
ccucaacacccacccaugggccuu

SEQ ID NO: 1015652 - RNA, 24 nt, Human
ccucccggguucaagugauucucc

SEQ ID NO: 1015653 - RNA, 19 nt, Human
ccuccugccuuggccuccc

SEQ ID NO: 1015654 - RNA, 24 nt, Human
ccugacaucaggugauccgcccac

SEQ ID NO: 1015655 - RNA, 19 nt, Human
ccuggcccugcuaaccaga

SEQ ID NO: 1015656 - RNA, 23 nt, Human
ccuucugcucuacuccaagcuuu

SEQ ID NO: 1015657 - RNA, 21 nt, Human
ccuuggccucccaaguaucug

SEQ ID NO: 1015658 - RNA, 23 nt, Human
cgcggaggccccgcgcgcgacga

SEQ ID NO: 1015659 - RNA, 23 nt, Human
cuaaaacaccaacauuauuaagc

SEQ ID NO: 1015660 - RNA, 24 nt, Human
cuagccccaacacucucaaacacc

SEQ ID NO: 1015661 - RNA, 19 nt, Human
cucaaauguuaccuuauca

SEQ ID NO: 1015662 - RNA, 20 nt, Human
cucaagcaauccuccugccu

SEQ ID NO: 1015663 - RNA, 24 nt, Human
cucaagcaauccuccugccuuggc

SEQ ID NO: 1015664 - RNA, 24 nt, Human
cucacucugucauccaggcuggag

SEQ ID NO: 1015665 - RNA, 24 nt, Human
cucacugcaaccucugccucccgg

SEQ ID NO: 1015666 - RNA, 22 nt, Human
cucagccucccuaguagcuggg

SEQ ID NO: 1015667 - RNA, 18 nt, Human
cucccacguuuccgccgc

SEQ ID NO: 1015668 - RNA, 18 nt, Human
cuccccccguuuuucugu

SEQ ID NO: 1015669 - RNA, 20 nt, Human
cucccccgaccccuaauucc

SEQ ID NO: 1015670 - RNA, 20 nt, Human
cucccggguucaagugauuc

SEQ ID NO: 1015671 - RNA, 23 nt, Human
cuccugccucagccucccuagua

SEQ ID NO: 1015672 - RNA, 23 nt, Human
cucuugcccaggcuagagugcag

SEQ ID NO: 1015673 - RNA, 25 nt, Human
cucuuugcuccuuuggugaaauuua

SEQ ID NO: 1015674 - RNA, 24 nt, Human
cugcaaccucugccucccggguuc

SEQ ID NO: 1015675 - RNA, 21 nt, Human
cugcaccccagggcaugcugg

SEQ ID NO: 1015676 - RNA, 23 nt, Human
cugccucagccucccuaguagcu

SEQ ID NO: 1015677 - RNA, 23 nt, Human
cugccucccggguucaagugauu

SEQ ID NO: 1015678 - RNA, 20 nt, Human
cugccuccuuacuguuuuug

SEQ ID NO: 1015679 - RNA, 24 nt, Human
cuuaaacaggaaaacagucuuacu

SEQ ID NO: 1015680 - RNA, 19 nt, Human
cuugcucugugucuguuuu

SEQ ID NO: 1015681 - RNA, 25 nt, Human
cuuugcccacagcugcucagagcug

SEQ ID NO: 1015682 - RNA, 19 nt, Human
gaaaagaaaaaagaagcaa

SEQ ID NO: 1015683 - RNA, 19 nt, Human
gaaaauauuauuugaaacu

SEQ ID NO: 1015684 - RNA, 21 nt, Human
gaacagugucuggcacagaga

SEQ ID NO: 1015685 - RNA, 22 nt, Human
gaaguaaauaaucacaugccag

SEQ ID NO: 1015686 - RNA, 23 nt, Human
gacagcggcccgcgcggcucccc

SEQ ID NO: 1015687 - RNA, 24 nt, Human
gacaucaggugauccgcccaccuu

SEQ ID NO: 1015688 - RNA, 18 nt, Human
gaccucauuuuccuuccc

SEQ ID NO: 1015689 - RNA, 19 nt, Human
gacgacagcggcccgcgcg

SEQ ID NO: 1015690 - RNA, 24 nt, Human
gacuacaggugugugcuaccaugc

SEQ ID NO: 1015691 - RNA, 20 nt, Human
gagaacacugcucaggcuuu

SEQ ID NO: 1015692 - RNA, 26 nt, Human
gagaugagugagguaccugccuuggg

SEQ ID NO: 1015693 - RNA, 18 nt, Human
gagcagcagccgggggcg

SEQ ID NO: 1015694 - RNA, 18 nt, Human
gagcagcagccgggggcg

SEQ ID NO: 1015695 - RNA, 22 nt, Human
gagcagcagccgggggcgcgga

SEQ ID NO: 1015696 - RNA, 22 nt, Human
gagcagcagccgggggcgcgga

SEQ ID NO: 1015697 - RNA, 18 nt, Human
gaguaaugagcuaugacc

SEQ ID NO: 1015698 - RNA, 18 nt, Human
gaguagaaaaaggaggcu

SEQ ID NO: 1015699 - RNA, 21 nt, Human
gagucccaagcccucccuucu

SEQ ID NO: 1015700 - RNA, 19 nt, Human
gagucuaaagucuuccaaa

SEQ ID NO: 1015701 - RNA, 20 nt, Human
gaucagcaaacagacgcaca

SEQ ID NO: 1015702 - RNA, 18 nt, Human
gauuacaggcgugagcca

SEQ ID NO: 1015703 - RNA, 21 nt, Human
gauuacaggcgugagccaccg

SEQ ID NO: 1015704 - RNA, 24 nt, Human
gauuacaggcgugagccaccgugc

SEQ ID NO: 1015705 - RNA, 23 nt, Human
gcaacaaaaaaccucaaaccaaa

SEQ ID NO: 1015706 - RNA, 22 nt, Human
gcaaccucugccucccggguuc

SEQ ID NO: 1015707 - RNA, 21 nt, Human
gcagcagccgggggcgcggag

SEQ ID NO: 1015708 - RNA, 21 nt, Human
gcagcagccgggggcgcggag

SEQ ID NO: 1015709 - RNA, 23 nt, Human
gccucauggcucacugcagcccu

SEQ ID NO: 1015710 - RNA, 19 nt, Human
gcuaugcuacaaucgagag

SEQ ID NO: 1015711 - RNA, 18 nt, Human
gcucacugcagcccugac

SEQ ID NO: 1015712 - RNA, 24 nt, Human
ggacuacaggugugugcuaccaug

SEQ ID NO: 1015713 - RNA, 18 nt, Human
ggacuuugugcuggaaua

SEQ ID NO: 1015714 - RNA, 19 nt, Human
ggauccccccauuucugcc

SEQ ID NO: 1015715 - RNA, 20 nt, Human
ggcgugagcagcagccgggg

SEQ ID NO: 1015716 - RNA, 20 nt, Human
ggcgugagcagcagccgggg

SEQ ID NO: 1015717 - RNA, 22 nt, Human
gggaucauauuaucaaaaacca

SEQ ID NO: 1015718 - RNA, 24 nt, Human
gggauguuuuaacauuuucaaacc

SEQ ID NO: 1015719 - RNA, 19 nt, Human
gggccuuuccugaccacac

SEQ ID NO: 1015720 - RNA, 18 nt, Human
ggggguugggacgacagc

SEQ ID NO: 1015721 - RNA, 18 nt, Human
ggguaugugggggaaucc

SEQ ID NO: 1015722 - RNA, 22 nt, Human
ggguucaagugauucuccugcc

SEQ ID NO: 1015723 - RNA, 23 nt, Human
ggguucaagugauucuccugccu

SEQ ID NO: 1015724 - RNA, 22 nt, Human
ggguuucaccauguuggccagg

SEQ ID NO: 1015725 - RNA, 21 nt, Human
guaaaaagauggcauaaccuu

SEQ ID NO: 1015726 - RNA, 20 nt, Human
guacagacugagauaaacaa

SEQ ID NO: 1015727 - RNA, 20 nt, Human
gucuaaagucuuccaaauga

SEQ ID NO: 1015728 - RNA, 24 nt, Human
gugauucuccugccucagccuccc

SEQ ID NO: 1015729 - RNA, 24 nt, Human
guuuguugcuacccgacuuuuugg

SEQ ID NO: 1015730 - RNA, 20 nt, Human
uaaaaaccucaacacccacc

SEQ ID NO: 1015731 - RNA, 19 nt, Human
uaaaacaaaaaacaacccu

SEQ ID NO: 1015732 - RNA, 23 nt, Human
uaaaacaaaaaacaacccuggua

SEQ ID NO: 1015733 - RNA, 22 nt, Human
uaaaacaugaagcauuucacaa

SEQ ID NO: 1015734 - RNA, 24 nt, Human
uaaaacugucuuucauaaaacucu

SEQ ID NO: 1015735 - RNA, 20 nt, Human
uaaaagaaaaagccagaaug

SEQ ID NO: 1015736 - RNA, 18 nt, Human
uaaaagauauacuauucu

SEQ ID NO: 1015737 - RNA, 21 nt, Human
uaaaauaaauacuaaauacua

SEQ ID NO: 1015738 - RNA, 23 nt, Human
uaaaauaaauacuaaauacuaac

SEQ ID NO: 1015739 - RNA, 20 nt, Human
uaaaauagcugagcauaugc

SEQ ID NO: 1015740 - RNA, 18 nt, Human
uaaagcacaagcacagcc

SEQ ID NO: 1015741 - RNA, 19 nt, Human
uaaauaaucacaugccaga

SEQ ID NO: 1015742 - RNA, 21 nt, Human
uaaauuaagaaaaaaugucca

SEQ ID NO: 1015743 - RNA, 18 nt, Human
uaaccagaauaucagugg

SEQ ID NO: 1015744 - RNA, 22 nt, Human
uaagaaauuacggucauguaaa

SEQ ID NO: 1015745 - RNA, 22 nt, Human
uaagaggcuuccauggccagca

SEQ ID NO: 1015746 - RNA, 22 nt, Human
uaagauaaagccacgaaacuca

SEQ ID NO: 1015747 - RNA, 21 nt, Human
uaagcugcagacagucuccuu

SEQ ID NO: 1015748 - RNA, 18 nt, Human
uaaggggacauccaaaaa

SEQ ID NO: 1015749 - RNA, 28 nt, Human
uaaggggacauccaaaaaaaagaggggg

SEQ ID NO: 1015750 - RNA, 24 nt, Human
uacaauaucaucauuagaaauucu

SEQ ID NO: 1015751 - RNA, 23 nt, Human
uacaggcgugagccaccgugccc

SEQ ID NO: 1015752 - RNA, 24 nt, Human
uacaggcgugagccaccgugcccu

SEQ ID NO: 1015753 - RNA, 21 nt, Human
uagaaaauaguauuugaaagc

SEQ ID NO: 1015754 - RNA, 23 nt, Human
uagaaauucugcauauggcuaau

SEQ ID NO: 1015755 - RNA, 24 nt, Human
uagaauccuggauuauuaugcccc

SEQ ID NO: 1015756 - RNA, 24 nt, Human
uagaauugauaagaaauuacgguc

SEQ ID NO: 1015757 - RNA, 20 nt, Human
uagagugcaguggugccuca

SEQ ID NO: 1015758 - RNA, 21 nt, Human
uagagugcaguggugccucau

SEQ ID NO: 1015759 - RNA, 23 nt, Human
uagagugcaguggugccucaugg

SEQ ID NO: 1015760 - RNA, 20 nt, Human
uagcaacaggguuucaccau

SEQ ID NO: 1015761 - RNA, 20 nt, Human
uaggugcuuggaacucuagu

SEQ ID NO: 1015762 - RNA, 18 nt, Human
uagguucuuggugguaga

SEQ ID NO: 1015763 - RNA, 25 nt, Human
uaguagagacgaagucuuacuaggu

SEQ ID NO: 1015764 - RNA, 24 nt, Human
uaguagcaacaggguuucaccaug

SEQ ID NO: 1015765 - RNA, 20 nt, Human
uaguagcuaacauuagccac

SEQ ID NO: 1015766 - RNA, 20 nt, Human
uaguagcugggguuacuggc

SEQ ID NO: 1015767 - RNA, 24 nt, Human
uaguuuuuuaauuauuaguagaga

SEQ ID NO: 1015768 - RNA, 22 nt, Human
uauaaucaggcaccacauuugc

SEQ ID NO: 1015769 - RNA, 25 nt, Human
uauagaacuguagcuaucucaauga

SEQ ID NO: 1015770 - RNA, 21 nt, Human
uaugccccucuaaaaaacaaa

SEQ ID NO: 1015771 - RNA, 20 nt, Human
uauuacugaaaaaugacaag

SEQ ID NO: 1015772 - RNA, 19 nt, Human
uauuaugccccucuaaaaa

SEQ ID NO: 1015773 - RNA, 30 nt, Human
ucaaaugugaacauaugaugcauuugcuuu

SEQ ID NO: 1015774 - RNA, 18 nt, Human
ucaacacccacccauggg

SEQ ID NO: 1015775 - RNA, 19 nt, Human
ucaagugauucuccugccu

SEQ ID NO: 1015776 - RNA, 23 nt, Human
ucacuccuaaacccucccccgac

SEQ ID NO: 1015777 - RNA, 24 nt, Human
ucacucugucauccaggcuggagu

SEQ ID NO: 1015778 - RNA, 22 nt, Human
ucacugaggccaauucugcugu

SEQ ID NO: 1015779 - RNA, 24 nt, Human
ucacugaggccaauucugcuguau

SEQ ID NO: 1015780 - RNA, 24 nt, Human
ucacugcaaccucugccucccggg

SEQ ID NO: 1015781 - RNA, 25 nt, Human
ucacugcaaccucugccucccgggu

SEQ ID NO: 1015782 - RNA, 20 nt, Human
ucagccucccuaguagcugg

SEQ ID NO: 1015783 - RNA, 24 nt, Human
ucauccaggcuggaguguaguggu

SEQ ID NO: 1015784 - RNA, 18 nt, Human
uccacaaaaucuggcucc

SEQ ID NO: 1015785 - RNA, 20 nt, Human
uccacaaaaucuggcucccg

SEQ ID NO: 1015786 - RNA, 23 nt, Human
uccacaaaaucuggcucccgggc

SEQ ID NO: 1015787 - RNA, 23 nt, Human
uccacaaaaucuggcucccgggc

SEQ ID NO: 1015788 - RNA, 24 nt, Human
ucccaaagugcugggauuacaggc

SEQ ID NO: 1015789 - RNA, 24 nt, Human
ucccaaguaucugggacuacaggu

SEQ ID NO: 1015790 - RNA, 21 nt, Human
uccccuuguccuggcccugcu

SEQ ID NO: 1015791 - RNA, 21 nt, Human
ucccggguucaagugauucuc

SEQ ID NO: 1015792 - RNA, 24 nt, Human
ucccggguucaagugauucuccug

SEQ ID NO: 1015793 - RNA, 21 nt, Human
uccuaaacccucccccgaccc

SEQ ID NO: 1015794 - RNA, 22 nt, Human
uccuaaacccucccccgacccc

SEQ ID NO: 1015795 - RNA, 19 nt, Human
uccucacaggcaacagagu

SEQ ID NO: 1015796 - RNA, 23 nt, Human
ucuacgaggagaacaauuuuaag

SEQ ID NO: 1015797 - RNA, 21 nt, Human
ucuacuaguuauuucucccca

SEQ ID NO: 1015798 - RNA, 22 nt, Human
ucucacucugucauccaggcug

SEQ ID NO: 1015799 - RNA, 23 nt, Human
ucucacucugucauccaggcugg

SEQ ID NO: 1015800 - RNA, 24 nt, Human
ucucacucugucauccaggcugga

SEQ ID NO: 1015801 - RNA, 24 nt, Human
ucucuugcccaggcuagagugcag

SEQ ID NO: 1015802 - RNA, 21 nt, Human
ucugcacggcgccaaugagga

SEQ ID NO: 1015803 - RNA, 22 nt, Human
ucuggcgaugcuuaacacuuaa

SEQ ID NO: 1015804 - RNA, 24 nt, Human
ucugucauccaggcuggaguguag

SEQ ID NO: 1015805 - RNA, 22 nt, Human
ucuugcccaggcuagagugcag

SEQ ID NO: 1015806 - RNA, 19 nt, Human
ucuuguucucuugcccagg

SEQ ID NO: 1015807 - RNA, 23 nt, Human
ugaaaaauaaaguuguacgcaca

SEQ ID NO: 1015808 - RNA, 22 nt, Human
ugaagggaucauauuaucaaaa

SEQ ID NO: 1015809 - RNA, 22 nt, Human
ugaaguaaauaaucacaugcca

SEQ ID NO: 1015810 - RNA, 21 nt, Human
ugaauagacagagaaacuagu

SEQ ID NO: 1015811 - RNA, 18 nt, Human
ugacaaccaaaaaugugc

SEQ ID NO: 1015812 - RNA, 18 nt, Human
ugacaucaggugauccgc

SEQ ID NO: 1015813 - RNA, 20 nt, Human
ugaccaauauccauaauuuu

SEQ ID NO: 1015814 - RNA, 28 nt, Human
ugaccacacuuuaaaaaccucaacaccc

SEQ ID NO: 1015815 - RNA, 21 nt, Human
ugagaacacugcucaggcuuu

SEQ ID NO: 1015816 - RNA, 22 nt, Human
ugagaugaagucucacucuguc

SEQ ID NO: 1015817 - RNA, 20 nt, Human
ugagaugagugagguaccug

SEQ ID NO: 1015818 - RNA, 18 nt, Human
ugagcccaggauucugag

SEQ ID NO: 1015819 - RNA, 18 nt, Human
ugaggaaaauauuaccua

SEQ ID NO: 1015820 - RNA, 20 nt, Human
ugaggaaaauggcagcagua

SEQ ID NO: 1015821 - RNA, 24 nt, Human
ugagguaccugccuugggcacaaa

SEQ ID NO: 1015822 - RNA, 22 nt, Human
ugagugagguaccugccuuggg

SEQ ID NO: 1015823 - RNA, 24 nt, Human
ugauauggaaaggaccugugcuuu

SEQ ID NO: 1015824 - RNA, 24 nt, Human
ugauccgcccaccuuggccuccca

SEQ ID NO: 1015825 - RNA, 20 nt, Human
ugauucuccugccucagccu

SEQ ID NO: 1015826 - RNA, 23 nt, Human
ugcaaaauggagucuuagaacaa

SEQ ID NO: 1015827 - RNA, 21 nt, Human
ugcccaggcuagagugcagug

SEQ ID NO: 1015828 - RNA, 24 nt, Human
ugcccaggcuagagugcaguggug

SEQ ID NO: 1015829 - RNA, 22 nt, Human
ugcccuaagcugcagacagucu

SEQ ID NO: 1015830 - RNA, 18 nt, Human
ugcccuggugcauuuggc

SEQ ID NO: 1015831 - RNA, 21 nt, Human
ugcccuggugcauuuggcugu

SEQ ID NO: 1015832 - RNA, 24 nt, Human
ugccucagccucccuaguagcugg

SEQ ID NO: 1015833 - RNA, 24 nt, Human
ugcugggauuacaggcgugagcca

SEQ ID NO: 1015834 - RNA, 24 nt, Human
ugcuuuauuuaucaucgaucuuca

SEQ ID NO: 1015835 - RNA, 23 nt, Human
uggaguguaguggugcaaucuca

SEQ ID NO: 1015836 - RNA, 24 nt, Human
uggaguguaguggugcaaucucag

SEQ ID NO: 1015837 - RNA, 22 nt, Human
uggauccccccauuucugcccu

SEQ ID NO: 1015838 - RNA, 20 nt, Human
uggcacagagaaggagcucu

SEQ ID NO: 1015839 - RNA, 24 nt, Human
uggcagcaguaaagaaaugaggaa

SEQ ID NO: 1015840 - RNA, 22 nt, Human
uggcauaaccuuuccucuaaaa

SEQ ID NO: 1015841 - RNA, 24 nt, Human
uggccaggcuggucucgaaccccu

SEQ ID NO: 1015842 - RNA, 22 nt, Human
uggcugaccacugcaccccagg

SEQ ID NO: 1015843 - RNA, 22 nt, Human
ugggacuacaggugugugcuac

SEQ ID NO: 1015844 - RNA, 24 nt, Human
ugggacuacaggugugugcuacca

SEQ ID NO: 1015845 - RNA, 25 nt, Human
ugggacuacaggugugugcuaccau

SEQ ID NO: 1015846 - RNA, 21 nt, Human
ugggauuacaggcgugagcca

SEQ ID NO: 1015847 - RNA, 22 nt, Human
ugggauuacaggcgugagccac

SEQ ID NO: 1015848 - RNA, 23 nt, Human
ugggauuacaggcgugagccacc

SEQ ID NO: 1015849 - RNA, 23 nt, Human
ugggauuacaggcgugagccacc

SEQ ID NO: 1015850 - RNA, 24 nt, Human
ugggauuacaggcgugagccaccg

SEQ ID NO: 1015851 - RNA, 21 nt, Human
ugguaugaaaguuugcaacau

SEQ ID NO: 1015852 - RNA, 24 nt, Human
uggugcaaucucagcucacugcaa

SEQ ID NO: 1015853 - RNA, 23 nt, Human
uggugccucauggcucacugcag

SEQ ID NO: 1015854 - RNA, 18 nt, Human
uguacauaugugugaaua

SEQ ID NO: 1015855 - RNA, 23 nt, Human
ugucacagaauuacuacgugucu

SEQ ID NO: 1015856 - RNA, 21 nt, Human
uguccuuucuuuaaacuucca

SEQ ID NO: 1015857 - RNA, 23 nt, Human
ugucucaacuuuaaaaauccuau

SEQ ID NO: 1015858 - RNA, 28 nt, Human
uguguucauguauuuguacauaugugug

SEQ ID NO: 1015859 - RNA, 23 nt, Human
uguuacuauuccuggcacugggc

SEQ ID NO: 1015860 - RNA, 24 nt, Human
uguuauugucuugcucugugucug

SEQ ID NO: 1015861 - RNA, 24 nt, Human
uguucauguauuuguacauaugug

SEQ ID NO: 1015862 - RNA, 24 nt, Human
uguucucuugcccaggcuagagug

SEQ ID NO: 1015863 - RNA, 18 nt, Human
uguucucuuuaucuuucc

SEQ ID NO: 1015864 - RNA, 22 nt, Human
uuaaaagaaaaagccagaaugu

SEQ ID NO: 1015865 - RNA, 19 nt, Human
uuaaauuucucuggcuuuu

SEQ ID NO: 1015866 - RNA, 20 nt, Human
uuagaaacacgucacgcuuc

SEQ ID NO: 1015867 - RNA, 24 nt, Human
uuaguagcaacaggguuucaccau

SEQ ID NO: 1015868 - RNA, 21 nt, Human
uuaucuacuguuuuuguguuu

SEQ ID NO: 1015869 - RNA, 18 nt, Human
uucaaaaggcugcaauaa

SEQ ID NO: 1015870 - RNA, 25 nt, Human
uucaaacacugaucugaaaagugaa

SEQ ID NO: 1015871 - RNA, 18 nt, Human
uucaacgucuuuucacug

SEQ ID NO: 1015872 - RNA, 24 nt, Human
uucaacucugaccaucauacagac

SEQ ID NO: 1015873 - RNA, 21 nt, Human
uucaagugauucuccugccuc

SEQ ID NO: 1015874 - RNA, 23 nt, Human
uucaagugauucuccugccucag

SEQ ID NO: 1015875 - RNA, 24 nt, Human
uucaagugauucuccugccucagc

SEQ ID NO: 1015876 - RNA, 20 nt, Human
uucacaaguuggaucccccc

SEQ ID NO: 1015877 - RNA, 25 nt, Human
uuccagaagguuacugaaaucacuu

SEQ ID NO: 1015878 - RNA, 18 nt, Human
uuccagagcaccaaaaac

SEQ ID NO: 1015879 - RNA, 22 nt, Human
uucccaauccaaaaacuggaag

SEQ ID NO: 1015880 - RNA, 18 nt, Human
uuccgugggccuggugcu

SEQ ID NO: 1015881 - RNA, 24 nt, Human
uucuaauuccuuuuagguucuugg

SEQ ID NO: 1015882 - RNA, 18 nt, Human
uucucuugcccaggcuag

SEQ ID NO: 1015883 - RNA, 22 nt, Human
uugaaacugauagcuuuccaga

SEQ ID NO: 1015884 - RNA, 18 nt, Human
uugcccaggcuagagugc

SEQ ID NO: 1015885 - RNA, 18 nt, Human
uuggccucccaaagugcu

SEQ ID NO: 1015886 - RNA, 33 nt, Human
uugggacgacagcggcccgcgcggcucccuuuu

SEQ ID NO: 1015887 - RNA, 27 nt, Human
uuguuaaaaaaacaauaaagugauaau

SEQ ID NO: 1015888 - RNA, 23 nt, Human
uuguuuuauccucuuugcuccuu

SEQ ID NO: 1015889 - RNA, 21 nt, Human
uuuaaaauuaauagagucuaa

SEQ ID NO: 1015890 - RNA, 22 nt, Human
uuuaaggggacauccaaaaaaa

SEQ ID NO: 1015891 - RNA, 24 nt, Human
uuucaccauguuggccaggcuggu

SEQ ID NO: 1015892 - RNA, 19 nt, Human
uuuccgccgcaguuaggag

SEQ ID NO: 1015893 - RNA, 25 nt, Human
uuucugauaaaucguaaugaaugag

SEQ ID NO: 1015894 - RNA, 23 nt, Human
uuucugcccuaagcugcagacag

SEQ ID NO: 1015895 - RNA, 24 nt, Human
uuuggcccuauuuggcugcuuuuc

SEQ ID NO: 1015896 - RNA, 19 nt, Human
uuuguaaaacaugaagcau

SEQ ID NO: 1015897 - RNA, 24 nt, Human
uuuguaaaacaugaagcauuucac

SEQ ID NO: 1015898 - RNA, 21 nt, Human
uuuuccaaacauuugugauuu

SEQ ID NO: 1015899 - RNA, 20 nt, Human
uuuuuaauuauuaguagaga

SEQ ID NO: 1015900 - RNA, 24 nt, Human
uuuuuaguagcaacaggguuucac

SEQ ID NO: 1015901 - RNA, 24 nt, Human
uuuuucuguaagcaaaaauaaaag

SEQ ID NO: 1015902 - RNA, 23 nt, Human
uuuuuguauuuuuaguagcaaca

SEQ ID NO: 1015903 - RNA, 21 nt, Human
uuuuuuuuuuuuuuuuuggau

SEQ ID NO: 1015904 - RNA, 24 nt, Human
uuuuuuuuuuuuuuuuuuaaccug

SEQ ID NO: 1015905 - RNA, 25 nt, Human
uuuuuuuuuuuuuuuuuuuuugggg

SEQ ID NO: 1015906 - RNA, 22 nt, Human
aaccuccacuuuauguuggaaa

SEQ ID NO: 1015907 - RNA, 25 nt, Human
aauacacauacacacacuaaaugug

SEQ ID NO: 1015908 - RNA, 19 nt, Human
agauguuuccaggagagau

SEQ ID NO: 1015909 - RNA, 22 nt, Human
auguggcagauguuuccaggag

SEQ ID NO: 1015910 - RNA, 18 nt, Human
cagagaggccacaugauc

SEQ ID NO: 1015911 - RNA, 19 nt, Human
ccacaugaucaaauaaaau

SEQ ID NO: 1015912 - RNA, 19 nt, Human
ccagaccaaauauagacac

SEQ ID NO: 1015913 - RNA, 19 nt, Human
cuugcuuaaagucuccugu

SEQ ID NO: 1015914 - RNA, 21 nt, Human
gcaacagagaggccacaugau

SEQ ID NO: 1015915 - RNA, 24 nt, Human
gcaacagagaggccacaugaucaa

SEQ ID NO: 1015916 - RNA, 23 nt, Human
gcagagcugucugcuaacgugag

SEQ ID NO: 1015917 - RNA, 24 nt, Human
guugaaaccuccacuuuauguugg

SEQ ID NO: 1015918 - RNA, 21 nt, Human
uaacgugagcggggaaggcca

SEQ ID NO: 1015919 - RNA, 29 nt, Human
ucagccagaccaaauauagacacacugga

SEQ ID NO: 1015920 - RNA, 22 nt, Human
uccagccgaucagccagaccaa

SEQ ID NO: 1015921 - RNA, 18 nt, Human
ugaauacacauacacaca

SEQ ID NO: 1015922 - RNA, 20 nt, Human
ugagcggggaaggccagagu

SEQ ID NO: 1015923 - RNA, 19 nt, Human
uguggcagauguuuccagg

SEQ ID NO: 1015924 - RNA, 21 nt, Human
uuuuuuuuuuuuacugguaaa

SEQ ID NO: 1015925 - RNA, 21 nt, Human
uuuuuuuuuuuuuuuuacugg

SEQ ID NO: 1015926 - RNA, 23 nt, Human
uuuuuuuuuuuuuuuuuuacugg

SEQ ID NO: 1015927 - RNA, 26 nt, Human
aaaaaaaacuaaagcaguagaaacaa

SEQ ID NO: 1015928 - RNA, 25 nt, Human
aaaaaacagaaacagccacaaagcc

SEQ ID NO: 1015929 - RNA, 21 nt, Human
aaaaacagaaacagccacaaa

SEQ ID NO: 1015930 - RNA, 24 nt, Human
aaaacagaaacagccacaaagcaa

SEQ ID NO: 1015931 - RNA, 18 nt, Human
aaaagacacaggaguagg

SEQ ID NO: 1015932 - RNA, 18 nt, Human
aaacaaaacaagaacuga

SEQ ID NO: 1015933 - RNA, 21 nt, Human
aaacaaaacaagaacugaaac

SEQ ID NO: 1015934 - RNA, 19 nt, Human
aaacaagaacugaaacgug

SEQ ID NO: 1015935 - RNA, 21 nt, Human
aaacaagaacugaaacgugga

SEQ ID NO: 1015936 - RNA, 26 nt, Human
aaacaagaacugaaacguggaagcaa

SEQ ID NO: 1015937 - RNA, 21 nt, Human
aaacuaaagcaguagaaacaa

SEQ ID NO: 1015938 - RNA, 20 nt, Human
aacuaaagcaguagaaacaa

SEQ ID NO: 1015939 - RNA, 23 nt, Human
aacuuuaaaaaaaacuaaagcag

SEQ ID NO: 1015940 - RNA, 19 nt, Human
aagcgaaccaccuuagagg

SEQ ID NO: 1015941 - RNA, 19 nt, Human
acaaaacaagaacugaaac

SEQ ID NO: 1015942 - RNA, 25 nt, Human
acuuuaaaaaaaacuaaagcaguag

SEQ ID NO: 1015943 - RNA, 20 nt, Human
agacccccgccuggcuucag

SEQ ID NO: 1015944 - RNA, 22 nt, Human
agcaguagaaacaaaacaagaa

SEQ ID NO: 1015945 - RNA, 24 nt, Human
aguaaaaaacagaaacagccacaa

SEQ ID NO: 1015946 - RNA, 21 nt, Human
aguaaaaaacagaaacagccc

SEQ ID NO: 1015947 - RNA, 24 nt, Human
aguagaaacaaaacaagaacugaa

SEQ ID NO: 1015948 - RNA, 20 nt, Human
cacucccucccuccccaaaa

SEQ ID NO: 1015949 - RNA, 21 nt, Human
cagaaccaaaagacacaggag

SEQ ID NO: 1015950 - RNA, 20 nt, Human
cagcaguuaagcuaucaccg

SEQ ID NO: 1015951 - RNA, 23 nt, Human
cagcaguuaagcuaucacucccu

SEQ ID NO: 1015952 - RNA, 24 nt, Human
caguaaaaaacagaaacagccaca

SEQ ID NO: 1015953 - RNA, 25 nt, Human
ccaaaagacacaggaguaggaagca

SEQ ID NO: 1015954 - RNA, 23 nt, Human
ccacaaagcaaugaugauagaga

SEQ ID NO: 1015955 - RNA, 18 nt, Human
ccagcugauugcaacgga

SEQ ID NO: 1015956 - RNA, 21 nt, Human
ccuugaucagaugagaaugaa

SEQ ID NO: 1015957 - RNA, 24 nt, Human
cuaaagcaguagaaacaaaacaag

SEQ ID NO: 1015958 - RNA, 23 nt, Human
cucccuccccaaaacaguuaaaa

SEQ ID NO: 1015959 - RNA, 21 nt, Human
cuggagaacuuuaaaaaaaac

SEQ ID NO: 1015960 - RNA, 18 nt, Human
cuggaggcugguggaacu

SEQ ID NO: 1015961 - RNA, 18 nt, Human
gaaacaaaacaagaacug

SEQ ID NO: 1015962 - RNA, 20 nt, Human
gaacugaaacguggaagcaa

SEQ ID NO: 1015963 - RNA, 20 nt, Human
gaauccuccagcagaccccc

SEQ ID NO: 1015964 - RNA, 25 nt, Human
ggaauccuccagcagacccccgccu

SEQ ID NO: 1015965 - RNA, 24 nt, Human
ggaccagcugauugcaacggagga

SEQ ID NO: 1015966 - RNA, 22 nt, Human
ggagaacuuuaaaaaaaacuaa

SEQ ID NO: 1015967 - RNA, 18 nt, Human
ggaguaggaagcagugcu

SEQ ID NO: 1015968 - RNA, 24 nt, Human
ggcugguggaacuggggcugcugu

SEQ ID NO: 1015969 - RNA, 23 nt, Human
gggggagguauuccuggaggagg

SEQ ID NO: 1015970 - RNA, 23 nt, Human
gguaaguugucgguggggcagaa

SEQ ID NO: 1015971 - RNA, 25 nt, Human
guaaaaaacagaaacagccacaaag

SEQ ID NO: 1015972 - RNA, 22 nt, Human
gugacacacaaagaagcuccgc

SEQ ID NO: 1015973 - RNA, 24 nt, Human
gugcuggucuagguuucucuggaa

SEQ ID NO: 1015974 - RNA, 20 nt, Human
uaaaaaaaacuaaagcagua

SEQ ID NO: 1015975 - RNA, 24 nt, Human
uaaaaaaaacuaaagcaguagaaa

SEQ ID NO: 1015976 - RNA, 20 nt, Human
uaaaaaacagaaacagccac

SEQ ID NO: 1015977 - RNA, 21 nt, Human
uaaaaaacagaaacagccaca

SEQ ID NO: 1015978 - RNA, 27 nt, Human
uaaaaaacagaaacagccacaaagcaa

SEQ ID NO: 1015979 - RNA, 24 nt, Human
uaaagcaguagaaacaaaacaaga

SEQ ID NO: 1015980 - RNA, 28 nt, Human
uaacugaggagguaucccuuguggaacu

SEQ ID NO: 1015981 - RNA, 23 nt, Human
uaucacucccucccuccccaaaa

SEQ ID NO: 1015982 - RNA, 18 nt, Human
uauggcagagcagacuug

SEQ ID NO: 1015983 - RNA, 23 nt, Human
uccccaaaacaguuaaaagaaaa

SEQ ID NO: 1015984 - RNA, 21 nt, Human
uccccaaguccuugaucagau

SEQ ID NO: 1015985 - RNA, 21 nt, Human
uccuccagcagacccccgccu

SEQ ID NO: 1015986 - RNA, 20 nt, Human
ucuguuggaauccuccagca

SEQ ID NO: 1015987 - RNA, 23 nt, Human
ugacacacaaagaagcuccgcga

SEQ ID NO: 1015988 - RNA, 22 nt, Human
ugcagugauuggcugagaugga

SEQ ID NO: 1015989 - RNA, 21 nt, Human
uggaagcaaggugacacacaa

SEQ ID NO: 1015990 - RNA, 21 nt, Human
uggaauccuccagcagacccc

SEQ ID NO: 1015991 - RNA, 21 nt, Human
uggaauccuccagcagacccc

SEQ ID NO: 1015992 - RNA, 22 nt, Human
uggaauccuccagcagaccccc

SEQ ID NO: 1015993 - RNA, 25 nt, Human
uggcagagcagacuugcucaaagga

SEQ ID NO: 1015994 - RNA, 24 nt, Human
uggcuucagcaguuaagcuaucac

SEQ ID NO: 1015995 - RNA, 19 nt, Human
ugguggaacuggggcugcu

SEQ ID NO: 1015996 - RNA, 20 nt, Human
ugguggaacuggggcugcug

SEQ ID NO: 1015997 - RNA, 18 nt, Human
aaaaguacuugggcuucc

SEQ ID NO: 1015998 - RNA, 22 nt, Human
aaaguacuugggcuuccuuuac

SEQ ID NO: 1015999 - RNA, 20 nt, Human
aaccccaaauccacuuccuc

SEQ ID NO: 1016000 - RNA, 23 nt, Human
aauccacuuccucccucuucagg

SEQ ID NO: 1016001 - RNA, 28 nt, Human
accaacugccccuuaugaagcuuuucag

SEQ ID NO: 1016002 - RNA, 21 nt, Human
auccacuuccucccucuucag

SEQ ID NO: 1016003 - RNA, 19 nt, Human
caaaguucugaaaguuuau

SEQ ID NO: 1016004 - RNA, 24 nt, Human
caaauuuuugcucaacccuuuucc

SEQ ID NO: 1016005 - RNA, 20 nt, Human
caacugccccuuaugaagcu

SEQ ID NO: 1016006 - RNA, 21 nt, Human
caagaaauggugaaccccaaa

SEQ ID NO: 1016007 - RNA, 23 nt, Human
ccaaauccacuuccucccucuuc

SEQ ID NO: 1016008 - RNA, 18 nt, Human
ccaagaaauggugaaccc

SEQ ID NO: 1016009 - RNA, 24 nt, Human
cccaaauccacuuccucccucuuc

SEQ ID NO: 1016010 - RNA, 19 nt, Human
ccccaagaaauggugaacc

SEQ ID NO: 1016011 - RNA, 21 nt, Human
ccccaagaaauggugaacccc

SEQ ID NO: 1016012 - RNA, 19 nt, Human
ccccuuaugaagcuuuuca

SEQ ID NO: 1016013 - RNA, 19 nt, Human
ccugaggagucagaaccuc

SEQ ID NO: 1016014 - RNA, 21 nt, Human
cuucagguuauguuuuuugcu

SEQ ID NO: 1016015 - RNA, 27 nt, Human
cuuuucagucacugcaacacucccgac

SEQ ID NO: 1016016 - RNA, 22 nt, Human
gcuccugaggagucagaaccuc

SEQ ID NO: 1016017 - RNA, 19 nt, Human
uaaggaaacugaauugaca

SEQ ID NO: 1016018 - RNA, 23 nt, Human
uacaaaguucugaaaguuuaugg

SEQ ID NO: 1016019 - RNA, 24 nt, Human
ucagaaccucuauuuucuccagau

SEQ ID NO: 1016020 - RNA, 23 nt, Human
ucucucaguguaugcuuuucggc

SEQ ID NO: 1016021 - RNA, 23 nt, Human
ugaaccccaaauccacuuccucc

SEQ ID NO: 1016022 - RNA, 19 nt, Human
ugccccaagaaauggugaa

SEQ ID NO: 1016023 - RNA, 21 nt, Human
uggaagacagcauucaacugg

SEQ ID NO: 1016024 - RNA, 21 nt, Human
uugacacagucgagcaauugc

SEQ ID NO: 1016025 - RNA, 24 nt, Human
uuucggccacauaaugaacuacaa

SEQ ID NO: 1016026 - RNA, 21 nt, Human
aagaaacaaggagagacaagc

SEQ ID NO: 1016027 - RNA, 27 nt, Human
aagcaccacagugcagugggaagaaac

SEQ ID NO: 1016028 - RNA, 20 nt, Human
aagcuccuccuuccuggaga

SEQ ID NO: 1016029 - RNA, 19 nt, Human
agaaacaaggagagacaag

SEQ ID NO: 1016030 - RNA, 24 nt, Human
aggcugggggccaaggggaggagc

SEQ ID NO: 1016031 - RNA, 20 nt, Human
agugcuuuucggggccucgg

SEQ ID NO: 1016032 - RNA, 24 nt, Human
caaaaguaggaagcuccuccuucc

SEQ ID NO: 1016033 - RNA, 25 nt, Human
cagaaagaugcugguguaugugacg

SEQ ID NO: 1016034 - RNA, 20 nt, Human
cagggcuggcacaggcuggg

SEQ ID NO: 1016035 - RNA, 18 nt, Human
caggucaccaaagggagg

SEQ ID NO: 1016036 - RNA, 21 nt, Human
ccauuuccuccgccgcuccca

SEQ ID NO: 1016037 - RNA, 19 nt, Human
gagcauggagaaggccagc

SEQ ID NO: 1016038 - RNA, 21 nt, Human
gccuaggaaacagaggugugg

SEQ ID NO: 1016039 - RNA, 22 nt, Human
ggcuucauucccuggcuuuuca

SEQ ID NO: 1016040 - RNA, 18 nt, Human
guaugugacgaggcuggu

SEQ ID NO: 1016041 - RNA, 21 nt, Human
uacagaaagaugcugguguau

SEQ ID NO: 1016042 - RNA, 23 nt, Human
uccccagccuaggaaacagaggu

SEQ ID NO: 1016043 - RNA, 22 nt, Human
uccccgcucccgcgggcuucau

SEQ ID NO: 1016044 - RNA, 25 nt, Human
uccccgcucccgcgggcuucauucc

SEQ ID NO: 1016045 - RNA, 19 nt, Human
ucccugacgaccagugcuu

SEQ ID NO: 1016046 - RNA, 19 nt, Human
uccuccgccgcucccaccg

SEQ ID NO: 1016047 - RNA, 23 nt, Human
ugaaucccagauuccccgcuccc

SEQ ID NO: 1016048 - RNA, 20 nt, Human
ugacgaggcugguggccacu

SEQ ID NO: 1016049 - RNA, 23 nt, Human
uggcagccgggccagggcuggca

SEQ ID NO: 1016050 - RNA, 22 nt, Human
uggcagccgggccagggcuggg

SEQ ID NO: 1016051 - RNA, 22 nt, Human
uggugccccucacuuuugcucc

SEQ ID NO: 1016052 - RNA, 19 nt, Human
ugugacgaggcugguggcc

SEQ ID NO: 1016053 - RNA, 18 nt, Human
uuagggaaacaagauuca

SEQ ID NO: 1016054 - RNA, 24 nt, Human
uucugaaucccagauuccccgcuc

SEQ ID NO: 1016055 - RNA, 18 nt, Human
uugcaagaaauugccugu

SEQ ID NO: 1016056 - RNA, 26 nt, Human
uuuuuuuuuuuuuuuuuuuuuuaggg

SEQ ID NO: 1016057 - RNA, 20 nt, Human
aaauguuugcugacuugaaa

SEQ ID NO: 1016058 - RNA, 21 nt, Human
agacccagacuggcugggccu

SEQ ID NO: 1016059 - RNA, 21 nt, Human
auuggagcaucacagccggug

SEQ ID NO: 1016060 - RNA, 22 nt, Human
cacgccuggccuuccacccucc

SEQ ID NO: 1016061 - RNA, 21 nt, Human
cagaugggcccugccaaaguc

SEQ ID NO: 1016062 - RNA, 24 nt, Human
cagcugcgcgccgcggaggccgug

SEQ ID NO: 1016063 - RNA, 23 nt, Human
ccagaugggcccugccaaaguca

SEQ ID NO: 1016064 - RNA, 25 nt, Human
ccccacgccuggccuuccacccucc

SEQ ID NO: 1016065 - RNA, 18 nt, Human
ccccggggcagccgcgcc

SEQ ID NO: 1016066 - RNA, 18 nt, Human
cccuccggccucucggcc

SEQ ID NO: 1016067 - RNA, 19 nt, Human
ccucgagcucuggcucugg

SEQ ID NO: 1016068 - RNA, 18 nt, Human
ccuggccuuccacccucc

SEQ ID NO: 1016069 - RNA, 19 nt, Human
ccuggccuuccacccuccc

SEQ ID NO: 1016070 - RNA, 21 nt, Human
ccuggccuuccacccuccccg

SEQ ID NO: 1016071 - RNA, 20 nt, Human
cggccgcccggcgcccuggg

SEQ ID NO: 1016072 - RNA, 18 nt, Human
cggcgcccugggcucgcc

SEQ ID NO: 1016073 - RNA, 22 nt, Human
cggcuccggcuccagcaggcug

SEQ ID NO: 1016074 - RNA, 24 nt, Human
cggcuccggcuccggcuccggcuc

SEQ ID NO: 1016075 - RNA, 24 nt, Human
cggcuccggcuccggcuccggcuc

SEQ ID NO: 1016076 - RNA, 24 nt, Human
cggcuccggcuccggcuccggcuc

SEQ ID NO: 1016077 - RNA, 18 nt, Human
cgugggggagggaggccg

SEQ ID NO: 1016078 - RNA, 20 nt, Human
cucuggcuccggcuccggcu

SEQ ID NO: 1016079 - RNA, 18 nt, Human
cucuggcucuggcuccgg

SEQ ID NO: 1016080 - RNA, 22 nt, Human
cugacuugaaaacagcugcgcg

SEQ ID NO: 1016081 - RNA, 21 nt, Human
cugggcucgccgcugcucggg

SEQ ID NO: 1016082 - RNA, 25 nt, Human
gaaaacagcugcgcgccgcggaggc

SEQ ID NO: 1016083 - RNA, 25 nt, Human
gacugggcggcaacgcgcccgggag

SEQ ID NO: 1016084 - RNA, 25 nt, Human
ggcaacgcgcccgggagcggggccc

SEQ ID NO: 1016085 - RNA, 23 nt, Human
ggcccuccggccucucggcccag

SEQ ID NO: 1016086 - RNA, 19 nt, Human
uaagccagaccagccuccc

SEQ ID NO: 1016087 - RNA, 18 nt, Human
ucagccagagguucgggc

SEQ ID NO: 1016088 - RNA, 21 nt, Human
ucccggccgcccggcgcccug

SEQ ID NO: 1016089 - RNA, 23 nt, Human
ucccggccgcccggcgcccuggg

SEQ ID NO: 1016090 - RNA, 19 nt, Human
uccggcuccagcaggcugg

SEQ ID NO: 1016091 - RNA, 19 nt, Human
ucgggccccacgccuggcc

SEQ ID NO: 1016092 - RNA, 21 nt, Human
ucucggcccagcuaagccaga

SEQ ID NO: 1016093 - RNA, 19 nt, Human
ugaaaacagcugcgcgccg

SEQ ID NO: 1016094 - RNA, 18 nt, Human
ugcggcaaggauggggug

SEQ ID NO: 1016095 - RNA, 23 nt, Human
ugcugacuugaaaacagcugcgc

SEQ ID NO: 1016096 - RNA, 24 nt, Human
uggcuccggcuccggcuccggcuc

SEQ ID NO: 1016097 - RNA, 24 nt, Human
uggcucuggcuccggcuccggcuc

SEQ ID NO: 1016098 - RNA, 22 nt, Human
ugggccggugaguccucgagcu

SEQ ID NO: 1016099 - RNA, 23 nt, Human
ugggguguugcauagagagucag

SEQ ID NO: 1016100 - RNA, 24 nt, Human
uugcugacuugaaaacagcugcgc

SEQ ID NO: 1016101 - RNA, 21 nt, Human
aaaaaaaaaaaaaaaaacaaa

SEQ ID NO: 1016102 - RNA, 25 nt, Human
aaaaaaaaaaaaaaaaacaaaccug

SEQ ID NO: 1016103 - RNA, 23 nt, Human
aaaaaaaaacaaaccugacuuca

SEQ ID NO: 1016104 - RNA, 21 nt, Human
aaaaaaacaaaccugacuuca

SEQ ID NO: 1016105 - RNA, 29 nt, Human
aaacaaaaggcuggaauuaaggggacccc

SEQ ID NO: 1016106 - RNA, 24 nt, Human
aaaccugacuucauauaauucuua

SEQ ID NO: 1016107 - RNA, 20 nt, Human
aaacugacaaaagaauguca

SEQ ID NO: 1016108 - RNA, 19 nt, Human
aaauagugcauacaaggca

SEQ ID NO: 1016109 - RNA, 21 nt, Human
aacuaaucaauucauauucug

SEQ ID NO: 1016110 - RNA, 20 nt, Human
aacuccccaucccgcagccc

SEQ ID NO: 1016111 - RNA, 18 nt, Human
aagccaaacugacaaaag

SEQ ID NO: 1016112 - RNA, 23 nt, Human
accccuggcuggacgggcuccug

SEQ ID NO: 1016113 - RNA, 23 nt, Human
acugaagcugaacauucuggcau

SEQ ID NO: 1016114 - RNA, 19 nt, Human
acuugaaaucucugaaauc

SEQ ID NO: 1016115 - RNA, 22 nt, Human
agacugcagauauuucuauugu

SEQ ID NO: 1016116 - RNA, 20 nt, Human
agcugaacauucuggcauca

SEQ ID NO: 1016117 - RNA, 23 nt, Human
aggccgaggaggcggaggggggc

SEQ ID NO: 1016118 - RNA, 18 nt, Human
aggcggcggcgucgggag

SEQ ID NO: 1016119 - RNA, 18 nt, Human
aggcuggaauuaagugag

SEQ ID NO: 1016120 - RNA, 27 nt, Human
aucuaaaaagagauuuuuagaaagcca

SEQ ID NO: 1016121 - RNA, 18 nt, Human
caaaaaagcauacagagu

SEQ ID NO: 1016122 - RNA, 28 nt, Human
caaacugacaaaagaaugucauaaaaca

SEQ ID NO: 1016123 - RNA, 23 nt, Human
caacacacuuuaguuuaucucaa

SEQ ID NO: 1016124 - RNA, 21 nt, Human
caacaggagaaauaaucuaaa

SEQ ID NO: 1016125 - RNA, 22 nt, Human
caacugcuuugagagcucaagc

SEQ ID NO: 1016126 - RNA, 18 nt, Human
caagaagagaugaaaaua

SEQ ID NO: 1016127 - RNA, 20 nt, Human
cacaauuaauauaaaacuau

SEQ ID NO: 1016128 - RNA, 18 nt, Human
caccccuggcuggacggg

SEQ ID NO: 1016129 - RNA, 23 nt, Human
cagcagaaaacaaaaggcuggaa

SEQ ID NO: 1016130 - RNA, 26 nt, Human
cagcauaauacaaaucugugaaagac

SEQ ID NO: 1016131 - RNA, 21 nt, Human
cagccaaagggacauaggcac

SEQ ID NO: 1016132 - RNA, 19 nt, Human
caucccgcagccccgagcc

SEQ ID NO: 1016133 - RNA, 20 nt, Human
ccaccuggacucuguaauga

SEQ ID NO: 1016134 - RNA, 22 nt, Human
cccccgccguuccccgccgccc

SEQ ID NO: 1016135 - RNA, 23 nt, Human
ccccgccgcccggccgccucccc

SEQ ID NO: 1016136 - RNA, 25 nt, Human
ccccgccgcccggccgccuccccug

SEQ ID NO: 1016137 - RNA, 20 nt, Human
ccccuggcuggacgggcucc

SEQ ID NO: 1016138 - RNA, 18 nt, Human
cccggcggaggcggaggc

SEQ ID NO: 1016139 - RNA, 18 nt, Human
cccuggcuggacgggcuc

SEQ ID NO: 1016140 - RNA, 18 nt, Human
ccgcccccgccguucccc

SEQ ID NO: 1016141 - RNA, 22 nt, Human
ccgcccgcgggccuggcuccgg

SEQ ID NO: 1016142 - RNA, 23 nt, Human
ccgccgcccgcgggccuggcucc

SEQ ID NO: 1016143 - RNA, 19 nt, Human
ccgccgccguggcgcuaac

SEQ ID NO: 1016144 - RNA, 18 nt, Human
ccgccguuccccgccgcc

SEQ ID NO: 1016145 - RNA, 18 nt, Human
ccgccguuccccgccgcc

SEQ ID NO: 1016146 - RNA, 19 nt, Human
ccgccguuccccgccgccc

SEQ ID NO: 1016147 - RNA, 23 nt, Human
ccgcgggccuggcuccggggcgg

SEQ ID NO: 1016148 - RNA, 23 nt, Human
ccugcccagcuccgccgccgccc

SEQ ID NO: 1016149 - RNA, 19 nt, Human
ccugggcggcggcggggug

SEQ ID NO: 1016150 - RNA, 18 nt, Human
cgagcggaggccgaggag

SEQ ID NO: 1016151 - RNA, 18 nt, Human
cggcggcugcgagcggag

SEQ ID NO: 1016152 - RNA, 18 nt, Human
cgggcgggcucugcgggg

SEQ ID NO: 1016153 - RNA, 24 nt, Human
cucaaacuaaauuuccaaauagca

SEQ ID NO: 1016154 - RNA, 23 nt, Human
cuccccaucccgcagccccgagc

SEQ ID NO: 1016155 - RNA, 20 nt, Human
cucgggccaccucgcgggcu

SEQ ID NO: 1016156 - RNA, 18 nt, Human
cugccgccgccguggcgc

SEQ ID NO: 1016157 - RNA, 24 nt, Human
gaagccucuuccauccaucuacag

SEQ ID NO: 1016158 - RNA, 22 nt, Human
gaccaaaacgugcucuaaaaug

SEQ ID NO: 1016159 - RNA, 21 nt, Human
gcagaaaacaaaaggcuggaa

SEQ ID NO: 1016160 - RNA, 18 nt, Human
gcccccgccguuccccgc

SEQ ID NO: 1016161 - RNA, 21 nt, Human
gcccggccgccuccccuggcg

SEQ ID NO: 1016162 - RNA, 20 nt, Human
gcgggccuggcuccggggcg

SEQ ID NO: 1016163 - RNA, 18 nt, Human
gcggggugcgcugcggcc

SEQ ID NO: 1016164 - RNA, 20 nt, Human
ggcuccggggcgggcugggc

SEQ ID NO: 1016165 - RNA, 24 nt, Human
gggcgggcucugcggggaugcggg

SEQ ID NO: 1016166 - RNA, 18 nt, Human
gggcugggcgggcccggc

SEQ ID NO: 1016167 - RNA, 19 nt, Human
gggggcggugaggcggcgg

SEQ ID NO: 1016168 - RNA, 20 nt, Human
guauuauucuaauuguuaac

SEQ ID NO: 1016169 - RNA, 18 nt, Human
uaaaaagagauuuuuaga

SEQ ID NO: 1016170 - RNA, 21 nt, Human
uaacaguacugugcuuugaaa

SEQ ID NO: 1016171 - RNA, 23 nt, Human
uaacaguacugugcuuugaaaaa

SEQ ID NO: 1016172 - RNA, 23 nt, Human
uaagcacaauuaauauaaaacua

SEQ ID NO: 1016173 - RNA, 21 nt, Human
uacaaaucugugaaagacugc

SEQ ID NO: 1016174 - RNA, 23 nt, Human
uacaaaucugugaaagacugcag

SEQ ID NO: 1016175 - RNA, 23 nt, Human
uacuggacucaaauaaaaaaaac

SEQ ID NO: 1016176 - RNA, 24 nt, Human
uagcaugccauuuuaguucauguu

SEQ ID NO: 1016177 - RNA, 20 nt, Human
uaucauuauaaugugacuug

SEQ ID NO: 1016178 - RNA, 21 nt, Human
uauuuuguguugaauguuugg

SEQ ID NO: 1016179 - RNA, 19 nt, Human
ucaacacacuuuaguuuau

SEQ ID NO: 1016180 - RNA, 22 nt, Human
ucaacacacuuuaguuuaucuc

SEQ ID NO: 1016181 - RNA, 24 nt, Human
ucaacacacuuuaguuuaucucaa

SEQ ID NO: 1016182 - RNA, 19 nt, Human
ucaacaggagaaauaaucu

SEQ ID NO: 1016183 - RNA, 18 nt, Human
uccccaucccgcagcccc

SEQ ID NO: 1016184 - RNA, 18 nt, Human
uccugugcugcuguuggu

SEQ ID NO: 1016185 - RNA, 23 nt, Human
ucugagauuucuugaagcagauu

SEQ ID NO: 1016186 - RNA, 19 nt, Human
ugaagcugaacauucuggc

SEQ ID NO: 1016187 - RNA, 23 nt, Human
ugacuucauauaauucuuaauac

SEQ ID NO: 1016188 - RNA, 19 nt, Human
ugaugagacgagaaagaaa

SEQ ID NO: 1016189 - RNA, 24 nt, Human
uggcaccuuccugugggaagccuc

SEQ ID NO: 1016190 - RNA, 21 nt, Human
uggcaggcugcgcccucgggc

SEQ ID NO: 1016191 - RNA, 21 nt, Human
uggcuggacgggcuccugggc

SEQ ID NO: 1016192 - RNA, 27 nt, Human
uggguaaaaacugguccuuggauuuau

SEQ ID NO: 1016193 - RNA, 21 nt, Human
ugguggcaccuuccuguggga

SEQ ID NO: 1016194 - RNA, 20 nt, Human
ugugaaagacugcagauauu

SEQ ID NO: 1016195 - RNA, 23 nt, Human
uuaaauucucaaaaucaguauca

SEQ ID NO: 1016196 - RNA, 19 nt, Human
uuaacauuuacaugaauua

SEQ ID NO: 1016197 - RNA, 22 nt, Human
uuaccugucaucauuuugauga

SEQ ID NO: 1016198 - RNA, 18 nt, Human
uuccaaauagcaugccau

SEQ ID NO: 1016199 - RNA, 22 nt, Human
uugaauguuugguuuaacaaag

SEQ ID NO: 1016200 - RNA, 23 nt, Human
uuggagaagauguuuuccccguu

SEQ ID NO: 1016201 - RNA, 24 nt, Human
uugguuuuuuuaagacuucuagca

SEQ ID NO: 1016202 - RNA, 21 nt, Human
uuuuaagcaauggcuuggaga

SEQ ID NO: 1016203 - RNA, 21 nt, Human
aagcagaugaaacaaaggaaa

SEQ ID NO: 1016204 - RNA, 23 nt, Human
aagcuaaaaaaggggguuucugg

SEQ ID NO: 1016205 - RNA, 21 nt, Human
aaggggaugaugguggggcug

SEQ ID NO: 1016206 - RNA, 21 nt, Human
aaggguggggacugugaggua

SEQ ID NO: 1016207 - RNA, 25 nt, Human
aauuguguaauuuuuuuuccucuug

SEQ ID NO: 1016208 - RNA, 23 nt, Human
accaccuccuucaaacaagacug

SEQ ID NO: 1016209 - RNA, 21 nt, Human
accagguguccagacuauucc

SEQ ID NO: 1016210 - RNA, 21 nt, Human
acuccuacccccaccccaagc

SEQ ID NO: 1016211 - RNA, 20 nt, Human
agaaaucgaaaggaugguuu

SEQ ID NO: 1016212 - RNA, 20 nt, Human
agaaggggaugauggugggg

SEQ ID NO: 1016213 - RNA, 25 nt, Human
agacagacagcagagagaaaccaga

SEQ ID NO: 1016214 - RNA, 22 nt, Human
agacagcagagagaaaccagag

SEQ ID NO: 1016215 - RNA, 24 nt, Human
agagaggaagcagaugaaacaaag

SEQ ID NO: 1016216 - RNA, 21 nt, Human
agagagggagaugggguggug

SEQ ID NO: 1016217 - RNA, 19 nt, Human
aggggaugaugguggggcu

SEQ ID NO: 1016218 - RNA, 21 nt, Human
aggucccuucugauccugccc

SEQ ID NO: 1016219 - RNA, 24 nt, Human
caaacaagacugacacaggaagug

SEQ ID NO: 1016220 - RNA, 21 nt, Human
caaggcaggcaauugcuuugc

SEQ ID NO: 1016221 - RNA, 26 nt, Human
cacagguacgugcacauuuauggggg

SEQ ID NO: 1016222 - RNA, 21 nt, Human
caccccaagcccauaaaguac

SEQ ID NO: 1016223 - RNA, 22 nt, Human
caccucuauccaccaucaccac

SEQ ID NO: 1016224 - RNA, 21 nt, Human
cacuuggagggcacucccuac

SEQ ID NO: 1016225 - RNA, 19 nt, Human
cagacagcagagagaaacc

SEQ ID NO: 1016226 - RNA, 24 nt, Human
caggauugaauaaaccuuaacucc

SEQ ID NO: 1016227 - RNA, 24 nt, Human
cagguuaaaauauagauaagacac

SEQ ID NO: 1016228 - RNA, 19 nt, Human
cagugccacaggcuuaggu

SEQ ID NO: 1016229 - RNA, 22 nt, Human
caucaccaccuccuucaaacaa

SEQ ID NO: 1016230 - RNA, 28 nt, Human
cauucuacacaccccaagcccauaaagu

SEQ ID NO: 1016231 - RNA, 18 nt, Human
ccaagcccauaaaguaca

SEQ ID NO: 1016232 - RNA, 20 nt, Human
ccacugccuccugggcagug

SEQ ID NO: 1016233 - RNA, 21 nt, Human
ccauaugucaacuuugaaagg

SEQ ID NO: 1016234 - RNA, 23 nt, Human
cccaccccaagcaaaagcuaaaa

SEQ ID NO: 1016235 - RNA, 21 nt, Human
ccccaccccaagcaaaagcua

SEQ ID NO: 1016236 - RNA, 23 nt, Human
ccccaccccaagcaaaagcuaaa

SEQ ID NO: 1016237 - RNA, 20 nt, Human
ccccacucccccgcaaaauc

SEQ ID NO: 1016238 - RNA, 24 nt, Human
cccccaccccaagcaaaagcuaaa

SEQ ID NO: 1016239 - RNA, 18 nt, Human
ccccgguggggcucccgc

SEQ ID NO: 1016240 - RNA, 19 nt, Human
cccgccacugccuccuggg

SEQ ID NO: 1016241 - RNA, 20 nt, Human
cccggccucgggcuucggcc

SEQ ID NO: 1016242 - RNA, 22 nt, Human
cccuacccaggacaggauugaa

SEQ ID NO: 1016243 - RNA, 20 nt, Human
ccgccgccgccgccgcugcc

SEQ ID NO: 1016244 - RNA, 20 nt, Human
ccgccgccgccgccgcugcc

SEQ ID NO: 1016245 - RNA, 25 nt, Human
ccgccgccgccgcugccuuccccug

SEQ ID NO: 1016246 - RNA, 19 nt, Human
ccgcugccuuccccugcag

SEQ ID NO: 1016247 - RNA, 18 nt, Human
ccuccuggcuuucccaug

SEQ ID NO: 1016248 - RNA, 21 nt, Human
ccuccuucaaacaagacugac

SEQ ID NO: 1016249 - RNA, 22 nt, Human
ccugcaguccccaacccgggac

SEQ ID NO: 1016250 - RNA, 22 nt, Human
ccuuaacuccuacccccacccc

SEQ ID NO: 1016251 - RNA, 23 nt, Human
ccuucaccucuauccaccaucac

SEQ ID NO: 1016252 - RNA, 22 nt, Human
ccuucugauccugcccuucuca

SEQ ID NO: 1016253 - RNA, 23 nt, Human
cggccucgggcuucggcgauggc

SEQ ID NO: 1016254 - RNA, 24 nt, Human
cuccaugccaggacaacagucucc

SEQ ID NO: 1016255 - RNA, 23 nt, Human
cucccccgcaaaaucauucuaca

SEQ ID NO: 1016256 - RNA, 22 nt, Human
cucuuucaucuuucuccccacu

SEQ ID NO: 1016257 - RNA, 24 nt, Human
cuggccaaugggauggccauaugu

SEQ ID NO: 1016258 - RNA, 21 nt, Human
cugugccaaggucccuucuga

SEQ ID NO: 1016259 - RNA, 20 nt, Human
gaaaaucuauucugucccag

SEQ ID NO: 1016260 - RNA, 21 nt, Human
gagcccgccacugccuccugg

SEQ ID NO: 1016261 - RNA, 19 nt, Human
gagggcacucccuaccucc

SEQ ID NO: 1016262 - RNA, 23 nt, Human
gcacuggugccuauugcagucag

SEQ ID NO: 1016263 - RNA, 23 nt, Human
gcagagagaaaccagaggccaga

SEQ ID NO: 1016264 - RNA, 20 nt, Human
gcagaugaaacaaaggaaaa

SEQ ID NO: 1016265 - RNA, 19 nt, Human
gcagugggaggucagggcc

SEQ ID NO: 1016266 - RNA, 18 nt, Human
gccacugccuccugggca

SEQ ID NO: 1016267 - RNA, 21 nt, Human
gccaggacaacagucucccag

SEQ ID NO: 1016268 - RNA, 19 nt, Human
gcucccgccgccgccgccg

SEQ ID NO: 1016269 - RNA, 20 nt, Human
gcucccgccgccgccgccgc

SEQ ID NO: 1016270 - RNA, 24 nt, Human
ggagaugggguggugagagaggaa

SEQ ID NO: 1016271 - RNA, 24 nt, Human
ggaggucagggcccuccuggcuuu

SEQ ID NO: 1016272 - RNA, 19 nt, Human
ggcaucgugaagccggagg

SEQ ID NO: 1016273 - RNA, 23 nt, Human
ggcuuucccaugcaucccccacc

SEQ ID NO: 1016274 - RNA, 19 nt, Human
gggcacagcgcgagacagc

SEQ ID NO: 1016275 - RNA, 19 nt, Human
gggcagugggaggucaggg

SEQ ID NO: 1016276 - RNA, 19 nt, Human
ggucagggcccuccuggcu

SEQ ID NO: 1016277 - RNA, 22 nt, Human
gucccagaccccgguggggcuc

SEQ ID NO: 1016278 - RNA, 24 nt, Human
gucuguggauucuggccaauggga

SEQ ID NO: 1016279 - RNA, 22 nt, Human
gucuuuccuacacacucuucca

SEQ ID NO: 1016280 - RNA, 21 nt, Human
gugaagccggaggcaguuccc

SEQ ID NO: 1016281 - RNA, 21 nt, Human
guggggacuuuuuuuuuucuc

SEQ ID NO: 1016282 - RNA, 22 nt, Human
guuaaaauauagauaagacaca

SEQ ID NO: 1016283 - RNA, 18 nt, Human
uaaaaaacaaaucaaugu

SEQ ID NO: 1016284 - RNA, 19 nt, Human
uaacuccuacccccacccc

SEQ ID NO: 1016285 - RNA, 23 nt, Human
uacacaccccaagcccauaaagu

SEQ ID NO: 1016286 - RNA, 24 nt, Human
uacccccaccccaagcaaaagcug

SEQ ID NO: 1016287 - RNA, 21 nt, Human
uaccuccuucaccucuaucca

SEQ ID NO: 1016288 - RNA, 21 nt, Human
uaguagaaugggcacagcgcg

SEQ ID NO: 1016289 - RNA, 22 nt, Human
uagugcugugguguggacuugu

SEQ ID NO: 1016290 - RNA, 18 nt, Human
uauuuuugcacuuggagg

SEQ ID NO: 1016291 - RNA, 21 nt, Human
ucagggcccuccuggcuuucc

SEQ ID NO: 1016292 - RNA, 19 nt, Human
ucaugccagacagacagca

SEQ ID NO: 1016293 - RNA, 18 nt, Human
uccaccaucaccaccucc

SEQ ID NO: 1016294 - RNA, 19 nt, Human
uccaccaucaccaccuccu

SEQ ID NO: 1016295 - RNA, 20 nt, Human
ucccaugcaucccccaccag

SEQ ID NO: 1016296 - RNA, 25 nt, Human
uccccgauggucaauaagugcguca

SEQ ID NO: 1016297 - RNA, 20 nt, Human
ucccgccgccgccgccgcug

SEQ ID NO: 1016298 - RNA, 20 nt, Human
uccuacacacucuuccaaau

SEQ ID NO: 1016299 - RNA, 20 nt, Human
ucggccagacaccgggcggc

SEQ ID NO: 1016300 - RNA, 20 nt, Human
ucugaaaaaucacauggcua

SEQ ID NO: 1016301 - RNA, 23 nt, Human
ucugaguggccaugccggucggg

SEQ ID NO: 1016302 - RNA, 19 nt, Human
ucuuucaucuuucucccca

SEQ ID NO: 1016303 - RNA, 23 nt, Human
ugaauaaaccuuaacuccuaccc

SEQ ID NO: 1016304 - RNA, 20 nt, Human
ugagaaggggaugauggugg

SEQ ID NO: 1016305 - RNA, 20 nt, Human
ugagacauaaaaaaaguuuu

SEQ ID NO: 1016306 - RNA, 21 nt, Human
ugagguuuuaugucccaucgg

SEQ ID NO: 1016307 - RNA, 24 nt, Human
ugauccugcccuucucaggccuca

SEQ ID NO: 1016308 - RNA, 21 nt, Human
ugccuuccccugcagucccca

SEQ ID NO: 1016309 - RNA, 23 nt, Human
uggcuagauuaacuuucgcccua

SEQ ID NO: 1016310 - RNA, 18 nt, Human
ugggcagugggaggucag

SEQ ID NO: 1016311 - RNA, 22 nt, Human
uggggacugugagguaacccca

SEQ ID NO: 1016312 - RNA, 19 nt, Human
ugggguggugagagaggaa

SEQ ID NO: 1016313 - RNA, 22 nt, Human
ugggguggugagagaggaagca

SEQ ID NO: 1016314 - RNA, 20 nt, Human
uguuuugcuuuuucgauuua

SEQ ID NO: 1016315 - RNA, 22 nt, Human
uucacacugcuuaauugacauc

SEQ ID NO: 1016316 - RNA, 24 nt, Human
uuccccugcaguccccaacccggg

SEQ ID NO: 1016317 - RNA, 21 nt, Human
uuuccuacacacucuuccaaa

SEQ ID NO: 1016318 - RNA, 24 nt, Human
uuuguuauuuuugcacuuggaggg

SEQ ID NO: 1016319 - RNA, 18 nt, Human
aacgaggauccacaugug

SEQ ID NO: 1016320 - RNA, 18 nt, Human
aagccccuccuguccaca

SEQ ID NO: 1016321 - RNA, 21 nt, Human
acagcagaaaucaaaacaaac

SEQ ID NO: 1016322 - RNA, 27 nt, Human
acccauuuuccccucucucccuugccc

SEQ ID NO: 1016323 - RNA, 21 nt, Human
agaaaucaaaacaaacaagcc

SEQ ID NO: 1016324 - RNA, 19 nt, Human
agagcacagccaggcacua

SEQ ID NO: 1016325 - RNA, 21 nt, Human
aggcacuaacgcgcaggcgcu

SEQ ID NO: 1016326 - RNA, 18 nt, Human
aucaauucaacacccaca

SEQ ID NO: 1016327 - RNA, 21 nt, Human
cacacaggucagagacacggc

SEQ ID NO: 1016328 - RNA, 22 nt, Human
caccgaaagugauuuauaagca

SEQ ID NO: 1016329 - RNA, 21 nt, Human
caccuagaaccucugagaagu

SEQ ID NO: 1016330 - RNA, 19 nt, Human
cagcagaaaucaaaacaaa

SEQ ID NO: 1016331 - RNA, 23 nt, Human
ccaggcacuaacgcgcaggcgcu

SEQ ID NO: 1016332 - RNA, 19 nt, Human
ccugcagauuucucuuggu

SEQ ID NO: 1016333 - RNA, 20 nt, Human
ccuguccacaugcccagagu

SEQ ID NO: 1016334 - RNA, 21 nt, Human
cucagcaucaccuagaaccuc

SEQ ID NO: 1016335 - RNA, 25 nt, Human
gagaauagagggggcauaaaagaga

SEQ ID NO: 1016336 - RNA, 24 nt, Human
gagcacagccaggcacuaacgcgc

SEQ ID NO: 1016337 - RNA, 25 nt, Human
gauaauucaaacagcagcuccucuu

SEQ ID NO: 1016338 - RNA, 22 nt, Human
ggggagagaggagaauagaggg

SEQ ID NO: 1016339 - RNA, 20 nt, Human
uaagcacagcagaaaucaaa

SEQ ID NO: 1016340 - RNA, 22 nt, Human
uaagcacagcagaaaucaaaac

SEQ ID NO: 1016341 - RNA, 27 nt, Human
ucagccggcagcucuggcauuccucuu

SEQ ID NO: 1016342 - RNA, 25 nt, Human
uccacauguguaaauaaacgggaac

SEQ ID NO: 1016343 - RNA, 19 nt, Human
ucuguuguugagaugaaaa

SEQ ID NO: 1016344 - RNA, 20 nt, Human
ugcccagaguuuagagacac

SEQ ID NO: 1016345 - RNA, 20 nt, Human
ugccuggcaugaccaguagc

SEQ ID NO: 1016346 - RNA, 19 nt, Human
uggaaaacgaggauccaca

SEQ ID NO: 1016347 - RNA, 19 nt, Human
ugguucuuccaggagccug

SEQ ID NO: 1016348 - RNA, 20 nt, Human
uucacagauaauucaaacag

SEQ ID NO: 1016349 - RNA, 21 nt, Human
uuccaggagccuggaucuggc

SEQ ID NO: 1016350 - RNA, 22 nt, Human
aaaaaaacuuugggcaaagaaa

SEQ ID NO: 1016351 - RNA, 21 nt, Human
aaaaaaauagaauccguaaca

SEQ ID NO: 1016352 - RNA, 27 nt, Human
aaaacacuccucauccucuuggaaucg

SEQ ID NO: 1016353 - RNA, 18 nt, Human
aaaagaaaaccagggaaa

SEQ ID NO: 1016354 - RNA, 23 nt, Human
aaaagaaaaccagggaaacagaa

SEQ ID NO: 1016355 - RNA, 18 nt, Human
aaaagaucucaaaugaag

SEQ ID NO: 1016356 - RNA, 22 nt, Human
aaaaucaaguuaacuguguaag

SEQ ID NO: 1016357 - RNA, 18 nt, Human
aaaauuccagacucaccu

SEQ ID NO: 1016358 - RNA, 22 nt, Human
aaacacuccucauccucuugga

SEQ ID NO: 1016359 - RNA, 23 nt, Human
aagaaaaccagggaaacagaaaa

SEQ ID NO: 1016360 - RNA, 19 nt, Human
aagaaacacaacuuguaca

SEQ ID NO: 1016361 - RNA, 24 nt, Human
aaugagagggaaccacaggaaaaa

SEQ ID NO: 1016362 - RNA, 24 nt, Human
acccagguauccccucuacccagc

SEQ ID NO: 1016363 - RNA, 21 nt, Human
acccugacuucaccagggcuu

SEQ ID NO: 1016364 - RNA, 18 nt, Human
agacaagaaaaugggagg

SEQ ID NO: 1016365 - RNA, 19 nt, Human
agcuggacaacagcuguuc

SEQ ID NO: 1016366 - RNA, 18 nt, Human
aggagagaauaucagggu

SEQ ID NO: 1016367 - RNA, 18 nt, Human
aggaguacaaaagaaaac

SEQ ID NO: 1016368 - RNA, 24 nt, Human
aggcaggucuucaaaagaaggaga

SEQ ID NO: 1016369 - RNA, 21 nt, Human
agguggccaccuggggcccuu

SEQ ID NO: 1016370 - RNA, 24 nt, Human
aguaacugggacaaaugagaggga

SEQ ID NO: 1016371 - RNA, 21 nt, Human
auaauauauauauauauauau

SEQ ID NO: 1016372 - RNA, 25 nt, Human
auaauauauauauauauauauuaua

SEQ ID NO: 1016373 - RNA, 19 nt, Human
aucaagauacagcucaugg

SEQ ID NO: 1016374 - RNA, 19 nt, Human
aucaaggaagggaaggucu

SEQ ID NO: 1016375 - RNA, 21 nt, Human
aucacccuucccccucccaaa

SEQ ID NO: 1016376 - RNA, 22 nt, Human
caaauaaagccaaaggucaaaa

SEQ ID NO: 1016377 - RNA, 24 nt, Human
cacacagcggcagaacagacaaga

SEQ ID NO: 1016378 - RNA, 20 nt, Human
cacaccugguaacgcagaag

SEQ ID NO: 1016379 - RNA, 23 nt, Human
cacaggaaaaagacugacgucuc

SEQ ID NO: 1016380 - RNA, 27 nt, Human
cagaaaacuuuaucacccuucccccuc

SEQ ID NO: 1016381 - RNA, 21 nt, Human
cagcggcagaacagacaagaa

SEQ ID NO: 1016382 - RNA, 19 nt, Human
cagucuucagcuuuccaga

SEQ ID NO: 1016383 - RNA, 19 nt, Human
cagucuuugucucuuuuag

SEQ ID NO: 1016384 - RNA, 23 nt, Human
cauaaaaugugagcugcaccuaa

SEQ ID NO: 1016385 - RNA, 23 nt, Human
caugugaugaaaaauauugcuuu

SEQ ID NO: 1016386 - RNA, 21 nt, Human
ccaagaaggaaccugaggccc

SEQ ID NO: 1016387 - RNA, 27 nt, Human
ccacaggaaaaagacugacgucucccc

SEQ ID NO: 1016388 - RNA, 20 nt, Human
ccaccaccaccagugucuug

SEQ ID NO: 1016389 - RNA, 23 nt, Human
ccaccacucccacacccugacuu

SEQ ID NO: 1016390 - RNA, 19 nt, Human
ccacucccacacccugacu

SEQ ID NO: 1016391 - RNA, 19 nt, Human
ccacuccuucucucuaucc

SEQ ID NO: 1016392 - RNA, 23 nt, Human
ccagaacaaggcagaagggaaga

SEQ ID NO: 1016393 - RNA, 19 nt, Human
cccagcaccauagugaggu

SEQ ID NO: 1016394 - RNA, 25 nt, Human
ccccaacucuccgacuccccaagcc

SEQ ID NO: 1016395 - RNA, 24 nt, Human
ccccaggcuucuuccuaaucacac

SEQ ID NO: 1016396 - RNA, 22 nt, Human
cccccucccaaauaaagccaaa

SEQ ID NO: 1016397 - RNA, 25 nt, Human
cccgccccgcugccgcgcgcucccg

SEQ ID NO: 1016398 - RNA, 19 nt, Human
cccucauuuucccauccca

SEQ ID NO: 1016399 - RNA, 23 nt, Human
cccuguuuccagacuagucaaug

SEQ ID NO: 1016400 - RNA, 23 nt, Human
ccgccccgcugccgcgcgcuccc

SEQ ID NO: 1016401 - RNA, 23 nt, Human
ccgccgccucccggcagugccgu

SEQ ID NO: 1016402 - RNA, 25 nt, Human
ccgccgccucccggcagugccgucc

SEQ ID NO: 1016403 - RNA, 26 nt, Human
ccgccgccucccggcagugccguccu

SEQ ID NO: 1016404 - RNA, 21 nt, Human
ccgccgucguugucaccgccg

SEQ ID NO: 1016405 - RNA, 23 nt, Human
ccgccgucguugucaccgccgcc

SEQ ID NO: 1016406 - RNA, 24 nt, Human
ccgccgucguugucaccgccgccu

SEQ ID NO: 1016407 - RNA, 19 nt, Human
ccgccucccggcagugccg

SEQ ID NO: 1016408 - RNA, 18 nt, Human
ccgcgcgcucccgccagg

SEQ ID NO: 1016409 - RNA, 19 nt, Human
ccgcgcgcucccgccaggc

SEQ ID NO: 1016410 - RNA, 19 nt, Human
ccgcugccgcgcgcucccg

SEQ ID NO: 1016411 - RNA, 18 nt, Human
ccguauauguaucccucc

SEQ ID NO: 1016412 - RNA, 30 nt, Human
ccguauauguaucccucccucauuuucccu

SEQ ID NO: 1016413 - RNA, 24 nt, Human
ccucccggcagugccguccugccu

SEQ ID NO: 1016414 - RNA, 24 nt, Human
ccucuugugaccaaaauuccagac

SEQ ID NO: 1016415 - RNA, 21 nt, Human
ccuuugguguaggcgcagagg

SEQ ID NO: 1016416 - RNA, 22 nt, Human
cgcgcggcccccgcacgcucca

SEQ ID NO: 1016417 - RNA, 20 nt, Human
cuacccagcaccauagugag

SEQ ID NO: 1016418 - RNA, 18 nt, Human
cucaaugccaccacuccc

SEQ ID NO: 1016419 - RNA, 20 nt, Human
cucccaccaccaccaguguc

SEQ ID NO: 1016420 - RNA, 26 nt, Human
cuccccaagccuacugcauuuuagaa

SEQ ID NO: 1016421 - RNA, 18 nt, Human
cugccgcgcgcucccgcc

SEQ ID NO: 1016422 - RNA, 18 nt, Human
cugguaacgcagaagagg

SEQ ID NO: 1016423 - RNA, 22 nt, Human
cuuagcaccagcagaggaugcu

SEQ ID NO: 1016424 - RNA, 21 nt, Human
cuuuaucacccuucccccucc

SEQ ID NO: 1016425 - RNA, 22 nt, Human
gacucaccucuccccaggcuuc

SEQ ID NO: 1016426 - RNA, 18 nt, Human
gagcaauugcacaaaugu

SEQ ID NO: 1016427 - RNA, 18 nt, Human
gagccuagaaaacuaauu

SEQ ID NO: 1016428 - RNA, 22 nt, Human
gaggaguacaaaagaaaaccag

SEQ ID NO: 1016429 - RNA, 18 nt, Human
gaucaaggaagggaaggu

SEQ ID NO: 1016430 - RNA, 20 nt, Human
gcagaacagacaagaaaaug

SEQ ID NO: 1016431 - RNA, 24 nt, Human
gcagaacagacaagaaaaugggag

SEQ ID NO: 1016432 - RNA, 19 nt, Human
gcagcgcgcggcccccgca

SEQ ID NO: 1016433 - RNA, 21 nt, Human
gcaugugaugaaaaauauugc

SEQ ID NO: 1016434 - RNA, 20 nt, Human
gcuaaagcuggacaacagcu

SEQ ID NO: 1016435 - RNA, 21 nt, Human
gcuuuguuuacugcagucuuu

SEQ ID NO: 1016436 - RNA, 19 nt, Human
ggcagaacagacaagaaaa

SEQ ID NO: 1016437 - RNA, 24 nt, Human
ggcagaacagacaagaaaauggga

SEQ ID NO: 1016438 - RNA, 24 nt, Human
gggaaacagaaaacuuuaucaccc

SEQ ID NO: 1016439 - RNA, 19 nt, Human
gggaaacuuaaaauccuug

SEQ ID NO: 1016440 - RNA, 24 nt, Human
gggaaccacaggaaaaagacugac

SEQ ID NO: 1016441 - RNA, 22 nt, Human
gggaagauuaagaaacacaacu

SEQ ID NO: 1016442 - RNA, 21 nt, Human
gggaagcaacagagaggagua

SEQ ID NO: 1016443 - RNA, 22 nt, Human
gggaaggaagguggccaccugg

SEQ ID NO: 1016444 - RNA, 18 nt, Human
gggaaggucuuaaaagau

SEQ ID NO: 1016445 - RNA, 18 nt, Human
gggcaaggaaaacagggc

SEQ ID NO: 1016446 - RNA, 24 nt, Human
guaacaauaauaaaaaaaauuauu

SEQ ID NO: 1016447 - RNA, 25 nt, Human
guuccaaagaugucccuguuuccag

SEQ ID NO: 1016448 - RNA, 22 nt, Human
uaaaagauaaaaggggggguug

SEQ ID NO: 1016449 - RNA, 21 nt, Human
uaaagaggagcuuuguuuacu

SEQ ID NO: 1016450 - RNA, 24 nt, Human
uaacccccaagggacaaucggagg

SEQ ID NO: 1016451 - RNA, 24 nt, Human
uaagcuaggggaggcuccaagggg

SEQ ID NO: 1016452 - RNA, 25 nt, Human
uaagggcucuguuuccuacaaaguu

SEQ ID NO: 1016453 - RNA, 19 nt, Human
uacaaaagaaaaccaggga

SEQ ID NO: 1016454 - RNA, 24 nt, Human
uacaaaagaaaaccagggaaacag

SEQ ID NO: 1016455 - RNA, 23 nt, Human
uacagcucauggauggaggcagg

SEQ ID NO: 1016456 - RNA, 18 nt, Human
uagaacccagguaucccc

SEQ ID NO: 1016457 - RNA, 24 nt, Human
uagcccaggcccacacagcggcag

SEQ ID NO: 1016458 - RNA, 25 nt, Human
uauauauauauauuauauguacaca

SEQ ID NO: 1016459 - RNA, 31 nt, Human
uauauauauauuauauguacacacacaccuu

SEQ ID NO: 1016460 - RNA, 20 nt, Human
uauauguacacacacaccug

SEQ ID NO: 1016461 - RNA, 24 nt, Human
uauguacacacacaccugguaacg

SEQ ID NO: 1016462 - RNA, 26 nt, Human
uauuuauaauauauauauauauauau

SEQ ID NO: 1016463 - RNA, 23 nt, Human
ucaaucucuucuuguuauuccca

SEQ ID NO: 1016464 - RNA, 20 nt, Human
ucaaugccaccacucccaca

SEQ ID NO: 1016465 - RNA, 20 nt, Human
ucacccgcgagcccggugcc

SEQ ID NO: 1016466 - RNA, 20 nt, Human
ucacccuucccccucccaaa

SEQ ID NO: 1016467 - RNA, 19 nt, Human
ucagacagaucaagauaca

SEQ ID NO: 1016468 - RNA, 21 nt, Human
uccaaaugaugaauaaccacc

SEQ ID NO: 1016469 - RNA, 23 nt, Human
uccaagaaggaaccugaggcccc

SEQ ID NO: 1016470 - RNA, 22 nt, Human
uccaaggggccaguaggagcac

SEQ ID NO: 1016471 - RNA, 18 nt, Human
uccacgacuacaguucca

SEQ ID NO: 1016472 - RNA, 22 nt, Human
uccagggaucaaggaagggaag

SEQ ID NO: 1016473 - RNA, 21 nt, Human
ucccaagcccuuuaagggcuc

SEQ ID NO: 1016474 - RNA, 19 nt, Human
uccccagaacaaggcagaa

SEQ ID NO: 1016475 - RNA, 19 nt, Human
ucccucccucauuuuccca

SEQ ID NO: 1016476 - RNA, 27 nt, Human
uccguaacaauaauaaaaaaaauuauu

SEQ ID NO: 1016477 - RNA, 21 nt, Human
uccguaguuaguaacugggac

SEQ ID NO: 1016478 - RNA, 22 nt, Human
ucguugucaccgccgccucccg

SEQ ID NO: 1016479 - RNA, 18 nt, Human
ucuaaucccucuccccca

SEQ ID NO: 1016480 - RNA, 24 nt, Human
ucucaaugccaccacucccacacc

SEQ ID NO: 1016481 - RNA, 18 nt, Human
ucucacccgcgagcccgg

SEQ ID NO: 1016482 - RNA, 21 nt, Human
ucucagggccccaacucuccg

SEQ ID NO: 1016483 - RNA, 20 nt, Human
ucuccccucuuuuccugcug

SEQ ID NO: 1016484 - RNA, 23 nt, Human
ucuccucuccaaguccuucccuc

SEQ ID NO: 1016485 - RNA, 21 nt, Human
ucucugucuucaaucucuucu

SEQ ID NO: 1016486 - RNA, 18 nt, Human
ucugguuuaaaaaugauc

SEQ ID NO: 1016487 - RNA, 24 nt, Human
ucuguuuccuacaaaguucaugua

SEQ ID NO: 1016488 - RNA, 24 nt, Human
ucuucaaucucuucuuguuauucc

SEQ ID NO: 1016489 - RNA, 18 nt, Human
ugaaggaaagcacauggg

SEQ ID NO: 1016490 - RNA, 21 nt, Human
ugaaggaaagcacaugggagg

SEQ ID NO: 1016491 - RNA, 24 nt, Human
ugaaggaaagcacaugggaggggg

SEQ ID NO: 1016492 - RNA, 25 nt, Human
ugaaggaaagcacaugggaggggga

SEQ ID NO: 1016493 - RNA, 21 nt, Human
ugaauaaccaccuccccagaa

SEQ ID NO: 1016494 - RNA, 21 nt, Human
ugacgucuccccucuuuuccu

SEQ ID NO: 1016495 - RNA, 18 nt, Human
ugaggaaugggaagagua

SEQ ID NO: 1016496 - RNA, 19 nt, Human
ugagggaaggaagguggcc

SEQ ID NO: 1016497 - RNA, 20 nt, Human
ugagggaaggaagguggcca

SEQ ID NO: 1016498 - RNA, 24 nt, Human
ugagggaaggaagguggccaccug

SEQ ID NO: 1016499 - RNA, 18 nt, Human
ugaucucccaccaccacc

SEQ ID NO: 1016500 - RNA, 26 nt, Human
ugcagaguucaaccagguuacugugu

SEQ ID NO: 1016501 - RNA, 23 nt, Human
ugccaccacucccacacccugag

SEQ ID NO: 1016502 - RNA, 23 nt, Human
uggaaucggugguuuaaaaaaug

SEQ ID NO: 1016503 - RNA, 24 nt, Human
uggcuaaucagaauaaaaaauaaa

SEQ ID NO: 1016504 - RNA, 19 nt, Human
ugggaggagggaagcaaca

SEQ ID NO: 1016505 - RNA, 18 nt, Human
ugggagggggaaagguga

SEQ ID NO: 1016506 - RNA, 26 nt, Human
ugggagggggaaaggugauuccaaau

SEQ ID NO: 1016507 - RNA, 22 nt, Human
uguacacaugcaaaugguugca

SEQ ID NO: 1016508 - RNA, 19 nt, Human
uuacugcagucuuugucuc

SEQ ID NO: 1016509 - RNA, 24 nt, Human
uuagguagucuucucaaugccacc

SEQ ID NO: 1016510 - RNA, 18 nt, Human
uucaaaagaaggagagaa

SEQ ID NO: 1016511 - RNA, 20 nt, Human
uugaagccauguucuuccca

SEQ ID NO: 1016512 - RNA, 21 nt, Human
uugagcuguaaauccuuuucu

SEQ ID NO: 1016513 - RNA, 23 nt, Human
uugcagguggaaaacauggacag

SEQ ID NO: 1016514 - RNA, 24 nt, Human
uuggagcucugaugggaaaucugc

SEQ ID NO: 1016515 - RNA, 21 nt, Human
aaacaacacuggcaauuuuga

SEQ ID NO: 1016516 - RNA, 21 nt, Human
aaacgaauaugcagaacaauc

SEQ ID NO: 1016517 - RNA, 23 nt, Human
aagcuaaccaaaaacuccaacaa

SEQ ID NO: 1016518 - RNA, 20 nt, Human
aauacauucauaguaaccac

SEQ ID NO: 1016519 - RNA, 19 nt, Human
acacagcucuucccccaac

SEQ ID NO: 1016520 - RNA, 24 nt, Human
acacugcuaauuuggcuggaacaa

SEQ ID NO: 1016521 - RNA, 22 nt, Human
acagaucuuuugcaacuucagc

SEQ ID NO: 1016522 - RNA, 24 nt, Human
acaugcacacacgcgcgcacacgg

SEQ ID NO: 1016523 - RNA, 18 nt, Human
accccaaauaaauaacug

SEQ ID NO: 1016524 - RNA, 21 nt, Human
accugugccguggguggagaa

SEQ ID NO: 1016525 - RNA, 33 nt, Human
acgcgcgcacacgcacagacacgcacacacagu

SEQ ID NO: 1016526 - RNA, 19 nt, Human
agcagcucaggacccagga

SEQ ID NO: 1016527 - RNA, 20 nt, Human
agcgggccccgcggcucggc

SEQ ID NO: 1016528 - RNA, 20 nt, Human
agcuaaccaaaaacuccaac

SEQ ID NO: 1016529 - RNA, 20 nt, Human
aggaagacccucagacuuug

SEQ ID NO: 1016530 - RNA, 18 nt, Human
aggugcccaauggcuggg

SEQ ID NO: 1016531 - RNA, 21 nt, Human
augaacagaaaggcaaaaaaa

SEQ ID NO: 1016532 - RNA, 22 nt, Human
augcacacacgcgcgcacacgc

SEQ ID NO: 1016533 - RNA, 20 nt, Human
augguccccuccccuuccca

SEQ ID NO: 1016534 - RNA, 24 nt, Human
caaaaaacaguucacagaugaaca

SEQ ID NO: 1016535 - RNA, 19 nt, Human
caaaaacuccaacaagagg

SEQ ID NO: 1016536 - RNA, 19 nt, Human
caagcaaaugccucagccc

SEQ ID NO: 1016537 - RNA, 31 nt, Human
cacacgcgcgcacacgcacagacacgcacag

SEQ ID NO: 1016538 - RNA, 18 nt, Human
cacagcaucgggcugccc

SEQ ID NO: 1016539 - RNA, 25 nt, Human
cacaugcacacacgcgcgcacacgc

SEQ ID NO: 1016540 - RNA, 24 nt, Human
cacgcauguccaacccagacaaca

SEQ ID NO: 1016541 - RNA, 19 nt, Human
cacugcuaauuuggcugga

SEQ ID NO: 1016542 - RNA, 25 nt, Human
cagaccccaaauaaauaacuggaag

SEQ ID NO: 1016543 - RNA, 18 nt, Human
cagaggugcccaauggcu

SEQ ID NO: 1016544 - RNA, 23 nt, Human
cagcaauacauucauaguaacca

SEQ ID NO: 1016545 - RNA, 23 nt, Human
cagcucugcaggaggccacggcg

SEQ ID NO: 1016546 - RNA, 23 nt, Human
caggaccccgcggcucucucccc

SEQ ID NO: 1016547 - RNA, 18 nt, Human
caguaaggaugccucccc

SEQ ID NO: 1016548 - RNA, 24 nt, Human
cagugcacagaucuuuugcaacuu

SEQ ID NO: 1016549 - RNA, 18 nt, Human
caugcggccgcgcucaug

SEQ ID NO: 1016550 - RNA, 24 nt, Human
ccacacgcauguccaacccagaca

SEQ ID NO: 1016551 - RNA, 22 nt, Human
ccaggggcuggcugccucaugg

SEQ ID NO: 1016552 - RNA, 19 nt, Human
cccacacacagcaucgggc

SEQ ID NO: 1016553 - RNA, 22 nt, Human
cccagaggugcccaauggcugg

SEQ ID NO: 1016554 - RNA, 19 nt, Human
ccccaacggcgcacacgcu

SEQ ID NO: 1016555 - RNA, 23 nt, Human
ccccaacggcgcacacgcuucug

SEQ ID NO: 1016556 - RNA, 21 nt, Human
cccggcgcugcggcuccuccc

SEQ ID NO: 1016557 - RNA, 21 nt, Human
cccgggcggggucgcccggcg

SEQ ID NO: 1016558 - RNA, 23 nt, Human
cccugccaggggcuggcugccuc

SEQ ID NO: 1016559 - RNA, 23 nt, Human
ccugcagguuugcucgcuuggcu

SEQ ID NO: 1016560 - RNA, 19 nt, Human
ccugccccacacacagcau

SEQ ID NO: 1016561 - RNA, 20 nt, Human
cgcauguccaacccagacaa

SEQ ID NO: 1016562 - RNA, 24 nt, Human
cggaagccaccuucacuguucagu

SEQ ID NO: 1016563 - RNA, 19 nt, Human
cggcaaaaaauguacaaac

SEQ ID NO: 1016564 - RNA, 22 nt, Human
cggcaaaaaauguacaaaccag

SEQ ID NO: 1016565 - RNA, 21 nt, Human
cggcgacugcagcggccgagg

SEQ ID NO: 1016566 - RNA, 20 nt, Human
cucagcccggaaccuuggcc

SEQ ID NO: 1016567 - RNA, 21 nt, Human
cucaugguccccuccccuucc

SEQ ID NO: 1016568 - RNA, 18 nt, Human
cucccggccugcggcggc

SEQ ID NO: 1016569 - RNA, 19 nt, Human
cuccgcaccaaggauccua

SEQ ID NO: 1016570 - RNA, 19 nt, Human
cucugcaggaggccacggc

SEQ ID NO: 1016571 - RNA, 24 nt, Human
cugaagcccacacgcauguccaac

SEQ ID NO: 1016572 - RNA, 22 nt, Human
cuggaacaaaaaaaaaaaauca

SEQ ID NO: 1016573 - RNA, 18 nt, Human
gaacaaucucggaaacug

SEQ ID NO: 1016574 - RNA, 20 nt, Human
gagaagaaaacguaaaagcc

SEQ ID NO: 1016575 - RNA, 23 nt, Human
gagggcaacgaagggccgcacag

SEQ ID NO: 1016576 - RNA, 21 nt, Human
gaguggcggggucagcaggag

SEQ ID NO: 1016577 - RNA, 20 nt, Human
gcacagucgccccugccagg

SEQ ID NO: 1016578 - RNA, 21 nt, Human
gccaagcaaaugccucagccc

SEQ ID NO: 1016579 - RNA, 22 nt, Human
gccauccuggccauucccgacu

SEQ ID NO: 1016580 - RNA, 20 nt, Human
gccaucugugacuauaaaua

SEQ ID NO: 1016581 - RNA, 31 nt, Human
gcgcgcacacgcacagacacgcacacacaca

SEQ ID NO: 1016582 - RNA, 23 nt, Human
gcggcggcggcggcgacugcagc

SEQ ID NO: 1016583 - RNA, 18 nt, Human
gcggcggcggcggcggcg

SEQ ID NO: 1016584 - RNA, 22 nt, Human
gcggcggcggcggcggcgacug

SEQ ID NO: 1016585 - RNA, 18 nt, Human
gcuccucccggccugcgg

SEQ ID NO: 1016586 - RNA, 20 nt, Human
gcugcggcuccucccggccu

SEQ ID NO: 1016587 - RNA, 24 nt, Human
ggaaacagcagcucaggacccagg

SEQ ID NO: 1016588 - RNA, 21 nt, Human
ggaacaaaaaaaaaaaaucag

SEQ ID NO: 1016589 - RNA, 19 nt, Human
ggaagucugugagcaaguu

SEQ ID NO: 1016590 - RNA, 23 nt, Human
ggacccaggauuugaauaaccca

SEQ ID NO: 1016591 - RNA, 23 nt, Human
ggagcccccugaaaugacugcuu

SEQ ID NO: 1016592 - RNA, 21 nt, Human
ggccugcggcggcggcggcgg

SEQ ID NO: 1016593 - RNA, 25 nt, Human
ggcggcggcggcgacugcagcggcc

SEQ ID NO: 1016594 - RNA, 20 nt, Human
guccggcaaaaaauguacaa

SEQ ID NO: 1016595 - RNA, 22 nt, Human
gugaccaaguccacuuccaaac

SEQ ID NO: 1016596 - RNA, 22 nt, Human
guggcucagguaggucccuuug

SEQ ID NO: 1016597 - RNA, 28 nt, Human
uaaccaaaaacuccaacaagagggcgcc

SEQ ID NO: 1016598 - RNA, 22 nt, Human
uacagaguaauuaaaaacaaaa

SEQ ID NO: 1016599 - RNA, 21 nt, Human
uaggugccauuuauacacugc

SEQ ID NO: 1016600 - RNA, 21 nt, Human
ucacuggauucacuguuuuuc

SEQ ID NO: 1016601 - RNA, 18 nt, Human
ucagugcacagaucuuuu

SEQ ID NO: 1016602 - RNA, 19 nt, Human
uccaacccagacaacaaug

SEQ ID NO: 1016603 - RNA, 18 nt, Human
ucccaggagggagacgcc

SEQ ID NO: 1016604 - RNA, 23 nt, Human
ucccucuggcugugacacagcuc

SEQ ID NO: 1016605 - RNA, 21 nt, Human
ucccugaaacgucgguuucua

SEQ ID NO: 1016606 - RNA, 21 nt, Human
ucucuuaguguggagggcaag

SEQ ID NO: 1016607 - RNA, 19 nt, Human
ucugcggugaccaagucca

SEQ ID NO: 1016608 - RNA, 18 nt, Human
ucuuaaggugcauacugu

SEQ ID NO: 1016609 - RNA, 20 nt, Human
ugaaaagucaaguauacuug

SEQ ID NO: 1016610 - RNA, 23 nt, Human
ugaaagcaggagggcaacgaagg

SEQ ID NO: 1016611 - RNA, 22 nt, Human
ugacacacaugcacacacgcgg

SEQ ID NO: 1016612 - RNA, 18 nt, Human
ugacacagcucuuccccc

SEQ ID NO: 1016613 - RNA, 22 nt, Human
ugagagccucuuccucugccau

SEQ ID NO: 1016614 - RNA, 20 nt, Human
ugauuggaaacagcagcuca

SEQ ID NO: 1016615 - RNA, 19 nt, Human
ugauuugcacacacuugcc

SEQ ID NO: 1016616 - RNA, 22 nt, Human
ugcaaacgaauaugcagaacaa

SEQ ID NO: 1016617 - RNA, 18 nt, Human
uggagaagaaaacguaaa

SEQ ID NO: 1016618 - RNA, 18 nt, Human
uggagagcggggcggugc

SEQ ID NO: 1016619 - RNA, 22 nt, Human
uggcaauuuugacacacaugca

SEQ ID NO: 1016620 - RNA, 20 nt, Human
uggccauucccgacuggagc

SEQ ID NO: 1016621 - RNA, 18 nt, Human
uggcucagguaggucccu

SEQ ID NO: 1016622 - RNA, 22 nt, Human
uggcuggaacaaaaaaaaaaaa

SEQ ID NO: 1016623 - RNA, 24 nt, Human
ugugauccggggagugcacugcug

SEQ ID NO: 1016624 - RNA, 20 nt, Human
ugugcaaacgaauaugcaga

SEQ ID NO: 1016625 - RNA, 24 nt, Human
ugugcaaacgaauaugcagaacaa

SEQ ID NO: 1016626 - RNA, 22 nt, Human
uuaaaaacaaaaaacaguucac

SEQ ID NO: 1016627 - RNA, 19 nt, Human
uugcugagagggucaaagg

SEQ ID NO: 1016628 - RNA, 24 nt, Human
uuucuauguaaacgcccugcugug

SEQ ID NO: 1016629 - RNA, 22 nt, Human
uuugcaucagcagugguagaag

SEQ ID NO: 1016630 - RNA, 20 nt, Human
aaaaacauaaaacagacaca

SEQ ID NO: 1016631 - RNA, 21 nt, Human
aaaaacauaaaacagacacaa

SEQ ID NO: 1016632 - RNA, 21 nt, Human
aaagaggcugacugggccccc

SEQ ID NO: 1016633 - RNA, 19 nt, Human
acaggcccagacacagacc

SEQ ID NO: 1016634 - RNA, 21 nt, Human
agaaguugguggggagggggg

SEQ ID NO: 1016635 - RNA, 23 nt, Human
agaaguugguggggagggggggu

SEQ ID NO: 1016636 - RNA, 18 nt, Human
aguuaggaguagccuggc

SEQ ID NO: 1016637 - RNA, 19 nt, Human
auggcagugggccaagccu

SEQ ID NO: 1016638 - RNA, 19 nt, Human
cacagcacacagacacggg

SEQ ID NO: 1016639 - RNA, 19 nt, Human
caccuauccaccaccaccc

SEQ ID NO: 1016640 - RNA, 24 nt, Human
caccuauccaccaccacccagagc

SEQ ID NO: 1016641 - RNA, 23 nt, Human
cacugccccagccaugggacagg

SEQ ID NO: 1016642 - RNA, 19 nt, Human
caggucccugacaccaagg

SEQ ID NO: 1016643 - RNA, 19 nt, Human
ccaccacccagagcaggcc

SEQ ID NO: 1016644 - RNA, 23 nt, Human
ccacccagagcaggccagggcag

SEQ ID NO: 1016645 - RNA, 20 nt, Human
cccagugugcuuucccacgg

SEQ ID NO: 1016646 - RNA, 23 nt, Human
ccccccgucgccucccacaagag

SEQ ID NO: 1016647 - RNA, 23 nt, Human
ccccgucgccucccacaagagca

SEQ ID NO: 1016648 - RNA, 28 nt, Human
ccccgugccugcucccgccugccccccc

SEQ ID NO: 1016649 - RNA, 20 nt, Human
ccccuguggcagcaucaccc

SEQ ID NO: 1016650 - RNA, 21 nt, Human
cccgccgauggguccacacca

SEQ ID NO: 1016651 - RNA, 21 nt, Human
ccggccacagcuggcuggcug

SEQ ID NO: 1016652 - RNA, 20 nt, Human
ccgugccugcucccgccugc

SEQ ID NO: 1016653 - RNA, 24 nt, Human
ccgugccugcucccgccugccccc

SEQ ID NO: 1016654 - RNA, 23 nt, Human
ccuauccaccaccacccagagca

SEQ ID NO: 1016655 - RNA, 25 nt, Human
ccucccacaagagcauaaagcaaag

SEQ ID NO: 1016656 - RNA, 27 nt, Human
ccucccacaagagcauaaagcaaaggu

SEQ ID NO: 1016657 - RNA, 22 nt, Human
ccuuggggugggguucuccagu

SEQ ID NO: 1016658 - RNA, 22 nt, Human
cgccugcccccccgucgccucc

SEQ ID NO: 1016659 - RNA, 19 nt, Human
cggggcugcggacguggca

SEQ ID NO: 1016660 - RNA, 22 nt, Human
cuccccagugugcuuucccacg

SEQ ID NO: 1016661 - RNA, 19 nt, Human
cucccgccugcccccccgu

SEQ ID NO: 1016662 - RNA, 21 nt, Human
cugcucccgccugcccccccg

SEQ ID NO: 1016663 - RNA, 25 nt, Human
cuguccaccuauccaccaccaccca

SEQ ID NO: 1016664 - RNA, 21 nt, Human
gaguagccuggcgggggacac

SEQ ID NO: 1016665 - RNA, 23 nt, Human
gccugagggcuggggagggggcu

SEQ ID NO: 1016666 - RNA, 22 nt, Human
gccugcucccgccugccccccc

SEQ ID NO: 1016667 - RNA, 21 nt, Human
ggacaggcccagacacagacc

SEQ ID NO: 1016668 - RNA, 18 nt, Human
ggcagagaaguugguggg

SEQ ID NO: 1016669 - RNA, 20 nt, Human
ggcagagaaguuggugggga

SEQ ID NO: 1016670 - RNA, 20 nt, Human
ggcagggagggccugagggc

SEQ ID NO: 1016671 - RNA, 23 nt, Human
ggcagggagggccugagggcugg

SEQ ID NO: 1016672 - RNA, 23 nt, Human
ggcuggggagggggcucugggug

SEQ ID NO: 1016673 - RNA, 21 nt, Human
gggagggccugagggcugggg

SEQ ID NO: 1016674 - RNA, 21 nt, Human
gggcccccggccacagcuggc

SEQ ID NO: 1016675 - RNA, 22 nt, Human
gggcccccggccacaggacccu

SEQ ID NO: 1016676 - RNA, 18 nt, Human
gggcccccucacugcccu

SEQ ID NO: 1016677 - RNA, 23 nt, Human
gggcuggggagggggcucugggu

SEQ ID NO: 1016678 - RNA, 23 nt, Human
ggggagggggggugcgcuguggg

SEQ ID NO: 1016679 - RNA, 26 nt, Human
ggggggugcgcuguggggucgagggc

SEQ ID NO: 1016680 - RNA, 19 nt, Human
gggguccugguccccgugg

SEQ ID NO: 1016681 - RNA, 20 nt, Human
ggugccucuguccaucucug

SEQ ID NO: 1016682 - RNA, 20 nt, Human
ggugcugggugauggcagug

SEQ ID NO: 1016683 - RNA, 20 nt, Human
guagccuggcgggggacacu

SEQ ID NO: 1016684 - RNA, 21 nt, Human
gucccugacaccaagggaagc

SEQ ID NO: 1016685 - RNA, 22 nt, Human
uaaaacagacacaacgcaagca

SEQ ID NO: 1016686 - RNA, 24 nt, Human
uaaaacagacacaacgcaagcaga

SEQ ID NO: 1016687 - RNA, 18 nt, Human
uacaagcuuccagcgggg

SEQ ID NO: 1016688 - RNA, 20 nt, Human
uauccaccaccacccagagc

SEQ ID NO: 1016689 - RNA, 23 nt, Human
uccacaccaggcugggguggccu

SEQ ID NO: 1016690 - RNA, 25 nt, Human
ucccagugagccgacuuccccaugg

SEQ ID NO: 1016691 - RNA, 21 nt, Human
uccccagugugcuuucccacg

SEQ ID NO: 1016692 - RNA, 18 nt, Human
uccccaugggcagaugag

SEQ ID NO: 1016693 - RNA, 23 nt, Human
ucccuggggcagagaaguuggug

SEQ ID NO: 1016694 - RNA, 25 nt, Human
ucccuggggcagagaaguugguggg

SEQ ID NO: 1016695 - RNA, 22 nt, Human
uccguaaggggaccauuggggg

SEQ ID NO: 1016696 - RNA, 18 nt, Human
ucuguccaccuauccacc

SEQ ID NO: 1016697 - RNA, 18 nt, Human
ucuguccaucucugggac

SEQ ID NO: 1016698 - RNA, 20 nt, Human
ugacaccaagggaagcacug

SEQ ID NO: 1016699 - RNA, 22 nt, Human
ugagggcuggggagggggcucu

SEQ ID NO: 1016700 - RNA, 20 nt, Human
ugccaagcuacaagcuucca

SEQ ID NO: 1016701 - RNA, 19 nt, Human
ugcugggugauggcagugg

SEQ ID NO: 1016702 - RNA, 23 nt, Human
uggaggcguggcacucucucccg

SEQ ID NO: 1016703 - RNA, 25 nt, Human
uggcaccauggcggauguguggcag

SEQ ID NO: 1016704 - RNA, 21 nt, Human
uggcagggagggccugagggc

SEQ ID NO: 1016705 - RNA, 22 nt, Human
uggcaugccuuggggugggguu

SEQ ID NO: 1016706 - RNA, 18 nt, Human
uggcuggcuggccgucug

SEQ ID NO: 1016707 - RNA, 21 nt, Human
ugggcagaugaguggacgggc

SEQ ID NO: 1016708 - RNA, 28 nt, Human
uggggagggggggugcgcuguggggucc

SEQ ID NO: 1016709 - RNA, 25 nt, Human
uggggcagagaaguugguggggagg

SEQ ID NO: 1016710 - RNA, 19 nt, Human
ugggggcccugggugccuc

SEQ ID NO: 1016711 - RNA, 19 nt, Human
ugggguggccucggguccc

SEQ ID NO: 1016712 - RNA, 23 nt, Human
ugggguggccucgggucccuggg

SEQ ID NO: 1016713 - RNA, 18 nt, Human
ugguggggagggggggug

SEQ ID NO: 1016714 - RNA, 29 nt, Human
ugguggggagggggggugcgcuguggggu

SEQ ID NO: 1016715 - RNA, 20 nt, Human
uugggggcuggccuggcggu

SEQ ID NO: 1016716 - RNA, 23 nt, Human
uuuggcagggagggccugagggc

SEQ ID NO: 1016717 - RNA, 20 nt, Human
aaagaaaaacaguuaaaagg

SEQ ID NO: 1016718 - RNA, 20 nt, Human
aaccacggagacccaacucg

SEQ ID NO: 1016719 - RNA, 27 nt, Human
aaccagugccagggcccaagagaccca

SEQ ID NO: 1016720 - RNA, 23 nt, Human
aagaaaaugccagugugcaacug

SEQ ID NO: 1016721 - RNA, 21 nt, Human
accaggaagggggagccggcc

SEQ ID NO: 1016722 - RNA, 25 nt, Human
acugggugacuaaagaccaaagaaa

SEQ ID NO: 1016723 - RNA, 21 nt, Human
agaagggagaccaggaagggg

SEQ ID NO: 1016724 - RNA, 21 nt, Human
agaccaggaagggggagccgg

SEQ ID NO: 1016725 - RNA, 19 nt, Human
agccggccugaaccacgga

SEQ ID NO: 1016726 - RNA, 23 nt, Human
agggagaccaggaagggggagcc

SEQ ID NO: 1016727 - RNA, 23 nt, Human
caacugggugacuaaagaccaaa

SEQ ID NO: 1016728 - RNA, 18 nt, Human
cagcgggagaagggagac

SEQ ID NO: 1016729 - RNA, 28 nt, Human
ccaaagguggcagcgacuuguccucccc

SEQ ID NO: 1016730 - RNA, 19 nt, Human
ccagugugcaacuggguga

SEQ ID NO: 1016731 - RNA, 20 nt, Human
ccaguuaucagaggugacug

SEQ ID NO: 1016732 - RNA, 24 nt, Human
cggccggcagcugacggcaggaaa

SEQ ID NO: 1016733 - RNA, 25 nt, Human
gaagacaaucuccucccgauaaacc

SEQ ID NO: 1016734 - RNA, 19 nt, Human
gaccaaagaaaaacaguua

SEQ ID NO: 1016735 - RNA, 24 nt, Human
gcccuggaagacaaucuccucccg

SEQ ID NO: 1016736 - RNA, 19 nt, Human
ggaagggggagccggccug

SEQ ID NO: 1016737 - RNA, 24 nt, Human
ggcaggaaacggaccgucccaggg

SEQ ID NO: 1016738 - RNA, 23 nt, Human
ggugacuaaagaccaaagaaaaa

SEQ ID NO: 1016739 - RNA, 21 nt, Human
uaacuucucaccugaaaucuc

SEQ ID NO: 1016740 - RNA, 20 nt, Human
uacuugcucucugucucagg

SEQ ID NO: 1016741 - RNA, 24 nt, Human
uagcccuaauuaaacacaaacaaa

SEQ ID NO: 1016742 - RNA, 18 nt, Human
uagcccuggaagacaauc

SEQ ID NO: 1016743 - RNA, 19 nt, Human
ucuucugccacugccuuga

SEQ ID NO: 1016744 - RNA, 20 nt, Human
ucuucugccacugccuugag

SEQ ID NO: 1016745 - RNA, 24 nt, Human
ugacuaaagaccaaagaaaaacag

SEQ ID NO: 1016746 - RNA, 18 nt, Human
uugcagcaagaaaaugcc

SEQ ID NO: 1016747 - RNA, 25 nt, Human
aaaucaccccaagaaaagaacaugu

SEQ ID NO: 1016748 - RNA, 23 nt, Human
aagaaaccuaggcaggcaguggg

SEQ ID NO: 1016749 - RNA, 24 nt, Human
aagcaacacaggcaagaacaaacu

SEQ ID NO: 1016750 - RNA, 25 nt, Human
aagcaugucucuagucaaguguaua

SEQ ID NO: 1016751 - RNA, 21 nt, Human
aagccaaagacagagacagaa

SEQ ID NO: 1016752 - RNA, 27 nt, Human
aaucuuuuaaagucagauuucuuguuc

SEQ ID NO: 1016753 - RNA, 21 nt, Human
acaccaggaauggagaagcca

SEQ ID NO: 1016754 - RNA, 22 nt, Human
acauacacucucucugauggcu

SEQ ID NO: 1016755 - RNA, 21 nt, Human
acccgcagcggccccucagcu

SEQ ID NO: 1016756 - RNA, 19 nt, Human
acccggcccugccuucccc

SEQ ID NO: 1016757 - RNA, 21 nt, Human
acuggcacuuucugaagcucc

SEQ ID NO: 1016758 - RNA, 25 nt, Human
agacagagacagaacuuuggcagga

SEQ ID NO: 1016759 - RNA, 21 nt, Human
agagacagaacuuuggcagga

SEQ ID NO: 1016760 - RNA, 19 nt, Human
agaggugugugaacagauc

SEQ ID NO: 1016761 - RNA, 20 nt, Human
agcaaaaaaauggguccuuu

SEQ ID NO: 1016762 - RNA, 23 nt, Human
aggaagaagcagaggaaacaaga

SEQ ID NO: 1016763 - RNA, 21 nt, Human
aggcagucuugaguuaccaug

SEQ ID NO: 1016764 - RNA, 24 nt, Human
aggccaagaguuucuccuccacag

SEQ ID NO: 1016765 - RNA, 23 nt, Human
agugaaggaugggcuaggugaug

SEQ ID NO: 1016766 - RNA, 33 nt, Human
aucucaccuacuuuaggagucccuccuccagga

SEQ ID NO: 1016767 - RNA, 21 nt, Human
augcugggcuccuuuccaggu

SEQ ID NO: 1016768 - RNA, 20 nt, Human
auggugcuuagcucucagug

SEQ ID NO: 1016769 - RNA, 21 nt, Human
cacaacuguggcuaaaccaga

SEQ ID NO: 1016770 - RNA, 20 nt, Human
caccaggaauggagaagccc

SEQ ID NO: 1016771 - RNA, 19 nt, Human
cacccgcagcggccccuca

SEQ ID NO: 1016772 - RNA, 22 nt, Human
caccuuauccuucccacugauc

SEQ ID NO: 1016773 - RNA, 23 nt, Human
cacuacugaggaccaagaguuca

SEQ ID NO: 1016774 - RNA, 25 nt, Human
cagaagccaaagacagagacagaac

SEQ ID NO: 1016775 - RNA, 21 nt, Human
cauagccuucccagaagcaaa

SEQ ID NO: 1016776 - RNA, 18 nt, Human
ccaccgcgcccggcucca

SEQ ID NO: 1016777 - RNA, 24 nt, Human
ccaccgcgcccggcuccaagcagg

SEQ ID NO: 1016778 - RNA, 18 nt, Human
ccccuuuccuaucuuguc

SEQ ID NO: 1016779 - RNA, 19 nt, Human
cccgcagcggccccucagc

SEQ ID NO: 1016780 - RNA, 18 nt, Human
cccggcccugccuucccc

SEQ ID NO: 1016781 - RNA, 18 nt, Human
ccgcacuccacccgcagc

SEQ ID NO: 1016782 - RNA, 21 nt, Human
ccgccgcacuccacccgcagc

SEQ ID NO: 1016783 - RNA, 21 nt, Human
ccgccgcugccaccgcgcccg

SEQ ID NO: 1016784 - RNA, 25 nt, Human
ccgcugccaccgcgcccggcuccaa

SEQ ID NO: 1016785 - RNA, 20 nt, Human
ccuagacaauacuuuggcuc

SEQ ID NO: 1016786 - RNA, 22 nt, Human
ccucaggauuccaagugggagu

SEQ ID NO: 1016787 - RNA, 19 nt, Human
cgacuccgccgcacuccac

SEQ ID NO: 1016788 - RNA, 23 nt, Human
cgccgcugccgccgcugccaccg

SEQ ID NO: 1016789 - RNA, 23 nt, Human
cgcgcccggcuccaagcaggccc

SEQ ID NO: 1016790 - RNA, 18 nt, Human
cggccgccggguccucuc

SEQ ID NO: 1016791 - RNA, 24 nt, Human
cuccuccacacuuucuguuggaca

SEQ ID NO: 1016792 - RNA, 19 nt, Human
cuuuggaacuggccugcag

SEQ ID NO: 1016793 - RNA, 18 nt, Human
cuuuguugcugaugauug

SEQ ID NO: 1016794 - RNA, 24 nt, Human
gaauaaaccaguuuccugcccaag

SEQ ID NO: 1016795 - RNA, 20 nt, Human
gacccggcccugccuucccc

SEQ ID NO: 1016796 - RNA, 21 nt, Human
gagacagaacuuuggcaggaa

SEQ ID NO: 1016797 - RNA, 20 nt, Human
gagacauaaucuacuaucaa

SEQ ID NO: 1016798 - RNA, 21 nt, Human
gagcaaaaaaauggguccuuu

SEQ ID NO: 1016799 - RNA, 23 nt, Human
gagcacuugauaggccaagaguu

SEQ ID NO: 1016800 - RNA, 19 nt, Human
gagcagacucagaugcucc

SEQ ID NO: 1016801 - RNA, 24 nt, Human
gagcauauacaagcaugaagccac

SEQ ID NO: 1016802 - RNA, 24 nt, Human
gagcugaaucucacauucaaguuc

SEQ ID NO: 1016803 - RNA, 22 nt, Human
gaggcgcggugcagcaggcggc

SEQ ID NO: 1016804 - RNA, 22 nt, Human
gaguauaggaauaaaccaguuu

SEQ ID NO: 1016805 - RNA, 19 nt, Human
gauucuggcuagaaagcuc

SEQ ID NO: 1016806 - RNA, 23 nt, Human
gcaacauaaacaguggcuuaagc

SEQ ID NO: 1016807 - RNA, 18 nt, Human
gcaggaacgcggcggagg

SEQ ID NO: 1016808 - RNA, 24 nt, Human
gccaccgcgcccggcuccaagcag

SEQ ID NO: 1016809 - RNA, 27 nt, Human
gccgacccggcccugccuuccccgcac

SEQ ID NO: 1016810 - RNA, 22 nt, Human
gcuagaaagcucuuaaucccaa

SEQ ID NO: 1016811 - RNA, 24 nt, Human
gcuuaguaucgcaccugcuuccgu

SEQ ID NO: 1016812 - RNA, 22 nt, Human
gcuuaugugugauagugacagc

SEQ ID NO: 1016813 - RNA, 18 nt, Human
ggaaagacagccacagag

SEQ ID NO: 1016814 - RNA, 25 nt, Human
ggagaagccaacuuacuggcuugga

SEQ ID NO: 1016815 - RNA, 19 nt, Human
ggcccugccuuccccgcac

SEQ ID NO: 1016816 - RNA, 27 nt, Human
gggauugaugaaagaaaagaguaacaa

SEQ ID NO: 1016817 - RNA, 23 nt, Human
gggcucacagaccuucucuugga

SEQ ID NO: 1016818 - RNA, 25 nt, Human
ggugcagcaggcggcggaucaagcu

SEQ ID NO: 1016819 - RNA, 19 nt, Human
gugaaauuccaaaacacaa

SEQ ID NO: 1016820 - RNA, 25 nt, Human
gugaaggaugggcuaggugaugagc

SEQ ID NO: 1016821 - RNA, 22 nt, Human
gugugugaacagaucuuggcug

SEQ ID NO: 1016822 - RNA, 22 nt, Human
uaaaagcaacacaggcaagaac

SEQ ID NO: 1016823 - RNA, 20 nt, Human
uaaaccaguuuccugcccaa

SEQ ID NO: 1016824 - RNA, 23 nt, Human
uaaaggaaacagaacuuaggccc

SEQ ID NO: 1016825 - RNA, 23 nt, Human
uaagagccuguuucaaaucaagc

SEQ ID NO: 1016826 - RNA, 19 nt, Human
uaagcaaacacucuuugga

SEQ ID NO: 1016827 - RNA, 22 nt, Human
uaguaagcaaagaguaaauccu

SEQ ID NO: 1016828 - RNA, 19 nt, Human
uauaggaauaaaccaguuu

SEQ ID NO: 1016829 - RNA, 22 nt, Human
uauaguuaaacauucucaugcc

SEQ ID NO: 1016830 - RNA, 21 nt, Human
uauucuugggcugaggcuuag

SEQ ID NO: 1016831 - RNA, 18 nt, Human
ucaacaccuggauccacu

SEQ ID NO: 1016832 - RNA, 22 nt, Human
ucaagaauaucagacaccagga

SEQ ID NO: 1016833 - RNA, 23 nt, Human
ucaaggugcaaacuagagcugaa

SEQ ID NO: 1016834 - RNA, 21 nt, Human
ucacaacuguggcuaaaccag

SEQ ID NO: 1016835 - RNA, 21 nt, Human
ucacuggggaaaucaaggugc

SEQ ID NO: 1016836 - RNA, 19 nt, Human
ucagggaaagacagccaca

SEQ ID NO: 1016837 - RNA, 21 nt, Human
ucagugaucuaggaauuuccu

SEQ ID NO: 1016838 - RNA, 25 nt, Human
uccacaggcggcgccgacccggccc

SEQ ID NO: 1016839 - RNA, 21 nt, Human
uccagaccuuguucuagaccu

SEQ ID NO: 1016840 - RNA, 20 nt, Human
ucccagaagcaaaguuagcu

SEQ ID NO: 1016841 - RNA, 20 nt, Human
ucccaggugauuaaaucacc

SEQ ID NO: 1016842 - RNA, 22 nt, Human
uccccgcacggacgggacucac

SEQ ID NO: 1016843 - RNA, 19 nt, Human
uccccuuuccuaucuuguc

SEQ ID NO: 1016844 - RNA, 18 nt, Human
ucccugcuggcuacacag

SEQ ID NO: 1016845 - RNA, 18 nt, Human
uccuccagcauacccugg

SEQ ID NO: 1016846 - RNA, 23 nt, Human
ucgccgccgcugccgccgcugcc

SEQ ID NO: 1016847 - RNA, 23 nt, Human
ucgcgaggccgacuccgccgcac

SEQ ID NO: 1016848 - RNA, 19 nt, Human
ucuaaacauuuccagaccu

SEQ ID NO: 1016849 - RNA, 19 nt, Human
ucucaggagcacuugauag

SEQ ID NO: 1016850 - RNA, 20 nt, Human
ucucuagcuuuuaaagcugg

SEQ ID NO: 1016851 - RNA, 22 nt, Human
ucucuagucaaguguauaggac

SEQ ID NO: 1016852 - RNA, 18 nt, Human
ucucuuggauuuugugcc

SEQ ID NO: 1016853 - RNA, 23 nt, Human
ugaaagaaaagaguaacaguuga

SEQ ID NO: 1016854 - RNA, 21 nt, Human
ugaagagcacguuucuggggu

SEQ ID NO: 1016855 - RNA, 21 nt, Human
ugaauuguguucacuuuuugc

SEQ ID NO: 1016856 - RNA, 20 nt, Human
ugagaacaagagaacuagag

SEQ ID NO: 1016857 - RNA, 21 nt, Human
ugagagaggaggcagcaacau

SEQ ID NO: 1016858 - RNA, 19 nt, Human
ugaugagcaaaaaaauggg

SEQ ID NO: 1016859 - RNA, 19 nt, Human
ugauuaaaucaccccaaga

SEQ ID NO: 1016860 - RNA, 19 nt, Human
ugcaaagccacuuaggagc

SEQ ID NO: 1016861 - RNA, 24 nt, Human
ugccuggacagaagccaaagacag

SEQ ID NO: 1016862 - RNA, 28 nt, Human
ugccuggacagaagccaaagacagagac

SEQ ID NO: 1016863 - RNA, 22 nt, Human
ugccuuaugaugggcuuccagu

SEQ ID NO: 1016864 - RNA, 18 nt, Human
uggcucaaggaagcugca

SEQ ID NO: 1016865 - RNA, 23 nt, Human
uggggcuaagaaaaccguuucca

SEQ ID NO: 1016866 - RNA, 23 nt, Human
ugggguuuccccuuuccuaucuu

SEQ ID NO: 1016867 - RNA, 24 nt, Human
ugggguuuccccuuuccuaucuug

SEQ ID NO: 1016868 - RNA, 23 nt, Human
uguaagacuucugcauucugucu

SEQ ID NO: 1016869 - RNA, 18 nt, Human
uguaucuuugaaaagaug

SEQ ID NO: 1016870 - RNA, 18 nt, Human
ugucaagaauaucagaca

SEQ ID NO: 1016871 - RNA, 22 nt, Human
ugucuggucaugacaagcaguu

SEQ ID NO: 1016872 - RNA, 24 nt, Human
ugugcagaugaaaauuugagaucc

SEQ ID NO: 1016873 - RNA, 22 nt, Human
uguuggacaccuuauccuuccc

SEQ ID NO: 1016874 - RNA, 23 nt, Human
uguuggauggggcucacagaccc

SEQ ID NO: 1016875 - RNA, 21 nt, Human
uucagacauagccuucccaga

SEQ ID NO: 1016876 - RNA, 23 nt, Human
uucauucguauuugaauuguguu

SEQ ID NO: 1016877 - RNA, 21 nt, Human
uugaaucuuaagcaaacacuc

SEQ ID NO: 1016878 - RNA, 28 nt, Human
aaaaaaaaaaugaaauggaaacugagaa

SEQ ID NO: 1016879 - RNA, 20 nt, Human
aaaaaacagcagaagcccug

SEQ ID NO: 1016880 - RNA, 21 nt, Human
aaaaaagaaacugucagagag

SEQ ID NO: 1016881 - RNA, 19 nt, Human
aaaaaaugacaaaaucacu

SEQ ID NO: 1016882 - RNA, 19 nt, Human
aaaaagaaacugucagaga

SEQ ID NO: 1016883 - RNA, 24 nt, Human
aaaucacuaagucaccaaaacuag

SEQ ID NO: 1016884 - RNA, 23 nt, Human
aacgaaaugcagggaaagguccg

SEQ ID NO: 1016885 - RNA, 24 nt, Human
aacgacuguucuguaaccccuaca

SEQ ID NO: 1016886 - RNA, 23 nt, Human
aacuuacugcuuuccagaaccuu

SEQ ID NO: 1016887 - RNA, 19 nt, Human
aagcagguucaucacucca

SEQ ID NO: 1016888 - RNA, 24 nt, Human
aagcagguucaucacuccaauuug

SEQ ID NO: 1016889 - RNA, 25 nt, Human
aagcagguucaucacuccaauuugu

SEQ ID NO: 1016890 - RNA, 18 nt, Human
aaggaucccaggccccag

SEQ ID NO: 1016891 - RNA, 19 nt, Human
aagugcaguaguacaugau

SEQ ID NO: 1016892 - RNA, 18 nt, Human
aaguugcagccggcuccg

SEQ ID NO: 1016893 - RNA, 19 nt, Human
aauggaaacugagaaaaga

SEQ ID NO: 1016894 - RNA, 26 nt, Human
acaaagaaauauauacaaaauguuca

SEQ ID NO: 1016895 - RNA, 18 nt, Human
acggcgggccgcgguagc

SEQ ID NO: 1016896 - RNA, 25 nt, Human
agaaaaaaaaaaaugaaauggaaga

SEQ ID NO: 1016897 - RNA, 26 nt, Human
aggaagaaaauacuccaacagaaugu

SEQ ID NO: 1016898 - RNA, 24 nt, Human
aggaaggaaaucaccuaaaaaaga

SEQ ID NO: 1016899 - RNA, 23 nt, Human
aggcacuaaaaacccaugcagcu

SEQ ID NO: 1016900 - RNA, 22 nt, Human
auauauguauauauauauauaa

SEQ ID NO: 1016901 - RNA, 19 nt, Human
auauguauauauauauaua

SEQ ID NO: 1016902 - RNA, 20 nt, Human
aucccaggccccagggcggg

SEQ ID NO: 1016903 - RNA, 26 nt, Human
aucccaggccccagggcggguagccc

SEQ ID NO: 1016904 - RNA, 27 nt, Human
aucgccgccgccgucuccuccuccccc

SEQ ID NO: 1016905 - RNA, 18 nt, Human
augcugugaugcacugga

SEQ ID NO: 1016906 - RNA, 21 nt, Human
caaaguaucucaauucagaag

SEQ ID NO: 1016907 - RNA, 24 nt, Human
caaggcuucuguuucaaaaaagcu

SEQ ID NO: 1016908 - RNA, 18 nt, Human
cagcccgggucaggucag

SEQ ID NO: 1016909 - RNA, 18 nt, Human
caggucagagggcagcga

SEQ ID NO: 1016910 - RNA, 24 nt, Human
cauacuaauccuuccauuuucaaa

SEQ ID NO: 1016911 - RNA, 22 nt, Human
cauucuaaaaaucuacacuugg

SEQ ID NO: 1016912 - RNA, 24 nt, Human
ccacaauuucaaauaaugcaggaa

SEQ ID NO: 1016913 - RNA, 27 nt, Human
ccaggccccagggcggguagccccggc

SEQ ID NO: 1016914 - RNA, 19 nt, Human
ccauuuauaaaaugacauu

SEQ ID NO: 1016915 - RNA, 22 nt, Human
ccccaaggaucccaggccccag

SEQ ID NO: 1016916 - RNA, 22 nt, Human
ccccagggcggguagccccggc

SEQ ID NO: 1016917 - RNA, 22 nt, Human
cccccgcugcagcccgggucag

SEQ ID NO: 1016918 - RNA, 21 nt, Human
cccccucccggcuuccaacuc

SEQ ID NO: 1016919 - RNA, 22 nt, Human
ccccggccgcuaagaguggcuc

SEQ ID NO: 1016920 - RNA, 19 nt, Human
cccgaggcugccagcagcu

SEQ ID NO: 1016921 - RNA, 24 nt, Human
cccggccgcuaagaguggcucacg

SEQ ID NO: 1016922 - RNA, 18 nt, Human
cccggcuuccaacucucc

SEQ ID NO: 1016923 - RNA, 19 nt, Human
ccgccgccgucuccuccuc

SEQ ID NO: 1016924 - RNA, 18 nt, Human
ccgccgcggcucccccuc

SEQ ID NO: 1016925 - RNA, 21 nt, Human
ccuaaguacaugcaauuacca

SEQ ID NO: 1016926 - RNA, 22 nt, Human
ccucccggcuuccaacucuccu

SEQ ID NO: 1016927 - RNA, 19 nt, Human
cgcgcgcacggccacgccg

SEQ ID NO: 1016928 - RNA, 25 nt, Human
cgcggcucccccucccggcuuccaa

SEQ ID NO: 1016929 - RNA, 21 nt, Human
cggcucccccucccggcuucc

SEQ ID NO: 1016930 - RNA, 18 nt, Human
cggcuccgggcucucacu

SEQ ID NO: 1016931 - RNA, 20 nt, Human
cuagaaaaaaaaaaaugaaa

SEQ ID NO: 1016932 - RNA, 22 nt, Human
cuaugccucaugagggccacgg

SEQ ID NO: 1016933 - RNA, 19 nt, Human
cucccgccucacuuggcua

SEQ ID NO: 1016934 - RNA, 20 nt, Human
cugcccgaggcugccagcag

SEQ ID NO: 1016935 - RNA, 19 nt, Human
cuguuucuccccagcccac

SEQ ID NO: 1016936 - RNA, 25 nt, Human
gaaaauacuccaacagaauguuaua

SEQ ID NO: 1016937 - RNA, 22 nt, Human
gaaccuaacaaagcagcuuuaa

SEQ ID NO: 1016938 - RNA, 20 nt, Human
gaaggaaaucaccuaaaaaa

SEQ ID NO: 1016939 - RNA, 28 nt, Human
gagccaaggcgcggggagggacgggaga

SEQ ID NO: 1016940 - RNA, 19 nt, Human
gcacuggaaaccaaagacc

SEQ ID NO: 1016941 - RNA, 21 nt, Human
gcaggaaggaaaucaccuaaa

SEQ ID NO: 1016942 - RNA, 18 nt, Human
gccagcagcuuggucagc

SEQ ID NO: 1016943 - RNA, 23 nt, Human
gccccaaggaucccaggccccag

SEQ ID NO: 1016944 - RNA, 23 nt, Human
gcccgaggcugccagcagcuugg

SEQ ID NO: 1016945 - RNA, 24 nt, Human
gcggccgggagaucgccgccgccg

SEQ ID NO: 1016946 - RNA, 23 nt, Human
ggaaaauacuuuuuaauuaugaa

SEQ ID NO: 1016947 - RNA, 21 nt, Human
ggcaggaaggaaaucaccuaa

SEQ ID NO: 1016948 - RNA, 23 nt, Human
ggccacggcgggccgcgguagcc

SEQ ID NO: 1016949 - RNA, 20 nt, Human
ggcuugcuccugcccuuagg

SEQ ID NO: 1016950 - RNA, 20 nt, Human
guacaugcaauuaccaugua

SEQ ID NO: 1016951 - RNA, 21 nt, Human
guauuaucuagcaacaaaaca

SEQ ID NO: 1016952 - RNA, 22 nt, Human
gucaccaaaacuagaaaaaaaa

SEQ ID NO: 1016953 - RNA, 19 nt, Human
uaaaaaacagcagaagccc

SEQ ID NO: 1016954 - RNA, 21 nt, Human
uaaaaaacagcagaagcccug

SEQ ID NO: 1016955 - RNA, 23 nt, Human
uaaaaacaagaccaugaaguuga

SEQ ID NO: 1016956 - RNA, 25 nt, Human
uaaaaauaaaaaacagcagaagccc

SEQ ID NO: 1016957 - RNA, 19 nt, Human
uaaagcaggaaauguggcc

SEQ ID NO: 1016958 - RNA, 20 nt, Human
uaaagcaggaaauguggccc

SEQ ID NO: 1016959 - RNA, 21 nt, Human
uaagacccacagucagcauua

SEQ ID NO: 1016960 - RNA, 25 nt, Human
uacaaaauguucaaguauuaguuaa

SEQ ID NO: 1016961 - RNA, 24 nt, Human
uacaacggagccuggcaggaagga

SEQ ID NO: 1016962 - RNA, 20 nt, Human
uacauacugaaauaaacaga

SEQ ID NO: 1016963 - RNA, 19 nt, Human
uacugugucacauucaugc

SEQ ID NO: 1016964 - RNA, 28 nt, Human
uacuuuugguuuauauauauauauauau

SEQ ID NO: 1016965 - RNA, 22 nt, Human
uagcacaaaguuagucauuuca

SEQ ID NO: 1016966 - RNA, 19 nt, Human
uauauauauauauauauau

SEQ ID NO: 1016967 - RNA, 18 nt, Human
uauauauauauguauaua

SEQ ID NO: 1016968 - RNA, 20 nt, Human
uauauauauguauauauaua

SEQ ID NO: 1016969 - RNA, 23 nt, Human
uauauauauguauauauauauau

SEQ ID NO: 1016970 - RNA, 18 nt, Human
uauauguauauauauaua

SEQ ID NO: 1016971 - RNA, 22 nt, Human
uauauguauauauauauauaau

SEQ ID NO: 1016972 - RNA, 23 nt, Human
uaucuagcaacaaaacauuuaca

SEQ ID NO: 1016973 - RNA, 18 nt, Human
uauguauauauauauaua

SEQ ID NO: 1016974 - RNA, 18 nt, Human
uauguauauauauauaua

SEQ ID NO: 1016975 - RNA, 27 nt, Human
ucacgggccccaaggaucccaggcccc

SEQ ID NO: 1016976 - RNA, 19 nt, Human
ucagagggcagcgaacaag

SEQ ID NO: 1016977 - RNA, 23 nt, Human
uccaauaucauguuagagaugaa

SEQ ID NO: 1016978 - RNA, 22 nt, Human
ucgucgccaaacugcugcuugc

SEQ ID NO: 1016979 - RNA, 19 nt, Human
ucuccuccucccccgcugc

SEQ ID NO: 1016980 - RNA, 18 nt, Human
ugaaagggguaaacgcgg

SEQ ID NO: 1016981 - RNA, 20 nt, Human
ugaaagggguaaacgcggau

SEQ ID NO: 1016982 - RNA, 23 nt, Human
ugacaaaaucacuaagucaccaa

SEQ ID NO: 1016983 - RNA, 24 nt, Human
ugacguaaggaagaaaauacucca

SEQ ID NO: 1016984 - RNA, 20 nt, Human
ugcccgaggcugccagcagc

SEQ ID NO: 1016985 - RNA, 22 nt, Human
uggaauuucaaaguaucucaau

SEQ ID NO: 1016986 - RNA, 19 nt, Human
uggccgaaacgaaaugcag

SEQ ID NO: 1016987 - RNA, 24 nt, Human
uggcucacgggccccaaggauccc

SEQ ID NO: 1016988 - RNA, 23 nt, Human
ugguguaagggaguugaaagggg

SEQ ID NO: 1016989 - RNA, 24 nt, Human
uguauauauauauauaauucagua

SEQ ID NO: 1016990 - RNA, 18 nt, Human
ugugcaagaacaaggauu

SEQ ID NO: 1016991 - RNA, 19 nt, Human
ugugcaagaacaaggauuc

SEQ ID NO: 1016992 - RNA, 19 nt, Human
uguuauaguuuuuagaaaa

SEQ ID NO: 1016993 - RNA, 18 nt, Human
uuaaaaauaaaaaacagc

SEQ ID NO: 1016994 - RNA, 24 nt, Human
uuaaaaauaggccauacuaauccu

SEQ ID NO: 1016995 - RNA, 25 nt, Human
uuaaaauaaagcaggaaauguggcc

SEQ ID NO: 1016996 - RNA, 22 nt, Human
uucaaauaaucuuuccaacuac

SEQ ID NO: 1016997 - RNA, 23 nt, Human
uucaaguauuaguuaaauuucaa

SEQ ID NO: 1016998 - RNA, 19 nt, Human
uucaucacuccaauuugug

SEQ ID NO: 1016999 - RNA, 18 nt, Human
uugcagccggcuccgggc

SEQ ID NO: 1017000 - RNA, 23 nt, Human
uugugcaagaacaaggauuccau

SEQ ID NO: 1017001 - RNA, 18 nt, Human
uuuaaagccccuauuaga

SEQ ID NO: 1017002 - RNA, 19 nt, Human
uuuauauauauauauauau

SEQ ID NO: 1017003 - RNA, 19 nt, Human
uuuauauauauauauauau

SEQ ID NO: 1017004 - RNA, 22 nt, Human
uuucaaauaaucuuuccaacua

SEQ ID NO: 1017005 - RNA, 22 nt, Human
uuuccagaaccuuuuaagaccc

SEQ ID NO: 1017006 - RNA, 21 nt, Human
uuugacuacuguuucucccca

SEQ ID NO: 1017007 - RNA, 30 nt, Human
uuugguuuauauauauauauauauauguaa

SEQ ID NO: 1017008 - RNA, 21 nt, Human
aacuggcaaauccugucccca

SEQ ID NO: 1017009 - RNA, 21 nt, Human
aauggcccccaguccaccuuu

SEQ ID NO: 1017010 - RNA, 20 nt, Human
accaggaacccccuggaaac

SEQ ID NO: 1017011 - RNA, 23 nt, Human
acccaaaccuuuucucuuuccca

SEQ ID NO: 1017012 - RNA, 18 nt, Human
accuuagcauccacuguc

SEQ ID NO: 1017013 - RNA, 19 nt, Human
agaaggccagggcugcaac

SEQ ID NO: 1017014 - RNA, 21 nt, Human
agacccugauccccagucccu

SEQ ID NO: 1017015 - RNA, 23 nt, Human
agccacagagccaucucacaggg

SEQ ID NO: 1017016 - RNA, 18 nt, Human
agccaccacguccucccc

SEQ ID NO: 1017017 - RNA, 23 nt, Human
agcccagaccaccgguguggccc

SEQ ID NO: 1017018 - RNA, 24 nt, Human
agcugagacuugggcaaaaaccug

SEQ ID NO: 1017019 - RNA, 18 nt, Human
aggagggugucacacaua

SEQ ID NO: 1017020 - RNA, 19 nt, Human
aggcaguggguugagggga

SEQ ID NO: 1017021 - RNA, 21 nt, Human
aggccgugugccucaguuucc

SEQ ID NO: 1017022 - RNA, 24 nt, Human
aguuucucugggccacccccaacc

SEQ ID NO: 1017023 - RNA, 18 nt, Human
auccccucagguauaaag

SEQ ID NO: 1017024 - RNA, 18 nt, Human
caagucgggauaccagcc

SEQ ID NO: 1017025 - RNA, 22 nt, Human
cacaggaagcaaauggccccca

SEQ ID NO: 1017026 - RNA, 20 nt, Human
cagagcccagacccugaucc

SEQ ID NO: 1017027 - RNA, 19 nt, Human
cagccacagagccaucuca

SEQ ID NO: 1017028 - RNA, 19 nt, Human
cagcuccaucuugucugaa

SEQ ID NO: 1017029 - RNA, 20 nt, Human
caggccgugugccucaguuu

SEQ ID NO: 1017030 - RNA, 20 nt, Human
cagugcugugacugucggcc

SEQ ID NO: 1017031 - RNA, 18 nt, Human
ccaaaccuuuucucuuuc

SEQ ID NO: 1017032 - RNA, 18 nt, Human
ccagagguggcggcugac

SEQ ID NO: 1017033 - RNA, 23 nt, Human
ccaugccugcaucccucucaccu

SEQ ID NO: 1017034 - RNA, 20 nt, Human
ccccaugggcaucccucucc

SEQ ID NO: 1017035 - RNA, 23 nt, Human
cccccaacccaugccugcauccc

SEQ ID NO: 1017036 - RNA, 24 nt, Human
ccccuaggaagucuuggaugaaca

SEQ ID NO: 1017037 - RNA, 23 nt, Human
ccccuggaaaccggacccgaccc

SEQ ID NO: 1017038 - RNA, 21 nt, Human
cccgacccgcgguccccagcc

SEQ ID NO: 1017039 - RNA, 19 nt, Human
ccucgagcaccaggaaccc

SEQ ID NO: 1017040 - RNA, 21 nt, Human
ccugaacgagugccaccggaa

SEQ ID NO: 1017041 - RNA, 18 nt, Human
ccuuggaggugaggcucc

SEQ ID NO: 1017042 - RNA, 24 nt, Human
cggcugacagagcccagacccuga

SEQ ID NO: 1017043 - RNA, 18 nt, Human
cuagaguucagccaccac

SEQ ID NO: 1017044 - RNA, 23 nt, Human
cucaccuuagcauccacugucau

SEQ ID NO: 1017045 - RNA, 18 nt, Human
cucugaauagucucggcc

SEQ ID NO: 1017046 - RNA, 22 nt, Human
gacaggguugggggugaagugg

SEQ ID NO: 1017047 - RNA, 18 nt, Human
gacccugauccccagucc

SEQ ID NO: 1017048 - RNA, 22 nt, Human
gagcccagacccugauccccag

SEQ ID NO: 1017049 - RNA, 20 nt, Human
gaggugaggcuccagguagg

SEQ ID NO: 1017050 - RNA, 19 nt, Human
gauaccagccacagagcca

SEQ ID NO: 1017051 - RNA, 19 nt, Human
gaugaacagaggcaguggg

SEQ ID NO: 1017052 - RNA, 23 nt, Human
gcaccacagugcagugcugugac

SEQ ID NO: 1017053 - RNA, 21 nt, Human
ggacccgacccgcggucccca

SEQ ID NO: 1017054 - RNA, 20 nt, Human
ggccacccccaacccaugcc

SEQ ID NO: 1017055 - RNA, 22 nt, Human
gggcaucccucuccugagucgg

SEQ ID NO: 1017056 - RNA, 23 nt, Human
ggggagguccucaggaggguguc

SEQ ID NO: 1017057 - RNA, 19 nt, Human
gucugaaguuaacaucauc

SEQ ID NO: 1017058 - RNA, 20 nt, Human
gugaaguggccaccaaaccc

SEQ ID NO: 1017059 - RNA, 22 nt, Human
uagggacagggccuggucugcu

SEQ ID NO: 1017060 - RNA, 18 nt, Human
ucagcgucuacaaacaug

SEQ ID NO: 1017061 - RNA, 20 nt, Human
uccccacgugcaaaugaaau

SEQ ID NO: 1017062 - RNA, 22 nt, Human
ucccccaugggcaucccucucc

SEQ ID NO: 1017063 - RNA, 18 nt, Human
uccucgccgccagccucg

SEQ ID NO: 1017064 - RNA, 18 nt, Human
uccugagucggcuaugug

SEQ ID NO: 1017065 - RNA, 21 nt, Human
uccuuggaggugaggcuccag

SEQ ID NO: 1017066 - RNA, 24 nt, Human
ucuacaaacaugauguucagugga

SEQ ID NO: 1017067 - RNA, 21 nt, Human
ucucugggccacccccaaccc

SEQ ID NO: 1017068 - RNA, 22 nt, Human
ucugggccacccccaacccaug

SEQ ID NO: 1017069 - RNA, 23 nt, Human
ucugucccugccaugaagggcca

SEQ ID NO: 1017070 - RNA, 18 nt, Human
ugacuagcaagcacggga

SEQ ID NO: 1017071 - RNA, 24 nt, Human
ugauccccagucccuuguggucuc

SEQ ID NO: 1017072 - RNA, 25 nt, Human
uggcagugagcauguguuggcuucg

SEQ ID NO: 1017073 - RNA, 25 nt, Human
uggccaagcugagacuugggcaaaa

SEQ ID NO: 1017074 - RNA, 20 nt, Human
uggcccccaguccaccuuuc

SEQ ID NO: 1017075 - RNA, 25 nt, Human
uggcggcugacagagcccagacccu

SEQ ID NO: 1017076 - RNA, 21 nt, Human
ugggcaucccucuccugaguc

SEQ ID NO: 1017077 - RNA, 23 nt, Human
uguccagccuccaauugaggagg

SEQ ID NO: 1017078 - RNA, 22 nt, Human
ugugugugaagccaggccaggc

SEQ ID NO: 1017079 - RNA, 22 nt, Human
uuccuuggaggugaggcuccaa

SEQ ID NO: 1017080 - RNA, 23 nt, Human
aaaaagggugaaucugaacagaa

SEQ ID NO: 1017081 - RNA, 24 nt, Human
aaaggcauugccacauucuucuca

SEQ ID NO: 1017082 - RNA, 19 nt, Human
aaagugcuggcauuacaga

SEQ ID NO: 1017083 - RNA, 24 nt, Human
aaagugcuggcauuacagauguga

SEQ ID NO: 1017084 - RNA, 19 nt, Human
aauagagaugggguuuugc

SEQ ID NO: 1017085 - RNA, 21 nt, Human
acaacauuugagcaacugcuu

SEQ ID NO: 1017086 - RNA, 21 nt, Human
acagcaauacccaaaaagacc

SEQ ID NO: 1017087 - RNA, 19 nt, Human
acagccucuucacucaggu

SEQ ID NO: 1017088 - RNA, 18 nt, Human
acccugggcugauggccc

SEQ ID NO: 1017089 - RNA, 19 nt, Human
acuccggaaaggcaccagc

SEQ ID NO: 1017090 - RNA, 20 nt, Human
acuccggaaaggcaccagcc

SEQ ID NO: 1017091 - RNA, 30 nt, Human
agaugggguuuugcuauguuggccaggcuu

SEQ ID NO: 1017092 - RNA, 19 nt, Human
agcaaccacuccggaaagg

SEQ ID NO: 1017093 - RNA, 20 nt, Human
agcaauucuccugcuucagc

SEQ ID NO: 1017094 - RNA, 23 nt, Human
agccaaaacucugaucucuucua

SEQ ID NO: 1017095 - RNA, 21 nt, Human
agcugggauuacaggggccug

SEQ ID NO: 1017096 - RNA, 21 nt, Human
aggaaagaaaaaauacucuag

SEQ ID NO: 1017097 - RNA, 18 nt, Human
aggcaagacuccagggug

SEQ ID NO: 1017098 - RNA, 23 nt, Human
aggcaagacuccaggguggggcc

SEQ ID NO: 1017099 - RNA, 24 nt, Human
aggugauccacccaccuuggccuc

SEQ ID NO: 1017100 - RNA, 24 nt, Human
agguuugaagauuaguuaaaagcu

SEQ ID NO: 1017101 - RNA, 19 nt, Human
agugguuccuuuuuuuccc

SEQ ID NO: 1017102 - RNA, 21 nt, Human
agugguuccuuuuuuucccau

SEQ ID NO: 1017103 - RNA, 23 nt, Human
auagaguuccucuccaguauaaa

SEQ ID NO: 1017104 - RNA, 22 nt, Human
auaggaaugaagagcaugaauu

SEQ ID NO: 1017105 - RNA, 18 nt, Human
auggcccaaggauaaggc

SEQ ID NO: 1017106 - RNA, 24 nt, Human
augggguuuugcuauguuggccag

SEQ ID NO: 1017107 - RNA, 20 nt, Human
auguuggccaggcuggucuc

SEQ ID NO: 1017108 - RNA, 22 nt, Human
auucugcucuggacauccucaa

SEQ ID NO: 1017109 - RNA, 21 nt, Human
auuuuaguaugaggccucugg

SEQ ID NO: 1017110 - RNA, 20 nt, Human
caaaaagggugaaucugaac

SEQ ID NO: 1017111 - RNA, 24 nt, Human
caaagugcuggcauuacagaugug

SEQ ID NO: 1017112 - RNA, 24 nt, Human
caccacacgcagcuaauuuuugua

SEQ ID NO: 1017113 - RNA, 22 nt, Human
cacccaccuuggccucccaaag

SEQ ID NO: 1017114 - RNA, 23 nt, Human
cacccaccuuggccucccaaagu

SEQ ID NO: 1017115 - RNA, 21 nt, Human
cacuccggaaaggcaccagcc

SEQ ID NO: 1017116 - RNA, 24 nt, Human
cacuccggaaaggcaccagccaaa

SEQ ID NO: 1017117 - RNA, 20 nt, Human
cacugagacauaggcagaau

SEQ ID NO: 1017118 - RNA, 21 nt, Human
cacugcaaucuucgccuccca

SEQ ID NO: 1017119 - RNA, 21 nt, Human
cagcaauacccaaaaagacca

SEQ ID NO: 1017120 - RNA, 27 nt, Human
cagcaauacccaaaaagaccagguuuc

SEQ ID NO: 1017121 - RNA, 18 nt, Human
cagccucuucacucaggu

SEQ ID NO: 1017122 - RNA, 19 nt, Human
caguaugaauuuucuuauc

SEQ ID NO: 1017123 - RNA, 20 nt, Human
caguaugaauuuucuuaugu

SEQ ID NO: 1017124 - RNA, 19 nt, Human
caucuuacauuuuaauguc

SEQ ID NO: 1017125 - RNA, 18 nt, Human
cauuacagaugugagcca

SEQ ID NO: 1017126 - RNA, 19 nt, Human
cauucauucaaaugaugac

SEQ ID NO: 1017127 - RNA, 18 nt, Human
ccaaaaagaccagguuuc

SEQ ID NO: 1017128 - RNA, 24 nt, Human
ccaaaacucugaucucuucuaauc

SEQ ID NO: 1017129 - RNA, 22 nt, Human
ccaaagugcuggcauuacagau

SEQ ID NO: 1017130 - RNA, 24 nt, Human
ccaaagugcuggcauuacagaugu

SEQ ID NO: 1017131 - RNA, 21 nt, Human
ccaaccaaagacaucucuugu

SEQ ID NO: 1017132 - RNA, 23 nt, Human
cccaauuagcugggauuacaggg

SEQ ID NO: 1017133 - RNA, 23 nt, Human
cccagguuugagcaauucuccug

SEQ ID NO: 1017134 - RNA, 22 nt, Human
ccggauaccaaccaaagacauc

SEQ ID NO: 1017135 - RNA, 21 nt, Human
ccucaggugauccacccaccu

SEQ ID NO: 1017136 - RNA, 24 nt, Human
ccucccagguuugagcaauucucc

SEQ ID NO: 1017137 - RNA, 21 nt, Human
ccugccaccacacgcagcuaa

SEQ ID NO: 1017138 - RNA, 24 nt, Human
ccugcccucaggugauccacccac

SEQ ID NO: 1017139 - RNA, 22 nt, Human
ccuuguggaauucgggaauugu

SEQ ID NO: 1017140 - RNA, 21 nt, Human
cuagcucuugggcaaaaggaa

SEQ ID NO: 1017141 - RNA, 24 nt, Human
cucaggugauccacccaccuuggc

SEQ ID NO: 1017142 - RNA, 20 nt, Human
cucagguuuucaucaugcau

SEQ ID NO: 1017143 - RNA, 21 nt, Human
cuccaguaugaauuuucuuau

SEQ ID NO: 1017144 - RNA, 24 nt, Human
cuccuuguuuuucauccaacuauc

SEQ ID NO: 1017145 - RNA, 24 nt, Human
cugcaaucuucgccucccagguuu

SEQ ID NO: 1017146 - RNA, 23 nt, Human
cugcuucagccucccaauuagcu

SEQ ID NO: 1017147 - RNA, 22 nt, Human
cuuguggucauaaacauucauu

SEQ ID NO: 1017148 - RNA, 28 nt, Human
gaaaggcaccagccaaaacuggagaccc

SEQ ID NO: 1017149 - RNA, 21 nt, Human
gaauacucuuuuuuuguuuug

SEQ ID NO: 1017150 - RNA, 25 nt, Human
gagcagauaauaauggcuuuuccac

SEQ ID NO: 1017151 - RNA, 22 nt, Human
gcaaucuucgccucccagguuu

SEQ ID NO: 1017152 - RNA, 18 nt, Human
gcagaaaaaguugaagac

SEQ ID NO: 1017153 - RNA, 20 nt, Human
gcagaaaaaguugaagacuu

SEQ ID NO: 1017154 - RNA, 19 nt, Human
gcccaaauaaagcccacac

SEQ ID NO: 1017155 - RNA, 18 nt, Human
gcuauguuggccaggcug

SEQ ID NO: 1017156 - RNA, 20 nt, Human
gcuauguuggccaggcuggu

SEQ ID NO: 1017157 - RNA, 21 nt, Human
gcucuuguugcuuuggcugga

SEQ ID NO: 1017158 - RNA, 23 nt, Human
ggaaaggcaccagccaaaacucu

SEQ ID NO: 1017159 - RNA, 21 nt, Human
ggauaaggcaggcaggagaga

SEQ ID NO: 1017160 - RNA, 20 nt, Human
gggaaacucucaaccggaua

SEQ ID NO: 1017161 - RNA, 24 nt, Human
gggaaacucucaaccggauaccaa

SEQ ID NO: 1017162 - RNA, 23 nt, Human
gggcaaaaggaaagaaaaaauac

SEQ ID NO: 1017163 - RNA, 22 nt, Human
gggguuuugcuauguuggccag

SEQ ID NO: 1017164 - RNA, 22 nt, Human
ggguuuugcuauguuggccagg

SEQ ID NO: 1017165 - RNA, 26 nt, Human
guaaaagaaauaaaaauauuuaaaac

SEQ ID NO: 1017166 - RNA, 18 nt, Human
guaaagguacuacaaccc

SEQ ID NO: 1017167 - RNA, 22 nt, Human
guccaguauuacauuuuacggg

SEQ ID NO: 1017168 - RNA, 19 nt, Human
gucucauuucucuugucac

SEQ ID NO: 1017169 - RNA, 24 nt, Human
gugauccacccaccuuggccuccc

SEQ ID NO: 1017170 - RNA, 21 nt, Human
gugugugcagaaaaaguugaa

SEQ ID NO: 1017171 - RNA, 23 nt, Human
uaaagcccacacguuuucccaca

SEQ ID NO: 1017172 - RNA, 24 nt, Human
uaacuguagcaggucacugaacaa

SEQ ID NO: 1017173 - RNA, 22 nt, Human
uaagauaaauauguauucuuag

SEQ ID NO: 1017174 - RNA, 20 nt, Human
uaauaccgaccuaacagaaa

SEQ ID NO: 1017175 - RNA, 24 nt, Human
uaauagagaugggguuuugcuaug

SEQ ID NO: 1017176 - RNA, 23 nt, Human
uaauuugaauguaauuauacauc

SEQ ID NO: 1017177 - RNA, 21 nt, Human
uacccaaaaagaccagguuuc

SEQ ID NO: 1017178 - RNA, 23 nt, Human
uacccaaaaagaccagguuucug

SEQ ID NO: 1017179 - RNA, 19 nt, Human
uaccuuagauauuucuacu

SEQ ID NO: 1017180 - RNA, 24 nt, Human
uagaaaggugugaggacugauuaa

SEQ ID NO: 1017181 - RNA, 23 nt, Human
uagagacagcaauacccaaaaag

SEQ ID NO: 1017182 - RNA, 22 nt, Human
uagagaugggguuuugcuaugu

SEQ ID NO: 1017183 - RNA, 22 nt, Human
uagcaaaguaaaagaaauaaaa

SEQ ID NO: 1017184 - RNA, 22 nt, Human
uauauauuacucugcucaaccc

SEQ ID NO: 1017185 - RNA, 19 nt, Human
uauguagcaaggugugagg

SEQ ID NO: 1017186 - RNA, 19 nt, Human
uauguuggccaggcugguc

SEQ ID NO: 1017187 - RNA, 22 nt, Human
uauguuggccaggcuggucuca

SEQ ID NO: 1017188 - RNA, 24 nt, Human
uauguuggccaggcuggucucaga

SEQ ID NO: 1017189 - RNA, 19 nt, Human
ucaccaguaugauuuaugu

SEQ ID NO: 1017190 - RNA, 19 nt, Human
ucacugcaaucuucgccuc

SEQ ID NO: 1017191 - RNA, 24 nt, Human
ucacugcaaucuucgccucccagg

SEQ ID NO: 1017192 - RNA, 25 nt, Human
ucacugcaaucuucgccucccaggu

SEQ ID NO: 1017193 - RNA, 18 nt, Human
ucagccucccaauuagcu

SEQ ID NO: 1017194 - RNA, 20 nt, Human
ucagccucccaauuagcugg

SEQ ID NO: 1017195 - RNA, 27 nt, Human
ucagcucacugcaaucuucgccuccca

SEQ ID NO: 1017196 - RNA, 21 nt, Human
ucaggaaacugggaaacucuc

SEQ ID NO: 1017197 - RNA, 19 nt, Human
uccagaccuccuccuuguu

SEQ ID NO: 1017198 - RNA, 18 nt, Human
ucccaaagugcuggcauu

SEQ ID NO: 1017199 - RNA, 21 nt, Human
ucccagguuugagcaauucuc

SEQ ID NO: 1017200 - RNA, 24 nt, Human
ucccagguuugagcaauucuccug

SEQ ID NO: 1017201 - RNA, 19 nt, Human
uccuauauaaaucccgcug

SEQ ID NO: 1017202 - RNA, 19 nt, Human
uccuccagagagaauucua

SEQ ID NO: 1017203 - RNA, 20 nt, Human
uccuuguggaauucgggaau

SEQ ID NO: 1017204 - RNA, 24 nt, Human
ucgugugugcagaaaaaguugaag

SEQ ID NO: 1017205 - RNA, 24 nt, Human
ucucaaccggauaccaaccaaaga

SEQ ID NO: 1017206 - RNA, 23 nt, Human
ucugcucuggacauccucaaaua

SEQ ID NO: 1017207 - RNA, 19 nt, Human
ucuuauguguagaaaggug

SEQ ID NO: 1017208 - RNA, 21 nt, Human
ugaagagcaugaauuugaguu

SEQ ID NO: 1017209 - RNA, 25 nt, Human
ugaaucugaacagaacugcagcugg

SEQ ID NO: 1017210 - RNA, 21 nt, Human
ugacaaccauuuaaaggcuuu

SEQ ID NO: 1017211 - RNA, 20 nt, Human
ugacccugggcugauggccc

SEQ ID NO: 1017212 - RNA, 20 nt, Human
ugaggcaagacuccagggug

SEQ ID NO: 1017213 - RNA, 23 nt, Human
ugaggccucugguauuuucuaag

SEQ ID NO: 1017214 - RNA, 24 nt, Human
ugauauacuacuaauucacuuuaa

SEQ ID NO: 1017215 - RNA, 24 nt, Human
ugauccacccaccuuggccuccca

SEQ ID NO: 1017216 - RNA, 22 nt, Human
ugccacauucuucacaacuaua

SEQ ID NO: 1017217 - RNA, 22 nt, Human
ugccacauucuucacaauugua

SEQ ID NO: 1017218 - RNA, 22 nt, Human
ugccacauuuuucacauuugua

SEQ ID NO: 1017219 - RNA, 18 nt, Human
ugccuaggugauugugag

SEQ ID NO: 1017220 - RNA, 24 nt, Human
ugcuauguuggccaggcuggucuc

SEQ ID NO: 1017221 - RNA, 22 nt, Human
ugcucuuguugcuuuggcugga

SEQ ID NO: 1017222 - RNA, 24 nt, Human
ugcuucagccucccaauuagcugg

SEQ ID NO: 1017223 - RNA, 18 nt, Human
ugcuucaugguuuuccuc

SEQ ID NO: 1017224 - RNA, 24 nt, Human
ugcuuuaucuauuuuucuaagggc

SEQ ID NO: 1017225 - RNA, 24 nt, Human
ugcuuuggcuggaguguaguggug

SEQ ID NO: 1017226 - RNA, 24 nt, Human
uggcauuacagaugugagccagca

SEQ ID NO: 1017227 - RNA, 26 nt, Human
uggcauuacagaugugagccagcaca

SEQ ID NO: 1017228 - RNA, 27 nt, Human
uggcauuacagaugugagccagcacaa

SEQ ID NO: 1017229 - RNA, 24 nt, Human
uggccaggcuggucucagacuccu

SEQ ID NO: 1017230 - RNA, 23 nt, Human
uggcuggaguguaguggugugau

SEQ ID NO: 1017231 - RNA, 22 nt, Human
ugggauuacaggggccugccac

SEQ ID NO: 1017232 - RNA, 24 nt, Human
ugggauuacaggggccugccacca

SEQ ID NO: 1017233 - RNA, 20 nt, Human
ugggcaaaaggaaagaaaaa

SEQ ID NO: 1017234 - RNA, 24 nt, Human
ugggguuuugcuauguuggccagg

SEQ ID NO: 1017235 - RNA, 24 nt, Human
uggugugauuucagcucacugcaa

SEQ ID NO: 1017236 - RNA, 20 nt, Human
uguaggguuucuuuccagua

SEQ ID NO: 1017237 - RNA, 23 nt, Human
uguaggguuucuuuccaguauga

SEQ ID NO: 1017238 - RNA, 19 nt, Human
uguauaguaagguaugagg

SEQ ID NO: 1017239 - RNA, 19 nt, Human
ugucaaaauuauugucaca

SEQ ID NO: 1017240 - RNA, 24 nt, Human
ugugauacaaguaaagguacuaca

SEQ ID NO: 1017241 - RNA, 22 nt, Human
ugugauauuuuucacauuucua

SEQ ID NO: 1017242 - RNA, 21 nt, Human
ugugcaguauccaggcauugc

SEQ ID NO: 1017243 - RNA, 19 nt, Human
uguguagaaaggugugagg

SEQ ID NO: 1017244 - RNA, 25 nt, Human
uguuagaaaguucgagguguuguca

SEQ ID NO: 1017245 - RNA, 18 nt, Human
uuaauagagaugggguuu

SEQ ID NO: 1017246 - RNA, 18 nt, Human
uuaauagagaugggguuu

SEQ ID NO: 1017247 - RNA, 18 nt, Human
uuaauagagaugggguuu

SEQ ID NO: 1017248 - RNA, 20 nt, Human
uuaauagagaugggguuuug

SEQ ID NO: 1017249 - RNA, 24 nt, Human
uuaauagagaugggguuuugcuau

SEQ ID NO: 1017250 - RNA, 23 nt, Human
uuaucuuauguuuagugagguuu

SEQ ID NO: 1017251 - RNA, 19 nt, Human
uucaguugcuagucuagac

SEQ ID NO: 1017252 - RNA, 21 nt, Human
uuccaguaugaauuuucuuau

SEQ ID NO: 1017253 - RNA, 21 nt, Human
uuccucuagugcaaaaugggu

SEQ ID NO: 1017254 - RNA, 24 nt, Human
uucucuaacaacacauuccuauau

SEQ ID NO: 1017255 - RNA, 18 nt, Human
uugagcaacugcuucaug

SEQ ID NO: 1017256 - RNA, 25 nt, Human
uugcucuuguugcuuuggggucggc

SEQ ID NO: 1017257 - RNA, 24 nt, Human
uugcuuuggcuggaguguaguggu

SEQ ID NO: 1017258 - RNA, 18 nt, Human
uuggcuggaguguagugg

SEQ ID NO: 1017259 - RNA, 20 nt, Human
uuucaccaguaugauuuaug

SEQ ID NO: 1017260 - RNA, 24 nt, Human
uuugagcaauucuccugcuucagc

SEQ ID NO: 1017261 - RNA, 25 nt, Human
uuugcuccagacaggugaucagaua

SEQ ID NO: 1017262 - RNA, 20 nt, Human
uuuguacaaucuuucugaag

SEQ ID NO: 1017263 - RNA, 24 nt, Human
uuuguaguuucucuccaguaugaa

SEQ ID NO: 1017264 - RNA, 19 nt, Human
uuuuccucuagugcaaaau

SEQ ID NO: 1017265 - RNA, 23 nt, Human
uuuugcuauguuggccaggcugg

SEQ ID NO: 1017266 - RNA, 24 nt, Human
uuuugcucuuguugcuuuggcugg

SEQ ID NO: 1017267 - RNA, 21 nt, Human
uuuuuaauagagaugggguuu

SEQ ID NO: 1017268 - RNA, 21 nt, Human
uuuuuaauagagaugggguuu

SEQ ID NO: 1017269 - RNA, 20 nt, Human
aaaaaaguacuugaagaaga

SEQ ID NO: 1017270 - RNA, 26 nt, Human
aaaaauaaaaaaguacuugaagaaga

SEQ ID NO: 1017271 - RNA, 23 nt, Human
aaacagaagaaaauguuuucuag

SEQ ID NO: 1017272 - RNA, 21 nt, Human
aaaguaaagaaaaaaaaagga

SEQ ID NO: 1017273 - RNA, 20 nt, Human
aaauacauaccugaccucaa

SEQ ID NO: 1017274 - RNA, 24 nt, Human
aagaaaaaaaaaggaaaccuacaa

SEQ ID NO: 1017275 - RNA, 22 nt, Human
aagacagcuuaacucaaagguc

SEQ ID NO: 1017276 - RNA, 19 nt, Human
aaguuacuccuacucuccc

SEQ ID NO: 1017277 - RNA, 24 nt, Human
acaaagauuagcaaacagaagaaa

SEQ ID NO: 1017278 - RNA, 22 nt, Human
acagaagaaaauguuuucuaga

SEQ ID NO: 1017279 - RNA, 22 nt, Human
accacaguuacauauuguagca

SEQ ID NO: 1017280 - RNA, 23 nt, Human
agaaaaaaaaaggaaaccuacaa

SEQ ID NO: 1017281 - RNA, 20 nt, Human
agaaauacauaccugaccuc

SEQ ID NO: 1017282 - RNA, 20 nt, Human
agaggcaggaaggcaugaau

SEQ ID NO: 1017283 - RNA, 20 nt, Human
aggaaaaagcaaguagggaa

SEQ ID NO: 1017284 - RNA, 19 nt, Human
aggcaauuaaccacaguua

SEQ ID NO: 1017285 - RNA, 23 nt, Human
agggaacaaaacugaugaaaagu

SEQ ID NO: 1017286 - RNA, 24 nt, Human
aguuuaaagaguagauggggaggg

SEQ ID NO: 1017287 - RNA, 23 nt, Human
cauccugcuuauaaagacagcuu

SEQ ID NO: 1017288 - RNA, 22 nt, Human
ccaccgugacuacuggcuccgg

SEQ ID NO: 1017289 - RNA, 23 nt, Human
ccauagccaagaggcaggaaggc

SEQ ID NO: 1017290 - RNA, 18 nt, Human
cccaaagagaagcuuguu

SEQ ID NO: 1017291 - RNA, 23 nt, Human
ccuacaauaaguugguauaaaag

SEQ ID NO: 1017292 - RNA, 24 nt, Human
ccuuaccuuccuaauaauggguaa

SEQ ID NO: 1017293 - RNA, 24 nt, Human
gagaugcauaacuaagaaaugaaa

SEQ ID NO: 1017294 - RNA, 23 nt, Human
gggccauagccaagaggcaggaa

SEQ ID NO: 1017295 - RNA, 19 nt, Human
gucuuuaaaaagcauggag

SEQ ID NO: 1017296 - RNA, 21 nt, Human
uaaguuacuccuacucuccca

SEQ ID NO: 1017297 - RNA, 19 nt, Human
uagauggggagggccauag

SEQ ID NO: 1017298 - RNA, 22 nt, Human
uagccaagaggcaggaaggcau

SEQ ID NO: 1017299 - RNA, 23 nt, Human
uauaaaaguauacagacacgcaa

SEQ ID NO: 1017300 - RNA, 24 nt, Human
uauguacaaaauacuaucuauaug

SEQ ID NO: 1017301 - RNA, 23 nt, Human
ucagugaugagauggauuucaaa

SEQ ID NO: 1017302 - RNA, 18 nt, Human
uccaaggaaaaagcaagu

SEQ ID NO: 1017303 - RNA, 20 nt, Human
ugaaauggaggaaguagaau

SEQ ID NO: 1017304 - RNA, 18 nt, Human
ugaccccaaagagaagcu

SEQ ID NO: 1017305 - RNA, 22 nt, Human
uggugaaauggaggaaguagaa

SEQ ID NO: 1017306 - RNA, 20 nt, Human
uuagcaaacagaagaaaaug

SEQ ID NO: 1017307 - RNA, 19 nt, Human
uucuagauagggaacaaaa

SEQ ID NO: 1017308 - RNA, 18 nt, Human
uuuuuuuuuuuuuuuuug

SEQ ID NO: 1017309 - RNA, 19 nt, Human
aaaaaaaccaggagagaua

SEQ ID NO: 1017310 - RNA, 27 nt, Human
aaaaaaccaggagagauagugggcacc

SEQ ID NO: 1017311 - RNA, 24 nt, Human
aaaaaaggaaaacuuaaauuaaaa

SEQ ID NO: 1017312 - RNA, 18 nt, Human
aaacaugcgcacaaacuu

SEQ ID NO: 1017313 - RNA, 21 nt, Human
aaagggacaaaaaaggccagg

SEQ ID NO: 1017314 - RNA, 18 nt, Human
aaccauuugaaaaacagu

SEQ ID NO: 1017315 - RNA, 24 nt, Human
aacuccaggugcaagaguugaaaa

SEQ ID NO: 1017316 - RNA, 21 nt, Human
aagcuccuccuccuuccccuc

SEQ ID NO: 1017317 - RNA, 18 nt, Human
aaguauauuugugcuaua

SEQ ID NO: 1017318 - RNA, 19 nt, Human
accccagccucaagggagc

SEQ ID NO: 1017319 - RNA, 21 nt, Human
acgcaaccccagccucaaggg

SEQ ID NO: 1017320 - RNA, 24 nt, Human
acgcaaccccagccucaagggagc

SEQ ID NO: 1017321 - RNA, 22 nt, Human
acucaagguagacuggcuccag

SEQ ID NO: 1017322 - RNA, 19 nt, Human
acucugcugccacccaaug

SEQ ID NO: 1017323 - RNA, 23 nt, Human
acugggguucaguagccucuuuu

SEQ ID NO: 1017324 - RNA, 18 nt, Human
agacgcaaccccagccuc

SEQ ID NO: 1017325 - RNA, 18 nt, Human
agagauuuuucugaccuu

SEQ ID NO: 1017326 - RNA, 21 nt, Human
agagucccuauugugucacag

SEQ ID NO: 1017327 - RNA, 22 nt, Human
agaguugaaaagcccaagggug

SEQ ID NO: 1017328 - RNA, 19 nt, Human
agcacucacucccucacca

SEQ ID NO: 1017329 - RNA, 22 nt, Human
agcacucacucccucaccauuu

SEQ ID NO: 1017330 - RNA, 22 nt, Human
agccaacagguucccaguuuca

SEQ ID NO: 1017331 - RNA, 22 nt, Human
aggaaggucauaggaagaggga

SEQ ID NO: 1017332 - RNA, 20 nt, Human
aggaggaggacaagucccaa

SEQ ID NO: 1017333 - RNA, 20 nt, Human
agggaacaaacacccagagc

SEQ ID NO: 1017334 - RNA, 19 nt, Human
agggacaaaaaaggccagg

SEQ ID NO: 1017335 - RNA, 19 nt, Human
agggagcugugagaaagcc

SEQ ID NO: 1017336 - RNA, 23 nt, Human
agguaguagauggcagagguggg

SEQ ID NO: 1017337 - RNA, 21 nt, Human
aggugaugcccauuuuacaga

SEQ ID NO: 1017338 - RNA, 21 nt, Human
caacagacgcaaccccagccu

SEQ ID NO: 1017339 - RNA, 19 nt, Human
caagacagagcuccagagg

SEQ ID NO: 1017340 - RNA, 22 nt, Human
cacccaggauccuccgcggcag

SEQ ID NO: 1017341 - RNA, 18 nt, Human
cacugguagggaacuggu

SEQ ID NO: 1017342 - RNA, 20 nt, Human
cagaaaagcccucugaggua

SEQ ID NO: 1017343 - RNA, 19 nt, Human
cagacgcaaccccagccuc

SEQ ID NO: 1017344 - RNA, 18 nt, Human
caguucuaagugcuucac

SEQ ID NO: 1017345 - RNA, 26 nt, Human
cauguucuuuuuggcuuucuggggcu

SEQ ID NO: 1017346 - RNA, 20 nt, Human
cauuuuacagauaaggacac

SEQ ID NO: 1017347 - RNA, 18 nt, Human
ccaggagagauaaaggga

SEQ ID NO: 1017348 - RNA, 24 nt, Human
cccagccucaagggagcgggagau

SEQ ID NO: 1017349 - RNA, 20 nt, Human
ccccaaaauguccaggagga

SEQ ID NO: 1017350 - RNA, 23 nt, Human
ccccaaaauguccaggaggagga

SEQ ID NO: 1017351 - RNA, 22 nt, Human
ccccacacccaauggcugccag

SEQ ID NO: 1017352 - RNA, 22 nt, Human
cccccaaaauguccaggaggag

SEQ ID NO: 1017353 - RNA, 23 nt, Human
cccccacacccaauggcugccag

SEQ ID NO: 1017354 - RNA, 20 nt, Human
ccccgcacacgcgccuccuc

SEQ ID NO: 1017355 - RNA, 22 nt, Human
ccccgcacacgcgccuccucgc

SEQ ID NO: 1017356 - RNA, 22 nt, Human
cccgcacacgcgccuccucgca

SEQ ID NO: 1017357 - RNA, 18 nt, Human
cccgcccccgagccuagc

SEQ ID NO: 1017358 - RNA, 25 nt, Human
cccucaccauuuucagcaccuaaaa

SEQ ID NO: 1017359 - RNA, 24 nt, Human
ccgcgucaacagacgcaaccccag

SEQ ID NO: 1017360 - RNA, 23 nt, Human
ccuccgcggcagcgccaggacuc

SEQ ID NO: 1017361 - RNA, 20 nt, Human
ccuccguguucccggcuggc

SEQ ID NO: 1017362 - RNA, 24 nt, Human
ccuccuccuuccccuccguguucc

SEQ ID NO: 1017363 - RNA, 19 nt, Human
cgacaagacagagcuccag

SEQ ID NO: 1017364 - RNA, 23 nt, Human
cgacaagacagagcuccagagga

SEQ ID NO: 1017365 - RNA, 20 nt, Human
cgagaaguuaaauguugcaa

SEQ ID NO: 1017366 - RNA, 21 nt, Human
cguuguacagcuucuccacuu

SEQ ID NO: 1017367 - RNA, 19 nt, Human
cugauggaauccagcugug

SEQ ID NO: 1017368 - RNA, 18 nt, Human
cugcacccaggauccucc

SEQ ID NO: 1017369 - RNA, 19 nt, Human
cuuaaauuaaaagcgauac

SEQ ID NO: 1017370 - RNA, 19 nt, Human
cuuccacccauggcugacu

SEQ ID NO: 1017371 - RNA, 22 nt, Human
cuucucugagcggcugcaccca

SEQ ID NO: 1017372 - RNA, 18 nt, Human
gaaaaacaugcgcacaaa

SEQ ID NO: 1017373 - RNA, 18 nt, Human
gaagcuucucugagcggc

SEQ ID NO: 1017374 - RNA, 23 nt, Human
gaagcuucucugagcggcugcac

SEQ ID NO: 1017375 - RNA, 23 nt, Human
gacaaaaaaggccaggcacuuaa

SEQ ID NO: 1017376 - RNA, 18 nt, Human
gagaaaaacuguaaaaaa

SEQ ID NO: 1017377 - RNA, 23 nt, Human
gagaaaaacuguaaaaaaggaaa

SEQ ID NO: 1017378 - RNA, 18 nt, Human
gagcggcugcacccagga

SEQ ID NO: 1017379 - RNA, 21 nt, Human
gcagaacuccaggugcaagag

SEQ ID NO: 1017380 - RNA, 19 nt, Human
gcagcaacacaggugacug

SEQ ID NO: 1017381 - RNA, 23 nt, Human
gcagcaacacaggugacugauuu

SEQ ID NO: 1017382 - RNA, 20 nt, Human
gcagggaacaaacacccaga

SEQ ID NO: 1017383 - RNA, 18 nt, Human
gcguuucuaccuuggccu

SEQ ID NO: 1017384 - RNA, 22 nt, Human
ggaagcacaagggagcugugag

SEQ ID NO: 1017385 - RNA, 24 nt, Human
ggccgcgucaacagacgcaacccc

SEQ ID NO: 1017386 - RNA, 20 nt, Human
guccaugcugacgagccccc

SEQ ID NO: 1017387 - RNA, 20 nt, Human
gugucaacucccaugaaaaa

SEQ ID NO: 1017388 - RNA, 19 nt, Human
uaaagggacaaaaaaggcc

SEQ ID NO: 1017389 - RNA, 22 nt, Human
uaaauuaaaagcgauacauugu

SEQ ID NO: 1017390 - RNA, 20 nt, Human
uaacagcaaucgucgaugaa

SEQ ID NO: 1017391 - RNA, 20 nt, Human
uaaccagcagaacuccaggu

SEQ ID NO: 1017392 - RNA, 24 nt, Human
uaagaaaaaaaccaggagagauaa

SEQ ID NO: 1017393 - RNA, 23 nt, Human
uaagaagaguaaagugcuggaga

SEQ ID NO: 1017394 - RNA, 18 nt, Human
uaagacuacuguguuuca

SEQ ID NO: 1017395 - RNA, 23 nt, Human
uaagcuccuccuccuuccccucc

SEQ ID NO: 1017396 - RNA, 19 nt, Human
uaaggacaccgaggcccug

SEQ ID NO: 1017397 - RNA, 25 nt, Human
uaaggacaccgaggcccugagagau

SEQ ID NO: 1017398 - RNA, 20 nt, Human
uacagauaaggacaccgagg

SEQ ID NO: 1017399 - RNA, 19 nt, Human
uaccuuggccugcagcaac

SEQ ID NO: 1017400 - RNA, 21 nt, Human
ucaccauuuucagcaccuaaa

SEQ ID NO: 1017401 - RNA, 20 nt, Human
ucacucccucaccauuuuca

SEQ ID NO: 1017402 - RNA, 25 nt, Human
ucaguagccucuuuuaagcuccucc

SEQ ID NO: 1017403 - RNA, 24 nt, Human
uccaacuuucaacauccgaguaac

SEQ ID NO: 1017404 - RNA, 24 nt, Human
ucccaguggucacuuccacacacc

SEQ ID NO: 1017405 - RNA, 19 nt, Human
ucccggcuggcagggcugu

SEQ ID NO: 1017406 - RNA, 18 nt, Human
ucccucaccauuuucagc

SEQ ID NO: 1017407 - RNA, 23 nt, Human
ucuaccuuggccugcagcaacac

SEQ ID NO: 1017408 - RNA, 22 nt, Human
ucucugagcggcugcacccagg

SEQ ID NO: 1017409 - RNA, 20 nt, Human
ugaaaaacaguguaaggccc

SEQ ID NO: 1017410 - RNA, 23 nt, Human
ugaaaaacaguguaaggccccaa

SEQ ID NO: 1017411 - RNA, 22 nt, Human
ugaaaagcccaagggugcagag

SEQ ID NO: 1017412 - RNA, 23 nt, Human
ugaauccugacguuguacagcuu

SEQ ID NO: 1017413 - RNA, 21 nt, Human
ugacaagacacugguagggaa

SEQ ID NO: 1017414 - RNA, 21 nt, Human
ugagaaagccucccuuccacc

SEQ ID NO: 1017415 - RNA, 19 nt, Human
ugagccacuuaguggcagg

SEQ ID NO: 1017416 - RNA, 23 nt, Human
ugauggaauccagcuguguuuug

SEQ ID NO: 1017417 - RNA, 21 nt, Human
ugauuuacagacugcccccac

SEQ ID NO: 1017418 - RNA, 24 nt, Human
ugcagagcacucacucccucacca

SEQ ID NO: 1017419 - RNA, 22 nt, Human
uggcagggaacaaacacccaga

SEQ ID NO: 1017420 - RNA, 21 nt, Human
ugggacucugcugccacccaa

SEQ ID NO: 1017421 - RNA, 18 nt, Human
ugggagguuaggagugga

SEQ ID NO: 1017422 - RNA, 21 nt, Human
ugggagguuaggaguggaagg

SEQ ID NO: 1017423 - RNA, 22 nt, Human
uggggcuuaagaaaaaaaccag

SEQ ID NO: 1017424 - RNA, 22 nt, Human
uggguucauuucugauuccaga

SEQ ID NO: 1017425 - RNA, 23 nt, Human
uggucacuuccacacaccacagg

SEQ ID NO: 1017426 - RNA, 19 nt, Human
uggugagcccucaugugcu

SEQ ID NO: 1017427 - RNA, 18 nt, Human
uguccaggaggaggagga

SEQ ID NO: 1017428 - RNA, 19 nt, Human
uguccaugcugacgagccc

SEQ ID NO: 1017429 - RNA, 24 nt, Human
ugugacugagccacuuaguggcag

SEQ ID NO: 1017430 - RNA, 18 nt, Human
uuagccaacagguuccca

SEQ ID NO: 1017431 - RNA, 22 nt, Human
uuccuuucuuguaacacaagua

SEQ ID NO: 1017432 - RNA, 21 nt, Human
uucucugagcggcugcaccca

SEQ ID NO: 1017433 - RNA, 24 nt, Human
uuuacagauaaggacaccgaggcc

SEQ ID NO: 1017434 - RNA, 22 nt, Human
uuuccauagagucccuauugug

SEQ ID NO: 1017435 - RNA, 21 nt, Human
aaaauccaaaaacaaagcccc

SEQ ID NO: 1017436 - RNA, 29 nt, Human
aaacaaaaggcuggaaagcgagggacccc

SEQ ID NO: 1017437 - RNA, 21 nt, Human
aaagacaugagucaguuuuug

SEQ ID NO: 1017438 - RNA, 24 nt, Human
aaagagcugggauuacagguguga

SEQ ID NO: 1017439 - RNA, 24 nt, Human
aaagugcugggauuacaggcguga

SEQ ID NO: 1017440 - RNA, 23 nt, Human
aaaucaccuccaccacaacuucu

SEQ ID NO: 1017441 - RNA, 20 nt, Human
aaccaagggugcuggagcag

SEQ ID NO: 1017442 - RNA, 25 nt, Human
aacccccuggugaagucccccugcc

SEQ ID NO: 1017443 - RNA, 18 nt, Human
aaccugcacacuugcaca

SEQ ID NO: 1017444 - RNA, 21 nt, Human
aacuccuagccucaggugauc

SEQ ID NO: 1017445 - RNA, 19 nt, Human
aagaaagaaaacuauuugc

SEQ ID NO: 1017446 - RNA, 21 nt, Human
aagagcugggauuacaggugu

SEQ ID NO: 1017447 - RNA, 24 nt, Human
aagcaaccgagaguaacauucuaa

SEQ ID NO: 1017448 - RNA, 19 nt, Human
aagcaucauguaaaucuca

SEQ ID NO: 1017449 - RNA, 20 nt, Human
aagccagcucuaucuauaac

SEQ ID NO: 1017450 - RNA, 23 nt, Human
aaggacacugcacacuuuggcac

SEQ ID NO: 1017451 - RNA, 19 nt, Human
aagggugcuggagcagcuc

SEQ ID NO: 1017452 - RNA, 18 nt, Human
aaggguucaaaccaacau

SEQ ID NO: 1017453 - RNA, 23 nt, Human
aagucccccugcccgauagccug

SEQ ID NO: 1017454 - RNA, 19 nt, Human
aagugcugggauuacaggc

SEQ ID NO: 1017455 - RNA, 19 nt, Human
aagugcugggauuacaggc

SEQ ID NO: 1017456 - RNA, 20 nt, Human
aaucccacuucacaauauac

SEQ ID NO: 1017457 - RNA, 22 nt, Human
aauuaauuucaaugcuccuuuc

SEQ ID NO: 1017458 - RNA, 20 nt, Human
acagaccuggauggucugca

SEQ ID NO: 1017459 - RNA, 25 nt, Human
acagcacaaauauuuaauacaccuu

SEQ ID NO: 1017460 - RNA, 21 nt, Human
acagcccagagaaaagggcca

SEQ ID NO: 1017461 - RNA, 20 nt, Human
acagcuuuauaccaaaaugu

SEQ ID NO: 1017462 - RNA, 18 nt, Human
acaggcgcccaccacgcc

SEQ ID NO: 1017463 - RNA, 20 nt, Human
acagugggagagauggaggc

SEQ ID NO: 1017464 - RNA, 18 nt, Human
acgggguuucacuauguu

SEQ ID NO: 1017465 - RNA, 23 nt, Human
acgggguuucacuauguuggcca

SEQ ID NO: 1017466 - RNA, 24 nt, Human
acgggguuucacuauguuggccag

SEQ ID NO: 1017467 - RNA, 18 nt, Human
acgggguuuugccauguu

SEQ ID NO: 1017468 - RNA, 23 nt, Human
acgggguuuugccauguuggcca

SEQ ID NO: 1017469 - RNA, 24 nt, Human
acgggguuuugccauguuggccag

SEQ ID NO: 1017470 - RNA, 18 nt, Human
acuauguuggccaggcug

SEQ ID NO: 1017471 - RNA, 22 nt, Human
acucuugucgcccaggcuggag

SEQ ID NO: 1017472 - RNA, 21 nt, Human
acugcaaucucugccucccgg

SEQ ID NO: 1017473 - RNA, 22 nt, Human
acugcaaucucugccucccggg

SEQ ID NO: 1017474 - RNA, 21 nt, Human
agaaaacagugacacacacug

SEQ ID NO: 1017475 - RNA, 18 nt, Human
agaaaacuauuugcuucc

SEQ ID NO: 1017476 - RNA, 20 nt, Human
agaaaacuauuugcuuccag

SEQ ID NO: 1017477 - RNA, 19 nt, Human
agaaaacuugaagugacug

SEQ ID NO: 1017478 - RNA, 20 nt, Human
agacuacaggcacauaccac

SEQ ID NO: 1017479 - RNA, 23 nt, Human
agagaguggccuguguggggggc

SEQ ID NO: 1017480 - RNA, 24 nt, Human
agagcugggauuacaggugugagc

SEQ ID NO: 1017481 - RNA, 18 nt, Human
agcagcugggauuacagg

SEQ ID NO: 1017482 - RNA, 24 nt, Human
aggaaacauggugaaaggggaggc

SEQ ID NO: 1017483 - RNA, 18 nt, Human
aggaaauaggggugagag

SEQ ID NO: 1017484 - RNA, 19 nt, Human
aggacagaagucaagagcu

SEQ ID NO: 1017485 - RNA, 20 nt, Human
aggcacauaccaccacaccc

SEQ ID NO: 1017486 - RNA, 28 nt, Human
aggcagagucucugcuccacucuucuuu

SEQ ID NO: 1017487 - RNA, 25 nt, Human
aggcuggagugcaguaguaugaucu

SEQ ID NO: 1017488 - RNA, 25 nt, Human
aggcuggagugcaguggcacgaucu

SEQ ID NO: 1017489 - RNA, 20 nt, Human
aggguucaagugauucuccu

SEQ ID NO: 1017490 - RNA, 24 nt, Human
aggguucaagugauucuccugucu

SEQ ID NO: 1017491 - RNA, 19 nt, Human
agguaacagaaacaaaauu

SEQ ID NO: 1017492 - RNA, 24 nt, Human
aggugaucugccugccucagccuc

SEQ ID NO: 1017493 - RNA, 24 nt, Human
aguaguaugaucuuggcucacugc

SEQ ID NO: 1017494 - RNA, 22 nt, Human
agucaacacagaucccugagcc

SEQ ID NO: 1017495 - RNA, 20 nt, Human
agucccccugcccgauagcc

SEQ ID NO: 1017496 - RNA, 23 nt, Human
agugauccacccgccucggccuc

SEQ ID NO: 1017497 - RNA, 24 nt, Human
agugauucuccugucucagccucc

SEQ ID NO: 1017498 - RNA, 24 nt, Human
agugcaguaguaugaucuuggcuc

SEQ ID NO: 1017499 - RNA, 21 nt, Human
agugcaguggcacgaucucag

SEQ ID NO: 1017500 - RNA, 23 nt, Human
agugcaguggcacgaucucagcu

SEQ ID NO: 1017501 - RNA, 18 nt, Human
agugcugggauuacaggc

SEQ ID NO: 1017502 - RNA, 20 nt, Human
auccaaaaacaaagccccac

SEQ ID NO: 1017503 - RNA, 18 nt, Human
augcuuauggucccuuua

SEQ ID NO: 1017504 - RNA, 18 nt, Human
auucuccugucucagccu

SEQ ID NO: 1017505 - RNA, 19 nt, Human
caaaaacaaagccccacug

SEQ ID NO: 1017506 - RNA, 18 nt, Human
caacagccugacaggauc

SEQ ID NO: 1017507 - RNA, 22 nt, Human
caagaggcaauagacuucagau

SEQ ID NO: 1017508 - RNA, 23 nt, Human
caagaggcaauagacuucagaua

SEQ ID NO: 1017509 - RNA, 22 nt, Human
caagcgauucuccugccucagc

SEQ ID NO: 1017510 - RNA, 22 nt, Human
caaguaacaucaggucaagaua

SEQ ID NO: 1017511 - RNA, 22 nt, Human
caagugauucuccugucucagc

SEQ ID NO: 1017512 - RNA, 18 nt, Human
cacaacugcccaacaccu

SEQ ID NO: 1017513 - RNA, 18 nt, Human
cacacacaauuucugggg

SEQ ID NO: 1017514 - RNA, 19 nt, Human
cacacucaccagaucuguu

SEQ ID NO: 1017515 - RNA, 22 nt, Human
cacagaaaacuugaagugacug

SEQ ID NO: 1017516 - RNA, 20 nt, Human
cacagaacaguuuggcuucu

SEQ ID NO: 1017517 - RNA, 24 nt, Human
caccacacccagcuaauuuuugua

SEQ ID NO: 1017518 - RNA, 21 nt, Human
cacuauguuggccaggcuggu

SEQ ID NO: 1017519 - RNA, 24 nt, Human
cacuauguuggccaggcuggucuc

SEQ ID NO: 1017520 - RNA, 21 nt, Human
cacucugucaccaggcuggag

SEQ ID NO: 1017521 - RNA, 24 nt, Human
cacucuugucgcccaggcuggagu

SEQ ID NO: 1017522 - RNA, 21 nt, Human
cacuugcacacacacaggcag

SEQ ID NO: 1017523 - RNA, 23 nt, Human
cagcaaaaagacaaaauaaaacc

SEQ ID NO: 1017524 - RNA, 23 nt, Human
cagcagggccauauacuugggcu

SEQ ID NO: 1017525 - RNA, 23 nt, Human
cagccacuguuugucaaaaaucu

SEQ ID NO: 1017526 - RNA, 20 nt, Human
cagccuccugaguagcugag

SEQ ID NO: 1017527 - RNA, 23 nt, Human
caggcgcccaccacgcccggcuu

SEQ ID NO: 1017528 - RNA, 22 nt, Human
caggugaucugccugccucagc

SEQ ID NO: 1017529 - RNA, 23 nt, Human
cauaaacccccuggugaaguccc

SEQ ID NO: 1017530 - RNA, 24 nt, Human
cauaccaccacacccagcuaauuu

SEQ ID NO: 1017531 - RNA, 22 nt, Human
cauguuggccaggcuggucugc

SEQ ID NO: 1017532 - RNA, 22 nt, Human
ccaaaaacaaagccccacugag

SEQ ID NO: 1017533 - RNA, 25 nt, Human
ccaaaaacaaagccccacugagggu

SEQ ID NO: 1017534 - RNA, 21 nt, Human
ccaaagagcugggauuacagg

SEQ ID NO: 1017535 - RNA, 23 nt, Human
ccaaagagcugggauuacaggug

SEQ ID NO: 1017536 - RNA, 24 nt, Human
ccaaagagcugggauuacaggugu

SEQ ID NO: 1017537 - RNA, 28 nt, Human
ccaaagcuugguauguggcccugggcuc

SEQ ID NO: 1017538 - RNA, 22 nt, Human
ccaaagugcugggauuacaggc

SEQ ID NO: 1017539 - RNA, 22 nt, Human
ccaaagugcugggauuacaggc

SEQ ID NO: 1017540 - RNA, 24 nt, Human
ccaaagugcugggauuacaggcgu

SEQ ID NO: 1017541 - RNA, 18 nt, Human
ccaaaucaccuccaccac

SEQ ID NO: 1017542 - RNA, 21 nt, Human
ccacacguacacauacauaca

SEQ ID NO: 1017543 - RNA, 24 nt, Human
ccagcaaaaagacaaaauaaaacc

SEQ ID NO: 1017544 - RNA, 20 nt, Human
ccaggguucaagugauucuc

SEQ ID NO: 1017545 - RNA, 23 nt, Human
ccaggguucaagugauucuccug

SEQ ID NO: 1017546 - RNA, 19 nt, Human
ccauguuggccaggcuggu

SEQ ID NO: 1017547 - RNA, 20 nt, Human
ccauguuggccaggcugguc

SEQ ID NO: 1017548 - RNA, 22 nt, Human
ccauucccaaacccacagaaca

SEQ ID NO: 1017549 - RNA, 22 nt, Human
cccaaagagcugggauuacagg

SEQ ID NO: 1017550 - RNA, 24 nt, Human
cccaaagagcugggauuacaggug

SEQ ID NO: 1017551 - RNA, 22 nt, Human
cccaaaucaccuccaccacaac

SEQ ID NO: 1017552 - RNA, 20 nt, Human
cccggguucaagcgauucuc

SEQ ID NO: 1017553 - RNA, 23 nt, Human
cccggguucaagcgauucuccug

SEQ ID NO: 1017554 - RNA, 24 nt, Human
cccuccuuucccaauuuauuuggg

SEQ ID NO: 1017555 - RNA, 21 nt, Human
ccuagccucaggugaucugcc

SEQ ID NO: 1017556 - RNA, 22 nt, Human
ccucaggugaucugccugccuc

SEQ ID NO: 1017557 - RNA, 24 nt, Human
ccuccaggguucaagugauucucc

SEQ ID NO: 1017558 - RNA, 24 nt, Human
ccucccggguucaagcgauucucc

SEQ ID NO: 1017559 - RNA, 22 nt, Human
ccugaccuugagugauccaccc

SEQ ID NO: 1017560 - RNA, 19 nt, Human
ccugagcagcugggauuac

SEQ ID NO: 1017561 - RNA, 23 nt, Human
ccugagcagcugggauuacaggc

SEQ ID NO: 1017562 - RNA, 24 nt, Human
ccugagcagcugggauuacaggcg

SEQ ID NO: 1017563 - RNA, 19 nt, Human
ccugaguagcugagacuac

SEQ ID NO: 1017564 - RNA, 24 nt, Human
ccugaguagcugagacuacaggca

SEQ ID NO: 1017565 - RNA, 18 nt, Human
ccuggcuaguaaccacuu

SEQ ID NO: 1017566 - RNA, 22 nt, Human
cgccucggccucccaaagagcu

SEQ ID NO: 1017567 - RNA, 24 nt, Human
cgccucggccucccaaagagcugg

SEQ ID NO: 1017568 - RNA, 24 nt, Human
cgggguuucacuauguuggccagg

SEQ ID NO: 1017569 - RNA, 24 nt, Human
cgggguuuugccauguuggccagg

SEQ ID NO: 1017570 - RNA, 20 nt, Human
cuaaaagauagucagcagaa

SEQ ID NO: 1017571 - RNA, 23 nt, Human
cuaauuuuuguauuuuuaauaga

SEQ ID NO: 1017572 - RNA, 21 nt, Human
cuagucuaucccaaaucaccu

SEQ ID NO: 1017573 - RNA, 23 nt, Human
cucacucugucaccaggcuggag

SEQ ID NO: 1017574 - RNA, 23 nt, Human
cucaggugaucugccugccucag

SEQ ID NO: 1017575 - RNA, 21 nt, Human
cucagucucacacacaauuuc

SEQ ID NO: 1017576 - RNA, 18 nt, Human
cuccacucuucuuuccca

SEQ ID NO: 1017577 - RNA, 19 nt, Human
cuccaggguucaagugauu

SEQ ID NO: 1017578 - RNA, 21 nt, Human
cucccccaccaucuuaguugc

SEQ ID NO: 1017579 - RNA, 18 nt, Human
cuccuucacucucaucuu

SEQ ID NO: 1017580 - RNA, 19 nt, Human
cucuugucgcccaggcugg

SEQ ID NO: 1017581 - RNA, 22 nt, Human
cugagcagcugggauuacaggc

SEQ ID NO: 1017582 - RNA, 24 nt, Human
cugcaaucucugccucccggguuc

SEQ ID NO: 1017583 - RNA, 23 nt, Human
cugccucagccucccaaagugcu

SEQ ID NO: 1017584 - RNA, 24 nt, Human
cugccucagccucccaaagugcug

SEQ ID NO: 1017585 - RNA, 23 nt, Human
cugccucagccuccugagcagcu

SEQ ID NO: 1017586 - RNA, 23 nt, Human
cugucucagccuccugaguagcu

SEQ ID NO: 1017587 - RNA, 18 nt, Human
cuucucaaucucauacag

SEQ ID NO: 1017588 - RNA, 24 nt, Human
cuugucgcccaggcuggagugcag

SEQ ID NO: 1017589 - RNA, 18 nt, Human
cuuuauaaacugaguaga

SEQ ID NO: 1017590 - RNA, 21 nt, Human
cuuuuuguauuuuuaguagag

SEQ ID NO: 1017591 - RNA, 24 nt, Human
cuuuuuguauuuuuaguagagacg

SEQ ID NO: 1017592 - RNA, 18 nt, Human
gaaaacuauuugcuucca

SEQ ID NO: 1017593 - RNA, 24 nt, Human
gaccuugagugauccacccgccuc

SEQ ID NO: 1017594 - RNA, 24 nt, Human
gacggagucucacucugucaccag

SEQ ID NO: 1017595 - RNA, 19 nt, Human
gacgggguuuugccauguu

SEQ ID NO: 1017596 - RNA, 24 nt, Human
gagacgggguuucacuauguuggc

SEQ ID NO: 1017597 - RNA, 24 nt, Human
gagacgggguuuugccauguuggc

SEQ ID NO: 1017598 - RNA, 18 nt, Human
gagcaagcagaaguugcu

SEQ ID NO: 1017599 - RNA, 25 nt, Human
gagcacacccauggugccagcugca

SEQ ID NO: 1017600 - RNA, 26 nt, Human
gaggaaccugaugauuugggggcagg

SEQ ID NO: 1017601 - RNA, 23 nt, Human
gauccucaaagucuggcacuuaa

SEQ ID NO: 1017602 - RNA, 21 nt, Human
gaucugccugccucagccucc

SEQ ID NO: 1017603 - RNA, 18 nt, Human
gauuacaggcgugagcca

SEQ ID NO: 1017604 - RNA, 21 nt, Human
gauuacaggcgugagccacca

SEQ ID NO: 1017605 - RNA, 22 nt, Human
gauuacaggcgugagccaccac

SEQ ID NO: 1017606 - RNA, 18 nt, Human
gauuacaggugugagcca

SEQ ID NO: 1017607 - RNA, 21 nt, Human
gauuacaggugugagccacca

SEQ ID NO: 1017608 - RNA, 24 nt, Human
gauuacaggugugagccaccaggc

SEQ ID NO: 1017609 - RNA, 21 nt, Human
gauucuccugccucagccucc

SEQ ID NO: 1017610 - RNA, 20 nt, Human
gcaacuccuagccucaggug

SEQ ID NO: 1017611 - RNA, 22 nt, Human
gcaacuucuaccuccaggguuc

SEQ ID NO: 1017612 - RNA, 18 nt, Human
gccauguuggccaggcug

SEQ ID NO: 1017613 - RNA, 20 nt, Human
gccauguuggccaggcuggu

SEQ ID NO: 1017614 - RNA, 22 nt, Human
gccauguuggccaggcuggucu

SEQ ID NO: 1017615 - RNA, 19 nt, Human
gcccaacaccucaccuacc

SEQ ID NO: 1017616 - RNA, 19 nt, Human
gcccaggcuggagugcagu

SEQ ID NO: 1017617 - RNA, 19 nt, Human
gccucccaaagagcuggga

SEQ ID NO: 1017618 - RNA, 24 nt, Human
gcgauucuccugccucagccuccu

SEQ ID NO: 1017619 - RNA, 21 nt, Human
gcucacugcaacuucuaccuc

SEQ ID NO: 1017620 - RNA, 19 nt, Human
gcuggagugcaguggcacg

SEQ ID NO: 1017621 - RNA, 21 nt, Human
ggagcacacccauggugccag

SEQ ID NO: 1017622 - RNA, 21 nt, Human
ggaggcagggcagggggcuca

SEQ ID NO: 1017623 - RNA, 19 nt, Human
ggauuacaggcgugagcca

SEQ ID NO: 1017624 - RNA, 23 nt, Human
gggaagaagaaaauuuuucccac

SEQ ID NO: 1017625 - RNA, 19 nt, Human
gggcucagagcaagcagaa

SEQ ID NO: 1017626 - RNA, 23 nt, Human
ggggcucacagacccucuugaag

SEQ ID NO: 1017627 - RNA, 23 nt, Human
gggguuucacuauguuggccagg

SEQ ID NO: 1017628 - RNA, 23 nt, Human
gggguuuugccauguuggccagg

SEQ ID NO: 1017629 - RNA, 24 nt, Human
ggugaaaggggaggcagggcaggg

SEQ ID NO: 1017630 - RNA, 24 nt, Human
guaauacucucagaaguucccaca

SEQ ID NO: 1017631 - RNA, 23 nt, Human
guagagacgggguuuugccaugu

SEQ ID NO: 1017632 - RNA, 24 nt, Human
guauggccuucguaauucuagaag

SEQ ID NO: 1017633 - RNA, 19 nt, Human
gucaguuuuugucagguca

SEQ ID NO: 1017634 - RNA, 24 nt, Human
gucucacucugucaccaggcugga

SEQ ID NO: 1017635 - RNA, 24 nt, Human
gugauccacccgccucggccuccc

SEQ ID NO: 1017636 - RNA, 18 nt, Human
gugaucugccugccucag

SEQ ID NO: 1017637 - RNA, 24 nt, Human
gugaucugccugccucagccuccc

SEQ ID NO: 1017638 - RNA, 24 nt, Human
gugauucuccugucucagccuccu

SEQ ID NO: 1017639 - RNA, 21 nt, Human
uaaaaccuccagcaagaacuu

SEQ ID NO: 1017640 - RNA, 22 nt, Human
uaaagcaagaaaacagugacac

SEQ ID NO: 1017641 - RNA, 21 nt, Human
uaaagguacaccuccaguuca

SEQ ID NO: 1017642 - RNA, 24 nt, Human
uaacagaaacaaaauuuagaugua

SEQ ID NO: 1017643 - RNA, 19 nt, Human
uaacccccucucccccacc

SEQ ID NO: 1017644 - RNA, 20 nt, Human
uaagaaagaaaacuauuugc

SEQ ID NO: 1017645 - RNA, 24 nt, Human
uaauagagacgggguuucacuaug

SEQ ID NO: 1017646 - RNA, 24 nt, Human
uaauuuuuguauuuuuaauagaga

SEQ ID NO: 1017647 - RNA, 18 nt, Human
uacaccuuuugcaacaag

SEQ ID NO: 1017648 - RNA, 23 nt, Human
uacaggcgugagccaccacgccc

SEQ ID NO: 1017649 - RNA, 23 nt, Human
uacaggugugagccaccaggccc

SEQ ID NO: 1017650 - RNA, 23 nt, Human
uacugcaaucucugccucccggg

SEQ ID NO: 1017651 - RNA, 19 nt, Human
uacuucaccaagaaaggga

SEQ ID NO: 1017652 - RNA, 19 nt, Human
uacuugggcuuggagguga

SEQ ID NO: 1017653 - RNA, 20 nt, Human
uagaauuagacaaaagcaac

SEQ ID NO: 1017654 - RNA, 21 nt, Human
uagagacgggguuucacuaug

SEQ ID NO: 1017655 - RNA, 22 nt, Human
uagagacgggguuucacuaugu

SEQ ID NO: 1017656 - RNA, 22 nt, Human
uagagacgggguuuugccaugu

SEQ ID NO: 1017657 - RNA, 18 nt, Human
uaguaaguaaugacuuuc

SEQ ID NO: 1017658 - RNA, 24 nt, Human
uaguagagacgggguuuugccaug

SEQ ID NO: 1017659 - RNA, 20 nt, Human
uaucccaaaucaccuccacc

SEQ ID NO: 1017660 - RNA, 22 nt, Human
uaucccaaaucaccuccaccac

SEQ ID NO: 1017661 - RNA, 23 nt, Human
uauguuggccaggcuggucucaa

SEQ ID NO: 1017662 - RNA, 24 nt, Human
uauguuggccaggcuggucucaaa

SEQ ID NO: 1017663 - RNA, 24 nt, Human
ucaacacagaucccugagccauag

SEQ ID NO: 1017664 - RNA, 23 nt, Human
ucacuaccuugaauuuagaguga

SEQ ID NO: 1017665 - RNA, 22 nt, Human
ucacuauguuggccaggcuggu

SEQ ID NO: 1017666 - RNA, 23 nt, Human
ucacucuugucgcccaggcugga

SEQ ID NO: 1017667 - RNA, 23 nt, Human
ucacugcaacuucuaccuccagg

SEQ ID NO: 1017668 - RNA, 24 nt, Human
ucacugcaacuucuaccuccaggg

SEQ ID NO: 1017669 - RNA, 19 nt, Human
ucagcagagcagccacugu

SEQ ID NO: 1017670 - RNA, 22 nt, Human
ucaggugaucugccugccucag

SEQ ID NO: 1017671 - RNA, 24 nt, Human
ucauucuucuaauccauauucaau

SEQ ID NO: 1017672 - RNA, 24 nt, Human
uccaggguucaagugauucuccug

SEQ ID NO: 1017673 - RNA, 20 nt, Human
uccauaaacccccuggugaa

SEQ ID NO: 1017674 - RNA, 19 nt, Human
ucccaaagagcugggauua

SEQ ID NO: 1017675 - RNA, 23 nt, Human
ucccaaagagcugggauuacagg

SEQ ID NO: 1017676 - RNA, 23 nt, Human
ucccaaagagcugggauuacagg

SEQ ID NO: 1017677 - RNA, 24 nt, Human
ucccaaagagcugggauuacaggu

SEQ ID NO: 1017678 - RNA, 24 nt, Human
ucccaaagugcugggauuacaggc

SEQ ID NO: 1017679 - RNA, 19 nt, Human
ucccaaaucaccuccacca

SEQ ID NO: 1017680 - RNA, 18 nt, Human
ucccagagaaguaugguu

SEQ ID NO: 1017681 - RNA, 19 nt, Human
ucccauagagcugcccaga

SEQ ID NO: 1017682 - RNA, 21 nt, Human
ucccggguucaagcgauucuc

SEQ ID NO: 1017683 - RNA, 24 nt, Human
ucccggguucaagcgauucuccug

SEQ ID NO: 1017684 - RNA, 19 nt, Human
uccuccuugacccccuccu

SEQ ID NO: 1017685 - RNA, 24 nt, Human
uccugagcagcugggauuacaggc

SEQ ID NO: 1017686 - RNA, 24 nt, Human
uccugaguagcugagacuacaggc

SEQ ID NO: 1017687 - RNA, 24 nt, Human
ucgcccaggcuggagugcaguagu

SEQ ID NO: 1017688 - RNA, 24 nt, Human
ucuaacccccucucccccaccauc

SEQ ID NO: 1017689 - RNA, 24 nt, Human
ucuaccuccaggguucaagugauu

SEQ ID NO: 1017690 - RNA, 23 nt, Human
ucucacucugucaccaggcugga

SEQ ID NO: 1017691 - RNA, 21 nt, Human
ucucugaggggaaacaggguu

SEQ ID NO: 1017692 - RNA, 23 nt, Human
ucugcuugagguccugaaaacug

SEQ ID NO: 1017693 - RNA, 23 nt, Human
ucugucaccaggcuggagugcag

SEQ ID NO: 1017694 - RNA, 21 nt, Human
ucuucuggggaagaagaaaau

SEQ ID NO: 1017695 - RNA, 20 nt, Human
ugaaaaugcggcuucacuac

SEQ ID NO: 1017696 - RNA, 18 nt, Human
ugaacaaaccaaaagggu

SEQ ID NO: 1017697 - RNA, 18 nt, Human
ugacaaacacagguuccc

SEQ ID NO: 1017698 - RNA, 23 nt, Human
ugacaaacacagguucccacacg

SEQ ID NO: 1017699 - RNA, 24 nt, Human
ugaccuugagugauccacccgccu

SEQ ID NO: 1017700 - RNA, 24 nt, Human
ugagacuacaggcacauaccacca

SEQ ID NO: 1017701 - RNA, 24 nt, Human
ugagcagcugggauuacaggcgcc

SEQ ID NO: 1017702 - RNA, 19 nt, Human
ugauuugcuuccugaauuc

SEQ ID NO: 1017703 - RNA, 21 nt, Human
ugcaguggcacgaucucagcu

SEQ ID NO: 1017704 - RNA, 18 nt, Human
ugcaugguguggaacugc

SEQ ID NO: 1017705 - RNA, 20 nt, Human
ugccagcugcacucccccgc

SEQ ID NO: 1017706 - RNA, 22 nt, Human
ugccauguuggccaggcugguc

SEQ ID NO: 1017707 - RNA, 27 nt, Human
ugccauguuggccaggcuggucugcaa

SEQ ID NO: 1017708 - RNA, 24 nt, Human
ugccucagccucccaaagugcugg

SEQ ID NO: 1017709 - RNA, 24 nt, Human
ugccucagccuccugagcagcugg

SEQ ID NO: 1017710 - RNA, 18 nt, Human
ugccucaucacuaaaguu

SEQ ID NO: 1017711 - RNA, 24 nt, Human
ugcugggauuacaggcgugagcca

SEQ ID NO: 1017712 - RNA, 26 nt, Human
ugcuguacuuaaaaucuugucagagg

SEQ ID NO: 1017713 - RNA, 20 nt, Human
ugcuucaaaaaaagccuuug

SEQ ID NO: 1017714 - RNA, 22 nt, Human
ugcuuuauaaacugaguagaga

SEQ ID NO: 1017715 - RNA, 22 nt, Human
uggaaaacaccccgugagccca

SEQ ID NO: 1017716 - RNA, 19 nt, Human
uggagugcaguaguaugau

SEQ ID NO: 1017717 - RNA, 23 nt, Human
uggagugcaguaguaugaucuug

SEQ ID NO: 1017718 - RNA, 24 nt, Human
uggagugcaguaguaugaucuugg

SEQ ID NO: 1017719 - RNA, 23 nt, Human
uggagugcaguggcacgaucuca

SEQ ID NO: 1017720 - RNA, 24 nt, Human
uggagugcaguggcacgaucucag

SEQ ID NO: 1017721 - RNA, 24 nt, Human
uggcacgaucucagcuuacugcaa

SEQ ID NO: 1017722 - RNA, 24 nt, Human
uggccaggcuggucucaaaugccu

SEQ ID NO: 1017723 - RNA, 24 nt, Human
uggccaggcuggucugcaacuccu

SEQ ID NO: 1017724 - RNA, 23 nt, Human
ugggaaaagcuucucaaucucau

SEQ ID NO: 1017725 - RNA, 18 nt, Human
ugggagagauggaggcug

SEQ ID NO: 1017726 - RNA, 21 nt, Human
ugggauuacaggcgcccacca

SEQ ID NO: 1017727 - RNA, 18 nt, Human
ugggauuacaggcgugag

SEQ ID NO: 1017728 - RNA, 19 nt, Human
ugggauuacaggcgugagc

SEQ ID NO: 1017729 - RNA, 22 nt, Human
ugggauuacaggcgugagccac

SEQ ID NO: 1017730 - RNA, 23 nt, Human
ugggauuacaggcgugagccacc

SEQ ID NO: 1017731 - RNA, 24 nt, Human
ugggauuacaggcgugagccacca

SEQ ID NO: 1017732 - RNA, 18 nt, Human
ugggauuacaggugugag

SEQ ID NO: 1017733 - RNA, 19 nt, Human
ugggauuacaggugugagc

SEQ ID NO: 1017734 - RNA, 22 nt, Human
ugggauuacaggugugagccac

SEQ ID NO: 1017735 - RNA, 23 nt, Human
ugggauuacaggugugagccacc

SEQ ID NO: 1017736 - RNA, 24 nt, Human
ugggauuacaggugugagccacca

SEQ ID NO: 1017737 - RNA, 19 nt, Human
ugggcuccucccccaauuu

SEQ ID NO: 1017738 - RNA, 22 nt, Human
ugggggcagggauaaaaccauu

SEQ ID NO: 1017739 - RNA, 21 nt, Human
uggugucuguaaggacuugac

SEQ ID NO: 1017740 - RNA, 18 nt, Human
ugguguuaaaagaauuuc

SEQ ID NO: 1017741 - RNA, 21 nt, Human
uguaaagguagacguuagguc

SEQ ID NO: 1017742 - RNA, 21 nt, Human
uguauuuuuaguagagacggg

SEQ ID NO: 1017743 - RNA, 24 nt, Human
ugucucagccuccugaguagcuga

SEQ ID NO: 1017744 - RNA, 19 nt, Human
uuaaagccagcucuaucua

SEQ ID NO: 1017745 - RNA, 23 nt, Human
uuaaagguaagucaggagcugaa

SEQ ID NO: 1017746 - RNA, 21 nt, Human
uuaagaaagaaaacuauuugc

SEQ ID NO: 1017747 - RNA, 21 nt, Human
uuaauagagacgggguuucac

SEQ ID NO: 1017748 - RNA, 24 nt, Human
uuaauagagacgggguuucacuau

SEQ ID NO: 1017749 - RNA, 24 nt, Human
uuacugcaaucucugccucccggg

SEQ ID NO: 1017750 - RNA, 25 nt, Human
uuacugcaaucucugccucccgggu

SEQ ID NO: 1017751 - RNA, 18 nt, Human
uuaguagagacgggguuu

SEQ ID NO: 1017752 - RNA, 22 nt, Human
uuaguagagacgggguuuugcc

SEQ ID NO: 1017753 - RNA, 24 nt, Human
uuaguagagacgggguuuugccau

SEQ ID NO: 1017754 - RNA, 21 nt, Human
uuauaaacauuuuugcaguca

SEQ ID NO: 1017755 - RNA, 25 nt, Human
uuaugcuagggguaugccuggcuag

SEQ ID NO: 1017756 - RNA, 24 nt, Human
uuauuguuuccucugaaggacacu

SEQ ID NO: 1017757 - RNA, 21 nt, Human
uucaagcgauucuccugccuc

SEQ ID NO: 1017758 - RNA, 23 nt, Human
uucaagcgauucuccugccucag

SEQ ID NO: 1017759 - RNA, 24 nt, Human
uucaagcgauucuccugccucagc

SEQ ID NO: 1017760 - RNA, 23 nt, Human
uucaagugauucuccugucucag

SEQ ID NO: 1017761 - RNA, 20 nt, Human
uucacaauauacuucaaucu

SEQ ID NO: 1017762 - RNA, 24 nt, Human
uucacucuugucgcccaggcugga

SEQ ID NO: 1017763 - RNA, 22 nt, Human
uucccacaacugcccaacaccu

SEQ ID NO: 1017764 - RNA, 25 nt, Human
uucccacacguacacauacauacaa

SEQ ID NO: 1017765 - RNA, 19 nt, Human
uuccuccuugacccccucc

SEQ ID NO: 1017766 - RNA, 21 nt, Human
uucucugaggggaaacagggu

SEQ ID NO: 1017767 - RNA, 21 nt, Human
uugaagccuauccauaaaccc

SEQ ID NO: 1017768 - RNA, 19 nt, Human
uugcaacaagaucuucucu

SEQ ID NO: 1017769 - RNA, 20 nt, Human
uuggcuuuaagccauuagaa

SEQ ID NO: 1017770 - RNA, 23 nt, Human
uuguauuuuuaguagagacgggg

SEQ ID NO: 1017771 - RNA, 24 nt, Human
uuuaauacaccuuuugcaacaaga

SEQ ID NO: 1017772 - RNA, 24 nt, Human
uuucacuauguuggccaggcuggu

SEQ ID NO: 1017773 - RNA, 24 nt, Human
uuucacucuugucgcccaggcugg

SEQ ID NO: 1017774 - RNA, 23 nt, Human
uuuugccauguuggccaggcugg

SEQ ID NO: 1017775 - RNA, 24 nt, Human
uuuuuaauagagacgggguuucac

SEQ ID NO: 1017776 - RNA, 21 nt, Human
uuuuuaguagagacgggguuu

SEQ ID NO: 1017777 - RNA, 21 nt, Human
uuuuuaguagagacgggguuu

SEQ ID NO: 1017778 - RNA, 20 nt, Human
uuuuuguauuuuuaauagag

SEQ ID NO: 1017779 - RNA, 23 nt, Human
uuuuuguauuuuuaauagagacg

SEQ ID NO: 1017780 - RNA, 21 nt, Human
uuuuuguauuuuuaguagaga

SEQ ID NO: 1017781 - RNA, 19 nt, Human
aaauggauuuuccuguguc

SEQ ID NO: 1017782 - RNA, 18 nt, Human
aaggcaucgcgcacccug

SEQ ID NO: 1017783 - RNA, 24 nt, Human
acaauagcaacagaagacuuucac

SEQ ID NO: 1017784 - RNA, 20 nt, Human
agaauagcaaaaauaaaaga

SEQ ID NO: 1017785 - RNA, 18 nt, Human
augaccaaauauuugagc

SEQ ID NO: 1017786 - RNA, 19 nt, Human
caugaccaaauauuugagc

SEQ ID NO: 1017787 - RNA, 18 nt, Human
cccacaauagcaacagaa

SEQ ID NO: 1017788 - RNA, 25 nt, Human
cccugcggcagcggcugcgcugccu

SEQ ID NO: 1017789 - RNA, 20 nt, Human
ccugcggguggccgcgacuc

SEQ ID NO: 1017790 - RNA, 19 nt, Human
cggcagcggcugcgcugcc

SEQ ID NO: 1017791 - RNA, 23 nt, Human
gagcccacaauagcaacagaaga

SEQ ID NO: 1017792 - RNA, 20 nt, Human
ggccgcgacucaggccggga

SEQ ID NO: 1017793 - RNA, 23 nt, Human
uacauucuucccccaugaccaaa

SEQ ID NO: 1017794 - RNA, 25 nt, Human
uagcaaaaauaaaagaguggggaaa

SEQ ID NO: 1017795 - RNA, 19 nt, Human
ucccccaugaccaaauauu

SEQ ID NO: 1017796 - RNA, 23 nt, Human
ucccccaugaccaaauauuugag

SEQ ID NO: 1017797 - RNA, 24 nt, Human
ucccccaugaccaaauauuugagc

SEQ ID NO: 1017798 - RNA, 21 nt, Human
ucuucccccaugaccaaauau

SEQ ID NO: 1017799 - RNA, 24 nt, Human
ugaccaaauauuugagcccacaau

SEQ ID NO: 1017800 - RNA, 20 nt, Human
ugagcccacaauagcaacag

SEQ ID NO: 1017801 - RNA, 18 nt, Human
ugccucagcccacagcuc

SEQ ID NO: 1017802 - RNA, 24 nt, Human
uggaagacaugggaaguuuauuuu

SEQ ID NO: 1017803 - RNA, 23 nt, Human
ugugccagugccacaacccuaca

SEQ ID NO: 1017804 - RNA, 22 nt, Human
uuucaaaauccagaguguugcu

SEQ ID NO: 1017805 - RNA, 28 nt, Human
uuuuuuuuuuuuuuuuuuuuuuuggggg

SEQ ID NO: 1017806 - RNA, 24 nt, Human
aaaaaagacaagaggaaaccgaaa

SEQ ID NO: 1017807 - RNA, 19 nt, Human
aagaggaaaccgaaaaagg

SEQ ID NO: 1017808 - RNA, 27 nt, Human
aaguuuaaguguuuuuuuuuuuuuuuu

SEQ ID NO: 1017809 - RNA, 25 nt, Human
aauaaaaaaaaaaagacaagaggaa

SEQ ID NO: 1017810 - RNA, 22 nt, Human
aauucuguuaaaaaacaaaaaa

SEQ ID NO: 1017811 - RNA, 19 nt, Human
accuaugggcugagggcua

SEQ ID NO: 1017812 - RNA, 19 nt, Human
agacaaaaugguucuaaac

SEQ ID NO: 1017813 - RNA, 19 nt, Human
agacaagaggaaaccgaaa

SEQ ID NO: 1017814 - RNA, 19 nt, Human
agcaagguggcggcuggcu

SEQ ID NO: 1017815 - RNA, 20 nt, Human
agcaagguggcggcuggcug

SEQ ID NO: 1017816 - RNA, 23 nt, Human
agcugcuggugcuggguugauuu

SEQ ID NO: 1017817 - RNA, 24 nt, Human
aggaaaccgaaaaaggaggggugg

SEQ ID NO: 1017818 - RNA, 22 nt, Human
aggggggaaggagagaagcgag

SEQ ID NO: 1017819 - RNA, 21 nt, Human
agguggcggcuggcugguuug

SEQ ID NO: 1017820 - RNA, 20 nt, Human
caaaaugguucuaaacugaa

SEQ ID NO: 1017821 - RNA, 24 nt, Human
caagaggaaaccgaaaaaggaggg

SEQ ID NO: 1017822 - RNA, 24 nt, Human
caccccccccacucccgugccccc

SEQ ID NO: 1017823 - RNA, 27 nt, Human
cacucccgugcccccagcaagggcugg

SEQ ID NO: 1017824 - RNA, 19 nt, Human
cagcucgcggacugcugga

SEQ ID NO: 1017825 - RNA, 19 nt, Human
ccaagagaaggguucccac

SEQ ID NO: 1017826 - RNA, 24 nt, Human
ccaguauggaccuuuggaaugcaa

SEQ ID NO: 1017827 - RNA, 25 nt, Human
ccaugucaccccccccacucccgug

SEQ ID NO: 1017828 - RNA, 20 nt, Human
ccccacucccgugcccccag

SEQ ID NO: 1017829 - RNA, 18 nt, Human
ccccccacucccgugccc

SEQ ID NO: 1017830 - RNA, 23 nt, Human
ccccccacucccgugcccccagc

SEQ ID NO: 1017831 - RNA, 20 nt, Human
cccgugcccccagcaagggc

SEQ ID NO: 1017832 - RNA, 18 nt, Human
ccgcgccccggggugccc

SEQ ID NO: 1017833 - RNA, 21 nt, Human
ccuccgcgccccggggugccc

SEQ ID NO: 1017834 - RNA, 20 nt, Human
ccuucccuuccuccucacug

SEQ ID NO: 1017835 - RNA, 23 nt, Human
cgggaggagcccuuggggcggcg

SEQ ID NO: 1017836 - RNA, 21 nt, Human
cuccaacaucucugaaccgcc

SEQ ID NO: 1017837 - RNA, 18 nt, Human
cuguucaagugaagagau

SEQ ID NO: 1017838 - RNA, 18 nt, Human
cuuuggaaugcaaggguu

SEQ ID NO: 1017839 - RNA, 18 nt, Human
gaaaccaaguaaccagua

SEQ ID NO: 1017840 - RNA, 21 nt, Human
gacaagaggaaaccgaaaaag

SEQ ID NO: 1017841 - RNA, 19 nt, Human
gagaagcgaggagcgcucc

SEQ ID NO: 1017842 - RNA, 21 nt, Human
gaggagagggcgagugcagcg

SEQ ID NO: 1017843 - RNA, 21 nt, Human
gcaaggguuuuuucaccccca

SEQ ID NO: 1017844 - RNA, 20 nt, Human
gccuagggcccaugucaccc

SEQ ID NO: 1017845 - RNA, 28 nt, Human
ggcaggccgggaggucgggggacuaguc

SEQ ID NO: 1017846 - RNA, 18 nt, Human
gggaaggagagaagcgag

SEQ ID NO: 1017847 - RNA, 24 nt, Human
gggaggguccggcggagugcggca

SEQ ID NO: 1017848 - RNA, 20 nt, Human
ggggaggggccgaaaguuug

SEQ ID NO: 1017849 - RNA, 20 nt, Human
ggguuuuuucacccccagac

SEQ ID NO: 1017850 - RNA, 20 nt, Human
gugaauauuuuguucaacag

SEQ ID NO: 1017851 - RNA, 18 nt, Human
gugcagcggcgcgggccg

SEQ ID NO: 1017852 - RNA, 19 nt, Human
gugcagcggcgcgggccgg

SEQ ID NO: 1017853 - RNA, 20 nt, Human
gugcagcggcgcgggccggc

SEQ ID NO: 1017854 - RNA, 21 nt, Human
gugguugguagcugcuggugc

SEQ ID NO: 1017855 - RNA, 22 nt, Human
uaaccaguauggaccuuuggaa

SEQ ID NO: 1017856 - RNA, 24 nt, Human
ucaccccccccacucccgugcccc

SEQ ID NO: 1017857 - RNA, 18 nt, Human
ucacuggcgcccucuugc

SEQ ID NO: 1017858 - RNA, 23 nt, Human
ucccaaacucaucggaguccuaa

SEQ ID NO: 1017859 - RNA, 20 nt, Human
ucucugaaccgccuucccuu

SEQ ID NO: 1017860 - RNA, 23 nt, Human
ugaaaccaaguaaccaguaugga

SEQ ID NO: 1017861 - RNA, 18 nt, Human
ugaaccgccuucccuucc

SEQ ID NO: 1017862 - RNA, 25 nt, Human
ugcaaggguuuuuucacccccaacg

SEQ ID NO: 1017863 - RNA, 23 nt, Human
ugcccggcccgccccccccgcgg

SEQ ID NO: 1017864 - RNA, 24 nt, Human
uggaccuuuggaaugcaaggguuu

SEQ ID NO: 1017865 - RNA, 21 nt, Human
uggcugguuuguuuacaccgg

SEQ ID NO: 1017866 - RNA, 23 nt, Human
uggguugauuuuuccugaagucc

SEQ ID NO: 1017867 - RNA, 24 nt, Human
uggugguugguagcugcuggugcu

SEQ ID NO: 1017868 - RNA, 21 nt, Human
uguuuuuuuuuuuuuuuuguu

SEQ ID NO: 1017869 - RNA, 22 nt, Human
uuaaaaaacaaaaaacaccuau

SEQ ID NO: 1017870 - RNA, 18 nt, Human
uucccuuccuccucacuc

SEQ ID NO: 1017871 - RNA, 19 nt, Human
uuuuuuuuuuuuuuguucu

SEQ ID NO: 1017872 - RNA, 19 nt, Human
aagagcgcucagcccacag

SEQ ID NO: 1017873 - RNA, 26 nt, Human
aaguagaggggagauuaagagcgcuc

SEQ ID NO: 1017874 - RNA, 25 nt, Human
acaauauauguaucacuccuugggg

SEQ ID NO: 1017875 - RNA, 24 nt, Human
accccaauuuggggagccucugcc

SEQ ID NO: 1017876 - RNA, 21 nt, Human
accccugcugugucuguccug

SEQ ID NO: 1017877 - RNA, 24 nt, Human
acucauuucaucuuccagaacccu

SEQ ID NO: 1017878 - RNA, 20 nt, Human
aggaagggcugaugcugaug

SEQ ID NO: 1017879 - RNA, 18 nt, Human
agggcucugggaggaagg

SEQ ID NO: 1017880 - RNA, 20 nt, Human
cacugcuuggcauggguguc

SEQ ID NO: 1017881 - RNA, 24 nt, Human
cagaacccucugaaguaugaucau

SEQ ID NO: 1017882 - RNA, 25 nt, Human
ccagaacccucugaaguaugaucau

SEQ ID NO: 1017883 - RNA, 18 nt, Human
ccaggagcagcugggaca

SEQ ID NO: 1017884 - RNA, 18 nt, Human
ccccagaccccugcugug

SEQ ID NO: 1017885 - RNA, 19 nt, Human
ccccagaccccugcugugu

SEQ ID NO: 1017886 - RNA, 20 nt, Human
ccugcgugcucccacugcuu

SEQ ID NO: 1017887 - RNA, 20 nt, Human
gaaugagggcucugggagga

SEQ ID NO: 1017888 - RNA, 23 nt, Human
gagcagcugggacagggacccca

SEQ ID NO: 1017889 - RNA, 19 nt, Human
gcaaggcuccgugccccag

SEQ ID NO: 1017890 - RNA, 21 nt, Human
gccccaauaccuucuuagcuu

SEQ ID NO: 1017891 - RNA, 22 nt, Human
ggaaugagggcucugggaggaa

SEQ ID NO: 1017892 - RNA, 24 nt, Human
ggaccccacuuuuacaauacagcu

SEQ ID NO: 1017893 - RNA, 20 nt, Human
guacuuuacacucauuucau

SEQ ID NO: 1017894 - RNA, 23 nt, Human
gugccccagaccccugcuguguc

SEQ ID NO: 1017895 - RNA, 20 nt, Human
gugcucccacugcuuggcau

SEQ ID NO: 1017896 - RNA, 25 nt, Human
uacaauacagcuguaaauauauaca

SEQ ID NO: 1017897 - RNA, 22 nt, Human
uacacaauauauguaucacucc

SEQ ID NO: 1017898 - RNA, 18 nt, Human
uccagaacccucugaagu

SEQ ID NO: 1017899 - RNA, 18 nt, Human
uccccggccuugugcugc

SEQ ID NO: 1017900 - RNA, 22 nt, Human
ugaaguaugaucaucaucuguu

SEQ ID NO: 1017901 - RNA, 25 nt, Human
ugagggcucugggaggaagggcuga

SEQ ID NO: 1017902 - RNA, 24 nt, Human
ugcaugccagucacccuucugagu

SEQ ID NO: 1017903 - RNA, 20 nt, Human
uggaaugagggcucugggag

SEQ ID NO: 1017904 - RNA, 20 nt, Human
uggaauuggaaugagggcuc

SEQ ID NO: 1017905 - RNA, 21 nt, Human
uggcauggguguccccggccu

SEQ ID NO: 1017906 - RNA, 24 nt, Human
uggcauggguguccccggccuugu

SEQ ID NO: 1017907 - RNA, 22 nt, Human
uguccccggccuugugcugcuu

SEQ ID NO: 1017908 - RNA, 25 nt, Human
uucacagacaaggaaacugagguuc

SEQ ID NO: 1017909 - RNA, 25 nt, Human
aaaaacacaaaaggagaaaaaaaug

SEQ ID NO: 1017910 - RNA, 19 nt, Human
aaaaaugcaguuugcuuuu

SEQ ID NO: 1017911 - RNA, 26 nt, Human
aaaagaaacaaauucacaagaaacaa

SEQ ID NO: 1017912 - RNA, 18 nt, Human
aaacaaaaagcaaggagc

SEQ ID NO: 1017913 - RNA, 19 nt, Human
aaaggaagaggggaugaga

SEQ ID NO: 1017914 - RNA, 24 nt, Human
aacaaccuugggcaaccacaaaga

SEQ ID NO: 1017915 - RNA, 21 nt, Human
aagaaacaaaaagcaaggagc

SEQ ID NO: 1017916 - RNA, 22 nt, Human
aagagacuguagagggcagccc

SEQ ID NO: 1017917 - RNA, 24 nt, Human
aagauuuuuaaaaaugcaguuugc

SEQ ID NO: 1017918 - RNA, 24 nt, Human
aagcaaagcaagaaacaaaaagca

SEQ ID NO: 1017919 - RNA, 25 nt, Human
aagcaaagcaagaaacaaaaagcaa

SEQ ID NO: 1017920 - RNA, 22 nt, Human
aagcaagaaacaaaaagcaagg

SEQ ID NO: 1017921 - RNA, 31 nt, Human
aagcaagaaacaaaaagcaaggagccagagg

SEQ ID NO: 1017922 - RNA, 22 nt, Human
aaucucucucucccagccccac

SEQ ID NO: 1017923 - RNA, 22 nt, Human
acaaaaacacacauguucaaag

SEQ ID NO: 1017924 - RNA, 20 nt, Human
acaacccuccucacccucuc

SEQ ID NO: 1017925 - RNA, 21 nt, Human
acacaaccucuaucccaagga

SEQ ID NO: 1017926 - RNA, 25 nt, Human
acacaaccucuaucccaaggaaauu

SEQ ID NO: 1017927 - RNA, 24 nt, Human
acacuguaaaaaucucaaagagca

SEQ ID NO: 1017928 - RNA, 26 nt, Human
acuagauuuuaaaugcuuuagauuuu

SEQ ID NO: 1017929 - RNA, 20 nt, Human
acuccaaaaaaaaaaaauca

SEQ ID NO: 1017930 - RNA, 23 nt, Human
agagacuguagagggcagccccc

SEQ ID NO: 1017931 - RNA, 19 nt, Human
agaggaggagaagggauua

SEQ ID NO: 1017932 - RNA, 20 nt, Human
agagggagaacaggggaugg

SEQ ID NO: 1017933 - RNA, 22 nt, Human
agagggaugcacaucucccaga

SEQ ID NO: 1017934 - RNA, 20 nt, Human
agaggggaugagagaugucg

SEQ ID NO: 1017935 - RNA, 21 nt, Human
agaguuacagguuggaaaggg

SEQ ID NO: 1017936 - RNA, 19 nt, Human
agauuugaaaagcaaagua

SEQ ID NO: 1017937 - RNA, 22 nt, Human
agcaacagagggagaacagggg

SEQ ID NO: 1017938 - RNA, 24 nt, Human
aggagaaaaaaaugguauuucaaa

SEQ ID NO: 1017939 - RNA, 18 nt, Human
agggaaagcagggaaacg

SEQ ID NO: 1017940 - RNA, 18 nt, Human
agggaaauguaaggaaau

SEQ ID NO: 1017941 - RNA, 24 nt, Human
aggggagcaacagagggagaacag

SEQ ID NO: 1017942 - RNA, 19 nt, Human
auagggcagcaguagagga

SEQ ID NO: 1017943 - RNA, 21 nt, Human
aucccuucuaucuuuauucca

SEQ ID NO: 1017944 - RNA, 19 nt, Human
aucuaaucucucucuccca

SEQ ID NO: 1017945 - RNA, 22 nt, Human
auucugaacaacccuccucacc

SEQ ID NO: 1017946 - RNA, 24 nt, Human
caaaaaaaaaggaaaagaaacaaa

SEQ ID NO: 1017947 - RNA, 23 nt, Human
caaaaacacuaccuuuucucucc

SEQ ID NO: 1017948 - RNA, 22 nt, Human
caaaacaaccuugggcaaccac

SEQ ID NO: 1017949 - RNA, 20 nt, Human
caaacagguacaaaggaggu

SEQ ID NO: 1017950 - RNA, 26 nt, Human
caaagacuccaaaaaaaaaaaaucag

SEQ ID NO: 1017951 - RNA, 21 nt, Human
caaagcaagaaacaaaaagca

SEQ ID NO: 1017952 - RNA, 20 nt, Human
caaaugaaauuuacggagac

SEQ ID NO: 1017953 - RNA, 19 nt, Human
caacaaagacuccaaaaaa

SEQ ID NO: 1017954 - RNA, 21 nt, Human
caacacaaccucuaucccaag

SEQ ID NO: 1017955 - RNA, 23 nt, Human
caacccuccucacccucucaaaa

SEQ ID NO: 1017956 - RNA, 22 nt, Human
caaggagucucaguuacgcaaa

SEQ ID NO: 1017957 - RNA, 21 nt, Human
cacccucucaaaauucuuaaa

SEQ ID NO: 1017958 - RNA, 21 nt, Human
cagaaagauuuuuaaaaaugc

SEQ ID NO: 1017959 - RNA, 21 nt, Human
cagccccacaaaauauagcaa

SEQ ID NO: 1017960 - RNA, 20 nt, Human
caggggggaauaaaggaaga

SEQ ID NO: 1017961 - RNA, 21 nt, Human
caucccuucuaucuuuauucc

SEQ ID NO: 1017962 - RNA, 18 nt, Human
cauuucugacaauaaaca

SEQ ID NO: 1017963 - RNA, 20 nt, Human
ccaaaaaagcacuaggcuaa

SEQ ID NO: 1017964 - RNA, 22 nt, Human
ccaacacaaccucuaucccaag

SEQ ID NO: 1017965 - RNA, 19 nt, Human
ccacaacacaaaaacacac

SEQ ID NO: 1017966 - RNA, 21 nt, Human
ccacaacacaaaaacacacau

SEQ ID NO: 1017967 - RNA, 22 nt, Human
ccagcaaaacgucauucuuucc

SEQ ID NO: 1017968 - RNA, 20 nt, Human
ccagccuccagagauuagaa

SEQ ID NO: 1017969 - RNA, 18 nt, Human
ccaugccccaagucuucc

SEQ ID NO: 1017970 - RNA, 19 nt, Human
cccacaaaauauagcaaca

SEQ ID NO: 1017971 - RNA, 25 nt, Human
cccacggccauggccaguguuugcc

SEQ ID NO: 1017972 - RNA, 21 nt, Human
cccaggggggaauaaaggaag

SEQ ID NO: 1017973 - RNA, 19 nt, Human
cccaguacucccacggcca

SEQ ID NO: 1017974 - RNA, 21 nt, Human
cccaguacucccacggccaug

SEQ ID NO: 1017975 - RNA, 23 nt, Human
cccaugaaaggagaaggguccug

SEQ ID NO: 1017976 - RNA, 24 nt, Human
ccccccgcccccucgccucccgaa

SEQ ID NO: 1017977 - RNA, 22 nt, Human
cccccucgccucccgaagccug

SEQ ID NO: 1017978 - RNA, 19 nt, Human
ccccgcccccucgccuccc

SEQ ID NO: 1017979 - RNA, 22 nt, Human
ccccgcccccucgccucccgaa

SEQ ID NO: 1017980 - RNA, 21 nt, Human
cccuaaagugccaagucaagc

SEQ ID NO: 1017981 - RNA, 18 nt, Human
ccucggcgcugcuccccc

SEQ ID NO: 1017982 - RNA, 22 nt, Human
ccucggcgcugcuccccccgcc

SEQ ID NO: 1017983 - RNA, 18 nt, Human
ccuucuaucuuuauucca

SEQ ID NO: 1017984 - RNA, 21 nt, Human
cgacuccaaaccauguuggca

SEQ ID NO: 1017985 - RNA, 25 nt, Human
cgcaaaacaaccuugggcaaccaca

SEQ ID NO: 1017986 - RNA, 23 nt, Human
cggcgcugcuccccccgcccccu

SEQ ID NO: 1017987 - RNA, 18 nt, Human
cggcggccucggcgcugc

SEQ ID NO: 1017988 - RNA, 22 nt, Human
cggcggccucggcgcugcuccc

SEQ ID NO: 1017989 - RNA, 22 nt, Human
cuaaucucucucucccagcccc

SEQ ID NO: 1017990 - RNA, 22 nt, Human
cuaccugucucucccaugaaag

SEQ ID NO: 1017991 - RNA, 20 nt, Human
cuccaaaaaaaaaaaaucag

SEQ ID NO: 1017992 - RNA, 25 nt, Human
cuccaaaaaaaaaaaaucagacuuc

SEQ ID NO: 1017993 - RNA, 20 nt, Human
cucccaguacucccacggcc

SEQ ID NO: 1017994 - RNA, 20 nt, Human
cuccccccgcccccucgccu

SEQ ID NO: 1017995 - RNA, 22 nt, Human
cucccgaagccugcggcucacc

SEQ ID NO: 1017996 - RNA, 19 nt, Human
cugcugcuucuuuuuuguc

SEQ ID NO: 1017997 - RNA, 23 nt, Human
cuuccaagcaagugagcaccauu

SEQ ID NO: 1017998 - RNA, 23 nt, Human
cuuuaagagcugcugcugcuucu

SEQ ID NO: 1017999 - RNA, 23 nt, Human
gaacaacccuccucacccucuca

SEQ ID NO: 1018000 - RNA, 21 nt, Human
gacucauagacuuuguuccuu

SEQ ID NO: 1018001 - RNA, 23 nt, Human
gagaugcugggaucaaagaaggg

SEQ ID NO: 1018002 - RNA, 19 nt, Human
gaggcauauggagcagaag

SEQ ID NO: 1018003 - RNA, 22 nt, Human
gaggcggaggcggcggccucgg

SEQ ID NO: 1018004 - RNA, 22 nt, Human
gcaaaacaaccuugggcaacca

SEQ ID NO: 1018005 - RNA, 24 nt, Human
gcaaaacaaccuugggcaaccaca

SEQ ID NO: 1018006 - RNA, 22 nt, Human
gcaagaaacaaaaagcaaggag

SEQ ID NO: 1018007 - RNA, 18 nt, Human
gccugcuuccaagcaagu

SEQ ID NO: 1018008 - RNA, 19 nt, Human
gcugucccaugccccaagu

SEQ ID NO: 1018009 - RNA, 22 nt, Human
ggaaacggcugagauaguuuaa

SEQ ID NO: 1018010 - RNA, 19 nt, Human
ggaaagcagggaaacggcu

SEQ ID NO: 1018011 - RNA, 24 nt, Human
ggaaagcauauucuacaucccuuc

SEQ ID NO: 1018012 - RNA, 21 nt, Human
ggaaauugugaugcccagaau

SEQ ID NO: 1018013 - RNA, 18 nt, Human
ggauuuagaagacaguaa

SEQ ID NO: 1018014 - RNA, 25 nt, Human
gggaaaaacacaaaaggagaaaaga

SEQ ID NO: 1018015 - RNA, 23 nt, Human
gggaaagcagggaaacggcugag

SEQ ID NO: 1018016 - RNA, 23 nt, Human
gggaauaaaggaagaggggauga

SEQ ID NO: 1018017 - RNA, 18 nt, Human
gggcagcaguagaggagg

SEQ ID NO: 1018018 - RNA, 21 nt, Human
gggcuuguccgucccccaccc

SEQ ID NO: 1018019 - RNA, 18 nt, Human
ggggauggggagguggag

SEQ ID NO: 1018020 - RNA, 21 nt, Human
gguaggagccagaaccauagg

SEQ ID NO: 1018021 - RNA, 21 nt, Human
guagagggcagcccccucccu

SEQ ID NO: 1018022 - RNA, 23 nt, Human
guggaggguguauguaugugugu

SEQ ID NO: 1018023 - RNA, 23 nt, Human
uaaaaaugcaguuugcuuuugug

SEQ ID NO: 1018024 - RNA, 20 nt, Human
uaaaagagcucccuggaagg

SEQ ID NO: 1018025 - RNA, 19 nt, Human
uaaauucucugaagcauau

SEQ ID NO: 1018026 - RNA, 26 nt, Human
uaacagcaguguccuucacuaacagg

SEQ ID NO: 1018027 - RNA, 23 nt, Human
uaagccauguuugugaaacacaa

SEQ ID NO: 1018028 - RNA, 23 nt, Human
uaaggaaucucagguuccacaac

SEQ ID NO: 1018029 - RNA, 18 nt, Human
uaaucuaaucucucucuc

SEQ ID NO: 1018030 - RNA, 22 nt, Human
uaaucuaaucucucucucccag

SEQ ID NO: 1018031 - RNA, 18 nt, Human
uacagguuggaaaggggg

SEQ ID NO: 1018032 - RNA, 19 nt, Human
uaccuagaauaagagaaaa

SEQ ID NO: 1018033 - RNA, 21 nt, Human
uacucccaguacucccacggc

SEQ ID NO: 1018034 - RNA, 21 nt, Human
uagaauaagagaaaacaaaga

SEQ ID NO: 1018035 - RNA, 21 nt, Human
uagauucugaacaacccuccu

SEQ ID NO: 1018036 - RNA, 21 nt, Human
uagcuguaucucaacuacagu

SEQ ID NO: 1018037 - RNA, 22 nt, Human
uagucaauauaccaaagucgac

SEQ ID NO: 1018038 - RNA, 26 nt, Human
uauagcaacaaagacuccaaaaaaag

SEQ ID NO: 1018039 - RNA, 18 nt, Human
uaugcagugggaagaguu

SEQ ID NO: 1018040 - RNA, 19 nt, Human
uaugguauuugaagauaag

SEQ ID NO: 1018041 - RNA, 18 nt, Human
uauguaugugugugcugu

SEQ ID NO: 1018042 - RNA, 19 nt, Human
uauguaugugugugcugug

SEQ ID NO: 1018043 - RNA, 19 nt, Human
uauuccauuuucuaucccc

SEQ ID NO: 1018044 - RNA, 24 nt, Human
ucaaagagcauacuaguuaccaug

SEQ ID NO: 1018045 - RNA, 20 nt, Human
ucacccucucaaaauucuua

SEQ ID NO: 1018046 - RNA, 25 nt, Human
ucacccucucaaaauucuuaaguuu

SEQ ID NO: 1018047 - RNA, 19 nt, Human
uccacaacacaaaaacaca

SEQ ID NO: 1018048 - RNA, 24 nt, Human
uccacaauggaaagagccgggguc

SEQ ID NO: 1018049 - RNA, 19 nt, Human
ucccaugaaaggagaaggg

SEQ ID NO: 1018050 - RNA, 25 nt, Human
ucgauucuagcuucugaggcacacu

SEQ ID NO: 1018051 - RNA, 22 nt, Human
ucuaugguauuugaagauaagu

SEQ ID NO: 1018052 - RNA, 18 nt, Human
ucucucucucccagcccc

SEQ ID NO: 1018053 - RNA, 21 nt, Human
ucucucucucccagccccaca

SEQ ID NO: 1018054 - RNA, 18 nt, Human
ucugccauuagccuggga

SEQ ID NO: 1018055 - RNA, 23 nt, Human
ucuucccuaaaaaggcuuccaaa

SEQ ID NO: 1018056 - RNA, 21 nt, Human
ugaaauguagaacuuuaagau

SEQ ID NO: 1018057 - RNA, 19 nt, Human
ugaccuuguacaaaaacac

SEQ ID NO: 1018058 - RNA, 23 nt, Human
ugacuaaccacugcaaaugaaau

SEQ ID NO: 1018059 - RNA, 21 nt, Human
ugagaauaacccucacuuuaa

SEQ ID NO: 1018060 - RNA, 25 nt, Human
ugagaauaacccucacuuuaagagc

SEQ ID NO: 1018061 - RNA, 26 nt, Human
ugagcugucccaugccccaagucuuc

SEQ ID NO: 1018062 - RNA, 21 nt, Human
ugaguacauuggaaaguggga

SEQ ID NO: 1018063 - RNA, 22 nt, Human
ugauaaagcaaagcaagaaaca

SEQ ID NO: 1018064 - RNA, 18 nt, Human
ugauacagagcccugucu

SEQ ID NO: 1018065 - RNA, 23 nt, Human
ugcccagaauuuuaggugaaagc

SEQ ID NO: 1018066 - RNA, 21 nt, Human
ugccuaaauucucugaagcau

SEQ ID NO: 1018067 - RNA, 19 nt, Human
ugcuagucuauaccucgau

SEQ ID NO: 1018068 - RNA, 25 nt, Human
uggaaugaacugauaaagcaaagca

SEQ ID NO: 1018069 - RNA, 21 nt, Human
ugggaaaaacacaaaaggaga

SEQ ID NO: 1018070 - RNA, 24 nt, Human
ugggcaaccacaaagaagagggau

SEQ ID NO: 1018071 - RNA, 18 nt, Human
uggggagguggagggugu

SEQ ID NO: 1018072 - RNA, 24 nt, Human
uguuacuaaaggggaaacagagca

SEQ ID NO: 1018073 - RNA, 23 nt, Human
uuacaacaggcaaaaaaggcuuu

SEQ ID NO: 1018074 - RNA, 18 nt, Human
uuacuccucuuuuuggga

SEQ ID NO: 1018075 - RNA, 20 nt, Human
uuaggugaaagccaaagcaa

SEQ ID NO: 1018076 - RNA, 20 nt, Human
uucacuaacagcaguguccu

SEQ ID NO: 1018077 - RNA, 25 nt, Human
uucuugaguacauuggaaaguggga

SEQ ID NO: 1018078 - RNA, 19 nt, Human
uuguaggugucucacucuc

SEQ ID NO: 1018079 - RNA, 20 nt, Human
uuucugacaauaaacaauga

SEQ ID NO: 1018080 - RNA, 25 nt, Human
uuucuuuaaaagccacuggagagcu

SEQ ID NO: 1018081 - RNA, 24 nt, Human
uuuuugggaaaaaagaauucuuug

SEQ ID NO: 1018082 - RNA, 24 nt, Human
uuuuuuuuguccuuuuuaacuuuu

SEQ ID NO: 1018083 - RNA, 21 nt, Human
aaacaaggcagaagcuacaaa

SEQ ID NO: 1018084 - RNA, 22 nt, Human
aaacagagauacuuuaagucca

SEQ ID NO: 1018085 - RNA, 20 nt, Human
aaaugcuugaaguuguuacu

SEQ ID NO: 1018086 - RNA, 20 nt, Human
aacaggcucagaacucucuc

SEQ ID NO: 1018087 - RNA, 21 nt, Human
aacucagagggaagucuucga

SEQ ID NO: 1018088 - RNA, 24 nt, Human
aagucagcagaaacggccugagca

SEQ ID NO: 1018089 - RNA, 21 nt, Human
acagggcaccacaguguacaa

SEQ ID NO: 1018090 - RNA, 20 nt, Human
acucccaccccaaccuuccu

SEQ ID NO: 1018091 - RNA, 26 nt, Human
acucccaccccaaccuuccuggaagg

SEQ ID NO: 1018092 - RNA, 26 nt, Human
agaaacacauaccauccagccccuga

SEQ ID NO: 1018093 - RNA, 27 nt, Human
agaaacacauaccauccagccccugaa

SEQ ID NO: 1018094 - RNA, 23 nt, Human
agcacucacucacucucccuagc

SEQ ID NO: 1018095 - RNA, 18 nt, Human
agcagcuggggauggggg

SEQ ID NO: 1018096 - RNA, 18 nt, Human
agcugcaaugcaaacuga

SEQ ID NO: 1018097 - RNA, 18 nt, Human
aggauagagaagggagag

SEQ ID NO: 1018098 - RNA, 21 nt, Human
aggcaaacggagccacucucu

SEQ ID NO: 1018099 - RNA, 21 nt, Human
agugaagacugaaugucaacu

SEQ ID NO: 1018100 - RNA, 21 nt, Human
auaaggcagcagaaacacaua

SEQ ID NO: 1018101 - RNA, 21 nt, Human
augaaggcucagaaaaagucu

SEQ ID NO: 1018102 - RNA, 18 nt, Human
caaacucagagcagcugg

SEQ ID NO: 1018103 - RNA, 22 nt, Human
caacucagagggaagucuucga

SEQ ID NO: 1018104 - RNA, 19 nt, Human
cacaacuuugccugucuuc

SEQ ID NO: 1018105 - RNA, 22 nt, Human
cacagcaucaccaaagcgggga

SEQ ID NO: 1018106 - RNA, 24 nt, Human
cacccagaagucagcacacauacu

SEQ ID NO: 1018107 - RNA, 20 nt, Human
cacccuggaguuuucuccgc

SEQ ID NO: 1018108 - RNA, 25 nt, Human
cacgacugauuacuuucaaucccag

SEQ ID NO: 1018109 - RNA, 21 nt, Human
cacucaaaacucccaccccaa

SEQ ID NO: 1018110 - RNA, 20 nt, Human
cacucacucacucucccuag

SEQ ID NO: 1018111 - RNA, 21 nt, Human
cagaaacacauaccauccagc

SEQ ID NO: 1018112 - RNA, 24 nt, Human
cagcagaaacacauaccauccagc

SEQ ID NO: 1018113 - RNA, 21 nt, Human
cagcugcaaugcaaacugaaa

SEQ ID NO: 1018114 - RNA, 23 nt, Human
caggaagguuucucuaaaauuaa

SEQ ID NO: 1018115 - RNA, 23 nt, Human
cauccagccccugaaccugaauu

SEQ ID NO: 1018116 - RNA, 20 nt, Human
cauccucuuucccacucaaa

SEQ ID NO: 1018117 - RNA, 23 nt, Human
ccaaaacagacaucaugcuaagg

SEQ ID NO: 1018118 - RNA, 20 nt, Human
ccaaagccauucaaacagcc

SEQ ID NO: 1018119 - RNA, 19 nt, Human
ccacucaaaacucccaccc

SEQ ID NO: 1018120 - RNA, 19 nt, Human
ccagccccugaaccugaau

SEQ ID NO: 1018121 - RNA, 20 nt, Human
ccagcugcaaugcaaacuga

SEQ ID NO: 1018122 - RNA, 22 nt, Human
cccaccccaaccuuccuggaag

SEQ ID NO: 1018123 - RNA, 20 nt, Human
cccacucaaaacucccaccc

SEQ ID NO: 1018124 - RNA, 23 nt, Human
cccagcugcaaugcaaacugaaa

SEQ ID NO: 1018125 - RNA, 23 nt, Human
ccucuuucccacucaaaacuccc

SEQ ID NO: 1018126 - RNA, 24 nt, Human
ccucuuucccacucaaaacuccca

SEQ ID NO: 1018127 - RNA, 23 nt, Human
ccuggaaggcagggcuaacagga

SEQ ID NO: 1018128 - RNA, 23 nt, Human
cggccugagcagugcccaagagc

SEQ ID NO: 1018129 - RNA, 20 nt, Human
cggcuaaacccugacaucuu

SEQ ID NO: 1018130 - RNA, 23 nt, Human
cgggccccgagucccagcccacc

SEQ ID NO: 1018131 - RNA, 19 nt, Human
cuaaacccugacaucagua

SEQ ID NO: 1018132 - RNA, 18 nt, Human
cuaaggucccucucccuu

SEQ ID NO: 1018133 - RNA, 22 nt, Human
cucaaaacucccaccccaaccu

SEQ ID NO: 1018134 - RNA, 23 nt, Human
cuuagcacggaugaaggcucaga

SEQ ID NO: 1018135 - RNA, 23 nt, Human
cuugaaguuguuacuuugcucau

SEQ ID NO: 1018136 - RNA, 19 nt, Human
gaaacaggauagagaaggg

SEQ ID NO: 1018137 - RNA, 21 nt, Human
gaaggcagggcuaacaggacc

SEQ ID NO: 1018138 - RNA, 24 nt, Human
gcaagucagcagaaacggccugag

SEQ ID NO: 1018139 - RNA, 21 nt, Human
gcacagcaucaccaaagcggg

SEQ ID NO: 1018140 - RNA, 20 nt, Human
gccccgagucccagcccacc

SEQ ID NO: 1018141 - RNA, 21 nt, Human
gccccgagucccagcccaccc

SEQ ID NO: 1018142 - RNA, 22 nt, Human
ggaauucuuuuacugugcgcuu

SEQ ID NO: 1018143 - RNA, 18 nt, Human
gggaugggggucucagcu

SEQ ID NO: 1018144 - RNA, 22 nt, Human
gguguugggguguagagaggaa

SEQ ID NO: 1018145 - RNA, 24 nt, Human
gucaacaaauauuuauugggcauu

SEQ ID NO: 1018146 - RNA, 18 nt, Human
uacaguuucuccugaauu

SEQ ID NO: 1018147 - RNA, 20 nt, Human
uagaaucaaaccaaaaacaa

SEQ ID NO: 1018148 - RNA, 19 nt, Human
uagauacgccgucaaacaa

SEQ ID NO: 1018149 - RNA, 24 nt, Human
uagcaaacaggcucagaacucucu

SEQ ID NO: 1018150 - RNA, 24 nt, Human
ucacucacucucccuagcaaacag

SEQ ID NO: 1018151 - RNA, 21 nt, Human
ucagcacacauacugcuggga

SEQ ID NO: 1018152 - RNA, 20 nt, Human
ucaucuccugagggcaauuc

SEQ ID NO: 1018153 - RNA, 19 nt, Human
uccaacuccuucuaugggu

SEQ ID NO: 1018154 - RNA, 22 nt, Human
uccaacuccuucuauggguuua

SEQ ID NO: 1018155 - RNA, 18 nt, Human
uccaagggugccagagca

SEQ ID NO: 1018156 - RNA, 22 nt, Human
uccagggcccccgaagccgcuc

SEQ ID NO: 1018157 - RNA, 22 nt, Human
ucccacucaaaacucccacccc

SEQ ID NO: 1018158 - RNA, 25 nt, Human
ucccacucaaaacucccaccccaac

SEQ ID NO: 1018159 - RNA, 23 nt, Human
ucccuagcaaacaggcucagaac

SEQ ID NO: 1018160 - RNA, 24 nt, Human
ucccuccaggaagguuucucuaaa

SEQ ID NO: 1018161 - RNA, 23 nt, Human
uccuagugucaguuuugaguuuc

SEQ ID NO: 1018162 - RNA, 24 nt, Human
uccucuuucccacucaaaacuccc

SEQ ID NO: 1018163 - RNA, 21 nt, Human
ucuggggcacccagaagucag

SEQ ID NO: 1018164 - RNA, 19 nt, Human
ugaauugacaaacugaacu

SEQ ID NO: 1018165 - RNA, 19 nt, Human
ugagauggcucucaucucc

SEQ ID NO: 1018166 - RNA, 18 nt, Human
ugcagcccaaacucagag

SEQ ID NO: 1018167 - RNA, 18 nt, Human
ugccagagcagucauagc

SEQ ID NO: 1018168 - RNA, 20 nt, Human
ugccagagcagucauagcac

SEQ ID NO: 1018169 - RNA, 27 nt, Human
uggaaggcagggcuaacaggaccuccu

SEQ ID NO: 1018170 - RNA, 20 nt, Human
uggccugauccaagggugcc

SEQ ID NO: 1018171 - RNA, 21 nt, Human
uggggaacacgaaaagauuuc

SEQ ID NO: 1018172 - RNA, 19 nt, Human
ugguggauugaauaaggca

SEQ ID NO: 1018173 - RNA, 19 nt, Human
uguagagaggaagugacuc

SEQ ID NO: 1018174 - RNA, 23 nt, Human
ugucuagauuuccaagcaugaag

SEQ ID NO: 1018175 - RNA, 23 nt, Human
uucccacucaaaacucccacccc

SEQ ID NO: 1018176 - RNA, 23 nt, Human
uugggguguagagaggaagugac

SEQ ID NO: 1018177 - RNA, 23 nt, Human
uuucuggggcacccagaagucag

SEQ ID NO: 1018178 - RNA, 19 nt, Human
acuccaggccuggccugca

SEQ ID NO: 1018179 - RNA, 19 nt, Human
agacccgggaggaaagcaa

SEQ ID NO: 1018180 - RNA, 26 nt, Human
agacccgggaggaaagcaagucaaga

SEQ ID NO: 1018181 - RNA, 21 nt, Human
aggggucggaggcuggagacc

SEQ ID NO: 1018182 - RNA, 24 nt, Human
auggggcgaggggucggaggcugg

SEQ ID NO: 1018183 - RNA, 20 nt, Human
caagacaaaugcuugaccca

SEQ ID NO: 1018184 - RNA, 22 nt, Human
caccacuacgcucucaccagcc

SEQ ID NO: 1018185 - RNA, 23 nt, Human
cagacaccucucauauucgcccc

SEQ ID NO: 1018186 - RNA, 24 nt, Human
cccgccucuccuccacagaaccca

SEQ ID NO: 1018187 - RNA, 22 nt, Human
cccucagccuccccauuacccc

SEQ ID NO: 1018188 - RNA, 21 nt, Human
ccugcagccacucugguggac

SEQ ID NO: 1018189 - RNA, 21 nt, Human
cgccccgaucucagauuccug

SEQ ID NO: 1018190 - RNA, 24 nt, Human
cggggacuccaggccuggccugca

SEQ ID NO: 1018191 - RNA, 18 nt, Human
cugccagcuccuucaugg

SEQ ID NO: 1018192 - RNA, 21 nt, Human
gaagaggugcccucagccucc

SEQ ID NO: 1018193 - RNA, 19 nt, Human
gauuccugcccacuguccc

SEQ ID NO: 1018194 - RNA, 19 nt, Human
gcccaguuuccacucuuaa

SEQ ID NO: 1018195 - RNA, 18 nt, Human
ggaaaggggcaugaguug

SEQ ID NO: 1018196 - RNA, 23 nt, Human
ggagacccgggaggaaagcaagu

SEQ ID NO: 1018197 - RNA, 21 nt, Human
ggaggcuggagacccgggagg

SEQ ID NO: 1018198 - RNA, 19 nt, Human
gggaaaggggcaugaguug

SEQ ID NO: 1018199 - RNA, 19 nt, Human
gggacuccaggccuggccu

SEQ ID NO: 1018200 - RNA, 21 nt, Human
gucaagacaaaugcuugaccc

SEQ ID NO: 1018201 - RNA, 23 nt, Human
ucaagacaaaugcuugacccacg

SEQ ID NO: 1018202 - RNA, 24 nt, Human
ucaagacaaaugcuugacccacgg

SEQ ID NO: 1018203 - RNA, 22 nt, Human
uccacagaacccacauccuagg

SEQ ID NO: 1018204 - RNA, 23 nt, Human
uccacucuuaacucccccagaca

SEQ ID NO: 1018205 - RNA, 21 nt, Human
uccaggccuggccugcagcca

SEQ ID NO: 1018206 - RNA, 19 nt, Human
uccugggaaaggggcauga

SEQ ID NO: 1018207 - RNA, 20 nt, Human
uccugggaaaggggcaugag

SEQ ID NO: 1018208 - RNA, 18 nt, Human
ucggaggcuggagacccg

SEQ ID NO: 1018209 - RNA, 22 nt, Human
ugaguugguaggaagucagguu

SEQ ID NO: 1018210 - RNA, 23 nt, Human
uuaccccgccucuccuccacaga

SEQ ID NO: 1018211 - RNA, 21 nt, Human
uucauggggcgaggggucgga

SEQ ID NO: 1018212 - RNA, 20 nt, Human
uuggcuuugggucugggguc

SEQ ID NO: 1018213 - RNA, 23 nt, Human
uuuauuuccaccugccagcuccu

SEQ ID NO: 1018214 - RNA, 18 nt, Human
aaaaagcaaacaaaaccu

SEQ ID NO: 1018215 - RNA, 25 nt, Human
aaaaauagggggggaagccgguacc

SEQ ID NO: 1018216 - RNA, 20 nt, Human
aacaaaguaacuuacaacua

SEQ ID NO: 1018217 - RNA, 21 nt, Human
aagcauacaucauuucaaagc

SEQ ID NO: 1018218 - RNA, 26 nt, Human
aauaaaaauaaugggaaaaaaucgga

SEQ ID NO: 1018219 - RNA, 21 nt, Human
aauaaugggaaaaaaucggaa

SEQ ID NO: 1018220 - RNA, 21 nt, Human
acuagagacaaaugcccacaa

SEQ ID NO: 1018221 - RNA, 22 nt, Human
agaaaguuauuuuuggccuugc

SEQ ID NO: 1018222 - RNA, 26 nt, Human
agagcaacugaagcacacauccugca

SEQ ID NO: 1018223 - RNA, 22 nt, Human
agaguaaucucacacacaccaa

SEQ ID NO: 1018224 - RNA, 19 nt, Human
agggggggaagcuagggca

SEQ ID NO: 1018225 - RNA, 20 nt, Human
auaucaaaauacacagagca

SEQ ID NO: 1018226 - RNA, 19 nt, Human
aucugggugauggggugug

SEQ ID NO: 1018227 - RNA, 24 nt, Human
caacaaaaugacaucuguguacca

SEQ ID NO: 1018228 - RNA, 24 nt, Human
caacuagugucaaaaagcaaacaa

SEQ ID NO: 1018229 - RNA, 22 nt, Human
cacaagaucugcagaaacauuc

SEQ ID NO: 1018230 - RNA, 18 nt, Human
cacagagcaacugaagca

SEQ ID NO: 1018231 - RNA, 21 nt, Human
cacuagagacaaaugcccaca

SEQ ID NO: 1018232 - RNA, 22 nt, Human
cagaggcuuuaaaacuguugca

SEQ ID NO: 1018233 - RNA, 20 nt, Human
cauauagaaaaacaaacucu

SEQ ID NO: 1018234 - RNA, 21 nt, Human
caucauuucaaagcaaaagua

SEQ ID NO: 1018235 - RNA, 26 nt, Human
cauuuuuauuaucaauuaugcagagg

SEQ ID NO: 1018236 - RNA, 18 nt, Human
cccacaagaucugcagaa

SEQ ID NO: 1018237 - RNA, 23 nt, Human
cggagcacauuuuuuuuuuuggg

SEQ ID NO: 1018238 - RNA, 23 nt, Human
cuaguuaauaaaagacacaaaaa

SEQ ID NO: 1018239 - RNA, 23 nt, Human
cucacacacaccaauaaggaacu

SEQ ID NO: 1018240 - RNA, 19 nt, Human
cucgucuucgccaguacuc

SEQ ID NO: 1018241 - RNA, 24 nt, Human
gagacaaaugcccacaagaucugc

SEQ ID NO: 1018242 - RNA, 19 nt, Human
ggugaugggguguguggag

SEQ ID NO: 1018243 - RNA, 21 nt, Human
gugaugggguguguggagaag

SEQ ID NO: 1018244 - RNA, 19 nt, Human
guguaccagagcauacaua

SEQ ID NO: 1018245 - RNA, 24 nt, Human
guugcuagaguaaucucacacaca

SEQ ID NO: 1018246 - RNA, 19 nt, Human
uaaaaacaagaaugucaug

SEQ ID NO: 1018247 - RNA, 25 nt, Human
uaaaaauaaugggaaaaaaucggaa

SEQ ID NO: 1018248 - RNA, 23 nt, Human
uaacacugaagauuuacagacac

SEQ ID NO: 1018249 - RNA, 21 nt, Human
uaauaaaagacacaaaaauaa

SEQ ID NO: 1018250 - RNA, 18 nt, Human
uacaaagaucuacguguu

SEQ ID NO: 1018251 - RNA, 23 nt, Human
uacacagagcaacugaagcacac

SEQ ID NO: 1018252 - RNA, 24 nt, Human
uacaucacugcuagaauauuuagc

SEQ ID NO: 1018253 - RNA, 19 nt, Human
uagaaaaacaaacucugca

SEQ ID NO: 1018254 - RNA, 27 nt, Human
uagaaaaacaaacucugcagucucacu

SEQ ID NO: 1018255 - RNA, 21 nt, Human
uagaaaaacuugguucuucca

SEQ ID NO: 1018256 - RNA, 24 nt, Human
uagggcaaccagaaaauaaaauaa

SEQ ID NO: 1018257 - RNA, 23 nt, Human
uauacacaagaaaaaaauauuca

SEQ ID NO: 1018258 - RNA, 22 nt, Human
uauacugcuaaugcacaacuaa

SEQ ID NO: 1018259 - RNA, 21 nt, Human
uaucaacaguaagauguaauu

SEQ ID NO: 1018260 - RNA, 23 nt, Human
uaugucaaaaagucaacuguaca

SEQ ID NO: 1018261 - RNA, 21 nt, Human
ucggagcacauuuuuuuuuuu

SEQ ID NO: 1018262 - RNA, 21 nt, Human
ucuuccaugaaauccuuuaaa

SEQ ID NO: 1018263 - RNA, 20 nt, Human
ugaaugaaaaacagccaaca

SEQ ID NO: 1018264 - RNA, 19 nt, Human
ugagcacucgaauggcagg

SEQ ID NO: 1018265 - RNA, 27 nt, Human
ugggugucuuuccauucaaauaauacc

SEQ ID NO: 1018266 - RNA, 19 nt, Human
ugucaaaaagcaaacaaaa

SEQ ID NO: 1018267 - RNA, 23 nt, Human
ugucaaaaagcaaacaaaaccuc

SEQ ID NO: 1018268 - RNA, 23 nt, Human
ugugaaaaaugcccuuuccacuu

SEQ ID NO: 1018269 - RNA, 22 nt, Human
uguguaccagagcauacauaua

SEQ ID NO: 1018270 - RNA, 19 nt, Human
uucacauauagaaaaacaa

SEQ ID NO: 1018271 - RNA, 26 nt, Human
uucauuuuuuguguauuucacuguag

SEQ ID NO: 1018272 - RNA, 21 nt, Human
uucuuccaugaaauccuuuaa

SEQ ID NO: 1018273 - RNA, 20 nt, Human
uuggccuugcuaugucaaaa

SEQ ID NO: 1018274 - RNA, 24 nt, Human
uuugaauaugauuuuacugaagca

SEQ ID NO: 1018275 - RNA, 23 nt, Human
aaaauacguacaaaguuagccca

SEQ ID NO: 1018276 - RNA, 18 nt, Human
aaacaaccccaaaauauu

SEQ ID NO: 1018277 - RNA, 18 nt, Human
aaagggacaaggaaaaaa

SEQ ID NO: 1018278 - RNA, 24 nt, Human
aaccgccacccccucacacaccuc

SEQ ID NO: 1018279 - RNA, 22 nt, Human
acaaggaaaaaaguuagacagc

SEQ ID NO: 1018280 - RNA, 23 nt, Human
acaccgaggggcuggaggcggcg

SEQ ID NO: 1018281 - RNA, 22 nt, Human
accccggggcucuccggggcac

SEQ ID NO: 1018282 - RNA, 21 nt, Human
acguucacccuuguccccccc

SEQ ID NO: 1018283 - RNA, 20 nt, Human
acucagagccagacagcgcc

SEQ ID NO: 1018284 - RNA, 24 nt, Human
agagcaaggccaaacaccuccgcc

SEQ ID NO: 1018285 - RNA, 24 nt, Human
agagcacauguuugcacacacagg

SEQ ID NO: 1018286 - RNA, 26 nt, Human
agcagauguaguugacacaugucccc

SEQ ID NO: 1018287 - RNA, 26 nt, Human
agccagacagcgccagcagugaaccc

SEQ ID NO: 1018288 - RNA, 22 nt, Human
aggaagucaauagagauucagg

SEQ ID NO: 1018289 - RNA, 20 nt, Human
aggggagggcggccggcugc

SEQ ID NO: 1018290 - RNA, 21 nt, Human
aggggcuggaggcggcgguga

SEQ ID NO: 1018291 - RNA, 24 nt, Human
aggggcuggaggcggcggugagcu

SEQ ID NO: 1018292 - RNA, 21 nt, Human
aggugguggugguucugaagc

SEQ ID NO: 1018293 - RNA, 19 nt, Human
agucagccguggaacucag

SEQ ID NO: 1018294 - RNA, 28 nt, Human
caaaguuagcccauucgacccccaacuc

SEQ ID NO: 1018295 - RNA, 23 nt, Human
caaggaaaaaaguuagacagcug

SEQ ID NO: 1018296 - RNA, 18 nt, Human
cacaccucucccccaaac

SEQ ID NO: 1018297 - RNA, 19 nt, Human
cacgcuccccggagcuccc

SEQ ID NO: 1018298 - RNA, 19 nt, Human
cagcagggcgcguuaggaa

SEQ ID NO: 1018299 - RNA, 20 nt, Human
cagugccccgcuuggcuagg

SEQ ID NO: 1018300 - RNA, 21 nt, Human
ccaaaaugggggaggggagaa

SEQ ID NO: 1018301 - RNA, 20 nt, Human
ccaaacaccuccgccgccau

SEQ ID NO: 1018302 - RNA, 23 nt, Human
ccaaccgccacccccucacacac

SEQ ID NO: 1018303 - RNA, 20 nt, Human
ccaccugacaguggggaggg

SEQ ID NO: 1018304 - RNA, 28 nt, Human
ccagagggguaggagcugagccccaagc

SEQ ID NO: 1018305 - RNA, 23 nt, Human
ccagcagugaacccgguggacag

SEQ ID NO: 1018306 - RNA, 21 nt, Human
ccagguuaucaggacuacagg

SEQ ID NO: 1018307 - RNA, 19 nt, Human
cccaaaauauuucccccuc

SEQ ID NO: 1018308 - RNA, 22 nt, Human
cccaaaauauuucccccucccc

SEQ ID NO: 1018309 - RNA, 20 nt, Human
ccccagacgcaggaguccau

SEQ ID NO: 1018310 - RNA, 22 nt, Human
ccccccagaacagaaaucccgc

SEQ ID NO: 1018311 - RNA, 22 nt, Human
ccccccagaacagaaaucccgc

SEQ ID NO: 1018312 - RNA, 22 nt, Human
ccccgccgcgccuugagcuaga

SEQ ID NO: 1018313 - RNA, 18 nt, Human
ccccggagcucccuguac

SEQ ID NO: 1018314 - RNA, 22 nt, Human
ccccucacacaccucuccccca

SEQ ID NO: 1018315 - RNA, 23 nt, Human
ccccucacacaccucucccccaa

SEQ ID NO: 1018316 - RNA, 24 nt, Human
cccgcacuauccucccuacacaca

SEQ ID NO: 1018317 - RNA, 21 nt, Human
cccugggccccggggggcagg

SEQ ID NO: 1018318 - RNA, 21 nt, Human
cccuguaccgggccgcuaaca

SEQ ID NO: 1018319 - RNA, 25 nt, Human
ccgccgccauugggccgaauugcug

SEQ ID NO: 1018320 - RNA, 18 nt, Human
ccugacaguggggagggg

SEQ ID NO: 1018321 - RNA, 19 nt, Human
ccugggccccggggggcag

SEQ ID NO: 1018322 - RNA, 20 nt, Human
ccuggguagcccauaggccc

SEQ ID NO: 1018323 - RNA, 18 nt, Human
ccuguccccaccaguccc

SEQ ID NO: 1018324 - RNA, 25 nt, Human
cgaaacaaauagcgcgcaugagaac

SEQ ID NO: 1018325 - RNA, 23 nt, Human
cgacccccaacuccuaaagaagg

SEQ ID NO: 1018326 - RNA, 25 nt, Human
cgcacuauccucccuacacacagcc

SEQ ID NO: 1018327 - RNA, 21 nt, Human
cgcccacccccuuggcuauua

SEQ ID NO: 1018328 - RNA, 21 nt, Human
cgcgcccacccccuuggcuau

SEQ ID NO: 1018329 - RNA, 21 nt, Human
cggcagaguagauguaagggg

SEQ ID NO: 1018330 - RNA, 21 nt, Human
cguucacccuuguccccccca

SEQ ID NO: 1018331 - RNA, 23 nt, Human
cuaaagcgaaagugaggguccac

SEQ ID NO: 1018332 - RNA, 18 nt, Human
cucacacuucccugcucc

SEQ ID NO: 1018333 - RNA, 19 nt, Human
cucucucucucucacacuu

SEQ ID NO: 1018334 - RNA, 20 nt, Human
cugaagcgccccagccauau

SEQ ID NO: 1018335 - RNA, 18 nt, Human
gaacucagagccagacag

SEQ ID NO: 1018336 - RNA, 20 nt, Human
gaacucagagccagacagcg

SEQ ID NO: 1018337 - RNA, 20 nt, Human
gcagucagccguggaacuca

SEQ ID NO: 1018338 - RNA, 21 nt, Human
gccaaacaccuccgccgccau

SEQ ID NO: 1018339 - RNA, 21 nt, Human
gcccccaaaaugggggagggg

SEQ ID NO: 1018340 - RNA, 23 nt, Human
gcgcaauuccaaagggacaagga

SEQ ID NO: 1018341 - RNA, 22 nt, Human
gcggcagaguagauguaagggg

SEQ ID NO: 1018342 - RNA, 25 nt, Human
gcuaaagcgaaagugaggguccagu

SEQ ID NO: 1018343 - RNA, 21 nt, Human
gcugcgcgcucuucccugggc

SEQ ID NO: 1018344 - RNA, 25 nt, Human
gcuggaggcggcggugagcuggggg

SEQ ID NO: 1018345 - RNA, 29 nt, Human
ggacggcugggggaggccuggggaggcuu

SEQ ID NO: 1018346 - RNA, 21 nt, Human
ggcggcggugagcugggggcc

SEQ ID NO: 1018347 - RNA, 23 nt, Human
gggaguggaggugacagaaauga

SEQ ID NO: 1018348 - RNA, 22 nt, Human
gggccagguuaucaggacuaca

SEQ ID NO: 1018349 - RNA, 20 nt, Human
ggggaguggaggugacagaa

SEQ ID NO: 1018350 - RNA, 21 nt, Human
ggggaguggaggugacagaaa

SEQ ID NO: 1018351 - RNA, 21 nt, Human
ggguaggagcugagccccaag

SEQ ID NO: 1018352 - RNA, 22 nt, Human
ggguggcgugggcugcgcgcuc

SEQ ID NO: 1018353 - RNA, 20 nt, Human
guaaaguuuuuuuuuuuuuc

SEQ ID NO: 1018354 - RNA, 18 nt, Human
gugaacccgguggacaga

SEQ ID NO: 1018355 - RNA, 21 nt, Human
guggaggugacagaaaugaug

SEQ ID NO: 1018356 - RNA, 22 nt, Human
guggggaggggaaaggaaaacc

SEQ ID NO: 1018357 - RNA, 21 nt, Human
gugguucugaagcgccccagc

SEQ ID NO: 1018358 - RNA, 22 nt, Human
guuuuuuuuuuuuucuuucuuu

SEQ ID NO: 1018359 - RNA, 19 nt, Human
uaaagcgaaagugaggguc

SEQ ID NO: 1018360 - RNA, 18 nt, Human
uaacuaaggagaguacaa

SEQ ID NO: 1018361 - RNA, 19 nt, Human
uacgacuuuggggaacaau

SEQ ID NO: 1018362 - RNA, 22 nt, Human
uagcagcagggcgcguuaggaa

SEQ ID NO: 1018363 - RNA, 19 nt, Human
uauccucccuacacacagc

SEQ ID NO: 1018364 - RNA, 21 nt, Human
uauccucccuacacacagccu

SEQ ID NO: 1018365 - RNA, 20 nt, Human
ucacacaccucucccccaaa

SEQ ID NO: 1018366 - RNA, 22 nt, Human
uccaaagggacaaggaaaaaag

SEQ ID NO: 1018367 - RNA, 23 nt, Human
uccagggaggaggagcgagaaaa

SEQ ID NO: 1018368 - RNA, 24 nt, Human
uccccaccaguccccuucucccgc

SEQ ID NO: 1018369 - RNA, 20 nt, Human
ucccccccagaacagaaauu

SEQ ID NO: 1018370 - RNA, 18 nt, Human
ucccuacacacagccucc

SEQ ID NO: 1018371 - RNA, 20 nt, Human
uccucguggaggcccgggac

SEQ ID NO: 1018372 - RNA, 19 nt, Human
ucucaguccaggugggcca

SEQ ID NO: 1018373 - RNA, 21 nt, Human
ucucccgcccccaaaaugggg

SEQ ID NO: 1018374 - RNA, 19 nt, Human
ucucucacacuucccugcu

SEQ ID NO: 1018375 - RNA, 20 nt, Human
ucucucucucucucacacuu

SEQ ID NO: 1018376 - RNA, 19 nt, Human
ucugcagucagccguggaa

SEQ ID NO: 1018377 - RNA, 20 nt, Human
ucugugauucuaagaauaga

SEQ ID NO: 1018378 - RNA, 21 nt, Human
ucuguggguugcuggggguuc

SEQ ID NO: 1018379 - RNA, 21 nt, Human
ucuuaugucuuuacgacuuug

SEQ ID NO: 1018380 - RNA, 18 nt, Human
ucuuucucuucuucuucc

SEQ ID NO: 1018381 - RNA, 18 nt, Human
ucuuucuuucucuucuuc

SEQ ID NO: 1018382 - RNA, 22 nt, Human
ucuuucuuucuuucucuucucc

SEQ ID NO: 1018383 - RNA, 24 nt, Human
ugacacauguccccauuucccuua

SEQ ID NO: 1018384 - RNA, 23 nt, Human
ugacagaaaugaugauguuggag

SEQ ID NO: 1018385 - RNA, 19 nt, Human
ugacaguggggaggggaaa

SEQ ID NO: 1018386 - RNA, 21 nt, Human
ugacaguggggaggggaaagg

SEQ ID NO: 1018387 - RNA, 20 nt, Human
ugagcugggggccauggugu

SEQ ID NO: 1018388 - RNA, 23 nt, Human
ugccgacccacgcuccccggagc

SEQ ID NO: 1018389 - RNA, 23 nt, Human
ugcuccaaccgccacccccucac

SEQ ID NO: 1018390 - RNA, 19 nt, Human
uggaagugugaaaacuuuu

SEQ ID NO: 1018391 - RNA, 20 nt, Human
uggaggcggcggugagcugg

SEQ ID NO: 1018392 - RNA, 22 nt, Human
uggaggcggcggugagcugggg

SEQ ID NO: 1018393 - RNA, 25 nt, Human
uggccuuggcucauggaaacaaccc

SEQ ID NO: 1018394 - RNA, 23 nt, Human
ugggccccggggggcaggcccag

SEQ ID NO: 1018395 - RNA, 24 nt, Human
ugggcugcgcgcucuucccugggc

SEQ ID NO: 1018396 - RNA, 23 nt, Human
ugggggaggggagaagauguugg

SEQ ID NO: 1018397 - RNA, 22 nt, Human
uggggguucugcuccagagggg

SEQ ID NO: 1018398 - RNA, 20 nt, Human
uggguugcuggggguucugc

SEQ ID NO: 1018399 - RNA, 24 nt, Human
uggugguucugaagcgccccagcc

SEQ ID NO: 1018400 - RNA, 19 nt, Human
uguaccgggccgcuaacac

SEQ ID NO: 1018401 - RNA, 22 nt, Human
ugugaaaacuuucuccuugcaa

SEQ ID NO: 1018402 - RNA, 19 nt, Human
uguucuggaagugugaaaa

SEQ ID NO: 1018403 - RNA, 22 nt, Human
uucuccuguccccaccaguccc

SEQ ID NO: 1018404 - RNA, 18 nt, Human
uucuuucuuucuuucucu

SEQ ID NO: 1018405 - RNA, 22 nt, Human
uugacacauguccccauuuccc

SEQ ID NO: 1018406 - RNA, 22 nt, Human
uugauuucuuaaacuuccaggg

SEQ ID NO: 1018407 - RNA, 21 nt, Human
uuggcucauggaaacaacccc

SEQ ID NO: 1018408 - RNA, 21 nt, Human
uuuuuuuuucuuucuuucuuu

SEQ ID NO: 1018409 - RNA, 21 nt, Human
aacuucuuuuguccuggccuc

SEQ ID NO: 1018410 - RNA, 21 nt, Human
agcgauuggcagagugaacac

SEQ ID NO: 1018411 - RNA, 21 nt, Human
cacaaucaggcccauagaccc

SEQ ID NO: 1018412 - RNA, 18 nt, Human
ccuccagcgauuggcaga

SEQ ID NO: 1018413 - RNA, 22 nt, Human
cgguggcaagucugagucacgg

SEQ ID NO: 1018414 - RNA, 19 nt, Human
cuuaacucugcuuauuccu

SEQ ID NO: 1018415 - RNA, 21 nt, Human
gaccgagauuuuggaaauggc

SEQ ID NO: 1018416 - RNA, 21 nt, Human
gccucggcugcucgauuggcu

SEQ ID NO: 1018417 - RNA, 23 nt, Human
ggcagagugaacaccacauuuga

SEQ ID NO: 1018418 - RNA, 26 nt, Human
uaggaugugguccaaggacucccacu

SEQ ID NO: 1018419 - RNA, 23 nt, Human
ucaggcccauagacccucacugg

SEQ ID NO: 1018420 - RNA, 18 nt, Human
uggcaagucugagucacg

SEQ ID NO: 1018421 - RNA, 24 nt, Human
uggcaguagccucggcugcucgau

SEQ ID NO: 1018422 - RNA, 22 nt, Human
ugguccaaggacucccacuuau

SEQ ID NO: 1018423 - RNA, 25 nt, Human
uguccuggccucuuaacucugcuua

SEQ ID NO: 1018424 - RNA, 20 nt, Human
ugucucagguuaggaugugg

SEQ ID NO: 1018425 - RNA, 18 nt, Human
uucccacucuauccucca

SEQ ID NO: 1018426 - RNA, 19 nt, Human
aaaaaauaaaauagagagg

SEQ ID NO: 1018427 - RNA, 20 nt, Human
aaaauaauagugacggagaa

SEQ ID NO: 1018428 - RNA, 20 nt, Human
aaauaaaaucaagaaacucg

SEQ ID NO: 1018429 - RNA, 23 nt, Human
aacacuauuucucuagggauacu

SEQ ID NO: 1018430 - RNA, 18 nt, Human
aagaaaauauuuucacac

SEQ ID NO: 1018431 - RNA, 22 nt, Human
aagaaacucgggcccaaugaac

SEQ ID NO: 1018432 - RNA, 22 nt, Human
aagccgacaaaauauaagaaac

SEQ ID NO: 1018433 - RNA, 22 nt, Human
aaggaacuguucuguaccgacu

SEQ ID NO: 1018434 - RNA, 21 nt, Human
aaguaacaaaguucauaaaga

SEQ ID NO: 1018435 - RNA, 24 nt, Human
aaucauggaauuuuagaccuggaa

SEQ ID NO: 1018436 - RNA, 21 nt, Human
acaaaauauaagaaacaaaga

SEQ ID NO: 1018437 - RNA, 20 nt, Human
acaccaagaagaaauuucaa

SEQ ID NO: 1018438 - RNA, 18 nt, Human
accaagaagaaauuucaa

SEQ ID NO: 1018439 - RNA, 21 nt, Human
acuacaaagggacagcauaag

SEQ ID NO: 1018440 - RNA, 19 nt, Human
acuagagucaaggauucca

SEQ ID NO: 1018441 - RNA, 22 nt, Human
agaacuauacaccaagaagaaa

SEQ ID NO: 1018442 - RNA, 24 nt, Human
agaaguucagaaagaaugauuaug

SEQ ID NO: 1018443 - RNA, 21 nt, Human
agaauauauaagagaggaaca

SEQ ID NO: 1018444 - RNA, 21 nt, Human
agauguuagagaacuauggcu

SEQ ID NO: 1018445 - RNA, 22 nt, Human
aggaacuuuuaaaacaguagaa

SEQ ID NO: 1018446 - RNA, 21 nt, Human
agucauuaugcugggugaaaa

SEQ ID NO: 1018447 - RNA, 19 nt, Human
agucuucuuuacgaaaagc

SEQ ID NO: 1018448 - RNA, 23 nt, Human
auaaaauagagaggaacuuuuaa

SEQ ID NO: 1018449 - RNA, 22 nt, Human
auagagaggaacuuuuaaaaca

SEQ ID NO: 1018450 - RNA, 24 nt, Human
aucaaacgagaccugcauucuuga

SEQ ID NO: 1018451 - RNA, 21 nt, Human
auuuuuuuagugccaucuguu

SEQ ID NO: 1018452 - RNA, 19 nt, Human
caaaugaccaagaucaaag

SEQ ID NO: 1018453 - RNA, 22 nt, Human
caaauggccaaucuuaggucaa

SEQ ID NO: 1018454 - RNA, 24 nt, Human
caagaacagcugguaaaaaguuaa

SEQ ID NO: 1018455 - RNA, 26 nt, Human
cacaaaauuauuaaauccgauuguau

SEQ ID NO: 1018456 - RNA, 26 nt, Human
caccaacaaauggccaaucuuagguc

SEQ ID NO: 1018457 - RNA, 18 nt, Human
cgaaaagcaguuccugug

SEQ ID NO: 1018458 - RNA, 23 nt, Human
cgacaaaauauaagaaacaaaga

SEQ ID NO: 1018459 - RNA, 18 nt, Human
cucagaacaccaucucaa

SEQ ID NO: 1018460 - RNA, 19 nt, Human
cucauuuuucacagcuuca

SEQ ID NO: 1018461 - RNA, 19 nt, Human
cugggugaaaaagcauuuc

SEQ ID NO: 1018462 - RNA, 21 nt, Human
gaaaaagauccacuaauuaga

SEQ ID NO: 1018463 - RNA, 19 nt, Human
gaacaccaucucaaauaug

SEQ ID NO: 1018464 - RNA, 28 nt, Human
gaacagcuucaaagaaagagggaacgcc

SEQ ID NO: 1018465 - RNA, 22 nt, Human
gccgacaaaauauaagaaacaa

SEQ ID NO: 1018466 - RNA, 21 nt, Human
gcugacuacaaagggacagca

SEQ ID NO: 1018467 - RNA, 24 nt, Human
ggugaaaaagcauuucaagaggga

SEQ ID NO: 1018468 - RNA, 21 nt, Human
guuaacacuuauaacaacgaa

SEQ ID NO: 1018469 - RNA, 22 nt, Human
uaaaaugaaaaguaucuuggug

SEQ ID NO: 1018470 - RNA, 30 nt, Human
uaaaaugacauggaugaaccucaaagucaa

SEQ ID NO: 1018471 - RNA, 24 nt, Human
uaagccgacaaaauauaagaaaca

SEQ ID NO: 1018472 - RNA, 24 nt, Human
uaagccgacaaaauauaagaaaca

SEQ ID NO: 1018473 - RNA, 24 nt, Human
uaauaaggcauggaaauaaaagua

SEQ ID NO: 1018474 - RNA, 22 nt, Human
uacaaaaucauggaauuuuaga

SEQ ID NO: 1018475 - RNA, 22 nt, Human
uacaacacuaauagcuacaccu

SEQ ID NO: 1018476 - RNA, 19 nt, Human
uagagcuagaaggagcuga

SEQ ID NO: 1018477 - RNA, 24 nt, Human
uagcaaugagcuaucacacuuucc

SEQ ID NO: 1018478 - RNA, 22 nt, Human
uauaaaaaaauucugcuauucc

SEQ ID NO: 1018479 - RNA, 23 nt, Human
uauaauaggaagcaaaaauaaga

SEQ ID NO: 1018480 - RNA, 18 nt, Human
uauauguaagguaugaga

SEQ ID NO: 1018481 - RNA, 23 nt, Human
uaucuugguguuuaguuuggaau

SEQ ID NO: 1018482 - RNA, 24 nt, Human
uauuuuuggaaauauaaaacucua

SEQ ID NO: 1018483 - RNA, 25 nt, Human
ucacacuuuccaguggaaaaagauc

SEQ ID NO: 1018484 - RNA, 18 nt, Human
ucuaaagugacuagaaac

SEQ ID NO: 1018485 - RNA, 21 nt, Human
ucucuugcuuuccccucuucu

SEQ ID NO: 1018486 - RNA, 18 nt, Human
ucuuaggucaaauggaag

SEQ ID NO: 1018487 - RNA, 27 nt, Human
ugaaaaaauacaacacuaauagcuaca

SEQ ID NO: 1018488 - RNA, 19 nt, Human
ugaaaaagcauuucaagag

SEQ ID NO: 1018489 - RNA, 21 nt, Human
ugagacagaaucccaucagcu

SEQ ID NO: 1018490 - RNA, 18 nt, Human
ugagacuuauauguaagg

SEQ ID NO: 1018491 - RNA, 21 nt, Human
ugcugggugaaaaagcauuuc

SEQ ID NO: 1018492 - RNA, 20 nt, Human
uggaaaaagauccacuaauu

SEQ ID NO: 1018493 - RNA, 20 nt, Human
uggaacuguuagaaguucag

SEQ ID NO: 1018494 - RNA, 23 nt, Human
uuaaaacaguagaacagauaucc

SEQ ID NO: 1018495 - RNA, 26 nt, Human
uuaacccuguauaaaaaaauucugcu

SEQ ID NO: 1018496 - RNA, 26 nt, Human
uucuguaccgacugcaguaguggugc

SEQ ID NO: 1018497 - RNA, 22 nt, Human
uuucacaccaacaaauggccaa

SEQ ID NO: 1018498 - RNA, 20 nt, Human
uuuggcauauuuuuggaaau

SEQ ID NO: 1018499 - RNA, 23 nt, Human
uuuuuggaaauauaaaacucuag

SEQ ID NO: 1018500 - RNA, 23 nt, Human
aaaaaaaaaaaaaauucaaagaa

SEQ ID NO: 1018501 - RNA, 23 nt, Human
aaaaaaaaaacccagaacacaaa

SEQ ID NO: 1018502 - RNA, 18 nt, Human
aaaaacccagaacacaaa

SEQ ID NO: 1018503 - RNA, 22 nt, Human
aaaacacagguaucuggaccca

SEQ ID NO: 1018504 - RNA, 24 nt, Human
aaacaaaacaauuacucaaaaaga

SEQ ID NO: 1018505 - RNA, 21 nt, Human
aacauaacauguggcaaccaa

SEQ ID NO: 1018506 - RNA, 21 nt, Human
aacaugagucaacaggaaaga

SEQ ID NO: 1018507 - RNA, 22 nt, Human
aaccaaucaaucugggucacaa

SEQ ID NO: 1018508 - RNA, 18 nt, Human
aagcagcuauccacagga

SEQ ID NO: 1018509 - RNA, 20 nt, Human
aauuuguugcucucuuccuc

SEQ ID NO: 1018510 - RNA, 24 nt, Human
acaaaacaauuacucaaaaagaua

SEQ ID NO: 1018511 - RNA, 24 nt, Human
acaggaaagacgcggcagccugug

SEQ ID NO: 1018512 - RNA, 20 nt, Human
accuucauuaggcacuacug

SEQ ID NO: 1018513 - RNA, 21 nt, Human
agaaagaagcuaaaguacuua

SEQ ID NO: 1018514 - RNA, 18 nt, Human
agauaaauaacgaagaga

SEQ ID NO: 1018515 - RNA, 23 nt, Human
agauauugacaggguucaaauaa

SEQ ID NO: 1018516 - RNA, 18 nt, Human
agaugaaauggcugcaga

SEQ ID NO: 1018517 - RNA, 20 nt, Human
agaugaaauggcugcagaaa

SEQ ID NO: 1018518 - RNA, 21 nt, Human
aggaacagagucaaaacacag

SEQ ID NO: 1018519 - RNA, 24 nt, Human
aggaucuaagacacuuaaaaauau

SEQ ID NO: 1018520 - RNA, 26 nt, Human
aggcaggaagcgcacaaaggggaccc

SEQ ID NO: 1018521 - RNA, 23 nt, Human
auauacguuacacaagugucauu

SEQ ID NO: 1018522 - RNA, 24 nt, Human
aucuggacccagccaccuagcguu

SEQ ID NO: 1018523 - RNA, 19 nt, Human
caacaaacauaacaugugg

SEQ ID NO: 1018524 - RNA, 21 nt, Human
cacaggggacccaagccaugu

SEQ ID NO: 1018525 - RNA, 21 nt, Human
caucucccgcgccucccaaac

SEQ ID NO: 1018526 - RNA, 23 nt, Human
caugagaaccacuucaacaaaca

SEQ ID NO: 1018527 - RNA, 24 nt, Human
caugagaaccacuucaacaaacau

SEQ ID NO: 1018528 - RNA, 21 nt, Human
caugccuacagcuucacaaga

SEQ ID NO: 1018529 - RNA, 22 nt, Human
ccaagcagcuauccacaggaac

SEQ ID NO: 1018530 - RNA, 22 nt, Human
cccagaacacaaauguguaaua

SEQ ID NO: 1018531 - RNA, 24 nt, Human
ccuccaaaaaaaaaaaaaauucaa

SEQ ID NO: 1018532 - RNA, 22 nt, Human
ccucgggcacgaacagccgccu

SEQ ID NO: 1018533 - RNA, 21 nt, Human
ccuucauuaggcacuacugug

SEQ ID NO: 1018534 - RNA, 19 nt, Human
cuauccacaggaacagagu

SEQ ID NO: 1018535 - RNA, 25 nt, Human
cuggaggaaccaaacaugagucaac

SEQ ID NO: 1018536 - RNA, 18 nt, Human
cugggucacaaaaagcca

SEQ ID NO: 1018537 - RNA, 24 nt, Human
cuguggaaucugcacauucggucu

SEQ ID NO: 1018538 - RNA, 22 nt, Human
gaccaagcagcuauccacagga

SEQ ID NO: 1018539 - RNA, 22 nt, Human
gagaaccacuucaacaaacaua

SEQ ID NO: 1018540 - RNA, 24 nt, Human
gcaugagaaccacuucaacaaaca

SEQ ID NO: 1018541 - RNA, 19 nt, Human
gcgcccggcggcgccacca

SEQ ID NO: 1018542 - RNA, 23 nt, Human
ggggacccaagccauguugcuac

SEQ ID NO: 1018543 - RNA, 18 nt, Human
uaacgaagagaauuaagu

SEQ ID NO: 1018544 - RNA, 23 nt, Human
uaggguuuucucaaucugauuac

SEQ ID NO: 1018545 - RNA, 22 nt, Human
ucagaccaagcagcuauccaca

SEQ ID NO: 1018546 - RNA, 22 nt, Human
uccaagaaggacggaagaucaa

SEQ ID NO: 1018547 - RNA, 24 nt, Human
uccaagaaggacggaagaucaaga

SEQ ID NO: 1018548 - RNA, 18 nt, Human
uccacaggaacagaguca

SEQ ID NO: 1018549 - RNA, 19 nt, Human
ucccucuuccucucgccag

SEQ ID NO: 1018550 - RNA, 20 nt, Human
uccuccaaaaaaaaaaaaaa

SEQ ID NO: 1018551 - RNA, 23 nt, Human
uccuccuccaaaaaaaaaaaaaa

SEQ ID NO: 1018552 - RNA, 22 nt, Human
ucucaaccuucauuaggcacua

SEQ ID NO: 1018553 - RNA, 18 nt, Human
ucucccgcgccucccaaa

SEQ ID NO: 1018554 - RNA, 19 nt, Human
ucucccgcgccucccaaaa

SEQ ID NO: 1018555 - RNA, 21 nt, Human
ucucugugguuugguaagggu

SEQ ID NO: 1018556 - RNA, 20 nt, Human
ugaaauggcugcagaaagaa

SEQ ID NO: 1018557 - RNA, 25 nt, Human
ugaaauggcugcagaaagaagcuaa

SEQ ID NO: 1018558 - RNA, 23 nt, Human
ugaguugguuaaaaaaaaaaaaa

SEQ ID NO: 1018559 - RNA, 25 nt, Human
ugaguugguuaaaaaaaaaaaaaaa

SEQ ID NO: 1018560 - RNA, 23 nt, Human
uggaauacucauaggguuuucuc

SEQ ID NO: 1018561 - RNA, 18 nt, Human
uggaaucugcacauucgg

SEQ ID NO: 1018562 - RNA, 20 nt, Human
uggcugcagaaagaagcuaa

SEQ ID NO: 1018563 - RNA, 19 nt, Human
uguggcaaccaaucaaucu

SEQ ID NO: 1018564 - RNA, 20 nt, Human
uuucccacaugcagacacug

SEQ ID NO: 1018565 - RNA, 22 nt, Human
aaaaacaaaaaaggcaaauggc

SEQ ID NO: 1018566 - RNA, 21 nt, Human
aaaacaaaaaaggcaaauggc

SEQ ID NO: 1018567 - RNA, 19 nt, Human
aaaguacugggauuacagg

SEQ ID NO: 1018568 - RNA, 25 nt, Human
aaaguacugggauuacaggcauuug

SEQ ID NO: 1018569 - RNA, 21 nt, Human
aaauagccuccaaauuagagg

SEQ ID NO: 1018570 - RNA, 20 nt, Human
aacauuugcugagugaguau

SEQ ID NO: 1018571 - RNA, 22 nt, Human
aacugaaugaacucucauaaaa

SEQ ID NO: 1018572 - RNA, 18 nt, Human
aagaaacaacccaaaaca

SEQ ID NO: 1018573 - RNA, 21 nt, Human
aaguacugggauuacaggcau

SEQ ID NO: 1018574 - RNA, 28 nt, Human
aaguacugggauuacaggcauuugagcc

SEQ ID NO: 1018575 - RNA, 20 nt, Human
acaggguuucaccauguugg

SEQ ID NO: 1018576 - RNA, 21 nt, Human
acaggguuucaccauguuggu

SEQ ID NO: 1018577 - RNA, 23 nt, Human
acaggguuucaccauguugguca

SEQ ID NO: 1018578 - RNA, 24 nt, Human
accauguuggucaugcuggucucg

SEQ ID NO: 1018579 - RNA, 18 nt, Human
acuccaucaggguuuuag

SEQ ID NO: 1018580 - RNA, 19 nt, Human
agucaagaaacaacccaaa

SEQ ID NO: 1018581 - RNA, 20 nt, Human
agugcaauggugcaauauug

SEQ ID NO: 1018582 - RNA, 24 nt, Human
agugcaauggugcaauauuggcuc

SEQ ID NO: 1018583 - RNA, 18 nt, Human
auuugcugagugaguaug

SEQ ID NO: 1018584 - RNA, 24 nt, Human
auuuuuguauuuuugguagagaca

SEQ ID NO: 1018585 - RNA, 28 nt, Human
caaaacacucacuuccuaucaaaagccc

SEQ ID NO: 1018586 - RNA, 25 nt, Human
caaaguacugggauuacaggcauuu

SEQ ID NO: 1018587 - RNA, 23 nt, Human
caaccucuaccucccagguucaa

SEQ ID NO: 1018588 - RNA, 22 nt, Human
caagcaauucuccugccucagc

SEQ ID NO: 1018589 - RNA, 24 nt, Human
caccauguuggucaugcuggucuc

SEQ ID NO: 1018590 - RNA, 24 nt, Human
caccucagccucccaaaguacugg

SEQ ID NO: 1018591 - RNA, 21 nt, Human
cacugcaaccucuaccuccca

SEQ ID NO: 1018592 - RNA, 22 nt, Human
caggguuucaccauguugguca

SEQ ID NO: 1018593 - RNA, 24 nt, Human
caggugaugcgcccaccccugaag

SEQ ID NO: 1018594 - RNA, 24 nt, Human
cagucaagaaacaacccaaaacac

SEQ ID NO: 1018595 - RNA, 22 nt, Human
caugcuggucucgaacuccuga

SEQ ID NO: 1018596 - RNA, 21 nt, Human
cauuucaacauggaauucugg

SEQ ID NO: 1018597 - RNA, 24 nt, Human
ccaaaguacugggauuacaggcau

SEQ ID NO: 1018598 - RNA, 24 nt, Human
ccaauucuuuccucgacuucucca

SEQ ID NO: 1018599 - RNA, 22 nt, Human
ccaccugauccuaucaggccaa

SEQ ID NO: 1018600 - RNA, 22 nt, Human
ccaggcaaccauaucuucccau

SEQ ID NO: 1018601 - RNA, 24 nt, Human
ccaucaggguuuuagcacauuugg

SEQ ID NO: 1018602 - RNA, 24 nt, Human
cccaaaguacugggauuacaggca

SEQ ID NO: 1018603 - RNA, 23 nt, Human
cccagguucaagcaauucuccug

SEQ ID NO: 1018604 - RNA, 22 nt, Human
ccccuacaccucuagagaaacc

SEQ ID NO: 1018605 - RNA, 23 nt, Human
cccggguagcugggauuacaggu

SEQ ID NO: 1018606 - RNA, 24 nt, Human
cccggguagcugggauuacaggug

SEQ ID NO: 1018607 - RNA, 19 nt, Human
cccucuacccgcuguauuc

SEQ ID NO: 1018608 - RNA, 20 nt, Human
ccgcuguauuccgcaucaua

SEQ ID NO: 1018609 - RNA, 23 nt, Human
ccggguagcugggauuacaggug

SEQ ID NO: 1018610 - RNA, 24 nt, Human
ccucccagguucaagcaauucucc

SEQ ID NO: 1018611 - RNA, 21 nt, Human
ccucgacuucuccaaaacuga

SEQ ID NO: 1018612 - RNA, 25 nt, Human
ccucuagagaaaccucuccacucau

SEQ ID NO: 1018613 - RNA, 24 nt, Human
ccugaccucaggugaugcgcccac

SEQ ID NO: 1018614 - RNA, 24 nt, Human
ccugccucagccucccggguagcu

SEQ ID NO: 1018615 - RNA, 24 nt, Human
cucacugcaaccucuaccucccag

SEQ ID NO: 1018616 - RNA, 24 nt, Human
cucacuuccuaucaaaagccccac

SEQ ID NO: 1018617 - RNA, 24 nt, Human
cucagccucccggguagcugggau

SEQ ID NO: 1018618 - RNA, 20 nt, Human
cugcaaccucuaccucccag

SEQ ID NO: 1018619 - RNA, 23 nt, Human
cugcaaccucuaccucccagguu

SEQ ID NO: 1018620 - RNA, 24 nt, Human
cugcaaccucuaccucccagguuc

SEQ ID NO: 1018621 - RNA, 26 nt, Human
gaaaccucuccacucaugaggcacuc

SEQ ID NO: 1018622 - RNA, 24 nt, Human
gaccucaggugaugcgcccaccuc

SEQ ID NO: 1018623 - RNA, 19 nt, Human
gaggccauuucaacaugga

SEQ ID NO: 1018624 - RNA, 20 nt, Human
gauuacaggcauuugagcca

SEQ ID NO: 1018625 - RNA, 21 nt, Human
gauuacaggugcccacaacua

SEQ ID NO: 1018626 - RNA, 22 nt, Human
gcaaccucuaccucccagguuc

SEQ ID NO: 1018627 - RNA, 23 nt, Human
gcagugaagaaaugccaagauac

SEQ ID NO: 1018628 - RNA, 24 nt, Human
gccccaccugauccuaucaggcca

SEQ ID NO: 1018629 - RNA, 18 nt, Human
gccuggcuaauuuuugua

SEQ ID NO: 1018630 - RNA, 21 nt, Human
gcucacugcaaccucuaccuc

SEQ ID NO: 1018631 - RNA, 23 nt, Human
gcuggucucgaacuccugaccuc

SEQ ID NO: 1018632 - RNA, 19 nt, Human
ggucucgaacuccugaccu

SEQ ID NO: 1018633 - RNA, 20 nt, Human
ggucucgaacuccugaccuc

SEQ ID NO: 1018634 - RNA, 24 nt, Human
ggugaugcgcccaccucagccucc

SEQ ID NO: 1018635 - RNA, 21 nt, Human
guagagacaggguuucaccau

SEQ ID NO: 1018636 - RNA, 22 nt, Human
guagagacaggguuucaccaug

SEQ ID NO: 1018637 - RNA, 18 nt, Human
guagcugggauuacaggu

SEQ ID NO: 1018638 - RNA, 21 nt, Human
gucaagaaacaacccaaaaca

SEQ ID NO: 1018639 - RNA, 24 nt, Human
gugaugcgcccaccucagccuccc

SEQ ID NO: 1018640 - RNA, 24 nt, Human
uaauuuuuguauuuuugguagaga

SEQ ID NO: 1018641 - RNA, 24 nt, Human
uacaggcauuugagccaccacgcc

SEQ ID NO: 1018642 - RNA, 22 nt, Human
uacugggauuacaggcauuuga

SEQ ID NO: 1018643 - RNA, 22 nt, Human
uagagacaggguuucaccaugu

SEQ ID NO: 1018644 - RNA, 18 nt, Human
uagaggccauuucaacau

SEQ ID NO: 1018645 - RNA, 25 nt, Human
uagccuccaaauuagaggccauuuc

SEQ ID NO: 1018646 - RNA, 26 nt, Human
ucaaaaauagccuccaaauuagaggc

SEQ ID NO: 1018647 - RNA, 21 nt, Human
ucaaaagccccaccugauccu

SEQ ID NO: 1018648 - RNA, 24 nt, Human
ucacugcaaccucuaccucccagg

SEQ ID NO: 1018649 - RNA, 25 nt, Human
ucacugcaaccucuaccucccaggu

SEQ ID NO: 1018650 - RNA, 26 nt, Human
ucacuuccuaucaaaagccccaccug

SEQ ID NO: 1018651 - RNA, 20 nt, Human
ucagccucccggguagcugg

SEQ ID NO: 1018652 - RNA, 24 nt, Human
uccagucaagaaacaacccaaaac

SEQ ID NO: 1018653 - RNA, 24 nt, Human
ucccaaaguacugggauuacaggc

SEQ ID NO: 1018654 - RNA, 21 nt, Human
ucccagguucaagcaauucuc

SEQ ID NO: 1018655 - RNA, 24 nt, Human
ucccagguucaagcaauucuccug

SEQ ID NO: 1018656 - RNA, 30 nt, Human
uccccuacaccucuagagaaaccucuccac

SEQ ID NO: 1018657 - RNA, 23 nt, Human
ucccggguagcugggauuacagg

SEQ ID NO: 1018658 - RNA, 24 nt, Human
ucccggguagcugggauuacaggu

SEQ ID NO: 1018659 - RNA, 19 nt, Human
ucgacuucuccaaaacuga

SEQ ID NO: 1018660 - RNA, 22 nt, Human
ucgcuaccuucaaaaauagccu

SEQ ID NO: 1018661 - RNA, 24 nt, Human
ucuccugccucagccucccgggua

SEQ ID NO: 1018662 - RNA, 19 nt, Human
ucucgaacuccugaccuca

SEQ ID NO: 1018663 - RNA, 22 nt, Human
ucugaaagggacugaaaaugaa

SEQ ID NO: 1018664 - RNA, 22 nt, Human
ucugaugccuguggucuuuucu

SEQ ID NO: 1018665 - RNA, 24 nt, Human
ucuggcauaaauuagcaaguugau

SEQ ID NO: 1018666 - RNA, 23 nt, Human
ugaaaagcuacacuaaugacuaa

SEQ ID NO: 1018667 - RNA, 23 nt, Human
ugaaaaggcguguauacugaaaa

SEQ ID NO: 1018668 - RNA, 21 nt, Human
ugaaagcuuaauuuucaaauc

SEQ ID NO: 1018669 - RNA, 24 nt, Human
ugaaagggacugaaaaugaaaagg

SEQ ID NO: 1018670 - RNA, 25 nt, Human
ugaaagggacugaaaaugaaaaggc

SEQ ID NO: 1018671 - RNA, 18 nt, Human
ugaccucaggugaugcgc

SEQ ID NO: 1018672 - RNA, 19 nt, Human
ugagugaguaugccgaaug

SEQ ID NO: 1018673 - RNA, 22 nt, Human
ugauugauuucugaugccugug

SEQ ID NO: 1018674 - RNA, 19 nt, Human
ugcccaggcaggagugcaa

SEQ ID NO: 1018675 - RNA, 24 nt, Human
ugccucagccucccggguagcugg

SEQ ID NO: 1018676 - RNA, 21 nt, Human
uggaauaaaacuccaucaggg

SEQ ID NO: 1018677 - RNA, 22 nt, Human
uggaauucuggggugacaauuc

SEQ ID NO: 1018678 - RNA, 19 nt, Human
ugggaaggcagaucuccag

SEQ ID NO: 1018679 - RNA, 18 nt, Human
ugggauuacaggcauuug

SEQ ID NO: 1018680 - RNA, 23 nt, Human
ugggauuacaggcauuugagcca

SEQ ID NO: 1018681 - RNA, 24 nt, Human
ugggauuacaggcauuugagccac

SEQ ID NO: 1018682 - RNA, 26 nt, Human
ugggauuacaggcauuugagccacca

SEQ ID NO: 1018683 - RNA, 20 nt, Human
ugggauuacaggugcccaca

SEQ ID NO: 1018684 - RNA, 24 nt, Human
ugggauuacaggugcccacaacua

SEQ ID NO: 1018685 - RNA, 23 nt, Human
ugguagagacaggguuucaccau

SEQ ID NO: 1018686 - RNA, 24 nt, Human
ugguagagacaggguuucaccaug

SEQ ID NO: 1018687 - RNA, 24 nt, Human
uggucaugcuggucucgaacuccu

SEQ ID NO: 1018688 - RNA, 21 nt, Human
uucaagcaauucuccugccuc

SEQ ID NO: 1018689 - RNA, 24 nt, Human
uucaagcaauucuccugccucagc

SEQ ID NO: 1018690 - RNA, 20 nt, Human
uuccaggcaaccauaucuuc

SEQ ID NO: 1018691 - RNA, 22 nt, Human
uuccucgacuucuccaaaacug

SEQ ID NO: 1018692 - RNA, 22 nt, Human
uucuuuccucgacuucuccaaa

SEQ ID NO: 1018693 - RNA, 18 nt, Human
uugcccaggcaggagugc

SEQ ID NO: 1018694 - RNA, 24 nt, Human
uugguagagacaggguuucaccau

SEQ ID NO: 1018695 - RNA, 23 nt, Human
uuguugcccaggcaggagugcaa

SEQ ID NO: 1018696 - RNA, 20 nt, Human
uuuugcucuuguugcccagg

SEQ ID NO: 1018697 - RNA, 24 nt, Human
uuuugcucuuguugcccaggcagg

SEQ ID NO: 1018698 - RNA, 22 nt, Human
uuuuugguagagacaggguuuc

SEQ ID NO: 1018699 - RNA, 24 nt, Human
uuuuugguagagacaggguuucac

SEQ ID NO: 1018700 - RNA, 20 nt, Human
uuuuuguauuuuugguagag

SEQ ID NO: 1018701 - RNA, 25 nt, Human
aaacaagagagugaaauaaauagag

SEQ ID NO: 1018702 - RNA, 21 nt, Human
aaggggaccgagggugcaggg

SEQ ID NO: 1018703 - RNA, 21 nt, Human
acaagaaagccgucucuaccc

SEQ ID NO: 1018704 - RNA, 21 nt, Human
acuccacccuccaugccccag

SEQ ID NO: 1018705 - RNA, 22 nt, Human
agacagggaggagacugacuga

SEQ ID NO: 1018706 - RNA, 18 nt, Human
agcacagcuccugcccag

SEQ ID NO: 1018707 - RNA, 22 nt, Human
agccagcguggcggccagggca

SEQ ID NO: 1018708 - RNA, 18 nt, Human
aggccucugcaccuccag

SEQ ID NO: 1018709 - RNA, 23 nt, Human
aguggagagggccggaggggagg

SEQ ID NO: 1018710 - RNA, 23 nt, Human
auggcaaacagacagaggccagg

SEQ ID NO: 1018711 - RNA, 19 nt, Human
auggggacagagggguugg

SEQ ID NO: 1018712 - RNA, 26 nt, Human
augggggagcaggagcucaaggggag

SEQ ID NO: 1018713 - RNA, 22 nt, Human
caaacagacagaggccaggccu

SEQ ID NO: 1018714 - RNA, 20 nt, Human
cacccuuucucccagcacag

SEQ ID NO: 1018715 - RNA, 20 nt, Human
cagcgaggcugggagucccc

SEQ ID NO: 1018716 - RNA, 23 nt, Human
cagggcacagggggaaaccccga

SEQ ID NO: 1018717 - RNA, 19 nt, Human
ccacuccacccuccaugcc

SEQ ID NO: 1018718 - RNA, 21 nt, Human
ccacuccacccuccaugcccc

SEQ ID NO: 1018719 - RNA, 24 nt, Human
ccauggcaaacagacagaggccag

SEQ ID NO: 1018720 - RNA, 22 nt, Human
cccacuccacccuccaugcccc

SEQ ID NO: 1018721 - RNA, 19 nt, Human
cccgaggcccacuccaccc

SEQ ID NO: 1018722 - RNA, 28 nt, Human
cccggcccuacaccccagccagcguggc

SEQ ID NO: 1018723 - RNA, 21 nt, Human
cccuggcugugcugcccucug

SEQ ID NO: 1018724 - RNA, 19 nt, Human
ccggcccuggcugugcugc

SEQ ID NO: 1018725 - RNA, 20 nt, Human
cucugcaccuccagcgaggc

SEQ ID NO: 1018726 - RNA, 25 nt, Human
gaaaccccgaggccauccucggggg

SEQ ID NO: 1018727 - RNA, 24 nt, Human
gaaagcagcucugauaccaggagc

SEQ ID NO: 1018728 - RNA, 18 nt, Human
gaaccuggaaggggaccg

SEQ ID NO: 1018729 - RNA, 18 nt, Human
gaaccuggaaggggaccg

SEQ ID NO: 1018730 - RNA, 19 nt, Human
gaggaugggggauggggga

SEQ ID NO: 1018731 - RNA, 23 nt, Human
gcccacuccacccuccaugcccc

SEQ ID NO: 1018732 - RNA, 19 nt, Human
gcccggcccuacaccccag

SEQ ID NO: 1018733 - RNA, 18 nt, Human
gcuuggggaaggcagccg

SEQ ID NO: 1018734 - RNA, 21 nt, Human
ggagagggccggaggggaggg

SEQ ID NO: 1018735 - RNA, 21 nt, Human
ggagagggccggaggggaggg

SEQ ID NO: 1018736 - RNA, 21 nt, Human
ggagggauuccuggggaaagg

SEQ ID NO: 1018737 - RNA, 25 nt, Human
ggaguccccucagccccaccugccc

SEQ ID NO: 1018738 - RNA, 19 nt, Human
ggcaaacagacagaggcca

SEQ ID NO: 1018739 - RNA, 19 nt, Human
ggccagggcagggccaggu

SEQ ID NO: 1018740 - RNA, 21 nt, Human
ggcugggaguccccucagccc

SEQ ID NO: 1018741 - RNA, 18 nt, Human
gggaaagaguggagacag

SEQ ID NO: 1018742 - RNA, 18 nt, Human
gggaaagggccguuagca

SEQ ID NO: 1018743 - RNA, 19 nt, Human
gggcagggccaggugggca

SEQ ID NO: 1018744 - RNA, 19 nt, Human
gggcgcugggagggcugcc

SEQ ID NO: 1018745 - RNA, 21 nt, Human
ggggaaggcagccguugggga

SEQ ID NO: 1018746 - RNA, 20 nt, Human
ggggagggauuccuggggaa

SEQ ID NO: 1018747 - RNA, 18 nt, Human
gugcugcccucuggaaag

SEQ ID NO: 1018748 - RNA, 21 nt, Human
uaccaggagcggcugucaggg

SEQ ID NO: 1018749 - RNA, 22 nt, Human
uacccaugggcgaccccauggg

SEQ ID NO: 1018750 - RNA, 22 nt, Human
ucccuaaagacacccggcccug

SEQ ID NO: 1018751 - RNA, 27 nt, Human
ucccuaaagacacccggcccuggcugu

SEQ ID NO: 1018752 - RNA, 18 nt, Human
ucucccagcacagcuccu

SEQ ID NO: 1018753 - RNA, 19 nt, Human
ugaaaggggcccaucccca

SEQ ID NO: 1018754 - RNA, 24 nt, Human
ugaaauaaauagagggaaagagug

SEQ ID NO: 1018755 - RNA, 21 nt, Human
ugcccggcccuacaccccagc

SEQ ID NO: 1018756 - RNA, 19 nt, Human
ugcccuaggaguguugggc

SEQ ID NO: 1018757 - RNA, 21 nt, Human
ugcugcccucuggaaagcagc

SEQ ID NO: 1018758 - RNA, 19 nt, Human
uggaaagcagcucugauac

SEQ ID NO: 1018759 - RNA, 23 nt, Human
uggaaagcagcucugauaccagg

SEQ ID NO: 1018760 - RNA, 27 nt, Human
uggaaagcagcucugauaccaggagcg

SEQ ID NO: 1018761 - RNA, 19 nt, Human
uggaaggggaccgagggug

SEQ ID NO: 1018762 - RNA, 23 nt, Human
uggaaggggaccgagggugcagg

SEQ ID NO: 1018763 - RNA, 22 nt, Human
uggagagggccggaggggaggg

SEQ ID NO: 1018764 - RNA, 19 nt, Human
uggcaaacagacagaggcc

SEQ ID NO: 1018765 - RNA, 18 nt, Human
ugggaggaugggggaugg

SEQ ID NO: 1018766 - RNA, 18 nt, Human
uggggacagagggguugg

SEQ ID NO: 1018767 - RNA, 19 nt, Human
ugucuggaaagcaguggag

SEQ ID NO: 1018768 - RNA, 20 nt, Human
uuagcaccaccaggcuccau

SEQ ID NO: 1018769 - RNA, 18 nt, Human
aaaaaaaccccacaaaac

SEQ ID NO: 1018770 - RNA, 28 nt, Human
aaaaaacaaaagaaacaaacaaacaaaa

SEQ ID NO: 1018771 - RNA, 19 nt, Human
aaaaaugaaaacucuucug

SEQ ID NO: 1018772 - RNA, 25 nt, Human
aaaacaaaagaaacaaacaaacaaa

SEQ ID NO: 1018773 - RNA, 19 nt, Human
aaaaccccacaaaacucaa

SEQ ID NO: 1018774 - RNA, 18 nt, Human
aaaacucuucugcccuug

SEQ ID NO: 1018775 - RNA, 19 nt, Human
aaacaaaaaaaccccacaa

SEQ ID NO: 1018776 - RNA, 20 nt, Human
aaacaaacaaaaaaacccca

SEQ ID NO: 1018777 - RNA, 24 nt, Human
aaacaaacaaaaaaaccccacaaa

SEQ ID NO: 1018778 - RNA, 25 nt, Human
aaacaaacaaaaaaaccccacaaaa

SEQ ID NO: 1018779 - RNA, 25 nt, Human
aaacauaugcccucaaacaccucac

SEQ ID NO: 1018780 - RNA, 23 nt, Human
aacaaacaaaaaaaccccacaaa

SEQ ID NO: 1018781 - RNA, 25 nt, Human
aaccccacaaaacucaaugauuuaa

SEQ ID NO: 1018782 - RNA, 23 nt, Human
acaaaagaaacaaacaaacaaaa

SEQ ID NO: 1018783 - RNA, 22 nt, Human
acaaacaaacaaaaaaacccca

SEQ ID NO: 1018784 - RNA, 28 nt, Human
acaaacaaacaaaaaaaccccacaaaac

SEQ ID NO: 1018785 - RNA, 21 nt, Human
accaggugaaaucauaacagc

SEQ ID NO: 1018786 - RNA, 20 nt, Human
acccgcccccaucccucccu

SEQ ID NO: 1018787 - RNA, 19 nt, Human
acgugggaaaaaaagauaa

SEQ ID NO: 1018788 - RNA, 20 nt, Human
agauaaaacuaugccuuuaa

SEQ ID NO: 1018789 - RNA, 20 nt, Human
agauaccaaaggcguacagu

SEQ ID NO: 1018790 - RNA, 22 nt, Human
aggaaggaaaggcaguuaucag

SEQ ID NO: 1018791 - RNA, 19 nt, Human
auacccgcccccaucccuc

SEQ ID NO: 1018792 - RNA, 19 nt, Human
augaaugagaagaagcuac

SEQ ID NO: 1018793 - RNA, 20 nt, Human
augugaagacaucacccaaa

SEQ ID NO: 1018794 - RNA, 24 nt, Human
caaacaaaaaaaccccacaaaacu

SEQ ID NO: 1018795 - RNA, 22 nt, Human
caaacaaacaaaaaaaccccac

SEQ ID NO: 1018796 - RNA, 24 nt, Human
caaacaaacaaaaaaaccccacaa

SEQ ID NO: 1018797 - RNA, 23 nt, Human
caaacaccucacaugcagauucc

SEQ ID NO: 1018798 - RNA, 20 nt, Human
caaacauaugcccucaaaca

SEQ ID NO: 1018799 - RNA, 26 nt, Human
caaauaauuuuacaacuugaugguaa

SEQ ID NO: 1018800 - RNA, 24 nt, Human
caagaaagggaagaaagaaauuaa

SEQ ID NO: 1018801 - RNA, 18 nt, Human
cacuguguagcaagaaag

SEQ ID NO: 1018802 - RNA, 22 nt, Human
cacuuuggaauaaaugcccaga

SEQ ID NO: 1018803 - RNA, 20 nt, Human
cagaaaggauuccuguggug

SEQ ID NO: 1018804 - RNA, 23 nt, Human
cagugagugagagcucuaggcac

SEQ ID NO: 1018805 - RNA, 23 nt, Human
cauauagcuuuaaaaacuggaaa

SEQ ID NO: 1018806 - RNA, 18 nt, Human
cccaaaugucagcggagc

SEQ ID NO: 1018807 - RNA, 25 nt, Human
cccuacgccgauacccgcccccauc

SEQ ID NO: 1018808 - RNA, 24 nt, Human
ccuuaccaacuauuaccuuucuua

SEQ ID NO: 1018809 - RNA, 18 nt, Human
cgagggccccuacgccga

SEQ ID NO: 1018810 - RNA, 26 nt, Human
cugcuccucuuuagccuuaggugaca

SEQ ID NO: 1018811 - RNA, 19 nt, Human
cuguggugaugcucccucu

SEQ ID NO: 1018812 - RNA, 19 nt, Human
gacauauuaaauguauuua

SEQ ID NO: 1018813 - RNA, 20 nt, Human
ggcuccuucagcgugcaccg

SEQ ID NO: 1018814 - RNA, 18 nt, Human
uaaaaaugaaaacucuuc

SEQ ID NO: 1018815 - RNA, 20 nt, Human
uaacagcaugaaaguaagac

SEQ ID NO: 1018816 - RNA, 21 nt, Human
uacccgcccccaucccucccu

SEQ ID NO: 1018817 - RNA, 20 nt, Human
uacgccgauacccgccccca

SEQ ID NO: 1018818 - RNA, 19 nt, Human
uagcaagaaagggaagaaa

SEQ ID NO: 1018819 - RNA, 23 nt, Human
uagcaagaaagggaagaaagaaa

SEQ ID NO: 1018820 - RNA, 24 nt, Human
uagccuuaggaaaauaaauaaugc

SEQ ID NO: 1018821 - RNA, 22 nt, Human
uaggaaaauaaauaaugcagua

SEQ ID NO: 1018822 - RNA, 22 nt, Human
uaucuaccacgugggaaaaaaa

SEQ ID NO: 1018823 - RNA, 23 nt, Human
uaugaagcagugaaacauauagc

SEQ ID NO: 1018824 - RNA, 22 nt, Human
uauuucauccuuaugucgcuua

SEQ ID NO: 1018825 - RNA, 18 nt, Human
ucaagaacuguaauuuuc

SEQ ID NO: 1018826 - RNA, 21 nt, Human
ucccuguaaugucacagagau

SEQ ID NO: 1018827 - RNA, 21 nt, Human
ucgucuuuccuguucugccac

SEQ ID NO: 1018828 - RNA, 24 nt, Human
ugaaacauauagcuuuaaaaacug

SEQ ID NO: 1018829 - RNA, 18 nt, Human
ugaaaguaagaccagauu

SEQ ID NO: 1018830 - RNA, 18 nt, Human
ugaaaucauaacagcaug

SEQ ID NO: 1018831 - RNA, 19 nt, Human
ugaucacuguguagcaaga

SEQ ID NO: 1018832 - RNA, 21 nt, Human
ugccacaccgacacucguccc

SEQ ID NO: 1018833 - RNA, 25 nt, Human
ugcucccucuuucaaacauaugccc

SEQ ID NO: 1018834 - RNA, 19 nt, Human
uggaauaaaugcccagaag

SEQ ID NO: 1018835 - RNA, 21 nt, Human
uggaauaaaugcccagaaggu

SEQ ID NO: 1018836 - RNA, 20 nt, Human
uggugaugcucccucuuucc

SEQ ID NO: 1018837 - RNA, 20 nt, Human
ugucacagcaauauccguuc

SEQ ID NO: 1018838 - RNA, 19 nt, Human
uguggugaugcucccucuu

SEQ ID NO: 1018839 - RNA, 21 nt, Human
uguucugccacuuuuaacaua

SEQ ID NO: 1018840 - RNA, 18 nt, Human
uuaaaacacugauucacc

SEQ ID NO: 1018841 - RNA, 27 nt, Human
uuuaaauaacauuggccuuaccaacua

SEQ ID NO: 1018842 - RNA, 20 nt, Human
uuuagccuuaggaaaauaaa

SEQ ID NO: 1018843 - RNA, 23 nt, Human
uuuccaaaaaacaaaagaaacaa

SEQ ID NO: 1018844 - RNA, 20 nt, Human
aaaacaaugggaaauuugca

SEQ ID NO: 1018845 - RNA, 21 nt, Human
aaaagcaauugcaccaaccua

SEQ ID NO: 1018846 - RNA, 22 nt, Human
aaacagaagaaaagccaacugg

SEQ ID NO: 1018847 - RNA, 22 nt, Human
aaauaaaucacagaaucucuau

SEQ ID NO: 1018848 - RNA, 20 nt, Human
aaauucaguacagucauuua

SEQ ID NO: 1018849 - RNA, 19 nt, Human
aagaaucacagaucuaaag

SEQ ID NO: 1018850 - RNA, 18 nt, Human
aagcaucccugacuuaaa

SEQ ID NO: 1018851 - RNA, 23 nt, Human
aagccauuuuuaaaguaaacugg

SEQ ID NO: 1018852 - RNA, 23 nt, Human
aaguaaacugggagaggcaacuu

SEQ ID NO: 1018853 - RNA, 18 nt, Human
aaucacagaucuaaagca

SEQ ID NO: 1018854 - RNA, 22 nt, Human
acugcaguuuuucaaccaaauu

SEQ ID NO: 1018855 - RNA, 20 nt, Human
agaaaagccaacuggugcag

SEQ ID NO: 1018856 - RNA, 19 nt, Human
agacaaaauguuuggaaac

SEQ ID NO: 1018857 - RNA, 24 nt, Human
aggaggugggauuuaaaaaucaaa

SEQ ID NO: 1018858 - RNA, 19 nt, Human
aggggauaaaauaaauagu

SEQ ID NO: 1018859 - RNA, 21 nt, Human
aguucaguguacaagagaugu

SEQ ID NO: 1018860 - RNA, 21 nt, Human
auaaaaagacacaauuccaaa

SEQ ID NO: 1018861 - RNA, 22 nt, Human
auaaagcaucccugacuuaaaa

SEQ ID NO: 1018862 - RNA, 24 nt, Human
auagaacccauuggccagacaaaa

SEQ ID NO: 1018863 - RNA, 18 nt, Human
auagaauaaagcaucccu

SEQ ID NO: 1018864 - RNA, 25 nt, Human
auggaacauaaaaagacacaauucc

SEQ ID NO: 1018865 - RNA, 24 nt, Human
caacaucuuuuauuuacauguuua

SEQ ID NO: 1018866 - RNA, 21 nt, Human
caccguagggagaaacggcug

SEQ ID NO: 1018867 - RNA, 20 nt, Human
cauaaaaagacacaauucca

SEQ ID NO: 1018868 - RNA, 24 nt, Human
cauaagugcuuuaaaauagaauaa

SEQ ID NO: 1018869 - RNA, 22 nt, Human
cauuuuuaaaguaaacugggag

SEQ ID NO: 1018870 - RNA, 21 nt, Human
ccaagcagacagucacacaga

SEQ ID NO: 1018871 - RNA, 20 nt, Human
cucauggucaauuuacuugc

SEQ ID NO: 1018872 - RNA, 21 nt, Human
cuccaagcagacagucacaca

SEQ ID NO: 1018873 - RNA, 19 nt, Human
cugaaaacauaccaaaucu

SEQ ID NO: 1018874 - RNA, 22 nt, Human
cuugaggaggugggauuuaaaa

SEQ ID NO: 1018875 - RNA, 19 nt, Human
gaagaaaagccaacuggug

SEQ ID NO: 1018876 - RNA, 19 nt, Human
gccacacagcuguuaaaac

SEQ ID NO: 1018877 - RNA, 24 nt, Human
ggcaacuuaguaauauauguacau

SEQ ID NO: 1018878 - RNA, 21 nt, Human
guaaucaauuucuucaaguau

SEQ ID NO: 1018879 - RNA, 18 nt, Human
gucaaaaugcaaaugaaa

SEQ ID NO: 1018880 - RNA, 20 nt, Human
guuaccaaacagcccagaac

SEQ ID NO: 1018881 - RNA, 24 nt, Human
uaaaaaacguaauauaccuaugca

SEQ ID NO: 1018882 - RNA, 21 nt, Human
uaaaaaucaaacauaugaauu

SEQ ID NO: 1018883 - RNA, 19 nt, Human
uaaaacagaagaaaagcca

SEQ ID NO: 1018884 - RNA, 24 nt, Human
uaaaaggggauaaaauaaauagua

SEQ ID NO: 1018885 - RNA, 22 nt, Human
uaaaauaaauaguaagucaaga

SEQ ID NO: 1018886 - RNA, 21 nt, Human
uaaacaugauacaaaagcuga

SEQ ID NO: 1018887 - RNA, 22 nt, Human
uaaaccacugccaucaaauauu

SEQ ID NO: 1018888 - RNA, 21 nt, Human
uaaagcaucccugacuuaaaa

SEQ ID NO: 1018889 - RNA, 20 nt, Human
uaaaguaaacugggagaggc

SEQ ID NO: 1018890 - RNA, 25 nt, Human
uaaaugcaaaauguauaauaaagua

SEQ ID NO: 1018891 - RNA, 18 nt, Human
uaagauaaaugagcagcc

SEQ ID NO: 1018892 - RNA, 23 nt, Human
uaagucaagaaucacagaucuaa

SEQ ID NO: 1018893 - RNA, 23 nt, Human
uaaugagaauuuuuuuuuccauu

SEQ ID NO: 1018894 - RNA, 23 nt, Human
uaauuguccuauguuaucaagga

SEQ ID NO: 1018895 - RNA, 24 nt, Human
uaauuguccuauguuaucaaggag

SEQ ID NO: 1018896 - RNA, 22 nt, Human
uaccuaaaagcuuaauuuuuaa

SEQ ID NO: 1018897 - RNA, 21 nt, Human
uagaacccauuggccagacaa

SEQ ID NO: 1018898 - RNA, 20 nt, Human
uauccacagagcugcuguga

SEQ ID NO: 1018899 - RNA, 24 nt, Human
ucaaggcacauucuuuucuugugc

SEQ ID NO: 1018900 - RNA, 21 nt, Human
ucagccacacagcuguuaaaa

SEQ ID NO: 1018901 - RNA, 24 nt, Human
uccacagagcugcugugaaugucc

SEQ ID NO: 1018902 - RNA, 19 nt, Human
ucccugagggcgccuguca

SEQ ID NO: 1018903 - RNA, 21 nt, Human
ucccuuaguccgaaggaaaag

SEQ ID NO: 1018904 - RNA, 22 nt, Human
ucuauagaacccauuggccaga

SEQ ID NO: 1018905 - RNA, 20 nt, Human
ugacuuaaaaggggauaaaa

SEQ ID NO: 1018906 - RNA, 27 nt, Human
ugagaauaaaacagaagaaaagccaac

SEQ ID NO: 1018907 - RNA, 22 nt, Human
ugauaaaccacugccaucaaau

SEQ ID NO: 1018908 - RNA, 18 nt, Human
ugcaaauauauaaugcau

SEQ ID NO: 1018909 - RNA, 25 nt, Human
ugcaaaugaaacuguacgguuuuaa

SEQ ID NO: 1018910 - RNA, 20 nt, Human
ugcaaaugcaaauauauaau

SEQ ID NO: 1018911 - RNA, 25 nt, Human
ugcacugaauaauuuucaacauucu

SEQ ID NO: 1018912 - RNA, 19 nt, Human
ugcaugcacagcuaucaca

SEQ ID NO: 1018913 - RNA, 22 nt, Human
ugggagaggcaacuuaguaaua

SEQ ID NO: 1018914 - RNA, 20 nt, Human
uggugcaaaagcaauugcac

SEQ ID NO: 1018915 - RNA, 22 nt, Human
ugucacuucuuuuuaucuucau

SEQ ID NO: 1018916 - RNA, 20 nt, Human
ugugaucugcuuauaucuua

SEQ ID NO: 1018917 - RNA, 25 nt, Human
uucaugcauuuuaauggcauuuuaa

SEQ ID NO: 1018918 - RNA, 20 nt, Human
uugcccuugaagaaauagua

SEQ ID NO: 1018919 - RNA, 21 nt, Human
uuucaauuucucuacacuaaa

SEQ ID NO: 1018920 - RNA, 21 nt, Human
uuuucaacauucugaaauuac

SEQ ID NO: 1018921 - RNA, 23 nt, Human
aaaaggaaaggcggaaacgcaga

SEQ ID NO: 1018922 - RNA, 23 nt, Human
aaagacggagacaacucugaaga

SEQ ID NO: 1018923 - RNA, 22 nt, Human
aacgugagacaaacaaaaggaa

SEQ ID NO: 1018924 - RNA, 21 nt, Human
accccugaaaucccgggaccg

SEQ ID NO: 1018925 - RNA, 19 nt, Human
agaauaucacuuccuaaca

SEQ ID NO: 1018926 - RNA, 21 nt, Human
aggaaaggcggaaacgcagaa

SEQ ID NO: 1018927 - RNA, 21 nt, Human
caaaacgugagacaaacaaaa

SEQ ID NO: 1018928 - RNA, 27 nt, Human
caacaggcccuucuccacagugugaag

SEQ ID NO: 1018929 - RNA, 19 nt, Human
ccacagugugaagacucug

SEQ ID NO: 1018930 - RNA, 23 nt, Human
ccaguauuaaccaucugauauuc

SEQ ID NO: 1018931 - RNA, 24 nt, Human
ccccugaaaucccgggaccgccuc

SEQ ID NO: 1018932 - RNA, 22 nt, Human
cccugaaaucccgggaccgccu

SEQ ID NO: 1018933 - RNA, 22 nt, Human
cggagacaacucugaagauaca

SEQ ID NO: 1018934 - RNA, 19 nt, Human
cuggaaauuucuaauaucc

SEQ ID NO: 1018935 - RNA, 21 nt, Human
gaaaucccgggaccgccuccc

SEQ ID NO: 1018936 - RNA, 24 nt, Human
ggaaagacggagacaacucugaag

SEQ ID NO: 1018937 - RNA, 27 nt, Human
gugagacaaacaaaaggaaaggcggaa

SEQ ID NO: 1018938 - RNA, 19 nt, Human
uaaccaucugauauucaac

SEQ ID NO: 1018939 - RNA, 28 nt, Human
uaucacuuccuaacaaaagccauccuau

SEQ ID NO: 1018940 - RNA, 24 nt, Human
uccacagugugaagacucugaggc

SEQ ID NO: 1018941 - RNA, 23 nt, Human
uccuauuuguaguuuugccaaaa

SEQ ID NO: 1018942 - RNA, 22 nt, Human
ugagacaaacaaaaggaaaggc

SEQ ID NO: 1018943 - RNA, 19 nt, Human
uucaggaugucaacaggcc

SEQ ID NO: 1018944 - RNA, 21 nt, Human
caacucuucuuuccuggcucc

SEQ ID NO: 1018945 - RNA, 23 nt, Human
ccggucccgccgagagccgagga

SEQ ID NO: 1018946 - RNA, 20 nt, Human
ccuucaucucacuccaacuc

SEQ ID NO: 1018947 - RNA, 18 nt, Human
cucggcucaggcaugagg

SEQ ID NO: 1018948 - RNA, 21 nt, Human
gucauaguccuuccuucaucu

SEQ ID NO: 1018949 - RNA, 24 nt, Human
ugaggcuuucuuuccuucugggcu

SEQ ID NO: 1018950 - RNA, 21 nt, Human
ugcguggcggggcuggguggg

SEQ ID NO: 1018951 - RNA, 23 nt, Human
ugggcuuccugggccaauagagg

SEQ ID NO: 1018952 - RNA, 21 nt, Human
ugucaccgccggucccgccga

SEQ ID NO: 1018953 - RNA, 19 nt, Human
uuuccuggcuccccgcucg

SEQ ID NO: 1018954 - RNA, 23 nt, Human
aaaaaagaaagaaaaucaccuaa

SEQ ID NO: 1018955 - RNA, 18 nt, Human
aaaagaaagaaaaucacc

SEQ ID NO: 1018956 - RNA, 25 nt, Human
aaaauaaaccacaagaagaccaaaa

SEQ ID NO: 1018957 - RNA, 21 nt, Human
aacaugguaagaccccguucu

SEQ ID NO: 1018958 - RNA, 21 nt, Human
aaccacaagaagaccaaaacu

SEQ ID NO: 1018959 - RNA, 20 nt, Human
aaccaggagguggaggaggu

SEQ ID NO: 1018960 - RNA, 21 nt, Human
aacccccccaccaccaaaaaa

SEQ ID NO: 1018961 - RNA, 23 nt, Human
aacugcuugaaccaggaggugga

SEQ ID NO: 1018962 - RNA, 21 nt, Human
aagaaaaucaccuaauaacac

SEQ ID NO: 1018963 - RNA, 24 nt, Human
aagaaagaaaaucaccuaauaaca

SEQ ID NO: 1018964 - RNA, 25 nt, Human
aagaaagaaaaucaccuaauaacac

SEQ ID NO: 1018965 - RNA, 21 nt, Human
aagcugaggcagaacugcuug

SEQ ID NO: 1018966 - RNA, 23 nt, Human
aagcuggcuuuaaaguugugacc

SEQ ID NO: 1018967 - RNA, 20 nt, Human
aauaagccacaaaauaaacc

SEQ ID NO: 1018968 - RNA, 29 nt, Human
aauaauaauaaaaauaaaaauguauuguc

SEQ ID NO: 1018969 - RNA, 25 nt, Human
acagaauuuuauucagccuuuaaaa

SEQ ID NO: 1018970 - RNA, 23 nt, Human
acagagcaagauucugucucaaa

SEQ ID NO: 1018971 - RNA, 24 nt, Human
acagagcaagauucugucucaaaa

SEQ ID NO: 1018972 - RNA, 19 nt, Human
accaaaaaaagaaagaaaa

SEQ ID NO: 1018973 - RNA, 21 nt, Human
accaaaaaaagaaagaaaauc

SEQ ID NO: 1018974 - RNA, 24 nt, Human
accaaaaaaagaaagaaaaucacc

SEQ ID NO: 1018975 - RNA, 24 nt, Human
accacugcacucuagucugggcaa

SEQ ID NO: 1018976 - RNA, 23 nt, Human
accuuaaaaauauaacguuaagc

SEQ ID NO: 1018977 - RNA, 24 nt, Human
acugcacucuagucugggcaacag

SEQ ID NO: 1018978 - RNA, 24 nt, Human
acugcacucuagucugggcaacag

SEQ ID NO: 1018979 - RNA, 18 nt, Human
agagcaagauucugucuc

SEQ ID NO: 1018980 - RNA, 20 nt, Human
agccacaaaauaaaccaccc

SEQ ID NO: 1018981 - RNA, 18 nt, Human
agccagguguagaauguc

SEQ ID NO: 1018982 - RNA, 22 nt, Human
agccuggccaacaugguaagac

SEQ ID NO: 1018983 - RNA, 24 nt, Human
agccuggccaacaugguaagaccc

SEQ ID NO: 1018984 - RNA, 23 nt, Human
agcggggcaugguggugcaugcc

SEQ ID NO: 1018985 - RNA, 24 nt, Human
agucugggcaacagagcaagauuc

SEQ ID NO: 1018986 - RNA, 20 nt, Human
auaggauauaccauacagcc

SEQ ID NO: 1018987 - RNA, 22 nt, Human
aucccagcacuuugggaggcca

SEQ ID NO: 1018988 - RNA, 19 nt, Human
augccuguaaucccagcac

SEQ ID NO: 1018989 - RNA, 23 nt, Human
auucacaaacgaaggccucccuu

SEQ ID NO: 1018990 - RNA, 24 nt, Human
auugcaccacugcacucuagucug

SEQ ID NO: 1018991 - RNA, 20 nt, Human
caaaauaaaccacaagaaga

SEQ ID NO: 1018992 - RNA, 21 nt, Human
caaagcgaguggcucacuuga

SEQ ID NO: 1018993 - RNA, 20 nt, Human
caacacaugacuaacagaau

SEQ ID NO: 1018994 - RNA, 19 nt, Human
caacccccccaccaccaaa

SEQ ID NO: 1018995 - RNA, 22 nt, Human
caacccccccaccaccaaaaaa

SEQ ID NO: 1018996 - RNA, 18 nt, Human
cacauucacuuaccacuc

SEQ ID NO: 1018997 - RNA, 25 nt, Human
caccaaaaaaagaaagaaaaucacc

SEQ ID NO: 1018998 - RNA, 24 nt, Human
caccacugcacucuagucugggca

SEQ ID NO: 1018999 - RNA, 23 nt, Human
cacucuagucugggcaacagagc

SEQ ID NO: 1019000 - RNA, 18 nt, Human
cacugcacucuagucugg

SEQ ID NO: 1019001 - RNA, 19 nt, Human
cacugcacucuagucuggg

SEQ ID NO: 1019002 - RNA, 21 nt, Human
cacugcacucuagucugggca

SEQ ID NO: 1019003 - RNA, 23 nt, Human
cacugcacucuagucugggcaac

SEQ ID NO: 1019004 - RNA, 24 nt, Human
cacugcacucuagucugggcaaca

SEQ ID NO: 1019005 - RNA, 23 nt, Human
cagaauuuuauucagccuuuaaa

SEQ ID NO: 1019006 - RNA, 21 nt, Human
cagcacuuugggaggccaaag

SEQ ID NO: 1019007 - RNA, 24 nt, Human
caugccuguaaucccagacacuug

SEQ ID NO: 1019008 - RNA, 24 nt, Human
caugccuguaaucccagcacuuug

SEQ ID NO: 1019009 - RNA, 21 nt, Human
cauucacgcaacccccccacc

SEQ ID NO: 1019010 - RNA, 26 nt, Human
cauugcacaaugugaaugacuuaaca

SEQ ID NO: 1019011 - RNA, 23 nt, Human
ccacaaaauaaaccacaagaaga

SEQ ID NO: 1019012 - RNA, 20 nt, Human
ccacugcacucuagucuggg

SEQ ID NO: 1019013 - RNA, 20 nt, Human
ccacugcacucuagucuggg

SEQ ID NO: 1019014 - RNA, 21 nt, Human
ccacugcacucuagucugggc

SEQ ID NO: 1019015 - RNA, 23 nt, Human
ccacugcacucuagucugggcaa

SEQ ID NO: 1019016 - RNA, 24 nt, Human
ccacugcacucuagucugggcaac

SEQ ID NO: 1019017 - RNA, 21 nt, Human
cccagacacuugggaagcuga

SEQ ID NO: 1019018 - RNA, 21 nt, Human
ccuacaguauucaguacagua

SEQ ID NO: 1019019 - RNA, 23 nt, Human
ccuggccaacaugguaagacccc

SEQ ID NO: 1019020 - RNA, 24 nt, Human
ccuggccaacaugguaagaccccg

SEQ ID NO: 1019021 - RNA, 18 nt, Human
ccuguaaucccagacacu

SEQ ID NO: 1019022 - RNA, 22 nt, Human
ccuguaaucccagcacuuuggg

SEQ ID NO: 1019023 - RNA, 23 nt, Human
cgcaacccccccaccaccaaaaa

SEQ ID NO: 1019024 - RNA, 21 nt, Human
cuacagcacaguaacaaccua

SEQ ID NO: 1019025 - RNA, 24 nt, Human
cucaugccuguaaucccagcacuu

SEQ ID NO: 1019026 - RNA, 23 nt, Human
cugcuugaaccaggagguggagg

SEQ ID NO: 1019027 - RNA, 21 nt, Human
cugggcaacagagcaagauuc

SEQ ID NO: 1019028 - RNA, 24 nt, Human
cugugugaagucuuuccccaucug

SEQ ID NO: 1019029 - RNA, 19 nt, Human
cuuaccauguguuccaaca

SEQ ID NO: 1019030 - RNA, 20 nt, Human
cuuggaaggugccuccucau

SEQ ID NO: 1019031 - RNA, 18 nt, Human
gagguugcaggaagccaa

SEQ ID NO: 1019032 - RNA, 23 nt, Human
gagguugcaggaagccaagauug

SEQ ID NO: 1019033 - RNA, 23 nt, Human
gaguagauuucugugugaagucu

SEQ ID NO: 1019034 - RNA, 23 nt, Human
gcaacccccccaccaccaaaaaa

SEQ ID NO: 1019035 - RNA, 24 nt, Human
gcacucuagucugggcaacagagc

SEQ ID NO: 1019036 - RNA, 21 nt, Human
gccaacaugguaagaccccgu

SEQ ID NO: 1019037 - RNA, 22 nt, Human
gccacaaaauaaaccacaagaa

SEQ ID NO: 1019038 - RNA, 19 nt, Human
gccagguguagaauguccu

SEQ ID NO: 1019039 - RNA, 19 nt, Human
gccgggcacgguggcucau

SEQ ID NO: 1019040 - RNA, 20 nt, Human
gccuguaaucccagacacuu

SEQ ID NO: 1019041 - RNA, 24 nt, Human
gcucacuugaggucgggaguuuga

SEQ ID NO: 1019042 - RNA, 22 nt, Human
ggagguugcaggaagccaagau

SEQ ID NO: 1019043 - RNA, 24 nt, Human
ggagguugcaggaagccaagauug

SEQ ID NO: 1019044 - RNA, 19 nt, Human
ggaguuugagaccagccug

SEQ ID NO: 1019045 - RNA, 23 nt, Human
ggcacgguggcucaugccuguaa

SEQ ID NO: 1019046 - RNA, 24 nt, Human
gggcaugguggugcaugccuguaa

SEQ ID NO: 1019047 - RNA, 19 nt, Human
gggcugggccuucugggug

SEQ ID NO: 1019048 - RNA, 19 nt, Human
ggucgggaguuugagacca

SEQ ID NO: 1019049 - RNA, 19 nt, Human
ggugagcuucucucuaaga

SEQ ID NO: 1019050 - RNA, 23 nt, Human
gguggcucaugccuguaauccca

SEQ ID NO: 1019051 - RNA, 24 nt, Human
gguggcucaugccuguaaucccag

SEQ ID NO: 1019052 - RNA, 24 nt, Human
gguggugcaugccuguaaucccag

SEQ ID NO: 1019053 - RNA, 19 nt, Human
guagaauguccuucagaag

SEQ ID NO: 1019054 - RNA, 23 nt, Human
guggcucaugccuguaaucccag

SEQ ID NO: 1019055 - RNA, 25 nt, Human
guuaagcaacacaugacuaacagaa

SEQ ID NO: 1019056 - RNA, 20 nt, Human
uaagcaacacaugacuaaca

SEQ ID NO: 1019057 - RNA, 23 nt, Human
uaagccacaaaauaaaccacaaa

SEQ ID NO: 1019058 - RNA, 25 nt, Human
uaagccacaaaauaaaccacaagaa

SEQ ID NO: 1019059 - RNA, 23 nt, Human
uacacaaugucuauaaagucuac

SEQ ID NO: 1019060 - RNA, 24 nt, Human
uaccauacagccuaggcauucacg

SEQ ID NO: 1019061 - RNA, 22 nt, Human
ucacuugaggucgggaguuuga

SEQ ID NO: 1019062 - RNA, 22 nt, Human
ucaugccuguaaucccagcacu

SEQ ID NO: 1019063 - RNA, 18 nt, Human
uccgucaugcucagccag

SEQ ID NO: 1019064 - RNA, 18 nt, Human
ucucacagggcugggccu

SEQ ID NO: 1019065 - RNA, 21 nt, Human
ucucuacuaaaaauacaaaaa

SEQ ID NO: 1019066 - RNA, 20 nt, Human
ucuggguggacaaagcuggc

SEQ ID NO: 1019067 - RNA, 22 nt, Human
ugacuaacagaauuuuauucag

SEQ ID NO: 1019068 - RNA, 23 nt, Human
ugagaccagccuggccaacaugg

SEQ ID NO: 1019069 - RNA, 24 nt, Human
ugagaccagccuggccaacauggu

SEQ ID NO: 1019070 - RNA, 21 nt, Human
ugaggcagaacugcuugaacc

SEQ ID NO: 1019071 - RNA, 18 nt, Human
ugaggucgggaguuugag

SEQ ID NO: 1019072 - RNA, 23 nt, Human
ugcaguacuguaagcuucauuca

SEQ ID NO: 1019073 - RNA, 24 nt, Human
ugccuguaaucccagacacuuggg

SEQ ID NO: 1019074 - RNA, 23 nt, Human
ugccuguaaucccagcacuuugg

SEQ ID NO: 1019075 - RNA, 19 nt, Human
ugcucagccagguguagaa

SEQ ID NO: 1019076 - RNA, 24 nt, Human
uggauggagugaggaauaagguuu

SEQ ID NO: 1019077 - RNA, 24 nt, Human
uggcucacuugaggucgggaguuu

SEQ ID NO: 1019078 - RNA, 22 nt, Human
uggcucaugccuguaaucccag

SEQ ID NO: 1019079 - RNA, 24 nt, Human
uggcucaugccuguaaucccagca

SEQ ID NO: 1019080 - RNA, 31 nt, Human
ugggaagcugaggcagaacugcuugaaccaa

SEQ ID NO: 1019081 - RNA, 24 nt, Human
ugggaggccaaagcgaguggcuca

SEQ ID NO: 1019082 - RNA, 20 nt, Human
ugggguguguuccgucaugc

SEQ ID NO: 1019083 - RNA, 21 nt, Human
ugguaaguucucugugagucu

SEQ ID NO: 1019084 - RNA, 21 nt, Human
uggugcaugccuguaauccca

SEQ ID NO: 1019085 - RNA, 22 nt, Human
uggugcaugccuguaaucccag

SEQ ID NO: 1019086 - RNA, 24 nt, Human
ugguggugcaugccuguaauccca

SEQ ID NO: 1019087 - RNA, 23 nt, Human
uguuaagcaacacaugacuaaca

SEQ ID NO: 1019088 - RNA, 24 nt, Human
uuaccauguguuccaacagccuac

SEQ ID NO: 1019089 - RNA, 20 nt, Human
uuagcggggcaugguggugc

SEQ ID NO: 1019090 - RNA, 24 nt, Human
uuagcggggcaugguggugcaugc

SEQ ID NO: 1019091 - RNA, 20 nt, Human
aacacagcaagaccgcaucu

SEQ ID NO: 1019092 - RNA, 20 nt, Human
aagaaugaaauacucacuga

SEQ ID NO: 1019093 - RNA, 22 nt, Human
aaguaucauaagcccccaagcu

SEQ ID NO: 1019094 - RNA, 19 nt, Human
acacagaaucuacauauug

SEQ ID NO: 1019095 - RNA, 21 nt, Human
acacagcaagaccgcaucucu

SEQ ID NO: 1019096 - RNA, 21 nt, Human
acauauugaagaccauguguu

SEQ ID NO: 1019097 - RNA, 19 nt, Human
acucaggaggcugaggcag

SEQ ID NO: 1019098 - RNA, 18 nt, Human
agcaggaguuugagacca

SEQ ID NO: 1019099 - RNA, 24 nt, Human
aggaucacuugagagcaggaguuu

SEQ ID NO: 1019100 - RNA, 18 nt, Human
aggcaggaggaucacuug

SEQ ID NO: 1019101 - RNA, 24 nt, Human
aggcugaggcaggaggaucacuug

SEQ ID NO: 1019102 - RNA, 22 nt, Human
agguuuccuuccuggcugggca

SEQ ID NO: 1019103 - RNA, 22 nt, Human
auagauuuuucuuccuugguau

SEQ ID NO: 1019104 - RNA, 20 nt, Human
aucacuugagagcaggaguu

SEQ ID NO: 1019105 - RNA, 23 nt, Human
cacccuguauuucacuccauccu

SEQ ID NO: 1019106 - RNA, 24 nt, Human
caggaggcugaggcaggaggauca

SEQ ID NO: 1019107 - RNA, 18 nt, Human
caggaguuugagaccagc

SEQ ID NO: 1019108 - RNA, 24 nt, Human
cauaaaaagaaauccacaucuaau

SEQ ID NO: 1019109 - RNA, 21 nt, Human
cauaagcccccaagcugaaua

SEQ ID NO: 1019110 - RNA, 23 nt, Human
cauccagaguugggccagaaggc

SEQ ID NO: 1019111 - RNA, 20 nt, Human
ccauccuuggcuaccuuccc

SEQ ID NO: 1019112 - RNA, 28 nt, Human
cccagcccuggaccuggccugcugggac

SEQ ID NO: 1019113 - RNA, 23 nt, Human
cccaggggaaaaacacaggucac

SEQ ID NO: 1019114 - RNA, 20 nt, Human
cccauaauuuccaaaggacc

SEQ ID NO: 1019115 - RNA, 22 nt, Human
cccauaauuuccaaaggaccca

SEQ ID NO: 1019116 - RNA, 20 nt, Human
cccuggaccuggccugcugg

SEQ ID NO: 1019117 - RNA, 24 nt, Human
ccugcugggacagcaacccuuucu

SEQ ID NO: 1019118 - RNA, 21 nt, Human
ccuguagguuuccuuccuggc

SEQ ID NO: 1019119 - RNA, 24 nt, Human
ccuugcucgucagacucuucuccc

SEQ ID NO: 1019120 - RNA, 24 nt, Human
cuuccuggcugggcagaguccuaa

SEQ ID NO: 1019121 - RNA, 22 nt, Human
gaggaucacuugagagcaggag

SEQ ID NO: 1019122 - RNA, 24 nt, Human
gaucacuugagagcaggaguuuga

SEQ ID NO: 1019123 - RNA, 21 nt, Human
gcugggcagaguccuaagcag

SEQ ID NO: 1019124 - RNA, 22 nt, Human
ggaucacuugagagcaggaguu

SEQ ID NO: 1019125 - RNA, 22 nt, Human
gguacuagaaguaucauaagcc

SEQ ID NO: 1019126 - RNA, 20 nt, Human
uaaaauauucauaggaucua

SEQ ID NO: 1019127 - RNA, 28 nt, Human
uaacagggcuucucuccaauauauguuc

SEQ ID NO: 1019128 - RNA, 23 nt, Human
uauauguucuaaagugagaaagg

SEQ ID NO: 1019129 - RNA, 22 nt, Human
uaucauaagcccccaagcugaa

SEQ ID NO: 1019130 - RNA, 18 nt, Human
ucacuugagagcaggagu

SEQ ID NO: 1019131 - RNA, 19 nt, Human
ucacuugagagcaggaguu

SEQ ID NO: 1019132 - RNA, 23 nt, Human
uccaauauauguucuaaagugag

SEQ ID NO: 1019133 - RNA, 21 nt, Human
uccagaguugggccagaaggc

SEQ ID NO: 1019134 - RNA, 23 nt, Human
uccaggugaccauaacagggcuu

SEQ ID NO: 1019135 - RNA, 24 nt, Human
ucuaugucacacagaaucuacaua

SEQ ID NO: 1019136 - RNA, 19 nt, Human
ucucagcugcaggcgacag

SEQ ID NO: 1019137 - RNA, 21 nt, Human
ucucuuuggguacuagaagua

SEQ ID NO: 1019138 - RNA, 24 nt, Human
ugaaaagauaacuaaaauauucau

SEQ ID NO: 1019139 - RNA, 25 nt, Human
ugaaaagauaacuaaaauauucaua

SEQ ID NO: 1019140 - RNA, 20 nt, Human
ugaggcaggaggaucacuug

SEQ ID NO: 1019141 - RNA, 25 nt, Human
ugaggcaggaggaucacuugagagc

SEQ ID NO: 1019142 - RNA, 23 nt, Human
ugauaaaaacaaucauagcuaua

SEQ ID NO: 1019143 - RNA, 24 nt, Human
ugguauuugauuuuuucccauaau

SEQ ID NO: 1019144 - RNA, 19 nt, Human
uguagguuuccuuccuggc

SEQ ID NO: 1019145 - RNA, 19 nt, Human
uuaaacugaaaagauaacu

SEQ ID NO: 1019146 - RNA, 18 nt, Human
uugaagaccauguguucu

SEQ ID NO: 1019147 - RNA, 22 nt, Human
uugagagcaggaguuugagacc

SEQ ID NO: 1019148 - RNA, 18 nt, Human
uugguauuugauuuuuuc

SEQ ID NO: 1019149 - RNA, 23 nt, Human
uuuauuacuuuaagaaagaaggg

SEQ ID NO: 1019150 - RNA, 26 nt, Human
aagcaaaagacacugacggaagagga

SEQ ID NO: 1019151 - RNA, 22 nt, Human
acuccacguugcgcgcuccgcc

SEQ ID NO: 1019152 - RNA, 22 nt, Human
agcgcccgucucucuugugccc

SEQ ID NO: 1019153 - RNA, 20 nt, Human
caccacccgccugcucuguc

SEQ ID NO: 1019154 - RNA, 19 nt, Human
ccuggguugcacuuggccc

SEQ ID NO: 1019155 - RNA, 22 nt, Human
cgcuccgccgggagucgaagca

SEQ ID NO: 1019156 - RNA, 21 nt, Human
cuccacguugcgcgcuccgcc

SEQ ID NO: 1019157 - RNA, 20 nt, Human
cuccgccgggagucgaagca

SEQ ID NO: 1019158 - RNA, 26 nt, Human
cucucuugugcccuagcagaggcugg

SEQ ID NO: 1019159 - RNA, 18 nt, Human
cugcucugucacuuucuc

SEQ ID NO: 1019160 - RNA, 19 nt, Human
gcuccgaaacagccguggc

SEQ ID NO: 1019161 - RNA, 21 nt, Human
ggcacgccgcucgcgggcggc

SEQ ID NO: 1019162 - RNA, 19 nt, Human
uaagacuuccaaaagaaca

SEQ ID NO: 1019163 - RNA, 24 nt, Human
ucacuuucucuacaaaggaaggac

SEQ ID NO: 1019164 - RNA, 20 nt, Human
uccugagcuccgaaacagcc

SEQ ID NO: 1019165 - RNA, 18 nt, Human
ucucuacaaaggaaggac

SEQ ID NO: 1019166 - RNA, 19 nt, Human
ugcacuuggccccugcacg

SEQ ID NO: 1019167 - RNA, 18 nt, Human
aaauagacaagcuaaaca

SEQ ID NO: 1019168 - RNA, 24 nt, Human
aaaucacauccuacugaauuuaaa

SEQ ID NO: 1019169 - RNA, 24 nt, Human
aacagggagggaggaggugaggga

SEQ ID NO: 1019170 - RNA, 20 nt, Human
aacccuacacuucugcccac

SEQ ID NO: 1019171 - RNA, 21 nt, Human
aagaagcuacacacacaagca

SEQ ID NO: 1019172 - RNA, 18 nt, Human
aagcaauugaaaagaagc

SEQ ID NO: 1019173 - RNA, 19 nt, Human
aagcaucucaguuuggagg

SEQ ID NO: 1019174 - RNA, 26 nt, Human
aagccaaucugucuuagggaagccaa

SEQ ID NO: 1019175 - RNA, 18 nt, Human
aauccucaguggucaucu

SEQ ID NO: 1019176 - RNA, 21 nt, Human
acaagcaauuaucauagcauc

SEQ ID NO: 1019177 - RNA, 20 nt, Human
acaucugcccagccauccaa

SEQ ID NO: 1019178 - RNA, 18 nt, Human
acuaagcaauugaaaaga

SEQ ID NO: 1019179 - RNA, 21 nt, Human
acuaagcaauugaaaagaagc

SEQ ID NO: 1019180 - RNA, 21 nt, Human
agaaagccaaucugucuuagg

SEQ ID NO: 1019181 - RNA, 21 nt, Human
agacaagcuaaacacuagccg

SEQ ID NO: 1019182 - RNA, 22 nt, Human
agacaggaaaaugggucacuga

SEQ ID NO: 1019183 - RNA, 22 nt, Human
agauauggcaaauagacaagcu

SEQ ID NO: 1019184 - RNA, 22 nt, Human
agcaauugaaaagaagcaaaaa

SEQ ID NO: 1019185 - RNA, 21 nt, Human
agcacaaaaucaaugcuugcu

SEQ ID NO: 1019186 - RNA, 19 nt, Human
aggaagaacaagcccacaa

SEQ ID NO: 1019187 - RNA, 20 nt, Human
aggacucagggggauaggca

SEQ ID NO: 1019188 - RNA, 22 nt, Human
aggagggaaaggggcagcuugg

SEQ ID NO: 1019189 - RNA, 18 nt, Human
agugaacggugaguggaa

SEQ ID NO: 1019190 - RNA, 18 nt, Human
aguucagggagcagaauu

SEQ ID NO: 1019191 - RNA, 23 nt, Human
auuuacccaccagggaucaucaa

SEQ ID NO: 1019192 - RNA, 18 nt, Human
caaaaucacauccuacug

SEQ ID NO: 1019193 - RNA, 19 nt, Human
caaauaaauggaauguucc

SEQ ID NO: 1019194 - RNA, 19 nt, Human
caaaugaaaaacugcuaua

SEQ ID NO: 1019195 - RNA, 24 nt, Human
caagagcagaggcccucauuuugu

SEQ ID NO: 1019196 - RNA, 20 nt, Human
caagccaaugugcauagggc

SEQ ID NO: 1019197 - RNA, 21 nt, Human
cacagcuucuuguaauccuca

SEQ ID NO: 1019198 - RNA, 19 nt, Human
cacagugcuuggcacacac

SEQ ID NO: 1019199 - RNA, 21 nt, Human
cacccccaaaaucacauccua

SEQ ID NO: 1019200 - RNA, 19 nt, Human
cacuagcuuaaggcagagu

SEQ ID NO: 1019201 - RNA, 24 nt, Human
cagcugaggaagagcaguugguau

SEQ ID NO: 1019202 - RNA, 22 nt, Human
caggaaaaugggucacugaaag

SEQ ID NO: 1019203 - RNA, 23 nt, Human
caguccacccccaaaaucacauc

SEQ ID NO: 1019204 - RNA, 22 nt, Human
cagucuucaacuuggcccauua

SEQ ID NO: 1019205 - RNA, 20 nt, Human
cauuacucugugacagugcc

SEQ ID NO: 1019206 - RNA, 24 nt, Human
cauuagaaagccaaucugucuuag

SEQ ID NO: 1019207 - RNA, 21 nt, Human
ccaccacgugccaagucugau

SEQ ID NO: 1019208 - RNA, 21 nt, Human
ccugcacugaggacucagggg

SEQ ID NO: 1019209 - RNA, 19 nt, Human
ccuggggccccagcaguug

SEQ ID NO: 1019210 - RNA, 25 nt, Human
cuacugaauuuaaaccuaauugugu

SEQ ID NO: 1019211 - RNA, 24 nt, Human
cucaaucaaaagcaacuaacuacu

SEQ ID NO: 1019212 - RNA, 19 nt, Human
cucugcacagugcuuggca

SEQ ID NO: 1019213 - RNA, 19 nt, Human
cucugugacagugccugcu

SEQ ID NO: 1019214 - RNA, 20 nt, Human
cucugugacagugccugcua

SEQ ID NO: 1019215 - RNA, 18 nt, Human
cucuuugguaaugucugu

SEQ ID NO: 1019216 - RNA, 18 nt, Human
cugaggaagagcaguugg

SEQ ID NO: 1019217 - RNA, 20 nt, Human
cugaucagccuggcgguggg

SEQ ID NO: 1019218 - RNA, 23 nt, Human
cugcgcaaugcaauagccaccuc

SEQ ID NO: 1019219 - RNA, 21 nt, Human
cugcuaugugguagagccuca

SEQ ID NO: 1019220 - RNA, 21 nt, Human
cuggauucacaagcuccucuu

SEQ ID NO: 1019221 - RNA, 26 nt, Human
cugggcccacagauggcagaguccag

SEQ ID NO: 1019222 - RNA, 19 nt, Human
cuuucauccacugguccug

SEQ ID NO: 1019223 - RNA, 24 nt, Human
gcaaauagacaagcuaaacacuag

SEQ ID NO: 1019224 - RNA, 20 nt, Human
gcccauuauaagccucaagg

SEQ ID NO: 1019225 - RNA, 20 nt, Human
gcgcaaugcaauagccaccu

SEQ ID NO: 1019226 - RNA, 19 nt, Human
ggaacuguguacccucugc

SEQ ID NO: 1019227 - RNA, 19 nt, Human
ggaggaggugagggaaggg

SEQ ID NO: 1019228 - RNA, 22 nt, Human
ggagggaggaggugagggaagg

SEQ ID NO: 1019229 - RNA, 19 nt, Human
ggcaaaagcaugaagaaau

SEQ ID NO: 1019230 - RNA, 21 nt, Human
gggaagccagccuaucuuggg

SEQ ID NO: 1019231 - RNA, 19 nt, Human
ggggauuaaugccauuacu

SEQ ID NO: 1019232 - RNA, 18 nt, Human
gucuuagggaagccaaga

SEQ ID NO: 1019233 - RNA, 23 nt, Human
uaaaucaagagcagaggcccuca

SEQ ID NO: 1019234 - RNA, 19 nt, Human
uacacacacaagcaauuau

SEQ ID NO: 1019235 - RNA, 22 nt, Human
uacacccuaaaacccacuuggg

SEQ ID NO: 1019236 - RNA, 22 nt, Human
uacucugugacagugccugcua

SEQ ID NO: 1019237 - RNA, 19 nt, Human
uacuucaugggggggggga

SEQ ID NO: 1019238 - RNA, 21 nt, Human
uagggaagccaagauggaauu

SEQ ID NO: 1019239 - RNA, 27 nt, Human
uaguguccaccacgugccaagucuggu

SEQ ID NO: 1019240 - RNA, 18 nt, Human
uauacacccuaaaaccca

SEQ ID NO: 1019241 - RNA, 21 nt, Human
uaugauuagaaacacuaagca

SEQ ID NO: 1019242 - RNA, 22 nt, Human
ucaauaauggcucuugcaagaa

SEQ ID NO: 1019243 - RNA, 18 nt, Human
ucaguccacccccaaaau

SEQ ID NO: 1019244 - RNA, 19 nt, Human
uccaccacgugccaagucu

SEQ ID NO: 1019245 - RNA, 22 nt, Human
uccacccccaaaaucacauccu

SEQ ID NO: 1019246 - RNA, 24 nt, Human
uccacccccaaaaucacauccuac

SEQ ID NO: 1019247 - RNA, 18 nt, Human
ugaaaagaagcaaaaagg

SEQ ID NO: 1019248 - RNA, 18 nt, Human
ugaaaagaagcaaaaagg

SEQ ID NO: 1019249 - RNA, 25 nt, Human
ugaaccugagcagaggaucggcuga

SEQ ID NO: 1019250 - RNA, 21 nt, Human
ugacagugccugcuauguggu

SEQ ID NO: 1019251 - RNA, 18 nt, Human
ugacaucaugggcauaaa

SEQ ID NO: 1019252 - RNA, 18 nt, Human
ugcaauagccaccucucu

SEQ ID NO: 1019253 - RNA, 22 nt, Human
ugcccagaggaagagugugauu

SEQ ID NO: 1019254 - RNA, 22 nt, Human
uggacaggcuuacaucugccca

SEQ ID NO: 1019255 - RNA, 18 nt, Human
uggaggcauuuucauggg

SEQ ID NO: 1019256 - RNA, 22 nt, Human
uggcacacacugagcacaaaau

SEQ ID NO: 1019257 - RNA, 19 nt, Human
uggcaggaagaacaagccc

SEQ ID NO: 1019258 - RNA, 24 nt, Human
ugggaagagcaugggcucuguagc

SEQ ID NO: 1019259 - RNA, 24 nt, Human
ugggaggccugaagggaggguguu

SEQ ID NO: 1019260 - RNA, 19 nt, Human
uggggccccagcaguugcc

SEQ ID NO: 1019261 - RNA, 22 nt, Human
ugucuugcauguugguucuaaa

SEQ ID NO: 1019262 - RNA, 24 nt, Human
ugugguagagccucaagaaauguu

SEQ ID NO: 1019263 - RNA, 24 nt, Human
uguuagcugcuuuuccacuuccuu

SEQ ID NO: 1019264 - RNA, 27 nt, Human
uucauggggggggggauaauucaggga

SEQ ID NO: 1019265 - RNA, 24 nt, Human
uuccuggauucacaagcuccucuu

SEQ ID NO: 1019266 - RNA, 22 nt, Human
uuggggcaaaacuggggacagc

SEQ ID NO: 1019267 - RNA, 21 nt, Human
uuuggcaggaagaacaagccc

SEQ ID NO: 1019268 - RNA, 24 nt, Human
aaagugcugggauuacaggcauga

SEQ ID NO: 1019269 - RNA, 23 nt, Human
aagguaggucuucugauuccaaa

SEQ ID NO: 1019270 - RNA, 19 nt, Human
aagugcugggauuacaggc

SEQ ID NO: 1019271 - RNA, 21 nt, Human
aagugcugggauuacaggcau

SEQ ID NO: 1019272 - RNA, 26 nt, Human
aagugcugggauuacaggcaugagcc

SEQ ID NO: 1019273 - RNA, 24 nt, Human
aauuuuuguauuuuaguagagaug

SEQ ID NO: 1019274 - RNA, 23 nt, Human
accauguuggucaggcuggucuc

SEQ ID NO: 1019275 - RNA, 18 nt, Human
acugacaggaaacuaaag

SEQ ID NO: 1019276 - RNA, 19 nt, Human
acugcaaccuccgcccucc

SEQ ID NO: 1019277 - RNA, 21 nt, Human
agaaauauauaucauuugucc

SEQ ID NO: 1019278 - RNA, 18 nt, Human
agacucuuguccgcccaa

SEQ ID NO: 1019279 - RNA, 23 nt, Human
agacuugaaaguugggaugaacu

SEQ ID NO: 1019280 - RNA, 23 nt, Human
agcugggauuaccggugugugcc

SEQ ID NO: 1019281 - RNA, 18 nt, Human
aggcaugagccaccaagc

SEQ ID NO: 1019282 - RNA, 21 nt, Human
aggcaugagccaccaagcccg

SEQ ID NO: 1019283 - RNA, 18 nt, Human
aggcuugucucgaacucc

SEQ ID NO: 1019284 - RNA, 24 nt, Human
aggugauccacucgcuucggccuc

SEQ ID NO: 1019285 - RNA, 23 nt, Human
aguagcugggauuaccggugugu

SEQ ID NO: 1019286 - RNA, 20 nt, Human
agugcaauggcgcgauccug

SEQ ID NO: 1019287 - RNA, 19 nt, Human
aguugggaugaacuuuauu

SEQ ID NO: 1019288 - RNA, 23 nt, Human
augggguuucaccauguugguca

SEQ ID NO: 1019289 - RNA, 24 nt, Human
augggguuucaccauguuggucag

SEQ ID NO: 1019290 - RNA, 24 nt, Human
auuuuaguagagaugggguuucac

SEQ ID NO: 1019291 - RNA, 20 nt, Human
caaagauccuuucacuuaac

SEQ ID NO: 1019292 - RNA, 24 nt, Human
caaaguccugggacuacaggagug

SEQ ID NO: 1019293 - RNA, 23 nt, Human
caaagugcugggauuacaggcau

SEQ ID NO: 1019294 - RNA, 24 nt, Human
caaagugcugggauuacaggcaug

SEQ ID NO: 1019295 - RNA, 22 nt, Human
caacuccacaccugacauucug

SEQ ID NO: 1019296 - RNA, 24 nt, Human
caacuuuauugacaacugaaugau

SEQ ID NO: 1019297 - RNA, 22 nt, Human
caagcgacucuccugucucagc

SEQ ID NO: 1019298 - RNA, 22 nt, Human
cacaaagauccuuucacuuaac

SEQ ID NO: 1019299 - RNA, 22 nt, Human
cacaacaacccugugagguagg

SEQ ID NO: 1019300 - RNA, 21 nt, Human
caccauguuggucaggcuggu

SEQ ID NO: 1019301 - RNA, 24 nt, Human
caccauguuggucaggcuggucuc

SEQ ID NO: 1019302 - RNA, 24 nt, Human
caccucggccucccaaaguccugg

SEQ ID NO: 1019303 - RNA, 22 nt, Human
cacugcacccagcccaugucua

SEQ ID NO: 1019304 - RNA, 24 nt, Human
cagcagggacacuaucuuuaaaau

SEQ ID NO: 1019305 - RNA, 20 nt, Human
cagccuccugaguagcuggg

SEQ ID NO: 1019306 - RNA, 18 nt, Human
cagggauucuauuccauu

SEQ ID NO: 1019307 - RNA, 18 nt, Human
ccacugcacccagcccau

SEQ ID NO: 1019308 - RNA, 20 nt, Human
cccagguucaagcgacucuc

SEQ ID NO: 1019309 - RNA, 23 nt, Human
cccagguucaagcgacucuccug

SEQ ID NO: 1019310 - RNA, 22 nt, Human
ccucccagguucaagcgacucu

SEQ ID NO: 1019311 - RNA, 19 nt, Human
ccuccgcccucccagguuc

SEQ ID NO: 1019312 - RNA, 20 nt, Human
ccugaccucaggugauccac

SEQ ID NO: 1019313 - RNA, 20 nt, Human
ccugaccucaggugauccac

SEQ ID NO: 1019314 - RNA, 19 nt, Human
ccugaguagcugggauuac

SEQ ID NO: 1019315 - RNA, 24 nt, Human
ccugucucagccuccugaguagcu

SEQ ID NO: 1019316 - RNA, 22 nt, Human
cgcccaacuccacaccugacau

SEQ ID NO: 1019317 - RNA, 24 nt, Human
cgcucuuguugcccaggcuggagu

SEQ ID NO: 1019318 - RNA, 20 nt, Human
cggugugugcccccaugccc

SEQ ID NO: 1019319 - RNA, 24 nt, Human
cucaaagugcugggauuacaggca

SEQ ID NO: 1019320 - RNA, 19 nt, Human
cucaagggaucuucccacc

SEQ ID NO: 1019321 - RNA, 24 nt, Human
cucaagggaucuucccaccucggc

SEQ ID NO: 1019322 - RNA, 25 nt, Human
cucacugcaaccuccgcccucccag

SEQ ID NO: 1019323 - RNA, 24 nt, Human
cucagccuccugaguagcugggau

SEQ ID NO: 1019324 - RNA, 23 nt, Human
cuccugggcucaagggaucuucc

SEQ ID NO: 1019325 - RNA, 26 nt, Human
cucuccugucucagccuccugaguag

SEQ ID NO: 1019326 - RNA, 24 nt, Human
cugcaaccuccgcccucccagguu

SEQ ID NO: 1019327 - RNA, 25 nt, Human
cugcaaccuccgcccucccagguuc

SEQ ID NO: 1019328 - RNA, 24 nt, Human
cuuguugcccaggcuggagugcaa

SEQ ID NO: 1019329 - RNA, 18 nt, Human
gacuacaggagugagcca

SEQ ID NO: 1019330 - RNA, 23 nt, Human
gacuacaggagugagccacugca

SEQ ID NO: 1019331 - RNA, 24 nt, Human
gagaugggguuucaccauguuggu

SEQ ID NO: 1019332 - RNA, 24 nt, Human
gagccacugcacccagcccauguc

SEQ ID NO: 1019333 - RNA, 23 nt, Human
gaguagcugggauuaccggugug

SEQ ID NO: 1019334 - RNA, 24 nt, Human
gagugagccacugcacccagccca

SEQ ID NO: 1019335 - RNA, 18 nt, Human
gauuacaggcaugagcca

SEQ ID NO: 1019336 - RNA, 21 nt, Human
gauuacaggcaugagccacca

SEQ ID NO: 1019337 - RNA, 24 nt, Human
gauuacaggcaugagccaccaagc

SEQ ID NO: 1019338 - RNA, 23 nt, Human
gcaaccuccgcccucccagguuc

SEQ ID NO: 1019339 - RNA, 19 nt, Human
gcccaggcuggagugcaau

SEQ ID NO: 1019340 - RNA, 24 nt, Human
gcgacucuccugucucagccuccu

SEQ ID NO: 1019341 - RNA, 24 nt, Human
gcucuuguugcccaggcuggagug

SEQ ID NO: 1019342 - RNA, 25 nt, Human
gcuggagugcaauggcgcgauccug

SEQ ID NO: 1019343 - RNA, 20 nt, Human
ggacuacaggagugagccac

SEQ ID NO: 1019344 - RNA, 19 nt, Human
ggauuacaggcaugagcca

SEQ ID NO: 1019345 - RNA, 23 nt, Human
gggaaagccaggaaucaaaggua

SEQ ID NO: 1019346 - RNA, 22 nt, Human
gggguuucaccauguuggucag

SEQ ID NO: 1019347 - RNA, 23 nt, Human
guagagaugggguuucaccaugu

SEQ ID NO: 1019348 - RNA, 22 nt, Human
gugauccacucgcuucggccuc

SEQ ID NO: 1019349 - RNA, 20 nt, Human
uaaaaugcauacuauacaca

SEQ ID NO: 1019350 - RNA, 23 nt, Human
uaauuuuuguauuuuaguagaga

SEQ ID NO: 1019351 - RNA, 19 nt, Human
uacaggagugagccacugc

SEQ ID NO: 1019352 - RNA, 24 nt, Human
uacaggagugagccacugcaccca

SEQ ID NO: 1019353 - RNA, 20 nt, Human
uacaggcaugagccaccaag

SEQ ID NO: 1019354 - RNA, 23 nt, Human
uacaggcaugagccaccaagccc

SEQ ID NO: 1019355 - RNA, 21 nt, Human
uaccggugugugcccccaugc

SEQ ID NO: 1019356 - RNA, 22 nt, Human
uagagaugggguuucaccaugu

SEQ ID NO: 1019357 - RNA, 23 nt, Human
uagcugggauuaccggugugugc

SEQ ID NO: 1019358 - RNA, 24 nt, Human
uaguagagaugggguuucaccaug

SEQ ID NO: 1019359 - RNA, 25 nt, Human
uaguagagaugggguuucaccaugu

SEQ ID NO: 1019360 - RNA, 23 nt, Human
ucaaagugcugggauuacaggca

SEQ ID NO: 1019361 - RNA, 24 nt, Human
ucaaagugcugggauuacaggcau

SEQ ID NO: 1019362 - RNA, 18 nt, Human
ucacugcaaccuccgccc

SEQ ID NO: 1019363 - RNA, 23 nt, Human
ucacugcaaccuccgcccuccca

SEQ ID NO: 1019364 - RNA, 25 nt, Human
ucacugcaaccuccgcccucccagg

SEQ ID NO: 1019365 - RNA, 23 nt, Human
ucacuuaacccucacaacaaccc

SEQ ID NO: 1019366 - RNA, 20 nt, Human
ucagccuccugaguagcugg

SEQ ID NO: 1019367 - RNA, 21 nt, Human
ucccagguucaagcgacucuc

SEQ ID NO: 1019368 - RNA, 24 nt, Human
ucccagguucaagcgacucuccug

SEQ ID NO: 1019369 - RNA, 22 nt, Human
uccugaguagcugggauuaccg

SEQ ID NO: 1019370 - RNA, 24 nt, Human
uccugaguagcugggauuaccggu

SEQ ID NO: 1019371 - RNA, 20 nt, Human
uccugggcucaagggaucuu

SEQ ID NO: 1019372 - RNA, 21 nt, Human
uccugggcucaagggaucuuc

SEQ ID NO: 1019373 - RNA, 24 nt, Human
uccugggcucaagggaucuuccca

SEQ ID NO: 1019374 - RNA, 23 nt, Human
ucgcucuuguugcccaggcugga

SEQ ID NO: 1019375 - RNA, 24 nt, Human
ucucaaagugcugggauuacaggc

SEQ ID NO: 1019376 - RNA, 22 nt, Human
ucucgaacuccugggcucaagg

SEQ ID NO: 1019377 - RNA, 22 nt, Human
ucuuguugcccaggcuggagug

SEQ ID NO: 1019378 - RNA, 22 nt, Human
ugaccucaggugauccacucgc

SEQ ID NO: 1019379 - RNA, 23 nt, Human
ugaccucaggugauccacucgcu

SEQ ID NO: 1019380 - RNA, 24 nt, Human
ugaccucaggugauccacucgcuu

SEQ ID NO: 1019381 - RNA, 18 nt, Human
ugcccaggcuggagugca

SEQ ID NO: 1019382 - RNA, 21 nt, Human
ugcccaggcuggagugcaaug

SEQ ID NO: 1019383 - RNA, 21 nt, Human
ugcccaggcuggagugcaaug

SEQ ID NO: 1019384 - RNA, 24 nt, Human
ugcccaggcuggagugcaauggcg

SEQ ID NO: 1019385 - RNA, 24 nt, Human
uggagugcaauggcgcgauccugg

SEQ ID NO: 1019386 - RNA, 22 nt, Human
ugggacuacaggagugagccac

SEQ ID NO: 1019387 - RNA, 22 nt, Human
ugggacuacaggagugagccac

SEQ ID NO: 1019388 - RNA, 24 nt, Human
ugggacuacaggagugagccacug

SEQ ID NO: 1019389 - RNA, 18 nt, Human
ugggauuacaggcaugag

SEQ ID NO: 1019390 - RNA, 19 nt, Human
ugggauuacaggcaugagc

SEQ ID NO: 1019391 - RNA, 22 nt, Human
ugggauuacaggcaugagccac

SEQ ID NO: 1019392 - RNA, 23 nt, Human
ugggauuacaggcaugagccacc

SEQ ID NO: 1019393 - RNA, 24 nt, Human
ugggauuacaggcaugagccacca

SEQ ID NO: 1019394 - RNA, 25 nt, Human
ugggauuaccggugugugcccccau

SEQ ID NO: 1019395 - RNA, 22 nt, Human
ugggcucaagggaucuucccac

SEQ ID NO: 1019396 - RNA, 24 nt, Human
ugggcucaagggaucuucccaccu

SEQ ID NO: 1019397 - RNA, 24 nt, Human
ugggguuucaccauguuggucagg

SEQ ID NO: 1019398 - RNA, 24 nt, Human
uggucaggcuggucucaaaauccu

SEQ ID NO: 1019399 - RNA, 23 nt, Human
ugucuaguaaagaguaaauaaua

SEQ ID NO: 1019400 - RNA, 24 nt, Human
ugucucagccuccugaguagcugg

SEQ ID NO: 1019401 - RNA, 22 nt, Human
uguuacccaggcuugucucgaa

SEQ ID NO: 1019402 - RNA, 20 nt, Human
uguugcccaggcuggagugc

SEQ ID NO: 1019403 - RNA, 20 nt, Human
uguuuuuguagacuugaaag

SEQ ID NO: 1019404 - RNA, 21 nt, Human
uguuuuuguagacuugaaagu

SEQ ID NO: 1019405 - RNA, 24 nt, Human
uuagaagaaauauauaucauuugu

SEQ ID NO: 1019406 - RNA, 18 nt, Human
uuaguagagaugggguuu

SEQ ID NO: 1019407 - RNA, 22 nt, Human
uuaguagagaugggguuucacc

SEQ ID NO: 1019408 - RNA, 24 nt, Human
uuaguagagaugggguuucaccau

SEQ ID NO: 1019409 - RNA, 21 nt, Human
uuauuguugcucucauuuaca

SEQ ID NO: 1019410 - RNA, 22 nt, Human
uucacuuaacccucacaacaac

SEQ ID NO: 1019411 - RNA, 24 nt, Human
uucgcucuuguugcccaggcugga

SEQ ID NO: 1019412 - RNA, 18 nt, Human
uugcccaggcuggagugc

SEQ ID NO: 1019413 - RNA, 24 nt, Human
uuucaccauguuggucaggcuggu

SEQ ID NO: 1019414 - RNA, 24 nt, Human
uuucgcucuuguugcccaggcugg

SEQ ID NO: 1019415 - RNA, 19 nt, Human
uuuuuguauuuuaguagag

SEQ ID NO: 1019416 - RNA, 27 nt, Human
aaaaaacaaagcaacgugagacaagca

SEQ ID NO: 1019417 - RNA, 21 nt, Human
aaacaaagcaacgugagacaa

SEQ ID NO: 1019418 - RNA, 24 nt, Human
aaacggcaagagccauaaauggca

SEQ ID NO: 1019419 - RNA, 24 nt, Human
aaauggcaggugagaaagucuaac

SEQ ID NO: 1019420 - RNA, 19 nt, Human
aagcugccaacaacacuca

SEQ ID NO: 1019421 - RNA, 22 nt, Human
aaguguaacacauaccuggaac

SEQ ID NO: 1019422 - RNA, 18 nt, Human
acaaagcaacgugagaca

SEQ ID NO: 1019423 - RNA, 21 nt, Human
agcaaauggggagaagcagag

SEQ ID NO: 1019424 - RNA, 21 nt, Human
aggcuggaaaaaaauccaugg

SEQ ID NO: 1019425 - RNA, 18 nt, Human
aggguuucuccgacacau

SEQ ID NO: 1019426 - RNA, 18 nt, Human
auguuagaaaguguaaca

SEQ ID NO: 1019427 - RNA, 22 nt, Human
caacgugagacaagcaguuccc

SEQ ID NO: 1019428 - RNA, 22 nt, Human
caagcaguucccaaguugguga

SEQ ID NO: 1019429 - RNA, 22 nt, Human
caagcugccaacaacacucaua

SEQ ID NO: 1019430 - RNA, 19 nt, Human
cacauggacuaugcaacuc

SEQ ID NO: 1019431 - RNA, 18 nt, Human
cacuguauauccuuagau

SEQ ID NO: 1019432 - RNA, 20 nt, Human
cacuguguggaccucacagg

SEQ ID NO: 1019433 - RNA, 20 nt, Human
caggugguagacaugauacg

SEQ ID NO: 1019434 - RNA, 21 nt, Human
caugaaaccaguaugucuuga

SEQ ID NO: 1019435 - RNA, 21 nt, Human
cccuaacuugucagagaggaa

SEQ ID NO: 1019436 - RNA, 21 nt, Human
cggcaagagccauaaauggca

SEQ ID NO: 1019437 - RNA, 22 nt, Human
cuagcaaauggggagaagcaga

SEQ ID NO: 1019438 - RNA, 23 nt, Human
cuagcaaauggggagaagcagag

SEQ ID NO: 1019439 - RNA, 24 nt, Human
cuagcaaauggggagaagcagagg

SEQ ID NO: 1019440 - RNA, 24 nt, Human
cucuguguaaacgaggcagugucc

SEQ ID NO: 1019441 - RNA, 21 nt, Human
cuugaaaaagacaguccuucu

SEQ ID NO: 1019442 - RNA, 18 nt, Human
ggaaaaaaauccauggag

SEQ ID NO: 1019443 - RNA, 22 nt, Human
ggagaagcagaggucugcuucc

SEQ ID NO: 1019444 - RNA, 19 nt, Human
ggcuucugccucagaaacu

SEQ ID NO: 1019445 - RNA, 22 nt, Human
uaaaugauacacacugugugga

SEQ ID NO: 1019446 - RNA, 25 nt, Human
uaacuugucagagaggaagacucag

SEQ ID NO: 1019447 - RNA, 21 nt, Human
uacacacuguguggaccucac

SEQ ID NO: 1019448 - RNA, 23 nt, Human
uacuccuucaguauaauuacacu

SEQ ID NO: 1019449 - RNA, 21 nt, Human
uccaugcccuaacuugucaga

SEQ ID NO: 1019450 - RNA, 22 nt, Human
uccgacacauggacuaugcaac

SEQ ID NO: 1019451 - RNA, 22 nt, Human
uccuuagauguuggggcuucca

SEQ ID NO: 1019452 - RNA, 19 nt, Human
ucucuggcacaaagcuggg

SEQ ID NO: 1019453 - RNA, 20 nt, Human
ucuugaaaaagacaguccuu

SEQ ID NO: 1019454 - RNA, 20 nt, Human
ugacauaaacggcaagagcc

SEQ ID NO: 1019455 - RNA, 22 nt, Human
ugauacggcuucugccucagaa

SEQ ID NO: 1019456 - RNA, 18 nt, Human
ugccucagaaacugucag

SEQ ID NO: 1019457 - RNA, 20 nt, Human
uggcaagcugccaacaacac

SEQ ID NO: 1019458 - RNA, 21 nt, Human
uguaaaaaacaaagcaacgug

SEQ ID NO: 1019459 - RNA, 19 nt, Human
uuccuugagcagguucagg

SEQ ID NO: 1019460 - RNA, 18 nt, Human
aaaacaagaaaaaaugga

SEQ ID NO: 1019461 - RNA, 19 nt, Human
aaaacaagaaaaaauggag

SEQ ID NO: 1019462 - RNA, 27 nt, Human
aaacaagaaaaaauggaggggggaccc

SEQ ID NO: 1019463 - RNA, 22 nt, Human
aaacagacgccaucauucucca

SEQ ID NO: 1019464 - RNA, 19 nt, Human
aaacagcaaacuuggcagc

SEQ ID NO: 1019465 - RNA, 18 nt, Human
aaacuuggcagcaggaug

SEQ ID NO: 1019466 - RNA, 20 nt, Human
aagaaacagcaaacuuggca

SEQ ID NO: 1019467 - RNA, 23 nt, Human
aagcaaccgcaaaucauccaagg

SEQ ID NO: 1019468 - RNA, 18 nt, Human
aagcauuggcaugaauga

SEQ ID NO: 1019469 - RNA, 25 nt, Human
aaggugaacaaccuuaaguaacaaa

SEQ ID NO: 1019470 - RNA, 18 nt, Human
aagguuauucagagcagg

SEQ ID NO: 1019471 - RNA, 24 nt, Human
acaaacucaaauaaccacugguac

SEQ ID NO: 1019472 - RNA, 22 nt, Human
acaccgcaagucccagaccaca

SEQ ID NO: 1019473 - RNA, 19 nt, Human
accccagagcccacuccca

SEQ ID NO: 1019474 - RNA, 23 nt, Human
accccagagcccacucccauccc

SEQ ID NO: 1019475 - RNA, 18 nt, Human
accccuauggcccgacuc

SEQ ID NO: 1019476 - RNA, 20 nt, Human
accgcaagucccagaccacg

SEQ ID NO: 1019477 - RNA, 18 nt, Human
accugaaggugccaagaa

SEQ ID NO: 1019478 - RNA, 21 nt, Human
agaacgccaaccccagcccac

SEQ ID NO: 1019479 - RNA, 23 nt, Human
agaacgccaaccccagcccacaa

SEQ ID NO: 1019480 - RNA, 23 nt, Human
agaacucuuccaggcagcugcuc

SEQ ID NO: 1019481 - RNA, 28 nt, Human
agagcccacucccauccccccagacagc

SEQ ID NO: 1019482 - RNA, 24 nt, Human
agagccccauuaacaacucccucc

SEQ ID NO: 1019483 - RNA, 21 nt, Human
agagcuccuucugccaauccu

SEQ ID NO: 1019484 - RNA, 18 nt, Human
agcaggaugaagaccugg

SEQ ID NO: 1019485 - RNA, 21 nt, Human
agcccacucccauccccccag

SEQ ID NO: 1019486 - RNA, 19 nt, Human
aggaggaggugggaagagg

SEQ ID NO: 1019487 - RNA, 26 nt, Human
aggaggaggugggaagagggggaccc

SEQ ID NO: 1019488 - RNA, 22 nt, Human
aggcaaucacaaacaacugccc

SEQ ID NO: 1019489 - RNA, 24 nt, Human
aggcugcagaacauagccaggagg

SEQ ID NO: 1019490 - RNA, 18 nt, Human
aggugccaagaaacagca

SEQ ID NO: 1019491 - RNA, 22 nt, Human
aggugccaagaaacagcaaacu

SEQ ID NO: 1019492 - RNA, 24 nt, Human
augccaccccccuccaucccccag

SEQ ID NO: 1019493 - RNA, 22 nt, Human
caacacuccugagacaagccau

SEQ ID NO: 1019494 - RNA, 24 nt, Human
caacucuuaaaauguaaaaaacaa

SEQ ID NO: 1019495 - RNA, 22 nt, Human
caaggaccuucagagagaccag

SEQ ID NO: 1019496 - RNA, 22 nt, Human
caagucccagaccacagccaua

SEQ ID NO: 1019497 - RNA, 18 nt, Human
cacauaugaccccagagc

SEQ ID NO: 1019498 - RNA, 19 nt, Human
cacauaugaccccagagcc

SEQ ID NO: 1019499 - RNA, 22 nt, Human
cacccagcaucucuguacccaa

SEQ ID NO: 1019500 - RNA, 20 nt, Human
caccccccuccaucccccag

SEQ ID NO: 1019501 - RNA, 23 nt, Human
caccgcaagucccagaccacagc

SEQ ID NO: 1019502 - RNA, 20 nt, Human
caccguguccccugcucucc

SEQ ID NO: 1019503 - RNA, 24 nt, Human
cagaacgccaaccccagcccacaa

SEQ ID NO: 1019504 - RNA, 21 nt, Human
cagagcccacucccauccccc

SEQ ID NO: 1019505 - RNA, 22 nt, Human
cagagcccacucccaucccccc

SEQ ID NO: 1019506 - RNA, 25 nt, Human
cagagcccacucccauccccccaga

SEQ ID NO: 1019507 - RNA, 21 nt, Human
cagauucucccauuccugcuc

SEQ ID NO: 1019508 - RNA, 22 nt, Human
ccaacuccgcuucucccucugu

SEQ ID NO: 1019509 - RNA, 22 nt, Human
ccacaggguuuucaggacagcc

SEQ ID NO: 1019510 - RNA, 21 nt, Human
ccacucccauccccccagaca

SEQ ID NO: 1019511 - RNA, 19 nt, Human
cccacucccauccccccag

SEQ ID NO: 1019512 - RNA, 20 nt, Human
cccagagcccacucccaucc

SEQ ID NO: 1019513 - RNA, 23 nt, Human
cccauuaacaacucccuccuaga

SEQ ID NO: 1019514 - RNA, 21 nt, Human
ccccagacagcagcggggcac

SEQ ID NO: 1019515 - RNA, 20 nt, Human
ccccagagcccacucccauc

SEQ ID NO: 1019516 - RNA, 24 nt, Human
ccccagagcccacucccauccccc

SEQ ID NO: 1019517 - RNA, 25 nt, Human
ccccagagcccacucccaucccccc

SEQ ID NO: 1019518 - RNA, 24 nt, Human
ccccauuaacaacucccuccuaga

SEQ ID NO: 1019519 - RNA, 21 nt, Human
ccccuauggcccgacucaacc

SEQ ID NO: 1019520 - RNA, 20 nt, Human
cccugcucuccggccuaagu

SEQ ID NO: 1019521 - RNA, 20 nt, Human
ccucuugguccuuuugagac

SEQ ID NO: 1019522 - RNA, 19 nt, Human
ccuucugccaauccuccag

SEQ ID NO: 1019523 - RNA, 24 nt, Human
cucuguacccaacuccgcuucucc

SEQ ID NO: 1019524 - RNA, 20 nt, Human
gaaccagccaccagucccug

SEQ ID NO: 1019525 - RNA, 22 nt, Human
gaacgccaaccccagcccacaa

SEQ ID NO: 1019526 - RNA, 22 nt, Human
gacagcagcggggcacacauuc

SEQ ID NO: 1019527 - RNA, 20 nt, Human
gagacaagccaucugugugc

SEQ ID NO: 1019528 - RNA, 24 nt, Human
gcaccacaggaccuuccucuucca

SEQ ID NO: 1019529 - RNA, 25 nt, Human
gcagcggggcacacauucaacaccg

SEQ ID NO: 1019530 - RNA, 22 nt, Human
gccaauccuccagauucuccca

SEQ ID NO: 1019531 - RNA, 23 nt, Human
gcccacucccauccccccagaca

SEQ ID NO: 1019532 - RNA, 24 nt, Human
gcccuggaaccagccaccaguccc

SEQ ID NO: 1019533 - RNA, 20 nt, Human
gccuuugggcuuggcuuggu

SEQ ID NO: 1019534 - RNA, 24 nt, Human
ggaggaggugggaagaggagaggg

SEQ ID NO: 1019535 - RNA, 23 nt, Human
ggaggugggaagaggagaggggu

SEQ ID NO: 1019536 - RNA, 19 nt, Human
ggcacacauucaacacucc

SEQ ID NO: 1019537 - RNA, 24 nt, Human
gggaaccuagcaccguguccccug

SEQ ID NO: 1019538 - RNA, 20 nt, Human
ggugccaagaaacagcaaac

SEQ ID NO: 1019539 - RNA, 19 nt, Human
gucccugacugcagugucu

SEQ ID NO: 1019540 - RNA, 18 nt, Human
guuauacuucccagaacu

SEQ ID NO: 1019541 - RNA, 22 nt, Human
uaaaacaagaaaaaauggaggg

SEQ ID NO: 1019542 - RNA, 23 nt, Human
uaaguaagcaucagugggcuaaa

SEQ ID NO: 1019543 - RNA, 20 nt, Human
uaauuccaaaaaagguuauu

SEQ ID NO: 1019544 - RNA, 21 nt, Human
uauucagagcagggcuaagca

SEQ ID NO: 1019545 - RNA, 22 nt, Human
ucagaacgccaaccccagccca

SEQ ID NO: 1019546 - RNA, 18 nt, Human
ucaggaagaacucagucc

SEQ ID NO: 1019547 - RNA, 19 nt, Human
ucccagaacucuuccaggc

SEQ ID NO: 1019548 - RNA, 20 nt, Human
ucccuguggggucagaacgc

SEQ ID NO: 1019549 - RNA, 23 nt, Human
ucccuguggggucagaacgccaa

SEQ ID NO: 1019550 - RNA, 26 nt, Human
ugaaacagacgccaucauucuccagg

SEQ ID NO: 1019551 - RNA, 20 nt, Human
ugaccccagagcccacuccc

SEQ ID NO: 1019552 - RNA, 19 nt, Human
ugagaaaaccagagaccug

SEQ ID NO: 1019553 - RNA, 23 nt, Human
ugagaaaaccagagaccugaagg

SEQ ID NO: 1019554 - RNA, 26 nt, Human
ugccaccccccuccaucccccagacg

SEQ ID NO: 1019555 - RNA, 21 nt, Human
uggcaugaaugagaaaaccag

SEQ ID NO: 1019556 - RNA, 22 nt, Human
uggcaugaaugagaaaaccaga

SEQ ID NO: 1019557 - RNA, 24 nt, Human
uggcaugaaugagaaaaccagaga

SEQ ID NO: 1019558 - RNA, 19 nt, Human
uggccuggacucuucuucc

SEQ ID NO: 1019559 - RNA, 19 nt, Human
ugggaagaggagaggggua

SEQ ID NO: 1019560 - RNA, 25 nt, Human
ugggugggcaccacaggaccuuccu

SEQ ID NO: 1019561 - RNA, 21 nt, Human
uuauucagagcagggcuaagc

SEQ ID NO: 1019562 - RNA, 20 nt, Human
uucacauaugaccccagagc

SEQ ID NO: 1019563 - RNA, 22 nt, Human
uucacuggaaucuuucuucuca

SEQ ID NO: 1019564 - RNA, 21 nt, Human
uugguacugggacaagggaag

SEQ ID NO: 1019565 - RNA, 18 nt, Human
aagcaggaugugccgugg

SEQ ID NO: 1019566 - RNA, 23 nt, Human
aagcaggaugugccguggcuggg

SEQ ID NO: 1019567 - RNA, 18 nt, Human
aagcuggcagagcggcgc

SEQ ID NO: 1019568 - RNA, 23 nt, Human
acaaagcaggaugugccguggcu

SEQ ID NO: 1019569 - RNA, 25 nt, Human
acagcccgggagguggccacagaug

SEQ ID NO: 1019570 - RNA, 22 nt, Human
acccauggacccaccccacagg

SEQ ID NO: 1019571 - RNA, 24 nt, Human
accgcagccucgcccgcggggcga

SEQ ID NO: 1019572 - RNA, 23 nt, Human
agaccugaguccuugccacccug

SEQ ID NO: 1019573 - RNA, 20 nt, Human
agcagcccccuggggggcca

SEQ ID NO: 1019574 - RNA, 23 nt, Human
agcccgggagguggccacagaug

SEQ ID NO: 1019575 - RNA, 20 nt, Human
aggaaaagauggcagccagg

SEQ ID NO: 1019576 - RNA, 24 nt, Human
aggcacagguugguagggcagagg

SEQ ID NO: 1019577 - RNA, 23 nt, Human
aggcgcccuguucuuggucucca

SEQ ID NO: 1019578 - RNA, 23 nt, Human
aggcgggaaggcgagccagccgg

SEQ ID NO: 1019579 - RNA, 22 nt, Human
agggagccaguaccgguggagc

SEQ ID NO: 1019580 - RNA, 23 nt, Human
agguggccacagauggaaggaga

SEQ ID NO: 1019581 - RNA, 18 nt, Human
agugccgauggagcaggg

SEQ ID NO: 1019582 - RNA, 18 nt, Human
agugccgauggagcaggg

SEQ ID NO: 1019583 - RNA, 20 nt, Human
agugccgcuggaguuggggc

SEQ ID NO: 1019584 - RNA, 21 nt, Human
caccagugccgauggagcagg

SEQ ID NO: 1019585 - RNA, 26 nt, Human
cagaaagccccugccgccgugacuaa

SEQ ID NO: 1019586 - RNA, 22 nt, Human
cagaggccugacccauggaccc

SEQ ID NO: 1019587 - RNA, 23 nt, Human
cagcagcccccuggggggccaag

SEQ ID NO: 1019588 - RNA, 21 nt, Human
cagcccgggagguggccacag

SEQ ID NO: 1019589 - RNA, 27 nt, Human
caggcgcccuguucuuggucuccaggg

SEQ ID NO: 1019590 - RNA, 21 nt, Human
cagggugggggccaaagagcc

SEQ ID NO: 1019591 - RNA, 19 nt, Human
ccacacagucaaaugaggc

SEQ ID NO: 1019592 - RNA, 20 nt, Human
ccagugccgauggagcaggg

SEQ ID NO: 1019593 - RNA, 27 nt, Human
ccagugccgauggagcagggugccggg

SEQ ID NO: 1019594 - RNA, 19 nt, Human
ccagugccguuggagcugg

SEQ ID NO: 1019595 - RNA, 24 nt, Human
cccccggguuuccggccaagccag

SEQ ID NO: 1019596 - RNA, 24 nt, Human
cccccggguuuccggccccgaccc

SEQ ID NO: 1019597 - RNA, 24 nt, Human
ccccuggggggccaaggccagucc

SEQ ID NO: 1019598 - RNA, 19 nt, Human
cccugugguagcugggcug

SEQ ID NO: 1019599 - RNA, 22 nt, Human
ccgguggagcugggcguuggug

SEQ ID NO: 1019600 - RNA, 23 nt, Human
ccugacccauggacccaccccac

SEQ ID NO: 1019601 - RNA, 20 nt, Human
ccugaggcucaggguugguc

SEQ ID NO: 1019602 - RNA, 30 nt, Human
cgcggucccacaggugugggcugucucucu

SEQ ID NO: 1019603 - RNA, 20 nt, Human
cgcuggagccaccauuaucc

SEQ ID NO: 1019604 - RNA, 22 nt, Human
cggagcccggugcuugauguug

SEQ ID NO: 1019605 - RNA, 25 nt, Human
cggagcccggugcuugauguuggag

SEQ ID NO: 1019606 - RNA, 19 nt, Human
cggcaggcgggaaggcgag

SEQ ID NO: 1019607 - RNA, 21 nt, Human
cuagcagugcgcgcgcccucc

SEQ ID NO: 1019608 - RNA, 18 nt, Human
cuccaggguuggccuccu

SEQ ID NO: 1019609 - RNA, 21 nt, Human
gaaaagauggcagccaggcgc

SEQ ID NO: 1019610 - RNA, 24 nt, Human
gaaagccccugccgccgugacuaa

SEQ ID NO: 1019611 - RNA, 18 nt, Human
gacccauggacccacccc

SEQ ID NO: 1019612 - RNA, 22 nt, Human
gagccaguaccgguggagcugg

SEQ ID NO: 1019613 - RNA, 21 nt, Human
gagcggcgcgggggaccagca

SEQ ID NO: 1019614 - RNA, 21 nt, Human
gaggcucgggggcuucuggga

SEQ ID NO: 1019615 - RNA, 20 nt, Human
gcaaaggcaggccgaguccg

SEQ ID NO: 1019616 - RNA, 19 nt, Human
gccccgcgcuguccaccgc

SEQ ID NO: 1019617 - RNA, 20 nt, Human
gcccgcggggcgagcggcga

SEQ ID NO: 1019618 - RNA, 20 nt, Human
gccggagccccgcgcugucc

SEQ ID NO: 1019619 - RNA, 18 nt, Human
gccuccugucgcuggagc

SEQ ID NO: 1019620 - RNA, 22 nt, Human
gccuggaaacgggagugggagg

SEQ ID NO: 1019621 - RNA, 19 nt, Human
ggagcagggcguuagugcu

SEQ ID NO: 1019622 - RNA, 19 nt, Human
ggagcagggugguagugcc

SEQ ID NO: 1019623 - RNA, 22 nt, Human
ggaguggggcgccgaguggggc

SEQ ID NO: 1019624 - RNA, 21 nt, Human
ggcacagguugguagggcaga

SEQ ID NO: 1019625 - RNA, 21 nt, Human
ggccgagggcaaaggcaggcc

SEQ ID NO: 1019626 - RNA, 19 nt, Human
ggccugaggcucaggguug

SEQ ID NO: 1019627 - RNA, 19 nt, Human
ggcugggccucccccgggu

SEQ ID NO: 1019628 - RNA, 18 nt, Human
gggcgggaggggaaggcu

SEQ ID NO: 1019629 - RNA, 22 nt, Human
gguagugccgauggagccggac

SEQ ID NO: 1019630 - RNA, 21 nt, Human
guggccacagauggaaggaga

SEQ ID NO: 1019631 - RNA, 24 nt, Human
uacccuggggucccucggacagcc

SEQ ID NO: 1019632 - RNA, 20 nt, Human
uaggccgagggcaaaggcag

SEQ ID NO: 1019633 - RNA, 21 nt, Human
ucccaaaguccagcagccccc

SEQ ID NO: 1019634 - RNA, 25 nt, Human
ucccacaggugugggcugucucucc

SEQ ID NO: 1019635 - RNA, 19 nt, Human
ucccggccacucggagccc

SEQ ID NO: 1019636 - RNA, 19 nt, Human
uccguucccuuugagcgcu

SEQ ID NO: 1019637 - RNA, 25 nt, Human
uccuccacgcccacugaaaggcaca

SEQ ID NO: 1019638 - RNA, 18 nt, Human
ucuccaggguuggccucc

SEQ ID NO: 1019639 - RNA, 19 nt, Human
ugacccauggacccacccc

SEQ ID NO: 1019640 - RNA, 24 nt, Human
ugacuaagacccgcggucccacag

SEQ ID NO: 1019641 - RNA, 19 nt, Human
ugaugauggagcagggugg

SEQ ID NO: 1019642 - RNA, 22 nt, Human
ugauggaguggggcgccgagug

SEQ ID NO: 1019643 - RNA, 23 nt, Human
ugccaggaauguguuggggcucc

SEQ ID NO: 1019644 - RNA, 23 nt, Human
uggaauggggcaccagugccguu

SEQ ID NO: 1019645 - RNA, 24 nt, Human
uggagccaccauuauccucaccag

SEQ ID NO: 1019646 - RNA, 23 nt, Human
uggagcggggugguagugccgau

SEQ ID NO: 1019647 - RNA, 23 nt, Human
uggagugggacaccagugccgau

SEQ ID NO: 1019648 - RNA, 20 nt, Human
uggaguggggcaccaauguc

SEQ ID NO: 1019649 - RNA, 19 nt, Human
uggcagagcggcgcggggg

SEQ ID NO: 1019650 - RNA, 19 nt, Human
uggcugggccucccccggg

SEQ ID NO: 1019651 - RNA, 25 nt, Human
ugggccccagaaccuguacuuucag

SEQ ID NO: 1019652 - RNA, 20 nt, Human
ugguagugccgauggagccg

SEQ ID NO: 1019653 - RNA, 19 nt, Human
uuagugccgauggaauggg

SEQ ID NO: 1019654 - RNA, 20 nt, Human
uuagugccgauggagcaggg

SEQ ID NO: 1019655 - RNA, 20 nt, Human
uuagugccgauggagcaggg

SEQ ID NO: 1019656 - RNA, 19 nt, Human
uuagugccgauggagcggg

SEQ ID NO: 1019657 - RNA, 23 nt, Human
uuagugccgcuggaguuggggcg

SEQ ID NO: 1019658 - RNA, 19 nt, Human
uuagugcugauggaguggg

SEQ ID NO: 1019659 - RNA, 19 nt, Human
uuagugcugauggaguggg

SEQ ID NO: 1019660 - RNA, 19 nt, Human
aaaaauaaaauaaaccaaa

SEQ ID NO: 1019661 - RNA, 20 nt, Human
aaaaaugugcaucuuaugcc

SEQ ID NO: 1019662 - RNA, 24 nt, Human
aaacccacaacaaaaugaacccaa

SEQ ID NO: 1019663 - RNA, 24 nt, Human
aaaguuguaagaacucaagaauau

SEQ ID NO: 1019664 - RNA, 27 nt, Human
aaauagcuacgaaacucacaccgugau

SEQ ID NO: 1019665 - RNA, 27 nt, Human
aacccacaacaaaaugaacccaaaaaa

SEQ ID NO: 1019666 - RNA, 27 nt, Human
aacccuugagauguauauaacauuuaa

SEQ ID NO: 1019667 - RNA, 24 nt, Human
aagagaagaucagguuuucuaaaa

SEQ ID NO: 1019668 - RNA, 18 nt, Human
aagagguuaaucuccucu

SEQ ID NO: 1019669 - RNA, 25 nt, Human
aagcaucaagacccucaguuagcau

SEQ ID NO: 1019670 - RNA, 22 nt, Human
aaguaggaaaugaaagguuggg

SEQ ID NO: 1019671 - RNA, 18 nt, Human
aaguuuuacaccauggaa

SEQ ID NO: 1019672 - RNA, 20 nt, Human
acaaaacagaaugccacccc

SEQ ID NO: 1019673 - RNA, 28 nt, Human
acaacaaaaugaacccaaaaaaaagaga

SEQ ID NO: 1019674 - RNA, 20 nt, Human
acacacaucugcgccaucuc

SEQ ID NO: 1019675 - RNA, 19 nt, Human
acaccauggaaaacaagau

SEQ ID NO: 1019676 - RNA, 18 nt, Human
acuagaaacaagaggcug

SEQ ID NO: 1019677 - RNA, 18 nt, Human
acucacaggagaggugcu

SEQ ID NO: 1019678 - RNA, 19 nt, Human
agaaagaaccuaagaggca

SEQ ID NO: 1019679 - RNA, 22 nt, Human
agagaaaagagaauggaguugg

SEQ ID NO: 1019680 - RNA, 20 nt, Human
agcaaguaauaggaagagaa

SEQ ID NO: 1019681 - RNA, 22 nt, Human
agcauuuuccugccucacuuua

SEQ ID NO: 1019682 - RNA, 23 nt, Human
aggaaaugaaagguuggguuugg

SEQ ID NO: 1019683 - RNA, 25 nt, Human
agguuaaucuccucuuuuugauugu

SEQ ID NO: 1019684 - RNA, 24 nt, Human
aguaaggcucuuuuuaauuaugaa

SEQ ID NO: 1019685 - RNA, 22 nt, Human
agucaaaggcucaagcaucaag

SEQ ID NO: 1019686 - RNA, 24 nt, Human
aucaagacccucaguuagcauuuc

SEQ ID NO: 1019687 - RNA, 21 nt, Human
aucacuaaaauguacagucau

SEQ ID NO: 1019688 - RNA, 24 nt, Human
auccugaugcugaguaaguuuuac

SEQ ID NO: 1019689 - RNA, 27 nt, Human
caaaacccacaacaaaaugaacccaaa

SEQ ID NO: 1019690 - RNA, 20 nt, Human
caacauaaaauaaacuguuu

SEQ ID NO: 1019691 - RNA, 21 nt, Human
caagauugugaagaaaaccaa

SEQ ID NO: 1019692 - RNA, 23 nt, Human
cacaaaacagaaugccaccccaa

SEQ ID NO: 1019693 - RNA, 20 nt, Human
cacaaauucuguccaugugg

SEQ ID NO: 1019694 - RNA, 24 nt, Human
cacaacaaaaugaacccaaaaaaa

SEQ ID NO: 1019695 - RNA, 22 nt, Human
caccaggugguaaaaaaacaag

SEQ ID NO: 1019696 - RNA, 20 nt, Human
cauuagccacucacaggaga

SEQ ID NO: 1019697 - RNA, 23 nt, Human
cauucccggcuccagagcagaaa

SEQ ID NO: 1019698 - RNA, 23 nt, Human
ccaugugguauguaaagaaagua

SEQ ID NO: 1019699 - RNA, 23 nt, Human
cccacaacaaaaugaacccaaaa

SEQ ID NO: 1019700 - RNA, 26 nt, Human
cccacaacaaaaugaacccaaaaagg

SEQ ID NO: 1019701 - RNA, 19 nt, Human
ccccaauuguacuauagaa

SEQ ID NO: 1019702 - RNA, 26 nt, Human
cccggggccccgggccggaccgcgga

SEQ ID NO: 1019703 - RNA, 22 nt, Human
cgaaacucacaccgugaucucc

SEQ ID NO: 1019704 - RNA, 18 nt, Human
cggggccccgggccggac

SEQ ID NO: 1019705 - RNA, 20 nt, Human
gaagagaaugggcaaacugg

SEQ ID NO: 1019706 - RNA, 19 nt, Human
gagaucccggggccccggg

SEQ ID NO: 1019707 - RNA, 27 nt, Human
gcaaacagugaggggaaaccgguaccc

SEQ ID NO: 1019708 - RNA, 20 nt, Human
ggaaagggucugguuaaccc

SEQ ID NO: 1019709 - RNA, 19 nt, Human
ggagcuuggguuguucucc

SEQ ID NO: 1019710 - RNA, 24 nt, Human
gucuccccuaagugccuccugcug

SEQ ID NO: 1019711 - RNA, 22 nt, Human
gugaagaaaaccaaaacccaca

SEQ ID NO: 1019712 - RNA, 20 nt, Human
uaaagaaacauucuugggga

SEQ ID NO: 1019713 - RNA, 22 nt, Human
uaauauuaacaauaauaauaag

SEQ ID NO: 1019714 - RNA, 21 nt, Human
uagcaccacacaugggucucg

SEQ ID NO: 1019715 - RNA, 25 nt, Human
uauuccuccaaaggcuggauuugga

SEQ ID NO: 1019716 - RNA, 21 nt, Human
uauuuuaaaaaagaagaaaaa

SEQ ID NO: 1019717 - RNA, 20 nt, Human
ucaaaguacauacuagaaac

SEQ ID NO: 1019718 - RNA, 22 nt, Human
ucaaaguacauacuagaaacaa

SEQ ID NO: 1019719 - RNA, 25 nt, Human
uccaacuucccaaugaauuucucaa

SEQ ID NO: 1019720 - RNA, 23 nt, Human
uccagagcagaaaaaugugcauc

SEQ ID NO: 1019721 - RNA, 18 nt, Human
uccccauccccaaaucca

SEQ ID NO: 1019722 - RNA, 20 nt, Human
ucucggaggcugggaaccag

SEQ ID NO: 1019723 - RNA, 23 nt, Human
ucucgucauaaaguuguaagaac

SEQ ID NO: 1019724 - RNA, 26 nt, Human
ugaacccaaaaaaaagagaagaucag

SEQ ID NO: 1019725 - RNA, 19 nt, Human
ugaagaaaaccaaaaccca

SEQ ID NO: 1019726 - RNA, 20 nt, Human
ugcacgagagaaaagagaau

SEQ ID NO: 1019727 - RNA, 22 nt, Human
ugcauguuuccccauccccaaa

SEQ ID NO: 1019728 - RNA, 24 nt, Human
ugcgccaucucuuccaacauaaaa

SEQ ID NO: 1019729 - RNA, 19 nt, Human
uggaaugaaguaggaaaug

SEQ ID NO: 1019730 - RNA, 20 nt, Human
uggggaaggguuucaagagg

SEQ ID NO: 1019731 - RNA, 27 nt, Human
uguaaaauguucaagauugugaagaaa

SEQ ID NO: 1019732 - RNA, 21 nt, Human
ugugaagaaaaccaaaaccca

SEQ ID NO: 1019733 - RNA, 18 nt, Human
ugugugaggaguggaggg

SEQ ID NO: 1019734 - RNA, 20 nt, Human
ugugugugugaggaguggag

SEQ ID NO: 1019735 - RNA, 22 nt, Human
uucaaugaaguccgucuauaaa

SEQ ID NO: 1019736 - RNA, 19 nt, Human
uucaaugguuugucaguua

SEQ ID NO: 1019737 - RNA, 20 nt, Human
uucacaaaacagaaugccac

SEQ ID NO: 1019738 - RNA, 21 nt, Human
uucacaaaacagaaugccacc

SEQ ID NO: 1019739 - RNA, 19 nt, Human
uucaccaggugguaaaaaa

SEQ ID NO: 1019740 - RNA, 24 nt, Human
uucaccaggugguaaaaaaacaag

SEQ ID NO: 1019741 - RNA, 21 nt, Human
uucuuggggaaggguuucaag

SEQ ID NO: 1019742 - RNA, 21 nt, Human
uuggggaaggguuucaagagg

SEQ ID NO: 1019743 - RNA, 20 nt, Human
uuuaagaaagaaccuaagag

SEQ ID NO: 1019744 - RNA, 22 nt, Human
uuugaaaugucuuccaacuucc

SEQ ID NO: 1019745 - RNA, 27 nt, Human
aaaaaaaaaaaagauaugaucuaugua

SEQ ID NO: 1019746 - RNA, 24 nt, Human
aaagagugagacucugucucaaaa

SEQ ID NO: 1019747 - RNA, 22 nt, Human
aaagcucuucccacaguucucu

SEQ ID NO: 1019748 - RNA, 18 nt, Human
aacacggugaaaccccgu

SEQ ID NO: 1019749 - RNA, 19 nt, Human
aacacggugaaaccccguu

SEQ ID NO: 1019750 - RNA, 21 nt, Human
aacacggugaaaccccguuuu

SEQ ID NO: 1019751 - RNA, 23 nt, Human
aacacggugaaaccccguuuuua

SEQ ID NO: 1019752 - RNA, 24 nt, Human
aauggcgugaacuugggaggcgga

SEQ ID NO: 1019753 - RNA, 21 nt, Human
aauuguaggcuguuugaagca

SEQ ID NO: 1019754 - RNA, 24 nt, Human
accccguuuuuacuaaaaauacaa

SEQ ID NO: 1019755 - RNA, 18 nt, Human
acugcagucaggcuuggg

SEQ ID NO: 1019756 - RNA, 21 nt, Human
aggcaggagaauggcgugaac

SEQ ID NO: 1019757 - RNA, 21 nt, Human
aggcaggagaauggcgugaac

SEQ ID NO: 1019758 - RNA, 24 nt, Human
aggcaggagaauggcgugaacuug

SEQ ID NO: 1019759 - RNA, 24 nt, Human
aggcggagcuugcagcgagcugag

SEQ ID NO: 1019760 - RNA, 18 nt, Human
aggcugaggcaggagaau

SEQ ID NO: 1019761 - RNA, 24 nt, Human
auguacaaagcucuucccacaguu

SEQ ID NO: 1019762 - RNA, 22 nt, Human
caaagcccuucccacacuucuc

SEQ ID NO: 1019763 - RNA, 23 nt, Human
caccuguagucccaguuacucgg

SEQ ID NO: 1019764 - RNA, 24 nt, Human
caccuguagucccaguuacucggg

SEQ ID NO: 1019765 - RNA, 24 nt, Human
cacugcagucaggcuugggugaaa

SEQ ID NO: 1019766 - RNA, 20 nt, Human
cagaaaucccuuugcuuucc

SEQ ID NO: 1019767 - RNA, 22 nt, Human
cagguacccuaaguuaucacuc

SEQ ID NO: 1019768 - RNA, 24 nt, Human
caguuacucgggaggcugaggcag

SEQ ID NO: 1019769 - RNA, 18 nt, Human
cccagccaaagcccuucc

SEQ ID NO: 1019770 - RNA, 22 nt, Human
cccagccaaagcccuucccaca

SEQ ID NO: 1019771 - RNA, 19 nt, Human
ccgcagccguagcucccgc

SEQ ID NO: 1019772 - RNA, 23 nt, Human
ccuggcuaacacggugaaacccc

SEQ ID NO: 1019773 - RNA, 24 nt, Human
ccuggcuaacacggugaaaccccg

SEQ ID NO: 1019774 - RNA, 21 nt, Human
ccuguagucccaguuacucgg

SEQ ID NO: 1019775 - RNA, 23 nt, Human
cgacggugcuuccuuuccucuaa

SEQ ID NO: 1019776 - RNA, 24 nt, Human
cgagaccauccuggcuaacacggu

SEQ ID NO: 1019777 - RNA, 18 nt, Human
cgccacugcagucaggcu

SEQ ID NO: 1019778 - RNA, 19 nt, Human
cgggcaccuguagucccag

SEQ ID NO: 1019779 - RNA, 19 nt, Human
cucugucucaaaaaaaaaa

SEQ ID NO: 1019780 - RNA, 18 nt, Human
cuggcuaacacggugaaa

SEQ ID NO: 1019781 - RNA, 24 nt, Human
gaaagagugagacucugucucaaa

SEQ ID NO: 1019782 - RNA, 20 nt, Human
gagacgcagaacagcucaaa

SEQ ID NO: 1019783 - RNA, 24 nt, Human
gccacugcagucaggcuuggguga

SEQ ID NO: 1019784 - RNA, 24 nt, Human
gcuaacacggugaaaccccguuuu

SEQ ID NO: 1019785 - RNA, 22 nt, Human
gcugaggcaggagaauggcgug

SEQ ID NO: 1019786 - RNA, 23 nt, Human
gcuugggugaaagagugagacuc

SEQ ID NO: 1019787 - RNA, 21 nt, Human
ggcgggcaccuguagucccag

SEQ ID NO: 1019788 - RNA, 24 nt, Human
gggugugguggcgggcaccuguag

SEQ ID NO: 1019789 - RNA, 24 nt, Human
gguggcgggcaccuguagucccag

SEQ ID NO: 1019790 - RNA, 21 nt, Human
gucucaaaaaaaaaaaaaaag

SEQ ID NO: 1019791 - RNA, 24 nt, Human
gugaaagagugagacucugucuca

SEQ ID NO: 1019792 - RNA, 18 nt, Human
uaacacggugaaaccccg

SEQ ID NO: 1019793 - RNA, 19 nt, Human
uaacacggugaaaccccgu

SEQ ID NO: 1019794 - RNA, 19 nt, Human
uaacacggugaaaccccgu

SEQ ID NO: 1019795 - RNA, 23 nt, Human
uaacucccgcagccguagcuccc

SEQ ID NO: 1019796 - RNA, 18 nt, Human
uacuaaaaauacaaaaaa

SEQ ID NO: 1019797 - RNA, 24 nt, Human
uaucacagaauaaaggguaacucc

SEQ ID NO: 1019798 - RNA, 24 nt, Human
uaugaucuauguacaaagcucuuc

SEQ ID NO: 1019799 - RNA, 23 nt, Human
uauguacaaagcucuucccacag

SEQ ID NO: 1019800 - RNA, 20 nt, Human
ucaaaaaaaaaaaaaaagau

SEQ ID NO: 1019801 - RNA, 24 nt, Human
ucaggcuugggugaaagagugaga

SEQ ID NO: 1019802 - RNA, 23 nt, Human
ucugucucaaaaaaaaaaaaaaa

SEQ ID NO: 1019803 - RNA, 23 nt, Human
ugaggcaggagaauggcgugaac

SEQ ID NO: 1019804 - RNA, 23 nt, Human
ugaggcaggagaauggcgugaac

SEQ ID NO: 1019805 - RNA, 23 nt, Human
ugccagguacccuaaguuaucac

SEQ ID NO: 1019806 - RNA, 20 nt, Human
ugggucagaugaguugaggc

SEQ ID NO: 1019807 - RNA, 21 nt, Human
ugggugaaagagugagacucu

SEQ ID NO: 1019808 - RNA, 24 nt, Human
ugguggcgggcaccuguaguccca

SEQ ID NO: 1019809 - RNA, 18 nt, Human
uuagcugggugugguggc

SEQ ID NO: 1019810 - RNA, 24 nt, Human
uuagcugggugugguggcgggcac

SEQ ID NO: 1019811 - RNA, 24 nt, Human
uucagaagggccugcgagacgcag

SEQ ID NO: 1019812 - RNA, 19 nt, Human
uugaagcagugaggcagcc

SEQ ID NO: 1019813 - RNA, 19 nt, Human
uugcagcgagcugagauag

SEQ ID NO: 1019814 - RNA, 22 nt, Human
uugcagcgagcugagauagcgc

SEQ ID NO: 1019815 - RNA, 25 nt, Human
aucauugggugguugcgagccccaa

SEQ ID NO: 1019816 - RNA, 24 nt, Human
caagaagucccuucccugcagcuc

SEQ ID NO: 1019817 - RNA, 19 nt, Human
cacuccauaaauauguaua

SEQ ID NO: 1019818 - RNA, 18 nt, Human
ccaagaagucccuucccu

SEQ ID NO: 1019819 - RNA, 19 nt, Human
cugcagcucuuuuagaaag

SEQ ID NO: 1019820 - RNA, 20 nt, Human
gcccaggcuucuuuucuccu

SEQ ID NO: 1019821 - RNA, 21 nt, Human
gcccaggcuucuuuucuccug

SEQ ID NO: 1019822 - RNA, 21 nt, Human
ggaaggacucgcaagaugugg

SEQ ID NO: 1019823 - RNA, 20 nt, Human
gggcucugcucuccgcccag

SEQ ID NO: 1019824 - RNA, 18 nt, Human
ucuccgcccaggcuucuu

SEQ ID NO: 1019825 - RNA, 19 nt, Human
uguaucaaauuucacacuc

SEQ ID NO: 1019826 - RNA, 18 nt, Human
aaacugcagcaaccucag

SEQ ID NO: 1019827 - RNA, 22 nt, Human
aacugcagcaaccucagucccc

SEQ ID NO: 1019828 - RNA, 22 nt, Human
agccccugguacgugggcuucc

SEQ ID NO: 1019829 - RNA, 21 nt, Human
ccccaaacuaucgcggaaaaa

SEQ ID NO: 1019830 - RNA, 29 nt, Human
cgcggaaaaacugcagcaaccucaguccc

SEQ ID NO: 1019831 - RNA, 24 nt, Human
gaaaaacugcagcaaccucagucc

SEQ ID NO: 1019832 - RNA, 22 nt, Human
gacugagugaagacuuuauugc

SEQ ID NO: 1019833 - RNA, 20 nt, Human
uccugggaaagcagaauugu

SEQ ID NO: 1019834 - RNA, 20 nt, Human
ugaugcaguuccugggaaag

SEQ ID NO: 1019835 - RNA, 19 nt, Human
uggaaacuugcagaguccu

SEQ ID NO: 1019836 - RNA, 22 nt, Human
uggaaacuugcagaguccugag

SEQ ID NO: 1019837 - RNA, 19 nt, Human
ugguuacagguauguuucu

SEQ ID NO: 1019838 - RNA, 19 nt, Human
aaagcagaauccugccucu

SEQ ID NO: 1019839 - RNA, 21 nt, Human
aacuaccagggacaaaacugc

SEQ ID NO: 1019840 - RNA, 21 nt, Human
acuaccagggacaaaacugcg

SEQ ID NO: 1019841 - RNA, 19 nt, Human
agggacaaaacugcagcaa

SEQ ID NO: 1019842 - RNA, 20 nt, Human
caaccucacaguaacggagc

SEQ ID NO: 1019843 - RNA, 22 nt, Human
caagggaaagcagaauccugcc

SEQ ID NO: 1019844 - RNA, 22 nt, Human
cagaauccugccucugcucucc

SEQ ID NO: 1019845 - RNA, 18 nt, Human
cucgcggaacugacccaa

SEQ ID NO: 1019846 - RNA, 18 nt, Human
cugacccaaacuaccagg

SEQ ID NO: 1019847 - RNA, 23 nt, Human
gaaagcagaauccugccucugcu

SEQ ID NO: 1019848 - RNA, 19 nt, Human
gacccaaacuaccagggac

SEQ ID NO: 1019849 - RNA, 24 nt, Human
uaacuaucacacuguaccccauaa

SEQ ID NO: 1019850 - RNA, 18 nt, Human
uaccagggacaaaacugc

SEQ ID NO: 1019851 - RNA, 21 nt, Human
uaccagggacaaaacugcagc

SEQ ID NO: 1019852 - RNA, 18 nt, Human
uaccccauaaaugaguac

SEQ ID NO: 1019853 - RNA, 19 nt, Human
uaccccauaaaugaguaca

SEQ ID NO: 1019854 - RNA, 19 nt, Human
ugauuugaucauuacacau

SEQ ID NO: 1019855 - RNA, 19 nt, Human
ugcagcaaccucacaguaa

SEQ ID NO: 1019856 - RNA, 21 nt, Human
uguuaauuacacugauuugau

SEQ ID NO: 1019857 - RNA, 22 nt, Human
uuaaggauccagugcguagguc

SEQ ID NO: 1019858 - RNA, 20 nt, Human
caagaaugagccuuucuacc

SEQ ID NO: 1019859 - RNA, 21 nt, Human
cagaaggccuucgguaggcuc

SEQ ID NO: 1019860 - RNA, 20 nt, Human
ccaaacaaaagaccgcuagc

SEQ ID NO: 1019861 - RNA, 22 nt, Human
cuacuccuuuuuuccccaaaca

SEQ ID NO: 1019862 - RNA, 25 nt, Human
cuacuccuuuuuuccccaaacaaaa

SEQ ID NO: 1019863 - RNA, 18 nt, Human
cuggguccuaucugcaaa

SEQ ID NO: 1019864 - RNA, 23 nt, Human
gugcauuucggggaaguuugaaa

SEQ ID NO: 1019865 - RNA, 18 nt, Human
ucagucccucucccaaaa

SEQ ID NO: 1019866 - RNA, 24 nt, Human
ucagucccucucccaaaacagccc

SEQ ID NO: 1019867 - RNA, 18 nt, Human
ucccaaaacagcccaugg

SEQ ID NO: 1019868 - RNA, 23 nt, Human
ucccaaaacagcccaugggguuc

SEQ ID NO: 1019869 - RNA, 26 nt, Human
ucccaaaacagcccaugggguucugc

SEQ ID NO: 1019870 - RNA, 19 nt, Human
uccccaaacaaaagaccgc

SEQ ID NO: 1019871 - RNA, 21 nt, Human
ucccucucccaaaacagccca

SEQ ID NO: 1019872 - RNA, 24 nt, Human
ucuggggaagugcagaguccuaag

SEQ ID NO: 1019873 - RNA, 23 nt, Human
ugcacuguacucagucccucucc

SEQ ID NO: 1019874 - RNA, 22 nt, Human
ugcauuucggggaaguuugaaa

SEQ ID NO: 1019875 - RNA, 20 nt, Human
ugcugcuuugugaaccacag

SEQ ID NO: 1019876 - RNA, 23 nt, Human
ugcuuuuugagaagucaggguuc

SEQ ID NO: 1019877 - RNA, 24 nt, Human
ugcuuuuugagaagucaggguucc

SEQ ID NO: 1019878 - RNA, 19 nt, Human
uguugcacuguacucaguc

SEQ ID NO: 1019879 - RNA, 22 nt, Human
uuccuucuggggaagugcagag

SEQ ID NO: 1019880 - RNA, 19 nt, Human
uucugcugccuccuccucu

SEQ ID NO: 1019881 - RNA, 21 nt, Human
uuugaguaguguugcacugua

SEQ ID NO: 1019882 - RNA, 21 nt, Human
aaaaucccucgugaaaccccu

SEQ ID NO: 1019883 - RNA, 19 nt, Human
aagauggaacaaagggugg

SEQ ID NO: 1019884 - RNA, 19 nt, Human
agcuaaacuucagcagaug

SEQ ID NO: 1019885 - RNA, 19 nt, Human
augaaauguccuaguuuug

SEQ ID NO: 1019886 - RNA, 23 nt, Human
caaaaucccucgugaaaccccuc

SEQ ID NO: 1019887 - RNA, 18 nt, Human
caacauuaaccagaaaca

SEQ ID NO: 1019888 - RNA, 26 nt, Human
caagugcacacauggguacauauaca

SEQ ID NO: 1019889 - RNA, 22 nt, Human
caucucugcucaagauggaaca

SEQ ID NO: 1019890 - RNA, 24 nt, Human
cauuuuugcaacauuaaccagaaa

SEQ ID NO: 1019891 - RNA, 18 nt, Human
ccucgugaaaccccucuc

SEQ ID NO: 1019892 - RNA, 24 nt, Human
cucaagauggaacaaaggguggga

SEQ ID NO: 1019893 - RNA, 18 nt, Human
cucgugaaaccccucuca

SEQ ID NO: 1019894 - RNA, 23 nt, Human
cuggaaaauuucagcucccauuu

SEQ ID NO: 1019895 - RNA, 26 nt, Human
cuugcaaauauuacaguaaaacucug

SEQ ID NO: 1019896 - RNA, 20 nt, Human
cuugcaggauuucuccucca

SEQ ID NO: 1019897 - RNA, 24 nt, Human
gaaaggcagagaccuuucugggag

SEQ ID NO: 1019898 - RNA, 26 nt, Human
gagcaccuacauugcguuaugaaaug

SEQ ID NO: 1019899 - RNA, 23 nt, Human
gaguagaaaaucaauuauguaaa

SEQ ID NO: 1019900 - RNA, 19 nt, Human
gcaacauuaaccagaaaca

SEQ ID NO: 1019901 - RNA, 23 nt, Human
uaaaaaaugcgcuuaaaaauuuc

SEQ ID NO: 1019902 - RNA, 22 nt, Human
uaaauuccugaccauacucaua

SEQ ID NO: 1019903 - RNA, 27 nt, Human
uaaccagaaacauuguuuaucaguuug

SEQ ID NO: 1019904 - RNA, 24 nt, Human
uacauauacacacacacaaagcua

SEQ ID NO: 1019905 - RNA, 20 nt, Human
uauacacacacacaaagcua

SEQ ID NO: 1019906 - RNA, 18 nt, Human
ucagaucaucauaaugcu

SEQ ID NO: 1019907 - RNA, 24 nt, Human
ucccucgugaaaccccucucauua

SEQ ID NO: 1019908 - RNA, 20 nt, Human
ucuuucuuuuucuagagaaa

SEQ ID NO: 1019909 - RNA, 23 nt, Human
ugcacacauggguacauauacac

SEQ ID NO: 1019910 - RNA, 24 nt, Human
uguccuaguuuuguagacuagcaa

SEQ ID NO: 1019911 - RNA, 23 nt, Human
uuaggcaugcucaucacuguacu

SEQ ID NO: 1019912 - RNA, 27 nt, Human
uuuuaaaaauucuuuuucuacugaaag

SEQ ID NO: 1019913 - RNA, 20 nt, Human
aguaauggagcacaaaggaa

SEQ ID NO: 1019914 - RNA, 21 nt, Human
caaguucagaaggacccgccg

SEQ ID NO: 1019915 - RNA, 24 nt, Human
cucaaacuacgcgguuauguagca

SEQ ID NO: 1019916 - RNA, 22 nt, Human
cuccuacuuuuuggagucuuca

SEQ ID NO: 1019917 - RNA, 21 nt, Human
guugcgaccccaagcgaaggu

SEQ ID NO: 1019918 - RNA, 21 nt, Human
uagcaaccgcaggcucccccg

SEQ ID NO: 1019919 - RNA, 31 nt, Human
uauauacacauauuaaaauuucauaccauaa

SEQ ID NO: 1019920 - RNA, 19 nt, Human
ucccaaaacaaagaaaugu

SEQ ID NO: 1019921 - RNA, 19 nt, Human
uucccaaaacaaagaaaug

SEQ ID NO: 1019922 - RNA, 25 nt, Human
uuuuccuccuacuuuuuggagucuu

SEQ ID NO: 1019923 - RNA, 22 nt, Human
aagggcccccucacaggaccag

SEQ ID NO: 1019924 - RNA, 21 nt, Human
ccccucacaggaccaggaggu

SEQ ID NO: 1019925 - RNA, 19 nt, Human
uccuaaaguagauuagacc

SEQ ID NO: 1019926 - RNA, 22 nt, Human
ucugucuggagacguucucccc

SEQ ID NO: 1019927 - RNA, 20 nt, Human
ugucuggagacguucucccc

SEQ ID NO: 1019928 - RNA, 19 nt, Human
aaccggaccaccagguccc

SEQ ID NO: 1019929 - RNA, 21 nt, Human
aaccggaccaccaggucccag

SEQ ID NO: 1019930 - RNA, 19 nt, Human
caccaggucccagcgagcc

SEQ ID NO: 1019931 - RNA, 20 nt, Human
caccaggucccagcgagccc

SEQ ID NO: 1019932 - RNA, 24 nt, Human
caggucccagcgagccccaaucuu

SEQ ID NO: 1019933 - RNA, 21 nt, Human
cauaaccggaccaccaggucc

SEQ ID NO: 1019934 - RNA, 19 nt, Human
cccaaucuuaagucccuga

SEQ ID NO: 1019935 - RNA, 18 nt, Human
cugcucucccacgaggcu

SEQ ID NO: 1019936 - RNA, 20 nt, Human
gcgcaguccuuuuucaggcu

SEQ ID NO: 1019937 - RNA, 21 nt, Human
ggaccaccaggucccagcgag

SEQ ID NO: 1019938 - RNA, 19 nt, Human
uaagucccugacauuagga

SEQ ID NO: 1019939 - RNA, 23 nt, Human
uaagucccugacauuaggagggg

SEQ ID NO: 1019940 - RNA, 21 nt, Human
ucccauaaccggaccaccagg

SEQ ID NO: 1019941 - RNA, 20 nt, Human
ugagagaaggcagaaucgug

SEQ ID NO: 1019942 - RNA, 23 nt, Human
ugccuggaacaguggagcuuugc

SEQ ID NO: 1019943 - RNA, 21 nt, Human
uggagcuuugcuuucaguagc

SEQ ID NO: 1019944 - RNA, 21 nt, Human
uugcagaguccugaguuaugc

SEQ ID NO: 1019945 - RNA, 20 nt, Human
uuucaggcucugcucuccca

SEQ ID NO: 1019946 - RNA, 20 nt, Human
aaacaagauguacuauaaaa

SEQ ID NO: 1019947 - RNA, 21 nt, Human
aagaauccaccccuggcuguu

SEQ ID NO: 1019948 - RNA, 19 nt, Human
acuccagucuuggucugug

SEQ ID NO: 1019949 - RNA, 27 nt, Human
aggcaggugguagagcaaaagggaccc

SEQ ID NO: 1019950 - RNA, 21 nt, Human
auaucccauaagauaguucua

SEQ ID NO: 1019951 - RNA, 24 nt, Human
auccaccccuggcuguuucugauu

SEQ ID NO: 1019952 - RNA, 21 nt, Human
cacccccacucucagcggccc

SEQ ID NO: 1019953 - RNA, 20 nt, Human
cacuguuagccuaaacaaca

SEQ ID NO: 1019954 - RNA, 18 nt, Human
cagccacccccacucuca

SEQ ID NO: 1019955 - RNA, 27 nt, Human
cagccacccccacucucagcggccccu

SEQ ID NO: 1019956 - RNA, 24 nt, Human
cauaauagcacuuaaaaguuaaaa

SEQ ID NO: 1019957 - RNA, 21 nt, Human
cauccagaacacgugcauuau

SEQ ID NO: 1019958 - RNA, 27 nt, Human
ccaaugaacaauggagauauuuccuuc

SEQ ID NO: 1019959 - RNA, 20 nt, Human
ccagccacccccacucucag

SEQ ID NO: 1019960 - RNA, 21 nt, Human
cccagccacccccacucucag

SEQ ID NO: 1019961 - RNA, 20 nt, Human
ccccuggcuguuucugauua

SEQ ID NO: 1019962 - RNA, 22 nt, Human
cguugauaagcugucugucccu

SEQ ID NO: 1019963 - RNA, 23 nt, Human
cguugauaagcugucugucccuu

SEQ ID NO: 1019964 - RNA, 20 nt, Human
cucggccuccgccuccuccu

SEQ ID NO: 1019965 - RNA, 20 nt, Human
cugcucccagccacccccac

SEQ ID NO: 1019966 - RNA, 21 nt, Human
cugggagauccaagaaucagg

SEQ ID NO: 1019967 - RNA, 22 nt, Human
cuuuguagaugcaucuuuuuua

SEQ ID NO: 1019968 - RNA, 18 nt, Human
gaagaaaggcagguggua

SEQ ID NO: 1019969 - RNA, 19 nt, Human
gaagaaugacauuagccuu

SEQ ID NO: 1019970 - RNA, 21 nt, Human
gacugaaguccuuuagcgaca

SEQ ID NO: 1019971 - RNA, 19 nt, Human
ggcuugaaggugauuccug

SEQ ID NO: 1019972 - RNA, 18 nt, Human
guagagcaaaagagguga

SEQ ID NO: 1019973 - RNA, 27 nt, Human
uaaacaacaacuuagguauaaaaaucc

SEQ ID NO: 1019974 - RNA, 19 nt, Human
uaauuucugccaaagccuc

SEQ ID NO: 1019975 - RNA, 22 nt, Human
uacgaaguaaggccacugguga

SEQ ID NO: 1019976 - RNA, 19 nt, Human
uagcugguuuaguaaguug

SEQ ID NO: 1019977 - RNA, 20 nt, Human
uagguauaaaaauccagacc

SEQ ID NO: 1019978 - RNA, 24 nt, Human
uauaaaaauccagaccucugcuaa

SEQ ID NO: 1019979 - RNA, 21 nt, Human
uaugaugaguugcaaauucuc

SEQ ID NO: 1019980 - RNA, 26 nt, Human
uauuaaaaacuccuuuuuuaagauuc

SEQ ID NO: 1019981 - RNA, 22 nt, Human
uccaccccuggcuguuucugau

SEQ ID NO: 1019982 - RNA, 20 nt, Human
ucccagccacccccacucuc

SEQ ID NO: 1019983 - RNA, 25 nt, Human
uccucggccuccgccuccuccuccg

SEQ ID NO: 1019984 - RNA, 24 nt, Human
uccuuauucuuccuuucagcuuca

SEQ ID NO: 1019985 - RNA, 21 nt, Human
uccuucuuaauuucugccaaa

SEQ ID NO: 1019986 - RNA, 19 nt, Human
ucucagcggcccuggacuc

SEQ ID NO: 1019987 - RNA, 20 nt, Human
ugacugaaguccuuuagcga

SEQ ID NO: 1019988 - RNA, 21 nt, Human
ugauuccugguccucggccuc

SEQ ID NO: 1019989 - RNA, 25 nt, Human
uggaagaaugacauuagccuucuuu

SEQ ID NO: 1019990 - RNA, 23 nt, Human
ugguagagcaaaagaggugagcu

SEQ ID NO: 1019991 - RNA, 24 nt, Human
uguauauuaacaccaaaauuacuu

SEQ ID NO: 1019992 - RNA, 25 nt, Human
uuacuccagucuuggucuguggagu

SEQ ID NO: 1019993 - RNA, 21 nt, Human
uucacagggagacaaacaaga

SEQ ID NO: 1019994 - RNA, 18 nt, Human
uucugcuuacgaaguaag

SEQ ID NO: 1019995 - RNA, 20 nt, Human
uuguagaugcaucuuuuuua

SEQ ID NO: 1019996 - RNA, 24 nt, Human
aaaaaaaaaacaaaaaacaaaaaa

SEQ ID NO: 1019997 - RNA, 18 nt, Human
aaaaaaaaaagggaaaaa

SEQ ID NO: 1019998 - RNA, 24 nt, Human
aaaaaagggaaaaacagcaaacgu

SEQ ID NO: 1019999 - RNA, 23 nt, Human
aaaagaaaaagggagcaaacaaa

SEQ ID NO: 1020000 - RNA, 23 nt, Human
aaaaugcuuuugccuugcgugcu

SEQ ID NO: 1020001 - RNA, 24 nt, Human
aaacaaaaaaaaagagagaacgag

SEQ ID NO: 1020002 - RNA, 21 nt, Human
aaacagugcauuuacguucuu

SEQ ID NO: 1020003 - RNA, 21 nt, Human
aaagaaaaagggagcaaacaa

SEQ ID NO: 1020004 - RNA, 23 nt, Human
aaagcaauuaaaaaaaaaaggga

SEQ ID NO: 1020005 - RNA, 21 nt, Human
aacaaaggaagaaugugaaac

SEQ ID NO: 1020006 - RNA, 22 nt, Human
aaccacacguuaggcugcagcc

SEQ ID NO: 1020007 - RNA, 19 nt, Human
aacccaaguucuaaaagcc

SEQ ID NO: 1020008 - RNA, 20 nt, Human
aacuaagagcaucaacacaa

SEQ ID NO: 1020009 - RNA, 20 nt, Human
aacucaugcauuucuguagc

SEQ ID NO: 1020010 - RNA, 22 nt, Human
aagacaaaaaauauauugaaaa

SEQ ID NO: 1020011 - RNA, 22 nt, Human
aagcaccaccaaaucacacgga

SEQ ID NO: 1020012 - RNA, 19 nt, Human
aagcauuuugugacaggac

SEQ ID NO: 1020013 - RNA, 31 nt, Human
aaggaggaaggggagaaaaagaaaaagggaa

SEQ ID NO: 1020014 - RNA, 20 nt, Human
aagggagcaaacaaaaaaaa

SEQ ID NO: 1020015 - RNA, 19 nt, Human
aaguccguuuucucacaga

SEQ ID NO: 1020016 - RNA, 19 nt, Human
aaguucuuugacacccccc

SEQ ID NO: 1020017 - RNA, 22 nt, Human
aaugaccacaaaaagaaaaucc

SEQ ID NO: 1020018 - RNA, 18 nt, Human
acaaagacaaaaaauaua

SEQ ID NO: 1020019 - RNA, 22 nt, Human
accaaaucacacggacaagacc

SEQ ID NO: 1020020 - RNA, 19 nt, Human
accacaaaaagaaaaucca

SEQ ID NO: 1020021 - RNA, 18 nt, Human
accacacguuaggcugca

SEQ ID NO: 1020022 - RNA, 23 nt, Human
accguaccacaacuauauagaga

SEQ ID NO: 1020023 - RNA, 21 nt, Human
accuaaacucugagcuggcau

SEQ ID NO: 1020024 - RNA, 24 nt, Human
acgcaucuccaucuuccuugaacc

SEQ ID NO: 1020025 - RNA, 19 nt, Human
acuggagggaauuucuacu

SEQ ID NO: 1020026 - RNA, 23 nt, Human
acuuuguugggggggaaaaaagg

SEQ ID NO: 1020027 - RNA, 24 nt, Human
agaagaaauuuaauuaacucuacu

SEQ ID NO: 1020028 - RNA, 23 nt, Human
agaaguugccacagaaaguuuua

SEQ ID NO: 1020029 - RNA, 22 nt, Human
agacaggaaaacaaacacugug

SEQ ID NO: 1020030 - RNA, 18 nt, Human
agccuggucaggaacaac

SEQ ID NO: 1020031 - RNA, 23 nt, Human
agggaggguaaggaggaagggga

SEQ ID NO: 1020032 - RNA, 23 nt, Human
agguuuccaacagccagaaaaaa

SEQ ID NO: 1020033 - RNA, 21 nt, Human
aguuggggguggaggguggug

SEQ ID NO: 1020034 - RNA, 21 nt, Human
auaauaaacaaagaaaagucc

SEQ ID NO: 1020035 - RNA, 21 nt, Human
auacaaugcaaacaaagacaa

SEQ ID NO: 1020036 - RNA, 19 nt, Human
auauauguauauauauaua

SEQ ID NO: 1020037 - RNA, 19 nt, Human
auauguauauauauauaua

SEQ ID NO: 1020038 - RNA, 20 nt, Human
auauguauauauauauauau

SEQ ID NO: 1020039 - RNA, 22 nt, Human
aucaaauuaugucccacaaaac

SEQ ID NO: 1020040 - RNA, 23 nt, Human
aucuccaucuuccuugaacccaa

SEQ ID NO: 1020041 - RNA, 23 nt, Human
augcuccaaggccauuuucacag

SEQ ID NO: 1020042 - RNA, 24 nt, Human
auuacagccaaauuaacacacauu

SEQ ID NO: 1020043 - RNA, 25 nt, Human
auuacuuuugcuaccugacugugcu

SEQ ID NO: 1020044 - RNA, 19 nt, Human
auuaugucccacaaaaccu

SEQ ID NO: 1020045 - RNA, 23 nt, Human
auuucucucacugggaacuguca

SEQ ID NO: 1020046 - RNA, 22 nt, Human
caaaaaaaaagagagaacgacc

SEQ ID NO: 1020047 - RNA, 20 nt, Human
caaaaaacaaaaaaacuuug

SEQ ID NO: 1020048 - RNA, 19 nt, Human
caaaaaauauauugaaaac

SEQ ID NO: 1020049 - RNA, 22 nt, Human
caaaagacaaugcaguguugac

SEQ ID NO: 1020050 - RNA, 21 nt, Human
caaacaaagacaaaaaauaua

SEQ ID NO: 1020051 - RNA, 23 nt, Human
caaauuuuaaacaaaagcaauua

SEQ ID NO: 1020052 - RNA, 20 nt, Human
caacuaagagcaucaacaca

SEQ ID NO: 1020053 - RNA, 23 nt, Human
caagacaggaaaacaaacacugu

SEQ ID NO: 1020054 - RNA, 18 nt, Human
caagacucaacuaagagc

SEQ ID NO: 1020055 - RNA, 21 nt, Human
cacucacaaugaccacaaaaa

SEQ ID NO: 1020056 - RNA, 18 nt, Human
cacugugcaaaaugcuuu

SEQ ID NO: 1020057 - RNA, 19 nt, Human
cagcaaacguuuuccaugc

SEQ ID NO: 1020058 - RNA, 22 nt, Human
cagcaacacacaauggaguuuu

SEQ ID NO: 1020059 - RNA, 28 nt, Human
cagccaaauuaacacacauuuaaccaaa

SEQ ID NO: 1020060 - RNA, 26 nt, Human
cauacaagaaaacuuguucaaccauc

SEQ ID NO: 1020061 - RNA, 19 nt, Human
caugucaaucaaggcaguc

SEQ ID NO: 1020062 - RNA, 18 nt, Human
cauucaguaucuuaagca

SEQ ID NO: 1020063 - RNA, 23 nt, Human
ccucaaaggaaaaacaccucucu

SEQ ID NO: 1020064 - RNA, 24 nt, Human
cggacaagaccuaaaugccagaag

SEQ ID NO: 1020065 - RNA, 23 nt, Human
cuaaaugccagaaggaaaaugca

SEQ ID NO: 1020066 - RNA, 20 nt, Human
cucauuagagccuggucagg

SEQ ID NO: 1020067 - RNA, 18 nt, Human
cugaacuuccucaccccc

SEQ ID NO: 1020068 - RNA, 23 nt, Human
cuuacuuccccuauccccucaaa

SEQ ID NO: 1020069 - RNA, 21 nt, Human
cuuuaaaugccauuacagcca

SEQ ID NO: 1020070 - RNA, 26 nt, Human
gaaaaugcacacuuucugaacuuccu

SEQ ID NO: 1020071 - RNA, 20 nt, Human
gacgcaucuccaucuuccuu

SEQ ID NO: 1020072 - RNA, 24 nt, Human
gcaauuaaaaaaaaaagggaaaaa

SEQ ID NO: 1020073 - RNA, 22 nt, Human
gcccauguaaucaauuacagua

SEQ ID NO: 1020074 - RNA, 26 nt, Human
gcugcaauauccuuuuucaucccaag

SEQ ID NO: 1020075 - RNA, 21 nt, Human
ggaaaacaaacacugugcaaa

SEQ ID NO: 1020076 - RNA, 18 nt, Human
gggaaaaaagagcucaaa

SEQ ID NO: 1020077 - RNA, 23 nt, Human
gggggagaguaagggagggaggg

SEQ ID NO: 1020078 - RNA, 22 nt, Human
gggggggagaguaagggaggga

SEQ ID NO: 1020079 - RNA, 18 nt, Human
ggggguggaggguggugg

SEQ ID NO: 1020080 - RNA, 23 nt, Human
ggggguggagggugguggugggg

SEQ ID NO: 1020081 - RNA, 23 nt, Human
gggguggaggguggugguggggg

SEQ ID NO: 1020082 - RNA, 21 nt, Human
gguaaggaggaaggggagaaa

SEQ ID NO: 1020083 - RNA, 18 nt, Human
ggugguggggggggagag

SEQ ID NO: 1020084 - RNA, 21 nt, Human
guggugguggggggggagagu

SEQ ID NO: 1020085 - RNA, 22 nt, Human
uaaaaauuauuuuaacauaaac

SEQ ID NO: 1020086 - RNA, 26 nt, Human
uaaaauaaaaauaaaaacagugcauu

SEQ ID NO: 1020087 - RNA, 22 nt, Human
uaaagauaaugcuccaaggcca

SEQ ID NO: 1020088 - RNA, 21 nt, Human
uaaaugcacacugcacaugca

SEQ ID NO: 1020089 - RNA, 19 nt, Human
uaaauguguacaccuaaac

SEQ ID NO: 1020090 - RNA, 22 nt, Human
uaaccaaauauuuccaaaacag

SEQ ID NO: 1020091 - RNA, 24 nt, Human
uaaccuggggagagaggaauuucu

SEQ ID NO: 1020092 - RNA, 27 nt, Human
uaagaauaagaauuuagaucucuuccc

SEQ ID NO: 1020093 - RNA, 23 nt, Human
uaauaaacaaagaaaagucccaa

SEQ ID NO: 1020094 - RNA, 25 nt, Human
uacaagaaaacuuguucaaccaucc

SEQ ID NO: 1020095 - RNA, 21 nt, Human
uacaccuaaacucugagcugg

SEQ ID NO: 1020096 - RNA, 20 nt, Human
uacaguauacaauaacagua

SEQ ID NO: 1020097 - RNA, 19 nt, Human
uacuuuucaagacucaacu

SEQ ID NO: 1020098 - RNA, 24 nt, Human
uagaccguaccacaacuauauaga

SEQ ID NO: 1020099 - RNA, 19 nt, Human
uagagaucuauuuauauau

SEQ ID NO: 1020100 - RNA, 25 nt, Human
uagcuuuaauuucaaagggaacaac

SEQ ID NO: 1020101 - RNA, 22 nt, Human
uagucuacuaacccccuucccc

SEQ ID NO: 1020102 - RNA, 20 nt, Human
uauauauauguauauauaua

SEQ ID NO: 1020103 - RNA, 23 nt, Human
uauauauauguauauauauauau

SEQ ID NO: 1020104 - RNA, 18 nt, Human
uauauauguauauauaua

SEQ ID NO: 1020105 - RNA, 18 nt, Human
uauauguauauauauaua

SEQ ID NO: 1020106 - RNA, 23 nt, Human
uauccccucaaaggaaaaacacc

SEQ ID NO: 1020107 - RNA, 20 nt, Human
uaugacccaagcaccaccaa

SEQ ID NO: 1020108 - RNA, 18 nt, Human
uauguauauauauauaua

SEQ ID NO: 1020109 - RNA, 19 nt, Human
uauguauauauauauauau

SEQ ID NO: 1020110 - RNA, 24 nt, Human
uauuuacuuuucaagacucaacua

SEQ ID NO: 1020111 - RNA, 27 nt, Human
ucagaaauuuuccauuugggucuaagg

SEQ ID NO: 1020112 - RNA, 21 nt, Human
uccaacagccagaaaaaauuc

SEQ ID NO: 1020113 - RNA, 20 nt, Human
uccaguccuuucagccuggg

SEQ ID NO: 1020114 - RNA, 27 nt, Human
ucccacaaaaccuacaaaauagcuuua

SEQ ID NO: 1020115 - RNA, 23 nt, Human
uccccucaaaggaaaaacaccuc

SEQ ID NO: 1020116 - RNA, 20 nt, Human
uccuggaacauacaagaaaa

SEQ ID NO: 1020117 - RNA, 26 nt, Human
uccuuucagccuggggcuuuuucagu

SEQ ID NO: 1020118 - RNA, 22 nt, Human
ucuaaagugcaaaaacaaguua

SEQ ID NO: 1020119 - RNA, 23 nt, Human
ucuauuuauauauauguauauau

SEQ ID NO: 1020120 - RNA, 24 nt, Human
ucuccaucuuccuugaacccaagu

SEQ ID NO: 1020121 - RNA, 21 nt, Human
ucucucacuaagaauaagaau

SEQ ID NO: 1020122 - RNA, 22 nt, Human
ugacaaaauuaagccauaugaa

SEQ ID NO: 1020123 - RNA, 18 nt, Human
ugacacccccccagccca

SEQ ID NO: 1020124 - RNA, 25 nt, Human
ugacacccccccagcccauguaauc

SEQ ID NO: 1020125 - RNA, 23 nt, Human
ugaucccaguguacuuucagcau

SEQ ID NO: 1020126 - RNA, 19 nt, Human
ugcaaacaaagacaaaaaa

SEQ ID NO: 1020127 - RNA, 23 nt, Human
ugccacagaaaguuuuaagucaa

SEQ ID NO: 1020128 - RNA, 21 nt, Human
ugcuggucauuaaaaccacac

SEQ ID NO: 1020129 - RNA, 20 nt, Human
uggagggugguggugggggg

SEQ ID NO: 1020130 - RNA, 20 nt, Human
uggccgccgugguacauguc

SEQ ID NO: 1020131 - RNA, 21 nt, Human
ugggaacugucagaaaaccag

SEQ ID NO: 1020132 - RNA, 18 nt, Human
uggugguggggggggaga

SEQ ID NO: 1020133 - RNA, 21 nt, Human
uguaaacauuuauauuuuccu

SEQ ID NO: 1020134 - RNA, 18 nt, Human
ugucagaaaaccagaagu

SEQ ID NO: 1020135 - RNA, 27 nt, Human
uguuuguaaacauuuauauuuuccuuu

SEQ ID NO: 1020136 - RNA, 24 nt, Human
uuaacucuacuuaucaaauuaugu

SEQ ID NO: 1020137 - RNA, 24 nt, Human
uucagaaauuuuccauuugggucu

SEQ ID NO: 1020138 - RNA, 23 nt, Human
uucauauaauuuauugcaguuag

SEQ ID NO: 1020139 - RNA, 22 nt, Human
uuccaaaacaguccagcaacac

SEQ ID NO: 1020140 - RNA, 30 nt, Human
uuccucacccccgccaaagagcuuccgacu

SEQ ID NO: 1020141 - RNA, 18 nt, Human
uuuacguucuucauaaca

SEQ ID NO: 1020142 - RNA, 24 nt, Human
uuuguuauaaaugcacacugcaca

SEQ ID NO: 1020143 - RNA, 21 nt, Human
uuuuuuuuuuuuuuuucucag

SEQ ID NO: 1020144 - RNA, 20 nt, Human
accucaaagagugucucagg

SEQ ID NO: 1020145 - RNA, 21 nt, Human
agaaagcccacagcuauuugg

SEQ ID NO: 1020146 - RNA, 20 nt, Human
aggggaucuggcugguagcc

SEQ ID NO: 1020147 - RNA, 21 nt, Human
caacccagccagcaguuccag

SEQ ID NO: 1020148 - RNA, 21 nt, Human
cagcagcaacccagccagcag

SEQ ID NO: 1020149 - RNA, 20 nt, Human
cagcaguuccagaaagccca

SEQ ID NO: 1020150 - RNA, 19 nt, Human
caugaccagcagcaaccca

SEQ ID NO: 1020151 - RNA, 21 nt, Human
ccaaauacuucagcgggaaca

SEQ ID NO: 1020152 - RNA, 23 nt, Human
ccaaauacuucagcgggaacacc

SEQ ID NO: 1020153 - RNA, 30 nt, Human
ccagccagcaguuccagaaagcccacagcu

SEQ ID NO: 1020154 - RNA, 27 nt, Human
cccaugaccagcagcaacccagccagc

SEQ ID NO: 1020155 - RNA, 20 nt, Human
gcagcaacccagccagcagu

SEQ ID NO: 1020156 - RNA, 19 nt, Human
ucucaggcucaaacgaaua

SEQ ID NO: 1020157 - RNA, 18 nt, Human
ugaccagcagcaacccag

SEQ ID NO: 1020158 - RNA, 24 nt, Human
ugggcccaugaccagcagcaaccc

SEQ ID NO: 1020159 - RNA, 18 nt, Human
ugguaauggauaguugga

SEQ ID NO: 1020160 - RNA, 21 nt, Human
ugguaauggauaguuggacac

SEQ ID NO: 1020161 - RNA, 19 nt, Human
uuccagaaagcccacagcu

SEQ ID NO: 1020162 - RNA, 19 nt, Human
aaaagugaugacauacccc

SEQ ID NO: 1020163 - RNA, 22 nt, Human
aaagacacucccagccuucgcc

SEQ ID NO: 1020164 - RNA, 19 nt, Human
aaauaaccuacagaaagag

SEQ ID NO: 1020165 - RNA, 19 nt, Human
aagggcuggugggaaagac

SEQ ID NO: 1020166 - RNA, 23 nt, Human
aauaaauaaccuacagaaagagc

SEQ ID NO: 1020167 - RNA, 22 nt, Human
acagaaagagcagcgcuggagg

SEQ ID NO: 1020168 - RNA, 19 nt, Human
agagcagcgcuggaggcug

SEQ ID NO: 1020169 - RNA, 25 nt, Human
agcgcuggaggcuggcccuugagcc

SEQ ID NO: 1020170 - RNA, 23 nt, Human
auagagcauuauguggaaggagg

SEQ ID NO: 1020171 - RNA, 20 nt, Human
caacuucagaguuccaaccu

SEQ ID NO: 1020172 - RNA, 21 nt, Human
caacuucagaguuccaaccuu

SEQ ID NO: 1020173 - RNA, 21 nt, Human
ccaacuucagaguuccaaccu

SEQ ID NO: 1020174 - RNA, 23 nt, Human
ccccaccaugggcaagggcuggu

SEQ ID NO: 1020175 - RNA, 24 nt, Human
ccuccccaccaugggcaagggcug

SEQ ID NO: 1020176 - RNA, 23 nt, Human
cuggaggcuggcccuugagccac

SEQ ID NO: 1020177 - RNA, 19 nt, Human
gcccuugagccacccacug

SEQ ID NO: 1020178 - RNA, 21 nt, Human
ggaaagacacucccagccuuc

SEQ ID NO: 1020179 - RNA, 21 nt, Human
guaacuuuauuccaccuucuc

SEQ ID NO: 1020180 - RNA, 23 nt, Human
uaaccuacagaaagagcagcgcu

SEQ ID NO: 1020181 - RNA, 21 nt, Human
uacagaaagagcagcgcugga

SEQ ID NO: 1020182 - RNA, 23 nt, Human
uaccccugguucauuucuggguu

SEQ ID NO: 1020183 - RNA, 21 nt, Human
uccuaggccaauucaaaaccg

SEQ ID NO: 1020184 - RNA, 18 nt, Human
ugaaaaaagugaugacau

SEQ ID NO: 1020185 - RNA, 23 nt, Human
ugacauaccccugguucauuucu

SEQ ID NO: 1020186 - RNA, 20 nt, Human
uuccaaaauaaggucaagua

SEQ ID NO: 1020187 - RNA, 21 nt, Human
uuccaccuucuccaacuucag

SEQ ID NO: 1020188 - RNA, 25 nt, Human
aaaagcuucuguccuucacaugauu

SEQ ID NO: 1020189 - RNA, 20 nt, Human
aaagaacauuucucaguuca

SEQ ID NO: 1020190 - RNA, 18 nt, Human
aaagacaaaauaagagga

SEQ ID NO: 1020191 - RNA, 23 nt, Human
aaagugguuaaaaacugaaaaag

SEQ ID NO: 1020192 - RNA, 20 nt, Human
aaugacaaacacagauggaa

SEQ ID NO: 1020193 - RNA, 18 nt, Human
acacaccuaugacuugca

SEQ ID NO: 1020194 - RNA, 19 nt, Human
acucaguucucuacaauuu

SEQ ID NO: 1020195 - RNA, 18 nt, Human
acucccaaacaaaauaag

SEQ ID NO: 1020196 - RNA, 26 nt, Human
agaaacuggugcaaaagacaaaauaa

SEQ ID NO: 1020197 - RNA, 21 nt, Human
agcugccauuggggaaaaaaa

SEQ ID NO: 1020198 - RNA, 19 nt, Human
augaauaaauuuaggguuc

SEQ ID NO: 1020199 - RNA, 18 nt, Human
caaaaucaaucaagacca

SEQ ID NO: 1020200 - RNA, 19 nt, Human
caaaguagccuauugcagc

SEQ ID NO: 1020201 - RNA, 24 nt, Human
caaaguuucacuccaaagcuaccu

SEQ ID NO: 1020202 - RNA, 22 nt, Human
caagagggcugccacugacuga

SEQ ID NO: 1020203 - RNA, 21 nt, Human
cacaguuuggugcauaccaau

SEQ ID NO: 1020204 - RNA, 20 nt, Human
cagacgcacacaucaacagc

SEQ ID NO: 1020205 - RNA, 23 nt, Human
ccaaaguagccuauugcagccaa

SEQ ID NO: 1020206 - RNA, 22 nt, Human
ccaaaugcuuuauauaggaacc

SEQ ID NO: 1020207 - RNA, 21 nt, Human
ccacucggagaaauuagucau

SEQ ID NO: 1020208 - RNA, 19 nt, Human
ccagaaaaugaaagggaca

SEQ ID NO: 1020209 - RNA, 22 nt, Human
ccagacccaccgcugagaaggc

SEQ ID NO: 1020210 - RNA, 21 nt, Human
cccacauccagacccaccgcu

SEQ ID NO: 1020211 - RNA, 19 nt, Human
cccaccuaaaaaaugagau

SEQ ID NO: 1020212 - RNA, 19 nt, Human
ccccauuucucuguaccac

SEQ ID NO: 1020213 - RNA, 21 nt, Human
cccccaccuaaaaaaugagau

SEQ ID NO: 1020214 - RNA, 18 nt, Human
ccuaaaagugguuaaaaa

SEQ ID NO: 1020215 - RNA, 21 nt, Human
ccugccacccccaccuaaaaa

SEQ ID NO: 1020216 - RNA, 22 nt, Human
ccugccacccccaccuaaaaaa

SEQ ID NO: 1020217 - RNA, 28 nt, Human
cgccagugagggcugaaagccaguaguc

SEQ ID NO: 1020218 - RNA, 23 nt, Human
cucauagaacuacugaaacagcu

SEQ ID NO: 1020219 - RNA, 19 nt, Human
cucuacaauuucaucaaaa

SEQ ID NO: 1020220 - RNA, 20 nt, Human
cucuguacugaucucuccuc

SEQ ID NO: 1020221 - RNA, 19 nt, Human
cugaaaaagaacaaaaagg

SEQ ID NO: 1020222 - RNA, 23 nt, Human
cugcaauaagggcccacacccag

SEQ ID NO: 1020223 - RNA, 19 nt, Human
cuugcaauccucauagaac

SEQ ID NO: 1020224 - RNA, 22 nt, Human
gaaaaaaaaugaaaauaaaagg

SEQ ID NO: 1020225 - RNA, 20 nt, Human
gaaaaccuaaaagugguuaa

SEQ ID NO: 1020226 - RNA, 18 nt, Human
gaaaugacaaacacagau

SEQ ID NO: 1020227 - RNA, 21 nt, Human
gagaaaagcugccauugggga

SEQ ID NO: 1020228 - RNA, 18 nt, Human
gagaauggagaugaggga

SEQ ID NO: 1020229 - RNA, 20 nt, Human
gaugucacucuuagcucugu

SEQ ID NO: 1020230 - RNA, 22 nt, Human
gcaauaagggcccacacccaga

SEQ ID NO: 1020231 - RNA, 24 nt, Human
ggacagaaccaccaaguacacaau

SEQ ID NO: 1020232 - RNA, 18 nt, Human
guuucuguaaggggaaaa

SEQ ID NO: 1020233 - RNA, 19 nt, Human
guuuuuuucuccccuggaa

SEQ ID NO: 1020234 - RNA, 23 nt, Human
uaaaaaagcaauaaucagacgca

SEQ ID NO: 1020235 - RNA, 23 nt, Human
uaacaaaaaugagauuuguuaca

SEQ ID NO: 1020236 - RNA, 23 nt, Human
uaauuaguuuguggaauaucauc

SEQ ID NO: 1020237 - RNA, 24 nt, Human
uacaccugccacccccaccuaaaa

SEQ ID NO: 1020238 - RNA, 21 nt, Human
uacaguucuugguaacaaaaa

SEQ ID NO: 1020239 - RNA, 23 nt, Human
uaccuuaguuuacccacauccag

SEQ ID NO: 1020240 - RNA, 21 nt, Human
uagcgucaaauuaaccuuagc

SEQ ID NO: 1020241 - RNA, 23 nt, Human
uaguggggacuauuacacuugcu

SEQ ID NO: 1020242 - RNA, 26 nt, Human
uauacaaaccauaaaauucguauagu

SEQ ID NO: 1020243 - RNA, 18 nt, Human
uaucagacaauccaauua

SEQ ID NO: 1020244 - RNA, 19 nt, Human
uaucgaacaagguauggag

SEQ ID NO: 1020245 - RNA, 19 nt, Human
uaugccacacacaccuaug

SEQ ID NO: 1020246 - RNA, 21 nt, Human
ucaguucccccucuugaguuu

SEQ ID NO: 1020247 - RNA, 23 nt, Human
uccaaauuuuguggggaagaaac

SEQ ID NO: 1020248 - RNA, 23 nt, Human
uccagacccaccgcugagaaggc

SEQ ID NO: 1020249 - RNA, 22 nt, Human
ucccuauuuucaaguuucaagg

SEQ ID NO: 1020250 - RNA, 19 nt, Human
uccuucaauuuucauuugc

SEQ ID NO: 1020251 - RNA, 23 nt, Human
uccuucaauuuucauuugcacau

SEQ ID NO: 1020252 - RNA, 18 nt, Human
ucuccccuggaaaaaaaa

SEQ ID NO: 1020253 - RNA, 24 nt, Human
ucucuacaauuucaucaaaaacug

SEQ ID NO: 1020254 - RNA, 21 nt, Human
ucuguaccacagcucaggcug

SEQ ID NO: 1020255 - RNA, 21 nt, Human
ucuuaugaauaaauuuagggu

SEQ ID NO: 1020256 - RNA, 21 nt, Human
ucuugaguuuuuugcuguugg

SEQ ID NO: 1020257 - RNA, 18 nt, Human
ugaaaaagaacaaaaagg

SEQ ID NO: 1020258 - RNA, 22 nt, Human
ugaaaagucuuucaagauuaaa

SEQ ID NO: 1020259 - RNA, 22 nt, Human
ugaaaauaagaaccucacuucc

SEQ ID NO: 1020260 - RNA, 21 nt, Human
ugaaacagcuagaguuuggaa

SEQ ID NO: 1020261 - RNA, 25 nt, Human
ugacaaacacagauggaauuaauca

SEQ ID NO: 1020262 - RNA, 19 nt, Human
ugacugaaaacacagcacu

SEQ ID NO: 1020263 - RNA, 23 nt, Human
ugauaugccacacacaccuauga

SEQ ID NO: 1020264 - RNA, 19 nt, Human
ugauguuuuuuucuccccu

SEQ ID NO: 1020265 - RNA, 22 nt, Human
ugccacugacugaaaacacagc

SEQ ID NO: 1020266 - RNA, 23 nt, Human
uggaaucacucacagguuugcca

SEQ ID NO: 1020267 - RNA, 18 nt, Human
uggagcaagagggcugcc

SEQ ID NO: 1020268 - RNA, 22 nt, Human
uggcaaacgucauaaaagcuuu

SEQ ID NO: 1020269 - RNA, 21 nt, Human
uggugcauaccaauauguaug

SEQ ID NO: 1020270 - RNA, 24 nt, Human
ugugggguucacaagucaucuguu

SEQ ID NO: 1020271 - RNA, 19 nt, Human
uucaagggcaacaagguca

SEQ ID NO: 1020272 - RNA, 24 nt, Human
uucaaguuucaagggcaacaaggu

SEQ ID NO: 1020273 - RNA, 23 nt, Human
uucacaguuuggugcauaccaau

SEQ ID NO: 1020274 - RNA, 21 nt, Human
uucauauucuuuccuucaauu

SEQ ID NO: 1020275 - RNA, 20 nt, Human
uugccagaguaagaaaagag

SEQ ID NO: 1020276 - RNA, 22 nt, Human
uuuacccacauccagacccacc

SEQ ID NO: 1020277 - RNA, 20 nt, Human
uuucaagggcaacaagguca

SEQ ID NO: 1020278 - RNA, 20 nt, Human
uuugcacauccacacugugg

SEQ ID NO: 1020279 - RNA, 20 nt, Human
uuuguggaauaucauccccu

SEQ ID NO: 1020280 - RNA, 24 nt, Human
uuuguuacucccaaacaaaauaag

SEQ ID NO: 1020281 - RNA, 24 nt, Human
uuuucaguucccccucuugaguuu

SEQ ID NO: 1020282 - RNA, 20 nt, Human
uuuuucauacaacuacagaa

SEQ ID NO: 1020283 - RNA, 21 nt, Human
uuuuuugcuguuggccaugac

SEQ ID NO: 1020284 - RNA, 25 nt, Human
aaagacacaauccccaauuuccccc

SEQ ID NO: 1020285 - RNA, 22 nt, Human
acagggaaagacacaaucccca

SEQ ID NO: 1020286 - RNA, 19 nt, Human
acccugaggucaccucaga

SEQ ID NO: 1020287 - RNA, 27 nt, Human
accucccucacaaugagcccccauuag

SEQ ID NO: 1020288 - RNA, 18 nt, Human
agcccggggccgggggcu

SEQ ID NO: 1020289 - RNA, 22 nt, Human
agcccggggccgggggcuccca

SEQ ID NO: 1020290 - RNA, 18 nt, Human
aggaagaaguaucaaaaa

SEQ ID NO: 1020291 - RNA, 19 nt, Human
aggcgcggccggcuccggc

SEQ ID NO: 1020292 - RNA, 20 nt, Human
aucugcgccaggacuucccc

SEQ ID NO: 1020293 - RNA, 23 nt, Human
cacccugaggucaccucagagac

SEQ ID NO: 1020294 - RNA, 20 nt, Human
cacccuggggcaggguggac

SEQ ID NO: 1020295 - RNA, 19 nt, Human
caccucccucacaaugagc

SEQ ID NO: 1020296 - RNA, 21 nt, Human
caccuuggcuuuaaaaagacc

SEQ ID NO: 1020297 - RNA, 26 nt, Human
caccuuggcuuuaaaaagaccaagag

SEQ ID NO: 1020298 - RNA, 18 nt, Human
cagcccaggcgcggccgg

SEQ ID NO: 1020299 - RNA, 21 nt, Human
cagccgugcccgccuacgaag

SEQ ID NO: 1020300 - RNA, 24 nt, Human
caggagcccggggccgggggcucc

SEQ ID NO: 1020301 - RNA, 20 nt, Human
caggcgccgccacgccggcc

SEQ ID NO: 1020302 - RNA, 18 nt, Human
ccagcccaggcgcggccg

SEQ ID NO: 1020303 - RNA, 25 nt, Human
cccaaaugcuccuacugaauguccc

SEQ ID NO: 1020304 - RNA, 20 nt, Human
cccgccuacgaaggcgcccu

SEQ ID NO: 1020305 - RNA, 20 nt, Human
ccggccccguggcccaucug

SEQ ID NO: 1020306 - RNA, 23 nt, Human
ccggccccguggcccaucugcgc

SEQ ID NO: 1020307 - RNA, 19 nt, Human
ccucagagacuugccaucc

SEQ ID NO: 1020308 - RNA, 23 nt, Human
ccucugaauaugccaccucaccu

SEQ ID NO: 1020309 - RNA, 18 nt, Human
ccucugccaauuccuggg

SEQ ID NO: 1020310 - RNA, 26 nt, Human
ccucugcugccucugcaccucccuca

SEQ ID NO: 1020311 - RNA, 20 nt, Human
ccucuggagucaggaacaag

SEQ ID NO: 1020312 - RNA, 23 nt, Human
ccugaagauauuuauucccaucc

SEQ ID NO: 1020313 - RNA, 21 nt, Human
cgaaggcgcccugaacccaug

SEQ ID NO: 1020314 - RNA, 22 nt, Human
cgaggagccccgcuccagccca

SEQ ID NO: 1020315 - RNA, 22 nt, Human
cgaggcaggaaccgagcgccac

SEQ ID NO: 1020316 - RNA, 23 nt, Human
cgccacgcuucucacccuauaua

SEQ ID NO: 1020317 - RNA, 21 nt, Human
cgccagcaggagcccggggcc

SEQ ID NO: 1020318 - RNA, 22 nt, Human
cgccaggacuuccccgaggcag

SEQ ID NO: 1020319 - RNA, 20 nt, Human
cgccuuagcccgaaaccagc

SEQ ID NO: 1020320 - RNA, 18 nt, Human
cgcggccggcuccggcgc

SEQ ID NO: 1020321 - RNA, 21 nt, Human
cggcgccagcaggagcccggg

SEQ ID NO: 1020322 - RNA, 25 nt, Human
cggcuccggcgccuaggccucaguc

SEQ ID NO: 1020323 - RNA, 21 nt, Human
cuacgaaggcgcccugaaccc

SEQ ID NO: 1020324 - RNA, 20 nt, Human
cuacuuccucugccaauucc

SEQ ID NO: 1020325 - RNA, 20 nt, Human
cucucguuccucuggaguca

SEQ ID NO: 1020326 - RNA, 19 nt, Human
cugcaccucccucacaaug

SEQ ID NO: 1020327 - RNA, 20 nt, Human
gaagauauuuauucccaucc

SEQ ID NO: 1020328 - RNA, 22 nt, Human
gccccgcuccagcccaggcgcg

SEQ ID NO: 1020329 - RNA, 21 nt, Human
gccccguggcccaucugcgcc

SEQ ID NO: 1020330 - RNA, 22 nt, Human
ggcgccagcaggagcccggggc

SEQ ID NO: 1020331 - RNA, 18 nt, Human
ggcuuuaaaaagaccaag

SEQ ID NO: 1020332 - RNA, 18 nt, Human
ggucauauuuacaugugu

SEQ ID NO: 1020333 - RNA, 19 nt, Human
uaaaaagaccaagagggua

SEQ ID NO: 1020334 - RNA, 20 nt, Human
uaggccucagucggucccag

SEQ ID NO: 1020335 - RNA, 24 nt, Human
uauuuuucucacacaggugggggg

SEQ ID NO: 1020336 - RNA, 22 nt, Human
ucaggggccccggaagcccaaa

SEQ ID NO: 1020337 - RNA, 20 nt, Human
uccagggaaucucucuuucc

SEQ ID NO: 1020338 - RNA, 27 nt, Human
ucccaaaugaggaagaaguaucaaaaa

SEQ ID NO: 1020339 - RNA, 22 nt, Human
ucccaacuggggccuucgggac

SEQ ID NO: 1020340 - RNA, 21 nt, Human
ucccaggcgccgccacgccgg

SEQ ID NO: 1020341 - RNA, 21 nt, Human
ucccaggguacuuggccccuc

SEQ ID NO: 1020342 - RNA, 22 nt, Human
ucccaggguacuuggccccucu

SEQ ID NO: 1020343 - RNA, 20 nt, Human
ucccucacaaugagccccca

SEQ ID NO: 1020344 - RNA, 19 nt, Human
uccucugcugccucugcac

SEQ ID NO: 1020345 - RNA, 18 nt, Human
ucucaggggccccggaag

SEQ ID NO: 1020346 - RNA, 21 nt, Human
ucucaggggccccggaagccc

SEQ ID NO: 1020347 - RNA, 23 nt, Human
ucucaggggccccggaagcccaa

SEQ ID NO: 1020348 - RNA, 24 nt, Human
ucugcgccaggacuuccccgaggc

SEQ ID NO: 1020349 - RNA, 28 nt, Human
ucuggagucaggaacaagaccggggucc

SEQ ID NO: 1020350 - RNA, 18 nt, Human
ugaccugcaaauuccacc

SEQ ID NO: 1020351 - RNA, 28 nt, Human
ugcaaauuccaccuuauuauugcccuug

SEQ ID NO: 1020352 - RNA, 24 nt, Human
ugcugccucugcaccucccucaca

SEQ ID NO: 1020353 - RNA, 19 nt, Human
uggaaugcucucguuccuc

SEQ ID NO: 1020354 - RNA, 23 nt, Human
uggaaugcucucguuccucugga

SEQ ID NO: 1020355 - RNA, 18 nt, Human
uggauucccaaacuuguu

SEQ ID NO: 1020356 - RNA, 23 nt, Human
ugggcugaccugcaaauuccacc

SEQ ID NO: 1020357 - RNA, 26 nt, Human
uugggccucugguuccuuuuugucug

SEQ ID NO: 1020358 - RNA, 19 nt, Human
uuuauuuuucucacacagg

SEQ ID NO: 1020359 - RNA, 23 nt, Human
uuucaguuuuaugccaauccucu

SEQ ID NO: 1020360 - RNA, 20 nt, Human
aaaaaggcuuguacuccaaa

SEQ ID NO: 1020361 - RNA, 24 nt, Human
aaaguguugggauuacaggcguga

SEQ ID NO: 1020362 - RNA, 23 nt, Human
aacauucugagacugcuagacuc

SEQ ID NO: 1020363 - RNA, 23 nt, Human
aacugaaacuuuuaauacaccaa

SEQ ID NO: 1020364 - RNA, 21 nt, Human
aaguguugggauuacaggcgu

SEQ ID NO: 1020365 - RNA, 26 nt, Human
aaguguugggauuacaggcgugagcc

SEQ ID NO: 1020366 - RNA, 19 nt, Human
aaucauagcucacugcagc

SEQ ID NO: 1020367 - RNA, 22 nt, Human
aaugcaguggcagaucucggcu

SEQ ID NO: 1020368 - RNA, 23 nt, Human
aaugcaguggcagaucucggcuc

SEQ ID NO: 1020369 - RNA, 18 nt, Human
acaggguuucaccauguu

SEQ ID NO: 1020370 - RNA, 20 nt, Human
acaggguuucaccauguugg

SEQ ID NO: 1020371 - RNA, 24 nt, Human
acaggguuucaccauguuggucag

SEQ ID NO: 1020372 - RNA, 18 nt, Human
accauguuggucaggcug

SEQ ID NO: 1020373 - RNA, 25 nt, Human
acucuguugcccaggcuggaaugca

SEQ ID NO: 1020374 - RNA, 19 nt, Human
acugcagccucaaacuccu

SEQ ID NO: 1020375 - RNA, 18 nt, Human
agccucccgaauagcugg

SEQ ID NO: 1020376 - RNA, 24 nt, Human
aggcuggaaugcaguggcagaucu

SEQ ID NO: 1020377 - RNA, 24 nt, Human
agugauucucaugccucagccucc

SEQ ID NO: 1020378 - RNA, 23 nt, Human
agugcaaugguggaaucauagcu

SEQ ID NO: 1020379 - RNA, 18 nt, Human
auagcucacugcagccuc

SEQ ID NO: 1020380 - RNA, 22 nt, Human
augccucagccucccgaauagc

SEQ ID NO: 1020381 - RNA, 23 nt, Human
augccucagccucccgaauagcu

SEQ ID NO: 1020382 - RNA, 21 nt, Human
auuuuuuauuuuuugguagag

SEQ ID NO: 1020383 - RNA, 24 nt, Human
auuuuuuauuuuuugguagagaca

SEQ ID NO: 1020384 - RNA, 24 nt, Human
caaaguguugggauuacaggcgug

SEQ ID NO: 1020385 - RNA, 23 nt, Human
caacccccaccucccagguucaa

SEQ ID NO: 1020386 - RNA, 24 nt, Human
caacccccaccucccagguucaag

SEQ ID NO: 1020387 - RNA, 22 nt, Human
caagugauucucaugccucagc

SEQ ID NO: 1020388 - RNA, 28 nt, Human
caagugauucucaugccucagccucccg

SEQ ID NO: 1020389 - RNA, 18 nt, Human
caccauguuggucaggcu

SEQ ID NO: 1020390 - RNA, 22 nt, Human
caccggaccgcugugaagccuc

SEQ ID NO: 1020391 - RNA, 24 nt, Human
cacucuguugcccaggcuggaaug

SEQ ID NO: 1020392 - RNA, 22 nt, Human
cagaacucuaaaauguuuguua

SEQ ID NO: 1020393 - RNA, 18 nt, Human
cagaauccuggagaacau

SEQ ID NO: 1020394 - RNA, 24 nt, Human
cagccucaaacuccugggcucaaa

SEQ ID NO: 1020395 - RNA, 22 nt, Human
caggaauaagguuucuccccag

SEQ ID NO: 1020396 - RNA, 23 nt, Human
cagggucuugcucuguugcccag

SEQ ID NO: 1020397 - RNA, 24 nt, Human
caggguuucaccauguuggucagg

SEQ ID NO: 1020398 - RNA, 24 nt, Human
caguguggacucuuugguguuuaa

SEQ ID NO: 1020399 - RNA, 22 nt, Human
ccaaaguguugggauuacaggc

SEQ ID NO: 1020400 - RNA, 22 nt, Human
ccaaaguguugggauuacaggc

SEQ ID NO: 1020401 - RNA, 24 nt, Human
ccaaaguguugggauuacaggcgu

SEQ ID NO: 1020402 - RNA, 19 nt, Human
ccacaucugccucccaaag

SEQ ID NO: 1020403 - RNA, 24 nt, Human
ccaccucccagguucaagugauuc

SEQ ID NO: 1020404 - RNA, 25 nt, Human
ccaguggccuuuccacacuuauccc

SEQ ID NO: 1020405 - RNA, 20 nt, Human
cccagguucaagugauucuc

SEQ ID NO: 1020406 - RNA, 23 nt, Human
cccagguucaagugauucucaug

SEQ ID NO: 1020407 - RNA, 22 nt, Human
cccccaccucccagguucaagu

SEQ ID NO: 1020408 - RNA, 24 nt, Human
cccgaauagcugggacuacaggcg

SEQ ID NO: 1020409 - RNA, 22 nt, Human
ccucccagguucaagugauucu

SEQ ID NO: 1020410 - RNA, 22 nt, Human
ccugcaacccccaccucccagg

SEQ ID NO: 1020411 - RNA, 24 nt, Human
ccugggcucaaaugaugcuucccc

SEQ ID NO: 1020412 - RNA, 25 nt, Human
ccuguccgcucuaggaaucugggag

SEQ ID NO: 1020413 - RNA, 19 nt, Human
cgcccuguccgcucuagga

SEQ ID NO: 1020414 - RNA, 18 nt, Human
cggcucccugcaaccccc

SEQ ID NO: 1020415 - RNA, 24 nt, Human
cucaaaugaugcuuccacaucugc

SEQ ID NO: 1020416 - RNA, 21 nt, Human
cucacugcagccucaaacucc

SEQ ID NO: 1020417 - RNA, 24 nt, Human
cucacugcagccucaaacuccugg

SEQ ID NO: 1020418 - RNA, 18 nt, Human
cucccagguucaagugau

SEQ ID NO: 1020419 - RNA, 20 nt, Human
cucccaugugguauuggugg

SEQ ID NO: 1020420 - RNA, 24 nt, Human
cucccgaauagcugggacuacagg

SEQ ID NO: 1020421 - RNA, 24 nt, Human
cucccugcaacccccaccucccag

SEQ ID NO: 1020422 - RNA, 24 nt, Human
cuccugggcucaaaugaugcuucc

SEQ ID NO: 1020423 - RNA, 18 nt, Human
cugauguuuaaccagauc

SEQ ID NO: 1020424 - RNA, 21 nt, Human
cugcaacccccaccucccagg

SEQ ID NO: 1020425 - RNA, 23 nt, Human
cugcaacccccaccucccagguu

SEQ ID NO: 1020426 - RNA, 24 nt, Human
cugcaacccccaccucccagguuc

SEQ ID NO: 1020427 - RNA, 23 nt, Human
cugcagccucaaacuccugggcu

SEQ ID NO: 1020428 - RNA, 24 nt, Human
cuggaaugcaguggcagaucucgg

SEQ ID NO: 1020429 - RNA, 18 nt, Human
cugguuacaaguauaagg

SEQ ID NO: 1020430 - RNA, 18 nt, Human
cuuguacuccaaacaaag

SEQ ID NO: 1020431 - RNA, 26 nt, Human
gaauagcugggacuacaggcgccugc

SEQ ID NO: 1020432 - RNA, 24 nt, Human
gacuacaggcgccugccaccaugc

SEQ ID NO: 1020433 - RNA, 24 nt, Human
gaucucggcucccugcaaccccca

SEQ ID NO: 1020434 - RNA, 18 nt, Human
gauuacaggcgugagcca

SEQ ID NO: 1020435 - RNA, 21 nt, Human
gauuacaggcgugagccacca

SEQ ID NO: 1020436 - RNA, 24 nt, Human
gauuacaggcgugagccaccauac

SEQ ID NO: 1020437 - RNA, 20 nt, Human
gcccaggcuggaaugcagug

SEQ ID NO: 1020438 - RNA, 27 nt, Human
gcucuguugcccagacuggagugcaau

SEQ ID NO: 1020439 - RNA, 19 nt, Human
ggauuacaggcgugagcca

SEQ ID NO: 1020440 - RNA, 22 nt, Human
ggguuucaccauguuggucagg

SEQ ID NO: 1020441 - RNA, 21 nt, Human
gguagagacaggguuucacca

SEQ ID NO: 1020442 - RNA, 21 nt, Human
guagagacaggguuucaccau

SEQ ID NO: 1020443 - RNA, 22 nt, Human
guagagacaggguuucaccaug

SEQ ID NO: 1020444 - RNA, 24 nt, Human
gugauucucaugccucagccuccc

SEQ ID NO: 1020445 - RNA, 25 nt, Human
uaaccagaucugagcgcuggcuaaa

SEQ ID NO: 1020446 - RNA, 18 nt, Human
uaagguuucucacagugc

SEQ ID NO: 1020447 - RNA, 27 nt, Human
uacaggcgugagccaccauacguaucc

SEQ ID NO: 1020448 - RNA, 22 nt, Human
uagagacaggguuucaccaugu

SEQ ID NO: 1020449 - RNA, 24 nt, Human
uagcucacugcagccucaaacucc

SEQ ID NO: 1020450 - RNA, 27 nt, Human
ucacacccggcgaaccugguggaccuc

SEQ ID NO: 1020451 - RNA, 24 nt, Human
ucacugcagccucaaacuccuggg

SEQ ID NO: 1020452 - RNA, 20 nt, Human
ucagccucccgaauagcugg

SEQ ID NO: 1020453 - RNA, 24 nt, Human
ucccaaaguguugggauuacaggc

SEQ ID NO: 1020454 - RNA, 21 nt, Human
ucccagguucaagugauucuc

SEQ ID NO: 1020455 - RNA, 24 nt, Human
ucccagguucaagugauucucaug

SEQ ID NO: 1020456 - RNA, 24 nt, Human
ucccgaauagcugggacuacaggc

SEQ ID NO: 1020457 - RNA, 18 nt, Human
ucccugcaacccccaccu

SEQ ID NO: 1020458 - RNA, 24 nt, Human
ucccugcaacccccaccucccagg

SEQ ID NO: 1020459 - RNA, 22 nt, Human
uccuggagaacauucugagacu

SEQ ID NO: 1020460 - RNA, 23 nt, Human
ucucacucuguugcccaggcugg

SEQ ID NO: 1020461 - RNA, 24 nt, Human
ucucacucuguugcccaggcugga

SEQ ID NO: 1020462 - RNA, 26 nt, Human
ucucacucuguugcccaggcuggaau

SEQ ID NO: 1020463 - RNA, 27 nt, Human
ucucacucuguugcccaggcuggaaug

SEQ ID NO: 1020464 - RNA, 19 nt, Human
ucugagcuccaacugaaac

SEQ ID NO: 1020465 - RNA, 24 nt, Human
ucuguugcccagacuggagugcaa

SEQ ID NO: 1020466 - RNA, 18 nt, Human
ucuguugcccaggcugga

SEQ ID NO: 1020467 - RNA, 24 nt, Human
ucuguugcccaggcuggaaugcag

SEQ ID NO: 1020468 - RNA, 24 nt, Human
ucuugcucuguugcccagacugga

SEQ ID NO: 1020469 - RNA, 19 nt, Human
ucuuggucuuguucucacc

SEQ ID NO: 1020470 - RNA, 21 nt, Human
ucuuugccuucagaauccugg

SEQ ID NO: 1020471 - RNA, 24 nt, Human
ugacugaaggcuuucccacacuca

SEQ ID NO: 1020472 - RNA, 21 nt, Human
ugcaguggcagaucucggcuc

SEQ ID NO: 1020473 - RNA, 21 nt, Human
ugcccagacuggagugcaaug

SEQ ID NO: 1020474 - RNA, 24 nt, Human
ugcccaggcuggaaugcaguggca

SEQ ID NO: 1020475 - RNA, 27 nt, Human
ugccucagccucccgaauagcugggac

SEQ ID NO: 1020476 - RNA, 24 nt, Human
ugcucuguugcccagacuggagug

SEQ ID NO: 1020477 - RNA, 23 nt, Human
uggaaugcaguggcagaucucgg

SEQ ID NO: 1020478 - RNA, 20 nt, Human
uggagugcaaugguggaauc

SEQ ID NO: 1020479 - RNA, 21 nt, Human
uggagugcaaugguggaauca

SEQ ID NO: 1020480 - RNA, 23 nt, Human
uggcuuuccaaucuuggucuugu

SEQ ID NO: 1020481 - RNA, 21 nt, Human
ugggacuacaggcgccugcca

SEQ ID NO: 1020482 - RNA, 22 nt, Human
ugggacuacaggcgccugccac

SEQ ID NO: 1020483 - RNA, 24 nt, Human
ugggacuacaggcgccugccacca

SEQ ID NO: 1020484 - RNA, 25 nt, Human
ugggacuacaggcgccugccaccau

SEQ ID NO: 1020485 - RNA, 18 nt, Human
ugggauuacaggcgugag

SEQ ID NO: 1020486 - RNA, 22 nt, Human
ugggauuacaggcgugagccac

SEQ ID NO: 1020487 - RNA, 23 nt, Human
ugggauuacaggcgugagccacc

SEQ ID NO: 1020488 - RNA, 24 nt, Human
ugggauuacaggcgugagccacca

SEQ ID NO: 1020489 - RNA, 25 nt, Human
ugggauuacaggcgugagccaccau

SEQ ID NO: 1020490 - RNA, 24 nt, Human
ugguagagacaggguuucaccaug

SEQ ID NO: 1020491 - RNA, 24 nt, Human
ugguggaaucauagcucacugcag

SEQ ID NO: 1020492 - RNA, 22 nt, Human
ugugguauuggugguuuuuuuu

SEQ ID NO: 1020493 - RNA, 20 nt, Human
uguugcccagacuggagugc

SEQ ID NO: 1020494 - RNA, 24 nt, Human
uuaaccuuucauuacaaaaacuga

SEQ ID NO: 1020495 - RNA, 23 nt, Human
uucaagugauucucaugccucag

SEQ ID NO: 1020496 - RNA, 19 nt, Human
uucccacacucaucacauu

SEQ ID NO: 1020497 - RNA, 18 nt, Human
uugcccagacuggagugc

SEQ ID NO: 1020498 - RNA, 24 nt, Human
uugguagagacaggguuucaccau

SEQ ID NO: 1020499 - RNA, 25 nt, Human
uuggugguuuuuuuuuuuuuuuaaa

SEQ ID NO: 1020500 - RNA, 21 nt, Human
uuucaccauguuggucaggcu

SEQ ID NO: 1020501 - RNA, 21 nt, Human
uuugccuucagaauccuggag

SEQ ID NO: 1020502 - RNA, 24 nt, Human
uuuuugguagagacaggguuucac

SEQ ID NO: 1020503 - RNA, 23 nt, Human
uuuuuugguagagacaggguuuc

SEQ ID NO: 1020504 - RNA, 27 nt, Human
uuuuuuuuuuuuaaauagacagggucu

SEQ ID NO: 1020505 - RNA, 27 nt, Human
uuuuuuuuuuuuuuuaaauagacaggg

SEQ ID NO: 1020506 - RNA, 20 nt, Human
aaagccuuuccacacuguaa

SEQ ID NO: 1020507 - RNA, 18 nt, Human
accagaugguaagauguu

SEQ ID NO: 1020508 - RNA, 24 nt, Human
agaugacaaaugaugaucuaaaac

SEQ ID NO: 1020509 - RNA, 20 nt, Human
aggucuuuucgaaugcuaaa

SEQ ID NO: 1020510 - RNA, 20 nt, Human
cggguaaaagccuuuccaca

SEQ ID NO: 1020511 - RNA, 19 nt, Human
gaccagaugguaagauguu

SEQ ID NO: 1020512 - RNA, 21 nt, Human
uaaacacucauagggcuucuc

SEQ ID NO: 1020513 - RNA, 21 nt, Human
ugucgaaugaggucuuuucga

SEQ ID NO: 1020514 - RNA, 18 nt, Human
accaacucgcugauguua

SEQ ID NO: 1020515 - RNA, 21 nt, Human
cuccaguaugaacuaucuuau

SEQ ID NO: 1020516 - RNA, 19 nt, Human
gagaauauacuaaagccuu

SEQ ID NO: 1020517 - RNA, 25 nt, Human
gagcagauauuaaugacuuuuccau

SEQ ID NO: 1020518 - RNA, 23 nt, Human
uaaauaccaacucgcugauguua

SEQ ID NO: 1020519 - RNA, 21 nt, Human
uacacuaaaggcuuuuccaca

SEQ ID NO: 1020520 - RNA, 21 nt, Human
uaucuuauguuuaguaagggu

SEQ ID NO: 1020521 - RNA, 21 nt, Human
uaucuuauguuuaguaagggu

SEQ ID NO: 1020522 - RNA, 19 nt, Human
uccacuucugggaguuuuc

SEQ ID NO: 1020523 - RNA, 20 nt, Human
ucucuccaguaugaacuauc

SEQ ID NO: 1020524 - RNA, 20 nt, Human
ucucuccaguaugaauuauc

SEQ ID NO: 1020525 - RNA, 21 nt, Human
ucucuuauguucaguaagggu

SEQ ID NO: 1020526 - RNA, 21 nt, Human
ucucuuauguuuaguaagagu

SEQ ID NO: 1020527 - RNA, 19 nt, Human
ucuuaugucuaguaagggu

SEQ ID NO: 1020528 - RNA, 23 nt, Human
ugagaaugcccuaaaggcacugc

SEQ ID NO: 1020529 - RNA, 22 nt, Human
ugccacauucuucacauuugua

SEQ ID NO: 1020530 - RNA, 23 nt, Human
uguaggguuucucuccaguauga

SEQ ID NO: 1020531 - RNA, 23 nt, Human
uguaggguuucucuccaguauga

SEQ ID NO: 1020532 - RNA, 23 nt, Human
uguaggguuucucuccaguauga

SEQ ID NO: 1020533 - RNA, 22 nt, Human
ugugcaauaaggaaaacuccac

SEQ ID NO: 1020534 - RNA, 22 nt, Human
uucucuuauguuuaguaagagu

SEQ ID NO: 1020535 - RNA, 20 nt, Human
uugagaauauacuaaagccu

SEQ ID NO: 1020536 - RNA, 22 nt, Human
uuguaugguuucucuuuaguau

SEQ ID NO: 1020537 - RNA, 19 nt, Human
uuuguaagguuucucucca

SEQ ID NO: 1020538 - RNA, 19 nt, Human
uuuguaggguuucucucca

SEQ ID NO: 1020539 - RNA, 19 nt, Human
uuuguaggguuucucucca

SEQ ID NO: 1020540 - RNA, 19 nt, Human
uuuguaggguuucucucca

SEQ ID NO: 1020541 - RNA, 18 nt, Human
aaauaugaaaaguugcau

SEQ ID NO: 1020542 - RNA, 28 nt, Human
auaaaacaaaauuacauuagaagaccuc

SEQ ID NO: 1020543 - RNA, 20 nt, Human
aucacgcuaacaaaauaaac

SEQ ID NO: 1020544 - RNA, 24 nt, Human
caaaauaaacuaaauaugaaaagu

SEQ ID NO: 1020545 - RNA, 20 nt, Human
cccggaggaggcgcucgugc

SEQ ID NO: 1020546 - RNA, 31 nt, Human
cucaaaauaaaacaaaauuacauuagaagaa

SEQ ID NO: 1020547 - RNA, 22 nt, Human
uaaaaucacgcuaacaaaauaa

SEQ ID NO: 1020548 - RNA, 26 nt, Human
uaauacaaacagagcuaaaaucacgg

SEQ ID NO: 1020549 - RNA, 25 nt, Human
ucacauuauucuuaauaggaucgug

SEQ ID NO: 1020550 - RNA, 20 nt, Human
ucguguagaaacauuccaau

SEQ ID NO: 1020551 - RNA, 21 nt, Human
aaaaaggggucugaggaaagc

SEQ ID NO: 1020552 - RNA, 18 nt, Human
aaacaaggguccuggggc

SEQ ID NO: 1020553 - RNA, 22 nt, Human
aaacaaggguccuggggcauag

SEQ ID NO: 1020554 - RNA, 20 nt, Human
aaagcgcuauugaaacgcga

SEQ ID NO: 1020555 - RNA, 21 nt, Human
accaggaaaggaagagagacc

SEQ ID NO: 1020556 - RNA, 21 nt, Human
accccacccggugccaggcca

SEQ ID NO: 1020557 - RNA, 18 nt, Human
accggagugcaaugccug

SEQ ID NO: 1020558 - RNA, 23 nt, Human
agaagaacguuuuccaggcgccu

SEQ ID NO: 1020559 - RNA, 22 nt, Human
agaccaggaaaggaagagagac

SEQ ID NO: 1020560 - RNA, 18 nt, Human
agcaaaagccucucccuc

SEQ ID NO: 1020561 - RNA, 20 nt, Human
agcggagcagcguagaugag

SEQ ID NO: 1020562 - RNA, 19 nt, Human
aggaacgccggacccacgg

SEQ ID NO: 1020563 - RNA, 19 nt, Human
aggaacgccggacccacgg

SEQ ID NO: 1020564 - RNA, 20 nt, Human
aggaagagagaccaggaggg

SEQ ID NO: 1020565 - RNA, 22 nt, Human
aggcucagacucuagcacccac

SEQ ID NO: 1020566 - RNA, 23 nt, Human
aggcuggggccgaggcggcacca

SEQ ID NO: 1020567 - RNA, 19 nt, Human
auaaagcgcuauugaaacg

SEQ ID NO: 1020568 - RNA, 21 nt, Human
aucauggugaggucugaccug

SEQ ID NO: 1020569 - RNA, 23 nt, Human
aucauggugaggucugaccuggg

SEQ ID NO: 1020570 - RNA, 21 nt, Human
aucccugccccacccugggga

SEQ ID NO: 1020571 - RNA, 20 nt, Human
augcugcugcaccagauuga

SEQ ID NO: 1020572 - RNA, 18 nt, Human
caagggcagggaaaguca

SEQ ID NO: 1020573 - RNA, 21 nt, Human
caccaauugggaggcccaggg

SEQ ID NO: 1020574 - RNA, 21 nt, Human
caccaggaaaauccuacccca

SEQ ID NO: 1020575 - RNA, 19 nt, Human
cacccggcaaggugguugg

SEQ ID NO: 1020576 - RNA, 18 nt, Human
cagauugaggggcugggg

SEQ ID NO: 1020577 - RNA, 21 nt, Human
cagcucugugaacaugcaguc

SEQ ID NO: 1020578 - RNA, 18 nt, Human
caggccagcagcuucccg

SEQ ID NO: 1020579 - RNA, 24 nt, Human
caugcagucugcaaucuggauacc

SEQ ID NO: 1020580 - RNA, 21 nt, Human
cauggugaggucugaccuggg

SEQ ID NO: 1020581 - RNA, 24 nt, Human
ccagcagcuucccgagcagcggag

SEQ ID NO: 1020582 - RNA, 19 nt, Human
ccaggcgccuucccccucu

SEQ ID NO: 1020583 - RNA, 18 nt, Human
cccacccuggggaccccc

SEQ ID NO: 1020584 - RNA, 21 nt, Human
cccagggcaggagagccugag

SEQ ID NO: 1020585 - RNA, 18 nt, Human
cccauggagaaagagccc

SEQ ID NO: 1020586 - RNA, 19 nt, Human
ccccacccuggggaccccc

SEQ ID NO: 1020587 - RNA, 18 nt, Human
ccccaggagcuggccucc

SEQ ID NO: 1020588 - RNA, 24 nt, Human
cccccaaccggagugcaaugccug

SEQ ID NO: 1020589 - RNA, 21 nt, Human
cccccuggcucuuccccagca

SEQ ID NO: 1020590 - RNA, 23 nt, Human
cccccuggcucuuccccagcagc

SEQ ID NO: 1020591 - RNA, 23 nt, Human
ccccgcucgggucggccagggag

SEQ ID NO: 1020592 - RNA, 18 nt, Human
cccguaggagcaaacagu

SEQ ID NO: 1020593 - RNA, 20 nt, Human
cccugccccacccuggggag

SEQ ID NO: 1020594 - RNA, 20 nt, Human
ccggacccacggcaagggca

SEQ ID NO: 1020595 - RNA, 22 nt, Human
ccuccugucgcuucugguuuua

SEQ ID NO: 1020596 - RNA, 30 nt, Human
ccucgccccucugcccugggagaacuggaa

SEQ ID NO: 1020597 - RNA, 20 nt, Human
ccucucacuuuacucgguca

SEQ ID NO: 1020598 - RNA, 23 nt, Human
ccucugaauguacaaccuggggc

SEQ ID NO: 1020599 - RNA, 23 nt, Human
ccugucgcuucugguuuuauccg

SEQ ID NO: 1020600 - RNA, 22 nt, Human
ccuuugggcgcuucccgaggcg

SEQ ID NO: 1020601 - RNA, 22 nt, Human
ccuuuuauuuaaugucaagaau

SEQ ID NO: 1020602 - RNA, 20 nt, Human
cgcccggagcuauggagcag

SEQ ID NO: 1020603 - RNA, 20 nt, Human
cggcugcccacugugauccc

SEQ ID NO: 1020604 - RNA, 18 nt, Human
cguagccaaucuguuccc

SEQ ID NO: 1020605 - RNA, 25 nt, Human
cucccucgccccucugcccugggag

SEQ ID NO: 1020606 - RNA, 21 nt, Human
cuccguccggcccugcccucc

SEQ ID NO: 1020607 - RNA, 23 nt, Human
cucgcggucccccuggcucuucc

SEQ ID NO: 1020608 - RNA, 19 nt, Human
cugccugugggggaccagg

SEQ ID NO: 1020609 - RNA, 20 nt, Human
cuucgggacucccugguggc

SEQ ID NO: 1020610 - RNA, 19 nt, Human
cuucugguuuuauccgugg

SEQ ID NO: 1020611 - RNA, 23 nt, Human
gaacaugcagucugcaaucugga

SEQ ID NO: 1020612 - RNA, 21 nt, Human
gacacaaacaaggguccuggg

SEQ ID NO: 1020613 - RNA, 18 nt, Human
gacaggcuggggccgagg

SEQ ID NO: 1020614 - RNA, 22 nt, Human
gagaaagagcccucugaauggu

SEQ ID NO: 1020615 - RNA, 22 nt, Human
gagcagcggagguaggcggaga

SEQ ID NO: 1020616 - RNA, 20 nt, Human
gagcugggcguccauucaga

SEQ ID NO: 1020617 - RNA, 20 nt, Human
gaggcccagggcaggagagc

SEQ ID NO: 1020618 - RNA, 20 nt, Human
gagugcuguuccccgcucgg

SEQ ID NO: 1020619 - RNA, 19 nt, Human
ggacaggcuggggccgagg

SEQ ID NO: 1020620 - RNA, 21 nt, Human
ggcagcgcgcgccccuucccg

SEQ ID NO: 1020621 - RNA, 21 nt, Human
ggcccugcccucccccagccc

SEQ ID NO: 1020622 - RNA, 21 nt, Human
ggccggacagcuccaucuaca

SEQ ID NO: 1020623 - RNA, 24 nt, Human
ggccggacagcuccaucuacagcc

SEQ ID NO: 1020624 - RNA, 28 nt, Human
ggcuggggccgaggcggcaccaggagcu

SEQ ID NO: 1020625 - RNA, 19 nt, Human
gggcaggagagccugaggc

SEQ ID NO: 1020626 - RNA, 20 nt, Human
ggggcuggggacaggcuggg

SEQ ID NO: 1020627 - RNA, 20 nt, Human
ggugaaccgucucaccugcc

SEQ ID NO: 1020628 - RNA, 24 nt, Human
ggugaaccgucucaccugccucuc

SEQ ID NO: 1020629 - RNA, 22 nt, Human
ggugcucaggccgcccccgauc

SEQ ID NO: 1020630 - RNA, 22 nt, Human
guaggagcaaacaguccccuuc

SEQ ID NO: 1020631 - RNA, 21 nt, Human
guccggcccugcccuccccca

SEQ ID NO: 1020632 - RNA, 21 nt, Human
gucggccagggagaagaagaa

SEQ ID NO: 1020633 - RNA, 24 nt, Human
guucccggcucccaggaaccccag

SEQ ID NO: 1020634 - RNA, 24 nt, Human
uacccuuagcacaucccucggccu

SEQ ID NO: 1020635 - RNA, 26 nt, Human
uacccuuagcacaucccucggccuuc

SEQ ID NO: 1020636 - RNA, 23 nt, Human
uagcacccacuugcccggcgcug

SEQ ID NO: 1020637 - RNA, 19 nt, Human
ucaccaggaaaauccuacc

SEQ ID NO: 1020638 - RNA, 21 nt, Human
uccauguccgugagcacgggc

SEQ ID NO: 1020639 - RNA, 18 nt, Human
ucccauggagaaagagcc

SEQ ID NO: 1020640 - RNA, 18 nt, Human
uccccagcagcugggucc

SEQ ID NO: 1020641 - RNA, 18 nt, Human
uccccagcagcugggucc

SEQ ID NO: 1020642 - RNA, 19 nt, Human
uccccagcagcugggucca

SEQ ID NO: 1020643 - RNA, 24 nt, Human
uccccugaugaccaucuguggccc

SEQ ID NO: 1020644 - RNA, 23 nt, Human
ucccucgccccucugcccuggga

SEQ ID NO: 1020645 - RNA, 24 nt, Human
ucccugccccacccuggggacccc

SEQ ID NO: 1020646 - RNA, 21 nt, Human
ucccuuugcacggcaaaaagg

SEQ ID NO: 1020647 - RNA, 22 nt, Human
uccuaccccaccuaucugagag

SEQ ID NO: 1020648 - RNA, 20 nt, Human
ucggccagggagaagaagaa

SEQ ID NO: 1020649 - RNA, 21 nt, Human
ucucacagcaaaagccucucc

SEQ ID NO: 1020650 - RNA, 24 nt, Human
ucuccuaaccuugggaccugauuu

SEQ ID NO: 1020651 - RNA, 24 nt, Human
ucuguggcccaguggucccagggc

SEQ ID NO: 1020652 - RNA, 20 nt, Human
ugaaggggaauccuuugggc

SEQ ID NO: 1020653 - RNA, 21 nt, Human
ugacaagaugcugcugcaccg

SEQ ID NO: 1020654 - RNA, 18 nt, Human
ugacacaaacaagggucc

SEQ ID NO: 1020655 - RNA, 23 nt, Human
ugacggcuacucucacagcaaaa

SEQ ID NO: 1020656 - RNA, 24 nt, Human
ugaggacacccggcaaggugguug

SEQ ID NO: 1020657 - RNA, 22 nt, Human
ugaggcuuuacuguaggcaagc

SEQ ID NO: 1020658 - RNA, 19 nt, Human
ugcccucccccagcccagc

SEQ ID NO: 1020659 - RNA, 22 nt, Human
uggauaccuuuuauuuaauguc

SEQ ID NO: 1020660 - RNA, 19 nt, Human
ugggaagagacacgugacg

SEQ ID NO: 1020661 - RNA, 18 nt, Human
uggucccagggcacucga

SEQ ID NO: 1020662 - RNA, 21 nt, Human
uggugaggucugaccuggggc

SEQ ID NO: 1020663 - RNA, 18 nt, Human
uuagcacaucccucggcc

SEQ ID NO: 1020664 - RNA, 22 nt, Human
uuccccgcucgggucggccagg

SEQ ID NO: 1020665 - RNA, 21 nt, Human
uuuccaggcgccuucccccuc

SEQ ID NO: 1020666 - RNA, 22 nt, Human
aaacaagagaggggaaaacugg

SEQ ID NO: 1020667 - RNA, 18 nt, Human
aaaucgcuggcuagauuu

SEQ ID NO: 1020668 - RNA, 19 nt, Human
aacccagcauuuuugguuu

SEQ ID NO: 1020669 - RNA, 20 nt, Human
aaccugcuuauggcucaaaa

SEQ ID NO: 1020670 - RNA, 20 nt, Human
aagaaccugcuuauggcuca

SEQ ID NO: 1020671 - RNA, 24 nt, Human
acaacaaagcucugacauaaacaa

SEQ ID NO: 1020672 - RNA, 20 nt, Human
acagugauaaaaccaacuua

SEQ ID NO: 1020673 - RNA, 22 nt, Human
acauugugucuuccugaugaua

SEQ ID NO: 1020674 - RNA, 23 nt, Human
caaaugaaauuagaugcauacag

SEQ ID NO: 1020675 - RNA, 27 nt, Human
caccccaauucagaucucccuggccag

SEQ ID NO: 1020676 - RNA, 21 nt, Human
caugugaacguaacuuagagu

SEQ ID NO: 1020677 - RNA, 22 nt, Human
ccacuuccugccuucccuccug

SEQ ID NO: 1020678 - RNA, 19 nt, Human
cccugaggcuggguccuca

SEQ ID NO: 1020679 - RNA, 21 nt, Human
ccgcuugaagcugucccuggg

SEQ ID NO: 1020680 - RNA, 21 nt, Human
ccgcuugaagcugucccuggg

SEQ ID NO: 1020681 - RNA, 22 nt, Human
ccgcuugaagcugucccugggg

SEQ ID NO: 1020682 - RNA, 24 nt, Human
ccucguggucccacuuccugccuu

SEQ ID NO: 1020683 - RNA, 22 nt, Human
cugucccugggggaaccgggca

SEQ ID NO: 1020684 - RNA, 22 nt, Human
gagauucugcucuucaccccaa

SEQ ID NO: 1020685 - RNA, 21 nt, Human
gcgccuuccaccuaaacacuc

SEQ ID NO: 1020686 - RNA, 23 nt, Human
gggccucguggucccacuuccug

SEQ ID NO: 1020687 - RNA, 27 nt, Human
guaagcccucagccuaaccuacccaau

SEQ ID NO: 1020688 - RNA, 24 nt, Human
uaaacaagagaggggaaaacugga

SEQ ID NO: 1020689 - RNA, 19 nt, Human
uaaggacuuugaacccagc

SEQ ID NO: 1020690 - RNA, 23 nt, Human
uacccaauaagaauuuccuuaca

SEQ ID NO: 1020691 - RNA, 18 nt, Human
uaccgcuugaagcugucc

SEQ ID NO: 1020692 - RNA, 23 nt, Human
ucccugaggcuggguccucagau

SEQ ID NO: 1020693 - RNA, 22 nt, Human
uccuuacaaagugagaggcuua

SEQ ID NO: 1020694 - RNA, 18 nt, Human
uggaagaggugacgcugg

SEQ ID NO: 1020695 - RNA, 18 nt, Human
uggaagaggugacgcugg

SEQ ID NO: 1020696 - RNA, 21 nt, Human
uggaagaggugacgcuggggc

SEQ ID NO: 1020697 - RNA, 23 nt, Human
uggaagaggugacgcuggggcau

SEQ ID NO: 1020698 - RNA, 18 nt, Human
uggccagacgaguuagaa

SEQ ID NO: 1020699 - RNA, 21 nt, Human
uggguccucagaugucugucc

SEQ ID NO: 1020700 - RNA, 22 nt, Human
uggucaucaacauagacagcag

SEQ ID NO: 1020701 - RNA, 24 nt, Human
uguugagggaggaagggaauucua

SEQ ID NO: 1020702 - RNA, 21 nt, Human
uuccacagauagcuauuuggg

SEQ ID NO: 1020703 - RNA, 22 nt, Human
uuccugccuucccuccugggcu

SEQ ID NO: 1020704 - RNA, 24 nt, Human
aagaagucaaguuuccuucuuaaa

SEQ ID NO: 1020705 - RNA, 21 nt, Human
accgaauugaaguuucccuua

SEQ ID NO: 1020706 - RNA, 20 nt, Human
agacaggagagucaaucugg

SEQ ID NO: 1020707 - RNA, 21 nt, Human
agagugucccggccaggagcu

SEQ ID NO: 1020708 - RNA, 24 nt, Human
agccuuagugacaaauucugagcc

SEQ ID NO: 1020709 - RNA, 21 nt, Human
agcggcagcggauccucgggc

SEQ ID NO: 1020710 - RNA, 21 nt, Human
agcggcagcggauccucgggc

SEQ ID NO: 1020711 - RNA, 18 nt, Human
agggauggauaagagacc

SEQ ID NO: 1020712 - RNA, 18 nt, Human
agucccgagcggcagcgg

SEQ ID NO: 1020713 - RNA, 21 nt, Human
caaggacacuauaucaaaggc

SEQ ID NO: 1020714 - RNA, 23 nt, Human
caaggacacuauaucaaaggcug

SEQ ID NO: 1020715 - RNA, 20 nt, Human
cacguuccagcccgguccug

SEQ ID NO: 1020716 - RNA, 21 nt, Human
cacuacuucugauacuucugc

SEQ ID NO: 1020717 - RNA, 21 nt, Human
cagcggauccucgggcuccgc

SEQ ID NO: 1020718 - RNA, 24 nt, Human
cccccgaguauaccaaaggauaag

SEQ ID NO: 1020719 - RNA, 19 nt, Human
ccuggaaccaaucccccga

SEQ ID NO: 1020720 - RNA, 21 nt, Human
cgccacuucccuuccccgcaa

SEQ ID NO: 1020721 - RNA, 19 nt, Human
cuccaguagugagccaagg

SEQ ID NO: 1020722 - RNA, 27 nt, Human
cugcagccgagggcagaaccggggucc

SEQ ID NO: 1020723 - RNA, 18 nt, Human
cuucugauacuucugcug

SEQ ID NO: 1020724 - RNA, 22 nt, Human
gacacauagaaugcacaaaaca

SEQ ID NO: 1020725 - RNA, 22 nt, Human
gcacaaaacaaaauugaaacaa

SEQ ID NO: 1020726 - RNA, 20 nt, Human
gccuuagugacaaauucuga

SEQ ID NO: 1020727 - RNA, 21 nt, Human
gcuagagucacaaggacacua

SEQ ID NO: 1020728 - RNA, 23 nt, Human
ggacacuauaucaaaggcugcug

SEQ ID NO: 1020729 - RNA, 20 nt, Human
ggcucagucccgagcggcag

SEQ ID NO: 1020730 - RNA, 24 nt, Human
uaaguguacuugaaauagagaguu

SEQ ID NO: 1020731 - RNA, 23 nt, Human
uacuucugauacuucugcugagu

SEQ ID NO: 1020732 - RNA, 19 nt, Human
ucauauacacagguuccac

SEQ ID NO: 1020733 - RNA, 25 nt, Human
uccauaccacuacuucugauacuuc

SEQ ID NO: 1020734 - RNA, 23 nt, Human
ucccccgaguauaccaaaggaua

SEQ ID NO: 1020735 - RNA, 20 nt, Human
ugaaauagagaguugaugag

SEQ ID NO: 1020736 - RNA, 21 nt, Human
ugaacagaguuugaaagcaca

SEQ ID NO: 1020737 - RNA, 22 nt, Human
ugaauacccuucacaggguuuc

SEQ ID NO: 1020738 - RNA, 19 nt, Human
ugaauguucugacacauag

SEQ ID NO: 1020739 - RNA, 19 nt, Human
ugagcccagaacuugcaga

SEQ ID NO: 1020740 - RNA, 21 nt, Human
ugaggcuaacauugcuacaga

SEQ ID NO: 1020741 - RNA, 23 nt, Human
ugaguaucuaacauauugcacuu

SEQ ID NO: 1020742 - RNA, 22 nt, Human
ugcacaaaacaaaauugaaacc

SEQ ID NO: 1020743 - RNA, 21 nt, Human
ugcguggcgggcucagucccg

SEQ ID NO: 1020744 - RNA, 20 nt, Human
ugcuacagacaggagaguca

SEQ ID NO: 1020745 - RNA, 22 nt, Human
ugcuugaagucucaugcuagag

SEQ ID NO: 1020746 - RNA, 19 nt, Human
uggaaccaaucccccgagu

SEQ ID NO: 1020747 - RNA, 25 nt, Human
uggcaauauccuuuauuucuccagu

SEQ ID NO: 1020748 - RNA, 19 nt, Human
uuauauccauaccacuacu

SEQ ID NO: 1020749 - RNA, 25 nt, Human
uugaaauagagaguugaugaguuau

SEQ ID NO: 1020750 - RNA, 26 nt, Human
uuuuuuuucaacugaacagaguuuga

SEQ ID NO: 1020751 - RNA, 19 nt, Human
aaauauuaacaaggguacu

SEQ ID NO: 1020752 - RNA, 24 nt, Human
aagauacucugcauaaaugaaaua

SEQ ID NO: 1020753 - RNA, 18 nt, Human
agaguauaaacaugggaa

SEQ ID NO: 1020754 - RNA, 21 nt, Human
caaaugcaaaguauauauuau

SEQ ID NO: 1020755 - RNA, 19 nt, Human
caacaaugaaaacagaaua

SEQ ID NO: 1020756 - RNA, 20 nt, Human
caagaacaaaacagacuugc

SEQ ID NO: 1020757 - RNA, 22 nt, Human
caagaacaaaacagacuugcua

SEQ ID NO: 1020758 - RNA, 21 nt, Human
cucugcauaaaugaaauaaac

SEQ ID NO: 1020759 - RNA, 22 nt, Human
gagcuggaguuaacauuuuucu

SEQ ID NO: 1020760 - RNA, 20 nt, Human
uaaacaugggaaaaugaguu

SEQ ID NO: 1020761 - RNA, 19 nt, Human
uaauuaagucuuuauuuaa

SEQ ID NO: 1020762 - RNA, 23 nt, Human
uacagugugggaagaguauaaac

SEQ ID NO: 1020763 - RNA, 22 nt, Human
uacaugccauaucuacagugug

SEQ ID NO: 1020764 - RNA, 21 nt, Human
uaccaaacuccaagauacucu

SEQ ID NO: 1020765 - RNA, 21 nt, Human
uagaacauucaaguaucuaca

SEQ ID NO: 1020766 - RNA, 20 nt, Human
uaugucuccuuucacccaua

SEQ ID NO: 1020767 - RNA, 23 nt, Human
uauuaucauaagauggaaauuac

SEQ ID NO: 1020768 - RNA, 19 nt, Human
ugaaauaaacucaacuugc

SEQ ID NO: 1020769 - RNA, 19 nt, Human
uggaaauuaccaaacucca

SEQ ID NO: 1020770 - RNA, 25 nt, Human
ugugggaagaguauaaacaugggaa

SEQ ID NO: 1020771 - RNA, 21 nt, Human
uuaccaaacuccaagauacuc

SEQ ID NO: 1020772 - RNA, 20 nt, Human
uuacuuuuauuacaagaaca

SEQ ID NO: 1020773 - RNA, 21 nt, Human
uucacccauaucacaaaugca

SEQ ID NO: 1020774 - RNA, 20 nt, Human
aaaacacagaucaacaaacg

SEQ ID NO: 1020775 - RNA, 25 nt, Human
aaaacacagaucaacaaacggaaug

SEQ ID NO: 1020776 - RNA, 19 nt, Human
aaaauguccaccaggaaac

SEQ ID NO: 1020777 - RNA, 22 nt, Human
aaaucagaagcaaauauggcaa

SEQ ID NO: 1020778 - RNA, 23 nt, Human
aaauguccuuaagcuaaaauuuu

SEQ ID NO: 1020779 - RNA, 21 nt, Human
aacaguuaacaagcuuuacaa

SEQ ID NO: 1020780 - RNA, 21 nt, Human
aagauguaccaauacuggaaa

SEQ ID NO: 1020781 - RNA, 22 nt, Human
acagcaccggagagcacuguac

SEQ ID NO: 1020782 - RNA, 23 nt, Human
accacaaaaauguaucaaauaac

SEQ ID NO: 1020783 - RNA, 24 nt, Human
agaaauaauucucccacaagcaaa

SEQ ID NO: 1020784 - RNA, 18 nt, Human
agaagccaagauguacca

SEQ ID NO: 1020785 - RNA, 21 nt, Human
agagcacuguacaaaaugucc

SEQ ID NO: 1020786 - RNA, 21 nt, Human
agcaaaaaggucagcaucaag

SEQ ID NO: 1020787 - RNA, 22 nt, Human
aggaggcaaacaaaacugggca

SEQ ID NO: 1020788 - RNA, 21 nt, Human
aggcucaaggcuagaagacaa

SEQ ID NO: 1020789 - RNA, 18 nt, Human
auacugaauuuuaccuag

SEQ ID NO: 1020790 - RNA, 21 nt, Human
augcucacuggcuuccccaca

SEQ ID NO: 1020791 - RNA, 23 nt, Human
caaacauuuacaaagcaaucuaa

SEQ ID NO: 1020792 - RNA, 21 nt, Human
caacauauuauuuaagccaca

SEQ ID NO: 1020793 - RNA, 21 nt, Human
caagaaucugaugcccuaaua

SEQ ID NO: 1020794 - RNA, 24 nt, Human
caagcaaaaaggucagcaucaaga

SEQ ID NO: 1020795 - RNA, 18 nt, Human
cacaagcaaaaaggucag

SEQ ID NO: 1020796 - RNA, 20 nt, Human
cagucuuaucuuguaaagcu

SEQ ID NO: 1020797 - RNA, 21 nt, Human
ccacaagcaaaaaggucagca

SEQ ID NO: 1020798 - RNA, 21 nt, Human
cccacauccacacuuucagac

SEQ ID NO: 1020799 - RNA, 19 nt, Human
ccggagagcacuguacaaa

SEQ ID NO: 1020800 - RNA, 18 nt, Human
ccuaauacuaauguggaa

SEQ ID NO: 1020801 - RNA, 18 nt, Human
cuaaaauuuuaagggcug

SEQ ID NO: 1020802 - RNA, 22 nt, Human
cuaaucucaugcaauuuuaaaa

SEQ ID NO: 1020803 - RNA, 22 nt, Human
cucauuuauuucuucccucuca

SEQ ID NO: 1020804 - RNA, 22 nt, Human
cugaaggcugaaaaacauuugc

SEQ ID NO: 1020805 - RNA, 22 nt, Human
cugcaauaaaauuauuccaagu

SEQ ID NO: 1020806 - RNA, 24 nt, Human
cuggucucucaaguaaccuagaua

SEQ ID NO: 1020807 - RNA, 20 nt, Human
gaguggcaaaaggcagguuu

SEQ ID NO: 1020808 - RNA, 25 nt, Human
guacaaaauguccaccaggaaacca

SEQ ID NO: 1020809 - RNA, 22 nt, Human
gucagcaucaagaauuuaauuu

SEQ ID NO: 1020810 - RNA, 20 nt, Human
uaaaacacagaucaacaaac

SEQ ID NO: 1020811 - RNA, 22 nt, Human
uaaaauaaucuacaaauaucag

SEQ ID NO: 1020812 - RNA, 21 nt, Human
uaaaauguccuuaagcuaaaa

SEQ ID NO: 1020813 - RNA, 23 nt, Human
uaacuaccacuccgcuucaugaa

SEQ ID NO: 1020814 - RNA, 21 nt, Human
uaccaauacuggaaagguuuu

SEQ ID NO: 1020815 - RNA, 22 nt, Human
uauguacauacauuggagcaug

SEQ ID NO: 1020816 - RNA, 18 nt, Human
uaugugaaggguacaagg

SEQ ID NO: 1020817 - RNA, 22 nt, Human
uauuuaguauaacuuuggcugg

SEQ ID NO: 1020818 - RNA, 21 nt, Human
ucacaaauuccaauucuguaa

SEQ ID NO: 1020819 - RNA, 18 nt, Human
ucccacaagcaaaaaggu

SEQ ID NO: 1020820 - RNA, 22 nt, Human
uccccacauccacacuuucaga

SEQ ID NO: 1020821 - RNA, 22 nt, Human
ucuacaaauaucagaauacuaa

SEQ ID NO: 1020822 - RNA, 20 nt, Human
ucuauaacucacacauagua

SEQ ID NO: 1020823 - RNA, 21 nt, Human
ucucaaguaaccuagauauua

SEQ ID NO: 1020824 - RNA, 18 nt, Human
ucugaguuucauaacccu

SEQ ID NO: 1020825 - RNA, 18 nt, Human
ugcaacagagaugauuag

SEQ ID NO: 1020826 - RNA, 27 nt, Human
ugcccuaauacuaauguggaaaaacaa

SEQ ID NO: 1020827 - RNA, 25 nt, Human
uggaaagguuuuaaacagucuuauu

SEQ ID NO: 1020828 - RNA, 18 nt, Human
uggcuuccccacauccac

SEQ ID NO: 1020829 - RNA, 28 nt, Human
uguacaaaauguccaccaggaaaccaaa

SEQ ID NO: 1020830 - RNA, 24 nt, Human
uuaaagaaauguauuaagaguccu

SEQ ID NO: 1020831 - RNA, 21 nt, Human
uuagaguugucaacgcuguac

SEQ ID NO: 1020832 - RNA, 27 nt, Human
uuauguacauacauuggagcauguggu

SEQ ID NO: 1020833 - RNA, 20 nt, Human
uucugcuugggguuugggcc

SEQ ID NO: 1020834 - RNA, 24 nt, Human
uuuaaaauguccuuaagcuaaaau

SEQ ID NO: 1020835 - RNA, 23 nt, Human
uuuccauguaauggaagacugca

SEQ ID NO: 1020836 - RNA, 23 nt, Human
uuucugaaggcugaaaaacauuu

SEQ ID NO: 1020837 - RNA, 24 nt, Human
uuuucuuuucugcuugggguuugg

SEQ ID NO: 1020838 - RNA, 23 nt, Human
aacacgcccccucucccucccuc

SEQ ID NO: 1020839 - RNA, 25 nt, Human
aaccgaguugggaauuuccacggga

SEQ ID NO: 1020840 - RNA, 21 nt, Human
aaggaggagggcggccggggg

SEQ ID NO: 1020841 - RNA, 22 nt, Human
aauuuccacgggaagucggggg

SEQ ID NO: 1020842 - RNA, 21 nt, Human
acaaacacagacuucaggcac

SEQ ID NO: 1020843 - RNA, 22 nt, Human
aggaaggguuuaguucuggaaa

SEQ ID NO: 1020844 - RNA, 22 nt, Human
caaaggccuugucuccacgaca

SEQ ID NO: 1020845 - RNA, 21 nt, Human
caacacgcccccucucccucc

SEQ ID NO: 1020846 - RNA, 21 nt, Human
caaguccacagagauaaagga

SEQ ID NO: 1020847 - RNA, 22 nt, Human
cacccacuccuccaugagaacc

SEQ ID NO: 1020848 - RNA, 21 nt, Human
cacccgggggccacagcgccc

SEQ ID NO: 1020849 - RNA, 23 nt, Human
cacgcccccucucccucccucca

SEQ ID NO: 1020850 - RNA, 21 nt, Human
cacucggcggccagagcagca

SEQ ID NO: 1020851 - RNA, 19 nt, Human
cagcgcccuugcaucgugc

SEQ ID NO: 1020852 - RNA, 21 nt, Human
caggaacaaagaaaggaggag

SEQ ID NO: 1020853 - RNA, 23 nt, Human
ccacagcgcccuugcaucgugcu

SEQ ID NO: 1020854 - RNA, 22 nt, Human
ccagccacaggaacaaagaaag

SEQ ID NO: 1020855 - RNA, 21 nt, Human
ccccccagccacaggaacaaa

SEQ ID NO: 1020856 - RNA, 19 nt, Human
cccccccagccacaggaac

SEQ ID NO: 1020857 - RNA, 18 nt, Human
ccccccgccccucacucg

SEQ ID NO: 1020858 - RNA, 18 nt, Human
cccccgggccccccccgc

SEQ ID NO: 1020859 - RNA, 25 nt, Human
ccccgccccucacucggcggccaga

SEQ ID NO: 1020860 - RNA, 19 nt, Human
ccccgggccccccccgccc

SEQ ID NO: 1020861 - RNA, 24 nt, Human
ccccucucccucccuccaugugca

SEQ ID NO: 1020862 - RNA, 21 nt, Human
cccuccuugucuccacccacu

SEQ ID NO: 1020863 - RNA, 24 nt, Human
cccuugcaucgugcuccuuauucc

SEQ ID NO: 1020864 - RNA, 29 nt, Human
ccugaccccugacccugugaccgguuccg

SEQ ID NO: 1020865 - RNA, 21 nt, Human
ccuugucuccacccacuccuc

SEQ ID NO: 1020866 - RNA, 23 nt, Human
cgaaagcuaccccaccccaguag

SEQ ID NO: 1020867 - RNA, 21 nt, Human
cgcccccgggccccccccgcc

SEQ ID NO: 1020868 - RNA, 19 nt, Human
cgcccccucucccucccuc

SEQ ID NO: 1020869 - RNA, 21 nt, Human
cgggccccccccgccccucac

SEQ ID NO: 1020870 - RNA, 21 nt, Human
gacuacaaccaccugaccccu

SEQ ID NO: 1020871 - RNA, 23 nt, Human
gacuuacucccuccuugucucca

SEQ ID NO: 1020872 - RNA, 20 nt, Human
gccacaggaacaaagaaagg

SEQ ID NO: 1020873 - RNA, 21 nt, Human
gcccccucucccucccuccau

SEQ ID NO: 1020874 - RNA, 19 nt, Human
gcgcauccuugagaggggg

SEQ ID NO: 1020875 - RNA, 24 nt, Human
ggaggagggcggccgggggggucu

SEQ ID NO: 1020876 - RNA, 19 nt, Human
ggauguucaacacgccccc

SEQ ID NO: 1020877 - RNA, 21 nt, Human
gggaggggauacccccccagc

SEQ ID NO: 1020878 - RNA, 19 nt, Human
ggggagggguugaguagua

SEQ ID NO: 1020879 - RNA, 22 nt, Human
gggugauggugaaacugugguu

SEQ ID NO: 1020880 - RNA, 28 nt, Human
ggugauggugaaacugugguuccccuuu

SEQ ID NO: 1020881 - RNA, 21 nt, Human
guagguucuaggacaagggug

SEQ ID NO: 1020882 - RNA, 23 nt, Human
gucuccacgacaacacaaacaca

SEQ ID NO: 1020883 - RNA, 26 nt, Human
uaaagagcgcauccuugagagggggu

SEQ ID NO: 1020884 - RNA, 27 nt, Human
uaaagagcgcauccuugagagggggua

SEQ ID NO: 1020885 - RNA, 19 nt, Human
uacucccuccuugucucca

SEQ ID NO: 1020886 - RNA, 18 nt, Human
uagaaugggcgggugaug

SEQ ID NO: 1020887 - RNA, 19 nt, Human
uccacagagauaaaggaag

SEQ ID NO: 1020888 - RNA, 18 nt, Human
uccuugucuccacccacu

SEQ ID NO: 1020889 - RNA, 26 nt, Human
ucggcggccagagcagcaaccugggc

SEQ ID NO: 1020890 - RNA, 18 nt, Human
ucuccacccacuccucca

SEQ ID NO: 1020891 - RNA, 24 nt, Human
ucuccacccacuccuccaugagaa

SEQ ID NO: 1020892 - RNA, 26 nt, Human
ucucgggccgcgcgcccccgggcccc

SEQ ID NO: 1020893 - RNA, 18 nt, Human
ucuguggagcaggggcuu

SEQ ID NO: 1020894 - RNA, 19 nt, Human
ugaaacugugguuccccuu

SEQ ID NO: 1020895 - RNA, 21 nt, Human
ugaguaguagaaugggcgggu

SEQ ID NO: 1020896 - RNA, 22 nt, Human
uggggcucaaaggccuugucuc

SEQ ID NO: 1020897 - RNA, 24 nt, Human
uggggcucaaaggccuugucucca

SEQ ID NO: 1020898 - RNA, 19 nt, Human
uggugaaacugugguuccc

SEQ ID NO: 1020899 - RNA, 19 nt, Human
ugucuccacccacuccucc

SEQ ID NO: 1020900 - RNA, 21 nt, Human
uguggagcaggggcuucagug

SEQ ID NO: 1020901 - RNA, 22 nt, Human
uguggugggagaucacccgggg

SEQ ID NO: 1020902 - RNA, 18 nt, Human
uucuggaaauaccuuggg

SEQ ID NO: 1020903 - RNA, 22 nt, Human
uugcaucgugcuccuuauuccc

SEQ ID NO: 1020904 - RNA, 23 nt, Human
uuucccgaaagcuaccccacccc

SEQ ID NO: 1020905 - RNA, 22 nt, Human
aaaacaaauccacauuaccuaa

SEQ ID NO: 1020906 - RNA, 20 nt, Human
aaaagaacagaugugagcaa

SEQ ID NO: 1020907 - RNA, 22 nt, Human
aaacacauuccagugcucauaa

SEQ ID NO: 1020908 - RNA, 23 nt, Human
aaacaggacaucaaaccuuccaa

SEQ ID NO: 1020909 - RNA, 18 nt, Human
aaagaguguauucucaag

SEQ ID NO: 1020910 - RNA, 22 nt, Human
aaagaguguauucucaagauuc

SEQ ID NO: 1020911 - RNA, 19 nt, Human
aaagcaaaccaaugagaaa

SEQ ID NO: 1020912 - RNA, 24 nt, Human
aaagugcugggauuacaggcguga

SEQ ID NO: 1020913 - RNA, 24 nt, Human
aaagugcugggauuacagguguga

SEQ ID NO: 1020914 - RNA, 22 nt, Human
aaaguguugggauuauaggcau

SEQ ID NO: 1020915 - RNA, 24 nt, Human
aaaguguugggauuauaggcauga

SEQ ID NO: 1020916 - RNA, 19 nt, Human
aaauaccacaaaacacuaa

SEQ ID NO: 1020917 - RNA, 22 nt, Human
aaauagcuaccaaaacaaaucc

SEQ ID NO: 1020918 - RNA, 23 nt, Human
aacuaccacccaagcgugccacc

SEQ ID NO: 1020919 - RNA, 23 nt, Human
aacuuauuuuauccccuccucca

SEQ ID NO: 1020920 - RNA, 18 nt, Human
aacuuguggcuccuucuc

SEQ ID NO: 1020921 - RNA, 18 nt, Human
aagauacccauucaaaua

SEQ ID NO: 1020922 - RNA, 22 nt, Human
aagcaaaccaaugagaaauacc

SEQ ID NO: 1020923 - RNA, 23 nt, Human
aagcaacccccuucuccugccuc

SEQ ID NO: 1020924 - RNA, 21 nt, Human
aagcagcuuuaucuauaaugu

SEQ ID NO: 1020925 - RNA, 19 nt, Human
aaguagcugggauuauagg

SEQ ID NO: 1020926 - RNA, 24 nt, Human
aagucacucucuuagcaucuccau

SEQ ID NO: 1020927 - RNA, 18 nt, Human
aagugcugggauuacagg

SEQ ID NO: 1020928 - RNA, 19 nt, Human
aagugcugggauuacaggc

SEQ ID NO: 1020929 - RNA, 19 nt, Human
aagugcugggauuacaggc

SEQ ID NO: 1020930 - RNA, 19 nt, Human
aagugcugggauuacaggu

SEQ ID NO: 1020931 - RNA, 26 nt, Human
aagugcugggauuacaggugugagcc

SEQ ID NO: 1020932 - RNA, 21 nt, Human
aaguguugggauuauaggcau

SEQ ID NO: 1020933 - RNA, 24 nt, Human
aauagcuaccaaaacaaauccaca

SEQ ID NO: 1020934 - RNA, 19 nt, Human
aaucauaguucacugcagc

SEQ ID NO: 1020935 - RNA, 18 nt, Human
aauggaacuggugggugg

SEQ ID NO: 1020936 - RNA, 23 nt, Human
aauuaucuguuucauauuuagaa

SEQ ID NO: 1020937 - RNA, 20 nt, Human
acaaauuccagcccaaagau

SEQ ID NO: 1020938 - RNA, 21 nt, Human
acaauccccucaguauacgug

SEQ ID NO: 1020939 - RNA, 21 nt, Human
acacaaauuugaggaauuaga

SEQ ID NO: 1020940 - RNA, 19 nt, Human
acacagcuuaaaagcaugu

SEQ ID NO: 1020941 - RNA, 23 nt, Human
acacagcuuaaaagcaugugcaa

SEQ ID NO: 1020942 - RNA, 24 nt, Human
acaguuaaaacaaacaagauaccc

SEQ ID NO: 1020943 - RNA, 23 nt, Human
accaaguacuguaaauauuuaca

SEQ ID NO: 1020944 - RNA, 25 nt, Human
acccaucucggccucccaaagugcu

SEQ ID NO: 1020945 - RNA, 23 nt, Human
acgagauggggucuugcucuguu

SEQ ID NO: 1020946 - RNA, 25 nt, Human
acuaaaauacaaaacacugccuuag

SEQ ID NO: 1020947 - RNA, 24 nt, Human
acuauguuggccaggcuggucucg

SEQ ID NO: 1020948 - RNA, 18 nt, Human
acuauguuggucaggcug

SEQ ID NO: 1020949 - RNA, 22 nt, Human
acucaccccauuacccauucca

SEQ ID NO: 1020950 - RNA, 25 nt, Human
acucuuuuacccaggcuggagugua

SEQ ID NO: 1020951 - RNA, 22 nt, Human
acuguagucucaaacuccuggg

SEQ ID NO: 1020952 - RNA, 23 nt, Human
acuuauuuuauccccuccuccau

SEQ ID NO: 1020953 - RNA, 28 nt, Human
acuuuuugcccagguucgucuugaauca

SEQ ID NO: 1020954 - RNA, 24 nt, Human
agaaaaaaaguuucuauuuagaag

SEQ ID NO: 1020955 - RNA, 25 nt, Human
agaaaaaccacaguuaagacucaaa

SEQ ID NO: 1020956 - RNA, 19 nt, Human
agaauccugccuaucugcc

SEQ ID NO: 1020957 - RNA, 22 nt, Human
agacaaguuccaaaguuccaca

SEQ ID NO: 1020958 - RNA, 22 nt, Human
agacacccuaccaccucccagg

SEQ ID NO: 1020959 - RNA, 24 nt, Human
agacuaaaaccagacaacagagcu

SEQ ID NO: 1020960 - RNA, 22 nt, Human
agagaagaccccacuguaugga

SEQ ID NO: 1020961 - RNA, 19 nt, Human
agagaugggguuucacuau

SEQ ID NO: 1020962 - RNA, 21 nt, Human
agcaccauaaucuaagacaga

SEQ ID NO: 1020963 - RNA, 23 nt, Human
agcacccuguccuacccugguga

SEQ ID NO: 1020964 - RNA, 20 nt, Human
agcacgcaucaucugugccc

SEQ ID NO: 1020965 - RNA, 20 nt, Human
agcgauucuccugccuuggc

SEQ ID NO: 1020966 - RNA, 23 nt, Human
agcgauucuccugccuuggccuc

SEQ ID NO: 1020967 - RNA, 20 nt, Human
agcgcucacaucccccgccc

SEQ ID NO: 1020968 - RNA, 18 nt, Human
agcuaccaaaacaaaucc

SEQ ID NO: 1020969 - RNA, 20 nt, Human
agcuaguuuuuuuuuuuuuu

SEQ ID NO: 1020970 - RNA, 23 nt, Human
agcuaguuuuuuuuuuuuuuuuu

SEQ ID NO: 1020971 - RNA, 23 nt, Human
agcuaguuuuuuuuuuuuuuuuu

SEQ ID NO: 1020972 - RNA, 18 nt, Human
aggagcuugagaaucaga

SEQ ID NO: 1020973 - RNA, 19 nt, Human
aggcuggagugcaguggca

SEQ ID NO: 1020974 - RNA, 19 nt, Human
agggacaagauuuguaagc

SEQ ID NO: 1020975 - RNA, 24 nt, Human
aggugauccacccaucucggccuc

SEQ ID NO: 1020976 - RNA, 21 nt, Human
agguucaagugauucuccugc

SEQ ID NO: 1020977 - RNA, 22 nt, Human
agguucaagugauucuccugcc

SEQ ID NO: 1020978 - RNA, 23 nt, Human
agguucaagugauucuccugccu

SEQ ID NO: 1020979 - RNA, 19 nt, Human
aguagagaugggguuucac

SEQ ID NO: 1020980 - RNA, 19 nt, Human
aguagcugauggacacaua

SEQ ID NO: 1020981 - RNA, 21 nt, Human
aguagcugggacuguauguac

SEQ ID NO: 1020982 - RNA, 18 nt, Human
aguagcugggauuacagg

SEQ ID NO: 1020983 - RNA, 20 nt, Human
agugcaauggugugaucucg

SEQ ID NO: 1020984 - RNA, 24 nt, Human
agugcaauggugugaucucggcuc

SEQ ID NO: 1020985 - RNA, 21 nt, Human
agugcaguggcacaaucauag

SEQ ID NO: 1020986 - RNA, 23 nt, Human
agugcaguggcacaaucauaguu

SEQ ID NO: 1020987 - RNA, 24 nt, Human
agugugguggugcaaucgcggcuc

SEQ ID NO: 1020988 - RNA, 18 nt, Human
auaguucacugcagccuu

SEQ ID NO: 1020989 - RNA, 21 nt, Human
auaguugcuuuucuuguuugu

SEQ ID NO: 1020990 - RNA, 19 nt, Human
aucauaccuaaaacccacu

SEQ ID NO: 1020991 - RNA, 22 nt, Human
auccugccuaucugcccucuca

SEQ ID NO: 1020992 - RNA, 18 nt, Human
aucgcggcucacugcaac

SEQ ID NO: 1020993 - RNA, 24 nt, Human
augaaccaccgcuccuggcagaau

SEQ ID NO: 1020994 - RNA, 24 nt, Human
augauccacccaccucagccuccc

SEQ ID NO: 1020995 - RNA, 21 nt, Human
auggccagcauuucagacacc

SEQ ID NO: 1020996 - RNA, 18 nt, Human
augggguuucacuauguu

SEQ ID NO: 1020997 - RNA, 24 nt, Human
augggguuucacuauguuggccag

SEQ ID NO: 1020998 - RNA, 21 nt, Human
augggguuucacuauguuggu

SEQ ID NO: 1020999 - RNA, 23 nt, Human
augggguuucacuauguugguca

SEQ ID NO: 1021000 - RNA, 24 nt, Human
augggguuucacuauguuggucag

SEQ ID NO: 1021001 - RNA, 24 nt, Human
auuacauuacagcaaagccaaacu

SEQ ID NO: 1021002 - RNA, 24 nt, Human
auuuuuguauuuuuaguagagaug

SEQ ID NO: 1021003 - RNA, 30 nt, Human
auuuuuuuuuuuuguauuuuuaguagagaa

SEQ ID NO: 1021004 - RNA, 23 nt, Human
caaaacaaauccacauuaccuaa

SEQ ID NO: 1021005 - RNA, 24 nt, Human
caaaacacuaaaagaacagaugug

SEQ ID NO: 1021006 - RNA, 23 nt, Human
caaaaccucaaauaccacaaaac

SEQ ID NO: 1021007 - RNA, 23 nt, Human
caaacaggcagaaaaugcucugc

SEQ ID NO: 1021008 - RNA, 24 nt, Human
caaaccaaugagaaauaccuaucu

SEQ ID NO: 1021009 - RNA, 25 nt, Human
caaacuccugggcucaggugauccu

SEQ ID NO: 1021010 - RNA, 20 nt, Human
caaagcugcugccacccaaa

SEQ ID NO: 1021011 - RNA, 24 nt, Human
caaagugcugggauuacaggcgug

SEQ ID NO: 1021012 - RNA, 24 nt, Human
caaagugcugggauuacaggugug

SEQ ID NO: 1021013 - RNA, 20 nt, Human
caaaguuccacaaaguccuc

SEQ ID NO: 1021014 - RNA, 27 nt, Human
caacaaguaaacacccugguguuagga

SEQ ID NO: 1021015 - RNA, 19 nt, Human
caagugauucuccugccuc

SEQ ID NO: 1021016 - RNA, 22 nt, Human
caagugauucuccugccuccgc

SEQ ID NO: 1021017 - RNA, 23 nt, Human
cacagcagcuuggugucuaccag

SEQ ID NO: 1021018 - RNA, 24 nt, Human
caccacgccuggcuaauuuuugua

SEQ ID NO: 1021019 - RNA, 22 nt, Human
cacccaccucagccucccaaag

SEQ ID NO: 1021020 - RNA, 23 nt, Human
cacccaccucagccucccaaagu

SEQ ID NO: 1021021 - RNA, 22 nt, Human
cacccaucucggccucccaaag

SEQ ID NO: 1021022 - RNA, 23 nt, Human
cacccaucucggccucccaaagu

SEQ ID NO: 1021023 - RNA, 18 nt, Human
caccgcuccuggcagaau

SEQ ID NO: 1021024 - RNA, 24 nt, Human
caccucagccucccaaagugcugg

SEQ ID NO: 1021025 - RNA, 24 nt, Human
caccugguuaauuuuuuuuuuuug

SEQ ID NO: 1021026 - RNA, 24 nt, Human
cacuaaaagaacagaugugagcaa

SEQ ID NO: 1021027 - RNA, 19 nt, Human
cacuaugcugauuucagca

SEQ ID NO: 1021028 - RNA, 23 nt, Human
cacuaugcugauuucagcagaac

SEQ ID NO: 1021029 - RNA, 20 nt, Human
cacuaugucagccuuguacc

SEQ ID NO: 1021030 - RNA, 21 nt, Human
cacuauguuggccaggcuggu

SEQ ID NO: 1021031 - RNA, 24 nt, Human
cacuauguuggccaggcuggucuc

SEQ ID NO: 1021032 - RNA, 21 nt, Human
cacuauguuggucaggcuggu

SEQ ID NO: 1021033 - RNA, 22 nt, Human
cacuauguuggucaggcugguc

SEQ ID NO: 1021034 - RNA, 18 nt, Human
cacucuaugaacuacucc

SEQ ID NO: 1021035 - RNA, 24 nt, Human
cacucuuuuacccaggcuggagug

SEQ ID NO: 1021036 - RNA, 21 nt, Human
cacugcaaccuccgccuccca

SEQ ID NO: 1021037 - RNA, 24 nt, Human
cagaaaaugcucugcuaauaccau

SEQ ID NO: 1021038 - RNA, 18 nt, Human
cagaacaaaauggcauca

SEQ ID NO: 1021039 - RNA, 22 nt, Human
cagacaacagagcucuguuaac

SEQ ID NO: 1021040 - RNA, 22 nt, Human
cagacacccuaccaccucccag

SEQ ID NO: 1021041 - RNA, 20 nt, Human
cagagcaggggcuguggcag

SEQ ID NO: 1021042 - RNA, 21 nt, Human
cagccacagagaagaccccac

SEQ ID NO: 1021043 - RNA, 18 nt, Human
cagccucagccuccuaaa

SEQ ID NO: 1021044 - RNA, 25 nt, Human
cagccucagccuccuaaaguguugg

SEQ ID NO: 1021045 - RNA, 20 nt, Human
cagccuccugaguagcuggg

SEQ ID NO: 1021046 - RNA, 25 nt, Human
cagcuaguuuuuuuuuuuuuuuuuu

SEQ ID NO: 1021047 - RNA, 24 nt, Human
caugauccacccaccucagccucc

SEQ ID NO: 1021048 - RNA, 18 nt, Human
ccaaagcugcugccaccc

SEQ ID NO: 1021049 - RNA, 20 nt, Human
ccaaagugcugggauuacag

SEQ ID NO: 1021050 - RNA, 20 nt, Human
ccaaagugcugggauuacag

SEQ ID NO: 1021051 - RNA, 21 nt, Human
ccaaagugcugggauuacagg

SEQ ID NO: 1021052 - RNA, 21 nt, Human
ccaaagugcugggauuacagg

SEQ ID NO: 1021053 - RNA, 22 nt, Human
ccaaagugcugggauuacaggc

SEQ ID NO: 1021054 - RNA, 22 nt, Human
ccaaagugcugggauuacaggc

SEQ ID NO: 1021055 - RNA, 24 nt, Human
ccaaagugcugggauuacaggcgu

SEQ ID NO: 1021056 - RNA, 24 nt, Human
ccaaagugcugggauuacaggugu

SEQ ID NO: 1021057 - RNA, 20 nt, Human
ccaccacgccuggcuaauuu

SEQ ID NO: 1021058 - RNA, 26 nt, Human
ccacccaccucagccucccaaagugc

SEQ ID NO: 1021059 - RNA, 21 nt, Human
ccacgacucucccagaauauc

SEQ ID NO: 1021060 - RNA, 19 nt, Human
ccacucauagaauccugcc

SEQ ID NO: 1021061 - RNA, 19 nt, Human
ccagcccaaagauaaacuu

SEQ ID NO: 1021062 - RNA, 24 nt, Human
ccagcuaguuuuuuuaaaaaauua

SEQ ID NO: 1021063 - RNA, 20 nt, Human
ccaggcucuggcugccugau

SEQ ID NO: 1021064 - RNA, 23 nt, Human
cccaaguagcugggauuauaggc

SEQ ID NO: 1021065 - RNA, 24 nt, Human
cccaaguagcugggauuauaggcg

SEQ ID NO: 1021066 - RNA, 20 nt, Human
cccaggcuggagugcaaugg

SEQ ID NO: 1021067 - RNA, 23 nt, Human
cccagguucaagugauucuccuc

SEQ ID NO: 1021068 - RNA, 23 nt, Human
cccagguucaagugauucuccug

SEQ ID NO: 1021069 - RNA, 22 nt, Human
cccauggggauugaagaaaaac

SEQ ID NO: 1021070 - RNA, 18 nt, Human
ccccaaauccaagaaaaa

SEQ ID NO: 1021071 - RNA, 22 nt, Human
ccccacuguauggaggcuacaa

SEQ ID NO: 1021072 - RNA, 23 nt, Human
cccgaguagcugggauuacaggu

SEQ ID NO: 1021073 - RNA, 24 nt, Human
cccgaguagcugggauuacaggug

SEQ ID NO: 1021074 - RNA, 18 nt, Human
cccuaccaccucccaggc

SEQ ID NO: 1021075 - RNA, 21 nt, Human
ccgaguagcugggauuacagg

SEQ ID NO: 1021076 - RNA, 24 nt, Human
ccgaguagcugggauuacaggugu

SEQ ID NO: 1021077 - RNA, 25 nt, Human
ccgcccaagauauccucucugccgc

SEQ ID NO: 1021078 - RNA, 24 nt, Human
ccgccucccagguucaagugauuc

SEQ ID NO: 1021079 - RNA, 23 nt, Human
ccgccucccgaguagcugggauu

SEQ ID NO: 1021080 - RNA, 23 nt, Human
ccuaaaguguugggauuauaggc

SEQ ID NO: 1021081 - RNA, 24 nt, Human
ccuaugggccccacuggguaaggg

SEQ ID NO: 1021082 - RNA, 23 nt, Human
ccucaaauaccacaaaacacuaa

SEQ ID NO: 1021083 - RNA, 20 nt, Human
ccucccaggcucuggcugcc

SEQ ID NO: 1021084 - RNA, 24 nt, Human
ccucccagguucaagugauucucc

SEQ ID NO: 1021085 - RNA, 19 nt, Human
ccuccgccucccgaguagc

SEQ ID NO: 1021086 - RNA, 18 nt, Human
ccucuagccuaugggccc

SEQ ID NO: 1021087 - RNA, 22 nt, Human
ccugaccgcaugauccacccac

SEQ ID NO: 1021088 - RNA, 23 nt, Human
ccugaccucaggugauccaccca

SEQ ID NO: 1021089 - RNA, 24 nt, Human
ccugaccucaggugauccacccau

SEQ ID NO: 1021090 - RNA, 19 nt, Human
ccugaguagcugggacugu

SEQ ID NO: 1021091 - RNA, 23 nt, Human
ccugccuuggccucccaaguagc

SEQ ID NO: 1021092 - RNA, 18 nt, Human
ccuggcuucaagugaucc

SEQ ID NO: 1021093 - RNA, 20 nt, Human
ccuggcuucaagugauccac

SEQ ID NO: 1021094 - RNA, 18 nt, Human
ccugggcucaggugaucc

SEQ ID NO: 1021095 - RNA, 24 nt, Human
ccuucugguuucgagcgauucucc

SEQ ID NO: 1021096 - RNA, 25 nt, Human
ccuuggccucccaaguagcugggau

SEQ ID NO: 1021097 - RNA, 19 nt, Human
ccuuguggaacuccugauu

SEQ ID NO: 1021098 - RNA, 24 nt, Human
cgaucugucgcgcaggcuggagug

SEQ ID NO: 1021099 - RNA, 22 nt, Human
cgccucccagguucaagugauu

SEQ ID NO: 1021100 - RNA, 21 nt, Human
cggugcugccaagggcucagc

SEQ ID NO: 1021101 - RNA, 24 nt, Human
cuaaaaccagacaacagagcucug

SEQ ID NO: 1021102 - RNA, 22 nt, Human
cuaaaacccacuggccucuacc

SEQ ID NO: 1021103 - RNA, 24 nt, Human
cuacuguagucucaaacuccuggg

SEQ ID NO: 1021104 - RNA, 18 nt, Human
cuagccuaugggccccac

SEQ ID NO: 1021105 - RNA, 21 nt, Human
cucaccccauuacccauucca

SEQ ID NO: 1021106 - RNA, 24 nt, Human
cucacugcaaccuccgccucccag

SEQ ID NO: 1021107 - RNA, 18 nt, Human
cucagaauaguugcuuuu

SEQ ID NO: 1021108 - RNA, 25 nt, Human
cucccaaguaaaaccaaguacugua

SEQ ID NO: 1021109 - RNA, 19 nt, Human
cucccagguucaagugauu

SEQ ID NO: 1021110 - RNA, 23 nt, Human
cuccugggcucaggugauccucu

SEQ ID NO: 1021111 - RNA, 24 nt, Human
cucuaaagaguaucucccccaccu

SEQ ID NO: 1021112 - RNA, 22 nt, Human
cucuguccaccuguuucgauca

SEQ ID NO: 1021113 - RNA, 20 nt, Human
cucuguugcccaggcuggag

SEQ ID NO: 1021114 - RNA, 20 nt, Human
cucuuguugcccaggcugga

SEQ ID NO: 1021115 - RNA, 18 nt, Human
cucuuuuacccaggcugg

SEQ ID NO: 1021116 - RNA, 24 nt, Human
cugaaauuaguaggaguaauagaa

SEQ ID NO: 1021117 - RNA, 23 nt, Human
cugcaaccuccgccucccagguu

SEQ ID NO: 1021118 - RNA, 24 nt, Human
cugcaaccuccgccucccagguuc

SEQ ID NO: 1021119 - RNA, 23 nt, Human
cugccaccuccaccuucugguuu

SEQ ID NO: 1021120 - RNA, 24 nt, Human
cugccaccuccaccuucugguuuc

SEQ ID NO: 1021121 - RNA, 23 nt, Human
cugccuccgccucccgaguagcu

SEQ ID NO: 1021122 - RNA, 23 nt, Human
cugccuuggccucccaaguagcu

SEQ ID NO: 1021123 - RNA, 23 nt, Human
cugcuucagccuccugaguagcu

SEQ ID NO: 1021124 - RNA, 22 nt, Human
cugcuuccaaaacuaccaccca

SEQ ID NO: 1021125 - RNA, 24 nt, Human
cuuguugcccaggcuggagugcaa

SEQ ID NO: 1021126 - RNA, 20 nt, Human
gaaacaggacaucaaaccuu

SEQ ID NO: 1021127 - RNA, 21 nt, Human
gaacagaugugagcaacuuau

SEQ ID NO: 1021128 - RNA, 21 nt, Human
gaacugaauccauagggacaa

SEQ ID NO: 1021129 - RNA, 22 nt, Human
gaccgcaugauccacccaccuc

SEQ ID NO: 1021130 - RNA, 24 nt, Human
gaccucaggugauccacccaucuc

SEQ ID NO: 1021131 - RNA, 20 nt, Human
gagagggugaucaguuuuug

SEQ ID NO: 1021132 - RNA, 20 nt, Human
gagaugggguuucacuaugu

SEQ ID NO: 1021133 - RNA, 24 nt, Human
gagaugggguuucacuauguuggc

SEQ ID NO: 1021134 - RNA, 24 nt, Human
gagaugggguuucacuauguuggu

SEQ ID NO: 1021135 - RNA, 22 nt, Human
gagccaccaugccuggccccaa

SEQ ID NO: 1021136 - RNA, 25 nt, Human
gagcgauucuccugccuuggccucc

SEQ ID NO: 1021137 - RNA, 26 nt, Human
gaguagcugggacuguauguacaugc

SEQ ID NO: 1021138 - RNA, 24 nt, Human
gaguagcugggauuacaggugugc

SEQ ID NO: 1021139 - RNA, 18 nt, Human
gauuacaggcgugagcca

SEQ ID NO: 1021140 - RNA, 21 nt, Human
gauuacaggcgugagccacca

SEQ ID NO: 1021141 - RNA, 24 nt, Human
gauuacaggcgugagccaccaugc

SEQ ID NO: 1021142 - RNA, 18 nt, Human
gauuacaggugugagcca

SEQ ID NO: 1021143 - RNA, 21 nt, Human
gauuacaggugugagccacca

SEQ ID NO: 1021144 - RNA, 22 nt, Human
gauuacaggugugagccaccac

SEQ ID NO: 1021145 - RNA, 18 nt, Human
gauuacaggugugcgcca

SEQ ID NO: 1021146 - RNA, 21 nt, Human
gauuauaggcaugaaccaccg

SEQ ID NO: 1021147 - RNA, 19 nt, Human
gccagcugcccagcuaguu

SEQ ID NO: 1021148 - RNA, 20 nt, Human
gcccgugguaccguggucag

SEQ ID NO: 1021149 - RNA, 19 nt, Human
gccgcaacagauucagccu

SEQ ID NO: 1021150 - RNA, 23 nt, Human
gcgcaggcuggagugugguggug

SEQ ID NO: 1021151 - RNA, 24 nt, Human
gcuaucauccugcuucagccuccu

SEQ ID NO: 1021152 - RNA, 19 nt, Human
gcucaguguacccucuaaa

SEQ ID NO: 1021153 - RNA, 25 nt, Human
gcucuguugcccaggcuggagugca

SEQ ID NO: 1021154 - RNA, 20 nt, Human
gcucuuguugcccaggcugg

SEQ ID NO: 1021155 - RNA, 21 nt, Human
gcucuuguugcccaggcugga

SEQ ID NO: 1021156 - RNA, 24 nt, Human
gcucuuguugcccaggcuggagug

SEQ ID NO: 1021157 - RNA, 30 nt, Human; identical to SEQ ID NO: 654829

SEQ ID NO: 1021158 - RNA, 19 nt, Human
gcuggagugcaguggcaca

SEQ ID NO: 1021159 - RNA, 23 nt, Human
gcuggucacaaacuccugaccuc

SEQ ID NO: 1021160 - RNA, 24 nt, Human
ggauuacaggcgugagccaccaug

SEQ ID NO: 1021161 - RNA, 22 nt, Human
ggcuggagugcaauggugugau

SEQ ID NO: 1021162 - RNA, 24 nt, Human
ggcuggucacaaacuccugaccuc

SEQ ID NO: 1021163 - RNA, 20 nt, Human
ggggcuguggcagcccgugg

SEQ ID NO: 1021164 - RNA, 22 nt, Human
gggguuucacuauguuggccag

SEQ ID NO: 1021165 - RNA, 22 nt, Human
gggguuucacuauguuggucag

SEQ ID NO: 1021166 - RNA, 21 nt, Human
gggucucacuuuuugcccagg

SEQ ID NO: 1021167 - RNA, 22 nt, Human
gggucuugcucuguugcccagg

SEQ ID NO: 1021168 - RNA, 18 nt, Human
ggguuucacuauguuggc

SEQ ID NO: 1021169 - RNA, 23 nt, Human
ggucagucacagcagcuuggugu

SEQ ID NO: 1021170 - RNA, 20 nt, Human
gguuucgagcgauucuccug

SEQ ID NO: 1021171 - RNA, 22 nt, Human
guagcacgcaucaucugugccc

SEQ ID NO: 1021172 - RNA, 18 nt, Human
guagcugggauuacaggu

SEQ ID NO: 1021173 - RNA, 18 nt, Human
guagcugggauuauaggc

SEQ ID NO: 1021174 - RNA, 19 nt, Human
gucucgaacuccugaccgc

SEQ ID NO: 1021175 - RNA, 23 nt, Human
gugauccaccagccucagccucc

SEQ ID NO: 1021176 - RNA, 24 nt, Human
gugauccacccaucucggccuccc

SEQ ID NO: 1021177 - RNA, 20 nt, Human
gugauucuccugccuccgcc

SEQ ID NO: 1021178 - RNA, 19 nt, Human
guguugggauuauaggcau

SEQ ID NO: 1021179 - RNA, 19 nt, Human
uaaaacaaacaagauaccc

SEQ ID NO: 1021180 - RNA, 20 nt, Human
uaaaaccagacaacagagcu

SEQ ID NO: 1021181 - RNA, 19 nt, Human
uaaaagaacagaugugagc

SEQ ID NO: 1021182 - RNA, 18 nt, Human
uaaagagaugaggucuca

SEQ ID NO: 1021183 - RNA, 24 nt, Human
uaaagagaugaggucucacucuuu

SEQ ID NO: 1021184 - RNA, 24 nt, Human
uaaagcaccauaaucuaagacaga

SEQ ID NO: 1021185 - RNA, 19 nt, Human
uaaccaauuucucauccua

SEQ ID NO: 1021186 - RNA, 19 nt, Human
uaaguccuagcacaacuga

SEQ ID NO: 1021187 - RNA, 18 nt, Human
uaaguguggucauggacc

SEQ ID NO: 1021188 - RNA, 21 nt, Human
uaaugagugauccaaagcugc

SEQ ID NO: 1021189 - RNA, 24 nt, Human
uaauuuuuguauuuuuaguagaga

SEQ ID NO: 1021190 - RNA, 24 nt, Human
uacaauuagauaaaauuguccaaa

SEQ ID NO: 1021191 - RNA, 23 nt, Human
uacacagagaaaagacugcuaac

SEQ ID NO: 1021192 - RNA, 24 nt, Human
uacacagagaaaagacugcuaacc

SEQ ID NO: 1021193 - RNA, 18 nt, Human
uacacagcuuaaaagcau

SEQ ID NO: 1021194 - RNA, 22 nt, Human
uacaggcgugagccaccaugcc

SEQ ID NO: 1021195 - RNA, 22 nt, Human
uacaggcgugagccaccaugcc

SEQ ID NO: 1021196 - RNA, 23 nt, Human
uacaggcgugagccaccaugccu

SEQ ID NO: 1021197 - RNA, 22 nt, Human
uacaggugugagccaccacgcc

SEQ ID NO: 1021198 - RNA, 22 nt, Human
uacaggugugcgccaccacgcc

SEQ ID NO: 1021199 - RNA, 23 nt, Human
uaccacugguggugccuugaagc

SEQ ID NO: 1021200 - RNA, 22 nt, Human
uacccacaaccauccaaacuua

SEQ ID NO: 1021201 - RNA, 21 nt, Human
uacccaggcuggaguguagug

SEQ ID NO: 1021202 - RNA, 24 nt, Human
uacccaggcuggaguguaguggca

SEQ ID NO: 1021203 - RNA, 22 nt, Human
uacccucuaaagaguaucuccc

SEQ ID NO: 1021204 - RNA, 21 nt, Human
uagaacuaaaauacaaaacac

SEQ ID NO: 1021205 - RNA, 23 nt, Human
uagaacuaaaauacaaaacacug

SEQ ID NO: 1021206 - RNA, 22 nt, Human
uagagaugggguuucacuaugu

SEQ ID NO: 1021207 - RNA, 22 nt, Human
uagagaugggguuucacuaugu

SEQ ID NO: 1021208 - RNA, 18 nt, Human
uagcacaacugacugcuu

SEQ ID NO: 1021209 - RNA, 22 nt, Human
uagcacccuguccuacccuggu

SEQ ID NO: 1021210 - RNA, 22 nt, Human
uagccuaugggccccacugggu

SEQ ID NO: 1021211 - RNA, 21 nt, Human
uagcucaguguacccucuaaa

SEQ ID NO: 1021212 - RNA, 23 nt, Human
uaggcgcccgccacuacaccugg

SEQ ID NO: 1021213 - RNA, 23 nt, Human
uaguagagaugggguuucacuau

SEQ ID NO: 1021214 - RNA, 24 nt, Human
uaguagagaugggguuucacuaug

SEQ ID NO: 1021215 - RNA, 24 nt, Human
uaguagagaugggguuucacuaug

SEQ ID NO: 1021216 - RNA, 25 nt, Human
uaguagcacccuguccuacccuggu

SEQ ID NO: 1021217 - RNA, 24 nt, Human
uagucuucaaugagaaacaggaca

SEQ ID NO: 1021218 - RNA, 18 nt, Human
uaguuaaaauauccuuua

SEQ ID NO: 1021219 - RNA, 24 nt, Human
uaguucacugcagccuugaacucu

SEQ ID NO: 1021220 - RNA, 19 nt, Human
uauaaugugggagcauggu

SEQ ID NO: 1021221 - RNA, 20 nt, Human
uauaaugugggagcaugguc

SEQ ID NO: 1021222 - RNA, 21 nt, Human
uauggaggcuacaauuaacca

SEQ ID NO: 1021223 - RNA, 18 nt, Human
uauguacaugccaccaug

SEQ ID NO: 1021224 - RNA, 19 nt, Human
uauguuggccaggcugguc

SEQ ID NO: 1021225 - RNA, 24 nt, Human
uauguuggccaggcuggucucgaa

SEQ ID NO: 1021226 - RNA, 23 nt, Human
uauguuggucaggcuggucacaa

SEQ ID NO: 1021227 - RNA, 24 nt, Human
uauguuggucaggcuggucacaaa

SEQ ID NO: 1021228 - RNA, 19 nt, Human
uauuacauuacagcaaagc

SEQ ID NO: 1021229 - RNA, 20 nt, Human
uauuacauuacagcaaagcc

SEQ ID NO: 1021230 - RNA, 19 nt, Human
uauugaggugaagagaaga

SEQ ID NO: 1021231 - RNA, 20 nt, Human
ucaagagucugaaacaccuu

SEQ ID NO: 1021232 - RNA, 20 nt, Human
ucaagcuaucauccugcuuc

SEQ ID NO: 1021233 - RNA, 19 nt, Human
ucaagugauccaccagccu

SEQ ID NO: 1021234 - RNA, 20 nt, Human
ucaagugauccaccagccuc

SEQ ID NO: 1021235 - RNA, 19 nt, Human
ucaagugauucuccugccu

SEQ ID NO: 1021236 - RNA, 22 nt, Human
ucacuauguuggccaggcuggu

SEQ ID NO: 1021237 - RNA, 22 nt, Human
ucacuauguuggucaggcuggu

SEQ ID NO: 1021238 - RNA, 24 nt, Human
ucacucuuuuacccaggcuggagu

SEQ ID NO: 1021239 - RNA, 19 nt, Human
ucacugcaaccuccgccuc

SEQ ID NO: 1021240 - RNA, 24 nt, Human
ucacugcaaccuccgccucccagg

SEQ ID NO: 1021241 - RNA, 25 nt, Human
ucacugcaaccuccgccucccaggu

SEQ ID NO: 1021242 - RNA, 27 nt, Human
ucacugcaaccuccgccucccagguuc

SEQ ID NO: 1021243 - RNA, 19 nt, Human
ucacugcagccuugaacuc

SEQ ID NO: 1021244 - RNA, 23 nt, Human
ucacugcagccuugaacucuugg

SEQ ID NO: 1021245 - RNA, 23 nt, Human
ucacugcagccuugaacucuugg

SEQ ID NO: 1021246 - RNA, 24 nt, Human
ucacugcagccuugaacucuuggg

SEQ ID NO: 1021247 - RNA, 18 nt, Human
ucacugccaccuccaccu

SEQ ID NO: 1021248 - RNA, 23 nt, Human
ucacugccaccuccaccuucugg

SEQ ID NO: 1021249 - RNA, 24 nt, Human
ucacugccaccuccaccuucuggu

SEQ ID NO: 1021250 - RNA, 20 nt, Human
ucagcaugaccuuguaauaa

SEQ ID NO: 1021251 - RNA, 18 nt, Human
ucagccucccaaagugcu

SEQ ID NO: 1021252 - RNA, 23 nt, Human
ucagccuccugaguagcugggac

SEQ ID NO: 1021253 - RNA, 22 nt, Human
ucagcugccgcaacagauucag

SEQ ID NO: 1021254 - RNA, 28 nt, Human
ucaguguacccucuaaagaguaucuccc

SEQ ID NO: 1021255 - RNA, 21 nt, Human
uccacccaccucagccuccca

SEQ ID NO: 1021256 - RNA, 23 nt, Human
ucccaaagugcugggauuacagg

SEQ ID NO: 1021257 - RNA, 24 nt, Human
ucccaaagugcugggauuacaggc

SEQ ID NO: 1021258 - RNA, 24 nt, Human
ucccaaguagcugggauuauaggc

SEQ ID NO: 1021259 - RNA, 24 nt, Human
ucccagaauaucuguauuuuuacc

SEQ ID NO: 1021260 - RNA, 21 nt, Human
ucccaggcucuggcugccuga

SEQ ID NO: 1021261 - RNA, 21 nt, Human
ucccagguucaagugauucuc

SEQ ID NO: 1021262 - RNA, 24 nt, Human
ucccagguucaagugauucuccug

SEQ ID NO: 1021263 - RNA, 23 nt, Human
ucccgaguagcugggauuacagg

SEQ ID NO: 1021264 - RNA, 24 nt, Human
ucccgaguagcugggauuacaggu

SEQ ID NO: 1021265 - RNA, 24 nt, Human
uccuaaaguguugggauuauaggc

SEQ ID NO: 1021266 - RNA, 25 nt, Human
uccuaaaguguugggauuauaggca

SEQ ID NO: 1021267 - RNA, 20 nt, Human
uccucuagccuaugggcccc

SEQ ID NO: 1021268 - RNA, 20 nt, Human
uccugaguagcugggacugu

SEQ ID NO: 1021269 - RNA, 24 nt, Human
uccuuuagaaagacuaaaaccaga

SEQ ID NO: 1021270 - RNA, 22 nt, Human
ucgaucacaaccagucagaagg

SEQ ID NO: 1021271 - RNA, 24 nt, Human
ucgcgcaggcuggagugugguggu

SEQ ID NO: 1021272 - RNA, 21 nt, Human
ucggugcuacaagagaaagaa

SEQ ID NO: 1021273 - RNA, 19 nt, Human
ucggugcugccaagggcuc

SEQ ID NO: 1021274 - RNA, 22 nt, Human
ucggugcugccaagggcucagc

SEQ ID NO: 1021275 - RNA, 21 nt, Human
ucuaaagaguaucucccccac

SEQ ID NO: 1021276 - RNA, 19 nt, Human
ucucaaacuccugggcuca

SEQ ID NO: 1021277 - RNA, 19 nt, Human
ucucacucugguuggugga

SEQ ID NO: 1021278 - RNA, 23 nt, Human
ucucacucuuuuacccaggcugg

SEQ ID NO: 1021279 - RNA, 24 nt, Human
ucucacucuuuuacccaggcugga

SEQ ID NO: 1021280 - RNA, 18 nt, Human
ucucacuuuuugcccagg

SEQ ID NO: 1021281 - RNA, 24 nt, Human
ucucagaauaguugcuuuucuugu

SEQ ID NO: 1021282 - RNA, 22 nt, Human
ucucccaaguaaaaccaaguac

SEQ ID NO: 1021283 - RNA, 23 nt, Human
ucucccaaguaaaaccaaguacu

SEQ ID NO: 1021284 - RNA, 20 nt, Human
ucuccugccucucugaacau

SEQ ID NO: 1021285 - RNA, 24 nt, Human
ucucgaucugucgcgcaggcugga

SEQ ID NO: 1021286 - RNA, 20 nt, Human
ucucggccucccaaagugcu

SEQ ID NO: 1021287 - RNA, 19 nt, Human
ucuguagacuaccuugcua

SEQ ID NO: 1021288 - RNA, 24 nt, Human
ucugucgcgcaggcuggagugugg

SEQ ID NO: 1021289 - RNA, 24 nt, Human
ucuguugcccaggcuggagugcag

SEQ ID NO: 1021290 - RNA, 23 nt, Human
ucuugcucuguugcccaggcugg

SEQ ID NO: 1021291 - RNA, 24 nt, Human
ucuugcucuguugcccaggcugga

SEQ ID NO: 1021292 - RNA, 22 nt, Human
ucuuguugcccaggcuggagug

SEQ ID NO: 1021293 - RNA, 23 nt, Human
ucuuguuuguuuuuuuaauuuuu

SEQ ID NO: 1021294 - RNA, 24 nt, Human
ucuuuuacccaggcuggaguguag

SEQ ID NO: 1021295 - RNA, 19 nt, Human
ugaaaaaaagguaaaaacc

SEQ ID NO: 1021296 - RNA, 20 nt, Human
ugaaaaaaagguaaaaacca

SEQ ID NO: 1021297 - RNA, 22 nt, Human
ugaaacaccuugugacaguagu

SEQ ID NO: 1021298 - RNA, 24 nt, Human
ugaagaaaaaccacaguuaagacu

SEQ ID NO: 1021299 - RNA, 21 nt, Human
ugaauaaaucccuguuuguaa

SEQ ID NO: 1021300 - RNA, 24 nt, Human
ugacaguaguggcaucuuacagaa

SEQ ID NO: 1021301 - RNA, 21 nt, Human
ugaccucaggugauccaccca

SEQ ID NO: 1021302 - RNA, 24 nt, Human
ugaccucaggugauccacccaucu

SEQ ID NO: 1021303 - RNA, 24 nt, Human
ugauccacccaccucagccuccca

SEQ ID NO: 1021304 - RNA, 24 nt, Human
ugauccacccaucucggccuccca

SEQ ID NO: 1021305 - RNA, 21 nt, Human
ugccaaaaccucaaauaccac

SEQ ID NO: 1021306 - RNA, 24 nt, Human
ugccaaaaccucaaauaccacaaa

SEQ ID NO: 1021307 - RNA, 27 nt, Human
ugccaaaaccucaaauaccacaaaaca

SEQ ID NO: 1021308 - RNA, 19 nt, Human
ugccaagggcucagcgcuc

SEQ ID NO: 1021309 - RNA, 19 nt, Human
ugccaccuccaccuucugg

SEQ ID NO: 1021310 - RNA, 18 nt, Human
ugcccaggcuggagugca

SEQ ID NO: 1021311 - RNA, 18 nt, Human
ugcccaggcuggagugca

SEQ ID NO: 1021312 - RNA, 21 nt, Human
ugcccaggcuggagugcaaug

SEQ ID NO: 1021313 - RNA, 24 nt, Human
ugcccaggcuggagugcaauggug

SEQ ID NO: 1021314 - RNA, 21 nt, Human
ugcccaggcuggagugcagug

SEQ ID NO: 1021315 - RNA, 22 nt, Human
ugcccaggcuggagugcagugg

SEQ ID NO: 1021316 - RNA, 24 nt, Human
ugcccaggcuggagugcaguggca

SEQ ID NO: 1021317 - RNA, 24 nt, Human
ugccuccgccucccgaguagcugg

SEQ ID NO: 1021318 - RNA, 24 nt, Human
ugcucuuguugcccaggcuggagu

SEQ ID NO: 1021319 - RNA, 24 nt, Human
ugcugggauuacaggcgugagcca

SEQ ID NO: 1021320 - RNA, 24 nt, Human
ugcugggauuacaggugugagcca

SEQ ID NO: 1021321 - RNA, 24 nt, Human
ugcuucagccuccugaguagcugg

SEQ ID NO: 1021322 - RNA, 21 nt, Human
uggaacacacaaauuugagga

SEQ ID NO: 1021323 - RNA, 24 nt, Human
uggacuuuuaaguuuaagcagcuu

SEQ ID NO: 1021324 - RNA, 19 nt, Human
uggagugcaauggugugau

SEQ ID NO: 1021325 - RNA, 23 nt, Human
uggagugcaauggugugaucucg

SEQ ID NO: 1021326 - RNA, 24 nt, Human
uggagugcaauggugugaucucgg

SEQ ID NO: 1021327 - RNA, 18 nt, Human
uggagugcaguggcacaa

SEQ ID NO: 1021328 - RNA, 19 nt, Human
uggagugcaguggcacaau

SEQ ID NO: 1021329 - RNA, 21 nt, Human
uggagugcaguggcacaauca

SEQ ID NO: 1021330 - RNA, 19 nt, Human
uggaguguaguggcaccau

SEQ ID NO: 1021331 - RNA, 24 nt, Human
uggcaaacaaccaagagguaauau

SEQ ID NO: 1021332 - RNA, 20 nt, Human
uggcacaaucauaguucacu

SEQ ID NO: 1021333 - RNA, 24 nt, Human
uggcacaaucauaguucacugcag

SEQ ID NO: 1021334 - RNA, 19 nt, Human
uggcaccaucauagcuacu

SEQ ID NO: 1021335 - RNA, 21 nt, Human
uggcagaacaaaauggcauca

SEQ ID NO: 1021336 - RNA, 19 nt, Human
uggcagcccgugguaccgu

SEQ ID NO: 1021337 - RNA, 24 nt, Human
uggccaggcuggucucgaacuccu

SEQ ID NO: 1021338 - RNA, 19 nt, Human
uggcugccugauaaaaaaa

SEQ ID NO: 1021339 - RNA, 24 nt, Human
uggcuucaagugauccaccagccu

SEQ ID NO: 1021340 - RNA, 24 nt, Human
ugggacuguauguacaugccacca

SEQ ID NO: 1021341 - RNA, 18 nt, Human
ugggauuacaggcgugag

SEQ ID NO: 1021342 - RNA, 22 nt, Human
ugggauuacaggcgugagccac

SEQ ID NO: 1021343 - RNA, 23 nt, Human
ugggauuacaggcgugagccacc

SEQ ID NO: 1021344 - RNA, 24 nt, Human
ugggauuacaggcgugagccacca

SEQ ID NO: 1021345 - RNA, 25 nt, Human
ugggauuacaggcgugagccaccau

SEQ ID NO: 1021346 - RNA, 18 nt, Human
ugggauuacaggugugag

SEQ ID NO: 1021347 - RNA, 19 nt, Human
ugggauuacaggugugagc

SEQ ID NO: 1021348 - RNA, 22 nt, Human
ugggauuacaggugugagccac

SEQ ID NO: 1021349 - RNA, 23 nt, Human
ugggauuacaggugugagccacc

SEQ ID NO: 1021350 - RNA, 24 nt, Human
ugggauuacaggugugagccacca

SEQ ID NO: 1021351 - RNA, 18 nt, Human
ugggauuacaggugugcg

SEQ ID NO: 1021352 - RNA, 19 nt, Human
ugggauuacaggugugcgc

SEQ ID NO: 1021353 - RNA, 21 nt, Human
ugggauuacaggugugcgcca

SEQ ID NO: 1021354 - RNA, 22 nt, Human
ugggauuacaggugugcgccac

SEQ ID NO: 1021355 - RNA, 24 nt, Human
ugggauuacaggugugcgccacca

SEQ ID NO: 1021356 - RNA, 21 nt, Human
ugggauuauaggcaugaacca

SEQ ID NO: 1021357 - RNA, 23 nt, Human
ugggauuauaggcaugaaccacc

SEQ ID NO: 1021358 - RNA, 24 nt, Human
ugggauuauaggcaugaaccaccg

SEQ ID NO: 1021359 - RNA, 21 nt, Human
ugggauuauaggcgcccgcca

SEQ ID NO: 1021360 - RNA, 22 nt, Human
ugggauuauaggcgcccgccac

SEQ ID NO: 1021361 - RNA, 22 nt, Human
ugggauuauaggcgcccgccac

SEQ ID NO: 1021362 - RNA, 24 nt, Human
ugggauuauaggcgcccgccacua

SEQ ID NO: 1021363 - RNA, 19 nt, Human
ugggcucaggugauccucu

SEQ ID NO: 1021364 - RNA, 24 nt, Human
uggggucuugcucuguugcccagg

SEQ ID NO: 1021365 - RNA, 24 nt, Human
ugggguuucacuauguuggccagg

SEQ ID NO: 1021366 - RNA, 24 nt, Human
ugggguuucacuauguuggucagg

SEQ ID NO: 1021367 - RNA, 24 nt, Human
uggucaggcuggucacaaacuccu

SEQ ID NO: 1021368 - RNA, 18 nt, Human
uggugauaaccucaggua

SEQ ID NO: 1021369 - RNA, 24 nt, Human
uguaagcuauacaaaucucccaag

SEQ ID NO: 1021370 - RNA, 21 nt, Human
uguauguacaugccaccaugu

SEQ ID NO: 1021371 - RNA, 21 nt, Human
uguauuuuuaguagagauggg

SEQ ID NO: 1021372 - RNA, 21 nt, Human
ugugagcaacuuauuuaaguc

SEQ ID NO: 1021373 - RNA, 21 nt, Human
ugugcaugccacucaagggcc

SEQ ID NO: 1021374 - RNA, 20 nt, Human
uguggcuccuucucacuaag

SEQ ID NO: 1021375 - RNA, 18 nt, Human
uguuacacagcuuaaaag

SEQ ID NO: 1021376 - RNA, 20 nt, Human
uguugcccaggcuggagugc

SEQ ID NO: 1021377 - RNA, 24 nt, Human
uuaaauaaguccuagcacaacuga

SEQ ID NO: 1021378 - RNA, 23 nt, Human
uuaaguucuacauuuaguagcug

SEQ ID NO: 1021379 - RNA, 21 nt, Human
uuacaguuaaaacaaacaaga

SEQ ID NO: 1021380 - RNA, 24 nt, Human
uuacccaggcuggaguguaguggc

SEQ ID NO: 1021381 - RNA, 20 nt, Human
uuaggagcuugagaaucaga

SEQ ID NO: 1021382 - RNA, 18 nt, Human
uuaguagagaugggguuu

SEQ ID NO: 1021383 - RNA, 18 nt, Human
uuaguagagaugggguuu

SEQ ID NO: 1021384 - RNA, 21 nt, Human
uuaguagagaugggguuucac

SEQ ID NO: 1021385 - RNA, 21 nt, Human
uuaguagagaugggguuucac

SEQ ID NO: 1021386 - RNA, 21 nt, Human
uuaguagagaugggguuucac

SEQ ID NO: 1021387 - RNA, 21 nt, Human
uuaguagagaugggguuucac

SEQ ID NO: 1021388 - RNA, 24 nt, Human
uuaguagagaugggguuucacuau

SEQ ID NO: 1021389 - RNA, 24 nt, Human
uuaguagagaugggguuucacuau

SEQ ID NO: 1021390 - RNA, 19 nt, Human
uucaagaagacacucuucu

SEQ ID NO: 1021391 - RNA, 23 nt, Human
uucaagugauccaccagccucag

SEQ ID NO: 1021392 - RNA, 21 nt, Human
uucaagugauucuccugccuc

SEQ ID NO: 1021393 - RNA, 24 nt, Human
uucaagugauucuccugccuccgc

SEQ ID NO: 1021394 - RNA, 20 nt, Human
uucaccccaaauccaagaaa

SEQ ID NO: 1021395 - RNA, 21 nt, Human
uucagcaugaccuuguaauaa

SEQ ID NO: 1021396 - RNA, 24 nt, Human
uucagccuccugaguagcugggac

SEQ ID NO: 1021397 - RNA, 19 nt, Human
uucauauuuagaaagucac

SEQ ID NO: 1021398 - RNA, 20 nt, Human
uucauauuuagaaagucacu

SEQ ID NO: 1021399 - RNA, 23 nt, Human
uuccuggcuucaagugauccacc

SEQ ID NO: 1021400 - RNA, 18 nt, Human
uucgagcgauucuccugc

SEQ ID NO: 1021401 - RNA, 23 nt, Human
uucgagcgauucuccugccuugg

SEQ ID NO: 1021402 - RNA, 24 nt, Human
uucgagcgauucuccugccuuggc

SEQ ID NO: 1021403 - RNA, 25 nt, Human
uucucaagauucuucuugggcaguu

SEQ ID NO: 1021404 - RNA, 28 nt, Human
uucuuguuuguuuuuuuaauuuuuuuuu

SEQ ID NO: 1021405 - RNA, 18 nt, Human
uugcccaggcuggagugc

SEQ ID NO: 1021406 - RNA, 24 nt, Human
uugcccaggcuggagugcaguggc

SEQ ID NO: 1021407 - RNA, 24 nt, Human
uugcucuguugcccaggcuggagu

SEQ ID NO: 1021408 - RNA, 22 nt, Human
uugcucuuguugcccaggcugg

SEQ ID NO: 1021409 - RNA, 23 nt, Human
uugcucuuguugcccaggcugga

SEQ ID NO: 1021410 - RNA, 22 nt, Human
uugcuuuucuuguuuguuuuuu

SEQ ID NO: 1021411 - RNA, 23 nt, Human
uuggccuacuuagagcuggucuu

SEQ ID NO: 1021412 - RNA, 24 nt, Human
uuggccuacuuagagcuggucuuu

SEQ ID NO: 1021413 - RNA, 21 nt, Human
uugggauuauaggcaugaacc

SEQ ID NO: 1021414 - RNA, 18 nt, Human
uugguucugugucugugg

SEQ ID NO: 1021415 - RNA, 23 nt, Human
uuguauuuuuaguagagaugggg

SEQ ID NO: 1021416 - RNA, 22 nt, Human
uuguccaaacucaauguuagaa

SEQ ID NO: 1021417 - RNA, 25 nt, Human
uuguggcuccuucucacuaaguggc

SEQ ID NO: 1021418 - RNA, 24 nt, Human
uuucacuauguuggccaggcuggu

SEQ ID NO: 1021419 - RNA, 24 nt, Human
uuucagaaauaucuuccuuuuuuu

SEQ ID NO: 1021420 - RNA, 20 nt, Human
uuucauauuuagaaagucac

SEQ ID NO: 1021421 - RNA, 22 nt, Human
uuugccaaaaccucaaauacca

SEQ ID NO: 1021422 - RNA, 24 nt, Human
uuugcucuuguugcccaggcugga

SEQ ID NO: 1021423 - RNA, 23 nt, Human
uuuguagagacaggggucucacu

SEQ ID NO: 1021424 - RNA, 24 nt, Human
uuuugcucuuguugcccaggcugg

SEQ ID NO: 1021425 - RNA, 23 nt, Human
uuuuuaauuuuuuuuuucugguc

SEQ ID NO: 1021426 - RNA, 24 nt, Human
uuuuuaguagagaugggguuucac

SEQ ID NO: 1021427 - RNA, 24 nt, Human
uuuuuaguagagaugggguuucac

SEQ ID NO: 1021428 - RNA, 20 nt, Human
uuuuuguauuuuuaguagag

SEQ ID NO: 1021429 - RNA, 22 nt, Human
uuuuuguauuuuuaguagagaa

SEQ ID NO: 1021430 - RNA, 24 nt, Human
uuuuuuguauuuuuaguagagaug

SEQ ID NO: 1021431 - RNA, 22 nt, Human
uuuuuuguauuuuuaguagagg

SEQ ID NO: 1021432 - RNA, 18 nt, Human
uuuuuuuguagagacagg

SEQ ID NO: 1021433 - RNA, 24 nt, Human
uuuuuuuuuuuuugagauagaguu

SEQ ID NO: 1021434 - RNA, 18 nt, Human
uuuuuuuuuuuuuuuuug

SEQ ID NO: 1021435 - RNA, 19 nt, Human
aaaaggccagaugacuggu

SEQ ID NO: 1021436 - RNA, 27 nt, Human
aaacacaaccuuaacauagcaaaaaua

SEQ ID NO: 1021437 - RNA, 24 nt, Human
aaacauccuucaccgcacacaucc

SEQ ID NO: 1021438 - RNA, 22 nt, Human
aaacccaaggccaucuggccuc

SEQ ID NO: 1021439 - RNA, 26 nt, Human
acaguaaaaugagccacuuauaggga

SEQ ID NO: 1021440 - RNA, 24 nt, Human
accgcacacaucccgccucugacu

SEQ ID NO: 1021441 - RNA, 22 nt, Human
acuaaggcuuuucuguggccag

SEQ ID NO: 1021442 - RNA, 21 nt, Human
agcaguuucacaauggcugau

SEQ ID NO: 1021443 - RNA, 18 nt, Human
agcuccaaguucccaguu

SEQ ID NO: 1021444 - RNA, 19 nt, Human
aggauuaaacccaaggcca

SEQ ID NO: 1021445 - RNA, 20 nt, Human
aggcaucaccaaacuagaaa

SEQ ID NO: 1021446 - RNA, 22 nt, Human
aggcaucaccaaacuagaaaca

SEQ ID NO: 1021447 - RNA, 21 nt, Human
agggaaaagcaagcucagacg

SEQ ID NO: 1021448 - RNA, 23 nt, Human
augcaggucaacuuauaugcuug

SEQ ID NO: 1021449 - RNA, 18 nt, Human
caaaagcagaguguccag

SEQ ID NO: 1021450 - RNA, 22 nt, Human
caccaaacuagaaacaaauucc

SEQ ID NO: 1021451 - RNA, 18 nt, Human
cagaagacaguaaaauga

SEQ ID NO: 1021452 - RNA, 21 nt, Human
cagaucaacuuuacugaaucu

SEQ ID NO: 1021453 - RNA, 19 nt, Human
ccaaaaccaccaucaccgc

SEQ ID NO: 1021454 - RNA, 19 nt, Human
cccgccucugacucccagc

SEQ ID NO: 1021455 - RNA, 18 nt, Human
cuccugcuuccuguccgc

SEQ ID NO: 1021456 - RNA, 20 nt, Human
cuugagcuaauacuaaggcu

SEQ ID NO: 1021457 - RNA, 21 nt, Human
gcaaaaauaaggccaccagga

SEQ ID NO: 1021458 - RNA, 20 nt, Human
gcagaguguccagagggaaa

SEQ ID NO: 1021459 - RNA, 21 nt, Human
gcaggucaacuuauaugcuug

SEQ ID NO: 1021460 - RNA, 25 nt, Human
gccaggauuaaacccaaggccaucu

SEQ ID NO: 1021461 - RNA, 22 nt, Human
gggaagaguaaaagggagaccg

SEQ ID NO: 1021462 - RNA, 24 nt, Human
uaaaaugagccacuuauagggaua

SEQ ID NO: 1021463 - RNA, 20 nt, Human
uaacauagcaaaaauaaggc

SEQ ID NO: 1021464 - RNA, 23 nt, Human
uagcaaaaauaaggccaccagga

SEQ ID NO: 1021465 - RNA, 20 nt, Human
uaugcaacuugacaauauuc

SEQ ID NO: 1021466 - RNA, 27 nt, Human
ucaagauagagaguaaagauuuaaaaa

SEQ ID NO: 1021467 - RNA, 19 nt, Human
ucaccaaacuagaaacaaa

SEQ ID NO: 1021468 - RNA, 21 nt, Human
uccucagucccaggacaaguc

SEQ ID NO: 1021469 - RNA, 30 nt, Human
uccuucaccgcacacaucccgccucugacu

SEQ ID NO: 1021470 - RNA, 18 nt, Human
ucugcauuguauuuguac

SEQ ID NO: 1021471 - RNA, 23 nt, Human
ugacaauauucuguaugcuuaac

SEQ ID NO: 1021472 - RNA, 19 nt, Human
ugacugguaaauuuuccuc

SEQ ID NO: 1021473 - RNA, 26 nt, Human
ugagaugggaaaaugcauacagauca

SEQ ID NO: 1021474 - RNA, 19 nt, Human
ugugcugaucacugaguuc

SEQ ID NO: 1021475 - RNA, 23 nt, Human
uuuacuuaagcuuucuuccacgu

SEQ ID NO: 1021476 - RNA, 24 nt, Human
uuuaggggucaugcucaagccccu

SEQ ID NO: 1021477 - RNA, 18 nt, Human
aacagaguccccuuucca

SEQ ID NO: 1021478 - RNA, 19 nt, Human
aacagaguccccuuuccag

SEQ ID NO: 1021479 - RNA, 21 nt, Human
aaccgcgcgcggacccagggc

SEQ ID NO: 1021480 - RNA, 19 nt, Human
aagccgccgccaggccuga

SEQ ID NO: 1021481 - RNA, 21 nt, Human
acacggcucaacaggaaggcc

SEQ ID NO: 1021482 - RNA, 18 nt, Human
agagaugggcaguguccc

SEQ ID NO: 1021483 - RNA, 24 nt, Human
agagaugggcaguguccggagucc

SEQ ID NO: 1021484 - RNA, 23 nt, Human
agaggucggcgccgucaucaccc

SEQ ID NO: 1021485 - RNA, 19 nt, Human
aggccccggccguggucaa

SEQ ID NO: 1021486 - RNA, 19 nt, Human
augggcagugucccauuug

SEQ ID NO: 1021487 - RNA, 18 nt, Human
cacaacagugccaagagg

SEQ ID NO: 1021488 - RNA, 24 nt, Human
cacuucgcucucacaacagugcca

SEQ ID NO: 1021489 - RNA, 20 nt, Human
caggaaaugcccaaggcccc

SEQ ID NO: 1021490 - RNA, 21 nt, Human
ccaaaaaaacuguagcuggcg

SEQ ID NO: 1021491 - RNA, 24 nt, Human
ccaauggccaacagaguccccuuu

SEQ ID NO: 1021492 - RNA, 24 nt, Human
ccaauggccaacagaguccccuuu

SEQ ID NO: 1021493 - RNA, 24 nt, Human
ccccgagcccgcgccuucgcggac

SEQ ID NO: 1021494 - RNA, 21 nt, Human
ccccgccgucgccgcgaccca

SEQ ID NO: 1021495 - RNA, 18 nt, Human
ccgcgacccacacuugcc

SEQ ID NO: 1021496 - RNA, 22 nt, Human
ccgggaacgacacugccccaaa

SEQ ID NO: 1021497 - RNA, 22 nt, Human
ccuccgggaacgacacugcccc

SEQ ID NO: 1021498 - RNA, 23 nt, Human
cgcggacccagggccuuagcccc

SEQ ID NO: 1021499 - RNA, 23 nt, Human
cggccgaccuccgggaacgacac

SEQ ID NO: 1021500 - RNA, 26 nt, Human
cuugccggaguccucagcagggccuc

SEQ ID NO: 1021501 - RNA, 21 nt, Human
gacgcgccgcguagcugguga

SEQ ID NO: 1021502 - RNA, 25 nt, Human
gccccgagcccgcgccuucgcggac

SEQ ID NO: 1021503 - RNA, 20 nt, Human
gccggaguccucagcagggc

SEQ ID NO: 1021504 - RNA, 24 nt, Human
gcggccgaccuccgggaacgacac

SEQ ID NO: 1021505 - RNA, 20 nt, Human
gguaacggcggccgaccucc

SEQ ID NO: 1021506 - RNA, 23 nt, Human
ucaccgucccgcaggcgccccga

SEQ ID NO: 1021507 - RNA, 18 nt, Human
uccaauggccaacagagu

SEQ ID NO: 1021508 - RNA, 18 nt, Human
uccaauggccaacagagu

SEQ ID NO: 1021509 - RNA, 23 nt, Human
uccgggaacgacacugccccaaa

SEQ ID NO: 1021510 - RNA, 22 nt, Human
ugccccaaaccguuccuuagcu

SEQ ID NO: 1021511 - RNA, 21 nt, Human
ugccggaguccucagcagggc

SEQ ID NO: 1021512 - RNA, 23 nt, Human
uggccaacagaguccccuuucca

SEQ ID NO: 1021513 - RNA, 23 nt, Human
uggccaacagaguccccuuucca

SEQ ID NO: 1021514 - RNA, 21 nt, Human
uguccggaguccucagcaggg

SEQ ID NO: 1021515 - RNA, 21 nt, Human
uucaugacgacauaacccaaa

SEQ ID NO: 1021516 - RNA, 20 nt, Human
uuuacacggcucaacaggaa

SEQ ID NO: 1021517 - RNA, 22 nt, Human
aaaaagccagagccccaccccc

SEQ ID NO: 1021518 - RNA, 19 nt, Human
aaaagaugaggacccucaa

SEQ ID NO: 1021519 - RNA, 22 nt, Human
aaagugcaacacaccucaugaa

SEQ ID NO: 1021520 - RNA, 24 nt, Human
aaaguuacccaaacauccauaaca

SEQ ID NO: 1021521 - RNA, 18 nt, Human
aacacaccucaugaaagc

SEQ ID NO: 1021522 - RNA, 22 nt, Human
aacugcccagggagacacagga

SEQ ID NO: 1021523 - RNA, 21 nt, Human
aagcacaggagauuuucgcac

SEQ ID NO: 1021524 - RNA, 18 nt, Human
aagcaguuccaaauuugg

SEQ ID NO: 1021525 - RNA, 23 nt, Human
aauccacucuacacaguaacaaa

SEQ ID NO: 1021526 - RNA, 24 nt, Human
aaucuccuuuuguuugccacaguc

SEQ ID NO: 1021527 - RNA, 20 nt, Human
acacaugcugaaacagcaca

SEQ ID NO: 1021528 - RNA, 22 nt, Human
acagaagacagcaaucccucaa

SEQ ID NO: 1021529 - RNA, 22 nt, Human
acauccaccucagucacucgga

SEQ ID NO: 1021530 - RNA, 19 nt, Human
accaacuaugcccuccuca

SEQ ID NO: 1021531 - RNA, 18 nt, Human
accccacgccuccaccgc

SEQ ID NO: 1021532 - RNA, 21 nt, Human
accgagacuuguggauguccc

SEQ ID NO: 1021533 - RNA, 21 nt, Human
acgagagccgcguagaaagcc

SEQ ID NO: 1021534 - RNA, 20 nt, Human
acuaaggcggcugcuucugg

SEQ ID NO: 1021535 - RNA, 24 nt, Human
acuccaagucucaaucuacccggu

SEQ ID NO: 1021536 - RNA, 18 nt, Human
acugcaccgagacuugug

SEQ ID NO: 1021537 - RNA, 22 nt, Human
acugcccagggagacacaggaa

SEQ ID NO: 1021538 - RNA, 19 nt, Human
acugggcucacaggaaauc

SEQ ID NO: 1021539 - RNA, 18 nt, Human
agaaagcacagaagucug

SEQ ID NO: 1021540 - RNA, 23 nt, Human
agcaauacaaaugagcaaacaau

SEQ ID NO: 1021541 - RNA, 18 nt, Human
agccagagccccaccccc

SEQ ID NO: 1021542 - RNA, 21 nt, Human
agguuuauuuguaauagccaa

SEQ ID NO: 1021543 - RNA, 18 nt, Human
auaaagguggugcccaca

SEQ ID NO: 1021544 - RNA, 26 nt, Human
augcaacaagauaauggauuaaccuu

SEQ ID NO: 1021545 - RNA, 19 nt, Human
augcacucccaucccacac

SEQ ID NO: 1021546 - RNA, 24 nt, Human
augucugaagguccugagaauuuc

SEQ ID NO: 1021547 - RNA, 21 nt, Human
auuuguaauagccaaaaacug

SEQ ID NO: 1021548 - RNA, 22 nt, Human
caaaauccccaagaguaaagac

SEQ ID NO: 1021549 - RNA, 18 nt, Human
caaaggguacucacagag

SEQ ID NO: 1021550 - RNA, 18 nt, Human
caagaguaaagacugcca

SEQ ID NO: 1021551 - RNA, 20 nt, Human
caauaguguaaauuagguca

SEQ ID NO: 1021552 - RNA, 23 nt, Human
caaugguagggggugaagugggg

SEQ ID NO: 1021553 - RNA, 25 nt, Human
caauuaaguugacaaagaagaaaaa

SEQ ID NO: 1021554 - RNA, 23 nt, Human
cacauccaccucagucacucgga

SEQ ID NO: 1021555 - RNA, 23 nt, Human
cacucggaaugcuggcuggguca

SEQ ID NO: 1021556 - RNA, 19 nt, Human
cacugcugagguuccuguc

SEQ ID NO: 1021557 - RNA, 18 nt, Human
cacuguauaaaucagagc

SEQ ID NO: 1021558 - RNA, 32 nt, Human
cacugucuuucuuugcuagguuccacgagaag

SEQ ID NO: 1021559 - RNA, 18 nt, Human
cagaagacagcaaucccu

SEQ ID NO: 1021560 - RNA, 21 nt, Human
cagagccccacccccuaaaaa

SEQ ID NO: 1021561 - RNA, 19 nt, Human
cagguacagaagacagcaa

SEQ ID NO: 1021562 - RNA, 23 nt, Human
cauaacaauuaaguugacaaaga

SEQ ID NO: 1021563 - RNA, 25 nt, Human
cauaacaauuaaguugacaaagaag

SEQ ID NO: 1021564 - RNA, 19 nt, Human
cauccccacuccauuaucu

SEQ ID NO: 1021565 - RNA, 19 nt, Human
caugaaagccucccacaua

SEQ ID NO: 1021566 - RNA, 21 nt, Human
ccacauccaccucagucacuc

SEQ ID NO: 1021567 - RNA, 24 nt, Human
ccacgccuccaccgcgcuggacgc

SEQ ID NO: 1021568 - RNA, 21 nt, Human
ccaggccacaaaguuaggcac

SEQ ID NO: 1021569 - RNA, 24 nt, Human
ccauauuccucucccuacaauuua

SEQ ID NO: 1021570 - RNA, 18 nt, Human
cccaagaguaaagacugc

SEQ ID NO: 1021571 - RNA, 19 nt, Human
cccacaccaucauaacugc

SEQ ID NO: 1021572 - RNA, 20 nt, Human
cccacccccuaaaaaguaca

SEQ ID NO: 1021573 - RNA, 25 nt, Human
ccgaaaccccacgccuccaccgcgc

SEQ ID NO: 1021574 - RNA, 19 nt, Human
ccugcagucuucacugucu

SEQ ID NO: 1021575 - RNA, 23 nt, Human
cgagagccgcguagaaagccgac

SEQ ID NO: 1021576 - RNA, 23 nt, Human
cgcaccaacuaugcccuccucac

SEQ ID NO: 1021577 - RNA, 19 nt, Human
cuagaucauguuugcucag

SEQ ID NO: 1021578 - RNA, 26 nt, Human
cucacugggcucacaggaaauccugg

SEQ ID NO: 1021579 - RNA, 27 nt, Human
cucuacacaguaacaaaauccccaaga

SEQ ID NO: 1021580 - RNA, 20 nt, Human
cugggcucacaggaaauccu

SEQ ID NO: 1021581 - RNA, 20 nt, Human
cugugcaggucaacugccca

SEQ ID NO: 1021582 - RNA, 21 nt, Human
cugugggcucagccgaaaccc

SEQ ID NO: 1021583 - RNA, 22 nt, Human
cuuacagucaauguuacuugcc

SEQ ID NO: 1021584 - RNA, 19 nt, Human
cuuaucaggaaucucccca

SEQ ID NO: 1021585 - RNA, 20 nt, Human
cuuccgccacaggcacuggc

SEQ ID NO: 1021586 - RNA, 26 nt, Human
gaaagccucccacauauguggugcuu

SEQ ID NO: 1021587 - RNA, 19 nt, Human
gacuuguggauguccccuc

SEQ ID NO: 1021588 - RNA, 21 nt, Human
gagcaaacaauugauucaugc

SEQ ID NO: 1021589 - RNA, 24 nt, Human
gcaauaguguaaauuaggucaaac

SEQ ID NO: 1021590 - RNA, 20 nt, Human
gccaaaaacugaaaguuacc

SEQ ID NO: 1021591 - RNA, 22 nt, Human
gccaggccacaaaguuaggcac

SEQ ID NO: 1021592 - RNA, 20 nt, Human
gccgaaaccccacgccucca

SEQ ID NO: 1021593 - RNA, 21 nt, Human
gcuuaucaggaaucuccccag

SEQ ID NO: 1021594 - RNA, 21 nt, Human
ggcucacaggaaauccuggca

SEQ ID NO: 1021595 - RNA, 22 nt, Human
gggcucacaggaaauccuggca

SEQ ID NO: 1021596 - RNA, 20 nt, Human
gggugaaguggggggggggg

SEQ ID NO: 1021597 - RNA, 20 nt, Human
guccuuuuggugagagcuag

SEQ ID NO: 1021598 - RNA, 18 nt, Human
gugucaggaaaucccagc

SEQ ID NO: 1021599 - RNA, 21 nt, Human
uaaaaacgcucacaagacuaa

SEQ ID NO: 1021600 - RNA, 19 nt, Human
uaaagacugccacaauagg

SEQ ID NO: 1021601 - RNA, 25 nt, Human
uaagacaaguaagucacagcuauca

SEQ ID NO: 1021602 - RNA, 22 nt, Human
uaagcaaugauguccacaucca

SEQ ID NO: 1021603 - RNA, 23 nt, Human
uaaguugacaaagaagaaaaauu

SEQ ID NO: 1021604 - RNA, 21 nt, Human
uacaaagugcaacacaccuca

SEQ ID NO: 1021605 - RNA, 20 nt, Human
uagaaaaugcuugcuguugc

SEQ ID NO: 1021606 - RNA, 24 nt, Human
uagccaaaaacugaaaguuaccca

SEQ ID NO: 1021607 - RNA, 20 nt, Human
uaucaggaaucuccccaggg

SEQ ID NO: 1021608 - RNA, 24 nt, Human
ucaauccacucuacacaguaacaa

SEQ ID NO: 1021609 - RNA, 21 nt, Human
ucacugcugagguuccugucc

SEQ ID NO: 1021610 - RNA, 18 nt, Human
ucacugggcucacaggaa

SEQ ID NO: 1021611 - RNA, 28 nt, Human
uccacucuacacaguaacaaaaucccca

SEQ ID NO: 1021612 - RNA, 20 nt, Human
ucccugagcaaaauggagug

SEQ ID NO: 1021613 - RNA, 19 nt, Human
ucucuucugucacugcuga

SEQ ID NO: 1021614 - RNA, 24 nt, Human
ucugccauccuuugguccccucug

SEQ ID NO: 1021615 - RNA, 23 nt, Human
ucuggauaucagggacuugaucc

SEQ ID NO: 1021616 - RNA, 23 nt, Human
ugaaacagcacauuuuacacuuu

SEQ ID NO: 1021617 - RNA, 20 nt, Human
ugacaaagaagaaaaauugu

SEQ ID NO: 1021618 - RNA, 19 nt, Human
ugacaguggccuuggccac

SEQ ID NO: 1021619 - RNA, 19 nt, Human
ugcaacaagauaauggauu

SEQ ID NO: 1021620 - RNA, 19 nt, Human
ugcccugugggcucagccg

SEQ ID NO: 1021621 - RNA, 22 nt, Human
ugcucagaaccuaaucaugagg

SEQ ID NO: 1021622 - RNA, 23 nt, Human
ugcuguugcuugugaauugugga

SEQ ID NO: 1021623 - RNA, 21 nt, Human
uggccacaggagauacagaug

SEQ ID NO: 1021624 - RNA, 20 nt, Human
uggugugaguccuaugagga

SEQ ID NO: 1021625 - RNA, 18 nt, Human
ugucugaagguccugaga

SEQ ID NO: 1021626 - RNA, 20 nt, Human
uguggauguccccucuagaa

SEQ ID NO: 1021627 - RNA, 24 nt, Human
uguggauguccccucuagaauguu

SEQ ID NO: 1021628 - RNA, 22 nt, Human
uuacccaaacauccauaacaau

SEQ ID NO: 1021629 - RNA, 18 nt, Human
uucacugucuuucuuugc

SEQ ID NO: 1021630 - RNA, 22 nt, Human
uucacugucuuucuuugcuagg

SEQ ID NO: 1021631 - RNA, 21 nt, Human
uucaugcaacaagauaaugga

SEQ ID NO: 1021632 - RNA, 19 nt, Human
uuccaaauuugggcgauuu

SEQ ID NO: 1021633 - RNA, 19 nt, Human
uugguccccucugaggcac

SEQ ID NO: 1021634 - RNA, 23 nt, Human
uuucauagguguacacacaugcu

SEQ ID NO: 1021635 - RNA, 26 nt, Human
acaaccauccacccaguagacaucaa

SEQ ID NO: 1021636 - RNA, 26 nt, Human
acaguggaaggccgacgccccaaggg

SEQ ID NO: 1021637 - RNA, 23 nt, Human
accauccacccaguagacaucac

SEQ ID NO: 1021638 - RNA, 22 nt, Human
agccgcgggaugagauuuaacc

SEQ ID NO: 1021639 - RNA, 21 nt, Human
aggcacagagggggauauaag

SEQ ID NO: 1021640 - RNA, 23 nt, Human
caaaaagaauggucagagaagca

SEQ ID NO: 1021641 - RNA, 18 nt, Human
caaguagccagucuaaac

SEQ ID NO: 1021642 - RNA, 22 nt, Human
cagaaaaggcacagagggggau

SEQ ID NO: 1021643 - RNA, 25 nt, Human
cagagaagcagcccccaaaucacaa

SEQ ID NO: 1021644 - RNA, 20 nt, Human
cagcgcuauuucugcagaag

SEQ ID NO: 1021645 - RNA, 20 nt, Human
caguagacaucaccaagugc

SEQ ID NO: 1021646 - RNA, 24 nt, Human
cauucaauaaacauuuauuagcac

SEQ ID NO: 1021647 - RNA, 21 nt, Human
ccccaaaucacaaccauccac

SEQ ID NO: 1021648 - RNA, 24 nt, Human
ccccaaaucacaaccauccaccca

SEQ ID NO: 1021649 - RNA, 18 nt, Human
cccccaaaucacaaccau

SEQ ID NO: 1021650 - RNA, 22 nt, Human
cccccaaaucacaaccauccac

SEQ ID NO: 1021651 - RNA, 23 nt, Human
cccccaaaucacaaccauccacc

SEQ ID NO: 1021652 - RNA, 24 nt, Human
cccccaaaucacaaccauccaccc

SEQ ID NO: 1021653 - RNA, 24 nt, Human
ccuaggccaaggcaguacucaggc

SEQ ID NO: 1021654 - RNA, 18 nt, Human
cugauaauguguaguggu

SEQ ID NO: 1021655 - RNA, 23 nt, Human
gcccccaaaucacaaccauccac

SEQ ID NO: 1021656 - RNA, 24 nt, Human
uaaagcccagcccacaauuucuau

SEQ ID NO: 1021657 - RNA, 18 nt, Human
uacccggggacaaaagaa

SEQ ID NO: 1021658 - RNA, 23 nt, Human
uagacaucaccaagugcugguuu

SEQ ID NO: 1021659 - RNA, 20 nt, Human
uaggccaaggcaguacucag

SEQ ID NO: 1021660 - RNA, 24 nt, Human
ucaaaaagaauggucagagaagca

SEQ ID NO: 1021661 - RNA, 25 nt, Human
ucaauaaacauuuauuagcaccugc

SEQ ID NO: 1021662 - RNA, 18 nt, Human
uccacccaguagacauca

SEQ ID NO: 1021663 - RNA, 20 nt, Human
ucccucuacccggggacaaa

SEQ ID NO: 1021664 - RNA, 24 nt, Human
ucuuaccucuucuagacaacucuc

SEQ ID NO: 1021665 - RNA, 21 nt, Human
ugacaaaugagcaccaacucu

SEQ ID NO: 1021666 - RNA, 19 nt, Human
ugggagagaacaaacaguu

SEQ ID NO: 1021667 - RNA, 20 nt, Human
ugguaaauaaagcccagccc

SEQ ID NO: 1021668 - RNA, 26 nt, Human
uguagugguaaauaaagcccagccca

SEQ ID NO: 1021669 - RNA, 18 nt, Human
aaagugcauggagauucu

SEQ ID NO: 1021670 - RNA, 22 nt, Human
aacaggaaauguggucuacaaa

SEQ ID NO: 1021671 - RNA, 18 nt, Human
aaguucuuagcacagagc

SEQ ID NO: 1021672 - RNA, 24 nt, Human
acagugagaguuuggaaucacugc

SEQ ID NO: 1021673 - RNA, 18 nt, Human
accccaaaacucuggucc

SEQ ID NO: 1021674 - RNA, 22 nt, Human
agauauauacauugaguccucc

SEQ ID NO: 1021675 - RNA, 18 nt, Human
aggaaauggggagaaagu

SEQ ID NO: 1021676 - RNA, 20 nt, Human
aggccacagccuccucacca

SEQ ID NO: 1021677 - RNA, 19 nt, Human
auugaugauuuuguaauga

SEQ ID NO: 1021678 - RNA, 25 nt, Human
caaagagcaacagcucaauaaacac

SEQ ID NO: 1021679 - RNA, 25 nt, Human
caagacagacagaucuguugaaucc

SEQ ID NO: 1021680 - RNA, 22 nt, Human
caccaagcuuaaaaauuggaaa

SEQ ID NO: 1021681 - RNA, 25 nt, Human
caccgagacacccacuucacaacag

SEQ ID NO: 1021682 - RNA, 18 nt, Human
cacuucacaacagggcgg

SEQ ID NO: 1021683 - RNA, 21 nt, Human
cagaagaaaaacaaauuacac

SEQ ID NO: 1021684 - RNA, 20 nt, Human
cagcauguuugccagggccc

SEQ ID NO: 1021685 - RNA, 24 nt, Human
ccaagcuuaaaaauuggaaaguuu

SEQ ID NO: 1021686 - RNA, 24 nt, Human
ccacugauuuaacucuaaucucgu

SEQ ID NO: 1021687 - RNA, 18 nt, Human
ccacugguauuguuccuc

SEQ ID NO: 1021688 - RNA, 21 nt, Human
ccauagccauugucuaaccca

SEQ ID NO: 1021689 - RNA, 26 nt, Human
ccauagccauugucuaacccagaagg

SEQ ID NO: 1021690 - RNA, 22 nt, Human
ccccaaggcuccaccgagacac

SEQ ID NO: 1021691 - RNA, 23 nt, Human
cccccuucuucugggacuguccc

SEQ ID NO: 1021692 - RNA, 26 nt, Human
ccucccuaggcaagauagucaggaac

SEQ ID NO: 1021693 - RNA, 24 nt, Human
ccucuaggaaauggggagaaaguu

SEQ ID NO: 1021694 - RNA, 19 nt, Human
ccugcaguccuggucucuc

SEQ ID NO: 1021695 - RNA, 19 nt, Human
ccugcucuaggccaacucc

SEQ ID NO: 1021696 - RNA, 18 nt, Human
ccugggacucagcuguca

SEQ ID NO: 1021697 - RNA, 27 nt, Human
cggggagugaggacagcacucucuuuc

SEQ ID NO: 1021698 - RNA, 22 nt, Human
cggugaguccuucaagaggcuc

SEQ ID NO: 1021699 - RNA, 19 nt, Human
cuaugcugaccucauccaa

SEQ ID NO: 1021700 - RNA, 21 nt, Human
cuauugaugauuuuguaauga

SEQ ID NO: 1021701 - RNA, 23 nt, Human
cucccaggcacacgcuguuccca

SEQ ID NO: 1021702 - RNA, 23 nt, Human
cucuaggccaacuccucucucac

SEQ ID NO: 1021703 - RNA, 23 nt, Human
cucugugcugagcucacaguggc

SEQ ID NO: 1021704 - RNA, 24 nt, Human
cuucaagaggcuccuagaaaaggg

SEQ ID NO: 1021705 - RNA, 19 nt, Human
cuucagcuaugcugaccuc

SEQ ID NO: 1021706 - RNA, 20 nt, Human
gacuuagaccccaaaacucu

SEQ ID NO: 1021707 - RNA, 19 nt, Human
gagaaaguaggagaaccac

SEQ ID NO: 1021708 - RNA, 23 nt, Human
gagcucacaguggccugcucuag

SEQ ID NO: 1021709 - RNA, 21 nt, Human
gccguugugaagauuaaauga

SEQ ID NO: 1021710 - RNA, 18 nt, Human
gcuguggugccaccucgg

SEQ ID NO: 1021711 - RNA, 18 nt, Human
gcuuaccugggacucagc

SEQ ID NO: 1021712 - RNA, 20 nt, Human
gcuugcaauuccagggccau

SEQ ID NO: 1021713 - RNA, 24 nt, Human
ggagaguagggacucggggaguga

SEQ ID NO: 1021714 - RNA, 24 nt, Human
ggucuuuacagagcuccuucucag

SEQ ID NO: 1021715 - RNA, 20 nt, Human
gugcugagcucacaguggcc

SEQ ID NO: 1021716 - RNA, 18 nt, Human
uaaaaauuggaaaguuua

SEQ ID NO: 1021717 - RNA, 24 nt, Human
uaagagcacgauagacucaagaca

SEQ ID NO: 1021718 - RNA, 19 nt, Human
uagacucaagacagacaga

SEQ ID NO: 1021719 - RNA, 23 nt, Human
uauaagacuuagaccccaaaacu

SEQ ID NO: 1021720 - RNA, 23 nt, Human
uauacaaaguucuuagcacagag

SEQ ID NO: 1021721 - RNA, 20 nt, Human
uaugcaauuccagucccgac

SEQ ID NO: 1021722 - RNA, 18 nt, Human
uauuuguuuaaaaaauuc

SEQ ID NO: 1021723 - RNA, 26 nt, Human
ucaccucccaaucuccaacgcucccc

SEQ ID NO: 1021724 - RNA, 20 nt, Human
ucacuguucuuccuacucug

SEQ ID NO: 1021725 - RNA, 20 nt, Human
ucaggccagggauccacugg

SEQ ID NO: 1021726 - RNA, 19 nt, Human
ucagggcauguauucuuca

SEQ ID NO: 1021727 - RNA, 21 nt, Human
uccaccgagacacccacuuca

SEQ ID NO: 1021728 - RNA, 23 nt, Human
uccauauuuguuuaaaaaauuca

SEQ ID NO: 1021729 - RNA, 21 nt, Human
ucccaagccucuaggaaaugg

SEQ ID NO: 1021730 - RNA, 19 nt, Human
ucccuaggcaagauaguca

SEQ ID NO: 1021731 - RNA, 21 nt, Human
ucccucaggccagggauccac

SEQ ID NO: 1021732 - RNA, 20 nt, Human
ucccucaggccagggauccc

SEQ ID NO: 1021733 - RNA, 19 nt, Human
uccuggggccguugugaag

SEQ ID NO: 1021734 - RNA, 24 nt, Human
uccuucucagcauguuugccaggg

SEQ ID NO: 1021735 - RNA, 23 nt, Human
ucuccuggggccguugugaagau

SEQ ID NO: 1021736 - RNA, 24 nt, Human
ucuccuggggggucuuuacagagc

SEQ ID NO: 1021737 - RNA, 22 nt, Human
ucucggagguauuacuugguuu

SEQ ID NO: 1021738 - RNA, 23 nt, Human
ucugagcuucuuccccugucuuu

SEQ ID NO: 1021739 - RNA, 20 nt, Human
ugagaaaguaggagaaccac

SEQ ID NO: 1021740 - RNA, 21 nt, Human
ugccugggcuugcaauuccag

SEQ ID NO: 1021741 - RNA, 24 nt, Human
ugccuucaaaucuggauccuuagu

SEQ ID NO: 1021742 - RNA, 22 nt, Human
ugcucaggaccacugauuuaac

SEQ ID NO: 1021743 - RNA, 22 nt, Human
ugcuccagcacgagcagcucca

SEQ ID NO: 1021744 - RNA, 18 nt, Human
uggaacucccaggcacac

SEQ ID NO: 1021745 - RNA, 23 nt, Human
uggauccuuaguauuuguaauuc

SEQ ID NO: 1021746 - RNA, 21 nt, Human
uggccugcucuaggccaacuc

SEQ ID NO: 1021747 - RNA, 18 nt, Human
uggcucaaauacugacac

SEQ ID NO: 1021748 - RNA, 20 nt, Human
uggcucaaauacugacacag

SEQ ID NO: 1021749 - RNA, 20 nt, Human
ugggagaguagggacucggg

SEQ ID NO: 1021750 - RNA, 20 nt, Human
uggggagaaaguuaguacuu

SEQ ID NO: 1021751 - RNA, 24 nt, Human
uggucucuucuguaugcaauucca

SEQ ID NO: 1021752 - RNA, 18 nt, Human
uuagaccccaaaacucug

SEQ ID NO: 1021753 - RNA, 21 nt, Human
uucaaaggcuguggugccacc

SEQ ID NO: 1021754 - RNA, 20 nt, Human
uugggaaggucagggcaugu

SEQ ID NO: 1021755 - RNA, 20 nt, Human
uuugccagggcccagggcuu

SEQ ID NO: 1021756 - RNA, 20 nt, Human
uuuguaaugaugucacuguc

SEQ ID NO: 1021757 - RNA, 22 nt, Human
uuuguaauucacuuccaaauua

SEQ ID NO: 1021758 - RNA, 19 nt, Human
aaaaaaccaaccuaaaccc

SEQ ID NO: 1021759 - RNA, 23 nt, Human
aaaaaaccaaccuaaacccauau

SEQ ID NO: 1021760 - RNA, 24 nt, Human
aaaagccagaacauaacaguggga

SEQ ID NO: 1021761 - RNA, 23 nt, Human
aaccaaaaagcucuggcccuccc

SEQ ID NO: 1021762 - RNA, 27 nt, Human
aacccagaaacacuuccaccaaaaaaa

SEQ ID NO: 1021763 - RNA, 21 nt, Human
aacuaguauccgcugaguccc

SEQ ID NO: 1021764 - RNA, 22 nt, Human
aacuccaagguucuugagcugu

SEQ ID NO: 1021765 - RNA, 24 nt, Human
aagcagaagguaaaagaagggacc

SEQ ID NO: 1021766 - RNA, 22 nt, Human
aagucugcacaccuuggggaca

SEQ ID NO: 1021767 - RNA, 19 nt, Human
aaguuuccagcaacagcuu

SEQ ID NO: 1021768 - RNA, 19 nt, Human
aauuuguaaaucagaacca

SEQ ID NO: 1021769 - RNA, 21 nt, Human
accccaagaggacuggugaca

SEQ ID NO: 1021770 - RNA, 25 nt, Human
accccacagcccagcgggagcuuca

SEQ ID NO: 1021771 - RNA, 19 nt, Human
accgugugacaaacaaggu

SEQ ID NO: 1021772 - RNA, 18 nt, Human
acuucccuaacccagaaa

SEQ ID NO: 1021773 - RNA, 22 nt, Human
agacagcuuuggcaagagccca

SEQ ID NO: 1021774 - RNA, 22 nt, Human
agcaacagcuuuuauuaacaac

SEQ ID NO: 1021775 - RNA, 19 nt, Human
agcagguuuucaaacacau

SEQ ID NO: 1021776 - RNA, 22 nt, Human
aggaaguagccgagaaccaaua

SEQ ID NO: 1021777 - RNA, 27 nt, Human
aggcauuuaagacugaaccagugaacu

SEQ ID NO: 1021778 - RNA, 18 nt, Human
aggcggcagaagcuccag

SEQ ID NO: 1021779 - RNA, 21 nt, Human
caaaaaaccaaccuaaaccca

SEQ ID NO: 1021780 - RNA, 22 nt, Human
caaaaaaccaaccuaaacccau

SEQ ID NO: 1021781 - RNA, 21 nt, Human
caaaaagcucuggcccuccca

SEQ ID NO: 1021782 - RNA, 19 nt, Human
caaggaaaggagacacuug

SEQ ID NO: 1021783 - RNA, 20 nt, Human
caaggaaaggagacacuugc

SEQ ID NO: 1021784 - RNA, 21 nt, Human
caccggcaggcgcggagcccc

SEQ ID NO: 1021785 - RNA, 23 nt, Human
cagcagcaguguacaagcgcgag

SEQ ID NO: 1021786 - RNA, 21 nt, Human
cagcgggagcuucagcucugg

SEQ ID NO: 1021787 - RNA, 23 nt, Human
cagcgggagcuucagcucugguc

SEQ ID NO: 1021788 - RNA, 22 nt, Human
caggcucccaaauggagaggua

SEQ ID NO: 1021789 - RNA, 22 nt, Human
cauaaggaaaacauuugugaca

SEQ ID NO: 1021790 - RNA, 23 nt, Human
caucaaaaaaccaaccuaaaccc

SEQ ID NO: 1021791 - RNA, 25 nt, Human
caucaaaaaaccaaccuaaacccuc

SEQ ID NO: 1021792 - RNA, 21 nt, Human
caucugaggauuuuuugugcu

SEQ ID NO: 1021793 - RNA, 21 nt, Human
ccagaaacacuuccaccaaaa

SEQ ID NO: 1021794 - RNA, 21 nt, Human
ccagcuucuggcaaccccaca

SEQ ID NO: 1021795 - RNA, 22 nt, Human
ccccaaaccucuuucuucuaau

SEQ ID NO: 1021796 - RNA, 23 nt, Human
ccccaaaccucuuucuucuaauu

SEQ ID NO: 1021797 - RNA, 23 nt, Human
ccccgggauggcaaccccagcuu

SEQ ID NO: 1021798 - RNA, 18 nt, Human
cccgagagacaaacacug

SEQ ID NO: 1021799 - RNA, 26 nt, Human
ccuaaagcaaguuuccagcaacagcc

SEQ ID NO: 1021800 - RNA, 22 nt, Human
ccuaacccagaaacacuuccac

SEQ ID NO: 1021801 - RNA, 21 nt, Human
cgcggagccccacagcagcag

SEQ ID NO: 1021802 - RNA, 24 nt, Human
cuacaaagcagguuuucaaacaca

SEQ ID NO: 1021803 - RNA, 21 nt, Human
cucacaucagucccucaaacg

SEQ ID NO: 1021804 - RNA, 24 nt, Human
cuccaagguucuugagcuguuccu

SEQ ID NO: 1021805 - RNA, 20 nt, Human
cugacccuccuccccacuua

SEQ ID NO: 1021806 - RNA, 21 nt, Human
cuuagcugacccuccucccca

SEQ ID NO: 1021807 - RNA, 23 nt, Human
gaacuccaagguucuugagcugu

SEQ ID NO: 1021808 - RNA, 24 nt, Human
gcucuggcccucccacuucucuua

SEQ ID NO: 1021809 - RNA, 23 nt, Human
ggauaaacagacuuuaacuuccc

SEQ ID NO: 1021810 - RNA, 21 nt, Human
ggcgcggagccccacagcagc

SEQ ID NO: 1021811 - RNA, 18 nt, Human
gugaacuucuuccagaaa

SEQ ID NO: 1021812 - RNA, 21 nt, Human
uaaaaaggcaccaugcaggca

SEQ ID NO: 1021813 - RNA, 23 nt, Human
uaacuucccuaacccagaaacac

SEQ ID NO: 1021814 - RNA, 20 nt, Human
uauccuaaaaaggcaccaug

SEQ ID NO: 1021815 - RNA, 22 nt, Human
ucccaaugccauggcucauuuu

SEQ ID NO: 1021816 - RNA, 19 nt, Human
ucucacuuucuggaaaguc

SEQ ID NO: 1021817 - RNA, 20 nt, Human
ucucacuuucuggaaaguca

SEQ ID NO: 1021818 - RNA, 19 nt, Human
ucugagugaacuucuucca

SEQ ID NO: 1021819 - RNA, 26 nt, Human
ucuguaacaugagacagauagcaagc

SEQ ID NO: 1021820 - RNA, 24 nt, Human
ugacauguaccccgggauggcaac

SEQ ID NO: 1021821 - RNA, 23 nt, Human
ugagugaacuucuuccagaaauu

SEQ ID NO: 1021822 - RNA, 21 nt, Human
ugccauggcucauuuucaggu

SEQ ID NO: 1021823 - RNA, 20 nt, Human
uggcaaccccagcuucuggc

SEQ ID NO: 1021824 - RNA, 21 nt, Human
ugggaggaaugagugugaaac

SEQ ID NO: 1021825 - RNA, 22 nt, Human
ugguacaaaaccccaagaggac

SEQ ID NO: 1021826 - RNA, 23 nt, Human
ugugaaacaagagguggagaagc

SEQ ID NO: 1021827 - RNA, 18 nt, Human
uucauugugcuauucaug

SEQ ID NO: 1021828 - RNA, 25 nt, Human
uucuaauucaucugaggauuuuuug

SEQ ID NO: 1021829 - RNA, 18 nt, Human
uucucggugccaccagug

SEQ ID NO: 1021830 - RNA, 23 nt, Human
uugugcuauucaugacccagaaa

SEQ ID NO: 1021831 - RNA, 22 nt, Human
uuucacguuuaauauguaaugg

SEQ ID NO: 1021832 - RNA, 20 nt, Human
uuucgccagauuucccucca

SEQ ID NO: 1021833 - RNA, 20 nt, Human
aaaaauaaagaugaaaaauu

SEQ ID NO: 1021834 - RNA, 20 nt, Human
aacuaccaaaaaugucucua

SEQ ID NO: 1021835 - RNA, 20 nt, Human
aagaacaaaacauacaggga

SEQ ID NO: 1021836 - RNA, 23 nt, Human
aagaacaaaacauacagggagga

SEQ ID NO: 1021837 - RNA, 22 nt, Human
aagaauucgccgcugaccccuc

SEQ ID NO: 1021838 - RNA, 24 nt, Human
aagcaaagaacaaaacauacaggg

SEQ ID NO: 1021839 - RNA, 21 nt, Human
acaggaacuggacuucuccca

SEQ ID NO: 1021840 - RNA, 23 nt, Human
accaauaaucaguuuuauuuuuu

SEQ ID NO: 1021841 - RNA, 23 nt, Human
accaguaacaaagugguacugag

SEQ ID NO: 1021842 - RNA, 22 nt, Human
acccugaaggcuucuccaugcu

SEQ ID NO: 1021843 - RNA, 21 nt, Human
accuuaaaaauaaagaugaaa

SEQ ID NO: 1021844 - RNA, 24 nt, Human
accuuaaaaauaaagaugaaaaau

SEQ ID NO: 1021845 - RNA, 19 nt, Human
agaauauucacaugcucaa

SEQ ID NO: 1021846 - RNA, 20 nt, Human
agacguacauuuucaccccc

SEQ ID NO: 1021847 - RNA, 23 nt, Human
agagaauggcagucaguuugccu

SEQ ID NO: 1021848 - RNA, 23 nt, Human
agcaggcugcaaacauauuacca

SEQ ID NO: 1021849 - RNA, 20 nt, Human
agcugcaagaaaaccuguaa

SEQ ID NO: 1021850 - RNA, 18 nt, Human
aggaucgggggagcggag

SEQ ID NO: 1021851 - RNA, 25 nt, Human
aggaucgggggagcggaggugacgg

SEQ ID NO: 1021852 - RNA, 19 nt, Human
aggugacggaagccgccgc

SEQ ID NO: 1021853 - RNA, 19 nt, Human
aguggccagggcugugaga

SEQ ID NO: 1021854 - RNA, 24 nt, Human
auaaagaugaaaaauuuaugaacg

SEQ ID NO: 1021855 - RNA, 24 nt, Human
aucaaacauucuucuuccuuaaag

SEQ ID NO: 1021856 - RNA, 18 nt, Human
caacaggccgaaagaauu

SEQ ID NO: 1021857 - RNA, 22 nt, Human
caauccgugugcaucagguacc

SEQ ID NO: 1021858 - RNA, 25 nt, Human
cagaaccuggauucucuugauauug

SEQ ID NO: 1021859 - RNA, 21 nt, Human
cagacacucaaagaggccaca

SEQ ID NO: 1021860 - RNA, 20 nt, Human
cagcaacagugacguuuggg

SEQ ID NO: 1021861 - RNA, 19 nt, Human
caggacaaccagaaagcua

SEQ ID NO: 1021862 - RNA, 24 nt, Human
caggccgaaagaauucgccgcuga

SEQ ID NO: 1021863 - RNA, 26 nt, Human
ccauacaaagacaagcagcuggccgu

SEQ ID NO: 1021864 - RNA, 21 nt, Human
cccaugugucucggggcaauc

SEQ ID NO: 1021865 - RNA, 18 nt, Human
cccgacugagaacccgug

SEQ ID NO: 1021866 - RNA, 19 nt, Human
cccgugcuguagaccaagg

SEQ ID NO: 1021867 - RNA, 21 nt, Human
ccuuaaaaauaaagaugaaaa

SEQ ID NO: 1021868 - RNA, 21 nt, Human
cgccgcugaccccuccuuggc

SEQ ID NO: 1021869 - RNA, 23 nt, Human
cgccgcugaccccuccuuggccc

SEQ ID NO: 1021870 - RNA, 22 nt, Human
cggucguuaagguggaucuucc

SEQ ID NO: 1021871 - RNA, 24 nt, Human
cguuggggcuucucucgggggguc

SEQ ID NO: 1021872 - RNA, 19 nt, Human
cuccaucaaacauucuucu

SEQ ID NO: 1021873 - RNA, 20 nt, Human
cucuugauauuggaagaaga

SEQ ID NO: 1021874 - RNA, 23 nt, Human
cugaaggcuucuccaugcuacag

SEQ ID NO: 1021875 - RNA, 22 nt, Human
cugaccccuccuuggcccaugu

SEQ ID NO: 1021876 - RNA, 25 nt, Human
cuuagcagcaucucugaugucuucu

SEQ ID NO: 1021877 - RNA, 25 nt, Human
cuuccccccauucuaacuaccaaaa

SEQ ID NO: 1021878 - RNA, 20 nt, Human
gaaccuggauucucuugaua

SEQ ID NO: 1021879 - RNA, 22 nt, Human
gacugcaugauuauuuucaacc

SEQ ID NO: 1021880 - RNA, 21 nt, Human
gagaauauucacaugcucaag

SEQ ID NO: 1021881 - RNA, 22 nt, Human
gagaauggcagucaguuugccu

SEQ ID NO: 1021882 - RNA, 23 nt, Human
gagguuguccagaaggaaauuag

SEQ ID NO: 1021883 - RNA, 23 nt, Human
gcagggcaccaggacaaccagaa

SEQ ID NO: 1021884 - RNA, 19 nt, Human
gcccauguggugacaucug

SEQ ID NO: 1021885 - RNA, 18 nt, Human
gccucgucuucccaguuu

SEQ ID NO: 1021886 - RNA, 19 nt, Human
ggaaaggggcagaugacag

SEQ ID NO: 1021887 - RNA, 21 nt, Human
ggaaaggggcagaugacagga

SEQ ID NO: 1021888 - RNA, 20 nt, Human
ggauucucuugauauuggaa

SEQ ID NO: 1021889 - RNA, 18 nt, Human
gggaauaggaucggggga

SEQ ID NO: 1021890 - RNA, 21 nt, Human
ggugacggaagccgccgccga

SEQ ID NO: 1021891 - RNA, 25 nt, Human
guagaccaagggucggccaaguuuu

SEQ ID NO: 1021892 - RNA, 20 nt, Human
uagaaguaucugucacucuu

SEQ ID NO: 1021893 - RNA, 24 nt, Human
uagaaguggucugaagucauuuug

SEQ ID NO: 1021894 - RNA, 18 nt, Human
uagcagcaucucugaugu

SEQ ID NO: 1021895 - RNA, 23 nt, Human
uagcagcaucucugaugucuucu

SEQ ID NO: 1021896 - RNA, 23 nt, Human
uagcguaagugcucacaagauuc

SEQ ID NO: 1021897 - RNA, 22 nt, Human
uaggaucgggggagcggaggug

SEQ ID NO: 1021898 - RNA, 18 nt, Human
uaugccauuggucaagga

SEQ ID NO: 1021899 - RNA, 22 nt, Human
ucacaagauucauaaaaaugga

SEQ ID NO: 1021900 - RNA, 26 nt, Human
ucagguaccaguaacaaagugguacu

SEQ ID NO: 1021901 - RNA, 22 nt, Human
ucaguggccagggcugugagac

SEQ ID NO: 1021902 - RNA, 26 nt, Human
uccaugcuacagacguacaggggacc

SEQ ID NO: 1021903 - RNA, 20 nt, Human
ucccaaguuccguggauucu

SEQ ID NO: 1021904 - RNA, 24 nt, Human
ucccaaguuccguggauucuuuug

SEQ ID NO: 1021905 - RNA, 22 nt, Human
ucgcccgacugagaacccgugc

SEQ ID NO: 1021906 - RNA, 22 nt, Human
ucgccgcugaccccuccuuggc

SEQ ID NO: 1021907 - RNA, 24 nt, Human
ucuccaugcuacagacguacauuu

SEQ ID NO: 1021908 - RNA, 24 nt, Human
ucucccaaguuccguggauucuuu

SEQ ID NO: 1021909 - RNA, 19 nt, Human
ucucggggcaaucgacucc

SEQ ID NO: 1021910 - RNA, 22 nt, Human
ugaaaaguaaagcaaagaacaa

SEQ ID NO: 1021911 - RNA, 18 nt, Human
ugacauuaaaugccacgg

SEQ ID NO: 1021912 - RNA, 19 nt, Human
ugagaacccgugcuguaga

SEQ ID NO: 1021913 - RNA, 22 nt, Human
ugaggaaucaagugagacuagg

SEQ ID NO: 1021914 - RNA, 19 nt, Human
ugauuucucucuuuagugu

SEQ ID NO: 1021915 - RNA, 19 nt, Human
ugcaagaaaaccuguaaga

SEQ ID NO: 1021916 - RNA, 22 nt, Human
ugcaaggugaaaaguaaagcaa

SEQ ID NO: 1021917 - RNA, 19 nt, Human
ugcaucagguaccaguaac

SEQ ID NO: 1021918 - RNA, 19 nt, Human
uggaaguccagggcugcug

SEQ ID NO: 1021919 - RNA, 21 nt, Human
uggcaagccauacaaagacaa

SEQ ID NO: 1021920 - RNA, 20 nt, Human
uggcuggaaucauuuccaca

SEQ ID NO: 1021921 - RNA, 23 nt, Human
uggggcuucucucggggggucug

SEQ ID NO: 1021922 - RNA, 22 nt, Human
ugucaguggccagggcugugag

SEQ ID NO: 1021923 - RNA, 23 nt, Human
uguggggggcuccugugugcugg

SEQ ID NO: 1021924 - RNA, 21 nt, Human
uuaaggguuauuuagaggagu

SEQ ID NO: 1021925 - RNA, 18 nt, Human
uuacaagucaggaguauc

SEQ ID NO: 1021926 - RNA, 24 nt, Human
uuagcagcaucucugaugucuucu

SEQ ID NO: 1021927 - RNA, 21 nt, Human
uucaugaccuuccacguuccu

SEQ ID NO: 1021928 - RNA, 21 nt, Human
uuggcccaugugucucggggc

SEQ ID NO: 1021929 - RNA, 19 nt, Human
uuguccagaaggaaauuag

SEQ ID NO: 1021930 - RNA, 20 nt, Human
uuuacaggaacuggacuucu

SEQ ID NO: 1021931 - RNA, 22 nt, Human
uuucuccaucaaacauucuucu

SEQ ID NO: 1021932 - RNA, 26 nt, Human
aaaaagaugcaccucugaauauccuu

SEQ ID NO: 1021933 - RNA, 21 nt, Human
aaaguuguucccucgaaggug

SEQ ID NO: 1021934 - RNA, 23 nt, Human
aacaaaaauggaaaacuuacagu

SEQ ID NO: 1021935 - RNA, 29 nt, Human
aacccccuacaaucacagucauccacacc

SEQ ID NO: 1021936 - RNA, 22 nt, Human
aaggcuuucccaaacucaucac

SEQ ID NO: 1021937 - RNA, 23 nt, Human
acagaaaaagaugcaccucugaa

SEQ ID NO: 1021938 - RNA, 26 nt, Human
acccccaaaagaagaauaaugcugac

SEQ ID NO: 1021939 - RNA, 22 nt, Human
accugguuuguagacaaguggu

SEQ ID NO: 1021940 - RNA, 25 nt, Human
agaucuucaacuacagccacagccu

SEQ ID NO: 1021941 - RNA, 18 nt, Human
agcaacccccuacaauca

SEQ ID NO: 1021942 - RNA, 22 nt, Human
aggcaaaaagauucauaucuga

SEQ ID NO: 1021943 - RNA, 22 nt, Human
agguauugguaucauccucugu

SEQ ID NO: 1021944 - RNA, 21 nt, Human
auaaauuuuauaagaacagaa

SEQ ID NO: 1021945 - RNA, 24 nt, Human
caaaagaagaauaaugcugacauu

SEQ ID NO: 1021946 - RNA, 24 nt, Human
caaaguugcugaccaacccccaaa

SEQ ID NO: 1021947 - RNA, 21 nt, Human
cacacaggagacaccaacacc

SEQ ID NO: 1021948 - RNA, 25 nt, Human
cacagucauccacacaggagacacc

SEQ ID NO: 1021949 - RNA, 18 nt, Human
caccauaggcugaagcug

SEQ ID NO: 1021950 - RNA, 18 nt, Human
cacccagcaacccccuac

SEQ ID NO: 1021951 - RNA, 23 nt, Human
cagagcauauguuuaacccuggc

SEQ ID NO: 1021952 - RNA, 21 nt, Human
cagaguucucggagccggcuc

SEQ ID NO: 1021953 - RNA, 22 nt, Human
cagaucuucaacuacagccaca

SEQ ID NO: 1021954 - RNA, 19 nt, Human
cagccuccuccccacucuc

SEQ ID NO: 1021955 - RNA, 20 nt, Human
ccaacuccugguucucaggu

SEQ ID NO: 1021956 - RNA, 23 nt, Human
ccacagccuccuccccacucucc

SEQ ID NO: 1021957 - RNA, 24 nt, Human
ccacagcucacaaauggggaggaa

SEQ ID NO: 1021958 - RNA, 21 nt, Human
ccacccagcaacccccuacaa

SEQ ID NO: 1021959 - RNA, 19 nt, Human
cccgcacccaggccuggag

SEQ ID NO: 1021960 - RNA, 19 nt, Human
ccuacaaucacagucaucc

SEQ ID NO: 1021961 - RNA, 21 nt, Human
ccucugaauauccuuugaucu

SEQ ID NO: 1021962 - RNA, 22 nt, Human
cuaaagucccacagcucacaaa

SEQ ID NO: 1021963 - RNA, 23 nt, Human
cuacagccacagccuccucccca

SEQ ID NO: 1021964 - RNA, 20 nt, Human
cucaaaaacagccccuccau

SEQ ID NO: 1021965 - RNA, 22 nt, Human
cucaaaaacagccccuccauaa

SEQ ID NO: 1021966 - RNA, 20 nt, Human
cucacuaagcucuuguucca

SEQ ID NO: 1021967 - RNA, 21 nt, Human
cucaggcaggauagucaggaa

SEQ ID NO: 1021968 - RNA, 21 nt, Human
cuccauaacaauuuauuucca

SEQ ID NO: 1021969 - RNA, 22 nt, Human
cugcagcaccccaaugaccgau

SEQ ID NO: 1021970 - RNA, 20 nt, Human
cuggagccugguucccuggc

SEQ ID NO: 1021971 - RNA, 19 nt, Human
cuguaugucuguugguucc

SEQ ID NO: 1021972 - RNA, 18 nt, Human
cuuccuccacuuucacaa

SEQ ID NO: 1021973 - RNA, 24 nt, Human
cuugcuuugaugccaacuccuggu

SEQ ID NO: 1021974 - RNA, 18 nt, Human
gaccauagcaaugauuuc

SEQ ID NO: 1021975 - RNA, 21 nt, Human
gcauauguuuaacccuggcaa

SEQ ID NO: 1021976 - RNA, 18 nt, Human
gccacagccuccucccca

SEQ ID NO: 1021977 - RNA, 19 nt, Human
gccccuccauaacaauuua

SEQ ID NO: 1021978 - RNA, 18 nt, Human
gcuagggaauaagaaggc

SEQ ID NO: 1021979 - RNA, 18 nt, Human
gcuguaugucuguugguu

SEQ ID NO: 1021980 - RNA, 22 nt, Human
ggaaaucauaagaaauggaccg

SEQ ID NO: 1021981 - RNA, 18 nt, Human
ggaaggcuuacucuggcu

SEQ ID NO: 1021982 - RNA, 19 nt, Human
gguggcggggcugcagcac

SEQ ID NO: 1021983 - RNA, 21 nt, Human
guaacaaaaauggaaaacuua

SEQ ID NO: 1021984 - RNA, 21 nt, Human
guaagcagcaagcugcccaag

SEQ ID NO: 1021985 - RNA, 22 nt, Human
uaaaacuacagguuucauacua

SEQ ID NO: 1021986 - RNA, 23 nt, Human
uaaaacuacuuaaaugaugcugc

SEQ ID NO: 1021987 - RNA, 23 nt, Human
uaaaaugccuaauaagguugcaa

SEQ ID NO: 1021988 - RNA, 24 nt, Human
uaacaaaaauggaaaacuuacagu

SEQ ID NO: 1021989 - RNA, 23 nt, Human
uacagaaaaagaugcaccucuga

SEQ ID NO: 1021990 - RNA, 21 nt, Human
uaccuugugaagaacagagau

SEQ ID NO: 1021991 - RNA, 24 nt, Human
uaugaaaugagacauagauuucua

SEQ ID NO: 1021992 - RNA, 18 nt, Human
ucaaaaacagccccucca

SEQ ID NO: 1021993 - RNA, 22 nt, Human
ucaaaaacagccccuccauaac

SEQ ID NO: 1021994 - RNA, 21 nt, Human
uccccaaaaccuuacauuugu

SEQ ID NO: 1021995 - RNA, 20 nt, Human
uccccaguaagcagcaagcu

SEQ ID NO: 1021996 - RNA, 23 nt, Human
uccucuguuuuacagguggggag

SEQ ID NO: 1021997 - RNA, 24 nt, Human
ucuaaaaugccuaauaagguugca

SEQ ID NO: 1021998 - RNA, 20 nt, Human
ucuaaaccauuaaaacuaca

SEQ ID NO: 1021999 - RNA, 24 nt, Human
ugacagaguucucggagccggcuc

SEQ ID NO: 1022000 - RNA, 28 nt, Human
ugaccaacccccaaaagaagaauaaugc

SEQ ID NO: 1022001 - RNA, 24 nt, Human
ugauaugaaucaucaacauaguua

SEQ ID NO: 1022002 - RNA, 19 nt, Human
uggaaggcuuacucuggcu

SEQ ID NO: 1022003 - RNA, 20 nt, Human
uggaaggcuuacucuggcuu

SEQ ID NO: 1022004 - RNA, 20 nt, Human
uggacgauucuuauucccca

SEQ ID NO: 1022005 - RNA, 27 nt, Human
uggcacucaaaguugcugaccaacccc

SEQ ID NO: 1022006 - RNA, 23 nt, Human
uggcggggcugcagcaccccaau

SEQ ID NO: 1022007 - RNA, 23 nt, Human
uggcucacuaagcucuuguucca

SEQ ID NO: 1022008 - RNA, 22 nt, Human
uggcuuuaaguaaagggauaac

SEQ ID NO: 1022009 - RNA, 20 nt, Human
uggggaggaaagauuugaac

SEQ ID NO: 1022010 - RNA, 20 nt, Human
ugguggaggcaaaaagauuc

SEQ ID NO: 1022011 - RNA, 20 nt, Human
uguaugucuguugguuccug

SEQ ID NO: 1022012 - RNA, 18 nt, Human
ugucaccauaggcugaag

SEQ ID NO: 1022013 - RNA, 19 nt, Human
ugucuaagcaugcuggucu

SEQ ID NO: 1022014 - RNA, 27 nt, Human
uguuccacauccuccaagagcacuuca

SEQ ID NO: 1022015 - RNA, 22 nt, Human
uuaguccaguucugcuggaaca

SEQ ID NO: 1022016 - RNA, 26 nt, Human
uuaguccaguucugcuggaacaguau

SEQ ID NO: 1022017 - RNA, 18 nt, Human
uucccuggcucacuaagc

SEQ ID NO: 1022018 - RNA, 22 nt, Human
uucuuggucccagauagggucu

SEQ ID NO: 1022019 - RNA, 23 nt, Human
uugcuccagcaccagcagcucca

SEQ ID NO: 1022020 - RNA, 23 nt, Human
uuggaaggcuuacucuggcuuua

SEQ ID NO: 1022021 - RNA, 18 nt, Human
uuggucccagauaggguc

SEQ ID NO: 1022022 - RNA, 23 nt, Human
uuuaaaauuuucugauuuaaucu

SEQ ID NO: 1022023 - RNA, 23 nt, Human
uuuaaaggaaaucauaagaaaug

SEQ ID NO: 1022024 - RNA, 21 nt, Human
uuucuaaaccauuaaaacuac

SEQ ID NO: 1022025 - RNA, 19 nt, Human
uuucuggccuuagccacuu

SEQ ID NO: 1022026 - RNA, 21 nt, Human
uuugaacuuggugccagagca

SEQ ID NO: 1022027 - RNA, 18 nt, Human
uuuuuuuuuuuuuuuuug

SEQ ID NO: 1022028 - RNA, 18 nt, Human
uuuuuuuuuuuuuuuuug

SEQ ID NO: 1022029 - RNA, 27 nt, Human
aaaaaaaaaaaaaaagaacaaguaaaa

SEQ ID NO: 1022030 - RNA, 21 nt, Human
aaaaaaaagaacaaguaaaaa

SEQ ID NO: 1022031 - RNA, 24 nt, Human
aaaaacaaaaacaaacaaaagaaa

SEQ ID NO: 1022032 - RNA, 20 nt, Human
aaaaaggcaacuaagaaaua

SEQ ID NO: 1022033 - RNA, 25 nt, Human
aaaacaaacaaaagaaaacuguacc

SEQ ID NO: 1022034 - RNA, 26 nt, Human
aaacaaacaaaagaaaacuguaccag

SEQ ID NO: 1022035 - RNA, 30 nt, Human
aaaccucccaccaaaaacaaaaacaaagcg

SEQ ID NO: 1022036 - RNA, 26 nt, Human
aaagaacaaguaaaaauggagacuac

SEQ ID NO: 1022037 - RNA, 19 nt, Human
aaagaauucuccugccuca

SEQ ID NO: 1022038 - RNA, 20 nt, Human
aaagcuucaggcaguggcua

SEQ ID NO: 1022039 - RNA, 24 nt, Human
aaagugcugggauuagaggcauga

SEQ ID NO: 1022040 - RNA, 24 nt, Human
aaauagccauauaacaugcaggaa

SEQ ID NO: 1022041 - RNA, 26 nt, Human
aacaaacaaaagaaaacuguaccagu

SEQ ID NO: 1022042 - RNA, 21 nt, Human
aacaacaaaaaggcaacuaag

SEQ ID NO: 1022043 - RNA, 21 nt, Human
aacaagaacauucacagcagc

SEQ ID NO: 1022044 - RNA, 21 nt, Human
aaccuaacuguccaucggugg

SEQ ID NO: 1022045 - RNA, 20 nt, Human
aagaaaacagacacaagagg

SEQ ID NO: 1022046 - RNA, 24 nt, Human
aagaauucuccugccucagccucc

SEQ ID NO: 1022047 - RNA, 19 nt, Human
aaguagcugggauuacagg

SEQ ID NO: 1022048 - RNA, 26 nt, Human
aaguagcugggauuacaggugcaugc

SEQ ID NO: 1022049 - RNA, 19 nt, Human
aagugcugggauuagaggc

SEQ ID NO: 1022050 - RNA, 18 nt, Human
acaguacauaccucaaag

SEQ ID NO: 1022051 - RNA, 18 nt, Human
acauacucuucucaccau

SEQ ID NO: 1022052 - RNA, 22 nt, Human
acauauacuaagugcaucaguu

SEQ ID NO: 1022053 - RNA, 23 nt, Human
accaaaaaaaaaaaaaaaaaaaa

SEQ ID NO: 1022054 - RNA, 21 nt, Human
accaaaaacaaaaacaaacaa

SEQ ID NO: 1022055 - RNA, 24 nt, Human
accauguuggccaggcugaucucg

SEQ ID NO: 1022056 - RNA, 22 nt, Human
accgugcccagccgggagaugg

SEQ ID NO: 1022057 - RNA, 21 nt, Human
accuaauagcaaaucucagca

SEQ ID NO: 1022058 - RNA, 23 nt, Human
accucaggugaucccccagccuc

SEQ ID NO: 1022059 - RNA, 23 nt, Human
accuuaacuugcugggccucagc

SEQ ID NO: 1022060 - RNA, 18 nt, Human
acgauaauggagguuaag

SEQ ID NO: 1022061 - RNA, 25 nt, Human
acucuguugcccaggcuggagugca

SEQ ID NO: 1022062 - RNA, 22 nt, Human
acuguagagagagucaggccug

SEQ ID NO: 1022063 - RNA, 24 nt, Human
acuguagagagagucaggccuguc

SEQ ID NO: 1022064 - RNA, 30 nt, Human
acuuuaaaaccaaaaaaaaaaaaaaaaaaa

SEQ ID NO: 1022065 - RNA, 20 nt, Human
agaauagugauaaccuuuga

SEQ ID NO: 1022066 - RNA, 19 nt, Human
agaguuuaacauaccucuc

SEQ ID NO: 1022067 - RNA, 22 nt, Human
agaguuuaacauaccucucuca

SEQ ID NO: 1022068 - RNA, 18 nt, Human
agaugacuuugauagccc

SEQ ID NO: 1022069 - RNA, 27 nt, Human
agauggaagcuuuuuuuuauuauuauu

SEQ ID NO: 1022070 - RNA, 21 nt, Human
agcaaauaccuaugacucagu

SEQ ID NO: 1022071 - RNA, 24 nt, Human
agccauauaacaugcaggaaccuu

SEQ ID NO: 1022072 - RNA, 22 nt, Human
agcuuuuuuuuauuauuauuau

SEQ ID NO: 1022073 - RNA, 22 nt, Human
aggaaaaacaaaucuaugguga

SEQ ID NO: 1022074 - RNA, 21 nt, Human
aggcaugagccaccgugccca

SEQ ID NO: 1022075 - RNA, 25 nt, Human
aggcuggagugcaguggcgcaaucu

SEQ ID NO: 1022076 - RNA, 18 nt, Human
aggugaucccccagccuc

SEQ ID NO: 1022077 - RNA, 20 nt, Human
agugcaguggcgcaaucucg

SEQ ID NO: 1022078 - RNA, 24 nt, Human
agugcaguggcgcaaucucggcuc

SEQ ID NO: 1022079 - RNA, 23 nt, Human
auauauguauguauauacauaaa

SEQ ID NO: 1022080 - RNA, 18 nt, Human
auauguauguauauacau

SEQ ID NO: 1022081 - RNA, 21 nt, Human
auggucacaggagggcuccuc

SEQ ID NO: 1022082 - RNA, 19 nt, Human
auuacaggugcaugccacc

SEQ ID NO: 1022083 - RNA, 22 nt, Human
caaaauucaccaagguguaccc

SEQ ID NO: 1022084 - RNA, 22 nt, Human
caaagaauucuccugccucagc

SEQ ID NO: 1022085 - RNA, 24 nt, Human
caaagaggccacauacucuucuca

SEQ ID NO: 1022086 - RNA, 24 nt, Human
caaagugcugggauuagaggcaug

SEQ ID NO: 1022087 - RNA, 18 nt, Human
caacauagauaaaucuca

SEQ ID NO: 1022088 - RNA, 23 nt, Human
caacuaagaaauagccauauaac

SEQ ID NO: 1022089 - RNA, 22 nt, Human
caaucugaacagaaaacccagg

SEQ ID NO: 1022090 - RNA, 19 nt, Human
cacaauggaauacuauuca

SEQ ID NO: 1022091 - RNA, 21 nt, Human
cacacugccaaucugaacaga

SEQ ID NO: 1022092 - RNA, 20 nt, Human
caccaaaaacaaaaacaaac

SEQ ID NO: 1022093 - RNA, 24 nt, Human
caccauguuggccaggcugaucuc

SEQ ID NO: 1022094 - RNA, 27 nt, Human
caccauguuggccaggcugaucucgaa

SEQ ID NO: 1022095 - RNA, 20 nt, Human
cacccagaugacuuugauag

SEQ ID NO: 1022096 - RNA, 22 nt, Human
cacuauauuaagugaagaaaac

SEQ ID NO: 1022097 - RNA, 22 nt, Human
cacucccaccgugccgugccgc

SEQ ID NO: 1022098 - RNA, 24 nt, Human
cacucccaccgugccgugccgcac

SEQ ID NO: 1022099 - RNA, 24 nt, Human
cacucuguugcccaggcuggagug

SEQ ID NO: 1022100 - RNA, 21 nt, Human
cacugcaaccucugccuccug

SEQ ID NO: 1022101 - RNA, 23 nt, Human
cacugcaaccucugccuccuggg

SEQ ID NO: 1022102 - RNA, 20 nt, Human
cacugccaaucugaacagaa

SEQ ID NO: 1022103 - RNA, 24 nt, Human
cagaguuucacucuguugcccagg

SEQ ID NO: 1022104 - RNA, 20 nt, Human
cagcagcuuuauucauaaca

SEQ ID NO: 1022105 - RNA, 25 nt, Human
cagccucagccucccaaagugcugg

SEQ ID NO: 1022106 - RNA, 19 nt, Human
cagcuuccucaucugggaa

SEQ ID NO: 1022107 - RNA, 19 nt, Human
caggugaaauaaaccuccc

SEQ ID NO: 1022108 - RNA, 22 nt, Human
cauauauauguauguauauaca

SEQ ID NO: 1022109 - RNA, 24 nt, Human
caugaaaccaucccugaacacaau

SEQ ID NO: 1022110 - RNA, 22 nt, Human
caugccacccagaugacuuuga

SEQ ID NO: 1022111 - RNA, 24 nt, Human
cauguuggccaggcugaucucgaa

SEQ ID NO: 1022112 - RNA, 23 nt, Human
ccaaaaaaaaaaaaaaaaaaaaa

SEQ ID NO: 1022113 - RNA, 26 nt, Human
ccaaaaacaaaaacaaacaaaagaaa

SEQ ID NO: 1022114 - RNA, 24 nt, Human
ccaaagugcugggauuagaggcau

SEQ ID NO: 1022115 - RNA, 21 nt, Human
ccaaguagcugggauuacagg

SEQ ID NO: 1022116 - RNA, 25 nt, Human
ccacauacucuucucaccauguaau

SEQ ID NO: 1022117 - RNA, 24 nt, Human
ccacccagaugacuuugauagccc

SEQ ID NO: 1022118 - RNA, 20 nt, Human
ccagagucacauccagugac

SEQ ID NO: 1022119 - RNA, 21 nt, Human
ccagccggagacacucccacc

SEQ ID NO: 1022120 - RNA, 28 nt, Human
ccagccggagacacucccaccgugccgu

SEQ ID NO: 1022121 - RNA, 22 nt, Human
cccaaguagcugggauuacagg

SEQ ID NO: 1022122 - RNA, 23 nt, Human
cccaaguagcugggauuacaggu

SEQ ID NO: 1022123 - RNA, 24 nt, Human
cccaaguagcugggauuacaggug

SEQ ID NO: 1022124 - RNA, 20 nt, Human
cccaccaaaaacaaaaacaa

SEQ ID NO: 1022125 - RNA, 26 nt, Human
cccaccuuaacuugcugggccucagc

SEQ ID NO: 1022126 - RNA, 21 nt, Human
cccagaugacuuugauagccc

SEQ ID NO: 1022127 - RNA, 24 nt, Human
ccccagccucagccucccaaagug

SEQ ID NO: 1022128 - RNA, 26 nt, Human
cccccagccucagccucccaaagugc

SEQ ID NO: 1022129 - RNA, 22 nt, Human
ccgugccgugccgcaccgcgcc

SEQ ID NO: 1022130 - RNA, 21 nt, Human
ccucaggugaucccccagccu

SEQ ID NO: 1022131 - RNA, 24 nt, Human
ccuccuggguucaaagaauucucc

SEQ ID NO: 1022132 - RNA, 19 nt, Human
ccucugccuccuggguuca

SEQ ID NO: 1022133 - RNA, 18 nt, Human
ccugaccucaggugaucc

SEQ ID NO: 1022134 - RNA, 18 nt, Human
ccugaccucaggugaucc

SEQ ID NO: 1022135 - RNA, 32 nt, Human
ccugaccucaggugaucccccagccucagccg

SEQ ID NO: 1022136 - RNA, 23 nt, Human
ccugccucagccucccaaguagc

SEQ ID NO: 1022137 - RNA, 21 nt, Human
ccuugcuugcaagaagggcug

SEQ ID NO: 1022138 - RNA, 18 nt, Human
cgugccgugccgcaccgc

SEQ ID NO: 1022139 - RNA, 25 nt, Human
cuaaggaggaagggguaauuugggu

SEQ ID NO: 1022140 - RNA, 22 nt, Human
cuagaaaucaugucuacuuguc

SEQ ID NO: 1022141 - RNA, 24 nt, Human
cucacugcaaccucugccuccugg

SEQ ID NO: 1022142 - RNA, 24 nt, Human
cucagccucccaaguagcugggau

SEQ ID NO: 1022143 - RNA, 19 nt, Human
cucauauucauacuagccu

SEQ ID NO: 1022144 - RNA, 21 nt, Human
cuccuggguucaaagaauucu

SEQ ID NO: 1022145 - RNA, 19 nt, Human
cugcaaccucugccuccug

SEQ ID NO: 1022146 - RNA, 23 nt, Human
cugcaaccucugccuccuggguu

SEQ ID NO: 1022147 - RNA, 24 nt, Human
cugcaaccucugccuccuggguuc

SEQ ID NO: 1022148 - RNA, 23 nt, Human
cugccucagccucccaaguagcu

SEQ ID NO: 1022149 - RNA, 22 nt, Human
cuggagccaggguuugaggucu

SEQ ID NO: 1022150 - RNA, 18 nt, Human
cugggccucagcuuccuc

SEQ ID NO: 1022151 - RNA, 23 nt, Human
cugggccucagcuuccucaucug

SEQ ID NO: 1022152 - RNA, 22 nt, Human
cuguacacuucagauguaugca

SEQ ID NO: 1022153 - RNA, 21 nt, Human
cuguagagagagucaggccug

SEQ ID NO: 1022154 - RNA, 18 nt, Human
gaagaaaacagacacaag

SEQ ID NO: 1022155 - RNA, 24 nt, Human
gaccucaggugaucccccagccuc

SEQ ID NO: 1022156 - RNA, 20 nt, Human
gaugcaaagcuucaggcagu

SEQ ID NO: 1022157 - RNA, 18 nt, Human
gauuacaggugcaugcca

SEQ ID NO: 1022158 - RNA, 18 nt, Human
gauuagaggcaugagcca

SEQ ID NO: 1022159 - RNA, 24 nt, Human
gauuagaggcaugagccaccgugc

SEQ ID NO: 1022160 - RNA, 19 nt, Human
gccucagcuuccucaucug

SEQ ID NO: 1022161 - RNA, 20 nt, Human
gccucagcuuccucaucugg

SEQ ID NO: 1022162 - RNA, 23 nt, Human
gcugaucucgaacuccugaccuc

SEQ ID NO: 1022163 - RNA, 19 nt, Human
gcuggagugcaguggcgca

SEQ ID NO: 1022164 - RNA, 19 nt, Human
ggaaagucauagccccaug

SEQ ID NO: 1022165 - RNA, 22 nt, Human
gggauuucaccauguuggccag

SEQ ID NO: 1022166 - RNA, 23 nt, Human
gggauuucaccauguuggccagg

SEQ ID NO: 1022167 - RNA, 23 nt, Human
gggccucagcuuccucaucuggu

SEQ ID NO: 1022168 - RNA, 24 nt, Human
ggggauuucaccauguuggccagg

SEQ ID NO: 1022169 - RNA, 18 nt, Human
guagcugggauuacaggu

SEQ ID NO: 1022170 - RNA, 20 nt, Human
gucauuugugauaacaugga

SEQ ID NO: 1022171 - RNA, 24 nt, Human
gugaucccccagccucagccuccc

SEQ ID NO: 1022172 - RNA, 21 nt, Human
gugcauauuuuucauguaugg

SEQ ID NO: 1022173 - RNA, 24 nt, Human
guuucacucuguugcccaggcugg

SEQ ID NO: 1022174 - RNA, 19 nt, Human
uaacaguacauaccucaaa

SEQ ID NO: 1022175 - RNA, 19 nt, Human
uaacauaccucucucaaua

SEQ ID NO: 1022176 - RNA, 21 nt, Human
uaagaaauagccauauaacau

SEQ ID NO: 1022177 - RNA, 18 nt, Human
uaagugaagaaaacagac

SEQ ID NO: 1022178 - RNA, 24 nt, Human
uaauuuuuauauuuuuaguagaga

SEQ ID NO: 1022179 - RNA, 18 nt, Human
uacaugcauguaugcauu

SEQ ID NO: 1022180 - RNA, 22 nt, Human
uagaagaauaagccacaccaga

SEQ ID NO: 1022181 - RNA, 22 nt, Human
uagagaggggauuucaccaugu

SEQ ID NO: 1022182 - RNA, 18 nt, Human
uagauuacagaagcaaga

SEQ ID NO: 1022183 - RNA, 19 nt, Human
uagccaggaccggaggaaa

SEQ ID NO: 1022184 - RNA, 24 nt, Human
uaguagagaggggauuucaccaug

SEQ ID NO: 1022185 - RNA, 21 nt, Human
uauauguauguauauacauaa

SEQ ID NO: 1022186 - RNA, 22 nt, Human
uauauguauguauauacauaaa

SEQ ID NO: 1022187 - RNA, 23 nt, Human
uauguauauacauaaauuuaaaa

SEQ ID NO: 1022188 - RNA, 18 nt, Human
uauguauguauauacaua

SEQ ID NO: 1022189 - RNA, 20 nt, Human
uauucauacuagccaggacc

SEQ ID NO: 1022190 - RNA, 21 nt, Human
ucacucuguugcccaggcugg

SEQ ID NO: 1022191 - RNA, 22 nt, Human
ucacucuguugcccaggcugga

SEQ ID NO: 1022192 - RNA, 23 nt, Human
ucacucuguugcccaggcuggag

SEQ ID NO: 1022193 - RNA, 24 nt, Human
ucacucuguugcccaggcuggagu

SEQ ID NO: 1022194 - RNA, 24 nt, Human
ucacugcaaccucugccuccuggg

SEQ ID NO: 1022195 - RNA, 25 nt, Human
ucacugcaaccucugccuccugggu

SEQ ID NO: 1022196 - RNA, 26 nt, Human
ucacugcaaccucugccuccuggguu

SEQ ID NO: 1022197 - RNA, 22 nt, Human
ucagacuauggacuauuacaca

SEQ ID NO: 1022198 - RNA, 18 nt, Human
ucagccucccaaagugcu

SEQ ID NO: 1022199 - RNA, 20 nt, Human
ucagccucccaaguagcugg

SEQ ID NO: 1022200 - RNA, 18 nt, Human
ucauagccccauguguuu

SEQ ID NO: 1022201 - RNA, 21 nt, Human
uccaugaagcauuuauaaaaa

SEQ ID NO: 1022202 - RNA, 24 nt, Human
ucccaaagugcugggauuagaggc

SEQ ID NO: 1022203 - RNA, 23 nt, Human
ucccaaguagcugggauuacagg

SEQ ID NO: 1022204 - RNA, 24 nt, Human
ucccaaguagcugggauuacaggu

SEQ ID NO: 1022205 - RNA, 19 nt, Human
ucccaccaaaaacaaaaac

SEQ ID NO: 1022206 - RNA, 19 nt, Human
ucccccagccucagccucc

SEQ ID NO: 1022207 - RNA, 20 nt, Human
ucccccagccucagccuccc

SEQ ID NO: 1022208 - RNA, 24 nt, Human
ucccugaacacaauaucuucccca

SEQ ID NO: 1022209 - RNA, 21 nt, Human
ucccugcaagccagccggaga

SEQ ID NO: 1022210 - RNA, 21 nt, Human
uccuggguucaaagaauucuc

SEQ ID NO: 1022211 - RNA, 24 nt, Human
uccuggguucaaagaauucuccug

SEQ ID NO: 1022212 - RNA, 21 nt, Human
ucucagucgguguucucccug

SEQ ID NO: 1022213 - RNA, 26 nt, Human
ucuccugccucagccucccaaguagc

SEQ ID NO: 1022214 - RNA, 23 nt, Human
ucucgaacuccugaccucaggug

SEQ ID NO: 1022215 - RNA, 18 nt, Human
ucuguugcccaggcugga

SEQ ID NO: 1022216 - RNA, 24 nt, Human
ucuguugcccaggcuggagugcag

SEQ ID NO: 1022217 - RNA, 21 nt, Human
ugaaauaaaccucccaccaaa

SEQ ID NO: 1022218 - RNA, 22 nt, Human
ugaaauaaaccucccaccaaaa

SEQ ID NO: 1022219 - RNA, 22 nt, Human
ugaaccuggaggacagaacuca

SEQ ID NO: 1022220 - RNA, 19 nt, Human
ugaauggauaaagaaaaug

SEQ ID NO: 1022221 - RNA, 24 nt, Human
ugacacuauauuaagugaagaaaa

SEQ ID NO: 1022222 - RNA, 19 nt, Human
ugaccucaggugauccccc

SEQ ID NO: 1022223 - RNA, 20 nt, Human
ugaccucaggugauccccca

SEQ ID NO: 1022224 - RNA, 24 nt, Human
ugaccucaggugaucccccagccu

SEQ ID NO: 1022225 - RNA, 25 nt, Human
ugaccucaggugaucccccagccuc

SEQ ID NO: 1022226 - RNA, 24 nt, Human
ugacucaguaacaaagaggccaca

SEQ ID NO: 1022227 - RNA, 22 nt, Human
ugagacagaguuucacucuguu

SEQ ID NO: 1022228 - RNA, 25 nt, Human
ugauaauacaacauagauaaaucuc

SEQ ID NO: 1022229 - RNA, 19 nt, Human
ugauggagaccgugguggg

SEQ ID NO: 1022230 - RNA, 22 nt, Human
ugcaguggcgcaaucucggcuc

SEQ ID NO: 1022231 - RNA, 23 nt, Human
ugcaguggcgcaaucucggcuca

SEQ ID NO: 1022232 - RNA, 21 nt, Human
ugcaucugucaaacucaucca

SEQ ID NO: 1022233 - RNA, 22 nt, Human
ugcaucugucaaacucauccaa

SEQ ID NO: 1022234 - RNA, 18 nt, Human
ugcccaggcuggagugca

SEQ ID NO: 1022235 - RNA, 21 nt, Human
ugcccaggcuggagugcagug

SEQ ID NO: 1022236 - RNA, 22 nt, Human
ugcccaggcuggagugcagugg

SEQ ID NO: 1022237 - RNA, 24 nt, Human
ugcccaggcuggagugcaguggcg

SEQ ID NO: 1022238 - RNA, 24 nt, Human
ugccucagccucccaaguagcugg

SEQ ID NO: 1022239 - RNA, 24 nt, Human
ugcugcaaucacauaaauaugcca

SEQ ID NO: 1022240 - RNA, 21 nt, Human
uggaaucaaccuaacugucca

SEQ ID NO: 1022241 - RNA, 23 nt, Human
uggagugcaguggcgcaaucucg

SEQ ID NO: 1022242 - RNA, 24 nt, Human
uggagugcaguggcgcaaucucgg

SEQ ID NO: 1022243 - RNA, 24 nt, Human
uggccaggcugaucucgaacuccu

SEQ ID NO: 1022244 - RNA, 21 nt, Human
ugggauuacaggugcaugcca

SEQ ID NO: 1022245 - RNA, 22 nt, Human
ugggauuacaggugcaugccac

SEQ ID NO: 1022246 - RNA, 24 nt, Human
ugggauuacaggugcaugccacca

SEQ ID NO: 1022247 - RNA, 22 nt, Human
ugggauuagaggcaugagccac

SEQ ID NO: 1022248 - RNA, 23 nt, Human
ugggauuagaggcaugagccacc

SEQ ID NO: 1022249 - RNA, 24 nt, Human
ugggauuagaggcaugagccaccg

SEQ ID NO: 1022250 - RNA, 23 nt, Human
uggguauagacauauacaaaauu

SEQ ID NO: 1022251 - RNA, 23 nt, Human
uggugguuacaugcauguaugca

SEQ ID NO: 1022252 - RNA, 22 nt, Human
uguaugcauuucacuauaaguc

SEQ ID NO: 1022253 - RNA, 19 nt, Human
uguccaaaaggcaagaagu

SEQ ID NO: 1022254 - RNA, 21 nt, Human
uuacaauuaaaccaaaaugaa

SEQ ID NO: 1022255 - RNA, 26 nt, Human
uuagaaaccaacaacaaaaaggcaac

SEQ ID NO: 1022256 - RNA, 18 nt, Human
uuaguagagaggggauuu

SEQ ID NO: 1022257 - RNA, 24 nt, Human
uuaguagagaggggauuucaccau

SEQ ID NO: 1022258 - RNA, 21 nt, Human
uuauggucacaggagggcucc

SEQ ID NO: 1022259 - RNA, 22 nt, Human
uucagauguaugcauuucacua

SEQ ID NO: 1022260 - RNA, 23 nt, Human
uucauaacaauaaaaccugcagg

SEQ ID NO: 1022261 - RNA, 20 nt, Human
uuccccagagucacauccag

SEQ ID NO: 1022262 - RNA, 24 nt, Human
uugcccaggcuggagugcaguggc

SEQ ID NO: 1022263 - RNA, 20 nt, Human
uuggcagcuagaagaauaag

SEQ ID NO: 1022264 - RNA, 23 nt, Human
uuuaaaaccaaaaaaaaaaaaaa

SEQ ID NO: 1022265 - RNA, 24 nt, Human
uuuaacauaccucucucaauaaau

SEQ ID NO: 1022266 - RNA, 24 nt, Human
uuuacuaucauuacaaugaauggu

SEQ ID NO: 1022267 - RNA, 21 nt, Human
uuuauauuuuuacaaaaugga

SEQ ID NO: 1022268 - RNA, 21 nt, Human
uuucaccauguuggccaggcu

SEQ ID NO: 1022269 - RNA, 22 nt, Human
uuucacucuguugcccaggcug

SEQ ID NO: 1022270 - RNA, 23 nt, Human
uuucacucuguugcccaggcugg

SEQ ID NO: 1022271 - RNA, 24 nt, Human
uuucacucuguugcccaggcugga

SEQ ID NO: 1022272 - RNA, 24 nt, Human
uuuuuaguagagaggggauuucac

SEQ ID NO: 1022273 - RNA, 20 nt, Human
uuuuuauauuuuuaguagag

SEQ ID NO: 1022274 - RNA, 24 nt, Human
uuuuucagcaauacauaaucaugg

SEQ ID NO: 1022275 - RNA, 20 nt, Human
cacaaugaauaauacauuua

SEQ ID NO: 1022276 - RNA, 22 nt, Human
cagagcucgccgccagcccuuc

SEQ ID NO: 1022277 - RNA, 26 nt, Human
cuccucuauacauacucacaguuuag

SEQ ID NO: 1022278 - RNA, 20 nt, Human
cucgccgccagcccuuccua

SEQ ID NO: 1022279 - RNA, 23 nt, Human
gauuuuacuccucuauacauacu

SEQ ID NO: 1022280 - RNA, 22 nt, Human
gccuccaguucgcaccaggucc

SEQ ID NO: 1022281 - RNA, 19 nt, Human
ggcgggaccagggauucac

SEQ ID NO: 1022282 - RNA, 18 nt, Human
gggccaagaguguugaaa

SEQ ID NO: 1022283 - RNA, 21 nt, Human
gugcacccgcuucgccucccc

SEQ ID NO: 1022284 - RNA, 18 nt, Human
ucacgggcugcaggaccc

SEQ ID NO: 1022285 - RNA, 20 nt, Human
ugaaagcagagcguucccuc

SEQ ID NO: 1022286 - RNA, 24 nt, Human
uucgcaccagguccaagucucggc

SEQ ID NO: 1022287 - RNA, 23 nt, Human
uuuguuggaauuuauuacuuugu

SEQ ID NO: 1022288 - RNA, 22 nt, Human
aacaaagcaaaguuacucuccu

SEQ ID NO: 1022289 - RNA, 22 nt, Human
aagcacagccuggcacaaauac

SEQ ID NO: 1022290 - RNA, 22 nt, Human
aaggucccaccuccuaauacuu

SEQ ID NO: 1022291 - RNA, 18 nt, Human
aauagaagggccacagga

SEQ ID NO: 1022292 - RNA, 22 nt, Human
aaucacuucccaaaggucccac

SEQ ID NO: 1022293 - RNA, 27 nt, Human
agagcagaaaauagaagggccacagga

SEQ ID NO: 1022294 - RNA, 19 nt, Human
agcccagguaaugcccucc

SEQ ID NO: 1022295 - RNA, 19 nt, Human
aggaaggcugggagggaag

SEQ ID NO: 1022296 - RNA, 19 nt, Human
agguucucuguagcccucu

SEQ ID NO: 1022297 - RNA, 19 nt, Human
augcagccucaacuaaagc

SEQ ID NO: 1022298 - RNA, 22 nt, Human
caaucggggcggcugagggcga

SEQ ID NO: 1022299 - RNA, 18 nt, Human
cacaggacaaacucccuc

SEQ ID NO: 1022300 - RNA, 23 nt, Human
cagccucaacuaaagcuuguaac

SEQ ID NO: 1022301 - RNA, 18 nt, Human
caggacaaacucccucua

SEQ ID NO: 1022302 - RNA, 19 nt, Human
caguaaacaguuuauguag

SEQ ID NO: 1022303 - RNA, 19 nt, Human
caguaggugcaguugucug

SEQ ID NO: 1022304 - RNA, 23 nt, Human
caucaguaggugcaguugucugu

SEQ ID NO: 1022305 - RNA, 24 nt, Human
ccaauagcccagguaaugcccucc

SEQ ID NO: 1022306 - RNA, 24 nt, Human
ccacgcaucucacggcucgcugac

SEQ ID NO: 1022307 - RNA, 26 nt, Human
ccacgcaucucacggcucgcugacgc

SEQ ID NO: 1022308 - RNA, 22 nt, Human
ccccaauagcccagguaaugcc

SEQ ID NO: 1022309 - RNA, 18 nt, Human
cccucuggauucugucug

SEQ ID NO: 1022310 - RNA, 20 nt, Human
cgaacaaguuaugcagccuc

SEQ ID NO: 1022311 - RNA, 19 nt, Human
cucacagagcagaaaauag

SEQ ID NO: 1022312 - RNA, 19 nt, Human
cucuuggggacacaugggu

SEQ ID NO: 1022313 - RNA, 19 nt, Human
cuucccaaaggucccaccu

SEQ ID NO: 1022314 - RNA, 23 nt, Human
gagggaagccagagggaaagugc

SEQ ID NO: 1022315 - RNA, 18 nt, Human
ggaaggcugggagggaag

SEQ ID NO: 1022316 - RNA, 20 nt, Human
ggagguuugguggagguguc

SEQ ID NO: 1022317 - RNA, 18 nt, Human
gguuugguggaggugucc

SEQ ID NO: 1022318 - RNA, 21 nt, Human
guucuggaggcugggaaguuc

SEQ ID NO: 1022319 - RNA, 21 nt, Human
uaaggaggggacaaaacaucc

SEQ ID NO: 1022320 - RNA, 19 nt, Human
uagaaagcacagccuggca

SEQ ID NO: 1022321 - RNA, 23 nt, Human
uaggaaagagaccacauuucccc

SEQ ID NO: 1022322 - RNA, 21 nt, Human
ucaaaacaucaguaggugcag

SEQ ID NO: 1022323 - RNA, 22 nt, Human
uccaaaccaaggaaggcuggga

SEQ ID NO: 1022324 - RNA, 24 nt, Human
ucggggcggcugagggcgaaccgg

SEQ ID NO: 1022325 - RNA, 19 nt, Human
ucucacggcucgcugacgc

SEQ ID NO: 1022326 - RNA, 19 nt, Human
ucucuuggggacacauggg

SEQ ID NO: 1022327 - RNA, 18 nt, Human
ugagggcucaugucuguu

SEQ ID NO: 1022328 - RNA, 22 nt, Human
ugcaagaggagguuugguggag

SEQ ID NO: 1022329 - RNA, 22 nt, Human
ugcugcaucuuuuggaagggag

SEQ ID NO: 1022330 - RNA, 19 nt, Human
ugggagggaagccagaggg

SEQ ID NO: 1022331 - RNA, 19 nt, Human
uggggagaguguaacaggc

SEQ ID NO: 1022332 - RNA, 22 nt, Human
uguccuagauuguuugcagucc

SEQ ID NO: 1022333 - RNA, 23 nt, Human
uguuucaacaguaaacaguuuau

SEQ ID NO: 1022334 - RNA, 18 nt, Human
uuccugcucuccacggag

SEQ ID NO: 1022335 - RNA, 20 nt, Human
uugacuuaaucacuucccaa

SEQ ID NO: 1022336 - RNA, 20 nt, Human
uuggaagggaggagcauugu

SEQ ID NO: 1022337 - RNA, 23 nt, Human
uuucccagaguucuggaggcugg

SEQ ID NO: 1022338 - RNA, 21 nt, Human
aaaaacaaaacaaaacaaaga

SEQ ID NO: 1022339 - RNA, 22 nt, Human
aaaaacaaaacaaaacaaagaa

SEQ ID NO: 1022340 - RNA, 24 nt, Human
aaaaacaaaacaaaacaaagaaaa

SEQ ID NO: 1022341 - RNA, 20 nt, Human
aaaacaaaacaaaacaaaga

SEQ ID NO: 1022342 - RNA, 21 nt, Human
aaacaaaacaaaacaaagaaa

SEQ ID NO: 1022343 - RNA, 24 nt, Human
aaacaaaacaaaacaaagaaaaca

SEQ ID NO: 1022344 - RNA, 21 nt, Human
aacaaaacaaaacaaagaaaa

SEQ ID NO: 1022345 - RNA, 21 nt, Human
aacagagcgagacuccgucuc

SEQ ID NO: 1022346 - RNA, 24 nt, Human
aacagagcgagacuccgucucaaa

SEQ ID NO: 1022347 - RNA, 20 nt, Human
aacaugaugaaaccccgccu

SEQ ID NO: 1022348 - RNA, 18 nt, Human
aagagaggcugggaagua

SEQ ID NO: 1022349 - RNA, 23 nt, Human
aaguuggaaacaaacacaugaau

SEQ ID NO: 1022350 - RNA, 21 nt, Human
aaucaucuugguaacauuuaa

SEQ ID NO: 1022351 - RNA, 18 nt, Human
aaucgcuugaaccuggga

SEQ ID NO: 1022352 - RNA, 24 nt, Human
aaucgcuugaaccugggaggcgga

SEQ ID NO: 1022353 - RNA, 28 nt, Human
acaaaacaaaacaaagaaaacauuaaga

SEQ ID NO: 1022354 - RNA, 24 nt, Human
acaaaacaaagaaaacauuaagag

SEQ ID NO: 1022355 - RNA, 25 nt, Human
acaccccccacccugccuucuccca

SEQ ID NO: 1022356 - RNA, 24 nt, Human
acagagcgagacuccgucucaaaa

SEQ ID NO: 1022357 - RNA, 19 nt, Human
acccccaaacucuggggag

SEQ ID NO: 1022358 - RNA, 24 nt, Human
acccccaaacucuggggaguauuc

SEQ ID NO: 1022359 - RNA, 24 nt, Human
accccgccucuauuaaauauacaa

SEQ ID NO: 1022360 - RNA, 19 nt, Human
accuuuauuagaguuggaa

SEQ ID NO: 1022361 - RNA, 21 nt, Human
acucugcgaggcggggaggac

SEQ ID NO: 1022362 - RNA, 21 nt, Human
acucuggggaguauuccagaa

SEQ ID NO: 1022363 - RNA, 18 nt, Human
acugcacuccagccuggg

SEQ ID NO: 1022364 - RNA, 24 nt, Human
acugcacuccagccugggaaacag

SEQ ID NO: 1022365 - RNA, 22 nt, Human
agauagcgccacugcacuccag

SEQ ID NO: 1022366 - RNA, 23 nt, Human
agaucacuugaggucaggaguuc

SEQ ID NO: 1022367 - RNA, 24 nt, Human
agcacuuugggaggcugagguggg

SEQ ID NO: 1022368 - RNA, 24 nt, Human
agccugggaaacagagcgagacuc

SEQ ID NO: 1022369 - RNA, 22 nt, Human
aggcaugagaaucgcuugaacc

SEQ ID NO: 1022370 - RNA, 24 nt, Human
aggcaugagaaucgcuugaaccug

SEQ ID NO: 1022371 - RNA, 24 nt, Human
aggcaugguggcucacaccuguaa

SEQ ID NO: 1022372 - RNA, 19 nt, Human
aggcggacguugcagugag

SEQ ID NO: 1022373 - RNA, 24 nt, Human
aggcggacguugcagugagccaag

SEQ ID NO: 1022374 - RNA, 21 nt, Human
aggcugaggugggcagaucac

SEQ ID NO: 1022375 - RNA, 24 nt, Human
aggcugaggugggcagaucacuug

SEQ ID NO: 1022376 - RNA, 22 nt, Human
aggugggcagaucacuugaggu

SEQ ID NO: 1022377 - RNA, 23 nt, Human
aggugggcagaucacuugagguc

SEQ ID NO: 1022378 - RNA, 22 nt, Human
aguaagcaguauaaaauuacaa

SEQ ID NO: 1022379 - RNA, 24 nt, Human
auagcgccacugcacuccagccug

SEQ ID NO: 1022380 - RNA, 21 nt, Human
aucaucuugguaacauuuaag

SEQ ID NO: 1022381 - RNA, 20 nt, Human
augcauuuaauuccaacccc

SEQ ID NO: 1022382 - RNA, 24 nt, Human
auggggcaaaagagaggcugggaa

SEQ ID NO: 1022383 - RNA, 23 nt, Human
augucguacaccuguggucccag

SEQ ID NO: 1022384 - RNA, 27 nt, Human
auuccuuucccccacuccuuuuguuuu

SEQ ID NO: 1022385 - RNA, 20 nt, Human
caaaacaaaacaaagaaaac

SEQ ID NO: 1022386 - RNA, 21 nt, Human
caaauguaauaagauggacag

SEQ ID NO: 1022387 - RNA, 24 nt, Human
cacaccuguaaucccagcacuuug

SEQ ID NO: 1022388 - RNA, 19 nt, Human
caccuguaaucccagcacu

SEQ ID NO: 1022389 - RNA, 24 nt, Human
caccuguaaucccagcacuuuggg

SEQ ID NO: 1022390 - RNA, 23 nt, Human
caccuguggucccagcuacucgg

SEQ ID NO: 1022391 - RNA, 24 nt, Human
cacggccaggcaugguggcucaca

SEQ ID NO: 1022392 - RNA, 24 nt, Human
cacuccagccugggaaacagagcg

SEQ ID NO: 1022393 - RNA, 18 nt, Human
cacugcacuccagccugg

SEQ ID NO: 1022394 - RNA, 19 nt, Human
cacugcacuccagccuggg

SEQ ID NO: 1022395 - RNA, 19 nt, Human
cacugcacuccagccuggg

SEQ ID NO: 1022396 - RNA, 24 nt, Human
cacugcacuccagccugggaaaca

SEQ ID NO: 1022397 - RNA, 24 nt, Human
cagaucacuugaggucaggaguuc

SEQ ID NO: 1022398 - RNA, 26 nt, Human
cagaucacuugaggucaggaguucaa

SEQ ID NO: 1022399 - RNA, 21 nt, Human
cagcacuuugggaggcugagg

SEQ ID NO: 1022400 - RNA, 24 nt, Human
cagcacuuugggaggcugaggugg

SEQ ID NO: 1022401 - RNA, 22 nt, Human
cauuuaauuccaaccccucauu

SEQ ID NO: 1022402 - RNA, 19 nt, Human
ccaaccuggcuuugcagca

SEQ ID NO: 1022403 - RNA, 19 nt, Human
ccacugcacuccagccugg

SEQ ID NO: 1022404 - RNA, 20 nt, Human
ccacugcacuccagccuggg

SEQ ID NO: 1022405 - RNA, 23 nt, Human
ccacugcacuccagccugggaaa

SEQ ID NO: 1022406 - RNA, 24 nt, Human
ccacugcacuccagccugggaaac

SEQ ID NO: 1022407 - RNA, 20 nt, Human
ccauccuuaaaaacauuaag

SEQ ID NO: 1022408 - RNA, 23 nt, Human
ccccacccugccuucucccaacu

SEQ ID NO: 1022409 - RNA, 25 nt, Human
cccccaaacucuggggaguauucca

SEQ ID NO: 1022410 - RNA, 25 nt, Human
cccccaacgcccccggggagcugga

SEQ ID NO: 1022411 - RNA, 24 nt, Human
ccccccacccugccuucucccaac

SEQ ID NO: 1022412 - RNA, 23 nt, Human
ccgcggagccccccaacgccccc

SEQ ID NO: 1022413 - RNA, 22 nt, Human
ccgucucaaaaacaaaacaaaa

SEQ ID NO: 1022414 - RNA, 22 nt, Human
ccugggaaacagagcgagacuc

SEQ ID NO: 1022415 - RNA, 21 nt, Human
ccuguggucccagcuacucgg

SEQ ID NO: 1022416 - RNA, 22 nt, Human
ccuuaaaaacauuaagagcaaa

SEQ ID NO: 1022417 - RNA, 21 nt, Human
ccuuucccccacuccuuuugu

SEQ ID NO: 1022418 - RNA, 21 nt, Human
ccuuuuauuuuuccacacccc

SEQ ID NO: 1022419 - RNA, 24 nt, Human
cgaggcaugagaaucgcuugaacc

SEQ ID NO: 1022420 - RNA, 21 nt, Human
cgcuugaaccugggaggcgga

SEQ ID NO: 1022421 - RNA, 21 nt, Human
cggcgggcgaaucccgaggcc

SEQ ID NO: 1022422 - RNA, 18 nt, Human
cgucccggcgugcugggc

SEQ ID NO: 1022423 - RNA, 24 nt, Human
cguugcagugagccaagauagcgc

SEQ ID NO: 1022424 - RNA, 24 nt, Human
cuacauggugcaaggacuuuuccu

SEQ ID NO: 1022425 - RNA, 20 nt, Human
cucaauuccuuucccccacu

SEQ ID NO: 1022426 - RNA, 22 nt, Human
cucacaccuguaaucccagcac

SEQ ID NO: 1022427 - RNA, 24 nt, Human
cucacaccuguaaucccagcacuu

SEQ ID NO: 1022428 - RNA, 19 nt, Human
cuuaagauuucuuuuucuc

SEQ ID NO: 1022429 - RNA, 23 nt, Human
cuuaagauuucuuuuucucaauu

SEQ ID NO: 1022430 - RNA, 23 nt, Human
cuuugggaggcugaggugggcag

SEQ ID NO: 1022431 - RNA, 23 nt, Human
gaauggggcaaaagagaggcugg

SEQ ID NO: 1022432 - RNA, 19 nt, Human
gacguugcagugagccaag

SEQ ID NO: 1022433 - RNA, 23 nt, Human
gaucacuugaggucaggaguuca

SEQ ID NO: 1022434 - RNA, 24 nt, Human
gaucacuugaggucaggaguucaa

SEQ ID NO: 1022435 - RNA, 24 nt, Human
gauucagagguggucucaaaguug

SEQ ID NO: 1022436 - RNA, 24 nt, Human
gcacuccagccugggaaacagagc

SEQ ID NO: 1022437 - RNA, 24 nt, Human
gcccgcggagccccccaacgcccc

SEQ ID NO: 1022438 - RNA, 20 nt, Human
gcgggcgaaucccgaggccc

SEQ ID NO: 1022439 - RNA, 22 nt, Human
gcgggcgaaucccgaggcccag

SEQ ID NO: 1022440 - RNA, 21 nt, Human
gcuggccgggcccggcgcccc

SEQ ID NO: 1022441 - RNA, 18 nt, Human
ggacguugcagugagcca

SEQ ID NO: 1022442 - RNA, 20 nt, Human
ggacguugcagugagccaag

SEQ ID NO: 1022443 - RNA, 19 nt, Human
ggagccccccaacgccccc

SEQ ID NO: 1022444 - RNA, 21 nt, Human
ggaugccaaagugggggacga

SEQ ID NO: 1022445 - RNA, 23 nt, Human
ggcccggcgccccaaccuggcuu

SEQ ID NO: 1022446 - RNA, 25 nt, Human
ggcgccccaaccuggcuuugcagca

SEQ ID NO: 1022447 - RNA, 19 nt, Human
gggaugccaaaguggggga

SEQ ID NO: 1022448 - RNA, 26 nt, Human
gggcagaucacuugaggucaggaguu

SEQ ID NO: 1022449 - RNA, 18 nt, Human
gggcgcuggccgggcccg

SEQ ID NO: 1022450 - RNA, 20 nt, Human
ggggcaaaagagaggcuggg

SEQ ID NO: 1022451 - RNA, 18 nt, Human
ggucucaaaguuguuaca

SEQ ID NO: 1022452 - RNA, 24 nt, Human
gguggcucacaccuguaaucccag

SEQ ID NO: 1022453 - RNA, 20 nt, Human
guaaagcaagcugcacuucc

SEQ ID NO: 1022454 - RNA, 22 nt, Human
gucucaaaaacaaaacaaaaca

SEQ ID NO: 1022455 - RNA, 19 nt, Human
uacaccuguggucccagcu

SEQ ID NO: 1022456 - RNA, 22 nt, Human
uauuuuuccacaccccccaccc

SEQ ID NO: 1022457 - RNA, 18 nt, Human
ucaggaguucaacaugau

SEQ ID NO: 1022458 - RNA, 21 nt, Human
uccagaauggggcaaaagaga

SEQ ID NO: 1022459 - RNA, 20 nt, Human
uccagccugggaaacagagc

SEQ ID NO: 1022460 - RNA, 23 nt, Human
uccagccugggaaacagagcgag

SEQ ID NO: 1022461 - RNA, 24 nt, Human
uccagccugggaaacagagcgaga

SEQ ID NO: 1022462 - RNA, 27 nt, Human
ucccgaggcccaggcccgcggagcccc

SEQ ID NO: 1022463 - RNA, 23 nt, Human
ucccggcgugcugggcgaccgcg

SEQ ID NO: 1022464 - RNA, 18 nt, Human
ucgcuugaaccugggagg

SEQ ID NO: 1022465 - RNA, 28 nt, Human
ucuuuuucucaauuccuuucccccacuc

SEQ ID NO: 1022466 - RNA, 19 nt, Human
ugaacacccccaaacucug

SEQ ID NO: 1022467 - RNA, 24 nt, Human
ugaaccugggaggcggacguugca

SEQ ID NO: 1022468 - RNA, 24 nt, Human
ugaggugggcagaucacuugaggu

SEQ ID NO: 1022469 - RNA, 26 nt, Human
ugaggugggcagaucacuugagguca

SEQ ID NO: 1022470 - RNA, 22 nt, Human
ugcagugagccaagauagcgcc

SEQ ID NO: 1022471 - RNA, 19 nt, Human
ugccuagagggcgcuggcc

SEQ ID NO: 1022472 - RNA, 24 nt, Human
ugcgaggcggggaggacggaugua

SEQ ID NO: 1022473 - RNA, 21 nt, Human
uggcucacaccuguaauccca

SEQ ID NO: 1022474 - RNA, 22 nt, Human
uggcucacaccuguaaucccag

SEQ ID NO: 1022475 - RNA, 24 nt, Human
uggcucacaccuguaaucccagca

SEQ ID NO: 1022476 - RNA, 24 nt, Human
ugggaggcggacguugcagugagc

SEQ ID NO: 1022477 - RNA, 20 nt, Human
ugggaggcugaggugggcag

SEQ ID NO: 1022478 - RNA, 24 nt, Human
ugggaggcugaggugggcagauca

SEQ ID NO: 1022479 - RNA, 24 nt, Human
ugggcagaucacuugaggucagga

SEQ ID NO: 1022480 - RNA, 24 nt, Human
ugguggcucacaccuguaauccca

SEQ ID NO: 1022481 - RNA, 21 nt, Human
uguaaagcaagcugcacuucc

SEQ ID NO: 1022482 - RNA, 21 nt, Human
ugucguacaccugugguccca

SEQ ID NO: 1022483 - RNA, 24 nt, Human
ugucguacaccuguggucccagcu

SEQ ID NO: 1022484 - RNA, 24 nt, Human
uugaaccugggaggcggacguugc

SEQ ID NO: 1022485 - RNA, 22 nt, Human
uugcagugagccaagauagcgc

SEQ ID NO: 1022486 - RNA, 25 nt, Human
uugggaggcugaggugggcagauca

SEQ ID NO: 1022487 - RNA, 19 nt, Human
uuuuagagaauucuacuua

SEQ ID NO: 1022488 - RNA, 25 nt, Human
uuuuauuuuuccacaccccccaccc

SEQ ID NO: 1022489 - RNA, 18 nt, Human
uuuuccacaccccccacc

SEQ ID NO: 1022490 - RNA, 21 nt, Human
aaaaaaaagaaaaaugcaaag

SEQ ID NO: 1022491 - RNA, 21 nt, Human
aaaagaagaagaaacagugga

SEQ ID NO: 1022492 - RNA, 22 nt, Human
aacacuuuuuuguacuauuuug

SEQ ID NO: 1022493 - RNA, 23 nt, Human
aagaagaagaaacaguggacagc

SEQ ID NO: 1022494 - RNA, 28 nt, Human
aagaagaagaaacaguggacagcaagaa

SEQ ID NO: 1022495 - RNA, 19 nt, Human
aaguagcugggacuacagg

SEQ ID NO: 1022496 - RNA, 20 nt, Human
aaguagcugggacuacaggu

SEQ ID NO: 1022497 - RNA, 26 nt, Human
aaguagcugggacuacagguacacac

SEQ ID NO: 1022498 - RNA, 22 nt, Human
aaucuuggaauggacccuacug

SEQ ID NO: 1022499 - RNA, 20 nt, Human
aaugcaaaguuccaaacagu

SEQ ID NO: 1022500 - RNA, 25 nt, Human
aauuaaaaugcuaaaagaagaagaa

SEQ ID NO: 1022501 - RNA, 20 nt, Human
acaaaaaaagagaggaagaa

SEQ ID NO: 1022502 - RNA, 21 nt, Human
acacagaggugaacuggucac

SEQ ID NO: 1022503 - RNA, 24 nt, Human
acagagugagaacuugucucaaaa

SEQ ID NO: 1022504 - RNA, 27 nt, Human
accucaauaaccugaaguuaaacauca

SEQ ID NO: 1022505 - RNA, 21 nt, Human
accugagccugggaggucaag

SEQ ID NO: 1022506 - RNA, 22 nt, Human
acgccuggcgacucccagccuc

SEQ ID NO: 1022507 - RNA, 19 nt, Human
acuccagccugggugacag

SEQ ID NO: 1022508 - RNA, 24 nt, Human
acuccagccugggugacagaguga

SEQ ID NO: 1022509 - RNA, 25 nt, Human
acucuguugcccaggcuggagugca

SEQ ID NO: 1022510 - RNA, 24 nt, Human
acuguacuccagccugggugacag

SEQ ID NO: 1022511 - RNA, 26 nt, Human
acuguacuccagccugggugacagag

SEQ ID NO: 1022512 - RNA, 23 nt, Human
agaauaacaaaauucacuugccu

SEQ ID NO: 1022513 - RNA, 22 nt, Human
agacaggacacagguuacaggg

SEQ ID NO: 1022514 - RNA, 18 nt, Human
agacauacguggcagugu

SEQ ID NO: 1022515 - RNA, 25 nt, Human
agaggaagaucugcuucuucaaacc

SEQ ID NO: 1022516 - RNA, 24 nt, Human
agccugggugacagagugagaacu

SEQ ID NO: 1022517 - RNA, 24 nt, Human
agcgauucucuugccucagccucc

SEQ ID NO: 1022518 - RNA, 24 nt, Human
aggucaagguugcagugagccaug

SEQ ID NO: 1022519 - RNA, 24 nt, Human
aguggcacacaccuauagucccag

SEQ ID NO: 1022520 - RNA, 26 nt, Human
aucaaccuccccaccucaauaaccuu

SEQ ID NO: 1022521 - RNA, 24 nt, Human
aucaugccacuguacuccagccug

SEQ ID NO: 1022522 - RNA, 23 nt, Human
augaaaacaaacuuuggugaaug

SEQ ID NO: 1022523 - RNA, 22 nt, Human
augccacuguacuccagccugg

SEQ ID NO: 1022524 - RNA, 22 nt, Human
caaaaacaaaaaaagagaggaa

SEQ ID NO: 1022525 - RNA, 21 nt, Human
caaccuccccaccucaauaac

SEQ ID NO: 1022526 - RNA, 22 nt, Human
caagcgauucucuugccucagc

SEQ ID NO: 1022527 - RNA, 27 nt, Human
caagcgauucucuugccucagccuccc

SEQ ID NO: 1022528 - RNA, 22 nt, Human
cacacaauaagcccugaacaga

SEQ ID NO: 1022529 - RNA, 24 nt, Human
cacacaauaagcccugaacagaga

SEQ ID NO: 1022530 - RNA, 24 nt, Human
cacaccaccaugcccggcuaauuu

SEQ ID NO: 1022531 - RNA, 19 nt, Human
cacaccuauagucccagcu

SEQ ID NO: 1022532 - RNA, 20 nt, Human
cacagaggugaacuggucac

SEQ ID NO: 1022533 - RNA, 22 nt, Human
caccccccgccgcggcgcggcc

SEQ ID NO: 1022534 - RNA, 23 nt, Human
caccccccgccgcggcgcggccc

SEQ ID NO: 1022535 - RNA, 23 nt, Human
caccuauagucccagcuacucgg

SEQ ID NO: 1022536 - RNA, 24 nt, Human
caccuauagucccagcuacucggg

SEQ ID NO: 1022537 - RNA, 22 nt, Human
caccuaugccuuaaaucgcgag

SEQ ID NO: 1022538 - RNA, 21 nt, Human
cacuaacgguaacugacaauc

SEQ ID NO: 1022539 - RNA, 24 nt, Human
cacucuguugcccaggcuggagug

SEQ ID NO: 1022540 - RNA, 19 nt, Human
cacuguacuccagccuggg

SEQ ID NO: 1022541 - RNA, 19 nt, Human
cacuguacuccagccuggg

SEQ ID NO: 1022542 - RNA, 21 nt, Human
cacuguacuccagccugggug

SEQ ID NO: 1022543 - RNA, 22 nt, Human
cacuguacuccagccuggguga

SEQ ID NO: 1022544 - RNA, 23 nt, Human
cacuguacuccagccugggugac

SEQ ID NO: 1022545 - RNA, 24 nt, Human
cacuguacuccagccugggugaca

SEQ ID NO: 1022546 - RNA, 24 nt, Human
cacuguacuccagccugggugaca

SEQ ID NO: 1022547 - RNA, 18 nt, Human
cagagcccaccuucccgc

SEQ ID NO: 1022548 - RNA, 22 nt, Human
caucaggaucaugaaaacaaac

SEQ ID NO: 1022549 - RNA, 22 nt, Human
ccacucuguugcccaggcugga

SEQ ID NO: 1022550 - RNA, 24 nt, Human
ccacucuguugcccaggcuggagu

SEQ ID NO: 1022551 - RNA, 20 nt, Human
ccacuguacuccagccuggg

SEQ ID NO: 1022552 - RNA, 20 nt, Human
ccacuguacuccagccuggg

SEQ ID NO: 1022553 - RNA, 21 nt, Human
ccacuguacuccagccugggu

SEQ ID NO: 1022554 - RNA, 21 nt, Human
ccacuguacuccagccugggu

SEQ ID NO: 1022555 - RNA, 23 nt, Human
ccacuguacuccagccuggguga

SEQ ID NO: 1022556 - RNA, 24 nt, Human
ccacuguacuccagccugggugac

SEQ ID NO: 1022557 - RNA, 20 nt, Human
ccagacaggacacagguuac

SEQ ID NO: 1022558 - RNA, 19 nt, Human
ccagagcccaccuucccgc

SEQ ID NO: 1022559 - RNA, 18 nt, Human
ccaguggggugggggaag

SEQ ID NO: 1022560 - RNA, 24 nt, Human
ccaguuucaagcgauucucuugcc

SEQ ID NO: 1022561 - RNA, 23 nt, Human
cccaaguagcugggacuacaggu

SEQ ID NO: 1022562 - RNA, 24 nt, Human
cccaaguagcugggacuacaggua

SEQ ID NO: 1022563 - RNA, 21 nt, Human
cccacacaacuaauauaaagu

SEQ ID NO: 1022564 - RNA, 23 nt, Human
cccccgccgcggcgcggcccagg

SEQ ID NO: 1022565 - RNA, 22 nt, Human
cccgcacgccuggcgacuccca

SEQ ID NO: 1022566 - RNA, 20 nt, Human
ccgacugcggcccccuccuc

SEQ ID NO: 1022567 - RNA, 21 nt, Human
ccuauagucccagcuacucgg

SEQ ID NO: 1022568 - RNA, 24 nt, Human
ccucccaguuucaagcgauucucu

SEQ ID NO: 1022569 - RNA, 19 nt, Human
ccucccggcugcuccccgc

SEQ ID NO: 1022570 - RNA, 21 nt, Human
ccucgccugcccucuuccucc

SEQ ID NO: 1022571 - RNA, 20 nt, Human
ccugaaguuaaacaucacac

SEQ ID NO: 1022572 - RNA, 22 nt, Human
ccugggugacagagugagaacu

SEQ ID NO: 1022573 - RNA, 23 nt, Human
cggcggcggcuccguccccggcu

SEQ ID NO: 1022574 - RNA, 24 nt, Human
cgucuguccuccccuuccuucucc

SEQ ID NO: 1022575 - RNA, 24 nt, Human
cuaggggcaacggcggcggcuccu

SEQ ID NO: 1022576 - RNA, 21 nt, Human
cuauagucccagcuacucggg

SEQ ID NO: 1022577 - RNA, 24 nt, Human
cuaucugcuaauuaaaaugcuaaa

SEQ ID NO: 1022578 - RNA, 18 nt, Human
cucaaaaacaaaaaaaga

SEQ ID NO: 1022579 - RNA, 19 nt, Human
cucaaaaacaaaaaaagag

SEQ ID NO: 1022580 - RNA, 21 nt, Human
cucacuccaaccccugccucc

SEQ ID NO: 1022581 - RNA, 24 nt, Human
cucagccucccaaguagcugggac

SEQ ID NO: 1022582 - RNA, 22 nt, Human
cuccucccggcugcuccccgcu

SEQ ID NO: 1022583 - RNA, 23 nt, Human
cuccucccggcugcuccccgcua

SEQ ID NO: 1022584 - RNA, 19 nt, Human
cucgccugcccucuuccuc

SEQ ID NO: 1022585 - RNA, 21 nt, Human
cugcccucuuccuccaccccc

SEQ ID NO: 1022586 - RNA, 23 nt, Human
cuugccucagccucccaaguagc

SEQ ID NO: 1022587 - RNA, 21 nt, Human
cuugucucaaaaacaaaaaaa

SEQ ID NO: 1022588 - RNA, 24 nt, Human
cuugucucaaaaacaaaaaaagag

SEQ ID NO: 1022589 - RNA, 24 nt, Human
cuuuggugaaugugagcaacugcg

SEQ ID NO: 1022590 - RNA, 23 nt, Human
cuuuuuuuuuuuuuuuuugcgau

SEQ ID NO: 1022591 - RNA, 20 nt, Human
cuuuuuuuuuuuuuuuuugg

SEQ ID NO: 1022592 - RNA, 24 nt, Human
gacagagugagaacuugucucaaa

SEQ ID NO: 1022593 - RNA, 22 nt, Human
gacuacagguacacaccaccau

SEQ ID NO: 1022594 - RNA, 18 nt, Human
gacugcggcccccuccuc

SEQ ID NO: 1022595 - RNA, 20 nt, Human
gagaggaagaucugcuucuu

SEQ ID NO: 1022596 - RNA, 21 nt, Human
gaucugcuucuucaaacccac

SEQ ID NO: 1022597 - RNA, 21 nt, Human
gcaacggcggcggcuccgucc

SEQ ID NO: 1022598 - RNA, 19 nt, Human
gccacuguacuccagccug

SEQ ID NO: 1022599 - RNA, 24 nt, Human
gccacuguacuccagccuggguga

SEQ ID NO: 1022600 - RNA, 21 nt, Human
gcccaggcuggagugcagugu

SEQ ID NO: 1022601 - RNA, 19 nt, Human
gcccccuccucccggcugc

SEQ ID NO: 1022602 - RNA, 23 nt, Human
gccucgccugcccucuuccucca

SEQ ID NO: 1022603 - RNA, 24 nt, Human
gccugggaggucaagguugcagug

SEQ ID NO: 1022604 - RNA, 24 nt, Human
gcgauucucuugccucagccuccc

SEQ ID NO: 1022605 - RNA, 21 nt, Human
gcggccagagcccaccuuccc

SEQ ID NO: 1022606 - RNA, 19 nt, Human
gcucacuccaaccccugcc

SEQ ID NO: 1022607 - RNA, 23 nt, Human
ggcccccuccucccggcugcucc

SEQ ID NO: 1022608 - RNA, 24 nt, Human
ggcgcggcccaggccucucccccg

SEQ ID NO: 1022609 - RNA, 19 nt, Human
gggaggcugaagugggaag

SEQ ID NO: 1022610 - RNA, 21 nt, Human
gggaggcugaagugggaagau

SEQ ID NO: 1022611 - RNA, 18 nt, Human
ggguccccucucccgacu

SEQ ID NO: 1022612 - RNA, 23 nt, Human
guacuccagccugggugacagag

SEQ ID NO: 1022613 - RNA, 24 nt, Human
guacuccagccugggugacagagu

SEQ ID NO: 1022614 - RNA, 24 nt, Human
guccacucuguugcccaggcugga

SEQ ID NO: 1022615 - RNA, 21 nt, Human
gugaacuggucacuucuaauu

SEQ ID NO: 1022616 - RNA, 19 nt, Human
gugaaugugagcaacugcg

SEQ ID NO: 1022617 - RNA, 27 nt, Human
uaaaagaagaagaaacaguggacagga

SEQ ID NO: 1022618 - RNA, 21 nt, Human
uaaaaugcuaaaagaagaaga

SEQ ID NO: 1022619 - RNA, 20 nt, Human
uaagaagagccaguggggug

SEQ ID NO: 1022620 - RNA, 23 nt, Human
uacagguacacaccaccaugccc

SEQ ID NO: 1022621 - RNA, 22 nt, Human
uacuccagccugggugacagag

SEQ ID NO: 1022622 - RNA, 24 nt, Human
uacuccagccugggugacagagug

SEQ ID NO: 1022623 - RNA, 19 nt, Human
uagcugggcauaguggcac

SEQ ID NO: 1022624 - RNA, 23 nt, Human
uaguggcacacaccuauaguccc

SEQ ID NO: 1022625 - RNA, 22 nt, Human
uauaaaguaaucaaccucccca

SEQ ID NO: 1022626 - RNA, 25 nt, Human
ucagaauaacaaaauucacuugccu

SEQ ID NO: 1022627 - RNA, 18 nt, Human
ucagccucccaaguagcu

SEQ ID NO: 1022628 - RNA, 20 nt, Human
ucagccucccaaguagcugg

SEQ ID NO: 1022629 - RNA, 23 nt, Human
ucaugccacuguacuccagccug

SEQ ID NO: 1022630 - RNA, 23 nt, Human
uccacucuguugcccaggcugga

SEQ ID NO: 1022631 - RNA, 23 nt, Human
uccagccugggugacagagugag

SEQ ID NO: 1022632 - RNA, 24 nt, Human
uccagccugggugacagagugaga

SEQ ID NO: 1022633 - RNA, 24 nt, Human
ucccaaguagcugggacuacaggu

SEQ ID NO: 1022634 - RNA, 21 nt, Human
ucccaguuucaagcgauucuc

SEQ ID NO: 1022635 - RNA, 18 nt, Human
ucucaaaaacaaaaaaag

SEQ ID NO: 1022636 - RNA, 19 nt, Human
ucugcuaauuaaaaugcua

SEQ ID NO: 1022637 - RNA, 18 nt, Human
ucuguugcccaggcugga

SEQ ID NO: 1022638 - RNA, 24 nt, Human
ucuguugcccaggcuggagugcag

SEQ ID NO: 1022639 - RNA, 26 nt, Human
ucuugccucagccucccaaguagcug

SEQ ID NO: 1022640 - RNA, 25 nt, Human
ugaaaacacuuuuuuuuuuuuuuuu

SEQ ID NO: 1022641 - RNA, 25 nt, Human
ugaacagagagcuguaggucaaugu

SEQ ID NO: 1022642 - RNA, 22 nt, Human
ugagaacacuuuuuuguacuau

SEQ ID NO: 1022643 - RNA, 24 nt, Human
ugagccugggaggucaagguugca

SEQ ID NO: 1022644 - RNA, 22 nt, Human
ugcagugagccaugaucaugcc

SEQ ID NO: 1022645 - RNA, 18 nt, Human
ugcccaggcuggagugca

SEQ ID NO: 1022646 - RNA, 21 nt, Human
ugcccaggcuggagugcagug

SEQ ID NO: 1022647 - RNA, 22 nt, Human
ugccucagccucccaaguagcu

SEQ ID NO: 1022648 - RNA, 24 nt, Human
ugccucagccucccaaguagcugg

SEQ ID NO: 1022649 - RNA, 21 nt, Human
ugcgauggaguccacucuguu

SEQ ID NO: 1022650 - RNA, 24 nt, Human
ugcggcccccuccucccggcugcu

SEQ ID NO: 1022651 - RNA, 22 nt, Human
ugcuaaaagaagaagaaacagu

SEQ ID NO: 1022652 - RNA, 19 nt, Human
uggaaagaaccacuagaug

SEQ ID NO: 1022653 - RNA, 21 nt, Human
uggaauggacccuacugcuga

SEQ ID NO: 1022654 - RNA, 24 nt, Human
uggagugcagugucacaguccugg

SEQ ID NO: 1022655 - RNA, 21 nt, Human
ugggacuacagguacacacca

SEQ ID NO: 1022656 - RNA, 22 nt, Human
ugggacuacagguacacaccac

SEQ ID NO: 1022657 - RNA, 24 nt, Human
ugggacuacagguacacaccacca

SEQ ID NO: 1022658 - RNA, 21 nt, Human
ugggaggucaagguugcagug

SEQ ID NO: 1022659 - RNA, 24 nt, Human
ugggaggucaagguugcagugagc

SEQ ID NO: 1022660 - RNA, 19 nt, Human
ugggguccccucucccgac

SEQ ID NO: 1022661 - RNA, 22 nt, Human
uggggugggggaagcugaaaac

SEQ ID NO: 1022662 - RNA, 20 nt, Human
uggugaaugugagcaacugc

SEQ ID NO: 1022663 - RNA, 21 nt, Human
ugugaacgucuguccuccccu

SEQ ID NO: 1022664 - RNA, 25 nt, Human
ugugaacgucuguccuccccuuccu

SEQ ID NO: 1022665 - RNA, 18 nt, Human
uuagcugggcauaguggc

SEQ ID NO: 1022666 - RNA, 22 nt, Human
uucaaaaggacacagaggugaa

SEQ ID NO: 1022667 - RNA, 19 nt, Human
uucaaacccacacaacuaa

SEQ ID NO: 1022668 - RNA, 27 nt, Human
uucaaacccacacaacuaauauaaagu

SEQ ID NO: 1022669 - RNA, 23 nt, Human
uucaagcgauucucuugccucag

SEQ ID NO: 1022670 - RNA, 20 nt, Human
uucagaauaacaaaauucac

SEQ ID NO: 1022671 - RNA, 24 nt, Human
uugcagugagccaugaucaugcca

SEQ ID NO: 1022672 - RNA, 24 nt, Human
uugcccaggcuggagugcaguguc

SEQ ID NO: 1022673 - RNA, 22 nt, Human
uuuuuuuuuuuuuugcgaugga

SEQ ID NO: 1022674 - RNA, 22 nt, Human
aaaaacacaucagugaacccag

SEQ ID NO: 1022675 - RNA, 18 nt, Human
aaaacuauuauggcauca

SEQ ID NO: 1022676 - RNA, 25 nt, Human
aaagccuuuucagauugguuuucac

SEQ ID NO: 1022677 - RNA, 21 nt, Human
aaccacacacacacacauaca

SEQ ID NO: 1022678 - RNA, 25 nt, Human
aacccuuuccccucccaucuuccac

SEQ ID NO: 1022679 - RNA, 21 nt, Human
aagcgcguagacccuugaaau

SEQ ID NO: 1022680 - RNA, 21 nt, Human
aaggaauugguccauuuuagc

SEQ ID NO: 1022681 - RNA, 19 nt, Human
aagugcugggauuacaggc

SEQ ID NO: 1022682 - RNA, 21 nt, Human
aagugcugggauuacaggcau

SEQ ID NO: 1022683 - RNA, 23 nt, Human
aagugcugggauuacaggcauga

SEQ ID NO: 1022684 - RNA, 18 nt, Human
aaguucuccuguauuccu

SEQ ID NO: 1022685 - RNA, 25 nt, Human
acacacacauacacguacacacaca

SEQ ID NO: 1022686 - RNA, 21 nt, Human
acaguggcacaaucucagcuc

SEQ ID NO: 1022687 - RNA, 22 nt, Human
acauauauaagucuuuugaacu

SEQ ID NO: 1022688 - RNA, 19 nt, Human
accagcaagguaacaucga

SEQ ID NO: 1022689 - RNA, 19 nt, Human
accaguuuuggguuuuauc

SEQ ID NO: 1022690 - RNA, 24 nt, Human
accauguugaccaggcuggucucg

SEQ ID NO: 1022691 - RNA, 23 nt, Human
acccagcugguccuggcacuuug

SEQ ID NO: 1022692 - RNA, 24 nt, Human
accuugugauccacccgccucagc

SEQ ID NO: 1022693 - RNA, 19 nt, Human
acugcaacauccaccuccc

SEQ ID NO: 1022694 - RNA, 19 nt, Human
agaaagggaguaacaugga

SEQ ID NO: 1022695 - RNA, 23 nt, Human
agacaacucugaagauacagccc

SEQ ID NO: 1022696 - RNA, 20 nt, Human
agauacagcccacucccucg

SEQ ID NO: 1022697 - RNA, 19 nt, Human
aggcaugaaccacuguacc

SEQ ID NO: 1022698 - RNA, 18 nt, Human
aggggguuucaccauguu

SEQ ID NO: 1022699 - RNA, 19 nt, Human
aggggguuucaccauguug

SEQ ID NO: 1022700 - RNA, 24 nt, Human
aggggguuucaccauguugaccag

SEQ ID NO: 1022701 - RNA, 21 nt, Human
agguucaagugauucuucugc

SEQ ID NO: 1022702 - RNA, 22 nt, Human
agguucaagugauucuucugcc

SEQ ID NO: 1022703 - RNA, 18 nt, Human
agguuuuaacaugaaugg

SEQ ID NO: 1022704 - RNA, 19 nt, Human
aguacaaugcugaaaagca

SEQ ID NO: 1022705 - RNA, 25 nt, Human
agucucuaucuaccagcaagguaac

SEQ ID NO: 1022706 - RNA, 24 nt, Human
agugauucuucugccucagccucc

SEQ ID NO: 1022707 - RNA, 18 nt, Human
agugcugggauuacaggc

SEQ ID NO: 1022708 - RNA, 19 nt, Human
agugcugggauuacaggca

SEQ ID NO: 1022709 - RNA, 21 nt, Human
aguguaaauucuaacauaacc

SEQ ID NO: 1022710 - RNA, 24 nt, Human
auagaauaucacuuccuaacaaaa

SEQ ID NO: 1022711 - RNA, 18 nt, Human
aucaaggauaauguuagc

SEQ ID NO: 1022712 - RNA, 25 nt, Human
aucauguuacuugugaacaaaguug

SEQ ID NO: 1022713 - RNA, 26 nt, Human
aucccuccuuuccccucaacucucag

SEQ ID NO: 1022714 - RNA, 26 nt, Human
caaaaccugagaaaaacaaaaggaaa

SEQ ID NO: 1022715 - RNA, 22 nt, Human
caagugauucuucugccucagc

SEQ ID NO: 1022716 - RNA, 19 nt, Human
cacaccagcuugauucugg

SEQ ID NO: 1022717 - RNA, 21 nt, Human
caccauguugaccaggcuggu

SEQ ID NO: 1022718 - RNA, 24 nt, Human
caccauguugaccaggcuggucuc

SEQ ID NO: 1022719 - RNA, 27 nt, Human
caccauguugaccaggcuggucucgaa

SEQ ID NO: 1022720 - RNA, 23 nt, Human
cacccgccucagccucccaaagu

SEQ ID NO: 1022721 - RNA, 21 nt, Human
cacugcaacauccaccuccca

SEQ ID NO: 1022722 - RNA, 19 nt, Human
cagcccacucccucgucgg

SEQ ID NO: 1022723 - RNA, 18 nt, Human
cagcccugggcagcccug

SEQ ID NO: 1022724 - RNA, 20 nt, Human
cagccuccugaguagcuucg

SEQ ID NO: 1022725 - RNA, 20 nt, Human
caucaaacucaaaacauaac

SEQ ID NO: 1022726 - RNA, 18 nt, Human
caucaaggauaauguuag

SEQ ID NO: 1022727 - RNA, 23 nt, Human
caugaaccacuguaccuggccuu

SEQ ID NO: 1022728 - RNA, 24 nt, Human
cauguugaccaggcuggucucgaa

SEQ ID NO: 1022729 - RNA, 19 nt, Human
cauucugucacccaggcug

SEQ ID NO: 1022730 - RNA, 30 nt, Human
ccaaagugaagugcugggauuacaggcauu

SEQ ID NO: 1022731 - RNA, 18 nt, Human
ccacacacacacacauac

SEQ ID NO: 1022732 - RNA, 19 nt, Human
ccacccgccucagccuccc

SEQ ID NO: 1022733 - RNA, 18 nt, Human
ccacuuauacauauauaa

SEQ ID NO: 1022734 - RNA, 18 nt, Human
ccagaucccugucugggg

SEQ ID NO: 1022735 - RNA, 20 nt, Human
cccaggcugcaguacagugg

SEQ ID NO: 1022736 - RNA, 22 nt, Human
cccagguucaagugauucuucu

SEQ ID NO: 1022737 - RNA, 23 nt, Human
cccagguucaagugauucuucug

SEQ ID NO: 1022738 - RNA, 22 nt, Human
cccuccuuuccccucaacucuc

SEQ ID NO: 1022739 - RNA, 24 nt, Human
cccugggcuguaugugugggccuu

SEQ ID NO: 1022740 - RNA, 20 nt, Human
cccuugaaaucccgggaccg

SEQ ID NO: 1022741 - RNA, 22 nt, Human
ccucacaaaaugaguugggaag

SEQ ID NO: 1022742 - RNA, 24 nt, Human
ccucccagguucaagugauucuuc

SEQ ID NO: 1022743 - RNA, 20 nt, Human
ccugaccuugugauccaccc

SEQ ID NO: 1022744 - RNA, 20 nt, Human
ccugagaaaaacaaaaggaa

SEQ ID NO: 1022745 - RNA, 23 nt, Human
ccugcaauccugcuguaauugcu

SEQ ID NO: 1022746 - RNA, 19 nt, Human
ccuuucacuggcucaauag

SEQ ID NO: 1022747 - RNA, 20 nt, Human
cgcaaaaccugagaaaaaca

SEQ ID NO: 1022748 - RNA, 30 nt, Human
cgccucagccucccaaagugaagugcuggg

SEQ ID NO: 1022749 - RNA, 22 nt, Human
cggagacaacucugaagauaca

SEQ ID NO: 1022750 - RNA, 24 nt, Human
cucacugcaacauccaccucccag

SEQ ID NO: 1022751 - RNA, 26 nt, Human
cuccagccucaacccuccucuucaua

SEQ ID NO: 1022752 - RNA, 18 nt, Human
cucccacgcaaaaccugg

SEQ ID NO: 1022753 - RNA, 19 nt, Human
cucccagguucaagugauu

SEQ ID NO: 1022754 - RNA, 24 nt, Human
cuccugaccuugugauccacccgc

SEQ ID NO: 1022755 - RNA, 22 nt, Human
cugaaggcuggaauguucacau

SEQ ID NO: 1022756 - RNA, 23 nt, Human
cugcaacauccaccucccagguu

SEQ ID NO: 1022757 - RNA, 23 nt, Human
cugccucagccuccugaguagcu

SEQ ID NO: 1022758 - RNA, 18 nt, Human
cuggcucaauaguuuugc

SEQ ID NO: 1022759 - RNA, 21 nt, Human
gaaaucccgggaccgccuccc

SEQ ID NO: 1022760 - RNA, 24 nt, Human
gaagugcugggauuacaggcauga

SEQ ID NO: 1022761 - RNA, 22 nt, Human
gaccuugugauccacccgccuc

SEQ ID NO: 1022762 - RNA, 24 nt, Human
gaccuugugauccacccgccucag

SEQ ID NO: 1022763 - RNA, 20 nt, Human
gacggagacaacucugaaga

SEQ ID NO: 1022764 - RNA, 18 nt, Human
gagaaaaacaaaaggaaa

SEQ ID NO: 1022765 - RNA, 22 nt, Human
gauaugaucguauuucaucuuu

SEQ ID NO: 1022766 - RNA, 21 nt, Human
gauuacaggcaugaaccacug

SEQ ID NO: 1022767 - RNA, 24 nt, Human
gauuacaggcaugaaccacuguac

SEQ ID NO: 1022768 - RNA, 26 nt, Human
gcaaaaccugagaaaaaccgggacgu

SEQ ID NO: 1022769 - RNA, 22 nt, Human
gcaacauccaccucccagguuc

SEQ ID NO: 1022770 - RNA, 22 nt, Human
gcauucgccauagaaaagcgcg

SEQ ID NO: 1022771 - RNA, 23 nt, Human
gcccagcuaauuuuuuguauuuu

SEQ ID NO: 1022772 - RNA, 22 nt, Human
gcccugucuuggagagcagcug

SEQ ID NO: 1022773 - RNA, 19 nt, Human
gcugaaaagcaguggugug

SEQ ID NO: 1022774 - RNA, 24 nt, Human
ggaaagacggagacaacucugaag

SEQ ID NO: 1022775 - RNA, 23 nt, Human
ggcuggucucgaacuccugaccu

SEQ ID NO: 1022776 - RNA, 18 nt, Human
gggaugggccugauaaug

SEQ ID NO: 1022777 - RNA, 22 nt, Human
gggguuucaccauguugaccag

SEQ ID NO: 1022778 - RNA, 23 nt, Human
gggguuucaccauguugaccagg

SEQ ID NO: 1022779 - RNA, 22 nt, Human
ggguuucaccauguugaccagg

SEQ ID NO: 1022780 - RNA, 19 nt, Human
gguaggaagagaaagggag

SEQ ID NO: 1022781 - RNA, 20 nt, Human
ggucucgaacuccugaccuu

SEQ ID NO: 1022782 - RNA, 19 nt, Human
guccaauuccuuuuuauca

SEQ ID NO: 1022783 - RNA, 24 nt, Human
gugauccacccgccucagccuccc

SEQ ID NO: 1022784 - RNA, 24 nt, Human
gugauucuucugccucagccuccu

SEQ ID NO: 1022785 - RNA, 19 nt, Human
gugcugggauuacaggcau

SEQ ID NO: 1022786 - RNA, 18 nt, Human
guuaucucugcuuuuauu

SEQ ID NO: 1022787 - RNA, 25 nt, Human
guuccugaucuuaguaggaaagugu

SEQ ID NO: 1022788 - RNA, 19 nt, Human
guugcagaaagcguguggu

SEQ ID NO: 1022789 - RNA, 22 nt, Human
uaauuuuuuguauuuuuaguag

SEQ ID NO: 1022790 - RNA, 23 nt, Human
uaauuuuuuguauuuuuaguaga

SEQ ID NO: 1022791 - RNA, 18 nt, Human
uacaaaaagggaacuacu

SEQ ID NO: 1022792 - RNA, 25 nt, Human
uacacacacacacagagugcaugca

SEQ ID NO: 1022793 - RNA, 22 nt, Human
uacacacgcaugccaccaugcc

SEQ ID NO: 1022794 - RNA, 22 nt, Human
uacaggcaugaaccacuguacc

SEQ ID NO: 1022795 - RNA, 23 nt, Human
uacauuauuauuaacugaagucc

SEQ ID NO: 1022796 - RNA, 21 nt, Human
uaccuuaaguaucucaaaaac

SEQ ID NO: 1022797 - RNA, 20 nt, Human
uagaauaucacuuccuaaca

SEQ ID NO: 1022798 - RNA, 19 nt, Human
uagcuucgacuacacacgc

SEQ ID NO: 1022799 - RNA, 24 nt, Human
uaguagauaggggguuucaccaug

SEQ ID NO: 1022800 - RNA, 20 nt, Human
uauaacccuuuccccuccca

SEQ ID NO: 1022801 - RNA, 24 nt, Human
uauacauuauccuuagaggaaguu

SEQ ID NO: 1022802 - RNA, 22 nt, Human
uauagcacuuccaguacaaugc

SEQ ID NO: 1022803 - RNA, 18 nt, Human
uaucaauaaaagccccac

SEQ ID NO: 1022804 - RNA, 18 nt, Human
uauuaggguaauacuggc

SEQ ID NO: 1022805 - RNA, 18 nt, Human
uauuaggguaauacuggc

SEQ ID NO: 1022806 - RNA, 18 nt, Human
ucaaaagucugagggccc

SEQ ID NO: 1022807 - RNA, 27 nt, Human
ucaacccuccucuucauauucucaaaa

SEQ ID NO: 1022808 - RNA, 19 nt, Human
ucaagugauucuucugccu

SEQ ID NO: 1022809 - RNA, 24 nt, Human
ucacugcaacauccaccucccagg

SEQ ID NO: 1022810 - RNA, 21 nt, Human
uccacccgccucagccuccca

SEQ ID NO: 1022811 - RNA, 22 nt, Human
uccagggcccugucuuggagag

SEQ ID NO: 1022812 - RNA, 30 nt, Human
ucccaaagugaagugcugggauuacaggcc

SEQ ID NO: 1022813 - RNA, 20 nt, Human
ucccagguucaagugauucu

SEQ ID NO: 1022814 - RNA, 24 nt, Human
ucccagguucaagugauucuucug

SEQ ID NO: 1022815 - RNA, 24 nt, Human
ucccaucuuccacaggcuccccaa

SEQ ID NO: 1022816 - RNA, 19 nt, Human
ucccuccuuuccccucaac

SEQ ID NO: 1022817 - RNA, 23 nt, Human
ucccuccuuuccccucaacucuc

SEQ ID NO: 1022818 - RNA, 21 nt, Human
uccucaguguaaauucuaaca

SEQ ID NO: 1022819 - RNA, 19 nt, Human
uccuggcacuuuguuuugg

SEQ ID NO: 1022820 - RNA, 22 nt, Human
ucuaacauaaccuuauuugcau

SEQ ID NO: 1022821 - RNA, 19 nt, Human
ucucauucugucacccagg

SEQ ID NO: 1022822 - RNA, 22 nt, Human
ucucauucugucacccaggcug

SEQ ID NO: 1022823 - RNA, 23 nt, Human
ucucauucugucacccaggcugc

SEQ ID NO: 1022824 - RNA, 24 nt, Human
ucucauucugucacccaggcugca

SEQ ID NO: 1022825 - RNA, 19 nt, Human
ucugaagauacagcccacu

SEQ ID NO: 1022826 - RNA, 19 nt, Human
ucugucacccaggcugcag

SEQ ID NO: 1022827 - RNA, 24 nt, Human
ucugucacccaggcugcaguacag

SEQ ID NO: 1022828 - RNA, 18 nt, Human
ucuguguuuuccguucac

SEQ ID NO: 1022829 - RNA, 21 nt, Human
ucuuggacuugaccauauacu

SEQ ID NO: 1022830 - RNA, 22 nt, Human
ugaaaugacaguccaacagccc

SEQ ID NO: 1022831 - RNA, 22 nt, Human
ugaacccagcugguccuggcac

SEQ ID NO: 1022832 - RNA, 21 nt, Human
ugaagauacagcccacucccu

SEQ ID NO: 1022833 - RNA, 20 nt, Human
ugaauaucaaauguugaaca

SEQ ID NO: 1022834 - RNA, 24 nt, Human
ugaauggauauuggauuuugucaa

SEQ ID NO: 1022835 - RNA, 24 nt, Human
ugaccaggcuggucucgaacuccu

SEQ ID NO: 1022836 - RNA, 22 nt, Human
ugagaaaaacaaaaggaaaggc

SEQ ID NO: 1022837 - RNA, 25 nt, Human
ugccucagccuccugaguagcuucg

SEQ ID NO: 1022838 - RNA, 23 nt, Human
ugcugggauuacaggcaugaacc

SEQ ID NO: 1022839 - RNA, 23 nt, Human
uggaagguuauuaauuacugcuu

SEQ ID NO: 1022840 - RNA, 22 nt, Human
uggaauguucacauauguaccc

SEQ ID NO: 1022841 - RNA, 20 nt, Human
uggaggcgagccuagaucuu

SEQ ID NO: 1022842 - RNA, 24 nt, Human
uggcacaaucucagcucacugcaa

SEQ ID NO: 1022843 - RNA, 18 nt, Human
uggccucuuucauuuuug

SEQ ID NO: 1022844 - RNA, 19 nt, Human
ugggaaguguuaucucugc

SEQ ID NO: 1022845 - RNA, 21 nt, Human
ugggauuacaggcaugaacca

SEQ ID NO: 1022846 - RNA, 22 nt, Human
ugggauuacaggcaugaaccac

SEQ ID NO: 1022847 - RNA, 22 nt, Human
ugggauuacaggcaugaaccac

SEQ ID NO: 1022848 - RNA, 23 nt, Human
ugggauuacaggcaugaaccacu

SEQ ID NO: 1022849 - RNA, 24 nt, Human
ugggauuacaggcaugaaccacug

SEQ ID NO: 1022850 - RNA, 24 nt, Human
ugggauuacaggcaugaaccacug

SEQ ID NO: 1022851 - RNA, 20 nt, Human
ugucuuuuaaugacuugaug

SEQ ID NO: 1022852 - RNA, 24 nt, Human
ugugauccacccgccucagccucc

SEQ ID NO: 1022853 - RNA, 24 nt, Human
uuaguagauaggggguuucaccau

SEQ ID NO: 1022854 - RNA, 25 nt, Human
uuaguagauaggggguuucaccaug

SEQ ID NO: 1022855 - RNA, 22 nt, Human
uuaugcccguauuaaccaucug

SEQ ID NO: 1022856 - RNA, 23 nt, Human
uucaagugauucuucugccucag

SEQ ID NO: 1022857 - RNA, 24 nt, Human
uucaagugauucuucugccucagc

SEQ ID NO: 1022858 - RNA, 21 nt, Human
uucacauauguacccuaggca

SEQ ID NO: 1022859 - RNA, 22 nt, Human
uucacuguuuuccauucucugc

SEQ ID NO: 1022860 - RNA, 18 nt, Human
uuccuaaaguggaagcuu

SEQ ID NO: 1022861 - RNA, 19 nt, Human
uucugguucugcuccagcc

SEQ ID NO: 1022862 - RNA, 25 nt, Human
uugaggauuucugcaucuguguuca

SEQ ID NO: 1022863 - RNA, 21 nt, Human
uuggauuuaauuugcucuucu

SEQ ID NO: 1022864 - RNA, 20 nt, Human
uuguucuuaagcuagcuaga

SEQ ID NO: 1022865 - RNA, 20 nt, Human
uuuaggguuucuccgugucu

SEQ ID NO: 1022866 - RNA, 19 nt, Human
uuuauaucacauaccacuu

SEQ ID NO: 1022867 - RNA, 24 nt, Human
uuucaccauguugaccaggcuggu

SEQ ID NO: 1022868 - RNA, 19 nt, Human
uuuccagggcccugucuug

SEQ ID NO: 1022869 - RNA, 24 nt, Human
uuucugcaucuguguucaauggaa

SEQ ID NO: 1022870 - RNA, 22 nt, Human
uuugaggauuucugcaucugug

SEQ ID NO: 1022871 - RNA, 24 nt, Human
uuuuuaguagauaggggguuucac

SEQ ID NO: 1022872 - RNA, 19 nt, Human
uuuuuguauuuuuaguaga

SEQ ID NO: 1022873 - RNA, 22 nt, Human
uuuuuuguauuuuuaguagaua

SEQ ID NO: 1022874 - RNA, 18 nt, Human
aaaaaacaaaagccguga

SEQ ID NO: 1022875 - RNA, 22 nt, Human
aaaaaaccaccaccauuaagua

SEQ ID NO: 1022876 - RNA, 22 nt, Human
aaaaacucuuuccacgcagccc

SEQ ID NO: 1022877 - RNA, 23 nt, Human
aaaacacagcaagaggacuugag

SEQ ID NO: 1022878 - RNA, 18 nt, Human
aaaagccugguauacagg

SEQ ID NO: 1022879 - RNA, 25 nt, Human
aaacaaaaauacaaaaugugaaaug

SEQ ID NO: 1022880 - RNA, 19 nt, Human
aaacccagagacauuggug

SEQ ID NO: 1022881 - RNA, 21 nt, Human
aaacggucagcaaaggcaggc

SEQ ID NO: 1022882 - RNA, 22 nt, Human
aaauacaaacagacacaaacaa

SEQ ID NO: 1022883 - RNA, 21 nt, Human
aaggauggaauguccucaugg

SEQ ID NO: 1022884 - RNA, 20 nt, Human
aauaaguaauaggaagucaa

SEQ ID NO: 1022885 - RNA, 24 nt, Human
acaaacaaaaauacaaaaugugaa

SEQ ID NO: 1022886 - RNA, 20 nt, Human
acacagcaagaggacuugag

SEQ ID NO: 1022887 - RNA, 28 nt, Human
acacagcacccucacuacaaguaguucu

SEQ ID NO: 1022888 - RNA, 20 nt, Human
acaccaaaauacaaacagac

SEQ ID NO: 1022889 - RNA, 21 nt, Human
acagcaagaggacuugagcac

SEQ ID NO: 1022890 - RNA, 26 nt, Human
accccaaaacggucagcaaaggcagg

SEQ ID NO: 1022891 - RNA, 23 nt, Human
agaaaagcacacacagcacccuc

SEQ ID NO: 1022892 - RNA, 18 nt, Human
agacacaucuccaauaca

SEQ ID NO: 1022893 - RNA, 23 nt, Human
agcaagaggacuugagcacaagc

SEQ ID NO: 1022894 - RNA, 22 nt, Human
agccccagcccuccccgagcag

SEQ ID NO: 1022895 - RNA, 21 nt, Human
agccccaguguacaaccuggu

SEQ ID NO: 1022896 - RNA, 20 nt, Human
aggaaaucugccacgcagca

SEQ ID NO: 1022897 - RNA, 18 nt, Human
aggaagucaauauaauau

SEQ ID NO: 1022898 - RNA, 23 nt, Human
aggacccccggccagccccagcc

SEQ ID NO: 1022899 - RNA, 23 nt, Human
agggacugguacaaaacccagag

SEQ ID NO: 1022900 - RNA, 19 nt, Human
agggggaggcgggccuggg

SEQ ID NO: 1022901 - RNA, 19 nt, Human
agggggaggcgggccuggg

SEQ ID NO: 1022902 - RNA, 23 nt, Human
agguccuggagggaaggaggagg

SEQ ID NO: 1022903 - RNA, 19 nt, Human
agugcuucugaaaacacag

SEQ ID NO: 1022904 - RNA, 24 nt, Human
agugggacacuguugguuuuaggg

SEQ ID NO: 1022905 - RNA, 23 nt, Human
aguuggaagcaguaagcugcguc

SEQ ID NO: 1022906 - RNA, 22 nt, Human
auacaaaaugugaaauguaauc

SEQ ID NO: 1022907 - RNA, 24 nt, Human
auccugaguguggagggggaggcg

SEQ ID NO: 1022908 - RNA, 21 nt, Human
aucugccacgcagcaaacacu

SEQ ID NO: 1022909 - RNA, 24 nt, Human
caaaacacaauauaagaucuaaaa

SEQ ID NO: 1022910 - RNA, 21 nt, Human
caaagccaggcggugcaccac

SEQ ID NO: 1022911 - RNA, 21 nt, Human
cacacagcacccucacuacaa

SEQ ID NO: 1022912 - RNA, 19 nt, Human
cacaccgugggaccuuugc

SEQ ID NO: 1022913 - RNA, 21 nt, Human
cacacgggcagguccuggagg

SEQ ID NO: 1022914 - RNA, 24 nt, Human
cacagaaaggaaacgcacaggcgc

SEQ ID NO: 1022915 - RNA, 18 nt, Human
cacagagaggcaggacgg

SEQ ID NO: 1022916 - RNA, 22 nt, Human
cacagcaccgcagugguggccu

SEQ ID NO: 1022917 - RNA, 24 nt, Human
caccaaaauacaaacagacacaaa

SEQ ID NO: 1022918 - RNA, 23 nt, Human
cacgcagcccugaagcucagcac

SEQ ID NO: 1022919 - RNA, 19 nt, Human
cacggccacagagaggcag

SEQ ID NO: 1022920 - RNA, 18 nt, Human
cagagaggcaggacggca

SEQ ID NO: 1022921 - RNA, 20 nt, Human
cagcccuccccgagcagcag

SEQ ID NO: 1022922 - RNA, 24 nt, Human
caggaaaagaaagaacaugugagu

SEQ ID NO: 1022923 - RNA, 21 nt, Human
caggacccccggccagcccca

SEQ ID NO: 1022924 - RNA, 24 nt, Human
caggcuagaaaaagagaguaaaaa

SEQ ID NO: 1022925 - RNA, 22 nt, Human
caguguacaaccuggucaggau

SEQ ID NO: 1022926 - RNA, 30 nt, Human
caugacaugucuuuucccuccacgccuccu

SEQ ID NO: 1022927 - RNA, 21 nt, Human
cauuuuguaagaaagucaguc

SEQ ID NO: 1022928 - RNA, 21 nt, Human
ccaaaacggucagcaaaggca

SEQ ID NO: 1022929 - RNA, 21 nt, Human
ccaaaauacaaacagacacaa

SEQ ID NO: 1022930 - RNA, 19 nt, Human
ccauguacuccuccacagg

SEQ ID NO: 1022931 - RNA, 24 nt, Human
cccaauaguagacacaucuccaau

SEQ ID NO: 1022932 - RNA, 19 nt, Human
ccccaaagccaggcggugc

SEQ ID NO: 1022933 - RNA, 21 nt, Human
ccccaaauaacaccaucccca

SEQ ID NO: 1022934 - RNA, 21 nt, Human
cccccaaagccaggcggugca

SEQ ID NO: 1022935 - RNA, 20 nt, Human
cccccaaauaacaccauccc

SEQ ID NO: 1022936 - RNA, 20 nt, Human
cccccggccagccccagccc

SEQ ID NO: 1022937 - RNA, 18 nt, Human
cccgcccccaaauaacac

SEQ ID NO: 1022938 - RNA, 20 nt, Human
ccgcagugguggccugugcc

SEQ ID NO: 1022939 - RNA, 23 nt, Human
ccgcccccaaauaacaccauccc

SEQ ID NO: 1022940 - RNA, 23 nt, Human
ccgggacccccaaagccaggcgg

SEQ ID NO: 1022941 - RNA, 20 nt, Human
ccuccgggacccccaaagcc

SEQ ID NO: 1022942 - RNA, 22 nt, Human
ccuccgggacccccaaagccag

SEQ ID NO: 1022943 - RNA, 20 nt, Human
ccugaguguggagggggagg

SEQ ID NO: 1022944 - RNA, 23 nt, Human
cgaacaagaacaggaaaucugcc

SEQ ID NO: 1022945 - RNA, 24 nt, Human
cggccagauggagcaggacauccu

SEQ ID NO: 1022946 - RNA, 20 nt, Human
cguggugucccugcccccuc

SEQ ID NO: 1022947 - RNA, 20 nt, Human
cuaaaaaaaaccaccaccau

SEQ ID NO: 1022948 - RNA, 19 nt, Human
cucagcacuccgggggguc

SEQ ID NO: 1022949 - RNA, 24 nt, Human
cucaggaaaagaaagaacauguga

SEQ ID NO: 1022950 - RNA, 19 nt, Human
cugcgcuguaccuggaguc

SEQ ID NO: 1022951 - RNA, 19 nt, Human
cugguacaaaacccagaga

SEQ ID NO: 1022952 - RNA, 22 nt, Human
cugguacaaaacccagagacau

SEQ ID NO: 1022953 - RNA, 23 nt, Human
cugguauacaggcuagaaaaaga

SEQ ID NO: 1022954 - RNA, 18 nt, Human
cuguaccuggaguccucc

SEQ ID NO: 1022955 - RNA, 18 nt, Human
cugugucccaaagcucag

SEQ ID NO: 1022956 - RNA, 23 nt, Human
gaaacuuggagacucaccgcaga

SEQ ID NO: 1022957 - RNA, 22 nt, Human
gaaagugaucgcuuugcaagga

SEQ ID NO: 1022958 - RNA, 24 nt, Human
gaaccgggggccaaugucaaaaaa

SEQ ID NO: 1022959 - RNA, 23 nt, Human
gacccccaaagccaggcggugca

SEQ ID NO: 1022960 - RNA, 25 nt, Human
gacccccggccagccccagcccucc

SEQ ID NO: 1022961 - RNA, 19 nt, Human
gagcagcagcggucaggga

SEQ ID NO: 1022962 - RNA, 22 nt, Human
gagcagcagcggucagggaagc

SEQ ID NO: 1022963 - RNA, 20 nt, Human
gaguccuccauguacuccuc

SEQ ID NO: 1022964 - RNA, 22 nt, Human
gccacagagaggcaggacggca

SEQ ID NO: 1022965 - RNA, 22 nt, Human
gccuaggcagaaacuuggagac

SEQ ID NO: 1022966 - RNA, 25 nt, Human
gcgggccuggguccugggcagggug

SEQ ID NO: 1022967 - RNA, 19 nt, Human
gcggggaaccccaaaacgg

SEQ ID NO: 1022968 - RNA, 23 nt, Human
ggaaaucccacacucuucagucc

SEQ ID NO: 1022969 - RNA, 21 nt, Human
ggaaccccaaaacggucagca

SEQ ID NO: 1022970 - RNA, 18 nt, Human
ggacccccggccagcccc

SEQ ID NO: 1022971 - RNA, 18 nt, Human
ggaguccuccauguacuc

SEQ ID NO: 1022972 - RNA, 22 nt, Human
ggauccagagcuugacagaaaa

SEQ ID NO: 1022973 - RNA, 20 nt, Human
gggaaccccaaaacggucag

SEQ ID NO: 1022974 - RNA, 18 nt, Human
gggcagguccuggaggga

SEQ ID NO: 1022975 - RNA, 20 nt, Human
gggggucuucacacgggcag

SEQ ID NO: 1022976 - RNA, 19 nt, Human
guagaaccgggggccaaug

SEQ ID NO: 1022977 - RNA, 24 nt, Human
guccuggagggaaggaggaggcca

SEQ ID NO: 1022978 - RNA, 21 nt, Human
uaagaaaagcacacacagcac

SEQ ID NO: 1022979 - RNA, 18 nt, Human
uaagaucuaaaaaaaacc

SEQ ID NO: 1022980 - RNA, 19 nt, Human
uaagcuaaucccgucacag

SEQ ID NO: 1022981 - RNA, 21 nt, Human
uacaaacagacacaaacaaaa

SEQ ID NO: 1022982 - RNA, 24 nt, Human
uacaaacagacacaaacaaaaaua

SEQ ID NO: 1022983 - RNA, 21 nt, Human
uagaaccgggggccaauguca

SEQ ID NO: 1022984 - RNA, 19 nt, Human
ucaaaaaacaaaagccgug

SEQ ID NO: 1022985 - RNA, 22 nt, Human
ucacagaaugagcuaaaauaag

SEQ ID NO: 1022986 - RNA, 18 nt, Human
ucagugggacacuguugg

SEQ ID NO: 1022987 - RNA, 25 nt, Human
uccacaggacccccggccagcccca

SEQ ID NO: 1022988 - RNA, 21 nt, Human
uccagagcuugacagaaaaau

SEQ ID NO: 1022989 - RNA, 18 nt, Human
ucccaaagcucagagagc

SEQ ID NO: 1022990 - RNA, 19 nt, Human
ucccaaagcucagagagcc

SEQ ID NO: 1022991 - RNA, 28 nt, Human
ucccaccgagcgauuacgagaaccucuu

SEQ ID NO: 1022992 - RNA, 18 nt, Human
uccccagaaaaaaaucaa

SEQ ID NO: 1022993 - RNA, 26 nt, Human
uccccgcccccaaauaacaccauccc

SEQ ID NO: 1022994 - RNA, 21 nt, Human
ucccugcccccuccccgcccc

SEQ ID NO: 1022995 - RNA, 28 nt, Human
uccugugucccaaagcucagagagcccc

SEQ ID NO: 1022996 - RNA, 24 nt, Human
ugaagcucagcacuccgggggguc

SEQ ID NO: 1022997 - RNA, 22 nt, Human
ugaaggcacagcaccgcagugg

SEQ ID NO: 1022998 - RNA, 19 nt, Human
ugacuccugcgcuguaccu

SEQ ID NO: 1022999 - RNA, 19 nt, Human
ugagauggacgugcucacc

SEQ ID NO: 1023000 - RNA, 18 nt, Human
ugcaaaguuggaagcagu

SEQ ID NO: 1023001 - RNA, 24 nt, Human
uggaauguccucauggugagugcu

SEQ ID NO: 1023002 - RNA, 19 nt, Human
uggagggaaggaggaggcc

SEQ ID NO: 1023003 - RNA, 18 nt, Human
uggagggggaggcgggcc

SEQ ID NO: 1023004 - RNA, 21 nt, Human
uggccugagagcagggacugg

SEQ ID NO: 1023005 - RNA, 19 nt, Human
uggguccugggcagggugg

SEQ ID NO: 1023006 - RNA, 22 nt, Human
uggguccugggcaggguggccu

SEQ ID NO: 1023007 - RNA, 19 nt, Human
ugguggguagcaaaggucu

SEQ ID NO: 1023008 - RNA, 21 nt, Human
ugguggguagcaaaggucugg

SEQ ID NO: 1023009 - RNA, 18 nt, Human
uguaaacaccaaaauaca

SEQ ID NO: 1023010 - RNA, 24 nt, Human
uguaaacaccaaaauacaaacaga

SEQ ID NO: 1023011 - RNA, 26 nt, Human
ugucaaaaaacaaaagccgugacucc

SEQ ID NO: 1023012 - RNA, 21 nt, Human
ugucacagaaugagcuaaaau

SEQ ID NO: 1023013 - RNA, 21 nt, Human
uuaagaaaagcacacacagca

SEQ ID NO: 1023014 - RNA, 19 nt, Human
uugcauuuucucaguuuuu

SEQ ID NO: 1023015 - RNA, 19 nt, Human
agggacagugaggggggcc

SEQ ID NO: 1023016 - RNA, 19 nt, Human
caggcaggcgggcgggcgg

SEQ ID NO: 1023017 - RNA, 23 nt, Human
cgaggaggucaauggguguuggc

SEQ ID NO: 1023018 - RNA, 25 nt, Human
cgggcaggcaggcaggcgggcgggc

SEQ ID NO: 1023019 - RNA, 27 nt, Human
cgggcgggcaggcaggcaggcgggccc

SEQ ID NO: 1023020 - RNA, 25 nt, Human
gagcgggcgggcaggcaggcaggcc

SEQ ID NO: 1023021 - RNA, 26 nt, Human
gaggaggucaauggguguuggcagcg

SEQ ID NO: 1023022 - RNA, 20 nt, Human
gagucgcgggccgggcgagc

SEQ ID NO: 1023023 - RNA, 19 nt, Human
gcgggccgggcgagcgagc

SEQ ID NO: 1023024 - RNA, 23 nt, Human
gcgggccgggcgagcgagcgggc

SEQ ID NO: 1023025 - RNA, 18 nt, Human
ggcagcgguaccagggac

SEQ ID NO: 1023026 - RNA, 23 nt, Human
gggaaaauuuacuuggagaaggc

SEQ ID NO: 1023027 - RNA, 24 nt, Human
gggccgggcgagcgagcgggcggg

SEQ ID NO: 1023028 - RNA, 19 nt, Human
ugaggggggcuuuccuggg

SEQ ID NO: 1023029 - RNA, 18 nt, Human
aagcaggcaggggccugu

SEQ ID NO: 1023030 - RNA, 23 nt, Human
agcuaucucacaaagccccaagg

SEQ ID NO: 1023031 - RNA, 27 nt, Human
ccacacaagucgacccuagcuaucuca

SEQ ID NO: 1023032 - RNA, 21 nt, Human
cuagaauccacacaagucgac

SEQ ID NO: 1023033 - RNA, 19 nt, Human
cucacaaagccccaaggcc

SEQ ID NO: 1023034 - RNA, 18 nt, Human
ggauagggucagcuccgu

SEQ ID NO: 1023035 - RNA, 21 nt, Human
uagauaaggaucuucaaauau

SEQ ID NO: 1023036 - RNA, 24 nt, Human
uauaaauauucuuagacugacuaa

SEQ ID NO: 1023037 - RNA, 25 nt, Human
ucagcuccguucuacuagaauccac

SEQ ID NO: 1023038 - RNA, 19 nt, Human
uccuuuuucagaaauaauu

SEQ ID NO: 1023039 - RNA, 18 nt, Human
ucggaggccucuauccaa

SEQ ID NO: 1023040 - RNA, 21 nt, Human
ucggauagggucagcuccguu

SEQ ID NO: 1023041 - RNA, 22 nt, Human
ucuugcaggugccuuguggaug

SEQ ID NO: 1023042 - RNA, 26 nt, Human
ugcaggugccuuguggauguucaaca

SEQ ID NO: 1023043 - RNA, 21 nt, Human
ugccuuguggauguucaacag

SEQ ID NO: 1023044 - RNA, 22 nt, Human
ugccuuguggauguucaacagc

SEQ ID NO: 1023045 - RNA, 19 nt, Human
uguuuagaguccuuccuuc

SEQ ID NO: 1023046 - RNA, 22 nt, Human
uuccaaaaguaaugaaggaaug

SEQ ID NO: 1023047 - RNA, 21 nt, Human
aaaauagccacagauccauag

SEQ ID NO: 1023048 - RNA, 24 nt, Human
aaacaauggaauaaaagauuuuau

SEQ ID NO: 1023049 - RNA, 24 nt, Human
aaaguguugggauuacaggcauga

SEQ ID NO: 1023050 - RNA, 23 nt, Human
aagaacuagagacugagucacuu

SEQ ID NO: 1023051 - RNA, 21 nt, Human
aaguguugggauuacaggcau

SEQ ID NO: 1023052 - RNA, 26 nt, Human
aaguguugggauuacaggcaugagcc

SEQ ID NO: 1023053 - RNA, 21 nt, Human
accacgaaaggugcuuaagga

SEQ ID NO: 1023054 - RNA, 23 nt, Human
accucaaacaauggaauaaaaga

SEQ ID NO: 1023055 - RNA, 19 nt, Human
agaaaccucaaacaaugga

SEQ ID NO: 1023056 - RNA, 24 nt, Human
agccagucauugcauuuucaagga

SEQ ID NO: 1023057 - RNA, 22 nt, Human
aggaaugaauucuaacugcaaa

SEQ ID NO: 1023058 - RNA, 22 nt, Human
aguagaaaugggguuucgccau

SEQ ID NO: 1023059 - RNA, 24 nt, Human
agugauucuccugccucagccucc

SEQ ID NO: 1023060 - RNA, 24 nt, Human
agugcauuggcacgaucuuggcuc

SEQ ID NO: 1023061 - RNA, 18 nt, Human
auagcugggauuacaggc

SEQ ID NO: 1023062 - RNA, 18 nt, Human
auagcugggauuacaggc

SEQ ID NO: 1023063 - RNA, 20 nt, Human
auggaauaaaagauuuuaug

SEQ ID NO: 1023064 - RNA, 21 nt, Human
augggguuucgccauguuggu

SEQ ID NO: 1023065 - RNA, 24 nt, Human
augggguuucgccauguuggucag

SEQ ID NO: 1023066 - RNA, 18 nt, Human
auucuccugccucagccu

SEQ ID NO: 1023067 - RNA, 18 nt, Human
auuuuuuuuuuuuccuuu

SEQ ID NO: 1023068 - RNA, 24 nt, Human
caaaguguugggauuacaggcaug

SEQ ID NO: 1023069 - RNA, 22 nt, Human
caagugauucuccugccucagc

SEQ ID NO: 1023070 - RNA, 21 nt, Human
cacacacaguacauuuaugug

SEQ ID NO: 1023071 - RNA, 23 nt, Human
caccaggccuagcuaauugugua

SEQ ID NO: 1023072 - RNA, 23 nt, Human
caccugccucggacucccaaagu

SEQ ID NO: 1023073 - RNA, 21 nt, Human
cacugcaaccuccgccuccug

SEQ ID NO: 1023074 - RNA, 23 nt, Human
cacugcaaccuccgccuccuggg

SEQ ID NO: 1023075 - RNA, 24 nt, Human
cauguuggucaggcuggucuugaa

SEQ ID NO: 1023076 - RNA, 23 nt, Human
ccaaaguguugggauuacaggca

SEQ ID NO: 1023077 - RNA, 24 nt, Human
ccaaaguguugggauuacaggcau

SEQ ID NO: 1023078 - RNA, 23 nt, Human
ccaccaggccuagcuaauugugu

SEQ ID NO: 1023079 - RNA, 19 nt, Human
ccauguuggucaggcuggu

SEQ ID NO: 1023080 - RNA, 21 nt, Human
ccauguuggucaggcuggucu

SEQ ID NO: 1023081 - RNA, 24 nt, Human
cccaaaguguugggauuacaggca

SEQ ID NO: 1023082 - RNA, 18 nt, Human
cccaggauggagugcauu

SEQ ID NO: 1023083 - RNA, 24 nt, Human
ccgccuccuggguucaagugauuc

SEQ ID NO: 1023084 - RNA, 22 nt, Human
ccuccgccuccuggguucaagu

SEQ ID NO: 1023085 - RNA, 21 nt, Human
ccuccuggguucaagugauuc

SEQ ID NO: 1023086 - RNA, 24 nt, Human
ccuccuggguucaagugauucucc

SEQ ID NO: 1023087 - RNA, 21 nt, Human
ccugaccucaggugauccacc

SEQ ID NO: 1023088 - RNA, 23 nt, Human
ccugaccucaggugauccaccug

SEQ ID NO: 1023089 - RNA, 23 nt, Human
ccugaccucaggugauccaccug

SEQ ID NO: 1023090 - RNA, 23 nt, Human
ccuggguucaagugauucuccuc

SEQ ID NO: 1023091 - RNA, 23 nt, Human
ccuggguucaagugauucuccug

SEQ ID NO: 1023092 - RNA, 24 nt, Human
cgccauguuggucaggcuggucuu

SEQ ID NO: 1023093 - RNA, 22 nt, Human
cuauauagcugggauuacaggc

SEQ ID NO: 1023094 - RNA, 24 nt, Human
cucacugcaaccuccgccuccugg

SEQ ID NO: 1023095 - RNA, 21 nt, Human
cuccuggguucaagugauucu

SEQ ID NO: 1023096 - RNA, 23 nt, Human
cugcaaccuccgccuccuggguu

SEQ ID NO: 1023097 - RNA, 23 nt, Human
cugccucagccuccuauauagcu

SEQ ID NO: 1023098 - RNA, 21 nt, Human
cuuacacauuacauuugugug

SEQ ID NO: 1023099 - RNA, 22 nt, Human
cuuuuaguagaaaugggguuuc

SEQ ID NO: 1023100 - RNA, 24 nt, Human
gaaaugggguuucgccauguuggu

SEQ ID NO: 1023101 - RNA, 24 nt, Human
gaccucaggugauccaccugccuc

SEQ ID NO: 1023102 - RNA, 20 nt, Human
gaccuuugaaauauauaaug

SEQ ID NO: 1023103 - RNA, 19 nt, Human
gacuugucuuucuuuccuc

SEQ ID NO: 1023104 - RNA, 18 nt, Human
gauuacaggcaugagcca

SEQ ID NO: 1023105 - RNA, 22 nt, Human
gauuacaggcaugagccacugc

SEQ ID NO: 1023106 - RNA, 23 nt, Human
gauuacaggcaugagccacugca

SEQ ID NO: 1023107 - RNA, 18 nt, Human
gauuacaggcgcacgcca

SEQ ID NO: 1023108 - RNA, 22 nt, Human
gcaaccuccgccuccuggguuc

SEQ ID NO: 1023109 - RNA, 20 nt, Human
gcucuuuuugcccaggaugg

SEQ ID NO: 1023110 - RNA, 23 nt, Human
gcuggucuugaacuccugaccuc

SEQ ID NO: 1023111 - RNA, 22 nt, Human
ggauuacaggcaugagccacug

SEQ ID NO: 1023112 - RNA, 24 nt, Human
ggcuggucuugaacuccugaccuc

SEQ ID NO: 1023113 - RNA, 22 nt, Human
gggguuucgccauguuggucag

SEQ ID NO: 1023114 - RNA, 19 nt, Human
ggucuugaacuccugaccu

SEQ ID NO: 1023115 - RNA, 24 nt, Human
gugauccaccugccucggacuccc

SEQ ID NO: 1023116 - RNA, 24 nt, Human
gugauucuccugccucagccuccu

SEQ ID NO: 1023117 - RNA, 21 nt, Human
uaacugcaaaaguuaccaccu

SEQ ID NO: 1023118 - RNA, 24 nt, Human
uacaggcaugagccacugcaccca

SEQ ID NO: 1023119 - RNA, 22 nt, Human
uagaaaugggguuucgccaugu

SEQ ID NO: 1023120 - RNA, 24 nt, Human
uaguagaaaugggguuucgccaug

SEQ ID NO: 1023121 - RNA, 25 nt, Human
uauagcugggauuacaggcgcacgc

SEQ ID NO: 1023122 - RNA, 19 nt, Human
ucaagugauucuccugccu

SEQ ID NO: 1023123 - RNA, 23 nt, Human
ucacugcaaccuccgccuccugg

SEQ ID NO: 1023124 - RNA, 24 nt, Human
ucacugcaaccuccgccuccuggg

SEQ ID NO: 1023125 - RNA, 25 nt, Human
ucacugcaaccuccgccuccugggu

SEQ ID NO: 1023126 - RNA, 27 nt, Human
ucacugcaaccuccgccuccuggguuc

SEQ ID NO: 1023127 - RNA, 21 nt, Human
ucaggugauccaccugccucg

SEQ ID NO: 1023128 - RNA, 24 nt, Human
ucccaaaguguugggauuacaggc

SEQ ID NO: 1023129 - RNA, 24 nt, Human
uccuauauagcugggauuacaggc

SEQ ID NO: 1023130 - RNA, 21 nt, Human
uccuggguucaagugauucuc

SEQ ID NO: 1023131 - RNA, 24 nt, Human
uccuggguucaagugauucuccug

SEQ ID NO: 1023132 - RNA, 22 nt, Human
ucgccauguuggucaggcuggu

SEQ ID NO: 1023133 - RNA, 24 nt, Human
ucgccauguuggucaggcuggucu

SEQ ID NO: 1023134 - RNA, 26 nt, Human
ucuccugccucagccuccuauauagc

SEQ ID NO: 1023135 - RNA, 23 nt, Human
ucuugaacuccugaccucaggug

SEQ ID NO: 1023136 - RNA, 19 nt, Human
ucuuuccucuuccucuucu

SEQ ID NO: 1023137 - RNA, 20 nt, Human
ucuuucuuuccucuuccucu

SEQ ID NO: 1023138 - RNA, 21 nt, Human
ugaaagucacaaacaguagcc

SEQ ID NO: 1023139 - RNA, 24 nt, Human
ugaccucaggugauccaccugccu

SEQ ID NO: 1023140 - RNA, 20 nt, Human
ugacuugucuuucuuuccuc

SEQ ID NO: 1023141 - RNA, 23 nt, Human
ugacuugucuuucuuuuggaagc

SEQ ID NO: 1023142 - RNA, 25 nt, Human
ugagaaaccucaaacaauggaauaa

SEQ ID NO: 1023143 - RNA, 18 nt, Human
ugcauuuuuuuuuuuucc

SEQ ID NO: 1023144 - RNA, 24 nt, Human
ugccucagccuccuauauagcugg

SEQ ID NO: 1023145 - RNA, 24 nt, Human
uggaauaaaagauuuuauaaccug

SEQ ID NO: 1023146 - RNA, 20 nt, Human
uggagugcauuggcacgauc

SEQ ID NO: 1023147 - RNA, 24 nt, Human
uggagugcauuggcacgaucuugg

SEQ ID NO: 1023148 - RNA, 19 nt, Human
uggaugucuauuaauacuu

SEQ ID NO: 1023149 - RNA, 18 nt, Human
ugggauuacaggcaugag

SEQ ID NO: 1023150 - RNA, 19 nt, Human
ugggauuacaggcaugagc

SEQ ID NO: 1023151 - RNA, 21 nt, Human
ugggauuacaggcaugagcca

SEQ ID NO: 1023152 - RNA, 22 nt, Human
ugggauuacaggcaugagccac

SEQ ID NO: 1023153 - RNA, 22 nt, Human
ugggauuacaggcaugagccac

SEQ ID NO: 1023154 - RNA, 24 nt, Human
ugggauuacaggcaugagccacug

SEQ ID NO: 1023155 - RNA, 26 nt, Human
ugggauuacaggcaugagccacugca

SEQ ID NO: 1023156 - RNA, 22 nt, Human
ugggauuacaggcgcacgccac

SEQ ID NO: 1023157 - RNA, 24 nt, Human
ugggauuacaggcgcacgccacca

SEQ ID NO: 1023158 - RNA, 24 nt, Human
ugggguuucgccauguuggucagg

SEQ ID NO: 1023159 - RNA, 23 nt, Human
uggguucaagugauucuccugcc

SEQ ID NO: 1023160 - RNA, 24 nt, Human
uggguucaagugauucuccugccu

SEQ ID NO: 1023161 - RNA, 24 nt, Human
uggucaggcuggucuugaacuccu

SEQ ID NO: 1023162 - RNA, 24 nt, Human
ugucacacacaguacauuuaugug

SEQ ID NO: 1023163 - RNA, 18 nt, Human
uuaguagaaaugggguuu

SEQ ID NO: 1023164 - RNA, 22 nt, Human
uuaguagaaaugggguuucgcc

SEQ ID NO: 1023165 - RNA, 24 nt, Human
uuaguagaaaugggguuucgccau

SEQ ID NO: 1023166 - RNA, 21 nt, Human
uucaagugauucuccugccuc

SEQ ID NO: 1023167 - RNA, 23 nt, Human
uucaagugauucuccugccucag

SEQ ID NO: 1023168 - RNA, 24 nt, Human
uucaagugauucuccugccucagc

SEQ ID NO: 1023169 - RNA, 19 nt, Human
uucccagauaggcaccacg

SEQ ID NO: 1023170 - RNA, 20 nt, Human
uugaacucaugaggaguuug

SEQ ID NO: 1023171 - RNA, 26 nt, Human
uugcauuuucaaggaaucucucaggc

SEQ ID NO: 1023172 - RNA, 24 nt, Human
uugcccaggauggagugcauuggc

SEQ ID NO: 1023173 - RNA, 24 nt, Human
uuucgccauguuggucaggcuggu

SEQ ID NO: 1023174 - RNA, 24 nt, Human
uuugcucuuuuugcccaggaugga

SEQ ID NO: 1023175 - RNA, 19 nt, Human
uuuguaagguuucucucca

SEQ ID NO: 1023176 - RNA, 22 nt, Human
uuugugugguuccaucaaauac

SEQ ID NO: 1023177 - RNA, 20 nt, Human
uuuugcucuuuuugcccagg

SEQ ID NO: 1023178 - RNA, 24 nt, Human
uuuugcucuuuuugcccaggaugg

SEQ ID NO: 1023179 - RNA, 23 nt, Human
aaaccggguccagaucuucagga

SEQ ID NO: 1023180 - RNA, 21 nt, Human
acacaacuuccccaggccccc

SEQ ID NO: 1023181 - RNA, 25 nt, Human
agcccggagcuucggcgucgggguc

SEQ ID NO: 1023182 - RNA, 21 nt, Human
aggcucugggucuucagaaac

SEQ ID NO: 1023183 - RNA, 20 nt, Human
cacaacacacaacuucccca

SEQ ID NO: 1023184 - RNA, 22 nt, Human
cagauccuccgagacgggcucc

SEQ ID NO: 1023185 - RNA, 21 nt, Human
ccaggcccccgaggaugccgg

SEQ ID NO: 1023186 - RNA, 21 nt, Human
ccccaggcccccgaggaugcc

SEQ ID NO: 1023187 - RNA, 19 nt, Human
ccuccgagacgggcuccag

SEQ ID NO: 1023188 - RNA, 25 nt, Human
cuuccccaggcccccgaggaugccg

SEQ ID NO: 1023189 - RNA, 18 nt, Human
gcucugggucuucagaaa

SEQ ID NO: 1023190 - RNA, 20 nt, Human
gggcuccagaucuucauagc

SEQ ID NO: 1023191 - RNA, 21 nt, Human
uccagaucuucauagcugggg

SEQ ID NO: 1023192 - RNA, 26 nt, Human
uccccaggcccccgaggaugccggcg

SEQ ID NO: 1023193 - RNA, 19 nt, Human
ugacugcacaacacacaac

SEQ ID NO: 1023194 - RNA, 18 nt, Human
aaacaaggucucaggcgc

SEQ ID NO: 1023195 - RNA, 21 nt, Human
aaacugccaucucgugacuug

SEQ ID NO: 1023196 - RNA, 24 nt, Human
acacuucuucuuccuccuccggga

SEQ ID NO: 1023197 - RNA, 22 nt, Human
agcaacggagacacugcucgcc

SEQ ID NO: 1023198 - RNA, 22 nt, Human
aggccagcucuuucuuccccaa

SEQ ID NO: 1023199 - RNA, 19 nt, Human
auggcuggaaggccaaggc

SEQ ID NO: 1023200 - RNA, 19 nt, Human
caaauagcucccggcucga

SEQ ID NO: 1023201 - RNA, 22 nt, Human
caaggcacaggaagcaacggag

SEQ ID NO: 1023202 - RNA, 24 nt, Human
cacuucuggcuccaaaacugccau

SEQ ID NO: 1023203 - RNA, 19 nt, Human
cacuucuucuuccuccucc

SEQ ID NO: 1023204 - RNA, 24 nt, Human
ccacacccagcacaucaggaggug

SEQ ID NO: 1023205 - RNA, 19 nt, Human
ccacugcucccuagcaggu

SEQ ID NO: 1023206 - RNA, 24 nt, Human
ccugcccuggcuuccuccugggag

SEQ ID NO: 1023207 - RNA, 25 nt, Human
cgaaaccauagauacgagcgggcua

SEQ ID NO: 1023208 - RNA, 21 nt, Human
cgaguggcucccucaccgcca

SEQ ID NO: 1023209 - RNA, 22 nt, Human
cucccucaccgccauuccccgc

SEQ ID NO: 1023210 - RNA, 20 nt, Human
cugguaaagcugaccuaaga

SEQ ID NO: 1023211 - RNA, 27 nt, Human
cuucuggcuccaaaacugccaucuuac

SEQ ID NO: 1023212 - RNA, 27 nt, Human
gaaaccauagauacgagcgggcuacug

SEQ ID NO: 1023213 - RNA, 22 nt, Human
gccaaggcacaggaagcaacgg

SEQ ID NO: 1023214 - RNA, 22 nt, Human
guaccacauggcuggaaggcca

SEQ ID NO: 1023215 - RNA, 18 nt, Human
gugaagccuucuucuugg

SEQ ID NO: 1023216 - RNA, 19 nt, Human
uaccacauggcuggaaggc

SEQ ID NO: 1023217 - RNA, 20 nt, Human
uagcucccggcucgaggccu

SEQ ID NO: 1023218 - RNA, 21 nt, Human
uagcucccggcucgaggccua

SEQ ID NO: 1023219 - RNA, 22 nt, Human
uaggacguauaacacuucuucu

SEQ ID NO: 1023220 - RNA, 18 nt, Human
uccccgcggaacccugcc

SEQ ID NO: 1023221 - RNA, 22 nt, Human
ucgaggccuaaccacacccagc

SEQ ID NO: 1023222 - RNA, 22 nt, Human
ucggggaugcuuuuucugaagg

SEQ ID NO: 1023223 - RNA, 24 nt, Human
ugaaacaaggucucaggcgcaguu

SEQ ID NO: 1023224 - RNA, 23 nt, Human
ugaaggaugcuggccugaaaccu

SEQ ID NO: 1023225 - RNA, 20 nt, Human
ugacugcagguaacaaacug

SEQ ID NO: 1023226 - RNA, 20 nt, Human
ugacuugugaagccuucuuc

SEQ ID NO: 1023227 - RNA, 19 nt, Human
ugcccuggcuuccuccugg

SEQ ID NO: 1023228 - RNA, 24 nt, Human
uggaaggccaaggcacaggaagca

SEQ ID NO: 1023229 - RNA, 21 nt, Human
uggcucccucaccgccauucc

SEQ ID NO: 1023230 - RNA, 25 nt, Human
uuauuucuggaauuuuccauuuaau

SEQ ID NO: 1023231 - RNA, 23 nt, Human
uuccuccucggggaugcuuuuuc

SEQ ID NO: 1023232 - RNA, 21 nt, Human
uuuuuuuuuuuuuuuuuuugg

SEQ ID NO: 1023233 - RNA, 24 nt, Human
aagugcaguucuaucaagaacuag

SEQ ID NO: 1023234 - RNA, 21 nt, Human
acacuaguacaaaacacauca

SEQ ID NO: 1023235 - RNA, 22 nt, Human
acauuuagaggauccagaggac

SEQ ID NO: 1023236 - RNA, 19 nt, Human
agaaaaugccaaguucucc

SEQ ID NO: 1023237 - RNA, 18 nt, Human
agcacaccccucccagcc

SEQ ID NO: 1023238 - RNA, 20 nt, Human
agggagaacuuaauauaaca

SEQ ID NO: 1023239 - RNA, 22 nt, Human
auacacuucuaugaauguauca

SEQ ID NO: 1023240 - RNA, 20 nt, Human
auuccaccgauccuuccccc

SEQ ID NO: 1023241 - RNA, 22 nt, Human
caaaacacaucaacucuaaugc

SEQ ID NO: 1023242 - RNA, 20 nt, Human
cacaccccucccagccccag

SEQ ID NO: 1023243 - RNA, 26 nt, Human
caccccucccagccccagcggccacu

SEQ ID NO: 1023244 - RNA, 25 nt, Human
caccuccccucacauuccaccgauc

SEQ ID NO: 1023245 - RNA, 20 nt, Human
cagaaaaugccaaguucucc

SEQ ID NO: 1023246 - RNA, 23 nt, Human
caguggcaaacaucauuggcuuc

SEQ ID NO: 1023247 - RNA, 21 nt, Human
ccaaaaaacugacacuaaagg

SEQ ID NO: 1023248 - RNA, 23 nt, Human
ccacuagcgacaauauggcuccu

SEQ ID NO: 1023249 - RNA, 22 nt, Human
cccagagaagcugcgccucucu

SEQ ID NO: 1023250 - RNA, 18 nt, Human
cccagccccagcggccac

SEQ ID NO: 1023251 - RNA, 22 nt, Human
cccagccccagcggccacuagc

SEQ ID NO: 1023252 - RNA, 23 nt, Human
ccccagcggccacuagcgacaau

SEQ ID NO: 1023253 - RNA, 23 nt, Human
cccccaggauaaaaaccacgccc

SEQ ID NO: 1023254 - RNA, 23 nt, Human
cccucccagccccagcggccacu

SEQ ID NO: 1023255 - RNA, 23 nt, Human
ccuccaccuccccucacauucca

SEQ ID NO: 1023256 - RNA, 21 nt, Human
ccucucuagcacaccccuccc

SEQ ID NO: 1023257 - RNA, 21 nt, Human
cuagcacaccccucccagccc

SEQ ID NO: 1023258 - RNA, 23 nt, Human
cuagcgacaauauggcuccuaag

SEQ ID NO: 1023259 - RNA, 20 nt, Human
cucaaaagaaagaaaauuuc

SEQ ID NO: 1023260 - RNA, 23 nt, Human
cucaaaagaaagaaaauuucuuu

SEQ ID NO: 1023261 - RNA, 18 nt, Human
cugucuuagaaaauucua

SEQ ID NO: 1023262 - RNA, 24 nt, Human
gaacuuaauauaacacagcccuua

SEQ ID NO: 1023263 - RNA, 18 nt, Human
gcacaccccucccagccc

SEQ ID NO: 1023264 - RNA, 23 nt, Human
gccucucuagcacaccccuccca

SEQ ID NO: 1023265 - RNA, 20 nt, Human
gcgacaauauggcuccuaag

SEQ ID NO: 1023266 - RNA, 21 nt, Human
uacauuauagaacugaugaua

SEQ ID NO: 1023267 - RNA, 24 nt, Human
uagaaaugaacugcacgcguagug

SEQ ID NO: 1023268 - RNA, 25 nt, Human
uauaucagaaaaugccaaguucucc

SEQ ID NO: 1023269 - RNA, 21 nt, Human
uauggaauaccucaaaagaaa

SEQ ID NO: 1023270 - RNA, 26 nt, Human
ucaaaauucacauuuagaggauccag

SEQ ID NO: 1023271 - RNA, 25 nt, Human
ucaacucuaaugcauagaugacgac

SEQ ID NO: 1023272 - RNA, 20 nt, Human
uccaccgauccuucccccag

SEQ ID NO: 1023273 - RNA, 20 nt, Human
ucuagcacaccccucccagc

SEQ ID NO: 1023274 - RNA, 19 nt, Human
ucuaugaauguaucagugg

SEQ ID NO: 1023275 - RNA, 19 nt, Human
ucucuagcacaccccuccc

SEQ ID NO: 1023276 - RNA, 23 nt, Human
ugcugugacacuaguacaaaaca

SEQ ID NO: 1023277 - RNA, 23 nt, Human
uggaauaccucaaaagaaagaaa

SEQ ID NO: 1023278 - RNA, 23 nt, Human
uuggcuuccaaaaaacugacacu

SEQ ID NO: 1023279 - RNA, 28 nt, Human
uuuucccaacuacuuuuauggaauaccu

SEQ ID NO: 1023280 - RNA, 21 nt, Human
agaaggagguggaaacaggga

SEQ ID NO: 1023281 - RNA, 18 nt, Human
agacagcaggacccuaac

SEQ ID NO: 1023282 - RNA, 19 nt, Human
auggugggguagagguugg

SEQ ID NO: 1023283 - RNA, 21 nt, Human
caaaaggacuuuauaucagca

SEQ ID NO: 1023284 - RNA, 22 nt, Human
caagacaaaacaaaaucauuag

SEQ ID NO: 1023285 - RNA, 25 nt, Human
cagcaggacccuaacuagacuuuaa

SEQ ID NO: 1023286 - RNA, 24 nt, Human
cagucgucgccgccgccgccgccu

SEQ ID NO: 1023287 - RNA, 20 nt, Human
ccacagcccugauucaggug

SEQ ID NO: 1023288 - RNA, 21 nt, Human
cccucgccaggccgcuaccuc

SEQ ID NO: 1023289 - RNA, 18 nt, Human
ccgccgccgccucggugc

SEQ ID NO: 1023290 - RNA, 18 nt, Human
ccuccgccgcggccgucc

SEQ ID NO: 1023291 - RNA, 19 nt, Human
cgucgccgccgccgccgcc

SEQ ID NO: 1023292 - RNA, 25 nt, Human
cuuuauaucagcaggacuuuagggc

SEQ ID NO: 1023293 - RNA, 19 nt, Human
gaguaguuuuuuuuuuuuu

SEQ ID NO: 1023294 - RNA, 22 nt, Human
gcagucgucgccgccgccgccg

SEQ ID NO: 1023295 - RNA, 21 nt, Human
gugggguagagguuggagaag

SEQ ID NO: 1023296 - RNA, 18 nt, Human
uaacuagacuuuaaggaa

SEQ ID NO: 1023297 - RNA, 22 nt, Human
uaagaugauuaccacagcccug

SEQ ID NO: 1023298 - RNA, 23 nt, Human
uaagaugauuaccacagcccuga

SEQ ID NO: 1023299 - RNA, 22 nt, Human
uacaaggcaacaugacagacag

SEQ ID NO: 1023300 - RNA, 19 nt, Human
ucaagacaaaacaaaauca

SEQ ID NO: 1023301 - RNA, 25 nt, Human
ucaagacaaaacaaaaucauuaguc

SEQ ID NO: 1023302 - RNA, 21 nt, Human
ucgccgccgccgccgccucgg

SEQ ID NO: 1023303 - RNA, 23 nt, Human
ucgucgccgccgccgccgccucg

SEQ ID NO: 1023304 - RNA, 24 nt, Human
ucgucgccgccgccgccgccucgg

SEQ ID NO: 1023305 - RNA, 20 nt, Human
ucuuugauuugcucucuggg

SEQ ID NO: 1023306 - RNA, 22 nt, Human
ucuuugauuugcucucugggga

SEQ ID NO: 1023307 - RNA, 20 nt, Human
uggugggguagagguuggag

SEQ ID NO: 1023308 - RNA, 20 nt, Human
uuagauaccugaauuugacc

SEQ ID NO: 1023309 - RNA, 18 nt, Human
uucagggauaagaggcau

SEQ ID NO: 1023310 - RNA, 23 nt, Human
aaaaacaaaccuggagccauaug

SEQ ID NO: 1023311 - RNA, 18 nt, Human
aaacacccuccugagucc

SEQ ID NO: 1023312 - RNA, 20 nt, Human
aagagcagagcaaacuguga

SEQ ID NO: 1023313 - RNA, 18 nt, Human
agaaaaacaaaccuggag

SEQ ID NO: 1023314 - RNA, 30 nt, Human
agaaaaacaaaccuggagccauauggcaga

SEQ ID NO: 1023315 - RNA, 24 nt, Human
agacaugcccagaaggcccgaagc

SEQ ID NO: 1023316 - RNA, 23 nt, Human
agcaaacacccuccugaguccuc

SEQ ID NO: 1023317 - RNA, 23 nt, Human
agcauccuccgcguccucuaccc

SEQ ID NO: 1023318 - RNA, 26 nt, Human
aggcccgaagcggcucccgcgacggg

SEQ ID NO: 1023319 - RNA, 20 nt, Human
cacccuuuauguucuguguu

SEQ ID NO: 1023320 - RNA, 22 nt, Human
cagcaaacacccuccugagucc

SEQ ID NO: 1023321 - RNA, 19 nt, Human
cagcagcucagcauccucc

SEQ ID NO: 1023322 - RNA, 19 nt, Human
cagcauccuccgcguccuc

SEQ ID NO: 1023323 - RNA, 24 nt, Human
ccauauggcagacaugcccagaag

SEQ ID NO: 1023324 - RNA, 19 nt, Human
ccguacaucucuaguugug

SEQ ID NO: 1023325 - RNA, 22 nt, Human
cgggggccgaaaagugcacacu

SEQ ID NO: 1023326 - RNA, 18 nt, Human
cugucuguucuugacucu

SEQ ID NO: 1023327 - RNA, 24 nt, Human
gacgccaggagaugccgggagccc

SEQ ID NO: 1023328 - RNA, 19 nt, Human
gacucuuucucgcggcugu

SEQ ID NO: 1023329 - RNA, 18 nt, Human
gagccauauggcagacau

SEQ ID NO: 1023330 - RNA, 22 nt, Human
gcauccguacaucucuaguugu

SEQ ID NO: 1023331 - RNA, 23 nt, Human
ggagcccuccccgucagagugcc

SEQ ID NO: 1023332 - RNA, 20 nt, Human
gggcaaagguguucucauua

SEQ ID NO: 1023333 - RNA, 21 nt, Human
gucuguucuugacucuuucuc

SEQ ID NO: 1023334 - RNA, 21 nt, Human
ucagcauccuccgcguccucu

SEQ ID NO: 1023335 - RNA, 18 nt, Human
uccacugguguuggaaga

SEQ ID NO: 1023336 - RNA, 18 nt, Human
uccccgucagagugccgg

SEQ ID NO: 1023337 - RNA, 21 nt, Human
uccugaguccucaagcgacuc

SEQ ID NO: 1023338 - RNA, 19 nt, Human
ucugucuguucuugacucu

SEQ ID NO: 1023339 - RNA, 20 nt, Human
ucuguucuugacucuuucuc

SEQ ID NO: 1023340 - RNA, 18 nt, Human
ugagaacugacuucaggg

SEQ ID NO: 1023341 - RNA, 23 nt, Human
uuucucgcggcuguaccucugau

SEQ ID NO: 1023342 - RNA, 25 nt, Human
aaaaaaaggacaaaaauaaacaaaa

SEQ ID NO: 1023343 - RNA, 21 nt, Human
aaaaggacaaaaauaaacaaa

SEQ ID NO: 1023344 - RNA, 19 nt, Human
aaacaaaacaucaaauaug

SEQ ID NO: 1023345 - RNA, 22 nt, Human
aaacaaaacaucaaauaugaaa

SEQ ID NO: 1023346 - RNA, 20 nt, Human
aagccaccugugaccaacuu

SEQ ID NO: 1023347 - RNA, 21 nt, Human
aaucuccuucuaccagcaguc

SEQ ID NO: 1023348 - RNA, 22 nt, Human
acauuagagauggaggaggagg

SEQ ID NO: 1023349 - RNA, 26 nt, Human
acccucucucucucuuccuccugccg

SEQ ID NO: 1023350 - RNA, 24 nt, Human
agaaaaggacuuuucccaccaaga

SEQ ID NO: 1023351 - RNA, 24 nt, Human
agaaggagagaggcuucaaggaaa

SEQ ID NO: 1023352 - RNA, 21 nt, Human
agaaggcaaagcugagggcug

SEQ ID NO: 1023353 - RNA, 18 nt, Human
agaguucagaaaaaggau

SEQ ID NO: 1023354 - RNA, 23 nt, Human
agcaaauccuucccuugagcacc

SEQ ID NO: 1023355 - RNA, 25 nt, Human
agccaccagagaacuguggagaacc

SEQ ID NO: 1023356 - RNA, 20 nt, Human
agccucuagucuuacaucag

SEQ ID NO: 1023357 - RNA, 23 nt, Human
aggaagaaaaggacuuuucccac

SEQ ID NO: 1023358 - RNA, 19 nt, Human
aggauaaggaggguaagga

SEQ ID NO: 1023359 - RNA, 20 nt, Human
aggcaaagcugagggcuggg

SEQ ID NO: 1023360 - RNA, 25 nt, Human
aggcaagaauagaacaagaggcugg

SEQ ID NO: 1023361 - RNA, 21 nt, Human
aggcaggcagaccccccagcc

SEQ ID NO: 1023362 - RNA, 18 nt, Human
agggguggagagagggaa

SEQ ID NO: 1023363 - RNA, 20 nt, Human
caaaacaucaaauaugaaaa

SEQ ID NO: 1023364 - RNA, 23 nt, Human
caaagccucccacagcuccuugg

SEQ ID NO: 1023365 - RNA, 19 nt, Human
caaggaagaaaaggacuuu

SEQ ID NO: 1023366 - RNA, 22 nt, Human
cacaagaccuuguggcaggcac

SEQ ID NO: 1023367 - RNA, 18 nt, Human
cacacacuucuaagccac

SEQ ID NO: 1023368 - RNA, 22 nt, Human
cacaucucagcccuugcccccu

SEQ ID NO: 1023369 - RNA, 21 nt, Human
caccugugaccaacuugggaa

SEQ ID NO: 1023370 - RNA, 23 nt, Human
cagaggcccaaggagauggagcc

SEQ ID NO: 1023371 - RNA, 19 nt, Human
caggacuacuucuuccucu

SEQ ID NO: 1023372 - RNA, 21 nt, Human
ccagcaauccaaagacgggug

SEQ ID NO: 1023373 - RNA, 23 nt, Human
ccaguucaggcccagccacuucc

SEQ ID NO: 1023374 - RNA, 19 nt, Human
cccaggccacagguaacca

SEQ ID NO: 1023375 - RNA, 18 nt, Human
ccccaaaucuccuucuac

SEQ ID NO: 1023376 - RNA, 23 nt, Human
ccccaaaucuccuucuaccagca

SEQ ID NO: 1023377 - RNA, 20 nt, Human
ccccaaaucuccuucuaccu

SEQ ID NO: 1023378 - RNA, 23 nt, Human
cccccaguuuuagaagcuuugcu

SEQ ID NO: 1023379 - RNA, 20 nt, Human
cccucucucucucuuccucc

SEQ ID NO: 1023380 - RNA, 22 nt, Human
cccugaggaguggcuucagaag

SEQ ID NO: 1023381 - RNA, 19 nt, Human
ccgacccccaguuuuagaa

SEQ ID NO: 1023382 - RNA, 18 nt, Human
ccgcaacaccccuguuuu

SEQ ID NO: 1023383 - RNA, 24 nt, Human
ccgucuuauuccuucuccuuucca

SEQ ID NO: 1023384 - RNA, 22 nt, Human
ccucccacagcuccuugggggu

SEQ ID NO: 1023385 - RNA, 22 nt, Human
ccuccugccgucuuauuccuuc

SEQ ID NO: 1023386 - RNA, 25 nt, Human
ccucuagucuuacaucagcccaaac

SEQ ID NO: 1023387 - RNA, 19 nt, Human
ccuuggggguggguugggg

SEQ ID NO: 1023388 - RNA, 18 nt, Human
cgacccccaguuuuagaa

SEQ ID NO: 1023389 - RNA, 19 nt, Human
cuacccucucucucucuuc

SEQ ID NO: 1023390 - RNA, 19 nt, Human
cuacccucucucucucuuc

SEQ ID NO: 1023391 - RNA, 22 nt, Human
cuccugaacuuucuguaaacaa

SEQ ID NO: 1023392 - RNA, 22 nt, Human
gaaaugguuacaacaaagaugg

SEQ ID NO: 1023393 - RNA, 19 nt, Human
gaacauuagagauggagga

SEQ ID NO: 1023394 - RNA, 24 nt, Human
gaaggcaggcagaccccccagcca

SEQ ID NO: 1023395 - RNA, 18 nt, Human
gacagggguggagagagg

SEQ ID NO: 1023396 - RNA, 20 nt, Human
gaccccccagccagcaaucc

SEQ ID NO: 1023397 - RNA, 22 nt, Human
gaccccccagccagcaauccaa

SEQ ID NO: 1023398 - RNA, 25 nt, Human
gacuuuucccaccaagaguuggaga

SEQ ID NO: 1023399 - RNA, 23 nt, Human
gagaaagaagacaccaggacuac

SEQ ID NO: 1023400 - RNA, 21 nt, Human
gagaacauuagagauggagga

SEQ ID NO: 1023401 - RNA, 23 nt, Human
gaggacagggguggagagaggga

SEQ ID NO: 1023402 - RNA, 18 nt, Human
gaggagggucugugcccc

SEQ ID NO: 1023403 - RNA, 24 nt, Human
ggaaagccgugacagaggcccaag

SEQ ID NO: 1023404 - RNA, 24 nt, Human
ggaccacaucucagcccuugcccc

SEQ ID NO: 1023405 - RNA, 21 nt, Human
ggacuacuucuuccucuuccc

SEQ ID NO: 1023406 - RNA, 22 nt, Human
ggagccaaggccugucaaggaa

SEQ ID NO: 1023407 - RNA, 22 nt, Human
ggaggaggaggagggucugugc

SEQ ID NO: 1023408 - RNA, 21 nt, Human
ggggguggguuggggagacug

SEQ ID NO: 1023409 - RNA, 25 nt, Human
gggguggagagagggaaaaaaagga

SEQ ID NO: 1023410 - RNA, 25 nt, Human
guaaaaccauaacacacacuucuaa

SEQ ID NO: 1023411 - RNA, 21 nt, Human
guccaguccuugcguuugccu

SEQ ID NO: 1023412 - RNA, 19 nt, Human
uaaacaaaacaucaaauau

SEQ ID NO: 1023413 - RNA, 20 nt, Human
uaaauccaauucccagaaac

SEQ ID NO: 1023414 - RNA, 24 nt, Human
uaccccaaaucuccuucuaccagc

SEQ ID NO: 1023415 - RNA, 19 nt, Human
uacccucucucucucuucc

SEQ ID NO: 1023416 - RNA, 27 nt, Human
uagcaaauccuucccuugagcaccgac

SEQ ID NO: 1023417 - RNA, 26 nt, Human
uaggggaagaaauggcucucagggaa

SEQ ID NO: 1023418 - RNA, 19 nt, Human
ucccaggccacagguaacc

SEQ ID NO: 1023419 - RNA, 21 nt, Human
ucccuugagcaccgaccccca

SEQ ID NO: 1023420 - RNA, 22 nt, Human
ucccuugagcaccgacccccag

SEQ ID NO: 1023421 - RNA, 20 nt, Human
ucucagcccuugcccccuuc

SEQ ID NO: 1023422 - RNA, 21 nt, Human
ucucagcccuugcccccuuca

SEQ ID NO: 1023423 - RNA, 24 nt, Human
ucucucucuuccuccugccgucuu

SEQ ID NO: 1023424 - RNA, 22 nt, Human
ucuggaaggcaggcagaccccc

SEQ ID NO: 1023425 - RNA, 25 nt, Human
ucuuuguaggcagagaaggagagag

SEQ ID NO: 1023426 - RNA, 31 nt, Human
ucuuuugcaggcaagaauagaacaagaggcu

SEQ ID NO: 1023427 - RNA, 18 nt, Human
ugagaguauagggucuuu

SEQ ID NO: 1023428 - RNA, 25 nt, Human
ugcauuuauaaacacagaaaugguu

SEQ ID NO: 1023429 - RNA, 19 nt, Human
ugcuugggaggggaggcug

SEQ ID NO: 1023430 - RNA, 23 nt, Human
ugcuugggaggggaggcugcugg

SEQ ID NO: 1023431 - RNA, 18 nt, Human
uggaaggcaggcagaccc

SEQ ID NO: 1023432 - RNA, 25 nt, Human
uggagaaagaagacaccaggacuac

SEQ ID NO: 1023433 - RNA, 21 nt, Human
uggagagagggaaaaaaagga

SEQ ID NO: 1023434 - RNA, 19 nt, Human
uggaggaggaggagggucu

SEQ ID NO: 1023435 - RNA, 18 nt, Human
uggggguggguuggggag

SEQ ID NO: 1023436 - RNA, 21 nt, Human
ugguauaauauauuuauauau

SEQ ID NO: 1023437 - RNA, 21 nt, Human
ugucaaggaagaaaaggacuu

SEQ ID NO: 1023438 - RNA, 25 nt, Human
ugucaaggaagaaaaggacuuuucc

SEQ ID NO: 1023439 - RNA, 30 nt, Human
uguuuuggaguuucacagauaacacaaagg

SEQ ID NO: 1023440 - RNA, 25 nt, Human
uucacagauaacacaaagccuccca

SEQ ID NO: 1023441 - RNA, 23 nt, Human
uuccagggcuccugaacuuucug

SEQ ID NO: 1023442 - RNA, 23 nt, Human
uuccuucuccuuuccagggcucc

SEQ ID NO: 1023443 - RNA, 21 nt, Human
uuggagaaagaagacaccagg

SEQ ID NO: 1023444 - RNA, 23 nt, Human
uuuauaaacacagaaaugguuac

SEQ ID NO: 1023445 - RNA, 22 nt, Human
uuugcaggcaagaauagaacaa

SEQ ID NO: 1023446 - RNA, 24 nt, Human
aaaaaacuuuugaaacaaugcuua

SEQ ID NO: 1023447 - RNA, 22 nt, Human
aaaagaaaacaaauucagugca

SEQ ID NO: 1023448 - RNA, 22 nt, Human
aaaaugcucuuaugcuauuucu

SEQ ID NO: 1023449 - RNA, 22 nt, Human
aaacaccguuucuaccuaagaa

SEQ ID NO: 1023450 - RNA, 20 nt, Human
aaacagacaaaucugcauca

SEQ ID NO: 1023451 - RNA, 22 nt, Human
aaacagacaaaucugcaucacu

SEQ ID NO: 1023452 - RNA, 23 nt, Human
aaacagauguauaaagugauuag

SEQ ID NO: 1023453 - RNA, 25 nt, Human
aaacagauguauaaagugauuuccu

SEQ ID NO: 1023454 - RNA, 25 nt, Human
aaacaguauacaaacaaacuaccuc

SEQ ID NO: 1023455 - RNA, 27 nt, Human
aaacauacuucacaaaacauccugcuc

SEQ ID NO: 1023456 - RNA, 22 nt, Human
aaauaaauuaaccugaagucau

SEQ ID NO: 1023457 - RNA, 24 nt, Human
aaauacaaacauacuucacaaaac

SEQ ID NO: 1023458 - RNA, 22 nt, Human
aaauguacagcacugaacacaa

SEQ ID NO: 1023459 - RNA, 20 nt, Human
aacuaugaaacucugauccg

SEQ ID NO: 1023460 - RNA, 21 nt, Human
aagaagaguacaaugaagaaa

SEQ ID NO: 1023461 - RNA, 18 nt, Human
aaggugccaguguuugaa

SEQ ID NO: 1023462 - RNA, 20 nt, Human
aaguacuguauagcaaaaug

SEQ ID NO: 1023463 - RNA, 23 nt, Human
acaaaaaucagugaaaggugggg

SEQ ID NO: 1023464 - RNA, 19 nt, Human
acaaaucuacaccaauauu

SEQ ID NO: 1023465 - RNA, 21 nt, Human
acaacuguaauagaaaauuuu

SEQ ID NO: 1023466 - RNA, 25 nt, Human
acagcacugaacacaauuuuguugc

SEQ ID NO: 1023467 - RNA, 24 nt, Human
acaguaauaacaguggaauacauc

SEQ ID NO: 1023468 - RNA, 21 nt, Human
accauacaccaaauguacagc

SEQ ID NO: 1023469 - RNA, 22 nt, Human
accguccugccuucucuacccu

SEQ ID NO: 1023470 - RNA, 21 nt, Human
acgccuuagcaguacaugaac

SEQ ID NO: 1023471 - RNA, 19 nt, Human
acuguaguuccuucccuaa

SEQ ID NO: 1023472 - RNA, 22 nt, Human
agacagcacauaugguagcuca

SEQ ID NO: 1023473 - RNA, 19 nt, Human
agaggcacgucugcacaug

SEQ ID NO: 1023474 - RNA, 20 nt, Human
agcacagaaaauuaagccca

SEQ ID NO: 1023475 - RNA, 18 nt, Human
agccuggcuggucacacc

SEQ ID NO: 1023476 - RNA, 19 nt, Human
aggcaaauaaauacaaaca

SEQ ID NO: 1023477 - RNA, 22 nt, Human
aguacacaacuguaauagaaaa

SEQ ID NO: 1023478 - RNA, 19 nt, Human
agugaaaggugggggaaga

SEQ ID NO: 1023479 - RNA, 24 nt, Human
aguggaauuacuguugaguauugu

SEQ ID NO: 1023480 - RNA, 20 nt, Human
auagugcaguccuuagacaa

SEQ ID NO: 1023481 - RNA, 20 nt, Human
auccugcccuucucccuaca

SEQ ID NO: 1023482 - RNA, 22 nt, Human
augaagaaauaaaagaaaaaca

SEQ ID NO: 1023483 - RNA, 25 nt, Human
caaaacacaucaaguacaaaguagg

SEQ ID NO: 1023484 - RNA, 23 nt, Human
caaaaugcaguuaaaagauagua

SEQ ID NO: 1023485 - RNA, 22 nt, Human
caaauaaauacaaacauacuuc

SEQ ID NO: 1023486 - RNA, 21 nt, Human
caaaucugcaucacuaaaaag

SEQ ID NO: 1023487 - RNA, 22 nt, Human
caaguacaaaguaggcaaauaa

SEQ ID NO: 1023488 - RNA, 19 nt, Human
caauaagcaggucucuucc

SEQ ID NO: 1023489 - RNA, 22 nt, Human
caauaagcaggucucuuccaca

SEQ ID NO: 1023490 - RNA, 19 nt, Human
cacccuuuccuguuuccuc

SEQ ID NO: 1023491 - RNA, 22 nt, Human
caggucucuuccacaucgcccc

SEQ ID NO: 1023492 - RNA, 21 nt, Human
caguuuagcugguugucuaua

SEQ ID NO: 1023493 - RNA, 24 nt, Human
cauucaguuaaaaacauccugccc

SEQ ID NO: 1023494 - RNA, 26 nt, Human
cauuuacacagaggcacgucugcaca

SEQ ID NO: 1023495 - RNA, 20 nt, Human
ccaacauauggcaggaaagc

SEQ ID NO: 1023496 - RNA, 25 nt, Human
ccagccaagucgaauacuuugcuga

SEQ ID NO: 1023497 - RNA, 20 nt, Human
ccauuccuuuccagucaacc

SEQ ID NO: 1023498 - RNA, 22 nt, Human
ccugcccuucucccuacaaaaa

SEQ ID NO: 1023499 - RNA, 22 nt, Human
ccuucccuaaaagcuacuggaa

SEQ ID NO: 1023500 - RNA, 24 nt, Human
cgccccagugcacagaucugguac

SEQ ID NO: 1023501 - RNA, 21 nt, Human
cggcaaccuccacgccuuagc

SEQ ID NO: 1023502 - RNA, 19 nt, Human
cuaaguacaaaucuacacc

SEQ ID NO: 1023503 - RNA, 21 nt, Human
cucaacuauagugcaguccuu

SEQ ID NO: 1023504 - RNA, 19 nt, Human
cucaccuuaccgcaaauuc

SEQ ID NO: 1023505 - RNA, 22 nt, Human
cucagcuuuuuaaucauagauu

SEQ ID NO: 1023506 - RNA, 22 nt, Human
cuccaaaccaaagauaagcccc

SEQ ID NO: 1023507 - RNA, 18 nt, Human
cuggaucugaacuggaga

SEQ ID NO: 1023508 - RNA, 21 nt, Human
cuucaaaaugcaguuaaaaga

SEQ ID NO: 1023509 - RNA, 18 nt, Human
gaaguccuggaauugcuc

SEQ ID NO: 1023510 - RNA, 23 nt, Human
gagguuaauaaaaaauaaacacu

SEQ ID NO: 1023511 - RNA, 20 nt, Human
gccugugugugugagugugu

SEQ ID NO: 1023512 - RNA, 18 nt, Human
gcuaacaaauucugagca

SEQ ID NO: 1023513 - RNA, 20 nt, Human
ggauguguuuguauuugcua

SEQ ID NO: 1023514 - RNA, 21 nt, Human
ggcuguuuuccagcauccugu

SEQ ID NO: 1023515 - RNA, 18 nt, Human
gucucuuccacaucgccc

SEQ ID NO: 1023516 - RNA, 22 nt, Human
gucugcacaugaaaugugugug

SEQ ID NO: 1023517 - RNA, 18 nt, Human
gugugugcacaccaaaaa

SEQ ID NO: 1023518 - RNA, 21 nt, Human
gugugugugugugugugugug

SEQ ID NO: 1023519 - RNA, 20 nt, Human
uaaaaaacucuuugauuagu

SEQ ID NO: 1023520 - RNA, 22 nt, Human
uaaaaacauccugcccuucucc

SEQ ID NO: 1023521 - RNA, 23 nt, Human
uaaaaacauccugcccuucuccc

SEQ ID NO: 1023522 - RNA, 22 nt, Human
uaaaaaggcuuauguuucuuua

SEQ ID NO: 1023523 - RNA, 21 nt, Human
uaaaagaaaaacauaugaaaa

SEQ ID NO: 1023524 - RNA, 23 nt, Human
uaaaagaaaaacauaugaaaaua

SEQ ID NO: 1023525 - RNA, 28 nt, Human
uaaaagaaaaacauaugaaaauaaauaa

SEQ ID NO: 1023526 - RNA, 23 nt, Human
uaaauacaaacauacuucacaaa

SEQ ID NO: 1023527 - RNA, 26 nt, Human
uaacaaacuuguuaaaauauuuagca

SEQ ID NO: 1023528 - RNA, 19 nt, Human
uaacaguaauaacagugga

SEQ ID NO: 1023529 - RNA, 20 nt, Human
uaagguucaagaguucaaau

SEQ ID NO: 1023530 - RNA, 24 nt, Human
uacaaaguaggcaaauaaauacaa

SEQ ID NO: 1023531 - RNA, 22 nt, Human
uaccauacaccaaauguacagc

SEQ ID NO: 1023532 - RNA, 21 nt, Human
uacuggaucugaacuggagag

SEQ ID NO: 1023533 - RNA, 20 nt, Human
uagcaguacaugaaccucua

SEQ ID NO: 1023534 - RNA, 21 nt, Human
uaggcaaauaaauacaaacau

SEQ ID NO: 1023535 - RNA, 21 nt, Human
uagugauaaauccugaaauuc

SEQ ID NO: 1023536 - RNA, 18 nt, Human
uagugggcgccauuuguc

SEQ ID NO: 1023537 - RNA, 23 nt, Human
uauacaaacaaacuaccucaaau

SEQ ID NO: 1023538 - RNA, 19 nt, Human
uauauuuuccauuccuuuc

SEQ ID NO: 1023539 - RNA, 20 nt, Human
uauuuagugauaaauccuga

SEQ ID NO: 1023540 - RNA, 24 nt, Human
ucaaaaugcaguuaaaagauaaaa

SEQ ID NO: 1023541 - RNA, 21 nt, Human
ucaacccaguaagauaaaugc

SEQ ID NO: 1023542 - RNA, 19 nt, Human
ucacaaaacauccugcuca

SEQ ID NO: 1023543 - RNA, 21 nt, Human
ucacaaaacauccugcucaaa

SEQ ID NO: 1023544 - RNA, 18 nt, Human
ucacauucaguuaaaaac

SEQ ID NO: 1023545 - RNA, 20 nt, Human
ucacuaaacuaagguucaag

SEQ ID NO: 1023546 - RNA, 22 nt, Human
ucagcuggggaaaauaaaauua

SEQ ID NO: 1023547 - RNA, 24 nt, Human
uccaugagguuaauaaaaaauaaa

SEQ ID NO: 1023548 - RNA, 23 nt, Human
uccuauaaacagauguauaaagu

SEQ ID NO: 1023549 - RNA, 19 nt, Human
uccuggauguguuccaaaa

SEQ ID NO: 1023550 - RNA, 20 nt, Human
uccuuuuuauaucagcuggg

SEQ ID NO: 1023551 - RNA, 19 nt, Human
ucuacaaaauuuuucauuu

SEQ ID NO: 1023552 - RNA, 25 nt, Human
ucugugugugaguaugccugugugu

SEQ ID NO: 1023553 - RNA, 22 nt, Human
ugaaaagaaaacaaauucagug

SEQ ID NO: 1023554 - RNA, 20 nt, Human
ugaaacucugauccguucag

SEQ ID NO: 1023555 - RNA, 18 nt, Human
ugacgucuuuucuuacug

SEQ ID NO: 1023556 - RNA, 23 nt, Human
ugagguuaauaaaaaauaaacac

SEQ ID NO: 1023557 - RNA, 25 nt, Human
ugagucugugugugugugugugugu

SEQ ID NO: 1023558 - RNA, 22 nt, Human
ugagugcggauuccccacuagu

SEQ ID NO: 1023559 - RNA, 22 nt, Human
ugauaaauccugaaauucauuc

SEQ ID NO: 1023560 - RNA, 19 nt, Human
ugauccguucagaaauuca

SEQ ID NO: 1023561 - RNA, 22 nt, Human
ugcaaacacaaauaaauuaacc

SEQ ID NO: 1023562 - RNA, 21 nt, Human
ugcacaugaaaugugugugca

SEQ ID NO: 1023563 - RNA, 23 nt, Human
ugcauugcuuuuaauccaagaag

SEQ ID NO: 1023564 - RNA, 19 nt, Human
ugccaucacuuuccaucua

SEQ ID NO: 1023565 - RNA, 24 nt, Human
uggaugagucugugugugugugug

SEQ ID NO: 1023566 - RNA, 22 nt, Human
uggauguguuccaaaaugcucu

SEQ ID NO: 1023567 - RNA, 18 nt, Human
uguauagcaaaauguuug

SEQ ID NO: 1023568 - RNA, 22 nt, Human
uguauauuuuguagcauuugaa

SEQ ID NO: 1023569 - RNA, 21 nt, Human
ugugaguaugccugugugugu

SEQ ID NO: 1023570 - RNA, 18 nt, Human
ugugaguguguguguaua

SEQ ID NO: 1023571 - RNA, 18 nt, Human
ugugcaauaaaaaucaaa

SEQ ID NO: 1023572 - RNA, 21 nt, Human
ugugcaauaaaaaucaaacuc

SEQ ID NO: 1023573 - RNA, 18 nt, Human
uguggcaagauuucuauc

SEQ ID NO: 1023574 - RNA, 23 nt, Human
ugugggcucaauuugaagugugg

SEQ ID NO: 1023575 - RNA, 19 nt, Human
ugugugucugugugugagu

SEQ ID NO: 1023576 - RNA, 22 nt, Human
ugugugugaguguguguguaua

SEQ ID NO: 1023577 - RNA, 20 nt, Human
ugugugugugagugugugug

SEQ ID NO: 1023578 - RNA, 21 nt, Human
ugugugugugagugugugugu

SEQ ID NO: 1023579 - RNA, 22 nt, Human
ugugugugugagugugugugua

SEQ ID NO: 1023580 - RNA, 21 nt, Human
ugugugugugugucugugugu

SEQ ID NO: 1023581 - RNA, 21 nt, Human
ugugugugugugucugugugu

SEQ ID NO: 1023582 - RNA, 21 nt, Human
ugugugugugugugucugugu

SEQ ID NO: 1023583 - RNA, 23 nt, Human
ugugugugugugugucugugugu

SEQ ID NO: 1023584 - RNA, 25 nt, Human
ugugugugugugugugucugugugu

SEQ ID NO: 1023585 - RNA, 18 nt, Human
ugugugugugugugugug

SEQ ID NO: 1023586 - RNA, 18 nt, Human
ugugugugugugugugug

SEQ ID NO: 1023587 - RNA, 18 nt, Human
ugugugugugugugugug

SEQ ID NO: 1023588 - RNA, 22 nt, Human
ugugugugugugugugugucug

SEQ ID NO: 1023589 - RNA, 21 nt, Human
ugugugugugugugugugugu

SEQ ID NO: 1023590 - RNA, 21 nt, Human
ugugugugugugugugugugu

SEQ ID NO: 1023591 - RNA, 21 nt, Human
ugugugugugugugugugugu

SEQ ID NO: 1023592 - RNA, 21 nt, Human
ugugugugugugugugugugu

SEQ ID NO: 1023593 - RNA, 21 nt, Human
uguuugaaguaaucauucaga

SEQ ID NO: 1023594 - RNA, 18 nt, Human
uuaaaauauuuagcaaau

SEQ ID NO: 1023595 - RNA, 24 nt, Human
uuacuauauuuuccauuccuuucc

SEQ ID NO: 1023596 - RNA, 21 nt, Human
uuauuuagugauaaauccuga

SEQ ID NO: 1023597 - RNA, 25 nt, Human
uuccuaccauacaccaaauguacag

SEQ ID NO: 1023598 - RNA, 22 nt, Human
uuccuuuccagucaacccagua

SEQ ID NO: 1023599 - RNA, 19 nt, Human
uugauuaguaauaaauaaa

SEQ ID NO: 1023600 - RNA, 18 nt, Human
uugcuaaguacaaaucua

SEQ ID NO: 1023601 - RNA, 21 nt, Human
uuggaaaauaaauuaauaaac

SEQ ID NO: 1023602 - RNA, 21 nt, Human
uuuauaauagacagcacauau

SEQ ID NO: 1023603 - RNA, 21 nt, Human
uuuccuggauguguuccaaaa

SEQ ID NO: 1023604 - RNA, 21 nt, Human
uuucuugcagaaaauuucuac

SEQ ID NO: 1023605 - RNA, 22 nt, Human
uuugugagugcggauuccccac

SEQ ID NO: 1023606 - RNA, 22 nt, Human
aaagacaaugagccccaaauaa

SEQ ID NO: 1023607 - RNA, 18 nt, Human
aauaguauggaggcucuu

SEQ ID NO: 1023608 - RNA, 19 nt, Human
aauuuuguucaucucccuu

SEQ ID NO: 1023609 - RNA, 23 nt, Human
agaaaaggggacacugaaaguau

SEQ ID NO: 1023610 - RNA, 18 nt, Human
agaagcacccauagauua

SEQ ID NO: 1023611 - RNA, 19 nt, Human
aggaacccaaccagacaaa

SEQ ID NO: 1023612 - RNA, 21 nt, Human
aggaacccaaccagacaaaga

SEQ ID NO: 1023613 - RNA, 24 nt, Human
caagugaagaugggugcuuccuuc

SEQ ID NO: 1023614 - RNA, 18 nt, Human
cacaauaaauagaaugca

SEQ ID NO: 1023615 - RNA, 24 nt, Human
cacuccucccgacgccgucgggga

SEQ ID NO: 1023616 - RNA, 18 nt, Human
cacuugugguacaucagu

SEQ ID NO: 1023617 - RNA, 25 nt, Human
cagaaaauucuauaauaaaauuuac

SEQ ID NO: 1023618 - RNA, 19 nt, Human
cagcaccaagugaagaugg

SEQ ID NO: 1023619 - RNA, 22 nt, Human
cauuacagaguuuuaucaagag

SEQ ID NO: 1023620 - RNA, 18 nt, Human
cauucacuucuccuccua

SEQ ID NO: 1023621 - RNA, 21 nt, Human
cauugacuuauuuccaaauua

SEQ ID NO: 1023622 - RNA, 22 nt, Human
ccagaaaaggggacacugaaag

SEQ ID NO: 1023623 - RNA, 27 nt, Human
ccauucacucauuaggauaccuacaua

SEQ ID NO: 1023624 - RNA, 23 nt, Human
cgacgccgucggggagaaaccgg

SEQ ID NO: 1023625 - RNA, 18 nt, Human
cuaguaccauucacucau

SEQ ID NO: 1023626 - RNA, 20 nt, Human
cugugguacaucucuccgac

SEQ ID NO: 1023627 - RNA, 24 nt, Human
gagucucuucccuuauuccaagga

SEQ ID NO: 1023628 - RNA, 23 nt, Human
gauuauuuuuuuccaacacggga

SEQ ID NO: 1023629 - RNA, 24 nt, Human
gcuaauuuuuaaaaccaagguuag

SEQ ID NO: 1023630 - RNA, 20 nt, Human
gugugcuuucauaagauaag

SEQ ID NO: 1023631 - RNA, 18 nt, Human
uaaacagggaaucuggcu

SEQ ID NO: 1023632 - RNA, 18 nt, Human
uaagccaguuucuggaga

SEQ ID NO: 1023633 - RNA, 23 nt, Human
uacaaagacaaugagccccaaau

SEQ ID NO: 1023634 - RNA, 24 nt, Human
uacauuuaucagcauacuaacuaa

SEQ ID NO: 1023635 - RNA, 21 nt, Human
uacuaugagucucuucccuua

SEQ ID NO: 1023636 - RNA, 21 nt, Human
uaucaagaaucucuggaaaau

SEQ ID NO: 1023637 - RNA, 21 nt, Human
uaucagaaaauucuauaauaa

SEQ ID NO: 1023638 - RNA, 21 nt, Human
uaugccagaaaaggggacacu

SEQ ID NO: 1023639 - RNA, 19 nt, Human
uauggaggcucuugugugc

SEQ ID NO: 1023640 - RNA, 20 nt, Human
uauuguaguaacauuacaga

SEQ ID NO: 1023641 - RNA, 18 nt, Human
uccucuaagccaguuucu

SEQ ID NO: 1023642 - RNA, 20 nt, Human
ucggggagaaaccggggaac

SEQ ID NO: 1023643 - RNA, 21 nt, Human
ugaaaagguugucuugugaug

SEQ ID NO: 1023644 - RNA, 24 nt, Human
ugacaacacuugugguacaucagu

SEQ ID NO: 1023645 - RNA, 25 nt, Human
ugacucaagauacacacaacucaau

SEQ ID NO: 1023646 - RNA, 21 nt, Human
ugcagguaaaacauaguuacu

SEQ ID NO: 1023647 - RNA, 18 nt, Human
uggauuuucugagaauga

SEQ ID NO: 1023648 - RNA, 25 nt, Human
ugucuagaaacucaucuuacuaaga

SEQ ID NO: 1023649 - RNA, 22 nt, Human
uuacaaagacaaugagccccaa

SEQ ID NO: 1023650 - RNA, 23 nt, Human
uuaggauaccuacauaacugcaa

SEQ ID NO: 1023651 - RNA, 20 nt, Human
uucacaauaaauagaaugca

SEQ ID NO: 1023652 - RNA, 23 nt, Human
uuuaauaauguacgauucaguaa

SEQ ID NO: 1023653 - RNA, 20 nt, Human
uuucaugacagcgugucuag

SEQ ID NO: 1023654 - RNA, 19 nt, Human
uuuguccauauguacaaga

SEQ ID NO: 1023655 - RNA, 19 nt, Human
aagcccaggagcggccagg

SEQ ID NO: 1023656 - RNA, 22 nt, Human
agcccaggagcggccaggaaau

SEQ ID NO: 1023657 - RNA, 25 nt, Human
aguuauaaguuucuuguaggugcuu

SEQ ID NO: 1023658 - RNA, 24 nt, Human
aucucuucuuuccgcgaagcccag

SEQ ID NO: 1023659 - RNA, 19 nt, Human
augcguggucccauggcca

SEQ ID NO: 1023660 - RNA, 25 nt, Human
caggugauuuauugacgauguguuc

SEQ ID NO: 1023661 - RNA, 18 nt, Human
ccucaugauaugccuugc

SEQ ID NO: 1023662 - RNA, 22 nt, Human
ccugccucugaagaauuaaugu

SEQ ID NO: 1023663 - RNA, 19 nt, Human
cucaugauaugccuugccu

SEQ ID NO: 1023664 - RNA, 23 nt, Human
ggauccuuucacagcuuucaccu

SEQ ID NO: 1023665 - RNA, 19 nt, Human
ggguuccuguuaagucucc

SEQ ID NO: 1023666 - RNA, 18 nt, Human
guggauccuuucacagcu

SEQ ID NO: 1023667 - RNA, 21 nt, Human
uauuuucuuauuacuucauag

SEQ ID NO: 1023668 - RNA, 23 nt, Human
ucaccaugccauuuuuacaaccu

SEQ ID NO: 1023669 - RNA, 25 nt, Human
ucaguaauagugacucuaucucucc

SEQ ID NO: 1023670 - RNA, 20 nt, Human
ucccauggccaugaauggcc

SEQ ID NO: 1023671 - RNA, 23 nt, Human
ucuccaauguccuuggacuuagc

SEQ ID NO: 1023672 - RNA, 21 nt, Human
ucuuggcugaaacagcuuagc

SEQ ID NO: 1023673 - RNA, 22 nt, Human
ugaaagucuuagcccugccucu

SEQ ID NO: 1023674 - RNA, 24 nt, Human
ugacucagucaccauaucaguaag

SEQ ID NO: 1023675 - RNA, 21 nt, Human
ugacuggguuccuguuaaguc

SEQ ID NO: 1023676 - RNA, 22 nt, Human
ugagauggagauuugggugcag

SEQ ID NO: 1023677 - RNA, 18 nt, Human
ugauaugccuugccagaa

SEQ ID NO: 1023678 - RNA, 23 nt, Human
uggauccuuucacagcuuucaac

SEQ ID NO: 1023679 - RNA, 23 nt, Human
uggcaguauguuguugacucagu

SEQ ID NO: 1023680 - RNA, 21 nt, Human
uuggagaggcccacugugaua

SEQ ID NO: 1023681 - RNA, 24 nt, Human
uuuuuuuuuuuuuucuguuacauu

SEQ ID NO: 1023682 - RNA, 22 nt, Human
uuuuuuuuuuuuuuuuucuguu

SEQ ID NO: 1023683 - RNA, 26 nt, Human
uuuuuuuuuuuuuuuuuuuucugggg

SEQ ID NO: 1023684 - RNA, 18 nt, Human
acagacaccuaacaugac

SEQ ID NO: 1023685 - RNA, 23 nt, Human
acagacaccuaacaugacgugac

SEQ ID NO: 1023686 - RNA, 21 nt, Human
acgugacaccgcccguccccc

SEQ ID NO: 1023687 - RNA, 21 nt, Human
auacaccaccucauuuagagu

SEQ ID NO: 1023688 - RNA, 22 nt, Human
augaauucuccaaaauacaaaa

SEQ ID NO: 1023689 - RNA, 18 nt, Human
auucaugggguuuucccu

SEQ ID NO: 1023690 - RNA, 22 nt, Human
cauacaccaccucauuuagagu

SEQ ID NO: 1023691 - RNA, 20 nt, Human
ccccaaaacuguggagugag

SEQ ID NO: 1023692 - RNA, 24 nt, Human
ccccgugucccgcgcacgcgccca

SEQ ID NO: 1023693 - RNA, 21 nt, Human
cccgcgcacgcgcccaaaccg

SEQ ID NO: 1023694 - RNA, 19 nt, Human
cccgcgcgcccgcggccuc

SEQ ID NO: 1023695 - RNA, 20 nt, Human
cccgcgcgcccgcggccucg

SEQ ID NO: 1023696 - RNA, 19 nt, Human
ccgcccgucccccgugucc

SEQ ID NO: 1023697 - RNA, 19 nt, Human
ccgcccgucccccgugucc

SEQ ID NO: 1023698 - RNA, 23 nt, Human
ccucgcgaucacgugacaccgcc

SEQ ID NO: 1023699 - RNA, 22 nt, Human
cgcccgucccccgugucccgcg

SEQ ID NO: 1023700 - RNA, 18 nt, Human
cgggacgagucggggacg

SEQ ID NO: 1023701 - RNA, 19 nt, Human
cuucuacacugagaaugaa

SEQ ID NO: 1023702 - RNA, 18 nt, Human
ggaacucuuucuuaucuc

SEQ ID NO: 1023703 - RNA, 20 nt, Human
gggccgggacgagucgggga

SEQ ID NO: 1023704 - RNA, 20 nt, Human
gguauuuuugguacccaugu

SEQ ID NO: 1023705 - RNA, 21 nt, Human
uaauugcauuuccugaagucc

SEQ ID NO: 1023706 - RNA, 19 nt, Human
uacugugcgucucuucugc

SEQ ID NO: 1023707 - RNA, 20 nt, Human
uagaauuggguauuuuuggu

SEQ ID NO: 1023708 - RNA, 22 nt, Human
uagaguucucauccucauggag

SEQ ID NO: 1023709 - RNA, 25 nt, Human
uauuuuuaaaacuucacacuucaaa

SEQ ID NO: 1023710 - RNA, 25 nt, Human
uauuuuuaaaacuucacacuucaaa

SEQ ID NO: 1023711 - RNA, 19 nt, Human
ucacaggauucuucuuugc

SEQ ID NO: 1023712 - RNA, 21 nt, Human
uccaaaauacaaaauagucug

SEQ ID NO: 1023713 - RNA, 21 nt, Human
uccaagaugaucugucaaaga

SEQ ID NO: 1023714 - RNA, 22 nt, Human
uccauaauaugaauucuccaaa

SEQ ID NO: 1023715 - RNA, 25 nt, Human
uccauacaccaccucauuuagaguu

SEQ ID NO: 1023716 - RNA, 22 nt, Human
uccccaguggaauauuucuaau

SEQ ID NO: 1023717 - RNA, 19 nt, Human
ucccgcgcacgcgcccaaa

SEQ ID NO: 1023718 - RNA, 22 nt, Human
ucccuugacaguacuauucuga

SEQ ID NO: 1023719 - RNA, 21 nt, Human
ucgggcggcuccgaacgggcc

SEQ ID NO: 1023720 - RNA, 18 nt, Human
ucggggacugcaccccga

SEQ ID NO: 1023721 - RNA, 22 nt, Human
ucgguucuacugugcgucucuu

SEQ ID NO: 1023722 - RNA, 24 nt, Human
ucuacaaacguuaucauaauugca

SEQ ID NO: 1023723 - RNA, 20 nt, Human
ucuaugguuuuaaaaguuuu

SEQ ID NO: 1023724 - RNA, 19 nt, Human
ucuccaaaauacaaaauag

SEQ ID NO: 1023725 - RNA, 22 nt, Human
ugaauucuccaaaauacaaaau

SEQ ID NO: 1023726 - RNA, 18 nt, Human
ugagauccacugcaguca

SEQ ID NO: 1023727 - RNA, 22 nt, Human
uggaaggcuuuuggacauucac

SEQ ID NO: 1023728 - RNA, 18 nt, Human
uggacauucacaggauuc

SEQ ID NO: 1023729 - RNA, 25 nt, Human
uggagugaggucucagcuaggucuu

SEQ ID NO: 1023730 - RNA, 19 nt, Human
uguuagguucuccauaaua

SEQ ID NO: 1023731 - RNA, 18 nt, Human
uuccaggaacucuuucuu

SEQ ID NO: 1023732 - RNA, 21 nt, Human
uucccagugucuuuaaauugu

SEQ ID NO: 1023733 - RNA, 21 nt, Human
uugacaguacuauucugaggg

SEQ ID NO: 1023734 - RNA, 24 nt, Human
uuguugcacugucccauauuuagu

SEQ ID NO: 1023735 - RNA, 18 nt, Human
uuuagaguucucauccuc

SEQ ID NO: 1023736 - RNA, 23 nt, Human
uuucugcugcuguacgagaugau

SEQ ID NO: 1023737 - RNA, 24 nt, Human
uuuuugagauccacugcagucaua

SEQ ID NO: 1023738 - RNA, 24 nt, Human
aaaaggauaaauccuucauaaaaa

SEQ ID NO: 1023739 - RNA, 25 nt, Human
aaacagcacacugaaaaaaaaggau

SEQ ID NO: 1023740 - RNA, 19 nt, Human
acaauaccaaggaagacca

SEQ ID NO: 1023741 - RNA, 23 nt, Human
acuuuaaaaucccucaaaaacug

SEQ ID NO: 1023742 - RNA, 18 nt, Human
agacaggugaucaggucu

SEQ ID NO: 1023743 - RNA, 19 nt, Human
agagaauucuauggccaca

SEQ ID NO: 1023744 - RNA, 25 nt, Human
agcaauaaacagcacacugaaaaaa

SEQ ID NO: 1023745 - RNA, 18 nt, Human
agugacaacaauaccaag

SEQ ID NO: 1023746 - RNA, 22 nt, Human
auagcaguuuucuggcagggca

SEQ ID NO: 1023747 - RNA, 20 nt, Human
caacaauaccaaggaagacc

SEQ ID NO: 1023748 - RNA, 21 nt, Human
caacaauaccaaggaagacca

SEQ ID NO: 1023749 - RNA, 19 nt, Human
cagcacacugaaaaaaaag

SEQ ID NO: 1023750 - RNA, 21 nt, Human
cuggcagggcagccacuucuc

SEQ ID NO: 1023751 - RNA, 20 nt, Human
gaauucuauggccacaucuc

SEQ ID NO: 1023752 - RNA, 25 nt, Human
uaaacagcacacugaaaaaaaagga

SEQ ID NO: 1023753 - RNA, 28 nt, Human
uaaugaacuuuuuuuuuccuggaaacuu

SEQ ID NO: 1023754 - RNA, 18 nt, Human
uaccaaggaagaccaggu

SEQ ID NO: 1023755 - RNA, 19 nt, Human
uaccaaggaagaccaggug

SEQ ID NO: 1023756 - RNA, 19 nt, Human
ucagcaauaaacagcacac

SEQ ID NO: 1023757 - RNA, 22 nt, Human
ucccuauauaaauucugcugug

SEQ ID NO: 1023758 - RNA, 19 nt, Human
uccuccagagagaauucua

SEQ ID NO: 1023759 - RNA, 19 nt, Human
ucucagcaauaaacagcac

SEQ ID NO: 1023760 - RNA, 22 nt, Human
ucucaugucucuucacagugaa

SEQ ID NO: 1023761 - RNA, 18 nt, Human
ucugcugugcagugucca

SEQ ID NO: 1023762 - RNA, 20 nt, Human
ugacaacaauaccaaggaag

SEQ ID NO: 1023763 - RNA, 22 nt, Human
uucacagugaaggguuuuuuuc

SEQ ID NO: 1023764 - RNA, 21 nt, Human
uuccuugcuccagacagguga

SEQ ID NO: 1023765 - RNA, 21 nt, Human
aaacauagaacccacaacaac

SEQ ID NO: 1023766 - RNA, 23 nt, Human
aaagguaugucaacauuugagga

SEQ ID NO: 1023767 - RNA, 18 nt, Human
aacucagcuccucuuagg

SEQ ID NO: 1023768 - RNA, 23 nt, Human
aaguccugcccagaaaacucuaa

SEQ ID NO: 1023769 - RNA, 19 nt, Human
acaaaauaaacaagccagg

SEQ ID NO: 1023770 - RNA, 20 nt, Human
accuguaguuuaaaaguuuu

SEQ ID NO: 1023771 - RNA, 21 nt, Human
agaaacaauauucccgccccu

SEQ ID NO: 1023772 - RNA, 22 nt, Human
agcaaaugacacugccuccaca

SEQ ID NO: 1023773 - RNA, 23 nt, Human
auagaacccacaacaacucagcu

SEQ ID NO: 1023774 - RNA, 18 nt, Human
augacacugccuccacaa

SEQ ID NO: 1023775 - RNA, 25 nt, Human
auuauaaauuccauaggggaaguaa

SEQ ID NO: 1023776 - RNA, 30 nt, Human
caacaguaauaauauuaaaaaaaauaaaaa

SEQ ID NO: 1023777 - RNA, 19 nt, Human
caguggcaaaucagaaucu

SEQ ID NO: 1023778 - RNA, 22 nt, Human
cauucuucuuucaagaauaaag

SEQ ID NO: 1023779 - RNA, 20 nt, Human
ccacaaaauaagaauuaucc

SEQ ID NO: 1023780 - RNA, 23 nt, Human
cccacaaaauaaacaagccaggu

SEQ ID NO: 1023781 - RNA, 21 nt, Human
ccccuucucucuuucccuccc

SEQ ID NO: 1023782 - RNA, 21 nt, Human
ccccuucucucuuucccuccc

SEQ ID NO: 1023783 - RNA, 23 nt, Human
ccgccccuucucucuucuguuuc

SEQ ID NO: 1023784 - RNA, 24 nt, Human
ccuguaguuuaaaaguuuugcuau

SEQ ID NO: 1023785 - RNA, 21 nt, Human
ccuugguagaaauggacugcu

SEQ ID NO: 1023786 - RNA, 23 nt, Human
gcagagcaaaugacacugccucc

SEQ ID NO: 1023787 - RNA, 25 nt, Human
gggaaguaaacauagaacccacaac

SEQ ID NO: 1023788 - RNA, 19 nt, Human
guccccuuuggaaugaaaa

SEQ ID NO: 1023789 - RNA, 27 nt, Human
uaaaaugccagucaucaaaacuauggg

SEQ ID NO: 1023790 - RNA, 21 nt, Human
uaaaccaccaaaguccugccc

SEQ ID NO: 1023791 - RNA, 22 nt, Human
uaaagaaacaauauucccgccc

SEQ ID NO: 1023792 - RNA, 23 nt, Human
uaaccccucaaagaggaggugac

SEQ ID NO: 1023793 - RNA, 23 nt, Human
ucaaaacuauggaaaaacagugc

SEQ ID NO: 1023794 - RNA, 20 nt, Human
ucagcuucuucuaaccccuc

SEQ ID NO: 1023795 - RNA, 21 nt, Human
uccugcccagaaaacucuaaa

SEQ ID NO: 1023796 - RNA, 22 nt, Human
ucgggagaucucagcuucuucu

SEQ ID NO: 1023797 - RNA, 19 nt, Human
ugaagaacaaaaaauuggu

SEQ ID NO: 1023798 - RNA, 18 nt, Human
ugcccagaaaacucuaaa

SEQ ID NO: 1023799 - RNA, 24 nt, Human
ugcuauaugguacaguguaaaaca

SEQ ID NO: 1023800 - RNA, 21 nt, Human
ugguacaguguaaaacauacu

SEQ ID NO: 1023801 - RNA, 22 nt, Human
uuaaaaguuuugcuauauggua

SEQ ID NO: 1023802 - RNA, 19 nt, Human
uucccccuucucucuuucc

SEQ ID NO: 1023803 - RNA, 24 nt, Human
uucucucuuucccucccuugcccc

SEQ ID NO: 1023804 - RNA, 19 nt, Human
uugcccccuccaagccaag

SEQ ID NO: 1023805 - RNA, 19 nt, Human
aggggccggugagaggagu

SEQ ID NO: 1023806 - RNA, 18 nt, Human
aguugcccaggaaaaaaa

SEQ ID NO: 1023807 - RNA, 18 nt, Human
aguugcccaggaaaaaga

SEQ ID NO: 1023808 - RNA, 24 nt, Human
ccacaugaugaucugauucucuuc

SEQ ID NO: 1023809 - RNA, 24 nt, Human
ccacaugaugaucugauucucuuc

SEQ ID NO: 1023810 - RNA, 23 nt, Human
ccaggaacaaugguaauccccac

SEQ ID NO: 1023811 - RNA, 23 nt, Human
ccaggaacaaugguaauccccac

SEQ ID NO: 1023812 - RNA, 23 nt, Human
ccuccugccucugcgaccaagga

SEQ ID NO: 1023813 - RNA, 23 nt, Human
cggucgggugccuccugccucug

SEQ ID NO: 1023814 - RNA, 21 nt, Human
cuagagcgccagcucugcccc

SEQ ID NO: 1023815 - RNA, 24 nt, Human
cugaggagggaguuggaaguuuau

SEQ ID NO: 1023816 - RNA, 23 nt, Human
gaaaggagggagggacuguagag

SEQ ID NO: 1023817 - RNA, 23 nt, Human
gaaaggagggagggacuguagag

SEQ ID NO: 1023818 - RNA, 20 nt, Human
gacagcgucggguacuaaag

SEQ ID NO: 1023819 - RNA, 18 nt, Human
gcggucgggugccuccug

SEQ ID NO: 1023820 - RNA, 20 nt, Human
gcggucgggugccuccugcc

SEQ ID NO: 1023821 - RNA, 22 nt, Human
gggcuagagcgccagcucugcc

SEQ ID NO: 1023822 - RNA, 23 nt, Human
uaacuuuaauaaggaaauucaac

SEQ ID NO: 1023823 - RNA, 23 nt, Human
uaacuuuaauaaggaaauucaac

SEQ ID NO: 1023824 - RNA, 18 nt, Human
ucccagacagcgucgggu

SEQ ID NO: 1023825 - RNA, 22 nt, Human
ucugcgaccaaggagccgaaac

SEQ ID NO: 1023826 - RNA, 20 nt, Human
uggacaaggcaucuaaaaac

SEQ ID NO: 1023827 - RNA, 20 nt, Human
uggacaaggcaucuaaaaac

SEQ ID NO: 1023828 - RNA, 24 nt, Human
accagaaaaauuugguccauaaaa

SEQ ID NO: 1023829 - RNA, 23 nt, Human
cccgucuacuuagugcucgggag

SEQ ID NO: 1023830 - RNA, 27 nt, Human
ucgggaguuguagugauaauuucucuc

SEQ ID NO: 1023831 - RNA, 21 nt, Human
uuggaucguacaguaccagaa

SEQ ID NO: 1023832 - RNA, 20 nt, Human
uuguagugauaauuucucuc

SEQ ID NO: 1023833 - RNA, 19 nt, Human
aaccacugaauaacugaag

SEQ ID NO: 1023834 - RNA, 18 nt, Human
ccgccgucgccugcccac

SEQ ID NO: 1023835 - RNA, 20 nt, Human
uauguuaauauuucaaauau

SEQ ID NO: 1023836 - RNA, 21 nt, Human
aagacacaacaggggcggccg

SEQ ID NO: 1023837 - RNA, 22 nt, Human
aaggaggaagagggcuggagag

SEQ ID NO: 1023838 - RNA, 18 nt, Human
accuggccgaggccagcu

SEQ ID NO: 1023839 - RNA, 24 nt, Human
agacaagaugcaaagagcggcccg

SEQ ID NO: 1023840 - RNA, 18 nt, Human
agaccuacgccccagugg

SEQ ID NO: 1023841 - RNA, 20 nt, Human
agaggaaggaggaagagggc

SEQ ID NO: 1023842 - RNA, 20 nt, Human
agaggaaggaggaagagggc

SEQ ID NO: 1023843 - RNA, 21 nt, Human
aggaggaagagggcuggagag

SEQ ID NO: 1023844 - RNA, 24 nt, Human
caagacaagaugcaaagagcggcc

SEQ ID NO: 1023845 - RNA, 18 nt, Human
caaggcagcuccacggcc

SEQ ID NO: 1023846 - RNA, 21 nt, Human
caccucaaggcagcuccacgg

SEQ ID NO: 1023847 - RNA, 23 nt, Human
cacugcaccucaaggcagcucca

SEQ ID NO: 1023848 - RNA, 18 nt, Human
cagcagccgcccgccucg

SEQ ID NO: 1023849 - RNA, 24 nt, Human
caggggaagucaggucccucagga

SEQ ID NO: 1023850 - RNA, 23 nt, Human
cauccaggcccucggaccuggcc

SEQ ID NO: 1023851 - RNA, 20 nt, Human
ccaguggguaugccucuccu

SEQ ID NO: 1023852 - RNA, 21 nt, Human
cccggcccucaccucagcagc

SEQ ID NO: 1023853 - RNA, 19 nt, Human
cccucaggaaccccuccuc

SEQ ID NO: 1023854 - RNA, 18 nt, Human
cccuccucccccagagga

SEQ ID NO: 1023855 - RNA, 20 nt, Human
cccuccucccccagaggaag

SEQ ID NO: 1023856 - RNA, 23 nt, Human
cccucggaccuggccgaggccag

SEQ ID NO: 1023857 - RNA, 19 nt, Human
ccuaaagggcagugaggag

SEQ ID NO: 1023858 - RNA, 21 nt, Human
ccucaggaaccccuccucccc

SEQ ID NO: 1023859 - RNA, 21 nt, Human
cgaggccagcugugggcaaga

SEQ ID NO: 1023860 - RNA, 21 nt, Human
cucaggaaccccuccuccccc

SEQ ID NO: 1023861 - RNA, 23 nt, Human
cucaggaaccccuccucccccag

SEQ ID NO: 1023862 - RNA, 24 nt, Human
cuggaagcuccacugugagucuga

SEQ ID NO: 1023863 - RNA, 21 nt, Human
cuggauccccaacacugcacc

SEQ ID NO: 1023864 - RNA, 24 nt, Human
cuggcccugggagccuaaagggca

SEQ ID NO: 1023865 - RNA, 18 nt, Human
gaaaaaaagacacaacag

SEQ ID NO: 1023866 - RNA, 22 nt, Human
gaggaaggaggaagagggcugg

SEQ ID NO: 1023867 - RNA, 20 nt, Human
gauccccaacacugcaccuc

SEQ ID NO: 1023868 - RNA, 19 nt, Human
ggagaguccugaggucgcg

SEQ ID NO: 1023869 - RNA, 19 nt, Human
ggcagcccugggggcuggu

SEQ ID NO: 1023870 - RNA, 19 nt, Human
gggcaagacaagaugcaaa

SEQ ID NO: 1023871 - RNA, 22 nt, Human
gggcggcagcccugggggcugg

SEQ ID NO: 1023872 - RNA, 20 nt, Human
gucacggaggggacacggag

SEQ ID NO: 1023873 - RNA, 19 nt, Human
uagcaagaggccuggagca

SEQ ID NO: 1023874 - RNA, 21 nt, Human
ucaggaaccccuccuccccca

SEQ ID NO: 1023875 - RNA, 23 nt, Human
ucauuggcuuuauucuggguccu

SEQ ID NO: 1023876 - RNA, 24 nt, Human
ucccucaggaaccccuccuccccc

SEQ ID NO: 1023877 - RNA, 19 nt, Human
ugcucaguuccucagcaac

SEQ ID NO: 1023878 - RNA, 18 nt, Human
uggauccccaacacugca

SEQ ID NO: 1023879 - RNA, 23 nt, Human
uggcccggcccucaccucagcag

SEQ ID NO: 1023880 - RNA, 19 nt, Human
uggcccugggagccuaaag

SEQ ID NO: 1023881 - RNA, 20 nt, Human
ugggcugcccggaagaguag

SEQ ID NO: 1023882 - RNA, 21 nt, Human
ugggggcuggugcagaaaaua

SEQ ID NO: 1023883 - RNA, 22 nt, Human
uggguaugccucuccucuggcc

SEQ ID NO: 1023884 - RNA, 19 nt, Human
uucuggguccuggaagcuc

SEQ ID NO: 1023885 - RNA, 25 nt, Human
uuuuuuuuuuuuuuuuuuuuucagg

SEQ ID NO: 1023886 - RNA, 25 nt, Human
aaccacaagagugaaauaauacacc

SEQ ID NO: 1023887 - RNA, 21 nt, Human
aagaaagaaaaaaaaaaagga

SEQ ID NO: 1023888 - RNA, 22 nt, Human
aagaaagaaaaaaaaaaaggac

SEQ ID NO: 1023889 - RNA, 20 nt, Human
aagcggcggcgguagggacg

SEQ ID NO: 1023890 - RNA, 22 nt, Human
aagcggcggcgguagggacguu

SEQ ID NO: 1023891 - RNA, 24 nt, Human
aaucgcuugaacccgggaggcaga

SEQ ID NO: 1023892 - RNA, 24 nt, Human
accugaggucaggaguucaagacc

SEQ ID NO: 1023893 - RNA, 19 nt, Human
acugcacugcagccugggc

SEQ ID NO: 1023894 - RNA, 23 nt, Human
acugcacugcagccugggcgaug

SEQ ID NO: 1023895 - RNA, 24 nt, Human
acugcacugcagccugggcgaugg

SEQ ID NO: 1023896 - RNA, 22 nt, Human
agaaucgcuugaacccgggagg

SEQ ID NO: 1023897 - RNA, 21 nt, Human
agacaagaucgugucacugca

SEQ ID NO: 1023898 - RNA, 20 nt, Human
agagguugcagugagacaag

SEQ ID NO: 1023899 - RNA, 24 nt, Human
agagguugcagugagacaagaucg

SEQ ID NO: 1023900 - RNA, 23 nt, Human
agaucaccugaggucaggaguuc

SEQ ID NO: 1023901 - RNA, 23 nt, Human
agcacuuugugaggccgaggcag

SEQ ID NO: 1023902 - RNA, 24 nt, Human
agccugggcgauggagcaagacuc

SEQ ID NO: 1023903 - RNA, 20 nt, Human
agcugggugugguggugggu

SEQ ID NO: 1023904 - RNA, 22 nt, Human
agcugggugugguggugggugc

SEQ ID NO: 1023905 - RNA, 23 nt, Human
agcugggugugguggugggugcc

SEQ ID NO: 1023906 - RNA, 23 nt, Human
aggaguucaagaccaggcuggcc

SEQ ID NO: 1023907 - RNA, 19 nt, Human
aggcagagguugcagugag

SEQ ID NO: 1023908 - RNA, 24 nt, Human
aggcagagguugcagugagacaag

SEQ ID NO: 1023909 - RNA, 26 nt, Human
aggcagaucaccugaggucaggaguu

SEQ ID NO: 1023910 - RNA, 24 nt, Human
aggcaggagaaucgcuugaacccg

SEQ ID NO: 1023911 - RNA, 22 nt, Human
aggcaggcagaucaccugaggu

SEQ ID NO: 1023912 - RNA, 26 nt, Human
aggcaggcagaucaccugaggucagg

SEQ ID NO: 1023913 - RNA, 19 nt, Human
aggccaaaaaaccacaaga

SEQ ID NO: 1023914 - RNA, 20 nt, Human
aggcugaggcaggagaaucg

SEQ ID NO: 1023915 - RNA, 24 nt, Human
aggcugaggcaggagaaucgcuug

SEQ ID NO: 1023916 - RNA, 23 nt, Human
aucaccugaggucaggaguucaa

SEQ ID NO: 1023917 - RNA, 24 nt, Human
aucgugucacugcacugcagccug

SEQ ID NO: 1023918 - RNA, 27 nt, Human
augcaaaaaauggacuaaaagggaccc

SEQ ID NO: 1023919 - RNA, 19 nt, Human
augccuguaauccuagcac

SEQ ID NO: 1023920 - RNA, 26 nt, Human
caaaaaaccacaagagugaaauaaua

SEQ ID NO: 1023921 - RNA, 24 nt, Human
caagaccaggcuggccaauguggu

SEQ ID NO: 1023922 - RNA, 23 nt, Human
caagacucuuucucaaaaaaaga

SEQ ID NO: 1023923 - RNA, 20 nt, Human
caagaucgugucacugcacu

SEQ ID NO: 1023924 - RNA, 26 nt, Human
cacacacgcgucgggacuaggccgcg

SEQ ID NO: 1023925 - RNA, 26 nt, Human
cacacacgcgucgggacuaggccgcg

SEQ ID NO: 1023926 - RNA, 22 nt, Human
cacacgcgucgggacuaggccg

SEQ ID NO: 1023927 - RNA, 22 nt, Human
cacacgcgucgggacuaggccg

SEQ ID NO: 1023928 - RNA, 24 nt, Human
cacacgcgucgggacuaggccgcg

SEQ ID NO: 1023929 - RNA, 24 nt, Human
cacacgcgucgggacuaggccgcg

SEQ ID NO: 1023930 - RNA, 23 nt, Human
caccugaggucaggaguucaaga

SEQ ID NO: 1023931 - RNA, 19 nt, Human
cacugcacugcagccuggg

SEQ ID NO: 1023932 - RNA, 19 nt, Human
cacugcacugcagccuggg

SEQ ID NO: 1023933 - RNA, 20 nt, Human
cacugcacugcagccugggc

SEQ ID NO: 1023934 - RNA, 23 nt, Human
cacugcacugcagccugggcgau

SEQ ID NO: 1023935 - RNA, 24 nt, Human
cacugcacugcagccugggcgaug

SEQ ID NO: 1023936 - RNA, 27 nt, Human
cacugcacugcagccugggcgauggag

SEQ ID NO: 1023937 - RNA, 23 nt, Human
cacugcagccugggcgauggagc

SEQ ID NO: 1023938 - RNA, 27 nt, Human
cagaucaccugaggucaggaguucaag

SEQ ID NO: 1023939 - RNA, 24 nt, Human
cagcuacucaggaggcugaggcag

SEQ ID NO: 1023940 - RNA, 24 nt, Human
caggcagaucaccugaggucagga

SEQ ID NO: 1023941 - RNA, 24 nt, Human
caugccuguaauccuagcacuuug

SEQ ID NO: 1023942 - RNA, 18 nt, Human
ccacugccgccgucgccg

SEQ ID NO: 1023943 - RNA, 18 nt, Human
ccacugccgccgucgccg

SEQ ID NO: 1023944 - RNA, 22 nt, Human
ccauuaucuauauucuugucug

SEQ ID NO: 1023945 - RNA, 18 nt, Human
cccccauggcagagaccc

SEQ ID NO: 1023946 - RNA, 18 nt, Human
cccccauggcagagaccc

SEQ ID NO: 1023947 - RNA, 23 nt, Human
ccccgucucuacuaaaaauacaa

SEQ ID NO: 1023948 - RNA, 18 nt, Human
ccgccgccgcugccccug

SEQ ID NO: 1023949 - RNA, 19 nt, Human
ccgccgcugccccugucgc

SEQ ID NO: 1023950 - RNA, 19 nt, Human
ccgccgcugccccugucgc

SEQ ID NO: 1023951 - RNA, 19 nt, Human
ccgccgcugccccugucgc

SEQ ID NO: 1023952 - RNA, 19 nt, Human
ccgccgcugccccugucgc

SEQ ID NO: 1023953 - RNA, 19 nt, Human
ccggcggcgccagguuccc

SEQ ID NO: 1023954 - RNA, 22 nt, Human
ccggcggcgccagguucccggg

SEQ ID NO: 1023955 - RNA, 22 nt, Human
ccugggcgauggagcaagacuc

SEQ ID NO: 1023956 - RNA, 19 nt, Human
ccuguaauuccagcuacuc

SEQ ID NO: 1023957 - RNA, 21 nt, Human
ccuguaauuccagcuacucag

SEQ ID NO: 1023958 - RNA, 19 nt, Human
cggcgguagggacguugcc

SEQ ID NO: 1023959 - RNA, 22 nt, Human
cgggugcaggcgcgucacuccc

SEQ ID NO: 1023960 - RNA, 22 nt, Human
cgggugcaggcgcgucacuccc

SEQ ID NO: 1023961 - RNA, 19 nt, Human
cucaaaaaaagaaagaaaa

SEQ ID NO: 1023962 - RNA, 19 nt, Human
cucaaaaaaagaaagaaaa

SEQ ID NO: 1023963 - RNA, 22 nt, Human
cucaaaaaaagaaagaaaaaaa

SEQ ID NO: 1023964 - RNA, 24 nt, Human
cucaugccuguaauccuagcacuu

SEQ ID NO: 1023965 - RNA, 26 nt, Human
cuggccaauguggugaaugaagcccc

SEQ ID NO: 1023966 - RNA, 19 nt, Human
gaagccccgucucuacuaa

SEQ ID NO: 1023967 - RNA, 18 nt, Human
gagaccccgucgggcucc

SEQ ID NO: 1023968 - RNA, 21 nt, Human
gagcaagacucuuucucaaaa

SEQ ID NO: 1023969 - RNA, 19 nt, Human
gaggcaggcagaucaccug

SEQ ID NO: 1023970 - RNA, 25 nt, Human
gaggcaggcagaucaccugagguca

SEQ ID NO: 1023971 - RNA, 21 nt, Human
gaggccgaggcaggcagauca

SEQ ID NO: 1023972 - RNA, 23 nt, Human
gaucaccugaggucaggaguuca

SEQ ID NO: 1023973 - RNA, 24 nt, Human
gaucaccugaggucaggaguucaa

SEQ ID NO: 1023974 - RNA, 21 nt, Human
gaucccuugacuaagucuaga

SEQ ID NO: 1023975 - RNA, 21 nt, Human
gcaauauuacaaauacugagu

SEQ ID NO: 1023976 - RNA, 21 nt, Human
gcaggcgcgucacucccccau

SEQ ID NO: 1023977 - RNA, 21 nt, Human
gcaggcgcgucacucccccau

SEQ ID NO: 1023978 - RNA, 22 nt, Human
gccgccacugccgccgucgccg

SEQ ID NO: 1023979 - RNA, 22 nt, Human
gccgccacugccgccgucgccg

SEQ ID NO: 1023980 - RNA, 20 nt, Human
gcuggccaauguggugaaug

SEQ ID NO: 1023981 - RNA, 28 nt, Human
gcuggccaauguggugaaugaagccccg

SEQ ID NO: 1023982 - RNA, 25 nt, Human
ggacguugccaagccacgucaucag

SEQ ID NO: 1023983 - RNA, 23 nt, Human
ggccgggugcuguggcucaugcc

SEQ ID NO: 1023984 - RNA, 24 nt, Human
gggugcuguggcucaugccuguaa

SEQ ID NO: 1023985 - RNA, 24 nt, Human
gucacugcacugcagccugggcga

SEQ ID NO: 1023986 - RNA, 20 nt, Human
guggcucaugccuguaaucc

SEQ ID NO: 1023987 - RNA, 20 nt, Human
guggcucaugccuguaaucc

SEQ ID NO: 1023988 - RNA, 24 nt, Human
guggugaaugaagccccgucucua

SEQ ID NO: 1023989 - RNA, 23 nt, Human
guggugggugccuguaauuccag

SEQ ID NO: 1023990 - RNA, 19 nt, Human
uaaaaauacaaaaaugagc

SEQ ID NO: 1023991 - RNA, 18 nt, Human
uaauguuucauucuguau

SEQ ID NO: 1023992 - RNA, 23 nt, Human
uacugagucauuuaaucuucauu

SEQ ID NO: 1023993 - RNA, 21 nt, Human
uagcacacacgcgucgggacu

SEQ ID NO: 1023994 - RNA, 21 nt, Human
uagcacacacgcgucgggacu

SEQ ID NO: 1023995 - RNA, 25 nt, Human
uagcacuuugugaggccgaggcagg

SEQ ID NO: 1023996 - RNA, 19 nt, Human
uauuacaaauacugaguca

SEQ ID NO: 1023997 - RNA, 19 nt, Human
ucaaaaaaagaaagaaaaa

SEQ ID NO: 1023998 - RNA, 23 nt, Human
ucaccugaggucaggaguucaag

SEQ ID NO: 1023999 - RNA, 20 nt, Human
ucacugcacugcagccuggg

SEQ ID NO: 1024000 - RNA, 21 nt, Human
ucacugcacugcagccugggc

SEQ ID NO: 1024001 - RNA, 24 nt, Human
ucacugcacugcagccugggcgau

SEQ ID NO: 1024002 - RNA, 20 nt, Human
ucccccauggcagagacccc

SEQ ID NO: 1024003 - RNA, 20 nt, Human
ucccccauggcagagacccc

SEQ ID NO: 1024004 - RNA, 27 nt, Human
ucccccauggcagagaccccgucgggc

SEQ ID NO: 1024005 - RNA, 27 nt, Human
ucccccauggcagagaccccgucgggc

SEQ ID NO: 1024006 - RNA, 18 nt, Human
ucgcuugaacccgggagg

SEQ ID NO: 1024007 - RNA, 18 nt, Human
ucgggcuccugcaggccg

SEQ ID NO: 1024008 - RNA, 18 nt, Human
ucgggcuccugcaggccg

SEQ ID NO: 1024009 - RNA, 22 nt, Human
ucucuacuaaaaauacaaaaau

SEQ ID NO: 1024010 - RNA, 18 nt, Human
ugaaauaauacacccagc

SEQ ID NO: 1024011 - RNA, 20 nt, Human
ugaaauaauacacccagcaa

SEQ ID NO: 1024012 - RNA, 24 nt, Human
ugagcugggugugguggugggugc

SEQ ID NO: 1024013 - RNA, 20 nt, Human
ugaggcaggagaaucgcuug

SEQ ID NO: 1024014 - RNA, 24 nt, Human
ugaggcaggagaaucgcuugaacc

SEQ ID NO: 1024015 - RNA, 25 nt, Human
ugaggcaggagaaucgcuugaaccc

SEQ ID NO: 1024016 - RNA, 19 nt, Human
ugaggccaaaaaaccacaa

SEQ ID NO: 1024017 - RNA, 23 nt, Human
ugauguaauacaucauguuuacu

SEQ ID NO: 1024018 - RNA, 22 nt, Human
ugccuguaauccuagcacuuug

SEQ ID NO: 1024019 - RNA, 24 nt, Human
ugccuguaauuccagcuacucagg

SEQ ID NO: 1024020 - RNA, 19 nt, Human
uggcucaugccuguaaucc

SEQ ID NO: 1024021 - RNA, 24 nt, Human
uggcucaugccuguaauccuagca

SEQ ID NO: 1024022 - RNA, 22 nt, Human
uggugggugccuguaauuccag

SEQ ID NO: 1024023 - RNA, 24 nt, Human
ugguggugggugccuguaauucca

SEQ ID NO: 1024024 - RNA, 22 nt, Human
ugucucgccgcugccgcggaac

SEQ ID NO: 1024025 - RNA, 22 nt, Human
ugucucgccgcugccgcggaac

SEQ ID NO: 1024026 - RNA, 24 nt, Human
uguggcucaugccuguaauccuag

SEQ ID NO: 1024027 - RNA, 18 nt, Human
uuaaauaauuacuccacu

SEQ ID NO: 1024028 - RNA, 22 nt, Human
uucauuugggucuuuguaauaa

SEQ ID NO: 1024029 - RNA, 22 nt, Human
uugcagugagacaagaucgugu

SEQ ID NO: 1024030 - RNA, 23 nt, Human
uuucauucuguauuuaaauuucc

SEQ ID NO: 1024031 - RNA, 21 nt, Human
uuugggucuuuguaauaaaca

SEQ ID NO: 1024032 - RNA, 23 nt, Human
uuuuuauccuucuggcaauauua

SEQ ID NO: 1024033 - RNA, 20 nt, Human
uuuuuuuuuuuuuuuuccau

SEQ ID NO: 1024034 - RNA, 24 nt, Human
aaacaguucuuaaacaaagccucg

SEQ ID NO: 1024035 - RNA, 21 nt, Human
aggccaaauaugguggcccau

SEQ ID NO: 1024036 - RNA, 18 nt, Human
auuccucccuuccccucc

SEQ ID NO: 1024037 - RNA, 21 nt, Human
cagcaugaaauaaugcugccu

SEQ ID NO: 1024038 - RNA, 20 nt, Human
caugaaauaaugcugccuga

SEQ ID NO: 1024039 - RNA, 18 nt, Human
cgauuugcucagaaauuc

SEQ ID NO: 1024040 - RNA, 18 nt, Human
cucguacaggccaggagg

SEQ ID NO: 1024041 - RNA, 19 nt, Human
gaaagaaauauuacaggaa

SEQ ID NO: 1024042 - RNA, 22 nt, Human
ggaagucuccuuaauuccugua

SEQ ID NO: 1024043 - RNA, 26 nt, Human
uaaacaaagccucguacaggccagga

SEQ ID NO: 1024044 - RNA, 20 nt, Human
uaauaaacaguucuuaaaca

SEQ ID NO: 1024045 - RNA, 20 nt, Human
uacccugacuccuggaaucu

SEQ ID NO: 1024046 - RNA, 18 nt, Human
uagcuuucuuaagaagau

SEQ ID NO: 1024047 - RNA, 18 nt, Human
uaugccaagggaagaauc

SEQ ID NO: 1024048 - RNA, 27 nt, Human
ucagaaauucucuacccugacuccugg

SEQ ID NO: 1024049 - RNA, 19 nt, Human
uccaaagcuagggccugca

SEQ ID NO: 1024050 - RNA, 18 nt, Human
ugacuccuggaaucuccc

SEQ ID NO: 1024051 - RNA, 19 nt, Human
uggaaagaaauauuacagg

SEQ ID NO: 1024052 - RNA, 24 nt, Human
uucaagacauagcuuucuuaagaa

SEQ ID NO: 1024053 - RNA, 20 nt, Human
uuccucguuccaaagcuagg

SEQ ID NO: 1024054 - RNA, 24 nt, Human
uucuguaaagucaaacuuccaaga

SEQ ID NO: 1024055 - RNA, 22 nt, Human
uuugcucagaaauucucuaccc

SEQ ID NO: 1024056 - RNA, 19 nt, Human
uuuuuuuuuuuuuuuuugu

SEQ ID NO: 1024057 - RNA, 20 nt, Human
uuuuuuuuuuuuuuuuuugg

SEQ ID NO: 1024058 - RNA, 22 nt, Human
aaaaguaagaguugacaaaaaa

SEQ ID NO: 1024059 - RNA, 22 nt, Human
aaaaguaagaguugacaaaaaa

SEQ ID NO: 1024060 - RNA, 24 nt, Human
aaacagaaagugggaaagaucaag

SEQ ID NO: 1024061 - RNA, 24 nt, Human
aaacagaaagugggaaagaucaag

SEQ ID NO: 1024062 - RNA, 25 nt, Human
aaacagaaagugggaaagaucaagg

SEQ ID NO: 1024063 - RNA, 25 nt, Human
aaacagaaagugggaaagaucaagg

SEQ ID NO: 1024064 - RNA, 19 nt, Human
aaacauuuggauccaugaa

SEQ ID NO: 1024065 - RNA, 19 nt, Human
aaacauuuggauccaugaa

SEQ ID NO: 1024066 - RNA, 18 nt, Human
aacaaauacacaacugag

SEQ ID NO: 1024067 - RNA, 24 nt, Human
aagaaccuuagcacaaaaggacuc

SEQ ID NO: 1024068 - RNA, 26 nt, Human
aagguaucacuagaggucaaugaaaa

SEQ ID NO: 1024069 - RNA, 26 nt, Human
aagguaucacuagaggucaaugaaaa

SEQ ID NO: 1024070 - RNA, 23 nt, Human
acaaaaaagguacaucuucucca

SEQ ID NO: 1024071 - RNA, 23 nt, Human
acaaaaaagguacaucuucucca

SEQ ID NO: 1024072 - RNA, 21 nt, Human
acaaaaggacucaacaaacau

SEQ ID NO: 1024073 - RNA, 21 nt, Human
acaaagaaaggacucaacaaa

SEQ ID NO: 1024074 - RNA, 22 nt, Human
acaaagaaaggacucaacaaac

SEQ ID NO: 1024075 - RNA, 21 nt, Human
acccuguguucaaaccagucc

SEQ ID NO: 1024076 - RNA, 22 nt, Human
acccuguguucaaaccaguccc

SEQ ID NO: 1024077 - RNA, 19 nt, Human
accuuagcacaaagaaagg

SEQ ID NO: 1024078 - RNA, 19 nt, Human
agaaaacaaauaaagaucc

SEQ ID NO: 1024079 - RNA, 19 nt, Human
agaaaacaaauaaagaucc

SEQ ID NO: 1024080 - RNA, 23 nt, Human
agaaaacaaauaaagauccaaau

SEQ ID NO: 1024081 - RNA, 19 nt, Human
agcagagcucagaugcaga

SEQ ID NO: 1024082 - RNA, 22 nt, Human
agcucuuuccuguucccaccau

SEQ ID NO: 1024083 - RNA, 18 nt, Human
aguggaugacaaaagcca

SEQ ID NO: 1024084 - RNA, 18 nt, Human
aguggaugacaaaagcca

SEQ ID NO: 1024085 - RNA, 24 nt, Human
auaaagauccaaauacgugaguug

SEQ ID NO: 1024086 - RNA, 24 nt, Human
auaaagauccaaauacgugaguug

SEQ ID NO: 1024087 - RNA, 21 nt, Human
auaaggcacaaaaagauacca

SEQ ID NO: 1024088 - RNA, 21 nt, Human
auaaggcacaaaaagauacca

SEQ ID NO: 1024089 - RNA, 18 nt, Human
auaccaagaauguuaaca

SEQ ID NO: 1024090 - RNA, 18 nt, Human
auaccaagaauguuaaca

SEQ ID NO: 1024091 - RNA, 21 nt, Human
augaaacaaaacauacaauag

SEQ ID NO: 1024092 - RNA, 21 nt, Human
augaaacaaaacauacaauag

SEQ ID NO: 1024093 - RNA, 20 nt, Human
augaacaaauacacaacuga

SEQ ID NO: 1024094 - RNA, 20 nt, Human
augaacaaauacacaacuga

SEQ ID NO: 1024095 - RNA, 28 nt, Human
augaacaucugaaaccagugaucgagaa

SEQ ID NO: 1024096 - RNA, 28 nt, Human
augaacaucugaaaccagugaucgagaa

SEQ ID NO: 1024097 - RNA, 20 nt, Human
augagguguaacauaagcuc

SEQ ID NO: 1024098 - RNA, 18 nt, Human
caaaaagauaccaagaau

SEQ ID NO: 1024099 - RNA, 22 nt, Human
caaaaggacucaacaaacaaug

SEQ ID NO: 1024100 - RNA, 18 nt, Human
caagaaccuuagcacaaa

SEQ ID NO: 1024101 - RNA, 18 nt, Human
caagaaccuuagcacaaa

SEQ ID NO: 1024102 - RNA, 19 nt, Human
cacaaagaaaggacucaac

SEQ ID NO: 1024103 - RNA, 20 nt, Human
cacaaagaaaggacucaaca

SEQ ID NO: 1024104 - RNA, 18 nt, Human
cacauauaaccaccugcc

SEQ ID NO: 1024105 - RNA, 18 nt, Human
cacauauaaccaccugcc

SEQ ID NO: 1024106 - RNA, 27 nt, Human
caccgcaagaaccuuagcacaaagaaa

SEQ ID NO: 1024107 - RNA, 23 nt, Human
cagagcucagaugcagagagagg

SEQ ID NO: 1024108 - RNA, 21 nt, Human
cagaggccuuuucuaggaucu

SEQ ID NO: 1024109 - RNA, 21 nt, Human
cagucuuuccuguaaugaugg

SEQ ID NO: 1024110 - RNA, 21 nt, Human
cagucuuuccuguaaugaugg

SEQ ID NO: 1024111 - RNA, 22 nt, Human
cauacaauaguggaugacaaaa

SEQ ID NO: 1024112 - RNA, 22 nt, Human
cauacaauaguggaugacaaaa

SEQ ID NO: 1024113 - RNA, 18 nt, Human
caucugaaaccagugauc

SEQ ID NO: 1024114 - RNA, 18 nt, Human
caucugaaaccagugauc

SEQ ID NO: 1024115 - RNA, 20 nt, Human
caugaauaaaauuaucuucc

SEQ ID NO: 1024116 - RNA, 20 nt, Human
ccacauauaaccaccugccu

SEQ ID NO: 1024117 - RNA, 20 nt, Human
ccacauauaaccaccugccu

SEQ ID NO: 1024118 - RNA, 20 nt, Human
ccaugcugcuguccuccagg

SEQ ID NO: 1024119 - RNA, 22 nt, Human
ccuaaaacagucagaugagcuc

SEQ ID NO: 1024120 - RNA, 22 nt, Human
ccuaaaacagucagaugagcuc

SEQ ID NO: 1024121 - RNA, 20 nt, Human
ccuggggaagaagacagggg

SEQ ID NO: 1024122 - RNA, 18 nt, Human
ccuguaaugaugguuggg

SEQ ID NO: 1024123 - RNA, 18 nt, Human
ccuguaaugaugguuggg

SEQ ID NO: 1024124 - RNA, 19 nt, Human
ccuuagcacaaaaggacuc

SEQ ID NO: 1024125 - RNA, 20 nt, Human
cuaaaacauucuccuccucc

SEQ ID NO: 1024126 - RNA, 20 nt, Human
cuaaaacauucuccuccucc

SEQ ID NO: 1024127 - RNA, 20 nt, Human
cuaggaucuuucuccaugcu

SEQ ID NO: 1024128 - RNA, 18 nt, Human
cuccauggguagcagagc

SEQ ID NO: 1024129 - RNA, 18 nt, Human
cuccccaucugcacaccc

SEQ ID NO: 1024130 - RNA, 18 nt, Human
cuccccaucugcacaccc

SEQ ID NO: 1024131 - RNA, 18 nt, Human
cugaaucuuugaaaagaa

SEQ ID NO: 1024132 - RNA, 18 nt, Human
cugaaucuuugaaaagaa

SEQ ID NO: 1024133 - RNA, 20 nt, Human
cuuucccuccuuccacacuu

SEQ ID NO: 1024134 - RNA, 18 nt, Human
cuuuccuguucccaccau

SEQ ID NO: 1024135 - RNA, 19 nt, Human
gaacaaauacacaacugag

SEQ ID NO: 1024136 - RNA, 23 nt, Human
gaacaucugaaaccagugaucga

SEQ ID NO: 1024137 - RNA, 23 nt, Human
gaacaucugaaaccagugaucga

SEQ ID NO: 1024138 - RNA, 23 nt, Human
gaauuaaauucaccaugucugca

SEQ ID NO: 1024139 - RNA, 23 nt, Human
gaauuaaauucaccaugucugca

SEQ ID NO: 1024140 - RNA, 19 nt, Human
gcacaaaaggacucaacaa

SEQ ID NO: 1024141 - RNA, 18 nt, Human
gccaguacccccucccca

SEQ ID NO: 1024142 - RNA, 18 nt, Human
gccaguacccccucccca

SEQ ID NO: 1024143 - RNA, 26 nt, Human
gccuuuucuaggaucuuucuccaugc

SEQ ID NO: 1024144 - RNA, 18 nt, Human
ggaggugagggaagucag

SEQ ID NO: 1024145 - RNA, 20 nt, Human
gggaagucagaggccugggg

SEQ ID NO: 1024146 - RNA, 19 nt, Human
gggaggugagggaagucag

SEQ ID NO: 1024147 - RNA, 24 nt, Human
uaaaugaacaucugaaaccaguga

SEQ ID NO: 1024148 - RNA, 24 nt, Human
uaaaugaacaucugaaaccaguga

SEQ ID NO: 1024149 - RNA, 21 nt, Human
uaaggcacaaaaagauaccaa

SEQ ID NO: 1024150 - RNA, 24 nt, Human
uagcacaaaaggacucaacaaaca

SEQ ID NO: 1024151 - RNA, 25 nt, Human
uagcacaaaaggacucaacaaacau

SEQ ID NO: 1024152 - RNA, 20 nt, Human
ucaaugaaacaaaacauaca

SEQ ID NO: 1024153 - RNA, 20 nt, Human
ucaaugaaacaaaacauaca

SEQ ID NO: 1024154 - RNA, 26 nt, Human
ucagaggccuuuucuaggaucuuucu

SEQ ID NO: 1024155 - RNA, 21 nt, Human
uccacacuugcaguccaggga

SEQ ID NO: 1024156 - RNA, 24 nt, Human
uccacagaugccagagcuugcugg

SEQ ID NO: 1024157 - RNA, 24 nt, Human
uccacagaugccagagcuugcugg

SEQ ID NO: 1024158 - RNA, 23 nt, Human
uccaugcugcuguccuccaggaa

SEQ ID NO: 1024159 - RNA, 23 nt, Human
ucccuccuuccacacuugcaguc

SEQ ID NO: 1024160 - RNA, 25 nt, Human
ugaaaagaauauaauaaaugaacau

SEQ ID NO: 1024161 - RNA, 25 nt, Human
ugaaaagaauauaauaaaugaacau

SEQ ID NO: 1024162 - RNA, 18 nt, Human
ugaacaaauacacaacug

SEQ ID NO: 1024163 - RNA, 19 nt, Human
ugagggaagucagaggccu

SEQ ID NO: 1024164 - RNA, 22 nt, Human
ugagggaagucagaggccuggg

SEQ ID NO: 1024165 - RNA, 20 nt, Human
ugagggaagucagaggccuu

SEQ ID NO: 1024166 - RNA, 21 nt, Human
ugaguugaucaucugauaaaa

SEQ ID NO: 1024167 - RNA, 21 nt, Human
ugaguugaucaucugauaaaa

SEQ ID NO: 1024168 - RNA, 19 nt, Human
ugccuaaaacauucuccuc

SEQ ID NO: 1024169 - RNA, 19 nt, Human
ugccuaaaacauucuccuc

SEQ ID NO: 1024170 - RNA, 22 nt, Human
ugggaggugagggaagucagag

SEQ ID NO: 1024171 - RNA, 22 nt, Human
ugggaggugagggaagucagag

SEQ ID NO: 1024172 - RNA, 24 nt, Human
uguucaaaccagucccagcuccug

SEQ ID NO: 1024173 - RNA, 24 nt, Human
uguucaaaccagucccagcuccug

SEQ ID NO: 1024174 - RNA, 22 nt, Human
uucacagucuuuccuguaauga

SEQ ID NO: 1024175 - RNA, 22 nt, Human
uucacagucuuuccuguaauga

SEQ ID NO: 1024176 - RNA, 24 nt, Human
uucccuccuuccacacuugcaguc

SEQ ID NO: 1024177 - RNA, 20 nt, Human
uucuccaugcugcuguccuc

SEQ ID NO: 1024178 - RNA, 22 nt, Human
uuuccuguucccaccauccauc

SEQ ID NO: 1024179 - RNA, 28 nt, Human
uuucuaggaucuuucuccaugcugcugu

SEQ ID NO: 1024180 - RNA, 18 nt, Human
aaagucccccaugucucc

SEQ ID NO: 1024181 - RNA, 24 nt, Human
aaagucccccaugucuccuuacuc

SEQ ID NO: 1024182 - RNA, 19 nt, Human
aagcaggugggccacucca

SEQ ID NO: 1024183 - RNA, 21 nt, Human
aagcaggugggccacuccagg

SEQ ID NO: 1024184 - RNA, 23 nt, Human
aagcaggugggccacuccaggac

SEQ ID NO: 1024185 - RNA, 19 nt, Human
ccagagcgguggcggccau

SEQ ID NO: 1024186 - RNA, 24 nt, Human
ccccaugucuccuuacuccguggg

SEQ ID NO: 1024187 - RNA, 22 nt, Human
ccgcugggcugcuugagcaugc

SEQ ID NO: 1024188 - RNA, 20 nt, Human
gagcaugcuuccuccccgcc

SEQ ID NO: 1024189 - RNA, 22 nt, Human
gggcaagcaggugggccacucc

SEQ ID NO: 1024190 - RNA, 19 nt, Human
uauauaucucacuaacauu

SEQ ID NO: 1024191 - RNA, 23 nt, Human
ucccccaugucuccuuacuccgu

SEQ ID NO: 1024192 - RNA, 19 nt, Human
ucucacuaacauuaaggaa

SEQ ID NO: 1024193 - RNA, 19 nt, Human
ugguccagagcgguggcgg

SEQ ID NO: 1024194 - RNA, 21 nt, Human
uucacacuuccuaaccaaaaa

SEQ ID NO: 1024195 - RNA, 19 nt, Human
acaaaaaguuuuuccacau

SEQ ID NO: 1024196 - RNA, 25 nt, Human
acauucauuacauucauaggguuuu

SEQ ID NO: 1024197 - RNA, 23 nt, Human
auugugagguaugacuucuggcu

SEQ ID NO: 1024198 - RNA, 20 nt, Human
cauucauuacauucauaggg

SEQ ID NO: 1024199 - RNA, 20 nt, Human
cauucauuacauucauaggg

SEQ ID NO: 1024200 - RNA, 23 nt, Human
cauucauuacauucauaggguug

SEQ ID NO: 1024201 - RNA, 23 nt, Human
cauucauuacauucauaggguug

SEQ ID NO: 1024202 - RNA, 18 nt, Human
gauuucugacaaaaaguu

SEQ ID NO: 1024203 - RNA, 21 nt, Human
gcuaaagguuuuuccacauuc

SEQ ID NO: 1024204 - RNA, 26 nt, Human
gggucuuuccccugugugaguuaucu

SEQ ID NO: 1024205 - RNA, 23 nt, Human
uaagguaugauuucugacaaaaa

SEQ ID NO: 1024206 - RNA, 19 nt, Human
uccacauucauuacaucca

SEQ ID NO: 1024207 - RNA, 23 nt, Human
uccacauucauuacauccauaug

SEQ ID NO: 1024208 - RNA, 21 nt, Human
ugaguucccugaugggugcug

SEQ ID NO: 1024209 - RNA, 22 nt, Human
uggcuaaagguuuuuccacauu

SEQ ID NO: 1024210 - RNA, 24 nt, Human
ugugaguucccugaugggugcuga

SEQ ID NO: 1024211 - RNA, 19 nt, Human
uuccccugugugaguucua

SEQ ID NO: 1024212 - RNA, 24 nt, Human
uuuuccacauucacuacacugaua

SEQ ID NO: 1024213 - RNA, 23 nt, Human
aacacugcucgucggguccagca

SEQ ID NO: 1024214 - RNA, 20 nt, Human
aacuguggauaaaacaaagu

SEQ ID NO: 1024215 - RNA, 22 nt, Human
aagcacccugcagcccuagcga

SEQ ID NO: 1024216 - RNA, 20 nt, Human
acaaugggggccgcaaaaaa

SEQ ID NO: 1024217 - RNA, 25 nt, Human
accccaaggcccgaugggucccgcg

SEQ ID NO: 1024218 - RNA, 20 nt, Human
agacaggagaggggcacgua

SEQ ID NO: 1024219 - RNA, 24 nt, Human
agacaggagaggggcacguaccgg

SEQ ID NO: 1024220 - RNA, 25 nt, Human
agagcuuguuccgaagcaagcacua

SEQ ID NO: 1024221 - RNA, 22 nt, Human
agccgaugcugaaugguacgcg

SEQ ID NO: 1024222 - RNA, 21 nt, Human
agccugaggaaggugggacuc

SEQ ID NO: 1024223 - RNA, 18 nt, Human
agggcccuggugagaggg

SEQ ID NO: 1024224 - RNA, 21 nt, Human
aggugggacucgggcggagcc

SEQ ID NO: 1024225 - RNA, 18 nt, Human
auccagcccuccccugga

SEQ ID NO: 1024226 - RNA, 20 nt, Human
cagacauguugacauaacag

SEQ ID NO: 1024227 - RNA, 22 nt, Human
cccccugcugugguucccgaac

SEQ ID NO: 1024228 - RNA, 23 nt, Human
ccccgguaccggggccgcgucua

SEQ ID NO: 1024229 - RNA, 21 nt, Human
ccccuggacccuaggucacgg

SEQ ID NO: 1024230 - RNA, 23 nt, Human
cccuaggucacggcaaucaaccc

SEQ ID NO: 1024231 - RNA, 22 nt, Human
ccgaagcaagcacccugcagcc

SEQ ID NO: 1024232 - RNA, 25 nt, Human
ccuccggauaguccccgagagcuuu

SEQ ID NO: 1024233 - RNA, 22 nt, Human
ccugcaggcugccuccggauag

SEQ ID NO: 1024234 - RNA, 22 nt, Human
cgaagcaagcacccugcagccc

SEQ ID NO: 1024235 - RNA, 23 nt, Human
cgaagcaagcacccugcagcccu

SEQ ID NO: 1024236 - RNA, 24 nt, Human
cgcggucggacuucuacacccgcc

SEQ ID NO: 1024237 - RNA, 23 nt, Human
cggaccagcgggcgagggcccug

SEQ ID NO: 1024238 - RNA, 25 nt, Human
cgggcggagccgaugcugaauggua

SEQ ID NO: 1024239 - RNA, 21 nt, Human
cuacacccgccuccagacagg

SEQ ID NO: 1024240 - RNA, 18 nt, Human
gacagcagucuggcuucc

SEQ ID NO: 1024241 - RNA, 18 nt, Human
gaggaaggugggacucgg

SEQ ID NO: 1024242 - RNA, 22 nt, Human
gauccagcccuccccuggaccc

SEQ ID NO: 1024243 - RNA, 24 nt, Human
gcagcacaaugggggccgcaaaaa

SEQ ID NO: 1024244 - RNA, 18 nt, Human
gcccuagcgauccagccc

SEQ ID NO: 1024245 - RNA, 23 nt, Human
gcggucggacuucuacacccgcc

SEQ ID NO: 1024246 - RNA, 23 nt, Human
ggaaggugggacucgggcggagc

SEQ ID NO: 1024247 - RNA, 20 nt, Human
ggacucgggcggagccgaug

SEQ ID NO: 1024248 - RNA, 20 nt, Human
ggaggccuucugugccggga

SEQ ID NO: 1024249 - RNA, 19 nt, Human
ggggcacaggccuguugag

SEQ ID NO: 1024250 - RNA, 20 nt, Human
ggggccgcgucuacgugggg

SEQ ID NO: 1024251 - RNA, 23 nt, Human
gguccagcagcacaaugggggcc

SEQ ID NO: 1024252 - RNA, 19 nt, Human
guucccgaaccccaaggcc

SEQ ID NO: 1024253 - RNA, 23 nt, Human
uaacuguggauaaaacaaaguca

SEQ ID NO: 1024254 - RNA, 24 nt, Human
uauggcuguuuguuacauacagug

SEQ ID NO: 1024255 - RNA, 18 nt, Human
ucagccaaucagagccug

SEQ ID NO: 1024256 - RNA, 18 nt, Human
ucccgaaccccaaggccc

SEQ ID NO: 1024257 - RNA, 19 nt, Human
ucuacacccgccuccagac

SEQ ID NO: 1024258 - RNA, 20 nt, Human
ugacauaacagugaaauaca

SEQ ID NO: 1024259 - RNA, 22 nt, Human
ugaggaaggugggacucgggcg

SEQ ID NO: 1024260 - RNA, 26 nt, Human
ugccugaacccccgguaccggggccg

SEQ ID NO: 1024261 - RNA, 19 nt, Human
uggcuuccgcggucggacu

SEQ ID NO: 1024262 - RNA, 19 nt, Human
ugggucccgcgggggucgc

SEQ ID NO: 1024263 - RNA, 22 nt, Human
ugguucccgaaccccaaggccc

SEQ ID NO: 1024264 - RNA, 18 nt, Human
ugucuuaaauauggcugu

SEQ ID NO: 1024265 - RNA, 19 nt, Human
aaaaaacccccgccaaauc

SEQ ID NO: 1024266 - RNA, 25 nt, Human
aaaccucccccaucaucuuagaagg

SEQ ID NO: 1024267 - RNA, 18 nt, Human
aagaaagaaacucgcgga

SEQ ID NO: 1024268 - RNA, 20 nt, Human
aaggaagagaggacugaggg

SEQ ID NO: 1024269 - RNA, 21 nt, Human
aauagcagagacagcggcaaa

SEQ ID NO: 1024270 - RNA, 23 nt, Human
acccgaguccccauacgaggccc

SEQ ID NO: 1024271 - RNA, 19 nt, Human
acccucacccgagucccca

SEQ ID NO: 1024272 - RNA, 27 nt, Human
acuuuuuuuuuuuuuuuuuuuuuuuuu

SEQ ID NO: 1024273 - RNA, 19 nt, Human
agagaugcagggaggcuga

SEQ ID NO: 1024274 - RNA, 25 nt, Human
agaggaaaggggagaugauaaagaa

SEQ ID NO: 1024275 - RNA, 26 nt, Human
agaggaagggggcgggacguggagag

SEQ ID NO: 1024276 - RNA, 22 nt, Human
agaguuggggagguguucaggg

SEQ ID NO: 1024277 - RNA, 24 nt, Human
aggaaaaaaacccccgccaaaucc

SEQ ID NO: 1024278 - RNA, 22 nt, Human
aggaagaaaagucuugggaugc

SEQ ID NO: 1024279 - RNA, 19 nt, Human
aggaggcaggaagaggaag

SEQ ID NO: 1024280 - RNA, 19 nt, Human
aggcagcucccaacaggaa

SEQ ID NO: 1024281 - RNA, 24 nt, Human
aggcaggaagaggaagggggcggg

SEQ ID NO: 1024282 - RNA, 27 nt, Human
aggcaggaagaggaagggggcgggguc

SEQ ID NO: 1024283 - RNA, 18 nt, Human
agggagggaggcggcggg

SEQ ID NO: 1024284 - RNA, 22 nt, Human
agugcagggaggccaggagaga

SEQ ID NO: 1024285 - RNA, 26 nt, Human
caaacccucgacgccggccuccggac

SEQ ID NO: 1024286 - RNA, 19 nt, Human
caaaccucccccaucaucu

SEQ ID NO: 1024287 - RNA, 24 nt, Human
cacccgaguccccauacgaggccc

SEQ ID NO: 1024288 - RNA, 22 nt, Human
cagagacagcggcaaacccucg

SEQ ID NO: 1024289 - RNA, 18 nt, Human
caggagcaggacagaagc

SEQ ID NO: 1024290 - RNA, 18 nt, Human
cagggaugaggcaggccu

SEQ ID NO: 1024291 - RNA, 22 nt, Human
caggguggagguccagagaauu

SEQ ID NO: 1024292 - RNA, 24 nt, Human
ccaaauccgaaccgcguuguagcu

SEQ ID NO: 1024293 - RNA, 22 nt, Human
ccaacacugcucccugccccca

SEQ ID NO: 1024294 - RNA, 21 nt, Human
ccaggguggagguccagagaa

SEQ ID NO: 1024295 - RNA, 19 nt, Human
cccagacuuuuuuuuuuuu

SEQ ID NO: 1024296 - RNA, 18 nt, Human
ccccaggggagggauggg

SEQ ID NO: 1024297 - RNA, 23 nt, Human
ccccauacgaggcccggcuugcc

SEQ ID NO: 1024298 - RNA, 20 nt, Human
ccccccaggggagggauggg

SEQ ID NO: 1024299 - RNA, 22 nt, Human
ccccuauggggaggauggaaau

SEQ ID NO: 1024300 - RNA, 19 nt, Human
cccgccaaauccgaaccgc

SEQ ID NO: 1024301 - RNA, 24 nt, Human
cccucgacgccggccuccggacag

SEQ ID NO: 1024302 - RNA, 24 nt, Human
cccuugguccuuaggggugggggc

SEQ ID NO: 1024303 - RNA, 19 nt, Human
ccgcugccgcugcuggcuu

SEQ ID NO: 1024304 - RNA, 19 nt, Human
ccuacaguuggcagaggag

SEQ ID NO: 1024305 - RNA, 24 nt, Human
ccuucaagaaagaaacucgcggac

SEQ ID NO: 1024306 - RNA, 18 nt, Human
cgagccugggguugggga

SEQ ID NO: 1024307 - RNA, 19 nt, Human
cgagccugggguuggggag

SEQ ID NO: 1024308 - RNA, 25 nt, Human
cgcgugcaacaaaccucccccauca

SEQ ID NO: 1024309 - RNA, 20 nt, Human
cgcucaggcucccuuggucc

SEQ ID NO: 1024310 - RNA, 18 nt, Human
cggaaccaguacucgcca

SEQ ID NO: 1024311 - RNA, 21 nt, Human
cggaaccaguacucgccaccc

SEQ ID NO: 1024312 - RNA, 19 nt, Human
cggccuccggacagcuccc

SEQ ID NO: 1024313 - RNA, 21 nt, Human
cgugaaugaaucuagccccca

SEQ ID NO: 1024314 - RNA, 18 nt, Human
cucccucuucuccucucc

SEQ ID NO: 1024315 - RNA, 23 nt, Human
cucgacgccggccuccggacagc

SEQ ID NO: 1024316 - RNA, 20 nt, Human
cugcuggcuuuugcagcagc

SEQ ID NO: 1024317 - RNA, 19 nt, Human
cuggaagggucagcgccgc

SEQ ID NO: 1024318 - RNA, 20 nt, Human
cuggcuuuugcagcagccgc

SEQ ID NO: 1024319 - RNA, 19 nt, Human
cuugggaugcggggcagag

SEQ ID NO: 1024320 - RNA, 20 nt, Human
cuugggaugcggggcagagc

SEQ ID NO: 1024321 - RNA, 22 nt, Human
gaaugaaucuagcccccacacc

SEQ ID NO: 1024322 - RNA, 18 nt, Human
gaccuggaagggucagcg

SEQ ID NO: 1024323 - RNA, 18 nt, Human
gacgggagguuggagaag

SEQ ID NO: 1024324 - RNA, 19 nt, Human
gacuuuuuuuuuuuuuuuu

SEQ ID NO: 1024325 - RNA, 18 nt, Human
gagaggggagagagcccc

SEQ ID NO: 1024326 - RNA, 20 nt, Human
gagaugggagaggggagaga

SEQ ID NO: 1024327 - RNA, 20 nt, Human
gaggauggaaauagcagaga

SEQ ID NO: 1024328 - RNA, 24 nt, Human
gaggggagagagccccuaugggga

SEQ ID NO: 1024329 - RNA, 19 nt, Human
gagugcagggagguuucca

SEQ ID NO: 1024330 - RNA, 22 nt, Human
gaugaggaggcaggaagaggaa

SEQ ID NO: 1024331 - RNA, 20 nt, Human
gaugauaaagaagggaagga

SEQ ID NO: 1024332 - RNA, 21 nt, Human
gaugauaaagaagggaaggaa

SEQ ID NO: 1024333 - RNA, 18 nt, Human
gaugcaggagcaggacag

SEQ ID NO: 1024334 - RNA, 20 nt, Human
gcaggaagaggaagggggcg

SEQ ID NO: 1024335 - RNA, 21 nt, Human
gccaggcacccuugggugucc

SEQ ID NO: 1024336 - RNA, 21 nt, Human
gcucccgcugccgcugcuggc

SEQ ID NO: 1024337 - RNA, 21 nt, Human
ggaaauagcagagacagcggc

SEQ ID NO: 1024338 - RNA, 20 nt, Human
ggaaggaagagaggacugag

SEQ ID NO: 1024339 - RNA, 23 nt, Human
ggagcccucucccaacacugcuc

SEQ ID NO: 1024340 - RNA, 24 nt, Human
ggaggcaggaagaggaagggggcg

SEQ ID NO: 1024341 - RNA, 23 nt, Human
gggagggagggaggcggcggguc

SEQ ID NO: 1024342 - RNA, 21 nt, Human
gggaugggcccaaggcagcuc

SEQ ID NO: 1024343 - RNA, 23 nt, Human
gggcccaaggcagcucccaacag

SEQ ID NO: 1024344 - RNA, 21 nt, Human
ggggccagggccaucaguugg

SEQ ID NO: 1024345 - RNA, 22 nt, Human
gucagcuagggagggagggagg

SEQ ID NO: 1024346 - RNA, 22 nt, Human
guccuuaggggugggggccagg

SEQ ID NO: 1024347 - RNA, 18 nt, Human
uagaaaauaauuauagag

SEQ ID NO: 1024348 - RNA, 19 nt, Human
uagcucgguccccgccucc

SEQ ID NO: 1024349 - RNA, 24 nt, Human
uagugcagggagguuggaaccagu

SEQ ID NO: 1024350 - RNA, 23 nt, Human
ucucccaacacugcucccugccc

SEQ ID NO: 1024351 - RNA, 19 nt, Human
ucucccucuucuccucucc

SEQ ID NO: 1024352 - RNA, 22 nt, Human
ucugcgaccugccaggcacccu

SEQ ID NO: 1024353 - RNA, 23 nt, Human
ucuugggaugcggggcagagccc

SEQ ID NO: 1024354 - RNA, 18 nt, Human
ugagaugggagaggggag

SEQ ID NO: 1024355 - RNA, 19 nt, Human
ugcagcagccgcagcccgg

SEQ ID NO: 1024356 - RNA, 24 nt, Human
ugcagggaugaggcaggccuacag

SEQ ID NO: 1024357 - RNA, 21 nt, Human
ugccaagacaaugaaaguugg

SEQ ID NO: 1024358 - RNA, 25 nt, Human
ugccaagacaaugaaaguugggagg

SEQ ID NO: 1024359 - RNA, 19 nt, Human
ugccaggcacccuugggug

SEQ ID NO: 1024360 - RNA, 22 nt, Human
ugccaggcacccuugggugucc

SEQ ID NO: 1024361 - RNA, 21 nt, Human
ugcucccugcccccaagccuc

SEQ ID NO: 1024362 - RNA, 20 nt, Human
ugcuuaagggagaugaggag

SEQ ID NO: 1024363 - RNA, 21 nt, Human
uggaaauagcagagacagccg

SEQ ID NO: 1024364 - RNA, 23 nt, Human
uggagguccagagaauuuggggg

SEQ ID NO: 1024365 - RNA, 22 nt, Human
uggcaagaugcaggagcaggac

SEQ ID NO: 1024366 - RNA, 18 nt, Human
ugggaggaggcggccagg

SEQ ID NO: 1024367 - RNA, 18 nt, Human
ugggaggaggcggccagg

SEQ ID NO: 1024368 - RNA, 20 nt, Human
ugggaggaggcggccagggu

SEQ ID NO: 1024369 - RNA, 23 nt, Human
ugggaggaggcggccagggugga

SEQ ID NO: 1024370 - RNA, 18 nt, Human
uggggagguguucaggga

SEQ ID NO: 1024371 - RNA, 24 nt, Human
ugggggccagggccaucaguuggg

SEQ ID NO: 1024372 - RNA, 18 nt, Human
ugggguuggggagcccuc

SEQ ID NO: 1024373 - RNA, 24 nt, Human
uguccgacccuggguggucccagc

SEQ ID NO: 1024374 - RNA, 19 nt, Human
uuaagggagaugaggaggc

SEQ ID NO: 1024375 - RNA, 19 nt, Human
uuaggggugggggccaggg

SEQ ID NO: 1024376 - RNA, 21 nt, Human
uuggaaccagugcagggauga

SEQ ID NO: 1024377 - RNA, 21 nt, Human
uuggcagaggagccuggcaag

SEQ ID NO: 1024378 - RNA, 20 nt, Human
uuggggagguguucagggag

SEQ ID NO: 1024379 - RNA, 22 nt, Human
uuggggggcuggaagaagugca

SEQ ID NO: 1024380 - RNA, 25 nt, Human
uuuuuuuuuuuuuuuuuuuuuaagg

SEQ ID NO: 1024381 - RNA, 19 nt, Human
agucacuggccacgcccgc

SEQ ID NO: 1024382 - RNA, 24 nt, Human
cagcaauuauuuuuauguaacaac

SEQ ID NO: 1024383 - RNA, 19 nt, Human
cccgcggcgccucgccuuc

SEQ ID NO: 1024384 - RNA, 22 nt, Human
cccgcggcgccucgccuucuag

SEQ ID NO: 1024385 - RNA, 24 nt, Human
cgccucgccuucuagucacuggcc

SEQ ID NO: 1024386 - RNA, 24 nt, Human
uuuuuuuuuuuuuuuuuuacacag

SEQ ID NO: 1024387 - RNA, 18 nt, Human
aaaaaaaauagcaaaaaa

SEQ ID NO: 1024388 - RNA, 25 nt, Human
aaaagcaaaaacaaaacaaaacaaa

SEQ ID NO: 1024389 - RNA, 20 nt, Human
aaaaugccacccagagguua

SEQ ID NO: 1024390 - RNA, 19 nt, Human
aaacaaaacaaaacaaaaa

SEQ ID NO: 1024391 - RNA, 26 nt, Human
aaagcaaaaacaaaacaaaacaaaaa

SEQ ID NO: 1024392 - RNA, 21 nt, Human
aaauucauaaugaaaaugcca

SEQ ID NO: 1024393 - RNA, 24 nt, Human
aagcaaaaacaaaacaaaacaaaa

SEQ ID NO: 1024394 - RNA, 22 nt, Human
aagcaagacagguggugaacaa

SEQ ID NO: 1024395 - RNA, 19 nt, Human
aaugaaaaugccacccaga

SEQ ID NO: 1024396 - RNA, 19 nt, Human
acaaaacaaaacaaaaaac

SEQ ID NO: 1024397 - RNA, 21 nt, Human
acaaaacaaaacaaaaaacca

SEQ ID NO: 1024398 - RNA, 23 nt, Human
acccugaauaucugcuagugggg

SEQ ID NO: 1024399 - RNA, 18 nt, Human
agaagagcuguuucagca

SEQ ID NO: 1024400 - RNA, 24 nt, Human
agaagagcuguuucagcacaaccc

SEQ ID NO: 1024401 - RNA, 19 nt, Human
agacaaccagauccccuga

SEQ ID NO: 1024402 - RNA, 20 nt, Human
agcacaacccaccagaaaca

SEQ ID NO: 1024403 - RNA, 23 nt, Human
agguacagagauuugagagagcc

SEQ ID NO: 1024404 - RNA, 22 nt, Human
auggcacagauacaccaacacc

SEQ ID NO: 1024405 - RNA, 21 nt, Human
caaaaaaaaaaacaaaacuca

SEQ ID NO: 1024406 - RNA, 25 nt, Human
caaaaaaccacucagcuuaaucagc

SEQ ID NO: 1024407 - RNA, 25 nt, Human
caaaaacaaaacaaaacaaaaaacc

SEQ ID NO: 1024408 - RNA, 21 nt, Human
caaaacaaaaaaccacucagc

SEQ ID NO: 1024409 - RNA, 19 nt, Human
caaccagauccccugacua

SEQ ID NO: 1024410 - RNA, 24 nt, Human
caaccagauccccugacuaaagcu

SEQ ID NO: 1024411 - RNA, 23 nt, Human
caacccacugaccaucucagcuc

SEQ ID NO: 1024412 - RNA, 18 nt, Human
cacacacaauuuuggugg

SEQ ID NO: 1024413 - RNA, 22 nt, Human
cacacauaaaguacacuaacac

SEQ ID NO: 1024414 - RNA, 22 nt, Human
cacaucuucaggaagacccuuu

SEQ ID NO: 1024415 - RNA, 23 nt, Human
caccagaaacauuggccaccaug

SEQ ID NO: 1024416 - RNA, 22 nt, Human
cacccagagguuaacagcuugc

SEQ ID NO: 1024417 - RNA, 18 nt, Human
cagcacaacccaccagaa

SEQ ID NO: 1024418 - RNA, 22 nt, Human
cagcacaacccaccagaaacaa

SEQ ID NO: 1024419 - RNA, 22 nt, Human
cagcacaacccaccagaaacau

SEQ ID NO: 1024420 - RNA, 19 nt, Human
cagcucucuucuaaagggg

SEQ ID NO: 1024421 - RNA, 19 nt, Human
cauaaagauagaauccaca

SEQ ID NO: 1024422 - RNA, 22 nt, Human
ccaagguaauagcauggcaaag

SEQ ID NO: 1024423 - RNA, 18 nt, Human
ccaccagaaacauuggcc

SEQ ID NO: 1024424 - RNA, 28 nt, Human
ccagggccgggcgaguagccgggguccc

SEQ ID NO: 1024425 - RNA, 20 nt, Human
cccaagaaugcugacaauaa

SEQ ID NO: 1024426 - RNA, 22 nt, Human
cccaccagaaacauuggccacc

SEQ ID NO: 1024427 - RNA, 22 nt, Human
cccagaaggcaccuccucucau

SEQ ID NO: 1024428 - RNA, 22 nt, Human
cccagagguuaacagcuugcca

SEQ ID NO: 1024429 - RNA, 19 nt, Human
cccccaaacacacacaauu

SEQ ID NO: 1024430 - RNA, 22 nt, Human
cccccaaacacacacaauuuug

SEQ ID NO: 1024431 - RNA, 21 nt, Human
ccccugacuaaagcuuggcuc

SEQ ID NO: 1024432 - RNA, 19 nt, Human
cccgcgggcucggcccugg

SEQ ID NO: 1024433 - RNA, 21 nt, Human
cccugaauaucugcuaguggg

SEQ ID NO: 1024434 - RNA, 20 nt, Human
ccgccgccgccucccaccgc

SEQ ID NO: 1024435 - RNA, 21 nt, Human
ccgccgccgccucccaccgcc

SEQ ID NO: 1024436 - RNA, 22 nt, Human
ccgccgccgccucccaccgccc

SEQ ID NO: 1024437 - RNA, 23 nt, Human
ccgccgccgccucccaccgccca

SEQ ID NO: 1024438 - RNA, 23 nt, Human
ccggcuccuggcuccuccgaggu

SEQ ID NO: 1024439 - RNA, 19 nt, Human
ccuacaguuaaaaaugggg

SEQ ID NO: 1024440 - RNA, 20 nt, Human
ccuacaguuaaaaauggggc

SEQ ID NO: 1024441 - RNA, 22 nt, Human
ccuccaugaaauuaaagcugug

SEQ ID NO: 1024442 - RNA, 21 nt, Human
ccucccaccgcccagggccgg

SEQ ID NO: 1024443 - RNA, 19 nt, Human
ccugaauaucugcuagugg

SEQ ID NO: 1024444 - RNA, 19 nt, Human
cgccgccgccgccgccgcc

SEQ ID NO: 1024445 - RNA, 23 nt, Human
cgcgagcgccgccgccgccgccg

SEQ ID NO: 1024446 - RNA, 25 nt, Human
cuacacaucugccaagguaauagca

SEQ ID NO: 1024447 - RNA, 24 nt, Human
cucucucucccccaaacacacaca

SEQ ID NO: 1024448 - RNA, 18 nt, Human
cuugggccacacauaaag

SEQ ID NO: 1024449 - RNA, 19 nt, Human
gcaaaaaaaaaaacaaaac

SEQ ID NO: 1024450 - RNA, 21 nt, Human
gcaaaaaaaaaaacaaaacuc

SEQ ID NO: 1024451 - RNA, 20 nt, Human
gcagggccagauuagaacau

SEQ ID NO: 1024452 - RNA, 18 nt, Human
gcagucaaaugcauuuau

SEQ ID NO: 1024453 - RNA, 19 nt, Human
gccacauucaaagcugucc

SEQ ID NO: 1024454 - RNA, 18 nt, Human
gcccugguuccggcuccu

SEQ ID NO: 1024455 - RNA, 19 nt, Human
gcccugguuccggcuccug

SEQ ID NO: 1024456 - RNA, 20 nt, Human
gcgccgccgccgccgccgcc

SEQ ID NO: 1024457 - RNA, 25 nt, Human
gcuagccccggcccgcgggcucggc

SEQ ID NO: 1024458 - RNA, 22 nt, Human
gcuagccccggcccgcgggcuu

SEQ ID NO: 1024459 - RNA, 18 nt, Human
ggcaguacccuaguuuau

SEQ ID NO: 1024460 - RNA, 22 nt, Human
gugccacacuggaagaagaguu

SEQ ID NO: 1024461 - RNA, 21 nt, Human
guggcagggccagauuagaac

SEQ ID NO: 1024462 - RNA, 21 nt, Human
guguugcucacuuguuuacau

SEQ ID NO: 1024463 - RNA, 21 nt, Human
uaaagcaacucaccaaaggua

SEQ ID NO: 1024464 - RNA, 24 nt, Human
uaauagcauggcaaauaguauuuu

SEQ ID NO: 1024465 - RNA, 18 nt, Human
uacaagagauacgaggca

SEQ ID NO: 1024466 - RNA, 18 nt, Human
uacaccaacacagagaua

SEQ ID NO: 1024467 - RNA, 22 nt, Human
uagcaaaaaaaaaaacaaaacu

SEQ ID NO: 1024468 - RNA, 23 nt, Human
uagcaaaaaaaaaaacaaaacuc

SEQ ID NO: 1024469 - RNA, 23 nt, Human
uagcuuaagcaagacagguggug

SEQ ID NO: 1024470 - RNA, 25 nt, Human
uaucucuaugucucucucuccccca

SEQ ID NO: 1024471 - RNA, 19 nt, Human
uauuuggccaaauuuuuca

SEQ ID NO: 1024472 - RNA, 22 nt, Human
ucacaaaauauuagagguggga

SEQ ID NO: 1024473 - RNA, 21 nt, Human
uccacaucuucaggaagaccc

SEQ ID NO: 1024474 - RNA, 18 nt, Human
ucucucucucccccaaac

SEQ ID NO: 1024475 - RNA, 22 nt, Human
ucugucucuaucucuaugucuc

SEQ ID NO: 1024476 - RNA, 24 nt, Human
ucugucucuaucucuaugucucuc

SEQ ID NO: 1024477 - RNA, 24 nt, Human
ugccaugcaugcaacugugugcgc

SEQ ID NO: 1024478 - RNA, 21 nt, Human
uggcaaauaguauuuuucuug

SEQ ID NO: 1024479 - RNA, 24 nt, Human
uggcacagauacaccaacacagag

SEQ ID NO: 1024480 - RNA, 21 nt, Human
ugggauggaucacucuagacc

SEQ ID NO: 1024481 - RNA, 22 nt, Human
ugguuggaaguucucagaagag

SEQ ID NO: 1024482 - RNA, 24 nt, Human
uguauagcucagccucaucugaag

SEQ ID NO: 1024483 - RNA, 25 nt, Human
uguauuaaaaagcaaaaacaaaaca

SEQ ID NO: 1024484 - RNA, 26 nt, Human
ugucuccagguuagagcauggguggu

SEQ ID NO: 1024485 - RNA, 24 nt, Human
uuaaaaaaaauagcaaaaaaaaaa

SEQ ID NO: 1024486 - RNA, 18 nt, Human
uucacaaaauauuagagg

SEQ ID NO: 1024487 - RNA, 24 nt, Human
uugucuugggccacacauaaagua

SEQ ID NO: 1024488 - RNA, 22 nt, Human
uuuacauaacucaggccacccu

SEQ ID NO: 1024489 - RNA, 18 nt, Human
uuucuuggggacaagagu

SEQ ID NO: 1024490 - RNA, 23 nt, Human
aaacacaugcacacugguaacaa

SEQ ID NO: 1024491 - RNA, 22 nt, Human
aaaggcagagauggagaggaga

SEQ ID NO: 1024492 - RNA, 26 nt, Human
acacagguccagaggccucgccugga

SEQ ID NO: 1024493 - RNA, 22 nt, Human
agaaaacauuucccuggaggcu

SEQ ID NO: 1024494 - RNA, 21 nt, Human
agaguuuccggcuggcucagg

SEQ ID NO: 1024495 - RNA, 26 nt, Human
aggaagagggugcaggccuuuccugg

SEQ ID NO: 1024496 - RNA, 21 nt, Human
aggcagagauggagaggagac

SEQ ID NO: 1024497 - RNA, 20 nt, Human
aggcagagauggagaggagg

SEQ ID NO: 1024498 - RNA, 21 nt, Human
agggagcuggcuuccugggag

SEQ ID NO: 1024499 - RNA, 18 nt, Human
aggugguucuagaagcag

SEQ ID NO: 1024500 - RNA, 20 nt, Human
aggugguucuagaagcagga

SEQ ID NO: 1024501 - RNA, 23 nt, Human
caaaccccuucagcugugcuaag

SEQ ID NO: 1024502 - RNA, 24 nt, Human
cacauaguguuucuacaggcacgc

SEQ ID NO: 1024503 - RNA, 22 nt, Human
cacugguaacaaaggcagagau

SEQ ID NO: 1024504 - RNA, 21 nt, Human
caggaagagggugcaggccuu

SEQ ID NO: 1024505 - RNA, 20 nt, Human
ccccagcucgcccucgugcc

SEQ ID NO: 1024506 - RNA, 20 nt, Human
ccccugaggagugaaguaga

SEQ ID NO: 1024507 - RNA, 23 nt, Human
cccugaggagugaaguagaaggg

SEQ ID NO: 1024508 - RNA, 19 nt, Human
ccucucugcaaagcuccug

SEQ ID NO: 1024509 - RNA, 18 nt, Human
cgcggccccagcucgccc

SEQ ID NO: 1024510 - RNA, 19 nt, Human
cuucaggaaagaggguauc

SEQ ID NO: 1024511 - RNA, 21 nt, Human
gaacacagguccagaggccuc

SEQ ID NO: 1024512 - RNA, 24 nt, Human
gaggaagaguuuccggcuggcuca

SEQ ID NO: 1024513 - RNA, 20 nt, Human
gcaggccuuuccuggugccc

SEQ ID NO: 1024514 - RNA, 23 nt, Human
gguaacaaaggcagagauggaga

SEQ ID NO: 1024515 - RNA, 31 nt, Human
uaaaaaaacacacaaacacaugcacacuggg

SEQ ID NO: 1024516 - RNA, 19 nt, Human
uaacuggccgagucaauau

SEQ ID NO: 1024517 - RNA, 22 nt, Human
uaagaccggacugacaagcuag

SEQ ID NO: 1024518 - RNA, 22 nt, Human
uaccugaggugguucuagaagc

SEQ ID NO: 1024519 - RNA, 22 nt, Human
ucacaaaccccuucagcugugc

SEQ ID NO: 1024520 - RNA, 21 nt, Human
uccuggugcccaccagccuga

SEQ ID NO: 1024521 - RNA, 19 nt, Human
ucucuaagaccggacugac

SEQ ID NO: 1024522 - RNA, 21 nt, Human
ucugcaaagcuccugaggggc

SEQ ID NO: 1024523 - RNA, 24 nt, Human
ugacaggacuuuggcacaggaaca

SEQ ID NO: 1024524 - RNA, 23 nt, Human
ugaccacauaguguuucuacagg

SEQ ID NO: 1024525 - RNA, 20 nt, Human
uggcacaggaacacaggucc

SEQ ID NO: 1024526 - RNA, 22 nt, Human
ugggagggauguucuccccgga

SEQ ID NO: 1024527 - RNA, 18 nt, Human
ugguucuagaagcaggaa

SEQ ID NO: 1024528 - RNA, 23 nt, Human
uucacaaaccccuucagcugugc

SEQ ID NO: 1024529 - RNA, 19 nt, Human
uucuacaggcacgccucac

SEQ ID NO: 1024530 - RNA, 23 nt, Human
uucuccccggaaggcuggaggaa

SEQ ID NO: 1024531 - RNA, 25 nt, Human
uuuccuggugcccaccagccugaca

SEQ ID NO: 1024532 - RNA, 24 nt, Human
uuuggcacaggaacacagguccag

SEQ ID NO: 1024533 - RNA, 24 nt, Human
uuuuuuuuuuuuuuuuuuaacugg

SEQ ID NO: 1024534 - RNA, 24 nt, Human
aaagugcugggauuauagguguga

SEQ ID NO: 1024535 - RNA, 18 nt, Human
aaauguguagaaaggcag

SEQ ID NO: 1024536 - RNA, 27 nt, Human
aagaaaacaaagccuuaggccgggcgu

SEQ ID NO: 1024537 - RNA, 27 nt, Human
aagcaauucuccugacucauccucccg

SEQ ID NO: 1024538 - RNA, 18 nt, Human
aagggcccagcugacaaa

SEQ ID NO: 1024539 - RNA, 21 nt, Human
aagucaaggaaaugaaaacau

SEQ ID NO: 1024540 - RNA, 18 nt, Human
aagugcugggauuauagg

SEQ ID NO: 1024541 - RNA, 26 nt, Human
aagugcugggauuauaggugugagcc

SEQ ID NO: 1024542 - RNA, 24 nt, Human
aaucaccugaacccguguggcaga

SEQ ID NO: 1024543 - RNA, 18 nt, Human
acaccacugcacuccagc

SEQ ID NO: 1024544 - RNA, 20 nt, Human
acaccacugcacuccagccu

SEQ ID NO: 1024545 - RNA, 20 nt, Human
acagggcgagacuccgucuc

SEQ ID NO: 1024546 - RNA, 24 nt, Human
acagggcgagacuccgucucaaaa

SEQ ID NO: 1024547 - RNA, 24 nt, Human
acaugaggucaggaguuugggacc

SEQ ID NO: 1024548 - RNA, 18 nt, Human
acauggcaaaccccaucu

SEQ ID NO: 1024549 - RNA, 19 nt, Human
acauggcaaaccccaucuc

SEQ ID NO: 1024550 - RNA, 19 nt, Human
accacugcacuccagccug

SEQ ID NO: 1024551 - RNA, 24 nt, Human
accacugcacuccagccuggguga

SEQ ID NO: 1024552 - RNA, 24 nt, Human
accauguuggccaggcuggucuug

SEQ ID NO: 1024553 - RNA, 24 nt, Human
accccaucucuacuaaaaauacaa

SEQ ID NO: 1024554 - RNA, 18 nt, Human
acgggguuucaccauguu

SEQ ID NO: 1024555 - RNA, 23 nt, Human
acgggguuucaccauguuggcca

SEQ ID NO: 1024556 - RNA, 24 nt, Human
acgggguuucaccauguuggccag

SEQ ID NO: 1024557 - RNA, 24 nt, Human
acucuguugcccaggcuggagugc

SEQ ID NO: 1024558 - RNA, 18 nt, Human
acugcacuccagccuggg

SEQ ID NO: 1024559 - RNA, 24 nt, Human
acugcacuccagccugggugacag

SEQ ID NO: 1024560 - RNA, 18 nt, Human
agaaaggcagaaaugagg

SEQ ID NO: 1024561 - RNA, 22 nt, Human
agaggcugaggcaagagaauca

SEQ ID NO: 1024562 - RNA, 18 nt, Human
agagguugcagugagccg

SEQ ID NO: 1024563 - RNA, 19 nt, Human
agauguugggaaucagaga

SEQ ID NO: 1024564 - RNA, 24 nt, Human
agcacuuugggaggcugagguggg

SEQ ID NO: 1024565 - RNA, 23 nt, Human
agccgggcguggugacacaugcc

SEQ ID NO: 1024566 - RNA, 24 nt, Human
agccugggugacagggcgagacuc

SEQ ID NO: 1024567 - RNA, 23 nt, Human
agccuguaaucccagcacuuugg

SEQ ID NO: 1024568 - RNA, 21 nt, Human
aggaggugagccacuccuugu

SEQ ID NO: 1024569 - RNA, 18 nt, Human
aggcaagagaaucaccug

SEQ ID NO: 1024570 - RNA, 18 nt, Human
aggcaagagaaucaccug

SEQ ID NO: 1024571 - RNA, 24 nt, Human
aggcaagagaaucaccugaacccg

SEQ ID NO: 1024572 - RNA, 18 nt, Human
aggccgggcgugguggcu

SEQ ID NO: 1024573 - RNA, 21 nt, Human
aggcugagguggguggauuac

SEQ ID NO: 1024574 - RNA, 25 nt, Human
aggcuggagugcaguggcacaaucu

SEQ ID NO: 1024575 - RNA, 20 nt, Human
agguggguggauuacaugag

SEQ ID NO: 1024576 - RNA, 18 nt, Human
aguaacugggauuauagg

SEQ ID NO: 1024577 - RNA, 24 nt, Human
agugacaagaaguaaauguguaga

SEQ ID NO: 1024578 - RNA, 21 nt, Human
agugcaguggcacaaucucag

SEQ ID NO: 1024579 - RNA, 21 nt, Human
augcugccuucuuuacaggca

SEQ ID NO: 1024580 - RNA, 19 nt, Human
auugcacccagccuguuac

SEQ ID NO: 1024581 - RNA, 22 nt, Human
auugcacccagccuguuaccag

SEQ ID NO: 1024582 - RNA, 24 nt, Human
caaagugcugggauuauaggugug

SEQ ID NO: 1024583 - RNA, 23 nt, Human
caaccuccaucuccuggguucaa

SEQ ID NO: 1024584 - RNA, 21 nt, Human
caaggaaaugaaaacauggca

SEQ ID NO: 1024585 - RNA, 21 nt, Human
cacaauggugacugagauggg

SEQ ID NO: 1024586 - RNA, 21 nt, Human
cacaccacugcacuccagccu

SEQ ID NO: 1024587 - RNA, 18 nt, Human
cacaggcaaggaggugag

SEQ ID NO: 1024588 - RNA, 21 nt, Human
caccauguuggccaggcuggu

SEQ ID NO: 1024589 - RNA, 23 nt, Human
caccauguuggccaggcuggucu

SEQ ID NO: 1024590 - RNA, 24 nt, Human
caccauguuggccaggcuggucuu

SEQ ID NO: 1024591 - RNA, 27 nt, Human
caccauguuggccaggcuggucuugaa

SEQ ID NO: 1024592 - RNA, 22 nt, Human
cacuccagccugggugacaggg

SEQ ID NO: 1024593 - RNA, 23 nt, Human
cacuccagccugggugacagggc

SEQ ID NO: 1024594 - RNA, 24 nt, Human
cacuccagccugggugacagggcg

SEQ ID NO: 1024595 - RNA, 24 nt, Human
cacucuguugcccaggcuggagug

SEQ ID NO: 1024596 - RNA, 23 nt, Human
cacugcaaccuccaucuccuggg

SEQ ID NO: 1024597 - RNA, 19 nt, Human
cacugcacuccagccuggg

SEQ ID NO: 1024598 - RNA, 19 nt, Human
cacugcacuccagccuggg

SEQ ID NO: 1024599 - RNA, 22 nt, Human
cacugcacuccagccuggguga

SEQ ID NO: 1024600 - RNA, 23 nt, Human
cacugcacuccagccugggugac

SEQ ID NO: 1024601 - RNA, 24 nt, Human
cacugcacuccagccugggugaca

SEQ ID NO: 1024602 - RNA, 24 nt, Human
cacugcacuccagccugggugaca

SEQ ID NO: 1024603 - RNA, 24 nt, Human
cagcacuuugggaggcugaggugg

SEQ ID NO: 1024604 - RNA, 20 nt, Human
caggugaaguguggggcuug

SEQ ID NO: 1024605 - RNA, 22 nt, Human
cauaaagaguggaggaaauggu

SEQ ID NO: 1024606 - RNA, 24 nt, Human
caugaggucaggaguuugggacca

SEQ ID NO: 1024607 - RNA, 24 nt, Human
cauguuggccaggcuggucuugaa

SEQ ID NO: 1024608 - RNA, 20 nt, Human
cauugcacccagccuguuac

SEQ ID NO: 1024609 - RNA, 23 nt, Human
cauugcacccagccuguuaccag

SEQ ID NO: 1024610 - RNA, 21 nt, Human
ccaaagugcugggauuauagg

SEQ ID NO: 1024611 - RNA, 24 nt, Human
ccaaagugcugggauuauaggugu

SEQ ID NO: 1024612 - RNA, 24 nt, Human
ccacucuguugcccaggcuggagu

SEQ ID NO: 1024613 - RNA, 20 nt, Human
ccacugcacuccagccuggg

SEQ ID NO: 1024614 - RNA, 20 nt, Human
ccacugcacuccagccuggg

SEQ ID NO: 1024615 - RNA, 21 nt, Human
ccacugcacuccagccugggu

SEQ ID NO: 1024616 - RNA, 21 nt, Human
ccacugcacuccagccugggu

SEQ ID NO: 1024617 - RNA, 23 nt, Human
ccacugcacuccagccuggguga

SEQ ID NO: 1024618 - RNA, 24 nt, Human
ccacugcacuccagccugggugac

SEQ ID NO: 1024619 - RNA, 20 nt, Human
ccagagugacaagaaguaaa

SEQ ID NO: 1024620 - RNA, 18 nt, Human
ccauugcacccagccugu

SEQ ID NO: 1024621 - RNA, 23 nt, Human
cccgaguaacugggauuauaggu

SEQ ID NO: 1024622 - RNA, 24 nt, Human
cccgaguaacugggauuauaggug

SEQ ID NO: 1024623 - RNA, 18 nt, Human
ccgagcucacaccacugc

SEQ ID NO: 1024624 - RNA, 21 nt, Human
ccucaagugauccgccucccu

SEQ ID NO: 1024625 - RNA, 24 nt, Human
ccucucgugagccagguacugggc

SEQ ID NO: 1024626 - RNA, 18 nt, Human
ccugaccucaagugaucc

SEQ ID NO: 1024627 - RNA, 19 nt, Human
ccugaccucaagugauccg

SEQ ID NO: 1024628 - RNA, 24 nt, Human
ccugaccucaagugauccgccucc

SEQ ID NO: 1024629 - RNA, 23 nt, Human
ccuggccuacauggcaaacccca

SEQ ID NO: 1024630 - RNA, 22 nt, Human
ccugggugacagggcgagacuc

SEQ ID NO: 1024631 - RNA, 23 nt, Human
ccuggguucaagcaauucuccug

SEQ ID NO: 1024632 - RNA, 22 nt, Human
ccuguaaucccagcacuuuggg

SEQ ID NO: 1024633 - RNA, 18 nt, Human
ccuguaaucccagcuacu

SEQ ID NO: 1024634 - RNA, 22 nt, Human
ccuguaaucccagcuacuucag

SEQ ID NO: 1024635 - RNA, 24 nt, Human
cgggguuucaccauguuggccagg

SEQ ID NO: 1024636 - RNA, 23 nt, Human
cuagcauagcaaaaguggggaau

SEQ ID NO: 1024637 - RNA, 24 nt, Human
cucacaccacugcacuccagccug

SEQ ID NO: 1024638 - RNA, 24 nt, Human
cucacugcaaccuccaucuccugg

SEQ ID NO: 1024639 - RNA, 21 nt, Human
cuccuggguucaagcaauucu

SEQ ID NO: 1024640 - RNA, 23 nt, Human
cugcaaccuccaucuccuggguu

SEQ ID NO: 1024641 - RNA, 24 nt, Human
cugcaaccuccaucuccuggguuc

SEQ ID NO: 1024642 - RNA, 20 nt, Human
cugccuucuuuacaggcaag

SEQ ID NO: 1024643 - RNA, 21 nt, Human
cugggauuauaggugugagcc

SEQ ID NO: 1024644 - RNA, 21 nt, Human
gacacaugccuguaaucccag

SEQ ID NO: 1024645 - RNA, 24 nt, Human
gacagggcgagacuccgucucaaa

SEQ ID NO: 1024646 - RNA, 20 nt, Human
gaccucaagugauccgccuc

SEQ ID NO: 1024647 - RNA, 24 nt, Human
gagacgggguuucaccauguuggc

SEQ ID NO: 1024648 - RNA, 23 nt, Human
gagcucacaccacugcacuccag

SEQ ID NO: 1024649 - RNA, 21 nt, Human
gauccgccucccucagccucc

SEQ ID NO: 1024650 - RNA, 20 nt, Human
gauggggcuucagggaagaa

SEQ ID NO: 1024651 - RNA, 21 nt, Human
gauuacaugaggucaggaguu

SEQ ID NO: 1024652 - RNA, 21 nt, Human
gauuacaugaggucaggaguu

SEQ ID NO: 1024653 - RNA, 24 nt, Human
gauuacaugaggucaggaguuugg

SEQ ID NO: 1024654 - RNA, 18 nt, Human
gauuauaggugugagcca

SEQ ID NO: 1024655 - RNA, 21 nt, Human
gcaagagaaucaccugaaccc

SEQ ID NO: 1024656 - RNA, 24 nt, Human
gcacuccagccugggugacagggc

SEQ ID NO: 1024657 - RNA, 20 nt, Human
gcccaggcuggagugcagug

SEQ ID NO: 1024658 - RNA, 20 nt, Human
gcccucaaaaacuaacaaaa

SEQ ID NO: 1024659 - RNA, 18 nt, Human
gccugggugacagggcga

SEQ ID NO: 1024660 - RNA, 19 nt, Human
gccuguaaucccagcacuu

SEQ ID NO: 1024661 - RNA, 20 nt, Human
gccuguaaucccagcuacuu

SEQ ID NO: 1024662 - RNA, 19 nt, Human
gcuggagugcaguggcaca

SEQ ID NO: 1024663 - RNA, 23 nt, Human
gcuggucuugaacuccugaccuc

SEQ ID NO: 1024664 - RNA, 20 nt, Human
ggaaucagagauggaaauuc

SEQ ID NO: 1024665 - RNA, 19 nt, Human
ggcagagguugcagugagc

SEQ ID NO: 1024666 - RNA, 20 nt, Human
ggcagagguugcagugagcc

SEQ ID NO: 1024667 - RNA, 23 nt, Human
ggcagagguugcagugagccgag

SEQ ID NO: 1024668 - RNA, 19 nt, Human
ggccauaaagaguggagga

SEQ ID NO: 1024669 - RNA, 23 nt, Human
ggcgugguggcuuaagccuguaa

SEQ ID NO: 1024670 - RNA, 24 nt, Human
ggcuggucuugaacuccugaccuc

SEQ ID NO: 1024671 - RNA, 21 nt, Human
ggcuuaagccuguaaucccag

SEQ ID NO: 1024672 - RNA, 21 nt, Human
gggaagaaaagaaaaugaggc

SEQ ID NO: 1024673 - RNA, 23 nt, Human
gggaagaaaagaaaaugaggcaa

SEQ ID NO: 1024674 - RNA, 22 nt, Human
gggaaucagagauggaaauucu

SEQ ID NO: 1024675 - RNA, 24 nt, Human
gggcguggugacacaugccuguaa

SEQ ID NO: 1024676 - RNA, 23 nt, Human
gggguuucaccauguuggccagg

SEQ ID NO: 1024677 - RNA, 19 nt, Human
ggucuugaacuccugaccu

SEQ ID NO: 1024678 - RNA, 24 nt, Human
ggugacacaugccuguaaucccag

SEQ ID NO: 1024679 - RNA, 21 nt, Human
gguggauuacaugaggucagg

SEQ ID NO: 1024680 - RNA, 24 nt, Human
gguggcuuaagccuguaaucccag

SEQ ID NO: 1024681 - RNA, 20 nt, Human
gguugcagugagccgagcuc

SEQ ID NO: 1024682 - RNA, 23 nt, Human
guagagacgggguuucaccaugu

SEQ ID NO: 1024683 - RNA, 24 nt, Human
gugauccgccucccucagccuccc

SEQ ID NO: 1024684 - RNA, 18 nt, Human
guugcagugagccgagcu

SEQ ID NO: 1024685 - RNA, 24 nt, Human
uaagccuguaaucccagcacuuug

SEQ ID NO: 1024686 - RNA, 30 nt, Human
uaauuuuuuuugucuguuuuuaguagagaa

SEQ ID NO: 1024687 - RNA, 18 nt, Human
uacauggcaaaccccauc

SEQ ID NO: 1024688 - RNA, 19 nt, Human
uaccaggugaagugugggg

SEQ ID NO: 1024689 - RNA, 22 nt, Human
uagagacgggguuucaccaugu

SEQ ID NO: 1024690 - RNA, 19 nt, Human
uaggugccagccgccaugc

SEQ ID NO: 1024691 - RNA, 24 nt, Human
uaguagagacgggguuucaccaug

SEQ ID NO: 1024692 - RNA, 26 nt, Human
uaguagagacgggguuucaccauguu

SEQ ID NO: 1024693 - RNA, 20 nt, Human
ucaaggaaaugaaaacaugg

SEQ ID NO: 1024694 - RNA, 23 nt, Human
ucacaccacugcacuccagccug

SEQ ID NO: 1024695 - RNA, 24 nt, Human
ucacugcaaccuccaucuccuggg

SEQ ID NO: 1024696 - RNA, 25 nt, Human
ucacugcaaccuccaucuccugggu

SEQ ID NO: 1024697 - RNA, 26 nt, Human
ucacugcaaccuccaucuccuggguu

SEQ ID NO: 1024698 - RNA, 24 nt, Human
ucagaagucuuuuugaaugcuccu

SEQ ID NO: 1024699 - RNA, 24 nt, Human
ucagggaagaaaagaaaaugaggc

SEQ ID NO: 1024700 - RNA, 23 nt, Human
uccagccugggugacagggcgag

SEQ ID NO: 1024701 - RNA, 24 nt, Human
uccagccugggugacagggcgaga

SEQ ID NO: 1024702 - RNA, 23 nt, Human
ucccaaagugcugggauuauagg

SEQ ID NO: 1024703 - RNA, 19 nt, Human
ucccacucuguugcccagg

SEQ ID NO: 1024704 - RNA, 24 nt, Human
ucccacucuguugcccaggcugga

SEQ ID NO: 1024705 - RNA, 26 nt, Human
ucccacucuguugcccaggcuggagu

SEQ ID NO: 1024706 - RNA, 27 nt, Human
ucccacucuguugcccaggcuggagug

SEQ ID NO: 1024707 - RNA, 23 nt, Human
ucccgaguaacugggauuauagg

SEQ ID NO: 1024708 - RNA, 24 nt, Human
ucccgaguaacugggauuauaggu

SEQ ID NO: 1024709 - RNA, 23 nt, Human
ucccucagccucccaaagugcug

SEQ ID NO: 1024710 - RNA, 24 nt, Human
ucccucagccucccaaagugcugg

SEQ ID NO: 1024711 - RNA, 21 nt, Human
uccgccucccucagccuccca

SEQ ID NO: 1024712 - RNA, 18 nt, Human
uccugggugcgguggcac

SEQ ID NO: 1024713 - RNA, 21 nt, Human
uccuggguucaagcaauucuc

SEQ ID NO: 1024714 - RNA, 24 nt, Human
uccuggguucaagcaauucuccug

SEQ ID NO: 1024715 - RNA, 24 nt, Human
ucuccuggguucaagcaauucucc

SEQ ID NO: 1024716 - RNA, 21 nt, Human
ucucuacuaaaaauacaaaaa

SEQ ID NO: 1024717 - RNA, 18 nt, Human
ucuguugcccaggcugga

SEQ ID NO: 1024718 - RNA, 21 nt, Human
ucuugaacuccugaccucaag

SEQ ID NO: 1024719 - RNA, 19 nt, Human
ucuuuugugugugugaauc

SEQ ID NO: 1024720 - RNA, 19 nt, Human
ugaagggagagaagaggaa

SEQ ID NO: 1024721 - RNA, 19 nt, Human
ugaaugcugccuucuuuac

SEQ ID NO: 1024722 - RNA, 23 nt, Human
ugacaagaaguaaauguguagaa

SEQ ID NO: 1024723 - RNA, 21 nt, Human
ugaccucaagugauccgccuc

SEQ ID NO: 1024724 - RNA, 22 nt, Human
ugagauggagucccacucuguu

SEQ ID NO: 1024725 - RNA, 20 nt, Human
ugaggcaagagaaucaccug

SEQ ID NO: 1024726 - RNA, 24 nt, Human
ugaggcaagagaaucaccugaacc

SEQ ID NO: 1024727 - RNA, 25 nt, Human
ugaggcaagagaaucaccugaaccc

SEQ ID NO: 1024728 - RNA, 22 nt, Human
ugagguggguggauuacaugag

SEQ ID NO: 1024729 - RNA, 23 nt, Human
ugagguggguggauuacaugagg

SEQ ID NO: 1024730 - RNA, 24 nt, Human
ugagguggguggauuacaugaggu

SEQ ID NO: 1024731 - RNA, 26 nt, Human
ugagguggguggauuacaugagguca

SEQ ID NO: 1024732 - RNA, 20 nt, Human
ugcacccagccuguuaccag

SEQ ID NO: 1024733 - RNA, 22 nt, Human
ugcaguggcacaaucucagcuc

SEQ ID NO: 1024734 - RNA, 18 nt, Human
ugcccaggcuggagugca

SEQ ID NO: 1024735 - RNA, 21 nt, Human
ugcccaggcuggagugcagug

SEQ ID NO: 1024736 - RNA, 22 nt, Human
ugcccaggcuggagugcagugg

SEQ ID NO: 1024737 - RNA, 24 nt, Human
ugcccaggcuggagugcaguggca

SEQ ID NO: 1024738 - RNA, 19 nt, Human
ugccuguaaucccagcuac

SEQ ID NO: 1024739 - RNA, 18 nt, Human
ugccuuauucaucuugcu

SEQ ID NO: 1024740 - RNA, 20 nt, Human
ugccuuauucaucuugcuaa

SEQ ID NO: 1024741 - RNA, 18 nt, Human
uggacgauuuaccaggug

SEQ ID NO: 1024742 - RNA, 18 nt, Human
uggaggcaagccagcuuc

SEQ ID NO: 1024743 - RNA, 18 nt, Human
uggagugcaguggcacaa

SEQ ID NO: 1024744 - RNA, 23 nt, Human
uggagugcaguggcacaaucuca

SEQ ID NO: 1024745 - RNA, 24 nt, Human
uggagugcaguggcacaaucucag

SEQ ID NO: 1024746 - RNA, 23 nt, Human
uggauuacaugaggucaggaguu

SEQ ID NO: 1024747 - RNA, 24 nt, Human
uggauuacaugaggucaggaguuu

SEQ ID NO: 1024748 - RNA, 24 nt, Human
uggcacaaucucagcucacugcaa

SEQ ID NO: 1024749 - RNA, 21 nt, Human
uggcacaguuaaaguuggcau

SEQ ID NO: 1024750 - RNA, 24 nt, Human
uggccaggcuggucuugaacuccu

SEQ ID NO: 1024751 - RNA, 22 nt, Human
uggcuuaagccuguaaucccag

SEQ ID NO: 1024752 - RNA, 24 nt, Human
uggcuuaagccuguaaucccagca

SEQ ID NO: 1024753 - RNA, 23 nt, Human
ugggaccagccuggccuacaugg

SEQ ID NO: 1024754 - RNA, 20 nt, Human
ugggaggcugaggugggugg

SEQ ID NO: 1024755 - RNA, 22 nt, Human
ugggaggcugagguggguggau

SEQ ID NO: 1024756 - RNA, 23 nt, Human
ugggaggcugagguggguggauu

SEQ ID NO: 1024757 - RNA, 20 nt, Human
ugggauuauaggugccagcc

SEQ ID NO: 1024758 - RNA, 21 nt, Human
ugggauuauaggugccagccg

SEQ ID NO: 1024759 - RNA, 24 nt, Human
ugggauuauaggugccagccgcca

SEQ ID NO: 1024760 - RNA, 25 nt, Human
ugggauuauaggugccagccgccau

SEQ ID NO: 1024761 - RNA, 18 nt, Human
ugggauuauaggugugag

SEQ ID NO: 1024762 - RNA, 19 nt, Human
ugggauuauaggugugagc

SEQ ID NO: 1024763 - RNA, 21 nt, Human
ugggauuauaggugugagcca

SEQ ID NO: 1024764 - RNA, 21 nt, Human
ugggauuauaggugugagcca

SEQ ID NO: 1024765 - RNA, 22 nt, Human
ugggauuauaggugugagccau

SEQ ID NO: 1024766 - RNA, 24 nt, Human
ugggauuauaggugugagccauug

SEQ ID NO: 1024767 - RNA, 24 nt, Human
uggguggauuacaugaggucagga

SEQ ID NO: 1024768 - RNA, 21 nt, Human
uggguucaagcaauucuccug

SEQ ID NO: 1024769 - RNA, 18 nt, Human
ugguaucuuuugugugug

SEQ ID NO: 1024770 - RNA, 24 nt, Human
uggugacacaugccuguaauccca

SEQ ID NO: 1024771 - RNA, 24 nt, Human
ugguggcuuaagccuguaauccca

SEQ ID NO: 1024772 - RNA, 25 nt, Human
uguagaaaggcagaaaugaggaaaa

SEQ ID NO: 1024773 - RNA, 28 nt, Human
ugugaaagugaaacaauuagaaaugagu

SEQ ID NO: 1024774 - RNA, 18 nt, Human
ugugaaucuggaggcaag

SEQ ID NO: 1024775 - RNA, 21 nt, Human
uguugcccaggcuggagugca

SEQ ID NO: 1024776 - RNA, 19 nt, Human
uguuuauucucucauugca

SEQ ID NO: 1024777 - RNA, 20 nt, Human
uuagccgggcguggugacac

SEQ ID NO: 1024778 - RNA, 24 nt, Human
uuagccgggcguggugacacaugc

SEQ ID NO: 1024779 - RNA, 26 nt, Human
uuaggccgggcgugguggcuuaagcc

SEQ ID NO: 1024780 - RNA, 18 nt, Human
uuaguagagacgggguuu

SEQ ID NO: 1024781 - RNA, 22 nt, Human
uuaguagagacgggguuucacc

SEQ ID NO: 1024782 - RNA, 24 nt, Human
uuaguagagacgggguuucaccau

SEQ ID NO: 1024783 - RNA, 18 nt, Human
uuauaggugugagccauu

SEQ ID NO: 1024784 - RNA, 21 nt, Human
uucaagcaauucuccugacuc

SEQ ID NO: 1024785 - RNA, 22 nt, Human
uucaguguuuauucucucauug

SEQ ID NO: 1024786 - RNA, 18 nt, Human
uugcagugagccgagcuc

SEQ ID NO: 1024787 - RNA, 20 nt, Human
uugcagugagccgagcucac

SEQ ID NO: 1024788 - RNA, 24 nt, Human
uuucaccauguuggccaggcuggu

SEQ ID NO: 1024789 - RNA, 24 nt, Human
uuuugucuguuuuuaguagagacg

SEQ ID NO: 1024790 - RNA, 24 nt, Human
uuuuuaguagagacgggguuucac

SEQ ID NO: 1024791 - RNA, 24 nt, Human
uuuuugucuguuuuuaguagagaa

SEQ ID NO: 1024792 - RNA, 23 nt, Human
uuuuuugucuguuuuuaguagag

SEQ ID NO: 1024793 - RNA, 22 nt, Human
uuuuuuuuuuuuuugagaugga

SEQ ID NO: 1024794 - RNA, 18 nt, Human
uuuuuuuuuuuuuuuuug

SEQ ID NO: 1024795 - RNA, 28 nt, Human
accuugaaggaugcuggaagacucagag

SEQ ID NO: 1024796 - RNA, 21 nt, Human
agccagcgcuggggcaacccg

SEQ ID NO: 1024797 - RNA, 21 nt, Human
agcgcccagucgagcccgggg

SEQ ID NO: 1024798 - RNA, 19 nt, Human
caggccccaggugcggacg

SEQ ID NO: 1024799 - RNA, 23 nt, Human
ccccagaguucagaggucuuggg

SEQ ID NO: 1024800 - RNA, 25 nt, Human
cccggcccugaggcaagguacuuug

SEQ ID NO: 1024801 - RNA, 21 nt, Human
ccgagauggcggcagccagcg

SEQ ID NO: 1024802 - RNA, 24 nt, Human
ccgucccuucgcuggugggaagaa

SEQ ID NO: 1024803 - RNA, 19 nt, Human
cggggcagcggcugccggg

SEQ ID NO: 1024804 - RNA, 20 nt, Human
cucccggcgugcuccgcggc

SEQ ID NO: 1024805 - RNA, 19 nt, Human
cucuuuagcugugcauagc

SEQ ID NO: 1024806 - RNA, 25 nt, Human
cugauggcgguagcagcgcccaguc

SEQ ID NO: 1024807 - RNA, 23 nt, Human
gagauggcggcagccagcgcugg

SEQ ID NO: 1024808 - RNA, 19 nt, Human
gcagcggcugccgggccgg

SEQ ID NO: 1024809 - RNA, 22 nt, Human
ggaagaagccgagauggcggca

SEQ ID NO: 1024810 - RNA, 22 nt, Human
uccccagaguucagaggucuug

SEQ ID NO: 1024811 - RNA, 19 nt, Human
ucccggcgugcuccgcggc

SEQ ID NO: 1024812 - RNA, 24 nt, Human
ucgcuggugggaagaagccgagau

SEQ ID NO: 1024813 - RNA, 23 nt, Human
ucuggcuuccacgccuuggggcu

SEQ ID NO: 1024814 - RNA, 20 nt, Human
ugaaggaugcuggaagacuc

SEQ ID NO: 1024815 - RNA, 20 nt, Human
ugaguuacagacggaaggag

SEQ ID NO: 1024816 - RNA, 24 nt, Human
uggaagacucagaguccccagagu

SEQ ID NO: 1024817 - RNA, 22 nt, Human
uggcggcagccagcgcuggggc

SEQ ID NO: 1024818 - RNA, 21 nt, Human
ugggaagaagccgagauggcg

SEQ ID NO: 1024819 - RNA, 22 nt, Human
caacgcuacuuccagaccucaa

SEQ ID NO: 1024820 - RNA, 20 nt, Human
caacuugaaagcagccaucc

SEQ ID NO: 1024821 - RNA, 25 nt, Human
cgcccaacugcaaugaccugcccac

SEQ ID NO: 1024822 - RNA, 18 nt, Human
cuagggguggcaggggag

SEQ ID NO: 1024823 - RNA, 20 nt, Human
cugccacagcugcugagcgc

SEQ ID NO: 1024824 - RNA, 27 nt, Human
cugcugagcgcccaacugcaaugaccu

SEQ ID NO: 1024825 - RNA, 21 nt, Human
ucuuuaauugcaaacaacuug

SEQ ID NO: 1024826 - RNA, 23 nt, Human
ugaaagcagccauccuaggggug

SEQ ID NO: 1024827 - RNA, 24 nt, Human
ugagcgcccaacugcaaugaccug

SEQ ID NO: 1024828 - RNA, 22 nt, Human
ugccacagcugcugagcgccca

SEQ ID NO: 1024829 - RNA, 18 nt, Human
ugcugagcgcccaacugc

SEQ ID NO: 1024830 - RNA, 23 nt, Human
uugaaagcagccauccuaggggu

SEQ ID NO: 1024831 - RNA, 24 nt, Human
aaacacccccggcacagccaugcc

SEQ ID NO: 1024832 - RNA, 23 nt, Human
aaaccaaggcucagagaggacca

SEQ ID NO: 1024833 - RNA, 24 nt, Human
aagcaggagcaucacuugaacucg

SEQ ID NO: 1024834 - RNA, 25 nt, Human
aagcaggagcaucacuugaacucgg

SEQ ID NO: 1024835 - RNA, 20 nt, Human
aaggucccacagggacccaa

SEQ ID NO: 1024836 - RNA, 33 nt, Human
acaaggucccacagggacccaagaauccaccuu

SEQ ID NO: 1024837 - RNA, 18 nt, Human
accaugcaugcacaaggu

SEQ ID NO: 1024838 - RNA, 25 nt, Human
acccuccccgacaggcaccgcuggu

SEQ ID NO: 1024839 - RNA, 21 nt, Human
acugcauuccagccuggcgac

SEQ ID NO: 1024840 - RNA, 23 nt, Human
acugcauuccagccuggcgacag

SEQ ID NO: 1024841 - RNA, 25 nt, Human
acugcauuccagccuggcgacagag

SEQ ID NO: 1024842 - RNA, 21 nt, Human
agacagcaguuauucugagca

SEQ ID NO: 1024843 - RNA, 23 nt, Human
agauggccccucuccccugcugg

SEQ ID NO: 1024844 - RNA, 20 nt, Human
agcagacggaaccagccaga

SEQ ID NO: 1024845 - RNA, 20 nt, Human
agccuggcgacagagugaaa

SEQ ID NO: 1024846 - RNA, 23 nt, Human
agcuggugggguucccacuccau

SEQ ID NO: 1024847 - RNA, 19 nt, Human
aggcaccgcuggcucuccu

SEQ ID NO: 1024848 - RNA, 20 nt, Human
aggcucagagaggaccaugc

SEQ ID NO: 1024849 - RNA, 21 nt, Human
agguggagguugcagugagcc

SEQ ID NO: 1024850 - RNA, 24 nt, Human
agguggagguugcagugagccgag

SEQ ID NO: 1024851 - RNA, 28 nt, Human
auagucccuguagucccagcuacucagg

SEQ ID NO: 1024852 - RNA, 23 nt, Human
aucacuugaacucgggaggugga

SEQ ID NO: 1024853 - RNA, 19 nt, Human
auugauaggaaggugggag

SEQ ID NO: 1024854 - RNA, 24 nt, Human
auugcccuacugcauuccagccug

SEQ ID NO: 1024855 - RNA, 21 nt, Human
caagugcacggagccccuucc

SEQ ID NO: 1024856 - RNA, 18 nt, Human
caaucccagguccuguag

SEQ ID NO: 1024857 - RNA, 20 nt, Human
cacugcugaagaaaccaagg

SEQ ID NO: 1024858 - RNA, 23 nt, Human
cacugcugcugucaccaucaacc

SEQ ID NO: 1024859 - RNA, 19 nt, Human
cagagcccagggcagugcu

SEQ ID NO: 1024860 - RNA, 19 nt, Human
cagccuggcgacagaguga

SEQ ID NO: 1024861 - RNA, 21 nt, Human
caggaagcccucagcaaacac

SEQ ID NO: 1024862 - RNA, 24 nt, Human
caggaggccgaagcaggagcauca

SEQ ID NO: 1024863 - RNA, 22 nt, Human
caggaugacaccugcaccugcu

SEQ ID NO: 1024864 - RNA, 23 nt, Human
cauuccagccuggcgacagagug

SEQ ID NO: 1024865 - RNA, 25 nt, Human
cauucccaguuuagauucccagggg

SEQ ID NO: 1024866 - RNA, 19 nt, Human
ccacugcggccagcaccgc

SEQ ID NO: 1024867 - RNA, 22 nt, Human
ccaggaugauguugccuccucu

SEQ ID NO: 1024868 - RNA, 22 nt, Human
ccaugccauagccagacaacag

SEQ ID NO: 1024869 - RNA, 20 nt, Human
ccccuagaaccuacugcggg

SEQ ID NO: 1024870 - RNA, 18 nt, Human
ccccuuccuccucggcca

SEQ ID NO: 1024871 - RNA, 22 nt, Human
cccucagcaaacacccccggca

SEQ ID NO: 1024872 - RNA, 21 nt, Human
ccgucuucccagggauggugg

SEQ ID NO: 1024873 - RNA, 26 nt, Human
ccucaccgccgaugagaccucccucg

SEQ ID NO: 1024874 - RNA, 22 nt, Human
ccuggcgacagagugaaauucc

SEQ ID NO: 1024875 - RNA, 21 nt, Human
ccuguagucccagcuacucag

SEQ ID NO: 1024876 - RNA, 22 nt, Human
ccuguagucccagcuacucagg

SEQ ID NO: 1024877 - RNA, 21 nt, Human
cgcccgucacgaugaccgucu

SEQ ID NO: 1024878 - RNA, 19 nt, Human
cgggagguggagguugcag

SEQ ID NO: 1024879 - RNA, 29 nt, Human
cgggagguggagguugcagugacaacggu

SEQ ID NO: 1024880 - RNA, 24 nt, Human
cgggagguggagguugcagugagc

SEQ ID NO: 1024881 - RNA, 21 nt, Human
cgggcugggaacucuagacac

SEQ ID NO: 1024882 - RNA, 21 nt, Human
cguacacuuagagcugccugu

SEQ ID NO: 1024883 - RNA, 19 nt, Human
cuacugcauuccagccugg

SEQ ID NO: 1024884 - RNA, 20 nt, Human
cuacugcauuccagccuggc

SEQ ID NO: 1024885 - RNA, 23 nt, Human
cuacugcauuccagccuggcgac

SEQ ID NO: 1024886 - RNA, 19 nt, Human
cucaggaugacaccugcac

SEQ ID NO: 1024887 - RNA, 19 nt, Human
cucucuggcugggcucugg

SEQ ID NO: 1024888 - RNA, 21 nt, Human
cuggcgacagagugaaauucc

SEQ ID NO: 1024889 - RNA, 20 nt, Human
cuggcuuucaaaucugcucc

SEQ ID NO: 1024890 - RNA, 18 nt, Human
cugggcucuggcacagga

SEQ ID NO: 1024891 - RNA, 19 nt, Human
cuucccagggaugguggcc

SEQ ID NO: 1024892 - RNA, 21 nt, Human
cuugaacucgggagguggagg

SEQ ID NO: 1024893 - RNA, 22 nt, Human
gaagcaggagcaucacuugaac

SEQ ID NO: 1024894 - RNA, 19 nt, Human
gaaggggacccgccugggc

SEQ ID NO: 1024895 - RNA, 23 nt, Human
gagguugcagugagccgagauug

SEQ ID NO: 1024896 - RNA, 23 nt, Human
gcauuccagccuggcgacagagu

SEQ ID NO: 1024897 - RNA, 22 nt, Human
gcccucagcaaacacccccggc

SEQ ID NO: 1024898 - RNA, 18 nt, Human
gcggccgccaguccuggg

SEQ ID NO: 1024899 - RNA, 18 nt, Human
gcgggcauggcggacagc

SEQ ID NO: 1024900 - RNA, 22 nt, Human
gcuguaccacaccaucauggga

SEQ ID NO: 1024901 - RNA, 22 nt, Human
gcuuccucaccgccgaugagac

SEQ ID NO: 1024902 - RNA, 23 nt, Human
ggaaccagccagagcccagggca

SEQ ID NO: 1024903 - RNA, 19 nt, Human
ggacccgccugggcuuccu

SEQ ID NO: 1024904 - RNA, 22 nt, Human
ggagguugcagugagccgagau

SEQ ID NO: 1024905 - RNA, 24 nt, Human
ggagguugcagugagccgagauug

SEQ ID NO: 1024906 - RNA, 26 nt, Human
ggcaagccccaccggugacauagucc

SEQ ID NO: 1024907 - RNA, 19 nt, Human
ggcacagccaugccauagc

SEQ ID NO: 1024908 - RNA, 24 nt, Human
ggcauggcggacagcuguccucgg

SEQ ID NO: 1024909 - RNA, 22 nt, Human
gggaugguggccuugcuggggc

SEQ ID NO: 1024910 - RNA, 21 nt, Human
guugcagugagccgagauugc

SEQ ID NO: 1024911 - RNA, 22 nt, Human
guugcagugagccgagauugcc

SEQ ID NO: 1024912 - RNA, 24 nt, Human
uacugcauuccagccuggcgacag

SEQ ID NO: 1024913 - RNA, 18 nt, Human
uagcagcagcuggugggg

SEQ ID NO: 1024914 - RNA, 21 nt, Human
ucacugcugcugucaccauca

SEQ ID NO: 1024915 - RNA, 22 nt, Human
ucacuugaacucgggaggugga

SEQ ID NO: 1024916 - RNA, 24 nt, Human
ucacuugaacucgggagguggagg

SEQ ID NO: 1024917 - RNA, 22 nt, Human
uccacugcggccagcaccgccc

SEQ ID NO: 1024918 - RNA, 18 nt, Human
uccagccuggcgacagag

SEQ ID NO: 1024919 - RNA, 24 nt, Human
ucccacagggacccaagaauccac

SEQ ID NO: 1024920 - RNA, 21 nt, Human
ucccacuccaugccgugcaga

SEQ ID NO: 1024921 - RNA, 19 nt, Human
uccccugcuggcagcagag

SEQ ID NO: 1024922 - RNA, 18 nt, Human
uccugggucucccggcuc

SEQ ID NO: 1024923 - RNA, 23 nt, Human
ucgcuguaccacaccaucauggg

SEQ ID NO: 1024924 - RNA, 20 nt, Human
ucugagcaucucacugcuga

SEQ ID NO: 1024925 - RNA, 19 nt, Human
ucugcaguuuggacuacca

SEQ ID NO: 1024926 - RNA, 20 nt, Human
ucuggcacaggaagcccuca

SEQ ID NO: 1024927 - RNA, 24 nt, Human
ugaagaaaccaaggcucagagagg

SEQ ID NO: 1024928 - RNA, 18 nt, Human
ugagagucugcaguuugg

SEQ ID NO: 1024929 - RNA, 22 nt, Human
ugagccgagauugcccuacugc

SEQ ID NO: 1024930 - RNA, 24 nt, Human
ugcaggccaguccacugcggccag

SEQ ID NO: 1024931 - RNA, 20 nt, Human
ugcaugcacaaggucccaca

SEQ ID NO: 1024932 - RNA, 18 nt, Human
ugccauagccagacaaca

SEQ ID NO: 1024933 - RNA, 21 nt, Human
ugccauagccagacaacagcu

SEQ ID NO: 1024934 - RNA, 18 nt, Human
ugcccuacugcauuccag

SEQ ID NO: 1024935 - RNA, 25 nt, Human
ugccuccucuccuggccaaguucca

SEQ ID NO: 1024936 - RNA, 19 nt, Human
ugcugcugucaccaucaac

SEQ ID NO: 1024937 - RNA, 20 nt, Human
ugcugcugucaccaucaacc

SEQ ID NO: 1024938 - RNA, 25 nt, Human
uggcugggcucuggcacaggaagcc

SEQ ID NO: 1024939 - RNA, 20 nt, Human
ugggcucuggcacaggaagc

SEQ ID NO: 1024940 - RNA, 23 nt, Human
uuagauucccaggggaagcauca

SEQ ID NO: 1024941 - RNA, 19 nt, Human
uucacggagcaccuuggaa

SEQ ID NO: 1024942 - RNA, 22 nt, Human
uucacggagcaccuuggaaccc

SEQ ID NO: 1024943 - RNA, 21 nt, Human
uuccaaggcggucugcuuccc

SEQ ID NO: 1024944 - RNA, 18 nt, Human
uucccagggaugguggcc

SEQ ID NO: 1024945 - RNA, 24 nt, Human
uugaacucgggagguggagguugc

SEQ ID NO: 1024946 - RNA, 19 nt, Human
uugcagugagccgagauug

SEQ ID NO: 1024947 - RNA, 20 nt, Human
uugcagugagccgagauugc

SEQ ID NO: 1024948 - RNA, 22 nt, Human
uugcagugagccgagauugccc

SEQ ID NO: 1024949 - RNA, 22 nt, Human
uuuuuuuuuuaaaugagcaagu

SEQ ID NO: 1024950 - RNA, 20 nt, Human
uuuuuuuuuuuuaaaugagc

SEQ ID NO: 1024951 - RNA, 23 nt, Human
uuuuuuuuuuuuuuuuuuaaaug

SEQ ID NO: 1024952 - RNA, 23 nt, Human
aaaaaaaaaaaaaaagaaaagaa

SEQ ID NO: 1024953 - RNA, 18 nt, Human
aaaauuagcugggcgugg

SEQ ID NO: 1024954 - RNA, 24 nt, Human
aaaauucccuuacugugccuacuu

SEQ ID NO: 1024955 - RNA, 19 nt, Human
aacacggugaaaccccauc

SEQ ID NO: 1024956 - RNA, 20 nt, Human
aacacggugaaaccccaucu

SEQ ID NO: 1024957 - RNA, 21 nt, Human
aacacggugaaaccccaucuc

SEQ ID NO: 1024958 - RNA, 21 nt, Human
aacacggugaaaccccaucuc

SEQ ID NO: 1024959 - RNA, 25 nt, Human
aaucgcuugaacccaggaggcgaga

SEQ ID NO: 1024960 - RNA, 18 nt, Human
acagagugaaacucuguc

SEQ ID NO: 1024961 - RNA, 19 nt, Human
acagagugaaacucugucu

SEQ ID NO: 1024962 - RNA, 20 nt, Human
acagagugaaacucugucuc

SEQ ID NO: 1024963 - RNA, 24 nt, Human
acagagugaaacucugucucaaaa

SEQ ID NO: 1024964 - RNA, 24 nt, Human
accccaucucugcuaaaaauacaa

SEQ ID NO: 1024965 - RNA, 24 nt, Human
accugaggucaggaguucaagacc

SEQ ID NO: 1024966 - RNA, 24 nt, Human
acuccagccugggugacagaguga

SEQ ID NO: 1024967 - RNA, 28 nt, Human
acucugucucaaaaaaaaaaaaaaagaa

SEQ ID NO: 1024968 - RNA, 18 nt, Human
agagugaaacucugucuc

SEQ ID NO: 1024969 - RNA, 24 nt, Human
agccuggccaacacggugaaaccc

SEQ ID NO: 1024970 - RNA, 22 nt, Human
agccugggugacagagugaaac

SEQ ID NO: 1024971 - RNA, 24 nt, Human
agccugggugacagagugaaacuc

SEQ ID NO: 1024972 - RNA, 18 nt, Human
agcuagagagaugccaca

SEQ ID NO: 1024973 - RNA, 23 nt, Human
agcugggcgugguggcaggcgcc

SEQ ID NO: 1024974 - RNA, 18 nt, Human
aggaggccugaagcacaa

SEQ ID NO: 1024975 - RNA, 23 nt, Human
aggcaggagaaucgcuugaaccc

SEQ ID NO: 1024976 - RNA, 24 nt, Human
aggcaggagaaucgcuugaaccca

SEQ ID NO: 1024977 - RNA, 22 nt, Human
aggcaguuggaucaccugaggu

SEQ ID NO: 1024978 - RNA, 26 nt, Human
aggcaguuggaucaccugaggucagg

SEQ ID NO: 1024979 - RNA, 18 nt, Human
aggccccagggggcccug

SEQ ID NO: 1024980 - RNA, 21 nt, Human
aggccgaggcaguuggaucac

SEQ ID NO: 1024981 - RNA, 20 nt, Human
aggcugaggcaggagaaucg

SEQ ID NO: 1024982 - RNA, 24 nt, Human
aggcugaggcaggagaaucgcuug

SEQ ID NO: 1024983 - RNA, 24 nt, Human
aguggcucacagcuguaaucccag

SEQ ID NO: 1024984 - RNA, 23 nt, Human
aguuggaucaccugaggucagga

SEQ ID NO: 1024985 - RNA, 24 nt, Human
aucaugccauugcacuccagccug

SEQ ID NO: 1024986 - RNA, 21 nt, Human
auugcacuccagccuggguga

SEQ ID NO: 1024987 - RNA, 24 nt, Human
auugcacuccagccugggugacag

SEQ ID NO: 1024988 - RNA, 22 nt, Human
caaggcaggaggcugagauggg

SEQ ID NO: 1024989 - RNA, 24 nt, Human
cacagcuguaaucccagcacuuug

SEQ ID NO: 1024990 - RNA, 20 nt, Human
cacaguuuaggauccaaaag

SEQ ID NO: 1024991 - RNA, 21 nt, Human
cacaguuuaggauccaaaagg

SEQ ID NO: 1024992 - RNA, 23 nt, Human
caccugaggucaggaguucaaga

SEQ ID NO: 1024993 - RNA, 22 nt, Human
cacuccagccugggugacagag

SEQ ID NO: 1024994 - RNA, 24 nt, Human
cacuccagccugggugacagagug

SEQ ID NO: 1024995 - RNA, 24 nt, Human
cagcacuuugggaggccgaggcag

SEQ ID NO: 1024996 - RNA, 24 nt, Human
cagcuacucgggaggcugaggcag

SEQ ID NO: 1024997 - RNA, 23 nt, Human
cagcuguaaucccagcacuuugg

SEQ ID NO: 1024998 - RNA, 24 nt, Human
cagcuguaaucccagcacuuuggg

SEQ ID NO: 1024999 - RNA, 19 nt, Human
cauugcacuccagccuggg

SEQ ID NO: 1025000 - RNA, 21 nt, Human
cauugcacuccagccugggug

SEQ ID NO: 1025001 - RNA, 22 nt, Human
cauugcacuccagccuggguga

SEQ ID NO: 1025002 - RNA, 24 nt, Human
cauugcacuccagccugggugaca

SEQ ID NO: 1025003 - RNA, 25 nt, Human
cauugcacuccagccugggugacag

SEQ ID NO: 1025004 - RNA, 20 nt, Human
ccacugggcugucuccgugc

SEQ ID NO: 1025005 - RNA, 20 nt, Human
ccacugggcugucuccgugc

SEQ ID NO: 1025006 - RNA, 23 nt, Human
ccagaauaggagaugaaugaaaa

SEQ ID NO: 1025007 - RNA, 22 nt, Human
ccagcucugaagccagaagccc

SEQ ID NO: 1025008 - RNA, 23 nt, Human
ccagugggaucugggcccuccuc

SEQ ID NO: 1025009 - RNA, 20 nt, Human
ccauugcacuccagccuggg

SEQ ID NO: 1025010 - RNA, 21 nt, Human
ccauugcacuccagccugggu

SEQ ID NO: 1025011 - RNA, 21 nt, Human
ccauugcacuccagccugggu

SEQ ID NO: 1025012 - RNA, 22 nt, Human
ccauugcacuccagccugggug

SEQ ID NO: 1025013 - RNA, 23 nt, Human
ccauugcacuccagccuggguga

SEQ ID NO: 1025014 - RNA, 24 nt, Human
ccauugcacuccagccugggugac

SEQ ID NO: 1025015 - RNA, 21 nt, Human
cccacaauucccagcucugaa

SEQ ID NO: 1025016 - RNA, 24 nt, Human
cccacaauucccagcucugaagcc

SEQ ID NO: 1025017 - RNA, 22 nt, Human
cccagcucugaagccagaagcc

SEQ ID NO: 1025018 - RNA, 24 nt, Human
ccccugugcucuccgcuucaggcu

SEQ ID NO: 1025019 - RNA, 18 nt, Human
cccuggccuccagcugca

SEQ ID NO: 1025020 - RNA, 21 nt, Human
ccucaucccccugugcucucc

SEQ ID NO: 1025021 - RNA, 23 nt, Human
ccucuaucggcuccccgcugccu

SEQ ID NO: 1025022 - RNA, 24 nt, Human
ccuggccaacacggugaaacccca

SEQ ID NO: 1025023 - RNA, 20 nt, Human
ccugggugacagagugaaac

SEQ ID NO: 1025024 - RNA, 22 nt, Human
ccugggugacagagugaaacuc

SEQ ID NO: 1025025 - RNA, 21 nt, Human
ccuguaaucccagcuacucgg

SEQ ID NO: 1025026 - RNA, 22 nt, Human
ccuguaaucccagcuacucggg

SEQ ID NO: 1025027 - RNA, 24 nt, Human
cgagaucaugccauugcacuccag

SEQ ID NO: 1025028 - RNA, 20 nt, Human
cgaggcaguuggaucaccug

SEQ ID NO: 1025029 - RNA, 24 nt, Human
cgaggcaguuggaucaccugaggu

SEQ ID NO: 1025030 - RNA, 26 nt, Human
cgaggcaguuggaucaccugagguca

SEQ ID NO: 1025031 - RNA, 23 nt, Human
cgccuguaaucccagcuacucgg

SEQ ID NO: 1025032 - RNA, 25 nt, Human
cucaaaaaaaaaaaaaaagaaaaga

SEQ ID NO: 1025033 - RNA, 24 nt, Human
cucacagcuguaaucccagcacuu

SEQ ID NO: 1025034 - RNA, 19 nt, Human
cucugucucaaaaaaaaaa

SEQ ID NO: 1025035 - RNA, 19 nt, Human
cugaagcacaauuggucua

SEQ ID NO: 1025036 - RNA, 23 nt, Human
cuggccaacacggugaaacccca

SEQ ID NO: 1025037 - RNA, 21 nt, Human
cugggaucccaauacuaaaga

SEQ ID NO: 1025038 - RNA, 20 nt, Human
cugugccuacuugccccucu

SEQ ID NO: 1025039 - RNA, 24 nt, Human
gacagagugaaacucugucucaaa

SEQ ID NO: 1025040 - RNA, 22 nt, Human
gaccacagcaggcaaaggagcc

SEQ ID NO: 1025041 - RNA, 23 nt, Human
gagaaucgcuugaacccaggagg

SEQ ID NO: 1025042 - RNA, 21 nt, Human
gaucaccugaggucaggaguu

SEQ ID NO: 1025043 - RNA, 23 nt, Human
gaucaccugaggucaggaguuca

SEQ ID NO: 1025044 - RNA, 24 nt, Human
gaucaccugaggucaggaguucaa

SEQ ID NO: 1025045 - RNA, 24 nt, Human
gcacuccagccugggugacagagu

SEQ ID NO: 1025046 - RNA, 22 nt, Human
gcaggagaaucgcuugaaccca

SEQ ID NO: 1025047 - RNA, 20 nt, Human
gcaguuggaucaccugaggu

SEQ ID NO: 1025048 - RNA, 24 nt, Human
gccaacacggugaaaccccaucuc

SEQ ID NO: 1025049 - RNA, 19 nt, Human
gccauugcacuccagccug

SEQ ID NO: 1025050 - RNA, 24 nt, Human
gccauugcacuccagccuggguga

SEQ ID NO: 1025051 - RNA, 23 nt, Human
gccuguaaucccagcuacucggg

SEQ ID NO: 1025052 - RNA, 22 nt, Human
gcucaggccagccauggacccu

SEQ ID NO: 1025053 - RNA, 25 nt, Human
gcucugaagccagaagcccagccuc

SEQ ID NO: 1025054 - RNA, 23 nt, Human
ggaaugcagcuugcaguguggag

SEQ ID NO: 1025055 - RNA, 19 nt, Human
ggaccacagcaggcaaagg

SEQ ID NO: 1025056 - RNA, 21 nt, Human
ggagggcagggaugggagggu

SEQ ID NO: 1025057 - RNA, 24 nt, Human
ggagggcagggaugggaggguaaa

SEQ ID NO: 1025058 - RNA, 19 nt, Human
ggaugggaggguaaagagg

SEQ ID NO: 1025059 - RNA, 23 nt, Human
ggcaaggccuauaggccccaggg

SEQ ID NO: 1025060 - RNA, 21 nt, Human
ggcaggcgccuguaaucccag

SEQ ID NO: 1025061 - RNA, 22 nt, Human
ggcagggaugggaggguaaaga

SEQ ID NO: 1025062 - RNA, 21 nt, Human
ggccgggugcaguggcucaca

SEQ ID NO: 1025063 - RNA, 23 nt, Human
ggcgugguggcaggcgccuguaa

SEQ ID NO: 1025064 - RNA, 25 nt, Human
ggcugcaagugcaaggcaggaggcu

SEQ ID NO: 1025065 - RNA, 24 nt, Human
gggcaaggccuauaggccccaggg

SEQ ID NO: 1025066 - RNA, 23 nt, Human
gggcagggaugggaggguaaaga

SEQ ID NO: 1025067 - RNA, 20 nt, Human
gggcccuccucccacaauuc

SEQ ID NO: 1025068 - RNA, 18 nt, Human
gggcucuuugaaagacca

SEQ ID NO: 1025069 - RNA, 24 nt, Human
gggugcaguggcucacagcuguaa

SEQ ID NO: 1025070 - RNA, 23 nt, Human
gguaaagagggcucuuugaaaga

SEQ ID NO: 1025071 - RNA, 19 nt, Human
ggugcaguggcucacagcu

SEQ ID NO: 1025072 - RNA, 24 nt, Human
gguggcaggcgccuguaaucccag

SEQ ID NO: 1025073 - RNA, 22 nt, Human
guagcccuggccuccagcugca

SEQ ID NO: 1025074 - RNA, 21 nt, Human
gucucaaaaaaaaaaaaaaag

SEQ ID NO: 1025075 - RNA, 20 nt, Human
uaaauucccggccgggugca

SEQ ID NO: 1025076 - RNA, 20 nt, Human
uaauaauaaaagcagagugc

SEQ ID NO: 1025077 - RNA, 20 nt, Human
uaggaaagcauccacaguag

SEQ ID NO: 1025078 - RNA, 23 nt, Human
uaggaaagcauccacaguagaaa

SEQ ID NO: 1025079 - RNA, 19 nt, Human
ucaaaaaaaaaaaaaaaga

SEQ ID NO: 1025080 - RNA, 19 nt, Human
ucaaugguuggaaucaagg

SEQ ID NO: 1025081 - RNA, 23 nt, Human
ucaccugaggucaggaguucaag

SEQ ID NO: 1025082 - RNA, 19 nt, Human
ucagaccuaggcugaccag

SEQ ID NO: 1025083 - RNA, 23 nt, Human
ucaugccauugcacuccagccug

SEQ ID NO: 1025084 - RNA, 26 nt, Human
uccacaguagaaagauaaauugagaa

SEQ ID NO: 1025085 - RNA, 22 nt, Human
uccagccugggugacagaguga

SEQ ID NO: 1025086 - RNA, 20 nt, Human
ucccagagugagacuuaguu

SEQ ID NO: 1025087 - RNA, 21 nt, Human
ucccagagugagacuuaguuu

SEQ ID NO: 1025088 - RNA, 18 nt, Human
ucccagcucugaagccag

SEQ ID NO: 1025089 - RNA, 19 nt, Human
ucccagcucugaagccaga

SEQ ID NO: 1025090 - RNA, 18 nt, Human
uccccgcugccugccacc

SEQ ID NO: 1025091 - RNA, 20 nt, Human
ucccugacuuguggccacug

SEQ ID NO: 1025092 - RNA, 21 nt, Human
ucccugacuuguggccacugg

SEQ ID NO: 1025093 - RNA, 24 nt, Human
ucgggaggcugaggcaggagaauc

SEQ ID NO: 1025094 - RNA, 24 nt, Human
ucucaaaaaaaaaaaaaaagaaaa

SEQ ID NO: 1025095 - RNA, 21 nt, Human
ucucugcuaaaaauacaaaaa

SEQ ID NO: 1025096 - RNA, 18 nt, Human
ucugcccuuccuuucuga

SEQ ID NO: 1025097 - RNA, 23 nt, Human
ucugucucaaaaaaaaaaaaaaa

SEQ ID NO: 1025098 - RNA, 18 nt, Human
ugaagccagaagcccagc

SEQ ID NO: 1025099 - RNA, 21 nt, Human
ugaagccccaaaucuaaguag

SEQ ID NO: 1025100 - RNA, 22 nt, Human
ugacagagugaaacucugucuc

SEQ ID NO: 1025101 - RNA, 26 nt, Human
ugacuuguggccacuggggcaggccu

SEQ ID NO: 1025102 - RNA, 20 nt, Human
ugagcuggguguucccaggg

SEQ ID NO: 1025103 - RNA, 20 nt, Human
ugaggcaggagaaucgcuug

SEQ ID NO: 1025104 - RNA, 24 nt, Human
ugaggcaggagaaucgcuugaacc

SEQ ID NO: 1025105 - RNA, 25 nt, Human
ugaggcaggagaaucgcuugaaccc

SEQ ID NO: 1025106 - RNA, 24 nt, Human
ugcacuccagccugggugacagag

SEQ ID NO: 1025107 - RNA, 22 nt, Human
ugcagcuugcaguguggagggc

SEQ ID NO: 1025108 - RNA, 20 nt, Human
ugcccuuccuuucugacuuc

SEQ ID NO: 1025109 - RNA, 24 nt, Human
uggaucaccugaggucaggaguuc

SEQ ID NO: 1025110 - RNA, 27 nt, Human
uggaucaccugaggucaggaguucaag

SEQ ID NO: 1025111 - RNA, 22 nt, Human
uggcaggcgccuguaaucccag

SEQ ID NO: 1025112 - RNA, 22 nt, Human
uggcucacagcuguaaucccag

SEQ ID NO: 1025113 - RNA, 24 nt, Human
uggcucacagcuguaaucccagca

SEQ ID NO: 1025114 - RNA, 18 nt, Human
uggcuggaaugcagcuug

SEQ ID NO: 1025115 - RNA, 19 nt, Human
uggcuggaaugcagcuugc

SEQ ID NO: 1025116 - RNA, 20 nt, Human
uggcuggaaugcagcuugca

SEQ ID NO: 1025117 - RNA, 24 nt, Human
ugggaggccgaggcaguuggauca

SEQ ID NO: 1025118 - RNA, 22 nt, Human
ugggcugucuccgugcauucaa

SEQ ID NO: 1025119 - RNA, 24 nt, Human
ugguggcaggcgccuguaauccca

SEQ ID NO: 1025120 - RNA, 21 nt, Human
ugugaaaggcugccuggagga

SEQ ID NO: 1025121 - RNA, 18 nt, Human
uuagcugggcgugguggc

SEQ ID NO: 1025122 - RNA, 24 nt, Human
uuagcugggcgugguggcaggcgc

SEQ ID NO: 1025123 - RNA, 23 nt, Human
uuccugaucaaguuucuuaagcu

SEQ ID NO: 1025124 - RNA, 21 nt, Human
uuccuucuggguagcagcuag

SEQ ID NO: 1025125 - RNA, 27 nt, Human
uuguggccacuggggcaggccugagcu

SEQ ID NO: 1025126 - RNA, 18 nt, Human
uuuuuuuuuuuuuuucug

SEQ ID NO: 1025127 - RNA, 22 nt, Human
uuuuuuuuuuuuuuuuucuguu

SEQ ID NO: 1025128 - RNA, 25 nt, Human
aaaacaccuguuuacuacuuacuaa

SEQ ID NO: 1025129 - RNA, 18 nt, Human
aaacaaagugccaaaugc

SEQ ID NO: 1025130 - RNA, 23 nt, Human
aaaccacccccaugauccaauca

SEQ ID NO: 1025131 - RNA, 19 nt, Human
aaagacaauuuaaaaugua

SEQ ID NO: 1025132 - RNA, 21 nt, Human
aacuauaaaaccuaccaaaca

SEQ ID NO: 1025133 - RNA, 22 nt, Human
aagaggaaagagaaaagcccag

SEQ ID NO: 1025134 - RNA, 23 nt, Human
aauagccaaauaccuuaguagcc

SEQ ID NO: 1025135 - RNA, 18 nt, Human
aauggcacaggacuuggu

SEQ ID NO: 1025136 - RNA, 19 nt, Human
aauucgagaugaaauuugg

SEQ ID NO: 1025137 - RNA, 21 nt, Human
acagacaaaccauaccagcca

SEQ ID NO: 1025138 - RNA, 24 nt, Human
accaaguauuuccuucuaaaaagu

SEQ ID NO: 1025139 - RNA, 18 nt, Human
accauucucaccauauuu

SEQ ID NO: 1025140 - RNA, 24 nt, Human
acuuacauuuaaauacuccagcau

SEQ ID NO: 1025141 - RNA, 20 nt, Human
agaaguagcaagaaggauga

SEQ ID NO: 1025142 - RNA, 18 nt, Human
agacaaaccauaccagcc

SEQ ID NO: 1025143 - RNA, 18 nt, Human
aggaaagagaaaagccca

SEQ ID NO: 1025144 - RNA, 22 nt, Human
aggcuuuaaaauuuuuuagaau

SEQ ID NO: 1025145 - RNA, 24 nt, Human
agugaggaguuaaaggggcagagc

SEQ ID NO: 1025146 - RNA, 22 nt, Human
auagccaaauaccuuaguagcc

SEQ ID NO: 1025147 - RNA, 23 nt, Human
auuuuuuuauucacuagauagca

SEQ ID NO: 1025148 - RNA, 25 nt, Human
caacaggaagaauagcaauuucucc

SEQ ID NO: 1025149 - RNA, 22 nt, Human
caagaaacuuacaaucaugggg

SEQ ID NO: 1025150 - RNA, 21 nt, Human
caagaaggaugaacugaagca

SEQ ID NO: 1025151 - RNA, 19 nt, Human
caagcccacuuuuagguau

SEQ ID NO: 1025152 - RNA, 20 nt, Human
caaggguaguaaaacuccag

SEQ ID NO: 1025153 - RNA, 21 nt, Human
cacuaucaggagaacaucgua

SEQ ID NO: 1025154 - RNA, 23 nt, Human
cagauaucuuucaaacuaauuuu

SEQ ID NO: 1025155 - RNA, 22 nt, Human
cagcaagcccacuuuuagguau

SEQ ID NO: 1025156 - RNA, 22 nt, Human
caggagaacaucguaggggaaa

SEQ ID NO: 1025157 - RNA, 24 nt, Human
ccacccccaugauccaaucaccuc

SEQ ID NO: 1025158 - RNA, 20 nt, Human
ccccaugauccaaucaccuc

SEQ ID NO: 1025159 - RNA, 23 nt, Human
cccccaugauccaaucaccuccc

SEQ ID NO: 1025160 - RNA, 25 nt, Human
ccucccaccaggucucucccuagac

SEQ ID NO: 1025161 - RNA, 20 nt, Human
cgccaucaaaacaucaaugu

SEQ ID NO: 1025162 - RNA, 22 nt, Human
cguacaaacaccuguacacgug

SEQ ID NO: 1025163 - RNA, 24 nt, Human
cucaagaaacuuacaaucaugggg

SEQ ID NO: 1025164 - RNA, 21 nt, Human
cucacccacuaucaggagaac

SEQ ID NO: 1025165 - RNA, 20 nt, Human
cucaccuacaucuuccaaca

SEQ ID NO: 1025166 - RNA, 22 nt, Human
cucauuaaaauacuuacauuua

SEQ ID NO: 1025167 - RNA, 18 nt, Human
gaagaccggaauuaaacc

SEQ ID NO: 1025168 - RNA, 23 nt, Human
ggacacagacaaaccauaccagc

SEQ ID NO: 1025169 - RNA, 20 nt, Human
uaaaaaaugcagccaaccac

SEQ ID NO: 1025170 - RNA, 22 nt, Human
uaaaaaaugcagccaaccaccu

SEQ ID NO: 1025171 - RNA, 24 nt, Human
uaaaaccuaccaaacaaagugcca

SEQ ID NO: 1025172 - RNA, 25 nt, Human
uaaaaccuaccaaacaaagugccaa

SEQ ID NO: 1025173 - RNA, 26 nt, Human
uaaaaccuaccaaacaaagugccaaa

SEQ ID NO: 1025174 - RNA, 27 nt, Human
uaacuuccuuucaaucagcaaaacacc

SEQ ID NO: 1025175 - RNA, 19 nt, Human
uacgaaacauauuuuucuc

SEQ ID NO: 1025176 - RNA, 21 nt, Human
uagaaguagcaagaaggauga

SEQ ID NO: 1025177 - RNA, 21 nt, Human
uagaugccuaucauuucauuu

SEQ ID NO: 1025178 - RNA, 21 nt, Human
uagccaaauaccuuaguagcc

SEQ ID NO: 1025179 - RNA, 20 nt, Human
uaggguaauaguggugaggu

SEQ ID NO: 1025180 - RNA, 23 nt, Human
uauuuucucaccuacaucuucca

SEQ ID NO: 1025181 - RNA, 20 nt, Human
ucaaaacaucaauguacuga

SEQ ID NO: 1025182 - RNA, 19 nt, Human
ucacaaggcuucaggagaa

SEQ ID NO: 1025183 - RNA, 21 nt, Human
ucaggagaaagagugaggagu

SEQ ID NO: 1025184 - RNA, 27 nt, Human
uccaacacuauuaauuacuuuugaauu

SEQ ID NO: 1025185 - RNA, 21 nt, Human
ucccuagacacauggggauua

SEQ ID NO: 1025186 - RNA, 18 nt, Human
ugaggacacagacaaacc

SEQ ID NO: 1025187 - RNA, 22 nt, Human
ugauccaaucaccucccaccag

SEQ ID NO: 1025188 - RNA, 18 nt, Human
ugcgauuucuccagauau

SEQ ID NO: 1025189 - RNA, 20 nt, Human
ugguuaggagaagaggaaag

SEQ ID NO: 1025190 - RNA, 19 nt, Human
uuacucauuaaaauacuua

SEQ ID NO: 1025191 - RNA, 29 nt, Human
uucaaucagcaaaacaccuguuuacuacu

SEQ ID NO: 1025192 - RNA, 19 nt, Human
uugaaacuauaaaaccuac

SEQ ID NO: 1025193 - RNA, 22 nt, Human
uuuaaaaagcccuauuguuuua

SEQ ID NO: 1025194 - RNA, 18 nt, Human
uuuuguuucuucccccuc

SEQ ID NO: 1025195 - RNA, 21 nt, Human
aaaaccuucucagggccaaag

SEQ ID NO: 1025196 - RNA, 23 nt, Human
aaauuuccagcacgaaccagcuc

SEQ ID NO: 1025197 - RNA, 25 nt, Human
acacacauacacacauacacacaua

SEQ ID NO: 1025198 - RNA, 20 nt, Human
acacgcacacacauacacag

SEQ ID NO: 1025199 - RNA, 22 nt, Human
acauacacacauacacacugua

SEQ ID NO: 1025200 - RNA, 20 nt, Human
accccaagaaacccaggaga

SEQ ID NO: 1025201 - RNA, 21 nt, Human
acccgggcagggcaggggacc

SEQ ID NO: 1025202 - RNA, 18 nt, Human
acgaaccagcucgccacc

SEQ ID NO: 1025203 - RNA, 23 nt, Human
acgcacacacauacacacauaca

SEQ ID NO: 1025204 - RNA, 20 nt, Human
agcacgaaccagcucgccac

SEQ ID NO: 1025205 - RNA, 22 nt, Human
agcacgaaccagcucgccaccu

SEQ ID NO: 1025206 - RNA, 19 nt, Human
aggaugggggcagcugaga

SEQ ID NO: 1025207 - RNA, 20 nt, Human
aggcaaaaggagaagucgcg

SEQ ID NO: 1025208 - RNA, 18 nt, Human
aggcuguguggcaagggc

SEQ ID NO: 1025209 - RNA, 19 nt, Human
aggggcuggggcucugggg

SEQ ID NO: 1025210 - RNA, 21 nt, Human
agggggcagugugggggacac

SEQ ID NO: 1025211 - RNA, 24 nt, Human
agggggcuucccgugccccacagg

SEQ ID NO: 1025212 - RNA, 21 nt, Human
auaacuaugguccccucccaa

SEQ ID NO: 1025213 - RNA, 23 nt, Human
auggacgcugaugucagccacca

SEQ ID NO: 1025214 - RNA, 18 nt, Human
caacggcuggggaaacuc

SEQ ID NO: 1025215 - RNA, 19 nt, Human
caagggacgucuacugugg

SEQ ID NO: 1025216 - RNA, 28 nt, Human
cacacacauacacacauacacacauaca

SEQ ID NO: 1025217 - RNA, 21 nt, Human
cacacccacacaugcaggucc

SEQ ID NO: 1025218 - RNA, 21 nt, Human
cacacuccagcgccagaaaag

SEQ ID NO: 1025219 - RNA, 27 nt, Human
cacauacacacauacacacuguaccuu

SEQ ID NO: 1025220 - RNA, 22 nt, Human
cacccacacaugcagguccuac

SEQ ID NO: 1025221 - RNA, 26 nt, Human
cacgcacacacauacacacauacaca

SEQ ID NO: 1025222 - RNA, 19 nt, Human
cacuaacuccccugcccua

SEQ ID NO: 1025223 - RNA, 21 nt, Human
cacuguuuguaaacuggaccc

SEQ ID NO: 1025224 - RNA, 30 nt, Human
cagagacacgcacacacauacacacauaca

SEQ ID NO: 1025225 - RNA, 24 nt, Human
caggagaaauuuccagcacgaacc

SEQ ID NO: 1025226 - RNA, 20 nt, Human
cagggccccaaccugguguu

SEQ ID NO: 1025227 - RNA, 21 nt, Human
cagggggagcugggaccugcu

SEQ ID NO: 1025228 - RNA, 24 nt, Human
cauucuggcagccgugggguucug

SEQ ID NO: 1025229 - RNA, 28 nt, Human
ccagggccccaaccuggugguagcaaga

SEQ ID NO: 1025230 - RNA, 21 nt, Human
cccaacucuaacauacuagau

SEQ ID NO: 1025231 - RNA, 22 nt, Human
cccaggaccccgccccaggccc

SEQ ID NO: 1025232 - RNA, 23 nt, Human
ccccacacuguuuguaaacugga

SEQ ID NO: 1025233 - RNA, 26 nt, Human
ccccacacuguuuguaaacuggaccc

SEQ ID NO: 1025234 - RNA, 19 nt, Human
ccccacaggccagcucaga

SEQ ID NO: 1025235 - RNA, 21 nt, Human
ccccgccccaggcccugagcc

SEQ ID NO: 1025236 - RNA, 19 nt, Human
ccccugguguccaccgccc

SEQ ID NO: 1025237 - RNA, 21 nt, Human
cccugcacacuccagcgccag

SEQ ID NO: 1025238 - RNA, 20 nt, Human
cccugcccugugagcccuuc

SEQ ID NO: 1025239 - RNA, 24 nt, Human
ccggcagaggucccugggccuggg

SEQ ID NO: 1025240 - RNA, 19 nt, Human
ccucugggugccucuggga

SEQ ID NO: 1025241 - RNA, 21 nt, Human
ccugguccuuggagggagugg

SEQ ID NO: 1025242 - RNA, 18 nt, Human
ccuuggagggaguggggg

SEQ ID NO: 1025243 - RNA, 19 nt, Human
ccuuggagggagugggggu

SEQ ID NO: 1025244 - RNA, 23 nt, Human
cgagagagagagcgagcacggca

SEQ ID NO: 1025245 - RNA, 22 nt, Human
cgcacacacauacacacauaca

SEQ ID NO: 1025246 - RNA, 23 nt, Human
cgcccugcacacuccagcgccag

SEQ ID NO: 1025247 - RNA, 21 nt, Human
cggcaagacaugaggggcugg

SEQ ID NO: 1025248 - RNA, 28 nt, Human
cggcagaggucccugggccugggacagu

SEQ ID NO: 1025249 - RNA, 21 nt, Human
cuaugguccccucccaacucu

SEQ ID NO: 1025250 - RNA, 23 nt, Human
cuccccugcccuaaggauggggg

SEQ ID NO: 1025251 - RNA, 19 nt, Human
cugcucuggggucaggcug

SEQ ID NO: 1025252 - RNA, 20 nt, Human
cuggggucaggcuggaggcu

SEQ ID NO: 1025253 - RNA, 20 nt, Human
cugguggagacccucuagcc

SEQ ID NO: 1025254 - RNA, 19 nt, Human
cugugagcccuucuauccu

SEQ ID NO: 1025255 - RNA, 24 nt, Human
gacagugacauaaacugagguaaa

SEQ ID NO: 1025256 - RNA, 19 nt, Human
gaccugguccuuggaggga

SEQ ID NO: 1025257 - RNA, 21 nt, Human
gaccugguccuuggagggagu

SEQ ID NO: 1025258 - RNA, 18 nt, Human
gaccuguggccccgccuc

SEQ ID NO: 1025259 - RNA, 19 nt, Human
gagcccuucuauccccaca

SEQ ID NO: 1025260 - RNA, 21 nt, Human
gaggacccggcagaggucccu

SEQ ID NO: 1025261 - RNA, 18 nt, Human
gaggauggggucuuggag

SEQ ID NO: 1025262 - RNA, 20 nt, Human
gagggagagagagaaagaga

SEQ ID NO: 1025263 - RNA, 19 nt, Human
gcagugugggggacacagg

SEQ ID NO: 1025264 - RNA, 20 nt, Human
gcccuaaggaugggggcagc

SEQ ID NO: 1025265 - RNA, 20 nt, Human
gcccuggggccaccccacac

SEQ ID NO: 1025266 - RNA, 18 nt, Human
gcggcugggagaggcagc

SEQ ID NO: 1025267 - RNA, 18 nt, Human
gcuguguggcaagggcug

SEQ ID NO: 1025268 - RNA, 18 nt, Human
ggaagcccaggcuacuac

SEQ ID NO: 1025269 - RNA, 21 nt, Human
ggacccgggcagggcagggga

SEQ ID NO: 1025270 - RNA, 21 nt, Human
ggagguuggcauguuugaccc

SEQ ID NO: 1025271 - RNA, 23 nt, Human
ggcagccgugggguucuguucag

SEQ ID NO: 1025272 - RNA, 21 nt, Human
ggcccugagccaagcauggac

SEQ ID NO: 1025273 - RNA, 24 nt, Human
gggaagcaccgaaggacagggggc

SEQ ID NO: 1025274 - RNA, 22 nt, Human
gggagaggcagccccgaugggc

SEQ ID NO: 1025275 - RNA, 21 nt, Human
gggcacagcagggagaguggg

SEQ ID NO: 1025276 - RNA, 23 nt, Human
gggcacagcagggagaguggggc

SEQ ID NO: 1025277 - RNA, 18 nt, Human
ggggcuggggcucugggg

SEQ ID NO: 1025278 - RNA, 23 nt, Human
gggggcuucccgugccccacagg

SEQ ID NO: 1025279 - RNA, 20 nt, Human
gugcacacacaccuagucac

SEQ ID NO: 1025280 - RNA, 23 nt, Human
gugcacacacaccuagucacaca

SEQ ID NO: 1025281 - RNA, 27 nt, Human
guuuagagaaguaaauaacacauuuaa

SEQ ID NO: 1025282 - RNA, 19 nt, Human
uaacagagagagggagaga

SEQ ID NO: 1025283 - RNA, 23 nt, Human
uaaggcaaaaggagaagucgcgg

SEQ ID NO: 1025284 - RNA, 18 nt, Human
uaaggggcaaaggguccc

SEQ ID NO: 1025285 - RNA, 24 nt, Human
uaaggggcaaagggucccagcccg

SEQ ID NO: 1025286 - RNA, 19 nt, Human
uacacacauacacacauac

SEQ ID NO: 1025287 - RNA, 22 nt, Human
uacacacauacacacauacaca

SEQ ID NO: 1025288 - RNA, 20 nt, Human
uacaguguuauuuuuugcua

SEQ ID NO: 1025289 - RNA, 19 nt, Human
uagucacacacucgccccc

SEQ ID NO: 1025290 - RNA, 19 nt, Human
ucagggaacauucuggcag

SEQ ID NO: 1025291 - RNA, 23 nt, Human
uccccugcccuaaggaugggggc

SEQ ID NO: 1025292 - RNA, 20 nt, Human
ucccgugccccacaggccag

SEQ ID NO: 1025293 - RNA, 24 nt, Human
ucccugggccugggacagugcggc

SEQ ID NO: 1025294 - RNA, 21 nt, Human
ucggcuccacacuaacucccc

SEQ ID NO: 1025295 - RNA, 18 nt, Human
ucuacccaggaccccgcc

SEQ ID NO: 1025296 - RNA, 21 nt, Human
ucuacccaggaccccgcccca

SEQ ID NO: 1025297 - RNA, 21 nt, Human
ucucugagaccugguccuugg

SEQ ID NO: 1025298 - RNA, 20 nt, Human
ucucugggaagcaccgaagg

SEQ ID NO: 1025299 - RNA, 21 nt, Human
ucugcucuggggucaggcugg

SEQ ID NO: 1025300 - RNA, 22 nt, Human
ucugcucuggggucaggcugga

SEQ ID NO: 1025301 - RNA, 26 nt, Human
ucuggggcuaggacucuacccaggac

SEQ ID NO: 1025302 - RNA, 24 nt, Human
ugaccagggccuucucugagaccu

SEQ ID NO: 1025303 - RNA, 20 nt, Human
ugagguaaacaucugugacc

SEQ ID NO: 1025304 - RNA, 19 nt, Human
ugcacacuccagcgccaga

SEQ ID NO: 1025305 - RNA, 23 nt, Human
ugcuacuuaccuggcauguggag

SEQ ID NO: 1025306 - RNA, 19 nt, Human
ugcuggaagcccaggcuac

SEQ ID NO: 1025307 - RNA, 18 nt, Human
uggagguuggcauguuug

SEQ ID NO: 1025308 - RNA, 24 nt, Human
uggcagcaccagggccccaaccug

SEQ ID NO: 1025309 - RNA, 21 nt, Human
ugggaagcaccgaaggacagg

SEQ ID NO: 1025310 - RNA, 20 nt, Human
ugggagaggcagccccgaug

SEQ ID NO: 1025311 - RNA, 18 nt, Human
uggggagguggagucugg

SEQ ID NO: 1025312 - RNA, 23 nt, Human
uggggagguggagucuggagagg

SEQ ID NO: 1025313 - RNA, 18 nt, Human
ugggggacacagggucug

SEQ ID NO: 1025314 - RNA, 20 nt, Human
ugggggacacagggucuggg

SEQ ID NO: 1025315 - RNA, 24 nt, Human
ugugaccaacaccucuccuaaggg

SEQ ID NO: 1025316 - RNA, 19 nt, Human
uguggagggcccauaccca

SEQ ID NO: 1025317 - RNA, 19 nt, Human
uguggcaagggcugggagg

SEQ ID NO: 1025318 - RNA, 21 nt, Human
ugugggggacacagggucugg

SEQ ID NO: 1025319 - RNA, 22 nt, Human
ugugggggacacagggucugga

SEQ ID NO: 1025320 - RNA, 18 nt, Human
uguguggcaagggcuggg

SEQ ID NO: 1025321 - RNA, 21 nt, Human
uucacagaagaaucgcaacaa

SEQ ID NO: 1025322 - RNA, 24 nt, Human
uucagugggccugguggagacccu

SEQ ID NO: 1025323 - RNA, 18 nt, Human
uuccagcacgaaccaggg

SEQ ID NO: 1025324 - RNA, 25 nt, Human
uucucacacccacacaugcaggucc

SEQ ID NO: 1025325 - RNA, 21 nt, Human
uucugcucuggggucaggcug

SEQ ID NO: 1025326 - RNA, 22 nt, Human
uucugcucuggggucaggcugg

SEQ ID NO: 1025327 - RNA, 23 nt, Human
uucugcucuggggucaggcugga

SEQ ID NO: 1025328 - RNA, 24 nt, Human
uucuucgacagugacauaaacuga

SEQ ID NO: 1025329 - RNA, 22 nt, Human
uugaccccaagaaacccaggag

SEQ ID NO: 1025330 - RNA, 24 nt, Human
uuggagggaguggggguuugcuac

SEQ ID NO: 1025331 - RNA, 18 nt, Human
aaaaccaaaccaacagaa

SEQ ID NO: 1025332 - RNA, 24 nt, Human
aaaaccaaaccaacagaaaaggaa

SEQ ID NO: 1025333 - RNA, 18 nt, Human
aacagaaaaggaagcuga

SEQ ID NO: 1025334 - RNA, 22 nt, Human
aaccuaacaaucucaagacaca

SEQ ID NO: 1025335 - RNA, 20 nt, Human
aagcagaaaggaagucagcc

SEQ ID NO: 1025336 - RNA, 22 nt, Human
aagcagaaaggaagucagccag

SEQ ID NO: 1025337 - RNA, 24 nt, Human
aagcagaaaggaagucagccagag

SEQ ID NO: 1025338 - RNA, 18 nt, Human
aagcugccacugcccacc

SEQ ID NO: 1025339 - RNA, 22 nt, Human
aaggagacaagaaagggcuuca

SEQ ID NO: 1025340 - RNA, 21 nt, Human
aaggggcccaggugguucugc

SEQ ID NO: 1025341 - RNA, 19 nt, Human
accuagauccacuaccccg

SEQ ID NO: 1025342 - RNA, 18 nt, Human
acgcggccuccgggcugg

SEQ ID NO: 1025343 - RNA, 18 nt, Human
acggagugccccaggccc

SEQ ID NO: 1025344 - RNA, 20 nt, Human
agaaugacaggagggaccgu

SEQ ID NO: 1025345 - RNA, 22 nt, Human
agacuacuagaagcagaaagga

SEQ ID NO: 1025346 - RNA, 23 nt, Human
agaguccccccaaccauucacau

SEQ ID NO: 1025347 - RNA, 21 nt, Human
agcccccucccccacggccga

SEQ ID NO: 1025348 - RNA, 18 nt, Human
agcccguggcuccuggac

SEQ ID NO: 1025349 - RNA, 23 nt, Human
aggaaggaggcagccuugaggac

SEQ ID NO: 1025350 - RNA, 21 nt, Human
aggcagccuugaggaccccaa

SEQ ID NO: 1025351 - RNA, 22 nt, Human
agugucuuucaaguuaaacagc

SEQ ID NO: 1025352 - RNA, 24 nt, Human
auacaaaagugugaaguuauuuuu

SEQ ID NO: 1025353 - RNA, 18 nt, Human
auagaucuguaucauaca

SEQ ID NO: 1025354 - RNA, 22 nt, Human
auaucucacaauaaaaacgcca

SEQ ID NO: 1025355 - RNA, 19 nt, Human
caaaaggaaggaggcagcc

SEQ ID NO: 1025356 - RNA, 23 nt, Human
caagucugguccccgaaggccgg

SEQ ID NO: 1025357 - RNA, 19 nt, Human
cacagaguagccaauauag

SEQ ID NO: 1025358 - RNA, 21 nt, Human
cacccuggaugcagaagcccu

SEQ ID NO: 1025359 - RNA, 20 nt, Human
cacuggcaaaaagggaggag

SEQ ID NO: 1025360 - RNA, 20 nt, Human
cagaguccccccaaccauuc

SEQ ID NO: 1025361 - RNA, 25 nt, Human
cagccugccccuccaacgggccaga

SEQ ID NO: 1025362 - RNA, 24 nt, Human
cagccuugaggaccccaaagacgg

SEQ ID NO: 1025363 - RNA, 22 nt, Human
cagcucuuccucccuccucucc

SEQ ID NO: 1025364 - RNA, 23 nt, Human
cagcugcaauucguaacccuaau

SEQ ID NO: 1025365 - RNA, 19 nt, Human
cagggccuggaagccagag

SEQ ID NO: 1025366 - RNA, 29 nt, Human
ccaaaaaaaaccuaacaaucucaagacaa

SEQ ID NO: 1025367 - RNA, 20 nt, Human
ccaaaugcugccccccacaa

SEQ ID NO: 1025368 - RNA, 22 nt, Human
ccacagccucagccugccccuc

SEQ ID NO: 1025369 - RNA, 22 nt, Human
ccagagcgggcgcgggcggacg

SEQ ID NO: 1025370 - RNA, 18 nt, Human
ccaggcuucccgagggga

SEQ ID NO: 1025371 - RNA, 22 nt, Human
cccaaggagaaaaccugccaaa

SEQ ID NO: 1025372 - RNA, 25 nt, Human
cccagaaacuccaugagaaaaacgc

SEQ ID NO: 1025373 - RNA, 18 nt, Human
cccagcucuuccucccuc

SEQ ID NO: 1025374 - RNA, 21 nt, Human
cccagcucuuccucccuccuc

SEQ ID NO: 1025375 - RNA, 19 nt, Human
cccaggugguucugcaaag

SEQ ID NO: 1025376 - RNA, 19 nt, Human
ccccaacccuccacccggc

SEQ ID NO: 1025377 - RNA, 20 nt, Human
ccccaaggagaaaaccugcc

SEQ ID NO: 1025378 - RNA, 19 nt, Human
ccccagccugucguacccc

SEQ ID NO: 1025379 - RNA, 21 nt, Human
ccccaggcccgcccgcccacc

SEQ ID NO: 1025380 - RNA, 20 nt, Human
ccccgaaggccggaaccucc

SEQ ID NO: 1025381 - RNA, 21 nt, Human
cccgcccgcccaccccagggg

SEQ ID NO: 1025382 - RNA, 18 nt, Human
cccgggaaguugcgcggc

SEQ ID NO: 1025383 - RNA, 22 nt, Human
cccucccccacggccgaaaggg

SEQ ID NO: 1025384 - RNA, 18 nt, Human
cccuggaugcagaagccc

SEQ ID NO: 1025385 - RNA, 19 nt, Human
cccuuucuuuccuccccaa

SEQ ID NO: 1025386 - RNA, 20 nt, Human
ccgcccaccccagggggacc

SEQ ID NO: 1025387 - RNA, 21 nt, Human
ccgcccuuucuuuccucccca

SEQ ID NO: 1025388 - RNA, 23 nt, Human
ccgcccuuucuuuccuccccaac

SEQ ID NO: 1025389 - RNA, 21 nt, Human
ccggcaacuugggcagcacuu

SEQ ID NO: 1025390 - RNA, 20 nt, Human
ccgggaaguugcgcggcucc

SEQ ID NO: 1025391 - RNA, 21 nt, Human
ccucaggacugggauguggga

SEQ ID NO: 1025392 - RNA, 21 nt, Human
ccuccccaacccuccacccuc

SEQ ID NO: 1025393 - RNA, 21 nt, Human
ccugccaaaugcugcccccca

SEQ ID NO: 1025394 - RNA, 18 nt, Human
ccuggcucuaggccucuc

SEQ ID NO: 1025395 - RNA, 26 nt, Human
cgaagaaaaccaaaccaacagaaaag

SEQ ID NO: 1025396 - RNA, 22 nt, Human
cgacagaacccccaggcugugu

SEQ ID NO: 1025397 - RNA, 18 nt, Human
cgcccaccccagggggac

SEQ ID NO: 1025398 - RNA, 21 nt, Human
cgcgugcgaugcacacacgcg

SEQ ID NO: 1025399 - RNA, 28 nt, Human
cgcgugcgaugcacacacgcguguucag

SEQ ID NO: 1025400 - RNA, 21 nt, Human
cgggggccagagcgggcgcgg

SEQ ID NO: 1025401 - RNA, 21 nt, Human
cgucccaacuaccgcuaccac

SEQ ID NO: 1025402 - RNA, 22 nt, Human
cuaguccauguguucucagcuc

SEQ ID NO: 1025403 - RNA, 22 nt, Human
cucagcuaguccauguguucuc

SEQ ID NO: 1025404 - RNA, 21 nt, Human
cuccaugagaaaaacgcauca

SEQ ID NO: 1025405 - RNA, 19 nt, Human
cucccgaggccaccgcccu

SEQ ID NO: 1025406 - RNA, 19 nt, Human
cuccuggacgcuuauccug

SEQ ID NO: 1025407 - RNA, 22 nt, Human
cucuaggccucucgcccagcuc

SEQ ID NO: 1025408 - RNA, 23 nt, Human
cucuuccucccuccucuccucug

SEQ ID NO: 1025409 - RNA, 19 nt, Human
cugaaauucauaguguuua

SEQ ID NO: 1025410 - RNA, 21 nt, Human
cugcgggauuugccggccucc

SEQ ID NO: 1025411 - RNA, 23 nt, Human
cuuguccccuccacagccucagc

SEQ ID NO: 1025412 - RNA, 25 nt, Human
gaaaaacgcaucaacggcaaacuga

SEQ ID NO: 1025413 - RNA, 24 nt, Human
gagaaugacaggagggaccguggc

SEQ ID NO: 1025414 - RNA, 22 nt, Human
gagggaccguggcagcugcggg

SEQ ID NO: 1025415 - RNA, 28 nt, Human
gccaccgcccuuucuuuccuccccaacc

SEQ ID NO: 1025416 - RNA, 22 nt, Human
gccagaguccccccaaccauuc

SEQ ID NO: 1025417 - RNA, 19 nt, Human
gccauacaaaagugugaag

SEQ ID NO: 1025418 - RNA, 24 nt, Human
gcccuuucuuuccuccccaacccu

SEQ ID NO: 1025419 - RNA, 19 nt, Human
gccugccccuccaacgggc

SEQ ID NO: 1025420 - RNA, 24 nt, Human
gcgaagaaaaccaaaccaacagaa

SEQ ID NO: 1025421 - RNA, 24 nt, Human
gcgcggcuccgcgggggccagagc

SEQ ID NO: 1025422 - RNA, 21 nt, Human
ggacacgagcccccuccccca

SEQ ID NO: 1025423 - RNA, 23 nt, Human
ggacugggaugugggaaucgggc

SEQ ID NO: 1025424 - RNA, 20 nt, Human
ggagguguucccauuuguac

SEQ ID NO: 1025425 - RNA, 24 nt, Human
ggcaaaaggaaggaggcagccuug

SEQ ID NO: 1025426 - RNA, 23 nt, Human
ggcauagugucugcacuggcaaa

SEQ ID NO: 1025427 - RNA, 23 nt, Human
ggccaggcuucccgaggggaggu

SEQ ID NO: 1025428 - RNA, 23 nt, Human
ggccuccgggcuggguugggggg

SEQ ID NO: 1025429 - RNA, 23 nt, Human
gggggccagagcgggcgcgggcg

SEQ ID NO: 1025430 - RNA, 25 nt, Human
ggggggacacgagcccccuccccca

SEQ ID NO: 1025431 - RNA, 24 nt, Human
gugauaugcucggggugggagccc

SEQ ID NO: 1025432 - RNA, 22 nt, Human
uaaaaacgccauacaaaagugu

SEQ ID NO: 1025433 - RNA, 26 nt, Human
uaaaacauguaacucaauccauccgc

SEQ ID NO: 1025434 - RNA, 18 nt, Human
uaaagaaggaaaacuaca

SEQ ID NO: 1025435 - RNA, 19 nt, Human
uaaagaaggaaaacuacau

SEQ ID NO: 1025436 - RNA, 19 nt, Human
uaacucaauccauccgcga

SEQ ID NO: 1025437 - RNA, 21 nt, Human
uacagcacaguuucucccgga

SEQ ID NO: 1025438 - RNA, 21 nt, Human
uacagcacaguuucucccgga

SEQ ID NO: 1025439 - RNA, 23 nt, Human
uacagcacaguuucucccggagu

SEQ ID NO: 1025440 - RNA, 21 nt, Human
uaccccgcuucucgucccaac

SEQ ID NO: 1025441 - RNA, 22 nt, Human
uagguacccccugugaauuugg

SEQ ID NO: 1025442 - RNA, 24 nt, Human
uagugucugcacuggcaaaaaggg

SEQ ID NO: 1025443 - RNA, 21 nt, Human
ucaauccauccgcgaagaaaa

SEQ ID NO: 1025444 - RNA, 23 nt, Human
ucacuuuggcccgggcucccggg

SEQ ID NO: 1025445 - RNA, 23 nt, Human
uccaaaaaaaaccuaacaaucuc

SEQ ID NO: 1025446 - RNA, 21 nt, Human
uccaagagauuggcaaaagga

SEQ ID NO: 1025447 - RNA, 26 nt, Human
uccaagagauuggcaaaaggaaggag

SEQ ID NO: 1025448 - RNA, 19 nt, Human
uccauccgcgaagaaaacc

SEQ ID NO: 1025449 - RNA, 22 nt, Human
uccccaacccuccacccggcuc

SEQ ID NO: 1025450 - RNA, 19 nt, Human
uccccgaaggccggaaccu

SEQ ID NO: 1025451 - RNA, 23 nt, Human
ucccgaggccaccgcccuuucuu

SEQ ID NO: 1025452 - RNA, 18 nt, Human
ucccggcgcccagaugcu

SEQ ID NO: 1025453 - RNA, 18 nt, Human
ucggggugggagcccgug

SEQ ID NO: 1025454 - RNA, 22 nt, Human
ucugcaccucugcgugugugca

SEQ ID NO: 1025455 - RNA, 19 nt, Human
ucugucugguuaauuuuug

SEQ ID NO: 1025456 - RNA, 18 nt, Human
ugacaggagggaccgugg

SEQ ID NO: 1025457 - RNA, 19 nt, Human
ugaggaacuaccuagaucc

SEQ ID NO: 1025458 - RNA, 23 nt, Human
ugaggaccccaaagacggagcag

SEQ ID NO: 1025459 - RNA, 18 nt, Human
ugaguccaagagauuggc

SEQ ID NO: 1025460 - RNA, 18 nt, Human
ugagucccucaggacugg

SEQ ID NO: 1025461 - RNA, 27 nt, Human
ugcgaugcacacacgcguguucagugc

SEQ ID NO: 1025462 - RNA, 18 nt, Human
uggaugcagaagcccuug

SEQ ID NO: 1025463 - RNA, 18 nt, Human
uggcaaaaagggaggagu

SEQ ID NO: 1025464 - RNA, 19 nt, Human
uggccaggcuucccgaggg

SEQ ID NO: 1025465 - RNA, 21 nt, Human
uggcuccuggacgcuuauccu

SEQ ID NO: 1025466 - RNA, 19 nt, Human
uggcucuaggccucucgcc

SEQ ID NO: 1025467 - RNA, 19 nt, Human
ugggaugugggaaucgggc

SEQ ID NO: 1025468 - RNA, 19 nt, Human
uggguaugaagacuggucc

SEQ ID NO: 1025469 - RNA, 21 nt, Human
ugucugguuaauuuuugucug

SEQ ID NO: 1025470 - RNA, 19 nt, Human
ugugugcaugcgugucugu

SEQ ID NO: 1025471 - RNA, 21 nt, Human
uuaaggccgacagaaccccca

SEQ ID NO: 1025472 - RNA, 19 nt, Human
uugaggaccccaaagacgg

SEQ ID NO: 1025473 - RNA, 24 nt, Human
uugcagcuccacucugcccagaaa

SEQ ID NO: 1025474 - RNA, 21 nt, Human
uuuaagacaaacacuuuuucu

SEQ ID NO: 1025475 - RNA, 22 nt, Human
uuuaagacaaacacuuuuucuc

SEQ ID NO: 1025476 - RNA, 18 nt, Human
uuuuuuuuuuuuuuuuug

SEQ ID NO: 1025477 - RNA, 18 nt, Human
agaaggacaaaauuaugg

SEQ ID NO: 1025478 - RNA, 20 nt, Human
aggggaagcgggagggcccu

SEQ ID NO: 1025479 - RNA, 21 nt, Human
caagcuggugaagggaaugca

SEQ ID NO: 1025480 - RNA, 21 nt, Human
cccgaccucgggcuuccuaac

SEQ ID NO: 1025481 - RNA, 20 nt, Human
ccuugcggcuuccgccccuc

SEQ ID NO: 1025482 - RNA, 21 nt, Human
cgccggcgcuccagguguucc

SEQ ID NO: 1025483 - RNA, 19 nt, Human
cgccucucugcccucggag

SEQ ID NO: 1025484 - RNA, 19 nt, Human
cgcggccaggccgaggcgc

SEQ ID NO: 1025485 - RNA, 25 nt, Human
cgcggggacagccgagcuccgccgg

SEQ ID NO: 1025486 - RNA, 18 nt, Human
cggaggggaagcgggagg

SEQ ID NO: 1025487 - RNA, 22 nt, Human
cgggagggcccuugggguaacg

SEQ ID NO: 1025488 - RNA, 21 nt, Human
gaccucgggcuuccuaaccug

SEQ ID NO: 1025489 - RNA, 18 nt, Human
gcuggccccgacgccgcg

SEQ ID NO: 1025490 - RNA, 22 nt, Human
ggccgggacucgagccccgguu

SEQ ID NO: 1025491 - RNA, 18 nt, Human
gggagggcccuuggggua

SEQ ID NO: 1025492 - RNA, 18 nt, Human
ucagugcaucagaagcuu

SEQ ID NO: 1025493 - RNA, 23 nt, Human
ucccuugcggcuuccgccccucu

SEQ ID NO: 1025494 - RNA, 18 nt, Human
uccgccggcgcuccaggu

SEQ ID NO: 1025495 - RNA, 21 nt, Human
uccgcggggcaggcucagguc

SEQ ID NO: 1025496 - RNA, 21 nt, Human
ugcgcgcugcgccugcagccg

SEQ ID NO: 1025497 - RNA, 19 nt, Human
ugcguccgggcgcggacgc

SEQ ID NO: 1025498 - RNA, 20 nt, Human
uggaagaaucacagauaaga

SEQ ID NO: 1025499 - RNA, 19 nt, Human
uggugaagggaaugcacuu

SEQ ID NO: 1025500 - RNA, 21 nt, Human
uugcggcuuccgccccucucc

SEQ ID NO: 1025501 - RNA, 18 nt, Human
aacucggucccagaauag

SEQ ID NO: 1025502 - RNA, 20 nt, Human
agaaacuagcaaaaagucag

SEQ ID NO: 1025503 - RNA, 21 nt, Human
agaagccauggcuuccccccu

SEQ ID NO: 1025504 - RNA, 21 nt, Human
auagaaacuagcaaaaaguca

SEQ ID NO: 1025505 - RNA, 22 nt, Human
aucuauccagucugcucuccca

SEQ ID NO: 1025506 - RNA, 21 nt, Human
caacagcucuaguacaguacu

SEQ ID NO: 1025507 - RNA, 24 nt, Human
caccuuagcucuguccucugaggg

SEQ ID NO: 1025508 - RNA, 26 nt, Human
cagaauagaaacuagcaaaaagucag

SEQ ID NO: 1025509 - RNA, 22 nt, Human
cagucugcucucccacgccuca

SEQ ID NO: 1025510 - RNA, 23 nt, Human
cauggcuuccccccuaccuccuc

SEQ ID NO: 1025511 - RNA, 22 nt, Human
ccaaucuagguaaucccugucc

SEQ ID NO: 1025512 - RNA, 22 nt, Human
ccacaaaaacaaaguuucucaa

SEQ ID NO: 1025513 - RNA, 20 nt, Human
ccucugagggauuugccagg

SEQ ID NO: 1025514 - RNA, 23 nt, Human
ccugcagccuauuuuucccagag

SEQ ID NO: 1025515 - RNA, 24 nt, Human
cuagcaaaaagucaguacaguacu

SEQ ID NO: 1025516 - RNA, 21 nt, Human
gaagccauggcuuccccccua

SEQ ID NO: 1025517 - RNA, 19 nt, Human
guggagaucagaagccaug

SEQ ID NO: 1025518 - RNA, 22 nt, Human
guugcaccacaauaguucucca

SEQ ID NO: 1025519 - RNA, 24 nt, Human
uaaacccaaggccuggcacagggg

SEQ ID NO: 1025520 - RNA, 22 nt, Human
uaaaguggaguggagaucagaa

SEQ ID NO: 1025521 - RNA, 26 nt, Human
uaaaguggaguggagaucagaagcca

SEQ ID NO: 1025522 - RNA, 22 nt, Human
uaaucccuguccaccuuagcuc

SEQ ID NO: 1025523 - RNA, 19 nt, Human
uagaaacuagcaaaaaguc

SEQ ID NO: 1025524 - RNA, 21 nt, Human
uagaaacuagcaaaaagucag

SEQ ID NO: 1025525 - RNA, 26 nt, Human
uagauaacuuucuuacuuccacaaaa

SEQ ID NO: 1025526 - RNA, 18 nt, Human
uaugaaaaaagggcaggu

SEQ ID NO: 1025527 - RNA, 25 nt, Human
uaugaaaaaagggcaggugcagaug

SEQ ID NO: 1025528 - RNA, 19 nt, Human
uaugcaggaaaguuugagu

SEQ ID NO: 1025529 - RNA, 21 nt, Human
ucagaagccauggcuuccccc

SEQ ID NO: 1025530 - RNA, 25 nt, Human
ucucaucuauccagucugcucuccc

SEQ ID NO: 1025531 - RNA, 23 nt, Human
ucuccauucucuuuagucugaac

SEQ ID NO: 1025532 - RNA, 23 nt, Human
ucugcucucccacgccucagaug

SEQ ID NO: 1025533 - RNA, 18 nt, Human
uggcuuccccccuaccuc

SEQ ID NO: 1025534 - RNA, 20 nt, Human
ugguaugaaaaaagggcagg

SEQ ID NO: 1025535 - RNA, 19 nt, Human
uguaaacccaaggccuggc

SEQ ID NO: 1025536 - RNA, 19 nt, Human
ugugguaugaaaaaagggc

SEQ ID NO: 1025537 - RNA, 24 nt, Human
uuagcucuguccucugagggauuu

SEQ ID NO: 1025538 - RNA, 24 nt, Human
uuccacaaaaacaaaguuucucaa

SEQ ID NO: 1025539 - RNA, 23 nt, Human
uugcaccacaauaguucuccauu

SEQ ID NO: 1025540 - RNA, 19 nt, Human
uuugugguaugaaaaaagg

SEQ ID NO: 1025541 - RNA, 24 nt, Human
agcucgagaccagccugggcagca

SEQ ID NO: 1025542 - RNA, 23 nt, Human
aggagcucgagaccagccugggc

SEQ ID NO: 1025543 - RNA, 19 nt, Human
aggaucacuugaggucagg

SEQ ID NO: 1025544 - RNA, 21 nt, Human
aggaucacuugaggucaggag

SEQ ID NO: 1025545 - RNA, 24 nt, Human
aguggcucacaccuguaaucccag

SEQ ID NO: 1025546 - RNA, 24 nt, Human
augcuggggcaggaggaucacuug

SEQ ID NO: 1025547 - RNA, 24 nt, Human
cacaccuguaaucccagcacuuug

SEQ ID NO: 1025548 - RNA, 18 nt, Human
caccuguaaucccagcac

SEQ ID NO: 1025549 - RNA, 19 nt, Human
caccuguaaucccagcacu

SEQ ID NO: 1025550 - RNA, 24 nt, Human
cagcacuuuggaaugcuggggcag

SEQ ID NO: 1025551 - RNA, 25 nt, Human
cagcauagggagacccccgcccccc

SEQ ID NO: 1025552 - RNA, 18 nt, Human
caggaggaucacuugagg

SEQ ID NO: 1025553 - RNA, 23 nt, Human
caggccaggcaguggcucacacc

SEQ ID NO: 1025554 - RNA, 24 nt, Human
cauaaaauuuaaacauuagccagg

SEQ ID NO: 1025555 - RNA, 24 nt, Human
cauagggagacccccgcccccccc

SEQ ID NO: 1025556 - RNA, 18 nt, Human
ccaggccaggcaguggcu

SEQ ID NO: 1025557 - RNA, 22 nt, Human
ccccccgccaucucuacauaaa

SEQ ID NO: 1025558 - RNA, 20 nt, Human
cccccgccccccccgccauc

SEQ ID NO: 1025559 - RNA, 23 nt, Human
ccccgccccccccgccaucucua

SEQ ID NO: 1025560 - RNA, 26 nt, Human
cccggccccggcucugagcgaggcgg

SEQ ID NO: 1025561 - RNA, 24 nt, Human
ccgccccccccgccaucucuacau

SEQ ID NO: 1025562 - RNA, 18 nt, Human
ccgcucuggcccggcccc

SEQ ID NO: 1025563 - RNA, 24 nt, Human
ccuacggccaggccaggcaguggc

SEQ ID NO: 1025564 - RNA, 20 nt, Human
cgccgcucuggcccggcccc

SEQ ID NO: 1025565 - RNA, 21 nt, Human
cggcucugagcgaggcggcga

SEQ ID NO: 1025566 - RNA, 21 nt, Human
cuagauaggcucauucuacug

SEQ ID NO: 1025567 - RNA, 22 nt, Human
cucacaccuguaaucccagcac

SEQ ID NO: 1025568 - RNA, 24 nt, Human
cucacaccuguaaucccagcacuu

SEQ ID NO: 1025569 - RNA, 18 nt, Human
cucuggcccggccccggc

SEQ ID NO: 1025570 - RNA, 18 nt, Human
cugugccuguagucccag

SEQ ID NO: 1025571 - RNA, 24 nt, Human
gacccccgccccccccgccaucuc

SEQ ID NO: 1025572 - RNA, 25 nt, Human
gacccccgccccccccgccaucucu

SEQ ID NO: 1025573 - RNA, 27 nt, Human
gacccccgccccccccgccaucucuac

SEQ ID NO: 1025574 - RNA, 18 nt, Human
gaucacuugaggucagga

SEQ ID NO: 1025575 - RNA, 24 nt, Human
gaucacuugaggucaggagcucga

SEQ ID NO: 1025576 - RNA, 24 nt, Human
gccccggcucugagcgaggcggcg

SEQ ID NO: 1025577 - RNA, 25 nt, Human
gcuggggcaggaggaucacuugagg

SEQ ID NO: 1025578 - RNA, 18 nt, Human
ggaucacuugaggucagg

SEQ ID NO: 1025579 - RNA, 23 nt, Human
ggaucacuugaggucaggagcuc

SEQ ID NO: 1025580 - RNA, 18 nt, Human
gggcaggaggaucacuug

SEQ ID NO: 1025581 - RNA, 21 nt, Human
gggccggggccgggcccgggg

SEQ ID NO: 1025582 - RNA, 21 nt, Human
gggccggggccgggcccgggg

SEQ ID NO: 1025583 - RNA, 19 nt, Human
ggggccgggcccggggucu

SEQ ID NO: 1025584 - RNA, 20 nt, Human
ggggggccggggccgggccc

SEQ ID NO: 1025585 - RNA, 24 nt, Human
guggccugugccuguagucccagc

SEQ ID NO: 1025586 - RNA, 18 nt, Human
uacugucuucuccagggc

SEQ ID NO: 1025587 - RNA, 20 nt, Human
uacugucuucuccagggcuc

SEQ ID NO: 1025588 - RNA, 32 nt, Human
uacugucuucuccagggcucuucuaugaaaag

SEQ ID NO: 1025589 - RNA, 24 nt, Human
uagccaggugugguggccugugcc

SEQ ID NO: 1025590 - RNA, 18 nt, Human
ugccuguagucccagcua

SEQ ID NO: 1025591 - RNA, 19 nt, Human
ugccuguagucccagcuac

SEQ ID NO: 1025592 - RNA, 24 nt, Human
uggccugugccuguagucccagcu

SEQ ID NO: 1025593 - RNA, 21 nt, Human
uggcucacaccuguaauccca

SEQ ID NO: 1025594 - RNA, 22 nt, Human
uggcucacaccuguaaucccag

SEQ ID NO: 1025595 - RNA, 24 nt, Human
uggcucacaccuguaaucccagca

SEQ ID NO: 1025596 - RNA, 20 nt, Human
uggggcaggaggaucacuug

SEQ ID NO: 1025597 - RNA, 26 nt, Human
uggggcaggaggaucacuugagguca

SEQ ID NO: 1025598 - RNA, 24 nt, Human
ugguggccugugccuguaguccca

SEQ ID NO: 1025599 - RNA, 22 nt, Human
uucuccagggcucuucuaugaa

SEQ ID NO: 1025600 - RNA, 28 nt, Human
uucuccagggcucuucuaugaaacaguu

SEQ ID NO: 1025601 - RNA, 18 nt, Human
uuuggaaugcuggggcag

SEQ ID NO: 1025602 - RNA, 18 nt, Human
uuuuuuuuuuuuuuuuug

SEQ ID NO: 1025603 - RNA, 23 nt, Human
agggcugcaucccggcccagaac

SEQ ID NO: 1025604 - RNA, 24 nt, Human
cacccccagcuucccgcacagucc

SEQ ID NO: 1025605 - RNA, 22 nt, Human
cagaaccccgggccccaccaug

SEQ ID NO: 1025606 - RNA, 21 nt, Human
caucccggcccagaaccccgg

SEQ ID NO: 1025607 - RNA, 24 nt, Human
ccagaaccccgggccccaccaugc

SEQ ID NO: 1025608 - RNA, 24 nt, Human
ccaugcauccacccccagcuuccc

SEQ ID NO: 1025609 - RNA, 24 nt, Human
cccagaaccccgggccccaccaug

SEQ ID NO: 1025610 - RNA, 19 nt, Human
cccccagcuucccgcacag

SEQ ID NO: 1025611 - RNA, 23 nt, Human
cccccagcuucccgcacaguccc

SEQ ID NO: 1025612 - RNA, 25 nt, Human
ccccgggccccaccaugcauccacc

SEQ ID NO: 1025613 - RNA, 18 nt, Human
cgcaguccggagcgcagg

SEQ ID NO: 1025614 - RNA, 21 nt, Human
cggcccagaaccccgggcccc

SEQ ID NO: 1025615 - RNA, 22 nt, Human
gcccagaaccccgggccccacc

SEQ ID NO: 1025616 - RNA, 22 nt, Human
ucccggcccagaaccccgggcc

SEQ ID NO: 1025617 - RNA, 20 nt, Human
ucuuuauuaagauggggacc

SEQ ID NO: 1025618 - RNA, 22 nt, Human
aaaaggaacaaaggaaacaaaa

SEQ ID NO: 1025619 - RNA, 19 nt, Human
aacaguccaaaucaguuuc

SEQ ID NO: 1025620 - RNA, 21 nt, Human
aaguuuuggaaguuuaaagcu

SEQ ID NO: 1025621 - RNA, 21 nt, Human
acagaguauaaacguaaaaag

SEQ ID NO: 1025622 - RNA, 19 nt, Human
agaagaacagaguauaaac

SEQ ID NO: 1025623 - RNA, 24 nt, Human
agaguauaaacguaaaaaggaaca

SEQ ID NO: 1025624 - RNA, 18 nt, Human
agcaaguguaggcaaaau

SEQ ID NO: 1025625 - RNA, 24 nt, Human
aggaacaaaggaaacaaaaaugac

SEQ ID NO: 1025626 - RNA, 20 nt, Human
agggcagcuauuuuucuaau

SEQ ID NO: 1025627 - RNA, 19 nt, Human
caaaggaugaaaaauuucc

SEQ ID NO: 1025628 - RNA, 21 nt, Human
cgcaaaggaugaaaaauuucc

SEQ ID NO: 1025629 - RNA, 20 nt, Human
cugagauaacuggcuucuuc

SEQ ID NO: 1025630 - RNA, 22 nt, Human
cuggcuucuucaucaccucgug

SEQ ID NO: 1025631 - RNA, 18 nt, Human
gaaacaaaaaugacaggc

SEQ ID NO: 1025632 - RNA, 18 nt, Human
gcuucuucaucaccucgu

SEQ ID NO: 1025633 - RNA, 21 nt, Human
uaaaaaggaacaaaggaaaca

SEQ ID NO: 1025634 - RNA, 22 nt, Human
uacuuuuagccuuuaacagucc

SEQ ID NO: 1025635 - RNA, 24 nt, Human
uagcaaguguaggcaaaauguguc

SEQ ID NO: 1025636 - RNA, 18 nt, Human
ucugagagcgaagaaaag

SEQ ID NO: 1025637 - RNA, 23 nt, Human
uuucaagggcagcuauuuuucua

SEQ ID NO: 1025638 - RNA, 22 nt, Human
uuuuuuuuuuuuuuuuuucaag

SEQ ID NO: 1025639 - RNA, 21 nt, Human
aaagaccaacaaacuucccuu

SEQ ID NO: 1025640 - RNA, 23 nt, Human
accaaaaacgacuuguacaccac

SEQ ID NO: 1025641 - RNA, 20 nt, Human
accgugcacacuggcaaggc

SEQ ID NO: 1025642 - RNA, 22 nt, Human
agcaggaaagaaguuauaccaa

SEQ ID NO: 1025643 - RNA, 23 nt, Human
agcaggaaagaaguuauaccaaa

SEQ ID NO: 1025644 - RNA, 20 nt, Human
aggaaacaguguuuccugga

SEQ ID NO: 1025645 - RNA, 20 nt, Human
aggcacuggcggaugcuggc

SEQ ID NO: 1025646 - RNA, 22 nt, Human
aggcagguuaagguccacaggc

SEQ ID NO: 1025647 - RNA, 23 nt, Human
aggcauucaacaaagaaguaagc

SEQ ID NO: 1025648 - RNA, 21 nt, Human
aggcugcuccccagggacccc

SEQ ID NO: 1025649 - RNA, 23 nt, Human
aggcugcuccccagggaccccag

SEQ ID NO: 1025650 - RNA, 21 nt, Human
agggaccccagcaccugccuu

SEQ ID NO: 1025651 - RNA, 28 nt, Human
agggugccuucuuugcauccaaagcuuu

SEQ ID NO: 1025652 - RNA, 22 nt, Human
auaccgcacucugccugaaaua

SEQ ID NO: 1025653 - RNA, 23 nt, Human
auggugacaaagguguucugguc

SEQ ID NO: 1025654 - RNA, 22 nt, Human
caaaacaucuugaaacuugcca

SEQ ID NO: 1025655 - RNA, 23 nt, Human
caacaaacuuccccagcagugcc

SEQ ID NO: 1025656 - RNA, 24 nt, Human
cacucugaccuuugaaauuggggg

SEQ ID NO: 1025657 - RNA, 18 nt, Human
cagagccccggacuuucc

SEQ ID NO: 1025658 - RNA, 23 nt, Human
caggaaagaaguuauaccaaaaa

SEQ ID NO: 1025659 - RNA, 23 nt, Human
cagguuaagguccacaggcugcu

SEQ ID NO: 1025660 - RNA, 18 nt, Human
caucucucuuguacugau

SEQ ID NO: 1025661 - RNA, 26 nt, Human
ccaaaaacgacuuguacaccacagac

SEQ ID NO: 1025662 - RNA, 18 nt, Human
ccagggaccccagcaccu

SEQ ID NO: 1025663 - RNA, 18 nt, Human
ccaucugcauucuggcug

SEQ ID NO: 1025664 - RNA, 21 nt, Human
ccccagagccccggacuuucc

SEQ ID NO: 1025665 - RNA, 20 nt, Human
ccccagggaccccagcaccu

SEQ ID NO: 1025666 - RNA, 20 nt, Human
ccccagggaccccagcaccu

SEQ ID NO: 1025667 - RNA, 18 nt, Human
ccucacaguggggaugaa

SEQ ID NO: 1025668 - RNA, 19 nt, Human
ccucugagcugggggcagg

SEQ ID NO: 1025669 - RNA, 19 nt, Human
ccucugaguaccgugugaa

SEQ ID NO: 1025670 - RNA, 25 nt, Human
cgacuuguacaccacagacauuaua

SEQ ID NO: 1025671 - RNA, 19 nt, Human
cugcacuucccucacagug

SEQ ID NO: 1025672 - RNA, 26 nt, Human
cuggaaauuuaucuaauaaagaccaa

SEQ ID NO: 1025673 - RNA, 19 nt, Human
cuggguacugagagaucua

SEQ ID NO: 1025674 - RNA, 21 nt, Human
cuuccccagcagugccucuga

SEQ ID NO: 1025675 - RNA, 20 nt, Human
cuuguggaagucagggugcc

SEQ ID NO: 1025676 - RNA, 21 nt, Human
gaaagaaguuauaccaaaaac

SEQ ID NO: 1025677 - RNA, 22 nt, Human
gaagcuuugguuccauuuuagg

SEQ ID NO: 1025678 - RNA, 21 nt, Human
gaccaacaaacuuccccagca

SEQ ID NO: 1025679 - RNA, 18 nt, Human
gagaaugacaacucacag

SEQ ID NO: 1025680 - RNA, 20 nt, Human
gagggagcugggaagcuuug

SEQ ID NO: 1025681 - RNA, 24 nt, Human
gcagcagcagcaggaaagaaguuu

SEQ ID NO: 1025682 - RNA, 19 nt, Human
gcaggccaguggacaugga

SEQ ID NO: 1025683 - RNA, 20 nt, Human
gccaagccagcuccaucugc

SEQ ID NO: 1025684 - RNA, 18 nt, Human
gcuguguauagugaccuc

SEQ ID NO: 1025685 - RNA, 21 nt, Human
ggcacuggcggaugcuggcag

SEQ ID NO: 1025686 - RNA, 18 nt, Human
gggaacagccaagccagc

SEQ ID NO: 1025687 - RNA, 24 nt, Human
gggaagcagcagcagcaggaaaga

SEQ ID NO: 1025688 - RNA, 24 nt, Human
gggaagcuuugguuccauuuuagg

SEQ ID NO: 1025689 - RNA, 22 nt, Human
guacaccacagacauuauaacc

SEQ ID NO: 1025690 - RNA, 18 nt, Human
gucauuucugcucuguuc

SEQ ID NO: 1025691 - RNA, 24 nt, Human
gugggauggggugcuccauaugug

SEQ ID NO: 1025692 - RNA, 18 nt, Human
uaccgugugaauucuggu

SEQ ID NO: 1025693 - RNA, 18 nt, Human
uauaacccuuuccucaaa

SEQ ID NO: 1025694 - RNA, 21 nt, Human
uccagggaacagccaagccag

SEQ ID NO: 1025695 - RNA, 19 nt, Human
uccucaaagaaacagucau

SEQ ID NO: 1025696 - RNA, 22 nt, Human
ucuccguucugugaagugaggu

SEQ ID NO: 1025697 - RNA, 21 nt, Human
ucugaguggaaaaaguccugg

SEQ ID NO: 1025698 - RNA, 19 nt, Human
ucugcauucuggcugcagc

SEQ ID NO: 1025699 - RNA, 26 nt, Human
ucuggcugcagcguguacauuagggg

SEQ ID NO: 1025700 - RNA, 26 nt, Human
ucuuguggaagucagggugccuucuu

SEQ ID NO: 1025701 - RNA, 18 nt, Human
ugaauaugcacucugacc

SEQ ID NO: 1025702 - RNA, 21 nt, Human
ugaccucuugacuuucaaccu

SEQ ID NO: 1025703 - RNA, 22 nt, Human
ugacuuucaaccugagcacccu

SEQ ID NO: 1025704 - RNA, 19 nt, Human
ugcauccaaagcuuugagg

SEQ ID NO: 1025705 - RNA, 19 nt, Human
ugcccauccagggaacagc

SEQ ID NO: 1025706 - RNA, 24 nt, Human
ugcuccccagggaccccagcaccu

SEQ ID NO: 1025707 - RNA, 27 nt, Human
uggaauauaccgcacucugccugaaaa

SEQ ID NO: 1025708 - RNA, 22 nt, Human
uggauagaugagaaugacaacu

SEQ ID NO: 1025709 - RNA, 24 nt, Human
uggccucuggacacugcacuuccc

SEQ ID NO: 1025710 - RNA, 18 nt, Human
uggcuccccagagccccu

SEQ ID NO: 1025711 - RNA, 19 nt, Human
ugugauggugacaaaggug

SEQ ID NO: 1025712 - RNA, 22 nt, Human
uguguacacucuagccugcgug

SEQ ID NO: 1025713 - RNA, 24 nt, Human
uguguacacucuagccugcgugug

SEQ ID NO: 1025714 - RNA, 22 nt, Human
uguuggguauuauggacagguc

SEQ ID NO: 1025715 - RNA, 21 nt, Human
uuggccucuggacacugcacu

SEQ ID NO: 1025716 - RNA, 19 nt, Human
uauuucuuguacagaagua

SEQ ID NO: 1025717 - RNA, 22 nt, Human
uguacagaaguaauuccaauuc

SEQ ID NO: 1025718 - RNA, 20 nt, Human
uuuuuuuuuuuuuuugucag

SEQ ID NO: 1025719 - RNA, 20 nt, Human
uuuuuuuuuuuuuuugucag

SEQ ID NO: 1025720 - RNA, 24 nt, Human
agaggaucauccggcggcugcggg

SEQ ID NO: 1025721 - RNA, 20 nt, Human
aggcagcacccgugcucccc

SEQ ID NO: 1025722 - RNA, 22 nt, Human
aggcagcacccgugcuccccgc

SEQ ID NO: 1025723 - RNA, 20 nt, Human
agggcaccgcuggcacgggg

SEQ ID NO: 1025724 - RNA, 19 nt, Human
aggguccggaggcaggagg

SEQ ID NO: 1025725 - RNA, 22 nt, Human
auccgcacggaaggcagcaccc

SEQ ID NO: 1025726 - RNA, 27 nt, Human
caccaaagcugaggcuaguccgagggc

SEQ ID NO: 1025727 - RNA, 22 nt, Human
cacccgugcuccccgcuggagg

SEQ ID NO: 1025728 - RNA, 23 nt, Human
cacccgugcuccccgcuggaggc

SEQ ID NO: 1025729 - RNA, 19 nt, Human
cagaagggcaccgcuggca

SEQ ID NO: 1025730 - RNA, 20 nt, Human
ccaaagcugaggcuaguccg

SEQ ID NO: 1025731 - RNA, 18 nt, Human
ccacaaggcagggcgugc

SEQ ID NO: 1025732 - RNA, 19 nt, Human
ccccacggccgggagcggg

SEQ ID NO: 1025733 - RNA, 23 nt, Human
cgggaggccguggcuccacaagg

SEQ ID NO: 1025734 - RNA, 25 nt, Human
cuaaccccugagggauccgggcgcg

SEQ ID NO: 1025735 - RNA, 23 nt, Human
cugugggagacagagacgggagc

SEQ ID NO: 1025736 - RNA, 23 nt, Human
gaaggguccggaggcaggagggc

SEQ ID NO: 1025737 - RNA, 19 nt, Human
gcgagacagaggggacaca

SEQ ID NO: 1025738 - RNA, 18 nt, Human
ggacacaaacgcagcaag

SEQ ID NO: 1025739 - RNA, 22 nt, Human
ggcgugcugccaccaaagcuga

SEQ ID NO: 1025740 - RNA, 18 nt, Human
ggcugcgggcggcugggg

SEQ ID NO: 1025741 - RNA, 18 nt, Human
gggaaggguccggaggca

SEQ ID NO: 1025742 - RNA, 21 nt, Human
gggaggccguggcuccacaag

SEQ ID NO: 1025743 - RNA, 23 nt, Human
gggcgugcugccaccaaagcuga

SEQ ID NO: 1025744 - RNA, 18 nt, Human
ucgaggcccggaagucca

SEQ ID NO: 1025745 - RNA, 19 nt, Human
ugaccgaguccaggaaagc

SEQ ID NO: 1025746 - RNA, 18 nt, Human
ugaggcuaguccgagggc

SEQ ID NO: 1025747 - RNA, 19 nt, Human
ugggagacagagacgggag

SEQ ID NO: 1025748 - RNA, 18 nt, Human
ugugcggaagaaaucgag

SEQ ID NO: 1025749 - RNA, 19 nt, Human
ugugcggaagaaaucgagg

SEQ ID NO: 1025750 - RNA, 20 nt, Human
ugugcggaagaaaucgaggc

SEQ ID NO: 1025751 - RNA, 22 nt, Human
uuuuuuuuuuuuuugguuuugg

SEQ ID NO: 1025752 - RNA, 24 nt, Human
uuuuuuuuuuuuuuuuuugguuuu

SEQ ID NO: 1025753 - RNA, 22 nt, Human
uuuuuuuuuuuuuuuuuuuggg

SEQ ID NO: 1025754 - RNA, 25 nt, Human
aagugaucuucccaccucagcuucu

SEQ ID NO: 1025755 - RNA, 23 nt, Human
acaccugcaggcagaagcccagg

SEQ ID NO: 1025756 - RNA, 23 nt, Human
accucagcuucuggaguagcugg

SEQ ID NO: 1025757 - RNA, 22 nt, Human
agcagaugaugaagccagcugg

SEQ ID NO: 1025758 - RNA, 18 nt, Human
aggcagaagcccaggccu

SEQ ID NO: 1025759 - RNA, 19 nt, Human
aggcagaagcccaggccuc

SEQ ID NO: 1025760 - RNA, 23 nt, Human
aguagcugggacuauaggcaugu

SEQ ID NO: 1025761 - RNA, 24 nt, Human
augaagccagcugggcuugugucc

SEQ ID NO: 1025762 - RNA, 22 nt, Human
caccugcaggcagaagcccagg

SEQ ID NO: 1025763 - RNA, 22 nt, Human
cacugcagccucaaucucccag

SEQ ID NO: 1025764 - RNA, 21 nt, Human
cacugggucuuaccaaggccu

SEQ ID NO: 1025765 - RNA, 23 nt, Human
cagacaccugcaggcagaagccc

SEQ ID NO: 1025766 - RNA, 24 nt, Human
cagccucaaucucccaggcucaag

SEQ ID NO: 1025767 - RNA, 26 nt, Human
cagcgucccccaaacccaacaccucc

SEQ ID NO: 1025768 - RNA, 19 nt, Human
caggcagaagcccaggccu

SEQ ID NO: 1025769 - RNA, 19 nt, Human
caggucccuccccgccccc

SEQ ID NO: 1025770 - RNA, 21 nt, Human
ccacauauguuugcucaaggc

SEQ ID NO: 1025771 - RNA, 21 nt, Human
ccagggccggccgagggagga

SEQ ID NO: 1025772 - RNA, 23 nt, Human
cccaagcuggagugcaauggcau

SEQ ID NO: 1025773 - RNA, 22 nt, Human
cccaggcucaagugaucuuccc

SEQ ID NO: 1025774 - RNA, 21 nt, Human
cccgacccugcaccugcccaa

SEQ ID NO: 1025775 - RNA, 26 nt, Human
cccgccccccuccucaaaucaggcca

SEQ ID NO: 1025776 - RNA, 22 nt, Human
cccuagagcuccacaaucagcc

SEQ ID NO: 1025777 - RNA, 23 nt, Human
cccuccccgccccccuccucaaa

SEQ ID NO: 1025778 - RNA, 21 nt, Human
cccugcaucaccaccucuuuu

SEQ ID NO: 1025779 - RNA, 23 nt, Human
ccgcaggucccuccccgcccccc

SEQ ID NO: 1025780 - RNA, 20 nt, Human
ccuccccgccccccuccuca

SEQ ID NO: 1025781 - RNA, 21 nt, Human
ccugcuguaaccacuaccuuu

SEQ ID NO: 1025782 - RNA, 23 nt, Human
cgagccggagaagggggcggggc

SEQ ID NO: 1025783 - RNA, 27 nt, Human
cgccccccuccucaaaucaggccaaag

SEQ ID NO: 1025784 - RNA, 21 nt, Human
cgccgcagacaccugcaggca

SEQ ID NO: 1025785 - RNA, 19 nt, Human
cggccgagggaggaggcgg

SEQ ID NO: 1025786 - RNA, 24 nt, Human
cucaagugaucuucccaccucagc

SEQ ID NO: 1025787 - RNA, 24 nt, Human
cucagcuucuggaguagcugggac

SEQ ID NO: 1025788 - RNA, 25 nt, Human
cucccaggcucaagugaucuuccca

SEQ ID NO: 1025789 - RNA, 18 nt, Human
cuccccgccccccuccuc

SEQ ID NO: 1025790 - RNA, 23 nt, Human
cugaagccaauacagcacugggu

SEQ ID NO: 1025791 - RNA, 24 nt, Human
cugaagccaauacagcacuggguc

SEQ ID NO: 1025792 - RNA, 23 nt, Human
cugcagccucaaucucccaggcu

SEQ ID NO: 1025793 - RNA, 24 nt, Human
cuggaguagcugggacuauaggca

SEQ ID NO: 1025794 - RNA, 24 nt, Human
cuggagugcaauggcaugaucuca

SEQ ID NO: 1025795 - RNA, 22 nt, Human
cugggaaccagggccaggggga

SEQ ID NO: 1025796 - RNA, 20 nt, Human
gaacccgacccugcaccugc

SEQ ID NO: 1025797 - RNA, 18 nt, Human
gacccugcaccugcccaa

SEQ ID NO: 1025798 - RNA, 22 nt, Human
gacccugcaccugcccaaggga

SEQ ID NO: 1025799 - RNA, 19 nt, Human
gacuauaggcauguaccac

SEQ ID NO: 1025800 - RNA, 18 nt, Human
gccaaaucgggcuguacc

SEQ ID NO: 1025801 - RNA, 19 nt, Human
gcucaagugaucuucccac

SEQ ID NO: 1025802 - RNA, 22 nt, Human
gcucaagugaucuucccaccuc

SEQ ID NO: 1025803 - RNA, 19 nt, Human
gcuggagugcaauggcaug

SEQ ID NO: 1025804 - RNA, 22 nt, Human
ggcaaauucccccagcagguuc

SEQ ID NO: 1025805 - RNA, 21 nt, Human
ggccgagggaggaggcgggcu

SEQ ID NO: 1025806 - RNA, 23 nt, Human
ggggccgcaagccgcaggucccu

SEQ ID NO: 1025807 - RNA, 21 nt, Human
gucccuccccgccccccuccu

SEQ ID NO: 1025808 - RNA, 19 nt, Human
ucacugcagccucaaucuc

SEQ ID NO: 1025809 - RNA, 23 nt, Human
ucacugcagccucaaucucccag

SEQ ID NO: 1025810 - RNA, 24 nt, Human
ucacugcagccucaaucucccagg

SEQ ID NO: 1025811 - RNA, 20 nt, Human
ucaggguggcaaauuccccc

SEQ ID NO: 1025812 - RNA, 24 nt, Human
uccacaaucagcagaugaugaagc

SEQ ID NO: 1025813 - RNA, 18 nt, Human
ucccaggcucaagugauc

SEQ ID NO: 1025814 - RNA, 19 nt, Human
ucccccaaacccaacaccu

SEQ ID NO: 1025815 - RNA, 19 nt, Human
ucccccaaacccaacaccu

SEQ ID NO: 1025816 - RNA, 19 nt, Human
uccccgccccccuccucaa

SEQ ID NO: 1025817 - RNA, 22 nt, Human
uccccgccccccuccucaaauc

SEQ ID NO: 1025818 - RNA, 18 nt, Human
ucccuccccgccccccuc

SEQ ID NO: 1025819 - RNA, 24 nt, Human
uccggaggcuuugaacccgacccu

SEQ ID NO: 1025820 - RNA, 24 nt, Human
ucuggaguagcugggacuauaggc

SEQ ID NO: 1025821 - RNA, 23 nt, Human
ucuugcucuggugcccaagcugg

SEQ ID NO: 1025822 - RNA, 24 nt, Human
ucuugcucuggugcccaagcugga

SEQ ID NO: 1025823 - RNA, 19 nt, Human
ugcagccucaaucucccag

SEQ ID NO: 1025824 - RNA, 22 nt, Human
ugccagcgucccccaaacccaa

SEQ ID NO: 1025825 - RNA, 24 nt, Human
ugcccaagcuggagugcaauggca

SEQ ID NO: 1025826 - RNA, 24 nt, Human
ugcucuggugcccaagcuggagug

SEQ ID NO: 1025827 - RNA, 19 nt, Human
uggagugcaauggcaugau

SEQ ID NO: 1025828 - RNA, 24 nt, Human
uggagugcaauggcaugaucucag

SEQ ID NO: 1025829 - RNA, 24 nt, Human
uggcaugaucucagcucacugcag

SEQ ID NO: 1025830 - RNA, 21 nt, Human
ugggacuauaggcauguacca

SEQ ID NO: 1025831 - RNA, 24 nt, Human
ugggacuauaggcauguaccacug

SEQ ID NO: 1025832 - RNA, 23 nt, Human
uuaucugcaacauucucagcuac

SEQ ID NO: 1025833 - RNA, 23 nt, Human
uucccaccucagcuucuggagua

SEQ ID NO: 1025834 - RNA, 22 nt, Human
uugcuaggucauucucuucuau

SEQ ID NO: 1025835 - RNA, 18 nt, Human
uuugaacccgacccugca

SEQ ID NO: 1025836 - RNA, 20 nt, Human
uuuuagguacuacuugauug

SEQ ID NO: 1025837 - RNA, 20 nt, Human
uuuuuuuuuuugagacaagg

SEQ ID NO: 1025838 - RNA, 23 nt, Human
uuuuuuuuuuuugagacaagguc

SEQ ID NO: 1025839 - RNA, 24 nt, Human
uuuuuuuuuuuugagacaaggucu

SEQ ID NO: 1025840 - RNA, 20 nt, Human
uuuuuuuuuuuuuuuuuugg

SEQ ID NO: 1025841 - RNA, 22 nt, Human
acccccaguccccgccccuagc

SEQ ID NO: 1025842 - RNA, 20 nt, Human
agaugggcagacugaagccc

SEQ ID NO: 1025843 - RNA, 18 nt, Human
aggcacccccucccccug

SEQ ID NO: 1025844 - RNA, 23 nt, Human
agucugaggucacacagcagucu

SEQ ID NO: 1025845 - RNA, 25 nt, Human
cacccccaguccccgccccuagccc

SEQ ID NO: 1025846 - RNA, 19 nt, Human
cagacugaagcccaagagu

SEQ ID NO: 1025847 - RNA, 19 nt, Human
ccagagcccgucuggccaa

SEQ ID NO: 1025848 - RNA, 23 nt, Human
ccccuaaauagcacccccagucc

SEQ ID NO: 1025849 - RNA, 24 nt, Human
ccccuaaauagcacccccaguccc

SEQ ID NO: 1025850 - RNA, 19 nt, Human
ccccuggggagggggucca

SEQ ID NO: 1025851 - RNA, 23 nt, Human
cccgucuggccaaaggugaaaac

SEQ ID NO: 1025852 - RNA, 21 nt, Human
cccugcugccugguuucuccu

SEQ ID NO: 1025853 - RNA, 19 nt, Human
ccgucuggccaaaggugaa

SEQ ID NO: 1025854 - RNA, 18 nt, Human
ccucccccuggggagggg

SEQ ID NO: 1025855 - RNA, 18 nt, Human
cgacagaagggcagaugg

SEQ ID NO: 1025856 - RNA, 21 nt, Human
cgcucugcugcccucgacgca

SEQ ID NO: 1025857 - RNA, 19 nt, Human
cugcugcccucgacgcagc

SEQ ID NO: 1025858 - RNA, 21 nt, Human
cugcugcccucgacgcagcuc

SEQ ID NO: 1025859 - RNA, 18 nt, Human
cugcugucuccauucagc

SEQ ID NO: 1025860 - RNA, 28 nt, Human
gaaaacagugcaggagaaaccgguaccc

SEQ ID NO: 1025861 - RNA, 21 nt, Human
ggugaaaacagugcaggagaa

SEQ ID NO: 1025862 - RNA, 18 nt, Human
guaggucuucccagagcc

SEQ ID NO: 1025863 - RNA, 20 nt, Human
guguaggucuucccagagcc

SEQ ID NO: 1025864 - RNA, 21 nt, Human
ucccagagcccgucuggccaa

SEQ ID NO: 1025865 - RNA, 23 nt, Human
ucccugagcagugcagcacgcuc

SEQ ID NO: 1025866 - RNA, 21 nt, Human
uccugaauccccuuguucccc

SEQ ID NO: 1025867 - RNA, 20 nt, Human
ucuccuggguucccacuugg

SEQ ID NO: 1025868 - RNA, 23 nt, Human
ucuccuggguucccacuuggccu

SEQ ID NO: 1025869 - RNA, 24 nt, Human
ugcagcacgcucugcugcccucga

SEQ ID NO: 1025870 - RNA, 20 nt, Human
ugcaggagaaacugcagagu

SEQ ID NO: 1025871 - RNA, 23 nt, Human
uggaguagcagcugcugucucca

SEQ ID NO: 1025872 - RNA, 19 nt, Human
uggccaaaggugaaaacag

SEQ ID NO: 1025873 - RNA, 22 nt, Human
ugggcagacugaagcccaagag

SEQ ID NO: 1025874 - RNA, 21 nt, Human
uggggaggggguccagucagg

SEQ ID NO: 1025875 - RNA, 20 nt, Human
uuauucauguauuucauccc

SEQ ID NO: 1025876 - RNA, 23 nt, Human
uucauccccugcugccugguuuc

SEQ ID NO: 1025877 - RNA, 22 nt, Human
uuccccuaaauagcacccccag

SEQ ID NO: 1025878 - RNA, 18 nt, Human
uuuuuuuuuuuuuuuuug

SEQ ID NO: 1025879 - RNA, 18 nt, Human
uuuuuuuuuuuuuuuuug

SEQ ID NO: 1025880 - RNA, 23 nt, Human
aagggcugggcaguuucacuggc

SEQ ID NO: 1025881 - RNA, 21 nt, Human
aaugcuagacgccccccgccc

SEQ ID NO: 1025882 - RNA, 22 nt, Human
acagcccggggcucucugcguc

SEQ ID NO: 1025883 - RNA, 21 nt, Human
agagagccgacccuucuccag

SEQ ID NO: 1025884 - RNA, 18 nt, Human
aggcagagaagggcuggg

SEQ ID NO: 1025885 - RNA, 18 nt, Human
aggcagagaagggcuggg

SEQ ID NO: 1025886 - RNA, 22 nt, Human
aggcuuuauugggggugggggg

SEQ ID NO: 1025887 - RNA, 18 nt, Human
agggucgucucugccugg

SEQ ID NO: 1025888 - RNA, 20 nt, Human
ccccuggaccuccgcccuuu

SEQ ID NO: 1025889 - RNA, 18 nt, Human
cccgcagcuguggacagc

SEQ ID NO: 1025890 - RNA, 25 nt, Human
cccgcagcuguggacagcccggggc

SEQ ID NO: 1025891 - RNA, 20 nt, Human
ccgggggacgcuggggagcc

SEQ ID NO: 1025892 - RNA, 21 nt, Human
ccuucuccaggccuaaugcua

SEQ ID NO: 1025893 - RNA, 19 nt, Human
cgagccugaccuggaggag

SEQ ID NO: 1025894 - RNA, 20 nt, Human
cgcccuguuccucugacgcg

SEQ ID NO: 1025895 - RNA, 22 nt, Human
cgcccuguuccucugacgcgua

SEQ ID NO: 1025896 - RNA, 22 nt, Human
cggaguugugggugguggucag

SEQ ID NO: 1025897 - RNA, 18 nt, Human
cggcggaaaacgcaggug

SEQ ID NO: 1025898 - RNA, 21 nt, Human
cugccccuggaccuccgcccu

SEQ ID NO: 1025899 - RNA, 23 nt, Human
gcccagggucgucucugccuggc

SEQ ID NO: 1025900 - RNA, 18 nt, Human
gcguacguuacuuccggc

SEQ ID NO: 1025901 - RNA, 22 nt, Human
ggaggaggucuuagggccugga

SEQ ID NO: 1025902 - RNA, 20 nt, Human
ggaguggggcaaucgaggcg

SEQ ID NO: 1025903 - RNA, 20 nt, Human
ggcucgaggacuucgcucuc

SEQ ID NO: 1025904 - RNA, 19 nt, Human
gggaguggggcaaucgagg

SEQ ID NO: 1025905 - RNA, 19 nt, Human
gggcacggcggaaaacgca

SEQ ID NO: 1025906 - RNA, 19 nt, Human
gggcuuccgagccugaccu

SEQ ID NO: 1025907 - RNA, 19 nt, Human
ggggaguggggcaaucgag

SEQ ID NO: 1025908 - RNA, 19 nt, Human
guggucaguuucccaaugg

SEQ ID NO: 1025909 - RNA, 21 nt, Human
uagacgccccccgcccuguuc

SEQ ID NO: 1025910 - RNA, 25 nt, Human
ucgaggcgguaacuccggcccucuu

SEQ ID NO: 1025911 - RNA, 23 nt, Human
ugaaagaagaggcuuuauugggg

SEQ ID NO: 1025912 - RNA, 23 nt, Human
ugaaagaagaggcuuuauugggg

SEQ ID NO: 1025913 - RNA, 24 nt, Human
ugcaauuaggcagagaagggcugg

SEQ ID NO: 1025914 - RNA, 24 nt, Human
ugccccuggaccuccgcccuuugc

SEQ ID NO: 1025915 - RNA, 20 nt, Human
uggcggaguuguggguggug

SEQ ID NO: 1025916 - RNA, 18 nt, Human
uggggguggggggagugg

SEQ ID NO: 1025917 - RNA, 20 nt, Human
uggggguggggggagugggg

SEQ ID NO: 1025918 - RNA, 18 nt, Human
uuggggguggggggagug

SEQ ID NO: 1025919 - RNA, 20 nt, Human
auaaagagccacguccuaca

SEQ ID NO: 1025920 - RNA, 22 nt, Human
auugucuggaacaucaaggccu

SEQ ID NO: 1025921 - RNA, 18 nt, Human
caaggccuuuccuccccu

SEQ ID NO: 1025922 - RNA, 19 nt, Human
cucacgaauaaagagccac

SEQ ID NO: 1025923 - RNA, 19 nt, Human
cuccccuggcaguggcaca

SEQ ID NO: 1025924 - RNA, 21 nt, Human
guccuacaaccguucccaacg

SEQ ID NO: 1025925 - RNA, 22 nt, Human
ucugaagcucuagguucagcgg

SEQ ID NO: 1025926 - RNA, 19 nt, Human
uuuuuuuuuuuuuuuuuaa

SEQ ID NO: 1025927 - RNA, 19 nt, Human
aaaaaccacauuagagaug

SEQ ID NO: 1025928 - RNA, 21 nt, Human
aaaacaaaaauagaaaaauua

SEQ ID NO: 1025929 - RNA, 19 nt, Human
aacaaaaauagaaaaauua

SEQ ID NO: 1025930 - RNA, 24 nt, Human
acacucacacccacaacaggcacc

SEQ ID NO: 1025931 - RNA, 19 nt, Human
acccacaacaggcacccca

SEQ ID NO: 1025932 - RNA, 21 nt, Human
acccacaacaggcaccccagc

SEQ ID NO: 1025933 - RNA, 25 nt, Human
acuccaaaauccauaaugaaaugga

SEQ ID NO: 1025934 - RNA, 22 nt, Human
acuuuaaauagauuaaaaaaag

SEQ ID NO: 1025935 - RNA, 21 nt, Human
agagauggcauucuucaagcc

SEQ ID NO: 1025936 - RNA, 24 nt, Human
auauauguguguguauauauauau

SEQ ID NO: 1025937 - RNA, 21 nt, Human
caaaucauuuacuaacaugac

SEQ ID NO: 1025938 - RNA, 23 nt, Human
caacaggcaccccagccacugau

SEQ ID NO: 1025939 - RNA, 20 nt, Human
caagcuaaaucugaacccuc

SEQ ID NO: 1025940 - RNA, 25 nt, Human
cacacccacaacaggcaccccagaa

SEQ ID NO: 1025941 - RNA, 22 nt, Human
ccaagcuaaaucugaacccuca

SEQ ID NO: 1025942 - RNA, 20 nt, Human
ccacaacaggcaccccagcc

SEQ ID NO: 1025943 - RNA, 19 nt, Human
ccuuccuggcuacccccuc

SEQ ID NO: 1025944 - RNA, 23 nt, Human
cuaucacucacaacuccaaaauc

SEQ ID NO: 1025945 - RNA, 23 nt, Human
cucacacccacaacaggcacccc

SEQ ID NO: 1025946 - RNA, 20 nt, Human
cuuccuggcuacccccuccc

SEQ ID NO: 1025947 - RNA, 24 nt, Human
cuuccuggcuacccccuccccucc

SEQ ID NO: 1025948 - RNA, 19 nt, Human
gcuacccccuccccuccaa

SEQ ID NO: 1025949 - RNA, 20 nt, Human
guguguauauauauauauau

SEQ ID NO: 1025950 - RNA, 19 nt, Human
guuucuuuuuuuucuucca

SEQ ID NO: 1025951 - RNA, 21 nt, Human
uaaaaccaaaaacaaaaauag

SEQ ID NO: 1025952 - RNA, 23 nt, Human
uaacaugacaacagauuuggcuu

SEQ ID NO: 1025953 - RNA, 22 nt, Human
uagauuaaaaaaaguaauuucu

SEQ ID NO: 1025954 - RNA, 27 nt, Human
uauacuuuuuauauauguguguguaua

SEQ ID NO: 1025955 - RNA, 20 nt, Human
uauauauguguguguauaua

SEQ ID NO: 1025956 - RNA, 26 nt, Human
uauguguguguauauauauauaaugu

SEQ ID NO: 1025957 - RNA, 19 nt, Human
ucacacccacaacaggcag

SEQ ID NO: 1025958 - RNA, 20 nt, Human
ucagcccaaucguucccgcc

SEQ ID NO: 1025959 - RNA, 24 nt, Human
uccaaaacaguucaauauagccac

SEQ ID NO: 1025960 - RNA, 21 nt, Human
ucccucaucuccuauacugaa

SEQ ID NO: 1025961 - RNA, 21 nt, Human
uccuggcagcaaaucucugca

SEQ ID NO: 1025962 - RNA, 23 nt, Human
uccuggcuacccccuccccucca

SEQ ID NO: 1025963 - RNA, 18 nt, Human
ugaacccucaaaauugau

SEQ ID NO: 1025964 - RNA, 21 nt, Human
ugauuccuggcagcaaaucuc

SEQ ID NO: 1025965 - RNA, 19 nt, Human
uggcuacccccuccccucc

SEQ ID NO: 1025966 - RNA, 18 nt, Human
uguauauauauauauaua

SEQ ID NO: 1025967 - RNA, 24 nt, Human
uguauauauauauauauauuuaua

SEQ ID NO: 1025968 - RNA, 18 nt, Human
uguguauauauauauaua

SEQ ID NO: 1025969 - RNA, 20 nt, Human
uguguauauauauauauaua

SEQ ID NO: 1025970 - RNA, 24 nt, Human
uguguauauauauauauauauuua

SEQ ID NO: 1025971 - RNA, 18 nt, Human
uguguguguauauauaua

SEQ ID NO: 1025972 - RNA, 18 nt, Human
uguguguguauauauaua

SEQ ID NO: 1025973 - RNA, 20 nt, Human
uuaaaaccaaaaacaaaaau

SEQ ID NO: 1025974 - RNA, 22 nt, Human
uucaaaaaauauuuucucucau

SEQ ID NO: 1025975 - RNA, 19 nt, Human
uucaaguuuaaugggaaga

SEQ ID NO: 1025976 - RNA, 24 nt, Human
uucaauauagccacaguucaaguu

SEQ ID NO: 1025977 - RNA, 22 nt, Human
uuccaagcuaaaucugaacccu

SEQ ID NO: 1025978 - RNA, 22 nt, Human
uucccgccgccgcaacuccaac

SEQ ID NO: 1025979 - RNA, 20 nt, Human
uuccuggcagcaaaucucug

SEQ ID NO: 1025980 - RNA, 24 nt, Human
uuuaaaaaccacauuagagaugaa

SEQ ID NO: 1025981 - RNA, 18 nt, Human
aaaaagccagacacaaga

SEQ ID NO: 1025982 - RNA, 25 nt, Human
aaagccagacacaagaaaccacaua

SEQ ID NO: 1025983 - RNA, 18 nt, Human
aaagguaauuucaggcug

SEQ ID NO: 1025984 - RNA, 18 nt, Human
aagaggaaugaaaaacug

SEQ ID NO: 1025985 - RNA, 18 nt, Human
acacacaccuggagggca

SEQ ID NO: 1025986 - RNA, 21 nt, Human
acaccuggagggcacccacac

SEQ ID NO: 1025987 - RNA, 22 nt, Human
acagagccuccagugguauacu

SEQ ID NO: 1025988 - RNA, 21 nt, Human
acaggcccacgguugaauacc

SEQ ID NO: 1025989 - RNA, 25 nt, Human
accucaaggagcacgggaccuggga

SEQ ID NO: 1025990 - RNA, 23 nt, Human
agaagaggcaaaucuagacauau

SEQ ID NO: 1025991 - RNA, 19 nt, Human
aggcagugaugauaagggg

SEQ ID NO: 1025992 - RNA, 20 nt, Human
agggguaugagggauacuca

SEQ ID NO: 1025993 - RNA, 18 nt, Human
aggucacaccugcacaua

SEQ ID NO: 1025994 - RNA, 18 nt, Human
agguucuggauguuccug

SEQ ID NO: 1025995 - RNA, 20 nt, Human
agugguaaaaagccagacac

SEQ ID NO: 1025996 - RNA, 24 nt, Human
caacauggaugaacucugaaaacg

SEQ ID NO: 1025997 - RNA, 18 nt, Human
cacaccuggagggcaccc

SEQ ID NO: 1025998 - RNA, 22 nt, Human
cacagcaguagcauuuauaaua

SEQ ID NO: 1025999 - RNA, 20 nt, Human
cagaagaggcaaaucuagac

SEQ ID NO: 1026000 - RNA, 25 nt, Human
cagugguaaaaagccagacacaaga

SEQ ID NO: 1026001 - RNA, 18 nt, Human
cauaaagaggaaugaaaa

SEQ ID NO: 1026002 - RNA, 21 nt, Human
cauggaucccuccggucuccc

SEQ ID NO: 1026003 - RNA, 21 nt, Human
ccucauuccuucggccuccaa

SEQ ID NO: 1026004 - RNA, 19 nt, Human
ccuccaacaucuccccuuu

SEQ ID NO: 1026005 - RNA, 19 nt, Human
cggcagacagaguuuguca

SEQ ID NO: 1026006 - RNA, 25 nt, Human
cguucagugguaaaaagccagacac

SEQ ID NO: 1026007 - RNA, 19 nt, Human
cucacagagccuccagugg

SEQ ID NO: 1026008 - RNA, 20 nt, Human
gaacgaaggacgacgaaugc

SEQ ID NO: 1026009 - RNA, 21 nt, Human
gaacgaaggacgacgaaugca

SEQ ID NO: 1026010 - RNA, 22 nt, Human
gaaugcagaaaugagacagaca

SEQ ID NO: 1026011 - RNA, 18 nt, Human
ggagguaacaggcccacg

SEQ ID NO: 1026012 - RNA, 23 nt, Human
gucugaucaguuucacuuucucu

SEQ ID NO: 1026013 - RNA, 25 nt, Human
guuccuguggauaaccucaaggagc

SEQ ID NO: 1026014 - RNA, 26 nt, Human
guuccuguggauaaccucaaggagcc

SEQ ID NO: 1026015 - RNA, 24 nt, Human
uaaaaagccagacacaagaaacca

SEQ ID NO: 1026016 - RNA, 20 nt, Human
uaccauggaucccuccgguc

SEQ ID NO: 1026017 - RNA, 24 nt, Human
uacugaguuggucacgacccucau

SEQ ID NO: 1026018 - RNA, 26 nt, Human
uaucagagaguuggaaacaaccccaa

SEQ ID NO: 1026019 - RNA, 20 nt, Human
uauuagguagagugaauagg

SEQ ID NO: 1026020 - RNA, 18 nt, Human
uauuauucagccauaaag

SEQ ID NO: 1026021 - RNA, 20 nt, Human
ucagagagccuccucgugcc

SEQ ID NO: 1026022 - RNA, 20 nt, Human
uccagaagaggcaaaucuag

SEQ ID NO: 1026023 - RNA, 18 nt, Human
ucuagggaacagggaccu

SEQ ID NO: 1026024 - RNA, 22 nt, Human
ucugaucaguuucacuuucucu

SEQ ID NO: 1026025 - RNA, 23 nt, Human
ugaauaaagguaauuucaggcug

SEQ ID NO: 1026026 - RNA, 18 nt, Human
ugaguaaacaaacugugg

SEQ ID NO: 1026027 - RNA, 23 nt, Human
ugaguaaacaaacugugguauau

SEQ ID NO: 1026028 - RNA, 20 nt, Human
ugcucuggcagaccuuccuc

SEQ ID NO: 1026029 - RNA, 19 nt, Human
uggcagccuccucagagag

SEQ ID NO: 1026030 - RNA, 19 nt, Human
uguuccuguggauaaccuc

SEQ ID NO: 1026031 - RNA, 21 nt, Human
uuccauggucacacacaccug

SEQ ID NO: 1026032 - RNA, 28 nt, Human
uuuacagcccuucauauuuauuagguag

SEQ ID NO: 1026033 - RNA, 23 nt, Human
uuuuacagcccuucauauuuauu

SEQ ID NO: 1026034 - RNA, 22 nt, Human
uuuuuuuuuuuuuuuuucacag

SEQ ID NO: 1026035 - RNA, 18 nt, Human
aaaucccagccauuccca

SEQ ID NO: 1026036 - RNA, 20 nt, Human
aagggccagaauaagcaaca

SEQ ID NO: 1026037 - RNA, 21 nt, Human
aagggccagaauaagcaacaa

SEQ ID NO: 1026038 - RNA, 18 nt, Human
acacaacagaugcggccu

SEQ ID NO: 1026039 - RNA, 20 nt, Human
accacacaacagaugcggcc

SEQ ID NO: 1026040 - RNA, 22 nt, Human
aggcacauguucgucccugccc

SEQ ID NO: 1026041 - RNA, 18 nt, Human
agugauggggguagaaga

SEQ ID NO: 1026042 - RNA, 21 nt, Human
aucccauuccugagcugacaa

SEQ ID NO: 1026043 - RNA, 23 nt, Human
auggggguagaagauggugacug

SEQ ID NO: 1026044 - RNA, 21 nt, Human
caaagugaacagucugggcuu

SEQ ID NO: 1026045 - RNA, 25 nt, Human
caacgcccaaaucccagccauuccc

SEQ ID NO: 1026046 - RNA, 20 nt, Human
cacacuccccagugcggccc

SEQ ID NO: 1026047 - RNA, 21 nt, Human
caccacacaacagaugcggcc

SEQ ID NO: 1026048 - RNA, 21 nt, Human
cagaacagaaaagugcuuucc

SEQ ID NO: 1026049 - RNA, 18 nt, Human
cagugcagacuggaacua

SEQ ID NO: 1026050 - RNA, 19 nt, Human
caucucauaacucuccucc

SEQ ID NO: 1026051 - RNA, 22 nt, Human
caugguagcaggacaagucacc

SEQ ID NO: 1026052 - RNA, 24 nt, Human
ccagaacagaaaagugcuuuccuu

SEQ ID NO: 1026053 - RNA, 21 nt, Human
cccacagagauugacagccaa

SEQ ID NO: 1026054 - RNA, 21 nt, Human
cccacaguaggaccauagggc

SEQ ID NO: 1026055 - RNA, 22 nt, Human
cccagcccacacuccccagugc

SEQ ID NO: 1026056 - RNA, 22 nt, Human
cccagugcggcccccgcucucc

SEQ ID NO: 1026057 - RNA, 21 nt, Human
ccugagugcuuguggccacca

SEQ ID NO: 1026058 - RNA, 20 nt, Human
cgcccaaaucccagccauuc

SEQ ID NO: 1026059 - RNA, 19 nt, Human
cugcggcccagcccacacu

SEQ ID NO: 1026060 - RNA, 21 nt, Human
cugcugcugggucugccuggc

SEQ ID NO: 1026061 - RNA, 27 nt, Human
gcaaaauagugaagggagccgguaccc

SEQ ID NO: 1026062 - RNA, 24 nt, Human
gcccccgcucuccgcccgcucgcc

SEQ ID NO: 1026063 - RNA, 19 nt, Human
gccuggccaucaaggagca

SEQ ID NO: 1026064 - RNA, 19 nt, Human
gcugcugggucugccuggc

SEQ ID NO: 1026065 - RNA, 19 nt, Human
gggcaaaauagugaaggga

SEQ ID NO: 1026066 - RNA, 18 nt, Human
gguagaagauggugacug

SEQ ID NO: 1026067 - RNA, 24 nt, Human
guggcuguguggugugggaagggc

SEQ ID NO: 1026068 - RNA, 20 nt, Human
uagugaagggagccaggugc

SEQ ID NO: 1026069 - RNA, 18 nt, Human
ucacuggccccucggcug

SEQ ID NO: 1026070 - RNA, 22 nt, Human
uccugagcugacaagacagauu

SEQ ID NO: 1026071 - RNA, 19 nt, Human
uccugggggaaucccauuc

SEQ ID NO: 1026072 - RNA, 18 nt, Human
ucucauaacucuccuccc

SEQ ID NO: 1026073 - RNA, 21 nt, Human
ucuccgcccgcucgccgggag

SEQ ID NO: 1026074 - RNA, 22 nt, Human
ucugggcuucccagaacagaaa

SEQ ID NO: 1026075 - RNA, 21 nt, Human
ugaagggagccaggugcauau

SEQ ID NO: 1026076 - RNA, 19 nt, Human
ugagugcuuguggccacca

SEQ ID NO: 1026077 - RNA, 22 nt, Human
ugagugcuuguggccaccacac

SEQ ID NO: 1026078 - RNA, 23 nt, Human
ugccuggccaucaaggagcagcc

SEQ ID NO: 1026079 - RNA, 20 nt, Human
ugcggccuuccucuucacug

SEQ ID NO: 1026080 - RNA, 20 nt, Human
ugggaagggccagaauaagc

SEQ ID NO: 1026081 - RNA, 24 nt, Human
ugggaagggccagaauaagcaaca

SEQ ID NO: 1026082 - RNA, 26 nt, Human
uggggcucugucaacaugguagcagg

SEQ ID NO: 1026083 - RNA, 24 nt, Human
uggggguagaagauggugacuguu

SEQ ID NO: 1026084 - RNA, 24 nt, Human
uguguggcuguguggugugggaag

SEQ ID NO: 1026085 - RNA, 21 nt, Human
uucacuggccccucggcugcu

SEQ ID NO: 1026086 - RNA, 21 nt, Human
uucccacuagaggccaaaccg

SEQ ID NO: 1026087 - RNA, 23 nt, Human
uuuccagugcagacuggaacuag

SEQ ID NO: 1026088 - RNA, 23 nt, Human
uuuuaugguucucagauaccacu

SEQ ID NO: 1026089 - RNA, 22 nt, Human
uuuuuuuuuuuuaugguucuca

SEQ ID NO: 1026090 - RNA, 21 nt, Human
aagccgaggcgccggccggga

SEQ ID NO: 1026091 - RNA, 18 nt, Human
agacaaguguccggcucc

SEQ ID NO: 1026092 - RNA, 24 nt, Human
aggcuggggagggggcggagaggc

SEQ ID NO: 1026093 - RNA, 22 nt, Human
caccagccgggagacgcagaag

SEQ ID NO: 1026094 - RNA, 21 nt, Human
cagcucggagacgggagacaa

SEQ ID NO: 1026095 - RNA, 22 nt, Human
ccggcggcgcagaggcuucccc

SEQ ID NO: 1026096 - RNA, 20 nt, Human
ccggcuccuccuucggcggc

SEQ ID NO: 1026097 - RNA, 23 nt, Human
cuuaaucccaaacaucucaaaug

SEQ ID NO: 1026098 - RNA, 31 nt, Human
gagaaaggcuggggagggggcggagaggccc

SEQ ID NO: 1026099 - RNA, 21 nt, Human
gagcagcucggagacgggaga

SEQ ID NO: 1026100 - RNA, 19 nt, Human
ggagcagcucggagacggg

SEQ ID NO: 1026101 - RNA, 21 nt, Human
ggcgcagaggcuuccccacca

SEQ ID NO: 1026102 - RNA, 19 nt, Human
gggagggggcggagaggcc

SEQ ID NO: 1026103 - RNA, 24 nt, Human
gggcgagagaaaggcuggggaggg

SEQ ID NO: 1026104 - RNA, 19 nt, Human
uccccaggcggccgccgcc

SEQ ID NO: 1026105 - RNA, 20 nt, Human
uccccaggcggccgccgccu

SEQ ID NO: 1026106 - RNA, 19 nt, Human
ucucuccuccagggguggg

SEQ ID NO: 1026107 - RNA, 28 nt, Human
ugggagaagagggcgagagaaaggcugg

SEQ ID NO: 1026108 - RNA, 22 nt, Human
uggggagcagcucggagacggg

SEQ ID NO: 1026109 - RNA, 20 nt, Human
uuaaucccaaacaucucaaa

SEQ ID NO: 1026110 - RNA, 19 nt, Human
uucaaauuguauggcuuaa

SEQ ID NO: 1026111 - RNA, 25 nt, Human
aaaaaggcaccuacaaauugaaacu

SEQ ID NO: 1026112 - RNA, 21 nt, Human
aacauggcaagacccucaucu

SEQ ID NO: 1026113 - RNA, 19 nt, Human
aacauggugaaacccuguc

SEQ ID NO: 1026114 - RNA, 20 nt, Human
aacauggugaaacccugucu

SEQ ID NO: 1026115 - RNA, 21 nt, Human
aacauggugaaacccugucuc

SEQ ID NO: 1026116 - RNA, 26 nt, Human
aaccaagagcccaaaaacccaaccca

SEQ ID NO: 1026117 - RNA, 22 nt, Human
aaccagccacaaaagaggccuc

SEQ ID NO: 1026118 - RNA, 23 nt, Human
aaccugcccgccuaggccucccg

SEQ ID NO: 1026119 - RNA, 18 nt, Human
aagagcccaaaaacccaa

SEQ ID NO: 1026120 - RNA, 22 nt, Human
aagaguucaccacauuuuggug

SEQ ID NO: 1026121 - RNA, 21 nt, Human
aagcugaucaugaucuuguac

SEQ ID NO: 1026122 - RNA, 23 nt, Human
aaguaucucucuggauucaaacc

SEQ ID NO: 1026123 - RNA, 26 nt, Human
aaguguuaggauuacaggcaugagcc

SEQ ID NO: 1026124 - RNA, 24 nt, Human
aauuaggaaauauuaaaauuaaga

SEQ ID NO: 1026125 - RNA, 24 nt, Human
acaacacaaaaggccaucaacaaa

SEQ ID NO: 1026126 - RNA, 20 nt, Human
acaagaacauucuuccuuau

SEQ ID NO: 1026127 - RNA, 19 nt, Human
acacugaaacucugagaaa

SEQ ID NO: 1026128 - RNA, 21 nt, Human
acccagaaagcgccacaguuc

SEQ ID NO: 1026129 - RNA, 21 nt, Human
acccauauuucgaaaaaacuc

SEQ ID NO: 1026130 - RNA, 22 nt, Human
acugcaaccuccgccucacagg

SEQ ID NO: 1026131 - RNA, 24 nt, Human
acuggcuaacauggugaaacccug

SEQ ID NO: 1026132 - RNA, 25 nt, Human
agaacaaaaagcuacaaauagagga

SEQ ID NO: 1026133 - RNA, 22 nt, Human
agacaggaaagaacaugguuaa

SEQ ID NO: 1026134 - RNA, 18 nt, Human
agagaaugaagacagagg

SEQ ID NO: 1026135 - RNA, 24 nt, Human
agcacuuugggagcccaagguggg

SEQ ID NO: 1026136 - RNA, 23 nt, Human
agcagcuugugccuguaaucuca

SEQ ID NO: 1026137 - RNA, 24 nt, Human
agcagcuugugccuguaaucucag

SEQ ID NO: 1026138 - RNA, 22 nt, Human
agccacuacgccuggccaagaa

SEQ ID NO: 1026139 - RNA, 24 nt, Human
agccuggacaacauggcaagaccc

SEQ ID NO: 1026140 - RNA, 23 nt, Human
agcugggugcagcagcuugugcc

SEQ ID NO: 1026141 - RNA, 19 nt, Human
aggaaauauuaaaauuaag

SEQ ID NO: 1026142 - RNA, 23 nt, Human
aggaguucaagaccagccuggac

SEQ ID NO: 1026143 - RNA, 23 nt, Human
aggauugugugaggucaggaguu

SEQ ID NO: 1026144 - RNA, 24 nt, Human
aggauugugugaggucaggaguuc

SEQ ID NO: 1026145 - RNA, 18 nt, Human
aggccaucaacaaauuag

SEQ ID NO: 1026146 - RNA, 18 nt, Human
aggcuaaggcaggaggau

SEQ ID NO: 1026147 - RNA, 25 nt, Human
aggcuggagugcaguagcgcgaucu

SEQ ID NO: 1026148 - RNA, 21 nt, Human
agggagaagcugaucaugauc

SEQ ID NO: 1026149 - RNA, 19 nt, Human
aggucaggaguucaagacc

SEQ ID NO: 1026150 - RNA, 24 nt, Human
aggugggugaaucacgaggucagg

SEQ ID NO: 1026151 - RNA, 22 nt, Human
aguagagaugggguuuugccau

SEQ ID NO: 1026152 - RNA, 18 nt, Human
aguagcaccuucuucuug

SEQ ID NO: 1026153 - RNA, 21 nt, Human
agucuccaacaccauaugauc

SEQ ID NO: 1026154 - RNA, 20 nt, Human
agugcaguagcgcgaucucg

SEQ ID NO: 1026155 - RNA, 24 nt, Human
agugcaguagcgcgaucucggcuu

SEQ ID NO: 1026156 - RNA, 24 nt, Human
auagguuaagugugcaguguuuau

SEQ ID NO: 1026157 - RNA, 22 nt, Human
aucagcucuccccucuuucucu

SEQ ID NO: 1026158 - RNA, 23 nt, Human
aucagguacagugcuagguacuc

SEQ ID NO: 1026159 - RNA, 24 nt, Human
augggguuuugccauguugcccgg

SEQ ID NO: 1026160 - RNA, 21 nt, Human
caacacaaaaggccaucaaca

SEQ ID NO: 1026161 - RNA, 23 nt, Human
caagagcccaaaaacccaaccca

SEQ ID NO: 1026162 - RNA, 24 nt, Human
caaggugggugaaucacgagguca

SEQ ID NO: 1026163 - RNA, 24 nt, Human
cacaucuguaaucccagcacuuug

SEQ ID NO: 1026164 - RNA, 23 nt, Human
cagcacuuugggagcccaaggug

SEQ ID NO: 1026165 - RNA, 24 nt, Human
cagcacuuugggagcccaaggugg

SEQ ID NO: 1026166 - RNA, 24 nt, Human
cagggucuugcccugucgcccagg

SEQ ID NO: 1026167 - RNA, 20 nt, Human
caguuaggcucucuucuuuu

SEQ ID NO: 1026168 - RNA, 18 nt, Human
caucgucuuccuuuuuuu

SEQ ID NO: 1026169 - RNA, 24 nt, Human
caucuguaaucccagcacuuuggg

SEQ ID NO: 1026170 - RNA, 25 nt, Human
cauguugcccgggcuggucucuaaa

SEQ ID NO: 1026171 - RNA, 19 nt, Human
ccaagagcccaaaaaccca

SEQ ID NO: 1026172 - RNA, 26 nt, Human
ccauccacaaagugagcaguggaagg

SEQ ID NO: 1026173 - RNA, 24 nt, Human
ccaucuaaaauauucaaagcaaag

SEQ ID NO: 1026174 - RNA, 19 nt, Human
ccauguugcccgggcuggu

SEQ ID NO: 1026175 - RNA, 22 nt, Human
ccauguugcccgggcuggucuc

SEQ ID NO: 1026176 - RNA, 21 nt, Human
cccagcacuuugggagcccaa

SEQ ID NO: 1026177 - RNA, 21 nt, Human
cccaucuaaaauauucaaagc

SEQ ID NO: 1026178 - RNA, 23 nt, Human
cccugucgcccaggcuggagugc

SEQ ID NO: 1026179 - RNA, 19 nt, Human
ccgaaguguuaggauuaca

SEQ ID NO: 1026180 - RNA, 24 nt, Human
ccgaaguguuaggauuacaggcau

SEQ ID NO: 1026181 - RNA, 23 nt, Human
ccgagccggcgaaagagaucgug

SEQ ID NO: 1026182 - RNA, 24 nt, Human
ccuaggagcaacagacuauaccau

SEQ ID NO: 1026183 - RNA, 19 nt, Human
ccuguaaucucaguuacuc

SEQ ID NO: 1026184 - RNA, 24 nt, Human
ccugucgcccaggcuggagugcag

SEQ ID NO: 1026185 - RNA, 21 nt, Human
ccuuucaguuaggcucucuuc

SEQ ID NO: 1026186 - RNA, 24 nt, Human
cgagaccauacuggcuaacauggu

SEQ ID NO: 1026187 - RNA, 24 nt, Human
cucacaucuguaaucccagcacuu

SEQ ID NO: 1026188 - RNA, 21 nt, Human
cucucuucuuuuuucucucca

SEQ ID NO: 1026189 - RNA, 23 nt, Human
cucucuucuuuuuucucuccauu

SEQ ID NO: 1026190 - RNA, 19 nt, Human
cugacucuagaacaaaaag

SEQ ID NO: 1026191 - RNA, 21 nt, Human
cuggcuaacauggugaaaccc

SEQ ID NO: 1026192 - RNA, 21 nt, Human
cuggcuaacauggugaaaccc

SEQ ID NO: 1026193 - RNA, 24 nt, Human
cuggcuaacauggugaaacccugu

SEQ ID NO: 1026194 - RNA, 21 nt, Human
cuguauaguagcaccuucuuc

SEQ ID NO: 1026195 - RNA, 18 nt, Human
cuguauuccuaacaaaau

SEQ ID NO: 1026196 - RNA, 22 nt, Human
cuuacaguccuuuuguuuuucc

SEQ ID NO: 1026197 - RNA, 22 nt, Human
cuucuugggaagcaauuucugg

SEQ ID NO: 1026198 - RNA, 24 nt, Human
cuugcccugucgcccaggcuggag

SEQ ID NO: 1026199 - RNA, 22 nt, Human
gaaagagacaggaaagaacaug

SEQ ID NO: 1026200 - RNA, 24 nt, Human
gaaguguuaggauuacaggcauga

SEQ ID NO: 1026201 - RNA, 18 nt, Human
gagaugggguuuugccau

SEQ ID NO: 1026202 - RNA, 18 nt, Human
gagcugcgucugccgaga

SEQ ID NO: 1026203 - RNA, 28 nt, Human
gaguagccgggacuaugccaccacaccg

SEQ ID NO: 1026204 - RNA, 18 nt, Human
gauuacaggcaugagcca

SEQ ID NO: 1026205 - RNA, 21 nt, Human
gauuacaggcaugagccacua

SEQ ID NO: 1026206 - RNA, 22 nt, Human
gauuacaggcaugagccacuac

SEQ ID NO: 1026207 - RNA, 24 nt, Human
gauugugugaggucaggaguucaa

SEQ ID NO: 1026208 - RNA, 18 nt, Human
gcaaauggguugcaccag

SEQ ID NO: 1026209 - RNA, 22 nt, Human
gcaaccuccgccucacagguuc

SEQ ID NO: 1026210 - RNA, 21 nt, Human
gcaccuccgaagaaucaaagu

SEQ ID NO: 1026211 - RNA, 24 nt, Human
gcaugaacaaacaaaaaaaucaua

SEQ ID NO: 1026212 - RNA, 20 nt, Human
gccauguugcccgggcuggu

SEQ ID NO: 1026213 - RNA, 19 nt, Human
gcccaggcuggagugcagu

SEQ ID NO: 1026214 - RNA, 21 nt, Human
gcgccgagccggcgaaagaga

SEQ ID NO: 1026215 - RNA, 24 nt, Human
gcuaacauggugaaacccugucuc

SEQ ID NO: 1026216 - RNA, 20 nt, Human
gcucucuucuuuuuucucuc

SEQ ID NO: 1026217 - RNA, 23 nt, Human
gcucucuucuuuuuucucuccau

SEQ ID NO: 1026218 - RNA, 18 nt, Human
gcugggcgugguggcuca

SEQ ID NO: 1026219 - RNA, 19 nt, Human
ggaaagagacaggaaagaa

SEQ ID NO: 1026220 - RNA, 26 nt, Human
ggaaauaaauaaguugaauucaaaug

SEQ ID NO: 1026221 - RNA, 19 nt, Human
ggauuacaggcaugagcca

SEQ ID NO: 1026222 - RNA, 22 nt, Human
ggauuacaggcaugagccacua

SEQ ID NO: 1026223 - RNA, 23 nt, Human
ggauugugugaggucaggaguuc

SEQ ID NO: 1026224 - RNA, 23 nt, Human
ggcgugguggcucacaucuguaa

SEQ ID NO: 1026225 - RNA, 20 nt, Human
gggguuuugccauguugccc

SEQ ID NO: 1026226 - RNA, 23 nt, Human
gggguuuugccauguugcccggg

SEQ ID NO: 1026227 - RNA, 22 nt, Human
ggguuuugccauguugcccggg

SEQ ID NO: 1026228 - RNA, 18 nt, Human
ggugaaucacgaggucag

SEQ ID NO: 1026229 - RNA, 23 nt, Human
ggugcagcagcuugugccuguaa

SEQ ID NO: 1026230 - RNA, 24 nt, Human
gguggcucacaucuguaaucccag

SEQ ID NO: 1026231 - RNA, 24 nt, Human
guaaaggaucuguuugcaugaaca

SEQ ID NO: 1026232 - RNA, 23 nt, Human
guagagaugggguuuugccaugu

SEQ ID NO: 1026233 - RNA, 21 nt, Human
guagaucuuucuuuaaauaaa

SEQ ID NO: 1026234 - RNA, 22 nt, Human
guauuuuuuuuaguagagaugg

SEQ ID NO: 1026235 - RNA, 25 nt, Human
gugaucagcucuccccucuuucucu

SEQ ID NO: 1026236 - RNA, 23 nt, Human
guggcucacaucuguaaucccag

SEQ ID NO: 1026237 - RNA, 24 nt, Human
gugugaggucaggaguucaagacc

SEQ ID NO: 1026238 - RNA, 21 nt, Human
guucuuuuauuguuacucuuu

SEQ ID NO: 1026239 - RNA, 23 nt, Human
guuuacacaaugacaauaucacc

SEQ ID NO: 1026240 - RNA, 24 nt, Human
guuuugccauguugcccgggcugg

SEQ ID NO: 1026241 - RNA, 21 nt, Human
uaaaauauucaaagcaaaguc

SEQ ID NO: 1026242 - RNA, 24 nt, Human
uaaacuccugagcucagacaaccu

SEQ ID NO: 1026243 - RNA, 26 nt, Human
uaaaucaaccaagagcccaaaaaccc

SEQ ID NO: 1026244 - RNA, 22 nt, Human
uaacauggugaaacccugucuc

SEQ ID NO: 1026245 - RNA, 23 nt, Human
uaacauggugaaacccugucucu

SEQ ID NO: 1026246 - RNA, 20 nt, Human
uaaggaaagauaagcuguaa

SEQ ID NO: 1026247 - RNA, 20 nt, Human
uaaggaaagauaagcuguaa

SEQ ID NO: 1026248 - RNA, 24 nt, Human
uaaggcaggaggauugugugaggu

SEQ ID NO: 1026249 - RNA, 26 nt, Human
uaaggcaggaggauugugugagguca

SEQ ID NO: 1026250 - RNA, 20 nt, Human
uacagagcugggugcagcag

SEQ ID NO: 1026251 - RNA, 22 nt, Human
uacaggcaugagccacuacgcc

SEQ ID NO: 1026252 - RNA, 18 nt, Human
uacugcaaccuccgccuc

SEQ ID NO: 1026253 - RNA, 18 nt, Human
uagaacaaaaagcuacaa

SEQ ID NO: 1026254 - RNA, 22 nt, Human
uagagaugggguuuugccaugu

SEQ ID NO: 1026255 - RNA, 22 nt, Human
uagccgggacuaugccaccaca

SEQ ID NO: 1026256 - RNA, 24 nt, Human
uagccuaggagcaacagacuauac

SEQ ID NO: 1026257 - RNA, 18 nt, Human
uaggauuacaggcaugag

SEQ ID NO: 1026258 - RNA, 21 nt, Human
uaggauuacaggcaugagcca

SEQ ID NO: 1026259 - RNA, 22 nt, Human
uaggauuacaggcaugagccac

SEQ ID NO: 1026260 - RNA, 22 nt, Human
uaggauuacaggcaugagccac

SEQ ID NO: 1026261 - RNA, 23 nt, Human
uaggauuacaggcaugagccacu

SEQ ID NO: 1026262 - RNA, 24 nt, Human
uaggauuacaggcaugagccacua

SEQ ID NO: 1026263 - RNA, 24 nt, Human
uaggauuacaggcaugagccacua

SEQ ID NO: 1026264 - RNA, 24 nt, Human
uaguagagaugggguuuugccaug

SEQ ID NO: 1026265 - RNA, 18 nt, Human
uaucagguacagugcuag

SEQ ID NO: 1026266 - RNA, 23 nt, Human
uauccaauacaaggauacuuaau

SEQ ID NO: 1026267 - RNA, 22 nt, Human
ucaaccaagagcccaaaaaccc

SEQ ID NO: 1026268 - RNA, 23 nt, Human
ucaaguauuccaugaaaauaaca

SEQ ID NO: 1026269 - RNA, 19 nt, Human
ucacaacacaaaaggccau

SEQ ID NO: 1026270 - RNA, 21 nt, Human
ucacagguucaagcuauucuc

SEQ ID NO: 1026271 - RNA, 24 nt, Human
ucacagguucaagcuauucuccug

SEQ ID NO: 1026272 - RNA, 18 nt, Human
ucacgaggucaggagauc

SEQ ID NO: 1026273 - RNA, 24 nt, Human
ucacgaggucaggagaucgagacc

SEQ ID NO: 1026274 - RNA, 19 nt, Human
ucauauuuccuuuuuccua

SEQ ID NO: 1026275 - RNA, 25 nt, Human
ucaucucuacaggaaaaaaaaaagg

SEQ ID NO: 1026276 - RNA, 18 nt, Human
uccauuguacaaaacuca

SEQ ID NO: 1026277 - RNA, 19 nt, Human
ucccgaaguguuaggauua

SEQ ID NO: 1026278 - RNA, 24 nt, Human
ucccgaaguguuaggauuacaggc

SEQ ID NO: 1026279 - RNA, 21 nt, Human
ucccucuuccuuucaguuagg

SEQ ID NO: 1026280 - RNA, 19 nt, Human
uccugccaccuuacagucc

SEQ ID NO: 1026281 - RNA, 24 nt, Human
ucgcccaggcuggagugcaguagc

SEQ ID NO: 1026282 - RNA, 23 nt, Human
ucggcauauuuuuuacugauuuu

SEQ ID NO: 1026283 - RNA, 23 nt, Human
ucuaauagcuaauagucuccaac

SEQ ID NO: 1026284 - RNA, 21 nt, Human
ucuagaacaaaaagcuacaaa

SEQ ID NO: 1026285 - RNA, 22 nt, Human
ucucuaaacuccugagcucaga

SEQ ID NO: 1026286 - RNA, 22 nt, Human
ucucucuggauucaaaccacag

SEQ ID NO: 1026287 - RNA, 19 nt, Human
ucugcucccucuuccuuuc

SEQ ID NO: 1026288 - RNA, 24 nt, Human
ucuggcugggcgugguggcucaca

SEQ ID NO: 1026289 - RNA, 23 nt, Human
ucuugcccugucgcccaggcugg

SEQ ID NO: 1026290 - RNA, 24 nt, Human
ucuugcccugucgcccaggcugga

SEQ ID NO: 1026291 - RNA, 23 nt, Human
ucuugcucugcucccucuuccuu

SEQ ID NO: 1026292 - RNA, 24 nt, Human
ugaacaaacaaaaaaaucauauuc

SEQ ID NO: 1026293 - RNA, 21 nt, Human
ugacuguaagacuucaaguau

SEQ ID NO: 1026294 - RNA, 22 nt, Human
ugagacagggucuugcccuguc

SEQ ID NO: 1026295 - RNA, 22 nt, Human
ugaggcaccaucaaccuaagga

SEQ ID NO: 1026296 - RNA, 22 nt, Human
ugaggcaccaucaaccuaagga

SEQ ID NO: 1026297 - RNA, 20 nt, Human
ugaguagccgggacuaugcc

SEQ ID NO: 1026298 - RNA, 19 nt, Human
ugcaggcaagugcaaaaca

SEQ ID NO: 1026299 - RNA, 21 nt, Human
ugcaguagcgcgaucucggcu

SEQ ID NO: 1026300 - RNA, 24 nt, Human
ugccauguugcccgggcuggucuc

SEQ ID NO: 1026301 - RNA, 25 nt, Human
ugcccgggcuggucucuaaacuccu

SEQ ID NO: 1026302 - RNA, 24 nt, Human
ugcccugucgcccaggcuggagug

SEQ ID NO: 1026303 - RNA, 25 nt, Human
ugcccugucgcccaggcuggagugc

SEQ ID NO: 1026304 - RNA, 21 nt, Human
ugccucagacuccugaguagc

SEQ ID NO: 1026305 - RNA, 24 nt, Human
ugccucagacuccugaguagccgg

SEQ ID NO: 1026306 - RNA, 24 nt, Human
ugccuguaaucucaguuacucagg

SEQ ID NO: 1026307 - RNA, 23 nt, Human
ugcuccacacacaccugggacag

SEQ ID NO: 1026308 - RNA, 23 nt, Human
ugcucugcucccucuuccuuuca

SEQ ID NO: 1026309 - RNA, 22 nt, Human
uggaauaaccagccacaaaaga

SEQ ID NO: 1026310 - RNA, 28 nt, Human
uggaauaaccagccacaaaaggucaucc

SEQ ID NO: 1026311 - RNA, 23 nt, Human
uggagugcaguagcgcgaucucg

SEQ ID NO: 1026312 - RNA, 24 nt, Human
uggagugcaguagcgcgaucucgg

SEQ ID NO: 1026313 - RNA, 24 nt, Human
uggauucaaaccacagaaauguca

SEQ ID NO: 1026314 - RNA, 19 nt, Human
uggcaagacccucaucucu

SEQ ID NO: 1026315 - RNA, 21 nt, Human
uggcucacaucuguaauccca

SEQ ID NO: 1026316 - RNA, 24 nt, Human
uggcucacaucuguaaucccagca

SEQ ID NO: 1026317 - RNA, 24 nt, Human
ugggguuuugccauguugcccggg

SEQ ID NO: 1026318 - RNA, 24 nt, Human
ugguggcucacaucuguaauccca

SEQ ID NO: 1026319 - RNA, 21 nt, Human
uguaagagaaugaagacagag

SEQ ID NO: 1026320 - RNA, 20 nt, Human
uguggaaguaaacaacauga

SEQ ID NO: 1026321 - RNA, 23 nt, Human
ugugguaguacugauaacauuca

SEQ ID NO: 1026322 - RNA, 23 nt, Human
ugugugaggucaggaguucaaga

SEQ ID NO: 1026323 - RNA, 18 nt, Human
uguguuugugaugcucca

SEQ ID NO: 1026324 - RNA, 21 nt, Human
uguuccaacugucuauagcau

SEQ ID NO: 1026325 - RNA, 20 nt, Human
uguuuauacaagucuacaug

SEQ ID NO: 1026326 - RNA, 18 nt, Human
uuacugcaaccuccgccu

SEQ ID NO: 1026327 - RNA, 19 nt, Human
uuacugcaaccuccgccuc

SEQ ID NO: 1026328 - RNA, 24 nt, Human
uuacugcaaccuccgccucacagg

SEQ ID NO: 1026329 - RNA, 21 nt, Human
uuaggaaauauuaaaauuaag

SEQ ID NO: 1026330 - RNA, 18 nt, Human
uuaguagagaugggguuu

SEQ ID NO: 1026331 - RNA, 22 nt, Human
uuaguagagaugggguuuugcc

SEQ ID NO: 1026332 - RNA, 24 nt, Human
uuaguagagaugggguuuugccau

SEQ ID NO: 1026333 - RNA, 18 nt, Human
uucaagcuauucuccugc

SEQ ID NO: 1026334 - RNA, 21 nt, Human
uucaagcuauucuccugccuc

SEQ ID NO: 1026335 - RNA, 22 nt, Human
uucugacucuagaacaaaaagc

SEQ ID NO: 1026336 - RNA, 21 nt, Human
uucuuguuuccaaaaaagucc

SEQ ID NO: 1026337 - RNA, 22 nt, Human
uugagacagggucuugcccugu

SEQ ID NO: 1026338 - RNA, 24 nt, Human
uugcccugucgcccaggcuggagu

SEQ ID NO: 1026339 - RNA, 24 nt, Human
uugugguucacaacacaaaaggcc

SEQ ID NO: 1026340 - RNA, 18 nt, Human
uuugucccaucuaaaaua

SEQ ID NO: 1026341 - RNA, 23 nt, Human
uuuuacacccuguaccaguagau

SEQ ID NO: 1026342 - RNA, 23 nt, Human
uuuugccauguugcccgggcugg

SEQ ID NO: 1026343 - RNA, 24 nt, Human
uuuuuaguagagaugggguuuugc

SEQ ID NO: 1026344 - RNA, 27 nt, Human
uuuuugguauuuuuuuuaguagagaug

SEQ ID NO: 1026345 - RNA, 22 nt, Human
uuuuuuaguagagaugggguuu

SEQ ID NO: 1026346 - RNA, 20 nt, Human
uuuuuuuugagacagggucu

SEQ ID NO: 1026347 - RNA, 20 nt, Human
uuuuuuuuuuugagacaggg

SEQ ID NO: 1026348 - RNA, 23 nt, Human
uuuuuuuuuuuugagacaggguc

SEQ ID NO: 1026349 - RNA, 24 nt, Human
uuuuuuuuuuuuuuugagacaggg

SEQ ID NO: 1026350 - RNA, 27 nt, Human
aaaagaaucaaucagaaugauggacac

SEQ ID NO: 1026351 - RNA, 25 nt, Human
aaagagagagagagagaaagggggc

SEQ ID NO: 1026352 - RNA, 19 nt, Human
aacccacucccacaauaac

SEQ ID NO: 1026353 - RNA, 22 nt, Human
aaggcagaaggguaagagagga

SEQ ID NO: 1026354 - RNA, 24 nt, Human
aaguccacucacaccucaucuguu

SEQ ID NO: 1026355 - RNA, 19 nt, Human
acauuuacuccuuugcuac

SEQ ID NO: 1026356 - RNA, 24 nt, Human
acucauccuucuucucagaaaccc

SEQ ID NO: 1026357 - RNA, 22 nt, Human
agagagagagagaaagggggcc

SEQ ID NO: 1026358 - RNA, 18 nt, Human
aggaugaaagagagagag

SEQ ID NO: 1026359 - RNA, 20 nt, Human
aggcagagcccucaugaccu

SEQ ID NO: 1026360 - RNA, 22 nt, Human
aggcagagcccucaugaccuag

SEQ ID NO: 1026361 - RNA, 19 nt, Human
caaaccauaucagcacacu

SEQ ID NO: 1026362 - RNA, 27 nt, Human
caaacucauccuucuucucagaaaccc

SEQ ID NO: 1026363 - RNA, 20 nt, Human
caggcugauaaugcugucca

SEQ ID NO: 1026364 - RNA, 18 nt, Human
caguggccucuuuucuuc

SEQ ID NO: 1026365 - RNA, 23 nt, Human
cauaaacauuuggggacaccuuc

SEQ ID NO: 1026366 - RNA, 24 nt, Human
cccacucccacaauaacuaaccca

SEQ ID NO: 1026367 - RNA, 24 nt, Human
cccuucucugcuauucucaccaac

SEQ ID NO: 1026368 - RNA, 22 nt, Human
ccggcggccucggguuccccuu

SEQ ID NO: 1026369 - RNA, 23 nt, Human
ccuacacaucuuguuucuggaca

SEQ ID NO: 1026370 - RNA, 20 nt, Human
ccuucucugcuauucucacc

SEQ ID NO: 1026371 - RNA, 24 nt, Human
cucugcuauucucaccaacuucag

SEQ ID NO: 1026372 - RNA, 24 nt, Human
cuguaguuuuuaugggcuuaagaa

SEQ ID NO: 1026373 - RNA, 22 nt, Human
cuuauggccuacacaucuuguu

SEQ ID NO: 1026374 - RNA, 24 nt, Human
cuucaaaccauaucagcacacuua

SEQ ID NO: 1026375 - RNA, 24 nt, Human
cuucaggcugauaaugcuguccau

SEQ ID NO: 1026376 - RNA, 23 nt, Human
cuuuauggccuaucuaguuuacu

SEQ ID NO: 1026377 - RNA, 18 nt, Human
gaaguccacucacaccuc

SEQ ID NO: 1026378 - RNA, 20 nt, Human
gaggaugaaagagagagaga

SEQ ID NO: 1026379 - RNA, 18 nt, Human
gaugaaagagagagagag

SEQ ID NO: 1026380 - RNA, 22 nt, Human
gccucggguuccccuugcugcc

SEQ ID NO: 1026381 - RNA, 21 nt, Human
gguaagagaggaugaaagaga

SEQ ID NO: 1026382 - RNA, 22 nt, Human
gucacaguggccucuuuucuuc

SEQ ID NO: 1026383 - RNA, 27 nt, Human
uaaaaaauaaaauuccuacauucugga

SEQ ID NO: 1026384 - RNA, 33 nt, Human
uaaacauaaaaaauaaaauuccuacauucuggu

SEQ ID NO: 1026385 - RNA, 20 nt, Human
uaagaagaagaccaccuugg

SEQ ID NO: 1026386 - RNA, 22 nt, Human
uaaguucccaucucuugacacu

SEQ ID NO: 1026387 - RNA, 19 nt, Human
uagcacuggcaucuggcaa

SEQ ID NO: 1026388 - RNA, 20 nt, Human
uaggaaaagaaucaaucaga

SEQ ID NO: 1026389 - RNA, 26 nt, Human
ucuaauacauaaacauuuggggacac

SEQ ID NO: 1026390 - RNA, 20 nt, Human
ucuguuccuucauccuuuga

SEQ ID NO: 1026391 - RNA, 22 nt, Human
ucuuacaguucugaaggcuggg

SEQ ID NO: 1026392 - RNA, 20 nt, Human
ucuuacaguucugaaggcuu

SEQ ID NO: 1026393 - RNA, 24 nt, Human
ugaaaaauuuaaacauaaaaaaua

SEQ ID NO: 1026394 - RNA, 24 nt, Human
ugaaacgcuccuuugguagccuua

SEQ ID NO: 1026395 - RNA, 22 nt, Human
ugagcuguccucaagucuugcu

SEQ ID NO: 1026396 - RNA, 24 nt, Human
uggaaggcagaaggguaagagagg

SEQ ID NO: 1026397 - RNA, 22 nt, Human
uggacacagcaucuuuauggcc

SEQ ID NO: 1026398 - RNA, 22 nt, Human
uggcaagggccuucaugcugca

SEQ ID NO: 1026399 - RNA, 18 nt, Human
uugugcuuaggaaaagaa

SEQ ID NO: 1026400 - RNA, 19 nt, Human
cacaccccggcauggcuuu

SEQ ID NO: 1026401 - RNA, 25 nt, Human
cauggcuuugguucugggaccgggc

SEQ ID NO: 1026402 - RNA, 24 nt, Human
ccacaccccggcauggcuuugguu

SEQ ID NO: 1026403 - RNA, 21 nt, Human
cccggcauggcuuugguucug

SEQ ID NO: 1026404 - RNA, 20 nt, Human
cggcauggcuuugguucugg

SEQ ID NO: 1026405 - RNA, 19 nt, Human
cggcucaggccggcugcga

SEQ ID NO: 1026406 - RNA, 21 nt, Human
ucccgcaaggcgagguccccu

SEQ ID NO: 1026407 - RNA, 20 nt, Human
ugcgaggcugggaggucggg

SEQ ID NO: 1026408 - RNA, 22 nt, Human
uggcuuugguucugggaccggg

SEQ ID NO: 1026409 - RNA, 25 nt, Human
uggggucccgcaaggcgaggucccc

SEQ ID NO: 1026410 - RNA, 22 nt, Human
uucacaggcacauguggcuuua

SEQ ID NO: 1026411 - RNA, 19 nt, Human
uuucacaggcacauguggc

SEQ ID NO: 1026412 - RNA, 21 nt, Human
uuuuuuuuuuuuuuucacagg

SEQ ID NO: 1026413 - RNA, 23 nt, Human
uuuuuuuuuuuuuuuuucacagg

SEQ ID NO: 1026414 - RNA, 19 nt, Human
aaagaagcaguccaggagg

SEQ ID NO: 1026415 - RNA, 24 nt, Human
aaucacuugaacccgggaggcgga

SEQ ID NO: 1026416 - RNA, 20 nt, Human
acagaucgagacuccgucuc

SEQ ID NO: 1026417 - RNA, 21 nt, Human
accagcguggccccagcuccu

SEQ ID NO: 1026418 - RNA, 18 nt, Human
acugcacuccagccuggg

SEQ ID NO: 1026419 - RNA, 24 nt, Human
acugcacuccagccugggugacag

SEQ ID NO: 1026420 - RNA, 18 nt, Human
agagccaaaagaagcagu

SEQ ID NO: 1026421 - RNA, 24 nt, Human
agccugggugacagaucgagacuc

SEQ ID NO: 1026422 - RNA, 19 nt, Human
agccuguaauuccagcuac

SEQ ID NO: 1026423 - RNA, 18 nt, Human
aggcaggagaaucacuug

SEQ ID NO: 1026424 - RNA, 24 nt, Human
aggcaggagaaucacuugaacccg

SEQ ID NO: 1026425 - RNA, 24 nt, Human
aggcggagguugcagugagccaag

SEQ ID NO: 1026426 - RNA, 24 nt, Human
aggcugaggcaggagaaucacuug

SEQ ID NO: 1026427 - RNA, 23 nt, Human
agguagacagccuguaauuccag

SEQ ID NO: 1026428 - RNA, 24 nt, Human
caagguugugccacugcacuccag

SEQ ID NO: 1026429 - RNA, 20 nt, Human
cacaggacuguccaugggcc

SEQ ID NO: 1026430 - RNA, 18 nt, Human
cacuccagccugggugac

SEQ ID NO: 1026431 - RNA, 24 nt, Human
cacuccagccugggugacagaucg

SEQ ID NO: 1026432 - RNA, 19 nt, Human
cacugcacuccagccuggg

SEQ ID NO: 1026433 - RNA, 21 nt, Human
cacugcacuccagccugggug

SEQ ID NO: 1026434 - RNA, 22 nt, Human
cacugcacuccagccuggguga

SEQ ID NO: 1026435 - RNA, 23 nt, Human
cacugcacuccagccugggugac

SEQ ID NO: 1026436 - RNA, 24 nt, Human
cacugcacuccagccugggugaca

SEQ ID NO: 1026437 - RNA, 25 nt, Human
cacugcacuccagccugggugacag

SEQ ID NO: 1026438 - RNA, 24 nt, Human
cagaaggcugaggcaggagaauca

SEQ ID NO: 1026439 - RNA, 24 nt, Human
cagcuacucagaaggcugaggcag

SEQ ID NO: 1026440 - RNA, 21 nt, Human
cauccagacacaggacugucc

SEQ ID NO: 1026441 - RNA, 20 nt, Human
ccacugcacuccagccuggg

SEQ ID NO: 1026442 - RNA, 20 nt, Human
ccacugcacuccagccuggg

SEQ ID NO: 1026443 - RNA, 20 nt, Human
ccacugcacuccagccuggg

SEQ ID NO: 1026444 - RNA, 21 nt, Human
ccacugcacuccagccugggu

SEQ ID NO: 1026445 - RNA, 21 nt, Human
ccacugcacuccagccugggu

SEQ ID NO: 1026446 - RNA, 24 nt, Human
ccacugcacuccagccugggugac

SEQ ID NO: 1026447 - RNA, 20 nt, Human
ccagcacugaguccuccuca

SEQ ID NO: 1026448 - RNA, 23 nt, Human
ccaucugccagcacugaguccuc

SEQ ID NO: 1026449 - RNA, 21 nt, Human
ccaugggccucucaggggucu

SEQ ID NO: 1026450 - RNA, 22 nt, Human
ccugggugacagaucgagacuc

SEQ ID NO: 1026451 - RNA, 21 nt, Human
ccuguaauuccagcuacucag

SEQ ID NO: 1026452 - RNA, 22 nt, Human
ccuguaauuccagcuacucaga

SEQ ID NO: 1026453 - RNA, 24 nt, Human
cgggaggcggagguugcagugagc

SEQ ID NO: 1026454 - RNA, 25 nt, Human
cuccucauccagacacaggacuguc

SEQ ID NO: 1026455 - RNA, 22 nt, Human
cugccagcacugaguccuccuc

SEQ ID NO: 1026456 - RNA, 20 nt, Human
cugcccuccagccugccagg

SEQ ID NO: 1026457 - RNA, 23 nt, Human
gagaaucacuugaacccgggagg

SEQ ID NO: 1026458 - RNA, 18 nt, Human
gagguugcagugagccaa

SEQ ID NO: 1026459 - RNA, 19 nt, Human
gagguugcagugagccaag

SEQ ID NO: 1026460 - RNA, 23 nt, Human
gagguugcagugagccaagguug

SEQ ID NO: 1026461 - RNA, 23 nt, Human
gcaggagaaucacuugaacccgg

SEQ ID NO: 1026462 - RNA, 19 nt, Human
gccacugcacuccagccug

SEQ ID NO: 1026463 - RNA, 24 nt, Human
gccacugcacuccagccuggguga

SEQ ID NO: 1026464 - RNA, 18 nt, Human
gcccuccagccugccagg

SEQ ID NO: 1026465 - RNA, 22 nt, Human
gcguggccccagcuccugcccu

SEQ ID NO: 1026466 - RNA, 23 nt, Human
gcuuccuucaggaggcagccagc

SEQ ID NO: 1026467 - RNA, 20 nt, Human
ggagguugcagugagccaag

SEQ ID NO: 1026468 - RNA, 20 nt, Human
ggagguugcagugagccaag

SEQ ID NO: 1026469 - RNA, 24 nt, Human
ggagguugcagugagccaagguug

SEQ ID NO: 1026470 - RNA, 22 nt, Human
gguagacagccuguaauuccag

SEQ ID NO: 1026471 - RNA, 24 nt, Human
guugugccacugcacuccagccug

SEQ ID NO: 1026472 - RNA, 23 nt, Human
uaucccagaccagcguggcccca

SEQ ID NO: 1026473 - RNA, 24 nt, Human
ucacuugaacccgggaggcggagg

SEQ ID NO: 1026474 - RNA, 19 nt, Human
ucauccagacacaggacug

SEQ ID NO: 1026475 - RNA, 24 nt, Human
uccagccugggugacagaucgaga

SEQ ID NO: 1026476 - RNA, 20 nt, Human
ucccagaccagcguggcccc

SEQ ID NO: 1026477 - RNA, 22 nt, Human
ucucaggggucuuuggggcccc

SEQ ID NO: 1026478 - RNA, 22 nt, Human
ugagccaagguugugccacugc

SEQ ID NO: 1026479 - RNA, 23 nt, Human
ugagccaagguugugccacugca

SEQ ID NO: 1026480 - RNA, 20 nt, Human
ugaggcaggagaaucacuug

SEQ ID NO: 1026481 - RNA, 24 nt, Human
ugaggcaggagaaucacuugaacc

SEQ ID NO: 1026482 - RNA, 25 nt, Human
ugaggcaggagaaucacuugaaccc

SEQ ID NO: 1026483 - RNA, 24 nt, Human
uugaacccgggaggcggagguugc

SEQ ID NO: 1026484 - RNA, 18 nt, Human
uugcagugagccaagguu

SEQ ID NO: 1026485 - RNA, 22 nt, Human
uugcagugagccaagguugugc

SEQ ID NO: 1026486 - RNA, 23 nt, Human
uugugccacugcacuccagccug

SEQ ID NO: 1026487 - RNA, 23 nt, Human
aaauaaucgacaaccuuuaaagc

SEQ ID NO: 1026488 - RNA, 24 nt, Human
aagcagaaggggaaaguuguccag

SEQ ID NO: 1026489 - RNA, 26 nt, Human
aagcagaaggggaaaguuguccagaa

SEQ ID NO: 1026490 - RNA, 20 nt, Human
aagugcugggacccacgggg

SEQ ID NO: 1026491 - RNA, 20 nt, Human
aucccagccccuucccugag

SEQ ID NO: 1026492 - RNA, 22 nt, Human
aucccagccccuucccugagcc

SEQ ID NO: 1026493 - RNA, 22 nt, Human
caaccuuuaaagcagaagggga

SEQ ID NO: 1026494 - RNA, 23 nt, Human
cagccucaaccaggcccccugua

SEQ ID NO: 1026495 - RNA, 22 nt, Human
cagcgaagcagcuuugguucuc

SEQ ID NO: 1026496 - RNA, 23 nt, Human
cagcuggcugagaccugccccuc

SEQ ID NO: 1026497 - RNA, 25 nt, Human
caggcccccuguaccugucccuaug

SEQ ID NO: 1026498 - RNA, 23 nt, Human
caucccaggagggucucccugga

SEQ ID NO: 1026499 - RNA, 21 nt, Human
ccauggcaauaagguuucccc

SEQ ID NO: 1026500 - RNA, 20 nt, Human
cccagccccuucccugagcc

SEQ ID NO: 1026501 - RNA, 25 nt, Human
cccugagccccggccucucaggccc

SEQ ID NO: 1026502 - RNA, 19 nt, Human
ccggccucucaggcccauc

SEQ ID NO: 1026503 - RNA, 22 nt, Human
ccuccagccucaaccaggcccc

SEQ ID NO: 1026504 - RNA, 22 nt, Human
ccugagccccggccucucaggc

SEQ ID NO: 1026505 - RNA, 20 nt, Human
cuggcugagaccugccccuc

SEQ ID NO: 1026506 - RNA, 20 nt, Human
cugggguugggguuggggcu

SEQ ID NO: 1026507 - RNA, 19 nt, Human
gagccacacucuccugagg

SEQ ID NO: 1026508 - RNA, 18 nt, Human
gcccccuguaccuguccc

SEQ ID NO: 1026509 - RNA, 21 nt, Human
gccuggggaagggguggcuuc

SEQ ID NO: 1026510 - RNA, 20 nt, Human
ggccgugucuguccucagag

SEQ ID NO: 1026511 - RNA, 19 nt, Human
ggcugagaccugccccucc

SEQ ID NO: 1026512 - RNA, 19 nt, Human
ggcugggguugggguuggg

SEQ ID NO: 1026513 - RNA, 23 nt, Human
gggguugggguuggggcugaggu

SEQ ID NO: 1026514 - RNA, 23 nt, Human
ggguugggguuggggcugaggug

SEQ ID NO: 1026515 - RNA, 20 nt, Human
ggucucggagcuucuuggcc

SEQ ID NO: 1026516 - RNA, 20 nt, Human
gguugggguuggggcugagg

SEQ ID NO: 1026517 - RNA, 18 nt, Human
gucagcuggggcagggga

SEQ ID NO: 1026518 - RNA, 18 nt, Human
guggaagugcugggaccc

SEQ ID NO: 1026519 - RNA, 20 nt, Human
ucaggcccaucccaggaggg

SEQ ID NO: 1026520 - RNA, 22 nt, Human
uccccagcuggcugagaccugc

SEQ ID NO: 1026521 - RNA, 20 nt, Human
ucccuuggggccugucuugc

SEQ ID NO: 1026522 - RNA, 24 nt, Human
ugaccuccagccucaaccaggccc

SEQ ID NO: 1026523 - RNA, 20 nt, Human
ugaggcuuugacccgucagc

SEQ ID NO: 1026524 - RNA, 26 nt, Human
uggggcaggggaugcggcugggguug

SEQ ID NO: 1026525 - RNA, 19 nt, Human
ugggggagggucugggcug

SEQ ID NO: 1026526 - RNA, 22 nt, Human
ugggggagggucugggcugggc

SEQ ID NO: 1026527 - RNA, 19 nt, Human
ugggguugggguuggggcu

SEQ ID NO: 1026528 - RNA, 22 nt, Human
ugucuugccuggggaaggggug

SEQ ID NO: 1026529 - RNA, 25 nt, Human
uuccccagcuggcugagaccugccc

SEQ ID NO: 1026530 - RNA, 21 nt, Human
uugccuggggaagggguggcu

SEQ ID NO: 1026531 - RNA, 27 nt, Human
uuggggcagcgggucuagacuuuucuc

SEQ ID NO: 1026532 - RNA, 18 nt, Human
aagaaaccccaacguuuc

SEQ ID NO: 1026533 - RNA, 20 nt, Human
aagaacgccauuugaggacu

SEQ ID NO: 1026534 - RNA, 24 nt, Human
acucugaaacccccaaaaagacug

SEQ ID NO: 1026535 - RNA, 20 nt, Human
acugguguguggggguaugu

SEQ ID NO: 1026536 - RNA, 18 nt, Human
agagcaucacauguacaa

SEQ ID NO: 1026537 - RNA, 19 nt, Human
agcagccacccuacccagu

SEQ ID NO: 1026538 - RNA, 19 nt, Human
agccagccgccuggagccc

SEQ ID NO: 1026539 - RNA, 18 nt, Human
agcuugcugaggcugucu

SEQ ID NO: 1026540 - RNA, 22 nt, Human
aggcaggggcucucuaggaguu

SEQ ID NO: 1026541 - RNA, 22 nt, Human
aggggaggcgggguguaguugg

SEQ ID NO: 1026542 - RNA, 18 nt, Human
aggguaugaucucaaugu

SEQ ID NO: 1026543 - RNA, 25 nt, Human
agugaaacacagggcugacaaccca

SEQ ID NO: 1026544 - RNA, 19 nt, Human
aucccaggcccucagcucu

SEQ ID NO: 1026545 - RNA, 19 nt, Human
aucucagcagccacccuac

SEQ ID NO: 1026546 - RNA, 23 nt, Human
caauagcuuauccaggcccccaa

SEQ ID NO: 1026547 - RNA, 21 nt, Human
cacacagacaagguguaugca

SEQ ID NO: 1026548 - RNA, 20 nt, Human
cacccccuuccuucuucucc

SEQ ID NO: 1026549 - RNA, 22 nt, Human
cacccccuuccuucuucuccca

SEQ ID NO: 1026550 - RNA, 18 nt, Human
caccugccagcacaugcc

SEQ ID NO: 1026551 - RNA, 22 nt, Human
caccugccaugucugccauccc

SEQ ID NO: 1026552 - RNA, 19 nt, Human
cacuccacauccuuggcca

SEQ ID NO: 1026553 - RNA, 20 nt, Human
cacuuauguuuuaacagagc

SEQ ID NO: 1026554 - RNA, 23 nt, Human
cagaaagugcugcaauagcuuau

SEQ ID NO: 1026555 - RNA, 20 nt, Human
cagaauguggccgacaaggc

SEQ ID NO: 1026556 - RNA, 24 nt, Human
caggaaagcuacugaggcugcugu

SEQ ID NO: 1026557 - RNA, 20 nt, Human
caggaugcaacacccagcuc

SEQ ID NO: 1026558 - RNA, 20 nt, Human
caggaugcaacacccagcuc

SEQ ID NO: 1026559 - RNA, 23 nt, Human
cagggugagcaccggcaccugcc

SEQ ID NO: 1026560 - RNA, 24 nt, Human
cagugagagcagagucuguccccu

SEQ ID NO: 1026561 - RNA, 19 nt, Human
caugucugccaucccaccc

SEQ ID NO: 1026562 - RNA, 24 nt, Human
ccacacagacaagguguaugcaag

SEQ ID NO: 1026563 - RNA, 26 nt, Human
ccacauccuuggccacuuuuugagaa

SEQ ID NO: 1026564 - RNA, 23 nt, Human
ccacccccuuccuucuucuccca

SEQ ID NO: 1026565 - RNA, 25 nt, Human
ccaccugccagcacaugcccacucc

SEQ ID NO: 1026566 - RNA, 23 nt, Human
ccacucugaaacccccaaaaaga

SEQ ID NO: 1026567 - RNA, 20 nt, Human
ccagaaaaaaaaauauggca

SEQ ID NO: 1026568 - RNA, 19 nt, Human
ccaggcccucagcucugcc

SEQ ID NO: 1026569 - RNA, 22 nt, Human
cccacugguuccuggaucccag

SEQ ID NO: 1026570 - RNA, 23 nt, Human
cccagaaaaaaaaauauggcaau

SEQ ID NO: 1026571 - RNA, 22 nt, Human
cccaggaugcaacacccagcuc

SEQ ID NO: 1026572 - RNA, 18 nt, Human
cccaggcccucagcucug

SEQ ID NO: 1026573 - RNA, 20 nt, Human
cccaggcccucagcucugcc

SEQ ID NO: 1026574 - RNA, 23 nt, Human
cccauccaggagaggcaagggaa

SEQ ID NO: 1026575 - RNA, 21 nt, Human
ccccauggccagugacaugcu

SEQ ID NO: 1026576 - RNA, 23 nt, Human
cccccauggccagugacaugcuc

SEQ ID NO: 1026577 - RNA, 20 nt, Human
ccccuuggccaggucaccac

SEQ ID NO: 1026578 - RNA, 25 nt, Human
cccuuggccaggucaccacuagagc

SEQ ID NO: 1026579 - RNA, 22 nt, Human
ccuucuucucccauccaauccc

SEQ ID NO: 1026580 - RNA, 18 nt, Human
cuacaaggguggggcugu

SEQ ID NO: 1026581 - RNA, 18 nt, Human
cuaggaguucacgggcag

SEQ ID NO: 1026582 - RNA, 19 nt, Human
cugacccuuuccuaccaaa

SEQ ID NO: 1026583 - RNA, 21 nt, Human
cuucucggcacauacugcuag

SEQ ID NO: 1026584 - RNA, 20 nt, Human
gaccugcaucucagcagcca

SEQ ID NO: 1026585 - RNA, 23 nt, Human
gaccugcaucucagcagccaccc

SEQ ID NO: 1026586 - RNA, 21 nt, Human
gacugguguguggggguaugu

SEQ ID NO: 1026587 - RNA, 19 nt, Human
gaggagaugcucaauggcu

SEQ ID NO: 1026588 - RNA, 20 nt, Human
gaggagaugcucaauggcuu

SEQ ID NO: 1026589 - RNA, 23 nt, Human
gcaccugccaugucugccauccc

SEQ ID NO: 1026590 - RNA, 24 nt, Human
gccacccuacccagugaccaggag

SEQ ID NO: 1026591 - RNA, 23 nt, Human
ggccacuuuuugagaaagcaagc

SEQ ID NO: 1026592 - RNA, 23 nt, Human
ggccuggagccuuccccugccuc

SEQ ID NO: 1026593 - RNA, 20 nt, Human
ggcgggguguaguuggggaa

SEQ ID NO: 1026594 - RNA, 18 nt, Human
gggaacaggcuccugggg

SEQ ID NO: 1026595 - RNA, 20 nt, Human
gggaggcgggguguaguugg

SEQ ID NO: 1026596 - RNA, 19 nt, Human
gggcagggugagcaccggc

SEQ ID NO: 1026597 - RNA, 19 nt, Human
ggggaacugcuccagguug

SEQ ID NO: 1026598 - RNA, 18 nt, Human
gggggugacgggccaccc

SEQ ID NO: 1026599 - RNA, 18 nt, Human
gggugugcagccagccgc

SEQ ID NO: 1026600 - RNA, 20 nt, Human
ggugauggcaggcagggugu

SEQ ID NO: 1026601 - RNA, 24 nt, Human
gugaaagccucagaaagugcugca

SEQ ID NO: 1026602 - RNA, 18 nt, Human
gugcagccagccgccugg

SEQ ID NO: 1026603 - RNA, 19 nt, Human
uaacagagcaucacaugua

SEQ ID NO: 1026604 - RNA, 18 nt, Human
uaagggcauguguccacu

SEQ ID NO: 1026605 - RNA, 20 nt, Human
uagagcagaugaggggaggc

SEQ ID NO: 1026606 - RNA, 18 nt, Human
uagcuuauccaggccccc

SEQ ID NO: 1026607 - RNA, 18 nt, Human
ucaagaagaggagaugcu

SEQ ID NO: 1026608 - RNA, 19 nt, Human
ucaauguaaaagagggaaa

SEQ ID NO: 1026609 - RNA, 24 nt, Human
ucacagugaaacacagggcugaca

SEQ ID NO: 1026610 - RNA, 23 nt, Human
ucaccuacgaagagaguaagccu

SEQ ID NO: 1026611 - RNA, 22 nt, Human
ucacuggaggaagaaaccccaa

SEQ ID NO: 1026612 - RNA, 18 nt, Human
ucagucgguuucuccggc

SEQ ID NO: 1026613 - RNA, 22 nt, Human
ucccaggcccucagcucugccc

SEQ ID NO: 1026614 - RNA, 24 nt, Human
uccuggaucccaggcccucagcuc

SEQ ID NO: 1026615 - RNA, 23 nt, Human
uccuucuucucccauccaauccc

SEQ ID NO: 1026616 - RNA, 24 nt, Human
ucuaggaguucacgggcaggguga

SEQ ID NO: 1026617 - RNA, 24 nt, Human
ucucccagaaaaaaaaauauggca

SEQ ID NO: 1026618 - RNA, 21 nt, Human
ucuccggccacucugaaaccc

SEQ ID NO: 1026619 - RNA, 20 nt, Human
ucugaaacccccaaaaagac

SEQ ID NO: 1026620 - RNA, 20 nt, Human
ucugucaagugagaaacuga

SEQ ID NO: 1026621 - RNA, 20 nt, Human
ugaaacacagggcugacaac

SEQ ID NO: 1026622 - RNA, 21 nt, Human
ugaaacccccaaaaagacugg

SEQ ID NO: 1026623 - RNA, 24 nt, Human
ugaauuggucacagugaaacacag

SEQ ID NO: 1026624 - RNA, 19 nt, Human
ugagagcagagucuguccc

SEQ ID NO: 1026625 - RNA, 22 nt, Human
ugagagcagagucuguccccuc

SEQ ID NO: 1026626 - RNA, 20 nt, Human
ugcagccagccgccuggagc

SEQ ID NO: 1026627 - RNA, 21 nt, Human
ugcagccagccgccuggagcc

SEQ ID NO: 1026628 - RNA, 23 nt, Human
ugcccacuccacauccuuggcca

SEQ ID NO: 1026629 - RNA, 24 nt, Human
ugcccacuccacauccuuggccac

SEQ ID NO: 1026630 - RNA, 21 nt, Human
ugguccaggacaagcaggggc

SEQ ID NO: 1026631 - RNA, 22 nt, Human
ugguuccuggaucccaggcccu

SEQ ID NO: 1026632 - RNA, 24 nt, Human
uucucccuacagugaaagccucag

SEQ ID NO: 1026633 - RNA, 18 nt, Human
uuucuccggccacucuga

SEQ ID NO: 1026634 - RNA, 23 nt, Human
uuuuuuuuuuuuuuuuuuaaaug

SEQ ID NO: 1026635 - RNA, 24 nt, Human
aaaaacgacaagagggcuccaccu

SEQ ID NO: 1026636 - RNA, 27 nt, Human
aaaaacgacaagagggcuccaccuggc

SEQ ID NO: 1026637 - RNA, 18 nt, Human
aaacgacaagagggcucc

SEQ ID NO: 1026638 - RNA, 24 nt, Human
aaaggagaagccacugcagcugcc

SEQ ID NO: 1026639 - RNA, 22 nt, Human
aaaggcgagcagacacugguca

SEQ ID NO: 1026640 - RNA, 22 nt, Human
aaccagaagcaccaggaagccu

SEQ ID NO: 1026641 - RNA, 21 nt, Human
accccauaaagguuuaaagaa

SEQ ID NO: 1026642 - RNA, 22 nt, Human
accccauaaagguuuaaagaau

SEQ ID NO: 1026643 - RNA, 23 nt, Human
agcaccaggaagccugggaaagg

SEQ ID NO: 1026644 - RNA, 20 nt, Human
aggcaggcauccacacgucc

SEQ ID NO: 1026645 - RNA, 24 nt, Human
aguggcguggggaaccagaagcac

SEQ ID NO: 1026646 - RNA, 25 nt, Human
caaaaacgacaagagggcuccaccu

SEQ ID NO: 1026647 - RNA, 23 nt, Human
caacgucuccucaucugacaucc

SEQ ID NO: 1026648 - RNA, 18 nt, Human
cacagagccgacugcagc

SEQ ID NO: 1026649 - RNA, 18 nt, Human
cacagcacagggcagggc

SEQ ID NO: 1026650 - RNA, 19 nt, Human
cacagcacagggcagggca

SEQ ID NO: 1026651 - RNA, 23 nt, Human
caccuggccccugcaccccacgu

SEQ ID NO: 1026652 - RNA, 24 nt, Human
cacugcagcugccccagacacccc

SEQ ID NO: 1026653 - RNA, 22 nt, Human
cagcacagggcagggcaggcag

SEQ ID NO: 1026654 - RNA, 23 nt, Human
cagcugccccagacaccccaccc

SEQ ID NO: 1026655 - RNA, 18 nt, Human
caggacggggagugaagg

SEQ ID NO: 1026656 - RNA, 23 nt, Human
cagggcagggcaggcaggcaucc

SEQ ID NO: 1026657 - RNA, 26 nt, Human
cauccacacguccugcccaccaccau

SEQ ID NO: 1026658 - RNA, 19 nt, Human
cauuggcagacagcuucug

SEQ ID NO: 1026659 - RNA, 18 nt, Human
cauuugggauccagcguc

SEQ ID NO: 1026660 - RNA, 22 nt, Human
ccagaagcaccaggaagccugg

SEQ ID NO: 1026661 - RNA, 20 nt, Human
ccagacuagagaaggcaugg

SEQ ID NO: 1026662 - RNA, 21 nt, Human
ccagcgucccugaggccagga

SEQ ID NO: 1026663 - RNA, 20 nt, Human
ccccugcaccccacgugugu

SEQ ID NO: 1026664 - RNA, 20 nt, Human
ccccugcaccccacgugugu

SEQ ID NO: 1026665 - RNA, 22 nt, Human
cccucagccacacaggcacucc

SEQ ID NO: 1026666 - RNA, 19 nt, Human
cccucuucccuuuuauucc

SEQ ID NO: 1026667 - RNA, 19 nt, Human
cccugaggccaggacggag

SEQ ID NO: 1026668 - RNA, 19 nt, Human
ccuccaaaugccccucucc

SEQ ID NO: 1026669 - RNA, 19 nt, Human
ccugaggccaggacggagg

SEQ ID NO: 1026670 - RNA, 18 nt, Human
ccugcccaccaccauccc

SEQ ID NO: 1026671 - RNA, 26 nt, Human
cuccacagcacagggcagggcaggca

SEQ ID NO: 1026672 - RNA, 22 nt, Human
cucuccugccauucagcuuuaa

SEQ ID NO: 1026673 - RNA, 19 nt, Human
gagccuccaaaugccccuc

SEQ ID NO: 1026674 - RNA, 20 nt, Human
gaggcugcagggcagaaggc

SEQ ID NO: 1026675 - RNA, 21 nt, Human
gcagcugccccagacacccca

SEQ ID NO: 1026676 - RNA, 20 nt, Human
gcagggagggagccuccaaa

SEQ ID NO: 1026677 - RNA, 20 nt, Human
gccccagacaccccacccca

SEQ ID NO: 1026678 - RNA, 20 nt, Human
gccccucuccugccauucag

SEQ ID NO: 1026679 - RNA, 20 nt, Human
ggacggggagugaaggcagg

SEQ ID NO: 1026680 - RNA, 19 nt, Human
ggcacugaccccugcccag

SEQ ID NO: 1026681 - RNA, 18 nt, Human
ggugcagugugcgaccug

SEQ ID NO: 1026682 - RNA, 21 nt, Human
guccgguggaggcgugugacu

SEQ ID NO: 1026683 - RNA, 19 nt, Human
uagauaacaaaaacgacaa

SEQ ID NO: 1026684 - RNA, 24 nt, Human
uagauaacaaaaacgacaagaggg

SEQ ID NO: 1026685 - RNA, 23 nt, Human
uccaaaugccccucuccugccau

SEQ ID NO: 1026686 - RNA, 24 nt, Human
uccaaaugccccucuccugccauu

SEQ ID NO: 1026687 - RNA, 24 nt, Human
uccacagcacagggcagggcaggc

SEQ ID NO: 1026688 - RNA, 18 nt, Human
uccugcccaccaccaucc

SEQ ID NO: 1026689 - RNA, 23 nt, Human
uccugcccaccaccaucccgcag

SEQ ID NO: 1026690 - RNA, 25 nt, Human
ucgaggcggcagcaguuucuauaag

SEQ ID NO: 1026691 - RNA, 24 nt, Human
ucgcaggcgcauuggcagacagcu

SEQ ID NO: 1026692 - RNA, 20 nt, Human
ugaaggcagggagggagccu

SEQ ID NO: 1026693 - RNA, 19 nt, Human
ugaccugguuaccuacuga

SEQ ID NO: 1026694 - RNA, 20 nt, Human
ugaugagcucaacgucuccu

SEQ ID NO: 1026695 - RNA, 20 nt, Human
ugauguuguaagacuucuca

SEQ ID NO: 1026696 - RNA, 24 nt, Human
ugcgaccugcgcucuccacagcac

SEQ ID NO: 1026697 - RNA, 20 nt, Human
uguccacaaccacagagccg

SEQ ID NO: 1026698 - RNA, 25 nt, Human
uuuuuuuuuuuuuuuuuuuuccagg

SEQ ID NO: 1026699 - RNA, 19 nt, Human
ccacaaaguaaagaaaguu

SEQ ID NO: 1026700 - RNA, 22 nt, Human
uauuuuuauuauuguuaaaaau

SEQ ID NO: 1026701 - RNA, 20 nt, Human
ugaggaacacaaccacaaag

SEQ ID NO: 1026702 - RNA, 23 nt, Human
uguuaaaaauucucauuuugagg

SEQ ID NO: 1026703 - RNA, 24 nt, Human
aaaaggcaaaacaaugcacagaac

SEQ ID NO: 1026704 - RNA, 18 nt, Human
aaagaaucaggagcuuga

SEQ ID NO: 1026705 - RNA, 21 nt, Human
aacuugcauuuuuauuuuuua

SEQ ID NO: 1026706 - RNA, 19 nt, Human
aagaaucaggagcuugaaa

SEQ ID NO: 1026707 - RNA, 24 nt, Human
aauguuuuuaaagcuguucaugau

SEQ ID NO: 1026708 - RNA, 25 nt, Human
acugauuguauccugaaggaaucac

SEQ ID NO: 1026709 - RNA, 22 nt, Human
agauguguuuuuauuucucacu

SEQ ID NO: 1026710 - RNA, 19 nt, Human
aucacaggucuuggcaagg

SEQ ID NO: 1026711 - RNA, 18 nt, Human
cacuccauaacccccagc

SEQ ID NO: 1026712 - RNA, 22 nt, Human
caugauuuaguagaaagaauca

SEQ ID NO: 1026713 - RNA, 21 nt, Human
ccaggauucccacuucccaag

SEQ ID NO: 1026714 - RNA, 18 nt, Human
cccggagucggggccggg

SEQ ID NO: 1026715 - RNA, 22 nt, Human
ccugugucaaggccuuuugagc

SEQ ID NO: 1026716 - RNA, 18 nt, Human
cuuggcaaggucaaguca

SEQ ID NO: 1026717 - RNA, 18 nt, Human
gaaacgguuacccucgug

SEQ ID NO: 1026718 - RNA, 25 nt, Human
gagucggggccgggcgcgcgggaaa

SEQ ID NO: 1026719 - RNA, 18 nt, Human
gccaugggggcugccggc

SEQ ID NO: 1026720 - RNA, 22 nt, Human
ggcaaaacaaugcacagaacaa

SEQ ID NO: 1026721 - RNA, 27 nt, Human
uaaaaaggcaaaacaaugcacagaaca

SEQ ID NO: 1026722 - RNA, 24 nt, Human
uaauuuaaaaaggcaaaacaaugc

SEQ ID NO: 1026723 - RNA, 21 nt, Human
ucuguugcucuuuuucugagg

SEQ ID NO: 1026724 - RNA, 21 nt, Human
ucuuggcaaggucaagucacc

SEQ ID NO: 1026725 - RNA, 24 nt, Human
ugcagguucccugugucaaggccu

SEQ ID NO: 1026726 - RNA, 21 nt, Human
ugucaaggccuuuugagccac

SEQ ID NO: 1026727 - RNA, 22 nt, Human
ugucaaggccuuuugagccacu

SEQ ID NO: 1026728 - RNA, 24 nt, Human
uuaaagcuguucaugauuuaguag

SEQ ID NO: 1026729 - RNA, 23 nt, Human
uugaaacaauuacuucuguugcu

SEQ ID NO: 1026730 - RNA, 19 nt, Human
uuuuuuuauuauugaaaua

SEQ ID NO: 1026731 - RNA, 23 nt, Human
aaaaaaacagacugugaacacca

SEQ ID NO: 1026732 - RNA, 24 nt, Human
aaaaaaacagacugugaacaccaa

SEQ ID NO: 1026733 - RNA, 26 nt, Human
aaaaaaacagacugugaacaccaaag

SEQ ID NO: 1026734 - RNA, 20 nt, Human
aaaaauaccgcaaucuggac

SEQ ID NO: 1026735 - RNA, 20 nt, Human
aaaauaccgcaaucuggaca

SEQ ID NO: 1026736 - RNA, 29 nt, Human
aacaaaaaaacagacugugaacaccaaag

SEQ ID NO: 1026737 - RNA, 21 nt, Human
aagacaaauaucaacaaaugu

SEQ ID NO: 1026738 - RNA, 20 nt, Human
acaacaaaaaaacagacugu

SEQ ID NO: 1026739 - RNA, 23 nt, Human
acacagacucaaauagagaacca

SEQ ID NO: 1026740 - RNA, 23 nt, Human
agcucaaaacaagaguuugacaa

SEQ ID NO: 1026741 - RNA, 23 nt, Human
aggguagcuuacuuaggugacac

SEQ ID NO: 1026742 - RNA, 23 nt, Human
caaaaaaacagacugugaacacc

SEQ ID NO: 1026743 - RNA, 25 nt, Human
caaaaaaacagacugugaacaccaa

SEQ ID NO: 1026744 - RNA, 18 nt, Human
caaagcacuacucagggc

SEQ ID NO: 1026745 - RNA, 24 nt, Human
caaauagagaaccauauauuuaaa

SEQ ID NO: 1026746 - RNA, 19 nt, Human
cacagguuuguuucuucac

SEQ ID NO: 1026747 - RNA, 23 nt, Human
cacucagccuccuucccaaacac

SEQ ID NO: 1026748 - RNA, 21 nt, Human
cagccuccuucccaaacacag

SEQ ID NO: 1026749 - RNA, 24 nt, Human
cagcucaaaacaagaguuugacaa

SEQ ID NO: 1026750 - RNA, 20 nt, Human
caguagucacucagccuccu

SEQ ID NO: 1026751 - RNA, 23 nt, Human
ccaaagcacuacucagggcucuu

SEQ ID NO: 1026752 - RNA, 22 nt, Human
ccacaaaaugauccagcucaaa

SEQ ID NO: 1026753 - RNA, 23 nt, Human
ccaguagucacucagccuccuuc

SEQ ID NO: 1026754 - RNA, 21 nt, Human
cuccucccguagucuaaaccu

SEQ ID NO: 1026755 - RNA, 24 nt, Human
cuccucccguagucuaaaccucaa

SEQ ID NO: 1026756 - RNA, 22 nt, Human
uaauauacuccucccguagucu

SEQ ID NO: 1026757 - RNA, 20 nt, Human
uagcuuacuuaggugacaca

SEQ ID NO: 1026758 - RNA, 19 nt, Human
ucacagguuuguuucuuca

SEQ ID NO: 1026759 - RNA, 31 nt, Human
ucagcauuaaaaaauauaaguuacaacaaag

SEQ ID NO: 1026760 - RNA, 20 nt, Human
ucuuugggaacauaaggcug

SEQ ID NO: 1026761 - RNA, 20 nt, Human
ugugaacaccaaagcacuac

SEQ ID NO: 1026762 - RNA, 24 nt, Human
uuucaguuuugauauucauuuggc

SEQ ID NO: 1026763 - RNA, 21 nt, Human
uuuucaguuuugauauucauu

SEQ ID NO: 1026764 - RNA, 18 nt, Human
aaaaacaaaacagagaaa

SEQ ID NO: 1026765 - RNA, 25 nt, Human
aaaacaaaacagagaaaaugacaag

SEQ ID NO: 1026766 - RNA, 27 nt, Human
aaacauacaaaaacaaaacagagaaaa

SEQ ID NO: 1026767 - RNA, 24 nt, Human
aacaaaacagagaaaaugacaagc

SEQ ID NO: 1026768 - RNA, 19 nt, Human
aacagagaaaaugacaagc

SEQ ID NO: 1026769 - RNA, 24 nt, Human
aagaacuggagaucagcaguuacu

SEQ ID NO: 1026770 - RNA, 21 nt, Human
aagcggccuacaaaauggagu

SEQ ID NO: 1026771 - RNA, 20 nt, Human
acaaaaacaaaacagagaaa

SEQ ID NO: 1026772 - RNA, 22 nt, Human
acaaauaagcggccuacaaaau

SEQ ID NO: 1026773 - RNA, 22 nt, Human
acauagcucuccucuuucgucu

SEQ ID NO: 1026774 - RNA, 21 nt, Human
acugcuggaggcugagcgacc

SEQ ID NO: 1026775 - RNA, 21 nt, Human
agggagacuguuacaucgggg

SEQ ID NO: 1026776 - RNA, 21 nt, Human
auccuuaccaguugacuacag

SEQ ID NO: 1026777 - RNA, 21 nt, Human
auuuuuuuuucuuccuuuuaa

SEQ ID NO: 1026778 - RNA, 22 nt, Human
caaaaacaacuuaauuaagccc

SEQ ID NO: 1026779 - RNA, 25 nt, Human
caaaaacacagcgaaguuggagacc

SEQ ID NO: 1026780 - RNA, 21 nt, Human
caaaauggagucgcagccguc

SEQ ID NO: 1026781 - RNA, 26 nt, Human
caaauaagcggccuacaaaauggagu

SEQ ID NO: 1026782 - RNA, 24 nt, Human
cacaaaacauagcucuccucuuuc

SEQ ID NO: 1026783 - RNA, 23 nt, Human
caccggaacccuccaagaacugg

SEQ ID NO: 1026784 - RNA, 23 nt, Human
caccggaacccuccaagaacugg

SEQ ID NO: 1026785 - RNA, 18 nt, Human
cacugaccauaagggaga

SEQ ID NO: 1026786 - RNA, 18 nt, Human
cauacaaaaacaaaacag

SEQ ID NO: 1026787 - RNA, 26 nt, Human
ccacaaaaacaacuuaauuaagcccc

SEQ ID NO: 1026788 - RNA, 21 nt, Human
ccaucuuccaucuccaacugu

SEQ ID NO: 1026789 - RNA, 22 nt, Human
ccgcaguaggggcguucuucuc

SEQ ID NO: 1026790 - RNA, 24 nt, Human
ccuccaaucugacaggucuacuac

SEQ ID NO: 1026791 - RNA, 23 nt, Human
ccuccugccgcuuccucaguacc

SEQ ID NO: 1026792 - RNA, 23 nt, Human
cgaggccaugcccaacauuucaa

SEQ ID NO: 1026793 - RNA, 20 nt, Human
cggaacccuccaagaacugg

SEQ ID NO: 1026794 - RNA, 20 nt, Human
cgggaagaaucgccguggau

SEQ ID NO: 1026795 - RNA, 21 nt, Human
cguggaugcacacaaauaagc

SEQ ID NO: 1026796 - RNA, 18 nt, Human
cuccuccugccgcuuccu

SEQ ID NO: 1026797 - RNA, 21 nt, Human
cuccuccugccgcuuccucag

SEQ ID NO: 1026798 - RNA, 21 nt, Human
cuguagacugucucuuccaug

SEQ ID NO: 1026799 - RNA, 21 nt, Human
cuucacaacucugcgggaaga

SEQ ID NO: 1026800 - RNA, 18 nt, Human
cuuccaugccauucucug

SEQ ID NO: 1026801 - RNA, 18 nt, Human
cuuuuccuuucuccggcc

SEQ ID NO: 1026802 - RNA, 22 nt, Human
cuuuugacuuugaccuccaauc

SEQ ID NO: 1026803 - RNA, 21 nt, Human
gcccaacauuucaaaaacaca

SEQ ID NO: 1026804 - RNA, 18 nt, Human
gggguaaaaaacauacaa

SEQ ID NO: 1026805 - RNA, 26 nt, Human
uaaaaaacauacaaaaacaaaacaga

SEQ ID NO: 1026806 - RNA, 22 nt, Human
uaacacacacaggaggggcuuu

SEQ ID NO: 1026807 - RNA, 19 nt, Human
uacaucgggguaaaaaaca

SEQ ID NO: 1026808 - RNA, 21 nt, Human
uacccugaugaacuggaagag

SEQ ID NO: 1026809 - RNA, 25 nt, Human
uacuuuugacuuugaccuccaaucu

SEQ ID NO: 1026810 - RNA, 24 nt, Human
uauacaaaaccaucuuccaucucc

SEQ ID NO: 1026811 - RNA, 26 nt, Human
uauaucagacaaugugccacaaaaca

SEQ ID NO: 1026812 - RNA, 21 nt, Human
ucacaaagguaacagcaaaau

SEQ ID NO: 1026813 - RNA, 24 nt, Human
ucaccaggcucaaccaaguagcgu

SEQ ID NO: 1026814 - RNA, 21 nt, Human
ugaacuggaagagacuuucca

SEQ ID NO: 1026815 - RNA, 18 nt, Human
ugaccauaagggagacug

SEQ ID NO: 1026816 - RNA, 22 nt, Human
ugccccuauaaugugugagggu

SEQ ID NO: 1026817 - RNA, 19 nt, Human
uggaagauucugaucccac

SEQ ID NO: 1026818 - RNA, 23 nt, Human
ugucucuuccaugccauucucug

SEQ ID NO: 1026819 - RNA, 18 nt, Human
ugugaaccaccgaucucc

SEQ ID NO: 1026820 - RNA, 20 nt, Human
uguuccaaaaaacaaucagg

SEQ ID NO: 1026821 - RNA, 21 nt, Human
uuaauacauucuucaccaggc

SEQ ID NO: 1026822 - RNA, 22 nt, Human
uuccaaaaaacaaucaggucac

SEQ ID NO: 1026823 - RNA, 21 nt, Human
uuccaaaaccaaacacauuug

SEQ ID NO: 1026824 - RNA, 22 nt, Human
uuccaucuccaacugucuucuc

SEQ ID NO: 1026825 - RNA, 24 nt, Human
uuuccaggcccugauaaugucuuu

SEQ ID NO: 1026826 - RNA, 22 nt, Human
uuugauaaucuaaauccauauc

SEQ ID NO: 1026827 - RNA, 18 nt, Human
cagcugcucgacuccuag

SEQ ID NO: 1026828 - RNA, 24 nt, Human
cgacuccuagucucuuccacuccu

SEQ ID NO: 1026829 - RNA, 23 nt, Human
ugcucgacuccuagucucuucca

SEQ ID NO: 1026830 - RNA, 19 nt, Human
ugugcugagccgcagcugc

SEQ ID NO: 1026831 - RNA, 25 nt, Human
aaaaaaaaaaaaaaaaagaaaagaa

SEQ ID NO: 1026832 - RNA, 22 nt, Human
aagaaaagaaaucacacaaugu

SEQ ID NO: 1026833 - RNA, 24 nt, Human
acaauguuaaaagcaaagauucac

SEQ ID NO: 1026834 - RNA, 23 nt, Human
acccauuuggccccagaagcccu

SEQ ID NO: 1026835 - RNA, 20 nt, Human
agcagguggauuucuccuac

SEQ ID NO: 1026836 - RNA, 23 nt, Human
agcucgcgcuguuaccucaagcc

SEQ ID NO: 1026837 - RNA, 22 nt, Human
cagaagcccugcggacagagaa

SEQ ID NO: 1026838 - RNA, 19 nt, Human
cagccucagcucgcgcugu

SEQ ID NO: 1026839 - RNA, 20 nt, Human
cagcggugcccucccucucc

SEQ ID NO: 1026840 - RNA, 22 nt, Human
caggcaaggaaccuggagucca

SEQ ID NO: 1026841 - RNA, 21 nt, Human
cagguggauuucuccuacucu

SEQ ID NO: 1026842 - RNA, 18 nt, Human
ccacacucagcccccagc

SEQ ID NO: 1026843 - RNA, 19 nt, Human
ccagcagguggauuucucc

SEQ ID NO: 1026844 - RNA, 27 nt, Human
cccgggacccagggccugucccucagg

SEQ ID NO: 1026845 - RNA, 26 nt, Human
cccucaggccacacucagcccccagc

SEQ ID NO: 1026846 - RNA, 22 nt, Human
ccugcggacagagaagagccua

SEQ ID NO: 1026847 - RNA, 21 nt, Human
cgccaagggccccagccucag

SEQ ID NO: 1026848 - RNA, 27 nt, Human
cucagccuccgcgccaagggccccagc

SEQ ID NO: 1026849 - RNA, 18 nt, Human
cucccaggcaaggaaccu

SEQ ID NO: 1026850 - RNA, 27 nt, Human
cuccgcgccaagggccccagccucagc

SEQ ID NO: 1026851 - RNA, 19 nt, Human
cuccgcgccaagggccccc

SEQ ID NO: 1026852 - RNA, 27 nt, Human
cuggccgacgacagcggugcccucccu

SEQ ID NO: 1026853 - RNA, 18 nt, Human
gagcaugcgcagcaaggc

SEQ ID NO: 1026854 - RNA, 21 nt, Human
gccaagggccccagccucagc

SEQ ID NO: 1026855 - RNA, 21 nt, Human
gccccagccucagcucgcgcu

SEQ ID NO: 1026856 - RNA, 23 nt, Human
gggccccagccucagcucgcgcu

SEQ ID NO: 1026857 - RNA, 21 nt, Human
gguugguggccugggaggaug

SEQ ID NO: 1026858 - RNA, 22 nt, Human
uaccucaagccggggucacagc

SEQ ID NO: 1026859 - RNA, 22 nt, Human
ucacccauuuggccccagaagc

SEQ ID NO: 1026860 - RNA, 25 nt, Human
ucacugaggacuccuuggcuucugg

SEQ ID NO: 1026861 - RNA, 20 nt, Human
ucagccuccgcgccaagggc

SEQ ID NO: 1026862 - RNA, 20 nt, Human
ucccucaggccacacucagc

SEQ ID NO: 1026863 - RNA, 22 nt, Human
ucccucaggccacacucagccc

SEQ ID NO: 1026864 - RNA, 21 nt, Human
uccgcgccaagggccccagcc

SEQ ID NO: 1026865 - RNA, 26 nt, Human
ucuaaaaaaaaaaaaaaaaagaaaag

SEQ ID NO: 1026866 - RNA, 18 nt, Human
ugaucuaaaaaaaaaaaa

SEQ ID NO: 1026867 - RNA, 25 nt, Human
ugaucuaaaaaaaaaaaaaaaaaga

SEQ ID NO: 1026868 - RNA, 24 nt, Human
ugcccugucuucuggcuggggccg

SEQ ID NO: 1026869 - RNA, 22 nt, Human
uggccgacgacagcggugcccu

SEQ ID NO: 1026870 - RNA, 24 nt, Human
uggcuggguggggacagcgaugug

SEQ ID NO: 1026871 - RNA, 20 nt, Human
uggcuggguugguggccugg

SEQ ID NO: 1026872 - RNA, 19 nt, Human
uggggacagcgauguggag

SEQ ID NO: 1026873 - RNA, 21 nt, Human
aaaagcucacuaaaaaguugc

SEQ ID NO: 1026874 - RNA, 20 nt, Human
aaauccaaaugaaaauauua

SEQ ID NO: 1026875 - RNA, 21 nt, Human
aaccaaaacacucucucuccc

SEQ ID NO: 1026876 - RNA, 30 nt, Human
aacccuacuaacucaucagagccccacuag

SEQ ID NO: 1026877 - RNA, 24 nt, Human
acaaacaaugucauggucuaugac

SEQ ID NO: 1026878 - RNA, 26 nt, Human
acaaagccaugcugaggaggagccau

SEQ ID NO: 1026879 - RNA, 20 nt, Human
accucagcucuucuuaauau

SEQ ID NO: 1026880 - RNA, 22 nt, Human
acucugcugccacuuugaauag

SEQ ID NO: 1026881 - RNA, 20 nt, Human
agaguugaaagacccauaac

SEQ ID NO: 1026882 - RNA, 19 nt, Human
agaugcucagugaccgggc

SEQ ID NO: 1026883 - RNA, 25 nt, Human
agcaaagaauaccagcccuacaucc

SEQ ID NO: 1026884 - RNA, 19 nt, Human
agcccucagcuuccucauc

SEQ ID NO: 1026885 - RNA, 20 nt, Human
agcuggugugcuaacuccug

SEQ ID NO: 1026886 - RNA, 24 nt, Human
agugcaauggcacaaucucggcuc

SEQ ID NO: 1026887 - RNA, 23 nt, Human
auuuacuuauuuauuuauuuauu

SEQ ID NO: 1026888 - RNA, 22 nt, Human
cacacaagcucagcagcacugg

SEQ ID NO: 1026889 - RNA, 21 nt, Human
caccgcaaccuccgccuccug

SEQ ID NO: 1026890 - RNA, 18 nt, Human
cacggugggcugcggggc

SEQ ID NO: 1026891 - RNA, 24 nt, Human
cacuccccucaagauaacugggaa

SEQ ID NO: 1026892 - RNA, 21 nt, Human
cacuuugaauagaaguccaag

SEQ ID NO: 1026893 - RNA, 21 nt, Human
cagaguugaaagacccauaac

SEQ ID NO: 1026894 - RNA, 21 nt, Human
ccaaaacacucucucucccca

SEQ ID NO: 1026895 - RNA, 30 nt, Human
ccacucugcugccacuuugaauagaagucc

SEQ ID NO: 1026896 - RNA, 19 nt, Human
ccacuuugaauagaagucc

SEQ ID NO: 1026897 - RNA, 21 nt, Human
ccagcccuacaucccacuccc

SEQ ID NO: 1026898 - RNA, 22 nt, Human
ccaugugguucuuggcugcuuc

SEQ ID NO: 1026899 - RNA, 19 nt, Human
cccaggcuggagugcaaug

SEQ ID NO: 1026900 - RNA, 23 nt, Human
cccccaaaccaauaggaucuucu

SEQ ID NO: 1026901 - RNA, 23 nt, Human
cccuacaucccacuccccucaag

SEQ ID NO: 1026902 - RNA, 18 nt, Human
cccucccaacucauuccc

SEQ ID NO: 1026903 - RNA, 24 nt, Human
cccuuugccucacucuggccauuc

SEQ ID NO: 1026904 - RNA, 23 nt, Human
ccgcaaccuccgccuccuggguu

SEQ ID NO: 1026905 - RNA, 24 nt, Human
ccgcaaccuccgccuccuggguuc

SEQ ID NO: 1026906 - RNA, 24 nt, Human
ccgccuccuggguucaagcgauuc

SEQ ID NO: 1026907 - RNA, 18 nt, Human
ccgggcuuccucucccac

SEQ ID NO: 1026908 - RNA, 23 nt, Human
ccuacaucccacuccccucaaga

SEQ ID NO: 1026909 - RNA, 21 nt, Human
ccucaagauaacugggaaaga

SEQ ID NO: 1026910 - RNA, 21 nt, Human
ccucacucuggccauuccaaa

SEQ ID NO: 1026911 - RNA, 19 nt, Human
ccuccgccuccuggguuca

SEQ ID NO: 1026912 - RNA, 24 nt, Human
ccuccuggguucaagcgauucucc

SEQ ID NO: 1026913 - RNA, 21 nt, Human
cuccuggguucaagcgauucu

SEQ ID NO: 1026914 - RNA, 18 nt, Human
cucucuccccacugccuu

SEQ ID NO: 1026915 - RNA, 22 nt, Human
cucuuguugcccaggcuggagu

SEQ ID NO: 1026916 - RNA, 25 nt, Human
cucuuugucuuuccagaguugaaag

SEQ ID NO: 1026917 - RNA, 24 nt, Human
cugcacuauucuuucccaucucaa

SEQ ID NO: 1026918 - RNA, 20 nt, Human
cugcugcacuaauaauccag

SEQ ID NO: 1026919 - RNA, 18 nt, Human
cuuauuuauuuauuuauu

SEQ ID NO: 1026920 - RNA, 18 nt, Human
cuucuugguuagcugccc

SEQ ID NO: 1026921 - RNA, 24 nt, Human
cuuguugcccaggcuggagugcaa

SEQ ID NO: 1026922 - RNA, 21 nt, Human
gacuugcugccucucucccuu

SEQ ID NO: 1026923 - RNA, 18 nt, Human
gaggaggagccaugguuu

SEQ ID NO: 1026924 - RNA, 19 nt, Human
gaguaguccuaaaagcuca

SEQ ID NO: 1026925 - RNA, 19 nt, Human
gcccaggcuggagugcaau

SEQ ID NO: 1026926 - RNA, 20 nt, Human
gcggggcuggagcuggggcc

SEQ ID NO: 1026927 - RNA, 20 nt, Human
gcuacgacugucccugagac

SEQ ID NO: 1026928 - RNA, 24 nt, Human
gcucuuguugcccaggcuggagug

SEQ ID NO: 1026929 - RNA, 25 nt, Human
gcugcuggaaguuguguucccccca

SEQ ID NO: 1026930 - RNA, 19 nt, Human
gcuggagugcaauggcaca

SEQ ID NO: 1026931 - RNA, 18 nt, Human
ggacuuacaacacugaua

SEQ ID NO: 1026932 - RNA, 24 nt, Human
ggaggccgggcgcaguggcucacg

SEQ ID NO: 1026933 - RNA, 24 nt, Human
ggaugaaggaggccgggcgcagug

SEQ ID NO: 1026934 - RNA, 18 nt, Human
gggaacgcggagccuggg

SEQ ID NO: 1026935 - RNA, 18 nt, Human
gggcgcaguggcucacgg

SEQ ID NO: 1026936 - RNA, 28 nt, Human
uaaauagagaaccuuauguuguaaugac

SEQ ID NO: 1026937 - RNA, 19 nt, Human
uaacaaggaaucaaaggag

SEQ ID NO: 1026938 - RNA, 19 nt, Human
uaacuccuguaauucuggg

SEQ ID NO: 1026939 - RNA, 23 nt, Human
uaacuuaaauagagaaccuuaug

SEQ ID NO: 1026940 - RNA, 19 nt, Human
uaagcaaagaauaccagcc

SEQ ID NO: 1026941 - RNA, 23 nt, Human
uacaguccgucuccucuauggag

SEQ ID NO: 1026942 - RNA, 22 nt, Human
uaccagcccuacaucccacucc

SEQ ID NO: 1026943 - RNA, 24 nt, Human
uacugcauguuucuagcccucagc

SEQ ID NO: 1026944 - RNA, 22 nt, Human
uauugggaauaacaaaugagaa

SEQ ID NO: 1026945 - RNA, 24 nt, Human
uauuuauuuauugagauggaguuu

SEQ ID NO: 1026946 - RNA, 19 nt, Human
ucaagcgauucucccgccu

SEQ ID NO: 1026947 - RNA, 23 nt, Human
ucacacaagcucagcagcacugg

SEQ ID NO: 1026948 - RNA, 24 nt, Human
ucaccgcaaccuccgccuccuggg

SEQ ID NO: 1026949 - RNA, 25 nt, Human
ucaccgcaaccuccgccuccugggu

SEQ ID NO: 1026950 - RNA, 27 nt, Human
ucaccgcaaccuccgccuccuggguuc

SEQ ID NO: 1026951 - RNA, 19 nt, Human
ucauaccucagcucuucuu

SEQ ID NO: 1026952 - RNA, 20 nt, Human
ucccacucugcugccacuuu

SEQ ID NO: 1026953 - RNA, 23 nt, Human
uccccacugccuuuuuucuuuug

SEQ ID NO: 1026954 - RNA, 26 nt, Human
uccccccaaaccaauaggaucuucuu

SEQ ID NO: 1026955 - RNA, 23 nt, Human
ucccguguacuuuccuucuccug

SEQ ID NO: 1026956 - RNA, 21 nt, Human
uccuggguucaagcgauucuc

SEQ ID NO: 1026957 - RNA, 24 nt, Human
uccuggguucaagcgauucucccg

SEQ ID NO: 1026958 - RNA, 23 nt, Human
ucgcucuuguugcccaggcugga

SEQ ID NO: 1026959 - RNA, 18 nt, Human
ucuacaguccgucuccuc

SEQ ID NO: 1026960 - RNA, 25 nt, Human
ucucuuugucuuuccagaguugaaa

SEQ ID NO: 1026961 - RNA, 21 nt, Human
ucuggacucuauaccugauuu

SEQ ID NO: 1026962 - RNA, 19 nt, Human
ucuguaauuagugggaagc

SEQ ID NO: 1026963 - RNA, 22 nt, Human
ucuguaauuagugggaagccac

SEQ ID NO: 1026964 - RNA, 22 nt, Human
ucuuguugcccaggcuggagug

SEQ ID NO: 1026965 - RNA, 21 nt, Human
ugacuugcugccucucucccu

SEQ ID NO: 1026966 - RNA, 23 nt, Human
ugagaauaaauauauuuagcccu

SEQ ID NO: 1026967 - RNA, 21 nt, Human
ugccacuuugaauagaagucc

SEQ ID NO: 1026968 - RNA, 18 nt, Human
ugcccaggcuggagugca

SEQ ID NO: 1026969 - RNA, 21 nt, Human
ugcccaggcuggagugcaaug

SEQ ID NO: 1026970 - RNA, 24 nt, Human
ugcccaggcuggagugcaauggca

SEQ ID NO: 1026971 - RNA, 22 nt, Human
ugcccaugugguucuuggcugc

SEQ ID NO: 1026972 - RNA, 23 nt, Human
ugccucacucuggccauuccaaa

SEQ ID NO: 1026973 - RNA, 20 nt, Human
uggaaaagggaacauuuagu

SEQ ID NO: 1026974 - RNA, 23 nt, Human
uggagcugcacuauucuuuccca

SEQ ID NO: 1026975 - RNA, 24 nt, Human
uggagcugcacuauucuuucccau

SEQ ID NO: 1026976 - RNA, 23 nt, Human
uggagugcaauggcacaaucucg

SEQ ID NO: 1026977 - RNA, 24 nt, Human
uggagugcaauggcacaaucucgg

SEQ ID NO: 1026978 - RNA, 24 nt, Human
uggcacaaucucggcucaccgcaa

SEQ ID NO: 1026979 - RNA, 21 nt, Human
ugggaaagacacaaagccaug

SEQ ID NO: 1026980 - RNA, 19 nt, Human
ugggcaggggaucuccuug

SEQ ID NO: 1026981 - RNA, 22 nt, Human
uguaaaugaaccuaagcaaaga

SEQ ID NO: 1026982 - RNA, 20 nt, Human
uguugcccaggcuggagugc

SEQ ID NO: 1026983 - RNA, 21 nt, Human
uguuucuggacucuauaccug

SEQ ID NO: 1026984 - RNA, 26 nt, Human
uuaaucuuugaauuucaauguuuucu

SEQ ID NO: 1026985 - RNA, 23 nt, Human
uucaagcgauucucccgccucag

SEQ ID NO: 1026986 - RNA, 25 nt, Human
uucaagcgauucucccgccucaggg

SEQ ID NO: 1026987 - RNA, 19 nt, Human
uuccagaguugaaagaccc

SEQ ID NO: 1026988 - RNA, 22 nt, Human
uucccugggacccccucccaac

SEQ ID NO: 1026989 - RNA, 24 nt, Human
uucgcucuuguugcccaggcugga

SEQ ID NO: 1026990 - RNA, 18 nt, Human
uugcccaggcuggagugc

SEQ ID NO: 1026991 - RNA, 22 nt, Human
uugcugccucucucccuucugg

SEQ ID NO: 1026992 - RNA, 22 nt, Human
uuguauuuaacuuaaauagaga

SEQ ID NO: 1026993 - RNA, 24 nt, Human
uuucgcucuuguugcccaggcugg

SEQ ID NO: 1026994 - RNA, 24 nt, Human
uuuuuuuuuuuuuuuuuuuuacag

SEQ ID NO: 1026995 - RNA, 22 nt, Human
aauucauuaggugcagaaaucu

SEQ ID NO: 1026996 - RNA, 20 nt, Human
acaucaaauucauuaggugc

SEQ ID NO: 1026997 - RNA, 22 nt, Human
agcucccgguguucagcagccc

SEQ ID NO: 1026998 - RNA, 21 nt, Human
aggaagagccagcagcagcug

SEQ ID NO: 1026999 - RNA, 18 nt, Human
auaugcacgaguguugga

SEQ ID NO: 1027000 - RNA, 21 nt, Human
auucuucuaguugaauucugg

SEQ ID NO: 1027001 - RNA, 21 nt, Human
caagaggaagagccagcagca

SEQ ID NO: 1027002 - RNA, 20 nt, Human
ccccuuucaccauccccgcc

SEQ ID NO: 1027003 - RNA, 21 nt, Human
ccccuuucaccauccccgccg

SEQ ID NO: 1027004 - RNA, 20 nt, Human
ccgccguggagauaucaucg

SEQ ID NO: 1027005 - RNA, 19 nt, Human
cucucugcauggccuuucc

SEQ ID NO: 1027006 - RNA, 21 nt, Human
cuguuccccgaaagaagaauc

SEQ ID NO: 1027007 - RNA, 25 nt, Human
cuuccaguuuaaacaugacaucuua

SEQ ID NO: 1027008 - RNA, 19 nt, Human
gaagcucucugcauggccu

SEQ ID NO: 1027009 - RNA, 23 nt, Human
uagcucccgguguucagcagccc

SEQ ID NO: 1027010 - RNA, 22 nt, Human
uauucuucuaguugaauucugg

SEQ ID NO: 1027011 - RNA, 21 nt, Human
ucaccauccccgccgccgugg

SEQ ID NO: 1027012 - RNA, 21 nt, Human
ucaccuucuaaaaacugacuc

SEQ ID NO: 1027013 - RNA, 18 nt, Human
uccacaaccccuuucacc

SEQ ID NO: 1027014 - RNA, 23 nt, Human
uccccgaaagaagaauccguuuc

SEQ ID NO: 1027015 - RNA, 18 nt, Human
uccccgccgccguggaga

SEQ ID NO: 1027016 - RNA, 26 nt, Human
ucuucacgugcucauaguagcucccc

SEQ ID NO: 1027017 - RNA, 22 nt, Human
ugacagcaucuuagaagcugau

SEQ ID NO: 1027018 - RNA, 21 nt, Human
ugagcagcaggugguccacaa

SEQ ID NO: 1027019 - RNA, 20 nt, Human
ugcggaagccuugggggcag

SEQ ID NO: 1027020 - RNA, 18 nt, Human
uuaaacaugacaucaaau

SEQ ID NO: 1027021 - RNA, 22 nt, Human
uucaggaaaaggccgcaagagg

SEQ ID NO: 1027022 - RNA, 23 nt, Human
uucaggaaaaggccgcaagagga

SEQ ID NO: 1027023 - RNA, 21 nt, Human
uucuuucggauuucuuuuaaa

SEQ ID NO: 1027024 - RNA, 20 nt, Human
aaaggaacuguugacccaaa

SEQ ID NO: 1027025 - RNA, 21 nt, Human
aaaggaacuguugacccaaag

SEQ ID NO: 1027026 - RNA, 18 nt, Human
aagaaccacaccacuaaa

SEQ ID NO: 1027027 - RNA, 19 nt, Human
aagaaccacaccacuaaau

SEQ ID NO: 1027028 - RNA, 19 nt, Human
aagccccaucccugcccag

SEQ ID NO: 1027029 - RNA, 24 nt, Human
aagccugaugaacuuaauccguac

SEQ ID NO: 1027030 - RNA, 19 nt, Human
aagcuggggcaggagagag

SEQ ID NO: 1027031 - RNA, 21 nt, Human
acaccacuaaauccccuuggc

SEQ ID NO: 1027032 - RNA, 21 nt, Human
accauccuguccuuggacccc

SEQ ID NO: 1027033 - RNA, 23 nt, Human
acccaaagcaugaagcaggaccc

SEQ ID NO: 1027034 - RNA, 18 nt, Human
accuagacaaaaacaauu

SEQ ID NO: 1027035 - RNA, 19 nt, Human
acugccagcugccgccgcc

SEQ ID NO: 1027036 - RNA, 23 nt, Human
acugugguggcugaguggaagcu

SEQ ID NO: 1027037 - RNA, 26 nt, Human
agaaaggagaacagaggcaggggagc

SEQ ID NO: 1027038 - RNA, 24 nt, Human
agaaucugaaagcucgagucccag

SEQ ID NO: 1027039 - RNA, 21 nt, Human
agagacaccagcuuggccucc

SEQ ID NO: 1027040 - RNA, 23 nt, Human
agcacgcuuuccucugacccacu

SEQ ID NO: 1027041 - RNA, 22 nt, Human
agccugcggccugagcacacca

SEQ ID NO: 1027042 - RNA, 22 nt, Human
aggacccccaccaaccccagcc

SEQ ID NO: 1027043 - RNA, 24 nt, Human
aggagacugcuuuccaaaugcagc

SEQ ID NO: 1027044 - RNA, 25 nt, Human
aggccaggagagcagcuccaggcac

SEQ ID NO: 1027045 - RNA, 24 nt, Human
aggcuaguugagaaucugaaagcu

SEQ ID NO: 1027046 - RNA, 18 nt, Human
agggaguggguggggccu

SEQ ID NO: 1027047 - RNA, 19 nt, Human
agggaguggguggggccug

SEQ ID NO: 1027048 - RNA, 24 nt, Human
agggcauaaggaauggggacaggg

SEQ ID NO: 1027049 - RNA, 18 nt, Human
aggguggggagggcugag

SEQ ID NO: 1027050 - RNA, 18 nt, Human
aggucuggggguccuggu

SEQ ID NO: 1027051 - RNA, 21 nt, Human
aggugaggucaccuugagcca

SEQ ID NO: 1027052 - RNA, 23 nt, Human
aggugaggucaccuugagccagg

SEQ ID NO: 1027053 - RNA, 20 nt, Human
agugcugugugcauaguugg

SEQ ID NO: 1027054 - RNA, 23 nt, Human
aucagcuuuggccuccugaccca

SEQ ID NO: 1027055 - RNA, 23 nt, Human
auugggggcagccagaagaggag

SEQ ID NO: 1027056 - RNA, 21 nt, Human
caaaacaaccugcgcucaggc

SEQ ID NO: 1027057 - RNA, 23 nt, Human
caaaggaacuguugacccaaagc

SEQ ID NO: 1027058 - RNA, 21 nt, Human
caaaucccagugggucagaaa

SEQ ID NO: 1027059 - RNA, 23 nt, Human
caagaggccuccccguggccacc

SEQ ID NO: 1027060 - RNA, 26 nt, Human
caccaaccccagccagguggccugca

SEQ ID NO: 1027061 - RNA, 21 nt, Human
caccacuaaauccccuuggca

SEQ ID NO: 1027062 - RNA, 23 nt, Human
cacccugcccuguugaccauccu

SEQ ID NO: 1027063 - RNA, 25 nt, Human
cacgcaaaccuucaguuuuugcgau

SEQ ID NO: 1027064 - RNA, 20 nt, Human
cagaaaggagaacagaggca

SEQ ID NO: 1027065 - RNA, 21 nt, Human
cagaggcaggggagcccucgg

SEQ ID NO: 1027066 - RNA, 22 nt, Human
cagcaugccuggccaaagccuc

SEQ ID NO: 1027067 - RNA, 21 nt, Human
cagcgaagagacugagacaag

SEQ ID NO: 1027068 - RNA, 19 nt, Human
cagcugccgccgccucugg

SEQ ID NO: 1027069 - RNA, 20 nt, Human
cagcugccgccgccucugga

SEQ ID NO: 1027070 - RNA, 18 nt, Human
caggaagcccauggugaa

SEQ ID NO: 1027071 - RNA, 20 nt, Human
ccaaccccagccagguggcc

SEQ ID NO: 1027072 - RNA, 20 nt, Human
ccaagccgguggugacccac

SEQ ID NO: 1027073 - RNA, 18 nt, Human
ccaggcacaacaccugcu

SEQ ID NO: 1027074 - RNA, 18 nt, Human
ccagggagguggcccugc

SEQ ID NO: 1027075 - RNA, 18 nt, Human
ccauccuguccuuggacc

SEQ ID NO: 1027076 - RNA, 18 nt, Human
cccaagccgguggugacc

SEQ ID NO: 1027077 - RNA, 23 nt, Human
cccagggagguggcccugcgcgg

SEQ ID NO: 1027078 - RNA, 25 nt, Human
cccaugguggggcaacugugguggc

SEQ ID NO: 1027079 - RNA, 19 nt, Human
ccccaaaguaaaauggggc

SEQ ID NO: 1027080 - RNA, 18 nt, Human
ccccacacaccccaagag

SEQ ID NO: 1027081 - RNA, 18 nt, Human
ccccacacaccccaagag

SEQ ID NO: 1027082 - RNA, 18 nt, Human
ccccaccaaccccagcca

SEQ ID NO: 1027083 - RNA, 20 nt, Human
ccccaucccugcccagcccc

SEQ ID NO: 1027084 - RNA, 23 nt, Human
cccgcgcacccaggaagcccaau

SEQ ID NO: 1027085 - RNA, 20 nt, Human
cccggacagaggagcuaaga

SEQ ID NO: 1027086 - RNA, 24 nt, Human
ccgccuacagcuguuuugccaagg

SEQ ID NO: 1027087 - RNA, 20 nt, Human
ccguccucacagcccuggga

SEQ ID NO: 1027088 - RNA, 22 nt, Human
ccuacagcuguuuugccaaggc

SEQ ID NO: 1027089 - RNA, 22 nt, Human
ccuacuacccaaacccuccuug

SEQ ID NO: 1027090 - RNA, 22 nt, Human
ccuaguagcccggacagaggag

SEQ ID NO: 1027091 - RNA, 20 nt, Human
ccucccuuugaaagaaccac

SEQ ID NO: 1027092 - RNA, 23 nt, Human
ccugaacaucagcuuuggccucc

SEQ ID NO: 1027093 - RNA, 28 nt, Human
ccugcgcucaggcccgcgcacccaggaa

SEQ ID NO: 1027094 - RNA, 27 nt, Human
ccuggagcuggggcaguugccagaagc

SEQ ID NO: 1027095 - RNA, 20 nt, Human
ccuggguucaaguuaaacag

SEQ ID NO: 1027096 - RNA, 26 nt, Human
ccuuccagucugagccaggccugccu

SEQ ID NO: 1027097 - RNA, 23 nt, Human
cgauaaauccaaggaggccagga

SEQ ID NO: 1027098 - RNA, 18 nt, Human
cggcgcuggcacgcuguc

SEQ ID NO: 1027099 - RNA, 21 nt, Human
cgugcuuacaacggauaugca

SEQ ID NO: 1027100 - RNA, 24 nt, Human
cucaggcccgcgcacccaggaagc

SEQ ID NO: 1027101 - RNA, 18 nt, Human
cuccaagggccagccgcg

SEQ ID NO: 1027102 - RNA, 18 nt, Human
cucccggccuggcagguc

SEQ ID NO: 1027103 - RNA, 19 nt, Human
cucucacgcaaaccuucag

SEQ ID NO: 1027104 - RNA, 22 nt, Human
cuucgagcacgcuuuccucuga

SEQ ID NO: 1027105 - RNA, 20 nt, Human
gaccucacgauccccugaac

SEQ ID NO: 1027106 - RNA, 21 nt, Human
gaccugucgucuguccuguuu

SEQ ID NO: 1027107 - RNA, 22 nt, Human
gagaggacccccaccaacccca

SEQ ID NO: 1027108 - RNA, 19 nt, Human
gagaggggagcaggcuucc

SEQ ID NO: 1027109 - RNA, 22 nt, Human
gagcccacugcccuagcucuga

SEQ ID NO: 1027110 - RNA, 26 nt, Human
gaggaccccggguggacagaguccuu

SEQ ID NO: 1027111 - RNA, 18 nt, Human
gcacgcuguccacccugc

SEQ ID NO: 1027112 - RNA, 21 nt, Human
gcacgcuuuccucugacccac

SEQ ID NO: 1027113 - RNA, 19 nt, Human
gcagaaggcgcuugcuccc

SEQ ID NO: 1027114 - RNA, 21 nt, Human
gcauccacccagggagguggc

SEQ ID NO: 1027115 - RNA, 19 nt, Human
gccaaagccuccccacucc

SEQ ID NO: 1027116 - RNA, 23 nt, Human
gccaaggugccccacguggcuug

SEQ ID NO: 1027117 - RNA, 19 nt, Human
gccagagaggggagcaggc

SEQ ID NO: 1027118 - RNA, 22 nt, Human
gccccacuaugucccugcugug

SEQ ID NO: 1027119 - RNA, 18 nt, Human
gcccucgguccccagccc

SEQ ID NO: 1027120 - RNA, 24 nt, Human
gccucuggcuggguguccaccucc

SEQ ID NO: 1027121 - RNA, 18 nt, Human
gccugagcacaccaaucu

SEQ ID NO: 1027122 - RNA, 18 nt, Human
gccuggagcuggggcagu

SEQ ID NO: 1027123 - RNA, 24 nt, Human
ggacacuugggggcugagggcacu

SEQ ID NO: 1027124 - RNA, 21 nt, Human
ggacagggcacagggcacgug

SEQ ID NO: 1027125 - RNA, 20 nt, Human
ggagagcagcuccaggcaca

SEQ ID NO: 1027126 - RNA, 21 nt, Human
ggagagccaggguggggaggg

SEQ ID NO: 1027127 - RNA, 24 nt, Human
ggaggggacguuugcaggucuggg

SEQ ID NO: 1027128 - RNA, 18 nt, Human
ggauggccuggagcuggg

SEQ ID NO: 1027129 - RNA, 18 nt, Human
ggccuggagcuggggcag

SEQ ID NO: 1027130 - RNA, 18 nt, Human
gggacguuugcaggucug

SEQ ID NO: 1027131 - RNA, 19 nt, Human
gggacguuugcaggucugg

SEQ ID NO: 1027132 - RNA, 19 nt, Human
gggcagccagaagaggagg

SEQ ID NO: 1027133 - RNA, 23 nt, Human
gggcaggggcuauggucccaugc

SEQ ID NO: 1027134 - RNA, 19 nt, Human
ggggagggcugagugucug

SEQ ID NO: 1027135 - RNA, 20 nt, Human
ggggcagccagaagaggagg

SEQ ID NO: 1027136 - RNA, 19 nt, Human
ggguggggagggcugagug

SEQ ID NO: 1027137 - RNA, 19 nt, Human
gugcuuccgugugaguugg

SEQ ID NO: 1027138 - RNA, 25 nt, Human
uaaagcuuuaaacaauccuggguuc

SEQ ID NO: 1027139 - RNA, 18 nt, Human
uaagagcgagugcugugu

SEQ ID NO: 1027140 - RNA, 23 nt, Human
uagcaaccucaucugaccccagc

SEQ ID NO: 1027141 - RNA, 21 nt, Human
uagcuccacugccugccuguu

SEQ ID NO: 1027142 - RNA, 20 nt, Human
uauguacaaaacaaccugcg

SEQ ID NO: 1027143 - RNA, 21 nt, Human
ucagaaaggagaacagaggca

SEQ ID NO: 1027144 - RNA, 21 nt, Human
uccacccugcccuguugacca

SEQ ID NO: 1027145 - RNA, 22 nt, Human
uccaccuccugccgggaagcca

SEQ ID NO: 1027146 - RNA, 22 nt, Human
uccagucugagccaggccugcc

SEQ ID NO: 1027147 - RNA, 20 nt, Human
uccccguggccaccaccgcc

SEQ ID NO: 1027148 - RNA, 21 nt, Human
uccgaggguauggcuccuggg

SEQ ID NO: 1027149 - RNA, 18 nt, Human
uccguacgcuggugggag

SEQ ID NO: 1027150 - RNA, 18 nt, Human
uccucgucucucacgcaa

SEQ ID NO: 1027151 - RNA, 21 nt, Human
ucucaagccccaucccugccc

SEQ ID NO: 1027152 - RNA, 18 nt, Human
ucucugggggauccaggg

SEQ ID NO: 1027153 - RNA, 22 nt, Human
ucugaccccagcuucggcuucc

SEQ ID NO: 1027154 - RNA, 21 nt, Human
ugaaagaaccacaccacuaaa

SEQ ID NO: 1027155 - RNA, 20 nt, Human
ugaaggugaggucaccuuga

SEQ ID NO: 1027156 - RNA, 22 nt, Human
ugaauaaccaaaaaauuucuuc

SEQ ID NO: 1027157 - RNA, 22 nt, Human
ugaccauggcauccuucgagca

SEQ ID NO: 1027158 - RNA, 20 nt, Human
ugacccaaagcaugaagcag

SEQ ID NO: 1027159 - RNA, 20 nt, Human
ugaccccagcuucggcuucc

SEQ ID NO: 1027160 - RNA, 20 nt, Human
ugaccuagacaaaaacaauu

SEQ ID NO: 1027161 - RNA, 25 nt, Human
ugacuugcuuuuccaucaucaacuc

SEQ ID NO: 1027162 - RNA, 19 nt, Human
ugagaaucugaaagcucga

SEQ ID NO: 1027163 - RNA, 19 nt, Human
ugagggagcuacagauggg

SEQ ID NO: 1027164 - RNA, 20 nt, Human
ugauggggcuggggcagccu

SEQ ID NO: 1027165 - RNA, 22 nt, Human
ugcagaaggcgcuugcucccaa

SEQ ID NO: 1027166 - RNA, 24 nt, Human
ugcagcucgggccuacuacccaaa

SEQ ID NO: 1027167 - RNA, 22 nt, Human
ugccaaggcuaguugagaaucu

SEQ ID NO: 1027168 - RNA, 23 nt, Human
ugccaggcuggacacuugggggc

SEQ ID NO: 1027169 - RNA, 25 nt, Human
ugccaguuggcccacggaaggccgg

SEQ ID NO: 1027170 - RNA, 23 nt, Human
ugcccuguugaccauccuguccu

SEQ ID NO: 1027171 - RNA, 22 nt, Human
ugccuggccaaagccuccccac

SEQ ID NO: 1027172 - RNA, 21 nt, Human
ugcgauaaauccaaggaggcc

SEQ ID NO: 1027173 - RNA, 18 nt, Human
ugcucuggaggcucugcc

SEQ ID NO: 1027174 - RNA, 18 nt, Human
uggagcagguuugggaug

SEQ ID NO: 1027175 - RNA, 24 nt, Human
uggcccacggaaggccggaaaugc

SEQ ID NO: 1027176 - RNA, 21 nt, Human
uggcuggguguccaccuccug

SEQ ID NO: 1027177 - RNA, 21 nt, Human
ugggaugcucaucccuugaca

SEQ ID NO: 1027178 - RNA, 28 nt, Human
ugggauggccuggagcuggggcaguugc

SEQ ID NO: 1027179 - RNA, 20 nt, Human
uggggcaguugccagaagcu

SEQ ID NO: 1027180 - RNA, 19 nt, Human
ugggggcagccagaagagg

SEQ ID NO: 1027181 - RNA, 24 nt, Human
ugggggcuggacucgagucuucuu

SEQ ID NO: 1027182 - RNA, 18 nt, Human
ugggucagaaaggagaac

SEQ ID NO: 1027183 - RNA, 18 nt, Human
ugguauuugagcucuuga

SEQ ID NO: 1027184 - RNA, 21 nt, Human
ugguggcugaguggaagcugg

SEQ ID NO: 1027185 - RNA, 23 nt, Human
ugguggggcaacugugguggcug

SEQ ID NO: 1027186 - RNA, 20 nt, Human
uguacaaaacaaccugcgcu

SEQ ID NO: 1027187 - RNA, 28 nt, Human
uguccuguuuuaucccccacacacccca

SEQ ID NO: 1027188 - RNA, 24 nt, Human
ugugcaagaccucaccgguucccc

SEQ ID NO: 1027189 - RNA, 21 nt, Human
uguuccuggcuuccccuucca

SEQ ID NO: 1027190 - RNA, 21 nt, Human
uguugaccauccuguccuugg

SEQ ID NO: 1027191 - RNA, 19 nt, Human
uguuggccagguuguacgg

SEQ ID NO: 1027192 - RNA, 20 nt, Human
uucaaguuaaacaguuccag

SEQ ID NO: 1027193 - RNA, 25 nt, Human
uuccgcuguccucgucucucacgca

SEQ ID NO: 1027194 - RNA, 18 nt, Human
aaaaagggucucugcccg

SEQ ID NO: 1027195 - RNA, 19 nt, Human
aaaaagggucucugcccgg

SEQ ID NO: 1027196 - RNA, 19 nt, Human
aaaaauugauaaggugaua

SEQ ID NO: 1027197 - RNA, 20 nt, Human
aaaagcagcuuuuggaaaca

SEQ ID NO: 1027198 - RNA, 26 nt, Human
aagcaucucucucgggcagggcaccc

SEQ ID NO: 1027199 - RNA, 18 nt, Human
aagcccagggggaagagg

SEQ ID NO: 1027200 - RNA, 22 nt, Human
acaagcaagagacuguuucaca

SEQ ID NO: 1027201 - RNA, 20 nt, Human
acgaggccaccccuggaagc

SEQ ID NO: 1027202 - RNA, 19 nt, Human
agaacugaccgaacugcug

SEQ ID NO: 1027203 - RNA, 22 nt, Human
agagccccccacuuucuguccu

SEQ ID NO: 1027204 - RNA, 20 nt, Human
agaugucagugaagguaugg

SEQ ID NO: 1027205 - RNA, 21 nt, Human
agccccggccaccggcucggc

SEQ ID NO: 1027206 - RNA, 21 nt, Human
agcgggaagccgggcugcagg

SEQ ID NO: 1027207 - RNA, 21 nt, Human
aggcucccccucccccucacc

SEQ ID NO: 1027208 - RNA, 20 nt, Human
aguggccaggcgccucgccc

SEQ ID NO: 1027209 - RNA, 21 nt, Human
aucauguuuuggaaaaaauug

SEQ ID NO: 1027210 - RNA, 21 nt, Human
aucuguaaaaguuuaugaaaa

SEQ ID NO: 1027211 - RNA, 22 nt, Human
caacgcaucuuacgaacguggc

SEQ ID NO: 1027212 - RNA, 18 nt, Human
caagacuccagauacaag

SEQ ID NO: 1027213 - RNA, 19 nt, Human
caccagggagggcgucgca

SEQ ID NO: 1027214 - RNA, 21 nt, Human
cacuuucuguccugguggggg

SEQ ID NO: 1027215 - RNA, 27 nt, Human
cagcagcacccuccgggcaggccuggc

SEQ ID NO: 1027216 - RNA, 21 nt, Human
ccagcugucucuucugcuccu

SEQ ID NO: 1027217 - RNA, 20 nt, Human
cccccucccccucaccgguc

SEQ ID NO: 1027218 - RNA, 20 nt, Human
cccccucuguuucaccugca

SEQ ID NO: 1027219 - RNA, 18 nt, Human
cccgacggcggcccucug

SEQ ID NO: 1027220 - RNA, 21 nt, Human
ccgagagccuggagagaggcu

SEQ ID NO: 1027221 - RNA, 19 nt, Human
ccuccgggacuggcauggg

SEQ ID NO: 1027222 - RNA, 20 nt, Human
ccugcagggcugcugcuccu

SEQ ID NO: 1027223 - RNA, 21 nt, Human
ccugcgguggacccgggaggc

SEQ ID NO: 1027224 - RNA, 19 nt, Human
ccugguggggggagcgggg

SEQ ID NO: 1027225 - RNA, 24 nt, Human
cgaagcccagggggaagaggcugg

SEQ ID NO: 1027226 - RNA, 19 nt, Human
cgaucggaucuaacaacgg

SEQ ID NO: 1027227 - RNA, 24 nt, Human
cgcaaggcggugugggcagcagca

SEQ ID NO: 1027228 - RNA, 20 nt, Human
cgccuggcuggcggggggca

SEQ ID NO: 1027229 - RNA, 18 nt, Human
cgggcagggcacccuggg

SEQ ID NO: 1027230 - RNA, 21 nt, Human
cgggugcccuccccaggcucu

SEQ ID NO: 1027231 - RNA, 18 nt, Human
cguccuccucuuccucua

SEQ ID NO: 1027232 - RNA, 22 nt, Human
cuagagccuuaucuuuugagaa

SEQ ID NO: 1027233 - RNA, 18 nt, Human
cuccaaccguggcggggc

SEQ ID NO: 1027234 - RNA, 24 nt, Human
cucccccucccccucaccggucuc

SEQ ID NO: 1027235 - RNA, 19 nt, Human
cuccucagggucguauggc

SEQ ID NO: 1027236 - RNA, 21 nt, Human
cucucgggcagggcacccugg

SEQ ID NO: 1027237 - RNA, 21 nt, Human
cugcugcucuugcuggaacag

SEQ ID NO: 1027238 - RNA, 24 nt, Human
cugcugugguuuugggcuccuggg

SEQ ID NO: 1027239 - RNA, 21 nt, Human
cugguggggggagcggggcgg

SEQ ID NO: 1027240 - RNA, 21 nt, Human
cugugguuuugggcuccuggg

SEQ ID NO: 1027241 - RNA, 19 nt, Human
gaaaaauacacgacaagca

SEQ ID NO: 1027242 - RNA, 21 nt, Human
gaagcccagggggaagaggcu

SEQ ID NO: 1027243 - RNA, 21 nt, Human
gaaggcgaaacuggaccaaca

SEQ ID NO: 1027244 - RNA, 22 nt, Human
gacuuuggugguggagacauca

SEQ ID NO: 1027245 - RNA, 20 nt, Human
gccauggagaccccgacggc

SEQ ID NO: 1027246 - RNA, 23 nt, Human
gccgcaaggcggugugggcagca

SEQ ID NO: 1027247 - RNA, 23 nt, Human
gccuggccgagcugucuccaacc

SEQ ID NO: 1027248 - RNA, 19 nt, Human
gccuggcuggcggggggca

SEQ ID NO: 1027249 - RNA, 19 nt, Human
gcgaaacuggaccaacaaa

SEQ ID NO: 1027250 - RNA, 24 nt, Human
gcucagaaggcgaaacuggaccaa

SEQ ID NO: 1027251 - RNA, 18 nt, Human
gcucugccuuccagccgu

SEQ ID NO: 1027252 - RNA, 21 nt, Human
ggcggugcccucgccgggucu

SEQ ID NO: 1027253 - RNA, 22 nt, Human
ggcugagagccccccacuuucu

SEQ ID NO: 1027254 - RNA, 24 nt, Human
gggcggugcccucgccgggucugg

SEQ ID NO: 1027255 - RNA, 23 nt, Human
ggugcccuccccaggcucugccu

SEQ ID NO: 1027256 - RNA, 19 nt, Human
ggugugggcagcagcaccc

SEQ ID NO: 1027257 - RNA, 22 nt, Human
guggacccgggaggcucucugg

SEQ ID NO: 1027258 - RNA, 18 nt, Human
guggccaggcgccucgcc

SEQ ID NO: 1027259 - RNA, 21 nt, Human
guggcucucugucccccucug

SEQ ID NO: 1027260 - RNA, 18 nt, Human
guucccgcugacccugaa

SEQ ID NO: 1027261 - RNA, 18 nt, Human
uaaaagcagcuuuuggaa

SEQ ID NO: 1027262 - RNA, 21 nt, Human
uaaaagcagcuuuuggaaaca

SEQ ID NO: 1027263 - RNA, 22 nt, Human
uaaaagcagcuuuuggaaacac

SEQ ID NO: 1027264 - RNA, 23 nt, Human
uaaaaucugagcacgcuaagaaa

SEQ ID NO: 1027265 - RNA, 24 nt, Human
uaaaucauguuuuggaaaaaauug

SEQ ID NO: 1027266 - RNA, 22 nt, Human
uacaguaauguuuaaguccaga

SEQ ID NO: 1027267 - RNA, 19 nt, Human
uacuaagacuucucccgua

SEQ ID NO: 1027268 - RNA, 18 nt, Human
uaugacaaaagaaagaug

SEQ ID NO: 1027269 - RNA, 24 nt, Human
ucaacagucacuuucgcuucuucu

SEQ ID NO: 1027270 - RNA, 20 nt, Human
uccagcagaaugaagauuuc

SEQ ID NO: 1027271 - RNA, 20 nt, Human
uccccaggcucugccuucca

SEQ ID NO: 1027272 - RNA, 24 nt, Human
ucccgcugacccugaaacgggggc

SEQ ID NO: 1027273 - RNA, 19 nt, Human
ucccugugguuugacgccu

SEQ ID NO: 1027274 - RNA, 20 nt, Human
uccugcgacgcgaaccccgg

SEQ ID NO: 1027275 - RNA, 23 nt, Human
uccugcgacgcgaaccccgggca

SEQ ID NO: 1027276 - RNA, 23 nt, Human
ucguacuccuccucagggucgua

SEQ ID NO: 1027277 - RNA, 26 nt, Human
ucucucucgggcagggcacccugggc

SEQ ID NO: 1027278 - RNA, 18 nt, Human
ucuguccuggugggggga

SEQ ID NO: 1027279 - RNA, 20 nt, Human
ugaacagcuuccugucucau

SEQ ID NO: 1027280 - RNA, 21 nt, Human
ugacaaaagaaagaugcauuu

SEQ ID NO: 1027281 - RNA, 21 nt, Human
ugaccgaacugcuggacgauc

SEQ ID NO: 1027282 - RNA, 22 nt, Human
ugagaacugaccgaacugcugg

SEQ ID NO: 1027283 - RNA, 24 nt, Human
ugagagccccccacuuucuguccu

SEQ ID NO: 1027284 - RNA, 24 nt, Human
ugcagcgggaagccgggcugcagg

SEQ ID NO: 1027285 - RNA, 19 nt, Human
ugccggcaccccguccucu

SEQ ID NO: 1027286 - RNA, 21 nt, Human
ugccuugggcaaggacgacuu

SEQ ID NO: 1027287 - RNA, 21 nt, Human
ugcucggaccccgcugggggc

SEQ ID NO: 1027288 - RNA, 20 nt, Human
ugcuggaacagcucugccuu

SEQ ID NO: 1027289 - RNA, 21 nt, Human
ugcugugguuuugggcuccug

SEQ ID NO: 1027290 - RNA, 20 nt, Human
uggaaaaaauugauaaggug

SEQ ID NO: 1027291 - RNA, 22 nt, Human
uggaacagcucugccuugggca

SEQ ID NO: 1027292 - RNA, 18 nt, Human
uggacgccugcaggucac

SEQ ID NO: 1027293 - RNA, 26 nt, Human
uggagagaggcucccccucccccuca

SEQ ID NO: 1027294 - RNA, 25 nt, Human
uggccaggcgccucgccugccgggg

SEQ ID NO: 1027295 - RNA, 26 nt, Human
uggccaggcgccucgccugccggggg

SEQ ID NO: 1027296 - RNA, 20 nt, Human
uggcccacgaggccaccccu

SEQ ID NO: 1027297 - RNA, 18 nt, Human
uggccugucguccuccuc

SEQ ID NO: 1027298 - RNA, 22 nt, Human
uggcgccgcccucgcuccacaa

SEQ ID NO: 1027299 - RNA, 20 nt, Human
ugggcaaggacgacuuuggu

SEQ ID NO: 1027300 - RNA, 24 nt, Human
ugugggcagcagcacccuccgggc

SEQ ID NO: 1027301 - RNA, 18 nt, Human
ugugguuuugggcuccug

SEQ ID NO: 1027302 - RNA, 23 nt, Human
ugugguuuugggcuccuggggga

SEQ ID NO: 1027303 - RNA, 18 nt, Human
uguucagcucuucuagca

SEQ ID NO: 1027304 - RNA, 26 nt, Human
uuaaaaaagcaucagaauuguaaaga

SEQ ID NO: 1027305 - RNA, 19 nt, Human
uucaccugcagggcugcug

SEQ ID NO: 1027306 - RNA, 22 nt, Human
uucagaaguacucgaaaaauac

SEQ ID NO: 1027307 - RNA, 21 nt, Human
uucaggagcccuuuccaccuc

SEQ ID NO: 1027308 - RNA, 18 nt, Human
uuccaaagagagucugca

SEQ ID NO: 1027309 - RNA, 24 nt, Human
uugcuggaacagcucugccuuggg

SEQ ID NO: 1027310 - RNA, 18 nt, Human
aagagcauggccccgggg

SEQ ID NO: 1027311 - RNA, 20 nt, Human
agcaagaguccgucucccuc

SEQ ID NO: 1027312 - RNA, 19 nt, Human
agccugggcaacauagcaa

SEQ ID NO: 1027313 - RNA, 23 nt, Human
aggaguucaagaccagccugggc

SEQ ID NO: 1027314 - RNA, 24 nt, Human
aggauugcuugaggccaggaguuc

SEQ ID NO: 1027315 - RNA, 18 nt, Human
aggcaggaggauugcuug

SEQ ID NO: 1027316 - RNA, 23 nt, Human
aggcaggaggauugcuugaggcc

SEQ ID NO: 1027317 - RNA, 21 nt, Human
aggcugaggcaggaggauugc

SEQ ID NO: 1027318 - RNA, 24 nt, Human
aggcugaggcaggaggauugcuug

SEQ ID NO: 1027319 - RNA, 21 nt, Human
aggggauggggugucacucgg

SEQ ID NO: 1027320 - RNA, 24 nt, Human
caacauagcaagaguccgucuccc

SEQ ID NO: 1027321 - RNA, 24 nt, Human
ccccggggcccggcgccuuggccc

SEQ ID NO: 1027322 - RNA, 19 nt, Human
ccucuggcgggaggacggg

SEQ ID NO: 1027323 - RNA, 19 nt, Human
cgugcagagucgugaccug

SEQ ID NO: 1027324 - RNA, 20 nt, Human
cgugcagagucgugaccugg

SEQ ID NO: 1027325 - RNA, 22 nt, Human
cuggugauaagagcauggcccc

SEQ ID NO: 1027326 - RNA, 19 nt, Human
cuuugggaggcugaggcag

SEQ ID NO: 1027327 - RNA, 24 nt, Human
gaggcaggaggauugcuugaggcc

SEQ ID NO: 1027328 - RNA, 24 nt, Human
gauugcuugaggccaggaguucaa

SEQ ID NO: 1027329 - RNA, 19 nt, Human
gcccugaggcucuacacac

SEQ ID NO: 1027330 - RNA, 19 nt, Human
ggaacgcucugugacccuc

SEQ ID NO: 1027331 - RNA, 23 nt, Human
ggauugcuugaggccaggaguuc

SEQ ID NO: 1027332 - RNA, 20 nt, Human
gggcagggacccucuggcgg

SEQ ID NO: 1027333 - RNA, 25 nt, Human
ggggauggggugucacucggggcag

SEQ ID NO: 1027334 - RNA, 24 nt, Human
gguuuguaauccccgugcuuuggg

SEQ ID NO: 1027335 - RNA, 18 nt, Human
ucacucggggcagggacc

SEQ ID NO: 1027336 - RNA, 21 nt, Human
ucacucggggcagggacccuc

SEQ ID NO: 1027337 - RNA, 21 nt, Human
ucuggcgggaggacggguggc

SEQ ID NO: 1027338 - RNA, 20 nt, Human
ugaccuggaccaccccgugg

SEQ ID NO: 1027339 - RNA, 21 nt, Human
ugaggcaggaggauugcuuga

SEQ ID NO: 1027340 - RNA, 24 nt, Human
ugaggcaggaggauugcuugaggc

SEQ ID NO: 1027341 - RNA, 25 nt, Human
ugaggcaggaggauugcuugaggcc

SEQ ID NO: 1027342 - RNA, 26 nt, Human
ugaggcaggaggauugcuugaggcca

SEQ ID NO: 1027343 - RNA, 25 nt, Human
uggcgggaggacggguggcugguga

SEQ ID NO: 1027344 - RNA, 20 nt, Human
ugggaggcugaggcaggagg

SEQ ID NO: 1027345 - RNA, 22 nt, Human
ugggaggcugaggcaggaggau

SEQ ID NO: 1027346 - RNA, 19 nt, Human
ugggcacucagcccugagg

SEQ ID NO: 1027347 - RNA, 18 nt, Human
uggggugucacucggggc

SEQ ID NO: 1027348 - RNA, 21 nt, Human
ugggugaacuggcuccccaag

SEQ ID NO: 1027349 - RNA, 22 nt, Human
uugaggccaggaguucaagacc

SEQ ID NO: 1027350 - RNA, 23 nt, Human
uugcuugaggccaggaguucaag

SEQ ID NO: 1027351 - RNA, 20 nt, Human
uugggaggcugaggcaggag

SEQ ID NO: 1027352 - RNA, 23 nt, Human
uuuuuuuuuuuuuuuuuagccuu

SEQ ID NO: 1027353 - RNA, 24 nt, Human
aggaaaaagaacucuguaaagucc

SEQ ID NO: 1027354 - RNA, 21 nt, Human
cucccgccacuuuacuaggaa

SEQ ID NO: 1027355 - RNA, 24 nt, Human
gaaaaagaacucuguaaaguccua

SEQ ID NO: 1027356 - RNA, 19 nt, Human
gagaaaaggcuuuuuaaua

SEQ ID NO: 1027357 - RNA, 18 nt, Human
ggagaugcgccccgcccu

SEQ ID NO: 1027358 - RNA, 20 nt, Human
uaagaaaccauauucuauca

SEQ ID NO: 1027359 - RNA, 21 nt, Human
ugccaagaggaaaaagaacuc

SEQ ID NO: 1027360 - RNA, 21 nt, Human
uguuauuaggaaaugccaaga

SEQ ID NO: 1027361 - RNA, 31 nt, Human
uguuauuaggaaaugccaagaggaaaaagag

SEQ ID NO: 1027362 - RNA, 25 nt, Human
uuuuuuuuuuuuaagagaaaaggcu

SEQ ID NO: 1027363 - RNA, 19 nt, Human
uuuuuuuuuuuuuuuuuaa

SEQ ID NO: 1027364 - RNA, 25 nt, Human
uuuuuuuuuuuuuuuuuuuaagaga

SEQ ID NO: 1027365 - RNA, 19 nt, Human
aaccggggcugggcuggag

SEQ ID NO: 1027366 - RNA, 19 nt, Human
aaccugccuccgaaaaggc

SEQ ID NO: 1027367 - RNA, 23 nt, Human
aagcacucccugcagccaggaag

SEQ ID NO: 1027368 - RNA, 24 nt, Human
aagcgacacaggcggguacaaacc

SEQ ID NO: 1027369 - RNA, 22 nt, Human
acaaacccaaacagugcagaca

SEQ ID NO: 1027370 - RNA, 22 nt, Human
acacagagcccuccaaguucca

SEQ ID NO: 1027371 - RNA, 25 nt, Human
acaccucacccucugggaagcccca

SEQ ID NO: 1027372 - RNA, 27 nt, Human
accagccacccuccaccucgcaugugc

SEQ ID NO: 1027373 - RNA, 24 nt, Human
accagccuggcguucuucagacac

SEQ ID NO: 1027374 - RNA, 26 nt, Human
accccggagccgccuccucacgccuc

SEQ ID NO: 1027375 - RNA, 18 nt, Human
acccugagguuucccagc

SEQ ID NO: 1027376 - RNA, 21 nt, Human
accuaggugaccccggagccg

SEQ ID NO: 1027377 - RNA, 23 nt, Human
accucacccucugggaagcccca

SEQ ID NO: 1027378 - RNA, 24 nt, Human
accucacccucugggaagccccag

SEQ ID NO: 1027379 - RNA, 25 nt, Human
accucacccucugggaagccccagc

SEQ ID NO: 1027380 - RNA, 23 nt, Human
acgggcccugcuggguggcugcc

SEQ ID NO: 1027381 - RNA, 19 nt, Human
agacagaaggugaaaaugg

SEQ ID NO: 1027382 - RNA, 25 nt, Human
agacagaaggugaaaaugguuucug

SEQ ID NO: 1027383 - RNA, 19 nt, Human
agccugacagcugcccaaa

SEQ ID NO: 1027384 - RNA, 19 nt, Human
agcggggaggaaccggggc

SEQ ID NO: 1027385 - RNA, 21 nt, Human
agcuccuugcucuucacuuug

SEQ ID NO: 1027386 - RNA, 22 nt, Human
aggagggcaauggccaggccuc

SEQ ID NO: 1027387 - RNA, 23 nt, Human
aggcagccuucuggagcuuucug

SEQ ID NO: 1027388 - RNA, 20 nt, Human
aggccagggcugagggcggg

SEQ ID NO: 1027389 - RNA, 22 nt, Human
aggccagggcugagggcgggga

SEQ ID NO: 1027390 - RNA, 21 nt, Human
aggcggguacaaacccaaaca

SEQ ID NO: 1027391 - RNA, 20 nt, Human
aguugcuggguccuagggaa

SEQ ID NO: 1027392 - RNA, 18 nt, Human
auggugguucacgugucu

SEQ ID NO: 1027393 - RNA, 22 nt, Human
caaagccuccagagcacagaac

SEQ ID NO: 1027394 - RNA, 22 nt, Human
caacagcccaggauccuccagg

SEQ ID NO: 1027395 - RNA, 24 nt, Human
caauggccaggccucggccucagc

SEQ ID NO: 1027396 - RNA, 22 nt, Human
cacaagcacucccugcagccag

SEQ ID NO: 1027397 - RNA, 25 nt, Human
cacacgacuguagacguuuggcuuc

SEQ ID NO: 1027398 - RNA, 26 nt, Human
cacauuccacaccagccacccuccac

SEQ ID NO: 1027399 - RNA, 19 nt, Human
cacccccaacccccaaguc

SEQ ID NO: 1027400 - RNA, 21 nt, Human
cacccucugggaagccccagc

SEQ ID NO: 1027401 - RNA, 24 nt, Human
cacuuuggucuucguguggcuggu

SEQ ID NO: 1027402 - RNA, 21 nt, Human
cagagcccuccaaguuccacg

SEQ ID NO: 1027403 - RNA, 18 nt, Human
cagaggcacccugagguu

SEQ ID NO: 1027404 - RNA, 22 nt, Human
cagaucccucccacaaugcucu

SEQ ID NO: 1027405 - RNA, 28 nt, Human
cagaucccucccacaaugcucugaccac

SEQ ID NO: 1027406 - RNA, 20 nt, Human
cagcagacaccucacccucu

SEQ ID NO: 1027407 - RNA, 18 nt, Human
cagcagccugagaccggc

SEQ ID NO: 1027408 - RNA, 18 nt, Human
cagccacccuccaccucg

SEQ ID NO: 1027409 - RNA, 20 nt, Human
cagcccaggauccuccagga

SEQ ID NO: 1027410 - RNA, 18 nt, Human
cagcccccugccuggccu

SEQ ID NO: 1027411 - RNA, 22 nt, Human
cagcgguggaccccagcuuccc

SEQ ID NO: 1027412 - RNA, 18 nt, Human
cagcuggaccccacccuu

SEQ ID NO: 1027413 - RNA, 19 nt, Human
cagcuggaccccacccuuu

SEQ ID NO: 1027414 - RNA, 20 nt, Human
caggaagaguccagccccac

SEQ ID NO: 1027415 - RNA, 21 nt, Human
caggaagaguccagccccacu

SEQ ID NO: 1027416 - RNA, 19 nt, Human
caggagggcaauggccagg

SEQ ID NO: 1027417 - RNA, 21 nt, Human
caggauccuccaggacucucc

SEQ ID NO: 1027418 - RNA, 22 nt, Human
caggcggguacaaacccaaaca

SEQ ID NO: 1027419 - RNA, 28 nt, Human
caguucccucccuucuggagcucugccu

SEQ ID NO: 1027420 - RNA, 19 nt, Human
cauucagagccccccaugg

SEQ ID NO: 1027421 - RNA, 20 nt, Human
ccaaagccuccagagcacag

SEQ ID NO: 1027422 - RNA, 25 nt, Human
ccaaagccuccagagcacagaacgg

SEQ ID NO: 1027423 - RNA, 20 nt, Human
ccaaagcuguaccauuucag

SEQ ID NO: 1027424 - RNA, 20 nt, Human
ccaacccccaaguccucucc

SEQ ID NO: 1027425 - RNA, 21 nt, Human
ccaacccccaaguccucuccc

SEQ ID NO: 1027426 - RNA, 19 nt, Human
ccacaccagccacccucca

SEQ ID NO: 1027427 - RNA, 22 nt, Human
ccacaccagccacccuccaccu

SEQ ID NO: 1027428 - RNA, 22 nt, Human
ccaccuaggugaccccggagcc

SEQ ID NO: 1027429 - RNA, 21 nt, Human
ccagcagacaccucacccucu

SEQ ID NO: 1027430 - RNA, 21 nt, Human
ccagccuuuccugcaggaaga

SEQ ID NO: 1027431 - RNA, 18 nt, Human
ccaggaagaggaggaggc

SEQ ID NO: 1027432 - RNA, 22 nt, Human
ccagggccaggagugucagggg

SEQ ID NO: 1027433 - RNA, 21 nt, Human
ccagggcugagggcggggagg

SEQ ID NO: 1027434 - RNA, 23 nt, Human
ccaggggccggggguccacagcc

SEQ ID NO: 1027435 - RNA, 21 nt, Human
ccaucugcucugcacaccguc

SEQ ID NO: 1027436 - RNA, 20 nt, Human
ccauggguccccuggggccc

SEQ ID NO: 1027437 - RNA, 24 nt, Human
ccauucgcaaugcagcuggacccc

SEQ ID NO: 1027438 - RNA, 23 nt, Human
cccaaacagugcagacauggagg

SEQ ID NO: 1027439 - RNA, 26 nt, Human
cccacaaugcucugaccacccccaaa

SEQ ID NO: 1027440 - RNA, 26 nt, Human
cccacaaugcucugaccacccccaac

SEQ ID NO: 1027441 - RNA, 22 nt, Human
cccauggccugggcaguccauc

SEQ ID NO: 1027442 - RNA, 23 nt, Human
ccccacgcugugccugcccagcu

SEQ ID NO: 1027443 - RNA, 18 nt, Human
ccccagcugccccagauc

SEQ ID NO: 1027444 - RNA, 26 nt, Human
ccccagcugccccagaucccucccac

SEQ ID NO: 1027445 - RNA, 19 nt, Human
ccccagggcuggggugacc

SEQ ID NO: 1027446 - RNA, 23 nt, Human
cccccaacccccaaguccucucc

SEQ ID NO: 1027447 - RNA, 23 nt, Human
cccccaaguccucucccuucugu

SEQ ID NO: 1027448 - RNA, 22 nt, Human
cccccuggcgguuggaacuccu

SEQ ID NO: 1027449 - RNA, 18 nt, Human
ccccgcagguuccucuuc

SEQ ID NO: 1027450 - RNA, 21 nt, Human
ccccucggcacguggucccca

SEQ ID NO: 1027451 - RNA, 23 nt, Human
ccccuggggccccaugcuggaac

SEQ ID NO: 1027452 - RNA, 19 nt, Human
cccgcagcuccccacaacu

SEQ ID NO: 1027453 - RNA, 22 nt, Human
cccguccccuccccgcucacca

SEQ ID NO: 1027454 - RNA, 20 nt, Human
cccucuggggacaccagccu

SEQ ID NO: 1027455 - RNA, 25 nt, Human
cccugagguuucccagcaggcaauu

SEQ ID NO: 1027456 - RNA, 19 nt, Human
cccuggggccccaugcugg

SEQ ID NO: 1027457 - RNA, 24 nt, Human
cccuggggccccaugcuggaaccc

SEQ ID NO: 1027458 - RNA, 18 nt, Human
cccuucugggccuguugc

SEQ ID NO: 1027459 - RNA, 25 nt, Human
ccgcacacgcuccgcugccucuccc

SEQ ID NO: 1027460 - RNA, 27 nt, Human
ccgcagguuccucuucauucagagccc

SEQ ID NO: 1027461 - RNA, 23 nt, Human
ccgguucugugucccguccccuc

SEQ ID NO: 1027462 - RNA, 18 nt, Human
ccuccugcccucccccuc

SEQ ID NO: 1027463 - RNA, 22 nt, Human
ccucugcagcagcacucaacuc

SEQ ID NO: 1027464 - RNA, 30 nt, Human
ccucugcagcagcacucaacucaugcacuu

SEQ ID NO: 1027465 - RNA, 18 nt, Human
ccucugggaagccccagc

SEQ ID NO: 1027466 - RNA, 19 nt, Human
ccucuggggacaccagccu

SEQ ID NO: 1027467 - RNA, 25 nt, Human
ccugcagccaggaagaggaggaggc

SEQ ID NO: 1027468 - RNA, 24 nt, Human
ccugcagcggggaggaaccggggc

SEQ ID NO: 1027469 - RNA, 24 nt, Human
ccuggcgguuggaacuccugucuc

SEQ ID NO: 1027470 - RNA, 19 nt, Human
ccuggggacgccuggggcu

SEQ ID NO: 1027471 - RNA, 20 nt, Human
ccuggggcugccccaauucc

SEQ ID NO: 1027472 - RNA, 20 nt, Human
ccugugcagcagccugagac

SEQ ID NO: 1027473 - RNA, 20 nt, Human
ccuuccauuucacuugguua

SEQ ID NO: 1027474 - RNA, 23 nt, Human
ccuuggagcugcccccgcccugg

SEQ ID NO: 1027475 - RNA, 24 nt, Human
cggccucagcccccugccuggccu

SEQ ID NO: 1027476 - RNA, 22 nt, Human
cgggcacauuccacaccagcca

SEQ ID NO: 1027477 - RNA, 18 nt, Human
cgggcugaaaacaguuca

SEQ ID NO: 1027478 - RNA, 23 nt, Human
cguggccugaugucugcauauuc

SEQ ID NO: 1027479 - RNA, 23 nt, Human
cguugcauguuccugcgugugca

SEQ ID NO: 1027480 - RNA, 23 nt, Human
cucacccucugggaagccccagc

SEQ ID NO: 1027481 - RNA, 22 nt, Human
cucccacaaugcucugaccacc

SEQ ID NO: 1027482 - RNA, 24 nt, Human
cucccaccugugagucccaggggc

SEQ ID NO: 1027483 - RNA, 20 nt, Human
cuccugcccucccccucggc

SEQ ID NO: 1027484 - RNA, 22 nt, Human
cuccuuccauuucacuugguua

SEQ ID NO: 1027485 - RNA, 26 nt, Human
cucggggugggccacggccgguucug

SEQ ID NO: 1027486 - RNA, 22 nt, Human
cugaaaacaguucauccugagu

SEQ ID NO: 1027487 - RNA, 24 nt, Human
cugaagccucucagagcaggucca

SEQ ID NO: 1027488 - RNA, 23 nt, Human
cugaccacccccaacccccaagu

SEQ ID NO: 1027489 - RNA, 21 nt, Human
cugagaccggcuguccaaugg

SEQ ID NO: 1027490 - RNA, 25 nt, Human
cugcaccgccgccugcuccgcccuc

SEQ ID NO: 1027491 - RNA, 20 nt, Human
cugcagccaggaagaggagg

SEQ ID NO: 1027492 - RNA, 18 nt, Human
cugcagcggggaggaacc

SEQ ID NO: 1027493 - RNA, 26 nt, Human
cugcagcggggaggaaccggggcugg

SEQ ID NO: 1027494 - RNA, 20 nt, Human
cugcccaaagccuccagagc

SEQ ID NO: 1027495 - RNA, 18 nt, Human
cugccucucugggcuggc

SEQ ID NO: 1027496 - RNA, 20 nt, Human
cuggaccccacccuuuccug

SEQ ID NO: 1027497 - RNA, 25 nt, Human
cuggggacaccagccuggcguucuu

SEQ ID NO: 1027498 - RNA, 24 nt, Human
cugugaccgcuuugaucaccuggc

SEQ ID NO: 1027499 - RNA, 23 nt, Human
cuucuggacucaaauccuucacc

SEQ ID NO: 1027500 - RNA, 26 nt, Human
cuuggagcugcccccgcccugggcca

SEQ ID NO: 1027501 - RNA, 22 nt, Human
cuuuccugauucccgcaggcca

SEQ ID NO: 1027502 - RNA, 20 nt, Human
gaaccggggcugggcuggaa

SEQ ID NO: 1027503 - RNA, 19 nt, Human
gaagaggaggaggcagccg

SEQ ID NO: 1027504 - RNA, 23 nt, Human
gacacaagcacucccugcagcca

SEQ ID NO: 1027505 - RNA, 19 nt, Human
gacaccagccuggcguucu

SEQ ID NO: 1027506 - RNA, 20 nt, Human
gacccgggcugaaaacaguu

SEQ ID NO: 1027507 - RNA, 24 nt, Human
gacucacguucccacggccaccuu

SEQ ID NO: 1027508 - RNA, 19 nt, Human
gacuguagacguuuggcuu

SEQ ID NO: 1027509 - RNA, 18 nt, Human
gagcacugaccuccuucu

SEQ ID NO: 1027510 - RNA, 21 nt, Human
gagcccagaggcccccgcagc

SEQ ID NO: 1027511 - RNA, 18 nt, Human
gagccccuccagccgccc

SEQ ID NO: 1027512 - RNA, 21 nt, Human
gagcugcccccgcccugggcc

SEQ ID NO: 1027513 - RNA, 19 nt, Human
gagggcaauggccaggccu

SEQ ID NO: 1027514 - RNA, 19 nt, Human
gcacgugguccccacgcug

SEQ ID NO: 1027515 - RNA, 22 nt, Human
gcagagcuuccuucugggaaag

SEQ ID NO: 1027516 - RNA, 22 nt, Human
gcaggagggaaacugcuggcug

SEQ ID NO: 1027517 - RNA, 23 nt, Human
gcaggccagggcugagggcgggg

SEQ ID NO: 1027518 - RNA, 18 nt, Human
gccaggccucggccucag

SEQ ID NO: 1027519 - RNA, 19 nt, Human
gccaggggaggggaggagg

SEQ ID NO: 1027520 - RNA, 19 nt, Human
gcccccgcagguuccucuu

SEQ ID NO: 1027521 - RNA, 19 nt, Human
gcccucaggcagccuucug

SEQ ID NO: 1027522 - RNA, 19 nt, Human
gcccuccugcccucccccu

SEQ ID NO: 1027523 - RNA, 21 nt, Human
gcccucuggggacaccagccu

SEQ ID NO: 1027524 - RNA, 23 nt, Human
gccgggcacauuccacaccagcc

SEQ ID NO: 1027525 - RNA, 18 nt, Human
gccucagcccccugccug

SEQ ID NO: 1027526 - RNA, 24 nt, Human
gccucggccucagcccccugccug

SEQ ID NO: 1027527 - RNA, 21 nt, Human
gccuucuggagcuuucugucu

SEQ ID NO: 1027528 - RNA, 27 nt, Human
gcgccugacuccggaggccucagaggc

SEQ ID NO: 1027529 - RNA, 20 nt, Human
gcuccgcccuccugcccucc

SEQ ID NO: 1027530 - RNA, 20 nt, Human
gcuggacacagagcccucca

SEQ ID NO: 1027531 - RNA, 18 nt, Human
gcuggguccuagggaagg

SEQ ID NO: 1027532 - RNA, 18 nt, Human
ggaccccacccuuuccug

SEQ ID NO: 1027533 - RNA, 21 nt, Human
ggagcccagggccaggagugu

SEQ ID NO: 1027534 - RNA, 23 nt, Human
ggaggagacagaaggugaaaaug

SEQ ID NO: 1027535 - RNA, 20 nt, Human
ggaggaggcagccgggucuu

SEQ ID NO: 1027536 - RNA, 20 nt, Human
ggaggcggggggagcccagg

SEQ ID NO: 1027537 - RNA, 21 nt, Human
ggcacgcuucuuccccucggc

SEQ ID NO: 1027538 - RNA, 22 nt, Human
ggccccaugcuggaaccccagc

SEQ ID NO: 1027539 - RNA, 28 nt, Human
ggccucggccucagcccccugccuggcc

SEQ ID NO: 1027540 - RNA, 22 nt, Human
gggaggaaccggggcugggcug

SEQ ID NO: 1027541 - RNA, 21 nt, Human
gggaggcggggggagcccagg

SEQ ID NO: 1027542 - RNA, 19 nt, Human
gggaggggaggaggugggg

SEQ ID NO: 1027543 - RNA, 21 nt, Human
gggaggggaggagguggggaa

SEQ ID NO: 1027544 - RNA, 24 nt, Human
gggauccugcugcuccuccgccgg

SEQ ID NO: 1027545 - RNA, 19 nt, Human
gggccuccugcaccgccgc

SEQ ID NO: 1027546 - RNA, 18 nt, Human
gggccuguugcugcugac

SEQ ID NO: 1027547 - RNA, 21 nt, Human
gggcugagggcggggaggggc

SEQ ID NO: 1027548 - RNA, 22 nt, Human
gggcugggcuggaggccugggg

SEQ ID NO: 1027549 - RNA, 24 nt, Human
ggggaggaaccggggcugggcugg

SEQ ID NO: 1027550 - RNA, 18 nt, Human
ggggaggggaggaggugg

SEQ ID NO: 1027551 - RNA, 20 nt, Human
gguguguguuucucucuaaa

SEQ ID NO: 1027552 - RNA, 21 nt, Human
gguuauuaggaguggaguugc

SEQ ID NO: 1027553 - RNA, 24 nt, Human
guccacgguucauuuuguguugcc

SEQ ID NO: 1027554 - RNA, 18 nt, Human
guccagccccacucccag

SEQ ID NO: 1027555 - RNA, 26 nt, Human
gucucuccaucucacuucccgugcaa

SEQ ID NO: 1027556 - RNA, 20 nt, Human
gugcaguguguguccacggg

SEQ ID NO: 1027557 - RNA, 21 nt, Human
guggcugcccuucugggccug

SEQ ID NO: 1027558 - RNA, 21 nt, Human
guucccucccuucuggagcuc

SEQ ID NO: 1027559 - RNA, 22 nt, Human
guugcugcugacucacguuccc

SEQ ID NO: 1027560 - RNA, 21 nt, Human
uaccauuucaggcuccugccu

SEQ ID NO: 1027561 - RNA, 23 nt, Human
uacccuggccugcagcggggagg

SEQ ID NO: 1027562 - RNA, 22 nt, Human
uacuccacggcggcuggaacgg

SEQ ID NO: 1027563 - RNA, 24 nt, Human
ucagcccccugccuggccugcacu

SEQ ID NO: 1027564 - RNA, 19 nt, Human
uccaggacucucccccugg

SEQ ID NO: 1027565 - RNA, 19 nt, Human
uccauggcgccugacuccg

SEQ ID NO: 1027566 - RNA, 21 nt, Human
ucccaggggccggggguccac

SEQ ID NO: 1027567 - RNA, 18 nt, Human
uccccaagcccgaggccu

SEQ ID NO: 1027568 - RNA, 22 nt, Human
ucccccuggcgguuggaacucc

SEQ ID NO: 1027569 - RNA, 21 nt, Human
ucccugcgucuggacguagua

SEQ ID NO: 1027570 - RNA, 18 nt, Human
uccucucccuucuguccc

SEQ ID NO: 1027571 - RNA, 18 nt, Human
uccugcaccgccgccugc

SEQ ID NO: 1027572 - RNA, 20 nt, Human
ucgcaugugcguuuaucgau

SEQ ID NO: 1027573 - RNA, 18 nt, Human
ucucugggcuggcucagc

SEQ ID NO: 1027574 - RNA, 23 nt, Human
ucugagccccuccagccgcccuc

SEQ ID NO: 1027575 - RNA, 20 nt, Human
ucuggagcuuucugucugug

SEQ ID NO: 1027576 - RNA, 22 nt, Human
ucugggaagccccagcugcccc

SEQ ID NO: 1027577 - RNA, 22 nt, Human
ugaaacgccacagugggaccuc

SEQ ID NO: 1027578 - RNA, 21 nt, Human
ugaagccucucagagcagguc

SEQ ID NO: 1027579 - RNA, 24 nt, Human
ugaccauuucagccauuggcaagu

SEQ ID NO: 1027580 - RNA, 19 nt, Human
ugacccgggcugaaaacag

SEQ ID NO: 1027581 - RNA, 24 nt, Human
ugacucacguucccacggccaccu

SEQ ID NO: 1027582 - RNA, 18 nt, Human
ugagucccaggggccggg

SEQ ID NO: 1027583 - RNA, 23 nt, Human
ugagucccaggggccgggggucc

SEQ ID NO: 1027584 - RNA, 19 nt, Human
ugcauauucauccgccgug

SEQ ID NO: 1027585 - RNA, 20 nt, Human
ugcccaaagccuccagagca

SEQ ID NO: 1027586 - RNA, 21 nt, Human
ugcccaaagccuccagagcac

SEQ ID NO: 1027587 - RNA, 25 nt, Human
ugcccaaagccuccagagcacagaa

SEQ ID NO: 1027588 - RNA, 20 nt, Human
ugccccaauucccagcagac

SEQ ID NO: 1027589 - RNA, 19 nt, Human
ugccccagaucccucccac

SEQ ID NO: 1027590 - RNA, 23 nt, Human
ugccccagaucccucccacaaug

SEQ ID NO: 1027591 - RNA, 20 nt, Human
ugccuggaugcccgccccug

SEQ ID NO: 1027592 - RNA, 24 nt, Human
ugcucugaccacccccaaccccca

SEQ ID NO: 1027593 - RNA, 22 nt, Human
ugcuggguggcugccaacagcc

SEQ ID NO: 1027594 - RNA, 21 nt, Human
ugcugguggguguugcagugg

SEQ ID NO: 1027595 - RNA, 20 nt, Human
uggaacuccugucucccacc

SEQ ID NO: 1027596 - RNA, 26 nt, Human
uggaacuccugucucccaccugugag

SEQ ID NO: 1027597 - RNA, 24 nt, Human
uggaggagacagaaggugaaaaug

SEQ ID NO: 1027598 - RNA, 25 nt, Human
uggauguggacauugugcugugacc

SEQ ID NO: 1027599 - RNA, 18 nt, Human
uggccugggcaguccauc

SEQ ID NO: 1027600 - RNA, 20 nt, Human
uggcgccucggggccuggcu

SEQ ID NO: 1027601 - RNA, 22 nt, Human
uggcucagccguugcauguucc

SEQ ID NO: 1027602 - RNA, 21 nt, Human
uggcuucuggacucaaauccu

SEQ ID NO: 1027603 - RNA, 18 nt, Human
ugggaaagccaugggucc

SEQ ID NO: 1027604 - RNA, 19 nt, Human
ugggaaagccauggguccc

SEQ ID NO: 1027605 - RNA, 22 nt, Human
ugggaaagccauggguccccug

SEQ ID NO: 1027606 - RNA, 19 nt, Human
ugggauccugcugcuccuc

SEQ ID NO: 1027607 - RNA, 18 nt, Human
ugguggguguugcagugg

SEQ ID NO: 1027608 - RNA, 18 nt, Human
ugguucuagaauucuccu

SEQ ID NO: 1027609 - RNA, 22 nt, Human
ugucccguccccuccccgcuca

SEQ ID NO: 1027610 - RNA, 18 nt, Human
uuccacaccagccacccu

SEQ ID NO: 1027611 - RNA, 20 nt, Human
uuccacaccagccacccucc

SEQ ID NO: 1027612 - RNA, 24 nt, Human
uuccacaccagccacccuccaccu

SEQ ID NO: 1027613 - RNA, 23 nt, Human
uuccacgggccuccugcaccgcc

SEQ ID NO: 1027614 - RNA, 24 nt, Human
uugcagugguuuccagcucuuggu

SEQ ID NO: 1027615 - RNA, 27 nt, Human
uugccaaaccgauguccaaagcuguac

SEQ ID NO: 1027616 - RNA, 21 nt, Human
uugcuggguccuagggaaggu

SEQ ID NO: 1027617 - RNA, 21 nt, Human
uuugccaaaccgauguccaaa

SEQ ID NO: 1027618 - RNA, 30 nt, Human
augaauucucugcugcugcugcugcugccg

SEQ ID NO: 1027619 - RNA, 21 nt, Human
auucucugcugcugcugcugc

SEQ ID NO: 1027620 - RNA, 21 nt, Human
caugaauaaagcccuuccuac

SEQ ID NO: 1027621 - RNA, 23 nt, Human
ccaccaguccuucucuggauucu

SEQ ID NO: 1027622 - RNA, 20 nt, Human
gauucuuucuuggugaggca

SEQ ID NO: 1027623 - RNA, 23 nt, Human
gcugcugcugcugcugcugcugg

SEQ ID NO: 1027624 - RNA, 20 nt, Human
gugguguuccucaagagaaa

SEQ ID NO: 1027625 - RNA, 24 nt, Human
uaauuucuuuccuauauugauugc

SEQ ID NO: 1027626 - RNA, 23 nt, Human
ucaugaauaaagcccuuccuaca

SEQ ID NO: 1027627 - RNA, 19 nt, Human
ucuggauucuuucuuggug

SEQ ID NO: 1027628 - RNA, 18 nt, Human
ugagaauguuuugagaau

SEQ ID NO: 1027629 - RNA, 21 nt, Human
ugcugcugcugcugcugcugc

SEQ ID NO: 1027630 - RNA, 21 nt, Human
ugcugcugcugcugcugcugc

SEQ ID NO: 1027631 - RNA, 23 nt, Human
uucucugcugcugcugcugcugc

SEQ ID NO: 1027632 - RNA, 26 nt, Human
uugauaacugaucaguaauuucuuuc

SEQ ID NO: 1027633 - RNA, 18 nt, Human
aaaaaaggaagaauugaa

SEQ ID NO: 1027634 - RNA, 21 nt, Human
aagacccaaccaaaccaagaa

SEQ ID NO: 1027635 - RNA, 26 nt, Human
aaguaccccaaagaauccauacgaga

SEQ ID NO: 1027636 - RNA, 21 nt, Human
acacuuccaaaccccaaacaa

SEQ ID NO: 1027637 - RNA, 22 nt, Human
acccaaccaaaccaagaaacca

SEQ ID NO: 1027638 - RNA, 20 nt, Human
acggaccugcucaacgagug

SEQ ID NO: 1027639 - RNA, 21 nt, Human
agaaacaaacuaacucaaaua

SEQ ID NO: 1027640 - RNA, 20 nt, Human
agaaacugagaaacaaacua

SEQ ID NO: 1027641 - RNA, 31 nt, Human
agaaacugagaaacaaacuaacucaaauaaa

SEQ ID NO: 1027642 - RNA, 18 nt, Human
agaauccauacgagaaac

SEQ ID NO: 1027643 - RNA, 24 nt, Human
agacccaaccaaaccaagaaacca

SEQ ID NO: 1027644 - RNA, 20 nt, Human
agacccacaggcuuaaggaa

SEQ ID NO: 1027645 - RNA, 18 nt, Human
agcaggacaaccuuccuc

SEQ ID NO: 1027646 - RNA, 18 nt, Human
agccagucgugguggcgc

SEQ ID NO: 1027647 - RNA, 19 nt, Human
aggaagggcuugggggucg

SEQ ID NO: 1027648 - RNA, 26 nt, Human
aggcggaaagcagggcuaagccgacc

SEQ ID NO: 1027649 - RNA, 20 nt, Human
aguaauggacgcgaaagaga

SEQ ID NO: 1027650 - RNA, 20 nt, Human
agugcagacacuuccaaacc

SEQ ID NO: 1027651 - RNA, 23 nt, Human
auuccauacaguaucugcuaaau

SEQ ID NO: 1027652 - RNA, 22 nt, Human
caaacaaugaaucaaacaacca

SEQ ID NO: 1027653 - RNA, 20 nt, Human
caaauaagacccaaccaaac

SEQ ID NO: 1027654 - RNA, 25 nt, Human
caaguugaaaggagcgagcuucuca

SEQ ID NO: 1027655 - RNA, 24 nt, Human
cacagcgcgcugacaauucacgga

SEQ ID NO: 1027656 - RNA, 23 nt, Human
cacucaggcuaccaaaguacccc

SEQ ID NO: 1027657 - RNA, 19 nt, Human
cacugugugagcucacgcc

SEQ ID NO: 1027658 - RNA, 21 nt, Human
caggcuaccaaaguaccccaa

SEQ ID NO: 1027659 - RNA, 19 nt, Human
caguaccaaacaaguugaa

SEQ ID NO: 1027660 - RNA, 18 nt, Human
cauaugauugcagcaucc

SEQ ID NO: 1027661 - RNA, 22 nt, Human
ccaaacaaguugaaaggagcga

SEQ ID NO: 1027662 - RNA, 18 nt, Human
ccaaacaaugaaucaaac

SEQ ID NO: 1027663 - RNA, 22 nt, Human
ccaaccaaaccaagaaaccagu

SEQ ID NO: 1027664 - RNA, 19 nt, Human
ccagucgccugcggccgag

SEQ ID NO: 1027665 - RNA, 23 nt, Human
cccaaagaauccauacgagaaac

SEQ ID NO: 1027666 - RNA, 20 nt, Human
cccacagcgcgcugacaauu

SEQ ID NO: 1027667 - RNA, 18 nt, Human
ccccaaacaaugaaucaa

SEQ ID NO: 1027668 - RNA, 18 nt, Human
cccccagucgguggcugc

SEQ ID NO: 1027669 - RNA, 23 nt, Human
cccguaaccgccguccagucgcc

SEQ ID NO: 1027670 - RNA, 23 nt, Human
ccgauagcaaaccgacgucccug

SEQ ID NO: 1027671 - RNA, 23 nt, Human
ccgccgcggccacacagucgccc

SEQ ID NO: 1027672 - RNA, 27 nt, Human
ccugcggccgagggcaggcuggcggga

SEQ ID NO: 1027673 - RNA, 20 nt, Human
ccuggcggccgccgcggcca

SEQ ID NO: 1027674 - RNA, 21 nt, Human
ccuggcggccgccgcggccac

SEQ ID NO: 1027675 - RNA, 24 nt, Human
cgagaaacugagaaacaaacuaac

SEQ ID NO: 1027676 - RNA, 21 nt, Human
cgccugcggccgagggcaggc

SEQ ID NO: 1027677 - RNA, 22 nt, Human
cguccagucgccugcggccgag

SEQ ID NO: 1027678 - RNA, 23 nt, Human
cucacgcccuuuuucccuuuaaa

SEQ ID NO: 1027679 - RNA, 22 nt, Human
gacgcgaaagagaugaaaaaga

SEQ ID NO: 1027680 - RNA, 26 nt, Human
gagaaacugagaaacaaacuaacuca

SEQ ID NO: 1027681 - RNA, 25 nt, Human
gagcucacgcccuuuuucccuuuaa

SEQ ID NO: 1027682 - RNA, 19 nt, Human
gaggggaggcggggcugcc

SEQ ID NO: 1027683 - RNA, 23 nt, Human
gccuggcggccgccgcggccaca

SEQ ID NO: 1027684 - RNA, 20 nt, Human
gcucuggaggggaggcgggg

SEQ ID NO: 1027685 - RNA, 24 nt, Human
gcucuggaggggaggcggggcugc

SEQ ID NO: 1027686 - RNA, 21 nt, Human
ggacgcgccggcggcggggaa

SEQ ID NO: 1027687 - RNA, 24 nt, Human
ggcucuggaggggaggcggggcug

SEQ ID NO: 1027688 - RNA, 24 nt, Human
ggcuuaaggaagggcuuggggguc

SEQ ID NO: 1027689 - RNA, 20 nt, Human
gggcggagccagccccgggg

SEQ ID NO: 1027690 - RNA, 20 nt, Human
ggggcgucaucagcccauga

SEQ ID NO: 1027691 - RNA, 18 nt, Human
guggcugcucacggccca

SEQ ID NO: 1027692 - RNA, 23 nt, Human
guuuaauauauauauauaugugu

SEQ ID NO: 1027693 - RNA, 22 nt, Human
uaagacccaaccaaaccaagaa

SEQ ID NO: 1027694 - RNA, 19 nt, Human
uacaguaucugcuaaauaa

SEQ ID NO: 1027695 - RNA, 23 nt, Human
uaccccaaagaauccauacgaga

SEQ ID NO: 1027696 - RNA, 19 nt, Human
uauauauauaugugugugu

SEQ ID NO: 1027697 - RNA, 24 nt, Human
uauguguguguguuugaaauagua

SEQ ID NO: 1027698 - RNA, 22 nt, Human
ucaaauaagacccaaccaaacc

SEQ ID NO: 1027699 - RNA, 20 nt, Human
uccaucauuugaaguaaaac

SEQ ID NO: 1027700 - RNA, 23 nt, Human
ucccugcugcgguucuaagugcc

SEQ ID NO: 1027701 - RNA, 18 nt, Human
uccguagcaggacaaccu

SEQ ID NO: 1027702 - RNA, 22 nt, Human
ugaaucaaacaaccaaccaacc

SEQ ID NO: 1027703 - RNA, 20 nt, Human
ugagaaacaaacuaacucag

SEQ ID NO: 1027704 - RNA, 19 nt, Human
ugaugugcuaauaugcucu

SEQ ID NO: 1027705 - RNA, 24 nt, Human
uggcugcucacggcccaguggacc

SEQ ID NO: 1027706 - RNA, 21 nt, Human
uuaaggaagggcuuggggguc

SEQ ID NO: 1027707 - RNA, 21 nt, Human
uucuuagacccacaggcuuaa

SEQ ID NO: 1027708 - RNA, 19 nt, Human
uuucccuuuaaaaacugaa

SEQ ID NO: 1027709 - RNA, 21 nt, Human
uuuuugauuuugauuaucauc

SEQ ID NO: 1027710 - RNA, 24 nt, Human
aaagggcugggauuauagguguga

SEQ ID NO: 1027711 - RNA, 19 nt, Human
aaagugcugggaguacagg

SEQ ID NO: 1027712 - RNA, 24 nt, Human
aaagugcugggauuauaggcguga

SEQ ID NO: 1027713 - RNA, 18 nt, Human
aaaucacuuaaccucaag

SEQ ID NO: 1027714 - RNA, 20 nt, Human
aagaagcggugacugguucc

SEQ ID NO: 1027715 - RNA, 24 nt, Human
aagcaaucugccugucucggccuc

SEQ ID NO: 1027716 - RNA, 20 nt, Human
aaggaagaaguuccagagag

SEQ ID NO: 1027717 - RNA, 24 nt, Human
aaguaccugggauuacaggcgugu

SEQ ID NO: 1027718 - RNA, 19 nt, Human
aagugcugggauuauaggc

SEQ ID NO: 1027719 - RNA, 19 nt, Human
aagugcugggauuauaggc

SEQ ID NO: 1027720 - RNA, 26 nt, Human
aagugcugggauuauaggcgugagcc

SEQ ID NO: 1027721 - RNA, 22 nt, Human
acacagcaacucccaauuucau

SEQ ID NO: 1027722 - RNA, 18 nt, Human
acagaaaaaguacacagg

SEQ ID NO: 1027723 - RNA, 19 nt, Human
acagggucucauuauguug

SEQ ID NO: 1027724 - RNA, 18 nt, Human
accauguuggccaggcug

SEQ ID NO: 1027725 - RNA, 24 nt, Human
accauguuggccaggcuggucucg

SEQ ID NO: 1027726 - RNA, 19 nt, Human
acccaaaagcaugggcaac

SEQ ID NO: 1027727 - RNA, 26 nt, Human
acccaaaagcaugggcaacacccucc

SEQ ID NO: 1027728 - RNA, 22 nt, Human
accccuagcugcaaaggaagcc

SEQ ID NO: 1027729 - RNA, 24 nt, Human
accugaguagcugggauuacgggu

SEQ ID NO: 1027730 - RNA, 24 nt, Human
acggagcuucaccauguuggccag

SEQ ID NO: 1027731 - RNA, 21 nt, Human
acgggguuuugccauuguugg

SEQ ID NO: 1027732 - RNA, 25 nt, Human
acgggguuuugccauuguuggccag

SEQ ID NO: 1027733 - RNA, 20 nt, Human
acgggguuuugccauuguuu

SEQ ID NO: 1027734 - RNA, 23 nt, Human
acggguaucaccauguuggccag

SEQ ID NO: 1027735 - RNA, 24 nt, Human
acucugucgcucaggcuggaaugc

SEQ ID NO: 1027736 - RNA, 19 nt, Human
acugcaaccaccaccuccu

SEQ ID NO: 1027737 - RNA, 18 nt, Human
agacagagucucaugccc

SEQ ID NO: 1027738 - RNA, 24 nt, Human
agcaaaucuccugccucacccucc

SEQ ID NO: 1027739 - RNA, 19 nt, Human
agccaccgcaccuggccua

SEQ ID NO: 1027740 - RNA, 22 nt, Human
agcggugacugguucccaaaac

SEQ ID NO: 1027741 - RNA, 23 nt, Human
agcugggauuacgggugugugcc

SEQ ID NO: 1027742 - RNA, 18 nt, Human
agcuucaccauguuggcc

SEQ ID NO: 1027743 - RNA, 22 nt, Human
aggaggaaggaagaaguuccag

SEQ ID NO: 1027744 - RNA, 20 nt, Human
aggcaggaggaaggaagaag

SEQ ID NO: 1027745 - RNA, 23 nt, Human
aggcgugagccaccgugccuggc

SEQ ID NO: 1027746 - RNA, 24 nt, Human
aggcgugugccaccaugccuggcu

SEQ ID NO: 1027747 - RNA, 25 nt, Human
aggcuggagugcaguggcaugaucu

SEQ ID NO: 1027748 - RNA, 24 nt, Human
agggcugggauuauaggugugagc

SEQ ID NO: 1027749 - RNA, 24 nt, Human
aggugauccaccugccucagccuc

SEQ ID NO: 1027750 - RNA, 21 nt, Human
aggugugagccaccuugccca

SEQ ID NO: 1027751 - RNA, 18 nt, Human
aguagcugggauuacagg

SEQ ID NO: 1027752 - RNA, 23 nt, Human
aguagcugggauuacgggugugu

SEQ ID NO: 1027753 - RNA, 23 nt, Human
agucucaugcccaggcuggagug

SEQ ID NO: 1027754 - RNA, 20 nt, Human
agugcaguggcaugaucucg

SEQ ID NO: 1027755 - RNA, 23 nt, Human
agugcaguggcaugaucucggcu

SEQ ID NO: 1027756 - RNA, 24 nt, Human
agugcaguggcaugaucucggcuc

SEQ ID NO: 1027757 - RNA, 20 nt, Human
agugcaguggcaugaucuug

SEQ ID NO: 1027758 - RNA, 23 nt, Human
agugcaguggcaugaucuuggcu

SEQ ID NO: 1027759 - RNA, 24 nt, Human
agugcaguggcaugaucuuggcuc

SEQ ID NO: 1027760 - RNA, 24 nt, Human
aguggcaugaucucggcucacugc

SEQ ID NO: 1027761 - RNA, 21 nt, Human
aguggcaugaucuuggcucgc

SEQ ID NO: 1027762 - RNA, 24 nt, Human
augauucuccugccucagccuucc

SEQ ID NO: 1027763 - RNA, 24 nt, Human
augcccaggcuggagugcaguggc

SEQ ID NO: 1027764 - RNA, 22 nt, Human
auguugcccaggcuggucuuga

SEQ ID NO: 1027765 - RNA, 21 nt, Human
auuacaggcgugugccaccau

SEQ ID NO: 1027766 - RNA, 24 nt, Human
auuauguugcccaggcuggucuug

SEQ ID NO: 1027767 - RNA, 24 nt, Human
auuuuuguauuuuugguagagacg

SEQ ID NO: 1027768 - RNA, 24 nt, Human
auuuuuguguuuuuaguagagacg

SEQ ID NO: 1027769 - RNA, 24 nt, Human
caaagggcugggauuauaggugug

SEQ ID NO: 1027770 - RNA, 24 nt, Human
caaagugcugggauuauaggcgug

SEQ ID NO: 1027771 - RNA, 23 nt, Human
caaccuccaccucccagguucaa

SEQ ID NO: 1027772 - RNA, 22 nt, Human
caagugauucuccugccucagc

SEQ ID NO: 1027773 - RNA, 24 nt, Human
caagugauucuccugccucagcca

SEQ ID NO: 1027774 - RNA, 22 nt, Human
cacagccucaguagcacccccc

SEQ ID NO: 1027775 - RNA, 24 nt, Human
caccacgcccagcuaauuuuugua

SEQ ID NO: 1027776 - RNA, 23 nt, Human
caccaugccuggcuaauuuuugu

SEQ ID NO: 1027777 - RNA, 21 nt, Human
caccauguuggccaggcuggu

SEQ ID NO: 1027778 - RNA, 21 nt, Human
caccauguuggccaggcuggu

SEQ ID NO: 1027779 - RNA, 24 nt, Human
caccauguuggccaggcuggucuc

SEQ ID NO: 1027780 - RNA, 24 nt, Human
caccauguuggccaggcuggucuc

SEQ ID NO: 1027781 - RNA, 27 nt, Human
caccauguuggccaggcuggucucaaa

SEQ ID NO: 1027782 - RNA, 27 nt, Human
caccauguuggccaggcuggucucgaa

SEQ ID NO: 1027783 - RNA, 21 nt, Human
caccgugccuggccccaaaau

SEQ ID NO: 1027784 - RNA, 23 nt, Human
caccugccucagccucccaaagu

SEQ ID NO: 1027785 - RNA, 22 nt, Human
cacucaguucuaacuacccugg

SEQ ID NO: 1027786 - RNA, 21 nt, Human
cacugcaaccaccaccuccug

SEQ ID NO: 1027787 - RNA, 23 nt, Human
cacugcaaccaccaccuccuggg

SEQ ID NO: 1027788 - RNA, 21 nt, Human
cacugcaaccugucuccuggg

SEQ ID NO: 1027789 - RNA, 20 nt, Human
cagagucggacagaucuggg

SEQ ID NO: 1027790 - RNA, 22 nt, Human
cagaugauucuccugccucagc

SEQ ID NO: 1027791 - RNA, 21 nt, Human
cagcuaugggccugggaccca

SEQ ID NO: 1027792 - RNA, 24 nt, Human
cagggucucauuauguugcccagg

SEQ ID NO: 1027793 - RNA, 22 nt, Human
caggugauccaccugccucagc

SEQ ID NO: 1027794 - RNA, 24 nt, Human
cauguuggccaggcuggucucaaa

SEQ ID NO: 1027795 - RNA, 24 nt, Human
cauguuggccaggcuggucucgaa

SEQ ID NO: 1027796 - RNA, 24 nt, Human
cauuauguugcccaggcuggucuu

SEQ ID NO: 1027797 - RNA, 20 nt, Human
ccaaaagcaugggcaacacc

SEQ ID NO: 1027798 - RNA, 21 nt, Human
ccaaagggcugggauuauagg

SEQ ID NO: 1027799 - RNA, 23 nt, Human
ccaaagggcugggauuauaggug

SEQ ID NO: 1027800 - RNA, 24 nt, Human
ccaaagggcugggauuauaggugu

SEQ ID NO: 1027801 - RNA, 22 nt, Human
ccaaagugcugggauuauaggc

SEQ ID NO: 1027802 - RNA, 24 nt, Human
ccaaagugcugggauuauaggcgu

SEQ ID NO: 1027803 - RNA, 22 nt, Human
ccaaguaccugggauuacaggc

SEQ ID NO: 1027804 - RNA, 24 nt, Human
ccaaguaccugggauuacaggcgu

SEQ ID NO: 1027805 - RNA, 20 nt, Human
ccaccacgcccagcuaauuu

SEQ ID NO: 1027806 - RNA, 24 nt, Human
ccaccuccuggguucaagugauuc

SEQ ID NO: 1027807 - RNA, 26 nt, Human
ccaccugccucagccucccaaagugc

SEQ ID NO: 1027808 - RNA, 21 nt, Human
cccaaaagcaugggcaacacc

SEQ ID NO: 1027809 - RNA, 23 nt, Human
cccaaaaugacuucuuuaaacua

SEQ ID NO: 1027810 - RNA, 20 nt, Human
cccagguucaagcaaaucuc

SEQ ID NO: 1027811 - RNA, 23 nt, Human
cccagguucaagcaaaucucccc

SEQ ID NO: 1027812 - RNA, 23 nt, Human
cccagguucaagcaaaucuccug

SEQ ID NO: 1027813 - RNA, 20 nt, Human
cccgggcugcagugcagugg

SEQ ID NO: 1027814 - RNA, 24 nt, Human
ccucccagguucaagcaaaucucc

SEQ ID NO: 1027815 - RNA, 24 nt, Human
ccuccuggguucaagugauucucc

SEQ ID NO: 1027816 - RNA, 21 nt, Human
ccugaccucaggugauccacc

SEQ ID NO: 1027817 - RNA, 23 nt, Human
ccugaccucaggugauccaccug

SEQ ID NO: 1027818 - RNA, 23 nt, Human
ccugaccucaggugauccaccug

SEQ ID NO: 1027819 - RNA, 22 nt, Human
ccugaguagcugggauuacagg

SEQ ID NO: 1027820 - RNA, 22 nt, Human
ccugaguagcugggauuacagg

SEQ ID NO: 1027821 - RNA, 23 nt, Human
ccugaguagcugggauuacaggu

SEQ ID NO: 1027822 - RNA, 24 nt, Human
ccugaguagcugggauuacaggug

SEQ ID NO: 1027823 - RNA, 22 nt, Human
ccugaguagcugggauuacggg

SEQ ID NO: 1027824 - RNA, 22 nt, Human
ccugaguagcugggauuacggg

SEQ ID NO: 1027825 - RNA, 23 nt, Human
ccugaguagcugggauuacgggu

SEQ ID NO: 1027826 - RNA, 24 nt, Human
ccugaguagcugggauuacgggug

SEQ ID NO: 1027827 - RNA, 24 nt, Human
ccugccucacccuccugaguagcu

SEQ ID NO: 1027828 - RNA, 18 nt, Human
ccuggccccaaaaugacu

SEQ ID NO: 1027829 - RNA, 18 nt, Human
ccuggccucaagugaucc

SEQ ID NO: 1027830 - RNA, 18 nt, Human
ccuggccucaagugaucc

SEQ ID NO: 1027831 - RNA, 21 nt, Human
ccuggccucaagugauccgcc

SEQ ID NO: 1027832 - RNA, 23 nt, Human
ccuggccucaagugauccgccug

SEQ ID NO: 1027833 - RNA, 18 nt, Human
ccugggcucaagcaaucu

SEQ ID NO: 1027834 - RNA, 23 nt, Human
ccugggcucaagcaaucugccug

SEQ ID NO: 1027835 - RNA, 18 nt, Human
ccugggcugguccugggg

SEQ ID NO: 1027836 - RNA, 23 nt, Human
ccuggguucaagugauucuccuc

SEQ ID NO: 1027837 - RNA, 23 nt, Human
ccuggguucaagugauucuccug

SEQ ID NO: 1027838 - RNA, 22 nt, Human
ccugucucggccuccaaaagug

SEQ ID NO: 1027839 - RNA, 25 nt, Human
cggacagaucuggguuuuuuuugga

SEQ ID NO: 1027840 - RNA, 24 nt, Human
cggagcuucaccauguuggccagg

SEQ ID NO: 1027841 - RNA, 24 nt, Human
cgggguuuugccauuguuggccag

SEQ ID NO: 1027842 - RNA, 24 nt, Human
cucacugcaaccaccaccuccugg

SEQ ID NO: 1027843 - RNA, 20 nt, Human
cucacugcaaccugucuccu

SEQ ID NO: 1027844 - RNA, 22 nt, Human
cucacugcaaccugucuccugg

SEQ ID NO: 1027845 - RNA, 23 nt, Human
cucacugcaaccugucuccuggg

SEQ ID NO: 1027846 - RNA, 23 nt, Human
cucagccaccugaguagcuggga

SEQ ID NO: 1027847 - RNA, 23 nt, Human
cucaggugauccaccugccucag

SEQ ID NO: 1027848 - RNA, 18 nt, Human
cuccucagcuuuuauuuu

SEQ ID NO: 1027849 - RNA, 27 nt, Human
cuccuggccacaggagaucugcuuugu

SEQ ID NO: 1027850 - RNA, 20 nt, Human
cuccugggcucaagcaaucu

SEQ ID NO: 1027851 - RNA, 21 nt, Human
cuccugggcucaagcaaucug

SEQ ID NO: 1027852 - RNA, 20 nt, Human
cuccuggguucaagugauuc

SEQ ID NO: 1027853 - RNA, 21 nt, Human
cuccuggguucaagugauucu

SEQ ID NO: 1027854 - RNA, 21 nt, Human
cuccuggguucagaugauucu

SEQ ID NO: 1027855 - RNA, 24 nt, Human
cucgcugcaaccuccaccucccag

SEQ ID NO: 1027856 - RNA, 21 nt, Human
cucggccuccaaaagugcugg

SEQ ID NO: 1027857 - RNA, 24 nt, Human
cucucugucgcccgggcugcagug

SEQ ID NO: 1027858 - RNA, 21 nt, Human
cugaagacagcagggcuguga

SEQ ID NO: 1027859 - RNA, 21 nt, Human
cugaguagcugggauuacagg

SEQ ID NO: 1027860 - RNA, 24 nt, Human
cugaguagcugggauuacaggugu

SEQ ID NO: 1027861 - RNA, 24 nt, Human
cugaguagcugggauuacgggugu

SEQ ID NO: 1027862 - RNA, 23 nt, Human
cugcaaccaccaccuccuggguu

SEQ ID NO: 1027863 - RNA, 23 nt, Human
cugcaaccuccaccucccagguu

SEQ ID NO: 1027864 - RNA, 24 nt, Human
cugcaaccuccaccucccagguuc

SEQ ID NO: 1027865 - RNA, 23 nt, Human
cugccucagccaccugaguagcu

SEQ ID NO: 1027866 - RNA, 23 nt, Human
cugccucagccucccaaagugcu

SEQ ID NO: 1027867 - RNA, 24 nt, Human
cugccucagccucccaaagugcug

SEQ ID NO: 1027868 - RNA, 24 nt, Human
cuggagugcaguggcaugaucucg

SEQ ID NO: 1027869 - RNA, 21 nt, Human
cugggauuauaggugugagcc

SEQ ID NO: 1027870 - RNA, 23 nt, Human
cugggcugguccuggggcuucuc

SEQ ID NO: 1027871 - RNA, 19 nt, Human
cuggucuugaacuccuggg

SEQ ID NO: 1027872 - RNA, 18 nt, Human
cuuaaccucaagccucag

SEQ ID NO: 1027873 - RNA, 21 nt, Human
cuucaccauguuggccaggcu

SEQ ID NO: 1027874 - RNA, 22 nt, Human
cuuccccuaacaaaaccagggg

SEQ ID NO: 1027875 - RNA, 24 nt, Human
cuuuguggucacggacaaaucacu

SEQ ID NO: 1027876 - RNA, 24 nt, Human
gaccucaggugauccaccugccuc

SEQ ID NO: 1027877 - RNA, 20 nt, Human
gacuuuuuuuuuuuuuugaa

SEQ ID NO: 1027878 - RNA, 20 nt, Human
gagaacauuuuaaaauacag

SEQ ID NO: 1027879 - RNA, 24 nt, Human
gagaaugaccccuccucagccuuc

SEQ ID NO: 1027880 - RNA, 18 nt, Human
gagacgggguuuugccau

SEQ ID NO: 1027881 - RNA, 19 nt, Human
gaguagcugggauuacagg

SEQ ID NO: 1027882 - RNA, 25 nt, Human
gaguagcugggauuacagguguaag

SEQ ID NO: 1027883 - RNA, 19 nt, Human
gaguagcugggauuacggg

SEQ ID NO: 1027884 - RNA, 19 nt, Human
gauuaaagguuggguguca

SEQ ID NO: 1027885 - RNA, 18 nt, Human
gauuacaggcgugugcca

SEQ ID NO: 1027886 - RNA, 24 nt, Human
gauuacaggcgugugccaccaugc

SEQ ID NO: 1027887 - RNA, 18 nt, Human
gauuacagguguaagcca

SEQ ID NO: 1027888 - RNA, 21 nt, Human
gauuacagguguaagccacca

SEQ ID NO: 1027889 - RNA, 18 nt, Human
gauuacgggugugugcca

SEQ ID NO: 1027890 - RNA, 18 nt, Human
gauuauaggcgugagcca

SEQ ID NO: 1027891 - RNA, 21 nt, Human
gauuauaggcgugagccaccg

SEQ ID NO: 1027892 - RNA, 24 nt, Human
gauuauaggcgugagccaccgugc

SEQ ID NO: 1027893 - RNA, 18 nt, Human
gauuauaggugugagcca

SEQ ID NO: 1027894 - RNA, 20 nt, Human
gauuauaggugugagccacc

SEQ ID NO: 1027895 - RNA, 20 nt, Human
gauuauaggugugagccacc

SEQ ID NO: 1027896 - RNA, 19 nt, Human
gauucuccugccucagccu

SEQ ID NO: 1027897 - RNA, 22 nt, Human
gcaacacccuccugugaccgaa

SEQ ID NO: 1027898 - RNA, 19 nt, Human
gcaaccaccaccuccuggg

SEQ ID NO: 1027899 - RNA, 22 nt, Human
gcaaccaccaccuccuggguuc

SEQ ID NO: 1027900 - RNA, 22 nt, Human
gcaaccuccaccucccagguuc

SEQ ID NO: 1027901 - RNA, 21 nt, Human
gccacaggagaucugcuggcc

SEQ ID NO: 1027902 - RNA, 19 nt, Human
gccaggcuugaacuccugg

SEQ ID NO: 1027903 - RNA, 22 nt, Human
gcccagcuaauuuuuguauuuu

SEQ ID NO: 1027904 - RNA, 24 nt, Human
gcccaggcuggagugcaguggcau

SEQ ID NO: 1027905 - RNA, 24 nt, Human
gccucagucucccaaagggcuggg

SEQ ID NO: 1027906 - RNA, 21 nt, Human
gcucagaauugacaauuguuc

SEQ ID NO: 1027907 - RNA, 23 nt, Human
gcucaggcuggaaugcaguggca

SEQ ID NO: 1027908 - RNA, 18 nt, Human
gcugaaccccuugcuucc

SEQ ID NO: 1027909 - RNA, 24 nt, Human
gcuggaaugcaguggcacgaucua

SEQ ID NO: 1027910 - RNA, 19 nt, Human
gcuggagugcaguggcaug

SEQ ID NO: 1027911 - RNA, 23 nt, Human
gcuggucucaaacuccugaccuc

SEQ ID NO: 1027912 - RNA, 23 nt, Human
gcuggucucgaacuccuggccuc

SEQ ID NO: 1027913 - RNA, 23 nt, Human
ggagcuucaccauguuggccagg

SEQ ID NO: 1027914 - RNA, 18 nt, Human
ggaggcagagaguuuaga

SEQ ID NO: 1027915 - RNA, 22 nt, Human
ggaggggaacuggggaggaggg

SEQ ID NO: 1027916 - RNA, 24 nt, Human
ggauuacaggcgugugccaccaug

SEQ ID NO: 1027917 - RNA, 19 nt, Human
ggauuacagguguaagcca

SEQ ID NO: 1027918 - RNA, 22 nt, Human
ggccucaagugauccgccugcc

SEQ ID NO: 1027919 - RNA, 24 nt, Human
ggcuggucucaaacuccugaccuc

SEQ ID NO: 1027920 - RNA, 24 nt, Human
ggcuggucucgaacuccuggccuc

SEQ ID NO: 1027921 - RNA, 18 nt, Human
ggcuggucuugaacuccu

SEQ ID NO: 1027922 - RNA, 23 nt, Human
ggggaggagggaucugagugagg

SEQ ID NO: 1027923 - RNA, 24 nt, Human
gggguuuugccauuguuggccagg

SEQ ID NO: 1027924 - RNA, 22 nt, Human
ggguaucaccauguuggccagg

SEQ ID NO: 1027925 - RNA, 23 nt, Human
ggguuuugccauuguuggccagg

SEQ ID NO: 1027926 - RNA, 24 nt, Human
ggugauccaccugccucagccucc

SEQ ID NO: 1027927 - RNA, 19 nt, Human
guagagacgggguuuugcc

SEQ ID NO: 1027928 - RNA, 21 nt, Human
guagagacgggguuuugccau

SEQ ID NO: 1027929 - RNA, 21 nt, Human
guagagacgggguuuugccau

SEQ ID NO: 1027930 - RNA, 18 nt, Human
guagcugggauuacaggu

SEQ ID NO: 1027931 - RNA, 23 nt, Human
guccuggggcuucucacagccuc

SEQ ID NO: 1027932 - RNA, 18 nt, Human
gugauccaccugccucag

SEQ ID NO: 1027933 - RNA, 24 nt, Human
gugauccaccugccucagccuccc

SEQ ID NO: 1027934 - RNA, 24 nt, Human
gugauucuccugccucagccaccu

SEQ ID NO: 1027935 - RNA, 21 nt, Human
uaacaaaaccaggggcuauca

SEQ ID NO: 1027936 - RNA, 18 nt, Human
uaaguugaaacagggucu

SEQ ID NO: 1027937 - RNA, 24 nt, Human
uaauuuuuguauuuuugguagaga

SEQ ID NO: 1027938 - RNA, 24 nt, Human
uaauuuuuguguuuuuaguagaga

SEQ ID NO: 1027939 - RNA, 24 nt, Human
uaauuuuuuguauuuuuaguagag

SEQ ID NO: 1027940 - RNA, 25 nt, Human
uaauuuuuuguauuuuuaguagaga

SEQ ID NO: 1027941 - RNA, 22 nt, Human
uacaggcuugagccaccgcacc

SEQ ID NO: 1027942 - RNA, 18 nt, Human
uacagguguaagccacca

SEQ ID NO: 1027943 - RNA, 23 nt, Human
uaccauacccagcugcucagaau

SEQ ID NO: 1027944 - RNA, 22 nt, Human
uacccagcugcucagaauugac

SEQ ID NO: 1027945 - RNA, 24 nt, Human
uacgggugugugccaccacgccca

SEQ ID NO: 1027946 - RNA, 20 nt, Human
uacucugaagacagcagggc

SEQ ID NO: 1027947 - RNA, 24 nt, Human
uacucugucgcucaggcuggaaug

SEQ ID NO: 1027948 - RNA, 21 nt, Human
uagagacggguaucaccaugu

SEQ ID NO: 1027949 - RNA, 24 nt, Human
uaguagagacggagcuucaccaug

SEQ ID NO: 1027950 - RNA, 26 nt, Human
uaguagagacggagcuucaccauguu

SEQ ID NO: 1027951 - RNA, 23 nt, Human
uaguagagacggguaucaccaug

SEQ ID NO: 1027952 - RNA, 23 nt, Human
uauaggcgugagccaccgugccu

SEQ ID NO: 1027953 - RNA, 19 nt, Human
uaucaaaaagaagcgguga

SEQ ID NO: 1027954 - RNA, 23 nt, Human
uaugggccugggacccacccaaa

SEQ ID NO: 1027955 - RNA, 24 nt, Human
uaugucaagcacaaugccagugcc

SEQ ID NO: 1027956 - RNA, 20 nt, Human
uauguugcccaggcuggucu

SEQ ID NO: 1027957 - RNA, 23 nt, Human
uauguugcccaggcuggucuuga

SEQ ID NO: 1027958 - RNA, 24 nt, Human
uauguugcccaggcuggucuugaa

SEQ ID NO: 1027959 - RNA, 19 nt, Human
uauuuuugguagagacggg

SEQ ID NO: 1027960 - RNA, 20 nt, Human
ucaaaaagaagcggugacug

SEQ ID NO: 1027961 - RNA, 23 nt, Human
ucaaaacggaggugacauugaca

SEQ ID NO: 1027962 - RNA, 20 nt, Human
ucaagcacaaugccagugcc

SEQ ID NO: 1027963 - RNA, 19 nt, Human
ucaagugauucuccugccu

SEQ ID NO: 1027964 - RNA, 22 nt, Human
ucaccauguuggccaggcuggu

SEQ ID NO: 1027965 - RNA, 24 nt, Human
ucacugcaaccaccaccuccuggg

SEQ ID NO: 1027966 - RNA, 27 nt, Human
ucacugcaaccaccaccuccuggguuc

SEQ ID NO: 1027967 - RNA, 22 nt, Human
ucacugcaaccugucuccuggg

SEQ ID NO: 1027968 - RNA, 23 nt, Human
ucacugcaaccugucuccugggu

SEQ ID NO: 1027969 - RNA, 21 nt, Human
ucagagucggacagaucuggg

SEQ ID NO: 1027970 - RNA, 22 nt, Human
ucagagucggacagaucugggu

SEQ ID NO: 1027971 - RNA, 19 nt, Human
ucagaugauucuccugccu

SEQ ID NO: 1027972 - RNA, 21 nt, Human
ucaguagcaccccccgucccc

SEQ ID NO: 1027973 - RNA, 23 nt, Human
ucaguaugaugauguaugucaag

SEQ ID NO: 1027974 - RNA, 24 nt, Human
uccaaaagugcugggaguacaggc

SEQ ID NO: 1027975 - RNA, 19 nt, Human
uccaaguaccugggauuac

SEQ ID NO: 1027976 - RNA, 23 nt, Human
uccaaguaccugggauuacaggc

SEQ ID NO: 1027977 - RNA, 24 nt, Human
uccaaguaccugggauuacaggcg

SEQ ID NO: 1027978 - RNA, 21 nt, Human
uccagguuuuucucucauggg

SEQ ID NO: 1027979 - RNA, 19 nt, Human
ucccaaagggcugggauua

SEQ ID NO: 1027980 - RNA, 23 nt, Human
ucccaaagggcugggauuauagg

SEQ ID NO: 1027981 - RNA, 24 nt, Human
ucccaaagugcugggauuauaggc

SEQ ID NO: 1027982 - RNA, 21 nt, Human
ucccagguucaagcaaaucuc

SEQ ID NO: 1027983 - RNA, 24 nt, Human
ucccagguucaagcaaaucuccug

SEQ ID NO: 1027984 - RNA, 21 nt, Human
uccccuaacaaaaccaggggc

SEQ ID NO: 1027985 - RNA, 23 nt, Human
uccccuaacaaaaccaggggcua

SEQ ID NO: 1027986 - RNA, 24 nt, Human
uccugaguagcugggauuacaggu

SEQ ID NO: 1027987 - RNA, 18 nt, Human
uccugggcucaagcaauc

SEQ ID NO: 1027988 - RNA, 20 nt, Human
uccugggcucaagcaaucug

SEQ ID NO: 1027989 - RNA, 21 nt, Human
uccuggguucaagugauucuc

SEQ ID NO: 1027990 - RNA, 24 nt, Human
uccuggguucaagugauucuccug

SEQ ID NO: 1027991 - RNA, 24 nt, Human
uccuggguucagaugauucuccug

SEQ ID NO: 1027992 - RNA, 22 nt, Human
ucgcccgggcugcagugcagug

SEQ ID NO: 1027993 - RNA, 24 nt, Human
ucgcucaggcuggaaugcaguggc

SEQ ID NO: 1027994 - RNA, 24 nt, Human
ucgcugcaaccuccaccucccagg

SEQ ID NO: 1027995 - RNA, 25 nt, Human
ucgcugcaaccuccaccucccaggu

SEQ ID NO: 1027996 - RNA, 24 nt, Human
ucucaugcccaggcuggagugcag

SEQ ID NO: 1027997 - RNA, 19 nt, Human
ucucauuauguugcccagg

SEQ ID NO: 1027998 - RNA, 23 nt, Human
ucucauuauguugcccaggcugg

SEQ ID NO: 1027999 - RNA, 24 nt, Human
ucucauuauguugcccaggcuggu

SEQ ID NO: 1028000 - RNA, 25 nt, Human
ucuccugccucagccuuccaaguac

SEQ ID NO: 1028001 - RNA, 24 nt, Human
ucuccuggguucagaugauucucc

SEQ ID NO: 1028002 - RNA, 21 nt, Human
ucucgaacuccuggccucaag

SEQ ID NO: 1028003 - RNA, 19 nt, Human
ucugaagucaggguugagg

SEQ ID NO: 1028004 - RNA, 24 nt, Human
ucugucgcucaggcuggaaugcag

SEQ ID NO: 1028005 - RNA, 23 nt, Human
ucuuacucugucgcucaggcugg

SEQ ID NO: 1028006 - RNA, 24 nt, Human
ucuuacucugucgcucaggcugga

SEQ ID NO: 1028007 - RNA, 19 nt, Human
ucuugaacuccugggcuca

SEQ ID NO: 1028008 - RNA, 23 nt, Human
ucuugaacuccugggcucaagca

SEQ ID NO: 1028009 - RNA, 24 nt, Human
ugaacuccugggcucaagcaaucu

SEQ ID NO: 1028010 - RNA, 19 nt, Human
ugacauugacagaaaguga

SEQ ID NO: 1028011 - RNA, 24 nt, Human
ugaccucaggugauccaccugccu

SEQ ID NO: 1028012 - RNA, 24 nt, Human
ugagugauuaaagguuggguguca

SEQ ID NO: 1028013 - RNA, 21 nt, Human
ugaguuuccacacagcaacuc

SEQ ID NO: 1028014 - RNA, 20 nt, Human
ugauucuccugccucagccu

SEQ ID NO: 1028015 - RNA, 18 nt, Human
ugcaaaggaagccaggaa

SEQ ID NO: 1028016 - RNA, 20 nt, Human
ugcagcuaugggccugggac

SEQ ID NO: 1028017 - RNA, 19 nt, Human
ugcagugcaguggcaugau

SEQ ID NO: 1028018 - RNA, 23 nt, Human
ugcagugcaguggcaugaucuug

SEQ ID NO: 1028019 - RNA, 24 nt, Human
ugcagugcaguggcaugaucuugg

SEQ ID NO: 1028020 - RNA, 22 nt, Human
ugcaguggcaugaucucggcuc

SEQ ID NO: 1028021 - RNA, 25 nt, Human
ugcaguggcaugaucuuuggaaggc

SEQ ID NO: 1028022 - RNA, 18 nt, Human
ugcccaggcuggagugca

SEQ ID NO: 1028023 - RNA, 21 nt, Human
ugcccaggcuggagugcagug

SEQ ID NO: 1028024 - RNA, 22 nt, Human
ugcccaggcuggagugcagugg

SEQ ID NO: 1028025 - RNA, 24 nt, Human
ugcccaggcuggagugcaguggca

SEQ ID NO: 1028026 - RNA, 24 nt, Human
ugcccaggcuggucuugaacuccu

SEQ ID NO: 1028027 - RNA, 28 nt, Human
ugcccaggcuggucuugaacuccugggc

SEQ ID NO: 1028028 - RNA, 20 nt, Human
ugcccagggcauuuuugugg

SEQ ID NO: 1028029 - RNA, 20 nt, Human
ugcccagugacagaucuggg

SEQ ID NO: 1028030 - RNA, 24 nt, Human
ugcccagugacagaucuggguuug

SEQ ID NO: 1028031 - RNA, 25 nt, Human
ugcccagugacagaucuggguuugg

SEQ ID NO: 1028032 - RNA, 21 nt, Human
ugccucacccuccugaguagc

SEQ ID NO: 1028033 - RNA, 24 nt, Human
ugccucacccuccugaguagcugg

SEQ ID NO: 1028034 - RNA, 28 nt, Human
ugccucacccuccugaguagcugggauu

SEQ ID NO: 1028035 - RNA, 21 nt, Human
ugccucagccaccugaguagc

SEQ ID NO: 1028036 - RNA, 24 nt, Human
ugccucagccaccugaguagcugg

SEQ ID NO: 1028037 - RNA, 24 nt, Human
ugccucagccucccaaagugcugg

SEQ ID NO: 1028038 - RNA, 24 nt, Human
ugccucagccuuccaaguaccugg

SEQ ID NO: 1028039 - RNA, 18 nt, Human
ugccuggccccaaaauga

SEQ ID NO: 1028040 - RNA, 18 nt, Human
ugccuggccccaaaauga

SEQ ID NO: 1028041 - RNA, 24 nt, Human
uggaaugcaguggcacgaucuagg

SEQ ID NO: 1028042 - RNA, 22 nt, Human
uggagacagagucuuacucugu

SEQ ID NO: 1028043 - RNA, 23 nt, Human
uggaggggaacuggggaggaggg

SEQ ID NO: 1028044 - RNA, 19 nt, Human
uggagugcaguggcaugau

SEQ ID NO: 1028045 - RNA, 24 nt, Human
uggagugcaguggcaugaucucgg

SEQ ID NO: 1028046 - RNA, 21 nt, Human
uggcaugaucuuggcucgcug

SEQ ID NO: 1028047 - RNA, 24 nt, Human
uggccaggcuggucucaaacuccu

SEQ ID NO: 1028048 - RNA, 24 nt, Human
uggccaggcuggucucgaacuccu

SEQ ID NO: 1028049 - RNA, 18 nt, Human
uggccucaagugauccgc

SEQ ID NO: 1028050 - RNA, 24 nt, Human
uggccucaagugauccgccugccu

SEQ ID NO: 1028051 - RNA, 20 nt, Human
uggcucgcugcaaccuccac

SEQ ID NO: 1028052 - RNA, 22 nt, Human
ugggaguacaggcuugagccac

SEQ ID NO: 1028053 - RNA, 23 nt, Human
ugggaguacaggcuugagccacc

SEQ ID NO: 1028054 - RNA, 24 nt, Human
ugggaguacaggcuugagccaccg

SEQ ID NO: 1028055 - RNA, 18 nt, Human
ugggauuacaggcgugug

SEQ ID NO: 1028056 - RNA, 21 nt, Human
ugggauuacaggcgugugcca

SEQ ID NO: 1028057 - RNA, 22 nt, Human
ugggauuacaggcgugugccac

SEQ ID NO: 1028058 - RNA, 24 nt, Human
ugggauuacaggcgugugccacca

SEQ ID NO: 1028059 - RNA, 25 nt, Human
ugggauuacaggcgugugccaccau

SEQ ID NO: 1028060 - RNA, 18 nt, Human
ugggauuacagguguaag

SEQ ID NO: 1028061 - RNA, 19 nt, Human
ugggauuacagguguaagc

SEQ ID NO: 1028062 - RNA, 22 nt, Human
ugggauuacagguguaagccac

SEQ ID NO: 1028063 - RNA, 24 nt, Human
ugggauuacagguguaagccacca

SEQ ID NO: 1028064 - RNA, 19 nt, Human
ugggauuacgggugugugc

SEQ ID NO: 1028065 - RNA, 22 nt, Human
ugggauuacgggugugugccac

SEQ ID NO: 1028066 - RNA, 24 nt, Human
ugggauuacgggugugugccacca

SEQ ID NO: 1028067 - RNA, 18 nt, Human
ugggauuauaggcgugag

SEQ ID NO: 1028068 - RNA, 21 nt, Human
ugggauuauaggcgugagcca

SEQ ID NO: 1028069 - RNA, 22 nt, Human
ugggauuauaggcgugagccac

SEQ ID NO: 1028070 - RNA, 23 nt, Human
ugggauuauaggcgugagccacc

SEQ ID NO: 1028071 - RNA, 23 nt, Human
ugggauuauaggcgugagccacc

SEQ ID NO: 1028072 - RNA, 24 nt, Human
ugggauuauaggcgugagccaccg

SEQ ID NO: 1028073 - RNA, 18 nt, Human
ugggauuauaggugugag

SEQ ID NO: 1028074 - RNA, 19 nt, Human
ugggauuauaggugugagc

SEQ ID NO: 1028075 - RNA, 21 nt, Human
ugggauuauaggugugagcca

SEQ ID NO: 1028076 - RNA, 22 nt, Human
ugggauuauaggugugagccac

SEQ ID NO: 1028077 - RNA, 23 nt, Human
ugggauuauaggugugagccacc

SEQ ID NO: 1028078 - RNA, 25 nt, Human
ugggauuauaggugugagccaccuu

SEQ ID NO: 1028079 - RNA, 20 nt, Human
ugggccugggacccacccaa

SEQ ID NO: 1028080 - RNA, 19 nt, Human
ugggcugguccuggggcuu

SEQ ID NO: 1028081 - RNA, 23 nt, Human
uggguucaagugauucuccugcc

SEQ ID NO: 1028082 - RNA, 24 nt, Human
uggguucaagugauucuccugccu

SEQ ID NO: 1028083 - RNA, 24 nt, Human
uggguucagaugauucuccugccu

SEQ ID NO: 1028084 - RNA, 25 nt, Human
ugguagagacgggguuuugccauug

SEQ ID NO: 1028085 - RNA, 21 nt, Human
uguauuuuuaguagagacgga

SEQ ID NO: 1028086 - RNA, 19 nt, Human
ugucucggccuccaaaagu

SEQ ID NO: 1028087 - RNA, 19 nt, Human
ugugugccaccacgcccag

SEQ ID NO: 1028088 - RNA, 22 nt, Human
uuaaccucaagccucaguuuca

SEQ ID NO: 1028089 - RNA, 18 nt, Human
uuaguagagacggagcuu

SEQ ID NO: 1028090 - RNA, 24 nt, Human
uuaguagagacggagcuucaccau

SEQ ID NO: 1028091 - RNA, 23 nt, Human
uuaguagagacggguaucaccau

SEQ ID NO: 1028092 - RNA, 24 nt, Human
uuaguagagacggguaucaccaug

SEQ ID NO: 1028093 - RNA, 21 nt, Human
uucaagugauucuccugccuc

SEQ ID NO: 1028094 - RNA, 23 nt, Human
uucaagugauucuccugccucag

SEQ ID NO: 1028095 - RNA, 26 nt, Human
uucaagugauucuccugccucagcca

SEQ ID NO: 1028096 - RNA, 23 nt, Human
uucagaugauucuccugccucag

SEQ ID NO: 1028097 - RNA, 23 nt, Human
uucucacagccucaguagcaccc

SEQ ID NO: 1028098 - RNA, 19 nt, Human
uuggccaggcuugaacucc

SEQ ID NO: 1028099 - RNA, 24 nt, Human
uuggcuucuccacaggcuccaggg

SEQ ID NO: 1028100 - RNA, 24 nt, Human
uugguagagacgggguuuugccau

SEQ ID NO: 1028101 - RNA, 23 nt, Human
uuguauuuuuaguagagacggag

SEQ ID NO: 1028102 - RNA, 24 nt, Human
uuuuuaguagagacggagcuucac

SEQ ID NO: 1028103 - RNA, 20 nt, Human
uuuuuaguagagacggguau

SEQ ID NO: 1028104 - RNA, 21 nt, Human
uuuuugguagagacgggguuu

SEQ ID NO: 1028105 - RNA, 24 nt, Human
uuuuugguagagacgggguuuugc

SEQ ID NO: 1028106 - RNA, 21 nt, Human
uuuuuguauuuuuaguagaga

SEQ ID NO: 1028107 - RNA, 20 nt, Human
uuuuuguauuuuugguagag

SEQ ID NO: 1028108 - RNA, 20 nt, Human
uuuuuguguuuuuaguagag

SEQ ID NO: 1028109 - RNA, 24 nt, Human
uuuuuuguauuuuuaguagagacg

SEQ ID NO: 1028110 - RNA, 19 nt, Human
aagcuuguaugcugggcgg

SEQ ID NO: 1028111 - RNA, 19 nt, Human
accacagcauacgucacug

SEQ ID NO: 1028112 - RNA, 19 nt, Human
accauggcagccaaaaacg

SEQ ID NO: 1028113 - RNA, 19 nt, Human
agccacaggcggagaaggc

SEQ ID NO: 1028114 - RNA, 24 nt, Human
aggauggaacagaucaugagauuu

SEQ ID NO: 1028115 - RNA, 22 nt, Human
cacaagaaaaaggauggaacag

SEQ ID NO: 1028116 - RNA, 19 nt, Human
caccacaccauuccugagg

SEQ ID NO: 1028117 - RNA, 21 nt, Human
cagcauacgucacugacgccu

SEQ ID NO: 1028118 - RNA, 21 nt, Human
caggaggaggaguucucaggc

SEQ ID NO: 1028119 - RNA, 21 nt, Human
ccagauacauggacagggaca

SEQ ID NO: 1028120 - RNA, 21 nt, Human
cccacacaagaaaaaggaugg

SEQ ID NO: 1028121 - RNA, 22 nt, Human
ccucugagagucccaggaggag

SEQ ID NO: 1028122 - RNA, 22 nt, Human
cuaggaaucagaucuccacacu

SEQ ID NO: 1028123 - RNA, 19 nt, Human
cucacauuaugcugucggc

SEQ ID NO: 1028124 - RNA, 23 nt, Human
cuggaccuugccucacauuaugc

SEQ ID NO: 1028125 - RNA, 18 nt, Human
gccaccacaccauuccug

SEQ ID NO: 1028126 - RNA, 19 nt, Human
gccaccacaccauuccuga

SEQ ID NO: 1028127 - RNA, 23 nt, Human
gggguguggaggugggagucaga

SEQ ID NO: 1028128 - RNA, 21 nt, Human
uaaaauaagcaaacaacuggc

SEQ ID NO: 1028129 - RNA, 24 nt, Human
uaaaauaagcaaacaacuggcagg

SEQ ID NO: 1028130 - RNA, 26 nt, Human
uaaaauaagcaaacaacuggcaggug

SEQ ID NO: 1028131 - RNA, 26 nt, Human
ucagagcugacagccaggcugaugag

SEQ ID NO: 1028132 - RNA, 19 nt, Human
ucccuguuucucaggcugu

SEQ ID NO: 1028133 - RNA, 20 nt, Human
ucucaggcuguagaugaaag

SEQ ID NO: 1028134 - RNA, 22 nt, Human
ucuguaccauggcagccaaaaa

SEQ ID NO: 1028135 - RNA, 24 nt, Human
ugaagucagguacacgccaaugcc

SEQ ID NO: 1028136 - RNA, 19 nt, Human
ugagccgauccguaagggc

SEQ ID NO: 1028137 - RNA, 19 nt, Human
ugccacagcugaagucagg

SEQ ID NO: 1028138 - RNA, 26 nt, Human
ugcugcgcagccuccacagggcgcuu

SEQ ID NO: 1028139 - RNA, 22 nt, Human
uggagaucuccaaagggggcug

SEQ ID NO: 1028140 - RNA, 18 nt, Human
uggcaucucucugaaguc

SEQ ID NO: 1028141 - RNA, 20 nt, Human
uuacccacacaagaaaaagg

SEQ ID NO: 1028142 - RNA, 19 nt, Human
uuuauacuacccaucugac

SEQ ID NO: 1028143 - RNA, 24 nt, Human
uuuuuuuuuuuuuuuugcagaugu

SEQ ID NO: 1028144 - RNA, 18 nt, Human
uuuuuuuuuuuuuuuuug

SEQ ID NO: 1028145 - RNA, 19 nt, Human
uuuuuuuuuuuuuuuuugc

SEQ ID NO: 1028146 - RNA, 22 nt, Human
ugucaaacaugaucuuucccug

SEQ ID NO: 1028147 - RNA, 22 nt, Human
aaaguguuaggauuauaggcau

SEQ ID NO: 1028148 - RNA, 24 nt, Human
aaaguguuaggauuauaggcauga

SEQ ID NO: 1028149 - RNA, 22 nt, Human
aacaaaauacaaaaaugcccag

SEQ ID NO: 1028150 - RNA, 19 nt, Human
acaacaacaacaaaauaca

SEQ ID NO: 1028151 - RNA, 23 nt, Human
acaggcgcccaccaccacgcccg

SEQ ID NO: 1028152 - RNA, 18 nt, Human
acaggguuucacuguguu

SEQ ID NO: 1028153 - RNA, 19 nt, Human
acaggguuucacuguguua

SEQ ID NO: 1028154 - RNA, 20 nt, Human
acaggguuucacuguguuag

SEQ ID NO: 1028155 - RNA, 24 nt, Human
acaggguuucacuguguuagccag

SEQ ID NO: 1028156 - RNA, 21 nt, Human
accacauguaugugucagagu

SEQ ID NO: 1028157 - RNA, 25 nt, Human
accucccggguucacaccauucucc

SEQ ID NO: 1028158 - RNA, 19 nt, Human
acuccagccuggguggcag

SEQ ID NO: 1028159 - RNA, 24 nt, Human
acuggacuccagccuggguggcag

SEQ ID NO: 1028160 - RNA, 18 nt, Human
agacaggguuucacugug

SEQ ID NO: 1028161 - RNA, 20 nt, Human
agccaccgcacccugccucc

SEQ ID NO: 1028162 - RNA, 20 nt, Human
agcuaccugggaggcugggg

SEQ ID NO: 1028163 - RNA, 24 nt, Human
agcuaccugggaggcugggguggg

SEQ ID NO: 1028164 - RNA, 20 nt, Human
aggcaugagccaccgcaccc

SEQ ID NO: 1028165 - RNA, 20 nt, Human
aggcgcccaccaccacgccc

SEQ ID NO: 1028166 - RNA, 25 nt, Human
aggcuggagugcaguggugcgaucu

SEQ ID NO: 1028167 - RNA, 24 nt, Human
agggcaaaagauaaccacauguag

SEQ ID NO: 1028168 - RNA, 18 nt, Human
aguaguugggacuacagg

SEQ ID NO: 1028169 - RNA, 20 nt, Human
agugcaguggugcgaucucg

SEQ ID NO: 1028170 - RNA, 23 nt, Human
agugcaguggugcgaucucggcu

SEQ ID NO: 1028171 - RNA, 24 nt, Human
agugcaguggugcgaucucggcuc

SEQ ID NO: 1028172 - RNA, 24 nt, Human
aucacgccacuggacuccagccug

SEQ ID NO: 1028173 - RNA, 23 nt, Human
augauccacccgccucggccucc

SEQ ID NO: 1028174 - RNA, 23 nt, Human
caaaauacaaaaaugcccauucu

SEQ ID NO: 1028175 - RNA, 22 nt, Human
caacaacaaaauacaaaaaugc

SEQ ID NO: 1028176 - RNA, 22 nt, Human
cacaccauucuccugccucagc

SEQ ID NO: 1028177 - RNA, 19 nt, Human
cacauguaugugucagagu

SEQ ID NO: 1028178 - RNA, 19 nt, Human
caccucccggguucacacc

SEQ ID NO: 1028179 - RNA, 23 nt, Human
cacuggacuccagccuggguggc

SEQ ID NO: 1028180 - RNA, 24 nt, Human
cacuggacuccagccuggguggca

SEQ ID NO: 1028181 - RNA, 18 nt, Human
cacuguguuagccaggau

SEQ ID NO: 1028182 - RNA, 19 nt, Human
cacuguguuagccaggaug

SEQ ID NO: 1028183 - RNA, 24 nt, Human
cacuguguuagccaggauggucuc

SEQ ID NO: 1028184 - RNA, 20 nt, Human
cagccuccugaguaguuggg

SEQ ID NO: 1028185 - RNA, 21 nt, Human
caggcgcccaccaccacgccc

SEQ ID NO: 1028186 - RNA, 24 nt, Human
caggguuucacuguguuagccagg

SEQ ID NO: 1028187 - RNA, 20 nt, Human
ccacuggacuccagccuggg

SEQ ID NO: 1028188 - RNA, 20 nt, Human
ccacuggacuccagccuggg

SEQ ID NO: 1028189 - RNA, 20 nt, Human
ccacuggacuccagccuggg

SEQ ID NO: 1028190 - RNA, 22 nt, Human
ccacuggacuccagccugggug

SEQ ID NO: 1028191 - RNA, 24 nt, Human
ccacuggacuccagccuggguggc

SEQ ID NO: 1028192 - RNA, 19 nt, Human
ccagacagggcccccgagg

SEQ ID NO: 1028193 - RNA, 21 nt, Human
cccaccaccacgcccggcuac

SEQ ID NO: 1028194 - RNA, 19 nt, Human
cccaggcuggagugcagug

SEQ ID NO: 1028195 - RNA, 22 nt, Human
cccaggcuggagugcaguggug

SEQ ID NO: 1028196 - RNA, 23 nt, Human
ccccgugcaggccggccggccuc

SEQ ID NO: 1028197 - RNA, 20 nt, Human
ccugaccucaugauccaccc

SEQ ID NO: 1028198 - RNA, 23 nt, Human
ccugaguaguugggacuacaggc

SEQ ID NO: 1028199 - RNA, 24 nt, Human
ccugaguaguugggacuacaggcg

SEQ ID NO: 1028200 - RNA, 23 nt, Human
cgccucggccuccuaaaguguua

SEQ ID NO: 1028201 - RNA, 24 nt, Human
cgccucggccuccuaaaguguuag

SEQ ID NO: 1028202 - RNA, 19 nt, Human
cgcugaggcgccagacagg

SEQ ID NO: 1028203 - RNA, 24 nt, Human
cuaaaguguuaggauuauaggcau

SEQ ID NO: 1028204 - RNA, 21 nt, Human
cucaacaacaacaacaaaaua

SEQ ID NO: 1028205 - RNA, 24 nt, Human
cucacugcaagcuccaccucccgg

SEQ ID NO: 1028206 - RNA, 21 nt, Human
cucccggguucacaccauucu

SEQ ID NO: 1028207 - RNA, 24 nt, Human
cuccugaccucaugauccacccgc

SEQ ID NO: 1028208 - RNA, 24 nt, Human
cucgcucugucucccaggcuggag

SEQ ID NO: 1028209 - RNA, 20 nt, Human
cucugucucccaggcuggag

SEQ ID NO: 1028210 - RNA, 24 nt, Human
cugcaagcuccaccucccggguuc

SEQ ID NO: 1028211 - RNA, 21 nt, Human
cugccucagccuccugaguag

SEQ ID NO: 1028212 - RNA, 22 nt, Human
gaccucaugauccacccgccuc

SEQ ID NO: 1028213 - RNA, 20 nt, Human
gacuccagccuggguggcag

SEQ ID NO: 1028214 - RNA, 21 nt, Human
gagacggagucucgcucuguc

SEQ ID NO: 1028215 - RNA, 19 nt, Human
gagccaccgcacccugccu

SEQ ID NO: 1028216 - RNA, 21 nt, Human
gaguacuaaaaaguggcuuac

SEQ ID NO: 1028217 - RNA, 25 nt, Human
gaguaguugggacuacaggcgccca

SEQ ID NO: 1028218 - RNA, 22 nt, Human
gauuauaggcaugagccaccgc

SEQ ID NO: 1028219 - RNA, 23 nt, Human
gauuauaggcaugagccaccgca

SEQ ID NO: 1028220 - RNA, 19 nt, Human
gccacuggacuccagccug

SEQ ID NO: 1028221 - RNA, 24 nt, Human
gccacuggacuccagccugggugg

SEQ ID NO: 1028222 - RNA, 23 nt, Human
gcccggcuacuuuuuuguauuuu

SEQ ID NO: 1028223 - RNA, 20 nt, Human
gcgcugaggcgccagacagg

SEQ ID NO: 1028224 - RNA, 22 nt, Human
ggauuauaggcaugagccaccg

SEQ ID NO: 1028225 - RNA, 20 nt, Human
ggucucgaucuccugaccuc

SEQ ID NO: 1028226 - RNA, 19 nt, Human
guguuaggauuauaggcau

SEQ ID NO: 1028227 - RNA, 22 nt, Human
uagagacaggguuucacugugu

SEQ ID NO: 1028228 - RNA, 24 nt, Human
uagcuaccugggaggcuggggugg

SEQ ID NO: 1028229 - RNA, 18 nt, Human
uaggauuauaggcaugag

SEQ ID NO: 1028230 - RNA, 21 nt, Human
uaggauuauaggcaugagcca

SEQ ID NO: 1028231 - RNA, 22 nt, Human
uaggauuauaggcaugagccac

SEQ ID NO: 1028232 - RNA, 23 nt, Human
uaggauuauaggcaugagccacc

SEQ ID NO: 1028233 - RNA, 24 nt, Human
uaggauuauaggcaugagccaccg

SEQ ID NO: 1028234 - RNA, 20 nt, Human
uaguagagacaggguuucac

SEQ ID NO: 1028235 - RNA, 24 nt, Human
uaguagagacaggguuucacugug

SEQ ID NO: 1028236 - RNA, 19 nt, Human
ucaacaacaacaacaaaau

SEQ ID NO: 1028237 - RNA, 25 nt, Human
ucaacaacaacaacaaaauacaaaa

SEQ ID NO: 1028238 - RNA, 21 nt, Human
ucacaccauucuccugccuca

SEQ ID NO: 1028239 - RNA, 23 nt, Human
ucacgccacuggacuccagccug

SEQ ID NO: 1028240 - RNA, 24 nt, Human
ucacugcaagcuccaccucccggg

SEQ ID NO: 1028241 - RNA, 24 nt, Human
ucacuguguuagccaggauggucu

SEQ ID NO: 1028242 - RNA, 23 nt, Human
ucagccuccugaguaguugggac

SEQ ID NO: 1028243 - RNA, 18 nt, Human
uccagccuggguggcaga

SEQ ID NO: 1028244 - RNA, 22 nt, Human
ucccaggcuggagugcaguggu

SEQ ID NO: 1028245 - RNA, 21 nt, Human
ucccggguucacaccauucuc

SEQ ID NO: 1028246 - RNA, 24 nt, Human
ucccggguucacaccauucuccug

SEQ ID NO: 1028247 - RNA, 24 nt, Human
uccuaaaguguuaggauuauaggc

SEQ ID NO: 1028248 - RNA, 24 nt, Human
uccugaguaguugggacuacaggc

SEQ ID NO: 1028249 - RNA, 24 nt, Human
ucucccaggcuggagugcaguggu

SEQ ID NO: 1028250 - RNA, 18 nt, Human
ucuccugccucagccucc

SEQ ID NO: 1028251 - RNA, 21 nt, Human
ucucgcucugucucccaggcu

SEQ ID NO: 1028252 - RNA, 23 nt, Human
ucucgcucugucucccaggcugg

SEQ ID NO: 1028253 - RNA, 24 nt, Human
ucucgcucugucucccaggcugga

SEQ ID NO: 1028254 - RNA, 19 nt, Human
ucugucucccaggcuggag

SEQ ID NO: 1028255 - RNA, 24 nt, Human
ucugucucccaggcuggagugcag

SEQ ID NO: 1028256 - RNA, 23 nt, Human
ugaagcugcagugagguaugauc

SEQ ID NO: 1028257 - RNA, 23 nt, Human
ugaccucaugauccacccgccuc

SEQ ID NO: 1028258 - RNA, 22 nt, Human
ugcaguggugcgaucucggcuc

SEQ ID NO: 1028259 - RNA, 24 nt, Human
ugccucagccuccugaguaguugg

SEQ ID NO: 1028260 - RNA, 23 nt, Human
uggagugcaguggugcgaucucg

SEQ ID NO: 1028261 - RNA, 24 nt, Human
uggagugcaguggugcgaucucgg

SEQ ID NO: 1028262 - RNA, 19 nt, Human
uggcuuacaaagcagcgug

SEQ ID NO: 1028263 - RNA, 21 nt, Human
ugggacuacaggcgcccacca

SEQ ID NO: 1028264 - RNA, 24 nt, Human
ugggacuacaggcgcccaccacca

SEQ ID NO: 1028265 - RNA, 22 nt, Human
ugggaggcuggggugggaggau

SEQ ID NO: 1028266 - RNA, 18 nt, Human
uggggugggaggauuacu

SEQ ID NO: 1028267 - RNA, 23 nt, Human
uggggugggaggauuacuugagc

SEQ ID NO: 1028268 - RNA, 24 nt, Human
uggggugggaggauuacuugagcc

SEQ ID NO: 1028269 - RNA, 20 nt, Human
ugucagaguacuaaaaagug

SEQ ID NO: 1028270 - RNA, 21 nt, Human
uuaguagagacaggguuucac

SEQ ID NO: 1028271 - RNA, 24 nt, Human
uuaguagagacaggguuucacugu

SEQ ID NO: 1028272 - RNA, 21 nt, Human
uucacuguguuagccaggaug

SEQ ID NO: 1028273 - RNA, 19 nt, Human
uuucacuguguuagccagg

SEQ ID NO: 1028274 - RNA, 20 nt, Human
uuugcugggcgugguggugc

SEQ ID NO: 1028275 - RNA, 24 nt, Human
uuuuuaguagagacaggguuucac

SEQ ID NO: 1028276 - RNA, 21 nt, Human
uuuuuguauuuuuaguagaga

SEQ ID NO: 1028277 - RNA, 21 nt, Human
uuuuuuguauuuuuaguagag

SEQ ID NO: 1028278 - RNA, 24 nt, Human
uuuuuuguauuuuuaguagagaca

SEQ ID NO: 1028279 - RNA, 22 nt, Human
aaacacugaaaacagcucuuac

SEQ ID NO: 1028280 - RNA, 20 nt, Human
aaacagaugguacaaacuuu

SEQ ID NO: 1028281 - RNA, 25 nt, Human
aagaugcugaaaacaaaacaaaaua

SEQ ID NO: 1028282 - RNA, 22 nt, Human
acaaacuuccaacuuucaaauc

SEQ ID NO: 1028283 - RNA, 18 nt, Human
acaaggaaaaauagcacu

SEQ ID NO: 1028284 - RNA, 24 nt, Human
accccgcccaccaagucuuacagc

SEQ ID NO: 1028285 - RNA, 21 nt, Human
agaaaauaaaaguucaaaaac

SEQ ID NO: 1028286 - RNA, 21 nt, Human
agaaagaugcugaaaacaaaa

SEQ ID NO: 1028287 - RNA, 21 nt, Human
agaauauccaaaggacaccuc

SEQ ID NO: 1028288 - RNA, 24 nt, Human
agcagccuugcacucuuaggcggc

SEQ ID NO: 1028289 - RNA, 21 nt, Human
aggcuucucugucaucacaga

SEQ ID NO: 1028290 - RNA, 22 nt, Human
auuccaggcucagaaucuucca

SEQ ID NO: 1028291 - RNA, 30 nt, Human
caacaagaaaauaaaaguucaaaaacuaag

SEQ ID NO: 1028292 - RNA, 26 nt, Human
caauagauccaaacugaaguaccauc

SEQ ID NO: 1028293 - RNA, 21 nt, Human
cacgguccaaucagguucuga

SEQ ID NO: 1028294 - RNA, 18 nt, Human
cacuaugacccagcuccc

SEQ ID NO: 1028295 - RNA, 19 nt, Human
cagcccagaggauuugcgg

SEQ ID NO: 1028296 - RNA, 24 nt, Human
cagcugaaaagggcgccucugcag

SEQ ID NO: 1028297 - RNA, 21 nt, Human
caucacagaauauccaaagga

SEQ ID NO: 1028298 - RNA, 18 nt, Human
cauuuaaaaauauuccau

SEQ ID NO: 1028299 - RNA, 21 nt, Human
cauuuuauugcucagcucacu

SEQ ID NO: 1028300 - RNA, 22 nt, Human
cauuuuuaaaaacaaggaaaaa

SEQ ID NO: 1028301 - RNA, 18 nt, Human
ccaauagauccaaacuga

SEQ ID NO: 1028302 - RNA, 20 nt, Human
ccccaccccaccccgcccac

SEQ ID NO: 1028303 - RNA, 19 nt, Human
ccccaccccgcccaccaag

SEQ ID NO: 1028304 - RNA, 24 nt, Human
cccuccccaccccaccccgcccac

SEQ ID NO: 1028305 - RNA, 25 nt, Human
cccuccccaccccaccccgcccacc

SEQ ID NO: 1028306 - RNA, 22 nt, Human
ccgcgcugcacucaggagcugc

SEQ ID NO: 1028307 - RNA, 18 nt, Human
ccuccccaccccaccccg

SEQ ID NO: 1028308 - RNA, 24 nt, Human
ccucugcaggcaggcggaucacuu

SEQ ID NO: 1028309 - RNA, 19 nt, Human
ccuuccuacccuuuccucc

SEQ ID NO: 1028310 - RNA, 23 nt, Human
cgcaauagauuccaaaaucagga

SEQ ID NO: 1028311 - RNA, 19 nt, Human
cgggccgggacaguggcag

SEQ ID NO: 1028312 - RNA, 20 nt, Human
cuacuggguaacucuuuggu

SEQ ID NO: 1028313 - RNA, 19 nt, Human
cuauaaguuuaagcuacag

SEQ ID NO: 1028314 - RNA, 22 nt, Human
cucacagcauggagcaugacga

SEQ ID NO: 1028315 - RNA, 18 nt, Human
cucccuucccacccuucc

SEQ ID NO: 1028316 - RNA, 23 nt, Human
cucgucauuugaaaggauuccac

SEQ ID NO: 1028317 - RNA, 22 nt, Human
cugcaaccgccuuccccggagc

SEQ ID NO: 1028318 - RNA, 26 nt, Human
cugcugccaugucaaccaguggaauc

SEQ ID NO: 1028319 - RNA, 21 nt, Human
cuuaacuucaaacaaacugca

SEQ ID NO: 1028320 - RNA, 22 nt, Human
cuuaugguuuacauaggauaug

SEQ ID NO: 1028321 - RNA, 21 nt, Human
cuucuaaaacucuaccuucaa

SEQ ID NO: 1028322 - RNA, 22 nt, Human
cuuuccucccuccccaccccac

SEQ ID NO: 1028323 - RNA, 18 nt, Human
cuuuucaaaacuuuauua

SEQ ID NO: 1028324 - RNA, 19 nt, Human
gacccagcucccuacaguc

SEQ ID NO: 1028325 - RNA, 18 nt, Human
gagcagcagcugaaaagg

SEQ ID NO: 1028326 - RNA, 20 nt, Human
gagcagcagcugaaaagggc

SEQ ID NO: 1028327 - RNA, 22 nt, Human
gagcugcaaccgccuuccccgg

SEQ ID NO: 1028328 - RNA, 18 nt, Human
gaguggcgagggggucug

SEQ ID NO: 1028329 - RNA, 21 nt, Human
gauacaguacgagauucauuu

SEQ ID NO: 1028330 - RNA, 19 nt, Human
gcagcagccaggggacaaa

SEQ ID NO: 1028331 - RNA, 24 nt, Human
gcaggagaaggacugggcgcugga

SEQ ID NO: 1028332 - RNA, 22 nt, Human
gcaggcaggcggaucacuuucu

SEQ ID NO: 1028333 - RNA, 22 nt, Human
gccacacucccccaauagaucc

SEQ ID NO: 1028334 - RNA, 21 nt, Human
gccuccaugggguccuaauuc

SEQ ID NO: 1028335 - RNA, 24 nt, Human
ggagcaugacgagguuuauuuccc

SEQ ID NO: 1028336 - RNA, 24 nt, Human
ggagcaugacgagguuuauuuccc

SEQ ID NO: 1028337 - RNA, 18 nt, Human
ggagggcagcagccaggg

SEQ ID NO: 1028338 - RNA, 20 nt, Human
ggagggcagcagccagggga

SEQ ID NO: 1028339 - RNA, 22 nt, Human
ggaguagagaaagcauggagug

SEQ ID NO: 1028340 - RNA, 20 nt, Human
ggcauuuucagguuuucagg

SEQ ID NO: 1028341 - RNA, 23 nt, Human
ggcgcuuggagaccugagcagcc

SEQ ID NO: 1028342 - RNA, 19 nt, Human
gggaaggugggcggacagg

SEQ ID NO: 1028343 - RNA, 21 nt, Human
gggccgggacaguggcaggaa

SEQ ID NO: 1028344 - RNA, 20 nt, Human
gggcuucuggcgagcagcag

SEQ ID NO: 1028345 - RNA, 19 nt, Human
ggggagaaugggagggcag

SEQ ID NO: 1028346 - RNA, 24 nt, Human
gggggugggguggggguuccucug

SEQ ID NO: 1028347 - RNA, 21 nt, Human
gucaaccaguggaaucaaggg

SEQ ID NO: 1028348 - RNA, 19 nt, Human
gucugcuucucccuuccca

SEQ ID NO: 1028349 - RNA, 21 nt, Human
guggcauuuucagguuuucag

SEQ ID NO: 1028350 - RNA, 22 nt, Human
guggccgggccgggacaguggc

SEQ ID NO: 1028351 - RNA, 20 nt, Human
gugguuugaggcagggagua

SEQ ID NO: 1028352 - RNA, 21 nt, Human
uaaaacacuaaccccagacag

SEQ ID NO: 1028353 - RNA, 18 nt, Human
uaaacccccagugaguca

SEQ ID NO: 1028354 - RNA, 20 nt, Human
uaaaggcauaaggcaaccag

SEQ ID NO: 1028355 - RNA, 24 nt, Human
uaaaugacuaugucugcuucuccc

SEQ ID NO: 1028356 - RNA, 22 nt, Human
uaaccccagacaguggaaccaa

SEQ ID NO: 1028357 - RNA, 19 nt, Human
uaagagcuugagaagauuu

SEQ ID NO: 1028358 - RNA, 18 nt, Human
uaaggcaaccaggucucc

SEQ ID NO: 1028359 - RNA, 25 nt, Human
uaggacucaaaacaguaaguuaagu

SEQ ID NO: 1028360 - RNA, 19 nt, Human
uaugacccagcucccuaca

SEQ ID NO: 1028361 - RNA, 19 nt, Human
uaugacccagcucccuaca

SEQ ID NO: 1028362 - RNA, 19 nt, Human
ucaaacagaugguacaaac

SEQ ID NO: 1028363 - RNA, 24 nt, Human
ucagaaucuuccauccagccuucu

SEQ ID NO: 1028364 - RNA, 24 nt, Human
ucagaaucuuccauccagccuucu

SEQ ID NO: 1028365 - RNA, 18 nt, Human
uccaugggguccuaauuc

SEQ ID NO: 1028366 - RNA, 24 nt, Human
ucccuccccaccccaccccgccca

SEQ ID NO: 1028367 - RNA, 21 nt, Human
ucgguucaggagguccaaaga

SEQ ID NO: 1028368 - RNA, 21 nt, Human
ucucacccagcuacuacugga

SEQ ID NO: 1028369 - RNA, 21 nt, Human
ucugcuucucccuucccaccc

SEQ ID NO: 1028370 - RNA, 23 nt, Human
ucugucaucacagaauauccaaa

SEQ ID NO: 1028371 - RNA, 23 nt, Human
ugaaaacagcucuuacaaaaucc

SEQ ID NO: 1028372 - RNA, 18 nt, Human
ugaaguaccaucuggggg

SEQ ID NO: 1028373 - RNA, 24 nt, Human
ugcaggcaggcggaucacuuucua

SEQ ID NO: 1028374 - RNA, 19 nt, Human
ugcauauacucaaacagau

SEQ ID NO: 1028375 - RNA, 18 nt, Human
ugccaggugaccuccuac

SEQ ID NO: 1028376 - RNA, 21 nt, Human
uggagggggagaaugggaggg

SEQ ID NO: 1028377 - RNA, 24 nt, Human
uggagggggagaaugggagggcag

SEQ ID NO: 1028378 - RNA, 19 nt, Human
uggaguggcgagggggucu

SEQ ID NO: 1028379 - RNA, 20 nt, Human
uggaguggcgagggggucug

SEQ ID NO: 1028380 - RNA, 18 nt, Human
uggcaggaagccgcgcug

SEQ ID NO: 1028381 - RNA, 20 nt, Human
ugggagggcagcagccaggg

SEQ ID NO: 1028382 - RNA, 23 nt, Human
ugguagguggggguggggugggg

SEQ ID NO: 1028383 - RNA, 23 nt, Human
ugguuuacauaggauaugcauug

SEQ ID NO: 1028384 - RNA, 21 nt, Human
uguaagaguaaaggcauaagg

SEQ ID NO: 1028385 - RNA, 23 nt, Human
uuaaaugugcauauacucaaaca

SEQ ID NO: 1028386 - RNA, 18 nt, Human
uuacugucccacgcacua

SEQ ID NO: 1028387 - RNA, 24 nt, Human
uuaggcggcagcguccuuucuccc

SEQ ID NO: 1028388 - RNA, 24 nt, Human
uugcccagaagucaacguuugcug

SEQ ID NO: 1028389 - RNA, 20 nt, Human
uuuaaaaacaaggaaaaauu

SEQ ID NO: 1028390 - RNA, 19 nt, Human
uuuaaaaauauuccauuuu

SEQ ID NO: 1028391 - RNA, 23 nt, Human
uuuaagcuacaggcugagaccuu

SEQ ID NO: 1028392 - RNA, 21 nt, Human
uuuuacagcuaucuacagaua

SEQ ID NO: 1028393 - RNA, 22 nt, Human
aaauuuauucugugacauuuuc

SEQ ID NO: 1028394 - RNA, 18 nt, Human
aagcagaagcgaaagcgg

SEQ ID NO: 1028395 - RNA, 23 nt, Human
aagcagaagcgaaagcggugaca

SEQ ID NO: 1028396 - RNA, 24 nt, Human
aagcagaagcgaaagcggugacac

SEQ ID NO: 1028397 - RNA, 24 nt, Human
cauaaaaugauaaggacugcaaca

SEQ ID NO: 1028398 - RNA, 19 nt, Human
cuuuuuuuuuuucacuuca

SEQ ID NO: 1028399 - RNA, 20 nt, Human
gacaccgccgacccgaccua

SEQ ID NO: 1028400 - RNA, 18 nt, Human
gccgacccgaccuaugcg

SEQ ID NO: 1028401 - RNA, 18 nt, Human
gcgcaggcgcgcacucgc

SEQ ID NO: 1028402 - RNA, 21 nt, Human
ucauugaagauauuuuaacau

SEQ ID NO: 1028403 - RNA, 18 nt, Human
ucugugacauuuuccuca

SEQ ID NO: 1028404 - RNA, 23 nt, Human
ugaagauauuuuaacauagauua

SEQ ID NO: 1028405 - RNA, 20 nt, Human
ugacaccgccgacccgaccu

SEQ ID NO: 1028406 - RNA, 24 nt, Human
uucaugaaaaauaaauucuagaag

SEQ ID NO: 1028407 - RNA, 20 nt, Human
uuuucacuucaaacaucauu

SEQ ID NO: 1028408 - RNA, 28 nt, Human
aaagcagccuugcccucuuuaacaauua

SEQ ID NO: 1028409 - RNA, 19 nt, Human
aacaggucauauuaguguc

SEQ ID NO: 1028410 - RNA, 19 nt, Human
aacaugaugaaaccccguc

SEQ ID NO: 1028411 - RNA, 20 nt, Human
aacaugaugaaaccccgucu

SEQ ID NO: 1028412 - RNA, 21 nt, Human
aacaugaugaaaccccgucuc

SEQ ID NO: 1028413 - RNA, 21 nt, Human
aaccaaaacgacaaagcaguc

SEQ ID NO: 1028414 - RNA, 21 nt, Human
aaccccgucucuaccaaaaau

SEQ ID NO: 1028415 - RNA, 23 nt, Human
aagaaacccagcgggugacaagc

SEQ ID NO: 1028416 - RNA, 19 nt, Human
aagcauuucgggaggcuga

SEQ ID NO: 1028417 - RNA, 24 nt, Human
aagcauuucgggaggcugaggugg

SEQ ID NO: 1028418 - RNA, 19 nt, Human
aaggagcuccuggacagaa

SEQ ID NO: 1028419 - RNA, 20 nt, Human
aauuguuugaacccaggagg

SEQ ID NO: 1028420 - RNA, 24 nt, Human
aauuguuugaacccaggaggcgga

SEQ ID NO: 1028421 - RNA, 22 nt, Human
acaaaaccaaaacgacaaagca

SEQ ID NO: 1028422 - RNA, 20 nt, Human
acacugccugccuuuucagc

SEQ ID NO: 1028423 - RNA, 19 nt, Human
acagaacccauacaacagc

SEQ ID NO: 1028424 - RNA, 22 nt, Human
acagaugcuagugaauguucuu

SEQ ID NO: 1028425 - RNA, 18 nt, Human
acaggagcacgcggcgug

SEQ ID NO: 1028426 - RNA, 22 nt, Human
acaggcccuccccagauggcaa

SEQ ID NO: 1028427 - RNA, 19 nt, Human
accaagugcacacucaccc

SEQ ID NO: 1028428 - RNA, 22 nt, Human
accaagugcacacucacccagc

SEQ ID NO: 1028429 - RNA, 22 nt, Human
accaguaauccccgcuauuugg

SEQ ID NO: 1028430 - RNA, 24 nt, Human
accccgucucuaccaaaaauacaa

SEQ ID NO: 1028431 - RNA, 18 nt, Human
accuugaauaaaagcagc

SEQ ID NO: 1028432 - RNA, 22 nt, Human
acgauggccaugcucggcgcgg

SEQ ID NO: 1028433 - RNA, 23 nt, Human
acgcugggccaacccgagcaugu

SEQ ID NO: 1028434 - RNA, 18 nt, Human
acuccagccugggggaca

SEQ ID NO: 1028435 - RNA, 21 nt, Human
acugucuccgcgaccuugggg

SEQ ID NO: 1028436 - RNA, 23 nt, Human
acuugcuggcgucugcagcguca

SEQ ID NO: 1028437 - RNA, 23 nt, Human
agacaaaaccaaaacgacaaagc

SEQ ID NO: 1028438 - RNA, 21 nt, Human
agacagaacccauacaacagc

SEQ ID NO: 1028439 - RNA, 18 nt, Human
agaccucaagaaacccag

SEQ ID NO: 1028440 - RNA, 21 nt, Human
agaggacagccucaccacgug

SEQ ID NO: 1028441 - RNA, 18 nt, Human
agcaauaucaucgauaac

SEQ ID NO: 1028442 - RNA, 20 nt, Human
agcaccuugggaggcugagg

SEQ ID NO: 1028443 - RNA, 24 nt, Human
agcauuucgggaggcugagguggg

SEQ ID NO: 1028444 - RNA, 18 nt, Human
agccucacagcgugcaca

SEQ ID NO: 1028445 - RNA, 24 nt, Human
agccuggccaacaugaugaaaccc

SEQ ID NO: 1028446 - RNA, 24 nt, Human
agccugggggacaaagccagacuc

SEQ ID NO: 1028447 - RNA, 23 nt, Human
agcgcccaugcacccucagccac

SEQ ID NO: 1028448 - RNA, 23 nt, Human
aggcaggagaauuguuugaaccc

SEQ ID NO: 1028449 - RNA, 24 nt, Human
aggcaggagaauuguuugaaccca

SEQ ID NO: 1028450 - RNA, 19 nt, Human
aggcaggaggaugaggucu

SEQ ID NO: 1028451 - RNA, 21 nt, Human
aggcggagguugcagugagcc

SEQ ID NO: 1028452 - RNA, 24 nt, Human
aggcggagguugcagugagccgag

SEQ ID NO: 1028453 - RNA, 29 nt, Human
aggcgguguucugggacuggucgagggcg

SEQ ID NO: 1028454 - RNA, 21 nt, Human
aggcugaggcaggagaauugu

SEQ ID NO: 1028455 - RNA, 24 nt, Human
aggcugaggcaggagaauuguuug

SEQ ID NO: 1028456 - RNA, 22 nt, Human
aggcugaggugggcggaucacg

SEQ ID NO: 1028457 - RNA, 23 nt, Human
agggaggccuggcugccccgggc

SEQ ID NO: 1028458 - RNA, 24 nt, Human
agggaggccuggcugccccgggcu

SEQ ID NO: 1028459 - RNA, 25 nt, Human
agggcaggacacacugaggucugcc

SEQ ID NO: 1028460 - RNA, 22 nt, Human
aggggucccagaguucuccaga

SEQ ID NO: 1028461 - RNA, 25 nt, Human
aggugcccccuauuccugcagcccu

SEQ ID NO: 1028462 - RNA, 21 nt, Human
agucaggcuccucugagcccu

SEQ ID NO: 1028463 - RNA, 19 nt, Human
aguucuccagaaaaaauaa

SEQ ID NO: 1028464 - RNA, 24 nt, Human
auacaacagcagaacuccccagag

SEQ ID NO: 1028465 - RNA, 24 nt, Human
auccugccaucgcacuccagccug

SEQ ID NO: 1028466 - RNA, 23 nt, Human
aucucgcuuuagcagccccccca

SEQ ID NO: 1028467 - RNA, 19 nt, Human
augccuguaaucccagcac

SEQ ID NO: 1028468 - RNA, 18 nt, Human
auggccucuggcuuccag

SEQ ID NO: 1028469 - RNA, 19 nt, Human
caaaaccaaaacgacaaag

SEQ ID NO: 1028470 - RNA, 20 nt, Human
caaaauaagccccgaaauga

SEQ ID NO: 1028471 - RNA, 26 nt, Human
caaacaguccccuuaccaagcccucu

SEQ ID NO: 1028472 - RNA, 24 nt, Human
caacaugaugaaaccccgucucua

SEQ ID NO: 1028473 - RNA, 20 nt, Human
caagacgacagccucacagc

SEQ ID NO: 1028474 - RNA, 22 nt, Human
cacagaugcuagugaauguucu

SEQ ID NO: 1028475 - RNA, 20 nt, Human
cacagugaacggccugugug

SEQ ID NO: 1028476 - RNA, 20 nt, Human
cacagugaacggccugugug

SEQ ID NO: 1028477 - RNA, 24 nt, Human
caccagggccugcauccccaucug

SEQ ID NO: 1028478 - RNA, 23 nt, Human
caccaguaauccccgcuauuugg

SEQ ID NO: 1028479 - RNA, 24 nt, Human
caccaguaauccccgcuauuuggg

SEQ ID NO: 1028480 - RNA, 21 nt, Human
cacccagcuuccucugcccgg

SEQ ID NO: 1028481 - RNA, 25 nt, Human
cacccguaaucccaaagcauuucgg

SEQ ID NO: 1028482 - RNA, 23 nt, Human
caccuggccucuccaugcaccaa

SEQ ID NO: 1028483 - RNA, 24 nt, Human
cacgacgucaggaguuugagacua

SEQ ID NO: 1028484 - RNA, 23 nt, Human
cacuccagccugggggacaaagc

SEQ ID NO: 1028485 - RNA, 18 nt, Human
cacucccacagggcagga

SEQ ID NO: 1028486 - RNA, 24 nt, Human
cagaacuccccagaggacagccuc

SEQ ID NO: 1028487 - RNA, 22 nt, Human
cagaauccauuaacugcuccuc

SEQ ID NO: 1028488 - RNA, 19 nt, Human
cagaggacagccucaccac

SEQ ID NO: 1028489 - RNA, 24 nt, Human
cagcaccuugggaggcugaggcag

SEQ ID NO: 1028490 - RNA, 18 nt, Human
caggacacacugaggucu

SEQ ID NO: 1028491 - RNA, 21 nt, Human
cagggccugcauccccaucug

SEQ ID NO: 1028492 - RNA, 20 nt, Human
cagugagccgagauccugcc

SEQ ID NO: 1028493 - RNA, 23 nt, Human
cagugcaauggcuucaacacuuu

SEQ ID NO: 1028494 - RNA, 18 nt, Human
caguggggaccggccagg

SEQ ID NO: 1028495 - RNA, 18 nt, Human
caucgcacuccagccugg

SEQ ID NO: 1028496 - RNA, 19 nt, Human
caucgcacuccagccuggg

SEQ ID NO: 1028497 - RNA, 24 nt, Human
caucgcacuccagccugggggaca

SEQ ID NO: 1028498 - RNA, 24 nt, Human
caugaacaggucauauuaguguca

SEQ ID NO: 1028499 - RNA, 24 nt, Human
caugccuguaaucccagcaccuug

SEQ ID NO: 1028500 - RNA, 28 nt, Human
ccaaccuggacaacauagcgagagcugg

SEQ ID NO: 1028501 - RNA, 22 nt, Human
ccagagggugugucaggaccug

SEQ ID NO: 1028502 - RNA, 20 nt, Human
ccagauggcaacuuggucuu

SEQ ID NO: 1028503 - RNA, 21 nt, Human
ccagccugggggacaaagcca

SEQ ID NO: 1028504 - RNA, 19 nt, Human
ccagccuguccucaucuca

SEQ ID NO: 1028505 - RNA, 22 nt, Human
ccaggaggcggagguugcagug

SEQ ID NO: 1028506 - RNA, 20 nt, Human
ccaucgcacuccagccuggg

SEQ ID NO: 1028507 - RNA, 24 nt, Human
ccaucgcacuccagccugggggac

SEQ ID NO: 1028508 - RNA, 24 nt, Human
ccaugcucggcgcggcggcucaca

SEQ ID NO: 1028509 - RNA, 19 nt, Human
ccaugggcuuccauggccu

SEQ ID NO: 1028510 - RNA, 24 nt, Human
cccaacaucucgcuuuagcagccc

SEQ ID NO: 1028511 - RNA, 22 nt, Human
cccacagggcaggacacacuga

SEQ ID NO: 1028512 - RNA, 22 nt, Human
cccagcgggugacaagcuuggg

SEQ ID NO: 1028513 - RNA, 18 nt, Human
cccauacaacagcagaac

SEQ ID NO: 1028514 - RNA, 20 nt, Human
cccaugcacccucagccacg

SEQ ID NO: 1028515 - RNA, 21 nt, Human
cccaugcacccucagccacgg

SEQ ID NO: 1028516 - RNA, 20 nt, Human
cccaugcgccaggagaaaac

SEQ ID NO: 1028517 - RNA, 28 nt, Human
cccaugcgccaggagaaaaccggggucc

SEQ ID NO: 1028518 - RNA, 18 nt, Human
ccccagaggacagccucc

SEQ ID NO: 1028519 - RNA, 22 nt, Human
ccccaggccaacaccuggccuc

SEQ ID NO: 1028520 - RNA, 22 nt, Human
cccccaggccaacaccuggccu

SEQ ID NO: 1028521 - RNA, 19 nt, Human
cccccaucuccccuccacc

SEQ ID NO: 1028522 - RNA, 28 nt, Human
cccccuauuccugcagcccuuccuggac

SEQ ID NO: 1028523 - RNA, 18 nt, Human
cccccuccaucccagcgc

SEQ ID NO: 1028524 - RNA, 19 nt, Human
ccccgcccugcuccccucg

SEQ ID NO: 1028525 - RNA, 21 nt, Human
ccccgcccugcuccccucgcc

SEQ ID NO: 1028526 - RNA, 30 nt, Human
ccccgggcuuuagaaccaaaauaagccccu

SEQ ID NO: 1028527 - RNA, 19 nt, Human
cccgcguccccgccgaggc

SEQ ID NO: 1028528 - RNA, 22 nt, Human
cccuacugucuccgcgaccuug

SEQ ID NO: 1028529 - RNA, 21 nt, Human
cccuccaccgccaccagggcc

SEQ ID NO: 1028530 - RNA, 23 nt, Human
cccugaccuuggccgguuucggc

SEQ ID NO: 1028531 - RNA, 23 nt, Human
cccugcuccccucgccccugcac

SEQ ID NO: 1028532 - RNA, 18 nt, Human
ccgccaccagggccugca

SEQ ID NO: 1028533 - RNA, 21 nt, Human
ccgcccugcuccccucgcccc

SEQ ID NO: 1028534 - RNA, 19 nt, Human
ccgcguccccgccgaggcc

SEQ ID NO: 1028535 - RNA, 20 nt, Human
ccgggcgucaccccgcccug

SEQ ID NO: 1028536 - RNA, 21 nt, Human
ccugcacagcccgaguccagc

SEQ ID NO: 1028537 - RNA, 20 nt, Human
ccugcagcccuuccuggacc

SEQ ID NO: 1028538 - RNA, 18 nt, Human
ccugcccccaucuccccu

SEQ ID NO: 1028539 - RNA, 21 nt, Human
ccugcccccaucuccccucca

SEQ ID NO: 1028540 - RNA, 19 nt, Human
ccuggacaacauagcgaga

SEQ ID NO: 1028541 - RNA, 21 nt, Human
ccuggacccagccuguccuca

SEQ ID NO: 1028542 - RNA, 23 nt, Human
ccuggccaacaugaugaaacccc

SEQ ID NO: 1028543 - RNA, 24 nt, Human
ccuggccaacaugaugaaaccccg

SEQ ID NO: 1028544 - RNA, 18 nt, Human
ccuugccccugacccuuc

SEQ ID NO: 1028545 - RNA, 22 nt, Human
cgaguccagccuggucgcugcc

SEQ ID NO: 1028546 - RNA, 24 nt, Human
cgcaccaguaauccccgcuauuug

SEQ ID NO: 1028547 - RNA, 20 nt, Human
cgcgccuuuaaaccugaagc

SEQ ID NO: 1028548 - RNA, 21 nt, Human
cggaucacgacgucaggaguu

SEQ ID NO: 1028549 - RNA, 19 nt, Human
cggcaacgucccugccccc

SEQ ID NO: 1028550 - RNA, 23 nt, Human
cggcucacacccguaaucccaaa

SEQ ID NO: 1028551 - RNA, 21 nt, Human
cggcugggcuccccgcuuucu

SEQ ID NO: 1028552 - RNA, 19 nt, Human
cgggaggcugaggugggcg

SEQ ID NO: 1028553 - RNA, 24 nt, Human
cgggaggcugaggugggcggauca

SEQ ID NO: 1028554 - RNA, 24 nt, Human
cgugcacagugaacggccugugug

SEQ ID NO: 1028555 - RNA, 24 nt, Human
cgugcacagugaacggccugugug

SEQ ID NO: 1028556 - RNA, 20 nt, Human
cuaaucugcauuauuaacac

SEQ ID NO: 1028557 - RNA, 21 nt, Human
cuagaacccgccuugccccug

SEQ ID NO: 1028558 - RNA, 22 nt, Human
cucacacccguaaucccaaagc

SEQ ID NO: 1028559 - RNA, 19 nt, Human
cucaugccuguaaucccag

SEQ ID NO: 1028560 - RNA, 25 nt, Human
cucaugccuguaaucccagcaccuu

SEQ ID NO: 1028561 - RNA, 19 nt, Human
cuccaagcuuccaccucgg

SEQ ID NO: 1028562 - RNA, 20 nt, Human
cuccaggccgcucuccgggc

SEQ ID NO: 1028563 - RNA, 19 nt, Human
cucccacauggcucccagg

SEQ ID NO: 1028564 - RNA, 21 nt, Human
cuccugcggaccguccaggcu

SEQ ID NO: 1028565 - RNA, 21 nt, Human
cucgcuuuagcagccccccca

SEQ ID NO: 1028566 - RNA, 20 nt, Human
cucuccaggccgcucuccgg

SEQ ID NO: 1028567 - RNA, 23 nt, Human
cucuccaggccgcucuccgggcc

SEQ ID NO: 1028568 - RNA, 19 nt, Human
cucuccaugcaccaacacc

SEQ ID NO: 1028569 - RNA, 20 nt, Human
cugcagcccaccccugggga

SEQ ID NO: 1028570 - RNA, 20 nt, Human
cugcagcccuuccuggaccc

SEQ ID NO: 1028571 - RNA, 18 nt, Human
cuggccuugccacuccca

SEQ ID NO: 1028572 - RNA, 21 nt, Human
cugggcuccccgcuuucuggu

SEQ ID NO: 1028573 - RNA, 24 nt, Human
cugugaccagucccugaccuuggc

SEQ ID NO: 1028574 - RNA, 20 nt, Human
cuguugucacuccccuuggc

SEQ ID NO: 1028575 - RNA, 25 nt, Human
cuucuccaucagucugaguuaaagg

SEQ ID NO: 1028576 - RNA, 19 nt, Human
cuuuucagcaaaaauccug

SEQ ID NO: 1028577 - RNA, 21 nt, Human
gacacagaugcuagugaaugu

SEQ ID NO: 1028578 - RNA, 21 nt, Human
gacagggugcccacgccuucu

SEQ ID NO: 1028579 - RNA, 23 nt, Human
gaccaagugcacacucacccagc

SEQ ID NO: 1028580 - RNA, 21 nt, Human
gacccagccuguccucaucuc

SEQ ID NO: 1028581 - RNA, 21 nt, Human
gacugugguucaccgagugug

SEQ ID NO: 1028582 - RNA, 23 nt, Human
gagaauuguuugaacccaggagg

SEQ ID NO: 1028583 - RNA, 20 nt, Human
gagcaaaggggaccaagugc

SEQ ID NO: 1028584 - RNA, 20 nt, Human
gagcagggccuggacagggg

SEQ ID NO: 1028585 - RNA, 18 nt, Human
gaggaacaggcccucccc

SEQ ID NO: 1028586 - RNA, 21 nt, Human
gaggcggagguugcagugagc

SEQ ID NO: 1028587 - RNA, 22 nt, Human
gaggcugaggugggcggaucac

SEQ ID NO: 1028588 - RNA, 22 nt, Human
gagguugcagugagccgagauc

SEQ ID NO: 1028589 - RNA, 21 nt, Human
gaucacgacgucaggaguuug

SEQ ID NO: 1028590 - RNA, 22 nt, Human
gaucacgacgucaggaguuuga

SEQ ID NO: 1028591 - RNA, 24 nt, Human
gaucacgacgucaggaguuugaga

SEQ ID NO: 1028592 - RNA, 20 nt, Human
gcacagacugggacaggaca

SEQ ID NO: 1028593 - RNA, 19 nt, Human
gcaggacacacugaggucu

SEQ ID NO: 1028594 - RNA, 22 nt, Human
gcaggagaauuguuugaaccca

SEQ ID NO: 1028595 - RNA, 24 nt, Human
gccaacaugaugaaaccccgucuc

SEQ ID NO: 1028596 - RNA, 21 nt, Human
gccacgguccucagaccucaa

SEQ ID NO: 1028597 - RNA, 20 nt, Human
gcccaugcacccucagccaa

SEQ ID NO: 1028598 - RNA, 21 nt, Human
gcccccuauuccugcagcccu

SEQ ID NO: 1028599 - RNA, 18 nt, Human
gccccgggcuuuagaacc

SEQ ID NO: 1028600 - RNA, 19 nt, Human
gcccuggacggcagagcuc

SEQ ID NO: 1028601 - RNA, 23 nt, Human
gccugcguggguggcgcucgcgc

SEQ ID NO: 1028602 - RNA, 22 nt, Human
gccuguggacuucauccauggg

SEQ ID NO: 1028603 - RNA, 23 nt, Human
gcggaucacgacgucaggaguuu

SEQ ID NO: 1028604 - RNA, 22 nt, Human
gcuauuugggaggcugaggcag

SEQ ID NO: 1028605 - RNA, 23 nt, Human
gcucaggugcccccuauuccugc

SEQ ID NO: 1028606 - RNA, 18 nt, Human
gcuccucugagcccuccc

SEQ ID NO: 1028607 - RNA, 23 nt, Human
gcucugguuuguagcacuugcug

SEQ ID NO: 1028608 - RNA, 22 nt, Human
gcuuucugcaggcucaggugcc

SEQ ID NO: 1028609 - RNA, 20 nt, Human
ggacaucccccuccauccca

SEQ ID NO: 1028610 - RNA, 19 nt, Human
ggaccguccaggcugcucu

SEQ ID NO: 1028611 - RNA, 18 nt, Human
ggagguugcagugagccg

SEQ ID NO: 1028612 - RNA, 20 nt, Human
ggagguugcagugagccgag

SEQ ID NO: 1028613 - RNA, 22 nt, Human
ggagguugcagugagccgagau

SEQ ID NO: 1028614 - RNA, 23 nt, Human
ggagguugcagugagccgagauc

SEQ ID NO: 1028615 - RNA, 20 nt, Human
ggaucacgacgucaggaguu

SEQ ID NO: 1028616 - RNA, 22 nt, Human
ggauugcugcugggggcacagg

SEQ ID NO: 1028617 - RNA, 22 nt, Human
ggcagggacuggcaggaggcag

SEQ ID NO: 1028618 - RNA, 23 nt, Human
ggcggaucacgacgucaggaguu

SEQ ID NO: 1028619 - RNA, 20 nt, Human
ggcugcuggccugagcuucc

SEQ ID NO: 1028620 - RNA, 20 nt, Human
gggacaggacaucccccucc

SEQ ID NO: 1028621 - RNA, 19 nt, Human
gggacgccuaagacaggag

SEQ ID NO: 1028622 - RNA, 20 nt, Human
gggaggcugaggugggcgga

SEQ ID NO: 1028623 - RNA, 23 nt, Human
gggaggcugaggugggcggauca

SEQ ID NO: 1028624 - RNA, 23 nt, Human
gggcugucaauucccacuuuuuc

SEQ ID NO: 1028625 - RNA, 18 nt, Human
ggggaccaagugcacacu

SEQ ID NO: 1028626 - RNA, 21 nt, Human
ggggguggggaggaagaggag

SEQ ID NO: 1028627 - RNA, 24 nt, Human
ggucccucaugccuguaaucccag

SEQ ID NO: 1028628 - RNA, 24 nt, Human
gucccugcccccaucuccccucca

SEQ ID NO: 1028629 - RNA, 18 nt, Human
gugaaggucauggcaucu

SEQ ID NO: 1028630 - RNA, 22 nt, Human
uaaaaauaaaacgacuaggagc

SEQ ID NO: 1028631 - RNA, 20 nt, Human
uaaaggacgaacguucccga

SEQ ID NO: 1028632 - RNA, 24 nt, Human
uaaaugccagaagaguucuucaau

SEQ ID NO: 1028633 - RNA, 18 nt, Human
uaacaauuaauaagcaca

SEQ ID NO: 1028634 - RNA, 25 nt, Human
uaacccaacaucucgcuuuagcagg

SEQ ID NO: 1028635 - RNA, 24 nt, Human
uaagacaaaaccaaaacgacaaag

SEQ ID NO: 1028636 - RNA, 19 nt, Human
uaagacaggagacgucucc

SEQ ID NO: 1028637 - RNA, 19 nt, Human
uaagccccgaaaugauugg

SEQ ID NO: 1028638 - RNA, 22 nt, Human
uaagucaugaggacccguuguc

SEQ ID NO: 1028639 - RNA, 22 nt, Human
uaaucccaaagcauuucgggag

SEQ ID NO: 1028640 - RNA, 19 nt, Human
uacaacagcagaacucccc

SEQ ID NO: 1028641 - RNA, 21 nt, Human
uacaacagcagaacuccccag

SEQ ID NO: 1028642 - RNA, 22 nt, Human
uacaacagcagaacuccccaga

SEQ ID NO: 1028643 - RNA, 25 nt, Human
uacaacagcagaacuccccagagga

SEQ ID NO: 1028644 - RNA, 21 nt, Human
uaccaaaaauacaaaaauuag

SEQ ID NO: 1028645 - RNA, 21 nt, Human
uagagcccaaagucccaggga

SEQ ID NO: 1028646 - RNA, 19 nt, Human
uagcacccccaggccaaca

SEQ ID NO: 1028647 - RNA, 24 nt, Human
uagccuggccaacaugaugaaacc

SEQ ID NO: 1028648 - RNA, 20 nt, Human
uagcugggugugguggcacg

SEQ ID NO: 1028649 - RNA, 22 nt, Human
uaugaccaauugauucucgcag

SEQ ID NO: 1028650 - RNA, 22 nt, Human
uauuauuagguccagaacacug

SEQ ID NO: 1028651 - RNA, 24 nt, Human
ucacgacgucaggaguuugagacu

SEQ ID NO: 1028652 - RNA, 18 nt, Human
ucacuccccuuggccgcu

SEQ ID NO: 1028653 - RNA, 22 nt, Human
ucaugccuguaaucccagcacc

SEQ ID NO: 1028654 - RNA, 19 nt, Human
uccaagacgacagccucac

SEQ ID NO: 1028655 - RNA, 21 nt, Human
uccagaauccauuaacugcuc

SEQ ID NO: 1028656 - RNA, 23 nt, Human
uccaugcaccaacaccuggccuc

SEQ ID NO: 1028657 - RNA, 18 nt, Human
ucccacauggcucccagg

SEQ ID NO: 1028658 - RNA, 21 nt, Human
ucccagaguucuccagaaaaa

SEQ ID NO: 1028659 - RNA, 22 nt, Human
uccccagauggcaacuuggucu

SEQ ID NO: 1028660 - RNA, 21 nt, Human
ucccgcguccccgccgaggcc

SEQ ID NO: 1028661 - RNA, 24 nt, Human
ucccucaugccuguaaucccagca

SEQ ID NO: 1028662 - RNA, 24 nt, Human
ucccugaucaaaguccucaacucu

SEQ ID NO: 1028663 - RNA, 21 nt, Human
ucccugugaccagucccugac

SEQ ID NO: 1028664 - RNA, 21 nt, Human
uccgcgaccuuggggguucac

SEQ ID NO: 1028665 - RNA, 18 nt, Human
uccucaacucccacccuc

SEQ ID NO: 1028666 - RNA, 19 nt, Human
uccugcagcccuuccugga

SEQ ID NO: 1028667 - RNA, 25 nt, Human
ucgggaggcugaggugggcggauca

SEQ ID NO: 1028668 - RNA, 18 nt, Human
ucuauuagccgggacuga

SEQ ID NO: 1028669 - RNA, 24 nt, Human
ucuccaugcaccaacaccuggccu

SEQ ID NO: 1028670 - RNA, 23 nt, Human
ucugcaggcucaggugcccccua

SEQ ID NO: 1028671 - RNA, 19 nt, Human
ucuggacugugguucaccg

SEQ ID NO: 1028672 - RNA, 20 nt, Human
ucuggcggcugggcuccccg

SEQ ID NO: 1028673 - RNA, 19 nt, Human
ucuuggacuucccaguccc

SEQ ID NO: 1028674 - RNA, 23 nt, Human
ugaaagccuuucuguuccccaga

SEQ ID NO: 1028675 - RNA, 19 nt, Human
ugaagcacgcgcucuccag

SEQ ID NO: 1028676 - RNA, 20 nt, Human
ugacacagacagaacccaua

SEQ ID NO: 1028677 - RNA, 21 nt, Human
ugacacagacagaacccauac

SEQ ID NO: 1028678 - RNA, 21 nt, Human
ugagacuagccuggccaacau

SEQ ID NO: 1028679 - RNA, 23 nt, Human
ugagacuagccuggccaacauga

SEQ ID NO: 1028680 - RNA, 19 nt, Human
ugagagaugauugucuguu

SEQ ID NO: 1028681 - RNA, 20 nt, Human
ugagccgagauccugccauc

SEQ ID NO: 1028682 - RNA, 22 nt, Human
ugagccgagauccugccaucgc

SEQ ID NO: 1028683 - RNA, 22 nt, Human
ugagccggaucugccuccccua

SEQ ID NO: 1028684 - RNA, 24 nt, Human
ugaggcaggagaauuguuugaacc

SEQ ID NO: 1028685 - RNA, 25 nt, Human
ugaggcaggagaauuguuugaaccc

SEQ ID NO: 1028686 - RNA, 22 nt, Human
ugaggugggcggaucacgacgu

SEQ ID NO: 1028687 - RNA, 24 nt, Human
ugaggugggcggaucacgacguca

SEQ ID NO: 1028688 - RNA, 22 nt, Human
ugaguaagucaugaggacccgu

SEQ ID NO: 1028689 - RNA, 22 nt, Human
ugaguagaggcaccagagggug

SEQ ID NO: 1028690 - RNA, 18 nt, Human
ugaguuaaaggccagcuc

SEQ ID NO: 1028691 - RNA, 19 nt, Human
ugaucucguuugucaguga

SEQ ID NO: 1028692 - RNA, 21 nt, Human
ugaucucguuugucagugacu

SEQ ID NO: 1028693 - RNA, 20 nt, Human
ugauguagccacgauggcca

SEQ ID NO: 1028694 - RNA, 20 nt, Human
ugcaauggcuucaacacuuu

SEQ ID NO: 1028695 - RNA, 19 nt, Human
ugcacgugggccucggagg

SEQ ID NO: 1028696 - RNA, 24 nt, Human
ugccccgggcuuuagaaccaaaau

SEQ ID NO: 1028697 - RNA, 22 nt, Human
ugcccggcaacgucccugcccc

SEQ ID NO: 1028698 - RNA, 21 nt, Human
ugccuguaaucccagcaccuu

SEQ ID NO: 1028699 - RNA, 23 nt, Human
ugccuguaaucccagcaccuugg

SEQ ID NO: 1028700 - RNA, 24 nt, Human
ugccuguaaucccagcaccuuggg

SEQ ID NO: 1028701 - RNA, 22 nt, Human
ugccuucagaccagggugagaa

SEQ ID NO: 1028702 - RNA, 23 nt, Human
ugcgccaggagaaaaccuaaagg

SEQ ID NO: 1028703 - RNA, 22 nt, Human
ugcggaccguccaggcugcucu

SEQ ID NO: 1028704 - RNA, 24 nt, Human
ugcugagucgguuuagugaaaauc

SEQ ID NO: 1028705 - RNA, 24 nt, Human
uggaaaaaaaaaaucugugacaau

SEQ ID NO: 1028706 - RNA, 24 nt, Human
uggacuucccaguccccauaaaug

SEQ ID NO: 1028707 - RNA, 21 nt, Human
uggccucuggcuuccaguccu

SEQ ID NO: 1028708 - RNA, 23 nt, Human
uggccuguggacuucauccaugg

SEQ ID NO: 1028709 - RNA, 19 nt, Human
uggcucccaggaauccccc

SEQ ID NO: 1028710 - RNA, 20 nt, Human
uggcucccaggaauccccca

SEQ ID NO: 1028711 - RNA, 18 nt, Human
uggcuuggaaaaaaaaaa

SEQ ID NO: 1028712 - RNA, 19 nt, Human
uggcuuggaaaaaaaaaau

SEQ ID NO: 1028713 - RNA, 19 nt, Human
ugggaggcugaggcagcag

SEQ ID NO: 1028714 - RNA, 19 nt, Human
ugggaggcugaggcagcag

SEQ ID NO: 1028715 - RNA, 21 nt, Human
ugggaggcugaggcagcaguu

SEQ ID NO: 1028716 - RNA, 24 nt, Human
ugggaggcugaggcagcaguuuga

SEQ ID NO: 1028717 - RNA, 19 nt, Human
ugggaggcugaggcaggag

SEQ ID NO: 1028718 - RNA, 22 nt, Human
ugggaggcugaggcaggagaau

SEQ ID NO: 1028719 - RNA, 22 nt, Human
ugggcggaucacgacgucagga

SEQ ID NO: 1028720 - RNA, 21 nt, Human
uggggguggggaggaagagga

SEQ ID NO: 1028721 - RNA, 20 nt, Human
uggggguggggcuuuccgag

SEQ ID NO: 1028722 - RNA, 19 nt, Human
ugggugucagcggggcugg

SEQ ID NO: 1028723 - RNA, 20 nt, Human
ugggugucagcggggcuggg

SEQ ID NO: 1028724 - RNA, 22 nt, Human
ugggugugguggcacgcaccag

SEQ ID NO: 1028725 - RNA, 24 nt, Human
uggucccucaugccuguaauccca

SEQ ID NO: 1028726 - RNA, 25 nt, Human
ugucagugacuucucuggucugagg

SEQ ID NO: 1028727 - RNA, 21 nt, Human
ugucguggaaggcuugagugc

SEQ ID NO: 1028728 - RNA, 22 nt, Human
ugucucggggugaaggucucac

SEQ ID NO: 1028729 - RNA, 22 nt, Human
ugugccugcguggguggcgcuc

SEQ ID NO: 1028730 - RNA, 20 nt, Human
uuacagcagccaaacuucuc

SEQ ID NO: 1028731 - RNA, 18 nt, Human
uuagcugggugugguggc

SEQ ID NO: 1028732 - RNA, 20 nt, Human
uuagcugggugugguggcac

SEQ ID NO: 1028733 - RNA, 22 nt, Human
uuagcugggugugguggcacgc

SEQ ID NO: 1028734 - RNA, 24 nt, Human
uugaacccaggaggcggagguugc

SEQ ID NO: 1028735 - RNA, 19 nt, Human
uugcagugagccgagaucc

SEQ ID NO: 1028736 - RNA, 21 nt, Human
uugcagugagccgagaucccc

SEQ ID NO: 1028737 - RNA, 21 nt, Human
uugcagugagccgagauccug

SEQ ID NO: 1028738 - RNA, 22 nt, Human
uugcagugagccgagauccugc

SEQ ID NO: 1028739 - RNA, 23 nt, Human
uugcagugagccgagauccugcc

SEQ ID NO: 1028740 - RNA, 23 nt, Human
uugcccccaaagaaacgugcaua

SEQ ID NO: 1028741 - RNA, 19 nt, Human
uugcugcugggggcacagg

SEQ ID NO: 1028742 - RNA, 21 nt, Human
uugcuguucacagugcaaugg

SEQ ID NO: 1028743 - RNA, 23 nt, Human
uugggaggcugaggcaggagaau

SEQ ID NO: 1028744 - RNA, 21 nt, Human
uugguaguuuuccagcccucu

SEQ ID NO: 1028745 - RNA, 24 nt, Human
uuguuugaacccaggaggcggagg

SEQ ID NO: 1028746 - RNA, 19 nt, Human
uuugcuguugcccuacugu

SEQ ID NO: 1028747 - RNA, 24 nt, Human
aacuuccagccacccuccccaucg

SEQ ID NO: 1028748 - RNA, 20 nt, Human
acccuggaguccaccagggc

SEQ ID NO: 1028749 - RNA, 21 nt, Human
acuuccagccacccuccccau

SEQ ID NO: 1028750 - RNA, 22 nt, Human
cacccuggaguccaccagggcc

SEQ ID NO: 1028751 - RNA, 26 nt, Human
cacugaguccggguagaucaccuggu

SEQ ID NO: 1028752 - RNA, 19 nt, Human
cagagcuccuggaggugcc

SEQ ID NO: 1028753 - RNA, 18 nt, Human
ccaccagggccuugcagg

SEQ ID NO: 1028754 - RNA, 24 nt, Human
ccagcugcugcuccagccgcugcu

SEQ ID NO: 1028755 - RNA, 19 nt, Human
cccaggauuuggcagagcu

SEQ ID NO: 1028756 - RNA, 20 nt, Human
ccggguagaucaccugguca

SEQ ID NO: 1028757 - RNA, 21 nt, Human
cgaacuuccagccacccuccc

SEQ ID NO: 1028758 - RNA, 19 nt, Human
cgcccaggauuuggcagag

SEQ ID NO: 1028759 - RNA, 18 nt, Human
gaacuuccagccacccuc

SEQ ID NO: 1028760 - RNA, 19 nt, Human
gaguccagcuucucgaacu

SEQ ID NO: 1028761 - RNA, 18 nt, Human
gcagcugaguccagcuuc

SEQ ID NO: 1028762 - RNA, 20 nt, Human
gcuccagccgcugcuucucc

SEQ ID NO: 1028763 - RNA, 20 nt, Human
ggaguccaccagggccuugc

SEQ ID NO: 1028764 - RNA, 21 nt, Human
ucaggcucaggugggcagcug

SEQ ID NO: 1028765 - RNA, 19 nt, Human
ucaggugggcagcugaguc

SEQ ID NO: 1028766 - RNA, 21 nt, Human
ucucgaacuuccagccacccu

SEQ ID NO: 1028767 - RNA, 22 nt, Human
ucucgaacuuccagccacccuc

SEQ ID NO: 1028768 - RNA, 24 nt, Human
ucucgaacuuccagccacccuccc

SEQ ID NO: 1028769 - RNA, 22 nt, Human
ugaguccagcuucucgaacuuc

SEQ ID NO: 1028770 - RNA, 18 nt, Human
uggcagagcuccuggagg

SEQ ID NO: 1028771 - RNA, 18 nt, Human
ugggcagcugaguccagc

SEQ ID NO: 1028772 - RNA, 18 nt, Human
uugcaggcuaggugccgg

SEQ ID NO: 1028773 - RNA, 22 nt, Human
aaaacauuagagugaggaaguc

SEQ ID NO: 1028774 - RNA, 21 nt, Human
aaacaacaccgugguuacuga

SEQ ID NO: 1028775 - RNA, 24 nt, Human
aaacaacauagauuuaucuuggcc

SEQ ID NO: 1028776 - RNA, 19 nt, Human
aaaggacaacaguucuaca

SEQ ID NO: 1028777 - RNA, 28 nt, Human
aacucaccuacuuaauccuacccuccug

SEQ ID NO: 1028778 - RNA, 19 nt, Human
aagaacaggggaaacugag

SEQ ID NO: 1028779 - RNA, 19 nt, Human
acaccuguuuuucaguaac

SEQ ID NO: 1028780 - RNA, 23 nt, Human
acccugcucaccccucccgggcc

SEQ ID NO: 1028781 - RNA, 21 nt, Human
agagaugagauaacacugcca

SEQ ID NO: 1028782 - RNA, 24 nt, Human
agcugaauaguuuuacuacccaau

SEQ ID NO: 1028783 - RNA, 22 nt, Human
aggaaagagauaaugaucuacu

SEQ ID NO: 1028784 - RNA, 20 nt, Human
aggcagguggcuucuuagga

SEQ ID NO: 1028785 - RNA, 20 nt, Human
agucaccaagaaacagugaa

SEQ ID NO: 1028786 - RNA, 23 nt, Human
auaagacaaaaaaucaggccuuu

SEQ ID NO: 1028787 - RNA, 19 nt, Human
aucugggugcaugcauggu

SEQ ID NO: 1028788 - RNA, 20 nt, Human
augaaaaucaaaauaggcag

SEQ ID NO: 1028789 - RNA, 26 nt, Human
augugaaacacagaaagaaaagagac

SEQ ID NO: 1028790 - RNA, 24 nt, Human
caaacuacaaaugacuuuagcuga

SEQ ID NO: 1028791 - RNA, 22 nt, Human
caauucuguacaaaaaugggau

SEQ ID NO: 1028792 - RNA, 21 nt, Human
cacagaaagaaaagagacuac

SEQ ID NO: 1028793 - RNA, 23 nt, Human
cacagaaagaaaagagacuacau

SEQ ID NO: 1028794 - RNA, 21 nt, Human
caccaagaaacagugaagcag

SEQ ID NO: 1028795 - RNA, 21 nt, Human
cagccagcggcacccugcuca

SEQ ID NO: 1028796 - RNA, 24 nt, Human
cagcggcacccugcucaccccucc

SEQ ID NO: 1028797 - RNA, 19 nt, Human
cauuuacucuuaccuaggg

SEQ ID NO: 1028798 - RNA, 20 nt, Human
ccaggacagcggcagaaaca

SEQ ID NO: 1028799 - RNA, 20 nt, Human
ccccagcagccagcggcacc

SEQ ID NO: 1028800 - RNA, 21 nt, Human
cccugcucaccccucccgggc

SEQ ID NO: 1028801 - RNA, 24 nt, Human
ccucccgggccacccugcgccggc

SEQ ID NO: 1028802 - RNA, 18 nt, Human
ccugcagaccccagcagc

SEQ ID NO: 1028803 - RNA, 21 nt, Human
ccugcagaccccagcagccag

SEQ ID NO: 1028804 - RNA, 19 nt, Human
cuacauccaugcccaagaa

SEQ ID NO: 1028805 - RNA, 23 nt, Human
cuccaaaggccagaaaaucagcc

SEQ ID NO: 1028806 - RNA, 18 nt, Human
cugccggguaaacacagg

SEQ ID NO: 1028807 - RNA, 20 nt, Human
cuuacagaaaaaaaagccau

SEQ ID NO: 1028808 - RNA, 25 nt, Human
cuuggcccaauucuauaaagauugg

SEQ ID NO: 1028809 - RNA, 22 nt, Human
gacaauugggguuaaggagaga

SEQ ID NO: 1028810 - RNA, 23 nt, Human
gcagaccccagcagccagcggca

SEQ ID NO: 1028811 - RNA, 22 nt, Human
gcucaccccucccgggccaccc

SEQ ID NO: 1028812 - RNA, 20 nt, Human
ggaaacugagcuuauaaagg

SEQ ID NO: 1028813 - RNA, 18 nt, Human
ggaacugguggugugggc

SEQ ID NO: 1028814 - RNA, 18 nt, Human
ggaagaguaaucaacuac

SEQ ID NO: 1028815 - RNA, 21 nt, Human
gggcagguggggcaaacuaca

SEQ ID NO: 1028816 - RNA, 19 nt, Human
ggugaguuucauucucuag

SEQ ID NO: 1028817 - RNA, 18 nt, Human
guuacugaaauggcacca

SEQ ID NO: 1028818 - RNA, 24 nt, Human
uaaaacaacaccgugguuacugaa

SEQ ID NO: 1028819 - RNA, 18 nt, Human
uaaacacaggcagguggc

SEQ ID NO: 1028820 - RNA, 20 nt, Human
uaaaccauaucuccauagcc

SEQ ID NO: 1028821 - RNA, 23 nt, Human
uaaaggcaucuaaaacaacaccg

SEQ ID NO: 1028822 - RNA, 22 nt, Human
uaagcacauguaauacugaaaa

SEQ ID NO: 1028823 - RNA, 20 nt, Human
uaagcuccuuauccacgacc

SEQ ID NO: 1028824 - RNA, 21 nt, Human
uacagaaaaaaaagccauaug

SEQ ID NO: 1028825 - RNA, 18 nt, Human
uaccugaaaccaaauugu

SEQ ID NO: 1028826 - RNA, 22 nt, Human
uaccugaaaccaaauuguggaa

SEQ ID NO: 1028827 - RNA, 23 nt, Human
uagggcaggaaaccugaauaagc

SEQ ID NO: 1028828 - RNA, 21 nt, Human
uaugcagaaaaucuacacuau

SEQ ID NO: 1028829 - RNA, 21 nt, Human
uauuuugcauuuuucuaguuu

SEQ ID NO: 1028830 - RNA, 26 nt, Human
ucaaauguaaaacucaaaugggcuuc

SEQ ID NO: 1028831 - RNA, 25 nt, Human
ucaauucuguacaaaaaugggaucc

SEQ ID NO: 1028832 - RNA, 18 nt, Human
ucagagagggacuagauc

SEQ ID NO: 1028833 - RNA, 20 nt, Human
ucaggaacuggugguguggg

SEQ ID NO: 1028834 - RNA, 22 nt, Human
uccaaaggccagaaaaucagcc

SEQ ID NO: 1028835 - RNA, 20 nt, Human
uccagcaugugaaguggagc

SEQ ID NO: 1028836 - RNA, 22 nt, Human
uccaggacagcggcagaaacac

SEQ ID NO: 1028837 - RNA, 24 nt, Human
uccauagccaaugcagaccggggc

SEQ ID NO: 1028838 - RNA, 23 nt, Human
uccuacccuccugucuaaaaacc

SEQ ID NO: 1028839 - RNA, 22 nt, Human
uccugagcgcugccaggaguuc

SEQ ID NO: 1028840 - RNA, 24 nt, Human
ucgcgaggcgcaacggccuuuccu

SEQ ID NO: 1028841 - RNA, 24 nt, Human
ucuauuaccaagccuaccugaaac

SEQ ID NO: 1028842 - RNA, 25 nt, Human
ucuccaaaggccagaaaaucagccu

SEQ ID NO: 1028843 - RNA, 22 nt, Human
ucuccauagccaaugcagacuu

SEQ ID NO: 1028844 - RNA, 23 nt, Human
ugaaaacuuacagaaaaaaaagc

SEQ ID NO: 1028845 - RNA, 20 nt, Human
ugaacagugacauuuuaggu

SEQ ID NO: 1028846 - RNA, 20 nt, Human
ugaagcaguuccauuauugc

SEQ ID NO: 1028847 - RNA, 19 nt, Human
ugaauaguuuuacuaccca

SEQ ID NO: 1028848 - RNA, 19 nt, Human
ugaaugugaaacacagaaa

SEQ ID NO: 1028849 - RNA, 21 nt, Human
ugaccugcagaccccagcagc

SEQ ID NO: 1028850 - RNA, 22 nt, Human
ugaccugcagaccccagcagcc

SEQ ID NO: 1028851 - RNA, 23 nt, Human
ugaccugcagaccccagcagcca

SEQ ID NO: 1028852 - RNA, 19 nt, Human
ugagauaacacugccaugg

SEQ ID NO: 1028853 - RNA, 22 nt, Human
ugagauuaagcacauguaauac

SEQ ID NO: 1028854 - RNA, 21 nt, Human
ugcagaaaaucuacacuauuu

SEQ ID NO: 1028855 - RNA, 20 nt, Human
ugccauggugaaaugguuca

SEQ ID NO: 1028856 - RNA, 23 nt, Human
ugccauggugaaaugguucaucu

SEQ ID NO: 1028857 - RNA, 23 nt, Human
ugcuaugaaugugaaacacagaa

SEQ ID NO: 1028858 - RNA, 24 nt, Human
uggaaucaaauguaaaacucaaau

SEQ ID NO: 1028859 - RNA, 21 nt, Human
uggcuucuuaggaguccccuu

SEQ ID NO: 1028860 - RNA, 20 nt, Human
uguuagaacacuggcuaauu

SEQ ID NO: 1028861 - RNA, 20 nt, Human
uguuagcugcaguugcuaug

SEQ ID NO: 1028862 - RNA, 24 nt, Human
uuaaagacaguauucaacacuuaa

SEQ ID NO: 1028863 - RNA, 19 nt, Human
uuaagcacauguaauacug

SEQ ID NO: 1028864 - RNA, 19 nt, Human
uuagagugaggaagucacc

SEQ ID NO: 1028865 - RNA, 21 nt, Human
uuaggaguccccucuccuggg

SEQ ID NO: 1028866 - RNA, 22 nt, Human
uuaguuggaauaagacaaaaaa

SEQ ID NO: 1028867 - RNA, 20 nt, Human
uugaacagugacauuuuagg

SEQ ID NO: 1028868 - RNA, 22 nt, Human
uuggaauaagacaaaaaaucag

SEQ ID NO: 1028869 - RNA, 19 nt, Human
uuuaaagacaguauucaac

SEQ ID NO: 1028870 - RNA, 21 nt, Human
uuugcauuuuucuaguuuaaa

SEQ ID NO: 1028871 - RNA, 23 nt, Human
aaaaugcuaggauuacaggcgug

SEQ ID NO: 1028872 - RNA, 24 nt, Human
aaaaugcuaggauuacaggcguga

SEQ ID NO: 1028873 - RNA, 26 nt, Human
aaaugcuaggauuacaggcgugagcc

SEQ ID NO: 1028874 - RNA, 22 nt, Human
aaccccugaccucaggugaucc

SEQ ID NO: 1028875 - RNA, 19 nt, Human
aacuccuggccaaguuucu

SEQ ID NO: 1028876 - RNA, 19 nt, Human
aagcauccaccucacucau

SEQ ID NO: 1028877 - RNA, 18 nt, Human
acaggguuucaccauguu

SEQ ID NO: 1028878 - RNA, 23 nt, Human
acaggguuucaccauguuggcca

SEQ ID NO: 1028879 - RNA, 24 nt, Human
acaggguuucaccauguuggccag

SEQ ID NO: 1028880 - RNA, 23 nt, Human
accaggugggcuaaggcugggac

SEQ ID NO: 1028881 - RNA, 24 nt, Human
accauguuggccaggcuggucucg

SEQ ID NO: 1028882 - RNA, 19 nt, Human
accccuacuucacaggaua

SEQ ID NO: 1028883 - RNA, 21 nt, Human
acccggcggggcaccgagggc

SEQ ID NO: 1028884 - RNA, 26 nt, Human
acuccaaaauccaggaagcaugacug

SEQ ID NO: 1028885 - RNA, 25 nt, Human
acucuguugcccaggcuggagugca

SEQ ID NO: 1028886 - RNA, 23 nt, Human
agaaagccucgacuccaaaaucc

SEQ ID NO: 1028887 - RNA, 18 nt, Human
aggcuggagugcaguggc

SEQ ID NO: 1028888 - RNA, 24 nt, Human
aggugauccacuguccuuggccuc

SEQ ID NO: 1028889 - RNA, 19 nt, Human
aguaacugggauuacaggc

SEQ ID NO: 1028890 - RNA, 20 nt, Human
aguaacugggauuacaggca

SEQ ID NO: 1028891 - RNA, 21 nt, Human
aguaacugggauuacaggcau

SEQ ID NO: 1028892 - RNA, 22 nt, Human
aguagagacaggguuucaccau

SEQ ID NO: 1028893 - RNA, 23 nt, Human
agugcaguggcgcagucuuggcu

SEQ ID NO: 1028894 - RNA, 24 nt, Human
agugcaguggcgcagucuuggcuc

SEQ ID NO: 1028895 - RNA, 22 nt, Human
caagcaauucuccugccuuagc

SEQ ID NO: 1028896 - RNA, 24 nt, Human
caaguuucucucucucgaagccuc

SEQ ID NO: 1028897 - RNA, 22 nt, Human
caccaccacgccuggcuaauuu

SEQ ID NO: 1028898 - RNA, 24 nt, Human
caccacgccuggcuaauuuuugua

SEQ ID NO: 1028899 - RNA, 18 nt, Human
caccaggugggcuaaggc

SEQ ID NO: 1028900 - RNA, 21 nt, Human
caccauguuggccaggcuggu

SEQ ID NO: 1028901 - RNA, 24 nt, Human
caccauguuggccaggcuggucuc

SEQ ID NO: 1028902 - RNA, 27 nt, Human
caccauguuggccaggcuggucucgaa

SEQ ID NO: 1028903 - RNA, 25 nt, Human
cacuccccaucccaccaggugggcu

SEQ ID NO: 1028904 - RNA, 24 nt, Human
cacucuguugcccaggcuggagug

SEQ ID NO: 1028905 - RNA, 18 nt, Human
cacugcaaucucugccuc

SEQ ID NO: 1028906 - RNA, 24 nt, Human
caggguuucaccauguuggccagg

SEQ ID NO: 1028907 - RNA, 23 nt, Human
caugcaccaccacgccuggcuaa

SEQ ID NO: 1028908 - RNA, 24 nt, Human
cauguuggccaggcuggucucgaa

SEQ ID NO: 1028909 - RNA, 28 nt, Human
ccaaguuucucucucucgaagccuccuu

SEQ ID NO: 1028910 - RNA, 23 nt, Human
cccaccacauuccgguaaaagga

SEQ ID NO: 1028911 - RNA, 22 nt, Human
cccaggcuggagugcaguggcg

SEQ ID NO: 1028912 - RNA, 23 nt, Human
cccagguucaagcaauucuccug

SEQ ID NO: 1028913 - RNA, 19 nt, Human
cccuucugucauuuguccu

SEQ ID NO: 1028914 - RNA, 24 nt, Human
ccucccagguucaagcaauucucc

SEQ ID NO: 1028915 - RNA, 20 nt, Human
ccugaccucaggugauccac

SEQ ID NO: 1028916 - RNA, 22 nt, Human
ccugaccucaggugauccacug

SEQ ID NO: 1028917 - RNA, 23 nt, Human
ccugaccucaggugauccacugu

SEQ ID NO: 1028918 - RNA, 23 nt, Human
ccugccuuagccucuggaguaac

SEQ ID NO: 1028919 - RNA, 19 nt, Human
ccuggccaucagaacuuuc

SEQ ID NO: 1028920 - RNA, 24 nt, Human
ccuggccaucagaacuuucuuuuc

SEQ ID NO: 1028921 - RNA, 23 nt, Human
ccuucugucauuuguccuccaga

SEQ ID NO: 1028922 - RNA, 24 nt, Human
cggggcaccgagggcgucggaccg

SEQ ID NO: 1028923 - RNA, 23 nt, Human
cgugagccaccaugccuggccau

SEQ ID NO: 1028924 - RNA, 24 nt, Human
cucacucuguugcccaggcuggag

SEQ ID NO: 1028925 - RNA, 18 nt, Human
cucacugcaaucucugcc

SEQ ID NO: 1028926 - RNA, 24 nt, Human
cucacugcaaucucugccucccag

SEQ ID NO: 1028927 - RNA, 18 nt, Human
cuccaaaauccaggaagc

SEQ ID NO: 1028928 - RNA, 19 nt, Human
cucgaaccccugaccucag

SEQ ID NO: 1028929 - RNA, 24 nt, Human
cugcaaucucugccucccagguuc

SEQ ID NO: 1028930 - RNA, 24 nt, Human
cuggaguaacugggauuacaggca

SEQ ID NO: 1028931 - RNA, 21 nt, Human
cuggugccagucuuggaugug

SEQ ID NO: 1028932 - RNA, 21 nt, Human
cuuggccuccaaaaaugcuag

SEQ ID NO: 1028933 - RNA, 23 nt, Human
gaccucaggugauccacuguccu

SEQ ID NO: 1028934 - RNA, 22 nt, Human
gaguaacugggauuacaggcau

SEQ ID NO: 1028935 - RNA, 24 nt, Human
gaguaacugggauuacaggcaugc

SEQ ID NO: 1028936 - RNA, 18 nt, Human
gaugcacccggcggggca

SEQ ID NO: 1028937 - RNA, 18 nt, Human
gauuacaggcgugagcca

SEQ ID NO: 1028938 - RNA, 21 nt, Human
gauuacaggcgugagccacca

SEQ ID NO: 1028939 - RNA, 24 nt, Human
gauuacaggcgugagccaccaugc

SEQ ID NO: 1028940 - RNA, 21 nt, Human
gcucacugcaaucucugccuc

SEQ ID NO: 1028941 - RNA, 19 nt, Human
gcuggagugcaguggcgca

SEQ ID NO: 1028942 - RNA, 23 nt, Human
gcuggucucgaaccccugaccuc

SEQ ID NO: 1028943 - RNA, 22 nt, Human
ggaggggcauggggaggagacu

SEQ ID NO: 1028944 - RNA, 22 nt, Human
ggauuacaggcgugagccacca

SEQ ID NO: 1028945 - RNA, 24 nt, Human
ggauuacaggcgugagccaccaug

SEQ ID NO: 1028946 - RNA, 22 nt, Human
ggcggggcaccgagggcgucgg

SEQ ID NO: 1028947 - RNA, 22 nt, Human
ggguuucaccauguuggccagg

SEQ ID NO: 1028948 - RNA, 19 nt, Human
ggucucgaaccccugaccu

SEQ ID NO: 1028949 - RNA, 18 nt, Human
ggugauccacuguccuug

SEQ ID NO: 1028950 - RNA, 20 nt, Human
guaacugggauuacaggcau

SEQ ID NO: 1028951 - RNA, 22 nt, Human
guccuuggccuccaaaaaugcu

SEQ ID NO: 1028952 - RNA, 18 nt, Human
uaaaaggaccuggugaug

SEQ ID NO: 1028953 - RNA, 20 nt, Human
uaaagggacuaaacuagaug

SEQ ID NO: 1028954 - RNA, 24 nt, Human
uaauuuuuguauuuuuaguagaga

SEQ ID NO: 1028955 - RNA, 22 nt, Human
uacaggcaugcaccaccacgcc

SEQ ID NO: 1028956 - RNA, 22 nt, Human
uacaggcgugagccaccaugcc

SEQ ID NO: 1028957 - RNA, 23 nt, Human
uacaggcgugagccaccaugccu

SEQ ID NO: 1028958 - RNA, 24 nt, Human
uagaaagccucgacuccaaaaucc

SEQ ID NO: 1028959 - RNA, 22 nt, Human
uagagacaggguuucaccaugu

SEQ ID NO: 1028960 - RNA, 18 nt, Human
uaggauuacaggcgugag

SEQ ID NO: 1028961 - RNA, 22 nt, Human
uaggauuacaggcgugagccac

SEQ ID NO: 1028962 - RNA, 24 nt, Human
uaggauuacaggcgugagccacca

SEQ ID NO: 1028963 - RNA, 25 nt, Human
uaggauuacaggcgugagccaccau

SEQ ID NO: 1028964 - RNA, 24 nt, Human
uaguagagacaggguuucaccaug

SEQ ID NO: 1028965 - RNA, 26 nt, Human
uaguagagacaggguuucaccauguu

SEQ ID NO: 1028966 - RNA, 24 nt, Human
ucacaucaaagaccagcaggacac

SEQ ID NO: 1028967 - RNA, 24 nt, Human
ucacucuguugcccaggcuggagu

SEQ ID NO: 1028968 - RNA, 19 nt, Human
ucacugcaaucucugccuc

SEQ ID NO: 1028969 - RNA, 24 nt, Human
ucacugcaaucucugccucccagg

SEQ ID NO: 1028970 - RNA, 25 nt, Human
ucacugcaaucucugccucccaggu

SEQ ID NO: 1028971 - RNA, 21 nt, Human
ucccagguucaagcaauucuc

SEQ ID NO: 1028972 - RNA, 24 nt, Human
ucccagguucaagcaauucuccug

SEQ ID NO: 1028973 - RNA, 23 nt, Human
ucucacucuguugcccaggcugg

SEQ ID NO: 1028974 - RNA, 24 nt, Human
ucucacucuguugcccaggcugga

SEQ ID NO: 1028975 - RNA, 26 nt, Human
ucucacucuguugcccaggcuggagu

SEQ ID NO: 1028976 - RNA, 27 nt, Human
ucucacucuguugcccaggcuggagug

SEQ ID NO: 1028977 - RNA, 23 nt, Human
ucuccugccuuagccucuggagu

SEQ ID NO: 1028978 - RNA, 24 nt, Human
ucuggaguaacugggauuacaggc

SEQ ID NO: 1028979 - RNA, 18 nt, Human
ucuguugcccaggcugga

SEQ ID NO: 1028980 - RNA, 24 nt, Human
ucuguugcccaggcuggagugcag

SEQ ID NO: 1028981 - RNA, 20 nt, Human
ugaagugaggaggggcaugg

SEQ ID NO: 1028982 - RNA, 19 nt, Human
ugaccucaggugauccacu

SEQ ID NO: 1028983 - RNA, 22 nt, Human
ugaccucaggugauccacuguc

SEQ ID NO: 1028984 - RNA, 23 nt, Human
ugcaaucucugccucccagguuc

SEQ ID NO: 1028985 - RNA, 22 nt, Human
ugcaguggcgcagucuuggcuc

SEQ ID NO: 1028986 - RNA, 18 nt, Human
ugcccaggcuggagugca

SEQ ID NO: 1028987 - RNA, 21 nt, Human
ugcccaggcuggagugcagug

SEQ ID NO: 1028988 - RNA, 22 nt, Human
ugcccaggcuggagugcagugg

SEQ ID NO: 1028989 - RNA, 21 nt, Human
ugccuuagccucuggaguaac

SEQ ID NO: 1028990 - RNA, 24 nt, Human
ugcuaggauuacaggcgugagcca

SEQ ID NO: 1028991 - RNA, 24 nt, Human
uggaguaacugggauuacaggcau

SEQ ID NO: 1028992 - RNA, 28 nt, Human
uggagugcaguggcgcaguccuagcacg

SEQ ID NO: 1028993 - RNA, 23 nt, Human
uggagugcaguggcgcagucuug

SEQ ID NO: 1028994 - RNA, 24 nt, Human
uggagugcaguggcgcagucuugg

SEQ ID NO: 1028995 - RNA, 24 nt, Human
uggccaggcuggucucgaaccccu

SEQ ID NO: 1028996 - RNA, 21 nt, Human
uggcucacugcaaucucugcc

SEQ ID NO: 1028997 - RNA, 21 nt, Human
ugggauuacaggcaugcacca

SEQ ID NO: 1028998 - RNA, 24 nt, Human
ugggauuacaggcaugcaccacca

SEQ ID NO: 1028999 - RNA, 20 nt, Human
uggggaggagacuaacagcg

SEQ ID NO: 1029000 - RNA, 20 nt, Human
uguccuuggccuccaaaaau

SEQ ID NO: 1029001 - RNA, 23 nt, Human
uguguucaaaggacuuccuguuu

SEQ ID NO: 1029002 - RNA, 23 nt, Human
uguucaaaggacuuccuguuugu

SEQ ID NO: 1029003 - RNA, 20 nt, Human
uuagccucuggaguaacugg

SEQ ID NO: 1029004 - RNA, 24 nt, Human
uuaguagagacaggguuucaccau

SEQ ID NO: 1029005 - RNA, 24 nt, Human
uucaagcaauucuccugccuuagc

SEQ ID NO: 1029006 - RNA, 24 nt, Human
uugcccaggcuggagugcaguggc

SEQ ID NO: 1029007 - RNA, 24 nt, Human
uuucaccauguuggccaggcuggu

SEQ ID NO: 1029008 - RNA, 22 nt, Human
uuuuguauuuuuaguagagaca

SEQ ID NO: 1029009 - RNA, 24 nt, Human
uuuuuaguagagacaggguuucac

SEQ ID NO: 1029010 - RNA, 20 nt, Human
uuuuuguauuuuuaguagag

SEQ ID NO: 1029011 - RNA, 23 nt, Human
aaaaaaaaauaggcgaagcaaaa

SEQ ID NO: 1029012 - RNA, 19 nt, Human
aaaaaaauaggcgaagcaa

SEQ ID NO: 1029013 - RNA, 24 nt, Human
aaaaaaauaggcgaagcaaaauca

SEQ ID NO: 1029014 - RNA, 23 nt, Human
aaaagaaaaaaaaaauaggcgaa

SEQ ID NO: 1029015 - RNA, 23 nt, Human
aaaaggccuggccucagcauuac

SEQ ID NO: 1029016 - RNA, 21 nt, Human
aaaauaggcgaagcaaaauca

SEQ ID NO: 1029017 - RNA, 18 nt, Human
aaacacccacauacacaa

SEQ ID NO: 1029018 - RNA, 23 nt, Human
aaacacccacauacacaacucuu

SEQ ID NO: 1029019 - RNA, 23 nt, Human
aaagaucagauacagaucaaaug

SEQ ID NO: 1029020 - RNA, 25 nt, Human
aacaaagccuacccuuacacaacag

SEQ ID NO: 1029021 - RNA, 18 nt, Human
aagcaaaaucacauacug

SEQ ID NO: 1029022 - RNA, 23 nt, Human
acacaacucuuccccaagucucc

SEQ ID NO: 1029023 - RNA, 23 nt, Human
acagaucaaaugaaagcucuaaa

SEQ ID NO: 1029024 - RNA, 23 nt, Human
agacaacacugcuagauuccuga

SEQ ID NO: 1029025 - RNA, 24 nt, Human
agaggguuugcacugcaggccccu

SEQ ID NO: 1029026 - RNA, 30 nt, Human
agucauucugccuuuaauuaucuucccccu

SEQ ID NO: 1029027 - RNA, 24 nt, Human
auacaggccaaugacuucauacca

SEQ ID NO: 1029028 - RNA, 18 nt, Human
caaggucuaaaaucccua

SEQ ID NO: 1029029 - RNA, 22 nt, Human
cacaacucuuccccaagucucc

SEQ ID NO: 1029030 - RNA, 20 nt, Human
cagacaacacugcuagauuc

SEQ ID NO: 1029031 - RNA, 22 nt, Human
cagccuauaccacggauggcac

SEQ ID NO: 1029032 - RNA, 20 nt, Human
cagcugggcccaccuaguca

SEQ ID NO: 1029033 - RNA, 22 nt, Human
cauaccagccagccuauaccac

SEQ ID NO: 1029034 - RNA, 19 nt, Human
ccagcugggcccaccuagu

SEQ ID NO: 1029035 - RNA, 23 nt, Human
ccagggcagacaacacugcuaga

SEQ ID NO: 1029036 - RNA, 18 nt, Human
cccaaaaaagaaaaaaaa

SEQ ID NO: 1029037 - RNA, 19 nt, Human
cccaaacaaacaaacaagc

SEQ ID NO: 1029038 - RNA, 21 nt, Human
cccaaacaaacaaacaagcua

SEQ ID NO: 1029039 - RNA, 22 nt, Human
ccccaagucuccuuuucccaaa

SEQ ID NO: 1029040 - RNA, 22 nt, Human
cccccaaaaaagaaaaaaaaaa

SEQ ID NO: 1029041 - RNA, 25 nt, Human
ccuauaguucagacagcugcucagc

SEQ ID NO: 1029042 - RNA, 23 nt, Human
ccucucuugacagaaguggaggu

SEQ ID NO: 1029043 - RNA, 22 nt, Human
cgaagcaaaaucacauacuguu

SEQ ID NO: 1029044 - RNA, 21 nt, Human
cugacaugagaauggcgagaa

SEQ ID NO: 1029045 - RNA, 23 nt, Human
cuuuccauuucauccugccuuuu

SEQ ID NO: 1029046 - RNA, 19 nt, Human
gaagccagcugggcccacc

SEQ ID NO: 1029047 - RNA, 22 nt, Human
gcgaagcaaaaucacauacugu

SEQ ID NO: 1029048 - RNA, 19 nt, Human
gcucucuggcauacaggcc

SEQ ID NO: 1029049 - RNA, 21 nt, Human
ggcaggaaaugaaagaucaga

SEQ ID NO: 1029050 - RNA, 20 nt, Human
guuugcacugcaggccccuc

SEQ ID NO: 1029051 - RNA, 20 nt, Human
guuuucuucucuuagcucuc

SEQ ID NO: 1029052 - RNA, 21 nt, Human
uacccuuacacaacaggaauu

SEQ ID NO: 1029053 - RNA, 21 nt, Human
uagaauuauaaccaucuugcc

SEQ ID NO: 1029054 - RNA, 24 nt, Human
uagcacaacuggucuucagcacug

SEQ ID NO: 1029055 - RNA, 21 nt, Human
uagcucucuggcauacaggcc

SEQ ID NO: 1029056 - RNA, 24 nt, Human
uauaguucagacagcugcucagcg

SEQ ID NO: 1029057 - RNA, 22 nt, Human
ucauccugccuuuucaaagcug

SEQ ID NO: 1029058 - RNA, 20 nt, Human
uccaccaucagguggcagga

SEQ ID NO: 1029059 - RNA, 24 nt, Human
ucuucccccaaaaaagaaaaaaaa

SEQ ID NO: 1029060 - RNA, 20 nt, Human
ugaagugucuuuaauaaagg

SEQ ID NO: 1029061 - RNA, 19 nt, Human
ugacagaaguggaggugag

SEQ ID NO: 1029062 - RNA, 18 nt, Human
ugaggaaauuguucagag

SEQ ID NO: 1029063 - RNA, 19 nt, Human
ugcccuccugcacgaagcc

SEQ ID NO: 1029064 - RNA, 22 nt, Human
uggcaggaaaugaaagaucaga

SEQ ID NO: 1029065 - RNA, 22 nt, Human
uggcccaggcccuccuuucagu

SEQ ID NO: 1029066 - RNA, 21 nt, Human
uuucuucucuuagcucucugg

SEQ ID NO: 1029067 - RNA, 27 nt, Human
aaaaaaaaaaaaaacaagcaggggagg

SEQ ID NO: 1029068 - RNA, 21 nt, Human
aaaaaaaaaaaacaagcaggg

SEQ ID NO: 1029069 - RNA, 20 nt, Human
aaaaaaacaagcaggggaga

SEQ ID NO: 1029070 - RNA, 21 nt, Human
aaaagaaacacaaaaaauaug

SEQ ID NO: 1029071 - RNA, 24 nt, Human
aaaagaaacacaaaaaauauggga

SEQ ID NO: 1029072 - RNA, 19 nt, Human
aaaagcaaauguaggcuca

SEQ ID NO: 1029073 - RNA, 25 nt, Human
aaaagggauucuuuuauucacugaa

SEQ ID NO: 1029074 - RNA, 22 nt, Human
aaacaaaggguaucuacauaca

SEQ ID NO: 1029075 - RNA, 24 nt, Human
aaacaaauaccuuccaugaaacug

SEQ ID NO: 1029076 - RNA, 19 nt, Human
aaacagcagcuccaaccaa

SEQ ID NO: 1029077 - RNA, 20 nt, Human
aaacagcuauaaaucaacac

SEQ ID NO: 1029078 - RNA, 25 nt, Human
aaagaaaaauagauuuuauaaaagg

SEQ ID NO: 1029079 - RNA, 21 nt, Human
aaagcaaauguaggcucagcc

SEQ ID NO: 1029080 - RNA, 22 nt, Human
aaagcaaauguaggcucagccc

SEQ ID NO: 1029081 - RNA, 23 nt, Human
aaauauccucacuuacuuggaac

SEQ ID NO: 1029082 - RNA, 23 nt, Human
aaauaugcaaugaucaugaaaau

SEQ ID NO: 1029083 - RNA, 28 nt, Human
aagaaacacaaaaaauaugggaaggaaa

SEQ ID NO: 1029084 - RNA, 27 nt, Human
aagcaaaaguagcagggcuguaaaauu

SEQ ID NO: 1029085 - RNA, 19 nt, Human
aagguaacuagguacuuca

SEQ ID NO: 1029086 - RNA, 25 nt, Human
aaguaaaaaaugaaaaccauuauag

SEQ ID NO: 1029087 - RNA, 19 nt, Human
aauacuagaaccaaauaua

SEQ ID NO: 1029088 - RNA, 21 nt, Human
acagugauugcaacaaaagua

SEQ ID NO: 1029089 - RNA, 19 nt, Human
accacaauaacaacacgga

SEQ ID NO: 1029090 - RNA, 25 nt, Human
acuacagaaaaaacaauucuaaaua

SEQ ID NO: 1029091 - RNA, 19 nt, Human
acucguucuguguccuauc

SEQ ID NO: 1029092 - RNA, 18 nt, Human
agaauaauuguagaaaua

SEQ ID NO: 1029093 - RNA, 19 nt, Human
agcagccagacgccgcuac

SEQ ID NO: 1029094 - RNA, 21 nt, Human
agccagagccucccggacucc

SEQ ID NO: 1029095 - RNA, 21 nt, Human
aggaauuaucaguaggcauuu

SEQ ID NO: 1029096 - RNA, 26 nt, Human
aggucccaaagauuacacuaugauuc

SEQ ID NO: 1029097 - RNA, 21 nt, Human
aguggagaggcggggcccgga

SEQ ID NO: 1029098 - RNA, 20 nt, Human
auaaagcucaaauauggaca

SEQ ID NO: 1029099 - RNA, 23 nt, Human
auagaguuaagauaaccucauuu

SEQ ID NO: 1029100 - RNA, 21 nt, Human
auaguaaaagcaucaucuaaa

SEQ ID NO: 1029101 - RNA, 18 nt, Human
aucucaaacagcuauaaa

SEQ ID NO: 1029102 - RNA, 22 nt, Human
auguaggcucagcccuaccuug

SEQ ID NO: 1029103 - RNA, 19 nt, Human
caaaacaaaggguaucuac

SEQ ID NO: 1029104 - RNA, 30 nt, Human
caaccaaaaaaaaaaaaaaaaacaagcagg

SEQ ID NO: 1029105 - RNA, 23 nt, Human
caagaaaguggccucacucaugc

SEQ ID NO: 1029106 - RNA, 21 nt, Human
caagaaauaugcaaugaucau

SEQ ID NO: 1029107 - RNA, 22 nt, Human
cacaugaucacaaacauuuguu

SEQ ID NO: 1029108 - RNA, 22 nt, Human
cacuguauguuucaggcaaaac

SEQ ID NO: 1029109 - RNA, 23 nt, Human
cagauaaaaacauguggucacca

SEQ ID NO: 1029110 - RNA, 22 nt, Human
cagcaacccaacaacagugauu

SEQ ID NO: 1029111 - RNA, 23 nt, Human
cagcagcuccaaccaaaaaaaaa

SEQ ID NO: 1029112 - RNA, 23 nt, Human
cagccacugguauaaaacaaaua

SEQ ID NO: 1029113 - RNA, 22 nt, Human
ccaaauacuuuauacagugaac

SEQ ID NO: 1029114 - RNA, 24 nt, Human
ccaacaacagugauugcaacaaaa

SEQ ID NO: 1029115 - RNA, 20 nt, Human
ccccgcggacgccaaaguca

SEQ ID NO: 1029116 - RNA, 21 nt, Human
cccgcgacuggagcagccaga

SEQ ID NO: 1029117 - RNA, 18 nt, Human
cccgcggacgccaaaguc

SEQ ID NO: 1029118 - RNA, 20 nt, Human
ccgccgaguggagaggcggg

SEQ ID NO: 1029119 - RNA, 26 nt, Human
cgcgggcagcggcgcgcaggccaggc

SEQ ID NO: 1029120 - RNA, 21 nt, Human
cuaaacagcagcuccaaccaa

SEQ ID NO: 1029121 - RNA, 22 nt, Human
cuacuguugcauuccacuuuga

SEQ ID NO: 1029122 - RNA, 23 nt, Human
cuccaaccaaaaaaaaaaaaaaa

SEQ ID NO: 1029123 - RNA, 20 nt, Human
cuccggagccgccggggucc

SEQ ID NO: 1029124 - RNA, 19 nt, Human
cugcaaaauaaacacccaa

SEQ ID NO: 1029125 - RNA, 23 nt, Human
cuugucaaagauaaauauucaga

SEQ ID NO: 1029126 - RNA, 20 nt, Human
cuuuuaucaucucaaacagc

SEQ ID NO: 1029127 - RNA, 22 nt, Human
gaaaaccauuauaguuuuacca

SEQ ID NO: 1029128 - RNA, 19 nt, Human
gaacagcauuuucaaaaca

SEQ ID NO: 1029129 - RNA, 19 nt, Human
gaauggcuguuuucaggcc

SEQ ID NO: 1029130 - RNA, 23 nt, Human
gauauuaaguaaaaaaugaaaac

SEQ ID NO: 1029131 - RNA, 25 nt, Human
gcaaauguaggcucagcccuaccuu

SEQ ID NO: 1029132 - RNA, 25 nt, Human
gcagccagagccucccggacuccgg

SEQ ID NO: 1029133 - RNA, 31 nt, Human
gcagcuccaaccaaaaaaaaaaaaaaaaaaa

SEQ ID NO: 1029134 - RNA, 23 nt, Human
gccucccggacuccggagccgcc

SEQ ID NO: 1029135 - RNA, 24 nt, Human
gcgcaggccaggcgcuaggacucg

SEQ ID NO: 1029136 - RNA, 19 nt, Human
ggucaaagaaugaaggaca

SEQ ID NO: 1029137 - RNA, 20 nt, Human
guaggcucagcccuaccuug

SEQ ID NO: 1029138 - RNA, 20 nt, Human
gucccaaagauuacacuaug

SEQ ID NO: 1029139 - RNA, 22 nt, Human
gucuguuuucucaucugcaaaa

SEQ ID NO: 1029140 - RNA, 24 nt, Human
uaaaaaauaaacacaaacccaaaa

SEQ ID NO: 1029141 - RNA, 22 nt, Human
uaaaaacauguggucaccagga

SEQ ID NO: 1029142 - RNA, 24 nt, Human
uaaaacaaauaccuuccaugaaac

SEQ ID NO: 1029143 - RNA, 22 nt, Human
uaaaauuaguagaaauggcuuc

SEQ ID NO: 1029144 - RNA, 18 nt, Human
uaaacucacaaguguaaa

SEQ ID NO: 1029145 - RNA, 21 nt, Human
uaaccccaauuccaccauccc

SEQ ID NO: 1029146 - RNA, 23 nt, Human
uaacucuagcaaauauguuacau

SEQ ID NO: 1029147 - RNA, 21 nt, Human
uaauucacuugcugugcucuu

SEQ ID NO: 1029148 - RNA, 25 nt, Human
uacuuuauacagugaacuacagaaa

SEQ ID NO: 1029149 - RNA, 20 nt, Human
uagaaguuccaucugcuaaa

SEQ ID NO: 1029150 - RNA, 19 nt, Human
uauaaaacaaauaccuucc

SEQ ID NO: 1029151 - RNA, 24 nt, Human
uaugggaaggagugaaaugaacau

SEQ ID NO: 1029152 - RNA, 22 nt, Human
ucaaaagccacauuuaauucaa

SEQ ID NO: 1029153 - RNA, 20 nt, Human
ucaaagauaaauauucagau

SEQ ID NO: 1029154 - RNA, 24 nt, Human
ucaaagauaaauauucagauaaac

SEQ ID NO: 1029155 - RNA, 20 nt, Human
ucacucaugcucauucacuc

SEQ ID NO: 1029156 - RNA, 19 nt, Human
ucacuguauguuucaggca

SEQ ID NO: 1029157 - RNA, 20 nt, Human
ucaguaggcauuuuucuucu

SEQ ID NO: 1029158 - RNA, 20 nt, Human
ucaucucaaacagcuauaaa

SEQ ID NO: 1029159 - RNA, 27 nt, Human
uccaaccaaaaaaaaaaaaaaaaacaa

SEQ ID NO: 1029160 - RNA, 18 nt, Human
uccaauauugcacuugau

SEQ ID NO: 1029161 - RNA, 26 nt, Human
ucccggacuccggagccgccgggguc

SEQ ID NO: 1029162 - RNA, 23 nt, Human
ucuaauauaucugcauuaauaga

SEQ ID NO: 1029163 - RNA, 22 nt, Human
ucugaacagcauuuucaaaaca

SEQ ID NO: 1029164 - RNA, 19 nt, Human
ucuuaggcccugucucuaa

SEQ ID NO: 1029165 - RNA, 20 nt, Human
ucuuuuggcaagagauucaa

SEQ ID NO: 1029166 - RNA, 23 nt, Human
ugaaaugaacauggcauaggucc

SEQ ID NO: 1029167 - RNA, 19 nt, Human
ugagcuaaaacaacauuuu

SEQ ID NO: 1029168 - RNA, 20 nt, Human
ugagcuaaaacaacauuuuu

SEQ ID NO: 1029169 - RNA, 23 nt, Human
ugagcuaaaacaacauuuuucca

SEQ ID NO: 1029170 - RNA, 21 nt, Human
ugauaagcuaaaauaaagcuc

SEQ ID NO: 1029171 - RNA, 18 nt, Human
ugauauggggcauuucuu

SEQ ID NO: 1029172 - RNA, 21 nt, Human
ugccauggucaaagaaugaag

SEQ ID NO: 1029173 - RNA, 21 nt, Human
ugccauggucaaagaaugaag

SEQ ID NO: 1029174 - RNA, 19 nt, Human
uggauucuugggauugauc

SEQ ID NO: 1029175 - RNA, 19 nt, Human
uggcuuccaauauugcacu

SEQ ID NO: 1029176 - RNA, 19 nt, Human
uguaaaaugaaugcauuua

SEQ ID NO: 1029177 - RNA, 27 nt, Human
uguaaaauuucauaaaauuugugggau

SEQ ID NO: 1029178 - RNA, 21 nt, Human
uguaacucuagcaaauauguu

SEQ ID NO: 1029179 - RNA, 18 nt, Human
uuaggaaaacaaacaaac

SEQ ID NO: 1029180 - RNA, 18 nt, Human
uuaguagaaauggcuucc

SEQ ID NO: 1029181 - RNA, 20 nt, Human
uucaaaagcaaaaguagcag

SEQ ID NO: 1029182 - RNA, 22 nt, Human
uugcauuccacuuugaaaucac

SEQ ID NO: 1029183 - RNA, 19 nt, Human
uugcuuuuuuuaaaaaacc

SEQ ID NO: 1029184 - RNA, 22 nt, Human
uuguagaaauaaccccaauucc

SEQ ID NO: 1029185 - RNA, 22 nt, Human
uuuaacuagcuauaaaauucca

SEQ ID NO: 1029186 - RNA, 24 nt, Human
aaaaaaaaaaauccaacuuuaaac

SEQ ID NO: 1029187 - RNA, 21 nt, Human
aaacagauagacaaguacaaa

SEQ ID NO: 1029188 - RNA, 23 nt, Human
aaacagauagacaaguacaaaau

SEQ ID NO: 1029189 - RNA, 22 nt, Human
aaagugaaaaaaggaaaaggga

SEQ ID NO: 1029190 - RNA, 22 nt, Human
aaagugaaaaaaggaaaaggga

SEQ ID NO: 1029191 - RNA, 18 nt, Human
aaauacauuucugacaaa

SEQ ID NO: 1029192 - RNA, 19 nt, Human
aacuccuacaucauugcau

SEQ ID NO: 1029193 - RNA, 19 nt, Human
aagaaaagcauggccauua

SEQ ID NO: 1029194 - RNA, 19 nt, Human
aagugacagagaucacgcc

SEQ ID NO: 1029195 - RNA, 21 nt, Human
aaugaaaggagucagaaagaa

SEQ ID NO: 1029196 - RNA, 19 nt, Human
acaacaaauaaaaccuuca

SEQ ID NO: 1029197 - RNA, 22 nt, Human
acaacaaauaaaaccuucaaaa

SEQ ID NO: 1029198 - RNA, 19 nt, Human
acagaguuuuaaucuaaac

SEQ ID NO: 1029199 - RNA, 21 nt, Human
accgcuuccuuagaccauuca

SEQ ID NO: 1029200 - RNA, 23 nt, Human
agacaaguacaaaaucugaauaa

SEQ ID NO: 1029201 - RNA, 19 nt, Human
agacagaagaaugagagga

SEQ ID NO: 1029202 - RNA, 21 nt, Human
agaggaaauuaaaauucagag

SEQ ID NO: 1029203 - RNA, 19 nt, Human
agcaugauaaggaaaaccg

SEQ ID NO: 1029204 - RNA, 22 nt, Human
aggcacaaaaagggaaccugaa

SEQ ID NO: 1029205 - RNA, 22 nt, Human
agggaaccugaaauccaauugc

SEQ ID NO: 1029206 - RNA, 18 nt, Human
aguucuuugugugaggca

SEQ ID NO: 1029207 - RNA, 19 nt, Human
auagaaaccuccugaguaa

SEQ ID NO: 1029208 - RNA, 22 nt, Human
augguagccccuuacugccugg

SEQ ID NO: 1029209 - RNA, 22 nt, Human
auuccaugaaaugaucuugcca

SEQ ID NO: 1029210 - RNA, 20 nt, Human
caaaagagaacuccuacauc

SEQ ID NO: 1029211 - RNA, 20 nt, Human
caagacagugagagugugaa

SEQ ID NO: 1029212 - RNA, 23 nt, Human
cacagguggaugaucugaggcac

SEQ ID NO: 1029213 - RNA, 25 nt, Human
cacccauuaauaaguuuacagaaca

SEQ ID NO: 1029214 - RNA, 27 nt, Human
cagauagacaaguacaaaaucugaaua

SEQ ID NO: 1029215 - RNA, 21 nt, Human
caugaagccaucaagaugagu

SEQ ID NO: 1029216 - RNA, 20 nt, Human
cauuagacuuaaacuuuugu

SEQ ID NO: 1029217 - RNA, 21 nt, Human
cauugauccaauucuuauggu

SEQ ID NO: 1029218 - RNA, 21 nt, Human
ccacaaagaggacuauggucc

SEQ ID NO: 1029219 - RNA, 19 nt, Human
cuaguaauaacaacaacaa

SEQ ID NO: 1029220 - RNA, 26 nt, Human
cucaaaaaaaaaaaaaaaaaaaaauc

SEQ ID NO: 1029221 - RNA, 22 nt, Human
cucaacuucucuaagaagguca

SEQ ID NO: 1029222 - RNA, 19 nt, Human
cucuucaaagggcagguga

SEQ ID NO: 1029223 - RNA, 18 nt, Human
cugaaacuaguuaauacc

SEQ ID NO: 1029224 - RNA, 20 nt, Human
cugagguaaacagauagaca

SEQ ID NO: 1029225 - RNA, 22 nt, Human
cuuauggucuuaucuacucauc

SEQ ID NO: 1029226 - RNA, 19 nt, Human
gaaagguugggccuaaggg

SEQ ID NO: 1029227 - RNA, 20 nt, Human
gaacuccuacaucauugcau

SEQ ID NO: 1029228 - RNA, 21 nt, Human
gaguugcucugggugcagcau

SEQ ID NO: 1029229 - RNA, 22 nt, Human
gaucugaggcacaagcugugau

SEQ ID NO: 1029230 - RNA, 20 nt, Human
gcacaaaaagggaaccugaa

SEQ ID NO: 1029231 - RNA, 21 nt, Human
gcacugugcuggaucaugaag

SEQ ID NO: 1029232 - RNA, 25 nt, Human
gcauugcuaguacucaaaaaaaaaa

SEQ ID NO: 1029233 - RNA, 23 nt, Human
gccaacugucuccauuccuccau

SEQ ID NO: 1029234 - RNA, 24 nt, Human
gccccuuacugccuggaggaauga

SEQ ID NO: 1029235 - RNA, 22 nt, Human
ggcaugaaggcacaaaaaggga

SEQ ID NO: 1029236 - RNA, 19 nt, Human
ggcauuaagaaguagggca

SEQ ID NO: 1029237 - RNA, 21 nt, Human
gucaaggaugguucuaaguca

SEQ ID NO: 1029238 - RNA, 18 nt, Human
uaucugagaucuguugcc

SEQ ID NO: 1029239 - RNA, 24 nt, Human
uauuuuaaugagaggaaauuaaaa

SEQ ID NO: 1029240 - RNA, 22 nt, Human
ucaaaaaaaaaaaaaaaaaaaa

SEQ ID NO: 1029241 - RNA, 23 nt, Human
ucaaaaaaaaaaaaaaaaaaaaa

SEQ ID NO: 1029242 - RNA, 24 nt, Human
ucaaaaaaaaaaaaaaaaaaaaau

SEQ ID NO: 1029243 - RNA, 18 nt, Human
ucaaaaguuguggggaaa

SEQ ID NO: 1029244 - RNA, 25 nt, Human
ucacagugacaaggcaaaaccauag

SEQ ID NO: 1029245 - RNA, 19 nt, Human
uccaaaaaguugaacugcu

SEQ ID NO: 1029246 - RNA, 23 nt, Human
uccauccauccauccacccaccc

SEQ ID NO: 1029247 - RNA, 22 nt, Human
ucccagggaaaugaaucuucag

SEQ ID NO: 1029248 - RNA, 22 nt, Human
ucccugugcauugcuaguacuc

SEQ ID NO: 1029249 - RNA, 23 nt, Human
uccgagacagaagaaugagagga

SEQ ID NO: 1029250 - RNA, 20 nt, Human
uccugaguaacacaguuuau

SEQ ID NO: 1029251 - RNA, 19 nt, Human
ucuuuuuuuuuuuuuuugg

SEQ ID NO: 1029252 - RNA, 18 nt, Human
ugaaaaaaggaaaaggga

SEQ ID NO: 1029253 - RNA, 19 nt, Human
ugaaacuugaagcuaaaug

SEQ ID NO: 1029254 - RNA, 24 nt, Human
ugaauaauuucacaauuccagcaa

SEQ ID NO: 1029255 - RNA, 22 nt, Human
ugaaugaccccugcuguggcca

SEQ ID NO: 1029256 - RNA, 21 nt, Human
ugagcugaaacuugaagcuaa

SEQ ID NO: 1029257 - RNA, 20 nt, Human
ugagguaaacagauagacaa

SEQ ID NO: 1029258 - RNA, 19 nt, Human
ugauguuugagcugaaacu

SEQ ID NO: 1029259 - RNA, 19 nt, Human
ugcaauaauuacucaugca

SEQ ID NO: 1029260 - RNA, 22 nt, Human
ugcauggcauggcuaccgcuuc

SEQ ID NO: 1029261 - RNA, 18 nt, Human
ugccuggaggaaugaaug

SEQ ID NO: 1029262 - RNA, 30 nt, Human
ugcuaguacucaaaaaaaaaaaaaaaaaaa

SEQ ID NO: 1029263 - RNA, 18 nt, Human
ugcuccaaauaaugggac

SEQ ID NO: 1029264 - RNA, 23 nt, Human
uggaaaggaguuuaaaaagccaa

SEQ ID NO: 1029265 - RNA, 19 nt, Human
uggcauggcuaccgcuucc

SEQ ID NO: 1029266 - RNA, 24 nt, Human
uggcauggcuaccgcuuccuuaga

SEQ ID NO: 1029267 - RNA, 24 nt, Human
uguagaguuuuucuuuuuccaugg

SEQ ID NO: 1029268 - RNA, 20 nt, Human
uuaagaaaaugaaagguaga

SEQ ID NO: 1029269 - RNA, 20 nt, Human
uucauaaaccccauaggguu

SEQ ID NO: 1029270 - RNA, 21 nt, Human
uuccauggccacugugcugcu

SEQ ID NO: 1029271 - RNA, 26 nt, Human
uuccuacauuaaaauaaagugacaga

SEQ ID NO: 1029272 - RNA, 22 nt, Human
uucucaagaguugcucugggug

SEQ ID NO: 1029273 - RNA, 19 nt, Human
uucugcaucaacaaguuuu

SEQ ID NO: 1029274 - RNA, 18 nt, Human
uuggucuuaagaaaauga

SEQ ID NO: 1029275 - RNA, 19 nt, Human
uuggucuuaagaaaaugaa

SEQ ID NO: 1029276 - RNA, 20 nt, Human
uuguccuugauccucggaaa

SEQ ID NO: 1029277 - RNA, 18 nt, Human
uuuccgagacagaagaau

SEQ ID NO: 1029278 - RNA, 21 nt, Human
uuucugguccuuauucaucuu

SEQ ID NO: 1029279 - RNA, 26 nt, Human
uuuuccauggccacugugcugcugac

SEQ ID NO: 1029280 - RNA, 23 nt, Human
uuuuuuuuuuuuuuuggcuuuag

SEQ ID NO: 1029281 - RNA, 19 nt, Human
aaaaaccucagcugauguu

SEQ ID NO: 1029282 - RNA, 18 nt, Human
aaaaccucagcugauguu

SEQ ID NO: 1029283 - RNA, 18 nt, Human
aaacaaacaagggggaau

SEQ ID NO: 1029284 - RNA, 23 nt, Human
aagccagaugccagccacgggga

SEQ ID NO: 1029285 - RNA, 24 nt, Human
acagguucauacugaaaaaaaccu

SEQ ID NO: 1029286 - RNA, 18 nt, Human
agccacggggaccacagc

SEQ ID NO: 1029287 - RNA, 21 nt, Human
agccacggggaccacagccuu

SEQ ID NO: 1029288 - RNA, 18 nt, Human
aggaggcuuuugcagaug

SEQ ID NO: 1029289 - RNA, 24 nt, Human
caaacugaaugcugaggaggcuga

SEQ ID NO: 1029290 - RNA, 20 nt, Human
cacagccuuggcccaagagu

SEQ ID NO: 1029291 - RNA, 21 nt, Human
caccccuccugcuucucuucc

SEQ ID NO: 1029292 - RNA, 21 nt, Human
cacccggcaggccuugcuagc

SEQ ID NO: 1029293 - RNA, 18 nt, Human
cagccacggggaccacag

SEQ ID NO: 1029294 - RNA, 23 nt, Human
cccacuggcagggcccggccacc

SEQ ID NO: 1029295 - RNA, 20 nt, Human
cgaggaggcuuuugcagaug

SEQ ID NO: 1029296 - RNA, 19 nt, Human
cugcuucucuuccagcagc

SEQ ID NO: 1029297 - RNA, 22 nt, Human
cugugggggcuggggagggugu

SEQ ID NO: 1029298 - RNA, 21 nt, Human
cuucaagaaaaacaccccucc

SEQ ID NO: 1029299 - RNA, 19 nt, Human
ggcccggccacccuggcug

SEQ ID NO: 1029300 - RNA, 27 nt, Human
gggaaaaaggaaacuucaagaaaaaca

SEQ ID NO: 1029301 - RNA, 20 nt, Human
ggggcuggggagggugucag

SEQ ID NO: 1029302 - RNA, 24 nt, Human
uagcuccauuuaacaccagccaug

SEQ ID NO: 1029303 - RNA, 23 nt, Human
ucagcugauguuaucuguggggg

SEQ ID NO: 1029304 - RNA, 21 nt, Human
uccaggguaacuaagugcucu

SEQ ID NO: 1029305 - RNA, 23 nt, Human
ucuguuuuuguaaaacaaacaag

SEQ ID NO: 1029306 - RNA, 25 nt, Human
ucuuuuguuuauuuauauucuuuaa

SEQ ID NO: 1029307 - RNA, 19 nt, Human
ugaaauguucucagaaccc

SEQ ID NO: 1029308 - RNA, 21 nt, Human
ugaaggcgaggaggcuuuugc

SEQ ID NO: 1029309 - RNA, 20 nt, Human
ugacugcggcacacccggca

SEQ ID NO: 1029310 - RNA, 20 nt, Human
ugaggagagcgcgucacugc

SEQ ID NO: 1029311 - RNA, 21 nt, Human
ugaggagagcgcgucacugcu

SEQ ID NO: 1029312 - RNA, 19 nt, Human
ugcagauguggaccuugag

SEQ ID NO: 1029313 - RNA, 19 nt, Human
ugggggcuggggagggugu

SEQ ID NO: 1029314 - RNA, 24 nt, Human
ugggggcuggggagggugucaggg

SEQ ID NO: 1029315 - RNA, 21 nt, Human
uuaucugugggggcuggggag

SEQ ID NO: 1029316 - RNA, 23 nt, Human
uucauacugaaaaaaaccucagc

SEQ ID NO: 1029317 - RNA, 21 nt, Human
uuccagcagcucgucuccuuc

SEQ ID NO: 1029318 - RNA, 22 nt, Human
uuggcccaagaguggcauuugu

SEQ ID NO: 1029319 - RNA, 25 nt, Human
uuuuuuuuuuuucaccuuucuuuug

SEQ ID NO: 1029320 - RNA, 24 nt, Human
uuuuuuuuuuuuuuuuucaccuuu

SEQ ID NO: 1029321 - RNA, 24 nt, Human
aaagagccuggaccaaucagagcc

SEQ ID NO: 1029322 - RNA, 21 nt, Human
aauggcagacaucaggaagga

SEQ ID NO: 1029323 - RNA, 20 nt, Human
accggauccgccucggggac

SEQ ID NO: 1029324 - RNA, 26 nt, Human
acguugugcuccacccuuuccgggcc

SEQ ID NO: 1029325 - RNA, 22 nt, Human
caccggacugcguuuuuuuucc

SEQ ID NO: 1029326 - RNA, 23 nt, Human
caucaggaaggaggagaggaacc

SEQ ID NO: 1029327 - RNA, 23 nt, Human
cccacaggcgccccgccuccugg

SEQ ID NO: 1029328 - RNA, 22 nt, Human
ccccucuccguguggagcccac

SEQ ID NO: 1029329 - RNA, 20 nt, Human
cgccccgccuccugggcucc

SEQ ID NO: 1029330 - RNA, 20 nt, Human
cggggcggaaaaaauacuuc

SEQ ID NO: 1029331 - RNA, 19 nt, Human
cgucaaagagccuggacca

SEQ ID NO: 1029332 - RNA, 18 nt, Human
cuguacuccagcucucag

SEQ ID NO: 1029333 - RNA, 18 nt, Human
cuguacuccagcucucag

SEQ ID NO: 1029334 - RNA, 19 nt, Human
cuguacuccagcucucagc

SEQ ID NO: 1029335 - RNA, 22 nt, Human
gcucccauuggcugcuuucgac

SEQ ID NO: 1029336 - RNA, 24 nt, Human
ggacugggaaagugcccuccacgg

SEQ ID NO: 1029337 - RNA, 18 nt, Human
ggagaggaaccauuugug

SEQ ID NO: 1029338 - RNA, 18 nt, Human
ggucgcccuccgucgugg

SEQ ID NO: 1029339 - RNA, 19 nt, Human
gucaaagagccuggaccaa

SEQ ID NO: 1029340 - RNA, 22 nt, Human
ucaguacuaccggcccagagca

SEQ ID NO: 1029341 - RNA, 20 nt, Human
ucuucaccgcagugcuuaga

SEQ ID NO: 1029342 - RNA, 21 nt, Human
uucuguacuccagcucucagc

SEQ ID NO: 1029343 - RNA, 22 nt, Human
uugugcuccacccuuuccgggc

SEQ ID NO: 1029344 - RNA, 18 nt, Human
aaagccuggcccuaagga

SEQ ID NO: 1029345 - RNA, 21 nt, Human
aagcagaggucaccaaggccc

SEQ ID NO: 1029346 - RNA, 23 nt, Human
aaggcccagccugagagcgcccc

SEQ ID NO: 1029347 - RNA, 18 nt, Human
aagggccagggccuggag

SEQ ID NO: 1029348 - RNA, 20 nt, Human
acaccugagagcuggaaaug

SEQ ID NO: 1029349 - RNA, 23 nt, Human
acagaccaggggccccaaucccc

SEQ ID NO: 1029350 - RNA, 19 nt, Human
accaggggccccaaucccc

SEQ ID NO: 1029351 - RNA, 20 nt, Human
accaugggugaggcugcugg

SEQ ID NO: 1029352 - RNA, 19 nt, Human
acccaggccaggcccccag

SEQ ID NO: 1029353 - RNA, 18 nt, Human
acccaguugggggccuaa

SEQ ID NO: 1029354 - RNA, 26 nt, Human
accccaucacccaggccaggccccca

SEQ ID NO: 1029355 - RNA, 21 nt, Human
acccucccuccccaggccaaa

SEQ ID NO: 1029356 - RNA, 19 nt, Human
acgcccccuggacugcagg

SEQ ID NO: 1029357 - RNA, 21 nt, Human
acugcggccuaggagguggcu

SEQ ID NO: 1029358 - RNA, 21 nt, Human
agacgggaggccuggaccgca

SEQ ID NO: 1029359 - RNA, 20 nt, Human
agagaguucagcugcccugg

SEQ ID NO: 1029360 - RNA, 23 nt, Human
agaggccucucacaggccugcuc

SEQ ID NO: 1029361 - RNA, 18 nt, Human
agaggucaccaaggccca

SEQ ID NO: 1029362 - RNA, 19 nt, Human
agcagcugggaccuugggc

SEQ ID NO: 1029363 - RNA, 18 nt, Human
agcccagccaaggccagg

SEQ ID NO: 1029364 - RNA, 21 nt, Human
agcugcccaggacucggagcc

SEQ ID NO: 1029365 - RNA, 20 nt, Human
agcuggaaauguugguuugg

SEQ ID NO: 1029366 - RNA, 24 nt, Human
aggccaaacccaguugggggccua

SEQ ID NO: 1029367 - RNA, 19 nt, Human
aggcccagccugagagcgc

SEQ ID NO: 1029368 - RNA, 18 nt, Human
aggcccccagcugcccag

SEQ ID NO: 1029369 - RNA, 20 nt, Human
agggacagcucggggucaag

SEQ ID NO: 1029370 - RNA, 24 nt, Human
agggccaggcacuccuuccacccc

SEQ ID NO: 1029371 - RNA, 24 nt, Human
agggggcuacagccccuuccuguu

SEQ ID NO: 1029372 - RNA, 24 nt, Human
cacagaccaggggccccaaucccc

SEQ ID NO: 1029373 - RNA, 22 nt, Human
caccaaggcccagccugagagc

SEQ ID NO: 1029374 - RNA, 24 nt, Human
caccccaucacccaggccaggccc

SEQ ID NO: 1029375 - RNA, 25 nt, Human
caccccaucacccaggccaggcccc

SEQ ID NO: 1029376 - RNA, 18 nt, Human
caccccccacccccgugc

SEQ ID NO: 1029377 - RNA, 18 nt, Human
cagaccuuccucucccuc

SEQ ID NO: 1029378 - RNA, 18 nt, Human
cagccucugcugccuccc

SEQ ID NO: 1029379 - RNA, 18 nt, Human
cagccugagagcgccccc

SEQ ID NO: 1029380 - RNA, 22 nt, Human
cagcucggggucaagucuccgg

SEQ ID NO: 1029381 - RNA, 24 nt, Human
caggccugaggccaccuccagggc

SEQ ID NO: 1029382 - RNA, 23 nt, Human
cagggccaggcacuccuuccacc

SEQ ID NO: 1029383 - RNA, 18 nt, Human
cagggccuggaggcccgg

SEQ ID NO: 1029384 - RNA, 20 nt, Human
caucacccaggccaggcccc

SEQ ID NO: 1029385 - RNA, 27 nt, Human
cauuucuguacaccugagagcuggaaa

SEQ ID NO: 1029386 - RNA, 19 nt, Human
ccaccaagaggguccuccc

SEQ ID NO: 1029387 - RNA, 21 nt, Human
ccaccccaucacccaggccag

SEQ ID NO: 1029388 - RNA, 21 nt, Human
ccaccccccaacacacccgcc

SEQ ID NO: 1029389 - RNA, 21 nt, Human
ccaccccccacccccgugccc

SEQ ID NO: 1029390 - RNA, 19 nt, Human
cccaacacacccgcccagg

SEQ ID NO: 1029391 - RNA, 20 nt, Human
cccaucacccaggccaggcc

SEQ ID NO: 1029392 - RNA, 23 nt, Human
cccaucacccaggccaggccccc

SEQ ID NO: 1029393 - RNA, 22 nt, Human
cccaugcugcauggccugaggc

SEQ ID NO: 1029394 - RNA, 24 nt, Human
ccccaacacacccgcccagguauu

SEQ ID NO: 1029395 - RNA, 18 nt, Human
ccccacuccccuccacca

SEQ ID NO: 1029396 - RNA, 26 nt, Human
ccccagggccaggcacuccuuccacc

SEQ ID NO: 1029397 - RNA, 21 nt, Human
ccccagggggcuacagccccu

SEQ ID NO: 1029398 - RNA, 25 nt, Human
cccccacuccccuccaccaagaggg

SEQ ID NO: 1029399 - RNA, 22 nt, Human
cccccagacucuguccacagac

SEQ ID NO: 1029400 - RNA, 20 nt, Human
cccccagcugcccaggacuc

SEQ ID NO: 1029401 - RNA, 19 nt, Human
ccccggcggccucaggcga

SEQ ID NO: 1029402 - RNA, 21 nt, Human
ccccucggccaugcccaauuc

SEQ ID NO: 1029403 - RNA, 24 nt, Human
ccccucggccaugcccaauucuag

SEQ ID NO: 1029404 - RNA, 22 nt, Human
cccuaaggaagggcuggggagc

SEQ ID NO: 1029405 - RNA, 18 nt, Human
cccugggcucgagggcuc

SEQ ID NO: 1029406 - RNA, 21 nt, Human
ccucaucuucagaccuuccuc

SEQ ID NO: 1029407 - RNA, 18 nt, Human
ccucccuccccaggccaa

SEQ ID NO: 1029408 - RNA, 18 nt, Human
ccuguguuggggcagcug

SEQ ID NO: 1029409 - RNA, 21 nt, Human
cgagcagcugggaccuugggc

SEQ ID NO: 1029410 - RNA, 22 nt, Human
cgagcagcugggaccuugggcc

SEQ ID NO: 1029411 - RNA, 21 nt, Human
cgcagcuccagccccugcccc

SEQ ID NO: 1029412 - RNA, 23 nt, Human
cgcagcuccagccccugccccuc

SEQ ID NO: 1029413 - RNA, 24 nt, Human
cgcaggcccuuggugggguuccca

SEQ ID NO: 1029414 - RNA, 20 nt, Human
cgcccuaucgcagugcggga

SEQ ID NO: 1029415 - RNA, 27 nt, Human
cggacccucccuccccaggccaaaccc

SEQ ID NO: 1029416 - RNA, 24 nt, Human
cggccggaucuccuggccuguguu

SEQ ID NO: 1029417 - RNA, 19 nt, Human
cgggugccuauaggggagg

SEQ ID NO: 1029418 - RNA, 19 nt, Human
cuacaaaguaaaccgcauu

SEQ ID NO: 1029419 - RNA, 21 nt, Human
cucacgcugcagccuucuaga

SEQ ID NO: 1029420 - RNA, 23 nt, Human
cuccaccaagaggguccucccca

SEQ ID NO: 1029421 - RNA, 22 nt, Human
cuccagccccugccccucggcc

SEQ ID NO: 1029422 - RNA, 19 nt, Human
cucggggggcucccuggcc

SEQ ID NO: 1029423 - RNA, 23 nt, Human
cucucacaggccugcucggguga

SEQ ID NO: 1029424 - RNA, 20 nt, Human
cucucaggacaggcacugca

SEQ ID NO: 1029425 - RNA, 22 nt, Human
cucugugaccacauaugugggc

SEQ ID NO: 1029426 - RNA, 19 nt, Human
cugccccucggccaugccc

SEQ ID NO: 1029427 - RNA, 19 nt, Human
cugccucccuggcuggucc

SEQ ID NO: 1029428 - RNA, 20 nt, Human
cugccucccuggcugguccc

SEQ ID NO: 1029429 - RNA, 20 nt, Human
cugcugcauguggugcuggc

SEQ ID NO: 1029430 - RNA, 19 nt, Human
cuggcccuaaggaagggcu

SEQ ID NO: 1029431 - RNA, 20 nt, Human
cugggaccuugggccacugc

SEQ ID NO: 1029432 - RNA, 26 nt, Human
cuggggagccggacccucccucccca

SEQ ID NO: 1029433 - RNA, 23 nt, Human
cuucaggcagggggcccccaugg

SEQ ID NO: 1029434 - RNA, 21 nt, Human
cuuccaccccccaacacaccc

SEQ ID NO: 1029435 - RNA, 22 nt, Human
cuuccaccccccaacacacccg

SEQ ID NO: 1029436 - RNA, 24 nt, Human
cuuugaggcaagucaguuaccaug

SEQ ID NO: 1029437 - RNA, 22 nt, Human
gaagcagaggucaccaaggccc

SEQ ID NO: 1029438 - RNA, 23 nt, Human
gaagcagaggucaccaaggccca

SEQ ID NO: 1029439 - RNA, 21 nt, Human
gaccuuccucucccucugugg

SEQ ID NO: 1029440 - RNA, 21 nt, Human
gaggugaagggaccaggugcu

SEQ ID NO: 1029441 - RNA, 22 nt, Human
gcagcuccagccccugccccuc

SEQ ID NO: 1029442 - RNA, 20 nt, Human
gcccagccaaggccaggaag

SEQ ID NO: 1029443 - RNA, 22 nt, Human
gccuaaacuggguuccagccuc

SEQ ID NO: 1029444 - RNA, 21 nt, Human
gcucugaggccaggcuugggg

SEQ ID NO: 1029445 - RNA, 18 nt, Human
gcucuuacccuggggcug

SEQ ID NO: 1029446 - RNA, 22 nt, Human
gcuggagaagugcaugagauua

SEQ ID NO: 1029447 - RNA, 18 nt, Human
gcuggccucucacgcugc

SEQ ID NO: 1029448 - RNA, 22 nt, Human
ggaagugcuggcggccggaucu

SEQ ID NO: 1029449 - RNA, 22 nt, Human
ggaccggggucaaggcuggaga

SEQ ID NO: 1029450 - RNA, 22 nt, Human
ggagguggcucuuacccugggg

SEQ ID NO: 1029451 - RNA, 18 nt, Human
ggccacugcggccuagga

SEQ ID NO: 1029452 - RNA, 19 nt, Human
ggccagggccuggaggccc

SEQ ID NO: 1029453 - RNA, 22 nt, Human
ggccagggccuggaggcccggg

SEQ ID NO: 1029454 - RNA, 20 nt, Human
ggccugguucggggccgagg

SEQ ID NO: 1029455 - RNA, 23 nt, Human
ggcgcacgccauguucccuccag

SEQ ID NO: 1029456 - RNA, 23 nt, Human
ggcuggagaagugcaugagaugu

SEQ ID NO: 1029457 - RNA, 22 nt, Human
gggagaagggccagggccugga

SEQ ID NO: 1029458 - RNA, 18 nt, Human
gggaggugaagggaccag

SEQ ID NO: 1029459 - RNA, 18 nt, Human
gggccaggacaucccugg

SEQ ID NO: 1029460 - RNA, 22 nt, Human
gggccugguucggggccgaggg

SEQ ID NO: 1029461 - RNA, 19 nt, Human
gggcuggggagccggaccc

SEQ ID NO: 1029462 - RNA, 19 nt, Human
gggcuggggugagagaguu

SEQ ID NO: 1029463 - RNA, 20 nt, Human
gggcuggggugagagaguuc

SEQ ID NO: 1029464 - RNA, 25 nt, Human
gggggcucccuggccuggcacuggu

SEQ ID NO: 1029465 - RNA, 19 nt, Human
ggugaagggaccaggugcu

SEQ ID NO: 1029466 - RNA, 21 nt, Human
gguguuaucuucuggggccag

SEQ ID NO: 1029467 - RNA, 22 nt, Human
guccacagaccaggggccccaa

SEQ ID NO: 1029468 - RNA, 19 nt, Human
gugaccaccccccaccccc

SEQ ID NO: 1029469 - RNA, 23 nt, Human
uaccaugggugaggcugcuggug

SEQ ID NO: 1029470 - RNA, 23 nt, Human
uagcugcugcauguggugcuggc

SEQ ID NO: 1029471 - RNA, 24 nt, Human
uagcugcugcauguggugcuggcu

SEQ ID NO: 1029472 - RNA, 24 nt, Human
uaggagguggcucuuacccugggg

SEQ ID NO: 1029473 - RNA, 20 nt, Human
ucacccaggccaggccccca

SEQ ID NO: 1029474 - RNA, 25 nt, Human
ucacccaggccaggcccccagcugc

SEQ ID NO: 1029475 - RNA, 19 nt, Human
ucagcugcccugggagguc

SEQ ID NO: 1029476 - RNA, 24 nt, Human
ucaggcagggggcccccauggacc

SEQ ID NO: 1029477 - RNA, 19 nt, Human
ucaggcucugggguggaag

SEQ ID NO: 1029478 - RNA, 18 nt, Human
uccacagaccaggggccc

SEQ ID NO: 1029479 - RNA, 21 nt, Human
uccacagaccaggggccccaa

SEQ ID NO: 1029480 - RNA, 19 nt, Human
ucccagucccccacucccc

SEQ ID NO: 1029481 - RNA, 26 nt, Human
uccccaggccaaacccaguugggggc

SEQ ID NO: 1029482 - RNA, 19 nt, Human
ucccggagggcucugaggc

SEQ ID NO: 1029483 - RNA, 19 nt, Human
ucccuggcuggucccaguc

SEQ ID NO: 1029484 - RNA, 18 nt, Human
ucuagagaggcccucauc

SEQ ID NO: 1029485 - RNA, 18 nt, Human
ucucacgcugcagccuuc

SEQ ID NO: 1029486 - RNA, 21 nt, Human
ugaaccaacguggccuacaaa

SEQ ID NO: 1029487 - RNA, 19 nt, Human
ugaccacauaugugggcaa

SEQ ID NO: 1029488 - RNA, 23 nt, Human
ugaggccaggcuuggggggcugg

SEQ ID NO: 1029489 - RNA, 24 nt, Human
ugaggccaggcuuggggggcugga

SEQ ID NO: 1029490 - RNA, 24 nt, Human
ugcagggucaggcucuggggugga

SEQ ID NO: 1029491 - RNA, 23 nt, Human
ugccagaaucucguggccuuggg

SEQ ID NO: 1029492 - RNA, 21 nt, Human
ugcccaggacucggagccgac

SEQ ID NO: 1029493 - RNA, 23 nt, Human
ugcgggaacccuacagauccccc

SEQ ID NO: 1029494 - RNA, 24 nt, Human
ugcucagagacaguguccuggccu

SEQ ID NO: 1029495 - RNA, 20 nt, Human
ugcucggggggcucccuggc

SEQ ID NO: 1029496 - RNA, 24 nt, Human
ugcugcauggccugaggcuggccu

SEQ ID NO: 1029497 - RNA, 18 nt, Human
uggaccagcagggagaag

SEQ ID NO: 1029498 - RNA, 19 nt, Human
uggaggcccgggacugcgu

SEQ ID NO: 1029499 - RNA, 19 nt, Human
uggccuguguuggggcagc

SEQ ID NO: 1029500 - RNA, 19 nt, Human
uggcugggccugguucggg

SEQ ID NO: 1029501 - RNA, 19 nt, Human
uggcugggccugguucggg

SEQ ID NO: 1029502 - RNA, 22 nt, Human
uggggcagcugcucggggggcu

SEQ ID NO: 1029503 - RNA, 25 nt, Human
uggggccagguccucagaaagcagg

SEQ ID NO: 1029504 - RNA, 21 nt, Human
uggucccagucccccacuccc

SEQ ID NO: 1029505 - RNA, 21 nt, Human
uguugguuuggguuccggggc

SEQ ID NO: 1029506 - RNA, 23 nt, Human
uguugguuuggguuccggggccg

SEQ ID NO: 1029507 - RNA, 21 nt, Human
aaaaaaaaaauuccuuuggga

SEQ ID NO: 1029508 - RNA, 28 nt, Human
aggugauggagagggugggagguguagu

SEQ ID NO: 1029509 - RNA, 22 nt, Human
aucaaguuguaaaucuucaccu

SEQ ID NO: 1029510 - RNA, 23 nt, Human
caacaugagacuggaaaaaaggg

SEQ ID NO: 1029511 - RNA, 22 nt, Human
caucaccggaccuuuggcuuuu

SEQ ID NO: 1029512 - RNA, 20 nt, Human
ccaccucugggucaauuccc

SEQ ID NO: 1029513 - RNA, 25 nt, Human
ccaucucaaaaaaaaaaaaaaaaaa

SEQ ID NO: 1029514 - RNA, 18 nt, Human
cucaaaaaaaaaaaaaaa

SEQ ID NO: 1029515 - RNA, 19 nt, Human
cuccaucucaaaaaaaaaa

SEQ ID NO: 1029516 - RNA, 28 nt, Human
cuucuacauaaaaaucuucaacaugaga

SEQ ID NO: 1029517 - RNA, 19 nt, Human
gaaacggauucucccgcag

SEQ ID NO: 1029518 - RNA, 18 nt, Human
gacagaagcaggaaacuc

SEQ ID NO: 1029519 - RNA, 21 nt, Human
gaccuuuggcuuuuacagcuc

SEQ ID NO: 1029520 - RNA, 22 nt, Human
ggaccuuuggcuuuuacagcuc

SEQ ID NO: 1029521 - RNA, 18 nt, Human
ggugauggagaggguggg

SEQ ID NO: 1029522 - RNA, 21 nt, Human
ggugauggagagggugggagg

SEQ ID NO: 1029523 - RNA, 22 nt, Human
ucaaaaaaaaaaaaaaaaaaaa

SEQ ID NO: 1029524 - RNA, 23 nt, Human
ucaaaaaaaaaaaaaaaaaaaaa

SEQ ID NO: 1029525 - RNA, 23 nt, Human
ucaaaaaaaaaaaaaaaaaaaaa

SEQ ID NO: 1029526 - RNA, 25 nt, Human
ucagcgauacgaugauuccauuucu

SEQ ID NO: 1029527 - RNA, 24 nt, Human
ucauuacuuuuuaguuuccuucau

SEQ ID NO: 1029528 - RNA, 23 nt, Human
uccaucucaaaaaaaaaaaaaaa

SEQ ID NO: 1029529 - RNA, 19 nt, Human
ucuccccuucuccucaaau

SEQ ID NO: 1029530 - RNA, 20 nt, Human
ugaaaaagaaaaaaugguca

SEQ ID NO: 1029531 - RNA, 21 nt, Human
ugacagaagcaggaaacucca

SEQ ID NO: 1029532 - RNA, 19 nt, Human
ugauggagagggugggagg

SEQ ID NO: 1029533 - RNA, 24 nt, Human
ugcuuuuuccucugccuugcuuca

SEQ ID NO: 1029534 - RNA, 20 nt, Human
uucaaaagcugagcagggcu

SEQ ID NO: 1029535 - RNA, 22 nt, Human
uuccauuucuucggauccuugu

SEQ ID NO: 1029536 - RNA, 19 nt, Human
uucuccucaaauaacuuuc

SEQ ID NO: 1029537 - RNA, 19 nt, Human
agcagcagccuugcgucgg

SEQ ID NO: 1029538 - RNA, 22 nt, Human
uuuuuuuuuuuuuuuuucgcag

SEQ ID NO: 1029539 - RNA, 23 nt, Human
uuuuuuuuuuuuuuuuucgcagu

SEQ ID NO: 1029540 - RNA, 23 nt, Human
uuuuuuuuuuuuuuuuuuucggg

SEQ ID NO: 1029541 - RNA, 26 nt, Human
accacaauguaagccuuccaaaucca

SEQ ID NO: 1029542 - RNA, 18 nt, Human
accguucuccuccaccaa

SEQ ID NO: 1029543 - RNA, 22 nt, Human
acucuagcacugucuccucuca

SEQ ID NO: 1029544 - RNA, 20 nt, Human
acugcagugcaccaagaccu

SEQ ID NO: 1029545 - RNA, 26 nt, Human
agaaucaaaccguucuccuccaccaa

SEQ ID NO: 1029546 - RNA, 24 nt, Human
aucugaaaguuuucugcuguugga

SEQ ID NO: 1029547 - RNA, 19 nt, Human
auguagaacaaccuuggua

SEQ ID NO: 1029548 - RNA, 18 nt, Human
auuccugacaacgaauca

SEQ ID NO: 1029549 - RNA, 19 nt, Human
caagaccggcccugcaucc

SEQ ID NO: 1029550 - RNA, 22 nt, Human
cccugcauccaugaugcucucc

SEQ ID NO: 1029551 - RNA, 21 nt, Human
cuccuguuguugcagugucuc

SEQ ID NO: 1029552 - RNA, 22 nt, Human
cucugauuuccacucgucuggu

SEQ ID NO: 1029553 - RNA, 20 nt, Human
cugcuuucuauuucagcagc

SEQ ID NO: 1029554 - RNA, 18 nt, Human
cuugcaucugcucuugau

SEQ ID NO: 1029555 - RNA, 21 nt, Human
cuugccuuugacccucuuuuc

SEQ ID NO: 1029556 - RNA, 24 nt, Human
cuuuccucuugcuuuucugcuuuu

SEQ ID NO: 1029557 - RNA, 19 nt, Human
cuuucuugcaucugcucuu

SEQ ID NO: 1029558 - RNA, 22 nt, Human
cuuucuugcaucugcucuugau

SEQ ID NO: 1029559 - RNA, 23 nt, Human
gacucuagcacugucuccucuca

SEQ ID NO: 1029560 - RNA, 22 nt, Human
gagaaguuugcacuccuguugu

SEQ ID NO: 1029561 - RNA, 21 nt, Human
gcacugcagugcaccaagacc

SEQ ID NO: 1029562 - RNA, 23 nt, Human
gcagguuuucucaucugaaaguu

SEQ ID NO: 1029563 - RNA, 21 nt, Human
gccuuugacccucuuuucagc

SEQ ID NO: 1029564 - RNA, 25 nt, Human
gcuucugucuggaccaucccugacc

SEQ ID NO: 1029565 - RNA, 25 nt, Human
uccuccaccaauguuguauuucaau

SEQ ID NO: 1029566 - RNA, 18 nt, Human
ucuagcacugucuccucu

SEQ ID NO: 1029567 - RNA, 23 nt, Human
ucucugaugaugucaauaagaau

SEQ ID NO: 1029568 - RNA, 19 nt, Human
ugaaaguuuucugcuguug

SEQ ID NO: 1029569 - RNA, 19 nt, Human
ugaaguuuuggcagguuuu

SEQ ID NO: 1029570 - RNA, 19 nt, Human
ugaccucguagaccacacc

SEQ ID NO: 1029571 - RNA, 21 nt, Human
ugcuucugucuggaccauccc

SEQ ID NO: 1029572 - RNA, 25 nt, Human
ugcuucugucuggaccaucccugac

SEQ ID NO: 1029573 - RNA, 26 nt, Human
uggcagguuuucucaucugaaaguuu

SEQ ID NO: 1029574 - RNA, 20 nt, Human
ugucuggaccaucccugacc

SEQ ID NO: 1029575 - RNA, 21 nt, Human
ugucuggaccaucccugaccu

SEQ ID NO: 1029576 - RNA, 23 nt, Human
ugucuggaccaucccugaccucg

SEQ ID NO: 1029577 - RNA, 20 nt, Human
uguuaaggggcugcuugagu

SEQ ID NO: 1029578 - RNA, 24 nt, Human
uguuuuuauuuucuugccuuugac

SEQ ID NO: 1029579 - RNA, 20 nt, Human
uuccagcacugcagugcacc

SEQ ID NO: 1029580 - RNA, 21 nt, Human
uuuguuuuuauuuucuugccu

SEQ ID NO: 1029581 - RNA, 20 nt, Human
aaaugacgucaccucuccua

SEQ ID NO: 1029582 - RNA, 20 nt, Human
aaccaaagcugcugaaacaa

SEQ ID NO: 1029583 - RNA, 19 nt, Human
aagcagacagccccuaaaa

SEQ ID NO: 1029584 - RNA, 24 nt, Human
acaaguccagccccagaaggugua

SEQ ID NO: 1029585 - RNA, 21 nt, Human
acccaauaaaccccugguacc

SEQ ID NO: 1029586 - RNA, 19 nt, Human
agaugccuucggggaaaaa

SEQ ID NO: 1029587 - RNA, 22 nt, Human
aggaagaggcagaguaggggaa

SEQ ID NO: 1029588 - RNA, 18 nt, Human
aggcaccggaagaugccu

SEQ ID NO: 1029589 - RNA, 19 nt, Human
aggcagaguaggggaaggu

SEQ ID NO: 1029590 - RNA, 18 nt, Human
aguauggaggaagaggca

SEQ ID NO: 1029591 - RNA, 22 nt, Human
agugguugugauuaucugaagg

SEQ ID NO: 1029592 - RNA, 18 nt, Human
augcuacuuaaccugaaa

SEQ ID NO: 1029593 - RNA, 22 nt, Human
caaaaaggacacugaaaaccca

SEQ ID NO: 1029594 - RNA, 24 nt, Human
cagccccuaaaauagauggggaga

SEQ ID NO: 1029595 - RNA, 18 nt, Human
caggaaacuccugcccga

SEQ ID NO: 1029596 - RNA, 19 nt, Human
ccaggccucggcccucggg

SEQ ID NO: 1029597 - RNA, 23 nt, Human
ccccugggaucgaggagccccug

SEQ ID NO: 1029598 - RNA, 23 nt, Human
cccucgggcgcuggcggccccug

SEQ ID NO: 1029599 - RNA, 21 nt, Human
cccuucaaaaaggacacugaa

SEQ ID NO: 1029600 - RNA, 23 nt, Human
ccgaacuugggugaaaggcaccg

SEQ ID NO: 1029601 - RNA, 22 nt, Human
ccucggcccucgggcgcuggcg

SEQ ID NO: 1029602 - RNA, 19 nt, Human
ccucgggcgcuggcggccc

SEQ ID NO: 1029603 - RNA, 21 nt, Human
ccuuccguguccaggccucgg

SEQ ID NO: 1029604 - RNA, 21 nt, Human
cggaauuggucgcccgcgggg

SEQ ID NO: 1029605 - RNA, 25 nt, Human
cggccccugggaucgaggagccccu

SEQ ID NO: 1029606 - RNA, 18 nt, Human
cuccuccuucccuuuucu

SEQ ID NO: 1029607 - RNA, 18 nt, Human
gaggcccggagggaaucg

SEQ ID NO: 1029608 - RNA, 22 nt, Human
gcaaaugacgucaccucuccua

SEQ ID NO: 1029609 - RNA, 22 nt, Human
gcaaccaaagcugcugaaacaa

SEQ ID NO: 1029610 - RNA, 18 nt, Human
gccacggccuuccguguc

SEQ ID NO: 1029611 - RNA, 19 nt, Human
ggaaauugaaacccugucu

SEQ ID NO: 1029612 - RNA, 23 nt, Human
ggaagaugccuucggggaaaaug

SEQ ID NO: 1029613 - RNA, 19 nt, Human
ggacacugaaaacccagug

SEQ ID NO: 1029614 - RNA, 26 nt, Human
ggaccagggcugagcguggccgggga

SEQ ID NO: 1029615 - RNA, 18 nt, Human
ggacccgagaagccggcg

SEQ ID NO: 1029616 - RNA, 23 nt, Human
ggagaaugugguacuuaaccuuc

SEQ ID NO: 1029617 - RNA, 21 nt, Human
ggcuaacggaaaccuuuugcu

SEQ ID NO: 1029618 - RNA, 18 nt, Human
gggcugagcguggccggg

SEQ ID NO: 1029619 - RNA, 19 nt, Human
gucaccucuccuaauggga

SEQ ID NO: 1029620 - RNA, 21 nt, Human
gugcagcaggagacccggguu

SEQ ID NO: 1029621 - RNA, 24 nt, Human
guggaaauugaaacccugucuuua

SEQ ID NO: 1029622 - RNA, 21 nt, Human
uaaaccccugguaccaugcag

SEQ ID NO: 1029623 - RNA, 24 nt, Human
uaaaccccugguaccaugcagcuc

SEQ ID NO: 1029624 - RNA, 24 nt, Human
uaagcaaaugacgucaccucuccu

SEQ ID NO: 1029625 - RNA, 18 nt, Human
uaaugggacuguuccaga

SEQ ID NO: 1029626 - RNA, 24 nt, Human
uaccaugcagcucccccaaauuca

SEQ ID NO: 1029627 - RNA, 20 nt, Human
uagaucccacaaugaaauga

SEQ ID NO: 1029628 - RNA, 21 nt, Human
uaguauggaggaagaggcaga

SEQ ID NO: 1029629 - RNA, 27 nt, Human
uagugagcucccugucaagagagauuu

SEQ ID NO: 1029630 - RNA, 18 nt, Human
ucagugcaaccaaagcug

SEQ ID NO: 1029631 - RNA, 22 nt, Human
ucugcaacccaauaaaccccug

SEQ ID NO: 1029632 - RNA, 21 nt, Human
ugaaaugaacguaggcagucc

SEQ ID NO: 1029633 - RNA, 20 nt, Human
ugaaaugaacguaggcagug

SEQ ID NO: 1029634 - RNA, 21 nt, Human
ugacccuucaaaaaggacacu

SEQ ID NO: 1029635 - RNA, 20 nt, Human
ugaccggagcgccaugccgg

SEQ ID NO: 1029636 - RNA, 19 nt, Human
ugaccuggggcuccuccuu

SEQ ID NO: 1029637 - RNA, 25 nt, Human
ugcaacccaauaaaccccugguacc

SEQ ID NO: 1029638 - RNA, 20 nt, Human
uggaaauugaaacccugucu

SEQ ID NO: 1029639 - RNA, 24 nt, Human
uggggagaacuuuuagcccugaua

SEQ ID NO: 1029640 - RNA, 21 nt, Human
uggggcuccuccuucccuuuu

SEQ ID NO: 1029641 - RNA, 18 nt, Human
ugguugugauuaucugaa

SEQ ID NO: 1029642 - RNA, 19 nt, Human
uguccaggccucggcccuc

SEQ ID NO: 1029643 - RNA, 23 nt, Human
ugugguguuaccuuauuuuuaau

SEQ ID NO: 1029644 - RNA, 19 nt, Human
uguuugcagagaucaugug

SEQ ID NO: 1029645 - RNA, 22 nt, Human
uuaaccuucuauagaucccaca

SEQ ID NO: 1029646 - RNA, 19 nt, Human
uucaaaaaggacacugaaa

SEQ ID NO: 1029647 - RNA, 21 nt, Human
uucaugcuacuuaaccugaaa

SEQ ID NO: 1029648 - RNA, 20 nt, Human
agcacuuugggaagcugagg

SEQ ID NO: 1029649 - RNA, 24 nt, Human
cagcacuuugggaagcugaggcgg

SEQ ID NO: 1029650 - RNA, 18 nt, Human
ccgcguccgcgcccgccc

SEQ ID NO: 1029651 - RNA, 20 nt, Human
ccuguaaucccagcacuuug

SEQ ID NO: 1029652 - RNA, 24 nt, Human
cucaggccuguaaucccagcacuu

SEQ ID NO: 1029653 - RNA, 18 nt, Human
gccggguuccgcguccgc

SEQ ID NO: 1029654 - RNA, 18 nt, Human
ggccgggcgcguggcuca

SEQ ID NO: 1029655 - RNA, 23 nt, Human
ggccuguaaucccagcacuuugg

SEQ ID NO: 1029656 - RNA, 24 nt, Human
ggccuguaaucccagcacuuuggg

SEQ ID NO: 1029657 - RNA, 22 nt, Human
ggcgcguggcucaggccuguaa

SEQ ID NO: 1029658 - RNA, 21 nt, Human
ggcucaggccuguaaucccag

SEQ ID NO: 1029659 - RNA, 23 nt, Human
gugccgccgccgcgccggguucc

SEQ ID NO: 1029660 - RNA, 23 nt, Human
guggcucaggccuguaaucccag

SEQ ID NO: 1029661 - RNA, 24 nt, Human
ucaggccgggcgcguggcucaggc

SEQ ID NO: 1029662 - RNA, 22 nt, Human
uggcucaggccuguaaucccag

SEQ ID NO: 1029663 - RNA, 24 nt, Human
uggcucaggccuguaaucccagca

SEQ ID NO: 1029664 - RNA, 20 nt, Human
uuccgcguccgcgcccgccc

SEQ ID NO: 1029665 - RNA, 18 nt, Human
uucuuuguauauuaauuu

SEQ ID NO: 1029666 - RNA, 18 nt, Human
uuuuauuuuuaaaagaag

SEQ ID NO: 1029667 - RNA, 19 nt, Human
aaccaucuccucaggccac

SEQ ID NO: 1029668 - RNA, 20 nt, Human
acccccuuacccccccgggc

SEQ ID NO: 1029669 - RNA, 21 nt, Human
agaaaaaaguccuugggucua

SEQ ID NO: 1029670 - RNA, 24 nt, Human
agaaaacaggaaaaacaaaauuag

SEQ ID NO: 1029671 - RNA, 23 nt, Human
agccuugcccacccuccagacac

SEQ ID NO: 1029672 - RNA, 23 nt, Human
agcuccuuggggaauaggcggcu

SEQ ID NO: 1029673 - RNA, 19 nt, Human
agggaugggagcugaagga

SEQ ID NO: 1029674 - RNA, 18 nt, Human
aucuccucaggccacugg

SEQ ID NO: 1029675 - RNA, 24 nt, Human
auuucaccagggcacccccuuacc

SEQ ID NO: 1029676 - RNA, 23 nt, Human
cacacugagacaauguuuggaau

SEQ ID NO: 1029677 - RNA, 25 nt, Human
caccagggcacccccuuaccccccc

SEQ ID NO: 1029678 - RNA, 21 nt, Human
cacccccuuacccccccgggc

SEQ ID NO: 1029679 - RNA, 24 nt, Human
cagcagccgcauuuugccagcacu

SEQ ID NO: 1029680 - RNA, 19 nt, Human
ccagcccucccacccaccc

SEQ ID NO: 1029681 - RNA, 24 nt, Human
ccagcccucccacccacccacaua

SEQ ID NO: 1029682 - RNA, 19 nt, Human
cccacccuccagacacacc

SEQ ID NO: 1029683 - RNA, 22 nt, Human
cccagcccucccacccacccac

SEQ ID NO: 1029684 - RNA, 20 nt, Human
cccagccuugcccacccucc

SEQ ID NO: 1029685 - RNA, 21 nt, Human
ccccagcccucccacccaccc

SEQ ID NO: 1029686 - RNA, 19 nt, Human
ccccgggcgaagcagcagc

SEQ ID NO: 1029687 - RNA, 25 nt, Human
ccccugccccagcccucccacccac

SEQ ID NO: 1029688 - RNA, 18 nt, Human
cccugccccagcccuccc

SEQ ID NO: 1029689 - RNA, 23 nt, Human
ccugccccagcccucccacccac

SEQ ID NO: 1029690 - RNA, 23 nt, Human
ccuuacccccccgggcgaagcag

SEQ ID NO: 1029691 - RNA, 19 nt, Human
cggggacaggcacagcgac

SEQ ID NO: 1029692 - RNA, 22 nt, Human
cucccagccuugcccacccucc

SEQ ID NO: 1029693 - RNA, 21 nt, Human
cuccuccaaguugauaucccu

SEQ ID NO: 1029694 - RNA, 19 nt, Human
cuggagcagugccagaagg

SEQ ID NO: 1029695 - RNA, 22 nt, Human
cuggccccugccccagcccucc

SEQ ID NO: 1029696 - RNA, 24 nt, Human
cuugcccacccuccagacacacca

SEQ ID NO: 1029697 - RNA, 21 nt, Human
gaccaugaugcaugcauaggg

SEQ ID NO: 1029698 - RNA, 20 nt, Human
gagcugaaggaaacuguguu

SEQ ID NO: 1029699 - RNA, 25 nt, Human
gccccugccccagcccucccaccca

SEQ ID NO: 1029700 - RNA, 23 nt, Human
ggaaugauccaaccaucuccuca

SEQ ID NO: 1029701 - RNA, 22 nt, Human
guccuugggucuagguguucuc

SEQ ID NO: 1029702 - RNA, 24 nt, Human
uaacaaaaccuuuauucucagaaa

SEQ ID NO: 1029703 - RNA, 22 nt, Human
uagguguucuccuccaaguuga

SEQ ID NO: 1029704 - RNA, 22 nt, Human
ucaccagggcacccccuuaccc

SEQ ID NO: 1029705 - RNA, 24 nt, Human
uccacacugagacaauguuuggaa

SEQ ID NO: 1029706 - RNA, 21 nt, Human
ucccacccacccacauauccu

SEQ ID NO: 1029707 - RNA, 23 nt, Human
uccucaggccacugacgggcccu

SEQ ID NO: 1029708 - RNA, 19 nt, Human
ugaaggaaacuguguuccu

SEQ ID NO: 1029709 - RNA, 21 nt, Human
ugagucagcaccacccccaug

SEQ ID NO: 1029710 - RNA, 20 nt, Human
ugauccaaccaucuccucag

SEQ ID NO: 1029711 - RNA, 25 nt, Human
ugccccagcuccagacucagggucc

SEQ ID NO: 1029712 - RNA, 19 nt, Human
ugcccugaagcuccuuggg

SEQ ID NO: 1029713 - RNA, 19 nt, Human
ugccucaguuuccacacug

SEQ ID NO: 1029714 - RNA, 18 nt, Human
uggccccugccccagccc

SEQ ID NO: 1029715 - RNA, 20 nt, Human
uggccccugccccagcccuc

SEQ ID NO: 1029716 - RNA, 19 nt, Human
ugggcagaaaaaaguccuu

SEQ ID NO: 1029717 - RNA, 21 nt, Human
ugggucuagguguucuccucc

SEQ ID NO: 1029718 - RNA, 22 nt, Human
uucaugaugcucagccucucuc

SEQ ID NO: 1029719 - RNA, 19 nt, Human
uugauaucccucccagccu

SEQ ID NO: 1029720 - RNA, 22 nt, Human
uuggccaggauagaaaauuuca

SEQ ID NO: 1029721 - RNA, 18 nt, Human
uuuuuuuuuuuuuuuuug

SEQ ID NO: 1029722 - RNA, 18 nt, Human
aaaaaaaaaaaaaaagcc

SEQ ID NO: 1029723 - RNA, 24 nt, Human
aaaaaaaaaaagccaacugaucca

SEQ ID NO: 1029724 - RNA, 22 nt, Human
aaaaaaaaagccaacugaucca

SEQ ID NO: 1029725 - RNA, 23 nt, Human
aaaaaaaaagccaacugauccag

SEQ ID NO: 1029726 - RNA, 24 nt, Human
aaaaaaaagccaacugauccagaa

SEQ ID NO: 1029727 - RNA, 21 nt, Human
aaaaaagccaacugauccaga

SEQ ID NO: 1029728 - RNA, 22 nt, Human
aacagcuggcccuggggucccc

SEQ ID NO: 1029729 - RNA, 23 nt, Human
aacagcuggcccugggguccccc

SEQ ID NO: 1029730 - RNA, 21 nt, Human
aaggagaccuugcauugcaaa

SEQ ID NO: 1029731 - RNA, 19 nt, Human
acaacacgaugcagcaugg

SEQ ID NO: 1029732 - RNA, 18 nt, Human
acagaucugcggugggcc

SEQ ID NO: 1029733 - RNA, 19 nt, Human
accaaaaaaaaaaaaaaag

SEQ ID NO: 1029734 - RNA, 19 nt, Human
agaaaaaacaaacuuaacc

SEQ ID NO: 1029735 - RNA, 23 nt, Human
agaaaaaacaaacuuaaccaaaa

SEQ ID NO: 1029736 - RNA, 26 nt, Human
agaaaaaacaaacuuaaccaaaaaaa

SEQ ID NO: 1029737 - RNA, 23 nt, Human
agacgggagucagaggccaagcc

SEQ ID NO: 1029738 - RNA, 19 nt, Human
agagcccgcgccgcgcccc

SEQ ID NO: 1029739 - RNA, 18 nt, Human
agaucugcggugggccaa

SEQ ID NO: 1029740 - RNA, 19 nt, Human
agccaggggcugggggagc

SEQ ID NO: 1029741 - RNA, 19 nt, Human
agccaggggcugggggagc

SEQ ID NO: 1029742 - RNA, 21 nt, Human
agcucugagcgaaacugcacc

SEQ ID NO: 1029743 - RNA, 19 nt, Human
agcuggcccuggggucccc

SEQ ID NO: 1029744 - RNA, 22 nt, Human
aggaagccaggggcugggggag

SEQ ID NO: 1029745 - RNA, 21 nt, Human
aggcagggguggacauuggga

SEQ ID NO: 1029746 - RNA, 21 nt, Human
agggaccccacggcuuccacc

SEQ ID NO: 1029747 - RNA, 23 nt, Human
agggaccccacggcuuccacccu

SEQ ID NO: 1029748 - RNA, 20 nt, Human
aggggcugggggagcugggg

SEQ ID NO: 1029749 - RNA, 22 nt, Human
aggguuggggagaagcaguggg

SEQ ID NO: 1029750 - RNA, 24 nt, Human
agguggccaagggcuccugggagg

SEQ ID NO: 1029751 - RNA, 21 nt, Human
aggugggaggugaagagcagg

SEQ ID NO: 1029752 - RNA, 21 nt, Human
aucauggucccugagaugggg

SEQ ID NO: 1029753 - RNA, 23 nt, Human
cacccugggggaggcugcaggcc

SEQ ID NO: 1029754 - RNA, 20 nt, Human
cacucugcugaggggcuccu

SEQ ID NO: 1029755 - RNA, 19 nt, Human
cagacaugaccugugccag

SEQ ID NO: 1029756 - RNA, 20 nt, Human
cagacaugaccugugccagg

SEQ ID NO: 1029757 - RNA, 23 nt, Human
cagcucagggccggugcgcgcgg

SEQ ID NO: 1029758 - RNA, 24 nt, Human
cagggacacuccaggcccagcuga

SEQ ID NO: 1029759 - RNA, 21 nt, Human
caggggacaucucugaccugg

SEQ ID NO: 1029760 - RNA, 19 nt, Human
caggggcugggggagcugg

SEQ ID NO: 1029761 - RNA, 22 nt, Human
caggggcugggggagcuggggg

SEQ ID NO: 1029762 - RNA, 24 nt, Human
ccaggcccagcugaggcuuccugc

SEQ ID NO: 1029763 - RNA, 21 nt, Human
ccaggguuggccuguggggag

SEQ ID NO: 1029764 - RNA, 20 nt, Human
cccacaaaggugggagguga

SEQ ID NO: 1029765 - RNA, 19 nt, Human
ccccacugccccggccccu

SEQ ID NO: 1029766 - RNA, 23 nt, Human
cccccacaaaggugggaggugaa

SEQ ID NO: 1029767 - RNA, 23 nt, Human
ccccuggaaagcuuaaggcccag

SEQ ID NO: 1029768 - RNA, 18 nt, Human
cccgcgccgcgcccccuc

SEQ ID NO: 1029769 - RNA, 20 nt, Human
cccugggguccccuuucaag

SEQ ID NO: 1029770 - RNA, 18 nt, Human
ccuggaggugggacagcu

SEQ ID NO: 1029771 - RNA, 21 nt, Human
ccuggaggugggacagcuggu

SEQ ID NO: 1029772 - RNA, 22 nt, Human
cgaaaaccccaguccccaguga

SEQ ID NO: 1029773 - RNA, 22 nt, Human
cggcccgggacaaugcggcuga

SEQ ID NO: 1029774 - RNA, 20 nt, Human
cugaggcgggccgggccucc

SEQ ID NO: 1029775 - RNA, 22 nt, Human
cugaggcgggccgggccuccag

SEQ ID NO: 1029776 - RNA, 21 nt, Human
cugaggggcuccuucuccucc

SEQ ID NO: 1029777 - RNA, 23 nt, Human
cugggggaucccugggguagugg

SEQ ID NO: 1029778 - RNA, 21 nt, Human
cugucccuggcagggcuggag

SEQ ID NO: 1029779 - RNA, 22 nt, Human
gaaaaaacaaacuuaaccaaaa

SEQ ID NO: 1029780 - RNA, 22 nt, Human
gaccccacggcuuccacccugg

SEQ ID NO: 1029781 - RNA, 22 nt, Human
gagaugggggcaagcacagaga

SEQ ID NO: 1029782 - RNA, 20 nt, Human
gaggcagggguggacauugg

SEQ ID NO: 1029783 - RNA, 20 nt, Human
gaggccgcgugcuguggugg

SEQ ID NO: 1029784 - RNA, 23 nt, Human
gauccagaauggcuuucagaagc

SEQ ID NO: 1029785 - RNA, 22 nt, Human
gcaggacaggugggcugccucc

SEQ ID NO: 1029786 - RNA, 22 nt, Human
gccggugcgcgcggcccgggac

SEQ ID NO: 1029787 - RNA, 19 nt, Human
gccuguggggagcguggag

SEQ ID NO: 1029788 - RNA, 19 nt, Human
gcgggccgggccuccagcg

SEQ ID NO: 1029789 - RNA, 22 nt, Human
ggacaaugcggcugaggcgggc

SEQ ID NO: 1029790 - RNA, 22 nt, Human
ggagaaaccugucccuggcagg

SEQ ID NO: 1029791 - RNA, 24 nt, Human
ggagcugggggaucccuggggucg

SEQ ID NO: 1029792 - RNA, 19 nt, Human
ggaggugaagagcaggcau

SEQ ID NO: 1029793 - RNA, 21 nt, Human
ggaggugggacagcuggugcu

SEQ ID NO: 1029794 - RNA, 21 nt, Human
ggcugggggagcugggggauc

SEQ ID NO: 1029795 - RNA, 18 nt, Human
gggacagcuggugcuaag

SEQ ID NO: 1029796 - RNA, 22 nt, Human
gggagcugggggaucccugggg

SEQ ID NO: 1029797 - RNA, 21 nt, Human
ggggagcugggggaucccugg

SEQ ID NO: 1029798 - RNA, 24 nt, Human
ggggagcugggggaucccuggggu

SEQ ID NO: 1029799 - RNA, 22 nt, Human
ggggaggcagggguggacauug

SEQ ID NO: 1029800 - RNA, 21 nt, Human
gggggagcugggggaucccug

SEQ ID NO: 1029801 - RNA, 18 nt, Human
gggguggacauugggacc

SEQ ID NO: 1029802 - RNA, 21 nt, Human
gggugcugcggcggcgcagcu

SEQ ID NO: 1029803 - RNA, 22 nt, Human
ggguuggggagaagcagugggu

SEQ ID NO: 1029804 - RNA, 25 nt, Human
uaaccaaaaaaaaaaaaaaagccaa

SEQ ID NO: 1029805 - RNA, 19 nt, Human
uacaacacgaugcagcaug

SEQ ID NO: 1029806 - RNA, 24 nt, Human
uagaaaaaacaaacuuaaccaaaa

SEQ ID NO: 1029807 - RNA, 25 nt, Human
uagaaaaaacaaacuuaaccaaaaa

SEQ ID NO: 1029808 - RNA, 19 nt, Human
ucaggacccuggagguggg

SEQ ID NO: 1029809 - RNA, 23 nt, Human
uccaggcccagcugaggcuuccu

SEQ ID NO: 1029810 - RNA, 25 nt, Human
uccccagugaaggggaggcaggggu

SEQ ID NO: 1029811 - RNA, 19 nt, Human
ucccugagaugggggcaag

SEQ ID NO: 1029812 - RNA, 20 nt, Human
ucccugggguaguggggaca

SEQ ID NO: 1029813 - RNA, 21 nt, Human
uccucagccccaucccaauac

SEQ ID NO: 1029814 - RNA, 23 nt, Human
uccucagccccaucccaauacaa

SEQ ID NO: 1029815 - RNA, 23 nt, Human
uccugggaggcaggacagguggg

SEQ ID NO: 1029816 - RNA, 21 nt, Human
ucgccgggagcccacgcgggg

SEQ ID NO: 1029817 - RNA, 22 nt, Human
ucugggguuggaagccaaggag

SEQ ID NO: 1029818 - RNA, 18 nt, Human
ugaaggggaggcaggggu

SEQ ID NO: 1029819 - RNA, 24 nt, Human
ugagcgaaacugcaccaaccccgg

SEQ ID NO: 1029820 - RNA, 23 nt, Human
ugaggcuuccugcucugcauggc

SEQ ID NO: 1029821 - RNA, 18 nt, Human
ugccaggguuggccugug

SEQ ID NO: 1029822 - RNA, 20 nt, Human
ugccccggccccuggaaagc

SEQ ID NO: 1029823 - RNA, 24 nt, Human
uggcgcgagguggccaagggcucc

SEQ ID NO: 1029824 - RNA, 24 nt, Human
ugggaggugaagagcaggcauuuu

SEQ ID NO: 1029825 - RNA, 20 nt, Human
ugggcugccuccgcucagca

SEQ ID NO: 1029826 - RNA, 22 nt, Human
uggggcgaaaaccccagucccc

SEQ ID NO: 1029827 - RNA, 21 nt, Human
ugggguuggaagccaaggaga

SEQ ID NO: 1029828 - RNA, 20 nt, Human
uggucaggacccuggaggug

SEQ ID NO: 1029829 - RNA, 22 nt, Human
ugugguggcaggccgcuaaagg

SEQ ID NO: 1029830 - RNA, 18 nt, Human
ugugguggcaggccgcuc

SEQ ID NO: 1029831 - RNA, 25 nt, Human
uuaaccaaaaaaaaaaaaaaagcca

SEQ ID NO: 1029832 - RNA, 24 nt, Human
uuccucagccccaucccaauacaa

SEQ ID NO: 1029833 - RNA, 20 nt, Human
aaaaaagaauucuuuuuaaa

SEQ ID NO: 1029834 - RNA, 26 nt, Human
aaaaagaauucuuuuuaaagccauug

SEQ ID NO: 1029835 - RNA, 19 nt, Human
aaaccacgauaagcugaua

SEQ ID NO: 1029836 - RNA, 23 nt, Human
aaacccagagggcaucccaaaac

SEQ ID NO: 1029837 - RNA, 19 nt, Human
aacauggugaaaccccguc

SEQ ID NO: 1029838 - RNA, 20 nt, Human
aacauggugaaaccccgucu

SEQ ID NO: 1029839 - RNA, 21 nt, Human
aacauggugaaaccccgucuc

SEQ ID NO: 1029840 - RNA, 25 nt, Human
aaccacaguacauugaaauuugucu

SEQ ID NO: 1029841 - RNA, 18 nt, Human
aagauaccuacacugaaa

SEQ ID NO: 1029842 - RNA, 22 nt, Human
aagccacacacgcugaggacac

SEQ ID NO: 1029843 - RNA, 25 nt, Human
aaggcggguggaucaccugagguca

SEQ ID NO: 1029844 - RNA, 24 nt, Human
aaucgcuugaacuagggaggcaaa

SEQ ID NO: 1029845 - RNA, 19 nt, Human
acaaacccagagggcaucc

SEQ ID NO: 1029846 - RNA, 21 nt, Human
acaaacccagagggcauccca

SEQ ID NO: 1029847 - RNA, 22 nt, Human
acaccacugcacuccagccagg

SEQ ID NO: 1029848 - RNA, 23 nt, Human
acaccacugcacuccagccaggc

SEQ ID NO: 1029849 - RNA, 18 nt, Human
accccgucuccacuaaaa

SEQ ID NO: 1029850 - RNA, 24 nt, Human
accugaggucaggaguucgagacc

SEQ ID NO: 1029851 - RNA, 24 nt, Human
acgucuguaaucccagcacccagg

SEQ ID NO: 1029852 - RNA, 23 nt, Human
acugcacuccagccaggcgacag

SEQ ID NO: 1029853 - RNA, 25 nt, Human
acugcacuccagccaggcgacagag

SEQ ID NO: 1029854 - RNA, 18 nt, Human
agaaaagaagaucuuuac

SEQ ID NO: 1029855 - RNA, 18 nt, Human
agaauaaugaaaaaagaa

SEQ ID NO: 1029856 - RNA, 19 nt, Human
agcacuggaagcauguggc

SEQ ID NO: 1029857 - RNA, 24 nt, Human
agcacuuugggagacugaggcggg

SEQ ID NO: 1029858 - RNA, 19 nt, Human
agccauugaaacugaagac

SEQ ID NO: 1029859 - RNA, 24 nt, Human
agcuuagccaacauggugaaaccc

SEQ ID NO: 1029860 - RNA, 23 nt, Human
aggaggccaaggcggguggauca

SEQ ID NO: 1029861 - RNA, 24 nt, Human
aggaguucgagacccagcuuagcc

SEQ ID NO: 1029862 - RNA, 20 nt, Human
aggcaaagguuuugaugagc

SEQ ID NO: 1029863 - RNA, 24 nt, Human
aggcaaagguuuugaugagcugag

SEQ ID NO: 1029864 - RNA, 21 nt, Human
aggccaaggcggguggaucac

SEQ ID NO: 1029865 - RNA, 22 nt, Human
aggcggguggaucaccugaggu

SEQ ID NO: 1029866 - RNA, 26 nt, Human
aggcggguggaucaccugaggucagg

SEQ ID NO: 1029867 - RNA, 24 nt, Human
aggcugagguaggaaaaucgcuug

SEQ ID NO: 1029868 - RNA, 24 nt, Human
agguaggaaaaucgcuugaacuag

SEQ ID NO: 1029869 - RNA, 20 nt, Human
aucacaccacugcacuccag

SEQ ID NO: 1029870 - RNA, 21 nt, Human
aucaccugaggucaggaguuc

SEQ ID NO: 1029871 - RNA, 24 nt, Human
caacauggugaaaccccgucucca

SEQ ID NO: 1029872 - RNA, 24 nt, Human
caaggcggguggaucaccugaggu

SEQ ID NO: 1029873 - RNA, 21 nt, Human
caaguggccgggggugguggc

SEQ ID NO: 1029874 - RNA, 23 nt, Human
cacacacgcugaggacacagagc

SEQ ID NO: 1029875 - RNA, 18 nt, Human
cacagagcagugaagggu

SEQ ID NO: 1029876 - RNA, 24 nt, Human
caccacugcacuccagccaggcga

SEQ ID NO: 1029877 - RNA, 23 nt, Human
caccugaggucaggaguucgaga

SEQ ID NO: 1029878 - RNA, 24 nt, Human
caccuguaaucccagcuacucagg

SEQ ID NO: 1029879 - RNA, 24 nt, Human
cacgccuguaauaccagcacuuug

SEQ ID NO: 1029880 - RNA, 19 nt, Human
cacgucuguaaucccagca

SEQ ID NO: 1029881 - RNA, 22 nt, Human
cacuccagccaggcgacagagc

SEQ ID NO: 1029882 - RNA, 18 nt, Human
cacugcacuccagccagg

SEQ ID NO: 1029883 - RNA, 19 nt, Human
cacugcacuccagccaggc

SEQ ID NO: 1029884 - RNA, 21 nt, Human
cacugcacuccagccaggcga

SEQ ID NO: 1029885 - RNA, 21 nt, Human
cacugcacuccagccaggcga

SEQ ID NO: 1029886 - RNA, 23 nt, Human
cacugcacuccagccaggcgaca

SEQ ID NO: 1029887 - RNA, 24 nt, Human
cagagcgagacuccugucucaaaa

SEQ ID NO: 1029888 - RNA, 24 nt, Human
cagcacuuugggagacugaggcgg

SEQ ID NO: 1029889 - RNA, 24 nt, Human
cagcuacucaggaggcugagguag

SEQ ID NO: 1029890 - RNA, 22 nt, Human
caggucacgaagccacacacgc

SEQ ID NO: 1029891 - RNA, 18 nt, Human
ccacuacaaacccagagg

SEQ ID NO: 1029892 - RNA, 19 nt, Human
ccacugcacuccagccagg

SEQ ID NO: 1029893 - RNA, 19 nt, Human
ccacugcacuccagccagg

SEQ ID NO: 1029894 - RNA, 20 nt, Human
ccacugcacuccagccaggc

SEQ ID NO: 1029895 - RNA, 23 nt, Human
ccacugcacuccagccaggcgac

SEQ ID NO: 1029896 - RNA, 19 nt, Human
ccagcacccaggaggccaa

SEQ ID NO: 1029897 - RNA, 24 nt, Human
ccagcacccaggaggccaaggcgg

SEQ ID NO: 1029898 - RNA, 19 nt, Human
ccagcagccuugcaaccaa

SEQ ID NO: 1029899 - RNA, 22 nt, Human
cccaaaacccuggggaacacaa

SEQ ID NO: 1029900 - RNA, 24 nt, Human
ccccacuccacuacaaacccagaa

SEQ ID NO: 1029901 - RNA, 25 nt, Human
ccccacuccacuacaaacccagaag

SEQ ID NO: 1029902 - RNA, 21 nt, Human
cccgucuccacuaaaaacaca

SEQ ID NO: 1029903 - RNA, 18 nt, Human
ccgggggugguggcucac

SEQ ID NO: 1029904 - RNA, 22 nt, Human
ccugaggucaggaguucgagac

SEQ ID NO: 1029905 - RNA, 21 nt, Human
ccuguaaucccagcuacucag

SEQ ID NO: 1029906 - RNA, 23 nt, Human
ccugucucaaaaaaaaaaaaaaa

SEQ ID NO: 1029907 - RNA, 24 nt, Human
cgagacuccugucucaaaaaaaaa

SEQ ID NO: 1029908 - RNA, 19 nt, Human
cgagguuuuuuuuuuuuuu

SEQ ID NO: 1029909 - RNA, 21 nt, Human
cgagguuuuuuuuuuuuuuuu

SEQ ID NO: 1029910 - RNA, 23 nt, Human
cgccuguaauaccagcacuuugg

SEQ ID NO: 1029911 - RNA, 24 nt, Human
cgccuguaauaccagcacuuuggg

SEQ ID NO: 1029912 - RNA, 24 nt, Human
cggguggaucaccugaggucagga

SEQ ID NO: 1029913 - RNA, 22 nt, Human
cuaaaaacacacaaaaaauuag

SEQ ID NO: 1029914 - RNA, 18 nt, Human
cucaaaaaaaaaaaaaaa

SEQ ID NO: 1029915 - RNA, 23 nt, Human
cucaaaaaaaaaaaaaaaaaaaa

SEQ ID NO: 1029916 - RNA, 24 nt, Human
cucacgccuguaauaccagcacuu

SEQ ID NO: 1029917 - RNA, 23 nt, Human
cucacgucuguaaucccagcacc

SEQ ID NO: 1029918 - RNA, 18 nt, Human
cucaggaggcugagguag

SEQ ID NO: 1029919 - RNA, 20 nt, Human
cuccacuacaaacccagagg

SEQ ID NO: 1029920 - RNA, 25 nt, Human
cuccugucucaaaaaaaaaaaaaaa

SEQ ID NO: 1029921 - RNA, 28 nt, Human
cuccugucucaaaaaaaaaaaaaaaaaa

SEQ ID NO: 1029922 - RNA, 22 nt, Human
cugauauuaagauaccuacacu

SEQ ID NO: 1029923 - RNA, 21 nt, Human
cuguaaucccagcuacucagg

SEQ ID NO: 1029924 - RNA, 24 nt, Human
cuuagccaacauggugaaaccccg

SEQ ID NO: 1029925 - RNA, 21 nt, Human
gaaaacaccacuaauaugaaa

SEQ ID NO: 1029926 - RNA, 23 nt, Human
gacuccugucucaaaaaaaaaaa

SEQ ID NO: 1029927 - RNA, 23 nt, Human
gagaucacaccacugcacuccag

SEQ ID NO: 1029928 - RNA, 21 nt, Human
gaggacacagagcagugaagg

SEQ ID NO: 1029929 - RNA, 22 nt, Human
gagggcaucccaaaacccuggg

SEQ ID NO: 1029930 - RNA, 24 nt, Human
gaucaccugaggucaggaguucga

SEQ ID NO: 1029931 - RNA, 23 nt, Human
gcacuccagccaggcgacagagc

SEQ ID NO: 1029932 - RNA, 21 nt, Human
gcagugaaggguagaccugga

SEQ ID NO: 1029933 - RNA, 26 nt, Human
gcaucccaaaacccuggggaacacaa

SEQ ID NO: 1029934 - RNA, 24 nt, Human
gccaacauggugaaaccccgucuc

SEQ ID NO: 1029935 - RNA, 20 nt, Human
gcugagaucacaccacugca

SEQ ID NO: 1029936 - RNA, 24 nt, Human
gcuggugggcaccuguaaucccag

SEQ ID NO: 1029937 - RNA, 22 nt, Human
ggaucaccugaggucaggaguu

SEQ ID NO: 1029938 - RNA, 19 nt, Human
ggcaccuguaaucccagcu

SEQ ID NO: 1029939 - RNA, 23 nt, Human
ggcgugcuggugggcaccuguaa

SEQ ID NO: 1029940 - RNA, 21 nt, Human
ggcucacgucuguaaucccag

SEQ ID NO: 1029941 - RNA, 24 nt, Human
gggcaugguggcucacgccuguaa

SEQ ID NO: 1029942 - RNA, 19 nt, Human
gggcgugcuggugggcacc

SEQ ID NO: 1029943 - RNA, 23 nt, Human
ggggugguggcucacgucuguaa

SEQ ID NO: 1029944 - RNA, 21 nt, Human
gguggaucaccugaggucagg

SEQ ID NO: 1029945 - RNA, 24 nt, Human
gguggcucacgccuguaauaccag

SEQ ID NO: 1029946 - RNA, 23 nt, Human
guggcucacgucuguaaucccag

SEQ ID NO: 1029947 - RNA, 25 nt, Human
uaaccaaaaaccacgauaagcugau

SEQ ID NO: 1029948 - RNA, 24 nt, Human
uaagauaccuacacugaaaacacc

SEQ ID NO: 1029949 - RNA, 21 nt, Human
uaccuacacugaaaacaccac

SEQ ID NO: 1029950 - RNA, 21 nt, Human
uagcacuggaagcauguggca

SEQ ID NO: 1029951 - RNA, 21 nt, Human
uagccaacauggugaaacccc

SEQ ID NO: 1029952 - RNA, 18 nt, Human
uaggcugggcaugguggc

SEQ ID NO: 1029953 - RNA, 23 nt, Human
ucaaaaaaaaaaaaaaaaaaaaa

SEQ ID NO: 1029954 - RNA, 20 nt, Human
ucaccugaggucaggaguuc

SEQ ID NO: 1029955 - RNA, 22 nt, Human
uccagccaggcgacagagcgag

SEQ ID NO: 1029956 - RNA, 23 nt, Human
uccagccaggcgacagagcgaga

SEQ ID NO: 1029957 - RNA, 21 nt, Human
ucccaaaacccuggggaacac

SEQ ID NO: 1029958 - RNA, 23 nt, Human
ucuguaaucccagcacccaggag

SEQ ID NO: 1029959 - RNA, 26 nt, Human
ugaaaacaccacuaauaugaaacugc

SEQ ID NO: 1029960 - RNA, 22 nt, Human
ugaaaccccgucuccacuaaaa

SEQ ID NO: 1029961 - RNA, 20 nt, Human
ugaacuagggaggcaaaggu

SEQ ID NO: 1029962 - RNA, 19 nt, Human
ugagaaacuuuuaauaagc

SEQ ID NO: 1029963 - RNA, 18 nt, Human
ugagaucacaccacugca

SEQ ID NO: 1029964 - RNA, 24 nt, Human
ugaugagaaacuuuuaauaagcau

SEQ ID NO: 1029965 - RNA, 24 nt, Human
uggaucaccugaggucaggaguuc

SEQ ID NO: 1029966 - RNA, 27 nt, Human
uggaucaccugaggucaggaguucgag

SEQ ID NO: 1029967 - RNA, 22 nt, Human
uggcagaauaaugaaaaaagaa

SEQ ID NO: 1029968 - RNA, 24 nt, Human
uggcagaauaaugaaaaaagaauu

SEQ ID NO: 1029969 - RNA, 22 nt, Human
uggcucacgccuguaauaccag

SEQ ID NO: 1029970 - RNA, 24 nt, Human
uggcucacgccuguaauaccagca

SEQ ID NO: 1029971 - RNA, 22 nt, Human
uggcucacgucuguaaucccag

SEQ ID NO: 1029972 - RNA, 24 nt, Human
uggcucacgucuguaaucccagca

SEQ ID NO: 1029973 - RNA, 18 nt, Human
ugguggcucacgccugua

SEQ ID NO: 1029974 - RNA, 24 nt, Human
ugguggcucacgucuguaauccca

SEQ ID NO: 1029975 - RNA, 21 nt, Human
uggugggcaccuguaauccca

SEQ ID NO: 1029976 - RNA, 22 nt, Human
uggugggcaccuguaaucccag

SEQ ID NO: 1029977 - RNA, 22 nt, Human
uguaacaugacaacuaaauaug

SEQ ID NO: 1029978 - RNA, 18 nt, Human
ugugcccuuugucaaugu

SEQ ID NO: 1029979 - RNA, 22 nt, Human
uguuugaggaauauauaaucuu

SEQ ID NO: 1029980 - RNA, 18 nt, Human
uuagcugggcgugcuggu

SEQ ID NO: 1029981 - RNA, 24 nt, Human
uuagcugggcgugcuggugggcac

SEQ ID NO: 1029982 - RNA, 24 nt, Human
uuaggcugggcaugguggcucacg

SEQ ID NO: 1029983 - RNA, 24 nt, Human
uuuuaauaagcauuuaaaagaaac

SEQ ID NO: 1029984 - RNA, 19 nt, Human
uuuuuuuuuuuuuuuguga

SEQ ID NO: 1029985 - RNA, 18 nt, Human
uuuuuuuuuuuuuuuuug

SEQ ID NO: 1029986 - RNA, 19 nt, Human
uuuuuuuuuuuuuuuuugu

SEQ ID NO: 1029987 - RNA, 23 nt, Human
aagcaagagagaggcauguucag

SEQ ID NO: 1029988 - RNA, 22 nt, Human
gcaagagagaggcauguucaga

SEQ ID NO: 1029989 - RNA, 18 nt, Human
gcugguggacagaagaca

SEQ ID NO: 1029990 - RNA, 21 nt, Human
ggccugacuguggugcuggug

SEQ ID NO: 1029991 - RNA, 20 nt, Human
gggcuaagcaaaggagugug

SEQ ID NO: 1029992 - RNA, 20 nt, Human
ucagauuccagcugcuggua

SEQ ID NO: 1029993 - RNA, 23 nt, Human
ucucuccagcaggcaguggggac

SEQ ID NO: 1029994 - RNA, 19 nt, Human
ucugcgcucagcauuugga

SEQ ID NO: 1029995 - RNA, 23 nt, Human
uggaucugcgcucagcauuugga

SEQ ID NO: 1029996 - RNA, 20 nt, Human
aaacuacuauagcaaccaca

SEQ ID NO: 1029997 - RNA, 23 nt, Human
aauacaauaaugaaaaugguaga

SEQ ID NO: 1029998 - RNA, 21 nt, Human
guaaacuacuauagcaaccac

SEQ ID NO: 1029999 - RNA, 23 nt, Human
uacaauaaugaaaaugguagaac

SEQ ID NO: 1030000 - RNA, 19 nt, Human
ugcauagaagguuauaugg

SEQ ID NO: 1030001 - RNA, 21 nt, Human
ugcauagaagguuauauggaa

SEQ ID NO: 1030002 - RNA, 21 nt, Human
uuccguuucagagagaacagc

SEQ ID NO: 1030003 - RNA, 18 nt, Human
aagcuccugccugggggc

SEQ ID NO: 1030004 - RNA, 19 nt, Human
aagcuccugccugggggcc

SEQ ID NO: 1030005 - RNA, 27 nt, Human
acacugaaaagugggcagcuaggaagc

SEQ ID NO: 1030006 - RNA, 23 nt, Human
accaccaggaggaagugagggga

SEQ ID NO: 1030007 - RNA, 18 nt, Human
acggugccugcgccaggc

SEQ ID NO: 1030008 - RNA, 18 nt, Human
agagaagcagggaggcuu

SEQ ID NO: 1030009 - RNA, 19 nt, Human
agcagaacgcggacugccc

SEQ ID NO: 1030010 - RNA, 18 nt, Human
agccugccccggggcccu

SEQ ID NO: 1030011 - RNA, 19 nt, Human
agcggggacggagcagggg

SEQ ID NO: 1030012 - RNA, 18 nt, Human
agcucugauucagcagag

SEQ ID NO: 1030013 - RNA, 18 nt, Human
aggaaggggccugggggg

SEQ ID NO: 1030014 - RNA, 18 nt, Human
aggaaggggccugggggg

SEQ ID NO: 1030015 - RNA, 20 nt, Human
aggaggaagugaggggaggc

SEQ ID NO: 1030016 - RNA, 21 nt, Human
aggcaggagaggccggccugg

SEQ ID NO: 1030017 - RNA, 23 nt, Human
auggagaccgaggaccccuguag

SEQ ID NO: 1030018 - RNA, 21 nt, Human
cacugcuggggauagagagcc

SEQ ID NO: 1030019 - RNA, 21 nt, Human
cagaacgcggacugcccgggc

SEQ ID NO: 1030020 - RNA, 23 nt, Human
cagcccccagggucaugaggccc

SEQ ID NO: 1030021 - RNA, 20 nt, Human
cagccccuccaggcaccccu

SEQ ID NO: 1030022 - RNA, 19 nt, Human
cagcucugauucagcagag

SEQ ID NO: 1030023 - RNA, 20 nt, Human
caucacuggccaggauaggg

SEQ ID NO: 1030024 - RNA, 18 nt, Human
ccagagggcccggagggg

SEQ ID NO: 1030025 - RNA, 20 nt, Human
ccaggaggaagugaggggag

SEQ ID NO: 1030026 - RNA, 18 nt, Human
ccaggaggugggagcugc

SEQ ID NO: 1030027 - RNA, 23 nt, Human
ccaggcaccccuggaacgccaga

SEQ ID NO: 1030028 - RNA, 19 nt, Human
cccaggaagcgccagggag

SEQ ID NO: 1030029 - RNA, 20 nt, Human
ccccacccaggaagcgccag

SEQ ID NO: 1030030 - RNA, 18 nt, Human
cccccgcggcugcggccu

SEQ ID NO: 1030031 - RNA, 21 nt, Human
ccccggggcccugaggagccc

SEQ ID NO: 1030032 - RNA, 22 nt, Human
cccucugcccuccuguuaagag

SEQ ID NO: 1030033 - RNA, 18 nt, Human
cccugcccucugcccucc

SEQ ID NO: 1030034 - RNA, 21 nt, Human
cccuggaacgccagagggccc

SEQ ID NO: 1030035 - RNA, 25 nt, Human
ccgaggggggcagcccccagggucc

SEQ ID NO: 1030036 - RNA, 25 nt, Human
ccuccaggcaccccuggaacgccag

SEQ ID NO: 1030037 - RNA, 19 nt, Human
ccugagcacuucccagcaa

SEQ ID NO: 1030038 - RNA, 18 nt, Human
ccugccaggaggugggag

SEQ ID NO: 1030039 - RNA, 18 nt, Human
ccuggcucuggcugaggg

SEQ ID NO: 1030040 - RNA, 23 nt, Human
ccuggcucuggcugagggugggg

SEQ ID NO: 1030041 - RNA, 20 nt, Human
ccuguagagauaccccucca

SEQ ID NO: 1030042 - RNA, 20 nt, Human
cggacugcccgggcgccccc

SEQ ID NO: 1030043 - RNA, 22 nt, Human
cggccuggccaucuguccccag

SEQ ID NO: 1030044 - RNA, 21 nt, Human
cucugauucagcagagacaac

SEQ ID NO: 1030045 - RNA, 23 nt, Human
cucugauucagcagagacaacgg

SEQ ID NO: 1030046 - RNA, 21 nt, Human
cugcggccuccugacuccggg

SEQ ID NO: 1030047 - RNA, 22 nt, Human
cugcucauucagugcugggacc

SEQ ID NO: 1030048 - RNA, 21 nt, Human
cuggaagcugcucuggcccca

SEQ ID NO: 1030049 - RNA, 21 nt, Human
cugggggccuggcucuggcug

SEQ ID NO: 1030050 - RNA, 20 nt, Human
cuguccccugcccucugccc

SEQ ID NO: 1030051 - RNA, 21 nt, Human
cuguccccugcccucugcccu

SEQ ID NO: 1030052 - RNA, 25 nt, Human
cuuccuggaagcugcucuugggggc

SEQ ID NO: 1030053 - RNA, 20 nt, Human
gacaacgggaccaccaggag

SEQ ID NO: 1030054 - RNA, 23 nt, Human
gacaacgggaccaccaggaggaa

SEQ ID NO: 1030055 - RNA, 19 nt, Human
gagcacuucccagcaaugu

SEQ ID NO: 1030056 - RNA, 19 nt, Human
gaggggucucuucacuucc

SEQ ID NO: 1030057 - RNA, 20 nt, Human
gaggguggggcuggaaacac

SEQ ID NO: 1030058 - RNA, 20 nt, Human
gcagagacaacgggaccacc

SEQ ID NO: 1030059 - RNA, 24 nt, Human
gcccugaggagcccaggucggacc

SEQ ID NO: 1030060 - RNA, 19 nt, Human
gcgccccccgcggcugcgg

SEQ ID NO: 1030061 - RNA, 20 nt, Human
gcggacugcccgggcgcccc

SEQ ID NO: 1030062 - RNA, 19 nt, Human
ggaagggaggaaggggccu

SEQ ID NO: 1030063 - RNA, 24 nt, Human
ggaccucugggucgucuguccccu

SEQ ID NO: 1030064 - RNA, 18 nt, Human
ggagcagggguccccacc

SEQ ID NO: 1030065 - RNA, 18 nt, Human
ggcccggggggccggggg

SEQ ID NO: 1030066 - RNA, 24 nt, Human
ggcugaggguggggcuggaaacac

SEQ ID NO: 1030067 - RNA, 21 nt, Human
gggaaguagauggagaccgag

SEQ ID NO: 1030068 - RNA, 23 nt, Human
gggacuuugguuuccgcugcagg

SEQ ID NO: 1030069 - RNA, 18 nt, Human
gggaggaaggggccuggg

SEQ ID NO: 1030070 - RNA, 23 nt, Human
ggggaagggaggaaggggccugg

SEQ ID NO: 1030071 - RNA, 25 nt, Human
gggggacuuugguuuccgcugcagg

SEQ ID NO: 1030072 - RNA, 19 nt, Human
gggucgucuguccccugcc

SEQ ID NO: 1030073 - RNA, 23 nt, Human
ggguggccgagccacagagggcg

SEQ ID NO: 1030074 - RNA, 22 nt, Human
gucagccccuccaggcaccccu

SEQ ID NO: 1030075 - RNA, 24 nt, Human
guuaagagagcagucagccccucc

SEQ ID NO: 1030076 - RNA, 19 nt, Human
uaccuccugagcacuuccc

SEQ ID NO: 1030077 - RNA, 18 nt, Human
ucccagagaaagaugugg

SEQ ID NO: 1030078 - RNA, 21 nt, Human
ucccagagaaagauguggggc

SEQ ID NO: 1030079 - RNA, 24 nt, Human
uccucaggccucggcuaccuccug

SEQ ID NO: 1030080 - RNA, 18 nt, Human
ucgcugggaagcuccugc

SEQ ID NO: 1030081 - RNA, 21 nt, Human
ugccaggaggugggagcugcc

SEQ ID NO: 1030082 - RNA, 21 nt, Human
ugccccggggcccugaggagc

SEQ ID NO: 1030083 - RNA, 18 nt, Human
ugccugggggccuggcuc

SEQ ID NO: 1030084 - RNA, 24 nt, Human
ugccugggggccuggcucuggcug

SEQ ID NO: 1030085 - RNA, 20 nt, Human
ugcucuggccccagagaagc

SEQ ID NO: 1030086 - RNA, 21 nt, Human
uggaagcugcucuggccccag

SEQ ID NO: 1030087 - RNA, 25 nt, Human
uggauuuuggcaccguucucagcuc

SEQ ID NO: 1030088 - RNA, 19 nt, Human
uggccaggauagggggcgc

SEQ ID NO: 1030089 - RNA, 21 nt, Human
uggccaggauagggggcgcga

SEQ ID NO: 1030090 - RNA, 25 nt, Human
uggccaggggcuagucaagggucac

SEQ ID NO: 1030091 - RNA, 19 nt, Human
uggcucuggcugagggugg

SEQ ID NO: 1030092 - RNA, 21 nt, Human
uggcucuggcugagggugggg

SEQ ID NO: 1030093 - RNA, 19 nt, Human
uggggugcugauguccagc

SEQ ID NO: 1030094 - RNA, 26 nt, Human
ugguuuccgcugcaggggaggcugac

SEQ ID NO: 1030095 - RNA, 21 nt, Human
uguccccugcccucugcccuc

SEQ ID NO: 1030096 - RNA, 18 nt, Human
uguggggcacuggggaga

SEQ ID NO: 1030097 - RNA, 21 nt, Human
uguggggugcugauguccagc

SEQ ID NO: 1030098 - RNA, 21 nt, Human
uucagugcugggaccucuggg

SEQ ID NO: 1030099 - RNA, 18 nt, Human
uuccucaggccucggcua

SEQ ID NO: 1030100 - RNA, 21 nt, Human
uucguaacacugaaaaguggg

SEQ ID NO: 1030101 - RNA, 22 nt, Human
aaacaccucccgguguccaccc

SEQ ID NO: 1030102 - RNA, 19 nt, Human
aaccaggacagggaggagc

SEQ ID NO: 1030103 - RNA, 24 nt, Human
aaggugccucuggccucccugccc

SEQ ID NO: 1030104 - RNA, 27 nt, Human
aaguaacccaggcagccacacugaauu

SEQ ID NO: 1030105 - RNA, 24 nt, Human
aaugccccccucccuccuccaccc

SEQ ID NO: 1030106 - RNA, 20 nt, Human
acacugaauuccagcccagg

SEQ ID NO: 1030107 - RNA, 25 nt, Human
accaccccaaccccaggaaggagug

SEQ ID NO: 1030108 - RNA, 20 nt, Human
acccacucugccgcuccucu

SEQ ID NO: 1030109 - RNA, 19 nt, Human
acccaggaggcccccaagc

SEQ ID NO: 1030110 - RNA, 24 nt, Human
acccuggugacucacccagggcug

SEQ ID NO: 1030111 - RNA, 22 nt, Human
accugcacccuuuggcuucaac

SEQ ID NO: 1030112 - RNA, 24 nt, Human
agaaacccaggcccccuaggcacc

SEQ ID NO: 1030113 - RNA, 21 nt, Human
agaggacaagcccucggagca

SEQ ID NO: 1030114 - RNA, 22 nt, Human
agccugggcguccugcccucug

SEQ ID NO: 1030115 - RNA, 18 nt, Human
aggacagggaggagcagg

SEQ ID NO: 1030116 - RNA, 24 nt, Human
aggagcagggaccaggggcagagc

SEQ ID NO: 1030117 - RNA, 22 nt, Human
aggcccccaagccccaccccac

SEQ ID NO: 1030118 - RNA, 23 nt, Human
aggcccccagcacaggggaaaca

SEQ ID NO: 1030119 - RNA, 21 nt, Human
agggccauacggugggggugg

SEQ ID NO: 1030120 - RNA, 20 nt, Human
agggccgugggggcccaggg

SEQ ID NO: 1030121 - RNA, 23 nt, Human
auaguuccgggacucacaggcug

SEQ ID NO: 1030122 - RNA, 19 nt, Human
caccagggcaaccagcccc

SEQ ID NO: 1030123 - RNA, 19 nt, Human
caccaugcaggccuuugcu

SEQ ID NO: 1030124 - RNA, 21 nt, Human
cacccaggaggcccccaagcc

SEQ ID NO: 1030125 - RNA, 26 nt, Human
caccccagggacagccugaccccaaa

SEQ ID NO: 1030126 - RNA, 21 nt, Human
caccuccccuaccccacaccg

SEQ ID NO: 1030127 - RNA, 23 nt, Human
cacuccuggaccaccccaacccc

SEQ ID NO: 1030128 - RNA, 18 nt, Human
cacuuggggccaggcccc

SEQ ID NO: 1030129 - RNA, 22 nt, Human
cacuuugggaaaugccccuaag

SEQ ID NO: 1030130 - RNA, 21 nt, Human
cagaaacccaggcccccuagg

SEQ ID NO: 1030131 - RNA, 22 nt, Human
cagacaacccacucugccgcuc

SEQ ID NO: 1030132 - RNA, 19 nt, Human
cagacucccccaccugcac

SEQ ID NO: 1030133 - RNA, 26 nt, Human
cagccgcccuuccugcugucccacuc

SEQ ID NO: 1030134 - RNA, 22 nt, Human
cagccugggcguccugcccucu

SEQ ID NO: 1030135 - RNA, 20 nt, Human
caggaggcccccaagcccca

SEQ ID NO: 1030136 - RNA, 22 nt, Human
caggcagccacacugaauucca

SEQ ID NO: 1030137 - RNA, 19 nt, Human
cagggcaaccagccccggc

SEQ ID NO: 1030138 - RNA, 20 nt, Human
cagggcagagcagcagggcc

SEQ ID NO: 1030139 - RNA, 25 nt, Human
cagggcuggacaggaauggcugagg

SEQ ID NO: 1030140 - RNA, 21 nt, Human
caggggcucuggcuggguggg

SEQ ID NO: 1030141 - RNA, 24 nt, Human
cauacaaguaacccaggcagccac

SEQ ID NO: 1030142 - RNA, 21 nt, Human
caugcaggccuuugcuguggc

SEQ ID NO: 1030143 - RNA, 22 nt, Human
ccacagcccccggugacccaca

SEQ ID NO: 1030144 - RNA, 23 nt, Human
ccacagggcuggacaggaauggc

SEQ ID NO: 1030145 - RNA, 18 nt, Human
ccaggacagggaggagca

SEQ ID NO: 1030146 - RNA, 20 nt, Human
ccaggcagccacacugaauu

SEQ ID NO: 1030147 - RNA, 19 nt, Human
ccagggccgugggggccca

SEQ ID NO: 1030148 - RNA, 21 nt, Human
ccaucacagccgcccuuccug

SEQ ID NO: 1030149 - RNA, 22 nt, Human
cccagcuucuggccaaggcugg

SEQ ID NO: 1030150 - RNA, 22 nt, Human
cccaggacuguggaagaaggcc

SEQ ID NO: 1030151 - RNA, 23 nt, Human
cccaucagacaccaugcaggccu

SEQ ID NO: 1030152 - RNA, 24 nt, Human
cccauggcugacacaggccggggc

SEQ ID NO: 1030153 - RNA, 20 nt, Human
cccaugugacaacuaagggu

SEQ ID NO: 1030154 - RNA, 19 nt, Human
ccccaagccccaccccacc

SEQ ID NO: 1030155 - RNA, 21 nt, Human
ccccagggacagccugacccc

SEQ ID NO: 1030156 - RNA, 18 nt, Human
ccccauggcugacacagg

SEQ ID NO: 1030157 - RNA, 19 nt, Human
cccccaagccccaccccac

SEQ ID NO: 1030158 - RNA, 21 nt, Human
cccccaagccccaccccaccg

SEQ ID NO: 1030159 - RNA, 23 nt, Human
cccccaagccccaccccaccguc

SEQ ID NO: 1030160 - RNA, 26 nt, Human
ccccccucccuccuccacccccuucc

SEQ ID NO: 1030161 - RNA, 19 nt, Human
ccccuaggcaccagcggca

SEQ ID NO: 1030162 - RNA, 18 nt, Human
ccccucccuccuccaccc

SEQ ID NO: 1030163 - RNA, 20 nt, Human
cccuaccccacaccguuguc

SEQ ID NO: 1030164 - RNA, 22 nt, Human
cccuaggcaccagcggcagcuc

SEQ ID NO: 1030165 - RNA, 21 nt, Human
cccucccuccuccacccccuu

SEQ ID NO: 1030166 - RNA, 19 nt, Human
cccucuguccccacuuugg

SEQ ID NO: 1030167 - RNA, 28 nt, Human
cccuucagugcucccagcucccuggugc

SEQ ID NO: 1030168 - RNA, 20 nt, Human
ccucccggaccacauuagcc

SEQ ID NO: 1030169 - RNA, 21 nt, Human
ccuccuccacccccuuccugc

SEQ ID NO: 1030170 - RNA, 23 nt, Human
ccucuggccucccugcccagccc

SEQ ID NO: 1030171 - RNA, 26 nt, Human
ccugaaugcaccuccccuaccccaca

SEQ ID NO: 1030172 - RNA, 23 nt, Human
ccugaccccaaagcuccuggcau

SEQ ID NO: 1030173 - RNA, 18 nt, Human
ccugcccucuguccccac

SEQ ID NO: 1030174 - RNA, 18 nt, Human
ccugcccucuguccccac

SEQ ID NO: 1030175 - RNA, 21 nt, Human
ccugcggcagacaacccacuc

SEQ ID NO: 1030176 - RNA, 21 nt, Human
ccuggaccaccccaaccccag

SEQ ID NO: 1030177 - RNA, 24 nt, Human
ccuggaccaccccaaccccaggaa

SEQ ID NO: 1030178 - RNA, 21 nt, Human
ccuggcauuagggucacccac

SEQ ID NO: 1030179 - RNA, 20 nt, Human
ccugggcugagcucagugcu

SEQ ID NO: 1030180 - RNA, 22 nt, Human
ccugguuccugggcuggccugg

SEQ ID NO: 1030181 - RNA, 19 nt, Human
ccugugugcagggcagagc

SEQ ID NO: 1030182 - RNA, 21 nt, Human
cggaccacauuagccacagcc

SEQ ID NO: 1030183 - RNA, 20 nt, Human
cggacccuggugacucaccc

SEQ ID NO: 1030184 - RNA, 21 nt, Human
cucccuccuccacccccuucc

SEQ ID NO: 1030185 - RNA, 24 nt, Human
cuccuggcauuagggucacccacu

SEQ ID NO: 1030186 - RNA, 19 nt, Human
cugacacaggcacugcucc

SEQ ID NO: 1030187 - RNA, 22 nt, Human
cuggacaggaauggcugaggcc

SEQ ID NO: 1030188 - RNA, 18 nt, Human
cuggccacccaggaggcc

SEQ ID NO: 1030189 - RNA, 22 nt, Human
cuguggccaggaggggcagggc

SEQ ID NO: 1030190 - RNA, 27 nt, Human
cuucauauuggcaacaaacagcagcug

SEQ ID NO: 1030191 - RNA, 21 nt, Human
cuucgcagggaccaggcggcc

SEQ ID NO: 1030192 - RNA, 18 nt, Human
gacagcagcugggggugg

SEQ ID NO: 1030193 - RNA, 21 nt, Human
gacaggaauggcugaggccca

SEQ ID NO: 1030194 - RNA, 18 nt, Human
gacgaaggccugggcuga

SEQ ID NO: 1030195 - RNA, 24 nt, Human
gagcagcagggccgaggggauuga

SEQ ID NO: 1030196 - RNA, 21 nt, Human
gaguaacaagguuagaaggga

SEQ ID NO: 1030197 - RNA, 22 nt, Human
gcacaaccuggacccuacggug

SEQ ID NO: 1030198 - RNA, 21 nt, Human
gcagcuccaagggccccaugg

SEQ ID NO: 1030199 - RNA, 21 nt, Human
gcccagcacuccuggaccacc

SEQ ID NO: 1030200 - RNA, 22 nt, Human
gcccaggacuguggaagaaggc

SEQ ID NO: 1030201 - RNA, 22 nt, Human
gccuggaggcucaaggucauca

SEQ ID NO: 1030202 - RNA, 20 nt, Human
gccuggaguggacccuuccu

SEQ ID NO: 1030203 - RNA, 26 nt, Human
gcugucccacucuggccacccaggag

SEQ ID NO: 1030204 - RNA, 24 nt, Human
ggaccuccuccaugcccuuggcuu

SEQ ID NO: 1030205 - RNA, 23 nt, Human
ggagaagcacgagauggucucag

SEQ ID NO: 1030206 - RNA, 22 nt, Human
ggagagcccccagccugggcgu

SEQ ID NO: 1030207 - RNA, 21 nt, Human
ggaggcccccaagccccaccc

SEQ ID NO: 1030208 - RNA, 24 nt, Human
ggaguggggugaggcccagcuggg

SEQ ID NO: 1030209 - RNA, 21 nt, Human
ggcaacaaacagcagcuggga

SEQ ID NO: 1030210 - RNA, 18 nt, Human
ggcagccagggccguggg

SEQ ID NO: 1030211 - RNA, 18 nt, Human
ggcagcuccaagggcccc

SEQ ID NO: 1030212 - RNA, 19 nt, Human
ggcucaaggucaucauggg

SEQ ID NO: 1030213 - RNA, 20 nt, Human
ggcuugggggaacugagauc

SEQ ID NO: 1030214 - RNA, 22 nt, Human
gggacucacaggcuggcauuca

SEQ ID NO: 1030215 - RNA, 21 nt, Human
gggauugacacagcaacucug

SEQ ID NO: 1030216 - RNA, 24 nt, Human
gggcagagcagcagggccgagggg

SEQ ID NO: 1030217 - RNA, 22 nt, Human
gggcagccagggccgugggggc

SEQ ID NO: 1030218 - RNA, 24 nt, Human
gggcgcauacaaguaacccaggca

SEQ ID NO: 1030219 - RNA, 19 nt, Human
ggggagagcagggcaggga

SEQ ID NO: 1030220 - RNA, 19 nt, Human
ggggccugugugcagggca

SEQ ID NO: 1030221 - RNA, 18 nt, Human
ggucagcucaccccagcu

SEQ ID NO: 1030222 - RNA, 18 nt, Human
guccugcccucugucccc

SEQ ID NO: 1030223 - RNA, 21 nt, Human
guggggugaggcccagcuggg

SEQ ID NO: 1030224 - RNA, 20 nt, Human
uacccacauaguuccgggac

SEQ ID NO: 1030225 - RNA, 22 nt, Human
ucagcgagugcagcccauguca

SEQ ID NO: 1030226 - RNA, 21 nt, Human
ucagugcugugacaucagcca

SEQ ID NO: 1030227 - RNA, 21 nt, Human
uccauguugaaccugacuggg

SEQ ID NO: 1030228 - RNA, 20 nt, Human
ucccacucuggccacccagg

SEQ ID NO: 1030229 - RNA, 21 nt, Human
ucccacucuggccacccagga

SEQ ID NO: 1030230 - RNA, 19 nt, Human
uccgcagcgcugccuggcc

SEQ ID NO: 1030231 - RNA, 21 nt, Human
uccgcagcgcugccuggccuc

SEQ ID NO: 1030232 - RNA, 19 nt, Human
uccuggaccaccccaaccc

SEQ ID NO: 1030233 - RNA, 18 nt, Human
uccugggcuggccugguc

SEQ ID NO: 1030234 - RNA, 22 nt, Human
ucuccgcagcgcugccuggccu

SEQ ID NO: 1030235 - RNA, 23 nt, Human
ucugggucagcucaccccagcuu

SEQ ID NO: 1030236 - RNA, 21 nt, Human
ucuguccccacuuugggaaau

SEQ ID NO: 1030237 - RNA, 24 nt, Human
ucugugucuggcaggcaucgcuga

SEQ ID NO: 1030238 - RNA, 20 nt, Human
ugacacagcaacucuguccc

SEQ ID NO: 1030239 - RNA, 21 nt, Human
ugaccccaaagcuccuggcau

SEQ ID NO: 1030240 - RNA, 23 nt, Human
ugagaucucaggggugugcguca

SEQ ID NO: 1030241 - RNA, 19 nt, Human
ugagcucagugcugugaca

SEQ ID NO: 1030242 - RNA, 24 nt, Human
ugaggcugucagacaccagggcgg

SEQ ID NO: 1030243 - RNA, 23 nt, Human
ugcaccuccccuaccccacaccg

SEQ ID NO: 1030244 - RNA, 23 nt, Human
ugccgcuccucuccgcagcgcug

SEQ ID NO: 1030245 - RNA, 21 nt, Human
ugccggggcuccacacgugcc

SEQ ID NO: 1030246 - RNA, 19 nt, Human
ugccugggcagaaacccag

SEQ ID NO: 1030247 - RNA, 21 nt, Human
ugccugggcagaaacccaggc

SEQ ID NO: 1030248 - RNA, 21 nt, Human
ugcugucccacucuggccacc

SEQ ID NO: 1030249 - RNA, 21 nt, Human
ugcuguggccaggaggggcag

SEQ ID NO: 1030250 - RNA, 19 nt, Human
uggaaggagaggacaagcc

SEQ ID NO: 1030251 - RNA, 21 nt, Human
uggagcgccuaucaugccaaa

SEQ ID NO: 1030252 - RNA, 21 nt, Human
uggagggaccuccuccaugcc

SEQ ID NO: 1030253 - RNA, 18 nt, Human
uggcaagggccaaggacc

SEQ ID NO: 1030254 - RNA, 25 nt, Human
uggcaagggccaaggaccugcgacg

SEQ ID NO: 1030255 - RNA, 21 nt, Human
uggccucagcgagugcagccc

SEQ ID NO: 1030256 - RNA, 20 nt, Human
ugggagggggucagacuccc

SEQ ID NO: 1030257 - RNA, 20 nt, Human
ugggggccugugugcagggc

SEQ ID NO: 1030258 - RNA, 27 nt, Human
ugggggccugugugcaggggggacacc

SEQ ID NO: 1030259 - RNA, 18 nt, Human
ugguuccugggcuggccu

SEQ ID NO: 1030260 - RNA, 22 nt, Human
uguccacccaucagacaccaug

SEQ ID NO: 1030261 - RNA, 22 nt, Human
ugugcagggcagagcagcaggg

SEQ ID NO: 1030262 - RNA, 18 nt, Human
uguggagggaccuccucc

SEQ ID NO: 1030263 - RNA, 21 nt, Human
uugccccuuuguccuggagac

SEQ ID NO: 1030264 - RNA, 21 nt, Human
uugggggaacugagaucucag

SEQ ID NO: 1030265 - RNA, 18 nt, Human
cacgcugggagcuguaga

SEQ ID NO: 1030266 - RNA, 22 nt, Human
cauucuuaucccuagacuccgg

SEQ ID NO: 1030267 - RNA, 22 nt, Human
cccuagacuccggcaaguacuc

SEQ ID NO: 1030268 - RNA, 23 nt, Human
guagugcauucuuaucccuagac

SEQ ID NO: 1030269 - RNA, 24 nt, Human
uagaaaaggucacuggucucagau

SEQ ID NO: 1030270 - RNA, 22 nt, Human
uagugcauucuuaucccuagac

SEQ ID NO: 1030271 - RNA, 24 nt, Human
ucaaugcaugccaccagcucauca

SEQ ID NO: 1030272 - RNA, 18 nt, Human
ucagauggaaaugcagaa

SEQ ID NO: 1030273 - RNA, 21 nt, Human
uuggccaucuuggcuccuccc

SEQ ID NO: 1030274 - RNA, 19 nt, Human
uuguagugcauucuuaucc

SEQ ID NO: 1030275 - RNA, 24 nt, Human
uuuguagugcauucuuaucccuag

SEQ ID NO: 1030276 - RNA, 26 nt, Human
uuuguagugcauucuuaucccuagac

SEQ ID NO: 1030277 - RNA, 24 nt, Human
aaagugcuagaauuacaggcauga

SEQ ID NO: 1030278 - RNA, 22 nt, Human
aagcucuucucucuuagccucc

SEQ ID NO: 1030279 - RNA, 19 nt, Human
aaguagcugggacuacagg

SEQ ID NO: 1030280 - RNA, 20 nt, Human
aaguagcugggacuacaggu

SEQ ID NO: 1030281 - RNA, 24 nt, Human
aaguagcugggacuacagguaugc

SEQ ID NO: 1030282 - RNA, 26 nt, Human
aagugcuagaauuacaggcaugagcc

SEQ ID NO: 1030283 - RNA, 20 nt, Human
aauuacaggcaugagccacc

SEQ ID NO: 1030284 - RNA, 25 nt, Human
acucugucacccaggaugggguaca

SEQ ID NO: 1030285 - RNA, 18 nt, Human
agccaaacuuaccgugga

SEQ ID NO: 1030286 - RNA, 23 nt, Human
agccucagccucccaaguagcug

SEQ ID NO: 1030287 - RNA, 26 nt, Human
aggcaguguuaagaaucauuggggga

SEQ ID NO: 1030288 - RNA, 21 nt, Human
agggauccuccagccucagcc

SEQ ID NO: 1030289 - RNA, 24 nt, Human
aucauguugcucagacuggucuug

SEQ ID NO: 1030290 - RNA, 25 nt, Human
aucauguugcucagacuggucuuga

SEQ ID NO: 1030291 - RNA, 19 nt, Human
auggggucucaucauguug

SEQ ID NO: 1030292 - RNA, 24 nt, Human
caaagugcuagaauuacaggcaug

SEQ ID NO: 1030293 - RNA, 21 nt, Human
caacagcuaaggccaagccaa

SEQ ID NO: 1030294 - RNA, 22 nt, Human
caagcucuucucucuuagccuc

SEQ ID NO: 1030295 - RNA, 20 nt, Human
caccaugucuggcuaauucu

SEQ ID NO: 1030296 - RNA, 22 nt, Human
caccaugucuggcuaauucuua

SEQ ID NO: 1030297 - RNA, 25 nt, Human
cagccucagccucccaaguagcugg

SEQ ID NO: 1030298 - RNA, 21 nt, Human
caggucuccugcaacagcuaa

SEQ ID NO: 1030299 - RNA, 20 nt, Human
cauguugcucagacuggucu

SEQ ID NO: 1030300 - RNA, 24 nt, Human
cauguugcucagacuggucuugaa

SEQ ID NO: 1030301 - RNA, 25 nt, Human
cauuuuuguccuggaaucagucaaa

SEQ ID NO: 1030302 - RNA, 24 nt, Human
ccaaagugcuagaauuacaggcau

SEQ ID NO: 1030303 - RNA, 23 nt, Human
cccaaguagcugggacuacaggu

SEQ ID NO: 1030304 - RNA, 24 nt, Human
cccaaguagcugggacuacaggua

SEQ ID NO: 1030305 - RNA, 26 nt, Human
ccuccagccucagccucccaaguagc

SEQ ID NO: 1030306 - RNA, 21 nt, Human
ccuggaaucagucaaagauga

SEQ ID NO: 1030307 - RNA, 20 nt, Human
ccuggguucaagggauccuc

SEQ ID NO: 1030308 - RNA, 23 nt, Human
cgugaucaaagcucacugcugcc

SEQ ID NO: 1030309 - RNA, 24 nt, Human
cucagccucccaaguagcugggac

SEQ ID NO: 1030310 - RNA, 24 nt, Human
cuccagccucagccucccaaguag

SEQ ID NO: 1030311 - RNA, 25 nt, Human
cuccagccucagccucccaaguagc

SEQ ID NO: 1030312 - RNA, 19 nt, Human
cugcugccuucaauuccug

SEQ ID NO: 1030313 - RNA, 18 nt, Human
cuuuucuucuucuucuuu

SEQ ID NO: 1030314 - RNA, 23 nt, Human
gaauuacaggcaugagccaccug

SEQ ID NO: 1030315 - RNA, 24 nt, Human
gacuacagguaugcaccaccaugu

SEQ ID NO: 1030316 - RNA, 20 nt, Human
gagauggggucucaucaugu

SEQ ID NO: 1030317 - RNA, 22 nt, Human
gauccuccagccucagccuccc

SEQ ID NO: 1030318 - RNA, 24 nt, Human
ggacuacagguaugcaccaccaug

SEQ ID NO: 1030319 - RNA, 22 nt, Human
ggauccuccagccucagccucc

SEQ ID NO: 1030320 - RNA, 23 nt, Human
ggcagggugggcccucauggggc

SEQ ID NO: 1030321 - RNA, 23 nt, Human
gggggguaaggcaguguuaagaa

SEQ ID NO: 1030322 - RNA, 22 nt, Human
ggggucucaucauguugcucag

SEQ ID NO: 1030323 - RNA, 21 nt, Human
gguacaguggcgugaucaaag

SEQ ID NO: 1030324 - RNA, 24 nt, Human
gguacaguggcgugaucaaagcuc

SEQ ID NO: 1030325 - RNA, 22 nt, Human
guagagauggggucucaucaug

SEQ ID NO: 1030326 - RNA, 18 nt, Human
gugaucaaagcucacugc

SEQ ID NO: 1030327 - RNA, 22 nt, Human
gugaucaaagcucacugcugcc

SEQ ID NO: 1030328 - RNA, 28 nt, Human
uaaggcagaguucacaggucuccugcaa

SEQ ID NO: 1030329 - RNA, 22 nt, Human
uaaggcaguguuaagaaucauu

SEQ ID NO: 1030330 - RNA, 18 nt, Human
uacagguaugcaccacca

SEQ ID NO: 1030331 - RNA, 21 nt, Human
uagaauuacaggcaugagcca

SEQ ID NO: 1030332 - RNA, 24 nt, Human
uagaauuacaggcaugagccaccu

SEQ ID NO: 1030333 - RNA, 26 nt, Human
uagaauuacaggcaugagccaccugg

SEQ ID NO: 1030334 - RNA, 25 nt, Human
ucaagcucuucucucuuagccuccu

SEQ ID NO: 1030335 - RNA, 24 nt, Human
ucacaggucuccugcaacagcuaa

SEQ ID NO: 1030336 - RNA, 18 nt, Human
ucagccucccaaguagcu

SEQ ID NO: 1030337 - RNA, 20 nt, Human
ucagccucccaaguagcugg

SEQ ID NO: 1030338 - RNA, 24 nt, Human
ucccaaagugcuagaauuacaggc

SEQ ID NO: 1030339 - RNA, 24 nt, Human
ucccaaguagcugggacuacaggu

SEQ ID NO: 1030340 - RNA, 19 nt, Human
uccuccagccucagccucc

SEQ ID NO: 1030341 - RNA, 18 nt, Human
uccuggguucaagggauc

SEQ ID NO: 1030342 - RNA, 24 nt, Human
uccuggguucaagggauccuccag

SEQ ID NO: 1030343 - RNA, 20 nt, Human
ucucacucugucacccagga

SEQ ID NO: 1030344 - RNA, 24 nt, Human
ucucacucugucacccaggauggg

SEQ ID NO: 1030345 - RNA, 25 nt, Human
ucucacucugucacccaggaugggg

SEQ ID NO: 1030346 - RNA, 26 nt, Human
ucucacucugucacccaggauggggu

SEQ ID NO: 1030347 - RNA, 19 nt, Human
ucuccugcaacagcuaagg

SEQ ID NO: 1030348 - RNA, 20 nt, Human
ucuccugcaacagcuaaggc

SEQ ID NO: 1030349 - RNA, 21 nt, Human
ucucucuuagccucccaaagu

SEQ ID NO: 1030350 - RNA, 23 nt, Human
ucucuuagccucccaaagugcua

SEQ ID NO: 1030351 - RNA, 23 nt, Human
ucuugaacuccugagcucaagcu

SEQ ID NO: 1030352 - RNA, 21 nt, Human
ugagaaagugaguccccuacc

SEQ ID NO: 1030353 - RNA, 21 nt, Human
ugcggaggugcaggcagggug

SEQ ID NO: 1030354 - RNA, 24 nt, Human
ugcucagacuggucuugaacuccu

SEQ ID NO: 1030355 - RNA, 21 nt, Human
ugggacuacagguaugcacca

SEQ ID NO: 1030356 - RNA, 24 nt, Human
ugggacuacagguaugcaccacca

SEQ ID NO: 1030357 - RNA, 19 nt, Human
ugggguacaguggcgugau

SEQ ID NO: 1030358 - RNA, 19 nt, Human
ugggguacaguggcgugau

SEQ ID NO: 1030359 - RNA, 28 nt, Human
ugggguacaguggcgugauggcucuagc

SEQ ID NO: 1030360 - RNA, 18 nt, Human
uggggucucaucauguug

SEQ ID NO: 1030361 - RNA, 24 nt, Human
uguagagauggggucucaucaugu

SEQ ID NO: 1030362 - RNA, 21 nt, Human
uguuaagaaucauuggggcug

SEQ ID NO: 1030363 - RNA, 20 nt, Human
uguugcucagacuggucuug

SEQ ID NO: 1030364 - RNA, 20 nt, Human
uuaaauuuuuuguagagaug

SEQ ID NO: 1030365 - RNA, 22 nt, Human
uuagccucccaaagugcuagaa

SEQ ID NO: 1030366 - RNA, 26 nt, Human
uucuucuucuucuuuuuuuuuuaaga

SEQ ID NO: 1030367 - RNA, 23 nt, Human
uugagggggucucacucugucac

SEQ ID NO: 1030368 - RNA, 24 nt, Human
uuguagagauggggucucaucaug

SEQ ID NO: 1030369 - RNA, 18 nt, Human
uuuguagagauggggucu

SEQ ID NO: 1030370 - RNA, 21 nt, Human
uuuguagagauggggucucau

SEQ ID NO: 1030371 - RNA, 24 nt, Human
uuuguagagauggggucucaucau

SEQ ID NO: 1030372 - RNA, 25 nt, Human
uuuuucuuuuuugagggggucucaa

SEQ ID NO: 1030373 - RNA, 24 nt, Human
uuuuuuguagagauggggucucau

SEQ ID NO: 1030374 - RNA, 21 nt, Human
aagccagcauuucuuguuuga

SEQ ID NO: 1030375 - RNA, 23 nt, Human
aagccagcauuucuuguuugaua

SEQ ID NO: 1030376 - RNA, 25 nt, Human
aagcgauucuccugccucagccucc

SEQ ID NO: 1030377 - RNA, 19 nt, Human
aaguagcugggacuacagg

SEQ ID NO: 1030378 - RNA, 20 nt, Human
aaguagcugggacuacaggc

SEQ ID NO: 1030379 - RNA, 25 nt, Human
aaguagcugggacuacaggcacaug

SEQ ID NO: 1030380 - RNA, 24 nt, Human
acagugcugggauuacaggcauga

SEQ ID NO: 1030381 - RNA, 22 nt, Human
accucuaccucuugggcucaag

SEQ ID NO: 1030382 - RNA, 21 nt, Human
acuaagcguaaauuucucaag

SEQ ID NO: 1030383 - RNA, 25 nt, Human
acucuguugcccagacuggagugca

SEQ ID NO: 1030384 - RNA, 20 nt, Human
agccaccgggccaagccagc

SEQ ID NO: 1030385 - RNA, 23 nt, Human
agugcaguggcgcgaucuuggcu

SEQ ID NO: 1030386 - RNA, 24 nt, Human
agugcaguggcgcgaucuuggcuc

SEQ ID NO: 1030387 - RNA, 18 nt, Human
agugcugggauuacaggc

SEQ ID NO: 1030388 - RNA, 21 nt, Human
agugcugggauuacaggcaug

SEQ ID NO: 1030389 - RNA, 22 nt, Human
agugcugggauuacaggcauga

SEQ ID NO: 1030390 - RNA, 18 nt, Human
augagccaccgggccaag

SEQ ID NO: 1030391 - RNA, 19 nt, Human
augagccaccgggccaagc

SEQ ID NO: 1030392 - RNA, 22 nt, Human
caaccucuaccucuugggcuca

SEQ ID NO: 1030393 - RNA, 23 nt, Human
caaccucuaccucuugggcucaa

SEQ ID NO: 1030394 - RNA, 22 nt, Human
caagcgauucuccugccucagc

SEQ ID NO: 1030395 - RNA, 23 nt, Human
cacucuguugcccagacuggagu

SEQ ID NO: 1030396 - RNA, 24 nt, Human
cacucuguugcccagacuggagug

SEQ ID NO: 1030397 - RNA, 23 nt, Human
cacugcaaccucuaccucuuggg

SEQ ID NO: 1030398 - RNA, 25 nt, Human
cagugcugggauuacaggcaugagc

SEQ ID NO: 1030399 - RNA, 19 nt, Human
caguggcgcgaucuuggcu

SEQ ID NO: 1030400 - RNA, 23 nt, Human
ccacagugcugggauuacaggca

SEQ ID NO: 1030401 - RNA, 24 nt, Human
ccacagugcugggauuacaggcau

SEQ ID NO: 1030402 - RNA, 22 nt, Human
ccaugcccggccaauuuuuuga

SEQ ID NO: 1030403 - RNA, 23 nt, Human
cccaaguagcugggacuacaggc

SEQ ID NO: 1030404 - RNA, 24 nt, Human
cccaaguagcugggacuacaggca

SEQ ID NO: 1030405 - RNA, 22 nt, Human
cccccaccguggucucccacag

SEQ ID NO: 1030406 - RNA, 24 nt, Human
ccucuugggcucaagcgauucucc

SEQ ID NO: 1030407 - RNA, 23 nt, Human
ccugccucagccucccaaguagc

SEQ ID NO: 1030408 - RNA, 20 nt, Human
ccugggcucaagggauuccc

SEQ ID NO: 1030409 - RNA, 24 nt, Human
cuauggagcugcuuucugcuggcc

SEQ ID NO: 1030410 - RNA, 24 nt, Human
cucaagcgauucuccugccucagc

SEQ ID NO: 1030411 - RNA, 19 nt, Human
cucaagggauucccccacc

SEQ ID NO: 1030412 - RNA, 25 nt, Human
cucaagggauucccccaccgugguc

SEQ ID NO: 1030413 - RNA, 24 nt, Human
cucacugcaaccucuaccucuugg

SEQ ID NO: 1030414 - RNA, 24 nt, Human
cucagccucccaaguagcugggac

SEQ ID NO: 1030415 - RNA, 21 nt, Human
cuccugggcucaagggauucc

SEQ ID NO: 1030416 - RNA, 24 nt, Human
cugcaaccucuaccucuugggcuc

SEQ ID NO: 1030417 - RNA, 23 nt, Human
cugccucagccucccaaguagcu

SEQ ID NO: 1030418 - RNA, 24 nt, Human
gacuacaggcacaugccaccaugc

SEQ ID NO: 1030419 - RNA, 18 nt, Human
gauuacaggcaugagcca

SEQ ID NO: 1030420 - RNA, 20 nt, Human
gauuacaggcaugagccacc

SEQ ID NO: 1030421 - RNA, 21 nt, Human
gauuacaggcaugagccaccg

SEQ ID NO: 1030422 - RNA, 21 nt, Human
gauucuccugccucagccucc

SEQ ID NO: 1030423 - RNA, 20 nt, Human
gcccagacuggagugcagug

SEQ ID NO: 1030424 - RNA, 24 nt, Human
gcgauucuccugccucagccuccc

SEQ ID NO: 1030425 - RNA, 21 nt, Human
gcucacugcaaccucuaccuc

SEQ ID NO: 1030426 - RNA, 22 nt, Human
ggauuacaggcaugagccaccg

SEQ ID NO: 1030427 - RNA, 20 nt, Human
gggcucaagcgauucuccug

SEQ ID NO: 1030428 - RNA, 22 nt, Human
gggcucaagcgauucuccugcc

SEQ ID NO: 1030429 - RNA, 23 nt, Human
uacaggcacaugccaccaugccc

SEQ ID NO: 1030430 - RNA, 24 nt, Human
uaguagaaaugggguguugugaug

SEQ ID NO: 1030431 - RNA, 23 nt, Human
ucacugcaaccucuaccucuugg

SEQ ID NO: 1030432 - RNA, 24 nt, Human
ucacugcaaccucuaccucuuggg

SEQ ID NO: 1030433 - RNA, 20 nt, Human
ucagccucccaaguagcugg

SEQ ID NO: 1030434 - RNA, 24 nt, Human
ucccaaguagcugggacuacaggc

SEQ ID NO: 1030435 - RNA, 24 nt, Human
ucccacagugcugggauuacaggc

SEQ ID NO: 1030436 - RNA, 19 nt, Human
uccugggcucaagggauuc

SEQ ID NO: 1030437 - RNA, 20 nt, Human
ucuaguuuguaugagcaaag

SEQ ID NO: 1030438 - RNA, 19 nt, Human
ucucaaggaucagcugguu

SEQ ID NO: 1030439 - RNA, 24 nt, Human
ucucacucuguugcccagacugga

SEQ ID NO: 1030440 - RNA, 26 nt, Human
ucucacucuguugcccagacuggagu

SEQ ID NO: 1030441 - RNA, 27 nt, Human
ucucacucuguugcccagacuggagug

SEQ ID NO: 1030442 - RNA, 22 nt, Human
ucuccaacuccugggcucaagg

SEQ ID NO: 1030443 - RNA, 26 nt, Human
ucuccugccucagccucccaaguagc

SEQ ID NO: 1030444 - RNA, 24 nt, Human
ucuguugcccagacuggagugcag

SEQ ID NO: 1030445 - RNA, 22 nt, Human
ucuugggcucaagcgauucucc

SEQ ID NO: 1030446 - RNA, 24 nt, Human
ucuugggcucaagcgauucuccug

SEQ ID NO: 1030447 - RNA, 19 nt, Human
ugacccaagagcgagaugg

SEQ ID NO: 1030448 - RNA, 20 nt, Human
ugagacagggucucacucug

SEQ ID NO: 1030449 - RNA, 22 nt, Human
ugagacagggucucacucuguu

SEQ ID NO: 1030450 - RNA, 22 nt, Human
ugagauccugcguggcucuccc

SEQ ID NO: 1030451 - RNA, 21 nt, Human
ugcccagacuggagugcagug

SEQ ID NO: 1030452 - RNA, 24 nt, Human
ugcccagacuggagugcaguggcg

SEQ ID NO: 1030453 - RNA, 23 nt, Human
ugcccggccaauuuuuugauuau

SEQ ID NO: 1030454 - RNA, 24 nt, Human
ugccucagccucccaaguagcugg

SEQ ID NO: 1030455 - RNA, 23 nt, Human
uggagugcaguggcgcgaucuug

SEQ ID NO: 1030456 - RNA, 24 nt, Human
uggagugcaguggcgcgaucuugg

SEQ ID NO: 1030457 - RNA, 22 nt, Human
uggccaggcaugacccaagagc

SEQ ID NO: 1030458 - RNA, 21 nt, Human
ugggacuacaggcacaugcca

SEQ ID NO: 1030459 - RNA, 22 nt, Human
ugggacuacaggcacaugccac

SEQ ID NO: 1030460 - RNA, 24 nt, Human
ugggacuacaggcacaugccacca

SEQ ID NO: 1030461 - RNA, 25 nt, Human
ugggacuacaggcacaugccaccau

SEQ ID NO: 1030462 - RNA, 18 nt, Human
ugggauuacaggcaugag

SEQ ID NO: 1030463 - RNA, 19 nt, Human
ugggauuacaggcaugagc

SEQ ID NO: 1030464 - RNA, 22 nt, Human
ugggauuacaggcaugagccac

SEQ ID NO: 1030465 - RNA, 23 nt, Human
ugggauuacaggcaugagccacc

SEQ ID NO: 1030466 - RNA, 24 nt, Human
ugggauuacaggcaugagccaccg

SEQ ID NO: 1030467 - RNA, 26 nt, Human
ugggauuacaggcaugagccaccggg

SEQ ID NO: 1030468 - RNA, 27 nt, Human
ugggauuacaggcaugagccaccgggc

SEQ ID NO: 1030469 - RNA, 24 nt, Human
ugggcucaagcgauucuccugccu

SEQ ID NO: 1030470 - RNA, 21 nt, Human
uuaguagaaaugggguguugu

SEQ ID NO: 1030471 - RNA, 19 nt, Human
uucccccaccguggucucc

SEQ ID NO: 1030472 - RNA, 22 nt, Human
uugagacagggucucacucugu

SEQ ID NO: 1030473 - RNA, 19 nt, Human
acaguccugggaaacaggg

SEQ ID NO: 1030474 - RNA, 22 nt, Human
ccaaagugcagcugagguccug

SEQ ID NO: 1030475 - RNA, 25 nt, Human
cgccggaagaaggggcuugggccuc

SEQ ID NO: 1030476 - RNA, 18 nt, Human
gaaccugggcccaguccc

SEQ ID NO: 1030477 - RNA, 19 nt, Human
gaucccgagggucuggagc

SEQ ID NO: 1030478 - RNA, 19 nt, Human
ggaaccugggcccaguccc

SEQ ID NO: 1030479 - RNA, 24 nt, Human
ggggcggggaccagaagguucugg

SEQ ID NO: 1030480 - RNA, 21 nt, Human
ugaacuguaaacggagauccc

SEQ ID NO: 1030481 - RNA, 18 nt, Human
uggcugaggcggacgaug

SEQ ID NO: 1030482 - RNA, 22 nt, Human
ugggaaccugggcccaguccca

SEQ ID NO: 1030483 - RNA, 19 nt, Human
ugucacaguuucauuuaca

SEQ ID NO: 1030484 - RNA, 18 nt, Human
acuugggucucgugcuuu

SEQ ID NO: 1030485 - RNA, 18 nt, Human
agcagcccucugugccuc

SEQ ID NO: 1030486 - RNA, 23 nt, Human
agccacaguuaccgccgcggucc

SEQ ID NO: 1030487 - RNA, 21 nt, Human
cauccugcucugaccgcucca

SEQ ID NO: 1030488 - RNA, 27 nt, Human
ccucuguagguccacagagauggagac

SEQ ID NO: 1030489 - RNA, 20 nt, Human
cuuccuggccuggucucugg

SEQ ID NO: 1030490 - RNA, 19 nt, Human
gugcucuccaucucgggcc

SEQ ID NO: 1030491 - RNA, 25 nt, Human
uagugcucuccaucucgggccuucc

SEQ ID NO: 1030492 - RNA, 22 nt, Human
uccuggccuggucucugggaag

SEQ ID NO: 1030493 - RNA, 22 nt, Human
ucgggccuuccuggccuggucu

SEQ ID NO: 1030494 - RNA, 20 nt, Human
ucucugggaagauaaggguc

SEQ ID NO: 1030495 - RNA, 21 nt, Human
ucugugccucuguagguccac

SEQ ID NO: 1030496 - RNA, 24 nt, Human
ugagcagcccucugugccucugua

SEQ ID NO: 1030497 - RNA, 21 nt, Human
ugugagcagcccucugugccu

SEQ ID NO: 1030498 - RNA, 19 nt, Human
uuaaauaaaaacaugaaag

SEQ ID NO: 1030499 - RNA, 21 nt, Human
uuaaauaaaaacaugaaagcc

SEQ ID NO: 1030500 - RNA, 22 nt, Human
aaaccaaggcacaaagaaggga

SEQ ID NO: 1030501 - RNA, 22 nt, Human
aagaaggacaaggaaaaccaag

SEQ ID NO: 1030502 - RNA, 19 nt, Human
aaggggcugaguggggcug

SEQ ID NO: 1030503 - RNA, 20 nt, Human
aaugagaagacaagcagaga

SEQ ID NO: 1030504 - RNA, 18 nt, Human
acaaagaagggaccuagg

SEQ ID NO: 1030505 - RNA, 20 nt, Human
acaaagaagggaccuaggcg

SEQ ID NO: 1030506 - RNA, 23 nt, Human
accaccaaguccaaaugagaaga

SEQ ID NO: 1030507 - RNA, 25 nt, Human
accccagaacucaccacggacacac

SEQ ID NO: 1030508 - RNA, 18 nt, Human
acuaaggcaaaaaguaaa

SEQ ID NO: 1030509 - RNA, 23 nt, Human
acuacaacccucugaguguggcu

SEQ ID NO: 1030510 - RNA, 21 nt, Human
acucaccacggacacacagca

SEQ ID NO: 1030511 - RNA, 24 nt, Human
agacaggacgaaccaccaagucca

SEQ ID NO: 1030512 - RNA, 21 nt, Human
aggaaaaccaaggcacaaaga

SEQ ID NO: 1030513 - RNA, 27 nt, Human
aggcaaaaaguaaaaagaaggacaagg

SEQ ID NO: 1030514 - RNA, 18 nt, Human
agggcuaagaggaggagc

SEQ ID NO: 1030515 - RNA, 22 nt, Human
caaaaaguaaaaagaaggacaa

SEQ ID NO: 1030516 - RNA, 20 nt, Human
caauacuaaggcaaaaagua

SEQ ID NO: 1030517 - RNA, 22 nt, Human
caccccagaacucaccacggac

SEQ ID NO: 1030518 - RNA, 21 nt, Human
cagagggcuucucuucauauc

SEQ ID NO: 1030519 - RNA, 19 nt, Human
ccccagaacucaccacgga

SEQ ID NO: 1030520 - RNA, 26 nt, Human
cuaaggcaaaaaguaaaaagaaggac

SEQ ID NO: 1030521 - RNA, 20 nt, Human
cucacaggcaaaggaggcag

SEQ ID NO: 1030522 - RNA, 18 nt, Human
cuggcgcggcagccccuc

SEQ ID NO: 1030523 - RNA, 20 nt, Human
gaaaaccaaggcacaaagaa

SEQ ID NO: 1030524 - RNA, 23 nt, Human
gaagaaggggcugaguggggcug

SEQ ID NO: 1030525 - RNA, 21 nt, Human
gaaggacaaggaaaaccaagg

SEQ ID NO: 1030526 - RNA, 21 nt, Human
gaaggggcugaguggggcugu

SEQ ID NO: 1030527 - RNA, 21 nt, Human
gacguagugucagaccaggag

SEQ ID NO: 1030528 - RNA, 23 nt, Human
gagguggacaacuacuacaaccc

SEQ ID NO: 1030529 - RNA, 23 nt, Human
ggacaaggcugacugucuuuugg

SEQ ID NO: 1030530 - RNA, 20 nt, Human
gggagaggagucagaggcug

SEQ ID NO: 1030531 - RNA, 23 nt, Human
gggcuguccagagguggacaacu

SEQ ID NO: 1030532 - RNA, 22 nt, Human
uaaggcaaaaaguaaaaagaag

SEQ ID NO: 1030533 - RNA, 25 nt, Human
uacaacccucugaguguggcugccu

SEQ ID NO: 1030534 - RNA, 18 nt, Human
uagugaagaaggggcuga

SEQ ID NO: 1030535 - RNA, 21 nt, Human
ucaccacggacacacagcaga

SEQ ID NO: 1030536 - RNA, 21 nt, Human
uccaaaugagaagacaagcag

SEQ ID NO: 1030537 - RNA, 18 nt, Human
uccuuugaggggagagga

SEQ ID NO: 1030538 - RNA, 18 nt, Human
ugagaagacaagcagaga

SEQ ID NO: 1030539 - RNA, 25 nt, Human
ugagacaggacgaaccaccaagucc

SEQ ID NO: 1030540 - RNA, 26 nt, Human
ugagacaggacgaaccaccaagucca

SEQ ID NO: 1030541 - RNA, 19 nt, Human
ugaggacaaggcugacugu

SEQ ID NO: 1030542 - RNA, 20 nt, Human
ugaggacaaggcugacuguc

SEQ ID NO: 1030543 - RNA, 19 nt, Human
aaacaggaaagcucccaag

SEQ ID NO: 1030544 - RNA, 23 nt, Human
accauuuacaaaugcuguuuguu

SEQ ID NO: 1030545 - RNA, 20 nt, Human
agaccauuuacaaaugcugu

SEQ ID NO: 1030546 - RNA, 18 nt, Human
augaaggcuaauagacca

SEQ ID NO: 1030547 - RNA, 22 nt, Human
caggaaagcucccaagaauuga

SEQ ID NO: 1030548 - RNA, 21 nt, Human
ccacgcuccacacucugcacc

SEQ ID NO: 1030549 - RNA, 23 nt, Human
cuccacacucugcaccucgugcc

SEQ ID NO: 1030550 - RNA, 19 nt, Human
gcuccacacucugcaccuc

SEQ ID NO: 1030551 - RNA, 22 nt, Human
ggcaaccagagcccccuggagc

SEQ ID NO: 1030552 - RNA, 19 nt, Human
uaagaucacauauuugcca

SEQ ID NO: 1030553 - RNA, 25 nt, Human
uaccagauguuuauagauggauagu

SEQ ID NO: 1030554 - RNA, 19 nt, Human
uaguccuuauaaauuuaag

SEQ ID NO: 1030555 - RNA, 22 nt, Human
uauuaaacaggaaagcucccaa

SEQ ID NO: 1030556 - RNA, 18 nt, Human
ucucucuggcuaggaccg

SEQ ID NO: 1030557 - RNA, 19 nt, Human
ucuggcuaggaccgcacug

SEQ ID NO: 1030558 - RNA, 18 nt, Human
ugaaugcguacgagccau

SEQ ID NO: 1030559 - RNA, 19 nt, Human
uggagcugccugugugcac

SEQ ID NO: 1030560 - RNA, 24 nt, Human
uggcaaauguccuuucucucuggc

SEQ ID NO: 1030561 - RNA, 19 nt, Human
uuuauagauggauaguccu

SEQ ID NO: 1030562 - RNA, 18 nt, Human
uuuuuuuuuuuuuuuuug

SEQ ID NO: 1030563 - RNA, 22 nt, Human
uuuuuuuuuuuuuuuuugcagg

SEQ ID NO: 1030564 - RNA, 23 nt, Human
uuuuuuuuuuuuuuuuugcaggu

SEQ ID NO: 1030565 - RNA, 20 nt, Human
aaccccacuccucuccucca

SEQ ID NO: 1030566 - RNA, 23 nt, Human
aaccucugggcucaagcgauccu

SEQ ID NO: 1030567 - RNA, 24 nt, Human
aagcgauccucccgccuuggccuc

SEQ ID NO: 1030568 - RNA, 25 nt, Human
aagcgauccucccgccuuggccucc

SEQ ID NO: 1030569 - RNA, 18 nt, Human
aagugcugggauuacagg

SEQ ID NO: 1030570 - RNA, 19 nt, Human
aagugcugggauuacaggc

SEQ ID NO: 1030571 - RNA, 19 nt, Human
aagugcugggauuacaggc

SEQ ID NO: 1030572 - RNA, 24 nt, Human
accacaccgggcuaacuuuuaauu

SEQ ID NO: 1030573 - RNA, 22 nt, Human
accccacuccucuccuccaccc

SEQ ID NO: 1030574 - RNA, 24 nt, Human
accccacuccucuccuccacccua

SEQ ID NO: 1030575 - RNA, 19 nt, Human
acucucuugcccagguuga

SEQ ID NO: 1030576 - RNA, 18 nt, Human
agugcugggauuacaggc

SEQ ID NO: 1030577 - RNA, 27 nt, Human
caagcgauccucccgccuuggccuccc

SEQ ID NO: 1030578 - RNA, 19 nt, Human
caagugcugggauuacagg

SEQ ID NO: 1030579 - RNA, 21 nt, Human
cacaccgggcuaacuuuuaau

SEQ ID NO: 1030580 - RNA, 24 nt, Human
cagggucucacucucuugcccagg

SEQ ID NO: 1030581 - RNA, 24 nt, Human
caucaacaaaccccacuccucucc

SEQ ID NO: 1030582 - RNA, 21 nt, Human
ccaagugcugggauuacaggc

SEQ ID NO: 1030583 - RNA, 21 nt, Human
ccaagugcugggauuacaggc

SEQ ID NO: 1030584 - RNA, 23 nt, Human
ccaagugcugggauuacaggcgu

SEQ ID NO: 1030585 - RNA, 24 nt, Human
ccaagugcugggauuacaggcgug

SEQ ID NO: 1030586 - RNA, 22 nt, Human
cccaagugcugggauuacaggc

SEQ ID NO: 1030587 - RNA, 24 nt, Human
cccaagugcugggauuacaggcgu

SEQ ID NO: 1030588 - RNA, 19 nt, Human
cccacuccucuccuccacc

SEQ ID NO: 1030589 - RNA, 23 nt, Human
ccccaagugcugggauuacaggc

SEQ ID NO: 1030590 - RNA, 25 nt, Human
ccucccgccuuggccuccccaagug

SEQ ID NO: 1030591 - RNA, 25 nt, Human
ccucugggcucaagcgauccucccg

SEQ ID NO: 1030592 - RNA, 19 nt, Human
cgauccucccgccuuggcc

SEQ ID NO: 1030593 - RNA, 22 nt, Human
cgccaccacaccgggcuaacuu

SEQ ID NO: 1030594 - RNA, 24 nt, Human
cucaagcgauccucccgccuuggc

SEQ ID NO: 1030595 - RNA, 20 nt, Human
cuccucuccuccacccuagc

SEQ ID NO: 1030596 - RNA, 21 nt, Human
ggacagcgcggcguguggucc

SEQ ID NO: 1030597 - RNA, 21 nt, Human
gggggugggguggggguggag

SEQ ID NO: 1030598 - RNA, 21 nt, Human
ggguugggugcuggggacagc

SEQ ID NO: 1030599 - RNA, 23 nt, Human
uaagccacaggugcgcgccacca

SEQ ID NO: 1030600 - RNA, 24 nt, Human
uccccaagugcugggauuacaggc

SEQ ID NO: 1030601 - RNA, 19 nt, Human
ucucacucucuugcccagg

SEQ ID NO: 1030602 - RNA, 23 nt, Human
ucucacucucuugcccagguuga

SEQ ID NO: 1030603 - RNA, 23 nt, Human
ucucgaaccucugggcucaagcg

SEQ ID NO: 1030604 - RNA, 19 nt, Human
ugcgggggugggguggggg

SEQ ID NO: 1030605 - RNA, 19 nt, Human
ugcugggauuacaggcgug

SEQ ID NO: 1030606 - RNA, 22 nt, Human
ugcugggauuacaggcgugcgg

SEQ ID NO: 1030607 - RNA, 18 nt, Human
ugggauuacaggcgugcg

SEQ ID NO: 1030608 - RNA, 18 nt, Human
ugggauuacaggcgugcg

SEQ ID NO: 1030609 - RNA, 24 nt, Human
ugggcucaagcgauccucccgccu

SEQ ID NO: 1030610 - RNA, 19 nt, Human
ugggguggggguggagguu

SEQ ID NO: 1030611 - RNA, 18 nt, Human
ugggugcuggggacagcg

SEQ ID NO: 1030612 - RNA, 21 nt, Human
uucaucaacaaaccccacucc

SEQ ID NO: 1030613 - RNA, 19 nt, Human
uugaucucgaaccucuggg

SEQ ID NO: 1030614 - RNA, 22 nt, Human
uuucaggguagcuaagccacag

SEQ ID NO: 1030615 - RNA, 23 nt, Human
uuucaggguagcuaagccacagg

SEQ ID NO: 1030616 - RNA, 25 nt, Human
uuuuuuuuuuuuuuuuuuucagggg

SEQ ID NO: 1030617 - RNA, 22 nt, Human
cccacggccgcgccccucggcc

SEQ ID NO: 1030618 - RNA, 19 nt, Human
ccccacggccgcgccccuc

SEQ ID NO: 1030619 - RNA, 18 nt, Human
ccgaggcaggacacagag

SEQ ID NO: 1030620 - RNA, 21 nt, Human
ccgcaaagagccgaggcugcc

SEQ ID NO: 1030621 - RNA, 19 nt, Human
cggccgcgccccucggccu

SEQ ID NO: 1030622 - RNA, 18 nt, Human
cugccaggcccauuuaug

SEQ ID NO: 1030623 - RNA, 26 nt, Human
gcaaagagccgaggcugccaggccca

SEQ ID NO: 1030624 - RNA, 22 nt, Human
ucucuagauuuucucgucaccc

SEQ ID NO: 1030625 - RNA, 21 nt, Human
ugccaggcccauuuauguccc

SEQ ID NO: 1030626 - RNA, 22 nt, Human
ugcuggaaguguggggagaacc

SEQ ID NO: 1030627 - RNA, 20 nt, Human
caccagcuccgagaaggaug

SEQ ID NO: 1030628 - RNA, 21 nt, Human
cagcaaugcagccccaggcac

SEQ ID NO: 1030629 - RNA, 23 nt, Human
cagcaaugcagccccaggcacca

SEQ ID NO: 1030630 - RNA, 18 nt, Human
ccaggccccggcaagccc

SEQ ID NO: 1030631 - RNA, 23 nt, Human
cccagcucuggggcggggcgggg

SEQ ID NO: 1030632 - RNA, 23 nt, Human
cccagggggcccagcucuggggc

SEQ ID NO: 1030633 - RNA, 19 nt, Human
cccccccacccugguuacc

SEQ ID NO: 1030634 - RNA, 24 nt, Human
ccucccccguuguuaggagccaga

SEQ ID NO: 1030635 - RNA, 19 nt, Human
cggacgaauaaauaggggc

SEQ ID NO: 1030636 - RNA, 24 nt, Human
cuccgagaaggaugcgguggggcg

SEQ ID NO: 1030637 - RNA, 18 nt, Human
cucuggggcggggcgggg

SEQ ID NO: 1030638 - RNA, 21 nt, Human
cugcucucuugacacaguucc

SEQ ID NO: 1030639 - RNA, 19 nt, Human
cuuucucgcucuuuaaucu

SEQ ID NO: 1030640 - RNA, 26 nt, Human
gcggggcgggggcgccuugcuggagc

SEQ ID NO: 1030641 - RNA, 21 nt, Human
ggaaccugcccagggggccca

SEQ ID NO: 1030642 - RNA, 23 nt, Human
ggacgaauaaauaggggcgguca

SEQ ID NO: 1030643 - RNA, 20 nt, Human
gggcccagcucuggggcggg

SEQ ID NO: 1030644 - RNA, 20 nt, Human
gggcggggcgggggcgccuc

SEQ ID NO: 1030645 - RNA, 18 nt, Human
ggggcgggguggggaacc

SEQ ID NO: 1030646 - RNA, 21 nt, Human
guggggcgggguggggaaccu

SEQ ID NO: 1030647 - RNA, 24 nt, Human
guggggcgggguggggaaccugcc

SEQ ID NO: 1030648 - RNA, 18 nt, Human
uaggggcggucagugguc

SEQ ID NO: 1030649 - RNA, 21 nt, Human
ucacucugcucucuugacaca

SEQ ID NO: 1030650 - RNA, 27 nt, Human
ucacucugcucucuugacacaguucca

SEQ ID NO: 1030651 - RNA, 21 nt, Human
ugcccagggggcccagcucug

SEQ ID NO: 1030652 - RNA, 24 nt, Human
ugcgguggggcgggguggggaacc

SEQ ID NO: 1030653 - RNA, 22 nt, Human
uggggaaccugcccagggggcc

SEQ ID NO: 1030654 - RNA, 27 nt, Human
uuccagcaaugcagccccaggcaccag

SEQ ID NO: 1030655 - RNA, 23 nt, Human
uuuuuugcuuucucgcucuuuaa

SEQ ID NO: 1030656 - RNA, 18 nt, Human
uuuuuuuuuuuuuuuuug

SEQ ID NO: 1030657 - RNA, 23 nt, Human
uuuuuuuuuuuuuuuuuugcuuu

SEQ ID NO: 1030658 - RNA, 19 nt, Human
aaacugguuaugguaguug

SEQ ID NO: 1030659 - RNA, 22 nt, Human
aacaagaaauucugaaaacguc

SEQ ID NO: 1030660 - RNA, 24 nt, Human
aagaaggcaucaccuucucuagcu

SEQ ID NO: 1030661 - RNA, 24 nt, Human
aagcagacagcagaaacccaacau

SEQ ID NO: 1030662 - RNA, 27 nt, Human
aagcagacagcagaaacccaacauuca

SEQ ID NO: 1030663 - RNA, 22 nt, Human
aaucucaaaaaauucaggcaug

SEQ ID NO: 1030664 - RNA, 24 nt, Human
acaaucucaaaaaauucaggcaug

SEQ ID NO: 1030665 - RNA, 18 nt, Human
acagcaaaaagucauucc

SEQ ID NO: 1030666 - RNA, 20 nt, Human
acaggcaaagcaaggggcag

SEQ ID NO: 1030667 - RNA, 20 nt, Human
agacuucugugucugagagg

SEQ ID NO: 1030668 - RNA, 21 nt, Human
aggaaggaaaaugaaacacaa

SEQ ID NO: 1030669 - RNA, 18 nt, Human
aggugaaagucuacaacc

SEQ ID NO: 1030670 - RNA, 19 nt, Human
auacaaagacaaaagaacu

SEQ ID NO: 1030671 - RNA, 20 nt, Human
auacaaagacaaaagaacuc

SEQ ID NO: 1030672 - RNA, 23 nt, Human
auacaaagacaaaagaacucuac

SEQ ID NO: 1030673 - RNA, 18 nt, Human
auagagcugcgucuaaau

SEQ ID NO: 1030674 - RNA, 24 nt, Human
caaaccaggaaggaaaaugaaaca

SEQ ID NO: 1030675 - RNA, 19 nt, Human
caaagacaaaagaacucua

SEQ ID NO: 1030676 - RNA, 23 nt, Human
caaagcaaggcucucugagaagc

SEQ ID NO: 1030677 - RNA, 24 nt, Human
caaagcaaggcucucugagaagca

SEQ ID NO: 1030678 - RNA, 24 nt, Human
caaagcaaggcucucugagaagcc

SEQ ID NO: 1030679 - RNA, 19 nt, Human
caaagcaaggggcagcaga

SEQ ID NO: 1030680 - RNA, 20 nt, Human
caaagcaaggggcagcagag

SEQ ID NO: 1030681 - RNA, 20 nt, Human
caaagcaaggggcagcagag

SEQ ID NO: 1030682 - RNA, 25 nt, Human
cacaaaccaggaaggaaaaugaaac

SEQ ID NO: 1030683 - RNA, 22 nt, Human
caccaggaggcucaccaugucu

SEQ ID NO: 1030684 - RNA, 18 nt, Human
cagacagcagaaacccaa

SEQ ID NO: 1030685 - RNA, 19 nt, Human
cagacagcagaaacccaac

SEQ ID NO: 1030686 - RNA, 25 nt, Human
cagcagaaacccaacauucaaaacc

SEQ ID NO: 1030687 - RNA, 19 nt, Human
cagcagaggcugugucacu

SEQ ID NO: 1030688 - RNA, 22 nt, Human
caggggccgccaugccugccgu

SEQ ID NO: 1030689 - RNA, 25 nt, Human
caucugcuuuucaucagcaaacaca

SEQ ID NO: 1030690 - RNA, 19 nt, Human
cauucaaaaccaucacagc

SEQ ID NO: 1030691 - RNA, 21 nt, Human
cauuucaacaagaaauucuga

SEQ ID NO: 1030692 - RNA, 22 nt, Human
ccaaagcaaggcucucugagaa

SEQ ID NO: 1030693 - RNA, 20 nt, Human
ccacacuuuaaucaccaugg

SEQ ID NO: 1030694 - RNA, 22 nt, Human
ccauacaaagacaaaagaacuc

SEQ ID NO: 1030695 - RNA, 23 nt, Human
cccauaaccacacuuuaaucacc

SEQ ID NO: 1030696 - RNA, 21 nt, Human
cuaagcagacagcagaaaccc

SEQ ID NO: 1030697 - RNA, 21 nt, Human
cucugagaagcauuugaaaaa

SEQ ID NO: 1030698 - RNA, 20 nt, Human
cuuccugcccauaaccacac

SEQ ID NO: 1030699 - RNA, 21 nt, Human
gaaaugccauuugacucgcaa

SEQ ID NO: 1030700 - RNA, 20 nt, Human
gagagagagagaauuaacac

SEQ ID NO: 1030701 - RNA, 20 nt, Human
gcaguaauggaaaaaguauc

SEQ ID NO: 1030702 - RNA, 25 nt, Human
gcaguaauggaaaaaguaucaucac

SEQ ID NO: 1030703 - RNA, 20 nt, Human
ggcagcagaggcugugucac

SEQ ID NO: 1030704 - RNA, 19 nt, Human
uaacacacacaaaccagga

SEQ ID NO: 1030705 - RNA, 20 nt, Human
uaguuucgggauuuugguug

SEQ ID NO: 1030706 - RNA, 23 nt, Human
uaugguaguugcugaugaagaag

SEQ ID NO: 1030707 - RNA, 23 nt, Human
ucaaccaaagcaaggcucucuga

SEQ ID NO: 1030708 - RNA, 22 nt, Human
uccacaucauuauaagcuucua

SEQ ID NO: 1030709 - RNA, 21 nt, Human
uccauacaaagacaaaagaac

SEQ ID NO: 1030710 - RNA, 30 nt, Human
ucuaacuccuuugauauuuacaaucucaaa

SEQ ID NO: 1030711 - RNA, 23 nt, Human
ucuacaaccaugucagaacacaa

SEQ ID NO: 1030712 - RNA, 19 nt, Human
ugaaagucuacaaccaugu

SEQ ID NO: 1030713 - RNA, 21 nt, Human
ugaagaagaugaggagccagg

SEQ ID NO: 1030714 - RNA, 24 nt, Human
ugaggagccaggaugucauuccuu

SEQ ID NO: 1030715 - RNA, 18 nt, Human
ugccguuaggaaaugcca

SEQ ID NO: 1030716 - RNA, 23 nt, Human
ugcgucuaaauguuugaguggug

SEQ ID NO: 1030717 - RNA, 19 nt, Human
uggaaaaugcaacaugaga

SEQ ID NO: 1030718 - RNA, 23 nt, Human
uggaagaaggcaucaccuucucu

SEQ ID NO: 1030719 - RNA, 19 nt, Human
ugucagaacacaaucuaac

SEQ ID NO: 1030720 - RNA, 26 nt, Human
uuaacacacacaaaccaggaaggaaa

SEQ ID NO: 1030721 - RNA, 19 nt, Human
uucaggggccgccaugccu

SEQ ID NO: 1030722 - RNA, 21 nt, Human
uuccauacaaagacaaaagaa

SEQ ID NO: 1030723 - RNA, 23 nt, Human
uuugaaaaauacgcauugaaaag

SEQ ID NO: 1030724 - RNA, 22 nt, Human
aaaacugcaaaccaucagccaa

SEQ ID NO: 1030725 - RNA, 22 nt, Human
aaaaguaaugugcuuauaaggg

SEQ ID NO: 1030726 - RNA, 20 nt, Human
aaaauaaucuaaacauggga

SEQ ID NO: 1030727 - RNA, 23 nt, Human
aacugcucuucaaaagguaccau

SEQ ID NO: 1030728 - RNA, 20 nt, Human
agagucauauuuuuucccua

SEQ ID NO: 1030729 - RNA, 21 nt, Human
aucaucccagacucuuugaug

SEQ ID NO: 1030730 - RNA, 23 nt, Human
aucucuuuuagaauuuucuguua

SEQ ID NO: 1030731 - RNA, 25 nt, Human
augguccaguacaugacauggguga

SEQ ID NO: 1030732 - RNA, 21 nt, Human
caggcaauuagaaaagggagg

SEQ ID NO: 1030733 - RNA, 20 nt, Human
ccauguaaccaucugugagc

SEQ ID NO: 1030734 - RNA, 18 nt, Human
cccggaaccugaaccgag

SEQ ID NO: 1030735 - RNA, 25 nt, Human
cucaauguccaaaaguuauacuacu

SEQ ID NO: 1030736 - RNA, 23 nt, Human
cugugagcuucuuugaauaguuc

SEQ ID NO: 1030737 - RNA, 24 nt, Human
cuuucuccaucucaauguccaaaa

SEQ ID NO: 1030738 - RNA, 19 nt, Human
gaacagauugaugaagauu

SEQ ID NO: 1030739 - RNA, 18 nt, Human
gcagaacugcucuucaaa

SEQ ID NO: 1030740 - RNA, 20 nt, Human
gcagaacugcucuucaaaag

SEQ ID NO: 1030741 - RNA, 23 nt, Human
gucauauuuuuucccuacccauu

SEQ ID NO: 1030742 - RNA, 20 nt, Human
uaaaaaguagagaaagaugg

SEQ ID NO: 1030743 - RNA, 22 nt, Human
uaaaauaaucuaaacaugggac

SEQ ID NO: 1030744 - RNA, 19 nt, Human
uauggcauauaauauauau

SEQ ID NO: 1030745 - RNA, 22 nt, Human
uaugguauauauaguauauaug

SEQ ID NO: 1030746 - RNA, 19 nt, Human
ucuagugaacuucaagcuc

SEQ ID NO: 1030747 - RNA, 26 nt, Human
ucucauguaaauguuauaugccuuac

SEQ ID NO: 1030748 - RNA, 22 nt, Human
ucuguaaucuagacauacaggc

SEQ ID NO: 1030749 - RNA, 22 nt, Human
ucuuacucugucuuaugaugaa

SEQ ID NO: 1030750 - RNA, 19 nt, Human
ugagugcacauuuaaacaa

SEQ ID NO: 1030751 - RNA, 21 nt, Human
ugucuaaccauuuugcucagu

SEQ ID NO: 1030752 - RNA, 23 nt, Human
ugugaaacuaucauucacaaauu

SEQ ID NO: 1030753 - RNA, 22 nt, Human
uguuaagagggccaugagaucg

SEQ ID NO: 1030754 - RNA, 21 nt, Human
uuaaugcaagauauaaagaag

SEQ ID NO: 1030755 - RNA, 23 nt, Human
uugugauguuuuucuaguuguau

SEQ ID NO: 1030756 - RNA, 27 nt, Human
uuugauaauuucucacuuucuccaucu

SEQ ID NO: 1030757 - RNA, 20 nt, Human
aaaaaagaaaacuaccugau

SEQ ID NO: 1030758 - RNA, 30 nt, Human
aaaaugacuuaucaaaagccugaaacaucc

SEQ ID NO: 1030759 - RNA, 24 nt, Human
aaacaggcaauccagacuccacca

SEQ ID NO: 1030760 - RNA, 20 nt, Human
aaagaggcacuaccaccccc

SEQ ID NO: 1030761 - RNA, 20 nt, Human
aaaguacaacuagcaaaaaa

SEQ ID NO: 1030762 - RNA, 18 nt, Human
aaaguacauaaaacugca

SEQ ID NO: 1030763 - RNA, 19 nt, Human
aaaguucuucaaaggacac

SEQ ID NO: 1030764 - RNA, 19 nt, Human
aacaaaagcauccucaauc

SEQ ID NO: 1030765 - RNA, 21 nt, Human
aacaaauacacagcacaccuu

SEQ ID NO: 1030766 - RNA, 23 nt, Human
aacuacaaaagugcuuucaaaua

SEQ ID NO: 1030767 - RNA, 24 nt, Human
aagcaaucuauacaccuuuggccu

SEQ ID NO: 1030768 - RNA, 20 nt, Human
aaggauguauauuuccuucc

SEQ ID NO: 1030769 - RNA, 21 nt, Human
aaggcaguuuugacccaauua

SEQ ID NO: 1030770 - RNA, 19 nt, Human
aagugcuuucaaauaucag

SEQ ID NO: 1030771 - RNA, 26 nt, Human
aauacagaaaaaagaaaacuaccuga

SEQ ID NO: 1030772 - RNA, 24 nt, Human
aaugacuuaucaaaagccugaaac

SEQ ID NO: 1030773 - RNA, 19 nt, Human
acacacacacagacacaca

SEQ ID NO: 1030774 - RNA, 26 nt, Human
acacaugcagacacacacacagacac

SEQ ID NO: 1030775 - RNA, 24 nt, Human
accauuuucuucaacagaccucaa

SEQ ID NO: 1030776 - RNA, 24 nt, Human
accccguccgccuccgccucugcc

SEQ ID NO: 1030777 - RNA, 20 nt, Human
agacacacacacagacacac

SEQ ID NO: 1030778 - RNA, 22 nt, Human
agacacacacacagacacacau

SEQ ID NO: 1030779 - RNA, 22 nt, Human
auaaggauguauauuuccuuca

SEQ ID NO: 1030780 - RNA, 23 nt, Human
auggccgagccucugcuuugggc

SEQ ID NO: 1030781 - RNA, 19 nt, Human
caaaacaggcaauccagac

SEQ ID NO: 1030782 - RNA, 22 nt, Human
caaaacaggcaauccagacucc

SEQ ID NO: 1030783 - RNA, 22 nt, Human
caacaaauacacagcacaccuu

SEQ ID NO: 1030784 - RNA, 25 nt, Human
caacagaccucaaaggcaguuuuga

SEQ ID NO: 1030785 - RNA, 29 nt, Human
caaguacaugcgugcacacaugcagugug

SEQ ID NO: 1030786 - RNA, 27 nt, Human
cacacacacagacacacauguaaagca

SEQ ID NO: 1030787 - RNA, 20 nt, Human
cacaccuuauuccuuuaaaa

SEQ ID NO: 1030788 - RNA, 19 nt, Human
cacagacacacauguaaag

SEQ ID NO: 1030789 - RNA, 19 nt, Human
cacccccuuucaagcaauc

SEQ ID NO: 1030790 - RNA, 21 nt, Human
cacccccuuucaagcaaucua

SEQ ID NO: 1030791 - RNA, 19 nt, Human
cagaaaaaagaaaacuacc

SEQ ID NO: 1030792 - RNA, 23 nt, Human
cagacacacauguaaagcaaccg

SEQ ID NO: 1030793 - RNA, 20 nt, Human
cagacuuaauaaauacaaug

SEQ ID NO: 1030794 - RNA, 20 nt, Human
caucaaaacuacaaaagugc

SEQ ID NO: 1030795 - RNA, 29 nt, Human
caugcagacacacacacagacacacaugg

SEQ ID NO: 1030796 - RNA, 24 nt, Human
cauggccgagccucugcuuugggc

SEQ ID NO: 1030797 - RNA, 23 nt, Human
cauuuuaaaaacagaugcacaga

SEQ ID NO: 1030798 - RNA, 21 nt, Human
ccagacuguagccgacucaac

SEQ ID NO: 1030799 - RNA, 18 nt, Human
ccccguccgccuccgccu

SEQ ID NO: 1030800 - RNA, 18 nt, Human
ccgccgccgccgcugucc

SEQ ID NO: 1030801 - RNA, 21 nt, Human
ccgccgccgccgcugucccgg

SEQ ID NO: 1030802 - RNA, 24 nt, Human
ccuaaagaaagcauucuuaagacu

SEQ ID NO: 1030803 - RNA, 21 nt, Human
ccugaaaguacauaaaacugc

SEQ ID NO: 1030804 - RNA, 23 nt, Human
cguaugcuuucauagcacaugug

SEQ ID NO: 1030805 - RNA, 23 nt, Human
cucaacaucaacaacuaguugcu

SEQ ID NO: 1030806 - RNA, 23 nt, Human
cuccaaaauuuuaaguaaaccaa

SEQ ID NO: 1030807 - RNA, 19 nt, Human
cuccugaaaguacauaaaa

SEQ ID NO: 1030808 - RNA, 21 nt, Human
cugauggucuucuccugaaag

SEQ ID NO: 1030809 - RNA, 23 nt, Human
cuuaaaaccucauuuuucagcag

SEQ ID NO: 1030810 - RNA, 28 nt, Human
cuuggccucuguuguaggaaggacggcc

SEQ ID NO: 1030811 - RNA, 21 nt, Human
cuuugggcugaccccguccgc

SEQ ID NO: 1030812 - RNA, 21 nt, Human
cuuuuacauugcauacaagua

SEQ ID NO: 1030813 - RNA, 21 nt, Human
gucuguccuaaagaaagcauu

SEQ ID NO: 1030814 - RNA, 22 nt, Human
uaaaccaaaugcaaugauucug

SEQ ID NO: 1030815 - RNA, 23 nt, Human
uaaagaaagcauucuuaagacaa

SEQ ID NO: 1030816 - RNA, 18 nt, Human
uaaauguuuaauuuacua

SEQ ID NO: 1030817 - RNA, 20 nt, Human
uaaucugcauuuucuuccuu

SEQ ID NO: 1030818 - RNA, 21 nt, Human
uacagaaaaaagaaaacuacc

SEQ ID NO: 1030819 - RNA, 30 nt, Human
uacaugcgugcacacaugcagacacacaca

SEQ ID NO: 1030820 - RNA, 23 nt, Human
uagcagggagcacucugcgagaa

SEQ ID NO: 1030821 - RNA, 21 nt, Human
uauaaaucacuuuccccuuuc

SEQ ID NO: 1030822 - RNA, 21 nt, Human
uauccuaccaugaauaauuuu

SEQ ID NO: 1030823 - RNA, 28 nt, Human
uauccuaccaugaauaauuuuagaauca

SEQ ID NO: 1030824 - RNA, 24 nt, Human
ucaaaaaaggauacucugcaagac

SEQ ID NO: 1030825 - RNA, 19 nt, Human
ucaaagaagggugucaaca

SEQ ID NO: 1030826 - RNA, 24 nt, Human
ucaaauaucagaggcaaauauaau

SEQ ID NO: 1030827 - RNA, 22 nt, Human
ucaacacaauuaaaauccauaa

SEQ ID NO: 1030828 - RNA, 19 nt, Human
ucauggccgagccucugcu

SEQ ID NO: 1030829 - RNA, 19 nt, Human
ucauuucuuuccuaaacag

SEQ ID NO: 1030830 - RNA, 24 nt, Human
uccgccgccgccgcugucccgggu

SEQ ID NO: 1030831 - RNA, 21 nt, Human
uccuuaaaaccucauuuuuca

SEQ ID NO: 1030832 - RNA, 24 nt, Human
ucuaauauuugcaagggcuuuaau

SEQ ID NO: 1030833 - RNA, 24 nt, Human
ucugcauuuucuuccuuaaaaccu

SEQ ID NO: 1030834 - RNA, 24 nt, Human
ugaaaaacagagguuaagggauua

SEQ ID NO: 1030835 - RNA, 21 nt, Human
ugaaacauucacacaccagau

SEQ ID NO: 1030836 - RNA, 19 nt, Human
ugaaaguacauaaaacugc

SEQ ID NO: 1030837 - RNA, 19 nt, Human
ugaaaguacauaaaacugg

SEQ ID NO: 1030838 - RNA, 24 nt, Human
ugcacacaugcagacacacacaca

SEQ ID NO: 1030839 - RNA, 28 nt, Human
ugcagacacacacacagacacacaugua

SEQ ID NO: 1030840 - RNA, 22 nt, Human
ugcauacaaguacaugcgugca

SEQ ID NO: 1030841 - RNA, 27 nt, Human
ugcauacaaguacaugcgugcacacag

SEQ ID NO: 1030842 - RNA, 22 nt, Human
ugcucucaacaucaacaacuag

SEQ ID NO: 1030843 - RNA, 21 nt, Human
uggggucuugaaaauauuuua

SEQ ID NO: 1030844 - RNA, 22 nt, Human
uguaaagcaacaaauucaaaga

SEQ ID NO: 1030845 - RNA, 24 nt, Human
uucaaagaagggugucaacacaau

SEQ ID NO: 1030846 - RNA, 19 nt, Human
uucaaagugugaaacccuu

SEQ ID NO: 1030847 - RNA, 25 nt, Human
uucaucaucaaaacuacaaaagugc

SEQ ID NO: 1030848 - RNA, 18 nt, Human
uuccuaaacagauuagaa

SEQ ID NO: 1030849 - RNA, 26 nt, Human
uuuaaaaacagaugcacagaggugag

SEQ ID NO: 1030850 - RNA, 23 nt, Human
uuugacuucuuuguccugucuuu

SEQ ID NO: 1030851 - RNA, 26 nt, Human
uuuggccuuuguuucccaauuugaug

SEQ ID NO: 1030852 - RNA, 20 nt, Human
aagagcaaugagggaacugc

SEQ ID NO: 1030853 - RNA, 21 nt, Human
aaggaggagcagaggguggug

SEQ ID NO: 1030854 - RNA, 26 nt, Human
acaccaaaacugaacuuccacccggu

SEQ ID NO: 1030855 - RNA, 19 nt, Human
agagggugguguuucgggc

SEQ ID NO: 1030856 - RNA, 19 nt, Human
agaugaauggcucuucugc

SEQ ID NO: 1030857 - RNA, 23 nt, Human
agcaaugagggaacugcuuagga

SEQ ID NO: 1030858 - RNA, 19 nt, Human
agccuggaaagcugacccu

SEQ ID NO: 1030859 - RNA, 24 nt, Human
aggagaaggaggagcagagggugg

SEQ ID NO: 1030860 - RNA, 25 nt, Human
caagcccaucccugccugcaaauaa

SEQ ID NO: 1030861 - RNA, 19 nt, Human
cacaguuucagcuucuugg

SEQ ID NO: 1030862 - RNA, 18 nt, Human
caccacgccagcucggcc

SEQ ID NO: 1030863 - RNA, 22 nt, Human
cacccggucaugggcccugcuc

SEQ ID NO: 1030864 - RNA, 23 nt, Human
cagacaccaaaacugaacuucca

SEQ ID NO: 1030865 - RNA, 22 nt, Human
cagcacccaguagugagggagg

SEQ ID NO: 1030866 - RNA, 18 nt, Human
cagggcuucugcuuggcc

SEQ ID NO: 1030867 - RNA, 19 nt, Human
caggguccuuccucauucu

SEQ ID NO: 1030868 - RNA, 19 nt, Human
cagguacaagcccaucccu

SEQ ID NO: 1030869 - RNA, 18 nt, Human
ccaaagaaggggccaacc

SEQ ID NO: 1030870 - RNA, 20 nt, Human
ccacacaggggugggugcug

SEQ ID NO: 1030871 - RNA, 19 nt, Human
cccaaagaaggggccaacc

SEQ ID NO: 1030872 - RNA, 22 nt, Human
cccaaagaaggggccaacccag

SEQ ID NO: 1030873 - RNA, 21 nt, Human
ccccuaggaugccugggccag

SEQ ID NO: 1030874 - RNA, 20 nt, Human
ccgugugcuaaggcugcuuc

SEQ ID NO: 1030875 - RNA, 23 nt, Human
ccucuugaagcagacaccaaaac

SEQ ID NO: 1030876 - RNA, 22 nt, Human
ccuugcacaggguccuuccuca

SEQ ID NO: 1030877 - RNA, 22 nt, Human
ccuuggacuugucacuuggcuu

SEQ ID NO: 1030878 - RNA, 22 nt, Human
cucggccugcagggacuggauc

SEQ ID NO: 1030879 - RNA, 23 nt, Human
cucggccugcagggacuggaucu

SEQ ID NO: 1030880 - RNA, 27 nt, Human
cucuuccagaccucuccccaacuccag

SEQ ID NO: 1030881 - RNA, 23 nt, Human
cugagccucaguuuccuugucug

SEQ ID NO: 1030882 - RNA, 21 nt, Human
cuuguguucuguauccaggag

SEQ ID NO: 1030883 - RNA, 22 nt, Human
cuuuucgacugugaaauccugg

SEQ ID NO: 1030884 - RNA, 20 nt, Human
gagggaacugcuuaggaggg

SEQ ID NO: 1030885 - RNA, 18 nt, Human
gcaugcaaaccuucucac

SEQ ID NO: 1030886 - RNA, 18 nt, Human
gcccugcucuuccugcgu

SEQ ID NO: 1030887 - RNA, 25 nt, Human
gccuggaaagcugacccugcagaau

SEQ ID NO: 1030888 - RNA, 20 nt, Human
gcugcagcucagaccuccgg

SEQ ID NO: 1030889 - RNA, 21 nt, Human
ggcccugcucuuccugcuguc

SEQ ID NO: 1030890 - RNA, 19 nt, Human
gggaggagaggcccgugug

SEQ ID NO: 1030891 - RNA, 18 nt, Human
gggcacaggcgcucaugc

SEQ ID NO: 1030892 - RNA, 22 nt, Human
gggcaguggggaggcagggagc

SEQ ID NO: 1030893 - RNA, 21 nt, Human
gggccacacaggggugggugc

SEQ ID NO: 1030894 - RNA, 19 nt, Human
gggccaggacaggagaagg

SEQ ID NO: 1030895 - RNA, 25 nt, Human
gggccaggacaggagaaggaggagc

SEQ ID NO: 1030896 - RNA, 23 nt, Human
ggugggugcugucagguacaagc

SEQ ID NO: 1030897 - RNA, 24 nt, Human
gguugaaauaagauauugguggug

SEQ ID NO: 1030898 - RNA, 20 nt, Human
gugcaggguccggcuccacc

SEQ ID NO: 1030899 - RNA, 22 nt, Human
uaggaggggucugagggugaug

SEQ ID NO: 1030900 - RNA, 22 nt, Human
uccaccacgccagcucggccug

SEQ ID NO: 1030901 - RNA, 23 nt, Human
uccacccggucaugggcccugcu

SEQ ID NO: 1030902 - RNA, 21 nt, Human
uccaggccuguguaguggcug

SEQ ID NO: 1030903 - RNA, 23 nt, Human
ucccugagccucaguuuccuugu

SEQ ID NO: 1030904 - RNA, 22 nt, Human
uccucauucuuuccucuuccuu

SEQ ID NO: 1030905 - RNA, 26 nt, Human
uccugagcccaaagaaggggccaacc

SEQ ID NO: 1030906 - RNA, 25 nt, Human
uccugggccagcuggucagccacgc

SEQ ID NO: 1030907 - RNA, 21 nt, Human
ucgacugugaaauccugggcc

SEQ ID NO: 1030908 - RNA, 19 nt, Human
ucgggcuccaagaaagucu

SEQ ID NO: 1030909 - RNA, 22 nt, Human
ucucucccccacccgccucaga

SEQ ID NO: 1030910 - RNA, 22 nt, Human
ugaaaccugggugaagagccag

SEQ ID NO: 1030911 - RNA, 23 nt, Human
ugaagcagacaccaaaacugaac

SEQ ID NO: 1030912 - RNA, 20 nt, Human
ugagcccaaagaaggggcca

SEQ ID NO: 1030913 - RNA, 21 nt, Human
ugagcccaaagaaggggccaa

SEQ ID NO: 1030914 - RNA, 24 nt, Human
ugagcccaaagaaggggccaaccc

SEQ ID NO: 1030915 - RNA, 19 nt, Human
ugagggaggagaggcccgu

SEQ ID NO: 1030916 - RNA, 19 nt, Human
uggaaagcugacccugcag

SEQ ID NO: 1030917 - RNA, 22 nt, Human
uggaaucagaguguaaaacccc

SEQ ID NO: 1030918 - RNA, 19 nt, Human
uggacucuggaccugcccc

SEQ ID NO: 1030919 - RNA, 19 nt, Human
uggcucuggcccuggaauc

SEQ ID NO: 1030920 - RNA, 24 nt, Human
uggcugcagcucagaccuccgguc

SEQ ID NO: 1030921 - RNA, 23 nt, Human
ugggaacagccuggaaagcugac

SEQ ID NO: 1030922 - RNA, 24 nt, Human
ugggacugcauggcucuggcccug

SEQ ID NO: 1030923 - RNA, 22 nt, Human
ugggcccugcucuuccugcugu

SEQ ID NO: 1030924 - RNA, 21 nt, Human
uggggagagcccuucucugcu

SEQ ID NO: 1030925 - RNA, 24 nt, Human
uggggaggcagggagcuauuuggg

SEQ ID NO: 1030926 - RNA, 21 nt, Human
ugggggccacacagggguggg

SEQ ID NO: 1030927 - RNA, 19 nt, Human
ugguagaauuccaggccug

SEQ ID NO: 1030928 - RNA, 23 nt, Human
uggucagccacgcagggcagcac

SEQ ID NO: 1030929 - RNA, 25 nt, Human
ugguguggcuauggguacccaggcu

SEQ ID NO: 1030930 - RNA, 18 nt, Human
uguguaguggcugcagcu

SEQ ID NO: 1030931 - RNA, 19 nt, Human
uuccaggccuguguagugg

SEQ ID NO: 1030932 - RNA, 19 nt, Human
uugaagcagacaccaaaac

SEQ ID NO: 1030933 - RNA, 21 nt, Human
uuuuuuuuuuuuuaaagauug

SEQ ID NO: 1030934 - RNA, 22 nt, Human
uuuuuuuuuuuuuuuuuuaaag

SEQ ID NO: 1030935 - RNA, 22 nt, Human
aaacacggccagagccaggugc

SEQ ID NO: 1030936 - RNA, 22 nt, Human
aaaggaaaaagccaacaaaaag

SEQ ID NO: 1030937 - RNA, 19 nt, Human
aacccuccguguccucuac

SEQ ID NO: 1030938 - RNA, 21 nt, Human
aagcagcccagggucagggag

SEQ ID NO: 1030939 - RNA, 23 nt, Human
acaaaggaaaaagccaacaaaaa

SEQ ID NO: 1030940 - RNA, 20 nt, Human
acacucccagcacgacgggu

SEQ ID NO: 1030941 - RNA, 18 nt, Human
acccguggucacuucccu

SEQ ID NO: 1030942 - RNA, 20 nt, Human
agagagaaggucuuggccac

SEQ ID NO: 1030943 - RNA, 22 nt, Human
agaggaaggggagcugagggag

SEQ ID NO: 1030944 - RNA, 18 nt, Human
agaggggucuggagagcc

SEQ ID NO: 1030945 - RNA, 20 nt, Human
agcugagggagggugagagg

SEQ ID NO: 1030946 - RNA, 21 nt, Human
aggaaagugggggccucuggc

SEQ ID NO: 1030947 - RNA, 21 nt, Human
aggagcccccagcaaacgggg

SEQ ID NO: 1030948 - RNA, 20 nt, Human
aggagggguggagagagaag

SEQ ID NO: 1030949 - RNA, 23 nt, Human
aggagggguggcuugugaggggu

SEQ ID NO: 1030950 - RNA, 19 nt, Human
aggccagggcaggguggga

SEQ ID NO: 1030951 - RNA, 22 nt, Human
aggcggaagggagcacgaguua

SEQ ID NO: 1030952 - RNA, 19 nt, Human
aggggcuguggaguugggg

SEQ ID NO: 1030953 - RNA, 20 nt, Human
agggggcccuggguuugagg

SEQ ID NO: 1030954 - RNA, 21 nt, Human
agggguggcuaagccccgccu

SEQ ID NO: 1030955 - RNA, 22 nt, Human
aggguggauggaggaggggugg

SEQ ID NO: 1030956 - RNA, 18 nt, Human
aguggagggagggcuucc

SEQ ID NO: 1030957 - RNA, 21 nt, Human
augaugcugaggggcccugug

SEQ ID NO: 1030958 - RNA, 23 nt, Human
caacagacacuguaaacuuuggu

SEQ ID NO: 1030959 - RNA, 22 nt, Human
caaggaaggggagcugagggug

SEQ ID NO: 1030960 - RNA, 20 nt, Human
cacccaggccagggcagggu

SEQ ID NO: 1030961 - RNA, 26 nt, Human
cacccaggccagggcagggugggagc

SEQ ID NO: 1030962 - RNA, 23 nt, Human
caccugcagaagcgcaccuggca

SEQ ID NO: 1030963 - RNA, 25 nt, Human
cagcagagggggcuguuucuucugg

SEQ ID NO: 1030964 - RNA, 26 nt, Human
cagcagcagagggggcuguuucuucu

SEQ ID NO: 1030965 - RNA, 23 nt, Human
caggaagcagcccagggucaggg

SEQ ID NO: 1030966 - RNA, 20 nt, Human
caggaagcagcccagggucu

SEQ ID NO: 1030967 - RNA, 20 nt, Human
caggguggauggaggagggg

SEQ ID NO: 1030968 - RNA, 18 nt, Human
caguccuuggccuugagu

SEQ ID NO: 1030969 - RNA, 19 nt, Human
caugaugcugaggggcccu

SEQ ID NO: 1030970 - RNA, 21 nt, Human
cauggggagggggcggagggc

SEQ ID NO: 1030971 - RNA, 19 nt, Human
ccacuugcaguugucccug

SEQ ID NO: 1030972 - RNA, 23 nt, Human
ccagaaaacacggccagagccag

SEQ ID NO: 1030973 - RNA, 20 nt, Human
ccagcagcagagggggcugu

SEQ ID NO: 1030974 - RNA, 21 nt, Human
ccagcagcagagggggcuguu

SEQ ID NO: 1030975 - RNA, 21 nt, Human
ccaggccucuucccauggggg

SEQ ID NO: 1030976 - RNA, 22 nt, Human
cccacagggcacacagacaguc

SEQ ID NO: 1030977 - RNA, 24 nt, Human
cccaggccagggcagggugggagc

SEQ ID NO: 1030978 - RNA, 21 nt, Human
cccagggucagggagaagggc

SEQ ID NO: 1030979 - RNA, 21 nt, Human
ccccgccgcugcugccaucgg

SEQ ID NO: 1030980 - RNA, 25 nt, Human
ccccgccugcgggucuccaugaugc

SEQ ID NO: 1030981 - RNA, 18 nt, Human
ccccuccuuucuccuucc

SEQ ID NO: 1030982 - RNA, 29 nt, Human
cccgcuuucuccccuccuuucuccuuccc

SEQ ID NO: 1030983 - RNA, 24 nt, Human
cccggcccaggccccgccucuggc

SEQ ID NO: 1030984 - RNA, 18 nt, Human
cccuccuuucuccuuccc

SEQ ID NO: 1030985 - RNA, 23 nt, Human
cccugggcucccggcccaggccc

SEQ ID NO: 1030986 - RNA, 24 nt, Human
cccugggcucccggcccaggcccc

SEQ ID NO: 1030987 - RNA, 19 nt, Human
cccuggguuugaggggugg

SEQ ID NO: 1030988 - RNA, 20 nt, Human
cccuggguuugagggguggc

SEQ ID NO: 1030989 - RNA, 23 nt, Human
ccuccuuucuccuucccccaggc

SEQ ID NO: 1030990 - RNA, 23 nt, Human
ccucuacugguccaagaccaggg

SEQ ID NO: 1030991 - RNA, 21 nt, Human
ccugcgggucuccaugaugcu

SEQ ID NO: 1030992 - RNA, 20 nt, Human
ccuggcacagaccucugugg

SEQ ID NO: 1030993 - RNA, 18 nt, Human
ccuggggccgggguggga

SEQ ID NO: 1030994 - RNA, 19 nt, Human
ccuggggguggggaccguc

SEQ ID NO: 1030995 - RNA, 20 nt, Human
ccuggggguggggaccgucc

SEQ ID NO: 1030996 - RNA, 24 nt, Human
ccuuucuccuucccccaggcuggg

SEQ ID NO: 1030997 - RNA, 30 nt, Human
cgccucuggccucagggagagcuuggcucu

SEQ ID NO: 1030998 - RNA, 19 nt, Human
cggaaaagaaggcggaagg

SEQ ID NO: 1030999 - RNA, 19 nt, Human
cggagggcccccugccucu

SEQ ID NO: 1031000 - RNA, 19 nt, Human
cggggugggagacugggag

SEQ ID NO: 1031001 - RNA, 22 nt, Human
cuagaauccacacucccagcac

SEQ ID NO: 1031002 - RNA, 18 nt, Human
cuccacccaggccagggc

SEQ ID NO: 1031003 - RNA, 23 nt, Human
cuccacugagccccaggguccuc

SEQ ID NO: 1031004 - RNA, 20 nt, Human
cuccccggucugaguccugg

SEQ ID NO: 1031005 - RNA, 20 nt, Human
cuccccuccuuucuccuucc

SEQ ID NO: 1031006 - RNA, 21 nt, Human
cuccugagggggugagagccc

SEQ ID NO: 1031007 - RNA, 18 nt, Human
cuccuucccccaggcugg

SEQ ID NO: 1031008 - RNA, 18 nt, Human
cugagccccaggguccuc

SEQ ID NO: 1031009 - RNA, 19 nt, Human
cuggaagggaggggucuca

SEQ ID NO: 1031010 - RNA, 18 nt, Human
cuggagagcccccaggaa

SEQ ID NO: 1031011 - RNA, 20 nt, Human
cuggggccggggugggagac

SEQ ID NO: 1031012 - RNA, 22 nt, Human
cugguucugucucagguugggg

SEQ ID NO: 1031013 - RNA, 18 nt, Human
cuugcccagagaggcugc

SEQ ID NO: 1031014 - RNA, 18 nt, Human
cuugguccuagagagggg

SEQ ID NO: 1031015 - RNA, 26 nt, Human
cuuucuccccuccuuucuccuucccc

SEQ ID NO: 1031016 - RNA, 20 nt, Human
gagcccccaggaagcagccc

SEQ ID NO: 1031017 - RNA, 22 nt, Human
gagcccccaggaagcagcccag

SEQ ID NO: 1031018 - RNA, 24 nt, Human
gagcggaagggaggggggcagggc

SEQ ID NO: 1031019 - RNA, 20 nt, Human
gagcugggguggagaguucu

SEQ ID NO: 1031020 - RNA, 25 nt, Human
gaggagcccccagcaaacgggggug

SEQ ID NO: 1031021 - RNA, 20 nt, Human
gaggcaguuucagauguggg

SEQ ID NO: 1031022 - RNA, 19 nt, Human
gaggggggcagggcccugc

SEQ ID NO: 1031023 - RNA, 26 nt, Human
gagggugagaggacugcagagaggcc

SEQ ID NO: 1031024 - RNA, 22 nt, Human
gcagagaggccugcaggcugga

SEQ ID NO: 1031025 - RNA, 21 nt, Human
gcagagggggcuguuucuucu

SEQ ID NO: 1031026 - RNA, 25 nt, Human
gcaggagcggaagggaggggggcag

SEQ ID NO: 1031027 - RNA, 22 nt, Human
gcaguuucagauguggggaggg

SEQ ID NO: 1031028 - RNA, 20 nt, Human
gccccgccugcgggucucca

SEQ ID NO: 1031029 - RNA, 25 nt, Human
gcccgcuuucuccccuccuuucucc

SEQ ID NO: 1031030 - RNA, 22 nt, Human
gccugcucacacggacccccac

SEQ ID NO: 1031031 - RNA, 21 nt, Human
gcggcggggggagaggcgggc

SEQ ID NO: 1031032 - RNA, 18 nt, Human
gcugaggggcccuguggg

SEQ ID NO: 1031033 - RNA, 25 nt, Human
gcuuucuccccuccuuucuccuucc

SEQ ID NO: 1031034 - RNA, 23 nt, Human
ggagagcuggugggggaggaggg

SEQ ID NO: 1031035 - RNA, 19 nt, Human
ggaggagggcccugcugcu

SEQ ID NO: 1031036 - RNA, 20 nt, Human
ggagggagggcuuccagccu

SEQ ID NO: 1031037 - RNA, 18 nt, Human
ggagggcaggugcugggg

SEQ ID NO: 1031038 - RNA, 20 nt, Human
ggagggguggcuugugaggg

SEQ ID NO: 1031039 - RNA, 21 nt, Human
ggcaaggaaggggagcugagg

SEQ ID NO: 1031040 - RNA, 20 nt, Human
ggcaggagcggaagggaggg

SEQ ID NO: 1031041 - RNA, 19 nt, Human
ggcagggugggagcugggg

SEQ ID NO: 1031042 - RNA, 24 nt, Human
ggccaggccagggguguuaugagc

SEQ ID NO: 1031043 - RNA, 23 nt, Human
ggccuccccggucugaguccugg

SEQ ID NO: 1031044 - RNA, 21 nt, Human
ggcgacaaaggaaaaagccaa

SEQ ID NO: 1031045 - RNA, 19 nt, Human
ggcgggcaaggaaggggag

SEQ ID NO: 1031046 - RNA, 24 nt, Human
ggcuggaggagcccccagcaaacg

SEQ ID NO: 1031047 - RNA, 21 nt, Human
gggaauacauggggagggggc

SEQ ID NO: 1031048 - RNA, 20 nt, Human
gggagagcuggugggggagg

SEQ ID NO: 1031049 - RNA, 21 nt, Human
gggagagcuggugggggagga

SEQ ID NO: 1031050 - RNA, 18 nt, Human
gggagauggggccuggau

SEQ ID NO: 1031051 - RNA, 19 nt, Human
gggagcugcuggcccgggc

SEQ ID NO: 1031052 - RNA, 27 nt, Human
gggcaggagcggaagggaggggggcag

SEQ ID NO: 1031053 - RNA, 19 nt, Human
gggccucuggccagaaaac

SEQ ID NO: 1031054 - RNA, 20 nt, Human
gggcucccgugcccacuccu

SEQ ID NO: 1031055 - RNA, 19 nt, Human
ggggagagcugguggggga

SEQ ID NO: 1031056 - RNA, 23 nt, Human
ggggaggagggcccugcugcugc

SEQ ID NO: 1031057 - RNA, 24 nt, Human
ggggaggcaguuucagaugugggg

SEQ ID NO: 1031058 - RNA, 21 nt, Human
ggggagggggcggagggcccc

SEQ ID NO: 1031059 - RNA, 21 nt, Human
ggggguggaggccuggcucag

SEQ ID NO: 1031060 - RNA, 24 nt, Human
ggggguggggguggaggccuggcu

SEQ ID NO: 1031061 - RNA, 24 nt, Human
gggguggggguggaggccuggcuc

SEQ ID NO: 1031062 - RNA, 26 nt, Human
gggguugugucccuggggguucguaa

SEQ ID NO: 1031063 - RNA, 19 nt, Human
ggucugaggaggggucuga

SEQ ID NO: 1031064 - RNA, 23 nt, Human
ggugcuggggaggcgacaaagga

SEQ ID NO: 1031065 - RNA, 20 nt, Human
gguggauggaggaggggugg

SEQ ID NO: 1031066 - RNA, 23 nt, Human
ggugguuggggggaggcaguuuc

SEQ ID NO: 1031067 - RNA, 19 nt, Human
gguugggggcgggucugga

SEQ ID NO: 1031068 - RNA, 20 nt, Human
gucacuucccugcccgugcc

SEQ ID NO: 1031069 - RNA, 25 nt, Human
gucccuggggguggggaccgucccu

SEQ ID NO: 1031070 - RNA, 19 nt, Human
gugagggguguaugugggg

SEQ ID NO: 1031071 - RNA, 20 nt, Human
guggaggccuggcucagccu

SEQ ID NO: 1031072 - RNA, 19 nt, Human
gugggggguucuugggaaa

SEQ ID NO: 1031073 - RNA, 22 nt, Human
guguaugugggggguucuuggg

SEQ ID NO: 1031074 - RNA, 23 nt, Human
guugugucccuggggguucguaa

SEQ ID NO: 1031075 - RNA, 21 nt, Human
uaaaggggccaggccaggggu

SEQ ID NO: 1031076 - RNA, 20 nt, Human
uaacugguggggcggcgggg

SEQ ID NO: 1031077 - RNA, 19 nt, Human
uacugguccaagaccaggg

SEQ ID NO: 1031078 - RNA, 19 nt, Human
uacugguccaagaccaggg

SEQ ID NO: 1031079 - RNA, 22 nt, Human
uagaauccacacucccagcacg

SEQ ID NO: 1031080 - RNA, 18 nt, Human
uaugugggggguucuugg

SEQ ID NO: 1031081 - RNA, 19 nt, Human
ucacacggacccccacagg

SEQ ID NO: 1031082 - RNA, 23 nt, Human
ucaggucacacugggagcugcug

SEQ ID NO: 1031083 - RNA, 23 nt, Human
uccagccuggggccgggguggga

SEQ ID NO: 1031084 - RNA, 18 nt, Human
ucccugcccgugccacuu

SEQ ID NO: 1031085 - RNA, 21 nt, Human
ucccuggggguggggaccguc

SEQ ID NO: 1031086 - RNA, 25 nt, Human
ucccuggggguggggaccgucccug

SEQ ID NO: 1031087 - RNA, 18 nt, Human
ucccuguggccccgccgc

SEQ ID NO: 1031088 - RNA, 23 nt, Human
ucucaguaaaggggccaggccag

SEQ ID NO: 1031089 - RNA, 19 nt, Human
ucuccuucccccaggcugg

SEQ ID NO: 1031090 - RNA, 22 nt, Human
ucuggaagggaggggucucacc

SEQ ID NO: 1031091 - RNA, 20 nt, Human
ucuguggagagucugacuuu

SEQ ID NO: 1031092 - RNA, 23 nt, Human
ucuucuggggauggaggcacagu

SEQ ID NO: 1031093 - RNA, 23 nt, Human
ugacugcagaggaaggggagcug

SEQ ID NO: 1031094 - RNA, 22 nt, Human
ugagagcccgcuuucuccccuc

SEQ ID NO: 1031095 - RNA, 18 nt, Human
ugagggagggugagagga

SEQ ID NO: 1031096 - RNA, 19 nt, Human
ugagggagggugagaggac

SEQ ID NO: 1031097 - RNA, 23 nt, Human
ugagggagggugagaggacugca

SEQ ID NO: 1031098 - RNA, 20 nt, Human
ugagggguguaugugggggg

SEQ ID NO: 1031099 - RNA, 23 nt, Human
ugagggugacugcagaggaaggg

SEQ ID NO: 1031100 - RNA, 22 nt, Human
ugcagaggaaggggagcugagg

SEQ ID NO: 1031101 - RNA, 25 nt, Human
ugcagaggaaggggagcugagggag

SEQ ID NO: 1031102 - RNA, 19 nt, Human
ugccaucggcuugcccaga

SEQ ID NO: 1031103 - RNA, 19 nt, Human
ugcccagagaggcugccca

SEQ ID NO: 1031104 - RNA, 22 nt, Human
ugcugucugcacccguggucac

SEQ ID NO: 1031105 - RNA, 22 nt, Human
uggagccgggguccagccuggc

SEQ ID NO: 1031106 - RNA, 24 nt, Human
uggaggagggguggagagagaagg

SEQ ID NO: 1031107 - RNA, 21 nt, Human
uggaguugggggagauggggc

SEQ ID NO: 1031108 - RNA, 19 nt, Human
uggccucagggagagcuug

SEQ ID NO: 1031109 - RNA, 18 nt, Human
uggcucagccugguucug

SEQ ID NO: 1031110 - RNA, 22 nt, Human
ugggagacugggagggcaggug

SEQ ID NO: 1031111 - RNA, 20 nt, Human
uggggagagcugguggggga

SEQ ID NO: 1031112 - RNA, 21 nt, Human
uggggagggggcggagggccc

SEQ ID NO: 1031113 - RNA, 21 nt, Human
uggugggggaggagggcccug

SEQ ID NO: 1031114 - RNA, 27 nt, Human
ugucucagguugggggcgggucuggag

SEQ ID NO: 1031115 - RNA, 23 nt, Human
ugugagggguguauguggggggu

SEQ ID NO: 1031116 - RNA, 19 nt, Human
uuaaaacaauaacuuaagu

SEQ ID NO: 1031117 - RNA, 20 nt, Human
uuaaaacaauaacuuaaguu

SEQ ID NO: 1031118 - RNA, 27 nt, Human
uucuccccuccuuucuccuucccccag

SEQ ID NO: 1031119 - RNA, 18 nt, Human
uucuggggauggaggcac

SEQ ID NO: 1031120 - RNA, 19 nt, Human
uucuggggauggaggcaca

SEQ ID NO: 1031121 - RNA, 20 nt, Human
uucuggggauggaggcacag

SEQ ID NO: 1031122 - RNA, 21 nt, Human
uucuggggauggaggcacagu

SEQ ID NO: 1031123 - RNA, 18 nt, Human
uugggggagauggggccu

SEQ ID NO: 1031124 - RNA, 24 nt, Human
uugguuuaaaacaauaacuuaagu

SEQ ID NO: 1031125 - RNA, 25 nt, Human
uugguuuaaaacaauaacuuaagug

SEQ ID NO: 1031126 - RNA, 22 nt, Human
uuugcuagaauccacacuccca

SEQ ID NO: 1031127 - RNA, 23 nt, Human
aauuuguuugauuguagguacuu

SEQ ID NO: 1031128 - RNA, 21 nt, Human
aucaucauuucuuucaaagca

SEQ ID NO: 1031129 - RNA, 25 nt, Human
cacagcaacuuacauuaacaccugc

SEQ ID NO: 1031130 - RNA, 21 nt, Human
ccugcuuaacugaacguaacc

SEQ ID NO: 1031131 - RNA, 18 nt, Human
cuugauggcccccagucc

SEQ ID NO: 1031132 - RNA, 18 nt, Human
gcaucaaaccaaagauac

SEQ ID NO: 1031133 - RNA, 18 nt, Human
uacccauuaugcagauuu

SEQ ID NO: 1031134 - RNA, 18 nt, Human
uagguacuuuugcagucu

SEQ ID NO: 1031135 - RNA, 18 nt, Human
uauauuuguaaacuuguc

SEQ ID NO: 1031136 - RNA, 21 nt, Human
uaugcaucaaaccaaagauac

SEQ ID NO: 1031137 - RNA, 20 nt, Human
uccacagcaacuuacauuaa

SEQ ID NO: 1031138 - RNA, 22 nt, Human
uccagauaaaggcugcaucuau

SEQ ID NO: 1031139 - RNA, 22 nt, Human
uccaggcagcacuugauggccc

SEQ ID NO: 1031140 - RNA, 21 nt, Human
ucugugcuucuauucuguuuu

SEQ ID NO: 1031141 - RNA, 23 nt, Human
uugaaaacagucauuccacagca

SEQ ID NO: 1031142 - RNA, 25 nt, Human
uugaaaacagucauuccacagcaac

SEQ ID NO: 1031143 - RNA, 19 nt, Human
uuuguaaacuugucugcau

SEQ ID NO: 1031144 - RNA, 25 nt, Human
uuuuuuuuuuuuuuuuuuuuacaag

SEQ ID NO: 1031145 - RNA, 29 nt, Human
uuuuuuuuuuuuuuuuuuuuuuacaagaa

SEQ ID NO: 1031146 - RNA, 19 nt, Human
aaagugcuggaauuacagg

SEQ ID NO: 1031147 - RNA, 24 nt, Human
aaagugcuggaauuacaggcguga

SEQ ID NO: 1031148 - RNA, 19 nt, Human
aaagugcugggauuacagg

SEQ ID NO: 1031149 - RNA, 19 nt, Human
aaagugcugggauuacagg

SEQ ID NO: 1031150 - RNA, 24 nt, Human
aaagugcugggauuacaggaguga

SEQ ID NO: 1031151 - RNA, 24 nt, Human
aagaacuggcccuggagauaguuu

SEQ ID NO: 1031152 - RNA, 26 nt, Human
aaguagcuaggacuacagaugcccgc

SEQ ID NO: 1031153 - RNA, 19 nt, Human
aaguagcugugauuacagg

SEQ ID NO: 1031154 - RNA, 20 nt, Human
aaguagcugugauuacaggc

SEQ ID NO: 1031155 - RNA, 26 nt, Human
aagugcuggaauuacaggcgugagcu

SEQ ID NO: 1031156 - RNA, 18 nt, Human
aagugcugggauuacagg

SEQ ID NO: 1031157 - RNA, 22 nt, Human
aagugcugggauuacaggaguc

SEQ ID NO: 1031158 - RNA, 26 nt, Human
aagugcugggauuacaggagugagcc

SEQ ID NO: 1031159 - RNA, 18 nt, Human
aauuacaggcgugagcua

SEQ ID NO: 1031160 - RNA, 19 nt, Human
aauuacaggcgugagcuac

SEQ ID NO: 1031161 - RNA, 21 nt, Human
aauuacaggcgugagcuacca

SEQ ID NO: 1031162 - RNA, 23 nt, Human
acacugaaaucucucaaaaugua

SEQ ID NO: 1031163 - RNA, 21 nt, Human
acagaugcccgccaugacacc

SEQ ID NO: 1031164 - RNA, 20 nt, Human
accauguuggccaggcuggu

SEQ ID NO: 1031165 - RNA, 23 nt, Human
accauguuggccaggcuggucuc

SEQ ID NO: 1031166 - RNA, 24 nt, Human
accauguuggccaggcuggucucg

SEQ ID NO: 1031167 - RNA, 18 nt, Human
acgggguuucaccauguu

SEQ ID NO: 1031168 - RNA, 19 nt, Human
acgggguuucaccauguua

SEQ ID NO: 1031169 - RNA, 20 nt, Human
acgggguuucaccauguuag

SEQ ID NO: 1031170 - RNA, 24 nt, Human
acgggguuucaccauguuagccag

SEQ ID NO: 1031171 - RNA, 24 nt, Human
acggguuuugaccauguuggccag

SEQ ID NO: 1031172 - RNA, 19 nt, Human
acucugucgccagggcugg

SEQ ID NO: 1031173 - RNA, 18 nt, Human
aggcgcccgccacuaagc

SEQ ID NO: 1031174 - RNA, 22 nt, Human
aggcgcccgccacuaagcccag

SEQ ID NO: 1031175 - RNA, 25 nt, Human
aggcuggagugcaguggcacaaucu

SEQ ID NO: 1031176 - RNA, 19 nt, Human
aggcuuguggcuggggucu

SEQ ID NO: 1031177 - RNA, 22 nt, Human
aguagagacgggguuucaccau

SEQ ID NO: 1031178 - RNA, 20 nt, Human
agucuuuuuuuuuuuuuuuu

SEQ ID NO: 1031179 - RNA, 24 nt, Human
agugauucuccugccucagccucc

SEQ ID NO: 1031180 - RNA, 20 nt, Human
agugcaguggcacaaucucg

SEQ ID NO: 1031181 - RNA, 24 nt, Human
agugcaguggcacaaucucggcuc

SEQ ID NO: 1031182 - RNA, 21 nt, Human
agugcaguggcgcaaucucag

SEQ ID NO: 1031183 - RNA, 19 nt, Human
aucaucagccaaauccagc

SEQ ID NO: 1031184 - RNA, 21 nt, Human
auucuccugccucagccuccc

SEQ ID NO: 1031185 - RNA, 23 nt, Human
caaagucuuuuuuuuuuuuuuuu

SEQ ID NO: 1031186 - RNA, 24 nt, Human
caaagugcuggaauuacaggcgug

SEQ ID NO: 1031187 - RNA, 24 nt, Human
caaagugcugggauuacaggagug

SEQ ID NO: 1031188 - RNA, 22 nt, Human
caacauuauagacacuaaaaca

SEQ ID NO: 1031189 - RNA, 24 nt, Human
caaccgccacacccagagccccca

SEQ ID NO: 1031190 - RNA, 20 nt, Human
caaccuggaaaccagacucc

SEQ ID NO: 1031191 - RNA, 19 nt, Human
caagccccgagagaggcug

SEQ ID NO: 1031192 - RNA, 20 nt, Human
caagccccgagagaggcugg

SEQ ID NO: 1031193 - RNA, 23 nt, Human
caagccccgagagaggcuggagg

SEQ ID NO: 1031194 - RNA, 22 nt, Human
caagugauucuccugccucagc

SEQ ID NO: 1031195 - RNA, 27 nt, Human
caagugauucuccugccucagccuccc

SEQ ID NO: 1031196 - RNA, 24 nt, Human
cacacccagagcccccaaaaacgg

SEQ ID NO: 1031197 - RNA, 18 nt, Human
caccauguuagccaggau

SEQ ID NO: 1031198 - RNA, 22 nt, Human
caccauguuagccaggaugguc

SEQ ID NO: 1031199 - RNA, 24 nt, Human
caccauguuagccaggauggucuc

SEQ ID NO: 1031200 - RNA, 23 nt, Human
cacccgccucagccucccaaagu

SEQ ID NO: 1031201 - RNA, 23 nt, Human
cacccgccucggccucccaaagu

SEQ ID NO: 1031202 - RNA, 22 nt, Human
cacgccauucuccugccucagc

SEQ ID NO: 1031203 - RNA, 25 nt, Human
cacuaagcccagcuaauuuuuugua

SEQ ID NO: 1031204 - RNA, 22 nt, Human
cacucugucgccagggcuggag

SEQ ID NO: 1031205 - RNA, 21 nt, Human
cacugcaaccuccgccucccg

SEQ ID NO: 1031206 - RNA, 23 nt, Human
cacugcaaccuccgccucccggg

SEQ ID NO: 1031207 - RNA, 23 nt, Human
cacugcaaucuccaccuccuggg

SEQ ID NO: 1031208 - RNA, 21 nt, Human
cagaugcccgccaugacaccc

SEQ ID NO: 1031209 - RNA, 21 nt, Human
cauaaagauaaaauauggaac

SEQ ID NO: 1031210 - RNA, 18 nt, Human
caugacacccagcaaauu

SEQ ID NO: 1031211 - RNA, 24 nt, Human
cauguuggccaggcuggucucgaa

SEQ ID NO: 1031212 - RNA, 20 nt, Human
ccaaagugcuggaauuacag

SEQ ID NO: 1031213 - RNA, 22 nt, Human
ccaaagugcuggaauuacaggc

SEQ ID NO: 1031214 - RNA, 24 nt, Human
ccaaagugcuggaauuacaggcgu

SEQ ID NO: 1031215 - RNA, 19 nt, Human
ccaaagugcugggauuaca

SEQ ID NO: 1031216 - RNA, 21 nt, Human
ccaaagugcugggauuacagg

SEQ ID NO: 1031217 - RNA, 24 nt, Human
ccaaagugcugggauuacaggagu

SEQ ID NO: 1031218 - RNA, 21 nt, Human
ccacacccagagcccccaaaa

SEQ ID NO: 1031219 - RNA, 23 nt, Human
ccacacccagagcccccaaaaac

SEQ ID NO: 1031220 - RNA, 18 nt, Human
ccaccgugcccagccuca

SEQ ID NO: 1031221 - RNA, 24 nt, Human
ccaccuccuggguucaagugauuc

SEQ ID NO: 1031222 - RNA, 22 nt, Human
ccagagcccccaaaaacggcaa

SEQ ID NO: 1031223 - RNA, 22 nt, Human
ccagggcuggagugcaguggcg

SEQ ID NO: 1031224 - RNA, 19 nt, Human
cccaaguagcugugauuac

SEQ ID NO: 1031225 - RNA, 23 nt, Human
cccaaguagcugugauuacaggc

SEQ ID NO: 1031226 - RNA, 22 nt, Human
cccccaaaaacggcaaccugga

SEQ ID NO: 1031227 - RNA, 21 nt, Human
ccccgagagaggcuggaggcu

SEQ ID NO: 1031228 - RNA, 21 nt, Human
cccgccaugacacccagcaaa

SEQ ID NO: 1031229 - RNA, 18 nt, Human
ccgccaugacacccagca

SEQ ID NO: 1031230 - RNA, 24 nt, Human
ccgccucagccucccaaagugcug

SEQ ID NO: 1031231 - RNA, 19 nt, Human
ccuccgccucccggguuca

SEQ ID NO: 1031232 - RNA, 24 nt, Human
ccuccuggguucaagugauucucc

SEQ ID NO: 1031233 - RNA, 21 nt, Human
ccugaccucgugauucacccg

SEQ ID NO: 1031234 - RNA, 20 nt, Human
ccugaccuucugauccaccc

SEQ ID NO: 1031235 - RNA, 23 nt, Human
ccugccucagccucccaaguagc

SEQ ID NO: 1031236 - RNA, 23 nt, Human
ccugccucagccucccaaguagc

SEQ ID NO: 1031237 - RNA, 24 nt, Human
ccugccucagccucccaaguagcu

SEQ ID NO: 1031238 - RNA, 23 nt, Human
ccuggguucaagugauucuccuc

SEQ ID NO: 1031239 - RNA, 23 nt, Human
ccuggguucaagugauucuccug

SEQ ID NO: 1031240 - RNA, 18 nt, Human
cgccacacccagagcccc

SEQ ID NO: 1031241 - RNA, 24 nt, Human
cgccucagccucccaaagugcugg

SEQ ID NO: 1031242 - RNA, 19 nt, Human
cgccucccggguucacgcc

SEQ ID NO: 1031243 - RNA, 24 nt, Human
cgccucggccucccaaagugcugg

SEQ ID NO: 1031244 - RNA, 24 nt, Human
cgggguuucaccauguuagccagg

SEQ ID NO: 1031245 - RNA, 24 nt, Human
cggguuuugaccauguuggccagg

SEQ ID NO: 1031246 - RNA, 22 nt, Human
cgugagcuaccacgccuggccc

SEQ ID NO: 1031247 - RNA, 19 nt, Human
cucacucugucgccagggc

SEQ ID NO: 1031248 - RNA, 24 nt, Human
cucacucugucgccagggcuggag

SEQ ID NO: 1031249 - RNA, 24 nt, Human
cucacugcaaccuccgccucccgg

SEQ ID NO: 1031250 - RNA, 24 nt, Human
cucacugcaaucuccaccuccugg

SEQ ID NO: 1031251 - RNA, 21 nt, Human
cucccggguucacgccauucu

SEQ ID NO: 1031252 - RNA, 24 nt, Human
cuccugaccuucugauccacccgc

SEQ ID NO: 1031253 - RNA, 20 nt, Human
cuccuggguucaagugauuc

SEQ ID NO: 1031254 - RNA, 21 nt, Human
cuccuggguucaagugauucu

SEQ ID NO: 1031255 - RNA, 24 nt, Human
cugauccacccgccucggccuccc

SEQ ID NO: 1031256 - RNA, 23 nt, Human
cugcaaccuccgccucccggguu

SEQ ID NO: 1031257 - RNA, 24 nt, Human
cugcaaucuccaccuccuggguuc

SEQ ID NO: 1031258 - RNA, 23 nt, Human
cugccucagccucccaaguagcu

SEQ ID NO: 1031259 - RNA, 22 nt, Human
cuggcccagaggcuuguggcug

SEQ ID NO: 1031260 - RNA, 21 nt, Human
cuugcucaguugcccaggcug

SEQ ID NO: 1031261 - RNA, 21 nt, Human
cuuuuuuuuuuuuuuuuuuuu

SEQ ID NO: 1031262 - RNA, 22 nt, Human
gaccucgugauucacccgccuc

SEQ ID NO: 1031263 - RNA, 24 nt, Human
gaccucgugauucacccgccucag

SEQ ID NO: 1031264 - RNA, 22 nt, Human
gaccuucugauccacccgccuc

SEQ ID NO: 1031265 - RNA, 22 nt, Human
gaccuucugauccacccgccuc

SEQ ID NO: 1031266 - RNA, 24 nt, Human
gaccuucugauccacccgccucgg

SEQ ID NO: 1031267 - RNA, 24 nt, Human
gacggagucucacucugucgccag

SEQ ID NO: 1031268 - RNA, 19 nt, Human
gagaaaagaacuggcccug

SEQ ID NO: 1031269 - RNA, 24 nt, Human
gagacgggguuucaccauguuagc

SEQ ID NO: 1031270 - RNA, 18 nt, Human
gauuacaggagugagcca

SEQ ID NO: 1031271 - RNA, 24 nt, Human
gauuacaggagugagccaccgugc

SEQ ID NO: 1031272 - RNA, 18 nt, Human
gauuacaggcgcccgcca

SEQ ID NO: 1031273 - RNA, 19 nt, Human
gauuacaggcgcccgccac

SEQ ID NO: 1031274 - RNA, 19 nt, Human
gauuacaggcgcccgccac

SEQ ID NO: 1031275 - RNA, 22 nt, Human
gcaaccuccgccucccggguuc

SEQ ID NO: 1031276 - RNA, 23 nt, Human
gcccagcuaauuuuuuguauuuu

SEQ ID NO: 1031277 - RNA, 19 nt, Human
gcuggagugcaguggcaca

SEQ ID NO: 1031278 - RNA, 19 nt, Human
gcuggagugcaguggcgca

SEQ ID NO: 1031279 - RNA, 18 nt, Human
gcuuguggcuggggucuu

SEQ ID NO: 1031280 - RNA, 23 nt, Human
ggaagggagagaaaagaacuggc

SEQ ID NO: 1031281 - RNA, 24 nt, Human
ggauggucucgaucuccugaccuu

SEQ ID NO: 1031282 - RNA, 20 nt, Human
ggcccagaggcuuguggcug

SEQ ID NO: 1031283 - RNA, 24 nt, Human
ggcuggagugcaguggcgcaaucu

SEQ ID NO: 1031284 - RNA, 24 nt, Human
ggcuggucucgaauuccugaccuc

SEQ ID NO: 1031285 - RNA, 23 nt, Human
gggguuucaccauguuagccagg

SEQ ID NO: 1031286 - RNA, 19 nt, Human
ggucucgaauuccugaccu

SEQ ID NO: 1031287 - RNA, 24 nt, Human
gguuucaccauguuagccaggaug

SEQ ID NO: 1031288 - RNA, 23 nt, Human
guagagacgggguuucaccaugu

SEQ ID NO: 1031289 - RNA, 24 nt, Human
gugauucacccgccucagccuccc

SEQ ID NO: 1031290 - RNA, 24 nt, Human
gugauucuccugccucagccuccc

SEQ ID NO: 1031291 - RNA, 20 nt, Human
gugcccagccucaaguccaa

SEQ ID NO: 1031292 - RNA, 21 nt, Human
uaaauugugugaguguuccuc

SEQ ID NO: 1031293 - RNA, 23 nt, Human
uaaauugugugaguguuccucug

SEQ ID NO: 1031294 - RNA, 24 nt, Human
uaauuuuuuguauuuuuaguagag

SEQ ID NO: 1031295 - RNA, 25 nt, Human
uaauuuuuuguauuuuuaguagaga

SEQ ID NO: 1031296 - RNA, 19 nt, Human
uacaauaauauuaugucca

SEQ ID NO: 1031297 - RNA, 24 nt, Human
uacaggagugagccaccgugccca

SEQ ID NO: 1031298 - RNA, 23 nt, Human
uacaggcgugagcuaccacgccu

SEQ ID NO: 1031299 - RNA, 19 nt, Human
uacccacgugcagcagcaa

SEQ ID NO: 1031300 - RNA, 19 nt, Human
uacggcaaccgccacaccc

SEQ ID NO: 1031301 - RNA, 22 nt, Human
uagagacgggguuucaccaugu

SEQ ID NO: 1031302 - RNA, 21 nt, Human
uaggacuacagaugcccgcca

SEQ ID NO: 1031303 - RNA, 24 nt, Human
uaguagagacgggguuucaccaug

SEQ ID NO: 1031304 - RNA, 26 nt, Human
uaguagagacgggguuucaccauguu

SEQ ID NO: 1031305 - RNA, 24 nt, Human
uaguagagacggguuuugaccaug

SEQ ID NO: 1031306 - RNA, 19 nt, Human
ucaagugauucuccugccu

SEQ ID NO: 1031307 - RNA, 24 nt, Human
ucaccauguuagccaggauggucu

SEQ ID NO: 1031308 - RNA, 23 nt, Human
ucacugcaaccuccgccucccgg

SEQ ID NO: 1031309 - RNA, 24 nt, Human
ucacugcaaccuccgccucccggg

SEQ ID NO: 1031310 - RNA, 25 nt, Human
ucacugcaaccuccgccucccgggu

SEQ ID NO: 1031311 - RNA, 26 nt, Human
ucacugcaaccuccgccucccggguu

SEQ ID NO: 1031312 - RNA, 23 nt, Human
ucacugcaaucuccaccuccugg

SEQ ID NO: 1031313 - RNA, 24 nt, Human
ucacugcaaucuccaccuccuggg

SEQ ID NO: 1031314 - RNA, 25 nt, Human
ucacugcaaucuccaccuccugggu

SEQ ID NO: 1031315 - RNA, 27 nt, Human
ucacugcaaucuccaccuccuggguuc

SEQ ID NO: 1031316 - RNA, 24 nt, Human
ucagcaaacaagccccgagagagg

SEQ ID NO: 1031317 - RNA, 20 nt, Human
ucagccucccaaguagcuag

SEQ ID NO: 1031318 - RNA, 20 nt, Human
ucagccucccaaguagcugg

SEQ ID NO: 1031319 - RNA, 23 nt, Human
ucagggacacagaacaaaucuga

SEQ ID NO: 1031320 - RNA, 24 nt, Human
ucaguugcccaggcuggagugcag

SEQ ID NO: 1031321 - RNA, 24 nt, Human
ucccaaagugcuggaauuacaggc

SEQ ID NO: 1031322 - RNA, 18 nt, Human
ucccaaagugcugggauu

SEQ ID NO: 1031323 - RNA, 23 nt, Human
ucccaaagugcugggauuacagg

SEQ ID NO: 1031324 - RNA, 24 nt, Human
ucccaaguagcugugauuacaggc

SEQ ID NO: 1031325 - RNA, 21 nt, Human
ucccggguucacgccauucuc

SEQ ID NO: 1031326 - RNA, 24 nt, Human
ucccggguucacgccauucuccug

SEQ ID NO: 1031327 - RNA, 21 nt, Human
uccuggguucaagugauucuc

SEQ ID NO: 1031328 - RNA, 24 nt, Human
uccuggguucaagugauucuccug

SEQ ID NO: 1031329 - RNA, 18 nt, Human
ucgccagggcuggagugc

SEQ ID NO: 1031330 - RNA, 18 nt, Human
ucggccucccaaagugcu

SEQ ID NO: 1031331 - RNA, 24 nt, Human
ucucacucugucgccagggcugga

SEQ ID NO: 1031332 - RNA, 22 nt, Human
ucuccaccuccuggguucaagu

SEQ ID NO: 1031333 - RNA, 26 nt, Human
ucuccugccucagccucccaaguagc

SEQ ID NO: 1031334 - RNA, 26 nt, Human
ucuccugccucagccucccaaguagc

SEQ ID NO: 1031335 - RNA, 24 nt, Human
ucugucgccagggcuggagugcag

SEQ ID NO: 1031336 - RNA, 22 nt, Human
ucuugcucaguugcccaggcug

SEQ ID NO: 1031337 - RNA, 23 nt, Human
ucuugcucaguugcccaggcugg

SEQ ID NO: 1031338 - RNA, 24 nt, Human
ucuugcucaguugcccaggcugga

SEQ ID NO: 1031339 - RNA, 27 nt, Human
ucuuuuuuuuuuuuuuuuuuuuugggg

SEQ ID NO: 1031340 - RNA, 22 nt, Human
ugauacccacgugcagcagcaa

SEQ ID NO: 1031341 - RNA, 20 nt, Human
ugauucuccugccucagccu

SEQ ID NO: 1031342 - RNA, 22 nt, Human
ugcaguggcacaaucucggcuc

SEQ ID NO: 1031343 - RNA, 22 nt, Human
ugcaguggcgcaaucucagcuc

SEQ ID NO: 1031344 - RNA, 23 nt, Human
ugcaguggcgcaaucucagcuca

SEQ ID NO: 1031345 - RNA, 18 nt, Human
ugcccaggcuggagugca

SEQ ID NO: 1031346 - RNA, 21 nt, Human
ugcccaggcuggagugcagug

SEQ ID NO: 1031347 - RNA, 22 nt, Human
ugcccaggcuggagugcagugg

SEQ ID NO: 1031348 - RNA, 24 nt, Human
ugcccaggcuggagugcaguggca

SEQ ID NO: 1031349 - RNA, 23 nt, Human
ugccucagccucccaaguagcua

SEQ ID NO: 1031350 - RNA, 24 nt, Human
ugccucagccucccaaguagcuag

SEQ ID NO: 1031351 - RNA, 25 nt, Human
ugccucagccucccaaguagcugug

SEQ ID NO: 1031352 - RNA, 24 nt, Human
ugcucaguugcccaggcuggagug

SEQ ID NO: 1031353 - RNA, 20 nt, Human
ugcuggaauuacaggcguga

SEQ ID NO: 1031354 - RNA, 18 nt, Human
uggaaaccagacuccaaa

SEQ ID NO: 1031355 - RNA, 22 nt, Human
uggaacuucagggacacagaac

SEQ ID NO: 1031356 - RNA, 18 nt, Human
uggaauuacaggcgugag

SEQ ID NO: 1031357 - RNA, 19 nt, Human
uggaauuacaggcgugagc

SEQ ID NO: 1031358 - RNA, 22 nt, Human
uggaauuacaggcgugagcuac

SEQ ID NO: 1031359 - RNA, 24 nt, Human
uggaauuacaggcgugagcuacca

SEQ ID NO: 1031360 - RNA, 18 nt, Human
uggaggcuggcccagagg

SEQ ID NO: 1031361 - RNA, 23 nt, Human
uggagugcaguggcacaaucucg

SEQ ID NO: 1031362 - RNA, 24 nt, Human
uggagugcaguggcacaaucucgg

SEQ ID NO: 1031363 - RNA, 18 nt, Human
uggagugcaguggcgcaa

SEQ ID NO: 1031364 - RNA, 23 nt, Human
uggagugcaguggcgcaaucuca

SEQ ID NO: 1031365 - RNA, 24 nt, Human
uggagugcaguggcgcaaucucag

SEQ ID NO: 1031366 - RNA, 24 nt, Human
uggcacaaucucggcucacugcaa

SEQ ID NO: 1031367 - RNA, 24 nt, Human
uggccaggcuggucucgaauuccu

SEQ ID NO: 1031368 - RNA, 24 nt, Human
uggcgcaaucucagcucacugcaa

SEQ ID NO: 1031369 - RNA, 22 nt, Human
ugggauuacaggagugagccac

SEQ ID NO: 1031370 - RNA, 23 nt, Human
ugggauuacaggagugagccacc

SEQ ID NO: 1031371 - RNA, 23 nt, Human
ugggauuacaggagugagccacc

SEQ ID NO: 1031372 - RNA, 24 nt, Human
ugggauuacaggagugagccaccg

SEQ ID NO: 1031373 - RNA, 23 nt, Human
uggguucaagugauucuccugcc

SEQ ID NO: 1031374 - RNA, 21 nt, Human
ugugauuacaggcgcccgcca

SEQ ID NO: 1031375 - RNA, 18 nt, Human
uuacuuggugcuucugau

SEQ ID NO: 1031376 - RNA, 18 nt, Human
uuaguagagacgggguuu

SEQ ID NO: 1031377 - RNA, 22 nt, Human
uuaguagagacgggguuucacc

SEQ ID NO: 1031378 - RNA, 24 nt, Human
uuaguagagacgggguuucaccau

SEQ ID NO: 1031379 - RNA, 24 nt, Human
uuaguagagacggguuuugaccau

SEQ ID NO: 1031380 - RNA, 21 nt, Human
uucaagugauucuccugccuc

SEQ ID NO: 1031381 - RNA, 23 nt, Human
uucaagugauucuccugccucag

SEQ ID NO: 1031382 - RNA, 24 nt, Human
uucaagugauucuccugccucagc

SEQ ID NO: 1031383 - RNA, 19 nt, Human
uucacccgccucagccucc

SEQ ID NO: 1031384 - RNA, 21 nt, Human
uucacccgccucagccuccca

SEQ ID NO: 1031385 - RNA, 24 nt, Human
uuccugaccucgugauucacccgc

SEQ ID NO: 1031386 - RNA, 23 nt, Human
uugagacagucuugcucaguugc

SEQ ID NO: 1031387 - RNA, 24 nt, Human
uugcccaggcuggagugcaguggc

SEQ ID NO: 1031388 - RNA, 24 nt, Human
uugcucaguugcccaggcuggagu

SEQ ID NO: 1031389 - RNA, 19 nt, Human
uuucaccauguuagccagg

SEQ ID NO: 1031390 - RNA, 20 nt, Human
uuucaccauguuagccagga

SEQ ID NO: 1031391 - RNA, 24 nt, Human
uuugaccauguuggccaggcuggu

SEQ ID NO: 1031392 - RNA, 23 nt, Human
uuuugaccauguuggccaggcug

SEQ ID NO: 1031393 - RNA, 23 nt, Human
uuuugagacagucuugcucaguu

SEQ ID NO: 1031394 - RNA, 24 nt, Human
uuuuuaguagagacgggguuucac

SEQ ID NO: 1031395 - RNA, 18 nt, Human
uuuuuaguagagacgggu

SEQ ID NO: 1031396 - RNA, 21 nt, Human
uuuuuguauuuuuaguagaga

SEQ ID NO: 1031397 - RNA, 21 nt, Human
uuuuuuauauuuuuaguagag

SEQ ID NO: 1031398 - RNA, 24 nt, Human
uuuuuuauauuuuuaguagagacg

SEQ ID NO: 1031399 - RNA, 24 nt, Human
uuuuuuguauuuuuaguagagacg

SEQ ID NO: 1031400 - RNA, 23 nt, Human
uuuuuuuuuuuuugagacagucu

SEQ ID NO: 1031401 - RNA, 18 nt, Human
aaaacuucugagaucuag

SEQ ID NO: 1031402 - RNA, 20 nt, Human
aaacaaaaaaggaaauaaaa

SEQ ID NO: 1031403 - RNA, 22 nt, Human
aaacacaaccagaacaguucua

SEQ ID NO: 1031404 - RNA, 22 nt, Human
aaacugcuccauucuaaaugua

SEQ ID NO: 1031405 - RNA, 24 nt, Human
aaccagugcugcucucugucauaa

SEQ ID NO: 1031406 - RNA, 26 nt, Human
aacgugcacaugugugcacgugcaca

SEQ ID NO: 1031407 - RNA, 21 nt, Human
aagauuuuaacaugugagcaa

SEQ ID NO: 1031408 - RNA, 19 nt, Human
aagcagucuaucaaauaua

SEQ ID NO: 1031409 - RNA, 20 nt, Human
aauaccagagcaacacucuc

SEQ ID NO: 1031410 - RNA, 20 nt, Human
aauaccagagcaacacucuc

SEQ ID NO: 1031411 - RNA, 26 nt, Human
acagaggccuucaauccuacuuaaag

SEQ ID NO: 1031412 - RNA, 18 nt, Human
acaggguuucauaggugc

SEQ ID NO: 1031413 - RNA, 30 nt, Human
acaugugugcacgugcacacgcacacacag

SEQ ID NO: 1031414 - RNA, 25 nt, Human
accagaauaccagacuucagaaccc

SEQ ID NO: 1031415 - RNA, 21 nt, Human
accagugcugcucucugucau

SEQ ID NO: 1031416 - RNA, 21 nt, Human
acccagaauaccagagcaaca

SEQ ID NO: 1031417 - RNA, 20 nt, Human
accucaccucgcccccgccg

SEQ ID NO: 1031418 - RNA, 19 nt, Human
acuagguguguacaggguu

SEQ ID NO: 1031419 - RNA, 22 nt, Human
agaggaacagguuacuuuugag

SEQ ID NO: 1031420 - RNA, 23 nt, Human
aggcccucuucuccccacaaaaa

SEQ ID NO: 1031421 - RNA, 20 nt, Human
aggugcuuuguaaacaucag

SEQ ID NO: 1031422 - RNA, 21 nt, Human
agucauacuuuugaacccaga

SEQ ID NO: 1031423 - RNA, 18 nt, Human
aucgcuccgcgucccccc

SEQ ID NO: 1031424 - RNA, 21 nt, Human
caaacacaaccagaacaguuc

SEQ ID NO: 1031425 - RNA, 22 nt, Human
caaacgugcacaugugugcacg

SEQ ID NO: 1031426 - RNA, 19 nt, Human
cacccccucucccucccgc

SEQ ID NO: 1031427 - RNA, 20 nt, Human
cacccccucucccucccgcc

SEQ ID NO: 1031428 - RNA, 19 nt, Human
caccucaccucgcccccgc

SEQ ID NO: 1031429 - RNA, 25 nt, Human
cagaggccuucaauccuacuuaaag

SEQ ID NO: 1031430 - RNA, 26 nt, Human
cauuuuuauuucaaguguauuuaaaa

SEQ ID NO: 1031431 - RNA, 19 nt, Human
ccaacaccucaccucgccc

SEQ ID NO: 1031432 - RNA, 21 nt, Human
ccauuuauaaguuuauuucca

SEQ ID NO: 1031433 - RNA, 23 nt, Human
cccacagaggccuucaauccuac

SEQ ID NO: 1031434 - RNA, 19 nt, Human
ccccccgagcccgaacccc

SEQ ID NO: 1031435 - RNA, 21 nt, Human
ccccccgagcccgaaccccuu

SEQ ID NO: 1031436 - RNA, 24 nt, Human
ccccccgagcccgaaccccuuucc

SEQ ID NO: 1031437 - RNA, 19 nt, Human
ccccccgccccccgagccc

SEQ ID NO: 1031438 - RNA, 23 nt, Human
cccccgagcccgaaccccuuucc

SEQ ID NO: 1031439 - RNA, 24 nt, Human
cccccgagcccgaaccccuuucca

SEQ ID NO: 1031440 - RNA, 21 nt, Human
cccccgccgccaccucgugcc

SEQ ID NO: 1031441 - RNA, 18 nt, Human
ccccgccccccgagcccg

SEQ ID NO: 1031442 - RNA, 22 nt, Human
ccccuaaaaugugcuauuccaa

SEQ ID NO: 1031443 - RNA, 18 nt, Human
ccccucucccucccgccc

SEQ ID NO: 1031444 - RNA, 19 nt, Human
ccccugcggccggcgcggg

SEQ ID NO: 1031445 - RNA, 22 nt, Human
cccgaaccccuuuccacugcca

SEQ ID NO: 1031446 - RNA, 19 nt, Human
cccgccccccgagcccgaa

SEQ ID NO: 1031447 - RNA, 19 nt, Human
cccucuucuccccacaaaa

SEQ ID NO: 1031448 - RNA, 20 nt, Human
cccuuuccacugccaacacc

SEQ ID NO: 1031449 - RNA, 18 nt, Human
ccgcccacucccgcagcu

SEQ ID NO: 1031450 - RNA, 20 nt, Human
ccucccgccaaacacaaccg

SEQ ID NO: 1031451 - RNA, 23 nt, Human
ccucggacacccccucucccucc

SEQ ID NO: 1031452 - RNA, 20 nt, Human
ccucuggagcuccuuucaac

SEQ ID NO: 1031453 - RNA, 21 nt, Human
cgccaaacacaaccagaacag

SEQ ID NO: 1031454 - RNA, 22 nt, Human
cgccccccgagcccgaaccccu

SEQ ID NO: 1031455 - RNA, 18 nt, Human
cgcuccgcguccccccgc

SEQ ID NO: 1031456 - RNA, 21 nt, Human
cuauuccaaagaggaacaggu

SEQ ID NO: 1031457 - RNA, 24 nt, Human
cuauuuuucaaaacuucugagauc

SEQ ID NO: 1031458 - RNA, 21 nt, Human
cuccaauacguccccauuuau

SEQ ID NO: 1031459 - RNA, 21 nt, Human
cuccgcguccccccgcccccc

SEQ ID NO: 1031460 - RNA, 18 nt, Human
cuccucuggagcuccuuu

SEQ ID NO: 1031461 - RNA, 20 nt, Human
gaaccccuuuccacugccaa

SEQ ID NO: 1031462 - RNA, 23 nt, Human
gaagauagguauucccucugcuc

SEQ ID NO: 1031463 - RNA, 19 nt, Human
ggaaguagcugggcugaag

SEQ ID NO: 1031464 - RNA, 18 nt, Human
gggaaguagcugggcuga

SEQ ID NO: 1031465 - RNA, 19 nt, Human
gguaacuucccucaaaugu

SEQ ID NO: 1031466 - RNA, 20 nt, Human
gguauuaaccaugccccuaa

SEQ ID NO: 1031467 - RNA, 20 nt, Human
gugagcaacacagaacucca

SEQ ID NO: 1031468 - RNA, 21 nt, Human
gugcacacgcacacacacaca

SEQ ID NO: 1031469 - RNA, 24 nt, Human
gugcacacgcacacacacacacuc

SEQ ID NO: 1031470 - RNA, 21 nt, Human
uaaaaauaacagaaccagugc

SEQ ID NO: 1031471 - RNA, 22 nt, Human
uaaaaauaacagaaccagugcu

SEQ ID NO: 1031472 - RNA, 19 nt, Human
uaaaagagaacauguaaaa

SEQ ID NO: 1031473 - RNA, 22 nt, Human
uaagaaggacugaacaaaaauu

SEQ ID NO: 1031474 - RNA, 25 nt, Human
uacacacaguaaccaucaggauuua

SEQ ID NO: 1031475 - RNA, 18 nt, Human
uaccagagcaacacucuc

SEQ ID NO: 1031476 - RNA, 18 nt, Human
uaccagagcaacacucuc

SEQ ID NO: 1031477 - RNA, 20 nt, Human
uagggaaguagcugggcuga

SEQ ID NO: 1031478 - RNA, 21 nt, Human
uauuuuaaauaaaaaugguug

SEQ ID NO: 1031479 - RNA, 21 nt, Human
ucagaauaccagagcaacacu

SEQ ID NO: 1031480 - RNA, 18 nt, Human
ucaggcccucuucucccc

SEQ ID NO: 1031481 - RNA, 23 nt, Human
uccaccuuuacuaucaagauuac

SEQ ID NO: 1031482 - RNA, 24 nt, Human
uccaccuuuacuaucaagauuaca

SEQ ID NO: 1031483 - RNA, 19 nt, Human
uccacugccaacaccucac

SEQ ID NO: 1031484 - RNA, 20 nt, Human
uccacugccaacaccucacc

SEQ ID NO: 1031485 - RNA, 28 nt, Human
uccauacauacaaacgugcacaugugug

SEQ ID NO: 1031486 - RNA, 24 nt, Human
uccccccgccccccgagcccgaac

SEQ ID NO: 1031487 - RNA, 26 nt, Human
uccccccgccccccgagcccgaaccc

SEQ ID NO: 1031488 - RNA, 22 nt, Human
uccccucccgccaaacacaacc

SEQ ID NO: 1031489 - RNA, 23 nt, Human
ucccgcccacucccgcagcgcga

SEQ ID NO: 1031490 - RNA, 23 nt, Human
uccgcguccccccgccccccgag

SEQ ID NO: 1031491 - RNA, 24 nt, Human
ugaggaaaaaagcugccuugguaa

SEQ ID NO: 1031492 - RNA, 18 nt, Human
ugauaaggguuuucugaa

SEQ ID NO: 1031493 - RNA, 25 nt, Human
ugcacgugcacacgcacacacacag

SEQ ID NO: 1031494 - RNA, 22 nt, Human
ugccaacaccucaccucgcccc

SEQ ID NO: 1031495 - RNA, 20 nt, Human
uggagcuccuuucaacucaa

SEQ ID NO: 1031496 - RNA, 22 nt, Human
uuccaaauccagucuucuuugc

SEQ ID NO: 1031497 - RNA, 26 nt, Human
uugaacccagaauaccagaauaccag

SEQ ID NO: 1031498 - RNA, 24 nt, Human
uuuaugcuugcuugguuuuuuuga

SEQ ID NO: 1031499 - RNA, 24 nt, Human
uuugacuacaauuaagagaugaaa

SEQ ID NO: 1031500 - RNA, 20 nt, Human
uuuguaaacaucagagucac

SEQ ID NO: 1031501 - RNA, 21 nt, Human
aaaaauuauccuggauccagg

SEQ ID NO: 1031502 - RNA, 24 nt, Human
aaaacccaccauuaaaauaagaca

SEQ ID NO: 1031503 - RNA, 22 nt, Human
aaaauaagacaaguucauagaa

SEQ ID NO: 1031504 - RNA, 19 nt, Human
aaacugguuuaaccucaca

SEQ ID NO: 1031505 - RNA, 22 nt, Human
aaaggccuccagagcuuucucc

SEQ ID NO: 1031506 - RNA, 22 nt, Human
aaccaaacccuccuggucucug

SEQ ID NO: 1031507 - RNA, 23 nt, Human
aacucagcccucauuccccucug

SEQ ID NO: 1031508 - RNA, 19 nt, Human
aagcaucgaaaucgccacu

SEQ ID NO: 1031509 - RNA, 22 nt, Human
aaugaaggcacuccaggaagaa

SEQ ID NO: 1031510 - RNA, 19 nt, Human
acaccaauuccucugcgua

SEQ ID NO: 1031511 - RNA, 20 nt, Human
acccuccacccauagccaaa

SEQ ID NO: 1031512 - RNA, 25 nt, Human
agaaccucuucaaacucacccucca

SEQ ID NO: 1031513 - RNA, 21 nt, Human
agagcccacccauguccagcc

SEQ ID NO: 1031514 - RNA, 22 nt, Human
agcaagaccucauuugggccug

SEQ ID NO: 1031515 - RNA, 21 nt, Human
aggaagaaggggaguuccugg

SEQ ID NO: 1031516 - RNA, 26 nt, Human
aggaauuaaaggcuauagcucaagcu

SEQ ID NO: 1031517 - RNA, 25 nt, Human
aggggugggguggggcauguugggg

SEQ ID NO: 1031518 - RNA, 20 nt, Human
agguccacaaguagcaguuu

SEQ ID NO: 1031519 - RNA, 24 nt, Human
aucugaaagaaucgggcacaaggg

SEQ ID NO: 1031520 - RNA, 26 nt, Human
caaacucacccuccacccauagccaa

SEQ ID NO: 1031521 - RNA, 23 nt, Human
cacccauagccaaaguaaggaau

SEQ ID NO: 1031522 - RNA, 21 nt, Human
cacccuccacccauagccaaa

SEQ ID NO: 1031523 - RNA, 19 nt, Human
cagaaaaaaaacccaccau

SEQ ID NO: 1031524 - RNA, 20 nt, Human
cagaagcuguagaagaggca

SEQ ID NO: 1031525 - RNA, 18 nt, Human
caguagcaguggaaccag

SEQ ID NO: 1031526 - RNA, 24 nt, Human
caguggaaccaggaaacccaaggg

SEQ ID NO: 1031527 - RNA, 23 nt, Human
cauaacucagcccucauuccccu

SEQ ID NO: 1031528 - RNA, 18 nt, Human
ccaccucccggauggcug

SEQ ID NO: 1031529 - RNA, 22 nt, Human
ccagagcuuucuccagaggaaa

SEQ ID NO: 1031530 - RNA, 19 nt, Human
cccacccauguccagccau

SEQ ID NO: 1031531 - RNA, 23 nt, Human
cccagguuacaagaaaaucagaa

SEQ ID NO: 1031532 - RNA, 21 nt, Human
cccgagacuggggaugagggc

SEQ ID NO: 1031533 - RNA, 24 nt, Human
cccucugggucaguagcaguggaa

SEQ ID NO: 1031534 - RNA, 25 nt, Human
ccucuuacuuuuuccacauuagggg

SEQ ID NO: 1031535 - RNA, 21 nt, Human
ccugugagcuaaccaaacccu

SEQ ID NO: 1031536 - RNA, 22 nt, Human
cuccaggaagaaggggaguucc

SEQ ID NO: 1031537 - RNA, 19 nt, Human
cuggcaccugccugccaaa

SEQ ID NO: 1031538 - RNA, 22 nt, Human
cuuuuuuguuuguuuguuuuuu

SEQ ID NO: 1031539 - RNA, 19 nt, Human
gaccguacuuagggguggg

SEQ ID NO: 1031540 - RNA, 21 nt, Human
gaguaguccucuuacuuuuuc

SEQ ID NO: 1031541 - RNA, 21 nt, Human
gcaaacugguuuaaccucaca

SEQ ID NO: 1031542 - RNA, 21 nt, Human
gcaagaccucauuugggccug

SEQ ID NO: 1031543 - RNA, 18 nt, Human
ggccugguucagggauag

SEQ ID NO: 1031544 - RNA, 21 nt, Human
gggccagauuuccuuccucaa

SEQ ID NO: 1031545 - RNA, 22 nt, Human
ggguggggcauguuggggaggg

SEQ ID NO: 1031546 - RNA, 21 nt, Human
ggucaguagcaguggaaccag

SEQ ID NO: 1031547 - RNA, 19 nt, Human
guccucuuacuuuuuccac

SEQ ID NO: 1031548 - RNA, 22 nt, Human
guccucuuacuuuuuccacauu

SEQ ID NO: 1031549 - RNA, 25 nt, Human
guggcagauuuucaugaaaaucagc

SEQ ID NO: 1031550 - RNA, 19 nt, Human
uaaccaaacccuccugguc

SEQ ID NO: 1031551 - RNA, 21 nt, Human
uaaccaaacccuccuggucuc

SEQ ID NO: 1031552 - RNA, 21 nt, Human
uaccagaaaaaaaacccacca

SEQ ID NO: 1031553 - RNA, 18 nt, Human
uaggggaaugcaaacugg

SEQ ID NO: 1031554 - RNA, 18 nt, Human
uaggggugggguggggca

SEQ ID NO: 1031555 - RNA, 26 nt, Human
uaggggugggguggggcauguugggg

SEQ ID NO: 1031556 - RNA, 19 nt, Human
ucacuggggucacacuuga

SEQ ID NO: 1031557 - RNA, 25 nt, Human
ucagagcccacccauguccagccau

SEQ ID NO: 1031558 - RNA, 22 nt, Human
ucaguagcaguggaaccaggaa

SEQ ID NO: 1031559 - RNA, 23 nt, Human
uccaaaucuuaccagaaaaaaaa

SEQ ID NO: 1031560 - RNA, 20 nt, Human
ucccagguuacaagaaaauc

SEQ ID NO: 1031561 - RNA, 25 nt, Human
uccucauucuugaugaauagucuca

SEQ ID NO: 1031562 - RNA, 19 nt, Human
uccucuuacuuuuuccaca

SEQ ID NO: 1031563 - RNA, 23 nt, Human
uccuggauccaggaaagugaugc

SEQ ID NO: 1031564 - RNA, 23 nt, Human
ugaaagaaucgggcacaagguca

SEQ ID NO: 1031565 - RNA, 24 nt, Human
ugacaagccuucaucccagacccu

SEQ ID NO: 1031566 - RNA, 23 nt, Human
ugaguaguccucuuacuuuuucc

SEQ ID NO: 1031567 - RNA, 24 nt, Human
ugaguaguccucuuacuuuuucca

SEQ ID NO: 1031568 - RNA, 19 nt, Human
ugcugaacuuugcucagca

SEQ ID NO: 1031569 - RNA, 19 nt, Human
uggaagugcugacaagccu

SEQ ID NO: 1031570 - RNA, 18 nt, Human
uggggugggggaaguccu

SEQ ID NO: 1031571 - RNA, 24 nt, Human
uggggugggggaaguccugugagc

SEQ ID NO: 1031572 - RNA, 21 nt, Human
ugguaaugagaagaggaaaga

SEQ ID NO: 1031573 - RNA, 18 nt, Human
uguuuguuuguuuuuuuc

SEQ ID NO: 1031574 - RNA, 21 nt, Human
uucaaaagagaaaguucugca

SEQ ID NO: 1031575 - RNA, 22 nt, Human
uucauaacucagcccucauucc

SEQ ID NO: 1031576 - RNA, 21 nt, Human
uuuaaaaauuauccuggaucc

SEQ ID NO: 1031577 - RNA, 25 nt, Human
uuuaucaucaaaacaaacagccaau

SEQ ID NO: 1031578 - RNA, 22 nt, Human
uuuucaugaaaaucagcuucug

SEQ ID NO: 1031579 - RNA, 21 nt, Human
uuuuuguuuguuuguuuuuuu

SEQ ID NO: 1031580 - RNA, 18 nt, Human
aaaagcccagcaagagaa

SEQ ID NO: 1031581 - RNA, 24 nt, Human
aaaagcccagcaagagaaacagaa

SEQ ID NO: 1031582 - RNA, 18 nt, Human
aaaccugaaagugaagca

SEQ ID NO: 1031583 - RNA, 20 nt, Human
aagagaaacagaaaucuggc

SEQ ID NO: 1031584 - RNA, 21 nt, Human
aagccacauccuggagcacca

SEQ ID NO: 1031585 - RNA, 24 nt, Human
aaggcacuucgagaaaccugaaag

SEQ ID NO: 1031586 - RNA, 19 nt, Human
aaggcaggcgaugggggcc

SEQ ID NO: 1031587 - RNA, 18 nt, Human
acaggagcaagaaggcac

SEQ ID NO: 1031588 - RNA, 24 nt, Human
acuucgagaaaccugaaagugaag

SEQ ID NO: 1031589 - RNA, 22 nt, Human
agaaacagaaaucuggcaggau

SEQ ID NO: 1031590 - RNA, 19 nt, Human
agaaaccugaaagugaagc

SEQ ID NO: 1031591 - RNA, 25 nt, Human
agaaaucuggcaggauggggaaaca

SEQ ID NO: 1031592 - RNA, 19 nt, Human
agacaggagcaagaaggca

SEQ ID NO: 1031593 - RNA, 20 nt, Human
agacugcuguguagggcugg

SEQ ID NO: 1031594 - RNA, 18 nt, Human
agauuccuccccuccacc

SEQ ID NO: 1031595 - RNA, 19 nt, Human
agauuccuccccuccaccc

SEQ ID NO: 1031596 - RNA, 22 nt, Human
agcaagaaggcacuucgagaaa

SEQ ID NO: 1031597 - RNA, 21 nt, Human
aggagccagguagccccagag

SEQ ID NO: 1031598 - RNA, 26 nt, Human
aggcuccacagauaaguccccaguga

SEQ ID NO: 1031599 - RNA, 22 nt, Human
aggcuugcccacagggccccgg

SEQ ID NO: 1031600 - RNA, 24 nt, Human
auccuggagcaccaggcuccacag

SEQ ID NO: 1031601 - RNA, 18 nt, Human
caaaagcccagcaagaga

SEQ ID NO: 1031602 - RNA, 22 nt, Human
caagagaaacagaaaucuggca

SEQ ID NO: 1031603 - RNA, 18 nt, Human
cacccccccucccccaau

SEQ ID NO: 1031604 - RNA, 20 nt, Human
cacccccccucccccaauaa

SEQ ID NO: 1031605 - RNA, 22 nt, Human
cacuguccucucuggcuggcug

SEQ ID NO: 1031606 - RNA, 21 nt, Human
cagacaggagcaagaaggcac

SEQ ID NO: 1031607 - RNA, 22 nt, Human
cagauuccuccccuccaccccc

SEQ ID NO: 1031608 - RNA, 22 nt, Human
caggaggcuugcccacagggcc

SEQ ID NO: 1031609 - RNA, 18 nt, Human
cauccuggagcaccaggc

SEQ ID NO: 1031610 - RNA, 20 nt, Human
ccaaaagcccagcaagagaa

SEQ ID NO: 1031611 - RNA, 20 nt, Human
ccaauaaguuccccuccucu

SEQ ID NO: 1031612 - RNA, 26 nt, Human
ccaggcuccacagauaaggugcuacg

SEQ ID NO: 1031613 - RNA, 19 nt, Human
ccccaauaaguuccccucc

SEQ ID NO: 1031614 - RNA, 22 nt, Human
ccccagugacgucucaggccag

SEQ ID NO: 1031615 - RNA, 23 nt, Human
cccccccucccccaauaaguucc

SEQ ID NO: 1031616 - RNA, 20 nt, Human
cccuccacccccccuccccc

SEQ ID NO: 1031617 - RNA, 21 nt, Human
ccuccacccccccucccccaa

SEQ ID NO: 1031618 - RNA, 21 nt, Human
cuccacuguccucucuggcug

SEQ ID NO: 1031619 - RNA, 19 nt, Human
cuccccuccacccccccuc

SEQ ID NO: 1031620 - RNA, 21 nt, Human
cuccccuccacccccccuccc

SEQ ID NO: 1031621 - RNA, 21 nt, Human
cuggcugggccuaggagccag

SEQ ID NO: 1031622 - RNA, 18 nt, Human
cugggcuccacuguccuc

SEQ ID NO: 1031623 - RNA, 19 nt, Human
cuguccucucuggcuggcu

SEQ ID NO: 1031624 - RNA, 24 nt, Human
gacugcuguguagggcuggggugg

SEQ ID NO: 1031625 - RNA, 25 nt, Human
gcuccacuguccucucuggcuggcu

SEQ ID NO: 1031626 - RNA, 20 nt, Human
ggagagaaggcaggcgaugg

SEQ ID NO: 1031627 - RNA, 25 nt, Human
gggaaacagacaggagcaagaaggc

SEQ ID NO: 1031628 - RNA, 24 nt, Human
gggugggguuuggcgggcuggggg

SEQ ID NO: 1031629 - RNA, 21 nt, Human
uaaguccccagugacgucuuc

SEQ ID NO: 1031630 - RNA, 22 nt, Human
uacugccaaaagcccagcaaga

SEQ ID NO: 1031631 - RNA, 22 nt, Human
uaggagccagguagccccagag

SEQ ID NO: 1031632 - RNA, 18 nt, Human
uccagauuccuccccucc

SEQ ID NO: 1031633 - RNA, 21 nt, Human
uccagauuccuccccuccacc

SEQ ID NO: 1031634 - RNA, 23 nt, Human
uccagauuccuccccuccacccc

SEQ ID NO: 1031635 - RNA, 23 nt, Human
ucccaaggagacgugucugggcu

SEQ ID NO: 1031636 - RNA, 21 nt, Human
ucccccaauaaguuccccucc

SEQ ID NO: 1031637 - RNA, 23 nt, Human
uccccuccacccccccuccccca

SEQ ID NO: 1031638 - RNA, 21 nt, Human
ugagaagccacauccuggagc

SEQ ID NO: 1031639 - RNA, 18 nt, Human
ugccaaaagcccagcaag

SEQ ID NO: 1031640 - RNA, 18 nt, Human
uggcaggauggggaaaca

SEQ ID NO: 1031641 - RNA, 20 nt, Human
uggcaggauggggaaacaga

SEQ ID NO: 1031642 - RNA, 22 nt, Human
uggggugggguuuggcgggcug

SEQ ID NO: 1031643 - RNA, 25 nt, Human
ugucugggcuccacuguccucucug

SEQ ID NO: 1031644 - RNA, 19 nt, Human
uucaugagaagccacaucc

SEQ ID NO: 1031645 - RNA, 20 nt, Human
uuccccuccucuggccagag

SEQ ID NO: 1031646 - RNA, 21 nt, Human
agagacagaaccuggagaaag

SEQ ID NO: 1031647 - RNA, 22 nt, Human
cugauaaauguuuuguaagcug

SEQ ID NO: 1031648 - RNA, 20 nt, Human
gaaccuggagaaaggcugcg

SEQ ID NO: 1031649 - RNA, 22 nt, Human
gaguggggcuccacuccuccag

SEQ ID NO: 1031650 - RNA, 19 nt, Human
ggagagacagaaccuggag

SEQ ID NO: 1031651 - RNA, 18 nt, Human
gggccugaacccacuccu

SEQ ID NO: 1031652 - RNA, 20 nt, Human
ucagaaugggagagacagaa

SEQ ID NO: 1031653 - RNA, 23 nt, Human
uccagggcuggaccugaagguuc

SEQ ID NO: 1031654 - RNA, 18 nt, Human
uggauacagucuuuaacc

SEQ ID NO: 1031655 - RNA, 18 nt, Human
ugggagagacagaaccug

SEQ ID NO: 1031656 - RNA, 24 nt, Human
uguagaaaggauucaagacagccg

SEQ ID NO: 1031657 - RNA, 23 nt, Human
uuaauuuaucuuuaauguuuucu

SEQ ID NO: 1031658 - RNA, 18 nt, Human
uuuuucaccaugauuacc

SEQ ID NO: 1031659 - RNA, 25 nt, Human
uuuuuuuuuuuuuucaccaugauua

SEQ ID NO: 1031660 - RNA, 23 nt, Human
uuuuuuuuuuuuuuucaccauga

SEQ ID NO: 1031661 - RNA, 19 nt, Human
acacugaggggcgcuguaa

SEQ ID NO: 1031662 - RNA, 19 nt, Human
accaccagucugucucugc

SEQ ID NO: 1031663 - RNA, 21 nt, Human
accagucugucucugcugugc

SEQ ID NO: 1031664 - RNA, 22 nt, Human
acccuucccauugccucccccc

SEQ ID NO: 1031665 - RNA, 23 nt, Human
acccuucccauugccuccccccc

SEQ ID NO: 1031666 - RNA, 20 nt, Human
auuuguaauuucuacccuuc

SEQ ID NO: 1031667 - RNA, 25 nt, Human
caaaaaaaacuguacaugaguuuac

SEQ ID NO: 1031668 - RNA, 25 nt, Human
caccuccagguucaaccaccagucu

SEQ ID NO: 1031669 - RNA, 18 nt, Human
cagcuggcuuuuuuggca

SEQ ID NO: 1031670 - RNA, 22 nt, Human
cccuucccauugccuccccccc

SEQ ID NO: 1031671 - RNA, 18 nt, Human
ccgccgccgccucgcgcc

SEQ ID NO: 1031672 - RNA, 19 nt, Human
ccgccgccgccucgcgccc

SEQ ID NO: 1031673 - RNA, 20 nt, Human
ccgccgccgccucgcgcccg

SEQ ID NO: 1031674 - RNA, 21 nt, Human
ccgccgccgccucgcgcccgc

SEQ ID NO: 1031675 - RNA, 23 nt, Human
ccuccuccguugucucugcugga

SEQ ID NO: 1031676 - RNA, 22 nt, Human
cgccgggacaggacgggaccgg

SEQ ID NO: 1031677 - RNA, 22 nt, Human
cggcagcgccgcucccucggga

SEQ ID NO: 1031678 - RNA, 18 nt, Human
cgggguagcagccaggcg

SEQ ID NO: 1031679 - RNA, 20 nt, Human
cguccuggugggagccuccu

SEQ ID NO: 1031680 - RNA, 20 nt, Human
cuguaaccacacagacugcc

SEQ ID NO: 1031681 - RNA, 21 nt, Human
cuucccauugccuccccccca

SEQ ID NO: 1031682 - RNA, 23 nt, Human
cuucccauugccucccccccaaa

SEQ ID NO: 1031683 - RNA, 21 nt, Human
gcccgcagcuggcuuuuuugg

SEQ ID NO: 1031684 - RNA, 21 nt, Human
gcucgggccuccgccgccgcc

SEQ ID NO: 1031685 - RNA, 22 nt, Human
gcucgggccuccgccgccgccu

SEQ ID NO: 1031686 - RNA, 22 nt, Human
gcuggcuuuuuuggcaccucca

SEQ ID NO: 1031687 - RNA, 23 nt, Human
ggaccggagccggggucggggua

SEQ ID NO: 1031688 - RNA, 18 nt, Human
ggccggggcgaggccgcg

SEQ ID NO: 1031689 - RNA, 21 nt, Human
ucccauugccucccccccaaa

SEQ ID NO: 1031690 - RNA, 24 nt, Human
uccuccguugucucugcuggagau

SEQ ID NO: 1031691 - RNA, 20 nt, Human
uccugggcccgcagcuggcu

SEQ ID NO: 1031692 - RNA, 20 nt, Human
uccugggcccgcagcuggcu

SEQ ID NO: 1031693 - RNA, 23 nt, Human
uccuggugggagccuccuccguu

SEQ ID NO: 1031694 - RNA, 23 nt, Human
ucggccggcagcgccgcucccuc

SEQ ID NO: 1031695 - RNA, 21 nt, Human
ugauucuauuuguaauuucua

SEQ ID NO: 1031696 - RNA, 23 nt, Human
ugcccaggguagagcccgggggc

SEQ ID NO: 1031697 - RNA, 21 nt, Human
uggugggagccuccuccguug

SEQ ID NO: 1031698 - RNA, 21 nt, Human
ugucucugcuggagaugaaca

SEQ ID NO: 1031699 - RNA, 22 nt, Human
uugccucccccccaaaaaaaac

SEQ ID NO: 1031700 - RNA, 21 nt, Human
uuuuuuuuuuuuuugcaaaug

SEQ ID NO: 1031701 - RNA, 18 nt, Human
uuuuuuuuuuuuuuuuug

SEQ ID NO: 1031702 - RNA, 19 nt, Human
uuuuuuuuuuuuuuuuugc

SEQ ID NO: 1031703 - RNA, 21 nt, Human
uuuuuuuuuuuuuuuuugcaa

SEQ ID NO: 1031704 - RNA, 24 nt, Human
aaaaaaaugacuacaacuuaaacu

SEQ ID NO: 1031705 - RNA, 23 nt, Human
aaacaaaccgacuccuagauucc

SEQ ID NO: 1031706 - RNA, 24 nt, Human
aaagugcugggauuacagguauga

SEQ ID NO: 1031707 - RNA, 23 nt, Human
aaccacacagccucugcauccuu

SEQ ID NO: 1031708 - RNA, 19 nt, Human
aaccgacuccuagauuccu

SEQ ID NO: 1031709 - RNA, 19 nt, Human
aaccgagccagacagcccc

SEQ ID NO: 1031710 - RNA, 24 nt, Human
aaccucaggugauccaacugccuc

SEQ ID NO: 1031711 - RNA, 21 nt, Human
aaccuccgccugccccaccuc

SEQ ID NO: 1031712 - RNA, 18 nt, Human
aagugcugggauuacagg

SEQ ID NO: 1031713 - RNA, 19 nt, Human
aagugcugggauuacaggu

SEQ ID NO: 1031714 - RNA, 26 nt, Human
aagugcugggauuacagguaugagcc

SEQ ID NO: 1031715 - RNA, 20 nt, Human
acacagccucugcauccuuc

SEQ ID NO: 1031716 - RNA, 24 nt, Human
acacagccugcaggggcgggagag

SEQ ID NO: 1031717 - RNA, 20 nt, Human
acaggguuucacccuguugg

SEQ ID NO: 1031718 - RNA, 24 nt, Human
acaggguuucacccuguuggccag

SEQ ID NO: 1031719 - RNA, 22 nt, Human
acaucaaaauaauaggaccagu

SEQ ID NO: 1031720 - RNA, 25 nt, Human
acccuguuggccaggcuggucucaa

SEQ ID NO: 1031721 - RNA, 27 nt, Human
acucugucaccuaggcuagagugcaau

SEQ ID NO: 1031722 - RNA, 24 nt, Human
acugccucggccucccaaagugcu

SEQ ID NO: 1031723 - RNA, 20 nt, Human
agacacagggccagaauaaa

SEQ ID NO: 1031724 - RNA, 25 nt, Human
aggaccaguaauggccacaauccug

SEQ ID NO: 1031725 - RNA, 20 nt, Human
aggcaugcaccaccacgccc

SEQ ID NO: 1031726 - RNA, 24 nt, Human
aggugauccaacugccucggccuc

SEQ ID NO: 1031727 - RNA, 24 nt, Human
agugauucuccugccucagccucc

SEQ ID NO: 1031728 - RNA, 23 nt, Human
agugcaauggcgcgaucuuggcu

SEQ ID NO: 1031729 - RNA, 24 nt, Human
agugcaauggcgcgaucuuggcuu

SEQ ID NO: 1031730 - RNA, 23 nt, Human
augguacaucaaaauaauaggac

SEQ ID NO: 1031731 - RNA, 22 nt, Human
auguuccuaacgcuccgcagug

SEQ ID NO: 1031732 - RNA, 18 nt, Human
auucuccugccucagccu

SEQ ID NO: 1031733 - RNA, 18 nt, Human
auuuaguuagaugcugug

SEQ ID NO: 1031734 - RNA, 19 nt, Human
caaaauaauaggaccagua

SEQ ID NO: 1031735 - RNA, 24 nt, Human
caaagugcugggauuacagguaug

SEQ ID NO: 1031736 - RNA, 27 nt, Human
caacuuaaacuuuauuuacuugauugg

SEQ ID NO: 1031737 - RNA, 20 nt, Human
caagugauucuccugccuca

SEQ ID NO: 1031738 - RNA, 22 nt, Human
caagugauucuccugccucagc

SEQ ID NO: 1031739 - RNA, 22 nt, Human
caccaccacgcccggcuaauuu

SEQ ID NO: 1031740 - RNA, 24 nt, Human
caccacgcccggcuaauuuuugua

SEQ ID NO: 1031741 - RNA, 21 nt, Human
cacccuguuggccaggcuggu

SEQ ID NO: 1031742 - RNA, 24 nt, Human
cacccuguuggccaggcuggucuc

SEQ ID NO: 1031743 - RNA, 23 nt, Human
cacucugucaccuaggcuagagu

SEQ ID NO: 1031744 - RNA, 24 nt, Human
cacucugucaccuaggcuagagug

SEQ ID NO: 1031745 - RNA, 20 nt, Human
cagccuccugaguaccuggg

SEQ ID NO: 1031746 - RNA, 19 nt, Human
cagccucugcauccuuccu

SEQ ID NO: 1031747 - RNA, 24 nt, Human
caggguuucacccuguuggccagg

SEQ ID NO: 1031748 - RNA, 22 nt, Human
caguagacacagggccagaaua

SEQ ID NO: 1031749 - RNA, 23 nt, Human
caugcaccaccacgcccggcuaa

SEQ ID NO: 1031750 - RNA, 23 nt, Human
caugcagcuuugauuugugccac

SEQ ID NO: 1031751 - RNA, 21 nt, Human
ccaaagugcugggauuacagg

SEQ ID NO: 1031752 - RNA, 21 nt, Human
ccaaagugcugggauuacagg

SEQ ID NO: 1031753 - RNA, 22 nt, Human
ccaaagugcugggauuacaggu

SEQ ID NO: 1031754 - RNA, 24 nt, Human
ccaaagugcugggauuacagguau

SEQ ID NO: 1031755 - RNA, 19 nt, Human
ccacaauccuguugacugc

SEQ ID NO: 1031756 - RNA, 22 nt, Human
ccagaauaaacuggcaaguuuu

SEQ ID NO: 1031757 - RNA, 23 nt, Human
cccccacgcgccgccgccucccg

SEQ ID NO: 1031758 - RNA, 18 nt, Human
cccgcccccacgcgccga

SEQ ID NO: 1031759 - RNA, 26 nt, Human
ccgucccgcccccacgcgccgccgcc

SEQ ID NO: 1031760 - RNA, 19 nt, Human
ccuaaccucaggugaucca

SEQ ID NO: 1031761 - RNA, 21 nt, Human
ccucggguucaagugauucuc

SEQ ID NO: 1031762 - RNA, 24 nt, Human
ccucggguucaagugauucuccug

SEQ ID NO: 1031763 - RNA, 24 nt, Human
ccugaguaccugggacuacaggca

SEQ ID NO: 1031764 - RNA, 24 nt, Human
ccugccucagccuccugaguaccu

SEQ ID NO: 1031765 - RNA, 22 nt, Human
cggaaaacaaaccgacuccuag

SEQ ID NO: 1031766 - RNA, 23 nt, Human
cucggguucaagugauucuccuc

SEQ ID NO: 1031767 - RNA, 23 nt, Human
cucuugugaauugaacuggaggc

SEQ ID NO: 1031768 - RNA, 25 nt, Human
cugcaaccuccgccugccccaccuc

SEQ ID NO: 1031769 - RNA, 22 nt, Human
gaaaaugcucuugugaauugaa

SEQ ID NO: 1031770 - RNA, 19 nt, Human
gaccaguaauggccacaau

SEQ ID NO: 1031771 - RNA, 19 nt, Human
gagagcggaaggagauggg

SEQ ID NO: 1031772 - RNA, 21 nt, Human
gaggcaagcuccacuuuucuu

SEQ ID NO: 1031773 - RNA, 24 nt, Human
gaguaccugggacuacaggcaugc

SEQ ID NO: 1031774 - RNA, 18 nt, Human
gauuacagguaugagcca

SEQ ID NO: 1031775 - RNA, 20 nt, Human
gauuacagguaugagccacc

SEQ ID NO: 1031776 - RNA, 21 nt, Human
gauuacagguaugagccaccg

SEQ ID NO: 1031777 - RNA, 19 nt, Human
gccccaauauuucuuuaag

SEQ ID NO: 1031778 - RNA, 24 nt, Human
gccccaccucggguucaagugauu

SEQ ID NO: 1031779 - RNA, 22 nt, Human
gcccggcuaauuuuuguauuuu

SEQ ID NO: 1031780 - RNA, 19 nt, Human
gccgcgccccuccccgucc

SEQ ID NO: 1031781 - RNA, 19 nt, Human
gcuagagugcaauggcgcg

SEQ ID NO: 1031782 - RNA, 23 nt, Human
gcuggucucaaacuccuaaccuc

SEQ ID NO: 1031783 - RNA, 20 nt, Human
ggaaaacaaaccgacuccua

SEQ ID NO: 1031784 - RNA, 22 nt, Human
ggaggcaagcuccacuuuucuu

SEQ ID NO: 1031785 - RNA, 19 nt, Human
gggcaaacugucuuccuuu

SEQ ID NO: 1031786 - RNA, 19 nt, Human
gggcaugggagggaaaaug

SEQ ID NO: 1031787 - RNA, 22 nt, Human
ggguucaagugauucuccugcc

SEQ ID NO: 1031788 - RNA, 23 nt, Human
ggguucaagugauucuccugccu

SEQ ID NO: 1031789 - RNA, 24 nt, Human
gugauccaacugccucggccuccc

SEQ ID NO: 1031790 - RNA, 24 nt, Human
gugauucuccugccucagccuccu

SEQ ID NO: 1031791 - RNA, 22 nt, Human
uaaaagcccuuaguuuuaaauc

SEQ ID NO: 1031792 - RNA, 20 nt, Human
uaaaccacacagccucugca

SEQ ID NO: 1031793 - RNA, 23 nt, Human
uaaacccugcauacuuccccaaa

SEQ ID NO: 1031794 - RNA, 20 nt, Human
uaacagauuuucuuaaagua

SEQ ID NO: 1031795 - RNA, 23 nt, Human
uaaccucaggugauccaacugcc

SEQ ID NO: 1031796 - RNA, 24 nt, Human
uaaccucaggugauccaacugccu

SEQ ID NO: 1031797 - RNA, 25 nt, Human
uaaccucaggugauccaacugccuc

SEQ ID NO: 1031798 - RNA, 28 nt, Human
uaacuucauuuuccuagaaagggauaau

SEQ ID NO: 1031799 - RNA, 24 nt, Human
uaauuuuuguauuuuuagacgaga

SEQ ID NO: 1031800 - RNA, 23 nt, Human
uacaggcaugcaccaccacgccc

SEQ ID NO: 1031801 - RNA, 24 nt, Human
uacagguaugagccaccgugccca

SEQ ID NO: 1031802 - RNA, 18 nt, Human
uacgacuaauuuggauaa

SEQ ID NO: 1031803 - RNA, 23 nt, Human
uagagugcaauggcgcgaucuug

SEQ ID NO: 1031804 - RNA, 24 nt, Human
uagagugcaauggcgcgaucuugg

SEQ ID NO: 1031805 - RNA, 20 nt, Human
uagcgacagccacaagaaaa

SEQ ID NO: 1031806 - RNA, 23 nt, Human
uaguaauaagguugagguuuuug

SEQ ID NO: 1031807 - RNA, 24 nt, Human
uauuucuuuaagcauuucuuaagc

SEQ ID NO: 1031808 - RNA, 19 nt, Human
ucaagugauucuccugccu

SEQ ID NO: 1031809 - RNA, 19 nt, Human
uccaacugccucggccucc

SEQ ID NO: 1031810 - RNA, 23 nt, Human
ucccaaagugcugggauuacagg

SEQ ID NO: 1031811 - RNA, 18 nt, Human
uccccaaaaauguuuagg

SEQ ID NO: 1031812 - RNA, 18 nt, Human
ucccggagaauaaauccu

SEQ ID NO: 1031813 - RNA, 24 nt, Human
uccugaguaccugggacuacaggc

SEQ ID NO: 1031814 - RNA, 21 nt, Human
ucggcacacagccugcagggg

SEQ ID NO: 1031815 - RNA, 18 nt, Human
ucggccucccaaagugcu

SEQ ID NO: 1031816 - RNA, 19 nt, Human
ucucacucugucaccuagg

SEQ ID NO: 1031817 - RNA, 23 nt, Human
ucucacucugucaccuaggcuag

SEQ ID NO: 1031818 - RNA, 24 nt, Human
ucucacucugucaccuaggcuaga

SEQ ID NO: 1031819 - RNA, 22 nt, Human
ucucccggagaauaaauccuga

SEQ ID NO: 1031820 - RNA, 24 nt, Human
ucuccugccucagccuccugagua

SEQ ID NO: 1031821 - RNA, 24 nt, Human
ucugucaccuaggcuagagugcaa

SEQ ID NO: 1031822 - RNA, 23 nt, Human
ugaaucaguaaaaauuuucccuc

SEQ ID NO: 1031823 - RNA, 21 nt, Human
ugagagaacacugucaaauga

SEQ ID NO: 1031824 - RNA, 23 nt, Human
ugagagaacacugucaaaugaug

SEQ ID NO: 1031825 - RNA, 24 nt, Human
ugccucagccuccugaguaccugg

SEQ ID NO: 1031826 - RNA, 21 nt, Human
ugccucggccucccaaagugc

SEQ ID NO: 1031827 - RNA, 24 nt, Human
ugccucggccucccaaagugcugg

SEQ ID NO: 1031828 - RNA, 24 nt, Human
ugcugggauuacagguaugagcca

SEQ ID NO: 1031829 - RNA, 24 nt, Human
uggccaggcuggucucaaacuccu

SEQ ID NO: 1031830 - RNA, 18 nt, Human
uggccgcgccccuccccg

SEQ ID NO: 1031831 - RNA, 21 nt, Human
uggccgcgccccuccccgucc

SEQ ID NO: 1031832 - RNA, 24 nt, Human
ugggaaaaaaaugacuacaacuua

SEQ ID NO: 1031833 - RNA, 21 nt, Human
ugggacuacaggcaugcacca

SEQ ID NO: 1031834 - RNA, 24 nt, Human
ugggacuacaggcaugcaccacca

SEQ ID NO: 1031835 - RNA, 19 nt, Human
ugggagggaaaaugcucuu

SEQ ID NO: 1031836 - RNA, 18 nt, Human
ugggauuacagguaugag

SEQ ID NO: 1031837 - RNA, 21 nt, Human
ugggauuacagguaugagcca

SEQ ID NO: 1031838 - RNA, 22 nt, Human
ugggauuacagguaugagccac

SEQ ID NO: 1031839 - RNA, 23 nt, Human
ugggauuacagguaugagccacc

SEQ ID NO: 1031840 - RNA, 23 nt, Human
ugggauuacagguaugagccacc

SEQ ID NO: 1031841 - RNA, 24 nt, Human
ugggauuacagguaugagccaccg

SEQ ID NO: 1031842 - RNA, 21 nt, Human
ugucaaaugaugaaugcauuu

SEQ ID NO: 1031843 - RNA, 18 nt, Human
ugugggaaaaaaaugacu

SEQ ID NO: 1031844 - RNA, 19 nt, Human
uguuccgucgaacggguca

SEQ ID NO: 1031845 - RNA, 22 nt, Human
uuaaaaccagaaauaacuucau

SEQ ID NO: 1031846 - RNA, 18 nt, Human
uuacugcaaccuccgccu

SEQ ID NO: 1031847 - RNA, 19 nt, Human
uuacugcaaccuccgccug

SEQ ID NO: 1031848 - RNA, 20 nt, Human
uuacugcaaccuccgccugc

SEQ ID NO: 1031849 - RNA, 21 nt, Human
uucaagugauucuccugccuc

SEQ ID NO: 1031850 - RNA, 23 nt, Human
uucaagugauucuccugccucag

SEQ ID NO: 1031851 - RNA, 24 nt, Human
uucaagugauucuccugccucagc

SEQ ID NO: 1031852 - RNA, 23 nt, Human
uuccuaacgcuccgcaguggccg

SEQ ID NO: 1031853 - RNA, 22 nt, Human
uuccuugcucgauuucugugcc

SEQ ID NO: 1031854 - RNA, 24 nt, Human
uugaacuggaggcaagcuccacuu

SEQ ID NO: 1031855 - RNA, 23 nt, Human
uugcacaugaaauguuuuaugug

SEQ ID NO: 1031856 - RNA, 22 nt, Human
uuucacccuguuggccaggcug

SEQ ID NO: 1031857 - RNA, 23 nt, Human
uuucacccuguuggccaggcugu

SEQ ID NO: 1031858 - RNA, 20 nt, Human
uuuuuguauuuuuagacgag

SEQ ID NO: 1031859 - RNA, 23 nt, Human
aaagugcugagauuauaggugug

SEQ ID NO: 1031860 - RNA, 21 nt, Human
aaauggcuccagcuugagaau

SEQ ID NO: 1031861 - RNA, 24 nt, Human
aaccaaauacccacuuauuugcug

SEQ ID NO: 1031862 - RNA, 23 nt, Human
aaccaaccagaaaacaccuaagu

SEQ ID NO: 1031863 - RNA, 20 nt, Human
aagauuauccaaaccugaaa

SEQ ID NO: 1031864 - RNA, 18 nt, Human
aagcagggcgccacaacc

SEQ ID NO: 1031865 - RNA, 20 nt, Human
aagcuggagagccccggcgg

SEQ ID NO: 1031866 - RNA, 23 nt, Human
aagugcugagauuauaggugugu

SEQ ID NO: 1031867 - RNA, 25 nt, Human
aauacccacuuauuugcugaguggc

SEQ ID NO: 1031868 - RNA, 24 nt, Human
acucugucgcccaggcuggagugc

SEQ ID NO: 1031869 - RNA, 20 nt, Human
acugcaagcuccgccucccg

SEQ ID NO: 1031870 - RNA, 22 nt, Human
agagagggacugaaugaggagc

SEQ ID NO: 1031871 - RNA, 20 nt, Human
agagcaaaugagggaagugg

SEQ ID NO: 1031872 - RNA, 19 nt, Human
agauuauaggugugugcca

SEQ ID NO: 1031873 - RNA, 22 nt, Human
agccacugccaguaagagggca

SEQ ID NO: 1031874 - RNA, 21 nt, Human
aggaauaccuuauaccaaguc

SEQ ID NO: 1031875 - RNA, 25 nt, Human
aggcuggagugcaguggugcgaucu

SEQ ID NO: 1031876 - RNA, 18 nt, Human
aguaacugggauuacagg

SEQ ID NO: 1031877 - RNA, 22 nt, Human
aguaguaggaucagaaaaggga

SEQ ID NO: 1031878 - RNA, 22 nt, Human
agugacauacacaaacgucuca

SEQ ID NO: 1031879 - RNA, 21 nt, Human
agugcaguggugcgaucucag

SEQ ID NO: 1031880 - RNA, 23 nt, Human
agugcaguggugcgaucucagcu

SEQ ID NO: 1031881 - RNA, 24 nt, Human
agugcaguggugcgaucucagcuc

SEQ ID NO: 1031882 - RNA, 24 nt, Human
aguggugcgaucucagcucacugc

SEQ ID NO: 1031883 - RNA, 21 nt, Human
auaauuuuucacaacaagaua

SEQ ID NO: 1031884 - RNA, 19 nt, Human
aucuggggcaagauuaucc

SEQ ID NO: 1031885 - RNA, 20 nt, Human
augagguuucacuguguuag

SEQ ID NO: 1031886 - RNA, 20 nt, Human
auguccuguugccaaaaaaa

SEQ ID NO: 1031887 - RNA, 19 nt, Human
caaaccugaaaucaaggcc

SEQ ID NO: 1031888 - RNA, 24 nt, Human
caaagugcugagauuauaggugug

SEQ ID NO: 1031889 - RNA, 22 nt, Human
cacacaagccugcugccgcagu

SEQ ID NO: 1031890 - RNA, 22 nt, Human
cacccaccucggccucccaaag

SEQ ID NO: 1031891 - RNA, 23 nt, Human
cacccaccucggccucccaaagu

SEQ ID NO: 1031892 - RNA, 24 nt, Human
caccucggccucccaaagugcuga

SEQ ID NO: 1031893 - RNA, 22 nt, Human
cacgccauucuccugccucagc

SEQ ID NO: 1031894 - RNA, 18 nt, Human
cacuguguuagccaggau

SEQ ID NO: 1031895 - RNA, 19 nt, Human
cacuguguuagccaggaug

SEQ ID NO: 1031896 - RNA, 24 nt, Human
cacuguguuagccaggauggucuc

SEQ ID NO: 1031897 - RNA, 20 nt, Human
cagccuccugaguaacuggg

SEQ ID NO: 1031898 - RNA, 24 nt, Human
cagcuugagaaucggggucacugc

SEQ ID NO: 1031899 - RNA, 21 nt, Human
caggaauaccuuauaccaagu

SEQ ID NO: 1031900 - RNA, 21 nt, Human
cagggcgccacaaccacagag

SEQ ID NO: 1031901 - RNA, 21 nt, Human
ccaaagugcugagauuauagg

SEQ ID NO: 1031902 - RNA, 21 nt, Human
ccaaagugcugagauuauagg

SEQ ID NO: 1031903 - RNA, 24 nt, Human
ccaaagugcugagauuauaggugu

SEQ ID NO: 1031904 - RNA, 20 nt, Human
ccaaccagaaaacaccuaag

SEQ ID NO: 1031905 - RNA, 20 nt, Human
cccagaugugucuccuggcu

SEQ ID NO: 1031906 - RNA, 26 nt, Human
ccccacugccucugccgcccuucuca

SEQ ID NO: 1031907 - RNA, 24 nt, Human
ccucccggguucacgccauucucc

SEQ ID NO: 1031908 - RNA, 22 nt, Human
ccugaccucgugauccacccac

SEQ ID NO: 1031909 - RNA, 19 nt, Human
ccugaguaacugggauuac

SEQ ID NO: 1031910 - RNA, 23 nt, Human
ccugaguaacugggauuacaggc

SEQ ID NO: 1031911 - RNA, 24 nt, Human
ccugaguaacugggauuacaggca

SEQ ID NO: 1031912 - RNA, 19 nt, Human
ccuugcccagcucuguuuu

SEQ ID NO: 1031913 - RNA, 20 nt, Human
ccuugggaucucuccaguga

SEQ ID NO: 1031914 - RNA, 24 nt, Human
cgcccaggcuggagugcaguggug

SEQ ID NO: 1031915 - RNA, 19 nt, Human
cgccucccggguucacgcc

SEQ ID NO: 1031916 - RNA, 21 nt, Human
cucccggguucacgccauucu

SEQ ID NO: 1031917 - RNA, 19 nt, Human
cucccucuguucaguccgc

SEQ ID NO: 1031918 - RNA, 18 nt, Human
cuccugaccucgugaucc

SEQ ID NO: 1031919 - RNA, 23 nt, Human
cugaguaacugggauuacaggca

SEQ ID NO: 1031920 - RNA, 23 nt, Human
cugccucagccuccugaguaacu

SEQ ID NO: 1031921 - RNA, 18 nt, Human
cugccucugccgcccuuc

SEQ ID NO: 1031922 - RNA, 20 nt, Human
cuucauaaaaccaaauaccc

SEQ ID NO: 1031923 - RNA, 26 nt, Human
cuugaaccauggucuagcaaagcccu

SEQ ID NO: 1031924 - RNA, 24 nt, Human
cuugagauggacauucacauucuc

SEQ ID NO: 1031925 - RNA, 20 nt, Human
cuuugcaggacuuggggguu

SEQ ID NO: 1031926 - RNA, 22 nt, Human
gaccucgugauccacccaccuc

SEQ ID NO: 1031927 - RNA, 22 nt, Human
gaccucgugauccacccaccuc

SEQ ID NO: 1031928 - RNA, 24 nt, Human
gaccucgugauccacccaccucgg

SEQ ID NO: 1031929 - RNA, 24 nt, Human
gaccucgugauccacccaccucgg

SEQ ID NO: 1031930 - RNA, 24 nt, Human
gagggaaguggggccgagacacaa

SEQ ID NO: 1031931 - RNA, 18 nt, Human
gagguuucacuguguuag

SEQ ID NO: 1031932 - RNA, 25 nt, Human
gaguaacugggauuacaggcacccg

SEQ ID NO: 1031933 - RNA, 20 nt, Human
gagugcugucuacauuucag

SEQ ID NO: 1031934 - RNA, 22 nt, Human
gccacaaccacagagcaaauga

SEQ ID NO: 1031935 - RNA, 20 nt, Human
gcccaggcuggagugcagug

SEQ ID NO: 1031936 - RNA, 23 nt, Human
gcccaggcuggagugcaguggug

SEQ ID NO: 1031937 - RNA, 23 nt, Human
gcccggcuaauuuuuuguauuuu

SEQ ID NO: 1031938 - RNA, 21 nt, Human
gcucuggaaagggagaggcca

SEQ ID NO: 1031939 - RNA, 25 nt, Human
ggagcucccucuguucaguccgccc

SEQ ID NO: 1031940 - RNA, 24 nt, Human
ggauggucucgaucuccugaccuc

SEQ ID NO: 1031941 - RNA, 23 nt, Human
ggcaagauuauccaaaccugaaa

SEQ ID NO: 1031942 - RNA, 19 nt, Human
ggcucuggaaagggagagg

SEQ ID NO: 1031943 - RNA, 24 nt, Human
gugauccacccaccucggccuccc

SEQ ID NO: 1031944 - RNA, 27 nt, Human
uaauccaaaccagaauauuuagaucaa

SEQ ID NO: 1031945 - RNA, 24 nt, Human
uaauuuuuuguauuuuuaguagag

SEQ ID NO: 1031946 - RNA, 23 nt, Human
uacaggcacccgcuaccacgccc

SEQ ID NO: 1031947 - RNA, 18 nt, Human
uaccugcucagcccucag

SEQ ID NO: 1031948 - RNA, 24 nt, Human
uacucugucgcccaggcuggagug

SEQ ID NO: 1031949 - RNA, 26 nt, Human
uaggaucagaaaagggagcaaccaac

SEQ ID NO: 1031950 - RNA, 24 nt, Human
uagggauauguugagcagaggcca

SEQ ID NO: 1031951 - RNA, 20 nt, Human
uaguagagaugagguuucac

SEQ ID NO: 1031952 - RNA, 24 nt, Human
uaguagagaugagguuucacugug

SEQ ID NO: 1031953 - RNA, 23 nt, Human
ucaaagcagggcgccacaaccac

SEQ ID NO: 1031954 - RNA, 18 nt, Human
ucacugcaagcuccgccu

SEQ ID NO: 1031955 - RNA, 19 nt, Human
ucacugcaagcuccgccuc

SEQ ID NO: 1031956 - RNA, 24 nt, Human
ucacugcaagcuccgccucccggg

SEQ ID NO: 1031957 - RNA, 24 nt, Human
ucacuguguuagccaggauggucu

SEQ ID NO: 1031958 - RNA, 21 nt, Human
ucagaacaggagcccucuuuc

SEQ ID NO: 1031959 - RNA, 19 nt, Human
ucagcucacugcaagcucc

SEQ ID NO: 1031960 - RNA, 20 nt, Human
uccaaaccugaaaucaaggc

SEQ ID NO: 1031961 - RNA, 25 nt, Human
uccaaaccugaaaucaaggccucag

SEQ ID NO: 1031962 - RNA, 23 nt, Human
ucccaaagugcugagauuauagg

SEQ ID NO: 1031963 - RNA, 21 nt, Human
ucccggguucacgccauucuc

SEQ ID NO: 1031964 - RNA, 24 nt, Human
ucccggguucacgccauucuccug

SEQ ID NO: 1031965 - RNA, 22 nt, Human
uccuagcugagacuugcagagc

SEQ ID NO: 1031966 - RNA, 24 nt, Human
uccugaguaacugggauuacaggc

SEQ ID NO: 1031967 - RNA, 24 nt, Human
ucgcccaggcuggagugcaguggu

SEQ ID NO: 1031968 - RNA, 18 nt, Human
ucggccucccaaagugcu

SEQ ID NO: 1031969 - RNA, 20 nt, Human
ucucaggagauaaacaguuc

SEQ ID NO: 1031970 - RNA, 18 nt, Human
ucucaucccucuagccac

SEQ ID NO: 1031971 - RNA, 26 nt, Human
ucuccugaccucgugauccacccacc

SEQ ID NO: 1031972 - RNA, 24 nt, Human
ucuccugccucagccuccugagua

SEQ ID NO: 1031973 - RNA, 24 nt, Human
ucugucgcccaggcuggagugcag

SEQ ID NO: 1031974 - RNA, 23 nt, Human
ucuuacucugucgcccaggcugg

SEQ ID NO: 1031975 - RNA, 24 nt, Human
ucuuacucugucgcccaggcugga

SEQ ID NO: 1031976 - RNA, 21 nt, Human
ugaaauggugccagagggagc

SEQ ID NO: 1031977 - RNA, 21 nt, Human
ugacuuagagaaaguccauau

SEQ ID NO: 1031978 - RNA, 23 nt, Human
ugacuuagagaaaguccauaucu

SEQ ID NO: 1031979 - RNA, 21 nt, Human
ugagauuauaggugugugcca

SEQ ID NO: 1031980 - RNA, 22 nt, Human
ugagauuauaggugugugccac

SEQ ID NO: 1031981 - RNA, 23 nt, Human
ugagauuauaggugugugccacc

SEQ ID NO: 1031982 - RNA, 24 nt, Human
ugagauuauaggugugugccaccg

SEQ ID NO: 1031983 - RNA, 18 nt, Human
ugagggaaguggggccga

SEQ ID NO: 1031984 - RNA, 24 nt, Human
ugagggaaguggggccgagacaca

SEQ ID NO: 1031985 - RNA, 20 nt, Human
ugaggucagaacaggagccc

SEQ ID NO: 1031986 - RNA, 24 nt, Human
ugagguuucacuguguuagccagg

SEQ ID NO: 1031987 - RNA, 24 nt, Human
ugauccacccaccucggccuccca

SEQ ID NO: 1031988 - RNA, 22 nt, Human
ugccaaaaaaauuuuaauugcc

SEQ ID NO: 1031989 - RNA, 24 nt, Human
ugccagagcauucggucaaagcag

SEQ ID NO: 1031990 - RNA, 24 nt, Human
ugccucagccuccugaguaacugg

SEQ ID NO: 1031991 - RNA, 19 nt, Human
ugccuuuacagggauggcc

SEQ ID NO: 1031992 - RNA, 19 nt, Human
ugcugaguggccagaucuc

SEQ ID NO: 1031993 - RNA, 22 nt, Human
uggaaacauauguccuguugcc

SEQ ID NO: 1031994 - RNA, 23 nt, Human
uggagugcaguggugcgaucuca

SEQ ID NO: 1031995 - RNA, 24 nt, Human
uggagugcaguggugcgaucucag

SEQ ID NO: 1031996 - RNA, 22 nt, Human
uggccagaucuaagaggaagcu

SEQ ID NO: 1031997 - RNA, 20 nt, Human
uggcucuggaaagggagagg

SEQ ID NO: 1031998 - RNA, 20 nt, Human
ugggaucucuccagugaggc

SEQ ID NO: 1031999 - RNA, 19 nt, Human
ugggauuacaggcacccgc

SEQ ID NO: 1032000 - RNA, 22 nt, Human
ugggauuacaggcacccgcuac

SEQ ID NO: 1032001 - RNA, 24 nt, Human
ugggauuacaggcacccgcuacca

SEQ ID NO: 1032002 - RNA, 24 nt, Human
uggugcgaucucagcucacugcaa

SEQ ID NO: 1032003 - RNA, 20 nt, Human
ugugugccaccgcucccagc

SEQ ID NO: 1032004 - RNA, 19 nt, Human
uuacaggcacccgcuacca

SEQ ID NO: 1032005 - RNA, 24 nt, Human
uuacucugucgcccaggcuggagu

SEQ ID NO: 1032006 - RNA, 18 nt, Human
uuaguagagaugagguuu

SEQ ID NO: 1032007 - RNA, 21 nt, Human
uuaguagagaugagguuucac

SEQ ID NO: 1032008 - RNA, 21 nt, Human
uuaguagagaugagguuucac

SEQ ID NO: 1032009 - RNA, 24 nt, Human
uuaguagagaugagguuucacugu

SEQ ID NO: 1032010 - RNA, 21 nt, Human
uucacuguguuagccaggaug

SEQ ID NO: 1032011 - RNA, 20 nt, Human
uugcaggacuuggggguucu

SEQ ID NO: 1032012 - RNA, 22 nt, Human
uuggugcuuuuguuuccucugg

SEQ ID NO: 1032013 - RNA, 19 nt, Human
uuucacuguguuagccagg

SEQ ID NO: 1032014 - RNA, 22 nt, Human
uuugaucuagaagaacaagauc

SEQ ID NO: 1032015 - RNA, 22 nt, Human
uuuuccugacuuagagaaaguc

SEQ ID NO: 1032016 - RNA, 24 nt, Human
uuuuuaguagagaugagguuucac

SEQ ID NO: 1032017 - RNA, 21 nt, Human
uuuuuguauuuuuaguagaga

SEQ ID NO: 1032018 - RNA, 24 nt, Human
uuuuuuguauuuuuaguagagaug

SEQ ID NO: 1032019 - RNA, 20 nt, Human
agcuguuucuggccuugucc

SEQ ID NO: 1032020 - RNA, 18 nt, Human
aggcuggccucagaggac

SEQ ID NO: 1032021 - RNA, 19 nt, Human
caguguccauaugaagcug

SEQ ID NO: 1032022 - RNA, 25 nt, Human
ccucucgggccaguccaggccggcc

SEQ ID NO: 1032023 - RNA, 21 nt, Human
cugggaaccgggaucccucuc

SEQ ID NO: 1032024 - RNA, 19 nt, Human
gaagcuguuucuggccuug

SEQ ID NO: 1032025 - RNA, 20 nt, Human
gccucagaggacacccaggc

SEQ ID NO: 1032026 - RNA, 19 nt, Human
gcuguuucuggccuugucc

SEQ ID NO: 1032027 - RNA, 21 nt, Human
ggccucagaggacacccaggc

SEQ ID NO: 1032028 - RNA, 20 nt, Human
gcaaauuuggaggcaacagg

SEQ ID NO: 1032029 - RNA, 18 nt, Human
uuuuuuuuuuuuuuuuug

SEQ ID NO: 1032030 - RNA, 18 nt, Human
cccagugcugggcuccuc

SEQ ID NO: 1032031 - RNA, 22 nt, Human
cggaaucccagugcugggcucc

SEQ ID NO: 1032032 - RNA, 21 nt, Human
ucuguguucagugcagaucac

SEQ ID NO: 1032033 - RNA, 23 nt, Human
uggaaacaccucggaaucccagu

SEQ ID NO: 1032034 - RNA, 19 nt, Human
aaacagacaaacccugaac

SEQ ID NO: 1032035 - RNA, 20 nt, Human
aaacagacaaacccugaacg

SEQ ID NO: 1032036 - RNA, 24 nt, Human
aaagugcugggauuacaggcguga

SEQ ID NO: 1032037 - RNA, 19 nt, Human
aagugcugggauuacaggc

SEQ ID NO: 1032038 - RNA, 19 nt, Human
aagugcugggauuacaggc

SEQ ID NO: 1032039 - RNA, 26 nt, Human
aagugcugggauuacaggcgugagcc

SEQ ID NO: 1032040 - RNA, 21 nt, Human
acaguggcgcgaucuuggcuc

SEQ ID NO: 1032041 - RNA, 21 nt, Human
acgcgguggucgccaggggca

SEQ ID NO: 1032042 - RNA, 18 nt, Human
acgggguuucaccauguu

SEQ ID NO: 1032043 - RNA, 19 nt, Human
acgggguuucaccauguua

SEQ ID NO: 1032044 - RNA, 20 nt, Human
acgggguuucaccauguuag

SEQ ID NO: 1032045 - RNA, 24 nt, Human
acgggguuucaccauguuagccag

SEQ ID NO: 1032046 - RNA, 18 nt, Human
acugcaagcuccgccucc

SEQ ID NO: 1032047 - RNA, 21 nt, Human
agaagccccccaccucggcgg

SEQ ID NO: 1032048 - RNA, 23 nt, Human
agagccggggucagugucaacau

SEQ ID NO: 1032049 - RNA, 24 nt, Human
aggaggggcaggggcacaaccuag

SEQ ID NO: 1032050 - RNA, 22 nt, Human
aggauggagacagcggcucugg

SEQ ID NO: 1032051 - RNA, 20 nt, Human
aguacaguggcgcgaucuug

SEQ ID NO: 1032052 - RNA, 24 nt, Human
aguacaguggcgcgaucuuggcuc

SEQ ID NO: 1032053 - RNA, 18 nt, Human
agugcugggauuacaggc

SEQ ID NO: 1032054 - RNA, 22 nt, Human
aucaaacagacaaacccugaac

SEQ ID NO: 1032055 - RNA, 19 nt, Human
auggagacagcggcucugg

SEQ ID NO: 1032056 - RNA, 24 nt, Human
caaagugcugggauuacaggcgug

SEQ ID NO: 1032057 - RNA, 19 nt, Human
caaccuagcagcuccaacc

SEQ ID NO: 1032058 - RNA, 19 nt, Human
caagcuccaucuccuuccu

SEQ ID NO: 1032059 - RNA, 20 nt, Human
caagcuccaucuccuuccuc

SEQ ID NO: 1032060 - RNA, 18 nt, Human
caccauguuagccaggau

SEQ ID NO: 1032061 - RNA, 22 nt, Human
caccauguuagccaggaugguc

SEQ ID NO: 1032062 - RNA, 24 nt, Human
caccauguuagccaggauggucuc

SEQ ID NO: 1032063 - RNA, 22 nt, Human
cacgccauucuccugccucagc

SEQ ID NO: 1032064 - RNA, 23 nt, Human
cagcagggcacggggcagggcuc

SEQ ID NO: 1032065 - RNA, 23 nt, Human
caggggcccaccaccacaccugc

SEQ ID NO: 1032066 - RNA, 19 nt, Human
caguggcgcgaucuuggcu

SEQ ID NO: 1032067 - RNA, 19 nt, Human
cagugggggcucccgcaag

SEQ ID NO: 1032068 - RNA, 21 nt, Human
cauccaaauucacuaccagac

SEQ ID NO: 1032069 - RNA, 22 nt, Human
ccaaagugcugggauuacaggc

SEQ ID NO: 1032070 - RNA, 22 nt, Human
ccaaagugcugggauuacaggc

SEQ ID NO: 1032071 - RNA, 24 nt, Human
ccaaagugcugggauuacaggcgu

SEQ ID NO: 1032072 - RNA, 23 nt, Human
ccccaugcugcugccacuucccu

SEQ ID NO: 1032073 - RNA, 19 nt, Human
cccugccccaugcugcugc

SEQ ID NO: 1032074 - RNA, 20 nt, Human
ccgcaagcuccaucuccuuc

SEQ ID NO: 1032075 - RNA, 24 nt, Human
ccucccggguucacgccauucucc

SEQ ID NO: 1032076 - RNA, 23 nt, Human
ccucgcucuguugcccaggcugg

SEQ ID NO: 1032077 - RNA, 24 nt, Human
ccucgcucuguugcccaggcugga

SEQ ID NO: 1032078 - RNA, 25 nt, Human
ccucgcucuguugcccaggcuggag

SEQ ID NO: 1032079 - RNA, 26 nt, Human
ccucgcucuguugcccaggcuggagu

SEQ ID NO: 1032080 - RNA, 22 nt, Human
ccugaguugggggggcugggac

SEQ ID NO: 1032081 - RNA, 19 nt, Human
cgccucccggguucacgcc

SEQ ID NO: 1032082 - RNA, 22 nt, Human
cgcucuguugcccaggcuggag

SEQ ID NO: 1032083 - RNA, 19 nt, Human
cggcgccccgccaagaaag

SEQ ID NO: 1032084 - RNA, 24 nt, Human
cgggguuucaccauguuagccagg

SEQ ID NO: 1032085 - RNA, 24 nt, Human
cucagccucccgaguagcugggac

SEQ ID NO: 1032086 - RNA, 22 nt, Human
cucaugaucuaccugccucgcc

SEQ ID NO: 1032087 - RNA, 24 nt, Human
cuccaggggcccaccaccacaccu

SEQ ID NO: 1032088 - RNA, 21 nt, Human
cucccggguucacgccauucu

SEQ ID NO: 1032089 - RNA, 24 nt, Human
cuccugaccucaugaucuaccugc

SEQ ID NO: 1032090 - RNA, 24 nt, Human
cucgcucuguugcccaggcuggag

SEQ ID NO: 1032091 - RNA, 23 nt, Human
cucuguugcccaggcuggaguac

SEQ ID NO: 1032092 - RNA, 23 nt, Human
cugccucagccucccgaguagcu

SEQ ID NO: 1032093 - RNA, 23 nt, Human
cugccucgccucccaaagugcug

SEQ ID NO: 1032094 - RNA, 18 nt, Human
gacccuuccuuucgugug

SEQ ID NO: 1032095 - RNA, 22 nt, Human
gaccucaugaucuaccugccuc

SEQ ID NO: 1032096 - RNA, 20 nt, Human
gacuuugucaguuggugugu

SEQ ID NO: 1032097 - RNA, 21 nt, Human
gagacggagccucgcucuguu

SEQ ID NO: 1032098 - RNA, 24 nt, Human
gagacgggguuucaccauguuagc

SEQ ID NO: 1032099 - RNA, 23 nt, Human
gaguagcugggacuccaggggcc

SEQ ID NO: 1032100 - RNA, 18 nt, Human
gauuacaggcgugagcca

SEQ ID NO: 1032101 - RNA, 22 nt, Human
gauuacaggcgugagccacggc

SEQ ID NO: 1032102 - RNA, 19 nt, Human
gcccaggcuggaguacagu

SEQ ID NO: 1032103 - RNA, 20 nt, Human
gccucagccucccgaguagc

SEQ ID NO: 1032104 - RNA, 19 nt, Human
gcuggaguacaguggcgcg

SEQ ID NO: 1032105 - RNA, 18 nt, Human
gggaaaggagagaaaaug

SEQ ID NO: 1032106 - RNA, 21 nt, Human
gggcagcgagagggccugagu

SEQ ID NO: 1032107 - RNA, 23 nt, Human
gggguuucaccauguuagccagg

SEQ ID NO: 1032108 - RNA, 20 nt, Human
ggucucgaucuccugaccuc

SEQ ID NO: 1032109 - RNA, 24 nt, Human
gguuucaccauguuagccaggaug

SEQ ID NO: 1032110 - RNA, 23 nt, Human
guagagacgggguuucaccaugu

SEQ ID NO: 1032111 - RNA, 25 nt, Human
gucggaguggcagugggggcucccg

SEQ ID NO: 1032112 - RNA, 20 nt, Human
uaauagagccggggucagug

SEQ ID NO: 1032113 - RNA, 22 nt, Human
uacaaggaaaaacugaaauaau

SEQ ID NO: 1032114 - RNA, 23 nt, Human
uacaaggaaaaacugaaauaaua

SEQ ID NO: 1032115 - RNA, 24 nt, Human
uacaggcgugagccacggcgcccc

SEQ ID NO: 1032116 - RNA, 19 nt, Human
uacaguggcgcgaucuugg

SEQ ID NO: 1032117 - RNA, 22 nt, Human
uaccugccucgccucccaaagu

SEQ ID NO: 1032118 - RNA, 22 nt, Human
uagagacgggguuucaccaugu

SEQ ID NO: 1032119 - RNA, 22 nt, Human
uagcagcuccaaccuaugaaag

SEQ ID NO: 1032120 - RNA, 24 nt, Human
uaguagagacgggguuucaccaug

SEQ ID NO: 1032121 - RNA, 25 nt, Human
uaguagagacgggguuucaccaugu

SEQ ID NO: 1032122 - RNA, 19 nt, Human
ucaaacagacaaacccuga

SEQ ID NO: 1032123 - RNA, 21 nt, Human
ucaaacagacaaacccugaac

SEQ ID NO: 1032124 - RNA, 23 nt, Human
ucaaacagacaaacccugaacgc

SEQ ID NO: 1032125 - RNA, 24 nt, Human
ucaccauguuagccaggauggucu

SEQ ID NO: 1032126 - RNA, 18 nt, Human
ucacugcaagcuccgccu

SEQ ID NO: 1032127 - RNA, 19 nt, Human
ucacugcaagcuccgccuc

SEQ ID NO: 1032128 - RNA, 24 nt, Human
ucacugcaagcuccgccucccggg

SEQ ID NO: 1032129 - RNA, 23 nt, Human
ucagccucccgaguagcugggac

SEQ ID NO: 1032130 - RNA, 19 nt, Human
uccaaauucacuaccagac

SEQ ID NO: 1032131 - RNA, 24 nt, Human
ucccaaagugcugggauuacaggc

SEQ ID NO: 1032132 - RNA, 23 nt, Human
uccccgagcugaagucgcucggc

SEQ ID NO: 1032133 - RNA, 23 nt, Human
ucccgaguagcugggacuccagg

SEQ ID NO: 1032134 - RNA, 25 nt, Human
ucccgaguagcugggacuccagggg

SEQ ID NO: 1032135 - RNA, 21 nt, Human
ucccggguucacgccauucuc

SEQ ID NO: 1032136 - RNA, 24 nt, Human
ucccggguucacgccauucuccug

SEQ ID NO: 1032137 - RNA, 20 nt, Human
ucccuggucucugcuggcuu

SEQ ID NO: 1032138 - RNA, 19 nt, Human
ucccuguccugcuggggag

SEQ ID NO: 1032139 - RNA, 22 nt, Human
uccuccauccaaauucacuacc

SEQ ID NO: 1032140 - RNA, 26 nt, Human
uccuccauccaaauucacuaccagac

SEQ ID NO: 1032141 - RNA, 24 nt, Human
ucgcucuguugcccaggcuggagu

SEQ ID NO: 1032142 - RNA, 24 nt, Human
ucuccugccucagccucccgagua

SEQ ID NO: 1032143 - RNA, 24 nt, Human
ucucugcuggcuucccugccaccu

SEQ ID NO: 1032144 - RNA, 18 nt, Human
ucuguugcccaggcugga

SEQ ID NO: 1032145 - RNA, 21 nt, Human
ugcccaggcuggaguacagug

SEQ ID NO: 1032146 - RNA, 21 nt, Human
ugcccaggcuggaguacagug

SEQ ID NO: 1032147 - RNA, 24 nt, Human
ugcccaggcuggaguacaguggcg

SEQ ID NO: 1032148 - RNA, 24 nt, Human
ugccucagccucccgaguagcugg

SEQ ID NO: 1032149 - RNA, 23 nt, Human
ugccucgccucccaaagugcugg

SEQ ID NO: 1032150 - RNA, 24 nt, Human
ugcugggauuacaggcgugagcca

SEQ ID NO: 1032151 - RNA, 24 nt, Human
uggaguacaguggcgcgaucuugg

SEQ ID NO: 1032152 - RNA, 18 nt, Human
uggcucacugcaagcucc

SEQ ID NO: 1032153 - RNA, 18 nt, Human
ugggauuacaggcgugag

SEQ ID NO: 1032154 - RNA, 19 nt, Human
ugggauuacaggcgugagc

SEQ ID NO: 1032155 - RNA, 21 nt, Human
ugggauuacaggcgugagcca

SEQ ID NO: 1032156 - RNA, 22 nt, Human
ugggauuacaggcgugagccac

SEQ ID NO: 1032157 - RNA, 22 nt, Human
ugggauuacaggcgugagccac

SEQ ID NO: 1032158 - RNA, 23 nt, Human
ugggauuacaggcgugagccacg

SEQ ID NO: 1032159 - RNA, 24 nt, Human
ugggauuacaggcgugagccacgg

SEQ ID NO: 1032160 - RNA, 24 nt, Human
ugggauuacaggcgugagccacgg

SEQ ID NO: 1032161 - RNA, 25 nt, Human
ugggauuacaggcgugagccacggc

SEQ ID NO: 1032162 - RNA, 21 nt, Human
uggggaagggcgcacgcggug

SEQ ID NO: 1032163 - RNA, 21 nt, Human
ugucaguuggugugucaaagc

SEQ ID NO: 1032164 - RNA, 19 nt, Human
uguuacuauauuuuuaaga

SEQ ID NO: 1032165 - RNA, 18 nt, Human
uuacuagacaguccucca

SEQ ID NO: 1032166 - RNA, 18 nt, Human
uuaguagagacgggguuu

SEQ ID NO: 1032167 - RNA, 22 nt, Human
uuaguagagacgggguuucacc

SEQ ID NO: 1032168 - RNA, 24 nt, Human
uuaguagagacgggguuucaccau

SEQ ID NO: 1032169 - RNA, 24 nt, Human
uugcccaggcuggaguacaguggc

SEQ ID NO: 1032170 - RNA, 19 nt, Human
uuucaccauguuagccagg

SEQ ID NO: 1032171 - RNA, 20 nt, Human
uuucaccauguuagccagga

SEQ ID NO: 1032172 - RNA, 24 nt, Human
uuuuuaguagagacgggguuucac

SEQ ID NO: 1032173 - RNA, 23 nt, Human
uuuuuuaguagagacgggguuuc

SEQ ID NO: 1032174 - RNA, 27 nt, Human
uuuuuuguauuuuuuuuaguagagacg

SEQ ID NO: 1032175 - RNA, 21 nt, Human
aaacaagugaacaaaggucuc

SEQ ID NO: 1032176 - RNA, 22 nt, Human
aaaccccgucuccaccaaaaaa

SEQ ID NO: 1032177 - RNA, 19 nt, Human
aaagguggacuguuuagua

SEQ ID NO: 1032178 - RNA, 19 nt, Human
aaagucucccacgucuacc

SEQ ID NO: 1032179 - RNA, 19 nt, Human
aacacagcgaaaccccguc

SEQ ID NO: 1032180 - RNA, 20 nt, Human
aacacagcgaaaccccgucu

SEQ ID NO: 1032181 - RNA, 21 nt, Human
aacacagcgaaaccccgucuc

SEQ ID NO: 1032182 - RNA, 22 nt, Human
aagaggaacagauuuucaagaa

SEQ ID NO: 1032183 - RNA, 21 nt, Human
acacagcgaaaccccgucucc

SEQ ID NO: 1032184 - RNA, 20 nt, Human
acacagcggggcauggccag

SEQ ID NO: 1032185 - RNA, 18 nt, Human
acaggacaauaggggagg

SEQ ID NO: 1032186 - RNA, 24 nt, Human
acauguuaaggagaggcaaacauu

SEQ ID NO: 1032187 - RNA, 18 nt, Human
accaaaaaaaauacgaaa

SEQ ID NO: 1032188 - RNA, 19 nt, Human
accagggguauaacucagg

SEQ ID NO: 1032189 - RNA, 19 nt, Human
acccccccaccucccuccc

SEQ ID NO: 1032190 - RNA, 20 nt, Human
accuugguacccagacacca

SEQ ID NO: 1032191 - RNA, 24 nt, Human
acgccacugcacuccagccuggac

SEQ ID NO: 1032192 - RNA, 25 nt, Human
acgccacugcacuccagccuggacu

SEQ ID NO: 1032193 - RNA, 28 nt, Human
acuuccauccccagcuugcaaucuccau

SEQ ID NO: 1032194 - RNA, 21 nt, Human
agaaagggacacagcggggca

SEQ ID NO: 1032195 - RNA, 19 nt, Human
agacugacccaccaugaca

SEQ ID NO: 1032196 - RNA, 18 nt, Human
agagaaagggacacagcg

SEQ ID NO: 1032197 - RNA, 20 nt, Human
agagacgcuccucacuuucc

SEQ ID NO: 1032198 - RNA, 18 nt, Human
aggaacauagaaaagugg

SEQ ID NO: 1032199 - RNA, 21 nt, Human
aggagaggccaaaacaccaug

SEQ ID NO: 1032200 - RNA, 21 nt, Human
aggcagaaagaggggacaggg

SEQ ID NO: 1032201 - RNA, 18 nt, Human
aggccaaaacaccaugac

SEQ ID NO: 1032202 - RNA, 22 nt, Human
aggccaaggcggguugcuggga

SEQ ID NO: 1032203 - RNA, 21 nt, Human
aggccgaggcuggcggaucac

SEQ ID NO: 1032204 - RNA, 19 nt, Human
agggagguugcagugagcc

SEQ ID NO: 1032205 - RNA, 22 nt, Human
agggagguugcagugagccgag

SEQ ID NO: 1032206 - RNA, 21 nt, Human
agggggaggagggaagaggga

SEQ ID NO: 1032207 - RNA, 18 nt, Human
agggggagggggaggagg

SEQ ID NO: 1032208 - RNA, 19 nt, Human
aggucacagaucaacagga

SEQ ID NO: 1032209 - RNA, 21 nt, Human
agguggagguuguagcgagcc

SEQ ID NO: 1032210 - RNA, 24 nt, Human
agguggagguuguagcgagccgag

SEQ ID NO: 1032211 - RNA, 23 nt, Human
agucaggcguggcggcacgcgcc

SEQ ID NO: 1032212 - RNA, 20 nt, Human
auagaaaaguggcaaggcua

SEQ ID NO: 1032213 - RNA, 24 nt, Human
aucacgccacugcacuccagccug

SEQ ID NO: 1032214 - RNA, 22 nt, Human
auggcggccgggaagaggcgcu

SEQ ID NO: 1032215 - RNA, 21 nt, Human
caaaacaccaugaccccagca

SEQ ID NO: 1032216 - RNA, 19 nt, Human
cacagaucaacaggauccc

SEQ ID NO: 1032217 - RNA, 20 nt, Human
caccagggguauaacucagg

SEQ ID NO: 1032218 - RNA, 18 nt, Human
cacucggcaggcugaggc

SEQ ID NO: 1032219 - RNA, 18 nt, Human
cacugcacuccagccugg

SEQ ID NO: 1032220 - RNA, 19 nt, Human
cacugcacuccagccugga

SEQ ID NO: 1032221 - RNA, 21 nt, Human
cacugcacuccagccuggaca

SEQ ID NO: 1032222 - RNA, 24 nt, Human
cacugcacuccagccuggacacca

SEQ ID NO: 1032223 - RNA, 18 nt, Human
cagacugacccaccauga

SEQ ID NO: 1032224 - RNA, 21 nt, Human
cagagacgcuccucacuuccc

SEQ ID NO: 1032225 - RNA, 21 nt, Human
cagcaguaccguccagcuucg

SEQ ID NO: 1032226 - RNA, 23 nt, Human
cagcaguaccguccagcuucggc

SEQ ID NO: 1032227 - RNA, 19 nt, Human
cagcucaauuccagggaua

SEQ ID NO: 1032228 - RNA, 19 nt, Human
caggacaauaggggaggga

SEQ ID NO: 1032229 - RNA, 24 nt, Human
caggaucccaaggcagaagaauuu

SEQ ID NO: 1032230 - RNA, 21 nt, Human
cagggcagagaugcuccccac

SEQ ID NO: 1032231 - RNA, 20 nt, Human
ccaaaaaaaauacgaaaacc

SEQ ID NO: 1032232 - RNA, 19 nt, Human
ccacugcacuccagccugg

SEQ ID NO: 1032233 - RNA, 19 nt, Human
ccacugcacuccagccugg

SEQ ID NO: 1032234 - RNA, 20 nt, Human
ccacugcacuccagccugga

SEQ ID NO: 1032235 - RNA, 21 nt, Human
ccacugcacuccagccuggac

SEQ ID NO: 1032236 - RNA, 19 nt, Human
ccagacaccagggguauaa

SEQ ID NO: 1032237 - RNA, 22 nt, Human
ccaggcagaggggcuccucaca

SEQ ID NO: 1032238 - RNA, 23 nt, Human
ccaucaaucagugcucuugucug

SEQ ID NO: 1032239 - RNA, 22 nt, Human
ccccaucuuuccccccuuucua

SEQ ID NO: 1032240 - RNA, 19 nt, Human
ccccccaccucccucccgg

SEQ ID NO: 1032241 - RNA, 19 nt, Human
ccccccaccucccucccgg

SEQ ID NO: 1032242 - RNA, 20 nt, Human
ccccccaccucccucccgga

SEQ ID NO: 1032243 - RNA, 21 nt, Human
cccccccaccucccucccgga

SEQ ID NO: 1032244 - RNA, 22 nt, Human
cccccccaccucccucccggac

SEQ ID NO: 1032245 - RNA, 23 nt, Human
cccggccaacacagcgaaacccc

SEQ ID NO: 1032246 - RNA, 24 nt, Human
cccggccaacacagcgaaaccccg

SEQ ID NO: 1032247 - RNA, 20 nt, Human
cccgucuccaccaaaaaaaa

SEQ ID NO: 1032248 - RNA, 22 nt, Human
ccgcccuuaauccauucaaccc

SEQ ID NO: 1032249 - RNA, 22 nt, Human
ccucacaucccagaugaugggc

SEQ ID NO: 1032250 - RNA, 19 nt, Human
ccucccucccggacggggc

SEQ ID NO: 1032251 - RNA, 20 nt, Human
ccucccucccggacggggcg

SEQ ID NO: 1032252 - RNA, 18 nt, Human
ccucgggaggccgaggcu

SEQ ID NO: 1032253 - RNA, 19 nt, Human
ccucgggaggccgaggcug

SEQ ID NO: 1032254 - RNA, 26 nt, Human
ccugcaaucgcaggcacucggcaggc

SEQ ID NO: 1032255 - RNA, 24 nt, Human
cgagaucacgccacugcacuccag

SEQ ID NO: 1032256 - RNA, 23 nt, Human
cgagccgagaucacgccacugca

SEQ ID NO: 1032257 - RNA, 24 nt, Human
cgccacugcacuccagccuggaca

SEQ ID NO: 1032258 - RNA, 21 nt, Human
cggagaugcuccucacuuccc

SEQ ID NO: 1032259 - RNA, 24 nt, Human
cggcacuuugggaggccaaggcgg

SEQ ID NO: 1032260 - RNA, 24 nt, Human
cggcaggcugaggcaagagaauca

SEQ ID NO: 1032261 - RNA, 22 nt, Human
cgggguggcugcugggcggagg

SEQ ID NO: 1032262 - RNA, 24 nt, Human
cgucugcaaucccggcaccucggg

SEQ ID NO: 1032263 - RNA, 18 nt, Human
cgugguuaggagcuggag

SEQ ID NO: 1032264 - RNA, 22 nt, Human
cuacacagacacggcaaccauc

SEQ ID NO: 1032265 - RNA, 25 nt, Human
cugaggcaagagaaucaggcaggga

SEQ ID NO: 1032266 - RNA, 23 nt, Human
cugaugacaggcauguaccauga

SEQ ID NO: 1032267 - RNA, 19 nt, Human
cugcaaucccggcaccucg

SEQ ID NO: 1032268 - RNA, 21 nt, Human
cuggacaccauugagcacuga

SEQ ID NO: 1032269 - RNA, 19 nt, Human
cuucaaacuaggcagaaag

SEQ ID NO: 1032270 - RNA, 18 nt, Human
gaacagcucaauuccagg

SEQ ID NO: 1032271 - RNA, 19 nt, Human
gagacuccgucugcaaucc

SEQ ID NO: 1032272 - RNA, 20 nt, Human
gagagaaagggacacagcgg

SEQ ID NO: 1032273 - RNA, 21 nt, Human
gagcugaguggaggcaccaag

SEQ ID NO: 1032274 - RNA, 18 nt, Human
gagcuggagaccagcccg

SEQ ID NO: 1032275 - RNA, 21 nt, Human
gagguugcagugagccgagau

SEQ ID NO: 1032276 - RNA, 20 nt, Human
gaguggaggcaccaagaccu

SEQ ID NO: 1032277 - RNA, 24 nt, Human
gaguggauacagcacauguuucag

SEQ ID NO: 1032278 - RNA, 20 nt, Human
gcaagagaaucaggcaggga

SEQ ID NO: 1032279 - RNA, 20 nt, Human
gcacuuugggaggccaaggc

SEQ ID NO: 1032280 - RNA, 21 nt, Human
gcagggagguugcagugagcc

SEQ ID NO: 1032281 - RNA, 19 nt, Human
gcauguaccaugagcuugg

SEQ ID NO: 1032282 - RNA, 19 nt, Human
gccaaaacaccaugacccc

SEQ ID NO: 1032283 - RNA, 19 nt, Human
gcgagggcacaggcugggc

SEQ ID NO: 1032284 - RNA, 22 nt, Human
gcuggugggaauguagaagccu

SEQ ID NO: 1032285 - RNA, 20 nt, Human
ggagacgcuccucacuuccc

SEQ ID NO: 1032286 - RNA, 22 nt, Human
ggaggagggaagaggaacagau

SEQ ID NO: 1032287 - RNA, 22 nt, Human
ggagggggaggagggaagagga

SEQ ID NO: 1032288 - RNA, 23 nt, Human
ggagggggaggagggaagaggaa

SEQ ID NO: 1032289 - RNA, 21 nt, Human
ggagggggagggggaggaggg

SEQ ID NO: 1032290 - RNA, 22 nt, Human
ggagggggagggggaggaggga

SEQ ID NO: 1032291 - RNA, 18 nt, Human
ggagguugcagugagccg

SEQ ID NO: 1032292 - RNA, 20 nt, Human
ggagguugcagugagccgag

SEQ ID NO: 1032293 - RNA, 22 nt, Human
ggagguugcagugagccgagau

SEQ ID NO: 1032294 - RNA, 24 nt, Human
ggagguugcagugagccgagaugg

SEQ ID NO: 1032295 - RNA, 23 nt, Human
ggagguuguagcgagccgagauc

SEQ ID NO: 1032296 - RNA, 24 nt, Human
ggagguuguagcgagccgagauca

SEQ ID NO: 1032297 - RNA, 21 nt, Human
ggcagaggcugcaaucucggc

SEQ ID NO: 1032298 - RNA, 26 nt, Human
ggcggguugcugggagguggagguug

SEQ ID NO: 1032299 - RNA, 21 nt, Human
ggcugcaaucucggcacuuug

SEQ ID NO: 1032300 - RNA, 19 nt, Human
ggcugccgggcggaggggc

SEQ ID NO: 1032301 - RNA, 18 nt, Human
ggcuggccgggcgggggg

SEQ ID NO: 1032302 - RNA, 23 nt, Human
gggaggccgaggcuggcggauca

SEQ ID NO: 1032303 - RNA, 23 nt, Human
gggagggggaggagggaagagga

SEQ ID NO: 1032304 - RNA, 22 nt, Human
gggcagagacgcuccucacuuu

SEQ ID NO: 1032305 - RNA, 22 nt, Human
gggcagaggcugcaaucucggc

SEQ ID NO: 1032306 - RNA, 20 nt, Human
gggcggcuggccgggcgggg

SEQ ID NO: 1032307 - RNA, 21 nt, Human
gggcggcuggccggguggggg

SEQ ID NO: 1032308 - RNA, 21 nt, Human
ggggacugauccccccaccuc

SEQ ID NO: 1032309 - RNA, 23 nt, Human
ggggggggggagggggaggggga

SEQ ID NO: 1032310 - RNA, 21 nt, Human
gggggggggggagggggaggg

SEQ ID NO: 1032311 - RNA, 22 nt, Human
gggggggggggagggggagggg

SEQ ID NO: 1032312 - RNA, 23 nt, Human
gguugcugggagguggagguugu

SEQ ID NO: 1032313 - RNA, 19 nt, Human
guacugaugacaggcaugu

SEQ ID NO: 1032314 - RNA, 20 nt, Human
gucacaggacaauaggggag

SEQ ID NO: 1032315 - RNA, 18 nt, Human
guugcagugagccgagau

SEQ ID NO: 1032316 - RNA, 21 nt, Human
guuguagcgagccgagaucac

SEQ ID NO: 1032317 - RNA, 24 nt, Human
uagaagccuucagaccuaugaagg

SEQ ID NO: 1032318 - RNA, 18 nt, Human
ucacaggacaauagggga

SEQ ID NO: 1032319 - RNA, 23 nt, Human
ucacgccacugcacuccagccug

SEQ ID NO: 1032320 - RNA, 19 nt, Human
ucaggcagggagguugcag

SEQ ID NO: 1032321 - RNA, 24 nt, Human
ucaggcagggagguugcagugagc

SEQ ID NO: 1032322 - RNA, 21 nt, Human
ucaggggaaguaggcgaaaag

SEQ ID NO: 1032323 - RNA, 22 nt, Human
ucauaugguccaccugcuggug

SEQ ID NO: 1032324 - RNA, 21 nt, Human
uccacaaaaccgccauuguca

SEQ ID NO: 1032325 - RNA, 22 nt, Human
uccaccaaaaaaaauacgaaaa

SEQ ID NO: 1032326 - RNA, 23 nt, Human
uccaggccaggagaggccaaaac

SEQ ID NO: 1032327 - RNA, 22 nt, Human
uccccccaccucccucccggac

SEQ ID NO: 1032328 - RNA, 22 nt, Human
ucccuggguacuugagauuagg

SEQ ID NO: 1032329 - RNA, 23 nt, Human
ucccuggguacuugagauuaggg

SEQ ID NO: 1032330 - RNA, 19 nt, Human
uccucacuuuccagacugg

SEQ ID NO: 1032331 - RNA, 25 nt, Human
ugagaacagcucaauuccagggaua

SEQ ID NO: 1032332 - RNA, 19 nt, Human
ugaggcaagagaaucaggc

SEQ ID NO: 1032333 - RNA, 18 nt, Human
ugccgggcggagaugcuc

SEQ ID NO: 1032334 - RNA, 19 nt, Human
ugcgagggcacaggcuggg

SEQ ID NO: 1032335 - RNA, 21 nt, Human
uggaaagagcggggggggggg

SEQ ID NO: 1032336 - RNA, 22 nt, Human
uggcaaggcuagugaccuuggu

SEQ ID NO: 1032337 - RNA, 18 nt, Human
ugggaggccaaggcgggu

SEQ ID NO: 1032338 - RNA, 24 nt, Human
ugggagguggagguuguagcgagc

SEQ ID NO: 1032339 - RNA, 21 nt, Human
ugggaugaccagugucuucaa

SEQ ID NO: 1032340 - RNA, 20 nt, Human
ugggggaaugaacagguugg

SEQ ID NO: 1032341 - RNA, 24 nt, Human
ugucuucaaacuaggcagaaagag

SEQ ID NO: 1032342 - RNA, 22 nt, Human
uuaggagcuggagaccagcccg

SEQ ID NO: 1032343 - RNA, 20 nt, Human
uugcagugagccgagauggc

SEQ ID NO: 1032344 - RNA, 20 nt, Human
uuguagcgagccgagaucac

SEQ ID NO: 1032345 - RNA, 21 nt, Human
uuuugagaguccaggccagga

SEQ ID NO: 1032346 - RNA, 23 nt, Human
cagcgcggagccguccucccgcc

SEQ ID NO: 1032347 - RNA, 21 nt, Human
ccagguaacgguggugcucuc

SEQ ID NO: 1032348 - RNA, 23 nt, Human
ccccgccccgcaugcagcgcgga

SEQ ID NO: 1032349 - RNA, 18 nt, Human
ccgccaccuccgggccgc

SEQ ID NO: 1032350 - RNA, 19 nt, Human
ccgggacaaaggccccucc

SEQ ID NO: 1032351 - RNA, 22 nt, Human
gagccguccucccgccaccucc

SEQ ID NO: 1032352 - RNA, 23 nt, Human
gagccuggccgggagauccacgc

SEQ ID NO: 1032353 - RNA, 18 nt, Human
ggacaaaggccccuccuc

SEQ ID NO: 1032354 - RNA, 24 nt, Human
gugcucucaaggcuggcagccuca

SEQ ID NO: 1032355 - RNA, 23 nt, Human
uggcagccucauucucuggaggc

SEQ ID NO: 1032356 - RNA, 26 nt, Human
ugguggguuuuccgggacaaaggccc

SEQ ID NO: 1032357 - RNA, 25 nt, Human
aaagagccuucaagacagguccagc

SEQ ID NO: 1032358 - RNA, 24 nt, Human
aaaggucucuucgaauccuuugcc

SEQ ID NO: 1032359 - RNA, 23 nt, Human
aacaggaaauaggaaaauucaga

SEQ ID NO: 1032360 - RNA, 25 nt, Human
aagcagcagaagucaucauucgcag

SEQ ID NO: 1032361 - RNA, 22 nt, Human
aagccccuggagcagggcccag

SEQ ID NO: 1032362 - RNA, 20 nt, Human
aaggauguuaagugcccaga

SEQ ID NO: 1032363 - RNA, 22 nt, Human
accucccugaggucaccuguug

SEQ ID NO: 1032364 - RNA, 20 nt, Human
acgcaggugacauggcuuug

SEQ ID NO: 1032365 - RNA, 19 nt, Human
acuuugugguacaggaagu

SEQ ID NO: 1032366 - RNA, 23 nt, Human
agacggaagcagcagaagucauc

SEQ ID NO: 1032367 - RNA, 18 nt, Human
aggaaguucaggacuuga

SEQ ID NO: 1032368 - RNA, 23 nt, Human
agugaggagcucccuggagcccg

SEQ ID NO: 1032369 - RNA, 22 nt, Human
augaguaaagcaggacucaccc

SEQ ID NO: 1032370 - RNA, 23 nt, Human
cacccaccaguguggguaacacu

SEQ ID NO: 1032371 - RNA, 22 nt, Human
caccgcgcguccucccuggucc

SEQ ID NO: 1032372 - RNA, 19 nt, Human
cagagacggaagcagcaga

SEQ ID NO: 1032373 - RNA, 18 nt, Human
cagcagcggcaguguggc

SEQ ID NO: 1032374 - RNA, 22 nt, Human
cauguuacuuucccaccagcaa

SEQ ID NO: 1032375 - RNA, 25 nt, Human
ccaacgaugacaccggccgucccuc

SEQ ID NO: 1032376 - RNA, 24 nt, Human
ccagcacacauuacugcuuuucca

SEQ ID NO: 1032377 - RNA, 21 nt, Human
ccaggcaugucccccugugcu

SEQ ID NO: 1032378 - RNA, 23 nt, Human
ccaggucucugugccucugugcc

SEQ ID NO: 1032379 - RNA, 23 nt, Human
ccauaaugaguagcugcugagua

SEQ ID NO: 1032380 - RNA, 18 nt, Human
cccaccagcaaucuauga

SEQ ID NO: 1032381 - RNA, 25 nt, Human
cccccugugcugauggcagaggcug

SEQ ID NO: 1032382 - RNA, 20 nt, Human
ccccuggagcagggcccagg

SEQ ID NO: 1032383 - RNA, 23 nt, Human
ccgcugacguuucacuggacaac

SEQ ID NO: 1032384 - RNA, 18 nt, Human
ccggggcagggagcaaug

SEQ ID NO: 1032385 - RNA, 18 nt, Human
ccuagcugagaaucucau

SEQ ID NO: 1032386 - RNA, 23 nt, Human
ccugaagacucaucccucagauu

SEQ ID NO: 1032387 - RNA, 25 nt, Human
ccuguugguuuccaggucucugugc

SEQ ID NO: 1032388 - RNA, 19 nt, Human
cggccaaaagagccuucaa

SEQ ID NO: 1032389 - RNA, 23 nt, Human
cguacucauuggucauuugugua

SEQ ID NO: 1032390 - RNA, 19 nt, Human
cuccaacgaugacaccggc

SEQ ID NO: 1032391 - RNA, 24 nt, Human
cuccaacgaugacaccgggguacc

SEQ ID NO: 1032392 - RNA, 23 nt, Human
cugaggucaccuguugguuuccu

SEQ ID NO: 1032393 - RNA, 19 nt, Human
cugauggcagaggcacagg

SEQ ID NO: 1032394 - RNA, 30 nt, Human
cugccaaacuguuucuacauugguugcacu

SEQ ID NO: 1032395 - RNA, 20 nt, Human
cuggauacuugucccagaug

SEQ ID NO: 1032396 - RNA, 18 nt, Human
gagccgggcggaggcggg

SEQ ID NO: 1032397 - RNA, 19 nt, Human
gauggcagaggcacaggga

SEQ ID NO: 1032398 - RNA, 21 nt, Human
gcacccaccaguguggguaac

SEQ ID NO: 1032399 - RNA, 23 nt, Human
gcagcggcaguguggcuggcucu

SEQ ID NO: 1032400 - RNA, 22 nt, Human
gcaggugcucucagaucccugc

SEQ ID NO: 1032401 - RNA, 22 nt, Human
gccccuggagcagggcccaggg

SEQ ID NO: 1032402 - RNA, 18 nt, Human
gcggaggcgggucuggga

SEQ ID NO: 1032403 - RNA, 20 nt, Human
ggagcucccuggagcccggg

SEQ ID NO: 1032404 - RNA, 20 nt, Human
gggcccagggagccgggcgg

SEQ ID NO: 1032405 - RNA, 21 nt, Human
gguccagcagugccaggaagc

SEQ ID NO: 1032406 - RNA, 21 nt, Human
guguaucuucuuuggacaaag

SEQ ID NO: 1032407 - RNA, 19 nt, Human
uaaaucucugacaugagua

SEQ ID NO: 1032408 - RNA, 21 nt, Human
uagcaggugcucucagauccc

SEQ ID NO: 1032409 - RNA, 22 nt, Human
uauuuuuuuuccugugguugua

SEQ ID NO: 1032410 - RNA, 22 nt, Human
ucacuggacaacgcaggugaca

SEQ ID NO: 1032411 - RNA, 25 nt, Human
ucagaaaacugcucagagaucucag

SEQ ID NO: 1032412 - RNA, 23 nt, Human
ucccgcaccgcgcguccucccug

SEQ ID NO: 1032413 - RNA, 20 nt, Human
ucccugaggucaccuguugg

SEQ ID NO: 1032414 - RNA, 24 nt, Human
ucccuggagcccgggcagcgccug

SEQ ID NO: 1032415 - RNA, 23 nt, Human
uccggccaaaagagccuucaaga

SEQ ID NO: 1032416 - RNA, 21 nt, Human
uccugaagacucaucccucag

SEQ ID NO: 1032417 - RNA, 23 nt, Human
uccugacaacaaacucuccugaa

SEQ ID NO: 1032418 - RNA, 19 nt, Human
uccugugguuguaugugcu

SEQ ID NO: 1032419 - RNA, 23 nt, Human
ucucagaucccugcccauccauu

SEQ ID NO: 1032420 - RNA, 19 nt, Human
ucucaggugccaagaaccc

SEQ ID NO: 1032421 - RNA, 20 nt, Human
ucugacaugaguaaagcagg

SEQ ID NO: 1032422 - RNA, 24 nt, Human
ucugcacagacucgggcauguggg

SEQ ID NO: 1032423 - RNA, 20 nt, Human
ugacccggggcagggagcaa

SEQ ID NO: 1032424 - RNA, 21 nt, Human
ugaguggaaagugguacuucc

SEQ ID NO: 1032425 - RNA, 21 nt, Human
ugauuugcaaauauuucacuc

SEQ ID NO: 1032426 - RNA, 23 nt, Human
ugcagcagcggcaguguggcugg

SEQ ID NO: 1032427 - RNA, 21 nt, Human
ugcagucuccuccgcgugggu

SEQ ID NO: 1032428 - RNA, 18 nt, Human
ugccaagaaccccaggcc

SEQ ID NO: 1032429 - RNA, 19 nt, Human
ugcccagagcucuccagag

SEQ ID NO: 1032430 - RNA, 23 nt, Human
ugcccagagcucuccagagacgg

SEQ ID NO: 1032431 - RNA, 25 nt, Human
ugcccagagcucuccagagacggaa

SEQ ID NO: 1032432 - RNA, 20 nt, Human
uggauacuugucccagaugu

SEQ ID NO: 1032433 - RNA, 24 nt, Human
ugggaaaugcagucuccuccgcgu

SEQ ID NO: 1032434 - RNA, 20 nt, Human
ugguuuccaggucucugugc

SEQ ID NO: 1032435 - RNA, 18 nt, Human
uguaucuucuuuggacaa

SEQ ID NO: 1032436 - RNA, 19 nt, Human
uucaacaggaaauaggaaa

SEQ ID NO: 1032437 - RNA, 23 nt, Human
uucacaaaccucccugaggucac

SEQ ID NO: 1032438 - RNA, 18 nt, Human
uucuccacaucuucacug

SEQ ID NO: 1032439 - RNA, 23 nt, Human
uucucuggguuuucuucucgcuu

SEQ ID NO: 1032440 - RNA, 21 nt, Human
uugguuuccaggucucugugc

SEQ ID NO: 1032441 - RNA, 21 nt, Human
uuuauacuuuuagcucuuaca

SEQ ID NO: 1032442 - RNA, 23 nt, Human
uuuguuuuagucuaaaucucuga

SEQ ID NO: 1032443 - RNA, 20 nt, Human
uuuuaaggaacugccaaacu

SEQ ID NO: 1032444 - RNA, 23 nt, Human
uuuuuuuccugugguuguaugug

SEQ ID NO: 1032445 - RNA, 25 nt, Human
aaagcaccaucauuucaauauugcc

SEQ ID NO: 1032446 - RNA, 30 nt, Human
aaauaaacaccaaaugcagaaagcaccauu

SEQ ID NO: 1032447 - RNA, 20 nt, Human
accaaaugcagaaagcacca

SEQ ID NO: 1032448 - RNA, 24 nt, Human
agaaccacuuccagggucagagcc

SEQ ID NO: 1032449 - RNA, 26 nt, Human
auaaacaccaaaugcagaaagcacca

SEQ ID NO: 1032450 - RNA, 23 nt, Human
auacccgcagccgacaaucucag

SEQ ID NO: 1032451 - RNA, 18 nt, Human
caaauaaacaccaaaugc

SEQ ID NO: 1032452 - RNA, 25 nt, Human
caaauaaacaccaaaugcagaaagc

SEQ ID NO: 1032453 - RNA, 18 nt, Human
caccaaaugcagaaagca

SEQ ID NO: 1032454 - RNA, 20 nt, Human
caugucuugauaauggaaaa

SEQ ID NO: 1032455 - RNA, 18 nt, Human
ccugcuuagaaccacuuc

SEQ ID NO: 1032456 - RNA, 18 nt, Human
gaugcauauuacuuaaaa

SEQ ID NO: 1032457 - RNA, 18 nt, Human
gcagaaagcaccaucauu

SEQ ID NO: 1032458 - RNA, 20 nt, Human
uaaacaccaaaugcagaaag

SEQ ID NO: 1032459 - RNA, 18 nt, Human
uacccgcagccgacaauc

SEQ ID NO: 1032460 - RNA, 18 nt, Human
uagauggccaugucuuga

SEQ ID NO: 1032461 - RNA, 19 nt, Human
uauuucugaaguuucugau

SEQ ID NO: 1032462 - RNA, 19 nt, Human
ucacuucauauucaugagg

SEQ ID NO: 1032463 - RNA, 20 nt, Human
uuuacaguauguaccacucu

SEQ ID NO: 1032464 - RNA, 21 nt, Human
uuuacaguauguaccacucuu

SEQ ID NO: 1032465 - RNA, 25 nt, Human
uuuuuuuuuuuuuuuuuuuuaucag

SEQ ID NO: 1032466 - RNA, 19 nt, Human
aagcaugaauaguugugac

SEQ ID NO: 1032467 - RNA, 24 nt, Human
ccaauugcagaagacucaagcuga

SEQ ID NO: 1032468 - RNA, 24 nt, Human
ugcagaagacucaagcugauucca

SEQ ID NO: 1032469 - RNA, 23 nt, Human
acuuuauggaucuaaaaaggcua

SEQ ID NO: 1032470 - RNA, 20 nt, Human
agaggcaaguuucucccugu

SEQ ID NO: 1032471 - RNA, 18 nt, Human
aggcaaguuucucccugu

SEQ ID NO: 1032472 - RNA, 21 nt, Human
cguaucugcaaacuuguuuca

SEQ ID NO: 1032473 - RNA, 22 nt, Human
cguaucugcaaacuuguuucac

SEQ ID NO: 1032474 - RNA, 19 nt, Human
gaaaauagcuuucagaggc

SEQ ID NO: 1032475 - RNA, 22 nt, Human
ggaucccuacugccuucuggac

SEQ ID NO: 1032476 - RNA, 20 nt, Human
ggaucuaaaaaggcuaagua

SEQ ID NO: 1032477 - RNA, 21 nt, Human
guaucugcaaacuuguuucac

SEQ ID NO: 1032478 - RNA, 23 nt, Human
ucagaaaauagcuuucagaggca

SEQ ID NO: 1032479 - RNA, 25 nt, Human
ucagaaaauagcuuucagaggcaag

SEQ ID NO: 1032480 - RNA, 22 nt, Human
acuggagcucagggugccccca

SEQ ID NO: 1032481 - RNA, 20 nt, Human
agcucgggggacagcagugc

SEQ ID NO: 1032482 - RNA, 26 nt, Human
ggacagcagugcggggacacccuuca

SEQ ID NO: 1032483 - RNA, 19 nt, Human
ggagcucagggugccccca

SEQ ID NO: 1032484 - RNA, 23 nt, Human
ucagggugcccccaguuccucuu

SEQ ID NO: 1032485 - RNA, 20 nt, Human
ugaguggugguacuggagcu

SEQ ID NO: 1032486 - RNA, 22 nt, Human
ugcccccaguuccucuuccggc

SEQ ID NO: 1032487 - RNA, 24 nt, Human
ugcccccaguuccucuuccggccc

SEQ ID NO: 1032488 - RNA, 18 nt, Human
uguugugaguggugguac

SEQ ID NO: 1032489 - RNA, 24 nt, Human
aaaagugcugggauuacagaggug

SEQ ID NO: 1032490 - RNA, 19 nt, Human
aaagugcugggauuacaga

SEQ ID NO: 1032491 - RNA, 24 nt, Human
aaagugcugggauuacagagguga

SEQ ID NO: 1032492 - RNA, 18 nt, Human
aagugcugggauuacaga

SEQ ID NO: 1032493 - RNA, 21 nt, Human
aagugcugggauuacagaggu

SEQ ID NO: 1032494 - RNA, 26 nt, Human
aagugcugggauuacagaggugagcc

SEQ ID NO: 1032495 - RNA, 18 nt, Human
acagaggugagccaccgc

SEQ ID NO: 1032496 - RNA, 24 nt, Human
accauguugcccaggcuggucugg

SEQ ID NO: 1032497 - RNA, 18 nt, Human
acgggguuucaccauguu

SEQ ID NO: 1032498 - RNA, 19 nt, Human
acgggguuucaccauguug

SEQ ID NO: 1032499 - RNA, 24 nt, Human
acgggguuucaccauguugcccag

SEQ ID NO: 1032500 - RNA, 19 nt, Human
agagagugcucagggagcu

SEQ ID NO: 1032501 - RNA, 25 nt, Human
agggagcugcaguggcugaucccag

SEQ ID NO: 1032502 - RNA, 18 nt, Human
aggucggggccagggauc

SEQ ID NO: 1032503 - RNA, 24 nt, Human
aggugauccgccugccucggccuc

SEQ ID NO: 1032504 - RNA, 24 nt, Human
auuuuuguauuuuuaguagagacg

SEQ ID NO: 1032505 - RNA, 22 nt, Human
caccauguugcccaggcugguc

SEQ ID NO: 1032506 - RNA, 27 nt, Human
caccauguugcccaggcuggucuggaa

SEQ ID NO: 1032507 - RNA, 22 nt, Human
caggugauccgccugccucggc

SEQ ID NO: 1032508 - RNA, 20 nt, Human
cauguugcccaggcuggucu

SEQ ID NO: 1032509 - RNA, 22 nt, Human
cauguugcccaggcuggucugg

SEQ ID NO: 1032510 - RNA, 23 nt, Human
cauguugcccaggcuggucugga

SEQ ID NO: 1032511 - RNA, 24 nt, Human
cauguugcccaggcuggucuggaa

SEQ ID NO: 1032512 - RNA, 21 nt, Human
cccggcccagcuccuccugcc

SEQ ID NO: 1032513 - RNA, 19 nt, Human
ccgcgcccggccugcuggg

SEQ ID NO: 1032514 - RNA, 19 nt, Human
ccuccugcccaggcccagg

SEQ ID NO: 1032515 - RNA, 21 nt, Human
ccugauuucaggugauccgcc

SEQ ID NO: 1032516 - RNA, 24 nt, Human
cggggccagggaucccacccuggg

SEQ ID NO: 1032517 - RNA, 24 nt, Human
cgggguuucaccauguugcccagg

SEQ ID NO: 1032518 - RNA, 21 nt, Human
cucggccucuaaaagugcugg

SEQ ID NO: 1032519 - RNA, 24 nt, Human
cuggcacccggcccagcuccuccu

SEQ ID NO: 1032520 - RNA, 18 nt, Human
cuggcucugcagccgccc

SEQ ID NO: 1032521 - RNA, 19 nt, Human
gacagggcgggggcaguga

SEQ ID NO: 1032522 - RNA, 23 nt, Human
gagacgggguuucaccauguugc

SEQ ID NO: 1032523 - RNA, 24 nt, Human
gagacgggguuucaccauguugcc

SEQ ID NO: 1032524 - RNA, 21 nt, Human
gagcugcaguggcugauccca

SEQ ID NO: 1032525 - RNA, 18 nt, Human
gauuacagaggugagcca

SEQ ID NO: 1032526 - RNA, 24 nt, Human
gauuucaggugauccgccugccuc

SEQ ID NO: 1032527 - RNA, 22 nt, Human
gcccaggccaauuggggcuuug

SEQ ID NO: 1032528 - RNA, 21 nt, Human
gcugggauuacagaggugagc

SEQ ID NO: 1032529 - RNA, 22 nt, Human
gcuggucuggaacuccugauuu

SEQ ID NO: 1032530 - RNA, 21 nt, Human
ggcccagcuccuccugcccag

SEQ ID NO: 1032531 - RNA, 20 nt, Human
ggcuggucuggaacuccuga

SEQ ID NO: 1032532 - RNA, 18 nt, Human
gggcaggguagggagggu

SEQ ID NO: 1032533 - RNA, 20 nt, Human
gggcagugauggccccugga

SEQ ID NO: 1032534 - RNA, 24 nt, Human
gggcgugucaggacagaggucggg

SEQ ID NO: 1032535 - RNA, 23 nt, Human
gggguuucaccauguugcccagg

SEQ ID NO: 1032536 - RNA, 27 nt, Human
gggucccagucccaacagccugggccu

SEQ ID NO: 1032537 - RNA, 25 nt, Human
ggucccagucccaacagccugggcc

SEQ ID NO: 1032538 - RNA, 23 nt, Human
guagagacgggguuucaccaugu

SEQ ID NO: 1032539 - RNA, 24 nt, Human
guuucaccauguugcccaggcugg

SEQ ID NO: 1032540 - RNA, 24 nt, Human
uaaaagugcugggauuacagaggu

SEQ ID NO: 1032541 - RNA, 24 nt, Human
uaauuuuuguauuuuuaguagaga

SEQ ID NO: 1032542 - RNA, 23 nt, Human
uacagaggugagccaccgcgccc

SEQ ID NO: 1032543 - RNA, 22 nt, Human
uagagacgggguuucaccaugu

SEQ ID NO: 1032544 - RNA, 21 nt, Human
uagcuggggcaggguagggag

SEQ ID NO: 1032545 - RNA, 24 nt, Human
uaguagagacgggguuucaccaug

SEQ ID NO: 1032546 - RNA, 26 nt, Human
uaguagagacgggguuucaccauguu

SEQ ID NO: 1032547 - RNA, 21 nt, Human
ucaccauguugcccaggcugg

SEQ ID NO: 1032548 - RNA, 21 nt, Human
ucaggugauccgccugccucg

SEQ ID NO: 1032549 - RNA, 25 nt, Human
ucuaaaagugcugggauuacagagg

SEQ ID NO: 1032550 - RNA, 26 nt, Human
ucuggcacccggcccagcuccuccug

SEQ ID NO: 1032551 - RNA, 22 nt, Human
ugagcggggacacccagcugcc

SEQ ID NO: 1032552 - RNA, 18 nt, Human
ugauuucaggugauccgc

SEQ ID NO: 1032553 - RNA, 24 nt, Human
ugauuucaggugauccgccugccu

SEQ ID NO: 1032554 - RNA, 25 nt, Human
ugcccaggcccaggccaauuggggc

SEQ ID NO: 1032555 - RNA, 24 nt, Human
ugcccaggcuggucuggaacuccu

SEQ ID NO: 1032556 - RNA, 22 nt, Human
ugggauuacagaggugagccac

SEQ ID NO: 1032557 - RNA, 23 nt, Human
ugggauuacagaggugagccacc

SEQ ID NO: 1032558 - RNA, 24 nt, Human
ugggauuacagaggugagccaccg

SEQ ID NO: 1032559 - RNA, 23 nt, Human
uggucuggaacuccugauuucag

SEQ ID NO: 1032560 - RNA, 21 nt, Human
uguauuuuuaguagagacggg

SEQ ID NO: 1032561 - RNA, 18 nt, Human
uuaguagagacgggguuu

SEQ ID NO: 1032562 - RNA, 22 nt, Human
uuaguagagacgggguuucacc

SEQ ID NO: 1032563 - RNA, 24 nt, Human
uuaguagagacgggguuucaccau

SEQ ID NO: 1032564 - RNA, 21 nt, Human
uucaggugauccgccugccuc

SEQ ID NO: 1032565 - RNA, 23 nt, Human
uuguauuuuuaguagagacgggg

SEQ ID NO: 1032566 - RNA, 24 nt, Human
uuucaccauguugcccaggcuggu

SEQ ID NO: 1032567 - RNA, 24 nt, Human
uuuuuaguagagacgggguuucac

SEQ ID NO: 1032568 - RNA, 20 nt, Human
uuuuuguauuuuuaguagag

SEQ ID NO: 1032569 - RNA, 19 nt, Human
aaggauggggaggauggcg

SEQ ID NO: 1032570 - RNA, 22 nt, Human
agcaguggugacugccccccac

SEQ ID NO: 1032571 - RNA, 20 nt, Human
aggaggagacaggccgucca

SEQ ID NO: 1032572 - RNA, 24 nt, Human
aggauggggaggauggcgagggcc

SEQ ID NO: 1032573 - RNA, 20 nt, Human
aggcggaugccacgcccagc

SEQ ID NO: 1032574 - RNA, 19 nt, Human
caggaggagacaggccgcc

SEQ ID NO: 1032575 - RNA, 28 nt, Human
ccagcaguggugacugccccccacuccu

SEQ ID NO: 1032576 - RNA, 23 nt, Human
cccagcaguggugacugcccccc

SEQ ID NO: 1032577 - RNA, 18 nt, Human
ccccagggcggccacacc

SEQ ID NO: 1032578 - RNA, 25 nt, Human
ccucacagcuucugaugacagcugc

SEQ ID NO: 1032579 - RNA, 22 nt, Human
cgcccagcaguggugacugccc

SEQ ID NO: 1032580 - RNA, 22 nt, Human
cucacagcuucugaugacagcu

SEQ ID NO: 1032581 - RNA, 19 nt, Human
cugugggucccucacagcu

SEQ ID NO: 1032582 - RNA, 22 nt, Human
cugugggucccucacagcuucu

SEQ ID NO: 1032583 - RNA, 19 nt, Human
ggaacaaggauggggagga

SEQ ID NO: 1032584 - RNA, 18 nt, Human
ggagaaaggcccaaggcg

SEQ ID NO: 1032585 - RNA, 18 nt, Human
ggagacaggccguccaca

SEQ ID NO: 1032586 - RNA, 18 nt, Human
gggaggauggcgagggcc

SEQ ID NO: 1032587 - RNA, 19 nt, Human
ggggaggauggcgagggcc

SEQ ID NO: 1032588 - RNA, 19 nt, Human
gugacugccccccacuccu

SEQ ID NO: 1032589 - RNA, 24 nt, Human
gugggcccugcaggaggagacagg

SEQ ID NO: 1032590 - RNA, 19 nt, Human
uccaaaaucuguggguccc

SEQ ID NO: 1032591 - RNA, 23 nt, Human
ugacagcugcuaaugccauuugc

SEQ ID NO: 1032592 - RNA, 22 nt, Human
ugccauuugcugaggaacaagg

SEQ ID NO: 1032593 - RNA, 24 nt, Human
ugcugaggaacaaggauggggagg

SEQ ID NO: 1032594 - RNA, 20 nt, Human
uggggaggauggcgagggcc

SEQ ID NO: 1032595 - RNA, 19 nt, Human
aaaaaaguguuuugccucu

SEQ ID NO: 1032596 - RNA, 21 nt, Human
aacaaaaggccaaguucuguu

SEQ ID NO: 1032597 - RNA, 21 nt, Human
aaucaggaaggaaagaauuuc

SEQ ID NO: 1032598 - RNA, 21 nt, Human
accuaauucacaacaaaaggc

SEQ ID NO: 1032599 - RNA, 24 nt, Human
acuacgcacaaaauaggcaaucac

SEQ ID NO: 1032600 - RNA, 20 nt, Human
aggaaggaaagaauuuccag

SEQ ID NO: 1032601 - RNA, 22 nt, Human
caaaauaggcaaucacuaagua

SEQ ID NO: 1032602 - RNA, 21 nt, Human
caacaaaaggccaaguucugu

SEQ ID NO: 1032603 - RNA, 20 nt, Human
cagggaaagacaauacaacg

SEQ ID NO: 1032604 - RNA, 23 nt, Human
ccauacuaugauuccaaagggug

SEQ ID NO: 1032605 - RNA, 21 nt, Human
cccauacuaugauuccaaagg

SEQ ID NO: 1032606 - RNA, 18 nt, Human
gagcaccuugcagggacu

SEQ ID NO: 1032607 - RNA, 20 nt, Human
gauaaaucauaacuucuacc

SEQ ID NO: 1032608 - RNA, 19 nt, Human
uaaaagacuucaaaugcag

SEQ ID NO: 1032609 - RNA, 18 nt, Human
uagggcaaaucaggaagg

SEQ ID NO: 1032610 - RNA, 18 nt, Human
ucagaagcuauauuucag

SEQ ID NO: 1032611 - RNA, 21 nt, Human
ucagaagcuauauuucaguca

SEQ ID NO: 1032612 - RNA, 21 nt, Human
ucaggaaggaaagaauuucca

SEQ ID NO: 1032613 - RNA, 25 nt, Human
ucaggaaggaaagaauuuccagggu

SEQ ID NO: 1032614 - RNA, 25 nt, Human
ucagucauugaaaauacuuguccau

SEQ ID NO: 1032615 - RNA, 18 nt, Human
uccaaagggugaaaaaag

SEQ ID NO: 1032616 - RNA, 20 nt, Human
uccuagggcaaaucaggaag

SEQ ID NO: 1032617 - RNA, 23 nt, Human
uguuuugccucuucuacccucca

SEQ ID NO: 1032618 - RNA, 25 nt, Human
uguuuugccucuucuacccuccaaa

SEQ ID NO: 1032619 - RNA, 18 nt, Human
uucaacuuccuuauugca

SEQ ID NO: 1032620 - RNA, 23 nt, Human
uucaacuuccuuauugcauccaa

SEQ ID NO: 1032621 - RNA, 19 nt, Human
uucuguucagaggauuuua

SEQ ID NO: 1032622 - RNA, 20 nt, Human
uugaaaauacuuguccauuu

SEQ ID NO: 1032623 - RNA, 21 nt, Human
cuagcacagcauccaauguag

SEQ ID NO: 1032624 - RNA, 21 nt, Human
aagcaaguagcauccucaaag

SEQ ID NO: 1032625 - RNA, 18 nt, Human
aagcauccgugccugaag

SEQ ID NO: 1032626 - RNA, 22 nt, Human
aggaaaggaacucagaguccca

SEQ ID NO: 1032627 - RNA, 22 nt, Human
aguacaaccaaguaaaguccag

SEQ ID NO: 1032628 - RNA, 21 nt, Human
auccaguaacacagccaaugg

SEQ ID NO: 1032629 - RNA, 23 nt, Human
caaccaguaaaacauccaguaac

SEQ ID NO: 1032630 - RNA, 28 nt, Human
cucagagucccaugcagaaaauuguucc

SEQ ID NO: 1032631 - RNA, 25 nt, Human
cucauaguucuccaacaggacagcc

SEQ ID NO: 1032632 - RNA, 21 nt, Human
cuccuggucuugugccugaag

SEQ ID NO: 1032633 - RNA, 24 nt, Human
cuugcucauaguucuccaacagga

SEQ ID NO: 1032634 - RNA, 21 nt, Human
gccgggaugcagaagagcugg

SEQ ID NO: 1032635 - RNA, 19 nt, Human
ggaaaggaacucagagucc

SEQ ID NO: 1032636 - RNA, 25 nt, Human
gucucuguuuauagugaagauucuu

SEQ ID NO: 1032637 - RNA, 20 nt, Human
guguuagaugguuuuuggcu

SEQ ID NO: 1032638 - RNA, 23 nt, Human
guucuugugaaucagacugcagu

SEQ ID NO: 1032639 - RNA, 25 nt, Human
uaaauguguuagaugguuuuuggcu

SEQ ID NO: 1032640 - RNA, 21 nt, Human
uagaugguuuuuggcuuauac

SEQ ID NO: 1032641 - RNA, 19 nt, Human
uaguuugagaaacaccaua

SEQ ID NO: 1032642 - RNA, 24 nt, Human
uccaagcaaguagcauccucaaag

SEQ ID NO: 1032643 - RNA, 25 nt, Human
uccgugccugaagcuguuuggaggc

SEQ ID NO: 1032644 - RNA, 21 nt, Human
uccuggucuugugccugaagc

SEQ ID NO: 1032645 - RNA, 22 nt, Human
ucuagaauagauaaugcagcuc

SEQ ID NO: 1032646 - RNA, 28 nt, Human
ugacccaguuucucgucaaccaguaagg

SEQ ID NO: 1032647 - RNA, 22 nt, Human
ugagaaacaccauaaugaaggc

SEQ ID NO: 1032648 - RNA, 21 nt, Human
ugaugcuucuuucuuuguugg

SEQ ID NO: 1032649 - RNA, 19 nt, Human
ugccugaagcuguuuggag

SEQ ID NO: 1032650 - RNA, 21 nt, Human
ugccugaagcuguuuggaggc

SEQ ID NO: 1032651 - RNA, 22 nt, Human
ugcuugcucauaguucuccaac

SEQ ID NO: 1032652 - RNA, 25 nt, Human
ugguuccaagcaaguagcauccuuu

SEQ ID NO: 1032653 - RNA, 23 nt, Human
uucuuuguugguaucuccuugau

SEQ ID NO: 1032654 - RNA, 21 nt, Human
uugguaucuccuugauaaaug

SEQ ID NO: 1032655 - RNA, 23 nt, Human
aaaaacauuaaggggacuguauc

SEQ ID NO: 1032656 - RNA, 20 nt, Human
aaaagaaccacuccaaggac

SEQ ID NO: 1032657 - RNA, 27 nt, Human
aaaaggagauggauuuggaucccaaaa

SEQ ID NO: 1032658 - RNA, 24 nt, Human
aaacacugaaguuacgucagagcu

SEQ ID NO: 1032659 - RNA, 20 nt, Human
aaacccucugcgggggcccc

SEQ ID NO: 1032660 - RNA, 24 nt, Human
aaagguacaauuuagaagcaaaaa

SEQ ID NO: 1032661 - RNA, 22 nt, Human
aaaucagaagcaaaagguacaa

SEQ ID NO: 1032662 - RNA, 20 nt, Human
aagaaacccaggaaaaagga

SEQ ID NO: 1032663 - RNA, 22 nt, Human
acagacagucaucgcuuggaga

SEQ ID NO: 1032664 - RNA, 19 nt, Human
acccugagguggacacagg

SEQ ID NO: 1032665 - RNA, 20 nt, Human
acgagguccuggucucccuc

SEQ ID NO: 1032666 - RNA, 21 nt, Human
acggagcuguuucuggagaac

SEQ ID NO: 1032667 - RNA, 19 nt, Human
acuuuuguguguacugccc

SEQ ID NO: 1032668 - RNA, 22 nt, Human
agaaaucagaagcaaaagguac

SEQ ID NO: 1032669 - RNA, 21 nt, Human
agacagcaaaguuggaccauu

SEQ ID NO: 1032670 - RNA, 21 nt, Human
agacuggagauuuuuaagggc

SEQ ID NO: 1032671 - RNA, 21 nt, Human
agggcgcgggcuggggggccc

SEQ ID NO: 1032672 - RNA, 18 nt, Human
aggggcaaggaggcccug

SEQ ID NO: 1032673 - RNA, 23 nt, Human
agguaguguggucagcagggcag

SEQ ID NO: 1032674 - RNA, 18 nt, Human
augggguuuccuucaagu

SEQ ID NO: 1032675 - RNA, 22 nt, Human
caaaagguacaauuuagaagca

SEQ ID NO: 1032676 - RNA, 24 nt, Human
caacccagugugggccucgggaac

SEQ ID NO: 1032677 - RNA, 23 nt, Human
cacacgguaggggcaaggaggcc

SEQ ID NO: 1032678 - RNA, 22 nt, Human
cacaggaacugaacaccagcgg

SEQ ID NO: 1032679 - RNA, 22 nt, Human
caccacggagcuguuucuggag

SEQ ID NO: 1032680 - RNA, 20 nt, Human
cacccaccgguuuccaaguc

SEQ ID NO: 1032681 - RNA, 20 nt, Human
cagagcuuccauagaaaugg

SEQ ID NO: 1032682 - RNA, 19 nt, Human
caggaaacagcaggggaga

SEQ ID NO: 1032683 - RNA, 22 nt, Human
caggagcuccugcuucagggcu

SEQ ID NO: 1032684 - RNA, 23 nt, Human
caggucacaaagagaugggcuga

SEQ ID NO: 1032685 - RNA, 21 nt, Human
cagugugggccucgggaaccu

SEQ ID NO: 1032686 - RNA, 22 nt, Human
cauucgaaguccucccaggucc

SEQ ID NO: 1032687 - RNA, 24 nt, Human
ccaggaaaaaggauucuggguuuc

SEQ ID NO: 1032688 - RNA, 24 nt, Human
cccacaccagggcgcgggcugggg

SEQ ID NO: 1032689 - RNA, 23 nt, Human
cccaugaugaagauaaugcuaag

SEQ ID NO: 1032690 - RNA, 20 nt, Human
ccccagcagucccccacacc

SEQ ID NO: 1032691 - RNA, 24 nt, Human
cccguaauccuucuccagacaguu

SEQ ID NO: 1032692 - RNA, 18 nt, Human
cccugagguggacacagg

SEQ ID NO: 1032693 - RNA, 18 nt, Human
ccguaauccuucuccaga

SEQ ID NO: 1032694 - RNA, 25 nt, Human
cgcaaaugcucugugaauguugacu

SEQ ID NO: 1032695 - RNA, 21 nt, Human
cuagcuuguucuuagcuuccc

SEQ ID NO: 1032696 - RNA, 20 nt, Human
cugcugagacacccugaggu

SEQ ID NO: 1032697 - RNA, 19 nt, Human
cugugcauuuuggggcugg

SEQ ID NO: 1032698 - RNA, 21 nt, Human
cuucccaaacagacauauuua

SEQ ID NO: 1032699 - RNA, 18 nt, Human
gacaaggauguauuuggc

SEQ ID NO: 1032700 - RNA, 21 nt, Human
gacaguggggugucuggagaa

SEQ ID NO: 1032701 - RNA, 23 nt, Human
gagagagacuugucuacguaaua

SEQ ID NO: 1032702 - RNA, 18 nt, Human
gccucgggaaccuucagc

SEQ ID NO: 1032703 - RNA, 19 nt, Human
gcgcgggcuggggggccca

SEQ ID NO: 1032704 - RNA, 20 nt, Human
gcggggcaggaggaguauug

SEQ ID NO: 1032705 - RNA, 25 nt, Human
gcggggcaggaggaguauuguagaa

SEQ ID NO: 1032706 - RNA, 18 nt, Human
ggacaagcgccggucccc

SEQ ID NO: 1032707 - RNA, 18 nt, Human
ggagaaaaacuggucucu

SEQ ID NO: 1032708 - RNA, 21 nt, Human
ggcaaagaaacccaggaaaaa

SEQ ID NO: 1032709 - RNA, 22 nt, Human
ggcauuugcauaacuggcaggu

SEQ ID NO: 1032710 - RNA, 26 nt, Human
ggccgugauggugauggaugcaaacc

SEQ ID NO: 1032711 - RNA, 19 nt, Human
ggcggggugacugagggcc

SEQ ID NO: 1032712 - RNA, 19 nt, Human
gggcggggcaggaggagua

SEQ ID NO: 1032713 - RNA, 19 nt, Human
gggcucagguguggugggg

SEQ ID NO: 1032714 - RNA, 25 nt, Human
guaaaagauuccccagggauguaaa

SEQ ID NO: 1032715 - RNA, 21 nt, Human
gucagagcuuccauagaaaug

SEQ ID NO: 1032716 - RNA, 18 nt, Human
guccuuuuccccuuuucu

SEQ ID NO: 1032717 - RNA, 18 nt, Human
gugcuggcgagggugcug

SEQ ID NO: 1032718 - RNA, 24 nt, Human
guggggugucuggagaaaaacugg

SEQ ID NO: 1032719 - RNA, 23 nt, Human
guguacugcccuguaacuccagc

SEQ ID NO: 1032720 - RNA, 19 nt, Human
uaaaaggagauggauuugg

SEQ ID NO: 1032721 - RNA, 23 nt, Human
uaaugacaaggauguauuuggcg

SEQ ID NO: 1032722 - RNA, 18 nt, Human
uacauggaggugguuucc

SEQ ID NO: 1032723 - RNA, 19 nt, Human
uagaaaacacugaaguuac

SEQ ID NO: 1032724 - RNA, 19 nt, Human
uagauugaaucuggacacu

SEQ ID NO: 1032725 - RNA, 23 nt, Human
uagcucccacauuugccaauucu

SEQ ID NO: 1032726 - RNA, 21 nt, Human
uauuggcucucuguucacuag

SEQ ID NO: 1032727 - RNA, 26 nt, Human
ucaaauauacuauaugaugacccaca

SEQ ID NO: 1032728 - RNA, 23 nt, Human
ucagcccugcacuuggggcacag

SEQ ID NO: 1032729 - RNA, 18 nt, Human
ucagccgcaccacggagc

SEQ ID NO: 1032730 - RNA, 20 nt, Human
ucaucugggagaugacuaug

SEQ ID NO: 1032731 - RNA, 25 nt, Human
uccaggucacaaagagaugggcuga

SEQ ID NO: 1032732 - RNA, 21 nt, Human
ucgcuuauuggcucucuguuc

SEQ ID NO: 1032733 - RNA, 23 nt, Human
ucuccucuuugggcggcagcuuu

SEQ ID NO: 1032734 - RNA, 24 nt, Human
ucucuagacagacagucaucgcuu

SEQ ID NO: 1032735 - RNA, 23 nt, Human
ucucugaugccgaccuggauggg

SEQ ID NO: 1032736 - RNA, 21 nt, Human
ucucugaugggcaggaaacag

SEQ ID NO: 1032737 - RNA, 21 nt, Human
ucuggagaaaaacuggucucu

SEQ ID NO: 1032738 - RNA, 20 nt, Human
ucuguuuggcuugggucagu

SEQ ID NO: 1032739 - RNA, 19 nt, Human
ugaauggacaguugguugg

SEQ ID NO: 1032740 - RNA, 21 nt, Human
ugaauggacaguugguuggca

SEQ ID NO: 1032741 - RNA, 25 nt, Human
ugacccaguacuugcgucucucaca

SEQ ID NO: 1032742 - RNA, 20 nt, Human
ugacuuauucucaucaauca

SEQ ID NO: 1032743 - RNA, 21 nt, Human
ugagcaauggcacacgguagg

SEQ ID NO: 1032744 - RNA, 21 nt, Human
ugcauaacuggcaggugcuga

SEQ ID NO: 1032745 - RNA, 21 nt, Human
ugccaauucuguguuuuccaa

SEQ ID NO: 1032746 - RNA, 20 nt, Human
ugcugagacacccugaggug

SEQ ID NO: 1032747 - RNA, 24 nt, Human
ugcugagacucagaacagucuucg

SEQ ID NO: 1032748 - RNA, 18 nt, Human
uggaaaagaaccacucca

SEQ ID NO: 1032749 - RNA, 19 nt, Human
uggaagaacagacagcaaa

SEQ ID NO: 1032750 - RNA, 20 nt, Human
uggaagaacagacagcaaag

SEQ ID NO: 1032751 - RNA, 25 nt, Human
uggaagaacagacagcagcgucgac

SEQ ID NO: 1032752 - RNA, 20 nt, Human
ugggcgccauuggccagagc

SEQ ID NO: 1032753 - RNA, 27 nt, Human
uggggacggagagagacuuccccgagg

SEQ ID NO: 1032754 - RNA, 18 nt, Human
uggggcuggcaauuugag

SEQ ID NO: 1032755 - RNA, 21 nt, Human
uggucagcagggcagccugug

SEQ ID NO: 1032756 - RNA, 24 nt, Human
uguaaacaaacuugcuuguaucag

SEQ ID NO: 1032757 - RNA, 19 nt, Human
uguaaggggcaaagaaacc

SEQ ID NO: 1032758 - RNA, 18 nt, Human
ugugggcucagaaagguc

SEQ ID NO: 1032759 - RNA, 20 nt, Human
uuacaaccaagucacagcau

SEQ ID NO: 1032760 - RNA, 21 nt, Human
uuacgaacuuccagugcuucu

SEQ ID NO: 1032761 - RNA, 24 nt, Human
uucaaauauacuauaugaugaccc

SEQ ID NO: 1032762 - RNA, 21 nt, Human
uucacuaggccaucuacucca

SEQ ID NO: 1032763 - RNA, 22 nt, Human
uuccagcgcuggccuacgaggu

SEQ ID NO: 1032764 - RNA, 24 nt, Human
uugugagcgagaaaugaacugagg

SEQ ID NO: 1032765 - RNA, 23 nt, Human
uuuccugacaguggggugucugg

SEQ ID NO: 1032766 - RNA, 19 nt, Human
uuugagguggcucaauggg

SEQ ID NO: 1032767 - RNA, 18 nt, Human
uuuggaagaacagacagc

SEQ ID NO: 1032768 - RNA, 20 nt, Human
uuugugaugccagggucucc

SEQ ID NO: 1032769 - RNA, 24 nt, Human
aaggaucuaguucuccccugggug

SEQ ID NO: 1032770 - RNA, 20 nt, Human
acaaguucuucaggaauaaa

SEQ ID NO: 1032771 - RNA, 20 nt, Human
acuccaaggacacugggaag

SEQ ID NO: 1032772 - RNA, 19 nt, Human
agcagcaucccagcauggc

SEQ ID NO: 1032773 - RNA, 24 nt, Human
aggaggauggugagaugcuguggu

SEQ ID NO: 1032774 - RNA, 27 nt, Human
aggaggauggugagaugcugugguucg

SEQ ID NO: 1032775 - RNA, 20 nt, Human
aggggcuggagggcagccuc

SEQ ID NO: 1032776 - RNA, 18 nt, Human
auggcugcggaguaaaca

SEQ ID NO: 1032777 - RNA, 24 nt, Human
caacacuccaaggacacugggaag

SEQ ID NO: 1032778 - RNA, 20 nt, Human
caaccaccccaccugucugc

SEQ ID NO: 1032779 - RNA, 21 nt, Human
cacuggcaggugggauaacag

SEQ ID NO: 1032780 - RNA, 19 nt, Human
ccaccugucugcuuaauuu

SEQ ID NO: 1032781 - RNA, 22 nt, Human
ccaccugucugcuuaauuugaa

SEQ ID NO: 1032782 - RNA, 22 nt, Human
ccagcagcaucccagcauggcu

SEQ ID NO: 1032783 - RNA, 24 nt, Human
ccccugggugcuggcugucuccuc

SEQ ID NO: 1032784 - RNA, 24 nt, Human
ccugcuuugggaagaaccaacacu

SEQ ID NO: 1032785 - RNA, 21 nt, Human
ccugucugcuuaauuugaaag

SEQ ID NO: 1032786 - RNA, 22 nt, Human
cuccaaggacacugggaagaca

SEQ ID NO: 1032787 - RNA, 21 nt, Human
cuccaaugugucagggcagcu

SEQ ID NO: 1032788 - RNA, 22 nt, Human
gaaggggcuggagggcagccuc

SEQ ID NO: 1032789 - RNA, 19 nt, Human
ggaagaaccaacacuccaa

SEQ ID NO: 1032790 - RNA, 22 nt, Human
ggaagacacacgaguugccccu

SEQ ID NO: 1032791 - RNA, 23 nt, Human
gucagggcagcugugcuccccgc

SEQ ID NO: 1032792 - RNA, 24 nt, Human
gugggauaacaggaggauggugag

SEQ ID NO: 1032793 - RNA, 21 nt, Human
uagcauucuugucuuucucca

SEQ ID NO: 1032794 - RNA, 20 nt, Human
uauccugcuuugggaagaac

SEQ ID NO: 1032795 - RNA, 23 nt, Human
ucauucuguaugacaaccacccc

SEQ ID NO: 1032796 - RNA, 21 nt, Human
ucuggcacuggcaggugggau

SEQ ID NO: 1032797 - RNA, 23 nt, Human
ucuguaugacaaccaccccaccu

SEQ ID NO: 1032798 - RNA, 23 nt, Human
ucuuucuccaggcugcauccugc

SEQ ID NO: 1032799 - RNA, 22 nt, Human
ugcuccccgccagcagcauccc

SEQ ID NO: 1032800 - RNA, 19 nt, Human
ugcuggcugucuccuccac

SEQ ID NO: 1032801 - RNA, 20 nt, Human
uggagggcagccucugucca

SEQ ID NO: 1032802 - RNA, 19 nt, Human
ugggaagaaccaacacucc

SEQ ID NO: 1032803 - RNA, 25 nt, Human
aagaaagaaauauugcucaugaaga

SEQ ID NO: 1032804 - RNA, 21 nt, Human
aagauuuuugugcccagcuuu

SEQ ID NO: 1032805 - RNA, 18 nt, Human
cacucuagaacuugacuu

SEQ ID NO: 1032806 - RNA, 23 nt, Human
uauucagaaguacagaaaauaac

SEQ ID NO: 1032807 - RNA, 25 nt, Human
ugaauaauaaaacauucuauuaaga

SEQ ID NO: 1032808 - RNA, 19 nt, Human
uugcacauuuauucagaag

SEQ ID NO: 1032809 - RNA, 24 nt, Human
aggucuuucugcuuaggaaaaucc

SEQ ID NO: 1032810 - RNA, 21 nt, Human
caccggugcccugcuugcucc

SEQ ID NO: 1032811 - RNA, 23 nt, Human
caucuggaagcccauaugcguuc

SEQ ID NO: 1032812 - RNA, 19 nt, Human
ccaccggugcccugcuugc

SEQ ID NO: 1032813 - RNA, 20 nt, Human
ccagggaccagaggcuggag

SEQ ID NO: 1032814 - RNA, 23 nt, Human
cccagaggcaccugcuccaccgg

SEQ ID NO: 1032815 - RNA, 19 nt, Human
ccccagaggcaccugcucc

SEQ ID NO: 1032816 - RNA, 24 nt, Human
ccggugcccugcuugcucccaggg

SEQ ID NO: 1032817 - RNA, 21 nt, Human
cgucugcccugcgcgcacgcg

SEQ ID NO: 1032818 - RNA, 18 nt, Human
gagacauuugauuggcag

SEQ ID NO: 1032819 - RNA, 28 nt, Human
gaggcaccugcuccaccggucgaccuac

SEQ ID NO: 1032820 - RNA, 18 nt, Human
gcaaauaugacuuucuga

SEQ ID NO: 1032821 - RNA, 20 nt, Human
uaggaaaaucccaaaagaga

SEQ ID NO: 1032822 - RNA, 19 nt, Human
uaggaugaggucuuucugc

SEQ ID NO: 1032823 - RNA, 24 nt, Human
ucaaauagaaucacccucccugcc

SEQ ID NO: 1032824 - RNA, 23 nt, Human
uccaucauuuuucuuuugaaaca

SEQ ID NO: 1032825 - RNA, 22 nt, Human
ucgucuccgcucuaccgucugc

SEQ ID NO: 1032826 - RNA, 21 nt, Human
ugaaagcauuuucuuuuugau

SEQ ID NO: 1032827 - RNA, 23 nt, Human
ugagccuuucccuccagcaaucu

SEQ ID NO: 1032828 - RNA, 18 nt, Human
ugagcgucaucuggaagc

SEQ ID NO: 1032829 - RNA, 23 nt, Human
ugcuccaccggugcccugcuugc

SEQ ID NO: 1032830 - RNA, 20 nt, Human
uggaggaacuggccuagcug

SEQ ID NO: 1032831 - RNA, 21 nt, Human
uucucauacaaaaugagacau

SEQ ID NO: 1032832 - RNA, 19 nt, Human
uuuguuaggaugaggucuu

SEQ ID NO: 1032833 - RNA, 23 nt, Human
uuuguuaggaugaggucuuucug

SEQ ID NO: 1032834 - RNA, 25 nt, Human
accaaggagacugcagucaaauaaa

SEQ ID NO: 1032835 - RNA, 18 nt, Human
augucuuauggucagaaa

SEQ ID NO: 1032836 - RNA, 18 nt, Human
caccaccugugccucugc

SEQ ID NO: 1032837 - RNA, 18 nt, Human
caccaccugugccucugc

SEQ ID NO: 1032838 - RNA, 26 nt, Human
cgccucuacugucugccaccaccugu

SEQ ID NO: 1032839 - RNA, 23 nt, Human
cuaacacauccaccuuggcaaaa

SEQ ID NO: 1032840 - RNA, 19 nt, Human
cuacugucugccaccaccu

SEQ ID NO: 1032841 - RNA, 24 nt, Human
cuagcugaauuugugauuuccuuu

SEQ ID NO: 1032842 - RNA, 24 nt, Human
cucacagcuuuggccacacacucc

SEQ ID NO: 1032843 - RNA, 20 nt, Human
gacuugggcaauguggccag

SEQ ID NO: 1032844 - RNA, 21 nt, Human
gggcaauguggccaggagggc

SEQ ID NO: 1032845 - RNA, 20 nt, Human
ggucagaaaaaucaacauuu

SEQ ID NO: 1032846 - RNA, 27 nt, Human
uaaauacauaauacagaagccugugug

SEQ ID NO: 1032847 - RNA, 19 nt, Human
uaugucuuauggucagaaa

SEQ ID NO: 1032848 - RNA, 19 nt, Human
uauuuuucccauuuuguuu

SEQ ID NO: 1032849 - RNA, 18 nt, Human
uccuaggccgaggcuaug

SEQ ID NO: 1032850 - RNA, 22 nt, Human
ugaaaaguacugaaaaugcuau

SEQ ID NO: 1032851 - RNA, 22 nt, Human
ugaaaaugcuauuacuagcuga

SEQ ID NO: 1032852 - RNA, 22 nt, Human
ugaguuauccuuauuuuuccca

SEQ ID NO: 1032853 - RNA, 24 nt, Human
ugaguuauccuuauuuuucccauu

SEQ ID NO: 1032854 - RNA, 19 nt, Human
ugccaccaccugugccucu

SEQ ID NO: 1032855 - RNA, 18 nt, Human
uguccuaggccgaggcua

SEQ ID NO: 1032856 - RNA, 21 nt, Human
uguguauuuacuuaguuuaug

SEQ ID NO: 1032857 - RNA, 24 nt, Human
uuauggucagaaaaaucaacauuu

SEQ ID NO: 1032858 - RNA, 18 nt, Human
aaacagauacuacacgca

SEQ ID NO: 1032859 - RNA, 25 nt, Human
accaaggagacugcagucaaauaaa

SEQ ID NO: 1032860 - RNA, 24 nt, Human
acuaacacauccaccuuggcaaaa

SEQ ID NO: 1032861 - RNA, 21 nt, Human
agcaggcuguacagcagcagc

SEQ ID NO: 1032862 - RNA, 20 nt, Human
agguaugcucaaagaucuau

SEQ ID NO: 1032863 - RNA, 22 nt, Human
aguugcuucuucuuauuucuac

SEQ ID NO: 1032864 - RNA, 18 nt, Human
augucuuauggucagaaa

SEQ ID NO: 1032865 - RNA, 18 nt, Human
caccaccugugccucugc

SEQ ID NO: 1032866 - RNA, 18 nt, Human
caccaccugugccucugc

SEQ ID NO: 1032867 - RNA, 18 nt, Human
cacgacaggucaguaugu

SEQ ID NO: 1032868 - RNA, 19 nt, Human
ccuggcuggaggccugccg

SEQ ID NO: 1032869 - RNA, 22 nt, Human
cgaaaaguacugaaaaugcuau

SEQ ID NO: 1032870 - RNA, 26 nt, Human
cgccucuacugucugccaccaccugu

SEQ ID NO: 1032871 - RNA, 19 nt, Human
cuacugucugccaccaccu

SEQ ID NO: 1032872 - RNA, 24 nt, Human
cuagcugaauuugugauuuccuuu

SEQ ID NO: 1032873 - RNA, 24 nt, Human
cucacagcuuuggccacgcacucc

SEQ ID NO: 1032874 - RNA, 22 nt, Human
cuccugccauccuguccucagc

SEQ ID NO: 1032875 - RNA, 20 nt, Human
gacuugggcaauguggccag

SEQ ID NO: 1032876 - RNA, 21 nt, Human
gcagucaaauaaaacagauac

SEQ ID NO: 1032877 - RNA, 21 nt, Human
gggcaauguggccaggagggc

SEQ ID NO: 1032878 - RNA, 20 nt, Human
ggucagaaaaaucaacauuu

SEQ ID NO: 1032879 - RNA, 22 nt, Human
gugcacacgacaggucaguaug

SEQ ID NO: 1032880 - RNA, 27 nt, Human
uaaauacauaauacagaagccugugug

SEQ ID NO: 1032881 - RNA, 19 nt, Human
uaugucuuauggucagaaa

SEQ ID NO: 1032882 - RNA, 19 nt, Human
uauuuuucccauuuuguuu

SEQ ID NO: 1032883 - RNA, 20 nt, Human
ucccggucacgaaccuggug

SEQ ID NO: 1032884 - RNA, 18 nt, Human
uccuaggccgaggcuaug

SEQ ID NO: 1032885 - RNA, 21 nt, Human
uccucagcuccugccuuccuc

SEQ ID NO: 1032886 - RNA, 21 nt, Human
ugaaaaugcuauuacuagcug

SEQ ID NO: 1032887 - RNA, 22 nt, Human
ugaguuauccuuauuuuuccca

SEQ ID NO: 1032888 - RNA, 24 nt, Human
ugaguuauccuuauuuuucccauu

SEQ ID NO: 1032889 - RNA, 19 nt, Human
ugccaccaccugugccucu

SEQ ID NO: 1032890 - RNA, 18 nt, Human
uguccuaggccgaggcua

SEQ ID NO: 1032891 - RNA, 23 nt, Human
ugugauaugaugagguaucucca

SEQ ID NO: 1032892 - RNA, 24 nt, Human
uuauggucagaaaaaucaacauuu

SEQ ID NO: 1032893 - RNA, 23 nt, Human
uugaugcacuccuggcuggaggc

SEQ ID NO: 1032894 - RNA, 19 nt, Human
caccacacuuccguccucc

SEQ ID NO: 1032895 - RNA, 22 nt, Human
caggagguuagacaccuccccu

SEQ ID NO: 1032896 - RNA, 21 nt, Human
ccccugaaacugcggcuucug

SEQ ID NO: 1032897 - RNA, 23 nt, Human
cccuccaggagguuagacaccuc

SEQ ID NO: 1032898 - RNA, 24 nt, Human
cuccaggagguuagacaccucccc

SEQ ID NO: 1032899 - RNA, 19 nt, Human
cuuggagcacagccucggc

SEQ ID NO: 1032900 - RNA, 19 nt, Human
gccucggccuccaugauuu

SEQ ID NO: 1032901 - RNA, 22 nt, Human
uccagaggaaacgcagccucgu

SEQ ID NO: 1032902 - RNA, 19 nt, Human
ucccugagaaacaggucug

SEQ ID NO: 1032903 - RNA, 19 nt, Human
ucugcuguguccucccucc

SEQ ID NO: 1032904 - RNA, 23 nt, Human
ugacaucauagauggcuucucca

SEQ ID NO: 1032905 - RNA, 19 nt, Human
ugagaaacaggucugcugu

SEQ ID NO: 1032906 - RNA, 19 nt, Human
uuccccaaugacaucauag

SEQ ID NO: 1032907 - RNA, 19 nt, Human
uuuccccaaugacaucaua

SEQ ID NO: 1032908 - RNA, 25 nt, Human
aaacaaaccaaucucuguucccaag

SEQ ID NO: 1032909 - RNA, 25 nt, Human
aaagagcccagauucgaauccaggc

SEQ ID NO: 1032910 - RNA, 19 nt, Human
aaagaugguugcagauggu

SEQ ID NO: 1032911 - RNA, 20 nt, Human
aacaagacgacaaacagaaa

SEQ ID NO: 1032912 - RNA, 22 nt, Human
aaccauagcaggagcagcacca

SEQ ID NO: 1032913 - RNA, 18 nt, Human
aaccugagccaacccaca

SEQ ID NO: 1032914 - RNA, 21 nt, Human
aagaggugcuggugcagcaca

SEQ ID NO: 1032915 - RNA, 21 nt, Human
aagaggugcuggugcagcaca

SEQ ID NO: 1032916 - RNA, 21 nt, Human
aagugugaagggcagccacag

SEQ ID NO: 1032917 - RNA, 21 nt, Human
acagcagcgaggugguauagc

SEQ ID NO: 1032918 - RNA, 18 nt, Human
acagccuccucccggcca

SEQ ID NO: 1032919 - RNA, 23 nt, Human
acagggcccugggcucucuggag

SEQ ID NO: 1032920 - RNA, 24 nt, Human
acaguguggaggcagcaaaucaac

SEQ ID NO: 1032921 - RNA, 23 nt, Human
acgcaggcccagggagccccccu

SEQ ID NO: 1032922 - RNA, 24 nt, Human
agaaaauguugaaugaagcccagg

SEQ ID NO: 1032923 - RNA, 19 nt, Human
agacaguggaacagcagcg

SEQ ID NO: 1032924 - RNA, 18 nt, Human
agaggagagcaauagaag

SEQ ID NO: 1032925 - RNA, 18 nt, Human
agcagcuggcagguccug

SEQ ID NO: 1032926 - RNA, 18 nt, Human
aggcagcaaaucaacaag

SEQ ID NO: 1032927 - RNA, 19 nt, Human
aggcaucaucugaguuaca

SEQ ID NO: 1032928 - RNA, 19 nt, Human
aggcuugagaaacggcacc

SEQ ID NO: 1032929 - RNA, 22 nt, Human
agggagccccccucugccaaag

SEQ ID NO: 1032930 - RNA, 23 nt, Human
agguagcagguauagcuucaggg

SEQ ID NO: 1032931 - RNA, 26 nt, Human
aucaucuccauuucacagaugagaaa

SEQ ID NO: 1032932 - RNA, 23 nt, Human
augaagcagcuggcagguccugc

SEQ ID NO: 1032933 - RNA, 25 nt, Human
augaugugugccaggaguugccccc

SEQ ID NO: 1032934 - RNA, 21 nt, Human
augcacaguaaacaaaccaau

SEQ ID NO: 1032935 - RNA, 22 nt, Human
caaagcccaugaugugugccag

SEQ ID NO: 1032936 - RNA, 18 nt, Human
cacaguguuaucaucucc

SEQ ID NO: 1032937 - RNA, 20 nt, Human
caccaacaauaugccaugcc

SEQ ID NO: 1032938 - RNA, 21 nt, Human
caccaacaauaugccaugccc

SEQ ID NO: 1032939 - RNA, 24 nt, Human
caccagggaugcacaguaaacaaa

SEQ ID NO: 1032940 - RNA, 19 nt, Human
cagaaacacuggaaguguu

SEQ ID NO: 1032941 - RNA, 19 nt, Human
cagccuccucccggccaag

SEQ ID NO: 1032942 - RNA, 19 nt, Human
cagcucuugccuuccaggg

SEQ ID NO: 1032943 - RNA, 20 nt, Human
cagcucuugccuuccagggc

SEQ ID NO: 1032944 - RNA, 22 nt, Human
cagggcccugggcucucuggag

SEQ ID NO: 1032945 - RNA, 23 nt, Human
caucuccauuucacagaugagaa

SEQ ID NO: 1032946 - RNA, 21 nt, Human
ccaaaggcuggcugcugcacc

SEQ ID NO: 1032947 - RNA, 23 nt, Human
ccaaaggcuggcugcugcaccca

SEQ ID NO: 1032948 - RNA, 19 nt, Human
ccacacaccuuucauguga

SEQ ID NO: 1032949 - RNA, 25 nt, Human
ccacacaccuuucaugugaccugaa

SEQ ID NO: 1032950 - RNA, 20 nt, Human
ccacagacucacgacuuagg

SEQ ID NO: 1032951 - RNA, 23 nt, Human
ccaccugugggccucauaagggc

SEQ ID NO: 1032952 - RNA, 27 nt, Human
ccagagcuguggucagaacacggggag

SEQ ID NO: 1032953 - RNA, 22 nt, Human
cccaaggagcugacagugugga

SEQ ID NO: 1032954 - RNA, 18 nt, Human
cccagggagccccccucu

SEQ ID NO: 1032955 - RNA, 19 nt, Human
ccugaaugccaaccuaaga

SEQ ID NO: 1032956 - RNA, 24 nt, Human
cgagaagaagcccuguggaaccau

SEQ ID NO: 1032957 - RNA, 19 nt, Human
cgaggacaucagagcagcc

SEQ ID NO: 1032958 - RNA, 21 nt, Human
cucagcuuaaccugagccaac

SEQ ID NO: 1032959 - RNA, 20 nt, Human
cucauuguagaaauggaaag

SEQ ID NO: 1032960 - RNA, 18 nt, Human
cucugccaaaggcuggcu

SEQ ID NO: 1032961 - RNA, 21 nt, Human
cucuugccuuccagggcuauu

SEQ ID NO: 1032962 - RNA, 22 nt, Human
cuggugcagcacagccuccucc

SEQ ID NO: 1032963 - RNA, 21 nt, Human
cuguggucagaacacgggagc

SEQ ID NO: 1032964 - RNA, 24 nt, Human
cuugcaauuaacaugaggcaggga

SEQ ID NO: 1032965 - RNA, 24 nt, Human
gaaugccaaaagcagcagcucugc

SEQ ID NO: 1032966 - RNA, 21 nt, Human
gaaugccaaccuaagacacag

SEQ ID NO: 1032967 - RNA, 21 nt, Human
gagaaaauggggacucagccg

SEQ ID NO: 1032968 - RNA, 22 nt, Human
gagagcaauagaagaggugccg

SEQ ID NO: 1032969 - RNA, 19 nt, Human
gagaggcaggaauggaggg

SEQ ID NO: 1032970 - RNA, 18 nt, Human
gagccaacccacagacuc

SEQ ID NO: 1032971 - RNA, 18 nt, Human
gaggcaggaauggaggga

SEQ ID NO: 1032972 - RNA, 25 nt, Human
gcaaaggaccaugacagcccccuca

SEQ ID NO: 1032973 - RNA, 26 nt, Human
gcaaaucaacaagacgacaaacagaa

SEQ ID NO: 1032974 - RNA, 20 nt, Human
gcuugugugccuccaaagcc

SEQ ID NO: 1032975 - RNA, 19 nt, Human
ggaacgguggacagaggaa

SEQ ID NO: 1032976 - RNA, 23 nt, Human
ggagggagcgaggacaucagagc

SEQ ID NO: 1032977 - RNA, 23 nt, Human
ggaguugccccugcucucugugc

SEQ ID NO: 1032978 - RNA, 22 nt, Human
ggcccagcaaggagccaugaga

SEQ ID NO: 1032979 - RNA, 19 nt, Human
gggccucuacccuggauuu

SEQ ID NO: 1032980 - RNA, 22 nt, Human
ggggaaucugggagaccucucu

SEQ ID NO: 1032981 - RNA, 24 nt, Human
ggugaugcggcugagagaggcaga

SEQ ID NO: 1032982 - RNA, 18 nt, Human
gucugcaggcagaaugcu

SEQ ID NO: 1032983 - RNA, 19 nt, Human
gucugcaggcagaaugcug

SEQ ID NO: 1032984 - RNA, 18 nt, Human
gugagaggcaggaaugga

SEQ ID NO: 1032985 - RNA, 19 nt, Human
gugcagcacagccuccucc

SEQ ID NO: 1032986 - RNA, 18 nt, Human
uaagggcaagcucggccc

SEQ ID NO: 1032987 - RNA, 21 nt, Human
uagcaggagcagcaccaugaa

SEQ ID NO: 1032988 - RNA, 22 nt, Human
uagcuugucugccauggagauc

SEQ ID NO: 1032989 - RNA, 21 nt, Human
uauagcgggguccccucugcc

SEQ ID NO: 1032990 - RNA, 20 nt, Human
uaucugguugugugugugug

SEQ ID NO: 1032991 - RNA, 20 nt, Human
ucaaaacacaucaugcaggu

SEQ ID NO: 1032992 - RNA, 18 nt, Human
ucuguucccaaggagcug

SEQ ID NO: 1032993 - RNA, 23 nt, Human
ugaagagcuagauagaaaauguu

SEQ ID NO: 1032994 - RNA, 20 nt, Human
ugaccugcgagaagaagccc

SEQ ID NO: 1032995 - RNA, 21 nt, Human
ugaccugcgagaagaagcccu

SEQ ID NO: 1032996 - RNA, 23 nt, Human
ugacucagugcucagggucugca

SEQ ID NO: 1032997 - RNA, 18 nt, Human
ugagagaggcagaggcug

SEQ ID NO: 1032998 - RNA, 24 nt, Human
ugcaaagcccaucacuuuauuuca

SEQ ID NO: 1032999 - RNA, 18 nt, Human
ugcagauggugagacaug

SEQ ID NO: 1033000 - RNA, 18 nt, Human
ugccaaaggcuggcugcc

SEQ ID NO: 1033001 - RNA, 18 nt, Human
ugccaaaggcuggcugcu

SEQ ID NO: 1033002 - RNA, 19 nt, Human
ugccaaaggcuggcugcuc

SEQ ID NO: 1033003 - RNA, 20 nt, Human
ugccaugcccuguucugggc

SEQ ID NO: 1033004 - RNA, 24 nt, Human
ugccauggagaucuuguuaauaac

SEQ ID NO: 1033005 - RNA, 19 nt, Human
ugccccugcucucugugcc

SEQ ID NO: 1033006 - RNA, 19 nt, Human
ugccuggaacgguggacag

SEQ ID NO: 1033007 - RNA, 21 nt, Human
ugccuggaacgguggacagag

SEQ ID NO: 1033008 - RNA, 20 nt, Human
ugcucagggucugcaggcag

SEQ ID NO: 1033009 - RNA, 19 nt, Human
uggaaaggaaacagcucuu

SEQ ID NO: 1033010 - RNA, 19 nt, Human
uggaaaggaaacagcucuu

SEQ ID NO: 1033011 - RNA, 22 nt, Human
uggaagcuccccaugacacugg

SEQ ID NO: 1033012 - RNA, 20 nt, Human
uggcacacagggagagugaa

SEQ ID NO: 1033013 - RNA, 19 nt, Human
uggccacuuuccacacacc

SEQ ID NO: 1033014 - RNA, 20 nt, Human
uggcugagauccccaccugc

SEQ ID NO: 1033015 - RNA, 20 nt, Human
ugggguucuggagggcuugg

SEQ ID NO: 1033016 - RNA, 20 nt, Human
uggucagaacacgggagcag

SEQ ID NO: 1033017 - RNA, 20 nt, Human
uggugagaggcaggaaugga

SEQ ID NO: 1033018 - RNA, 22 nt, Human
ugguuguguguguguggacaau

SEQ ID NO: 1033019 - RNA, 19 nt, Human
ugugugccaggaguugccc

SEQ ID NO: 1033020 - RNA, 20 nt, Human
ugugugccaggaguugcccc

SEQ ID NO: 1033021 - RNA, 23 nt, Human
uguguggacaauggaugcgugca

SEQ ID NO: 1033022 - RNA, 23 nt, Human
uguugaaugaagcccaggcuuga

SEQ ID NO: 1033023 - RNA, 25 nt, Human
uuaugcaccaacaauaugccaugcc

SEQ ID NO: 1033024 - RNA, 19 nt, Human
uucacagaugagaaaaugg

SEQ ID NO: 1033025 - RNA, 22 nt, Human
uuccagugcuuaugcuauugcc

SEQ ID NO: 1033026 - RNA, 21 nt, Human
uugaaugaagcccaggcuuga

SEQ ID NO: 1033027 - RNA, 19 nt, Human
cagcauccgcuuuuucuug

SEQ ID NO: 1033028 - RNA, 18 nt, Human
cuuuccucuucuccucca

SEQ ID NO: 1033029 - RNA, 22 nt, Human
ugucacugccugguacuuccag

SEQ ID NO: 1033030 - RNA, 18 nt, Human
uuccucuucuccuccagg

SEQ ID NO: 1033031 - RNA, 22 nt, Human
uucuccuccaggguggcuguca

SEQ ID NO: 1033032 - RNA, 21 nt, Human
aaggcuuuagugcagcugcuc

SEQ ID NO: 1033033 - RNA, 21 nt, Human
agcugauucugccauccccac

SEQ ID NO: 1033034 - RNA, 21 nt, Human
agugcuuccccuggcugggaa

SEQ ID NO: 1033035 - RNA, 27 nt, Human
cugacagugaaugaagugaccuuuuuc

SEQ ID NO: 1033036 - RNA, 20 nt, Human
gaagugaccuuuuucuuaaa

SEQ ID NO: 1033037 - RNA, 24 nt, Human
gcggaccagggcugugauuagggc

SEQ ID NO: 1033038 - RNA, 23 nt, Human
gcuucugccacugcuucugaggg

SEQ ID NO: 1033039 - RNA, 21 nt, Human
ggacagcaaacagcaaccacu

SEQ ID NO: 1033040 - RNA, 20 nt, Human
uaaaaggacagcaaacagca

SEQ ID NO: 1033041 - RNA, 21 nt, Human
uaaaaggacagcaaacagcaa

SEQ ID NO: 1033042 - RNA, 24 nt, Human
ucuacugcuucugccacugcuucu

SEQ ID NO: 1033043 - RNA, 22 nt, Human
ucuuauggcucugcauguaggu

SEQ ID NO: 1033044 - RNA, 23 nt, Human
ugaaugaagugaccuuuuucuua

SEQ ID NO: 1033045 - RNA, 19 nt, Human
ugacagugaaugaagugac

SEQ ID NO: 1033046 - RNA, 18 nt, Human
ugcagcugcucuuauggc

SEQ ID NO: 1033047 - RNA, 24 nt, Human
uuaaaaggacagcaaacagcaacc

SEQ ID NO: 1033048 - RNA, 20 nt, Human
uucugccauccccacucccc

SEQ ID NO: 1033049 - RNA, 24 nt, Human
uuugagcaaaauugcccugacagu

SEQ ID NO: 1033050 - RNA, 18 nt, Human
agggagagggagcugagg

SEQ ID NO: 1033051 - RNA, 19 nt, Human
cacuggguuucgagggaga

SEQ ID NO: 1033052 - RNA, 21 nt, Human
cagcuucugaguggcaguggg

SEQ ID NO: 1033053 - RNA, 19 nt, Human
cagcuucuuugaagaugau

SEQ ID NO: 1033054 - RNA, 20 nt, Human
ccacuggguuucgagggaga

SEQ ID NO: 1033055 - RNA, 22 nt, Human
cugcuucuucacuucugggugg

SEQ ID NO: 1033056 - RNA, 19 nt, Human
cuggacuccugauuuccua

SEQ ID NO: 1033057 - RNA, 19 nt, Human
gaaauccuuucagcuucuu

SEQ ID NO: 1033058 - RNA, 24 nt, Human
gagggagagggagcugaggccgca

SEQ ID NO: 1033059 - RNA, 18 nt, Human
ggaguauucuggguuugc

SEQ ID NO: 1033060 - RNA, 22 nt, Human
ucuuucuccuugcuggggagua

SEQ ID NO: 1033061 - RNA, 20 nt, Human
ugauuagcuucuuucuccuu

SEQ ID NO: 1033062 - RNA, 22 nt, Human
uggaagaaugaucuggacuccu

SEQ ID NO: 1033063 - RNA, 19 nt, Human
uggcagugggggguuggua

SEQ ID NO: 1033064 - RNA, 25 nt, Human
uggcagugggggguugguaggaaag

SEQ ID NO: 1033065 - RNA, 23 nt, Human
uggguuucgagggagagggagcu

SEQ ID NO: 1033066 - RNA, 21 nt, Human
uucugaguggcaguggggggu

SEQ ID NO: 1033067 - RNA, 22 nt, Human
uugaagaugauuagcuucuuuc

SEQ ID NO: 1033068 - RNA, 21 nt, Human
uuguguaucugcuucuucacu

SEQ ID NO: 1033069 - RNA, 18 nt, Human
uuuucugacagcuucuga

SEQ ID NO: 1033070 - RNA, 22 nt, Human
aagacaucauuaacaggcugaa

SEQ ID NO: 1033071 - RNA, 23 nt, Human
aagacaucauuaacaggcugaag

SEQ ID NO: 1033072 - RNA, 19 nt, Human
aaguaggcagguuuuagga

SEQ ID NO: 1033073 - RNA, 21 nt, Human
aaguauuucgauuaagucuuc

SEQ ID NO: 1033074 - RNA, 20 nt, Human
aaucuucgaggcaagcccaa

SEQ ID NO: 1033075 - RNA, 21 nt, Human
acagcagcaccacgacacagc

SEQ ID NO: 1033076 - RNA, 20 nt, Human
acgccgcagagcagccugac

SEQ ID NO: 1033077 - RNA, 24 nt, Human
agccagaaucuucggaaauggcuu

SEQ ID NO: 1033078 - RNA, 19 nt, Human
auggaucuuaaggucaaca

SEQ ID NO: 1033079 - RNA, 21 nt, Human
caaucuggaaagaagucuagg

SEQ ID NO: 1033080 - RNA, 20 nt, Human
cagcagcaccacgacacagc

SEQ ID NO: 1033081 - RNA, 19 nt, Human
cagcauuaucagcaaugag

SEQ ID NO: 1033082 - RNA, 20 nt, Human
cagccagaaucuucggaaau

SEQ ID NO: 1033083 - RNA, 24 nt, Human
cagccagaaucuucggaaauggcu

SEQ ID NO: 1033084 - RNA, 22 nt, Human
cagcugccacguaggucucugg

SEQ ID NO: 1033085 - RNA, 21 nt, Human
cccgcacgccgcagagcagcc

SEQ ID NO: 1033086 - RNA, 24 nt, Human
ccugccaaugggcccaaucuggaa

SEQ ID NO: 1033087 - RNA, 18 nt, Human
cgucacaggugagcuccu

SEQ ID NO: 1033088 - RNA, 24 nt, Human
cuccgcggacagcagcaccacgac

SEQ ID NO: 1033089 - RNA, 22 nt, Human
cugaccacgcggugcggaggau

SEQ ID NO: 1033090 - RNA, 23 nt, Human
cuucgaggcaagcccaaaccagc

SEQ ID NO: 1033091 - RNA, 20 nt, Human
gaccacgcggugcggaggau

SEQ ID NO: 1033092 - RNA, 22 nt, Human
gagucacagccagaaucuucgg

SEQ ID NO: 1033093 - RNA, 22 nt, Human
gccaaugggcccaaucuggaaa

SEQ ID NO: 1033094 - RNA, 22 nt, Human
ggaacuccucgcugucccgcac

SEQ ID NO: 1033095 - RNA, 21 nt, Human
gggcagcaaggcgggcuugug

SEQ ID NO: 1033096 - RNA, 22 nt, Human
guaaaaucacuggugaaguaca

SEQ ID NO: 1033097 - RNA, 19 nt, Human
uaggucucuggcucaucgu

SEQ ID NO: 1033098 - RNA, 23 nt, Human
uaggucucuggcucaucgucaca

SEQ ID NO: 1033099 - RNA, 23 nt, Human
ucagugacugagucacagccaga

SEQ ID NO: 1033100 - RNA, 19 nt, Human
uccgcggacagcagcacca

SEQ ID NO: 1033101 - RNA, 21 nt, Human
ucuuaaaguccugaaguaggc

SEQ ID NO: 1033102 - RNA, 21 nt, Human
ucuucauccuuuuggcaaaca

SEQ ID NO: 1033103 - RNA, 20 nt, Human
ugaagacaucauuaacaggc

SEQ ID NO: 1033104 - RNA, 24 nt, Human
ugauauggcaaauuagagguaagu

SEQ ID NO: 1033105 - RNA, 22 nt, Human
ugcuucgaguaggaaacaaccu

SEQ ID NO: 1033106 - RNA, 24 nt, Human
uggaaagaagucuaggaacuccuc

SEQ ID NO: 1033107 - RNA, 19 nt, Human
uggaaagcucucugcagca

SEQ ID NO: 1033108 - RNA, 20 nt, Human
uucccaggugaagucaccgu

SEQ ID NO: 1033109 - RNA, 23 nt, Human
uucgaggcaagcccaaaccagca

SEQ ID NO: 1033110 - RNA, 18 nt, Human
uuggugauggugaaugaa

SEQ ID NO: 1033111 - RNA, 24 nt, Human
uuggugauggugaaugaagcccuu

SEQ ID NO: 1033112 - RNA, 23 nt, Human
uuucacagcugccacguaggucu

SEQ ID NO: 1033113 - RNA, 24 nt, Human
aaaccaaaccugcgcccgaagcaa

SEQ ID NO: 1033114 - RNA, 22 nt, Human
aaccagugagaagagguggcuc

SEQ ID NO: 1033115 - RNA, 20 nt, Human
accccaaagaaaaccaaacc

SEQ ID NO: 1033116 - RNA, 22 nt, Human
accuugcucuccgccaccucca

SEQ ID NO: 1033117 - RNA, 19 nt, Human
agacagaggauccagaucu

SEQ ID NO: 1033118 - RNA, 23 nt, Human
agauaaagacagaggauccagau

SEQ ID NO: 1033119 - RNA, 23 nt, Human
agcacauaaggguuagggaaaga

SEQ ID NO: 1033120 - RNA, 27 nt, Human
aggcuacacuggguaaccugaggucuu

SEQ ID NO: 1033121 - RNA, 22 nt, Human
caccaaugacugcugcaggguc

SEQ ID NO: 1033122 - RNA, 18 nt, Human
caccagcgauugccccac

SEQ ID NO: 1033123 - RNA, 24 nt, Human
caccuccaccagcgauugccccac

SEQ ID NO: 1033124 - RNA, 23 nt, Human
caccuugcucuccgccaccucca

SEQ ID NO: 1033125 - RNA, 19 nt, Human
cacuggguaaccugagguc

SEQ ID NO: 1033126 - RNA, 20 nt, Human
cagcauccucagcacuuuuc

SEQ ID NO: 1033127 - RNA, 22 nt, Human
cauaaggguuagggaaagacag

SEQ ID NO: 1033128 - RNA, 23 nt, Human
ccaaugacugcugcagggucugc

SEQ ID NO: 1033129 - RNA, 22 nt, Human
cccaaagaaaaccaaaccugcg

SEQ ID NO: 1033130 - RNA, 19 nt, Human
ccccaaagaaaaccaaacc

SEQ ID NO: 1033131 - RNA, 19 nt, Human
ccgccaccuccaccagcga

SEQ ID NO: 1033132 - RNA, 22 nt, Human
ccucugcaacgcagauaaagac

SEQ ID NO: 1033133 - RNA, 23 nt, Human
ccugcgcccgaagcaacagugac

SEQ ID NO: 1033134 - RNA, 23 nt, Human
cgaagcaacagugaccaucaacg

SEQ ID NO: 1033135 - RNA, 21 nt, Human
cgccauccugggcgaccgcac

SEQ ID NO: 1033136 - RNA, 22 nt, Human
cggggccgaguguuugcgaacc

SEQ ID NO: 1033137 - RNA, 22 nt, Human
cuccaccagcgauugccccacu

SEQ ID NO: 1033138 - RNA, 18 nt, Human
cucuccgccaccuccacc

SEQ ID NO: 1033139 - RNA, 18 nt, Human
cugacuaugugaaagagg

SEQ ID NO: 1033140 - RNA, 21 nt, Human
cugcagggucugcuggccagc

SEQ ID NO: 1033141 - RNA, 18 nt, Human
gaaucaacaacaggggca

SEQ ID NO: 1033142 - RNA, 22 nt, Human
gacugcugcagggucugcuggc

SEQ ID NO: 1033143 - RNA, 19 nt, Human
gccaccuugcucuccgcca

SEQ ID NO: 1033144 - RNA, 21 nt, Human
gccuggacgcaggguuccagc

SEQ ID NO: 1033145 - RNA, 25 nt, Human
ggcaaccccaaagaaaagggaacgc

SEQ ID NO: 1033146 - RNA, 22 nt, Human
gguaaccugaggucuuaggaac

SEQ ID NO: 1033147 - RNA, 20 nt, Human
gguccaguucuggaauggca

SEQ ID NO: 1033148 - RNA, 19 nt, Human
gugguccaguucuggaaug

SEQ ID NO: 1033149 - RNA, 18 nt, Human
uaccuaggcaaccgggag

SEQ ID NO: 1033150 - RNA, 22 nt, Human
ucccggcugccaccuugcucuc

SEQ ID NO: 1033151 - RNA, 21 nt, Human
uccucagcacuuuucuguggu

SEQ ID NO: 1033152 - RNA, 23 nt, Human
uccucugaugggcucccggcugc

SEQ ID NO: 1033153 - RNA, 18 nt, Human
ucucagcucugauucauu

SEQ ID NO: 1033154 - RNA, 18 nt, Human
ucugugguccaguucugg

SEQ ID NO: 1033155 - RNA, 18 nt, Human
ugaaagaggggugguccc

SEQ ID NO: 1033156 - RNA, 21 nt, Human
ugaaagagggguggucccacc

SEQ ID NO: 1033157 - RNA, 18 nt, Human
ugaaauggcaaccccaaa

SEQ ID NO: 1033158 - RNA, 21 nt, Human
ugaaauggcaaccccaaagaa

SEQ ID NO: 1033159 - RNA, 20 nt, Human
ugacgccgccauccugggcg

SEQ ID NO: 1033160 - RNA, 22 nt, Human
ugacuaugugaaagaggggugg

SEQ ID NO: 1033161 - RNA, 24 nt, Human
ugacugcugcagggucugcuggcc

SEQ ID NO: 1033162 - RNA, 19 nt, Human
ugagaagagguggcuccuc

SEQ ID NO: 1033163 - RNA, 22 nt, Human
ugcuggccagcauccucagcac

SEQ ID NO: 1033164 - RNA, 18 nt, Human
uggaauggcaggugacag

SEQ ID NO: 1033165 - RNA, 22 nt, Human
uggaauggcaggugacagggca

SEQ ID NO: 1033166 - RNA, 22 nt, Human
uggcaaccccaaagaaaaccaa

SEQ ID NO: 1033167 - RNA, 18 nt, Human
ugggcucccggcugccac

SEQ ID NO: 1033168 - RNA, 23 nt, Human
uguccuccagcacauaaggguua

SEQ ID NO: 1033169 - RNA, 18 nt, Human
uugcucuccgccaccucc

SEQ ID NO: 1033170 - RNA, 19 nt, Human
uugcucuccgccaccuccc

SEQ ID NO: 1033171 - RNA, 23 nt, Human
aaaaaucagugauuuccggacaa

SEQ ID NO: 1033172 - RNA, 25 nt, Human
aaaacacuucugcucucuuccacug

SEQ ID NO: 1033173 - RNA, 24 nt, Human
aaacagaaugcaaaauuauuucau

SEQ ID NO: 1033174 - RNA, 21 nt, Human
aaacccacaggccugacacaa

SEQ ID NO: 1033175 - RNA, 24 nt, Human
aaagucacacuuggaaaagcaauu

SEQ ID NO: 1033176 - RNA, 24 nt, Human
aacguuaucuuucuugaugagcac

SEQ ID NO: 1033177 - RNA, 18 nt, Human
aaguguuggaguuggacc

SEQ ID NO: 1033178 - RNA, 22 nt, Human
acaccagaaaugauccagcccu

SEQ ID NO: 1033179 - RNA, 22 nt, Human
accacagucauccaccagauca

SEQ ID NO: 1033180 - RNA, 24 nt, Human
acggcaaaugaaaguagucucauc

SEQ ID NO: 1033181 - RNA, 20 nt, Human
agaaacccgacucaaaguca

SEQ ID NO: 1033182 - RNA, 22 nt, Human
agaaauggcucccaaccgcaga

SEQ ID NO: 1033183 - RNA, 23 nt, Human
agacugcaggcugugguccaguu

SEQ ID NO: 1033184 - RNA, 22 nt, Human
agcaacuugccacaagcugcug

SEQ ID NO: 1033185 - RNA, 23 nt, Human
agcgccuacccauacauaauaac

SEQ ID NO: 1033186 - RNA, 19 nt, Human
agcugcagcucagcugcuc

SEQ ID NO: 1033187 - RNA, 21 nt, Human
agcuuccuguugugcuuguau

SEQ ID NO: 1033188 - RNA, 18 nt, Human
aggaaaguaugcauccag

SEQ ID NO: 1033189 - RNA, 20 nt, Human
aggauugggcugaguaaggc

SEQ ID NO: 1033190 - RNA, 21 nt, Human
aggcagcacugucuugaaaag

SEQ ID NO: 1033191 - RNA, 18 nt, Human
aguguuggaguuggaccc

SEQ ID NO: 1033192 - RNA, 21 nt, Human
auccauuguugcucuuccuuc

SEQ ID NO: 1033193 - RNA, 20 nt, Human
augacauucccuauagccaa

SEQ ID NO: 1033194 - RNA, 22 nt, Human
augcgcuuuccaaacauguggu

SEQ ID NO: 1033195 - RNA, 18 nt, Human
caaaauggucaccacuaa

SEQ ID NO: 1033196 - RNA, 23 nt, Human
caaaauugagauuaagagcauac

SEQ ID NO: 1033197 - RNA, 22 nt, Human
caaccuauaaaugcgcuuucca

SEQ ID NO: 1033198 - RNA, 22 nt, Human
caagugcaaugucuccacgcug

SEQ ID NO: 1033199 - RNA, 25 nt, Human
caauagcugagaccccaucauaaau

SEQ ID NO: 1033200 - RNA, 21 nt, Human
cacacaugaauucaugaucag

SEQ ID NO: 1033201 - RNA, 21 nt, Human
cacacuuggaaaagcaauuag

SEQ ID NO: 1033202 - RNA, 20 nt, Human
caccagaucacauaaccgaa

SEQ ID NO: 1033203 - RNA, 20 nt, Human
caccuugcuguccaguuuga

SEQ ID NO: 1033204 - RNA, 24 nt, Human
cacguuuggcucugaagacaaucu

SEQ ID NO: 1033205 - RNA, 19 nt, Human
cacucaguuggaaaaucga

SEQ ID NO: 1033206 - RNA, 21 nt, Human
cacugcuacaucuccuaugua

SEQ ID NO: 1033207 - RNA, 21 nt, Human
cagaucacauaaccgaagcuu

SEQ ID NO: 1033208 - RNA, 23 nt, Human
cagaucuucugguauuaacacau

SEQ ID NO: 1033209 - RNA, 18 nt, Human
cagcccuucacagcucuc

SEQ ID NO: 1033210 - RNA, 19 nt, Human
cagccugaacugaaagaua

SEQ ID NO: 1033211 - RNA, 20 nt, Human
cagcuccuccucccaggucc

SEQ ID NO: 1033212 - RNA, 18 nt, Human
cagguuccagucaaaguc

SEQ ID NO: 1033213 - RNA, 19 nt, Human
cagguuccagucaaagucc

SEQ ID NO: 1033214 - RNA, 21 nt, Human
caucaccuccuugauccugcc

SEQ ID NO: 1033215 - RNA, 26 nt, Human
caucugaauuaucagcacaaucauuc

SEQ ID NO: 1033216 - RNA, 21 nt, Human
ccaaauaucugccacagcagc

SEQ ID NO: 1033217 - RNA, 22 nt, Human
ccagucaaaguccucaucuuuc

SEQ ID NO: 1033218 - RNA, 24 nt, Human
ccauuguugcucuuccuuccucug

SEQ ID NO: 1033219 - RNA, 22 nt, Human
cccaguccaagucauccucaga

SEQ ID NO: 1033220 - RNA, 19 nt, Human
ccccaaugccauuuccaua

SEQ ID NO: 1033221 - RNA, 22 nt, Human
ccgcagaaacccgacucaaagu

SEQ ID NO: 1033222 - RNA, 22 nt, Human
ccuaauccaucuguugccuuga

SEQ ID NO: 1033223 - RNA, 20 nt, Human
ccuacccauacauaauaacc

SEQ ID NO: 1033224 - RNA, 23 nt, Human
ccuauagccaagugggcagaaac

SEQ ID NO: 1033225 - RNA, 23 nt, Human
ccucaucuuucuccugcuuccag

SEQ ID NO: 1033226 - RNA, 19 nt, Human
ccucugaaagggcugccug

SEQ ID NO: 1033227 - RNA, 22 nt, Human
ccugcauuaaggugagugcccc

SEQ ID NO: 1033228 - RNA, 24 nt, Human
ccuggagagaaccaacgguggccc

SEQ ID NO: 1033229 - RNA, 25 nt, Human
ccuggcuccugguccaaucaaaguc

SEQ ID NO: 1033230 - RNA, 19 nt, Human
ccuugauucccaaauaucu

SEQ ID NO: 1033231 - RNA, 21 nt, Human
cgcagaaacccgacucaaagu

SEQ ID NO: 1033232 - RNA, 18 nt, Human
cucaaaaucagcagaaag

SEQ ID NO: 1033233 - RNA, 23 nt, Human
cucaaaaucagcagaaaguucac

SEQ ID NO: 1033234 - RNA, 21 nt, Human
cuccugcuuccaggaacaaag

SEQ ID NO: 1033235 - RNA, 21 nt, Human
cugaagugugcuuugucaccc

SEQ ID NO: 1033236 - RNA, 21 nt, Human
cugacguccacucacacaugu

SEQ ID NO: 1033237 - RNA, 18 nt, Human
cugcugccaauggcccag

SEQ ID NO: 1033238 - RNA, 18 nt, Human
cugggcuaagcaaagggg

SEQ ID NO: 1033239 - RNA, 22 nt, Human
cuguccaguuugagcccacaau

SEQ ID NO: 1033240 - RNA, 21 nt, Human
cugugaguugauauguuguau

SEQ ID NO: 1033241 - RNA, 19 nt, Human
cuuaacuuuccuagcagga

SEQ ID NO: 1033242 - RNA, 18 nt, Human
cuucagaucuucugguau

SEQ ID NO: 1033243 - RNA, 19 nt, Human
cuucugguauuaacacauc

SEQ ID NO: 1033244 - RNA, 18 nt, Human
cuuucccaacucuaccuu

SEQ ID NO: 1033245 - RNA, 18 nt, Human
gaaaagcaauuaguuuca

SEQ ID NO: 1033246 - RNA, 20 nt, Human
gaaauaccagaagcucaugg

SEQ ID NO: 1033247 - RNA, 21 nt, Human
gaaaucacagcgcccacugga

SEQ ID NO: 1033248 - RNA, 20 nt, Human
gaaugccuaaaaacacuucu

SEQ ID NO: 1033249 - RNA, 19 nt, Human
gacacaguaaaauuccauc

SEQ ID NO: 1033250 - RNA, 22 nt, Human
gacagauucuuuggcgaugcac

SEQ ID NO: 1033251 - RNA, 18 nt, Human
gagcaccuggagagaacc

SEQ ID NO: 1033252 - RNA, 18 nt, Human
gagcuaccacacucauuu

SEQ ID NO: 1033253 - RNA, 23 nt, Human
gcagagcaaagcuuucuggauug

SEQ ID NO: 1033254 - RNA, 25 nt, Human
gccaaccccuaaaacccaaucaaag

SEQ ID NO: 1033255 - RNA, 18 nt, Human
gcgaaaggcgcccuagcu

SEQ ID NO: 1033256 - RNA, 21 nt, Human
gcucccaaccgcagaaacccg

SEQ ID NO: 1033257 - RNA, 26 nt, Human
gcucugugccugcugcagggaugcug

SEQ ID NO: 1033258 - RNA, 21 nt, Human
gcugaaugguugccuccaacc

SEQ ID NO: 1033259 - RNA, 20 nt, Human
gcugcagcucagcugcuccc

SEQ ID NO: 1033260 - RNA, 19 nt, Human
gcuuguauaaugugcacag

SEQ ID NO: 1033261 - RNA, 18 nt, Human
ggacuugaaauucuggca

SEQ ID NO: 1033262 - RNA, 19 nt, Human
ggaguuuugccagccacac

SEQ ID NO: 1033263 - RNA, 20 nt, Human
ggaugcugcuagcuuucagg

SEQ ID NO: 1033264 - RNA, 18 nt, Human
gggcugccugcuggaaau

SEQ ID NO: 1033265 - RNA, 23 nt, Human
gggucuucaucacucucaucggg

SEQ ID NO: 1033266 - RNA, 19 nt, Human
gguggaguugggaggucug

SEQ ID NO: 1033267 - RNA, 20 nt, Human
guauaauacucuccaaauca

SEQ ID NO: 1033268 - RNA, 18 nt, Human
guccuuucucugucuuga

SEQ ID NO: 1033269 - RNA, 19 nt, Human
gugaucugcugcuggcucu

SEQ ID NO: 1033270 - RNA, 20 nt, Human
guguggauucgaaugcaggg

SEQ ID NO: 1033271 - RNA, 20 nt, Human
uaaaaacacuucugcucucu

SEQ ID NO: 1033272 - RNA, 22 nt, Human
uaaaacccaaucaaaguuguca

SEQ ID NO: 1033273 - RNA, 21 nt, Human
uaaaaugcccuugagaugcgu

SEQ ID NO: 1033274 - RNA, 25 nt, Human
uaaaaugcccuugagaugcguugag

SEQ ID NO: 1033275 - RNA, 25 nt, Human
uacaaccugcauccucaccaggcac

SEQ ID NO: 1033276 - RNA, 22 nt, Human
uacagucuuacucucaggacac

SEQ ID NO: 1033277 - RNA, 24 nt, Human
uaccuucaaauuugaguuggaagu

SEQ ID NO: 1033278 - RNA, 21 nt, Human
uagugacaaauggaagggcug

SEQ ID NO: 1033279 - RNA, 22 nt, Human
uauagaaccagaaggaaaguau

SEQ ID NO: 1033280 - RNA, 19 nt, Human
uaugcaagcccuggugugg

SEQ ID NO: 1033281 - RNA, 22 nt, Human
ucaaaaucagcagaaaguucac

SEQ ID NO: 1033282 - RNA, 24 nt, Human
ucaaaauugagauuaagagcauac

SEQ ID NO: 1033283 - RNA, 24 nt, Human
ucaaagucacacuuggaaaagcaa

SEQ ID NO: 1033284 - RNA, 20 nt, Human
ucaaauucaaacccacaggc

SEQ ID NO: 1033285 - RNA, 22 nt, Human
ucaauaucaucaauugcagcuc

SEQ ID NO: 1033286 - RNA, 24 nt, Human
ucaauugcagcuccuccucccagg

SEQ ID NO: 1033287 - RNA, 23 nt, Human
ucauuggcaggcaagcagccuga

SEQ ID NO: 1033288 - RNA, 23 nt, Human
ucauuuccaaguguguggucuuu

SEQ ID NO: 1033289 - RNA, 22 nt, Human
uccaaccauuguuugcccugau

SEQ ID NO: 1033290 - RNA, 23 nt, Human
uccaaccauuguuugcccugauu

SEQ ID NO: 1033291 - RNA, 18 nt, Human
uccagucaaaauggucac

SEQ ID NO: 1033292 - RNA, 18 nt, Human
uccagugugaaucuucug

SEQ ID NO: 1033293 - RNA, 19 nt, Human
uccagugugaaucuucugu

SEQ ID NO: 1033294 - RNA, 18 nt, Human
uccauugcauaauagaau

SEQ ID NO: 1033295 - RNA, 20 nt, Human
ucccaaauaucugccacagc

SEQ ID NO: 1033296 - RNA, 18 nt, Human
ucccaacucuaccuucaa

SEQ ID NO: 1033297 - RNA, 23 nt, Human
ucuacagugagguuaaguagaac

SEQ ID NO: 1033298 - RNA, 19 nt, Human
ucuccacaguuaucuacga

SEQ ID NO: 1033299 - RNA, 21 nt, Human
ucuccugcuuccaggaacaaa

SEQ ID NO: 1033300 - RNA, 21 nt, Human
ucucugggcuaagcaaagggg

SEQ ID NO: 1033301 - RNA, 21 nt, Human
ucugguauuaacacaucugcu

SEQ ID NO: 1033302 - RNA, 18 nt, Human
ugaaaagccuguggcucu

SEQ ID NO: 1033303 - RNA, 21 nt, Human
ugaaauacaaccugcauccuc

SEQ ID NO: 1033304 - RNA, 22 nt, Human
ugagaccccaucauaaaugccc

SEQ ID NO: 1033305 - RNA, 18 nt, Human
ugagauuaagagcauaca

SEQ ID NO: 1033306 - RNA, 20 nt, Human
ugagauuaagagcauacaac

SEQ ID NO: 1033307 - RNA, 21 nt, Human
ugagcaccuggagagaaccaa

SEQ ID NO: 1033308 - RNA, 18 nt, Human
ugaggaaacaaacucuuu

SEQ ID NO: 1033309 - RNA, 24 nt, Human
ugaggaaacaaacucuuuauaaag

SEQ ID NO: 1033310 - RNA, 19 nt, Human
ugaguaagacugcaggcug

SEQ ID NO: 1033311 - RNA, 20 nt, Human
ugaucagagucuggaauuaa

SEQ ID NO: 1033312 - RNA, 21 nt, Human
ugaucccgagguggagccugg

SEQ ID NO: 1033313 - RNA, 19 nt, Human
ugccuaaaaacacuucugc

SEQ ID NO: 1033314 - RNA, 23 nt, Human
ugcugcagggaugcugcuagcuu

SEQ ID NO: 1033315 - RNA, 21 nt, Human
ugcugcuggcucugugccugc

SEQ ID NO: 1033316 - RNA, 24 nt, Human
ugcuuucacccauuggcugugagu

SEQ ID NO: 1033317 - RNA, 18 nt, Human
uggaaaagcaauuaguuu

SEQ ID NO: 1033318 - RNA, 24 nt, Human
uggauugggucuuaaaugucuuca

SEQ ID NO: 1033319 - RNA, 18 nt, Human
uggcauuaaggauugggc

SEQ ID NO: 1033320 - RNA, 18 nt, Human
uggcugaaaguugggcuc

SEQ ID NO: 1033321 - RNA, 24 nt, Human
ugugcaccuugcuguccaguuuga

SEQ ID NO: 1033322 - RNA, 18 nt, Human
uguggcucugaagauucu

SEQ ID NO: 1033323 - RNA, 20 nt, Human
ugugguaauagaagcggaag

SEQ ID NO: 1033324 - RNA, 22 nt, Human
uguguggucuuugggaggucuu

SEQ ID NO: 1033325 - RNA, 19 nt, Human
uguuaaguguuggaguugg

SEQ ID NO: 1033326 - RNA, 21 nt, Human
uuaccaggguucugcuuacuu

SEQ ID NO: 1033327 - RNA, 27 nt, Human
uucagaaugaacauaaaaugcccuuga

SEQ ID NO: 1033328 - RNA, 20 nt, Human
uucaugugcucccuuugggc

SEQ ID NO: 1033329 - RNA, 24 nt, Human
uuccagucaaaguccucaucuuuc

SEQ ID NO: 1033330 - RNA, 19 nt, Human
uucuuuggcgaugcacugg

SEQ ID NO: 1033331 - RNA, 22 nt, Human
uugcagcuccuccucccagguc

SEQ ID NO: 1033332 - RNA, 22 nt, Human
uuggaagaggcacugccaguuc

SEQ ID NO: 1033333 - RNA, 20 nt, Human
uuggaagucuucaucaccaa

SEQ ID NO: 1033334 - RNA, 19 nt, Human
uuugaguuggaagucuuca

SEQ ID NO: 1033335 - RNA, 21 nt, Human
uuugcagauacgaaauaccag

SEQ ID NO: 1033336 - RNA, 21 nt, Human
uuuugccagccacaccagccu

SEQ ID NO: 1033337 - RNA, 22 nt, Human
aagugccccagggucggggauc

SEQ ID NO: 1033338 - RNA, 23 nt, Human
aggacaguggcuuuacucugggu

SEQ ID NO: 1033339 - RNA, 18 nt, Human
ccccucaccuggaugagg

SEQ ID NO: 1033340 - RNA, 28 nt, Human
ccgacugccgagccccagaagguuuucc

SEQ ID NO: 1033341 - RNA, 19 nt, Human
ccuucccugcuguccagcu

SEQ ID NO: 1033342 - RNA, 23 nt, Human
cugggugggaccccuucccugcu

SEQ ID NO: 1033343 - RNA, 21 nt, Human
cuugugcaggguagcaccugg

SEQ ID NO: 1033344 - RNA, 18 nt, Human
gaauaggcgagcugugcu

SEQ ID NO: 1033345 - RNA, 20 nt, Human
gaccugagggaccuggaggc

SEQ ID NO: 1033346 - RNA, 25 nt, Human
gagcacccccucaccuggaugagga

SEQ ID NO: 1033347 - RNA, 23 nt, Human
ggaucaggcuugugcaggguagc

SEQ ID NO: 1033348 - RNA, 18 nt, Human
ggcgagcugugcuuggau

SEQ ID NO: 1033349 - RNA, 22 nt, Human
uagggccgagcacccccucacc

SEQ ID NO: 1033350 - RNA, 21 nt, Human
ugaggacaguggcuuuacucu

SEQ ID NO: 1033351 - RNA, 22 nt, Human
ugaggacaguggcuuuacucug

SEQ ID NO: 1033352 - RNA, 24 nt, Human
ugagggaccuggaggccuucuugu

SEQ ID NO: 1033353 - RNA, 20 nt, Human
aaccuggauuuuuauuucca

SEQ ID NO: 1033354 - RNA, 24 nt, Human
aagacaaaccacacaagcuguaag

SEQ ID NO: 1033355 - RNA, 22 nt, Human
caaaccacacaagcuguaacuu

SEQ ID NO: 1033356 - RNA, 18 nt, Human
caaagacaaaccacacaa

SEQ ID NO: 1033357 - RNA, 20 nt, Human
cugugugccaaguucgcccc

SEQ ID NO: 1033358 - RNA, 23 nt, Human
uaaaacuucaugaaguuucacau

SEQ ID NO: 1033359 - RNA, 26 nt, Human
uauauggaauuucaaauugcaugaag

SEQ ID NO: 1033360 - RNA, 21 nt, Human
ucaugaaguuucacauuaagg

SEQ ID NO: 1033361 - RNA, 20 nt, Human
uccaaagacaaaccacacaa

SEQ ID NO: 1033362 - RNA, 22 nt, Human
uccaaagacaaaccacacaagc

SEQ ID NO: 1033363 - RNA, 18 nt, Human
uuccaaagacaaaccaca

SEQ ID NO: 1033364 - RNA, 20 nt, Human
uuccaaagacaaaccacaca

SEQ ID NO: 1033365 - RNA, 24 nt, Human
uuuuuuuuuuuuuuuuuugucauu

SEQ ID NO: 1033366 - RNA, 27 nt, Human
uuuuuuuuuuuuuuuuuuuuuuugggg

SEQ ID NO: 1033367 - RNA, 18 nt, Human
aaaaaaacagagcaagaa

SEQ ID NO: 1033368 - RNA, 23 nt, Human
aaaaaaacagagcaagaagaaga

SEQ ID NO: 1033369 - RNA, 18 nt, Human
aaaaacagagcaagaaga

SEQ ID NO: 1033370 - RNA, 20 nt, Human
aaaggcuggggcuccgagga

SEQ ID NO: 1033371 - RNA, 21 nt, Human
aagaagaagaaagauuucugg

SEQ ID NO: 1033372 - RNA, 22 nt, Human
aagaagaagaaagauuucugga

SEQ ID NO: 1033373 - RNA, 23 nt, Human
aaucauucucccaaaacuaagcc

SEQ ID NO: 1033374 - RNA, 19 nt, Human
acacauccucuggggaaac

SEQ ID NO: 1033375 - RNA, 20 nt, Human
acagagcaagaagaagaaag

SEQ ID NO: 1033376 - RNA, 22 nt, Human
acggaacagagccgggacagaa

SEQ ID NO: 1033377 - RNA, 26 nt, Human
agaagaagaaagauuucuggauagaa

SEQ ID NO: 1033378 - RNA, 18 nt, Human
agaaggaacuccugggca

SEQ ID NO: 1033379 - RNA, 24 nt, Human
agaagucaagguccaaagcuugga

SEQ ID NO: 1033380 - RNA, 24 nt, Human
agcaagaagaagaaagauuucugg

SEQ ID NO: 1033381 - RNA, 22 nt, Human
agggaggagggcgucgaaccua

SEQ ID NO: 1033382 - RNA, 24 nt, Human
cacacccccaucccaaggucaccc

SEQ ID NO: 1033383 - RNA, 23 nt, Human
cacccccaucccaaggucaccuc

SEQ ID NO: 1033384 - RNA, 19 nt, Human
cagccucuuggugcccugg

SEQ ID NO: 1033385 - RNA, 19 nt, Human
caucccaaggucacccuuc

SEQ ID NO: 1033386 - RNA, 19 nt, Human
ccacacccccaucccaagg

SEQ ID NO: 1033387 - RNA, 22 nt, Human
ccaugcagguaaggcaaccuaa

SEQ ID NO: 1033388 - RNA, 22 nt, Human
ccccaucccaaggucacccuuc

SEQ ID NO: 1033389 - RNA, 18 nt, Human
cgggcgcagccacugcga

SEQ ID NO: 1033390 - RNA, 20 nt, Human
cuuaggacccuccuccgccc

SEQ ID NO: 1033391 - RNA, 23 nt, Human
cuuaggacccuccuccgccccac

SEQ ID NO: 1033392 - RNA, 27 nt, Human
gaagaaagauuucuggauagaaauuaa

SEQ ID NO: 1033393 - RNA, 22 nt, Human
gagcaagaagaagaaagauuuc

SEQ ID NO: 1033394 - RNA, 22 nt, Human
gcacacauccucuggggaaacc

SEQ ID NO: 1033395 - RNA, 19 nt, Human
gccuggagcuucauuguuc

SEQ ID NO: 1033396 - RNA, 18 nt, Human
gcgcagccacugcgauau

SEQ ID NO: 1033397 - RNA, 24 nt, Human
gcgcugggugaaaggcuggggcuc

SEQ ID NO: 1033398 - RNA, 21 nt, Human
gcugggugaaaggcuggggcu

SEQ ID NO: 1033399 - RNA, 22 nt, Human
ggaacagagccgggacagaagg

SEQ ID NO: 1033400 - RNA, 23 nt, Human
ggaacagagccgggacagaagga

SEQ ID NO: 1033401 - RNA, 18 nt, Human
ggaggagggcgucgaacc

SEQ ID NO: 1033402 - RNA, 18 nt, Human
ggaggagggcgucgaacc

SEQ ID NO: 1033403 - RNA, 23 nt, Human
gugaaaggcuggggcuccgagga

SEQ ID NO: 1033404 - RNA, 19 nt, Human
uaaaaaaacagagcaagaa

SEQ ID NO: 1033405 - RNA, 21 nt, Human
uaaaguaacagaccacacccc

SEQ ID NO: 1033406 - RNA, 23 nt, Human
uaaaguaacagaccacaccccca

SEQ ID NO: 1033407 - RNA, 28 nt, Human
uaaaguaacagaccacacccccauccca

SEQ ID NO: 1033408 - RNA, 23 nt, Human
uaagcccagccucuuggugcccu

SEQ ID NO: 1033409 - RNA, 21 nt, Human
ucacauuaaaaacagaaacau

SEQ ID NO: 1033410 - RNA, 22 nt, Human
ucauucucccaaaacuaagccc

SEQ ID NO: 1033411 - RNA, 20 nt, Human
ucccaaggucacccuucuug

SEQ ID NO: 1033412 - RNA, 19 nt, Human
uccugggcaaagggaggag

SEQ ID NO: 1033413 - RNA, 23 nt, Human
ucuuaggacccuccuccgcccca

SEQ ID NO: 1033414 - RNA, 18 nt, Human
ugcccuggagaagagaga

SEQ ID NO: 1033415 - RNA, 23 nt, Human
uggagaagagagagccuggagcu

SEQ ID NO: 1033416 - RNA, 18 nt, Human
ugggcaaagggaggaggg

SEQ ID NO: 1033417 - RNA, 23 nt, Human
ugucaaaaauuccagccaccuug

SEQ ID NO: 1033418 - RNA, 21 nt, Human
uuaauuuaaaaaaacagagca

SEQ ID NO: 1033419 - RNA, 20 nt, Human
uucauuguucucuccaaacc

SEQ ID NO: 1033420 - RNA, 20 nt, Human
uuggaggcgcugggugaaag

SEQ ID NO: 1033421 - RNA, 23 nt, Human
agcaaggcaugguggugcagguc

SEQ ID NO: 1033422 - RNA, 19 nt, Human
agccccauggcugcagccc

SEQ ID NO: 1033423 - RNA, 23 nt, Human
agucagaagaugggggccugcaa

SEQ ID NO: 1033424 - RNA, 20 nt, Human
cagccccagccuuagcccca

SEQ ID NO: 1033425 - RNA, 25 nt, Human
cauccucgucccuagaucaggguag

SEQ ID NO: 1033426 - RNA, 20 nt, Human
ccagcaaccaggccuggggc

SEQ ID NO: 1033427 - RNA, 19 nt, Human
ccaggucggccagcaaggc

SEQ ID NO: 1033428 - RNA, 26 nt, Human
cccagccccauggcugcagccccagc

SEQ ID NO: 1033429 - RNA, 22 nt, Human
ccccagccuuagccccaggagc

SEQ ID NO: 1033430 - RNA, 27 nt, Human
ccccauggcugcagccccagccuuagc

SEQ ID NO: 1033431 - RNA, 23 nt, Human
ccugcaaucguagccggcgaagc

SEQ ID NO: 1033432 - RNA, 22 nt, Human
cucagguaagggaauuugaaaa

SEQ ID NO: 1033433 - RNA, 21 nt, Human
cugcagccccagccuuagccc

SEQ ID NO: 1033434 - RNA, 27 nt, Human
cugcagccccagccuuagccccaggag

SEQ ID NO: 1033435 - RNA, 23 nt, Human
gaccacagcugugggcagaccca

SEQ ID NO: 1033436 - RNA, 21 nt, Human
gcagacccagcaaccaggccu

SEQ ID NO: 1033437 - RNA, 20 nt, Human
gguggugcagguccacgagc

SEQ ID NO: 1033438 - RNA, 21 nt, Human
uagccccaggagcaccgggga

SEQ ID NO: 1033439 - RNA, 21 nt, Human
ucccuagaucaggguaggagc

SEQ ID NO: 1033440 - RNA, 22 nt, Human
uccuuguaaucgggcuccuucc

SEQ ID NO: 1033441 - RNA, 24 nt, Human
ucggccagcaaggcaugguggugc

SEQ ID NO: 1033442 - RNA, 19 nt, Human
aaacagaugagaccuccca

SEQ ID NO: 1033443 - RNA, 21 nt, Human
aaacaggaugcucugguucuu

SEQ ID NO: 1033444 - RNA, 21 nt, Human
aagaucugcaauugcagcagg

SEQ ID NO: 1033445 - RNA, 18 nt, Human
agugggugacuuccuaca

SEQ ID NO: 1033446 - RNA, 23 nt, Human
cacagcgccgcuuucuucacgcc

SEQ ID NO: 1033447 - RNA, 19 nt, Human
caccuugauuacucuggcc

SEQ ID NO: 1033448 - RNA, 20 nt, Human
caccuugauuacucuggcca

SEQ ID NO: 1033449 - RNA, 20 nt, Human
cacgccgccgcccccgcugc

SEQ ID NO: 1033450 - RNA, 24 nt, Human
ccaacacuuuguaaauuuccuuuu

SEQ ID NO: 1033451 - RNA, 21 nt, Human
ccaacaggccuuucauaguaa

SEQ ID NO: 1033452 - RNA, 24 nt, Human
ccaccgccuccgcccgggccccua

SEQ ID NO: 1033453 - RNA, 26 nt, Human
cccaaacagaugagaccucccaacuu

SEQ ID NO: 1033454 - RNA, 18 nt, Human
cccgccaccgccuccgcc

SEQ ID NO: 1033455 - RNA, 20 nt, Human
ccgccaccgccuccgcccgg

SEQ ID NO: 1033456 - RNA, 22 nt, Human
ccgcccccgcugccuccauuuu

SEQ ID NO: 1033457 - RNA, 18 nt, Human
ccgccgcccccgcugccu

SEQ ID NO: 1033458 - RNA, 21 nt, Human
ccgccgcccccgcugccucca

SEQ ID NO: 1033459 - RNA, 18 nt, Human
ccgcgcccacagcgccgc

SEQ ID NO: 1033460 - RNA, 18 nt, Human
ccgcgcccacagcgccgc

SEQ ID NO: 1033461 - RNA, 21 nt, Human
ccgcugaagaucugcaauugc

SEQ ID NO: 1033462 - RNA, 23 nt, Human
ccgggccccuacucccgcgccca

SEQ ID NO: 1033463 - RNA, 18 nt, Human
ccuacucccgcgcccaca

SEQ ID NO: 1033464 - RNA, 23 nt, Human
cucccgcgcccacagcgccgcuu

SEQ ID NO: 1033465 - RNA, 21 nt, Human
cuccgcccgggccccuacucc

SEQ ID NO: 1033466 - RNA, 21 nt, Human
cugguucugccugauuuggag

SEQ ID NO: 1033467 - RNA, 21 nt, Human
cuuuucaacgagaacaucugg

SEQ ID NO: 1033468 - RNA, 21 nt, Human
gaaagcagauccuuggguugg

SEQ ID NO: 1033469 - RNA, 22 nt, Human
gacaucuuuggccacuucuugc

SEQ ID NO: 1033470 - RNA, 19 nt, Human
gauaagucgaucuccccgc

SEQ ID NO: 1033471 - RNA, 18 nt, Human
gcaccaccuucucuggcu

SEQ ID NO: 1033472 - RNA, 21 nt, Human
gccugcuugauaagcuucaac

SEQ ID NO: 1033473 - RNA, 22 nt, Human
gcgguucuagugacuauagccu

SEQ ID NO: 1033474 - RNA, 23 nt, Human
gggccccuacucccgcgcccaca

SEQ ID NO: 1033475 - RNA, 23 nt, Human
gggcggcugggucggggcgagcg

SEQ ID NO: 1033476 - RNA, 23 nt, Human
ggggcgagcggcuccgugggccu

SEQ ID NO: 1033477 - RNA, 18 nt, Human
ggucugauucuccuucuu

SEQ ID NO: 1033478 - RNA, 19 nt, Human
gguggagguuuauuuccau

SEQ ID NO: 1033479 - RNA, 22 nt, Human
guccgaacuguccuuaguaggg

SEQ ID NO: 1033480 - RNA, 20 nt, Human
guggagguuuauuuccaucu

SEQ ID NO: 1033481 - RNA, 19 nt, Human
uagcuaggcauccuaaagc

SEQ ID NO: 1033482 - RNA, 22 nt, Human
uagugacuauagccuuagguga

SEQ ID NO: 1033483 - RNA, 18 nt, Human
uagugggugacuuccuac

SEQ ID NO: 1033484 - RNA, 23 nt, Human
uauggcauccacauuuuuugcuu

SEQ ID NO: 1033485 - RNA, 18 nt, Human
ucaaugaugacgugccca

SEQ ID NO: 1033486 - RNA, 21 nt, Human
ucacgccgccgcccccgcugc

SEQ ID NO: 1033487 - RNA, 18 nt, Human
ucauaguacaccaggacu

SEQ ID NO: 1033488 - RNA, 23 nt, Human
uccacauuuuuugcuugcuuuuc

SEQ ID NO: 1033489 - RNA, 21 nt, Human
ucgaucuccccgcugaagauc

SEQ ID NO: 1033490 - RNA, 18 nt, Human
ucuacuuucaguaucuac

SEQ ID NO: 1033491 - RNA, 18 nt, Human
ucucagaaguuuuuaggg

SEQ ID NO: 1033492 - RNA, 23 nt, Human
ucugaagugacaucuuuggccac

SEQ ID NO: 1033493 - RNA, 25 nt, Human
ucugcaauugcagcaggccgggguc

SEQ ID NO: 1033494 - RNA, 18 nt, Human
ucugguucugccugauuu

SEQ ID NO: 1033495 - RNA, 24 nt, Human
ucuuucaaauauuugaagugaaua

SEQ ID NO: 1033496 - RNA, 18 nt, Human
ucuuuggccacuucuugc

SEQ ID NO: 1033497 - RNA, 23 nt, Human
ugaagaucugcaauugcagcagg

SEQ ID NO: 1033498 - RNA, 19 nt, Human
ugaagugaauaguaauguc

SEQ ID NO: 1033499 - RNA, 21 nt, Human
ugaagugaauaguaaugucac

SEQ ID NO: 1033500 - RNA, 19 nt, Human
ugaauaguaaugucaccau

SEQ ID NO: 1033501 - RNA, 20 nt, Human
ugagaccucccaacuugaaa

SEQ ID NO: 1033502 - RNA, 23 nt, Human
ugggucggggcgagcggcuccgu

SEQ ID NO: 1033503 - RNA, 23 nt, Human
ugguucuuguccauuuuccuagc

SEQ ID NO: 1033504 - RNA, 22 nt, Human
uguagcuaggcauccuaaagcc

SEQ ID NO: 1033505 - RNA, 19 nt, Human
uuccguguuugauguagcu

SEQ ID NO: 1033506 - RNA, 22 nt, Human
uucuucacgccgccgcccccgc

SEQ ID NO: 1033507 - RNA, 21 nt, Human
uucuugcuuugcuaaaaauug

SEQ ID NO: 1033508 - RNA, 27 nt, Human
uugaaagcagauccuuggguugguuuu

SEQ ID NO: 1033509 - RNA, 23 nt, Human
uugaaaggaucccugcaccacaa

SEQ ID NO: 1033510 - RNA, 24 nt, Human
uuggaacacguuugggacuaugaa

SEQ ID NO: 1033511 - RNA, 23 nt, Human
uuuugaggacaucgggcggcugg

SEQ ID NO: 1033512 - RNA, 21 nt, Human
agcaauucuuccaggaauugg

SEQ ID NO: 1033513 - RNA, 24 nt, Human
ccccagagagccugcucagaagcc

SEQ ID NO: 1033514 - RNA, 23 nt, Human
cucuucccguuguuucucgggcu

SEQ ID NO: 1033515 - RNA, 22 nt, Human
cugggggcguccaguccucuuc

SEQ ID NO: 1033516 - RNA, 26 nt, Human
cugggggcguccaguccucuuccugu

SEQ ID NO: 1033517 - RNA, 21 nt, Human
cuuccaggaauuggggaugaa

SEQ ID NO: 1033518 - RNA, 24 nt, Human
gaugccagagccccauccuugggg

SEQ ID NO: 1033519 - RNA, 20 nt, Human
ucggaugccagagccccauc

SEQ ID NO: 1033520 - RNA, 30 nt, Human
ugggggcguccaguccucuuccuguggcuu

SEQ ID NO: 1033521 - RNA, 19 nt, Human
uuggugacgaagucuuucu

SEQ ID NO: 1033522 - RNA, 23 nt, Human
accucaaggcggaacuggggagu

SEQ ID NO: 1033523 - RNA, 19 nt, Human
acugaguuuugcuuucucc

SEQ ID NO: 1033524 - RNA, 20 nt, Human
agccugagacagagggacca

SEQ ID NO: 1033525 - RNA, 18 nt, Human
augggaaagggcucuucu

SEQ ID NO: 1033526 - RNA, 22 nt, Human
cuaaugggaaagggcucuucuu

SEQ ID NO: 1033527 - RNA, 19 nt, Human
gaaaaacgccggggauucu

SEQ ID NO: 1033528 - RNA, 25 nt, Human
gcaggggaggaacacgcaguccgga

SEQ ID NO: 1033529 - RNA, 21 nt, Human
gcuuucuccugcgcuugcgca

SEQ ID NO: 1033530 - RNA, 23 nt, Human
ugggaaagggcucuucuugagua

SEQ ID NO: 1033531 - RNA, 19 nt, Human
agaaaggaucccgccaagg

SEQ ID NO: 1033532 - RNA, 21 nt, Human
agaugcuuuagccaugcucag

SEQ ID NO: 1033533 - RNA, 21 nt, Human
auugcugcccagcccacacca

SEQ ID NO: 1033534 - RNA, 23 nt, Human
caagugaauugcugcccagccca

SEQ ID NO: 1033535 - RNA, 20 nt, Human
ccaaggauggccgccucucc

SEQ ID NO: 1033536 - RNA, 25 nt, Human
cccgccaaggauggccgccucucca

SEQ ID NO: 1033537 - RNA, 23 nt, Human
cuccacaccggggcuguuucucc

SEQ ID NO: 1033538 - RNA, 24 nt, Human
cuccuuagaaaggaucccgccaag

SEQ ID NO: 1033539 - RNA, 21 nt, Human
ucucccugugaaugcagagau

SEQ ID NO: 1033540 - RNA, 21 nt, Human
ucuccuucaagugaauugcug

SEQ ID NO: 1033541 - RNA, 18 nt, Human
ugaauugcugcccagccc

SEQ ID NO: 1033542 - RNA, 24 nt, Human
ugacacaaagcuugacucauggaa

SEQ ID NO: 1033543 - RNA, 27 nt, Human
ugacucauggaaggucuucugccggua

SEQ ID NO: 1033544 - RNA, 19 nt, Human
uguccauugggcuugguga

SEQ ID NO: 1033545 - RNA, 18 nt, Human
uguuagagaaucagacag

SEQ ID NO: 1033546 - RNA, 19 nt, Human
uuauuuguccuuuugacac

SEQ ID NO: 1033547 - RNA, 23 nt, Human
uucacaaacugccuguuuauuuc

SEQ ID NO: 1033548 - RNA, 27 nt, Human
aggaauauugggaggaaaccgguaccc

SEQ ID NO: 1033549 - RNA, 22 nt, Human
gggcguugcugcaaagcauccu

SEQ ID NO: 1033550 - RNA, 21 nt, Human
ugagaaggaauauugggagga

SEQ ID NO: 1033551 - RNA, 19 nt, Human
uugcugcaaagcauccugg

SEQ ID NO: 1033552 - RNA, 18 nt, Human
aacccuugugccggcccu

SEQ ID NO: 1033553 - RNA, 24 nt, Human
cacaacccuugugccggcccugac

SEQ ID NO: 1033554 - RNA, 23 nt, Human
cccuugugccggcccugacuggg

SEQ ID NO: 1033555 - RNA, 18 nt, Human
ccuugugccggcccugac

SEQ ID NO: 1033556 - RNA, 23 nt, Human
cuggcuuuggugcacaugcgaca

SEQ ID NO: 1033557 - RNA, 24 nt, Human
gugguccccauggggcacuccugc

SEQ ID NO: 1033558 - RNA, 23 nt, Human
acacucauagacgucagagccac

SEQ ID NO: 1033559 - RNA, 19 nt, Human
agaaaggaucccgccaagg

SEQ ID NO: 1033560 - RNA, 21 nt, Human
auugcugcccagcccacacca

SEQ ID NO: 1033561 - RNA, 23 nt, Human
caagugaauugcugcccagccca

SEQ ID NO: 1033562 - RNA, 18 nt, Human
cacacccuuagcuggccc

SEQ ID NO: 1033563 - RNA, 24 nt, Human
cacacucauagacgucagagccac

SEQ ID NO: 1033564 - RNA, 19 nt, Human
cacuuuguggaucucagag

SEQ ID NO: 1033565 - RNA, 23 nt, Human
cauuugugguuggcauuguggga

SEQ ID NO: 1033566 - RNA, 20 nt, Human
ccaaggauggccgccucucc

SEQ ID NO: 1033567 - RNA, 25 nt, Human
cccgccaaggauggccgccucucca

SEQ ID NO: 1033568 - RNA, 23 nt, Human
cuccacacccgggcuguuucucc

SEQ ID NO: 1033569 - RNA, 24 nt, Human
cuccuuagaaaggaucccgccaag

SEQ ID NO: 1033570 - RNA, 19 nt, Human
cuggcucccaaauucgacu

SEQ ID NO: 1033571 - RNA, 18 nt, Human
cugucaggucccucgcug

SEQ ID NO: 1033572 - RNA, 19 nt, Human
cuucugguguccaaugugc

SEQ ID NO: 1033573 - RNA, 19 nt, Human
gccgccucuccacacccgg

SEQ ID NO: 1033574 - RNA, 19 nt, Human
uagcuggccccauuugugg

SEQ ID NO: 1033575 - RNA, 24 nt, Human
uagcuggccccauuugugguuggc

SEQ ID NO: 1033576 - RNA, 18 nt, Human
ucaggucccucgcuggcu

SEQ ID NO: 1033577 - RNA, 21 nt, Human
ucuccuucaagugaauugcug

SEQ ID NO: 1033578 - RNA, 23 nt, Human
ucugcacacucauagacgucaga

SEQ ID NO: 1033579 - RNA, 24 nt, Human
ucuucugguguccaaugugcugcu

SEQ ID NO: 1033580 - RNA, 18 nt, Human
ugaauugcugcccagccc

SEQ ID NO: 1033581 - RNA, 18 nt, Human
uggaucucagagcugcag

SEQ ID NO: 1033582 - RNA, 18 nt, Human
ugggcagccuccaaagca

SEQ ID NO: 1033583 - RNA, 19 nt, Human
ugucugcacacucauagac

SEQ ID NO: 1033584 - RNA, 21 nt, Human
uguggaucucagagcugcagg

SEQ ID NO: 1033585 - RNA, 19 nt, Human
uucgacugggcagccucca

SEQ ID NO: 1033586 - RNA, 19 nt, Human
uucucccaccacacccuua

SEQ ID NO: 1033587 - RNA, 22 nt, Human
uucucccaccacacccuuagcu

SEQ ID NO: 1033588 - RNA, 22 nt, Human
ccuuugcuuccucagcugucuc

SEQ ID NO: 1033589 - RNA, 20 nt, Human
gcugccgccgccauagcgga

SEQ ID NO: 1033590 - RNA, 18 nt, Human
gggcgggcucaucacucc

SEQ ID NO: 1033591 - RNA, 22 nt, Human
ucagcaggcuccuuugcuuccu

SEQ ID NO: 1033592 - RNA, 22 nt, Human
ucgccaguacgcccucggcugc

SEQ ID NO: 1033593 - RNA, 20 nt, Human
ucggcugccgccgccauagc

SEQ ID NO: 1033594 - RNA, 18 nt, Human
uugcuuccucagcugucu

SEQ ID NO: 1033595 - RNA, 19 nt, Human
agagccccauccuugggga

SEQ ID NO: 1033596 - RNA, 23 nt, Human
aggggccacccagcccccaaguc

SEQ ID NO: 1033597 - RNA, 23 nt, Human
cagagacccugagcccaggcccu

SEQ ID NO: 1033598 - RNA, 18 nt, Human
ccacccagcccccaaguc

SEQ ID NO: 1033599 - RNA, 19 nt, Human
ccacccagcccccaaguca

SEQ ID NO: 1033600 - RNA, 21 nt, Human
ccacccagcccccaagucagg

SEQ ID NO: 1033601 - RNA, 18 nt, Human
ccagcccccaagucaggg

SEQ ID NO: 1033602 - RNA, 19 nt, Human
ccccagagacccugagccc

SEQ ID NO: 1033603 - RNA, 21 nt, Human
ccccagagacccugagcccag

SEQ ID NO: 1033604 - RNA, 22 nt, Human
ccccagagacccugagcccagg

SEQ ID NO: 1033605 - RNA, 24 nt, Human
ccccagagagccugcucagaagcc

SEQ ID NO: 1033606 - RNA, 24 nt, Human
ccccuacuggcuacaaugcugcuu

SEQ ID NO: 1033607 - RNA, 18 nt, Human
cuccuuccuggagaugaa

SEQ ID NO: 1033608 - RNA, 21 nt, Human
cuccuuccuggagaugaaggg

SEQ ID NO: 1033609 - RNA, 23 nt, Human
cucuucccguuguuucuugggcu

SEQ ID NO: 1033610 - RNA, 23 nt, Human
cuggcuacaaugcugcuucuucu

SEQ ID NO: 1033611 - RNA, 22 nt, Human
gaggggccacccagcccccaag

SEQ ID NO: 1033612 - RNA, 24 nt, Human
gaugccagagccccauccuugggg

SEQ ID NO: 1033613 - RNA, 21 nt, Human
ucagcagauggggacugauga

SEQ ID NO: 1033614 - RNA, 22 nt, Human
ucagcagauggggacugaugag

SEQ ID NO: 1033615 - RNA, 20 nt, Human
uccccagagacccugagccc

SEQ ID NO: 1033616 - RNA, 26 nt, Human
uccuuggggauuggccccagagagcc

SEQ ID NO: 1033617 - RNA, 20 nt, Human
ucggaugccagagccccauc

SEQ ID NO: 1033618 - RNA, 23 nt, Human
ucuccuuccuggagaugaagggg

SEQ ID NO: 1033619 - RNA, 22 nt, Human
ucucucagcagauggggacuga

SEQ ID NO: 1033620 - RNA, 21 nt, Human
ugagcccaggcccuggguggg

SEQ ID NO: 1033621 - RNA, 22 nt, Human
ugcuucuucuccuuccuggaga

SEQ ID NO: 1033622 - RNA, 25 nt, Human
uuccaaagagaggucgcuucuugga

SEQ ID NO: 1033623 - RNA, 21 nt, Human
aaaaacaaaaaggaaaagcca

SEQ ID NO: 1033624 - RNA, 22 nt, Human
aaaacaaaaaggaaaagccaga

SEQ ID NO: 1033625 - RNA, 22 nt, Human
aaacaaaaaggaaaagccagag

SEQ ID NO: 1033626 - RNA, 19 nt, Human
aagccaaaaauucugugau

SEQ ID NO: 1033627 - RNA, 24 nt, Human
aagccuucacacagcacaguuuuc

SEQ ID NO: 1033628 - RNA, 21 nt, Human
aaguaaucaccaaagagguga

SEQ ID NO: 1033629 - RNA, 22 nt, Human
acaaaugcaaacuggcugaaaa

SEQ ID NO: 1033630 - RNA, 20 nt, Human
agaauugacaaaugcaaacu

SEQ ID NO: 1033631 - RNA, 21 nt, Human
agagagcucccauacucaaaa

SEQ ID NO: 1033632 - RNA, 19 nt, Human
agagcucccauacucaaaa

SEQ ID NO: 1033633 - RNA, 22 nt, Human
agaggcuaugguuguuaaggaa

SEQ ID NO: 1033634 - RNA, 19 nt, Human
agccuucacacagcacagu

SEQ ID NO: 1033635 - RNA, 19 nt, Human
aggaaggaauacaagacca

SEQ ID NO: 1033636 - RNA, 22 nt, Human
caaaaggaaggaauacaagacc

SEQ ID NO: 1033637 - RNA, 25 nt, Human
ccaaaauagagauugaacuuuuccc

SEQ ID NO: 1033638 - RNA, 20 nt, Human
ccaaagaggugacccucccu

SEQ ID NO: 1033639 - RNA, 18 nt, Human
ccauaaaacugaagcucu

SEQ ID NO: 1033640 - RNA, 22 nt, Human
cccauaaaacugaagcucuaaa

SEQ ID NO: 1033641 - RNA, 24 nt, Human
ccuauucuccacaguccuuccuuu

SEQ ID NO: 1033642 - RNA, 20 nt, Human
cuaaaaaaacaaaaaggaaa

SEQ ID NO: 1033643 - RNA, 23 nt, Human
gagaaagaagaauugacaaaugc

SEQ ID NO: 1033644 - RNA, 22 nt, Human
gccagagagcucccauacucaa

SEQ ID NO: 1033645 - RNA, 18 nt, Human
ggauugccuauucuccac

SEQ ID NO: 1033646 - RNA, 20 nt, Human
uaagcacuugauccuugugg

SEQ ID NO: 1033647 - RNA, 18 nt, Human
uacaagaccacauaaagc

SEQ ID NO: 1033648 - RNA, 21 nt, Human
uauauacagcauaugaguaua

SEQ ID NO: 1033649 - RNA, 24 nt, Human
uaugccacauuaaaacaucaggag

SEQ ID NO: 1033650 - RNA, 26 nt, Human
ucaaaaggaaggaauacaagaccaca

SEQ ID NO: 1033651 - RNA, 20 nt, Human
uccaaagagcaguagcugug

SEQ ID NO: 1033652 - RNA, 23 nt, Human
uccuuguggaccaaaauagagau

SEQ ID NO: 1033653 - RNA, 21 nt, Human
ucuccaaagagcaguagcugu

SEQ ID NO: 1033654 - RNA, 21 nt, Human
ugaagcucuaaaaaaacaaaa

SEQ ID NO: 1033655 - RNA, 24 nt, Human
ugccucuuauccacucuugaucau

SEQ ID NO: 1033656 - RNA, 23 nt, Human
uuaaaaaauaaauguuaacucaa

SEQ ID NO: 1033657 - RNA, 23 nt, Human
uuaguuuaaaccauguauacaau

SEQ ID NO: 1033658 - RNA, 24 nt, Human
uucuccacaguccuuccuuuugau

SEQ ID NO: 1033659 - RNA, 24 nt, Human
uuucuuacaauucuccaaagagca

SEQ ID NO: 1033660 - RNA, 23 nt, Human
uuuuggaaguaaucaccaaagag

SEQ ID NO: 1033661 - RNA, 21 nt, Human
acucccaacaagcuggggaau

SEQ ID NO: 1033662 - RNA, 21 nt, Human
acuucaaagaaaagaaagaga

SEQ ID NO: 1033663 - RNA, 19 nt, Human
auugguucccaagacaagc

SEQ ID NO: 1033664 - RNA, 18 nt, Human
cugggggcuggcuuccuu

SEQ ID NO: 1033665 - RNA, 19 nt, Human
gacucccaacaagcugggg

SEQ ID NO: 1033666 - RNA, 25 nt, Human
ucaaagaaaagaaagagagacggau

SEQ ID NO: 1033667 - RNA, 24 nt, Human
ucccaagacaagccgugagguacc

SEQ ID NO: 1033668 - RNA, 19 nt, Human
uucaaagaaaagaaagaga

SEQ ID NO: 1033669 - RNA, 22 nt, Human
uucaaagaaaagaaagagagac

SEQ ID NO: 1033670 - RNA, 21 nt, Human
aaacuuaggaggcagaaauuu

SEQ ID NO: 1033671 - RNA, 20 nt, Human
aacguggugaaacccagucu

SEQ ID NO: 1033672 - RNA, 21 nt, Human
aacguggugaaacccagucuc

SEQ ID NO: 1033673 - RNA, 23 nt, Human
aagugccuaaguaucuuuugauu

SEQ ID NO: 1033674 - RNA, 24 nt, Human
acccagucucuacuaaaaaugcaa

SEQ ID NO: 1033675 - RNA, 24 nt, Human
accugaggucaggaguucgagacc

SEQ ID NO: 1033676 - RNA, 24 nt, Human
agagguugcagugagucaagaucg

SEQ ID NO: 1033677 - RNA, 22 nt, Human
agccuggccaacguggugaaac

SEQ ID NO: 1033678 - RNA, 24 nt, Human
agccuggccaacguggugaaaccc

SEQ ID NO: 1033679 - RNA, 22 nt, Human
aggagaauugcuggaacccgag

SEQ ID NO: 1033680 - RNA, 24 nt, Human
aggcagagguugcagugagucaag

SEQ ID NO: 1033681 - RNA, 24 nt, Human
aggcaggagaauugcuggaacccg

SEQ ID NO: 1033682 - RNA, 21 nt, Human
aggcgguggaucaccugaggu

SEQ ID NO: 1033683 - RNA, 25 nt, Human
aggcgguggaucaccugaggucagg

SEQ ID NO: 1033684 - RNA, 20 nt, Human
aggcugaggcaggagaauug

SEQ ID NO: 1033685 - RNA, 21 nt, Human
aggcugaggcaggagaauugc

SEQ ID NO: 1033686 - RNA, 20 nt, Human
aucacacuccagccaggaug

SEQ ID NO: 1033687 - RNA, 24 nt, Human
caacguggugaaacccagucucua

SEQ ID NO: 1033688 - RNA, 26 nt, Human
caccaucacacuccagccaggaugac

SEQ ID NO: 1033689 - RNA, 23 nt, Human
caccugaggucaggaguucgaga

SEQ ID NO: 1033690 - RNA, 24 nt, Human
cacuccagccaggaugacaagagc

SEQ ID NO: 1033691 - RNA, 18 nt, Human
cagauggaaauauguggu

SEQ ID NO: 1033692 - RNA, 24 nt, Human
cagcuacucgggaggcugaggcag

SEQ ID NO: 1033693 - RNA, 24 nt, Human
caucacacuccagccaggaugaca

SEQ ID NO: 1033694 - RNA, 19 nt, Human
cccuaaugguuuugggagg

SEQ ID NO: 1033695 - RNA, 24 nt, Human
ccucugagcccuaaugguuuuggg

SEQ ID NO: 1033696 - RNA, 22 nt, Human
ccugaggucaggaguucgagac

SEQ ID NO: 1033697 - RNA, 22 nt, Human
ccuggccaacguggugaaaccc

SEQ ID NO: 1033698 - RNA, 22 nt, Human
ccuggccaacguggugaaaccc

SEQ ID NO: 1033699 - RNA, 23 nt, Human
ccuggccaacguggugaaaccca

SEQ ID NO: 1033700 - RNA, 21 nt, Human
ccuguaaucucagcuacucgg

SEQ ID NO: 1033701 - RNA, 22 nt, Human
ccuguaaucucagcuacucggg

SEQ ID NO: 1033702 - RNA, 24 nt, Human
cgagaccagccuggccaacguggu

SEQ ID NO: 1033703 - RNA, 23 nt, Human
cgccuguaaucucagcuacucgg

SEQ ID NO: 1033704 - RNA, 18 nt, Human
cucaaaaaaaaaaaaaag

SEQ ID NO: 1033705 - RNA, 23 nt, Human
cucagucucaaaaaaaaaaaaaa

SEQ ID NO: 1033706 - RNA, 19 nt, Human
cuggagcaaaaaucaggaa

SEQ ID NO: 1033707 - RNA, 22 nt, Human
gagaggcagagguugcagugag

SEQ ID NO: 1033708 - RNA, 24 nt, Human
gaucaccugaggucaggaguucga

SEQ ID NO: 1033709 - RNA, 24 nt, Human
gccaacguggugaaacccagucuc

SEQ ID NO: 1033710 - RNA, 23 nt, Human
gccuguaaucucagcuacucggg

SEQ ID NO: 1033711 - RNA, 24 nt, Human
gcgguggaucaccugaggucagga

SEQ ID NO: 1033712 - RNA, 22 nt, Human
ggaucaccugaggucaggaguu

SEQ ID NO: 1033713 - RNA, 23 nt, Human
ggcaugguggcgggcgccuguaa

SEQ ID NO: 1033714 - RNA, 24 nt, Human
gguggcgggcgccuguaaucucag

SEQ ID NO: 1033715 - RNA, 18 nt, Human
guaaauggauggaaacaa

SEQ ID NO: 1033716 - RNA, 20 nt, Human
gucucaaaaaaaaaaaaaag

SEQ ID NO: 1033717 - RNA, 22 nt, Human
uaggaggcagaaauuuuuaaac

SEQ ID NO: 1033718 - RNA, 22 nt, Human
uaggcgguggaucaccugaggu

SEQ ID NO: 1033719 - RNA, 18 nt, Human
ucaaaaaaaaaaaaaagu

SEQ ID NO: 1033720 - RNA, 20 nt, Human
ucaccugaggucaggaguuc

SEQ ID NO: 1033721 - RNA, 22 nt, Human
ucagucucaaaaaaaaaaaaaa

SEQ ID NO: 1033722 - RNA, 23 nt, Human
ucgggaggcugaggcaggagaau

SEQ ID NO: 1033723 - RNA, 21 nt, Human
ucucuacuaaaaaugcaaaaa

SEQ ID NO: 1033724 - RNA, 19 nt, Human
ugaaaucuugguuuuucuc

SEQ ID NO: 1033725 - RNA, 18 nt, Human
ugacaaaucuauccaaaa

SEQ ID NO: 1033726 - RNA, 19 nt, Human
ugaggcaggagaauugcug

SEQ ID NO: 1033727 - RNA, 24 nt, Human
ugaggcaggagaauugcuggaacc

SEQ ID NO: 1033728 - RNA, 25 nt, Human
ugaggcaggagaauugcuggaaccc

SEQ ID NO: 1033729 - RNA, 22 nt, Human
ugcccaaaugacuuuuuaaaca

SEQ ID NO: 1033730 - RNA, 24 nt, Human
uggaucaccugaggucaggaguuc

SEQ ID NO: 1033731 - RNA, 27 nt, Human
uggaucaccugaggucaggaguucgag

SEQ ID NO: 1033732 - RNA, 24 nt, Human
uggccaacguggugaaacccaguc

SEQ ID NO: 1033733 - RNA, 22 nt, Human
uggcgggcgccuguaaucucag

SEQ ID NO: 1033734 - RNA, 23 nt, Human
ugggaggccuaggcgguggauca

SEQ ID NO: 1033735 - RNA, 24 nt, Human
ugguggcgggcgccuguaaucuca

SEQ ID NO: 1033736 - RNA, 23 nt, Human
uuaaaacuaguuuccagaacugc

SEQ ID NO: 1033737 - RNA, 18 nt, Human
uuagccgggcaugguggc

SEQ ID NO: 1033738 - RNA, 22 nt, Human
uucucugcggccguaaaucgau

SEQ ID NO: 1033739 - RNA, 22 nt, Human
uugcagugagucaagaucgcac

SEQ ID NO: 1033740 - RNA, 25 nt, Human
uuuaauuaccugcuagauuaucaga

SEQ ID NO: 1033741 - RNA, 18 nt, Human
uuugacaaaucuauccaa

SEQ ID NO: 1033742 - RNA, 23 nt, Human
uuuuuuuuuuuuuuuuuuuacgg

SEQ ID NO: 1033743 - RNA, 23 nt, Human
agaugcaacgccaaaaugagaug

SEQ ID NO: 1033744 - RNA, 23 nt, Human
caaauauaaaaucucacucuucc

SEQ ID NO: 1033745 - RNA, 27 nt, Human
cacaaaugcugucacagaugacaguca

SEQ ID NO: 1033746 - RNA, 23 nt, Human
cacacagaccagcgacauuuccc

SEQ ID NO: 1033747 - RNA, 19 nt, Human
cacguuaccaugcugaauu

SEQ ID NO: 1033748 - RNA, 19 nt, Human
caguuacuacucagggcug

SEQ ID NO: 1033749 - RNA, 21 nt, Human
ccaaaaugagaugaaagagaa

SEQ ID NO: 1033750 - RNA, 21 nt, Human
ccaugcugaauuguccagaga

SEQ ID NO: 1033751 - RNA, 21 nt, Human
cuacucagggcugauguacaa

SEQ ID NO: 1033752 - RNA, 18 nt, Human
uacaauagaugcaacgcc

SEQ ID NO: 1033753 - RNA, 24 nt, Human
uacaauagaugcaacgccaaaaga

SEQ ID NO: 1033754 - RNA, 23 nt, Human
uaccacacagaccagcgacauuu

SEQ ID NO: 1033755 - RNA, 20 nt, Human
ugagaccaggucagaagggu

SEQ ID NO: 1033756 - RNA, 19 nt, Human
uucccauucauuuccccaa

SEQ ID NO: 1033757 - RNA, 28 nt, Human
aaaaaaaaagaauauuuaaaaauuccuc

SEQ ID NO: 1033758 - RNA, 24 nt, Human
aaaacaaauaaacaaaacauuccc

SEQ ID NO: 1033759 - RNA, 20 nt, Human
aaaauaggaaaaaaaaaaga

SEQ ID NO: 1033760 - RNA, 23 nt, Human
aaacaaauaaacaaaacauuccc

SEQ ID NO: 1033761 - RNA, 24 nt, Human
aaagugcugggauuacaggcguga

SEQ ID NO: 1033762 - RNA, 21 nt, Human
aagcgauucuccugcuucagc

SEQ ID NO: 1033763 - RNA, 22 nt, Human
aaguauuuguugccugugaaua

SEQ ID NO: 1033764 - RNA, 19 nt, Human
aagugcugggauuacaggc

SEQ ID NO: 1033765 - RNA, 19 nt, Human
aagugcugggauuacaggc

SEQ ID NO: 1033766 - RNA, 26 nt, Human
aagugcugggauuacaggcgugagcc

SEQ ID NO: 1033767 - RNA, 24 nt, Human
aauuuuguauuucuaguagagaug

SEQ ID NO: 1033768 - RNA, 20 nt, Human
accagccugaguggcugcgc

SEQ ID NO: 1033769 - RNA, 21 nt, Human
accccaaaccuccugguucuc

SEQ ID NO: 1033770 - RNA, 21 nt, Human
agccccacccccaggaccagc

SEQ ID NO: 1033771 - RNA, 24 nt, Human
agcgauucuccugcuucagccucc

SEQ ID NO: 1033772 - RNA, 25 nt, Human
aggaaaaaaaaaagaauauuuaaaa

SEQ ID NO: 1033773 - RNA, 24 nt, Human
aggugauccaccugccuuggccuc

SEQ ID NO: 1033774 - RNA, 21 nt, Human
aguagcugggauuacaggcau

SEQ ID NO: 1033775 - RNA, 20 nt, Human
augggguuucuccauguugg

SEQ ID NO: 1033776 - RNA, 21 nt, Human
augggguuucuccauguuggu

SEQ ID NO: 1033777 - RNA, 24 nt, Human
augggguuucuccauguuggucag

SEQ ID NO: 1033778 - RNA, 21 nt, Human
auguaagcugugagaaagucc

SEQ ID NO: 1033779 - RNA, 24 nt, Human
caaagugcugggauuacaggcgug

SEQ ID NO: 1033780 - RNA, 22 nt, Human
caccaccaugccuggcuaauuu

SEQ ID NO: 1033781 - RNA, 20 nt, Human
caccauauggaugacaggac

SEQ ID NO: 1033782 - RNA, 23 nt, Human
caccugccuuggccucccaaagu

SEQ ID NO: 1033783 - RNA, 24 nt, Human
caccugccuuggccucccaaagug

SEQ ID NO: 1033784 - RNA, 24 nt, Human
cagcaaccucugccucccggauuu

SEQ ID NO: 1033785 - RNA, 24 nt, Human
cauguuggucaggcuggucuugaa

SEQ ID NO: 1033786 - RNA, 22 nt, Human
ccaaagugcugggauuacaggc

SEQ ID NO: 1033787 - RNA, 22 nt, Human
ccaaagugcugggauuacaggc

SEQ ID NO: 1033788 - RNA, 24 nt, Human
ccaaagugcugggauuacaggcgu

SEQ ID NO: 1033789 - RNA, 18 nt, Human
ccacugcaccucagcggc

SEQ ID NO: 1033790 - RNA, 19 nt, Human
ccauguuggucaggcuggu

SEQ ID NO: 1033791 - RNA, 21 nt, Human
ccauguuggucaggcuggucu

SEQ ID NO: 1033792 - RNA, 21 nt, Human
ccauguuggucaggcuggucu

SEQ ID NO: 1033793 - RNA, 19 nt, Human
ccccuacagccccaccccc

SEQ ID NO: 1033794 - RNA, 21 nt, Human
cccgaccucaggugauccacc

SEQ ID NO: 1033795 - RNA, 23 nt, Human
cccgaccucaggugauccaccug

SEQ ID NO: 1033796 - RNA, 23 nt, Human
cccgaccucaggugauccaccug

SEQ ID NO: 1033797 - RNA, 23 nt, Human
cccgaguagcugggauuacaggc

SEQ ID NO: 1033798 - RNA, 24 nt, Human
cccgaguagcugggauuacaggca

SEQ ID NO: 1033799 - RNA, 23 nt, Human
cccggauuuaagcgauucuccug

SEQ ID NO: 1033800 - RNA, 24 nt, Human
cccuacagccccacccccaggacc

SEQ ID NO: 1033801 - RNA, 23 nt, Human
ccgaguagcugggauuacaggca

SEQ ID NO: 1033802 - RNA, 24 nt, Human
ccgaguagcugggauuacaggcau

SEQ ID NO: 1033803 - RNA, 18 nt, Human
ccgcggcguguucgcccc

SEQ ID NO: 1033804 - RNA, 24 nt, Human
ccucccggauuuaagcgauucucc

SEQ ID NO: 1033805 - RNA, 24 nt, Human
cgaccucaggugauccaccugccu

SEQ ID NO: 1033806 - RNA, 18 nt, Human
cuaguagagaugggguuu

SEQ ID NO: 1033807 - RNA, 22 nt, Human
cuaguagagaugggguuucucc

SEQ ID NO: 1033808 - RNA, 24 nt, Human
cuaguagagaugggguuucuccau

SEQ ID NO: 1033809 - RNA, 24 nt, Human
cucacagcaaccucugccucccgg

SEQ ID NO: 1033810 - RNA, 24 nt, Human
cucaggugauccaccugccuuggc

SEQ ID NO: 1033811 - RNA, 24 nt, Human
cuccugguucucugaaacugauug

SEQ ID NO: 1033812 - RNA, 18 nt, Human
cucuuguugcccaggcug

SEQ ID NO: 1033813 - RNA, 20 nt, Human
cugauugucuuaaucugauu

SEQ ID NO: 1033814 - RNA, 23 nt, Human
cugccuuggccucccaaagugcu

SEQ ID NO: 1033815 - RNA, 23 nt, Human
cugcuucagccucccgaguagcu

SEQ ID NO: 1033816 - RNA, 21 nt, Human
cuggaaauggcgcgaucucgg

SEQ ID NO: 1033817 - RNA, 24 nt, Human
cuuuuuuuuuuuuuuuuuugagaa

SEQ ID NO: 1033818 - RNA, 21 nt, Human
gaaaacacauucaucugcaaa

SEQ ID NO: 1033819 - RNA, 23 nt, Human
gaccucaggugauccaccugccu

SEQ ID NO: 1033820 - RNA, 24 nt, Human
gaccucaggugauccaccugccuu

SEQ ID NO: 1033821 - RNA, 18 nt, Human
gagaaaccaaguacaaau

SEQ ID NO: 1033822 - RNA, 21 nt, Human
gagacggaguuucccucuugu

SEQ ID NO: 1033823 - RNA, 24 nt, Human
gagaugggguuucuccauguuggu

SEQ ID NO: 1033824 - RNA, 24 nt, Human
gaguagcugggauuacaggcaugc

SEQ ID NO: 1033825 - RNA, 21 nt, Human
gaucucggcucacagcaaccu

SEQ ID NO: 1033826 - RNA, 22 nt, Human
gauuacaggcaugcaccaccau

SEQ ID NO: 1033827 - RNA, 18 nt, Human
gauuacaggcgugagcca

SEQ ID NO: 1033828 - RNA, 19 nt, Human
gauuacaggcgugagccac

SEQ ID NO: 1033829 - RNA, 23 nt, Human
gauuacaggcgugagccacugca

SEQ ID NO: 1033830 - RNA, 20 nt, Human
gcaccaccaugccuggcuaa

SEQ ID NO: 1033831 - RNA, 20 nt, Human
gccccacccccaggaccagc

SEQ ID NO: 1033832 - RNA, 22 nt, Human
gccuuggccucccaaagugcug

SEQ ID NO: 1033833 - RNA, 24 nt, Human
gcgauucuccugcuucagccuccc

SEQ ID NO: 1033834 - RNA, 23 nt, Human
gcuggucuugaacucccgaccuc

SEQ ID NO: 1033835 - RNA, 24 nt, Human
ggauuacaggcaugcaccaccaug

SEQ ID NO: 1033836 - RNA, 24 nt, Human
ggcuggucuugaacucccgaccuc

SEQ ID NO: 1033837 - RNA, 22 nt, Human
gggguuucuccauguuggucag

SEQ ID NO: 1033838 - RNA, 22 nt, Human
ggguuucuccauguuggucagg

SEQ ID NO: 1033839 - RNA, 18 nt, Human
guagcugggauuacaggc

SEQ ID NO: 1033840 - RNA, 20 nt, Human
guagcugggauuacaggcau

SEQ ID NO: 1033841 - RNA, 24 nt, Human
gugauccaccugccuuggccuccc

SEQ ID NO: 1033842 - RNA, 23 nt, Human
guucgccccccaacagacggagc

SEQ ID NO: 1033843 - RNA, 21 nt, Human
uacagccccacccccaggacc

SEQ ID NO: 1033844 - RNA, 22 nt, Human
uacaggcaugcaccaccaugcc

SEQ ID NO: 1033845 - RNA, 22 nt, Human
uacaggcgugagccacugcacc

SEQ ID NO: 1033846 - RNA, 23 nt, Human
uacaggcgugagccacugcaccu

SEQ ID NO: 1033847 - RNA, 25 nt, Human
uacaggcgugagccacugcaccuca

SEQ ID NO: 1033848 - RNA, 19 nt, Human
uacuucacaugccuggcug

SEQ ID NO: 1033849 - RNA, 24 nt, Human
uaguagagaugggguuucuccaug

SEQ ID NO: 1033850 - RNA, 18 nt, Human
ucacagcaaccucugccu

SEQ ID NO: 1033851 - RNA, 23 nt, Human
ucacagcaaccucugccucccgg

SEQ ID NO: 1033852 - RNA, 24 nt, Human
ucacagcaaccucugccucccgga

SEQ ID NO: 1033853 - RNA, 20 nt, Human
ucagccucccgaguagcugg

SEQ ID NO: 1033854 - RNA, 21 nt, Human
ucagcggcuuuagcacuuucc

SEQ ID NO: 1033855 - RNA, 21 nt, Human
ucaggugauccaccugccuug

SEQ ID NO: 1033856 - RNA, 24 nt, Human
uccaaaaagcacuucuuuuugcca

SEQ ID NO: 1033857 - RNA, 24 nt, Human
ucccaaagugcugggauuacaggc

SEQ ID NO: 1033858 - RNA, 19 nt, Human
ucccccacuggcuuugcac

SEQ ID NO: 1033859 - RNA, 24 nt, Human
ucccgaguagcugggauuacaggc

SEQ ID NO: 1033860 - RNA, 21 nt, Human
ucccggauuuaagcgauucuc

SEQ ID NO: 1033861 - RNA, 24 nt, Human
ucccggauuuaagcgauucuccug

SEQ ID NO: 1033862 - RNA, 22 nt, Human
ucccucuuguugcccaggcugg

SEQ ID NO: 1033863 - RNA, 23 nt, Human
ucccucuuguugcccaggcugga

SEQ ID NO: 1033864 - RNA, 22 nt, Human
ucucuggauggcuauguaagcu

SEQ ID NO: 1033865 - RNA, 23 nt, Human
ucuuguugcccaggcuggaaaug

SEQ ID NO: 1033866 - RNA, 18 nt, Human
ucuuuuuuuuuuuuuuuu

SEQ ID NO: 1033867 - RNA, 27 nt, Human
ugaaaacacauucaucugcaaaauaac

SEQ ID NO: 1033868 - RNA, 24 nt, Human
ugaauagauacagagaaaccaagu

SEQ ID NO: 1033869 - RNA, 20 nt, Human
ugagaaagucccccacuggc

SEQ ID NO: 1033870 - RNA, 18 nt, Human
ugaguugaaaacacauuc

SEQ ID NO: 1033871 - RNA, 27 nt, Human
ugaguugaaaacacauucaucugcaau

SEQ ID NO: 1033872 - RNA, 24 nt, Human
ugaugucuaaaaauaggaaaaaaa

SEQ ID NO: 1033873 - RNA, 22 nt, Human
ugcaccucagcggcuuuagcac

SEQ ID NO: 1033874 - RNA, 24 nt, Human
ugcuucagccucccgaguagcugg

SEQ ID NO: 1033875 - RNA, 19 nt, Human
ugcuugaguccaccaauga

SEQ ID NO: 1033876 - RNA, 23 nt, Human
uggauggcuauguaagcugugag

SEQ ID NO: 1033877 - RNA, 21 nt, Human
ugggauuacaggcaugcacca

SEQ ID NO: 1033878 - RNA, 24 nt, Human
ugggauuacaggcaugcaccacca

SEQ ID NO: 1033879 - RNA, 18 nt, Human
ugggauuacaggcgugag

SEQ ID NO: 1033880 - RNA, 19 nt, Human
ugggauuacaggcgugagc

SEQ ID NO: 1033881 - RNA, 21 nt, Human
ugggauuacaggcgugagcca

SEQ ID NO: 1033882 - RNA, 22 nt, Human
ugggauuacaggcgugagccac

SEQ ID NO: 1033883 - RNA, 22 nt, Human
ugggauuacaggcgugagccac

SEQ ID NO: 1033884 - RNA, 24 nt, Human
ugggauuacaggcgugagccacug

SEQ ID NO: 1033885 - RNA, 24 nt, Human
ugggauuacaggcgugagccacug

SEQ ID NO: 1033886 - RNA, 24 nt, Human
ugggguuucuccauguuggucagg

SEQ ID NO: 1033887 - RNA, 23 nt, Human
uggucaggcuggucuugaacucc

SEQ ID NO: 1033888 - RNA, 25 nt, Human
uuacugcuuuauuuuuacaagugcu

SEQ ID NO: 1033889 - RNA, 23 nt, Human
uuauguuuucuuuucucuucuuu

SEQ ID NO: 1033890 - RNA, 24 nt, Human
uucagccucccgaguagcugggau

SEQ ID NO: 1033891 - RNA, 22 nt, Human
uuccccuacagccccaccccca

SEQ ID NO: 1033892 - RNA, 24 nt, Human
uucccucuuguugcccaggcugga

SEQ ID NO: 1033893 - RNA, 29 nt, Human
uucuuuucucuucuuuuuuuuuuuuuuuu

SEQ ID NO: 1033894 - RNA, 22 nt, Human
uugaaaacacauucaucugcaa

SEQ ID NO: 1033895 - RNA, 24 nt, Human
uugaaaacacauucaucugcaaaa

SEQ ID NO: 1033896 - RNA, 23 nt, Human
uugcuacagaauugcuugagucc

SEQ ID NO: 1033897 - RNA, 18 nt, Human
uugcuuacugcuuuauuu

SEQ ID NO: 1033898 - RNA, 23 nt, Human
uuuaagcgauucuccugcuucag

SEQ ID NO: 1033899 - RNA, 24 nt, Human
uuuaagcgauucuccugcuucagc

SEQ ID NO: 1033900 - RNA, 24 nt, Human
uuucccucuuguugcccaggcugg

SEQ ID NO: 1033901 - RNA, 22 nt, Human
uuucuaguagagaugggguuuc

SEQ ID NO: 1033902 - RNA, 21 nt, Human
uuucuccauguuggucaggcu

SEQ ID NO: 1033903 - RNA, 30 nt, Human
uuucuuuucucuucuuuuuuuuuuuuuuuu

SEQ ID NO: 1033904 - RNA, 31 nt, Human
uuuucuuuucucuucuuuuuuuuuuuuuuuu

SEQ ID NO: 1033905 - RNA, 20 nt, Human
uuuuguauuucuaguagaga

SEQ ID NO: 1033906 - RNA, 22 nt, Human
uuuuuuuuuuuuuugagacgga

SEQ ID NO: 1033907 - RNA, 18 nt, Human
uuuuuuuuuuuuuuuuug

SEQ ID NO: 1033908 - RNA, 23 nt, Human
aaaagucaagaugaccacaagca

SEQ ID NO: 1033909 - RNA, 21 nt, Human
aagaggaugcgagcugcauuu

SEQ ID NO: 1033910 - RNA, 27 nt, Human
aagcaucaaugguuccaacaccaagcu

SEQ ID NO: 1033911 - RNA, 22 nt, Human
aagcucaaagaggaugcgagcu

SEQ ID NO: 1033912 - RNA, 21 nt, Human
accacaagcaucaaugguucc

SEQ ID NO: 1033913 - RNA, 22 nt, Human
accugaaaauauacuucaaaaa

SEQ ID NO: 1033914 - RNA, 20 nt, Human
agacacaucaacccacaagg

SEQ ID NO: 1033915 - RNA, 23 nt, Human
agauagacacaucaacccacaag

SEQ ID NO: 1033916 - RNA, 23 nt, Human
aggaaaauuccaaaacagcucua

SEQ ID NO: 1033917 - RNA, 19 nt, Human
aguuauucuuccaaggccu

SEQ ID NO: 1033918 - RNA, 21 nt, Human
caacaccaagcucaaagagga

SEQ ID NO: 1033919 - RNA, 20 nt, Human
caagguuauaaucuacuaua

SEQ ID NO: 1033920 - RNA, 19 nt, Human
cacagaaaaaaagcaaacc

SEQ ID NO: 1033921 - RNA, 19 nt, Human
cagcaagccagaggcuuac

SEQ ID NO: 1033922 - RNA, 22 nt, Human
ccaacaccaagcucaaagagga

SEQ ID NO: 1033923 - RNA, 21 nt, Human
ccaguuauucuuccaaggccu

SEQ ID NO: 1033924 - RNA, 21 nt, Human
cccuccauuuggguaaaaguc

SEQ ID NO: 1033925 - RNA, 18 nt, Human
cccugaacaccaaggaac

SEQ ID NO: 1033926 - RNA, 23 nt, Human
cccugaacaccaaggaacaccuu

SEQ ID NO: 1033927 - RNA, 20 nt, Human
ccugaacaccaaggaacacc

SEQ ID NO: 1033928 - RNA, 22 nt, Human
cuggguccaacccaguuauucu

SEQ ID NO: 1033929 - RNA, 19 nt, Human
cuugacccagcuuccccag

SEQ ID NO: 1033930 - RNA, 20 nt, Human
cuugacucugaguaagaccc

SEQ ID NO: 1033931 - RNA, 19 nt, Human
gaggaugcgagcugcauuu

SEQ ID NO: 1033932 - RNA, 19 nt, Human
guuguugaacuucaggucc

SEQ ID NO: 1033933 - RNA, 26 nt, Human
uaacagauaagcuccaaaaucucucu

SEQ ID NO: 1033934 - RNA, 21 nt, Human
uaacgucaacaaaguuggcau

SEQ ID NO: 1033935 - RNA, 21 nt, Human
uacacagaaaaaaagcaaacc

SEQ ID NO: 1033936 - RNA, 22 nt, Human
uacacagaaaaaaagcaaaccc

SEQ ID NO: 1033937 - RNA, 19 nt, Human
ucaggaaaauuccaaaaca

SEQ ID NO: 1033938 - RNA, 22 nt, Human
ucaguguguuuuuaaggugcag

SEQ ID NO: 1033939 - RNA, 18 nt, Human
ucauaauuugucucagca

SEQ ID NO: 1033940 - RNA, 21 nt, Human
ucccuccauuuggguaaaagu

SEQ ID NO: 1033941 - RNA, 21 nt, Human
ugacccagcuuccccagccag

SEQ ID NO: 1033942 - RNA, 19 nt, Human
ugacucugaguaagacccu

SEQ ID NO: 1033943 - RNA, 19 nt, Human
ugccagguggaaggagaca

SEQ ID NO: 1033944 - RNA, 21 nt, Human
ugcucccaagcuguggccaau

SEQ ID NO: 1033945 - RNA, 20 nt, Human
uggaaaaauggcccagcugg

SEQ ID NO: 1033946 - RNA, 23 nt, Human
uggaaggagacacuuuucuucau

SEQ ID NO: 1033947 - RNA, 22 nt, Human
uuccccagccaggugugcuccc

SEQ ID NO: 1033948 - RNA, 19 nt, Human
uucuacacagaaaaaaagc

SEQ ID NO: 1033949 - RNA, 24 nt, Human
uuggguaaaagucaagaugaccac

SEQ ID NO: 1033950 - RNA, 25 nt, Human
uuggucuggaugccagguggaagga

SEQ ID NO: 1033951 - RNA, 19 nt, Human
uuuuuaaggugcaguuaga

SEQ ID NO: 1033952 - RNA, 25 nt, Human
uuuuuaaggugcaguuagaugaaca

SEQ ID NO: 1033953 - RNA, 22 nt, Human
aaaaaccccagagacgccagcc

SEQ ID NO: 1033954 - RNA, 22 nt, Human
aaccguucccucagcaacccca

SEQ ID NO: 1033955 - RNA, 19 nt, Human
aaccuggagaggggaaggu

SEQ ID NO: 1033956 - RNA, 21 nt, Human
acagacaccucuggggucccc

SEQ ID NO: 1033957 - RNA, 18 nt, Human
accccagagacgccagcc

SEQ ID NO: 1033958 - RNA, 23 nt, Human
accccagagacgccagccuggga

SEQ ID NO: 1033959 - RNA, 22 nt, Human
accccaggggugucagacgggg

SEQ ID NO: 1033960 - RNA, 23 nt, Human
agaagaccuguggcaaaguucuc

SEQ ID NO: 1033961 - RNA, 18 nt, Human
agagacgccagccuggga

SEQ ID NO: 1033962 - RNA, 23 nt, Human
agccagccuuaaaaaccccagag

SEQ ID NO: 1033963 - RNA, 21 nt, Human
agccagccuuaaaaacccccu

SEQ ID NO: 1033964 - RNA, 22 nt, Human
cacagacaccucuggggucccc

SEQ ID NO: 1033965 - RNA, 20 nt, Human
caccucugggguccccagaa

SEQ ID NO: 1033966 - RNA, 19 nt, Human
cagacaccucugggguccc

SEQ ID NO: 1033967 - RNA, 30 nt, Human
ccacuccaaccguucccucagcaaccccaa

SEQ ID NO: 1033968 - RNA, 19 nt, Human
ccagccagccuuaaaaacc

SEQ ID NO: 1033969 - RNA, 22 nt, Human
ccccacuccaaccguucccuca

SEQ ID NO: 1033970 - RNA, 23 nt, Human
ccccagagacgccagccugggaa

SEQ ID NO: 1033971 - RNA, 21 nt, Human
ccccaggggugucagacgggg

SEQ ID NO: 1033972 - RNA, 20 nt, Human
ccgccgccgccaggccgcgc

SEQ ID NO: 1033973 - RNA, 24 nt, Human
ccuuaaaaaccccagagacgccag

SEQ ID NO: 1033974 - RNA, 24 nt, Human
gccagccuuaaaaaccccagagac

SEQ ID NO: 1033975 - RNA, 21 nt, Human
uaaaaaccccagagacgccag

SEQ ID NO: 1033976 - RNA, 21 nt, Human
uccccagaagaccuguggcaa

SEQ ID NO: 1033977 - RNA, 20 nt, Human
ucccucagcaaccccagggg

SEQ ID NO: 1033978 - RNA, 18 nt, Human
ucgcaggccgauccccac

SEQ ID NO: 1033979 - RNA, 20 nt, Human
ucuucuccagccagccuuaa

SEQ ID NO: 1033980 - RNA, 18 nt, Human
gauggugaagcuggagac

SEQ ID NO: 1033981 - RNA, 24 nt, Human
aaaagaaaacagccucagccucca

SEQ ID NO: 1033982 - RNA, 21 nt, Human
aaacaacagugagugagucca

SEQ ID NO: 1033983 - RNA, 25 nt, Human
aagaaaacagccucagccuccagcc

SEQ ID NO: 1033984 - RNA, 23 nt, Human
aaguuauuuggauaaaugggaaa

SEQ ID NO: 1033985 - RNA, 19 nt, Human
acaaagaaaagaaaacagc

SEQ ID NO: 1033986 - RNA, 21 nt, Human
agaaaacagccucagccucca

SEQ ID NO: 1033987 - RNA, 22 nt, Human
agauucccgguuauucucccac

SEQ ID NO: 1033988 - RNA, 18 nt, Human
cacagcccacguagaugg

SEQ ID NO: 1033989 - RNA, 22 nt, Human
cacccucucuuccaggcacuuc

SEQ ID NO: 1033990 - RNA, 24 nt, Human
cacccucucuuccaggcacuucuu

SEQ ID NO: 1033991 - RNA, 20 nt, Human
cagcgacggugugccaggag

SEQ ID NO: 1033992 - RNA, 19 nt, Human
cagguuggcuugcugaguu

SEQ ID NO: 1033993 - RNA, 20 nt, Human
caguuuguaugaagguagcu

SEQ ID NO: 1033994 - RNA, 24 nt, Human
cuaccagguugguuuaauuugcau

SEQ ID NO: 1033995 - RNA, 19 nt, Human
cuccagccuucccuuuugg

SEQ ID NO: 1033996 - RNA, 25 nt, Human
cugcugcucuguccaaguuauuugg

SEQ ID NO: 1033997 - RNA, 22 nt, Human
cuugaauuacagaggaaacaac

SEQ ID NO: 1033998 - RNA, 23 nt, Human
cuugcugaguucucucacuccca

SEQ ID NO: 1033999 - RNA, 26 nt, Human
gaaaacagccucagccuccagccuuc

SEQ ID NO: 1034000 - RNA, 20 nt, Human
gaacacgaucagagauuccc

SEQ ID NO: 1034001 - RNA, 23 nt, Human
gauaaaugggaacaaagaaaaga

SEQ ID NO: 1034002 - RNA, 23 nt, Human
gcuacuaccagguugguuuaauu

SEQ ID NO: 1034003 - RNA, 23 nt, Human
gggaacaaagaaaagaaaacagc

SEQ ID NO: 1034004 - RNA, 20 nt, Human
uauggagcuacuaccagguu

SEQ ID NO: 1034005 - RNA, 21 nt, Human
uccagccuucccuuuugggac

SEQ ID NO: 1034006 - RNA, 21 nt, Human
ucccagacgagucucaagggc

SEQ ID NO: 1034007 - RNA, 20 nt, Human
ugaaaucguucagacuucca

SEQ ID NO: 1034008 - RNA, 26 nt, Human
ugaguucucucacucccaucagcuuu

SEQ ID NO: 1034009 - RNA, 26 nt, Human
ugccucacaaugcacccucucuucca

SEQ ID NO: 1034010 - RNA, 25 nt, Human
uggcuugcugaguucucucacuccc

SEQ ID NO: 1034011 - RNA, 22 nt, Human
ugggaacaaagaaaagaaaaca

SEQ ID NO: 1034012 - RNA, 22 nt, Human
uucucugcugcucuguccaagu

SEQ ID NO: 1034013 - RNA, 24 nt, Human
uucucugcugcucuguccaaguua

SEQ ID NO: 1034014 - RNA, 19 nt, Human
acucugugaccgagacgcu

SEQ ID NO: 1034015 - RNA, 23 nt, Human
caguuugcuuugaugaggaaaac

SEQ ID NO: 1034016 - RNA, 21 nt, Human
ccugcacuauuucuccaacuc

SEQ ID NO: 1034017 - RNA, 24 nt, Human
cugcacuauuucuccaacucugug

SEQ ID NO: 1034018 - RNA, 21 nt, Human
ucugugaccgagacgcugucc

SEQ ID NO: 1034019 - RNA, 19 nt, Human
ugaggaaaacgcucucccu

SEQ ID NO: 1034020 - RNA, 23 nt, Human
uugaugaggaaaacgcucucccu

SEQ ID NO: 1034021 - RNA, 20 nt, Human
uuugaugaggaaaacgcucu

SEQ ID NO: 1034022 - RNA, 21 nt, Human
aacaaagacagauuuccaaag

SEQ ID NO: 1034023 - RNA, 22 nt, Human
aagcacacacacacaaaaugcc

SEQ ID NO: 1034024 - RNA, 18 nt, Human
acacacacacaaaaugcc

SEQ ID NO: 1034025 - RNA, 21 nt, Human
auuaaaauaagcacacacaca

SEQ ID NO: 1034026 - RNA, 21 nt, Human
caacaaagacagauuuccaaa

SEQ ID NO: 1034027 - RNA, 25 nt, Human
cacacacacacaaaaugccucugug

SEQ ID NO: 1034028 - RNA, 22 nt, Human
cacagacacauuccaggagucc

SEQ ID NO: 1034029 - RNA, 19 nt, Human
cagacacauuccaggaguc

SEQ ID NO: 1034030 - RNA, 22 nt, Human
cagacacauuccaggagucccc

SEQ ID NO: 1034031 - RNA, 18 nt, Human
ccacaguaucuucggcua

SEQ ID NO: 1034032 - RNA, 21 nt, Human
cccagagcaacaaagacagau

SEQ ID NO: 1034033 - RNA, 21 nt, Human
gccacaguaucuucggcuagu

SEQ ID NO: 1034034 - RNA, 21 nt, Human
uaguagguuuaucuuuuauuc

SEQ ID NO: 1034035 - RNA, 27 nt, Human
ucccagagcaacaaagacagauuucca

SEQ ID NO: 1034036 - RNA, 22 nt, Human
uccccucucccagagcaacaaa

SEQ ID NO: 1034037 - RNA, 19 nt, Human
ucucccagagcaacaaaga

SEQ ID NO: 1034038 - RNA, 21 nt, Human
uuuuuuuuuuuuauaguaggu

SEQ ID NO: 1034039 - RNA, 26 nt, Human
aagaccccaccccacagaugcucugc

SEQ ID NO: 1034040 - RNA, 18 nt, Human
accccacagaugcucugc

SEQ ID NO: 1034041 - RNA, 21 nt, Human
accccaccccacagaugcucu

SEQ ID NO: 1034042 - RNA, 20 nt, Human
acuuuaauuaugaaaaaggg

SEQ ID NO: 1034043 - RNA, 23 nt, Human
agccccaaacuggcuggggcaga

SEQ ID NO: 1034044 - RNA, 21 nt, Human
agcggcucccgggcugggccc

SEQ ID NO: 1034045 - RNA, 22 nt, Human
agggagggacgcgacccggggc

SEQ ID NO: 1034046 - RNA, 26 nt, Human
agggauggcggagggcaggggcgugu

SEQ ID NO: 1034047 - RNA, 19 nt, Human
caagaugggggaaccagcc

SEQ ID NO: 1034048 - RNA, 24 nt, Human
caaggggaagaccccaccccacag

SEQ ID NO: 1034049 - RNA, 23 nt, Human
cacagaugcucugccccagcccu

SEQ ID NO: 1034050 - RNA, 20 nt, Human
cagcaaggggaagaccccac

SEQ ID NO: 1034051 - RNA, 21 nt, Human
ccagccccaaacuggcugggg

SEQ ID NO: 1034052 - RNA, 19 nt, Human
ccccaccccacagaugcuc

SEQ ID NO: 1034053 - RNA, 27 nt, Human
cccuucccagagaccuuaaauaauuua

SEQ ID NO: 1034054 - RNA, 20 nt, Human
cggcucccgggcugggcccu

SEQ ID NO: 1034055 - RNA, 18 nt, Human
cuccagcggcucccgggc

SEQ ID NO: 1034056 - RNA, 19 nt, Human
cugcuccagcggcucccgg

SEQ ID NO: 1034057 - RNA, 25 nt, Human
gccgacgggggcgcucagggaggga

SEQ ID NO: 1034058 - RNA, 18 nt, Human
ggcucccgggcugggccc

SEQ ID NO: 1034059 - RNA, 18 nt, Human
gggcagguugcccuggug

SEQ ID NO: 1034060 - RNA, 22 nt, Human
uacaauagcagcaaggggaaga

SEQ ID NO: 1034061 - RNA, 22 nt, Human
ugccccagcccuucccagagac

SEQ ID NO: 1034062 - RNA, 19 nt, Human
uggcuggggcagagagaga

SEQ ID NO: 1034063 - RNA, 20 nt, Human
uggcuggggcagagagagac

SEQ ID NO: 1034064 - RNA, 23 nt, Human
uggcuggggcagagagagaccag

SEQ ID NO: 1034065 - RNA, 23 nt, Human
uggggcagagagagaccaguccc

SEQ ID NO: 1034066 - RNA, 23 nt, Human
aaggguggguccccccauaacuc

SEQ ID NO: 1034067 - RNA, 21 nt, Human
aaggucccuccaccuucaccc

SEQ ID NO: 1034068 - RNA, 22 nt, Human
aaggucccuccaccuucacccu

SEQ ID NO: 1034069 - RNA, 18 nt, Human
agggaucacuggcuguga

SEQ ID NO: 1034070 - RNA, 20 nt, Human
aggucccuccaccuucaccc

SEQ ID NO: 1034071 - RNA, 21 nt, Human
cagcaaguccccucccguggc

SEQ ID NO: 1034072 - RNA, 23 nt, Human
cagcaaguccccucccguggcuu

SEQ ID NO: 1034073 - RNA, 19 nt, Human
cagggcagggaucacuggc

SEQ ID NO: 1034074 - RNA, 20 nt, Human
ccccucccguggcuuucuca

SEQ ID NO: 1034075 - RNA, 24 nt, Human
ccucggaggcaaggucccuccacc

SEQ ID NO: 1034076 - RNA, 24 nt, Human
guccccucccguggcuuucucagu

SEQ ID NO: 1034077 - RNA, 20 nt, Human
uccccauaaggaaacagggc

SEQ ID NO: 1034078 - RNA, 26 nt, Human
uccccauaaggaaacagggcagggau

SEQ ID NO: 1034079 - RNA, 19 nt, Human
ucccuccaccuucacccua

SEQ ID NO: 1034080 - RNA, 19 nt, Human
uggaagggugggucccccc

SEQ ID NO: 1034081 - RNA, 22 nt, Human
uucaaacaccaggugccagaga

SEQ ID NO: 1034082 - RNA, 24 nt, Human
aggauagugaagggagccgguacc

SEQ ID NO: 1034083 - RNA, 21 nt, Human
caggauagugaagggagcacu

SEQ ID NO: 1034084 - RNA, 18 nt, Human
gaauacgagcccagcuuc

SEQ ID NO: 1034085 - RNA, 18 nt, Human
uagcucucucccuguuag

SEQ ID NO: 1034086 - RNA, 19 nt, Human
ugccugcugcugugcagau

SEQ ID NO: 1034087 - RNA, 18 nt, Human
uggcacagauugcaggcu

SEQ ID NO: 1034088 - RNA, 24 nt, Human
uggcuugaauacgagcccagcuuc

SEQ ID NO: 1034089 - RNA, 20 nt, Human
uuggaggaaggcacaggaua

SEQ ID NO: 1034090 - RNA, 24 nt, Human
aaagaguagcauaaaagagagauu

SEQ ID NO: 1034091 - RNA, 22 nt, Human
agaaaacagaguuuguuaccau

SEQ ID NO: 1034092 - RNA, 21 nt, Human
aggcccaggccuaccuccccu

SEQ ID NO: 1034093 - RNA, 21 nt, Human
caaaagaguagcauaaaagag

SEQ ID NO: 1034094 - RNA, 23 nt, Human
caggagccaaucauuagaauuug

SEQ ID NO: 1034095 - RNA, 21 nt, Human
caggcccaggccuaccucccc

SEQ ID NO: 1034096 - RNA, 23 nt, Human
cauccuggccugggagucagaag

SEQ ID NO: 1034097 - RNA, 20 nt, Human
ccaggccuaccuccccugcc

SEQ ID NO: 1034098 - RNA, 22 nt, Human
cgcugcguggccggcgucaggc

SEQ ID NO: 1034099 - RNA, 23 nt, Human
cgucaggcccaggccuaccuccc

SEQ ID NO: 1034100 - RNA, 20 nt, Human
cgugccaaagaaaacagagu

SEQ ID NO: 1034101 - RNA, 19 nt, Human
cuccaggacgccgccgccc

SEQ ID NO: 1034102 - RNA, 25 nt, Human
gagccaaucauuagaauuuggcuaa

SEQ ID NO: 1034103 - RNA, 24 nt, Human
ggcaaaagaguagcauaaaagaga

SEQ ID NO: 1034104 - RNA, 23 nt, Human
gggucuccaggacgccgccgccc

SEQ ID NO: 1034105 - RNA, 19 nt, Human
uaaaacauccuggccuggg

SEQ ID NO: 1034106 - RNA, 19 nt, Human
uaauuuucagaaaugggac

SEQ ID NO: 1034107 - RNA, 23 nt, Human
uacuaguuaucuugauaauuuuc

SEQ ID NO: 1034108 - RNA, 22 nt, Human
uacuuuggcauucacagggaug

SEQ ID NO: 1034109 - RNA, 20 nt, Human
uagaagacucaugauucugc

SEQ ID NO: 1034110 - RNA, 23 nt, Human
uaucgugccaaagaaaacagagu

SEQ ID NO: 1034111 - RNA, 18 nt, Human
uauguauauagcaaugua

SEQ ID NO: 1034112 - RNA, 18 nt, Human
uauugcuaacacuuaaaa

SEQ ID NO: 1034113 - RNA, 26 nt, Human
uauuuuauucucuuauuguugaaauc

SEQ ID NO: 1034114 - RNA, 21 nt, Human
ucacagggaugaucuggagag

SEQ ID NO: 1034115 - RNA, 24 nt, Human
ucagaacuuaauuuuuugaacuau

SEQ ID NO: 1034116 - RNA, 18 nt, Human
ucccgccgcugcguggcc

SEQ ID NO: 1034117 - RNA, 19 nt, Human
uccucugacgaaaaacaag

SEQ ID NO: 1034118 - RNA, 26 nt, Human
ucgugccaaagaaaacagaguuuguu

SEQ ID NO: 1034119 - RNA, 20 nt, Human
ugaguggcaaaagaguagca

SEQ ID NO: 1034120 - RNA, 25 nt, Human
uggcaaaagaguagcauaaaagaga

SEQ ID NO: 1034121 - RNA, 22 nt, Human
ugguaaagaguuaugauuacuu

SEQ ID NO: 1034122 - RNA, 20 nt, Human
ugugagaaauaaaacauccu

SEQ ID NO: 1034123 - RNA, 19 nt, Human
uuacuuuggcauucacagg

SEQ ID NO: 1034124 - RNA, 23 nt, Human
uucauugaaacacuaagucauga

SEQ ID NO: 1034125 - RNA, 20 nt, Human
uugaucucaaggcugagugg

SEQ ID NO: 1034126 - RNA, 19 nt, Human
uuucauagguuuaccacua

SEQ ID NO: 1034127 - RNA, 23 nt, Human
uuuucagaacuuaauuuuuugaa

SEQ ID NO: 1034128 - RNA, 26 nt, Human
aaaagaagccaaguucauuuccagaa

SEQ ID NO: 1034129 - RNA, 24 nt, Human
aaacaaaacaaaccaggacuccca

SEQ ID NO: 1034130 - RNA, 19 nt, Human
aaaugcaaccucauuuguc

SEQ ID NO: 1034131 - RNA, 23 nt, Human
aauaacaccuguaaacugauuaa

SEQ ID NO: 1034132 - RNA, 18 nt, Human
aaugcccaucauucaagg

SEQ ID NO: 1034133 - RNA, 24 nt, Human
accaagcaacuaaugcaauaucac

SEQ ID NO: 1034134 - RNA, 21 nt, Human
aguggccgugcuguaacaauc

SEQ ID NO: 1034135 - RNA, 20 nt, Human
auaaaagaccaagcaacuaa

SEQ ID NO: 1034136 - RNA, 22 nt, Human
auagcaagacucauuuauucca

SEQ ID NO: 1034137 - RNA, 23 nt, Human
aucuucuaacaaaccagaacauc

SEQ ID NO: 1034138 - RNA, 22 nt, Human
auuuguagaagcacaccuccuu

SEQ ID NO: 1034139 - RNA, 25 nt, Human
caaaacaaaacaaaccaggacuccc

SEQ ID NO: 1034140 - RNA, 26 nt, Human
caaaacaaaccaggacucccacugga

SEQ ID NO: 1034141 - RNA, 23 nt, Human
caaaugcccaucauucaaggacc

SEQ ID NO: 1034142 - RNA, 19 nt, Human
caacagaagugacaauuac

SEQ ID NO: 1034143 - RNA, 25 nt, Human
caagaaaauaacaaaacaaaacaaa

SEQ ID NO: 1034144 - RNA, 21 nt, Human
caaggaccagaugaacccaug

SEQ ID NO: 1034145 - RNA, 26 nt, Human
caucauucaaggaccagaugaaccca

SEQ ID NO: 1034146 - RNA, 19 nt, Human
caugaaagauaaaagacca

SEQ ID NO: 1034147 - RNA, 20 nt, Human
ccaaguucauuuccagaaau

SEQ ID NO: 1034148 - RNA, 19 nt, Human
ccacuggaaaccacagcug

SEQ ID NO: 1034149 - RNA, 24 nt, Human
ccagaugaacccaugaaagauaaa

SEQ ID NO: 1034150 - RNA, 24 nt, Human
cccaugaaagauaaaagaccaagc

SEQ ID NO: 1034151 - RNA, 20 nt, Human
ccuggcaagccacuuuuuca

SEQ ID NO: 1034152 - RNA, 22 nt, Human
cuaugugcgucgucucugcacc

SEQ ID NO: 1034153 - RNA, 18 nt, Human
cucccacuggaaaccaca

SEQ ID NO: 1034154 - RNA, 18 nt, Human
cucuccaucaguugcugu

SEQ ID NO: 1034155 - RNA, 21 nt, Human
cucugcaccaaaugcaaccuc

SEQ ID NO: 1034156 - RNA, 18 nt, Human
gaccugguagcaauagug

SEQ ID NO: 1034157 - RNA, 19 nt, Human
gaccugguagcaauagugc

SEQ ID NO: 1034158 - RNA, 19 nt, Human
gcaauaucacuucugcaaa

SEQ ID NO: 1034159 - RNA, 21 nt, Human
gccaaguucauuuccagaaau

SEQ ID NO: 1034160 - RNA, 20 nt, Human
gcuguaauucugagggcaaa

SEQ ID NO: 1034161 - RNA, 22 nt, Human
gguagcaauagugcugagcaag

SEQ ID NO: 1034162 - RNA, 26 nt, Human
uaaacagaucuucuaacaaaccagaa

SEQ ID NO: 1034163 - RNA, 20 nt, Human
uaacaaaccagaacauccuu

SEQ ID NO: 1034164 - RNA, 19 nt, Human
uaacucccuggcaagccac

SEQ ID NO: 1034165 - RNA, 22 nt, Human
uaagauccauuugaaaauccau

SEQ ID NO: 1034166 - RNA, 23 nt, Human
uacuauaggugauguacccauuu

SEQ ID NO: 1034167 - RNA, 22 nt, Human
uacuuuaucagaguccuucauu

SEQ ID NO: 1034168 - RNA, 21 nt, Human
uagcgauacuauaggugaugu

SEQ ID NO: 1034169 - RNA, 22 nt, Human
uagcgauacuauaggugaugua

SEQ ID NO: 1034170 - RNA, 26 nt, Human
ucaggaguacaaucaacagaagucga

SEQ ID NO: 1034171 - RNA, 21 nt, Human
ugcaaagccuuacuguaaagg

SEQ ID NO: 1034172 - RNA, 25 nt, Human
ugcaauaucacuucugcaaagccuu

SEQ ID NO: 1034173 - RNA, 18 nt, Human
uggcaagccacuuuuuca

SEQ ID NO: 1034174 - RNA, 22 nt, Human
uggcgguauggugaaccccagu

SEQ ID NO: 1034175 - RNA, 20 nt, Human
uguaaagggaaagauuccua

SEQ ID NO: 1034176 - RNA, 20 nt, Human
uguuuuguaaauaucuccuu

SEQ ID NO: 1034177 - RNA, 22 nt, Human
uucaguggccgugcuguaacaa

SEQ ID NO: 1034178 - RNA, 22 nt, Human
uugaaaauccauuucacacuuc

SEQ ID NO: 1034179 - RNA, 19 nt, Human
uugcuguaauucugagggc

SEQ ID NO: 1034180 - RNA, 19 nt, Human
uuuauaaaccuccuucuua

SEQ ID NO: 1034181 - RNA, 19 nt, Human
uuucuccuuuauccuuauc

SEQ ID NO: 1034182 - RNA, 23 nt, Human
aaaaaaaaaaaagcacaauuuug

SEQ ID NO: 1034183 - RNA, 23 nt, Human
aaacaaacagaaauaacugagca

SEQ ID NO: 1034184 - RNA, 26 nt, Human
aaacaaacagaaauaacugagcagcu

SEQ ID NO: 1034185 - RNA, 19 nt, Human
aacauggugaaaccccauc

SEQ ID NO: 1034186 - RNA, 20 nt, Human
aacauggugaaaccccaucu

SEQ ID NO: 1034187 - RNA, 21 nt, Human
aacauggugaaaccccaucuc

SEQ ID NO: 1034188 - RNA, 21 nt, Human
aacauggugaaaccccaucuc

SEQ ID NO: 1034189 - RNA, 18 nt, Human
aacuuccucccccaccca

SEQ ID NO: 1034190 - RNA, 20 nt, Human
aagaucccaugaggguccaa

SEQ ID NO: 1034191 - RNA, 23 nt, Human
aagcaaaaaaggaaagucccuca

SEQ ID NO: 1034192 - RNA, 23 nt, Human
aagcacaguuuugggcugggcac

SEQ ID NO: 1034193 - RNA, 24 nt, Human
aaucgcuugaacccaggaggugga

SEQ ID NO: 1034194 - RNA, 24 nt, Human
aaucgcuugaacccaggaggugga

SEQ ID NO: 1034195 - RNA, 18 nt, Human
aauuuauacacaauaacu

SEQ ID NO: 1034196 - RNA, 23 nt, Human
acaaaaccaaccagauaaucaca

SEQ ID NO: 1034197 - RNA, 20 nt, Human
acaccuguaaccccagcaac

SEQ ID NO: 1034198 - RNA, 24 nt, Human
acagagcaagacucugucuugaga

SEQ ID NO: 1034199 - RNA, 22 nt, Human
accccagcaaccugggaggcug

SEQ ID NO: 1034200 - RNA, 24 nt, Human
accccaucucuacuaaaaauacaa

SEQ ID NO: 1034201 - RNA, 22 nt, Human
acgaggucaggaguuugagacc

SEQ ID NO: 1034202 - RNA, 20 nt, Human
acuaacuuuuccaacaauca

SEQ ID NO: 1034203 - RNA, 22 nt, Human
acugcacaaagccauacaagac

SEQ ID NO: 1034204 - RNA, 18 nt, Human
acuuccucccccacccac

SEQ ID NO: 1034205 - RNA, 19 nt, Human
acuuuaacuuccuccccca

SEQ ID NO: 1034206 - RNA, 22 nt, Human
agaaaaaaaaaaaaaagcacaa

SEQ ID NO: 1034207 - RNA, 22 nt, Human
agaaucgcuugaacccaggagg

SEQ ID NO: 1034208 - RNA, 19 nt, Human
agaucagagaaauugaaag

SEQ ID NO: 1034209 - RNA, 26 nt, Human
agcacaauuuugcuuuauuggcagua

SEQ ID NO: 1034210 - RNA, 21 nt, Human
agccaacuucuguagcaaugu

SEQ ID NO: 1034211 - RNA, 19 nt, Human
agccauacaagacuggcug

SEQ ID NO: 1034212 - RNA, 22 nt, Human
agccuggccaacauggugaaac

SEQ ID NO: 1034213 - RNA, 24 nt, Human
agccuggccaacauggugaaaccc

SEQ ID NO: 1034214 - RNA, 24 nt, Human
agccugggugacagagcaagacuc

SEQ ID NO: 1034215 - RNA, 23 nt, Human
aggagguggagauugcagugagc

SEQ ID NO: 1034216 - RNA, 20 nt, Human
aggaguuugagaccagccug

SEQ ID NO: 1034217 - RNA, 23 nt, Human
aggcaggagaaucgcuugaaccc

SEQ ID NO: 1034218 - RNA, 24 nt, Human
aggcaggagaaucgcuugaaccca

SEQ ID NO: 1034219 - RNA, 24 nt, Human
aggcggccguaaucugauugaagc

SEQ ID NO: 1034220 - RNA, 24 nt, Human
aggcgugguggcacacaccuguaa

SEQ ID NO: 1034221 - RNA, 20 nt, Human
aggcugaggcaggagaaucg

SEQ ID NO: 1034222 - RNA, 24 nt, Human
aggcugaggcaggagaaucgcuug

SEQ ID NO: 1034223 - RNA, 20 nt, Human
aggggaauggcugugggcuu

SEQ ID NO: 1034224 - RNA, 24 nt, Human
agguggagauugcagugagcugag

SEQ ID NO: 1034225 - RNA, 24 nt, Human
agguggauuacgaggucaggaguu

SEQ ID NO: 1034226 - RNA, 24 nt, Human
aguuuugggcugggcacgguggcu

SEQ ID NO: 1034227 - RNA, 19 nt, Human
augccuguaaucccagcac

SEQ ID NO: 1034228 - RNA, 21 nt, Human
auugcacucuagccuggguga

SEQ ID NO: 1034229 - RNA, 24 nt, Human
auugcacucuagccugggugacag

SEQ ID NO: 1034230 - RNA, 24 nt, Human
auugcagugagcugagaucaugcc

SEQ ID NO: 1034231 - RNA, 19 nt, Human
auuggcaguaccaaaauaa

SEQ ID NO: 1034232 - RNA, 19 nt, Human
caaacagaaauaacugagc

SEQ ID NO: 1034233 - RNA, 24 nt, Human
caacauggugaaaccccaucucua

SEQ ID NO: 1034234 - RNA, 19 nt, Human
caagaucccaugagggucc

SEQ ID NO: 1034235 - RNA, 20 nt, Human
cacaaacaaacagaaauaac

SEQ ID NO: 1034236 - RNA, 21 nt, Human
cacacaccuguaaccccagca

SEQ ID NO: 1034237 - RNA, 24 nt, Human
cacaccuguaaccccagcaaccug

SEQ ID NO: 1034238 - RNA, 23 nt, Human
caccuguaaccccagcaaccugg

SEQ ID NO: 1034239 - RNA, 24 nt, Human
caccuguaaccccagcaaccuggg

SEQ ID NO: 1034240 - RNA, 24 nt, Human
cacggcagguggauuacgagguca

SEQ ID NO: 1034241 - RNA, 22 nt, Human
cacucuagccugggugacagag

SEQ ID NO: 1034242 - RNA, 23 nt, Human
cacucuagccugggugacagagc

SEQ ID NO: 1034243 - RNA, 18 nt, Human
cagaaaacacaaaaccaa

SEQ ID NO: 1034244 - RNA, 21 nt, Human
cagaaaacacaaaaccaacca

SEQ ID NO: 1034245 - RNA, 24 nt, Human
cagcaaccugggaggcugaggcag

SEQ ID NO: 1034246 - RNA, 21 nt, Human
cagcacuuugggaggccacgg

SEQ ID NO: 1034247 - RNA, 24 nt, Human
cagcacuuugggaggccacggcag

SEQ ID NO: 1034248 - RNA, 20 nt, Human
cagccgaccgcaagauccca

SEQ ID NO: 1034249 - RNA, 29 nt, Human
caggagguggagauugcagugacaacggu

SEQ ID NO: 1034250 - RNA, 22 nt, Human
cagguggauuacgaggucagga

SEQ ID NO: 1034251 - RNA, 25 nt, Human
caguaccaaaauaaaguuaacugaa

SEQ ID NO: 1034252 - RNA, 20 nt, Human
caugccuguaaucccagcac

SEQ ID NO: 1034253 - RNA, 18 nt, Human
caugcucgccggcagaau

SEQ ID NO: 1034254 - RNA, 21 nt, Human
cauucagaaacacugacucau

SEQ ID NO: 1034255 - RNA, 19 nt, Human
cauugcacucuagccuggg

SEQ ID NO: 1034256 - RNA, 21 nt, Human
cauugcacucuagccugggug

SEQ ID NO: 1034257 - RNA, 22 nt, Human
cauugcacucuagccuggguga

SEQ ID NO: 1034258 - RNA, 24 nt, Human
cauugcacucuagccugggugaca

SEQ ID NO: 1034259 - RNA, 25 nt, Human
cauugcacucuagccugggugacag

SEQ ID NO: 1034260 - RNA, 27 nt, Human
ccaaauggaacccaaaaagccucaugu

SEQ ID NO: 1034261 - RNA, 18 nt, Human
ccaaugccauaugucauc

SEQ ID NO: 1034262 - RNA, 19 nt, Human
ccaaugccauaugucauca

SEQ ID NO: 1034263 - RNA, 20 nt, Human
ccauugcacucuagccuggg

SEQ ID NO: 1034264 - RNA, 21 nt, Human
ccauugcacucuagccugggu

SEQ ID NO: 1034265 - RNA, 21 nt, Human
ccauugcacucuagccugggu

SEQ ID NO: 1034266 - RNA, 22 nt, Human
ccauugcacucuagccugggug

SEQ ID NO: 1034267 - RNA, 23 nt, Human
ccauugcacucuagccuggguga

SEQ ID NO: 1034268 - RNA, 24 nt, Human
ccauugcacucuagccugggugac

SEQ ID NO: 1034269 - RNA, 23 nt, Human
cccaaaaagccucauguugcucu

SEQ ID NO: 1034270 - RNA, 20 nt, Human
cccaaaaccuucacauuagc

SEQ ID NO: 1034271 - RNA, 20 nt, Human
cccacccaccaaauggaacc

SEQ ID NO: 1034272 - RNA, 19 nt, Human
cccagccaaucugcuucca

SEQ ID NO: 1034273 - RNA, 20 nt, Human
cccagccaaucugcuuccac

SEQ ID NO: 1034274 - RNA, 23 nt, Human
cccccacccaccaaauggaaccc

SEQ ID NO: 1034275 - RNA, 24 nt, Human
cccccacccaccaaauggaaccca

SEQ ID NO: 1034276 - RNA, 22 nt, Human
cccucuuugcauuuuuagcugu

SEQ ID NO: 1034277 - RNA, 23 nt, Human
ccucaaccugucaacuuucaguu

SEQ ID NO: 1034278 - RNA, 26 nt, Human
ccucccccacccaccaaauggaaccc

SEQ ID NO: 1034279 - RNA, 23 nt, Human
ccuggccaacauggugaaacccc

SEQ ID NO: 1034280 - RNA, 24 nt, Human
ccuggccaacauggugaaacccca

SEQ ID NO: 1034281 - RNA, 22 nt, Human
ccugggugacagagcaagacuc

SEQ ID NO: 1034282 - RNA, 20 nt, Human
ccuguaaucccagcacuuug

SEQ ID NO: 1034283 - RNA, 22 nt, Human
cggccguaaucugauugaagca

SEQ ID NO: 1034284 - RNA, 24 nt, Human
cuagucuacuuuccucuuuucuua

SEQ ID NO: 1034285 - RNA, 23 nt, Human
cucaugccuguaaucccagcacu

SEQ ID NO: 1034286 - RNA, 24 nt, Human
cucaugccuguaaucccagcacuu

SEQ ID NO: 1034287 - RNA, 21 nt, Human
cuggacacacaacacguauuc

SEQ ID NO: 1034288 - RNA, 23 nt, Human
cuggccaacauggugaaacccca

SEQ ID NO: 1034289 - RNA, 24 nt, Human
cugggaggcugaggcaggagaauc

SEQ ID NO: 1034290 - RNA, 19 nt, Human
gaacccaaaaagccucaug

SEQ ID NO: 1034291 - RNA, 19 nt, Human
gacaccuuuccucugcauu

SEQ ID NO: 1034292 - RNA, 24 nt, Human
gacagagcaagacucugucuugag

SEQ ID NO: 1034293 - RNA, 19 nt, Human
gagaaaaaaaaaaaaaagc

SEQ ID NO: 1034294 - RNA, 23 nt, Human
gagaccagccuggccaacauggu

SEQ ID NO: 1034295 - RNA, 24 nt, Human
gauuacgaggucaggaguuugaga

SEQ ID NO: 1034296 - RNA, 20 nt, Human
gcacaaagccauacaagacu

SEQ ID NO: 1034297 - RNA, 24 nt, Human
gcacucuagccugggugacagagc

SEQ ID NO: 1034298 - RNA, 22 nt, Human
gcaggagaaucgcuugaaccca

SEQ ID NO: 1034299 - RNA, 24 nt, Human
gccaacauggugaaaccccaucuc

SEQ ID NO: 1034300 - RNA, 24 nt, Human
gccauugcacucuagccuggguga

SEQ ID NO: 1034301 - RNA, 19 nt, Human
gccucuuugauuguugcca

SEQ ID NO: 1034302 - RNA, 19 nt, Human
gcugggcacgguggcucau

SEQ ID NO: 1034303 - RNA, 22 nt, Human
gcugggcacgguggcucaugcc

SEQ ID NO: 1034304 - RNA, 27 nt, Human
ggaagaccacagccgaccgcaagaucc

SEQ ID NO: 1034305 - RNA, 22 nt, Human
ggagauugcagugagcugagau

SEQ ID NO: 1034306 - RNA, 24 nt, Human
ggagauugcagugagcugagauca

SEQ ID NO: 1034307 - RNA, 20 nt, Human
ggagauugcagugagcuggc

SEQ ID NO: 1034308 - RNA, 23 nt, Human
ggauuacgaggucaggaguuuga

SEQ ID NO: 1034309 - RNA, 23 nt, Human
ggcagguggauuacgaggucagg

SEQ ID NO: 1034310 - RNA, 24 nt, Human
ggccacggcagguggauuacgagg

SEQ ID NO: 1034311 - RNA, 25 nt, Human
ggcgugguggcacacaccuguaacc

SEQ ID NO: 1034312 - RNA, 23 nt, Human
ggcugggcacgguggcucaugcc

SEQ ID NO: 1034313 - RNA, 22 nt, Human
ggcugugggcuugugggugcuu

SEQ ID NO: 1034314 - RNA, 18 nt, Human
gggcacgguggcucaugc

SEQ ID NO: 1034315 - RNA, 24 nt, Human
gggcacgguggcucaugccuguaa

SEQ ID NO: 1034316 - RNA, 19 nt, Human
ggucaggaguuugagacca

SEQ ID NO: 1034317 - RNA, 24 nt, Human
gguggcacacaccuguaaccccag

SEQ ID NO: 1034318 - RNA, 23 nt, Human
gguggcucaugccuguaauccca

SEQ ID NO: 1034319 - RNA, 24 nt, Human
gguggcucaugccuguaaucccag

SEQ ID NO: 1034320 - RNA, 20 nt, Human
guggagauugcagugagcug

SEQ ID NO: 1034321 - RNA, 23 nt, Human
guggauuacgaggucaggaguuu

SEQ ID NO: 1034322 - RNA, 23 nt, Human
uaaaacccaacuauauuagauug

SEQ ID NO: 1034323 - RNA, 23 nt, Human
uaacagacaccuuuccucugcau

SEQ ID NO: 1034324 - RNA, 23 nt, Human
uaacuuuuccaacaaucauuacu

SEQ ID NO: 1034325 - RNA, 21 nt, Human
uacacaccaaugccauauguc

SEQ ID NO: 1034326 - RNA, 23 nt, Human
uacaugcaacaaugccucuuuga

SEQ ID NO: 1034327 - RNA, 24 nt, Human
uaccagaaaacacaaaaccaaccu

SEQ ID NO: 1034328 - RNA, 23 nt, Human
uaccagucaccucucaaaaacaa

SEQ ID NO: 1034329 - RNA, 24 nt, Human
uacuacuauuuucauuucauuggc

SEQ ID NO: 1034330 - RNA, 20 nt, Human
uagcugugaacauagguacc

SEQ ID NO: 1034331 - RNA, 24 nt, Human
uaugaacaaagccaacuucuguag

SEQ ID NO: 1034332 - RNA, 22 nt, Human
ucaaggauuaccagucaccucu

SEQ ID NO: 1034333 - RNA, 21 nt, Human
ucccccacccaccaaauggaa

SEQ ID NO: 1034334 - RNA, 24 nt, Human
ucuagccugggugacagagcaaga

SEQ ID NO: 1034335 - RNA, 22 nt, Human
ucucuacuaaaaauacaaaaaa

SEQ ID NO: 1034336 - RNA, 19 nt, Human
ucugcuuccacuuuucugu

SEQ ID NO: 1034337 - RNA, 19 nt, Human
ugaaaccccaucucuacua

SEQ ID NO: 1034338 - RNA, 23 nt, Human
ugaacauagguaccuacaucaag

SEQ ID NO: 1034339 - RNA, 22 nt, Human
ugagaaaaaaaaaaaaaagcac

SEQ ID NO: 1034340 - RNA, 23 nt, Human
ugagaccagccuggccaacaugg

SEQ ID NO: 1034341 - RNA, 20 nt, Human
ugaggcaggagaaucgcuug

SEQ ID NO: 1034342 - RNA, 24 nt, Human
ugaggcaggagaaucgcuugaacc

SEQ ID NO: 1034343 - RNA, 25 nt, Human
ugaggcaggagaaucgcuugaaccc

SEQ ID NO: 1034344 - RNA, 22 nt, Human
ugcaagcacauauuuguacaua

SEQ ID NO: 1034345 - RNA, 22 nt, Human
ugcacucuagccugggugacag

SEQ ID NO: 1034346 - RNA, 24 nt, Human
ugcacucuagccugggugacagag

SEQ ID NO: 1034347 - RNA, 23 nt, Human
ugccuguaaucccagcacuuugg

SEQ ID NO: 1034348 - RNA, 23 nt, Human
ugccuguaaucccagcacuuugg

SEQ ID NO: 1034349 - RNA, 24 nt, Human
ugccuguaaucccagcacuuuggg

SEQ ID NO: 1034350 - RNA, 21 nt, Human
uggauuacgaggucaggaguu

SEQ ID NO: 1034351 - RNA, 19 nt, Human
uggcacacaccuguaaccc

SEQ ID NO: 1034352 - RNA, 23 nt, Human
uggcacacaccuguaaccccagc

SEQ ID NO: 1034353 - RNA, 24 nt, Human
uggccaacauggugaaaccccauc

SEQ ID NO: 1034354 - RNA, 23 nt, Human
uggcucaaaauuacaugcaacaa

SEQ ID NO: 1034355 - RNA, 24 nt, Human
uggcucaugccuguaaucccagca

SEQ ID NO: 1034356 - RNA, 23 nt, Human
uggcugugggcuugugggugcuu

SEQ ID NO: 1034357 - RNA, 26 nt, Human
ugggacagaagcccagccaaucugcu

SEQ ID NO: 1034358 - RNA, 19 nt, Human
ugggaggcugaggcaggag

SEQ ID NO: 1034359 - RNA, 23 nt, Human
ugggaggcugaggcaggagaauc

SEQ ID NO: 1034360 - RNA, 22 nt, Human
ugggcacgguggcucaugccug

SEQ ID NO: 1034361 - RNA, 23 nt, Human
ugguggcacacaccuguaacccc

SEQ ID NO: 1034362 - RNA, 19 nt, Human
uguuauauuuccaguggaa

SEQ ID NO: 1034363 - RNA, 23 nt, Human
uuaauacugcaaggacugaugcu

SEQ ID NO: 1034364 - RNA, 24 nt, Human
uuacgaggucaggaguuugagacc

SEQ ID NO: 1034365 - RNA, 26 nt, Human
uugagaaaaaaaaaaaaaagcacaau

SEQ ID NO: 1034366 - RNA, 18 nt, Human
uugcagugagcugagauc

SEQ ID NO: 1034367 - RNA, 19 nt, Human
uugcagugagcugagauca

SEQ ID NO: 1034368 - RNA, 20 nt, Human
uugcagugagcugagaucau

SEQ ID NO: 1034369 - RNA, 23 nt, Human
uuggaugcuuaacacaaacaaac

SEQ ID NO: 1034370 - RNA, 23 nt, Human
uugugaagaaguuucuaguggaa

SEQ ID NO: 1034371 - RNA, 19 nt, Human
uuuaccagaaaacacaaaa

SEQ ID NO: 1034372 - RNA, 22 nt, Human
uuuauuggcaguaccaaaauaa

SEQ ID NO: 1034373 - RNA, 18 nt, Human
uuuccagggcacaauacu

SEQ ID NO: 1034374 - RNA, 19 nt, Human
aaagugaguugaucaaggu

SEQ ID NO: 1034375 - RNA, 18 nt, Human
aacagcuacauucaaagc

SEQ ID NO: 1034376 - RNA, 21 nt, Human
aaccugcagaaucagagcaac

SEQ ID NO: 1034377 - RNA, 24 nt, Human
aagcauuaaaauaacaacagcuac

SEQ ID NO: 1034378 - RNA, 24 nt, Human
aaggucuugcccacucaugcuccu

SEQ ID NO: 1034379 - RNA, 20 nt, Human
acaaguacuuacauauccuc

SEQ ID NO: 1034380 - RNA, 20 nt, Human
acaggcuaggauucuguaac

SEQ ID NO: 1034381 - RNA, 19 nt, Human
aggaaucagagaccaguuu

SEQ ID NO: 1034382 - RNA, 23 nt, Human
auuaugcaugugcuccucaaaau

SEQ ID NO: 1034383 - RNA, 22 nt, Human
caacagcuacauucaaagcuuc

SEQ ID NO: 1034384 - RNA, 22 nt, Human
caauaaaagucccugcugaaag

SEQ ID NO: 1034385 - RNA, 31 nt, Human
caauuuuguuucaaaagacucuguugagggg

SEQ ID NO: 1034386 - RNA, 19 nt, Human
cacauguacaaguacuuac

SEQ ID NO: 1034387 - RNA, 22 nt, Human
cacauguacaaguacuuacaua

SEQ ID NO: 1034388 - RNA, 19 nt, Human
caccaugggaaguacagag

SEQ ID NO: 1034389 - RNA, 20 nt, Human
cacccagaguuaaagcacau

SEQ ID NO: 1034390 - RNA, 24 nt, Human
cauguacaaguacuuacauauccu

SEQ ID NO: 1034391 - RNA, 19 nt, Human
cauuaugcaugugcuccuc

SEQ ID NO: 1034392 - RNA, 18 nt, Human
ccaaugugucuaauaugg

SEQ ID NO: 1034393 - RNA, 24 nt, Human
ccccaauaaaagucccugcugaaa

SEQ ID NO: 1034394 - RNA, 20 nt, Human
ccgaauuacaaaacuaauaa

SEQ ID NO: 1034395 - RNA, 20 nt, Human
cuucccauuuuuuuuaaacc

SEQ ID NO: 1034396 - RNA, 24 nt, Human
cuugcccacucaugcuccuucuuc

SEQ ID NO: 1034397 - RNA, 22 nt, Human
gacaauaacagcaacuccagaa

SEQ ID NO: 1034398 - RNA, 22 nt, Human
guacaaguacuuacauauccuc

SEQ ID NO: 1034399 - RNA, 20 nt, Human
uaaaguaauguguguguggc

SEQ ID NO: 1034400 - RNA, 21 nt, Human
uaacaacagcuacauucaaag

SEQ ID NO: 1034401 - RNA, 18 nt, Human
uaagauggggccacagua

SEQ ID NO: 1034402 - RNA, 21 nt, Human
uaagauggggccacaguaauu

SEQ ID NO: 1034403 - RNA, 20 nt, Human
uaauuugcaaaagucugacc

SEQ ID NO: 1034404 - RNA, 19 nt, Human
uacaaguacuuacauaucc

SEQ ID NO: 1034405 - RNA, 23 nt, Human
uaguagguucuuuuugaaggucu

SEQ ID NO: 1034406 - RNA, 21 nt, Human
ucaaaagacucuguugagggg

SEQ ID NO: 1034407 - RNA, 24 nt, Human
ucaaaaucaccaugggaaguacag

SEQ ID NO: 1034408 - RNA, 20 nt, Human
ucacaaacuucccauuuuuu

SEQ ID NO: 1034409 - RNA, 18 nt, Human
ucaccaugggaaguacag

SEQ ID NO: 1034410 - RNA, 22 nt, Human
ucagagaaugaaaacgaucaau

SEQ ID NO: 1034411 - RNA, 21 nt, Human
ucccaggaguacuagucaguu

SEQ ID NO: 1034412 - RNA, 22 nt, Human
uccuccaaaucauagacaacaa

SEQ ID NO: 1034413 - RNA, 20 nt, Human
uccuucucagaaacaccuua

SEQ ID NO: 1034414 - RNA, 19 nt, Human
ucucagaaacaccuuacau

SEQ ID NO: 1034415 - RNA, 24 nt, Human
ucucuccauaauuugcaaaaguug

SEQ ID NO: 1034416 - RNA, 19 nt, Human
ugaaguaugguuugaccaa

SEQ ID NO: 1034417 - RNA, 21 nt, Human
ugcuccuucuucuggguacca

SEQ ID NO: 1034418 - RNA, 21 nt, Human
uggauaaaaccgaauuacaaa

SEQ ID NO: 1034419 - RNA, 18 nt, Human
ugggaaguacagaggguc

SEQ ID NO: 1034420 - RNA, 22 nt, Human
uuaaagugaguugaucaagguc

SEQ ID NO: 1034421 - RNA, 24 nt, Human
uuauacucauuugacagaugagga

SEQ ID NO: 1034422 - RNA, 26 nt, Human
uuaugcaugugcuccucaaaaucacc

SEQ ID NO: 1034423 - RNA, 24 nt, Human
uucccauuuuuuuuaaaccugcag

SEQ ID NO: 1034424 - RNA, 18 nt, Human
uuccuggauaaaaccgaa

SEQ ID NO: 1034425 - RNA, 22 nt, Human
uucuggguaccagcccccaaua

SEQ ID NO: 1034426 - RNA, 24 nt, Human
uugacagaugaggaaucagagacc

SEQ ID NO: 1034427 - RNA, 23 nt, Human
uuuaaacauaaggaagaaaugag

SEQ ID NO: 1034428 - RNA, 19 nt, Human
uuugaaggucuugcccacu

SEQ ID NO: 1034429 - RNA, 20 nt, Human
aaaagcaaaacuccaucuca

SEQ ID NO: 1034430 - RNA, 19 nt, Human
aacacagacuuuauaguau

SEQ ID NO: 1034431 - RNA, 23 nt, Human
aacauauuucuaauaagaaagua

SEQ ID NO: 1034432 - RNA, 20 nt, Human
aacauggugaaacccugucu

SEQ ID NO: 1034433 - RNA, 21 nt, Human
aacauggugaaacccugucuc

SEQ ID NO: 1034434 - RNA, 23 nt, Human
aacauggugaaacccugucucua

SEQ ID NO: 1034435 - RNA, 19 nt, Human
aacugcaagauacacagga

SEQ ID NO: 1034436 - RNA, 18 nt, Human
aagaaugaugaccuagga

SEQ ID NO: 1034437 - RNA, 21 nt, Human
aagauacacaggaugcuguag

SEQ ID NO: 1034438 - RNA, 23 nt, Human
aaucgcuugaacccgggagaggg

SEQ ID NO: 1034439 - RNA, 20 nt, Human
acaaaagcaaaacuccaucu

SEQ ID NO: 1034440 - RNA, 24 nt, Human
acaaacauggugaaacccugucuc

SEQ ID NO: 1034441 - RNA, 30 nt, Human
acaugagaggccaggugcgguggcucacgg

SEQ ID NO: 1034442 - RNA, 22 nt, Human
acccugucucuacuaaacauaa

SEQ ID NO: 1034443 - RNA, 21 nt, Human
agaaaaacaugagaggccagg

SEQ ID NO: 1034444 - RNA, 22 nt, Human
agaaucgcuugaacccgggaga

SEQ ID NO: 1034445 - RNA, 24 nt, Human
agacugaggcaggagaaucgcuug

SEQ ID NO: 1034446 - RNA, 24 nt, Human
agagggagguugcagugagccgag

SEQ ID NO: 1034447 - RNA, 24 nt, Human
agauagaaagcaaaguguucagga

SEQ ID NO: 1034448 - RNA, 23 nt, Human
agaucaccugaggucaggaguuc

SEQ ID NO: 1034449 - RNA, 25 nt, Human
agaucaccugaggucaggaguucga

SEQ ID NO: 1034450 - RNA, 23 nt, Human
agccgggcgcgguggcaggagcc

SEQ ID NO: 1034451 - RNA, 24 nt, Human
agccugacaaacauggugaaaccc

SEQ ID NO: 1034452 - RNA, 23 nt, Human
agccugggugacaaaagcaaaac

SEQ ID NO: 1034453 - RNA, 24 nt, Human
agccuguagucccagcuacucggg

SEQ ID NO: 1034454 - RNA, 26 nt, Human
aggcagaucaccugaggucaggaguu

SEQ ID NO: 1034455 - RNA, 24 nt, Human
aggcaggagaaucgcuugaacccg

SEQ ID NO: 1034456 - RNA, 22 nt, Human
aggcaggcagaucaccugaggu

SEQ ID NO: 1034457 - RNA, 26 nt, Human
aggcaggcagaucaccugaggucagg

SEQ ID NO: 1034458 - RNA, 19 nt, Human
agggagguugcagugagcc

SEQ ID NO: 1034459 - RNA, 21 nt, Human
aggugcgguggcucacgccug

SEQ ID NO: 1034460 - RNA, 24 nt, Human
aggugcgguggcucacgccuguaa

SEQ ID NO: 1034461 - RNA, 21 nt, Human
aucaccugaggucaggaguuc

SEQ ID NO: 1034462 - RNA, 24 nt, Human
aucaccugaggucaggaguucgag

SEQ ID NO: 1034463 - RNA, 24 nt, Human
aucgcgccauugcacuccagccug

SEQ ID NO: 1034464 - RNA, 20 nt, Human
augaaggguacuauaccaac

SEQ ID NO: 1034465 - RNA, 21 nt, Human
auugcacuccagccuggguga

SEQ ID NO: 1034466 - RNA, 18 nt, Human
caaaacuccaucucaaaa

SEQ ID NO: 1034467 - RNA, 23 nt, Human
caccugaggucaggaguucgaga

SEQ ID NO: 1034468 - RNA, 24 nt, Human
cacgccuguaaucccagcacuuug

SEQ ID NO: 1034469 - RNA, 18 nt, Human
cacuccagccugggugac

SEQ ID NO: 1034470 - RNA, 19 nt, Human
cacuccagccugggugaca

SEQ ID NO: 1034471 - RNA, 24 nt, Human
cagaucaccugaggucaggaguuc

SEQ ID NO: 1034472 - RNA, 21 nt, Human
cagcacuuugggagggcgagg

SEQ ID NO: 1034473 - RNA, 24 nt, Human
cagcacuuugggagggcgaggcag

SEQ ID NO: 1034474 - RNA, 24 nt, Human
caggcagaucaccugaggucagga

SEQ ID NO: 1034475 - RNA, 24 nt, Human
cagguggaggggaugaacuccauu

SEQ ID NO: 1034476 - RNA, 21 nt, Human
cauucauuccagcugugcagu

SEQ ID NO: 1034477 - RNA, 19 nt, Human
cauugcacuccagccuggg

SEQ ID NO: 1034478 - RNA, 21 nt, Human
cauugcacuccagccugggug

SEQ ID NO: 1034479 - RNA, 22 nt, Human
cauugcacuccagccuggguga

SEQ ID NO: 1034480 - RNA, 24 nt, Human
cauugcacuccagccugggugaca

SEQ ID NO: 1034481 - RNA, 25 nt, Human
cauugcacuccagccugggugacaa

SEQ ID NO: 1034482 - RNA, 20 nt, Human
ccauugcacuccagccuggg

SEQ ID NO: 1034483 - RNA, 21 nt, Human
ccauugcacuccagccugggu

SEQ ID NO: 1034484 - RNA, 21 nt, Human
ccauugcacuccagccugggu

SEQ ID NO: 1034485 - RNA, 22 nt, Human
ccauugcacuccagccugggug

SEQ ID NO: 1034486 - RNA, 23 nt, Human
ccauugcacuccagccuggguga

SEQ ID NO: 1034487 - RNA, 24 nt, Human
ccauugcacuccagccugggugac

SEQ ID NO: 1034488 - RNA, 21 nt, Human
cccgggagagggagguugcag

SEQ ID NO: 1034489 - RNA, 22 nt, Human
ccugacaaacauggugaaaccc

SEQ ID NO: 1034490 - RNA, 24 nt, Human
ccugacaaacauggugaaacccug

SEQ ID NO: 1034491 - RNA, 25 nt, Human
ccugggugacaaaagcaaaacucca

SEQ ID NO: 1034492 - RNA, 19 nt, Human
ccuguagucccagcuacuc

SEQ ID NO: 1034493 - RNA, 21 nt, Human
ccuguagucccagcuacucgg

SEQ ID NO: 1034494 - RNA, 22 nt, Human
ccuguagucccagcuacucggg

SEQ ID NO: 1034495 - RNA, 20 nt, Human
cgaggcaggcagaucaccug

SEQ ID NO: 1034496 - RNA, 26 nt, Human
cgccauugcacuccagccugggugac

SEQ ID NO: 1034497 - RNA, 24 nt, Human
cgccuguaaucccagcacuuuggg

SEQ ID NO: 1034498 - RNA, 22 nt, Human
cucacgccuguaaucccagcac

SEQ ID NO: 1034499 - RNA, 24 nt, Human
cucacgccuguaaucccagcacuu

SEQ ID NO: 1034500 - RNA, 21 nt, Human
cuccauucauuccagcugugc

SEQ ID NO: 1034501 - RNA, 24 nt, Human
cugacaaacauggugaaacccugu

SEQ ID NO: 1034502 - RNA, 21 nt, Human
cugcgcccuccgcaucucggc

SEQ ID NO: 1034503 - RNA, 22 nt, Human
cuugaacccgggagagggaggu

SEQ ID NO: 1034504 - RNA, 18 nt, Human
gaccacagcaggcauuca

SEQ ID NO: 1034505 - RNA, 19 nt, Human
gacccuuaagaucagacca

SEQ ID NO: 1034506 - RNA, 18 nt, Human
gagaggccaggugcggug

SEQ ID NO: 1034507 - RNA, 21 nt, Human
gagagggagguugcagugagc

SEQ ID NO: 1034508 - RNA, 23 nt, Human
gagaucgcgccauugcacuccag

SEQ ID NO: 1034509 - RNA, 25 nt, Human
gaggcaggcagaucaccugagguca

SEQ ID NO: 1034510 - RNA, 23 nt, Human
gagguugcagugagccgagaucg

SEQ ID NO: 1034511 - RNA, 24 nt, Human
gaucaccugaggucaggaguucga

SEQ ID NO: 1034512 - RNA, 19 nt, Human
gccauugcacuccagccug

SEQ ID NO: 1034513 - RNA, 24 nt, Human
gccauugcacuccagccuggguga

SEQ ID NO: 1034514 - RNA, 18 nt, Human
gcuguaggccugauuucc

SEQ ID NO: 1034515 - RNA, 19 nt, Human
ggacaccugaauuaugucg

SEQ ID NO: 1034516 - RNA, 22 nt, Human
ggagggcagaacuuaagaauga

SEQ ID NO: 1034517 - RNA, 21 nt, Human
ggagggcgaggcaggcagauc

SEQ ID NO: 1034518 - RNA, 20 nt, Human
ggagguugcagugagccgag

SEQ ID NO: 1034519 - RNA, 22 nt, Human
ggagguugcagugagccgagau

SEQ ID NO: 1034520 - RNA, 24 nt, Human
ggagguugcagugagccgagaucg

SEQ ID NO: 1034521 - RNA, 21 nt, Human
ggcucacgccuguaaucccag

SEQ ID NO: 1034522 - RNA, 23 nt, Human
gguggcaggagccuguaguccca

SEQ ID NO: 1034523 - RNA, 23 nt, Human
gguggcucacgccuguaauccca

SEQ ID NO: 1034524 - RNA, 24 nt, Human
gguggcucacgccuguaaucccag

SEQ ID NO: 1034525 - RNA, 21 nt, Human
gugaaacccugucucuacuaa

SEQ ID NO: 1034526 - RNA, 21 nt, Human
gugacaaaagcaaaacuccau

SEQ ID NO: 1034527 - RNA, 23 nt, Human
guggcucacgccuguaaucccag

SEQ ID NO: 1034528 - RNA, 19 nt, Human
guugcagugagccgagauc

SEQ ID NO: 1034529 - RNA, 20 nt, Human
uaaaauaccaaagcuuguga

SEQ ID NO: 1034530 - RNA, 18 nt, Human
uaagccugacaaacaugg

SEQ ID NO: 1034531 - RNA, 18 nt, Human
uaaguuaccaaaagcagc

SEQ ID NO: 1034532 - RNA, 20 nt, Human
uacuucauuuuuccuuauga

SEQ ID NO: 1034533 - RNA, 20 nt, Human
uagacccuuaagaucagacc

SEQ ID NO: 1034534 - RNA, 22 nt, Human
uauagaaaaacaugagaggcca

SEQ ID NO: 1034535 - RNA, 24 nt, Human
ucaggaugcuguguggcuucucuu

SEQ ID NO: 1034536 - RNA, 21 nt, Human
ucccaacugcaagauacacag

SEQ ID NO: 1034537 - RNA, 19 nt, Human
uccugggcucauaccccgg

SEQ ID NO: 1034538 - RNA, 23 nt, Human
ucgcgccauugcacuccagccug

SEQ ID NO: 1034539 - RNA, 24 nt, Human
ucgcuugaacccgggagagggagg

SEQ ID NO: 1034540 - RNA, 18 nt, Human
ucuccugggcucauaccc

SEQ ID NO: 1034541 - RNA, 27 nt, Human
ucuccugggcucauaccccggauucau

SEQ ID NO: 1034542 - RNA, 21 nt, Human
ucucuacuaaacauaaaaaaa

SEQ ID NO: 1034543 - RNA, 24 nt, Human
ugacaaacauggugaaacccuguc

SEQ ID NO: 1034544 - RNA, 23 nt, Human
ugacacugaggcacaaaggccug

SEQ ID NO: 1034545 - RNA, 22 nt, Human
ugagccgagaucgcgccauugc

SEQ ID NO: 1034546 - RNA, 20 nt, Human
ugaggcaggagaaucgcuug

SEQ ID NO: 1034547 - RNA, 24 nt, Human
ugaggcaggagaaucgcuugaacc

SEQ ID NO: 1034548 - RNA, 25 nt, Human
ugaggcaggagaaucgcuugaaccc

SEQ ID NO: 1034549 - RNA, 21 nt, Human
ugcacuccagccugggugaca

SEQ ID NO: 1034550 - RNA, 21 nt, Human
ugcuuauagaaaaacaugaga

SEQ ID NO: 1034551 - RNA, 24 nt, Human
uggcucacgccuguaaucccagca

SEQ ID NO: 1034552 - RNA, 18 nt, Human
ugggacaucugcgcccuc

SEQ ID NO: 1034553 - RNA, 24 nt, Human
ugggagggcgaggcaggcagauca

SEQ ID NO: 1034554 - RNA, 21 nt, Human
uguaaagcuuuuagcaucucu

SEQ ID NO: 1034555 - RNA, 20 nt, Human
uuaaaauaccaaagcuugug

SEQ ID NO: 1034556 - RNA, 22 nt, Human
uuauaguauguuuaaaaauccc

SEQ ID NO: 1034557 - RNA, 18 nt, Human
uugacacugaggcacaaa

SEQ ID NO: 1034558 - RNA, 24 nt, Human
uugacacugaggcacaaaggccug

SEQ ID NO: 1034559 - RNA, 18 nt, Human
uugcagugagccgagauc

SEQ ID NO: 1034560 - RNA, 20 nt, Human
uugcagugagccgagaucgc

SEQ ID NO: 1034561 - RNA, 22 nt, Human
uugcagugagccgagaucgcgc

SEQ ID NO: 1034562 - RNA, 24 nt, Human
uuggcagaagagauagaaagcaaa

SEQ ID NO: 1034563 - RNA, 26 nt, Human
uuuuuuuuuaaaauaccaaagcuugu

SEQ ID NO: 1034564 - RNA, 20 nt, Human
aagacgcccgcaccugaggg

SEQ ID NO: 1034565 - RNA, 24 nt, Human
aggcaaauauacauucuuguuccc

SEQ ID NO: 1034566 - RNA, 18 nt, Human
caccaaguuggcagugac

SEQ ID NO: 1034567 - RNA, 21 nt, Human
cagugacaguggcacacagaa

SEQ ID NO: 1034568 - RNA, 21 nt, Human
caguugauaugccuccaagau

SEQ ID NO: 1034569 - RNA, 23 nt, Human
caguugauaugccuccaagaucu

SEQ ID NO: 1034570 - RNA, 19 nt, Human
ccagccagucagaacggca

SEQ ID NO: 1034571 - RNA, 25 nt, Human
ccuccgcagaaugaggaggagcgaa

SEQ ID NO: 1034572 - RNA, 21 nt, Human
cucacagcaaacgccuacacc

SEQ ID NO: 1034573 - RNA, 24 nt, Human
cugcgaggccgacucgcaagacgc

SEQ ID NO: 1034574 - RNA, 22 nt, Human
gacucgcaagacgcccgcaccu

SEQ ID NO: 1034575 - RNA, 24 nt, Human
gcagaaugaggaggagcgaaguac

SEQ ID NO: 1034576 - RNA, 23 nt, Human
ggcaaauauacauucuuguuccc

SEQ ID NO: 1034577 - RNA, 22 nt, Human
ucacagcaaacgccuacaccaa

SEQ ID NO: 1034578 - RNA, 20 nt, Human
uccaagaucuaaacugaaga

SEQ ID NO: 1034579 - RNA, 18 nt, Human
ucccagggcccgcuucuc

SEQ ID NO: 1034580 - RNA, 19 nt, Human
uccgugcugcuuuccccuc

SEQ ID NO: 1034581 - RNA, 19 nt, Human
ugaagauacacaagcggug

SEQ ID NO: 1034582 - RNA, 22 nt, Human
ugauaugccuccaagaucuaaa

SEQ ID NO: 1034583 - RNA, 22 nt, Human
ugcagacaccgaagaaccugcu

SEQ ID NO: 1034584 - RNA, 23 nt, Human
ugcagacaccgaagaaccugcua

SEQ ID NO: 1034585 - RNA, 22 nt, Human
ugcagcuuccacagagcugcga

SEQ ID NO: 1034586 - RNA, 21 nt, Human
uuaaguaucugcuaaggugcc

SEQ ID NO: 1034587 - RNA, 23 nt, Human
uucacgcguucacaaucguuucc

SEQ ID NO: 1034588 - RNA, 22 nt, Human
uucccagggcccgcuucucagu

SEQ ID NO: 1034589 - RNA, 20 nt, Human
uuccccugcauucuccauuc

SEQ ID NO: 1034590 - RNA, 25 nt, Human
uugaugcugugacuuuuauucuaau

SEQ ID NO: 1034591 - RNA, 18 nt, Human
uuuccgcugccagucaca

SEQ ID NO: 1034592 - RNA, 20 nt, Human
agcggccgccgacuccagga

SEQ ID NO: 1034593 - RNA, 18 nt, Human
cccgcggcgggacccggg

SEQ ID NO: 1034594 - RNA, 20 nt, Human
ccggaaacuucgcagaccgc

SEQ ID NO: 1034595 - RNA, 21 nt, Human
cgcgaacccgcggcgggaccc

SEQ ID NO: 1034596 - RNA, 20 nt, Human
gaacccgcggcgggacccgg

SEQ ID NO: 1034597 - RNA, 23 nt, Human
gagcacaagcgcgaacccgcggc

SEQ ID NO: 1034598 - RNA, 18 nt, Human
gagcgcgagcacaagcgc

SEQ ID NO: 1034599 - RNA, 19 nt, Human
ucugggggcggggaccggg

SEQ ID NO: 1034600 - RNA, 22 nt, Human
ugggggcggggaccggguuggg

SEQ ID NO: 1034601 - RNA, 21 nt, Human
ugucugggggcggggaccggg

SEQ ID NO: 1034602 - RNA, 19 nt, Human
uugggcaacgagcgcgcgc

SEQ ID NO: 1034603 - RNA, 23 nt, Human
uuaacagcucuguuuucagcucc

SEQ ID NO: 1034604 - RNA, 19 nt, Human
aaguagaggcaggugagaa

SEQ ID NO: 1034605 - RNA, 19 nt, Human
aggcaggugagaaaggaag

SEQ ID NO: 1034606 - RNA, 23 nt, Human
caguugaucuccucgacugaucu

SEQ ID NO: 1034607 - RNA, 19 nt, Human
cugauuugaagacugacaa

SEQ ID NO: 1034608 - RNA, 22 nt, Human
gauccugauuuucucugauuug

SEQ ID NO: 1034609 - RNA, 19 nt, Human
uagaggcaggugagaaagg

SEQ ID NO: 1034610 - RNA, 20 nt, Human
aaaaaguaaaacaauugaaa

SEQ ID NO: 1034611 - RNA, 22 nt, Human
aaauuggaaauagugacaugua

SEQ ID NO: 1034612 - RNA, 21 nt, Human
aauaauugggcguggaagaaa

SEQ ID NO: 1034613 - RNA, 22 nt, Human
acugugcuugggauauuguguu

SEQ ID NO: 1034614 - RNA, 21 nt, Human
aggcugaaagaaaugcucuga

SEQ ID NO: 1034615 - RNA, 24 nt, Human
auguaaacugugcuugggauauug

SEQ ID NO: 1034616 - RNA, 18 nt, Human
caaagcaagaauaucacc

SEQ ID NO: 1034617 - RNA, 22 nt, Human
caggcugaaagaaaugcucuga

SEQ ID NO: 1034618 - RNA, 19 nt, Human
ccgcugucaaagcaagaau

SEQ ID NO: 1034619 - RNA, 21 nt, Human
cugcugccuccggaccgcugu

SEQ ID NO: 1034620 - RNA, 24 nt, Human
gaaaugcucugaagggaaagcuaa

SEQ ID NO: 1034621 - RNA, 24 nt, Human
gaagaaauugguucaggcucaaaa

SEQ ID NO: 1034622 - RNA, 18 nt, Human
gaauuugaaagacaggug

SEQ ID NO: 1034623 - RNA, 21 nt, Human
uaaaaaacaagugaaagggaa

SEQ ID NO: 1034624 - RNA, 18 nt, Human
uaauugggcguggaagaa

SEQ ID NO: 1034625 - RNA, 24 nt, Human
uauuguaaaaaacaagugaaaggg

SEQ ID NO: 1034626 - RNA, 23 nt, Human
ucgaggcagcuugaguuuucuuc

SEQ ID NO: 1034627 - RNA, 19 nt, Human
ucugaagguaggaaucaaa

SEQ ID NO: 1034628 - RNA, 19 nt, Human
ugaaacacaacuggaaaau

SEQ ID NO: 1034629 - RNA, 20 nt, Human
ugaagggaaagcuaagacau

SEQ ID NO: 1034630 - RNA, 19 nt, Human
ugcaacugggucugaaagg

SEQ ID NO: 1034631 - RNA, 22 nt, Human
ugcagaagauggugcaacuggg

SEQ ID NO: 1034632 - RNA, 19 nt, Human
uggaagaaauugguucagg

SEQ ID NO: 1034633 - RNA, 23 nt, Human
uugaugaggacuauguuucuuuu

SEQ ID NO: 1034634 - RNA, 20 nt, Human
acaugacuuuagcacugaaa

SEQ ID NO: 1034635 - RNA, 25 nt, Human
ccaaaaugaagguccuuuaauucac

SEQ ID NO: 1034636 - RNA, 22 nt, Human
cucucaguuccuugacccccuu

SEQ ID NO: 1034637 - RNA, 22 nt, Human
uagcacugaaaacccaaaacau

SEQ ID NO: 1034638 - RNA, 24 nt, Human
uagcacugaaaacccaaaacauau

SEQ ID NO: 1034639 - RNA, 20 nt, Human
ucucucaguuccuugacccc

SEQ ID NO: 1034640 - RNA, 21 nt, Human
ugaguggugaauaauuuucuu

SEQ ID NO: 1034641 - RNA, 23 nt, Human
uuagcacugaaaacccaaaacau

SEQ ID NO: 1034642 - RNA, 24 nt, Human
uucuuaagccucuucucucaguuc

SEQ ID NO: 1034643 - RNA, 18 nt, Human
uuuuuuuuuuuuuuuuug

SEQ ID NO: 1034644 - RNA, 22 nt, Human
uuuuuuuuuuuuuuuuuuuggc

SEQ ID NO: 1034645 - RNA, 20 nt, Human
aguuccuaaaaugaguaaaa

SEQ ID NO: 1034646 - RNA, 24 nt, Human
caccuccaguaggauguccagcug

SEQ ID NO: 1034647 - RNA, 23 nt, Human
cagagauggauaaguuuagagca

SEQ ID NO: 1034648 - RNA, 23 nt, Human
cauagccuuccuccccaaacaga

SEQ ID NO: 1034649 - RNA, 25 nt, Human
ccauauugcuuccucugucccaagu

SEQ ID NO: 1034650 - RNA, 18 nt, Human
cucuugguuuugcauccc

SEQ ID NO: 1034651 - RNA, 23 nt, Human
cucuugguuuugcaucccuuauc

SEQ ID NO: 1034652 - RNA, 26 nt, Human
cuguguguggcacugguggugguguu

SEQ ID NO: 1034653 - RNA, 19 nt, Human
cuguuuuaaugaucucucc

SEQ ID NO: 1034654 - RNA, 21 nt, Human
cuuacauagccuuccucccca

SEQ ID NO: 1034655 - RNA, 22 nt, Human
gccuuccuccccaaacagauuc

SEQ ID NO: 1034656 - RNA, 19 nt, Human
gguguucacaugggugaaa

SEQ ID NO: 1034657 - RNA, 18 nt, Human
uaaaaugaguaaaacuua

SEQ ID NO: 1034658 - RNA, 20 nt, Human
uaaauuuauuuuccuuaguu

SEQ ID NO: 1034659 - RNA, 21 nt, Human
uauucugaguucagucucugu

SEQ ID NO: 1034660 - RNA, 18 nt, Human
ucccucaccuccaguagg

SEQ ID NO: 1034661 - RNA, 25 nt, Human
uccuccccaaacagauucuuuuaaa

SEQ ID NO: 1034662 - RNA, 23 nt, Human
uggcuggaaaaguaccugugagu

SEQ ID NO: 1034663 - RNA, 18 nt, Human
ugggaucugcugaucuag

SEQ ID NO: 1034664 - RNA, 22 nt, Human
ugguauagucauucuucaugaa

SEQ ID NO: 1034665 - RNA, 22 nt, Human
uguccuuacauagccuuccucc

SEQ ID NO: 1034666 - RNA, 22 nt, Human
uuaaugguaucagugauguuuu

SEQ ID NO: 1034667 - RNA, 20 nt, Human
uuaucaguugucauuguccu

SEQ ID NO: 1034668 - RNA, 22 nt, Human
uuccaguaauggacagagaugg

SEQ ID NO: 1034669 - RNA, 21 nt, Human
uuccuaaaaugaguaaaacuu

SEQ ID NO: 1034670 - RNA, 19 nt, Human
uugcuuccucugucccaag

SEQ ID NO: 1034671 - RNA, 20 nt, Human
uuuaaugaucucuccuaucu

SEQ ID NO: 1034672 - RNA, 25 nt, Human
aaacaacccaaaugucgaucaacaa

SEQ ID NO: 1034673 - RNA, 22 nt, Human
aaccuccaccuccugacgaccc

SEQ ID NO: 1034674 - RNA, 25 nt, Human
aagcaagaagacugcuauuaugauc

SEQ ID NO: 1034675 - RNA, 22 nt, Human
aagugaaauacgccagacagaa

SEQ ID NO: 1034676 - RNA, 21 nt, Human
acaucacauuuucucuaaacu

SEQ ID NO: 1034677 - RNA, 19 nt, Human
acccaggcuggaguguggu

SEQ ID NO: 1034678 - RNA, 23 nt, Human
acccaggcuggagugugguggug

SEQ ID NO: 1034679 - RNA, 20 nt, Human
agaaaaggacaaaugcugca

SEQ ID NO: 1034680 - RNA, 22 nt, Human
aggacaaaugcugcauguuccc

SEQ ID NO: 1034681 - RNA, 23 nt, Human
agugugguggugcaaucuuggcu

SEQ ID NO: 1034682 - RNA, 24 nt, Human
agugugguggugcaaucuuggcuc

SEQ ID NO: 1034683 - RNA, 19 nt, Human
augaucccacuaaguuuuc

SEQ ID NO: 1034684 - RNA, 24 nt, Human
augcauuucugggcugcacauguc

SEQ ID NO: 1034685 - RNA, 20 nt, Human
caacaaaugaauggauaaac

SEQ ID NO: 1034686 - RNA, 26 nt, Human
caaccuccaccuccugacgacccaaa

SEQ ID NO: 1034687 - RNA, 21 nt, Human
cacccaggcuggaguguggug

SEQ ID NO: 1034688 - RNA, 21 nt, Human
cacugcaaccuccaccuccug

SEQ ID NO: 1034689 - RNA, 21 nt, Human
cagucuuaaaaaugaaggaaa

SEQ ID NO: 1034690 - RNA, 24 nt, Human
ccaaaaggggaaacaacccaaaug

SEQ ID NO: 1034691 - RNA, 21 nt, Human
cuauucaaucaucaugcucag

SEQ ID NO: 1034692 - RNA, 26 nt, Human
cucacugcaaccuccaccuccugacg

SEQ ID NO: 1034693 - RNA, 21 nt, Human
cucgcucugucacccaggcug

SEQ ID NO: 1034694 - RNA, 24 nt, Human
cucgcucugucacccaggcuggag

SEQ ID NO: 1034695 - RNA, 20 nt, Human
cucugucacccaggcuggag

SEQ ID NO: 1034696 - RNA, 18 nt, Human
cugcaaccuccaccuccu

SEQ ID NO: 1034697 - RNA, 19 nt, Human
gaaaaggacaaaugcugca

SEQ ID NO: 1034698 - RNA, 23 nt, Human
gaauguuaaaaaugugccagaga

SEQ ID NO: 1034699 - RNA, 25 nt, Human
gcucugucacccaggcuggagugug

SEQ ID NO: 1034700 - RNA, 22 nt, Human
ggaauauuauucagucuuaaaa

SEQ ID NO: 1034701 - RNA, 21 nt, Human
ggacaaaugcugcauguuccc

SEQ ID NO: 1034702 - RNA, 19 nt, Human
ggacaggagcgaaugggga

SEQ ID NO: 1034703 - RNA, 19 nt, Human
ggauaaacaaaauguagua

SEQ ID NO: 1034704 - RNA, 24 nt, Human
gucucgcucugucacccaggcugg

SEQ ID NO: 1034705 - RNA, 19 nt, Human
gucuuaaaaaugaaggaaa

SEQ ID NO: 1034706 - RNA, 23 nt, Human
guuuucucucaaugagccugugg

SEQ ID NO: 1034707 - RNA, 22 nt, Human
uaaaauagucaaauucagaagg

SEQ ID NO: 1034708 - RNA, 20 nt, Human
uaagaggggaaguauccuua

SEQ ID NO: 1034709 - RNA, 22 nt, Human
uacaguagccaaaaggggaaac

SEQ ID NO: 1034710 - RNA, 21 nt, Human
uaccuaaaauagucaaauuca

SEQ ID NO: 1034711 - RNA, 18 nt, Human
uacgccagacagaaaagg

SEQ ID NO: 1034712 - RNA, 25 nt, Human
uauauuaauagaaaggguguauauc

SEQ ID NO: 1034713 - RNA, 22 nt, Human
ucacccaggcuggaguguggug

SEQ ID NO: 1034714 - RNA, 19 nt, Human
ucacugcaaccuccaccuc

SEQ ID NO: 1034715 - RNA, 20 nt, Human
ucacugcaaccuccaccucc

SEQ ID NO: 1034716 - RNA, 22 nt, Human
ucacugcaaccuccaccuccug

SEQ ID NO: 1034717 - RNA, 24 nt, Human
ucacugcaaccuccaccuccugac

SEQ ID NO: 1034718 - RNA, 24 nt, Human
ucacugcaaccuccaccuccugac

SEQ ID NO: 1034719 - RNA, 23 nt, Human
ucagaaggacagaaaauacaaug

SEQ ID NO: 1034720 - RNA, 22 nt, Human
ucagucuuaaaaaugaaggaaa

SEQ ID NO: 1034721 - RNA, 22 nt, Human
ucaucaugcucagcacuggaga

SEQ ID NO: 1034722 - RNA, 24 nt, Human
ucgcucugucacccaggcuggagu

SEQ ID NO: 1034723 - RNA, 19 nt, Human
ucucgcucugucacccagg

SEQ ID NO: 1034724 - RNA, 23 nt, Human
ucucgcucugucacccaggcugg

SEQ ID NO: 1034725 - RNA, 24 nt, Human
ucucgcucugucacccaggcugga

SEQ ID NO: 1034726 - RNA, 24 nt, Human
ucugucacccaggcuggagugugg

SEQ ID NO: 1034727 - RNA, 22 nt, Human
ugagauggagucucgcucuguc

SEQ ID NO: 1034728 - RNA, 24 nt, Human
ugaugaggguuucacaacauugua

SEQ ID NO: 1034729 - RNA, 21 nt, Human
ugccaugggccaaggacagga

SEQ ID NO: 1034730 - RNA, 23 nt, Human
ugccaugggccaaggacaggagc

SEQ ID NO: 1034731 - RNA, 24 nt, Human
uggagugugguggugcaaucuugg

SEQ ID NO: 1034732 - RNA, 23 nt, Human
ugugguggugcaaucuuggcuca

SEQ ID NO: 1034733 - RNA, 25 nt, Human
ugugguggugcaaucuuggcucaac

SEQ ID NO: 1034734 - RNA, 22 nt, Human
uucagucuuaaaaaugaaggaa

SEQ ID NO: 1034735 - RNA, 18 nt, Human
uuccuaagcaagaagacu

SEQ ID NO: 1034736 - RNA, 20 nt, Human
uuccuaagcaagaagacugc

SEQ ID NO: 1034737 - RNA, 24 nt, Human
uuuuuuuuuuugagauggagucuc

SEQ ID NO: 1034738 - RNA, 20 nt, Human
aaaaaaaagcaaaaguauac

SEQ ID NO: 1034739 - RNA, 22 nt, Human
aaaaaguaugauauugugagga

SEQ ID NO: 1034740 - RNA, 26 nt, Human
aacccauucaccccaaaccuuuccca

SEQ ID NO: 1034741 - RNA, 19 nt, Human
aacuguaaauuccucacca

SEQ ID NO: 1034742 - RNA, 22 nt, Human
aaggacaucacaaaaccaugaa

SEQ ID NO: 1034743 - RNA, 19 nt, Human
acaugugcaugcgugugua

SEQ ID NO: 1034744 - RNA, 21 nt, Human
accccaaaccuuucccaggac

SEQ ID NO: 1034745 - RNA, 18 nt, Human
agacaggaggacagcugg

SEQ ID NO: 1034746 - RNA, 19 nt, Human
agacaggaggacagcuggg

SEQ ID NO: 1034747 - RNA, 21 nt, Human
agcagagaaaaugggggaggg

SEQ ID NO: 1034748 - RNA, 18 nt, Human
aggacuccaaggcccugc

SEQ ID NO: 1034749 - RNA, 26 nt, Human
aggccuguuccuccagaggaaaccuu

SEQ ID NO: 1034750 - RNA, 24 nt, Human
augagacaggaggacagcugggag

SEQ ID NO: 1034751 - RNA, 21 nt, Human
auucaccccaaaccuuuccca

SEQ ID NO: 1034752 - RNA, 20 nt, Human
caacgggggguuugaggcca

SEQ ID NO: 1034753 - RNA, 23 nt, Human
caccaggacuuuacuugcccccu

SEQ ID NO: 1034754 - RNA, 27 nt, Human
caccccaaaccuuucccaggaccaaaa

SEQ ID NO: 1034755 - RNA, 27 nt, Human
cagcaggccuguuccuccagagcuguc

SEQ ID NO: 1034756 - RNA, 25 nt, Human
caggaccaaaaccagccucuagugu

SEQ ID NO: 1034757 - RNA, 24 nt, Human
cauaaaaauaggacgauuuccaca

SEQ ID NO: 1034758 - RNA, 23 nt, Human
caucacaaaaccaugaacaguuu

SEQ ID NO: 1034759 - RNA, 19 nt, Human
cauguacacacacaugugc

SEQ ID NO: 1034760 - RNA, 19 nt, Human
ccaaaacuguauucauacc

SEQ ID NO: 1034761 - RNA, 22 nt, Human
ccaacccauucaccccaaaccu

SEQ ID NO: 1034762 - RNA, 20 nt, Human
ccagaggccaaguccaugcu

SEQ ID NO: 1034763 - RNA, 20 nt, Human
ccaggaccaaaaccagccuc

SEQ ID NO: 1034764 - RNA, 21 nt, Human
ccaucugaauggagggauaag

SEQ ID NO: 1034765 - RNA, 24 nt, Human
ccccaaaccuuucccaggaccaaa

SEQ ID NO: 1034766 - RNA, 27 nt, Human
cccucaaccgaggcauaaaaauaggac

SEQ ID NO: 1034767 - RNA, 22 nt, Human
ccuccuagaagugaaagacaaa

SEQ ID NO: 1034768 - RNA, 23 nt, Human
cgaaauacaaucuccuccuagaa

SEQ ID NO: 1034769 - RNA, 19 nt, Human
cuccagaggccaaguccau

SEQ ID NO: 1034770 - RNA, 22 nt, Human
gaaaaugggggagggaagaucu

SEQ ID NO: 1034771 - RNA, 23 nt, Human
gagcgggagucugaaaucacugg

SEQ ID NO: 1034772 - RNA, 19 nt, Human
gcccaggacacacacagga

SEQ ID NO: 1034773 - RNA, 23 nt, Human
ggagcagagaaaaugggggaggg

SEQ ID NO: 1034774 - RNA, 22 nt, Human
ggcccaggacacacacaggaga

SEQ ID NO: 1034775 - RNA, 21 nt, Human
ggggagcagagaaaauggggg

SEQ ID NO: 1034776 - RNA, 25 nt, Human
ggggagcagagaaaaugggggaggg

SEQ ID NO: 1034777 - RNA, 18 nt, Human
uaaauaacacaaagucau

SEQ ID NO: 1034778 - RNA, 19 nt, Human
uaaauuccucaccaggacu

SEQ ID NO: 1034779 - RNA, 20 nt, Human
uaacacaaagucauguacac

SEQ ID NO: 1034780 - RNA, 19 nt, Human
uauacuuuuauucuugaug

SEQ ID NO: 1034781 - RNA, 25 nt, Human
uccaaaaguuucuaacuguaaauuc

SEQ ID NO: 1034782 - RNA, 24 nt, Human
uccaccgcugcugagaugaaggga

SEQ ID NO: 1034783 - RNA, 20 nt, Human
uccacuaagaacccugccca

SEQ ID NO: 1034784 - RNA, 21 nt, Human
ucccaaaacuguauucauacc

SEQ ID NO: 1034785 - RNA, 20 nt, Human
ucccaggaccaaaaccagcc

SEQ ID NO: 1034786 - RNA, 18 nt, Human
ucucaggacuccaaggcc

SEQ ID NO: 1034787 - RNA, 23 nt, Human
ucugccaggcuccaaauucucca

SEQ ID NO: 1034788 - RNA, 19 nt, Human
ugaaggacaucacaaaacc

SEQ ID NO: 1034789 - RNA, 24 nt, Human
ugaauggagggauaagaaaaggag

SEQ ID NO: 1034790 - RNA, 19 nt, Human
ugaccaaacaaugagacag

SEQ ID NO: 1034791 - RNA, 19 nt, Human
ugagacaggaggacagcug

SEQ ID NO: 1034792 - RNA, 19 nt, Human
ugaggacuggaguggagcg

SEQ ID NO: 1034793 - RNA, 21 nt, Human
ugcuaggugaaggcaguaagg

SEQ ID NO: 1034794 - RNA, 21 nt, Human
uggagcggggagcagagaaaa

SEQ ID NO: 1034795 - RNA, 18 nt, Human
uggagggauaagaaaagg

SEQ ID NO: 1034796 - RNA, 19 nt, Human
uggcccaggacacacacag

SEQ ID NO: 1034797 - RNA, 21 nt, Human
ugggggagggaagaucucagg

SEQ ID NO: 1034798 - RNA, 24 nt, Human
ugggggagggaagaucucaggacu

SEQ ID NO: 1034799 - RNA, 25 nt, Human
ugggggagggaagaucucaggacuc

SEQ ID NO: 1034800 - RNA, 27 nt, Human
uguacacacacaugugcaugcgugugg

SEQ ID NO: 1034801 - RNA, 23 nt, Human
ugugcaugcguguguacuuguga

SEQ ID NO: 1034802 - RNA, 18 nt, Human
ugugccagaggaaugauu

SEQ ID NO: 1034803 - RNA, 22 nt, Human
uuagcacgguuuggcuuuccuc

SEQ ID NO: 1034804 - RNA, 23 nt, Human
uuccaacccauucaccccaaacc

SEQ ID NO: 1034805 - RNA, 18 nt, Human
uugaccaaacaaugagac

SEQ ID NO: 1034806 - RNA, 26 nt, Human
aaucacucccaauggccucgucccac

SEQ ID NO: 1034807 - RNA, 19 nt, Human
acacagagaagccaaucuc

SEQ ID NO: 1034808 - RNA, 22 nt, Human
acacagagaagccaaucucgga

SEQ ID NO: 1034809 - RNA, 25 nt, Human
accaaauucaccacugguuucagug

SEQ ID NO: 1034810 - RNA, 27 nt, Human
agagaagccaaucucggaggccacagg

SEQ ID NO: 1034811 - RNA, 19 nt, Human
agccaguagggcugugcuc

SEQ ID NO: 1034812 - RNA, 20 nt, Human
agggacugagagcacagcag

SEQ ID NO: 1034813 - RNA, 29 nt, Human
auccuugcucugggaacaaaaucagaggg

SEQ ID NO: 1034814 - RNA, 22 nt, Human
caaggagcacucuuagccagua

SEQ ID NO: 1034815 - RNA, 24 nt, Human
cacagcaaggaggacacagagaag

SEQ ID NO: 1034816 - RNA, 22 nt, Human
caccacugguuucagugcucca

SEQ ID NO: 1034817 - RNA, 22 nt, Human
cacucuuagccaguagggcugu

SEQ ID NO: 1034818 - RNA, 19 nt, Human
cagcucagugccauccucc

SEQ ID NO: 1034819 - RNA, 20 nt, Human
caguguuucuagaucuuuua

SEQ ID NO: 1034820 - RNA, 23 nt, Human
ccacaggcugcgucccacuuccu

SEQ ID NO: 1034821 - RNA, 22 nt, Human
ccaguagggcugugcucccucu

SEQ ID NO: 1034822 - RNA, 20 nt, Human
cccaaaagaguccccuuggu

SEQ ID NO: 1034823 - RNA, 18 nt, Human
ccuugcucugggaacaaa

SEQ ID NO: 1034824 - RNA, 22 nt, Human
cgucacgggguccacagcaagg

SEQ ID NO: 1034825 - RNA, 18 nt, Human
cugcugccaucugcaucu

SEQ ID NO: 1034826 - RNA, 18 nt, Human
cuuagccaguagggcugu

SEQ ID NO: 1034827 - RNA, 19 nt, Human
cuucaaucacucccaaugg

SEQ ID NO: 1034828 - RNA, 24 nt, Human
gagucggucagggacugagagcac

SEQ ID NO: 1034829 - RNA, 20 nt, Human
ggccucgucccacaacacag

SEQ ID NO: 1034830 - RNA, 19 nt, Human
gggcugugcucccucuggg

SEQ ID NO: 1034831 - RNA, 20 nt, Human
uaccaaauucaccacugguu

SEQ ID NO: 1034832 - RNA, 24 nt, Human
uccacagcaaggaggacacagaga

SEQ ID NO: 1034833 - RNA, 20 nt, Human
ucccaaaagaguccccuugg

SEQ ID NO: 1034834 - RNA, 22 nt, Human
ucccaauggccucgucccacaa

SEQ ID NO: 1034835 - RNA, 19 nt, Human
uccucagcuucucccugug

SEQ ID NO: 1034836 - RNA, 20 nt, Human
uccuguggcugcgcugcugc

SEQ ID NO: 1034837 - RNA, 22 nt, Human
ugcccugaggggugcuuaaugc

SEQ ID NO: 1034838 - RNA, 23 nt, Human
uggccucgucccacaacacagcc

SEQ ID NO: 1034839 - RNA, 25 nt, Human
ugucugagcuggccgccccggggau

SEQ ID NO: 1034840 - RNA, 25 nt, Human
aaaaaaaugacauaauaaaguucuc

SEQ ID NO: 1034841 - RNA, 26 nt, Human
aaaaaaaugacauaauaaaguucuca

SEQ ID NO: 1034842 - RNA, 27 nt, Human
aacuggccucacauuauucacaaagau

SEQ ID NO: 1034843 - RNA, 26 nt, Human
aagaggagacaugcucauauuaagaa

SEQ ID NO: 1034844 - RNA, 24 nt, Human
acacaccacacacauauaauuuca

SEQ ID NO: 1034845 - RNA, 24 nt, Human
acagagugagacucugucuuagaa

SEQ ID NO: 1034846 - RNA, 24 nt, Human
acauauuuauucacacaccacaca

SEQ ID NO: 1034847 - RNA, 22 nt, Human
accagaagugggccuucucaga

SEQ ID NO: 1034848 - RNA, 24 nt, Human
acugcacuccagcuggcgcgacag

SEQ ID NO: 1034849 - RNA, 20 nt, Human
agugauucuugugcccagga

SEQ ID NO: 1034850 - RNA, 24 nt, Human
agugcaguggcacaaccucggcuc

SEQ ID NO: 1034851 - RNA, 21 nt, Human
auaaaaagcugcuagucuaca

SEQ ID NO: 1034852 - RNA, 23 nt, Human
aucauggcacugcacuccagcug

SEQ ID NO: 1034853 - RNA, 20 nt, Human
auccauaaccagccuuccuu

SEQ ID NO: 1034854 - RNA, 22 nt, Human
auucacacaccacacacauaua

SEQ ID NO: 1034855 - RNA, 19 nt, Human
caaagcucaacggcuucuc

SEQ ID NO: 1034856 - RNA, 22 nt, Human
caagugauucuugugcccagga

SEQ ID NO: 1034857 - RNA, 19 nt, Human
cacacaccacacacauaua

SEQ ID NO: 1034858 - RNA, 24 nt, Human
cacaccacacacauauaauuucau

SEQ ID NO: 1034859 - RNA, 18 nt, Human
cacauaggcgcugcuacc

SEQ ID NO: 1034860 - RNA, 23 nt, Human
cacuccagcuggcgcgacagagu

SEQ ID NO: 1034861 - RNA, 18 nt, Human
cacugcacuccagcuggc

SEQ ID NO: 1034862 - RNA, 22 nt, Human
cacugcacuccagcuggcgcga

SEQ ID NO: 1034863 - RNA, 24 nt, Human
cacugcacuccagcuggcgcgaca

SEQ ID NO: 1034864 - RNA, 21 nt, Human
caguggcacaaccucggcuca

SEQ ID NO: 1034865 - RNA, 23 nt, Human
cauaauaaaguucucagauggga

SEQ ID NO: 1034866 - RNA, 19 nt, Human
cauagagaaaagggacaga

SEQ ID NO: 1034867 - RNA, 20 nt, Human
cccaggcugcagugcagugg

SEQ ID NO: 1034868 - RNA, 21 nt, Human
ccucgccugcugucggccaga

SEQ ID NO: 1034869 - RNA, 27 nt, Human
ccucggcucacucugccuccuggguuc

SEQ ID NO: 1034870 - RNA, 19 nt, Human
cuaauggccacagauuuuc

SEQ ID NO: 1034871 - RNA, 20 nt, Human
cuccuggguucaagugauuc

SEQ ID NO: 1034872 - RNA, 21 nt, Human
cuccuggguucaagugauucu

SEQ ID NO: 1034873 - RNA, 23 nt, Human
cugccuccuggguucaagugauu

SEQ ID NO: 1034874 - RNA, 21 nt, Human
cuucacauaggcgcugcuacc

SEQ ID NO: 1034875 - RNA, 19 nt, Human
cuuuaaaugaguucugacu

SEQ ID NO: 1034876 - RNA, 22 nt, Human
cuuuaaggcauaugccaucugu

SEQ ID NO: 1034877 - RNA, 24 nt, Human
gacagagugagacucugucuuaga

SEQ ID NO: 1034878 - RNA, 23 nt, Human
gagaucauggcacugcacuccag

SEQ ID NO: 1034879 - RNA, 24 nt, Human
gcacuccagcuggcgcgacagagu

SEQ ID NO: 1034880 - RNA, 19 nt, Human
gcacugcacuccagcuggc

SEQ ID NO: 1034881 - RNA, 22 nt, Human
gcgacagagugagacucugucu

SEQ ID NO: 1034882 - RNA, 19 nt, Human
gcucaacggcuucucauca

SEQ ID NO: 1034883 - RNA, 19 nt, Human
gcucacucugccuccuggg

SEQ ID NO: 1034884 - RNA, 24 nt, Human
ggagguuacagcgaccugagauca

SEQ ID NO: 1034885 - RNA, 18 nt, Human
gggaaccuggaugacuac

SEQ ID NO: 1034886 - RNA, 20 nt, Human
uaaagaauauucaacacaca

SEQ ID NO: 1034887 - RNA, 33 nt, Human
uaaauguaaagaauauucaacacacauucuggu

SEQ ID NO: 1034888 - RNA, 21 nt, Human
uaacuucacauaggcgcugcu

SEQ ID NO: 1034889 - RNA, 24 nt, Human
uacaaaaauauugugggaggggga

SEQ ID NO: 1034890 - RNA, 23 nt, Human
uacaacagccccauaacuuuagc

SEQ ID NO: 1034891 - RNA, 18 nt, Human
uaccacaguuaaagcauu

SEQ ID NO: 1034892 - RNA, 21 nt, Human
uagcuaacuucacauaggcgc

SEQ ID NO: 1034893 - RNA, 24 nt, Human
uagcuaacuucacauaggcgcugc

SEQ ID NO: 1034894 - RNA, 24 nt, Human
uauucaacacacauucugccaagu

SEQ ID NO: 1034895 - RNA, 24 nt, Human
uauucacacaccacacacauauag

SEQ ID NO: 1034896 - RNA, 19 nt, Human
uauuuuuuuugagacagag

SEQ ID NO: 1034897 - RNA, 24 nt, Human
uccagcuggcgcgacagagugaga

SEQ ID NO: 1034898 - RNA, 21 nt, Human
uccuggguucaagugauucuu

SEQ ID NO: 1034899 - RNA, 22 nt, Human
uccuggguucaagugauucuug

SEQ ID NO: 1034900 - RNA, 22 nt, Human
ucggcucacucugccuccuggg

SEQ ID NO: 1034901 - RNA, 24 nt, Human
ucuguagcccaggcugcagugcag

SEQ ID NO: 1034902 - RNA, 22 nt, Human
ucuugcucucuguagcccaggc

SEQ ID NO: 1034903 - RNA, 22 nt, Human
ugaaaagaggagacaugcucau

SEQ ID NO: 1034904 - RNA, 19 nt, Human
ugaauauccauaaccagcc

SEQ ID NO: 1034905 - RNA, 22 nt, Human
ugaauauccauaaccagccuuc

SEQ ID NO: 1034906 - RNA, 23 nt, Human
ugacauaauaaaguucucagaug

SEQ ID NO: 1034907 - RNA, 20 nt, Human
ugagacagagucuugcucuc

SEQ ID NO: 1034908 - RNA, 23 nt, Human
ugagacagagucuugcucucugu

SEQ ID NO: 1034909 - RNA, 20 nt, Human
ugauuuuggauuuuuacgug

SEQ ID NO: 1034910 - RNA, 24 nt, Human
ugcagugcaguggcacaaccucgg

SEQ ID NO: 1034911 - RNA, 20 nt, Human
ugcaguggcacaaccucggc

SEQ ID NO: 1034912 - RNA, 20 nt, Human
ugccagguuugauaaaaagc

SEQ ID NO: 1034913 - RNA, 18 nt, Human
uggcacaaccucggcuca

SEQ ID NO: 1034914 - RNA, 22 nt, Human
uggcauagagaaaagggacaga

SEQ ID NO: 1034915 - RNA, 23 nt, Human
uggcauagagaaaagggacagga

SEQ ID NO: 1034916 - RNA, 21 nt, Human
uggcgcgacagagugagacuc

SEQ ID NO: 1034917 - RNA, 22 nt, Human
uggcgcgacagagugagacucu

SEQ ID NO: 1034918 - RNA, 21 nt, Human
uguacauuguuugaauguccc

SEQ ID NO: 1034919 - RNA, 23 nt, Human
ugucucaauaccacaguuaaagc

SEQ ID NO: 1034920 - RNA, 23 nt, Human
ugucuucaaccucauuuugauuu

SEQ ID NO: 1034921 - RNA, 18 nt, Human
uuaaaagcuuccauuucc

SEQ ID NO: 1034922 - RNA, 22 nt, Human
uucaagugauucuugugcccag

SEQ ID NO: 1034923 - RNA, 21 nt, Human
uucacacaccacacacauaua

SEQ ID NO: 1034924 - RNA, 26 nt, Human
uucacacaccacacacauauaauuuc

SEQ ID NO: 1034925 - RNA, 22 nt, Human
uuuauucacacaccacacacau

SEQ ID NO: 1034926 - RNA, 23 nt, Human
cacuuuuaucucagcagcuaaag

SEQ ID NO: 1034927 - RNA, 21 nt, Human
cuaaagcuuucccuaagacaa

SEQ ID NO: 1034928 - RNA, 25 nt, Human
cuaaagcuuucccuaagacaaccaa

SEQ ID NO: 1034929 - RNA, 22 nt, Human
ucagcagcuaaagcuuucccua

SEQ ID NO: 1034930 - RNA, 26 nt, Human
ucagcagcuaaagcuuucccuaagac

SEQ ID NO: 1034931 - RNA, 22 nt, Human
ucccuaagacaaccaauuuccc

SEQ ID NO: 1034932 - RNA, 24 nt, Human
ucccugcuacaaugcucugguacc

SEQ ID NO: 1034933 - RNA, 20 nt, Human
aaaugguccugcaaucuuaa

SEQ ID NO: 1034934 - RNA, 20 nt, Human
aaccacuggaagaauuugaa

SEQ ID NO: 1034935 - RNA, 20 nt, Human
aauaaguggggagaagagaa

SEQ ID NO: 1034936 - RNA, 18 nt, Human
acacaggccacacucgac

SEQ ID NO: 1034937 - RNA, 22 nt, Human
acagagagacagcauaacuaca

SEQ ID NO: 1034938 - RNA, 19 nt, Human
accgcuucccagccagucc

SEQ ID NO: 1034939 - RNA, 22 nt, Human
agaacaacauucccauggucag

SEQ ID NO: 1034940 - RNA, 18 nt, Human
aguaacuuaccauacuga

SEQ ID NO: 1034941 - RNA, 25 nt, Human
augauaaucaagcuuaaaauguauc

SEQ ID NO: 1034942 - RNA, 20 nt, Human
caaaguaguuugaauagggc

SEQ ID NO: 1034943 - RNA, 20 nt, Human
caaauagaggacugccuaca

SEQ ID NO: 1034944 - RNA, 20 nt, Human
caaguuuuugucccccagaa

SEQ ID NO: 1034945 - RNA, 21 nt, Human
cacccccaaaauuuuaauacc

SEQ ID NO: 1034946 - RNA, 20 nt, Human
cagcagcaagaacaacauuc

SEQ ID NO: 1034947 - RNA, 24 nt, Human
cagcagcaagaacaacauucccau

SEQ ID NO: 1034948 - RNA, 18 nt, Human
ccauacugaguaagcauc

SEQ ID NO: 1034949 - RNA, 20 nt, Human
ccaugaccuuuaagguucug

SEQ ID NO: 1034950 - RNA, 19 nt, Human
cccaaaauuuuaauaccac

SEQ ID NO: 1034951 - RNA, 21 nt, Human
cccaugaugaaaaauuagggc

SEQ ID NO: 1034952 - RNA, 19 nt, Human
ccuagauuuuaacaacaac

SEQ ID NO: 1034953 - RNA, 20 nt, Human
cuccauaguuugguaccgca

SEQ ID NO: 1034954 - RNA, 23 nt, Human
cucgaccgaccgcuucccagcca

SEQ ID NO: 1034955 - RNA, 22 nt, Human
cuuuuuuucuggcaaguaacuu

SEQ ID NO: 1034956 - RNA, 20 nt, Human
gaccgcuucccagccagucc

SEQ ID NO: 1034957 - RNA, 23 nt, Human
gaccgcuucccagccaguccccc

SEQ ID NO: 1034958 - RNA, 19 nt, Human
gcuuaacgcugacuacuga

SEQ ID NO: 1034959 - RNA, 18 nt, Human
ggaagaauuugaaagaaa

SEQ ID NO: 1034960 - RNA, 21 nt, Human
gucagcuuccacccuuuuauu

SEQ ID NO: 1034961 - RNA, 18 nt, Human
uaaacuaaaucuagguca

SEQ ID NO: 1034962 - RNA, 19 nt, Human
uaaagcacccaugaugaaa

SEQ ID NO: 1034963 - RNA, 25 nt, Human
uaaauaucuuuuaauguaaaguuuu

SEQ ID NO: 1034964 - RNA, 20 nt, Human
uaacaacaacaguuuccuua

SEQ ID NO: 1034965 - RNA, 23 nt, Human
uaaggagucuuuuuacaauccua

SEQ ID NO: 1034966 - RNA, 20 nt, Human
uacaaugugcuaacuaaaau

SEQ ID NO: 1034967 - RNA, 24 nt, Human
uacacagcagcaagaacaacauuc

SEQ ID NO: 1034968 - RNA, 21 nt, Human
uacuuguuuauauugauccag

SEQ ID NO: 1034969 - RNA, 22 nt, Human
uagauuuuaacaacaacaguuu

SEQ ID NO: 1034970 - RNA, 22 nt, Human
uauguucacggcaaacugccau

SEQ ID NO: 1034971 - RNA, 20 nt, Human
ucaaccacccccaaaauuuu

SEQ ID NO: 1034972 - RNA, 24 nt, Human
ucacaaucaugaagcauaucuguu

SEQ ID NO: 1034973 - RNA, 19 nt, Human
ucacuuccaguguuaucau

SEQ ID NO: 1034974 - RNA, 25 nt, Human
ucagugacuucuucuacaaauucau

SEQ ID NO: 1034975 - RNA, 22 nt, Human
uccaaaacaguuuaauacucaa

SEQ ID NO: 1034976 - RNA, 23 nt, Human
uccacacaggccacacucgaccg

SEQ ID NO: 1034977 - RNA, 19 nt, Human
ugaacugaauuaacagaug

SEQ ID NO: 1034978 - RNA, 18 nt, Human
ugaaguaagcacuguucc

SEQ ID NO: 1034979 - RNA, 22 nt, Human
ugcgaguccacacaggccacac

SEQ ID NO: 1034980 - RNA, 18 nt, Human
ugggaccauaaaaauggu

SEQ ID NO: 1034981 - RNA, 20 nt, Human
ugucauaugauaaucaagcu

SEQ ID NO: 1034982 - RNA, 23 nt, Human
ugucuggagguuuaggucauggg

SEQ ID NO: 1034983 - RNA, 21 nt, Human
uuaacaacaacaguuuccuua

SEQ ID NO: 1034984 - RNA, 21 nt, Human
uuuacaauccuaaucaaccac

SEQ ID NO: 1034985 - RNA, 23 nt, Human
uuuuuuuuuaaccaucacuuccu

SEQ ID NO: 1034986 - RNA, 18 nt, Human
aaccuggucgauggaacc

SEQ ID NO: 1034987 - RNA, 24 nt, Human
acacaccugcuagccccuuccccu

SEQ ID NO: 1034988 - RNA, 19 nt, Human
acccagaagccucaggccu

SEQ ID NO: 1034989 - RNA, 19 nt, Human
acugaagacauuggggacc

SEQ ID NO: 1034990 - RNA, 23 nt, Human
auggaacccucuguuuacacacc

SEQ ID NO: 1034991 - RNA, 21 nt, Human
caccaggacccagaagccuca

SEQ ID NO: 1034992 - RNA, 24 nt, Human
cagccaggagcccccuccuguggc

SEQ ID NO: 1034993 - RNA, 22 nt, Human
caggagcccccuccuguggccu

SEQ ID NO: 1034994 - RNA, 21 nt, Human
cccaagagggggccccccacu

SEQ ID NO: 1034995 - RNA, 19 nt, Human
cccagaagccucaggccuc

SEQ ID NO: 1034996 - RNA, 20 nt, Human
cccagaagccucaggccucu

SEQ ID NO: 1034997 - RNA, 21 nt, Human
cccgucaccaggacccagaag

SEQ ID NO: 1034998 - RNA, 22 nt, Human
cccgucaccaggacccagaagc

SEQ ID NO: 1034999 - RNA, 22 nt, Human
ccggccagccucaggccagcca

SEQ ID NO: 1035000 - RNA, 22 nt, Human
ccucaggccagccaggagcccc

SEQ ID NO: 1035001 - RNA, 22 nt, Human
ccucccagaggccgagucccug

SEQ ID NO: 1035002 - RNA, 23 nt, Human
ccuuccccuccggccagccucag

SEQ ID NO: 1035003 - RNA, 22 nt, Human
cugcuauggcaucaccagaccc

SEQ ID NO: 1035004 - RNA, 18 nt, Human
gacccagaagccucaggc

SEQ ID NO: 1035005 - RNA, 19 nt, Human
gccagccucaggccagccg

SEQ ID NO: 1035006 - RNA, 19 nt, Human
gcgugcaggggggcugagc

SEQ ID NO: 1035007 - RNA, 20 nt, Human
ggagcccccuccuguggccu

SEQ ID NO: 1035008 - RNA, 21 nt, Human
ggccgagucccugccgcagcc

SEQ ID NO: 1035009 - RNA, 24 nt, Human
gugcaggggggcugagcugggggc

SEQ ID NO: 1035010 - RNA, 20 nt, Human
guggccuccgagcacccucc

SEQ ID NO: 1035011 - RNA, 19 nt, Human
uauggcaucaccagacccc

SEQ ID NO: 1035012 - RNA, 18 nt, Human
ucaggccucuagacugcu

SEQ ID NO: 1035013 - RNA, 22 nt, Human
ucccagaggccgagucccugcc

SEQ ID NO: 1035014 - RNA, 20 nt, Human
ugagcugggggcacaagugg

SEQ ID NO: 1035015 - RNA, 22 nt, Human
ugagcugggggcacaagugggg

SEQ ID NO: 1035016 - RNA, 24 nt, Human
ugagcugggggcacaagugggggc

SEQ ID NO: 1035017 - RNA, 26 nt, Human
ugccgcagcccuaggcgccgcggugg

SEQ ID NO: 1035018 - RNA, 20 nt, Human
uggccuccgagcacccuccu

SEQ ID NO: 1035019 - RNA, 24 nt, Human
ugggcuccggggcccaagcaaccu

SEQ ID NO: 1035020 - RNA, 21 nt, Human
ugggggcacaagugggggcga

SEQ ID NO: 1035021 - RNA, 23 nt, Human
aggaaaauccaaucacagaaaug

SEQ ID NO: 1035022 - RNA, 24 nt, Human
gaaaauccaaucacagaaauguca

SEQ ID NO: 1035023 - RNA, 21 nt, Human
gcugagugccuuaggccgggc

SEQ ID NO: 1035024 - RNA, 20 nt, Human
ggagauggaagacagcucgg

SEQ ID NO: 1035025 - RNA, 19 nt, Human
aaccaugcacucccaaggu

SEQ ID NO: 1035026 - RNA, 19 nt, Human
acgaaccaugcacucccaa

SEQ ID NO: 1035027 - RNA, 18 nt, Human
cacgaaccaugcacuccc

SEQ ID NO: 1035028 - RNA, 23 nt, Human
gaaccaugcacucccaaggucag

SEQ ID NO: 1035029 - RNA, 24 nt, Human
aagccaacuucuugagaacaauau

SEQ ID NO: 1035030 - RNA, 19 nt, Human
agagaagccaacuucuuga

SEQ ID NO: 1035031 - RNA, 19 nt, Human
caagagaagccaacuucuu

SEQ ID NO: 1035032 - RNA, 20 nt, Human
gagaaaagcagaagagcccc

SEQ ID NO: 1035033 - RNA, 19 nt, Human
gcaagagaagccaacuucu

SEQ ID NO: 1035034 - RNA, 19 nt, Human
gccccuuuuccucuucaug

SEQ ID NO: 1035035 - RNA, 21 nt, Human
uagcacacagaucugcuucuc

SEQ ID NO: 1035036 - RNA, 23 nt, Human
uauguuauucccuuuuuaugaga

SEQ ID NO: 1035037 - RNA, 18 nt, Human
ugagaaaagcagaagagc

SEQ ID NO: 1035038 - RNA, 21 nt, Human
ugagaaaagcagaagagcccc

SEQ ID NO: 1035039 - RNA, 21 nt, Human
uuacuggauauguuauucccu

SEQ ID NO: 1035040 - RNA, 19 nt, Human
uuccucuucauguagcaca

SEQ ID NO: 1035041 - RNA, 21 nt, Human
uugcaagagaagccaacuucu

SEQ ID NO: 1035042 - RNA, 22 nt, Human
uugcaagagaagccaacuucuu

SEQ ID NO: 1035043 - RNA, 22 nt, Human
cacccggacgccgcugggcuca

SEQ ID NO: 1035044 - RNA, 25 nt, Human
cacccggacgccgcugggcucagcc

SEQ ID NO: 1035045 - RNA, 20 nt, Human
cagcccugggcccgcucguc

SEQ ID NO: 1035046 - RNA, 18 nt, Human
cagccggagacgccgggg

SEQ ID NO: 1035047 - RNA, 20 nt, Human
ccaccgcccacccggacgcc

SEQ ID NO: 1035048 - RNA, 25 nt, Human
cccugggcccgcucgucccgguaac

SEQ ID NO: 1035049 - RNA, 25 nt, Human
ccugacccggccucaauguccugac

SEQ ID NO: 1035050 - RNA, 22 nt, Human
gcagccggagacgccggggucc

SEQ ID NO: 1035051 - RNA, 23 nt, Human
gguccagcacgugcucggaagcc

SEQ ID NO: 1035052 - RNA, 23 nt, Human
ggugcagccggagacgccggggu

SEQ ID NO: 1035053 - RNA, 18 nt, Human
uccccagcacaggugagg

SEQ ID NO: 1035054 - RNA, 21 nt, Human
ucucacgcucccugacccggc

SEQ ID NO: 1035055 - RNA, 18 nt, Human
ugacccggccucaauguc

SEQ ID NO: 1035056 - RNA, 19 nt, Human
ugccccagaucaggaccca

SEQ ID NO: 1035057 - RNA, 21 nt, Human
ugccccagaucaggacccagc

SEQ ID NO: 1035058 - RNA, 19 nt, Human
aaaacaacgaacaaaacag

SEQ ID NO: 1035059 - RNA, 24 nt, Human
aaaaucuggucuucuuuucacuau

SEQ ID NO: 1035060 - RNA, 26 nt, Human
aaacacgcacacacagauuaaaaucc

SEQ ID NO: 1035061 - RNA, 22 nt, Human
aaaguagcuaacaucaaaguca

SEQ ID NO: 1035062 - RNA, 19 nt, Human
aaauaagccacaacaugag

SEQ ID NO: 1035063 - RNA, 18 nt, Human
aacugcagacgacagaac

SEQ ID NO: 1035064 - RNA, 24 nt, Human
aagcaaacaugguaagauagugau

SEQ ID NO: 1035065 - RNA, 19 nt, Human
aagcucccaacaagaaucu

SEQ ID NO: 1035066 - RNA, 25 nt, Human
aaggguaaauaacaugccugaguua

SEQ ID NO: 1035067 - RNA, 19 nt, Human
aagugagguuagugcugac

SEQ ID NO: 1035068 - RNA, 22 nt, Human
aaucuuauuccaaaucauccac

SEQ ID NO: 1035069 - RNA, 21 nt, Human
acacagcaugccagagucucc

SEQ ID NO: 1035070 - RNA, 25 nt, Human
acagucuugaguguuggcacuguuu

SEQ ID NO: 1035071 - RNA, 23 nt, Human
accaaugcacuauucuaguuuug

SEQ ID NO: 1035072 - RNA, 18 nt, Human
acuaaccaucucuuucug

SEQ ID NO: 1035073 - RNA, 18 nt, Human
acugaacugcagacgaca

SEQ ID NO: 1035074 - RNA, 23 nt, Human
acugaacugcagacgacagaaca

SEQ ID NO: 1035075 - RNA, 24 nt, Human
agaaaacaacgaacaaaacagaac

SEQ ID NO: 1035076 - RNA, 22 nt, Human
agaaaacauucagccugaguaa

SEQ ID NO: 1035077 - RNA, 20 nt, Human
agaauacauagacucaaaua

SEQ ID NO: 1035078 - RNA, 19 nt, Human
agcccauggggcugagauu

SEQ ID NO: 1035079 - RNA, 23 nt, Human
agguuaaacccauucaauaguau

SEQ ID NO: 1035080 - RNA, 21 nt, Human
aguuuuguguaauuuuuaaau

SEQ ID NO: 1035081 - RNA, 19 nt, Human
auagcaaguaacauuacaa

SEQ ID NO: 1035082 - RNA, 22 nt, Human
aucacacuuuccaccaucauga

SEQ ID NO: 1035083 - RNA, 19 nt, Human
aucauucuuuucuucucua

SEQ ID NO: 1035084 - RNA, 24 nt, Human
aucuugugagguuugaaggguaca

SEQ ID NO: 1035085 - RNA, 21 nt, Human
augagucaacagaagucugca

SEQ ID NO: 1035086 - RNA, 21 nt, Human
auguuuuaugaaagaccauuu

SEQ ID NO: 1035087 - RNA, 21 nt, Human
caaaaguaucuugcaaggccg

SEQ ID NO: 1035088 - RNA, 22 nt, Human
caaaguguucacagcagugaaa

SEQ ID NO: 1035089 - RNA, 18 nt, Human
caacuucuaaugcacccu

SEQ ID NO: 1035090 - RNA, 21 nt, Human
caaguaacauuacaaaacauc

SEQ ID NO: 1035091 - RNA, 22 nt, Human
caauuagagcccauggggcuga

SEQ ID NO: 1035092 - RNA, 20 nt, Human
cacacacagauuaaaauccc

SEQ ID NO: 1035093 - RNA, 19 nt, Human
cacugugucuucacaaagc

SEQ ID NO: 1035094 - RNA, 25 nt, Human
cacuguuugagguacauuuucucca

SEQ ID NO: 1035095 - RNA, 23 nt, Human
cagaaaacaacgaacaaaacaga

SEQ ID NO: 1035096 - RNA, 24 nt, Human
cagaauacauagacucaaauaaua

SEQ ID NO: 1035097 - RNA, 22 nt, Human
cagggagaaaaagaagauaacc

SEQ ID NO: 1035098 - RNA, 19 nt, Human
caucaacuccaagaacugc

SEQ ID NO: 1035099 - RNA, 19 nt, Human
caucacacuuuccaccauc

SEQ ID NO: 1035100 - RNA, 22 nt, Human
caucacauuucuucagaaacaa

SEQ ID NO: 1035101 - RNA, 25 nt, Human
caucacauuucuucagaaacaacag

SEQ ID NO: 1035102 - RNA, 22 nt, Human
caugucuccacagaggucacug

SEQ ID NO: 1035103 - RNA, 20 nt, Human
cauuuuuaguauucucauuu

SEQ ID NO: 1035104 - RNA, 22 nt, Human
ccaaaagacaguuuucacuaua

SEQ ID NO: 1035105 - RNA, 18 nt, Human
cccaaauaucuauuuaac

SEQ ID NO: 1035106 - RNA, 18 nt, Human
cccauggggcugagauuc

SEQ ID NO: 1035107 - RNA, 21 nt, Human
cucacuuuaccaucagcauaa

SEQ ID NO: 1035108 - RNA, 24 nt, Human
cuggcuaugagaugaagccgaagg

SEQ ID NO: 1035109 - RNA, 27 nt, Human
cuuacauaaacaaauucauacuggaga

SEQ ID NO: 1035110 - RNA, 20 nt, Human
cuuuucuucucuacuuucuc

SEQ ID NO: 1035111 - RNA, 20 nt, Human
gaaacaguacccaaaagaca

SEQ ID NO: 1035112 - RNA, 22 nt, Human
gacagaacaacuguacuaacca

SEQ ID NO: 1035113 - RNA, 23 nt, Human
gagguagaagacaaguuuaaaug

SEQ ID NO: 1035114 - RNA, 20 nt, Human
gagguuugaaggguacacug

SEQ ID NO: 1035115 - RNA, 24 nt, Human
gauuguuaaaaacgaaaucaucau

SEQ ID NO: 1035116 - RNA, 18 nt, Human
gccacaauuuucacaggu

SEQ ID NO: 1035117 - RNA, 21 nt, Human
guaaaauaagauaugugcccc

SEQ ID NO: 1035118 - RNA, 26 nt, Human
guagcccagagauaguucugagguca

SEQ ID NO: 1035119 - RNA, 21 nt, Human
uaaaaaaaaauuccccaaaua

SEQ ID NO: 1035120 - RNA, 21 nt, Human
uaaacaaauucauacuggaga

SEQ ID NO: 1035121 - RNA, 23 nt, Human
uaaaccagaugaagaaccuucca

SEQ ID NO: 1035122 - RNA, 27 nt, Human
uaaauaagccacaacaugagugagacc

SEQ ID NO: 1035123 - RNA, 25 nt, Human
uaaaucauguaguuuauauaaacug

SEQ ID NO: 1035124 - RNA, 22 nt, Human
uaacaggucaagaaugccaaag

SEQ ID NO: 1035125 - RNA, 25 nt, Human
uaaccccaaaugcuuccucuaauau

SEQ ID NO: 1035126 - RNA, 18 nt, Human
uaacugucuuaggugaua

SEQ ID NO: 1035127 - RNA, 19 nt, Human
uaagcaaacaaaaaaauga

SEQ ID NO: 1035128 - RNA, 26 nt, Human
uaauuuaaccucucaucaacuccaag

SEQ ID NO: 1035129 - RNA, 19 nt, Human
uacagaaaacaacgaacaa

SEQ ID NO: 1035130 - RNA, 22 nt, Human
uaccugaaaauacugcuuacuu

SEQ ID NO: 1035131 - RNA, 19 nt, Human
uaggugauauucaaaaaug

SEQ ID NO: 1035132 - RNA, 21 nt, Human
ucaaaagaauuaccuugucua

SEQ ID NO: 1035133 - RNA, 21 nt, Human
ucaaaguagcuaacaucaaag

SEQ ID NO: 1035134 - RNA, 23 nt, Human
ucaaaguagcuaacaucaaaguc

SEQ ID NO: 1035135 - RNA, 22 nt, Human
ucaacuccaagaacugcauuuc

SEQ ID NO: 1035136 - RNA, 19 nt, Human
ucaaugguuacaucaguua

SEQ ID NO: 1035137 - RNA, 22 nt, Human
ucacacacaaacacgcacacac

SEQ ID NO: 1035138 - RNA, 23 nt, Human
ucacacacaaacacgcacacaca

SEQ ID NO: 1035139 - RNA, 20 nt, Human
ucacacuuuuaaagugaggu

SEQ ID NO: 1035140 - RNA, 21 nt, Human
ucacagcagugaaauaacaca

SEQ ID NO: 1035141 - RNA, 18 nt, Human
ucagaauacauagacuca

SEQ ID NO: 1035142 - RNA, 19 nt, Human
ucaugaguauacucuuaag

SEQ ID NO: 1035143 - RNA, 22 nt, Human
ucauucuuuucuucucuacuuu

SEQ ID NO: 1035144 - RNA, 19 nt, Human
ucuacuccauuguaacuaa

SEQ ID NO: 1035145 - RNA, 19 nt, Human
ucucacacacaaacacgca

SEQ ID NO: 1035146 - RNA, 18 nt, Human
ucuucagaaacaacagac

SEQ ID NO: 1035147 - RNA, 19 nt, Human
ucuucagaaacaacagacc

SEQ ID NO: 1035148 - RNA, 18 nt, Human
ucuucucuacuuucucuc

SEQ ID NO: 1035149 - RNA, 25 nt, Human
ucuucugaguuucaucuugugaggu

SEQ ID NO: 1035150 - RNA, 23 nt, Human
ucuugugagguuugaaggguaca

SEQ ID NO: 1035151 - RNA, 23 nt, Human
ucuuuucuucucuacuuucucuu

SEQ ID NO: 1035152 - RNA, 22 nt, Human
ugagaccacagcauacagucca

SEQ ID NO: 1035153 - RNA, 26 nt, Human
ugaguaaacugaacgcucuguacaga

SEQ ID NO: 1035154 - RNA, 23 nt, Human
ugaguaagcacuaauguuauuuc

SEQ ID NO: 1035155 - RNA, 18 nt, Human
ugaguuacuaaaaagaga

SEQ ID NO: 1035156 - RNA, 18 nt, Human
ugauaagugucagaucug

SEQ ID NO: 1035157 - RNA, 23 nt, Human
ugcauacaaaaugaaacacuaca

SEQ ID NO: 1035158 - RNA, 18 nt, Human
uguacagaaaacaacgaa

SEQ ID NO: 1035159 - RNA, 21 nt, Human
uguacagaaaacaacgaacaa

SEQ ID NO: 1035160 - RNA, 20 nt, Human
uguacagaaaacaacgaacc

SEQ ID NO: 1035161 - RNA, 21 nt, Human
ugucagaaaacauucagccug

SEQ ID NO: 1035162 - RNA, 18 nt, Human
ugucuaaagauaaauuca

SEQ ID NO: 1035163 - RNA, 18 nt, Human
uguuuuacagacucccuc

SEQ ID NO: 1035164 - RNA, 20 nt, Human
uguuuuaugaaagaccauuu

SEQ ID NO: 1035165 - RNA, 22 nt, Human
uuaaagguuucccaaguucuuu

SEQ ID NO: 1035166 - RNA, 20 nt, Human
uuaggaaaaaaaaaauuauu

SEQ ID NO: 1035167 - RNA, 18 nt, Human
uucagaaaauucauuuaa

SEQ ID NO: 1035168 - RNA, 20 nt, Human
uuccucucucaauuuguccc

SEQ ID NO: 1035169 - RNA, 21 nt, Human
uucuccaucuacacaccccua

SEQ ID NO: 1035170 - RNA, 18 nt, Human
uucuucucuacuuucucu

SEQ ID NO: 1035171 - RNA, 19 nt, Human
uuuacagacucccuccuag

SEQ ID NO: 1035172 - RNA, 22 nt, Human
uuucagggccuuaaaacccuua

SEQ ID NO: 1035173 - RNA, 23 nt, Human
aaaaaauagcaaaaaaaaauggc

SEQ ID NO: 1035174 - RNA, 23 nt, Human
aaaauggcaaaacuuauugcaaa

SEQ ID NO: 1035175 - RNA, 22 nt, Human
aaacagaaagauuaacauuagc

SEQ ID NO: 1035176 - RNA, 22 nt, Human
agaggaaaaaaauagcaaaaaa

SEQ ID NO: 1035177 - RNA, 22 nt, Human
aggaaaaaaauagcaaaaaaaa

SEQ ID NO: 1035178 - RNA, 23 nt, Human
gaggaaaaaaauagcaaaaaaaa

SEQ ID NO: 1035179 - RNA, 21 nt, Human
ggaaaaaaauagcaaaaaaaa

SEQ ID NO: 1035180 - RNA, 18 nt, Human
uaacauuagcauaaaugg

SEQ ID NO: 1035181 - RNA, 24 nt, Human
uaaguagccgucguaauucuucuc

SEQ ID NO: 1035182 - RNA, 18 nt, Human
uagcaaaaaaaaauggca

SEQ ID NO: 1035183 - RNA, 22 nt, Human
ucuuagauauaguuguguugcu

SEQ ID NO: 1035184 - RNA, 21 nt, Human
ugaugccauugccauaaaagu

SEQ ID NO: 1035185 - RNA, 19 nt, Human
ugcaaaauuuuucaccugu

SEQ ID NO: 1035186 - RNA, 26 nt, Human
uuuagaggaaaaaaauagcaaaaaaa

SEQ ID NO: 1035187 - RNA, 19 nt, Human
aagacgaguggcaaaccug

SEQ ID NO: 1035188 - RNA, 22 nt, Human
agagacacacucucaacuugug

SEQ ID NO: 1035189 - RNA, 25 nt, Human
aucuucuuuacuucaucuccuguca

SEQ ID NO: 1035190 - RNA, 19 nt, Human
caguuuggaccuugccauc

SEQ ID NO: 1035191 - RNA, 20 nt, Human
gucaacuuauccagcaucca

SEQ ID NO: 1035192 - RNA, 20 nt, Human
uagguuauaucaguuuggac

SEQ ID NO: 1035193 - RNA, 21 nt, Human
ucuuuacuucaucuccuguca

SEQ ID NO: 1035194 - RNA, 19 nt, Human
uuccuuaggaagaugauga

SEQ ID NO: 1035195 - RNA, 24 nt, Human
aaaaaaaaaaagguuucuaucuga

SEQ ID NO: 1035196 - RNA, 18 nt, Human
aaaauacacauuuacugg

SEQ ID NO: 1035197 - RNA, 21 nt, Human
aaacucauuuggaaacuucaa

SEQ ID NO: 1035198 - RNA, 21 nt, Human
aaaugugaguacccuuuccau

SEQ ID NO: 1035199 - RNA, 18 nt, Human
aaguaacaaugaaagaga

SEQ ID NO: 1035200 - RNA, 20 nt, Human
acaagaggagagaauaauuu

SEQ ID NO: 1035201 - RNA, 23 nt, Human
acaaugaaagagauaacacugga

SEQ ID NO: 1035202 - RNA, 23 nt, Human
acagacaagaaaacaaaaaauua

SEQ ID NO: 1035203 - RNA, 20 nt, Human
acagcaacaaagagaauucc

SEQ ID NO: 1035204 - RNA, 19 nt, Human
acuggaacaaagagcucua

SEQ ID NO: 1035205 - RNA, 19 nt, Human
agaaugaagcagauuagaa

SEQ ID NO: 1035206 - RNA, 24 nt, Human
agaauuuaaaauaaaguuuaccuc

SEQ ID NO: 1035207 - RNA, 20 nt, Human
agcaacaaagagaauucaca

SEQ ID NO: 1035208 - RNA, 19 nt, Human
agcagaaaugaccucaaau

SEQ ID NO: 1035209 - RNA, 21 nt, Human
aguaacaaugaaagagauaac

SEQ ID NO: 1035210 - RNA, 19 nt, Human
aguauaauuuggaagccua

SEQ ID NO: 1035211 - RNA, 21 nt, Human
auaauuuggaagccuagggug

SEQ ID NO: 1035212 - RNA, 21 nt, Human
augacauuuccucuggcaacu

SEQ ID NO: 1035213 - RNA, 24 nt, Human
augacauuuccucuggcaacuuca

SEQ ID NO: 1035214 - RNA, 19 nt, Human
caaagacaauuccuauuuc

SEQ ID NO: 1035215 - RNA, 22 nt, Human
caacaaagagaauucacauacc

SEQ ID NO: 1035216 - RNA, 19 nt, Human
caacugaaaaguguuagau

SEQ ID NO: 1035217 - RNA, 25 nt, Human
cagcaacaaagagaauucacauacc

SEQ ID NO: 1035218 - RNA, 21 nt, Human
cauaacuaaagcuccuuucuc

SEQ ID NO: 1035219 - RNA, 22 nt, Human
cauuuccucuggcaacuucagg

SEQ ID NO: 1035220 - RNA, 29 nt, Human
cccucuacuauucuaccuccaguugucaa

SEQ ID NO: 1035221 - RNA, 18 nt, Human
ccuaaagcagaaaugacc

SEQ ID NO: 1035222 - RNA, 20 nt, Human
ccugucuuaagcacagaauu

SEQ ID NO: 1035223 - RNA, 20 nt, Human
cuccauuacagacaagaaaa

SEQ ID NO: 1035224 - RNA, 20 nt, Human
cuccuuucuccuucagcaac

SEQ ID NO: 1035225 - RNA, 21 nt, Human
cuggaucagguaauuuuccuu

SEQ ID NO: 1035226 - RNA, 24 nt, Human
cuuaagcacagaauuuaaaauaaa

SEQ ID NO: 1035227 - RNA, 18 nt, Human
gcaaauacaaaguaacaa

SEQ ID NO: 1035228 - RNA, 22 nt, Human
gcaacugaaaaguguuagauau

SEQ ID NO: 1035229 - RNA, 26 nt, Human
gcauagcuuccuuuaaaauacagaaa

SEQ ID NO: 1035230 - RNA, 25 nt, Human
ggccaaagaauuuaccgaaaguaac

SEQ ID NO: 1035231 - RNA, 19 nt, Human
gucuaggaaagacacagag

SEQ ID NO: 1035232 - RNA, 21 nt, Human
guugucaaaaugucauagagu

SEQ ID NO: 1035233 - RNA, 20 nt, Human
uaaaaugccauaaguucuga

SEQ ID NO: 1035234 - RNA, 18 nt, Human
uacaaaguaacaaugaaa

SEQ ID NO: 1035235 - RNA, 24 nt, Human
uauaauucugaaaaaaaaaaaggu

SEQ ID NO: 1035236 - RNA, 28 nt, Human
uauaccgugcagauuucuagaaaaaucg

SEQ ID NO: 1035237 - RNA, 18 nt, Human
uaucugaaugauguagga

SEQ ID NO: 1035238 - RNA, 18 nt, Human
uaugauagugcauuucga

SEQ ID NO: 1035239 - RNA, 21 nt, Human
uauuacauagguauuuggccc

SEQ ID NO: 1035240 - RNA, 23 nt, Human
ucaaacucauuuggaaacuucaa

SEQ ID NO: 1035241 - RNA, 19 nt, Human
uccuaaagcagaaaugacc

SEQ ID NO: 1035242 - RNA, 22 nt, Human
uccucauggucuugguaggagc

SEQ ID NO: 1035243 - RNA, 23 nt, Human
uccuucauacacacgagcuauuu

SEQ ID NO: 1035244 - RNA, 28 nt, Human
ucuauaauucugaaaaaaaaaaagguuu

SEQ ID NO: 1035245 - RNA, 24 nt, Human
ugaaaaacaacucuauuaugucua

SEQ ID NO: 1035246 - RNA, 21 nt, Human
ugaaauaaugaauacugguca

SEQ ID NO: 1035247 - RNA, 20 nt, Human
ugcaacagcaacaaagagaa

SEQ ID NO: 1035248 - RNA, 24 nt, Human
ugguaaaaaaaauugcaaauacaa

SEQ ID NO: 1035249 - RNA, 19 nt, Human
uuacaagaggagagaauaa

SEQ ID NO: 1035250 - RNA, 19 nt, Human
uucaaaaaaugugaguacc

SEQ ID NO: 1035251 - RNA, 25 nt, Human
uucacauaccaacaaaggacuuuau

SEQ ID NO: 1035252 - RNA, 21 nt, Human
uucauacacacgagcuauuuc

SEQ ID NO: 1035253 - RNA, 21 nt, Human
uuggaagccuaggguggcaga

SEQ ID NO: 1035254 - RNA, 20 nt, Human
uuuuaaaauaaauauuuacc

SEQ ID NO: 1035255 - RNA, 23 nt, Human
aaaaaggagacauucaaagagga

SEQ ID NO: 1035256 - RNA, 22 nt, Human
aaacaaagccauuucaggugug

SEQ ID NO: 1035257 - RNA, 22 nt, Human
aaacaggaaagaaguaaagcaa

SEQ ID NO: 1035258 - RNA, 26 nt, Human
aaacaggaaagaaguaaaggggaccc

SEQ ID NO: 1035259 - RNA, 23 nt, Human
aaagccauuucaggugugacaac

SEQ ID NO: 1035260 - RNA, 19 nt, Human
aacauggugaaacccccuc

SEQ ID NO: 1035261 - RNA, 20 nt, Human
aacauggugaaacccccucu

SEQ ID NO: 1035262 - RNA, 21 nt, Human
aacauggugaaacccccucuc

SEQ ID NO: 1035263 - RNA, 21 nt, Human
aagaaagacugauauuuggca

SEQ ID NO: 1035264 - RNA, 23 nt, Human
aagaauugcuugaauccgggagg

SEQ ID NO: 1035265 - RNA, 24 nt, Human
aagacugauauuuggcacuuaaau

SEQ ID NO: 1035266 - RNA, 20 nt, Human
aagagaaacuuuucucagga

SEQ ID NO: 1035267 - RNA, 24 nt, Human
aagcugaggcagaagaauugcuug

SEQ ID NO: 1035268 - RNA, 24 nt, Human
aauugcuugaauccgggaggugga

SEQ ID NO: 1035269 - RNA, 20 nt, Human
acaagagcaaaacuccaucu

SEQ ID NO: 1035270 - RNA, 24 nt, Human
accaugccauugcaucccagccug

SEQ ID NO: 1035271 - RNA, 21 nt, Human
acuccagcgugacuguugcag

SEQ ID NO: 1035272 - RNA, 21 nt, Human
agaaaacugguaauauucuug

SEQ ID NO: 1035273 - RNA, 21 nt, Human
agacagcgaugaaaaacuugg

SEQ ID NO: 1035274 - RNA, 21 nt, Human
agaccagacuggccaacaugg

SEQ ID NO: 1035275 - RNA, 24 nt, Human
agacuggccaacauggugaaaccc

SEQ ID NO: 1035276 - RNA, 20 nt, Human
agagaaagaaagacugauau

SEQ ID NO: 1035277 - RNA, 23 nt, Human
agagacacaacuugcaguaucau

SEQ ID NO: 1035278 - RNA, 20 nt, Human
agauuagcacugugcugcgg

SEQ ID NO: 1035279 - RNA, 20 nt, Human
agauugcuggugaccaaaua

SEQ ID NO: 1035280 - RNA, 24 nt, Human
agcacuuugggaggccaagguggg

SEQ ID NO: 1035281 - RNA, 21 nt, Human
agcagggggucaggccucuaa

SEQ ID NO: 1035282 - RNA, 24 nt, Human
agcugggcacgguggcaggcagcu

SEQ ID NO: 1035283 - RNA, 24 nt, Human
aggcagaagaauugcuugaauccg

SEQ ID NO: 1035284 - RNA, 21 nt, Human
aggccaaggugggcggaucac

SEQ ID NO: 1035285 - RNA, 20 nt, Human
agggaaaaaacggcuuuaaa

SEQ ID NO: 1035286 - RNA, 24 nt, Human
agguggagguuacagugagcugag

SEQ ID NO: 1035287 - RNA, 22 nt, Human
auacaugcaugugcgcacauau

SEQ ID NO: 1035288 - RNA, 18 nt, Human
aucagcuuuucucucucu

SEQ ID NO: 1035289 - RNA, 20 nt, Human
aucucaaaaaaaaaaaaaag

SEQ ID NO: 1035290 - RNA, 19 nt, Human
aucuugaaguuucuuucuc

SEQ ID NO: 1035291 - RNA, 22 nt, Human
augaugguguuagaugccaucu

SEQ ID NO: 1035292 - RNA, 22 nt, Human
auuccagcacuuugggaggcca

SEQ ID NO: 1035293 - RNA, 24 nt, Human
caaaaaggagacauucaaagagga

SEQ ID NO: 1035294 - RNA, 26 nt, Human
caaaaaggagacauucaaagaggaca

SEQ ID NO: 1035295 - RNA, 22 nt, Human
caaaacaggaaagaaguaaagc

SEQ ID NO: 1035296 - RNA, 24 nt, Human
caagagcaaaacuccaucucaaaa

SEQ ID NO: 1035297 - RNA, 19 nt, Human
caaggugggcggaucaccu

SEQ ID NO: 1035298 - RNA, 26 nt, Human
caaggugggcggaucaccugacguca

SEQ ID NO: 1035299 - RNA, 26 nt, Human
caaguauuuauugauaaaaacaaagc

SEQ ID NO: 1035300 - RNA, 27 nt, Human
cagacucuggacaucacuccacuccuu

SEQ ID NO: 1035301 - RNA, 22 nt, Human
cagcaaugccaucccuagcuuu

SEQ ID NO: 1035302 - RNA, 21 nt, Human
cagcacuuugggaggccaagg

SEQ ID NO: 1035303 - RNA, 24 nt, Human
cagcacuuugggaggccaaggugg

SEQ ID NO: 1035304 - RNA, 23 nt, Human
cagcuguaaucccagcuagucgg

SEQ ID NO: 1035305 - RNA, 24 nt, Human
cagcuguaaucccagcuagucggg

SEQ ID NO: 1035306 - RNA, 24 nt, Human
caggccucuaauuccagcacuuug

SEQ ID NO: 1035307 - RNA, 21 nt, Human
cagggugaaagucacccugcu

SEQ ID NO: 1035308 - RNA, 21 nt, Human
caucacuccacuccuauuuau

SEQ ID NO: 1035309 - RNA, 18 nt, Human
cauggcucucagauaagu

SEQ ID NO: 1035310 - RNA, 21 nt, Human
cauggugaaacccccucucca

SEQ ID NO: 1035311 - RNA, 18 nt, Human
cauugcaucccagccugg

SEQ ID NO: 1035312 - RNA, 19 nt, Human
cauugcaucccagccuggg

SEQ ID NO: 1035313 - RNA, 24 nt, Human
cauugcaucccagccugggcuaca

SEQ ID NO: 1035314 - RNA, 22 nt, Human
ccaaaaaggagacauucaaaga

SEQ ID NO: 1035315 - RNA, 22 nt, Human
ccagccugggcuacaagagcaa

SEQ ID NO: 1035316 - RNA, 24 nt, Human
ccauauuuuacuucuugaccuaga

SEQ ID NO: 1035317 - RNA, 20 nt, Human
ccauugcaucccagccuggg

SEQ ID NO: 1035318 - RNA, 21 nt, Human
ccauugcaucccagccugggc

SEQ ID NO: 1035319 - RNA, 24 nt, Human
ccauugcaucccagccugggcuac

SEQ ID NO: 1035320 - RNA, 20 nt, Human
cccacagacucuggacauca

SEQ ID NO: 1035321 - RNA, 19 nt, Human
cccucuccacuaaaaauac

SEQ ID NO: 1035322 - RNA, 20 nt, Human
ccuagaauucuuaagaagag

SEQ ID NO: 1035323 - RNA, 24 nt, Human
cggaucaccugacgucaggaguuc

SEQ ID NO: 1035324 - RNA, 27 nt, Human
cgggaagcugaggcagaagaauugcuu

SEQ ID NO: 1035325 - RNA, 29 nt, Human
cgggagguggagguuacagugacaacggu

SEQ ID NO: 1035326 - RNA, 24 nt, Human
cgggagguggagguuacagugagc

SEQ ID NO: 1035327 - RNA, 24 nt, Human
cuagaccagacuggccaacauggu

SEQ ID NO: 1035328 - RNA, 19 nt, Human
cuccaucucaaaaaaaaaa

SEQ ID NO: 1035329 - RNA, 22 nt, Human
cuggccaacauggugaaacccc

SEQ ID NO: 1035330 - RNA, 25 nt, Human
cugugcugcggcaugguccauggga

SEQ ID NO: 1035331 - RNA, 24 nt, Human
cuugaaguuucuuucuccuacugc

SEQ ID NO: 1035332 - RNA, 19 nt, Human
cuuugggaggugguauguu

SEQ ID NO: 1035333 - RNA, 24 nt, Human
cuuuucccucuucuuuccuguuuu

SEQ ID NO: 1035334 - RNA, 22 nt, Human
gaggacauauguguccucugaa

SEQ ID NO: 1035335 - RNA, 23 nt, Human
gaguguguuuuccaccauggcuc

SEQ ID NO: 1035336 - RNA, 18 nt, Human
gaucaccugacgucagga

SEQ ID NO: 1035337 - RNA, 20 nt, Human
gcaggcagcuguaaucccag

SEQ ID NO: 1035338 - RNA, 24 nt, Human
gccaacauggugaaacccccucuc

SEQ ID NO: 1035339 - RNA, 22 nt, Human
gccauugcaucccagccugggc

SEQ ID NO: 1035340 - RNA, 19 nt, Human
ggaagcaucucaaccaggc

SEQ ID NO: 1035341 - RNA, 18 nt, Human
ggagcagggggucaggcc

SEQ ID NO: 1035342 - RNA, 21 nt, Human
ggagguggagguuacagugag

SEQ ID NO: 1035343 - RNA, 18 nt, Human
ggagguuacagugagcug

SEQ ID NO: 1035344 - RNA, 24 nt, Human
ggagguuacagugagcugagacca

SEQ ID NO: 1035345 - RNA, 20 nt, Human
ggagguuacagugagcuggc

SEQ ID NO: 1035346 - RNA, 23 nt, Human
ggaucaccugacgucaggaguuc

SEQ ID NO: 1035347 - RNA, 24 nt, Human
ggcagauugcuggugaccaaauau

SEQ ID NO: 1035348 - RNA, 21 nt, Human
ggcuacaagagcaaaacucca

SEQ ID NO: 1035349 - RNA, 24 nt, Human
gggcggaucaccugacgucaggag

SEQ ID NO: 1035350 - RNA, 25 nt, Human
gguauacaugcaugugcgcacauau

SEQ ID NO: 1035351 - RNA, 26 nt, Human
ggugcagguauacaugcaugugcgca

SEQ ID NO: 1035352 - RNA, 19 nt, Human
gguggagguuacagugagc

SEQ ID NO: 1035353 - RNA, 21 nt, Human
guaaagcaacacuauuccuuu

SEQ ID NO: 1035354 - RNA, 26 nt, Human
guacuccagcgugacuguugcagggu

SEQ ID NO: 1035355 - RNA, 24 nt, Human
guaggaagaauaacauacauaugc

SEQ ID NO: 1035356 - RNA, 19 nt, Human
guccaugggaagcaucuca

SEQ ID NO: 1035357 - RNA, 27 nt, Human
gugacaacaguaacauaguuggcaaaa

SEQ ID NO: 1035358 - RNA, 19 nt, Human
uaaaaacaaagccauuucc

SEQ ID NO: 1035359 - RNA, 19 nt, Human
uaaucccagcuagucggga

SEQ ID NO: 1035360 - RNA, 20 nt, Human
uacaagagcaaaacuccauc

SEQ ID NO: 1035361 - RNA, 22 nt, Human
uacuccagcgugacuguugcag

SEQ ID NO: 1035362 - RNA, 26 nt, Human
uacuccagcgugacuguugcagggug

SEQ ID NO: 1035363 - RNA, 18 nt, Human
uagaagacaguaggaaga

SEQ ID NO: 1035364 - RNA, 24 nt, Human
uauacaugcaugugcgcacauaua

SEQ ID NO: 1035365 - RNA, 19 nt, Human
ucaaaaaaaaaaaaaagga

SEQ ID NO: 1035366 - RNA, 21 nt, Human
ucagcauuuaguuuuugcucc

SEQ ID NO: 1035367 - RNA, 22 nt, Human
ucaggccucuaauuccagcacu

SEQ ID NO: 1035368 - RNA, 24 nt, Human
uccacuccuauuuauaaaaugaca

SEQ ID NO: 1035369 - RNA, 22 nt, Human
uccaucucaaaaaaaaaaaaaa

SEQ ID NO: 1035370 - RNA, 23 nt, Human
uccaucucaaaaaaaaaaaaaag

SEQ ID NO: 1035371 - RNA, 18 nt, Human
uccaugggaagcaucuca

SEQ ID NO: 1035372 - RNA, 20 nt, Human
ucccaucgggcugaauuccu

SEQ ID NO: 1035373 - RNA, 21 nt, Human
uccgggagguggagguuacag

SEQ ID NO: 1035374 - RNA, 18 nt, Human
uccucuagguggcaguga

SEQ ID NO: 1035375 - RNA, 23 nt, Human
uccugcuucuucagaaucuugca

SEQ ID NO: 1035376 - RNA, 23 nt, Human
ucgggcugaauuccugcuucuuc

SEQ ID NO: 1035377 - RNA, 25 nt, Human
ucuauggccuccacauuuacuuccu

SEQ ID NO: 1035378 - RNA, 25 nt, Human
ucucaaaaaaaaaaaaaaggauuuc

SEQ ID NO: 1035379 - RNA, 24 nt, Human
ucucguucucucugucuccuccua

SEQ ID NO: 1035380 - RNA, 21 nt, Human
ucugucuccuccuacucgcuc

SEQ ID NO: 1035381 - RNA, 22 nt, Human
ugaaacccccucuccacuaaaa

SEQ ID NO: 1035382 - RNA, 20 nt, Human
ugacagagagagacacaacu

SEQ ID NO: 1035383 - RNA, 18 nt, Human
ugacugcacaguauggag

SEQ ID NO: 1035384 - RNA, 20 nt, Human
ugacugcacaguauggaguu

SEQ ID NO: 1035385 - RNA, 25 nt, Human
ugaggcagaagaauugcuugaaucc

SEQ ID NO: 1035386 - RNA, 18 nt, Human
ugcuugaauccgggaggu

SEQ ID NO: 1035387 - RNA, 24 nt, Human
uggccaacauggugaaacccccuc

SEQ ID NO: 1035388 - RNA, 21 nt, Human
uggccuccacauuuacuuccu

SEQ ID NO: 1035389 - RNA, 20 nt, Human
ugggaacauggcucucagau

SEQ ID NO: 1035390 - RNA, 19 nt, Human
ugggaggccaaggugggcg

SEQ ID NO: 1035391 - RNA, 24 nt, Human
ugggaggccaaggugggcggauca

SEQ ID NO: 1035392 - RNA, 24 nt, Human
ugggcggaucaccugacgucagga

SEQ ID NO: 1035393 - RNA, 24 nt, Human
uguggauagauuagcacugugcug

SEQ ID NO: 1035394 - RNA, 24 nt, Human
uguuuuguggauagauuagcacug

SEQ ID NO: 1035395 - RNA, 20 nt, Human
uuacagugagcugagaccau

SEQ ID NO: 1035396 - RNA, 21 nt, Human
uuacagugagcugagaccaug

SEQ ID NO: 1035397 - RNA, 18 nt, Human
uuagcugggcacgguggc

SEQ ID NO: 1035398 - RNA, 19 nt, Human
uucacaaaaaccuucugag

SEQ ID NO: 1035399 - RNA, 23 nt, Human
uucaccagaguacuccagcguga

SEQ ID NO: 1035400 - RNA, 22 nt, Human
uucuauaugcacucaauaguua

SEQ ID NO: 1035401 - RNA, 24 nt, Human
uucuauggccuccacauuuacuuc

SEQ ID NO: 1035402 - RNA, 21 nt, Human
uugaauccgggagguggaggu

SEQ ID NO: 1035403 - RNA, 24 nt, Human
uugcuugaauccgggagguggagg

SEQ ID NO: 1035404 - RNA, 25 nt, Human
uuucccucuucuuuccuguuuuucu

SEQ ID NO: 1035405 - RNA, 22 nt, Human
uuugcccauaucagcaaugcca

SEQ ID NO: 1035406 - RNA, 21 nt, Human
uuuugcuccaagaacucgaga

SEQ ID NO: 1035407 - RNA, 21 nt, Human
acaccaugaagauaacuuggc

SEQ ID NO: 1035408 - RNA, 20 nt, Human
agagugcaaaaggcuugaaa

SEQ ID NO: 1035409 - RNA, 22 nt, Human
auuggugauggcuacuucuuuc

SEQ ID NO: 1035410 - RNA, 18 nt, Human
caccaguaagagggauac

SEQ ID NO: 1035411 - RNA, 23 nt, Human
caccaguaagagggauacaccaa

SEQ ID NO: 1035412 - RNA, 25 nt, Human
caccaugaagauaacuuggcuuuca

SEQ ID NO: 1035413 - RNA, 25 nt, Human
ccuguggugugaggcacagugggac

SEQ ID NO: 1035414 - RNA, 19 nt, Human
uaacccaagaugaccuuac

SEQ ID NO: 1035415 - RNA, 23 nt, Human
ucaacuucugagagggacaauca

SEQ ID NO: 1035416 - RNA, 18 nt, Human
uccacauagagagcauuc

SEQ ID NO: 1035417 - RNA, 19 nt, Human
uggugugaggcacaguggg

SEQ ID NO: 1035418 - RNA, 20 nt, Human
uggugugaggcacaguggga

SEQ ID NO: 1035419 - RNA, 23 nt, Human
uguggugugaggcacagugggac

SEQ ID NO: 1035420 - RNA, 21 nt, Human
uuggugauggcuacuucuuuc

SEQ ID NO: 1035421 - RNA, 20 nt, Human
accgaggccuccucaggcag

SEQ ID NO: 1035422 - RNA, 19 nt, Human
agaaccagagaaaccaugg

SEQ ID NO: 1035423 - RNA, 19 nt, Human
ccaaccgaggccuccucag

SEQ ID NO: 1035424 - RNA, 30 nt, Human; identical to SEQ ID NO: 852361

SEQ ID NO: 1035425 - RNA, 19 nt, Human
ccuccucaggcaggcaggg

SEQ ID NO: 1035426 - RNA, 31 nt, Human; identical to SEQ ID NO: 852366

SEQ ID NO: 1035427 - RNA, 19 nt, Human
gaagucucuccacagcauu

SEQ ID NO: 1035428 - RNA, 18 nt, Human
uagguguaccucacccuc

SEQ ID NO: 1035429 - RNA, 23 nt, Human
ucaaacuggcagaaccagagaaa

SEQ ID NO: 1035430 - RNA, 23 nt, Human
ucuccacagcaugccuugggccu

SEQ ID NO: 1035431 - RNA, 18 nt, Human
uggcagaaccagagaaac

SEQ ID NO: 1035432 - RNA, 23 nt, Human
agggcagggacaggauugcaggg

SEQ ID NO: 1035433 - RNA, 31 nt, Human
caaaaggucacccccaagucacccaagcacc

SEQ ID NO: 1035434 - RNA, 23 nt, Human
caagucacccaagcacaucacuc

SEQ ID NO: 1035435 - RNA, 18 nt, Human
cacaucacucaagcuggc

SEQ ID NO: 1035436 - RNA, 22 nt, Human
ccaagucacccaagcacaucac

SEQ ID NO: 1035437 - RNA, 22 nt, Human
cccaagucacccaagcacauca

SEQ ID NO: 1035438 - RNA, 24 nt, Human
ccccaagucacccaagcacaucac

SEQ ID NO: 1035439 - RNA, 25 nt, Human
cccccaagucacccaagcacaucac

SEQ ID NO: 1035440 - RNA, 20 nt, Human
ccugggucugagguccccug

SEQ ID NO: 1035441 - RNA, 21 nt, Human
ggcagggacaggauugcaggg

SEQ ID NO: 1035442 - RNA, 21 nt, Human
ggggugaggagggcagggaca

SEQ ID NO: 1035443 - RNA, 22 nt, Human
gucugagguccccuggcuguuc

SEQ ID NO: 1035444 - RNA, 18 nt, Human
uaaccuucccucccaucc

SEQ ID NO: 1035445 - RNA, 22 nt, Human
ucacccccaagucacccaagca

SEQ ID NO: 1035446 - RNA, 18 nt, Human
ucagccuccucucggugg

SEQ ID NO: 1035447 - RNA, 26 nt, Human
uccccuggcuguuccugcuccugaca

SEQ ID NO: 1035448 - RNA, 19 nt, Human
uccuacugcaggaccaagg

SEQ ID NO: 1035449 - RNA, 20 nt, Human
ugcaggaccaaggagaaaac

SEQ ID NO: 1035450 - RNA, 20 nt, Human
uaagggagaagaaggaggug

SEQ ID NO: 1035451 - RNA, 24 nt, Human
ucuaagggagaagaaggaggugac

SEQ ID NO: 1035452 - RNA, 25 nt, Human
ugaagccuguacuaccuucucuaag

SEQ ID NO: 1035453 - RNA, 23 nt, Human
ugacaccaacuuugcucucacag

SEQ ID NO: 1035454 - RNA, 19 nt, Human
uugcucucacagccuuucc

SEQ ID NO: 1035455 - RNA, 21 nt, Human
aagagcacccccagggucacu

SEQ ID NO: 1035456 - RNA, 22 nt, Human
aagggcccccaaggcuggccag

SEQ ID NO: 1035457 - RNA, 19 nt, Human
aagugcuucccuagaccuc

SEQ ID NO: 1035458 - RNA, 18 nt, Human
acccgcaccuuguggcac

SEQ ID NO: 1035459 - RNA, 21 nt, Human
agaggaggggguggaagugcu

SEQ ID NO: 1035460 - RNA, 26 nt, Human
agcaguagccucacccuucccccagc

SEQ ID NO: 1035461 - RNA, 21 nt, Human
aggagaggaggggguggaagu

SEQ ID NO: 1035462 - RNA, 21 nt, Human
aggaggggguggaagugcuuc

SEQ ID NO: 1035463 - RNA, 22 nt, Human
aggaggggguggaagugcuucc

SEQ ID NO: 1035464 - RNA, 19 nt, Human
aggggacagggcgugugug

SEQ ID NO: 1035465 - RNA, 21 nt, Human
caaggaggagcuggcauuucg

SEQ ID NO: 1035466 - RNA, 19 nt, Human
cacaguaggaagcucacca

SEQ ID NO: 1035467 - RNA, 22 nt, Human
cacauccugccaggauugagga

SEQ ID NO: 1035468 - RNA, 18 nt, Human
caggauugaggagaggag

SEQ ID NO: 1035469 - RNA, 22 nt, Human
cagggcuccaagggcccccaag

SEQ ID NO: 1035470 - RNA, 21 nt, Human
ccacggcgaugcccacucuca

SEQ ID NO: 1035471 - RNA, 19 nt, Human
ccaggcucagcugugucuc

SEQ ID NO: 1035472 - RNA, 24 nt, Human
cccccaaggcuggccagaucccca

SEQ ID NO: 1035473 - RNA, 25 nt, Human
cccccaaggcuggccagauccccag

SEQ ID NO: 1035474 - RNA, 18 nt, Human
cgcuccugacagcugacc

SEQ ID NO: 1035475 - RNA, 23 nt, Human
cuccagcacccgcaccuuguggc

SEQ ID NO: 1035476 - RNA, 18 nt, Human
gaccuccagaugcauccc

SEQ ID NO: 1035477 - RNA, 23 nt, Human
gagaacaccaaggaggagcuggc

SEQ ID NO: 1035478 - RNA, 22 nt, Human
gaugcccacucucauuuccagg

SEQ ID NO: 1035479 - RNA, 23 nt, Human
ggagaacaccaaggaggagcugg

SEQ ID NO: 1035480 - RNA, 18 nt, Human
ggagagaaacgucacugu

SEQ ID NO: 1035481 - RNA, 23 nt, Human
ggagguccuagacgccgggggug

SEQ ID NO: 1035482 - RNA, 19 nt, Human
ggccagggcuccaagggcc

SEQ ID NO: 1035483 - RNA, 25 nt, Human
ggcguguguguuggggugucgaggc

SEQ ID NO: 1035484 - RNA, 20 nt, Human
gggcguguguguuggggugu

SEQ ID NO: 1035485 - RNA, 20 nt, Human
gguguguguuuguguuugug

SEQ ID NO: 1035486 - RNA, 20 nt, Human
guggagaaaggggacagggc

SEQ ID NO: 1035487 - RNA, 22 nt, Human
guguguuuguguuugugugugu

SEQ ID NO: 1035488 - RNA, 25 nt, Human
uagaccuccagaugcaucccugcuc

SEQ ID NO: 1035489 - RNA, 18 nt, Human
uagcguggccuccauguu

SEQ ID NO: 1035490 - RNA, 19 nt, Human
ucauuuccaggcucagcug

SEQ ID NO: 1035491 - RNA, 21 nt, Human
ucauuuccaggcucagcugug

SEQ ID NO: 1035492 - RNA, 21 nt, Human
uccacugggccagggcuccaa

SEQ ID NO: 1035493 - RNA, 18 nt, Human
uccagaugcaucccugcu

SEQ ID NO: 1035494 - RNA, 23 nt, Human
uccaggcucagcugugucucccc

SEQ ID NO: 1035495 - RNA, 19 nt, Human
ucccccagcgguaucaggg

SEQ ID NO: 1035496 - RNA, 20 nt, Human
uccucaggcacgagcuucca

SEQ ID NO: 1035497 - RNA, 22 nt, Human
uccugccaggauugaggagagg

SEQ ID NO: 1035498 - RNA, 19 nt, Human
ucuccagcacccgcaccuu

SEQ ID NO: 1035499 - RNA, 18 nt, Human
ucucccucccucccauug

SEQ ID NO: 1035500 - RNA, 24 nt, Human
ucuguugcugccuaaacucuuuca

SEQ ID NO: 1035501 - RNA, 19 nt, Human
ugaccacggcgaugcccac

SEQ ID NO: 1035502 - RNA, 22 nt, Human
ugagcuaaaugcaacuagcuug

SEQ ID NO: 1035503 - RNA, 18 nt, Human
ugcaggguggagaaaggg

SEQ ID NO: 1035504 - RNA, 26 nt, Human
ugcucccauguucucccucccuccca

SEQ ID NO: 1035505 - RNA, 19 nt, Human
ugucuccagcacccgcacc

SEQ ID NO: 1035506 - RNA, 23 nt, Human
uguguguuuguguuugugugugu

SEQ ID NO: 1035507 - RNA, 22 nt, Human
uguugcugccuaaacucuuuca

SEQ ID NO: 1035508 - RNA, 20 nt, Human
uuccacugggccagggcucc

SEQ ID NO: 1035509 - RNA, 19 nt, Human
uucccuagaccuccagaug

SEQ ID NO: 1035510 - RNA, 24 nt, Human
uuccucaggcacgagcuuccacug

SEQ ID NO: 1035511 - RNA, 25 nt, Human
uugaagcagcaguagccucacccuu

SEQ ID NO: 1035512 - RNA, 23 nt, Human
aggaaaaaacaaacugaugggga

SEQ ID NO: 1035513 - RNA, 20 nt, Human
gaaaaaacaaacugaugggg

SEQ ID NO: 1035514 - RNA, 24 nt, Human
gaaaaaacaaacugauggggauua

SEQ ID NO: 1035515 - RNA, 18 nt, Human
uugaggaaaaaacaaacu

SEQ ID NO: 1035516 - RNA, 21 nt, Human
aaagaaaguguacaagcuacg

SEQ ID NO: 1035517 - RNA, 22 nt, Human
aaagacgagaaaaacagggcug

SEQ ID NO: 1035518 - RNA, 21 nt, Human
aaauaccccccacuuaacguu

SEQ ID NO: 1035519 - RNA, 24 nt, Human
aaccaccauagaaaauacccccca

SEQ ID NO: 1035520 - RNA, 25 nt, Human
aagcuccccccacccacccauagaa

SEQ ID NO: 1035521 - RNA, 22 nt, Human
aaggcgaaaauacagucaaauc

SEQ ID NO: 1035522 - RNA, 18 nt, Human
acaagacgcaccagccgc

SEQ ID NO: 1035523 - RNA, 20 nt, Human
acaccaaagacgagaaaaac

SEQ ID NO: 1035524 - RNA, 20 nt, Human
accaaagacgagaaaaacag

SEQ ID NO: 1035525 - RNA, 18 nt, Human
accagccgcccaaccacc

SEQ ID NO: 1035526 - RNA, 27 nt, Human
accagcuccccccaacccccaacacca

SEQ ID NO: 1035527 - RNA, 23 nt, Human
acccaccagcuccccccaacccc

SEQ ID NO: 1035528 - RNA, 18 nt, Human
acugcgucaggacagaau

SEQ ID NO: 1035529 - RNA, 20 nt, Human
agaaaaauggcuucccucau

SEQ ID NO: 1035530 - RNA, 21 nt, Human
agacaaaaggcgaaaauacag

SEQ ID NO: 1035531 - RNA, 23 nt, Human
agagaaggaguuaauaagauggc

SEQ ID NO: 1035532 - RNA, 20 nt, Human
agcuccaagcuccccccacc

SEQ ID NO: 1035533 - RNA, 23 nt, Human
aggcaaaaaggcggcuucgcuga

SEQ ID NO: 1035534 - RNA, 21 nt, Human
aggggaggccaggcagggcug

SEQ ID NO: 1035535 - RNA, 25 nt, Human
agguagcucccuuaccugcuagagg

SEQ ID NO: 1035536 - RNA, 20 nt, Human
agugggggacagaagcagag

SEQ ID NO: 1035537 - RNA, 20 nt, Human
caaagaaaaggucuuccuuu

SEQ ID NO: 1035538 - RNA, 19 nt, Human
caaagaaaguguacaagcu

SEQ ID NO: 1035539 - RNA, 18 nt, Human
caaaucaaacaaaaggca

SEQ ID NO: 1035540 - RNA, 28 nt, Human
caagagagacaaagacauacaugcagau

SEQ ID NO: 1035541 - RNA, 24 nt, Human
caagcaucuuaacuggcuuauauu

SEQ ID NO: 1035542 - RNA, 22 nt, Human
caagguaaccggggucagauca

SEQ ID NO: 1035543 - RNA, 19 nt, Human
caagucauaaggaaaaauc

SEQ ID NO: 1035544 - RNA, 21 nt, Human
caccauagaaaauacccccca

SEQ ID NO: 1035545 - RNA, 18 nt, Human
cacccacccauagaacaa

SEQ ID NO: 1035546 - RNA, 19 nt, Human
cacucccccuuccagucac

SEQ ID NO: 1035547 - RNA, 20 nt, Human
cagaaggaaagauuguccau

SEQ ID NO: 1035548 - RNA, 19 nt, Human
cagcacuggagggcaggca

SEQ ID NO: 1035549 - RNA, 21 nt, Human
cagcuagaaaaccucuucagg

SEQ ID NO: 1035550 - RNA, 18 nt, Human
cagcuccaagcucccccc

SEQ ID NO: 1035551 - RNA, 18 nt, Human
cagcuccaagcucccccc

SEQ ID NO: 1035552 - RNA, 22 nt, Human
cagcuccaagcuccccccaccc

SEQ ID NO: 1035553 - RNA, 20 nt, Human
cagguucugggguggcuggg

SEQ ID NO: 1035554 - RNA, 27 nt, Human
caguugugcuccagccuuccaggaggu

SEQ ID NO: 1035555 - RNA, 24 nt, Human
cauaggagggcuccugacuguccu

SEQ ID NO: 1035556 - RNA, 19 nt, Human
ccagcuccccccaaccccc

SEQ ID NO: 1035557 - RNA, 18 nt, Human
cccaacaccaaagacgag

SEQ ID NO: 1035558 - RNA, 23 nt, Human
cccaacccccaacaccaaagacg

SEQ ID NO: 1035559 - RNA, 26 nt, Human
cccaacccccaacaccaaagacgaga

SEQ ID NO: 1035560 - RNA, 20 nt, Human
cccaccagcuccccccaacc

SEQ ID NO: 1035561 - RNA, 18 nt, Human
cccacccacccauagaac

SEQ ID NO: 1035562 - RNA, 21 nt, Human
cccacccauagaacaaaaaga

SEQ ID NO: 1035563 - RNA, 21 nt, Human
ccccacccacccauagaacaa

SEQ ID NO: 1035564 - RNA, 24 nt, Human
cccccaacaccaaagacgagaaaa

SEQ ID NO: 1035565 - RNA, 21 nt, Human
cccccacccacccauagaaca

SEQ ID NO: 1035566 - RNA, 23 nt, Human
ccccccacccacccauagaacaa

SEQ ID NO: 1035567 - RNA, 24 nt, Human
ccccccacccacccauagaacaaa

SEQ ID NO: 1035568 - RNA, 20 nt, Human
cccucagggugaccagggag

SEQ ID NO: 1035569 - RNA, 22 nt, Human
ccguugacagaaggaaagauug

SEQ ID NO: 1035570 - RNA, 22 nt, Human
ccucacccaccagcucccccca

SEQ ID NO: 1035571 - RNA, 20 nt, Human
cgucgccccuucuccggccc

SEQ ID NO: 1035572 - RNA, 22 nt, Human
cuccugacuguccucaaaagcc

SEQ ID NO: 1035573 - RNA, 19 nt, Human
cuggggaggcagggcuggg

SEQ ID NO: 1035574 - RNA, 19 nt, Human
gaaaguguacaagcuacgg

SEQ ID NO: 1035575 - RNA, 20 nt, Human
gaacaaaaagaggaaaaaaa

SEQ ID NO: 1035576 - RNA, 24 nt, Human
gaacaaaaagaggaaaaaaaauau

SEQ ID NO: 1035577 - RNA, 23 nt, Human
gaaccagcuaggacuuguuuucc

SEQ ID NO: 1035578 - RNA, 18 nt, Human
gacaagagagacaaagac

SEQ ID NO: 1035579 - RNA, 25 nt, Human
gaccagggaggagcugugacuggcu

SEQ ID NO: 1035580 - RNA, 23 nt, Human
gacgcaccagccgcccaaccacc

SEQ ID NO: 1035581 - RNA, 20 nt, Human
gagacaaagacauacaugca

SEQ ID NO: 1035582 - RNA, 20 nt, Human
gaggagcugugacuggcugg

SEQ ID NO: 1035583 - RNA, 23 nt, Human
gaggcaguugugcuccagccuuc

SEQ ID NO: 1035584 - RNA, 22 nt, Human
gagguuggaagcaggggaaccc

SEQ ID NO: 1035585 - RNA, 20 nt, Human
gcaccagccgcccaaccacc

SEQ ID NO: 1035586 - RNA, 19 nt, Human
gcagaaaaauggcuucccu

SEQ ID NO: 1035587 - RNA, 19 nt, Human
gccaggcuccacaggagug

SEQ ID NO: 1035588 - RNA, 18 nt, Human
gcuccaagcuccccccac

SEQ ID NO: 1035589 - RNA, 22 nt, Human
gcuccaagcuccccccacccac

SEQ ID NO: 1035590 - RNA, 23 nt, Human
ggaagcaggggaacccuuuacug

SEQ ID NO: 1035591 - RNA, 18 nt, Human
ggcccagaaccuuuuugu

SEQ ID NO: 1035592 - RNA, 22 nt, Human
ggcccagaaccuuuuuguaagu

SEQ ID NO: 1035593 - RNA, 23 nt, Human
ggcuggcacacuaggccuggcag

SEQ ID NO: 1035594 - RNA, 20 nt, Human
ggcuggggccgagguuccuc

SEQ ID NO: 1035595 - RNA, 18 nt, Human
gggggacagaagcagagc

SEQ ID NO: 1035596 - RNA, 19 nt, Human
gggggacagaagcagagca

SEQ ID NO: 1035597 - RNA, 22 nt, Human
gucagagucaaacuaggccugc

SEQ ID NO: 1035598 - RNA, 18 nt, Human
uaagacagcuccaagcuc

SEQ ID NO: 1035599 - RNA, 23 nt, Human
uaagagacaaaaggcgaaaauac

SEQ ID NO: 1035600 - RNA, 23 nt, Human
uaauuccauugcagaaaaauggc

SEQ ID NO: 1035601 - RNA, 24 nt, Human
uaggagggcuccugacuguccuca

SEQ ID NO: 1035602 - RNA, 22 nt, Human
uauacaagacaaagauggauuc

SEQ ID NO: 1035603 - RNA, 23 nt, Human
uauauacauuuaaaacauuaccu

SEQ ID NO: 1035604 - RNA, 20 nt, Human
ucaaaacuguuaacugcuga

SEQ ID NO: 1035605 - RNA, 21 nt, Human
ucaaaacuguuaacugcugac

SEQ ID NO: 1035606 - RNA, 19 nt, Human
ucaaacaaaaggcacaaga

SEQ ID NO: 1035607 - RNA, 22 nt, Human
ucaaacuaggccugccccugcc

SEQ ID NO: 1035608 - RNA, 20 nt, Human
ucacccaccagcucccccca

SEQ ID NO: 1035609 - RNA, 20 nt, Human
ucacuggagcccauaggagg

SEQ ID NO: 1035610 - RNA, 19 nt, Human
ucagggugaccagggagga

SEQ ID NO: 1035611 - RNA, 21 nt, Human
ucagguucugggguggcuggg

SEQ ID NO: 1035612 - RNA, 25 nt, Human
uccaagcuccccccacccacccaua

SEQ ID NO: 1035613 - RNA, 21 nt, Human
ucgcuaguccuaaagcuauau

SEQ ID NO: 1035614 - RNA, 21 nt, Human
ucuaagagguggaagaagagg

SEQ ID NO: 1035615 - RNA, 19 nt, Human
ucucucuacacaaagaaaa

SEQ ID NO: 1035616 - RNA, 21 nt, Human
ugccauuucgcuaguccuaaa

SEQ ID NO: 1035617 - RNA, 21 nt, Human
uggaagaagaggaccagaagc

SEQ ID NO: 1035618 - RNA, 25 nt, Human
uggaagaagaggaccagaagcuggu

SEQ ID NO: 1035619 - RNA, 19 nt, Human
uggaagcaggggaacccuu

SEQ ID NO: 1035620 - RNA, 18 nt, Human
uggagcccauaggagggc

SEQ ID NO: 1035621 - RNA, 19 nt, Human
uggcagcacuggagggcag

SEQ ID NO: 1035622 - RNA, 18 nt, Human
uggcuggggaggcagggc

SEQ ID NO: 1035623 - RNA, 21 nt, Human
ugugcuccagccuuccaggag

SEQ ID NO: 1035624 - RNA, 21 nt, Human
ugugcuccagccuuccaggag

SEQ ID NO: 1035625 - RNA, 20 nt, Human
uugugcuccagccuuccagg

SEQ ID NO: 1035626 - RNA, 20 nt, Human
aaagcauuuuuauccuuuua

SEQ ID NO: 1035627 - RNA, 18 nt, Human
acauaagauucucucucu

SEQ ID NO: 1035628 - RNA, 20 nt, Human
ccaggaaauuucauuguucu

SEQ ID NO: 1035629 - RNA, 21 nt, Human
uaaaaagguauucuuauauga

SEQ ID NO: 1035630 - RNA, 25 nt, Human
uaaaaugcuuuaguaacucauuuuc

SEQ ID NO: 1035631 - RNA, 24 nt, Human
uaacuccauuuaaaaaacauaaga

SEQ ID NO: 1035632 - RNA, 23 nt, Human
ugaaguaacuucuauuuaaaaaa

SEQ ID NO: 1035633 - RNA, 18 nt, Human
uggcauuauaaaaauaca

SEQ ID NO: 1035634 - RNA, 27 nt, Human
ugguacaaggcagguauuauuuaaaau

SEQ ID NO: 1035635 - RNA, 20 nt, Human
uguauaaauaaagcauuuuu

SEQ ID NO: 1035636 - RNA, 21 nt, Human
uuuaaaaugcuuuaguaacuc

SEQ ID NO: 1035637 - RNA, 21 nt, Human
uuuaaaauucauaacuccauu

SEQ ID NO: 1035638 - RNA, 21 nt, Human
aaaguucuuucaggaaaggcc

SEQ ID NO: 1035639 - RNA, 26 nt, Human
aaaguucuuucaggaaaggccuacuu

SEQ ID NO: 1035640 - RNA, 18 nt, Human
aucuuuugugaagcuuuc

SEQ ID NO: 1035641 - RNA, 22 nt, Human
caaaaggagcuccgaacugaug

SEQ ID NO: 1035642 - RNA, 21 nt, Human
caaagcagccccuauuaaagc

SEQ ID NO: 1035643 - RNA, 25 nt, Human
cagaaaguucuuucaggaaaggccu

SEQ ID NO: 1035644 - RNA, 20 nt, Human
cagaacgcucaguaccuucc

SEQ ID NO: 1035645 - RNA, 19 nt, Human
ccccuauuaaagcacucug

SEQ ID NO: 1035646 - RNA, 23 nt, Human
gaugccaaaaggagcuccgaacu

SEQ ID NO: 1035647 - RNA, 20 nt, Human
gugaagcuuuccuuagaaaa

SEQ ID NO: 1035648 - RNA, 18 nt, Human
ucccuuccuuugaucuuu

SEQ ID NO: 1035649 - RNA, 20 nt, Human
uccgaacugaugugagccuc

SEQ ID NO: 1035650 - RNA, 19 nt, Human
ucucgcugcucugacuggu

SEQ ID NO: 1035651 - RNA, 23 nt, Human
ugggagucccccaaagcagcccc

SEQ ID NO: 1035652 - RNA, 18 nt, Human
uuagaaaaccgaaacuca

SEQ ID NO: 1035653 - RNA, 24 nt, Human
uucagaucuuccugagucuacuuc

SEQ ID NO: 1035654 - RNA, 22 nt, Human
uuccuuugaucuuuugugaagc

SEQ ID NO: 1035655 - RNA, 20 nt, Human
agacagaaaccaaggacucu

SEQ ID NO: 1035656 - RNA, 22 nt, Human
cagaaaccaaggacucuggagc

SEQ ID NO: 1035657 - RNA, 19 nt, Human
cagacagaaaccaaggacu

SEQ ID NO: 1035658 - RNA, 23 nt, Human
caggccccugcuugguuccccaa

SEQ ID NO: 1035659 - RNA, 24 nt, Human
caguugguuuccuugcuugggucu

SEQ ID NO: 1035660 - RNA, 21 nt, Human
cuccaggccccugcuugguuc

SEQ ID NO: 1035661 - RNA, 19 nt, Human
cucuggagcugaagaugga

SEQ ID NO: 1035662 - RNA, 24 nt, Human
cugaagcugugcugagacagucuc

SEQ ID NO: 1035663 - RNA, 21 nt, Human
cugguuuccuugcuuuggcag

SEQ ID NO: 1035664 - RNA, 22 nt, Human
cugugcugagacagucuucuuc

SEQ ID NO: 1035665 - RNA, 18 nt, Human
cuuugccccacuccuuca

SEQ ID NO: 1035666 - RNA, 20 nt, Human
gcuccaggccccugcuuggu

SEQ ID NO: 1035667 - RNA, 19 nt, Human
uacacuuugccccacuccu

SEQ ID NO: 1035668 - RNA, 22 nt, Human
ucagaugagccuggcggaagca

SEQ ID NO: 1035669 - RNA, 19 nt, Human
uccccaacugaagcugugc

SEQ ID NO: 1035670 - RNA, 25 nt, Human
uccccaacugaagcugugcugagac

SEQ ID NO: 1035671 - RNA, 19 nt, Human
ucuccagguggguuaggug

SEQ ID NO: 1035672 - RNA, 19 nt, Human
ucugcuaauaucuucccca

SEQ ID NO: 1035673 - RNA, 20 nt, Human
ucuucuggguucagugauga

SEQ ID NO: 1035674 - RNA, 23 nt, Human
ugcugagacagucuucuucucca

SEQ ID NO: 1035675 - RNA, 23 nt, Human
uggcggaagcagagauguccuuc

SEQ ID NO: 1035676 - RNA, 21 nt, Human
ugggucucacuugauuuccaa

SEQ ID NO: 1035677 - RNA, 20 nt, Human
ugucugcuaauaucuucccc

SEQ ID NO: 1035678 - RNA, 23 nt, Human
uucccaguuucagccauagaccc

SEQ ID NO: 1035679 - RNA, 20 nt, Human
uugcuugggucucacuugau

SEQ ID NO: 1035680 - RNA, 22 nt, Human
aagacagacccacacaugaaca

SEQ ID NO: 1035681 - RNA, 23 nt, Human
aagauauucacgcagagccagca

SEQ ID NO: 1035682 - RNA, 24 nt, Human
aaggaagacagacccacacaugaa

SEQ ID NO: 1035683 - RNA, 23 nt, Human
accauagcuguaguggaaacaga

SEQ ID NO: 1035684 - RNA, 22 nt, Human
accucguuucuccugguuccag

SEQ ID NO: 1035685 - RNA, 28 nt, Human
agacagacccacacaugaaccggacccc

SEQ ID NO: 1035686 - RNA, 19 nt, Human
agugugaucucucagcugg

SEQ ID NO: 1035687 - RNA, 19 nt, Human
auagacuccaaccaaucag

SEQ ID NO: 1035688 - RNA, 21 nt, Human
cagaacuggugagaaaugcuc

SEQ ID NO: 1035689 - RNA, 21 nt, Human
caguaugcaagagugauacuc

SEQ ID NO: 1035690 - RNA, 24 nt, Human
ccaaaaguuuugcccaaagaacuc

SEQ ID NO: 1035691 - RNA, 23 nt, Human
ccaaccaaucagaauggauuuca

SEQ ID NO: 1035692 - RNA, 18 nt, Human
cccacacaugaacaaggu

SEQ ID NO: 1035693 - RNA, 21 nt, Human
ccucaucuuucuagggauggg

SEQ ID NO: 1035694 - RNA, 18 nt, Human
cugauuggcauaaggaag

SEQ ID NO: 1035695 - RNA, 18 nt, Human
cugcagaaauuuucagag

SEQ ID NO: 1035696 - RNA, 21 nt, Human
cugccaguaccacucuccucu

SEQ ID NO: 1035697 - RNA, 20 nt, Human
gcaguguggguucuagggcu

SEQ ID NO: 1035698 - RNA, 20 nt, Human
gccuuaauagaaccuucagu

SEQ ID NO: 1035699 - RNA, 24 nt, Human
ggaagacagacccacacaugaaca

SEQ ID NO: 1035700 - RNA, 18 nt, Human
ggccacugggguucagga

SEQ ID NO: 1035701 - RNA, 18 nt, Human
gggaguaggaauaauggg

SEQ ID NO: 1035702 - RNA, 19 nt, Human
gggccagggcuauuugggg

SEQ ID NO: 1035703 - RNA, 22 nt, Human
ggguaaaaagguuauuuuuuca

SEQ ID NO: 1035704 - RNA, 18 nt, Human
guuuugcccaaagaacuc

SEQ ID NO: 1035705 - RNA, 18 nt, Human
uaacaguaugcaagagug

SEQ ID NO: 1035706 - RNA, 20 nt, Human
uagcaccggcugauagacuu

SEQ ID NO: 1035707 - RNA, 22 nt, Human
uaggaugcauugcuucccaaaa

SEQ ID NO: 1035708 - RNA, 22 nt, Human
ucaggcugaauaucagcccaug

SEQ ID NO: 1035709 - RNA, 20 nt, Human
ucaguugggucuacugcaga

SEQ ID NO: 1035710 - RNA, 21 nt, Human
ucucuuguuuccuuguuacuc

SEQ ID NO: 1035711 - RNA, 23 nt, Human
ugcauugcuucccaaaaguuuug

SEQ ID NO: 1035712 - RNA, 19 nt, Human
uggcagugacuccugguag

SEQ ID NO: 1035713 - RNA, 18 nt, Human
uggccauugcugggaccu

SEQ ID NO: 1035714 - RNA, 25 nt, Human
ugugugggccagggcuauuugggga

SEQ ID NO: 1035715 - RNA, 21 nt, Human
uuccaggaugaucccaugccc

SEQ ID NO: 1035716 - RNA, 20 nt, Human
uuucagccauaaacugccag

SEQ ID NO: 1035717 - RNA, 26 nt, Human
uuucauuucccccuuuucuucacaca

SEQ ID NO: 1035718 - RNA, 21 nt, Human
uuuucugugugggccagggcu

SEQ ID NO: 1035719 - RNA, 19 nt, Human
acugcugguucuggauggu

SEQ ID NO: 1035720 - RNA, 23 nt, Human
augguccuguugcaugagcccac

SEQ ID NO: 1035721 - RNA, 18 nt, Human
cgaccacuuucucauuuu

SEQ ID NO: 1035722 - RNA, 18 nt, Human
cuggaugguccuguugca

SEQ ID NO: 1035723 - RNA, 20 nt, Human
gagcccacgaccacuuucuc

SEQ ID NO: 1035724 - RNA, 22 nt, Human
uggacauggacaaucugaaacc

SEQ ID NO: 1035725 - RNA, 18 nt, Human
uuucucauuuuugaaaag

SEQ ID NO: 1035726 - RNA, 24 nt, Human
aaaagggagggugaagggaugagg

SEQ ID NO: 1035727 - RNA, 21 nt, Human
aacacaacagcaaacugaaca

SEQ ID NO: 1035728 - RNA, 22 nt, Human
aacugcggcucucagcucugcc

SEQ ID NO: 1035729 - RNA, 21 nt, Human
aagcugccuuccuucuuugcc

SEQ ID NO: 1035730 - RNA, 21 nt, Human
acaacagcaaacugaacagag

SEQ ID NO: 1035731 - RNA, 23 nt, Human
acacaacagcaaacugaacagag

SEQ ID NO: 1035732 - RNA, 26 nt, Human
acaguuccaagaauuuuuuuuuuuuu

SEQ ID NO: 1035733 - RNA, 18 nt, Human
agaaaaacacaacagcaa

SEQ ID NO: 1035734 - RNA, 18 nt, Human
agcugcuucuagcaucag

SEQ ID NO: 1035735 - RNA, 21 nt, Human
aggcaggcagucugcagcugc

SEQ ID NO: 1035736 - RNA, 21 nt, Human
aggggccugggagaaagcauu

SEQ ID NO: 1035737 - RNA, 22 nt, Human
agucagguuccuuccuucccug

SEQ ID NO: 1035738 - RNA, 19 nt, Human
caaaauggaucaaugagcc

SEQ ID NO: 1035739 - RNA, 24 nt, Human
caaacugaacagagcagaggccga

SEQ ID NO: 1035740 - RNA, 23 nt, Human
caagaacccaaagacggaagcug

SEQ ID NO: 1035741 - RNA, 22 nt, Human
cacaacagcaaacugaacagag

SEQ ID NO: 1035742 - RNA, 20 nt, Human
cagagcagaggccgaggcag

SEQ ID NO: 1035743 - RNA, 21 nt, Human
cagcagcuuugagccugaugc

SEQ ID NO: 1035744 - RNA, 20 nt, Human
cagcccccacgccacagccc

SEQ ID NO: 1035745 - RNA, 22 nt, Human
cagcccccacgccacagccccc

SEQ ID NO: 1035746 - RNA, 23 nt, Human
caggcagucugcagcugcucacc

SEQ ID NO: 1035747 - RNA, 19 nt, Human
cauggggaaggauuagggg

SEQ ID NO: 1035748 - RNA, 30 nt, Human
ccaccacccccacaugggggagaaaaacaa

SEQ ID NO: 1035749 - RNA, 18 nt, Human
ccaggaugcaacugcggc

SEQ ID NO: 1035750 - RNA, 21 nt, Human
cccacauggcgaaaagggagg

SEQ ID NO: 1035751 - RNA, 27 nt, Human
cccaccacccccacaugggggagaaaa

SEQ ID NO: 1035752 - RNA, 20 nt, Human
ccccaccacccccacauggg

SEQ ID NO: 1035753 - RNA, 26 nt, Human
ccccacgccacagcccccccuuucuc

SEQ ID NO: 1035754 - RNA, 24 nt, Human
cccccaaaugcccucaaaauggau

SEQ ID NO: 1035755 - RNA, 25 nt, Human
cccccacaugggggagaaaaacaca

SEQ ID NO: 1035756 - RNA, 22 nt, Human
cccgccuuagccccuccucagc

SEQ ID NO: 1035757 - RNA, 23 nt, Human
cccucccgccuuagccccuccuc

SEQ ID NO: 1035758 - RNA, 21 nt, Human
cccuguaccccaccaccccca

SEQ ID NO: 1035759 - RNA, 19 nt, Human
ccgccuuagccccuccuca

SEQ ID NO: 1035760 - RNA, 19 nt, Human
ccucccgccuuagccccuc

SEQ ID NO: 1035761 - RNA, 25 nt, Human
ccucccgccuuagccccuccucagc

SEQ ID NO: 1035762 - RNA, 28 nt, Human
cgacugacuucuaaauggagcagauugc

SEQ ID NO: 1035763 - RNA, 22 nt, Human
cgaggcagcaagaacccaaaga

SEQ ID NO: 1035764 - RNA, 22 nt, Human
cgccuuagccccuccucagccc

SEQ ID NO: 1035765 - RNA, 25 nt, Human
cgccuuagccccuccucagccccca

SEQ ID NO: 1035766 - RNA, 21 nt, Human
cggaagcugcuucuagcauca

SEQ ID NO: 1035767 - RNA, 20 nt, Human
cucaacuuugacccccaaau

SEQ ID NO: 1035768 - RNA, 18 nt, Human
cucauuucacuucuguuc

SEQ ID NO: 1035769 - RNA, 21 nt, Human
cuccaccucaacaaaccuuua

SEQ ID NO: 1035770 - RNA, 25 nt, Human
cuccucagcccccacgccacagccc

SEQ ID NO: 1035771 - RNA, 24 nt, Human
gagcagaggccgaggcagcaagaa

SEQ ID NO: 1035772 - RNA, 21 nt, Human
gaguaaggaggcuguucuagg

SEQ ID NO: 1035773 - RNA, 20 nt, Human
gccgaggcagcaagaaccca

SEQ ID NO: 1035774 - RNA, 30 nt, Human
gccgaggcagcaagaacccaaagacggaag

SEQ ID NO: 1035775 - RNA, 19 nt, Human
gccugaugcaggcaugggg

SEQ ID NO: 1035776 - RNA, 19 nt, Human
gccuuagccccuccucagc

SEQ ID NO: 1035777 - RNA, 23 nt, Human
gcuggaguaaggaggcuguucua

SEQ ID NO: 1035778 - RNA, 22 nt, Human
ggcgaaaagggagggugaaggg

SEQ ID NO: 1035779 - RNA, 23 nt, Human
ggcgaaaagggagggugaaggga

SEQ ID NO: 1035780 - RNA, 20 nt, Human
uaagaaaugcuaauuuuaua

SEQ ID NO: 1035781 - RNA, 19 nt, Human
uagccccuccucagccccc

SEQ ID NO: 1035782 - RNA, 18 nt, Human
ucacuucuguuccuccac

SEQ ID NO: 1035783 - RNA, 23 nt, Human
ucagcagcuuugagccugaugca

SEQ ID NO: 1035784 - RNA, 19 nt, Human
ucagguuccuuccuucccu

SEQ ID NO: 1035785 - RNA, 18 nt, Human
ucccucgaccucuucugg

SEQ ID NO: 1035786 - RNA, 21 nt, Human
ucccuguaccccaccaccccc

SEQ ID NO: 1035787 - RNA, 22 nt, Human
ucugcccuuccuccuggccccc

SEQ ID NO: 1035788 - RNA, 23 nt, Human
ugauaagaaaugcuaauuuuaua

SEQ ID NO: 1035789 - RNA, 23 nt, Human
ugaugcaggcauggggaaggauu

SEQ ID NO: 1035790 - RNA, 18 nt, Human
ugcccuuccuccuggcca

SEQ ID NO: 1035791 - RNA, 21 nt, Human
uggaacaagcugccuuccuuc

SEQ ID NO: 1035792 - RNA, 19 nt, Human
uggaaugaacagccgaagc

SEQ ID NO: 1035793 - RNA, 27 nt, Human
uggccagaagagaauuuggucgacacg

SEQ ID NO: 1035794 - RNA, 18 nt, Human
ugggcagggcuggaaggu

SEQ ID NO: 1035795 - RNA, 18 nt, Human
uucuaggcaggcagucug

SEQ ID NO: 1035796 - RNA, 19 nt, Human
uugagccugaugcaggcau

SEQ ID NO: 1035797 - RNA, 20 nt, Human
uuuuuuuuuuucauauuugu

SEQ ID NO: 1035798 - RNA, 18 nt, Human
aaaaaagcaacaggaaaa

SEQ ID NO: 1035799 - RNA, 23 nt, Human
aaaaagcaacaggaaaauauuaa

SEQ ID NO: 1035800 - RNA, 22 nt, Human
aaaggagacagacuuguggaga

SEQ ID NO: 1035801 - RNA, 20 nt, Human
aaagguuuguuuuuuguuuu

SEQ ID NO: 1035802 - RNA, 18 nt, Human
aacaaacauaaccaauuu

SEQ ID NO: 1035803 - RNA, 20 nt, Human
aagcuucacuuaaccuaaaa

SEQ ID NO: 1035804 - RNA, 25 nt, Human
aagguuuguuuuuuguuuuuuuuuu

SEQ ID NO: 1035805 - RNA, 20 nt, Human
aauacaccauguaggcaaaa

SEQ ID NO: 1035806 - RNA, 23 nt, Human
acaagaagguaaccaagucagua

SEQ ID NO: 1035807 - RNA, 18 nt, Human
acaccauguaggcaaaac

SEQ ID NO: 1035808 - RNA, 24 nt, Human
accagauagcucuugucgaguccu

SEQ ID NO: 1035809 - RNA, 22 nt, Human
acuaaaaaacaaacauaaccaa

SEQ ID NO: 1035810 - RNA, 24 nt, Human
acuucaucaaguuaacaaaauaau

SEQ ID NO: 1035811 - RNA, 21 nt, Human
agaaacccauaaaguuaguga

SEQ ID NO: 1035812 - RNA, 18 nt, Human
agcccccccaagcuucac

SEQ ID NO: 1035813 - RNA, 23 nt, Human
aggcaauuugucaaucaaaaaua

SEQ ID NO: 1035814 - RNA, 21 nt, Human
aguuaaugauaaagaccacaa

SEQ ID NO: 1035815 - RNA, 24 nt, Human
auacacaguacagaaagaauuaaa

SEQ ID NO: 1035816 - RNA, 18 nt, Human
auacaccauguaggcaaa

SEQ ID NO: 1035817 - RNA, 21 nt, Human
aucccaucauccuuuuacucu

SEQ ID NO: 1035818 - RNA, 20 nt, Human
augcuauaaaccacacuggg

SEQ ID NO: 1035819 - RNA, 24 nt, Human
auggggcagaagagcuauacaaag

SEQ ID NO: 1035820 - RNA, 22 nt, Human
auuccuguuuuuauuuuuggaa

SEQ ID NO: 1035821 - RNA, 23 nt, Human
auuccuguuuuuauuuuuggaag

SEQ ID NO: 1035822 - RNA, 24 nt, Human
caaaauaauuacuagccaacccua

SEQ ID NO: 1035823 - RNA, 21 nt, Human
caagagacaagaagguaacca

SEQ ID NO: 1035824 - RNA, 24 nt, Human
caccauguaggcaaaacacacuaa

SEQ ID NO: 1035825 - RNA, 21 nt, Human
cagaagagcuauacaaaggua

SEQ ID NO: 1035826 - RNA, 20 nt, Human
cagcacaccccacaaggcuc

SEQ ID NO: 1035827 - RNA, 22 nt, Human
cagcacaccccacaaggcuccg

SEQ ID NO: 1035828 - RNA, 22 nt, Human
caguacaaauguaugcuauaaa

SEQ ID NO: 1035829 - RNA, 18 nt, Human
cauaaucugucaggaaaa

SEQ ID NO: 1035830 - RNA, 22 nt, Human
ccauguaggcaaaacacacuaa

SEQ ID NO: 1035831 - RNA, 23 nt, Human
cccaagcuucacuuaaccuaaaa

SEQ ID NO: 1035832 - RNA, 21 nt, Human
cccaucauccuuuuacucuua

SEQ ID NO: 1035833 - RNA, 23 nt, Human
ccccaagcuucacuuaaccuaaa

SEQ ID NO: 1035834 - RNA, 19 nt, Human
cccccaagcuucacuuaac

SEQ ID NO: 1035835 - RNA, 20 nt, Human
cccccaagcuucacuuaacc

SEQ ID NO: 1035836 - RNA, 23 nt, Human
cgcgaccccggcccgcgccuccc

SEQ ID NO: 1035837 - RNA, 21 nt, Human
cgggaggugcgcgaccccggc

SEQ ID NO: 1035838 - RNA, 21 nt, Human
cuuaaaaauuuccaucacuuc

SEQ ID NO: 1035839 - RNA, 21 nt, Human
cuugagguugacaaaaaagga

SEQ ID NO: 1035840 - RNA, 23 nt, Human
gaaguacaauauaguaacauaaa

SEQ ID NO: 1035841 - RNA, 20 nt, Human
gcaaaacacacuaauauuua

SEQ ID NO: 1035842 - RNA, 21 nt, Human
gcgcgaccccggcccgcgccu

SEQ ID NO: 1035843 - RNA, 20 nt, Human
guaaaaugcauccaaguacc

SEQ ID NO: 1035844 - RNA, 18 nt, Human
guuuguuuuuuguuuuuu

SEQ ID NO: 1035845 - RNA, 20 nt, Human
uaaaaaacaaacauaaccaa

SEQ ID NO: 1035846 - RNA, 21 nt, Human
uaaaaaagcaacaggaaaaua

SEQ ID NO: 1035847 - RNA, 24 nt, Human
uaaaaugcauccaaguaccugcca

SEQ ID NO: 1035848 - RNA, 22 nt, Human
uaacaaaauaauuacuagccaa

SEQ ID NO: 1035849 - RNA, 23 nt, Human
uaaccaagucaguagccccccca

SEQ ID NO: 1035850 - RNA, 20 nt, Human
uacugauucuauguaguucu

SEQ ID NO: 1035851 - RNA, 22 nt, Human
uauaaaaauauuauacacaguu

SEQ ID NO: 1035852 - RNA, 19 nt, Human
uauacaucuaucuauugcc

SEQ ID NO: 1035853 - RNA, 19 nt, Human
uauuuggaaaaagaaaauu

SEQ ID NO: 1035854 - RNA, 23 nt, Human
ucaguagcccccccaagcuucac

SEQ ID NO: 1035855 - RNA, 23 nt, Human
ucaucuguacacauaauuacuaa

SEQ ID NO: 1035856 - RNA, 22 nt, Human
uccaaguaccugccaaaagaaa

SEQ ID NO: 1035857 - RNA, 21 nt, Human
ucccuauaugcuucaguacaa

SEQ ID NO: 1035858 - RNA, 21 nt, Human
ucuauguaguucuguguugcc

SEQ ID NO: 1035859 - RNA, 19 nt, Human
ugacaaaaaaggagacaga

SEQ ID NO: 1035860 - RNA, 20 nt, Human
ugacuucaucaaguuaacaa

SEQ ID NO: 1035861 - RNA, 21 nt, Human
ugcgcgaccccggcccgcgcc

SEQ ID NO: 1035862 - RNA, 19 nt, Human
ugcuauaaaccacacuggg

SEQ ID NO: 1035863 - RNA, 24 nt, Human
uggcuaaagcuuucaaaaaauaaa

SEQ ID NO: 1035864 - RNA, 19 nt, Human
uggguagaugacauacugu

SEQ ID NO: 1035865 - RNA, 20 nt, Human
uguagaucauaguagguaga

SEQ ID NO: 1035866 - RNA, 20 nt, Human
uuagaaacaccaauugccau

SEQ ID NO: 1035867 - RNA, 20 nt, Human
uuaguaccuaauaugaaauc

SEQ ID NO: 1035868 - RNA, 23 nt, Human
uuaguggauggcuaaagcuuuca

SEQ ID NO: 1035869 - RNA, 20 nt, Human
uuccaaaaauugucuuauca

SEQ ID NO: 1035870 - RNA, 22 nt, Human
uucccaaauuacagaacauuaa

SEQ ID NO: 1035871 - RNA, 22 nt, Human
uugcaguacaacguugcauguu

SEQ ID NO: 1035872 - RNA, 22 nt, Human
uuguugguauaaaaucccauca

SEQ ID NO: 1035873 - RNA, 22 nt, Human
uuuaaaucucaacuagccccaa

SEQ ID NO: 1035874 - RNA, 23 nt, Human
uuugacaaccuuucuaaauaauu

SEQ ID NO: 1035875 - RNA, 23 nt, Human
aaacucaugucuaacacaguugg

SEQ ID NO: 1035876 - RNA, 18 nt, Human
aaagauauuucaaagauu

SEQ ID NO: 1035877 - RNA, 24 nt, Human
aaaguagagaaauauuuuuaaaga

SEQ ID NO: 1035878 - RNA, 19 nt, Human
aaagugcuaggauuacagg

SEQ ID NO: 1035879 - RNA, 24 nt, Human
aaagugcuaggauuacagguguga

SEQ ID NO: 1035880 - RNA, 24 nt, Human
aacacaguuggaaccuaaaacuca

SEQ ID NO: 1035881 - RNA, 18 nt, Human
aacccacagcgccuucca

SEQ ID NO: 1035882 - RNA, 20 nt, Human
aagauauuucaaagauuuau

SEQ ID NO: 1035883 - RNA, 26 nt, Human
aagugcuaggauuacaggugugagcc

SEQ ID NO: 1035884 - RNA, 19 nt, Human
aauacucuuuauuagcccc

SEQ ID NO: 1035885 - RNA, 20 nt, Human
acaggguuucacccuguuag

SEQ ID NO: 1035886 - RNA, 21 nt, Human
acauaauuccuaagaaaggcc

SEQ ID NO: 1035887 - RNA, 18 nt, Human
acccuguuagccagaugg

SEQ ID NO: 1035888 - RNA, 23 nt, Human
accucggccucccaaagugcuag

SEQ ID NO: 1035889 - RNA, 18 nt, Human
acuggcugaggcaggcac

SEQ ID NO: 1035890 - RNA, 18 nt, Human
agacauagguuugaaaau

SEQ ID NO: 1035891 - RNA, 18 nt, Human
agacuuggcaccgcccag

SEQ ID NO: 1035892 - RNA, 19 nt, Human
agagcccagccccuucccu

SEQ ID NO: 1035893 - RNA, 24 nt, Human
agauggucuugaucuccugacuuc

SEQ ID NO: 1035894 - RNA, 19 nt, Human
aggaggggcaggacgaagg

SEQ ID NO: 1035895 - RNA, 23 nt, Human
aguagagacaggguuucacccug

SEQ ID NO: 1035896 - RNA, 23 nt, Human
augaugauguucauuaaugcuuu

SEQ ID NO: 1035897 - RNA, 23 nt, Human
caaaaacuaaaauguuucccagg

SEQ ID NO: 1035898 - RNA, 24 nt, Human
caaagugcuaggauuacaggugug

SEQ ID NO: 1035899 - RNA, 18 nt, Human
caccagggggagcaggac

SEQ ID NO: 1035900 - RNA, 23 nt, Human
cacccuguuagccagauggucuu

SEQ ID NO: 1035901 - RNA, 18 nt, Human
caccgcccagagcccagc

SEQ ID NO: 1035902 - RNA, 20 nt, Human
caccgcccagagcccagccc

SEQ ID NO: 1035903 - RNA, 21 nt, Human
cagcuucuucaccagggggag

SEQ ID NO: 1035904 - RNA, 19 nt, Human
caggguuucacccuguuag

SEQ ID NO: 1035905 - RNA, 24 nt, Human
cauggaucuagcaaacucaugucu

SEQ ID NO: 1035906 - RNA, 21 nt, Human
ccaaagugcuaggauuacagg

SEQ ID NO: 1035907 - RNA, 24 nt, Human
ccaaagugcuaggauuacaggugu

SEQ ID NO: 1035908 - RNA, 22 nt, Human
ccaaccaaccugacaguaaguu

SEQ ID NO: 1035909 - RNA, 21 nt, Human
ccacugcgccuggccuauuua

SEQ ID NO: 1035910 - RNA, 20 nt, Human
ccagagcccagccccuuccc

SEQ ID NO: 1035911 - RNA, 19 nt, Human
ccaggcucucccucaggca

SEQ ID NO: 1035912 - RNA, 23 nt, Human
ccauggaucuagcaaacucaugu

SEQ ID NO: 1035913 - RNA, 19 nt, Human
cccacagcgccuuccacug

SEQ ID NO: 1035914 - RNA, 19 nt, Human
ccccuggagacaucaauau

SEQ ID NO: 1035915 - RNA, 20 nt, Human
cccuaggagaggugggcggc

SEQ ID NO: 1035916 - RNA, 21 nt, Human
ccgaggaaauucaaacucccg

SEQ ID NO: 1035917 - RNA, 19 nt, Human
ccgcccagagcccagccuc

SEQ ID NO: 1035918 - RNA, 22 nt, Human
cuccugacuucgugaucugccc

SEQ ID NO: 1035919 - RNA, 23 nt, Human
cugggcggugaccgcgcccccuc

SEQ ID NO: 1035920 - RNA, 26 nt, Human
cuuaacaaaaacuaaaauguuuccca

SEQ ID NO: 1035921 - RNA, 24 nt, Human
cuuuaaaaaacauuaaaaauauua

SEQ ID NO: 1035922 - RNA, 18 nt, Human
gaaaggccuuauguaaga

SEQ ID NO: 1035923 - RNA, 19 nt, Human
gacauagguuugaaaaugg

SEQ ID NO: 1035924 - RNA, 22 nt, Human
gacuucgugaucugcccaccuc

SEQ ID NO: 1035925 - RNA, 24 nt, Human
gacuucgugaucugcccaccucgg

SEQ ID NO: 1035926 - RNA, 21 nt, Human
gagucuuucagcugccagcuc

SEQ ID NO: 1035927 - RNA, 18 nt, Human
gauuacaggugugagcca

SEQ ID NO: 1035928 - RNA, 22 nt, Human
gauuacaggugugagccacugc

SEQ ID NO: 1035929 - RNA, 22 nt, Human
gauuacaggugugagccacugc

SEQ ID NO: 1035930 - RNA, 18 nt, Human
gcacauuaccaaccaacc

SEQ ID NO: 1035931 - RNA, 21 nt, Human
gcccagagcccagccccuucc

SEQ ID NO: 1035932 - RNA, 24 nt, Human
ggaggaggggcaggacgaaggggu

SEQ ID NO: 1035933 - RNA, 22 nt, Human
ggauuacaggugugagccacug

SEQ ID NO: 1035934 - RNA, 18 nt, Human
ggcaccgcccagagccca

SEQ ID NO: 1035935 - RNA, 18 nt, Human
ggcauccucguugcuuca

SEQ ID NO: 1035936 - RNA, 22 nt, Human
ggcguaucaaaguaacucaaaa

SEQ ID NO: 1035937 - RNA, 24 nt, Human
gugaucugcccaccucggccuccc

SEQ ID NO: 1035938 - RNA, 23 nt, Human
guggauucuuaaccugcagugaa

SEQ ID NO: 1035939 - RNA, 21 nt, Human
uaaaaagauaagcuuugauua

SEQ ID NO: 1035940 - RNA, 23 nt, Human
uaaaauguuucccaggcuuuaga

SEQ ID NO: 1035941 - RNA, 24 nt, Human
uaacaaaaacuaaaauguuuccca

SEQ ID NO: 1035942 - RNA, 22 nt, Human
uaagaacauacuuacucugauu

SEQ ID NO: 1035943 - RNA, 26 nt, Human
uaaguaaaccaucuagagaccaugga

SEQ ID NO: 1035944 - RNA, 18 nt, Human
uacaauauaauaggugaa

SEQ ID NO: 1035945 - RNA, 22 nt, Human
uacaggugugagccacugcgcc

SEQ ID NO: 1035946 - RNA, 22 nt, Human
uacaggugugagccacugcgcc

SEQ ID NO: 1035947 - RNA, 23 nt, Human
uacaggugugagccacugcgccu

SEQ ID NO: 1035948 - RNA, 21 nt, Human
uagaaccuuaacaaaaacuaa

SEQ ID NO: 1035949 - RNA, 22 nt, Human
uagagacaggguuucacccugu

SEQ ID NO: 1035950 - RNA, 24 nt, Human
uagcaaaggcaccaggcucucccu

SEQ ID NO: 1035951 - RNA, 18 nt, Human
uaggagaggugggcggcg

SEQ ID NO: 1035952 - RNA, 19 nt, Human
uaggauuacaggugugagc

SEQ ID NO: 1035953 - RNA, 21 nt, Human
uaggauuacaggugugagcca

SEQ ID NO: 1035954 - RNA, 22 nt, Human
uaggauuacaggugugagccac

SEQ ID NO: 1035955 - RNA, 22 nt, Human
uaggauuacaggugugagccac

SEQ ID NO: 1035956 - RNA, 24 nt, Human
uaggauuacaggugugagccacug

SEQ ID NO: 1035957 - RNA, 19 nt, Human
ucacugagucuuucagcug

SEQ ID NO: 1035958 - RNA, 19 nt, Human
ucagcugccagcuccauag

SEQ ID NO: 1035959 - RNA, 19 nt, Human
uccaaauccgaggaaauuc

SEQ ID NO: 1035960 - RNA, 23 nt, Human
ucccaaagugcuaggauuacagg

SEQ ID NO: 1035961 - RNA, 19 nt, Human
uccccggcauccucguugc

SEQ ID NO: 1035962 - RNA, 19 nt, Human
ucccgggcgcgcgcaggcc

SEQ ID NO: 1035963 - RNA, 22 nt, Human
ucccucaggcauguuaucuuuu

SEQ ID NO: 1035964 - RNA, 18 nt, Human
ucggccucccaaagugcu

SEQ ID NO: 1035965 - RNA, 23 nt, Human
ucuccccggcauccucguugcuu

SEQ ID NO: 1035966 - RNA, 21 nt, Human
ugacaguaaguucaggugaca

SEQ ID NO: 1035967 - RNA, 21 nt, Human
ugacaguaaguucaggugaca

SEQ ID NO: 1035968 - RNA, 23 nt, Human
ugaggcaggcacauuaccaacca

SEQ ID NO: 1035969 - RNA, 24 nt, Human
ugaucugcccaccucggccuccca

SEQ ID NO: 1035970 - RNA, 24 nt, Human
ugcuaggauuacaggugugagcca

SEQ ID NO: 1035971 - RNA, 22 nt, Human
uggauucuuaaccugcagugaa

SEQ ID NO: 1035972 - RNA, 22 nt, Human
uggguacaauauaauaggugaa

SEQ ID NO: 1035973 - RNA, 21 nt, Human
uuaaguaaaccaucuagagac

SEQ ID NO: 1035974 - RNA, 22 nt, Human
uuagaaccuuaacaaaaacuaa

SEQ ID NO: 1035975 - RNA, 18 nt, Human
uuagccccuggagacauc

SEQ ID NO: 1035976 - RNA, 19 nt, Human
uuauguggauaauccauuu

SEQ ID NO: 1035977 - RNA, 20 nt, Human
uuccuaagaaaggccuuaug

SEQ ID NO: 1035978 - RNA, 26 nt, Human
uugguuguguggauucuuaaccugca

SEQ ID NO: 1035979 - RNA, 19 nt, Human
uuuauuagccccuggagac

SEQ ID NO: 1035980 - RNA, 22 nt, Human
uuucccaggcuuuagaguuuuc

SEQ ID NO: 1035981 - RNA, 24 nt, Human
aaaaaaaaaaaaaauacaaaaauu

SEQ ID NO: 1035982 - RNA, 23 nt, Human
aaaaaaaaccccaaaaccaugaa

SEQ ID NO: 1035983 - RNA, 24 nt, Human
aaaaauaaaaaaaaaccccaaaac

SEQ ID NO: 1035984 - RNA, 18 nt, Human
aaaaccccaaaaccauga

SEQ ID NO: 1035985 - RNA, 22 nt, Human
aaaccccguaucuaccaaaaaa

SEQ ID NO: 1035986 - RNA, 23 nt, Human
aaacuccuggccuccagcaaucc

SEQ ID NO: 1035987 - RNA, 18 nt, Human
aaagugcuggcauuauag

SEQ ID NO: 1035988 - RNA, 18 nt, Human
aacaaaacacaaacaaaa

SEQ ID NO: 1035989 - RNA, 23 nt, Human
aacagcucuuucugugacaguuu

SEQ ID NO: 1035990 - RNA, 18 nt, Human
aacauggugaaaccccgu

SEQ ID NO: 1035991 - RNA, 20 nt, Human
aacauggugaaaccccguau

SEQ ID NO: 1035992 - RNA, 21 nt, Human
aacauggugaaaccccguauc

SEQ ID NO: 1035993 - RNA, 22 nt, Human
aacauggugaaaccccguaucu

SEQ ID NO: 1035994 - RNA, 24 nt, Human
aacuccuggccuccagcaauccua

SEQ ID NO: 1035995 - RNA, 21 nt, Human
aacuucagaaaaucuugaucg

SEQ ID NO: 1035996 - RNA, 24 nt, Human
aagaacaaaacacaaacaaaaaaa

SEQ ID NO: 1035997 - RNA, 26 nt, Human
aagaacaaaacacaaacaaaaaaaua

SEQ ID NO: 1035998 - RNA, 21 nt, Human
aagaagaggcaaaugucaaga

SEQ ID NO: 1035999 - RNA, 22 nt, Human
aagaagaggcaaaugucaagaa

SEQ ID NO: 1036000 - RNA, 22 nt, Human
aagcgugguggcucacgccuga

SEQ ID NO: 1036001 - RNA, 24 nt, Human
aagcugaggcaggugaaucgcuug

SEQ ID NO: 1036002 - RNA, 24 nt, Human
aaucacuugaggccaggaguucaa

SEQ ID NO: 1036003 - RNA, 24 nt, Human
aaucgcuugaacccgggaggcgga

SEQ ID NO: 1036004 - RNA, 22 nt, Human
aaugacacgucagcaaaaagga

SEQ ID NO: 1036005 - RNA, 18 nt, Human
acaaaaaaauaacuaugc

SEQ ID NO: 1036006 - RNA, 21 nt, Human
acaaaaauaaaaaaaaacccc

SEQ ID NO: 1036007 - RNA, 24 nt, Human
acaaaaauaaaaaaaaaccccaaa

SEQ ID NO: 1036008 - RNA, 26 nt, Human
acaaacaaaaaaauaacuaugcuaca

SEQ ID NO: 1036009 - RNA, 26 nt, Human
accccaaaaccaugaaauugaggggu

SEQ ID NO: 1036010 - RNA, 25 nt, Human
accccguaucuaccaaaaaaaaaaa

SEQ ID NO: 1036011 - RNA, 18 nt, Human
acugcacuccagccucgg

SEQ ID NO: 1036012 - RNA, 21 nt, Human
acugcacuccagccucggugg

SEQ ID NO: 1036013 - RNA, 24 nt, Human
acugcacuccagccucgguggcag

SEQ ID NO: 1036014 - RNA, 25 nt, Human
acugccucagccuucccaaagugcu

SEQ ID NO: 1036015 - RNA, 18 nt, Human
acuucagcccaccgcacc

SEQ ID NO: 1036016 - RNA, 24 nt, Human
agaacaaaacacaaacaaaaaaau

SEQ ID NO: 1036017 - RNA, 20 nt, Human
agacaaaaauaaauauuucu

SEQ ID NO: 1036018 - RNA, 24 nt, Human
agaccaagcgugguggcucacgcc

SEQ ID NO: 1036019 - RNA, 24 nt, Human
agaccacuacaaaaauaaaaaaaa

SEQ ID NO: 1036020 - RNA, 24 nt, Human
agcacuuugggaggcggaggcggg

SEQ ID NO: 1036021 - RNA, 23 nt, Human
agccaggcgugguggcgcaggcc

SEQ ID NO: 1036022 - RNA, 22 nt, Human
agccuggccaacauggugaaac

SEQ ID NO: 1036023 - RNA, 24 nt, Human
agccuggccaacauggugaaaccc

SEQ ID NO: 1036024 - RNA, 18 nt, Human
aggcaggugaaucgcuug

SEQ ID NO: 1036025 - RNA, 24 nt, Human
aggcaggugaaucgcuugaacccg

SEQ ID NO: 1036026 - RNA, 19 nt, Human
aggccaggaguucaagacc

SEQ ID NO: 1036027 - RNA, 21 nt, Human
aggcggaggcgggugaaucac

SEQ ID NO: 1036028 - RNA, 18 nt, Human
aggcgggugaaucacuug

SEQ ID NO: 1036029 - RNA, 23 nt, Human
aggcgggugaaucacuugaggcc

SEQ ID NO: 1036030 - RNA, 26 nt, Human
aggcgggugaaucacuugaggccagg

SEQ ID NO: 1036031 - RNA, 24 nt, Human
aggcgugguggcgcaggccuguaa

SEQ ID NO: 1036032 - RNA, 21 nt, Human
aucaaguucuuuaacauuuuu

SEQ ID NO: 1036033 - RNA, 20 nt, Human
aucacagcgccuacucagca

SEQ ID NO: 1036034 - RNA, 23 nt, Human
aucgugccacugcacuccagccu

SEQ ID NO: 1036035 - RNA, 21 nt, Human
augacacgucagcaaaaagga

SEQ ID NO: 1036036 - RNA, 20 nt, Human
auggaguaggagaaaguacu

SEQ ID NO: 1036037 - RNA, 20 nt, Human
auggggucucacuauguugg

SEQ ID NO: 1036038 - RNA, 24 nt, Human
auggggucucacuauguuggccau

SEQ ID NO: 1036039 - RNA, 22 nt, Human
caaaacacaaacaaaaaaauaa

SEQ ID NO: 1036040 - RNA, 18 nt, Human
caaagugcuggcauuaua

SEQ ID NO: 1036041 - RNA, 21 nt, Human
caaauaucuacaguauuucua

SEQ ID NO: 1036042 - RNA, 24 nt, Human
caacauggugaaaccccguaucua

SEQ ID NO: 1036043 - RNA, 24 nt, Human
caagaccaagcgugguggcucacg

SEQ ID NO: 1036044 - RNA, 24 nt, Human
caagaccagccuggccaacauggu

SEQ ID NO: 1036045 - RNA, 21 nt, Human
caccccgccccccucauucac

SEQ ID NO: 1036046 - RNA, 24 nt, Human
cacgccugaaaugccagcacuuug

SEQ ID NO: 1036047 - RNA, 30 nt, Human
cacuacaaaaauaaaaaaaaaccccaaaaa

SEQ ID NO: 1036048 - RNA, 21 nt, Human
cacuauguuggccaugcuggu

SEQ ID NO: 1036049 - RNA, 24 nt, Human
cacuauguuggccaugcuggucuc

SEQ ID NO: 1036050 - RNA, 19 nt, Human
cacuccagccucgguggca

SEQ ID NO: 1036051 - RNA, 23 nt, Human
cacuccagccucgguggcagagc

SEQ ID NO: 1036052 - RNA, 19 nt, Human
cacugcacuccagccucgg

SEQ ID NO: 1036053 - RNA, 19 nt, Human
cacugcacuccagccucgg

SEQ ID NO: 1036054 - RNA, 23 nt, Human
cacugcacuccagccucgguggc

SEQ ID NO: 1036055 - RNA, 24 nt, Human
cacugcacuccagccucgguggca

SEQ ID NO: 1036056 - RNA, 24 nt, Human
cacugcacuccagccucgguggca

SEQ ID NO: 1036057 - RNA, 24 nt, Human
cagcacuuugggaggcggaggcgg

SEQ ID NO: 1036058 - RNA, 23 nt, Human
cauacaaauaucuacaguauuuc

SEQ ID NO: 1036059 - RNA, 21 nt, Human
caugcuggucucaaacuccug

SEQ ID NO: 1036060 - RNA, 24 nt, Human
cauuacagaguuuuaaaucaaggg

SEQ ID NO: 1036061 - RNA, 18 nt, Human
ccaaagugcuggcauuau

SEQ ID NO: 1036062 - RNA, 23 nt, Human
ccaccgcaccaaggaagcuauau

SEQ ID NO: 1036063 - RNA, 20 nt, Human
ccacugcacuccagccucgg

SEQ ID NO: 1036064 - RNA, 20 nt, Human
ccacugcacuccagccucgg

SEQ ID NO: 1036065 - RNA, 21 nt, Human
ccacugcacuccagccucggu

SEQ ID NO: 1036066 - RNA, 22 nt, Human
ccacugcacuccagccucggug

SEQ ID NO: 1036067 - RNA, 24 nt, Human
ccacugcacuccagccucgguggc

SEQ ID NO: 1036068 - RNA, 27 nt, Human
ccagcaauccuacugccucagccuucc

SEQ ID NO: 1036069 - RNA, 24 nt, Human
ccagcuggguuccaaucuugacuc

SEQ ID NO: 1036070 - RNA, 18 nt, Human
cccaccccgccccccuca

SEQ ID NO: 1036071 - RNA, 22 nt, Human
cccaccccgccccccucauuca

SEQ ID NO: 1036072 - RNA, 19 nt, Human
cccccaccccgccccccuc

SEQ ID NO: 1036073 - RNA, 21 nt, Human
ccggaagcugaggcaggugaa

SEQ ID NO: 1036074 - RNA, 26 nt, Human
ccuacugccucagccuucccaaagug

SEQ ID NO: 1036075 - RNA, 23 nt, Human
ccuggccaacauggugaaacccc

SEQ ID NO: 1036076 - RNA, 24 nt, Human
ccuggccaacauggugaaaccccg

SEQ ID NO: 1036077 - RNA, 22 nt, Human
ccuguaaucccagcuacuccgg

SEQ ID NO: 1036078 - RNA, 23 nt, Human
ccuguaaucccagcuacuccgga

SEQ ID NO: 1036079 - RNA, 24 nt, Human
cgggugaaucacuugaggccagga

SEQ ID NO: 1036080 - RNA, 26 nt, Human
cuacaaaaauaaaaaaaaaccccaaa

SEQ ID NO: 1036081 - RNA, 24 nt, Human
cucacgccugaaaugccagcacuu

SEQ ID NO: 1036082 - RNA, 19 nt, Human
cuccagcaauccuacugcc

SEQ ID NO: 1036083 - RNA, 19 nt, Human
cuggccuccagcaauccua

SEQ ID NO: 1036084 - RNA, 20 nt, Human
cuuagaaauuaaacuaacac

SEQ ID NO: 1036085 - RNA, 20 nt, Human
gaacccgggaggcggaggcg

SEQ ID NO: 1036086 - RNA, 24 nt, Human
gaauugagaccacuacaaaaauaa

SEQ ID NO: 1036087 - RNA, 23 nt, Human
gagaucgugccacugcacuccag

SEQ ID NO: 1036088 - RNA, 25 nt, Human
gaggcgggugaaucacuugaggcca

SEQ ID NO: 1036089 - RNA, 23 nt, Human
gcaacaaauaucgagggcacgaa

SEQ ID NO: 1036090 - RNA, 24 nt, Human
gcacuccagccucgguggcagagc

SEQ ID NO: 1036091 - RNA, 18 nt, Human
gccaacauggugaaaccc

SEQ ID NO: 1036092 - RNA, 22 nt, Human
gccacccccaccccgccccccu

SEQ ID NO: 1036093 - RNA, 23 nt, Human
gccaugcuggucucaaacuccug

SEQ ID NO: 1036094 - RNA, 19 nt, Human
gcgagaucgugccacugca

SEQ ID NO: 1036095 - RNA, 23 nt, Human
gcuggucucaaacuccuggccuc

SEQ ID NO: 1036096 - RNA, 24 nt, Human
ggaaaagaggcauuaaacaaaugu

SEQ ID NO: 1036097 - RNA, 20 nt, Human
ggacucagagucacagacaa

SEQ ID NO: 1036098 - RNA, 24 nt, Human
ggccuguaaucccagcuacuccgg

SEQ ID NO: 1036099 - RNA, 20 nt, Human
gggaggcggaggcgagaucg

SEQ ID NO: 1036100 - RNA, 18 nt, Human
ggggucucacuauguugg

SEQ ID NO: 1036101 - RNA, 24 nt, Human
gguggcgcaggccuguaaucccag

SEQ ID NO: 1036102 - RNA, 24 nt, Human
gguggcucacgccugaaaugccag

SEQ ID NO: 1036103 - RNA, 22 nt, Human
guucuuuaaccccuggggcugg

SEQ ID NO: 1036104 - RNA, 19 nt, Human
uaaaaaaaaaccccaaaac

SEQ ID NO: 1036105 - RNA, 22 nt, Human
uaaaaaaaaaccccaaaaccau

SEQ ID NO: 1036106 - RNA, 26 nt, Human
uaaaaaaaaaccccaaaaccaugaaa

SEQ ID NO: 1036107 - RNA, 18 nt, Human
uaacagcucuuucuguga

SEQ ID NO: 1036108 - RNA, 25 nt, Human
uaaccccuggggcugggaaacuccc

SEQ ID NO: 1036109 - RNA, 19 nt, Human
uacaguauuucuauccucc

SEQ ID NO: 1036110 - RNA, 20 nt, Human
uaccaaaaaaaaaaaaaaua

SEQ ID NO: 1036111 - RNA, 21 nt, Human
uacuauaccauaggacucaga

SEQ ID NO: 1036112 - RNA, 26 nt, Human
uagaauagcuagagcaagaccaagcg

SEQ ID NO: 1036113 - RNA, 22 nt, Human
uagagauggggucucacuaugu

SEQ ID NO: 1036114 - RNA, 23 nt, Human
uaguaaacuucagaaaaucuuga

SEQ ID NO: 1036115 - RNA, 24 nt, Human
uauguuggccaugcuggucucaaa

SEQ ID NO: 1036116 - RNA, 23 nt, Human
uauuuuauguagagauggggucu

SEQ ID NO: 1036117 - RNA, 23 nt, Human
ucacuugaggccaggaguucaag

SEQ ID NO: 1036118 - RNA, 22 nt, Human
uccaucggggcccuaacuuuca

SEQ ID NO: 1036119 - RNA, 23 nt, Human
ucccaaagugcuggcauuauagc

SEQ ID NO: 1036120 - RNA, 19 nt, Human
uccguuaucuaggaagugu

SEQ ID NO: 1036121 - RNA, 24 nt, Human
uccuacugccucagccuucccaaa

SEQ ID NO: 1036122 - RNA, 24 nt, Human
ucgcuugaacccgggaggcggagg

SEQ ID NO: 1036123 - RNA, 24 nt, Human
ucuaaucaaagaauugagaccacu

SEQ ID NO: 1036124 - RNA, 20 nt, Human
ucuaccaaaaaaaaaaaaaa

SEQ ID NO: 1036125 - RNA, 24 nt, Human
ucucacuauguuggccaugcuggu

SEQ ID NO: 1036126 - RNA, 20 nt, Human
ucuuuaaccccuggggcugg

SEQ ID NO: 1036127 - RNA, 25 nt, Human
ucuuucugugacaguuugggggccc

SEQ ID NO: 1036128 - RNA, 24 nt, Human
ugaaacccaaaaucacucauuugg

SEQ ID NO: 1036129 - RNA, 19 nt, Human
ugaaaugccagcacuuugg

SEQ ID NO: 1036130 - RNA, 24 nt, Human
ugaaucacuugaggccaggaguuc

SEQ ID NO: 1036131 - RNA, 27 nt, Human
ugaaucacuugaggccaggaguucaag

SEQ ID NO: 1036132 - RNA, 21 nt, Human
ugacaguuugggggcccugaa

SEQ ID NO: 1036133 - RNA, 26 nt, Human
ugacuucagcccaccgcaccaaggaa

SEQ ID NO: 1036134 - RNA, 24 nt, Human
ugaggcaggugaaucgcuugaacc

SEQ ID NO: 1036135 - RNA, 25 nt, Human
ugaggcaggugaaucgcuugaaccc

SEQ ID NO: 1036136 - RNA, 25 nt, Human
ugccucagccuucccaaagugcugg

SEQ ID NO: 1036137 - RNA, 22 nt, Human
ugcuacaagggaaaauauaagu

SEQ ID NO: 1036138 - RNA, 23 nt, Human
uggagucuguagagaagcugugg

SEQ ID NO: 1036139 - RNA, 21 nt, Human
uggcagagcuagacuuggucc

SEQ ID NO: 1036140 - RNA, 19 nt, Human
uggcauuauagccaccccc

SEQ ID NO: 1036141 - RNA, 18 nt, Human
uggccaacauggugaaac

SEQ ID NO: 1036142 - RNA, 24 nt, Human
uggccaugcuggucucaaacuccu

SEQ ID NO: 1036143 - RNA, 24 nt, Human
uggccuccagcaauccuacugccu

SEQ ID NO: 1036144 - RNA, 19 nt, Human
uggcucacgccugaaaugc

SEQ ID NO: 1036145 - RNA, 24 nt, Human
uggcucacgccugaaaugccagca

SEQ ID NO: 1036146 - RNA, 24 nt, Human
ugggaggcggaggcgggugaauca

SEQ ID NO: 1036147 - RNA, 24 nt, Human
ugggggcccugaaaagggccuuuu

SEQ ID NO: 1036148 - RNA, 22 nt, Human
uggggucucacuauguuggcca

SEQ ID NO: 1036149 - RNA, 24 nt, Human
uggggucucacuauguuggccaug

SEQ ID NO: 1036150 - RNA, 24 nt, Human
ugguggcgcaggccuguaauccca

SEQ ID NO: 1036151 - RNA, 20 nt, Human
ugguggcucacgccugaaau

SEQ ID NO: 1036152 - RNA, 23 nt, Human
uguagagauggggucucacuaug

SEQ ID NO: 1036153 - RNA, 24 nt, Human
uguagagauggggucucacuaugu

SEQ ID NO: 1036154 - RNA, 20 nt, Human
uucaaaagggaugacuuugc

SEQ ID NO: 1036155 - RNA, 24 nt, Human
aaauuuaaaagaaggaagaagaga

SEQ ID NO: 1036156 - RNA, 20 nt, Human
aagagaaaacgagauuuuaa

SEQ ID NO: 1036157 - RNA, 22 nt, Human
aagagaaaacgagauuuuaaga

SEQ ID NO: 1036158 - RNA, 19 nt, Human
aaugcacgauaagaaggaa

SEQ ID NO: 1036159 - RNA, 19 nt, Human
acccuggacuuuguguugg

SEQ ID NO: 1036160 - RNA, 18 nt, Human
accuuaaaagagcaggaa

SEQ ID NO: 1036161 - RNA, 19 nt, Human
agaagguagaguuucaacc

SEQ ID NO: 1036162 - RNA, 31 nt, Human
agccuuuaacuucuggcaaaaagacaauuuu

SEQ ID NO: 1036163 - RNA, 19 nt, Human
agggacaaugcuaggguuc

SEQ ID NO: 1036164 - RNA, 20 nt, Human
agggacuuggagacagccuu

SEQ ID NO: 1036165 - RNA, 19 nt, Human
aguuucaacccuuagguaa

SEQ ID NO: 1036166 - RNA, 30 nt, Human
augaagcucugugugugugugugugugugg

SEQ ID NO: 1036167 - RNA, 25 nt, Human
auuggaacaaucuuucucuaggaau

SEQ ID NO: 1036168 - RNA, 23 nt, Human
caaauuggaacaaucuuucucua

SEQ ID NO: 1036169 - RNA, 23 nt, Human
caagguagaaagggaguuucaug

SEQ ID NO: 1036170 - RNA, 21 nt, Human
caggccgggcgugguggcuca

SEQ ID NO: 1036171 - RNA, 21 nt, Human
ccaggcauugauccuagcgcu

SEQ ID NO: 1036172 - RNA, 22 nt, Human
ccucuccugcuccugcuccaac

SEQ ID NO: 1036173 - RNA, 21 nt, Human
cgugcgugcgugugugcacgu

SEQ ID NO: 1036174 - RNA, 33 nt, Human
cuaaagcacaggccgggcgugguggcucauagu

SEQ ID NO: 1036175 - RNA, 31 nt, Human
cuaaagcacaggccgggcgugguggcucauu

SEQ ID NO: 1036176 - RNA, 26 nt, Human
cugagauaaaagaccaagguuaguaa

SEQ ID NO: 1036177 - RNA, 21 nt, Human
cuucuggcaaaaagacaauuu

SEQ ID NO: 1036178 - RNA, 21 nt, Human
gaggaugccggagcagaguuc

SEQ ID NO: 1036179 - RNA, 24 nt, Human
gaguaugaaugcacgauaagaagg

SEQ ID NO: 1036180 - RNA, 18 nt, Human
gcugaguucagggacuug

SEQ ID NO: 1036181 - RNA, 19 nt, Human
ggaggccgacucagggcag

SEQ ID NO: 1036182 - RNA, 23 nt, Human
ggcgugguggcucauaccuguaa

SEQ ID NO: 1036183 - RNA, 18 nt, Human
gggaggccgacucagggc

SEQ ID NO: 1036184 - RNA, 21 nt, Human
gggcuuugggaacuuugcagc

SEQ ID NO: 1036185 - RNA, 19 nt, Human
gguggcucauaccuguaau

SEQ ID NO: 1036186 - RNA, 22 nt, Human
guagaguuucaacccuuaggua

SEQ ID NO: 1036187 - RNA, 27 nt, Human
uaaaaaauguaaauaugcuaugccagg

SEQ ID NO: 1036188 - RNA, 22 nt, Human
uaaagaacuaaagcacaggccg

SEQ ID NO: 1036189 - RNA, 18 nt, Human
uaagacaggaaaugaagc

SEQ ID NO: 1036190 - RNA, 21 nt, Human
uaaggguauuagggacaaugc

SEQ ID NO: 1036191 - RNA, 19 nt, Human
uaaguaagauuuugccagg

SEQ ID NO: 1036192 - RNA, 18 nt, Human
ucagaacauauccaacca

SEQ ID NO: 1036193 - RNA, 23 nt, Human
ucauguaaagaacuaaagcacag

SEQ ID NO: 1036194 - RNA, 21 nt, Human
uccugagucagagacggacau

SEQ ID NO: 1036195 - RNA, 23 nt, Human
uccugcuccugcuccaacccugg

SEQ ID NO: 1036196 - RNA, 24 nt, Human
ucucuaggaaugccucucuuucau

SEQ ID NO: 1036197 - RNA, 18 nt, Human
ugauuggcugugggguug

SEQ ID NO: 1036198 - RNA, 22 nt, Human
ugcgugugugugugcacgcgug

SEQ ID NO: 1036199 - RNA, 18 nt, Human
ugcuaaccaagcauggag

SEQ ID NO: 1036200 - RNA, 21 nt, Human
ugcuccaacccuggacuuugu

SEQ ID NO: 1036201 - RNA, 19 nt, Human
uggcaggccuagugauccu

SEQ ID NO: 1036202 - RNA, 18 nt, Human
uggcucauaccuguaauc

SEQ ID NO: 1036203 - RNA, 18 nt, Human
ugggagagaugggcaagu

SEQ ID NO: 1036204 - RNA, 18 nt, Human
ugguggcucauaccugua

SEQ ID NO: 1036205 - RNA, 18 nt, Human
ugugcacgcgugcgugcg

SEQ ID NO: 1036206 - RNA, 18 nt, Human
ugugcacgugcgugugug

SEQ ID NO: 1036207 - RNA, 22 nt, Human
ugugcacgugcgugugugugug

SEQ ID NO: 1036208 - RNA, 21 nt, Human
ugugcgugugugugugcacgc

SEQ ID NO: 1036209 - RNA, 24 nt, Human
ugugggguuguuagggcuuuggga

SEQ ID NO: 1036210 - RNA, 24 nt, Human
ugugugcacgcgugcgugcgugug

SEQ ID NO: 1036211 - RNA, 26 nt, Human
ugugugcacgcgugcgugcgugugug

SEQ ID NO: 1036212 - RNA, 31 nt, Human
ugugugcgugugugugugcacgcgugcggug

SEQ ID NO: 1036213 - RNA, 25 nt, Human
ugugugugugcacgcgugcgugcgg

SEQ ID NO: 1036214 - RNA, 21 nt, Human
ugugugugugcgugugugugu

SEQ ID NO: 1036215 - RNA, 21 nt, Human
ugugugugugcgugugugugu

SEQ ID NO: 1036216 - RNA, 20 nt, Human
ugugugugugugcgugugug

SEQ ID NO: 1036217 - RNA, 22 nt, Human
ugugugugugugcgugugugug

SEQ ID NO: 1036218 - RNA, 22 nt, Human
ugugugugugugcgugugugug

SEQ ID NO: 1036219 - RNA, 21 nt, Human
ugugugugugugugcgugugu

SEQ ID NO: 1036220 - RNA, 21 nt, Human
ugugugugugugugcgugugu

SEQ ID NO: 1036221 - RNA, 18 nt, Human
ugugugugugugugugug

SEQ ID NO: 1036222 - RNA, 19 nt, Human
ugugugugugugugugugu

SEQ ID NO: 1036223 - RNA, 22 nt, Human
ugugugugugugugugugugag

SEQ ID NO: 1036224 - RNA, 21 nt, Human
ugugugugugugugugugugc

SEQ ID NO: 1036225 - RNA, 24 nt, Human
ugugugugugugugugugugcgug

SEQ ID NO: 1036226 - RNA, 23 nt, Human
uuaacuucuggcaaaaagacaau

SEQ ID NO: 1036227 - RNA, 19 nt, Human
uugauccuagcgcuaagaa

SEQ ID NO: 1036228 - RNA, 22 nt, Human
uuggagaugcuaaccaagcaug

SEQ ID NO: 1036229 - RNA, 20 nt, Human
uuuaaaagaaggaagaagag

SEQ ID NO: 1036230 - RNA, 20 nt, Human
aacuuuaucgguagaaugac

SEQ ID NO: 1036231 - RNA, 22 nt, Human
accauggcugguccuggaggag

SEQ ID NO: 1036232 - RNA, 21 nt, Human
agagcugggaaugucuugagc

SEQ ID NO: 1036233 - RNA, 22 nt, Human
agcaagguggaacuaaagcgau

SEQ ID NO: 1036234 - RNA, 21 nt, Human
aggcuccccugcuuuccccac

SEQ ID NO: 1036235 - RNA, 24 nt, Human
caccauggcugguccuggaggagu

SEQ ID NO: 1036236 - RNA, 21 nt, Human
cagauguguaagaagagcugg

SEQ ID NO: 1036237 - RNA, 22 nt, Human
cauuuguucuuccagcgagcca

SEQ ID NO: 1036238 - RNA, 23 nt, Human
ccaaagcaagccucccauuaacc

SEQ ID NO: 1036239 - RNA, 20 nt, Human
ccccugcuuuccccacuucc

SEQ ID NO: 1036240 - RNA, 20 nt, Human
cuccacaccauggcuggucc

SEQ ID NO: 1036241 - RNA, 24 nt, Human
cucccauuaacccgguccauugca

SEQ ID NO: 1036242 - RNA, 25 nt, Human
cucuucuucagauacauucucacca

SEQ ID NO: 1036243 - RNA, 24 nt, Human
cuucagauacauucucaccaacca

SEQ ID NO: 1036244 - RNA, 22 nt, Human
gcagcugaguguuuugcuggcc

SEQ ID NO: 1036245 - RNA, 20 nt, Human
gccagaagucacaaaugguu

SEQ ID NO: 1036246 - RNA, 21 nt, Human
gcugaguguuuugcuggccug

SEQ ID NO: 1036247 - RNA, 24 nt, Human
ggcuuuggacuugcagcugagugu

SEQ ID NO: 1036248 - RNA, 20 nt, Human
uaaaacucccuucauuuguu

SEQ ID NO: 1036249 - RNA, 19 nt, Human
uaacccgguccauugcaga

SEQ ID NO: 1036250 - RNA, 18 nt, Human
uaagaagagcugggaaug

SEQ ID NO: 1036251 - RNA, 23 nt, Human
uaagaagagcugggaaugucuug

SEQ ID NO: 1036252 - RNA, 20 nt, Human
uagcagauguguaagaagag

SEQ ID NO: 1036253 - RNA, 23 nt, Human
uauuucaaaacuuuaucgguaga

SEQ ID NO: 1036254 - RNA, 26 nt, Human
ucuugagcuguaaguccugagaccuc

SEQ ID NO: 1036255 - RNA, 23 nt, Human
ugcagcugaguguuuugcuggcc

SEQ ID NO: 1036256 - RNA, 18 nt, Human
ugccuggggguuuggugu

SEQ ID NO: 1036257 - RNA, 21 nt, Human
ugcuggccuguucccauuuac

SEQ ID NO: 1036258 - RNA, 18 nt, Human
ugugguugugcugcuugu

SEQ ID NO: 1036259 - RNA, 18 nt, Human
uguguaagaagagcuggg

SEQ ID NO: 1036260 - RNA, 23 nt, Human
uuguggcuuuggacuugcagcug

SEQ ID NO: 1036261 - RNA, 19 nt, Human
aaaaaaaaaaaaaaaaaga

SEQ ID NO: 1036262 - RNA, 24 nt, Human
aaaaaaaaaaaaaaaaagaagggg

SEQ ID NO: 1036263 - RNA, 21 nt, Human
aaaaaaaaaagcagcuuaaag

SEQ ID NO: 1036264 - RNA, 24 nt, Human
aaaaaaaagcagcuuaaagcagca

SEQ ID NO: 1036265 - RNA, 23 nt, Human
aaaagaaaaaaaaaagcagcuua

SEQ ID NO: 1036266 - RNA, 22 nt, Human
aaaagaaaacaacaaaaaaaga

SEQ ID NO: 1036267 - RNA, 23 nt, Human
aaaagaacaaaagagauugcaga

SEQ ID NO: 1036268 - RNA, 18 nt, Human
aaaagaacacaaauggca

SEQ ID NO: 1036269 - RNA, 18 nt, Human
aaagaacacaaauggcaa

SEQ ID NO: 1036270 - RNA, 24 nt, Human
aaagugauuuuauuuuccuuuuca

SEQ ID NO: 1036271 - RNA, 19 nt, Human
aacaguaguacauaguccc

SEQ ID NO: 1036272 - RNA, 25 nt, Human
aagaaaaaacaacucaaaaaccaaa

SEQ ID NO: 1036273 - RNA, 25 nt, Human
aagaaaacaacaaaaaaagaaaaca

SEQ ID NO: 1036274 - RNA, 19 nt, Human
aagcaaaagaaaacaacaa

SEQ ID NO: 1036275 - RNA, 20 nt, Human
aagcagcaaaaggauuauga

SEQ ID NO: 1036276 - RNA, 18 nt, Human
aaggaucacgaaaucugg

SEQ ID NO: 1036277 - RNA, 18 nt, Human
aauucuggacaacagacu

SEQ ID NO: 1036278 - RNA, 20 nt, Human
acaaauggcaaccaaucaca

SEQ ID NO: 1036279 - RNA, 23 nt, Human
acaaauuaaaauuuucacacuua

SEQ ID NO: 1036280 - RNA, 21 nt, Human
acaacaaaaaaagaaaacaca

SEQ ID NO: 1036281 - RNA, 21 nt, Human
acaaguuauaaagcuagcuca

SEQ ID NO: 1036282 - RNA, 22 nt, Human
acacuuuuaaauuuuuuaaagc

SEQ ID NO: 1036283 - RNA, 22 nt, Human
accaaucacaucuauuuaucau

SEQ ID NO: 1036284 - RNA, 22 nt, Human
accagacauacugcaacacucu

SEQ ID NO: 1036285 - RNA, 19 nt, Human
acgcugcugcuacugcugc

SEQ ID NO: 1036286 - RNA, 25 nt, Human
agaaaacaacaaaaaaagaaaacac

SEQ ID NO: 1036287 - RNA, 20 nt, Human
agagcuccuccaggucggcc

SEQ ID NO: 1036288 - RNA, 22 nt, Human
agcaaaagaaaacaacaaaaaa

SEQ ID NO: 1036289 - RNA, 23 nt, Human
agcaaaagaaaacaacaaaaaaa

SEQ ID NO: 1036290 - RNA, 23 nt, Human
aggaguauuuucugcaguuucac

SEQ ID NO: 1036291 - RNA, 20 nt, Human
agggaagaaaagaaaaaaaa

SEQ ID NO: 1036292 - RNA, 20 nt, Human
agucccuuaagucugugaaa

SEQ ID NO: 1036293 - RNA, 19 nt, Human
aguuauauagguaaauauu

SEQ ID NO: 1036294 - RNA, 20 nt, Human
auuuaacuuucaugccucua

SEQ ID NO: 1036295 - RNA, 21 nt, Human
caaaaaaagaaaacacacugc

SEQ ID NO: 1036296 - RNA, 19 nt, Human
caacaaaaaaagaaaacac

SEQ ID NO: 1036297 - RNA, 20 nt, Human
caacaaaaaaagaaaacaca

SEQ ID NO: 1036298 - RNA, 20 nt, Human
caacaucagauaagcagcaa

SEQ ID NO: 1036299 - RNA, 22 nt, Human
caacaucagauaagcagcaaaa

SEQ ID NO: 1036300 - RNA, 25 nt, Human
caagcaaggucuacaaucauugguc

SEQ ID NO: 1036301 - RNA, 18 nt, Human
caagcugccccgccggcc

SEQ ID NO: 1036302 - RNA, 19 nt, Human
caaggucuacaaucauugg

SEQ ID NO: 1036303 - RNA, 21 nt, Human
cacccccgccgcugcugcugc

SEQ ID NO: 1036304 - RNA, 18 nt, Human
caccgccucggccuccgc

SEQ ID NO: 1036305 - RNA, 24 nt, Human
cacuccuccgccgccgccuccgcc

SEQ ID NO: 1036306 - RNA, 23 nt, Human
cagcacuagugaaguacaauauc

SEQ ID NO: 1036307 - RNA, 22 nt, Human
cagcagcgccgccaccgccucg

SEQ ID NO: 1036308 - RNA, 22 nt, Human
cagcgccgccaccgccucggcc

SEQ ID NO: 1036309 - RNA, 19 nt, Human
caggcucucggcgcuacuc

SEQ ID NO: 1036310 - RNA, 22 nt, Human
cauccccgcugcugcugcuggc

SEQ ID NO: 1036311 - RNA, 20 nt, Human
ccaacaucagauaagcagca

SEQ ID NO: 1036312 - RNA, 18 nt, Human
ccccacuccuccgccgcc

SEQ ID NO: 1036313 - RNA, 22 nt, Human
cccccacuccuccgccgccgcc

SEQ ID NO: 1036314 - RNA, 21 nt, Human
ccccgccgccgcccuggcugc

SEQ ID NO: 1036315 - RNA, 24 nt, Human
ccccgccgcugcugcugcucucau

SEQ ID NO: 1036316 - RNA, 25 nt, Human
ccccggaggucgcgcugcuuccgcc

SEQ ID NO: 1036317 - RNA, 23 nt, Human
cccgcggucccuugggcuccucc

SEQ ID NO: 1036318 - RNA, 23 nt, Human
cccucgucgccgccgcuggagac

SEQ ID NO: 1036319 - RNA, 20 nt, Human
cccuggcugccccgcggucc

SEQ ID NO: 1036320 - RNA, 18 nt, Human
ccgcccccgccgccgccc

SEQ ID NO: 1036321 - RNA, 23 nt, Human
ccgccgcccccaccgcugccgcc

SEQ ID NO: 1036322 - RNA, 23 nt, Human
ccgccgcccccaccgcugccgcc

SEQ ID NO: 1036323 - RNA, 24 nt, Human
ccgccgcccccaccgcugccgccg

SEQ ID NO: 1036324 - RNA, 26 nt, Human
ccgccgcccccaccgcugccgccguu

SEQ ID NO: 1036325 - RNA, 19 nt, Human
ccgccgccgcccuggcugc

SEQ ID NO: 1036326 - RNA, 20 nt, Human
ccgccgccgcccuggcugcc

SEQ ID NO: 1036327 - RNA, 21 nt, Human
ccgccgccgcccuggcugccc

SEQ ID NO: 1036328 - RNA, 20 nt, Human
ccgccgccgccuccgccgcc

SEQ ID NO: 1036329 - RNA, 22 nt, Human
ccgccgccgccuccgccgcccc

SEQ ID NO: 1036330 - RNA, 24 nt, Human
ccgccgccgccuccgccgccccca

SEQ ID NO: 1036331 - RNA, 18 nt, Human
ccgcugccgccguucagc

SEQ ID NO: 1036332 - RNA, 21 nt, Human
ccgcugccgccguucagcagc

SEQ ID NO: 1036333 - RNA, 20 nt, Human
ccgcugcugcugcucucauc

SEQ ID NO: 1036334 - RNA, 22 nt, Human
ccguagcccucgucgccgccgc

SEQ ID NO: 1036335 - RNA, 22 nt, Human
ccuccaggcccuccuugccccg

SEQ ID NO: 1036336 - RNA, 23 nt, Human
ccucccucaaagacuuucuggaa

SEQ ID NO: 1036337 - RNA, 21 nt, Human
ccuccgccgcccccaccgcug

SEQ ID NO: 1036338 - RNA, 18 nt, Human
ccuccgccgccgccuccg

SEQ ID NO: 1036339 - RNA, 24 nt, Human
ccuccgccgccgccuccgccgccc

SEQ ID NO: 1036340 - RNA, 19 nt, Human
ccuccucgucguccuccuc

SEQ ID NO: 1036341 - RNA, 18 nt, Human
ccuccucuuccuccuccu

SEQ ID NO: 1036342 - RNA, 20 nt, Human
ccuccucuuccuccuccucc

SEQ ID NO: 1036343 - RNA, 20 nt, Human
ccuccucuuccuccuccucc

SEQ ID NO: 1036344 - RNA, 21 nt, Human
ccucgccgccccccacuccuc

SEQ ID NO: 1036345 - RNA, 21 nt, Human
ccuugggcuccuccaggcccu

SEQ ID NO: 1036346 - RNA, 21 nt, Human
cgcccccaccgcugccgccgu

SEQ ID NO: 1036347 - RNA, 18 nt, Human
cgccgcccccaccgcugc

SEQ ID NO: 1036348 - RNA, 18 nt, Human
cgcugcugcugcuggcgg

SEQ ID NO: 1036349 - RNA, 22 nt, Human
cguucagcagcagcgccgccac

SEQ ID NO: 1036350 - RNA, 21 nt, Human
cuaagacugcagguguccccg

SEQ ID NO: 1036351 - RNA, 21 nt, Human
cuacgcugcugcuacugcugc

SEQ ID NO: 1036352 - RNA, 26 nt, Human
cuagaaaacaucuacaguacauuuca

SEQ ID NO: 1036353 - RNA, 23 nt, Human
cucagcccggccccgcgccgguu

SEQ ID NO: 1036354 - RNA, 21 nt, Human
cuccgccgcccccaccgcugc

SEQ ID NO: 1036355 - RNA, 19 nt, Human
cuccuccgccgccgccucc

SEQ ID NO: 1036356 - RNA, 23 nt, Human
cuccuccuccucuuccuccuccu

SEQ ID NO: 1036357 - RNA, 19 nt, Human
cuccucuuccuccuccucc

SEQ ID NO: 1036358 - RNA, 23 nt, Human
cuccuugccguccccauccccgc

SEQ ID NO: 1036359 - RNA, 19 nt, Human
cucugccucgccgcccccc

SEQ ID NO: 1036360 - RNA, 22 nt, Human
cugccgcccccgccgccgcccu

SEQ ID NO: 1036361 - RNA, 24 nt, Human
cugcugcucccgccgcugcugccc

SEQ ID NO: 1036362 - RNA, 21 nt, Human
cugcugcucucaucuuccucc

SEQ ID NO: 1036363 - RNA, 24 nt, Human
cugcugcugcuggcggcgccgggg

SEQ ID NO: 1036364 - RNA, 22 nt, Human
cugguuuugacaucuaaguauu

SEQ ID NO: 1036365 - RNA, 20 nt, Human
cuuccuccuccucgucgucc

SEQ ID NO: 1036366 - RNA, 24 nt, Human
gaaaaaauacucaagcaaggucua

SEQ ID NO: 1036367 - RNA, 20 nt, Human
gaaaucugguuuugacaucu

SEQ ID NO: 1036368 - RNA, 19 nt, Human
gaagaaaagaaaaaaaaaa

SEQ ID NO: 1036369 - RNA, 19 nt, Human
gacauacugcaacacucuu

SEQ ID NO: 1036370 - RNA, 18 nt, Human
gauguuauguguauauau

SEQ ID NO: 1036371 - RNA, 19 nt, Human
gcagagggcucaggcggga

SEQ ID NO: 1036372 - RNA, 21 nt, Human
gccggcccccggaggucgcgc

SEQ ID NO: 1036373 - RNA, 21 nt, Human
gcgcugcuuccgccuccccca

SEQ ID NO: 1036374 - RNA, 18 nt, Human
gcucucggggcucggcuc

SEQ ID NO: 1036375 - RNA, 19 nt, Human
gcugccgcccccgccgccg

SEQ ID NO: 1036376 - RNA, 22 nt, Human
gcugccgcccccgccgccgccc

SEQ ID NO: 1036377 - RNA, 23 nt, Human
gcugccgcccccgccgccgcccu

SEQ ID NO: 1036378 - RNA, 22 nt, Human
gcugcucccgccgcugcugccc

SEQ ID NO: 1036379 - RNA, 18 nt, Human
gcugcugcuggcggcgcc

SEQ ID NO: 1036380 - RNA, 24 nt, Human
gcugcuuccgccucccccaguccc

SEQ ID NO: 1036381 - RNA, 24 nt, Human
ggcuccuccaggcccuccuugccg

SEQ ID NO: 1036382 - RNA, 23 nt, Human
gggaagaaaagaaaaaaaaaagc

SEQ ID NO: 1036383 - RNA, 22 nt, Human
guaaauauuaacauacuguacu

SEQ ID NO: 1036384 - RNA, 19 nt, Human
guauauauguauacauaca

SEQ ID NO: 1036385 - RNA, 18 nt, Human
gucucugccucgccgccc

SEQ ID NO: 1036386 - RNA, 18 nt, Human
guguauauauguauacau

SEQ ID NO: 1036387 - RNA, 19 nt, Human
uaaaaauacagguacaaac

SEQ ID NO: 1036388 - RNA, 21 nt, Human
uaaagcagcaagcaugcaaag

SEQ ID NO: 1036389 - RNA, 22 nt, Human
uaaagcagcaagcaugcaaagc

SEQ ID NO: 1036390 - RNA, 24 nt, Human
uaacaaaucaaauuuuaaaaagaa

SEQ ID NO: 1036391 - RNA, 25 nt, Human
uaagaaaaaacaacucaaaaaccaa

SEQ ID NO: 1036392 - RNA, 25 nt, Human
uaagaaugacuuacaagaacaugag

SEQ ID NO: 1036393 - RNA, 18 nt, Human
uaagcaaaagaaaacaac

SEQ ID NO: 1036394 - RNA, 23 nt, Human
uacaaacuauguaucugaaacac

SEQ ID NO: 1036395 - RNA, 22 nt, Human
uacaagcaauguucuauuaucu

SEQ ID NO: 1036396 - RNA, 19 nt, Human
uacauuaagaaaaaacaac

SEQ ID NO: 1036397 - RNA, 23 nt, Human
uacuaaguugccaaaagaguguu

SEQ ID NO: 1036398 - RNA, 26 nt, Human
uacugcugccgcccccgccgccgccc

SEQ ID NO: 1036399 - RNA, 28 nt, Human
uacuggauuuaaaaaaaaaaaaaaaaaa

SEQ ID NO: 1036400 - RNA, 19 nt, Human
uagaucaaauggauaauac

SEQ ID NO: 1036401 - RNA, 20 nt, Human
uagguuaaaugaaaauauga

SEQ ID NO: 1036402 - RNA, 23 nt, Human
uauauguauacauacaaguuaua

SEQ ID NO: 1036403 - RNA, 18 nt, Human
uaucacuguaguaaagug

SEQ ID NO: 1036404 - RNA, 20 nt, Human
uauguguauauauguauaau

SEQ ID NO: 1036405 - RNA, 24 nt, Human
uauguguauauauguauacauaca

SEQ ID NO: 1036406 - RNA, 23 nt, Human
ucauguauauagcucuuuacccc

SEQ ID NO: 1036407 - RNA, 21 nt, Human
ucauuuucauguauauagcuc

SEQ ID NO: 1036408 - RNA, 23 nt, Human
uccaugagaaagcccuaguccug

SEQ ID NO: 1036409 - RNA, 21 nt, Human
uccccgcugcugcugcuggcg

SEQ ID NO: 1036410 - RNA, 18 nt, Human
ucccgccgcugcugccca

SEQ ID NO: 1036411 - RNA, 21 nt, Human
ucccgccgcugcugcccacca

SEQ ID NO: 1036412 - RNA, 21 nt, Human
uccgccgcccccaccgcugcc

SEQ ID NO: 1036413 - RNA, 19 nt, Human
uccuccgccgccgccuccg

SEQ ID NO: 1036414 - RNA, 20 nt, Human
uccucuggcagcacuaguga

SEQ ID NO: 1036415 - RNA, 21 nt, Human
uccucuggcagcacuagugaa

SEQ ID NO: 1036416 - RNA, 18 nt, Human
ucgccgccccccacuccu

SEQ ID NO: 1036417 - RNA, 24 nt, Human
ucgcugcugcucccgccgcugcug

SEQ ID NO: 1036418 - RNA, 19 nt, Human
ucucaucuuccuccuccuc

SEQ ID NO: 1036419 - RNA, 26 nt, Human
ucucccacaguaccauuccaugaaaa

SEQ ID NO: 1036420 - RNA, 20 nt, Human
ucuccuccucacccccgccg

SEQ ID NO: 1036421 - RNA, 21 nt, Human
ucuuccuccuccuccucuucc

SEQ ID NO: 1036422 - RNA, 21 nt, Human
ucuuccuccuccucgucgucc

SEQ ID NO: 1036423 - RNA, 24 nt, Human
ugaaaaccacaaauuaaaauuuuc

SEQ ID NO: 1036424 - RNA, 22 nt, Human
ugaaagguuuuucaaaaaccgu

SEQ ID NO: 1036425 - RNA, 24 nt, Human
ugagaaagcccuaguccugaaaag

SEQ ID NO: 1036426 - RNA, 23 nt, Human
ugagugccauaauucuauuaugg

SEQ ID NO: 1036427 - RNA, 23 nt, Human
ugcauauaaccacauacuuuaca

SEQ ID NO: 1036428 - RNA, 20 nt, Human
ugccccgcggucccuugggc

SEQ ID NO: 1036429 - RNA, 24 nt, Human
ugcuauagaucaaauggauaauac

SEQ ID NO: 1036430 - RNA, 22 nt, Human
ugcucccgccgcugcugcccac

SEQ ID NO: 1036431 - RNA, 20 nt, Human
uggauuuaaaaaaaaaaaaa

SEQ ID NO: 1036432 - RNA, 21 nt, Human
uggguauagguccucccucaa

SEQ ID NO: 1036433 - RNA, 18 nt, Human
ugguauuuguaagggcac

SEQ ID NO: 1036434 - RNA, 18 nt, Human
uguguauauauguauaca

SEQ ID NO: 1036435 - RNA, 20 nt, Human
uguguauauauguauacaua

SEQ ID NO: 1036436 - RNA, 22 nt, Human
uguuaacaguaucaaaccaaca

SEQ ID NO: 1036437 - RNA, 20 nt, Human
uuaaaaaaaaaaaaaaaaaa

SEQ ID NO: 1036438 - RNA, 22 nt, Human
uuaaagcagcaagcaugcaaag

SEQ ID NO: 1036439 - RNA, 23 nt, Human
uuaaauuuuuuaaagcaaaugag

SEQ ID NO: 1036440 - RNA, 24 nt, Human
uucuauuuggcaauuuuauaacaa

SEQ ID NO: 1036441 - RNA, 18 nt, Human
uuggcaauuuuauaacaa

SEQ ID NO: 1036442 - RNA, 19 nt, Human
uuuuaaaauucaauugaau

SEQ ID NO: 1036443 - RNA, 26 nt, Human
uuuuccuuuucaagaccaacuuuggu

SEQ ID NO: 1036444 - RNA, 26 nt, Human
aacuuuuccuucuccucauaugggga

SEQ ID NO: 1036445 - RNA, 20 nt, Human
cauugaugcugccaauucuc

SEQ ID NO: 1036446 - RNA, 20 nt, Human
gagaaaaacuuuuccuucuc

SEQ ID NO: 1036447 - RNA, 19 nt, Human
gcugccaauucucugugcc

SEQ ID NO: 1036448 - RNA, 19 nt, Human
uaagucauuuacaaaggcc

SEQ ID NO: 1036449 - RNA, 23 nt, Human
uaauaagucauuuacaaaggccu

SEQ ID NO: 1036450 - RNA, 23 nt, Human
acauucaguggccugguuuucag

SEQ ID NO: 1036451 - RNA, 20 nt, Human
cagcuguuuggcugccccag

SEQ ID NO: 1036452 - RNA, 20 nt, Human
cuggagcacaguagcuggcc

SEQ ID NO: 1036453 - RNA, 21 nt, Human
cuggagcacaguagcuggccu

SEQ ID NO: 1036454 - RNA, 24 nt, Human
cuggagcacaguagcuggccuuug

SEQ ID NO: 1036455 - RNA, 22 nt, Human
cuucacagacaugcuggccacc

SEQ ID NO: 1036456 - RNA, 20 nt, Human
uggcugccccaguuucugcc

SEQ ID NO: 1036457 - RNA, 20 nt, Human
uucacagacaugcuggccac

SEQ ID NO: 1036458 - RNA, 25 nt, Human
uucaguggccugguuuuucccagag

SEQ ID NO: 1036459 - RNA, 24 nt, Human
uucccaccuggagcacaguagcug

SEQ ID NO: 1036460 - RNA, 21 nt, Human
uuugccagcuguuuggcugcc

SEQ ID NO: 1036461 - RNA, 18 nt, Human
aaagccaaugcggcagga

SEQ ID NO: 1036462 - RNA, 19 nt, Human
aaagccaaugcggcaggag

SEQ ID NO: 1036463 - RNA, 19 nt, Human
acggugaaguccuccaacu

SEQ ID NO: 1036464 - RNA, 20 nt, Human
agccaaaaacaggugccagg

SEQ ID NO: 1036465 - RNA, 22 nt, Human
aguccuuuguuuuucaacagga

SEQ ID NO: 1036466 - RNA, 24 nt, Human
cacagccucaccaauuugcuacca

SEQ ID NO: 1036467 - RNA, 18 nt, Human
cagcuccuuggcccagcc

SEQ ID NO: 1036468 - RNA, 24 nt, Human
caucauuugucggcuugcuggaga

SEQ ID NO: 1036469 - RNA, 22 nt, Human
ccuccaacugucaaccuggaac

SEQ ID NO: 1036470 - RNA, 23 nt, Human
cuccuuggcccagccaaaaacag

SEQ ID NO: 1036471 - RNA, 20 nt, Human
gaccaguggaaaguccuuug

SEQ ID NO: 1036472 - RNA, 20 nt, Human
gacccagcugaucugaucug

SEQ ID NO: 1036473 - RNA, 20 nt, Human
ggagcaguagaggcagcucc

SEQ ID NO: 1036474 - RNA, 19 nt, Human
gggagcaguagaggcagcc

SEQ ID NO: 1036475 - RNA, 19 nt, Human
uaaaaaaguucccaccccu

SEQ ID NO: 1036476 - RNA, 21 nt, Human
ucacagccucaccaauuugcu

SEQ ID NO: 1036477 - RNA, 20 nt, Human
ucacuggacagugguccccg

SEQ ID NO: 1036478 - RNA, 19 nt, Human
ucggcuugcuggagaggag

SEQ ID NO: 1036479 - RNA, 20 nt, Human
ucggcuugcuggagaggagu

SEQ ID NO: 1036480 - RNA, 23 nt, Human
ugaucugaucugcagaccagugg

SEQ ID NO: 1036481 - RNA, 23 nt, Human
uggaaaguucccgggaagcauuc

SEQ ID NO: 1036482 - RNA, 21 nt, Human
uggacagugguccccggcagu

SEQ ID NO: 1036483 - RNA, 18 nt, Human
ugggagcaguagaggcag

SEQ ID NO: 1036484 - RNA, 23 nt, Human
uuaauguguaauacaaucucuuc

SEQ ID NO: 1036485 - RNA, 20 nt, Human
uucaacaggaacacguggga

SEQ ID NO: 1036486 - RNA, 22 nt, Human
uucaaugguccuaggggugcuu

SEQ ID NO: 1036487 - RNA, 21 nt, Human
aaaccaugaaauaugaaagua

SEQ ID NO: 1036488 - RNA, 23 nt, Human
agaggaggaaaaaaagagaggga

SEQ ID NO: 1036489 - RNA, 19 nt, Human
cagaggaggaaaaaaagag

SEQ ID NO: 1036490 - RNA, 18 nt, Human
ccgaugccaguaaaccau

SEQ ID NO: 1036491 - RNA, 18 nt, Human
gaugccaguaaaccauga

SEQ ID NO: 1036492 - RNA, 19 nt, Human
ucagaacgguaaauucaac

SEQ ID NO: 1036493 - RNA, 24 nt, Human
ucagaggaggaaaaaaagagaggg

SEQ ID NO: 1036494 - RNA, 19 nt, Human
ugaagaaaauaaaauaaaa

SEQ ID NO: 1036495 - RNA, 20 nt, Human
uucagaggaggaaaaaaaga

SEQ ID NO: 1036496 - RNA, 22 nt, Human
cagaagaaguaaacagaauuca

SEQ ID NO: 1036497 - RNA, 21 nt, Human
cagaauucagguccuuggccu

SEQ ID NO: 1036498 - RNA, 19 nt, Human
cuaaaggucuccuccacug

SEQ ID NO: 1036499 - RNA, 22 nt, Human
gaaguaaacagaauucaggucc

SEQ ID NO: 1036500 - RNA, 25 nt, Human
uaagcauacaccaagcgagggauaa

SEQ ID NO: 1036501 - RNA, 23 nt, Human
ucauucacuugagugugcuuuug

SEQ ID NO: 1036502 - RNA, 21 nt, Human
uccuuggccugcacaaggucc

SEQ ID NO: 1036503 - RNA, 22 nt, Human
ugacaaauuuguaagcaucaag

SEQ ID NO: 1036504 - RNA, 19 nt, Human
ugcuaggggaaaagcugcc

SEQ ID NO: 1036505 - RNA, 19 nt, Human
uggaaagggacuauuuuau

SEQ ID NO: 1036506 - RNA, 20 nt, Human
uggaaagggacuauuuuaug

SEQ ID NO: 1036507 - RNA, 18 nt, Human
ugugauaacagagagaau

SEQ ID NO: 1036508 - RNA, 23 nt, Human
uucaagaauuccauaccaaauuc

SEQ ID NO: 1036509 - RNA, 24 nt, Human
uuccaaugccuucaagaauuccau

SEQ ID NO: 1036510 - RNA, 22 nt, Human
auagcacuuucuucaaguucug

SEQ ID NO: 1036511 - RNA, 19 nt, Human
cccuggagccucuugugac

SEQ ID NO: 1036512 - RNA, 19 nt, Human
cuggagccucuugugaccc

SEQ ID NO: 1036513 - RNA, 19 nt, Human
ggcaggggauagcacuuuc

SEQ ID NO: 1036514 - RNA, 26 nt, Human
uagacaggcaggggauagcacuuucu

SEQ ID NO: 1036515 - RNA, 26 nt, Human
aaaaaucuguuuguccaaggggucuc

SEQ ID NO: 1036516 - RNA, 24 nt, Human
aaaacccagaggucugcacuccac

SEQ ID NO: 1036517 - RNA, 19 nt, Human
aagaagggacgucaguggc

SEQ ID NO: 1036518 - RNA, 24 nt, Human
agaaauugcucaaguucuaucccc

SEQ ID NO: 1036519 - RNA, 19 nt, Human
agaagggacgucaguggcg

SEQ ID NO: 1036520 - RNA, 18 nt, Human
agcaacauuccuaguuuc

SEQ ID NO: 1036521 - RNA, 19 nt, Human
agccggaagggacccuagg

SEQ ID NO: 1036522 - RNA, 24 nt, Human
agcuggcuagcuugcaaaaaccca

SEQ ID NO: 1036523 - RNA, 20 nt, Human
agggucucccacguccaccc

SEQ ID NO: 1036524 - RNA, 25 nt, Human
agugcaaaaaucuguuuguccaagg

SEQ ID NO: 1036525 - RNA, 22 nt, Human
cauuuucauuuuaaaguuuaaa

SEQ ID NO: 1036526 - RNA, 21 nt, Human
ccuguccccacaggaaagaag

SEQ ID NO: 1036527 - RNA, 27 nt, Human
cgaggccaagacagaaauugcucaagu

SEQ ID NO: 1036528 - RNA, 20 nt, Human
gauguuaaagccggaaggga

SEQ ID NO: 1036529 - RNA, 18 nt, Human
ggaaacagaagauguuag

SEQ ID NO: 1036530 - RNA, 19 nt, Human
uagcuugcaaaaacccaga

SEQ ID NO: 1036531 - RNA, 21 nt, Human
ucuauccccagugcaaaaauc

SEQ ID NO: 1036532 - RNA, 22 nt, Human
uggcgaggccaagacagaaauu

SEQ ID NO: 1036533 - RNA, 18 nt, Human
uucauuuuaaaguuuaaa

SEQ ID NO: 1036534 - RNA, 22 nt, Human
uuccuaguuucacauuuucauu

SEQ ID NO: 1036535 - RNA, 21 nt, Human
aggggccgagcacacugagcc

SEQ ID NO: 1036536 - RNA, 23 nt, Human
agguucuucuuccaggagaacuc

SEQ ID NO: 1036537 - RNA, 21 nt, Human
caucagguucuucuuccagga

SEQ ID NO: 1036538 - RNA, 18 nt, Human
cugcacuguuacuuccug

SEQ ID NO: 1036539 - RNA, 19 nt, Human
gacagauggcuggcaucag

SEQ ID NO: 1036540 - RNA, 19 nt, Human
uuccuugacagauggcugg

SEQ ID NO: 1036541 - RNA, 24 nt, Human
aaaacauuucaauaguauaaccaa

SEQ ID NO: 1036542 - RNA, 24 nt, Human
aaaaggacuugaccucuaugacuc

SEQ ID NO: 1036543 - RNA, 18 nt, Human
aaacacagucagaucgua

SEQ ID NO: 1036544 - RNA, 18 nt, Human
aaaggaccucaugugaga

SEQ ID NO: 1036545 - RNA, 23 nt, Human
aagcaagaaaggacagaagaaau

SEQ ID NO: 1036546 - RNA, 23 nt, Human
aagcaagaaaggacagaagggac

SEQ ID NO: 1036547 - RNA, 18 nt, Human
aaggaccucaugugagag

SEQ ID NO: 1036548 - RNA, 20 nt, Human
aauaguggaaacaacuagaa

SEQ ID NO: 1036549 - RNA, 18 nt, Human
acaagaaaaggacuugac

SEQ ID NO: 1036550 - RNA, 30 nt, Human
acauggccuuuucucugcguguguacccuu

SEQ ID NO: 1036551 - RNA, 24 nt, Human
acccuauccccaaauacagucaca

SEQ ID NO: 1036552 - RNA, 22 nt, Human
agaaaacucuauuaggugccga

SEQ ID NO: 1036553 - RNA, 23 nt, Human
agaacacauacgcccugugacag

SEQ ID NO: 1036554 - RNA, 19 nt, Human
agacagaaagaacuacaag

SEQ ID NO: 1036555 - RNA, 20 nt, Human
agagggagaggccccacagg

SEQ ID NO: 1036556 - RNA, 21 nt, Human
aggaaaagagaaauaacagaa

SEQ ID NO: 1036557 - RNA, 20 nt, Human
aggacaucaugguuagccuc

SEQ ID NO: 1036558 - RNA, 29 nt, Human
aggugguuugcuugaagaagcagccauag

SEQ ID NO: 1036559 - RNA, 19 nt, Human
aguaauuaguggaaaauaa

SEQ ID NO: 1036560 - RNA, 24 nt, Human
augacucugugguggggaugaagg

SEQ ID NO: 1036561 - RNA, 18 nt, Human
augccaucucuguguuuu

SEQ ID NO: 1036562 - RNA, 19 nt, Human
augggauaaaaugaauggu

SEQ ID NO: 1036563 - RNA, 26 nt, Human
caaauuccaccccacuguagucauac

SEQ ID NO: 1036564 - RNA, 23 nt, Human
caacauaugaauuugaggaacac

SEQ ID NO: 1036565 - RNA, 23 nt, Human
caaucccuaagcaagaaaggaca

SEQ ID NO: 1036566 - RNA, 22 nt, Human
cacaagaaaaggacuugaccuc

SEQ ID NO: 1036567 - RNA, 22 nt, Human
cacacaacuccuacuggaauag

SEQ ID NO: 1036568 - RNA, 20 nt, Human
cacauuugguacuugggguu

SEQ ID NO: 1036569 - RNA, 18 nt, Human
cacccccaaucccuaagc

SEQ ID NO: 1036570 - RNA, 21 nt, Human
cagaaagguagcccuucacua

SEQ ID NO: 1036571 - RNA, 22 nt, Human
cagcaagcggguuuuauccccu

SEQ ID NO: 1036572 - RNA, 18 nt, Human
cagggguccugcugagcc

SEQ ID NO: 1036573 - RNA, 24 nt, Human
caguucuggagacuggaccuccaa

SEQ ID NO: 1036574 - RNA, 20 nt, Human
cauacgcccugugacagggc

SEQ ID NO: 1036575 - RNA, 19 nt, Human
caugaagucccaaauucca

SEQ ID NO: 1036576 - RNA, 20 nt, Human
cauggccuuuucucugcgug

SEQ ID NO: 1036577 - RNA, 21 nt, Human
ccaaauacagucacauuuggu

SEQ ID NO: 1036578 - RNA, 23 nt, Human
ccaacaccuaauccaauaugacu

SEQ ID NO: 1036579 - RNA, 23 nt, Human
ccaagagagggagaggccccaca

SEQ ID NO: 1036580 - RNA, 23 nt, Human
cccaacaccuaauccaauaugac

SEQ ID NO: 1036581 - RNA, 18 nt, Human
cccacagaaagguagccc

SEQ ID NO: 1036582 - RNA, 21 nt, Human
ccuugcgcucaucuucuccuc

SEQ ID NO: 1036583 - RNA, 20 nt, Human
cucagagcuuaggcuaggcc

SEQ ID NO: 1036584 - RNA, 24 nt, Human
cugcguguguacccucuggugccu

SEQ ID NO: 1036585 - RNA, 24 nt, Human
cuucagcccauccucaacuacccc

SEQ ID NO: 1036586 - RNA, 19 nt, Human
cuucagggacccuaucccc

SEQ ID NO: 1036587 - RNA, 21 nt, Human
cuucagggacccuauccccaa

SEQ ID NO: 1036588 - RNA, 20 nt, Human
cuucugugccuucagcccau

SEQ ID NO: 1036589 - RNA, 24 nt, Human
cuugauuucucccuuggccagcca

SEQ ID NO: 1036590 - RNA, 20 nt, Human
cuuggcauaauuuagcagca

SEQ ID NO: 1036591 - RNA, 21 nt, Human
gaaaagagaaauaacagaaaa

SEQ ID NO: 1036592 - RNA, 23 nt, Human
gaaccaacuuauuggagcaguaa

SEQ ID NO: 1036593 - RNA, 21 nt, Human
gaccuccaagaucaaggugca

SEQ ID NO: 1036594 - RNA, 21 nt, Human
gaggccccacagggguccugc

SEQ ID NO: 1036595 - RNA, 23 nt, Human
gaucaaggaaaagagaaauaaca

SEQ ID NO: 1036596 - RNA, 19 nt, Human
gauuuccacccccaauccc

SEQ ID NO: 1036597 - RNA, 22 nt, Human
gcccauccucaacuacccccuc

SEQ ID NO: 1036598 - RNA, 21 nt, Human
gccuuuccuucaccuuuagau

SEQ ID NO: 1036599 - RNA, 22 nt, Human
gcugguuucuucugugccuuca

SEQ ID NO: 1036600 - RNA, 21 nt, Human
ggaacaugcuuagauugccag

SEQ ID NO: 1036601 - RNA, 22 nt, Human
ggcaugaagucccaaauuccac

SEQ ID NO: 1036602 - RNA, 21 nt, Human
ggugcaggcaaggcugguuuc

SEQ ID NO: 1036603 - RNA, 20 nt, Human
gguuucuucugagguuuccc

SEQ ID NO: 1036604 - RNA, 23 nt, Human
guauaacagaacacauacgcccu

SEQ ID NO: 1036605 - RNA, 23 nt, Human
gugacagggcaugucacugugac

SEQ ID NO: 1036606 - RNA, 23 nt, Human
gugauugaaguuauuccauugua

SEQ ID NO: 1036607 - RNA, 21 nt, Human
gugccuacagcucgccuuuaa

SEQ ID NO: 1036608 - RNA, 18 nt, Human
uaaaccuucuagagcaau

SEQ ID NO: 1036609 - RNA, 18 nt, Human
uaacugccauaacuuugg

SEQ ID NO: 1036610 - RNA, 24 nt, Human
uacaagauauaaguaggugugagg

SEQ ID NO: 1036611 - RNA, 19 nt, Human
uacagcucgccuuuaacag

SEQ ID NO: 1036612 - RNA, 26 nt, Human
uacucacaacuacacccaguuuuuua

SEQ ID NO: 1036613 - RNA, 21 nt, Human
uagaauuuaaugaccaacccc

SEQ ID NO: 1036614 - RNA, 23 nt, Human
uagcagcaaccuuggaauuugca

SEQ ID NO: 1036615 - RNA, 19 nt, Human
uagcagcagcaagcggguu

SEQ ID NO: 1036616 - RNA, 20 nt, Human
uaguuuucuugaauuuuugg

SEQ ID NO: 1036617 - RNA, 19 nt, Human
uauuuugcccuucccuguu

SEQ ID NO: 1036618 - RNA, 21 nt, Human
ucaacauaugaauuugaggaa

SEQ ID NO: 1036619 - RNA, 21 nt, Human
ucagagcuuaggcuaggcccu

SEQ ID NO: 1036620 - RNA, 21 nt, Human
ucagcccauccucaacuaccc

SEQ ID NO: 1036621 - RNA, 19 nt, Human
ucagggacccuauccccaa

SEQ ID NO: 1036622 - RNA, 23 nt, Human
ucaguccauaauagguuuuuugg

SEQ ID NO: 1036623 - RNA, 19 nt, Human
ucauauuggauuagggucc

SEQ ID NO: 1036624 - RNA, 25 nt, Human
uccaagaucaaggugcaggcaaggc

SEQ ID NO: 1036625 - RNA, 26 nt, Human
uccacacauggccuuuucucugcgug

SEQ ID NO: 1036626 - RNA, 21 nt, Human
uccaccccacuguagucauac

SEQ ID NO: 1036627 - RNA, 20 nt, Human
uccaugccuuuaagcaccaa

SEQ ID NO: 1036628 - RNA, 21 nt, Human
uccccuggauaguguggugag

SEQ ID NO: 1036629 - RNA, 23 nt, Human
ucccuuggccagccaauucccaa

SEQ ID NO: 1036630 - RNA, 22 nt, Human
uccuaaacucacaauucuuuaa

SEQ ID NO: 1036631 - RNA, 22 nt, Human
ucuaugacucugugguggggau

SEQ ID NO: 1036632 - RNA, 20 nt, Human
ugaaaugcuauaacgaauga

SEQ ID NO: 1036633 - RNA, 21 nt, Human
ugaaugguugcacaaucccau

SEQ ID NO: 1036634 - RNA, 20 nt, Human
ugaauuaacaugccaaaggc

SEQ ID NO: 1036635 - RNA, 23 nt, Human
ugaauuaacaugccaaaggcaca

SEQ ID NO: 1036636 - RNA, 19 nt, Human
ugaauuuuugggggauugu

SEQ ID NO: 1036637 - RNA, 20 nt, Human
ugacacucgugauuaugaua

SEQ ID NO: 1036638 - RNA, 18 nt, Human
ugacauugcuaauugaac

SEQ ID NO: 1036639 - RNA, 19 nt, Human
ugaccaacccccaccuguu

SEQ ID NO: 1036640 - RNA, 23 nt, Human
ugacuucucagagcuuaggcuag

SEQ ID NO: 1036641 - RNA, 22 nt, Human
ugagagcagcaaguuguggcua

SEQ ID NO: 1036642 - RNA, 21 nt, Human
ugaggaacacaauucagucca

SEQ ID NO: 1036643 - RNA, 18 nt, Human
ugaggaagaagggucugc

SEQ ID NO: 1036644 - RNA, 24 nt, Human
ugaggugguuugcuugaagaagca

SEQ ID NO: 1036645 - RNA, 18 nt, Human
ugaugaaacacagucaga

SEQ ID NO: 1036646 - RNA, 19 nt, Human
ugcuaguggggagaggggc

SEQ ID NO: 1036647 - RNA, 18 nt, Human
ugggaaaggacaucaugg

SEQ ID NO: 1036648 - RNA, 18 nt, Human
ugggcaugaagucccaaa

SEQ ID NO: 1036649 - RNA, 18 nt, Human
uggugaggugguuugcuu

SEQ ID NO: 1036650 - RNA, 22 nt, Human
ugguuguuuauuuugcccuucc

SEQ ID NO: 1036651 - RNA, 21 nt, Human
uuacccacagaaagguagccc

SEQ ID NO: 1036652 - RNA, 20 nt, Human
uuaguucauccuuuuucuua

SEQ ID NO: 1036653 - RNA, 21 nt, Human
uucacaguucuggagacugga

SEQ ID NO: 1036654 - RNA, 22 nt, Human
uugaggagaaauaucagaaugu

SEQ ID NO: 1036655 - RNA, 24 nt, Human
uuggauuaggguccagggaacagg

SEQ ID NO: 1036656 - RNA, 20 nt, Human
uuucccugauaaaggagaga

SEQ ID NO: 1036657 - RNA, 21 nt, Human
gcaggcguaaagggagcuuuu

SEQ ID NO: 1036658 - RNA, 20 nt, Human
ucuuugguguccgcauuugc

SEQ ID NO: 1036659 - RNA, 22 nt, Human
acauuccuuuucuucagaugua

SEQ ID NO: 1036660 - RNA, 21 nt, Human
uaaaacaauggcaaagaugag

SEQ ID NO: 1036661 - RNA, 22 nt, Human
uaaaacaauggcaaagaugagc

SEQ ID NO: 1036662 - RNA, 18 nt, Human
uaucuucaaaguuacauu

SEQ ID NO: 1036663 - RNA, 21 nt, Human
ugagaauaaaauucuaucuuc

SEQ ID NO: 1036664 - RNA, 23 nt, Human
ugaucuucacuuucacuaguacc

SEQ ID NO: 1036665 - RNA, 18 nt, Human
ugaugaaguaauucuuuu

SEQ ID NO: 1036666 - RNA, 24 nt, Human
uucacuuucacuaguaccugacca

SEQ ID NO: 1036667 - RNA, 24 nt, Human
uucucugucuggaugcucuguaug

SEQ ID NO: 1036668 - RNA, 19 nt, Human
cagacaccauguuccacuc

SEQ ID NO: 1036669 - RNA, 23 nt, Human
caggagccagcuuaggcuccagu

SEQ ID NO: 1036670 - RNA, 20 nt, Human
ccacugagaucuaggcgcag

SEQ ID NO: 1036671 - RNA, 21 nt, Human
ccacugagaucuaggcgcagg

SEQ ID NO: 1036672 - RNA, 24 nt, Human
ccccaggagccagcuuaggcuccu

SEQ ID NO: 1036673 - RNA, 21 nt, Human
cugaagguuccuguaggcugg

SEQ ID NO: 1036674 - RNA, 18 nt, Human
gaagguuccuguaggcug

SEQ ID NO: 1036675 - RNA, 18 nt, Human
ggacagacaccauguucc

SEQ ID NO: 1036676 - RNA, 19 nt, Human
ggacagacaccauguucca

SEQ ID NO: 1036677 - RNA, 28 nt, Human
ggacagacaccauguuccagcuucccag

SEQ ID NO: 1036678 - RNA, 23 nt, Human
uccccaggagccagcuuaggcuc

SEQ ID NO: 1036679 - RNA, 28 nt, Human
ucgucccaugaacaaggugaacagagau

SEQ ID NO: 1036680 - RNA, 18 nt, Human
uggcagggagaggacaga

SEQ ID NO: 1036681 - RNA, 21 nt, Human
uggcagggagaggacagacac

SEQ ID NO: 1036682 - RNA, 19 nt, Human
aagcggagcaaaagacaca

SEQ ID NO: 1036683 - RNA, 18 nt, Human
auuuguacuauuuucccu

SEQ ID NO: 1036684 - RNA, 23 nt, Human
uaaagcggagcaaaagacacaaa

SEQ ID NO: 1036685 - RNA, 18 nt, Human
uccauugauuuucagauu

SEQ ID NO: 1036686 - RNA, 18 nt, Human
ugacuaggaauguccucg

SEQ ID NO: 1036687 - RNA, 23 nt, Human
ugagaaaaugacuaggaaugucc

SEQ ID NO: 1036688 - RNA, 18 nt, Human
aaaguuccucaaaaccag

SEQ ID NO: 1036689 - RNA, 18 nt, Human
aacaguaugaccaaagaa

SEQ ID NO: 1036690 - RNA, 19 nt, Human
aagacacagcacucugugg

SEQ ID NO: 1036691 - RNA, 24 nt, Human
accuuagucccucuucccaacccc

SEQ ID NO: 1036692 - RNA, 20 nt, Human
acugcaaaaguaaaguuccu

SEQ ID NO: 1036693 - RNA, 20 nt, Human
aguaaaguuccucaaaacca

SEQ ID NO: 1036694 - RNA, 18 nt, Human
agucuaccagggcaaaua

SEQ ID NO: 1036695 - RNA, 19 nt, Human
aucuuauuuacaaucucuc

SEQ ID NO: 1036696 - RNA, 21 nt, Human
auucccauuuuuuuuacccag

SEQ ID NO: 1036697 - RNA, 19 nt, Human
caacugcaacacaaaaugu

SEQ ID NO: 1036698 - RNA, 23 nt, Human
caagagggcaacaaaauauaaga

SEQ ID NO: 1036699 - RNA, 26 nt, Human
caaucuguuauucaauccuccaucuc

SEQ ID NO: 1036700 - RNA, 22 nt, Human
caccuuagucccucuucccaac

SEQ ID NO: 1036701 - RNA, 23 nt, Human
cacuaauaucuuugggauguuau

SEQ ID NO: 1036702 - RNA, 22 nt, Human
cacuccuacuccaaaaguccca

SEQ ID NO: 1036703 - RNA, 22 nt, Human
caguaugaccaaagaauccacu

SEQ ID NO: 1036704 - RNA, 21 nt, Human
cagucuaccagggcaaauaau

SEQ ID NO: 1036705 - RNA, 18 nt, Human
cauugagggagucaacug

SEQ ID NO: 1036706 - RNA, 23 nt, Human
ccaaaagucccacuaugcuccaa

SEQ ID NO: 1036707 - RNA, 22 nt, Human
ccauccacaauguaaauaucuc

SEQ ID NO: 1036708 - RNA, 25 nt, Human
cccaagagggcaacaaaauauaaga

SEQ ID NO: 1036709 - RNA, 22 nt, Human
ccucaugucaggugcuucgggc

SEQ ID NO: 1036710 - RNA, 19 nt, Human
ccuccaucuccauccacaa

SEQ ID NO: 1036711 - RNA, 19 nt, Human
ccugcuugucuccccacua

SEQ ID NO: 1036712 - RNA, 20 nt, Human
cgugugcauuucgggguccc

SEQ ID NO: 1036713 - RNA, 23 nt, Human
cucaaaaccagggcgaaugaaaa

SEQ ID NO: 1036714 - RNA, 18 nt, Human
cucaaauucacuucuccu

SEQ ID NO: 1036715 - RNA, 22 nt, Human
cuuaggccaacccacauccagc

SEQ ID NO: 1036716 - RNA, 19 nt, Human
gaaguauccaugauucccu

SEQ ID NO: 1036717 - RNA, 20 nt, Human
gcgaaguauccaugauuccc

SEQ ID NO: 1036718 - RNA, 23 nt, Human
ggaaauauccauccucugugaac

SEQ ID NO: 1036719 - RNA, 20 nt, Human
ggcgaaugaaaaucacagaa

SEQ ID NO: 1036720 - RNA, 20 nt, Human
uaaauucuugugcuugaaca

SEQ ID NO: 1036721 - RNA, 18 nt, Human
uaagucccaagagggcaa

SEQ ID NO: 1036722 - RNA, 23 nt, Human
uaagucccaagagggcaacaaaa

SEQ ID NO: 1036723 - RNA, 24 nt, Human
uacaaauaaaacuaagucccaaga

SEQ ID NO: 1036724 - RNA, 18 nt, Human
uacccaagacuugaacaa

SEQ ID NO: 1036725 - RNA, 23 nt, Human
uacccagggagaaucagucuacc

SEQ ID NO: 1036726 - RNA, 19 nt, Human
ucaacugcaacacaaaaug

SEQ ID NO: 1036727 - RNA, 20 nt, Human
ucauuuuuaagucgucaaga

SEQ ID NO: 1036728 - RNA, 22 nt, Human
uccaaaagucccacuaugcucc

SEQ ID NO: 1036729 - RNA, 19 nt, Human
ucugagcucaaauucacuu

SEQ ID NO: 1036730 - RNA, 18 nt, Human
ucuuugggauguuauccc

SEQ ID NO: 1036731 - RNA, 20 nt, Human
ugcuccaaggucgcuuuugc

SEQ ID NO: 1036732 - RNA, 21 nt, Human
uggguuaucaaacugcaaagg

SEQ ID NO: 1036733 - RNA, 22 nt, Human
uguaaauaucuccuguguccuc

SEQ ID NO: 1036734 - RNA, 23 nt, Human
uugagggagucaacugcaacaca

SEQ ID NO: 1036735 - RNA, 24 nt, Human
uugagggagucaacugcaacacaa

SEQ ID NO: 1036736 - RNA, 19 nt, Human
uuuaacaguaugaccaaag

SEQ ID NO: 1036737 - RNA, 22 nt, Human
ccacgugcuggguuuccccuuc

SEQ ID NO: 1036738 - RNA, 19 nt, Human
cucucucaccccgucaaag

SEQ ID NO: 1036739 - RNA, 18 nt, Human
gcuggguuuccccuuccu

SEQ ID NO: 1036740 - RNA, 18 nt, Human
auguggaaugguucagag

SEQ ID NO: 1036741 - RNA, 19 nt, Human
cccuguuccggaggcuggu

SEQ ID NO: 1036742 - RNA, 25 nt, Human
gugggcgugugcacacaagugcccu

SEQ ID NO: 1036743 - RNA, 20 nt, Human
guucuagcaggcuccucucc

SEQ ID NO: 1036744 - RNA, 18 nt, Human
uagcaggcuccucuccug

SEQ ID NO: 1036745 - RNA, 21 nt, Human
uagcaggcuccucuccugcgc

SEQ ID NO: 1036746 - RNA, 25 nt, Human
ugguggguggggguucuagcaggcu

SEQ ID NO: 1036747 - RNA, 18 nt, Human
uguuccggaggcuggugg

SEQ ID NO: 1036748 - RNA, 21 nt, Human
uguuccggaggcuggugggug

SEQ ID NO: 1036749 - RNA, 21 nt, Human
uuccggaggcugguggguggg

SEQ ID NO: 1036750 - RNA, 21 nt, Human
uuuauguggaaugguucagag

SEQ ID NO: 1036751 - RNA, 21 nt, Human
uuuuccuuuauguggaauggu

SEQ ID NO: 1036752 - RNA, 18 nt, Human
acccgcaguuuuauguug

SEQ ID NO: 1036753 - RNA, 22 nt, Human
acugauaauggucauuucucuu

SEQ ID NO: 1036754 - RNA, 23 nt, Human
agguuuuggucucguggggaagg

SEQ ID NO: 1036755 - RNA, 22 nt, Human
cacagucaaaggccagaagucc

SEQ ID NO: 1036756 - RNA, 21 nt, Human
cacuggacugcuccuggcucu

SEQ ID NO: 1036757 - RNA, 23 nt, Human
cucuuugcugacagagccaggag

SEQ ID NO: 1036758 - RNA, 21 nt, Human
cugauaauggucauuucucuu

SEQ ID NO: 1036759 - RNA, 18 nt, Human
gacacuggaagccccuuu

SEQ ID NO: 1036760 - RNA, 21 nt, Human
gcaaguuucucgaccucucca

SEQ ID NO: 1036761 - RNA, 23 nt, Human
uaacaacacugcuaccagcagaa

SEQ ID NO: 1036762 - RNA, 18 nt, Human
ucgaccucuccagccacc

SEQ ID NO: 1036763 - RNA, 20 nt, Human
ucugucucugcugcucugga

SEQ ID NO: 1036764 - RNA, 22 nt, Human
ugauaaauauugcccuuccucc

SEQ ID NO: 1036765 - RNA, 24 nt, Human
ugauaaauauugcccuuccuccca

SEQ ID NO: 1036766 - RNA, 18 nt, Human
uggacugcuccuggcucu

SEQ ID NO: 1036767 - RNA, 25 nt, Human
uggggaaggcagaaccugcucuuug

SEQ ID NO: 1036768 - RNA, 24 nt, Human
ugucuuuccuucugucccguucca

SEQ ID NO: 1036769 - RNA, 27 nt, Human
uuugugcuggcaccagaccacuggacu

SEQ ID NO: 1036770 - RNA, 19 nt, Human
agguguggacgugaacacc

SEQ ID NO: 1036771 - RNA, 23 nt, Human
cagagagguguggacgugaacac

SEQ ID NO: 1036772 - RNA, 24 nt, Human
cccgcugcugcuggccgugcgggg

SEQ ID NO: 1036773 - RNA, 24 nt, Human
cuggccgugcggggcaggcauccg

SEQ ID NO: 1036774 - RNA, 22 nt, Human
gcugcugcagagagguguggac

SEQ ID NO: 1036775 - RNA, 21 nt, Human
uggcuucagcccgcugcugcu

SEQ ID NO: 1036776 - RNA, 25 nt, Human
aaaaacaccacucucugacuaucac

SEQ ID NO: 1036777 - RNA, 18 nt, Human
aaaagaagaaagaaaagg

SEQ ID NO: 1036778 - RNA, 24 nt, Human
aaacacaccugaauuuggauauuc

SEQ ID NO: 1036779 - RNA, 18 nt, Human
aacacagauaagcuaugg

SEQ ID NO: 1036780 - RNA, 25 nt, Human
aagaaaaggccuuuaggaugcagug

SEQ ID NO: 1036781 - RNA, 20 nt, Human
aagaagaaagaaaaggccuu

SEQ ID NO: 1036782 - RNA, 21 nt, Human
aagaagaaagaaaaggccuuu

SEQ ID NO: 1036783 - RNA, 22 nt, Human
acccaaagagaaaagaagaaag

SEQ ID NO: 1036784 - RNA, 19 nt, Human
agacuguaacacccagaca

SEQ ID NO: 1036785 - RNA, 19 nt, Human
agucugcggagggagccug

SEQ ID NO: 1036786 - RNA, 21 nt, Human
caaaaacaccacucucugacu

SEQ ID NO: 1036787 - RNA, 25 nt, Human
caaaauacagcucuuuauccaaaca

SEQ ID NO: 1036788 - RNA, 24 nt, Human
caauccuucccaccugaacaaaaa

SEQ ID NO: 1036789 - RNA, 20 nt, Human
caccugaacaaaaacaccac

SEQ ID NO: 1036790 - RNA, 18 nt, Human
cacugauaaugacagagu

SEQ ID NO: 1036791 - RNA, 21 nt, Human
cagaggaaagucagucugcgg

SEQ ID NO: 1036792 - RNA, 21 nt, Human
ccaaagagaaaagaagaaaga

SEQ ID NO: 1036793 - RNA, 23 nt, Human
ccaaagagaaaagaagaaagaaa

SEQ ID NO: 1036794 - RNA, 22 nt, Human
ccaauccuucccaccugaacaa

SEQ ID NO: 1036795 - RNA, 20 nt, Human
cuacugguuuaaaucacugu

SEQ ID NO: 1036796 - RNA, 18 nt, Human
cuaucacccaaagagaaa

SEQ ID NO: 1036797 - RNA, 18 nt, Human
cugaacaaaaacaccacu

SEQ ID NO: 1036798 - RNA, 30 nt, Human
cugauaaugacagaguugaugcucuccuuu

SEQ ID NO: 1036799 - RNA, 22 nt, Human
cuucucaauccaaacacaccug

SEQ ID NO: 1036800 - RNA, 22 nt, Human
gcaaaauacagcucuuuaucca

SEQ ID NO: 1036801 - RNA, 23 nt, Human
uaacacccagacacagaggaaag

SEQ ID NO: 1036802 - RNA, 21 nt, Human
uaucacccaaagagaaaagaa

SEQ ID NO: 1036803 - RNA, 22 nt, Human
ucacccaaagagaaaagaagaa

SEQ ID NO: 1036804 - RNA, 20 nt, Human
ucacuguaacagaacagaau

SEQ ID NO: 1036805 - RNA, 20 nt, Human
uccaaaaugugaaccaagaa

SEQ ID NO: 1036806 - RNA, 18 nt, Human
ucccaccugaacaaaaac

SEQ ID NO: 1036807 - RNA, 19 nt, Human
ucccucauggaaaaaaaaa

SEQ ID NO: 1036808 - RNA, 28 nt, Human
ucccucauggaaaaaaaaaucagaaaau

SEQ ID NO: 1036809 - RNA, 24 nt, Human
uccuucccaccugaacaaaaacac

SEQ ID NO: 1036810 - RNA, 23 nt, Human
ucucaauccaaacacaccugaau

SEQ ID NO: 1036811 - RNA, 24 nt, Human
ucucuggugaaggucuucaggggc

SEQ ID NO: 1036812 - RNA, 26 nt, Human
uggugaaggucuucaggggcgucacu

SEQ ID NO: 1036813 - RNA, 19 nt, Human
uucccaccugaacaaaaac

SEQ ID NO: 1036814 - RNA, 24 nt, Human
uucccaccugaacaaaaacaccac

SEQ ID NO: 1036815 - RNA, 18 nt, Human
uuccugaggggugugcug

SEQ ID NO: 1036816 - RNA, 21 nt, Human
uugaugcucuccuucucaauc

SEQ ID NO: 1036817 - RNA, 24 nt, Human
aaaauaguuuugucccaaaaucca

SEQ ID NO: 1036818 - RNA, 21 nt, Human
agaauugguggggacccccaa

SEQ ID NO: 1036819 - RNA, 21 nt, Human
agguccccugcgucucaguuu

SEQ ID NO: 1036820 - RNA, 19 nt, Human
agucccuggccgagccuca

SEQ ID NO: 1036821 - RNA, 20 nt, Human
agucugccauccucuucagg

SEQ ID NO: 1036822 - RNA, 20 nt, Human
auccucuucaggucccauag

SEQ ID NO: 1036823 - RNA, 22 nt, Human
auggaucccgcgaaggcacacc

SEQ ID NO: 1036824 - RNA, 24 nt, Human
cacaagcuucuccaauucuccaag

SEQ ID NO: 1036825 - RNA, 20 nt, Human
caccgcacugcacagucugc

SEQ ID NO: 1036826 - RNA, 22 nt, Human
ccagcagggcacaagcuucucc

SEQ ID NO: 1036827 - RNA, 28 nt, Human
cccauaccucucuugaucuccccgacua

SEQ ID NO: 1036828 - RNA, 20 nt, Human
ccuagaacucagguccccug

SEQ ID NO: 1036829 - RNA, 19 nt, Human
ccuaguuccggggaugugg

SEQ ID NO: 1036830 - RNA, 20 nt, Human
ccugcaccgcgaucaccuag

SEQ ID NO: 1036831 - RNA, 19 nt, Human
ccugguuccugcaccgcga

SEQ ID NO: 1036832 - RNA, 18 nt, Human
cgccuagggugcuccggg

SEQ ID NO: 1036833 - RNA, 20 nt, Human
cuagaacucagguccccugc

SEQ ID NO: 1036834 - RNA, 25 nt, Human
cuccaaggucagcaagccacggcag

SEQ ID NO: 1036835 - RNA, 22 nt, Human
cuugaucuccccgacuacuaga

SEQ ID NO: 1036836 - RNA, 18 nt, Human
gagccucagcuuuaucug

SEQ ID NO: 1036837 - RNA, 23 nt, Human
gcacaccugguuccugcaccgcg

SEQ ID NO: 1036838 - RNA, 21 nt, Human
gccuggggcguggcaccagcc

SEQ ID NO: 1036839 - RNA, 20 nt, Human
ggagggguggacgacggcug

SEQ ID NO: 1036840 - RNA, 25 nt, Human
ggcagagccaggccuagaacucagg

SEQ ID NO: 1036841 - RNA, 20 nt, Human
gggaggagauaggaggguga

SEQ ID NO: 1036842 - RNA, 18 nt, Human
ggggagggguggacgacg

SEQ ID NO: 1036843 - RNA, 21 nt, Human
uaccucucuugaucuccccga

SEQ ID NO: 1036844 - RNA, 19 nt, Human
ucccaaaauccagcgccua

SEQ ID NO: 1036845 - RNA, 21 nt, Human
ucccuggccgagccucagcuu

SEQ ID NO: 1036846 - RNA, 18 nt, Human
ucuguaagaaaggggagg

SEQ ID NO: 1036847 - RNA, 23 nt, Human
ugcgggcggggugagccuggggc

SEQ ID NO: 1036848 - RNA, 25 nt, Human
ugggaggagauaggagggugaaaac

SEQ ID NO: 1036849 - RNA, 27 nt, Human
uucuccaaggucagcaagccacggcag

SEQ ID NO: 1036850 - RNA, 21 nt, Human
aaagcaaauggagcgaaagcc

SEQ ID NO: 1036851 - RNA, 20 nt, Human
aauaaagaggccuuccugaa

SEQ ID NO: 1036852 - RNA, 21 nt, Human
acuuccuuuaguuccuuguug

SEQ ID NO: 1036853 - RNA, 21 nt, Human
aggaagauuuaaaaaugcuug

SEQ ID NO: 1036854 - RNA, 20 nt, Human
cagaauucucacaugguguu

SEQ ID NO: 1036855 - RNA, 20 nt, Human
cauuauuuuugugcugcugu

SEQ ID NO: 1036856 - RNA, 23 nt, Human
ccaaagcaaauggagcgaaagcc

SEQ ID NO: 1036857 - RNA, 25 nt, Human
cccauaguacauccaacguucaggu

SEQ ID NO: 1036858 - RNA, 20 nt, Human
cucagaagagcucaaggaaa

SEQ ID NO: 1036859 - RNA, 20 nt, Human
ggaaaugcuugggacccagg

SEQ ID NO: 1036860 - RNA, 24 nt, Human
guagaucuuuguucccagaauucu

SEQ ID NO: 1036861 - RNA, 19 nt, Human
uaacacaaauggcugugcc

SEQ ID NO: 1036862 - RNA, 20 nt, Human
uagaucuuuguucccagaau

SEQ ID NO: 1036863 - RNA, 27 nt, Human
ucacaugguguucauuucugccaguag

SEQ ID NO: 1036864 - RNA, 19 nt, Human
ucaggucauuggccuucug

SEQ ID NO: 1036865 - RNA, 21 nt, Human
ucccagaauucucacauggug

SEQ ID NO: 1036866 - RNA, 21 nt, Human
ugaccucagaaaaaagagucu

SEQ ID NO: 1036867 - RNA, 23 nt, Human
ugguguucauuucugccaguagu

SEQ ID NO: 1036868 - RNA, 20 nt, Human
uguaaugcccauaguacauc

SEQ ID NO: 1036869 - RNA, 21 nt, Human
uguccaaagcaaauggagcga

SEQ ID NO: 1036870 - RNA, 18 nt, Human
uuccugaaaauaugugcc

SEQ ID NO: 1036871 - RNA, 22 nt, Human
uuccuuguuguucuguguagau

SEQ ID NO: 1036872 - RNA, 21 nt, Human
uucuucagugcuucaucuggc

SEQ ID NO: 1036873 - RNA, 22 nt, Human
aaguuacuuucuuuuccuuucu

SEQ ID NO: 1036874 - RNA, 19 nt, Human
agagcgucauaaggauaaa

SEQ ID NO: 1036875 - RNA, 21 nt, Human
agcagaguggaagaggggcag

SEQ ID NO: 1036876 - RNA, 19 nt, Human
ccgagagcagaguggaaga

SEQ ID NO: 1036877 - RNA, 22 nt, Human
cgagagcagaguggaagagggg

SEQ ID NO: 1036878 - RNA, 22 nt, Human
gagcagaguggaagaggggcag

SEQ ID NO: 1036879 - RNA, 19 nt, Human
uccucacggcaaaauaagg

SEQ ID NO: 1036880 - RNA, 23 nt, Human
ugugaaaccagugagaagaauaa

SEQ ID NO: 1036881 - RNA, 27 nt, Human
uuacuuucuuuuccuuucucugugaaa

SEQ ID NO: 1036882 - RNA, 22 nt, Human
uucucugugaaaccagugagaa

SEQ ID NO: 1036883 - RNA, 20 nt, Human
aagcauuuuucaaagcaauu

SEQ ID NO: 1036884 - RNA, 18 nt, Human
auagaauauuugucuaca

SEQ ID NO: 1036885 - RNA, 24 nt, Human
cauuucaaauauaguuuuaaugac

SEQ ID NO: 1036886 - RNA, 24 nt, Human
cugguugcuaaggugaaagcgcca

SEQ ID NO: 1036887 - RNA, 24 nt, Human
uaaaauauuaaaucaguauuuguc

SEQ ID NO: 1036888 - RNA, 20 nt, Human
ucuacaauauauagucugau

SEQ ID NO: 1036889 - RNA, 25 nt, Human
ucucaugagcuaugcacaaaugucu

SEQ ID NO: 1036890 - RNA, 18 nt, Human
ugagcuaugcacaaaugu

SEQ ID NO: 1036891 - RNA, 24 nt, Human
ugggagccgcgcugguugcuaagg

SEQ ID NO: 1036892 - RNA, 18 nt, Human
uucaauuuauuuccauuu

SEQ ID NO: 1036893 - RNA, 23 nt, Human
acagaauuucaccuucuccggcc

SEQ ID NO: 1036894 - RNA, 24 nt, Human
accagcaucuuuauuuuucaugcu

SEQ ID NO: 1036895 - RNA, 24 nt, Human
caggaucugguuuggauaaagguu

SEQ ID NO: 1036896 - RNA, 21 nt, Human
ggaaagucaucuccaccaaga

SEQ ID NO: 1036897 - RNA, 22 nt, Human
ggugagccuccacucggauucu

SEQ ID NO: 1036898 - RNA, 22 nt, Human
gguuuggauaaagguuacugug

SEQ ID NO: 1036899 - RNA, 24 nt, Human
ucccaagcuggcaggaguaaagcu

SEQ ID NO: 1036900 - RNA, 25 nt, Human
ucccaagcuggcaggaguaaagcuu

SEQ ID NO: 1036901 - RNA, 22 nt, Human
uuacugugcgggagcugacaaa

SEQ ID NO: 1036902 - RNA, 21 nt, Human
uuuggaagauugucauccaga

SEQ ID NO: 1036903 - RNA, 20 nt, Human
uuuugggaguaggagacuug

SEQ ID NO: 1036904 - RNA, 24 nt, Human
aaaaguacccaacaaaacuuuuga

SEQ ID NO: 1036905 - RNA, 21 nt, Human
acccaacaaaacuuuugagcc

SEQ ID NO: 1036906 - RNA, 26 nt, Human
cuacuucaaguuaaaaagaaagcaau

SEQ ID NO: 1036907 - RNA, 18 nt, Human
gagccuucaugcuacuuc

SEQ ID NO: 1036908 - RNA, 21 nt, Human
gcaaccaaaacuacuucucaa

SEQ ID NO: 1036909 - RNA, 18 nt, Human
uacuguguaaucaagagc

SEQ ID NO: 1036910 - RNA, 19 nt, Human
ucaagagcaaccaaaacua

SEQ ID NO: 1036911 - RNA, 22 nt, Human
ugcaguacaaguuucaccacca

SEQ ID NO: 1036912 - RNA, 22 nt, Human
uguaaucaagagcaaccaaaac

SEQ ID NO: 1036913 - RNA, 19 nt, Human
uucaaguuaaaaagaaagc

SEQ ID NO: 1036914 - RNA, 23 nt, Human
aaaauacuuuuaccuagguuuua

SEQ ID NO: 1036915 - RNA, 27 nt, Human
aaacacugaaaauacacuucugaaacu

SEQ ID NO: 1036916 - RNA, 24 nt, Human
acacugaaaauacacuucugaaac

SEQ ID NO: 1036917 - RNA, 21 nt, Human
acagucagauauauuuugaac

SEQ ID NO: 1036918 - RNA, 19 nt, Human
acauucaaauccauacuag

SEQ ID NO: 1036919 - RNA, 18 nt, Human
agcgcccaggcccaaucu

SEQ ID NO: 1036920 - RNA, 23 nt, Human
auacacuucugaaacuaguauag

SEQ ID NO: 1036921 - RNA, 22 nt, Human
auucaaauccauacuagaucaa

SEQ ID NO: 1036922 - RNA, 24 nt, Human
caaguauacacaaaauaaaagccc

SEQ ID NO: 1036923 - RNA, 18 nt, Human
cagcagcuccagcgccca

SEQ ID NO: 1036924 - RNA, 25 nt, Human
cccgucgccgccgccgccugcucau

SEQ ID NO: 1036925 - RNA, 20 nt, Human
ccgcacccgucgccgccgcc

SEQ ID NO: 1036926 - RNA, 24 nt, Human
ccgccgcacccgucgccgccgccg

SEQ ID NO: 1036927 - RNA, 26 nt, Human
ccgccgcacccgucgccgccgccgcc

SEQ ID NO: 1036928 - RNA, 27 nt, Human
ccgccgcacccgucgccgccgccgccu

SEQ ID NO: 1036929 - RNA, 22 nt, Human
ccgccgccgccgccgccgccgc

SEQ ID NO: 1036930 - RNA, 22 nt, Human
ccgccgccgccgccgccgccgc

SEQ ID NO: 1036931 - RNA, 23 nt, Human
ccgccgccgccgccgccgccgcu

SEQ ID NO: 1036932 - RNA, 26 nt, Human
ccgccgccgccgccgccgccgcugcc

SEQ ID NO: 1036933 - RNA, 24 nt, Human
ccgccggcugucucggccuccccc

SEQ ID NO: 1036934 - RNA, 23 nt, Human
cucacuggacccacggagccagg

SEQ ID NO: 1036935 - RNA, 18 nt, Human
cuggacccacggagccag

SEQ ID NO: 1036936 - RNA, 22 nt, Human
gaguucugggcucuggcauggc

SEQ ID NO: 1036937 - RNA, 22 nt, Human
gccgccgccgccgccgccgccg

SEQ ID NO: 1036938 - RNA, 22 nt, Human
gcugccgccgccgccgccgccg

SEQ ID NO: 1036939 - RNA, 19 nt, Human
ggaccgaaaacugccggug

SEQ ID NO: 1036940 - RNA, 20 nt, Human
uaaaaaauugcugcagggau

SEQ ID NO: 1036941 - RNA, 23 nt, Human
uacaaacauuuuugcacagaucc

SEQ ID NO: 1036942 - RNA, 21 nt, Human
uaguauaguugaacuauuuuc

SEQ ID NO: 1036943 - RNA, 27 nt, Human
uauuccaacauaaaauaugcucauugu

SEQ ID NO: 1036944 - RNA, 22 nt, Human
ugccauuauaaagaaauaguuu

SEQ ID NO: 1036945 - RNA, 22 nt, Human
ugggagagcaugggcaggaggg

SEQ ID NO: 1036946 - RNA, 22 nt, Human
ugggcaggagggaaaacaacuu

SEQ ID NO: 1036947 - RNA, 25 nt, Human
uuaaacacugaaaauacacuucuga

SEQ ID NO: 1036948 - RNA, 23 nt, Human
uuuauaauacuuuaggaaguagu

SEQ ID NO: 1036949 - RNA, 20 nt, Human
aaaagaaaaaaaaaaugggg

SEQ ID NO: 1036950 - RNA, 22 nt, Human
aaacauaaagaagguacaguaa

SEQ ID NO: 1036951 - RNA, 25 nt, Human
aaaggguaauaaauaaaugggaaac

SEQ ID NO: 1036952 - RNA, 23 nt, Human
aacaaaaaguccaaagguaaagc

SEQ ID NO: 1036953 - RNA, 22 nt, Human
aacaugcaagauucuaacaaaa

SEQ ID NO: 1036954 - RNA, 21 nt, Human
aaccuguacagcauauuauug

SEQ ID NO: 1036955 - RNA, 24 nt, Human
aagaauaucucacauaacaaaaag

SEQ ID NO: 1036956 - RNA, 18 nt, Human
aagagaaaguaaguagaa

SEQ ID NO: 1036957 - RNA, 18 nt, Human
aagcaaauggaacaauau

SEQ ID NO: 1036958 - RNA, 25 nt, Human
aagcaaauggaacaauauaaagaau

SEQ ID NO: 1036959 - RNA, 21 nt, Human
aaguucucuauuguguucuau

SEQ ID NO: 1036960 - RNA, 18 nt, Human
acaaacaucgaacaaugu

SEQ ID NO: 1036961 - RNA, 20 nt, Human
acacuguugaagccuugcau

SEQ ID NO: 1036962 - RNA, 21 nt, Human
acacuguugaagccuugcauu

SEQ ID NO: 1036963 - RNA, 18 nt, Human
accaggacuuccaugcac

SEQ ID NO: 1036964 - RNA, 22 nt, Human
acccagcuuuuucacacacaca

SEQ ID NO: 1036965 - RNA, 21 nt, Human
accuuuaaguuucuccccacc

SEQ ID NO: 1036966 - RNA, 21 nt, Human
acucucccuuuguuucuacua

SEQ ID NO: 1036967 - RNA, 27 nt, Human
acugaccccaaaccacuaagaugauau

SEQ ID NO: 1036968 - RNA, 19 nt, Human
acuguacccuuccaugaaa

SEQ ID NO: 1036969 - RNA, 22 nt, Human
acuuguccuuucauggccauca

SEQ ID NO: 1036970 - RNA, 18 nt, Human
agaaaaaggcauauucaa

SEQ ID NO: 1036971 - RNA, 18 nt, Human
agaaaaaggcauauucaa

SEQ ID NO: 1036972 - RNA, 18 nt, Human
aggaaagaagggaauaaa

SEQ ID NO: 1036973 - RNA, 24 nt, Human
aggaaugaaaccuauuaaagaaaa

SEQ ID NO: 1036974 - RNA, 21 nt, Human
aggcuacaaaccuguacagca

SEQ ID NO: 1036975 - RNA, 19 nt, Human
auauacacacauacaaugu

SEQ ID NO: 1036976 - RNA, 23 nt, Human
auauauguauuuauauauacaca

SEQ ID NO: 1036977 - RNA, 24 nt, Human
caaaucccuaacuuguaucaauug

SEQ ID NO: 1036978 - RNA, 19 nt, Human
caauauacauauacccaaa

SEQ ID NO: 1036979 - RNA, 25 nt, Human
cacaaauacaugcaaaaaggguuuc

SEQ ID NO: 1036980 - RNA, 23 nt, Human
cacaauucaggugcuuucuaucu

SEQ ID NO: 1036981 - RNA, 22 nt, Human
caccuaagcuauggccuauugc

SEQ ID NO: 1036982 - RNA, 21 nt, Human
cagaaucuaaucaacacucac

SEQ ID NO: 1036983 - RNA, 19 nt, Human
cagaguguacuuacacaaa

SEQ ID NO: 1036984 - RNA, 19 nt, Human
cauucuaucccuguggcua

SEQ ID NO: 1036985 - RNA, 20 nt, Human
ccacugccauauaugagguc

SEQ ID NO: 1036986 - RNA, 25 nt, Human
ccccaaaccacuaagaugauauggu

SEQ ID NO: 1036987 - RNA, 19 nt, Human
cccugcugcagaguucccu

SEQ ID NO: 1036988 - RNA, 19 nt, Human
cccuucaucuccuuugauc

SEQ ID NO: 1036989 - RNA, 18 nt, Human
ccuaaaguacauuuuuaa

SEQ ID NO: 1036990 - RNA, 21 nt, Human
cucagcgacuucgccggcgcc

SEQ ID NO: 1036991 - RNA, 19 nt, Human
cuucggggcuaccaaaucc

SEQ ID NO: 1036992 - RNA, 21 nt, Human
cuuuguaauacuguacccuuc

SEQ ID NO: 1036993 - RNA, 19 nt, Human
gaaugucccuucaucuccu

SEQ ID NO: 1036994 - RNA, 22 nt, Human
gagaagcagaagagggaugcug

SEQ ID NO: 1036995 - RNA, 22 nt, Human
gauccuuuaccaggacuuccau

SEQ ID NO: 1036996 - RNA, 19 nt, Human
gcagaguucccugucacac

SEQ ID NO: 1036997 - RNA, 22 nt, Human
gcagaguucccugucacacaaa

SEQ ID NO: 1036998 - RNA, 19 nt, Human
gccuugcauuucaguaugu

SEQ ID NO: 1036999 - RNA, 20 nt, Human
ggagcucuaaccaaagccaa

SEQ ID NO: 1037000 - RNA, 23 nt, Human
ggccgaacgaaagucugacggga

SEQ ID NO: 1037001 - RNA, 23 nt, Human
gucacccccugcugcagaguucc

SEQ ID NO: 1037002 - RNA, 28 nt, Human
guuuuaggccaaaaaaaaagaaaaaaaa

SEQ ID NO: 1037003 - RNA, 24 nt, Human
uaaagcaguuccuggauugguuaa

SEQ ID NO: 1037004 - RNA, 27 nt, Human
uaaauacauaucacucuaaccaaauaa

SEQ ID NO: 1037005 - RNA, 19 nt, Human
uaacaggaauaaauacaaa

SEQ ID NO: 1037006 - RNA, 23 nt, Human
uacacaaaccuagaugguaugau

SEQ ID NO: 1037007 - RNA, 21 nt, Human
uacacacauacaauguauaua

SEQ ID NO: 1037008 - RNA, 20 nt, Human
uaccuaauauucuuuggccc

SEQ ID NO: 1037009 - RNA, 23 nt, Human
uagagucacugaauucacauuua

SEQ ID NO: 1037010 - RNA, 22 nt, Human
uagcuucaaacauccauaucac

SEQ ID NO: 1037011 - RNA, 23 nt, Human
uauauacacacauacaauguaua

SEQ ID NO: 1037012 - RNA, 25 nt, Human
uauauacacacauacaauguauaua

SEQ ID NO: 1037013 - RNA, 19 nt, Human
uauauguauuuauauauac

SEQ ID NO: 1037014 - RNA, 20 nt, Human
uaugaaauccuuauacaggu

SEQ ID NO: 1037015 - RNA, 21 nt, Human
uauuuuguguuuuuaauauaa

SEQ ID NO: 1037016 - RNA, 20 nt, Human
ucacugagaagcagaagagg

SEQ ID NO: 1037017 - RNA, 21 nt, Human
ucagcuggaagaggaaagaag

SEQ ID NO: 1037018 - RNA, 19 nt, Human
uccaacucugcucagcugg

SEQ ID NO: 1037019 - RNA, 18 nt, Human
ucccaaaggcugguacuu

SEQ ID NO: 1037020 - RNA, 19 nt, Human
uccccaaaacaugugagaa

SEQ ID NO: 1037021 - RNA, 18 nt, Human
uccccaccuacucccgca

SEQ ID NO: 1037022 - RNA, 18 nt, Human
ucuacaucccacuauucu

SEQ ID NO: 1037023 - RNA, 23 nt, Human
ucuauagcacaaggcagccauac

SEQ ID NO: 1037024 - RNA, 24 nt, Human
ucucaugcuaauucaacaaacccu

SEQ ID NO: 1037025 - RNA, 25 nt, Human
ugaaaggaaaaugguaugcuucuaa

SEQ ID NO: 1037026 - RNA, 22 nt, Human
ugaaggaaugaaaccuauuaaa

SEQ ID NO: 1037027 - RNA, 25 nt, Human
ugagaagcagaagagggaugcuggc

SEQ ID NO: 1037028 - RNA, 22 nt, Human
uggcaaaucccuaacuuguauc

SEQ ID NO: 1037029 - RNA, 19 nt, Human
uggcuaagagaccgaggua

SEQ ID NO: 1037030 - RNA, 21 nt, Human
uggcucccguuugagcugguc

SEQ ID NO: 1037031 - RNA, 19 nt, Human
ugucacacaaauacaugca

SEQ ID NO: 1037032 - RNA, 21 nt, Human
ugucagaaugacuaauucaau

SEQ ID NO: 1037033 - RNA, 24 nt, Human
uguuuggugugucagucacccccu

SEQ ID NO: 1037034 - RNA, 22 nt, Human
uuacaugaauaauuuaucucuu

SEQ ID NO: 1037035 - RNA, 21 nt, Human
uuagcuucaaacauccauauc

SEQ ID NO: 1037036 - RNA, 28 nt, Human
uuauauauacacacauacaauguauaua

SEQ ID NO: 1037037 - RNA, 20 nt, Human
uucaaagccuucagacuucc

SEQ ID NO: 1037038 - RNA, 20 nt, Human
uucaaagccuucagacuucc

SEQ ID NO: 1037039 - RNA, 21 nt, Human
uucauggccaucagaaggcug

SEQ ID NO: 1037040 - RNA, 21 nt, Human
uugcuccuaggcuacaaaccu

SEQ ID NO: 1037041 - RNA, 18 nt, Human
uuugaaguucucuauugu

SEQ ID NO: 1037042 - RNA, 25 nt, Human
uuugaauaaccuaacucucccuuug

SEQ ID NO: 1037043 - RNA, 18 nt, Human
accuaacaauaaaaaucu

SEQ ID NO: 1037044 - RNA, 22 nt, Human
auccucccagcugaucacaguu

SEQ ID NO: 1037045 - RNA, 19 nt, Human
caauccucccagcugauca

SEQ ID NO: 1037046 - RNA, 22 nt, Human
ccagcugaucacaguucuucuc

SEQ ID NO: 1037047 - RNA, 21 nt, Human
ccucccagcugaucacaguuc

SEQ ID NO: 1037048 - RNA, 18 nt, Human
ugcagcaauccucccagc

SEQ ID NO: 1037049 - RNA, 18 nt, Human
ggaggccuucccacggcc

SEQ ID NO: 1037050 - RNA, 20 nt, Human
ucccacggcacuccuugaag

SEQ ID NO: 1037051 - RNA, 19 nt, Human
ugggaggccuucccacggc

SEQ ID NO: 1037052 - RNA, 21 nt, Human
aaauggccaacagagccauga

SEQ ID NO: 1037053 - RNA, 23 nt, Human
aagauaagggacauuuguuacac

SEQ ID NO: 1037054 - RNA, 19 nt, Human
aaggagcuggcaaaauugg

SEQ ID NO: 1037055 - RNA, 21 nt, Human
aaugucgaagaucaaggagcu

SEQ ID NO: 1037056 - RNA, 21 nt, Human
aggauuggguggcuuaaacaa

SEQ ID NO: 1037057 - RNA, 22 nt, Human
caccagggcugguuucagagac

SEQ ID NO: 1037058 - RNA, 21 nt, Human
caggagacagagcuaacagag

SEQ ID NO: 1037059 - RNA, 22 nt, Human
ccucagggggcugcuucucccu

SEQ ID NO: 1037060 - RNA, 19 nt, Human
gcugcuucucccuccagga

SEQ ID NO: 1037061 - RNA, 19 nt, Human
uaagaagacaacaggauug

SEQ ID NO: 1037062 - RNA, 20 nt, Human
ucaaaaauggccaacagagc

SEQ ID NO: 1037063 - RNA, 20 nt, Human
ucagagaccaugcucaaaaa

SEQ ID NO: 1037064 - RNA, 20 nt, Human
ugucgaagaucaaggagcug

SEQ ID NO: 1037065 - RNA, 22 nt, Human
acugccucagcucagcacagcu

SEQ ID NO: 1037066 - RNA, 24 nt, Human
acugccucagcucagcacagcugc

SEQ ID NO: 1037067 - RNA, 20 nt, Human
aggaaaugggcucacaugug

SEQ ID NO: 1037068 - RNA, 21 nt, Human
aggagcugugcucuaggggau

SEQ ID NO: 1037069 - RNA, 22 nt, Human
augggcucacaugugucuggag

SEQ ID NO: 1037070 - RNA, 24 nt, Human
cacugccucagcucagcacagcug

SEQ ID NO: 1037071 - RNA, 19 nt, Human
cagcucagcacagcugccu

SEQ ID NO: 1037072 - RNA, 24 nt, Human
cagcugccucccacaucaggauuu

SEQ ID NO: 1037073 - RNA, 18 nt, Human
cuaacaaaguggcuucuc

SEQ ID NO: 1037074 - RNA, 21 nt, Human
cuuugcuaacaaaguggcuuc

SEQ ID NO: 1037075 - RNA, 18 nt, Human
ggaugucgaugcaaaaug

SEQ ID NO: 1037076 - RNA, 19 nt, Human
uauuccacauucuuggcua

SEQ ID NO: 1037077 - RNA, 20 nt, Human
ucaguuaagcaaagagcagg

SEQ ID NO: 1037078 - RNA, 19 nt, Human
ugccucagcucagcacagc

SEQ ID NO: 1037079 - RNA, 21 nt, Human
ugucuggagcagggcauggcu

SEQ ID NO: 1037080 - RNA, 22 nt, Human
uuaagcaaagagcaggaaaugg

SEQ ID NO: 1037081 - RNA, 20 nt, Human
aaagaggcuucagcaucucu

SEQ ID NO: 1037082 - RNA, 25 nt, Human
aagcccaggccggggucagagggga

SEQ ID NO: 1037083 - RNA, 22 nt, Human
aggccuggccugugggccagga

SEQ ID NO: 1037084 - RNA, 21 nt, Human
cacggggcaggcucggugcug

SEQ ID NO: 1037085 - RNA, 18 nt, Human
cccgggcggucgcaggcg

SEQ ID NO: 1037086 - RNA, 22 nt, Human
cucacggggcaggcucggugcu

SEQ ID NO: 1037087 - RNA, 23 nt, Human
cucccuggaggagguggggcuca

SEQ ID NO: 1037088 - RNA, 18 nt, Human
cugcuugcgggaggaagc

SEQ ID NO: 1037089 - RNA, 20 nt, Human
gcggacccgggcugcuugcg

SEQ ID NO: 1037090 - RNA, 21 nt, Human
gcggucgcaggcggcuccugg

SEQ ID NO: 1037091 - RNA, 20 nt, Human
ggaaggggcuuccuggaggg

SEQ ID NO: 1037092 - RNA, 23 nt, Human
ggaggaagcggcugaagcccagg

SEQ ID NO: 1037093 - RNA, 19 nt, Human
ggagggcucccuggaggag

SEQ ID NO: 1037094 - RNA, 22 nt, Human
ggagguggggcucagggggggc

SEQ ID NO: 1037095 - RNA, 18 nt, Human
ggccggggucagagggga

SEQ ID NO: 1037096 - RNA, 19 nt, Human
gggucgccgagagaaaaag

SEQ ID NO: 1037097 - RNA, 22 nt, Human
gugggggccacugcugcuuucc

SEQ ID NO: 1037098 - RNA, 21 nt, Human
ucagagagcaggcgggcgguu

SEQ ID NO: 1037099 - RNA, 25 nt, Human
ucgccgagagaaaaagaggcccccc

SEQ ID NO: 1037100 - RNA, 20 nt, Human
uggaggagguggggcucagg

SEQ ID NO: 1037101 - RNA, 26 nt, Human
uggaggagguggggcucagggggggg

SEQ ID NO: 1037102 - RNA, 24 nt, Human
ugggccaggagucagggaaggggc

SEQ ID NO: 1037103 - RNA, 21 nt, Human
ugugggggccacugcugcuuu

SEQ ID NO: 1037104 - RNA, 19 nt, Human
uuccagccgcagacugcag

SEQ ID NO: 1037105 - RNA, 19 nt, Human
uuuuuuaggccuggccugu

SEQ ID NO: 1037106 - RNA, 18 nt, Human
uuuuuuuuuuuuuuuuug

SEQ ID NO: 1037107 - RNA, 19 nt, Human
acacaaggcuggcuuucca

SEQ ID NO: 1037108 - RNA, 20 nt, Human
cagguugaacagaaauauaa

SEQ ID NO: 1037109 - RNA, 18 nt, Human
gaggaacgugacugcugc

SEQ ID NO: 1037110 - RNA, 20 nt, Human
gaggaacgugacugcugcug

SEQ ID NO: 1037111 - RNA, 22 nt, Human
uacacaaguccagacgcugcca

SEQ ID NO: 1037112 - RNA, 18 nt, Human
ucucugagcacuuuggcu

SEQ ID NO: 1037113 - RNA, 19 nt, Human
ugaacagaaauauaaaagu

SEQ ID NO: 1037114 - RNA, 18 nt, Human
ugagcacuuuggcucauu

SEQ ID NO: 1037115 - RNA, 25 nt, Human
ugccagggccuguugggaucagcuc

SEQ ID NO: 1037116 - RNA, 18 nt, Human
acaagaagagguccuucu

SEQ ID NO: 1037117 - RNA, 20 nt, Human
ccaguuagaauaaauaauca

SEQ ID NO: 1037118 - RNA, 21 nt, Human
cccaaaauuccaugccugcuc

SEQ ID NO: 1037119 - RNA, 19 nt, Human
cuggugacacccaaaauuc

SEQ ID NO: 1037120 - RNA, 25 nt, Human
uaguaagacccuaguccuaaagcuc

SEQ ID NO: 1037121 - RNA, 23 nt, Human
ucagauguaguguaaucucuucu

SEQ ID NO: 1037122 - RNA, 25 nt, Human
uuagaauaaauaaucaggaguucac

SEQ ID NO: 1037123 - RNA, 21 nt, Human
uuucuauucagaugcugaggg

SEQ ID NO: 1037124 - RNA, 19 nt, Human
uuuggauuuuucacuccuc

SEQ ID NO: 1037125 - RNA, 25 nt, Human
uuuuuugucagucauaacuuuuaau

SEQ ID NO: 1037126 - RNA, 20 nt, Human
uuuuuuuuuuuuuuugucag

SEQ ID NO: 1037127 - RNA, 20 nt, Human
uuuuuuuuuuuuuuugucag

SEQ ID NO: 1037128 - RNA, 24 nt, Human
agaagggggagggaggacuuagag

SEQ ID NO: 1037129 - RNA, 19 nt, Human
ccaagcucccugguguuaa

SEQ ID NO: 1037130 - RNA, 24 nt, Human
ccggaugguggucugacccuuccc

SEQ ID NO: 1037131 - RNA, 20 nt, Human
ggacuuagaguacccggaug

SEQ ID NO: 1037132 - RNA, 21 nt, Human
ggggagggaggacuuagagua

SEQ ID NO: 1037133 - RNA, 22 nt, Human
ggugaaggagaagggggaggga

SEQ ID NO: 1037134 - RNA, 18 nt, Human
gugaaggagaagggggag

SEQ ID NO: 1037135 - RNA, 19 nt, Human
uagcaggcugagaugaagc

SEQ ID NO: 1037136 - RNA, 21 nt, Human
uagcaggcugagaugaagcuc

SEQ ID NO: 1037137 - RNA, 24 nt, Human
ucccucacagacagagauuuuggc

SEQ ID NO: 1037138 - RNA, 26 nt, Human
uuuuccaagcucccugguguuaaaca

SEQ ID NO: 1037139 - RNA, 19 nt, Human
aaaagguaaagaaagucaa

SEQ ID NO: 1037140 - RNA, 20 nt, Human
aaagguaaagaaagucaaaa

SEQ ID NO: 1037141 - RNA, 20 nt, Human
aacuagccuggagcuggccc

SEQ ID NO: 1037142 - RNA, 21 nt, Human
aagaaaaagugguuuggcuag

SEQ ID NO: 1037143 - RNA, 19 nt, Human
aagcaguuaggacauaaac

SEQ ID NO: 1037144 - RNA, 20 nt, Human
acaaagaagucagaagccaa

SEQ ID NO: 1037145 - RNA, 19 nt, Human
acagguaacuagccuggag

SEQ ID NO: 1037146 - RNA, 27 nt, Human
accccccuuccccaggacuuuugucuu

SEQ ID NO: 1037147 - RNA, 25 nt, Human
acccgcucuucuucucccaaggccu

SEQ ID NO: 1037148 - RNA, 19 nt, Human
acuucaaaagguaaagaaa

SEQ ID NO: 1037149 - RNA, 27 nt, Human
acuuuugucuucccaucaagcuggagg

SEQ ID NO: 1037150 - RNA, 23 nt, Human
aggaaugaagcugugaaccuguu

SEQ ID NO: 1037151 - RNA, 23 nt, Human
caaaaggaacaaaacaucauuuu

SEQ ID NO: 1037152 - RNA, 26 nt, Human
cacccgcucuucuucucccaaggccu

SEQ ID NO: 1037153 - RNA, 25 nt, Human
cacuuucuacuucaaaagguaaaga

SEQ ID NO: 1037154 - RNA, 20 nt, Human
cauaaaccccccuuccccag

SEQ ID NO: 1037155 - RNA, 24 nt, Human
cauaaaccccccuuccccaggacu

SEQ ID NO: 1037156 - RNA, 24 nt, Human
caucaagcuggaggaugagcuggg

SEQ ID NO: 1037157 - RNA, 24 nt, Human
ccccccuuccccaggacuuuuguc

SEQ ID NO: 1037158 - RNA, 19 nt, Human
ccuggagcuggcccugggg

SEQ ID NO: 1037159 - RNA, 23 nt, Human
cuagcagccauuuuaacaaggcu

SEQ ID NO: 1037160 - RNA, 22 nt, Human
gagcuggcccuggggccugagc

SEQ ID NO: 1037161 - RNA, 22 nt, Human
ggacauaaaccccccuucccca

SEQ ID NO: 1037162 - RNA, 21 nt, Human
gguaaagaaagucaaaaggaa

SEQ ID NO: 1037163 - RNA, 18 nt, Human
uagauaaaagggcacccg

SEQ ID NO: 1037164 - RNA, 24 nt, Human
uaggacauaaaccccccuucccca

SEQ ID NO: 1037165 - RNA, 26 nt, Human
uaucacuuguaggaguaaaaaaagag

SEQ ID NO: 1037166 - RNA, 21 nt, Human
ucacuuguaggaguaaaaaaa

SEQ ID NO: 1037167 - RNA, 23 nt, Human
uccccaggacuuuugucuuccca

SEQ ID NO: 1037168 - RNA, 20 nt, Human
uguaggaguaaaaaaagagu

SEQ ID NO: 1037169 - RNA, 19 nt, Human
uugagcagagccuuccaug

SEQ ID NO: 1037170 - RNA, 18 nt, Human
aaacugggaaaacugcug

SEQ ID NO: 1037171 - RNA, 24 nt, Human
aaagugcugggauuacaggcguga

SEQ ID NO: 1037172 - RNA, 21 nt, Human
aagcgauucuccugccucagc

SEQ ID NO: 1037173 - RNA, 19 nt, Human
aagugcugggauuacaggc

SEQ ID NO: 1037174 - RNA, 19 nt, Human
aagugcugggauuacaggc

SEQ ID NO: 1037175 - RNA, 26 nt, Human
aagugcugggauuacaggcgugagcc

SEQ ID NO: 1037176 - RNA, 18 nt, Human
acaggguuucaccauguu

SEQ ID NO: 1037177 - RNA, 19 nt, Human
acaggguuucaccauguug

SEQ ID NO: 1037178 - RNA, 24 nt, Human
acaggguuucaccauguugaccag

SEQ ID NO: 1037179 - RNA, 22 nt, Human
acccagcuaggagguaaaaauu

SEQ ID NO: 1037180 - RNA, 22 nt, Human
accucccgaguuuaagcgauuc

SEQ ID NO: 1037181 - RNA, 18 nt, Human
agaaaagaaauccagaga

SEQ ID NO: 1037182 - RNA, 18 nt, Human
agaaaagaaauccagaga

SEQ ID NO: 1037183 - RNA, 23 nt, Human
agacagggugaggaagggaggca

SEQ ID NO: 1037184 - RNA, 21 nt, Human
agagacagggugaggaaggga

SEQ ID NO: 1037185 - RNA, 24 nt, Human
agcgauucuccugccucagccucc

SEQ ID NO: 1037186 - RNA, 24 nt, Human
agcugggauuacaagcgcacccca

SEQ ID NO: 1037187 - RNA, 25 nt, Human
aggagguaaauuuuuuuuuuuuuuu

SEQ ID NO: 1037188 - RNA, 19 nt, Human
aguagcugggauuacaagc

SEQ ID NO: 1037189 - RNA, 20 nt, Human
agugcaauggugugaccuug

SEQ ID NO: 1037190 - RNA, 24 nt, Human
agugcaauggugugaccuuggcuc

SEQ ID NO: 1037191 - RNA, 18 nt, Human
agugcugggauuacaggc

SEQ ID NO: 1037192 - RNA, 24 nt, Human
aucuugugaucugcccgccucagc

SEQ ID NO: 1037193 - RNA, 24 nt, Human
caaagugcugggauuacaggcgug

SEQ ID NO: 1037194 - RNA, 20 nt, Human
caaccucuaccucccgaguu

SEQ ID NO: 1037195 - RNA, 24 nt, Human
caaccucuaccucccgaguuuaag

SEQ ID NO: 1037196 - RNA, 21 nt, Human
caagcgcaccccaccacgccc

SEQ ID NO: 1037197 - RNA, 18 nt, Human
caccauguugaccaggcu

SEQ ID NO: 1037198 - RNA, 19 nt, Human
caccauguugaccaggcug

SEQ ID NO: 1037199 - RNA, 22 nt, Human
caccauguugaccaggcugggu

SEQ ID NO: 1037200 - RNA, 26 nt, Human
caccauguugaccaggcuggguuggc

SEQ ID NO: 1037201 - RNA, 25 nt, Human
caccccaccacgcccggcuaauugu

SEQ ID NO: 1037202 - RNA, 21 nt, Human
cacugcaaccucuaccucccg

SEQ ID NO: 1037203 - RNA, 20 nt, Human
cagccuccugaguagcuggg

SEQ ID NO: 1037204 - RNA, 24 nt, Human
caggguuucaccauguugaccagg

SEQ ID NO: 1037205 - RNA, 19 nt, Human
ccaaaacugggaaaacugc

SEQ ID NO: 1037206 - RNA, 20 nt, Human
ccaaagugcugggauuacag

SEQ ID NO: 1037207 - RNA, 22 nt, Human
ccaaagugcugggauuacaggc

SEQ ID NO: 1037208 - RNA, 22 nt, Human
ccaaagugcugggauuacaggc

SEQ ID NO: 1037209 - RNA, 24 nt, Human
ccaaagugcugggauuacaggcgu

SEQ ID NO: 1037210 - RNA, 20 nt, Human
ccauguugaccaggcugggu

SEQ ID NO: 1037211 - RNA, 23 nt, Human
cccgaguuuaagcgauucuccug

SEQ ID NO: 1037212 - RNA, 18 nt, Human
cccugucgcccagguugg

SEQ ID NO: 1037213 - RNA, 19 nt, Human
ccgcacccagcuaggaggu

SEQ ID NO: 1037214 - RNA, 24 nt, Human
ccgccucagccucccaaagugcug

SEQ ID NO: 1037215 - RNA, 24 nt, Human
ccucccgaguuuaagcgauucucc

SEQ ID NO: 1037216 - RNA, 19 nt, Human
ccugaguagcugggauuac

SEQ ID NO: 1037217 - RNA, 23 nt, Human
ccugccucagccuccugaguagc

SEQ ID NO: 1037218 - RNA, 24 nt, Human
ccugccucagccuccugaguagcu

SEQ ID NO: 1037219 - RNA, 24 nt, Human
ccugucgcccagguuggagugcaa

SEQ ID NO: 1037220 - RNA, 24 nt, Human
cgcccugucgcccagguuggagug

SEQ ID NO: 1037221 - RNA, 24 nt, Human
cucacugcaaccucuaccucccga

SEQ ID NO: 1037222 - RNA, 23 nt, Human
cucagccuccugaguagcuggga

SEQ ID NO: 1037223 - RNA, 20 nt, Human
cugcaaccucuaccucccga

SEQ ID NO: 1037224 - RNA, 24 nt, Human
cugcaaccucuaccucccgaguuu

SEQ ID NO: 1037225 - RNA, 31 nt, Human
cuggguuggccaggcuggucucgaacuccuu

SEQ ID NO: 1037226 - RNA, 21 nt, Human
cuugugaucugcccgccucag

SEQ ID NO: 1037227 - RNA, 28 nt, Human
gaccaggcuggguuggccaggcuggucu

SEQ ID NO: 1037228 - RNA, 19 nt, Human
gaccuuggcucacugcaac

SEQ ID NO: 1037229 - RNA, 24 nt, Human
gaguagcugggauuacaagcgcac

SEQ ID NO: 1037230 - RNA, 24 nt, Human
gaucuugugaucugcccgccucag

SEQ ID NO: 1037231 - RNA, 18 nt, Human
gauuacaggcgugagcca

SEQ ID NO: 1037232 - RNA, 22 nt, Human
gauuacaggcgugagccaccgc

SEQ ID NO: 1037233 - RNA, 23 nt, Human
gauuacaggcgugagccaccgca

SEQ ID NO: 1037234 - RNA, 21 nt, Human
gcaaccucuaccucccgaguu

SEQ ID NO: 1037235 - RNA, 23 nt, Human
gccucagccucccaaagugcugg

SEQ ID NO: 1037236 - RNA, 23 nt, Human
gcgauucuccugccucagccucc

SEQ ID NO: 1037237 - RNA, 21 nt, Human
gcucacugcaaccucuaccuc

SEQ ID NO: 1037238 - RNA, 22 nt, Human
gcucuuuuucucugaagacaga

SEQ ID NO: 1037239 - RNA, 23 nt, Human
ggcuggucucgaacuccugaucu

SEQ ID NO: 1037240 - RNA, 24 nt, Human
ggugauagaaaagaaauccagaga

SEQ ID NO: 1037241 - RNA, 18 nt, Human
guagcugggauuacaagc

SEQ ID NO: 1037242 - RNA, 24 nt, Human
gugaucugcccgccucagccuccc

SEQ ID NO: 1037243 - RNA, 19 nt, Human
guuggccaggcuggucucg

SEQ ID NO: 1037244 - RNA, 18 nt, Human
uaagcgauucuccugccu

SEQ ID NO: 1037245 - RNA, 22 nt, Human
uaauuguuuguaucuuuaguag

SEQ ID NO: 1037246 - RNA, 24 nt, Human
uacaggcgugagccaccgcaccca

SEQ ID NO: 1037247 - RNA, 22 nt, Human
uagggacaggguuucaccaugu

SEQ ID NO: 1037248 - RNA, 24 nt, Human
uaguagggacaggguuucaccaug

SEQ ID NO: 1037249 - RNA, 21 nt, Human
ucacguucacagaacagcuau

SEQ ID NO: 1037250 - RNA, 18 nt, Human
ucacugcaaccucuaccu

SEQ ID NO: 1037251 - RNA, 22 nt, Human
ucacugcaaccucuaccucccg

SEQ ID NO: 1037252 - RNA, 24 nt, Human
ucacugcaaccucuaccucccgag

SEQ ID NO: 1037253 - RNA, 20 nt, Human
ucagccuccugaguagcugg

SEQ ID NO: 1037254 - RNA, 24 nt, Human
ucccaaagugcugggauuacaggc

SEQ ID NO: 1037255 - RNA, 26 nt, Human
ucccagcucuuuuucucuggggccgc

SEQ ID NO: 1037256 - RNA, 21 nt, Human
ucccgaguuuaagcgauucuc

SEQ ID NO: 1037257 - RNA, 24 nt, Human
ucccgaguuuaagcgauucuccug

SEQ ID NO: 1037258 - RNA, 18 nt, Human
uccugaguagcugggauu

SEQ ID NO: 1037259 - RNA, 18 nt, Human
ucgcccagguuggagugc

SEQ ID NO: 1037260 - RNA, 24 nt, Human
ucuccugccucagccuccugagua

SEQ ID NO: 1037261 - RNA, 19 nt, Human
ucucgaacuccugaucuug

SEQ ID NO: 1037262 - RNA, 23 nt, Human
ucucgcccugucgcccagguugg

SEQ ID NO: 1037263 - RNA, 24 nt, Human
ucucgcccugucgcccagguugga

SEQ ID NO: 1037264 - RNA, 21 nt, Human
ucugcccgccucagccuccca

SEQ ID NO: 1037265 - RNA, 18 nt, Human
ucuuggugucccagcucu

SEQ ID NO: 1037266 - RNA, 24 nt, Human
ucuuuaguagggacaggguuucac

SEQ ID NO: 1037267 - RNA, 22 nt, Human
ugagacggagucucgcccuguc

SEQ ID NO: 1037268 - RNA, 20 nt, Human
ugcaauggugugaccuuggc

SEQ ID NO: 1037269 - RNA, 24 nt, Human
ugccucagccuccugaguagcugg

SEQ ID NO: 1037270 - RNA, 19 nt, Human
ugccuggccaaaacuggga

SEQ ID NO: 1037271 - RNA, 21 nt, Human
ugccuggccaaaacugggaaa

SEQ ID NO: 1037272 - RNA, 24 nt, Human
ugcugggauuacaggcgugagcca

SEQ ID NO: 1037273 - RNA, 22 nt, Human
uggaaccagagaugagaguacu

SEQ ID NO: 1037274 - RNA, 19 nt, Human
uggaauggaaccagagaug

SEQ ID NO: 1037275 - RNA, 23 nt, Human
uggagugcaauggugugaccuug

SEQ ID NO: 1037276 - RNA, 24 nt, Human
uggagugcaauggugugaccuugg

SEQ ID NO: 1037277 - RNA, 19 nt, Human
ugggauuacaagcgcaccc

SEQ ID NO: 1037278 - RNA, 24 nt, Human
ugggauuacaagcgcaccccacca

SEQ ID NO: 1037279 - RNA, 18 nt, Human
ugggauuacaggcgugag

SEQ ID NO: 1037280 - RNA, 19 nt, Human
ugggauuacaggcgugagc

SEQ ID NO: 1037281 - RNA, 21 nt, Human
ugggauuacaggcgugagcca

SEQ ID NO: 1037282 - RNA, 22 nt, Human
ugggauuacaggcgugagccac

SEQ ID NO: 1037283 - RNA, 23 nt, Human
ugggauuacaggcgugagccacc

SEQ ID NO: 1037284 - RNA, 24 nt, Human
ugggauuacaggcgugagccaccg

SEQ ID NO: 1037285 - RNA, 21 nt, Human
ugucccagcucuuuuucucug

SEQ ID NO: 1037286 - RNA, 23 nt, Human
uuaaagcaagacuuagcugaacu

SEQ ID NO: 1037287 - RNA, 24 nt, Human
uuaguagggacaggguuucaccau

SEQ ID NO: 1037288 - RNA, 21 nt, Human
uucacagaacagcuauuucuc

SEQ ID NO: 1037289 - RNA, 24 nt, Human
uuguuuguaucuuuaguagggaca

SEQ ID NO: 1037290 - RNA, 23 nt, Human
uuuaagcgauucuccugccucag

SEQ ID NO: 1037291 - RNA, 24 nt, Human
uuuaagcgauucuccugccucagc

SEQ ID NO: 1037292 - RNA, 21 nt, Human
uuucaccauguugaccaggcu

SEQ ID NO: 1037293 - RNA, 25 nt, Human
uuuuuuuuuuuugagacggagucuc

SEQ ID NO: 1037294 - RNA, 22 nt, Human
uuuuuuuuuuuuuugagacgga

SEQ ID NO: 1037295 - RNA, 18 nt, Human
acaucaucaucugcugcu

SEQ ID NO: 1037296 - RNA, 20 nt, Human
accauauucccaagcacaca

SEQ ID NO: 1037297 - RNA, 18 nt, Human
agacauuuuacaucauca

SEQ ID NO: 1037298 - RNA, 21 nt, Human
aguuuuguugcuuguucccau

SEQ ID NO: 1037299 - RNA, 24 nt, Human
cagcagugccaucacucuuucuga

SEQ ID NO: 1037300 - RNA, 18 nt, Human
cagcuuuggaagccccag

SEQ ID NO: 1037301 - RNA, 24 nt, Human
cauuuugcauguguaucuucccaa

SEQ ID NO: 1037302 - RNA, 21 nt, Human
cccagcuuuggaagccccagc

SEQ ID NO: 1037303 - RNA, 19 nt, Human
ccucagcagugccaucacu

SEQ ID NO: 1037304 - RNA, 22 nt, Human
cuucccaagccucaguguuucc

SEQ ID NO: 1037305 - RNA, 24 nt, Human
gccaucacucuuucugaagugcug

SEQ ID NO: 1037306 - RNA, 18 nt, Human
uaaaaaauaggauuccca

SEQ ID NO: 1037307 - RNA, 21 nt, Human
uaauaaaaaauaggauuccca

SEQ ID NO: 1037308 - RNA, 20 nt, Human
uacaucaucaucugcugcuu

SEQ ID NO: 1037309 - RNA, 20 nt, Human
uaccugaugccuuguaagac

SEQ ID NO: 1037310 - RNA, 18 nt, Human
uaggauucccagcuuugg

SEQ ID NO: 1037311 - RNA, 23 nt, Human
ucagcagugccaucacucuuucu

SEQ ID NO: 1037312 - RNA, 27 nt, Human
ucuccuugccaucguuacuucaaccaa

SEQ ID NO: 1037313 - RNA, 26 nt, Human
ucucuccuugccaucguuacuucaac

SEQ ID NO: 1037314 - RNA, 23 nt, Human
ugcagugggaugcucagugcgcc

SEQ ID NO: 1037315 - RNA, 21 nt, Human
ugccaucacucuuucugaagu

SEQ ID NO: 1037316 - RNA, 23 nt, Human
uggccaucuuccacuugggcuuu

SEQ ID NO: 1037317 - RNA, 19 nt, Human
uguguaucuucccaagccu

SEQ ID NO: 1037318 - RNA, 18 nt, Human
uguuucaaugcuagcuug

SEQ ID NO: 1037319 - RNA, 26 nt, Human
uucccaagccucaguguuuccugcag

SEQ ID NO: 1037320 - RNA, 18 nt, Human
uugcauguguaucuuccc

SEQ ID NO: 1037321 - RNA, 24 nt, Human
uugcauguguaucuucccaagccu

SEQ ID NO: 1037322 - RNA, 22 nt, Human
uuuacaucaucaucugcugcuu

SEQ ID NO: 1037323 - RNA, 25 nt, Human
aaaauacacaccaccacgagugcaa

SEQ ID NO: 1037324 - RNA, 22 nt, Human
aaauacacaccaccacgagugc

SEQ ID NO: 1037325 - RNA, 23 nt, Human
aaauacacaccaccacgagugca

SEQ ID NO: 1037326 - RNA, 18 nt, Human
aaggucccaaaauacaca

SEQ ID NO: 1037327 - RNA, 22 nt, Human
accaccacgagugcaaaaaccg

SEQ ID NO: 1037328 - RNA, 28 nt, Human
accacgagugcaaaaaccgaggcugguc

SEQ ID NO: 1037329 - RNA, 20 nt, Human
agcugcacaguaaagguccc

SEQ ID NO: 1037330 - RNA, 20 nt, Human
cacaccaccacgagugcaaa

SEQ ID NO: 1037331 - RNA, 19 nt, Human
cacaguaaaggucccaaaa

SEQ ID NO: 1037332 - RNA, 20 nt, Human
caccaccacgagugcaaaaa

SEQ ID NO: 1037333 - RNA, 19 nt, Human
cacgagugcaaaaaccgag

SEQ ID NO: 1037334 - RNA, 27 nt, Human
ccaaaauacacaccaccacgagugcaa

SEQ ID NO: 1037335 - RNA, 22 nt, Human
ucucccaacgugauguuuuuuu

SEQ ID NO: 1037336 - RNA, 18 nt, Human
ugccaagcacggggcucc

SEQ ID NO: 1037337 - RNA, 18 nt, Human
ugccaagcacggggcucc

SEQ ID NO: 1037338 - RNA, 21 nt, Human
uugaauguucacaagugucuc

SEQ ID NO: 1037339 - RNA, 19 nt, Human
aagagccaauaaagagagg

SEQ ID NO: 1037340 - RNA, 23 nt, Human
agagccaauaaagagaggcggga

SEQ ID NO: 1037341 - RNA, 21 nt, Human
cacacacagcgcacacagggu

SEQ ID NO: 1037342 - RNA, 19 nt, Human
cacacaggguuuacagcag

SEQ ID NO: 1037343 - RNA, 23 nt, Human
cacacaggguuuacagcaggucc

SEQ ID NO: 1037344 - RNA, 18 nt, Human
cacagcgcacacaggguu

SEQ ID NO: 1037345 - RNA, 21 nt, Human
cacaggguuuacagcaggucc

SEQ ID NO: 1037346 - RNA, 24 nt, Human
ccccgccgccgccaucuucucccc

SEQ ID NO: 1037347 - RNA, 18 nt, Human
ccuacaaagcggacacug

SEQ ID NO: 1037348 - RNA, 20 nt, Human
cucccccgccgccgccaucu

SEQ ID NO: 1037349 - RNA, 23 nt, Human
cucccccgccgccgccaucuucu

SEQ ID NO: 1037350 - RNA, 24 nt, Human
cucuaaagagccaauaaagagagg

SEQ ID NO: 1037351 - RNA, 21 nt, Human
cugggcucacacacagcgcac

SEQ ID NO: 1037352 - RNA, 24 nt, Human
gacucggcgcuccuccggcugcuc

SEQ ID NO: 1037353 - RNA, 18 nt, Human
gcgggaagugagugugag

SEQ ID NO: 1037354 - RNA, 18 nt, Human
ggaagugagugugaggug

SEQ ID NO: 1037355 - RNA, 23 nt, Human
gugguguccuacaaagcggacac

SEQ ID NO: 1037356 - RNA, 22 nt, Human
ucacacacagcgcacacagggu

SEQ ID NO: 1037357 - RNA, 23 nt, Human
ucccccgccgccgccaucuucuc

SEQ ID NO: 1037358 - RNA, 22 nt, Human
uccuccggcugcucacgcugcc

SEQ ID NO: 1037359 - RNA, 20 nt, Human
ugaucaccuugacugucugg

SEQ ID NO: 1037360 - RNA, 23 nt, Human
agcaaguauacagaaaucuuccc

SEQ ID NO: 1037361 - RNA, 20 nt, Human
agcuggcuuugaaacuuccu

SEQ ID NO: 1037362 - RNA, 22 nt, Human
augaagcccgcgggaaacggcu

SEQ ID NO: 1037363 - RNA, 23 nt, Human
caacggccacaaccacgucaagc

SEQ ID NO: 1037364 - RNA, 19 nt, Human
caugcaccccaaacugauc

SEQ ID NO: 1037365 - RNA, 23 nt, Human
ccaacggccacaaccacgucaag

SEQ ID NO: 1037366 - RNA, 18 nt, Human
cccaacggccacaaccac

SEQ ID NO: 1037367 - RNA, 24 nt, Human
ccggcgccgccaucgggguccucg

SEQ ID NO: 1037368 - RNA, 19 nt, Human
ccuguuggacugguccgcg

SEQ ID NO: 1037369 - RNA, 18 nt, Human
cgcccgggaaaccggcag

SEQ ID NO: 1037370 - RNA, 28 nt, Human
cgcgggaaacggcuucccuucucccuua

SEQ ID NO: 1037371 - RNA, 21 nt, Human
cgcugcaaaaucauacaugca

SEQ ID NO: 1037372 - RNA, 18 nt, Human
cuauacacauuccuccuc

SEQ ID NO: 1037373 - RNA, 22 nt, Human
cuccuucccgccacccggcgcc

SEQ ID NO: 1037374 - RNA, 23 nt, Human
cugaccaccuggauccgggcucg

SEQ ID NO: 1037375 - RNA, 21 nt, Human
cugguccgcgacucgggcugu

SEQ ID NO: 1037376 - RNA, 25 nt, Human
gaaacuuccuccuucccgccacccg

SEQ ID NO: 1037377 - RNA, 19 nt, Human
gcgggaaacggcuucccuu

SEQ ID NO: 1037378 - RNA, 18 nt, Human
gggccggguucucgccgu

SEQ ID NO: 1037379 - RNA, 18 nt, Human
ucaucuaaaugaguaacu

SEQ ID NO: 1037380 - RNA, 25 nt, Human
ucggcgggggcgcaacgucuuuucc

SEQ ID NO: 1037381 - RNA, 19 nt, Human
ucuccagcaaguauacaga

SEQ ID NO: 1037382 - RNA, 22 nt, Human
ugcaaaaucauacaugcacccc

SEQ ID NO: 1037383 - RNA, 25 nt, Human
uugaaacuuccuccuucccgccacc

SEQ ID NO: 1037384 - RNA, 22 nt, Human
uugguuuuaauaaaaguuuugg

SEQ ID NO: 1037385 - RNA, 21 nt, Human
uuugaaacuuccuccuucccg

SEQ ID NO: 1037386 - RNA, 26 nt, Human
uuugaaacuuccuccuucccgccacc

SEQ ID NO: 1037387 - RNA, 20 nt, Human
aaaaaagaaaacaguaauua

SEQ ID NO: 1037388 - RNA, 24 nt, Human
aaaaaguuaaaacauacuaaauau

SEQ ID NO: 1037389 - RNA, 18 nt, Human
aauacaguacauauauau

SEQ ID NO: 1037390 - RNA, 18 nt, Human
aauggagagacaacugaa

SEQ ID NO: 1037391 - RNA, 23 nt, Human
agcuuuacacauccaaaauacag

SEQ ID NO: 1037392 - RNA, 22 nt, Human
agguaacuuuaaaaugacuuga

SEQ ID NO: 1037393 - RNA, 23 nt, Human
agguaagugucgaaaaggucagg

SEQ ID NO: 1037394 - RNA, 20 nt, Human
caaaauacaguacauauaua

SEQ ID NO: 1037395 - RNA, 18 nt, Human
ccgcgccacaaccccugc

SEQ ID NO: 1037396 - RNA, 22 nt, Human
ccucuauucgaauaaaggugag

SEQ ID NO: 1037397 - RNA, 21 nt, Human
cgcgccacaaccccugcccgc

SEQ ID NO: 1037398 - RNA, 21 nt, Human
cgcuggcccgccgcuugccgc

SEQ ID NO: 1037399 - RNA, 23 nt, Human
cuagguaagugucgaaaagguca

SEQ ID NO: 1037400 - RNA, 19 nt, Human
cucaaaaaguuaauaaaaa

SEQ ID NO: 1037401 - RNA, 22 nt, Human
gaagacauuuauuccucuauuc

SEQ ID NO: 1037402 - RNA, 19 nt, Human
gaugaugccuaagaauacu

SEQ ID NO: 1037403 - RNA, 22 nt, Human
gcuggcccgccgcuugccgcgc

SEQ ID NO: 1037404 - RNA, 21 nt, Human
guaugauaaauaaaccuccac

SEQ ID NO: 1037405 - RNA, 24 nt, Human
uaacuguacuuacuuucagaaaga

SEQ ID NO: 1037406 - RNA, 21 nt, Human
uaauguuucaaagccuguaug

SEQ ID NO: 1037407 - RNA, 24 nt, Human
uacaacucuguagaaugguggggg

SEQ ID NO: 1037408 - RNA, 22 nt, Human
uacacugacaaaaaagaaaaca

SEQ ID NO: 1037409 - RNA, 18 nt, Human
uacuagauuaccauccca

SEQ ID NO: 1037410 - RNA, 19 nt, Human
ucccauggcauauagucac

SEQ ID NO: 1037411 - RNA, 21 nt, Human
ucgaaaaggucaggaguucaa

SEQ ID NO: 1037412 - RNA, 19 nt, Human
ugaaaguguauauguagug

SEQ ID NO: 1037413 - RNA, 24 nt, Human
ugaaauacuacaaacuacuauaau

SEQ ID NO: 1037414 - RNA, 24 nt, Human
ugacaaaaaagaaaacaguaauua

SEQ ID NO: 1037415 - RNA, 22 nt, Human
ugacauacauacauguauuuau

SEQ ID NO: 1037416 - RNA, 19 nt, Human
ugauaaauaaaccuccacu

SEQ ID NO: 1037417 - RNA, 22 nt, Human
ugcaugguaauauuguggagaa

SEQ ID NO: 1037418 - RNA, 21 nt, Human
uggaagggcaugauugugaua

SEQ ID NO: 1037419 - RNA, 20 nt, Human
ugggaguguaaauguauagu

SEQ ID NO: 1037420 - RNA, 30 nt, Human
uguaguguuuugacauacauacauguagug

SEQ ID NO: 1037421 - RNA, 19 nt, Human
uguucugcaguuuguaagg

SEQ ID NO: 1037422 - RNA, 24 nt, Human
uugcaugguaauauuguggagaau

SEQ ID NO: 1037423 - RNA, 18 nt, Human
uuuguaaggaaauuuguu

SEQ ID NO: 1037424 - RNA, 21 nt, Human
uuuuaaauuucagagauaacu

SEQ ID NO: 1037425 - RNA, 23 nt, Human
aaaagauagucauggaagccaaa

SEQ ID NO: 1037426 - RNA, 23 nt, Human
aaacaaauaaagcaucaccaagg

SEQ ID NO: 1037427 - RNA, 18 nt, Human
aaacacaccacacuccaa

SEQ ID NO: 1037428 - RNA, 21 nt, Human
aaacacaccacacuccaauau

SEQ ID NO: 1037429 - RNA, 22 nt, Human
aaacugggcagauagaaaaaaa

SEQ ID NO: 1037430 - RNA, 24 nt, Human
aaagaacaugugcaaaaccaccaa

SEQ ID NO: 1037431 - RNA, 21 nt, Human
aacagguaacugucuuaaaaa

SEQ ID NO: 1037432 - RNA, 23 nt, Human
aacagguaacugucuuaaaaaug

SEQ ID NO: 1037433 - RNA, 18 nt, Human
aagaaacucuaagggcua

SEQ ID NO: 1037434 - RNA, 21 nt, Human
aagaucacaaaagaggacaug

SEQ ID NO: 1037435 - RNA, 21 nt, Human
aagcaaaacaauuuugugacc

SEQ ID NO: 1037436 - RNA, 21 nt, Human
aaguaauauguaaagaacuua

SEQ ID NO: 1037437 - RNA, 21 nt, Human
aaugugauguuacauguaacu

SEQ ID NO: 1037438 - RNA, 23 nt, Human
acaaauguuguaaaauacuaaau

SEQ ID NO: 1037439 - RNA, 21 nt, Human
acaggcaucacagcaugcacu

SEQ ID NO: 1037440 - RNA, 21 nt, Human
accaacguuuucuaagacauu

SEQ ID NO: 1037441 - RNA, 25 nt, Human
acucuauggaacuuuuuuuccuuuu

SEQ ID NO: 1037442 - RNA, 21 nt, Human
acugagcgggaugaaggaguc

SEQ ID NO: 1037443 - RNA, 22 nt, Human
acugguuuuguaaacuccacaa

SEQ ID NO: 1037444 - RNA, 20 nt, Human
acuuccauacauuccaauau

SEQ ID NO: 1037445 - RNA, 24 nt, Human
acuucugguuuucugcuuauugcu

SEQ ID NO: 1037446 - RNA, 18 nt, Human
agaaucauggccaaaggc

SEQ ID NO: 1037447 - RNA, 19 nt, Human
agacauaguaagcuuuaaa

SEQ ID NO: 1037448 - RNA, 20 nt, Human
agagaaucuucccucuuucc

SEQ ID NO: 1037449 - RNA, 22 nt, Human
agcaaaaccucaaagaucugau

SEQ ID NO: 1037450 - RNA, 24 nt, Human
agcacaggagggacagcacagaca

SEQ ID NO: 1037451 - RNA, 22 nt, Human
aggcacaugagaaaacagucau

SEQ ID NO: 1037452 - RNA, 23 nt, Human
agggugaagaagauauggcacaa

SEQ ID NO: 1037453 - RNA, 19 nt, Human
agguaucauucacucagug

SEQ ID NO: 1037454 - RNA, 21 nt, Human
auaaagcaucaccaagcacca

SEQ ID NO: 1037455 - RNA, 21 nt, Human
auuuuuuaaaagcucccccca

SEQ ID NO: 1037456 - RNA, 22 nt, Human
caaaaccaccaacaaugucagc

SEQ ID NO: 1037457 - RNA, 24 nt, Human
caaaccucaccaggcuuaagcauc

SEQ ID NO: 1037458 - RNA, 20 nt, Human
caaagccaagcucgccuccu

SEQ ID NO: 1037459 - RNA, 22 nt, Human
caaagccaagcucgccuccucc

SEQ ID NO: 1037460 - RNA, 23 nt, Human
caacaaugucagcaaaaccucaa

SEQ ID NO: 1037461 - RNA, 22 nt, Human
caacagguaacugucuuaaaaa

SEQ ID NO: 1037462 - RNA, 19 nt, Human
caagcucgccuccucauca

SEQ ID NO: 1037463 - RNA, 18 nt, Human
caauaucugcaacuuugg

SEQ ID NO: 1037464 - RNA, 21 nt, Human
cacaaaaugcauuacaacaug

SEQ ID NO: 1037465 - RNA, 18 nt, Human
cacaggagggacagcaca

SEQ ID NO: 1037466 - RNA, 18 nt, Human
cacugagcgggaugaagg

SEQ ID NO: 1037467 - RNA, 19 nt, Human
cagguaucauucacucagu

SEQ ID NO: 1037468 - RNA, 18 nt, Human
caguguucacuuugggac

SEQ ID NO: 1037469 - RNA, 19 nt, Human
cauauaucaacugacuguc

SEQ ID NO: 1037470 - RNA, 19 nt, Human
cauuuccuucugaaggauc

SEQ ID NO: 1037471 - RNA, 22 nt, Human
ccaacaaugucagcaaaaccuc

SEQ ID NO: 1037472 - RNA, 22 nt, Human
ccagcacaggagggacagcaca

SEQ ID NO: 1037473 - RNA, 22 nt, Human
ccuguacagcugcacacagacg

SEQ ID NO: 1037474 - RNA, 22 nt, Human
cgacccagcacaggagggacag

SEQ ID NO: 1037475 - RNA, 21 nt, Human
cuacacauccgcgacccagca

SEQ ID NO: 1037476 - RNA, 22 nt, Human
cuacacauccgcgacccagcac

SEQ ID NO: 1037477 - RNA, 18 nt, Human
cucagguucccagcacuc

SEQ ID NO: 1037478 - RNA, 19 nt, Human
cuccaauauucugaaggcu

SEQ ID NO: 1037479 - RNA, 21 nt, Human
cuuauagaaagacauugugcu

SEQ ID NO: 1037480 - RNA, 23 nt, Human
cuuaugauuuugaccacuccauc

SEQ ID NO: 1037481 - RNA, 18 nt, Human
cuucccucuuuccucucc

SEQ ID NO: 1037482 - RNA, 19 nt, Human
cuugcuguacauuuucugu

SEQ ID NO: 1037483 - RNA, 21 nt, Human
cuuucuggaagaucacaaaag

SEQ ID NO: 1037484 - RNA, 18 nt, Human
gaacuaaaaagcaucaga

SEQ ID NO: 1037485 - RNA, 19 nt, Human
gaaggaucagugaacuucc

SEQ ID NO: 1037486 - RNA, 19 nt, Human
gagaaucauggccaaaggc

SEQ ID NO: 1037487 - RNA, 20 nt, Human
gagcaaacacaccacacucc

SEQ ID NO: 1037488 - RNA, 19 nt, Human
gcauccucuagcaaacagu

SEQ ID NO: 1037489 - RNA, 22 nt, Human
gccaagcucgccuccucaucac

SEQ ID NO: 1037490 - RNA, 26 nt, Human
ggacagccucagggaggagggaacgc

SEQ ID NO: 1037491 - RNA, 24 nt, Human
gggcacucugguggucagggcugg

SEQ ID NO: 1037492 - RNA, 24 nt, Human
gugcaaaaccaccaacaaugucag

SEQ ID NO: 1037493 - RNA, 28 nt, Human
uaaaagaagagagaaucuucccucuuuc

SEQ ID NO: 1037494 - RNA, 18 nt, Human
uaacaagacacccccagg

SEQ ID NO: 1037495 - RNA, 21 nt, Human
uaagcagaaacuagcauugcc

SEQ ID NO: 1037496 - RNA, 19 nt, Human
uacaguaauuaaauauguu

SEQ ID NO: 1037497 - RNA, 22 nt, Human
uagaaagaacaugugcaaaacc

SEQ ID NO: 1037498 - RNA, 25 nt, Human
uauagacauacacaaucccauguag

SEQ ID NO: 1037499 - RNA, 23 nt, Human
uauauauguauaauauauacaca

SEQ ID NO: 1037500 - RNA, 19 nt, Human
uauaucaacugacugucug

SEQ ID NO: 1037501 - RNA, 21 nt, Human
uauguaaagaacuuaugacuu

SEQ ID NO: 1037502 - RNA, 25 nt, Human
uaugugcuucugucacauacguagu

SEQ ID NO: 1037503 - RNA, 20 nt, Human
ucacucagugacauauucuc

SEQ ID NO: 1037504 - RNA, 23 nt, Human
ucagcaaaaccucaaagaucuga

SEQ ID NO: 1037505 - RNA, 18 nt, Human
ucagggaggaagcaaugg

SEQ ID NO: 1037506 - RNA, 24 nt, Human
uccacuguacccuacaucuauuuc

SEQ ID NO: 1037507 - RNA, 18 nt, Human
ucccucuuuccucuccca

SEQ ID NO: 1037508 - RNA, 18 nt, Human
uccucagguucccagcac

SEQ ID NO: 1037509 - RNA, 21 nt, Human
uccuggagcuuucuggaagau

SEQ ID NO: 1037510 - RNA, 19 nt, Human
ucgcauccucuagcaaaca

SEQ ID NO: 1037511 - RNA, 19 nt, Human
ucuaacaucuuucacguga

SEQ ID NO: 1037512 - RNA, 19 nt, Human
ucucauacacuacgucuuc

SEQ ID NO: 1037513 - RNA, 22 nt, Human
ucugguuuucugcuuauugcuu

SEQ ID NO: 1037514 - RNA, 23 nt, Human
ucuucccucuuuccucucccaaa

SEQ ID NO: 1037515 - RNA, 20 nt, Human
ugaaggcuuugcaaucagua

SEQ ID NO: 1037516 - RNA, 22 nt, Human
ugagcaaacacaccacacucca

SEQ ID NO: 1037517 - RNA, 26 nt, Human
ugagcaaacacaccacacuccaauau

SEQ ID NO: 1037518 - RNA, 20 nt, Human
ugagcgggaugaaggaguca

SEQ ID NO: 1037519 - RNA, 24 nt, Human
ugagcgggaugaaggagucacagg

SEQ ID NO: 1037520 - RNA, 23 nt, Human
ugcaaacaguggaucaaaaagca

SEQ ID NO: 1037521 - RNA, 22 nt, Human
ugcuaugaaguucucuccugaa

SEQ ID NO: 1037522 - RNA, 23 nt, Human
ugcuaugaaguucucuccugaag

SEQ ID NO: 1037523 - RNA, 19 nt, Human
ugcuuauguuccacuguac

SEQ ID NO: 1037524 - RNA, 19 nt, Human
uggaagccaaaaugaagac

SEQ ID NO: 1037525 - RNA, 22 nt, Human
uggaagccaaaaugaagacaua

SEQ ID NO: 1037526 - RNA, 23 nt, Human
uggaagccaaaaugaagacauag

SEQ ID NO: 1037527 - RNA, 24 nt, Human
ugguggucagggcugggcucuggg

SEQ ID NO: 1037528 - RNA, 24 nt, Human
uguuccacuguacccuacaucuau

SEQ ID NO: 1037529 - RNA, 19 nt, Human
uguuccagcucaccauuug

SEQ ID NO: 1037530 - RNA, 22 nt, Human
uguugagaaucauggccaaagg

SEQ ID NO: 1037531 - RNA, 26 nt, Human
uuagcaugauucaucuuugaaaaccc

SEQ ID NO: 1037532 - RNA, 19 nt, Human
uucaaaauuaacaagacac

SEQ ID NO: 1037533 - RNA, 18 nt, Human
uuccaaaguuuuaacaga

SEQ ID NO: 1037534 - RNA, 21 nt, Human
uuguuccaaggcuuuuguuuc

SEQ ID NO: 1037535 - RNA, 18 nt, Human
uuuaaaagcuccccccaa

SEQ ID NO: 1037536 - RNA, 24 nt, Human
uuuguaaacuccacaaaaugcauu

SEQ ID NO: 1037537 - RNA, 18 nt, Human
uuuuccaaaguuuuaaca

SEQ ID NO: 1037538 - RNA, 21 nt, Human
aaaaaaauaaugcuacauugg

SEQ ID NO: 1037539 - RNA, 19 nt, Human
aaaagaaaggaaauuacac

SEQ ID NO: 1037540 - RNA, 23 nt, Human
aaaagaaaggaaauuacacaaaa

SEQ ID NO: 1037541 - RNA, 27 nt, Human
aaaagaaaggaaauuacacaaaaaugu

SEQ ID NO: 1037542 - RNA, 20 nt, Human
aaaccaucagugucaucuau

SEQ ID NO: 1037543 - RNA, 21 nt, Human
aaauacacuagagucucccac

SEQ ID NO: 1037544 - RNA, 27 nt, Human
aagcacuugguacuauaaaucaaaacg

SEQ ID NO: 1037545 - RNA, 21 nt, Human
aaggaaaaaagggcuggacaa

SEQ ID NO: 1037546 - RNA, 23 nt, Human
aaggaagcaauaauuagaucaag

SEQ ID NO: 1037547 - RNA, 25 nt, Human
aaugcaaaaaggaaagucacucgaa

SEQ ID NO: 1037548 - RNA, 23 nt, Human
acacuagagucucccacaaauca

SEQ ID NO: 1037549 - RNA, 21 nt, Human
agaaaggaaauuacacaaaaa

SEQ ID NO: 1037550 - RNA, 19 nt, Human
agacagggaagaggagggu

SEQ ID NO: 1037551 - RNA, 21 nt, Human
agagucucccacaaaucaccu

SEQ ID NO: 1037552 - RNA, 21 nt, Human
agccggaacaaucucacagaa

SEQ ID NO: 1037553 - RNA, 20 nt, Human
auaaaacuuguaaagcaugu

SEQ ID NO: 1037554 - RNA, 19 nt, Human
caaacuaaaacauagccaa

SEQ ID NO: 1037555 - RNA, 24 nt, Human
caaaggaaaaaagggcuggacaac

SEQ ID NO: 1037556 - RNA, 21 nt, Human
caaauaauuuacuaauauuuc

SEQ ID NO: 1037557 - RNA, 18 nt, Human
caaguccaaaauucuugg

SEQ ID NO: 1037558 - RNA, 20 nt, Human
cacacaaacuaaaacauagc

SEQ ID NO: 1037559 - RNA, 19 nt, Human
cagcggcggcggcgaagac

SEQ ID NO: 1037560 - RNA, 25 nt, Human
cagcggcggcggcgaagacagggaa

SEQ ID NO: 1037561 - RNA, 19 nt, Human
ccaugccgcugccgucucc

SEQ ID NO: 1037562 - RNA, 22 nt, Human
cccacaaaucaccuuccccaaa

SEQ ID NO: 1037563 - RNA, 19 nt, Human
ccccaaagaaaagcuucug

SEQ ID NO: 1037564 - RNA, 19 nt, Human
ccccagagucuccgcggac

SEQ ID NO: 1037565 - RNA, 19 nt, Human
ccggccgccaugccgcugc

SEQ ID NO: 1037566 - RNA, 21 nt, Human
cggcgaagacagggaagagga

SEQ ID NO: 1037567 - RNA, 21 nt, Human
cuaaaacauagccaaaaaucc

SEQ ID NO: 1037568 - RNA, 24 nt, Human
cuaaagcaaauuauggggcagauc

SEQ ID NO: 1037569 - RNA, 19 nt, Human
cucuaugauguugcucuuc

SEQ ID NO: 1037570 - RNA, 21 nt, Human
cugaaaagaacaaauacaacg

SEQ ID NO: 1037571 - RNA, 23 nt, Human
gaaggaaggagggccggcggagc

SEQ ID NO: 1037572 - RNA, 24 nt, Human
gaaggaaggagggccggcggagcg

SEQ ID NO: 1037573 - RNA, 23 nt, Human
gauuaaaaugcuaauuuaaaaua

SEQ ID NO: 1037574 - RNA, 22 nt, Human
ggaaaguaauaagaaaggaagc

SEQ ID NO: 1037575 - RNA, 21 nt, Human
ggcgaagacagggaagaggag

SEQ ID NO: 1037576 - RNA, 19 nt, Human
ggcuggugggugggguggg

SEQ ID NO: 1037577 - RNA, 19 nt, Human
gggaagaggagggucgggc

SEQ ID NO: 1037578 - RNA, 20 nt, Human
ggggcuucauuuagaaaaaa

SEQ ID NO: 1037579 - RNA, 18 nt, Human
uaaaaaagaaauguggca

SEQ ID NO: 1037580 - RNA, 20 nt, Human
uaaaaacacuccucucuucc

SEQ ID NO: 1037581 - RNA, 19 nt, Human
uaaaacauagccaaaaauc

SEQ ID NO: 1037582 - RNA, 18 nt, Human
uaaagcaaauuauggggc

SEQ ID NO: 1037583 - RNA, 27 nt, Human
uacuaaaaaagaaauguggcagauucc

SEQ ID NO: 1037584 - RNA, 23 nt, Human
uacuaaagcaaauuauggggcag

SEQ ID NO: 1037585 - RNA, 26 nt, Human
uacugccaaaaaaugcaaaaaggaaa

SEQ ID NO: 1037586 - RNA, 21 nt, Human
uauagaaaaauuaggaaagua

SEQ ID NO: 1037587 - RNA, 27 nt, Human
uauguuaaaaauguaauauauagaaca

SEQ ID NO: 1037588 - RNA, 19 nt, Human
ucaccuuccccaaagaaaa

SEQ ID NO: 1037589 - RNA, 19 nt, Human
uccaaauaauuuacuaaua

SEQ ID NO: 1037590 - RNA, 18 nt, Human
ucccacaaaucaccuucc

SEQ ID NO: 1037591 - RNA, 21 nt, Human
uccuuguguuuaagcacuugg

SEQ ID NO: 1037592 - RNA, 19 nt, Human
ucuaacacuauccuugugu

SEQ ID NO: 1037593 - RNA, 23 nt, Human
ucucccacaaaucaccuucccca

SEQ ID NO: 1037594 - RNA, 28 nt, Human
ucucccacaaaucaccuuccccaaagaa

SEQ ID NO: 1037595 - RNA, 22 nt, Human
ucuuccagccucguacuuucag

SEQ ID NO: 1037596 - RNA, 18 nt, Human
ugaaaagaacaaauacaa

SEQ ID NO: 1037597 - RNA, 21 nt, Human
ugaaaagugcauuauugcaau

SEQ ID NO: 1037598 - RNA, 18 nt, Human
ugacuccagcagcggcgg

SEQ ID NO: 1037599 - RNA, 20 nt, Human
ugagaaaaguuagauacaaa

SEQ ID NO: 1037600 - RNA, 18 nt, Human
ugagccggaacaaucuca

SEQ ID NO: 1037601 - RNA, 21 nt, Human
ugagccggaacaaucucacag

SEQ ID NO: 1037602 - RNA, 22 nt, Human
ugagccggaacaaucucacaga

SEQ ID NO: 1037603 - RNA, 18 nt, Human
ugcaaaaaggaaagucac

SEQ ID NO: 1037604 - RNA, 23 nt, Human
ugcaaaaaggaaagucacucgaa

SEQ ID NO: 1037605 - RNA, 24 nt, Human
ugccgcugccgucucccuccccca

SEQ ID NO: 1037606 - RNA, 18 nt, Human
uggggcuucauuuagaaa

SEQ ID NO: 1037607 - RNA, 20 nt, Human
ugguggguggggugggagag

SEQ ID NO: 1037608 - RNA, 18 nt, Human
uguaauugaaaaaaaaac

SEQ ID NO: 1037609 - RNA, 24 nt, Human
ugugugcgcgcgcauguguuuuua

SEQ ID NO: 1037610 - RNA, 20 nt, Human
ugugugugugcgcgcgcaug

SEQ ID NO: 1037611 - RNA, 21 nt, Human
uuacuguauuaucacaucaua

SEQ ID NO: 1037612 - RNA, 23 nt, Human
uuauacuaaaaaagaaauguggc

SEQ ID NO: 1037613 - RNA, 18 nt, Human
uucaaguaugaaaagugc

SEQ ID NO: 1037614 - RNA, 19 nt, Human
uucacacucuaugauguug

SEQ ID NO: 1037615 - RNA, 21 nt, Human
uuccccaaagaaaagcuucug

SEQ ID NO: 1037616 - RNA, 22 nt, Human
uuccugcauuuuguuaauguuu

SEQ ID NO: 1037617 - RNA, 19 nt, Human
uugcaaguccaaaauucuu

SEQ ID NO: 1037618 - RNA, 22 nt, Human
uuuaauuaaucuccacucuccc

SEQ ID NO: 1037619 - RNA, 20 nt, Human
uuugcaaguccaaaauucuu

SEQ ID NO: 1037620 - RNA, 21 nt, Human
uuuucaguguucuacauacua

SEQ ID NO: 1037621 - RNA, 23 nt, Human
uuuuuuuuuuuuuuaacucuuaa

SEQ ID NO: 1037622 - RNA, 22 nt, Human
aaaaaaaaaaaaaaagcaacaa

SEQ ID NO: 1037623 - RNA, 21 nt, Human
aaaaaaaaaaaaagcaacaaa

SEQ ID NO: 1037624 - RNA, 18 nt, Human
aaaaaggaaaacauuuuc

SEQ ID NO: 1037625 - RNA, 20 nt, Human
aaaaagugcaucuaaacccc

SEQ ID NO: 1037626 - RNA, 23 nt, Human
aaacaauauggcaaccaucugac

SEQ ID NO: 1037627 - RNA, 18 nt, Human
aaacacaauguaacuaau

SEQ ID NO: 1037628 - RNA, 23 nt, Human
aaagcucccccaagaauuugcuc

SEQ ID NO: 1037629 - RNA, 20 nt, Human
aaaggccuuaaagaaaagga

SEQ ID NO: 1037630 - RNA, 25 nt, Human
aacccacagaacucauuccaaaaaa

SEQ ID NO: 1037631 - RNA, 27 nt, Human
aagaaaaacaacagccuauuaucaaaa

SEQ ID NO: 1037632 - RNA, 18 nt, Human
aagaaaacccacagaacu

SEQ ID NO: 1037633 - RNA, 25 nt, Human
aagcaaauauauguucaucaaccau

SEQ ID NO: 1037634 - RNA, 19 nt, Human
aagcauuuuaagaaaugaa

SEQ ID NO: 1037635 - RNA, 20 nt, Human
aagcauuuuaagaaaugaaa

SEQ ID NO: 1037636 - RNA, 19 nt, Human
aaggaaaaagggacuucua

SEQ ID NO: 1037637 - RNA, 18 nt, Human
accaacugccaaaccagu

SEQ ID NO: 1037638 - RNA, 20 nt, Human
accccauuaaaagaaaguug

SEQ ID NO: 1037639 - RNA, 22 nt, Human
acuuuuuagucacacaguuaac

SEQ ID NO: 1037640 - RNA, 21 nt, Human
agacacugacagguaagagcu

SEQ ID NO: 1037641 - RNA, 23 nt, Human
agccaagugaacccaugcuacca

SEQ ID NO: 1037642 - RNA, 22 nt, Human
agguuuugugugaaauguuagu

SEQ ID NO: 1037643 - RNA, 20 nt, Human
aucacagguuuacugacuca

SEQ ID NO: 1037644 - RNA, 24 nt, Human
augaagacaaauauacuuaucuac

SEQ ID NO: 1037645 - RNA, 23 nt, Human
auuaaauaacaaaagcaucacug

SEQ ID NO: 1037646 - RNA, 22 nt, Human
caaaacacaauguaacuaauaa

SEQ ID NO: 1037647 - RNA, 23 nt, Human
caaaacuucccuuacucucaaaa

SEQ ID NO: 1037648 - RNA, 19 nt, Human
caaaccaaauacuagagca

SEQ ID NO: 1037649 - RNA, 19 nt, Human
caagaauuugcucauacaa

SEQ ID NO: 1037650 - RNA, 25 nt, Human
caagaccaagaaccugaagugaagc

SEQ ID NO: 1037651 - RNA, 21 nt, Human
cacaggcacuggcagacaaaa

SEQ ID NO: 1037652 - RNA, 20 nt, Human
caccuugaaauuuauuucca

SEQ ID NO: 1037653 - RNA, 20 nt, Human
cacuauacugagcaaagagc

SEQ ID NO: 1037654 - RNA, 24 nt, Human
cacuuucaaaacacuauacugagc

SEQ ID NO: 1037655 - RNA, 20 nt, Human
cagacuuugcaaaugaacac

SEQ ID NO: 1037656 - RNA, 21 nt, Human
cagcaccccauuaaaagaaag

SEQ ID NO: 1037657 - RNA, 23 nt, Human
cagccgcggcagccuccacagcc

SEQ ID NO: 1037658 - RNA, 20 nt, Human
caguaauuagagccacaaaa

SEQ ID NO: 1037659 - RNA, 24 nt, Human
cauauuccaaacaauauggcaacc

SEQ ID NO: 1037660 - RNA, 24 nt, Human
ccacaaaauauauuccaaaccaaa

SEQ ID NO: 1037661 - RNA, 23 nt, Human
ccagcaagucaaauauaaagaag

SEQ ID NO: 1037662 - RNA, 18 nt, Human
ccccagcaauucccggcu

SEQ ID NO: 1037663 - RNA, 26 nt, Human
ccccgccgccgcugccgccacuccuc

SEQ ID NO: 1037664 - RNA, 19 nt, Human
ccgccgccgccuccuucgc

SEQ ID NO: 1037665 - RNA, 18 nt, Human
ccgccgccgcugccgcca

SEQ ID NO: 1037666 - RNA, 19 nt, Human
ccuaaagaggcagcacccc

SEQ ID NO: 1037667 - RNA, 20 nt, Human
ccuccgccaccgccgccgcc

SEQ ID NO: 1037668 - RNA, 24 nt, Human
ccuuuaaaaaaaaaaaaaaagcaa

SEQ ID NO: 1037669 - RNA, 19 nt, Human
cgccaagguucucacucag

SEQ ID NO: 1037670 - RNA, 27 nt, Human
cguagcaguaauuuugauuaaauaaaa

SEQ ID NO: 1037671 - RNA, 23 nt, Human
cuaaaccccagcaauucccggcu

SEQ ID NO: 1037672 - RNA, 18 nt, Human
cuggcagaagaaaagcaa

SEQ ID NO: 1037673 - RNA, 18 nt, Human
cuggguuuucaugcuaga

SEQ ID NO: 1037674 - RNA, 26 nt, Human
cuuuaaaaaaaaaaaaaaagcaacaa

SEQ ID NO: 1037675 - RNA, 23 nt, Human
gaagacaaauauacuuaucuaca

SEQ ID NO: 1037676 - RNA, 21 nt, Human
gcaaagagcagcuuuccuuua

SEQ ID NO: 1037677 - RNA, 18 nt, Human
gcaaagcucccccaagaa

SEQ ID NO: 1037678 - RNA, 19 nt, Human
gcuccaucaacuuuucuua

SEQ ID NO: 1037679 - RNA, 26 nt, Human
ggaaaaagggacuucuaaaguaaacc

SEQ ID NO: 1037680 - RNA, 24 nt, Human
ggaugauaguuguuccuugauguc

SEQ ID NO: 1037681 - RNA, 20 nt, Human
gguggcuguuaagaaaaccc

SEQ ID NO: 1037682 - RNA, 23 nt, Human
guccccgccgccgcugccgccac

SEQ ID NO: 1037683 - RNA, 18 nt, Human
guuucaucccaauguaca

SEQ ID NO: 1037684 - RNA, 24 nt, Human
uaaaaaaaaaaaaaaagcaacaaa

SEQ ID NO: 1037685 - RNA, 20 nt, Human
uaaaaccuaaaacugaagcg

SEQ ID NO: 1037686 - RNA, 23 nt, Human
uaaaaccuaaaacugaagcgucu

SEQ ID NO: 1037687 - RNA, 24 nt, Human
uaaaccccagcaauucccggcucc

SEQ ID NO: 1037688 - RNA, 22 nt, Human
uaaagacauaaggcauacacug

SEQ ID NO: 1037689 - RNA, 27 nt, Human
uaaaguaaaccauucuuucauucaccu

SEQ ID NO: 1037690 - RNA, 23 nt, Human
uaaauaacaaaagcaucacugug

SEQ ID NO: 1037691 - RNA, 26 nt, Human
uagguuuuccaguuaaauaaauuauc

SEQ ID NO: 1037692 - RNA, 23 nt, Human
uaucacagguuuacugacucaau

SEQ ID NO: 1037693 - RNA, 23 nt, Human
uauucaagaauggaaaauuuaau

SEQ ID NO: 1037694 - RNA, 22 nt, Human
uauucugcucauuaaacuuuca

SEQ ID NO: 1037695 - RNA, 18 nt, Human
ucaaaaaguaaauuacug

SEQ ID NO: 1037696 - RNA, 18 nt, Human
ucaaaugaaaacaacaac

SEQ ID NO: 1037697 - RNA, 21 nt, Human
uccaaaccaaauacuagagca

SEQ ID NO: 1037698 - RNA, 23 nt, Human
uccacuuacugguucugugauaa

SEQ ID NO: 1037699 - RNA, 24 nt, Human
uccccgccgccgcugccgccacuc

SEQ ID NO: 1037700 - RNA, 21 nt, Human
uccgccaccgccgccgccucc

SEQ ID NO: 1037701 - RNA, 22 nt, Human
uccgccaccgccgccgccuccu

SEQ ID NO: 1037702 - RNA, 18 nt, Human
uccuccgccaccgccgcc

SEQ ID NO: 1037703 - RNA, 23 nt, Human
uccuccgccaccgccgccgccuc

SEQ ID NO: 1037704 - RNA, 19 nt, Human
ucugguuucugaucugugg

SEQ ID NO: 1037705 - RNA, 22 nt, Human
ucuuccuccgccaccgccgcua

SEQ ID NO: 1037706 - RNA, 25 nt, Human
ugaaaaaaguauccaaauuauaaaa

SEQ ID NO: 1037707 - RNA, 24 nt, Human
ugaaaaaauaaaaccuaaaacuga

SEQ ID NO: 1037708 - RNA, 19 nt, Human
ugaaagcaauuaacuguaa

SEQ ID NO: 1037709 - RNA, 19 nt, Human
ugagcaaagagcagcuuuc

SEQ ID NO: 1037710 - RNA, 19 nt, Human
ugcaaaggucgauucugug

SEQ ID NO: 1037711 - RNA, 23 nt, Human
ugcacugauuggccaaaacacaa

SEQ ID NO: 1037712 - RNA, 23 nt, Human
ugccuaaaugaaguuugaccaaa

SEQ ID NO: 1037713 - RNA, 23 nt, Human
uggagucuuucaguguuggugcu

SEQ ID NO: 1037714 - RNA, 18 nt, Human
uggcaaaaacacuaaaau

SEQ ID NO: 1037715 - RNA, 21 nt, Human
uggcaaccaucugacuuuuua

SEQ ID NO: 1037716 - RNA, 19 nt, Human
uguaaggaaaaagggacuu

SEQ ID NO: 1037717 - RNA, 21 nt, Human
ugugugguuaccauauuuuua

SEQ ID NO: 1037718 - RNA, 25 nt, Human
uguuaagaaaacccacagaacucag

SEQ ID NO: 1037719 - RNA, 22 nt, Human
uguuacauugcacugauuggcc

SEQ ID NO: 1037720 - RNA, 22 nt, Human
uucaacuucaaaaacuaccguc

SEQ ID NO: 1037721 - RNA, 23 nt, Human
uucugcucauuaaacuuucaaga

SEQ ID NO: 1037722 - RNA, 22 nt, Human
uugaaagcaauuaacuguaaaa

SEQ ID NO: 1037723 - RNA, 22 nt, Human
uugguaccaaaagaacuccuga

SEQ ID NO: 1037724 - RNA, 20 nt, Human
uuuaaaaaaaaaaaaaaagc

SEQ ID NO: 1037725 - RNA, 24 nt, Human
uuucauucacuaaucacugaggua

SEQ ID NO: 1037726 - RNA, 18 nt, Human
agaucugcuuuuugguca

SEQ ID NO: 1037727 - RNA, 22 nt, Human
gagcagaagaucugcuuuuugg

SEQ ID NO: 1037728 - RNA, 19 nt, Human
uauagaauccauuuucuaa

SEQ ID NO: 1037729 - RNA, 20 nt, Human
uccaggagcagaagaucugc

SEQ ID NO: 1037730 - RNA, 20 nt, Human
ugcaaaaauagauaauaauu

SEQ ID NO: 1037731 - RNA, 19 nt, Human
aacacaguguccuuuggac

SEQ ID NO: 1037732 - RNA, 20 nt, Human
acauggucucccauuuccuc

SEQ ID NO: 1037733 - RNA, 21 nt, Human
aggcacagacaucuucaugcc

SEQ ID NO: 1037734 - RNA, 20 nt, Human
cauucugcuucuuggaggua

SEQ ID NO: 1037735 - RNA, 21 nt, Human
cuccuggagccgggcaccguc

SEQ ID NO: 1037736 - RNA, 22 nt, Human
gacaucuucaugccuguguuca

SEQ ID NO: 1037737 - RNA, 22 nt, Human
ggagaaccucuguggguuggaa

SEQ ID NO: 1037738 - RNA, 24 nt, Human
gggacuggguggagucucuggggg

SEQ ID NO: 1037739 - RNA, 19 nt, Human
guuggaaggcacagacauc

SEQ ID NO: 1037740 - RNA, 19 nt, Human
uaaaagagucagugugaug

SEQ ID NO: 1037741 - RNA, 21 nt, Human
uaaaagagucagugugaugua

SEQ ID NO: 1037742 - RNA, 19 nt, Human
uaaauaaugcugccucucu

SEQ ID NO: 1037743 - RNA, 23 nt, Human
uagccugcuucguacucacacug

SEQ ID NO: 1037744 - RNA, 20 nt, Human
uaguuucuggguccaggacc

SEQ ID NO: 1037745 - RNA, 19 nt, Human
ugaaguaggagaaccucug

SEQ ID NO: 1037746 - RNA, 26 nt, Human
ugaaguaggagaaccucuguggguug

SEQ ID NO: 1037747 - RNA, 22 nt, Human
uggaacuccuggagccgggcac

SEQ ID NO: 1037748 - RNA, 18 nt, Human
uggagguaagcacuggua

SEQ ID NO: 1037749 - RNA, 20 nt, Human
uggcugguuugguaagaggu

SEQ ID NO: 1037750 - RNA, 23 nt, Human
uggcugguuugguaagaggucca

SEQ ID NO: 1037751 - RNA, 22 nt, Human
uggguuggaaggcacagacauc

SEQ ID NO: 1037752 - RNA, 23 nt, Human
ugguuugguaagagguccaagga

SEQ ID NO: 1037753 - RNA, 22 nt, Human
ugucuguucuucuagucgguca

SEQ ID NO: 1037754 - RNA, 23 nt, Human
cacugguugcgguuuugaaacac

SEQ ID NO: 1037755 - RNA, 19 nt, Human
aaacuucuagaauucuacu

SEQ ID NO: 1037756 - RNA, 18 nt, Human
aaagauaagucaaguggc

SEQ ID NO: 1037757 - RNA, 20 nt, Human
acccaaucugugacccugau

SEQ ID NO: 1037758 - RNA, 22 nt, Human
auuccaaauuuuagagccaugg

SEQ ID NO: 1037759 - RNA, 26 nt, Human
caauaaagauaagucaaguggcacag

SEQ ID NO: 1037760 - RNA, 22 nt, Human
ccugauccacaacacaauaaga

SEQ ID NO: 1037761 - RNA, 22 nt, Human
cugaaaauaauaguggcaaaac

SEQ ID NO: 1037762 - RNA, 25 nt, Human
gaaaauaauaguggcaaaacauaac

SEQ ID NO: 1037763 - RNA, 20 nt, Human
gcauagacaauaaagauaag

SEQ ID NO: 1037764 - RNA, 19 nt, Human
ggaaauaaaauugagaggg

SEQ ID NO: 1037765 - RNA, 22 nt, Human
uaacagcaucuggaggcucagc

SEQ ID NO: 1037766 - RNA, 21 nt, Human
uacaagcagcucuuaaggcaa

SEQ ID NO: 1037767 - RNA, 22 nt, Human
uaguggcaaaacauaacacucc

SEQ ID NO: 1037768 - RNA, 21 nt, Human
ucaaccagugauuaaaucuga

SEQ ID NO: 1037769 - RNA, 23 nt, Human
uccaagcuacccaaucugugacc

SEQ ID NO: 1037770 - RNA, 20 nt, Human
ugaaaaagagaacauuucau

SEQ ID NO: 1037771 - RNA, 23 nt, Human
ugagagggacaugauuagaagua

SEQ ID NO: 1037772 - RNA, 19 nt, Human
ugagguaacagcaucugga

SEQ ID NO: 1037773 - RNA, 21 nt, Human
ugagguaacagcaucuggagg

SEQ ID NO: 1037774 - RNA, 22 nt, Human
uggcagggugaagugaaaaaga

SEQ ID NO: 1037775 - RNA, 24 nt, Human
uucaaauugguacaacuggugaca

SEQ ID NO: 1037776 - RNA, 22 nt, Human
uuuauacauagcuauccacaua

SEQ ID NO: 1037777 - RNA, 28 nt, Human
uuuauacauagcuauccacauauguaca

SEQ ID NO: 1037778 - RNA, 22 nt, Human
agcccuugacaggagaugguuc

SEQ ID NO: 1037779 - RNA, 21 nt, Human
ugacaggagaugguucucagu

SEQ ID NO: 1037780 - RNA, 22 nt, Human
ugggaauaaucaaagcccuuga

SEQ ID NO: 1037781 - RNA, 24 nt, Human
uugacaggagaugguuccggacuc

SEQ ID NO: 1037782 - RNA, 19 nt, Human
aaaggucgaggcccgagac

SEQ ID NO: 1037783 - RNA, 24 nt, Human
aaaguacugggauuacagguguga

SEQ ID NO: 1037784 - RNA, 19 nt, Human
aagccauggccagcaagga

SEQ ID NO: 1037785 - RNA, 18 nt, Human
aaguacugggauuacagg

SEQ ID NO: 1037786 - RNA, 26 nt, Human
aaguacugggauuacaggugugagcc

SEQ ID NO: 1037787 - RNA, 23 nt, Human
accauguuuggcuaauuuuugua

SEQ ID NO: 1037788 - RNA, 24 nt, Human
accugugacucaaaacauuaacua

SEQ ID NO: 1037789 - RNA, 20 nt, Human
acggggucucgcuguguuac

SEQ ID NO: 1037790 - RNA, 23 nt, Human
acggggucucgcuguguuaccug

SEQ ID NO: 1037791 - RNA, 22 nt, Human
acuacagguguguaccauguuu

SEQ ID NO: 1037792 - RNA, 20 nt, Human
agaaagccccugggacuuca

SEQ ID NO: 1037793 - RNA, 20 nt, Human
agacaucugauucacauagg

SEQ ID NO: 1037794 - RNA, 22 nt, Human
agagcagccccaugggcucgag

SEQ ID NO: 1037795 - RNA, 20 nt, Human
agcaauaugccccccuugac

SEQ ID NO: 1037796 - RNA, 23 nt, Human
aguagcugggacuacaggugugu

SEQ ID NO: 1037797 - RNA, 20 nt, Human
agugcaguggugcaaucacg

SEQ ID NO: 1037798 - RNA, 20 nt, Human
augacaaagacauggcuuua

SEQ ID NO: 1037799 - RNA, 19 nt, Human
auggccagcaaggaggcug

SEQ ID NO: 1037800 - RNA, 24 nt, Human
caaaguacugggauuacaggugug

SEQ ID NO: 1037801 - RNA, 18 nt, Human
caagaggcccccuccaau

SEQ ID NO: 1037802 - RNA, 21 nt, Human
caauaccaaagaugucaauga

SEQ ID NO: 1037803 - RNA, 22 nt, Human
caaugaucccugggaagggucc

SEQ ID NO: 1037804 - RNA, 21 nt, Human
cacccggcccgcucgcaccga

SEQ ID NO: 1037805 - RNA, 21 nt, Human
cagcaaacauuaagugaccau

SEQ ID NO: 1037806 - RNA, 21 nt, Human
cagcagcagcggccugggggc

SEQ ID NO: 1037807 - RNA, 22 nt, Human
cagcggccugggggcuccagga

SEQ ID NO: 1037808 - RNA, 24 nt, Human
cauguugccuaagcuggucaugaa

SEQ ID NO: 1037809 - RNA, 21 nt, Human
ccaaaguacugggauuacagg

SEQ ID NO: 1037810 - RNA, 24 nt, Human
ccaaaguacugggauuacaggugu

SEQ ID NO: 1037811 - RNA, 24 nt, Human
ccugagcucaagcaauaugccccc

SEQ ID NO: 1037812 - RNA, 21 nt, Human
ccuuggaagagaguacagacu

SEQ ID NO: 1037813 - RNA, 18 nt, Human
cgcaccgacuggcgccgc

SEQ ID NO: 1037814 - RNA, 22 nt, Human
cgcaccggcucguuccagcagc

SEQ ID NO: 1037815 - RNA, 23 nt, Human
cgcgcagcguaacccgcugcucc

SEQ ID NO: 1037816 - RNA, 19 nt, Human
cggcucguuccagcagcag

SEQ ID NO: 1037817 - RNA, 21 nt, Human
cguccaggcucggggucgugg

SEQ ID NO: 1037818 - RNA, 20 nt, Human
cuaaaaaaaucuagaaggaa

SEQ ID NO: 1037819 - RNA, 22 nt, Human
cucaagcaauaugccccccuug

SEQ ID NO: 1037820 - RNA, 23 nt, Human
cucgaguagcugggacuacaggu

SEQ ID NO: 1037821 - RNA, 24 nt, Human
cucgaguagcugggacuacaggug

SEQ ID NO: 1037822 - RNA, 23 nt, Human
cucggguuccagggcccagagca

SEQ ID NO: 1037823 - RNA, 18 nt, Human
cugagcucaagcaauaug

SEQ ID NO: 1037824 - RNA, 23 nt, Human
cuguguuaccugggcuggagugc

SEQ ID NO: 1037825 - RNA, 24 nt, Human
cuuagagaggaagugagagggaaa

SEQ ID NO: 1037826 - RNA, 20 nt, Human
gacuacagguguguaccaug

SEQ ID NO: 1037827 - RNA, 25 nt, Human
gaguagcugggacuacaggugugua

SEQ ID NO: 1037828 - RNA, 24 nt, Human
gagugcaguggugcaaucacggcu

SEQ ID NO: 1037829 - RNA, 18 nt, Human
gauuacaggugugagcca

SEQ ID NO: 1037830 - RNA, 21 nt, Human
gauuacaggugugagccacug

SEQ ID NO: 1037831 - RNA, 24 nt, Human
gauuacaggugugagccacuguac

SEQ ID NO: 1037832 - RNA, 22 nt, Human
gcaccgacuggcgccgcacccc

SEQ ID NO: 1037833 - RNA, 23 nt, Human
gccaaaaaggcuucucggguucc

SEQ ID NO: 1037834 - RNA, 20 nt, Human
gccacuguacucggccccag

SEQ ID NO: 1037835 - RNA, 20 nt, Human
gccauguugccuaagcuggu

SEQ ID NO: 1037836 - RNA, 20 nt, Human
gcucggggucguggccgucc

SEQ ID NO: 1037837 - RNA, 21 nt, Human
ggaagcgccaaaaaggcuucu

SEQ ID NO: 1037838 - RNA, 20 nt, Human
ggacuacagguguguaccau

SEQ ID NO: 1037839 - RNA, 21 nt, Human
ggacuacagguguguaccaug

SEQ ID NO: 1037840 - RNA, 23 nt, Human
ggcucguuccagcagcagcggcc

SEQ ID NO: 1037841 - RNA, 21 nt, Human
gggacgcgcgcagcguaaccc

SEQ ID NO: 1037842 - RNA, 22 nt, Human
ggggcuccaggaucagcguugc

SEQ ID NO: 1037843 - RNA, 18 nt, Human
ggucugcucuuagagagg

SEQ ID NO: 1037844 - RNA, 23 nt, Human
ggugccggaagcugccgguggcu

SEQ ID NO: 1037845 - RNA, 21 nt, Human
guagggauuggguuuugccau

SEQ ID NO: 1037846 - RNA, 25 nt, Human
uaacgacaaagcuuauucaacaaag

SEQ ID NO: 1037847 - RNA, 18 nt, Human
uaacuaaaaaaaucuaga

SEQ ID NO: 1037848 - RNA, 22 nt, Human
uacaggugugagccacuguacu

SEQ ID NO: 1037849 - RNA, 21 nt, Human
uacauuaguaaaacuaacgac

SEQ ID NO: 1037850 - RNA, 19 nt, Human
uaccugggcuggagugcag

SEQ ID NO: 1037851 - RNA, 24 nt, Human
uaccugggcuggagugcaguggug

SEQ ID NO: 1037852 - RNA, 24 nt, Human
uacugggauuacaggugugagcca

SEQ ID NO: 1037853 - RNA, 22 nt, Human
uagggauuggguuuugccaugu

SEQ ID NO: 1037854 - RNA, 19 nt, Human
uauccaggagacaucugau

SEQ ID NO: 1037855 - RNA, 18 nt, Human
uccagcaccuccaacucc

SEQ ID NO: 1037856 - RNA, 23 nt, Human
ucccaaaguacugggauuacagg

SEQ ID NO: 1037857 - RNA, 21 nt, Human
ucccgcuucaggaagcgccaa

SEQ ID NO: 1037858 - RNA, 18 nt, Human
ucccgggcucaagcaauc

SEQ ID NO: 1037859 - RNA, 19 nt, Human
ucccgggcucaagcaaucg

SEQ ID NO: 1037860 - RNA, 22 nt, Human
uccggcguccccuggugccgga

SEQ ID NO: 1037861 - RNA, 24 nt, Human
ucgcuguguuaccugggcuggagu

SEQ ID NO: 1037862 - RNA, 18 nt, Human
ucucaucuccuccuguca

SEQ ID NO: 1037863 - RNA, 23 nt, Human
ucucgaguagcugggacuacagg

SEQ ID NO: 1037864 - RNA, 24 nt, Human
ucucgaguagcugggacuacaggu

SEQ ID NO: 1037865 - RNA, 19 nt, Human
ucuugaccucccgggcuca

SEQ ID NO: 1037866 - RNA, 21 nt, Human
ugaggcaaaaguagccaggcu

SEQ ID NO: 1037867 - RNA, 22 nt, Human
ugcaguggugcaaucacggcuc

SEQ ID NO: 1037868 - RNA, 22 nt, Human
ugccauguugccuaagcugguc

SEQ ID NO: 1037869 - RNA, 24 nt, Human
ugccgguggcugagcagucccaga

SEQ ID NO: 1037870 - RNA, 18 nt, Human
ugcgcgcuccagguccag

SEQ ID NO: 1037871 - RNA, 21 nt, Human
uggagugcaguggugcaauca

SEQ ID NO: 1037872 - RNA, 24 nt, Human
uggagugcaguggugcaaucacgg

SEQ ID NO: 1037873 - RNA, 18 nt, Human
uggccaaagaaaauucua

SEQ ID NO: 1037874 - RNA, 24 nt, Human
uggccguccagcaccuccaacucc

SEQ ID NO: 1037875 - RNA, 25 nt, Human
uggcggcaggaagagcguggcgcgc

SEQ ID NO: 1037876 - RNA, 23 nt, Human
ugggaaggguccagguccuggcg

SEQ ID NO: 1037877 - RNA, 25 nt, Human
ugggaaggguccagguccuggcggc

SEQ ID NO: 1037878 - RNA, 21 nt, Human
ugggacuacagguguguacca

SEQ ID NO: 1037879 - RNA, 21 nt, Human
ugggacuacagguguguacca

SEQ ID NO: 1037880 - RNA, 22 nt, Human
ugggacuacagguguguaccau

SEQ ID NO: 1037881 - RNA, 18 nt, Human
ugggauuacaggugugag

SEQ ID NO: 1037882 - RNA, 21 nt, Human
ugggauuacaggugugagcca

SEQ ID NO: 1037883 - RNA, 22 nt, Human
ugggauuacaggugugagccac

SEQ ID NO: 1037884 - RNA, 22 nt, Human
ugggauuacaggugugagccac

SEQ ID NO: 1037885 - RNA, 22 nt, Human
ugggauuacaggugugagccac

SEQ ID NO: 1037886 - RNA, 24 nt, Human
ugggauuacaggugugagccacug

SEQ ID NO: 1037887 - RNA, 24 nt, Human
uguagggauuggguuuugccaugu

SEQ ID NO: 1037888 - RNA, 18 nt, Human
uguccggacggcguccgg

SEQ ID NO: 1037889 - RNA, 24 nt, Human
uguguuaccugggcuggagugcag

SEQ ID NO: 1037890 - RNA, 24 nt, Human
uuaccugggcuggagugcaguggu

SEQ ID NO: 1037891 - RNA, 18 nt, Human
uuccagcagcagcggccu

SEQ ID NO: 1037892 - RNA, 20 nt, Human
uuccagggcccagagcagcc

SEQ ID NO: 1037893 - RNA, 24 nt, Human
uuuguagggauuggguuuugccau

SEQ ID NO: 1037894 - RNA, 23 nt, Human
uuuugccauguugccuaagcugg

SEQ ID NO: 1037895 - RNA, 19 nt, Human
uaaaaggaacuguugcagg

SEQ ID NO: 1037896 - RNA, 21 nt, Human
uaaaaggaacuguugcaggua

SEQ ID NO: 1037897 - RNA, 19 nt, Human
aaguagcugggacuauagg

SEQ ID NO: 1037898 - RNA, 20 nt, Human
aaguagcugggacuauaggc

SEQ ID NO: 1037899 - RNA, 25 nt, Human
aaguagcugggacuauaggcacaug

SEQ ID NO: 1037900 - RNA, 19 nt, Human
aggcacaugcuaccacacc

SEQ ID NO: 1037901 - RNA, 21 nt, Human
auaauccucccaccuccaccu

SEQ ID NO: 1037902 - RNA, 23 nt, Human
caccuccaccucccaaguagcug

SEQ ID NO: 1037903 - RNA, 24 nt, Human
caccuccaccucccaaguagcugg

SEQ ID NO: 1037904 - RNA, 22 nt, Human
caccuuaacuaauaucaaggac

SEQ ID NO: 1037905 - RNA, 23 nt, Human
cauucugugucacccuuaugugu

SEQ ID NO: 1037906 - RNA, 23 nt, Human
ccaccucccaaguagcugggacu

SEQ ID NO: 1037907 - RNA, 19 nt, Human
cccaaguagcugggacuau

SEQ ID NO: 1037908 - RNA, 24 nt, Human
cccaaguagcugggacuauaggca

SEQ ID NO: 1037909 - RNA, 23 nt, Human
ccucccaccuccaccucccaagu

SEQ ID NO: 1037910 - RNA, 26 nt, Human
ccucccaccuccaccucccaaguagc

SEQ ID NO: 1037911 - RNA, 24 nt, Human
cuaccacaccuggcuuaaaggugc

SEQ ID NO: 1037912 - RNA, 25 nt, Human
cuauauacauacauacacagacaua

SEQ ID NO: 1037913 - RNA, 20 nt, Human
cucccaccuccaccucccaa

SEQ ID NO: 1037914 - RNA, 19 nt, Human
cucuauuuauaauccuccc

SEQ ID NO: 1037915 - RNA, 24 nt, Human
gccggugcggccagcgaaggccca

SEQ ID NO: 1037916 - RNA, 21 nt, Human
ggaaagucucuauuuauaauc

SEQ ID NO: 1037917 - RNA, 20 nt, Human
uacacaaugauuuauuuuaa

SEQ ID NO: 1037918 - RNA, 23 nt, Human
uacauacauacacagacauagug

SEQ ID NO: 1037919 - RNA, 24 nt, Human
uauaaacaaacaucuacuauauaa

SEQ ID NO: 1037920 - RNA, 24 nt, Human
uauuuauaauccucccaccuccac

SEQ ID NO: 1037921 - RNA, 23 nt, Human
ucagacuccuuaagcuacaugau

SEQ ID NO: 1037922 - RNA, 23 nt, Human
uccaccucccaaguagcugggac

SEQ ID NO: 1037923 - RNA, 24 nt, Human
ucccaaguagcugggacuauaggc

SEQ ID NO: 1037924 - RNA, 23 nt, Human
uccucccaccuccaccucccaag

SEQ ID NO: 1037925 - RNA, 22 nt, Human
ugggacuauaggcacaugcuac

SEQ ID NO: 1037926 - RNA, 24 nt, Human
ugggacuauaggcacaugcuacca

SEQ ID NO: 1037927 - RNA, 25 nt, Human
uuuauaauccucccaccuccaccuc

SEQ ID NO: 1037928 - RNA, 19 nt, Human
aaaaaggcuuaaguaaaca

SEQ ID NO: 1037929 - RNA, 21 nt, Human
aaacuuucuccaaauauagaa

SEQ ID NO: 1037930 - RNA, 22 nt, Human
aaccuacaacugcucuaaaaaa

SEQ ID NO: 1037931 - RNA, 23 nt, Human
aagagguaaacaguggagccaag

SEQ ID NO: 1037932 - RNA, 22 nt, Human
aagcugaaauuauuuccaaaua

SEQ ID NO: 1037933 - RNA, 22 nt, Human
aagcuucaaggaaauaaccagc

SEQ ID NO: 1037934 - RNA, 23 nt, Human
aaggguuuucuuuuuauuguuuu

SEQ ID NO: 1037935 - RNA, 22 nt, Human
aagguauacuccuggccuaaaa

SEQ ID NO: 1037936 - RNA, 21 nt, Human
aaucugcuggaggcagugggc

SEQ ID NO: 1037937 - RNA, 23 nt, Human
aaugggggcagaaaaaaagggaa

SEQ ID NO: 1037938 - RNA, 24 nt, Human
aauuucugaaauccuucauaagca

SEQ ID NO: 1037939 - RNA, 23 nt, Human
acauagcaagagguaaacagugg

SEQ ID NO: 1037940 - RNA, 19 nt, Human
accuggcuguugaguacau

SEQ ID NO: 1037941 - RNA, 26 nt, Human
acuccaaauaaaacaaauaguaaaau

SEQ ID NO: 1037942 - RNA, 18 nt, Human
acuggaaagaaaacugca

SEQ ID NO: 1037943 - RNA, 23 nt, Human
agaaacugagaagucauagcuuu

SEQ ID NO: 1037944 - RNA, 23 nt, Human
agaaauauauauuuuugaaaugu

SEQ ID NO: 1037945 - RNA, 23 nt, Human
agaagucauagcuuucccuuaaa

SEQ ID NO: 1037946 - RNA, 21 nt, Human
agagaaaccagcuaaaacaaa

SEQ ID NO: 1037947 - RNA, 20 nt, Human
agcaaaagacacaaacuucc

SEQ ID NO: 1037948 - RNA, 21 nt, Human
agcaaaggggauauaagaugu

SEQ ID NO: 1037949 - RNA, 20 nt, Human
agccaaaacugcaaacauuu

SEQ ID NO: 1037950 - RNA, 23 nt, Human
auagaacagagaaaccagcuaaa

SEQ ID NO: 1037951 - RNA, 20 nt, Human
aucagauacauuauauacca

SEQ ID NO: 1037952 - RNA, 19 nt, Human
aucucauuuuuuacuacca

SEQ ID NO: 1037953 - RNA, 19 nt, Human
auuauuuauuguaaucaug

SEQ ID NO: 1037954 - RNA, 19 nt, Human
auuugggaaaauguuaaug

SEQ ID NO: 1037955 - RNA, 18 nt, Human
caaaaucagagcaguaga

SEQ ID NO: 1037956 - RNA, 23 nt, Human
caaaaugaacaugguacuucaua

SEQ ID NO: 1037957 - RNA, 18 nt, Human
caaaguaagaaugggggc

SEQ ID NO: 1037958 - RNA, 21 nt, Human
caaguaaauccacuguuagga

SEQ ID NO: 1037959 - RNA, 28 nt, Human
cacaaaaucagagcaguagaggacauac

SEQ ID NO: 1037960 - RNA, 25 nt, Human
cacaauaugcauaccuauuagcagg

SEQ ID NO: 1037961 - RNA, 19 nt, Human
cacuuacccccuccccucc

SEQ ID NO: 1037962 - RNA, 23 nt, Human
cagagaaaccagcuaaaacaaag

SEQ ID NO: 1037963 - RNA, 22 nt, Human
cagcaaaagacacaaacuucca

SEQ ID NO: 1037964 - RNA, 23 nt, Human
cagcaaaagacacaaacuuccaa

SEQ ID NO: 1037965 - RNA, 23 nt, Human
caggugauuuaucuuaaaaaucc

SEQ ID NO: 1037966 - RNA, 18 nt, Human
caguggcagagaguacug

SEQ ID NO: 1037967 - RNA, 21 nt, Human
cauucaucuuccuacaauucu

SEQ ID NO: 1037968 - RNA, 18 nt, Human
ccagcaaaagacacaaac

SEQ ID NO: 1037969 - RNA, 19 nt, Human
ccagcauuaguaccuccuc

SEQ ID NO: 1037970 - RNA, 18 nt, Human
cccccuccccuccacuuc

SEQ ID NO: 1037971 - RNA, 20 nt, Human
cccccuccccuccacuuccc

SEQ ID NO: 1037972 - RNA, 22 nt, Human
ccccuccccuccacuucccucc

SEQ ID NO: 1037973 - RNA, 26 nt, Human
cgcucugcugucgccgccugcgggaa

SEQ ID NO: 1037974 - RNA, 24 nt, Human
cggccgcgccucgagguccugccu

SEQ ID NO: 1037975 - RNA, 20 nt, Human
cgggagaaaauacauagcaa

SEQ ID NO: 1037976 - RNA, 19 nt, Human
cguaaguggguaaagguca

SEQ ID NO: 1037977 - RNA, 22 nt, Human
cuaaaugccaauaguacuaaca

SEQ ID NO: 1037978 - RNA, 19 nt, Human
cuccucaccugaaaaaggc

SEQ ID NO: 1037979 - RNA, 21 nt, Human
cucgagguccugccuuuccca

SEQ ID NO: 1037980 - RNA, 22 nt, Human
cugcgggaacugugacuccggu

SEQ ID NO: 1037981 - RNA, 21 nt, Human
cuucauaugggcccacuuuuc

SEQ ID NO: 1037982 - RNA, 23 nt, Human
cuuccaaucuuaauauuaaucug

SEQ ID NO: 1037983 - RNA, 20 nt, Human
cuuccucucaauuuuucugu

SEQ ID NO: 1037984 - RNA, 20 nt, Human
gaccacaauuauauaacuug

SEQ ID NO: 1037985 - RNA, 18 nt, Human
gcaaauaugaagagaagu

SEQ ID NO: 1037986 - RNA, 21 nt, Human
gccgcgccucgagguccugcc

SEQ ID NO: 1037987 - RNA, 21 nt, Human
gccgcgccucgagguccugcc

SEQ ID NO: 1037988 - RNA, 19 nt, Human
ggagauggcaccuagggaa

SEQ ID NO: 1037989 - RNA, 21 nt, Human
gggaggcuguugagggcuuug

SEQ ID NO: 1037990 - RNA, 21 nt, Human
gucauagcuuucccuuaaauu

SEQ ID NO: 1037991 - RNA, 21 nt, Human
guugcauuugcagaggauguu

SEQ ID NO: 1037992 - RNA, 22 nt, Human
uaaaaaaaacuccacuaggaga

SEQ ID NO: 1037993 - RNA, 19 nt, Human
uaaaacacagggcacaaac

SEQ ID NO: 1037994 - RNA, 24 nt, Human
uaaaacacagggcacaaacuuucu

SEQ ID NO: 1037995 - RNA, 19 nt, Human
uaaaauaaacaauaaagcc

SEQ ID NO: 1037996 - RNA, 21 nt, Human
uaagaaugggggcagaaaaaa

SEQ ID NO: 1037997 - RNA, 19 nt, Human
uaaguggguaaaggucaag

SEQ ID NO: 1037998 - RNA, 19 nt, Human
uaaucaauaaugccuagca

SEQ ID NO: 1037999 - RNA, 19 nt, Human
uacacccaaccaaacacag

SEQ ID NO: 1038000 - RNA, 26 nt, Human
uacauuauauaccauaauuauagccc

SEQ ID NO: 1038001 - RNA, 24 nt, Human
uacugcuuuuaaaaaucaugcaaa

SEQ ID NO: 1038002 - RNA, 23 nt, Human
uacuucauaugggcccacuuuuc

SEQ ID NO: 1038003 - RNA, 21 nt, Human
uagaacagagaaaccagcuaa

SEQ ID NO: 1038004 - RNA, 24 nt, Human
uagcaggagauuggauuuuuauuu

SEQ ID NO: 1038005 - RNA, 26 nt, Human
uaggagcuggaauaaagaaggcaugc

SEQ ID NO: 1038006 - RNA, 24 nt, Human
uaggaguacugcuuuuaaaaauca

SEQ ID NO: 1038007 - RNA, 22 nt, Human
uauagaaagaacuaucuauggu

SEQ ID NO: 1038008 - RNA, 22 nt, Human
uauagauuaaaaaacuuaaaac

SEQ ID NO: 1038009 - RNA, 22 nt, Human
uaugcuaucaaaagcugacauu

SEQ ID NO: 1038010 - RNA, 19 nt, Human
uauuugagggaagaaaaca

SEQ ID NO: 1038011 - RNA, 20 nt, Human
uauuugggaaaauguuaaug

SEQ ID NO: 1038012 - RNA, 21 nt, Human
ucaaaauauuaucacacaggu

SEQ ID NO: 1038013 - RNA, 25 nt, Human
ucaauuaagcugaaauuauuuccaa

SEQ ID NO: 1038014 - RNA, 22 nt, Human
ucacuuacccccuccccuccaa

SEQ ID NO: 1038015 - RNA, 24 nt, Human
ucaugguuuauagaaaucacauuu

SEQ ID NO: 1038016 - RNA, 21 nt, Human
ucauugguagcaaauugaaau

SEQ ID NO: 1038017 - RNA, 24 nt, Human
uccaaauauagaaaauaguugaaa

SEQ ID NO: 1038018 - RNA, 23 nt, Human
uccacuucccuccccguacccac

SEQ ID NO: 1038019 - RNA, 19 nt, Human
uccagcaaaagacacaaac

SEQ ID NO: 1038020 - RNA, 19 nt, Human
uccccuacccuaucacuua

SEQ ID NO: 1038021 - RNA, 22 nt, Human
uccugccaaaauguaguuuucu

SEQ ID NO: 1038022 - RNA, 21 nt, Human
ucuauuucugaaguuuuuugg

SEQ ID NO: 1038023 - RNA, 23 nt, Human
ucuucacccacaaaauaaaaucc

SEQ ID NO: 1038024 - RNA, 21 nt, Human
ucuuccuacaauucuucaccc

SEQ ID NO: 1038025 - RNA, 20 nt, Human
ugaaaucauaagucuucuaa

SEQ ID NO: 1038026 - RNA, 24 nt, Human
ugaagagaaguuauuuuggcauag

SEQ ID NO: 1038027 - RNA, 25 nt, Human
ugagaaaauacucaaacacgguaaa

SEQ ID NO: 1038028 - RNA, 22 nt, Human
ugagaacacagagcacuuaguc

SEQ ID NO: 1038029 - RNA, 21 nt, Human
ugauauacacagaacauagga

SEQ ID NO: 1038030 - RNA, 22 nt, Human
ugcaauagaaaauauuuguuac

SEQ ID NO: 1038031 - RNA, 19 nt, Human
ugcauacauaucaucauaa

SEQ ID NO: 1038032 - RNA, 20 nt, Human
ugcauacauaucaucauaua

SEQ ID NO: 1038033 - RNA, 18 nt, Human
ugcaugccugggacaaag

SEQ ID NO: 1038034 - RNA, 27 nt, Human
ugccugggacaaaguaagaaugggggc

SEQ ID NO: 1038035 - RNA, 23 nt, Human
uggaaagaaaacugcaauagaaa

SEQ ID NO: 1038036 - RNA, 23 nt, Human
uggauaucugauaaaauucauua

SEQ ID NO: 1038037 - RNA, 21 nt, Human
uggcagagaguacugguacca

SEQ ID NO: 1038038 - RNA, 24 nt, Human
uuaaaaaacuuaaaacuaaaaaag

SEQ ID NO: 1038039 - RNA, 24 nt, Human
uuaagcugaaauuauuuccaaaua

SEQ ID NO: 1038040 - RNA, 22 nt, Human
uuagccaaaacugcaaacauuu

SEQ ID NO: 1038041 - RNA, 22 nt, Human
uuuaaaauaaacaauaaagccc

SEQ ID NO: 1038042 - RNA, 19 nt, Human
uuuacuucuuugguaccca

SEQ ID NO: 1038043 - RNA, 19 nt, Human
uuugccucuucucauuggu

SEQ ID NO: 1038044 - RNA, 19 nt, Human
aacauaguagaccuacagc

SEQ ID NO: 1038045 - RNA, 21 nt, Human
aauagcacuuccaguuucucu

SEQ ID NO: 1038046 - RNA, 22 nt, Human
aguaaauaauuaagaagacuaa

SEQ ID NO: 1038047 - RNA, 23 nt, Human
caggcacaacuguuuugucucuu

SEQ ID NO: 1038048 - RNA, 23 nt, Human
gugaaaaguaagugagaaauuaa

SEQ ID NO: 1038049 - RNA, 22 nt, Human
uaaaguauuuaaaaucuguacu

SEQ ID NO: 1038050 - RNA, 21 nt, Human
uauacagugucuccucauuug

SEQ ID NO: 1038051 - RNA, 19 nt, Human
ucuggauacuccuugauuc

SEQ ID NO: 1038052 - RNA, 23 nt, Human
ugagaaauuaagaguuguggaag

SEQ ID NO: 1038053 - RNA, 23 nt, Human
uguacuaaaguuacuucaggcac

SEQ ID NO: 1038054 - RNA, 18 nt, Human
ugucuccucauuugauau

SEQ ID NO: 1038055 - RNA, 20 nt, Human
aauuuccaaccccucagcuc

SEQ ID NO: 1038056 - RNA, 21 nt, Human
caccauaggacaaggagcaga

SEQ ID NO: 1038057 - RNA, 19 nt, Human
ggacaaggagcagaugcuu

SEQ ID NO: 1038058 - RNA, 20 nt, Human
uaaaauguccaaauguuacc

SEQ ID NO: 1038059 - RNA, 21 nt, Human
uaccgcaucuuccguaaaaug

SEQ ID NO: 1038060 - RNA, 18 nt, Human
ccccuguggcuccacguc

SEQ ID NO: 1038061 - RNA, 25 nt, Human
ccgggcccacguagagaggggcugg

SEQ ID NO: 1038062 - RNA, 22 nt, Human
cucccgggcccacguagagagg

SEQ ID NO: 1038063 - RNA, 23 nt, Human
cuugcugucauucaaagccaaac

SEQ ID NO: 1038064 - RNA, 20 nt, Human
gaguauaggguaccacacag

SEQ ID NO: 1038065 - RNA, 21 nt, Human
gcuggggcacgcccugcaggg

SEQ ID NO: 1038066 - RNA, 18 nt, Human
gggcuggggcacgcccug

SEQ ID NO: 1038067 - RNA, 18 nt, Human
guagagaggggcuggggc

SEQ ID NO: 1038068 - RNA, 23 nt, Human
gucauucaaagccaaaccaccgg

SEQ ID NO: 1038069 - RNA, 20 nt, Human
guggcuccacgucuuuaccc

SEQ ID NO: 1038070 - RNA, 21 nt, Human
uggcugaauaaacucagacac

SEQ ID NO: 1038071 - RNA, 21 nt, Human
ugucuuagucuucugggagua

SEQ ID NO: 1038072 - RNA, 25 nt, Human
aaaacaaagaacacuuuauucccuu

SEQ ID NO: 1038073 - RNA, 24 nt, Human
aacacagaccagagggguggccca

SEQ ID NO: 1038074 - RNA, 20 nt, Human
aacuagccaccccugugccc

SEQ ID NO: 1038075 - RNA, 18 nt, Human
aagcccuggcacugagaa

SEQ ID NO: 1038076 - RNA, 18 nt, Human
aagcugggguaugcagag

SEQ ID NO: 1038077 - RNA, 24 nt, Human
aaggagcccuggggaaggagggcg

SEQ ID NO: 1038078 - RNA, 23 nt, Human
aaggggcuggagugucugccuca

SEQ ID NO: 1038079 - RNA, 26 nt, Human
acacagaccagagggguggcccacca

SEQ ID NO: 1038080 - RNA, 21 nt, Human
acagugugggcaugagggucc

SEQ ID NO: 1038081 - RNA, 19 nt, Human
accaggcugugcaaagccc

SEQ ID NO: 1038082 - RNA, 22 nt, Human
accaggcugugcaaagcccagu

SEQ ID NO: 1038083 - RNA, 18 nt, Human
acccgcgcuggucccucg

SEQ ID NO: 1038084 - RNA, 19 nt, Human
agccaggccaggugcuggc

SEQ ID NO: 1038085 - RNA, 23 nt, Human
agcccuccucugccccaggcccc

SEQ ID NO: 1038086 - RNA, 21 nt, Human
agcugaucagcaaaauucagc

SEQ ID NO: 1038087 - RNA, 19 nt, Human
aggcagccugaggcccaga

SEQ ID NO: 1038088 - RNA, 27 nt, Human
aggcugugcaaagcccagucgguuccc

SEQ ID NO: 1038089 - RNA, 18 nt, Human
agggugcaggguccccag

SEQ ID NO: 1038090 - RNA, 26 nt, Human
agugcaguucucggccaaaacuaccc

SEQ ID NO: 1038091 - RNA, 23 nt, Human
aucacacuugaacuguccagacc

SEQ ID NO: 1038092 - RNA, 21 nt, Human
augguggggauggcggcagca

SEQ ID NO: 1038093 - RNA, 25 nt, Human
auuucuccuugccacagcuucgagg

SEQ ID NO: 1038094 - RNA, 26 nt, Human
cacuuuauucccuugacaguuucugu

SEQ ID NO: 1038095 - RNA, 22 nt, Human
cagagggguggcccaccacccc

SEQ ID NO: 1038096 - RNA, 21 nt, Human
cagcaaaauucagcccacguc

SEQ ID NO: 1038097 - RNA, 23 nt, Human
cagcgacaccaggcugugcaaag

SEQ ID NO: 1038098 - RNA, 22 nt, Human
caggguccccaguucacccucc

SEQ ID NO: 1038099 - RNA, 25 nt, Human
caguggcauguggagaagcuggggu

SEQ ID NO: 1038100 - RNA, 21 nt, Human
caucacacuugaacuguccag

SEQ ID NO: 1038101 - RNA, 23 nt, Human
caucagagacccccgggagccag

SEQ ID NO: 1038102 - RNA, 24 nt, Human
ccaacuagccaccccugugcccac

SEQ ID NO: 1038103 - RNA, 19 nt, Human
ccaggccaggugcuggcug

SEQ ID NO: 1038104 - RNA, 18 nt, Human
ccaggugcuggcugcugc

SEQ ID NO: 1038105 - RNA, 26 nt, Human
ccccaacuagccaccccugugcccac

SEQ ID NO: 1038106 - RNA, 21 nt, Human
ccccaggccccaacuagccac

SEQ ID NO: 1038107 - RNA, 21 nt, Human
ccccaggccccaacuagccac

SEQ ID NO: 1038108 - RNA, 18 nt, Human
cccccgggagccagccug

SEQ ID NO: 1038109 - RNA, 21 nt, Human
ccccugaggccccucgccggg

SEQ ID NO: 1038110 - RNA, 22 nt, Human
ccccugaggccccucgccgggc

SEQ ID NO: 1038111 - RNA, 20 nt, Human
cccugaggccccucgccggg

SEQ ID NO: 1038112 - RNA, 19 nt, Human
ccggcgaggccgccuuucc

SEQ ID NO: 1038113 - RNA, 23 nt, Human
cgacucaggggccaauuuauguc

SEQ ID NO: 1038114 - RNA, 21 nt, Human
cgagcgcgcggugccggggcu

SEQ ID NO: 1038115 - RNA, 24 nt, Human
cgcagcaucccagcaggaagcagg

SEQ ID NO: 1038116 - RNA, 18 nt, Human
cgggagccagccugcagg

SEQ ID NO: 1038117 - RNA, 19 nt, Human
cuaacacagaccagagggg

SEQ ID NO: 1038118 - RNA, 21 nt, Human
cuagacccgcgcuggucccuc

SEQ ID NO: 1038119 - RNA, 23 nt, Human
cucgcagcaucccagcaggaagc

SEQ ID NO: 1038120 - RNA, 18 nt, Human
cucgcuggauccccuccg

SEQ ID NO: 1038121 - RNA, 21 nt, Human
cuggagguguuccaggccugg

SEQ ID NO: 1038122 - RNA, 19 nt, Human
gaauaaucucugagcuucg

SEQ ID NO: 1038123 - RNA, 24 nt, Human
gaguggcagcagcugggguacccc

SEQ ID NO: 1038124 - RNA, 20 nt, Human
gcacugagaaugccugggag

SEQ ID NO: 1038125 - RNA, 22 nt, Human
gcagcagcuagacccgcgcugg

SEQ ID NO: 1038126 - RNA, 24 nt, Human
gcccacgucugauagacuccacag

SEQ ID NO: 1038127 - RNA, 21 nt, Human
gccgggcugggcgccgucggg

SEQ ID NO: 1038128 - RNA, 20 nt, Human
gccucaguuuccaggauaac

SEQ ID NO: 1038129 - RNA, 22 nt, Human
gcggcagcagcuagacccgcgc

SEQ ID NO: 1038130 - RNA, 18 nt, Human
gcuggagugucugccuca

SEQ ID NO: 1038131 - RNA, 20 nt, Human
gcugggcgccgucggggucc

SEQ ID NO: 1038132 - RNA, 21 nt, Human
ggaagcagggcaaucgacuca

SEQ ID NO: 1038133 - RNA, 19 nt, Human
ggaaggagggcggggugag

SEQ ID NO: 1038134 - RNA, 23 nt, Human
ggacaggcagccugaggcccaga

SEQ ID NO: 1038135 - RNA, 19 nt, Human
ggagggugcagggucccca

SEQ ID NO: 1038136 - RNA, 20 nt, Human
ggggauccuggcuggcggug

SEQ ID NO: 1038137 - RNA, 19 nt, Human
gggggucccauacuguucu

SEQ ID NO: 1038138 - RNA, 18 nt, Human
gguggcccaccacccccc

SEQ ID NO: 1038139 - RNA, 18 nt, Human
guccucccccugaggccc

SEQ ID NO: 1038140 - RNA, 18 nt, Human
gugcagcccuccucugcc

SEQ ID NO: 1038141 - RNA, 18 nt, Human
uacagugugggcaugagg

SEQ ID NO: 1038142 - RNA, 21 nt, Human
uauggacaggcagccugaggc

SEQ ID NO: 1038143 - RNA, 22 nt, Human
uauuucauagaugagaacacug

SEQ ID NO: 1038144 - RNA, 23 nt, Human
ucagccaggccaggugcuggcug

SEQ ID NO: 1038145 - RNA, 20 nt, Human
ucagggaugguggggauggc

SEQ ID NO: 1038146 - RNA, 20 nt, Human
uccauggcuucccggagggu

SEQ ID NO: 1038147 - RNA, 25 nt, Human
uccauggcuucccggagggugcagg

SEQ ID NO: 1038148 - RNA, 19 nt, Human
ucccagcaggaagcagggc

SEQ ID NO: 1038149 - RNA, 20 nt, Human
uccccgagcgcgcggugccg

SEQ ID NO: 1038150 - RNA, 23 nt, Human
ucccucggcggcagcugacucgc

SEQ ID NO: 1038151 - RNA, 19 nt, Human
uccuccucguccucccccu

SEQ ID NO: 1038152 - RNA, 19 nt, Human
uccuccuggcgcggagccc

SEQ ID NO: 1038153 - RNA, 22 nt, Human
uccuuauuucauagaugagaac

SEQ ID NO: 1038154 - RNA, 22 nt, Human
ucggcggcagcugacucgcugg

SEQ ID NO: 1038155 - RNA, 18 nt, Human
ucugcugagcccucugca

SEQ ID NO: 1038156 - RNA, 19 nt, Human
ugacucgcuggauccccuc

SEQ ID NO: 1038157 - RNA, 23 nt, Human
ugagaaggagcccuggggaagga

SEQ ID NO: 1038158 - RNA, 24 nt, Human
ugagaaggagcccuggggaaggag

SEQ ID NO: 1038159 - RNA, 22 nt, Human
ugaggccccucgccgggcuggg

SEQ ID NO: 1038160 - RNA, 21 nt, Human
ugcaauggccucagccaggcc

SEQ ID NO: 1038161 - RNA, 28 nt, Human
ugcagcccuccucugccccaggccccaa

SEQ ID NO: 1038162 - RNA, 20 nt, Human
ugccccaggccccaacuagc

SEQ ID NO: 1038163 - RNA, 21 nt, Human
ugccccaggccccaacuagcc

SEQ ID NO: 1038164 - RNA, 21 nt, Human
ugcugggaauaaucucugagc

SEQ ID NO: 1038165 - RNA, 21 nt, Human
uggacaggcagccugaggccc

SEQ ID NO: 1038166 - RNA, 21 nt, Human
uggagguguuccaggccuggu

SEQ ID NO: 1038167 - RNA, 23 nt, Human
uggagguguuccaggccugguga

SEQ ID NO: 1038168 - RNA, 25 nt, Human
ugguaggugggccggagacucaguu

SEQ ID NO: 1038169 - RNA, 20 nt, Human
uggugcagcccuccucugcc

SEQ ID NO: 1038170 - RNA, 23 nt, Human
uucauagaugagaacacugaggc

SEQ ID NO: 1038171 - RNA, 18 nt, Human
uuccaggccuggugaggg

SEQ ID NO: 1038172 - RNA, 21 nt, Human
uuccucugucccuaacacaga

SEQ ID NO: 1038173 - RNA, 19 nt, Human
uucucugcugagcccucug

SEQ ID NO: 1038174 - RNA, 19 nt, Human
uugcuccccacccuagucc

SEQ ID NO: 1038175 - RNA, 21 nt, Human
uuugcuggggagcagagggac

SEQ ID NO: 1038176 - RNA, 20 nt, Human
uuuuauggacaggcagccug

SEQ ID NO: 1038177 - RNA, 22 nt, Human
acggagcccugcagcccacacu

SEQ ID NO: 1038178 - RNA, 22 nt, Human
agaagucagcuccgugggaacc

SEQ ID NO: 1038179 - RNA, 18 nt, Human
agcuucucagugcugggg

SEQ ID NO: 1038180 - RNA, 19 nt, Human
caaacgccggguuuaaugu

SEQ ID NO: 1038181 - RNA, 22 nt, Human
cacaggaaggaaauguagcuuc

SEQ ID NO: 1038182 - RNA, 19 nt, Human
caccaggaggcagcccggg

SEQ ID NO: 1038183 - RNA, 23 nt, Human
cagggccaggccucaccugggga

SEQ ID NO: 1038184 - RNA, 21 nt, Human
caugguggggcagggccaggc

SEQ ID NO: 1038185 - RNA, 18 nt, Human
ccaggccucaccugggga

SEQ ID NO: 1038186 - RNA, 18 nt, Human
ccgcggcgcggaaccagc

SEQ ID NO: 1038187 - RNA, 20 nt, Human
ccugcagcccacacugcugu

SEQ ID NO: 1038188 - RNA, 22 nt, Human
cugcaccugucgcggcggccgc

SEQ ID NO: 1038189 - RNA, 22 nt, Human
cugcugcaccugucgcggcggc

SEQ ID NO: 1038190 - RNA, 22 nt, Human
gcccugcagcccacacugcugu

SEQ ID NO: 1038191 - RNA, 18 nt, Human
ggacaagggcagcagucc

SEQ ID NO: 1038192 - RNA, 22 nt, Human
ggacacuccucggggacaaggg

SEQ ID NO: 1038193 - RNA, 20 nt, Human
ggccaccaccaggaggcagc

SEQ ID NO: 1038194 - RNA, 20 nt, Human
guggcugcgcgggacacucc

SEQ ID NO: 1038195 - RNA, 24 nt, Human
ugaaacaaacgccggguuuaaugu

SEQ ID NO: 1038196 - RNA, 22 nt, Human
ugcaccugucgcggcggccgcg

SEQ ID NO: 1038197 - RNA, 22 nt, Human
uggcugcgcgggacacuccucg

SEQ ID NO: 1038198 - RNA, 22 nt, Human
uggggcagggccaggccucacc

SEQ ID NO: 1038199 - RNA, 21 nt, Human
cucucuggaucccuguaaaca

SEQ ID NO: 1038200 - RNA, 19 nt, Human
uaugaaaauggggaagggu

SEQ ID NO: 1038201 - RNA, 20 nt, Human
ucuauguagcuagugucuga

SEQ ID NO: 1038202 - RNA, 18 nt, Human
uguaaacauagucuaugu

SEQ ID NO: 1038203 - RNA, 20 nt, Human
uucccacauacacguauucc

SEQ ID NO: 1038204 - RNA, 22 nt, Human
uuuuuuuuuuuuuuuugcuuuu

SEQ ID NO: 1038205 - RNA, 24 nt, Human
uuuuuuuuuuuuuuuugcuuuuaa

SEQ ID NO: 1038206 - RNA, 22 nt, Human
aaaacagcagacuggguaaaag

SEQ ID NO: 1038207 - RNA, 23 nt, Human
aaaagcaaugaggaaggaaaugc

SEQ ID NO: 1038208 - RNA, 23 nt, Human
aaacagcagacuggguaaaagca

SEQ ID NO: 1038209 - RNA, 19 nt, Human
aggaaggaaaugcaaugaa

SEQ ID NO: 1038210 - RNA, 22 nt, Human
aggaaggaaaugcaaugaauaa

SEQ ID NO: 1038211 - RNA, 18 nt, Human
aggcaaaggaggugaggc

SEQ ID NO: 1038212 - RNA, 19 nt, Human
aggcaaaggaggugaggcu

SEQ ID NO: 1038213 - RNA, 24 nt, Human
caaaacagcagacuggguaaaagc

SEQ ID NO: 1038214 - RNA, 23 nt, Human
cagaaagcucaggcagaaaauca

SEQ ID NO: 1038215 - RNA, 23 nt, Human
cagaagauaaaauauguaggcac

SEQ ID NO: 1038216 - RNA, 18 nt, Human
ccaaaacagcagacuggg

SEQ ID NO: 1038217 - RNA, 20 nt, Human
gaacucagaaagcucaggca

SEQ ID NO: 1038218 - RNA, 21 nt, Human
gaacucagaaagcucaggcag

SEQ ID NO: 1038219 - RNA, 19 nt, Human
gagaggcaaaggaggugag

SEQ ID NO: 1038220 - RNA, 22 nt, Human
gcagacuggguaaaagcaauga

SEQ ID NO: 1038221 - RNA, 19 nt, Human
gcuucccaaaacagcagac

SEQ ID NO: 1038222 - RNA, 20 nt, Human
gcuucuuugguucagagagg

SEQ ID NO: 1038223 - RNA, 24 nt, Human
uaaaagcaaugaggaaggaaaugc

SEQ ID NO: 1038224 - RNA, 18 nt, Human
ucagugagaucagaagau

SEQ ID NO: 1038225 - RNA, 23 nt, Human
uccugucuaucuuccucuugagg

SEQ ID NO: 1038226 - RNA, 19 nt, Human
ugaggaaggaaaugcaaug

SEQ ID NO: 1038227 - RNA, 23 nt, Human
uugguucagagaggcaaaggagg

SEQ ID NO: 1038228 - RNA, 18 nt, Human
aaacagaagguguccucc

SEQ ID NO: 1038229 - RNA, 22 nt, Human
aacagcacgagcccaccaucca

SEQ ID NO: 1038230 - RNA, 21 nt, Human
aagguuggggggcuugggccu

SEQ ID NO: 1038231 - RNA, 21 nt, Human
accauccaugcuccucagagc

SEQ ID NO: 1038232 - RNA, 23 nt, Human
accgcccacugcacuacccaccc

SEQ ID NO: 1038233 - RNA, 23 nt, Human
accggcuccccaggcuggucucg

SEQ ID NO: 1038234 - RNA, 19 nt, Human
accucagugcccggcaccg

SEQ ID NO: 1038235 - RNA, 19 nt, Human
acucagcauccuccacccc

SEQ ID NO: 1038236 - RNA, 19 nt, Human
acugggcccucuagggcaa

SEQ ID NO: 1038237 - RNA, 22 nt, Human
agaaaacucuucagcacagccc

SEQ ID NO: 1038238 - RNA, 26 nt, Human
agaggccaaaguggauggugggcacc

SEQ ID NO: 1038239 - RNA, 19 nt, Human
agaugcucuuccaccucuc

SEQ ID NO: 1038240 - RNA, 19 nt, Human
agcaauacaguacccuggc

SEQ ID NO: 1038241 - RNA, 21 nt, Human
agcaccagcuggucagaggug

SEQ ID NO: 1038242 - RNA, 18 nt, Human
agcagaaggugcugaggg

SEQ ID NO: 1038243 - RNA, 20 nt, Human
agcaggagguggucagcugg

SEQ ID NO: 1038244 - RNA, 21 nt, Human
agcccugggccagaugcagcc

SEQ ID NO: 1038245 - RNA, 18 nt, Human
agcucaccugcaccugca

SEQ ID NO: 1038246 - RNA, 20 nt, Human
agcugcgcaccucagugccc

SEQ ID NO: 1038247 - RNA, 22 nt, Human
agcugggccucagcaaagcccg

SEQ ID NO: 1038248 - RNA, 21 nt, Human
aggaaggacagauugcucagg

SEQ ID NO: 1038249 - RNA, 21 nt, Human
aggacaggcaugucuggguca

SEQ ID NO: 1038250 - RNA, 23 nt, Human
aggagguccuggugggucagcac

SEQ ID NO: 1038251 - RNA, 19 nt, Human
aggcagccagagaguggga

SEQ ID NO: 1038252 - RNA, 23 nt, Human
aggcauggcuccgggccucaggg

SEQ ID NO: 1038253 - RNA, 25 nt, Human
aggccgaggccacauccagcgagaa

SEQ ID NO: 1038254 - RNA, 21 nt, Human
aggggggcucccaggacuaca

SEQ ID NO: 1038255 - RNA, 26 nt, Human
aggguugaccuggaugggcaggaggu

SEQ ID NO: 1038256 - RNA, 27 nt, Human
agguaccuggcacuguugagacucuug

SEQ ID NO: 1038257 - RNA, 21 nt, Human
aggugggcuguggugagggcc

SEQ ID NO: 1038258 - RNA, 19 nt, Human
aguccaggucauaggccug

SEQ ID NO: 1038259 - RNA, 21 nt, Human
agugcugugggucagugcuca

SEQ ID NO: 1038260 - RNA, 18 nt, Human
aguguccggcugcccucc

SEQ ID NO: 1038261 - RNA, 18 nt, Human
auaggccuggagaaccuc

SEQ ID NO: 1038262 - RNA, 22 nt, Human
auccagcgagaaggcauggcuc

SEQ ID NO: 1038263 - RNA, 19 nt, Human
caaagcccgaaucagcauu

SEQ ID NO: 1038264 - RNA, 20 nt, Human
caaccaagccaucacugaca

SEQ ID NO: 1038265 - RNA, 22 nt, Human
caagaugggcauggcagagccc

SEQ ID NO: 1038266 - RNA, 19 nt, Human
caaggcccgggagaguggg

SEQ ID NO: 1038267 - RNA, 24 nt, Human
cacacccaccacccucgggcacca

SEQ ID NO: 1038268 - RNA, 18 nt, Human
caccacucagcauccucc

SEQ ID NO: 1038269 - RNA, 27 nt, Human
caccagguagccggcacucggugggcu

SEQ ID NO: 1038270 - RNA, 25 nt, Human
cacccaggccgaggccacauccagc

SEQ ID NO: 1038271 - RNA, 26 nt, Human
caccccaccagcccccugcuucugca

SEQ ID NO: 1038272 - RNA, 23 nt, Human
caccggcuccccaggcuggucuc

SEQ ID NO: 1038273 - RNA, 19 nt, Human
caccugcaccugcagaucc

SEQ ID NO: 1038274 - RNA, 24 nt, Human
cacgcagcaccaucaccagguagc

SEQ ID NO: 1038275 - RNA, 24 nt, Human
cacgccaagucaaccucccauggc

SEQ ID NO: 1038276 - RNA, 22 nt, Human
cacugcacuacccacccauugc

SEQ ID NO: 1038277 - RNA, 23 nt, Human
cagaggcuucuguguguguucca

SEQ ID NO: 1038278 - RNA, 19 nt, Human
cagaguaaccauccaugcu

SEQ ID NO: 1038279 - RNA, 20 nt, Human
cagaugcucuuccaccucuc

SEQ ID NO: 1038280 - RNA, 18 nt, Human
cagcagaaggugcugagg

SEQ ID NO: 1038281 - RNA, 22 nt, Human
cagcagaaggugcugagggucc

SEQ ID NO: 1038282 - RNA, 18 nt, Human
cagcaggagaacucaguc

SEQ ID NO: 1038283 - RNA, 20 nt, Human
cagcaggagaacucagucac

SEQ ID NO: 1038284 - RNA, 20 nt, Human
cagcccccugcuucugcagc

SEQ ID NO: 1038285 - RNA, 18 nt, Human
cagccgccaccuacccca

SEQ ID NO: 1038286 - RNA, 20 nt, Human
cagccgccaccuaccccagg

SEQ ID NO: 1038287 - RNA, 21 nt, Human
cagcugggccucagcaaagcc

SEQ ID NO: 1038288 - RNA, 21 nt, Human
cagcugggucugcaugaagcu

SEQ ID NO: 1038289 - RNA, 20 nt, Human
cagcuggucccuucugaucu

SEQ ID NO: 1038290 - RNA, 22 nt, Human
caggaucaccauaaggcugcca

SEQ ID NO: 1038291 - RNA, 18 nt, Human
caggcaggcaaggcagcc

SEQ ID NO: 1038292 - RNA, 21 nt, Human
cagggccaucguggaugaagc

SEQ ID NO: 1038293 - RNA, 19 nt, Human
caggguuccuucauccuga

SEQ ID NO: 1038294 - RNA, 21 nt, Human
cagguucuccacgguguccuc

SEQ ID NO: 1038295 - RNA, 27 nt, Human
cauccuccaccccaccagcccccugcu

SEQ ID NO: 1038296 - RNA, 19 nt, Human
cauccugggugaagcccug

SEQ ID NO: 1038297 - RNA, 22 nt, Human
caugaagcugcgcaccucaguc

SEQ ID NO: 1038298 - RNA, 21 nt, Human
cauggaccacagguggcccuc

SEQ ID NO: 1038299 - RNA, 18 nt, Human
ccaccuaccccaggccac

SEQ ID NO: 1038300 - RNA, 21 nt, Human
ccacgaggacaggcaugucug

SEQ ID NO: 1038301 - RNA, 18 nt, Human
ccacugcacuacccaccc

SEQ ID NO: 1038302 - RNA, 19 nt, Human
ccagaugcagcccugugcu

SEQ ID NO: 1038303 - RNA, 23 nt, Human
ccaggcaggcaaggcagccagag

SEQ ID NO: 1038304 - RNA, 24 nt, Human
cccaccacucagcauccuccaccc

SEQ ID NO: 1038305 - RNA, 20 nt, Human
ccccaugccgggguggcucc

SEQ ID NO: 1038306 - RNA, 20 nt, Human
cccccugcuucugcagcucc

SEQ ID NO: 1038307 - RNA, 26 nt, Human
cccccugcuucugcagcucccugaac

SEQ ID NO: 1038308 - RNA, 25 nt, Human
cccgcaccacaugguagagcaggag

SEQ ID NO: 1038309 - RNA, 21 nt, Human
cccuccgcaggcaugagggca

SEQ ID NO: 1038310 - RNA, 19 nt, Human
cccugaccgucugacagca

SEQ ID NO: 1038311 - RNA, 18 nt, Human
ccgaggccacauccagcg

SEQ ID NO: 1038312 - RNA, 18 nt, Human
ccggccuccaacucccag

SEQ ID NO: 1038313 - RNA, 23 nt, Human
ccggcuccccaggcuggucucgg

SEQ ID NO: 1038314 - RNA, 27 nt, Human
ccguccagggccccucuggccuaaugg

SEQ ID NO: 1038315 - RNA, 19 nt, Human
ccucaggccccagaggcuu

SEQ ID NO: 1038316 - RNA, 23 nt, Human
ccuccgggugguucucuugaucu

SEQ ID NO: 1038317 - RNA, 19 nt, Human
ccuccguccagggccccuc

SEQ ID NO: 1038318 - RNA, 23 nt, Human
ccugaaccaccucacaguggaag

SEQ ID NO: 1038319 - RNA, 25 nt, Human
ccugugcugcgguggauuuguaugg

SEQ ID NO: 1038320 - RNA, 18 nt, Human
ccuugugcugggccagcu

SEQ ID NO: 1038321 - RNA, 20 nt, Human
ccuugugcugggccagcuuc

SEQ ID NO: 1038322 - RNA, 19 nt, Human
cgccaccuaccccaggcca

SEQ ID NO: 1038323 - RNA, 20 nt, Human
cggggggcuggccugcaguc

SEQ ID NO: 1038324 - RNA, 21 nt, Human
cggggggcuggccugcagucc

SEQ ID NO: 1038325 - RNA, 18 nt, Human
cucagcauccuccacccc

SEQ ID NO: 1038326 - RNA, 26 nt, Human
cucagggcgggagugcagguagagga

SEQ ID NO: 1038327 - RNA, 18 nt, Human
cuccaccccaccagcccc

SEQ ID NO: 1038328 - RNA, 25 nt, Human
cuccagcaccugcaggccaaggccc

SEQ ID NO: 1038329 - RNA, 20 nt, Human
cuccagguagcugaggacuc

SEQ ID NO: 1038330 - RNA, 18 nt, Human
cucccagcaggagaacuc

SEQ ID NO: 1038331 - RNA, 19 nt, Human
cuccgcaggcaugagggca

SEQ ID NO: 1038332 - RNA, 19 nt, Human
cuccuccuggcccaggaca

SEQ ID NO: 1038333 - RNA, 19 nt, Human
cuccugggcuaccuccagc

SEQ ID NO: 1038334 - RNA, 21 nt, Human
cugaggacuccucaguucgug

SEQ ID NO: 1038335 - RNA, 22 nt, Human
cugcaccugcagauccagguuc

SEQ ID NO: 1038336 - RNA, 23 nt, Human
cugcagccucagcuccuccuggc

SEQ ID NO: 1038337 - RNA, 24 nt, Human
cugcgguggauuuguauggccagc

SEQ ID NO: 1038338 - RNA, 24 nt, Human
cugcuggcggcacugccuccuggg

SEQ ID NO: 1038339 - RNA, 24 nt, Human
cugcuggcucugaggcucuggcug

SEQ ID NO: 1038340 - RNA, 20 nt, Human
cugcuggggucugcagccuc

SEQ ID NO: 1038341 - RNA, 19 nt, Human
cuggaggccccgcaccaca

SEQ ID NO: 1038342 - RNA, 22 nt, Human
cuggaggccccgcaccacaugg

SEQ ID NO: 1038343 - RNA, 21 nt, Human
cugggugaagcccugaccguc

SEQ ID NO: 1038344 - RNA, 24 nt, Human
cuuguccugugucccacgccaagu

SEQ ID NO: 1038345 - RNA, 19 nt, Human
gaacagcacgagcccacca

SEQ ID NO: 1038346 - RNA, 23 nt, Human
gaacucagucaccggcuccccag

SEQ ID NO: 1038347 - RNA, 21 nt, Human
gaagagccggccuagcuggag

SEQ ID NO: 1038348 - RNA, 24 nt, Human
gaaggugcugaggguccuggcuug

SEQ ID NO: 1038349 - RNA, 19 nt, Human
gacuucuaggggggcuccc

SEQ ID NO: 1038350 - RNA, 22 nt, Human
gagaaggagggcuucggguugg

SEQ ID NO: 1038351 - RNA, 20 nt, Human
gagacucuugaugaagagcu

SEQ ID NO: 1038352 - RNA, 22 nt, Human
gagagugggacccagagaagcc

SEQ ID NO: 1038353 - RNA, 20 nt, Human
gagccauggccacagucacc

SEQ ID NO: 1038354 - RNA, 23 nt, Human
gaggagucugcggccauugagag

SEQ ID NO: 1038355 - RNA, 19 nt, Human
gaggccagagggggugcca

SEQ ID NO: 1038356 - RNA, 22 nt, Human
gagggccuccugcuggguguuc

SEQ ID NO: 1038357 - RNA, 19 nt, Human
gaggguccuggcuugaggc

SEQ ID NO: 1038358 - RNA, 24 nt, Human
gcaccgcccacugcacuacccacc

SEQ ID NO: 1038359 - RNA, 18 nt, Human
gcacugccuccugggcua

SEQ ID NO: 1038360 - RNA, 21 nt, Human
gcagaaaacucuucagcacag

SEQ ID NO: 1038361 - RNA, 18 nt, Human
gcagcaggagguggucag

SEQ ID NO: 1038362 - RNA, 22 nt, Human
gcaggccaagucucccagugcu

SEQ ID NO: 1038363 - RNA, 23 nt, Human
gccagaugcagcccugugcugcg

SEQ ID NO: 1038364 - RNA, 18 nt, Human
gcccugcuccacauccug

SEQ ID NO: 1038365 - RNA, 19 nt, Human
gcccugggccagaugcagc

SEQ ID NO: 1038366 - RNA, 19 nt, Human
gccugcugccuggaaggcc

SEQ ID NO: 1038367 - RNA, 18 nt, Human
gcugcauggaggcaaccc

SEQ ID NO: 1038368 - RNA, 22 nt, Human
gcugggccagcuucaguggggc

SEQ ID NO: 1038369 - RNA, 24 nt, Human
ggaagagccggccuagcuggaggc

SEQ ID NO: 1038370 - RNA, 20 nt, Human
ggacacacccaccacccucg

SEQ ID NO: 1038371 - RNA, 23 nt, Human
ggacccagagaagcccagggcca

SEQ ID NO: 1038372 - RNA, 21 nt, Human
ggaggcauucagaaacccauu

SEQ ID NO: 1038373 - RNA, 24 nt, Human
ggcaaccaagccaucacugacacc

SEQ ID NO: 1038374 - RNA, 21 nt, Human
ggcauggcuccgggccucagg

SEQ ID NO: 1038375 - RNA, 24 nt, Human
gggacuucuaggggggcucccagg

SEQ ID NO: 1038376 - RNA, 21 nt, Human
gggagaguggggaaguagggg

SEQ ID NO: 1038377 - RNA, 23 nt, Human
gggcuugggccugccuccuccag

SEQ ID NO: 1038378 - RNA, 20 nt, Human
ggggagaaauaugguggagc

SEQ ID NO: 1038379 - RNA, 22 nt, Human
ggggggugggcaguugaagagg

SEQ ID NO: 1038380 - RNA, 23 nt, Human
ggggggugggcaguugaagaggg

SEQ ID NO: 1038381 - RNA, 19 nt, Human
gggggucagaggcuggagg

SEQ ID NO: 1038382 - RNA, 19 nt, Human
ggggugccaaggagcugga

SEQ ID NO: 1038383 - RNA, 18 nt, Human
gguagagcaggagcuggg

SEQ ID NO: 1038384 - RNA, 21 nt, Human
ggucagagguguccucagggc

SEQ ID NO: 1038385 - RNA, 21 nt, Human
guagaauuucugcuggggucu

SEQ ID NO: 1038386 - RNA, 20 nt, Human
gucugcaugaagcugcgcac

SEQ ID NO: 1038387 - RNA, 20 nt, Human
gugaagcacuugcuucuggg

SEQ ID NO: 1038388 - RNA, 19 nt, Human
gugaagcccugaccgucug

SEQ ID NO: 1038389 - RNA, 18 nt, Human
gugcugggccagcuucag

SEQ ID NO: 1038390 - RNA, 20 nt, Human
guggaacgccugugugaccc

SEQ ID NO: 1038391 - RNA, 24 nt, Human
guggaacgccugugugacccacca

SEQ ID NO: 1038392 - RNA, 19 nt, Human
uaaugguguacaccagguc

SEQ ID NO: 1038393 - RNA, 23 nt, Human
uacaguacccuggcccuucucaa

SEQ ID NO: 1038394 - RNA, 23 nt, Human
uaccccaggccacguggaagacu

SEQ ID NO: 1038395 - RNA, 19 nt, Human
uacccuggcccuucucaac

SEQ ID NO: 1038396 - RNA, 21 nt, Human
uaccucacguggcccugcucc

SEQ ID NO: 1038397 - RNA, 21 nt, Human
uacugguccauggagauuucu

SEQ ID NO: 1038398 - RNA, 23 nt, Human
uagaauuucugcuggggucugca

SEQ ID NO: 1038399 - RNA, 24 nt, Human
uagaauuucugcuggggucugcag

SEQ ID NO: 1038400 - RNA, 22 nt, Human
ucaccugcaccugcagauccag

SEQ ID NO: 1038401 - RNA, 23 nt, Human
ucacgucagagaggccaaagugg

SEQ ID NO: 1038402 - RNA, 21 nt, Human
ucagcaaagcccgaaucagca

SEQ ID NO: 1038403 - RNA, 19 nt, Human
ucagcaccagcugggccuc

SEQ ID NO: 1038404 - RNA, 20 nt, Human
ucagcauccuccaccccacc

SEQ ID NO: 1038405 - RNA, 24 nt, Human
ucagcauccuccaccccaccagcc

SEQ ID NO: 1038406 - RNA, 26 nt, Human
ucagcauccuccaccccaccagcccc

SEQ ID NO: 1038407 - RNA, 24 nt, Human
ucaguggggcuacugggcccucua

SEQ ID NO: 1038408 - RNA, 19 nt, Human
ucaguguccggcugcccuc

SEQ ID NO: 1038409 - RNA, 23 nt, Human
uccagcaccugcaggccaaggcc

SEQ ID NO: 1038410 - RNA, 27 nt, Human
ucccaacaaagagcccauaggguaccc

SEQ ID NO: 1038411 - RNA, 23 nt, Human
ucccugagugaaguucaccaggu

SEQ ID NO: 1038412 - RNA, 23 nt, Human
ucccuucugaucucagcugccuc

SEQ ID NO: 1038413 - RNA, 18 nt, Human
uccucagggccaucgugg

SEQ ID NO: 1038414 - RNA, 19 nt, Human
uccucgguguagugcugug

SEQ ID NO: 1038415 - RNA, 19 nt, Human
uccuugggcccagaguaac

SEQ ID NO: 1038416 - RNA, 18 nt, Human
uccuuuuucugccccucu

SEQ ID NO: 1038417 - RNA, 21 nt, Human
ucugcacgggguccaggcugg

SEQ ID NO: 1038418 - RNA, 20 nt, Human
ucugccccucuuacacucuc

SEQ ID NO: 1038419 - RNA, 18 nt, Human
ucugucuuggagguaguc

SEQ ID NO: 1038420 - RNA, 19 nt, Human
ugaaguccccaugccagcc

SEQ ID NO: 1038421 - RNA, 21 nt, Human
ugaauguugauguggaugcug

SEQ ID NO: 1038422 - RNA, 19 nt, Human
ugacagcaucgugcccugu

SEQ ID NO: 1038423 - RNA, 18 nt, Human
ugacaggguugaccugga

SEQ ID NO: 1038424 - RNA, 24 nt, Human
ugaccucauagagguaccuggcac

SEQ ID NO: 1038425 - RNA, 24 nt, Human
ugaccuggaugggcaggaggucug

SEQ ID NO: 1038426 - RNA, 21 nt, Human
ugagaaaacgaugucugcugg

SEQ ID NO: 1038427 - RNA, 23 nt, Human
ugagaacagcacgagcccaccau

SEQ ID NO: 1038428 - RNA, 22 nt, Human
ugaggacuccucaguucgugug

SEQ ID NO: 1038429 - RNA, 20 nt, Human
ugaggggcugcaguugcaag

SEQ ID NO: 1038430 - RNA, 21 nt, Human
ugagugaaguucaccaggucc

SEQ ID NO: 1038431 - RNA, 22 nt, Human
ugauguggggugggucauugaa

SEQ ID NO: 1038432 - RNA, 25 nt, Human
ugauguggggugggucauugacagg

SEQ ID NO: 1038433 - RNA, 26 nt, Human
ugcaccugcagauccagguucuccac

SEQ ID NO: 1038434 - RNA, 22 nt, Human
ugcacgggguccaggcugggug

SEQ ID NO: 1038435 - RNA, 24 nt, Human
ugcagguacuggaucagaugcucu

SEQ ID NO: 1038436 - RNA, 22 nt, Human
ugccaaggagcuggaaggcgag

SEQ ID NO: 1038437 - RNA, 21 nt, Human
ugccaggagaaggagggcuuc

SEQ ID NO: 1038438 - RNA, 20 nt, Human
ugccccucuuacacucucug

SEQ ID NO: 1038439 - RNA, 25 nt, Human
ugccuggaaggccaagggugccugc

SEQ ID NO: 1038440 - RNA, 23 nt, Human
ugcucuuccaccucucuccagca

SEQ ID NO: 1038441 - RNA, 20 nt, Human
ugcugaccuuguggggcugu

SEQ ID NO: 1038442 - RNA, 20 nt, Human
uggagaacugcagcugcagg

SEQ ID NO: 1038443 - RNA, 21 nt, Human
uggaucagaugcucuuccacc

SEQ ID NO: 1038444 - RNA, 18 nt, Human
uggauggagaagguacag

SEQ ID NO: 1038445 - RNA, 25 nt, Human
uggcccaggacaagccugaccugca

SEQ ID NO: 1038446 - RNA, 23 nt, Human
uggggaggccagagggggugcca

SEQ ID NO: 1038447 - RNA, 19 nt, Human
ugggucagcaccagcuggg

SEQ ID NO: 1038448 - RNA, 18 nt, Human
ugguagagcaggagcugg

SEQ ID NO: 1038449 - RNA, 19 nt, Human
ugguagagcaggagcuggg

SEQ ID NO: 1038450 - RNA, 18 nt, Human
uggucagagguguccuca

SEQ ID NO: 1038451 - RNA, 20 nt, Human
uggugaguguaaacuccagg

SEQ ID NO: 1038452 - RNA, 21 nt, Human
ugguucucuugaucuccuuuu

SEQ ID NO: 1038453 - RNA, 25 nt, Human
ugugagaacagcacgagcccaccau

SEQ ID NO: 1038454 - RNA, 20 nt, Human
ugugggaagaugaugugggg

SEQ ID NO: 1038455 - RNA, 18 nt, Human
uguggggugggucauuga

SEQ ID NO: 1038456 - RNA, 22 nt, Human
uucaguggggcuacugggcccu

SEQ ID NO: 1038457 - RNA, 18 nt, Human
uucugagugugcaguggc

SEQ ID NO: 1038458 - RNA, 24 nt, Human
uucugagugugcaguggcuccagc

SEQ ID NO: 1038459 - RNA, 23 nt, Human
uugauguggaugcugaccuugug

SEQ ID NO: 1038460 - RNA, 22 nt, Human
uugcugggcugcuuaauggugu

SEQ ID NO: 1038461 - RNA, 22 nt, Human
aaaaaaaaaagaaagaaagaaa

SEQ ID NO: 1038462 - RNA, 23 nt, Human
aaagaaagaaaaagaaaaaagcg

SEQ ID NO: 1038463 - RNA, 21 nt, Human
aagaaaaaaaaaaagaaagaa

SEQ ID NO: 1038464 - RNA, 23 nt, Human
aagaaagaaaaagaaaaaagcgg

SEQ ID NO: 1038465 - RNA, 21 nt, Human
aagcggcuucuugggagagac

SEQ ID NO: 1038466 - RNA, 19 nt, Human
acuugagcucucccaggca

SEQ ID NO: 1038467 - RNA, 21 nt, Human
agaaaaaaaaaaagaaagaaa

SEQ ID NO: 1038468 - RNA, 24 nt, Human
agaaaaaaaaaaagaaagaaagaa

SEQ ID NO: 1038469 - RNA, 25 nt, Human
agaaaaagaaaaaagcggcuucuug

SEQ ID NO: 1038470 - RNA, 19 nt, Human
agagccugcggcagcugga

SEQ ID NO: 1038471 - RNA, 19 nt, Human
agccccagcagcccuccug

SEQ ID NO: 1038472 - RNA, 19 nt, Human
agguuucaggccacugagc

SEQ ID NO: 1038473 - RNA, 19 nt, Human
aguucauucauuguaucug

SEQ ID NO: 1038474 - RNA, 21 nt, Human
aguuccugacgacugccuuga

SEQ ID NO: 1038475 - RNA, 21 nt, Human
cagcuggacccaucugguagc

SEQ ID NO: 1038476 - RNA, 21 nt, Human
caguucauucauuguaucugc

SEQ ID NO: 1038477 - RNA, 19 nt, Human
ccaccugcucccuuccagg

SEQ ID NO: 1038478 - RNA, 25 nt, Human
ccacugagcugagcccacaucaugu

SEQ ID NO: 1038479 - RNA, 22 nt, Human
ccagcagcccuccuggccuccu

SEQ ID NO: 1038480 - RNA, 22 nt, Human
ccccagcagcccuccuggccuc

SEQ ID NO: 1038481 - RNA, 22 nt, Human
ccccccggauccugaguuccug

SEQ ID NO: 1038482 - RNA, 21 nt, Human
cccccggauccugaguuccug

SEQ ID NO: 1038483 - RNA, 18 nt, Human
ccccugggcagagaagcc

SEQ ID NO: 1038484 - RNA, 19 nt, Human
cccuuagccccagcagccc

SEQ ID NO: 1038485 - RNA, 19 nt, Human
ccuuagaccccuuagcccc

SEQ ID NO: 1038486 - RNA, 22 nt, Human
ccuuagaccccuuagccccagc

SEQ ID NO: 1038487 - RNA, 19 nt, Human
cgauuucuguaucuuccuu

SEQ ID NO: 1038488 - RNA, 18 nt, Human
cuccucgguucuggcccc

SEQ ID NO: 1038489 - RNA, 21 nt, Human
cugcucccuuccaggagcauu

SEQ ID NO: 1038490 - RNA, 24 nt, Human
cuuagccccagcagcccuccuggc

SEQ ID NO: 1038491 - RNA, 22 nt, Human
gaccccuuagccccagcagccc

SEQ ID NO: 1038492 - RNA, 20 nt, Human
gagacucuaaaaccugagag

SEQ ID NO: 1038493 - RNA, 22 nt, Human
gccgugaagaccccccggaucc

SEQ ID NO: 1038494 - RNA, 20 nt, Human
ggacagugccuggagagccu

SEQ ID NO: 1038495 - RNA, 21 nt, Human
ggagagacucuaaaaccugag

SEQ ID NO: 1038496 - RNA, 20 nt, Human
gggcagagaagccgugaaga

SEQ ID NO: 1038497 - RNA, 21 nt, Human
uagaccccuuagccccagcag

SEQ ID NO: 1038498 - RNA, 24 nt, Human
uagcucuggccuuagcacacgccc

SEQ ID NO: 1038499 - RNA, 24 nt, Human
uaucugcuaagaaaaaaaaaaaga

SEQ ID NO: 1038500 - RNA, 19 nt, Human
uccucgguucuggccccug

SEQ ID NO: 1038501 - RNA, 20 nt, Human
uccuggccuccucgguucug

SEQ ID NO: 1038502 - RNA, 24 nt, Human
uccuggccuccucgguucuggccc

SEQ ID NO: 1038503 - RNA, 26 nt, Human
uccuuagaccccuuagccccagcagc

SEQ ID NO: 1038504 - RNA, 21 nt, Human
ucucccaggcaguaacagcug

SEQ ID NO: 1038505 - RNA, 20 nt, Human
ucugcuaagaaaaaaaaaaa

SEQ ID NO: 1038506 - RNA, 23 nt, Human
ucugcuaagaaaaaaaaaaagaa

SEQ ID NO: 1038507 - RNA, 25 nt, Human
ucugcuaagaaaaaaaaaaagaaag

SEQ ID NO: 1038508 - RNA, 21 nt, Human
ugaagaccccccggauccuga

SEQ ID NO: 1038509 - RNA, 18 nt, Human
ugaguuccugacgacugc

SEQ ID NO: 1038510 - RNA, 23 nt, Human
uggcuuaggauggggcuucucug

SEQ ID NO: 1038511 - RNA, 21 nt, Human
uuagccccagcagcccuccug

SEQ ID NO: 1038512 - RNA, 26 nt, Human
uuccuuuuccuccucuuuaugggaga

SEQ ID NO: 1038513 - RNA, 28 nt, Human
uuccuuuuccuccucuuuaugggagaac

SEQ ID NO: 1038514 - RNA, 22 nt, Human
aaacaaaguuacacagaagcaa

SEQ ID NO: 1038515 - RNA, 23 nt, Human
aaacugaauuccuuugucaguaa

SEQ ID NO: 1038516 - RNA, 21 nt, Human
accagauuccacaaaacugaa

SEQ ID NO: 1038517 - RNA, 19 nt, Human
agcugcugcuuuugugguu

SEQ ID NO: 1038518 - RNA, 21 nt, Human
aguagaagucauaaaaauacc

SEQ ID NO: 1038519 - RNA, 23 nt, Human
auagugcaaacaccagauuccac

SEQ ID NO: 1038520 - RNA, 19 nt, Human
caugaguggacccaucagg

SEQ ID NO: 1038521 - RNA, 19 nt, Human
cccgcgacugcggcgaggg

SEQ ID NO: 1038522 - RNA, 19 nt, Human
cccucaggcaccgacgccg

SEQ ID NO: 1038523 - RNA, 20 nt, Human
ccugagacauacuagaaaau

SEQ ID NO: 1038524 - RNA, 20 nt, Human
gacugcggcgagggcgacgc

SEQ ID NO: 1038525 - RNA, 22 nt, Human
gcggcgagggcgacgcggacac

SEQ ID NO: 1038526 - RNA, 18 nt, Human
gcuggaaaauuucccacg

SEQ ID NO: 1038527 - RNA, 22 nt, Human
uaaaaauaccugagacauacua

SEQ ID NO: 1038528 - RNA, 21 nt, Human
uaaccuauagugcaaacacca

SEQ ID NO: 1038529 - RNA, 24 nt, Human
ucacuaacauuucauaaucauuuc

SEQ ID NO: 1038530 - RNA, 25 nt, Human
ucccccguggacaugaguaaauuaa

SEQ ID NO: 1038531 - RNA, 20 nt, Human
ucuccuuucucagcugaggc

SEQ ID NO: 1038532 - RNA, 19 nt, Human
ugaguggacccaucagugg

SEQ ID NO: 1038533 - RNA, 20 nt, Human
ugcaugucagcuacacguuc

SEQ ID NO: 1038534 - RNA, 19 nt, Human
ugcccucuaaacguccccc

SEQ ID NO: 1038535 - RNA, 21 nt, Human
uggcaacucuuaaccuauagu

SEQ ID NO: 1038536 - RNA, 21 nt, Human
uuaaauggcaacucuuaaccu

SEQ ID NO: 1038537 - RNA, 25 nt, Human
uuaaguuucucaaggcauugauugc

SEQ ID NO: 1038538 - RNA, 21 nt, Human
uuaguaguagcugcugcuuuu

SEQ ID NO: 1038539 - RNA, 26 nt, Human
uuaguuaaaauuaaguaaugauucca

SEQ ID NO: 1038540 - RNA, 22 nt, Human
uucucgaugaauaauauuuccc

SEQ ID NO: 1038541 - RNA, 18 nt, Human
acuccgaagcagcaccgg

SEQ ID NO: 1038542 - RNA, 22 nt, Human
agccccugccagcuccgcuucc

SEQ ID NO: 1038543 - RNA, 21 nt, Human
caccgggccgcuccggucccc

SEQ ID NO: 1038544 - RNA, 23 nt, Human
cagcaccgggccgcuccgguccc

SEQ ID NO: 1038545 - RNA, 19 nt, Human
cagccccugccagcuccgc

SEQ ID NO: 1038546 - RNA, 18 nt, Human
ccagccccugccagcucc

SEQ ID NO: 1038547 - RNA, 22 nt, Human
ccgcccuccgcagccuggacuu

SEQ ID NO: 1038548 - RNA, 19 nt, Human
ccgcugugcgccucccgcc

SEQ ID NO: 1038549 - RNA, 19 nt, Human
ccgggccgcuccggucccc

SEQ ID NO: 1038550 - RNA, 18 nt, Human
ccgguccccgccagcccc

SEQ ID NO: 1038551 - RNA, 22 nt, Human
cgccgacucugacccagggacc

SEQ ID NO: 1038552 - RNA, 18 nt, Human
cggcugaggggagucggg

SEQ ID NO: 1038553 - RNA, 20 nt, Human
cggggggucgggggagaggg

SEQ ID NO: 1038554 - RNA, 22 nt, Human
cgggguucgguggguccuggga

SEQ ID NO: 1038555 - RNA, 22 nt, Human
gccagccccugccagcuccgcu

SEQ ID NO: 1038556 - RNA, 23 nt, Human
gcgccucccgccgacucugaccc

SEQ ID NO: 1038557 - RNA, 20 nt, Human
ggaaaggaagggggacgggg

SEQ ID NO: 1038558 - RNA, 20 nt, Human
ggagucggggggucggggga

SEQ ID NO: 1038559 - RNA, 20 nt, Human
ggaugggagggaacgugggc

SEQ ID NO: 1038560 - RNA, 18 nt, Human
gggacggggaugggaggg

SEQ ID NO: 1038561 - RNA, 19 nt, Human
ggggaugggagggaacgug

SEQ ID NO: 1038562 - RNA, 20 nt, Human
ggggaugggagggaacgugg

SEQ ID NO: 1038563 - RNA, 25 nt, Human
uccccgccagccccugccagcuccc

SEQ ID NO: 1038564 - RNA, 20 nt, Human
ucccgggucuccggaaagga

SEQ ID NO: 1038565 - RNA, 25 nt, Human
uccgcagccuggacuuuccuggccu

SEQ ID NO: 1038566 - RNA, 21 nt, Human
uccugggacggggaugggagg

SEQ ID NO: 1038567 - RNA, 19 nt, Human
ucuccggggucccucggcc

SEQ ID NO: 1038568 - RNA, 23 nt, Human
ugacccagggacccggagaccaa

SEQ ID NO: 1038569 - RNA, 22 nt, Human
ugcccggaggaggagaacggag

SEQ ID NO: 1038570 - RNA, 20 nt, Human
ugccgagagccuggcgcccc

SEQ ID NO: 1038571 - RNA, 18 nt, Human
aaaaccuuccaggcuuca

SEQ ID NO: 1038572 - RNA, 22 nt, Human
acagcugacuuaucuguccuuu

SEQ ID NO: 1038573 - RNA, 20 nt, Human
agaaaaucaucugacuccuu

SEQ ID NO: 1038574 - RNA, 24 nt, Human
aucaaagaaaaccuuccaggcuuc

SEQ ID NO: 1038575 - RNA, 23 nt, Human
cacuccaccauuagauuucacuu

SEQ ID NO: 1038576 - RNA, 22 nt, Human
cauaacgcauagcaaauucauc

SEQ ID NO: 1038577 - RNA, 25 nt, Human
ccacucaagguccucacuucuacaa

SEQ ID NO: 1038578 - RNA, 22 nt, Human
cuguaauaauggucugagucuu

SEQ ID NO: 1038579 - RNA, 18 nt, Human
gaagcaucaucaaagaaa

SEQ ID NO: 1038580 - RNA, 19 nt, Human
ggaacagauucucauguaa

SEQ ID NO: 1038581 - RNA, 19 nt, Human
uaaauggauucaauuccau

SEQ ID NO: 1038582 - RNA, 18 nt, Human
uaacgcauagcaaauuca

SEQ ID NO: 1038583 - RNA, 21 nt, Human
uaacgcauagcaaauucauca

SEQ ID NO: 1038584 - RNA, 22 nt, Human
uacucugacuuugauucgaucu

SEQ ID NO: 1038585 - RNA, 22 nt, Human
uaucuguccuuuucucuaaguu

SEQ ID NO: 1038586 - RNA, 23 nt, Human
uaugauauggagcaaccuucucu

SEQ ID NO: 1038587 - RNA, 20 nt, Human
uauggccccagauacagcug

SEQ ID NO: 1038588 - RNA, 22 nt, Human
ucuguccuuuucucuaaguugu

SEQ ID NO: 1038589 - RNA, 20 nt, Human
ugaaauguugcuugacucug

SEQ ID NO: 1038590 - RNA, 18 nt, Human
ugaauaugauauggagca

SEQ ID NO: 1038591 - RNA, 20 nt, Human
ugacuucugggauuuucacu

SEQ ID NO: 1038592 - RNA, 19 nt, Human
uggucugagucuugucuuc

SEQ ID NO: 1038593 - RNA, 22 nt, Human
uguaccagacauccauuucucc

SEQ ID NO: 1038594 - RNA, 19 nt, Human
uuagaacucuuuucugcug

SEQ ID NO: 1038595 - RNA, 23 nt, Human
uucacuccaccauuagauuucac

SEQ ID NO: 1038596 - RNA, 19 nt, Human
uucucauguaaacauguau

SEQ ID NO: 1038597 - RNA, 19 nt, Human
uucuccuuuuaucuccaca

SEQ ID NO: 1038598 - RNA, 25 nt, Human
uucucuaaguuguaccagacaucca

SEQ ID NO: 1038599 - RNA, 23 nt, Human
uuuucacuccaccauuagauuuc

SEQ ID NO: 1038600 - RNA, 18 nt, Human
aaaggagaggagagagua

SEQ ID NO: 1038601 - RNA, 20 nt, Human
aagaaggacugaauuaaaug

SEQ ID NO: 1038602 - RNA, 19 nt, Human
acaguggaaagugccaaca

SEQ ID NO: 1038603 - RNA, 20 nt, Human
agaaagaaauucuccgccga

SEQ ID NO: 1038604 - RNA, 21 nt, Human
agguggcuggccuaccagcca

SEQ ID NO: 1038605 - RNA, 22 nt, Human
augcagauuagagucagggcag

SEQ ID NO: 1038606 - RNA, 19 nt, Human
cagaccacggcgaggggug

SEQ ID NO: 1038607 - RNA, 19 nt, Human
ccccgcuuccucacagucc

SEQ ID NO: 1038608 - RNA, 23 nt, Human
ccccgcuuccucacaguccucca

SEQ ID NO: 1038609 - RNA, 23 nt, Human
cucccccaacgacacagggaccu

SEQ ID NO: 1038610 - RNA, 19 nt, Human
gaacaguggaaagugccaa

SEQ ID NO: 1038611 - RNA, 23 nt, Human
gagaaagaaauucuccgccgaaa

SEQ ID NO: 1038612 - RNA, 18 nt, Human
gccagugguugcuccugg

SEQ ID NO: 1038613 - RNA, 18 nt, Human
guggaaagugccaacaga

SEQ ID NO: 1038614 - RNA, 18 nt, Human
uaaaggcagcgaguggcu

SEQ ID NO: 1038615 - RNA, 22 nt, Human
uaaggcgagaaagaaauucucc

SEQ ID NO: 1038616 - RNA, 25 nt, Human
uagagucagggcaggguaagguggc

SEQ ID NO: 1038617 - RNA, 20 nt, Human
uagcuaaggcgagaaagaaa

SEQ ID NO: 1038618 - RNA, 18 nt, Human
uaugguuacaggaagggu

SEQ ID NO: 1038619 - RNA, 18 nt, Human
ucccccaacgacacaggg

SEQ ID NO: 1038620 - RNA, 20 nt, Human
ucccccaacgacacagggac

SEQ ID NO: 1038621 - RNA, 26 nt, Human
ucuuucaguuaugguuacaggaaggg

SEQ ID NO: 1038622 - RNA, 22 nt, Human
uggaacaguggaaagugccaac

SEQ ID NO: 1038623 - RNA, 18 nt, Human
ugguagggccagugguug

SEQ ID NO: 1038624 - RNA, 18 nt, Human
uguuaggggcuucucggg

SEQ ID NO: 1038625 - RNA, 21 nt, Human
uucaguuaugguuacaggaag

SEQ ID NO: 1038626 - RNA, 18 nt, Human
uuccuucccccgcuuccu

SEQ ID NO: 1038627 - RNA, 26 nt, Human
uuccuucccccgcuuccucacagucc

SEQ ID NO: 1038628 - RNA, 22 nt, Human
caccucugcccugaggauauuu

SEQ ID NO: 1038629 - RNA, 21 nt, Human
ccuucuuucucuucucuuugc

SEQ ID NO: 1038630 - RNA, 22 nt, Human
ccuucuuucucuucucuuugca

SEQ ID NO: 1038631 - RNA, 21 nt, Human
cugcuggccacaggugaacgg

SEQ ID NO: 1038632 - RNA, 19 nt, Human
gaggauauuuggagugcaa

SEQ ID NO: 1038633 - RNA, 21 nt, Human
gccugcuucucacuuaacacc

SEQ ID NO: 1038634 - RNA, 23 nt, Human
ucucuucucuuugcauaccuucu

SEQ ID NO: 1038635 - RNA, 26 nt, Human
ucuucugcugcuggccacaggugaac

SEQ ID NO: 1038636 - RNA, 24 nt, Human
ucuuucucuucucuuugcauaccu

SEQ ID NO: 1038637 - RNA, 18 nt, Human
gaaagccagcgacgagug

SEQ ID NO: 1038638 - RNA, 22 nt, Human
uccacagcagggcagggaaagc

SEQ ID NO: 1038639 - RNA, 27 nt, Human
aaaaauaaaaaacaccuuucuagagag

SEQ ID NO: 1038640 - RNA, 25 nt, Human
aaaagagcaggacaauaaacaggca

SEQ ID NO: 1038641 - RNA, 21 nt, Human
aaacaggcaaauacacaaacc

SEQ ID NO: 1038642 - RNA, 25 nt, Human
aaacaggcaaauacacaaacccugg

SEQ ID NO: 1038643 - RNA, 18 nt, Human
aacccuggagcaaagccg

SEQ ID NO: 1038644 - RNA, 20 nt, Human
aagcaucuuuguugcagccc

SEQ ID NO: 1038645 - RNA, 18 nt, Human
acacacacacacacacac

SEQ ID NO: 1038646 - RNA, 21 nt, Human
acacacacacacacacgcaca

SEQ ID NO: 1038647 - RNA, 21 nt, Human
acacacacacacacgcacagu

SEQ ID NO: 1038648 - RNA, 21 nt, Human
acacacacacacacgcacagu

SEQ ID NO: 1038649 - RNA, 21 nt, Human
acacgcacacacgugcacaca

SEQ ID NO: 1038650 - RNA, 19 nt, Human
acagagcagaggaacaaca

SEQ ID NO: 1038651 - RNA, 25 nt, Human
acaggcaaauacacaaacccuggag

SEQ ID NO: 1038652 - RNA, 23 nt, Human
acgcacacacgugcacacacaca

SEQ ID NO: 1038653 - RNA, 20 nt, Human
agacugacuucaaauauagu

SEQ ID NO: 1038654 - RNA, 23 nt, Human
aggaacaacaaaaaagcacaaag

SEQ ID NO: 1038655 - RNA, 19 nt, Human
aggcaaauacacaaacccu

SEQ ID NO: 1038656 - RNA, 21 nt, Human
aguggcaagcaccuggcagau

SEQ ID NO: 1038657 - RNA, 25 nt, Human
aguugucgaaaacccugugugagcc

SEQ ID NO: 1038658 - RNA, 19 nt, Human
caaaaaaaaaaagagcagg

SEQ ID NO: 1038659 - RNA, 24 nt, Human
caaaaaaaaaaagagcaggacaau

SEQ ID NO: 1038660 - RNA, 24 nt, Human
caaacccuggagcaaagccaggaa

SEQ ID NO: 1038661 - RNA, 20 nt, Human
cacacacacacacacacaca

SEQ ID NO: 1038662 - RNA, 26 nt, Human
cacacacacacacacacacacgcaca

SEQ ID NO: 1038663 - RNA, 31 nt, Human
cacacacgugcacacgcacacacgugcacag

SEQ ID NO: 1038664 - RNA, 21 nt, Human
caccucuagccugggaacacc

SEQ ID NO: 1038665 - RNA, 26 nt, Human
cacgugcacacacacacacacacaca

SEQ ID NO: 1038666 - RNA, 25 nt, Human
cacuucaccagcucagaggugagcc

SEQ ID NO: 1038667 - RNA, 22 nt, Human
cagaggaacaacaaaaaagcac

SEQ ID NO: 1038668 - RNA, 18 nt, Human
cagcagcagaucccuggg

SEQ ID NO: 1038669 - RNA, 18 nt, Human
cagccaaucaccucuagc

SEQ ID NO: 1038670 - RNA, 23 nt, Human
cagccgccauuucugccaggaag

SEQ ID NO: 1038671 - RNA, 23 nt, Human
ccugacagugugauuuuuuccag

SEQ ID NO: 1038672 - RNA, 21 nt, Human
ccugagaagucagcccaaggc

SEQ ID NO: 1038673 - RNA, 18 nt, Human
ccuguggggucuccuggg

SEQ ID NO: 1038674 - RNA, 20 nt, Human
ccuguggggucuccuggguc

SEQ ID NO: 1038675 - RNA, 22 nt, Human
cgcacacacgugcacacacaca

SEQ ID NO: 1038676 - RNA, 25 nt, Human
cgugcacacacacacacacacacac

SEQ ID NO: 1038677 - RNA, 20 nt, Human
cgugcacacgcacacacgug

SEQ ID NO: 1038678 - RNA, 25 nt, Human
cgugcacacgcacacacgugcacac

SEQ ID NO: 1038679 - RNA, 24 nt, Human
cucaccugaaccucugccuuccgg

SEQ ID NO: 1038680 - RNA, 25 nt, Human
cuccagaagccagcagcagaucccu

SEQ ID NO: 1038681 - RNA, 20 nt, Human
cuccuggguccugugggguc

SEQ ID NO: 1038682 - RNA, 22 nt, Human
cuuucuagagagagcaaaaucc

SEQ ID NO: 1038683 - RNA, 23 nt, Human
gaaggagaaacuguuuuauagga

SEQ ID NO: 1038684 - RNA, 20 nt, Human
gacaauaaacaggcaaauac

SEQ ID NO: 1038685 - RNA, 18 nt, Human
gagaaggagaaacuguuu

SEQ ID NO: 1038686 - RNA, 27 nt, Human
gagagcaaaaucccagggucccgaagg

SEQ ID NO: 1038687 - RNA, 20 nt, Human
gaggaacaacaaaaaagcac

SEQ ID NO: 1038688 - RNA, 24 nt, Human
gaggaacaacaaaaaagcacaaag

SEQ ID NO: 1038689 - RNA, 23 nt, Human
gcaaaaucccagggucccgaagg

SEQ ID NO: 1038690 - RNA, 23 nt, Human
gcacacgcacacacgugcacaca

SEQ ID NO: 1038691 - RNA, 26 nt, Human
gcacuuuccuuucccuucagagaagg

SEQ ID NO: 1038692 - RNA, 24 nt, Human
ggaacaacaaaaaagcacaaagaa

SEQ ID NO: 1038693 - RNA, 23 nt, Human
ggcagauggagcccggguguuuc

SEQ ID NO: 1038694 - RNA, 18 nt, Human
ggcccugucuccagaagc

SEQ ID NO: 1038695 - RNA, 19 nt, Human
ggcugccuagcacuuuccu

SEQ ID NO: 1038696 - RNA, 18 nt, Human
gucuccuggguccaggug

SEQ ID NO: 1038697 - RNA, 23 nt, Human
gugcacacacacacacacacagg

SEQ ID NO: 1038698 - RNA, 23 nt, Human
uaaacaggcaaauacacaaaccc

SEQ ID NO: 1038699 - RNA, 21 nt, Human
uaaggcaaacaacguagaacc

SEQ ID NO: 1038700 - RNA, 23 nt, Human
ucacaggcaaguccucacuucac

SEQ ID NO: 1038701 - RNA, 18 nt, Human
ucacaggcugccuagcac

SEQ ID NO: 1038702 - RNA, 20 nt, Human
uccuggguccagguggguuc

SEQ ID NO: 1038703 - RNA, 23 nt, Human
uccuggguccagguggguuccua

SEQ ID NO: 1038704 - RNA, 21 nt, Human
uccuggguccuguggggucuc

SEQ ID NO: 1038705 - RNA, 24 nt, Human
ucuccagaagccagcagcagaucc

SEQ ID NO: 1038706 - RNA, 24 nt, Human
ugacagagcagaggaacaacaaaa

SEQ ID NO: 1038707 - RNA, 20 nt, Human
ugacuucaaauauagucccc

SEQ ID NO: 1038708 - RNA, 21 nt, Human
ugagccacucucaccugaacc

SEQ ID NO: 1038709 - RNA, 20 nt, Human
ugcacacacacacacacaca

SEQ ID NO: 1038710 - RNA, 25 nt, Human
ugcacacacacacacacacacacgc

SEQ ID NO: 1038711 - RNA, 18 nt, Human
uggagcaaagccaggaaa

SEQ ID NO: 1038712 - RNA, 18 nt, Human
uggcaagcaccuggcaga

SEQ ID NO: 1038713 - RNA, 24 nt, Human
uggcagauggagcccggguguuuc

SEQ ID NO: 1038714 - RNA, 25 nt, Human
uggcagauggagcccggguguuucu

SEQ ID NO: 1038715 - RNA, 21 nt, Human
ugugauuuuuuccagccagcc

SEQ ID NO: 1038716 - RNA, 22 nt, Human
uuccagccagccaaaucaccgu

SEQ ID NO: 1038717 - RNA, 23 nt, Human
uuccggcagggaccuccuggguc

SEQ ID NO: 1038718 - RNA, 23 nt, Human
agcuucaucauuucucccugaag

SEQ ID NO: 1038719 - RNA, 18 nt, Human
caggauccuucagcacug

SEQ ID NO: 1038720 - RNA, 22 nt, Human
cauucagugggacagcuuugcu

SEQ ID NO: 1038721 - RNA, 19 nt, Human
cauuuggaauccauuaauu

SEQ ID NO: 1038722 - RNA, 22 nt, Human
ccacacagcuuccauaucugaa

SEQ ID NO: 1038723 - RNA, 21 nt, Human
gauuuucuucugauagcuuca

SEQ ID NO: 1038724 - RNA, 19 nt, Human
uaucaugaagugaagcacu

SEQ ID NO: 1038725 - RNA, 27 nt, Human
ucauucaauuuaucauuuucauugggg

SEQ ID NO: 1038726 - RNA, 23 nt, Human
ucugaaacuuugcugcuggaucu

SEQ ID NO: 1038727 - RNA, 22 nt, Human
ugccucauuccacacagcuucc

SEQ ID NO: 1038728 - RNA, 18 nt, Human
ugcuuagaugcauucagu

SEQ ID NO: 1038729 - RNA, 23 nt, Human
uguggcgugggcccgucuugcuu

SEQ ID NO: 1038730 - RNA, 19 nt, Human
uucaguaucaugaagugaa

SEQ ID NO: 1038731 - RNA, 18 nt, Human
uucaugagguuuugccuc

SEQ ID NO: 1038732 - RNA, 21 nt, Human
uuccacacagcuuccauaucu

SEQ ID NO: 1038733 - RNA, 20 nt, Human
uuccugguuagacucuguuc

SEQ ID NO: 1038734 - RNA, 21 nt, Human
uuuuguuuuguuuggguuuuc

SEQ ID NO: 1038735 - RNA, 20 nt, Human
auucuuaucguccugcagcc

SEQ ID NO: 1038736 - RNA, 19 nt, Human
cagacuccagcugcuggca

SEQ ID NO: 1038737 - RNA, 18 nt, Human
cagcugcuggcacugccu

SEQ ID NO: 1038738 - RNA, 22 nt, Human
ccguuuaacagacuccagcugc

SEQ ID NO: 1038739 - RNA, 23 nt, Human
cugcuggcacugccuucugaguu

SEQ ID NO: 1038740 - RNA, 24 nt, Human
ucacuuccgaauucuuaucguccu

SEQ ID NO: 1038741 - RNA, 24 nt, Human
ugaguucuuucacuuccgaauucu

SEQ ID NO: 1038742 - RNA, 20 nt, Human
ugccccguuuaacagacucc

SEQ ID NO: 1038743 - RNA, 23 nt, Human
ugccccguuuaacagacuccagc

SEQ ID NO: 1038744 - RNA, 21 nt, Human
ugccuucugaguucuuucacu

SEQ ID NO: 1038745 - RNA, 21 nt, Human
ugcuggcacugccuucugagu

SEQ ID NO: 1038746 - RNA, 24 nt, Human
aaagaaaacccagccacgagcacc

SEQ ID NO: 1038747 - RNA, 18 nt, Human
aagcccuccugguucuuc

SEQ ID NO: 1038748 - RNA, 19 nt, Human
accacccuccccugagcag

SEQ ID NO: 1038749 - RNA, 21 nt, Human
acccagggcccccgucccagc

SEQ ID NO: 1038750 - RNA, 22 nt, Human
acccagggcccccgucccagcc

SEQ ID NO: 1038751 - RNA, 26 nt, Human
accccaaggggugcucgacaacauga

SEQ ID NO: 1038752 - RNA, 21 nt, Human
acccugagggaggccaggugg

SEQ ID NO: 1038753 - RNA, 22 nt, Human
acccugagggaggccagguggg

SEQ ID NO: 1038754 - RNA, 19 nt, Human
agacucagaaacgcucaug

SEQ ID NO: 1038755 - RNA, 25 nt, Human
agaugugugaccccaaggggugcuc

SEQ ID NO: 1038756 - RNA, 21 nt, Human
agccacgagcaccacccuccc

SEQ ID NO: 1038757 - RNA, 23 nt, Human
agccacgagcaccacccuccccc

SEQ ID NO: 1038758 - RNA, 21 nt, Human
aggaacgaaggcaacgcaaga

SEQ ID NO: 1038759 - RNA, 30 nt, Human
aggcaggcagcacccugagggaggccaggg

SEQ ID NO: 1038760 - RNA, 18 nt, Human
aggccugaucugaaagac

SEQ ID NO: 1038761 - RNA, 18 nt, Human
agggguggggcuggacag

SEQ ID NO: 1038762 - RNA, 21 nt, Human
caagaggcugagcuggccccc

SEQ ID NO: 1038763 - RNA, 20 nt, Human
cacccagggcccccguccca

SEQ ID NO: 1038764 - RNA, 23 nt, Human
cagcaugggcacagugggcugga

SEQ ID NO: 1038765 - RNA, 24 nt, Human
cagccuccagggucccaggagagc

SEQ ID NO: 1038766 - RNA, 18 nt, Human
caggaacgaaggcaacgc

SEQ ID NO: 1038767 - RNA, 18 nt, Human
caggagagcuuugagaug

SEQ ID NO: 1038768 - RNA, 21 nt, Human
caggagcccugggugcaaaaa

SEQ ID NO: 1038769 - RNA, 18 nt, Human
cagggucccaggagagcu

SEQ ID NO: 1038770 - RNA, 20 nt, Human
caggugccuugcagucuggc

SEQ ID NO: 1038771 - RNA, 19 nt, Human
ccacacucuacccugcuga

SEQ ID NO: 1038772 - RNA, 19 nt, Human
ccaccucuagguugauccc

SEQ ID NO: 1038773 - RNA, 18 nt, Human
ccagguccugcugcgcca

SEQ ID NO: 1038774 - RNA, 24 nt, Human
cccauccuggcgucacugcccgcu

SEQ ID NO: 1038775 - RNA, 18 nt, Human
cccccccacacucuaccc

SEQ ID NO: 1038776 - RNA, 25 nt, Human
cccccccacacucuacccugcugaa

SEQ ID NO: 1038777 - RNA, 21 nt, Human
ccccgucccagccugggggac

SEQ ID NO: 1038778 - RNA, 20 nt, Human
cccuagaguccagggugggc

SEQ ID NO: 1038779 - RNA, 22 nt, Human
cccucaucucacccagcccaug

SEQ ID NO: 1038780 - RNA, 22 nt, Human
cccucuaggacccucccaccca

SEQ ID NO: 1038781 - RNA, 19 nt, Human
cccugagggaggccaggug

SEQ ID NO: 1038782 - RNA, 19 nt, Human
ccgccgucuccucguccca

SEQ ID NO: 1038783 - RNA, 19 nt, Human
ccgugugauuguguuggac

SEQ ID NO: 1038784 - RNA, 20 nt, Human
ccucagggacccugugcagg

SEQ ID NO: 1038785 - RNA, 23 nt, Human
ccuccagcaugggcacagugggc

SEQ ID NO: 1038786 - RNA, 27 nt, Human
ccuccccugagcagggcgagaagaggc

SEQ ID NO: 1038787 - RNA, 19 nt, Human
ccuccuggccuggcgucgc

SEQ ID NO: 1038788 - RNA, 21 nt, Human
ccuccuggccuggcgucgccu

SEQ ID NO: 1038789 - RNA, 23 nt, Human
ccucuaggacccucccacccacc

SEQ ID NO: 1038790 - RNA, 21 nt, Human
ccucugggcgcuuugcuccug

SEQ ID NO: 1038791 - RNA, 23 nt, Human
ccugcaugggggcggggugggga

SEQ ID NO: 1038792 - RNA, 27 nt, Human
cgagcaccacccuccccugagcagggc

SEQ ID NO: 1038793 - RNA, 25 nt, Human
cggcuggcugagcacgugcggggcc

SEQ ID NO: 1038794 - RNA, 19 nt, Human
cgggagaggaaacacaacg

SEQ ID NO: 1038795 - RNA, 23 nt, Human
cuaggacccucccacccaccucu

SEQ ID NO: 1038796 - RNA, 20 nt, Human
cuagguugaucccuuuauau

SEQ ID NO: 1038797 - RNA, 18 nt, Human
cuccccucaucucaccca

SEQ ID NO: 1038798 - RNA, 19 nt, Human
cugaagcugggccacaggc

SEQ ID NO: 1038799 - RNA, 18 nt, Human
cugaagcuuguggccucc

SEQ ID NO: 1038800 - RNA, 24 nt, Human
cugaccucugggcgcuuugcuccu

SEQ ID NO: 1038801 - RNA, 19 nt, Human
cugcagcuccuccacgacg

SEQ ID NO: 1038802 - RNA, 25 nt, Human
cugcugaagcugggccacaggcugg

SEQ ID NO: 1038803 - RNA, 23 nt, Human
cugggccacaggcugguuuuugu

SEQ ID NO: 1038804 - RNA, 22 nt, Human
cuuagggguggggcuggacagc

SEQ ID NO: 1038805 - RNA, 19 nt, Human
cuuugaggucugaagcuug

SEQ ID NO: 1038806 - RNA, 18 nt, Human
gaaagacggcuuaggggu

SEQ ID NO: 1038807 - RNA, 18 nt, Human
gacccucccacccaccuc

SEQ ID NO: 1038808 - RNA, 21 nt, Human
gaggcaggcagcacccugagg

SEQ ID NO: 1038809 - RNA, 24 nt, Human
gagggaggccaggugggcuccugg

SEQ ID NO: 1038810 - RNA, 22 nt, Human
gagucaggagcccugggugcaa

SEQ ID NO: 1038811 - RNA, 20 nt, Human
gcagcuccuccacgacgcuc

SEQ ID NO: 1038812 - RNA, 25 nt, Human
gcccauggcaggcucuaggccucag

SEQ ID NO: 1038813 - RNA, 23 nt, Human
gcccccgucccagccugggggac

SEQ ID NO: 1038814 - RNA, 19 nt, Human
ggcccccccacacucuacc

SEQ ID NO: 1038815 - RNA, 20 nt, Human
ggccugaucugaaagacagu

SEQ ID NO: 1038816 - RNA, 22 nt, Human
ggcugagcacgugcggggccug

SEQ ID NO: 1038817 - RNA, 22 nt, Human
gggcaaggcugaaucagcggcg

SEQ ID NO: 1038818 - RNA, 28 nt, Human
gggcccccgucccagccugggggacccc

SEQ ID NO: 1038819 - RNA, 22 nt, Human
gggcgggguggggaggacuggg

SEQ ID NO: 1038820 - RNA, 18 nt, Human
gguggggaggacugggcu

SEQ ID NO: 1038821 - RNA, 22 nt, Human
uaaaaagaaaacccagccacga

SEQ ID NO: 1038822 - RNA, 19 nt, Human
ucagugcagcugguuuuua

SEQ ID NO: 1038823 - RNA, 21 nt, Human
uccagggucccaggagagcuu

SEQ ID NO: 1038824 - RNA, 20 nt, Human
ucccacgugccggccuccaa

SEQ ID NO: 1038825 - RNA, 18 nt, Human
uccugcugcgccaggugc

SEQ ID NO: 1038826 - RNA, 22 nt, Human
uccugggccccgcguguggccc

SEQ ID NO: 1038827 - RNA, 19 nt, Human
ucgucuugaagagacucag

SEQ ID NO: 1038828 - RNA, 23 nt, Human
ucuaggacccucccacccaccuc

SEQ ID NO: 1038829 - RNA, 18 nt, Human
ucucccagcaucgcgguu

SEQ ID NO: 1038830 - RNA, 18 nt, Human
ucuuacgguugcggagcc

SEQ ID NO: 1038831 - RNA, 19 nt, Human
ugaagcuuguggccuccug

SEQ ID NO: 1038832 - RNA, 18 nt, Human
ugaaucagcggcgagggg

SEQ ID NO: 1038833 - RNA, 19 nt, Human
ugagauggcugucuccccu

SEQ ID NO: 1038834 - RNA, 19 nt, Human
ugcccucuaggacccuccc

SEQ ID NO: 1038835 - RNA, 20 nt, Human
ugcggagggagacgggcaag

SEQ ID NO: 1038836 - RNA, 25 nt, Human
ugcggagggagacgggcaaggcugg

SEQ ID NO: 1038837 - RNA, 21 nt, Human
uggacggggagucaggagccc

SEQ ID NO: 1038838 - RNA, 19 nt, Human
uggcugagcacgugcgggg

SEQ ID NO: 1038839 - RNA, 22 nt, Human
uggcugagcacgugcggggccu

SEQ ID NO: 1038840 - RNA, 18 nt, Human
ugggaaagacggcuuagg

SEQ ID NO: 1038841 - RNA, 24 nt, Human
ugggggcgggguggggaggacugg

SEQ ID NO: 1038842 - RNA, 20 nt, Human
ugggggcgggguggggaggg

SEQ ID NO: 1038843 - RNA, 19 nt, Human
uguccuccagcaugggcac

SEQ ID NO: 1038844 - RNA, 19 nt, Human
uuaaagccaagguuggaaa

SEQ ID NO: 1038845 - RNA, 22 nt, Human
uucagaacaggaaaccucagga

SEQ ID NO: 1038846 - RNA, 21 nt, Human
uucgcccagaugugugacccc

SEQ ID NO: 1038847 - RNA, 20 nt, Human
uucgucuugaagagacucag

SEQ ID NO: 1038848 - RNA, 21 nt, Human
aagcaacauuaauguuuaacc

SEQ ID NO: 1038849 - RNA, 20 nt, Human
aauaugauucaggguccugg

SEQ ID NO: 1038850 - RNA, 22 nt, Human
agccuguccacaucuucagccc

SEQ ID NO: 1038851 - RNA, 21 nt, Human
aggcacagaagcccaacauuu

SEQ ID NO: 1038852 - RNA, 19 nt, Human
auaaaggacacccuuaguc

SEQ ID NO: 1038853 - RNA, 18 nt, Human
augcuuccaagacuauaa

SEQ ID NO: 1038854 - RNA, 22 nt, Human
auuucauuuucucucccuuuaa

SEQ ID NO: 1038855 - RNA, 21 nt, Human
caacaaagcaacauuaauguu

SEQ ID NO: 1038856 - RNA, 18 nt, Human
caagaaaagcugggggug

SEQ ID NO: 1038857 - RNA, 21 nt, Human
cacauaacagcagugagcaca

SEQ ID NO: 1038858 - RNA, 18 nt, Human
cacaucuucagcccuuca

SEQ ID NO: 1038859 - RNA, 22 nt, Human
cauaugcguauauuugugugug

SEQ ID NO: 1038860 - RNA, 24 nt, Human
cucaacuuucuuucuuuccaaacc

SEQ ID NO: 1038861 - RNA, 18 nt, Human
ggacacccuuagucaaau

SEQ ID NO: 1038862 - RNA, 19 nt, Human
guguuugucuauaugucca

SEQ ID NO: 1038863 - RNA, 23 nt, Human
guuugugucuacacgucugugua

SEQ ID NO: 1038864 - RNA, 21 nt, Human
uaaaagagacagaaugcuucc

SEQ ID NO: 1038865 - RNA, 19 nt, Human
uaagagaggaagugaccau

SEQ ID NO: 1038866 - RNA, 26 nt, Human
uacguguauacacaucuguguauaug

SEQ ID NO: 1038867 - RNA, 19 nt, Human
uauauguuugugucuacau

SEQ ID NO: 1038868 - RNA, 21 nt, Human
uaucaaggggauucuuuagcc

SEQ ID NO: 1038869 - RNA, 18 nt, Human
uauguccauaugcguaua

SEQ ID NO: 1038870 - RNA, 23 nt, Human
ucccuggauuagaaguuggaaaa

SEQ ID NO: 1038871 - RNA, 21 nt, Human
ucucccuuuaacaacaaagca

SEQ ID NO: 1038872 - RNA, 23 nt, Human
ucuguauacguguauacacaucu

SEQ ID NO: 1038873 - RNA, 25 nt, Human
uggcuuugacuuuguuucaaaguuc

SEQ ID NO: 1038874 - RNA, 21 nt, Human
uguauacacaucuguguauau

SEQ ID NO: 1038875 - RNA, 24 nt, Human
uguauacacgucuaggcguauaug

SEQ ID NO: 1038876 - RNA, 21 nt, Human
uguauacguguauacacaucu

SEQ ID NO: 1038877 - RNA, 22 nt, Human
ugucuacacgucuguguauaug

SEQ ID NO: 1038878 - RNA, 18 nt, Human
ugucuacaugugucuaug

SEQ ID NO: 1038879 - RNA, 19 nt, Human
ugucuacaugugucuaugu

SEQ ID NO: 1038880 - RNA, 18 nt, Human
uguguacgugucuguaua

SEQ ID NO: 1038881 - RNA, 19 nt, Human
uguguacgugucuguauac

SEQ ID NO: 1038882 - RNA, 28 nt, Human
uguguacgugucuguauacguguauaca

SEQ ID NO: 1038883 - RNA, 23 nt, Human
uguguauauguuugugucuacau

SEQ ID NO: 1038884 - RNA, 24 nt, Human
uguguauauguuugugucuacaug

SEQ ID NO: 1038885 - RNA, 25 nt, Human
uguguauauguuugugucuacaugu

SEQ ID NO: 1038886 - RNA, 20 nt, Human
ugugucuacacauguauaca

SEQ ID NO: 1038887 - RNA, 22 nt, Human
ugugucugcgugugugugcaug

SEQ ID NO: 1038888 - RNA, 18 nt, Human
uguguguacgugucugua

SEQ ID NO: 1038889 - RNA, 20 nt, Human
ugugugugucugcgugugug

SEQ ID NO: 1038890 - RNA, 21 nt, Human
ugugugugucugcgugugugu

SEQ ID NO: 1038891 - RNA, 21 nt, Human
ugugugugucugcgugugugu

SEQ ID NO: 1038892 - RNA, 22 nt, Human
ugugugugucugcgugugugug

SEQ ID NO: 1038893 - RNA, 23 nt, Human
uuaggcacagaagcccaacauuu

SEQ ID NO: 1038894 - RNA, 19 nt, Human
uucuacgaagaggauccca

SEQ ID NO: 1038895 - RNA, 22 nt, Human
agccuggcugggcuggcacggc

SEQ ID NO: 1038896 - RNA, 18 nt, Human
cccucccucucuggccac

SEQ ID NO: 1038897 - RNA, 19 nt, Human
cccuguggugaaacagagc

SEQ ID NO: 1038898 - RNA, 26 nt, Human
ccggggcaguuugggagauuccuucu

SEQ ID NO: 1038899 - RNA, 20 nt, Human
ccugugcagccuggcugggc

SEQ ID NO: 1038900 - RNA, 18 nt, Human
cuggccacagugagggau

SEQ ID NO: 1038901 - RNA, 24 nt, Human
cuguggugaaacagagcccucccu

SEQ ID NO: 1038902 - RNA, 21 nt, Human
gggauccagcaggaacccugc

SEQ ID NO: 1038903 - RNA, 22 nt, Human
gugcagccuggcugggcuggca

SEQ ID NO: 1038904 - RNA, 24 nt, Human
ugaaacagagcccucccucucugg

SEQ ID NO: 1038905 - RNA, 24 nt, Human
ugccugugcagccuggcugggcug

SEQ ID NO: 1038906 - RNA, 18 nt, Human
aaaagggguauggacaga

SEQ ID NO: 1038907 - RNA, 21 nt, Human
aaauccacaacaggaucaaag

SEQ ID NO: 1038908 - RNA, 18 nt, Human
aaggauggcuugaaggca

SEQ ID NO: 1038909 - RNA, 19 nt, Human
aucucacuuccuccucuua

SEQ ID NO: 1038910 - RNA, 21 nt, Human
caaaacauacagcagaaagga

SEQ ID NO: 1038911 - RNA, 23 nt, Human
ccacauuaucuguuguguaucua

SEQ ID NO: 1038912 - RNA, 23 nt, Human
ccuugaggaggaaguaaaagggg

SEQ ID NO: 1038913 - RNA, 21 nt, Human
cucuccacauuaucuguugug

SEQ ID NO: 1038914 - RNA, 21 nt, Human
cuuccuccucuuaugucuuuu

SEQ ID NO: 1038915 - RNA, 21 nt, Human
gcugacagugccacagugccu

SEQ ID NO: 1038916 - RNA, 21 nt, Human
gcugugucuucuacuucuugu

SEQ ID NO: 1038917 - RNA, 19 nt, Human
uaaaagggguauggacaga

SEQ ID NO: 1038918 - RNA, 21 nt, Human
uaaauaaauccacaacaggau

SEQ ID NO: 1038919 - RNA, 22 nt, Human
uagaaggcugcaaaacauacag

SEQ ID NO: 1038920 - RNA, 20 nt, Human
uccaaaugauguuuucuggc

SEQ ID NO: 1038921 - RNA, 21 nt, Human
uccacauuaucuguuguguau

SEQ ID NO: 1038922 - RNA, 20 nt, Human
ucuccacauuaucuguugug

SEQ ID NO: 1038923 - RNA, 21 nt, Human
ugagcuuucuguccuccacag

SEQ ID NO: 1038924 - RNA, 19 nt, Human
uggcuugaaggcaauugau

SEQ ID NO: 1038925 - RNA, 18 nt, Human
aagucugccaggaguccu

SEQ ID NO: 1038926 - RNA, 20 nt, Human
aggcugaauuauuaaacacc

SEQ ID NO: 1038927 - RNA, 19 nt, Human
auccugugaugcugcugag

SEQ ID NO: 1038928 - RNA, 22 nt, Human
cacggcccccucggcacuggcc

SEQ ID NO: 1038929 - RNA, 19 nt, Human
cagauccagaaacaaggac

SEQ ID NO: 1038930 - RNA, 26 nt, Human
cagggaagcccagucuuuuccccuca

SEQ ID NO: 1038931 - RNA, 23 nt, Human
cagucuuuuccccucaggggcuu

SEQ ID NO: 1038932 - RNA, 23 nt, Human
ccagacagcuugaagucugccag

SEQ ID NO: 1038933 - RNA, 22 nt, Human
ccaugagccccagccucagcuc

SEQ ID NO: 1038934 - RNA, 20 nt, Human
cccacuuuuucuucuguguc

SEQ ID NO: 1038935 - RNA, 25 nt, Human
cccucggcacuggccgacacacuag

SEQ ID NO: 1038936 - RNA, 23 nt, Human
ccgcuccuugcccugccgccugg

SEQ ID NO: 1038937 - RNA, 19 nt, Human
ccucaggggcuucaucuaa

SEQ ID NO: 1038938 - RNA, 23 nt, Human
ccucaggggcuucaucuaacuuc

SEQ ID NO: 1038939 - RNA, 24 nt, Human
ccucucaccaggcaaugcagggag

SEQ ID NO: 1038940 - RNA, 24 nt, Human
ccugccgccuggagccaugagccc

SEQ ID NO: 1038941 - RNA, 18 nt, Human
ccuggagccaugagcccc

SEQ ID NO: 1038942 - RNA, 19 nt, Human
ccuuggagacagaggcgag

SEQ ID NO: 1038943 - RNA, 25 nt, Human
cuggcgacugcgaugaccuaucccc

SEQ ID NO: 1038944 - RNA, 21 nt, Human
cugugucuuuugucuuugggg

SEQ ID NO: 1038945 - RNA, 19 nt, Human
gagcugccggugcuggugg

SEQ ID NO: 1038946 - RNA, 21 nt, Human
gccaugagccccagccucagc

SEQ ID NO: 1038947 - RNA, 25 nt, Human
gccuggagccaugagccccagccuc

SEQ ID NO: 1038948 - RNA, 22 nt, Human
gcugguggggauggcuucuucu

SEQ ID NO: 1038949 - RNA, 21 nt, Human
ggagacagaggcgagggaaca

SEQ ID NO: 1038950 - RNA, 19 nt, Human
ggaguccugucauccugcu

SEQ ID NO: 1038951 - RNA, 20 nt, Human
ggggcaacccggcucuccuc

SEQ ID NO: 1038952 - RNA, 20 nt, Human
guggccaccaaggggcaacc

SEQ ID NO: 1038953 - RNA, 19 nt, Human
ucaccaggcaaugcaggga

SEQ ID NO: 1038954 - RNA, 22 nt, Human
ucaucuaacuucucacucucua

SEQ ID NO: 1038955 - RNA, 23 nt, Human
uccagaaacaaggacuuguggcc

SEQ ID NO: 1038956 - RNA, 23 nt, Human
ucccacuuuuucuucugugucuu

SEQ ID NO: 1038957 - RNA, 19 nt, Human
ucuuguuucucguuucugg

SEQ ID NO: 1038958 - RNA, 23 nt, Human
ucuuuggggguggccagacagcu

SEQ ID NO: 1038959 - RNA, 20 nt, Human
ucuuuugucuuugggggugg

SEQ ID NO: 1038960 - RNA, 24 nt, Human
ugagggacacucguguggacaggg

SEQ ID NO: 1038961 - RNA, 19 nt, Human
ugccaagagcugccggugc

SEQ ID NO: 1038962 - RNA, 18 nt, Human
ugcccugccgccuggagc

SEQ ID NO: 1038963 - RNA, 18 nt, Human
ugccggugcuggugggga

SEQ ID NO: 1038964 - RNA, 23 nt, Human
ugccggugcugguggggauggcu

SEQ ID NO: 1038965 - RNA, 21 nt, Human
ugcugagggcuggggagccuu

SEQ ID NO: 1038966 - RNA, 18 nt, Human
uggagacagaggcgaggg

SEQ ID NO: 1038967 - RNA, 18 nt, Human
uggccgacacacuagaaa

SEQ ID NO: 1038968 - RNA, 24 nt, Human
uggggcagauccagaaacaaggac

SEQ ID NO: 1038969 - RNA, 24 nt, Human
uggggcagauccagaaacaaggac

SEQ ID NO: 1038970 - RNA, 21 nt, Human
uggguugugaggagucaggac

SEQ ID NO: 1038971 - RNA, 21 nt, Human
ugucuuuugucuuugggggug

SEQ ID NO: 1038972 - RNA, 21 nt, Human
ugugucuuuugucuuuggggg

SEQ ID NO: 1038973 - RNA, 19 nt, Human
caucuugcaucccauccaa

SEQ ID NO: 1038974 - RNA, 19 nt, Human
ccccucacaagagaugagg

SEQ ID NO: 1038975 - RNA, 21 nt, Human
ccucacaagagaugaggugga

SEQ ID NO: 1038976 - RNA, 19 nt, Human
cuguggacugggugaaggc

SEQ ID NO: 1038977 - RNA, 22 nt, Human
uuccuguggacugggugaaggc

SEQ ID NO: 1038978 - RNA, 22 nt, Human
acugggucuucuaggggccugg

SEQ ID NO: 1038979 - RNA, 21 nt, Human
caacagaucuuuacugggucu

SEQ ID NO: 1038980 - RNA, 20 nt, Human
gaucccgcuuucccgcagac

SEQ ID NO: 1038981 - RNA, 23 nt, Human
gcagcgacccgacguccuggggu

SEQ ID NO: 1038982 - RNA, 21 nt, Human
gugcggccucggccgcgcacc

SEQ ID NO: 1038983 - RNA, 19 nt, Human
uacugggucuucuaggggc

SEQ ID NO: 1038984 - RNA, 21 nt, Human
uacugggucuucuaggggccu

SEQ ID NO: 1038985 - RNA, 24 nt, Human
uuuauucaacagaucuuuacuggg

SEQ ID NO: 1038986 - RNA, 18 nt, Human
aaggcagagaaagcucaa

SEQ ID NO: 1038987 - RNA, 22 nt, Human
aaguguccucuucaaauccucc

SEQ ID NO: 1038988 - RNA, 21 nt, Human
acaaccuccuuggaggaccaa

SEQ ID NO: 1038989 - RNA, 22 nt, Human
acaccgaggccagcaggccaaa

SEQ ID NO: 1038990 - RNA, 21 nt, Human
agaaagcucaacccacacuga

SEQ ID NO: 1038991 - RNA, 21 nt, Human
caaguguccucuucaaauccu

SEQ ID NO: 1038992 - RNA, 23 nt, Human
cacacugacaggaggaagagaca

SEQ ID NO: 1038993 - RNA, 23 nt, Human
caccgaggccagcaggccaaagc

SEQ ID NO: 1038994 - RNA, 20 nt, Human
cagcucuggaucugcagucu

SEQ ID NO: 1038995 - RNA, 21 nt, Human
cccacaccgaggccagcaggc

SEQ ID NO: 1038996 - RNA, 20 nt, Human
cccagcuugcaacugcugac

SEQ ID NO: 1038997 - RNA, 22 nt, Human
cucaaagccccacaccgaggcc

SEQ ID NO: 1038998 - RNA, 26 nt, Human
cucaaagccccacaccgaggccagca

SEQ ID NO: 1038999 - RNA, 23 nt, Human
cugacguaugcucaaagccccuc

SEQ ID NO: 1039000 - RNA, 18 nt, Human
cuggaucugcagucugga

SEQ ID NO: 1039001 - RNA, 21 nt, Human
gcagagaaagcucaacccaca

SEQ ID NO: 1039002 - RNA, 19 nt, Human
gccagcaggccaaagcuga

SEQ ID NO: 1039003 - RNA, 20 nt, Human
uccucuucaaauccuccuug

SEQ ID NO: 1039004 - RNA, 22 nt, Human
ugagaguaccgcacagaccagu

SEQ ID NO: 1039005 - RNA, 22 nt, Human
ugcucaaagccccacaccgagg

SEQ ID NO: 1039006 - RNA, 23 nt, Human
aagguccacauugaaaaaugaca

SEQ ID NO: 1039007 - RNA, 22 nt, Human
aggcuucuggacuuucagccuc

SEQ ID NO: 1039008 - RNA, 22 nt, Human
aucuucuuugguggaacuguua

SEQ ID NO: 1039009 - RNA, 19 nt, Human
cgccccggcugcagcugca

SEQ ID NO: 1039010 - RNA, 21 nt, Human
cgggaugcccacaacagacuc

SEQ ID NO: 1039011 - RNA, 23 nt, Human
cuaauagaaugccaaucuucuuu

SEQ ID NO: 1039012 - RNA, 22 nt, Human
cuuucagccucuucacagcucc

SEQ ID NO: 1039013 - RNA, 23 nt, Human
gcugcagcugcaccacggacucg

SEQ ID NO: 1039014 - RNA, 24 nt, Human
ucuuugguggaacuguuauucuua

SEQ ID NO: 1039015 - RNA, 25 nt, Human
uggacuuucagccucuucacagcuc

SEQ ID NO: 1039016 - RNA, 24 nt, Human
uggaguuguucuguugugcagaaa

SEQ ID NO: 1039017 - RNA, 24 nt, Human
aacaccauggggagagaggugccu

SEQ ID NO: 1039018 - RNA, 21 nt, Human
acaccaccaaauguggaaaac

SEQ ID NO: 1039019 - RNA, 26 nt, Human
accacucccugcugccagacacauac

SEQ ID NO: 1039020 - RNA, 18 nt, Human
agguagaugggcaggggg

SEQ ID NO: 1039021 - RNA, 21 nt, Human
aguacccacaccacucccugc

SEQ ID NO: 1039022 - RNA, 22 nt, Human
cccacaccacucccugcugcca

SEQ ID NO: 1039023 - RNA, 24 nt, Human
cccauacuucugcaggcccaccuc

SEQ ID NO: 1039024 - RNA, 20 nt, Human
ccccauacuucugcaggccc

SEQ ID NO: 1039025 - RNA, 22 nt, Human
gagcucggaggggaugaaggcc

SEQ ID NO: 1039026 - RNA, 20 nt, Human
ggcaggggguucuggccgca

SEQ ID NO: 1039027 - RNA, 23 nt, Human
ucccugcugccagacacauacag

SEQ ID NO: 1039028 - RNA, 19 nt, Human
ugaguuaaguacccacacc

SEQ ID NO: 1039029 - RNA, 22 nt, Human
uggggagagaggugccuggccc

SEQ ID NO: 1039030 - RNA, 19 nt, Human
uggggccaacuucuaccug

SEQ ID NO: 1039031 - RNA, 18 nt, Human
uugacauugauggugagg

SEQ ID NO: 1039032 - RNA, 21 nt, Human
uugauggugagguagaugggc

SEQ ID NO: 1039033 - RNA, 23 nt, Human
aaaaaaaaaauggaggaaaagaa

SEQ ID NO: 1039034 - RNA, 20 nt, Human
aacacgcuccgcuacuaaaa

SEQ ID NO: 1039035 - RNA, 27 nt, Human
agaaagagagagugggggguggguggg

SEQ ID NO: 1039036 - RNA, 20 nt, Human
agaagaaagagaaaggaugg

SEQ ID NO: 1039037 - RNA, 21 nt, Human
agagaaagagagagugggggg

SEQ ID NO: 1039038 - RNA, 23 nt, Human
agagaagaaagagaaaggauggc

SEQ ID NO: 1039039 - RNA, 20 nt, Human
aggcaggaucaacacgcucc

SEQ ID NO: 1039040 - RNA, 24 nt, Human
caaaaaaaaaauggaggaaaagaa

SEQ ID NO: 1039041 - RNA, 19 nt, Human
caaacggugcuuauuccca

SEQ ID NO: 1039042 - RNA, 22 nt, Human
cccagggguucuaccgcgaccg

SEQ ID NO: 1039043 - RNA, 24 nt, Human
ccccgagacagcuagucccggccu

SEQ ID NO: 1039044 - RNA, 19 nt, Human
gagagaaagagagaguggg

SEQ ID NO: 1039045 - RNA, 22 nt, Human
gaguggggggugggugggaaau

SEQ ID NO: 1039046 - RNA, 19 nt, Human
gccccgagacagcuagucc

SEQ ID NO: 1039047 - RNA, 22 nt, Human
uacaaaaaaaaaauggaggaaa

SEQ ID NO: 1039048 - RNA, 18 nt, Human
uggcaagagcuacucagg

SEQ ID NO: 1039049 - RNA, 18 nt, Human
uggcugcaucucaaacgg

SEQ ID NO: 1039050 - RNA, 20 nt, Human
uggggggugggugggaaaug

SEQ ID NO: 1039051 - RNA, 21 nt, Human
uggggggugggugggaaauga

SEQ ID NO: 1039052 - RNA, 22 nt, Human
ugggugggaaaugagagagaag

SEQ ID NO: 1039053 - RNA, 19 nt, Human
uuguacuacaaaaaaaaaa

SEQ ID NO: 1039054 - RNA, 22 nt, Human
agccgggccucaguguugaacc

SEQ ID NO: 1039055 - RNA, 20 nt, Human
agggugugagcugcugcacc

SEQ ID NO: 1039056 - RNA, 23 nt, Human
caccucacagccugguacacgcc

SEQ ID NO: 1039057 - RNA, 20 nt, Human
cacuccacagccggagcaca

SEQ ID NO: 1039058 - RNA, 24 nt, Human
cagcaguucaugggcaccaccuug

SEQ ID NO: 1039059 - RNA, 20 nt, Human
cagcugcccagcggcguccg

SEQ ID NO: 1039060 - RNA, 23 nt, Human
ccagcggcguccgcgggcccucc

SEQ ID NO: 1039061 - RNA, 25 nt, Human
ccagcggcguccgcgggcccuccuc

SEQ ID NO: 1039062 - RNA, 20 nt, Human
ccgcgggcccuccucacucu

SEQ ID NO: 1039063 - RNA, 20 nt, Human
cucaguguugaaccugaggu

SEQ ID NO: 1039064 - RNA, 26 nt, Human
cucaguguugaaccugagguucugga

SEQ ID NO: 1039065 - RNA, 21 nt, Human
cuccuggcuguggggcuucuc

SEQ ID NO: 1039066 - RNA, 21 nt, Human
gccccagcaguucaugggcac

SEQ ID NO: 1039067 - RNA, 22 nt, Human
gccugguacacgccccagcagu

SEQ ID NO: 1039068 - RNA, 25 nt, Human
uccacagccggagcacaccgggguc

SEQ ID NO: 1039069 - RNA, 23 nt, Human
uccuggcuguggggcuucuccag

SEQ ID NO: 1039070 - RNA, 23 nt, Human
ucuccaggaccccuccuggccuc

SEQ ID NO: 1039071 - RNA, 24 nt, Human
ugaagacccgcggccucaccaggg

SEQ ID NO: 1039072 - RNA, 22 nt, Human
ugagcugcugcaccugcuccug

SEQ ID NO: 1039073 - RNA, 25 nt, Human
uucaugggcaccaccuugccaggcc

SEQ ID NO: 1039074 - RNA, 20 nt, Human
uucuggauggucuuguuggc

SEQ ID NO: 1039075 - RNA, 21 nt, Human
aagcugcuccuccggaccccg

SEQ ID NO: 1039076 - RNA, 19 nt, Human
aggcggccgcccaggcagg

SEQ ID NO: 1039077 - RNA, 21 nt, Human
ccccccgcuuugcagccccgg

SEQ ID NO: 1039078 - RNA, 23 nt, Human
ccccccgcuuugcagccccgggc

SEQ ID NO: 1039079 - RNA, 20 nt, Human
ccccgggccgcccgccgccc

SEQ ID NO: 1039080 - RNA, 21 nt, Human
cccgggccgcccgccgccccc

SEQ ID NO: 1039081 - RNA, 18 nt, Human
ccgccgcccccgccccuc

SEQ ID NO: 1039082 - RNA, 21 nt, Human
ccuccggaccccgaucuugaa

SEQ ID NO: 1039083 - RNA, 22 nt, Human
gcggccccccgcuuugcagccc

SEQ ID NO: 1039084 - RNA, 19 nt, Human
gcggccgcccaggcaggcc

SEQ ID NO: 1039085 - RNA, 18 nt, Human
ggcccagggaggcggcgg

SEQ ID NO: 1039086 - RNA, 19 nt, Human
uaagugaaugucaucuucu

SEQ ID NO: 1039087 - RNA, 20 nt, Human
acacagguagccaccaggcc

SEQ ID NO: 1039088 - RNA, 19 nt, Human
agcccagcucucugcaggc

SEQ ID NO: 1039089 - RNA, 22 nt, Human
aggaacaggggcagccgggcca

SEQ ID NO: 1039090 - RNA, 20 nt, Human
aggaaggggaagaagggcuc

SEQ ID NO: 1039091 - RNA, 24 nt, Human
cacaggccuggcacgaggggcagg

SEQ ID NO: 1039092 - RNA, 19 nt, Human
caccagggucccacacucc

SEQ ID NO: 1039093 - RNA, 23 nt, Human
cacgcaagcaccgaugaucagcu

SEQ ID NO: 1039094 - RNA, 19 nt, Human
cagccccacagauguagca

SEQ ID NO: 1039095 - RNA, 18 nt, Human
caggcugcaggccagaug

SEQ ID NO: 1039096 - RNA, 22 nt, Human
caugugaguccugggaagaucu

SEQ ID NO: 1039097 - RNA, 20 nt, Human
cccgcacacaccaggguccc

SEQ ID NO: 1039098 - RNA, 22 nt, Human
cccgcacacaccagggucccac

SEQ ID NO: 1039099 - RNA, 22 nt, Human
cccgcacacaccagggucccac

SEQ ID NO: 1039100 - RNA, 19 nt, Human
cccggggcccagcucagcc

SEQ ID NO: 1039101 - RNA, 23 nt, Human
ccucaugcugcagccacugggcc

SEQ ID NO: 1039102 - RNA, 18 nt, Human
cgccaggagcuccagagc

SEQ ID NO: 1039103 - RNA, 23 nt, Human
cgccaggagcuccagagcuagag

SEQ ID NO: 1039104 - RNA, 24 nt, Human
cuggggcugcugggagguccucug

SEQ ID NO: 1039105 - RNA, 21 nt, Human
cuucccggggcccagcucagc

SEQ ID NO: 1039106 - RNA, 21 nt, Human
gcacacaccagggucccacac

SEQ ID NO: 1039107 - RNA, 18 nt, Human
gcagccacugggccagca

SEQ ID NO: 1039108 - RNA, 18 nt, Human
gcaggcggggacacagcc

SEQ ID NO: 1039109 - RNA, 19 nt, Human
gcaggcugcaggccagaug

SEQ ID NO: 1039110 - RNA, 18 nt, Human
gcuggaacuccuucccgg

SEQ ID NO: 1039111 - RNA, 24 nt, Human
ggaggugacuucugggggggaucc

SEQ ID NO: 1039112 - RNA, 20 nt, Human
ggcaggcggggacacagcuc

SEQ ID NO: 1039113 - RNA, 23 nt, Human
ggcgggguucacguugagcugga

SEQ ID NO: 1039114 - RNA, 26 nt, Human
gggcaggcggggacacagcucuggcc

SEQ ID NO: 1039115 - RNA, 24 nt, Human
guagcagagcacacagguagccac

SEQ ID NO: 1039116 - RNA, 19 nt, Human
uauuccaagcgugcucagc

SEQ ID NO: 1039117 - RNA, 21 nt, Human
uauuccaagcgugcucagccc

SEQ ID NO: 1039118 - RNA, 19 nt, Human
uccaccaacaggcuguggc

SEQ ID NO: 1039119 - RNA, 24 nt, Human
uccagagcuagagcuuagugagaa

SEQ ID NO: 1039120 - RNA, 20 nt, Human
uccaguggguauuccaagcg

SEQ ID NO: 1039121 - RNA, 22 nt, Human
ucccacacuccacgcaagcacc

SEQ ID NO: 1039122 - RNA, 24 nt, Human
ucccacacuccacgcaagcaccga

SEQ ID NO: 1039123 - RNA, 21 nt, Human
ucccggggcccagcucagccc

SEQ ID NO: 1039124 - RNA, 18 nt, Human
uccugggaagaucuggcc

SEQ ID NO: 1039125 - RNA, 21 nt, Human
ucuccugcugacaaaagaagc

SEQ ID NO: 1039126 - RNA, 23 nt, Human
ucuucuccugcugacaaaagaag

SEQ ID NO: 1039127 - RNA, 23 nt, Human
ugagcccuuggcccgcacacacc

SEQ ID NO: 1039128 - RNA, 19 nt, Human
ugcauggaggugacuucug

SEQ ID NO: 1039129 - RNA, 18 nt, Human
ugccaagggcaggcgggg

SEQ ID NO: 1039130 - RNA, 18 nt, Human
ugcugggagguccucugc

SEQ ID NO: 1039131 - RNA, 20 nt, Human
uucccggggcccagcucagc

SEQ ID NO: 1039132 - RNA, 24 nt, Human
uucccggggcccagcucagccccc

SEQ ID NO: 1039133 - RNA, 19 nt, Human
aacgcuuccccggucgccc

SEQ ID NO: 1039134 - RNA, 23 nt, Human
aauccagcucugcugcaccaccu

SEQ ID NO: 1039135 - RNA, 18 nt, Human
acgccgggcuccugcgcg

SEQ ID NO: 1039136 - RNA, 21 nt, Human
agacuccuccacgccgggcuc

SEQ ID NO: 1039137 - RNA, 21 nt, Human
agccagagacagcgcagcccu

SEQ ID NO: 1039138 - RNA, 21 nt, Human
caacucaguuugggccuccag

SEQ ID NO: 1039139 - RNA, 26 nt, Human
cagaagaacccacacauauuuccuua

SEQ ID NO: 1039140 - RNA, 23 nt, Human
cagcccaacgcuuccccggucgc

SEQ ID NO: 1039141 - RNA, 21 nt, Human
cauuaucaccacucuguuucu

SEQ ID NO: 1039142 - RNA, 22 nt, Human
ccacacauauuuccuuaggauc

SEQ ID NO: 1039143 - RNA, 22 nt, Human
cccacacauauuuccuuaggau

SEQ ID NO: 1039144 - RNA, 26 nt, Human
cccagcccagccagagaguacccucu

SEQ ID NO: 1039145 - RNA, 23 nt, Human
cccauuaucaccacucuguuucu

SEQ ID NO: 1039146 - RNA, 22 nt, Human
cccgcagacuccuccacgccgg

SEQ ID NO: 1039147 - RNA, 19 nt, Human
cccucuuuccuucuucgcc

SEQ ID NO: 1039148 - RNA, 20 nt, Human
ccuccacgccgggcuccugc

SEQ ID NO: 1039149 - RNA, 21 nt, Human
ccugucgcaggcuccgagggc

SEQ ID NO: 1039150 - RNA, 18 nt, Human
cucaauuuuacggagcaa

SEQ ID NO: 1039151 - RNA, 19 nt, Human
cuccuccacgccgggcucc

SEQ ID NO: 1039152 - RNA, 24 nt, Human
gagagguuuucaauggucuugaug

SEQ ID NO: 1039153 - RNA, 21 nt, Human
gcagcccccucggccugcgcu

SEQ ID NO: 1039154 - RNA, 21 nt, Human
gccccagcccagccagagagu

SEQ ID NO: 1039155 - RNA, 20 nt, Human
gcgaagugaccaccugaccc

SEQ ID NO: 1039156 - RNA, 21 nt, Human
ggacugggaggcaggagaggu

SEQ ID NO: 1039157 - RNA, 19 nt, Human
gggcccagguucgcggcgg

SEQ ID NO: 1039158 - RNA, 18 nt, Human
gggcuccugcgcgcaauc

SEQ ID NO: 1039159 - RNA, 22 nt, Human
guguacucuuccagguucucaa

SEQ ID NO: 1039160 - RNA, 23 nt, Human
guugcugagguuaagagcaucca

SEQ ID NO: 1039161 - RNA, 26 nt, Human
uaagagcauccaguuucugcagaggu

SEQ ID NO: 1039162 - RNA, 21 nt, Human
uaauuucuuccuugcagcccc

SEQ ID NO: 1039163 - RNA, 19 nt, Human
uacagcccaacgcuucccc

SEQ ID NO: 1039164 - RNA, 22 nt, Human
uacccucuuuccuucuucgcca

SEQ ID NO: 1039165 - RNA, 23 nt, Human
uacggccccagcccagccagaga

SEQ ID NO: 1039166 - RNA, 27 nt, Human
uauaaagcuugugcugcuugcagaguu

SEQ ID NO: 1039167 - RNA, 19 nt, Human
uaugcuacauauaacuggg

SEQ ID NO: 1039168 - RNA, 21 nt, Human
uccuccacgccgggcuccugc

SEQ ID NO: 1039169 - RNA, 22 nt, Human
uccuugcagcccccucggccug

SEQ ID NO: 1039170 - RNA, 19 nt, Human
ucgcaggcuccgagggcuc

SEQ ID NO: 1039171 - RNA, 23 nt, Human
ucucaaugcgaucaaaaccuuua

SEQ ID NO: 1039172 - RNA, 23 nt, Human
ucugcagccagagacagcgcagc

SEQ ID NO: 1039173 - RNA, 24 nt, Human
ugcgaagugaccaccugacccauu

SEQ ID NO: 1039174 - RNA, 21 nt, Human
ugcgcgcaauccagcucugcu

SEQ ID NO: 1039175 - RNA, 18 nt, Human
ugggugugcgaagugacc

SEQ ID NO: 1039176 - RNA, 21 nt, Human
ugucagaagaacccacacaua

SEQ ID NO: 1039177 - RNA, 18 nt, Human
uugcagcccccucggccu

SEQ ID NO: 1039178 - RNA, 25 nt, Human
aaagagaaagaagaggggaauccaa

SEQ ID NO: 1039179 - RNA, 21 nt, Human
aaagaugagaccugcucgaau

SEQ ID NO: 1039180 - RNA, 23 nt, Human
aagaagaggggaauccaaaugaa

SEQ ID NO: 1039181 - RNA, 23 nt, Human
aagguuuggggugacuuguggau

SEQ ID NO: 1039182 - RNA, 21 nt, Human
aauauuuauaaguuuuccucu

SEQ ID NO: 1039183 - RNA, 19 nt, Human
acgcugcaggccacaggcu

SEQ ID NO: 1039184 - RNA, 19 nt, Human
acuucauccccagcaacaa

SEQ ID NO: 1039185 - RNA, 21 nt, Human
acuuccuucucuucuuuucuu

SEQ ID NO: 1039186 - RNA, 24 nt, Human
auaaagaugagaccugcucgaaug

SEQ ID NO: 1039187 - RNA, 23 nt, Human
auaacaucaaaaacaugagauau

SEQ ID NO: 1039188 - RNA, 22 nt, Human
aucaguuucuuuuacuauuuuu

SEQ ID NO: 1039189 - RNA, 25 nt, Human
aucuggaugguuccaggcauaaagg

SEQ ID NO: 1039190 - RNA, 22 nt, Human
augguuccaggcauaaagauga

SEQ ID NO: 1039191 - RNA, 19 nt, Human
caagacaaaacuuauauuc

SEQ ID NO: 1039192 - RNA, 20 nt, Human
caauugcuuucccuugcagu

SEQ ID NO: 1039193 - RNA, 26 nt, Human
cacacagugaugagugguggaugcuc

SEQ ID NO: 1039194 - RNA, 18 nt, Human
caccacagggcugggcuu

SEQ ID NO: 1039195 - RNA, 21 nt, Human
caccacugccacacgaucccc

SEQ ID NO: 1039196 - RNA, 20 nt, Human
cagcaccacugccacacgau

SEQ ID NO: 1039197 - RNA, 22 nt, Human
cagccaccacucaggcacucgg

SEQ ID NO: 1039198 - RNA, 18 nt, Human
caggaucaccagccacca

SEQ ID NO: 1039199 - RNA, 19 nt, Human
caggugaaacaacguggua

SEQ ID NO: 1039200 - RNA, 24 nt, Human
caguggauuucaucuggaugguuc

SEQ ID NO: 1039201 - RNA, 18 nt, Human
ccaaagggaaaagaaaga

SEQ ID NO: 1039202 - RNA, 21 nt, Human
ccaaagggaaaagaaagagaa

SEQ ID NO: 1039203 - RNA, 22 nt, Human
ccaaagggaaaagaaagagaaa

SEQ ID NO: 1039204 - RNA, 22 nt, Human
ccaaaugaaugucucuuagaug

SEQ ID NO: 1039205 - RNA, 19 nt, Human
ccaaggcaagacaaaacuu

SEQ ID NO: 1039206 - RNA, 19 nt, Human
ccaagggcccaaagggaaa

SEQ ID NO: 1039207 - RNA, 19 nt, Human
ccaggaucaccagccacca

SEQ ID NO: 1039208 - RNA, 18 nt, Human
cccacgcugcaggccaca

SEQ ID NO: 1039209 - RNA, 20 nt, Human
cccacgcugcaggccacagg

SEQ ID NO: 1039210 - RNA, 21 nt, Human
ccccacacacaagucuuccug

SEQ ID NO: 1039211 - RNA, 21 nt, Human
cccgagaggacguuggcugcc

SEQ ID NO: 1039212 - RNA, 24 nt, Human
cccucuccuuuucacucucucuca

SEQ ID NO: 1039213 - RNA, 19 nt, Human
cccucucuuucuuucuugu

SEQ ID NO: 1039214 - RNA, 22 nt, Human
cccucucuuucuuucuuguguu

SEQ ID NO: 1039215 - RNA, 28 nt, Human
cccuuucaucuccucuuuccuuucuucc

SEQ ID NO: 1039216 - RNA, 19 nt, Human
cccuuucucccucucuuuc

SEQ ID NO: 1039217 - RNA, 18 nt, Human
ccucucuccuucuuuccc

SEQ ID NO: 1039218 - RNA, 19 nt, Human
ccucucuuucucccucucu

SEQ ID NO: 1039219 - RNA, 22 nt, Human
ccugcucgaaugcagcccagga

SEQ ID NO: 1039220 - RNA, 19 nt, Human
ccuucccauucacccacca

SEQ ID NO: 1039221 - RNA, 19 nt, Human
ccuucuuucccuacuuuau

SEQ ID NO: 1039222 - RNA, 21 nt, Human
ccuucuuucccuacuuuauuu

SEQ ID NO: 1039223 - RNA, 18 nt, Human
ccuuucuuccuccuuccc

SEQ ID NO: 1039224 - RNA, 18 nt, Human
ccuuuuuuucuguuaccc

SEQ ID NO: 1039225 - RNA, 22 nt, Human
cgcugcaggccacaggcucccg

SEQ ID NO: 1039226 - RNA, 18 nt, Human
cggggcagcaccacugcc

SEQ ID NO: 1039227 - RNA, 21 nt, Human
cuaaugucccaaccccacaca

SEQ ID NO: 1039228 - RNA, 19 nt, Human
cucccuuucucccucucuu

SEQ ID NO: 1039229 - RNA, 22 nt, Human
cuccuuuucacucucucucauu

SEQ ID NO: 1039230 - RNA, 23 nt, Human
cucucuuucuuucuuguguucuu

SEQ ID NO: 1039231 - RNA, 18 nt, Human
cucugacccugacaguuc

SEQ ID NO: 1039232 - RNA, 20 nt, Human
cugcuggcuguuuucacuca

SEQ ID NO: 1039233 - RNA, 22 nt, Human
cuuucccuacuuuauuucuuuu

SEQ ID NO: 1039234 - RNA, 25 nt, Human
cuuucccuacuuuauuucuuuuuca

SEQ ID NO: 1039235 - RNA, 26 nt, Human
cuuuccuuucuucucuuuauuuuucu

SEQ ID NO: 1039236 - RNA, 25 nt, Human
cuuuccuuuuuuucuguuacccucu

SEQ ID NO: 1039237 - RNA, 20 nt, Human
cuuucucccucucuuucuuu

SEQ ID NO: 1039238 - RNA, 19 nt, Human
gaggacguuggcugccugc

SEQ ID NO: 1039239 - RNA, 21 nt, Human
gcagcccaggaucaccagcca

SEQ ID NO: 1039240 - RNA, 18 nt, Human
gcaguuuuaauauuuccc

SEQ ID NO: 1039241 - RNA, 23 nt, Human
gcucuuucuucuuucucuuucuc

SEQ ID NO: 1039242 - RNA, 19 nt, Human
gggcugggcuugggagucg

SEQ ID NO: 1039243 - RNA, 20 nt, Human
guagauaacaucaaaaacau

SEQ ID NO: 1039244 - RNA, 21 nt, Human
guuggcugccugcuggcuguu

SEQ ID NO: 1039245 - RNA, 22 nt, Human
uaacaucaaaaacaugagauau

SEQ ID NO: 1039246 - RNA, 18 nt, Human
uaauuccuuccccuuccc

SEQ ID NO: 1039247 - RNA, 30 nt, Human
uagaugccacacacaggugaaacaacgugg

SEQ ID NO: 1039248 - RNA, 27 nt, Human
uagccuuggccuuagacaucugcaacc

SEQ ID NO: 1039249 - RNA, 18 nt, Human
uaguaguuucuugaaguu

SEQ ID NO: 1039250 - RNA, 23 nt, Human
uauuuuuacaauuuuuuucucuc

SEQ ID NO: 1039251 - RNA, 19 nt, Human
ucacucaguucucugaaau

SEQ ID NO: 1039252 - RNA, 21 nt, Human
ucauaggaaggccaagggccc

SEQ ID NO: 1039253 - RNA, 21 nt, Human
uccaggcauaaagaugagacc

SEQ ID NO: 1039254 - RNA, 19 nt, Human
uccccagcaacaauagccu

SEQ ID NO: 1039255 - RNA, 25 nt, Human
uccccagcaacaauagccuuggccu

SEQ ID NO: 1039256 - RNA, 23 nt, Human
ucuaacaugguaaaguuuugugc

SEQ ID NO: 1039257 - RNA, 24 nt, Human
ucucagacaccaguagcuuaauuc

SEQ ID NO: 1039258 - RNA, 24 nt, Human
ucucauuccuucccuuucuucuuu

SEQ ID NO: 1039259 - RNA, 20 nt, Human
ucucccuuucucccucucuu

SEQ ID NO: 1039260 - RNA, 26 nt, Human
ucucccuuucucccucucuuucuccc

SEQ ID NO: 1039261 - RNA, 24 nt, Human
ucucucauuccuucccuuucuucu

SEQ ID NO: 1039262 - RNA, 24 nt, Human
ucucuucuuuucuuccugucuucc

SEQ ID NO: 1039263 - RNA, 19 nt, Human
ucuuuauuucuuuccuuuc

SEQ ID NO: 1039264 - RNA, 22 nt, Human
ucuuucuucuuucucuuucucu

SEQ ID NO: 1039265 - RNA, 19 nt, Human
ucuuuucuuccugucuucc

SEQ ID NO: 1039266 - RNA, 19 nt, Human
ugacuucauccccagcaac

SEQ ID NO: 1039267 - RNA, 21 nt, Human
ugauucuaaugucccaacccc

SEQ ID NO: 1039268 - RNA, 22 nt, Human
ugccacacacaggugaaacaac

SEQ ID NO: 1039269 - RNA, 24 nt, Human
ugccugcuggcuguuuucacucag

SEQ ID NO: 1039270 - RNA, 22 nt, Human
ugcuaauaaccaaggcaagaca

SEQ ID NO: 1039271 - RNA, 18 nt, Human
uggcugccugcuggcugu

SEQ ID NO: 1039272 - RNA, 23 nt, Human
ugguauuuauaaugcaucugggu

SEQ ID NO: 1039273 - RNA, 23 nt, Human
uuaauuccuuccccuucccauuc

SEQ ID NO: 1039274 - RNA, 23 nt, Human
uuagacaucugcaaccuauacag

SEQ ID NO: 1039275 - RNA, 23 nt, Human
uucuaucuuuucucccccuuuca

SEQ ID NO: 1039276 - RNA, 18 nt, Human
uucucccucucuuucucc

SEQ ID NO: 1039277 - RNA, 21 nt, Human
uucucuuuauuuuucugauuc

SEQ ID NO: 1039278 - RNA, 23 nt, Human
uuuccucuuuacuuccuucucuu

SEQ ID NO: 1039279 - RNA, 22 nt, Human
uuuuuuucucucccuuucuccc

SEQ ID NO: 1039280 - RNA, 19 nt, Human
aaaccaccuaccauccccg

SEQ ID NO: 1039281 - RNA, 18 nt, Human
acaaaggugucaaagaga

SEQ ID NO: 1039282 - RNA, 21 nt, Human
accugagugaaguuaaggaac

SEQ ID NO: 1039283 - RNA, 23 nt, Human
auccucuuguuuggcuucuguua

SEQ ID NO: 1039284 - RNA, 20 nt, Human
auggugcugguggccuggcc

SEQ ID NO: 1039285 - RNA, 19 nt, Human
caaaccaccuaccaucccc

SEQ ID NO: 1039286 - RNA, 21 nt, Human
caaagagacuuggccaggccu

SEQ ID NO: 1039287 - RNA, 22 nt, Human
cacuccacaaaggugucaaaga

SEQ ID NO: 1039288 - RNA, 24 nt, Human
caucagccagaggagccagccaac

SEQ ID NO: 1039289 - RNA, 23 nt, Human
ccaaaccaccuaccauccccgcu

SEQ ID NO: 1039290 - RNA, 18 nt, Human
ccaggccaaacugaaaug

SEQ ID NO: 1039291 - RNA, 21 nt, Human
ccaggccaaacugaaauguaa

SEQ ID NO: 1039292 - RNA, 21 nt, Human
ccccgccgccgccgccucuuc

SEQ ID NO: 1039293 - RNA, 24 nt, Human
ccccgccgccgccgccucuucuuc

SEQ ID NO: 1039294 - RNA, 19 nt, Human
ccgcugcccuucuucagag

SEQ ID NO: 1039295 - RNA, 22 nt, Human
cggcggguccaaaccaccuacc

SEQ ID NO: 1039296 - RNA, 20 nt, Human
cuacccccgccgccgccgcc

SEQ ID NO: 1039297 - RNA, 20 nt, Human
cucuagaguggaccccucug

SEQ ID NO: 1039298 - RNA, 22 nt, Human
cuggguaaagacuaguuuccac

SEQ ID NO: 1039299 - RNA, 25 nt, Human
cuuucuggaaacgacggcggcccgg

SEQ ID NO: 1039300 - RNA, 20 nt, Human
gcagugaccgcugcccuucu

SEQ ID NO: 1039301 - RNA, 21 nt, Human
gcagugaccgcugcccuucuu

SEQ ID NO: 1039302 - RNA, 22 nt, Human
gcccauguaccucaacaugcca

SEQ ID NO: 1039303 - RNA, 20 nt, Human
gcuggcccauguaccucaac

SEQ ID NO: 1039304 - RNA, 19 nt, Human
ggugcugguggccuggccu

SEQ ID NO: 1039305 - RNA, 28 nt, Human
uacccccgccgccgccgccucuucuucc

SEQ ID NO: 1039306 - RNA, 20 nt, Human
uccaggcucccuacccccgc

SEQ ID NO: 1039307 - RNA, 20 nt, Human
ucgcugccgcuggcccaugu

SEQ ID NO: 1039308 - RNA, 22 nt, Human
ugaggucagggccaaucaccuc

SEQ ID NO: 1039309 - RNA, 21 nt, Human
ugcagugaccgcugcccuucu

SEQ ID NO: 1039310 - RNA, 19 nt, Human
ugccaucagccagaggagc

SEQ ID NO: 1039311 - RNA, 23 nt, Human
ugcccuugauccccgagggguuc

SEQ ID NO: 1039312 - RNA, 24 nt, Human
ugcuccagagguuccuccagucaa

SEQ ID NO: 1039313 - RNA, 19 nt, Human
uggaccccucuggauugga

SEQ ID NO: 1039314 - RNA, 21 nt, Human
uggccucuagaguggaccccu

SEQ ID NO: 1039315 - RNA, 22 nt, Human
uuaaggaacauguuccaagugu

SEQ ID NO: 1039316 - RNA, 20 nt, Human
uugcugcccagggucgauga

SEQ ID NO: 1039317 - RNA, 22 nt, Human
aagcagcccccuggaaacuucc

SEQ ID NO: 1039318 - RNA, 20 nt, Human
caaagcagcccccuggaaac

SEQ ID NO: 1039319 - RNA, 18 nt, Human
ugcaaagcagcccccugg

SEQ ID NO: 1039320 - RNA, 20 nt, Human
uuagugauaagggaguucuu

SEQ ID NO: 1039321 - RNA, 24 nt, Human
uuggauggggguuagugauaaggg

SEQ ID NO: 1039322 - RNA, 21 nt, Human
agagccuagugcaggagcuag

SEQ ID NO: 1039323 - RNA, 18 nt, Human
agcccccggagggaggga

SEQ ID NO: 1039324 - RNA, 18 nt, Human
agcccguccgcccagccc

SEQ ID NO: 1039325 - RNA, 28 nt, Human
cagcccccggagggagggacggugauug

SEQ ID NO: 1039326 - RNA, 21 nt, Human
ccguccgcccagcccccggag

SEQ ID NO: 1039327 - RNA, 21 nt, Human
ggcuggagguacgggcgcugc

SEQ ID NO: 1039328 - RNA, 21 nt, Human
ucugcagagccuggacaacca

SEQ ID NO: 1039329 - RNA, 18 nt, Human
ugauuggaugggagcugg

SEQ ID NO: 1039330 - RNA, 21 nt, Human
ugcagagccuggacaaccacc

SEQ ID NO: 1039331 - RNA, 25 nt, Human
ugcagagccuggacaaccaccgcca

SEQ ID NO: 1039332 - RNA, 18 nt, Human
uuggaugggagcuggggg

SEQ ID NO: 1039333 - RNA, 18 nt, Human
agaccaaagucccaagug

SEQ ID NO: 1039334 - RNA, 18 nt, Human
agagggccuaggcccaca

SEQ ID NO: 1039335 - RNA, 18 nt, Human
aggggcuggaugguggcc

SEQ ID NO: 1039336 - RNA, 21 nt, Human
caagaccaaagucccaagugg

SEQ ID NO: 1039337 - RNA, 22 nt, Human
ccaccagagggccuaggcccac

SEQ ID NO: 1039338 - RNA, 24 nt, Human
ccagcaagcgagggcagagcuggg

SEQ ID NO: 1039339 - RNA, 21 nt, Human
ccccgcgcugaccccggagac

SEQ ID NO: 1039340 - RNA, 22 nt, Human
ccccgcgcugaccccggagacc

SEQ ID NO: 1039341 - RNA, 18 nt, Human
ccccggagaccggccagc

SEQ ID NO: 1039342 - RNA, 18 nt, Human
ccccggagaccggccagc

SEQ ID NO: 1039343 - RNA, 21 nt, Human
ccccggagaccggccagcaag

SEQ ID NO: 1039344 - RNA, 20 nt, Human
cuggaugguggccccgcgcu

SEQ ID NO: 1039345 - RNA, 24 nt, Human
uggaaggaggggagccaccagugg

SEQ ID NO: 1039346 - RNA, 21 nt, Human
uggggcgggccccaaggggcu

SEQ ID NO: 1039347 - RNA, 19 nt, Human
uucagcaagaccaaagucc

SEQ ID NO: 1039348 - RNA, 22 nt, Human
uucagcaagaccaaagucccaa

SEQ ID NO: 1039349 - RNA, 18 nt, Human
acaauagaaggcaacugg

SEQ ID NO: 1039350 - RNA, 21 nt, Human
agaaaaaauauucacaccugu

SEQ ID NO: 1039351 - RNA, 25 nt, Human
agaaggcaacuggaaaagaggcaag

SEQ ID NO: 1039352 - RNA, 25 nt, Human
gacaauagaaggcaacuggaaaaga

SEQ ID NO: 1039353 - RNA, 20 nt, Human
uagaaggcaacuggaaaaga

SEQ ID NO: 1039354 - RNA, 19 nt, Human
aacccccugcugugcccag

SEQ ID NO: 1039355 - RNA, 18 nt, Human
aagcaggcucagcuucca

SEQ ID NO: 1039356 - RNA, 24 nt, Human
accccgccgccugggcgggcuguc

SEQ ID NO: 1039357 - RNA, 19 nt, Human
agacccgaggguagggcag

SEQ ID NO: 1039358 - RNA, 18 nt, Human
agagcuuggggugggggg

SEQ ID NO: 1039359 - RNA, 20 nt, Human
agagcuugggguggggggag

SEQ ID NO: 1039360 - RNA, 23 nt, Human
agccgugcacccggcagagcccc

SEQ ID NO: 1039361 - RNA, 19 nt, Human
aggcaaccagaggcccaga

SEQ ID NO: 1039362 - RNA, 21 nt, Human
aggcaccuccucgccagccug

SEQ ID NO: 1039363 - RNA, 22 nt, Human
aggcuggaccccucuacccagc

SEQ ID NO: 1039364 - RNA, 18 nt, Human
agggagcaggccaggagc

SEQ ID NO: 1039365 - RNA, 18 nt, Human
aggguggggaaaugugga

SEQ ID NO: 1039366 - RNA, 24 nt, Human
caaggcaaccagaggcccagaccc

SEQ ID NO: 1039367 - RNA, 20 nt, Human
caaguccugagccccguacu

SEQ ID NO: 1039368 - RNA, 19 nt, Human
caccacgggagcugucucc

SEQ ID NO: 1039369 - RNA, 18 nt, Human
cacccugcccucucccuc

SEQ ID NO: 1039370 - RNA, 21 nt, Human
caccuccucgccagccugugg

SEQ ID NO: 1039371 - RNA, 18 nt, Human
cacugcccguuccugcgc

SEQ ID NO: 1039372 - RNA, 20 nt, Human
cacuggacccaccaagaccc

SEQ ID NO: 1039373 - RNA, 20 nt, Human
cagccacugcccguuccugg

SEQ ID NO: 1039374 - RNA, 23 nt, Human
cagccugugggcugcacccacag

SEQ ID NO: 1039375 - RNA, 21 nt, Human
cagggaguugugggcccagag

SEQ ID NO: 1039376 - RNA, 22 nt, Human
caguggaugcacccugcccucu

SEQ ID NO: 1039377 - RNA, 19 nt, Human
caucugguuugaggucagg

SEQ ID NO: 1039378 - RNA, 24 nt, Human
caucugguuugaggucaggucauu

SEQ ID NO: 1039379 - RNA, 28 nt, Human
ccaccaagaccccgccgccugggcgggg

SEQ ID NO: 1039380 - RNA, 18 nt, Human
ccacgggccuuggggcac

SEQ ID NO: 1039381 - RNA, 21 nt, Human
ccagcaaagagaagcaccacg

SEQ ID NO: 1039382 - RNA, 20 nt, Human
ccagcagcagugacgcucag

SEQ ID NO: 1039383 - RNA, 25 nt, Human
cccaaggggagggccggcguccccg

SEQ ID NO: 1039384 - RNA, 23 nt, Human
cccagcaaagagaagcaccacgg

SEQ ID NO: 1039385 - RNA, 24 nt, Human
cccagcugcugugacacccaaggg

SEQ ID NO: 1039386 - RNA, 22 nt, Human
cccagcugucagccacugcccg

SEQ ID NO: 1039387 - RNA, 19 nt, Human
ccccagggacaaggcaacc

SEQ ID NO: 1039388 - RNA, 22 nt, Human
ccccgccgccugggcgggcugu

SEQ ID NO: 1039389 - RNA, 26 nt, Human
ccccgcgcgccgcgcgcuuccgccgg

SEQ ID NO: 1039390 - RNA, 19 nt, Human
ccgccgccugggcgggcug

SEQ ID NO: 1039391 - RNA, 22 nt, Human
ccucgccagacccgaggguagg

SEQ ID NO: 1039392 - RNA, 21 nt, Human
ccucugaguguucuggggagg

SEQ ID NO: 1039393 - RNA, 19 nt, Human
ccuuccauauacagagagu

SEQ ID NO: 1039394 - RNA, 18 nt, Human
cgggccuccccgcgcgcc

SEQ ID NO: 1039395 - RNA, 21 nt, Human
cgucuggguuccgaggguggg

SEQ ID NO: 1039396 - RNA, 23 nt, Human
cgugcacccggcagagccccgca

SEQ ID NO: 1039397 - RNA, 23 nt, Human
cuuccauauacagagagucccac

SEQ ID NO: 1039398 - RNA, 24 nt, Human
cuucccagcugucagccacugccc

SEQ ID NO: 1039399 - RNA, 18 nt, Human
gaaagcaggcucagcucc

SEQ ID NO: 1039400 - RNA, 19 nt, Human
gaccccgccgccugggcgg

SEQ ID NO: 1039401 - RNA, 22 nt, Human
gaggaggggguggggcggaggg

SEQ ID NO: 1039402 - RNA, 19 nt, Human
gaggggcaccauuaccacu

SEQ ID NO: 1039403 - RNA, 24 nt, Human
gagucccaccuccagcaaggguug

SEQ ID NO: 1039404 - RNA, 21 nt, Human
gaguguucuggggaggagggg

SEQ ID NO: 1039405 - RNA, 19 nt, Human
gcaccauuaccacuggacc

SEQ ID NO: 1039406 - RNA, 19 nt, Human
gcagcagugacgcucaggg

SEQ ID NO: 1039407 - RNA, 19 nt, Human
gcuccagcagagcuugggg

SEQ ID NO: 1039408 - RNA, 26 nt, Human
ggaaauguggaaaggcuccugcuggc

SEQ ID NO: 1039409 - RNA, 22 nt, Human
ggacccccaaguccugagcccc

SEQ ID NO: 1039410 - RNA, 20 nt, Human
ggaggggguggggcggaggg

SEQ ID NO: 1039411 - RNA, 21 nt, Human
ggcaccauuaccacuggaccc

SEQ ID NO: 1039412 - RNA, 19 nt, Human
ggccuggacucuccaaccc

SEQ ID NO: 1039413 - RNA, 23 nt, Human
gggagcugucucccaagagcccu

SEQ ID NO: 1039414 - RNA, 19 nt, Human
ggggaggaggggguggggc

SEQ ID NO: 1039415 - RNA, 20 nt, Human
ggggggagcucggugucacc

SEQ ID NO: 1039416 - RNA, 20 nt, Human
guccccgaagccaggucagc

SEQ ID NO: 1039417 - RNA, 19 nt, Human
gucccucugaguguucugg

SEQ ID NO: 1039418 - RNA, 23 nt, Human
gugcccaggacucccccagggac

SEQ ID NO: 1039419 - RNA, 19 nt, Human
uacagagagucccaccucc

SEQ ID NO: 1039420 - RNA, 18 nt, Human
ucagggccuucccagcug

SEQ ID NO: 1039421 - RNA, 25 nt, Human
ucaguucgggccuccccgcgcgccg

SEQ ID NO: 1039422 - RNA, 21 nt, Human
uccccagcggucuccggccgc

SEQ ID NO: 1039423 - RNA, 27 nt, Human
ucccccagggacaaggcaaccagaggc

SEQ ID NO: 1039424 - RNA, 22 nt, Human
uccccgaagccaggucagccgu

SEQ ID NO: 1039425 - RNA, 23 nt, Human
uccccgcgcgccgcgcgcuuccg

SEQ ID NO: 1039426 - RNA, 21 nt, Human
ucccucgccagacccgagggu

SEQ ID NO: 1039427 - RNA, 21 nt, Human
ucccucugaguguucugggga

SEQ ID NO: 1039428 - RNA, 22 nt, Human
ucccucugaguguucuggggag

SEQ ID NO: 1039429 - RNA, 26 nt, Human
ucccugggacacguggaggaccccca

SEQ ID NO: 1039430 - RNA, 27 nt, Human
uccguacugcagggagcaggccaggag

SEQ ID NO: 1039431 - RNA, 18 nt, Human
ucuccaacccccugcugu

SEQ ID NO: 1039432 - RNA, 22 nt, Human
ugacacccaaggggagggccgg

SEQ ID NO: 1039433 - RNA, 21 nt, Human
ugcugugcccaggacuccccc

SEQ ID NO: 1039434 - RNA, 22 nt, Human
ugcugugcccaggacuccccca

SEQ ID NO: 1039435 - RNA, 18 nt, Human
uggaggggaggggcacca

SEQ ID NO: 1039436 - RNA, 18 nt, Human
uggaugcacccugcccuc

SEQ ID NO: 1039437 - RNA, 20 nt, Human
ugggcugcacccacagggaa

SEQ ID NO: 1039438 - RNA, 18 nt, Human
uggggaggaggggguggg

SEQ ID NO: 1039439 - RNA, 19 nt, Human
ugggguggggggagcucgg

SEQ ID NO: 1039440 - RNA, 23 nt, Human
uggguuccgaggguggggaaaug

SEQ ID NO: 1039441 - RNA, 19 nt, Human
ugugacacccaaggggagg

SEQ ID NO: 1039442 - RNA, 20 nt, Human
ugugggcccagcugcuguga

SEQ ID NO: 1039443 - RNA, 19 nt, Human
ugugggcugcacccacagg

SEQ ID NO: 1039444 - RNA, 24 nt, Human
uuccugucugugggcccagcugcu

SEQ ID NO: 1039445 - RNA, 19 nt, Human
uugugggcccagaggggcu

SEQ ID NO: 1039446 - RNA, 22 nt, Human
aaaagcacuggagaaggggcca

SEQ ID NO: 1039447 - RNA, 26 nt, Human
acuaauuuauucauuuaucaauacca

SEQ ID NO: 1039448 - RNA, 21 nt, Human
acucugguggacaccccuggc

SEQ ID NO: 1039449 - RNA, 21 nt, Human
agaaagacaggacagcgcugg

SEQ ID NO: 1039450 - RNA, 25 nt, Human
agaaagacaggacagcgcuggcaag

SEQ ID NO: 1039451 - RNA, 18 nt, Human
agcagcucuggggaaggc

SEQ ID NO: 1039452 - RNA, 25 nt, Human
agcauuggagaagggggcugcaggu

SEQ ID NO: 1039453 - RNA, 22 nt, Human
agcccuggugcacccuccccga

SEQ ID NO: 1039454 - RNA, 21 nt, Human
aggccuggugcacccuccccc

SEQ ID NO: 1039455 - RNA, 20 nt, Human
caagccaauggcagaucaca

SEQ ID NO: 1039456 - RNA, 24 nt, Human
caagccaauggcagaucacaugga

SEQ ID NO: 1039457 - RNA, 22 nt, Human
cacacugucacuaaaugcauca

SEQ ID NO: 1039458 - RNA, 24 nt, Human
cacccucccccagagcacuggaga

SEQ ID NO: 1039459 - RNA, 19 nt, Human
cacuggagaaggggacugc

SEQ ID NO: 1039460 - RNA, 19 nt, Human
cacuggagaagggggcugc

SEQ ID NO: 1039461 - RNA, 19 nt, Human
cacuggagaagggggcugc

SEQ ID NO: 1039462 - RNA, 20 nt, Human
cagguucucacagggugggg

SEQ ID NO: 1039463 - RNA, 18 nt, Human
cagugacucugggccucu

SEQ ID NO: 1039464 - RNA, 19 nt, Human
cauggaaagccugcuggcc

SEQ ID NO: 1039465 - RNA, 23 nt, Human
ccacuuccaacaugaacauacua

SEQ ID NO: 1039466 - RNA, 24 nt, Human
ccagacuagaaacuaacaaagcua

SEQ ID NO: 1039467 - RNA, 26 nt, Human
ccagacuagaaacuaacaaagcuaac

SEQ ID NO: 1039468 - RNA, 25 nt, Human
cccccagagcacuggagaagggggg

SEQ ID NO: 1039469 - RNA, 24 nt, Human
cccgcugccaccucagaagucugu

SEQ ID NO: 1039470 - RNA, 22 nt, Human
cccucccgcugccaccucagaa

SEQ ID NO: 1039471 - RNA, 21 nt, Human
cccuggugcacccuccccaaa

SEQ ID NO: 1039472 - RNA, 18 nt, Human
cccugguguacccucccc

SEQ ID NO: 1039473 - RNA, 21 nt, Human
cccuuccguggccuuccacaa

SEQ ID NO: 1039474 - RNA, 24 nt, Human
ccucccgcugccaccucagaaguc

SEQ ID NO: 1039475 - RNA, 18 nt, Human
ccugagcugaggguugcu

SEQ ID NO: 1039476 - RNA, 22 nt, Human
ccuggcuccacuggccacugaa

SEQ ID NO: 1039477 - RNA, 24 nt, Human
cgaaagcacuggagaagggggcca

SEQ ID NO: 1039478 - RNA, 24 nt, Human
cgaaagcacuggagaagggggcug

SEQ ID NO: 1039479 - RNA, 24 nt, Human
cgagagcacuggagaaggggacug

SEQ ID NO: 1039480 - RNA, 22 nt, Human
cgagagcacuggagaagggggc

SEQ ID NO: 1039481 - RNA, 22 nt, Human
cgagagcacuggagaagggggu

SEQ ID NO: 1039482 - RNA, 20 nt, Human
cgcagggaguagcgagugcc

SEQ ID NO: 1039483 - RNA, 21 nt, Human
cgggagaagggggccacggcu

SEQ ID NO: 1039484 - RNA, 18 nt, Human
cucaaggcgggggcaggc

SEQ ID NO: 1039485 - RNA, 21 nt, Human
cucugagccagucacucuugc

SEQ ID NO: 1039486 - RNA, 18 nt, Human
cuuacagcguggggcagc

SEQ ID NO: 1039487 - RNA, 18 nt, Human
cuuucuucuuuggggccu

SEQ ID NO: 1039488 - RNA, 18 nt, Human
gaccgagcugcuagcagc

SEQ ID NO: 1039489 - RNA, 18 nt, Human
gagaagggggccacggcu

SEQ ID NO: 1039490 - RNA, 18 nt, Human
gagaagggggccacggcu

SEQ ID NO: 1039491 - RNA, 18 nt, Human
gagaagggggccacggcu

SEQ ID NO: 1039492 - RNA, 18 nt, Human
gagaagggggcggcggcu

SEQ ID NO: 1039493 - RNA, 18 nt, Human
gagaagggggcgguggcu

SEQ ID NO: 1039494 - RNA, 22 nt, Human
gagaagggggcugcagguucuc

SEQ ID NO: 1039495 - RNA, 19 nt, Human
gagagcacuggagaagggg

SEQ ID NO: 1039496 - RNA, 22 nt, Human
gccagacuagaaacuaacaaag

SEQ ID NO: 1039497 - RNA, 19 nt, Human
gcuccacuggccacugaag

SEQ ID NO: 1039498 - RNA, 18 nt, Human
ggagaagggggccacggc

SEQ ID NO: 1039499 - RNA, 18 nt, Human
ggagaagggggccacggc

SEQ ID NO: 1039500 - RNA, 18 nt, Human
ggagaagggggccacggc

SEQ ID NO: 1039501 - RNA, 19 nt, Human
ggagaagggggcggcggcu

SEQ ID NO: 1039502 - RNA, 19 nt, Human
ggagaagggggcgguggcu

SEQ ID NO: 1039503 - RNA, 22 nt, Human
ggagagcacuggagaagggggc

SEQ ID NO: 1039504 - RNA, 23 nt, Human
ggccagaaagacaggacagcgcu

SEQ ID NO: 1039505 - RNA, 22 nt, Human
ggcccuggugcacccuccccaa

SEQ ID NO: 1039506 - RNA, 18 nt, Human
gggcugcaguuucucaag

SEQ ID NO: 1039507 - RNA, 23 nt, Human
ggggcggcggcuucuuacagcgu

SEQ ID NO: 1039508 - RNA, 25 nt, Human
gggggcugcagguucucacagggug

SEQ ID NO: 1039509 - RNA, 18 nt, Human
ggguggggcgggccuggu

SEQ ID NO: 1039510 - RNA, 18 nt, Human
ggguggggcgggccuggu

SEQ ID NO: 1039511 - RNA, 19 nt, Human
ggguggggcgggccuggug

SEQ ID NO: 1039512 - RNA, 22 nt, Human
ggugcacccuccccaaaagcac

SEQ ID NO: 1039513 - RNA, 22 nt, Human
ggugcacccuccccgagagcac

SEQ ID NO: 1039514 - RNA, 22 nt, Human
ggugcacccuccccgagagcac

SEQ ID NO: 1039515 - RNA, 22 nt, Human
ggugcacccuccccgagagcac

SEQ ID NO: 1039516 - RNA, 22 nt, Human
ggugcacccucccugagagcac

SEQ ID NO: 1039517 - RNA, 22 nt, Human
ggugcacccucccugagagcac

SEQ ID NO: 1039518 - RNA, 18 nt, Human
gguggggcgggccuggug

SEQ ID NO: 1039519 - RNA, 21 nt, Human
gugcacccuccccgaaagcac

SEQ ID NO: 1039520 - RNA, 19 nt, Human
gugggccagaaagacagga

SEQ ID NO: 1039521 - RNA, 24 nt, Human
uaaaugcaucaggcuuccacacag

SEQ ID NO: 1039522 - RNA, 27 nt, Human
uaacaaagcuaacacacugucacuaaa

SEQ ID NO: 1039523 - RNA, 23 nt, Human
uauauacuacauaggccuguaug

SEQ ID NO: 1039524 - RNA, 21 nt, Human
uauguguguauauacuacaua

SEQ ID NO: 1039525 - RNA, 21 nt, Human
uauucauuuaucaauaccaca

SEQ ID NO: 1039526 - RNA, 20 nt, Human
ucacaggguggggugggccu

SEQ ID NO: 1039527 - RNA, 20 nt, Human
ucacaggguggggugggccu

SEQ ID NO: 1039528 - RNA, 23 nt, Human
ucacauugucuccuucugaaacg

SEQ ID NO: 1039529 - RNA, 22 nt, Human
ucagugccauggcugucccaug

SEQ ID NO: 1039530 - RNA, 23 nt, Human
ucauaagcugacucagauuacac

SEQ ID NO: 1039531 - RNA, 24 nt, Human
uccacaaucaggagcccucaucug

SEQ ID NO: 1039532 - RNA, 23 nt, Human
uccacuggccacugaagcaagcc

SEQ ID NO: 1039533 - RNA, 20 nt, Human
uccccaaaagcacuggagaa

SEQ ID NO: 1039534 - RNA, 24 nt, Human
uccccaaaagcacuggagaagggg

SEQ ID NO: 1039535 - RNA, 24 nt, Human
ucccccagagcacuggagaagggg

SEQ ID NO: 1039536 - RNA, 24 nt, Human
uccccgaaagcacuggagaagggg

SEQ ID NO: 1039537 - RNA, 24 nt, Human
uccccgaaagcacuggagaagggg

SEQ ID NO: 1039538 - RNA, 24 nt, Human
uccccgagagcacuggagaagggg

SEQ ID NO: 1039539 - RNA, 24 nt, Human
uccccgagagcacuggagaagggg

SEQ ID NO: 1039540 - RNA, 24 nt, Human
uccccgagagcacuggagaagggg

SEQ ID NO: 1039541 - RNA, 24 nt, Human
uccccgagagcacuggagaagggg

SEQ ID NO: 1039542 - RNA, 24 nt, Human
uccccgagagcauuggagaagggg

SEQ ID NO: 1039543 - RNA, 24 nt, Human
ucccugagagcacgggagaagggg

SEQ ID NO: 1039544 - RNA, 24 nt, Human
ucccugagagcacuggagaagggg

SEQ ID NO: 1039545 - RNA, 21 nt, Human
ucucacaggguggggcaaccc

SEQ ID NO: 1039546 - RNA, 18 nt, Human
ucucacaggguggggcgg

SEQ ID NO: 1039547 - RNA, 18 nt, Human
ucucacaggguggggcgg

SEQ ID NO: 1039548 - RNA, 18 nt, Human
ucucacaggguggggcgg

SEQ ID NO: 1039549 - RNA, 22 nt, Human
ucuguguccaagacucuggugg

SEQ ID NO: 1039550 - RNA, 23 nt, Human
ugaagcaagccaauggcagauca

SEQ ID NO: 1039551 - RNA, 21 nt, Human
ugacucagauuacacucaagc

SEQ ID NO: 1039552 - RNA, 18 nt, Human
ugagagcacgggagaagg

SEQ ID NO: 1039553 - RNA, 18 nt, Human
ugagagcacuggagaagg

SEQ ID NO: 1039554 - RNA, 24 nt, Human
ugagagcacuggagaagggggcca

SEQ ID NO: 1039555 - RNA, 18 nt, Human
ugcguauguguguauaua

SEQ ID NO: 1039556 - RNA, 24 nt, Human
uggcaaggccacuuccaaagucuc

SEQ ID NO: 1039557 - RNA, 19 nt, Human
uggugcacccuccccgaaa

SEQ ID NO: 1039558 - RNA, 19 nt, Human
uggugcacccuccccgaga

SEQ ID NO: 1039559 - RNA, 19 nt, Human
uggugcacccuccccgaga

SEQ ID NO: 1039560 - RNA, 19 nt, Human
uggugcacccuccccgaga

SEQ ID NO: 1039561 - RNA, 19 nt, Human
uggugcacccucccugaga

SEQ ID NO: 1039562 - RNA, 19 nt, Human
uggugcacccucccugaga

SEQ ID NO: 1039563 - RNA, 19 nt, Human
uguuuuaacugugcaccac

SEQ ID NO: 1039564 - RNA, 19 nt, Human
uucacauugucuccuucug

SEQ ID NO: 1039565 - RNA, 22 nt, Human
uucauaagcugacucagauuac

SEQ ID NO: 1039566 - RNA, 18 nt, Human
uuccacacagggcagggc

SEQ ID NO: 1039567 - RNA, 22 nt, Human
uuccacacagggcagggcauuc

SEQ ID NO: 1039568 - RNA, 19 nt, Human
uuggagaagggggcugcag

SEQ ID NO: 1039569 - RNA, 21 nt, Human
uuguacguguguggcagggag

SEQ ID NO: 1039570 - RNA, 21 nt, Human
agcugcacagcaccacagccu

SEQ ID NO: 1039571 - RNA, 21 nt, Human
agcuggccuuggcagcugcac

SEQ ID NO: 1039572 - RNA, 19 nt, Human
aggcucagcaggcccacga

SEQ ID NO: 1039573 - RNA, 22 nt, Human
cacagcaccacagccugugugg

SEQ ID NO: 1039574 - RNA, 18 nt, Human
cacagccuguguggccag

SEQ ID NO: 1039575 - RNA, 18 nt, Human
cagggguucucucugcuc

SEQ ID NO: 1039576 - RNA, 18 nt, Human
ccagcuccgagcccggug

SEQ ID NO: 1039577 - RNA, 24 nt, Human
cccggcugcccuggccuccucucg

SEQ ID NO: 1039578 - RNA, 21 nt, Human
cccugaagacacgggggugag

SEQ ID NO: 1039579 - RNA, 21 nt, Human
ccggcugcccuggccuccucu

SEQ ID NO: 1039580 - RNA, 21 nt, Human
ccugacggagcuggccuuggc

SEQ ID NO: 1039581 - RNA, 22 nt, Human
ccuguguggccagucgcugccc

SEQ ID NO: 1039582 - RNA, 23 nt, Human
ccuucaguuucuugagcugcagc

SEQ ID NO: 1039583 - RNA, 23 nt, Human
cggcccaggguugcccugaagac

SEQ ID NO: 1039584 - RNA, 19 nt, Human
cucucgggcucccugcagc

SEQ ID NO: 1039585 - RNA, 21 nt, Human
cugacggagcuggccuuggca

SEQ ID NO: 1039586 - RNA, 19 nt, Human
cugcagcugcagccgggca

SEQ ID NO: 1039587 - RNA, 21 nt, Human
cugcagcugccggcccagggu

SEQ ID NO: 1039588 - RNA, 23 nt, Human
cuggccuuggcagcugcacagca

SEQ ID NO: 1039589 - RNA, 24 nt, Human
cuggccuuggcagcugcacagcac

SEQ ID NO: 1039590 - RNA, 23 nt, Human
gccuccacgcccggcuuccccau

SEQ ID NO: 1039591 - RNA, 23 nt, Human
gcugcugcugccacuggcacugc

SEQ ID NO: 1039592 - RNA, 25 nt, Human
gggaacccuggccagcuccgagccc

SEQ ID NO: 1039593 - RNA, 26 nt, Human
gggguucucucugcuccaggaugggg

SEQ ID NO: 1039594 - RNA, 23 nt, Human
guucucucugcuccaggaugggg

SEQ ID NO: 1039595 - RNA, 23 nt, Human
ugcacagcaccacagccugugug

SEQ ID NO: 1039596 - RNA, 27 nt, Human
ugcagccgggcauuuucagccucugcc

SEQ ID NO: 1039597 - RNA, 18 nt, Human
ugcccugaagacacgggg

SEQ ID NO: 1039598 - RNA, 22 nt, Human
ugcccugaagacacggggguga

SEQ ID NO: 1039599 - RNA, 23 nt, Human
ugcccuggccuccucucgggcuc

SEQ ID NO: 1039600 - RNA, 21 nt, Human
ugcuccaggauggggccccag

SEQ ID NO: 1039601 - RNA, 21 nt, Human
uggccagcuccgagcccggug

SEQ ID NO: 1039602 - RNA, 21 nt, Human
uggcugcugcugccacuggca

SEQ ID NO: 1039603 - RNA, 22 nt, Human
aaaacacugacaauacuccuug

SEQ ID NO: 1039604 - RNA, 21 nt, Human
aaacacaaaacacugacaaua

SEQ ID NO: 1039605 - RNA, 22 nt, Human
aaacgacaggcgagaaagaaac

SEQ ID NO: 1039606 - RNA, 19 nt, Human
aacaaggaaaucccagaac

SEQ ID NO: 1039607 - RNA, 22 nt, Human
aacaaggaaaucccagaacagu

SEQ ID NO: 1039608 - RNA, 22 nt, Human
aacaaucaagcaucuuauuacc

SEQ ID NO: 1039609 - RNA, 23 nt, Human
aagaaaaaaaaucaauuuaagac

SEQ ID NO: 1039610 - RNA, 21 nt, Human
aaggccaagaaaaaaaaucaa

SEQ ID NO: 1039611 - RNA, 20 nt, Human
aaguaauaaaaauaaaggcc

SEQ ID NO: 1039612 - RNA, 26 nt, Human
aauauuaagguuuauuuuuucuucca

SEQ ID NO: 1039613 - RNA, 20 nt, Human
accccauaccccaucacuuu

SEQ ID NO: 1039614 - RNA, 31 nt, Human
agaaugcuccugagaguccauaacuguuugg

SEQ ID NO: 1039615 - RNA, 21 nt, Human
aggcgagaaagaaacaaucga

SEQ ID NO: 1039616 - RNA, 24 nt, Human
agguguuuauaucugaguauauca

SEQ ID NO: 1039617 - RNA, 27 nt, Human
aguaauaaaaauaaaggccaagaaaaa

SEQ ID NO: 1039618 - RNA, 22 nt, Human
auauugcaucucugguggcaaa

SEQ ID NO: 1039619 - RNA, 23 nt, Human
caaaacacugacaauacuccuug

SEQ ID NO: 1039620 - RNA, 23 nt, Human
caaggaaaucccagaacagucca

SEQ ID NO: 1039621 - RNA, 23 nt, Human
cagaaugcuccugagaguccaua

SEQ ID NO: 1039622 - RNA, 25 nt, Human
cagauaaaacauuacugcuuaaaag

SEQ ID NO: 1039623 - RNA, 20 nt, Human
cagcagcgacggcucgggcu

SEQ ID NO: 1039624 - RNA, 21 nt, Human
cagcauuuuuguugguuuuuu

SEQ ID NO: 1039625 - RNA, 25 nt, Human
caguuuauauucuuaauuccccauu

SEQ ID NO: 1039626 - RNA, 20 nt, Human
ccaaacacaaaacacugaca

SEQ ID NO: 1039627 - RNA, 21 nt, Human
ccauccagcauuuuuguuggu

SEQ ID NO: 1039628 - RNA, 23 nt, Human
cggcagcccggccuccgcccgcc

SEQ ID NO: 1039629 - RNA, 22 nt, Human
cggcggcagcagcgacggcucg

SEQ ID NO: 1039630 - RNA, 23 nt, Human
cuccuccccucacacuucggcag

SEQ ID NO: 1039631 - RNA, 23 nt, Human
cuuuuuauccuuuaacauccauc

SEQ ID NO: 1039632 - RNA, 22 nt, Human
gagcaguuuguuuuuuuuuuuu

SEQ ID NO: 1039633 - RNA, 20 nt, Human
gcaguuuguuuuuuuuuuuu

SEQ ID NO: 1039634 - RNA, 20 nt, Human
gccaauuuaauaaaaguaaa

SEQ ID NO: 1039635 - RNA, 18 nt, Human
gcgacugaaaauaagggg

SEQ ID NO: 1039636 - RNA, 18 nt, Human
ggggaagagcgacugaaa

SEQ ID NO: 1039637 - RNA, 25 nt, Human
uaaaagggggcuaaaucuaacugau

SEQ ID NO: 1039638 - RNA, 21 nt, Human
uaaaauauaacucauaccuua

SEQ ID NO: 1039639 - RNA, 22 nt, Human
uaaaggccaagaaaaaaaauca

SEQ ID NO: 1039640 - RNA, 20 nt, Human
uaaauugauaugccaaaaug

SEQ ID NO: 1039641 - RNA, 18 nt, Human
uaacugaugacuaucuuc

SEQ ID NO: 1039642 - RNA, 18 nt, Human
uaagguuuauuuuuucuu

SEQ ID NO: 1039643 - RNA, 21 nt, Human
uaauaaaaauaaaggccaaga

SEQ ID NO: 1039644 - RNA, 19 nt, Human
uaccccaucacuuuuuauc

SEQ ID NO: 1039645 - RNA, 24 nt, Human
uagaaacaaauauccauucagaua

SEQ ID NO: 1039646 - RNA, 22 nt, Human
uagcacugaaaaucugaaauau

SEQ ID NO: 1039647 - RNA, 24 nt, Human
uaucccaaacacaaaacacugacu

SEQ ID NO: 1039648 - RNA, 24 nt, Human
ucugaguauaucauuaaauguuuu

SEQ ID NO: 1039649 - RNA, 25 nt, Human
ugagagcaguuuguuuuuuuuuuuu

SEQ ID NO: 1039650 - RNA, 20 nt, Human
uggcacaggcuaaacgacag

SEQ ID NO: 1039651 - RNA, 20 nt, Human
ugguaaacaaggaaauccca

SEQ ID NO: 1039652 - RNA, 24 nt, Human
uguaagaaggcuuuaaaaggauuu

SEQ ID NO: 1039653 - RNA, 22 nt, Human
ugucuagaaaguaucuccuaaa

SEQ ID NO: 1039654 - RNA, 20 nt, Human
uguuauccugacagaaguuu

SEQ ID NO: 1039655 - RNA, 20 nt, Human
uucauaccuaccccauaccc

SEQ ID NO: 1039656 - RNA, 25 nt, Human
uucauauagcacccaaacuucaaac

SEQ ID NO: 1039657 - RNA, 20 nt, Human
uuccagauugaaaguaacaa

SEQ ID NO: 1039658 - RNA, 20 nt, Human
uugcucccgaaguguggcac

SEQ ID NO: 1039659 - RNA, 24 nt, Human
uuuauccuuuaacauccauccagc

SEQ ID NO: 1039660 - RNA, 20 nt, Human
uuucauguuuagguuaacag

SEQ ID NO: 1039661 - RNA, 24 nt, Human
uuucauguuuagguuaacaggcac

SEQ ID NO: 1039662 - RNA, 22 nt, Human
aacaggagguuuuagcacucac

SEQ ID NO: 1039663 - RNA, 20 nt, Human
acacucaacaaaaguuaacc

SEQ ID NO: 1039664 - RNA, 18 nt, Human
agcauaaauggaauaauc

SEQ ID NO: 1039665 - RNA, 26 nt, Human
augaagauuaaauacauuaaggaaaa

SEQ ID NO: 1039666 - RNA, 21 nt, Human
cacaacugaauaaaccauuua

SEQ ID NO: 1039667 - RNA, 18 nt, Human
cacgugagagccagcucc

SEQ ID NO: 1039668 - RNA, 20 nt, Human
cagcauaaauggaauaauca

SEQ ID NO: 1039669 - RNA, 19 nt, Human
caguucauccaagcccauc

SEQ ID NO: 1039670 - RNA, 18 nt, Human
cauaaauggaauaaucaa

SEQ ID NO: 1039671 - RNA, 23 nt, Human
ccaagaucugauuuuuucacaaa

SEQ ID NO: 1039672 - RNA, 21 nt, Human
ccccaguucauccaagcccau

SEQ ID NO: 1039673 - RNA, 19 nt, Human
ccugcuaaacacucaacaa

SEQ ID NO: 1039674 - RNA, 21 nt, Human
cuaguaccugcuaaacacuca

SEQ ID NO: 1039675 - RNA, 18 nt, Human
gaagauuaaauacauuaa

SEQ ID NO: 1039676 - RNA, 21 nt, Human
ggggcuaauaauagcacccau

SEQ ID NO: 1039677 - RNA, 21 nt, Human
uaguaugucccuaguaccugc

SEQ ID NO: 1039678 - RNA, 26 nt, Human
ucaauauaguuguccucguccuuaau

SEQ ID NO: 1039679 - RNA, 24 nt, Human
uccagcauaaauggaauaaucaaa

SEQ ID NO: 1039680 - RNA, 20 nt, Human
uccauuacuggaacgcuaag

SEQ ID NO: 1039681 - RNA, 18 nt, Human
ucccugaaccucaguugc

SEQ ID NO: 1039682 - RNA, 19 nt, Human
ucccugaaccucaguugcc

SEQ ID NO: 1039683 - RNA, 21 nt, Human
ugccccaguucauccaagccc

SEQ ID NO: 1039684 - RNA, 21 nt, Human
uggggggacaaaacucuagag

SEQ ID NO: 1039685 - RNA, 20 nt, Human
uuugcacaacugaauaaacc

SEQ ID NO: 1039686 - RNA, 23 nt, Human
aaaauaaaggcuuuacuauuuac

SEQ ID NO: 1039687 - RNA, 20 nt, Human
aagauacgucuuagcuaugg

SEQ ID NO: 1039688 - RNA, 19 nt, Human
aaggucuuuuuuauaaaga

SEQ ID NO: 1039689 - RNA, 24 nt, Human
aaucacaagagagagagcaucauu

SEQ ID NO: 1039690 - RNA, 20 nt, Human
acuagaguucauuguacauu

SEQ ID NO: 1039691 - RNA, 24 nt, Human
agaaaucacaagagagagagccgg

SEQ ID NO: 1039692 - RNA, 18 nt, Human
aggcggccacaaguggga

SEQ ID NO: 1039693 - RNA, 23 nt, Human
agucacuagguaaacuuaaaacc

SEQ ID NO: 1039694 - RNA, 20 nt, Human
aucauuuggacauuuuccuu

SEQ ID NO: 1039695 - RNA, 22 nt, Human
aucuucccccggcugacuguug

SEQ ID NO: 1039696 - RNA, 23 nt, Human
auuacaaauuuaaaaggcuguaa

SEQ ID NO: 1039697 - RNA, 19 nt, Human
caaaacaacccagugcaac

SEQ ID NO: 1039698 - RNA, 19 nt, Human
ccacaagugggaaaacugg

SEQ ID NO: 1039699 - RNA, 21 nt, Human
cuggaugaaugaauaaaaugu

SEQ ID NO: 1039700 - RNA, 23 nt, Human
cuuuguuacaucugucuggguuu

SEQ ID NO: 1039701 - RNA, 19 nt, Human
gaaugaauaaaaugugggg

SEQ ID NO: 1039702 - RNA, 21 nt, Human
gcacugaagaaguaaucugga

SEQ ID NO: 1039703 - RNA, 24 nt, Human
uaaaaccaaauucagagguugggg

SEQ ID NO: 1039704 - RNA, 23 nt, Human
uaagguaauaaguuuacccauaa

SEQ ID NO: 1039705 - RNA, 21 nt, Human
uagcuugucaaaacaacccag

SEQ ID NO: 1039706 - RNA, 23 nt, Human
ucagucacuagguaaacuuaaaa

SEQ ID NO: 1039707 - RNA, 18 nt, Human
ucuuuuuuauaaagagag

SEQ ID NO: 1039708 - RNA, 20 nt, Human
uggaugaaugaauaaaaugu

SEQ ID NO: 1039709 - RNA, 21 nt, Human
uggucuccuuuggaaaugauc

SEQ ID NO: 1039710 - RNA, 25 nt, Human
ugucaaaacaacccagugcaacuaa

SEQ ID NO: 1039711 - RNA, 18 nt, Human
uuaaagcuuguuugcaau

SEQ ID NO: 1039712 - RNA, 25 nt, Human
uuauuuucaaaaugcuguucuuaac

SEQ ID NO: 1039713 - RNA, 27 nt, Human
uucaagacaaucaauauguaccauaaa

SEQ ID NO: 1039714 - RNA, 22 nt, Human
uucuuaacacaaaaauaaaggc

SEQ ID NO: 1039715 - RNA, 27 nt, Human
uucuuaacacaaaaauaaaggcuuuac

SEQ ID NO: 1039716 - RNA, 21 nt, Human
uugcaguaaaaguuaaggagu

SEQ ID NO: 1039717 - RNA, 22 nt, Human
uugcauacuuauaaaaaagaag

SEQ ID NO: 1039718 - RNA, 21 nt, Human
uuugcacauguuccaagucuu

SEQ ID NO: 1039719 - RNA, 19 nt, Human
ccucuuuccauugauuuug

SEQ ID NO: 1039720 - RNA, 21 nt, Human
uaacuuuuguuuccacaugcc

SEQ ID NO: 1039721 - RNA, 20 nt, Human
uccacaugccuccguagagu

SEQ ID NO: 1039722 - RNA, 23 nt, Human
ucuguuuucuggcggucuuccuc

SEQ ID NO: 1039723 - RNA, 19 nt, Human
ugcuauuacaaauauggaa

SEQ ID NO: 1039724 - RNA, 20 nt, Human
aagaugccccagcccggcca

SEQ ID NO: 1039725 - RNA, 23 nt, Human
aaggugggcggaucacgagguca

SEQ ID NO: 1039726 - RNA, 18 nt, Human
acucgugguaucaucuuc

SEQ ID NO: 1039727 - RNA, 24 nt, Human
agcacuuugggaggccaagguggg

SEQ ID NO: 1039728 - RNA, 21 nt, Human
agcagcauuuguggccauaau

SEQ ID NO: 1039729 - RNA, 23 nt, Human
agcugugugugguggugcaugcc

SEQ ID NO: 1039730 - RNA, 21 nt, Human
aggccaaggugggcggaucac

SEQ ID NO: 1039731 - RNA, 22 nt, Human
agggugcucuucuucccacggg

SEQ ID NO: 1039732 - RNA, 18 nt, Human
agguggccaggaagccag

SEQ ID NO: 1039733 - RNA, 24 nt, Human
aggugggcggaucacgaggucagg

SEQ ID NO: 1039734 - RNA, 18 nt, Human
aucacgaggucaggaguu

SEQ ID NO: 1039735 - RNA, 20 nt, Human
aucacgaggucaggaguuuc

SEQ ID NO: 1039736 - RNA, 22 nt, Human
aucccagcacuuugggaggcca

SEQ ID NO: 1039737 - RNA, 25 nt, Human
aucuuccuccgcgaggucuuuguua

SEQ ID NO: 1039738 - RNA, 22 nt, Human
augcaauucauuaaagagcaac

SEQ ID NO: 1039739 - RNA, 21 nt, Human
augccccagcccggccaugcc

SEQ ID NO: 1039740 - RNA, 18 nt, Human
auuggcuggguguggugg

SEQ ID NO: 1039741 - RNA, 22 nt, Human
caacauggugaaaccaucucua

SEQ ID NO: 1039742 - RNA, 19 nt, Human
caacuucuccccagcaacu

SEQ ID NO: 1039743 - RNA, 18 nt, Human
caagccccaccacaccuc

SEQ ID NO: 1039744 - RNA, 24 nt, Human
cacaucuguaaucccagcacuuug

SEQ ID NO: 1039745 - RNA, 20 nt, Human
caccggaagaguccggcuuu

SEQ ID NO: 1039746 - RNA, 22 nt, Human
cacgaggucaggaguuugagac

SEQ ID NO: 1039747 - RNA, 24 nt, Human
cagcacuuugggaggccaaggugg

SEQ ID NO: 1039748 - RNA, 22 nt, Human
cagcagcauuuguggccauaau

SEQ ID NO: 1039749 - RNA, 23 nt, Human
caucuguaaucccagcacuuugg

SEQ ID NO: 1039750 - RNA, 24 nt, Human
caucuguaaucccagcacuuuggg

SEQ ID NO: 1039751 - RNA, 24 nt, Human
ccaccacaccuccgcuucaccgga

SEQ ID NO: 1039752 - RNA, 18 nt, Human
ccuauccaaacacaugua

SEQ ID NO: 1039753 - RNA, 19 nt, Human
ccucucuccuggccacuac

SEQ ID NO: 1039754 - RNA, 19 nt, Human
ccuggccaacauggugaaa

SEQ ID NO: 1039755 - RNA, 21 nt, Human
ccuggccaacauggugaaacc

SEQ ID NO: 1039756 - RNA, 22 nt, Human
ccuggccaacauggugaaacca

SEQ ID NO: 1039757 - RNA, 19 nt, Human
ccuguucagagacuggugg

SEQ ID NO: 1039758 - RNA, 23 nt, Human
cgccuguuucauccugcccaagg

SEQ ID NO: 1039759 - RNA, 21 nt, Human
cggaucacgaggucaggaguu

SEQ ID NO: 1039760 - RNA, 24 nt, Human
cggaucacgaggucaggaguuuga

SEQ ID NO: 1039761 - RNA, 24 nt, Human
cucacaucuguaaucccagcacuu

SEQ ID NO: 1039762 - RNA, 21 nt, Human
cuuacacaaccagcacaggcu

SEQ ID NO: 1039763 - RNA, 22 nt, Human
cuuccugcgggcccggcgugag

SEQ ID NO: 1039764 - RNA, 25 nt, Human
cuuccugcgggcccggcgugagggu

SEQ ID NO: 1039765 - RNA, 22 nt, Human
cuuuugccauuaaauacucucc

SEQ ID NO: 1039766 - RNA, 24 nt, Human
gaucacgaggucaggaguuugaga

SEQ ID NO: 1039767 - RNA, 23 nt, Human
gcaagccccaccacaccuccgcu

SEQ ID NO: 1039768 - RNA, 21 nt, Human
gccuggccaacauggugaaac

SEQ ID NO: 1039769 - RNA, 22 nt, Human
gccuggccaacauggugaaacc

SEQ ID NO: 1039770 - RNA, 19 nt, Human
gcgggccgggcgugggggu

SEQ ID NO: 1039771 - RNA, 18 nt, Human
gcugggugugguggcuca

SEQ ID NO: 1039772 - RNA, 20 nt, Human
ggaagccagcgggaugcugc

SEQ ID NO: 1039773 - RNA, 22 nt, Human
ggagugggguugcucuucuuca

SEQ ID NO: 1039774 - RNA, 20 nt, Human
ggaucacgaggucaggaguu

SEQ ID NO: 1039775 - RNA, 23 nt, Human
ggaucacgaggucaggaguuuga

SEQ ID NO: 1039776 - RNA, 21 nt, Human
ggccacuacaucacauucaga

SEQ ID NO: 1039777 - RNA, 23 nt, Human
ggcggaucacgaggucaggaguu

SEQ ID NO: 1039778 - RNA, 19 nt, Human
ggcugggugugguggcuca

SEQ ID NO: 1039779 - RNA, 19 nt, Human
gggcgugggggugcucuuc

SEQ ID NO: 1039780 - RNA, 22 nt, Human
ggggugcucuucuuccugcggg

SEQ ID NO: 1039781 - RNA, 20 nt, Human
gggugaggagagguggccag

SEQ ID NO: 1039782 - RNA, 21 nt, Human
ggugaggagagguggccagga

SEQ ID NO: 1039783 - RNA, 24 nt, Human
gguggcucacaucuguaaucccag

SEQ ID NO: 1039784 - RNA, 24 nt, Human
gguggugcaugccuguaaucccag

SEQ ID NO: 1039785 - RNA, 23 nt, Human
ggugugguggcucacaucuguaa

SEQ ID NO: 1039786 - RNA, 21 nt, Human
guugauucuccccucccuguu

SEQ ID NO: 1039787 - RNA, 23 nt, Human
uaagacagcccuaauuggcuggg

SEQ ID NO: 1039788 - RNA, 22 nt, Human
uacacaaccagcacaggcugcg

SEQ ID NO: 1039789 - RNA, 25 nt, Human
uaucaucuuccuccgcgaggucuuu

SEQ ID NO: 1039790 - RNA, 24 nt, Human
ucacgaggucaggaguuugagacu

SEQ ID NO: 1039791 - RNA, 20 nt, Human
ucagcacaggcccaaaguag

SEQ ID NO: 1039792 - RNA, 23 nt, Human
ucccacgggcggggagugggguu

SEQ ID NO: 1039793 - RNA, 22 nt, Human
ucucuacuaaaaauauaaaacu

SEQ ID NO: 1039794 - RNA, 19 nt, Human
ucucugugacagcagcagc

SEQ ID NO: 1039795 - RNA, 22 nt, Human
ucuguagcuucccccauuuuua

SEQ ID NO: 1039796 - RNA, 23 nt, Human
ucugugacagcagcagcauuugu

SEQ ID NO: 1039797 - RNA, 21 nt, Human
ugaagaaacaagucauuugca

SEQ ID NO: 1039798 - RNA, 23 nt, Human
ugacucgugguaucaucuuccuc

SEQ ID NO: 1039799 - RNA, 23 nt, Human
ugagacuggccuggccaacaugg

SEQ ID NO: 1039800 - RNA, 24 nt, Human
ugagacuggccuggccaacauggu

SEQ ID NO: 1039801 - RNA, 18 nt, Human
ugccuguaaucccagcua

SEQ ID NO: 1039802 - RNA, 19 nt, Human
ugccuguaaucccagcuac

SEQ ID NO: 1039803 - RNA, 18 nt, Human
ugcgggccgggcgugggg

SEQ ID NO: 1039804 - RNA, 18 nt, Human
uggccaacauggugaaac

SEQ ID NO: 1039805 - RNA, 18 nt, Human
uggccaggaagccagcgg

SEQ ID NO: 1039806 - RNA, 24 nt, Human
uggccuggccaacauggugaaacc

SEQ ID NO: 1039807 - RNA, 21 nt, Human
uggcucacaucuguaauccca

SEQ ID NO: 1039808 - RNA, 24 nt, Human
uggcucacaucuguaaucccagca

SEQ ID NO: 1039809 - RNA, 19 nt, Human
ugggaggccaaggugggcg

SEQ ID NO: 1039810 - RNA, 24 nt, Human
ugggaggccaaggugggcggauca

SEQ ID NO: 1039811 - RNA, 20 nt, Human
ugggcggaucacgaggucau

SEQ ID NO: 1039812 - RNA, 21 nt, Human
uggugcaugccuguaauccca

SEQ ID NO: 1039813 - RNA, 24 nt, Human
ugguggcucacaucuguaauccca

SEQ ID NO: 1039814 - RNA, 24 nt, Human
ugguggugcaugccuguaauccca

SEQ ID NO: 1039815 - RNA, 24 nt, Human
uuagcugugugugguggugcaugc

SEQ ID NO: 1039816 - RNA, 22 nt, Human
uucagcacaggcccaaaguagg

SEQ ID NO: 1039817 - RNA, 22 nt, Human
uuggcugggugugguggcucac

SEQ ID NO: 1039818 - RNA, 23 nt, Human
uuggcugggugugguggcucaca

SEQ ID NO: 1039819 - RNA, 20 nt, Human
uuguugaacaugguccucuc

SEQ ID NO: 1039820 - RNA, 22 nt, Human
uuuuuuuuuuuguaagacagcc

SEQ ID NO: 1039821 - RNA, 21 nt, Human
accaccacacagauggccuca

SEQ ID NO: 1039822 - RNA, 23 nt, Human
cagcucggauggccccauacccc

SEQ ID NO: 1039823 - RNA, 21 nt, Human
caguaccaucagccaccacca

SEQ ID NO: 1039824 - RNA, 23 nt, Human
ccgggcacccuccacaucgccuu

SEQ ID NO: 1039825 - RNA, 21 nt, Human
ccucuggccggugcaucccag

SEQ ID NO: 1039826 - RNA, 24 nt, Human
ccucuggccggugcaucccagggc

SEQ ID NO: 1039827 - RNA, 19 nt, Human
ccugggcccccauccagaa

SEQ ID NO: 1039828 - RNA, 23 nt, Human
cgccuuuauacucuccugggccc

SEQ ID NO: 1039829 - RNA, 20 nt, Human
cuccaguaccaucagccacc

SEQ ID NO: 1039830 - RNA, 18 nt, Human
cuccugggcccccugggc

SEQ ID NO: 1039831 - RNA, 18 nt, Human
gacucaguuacuccagua

SEQ ID NO: 1039832 - RNA, 20 nt, Human
ucagcucggauggccccaua

SEQ ID NO: 1039833 - RNA, 19 nt, Human
ucccagggcucucgccugu

SEQ ID NO: 1039834 - RNA, 19 nt, Human
uccugggcccccugggccc

SEQ ID NO: 1039835 - RNA, 19 nt, Human
uccugggcccccugggccc

SEQ ID NO: 1039836 - RNA, 23 nt, Human
ucuccugggcccccugggccccc

SEQ ID NO: 1039837 - RNA, 24 nt, Human
ucuccugggcccccugggccccca

SEQ ID NO: 1039838 - RNA, 24 nt, Human
ugggcccccugggcccccauccag

SEQ ID NO: 1039839 - RNA, 24 nt, Human
ugugacugggcgucugguugugcc

SEQ ID NO: 1039840 - RNA, 23 nt, Human
caucaggugagccucugcccucu

SEQ ID NO: 1039841 - RNA, 18 nt, Human
ccaccuccugaaggacac

SEQ ID NO: 1039842 - RNA, 20 nt, Human
ccuccugaaggacacucgcc

SEQ ID NO: 1039843 - RNA, 21 nt, Human
ccucugcccucucaccuguga

SEQ ID NO: 1039844 - RNA, 20 nt, Human
gccugagcccaccucaagcc

SEQ ID NO: 1039845 - RNA, 22 nt, Human
guccccaucaggugagccucug

SEQ ID NO: 1039846 - RNA, 25 nt, Human
uaccagaaaggggaucccggacucc

SEQ ID NO: 1039847 - RNA, 21 nt, Human
ucaggugagccucugcccucu

SEQ ID NO: 1039848 - RNA, 18 nt, Human
ucccggacuccauggcuc

SEQ ID NO: 1039849 - RNA, 19 nt, Human
aaaauaggagcuuggaggg

SEQ ID NO: 1039850 - RNA, 18 nt, Human
aaauaggagcuuggaggg

SEQ ID NO: 1039851 - RNA, 23 nt, Human
aagcagguccaggggcuggggug

SEQ ID NO: 1039852 - RNA, 22 nt, Human
aaggagccagccccuugcagac

SEQ ID NO: 1039853 - RNA, 21 nt, Human
acaagacggguccacgccccc

SEQ ID NO: 1039854 - RNA, 27 nt, Human
accccagagucccucucuggucuaacc

SEQ ID NO: 1039855 - RNA, 24 nt, Human
accuaagugacaucaacucagagc

SEQ ID NO: 1039856 - RNA, 21 nt, Human
acucccuagcccuggacaccc

SEQ ID NO: 1039857 - RNA, 18 nt, Human
agacggguccacgccccc

SEQ ID NO: 1039858 - RNA, 18 nt, Human
agccuggagccugcacag

SEQ ID NO: 1039859 - RNA, 22 nt, Human
agcugacacaguaaaauaggag

SEQ ID NO: 1039860 - RNA, 19 nt, Human
aggaagacuggccacaggc

SEQ ID NO: 1039861 - RNA, 23 nt, Human
aggaggcugcugugggcaggcug

SEQ ID NO: 1039862 - RNA, 21 nt, Human
aggcagggaaggaaguuggag

SEQ ID NO: 1039863 - RNA, 20 nt, Human
aggcagggaaggaaguuggg

SEQ ID NO: 1039864 - RNA, 20 nt, Human
aggcccaucacugccuggcg

SEQ ID NO: 1039865 - RNA, 22 nt, Human
aggccuucacucuccccugagg

SEQ ID NO: 1039866 - RNA, 24 nt, Human
agggacagagcugguuucauccgg

SEQ ID NO: 1039867 - RNA, 20 nt, Human
auagucucugggcagaggga

SEQ ID NO: 1039868 - RNA, 19 nt, Human
aucaggaagacuggccaca

SEQ ID NO: 1039869 - RNA, 19 nt, Human
auugucccugacuguggcu

SEQ ID NO: 1039870 - RNA, 21 nt, Human
caacauggcccuuccuguccc

SEQ ID NO: 1039871 - RNA, 23 nt, Human
caacauggcccuuccugucccuu

SEQ ID NO: 1039872 - RNA, 23 nt, Human
caaggcagacgcgccgcagggac

SEQ ID NO: 1039873 - RNA, 24 nt, Human
cacaggccuggugggaggaacagg

SEQ ID NO: 1039874 - RNA, 22 nt, Human
cacaucccccgguggguaccug

SEQ ID NO: 1039875 - RNA, 19 nt, Human
cacccuagacccaaccuga

SEQ ID NO: 1039876 - RNA, 21 nt, Human
caccuccaccccccggagcag

SEQ ID NO: 1039877 - RNA, 22 nt, Human
cagagggggccuuggagugcag

SEQ ID NO: 1039878 - RNA, 20 nt, Human
cagcagcugaagccccaugc

SEQ ID NO: 1039879 - RNA, 21 nt, Human
caggcacaucccccggugggu

SEQ ID NO: 1039880 - RNA, 20 nt, Human
cauccagggucuuaacgccc

SEQ ID NO: 1039881 - RNA, 19 nt, Human
cauggcccuuccugucccu

SEQ ID NO: 1039882 - RNA, 20 nt, Human
ccagcugacacaguaaaaua

SEQ ID NO: 1039883 - RNA, 23 nt, Human
ccaggggcuggggugggcagggc

SEQ ID NO: 1039884 - RNA, 22 nt, Human
cccacaggucacagaggguaaa

SEQ ID NO: 1039885 - RNA, 22 nt, Human
ccccccggagcaggugcacacc

SEQ ID NO: 1039886 - RNA, 21 nt, Human
cccccgcgccggggcggaggc

SEQ ID NO: 1039887 - RNA, 23 nt, Human
ccccgguggguaccuggagcugu

SEQ ID NO: 1039888 - RNA, 19 nt, Human
ccccucgggaacucccaug

SEQ ID NO: 1039889 - RNA, 19 nt, Human
ccccugaggcugagcccug

SEQ ID NO: 1039890 - RNA, 21 nt, Human
ccccugaggcuguccuggccc

SEQ ID NO: 1039891 - RNA, 22 nt, Human
ccccuugcagacgaguugggag

SEQ ID NO: 1039892 - RNA, 24 nt, Human
ccccuugcagacgaguugggagga

SEQ ID NO: 1039893 - RNA, 18 nt, Human
cccgcgccggggcggagg

SEQ ID NO: 1039894 - RNA, 18 nt, Human
cccgcgccggggcggagg

SEQ ID NO: 1039895 - RNA, 21 nt, Human
cccggcgcccacccaucgccc

SEQ ID NO: 1039896 - RNA, 21 nt, Human
cccuagacccaaccugagccc

SEQ ID NO: 1039897 - RNA, 22 nt, Human
cccuagacccaaccugagcccc

SEQ ID NO: 1039898 - RNA, 26 nt, Human
cccugcugcagaacccagcgcuccug

SEQ ID NO: 1039899 - RNA, 22 nt, Human
cccuggaccuaagugacaucaa

SEQ ID NO: 1039900 - RNA, 19 nt, Human
ccgagccuccuccucagug

SEQ ID NO: 1039901 - RNA, 19 nt, Human
ccgcagcgcgggaaggccc

SEQ ID NO: 1039902 - RNA, 20 nt, Human
ccgcgccccuccggcgcugc

SEQ ID NO: 1039903 - RNA, 23 nt, Human
ccuagcccuggacacccuccuug

SEQ ID NO: 1039904 - RNA, 18 nt, Human
ccuccugcaggccuucac

SEQ ID NO: 1039905 - RNA, 18 nt, Human
ccuccuuugagccucgga

SEQ ID NO: 1039906 - RNA, 24 nt, Human
ccugccuguuugucaggcgggagc

SEQ ID NO: 1039907 - RNA, 18 nt, Human
ccugcuguccccgagccu

SEQ ID NO: 1039908 - RNA, 20 nt, Human
ccugcuguccccgagccucc

SEQ ID NO: 1039909 - RNA, 24 nt, Human
ccuugggccagcagcugaagcccc

SEQ ID NO: 1039910 - RNA, 20 nt, Human
ccuugucucgccugcccucc

SEQ ID NO: 1039911 - RNA, 23 nt, Human
ccuuuuguccugaaugccuuacu

SEQ ID NO: 1039912 - RNA, 23 nt, Human
cgcccacccaucgcccugcgcuc

SEQ ID NO: 1039913 - RNA, 19 nt, Human
cgcgcgaguccgucgcccc

SEQ ID NO: 1039914 - RNA, 25 nt, Human
cgcggcggcggcggcggcgguggcc

SEQ ID NO: 1039915 - RNA, 18 nt, Human
cggcgcugcgcacgcgcg

SEQ ID NO: 1039916 - RNA, 24 nt, Human
cgguggguaccuggagcuguuggg

SEQ ID NO: 1039917 - RNA, 19 nt, Human
cgucgcccccgcgccgggg

SEQ ID NO: 1039918 - RNA, 19 nt, Human
cuccaccccccggagcagg

SEQ ID NO: 1039919 - RNA, 23 nt, Human
cucccgucgcccuugaaagcugg

SEQ ID NO: 1039920 - RNA, 22 nt, Human
cucgcggcggcggcggcggcuu

SEQ ID NO: 1039921 - RNA, 18 nt, Human
cugaggcuguccuggccc

SEQ ID NO: 1039922 - RNA, 22 nt, Human
cugcggucggcuccgccaaggc

SEQ ID NO: 1039923 - RNA, 18 nt, Human
cuguguggagcaaagagg

SEQ ID NO: 1039924 - RNA, 19 nt, Human
cuuggagugcagccagaug

SEQ ID NO: 1039925 - RNA, 18 nt, Human
gacacaguaaaauaggag

SEQ ID NO: 1039926 - RNA, 21 nt, Human
gagcaccuccaccccccggag

SEQ ID NO: 1039927 - RNA, 18 nt, Human
gcaacauggcccuuccug

SEQ ID NO: 1039928 - RNA, 22 nt, Human
gcaggcacaucccccggugggu

SEQ ID NO: 1039929 - RNA, 19 nt, Human
gcaggccuucacucucccc

SEQ ID NO: 1039930 - RNA, 18 nt, Human
gccagcagcugaagcccc

SEQ ID NO: 1039931 - RNA, 23 nt, Human
gccagccccuugcagacgaguug

SEQ ID NO: 1039932 - RNA, 23 nt, Human
gcccuggacacccuccuugucuc

SEQ ID NO: 1039933 - RNA, 19 nt, Human
gcggcggcggcggcggcgg

SEQ ID NO: 1039934 - RNA, 19 nt, Human
gcggcggcggcggcggcgg

SEQ ID NO: 1039935 - RNA, 20 nt, Human
gcggcggcggcggcggcggu

SEQ ID NO: 1039936 - RNA, 19 nt, Human
ggaagaggucaguccacag

SEQ ID NO: 1039937 - RNA, 19 nt, Human
ggcggcggcggcggcggug

SEQ ID NO: 1039938 - RNA, 20 nt, Human
ggcggcggcggcggcggugg

SEQ ID NO: 1039939 - RNA, 19 nt, Human
gggcaggcuggcauggcag

SEQ ID NO: 1039940 - RNA, 21 nt, Human
gggcuggggugggcagggcua

SEQ ID NO: 1039941 - RNA, 24 nt, Human
gggugggcagggcuagcuuuugga

SEQ ID NO: 1039942 - RNA, 22 nt, Human
gguaaagaggucccaagaggga

SEQ ID NO: 1039943 - RNA, 21 nt, Human
guaaagaggucccaagaggga

SEQ ID NO: 1039944 - RNA, 18 nt, Human
uaacucuaggaggcugcu

SEQ ID NO: 1039945 - RNA, 26 nt, Human
uaagugacaucaacucagagccuccu

SEQ ID NO: 1039946 - RNA, 19 nt, Human
uagcccuggacacccuccu

SEQ ID NO: 1039947 - RNA, 21 nt, Human
uagggugaggaggcucugggc

SEQ ID NO: 1039948 - RNA, 24 nt, Human
ucaaaucugccuccaaguccaugu

SEQ ID NO: 1039949 - RNA, 18 nt, Human
ucaagguggagggcaggc

SEQ ID NO: 1039950 - RNA, 18 nt, Human
ucaagguggagggcaggc

SEQ ID NO: 1039951 - RNA, 30 nt, Human
ucccagcccgcgccccuccggcgcugcgcc

SEQ ID NO: 1039952 - RNA, 20 nt, Human
ucccuagcccuggacacccu

SEQ ID NO: 1039953 - RNA, 24 nt, Human
ucccugacuguggcucccugccug

SEQ ID NO: 1039954 - RNA, 23 nt, Human
ucccugccuguuugucaggcggg

SEQ ID NO: 1039955 - RNA, 19 nt, Human
uccugcuguccccgagccu

SEQ ID NO: 1039956 - RNA, 20 nt, Human
uccuuuuguccugaaugccu

SEQ ID NO: 1039957 - RNA, 19 nt, Human
ucucaugagcuggaagcau

SEQ ID NO: 1039958 - RNA, 22 nt, Human
ugaaaaggacagagggggccuu

SEQ ID NO: 1039959 - RNA, 22 nt, Human
ugaaagcuggggccccucggga

SEQ ID NO: 1039960 - RNA, 24 nt, Human
ugacuguggcucccugccuguuug

SEQ ID NO: 1039961 - RNA, 26 nt, Human
ugagcuggaagcauccaaggagccaa

SEQ ID NO: 1039962 - RNA, 18 nt, Human
ugaggaggcucugggcug

SEQ ID NO: 1039963 - RNA, 19 nt, Human
ugaggaggcucugggcugg

SEQ ID NO: 1039964 - RNA, 22 nt, Human
ugaggcugagcccugcugcaga

SEQ ID NO: 1039965 - RNA, 26 nt, Human
ugcacagggacagagcugguuucauc

SEQ ID NO: 1039966 - RNA, 22 nt, Human
ugcagcccuugugccuguggcc

SEQ ID NO: 1039967 - RNA, 21 nt, Human
ugccuccaaguccauguguuc

SEQ ID NO: 1039968 - RNA, 23 nt, Human
uggaagaagcagcugcagcccuu

SEQ ID NO: 1039969 - RNA, 22 nt, Human
uggagggaaaaggcagggaagg

SEQ ID NO: 1039970 - RNA, 23 nt, Human
uggauccugagugucacuacucu

SEQ ID NO: 1039971 - RNA, 18 nt, Human
uggcaggacuugaacucu

SEQ ID NO: 1039972 - RNA, 18 nt, Human
ugggaggaacaccuggug

SEQ ID NO: 1039973 - RNA, 19 nt, Human
ugggaggaacaggauaggg

SEQ ID NO: 1039974 - RNA, 19 nt, Human
ugggagggcugguaugcag

SEQ ID NO: 1039975 - RNA, 20 nt, Human
ugggaguauggcacucaagg

SEQ ID NO: 1039976 - RNA, 24 nt, Human
ugggcagagggagccagggcgggc

SEQ ID NO: 1039977 - RNA, 19 nt, Human
ugucaguuuccuggaagaa

SEQ ID NO: 1039978 - RNA, 30 nt, Human
ugucucgccugcccuccugcaggccuucaa

SEQ ID NO: 1039979 - RNA, 21 nt, Human
uuccuuccagcugacacagua

SEQ ID NO: 1039980 - RNA, 22 nt, Human
uugaaggcuguccaagugcugc

SEQ ID NO: 1039981 - RNA, 21 nt, Human
cacagccuggcucagccaccc

SEQ ID NO: 1039982 - RNA, 21 nt, Human
caggcacuccgugcacagccu

SEQ ID NO: 1039983 - RNA, 18 nt, Human
ccuggcucagccacccgg

SEQ ID NO: 1039984 - RNA, 22 nt, Human
gcacagccuggcucagccaccc

SEQ ID NO: 1039985 - RNA, 18 nt, Human
gcuuguuucucaggcugg

SEQ ID NO: 1039986 - RNA, 24 nt, Human
uccgugcacagccuggcucagcca

SEQ ID NO: 1039987 - RNA, 19 nt, Human
aaaacaauuugaugcuuaa

SEQ ID NO: 1039988 - RNA, 18 nt, Human
aaaauccaaaauggcugc

SEQ ID NO: 1039989 - RNA, 24 nt, Human
aagaaucacagccaaaauaagaca

SEQ ID NO: 1039990 - RNA, 19 nt, Human
aagagaaggcggggcuggc

SEQ ID NO: 1039991 - RNA, 19 nt, Human
aauauuuccugaugagacu

SEQ ID NO: 1039992 - RNA, 25 nt, Human
aaucacagccaaaauaagacauuaa

SEQ ID NO: 1039993 - RNA, 26 nt, Human
acuuuuuuuucuuuuuuacuuuuuaa

SEQ ID NO: 1039994 - RNA, 19 nt, Human
agaggaggccacggcuccc

SEQ ID NO: 1039995 - RNA, 19 nt, Human
aggaggaggaagagaaggc

SEQ ID NO: 1039996 - RNA, 18 nt, Human
aggcugggauucagcguc

SEQ ID NO: 1039997 - RNA, 18 nt, Human
agggaagaagauggagga

SEQ ID NO: 1039998 - RNA, 22 nt, Human
cagcgucguugucauuuccugu

SEQ ID NO: 1039999 - RNA, 21 nt, Human
caggggcgggggaggagaagg

SEQ ID NO: 1040000 - RNA, 22 nt, Human
cauccuccacggccuucagcug

SEQ ID NO: 1040001 - RNA, 21 nt, Human
cccgggcuagggacccagagc

SEQ ID NO: 1040002 - RNA, 19 nt, Human
cccggggaucuuggcccgc

SEQ ID NO: 1040003 - RNA, 22 nt, Human
ccgggggcgggugaucaggggc

SEQ ID NO: 1040004 - RNA, 24 nt, Human
ccuguguggcuucuuuuccagcug

SEQ ID NO: 1040005 - RNA, 20 nt, Human
ccuuggcccuuccgcucuuc

SEQ ID NO: 1040006 - RNA, 23 nt, Human
cuggagucggagcggcguggaga

SEQ ID NO: 1040007 - RNA, 20 nt, Human
gaagauggaggaggaggaaa

SEQ ID NO: 1040008 - RNA, 19 nt, Human
gaggaagagaaggcggggc

SEQ ID NO: 1040009 - RNA, 28 nt, Human
gaggaggaggaagagaaggcggggcugg

SEQ ID NO: 1040010 - RNA, 21 nt, Human
gcucuggggagggaggcuggg

SEQ ID NO: 1040011 - RNA, 19 nt, Human
gcuuaaaauaaaagacagg

SEQ ID NO: 1040012 - RNA, 18 nt, Human
ggaagaagauggaggagg

SEQ ID NO: 1040013 - RNA, 19 nt, Human
gggaagaagauggaggagg

SEQ ID NO: 1040014 - RNA, 20 nt, Human
gggaagaagauggaggagga

SEQ ID NO: 1040015 - RNA, 23 nt, Human
gggcggagaggaggccacggcuc

SEQ ID NO: 1040016 - RNA, 20 nt, Human
gggcgggggaggagaaggau

SEQ ID NO: 1040017 - RNA, 20 nt, Human
gggcgggggaggagaaggau

SEQ ID NO: 1040018 - RNA, 20 nt, Human
uagcauccuccacggccuuc

SEQ ID NO: 1040019 - RNA, 24 nt, Human
ugagaaccgugcuggucacuagcg

SEQ ID NO: 1040020 - RNA, 25 nt, Human
ugauccgggggcgggugaucagggg

SEQ ID NO: 1040021 - RNA, 19 nt, Human
ugcaaaauccaaaauggcu

SEQ ID NO: 1040022 - RNA, 24 nt, Human
ugccaccagugguucgcgagguuc

SEQ ID NO: 1040023 - RNA, 22 nt, Human
ugccuggacccgggcuagggac

SEQ ID NO: 1040024 - RNA, 23 nt, Human
uggaggaggaggaagagaaggcg

SEQ ID NO: 1040025 - RNA, 20 nt, Human
ugucugugucugucuguccu

SEQ ID NO: 1040026 - RNA, 23 nt, Human
uuaaaauaaaagacaggaaauau

SEQ ID NO: 1040027 - RNA, 22 nt, Human
uucccggggaucuuggcccgcu

SEQ ID NO: 1040028 - RNA, 18 nt, Human
aaagcaaggaaaacaagc

SEQ ID NO: 1040029 - RNA, 24 nt, Human
caagcaaacuuacccaguugcaaa

SEQ ID NO: 1040030 - RNA, 23 nt, Human
cagcccuucucucugccaucucc

SEQ ID NO: 1040031 - RNA, 20 nt, Human
caugaugagugccauaccua

SEQ ID NO: 1040032 - RNA, 22 nt, Human
cauuucugucauaauuaguggg

SEQ ID NO: 1040033 - RNA, 18 nt, Human
ccacuggguggggaugaa

SEQ ID NO: 1040034 - RNA, 22 nt, Human
ccuggcagacuauguccaaaag

SEQ ID NO: 1040035 - RNA, 20 nt, Human
cugcagggcuugagcacaga

SEQ ID NO: 1040036 - RNA, 18 nt, Human
cuggcagacuauguccaa

SEQ ID NO: 1040037 - RNA, 19 nt, Human
gaaccucugacacuuagaa

SEQ ID NO: 1040038 - RNA, 22 nt, Human
ggaaaacaagcaaacuuaccca

SEQ ID NO: 1040039 - RNA, 20 nt, Human
ggguggggaugaagguguuu

SEQ ID NO: 1040040 - RNA, 22 nt, Human
uauacaguucugugccugaaac

SEQ ID NO: 1040041 - RNA, 21 nt, Human
ucugcagggcuugagcacaga

SEQ ID NO: 1040042 - RNA, 23 nt, Human
ugaagguguuuuugcgcaacacg

SEQ ID NO: 1040043 - RNA, 18 nt, Human
ugccauaccuauaaaaca

SEQ ID NO: 1040044 - RNA, 23 nt, Human
ugguaguccucugcccgccgcca

SEQ ID NO: 1040045 - RNA, 26 nt, Human
uguccaaaagcaaggaaaacaagcaa

SEQ ID NO: 1040046 - RNA, 21 nt, Human
uuggauauacaguucugugcc

SEQ ID NO: 1040047 - RNA, 22 nt, Human
aggaaggggcagggaaggaggg

SEQ ID NO: 1040048 - RNA, 23 nt, Human
aggggcagggaaggagggccagc

SEQ ID NO: 1040049 - RNA, 19 nt, Human
cacagccugcagcuccccc

SEQ ID NO: 1040050 - RNA, 19 nt, Human
cccccugcaggcgauucag

SEQ ID NO: 1040051 - RNA, 18 nt, Human
ccccggaggccugcgcgg

SEQ ID NO: 1040052 - RNA, 26 nt, Human
ccccggaggccugcgcggaggggcgg

SEQ ID NO: 1040053 - RNA, 24 nt, Human
ccccuacaugguaagccccggccc

SEQ ID NO: 1040054 - RNA, 18 nt, Human
cccggggucccgaagccc

SEQ ID NO: 1040055 - RNA, 23 nt, Human
cccugcggccucuuacagacccc

SEQ ID NO: 1040056 - RNA, 18 nt, Human
ccgaagccccaccccgcg

SEQ ID NO: 1040057 - RNA, 18 nt, Human
cgcucgaggaaggggcag

SEQ ID NO: 1040058 - RNA, 18 nt, Human
cuaacaccagucucacac

SEQ ID NO: 1040059 - RNA, 21 nt, Human
cuccccuacaugguaagcccc

SEQ ID NO: 1040060 - RNA, 19 nt, Human
cugcagcucccccugcagg

SEQ ID NO: 1040061 - RNA, 20 nt, Human
gaccuggcccggcucauccc

SEQ ID NO: 1040062 - RNA, 22 nt, Human
gccagcagagucuguuacuagg

SEQ ID NO: 1040063 - RNA, 23 nt, Human
gccccggccccccggaggccugc

SEQ ID NO: 1040064 - RNA, 18 nt, Human
gcuaacaccagucucaca

SEQ ID NO: 1040065 - RNA, 19 nt, Human
ggaaggagggccagcagag

SEQ ID NO: 1040066 - RNA, 20 nt, Human
ggcagggaaggagggccagc

SEQ ID NO: 1040067 - RNA, 22 nt, Human
ggcagggaaggagggccagcag

SEQ ID NO: 1040068 - RNA, 18 nt, Human
uaacaccagucucacaca

SEQ ID NO: 1040069 - RNA, 21 nt, Human
uaagccccggccccccggagg

SEQ ID NO: 1040070 - RNA, 23 nt, Human
ucccgaagccccaccccgcgcuc

SEQ ID NO: 1040071 - RNA, 18 nt, Human
ucuuacagaccccggagg

SEQ ID NO: 1040072 - RNA, 23 nt, Human
ugcagugagcgguggcuaacacc

SEQ ID NO: 1040073 - RNA, 19 nt, Human
uggcccggcucauccccgg

SEQ ID NO: 1040074 - RNA, 21 nt, Human
uggcuaacaccagucucacac

SEQ ID NO: 1040075 - RNA, 18 nt, Human
aagggggcccgcagagac

SEQ ID NO: 1040076 - RNA, 20 nt, Human
acaauccuuuucucugcaag

SEQ ID NO: 1040077 - RNA, 20 nt, Human
accccugggcugggcugggc

SEQ ID NO: 1040078 - RNA, 18 nt, Human
acuaacaugcaaagucca

SEQ ID NO: 1040079 - RNA, 19 nt, Human
aggaaggcugcguggucuc

SEQ ID NO: 1040080 - RNA, 22 nt, Human
aggcaggcgcugggaggcggug

SEQ ID NO: 1040081 - RNA, 18 nt, Human
aggcagggcccuggggag

SEQ ID NO: 1040082 - RNA, 22 nt, Human
agggggcugggggcucacacua

SEQ ID NO: 1040083 - RNA, 21 nt, Human
cacgggguccuggccuccggg

SEQ ID NO: 1040084 - RNA, 22 nt, Human
cagcugccccaggaacuagguu

SEQ ID NO: 1040085 - RNA, 23 nt, Human
caugcaaaguccagcugccccag

SEQ ID NO: 1040086 - RNA, 24 nt, Human
ccagggaucagcaaugucuccgcc

SEQ ID NO: 1040087 - RNA, 18 nt, Human
cccaggccgcucugaacc

SEQ ID NO: 1040088 - RNA, 23 nt, Human
cccgcagagacguccucuccccc

SEQ ID NO: 1040089 - RNA, 18 nt, Human
cccgcuccggccucccuc

SEQ ID NO: 1040090 - RNA, 21 nt, Human
cccuggggagggggcggcggg

SEQ ID NO: 1040091 - RNA, 19 nt, Human
ccgcccgcgccuccgccuc

SEQ ID NO: 1040092 - RNA, 24 nt, Human
ccgccgcgcugcccgcuccggccu

SEQ ID NO: 1040093 - RNA, 23 nt, Human
ccgcgccuccgccucacgcgucc

SEQ ID NO: 1040094 - RNA, 22 nt, Human
ccuccgccgcccgcgccuccgc

SEQ ID NO: 1040095 - RNA, 18 nt, Human
ccuggaguuucccacaau

SEQ ID NO: 1040096 - RNA, 18 nt, Human
ccuggccuccgggagggg

SEQ ID NO: 1040097 - RNA, 22 nt, Human
cgccaggcacccaggccgcucu

SEQ ID NO: 1040098 - RNA, 25 nt, Human
cgccgcccgcgccuccgccucacgc

SEQ ID NO: 1040099 - RNA, 23 nt, Human
cgcgcucuccccuccagggcucc

SEQ ID NO: 1040100 - RNA, 21 nt, Human
cgggcagggggcugggggcuc

SEQ ID NO: 1040101 - RNA, 23 nt, Human
cuaacaugcaaaguccagcugcc

SEQ ID NO: 1040102 - RNA, 24 nt, Human
cuccggccucccuccgccgcccgc

SEQ ID NO: 1040103 - RNA, 18 nt, Human
cuccgggaggggggaggg

SEQ ID NO: 1040104 - RNA, 23 nt, Human
cuggcaccagacgugucccugcc

SEQ ID NO: 1040105 - RNA, 20 nt, Human
gaggccugccggcccccaag

SEQ ID NO: 1040106 - RNA, 23 nt, Human
gaggcggugggaagaguccugga

SEQ ID NO: 1040107 - RNA, 19 nt, Human
gaggggguggggaggaggc

SEQ ID NO: 1040108 - RNA, 23 nt, Human
gaggggguggggaggaggcaggg

SEQ ID NO: 1040109 - RNA, 22 nt, Human
gccaugaccuugcgugugggca

SEQ ID NO: 1040110 - RNA, 18 nt, Human
gccuccgccucacgcguc

SEQ ID NO: 1040111 - RNA, 22 nt, Human
gcucugaaccacuccaugugcc

SEQ ID NO: 1040112 - RNA, 20 nt, Human
ggaagaguccuggaguuucc

SEQ ID NO: 1040113 - RNA, 24 nt, Human
ggaggcagggcccuggggaggggg

SEQ ID NO: 1040114 - RNA, 20 nt, Human
ggcgggcagggggcuggggg

SEQ ID NO: 1040115 - RNA, 21 nt, Human
gggaagaguccuggaguuucc

SEQ ID NO: 1040116 - RNA, 22 nt, Human
gggaggaggcagggcccugggg

SEQ ID NO: 1040117 - RNA, 20 nt, Human
gggagggggcggcgggcagg

SEQ ID NO: 1040118 - RNA, 21 nt, Human
gggcugggcaggugcgucuuc

SEQ ID NO: 1040119 - RNA, 20 nt, Human
gggcugggcugggcaggugc

SEQ ID NO: 1040120 - RNA, 25 nt, Human
gggcugggcugggcaggugcgucuu

SEQ ID NO: 1040121 - RNA, 23 nt, Human
ggggaggaggcagggcccugggg

SEQ ID NO: 1040122 - RNA, 23 nt, Human
ggggagggggcggcgggcagggg

SEQ ID NO: 1040123 - RNA, 20 nt, Human
ggggguggggaggaggcagg

SEQ ID NO: 1040124 - RNA, 23 nt, Human
ggggugaagggggcccgcagaga

SEQ ID NO: 1040125 - RNA, 20 nt, Human
ggucgaggccugccggcccc

SEQ ID NO: 1040126 - RNA, 28 nt, Human
uacacagacacggccacgcgcacacaug

SEQ ID NO: 1040127 - RNA, 21 nt, Human
ucccccgccccacgggguccu

SEQ ID NO: 1040128 - RNA, 23 nt, Human
ucccccgccccacgggguccugg

SEQ ID NO: 1040129 - RNA, 22 nt, Human
uccgccgcccgcgccuccgccu

SEQ ID NO: 1040130 - RNA, 18 nt, Human
uccgcgcucuccccucca

SEQ ID NO: 1040131 - RNA, 22 nt, Human
ucucccccgccccacggggucc

SEQ ID NO: 1040132 - RNA, 19 nt, Human
ugggcugggcugggcaggu

SEQ ID NO: 1040133 - RNA, 18 nt, Human
uggggaggaggcagggcc

SEQ ID NO: 1040134 - RNA, 19 nt, Human
uggggaggaggcagggccc

SEQ ID NO: 1040135 - RNA, 27 nt, Human
uggggagggggcggcgggcagggggcu

SEQ ID NO: 1040136 - RNA, 23 nt, Human
uuuguuaaaagggggaaaggaag

SEQ ID NO: 1040137 - RNA, 22 nt, Human
uuuuuuuuuuuuuugguuugga

SEQ ID NO: 1040138 - RNA, 18 nt, Human
uuuuuuuuuuuuuuuuug

SEQ ID NO: 1040139 - RNA, 24 nt, Human
uuuuuuuuuuuuuuuuugguuugg

SEQ ID NO: 1040140 - RNA, 23 nt, Human
uuuuuuuuuuuuuuuuuugguuu

SEQ ID NO: 1040141 - RNA, 22 nt, Human
aagcaguccuuuugcacuuuuc

SEQ ID NO: 1040142 - RNA, 22 nt, Human
agacugagcucuuacugcagcc

SEQ ID NO: 1040143 - RNA, 22 nt, Human
cagaacgcgaagccgccuuggc

SEQ ID NO: 1040144 - RNA, 19 nt, Human
cagagguucugucuauucu

SEQ ID NO: 1040145 - RNA, 20 nt, Human
cccggugugggccucugggg

SEQ ID NO: 1040146 - RNA, 23 nt, Human
cgaagccgccuuggccucccaga

SEQ ID NO: 1040147 - RNA, 24 nt, Human
cuagaguucccccaucugagcugg

SEQ ID NO: 1040148 - RNA, 25 nt, Human
cugaagugguaguggguggucuccu

SEQ ID NO: 1040149 - RNA, 22 nt, Human
gacugagcucuuacugcagcca

SEQ ID NO: 1040150 - RNA, 19 nt, Human
gagagugucuuaucuuuuc

SEQ ID NO: 1040151 - RNA, 18 nt, Human
gagcucagacagcugcuc

SEQ ID NO: 1040152 - RNA, 23 nt, Human
gauuucucucuuccuagaguucc

SEQ ID NO: 1040153 - RNA, 19 nt, Human
gcgaagccgccuuggccuc

SEQ ID NO: 1040154 - RNA, 21 nt, Human
ggaaggacugggagccccugg

SEQ ID NO: 1040155 - RNA, 19 nt, Human
gggauguccuggcgucuga

SEQ ID NO: 1040156 - RNA, 19 nt, Human
gggccucuggggguccccc

SEQ ID NO: 1040157 - RNA, 19 nt, Human
gugcagagaggucaccagg

SEQ ID NO: 1040158 - RNA, 20 nt, Human
gugcagagaggucaccaggc

SEQ ID NO: 1040159 - RNA, 22 nt, Human
ucagaggccuuugguuucuuuu

SEQ ID NO: 1040160 - RNA, 18 nt, Human
uccaaagucaagcagucc

SEQ ID NO: 1040161 - RNA, 23 nt, Human
uccauggaauggauuucucucuu

SEQ ID NO: 1040162 - RNA, 21 nt, Human
ucuuacugcagccaacaaagg

SEQ ID NO: 1040163 - RNA, 22 nt, Human
ugauguguacagugucagaggc

SEQ ID NO: 1040164 - RNA, 18 nt, Human
ugcccggugugggccucu

SEQ ID NO: 1040165 - RNA, 24 nt, Human
uggcgucugagcuacggaucuccc

SEQ ID NO: 1040166 - RNA, 21 nt, Human
ugggccgcucgcugugcccgg

SEQ ID NO: 1040167 - RNA, 18 nt, Human
uguguugugauaaauggc

SEQ ID NO: 1040168 - RNA, 19 nt, Human
uuacugcagccaacaaagg

SEQ ID NO: 1040169 - RNA, 21 nt, Human
uugugauaaauggcuucagau

SEQ ID NO: 1040170 - RNA, 21 nt, Human
uuucuucugauggucuuuccu

SEQ ID NO: 1040171 - RNA, 18 nt, Human
uaacagcaauggaucaga

SEQ ID NO: 1040172 - RNA, 22 nt, Human
aaaaccuuuuccaacucagagc

SEQ ID NO: 1040173 - RNA, 19 nt, Human
aaaagaagggagccacgga

SEQ ID NO: 1040174 - RNA, 21 nt, Human
aaacggcuagaucugaauccc

SEQ ID NO: 1040175 - RNA, 20 nt, Human
aaagggaggggagggcagag

SEQ ID NO: 1040176 - RNA, 20 nt, Human
aaccccgccuccugcuucca

SEQ ID NO: 1040177 - RNA, 21 nt, Human
aagcucagagaagacaaagga

SEQ ID NO: 1040178 - RNA, 19 nt, Human
agacaaaggacuucccaag

SEQ ID NO: 1040179 - RNA, 22 nt, Human
agagaaaagaaagcucagagaa

SEQ ID NO: 1040180 - RNA, 18 nt, Human
agagaagacaaaggacuu

SEQ ID NO: 1040181 - RNA, 23 nt, Human
agagaagacaaaggacuucccaa

SEQ ID NO: 1040182 - RNA, 20 nt, Human
agggagaaugggacaagagc

SEQ ID NO: 1040183 - RNA, 20 nt, Human
agggaggggagggcagaguc

SEQ ID NO: 1040184 - RNA, 21 nt, Human
aggguccgccgccgcuggugc

SEQ ID NO: 1040185 - RNA, 23 nt, Human
aguaaguggcagagccagaacaa

SEQ ID NO: 1040186 - RNA, 18 nt, Human
auccaugaaaugggaguu

SEQ ID NO: 1040187 - RNA, 19 nt, Human
aucccuuucuguuauucac

SEQ ID NO: 1040188 - RNA, 23 nt, Human
aucugaaccccgccuccugcuuc

SEQ ID NO: 1040189 - RNA, 22 nt, Human
auggaaaagaacuucuggaagg

SEQ ID NO: 1040190 - RNA, 22 nt, Human
caaaaaauacugugagggaaac

SEQ ID NO: 1040191 - RNA, 19 nt, Human
caaaggacuucccaaggcc

SEQ ID NO: 1040192 - RNA, 19 nt, Human
caaaggacuucccaaggcc

SEQ ID NO: 1040193 - RNA, 24 nt, Human
caaaggacuucccaaggccacaca

SEQ ID NO: 1040194 - RNA, 20 nt, Human
caaaugcucagcccugcccc

SEQ ID NO: 1040195 - RNA, 20 nt, Human
caacucagagccaaggccca

SEQ ID NO: 1040196 - RNA, 22 nt, Human
caaggcccaagaaguugauuca

SEQ ID NO: 1040197 - RNA, 18 nt, Human
cacaguaaguggcagagc

SEQ ID NO: 1040198 - RNA, 19 nt, Human
cacccccuccccggaaagc

SEQ ID NO: 1040199 - RNA, 26 nt, Human
cacccccuccccggaaagcccccgcc

SEQ ID NO: 1040200 - RNA, 18 nt, Human
caccgcuuuuacgcaaag

SEQ ID NO: 1040201 - RNA, 24 nt, Human
cacugugcagcuaaacggcuagau

SEQ ID NO: 1040202 - RNA, 19 nt, Human
cagagccaaggcccaagaa

SEQ ID NO: 1040203 - RNA, 22 nt, Human
cagccagagcccagacaaggga

SEQ ID NO: 1040204 - RNA, 19 nt, Human
caggagggguagggccaag

SEQ ID NO: 1040205 - RNA, 22 nt, Human
caggggucgggggaaaagaagg

SEQ ID NO: 1040206 - RNA, 19 nt, Human
ccaagaucugaaccccgcc

SEQ ID NO: 1040207 - RNA, 20 nt, Human
ccaaguggggugcuccuucc

SEQ ID NO: 1040208 - RNA, 21 nt, Human
cccaagaaguugauucacacc

SEQ ID NO: 1040209 - RNA, 18 nt, Human
cccacauuccagcucuuc

SEQ ID NO: 1040210 - RNA, 19 nt, Human
ccccgaacgauugcaacgc

SEQ ID NO: 1040211 - RNA, 21 nt, Human
ccccuccccggaaagcccccg

SEQ ID NO: 1040212 - RNA, 26 nt, Human
cccuccccggaaagcccccgccccga

SEQ ID NO: 1040213 - RNA, 21 nt, Human
ccgaacgauugcaacgcccuc

SEQ ID NO: 1040214 - RNA, 21 nt, Human
ccgccgccgcuggugcaccug

SEQ ID NO: 1040215 - RNA, 18 nt, Human
ccggaaagcccccgcccc

SEQ ID NO: 1040216 - RNA, 19 nt, Human
ccguccggcuggaaggggg

SEQ ID NO: 1040217 - RNA, 22 nt, Human
ccucaaaaccggguaaggcgag

SEQ ID NO: 1040218 - RNA, 18 nt, Human
ccuccggggagagccugc

SEQ ID NO: 1040219 - RNA, 19 nt, Human
ccuccggggagagccugcu

SEQ ID NO: 1040220 - RNA, 23 nt, Human
ccugagcacccccuccccggaaa

SEQ ID NO: 1040221 - RNA, 18 nt, Human
cgacuccaaaaguucaac

SEQ ID NO: 1040222 - RNA, 22 nt, Human
cgcccucguccccucccggucu

SEQ ID NO: 1040223 - RNA, 23 nt, Human
cggaaagcccccgccccgaacga

SEQ ID NO: 1040224 - RNA, 18 nt, Human
cucagagccaaggcccaa

SEQ ID NO: 1040225 - RNA, 21 nt, Human
cucagagccaaggcccaagaa

SEQ ID NO: 1040226 - RNA, 23 nt, Human
cucagagccaaggcccaagaagu

SEQ ID NO: 1040227 - RNA, 22 nt, Human
cuccccggaaagcccccgcccc

SEQ ID NO: 1040228 - RNA, 23 nt, Human
cucccugcacugcuggauaaaua

SEQ ID NO: 1040229 - RNA, 24 nt, Human
cugcuggauaaauauuugcugcau

SEQ ID NO: 1040230 - RNA, 21 nt, Human
cuguuauucacugacucugug

SEQ ID NO: 1040231 - RNA, 19 nt, Human
gaaacugaaagggagacuu

SEQ ID NO: 1040232 - RNA, 24 nt, Human
gaacgauugcaacgcccucguccc

SEQ ID NO: 1040233 - RNA, 22 nt, Human
gaagacucuggagaagaacucc

SEQ ID NO: 1040234 - RNA, 18 nt, Human
gaaugggacaagagcacc

SEQ ID NO: 1040235 - RNA, 22 nt, Human
gacaaaggacuucccaaggcca

SEQ ID NO: 1040236 - RNA, 24 nt, Human
gacaagggaagacucuggagaaga

SEQ ID NO: 1040237 - RNA, 23 nt, Human
gagaaacaggaagcacuguucug

SEQ ID NO: 1040238 - RNA, 20 nt, Human
gcgacggccugauggaaaag

SEQ ID NO: 1040239 - RNA, 18 nt, Human
ggagacuucucagcugga

SEQ ID NO: 1040240 - RNA, 18 nt, Human
ggggagagccugcuggaa

SEQ ID NO: 1040241 - RNA, 19 nt, Human
ggggagcagagggggcuga

SEQ ID NO: 1040242 - RNA, 22 nt, Human
ggggguuaaagggaggggaggg

SEQ ID NO: 1040243 - RNA, 22 nt, Human
gguuaaagggaggggagggcag

SEQ ID NO: 1040244 - RNA, 22 nt, Human
guccacuuccuuucucuuucuc

SEQ ID NO: 1040245 - RNA, 25 nt, Human
uaaagggaggggagggcagagucug

SEQ ID NO: 1040246 - RNA, 20 nt, Human
uaacacaggagggguagggc

SEQ ID NO: 1040247 - RNA, 21 nt, Human
uaauaaggauuaaacguggcg

SEQ ID NO: 1040248 - RNA, 24 nt, Human
ucacugacucugugagcuuaagaa

SEQ ID NO: 1040249 - RNA, 23 nt, Human
ucagcccugccccgccucccguc

SEQ ID NO: 1040250 - RNA, 24 nt, Human
uccaaaaguucaacucccugcacu

SEQ ID NO: 1040251 - RNA, 19 nt, Human
uccccggaaagcccccgcc

SEQ ID NO: 1040252 - RNA, 19 nt, Human
uccggggagagccugcugg

SEQ ID NO: 1040253 - RNA, 20 nt, Human
ugaaagggagacuucucagc

SEQ ID NO: 1040254 - RNA, 24 nt, Human
ugaaccccgccuccugcuuccaag

SEQ ID NO: 1040255 - RNA, 26 nt, Human
ugagcacccccuccccggaaagcccc

SEQ ID NO: 1040256 - RNA, 20 nt, Human
ugagccuccggggagagccu

SEQ ID NO: 1040257 - RNA, 18 nt, Human
ugagggaaacugaggcuc

SEQ ID NO: 1040258 - RNA, 23 nt, Human
ugagggaaacugaggcucgcgga

SEQ ID NO: 1040259 - RNA, 18 nt, Human
ugcaacgcccucgucccc

SEQ ID NO: 1040260 - RNA, 23 nt, Human
ugccccgccucccguccggcugg

SEQ ID NO: 1040261 - RNA, 23 nt, Human
uggaagaaggaaacugaaaggga

SEQ ID NO: 1040262 - RNA, 24 nt, Human
uggaaggcgaagagauaaacaggg

SEQ ID NO: 1040263 - RNA, 19 nt, Human
uggagaaacaggaagcacu

SEQ ID NO: 1040264 - RNA, 20 nt, Human
uggccaugcaggaauucaac

SEQ ID NO: 1040265 - RNA, 22 nt, Human
uuacgcaaagagaaaagaaagc

SEQ ID NO: 1040266 - RNA, 20 nt, Human
uucccaaggccacacaguaa

SEQ ID NO: 1040267 - RNA, 23 nt, Human
uuuccaacucagagccaaggccc

SEQ ID NO: 1040268 - RNA, 24 nt, Human
aaaaggacauaugggucaaagugu

SEQ ID NO: 1040269 - RNA, 24 nt, Human
aaacaggaaacaggcugugugacc

SEQ ID NO: 1040270 - RNA, 22 nt, Human
aaaccagaacugaggaugccga

SEQ ID NO: 1040271 - RNA, 19 nt, Human
aaagcugaaaccaggccca

SEQ ID NO: 1040272 - RNA, 19 nt, Human
aaaguguuugcagcagugu

SEQ ID NO: 1040273 - RNA, 23 nt, Human
aaauauguagaagucaaaaaagu

SEQ ID NO: 1040274 - RNA, 20 nt, Human
aagcucagggaggcuagcgg

SEQ ID NO: 1040275 - RNA, 21 nt, Human
aagucaaaaaagugucuauga

SEQ ID NO: 1040276 - RNA, 18 nt, Human
aaguguuugcagcagugu

SEQ ID NO: 1040277 - RNA, 18 nt, Human
aauacaguuuuugucaac

SEQ ID NO: 1040278 - RNA, 20 nt, Human
acaaaaaggacauauggguc

SEQ ID NO: 1040279 - RNA, 21 nt, Human
accccuaagagcuuccuggaa

SEQ ID NO: 1040280 - RNA, 25 nt, Human
accccuaggcccagcuggaugaccc

SEQ ID NO: 1040281 - RNA, 24 nt, Human
acucaaggacauacugcggcuuca

SEQ ID NO: 1040282 - RNA, 21 nt, Human
agaacugaggaugccgagggu

SEQ ID NO: 1040283 - RNA, 20 nt, Human
agaugaggagcucacaagga

SEQ ID NO: 1040284 - RNA, 25 nt, Human
agccagaaagcucagggaggcuagc

SEQ ID NO: 1040285 - RNA, 19 nt, Human
agcuagauggguagggggg

SEQ ID NO: 1040286 - RNA, 24 nt, Human
agcuauggggacagccacuagaga

SEQ ID NO: 1040287 - RNA, 18 nt, Human
agcucagggaggcuagcg

SEQ ID NO: 1040288 - RNA, 25 nt, Human
aggacaucauucugucccagcuucc

SEQ ID NO: 1040289 - RNA, 20 nt, Human
aggcuagcggcccugcccag

SEQ ID NO: 1040290 - RNA, 21 nt, Human
aggcuccagucuccagggcug

SEQ ID NO: 1040291 - RNA, 23 nt, Human
agggaccaguucuguccugguca

SEQ ID NO: 1040292 - RNA, 22 nt, Human
agggguccgggaggagugucau

SEQ ID NO: 1040293 - RNA, 18 nt, Human
aggguguggcgucaggag

SEQ ID NO: 1040294 - RNA, 18 nt, Human
agugggcaaucaaagcug

SEQ ID NO: 1040295 - RNA, 23 nt, Human
aucaggguguggcgucaggagcc

SEQ ID NO: 1040296 - RNA, 24 nt, Human
augcagccagggcucccaggguga

SEQ ID NO: 1040297 - RNA, 20 nt, Human
augcucauaauauauaguga

SEQ ID NO: 1040298 - RNA, 18 nt, Human
caaaacaauaugccaaga

SEQ ID NO: 1040299 - RNA, 20 nt, Human
caaaacaauaugccaagaca

SEQ ID NO: 1040300 - RNA, 23 nt, Human
caacaccaacacgcuggggacau

SEQ ID NO: 1040301 - RNA, 20 nt, Human
caacuuagcccuaccagcag

SEQ ID NO: 1040302 - RNA, 27 nt, Human
caauaugccaagacaugauuucugccc

SEQ ID NO: 1040303 - RNA, 20 nt, Human
cacagggcugaacacucgag

SEQ ID NO: 1040304 - RNA, 18 nt, Human
cacugcuguauccccagc

SEQ ID NO: 1040305 - RNA, 22 nt, Human
cagaacugaggaugccgagggu

SEQ ID NO: 1040306 - RNA, 20 nt, Human
cagauggucugcagcaacgc

SEQ ID NO: 1040307 - RNA, 23 nt, Human
cagauuacaaaacaauaugccaa

SEQ ID NO: 1040308 - RNA, 18 nt, Human
cagcaacgcacgggcaac

SEQ ID NO: 1040309 - RNA, 22 nt, Human
cagcagguggaacuaguuuugc

SEQ ID NO: 1040310 - RNA, 19 nt, Human
cagccagggcucccagggu

SEQ ID NO: 1040311 - RNA, 19 nt, Human
cagcgcuacguggugagaa

SEQ ID NO: 1040312 - RNA, 23 nt, Human
cagcggccucaggcucagggccu

SEQ ID NO: 1040313 - RNA, 21 nt, Human
cagcuagaucaagguucccaa

SEQ ID NO: 1040314 - RNA, 21 nt, Human
caucacaaacuuagagacuuu

SEQ ID NO: 1040315 - RNA, 18 nt, Human
cauuuugcaacauugugg

SEQ ID NO: 1040316 - RNA, 25 nt, Human
ccaacaccaacacgcuggggacaug

SEQ ID NO: 1040317 - RNA, 19 nt, Human
ccagggaucuuugguuacu

SEQ ID NO: 1040318 - RNA, 22 nt, Human
cccacgacuuaggagcuggaga

SEQ ID NO: 1040319 - RNA, 19 nt, Human
cccagccacugggcuccuc

SEQ ID NO: 1040320 - RNA, 21 nt, Human
cccagccugaagccagaaagc

SEQ ID NO: 1040321 - RNA, 21 nt, Human
cccaugcagccagggcuccca

SEQ ID NO: 1040322 - RNA, 26 nt, Human
cccaugcagccagggcucccaggguu

SEQ ID NO: 1040323 - RNA, 22 nt, Human
cccccaccccagccacugggcu

SEQ ID NO: 1040324 - RNA, 23 nt, Human
cccuaggcccagcuggaugaccc

SEQ ID NO: 1040325 - RNA, 21 nt, Human
cccucugagaagccuucccug

SEQ ID NO: 1040326 - RNA, 18 nt, Human
cccugcaccccuaggccc

SEQ ID NO: 1040327 - RNA, 18 nt, Human
ccgagggugguggggggg

SEQ ID NO: 1040328 - RNA, 24 nt, Human
ccucagggcugugcuccugcuacc

SEQ ID NO: 1040329 - RNA, 22 nt, Human
ccucagggcugugcuccugcuc

SEQ ID NO: 1040330 - RNA, 18 nt, Human
ccugaagccagaaagcuc

SEQ ID NO: 1040331 - RNA, 21 nt, Human
ccugacacuucacuuccguga

SEQ ID NO: 1040332 - RNA, 20 nt, Human
ccugcuccuggacuuuacag

SEQ ID NO: 1040333 - RNA, 23 nt, Human
ccugcuccuggacuuuacagaua

SEQ ID NO: 1040334 - RNA, 21 nt, Human
cgacaagccgaggggcugcca

SEQ ID NO: 1040335 - RNA, 18 nt, Human
cgcccccucugagaagcc

SEQ ID NO: 1040336 - RNA, 20 nt, Human
cucagcacugacccugcacc

SEQ ID NO: 1040337 - RNA, 26 nt, Human
cucagcacugacccugcaccgguucc

SEQ ID NO: 1040338 - RNA, 26 nt, Human
cucagcccccaccccagccacugggc

SEQ ID NO: 1040339 - RNA, 22 nt, Human
cucauaauauauagugacaauu

SEQ ID NO: 1040340 - RNA, 23 nt, Human
cuccaggccuugauuuccccauc

SEQ ID NO: 1040341 - RNA, 21 nt, Human
cuccagggcugugugugucca

SEQ ID NO: 1040342 - RNA, 26 nt, Human
cuccagggcuguguguguccaggggu

SEQ ID NO: 1040343 - RNA, 19 nt, Human
cuccggcgacaagccgagg

SEQ ID NO: 1040344 - RNA, 23 nt, Human
cugaagcucccgcguggucaugc

SEQ ID NO: 1040345 - RNA, 19 nt, Human
cugcacggcccacacacag

SEQ ID NO: 1040346 - RNA, 23 nt, Human
cugugugugcugccucucagagc

SEQ ID NO: 1040347 - RNA, 21 nt, Human
cuuagagacuuuucucuccuc

SEQ ID NO: 1040348 - RNA, 24 nt, Human
cuuucuaaguuccccguuugaaaa

SEQ ID NO: 1040349 - RNA, 26 nt, Human
gacaagccgaggggcugccacuuucu

SEQ ID NO: 1040350 - RNA, 23 nt, Human
gacuugccaugcuccaaggcucc

SEQ ID NO: 1040351 - RNA, 21 nt, Human
gagcuggagagcacacagggc

SEQ ID NO: 1040352 - RNA, 20 nt, Human
gaggugacaagugugggucc

SEQ ID NO: 1040353 - RNA, 23 nt, Human
gcagagcuaaguccaugcuaugc

SEQ ID NO: 1040354 - RNA, 18 nt, Human
gcaggguuauucugugug

SEQ ID NO: 1040355 - RNA, 24 nt, Human
gccagaaagcucagggaggcuagg

SEQ ID NO: 1040356 - RNA, 18 nt, Human
gcccacacacaggcuccc

SEQ ID NO: 1040357 - RNA, 22 nt, Human
gcccccaccccagccacugggc

SEQ ID NO: 1040358 - RNA, 19 nt, Human
gcccugcccaggccucagc

SEQ ID NO: 1040359 - RNA, 20 nt, Human
gccucccagccugaagccag

SEQ ID NO: 1040360 - RNA, 18 nt, Human
gccuccugacacuucacu

SEQ ID NO: 1040361 - RNA, 22 nt, Human
gcgucaggagccggagccuacg

SEQ ID NO: 1040362 - RNA, 21 nt, Human
gcugaaaccaggcccacgacu

SEQ ID NO: 1040363 - RNA, 21 nt, Human
ggaaacaggcugugugaccug

SEQ ID NO: 1040364 - RNA, 24 nt, Human
ggcguggggacuuuuggaggggag

SEQ ID NO: 1040365 - RNA, 24 nt, Human
gggggccgagccugggagcugaca

SEQ ID NO: 1040366 - RNA, 18 nt, Human
gggucuugauaucagggu

SEQ ID NO: 1040367 - RNA, 18 nt, Human
gguagggggggacccacu

SEQ ID NO: 1040368 - RNA, 25 nt, Human
gguuaugggucccaugcagccaggg

SEQ ID NO: 1040369 - RNA, 20 nt, Human
gguucccaacaccaacacgc

SEQ ID NO: 1040370 - RNA, 24 nt, Human
guccggguguguccuggaccuacc

SEQ ID NO: 1040371 - RNA, 23 nt, Human
gugucauauggccccuucgagcu

SEQ ID NO: 1040372 - RNA, 21 nt, Human
uaaaaagcagauuacaaaaca

SEQ ID NO: 1040373 - RNA, 24 nt, Human
uaagaagagacagagaaagcgaaa

SEQ ID NO: 1040374 - RNA, 22 nt, Human
uaagugcccgucagguccuggg

SEQ ID NO: 1040375 - RNA, 26 nt, Human
uaccuccuuuugcaggacaacauuuu

SEQ ID NO: 1040376 - RNA, 24 nt, Human
uacguggugagaaacuuaccuccu

SEQ ID NO: 1040377 - RNA, 24 nt, Human
uagaaguugccauaagagugcacu

SEQ ID NO: 1040378 - RNA, 19 nt, Human
uagaauacaaugaaaccau

SEQ ID NO: 1040379 - RNA, 19 nt, Human
uagugagggggccgagccu

SEQ ID NO: 1040380 - RNA, 21 nt, Human
uaguuuccugccucagggcug

SEQ ID NO: 1040381 - RNA, 23 nt, Human
ucacaaggacccuggauggggga

SEQ ID NO: 1040382 - RNA, 21 nt, Human
ucagguccugggugcgggagg

SEQ ID NO: 1040383 - RNA, 23 nt, Human
ucagguccugggugcgggagguc

SEQ ID NO: 1040384 - RNA, 19 nt, Human
ucauucugucccagcuucc

SEQ ID NO: 1040385 - RNA, 24 nt, Human
uccagggcuguguguguccagggg

SEQ ID NO: 1040386 - RNA, 25 nt, Human
ucccaacaccaacacgcuggggaca

SEQ ID NO: 1040387 - RNA, 18 nt, Human
ucccugaccaccuggcug

SEQ ID NO: 1040388 - RNA, 21 nt, Human
ucccugaccaccuggcugagg

SEQ ID NO: 1040389 - RNA, 20 nt, Human
uccggguguguccuggaccu

SEQ ID NO: 1040390 - RNA, 24 nt, Human
uccuggaccuacccccuuucuggg

SEQ ID NO: 1040391 - RNA, 25 nt, Human
ucuaggccaaggggucacaguccac

SEQ ID NO: 1040392 - RNA, 24 nt, Human
ucuccaggccuugauuuccccauc

SEQ ID NO: 1040393 - RNA, 18 nt, Human
ucuccagggugcuugggc

SEQ ID NO: 1040394 - RNA, 18 nt, Human
ucucugucucucucucuu

SEQ ID NO: 1040395 - RNA, 26 nt, Human
ucucugucucucucucuuuuaacaaa

SEQ ID NO: 1040396 - RNA, 18 nt, Human
ucugucucugucucucuc

SEQ ID NO: 1040397 - RNA, 20 nt, Human
ugaccccuaagagcuuccuu

SEQ ID NO: 1040398 - RNA, 22 nt, Human
ugagaagccuucccugaccacc

SEQ ID NO: 1040399 - RNA, 18 nt, Human
ugagagcgaaggcacagu

SEQ ID NO: 1040400 - RNA, 20 nt, Human
ugaggcagggaccaguucug

SEQ ID NO: 1040401 - RNA, 22 nt, Human
ugaggcagggaccaguucuguc

SEQ ID NO: 1040402 - RNA, 21 nt, Human
ugagggcauaggggcugcccc

SEQ ID NO: 1040403 - RNA, 19 nt, Human
ugagggggccgagccuggg

SEQ ID NO: 1040404 - RNA, 20 nt, Human
ugcaaggcuucucuguuagu

SEQ ID NO: 1040405 - RNA, 18 nt, Human
ugccaagacaugauuucu

SEQ ID NO: 1040406 - RNA, 22 nt, Human
ugccucagggcugugcuccugc

SEQ ID NO: 1040407 - RNA, 20 nt, Human
ugcuggagcugcugcagcca

SEQ ID NO: 1040408 - RNA, 22 nt, Human
uggagcccacucucucagcugg

SEQ ID NO: 1040409 - RNA, 23 nt, Human
uggaggggagggcauuuucuuga

SEQ ID NO: 1040410 - RNA, 23 nt, Human
uggauaagucaucucuccaggcc

SEQ ID NO: 1040411 - RNA, 18 nt, Human
uggggugguuaaaauaac

SEQ ID NO: 1040412 - RNA, 18 nt, Human
uggguccuugccgugcac

SEQ ID NO: 1040413 - RNA, 20 nt, Human
uguccagggguccgggagga

SEQ ID NO: 1040414 - RNA, 18 nt, Human
ugucccagcuuccauuug

SEQ ID NO: 1040415 - RNA, 27 nt, Human
uuaggagcuggagagcacacagggcug

SEQ ID NO: 1040416 - RNA, 26 nt, Human
uuaguggugccuggagcccacucucu

SEQ ID NO: 1040417 - RNA, 20 nt, Human
uucucuguuaguggugccug

SEQ ID NO: 1040418 - RNA, 21 nt, Human
uucuugaucuuaccauggggg

SEQ ID NO: 1040419 - RNA, 19 nt, Human
uugcuggagcugcugcagc

SEQ ID NO: 1040420 - RNA, 21 nt, Human
uuugccuaaaauucuccccuc

SEQ ID NO: 1040421 - RNA, 21 nt, Human
aaaaacagaucugccaaagca

SEQ ID NO: 1040422 - RNA, 23 nt, Human
aaaagcccaaggcagggagagca

SEQ ID NO: 1040423 - RNA, 24 nt, Human
aaaaggaaaacaugacggaaagaa

SEQ ID NO: 1040424 - RNA, 25 nt, Human
aaaaggaaaacaugacggaaagaaa

SEQ ID NO: 1040425 - RNA, 23 nt, Human
aaagaaaagcccaaggcagggag

SEQ ID NO: 1040426 - RNA, 23 nt, Human
aacaauucugagaaccgggaauu

SEQ ID NO: 1040427 - RNA, 24 nt, Human
aacuggcuuacccugccugaccuc

SEQ ID NO: 1040428 - RNA, 21 nt, Human
aagaacacuggaaagguucug

SEQ ID NO: 1040429 - RNA, 24 nt, Human
aagccaaacgcaacggccccugug

SEQ ID NO: 1040430 - RNA, 22 nt, Human
aaggaacacgaaaaggaaaaca

SEQ ID NO: 1040431 - RNA, 23 nt, Human
acaaagccaaacgcaacggcccc

SEQ ID NO: 1040432 - RNA, 18 nt, Human
acgaaaaggaaaacauga

SEQ ID NO: 1040433 - RNA, 19 nt, Human
acucguuccuuggaaacau

SEQ ID NO: 1040434 - RNA, 20 nt, Human
acucguuccuuggaaacauu

SEQ ID NO: 1040435 - RNA, 21 nt, Human
agaaaaacagaucugccaaag

SEQ ID NO: 1040436 - RNA, 19 nt, Human
agaaggaacacgaaaagga

SEQ ID NO: 1040437 - RNA, 21 nt, Human
agagaaggaacacgaaaagga

SEQ ID NO: 1040438 - RNA, 18 nt, Human
agaucugccaaagcagcu

SEQ ID NO: 1040439 - RNA, 22 nt, Human
agcagagacaagagaaaucaga

SEQ ID NO: 1040440 - RNA, 19 nt, Human
aggaaaacaugacggaaag

SEQ ID NO: 1040441 - RNA, 25 nt, Human
aggaacacgaaaaggaaaacaugac

SEQ ID NO: 1040442 - RNA, 28 nt, Human
aggcagcccgggcugggucuccugggca

SEQ ID NO: 1040443 - RNA, 18 nt, Human
agguccugccccucugcu

SEQ ID NO: 1040444 - RNA, 19 nt, Human
agugggagggcccaucccc

SEQ ID NO: 1040445 - RNA, 21 nt, Human
aucuuuuuuuguuuuuccccu

SEQ ID NO: 1040446 - RNA, 18 nt, Human
augacggaaagaaaagcc

SEQ ID NO: 1040447 - RNA, 22 nt, Human
auucugcuuaaagcccccucca

SEQ ID NO: 1040448 - RNA, 27 nt, Human
caaagcagcucacagcauggaggagcc

SEQ ID NO: 1040449 - RNA, 20 nt, Human
caacauacacacauauucac

SEQ ID NO: 1040450 - RNA, 20 nt, Human
cacaaagccaaacgcaacgg

SEQ ID NO: 1040451 - RNA, 20 nt, Human
caccaccugcuguggagccg

SEQ ID NO: 1040452 - RNA, 22 nt, Human
cagagacaagagaaaucagaga

SEQ ID NO: 1040453 - RNA, 22 nt, Human
cagauccuuccagacacuccuc

SEQ ID NO: 1040454 - RNA, 19 nt, Human
cagcauggaggagcaggca

SEQ ID NO: 1040455 - RNA, 19 nt, Human
cagcccgggcugggucucc

SEQ ID NO: 1040456 - RNA, 22 nt, Human
caggaugacuuccuggugcuga

SEQ ID NO: 1040457 - RNA, 19 nt, Human
caggcuccguggaugcccc

SEQ ID NO: 1040458 - RNA, 21 nt, Human
caucccagccauuucccccaa

SEQ ID NO: 1040459 - RNA, 22 nt, Human
ccagacacugaguaucuguacu

SEQ ID NO: 1040460 - RNA, 23 nt, Human
ccccaaagagucagaauucugcu

SEQ ID NO: 1040461 - RNA, 25 nt, Human
ccccaaagcaguggugacaccaaca

SEQ ID NO: 1040462 - RNA, 21 nt, Human
ccccaggacagcuuguuccca

SEQ ID NO: 1040463 - RNA, 24 nt, Human
ccccaguuccuaaucccccacccc

SEQ ID NO: 1040464 - RNA, 22 nt, Human
cccccaggacagcuuguuccca

SEQ ID NO: 1040465 - RNA, 23 nt, Human
cccccaggacagcuuguucccaa

SEQ ID NO: 1040466 - RNA, 24 nt, Human
cccccaguuccuaaucccccaccc

SEQ ID NO: 1040467 - RNA, 23 nt, Human
cccccugaaaauauaaauauugc

SEQ ID NO: 1040468 - RNA, 22 nt, Human
ccuaaucucucuuggacaacau

SEQ ID NO: 1040469 - RNA, 21 nt, Human
ccugacuccugccucgugggu

SEQ ID NO: 1040470 - RNA, 18 nt, Human
cggagggugguuaaugag

SEQ ID NO: 1040471 - RNA, 19 nt, Human
cuccccaccaccugcugug

SEQ ID NO: 1040472 - RNA, 18 nt, Human
cucuuggacaacauacac

SEQ ID NO: 1040473 - RNA, 19 nt, Human
cugaugaaaucagaaccaa

SEQ ID NO: 1040474 - RNA, 20 nt, Human
cugggguuugcggagggugg

SEQ ID NO: 1040475 - RNA, 22 nt, Human
cugugacagcaugcaccagagu

SEQ ID NO: 1040476 - RNA, 22 nt, Human
cuuccuggugcugagcuggugc

SEQ ID NO: 1040477 - RNA, 18 nt, Human
gaaaaggaaaacaugacg

SEQ ID NO: 1040478 - RNA, 19 nt, Human
gaacacuggaaagguucug

SEQ ID NO: 1040479 - RNA, 22 nt, Human
gacaagagaaaucagagaagga

SEQ ID NO: 1040480 - RNA, 19 nt, Human
gagcagcagagacaagaga

SEQ ID NO: 1040481 - RNA, 23 nt, Human
gcagagacaagagaaaucagaga

SEQ ID NO: 1040482 - RNA, 21 nt, Human
gccaacuggcuuacccugccu

SEQ ID NO: 1040483 - RNA, 21 nt, Human
gcccgggcugggucuccuggg

SEQ ID NO: 1040484 - RNA, 21 nt, Human
ggaaaacaugacggaaagaaa

SEQ ID NO: 1040485 - RNA, 20 nt, Human
gggaaagugggagggcccau

SEQ ID NO: 1040486 - RNA, 19 nt, Human
guccugagugcccuggaac

SEQ ID NO: 1040487 - RNA, 18 nt, Human
uaacucgagguucuccuc

SEQ ID NO: 1040488 - RNA, 23 nt, Human
uacaaaggagccccucgaggcag

SEQ ID NO: 1040489 - RNA, 19 nt, Human
uacagagaugaggcgaggg

SEQ ID NO: 1040490 - RNA, 21 nt, Human
uagccucaucccagccauuuc

SEQ ID NO: 1040491 - RNA, 20 nt, Human
uccaaaggcugcuucuuccc

SEQ ID NO: 1040492 - RNA, 21 nt, Human
uccacaaagccaaacgcaacg

SEQ ID NO: 1040493 - RNA, 18 nt, Human
ucccugcagguccugccc

SEQ ID NO: 1040494 - RNA, 21 nt, Human
ucccugcagguccugccccuc

SEQ ID NO: 1040495 - RNA, 22 nt, Human
ucccugcagguccugccccucu

SEQ ID NO: 1040496 - RNA, 18 nt, Human
uccguggaugccccuugc

SEQ ID NO: 1040497 - RNA, 20 nt, Human
uccuaaucccccaccccaaa

SEQ ID NO: 1040498 - RNA, 21 nt, Human
uccugacuccugccucguggg

SEQ ID NO: 1040499 - RNA, 21 nt, Human
uccugccccucugcuccccac

SEQ ID NO: 1040500 - RNA, 19 nt, Human
uccuggguccaggaugacu

SEQ ID NO: 1040501 - RNA, 20 nt, Human
uccuggguccaggaugacuu

SEQ ID NO: 1040502 - RNA, 20 nt, Human
uccuggugcugagcuggugc

SEQ ID NO: 1040503 - RNA, 25 nt, Human
ucucccucugccugccuuuccacug

SEQ ID NO: 1040504 - RNA, 21 nt, Human
ucugccaaagcagcucacagc

SEQ ID NO: 1040505 - RNA, 20 nt, Human
ucugcuuaaagcccccucca

SEQ ID NO: 1040506 - RNA, 21 nt, Human
ugaaaucagaaccaaaagaac

SEQ ID NO: 1040507 - RNA, 18 nt, Human
ugccccuugcagaacuca

SEQ ID NO: 1040508 - RNA, 21 nt, Human
ugcccuggaaccucggguguu

SEQ ID NO: 1040509 - RNA, 22 nt, Human
ugccugccuuuccacuguccug

SEQ ID NO: 1040510 - RNA, 23 nt, Human
ugcuuaaagcccccuccacggag

SEQ ID NO: 1040511 - RNA, 20 nt, Human
uggaaagguucugccacugu

SEQ ID NO: 1040512 - RNA, 19 nt, Human
ugugacagcaugcaccaga

SEQ ID NO: 1040513 - RNA, 18 nt, Human
uguucaguggacaucugc

SEQ ID NO: 1040514 - RNA, 22 nt, Human
uuacaaguucucuacucccuag

SEQ ID NO: 1040515 - RNA, 25 nt, Human
uuccuggucgacucguuccuuggaa

SEQ ID NO: 1040516 - RNA, 21 nt, Human
uuuuuccccugacuacacaga

SEQ ID NO: 1040517 - RNA, 21 nt, Human
aaagguacacauuaaaacugc

SEQ ID NO: 1040518 - RNA, 22 nt, Human
aacuauacucaaccaaaaccua

SEQ ID NO: 1040519 - RNA, 21 nt, Human
acaaaaaagaaagccaaaaga

SEQ ID NO: 1040520 - RNA, 21 nt, Human
acacuccauaauguauucuuu

SEQ ID NO: 1040521 - RNA, 20 nt, Human
accacagagaaaugagggac

SEQ ID NO: 1040522 - RNA, 19 nt, Human
accccagagacacuguuga

SEQ ID NO: 1040523 - RNA, 20 nt, Human
accuauuuggcauuuauuga

SEQ ID NO: 1040524 - RNA, 19 nt, Human
acucugcucauuugaaaua

SEQ ID NO: 1040525 - RNA, 22 nt, Human
agcaaagaaaagaguuugccaa

SEQ ID NO: 1040526 - RNA, 23 nt, Human
caacauacucugcucauuugaaa

SEQ ID NO: 1040527 - RNA, 24 nt, Human
cagugcaaaggaugccaccccaga

SEQ ID NO: 1040528 - RNA, 18 nt, Human
cucacagaauacuguaaa

SEQ ID NO: 1040529 - RNA, 18 nt, Human
cucacccucgccgccucg

SEQ ID NO: 1040530 - RNA, 20 nt, Human
gagaacaauaggaguccaca

SEQ ID NO: 1040531 - RNA, 25 nt, Human
uaagaaaacacuacacuccauaaug

SEQ ID NO: 1040532 - RNA, 23 nt, Human
uacaaaaaagaaagccaaaagac

SEQ ID NO: 1040533 - RNA, 19 nt, Human
ucacagaauacuguaaauu

SEQ ID NO: 1040534 - RNA, 22 nt, Human
uccauaaaguuuaaguucaaca

SEQ ID NO: 1040535 - RNA, 21 nt, Human
ugaaauaaaccaguaucuucc

SEQ ID NO: 1040536 - RNA, 23 nt, Human
ugaagaacuaagaaaacacuaca

SEQ ID NO: 1040537 - RNA, 22 nt, Human
uguagcaaagaaaagaguuugc

SEQ ID NO: 1040538 - RNA, 24 nt, Human
uucaaaaugaagaaaaggcugaga

SEQ ID NO: 1040539 - RNA, 21 nt, Human
uugagaacaauaggaguccac

SEQ ID NO: 1040540 - RNA, 18 nt, Human
uuuuuuuuuuuuuuccug

SEQ ID NO: 1040541 - RNA, 24 nt, Human
uuuuuuuuuuuuuuuuccugcuuu

SEQ ID NO: 1040542 - RNA, 20 nt, Human
aaaaucuaaggcaaacagac

SEQ ID NO: 1040543 - RNA, 23 nt, Human
aacagacuugaccaucuucagac

SEQ ID NO: 1040544 - RNA, 22 nt, Human
aagcccggagcaaggcgaaaga

SEQ ID NO: 1040545 - RNA, 18 nt, Human
acccugccgcgcugcgag

SEQ ID NO: 1040546 - RNA, 18 nt, Human
agcgaagaaagcccggag

SEQ ID NO: 1040547 - RNA, 22 nt, Human
aggcgaaagagacucacacgcg

SEQ ID NO: 1040548 - RNA, 23 nt, Human
caccugcgggacguggaccucca

SEQ ID NO: 1040549 - RNA, 22 nt, Human
caucaaaaucuaaggcaaacag

SEQ ID NO: 1040550 - RNA, 26 nt, Human
caucuucagacccacugcauucucaa

SEQ ID NO: 1040551 - RNA, 21 nt, Human
ccagaacagguuguagguaua

SEQ ID NO: 1040552 - RNA, 18 nt, Human
cccagaacagguuguagg

SEQ ID NO: 1040553 - RNA, 21 nt, Human
ccccgucggcccccggacccg

SEQ ID NO: 1040554 - RNA, 21 nt, Human
cccggagcaaggcgaaagaga

SEQ ID NO: 1040555 - RNA, 24 nt, Human
ccuccaggacagccccgucggccc

SEQ ID NO: 1040556 - RNA, 24 nt, Human
cgagcgaagaaagcccggagcaag

SEQ ID NO: 1040557 - RNA, 18 nt, Human
cgcugggcccggaccccc

SEQ ID NO: 1040558 - RNA, 18 nt, Human
cggagcaaggcgaaagag

SEQ ID NO: 1040559 - RNA, 20 nt, Human
cggcaagaaggggaaagccc

SEQ ID NO: 1040560 - RNA, 21 nt, Human
cggcccccggacccggcuccu

SEQ ID NO: 1040561 - RNA, 23 nt, Human
cggcccccggacccggcuccucc

SEQ ID NO: 1040562 - RNA, 20 nt, Human
cguugggccccgggcgggcg

SEQ ID NO: 1040563 - RNA, 22 nt, Human
cuaaggcaaacagacuugacca

SEQ ID NO: 1040564 - RNA, 23 nt, Human
gagcgaagaaagcccggagcaag

SEQ ID NO: 1040565 - RNA, 19 nt, Human
gccagguugcucaucagua

SEQ ID NO: 1040566 - RNA, 19 nt, Human
gcgcugcgagcgaagaaag

SEQ ID NO: 1040567 - RNA, 18 nt, Human
gcggaaggcuccgggcug

SEQ ID NO: 1040568 - RNA, 19 nt, Human
ggcaagaaggggaaagccc

SEQ ID NO: 1040569 - RNA, 22 nt, Human
ggcaagaaggggaaagcccaga

SEQ ID NO: 1040570 - RNA, 20 nt, Human
ggcaagaaggggaaagcccg

SEQ ID NO: 1040571 - RNA, 21 nt, Human
ucaaaaucuaaggcaaacaga

SEQ ID NO: 1040572 - RNA, 22 nt, Human
ucaggcgccuccuggcgggugc

SEQ ID NO: 1040573 - RNA, 19 nt, Human
uccuggcgggugcugcugc

SEQ ID NO: 1040574 - RNA, 24 nt, Human
ugaaguggucugcucauaguuugu

SEQ ID NO: 1040575 - RNA, 25 nt, Human
ugaccaucuucagacccacugcauu

SEQ ID NO: 1040576 - RNA, 21 nt, Human
ugcaggaccucaggcgccucc

SEQ ID NO: 1040577 - RNA, 21 nt, Human
uggccguagcaccugacggca

SEQ ID NO: 1040578 - RNA, 25 nt, Human
uggcgggugcugcugcacgcaccug

SEQ ID NO: 1040579 - RNA, 18 nt, Human
ugugccagguugcucauc

SEQ ID NO: 1040580 - RNA, 20 nt, Human
uugggccccgggcgggcggg

SEQ ID NO: 1040581 - RNA, 20 nt, Human
aaaaggaaauauugggaaga

SEQ ID NO: 1040582 - RNA, 24 nt, Human
aagaaaaugaaccacagacacaga

SEQ ID NO: 1040583 - RNA, 21 nt, Human
aagcaaauuggugagggagaa

SEQ ID NO: 1040584 - RNA, 20 nt, Human
aagggaaaacaaagccaaag

SEQ ID NO: 1040585 - RNA, 20 nt, Human
acaaagccaaagagaagaaa

SEQ ID NO: 1040586 - RNA, 23 nt, Human
accaagguuuuaggcccauauga

SEQ ID NO: 1040587 - RNA, 24 nt, Human
agaaauguucgcacaggggaaaug

SEQ ID NO: 1040588 - RNA, 26 nt, Human
agagaaaaagcuugaauacucauaau

SEQ ID NO: 1040589 - RNA, 24 nt, Human
agagcaaagguaguagcucccucu

SEQ ID NO: 1040590 - RNA, 18 nt, Human
agccaaagagaagaaacc

SEQ ID NO: 1040591 - RNA, 20 nt, Human
agggaaaacaaagccaaaga

SEQ ID NO: 1040592 - RNA, 19 nt, Human
aguagcucccucuccacuu

SEQ ID NO: 1040593 - RNA, 21 nt, Human
caaaaggaaauauugggaaga

SEQ ID NO: 1040594 - RNA, 18 nt, Human
caaagggaaaacaaagcc

SEQ ID NO: 1040595 - RNA, 27 nt, Human
caacacacuaugaagagagcaaaggua

SEQ ID NO: 1040596 - RNA, 18 nt, Human
caacccagacucacacca

SEQ ID NO: 1040597 - RNA, 21 nt, Human
caagaaaagcuggguggcuua

SEQ ID NO: 1040598 - RNA, 22 nt, Human
cacagauacaugaagucacuac

SEQ ID NO: 1040599 - RNA, 22 nt, Human
caccugaagaaaaugaaccuug

SEQ ID NO: 1040600 - RNA, 22 nt, Human
caggggcucagaaccaagguuu

SEQ ID NO: 1040601 - RNA, 19 nt, Human
cauuuuuaaaagcuuggaa

SEQ ID NO: 1040602 - RNA, 19 nt, Human
ccaagaaaagcuggguggc

SEQ ID NO: 1040603 - RNA, 18 nt, Human
ccagacucacaccaaaag

SEQ ID NO: 1040604 - RNA, 23 nt, Human
ccagacucacaccaaaaggaaau

SEQ ID NO: 1040605 - RNA, 22 nt, Human
cccugcuaugaugaaccucaac

SEQ ID NO: 1040606 - RNA, 18 nt, Human
cucaaaauacggaaaaua

SEQ ID NO: 1040607 - RNA, 21 nt, Human
cucaaaauacggaaaauagaa

SEQ ID NO: 1040608 - RNA, 20 nt, Human
gaaccacagacacagauaca

SEQ ID NO: 1040609 - RNA, 24 nt, Human
gacucacaccaaaaggaaauauug

SEQ ID NO: 1040610 - RNA, 21 nt, Human
gauaacauauaguuauaugau

SEQ ID NO: 1040611 - RNA, 20 nt, Human
gcuaugaugaaccucaacac

SEQ ID NO: 1040612 - RNA, 28 nt, Human
ggaaauauugggaagagagccgguaccc

SEQ ID NO: 1040613 - RNA, 19 nt, Human
ggucaaugaugggucaggg

SEQ ID NO: 1040614 - RNA, 21 nt, Human
uaacaaacauagaauauuuua

SEQ ID NO: 1040615 - RNA, 19 nt, Human
ucgcacaggggaaaugcug

SEQ ID NO: 1040616 - RNA, 25 nt, Human
ugaaccacagacacagauacaugaa

SEQ ID NO: 1040617 - RNA, 22 nt, Human
ugaagaaaaugaaccacagaca

SEQ ID NO: 1040618 - RNA, 19 nt, Human
ugcaugcauugcccaugau

SEQ ID NO: 1040619 - RNA, 20 nt, Human
uggaauauacauuccugaaa

SEQ ID NO: 1040620 - RNA, 24 nt, Human
uguccaccaagaaggugaaaagga

SEQ ID NO: 1040621 - RNA, 25 nt, Human
uguucccaacaacccagacucacac

SEQ ID NO: 1040622 - RNA, 21 nt, Human
uuaagacuccaaauucugugc

SEQ ID NO: 1040623 - RNA, 18 nt, Human
uuacaagugggugcugga

SEQ ID NO: 1040624 - RNA, 24 nt, Human
accucgagaccccaccauagguug

SEQ ID NO: 1040625 - RNA, 19 nt, Human
caagaccccucagaacugg

SEQ ID NO: 1040626 - RNA, 18 nt, Human
caccauagguuguggcaa

SEQ ID NO: 1040627 - RNA, 23 nt, Human
cacccucagcuucaaggugcaga

SEQ ID NO: 1040628 - RNA, 21 nt, Human
cagcguggcacgggagacgcu

SEQ ID NO: 1040629 - RNA, 21 nt, Human
caggccggggcggguaaacag

SEQ ID NO: 1040630 - RNA, 19 nt, Human
ccaggccacacccucagcu

SEQ ID NO: 1040631 - RNA, 23 nt, Human
ccuccaggccacacccucagcuu

SEQ ID NO: 1040632 - RNA, 19 nt, Human
ccuccgagugggcaggcuc

SEQ ID NO: 1040633 - RNA, 20 nt, Human
ccucgagaccccaccauagg

SEQ ID NO: 1040634 - RNA, 20 nt, Human
cucagggccuucaagacccc

SEQ ID NO: 1040635 - RNA, 23 nt, Human
cuugccccucuggugccuccagg

SEQ ID NO: 1040636 - RNA, 19 nt, Human
gcaggccucccccaagucu

SEQ ID NO: 1040637 - RNA, 20 nt, Human
gcaggccucccccaagucua

SEQ ID NO: 1040638 - RNA, 24 nt, Human
gcuccuggggaagggggcugcagg

SEQ ID NO: 1040639 - RNA, 18 nt, Human
ggaacauucucuugcccc

SEQ ID NO: 1040640 - RNA, 22 nt, Human
gggcugcagggcuggcaacugu

SEQ ID NO: 1040641 - RNA, 19 nt, Human
ggggaagggggcugcaggg

SEQ ID NO: 1040642 - RNA, 22 nt, Human
ucaaaggagucgccccaacugg

SEQ ID NO: 1040643 - RNA, 21 nt, Human
uccaggccacacccucagcuu

SEQ ID NO: 1040644 - RNA, 19 nt, Human
uccggaacauucucuugcc

SEQ ID NO: 1040645 - RNA, 23 nt, Human
ucucuugccccucuggugccucc

SEQ ID NO: 1040646 - RNA, 21 nt, Human
ugcccaggccggggcggguaa

SEQ ID NO: 1040647 - RNA, 21 nt, Human
ugcuccuggggaagggggcug

SEQ ID NO: 1040648 - RNA, 22 nt, Human
aaccugcucacccuguccccua

SEQ ID NO: 1040649 - RNA, 24 nt, Human
aacgugcugagauuacagguguga

SEQ ID NO: 1040650 - RNA, 18 nt, Human
accagggcugcaaugcuc

SEQ ID NO: 1040651 - RNA, 20 nt, Human
accaugaguugcugguccuu

SEQ ID NO: 1040652 - RNA, 20 nt, Human
acccacucuccuuguccccc

SEQ ID NO: 1040653 - RNA, 19 nt, Human
acccugcccgcugugcagc

SEQ ID NO: 1040654 - RNA, 20 nt, Human
acccuggacaccuucugcuu

SEQ ID NO: 1040655 - RNA, 18 nt, Human
acgggauuucgccauguu

SEQ ID NO: 1040656 - RNA, 20 nt, Human
acgggauuucgccauguugg

SEQ ID NO: 1040657 - RNA, 24 nt, Human
acgggauuucgccauguuggccag

SEQ ID NO: 1040658 - RNA, 24 nt, Human
acucuccuuguccccccaaacccu

SEQ ID NO: 1040659 - RNA, 20 nt, Human
agacguucaggagguucugc

SEQ ID NO: 1040660 - RNA, 18 nt, Human
agagaguccuucaggagc

SEQ ID NO: 1040661 - RNA, 22 nt, Human
agauuacaggugugagucacug

SEQ ID NO: 1040662 - RNA, 22 nt, Human
agcacuccuuucgcugcuccuc

SEQ ID NO: 1040663 - RNA, 19 nt, Human
agcuugcugucgcgauagu

SEQ ID NO: 1040664 - RNA, 23 nt, Human
aggugugagucacugugcccagc

SEQ ID NO: 1040665 - RNA, 20 nt, Human
auuauaacauuaguuaccau

SEQ ID NO: 1040666 - RNA, 24 nt, Human
caacgugcugagauuacaggugug

SEQ ID NO: 1040667 - RNA, 19 nt, Human
cacaggauuuguggccuga

SEQ ID NO: 1040668 - RNA, 21 nt, Human
cacccuguccccuaaacccac

SEQ ID NO: 1040669 - RNA, 22 nt, Human
cacccuguccccuaaacccacu

SEQ ID NO: 1040670 - RNA, 25 nt, Human
cacccuguccccuaaacccacucuc

SEQ ID NO: 1040671 - RNA, 22 nt, Human
cacugugcccagccugaaaaac

SEQ ID NO: 1040672 - RNA, 24 nt, Human
cagccgcacccccaccgccuccgg

SEQ ID NO: 1040673 - RNA, 19 nt, Human
cagccugaaaaacccuaau

SEQ ID NO: 1040674 - RNA, 18 nt, Human
cagccuucucacccugcc

SEQ ID NO: 1040675 - RNA, 20 nt, Human
cagcugcuagcugcccgccg

SEQ ID NO: 1040676 - RNA, 18 nt, Human
caggagccgggugagcuu

SEQ ID NO: 1040677 - RNA, 21 nt, Human
caggagccgggugagcuugcu

SEQ ID NO: 1040678 - RNA, 20 nt, Human
caugccagccuucucacccu

SEQ ID NO: 1040679 - RNA, 24 nt, Human
cauguuggccaggcuggucucgaa

SEQ ID NO: 1040680 - RNA, 21 nt, Human
ccaacgugcugagauuacagg

SEQ ID NO: 1040681 - RNA, 21 nt, Human
ccaacgugcugagauuacagg

SEQ ID NO: 1040682 - RNA, 24 nt, Human
ccaacgugcugagauuacaggugu

SEQ ID NO: 1040683 - RNA, 20 nt, Human
ccaccgccuccgggucgcgu

SEQ ID NO: 1040684 - RNA, 24 nt, Human
ccaccgggcauggcucagccgcac

SEQ ID NO: 1040685 - RNA, 19 nt, Human
ccagggcugcaaugcucuc

SEQ ID NO: 1040686 - RNA, 19 nt, Human
ccauguuggccaggcuggu

SEQ ID NO: 1040687 - RNA, 22 nt, Human
ccauguuggccaggcuggucuc

SEQ ID NO: 1040688 - RNA, 23 nt, Human
ccauguuggccaggcuggucucg

SEQ ID NO: 1040689 - RNA, 22 nt, Human
cccacucuccuuguccccccaa

SEQ ID NO: 1040690 - RNA, 23 nt, Human
cccacucuccuuguccccccaaa

SEQ ID NO: 1040691 - RNA, 25 nt, Human
ccccaccgccuccgggucgcguccg

SEQ ID NO: 1040692 - RNA, 27 nt, Human
cccccaccgccuccgggucgcguccgc

SEQ ID NO: 1040693 - RNA, 18 nt, Human
ccccgggccuggccccgc

SEQ ID NO: 1040694 - RNA, 20 nt, Human
cccgccgccucgcgcgcugc

SEQ ID NO: 1040695 - RNA, 18 nt, Human
cccugccgcaccuccugc

SEQ ID NO: 1040696 - RNA, 19 nt, Human
ccgcacccccaccgccucc

SEQ ID NO: 1040697 - RNA, 21 nt, Human
ccgcacccccaccgccucccc

SEQ ID NO: 1040698 - RNA, 20 nt, Human
ccgccgccucgcgcgcugcc

SEQ ID NO: 1040699 - RNA, 23 nt, Human
ccgccgccucgcgcgcugccuga

SEQ ID NO: 1040700 - RNA, 23 nt, Human
ccggccccgggccuggccccgcc

SEQ ID NO: 1040701 - RNA, 20 nt, Human
ccuccgccuugccucucaaa

SEQ ID NO: 1040702 - RNA, 19 nt, Human
ccucucaaaccugcucacc

SEQ ID NO: 1040703 - RNA, 20 nt, Human
ccucucaaaccugcucaccc

SEQ ID NO: 1040704 - RNA, 19 nt, Human
ccugcccgcugugcagcug

SEQ ID NO: 1040705 - RNA, 23 nt, Human
ccuggccccuccgccuugccucu

SEQ ID NO: 1040706 - RNA, 18 nt, Human
ccuggccucaagugaucu

SEQ ID NO: 1040707 - RNA, 24 nt, Human
ccuggccucaagugaucugccuac

SEQ ID NO: 1040708 - RNA, 18 nt, Human
ccuuucgcugcuccuccc

SEQ ID NO: 1040709 - RNA, 21 nt, Human
ccuuucgcugcuccucccgcc

SEQ ID NO: 1040710 - RNA, 27 nt, Human
cgccauguuggccaggcuggucucgaa

SEQ ID NO: 1040711 - RNA, 19 nt, Human
cgccgccucgcgcgcugcc

SEQ ID NO: 1040712 - RNA, 24 nt, Human
cgccuugccucucaaaccugcuca

SEQ ID NO: 1040713 - RNA, 19 nt, Human
cggccccgggccuggcccc

SEQ ID NO: 1040714 - RNA, 21 nt, Human
cggcuacccccacccuggccc

SEQ ID NO: 1040715 - RNA, 24 nt, Human
cgggauuucgccauguuggccagg

SEQ ID NO: 1040716 - RNA, 19 nt, Human
cgugcugagauuacaggug

SEQ ID NO: 1040717 - RNA, 24 nt, Human
cucaagugaucugccuaccucaac

SEQ ID NO: 1040718 - RNA, 18 nt, Human
cucccgggcugcggccac

SEQ ID NO: 1040719 - RNA, 23 nt, Human
cuccuggguccucugccgguucc

SEQ ID NO: 1040720 - RNA, 19 nt, Human
cucugccgguuccccuuca

SEQ ID NO: 1040721 - RNA, 24 nt, Human
cugccacgcugaugggccggaccc

SEQ ID NO: 1040722 - RNA, 20 nt, Human
cuggccccuccgccuugccu

SEQ ID NO: 1040723 - RNA, 21 nt, Human
cuggccccuccgccuugccuc

SEQ ID NO: 1040724 - RNA, 22 nt, Human
gaagcgccaccaugaguugcug

SEQ ID NO: 1040725 - RNA, 21 nt, Human
gaagcugucccaugccagccu

SEQ ID NO: 1040726 - RNA, 22 nt, Human
gagcaggugucgggagguguca

SEQ ID NO: 1040727 - RNA, 20 nt, Human
gaugcaguugcccagugcca

SEQ ID NO: 1040728 - RNA, 18 nt, Human
gauuacaggugugaguca

SEQ ID NO: 1040729 - RNA, 24 nt, Human
gauuacaggugugagucacugugc

SEQ ID NO: 1040730 - RNA, 24 nt, Human
gcccgccgccucgcgcgcugccug

SEQ ID NO: 1040731 - RNA, 21 nt, Human
gccggccccgggccuggcccc

SEQ ID NO: 1040732 - RNA, 20 nt, Human
gccugaaaaacccuaauuau

SEQ ID NO: 1040733 - RNA, 22 nt, Human
gccuugccucucaaaccugcuc

SEQ ID NO: 1040734 - RNA, 18 nt, Human
gcggccgugggcuccugg

SEQ ID NO: 1040735 - RNA, 22 nt, Human
gcucacccuguccccuaaaccc

SEQ ID NO: 1040736 - RNA, 19 nt, Human
gcucagggcguugaugcag

SEQ ID NO: 1040737 - RNA, 23 nt, Human
gcuggucucgaacuccuggccuc

SEQ ID NO: 1040738 - RNA, 20 nt, Human
ggagguucugcuucacccua

SEQ ID NO: 1040739 - RNA, 20 nt, Human
ggcccggccggcguagguca

SEQ ID NO: 1040740 - RNA, 24 nt, Human
ggccucaagugaucugccuaccuc

SEQ ID NO: 1040741 - RNA, 24 nt, Human
ggcuggucucgaacuccuggccuc

SEQ ID NO: 1040742 - RNA, 23 nt, Human
gggauuucgccauguuggccagg

SEQ ID NO: 1040743 - RNA, 22 nt, Human
gggccuggccccgcccagucug

SEQ ID NO: 1040744 - RNA, 23 nt, Human
gguggcuccaggaugucugguug

SEQ ID NO: 1040745 - RNA, 24 nt, Human
gugaucugccuaccucaacuuccc

SEQ ID NO: 1040746 - RNA, 21 nt, Human
gugcugagauuacagguguga

SEQ ID NO: 1040747 - RNA, 22 nt, Human
uaaagacgggauuucgccaugu

SEQ ID NO: 1040748 - RNA, 19 nt, Human
uaacauuaguuaccauuuu

SEQ ID NO: 1040749 - RNA, 24 nt, Human
uaccucaacuucccaacgugcuga

SEQ ID NO: 1040750 - RNA, 20 nt, Human
uagcugcccgccgccucgcg

SEQ ID NO: 1040751 - RNA, 24 nt, Human
uaguaaagacgggauuucgccaug

SEQ ID NO: 1040752 - RNA, 27 nt, Human
ucaaaccugcucacccuguccccuaaa

SEQ ID NO: 1040753 - RNA, 20 nt, Human
ucacugugcccagccugaaa

SEQ ID NO: 1040754 - RNA, 19 nt, Human
ucacugugcggcuguuucc

SEQ ID NO: 1040755 - RNA, 23 nt, Human
ucccaacgugcugagauuacagg

SEQ ID NO: 1040756 - RNA, 21 nt, Human
ucccaagucucacggcuaccc

SEQ ID NO: 1040757 - RNA, 22 nt, Human
ucccagcaaccccaugagggcu

SEQ ID NO: 1040758 - RNA, 22 nt, Human
uccccccaaacccuggacaccu

SEQ ID NO: 1040759 - RNA, 20 nt, Human
uccuugguaugugccaggca

SEQ ID NO: 1040760 - RNA, 20 nt, Human
ucgcaggacugaugugagcg

SEQ ID NO: 1040761 - RNA, 22 nt, Human
ucgccauguuggccaggcuggu

SEQ ID NO: 1040762 - RNA, 24 nt, Human
ucgccauguuggccaggcuggucu

SEQ ID NO: 1040763 - RNA, 18 nt, Human
ucgcugcuccucccgcca

SEQ ID NO: 1040764 - RNA, 27 nt, Human
ucucacccugcccgcugugcagcugga

SEQ ID NO: 1040765 - RNA, 23 nt, Human
ucuccagcuccagcaggcgccuc

SEQ ID NO: 1040766 - RNA, 21 nt, Human
ucucgaacuccuggccucaag

SEQ ID NO: 1040767 - RNA, 18 nt, Human
ucugguuggcggccgugg

SEQ ID NO: 1040768 - RNA, 20 nt, Human
ugaacaggcggcccugccgc

SEQ ID NO: 1040769 - RNA, 21 nt, Human
ugagauuacaggugugaguca

SEQ ID NO: 1040770 - RNA, 22 nt, Human
ugagauuacaggugugagucac

SEQ ID NO: 1040771 - RNA, 22 nt, Human
ugagauuacaggugugagucac

SEQ ID NO: 1040772 - RNA, 22 nt, Human
ugagauuacaggugugagucac

SEQ ID NO: 1040773 - RNA, 24 nt, Human
ugagauuacaggugugagucacug

SEQ ID NO: 1040774 - RNA, 18 nt, Human
ugaguccuugguaugugc

SEQ ID NO: 1040775 - RNA, 19 nt, Human
ugaguugcugguccuugga

SEQ ID NO: 1040776 - RNA, 23 nt, Human
ugaucugccuaccucaacuuccc

SEQ ID NO: 1040777 - RNA, 24 nt, Human
ugccaggcauuuauguaaucuucc

SEQ ID NO: 1040778 - RNA, 19 nt, Human
ugcccgccgccucgcgcgc

SEQ ID NO: 1040779 - RNA, 24 nt, Human
ugcugagauuacaggugugaguca

SEQ ID NO: 1040780 - RNA, 24 nt, Human
uggccaggcuggucucgaacuccu

SEQ ID NO: 1040781 - RNA, 18 nt, Human
uggccucaagugaucugc

SEQ ID NO: 1040782 - RNA, 19 nt, Human
uggccucaagugaucugcc

SEQ ID NO: 1040783 - RNA, 20 nt, Human
uggccucaagugaucugccu

SEQ ID NO: 1040784 - RNA, 24 nt, Human
ugggcgaugaggguagcuccuucc

SEQ ID NO: 1040785 - RNA, 22 nt, Human
uguccccuaaacccacucuccu

SEQ ID NO: 1040786 - RNA, 19 nt, Human
ugugcagcuggaccucagc

SEQ ID NO: 1040787 - RNA, 18 nt, Human
uguuuccucccagagagu

SEQ ID NO: 1040788 - RNA, 22 nt, Human
uuacagguggggaaugugacgc

SEQ ID NO: 1040789 - RNA, 23 nt, Human
uuacagguggggaaugugacgca

SEQ ID NO: 1040790 - RNA, 24 nt, Human
uuaguaaagacgggauuucgccau

SEQ ID NO: 1040791 - RNA, 21 nt, Human
uucccaacgugcugagauuac

SEQ ID NO: 1040792 - RNA, 20 nt, Human
uuccgggacuccucgaaggc

SEQ ID NO: 1040793 - RNA, 19 nt, Human
uuggcggccgugggcuccu

SEQ ID NO: 1040794 - RNA, 24 nt, Human
uuucgccauguuggccaggcuggu

SEQ ID NO: 1040795 - RNA, 24 nt, Human
cugggugauguaaaaauucuccuc

SEQ ID NO: 1040796 - RNA, 24 nt, Human
ucaggccuggugagucuggaugug

SEQ ID NO: 1040797 - RNA, 21 nt, Human
ugaccgcuuccugggugaugu

SEQ ID NO: 1040798 - RNA, 19 nt, Human
ugauguaaaaauucuccuc

SEQ ID NO: 1040799 - RNA, 21 nt, Human
uggaugugaccgcuuccuggg

SEQ ID NO: 1040800 - RNA, 23 nt, Human
uucuccucauacuucaacuucaa

SEQ ID NO: 1040801 - RNA, 23 nt, Human
aaaccacacaacagcuagcgcaa

SEQ ID NO: 1040802 - RNA, 20 nt, Human
aaugcauguuuuccaguggu

SEQ ID NO: 1040803 - RNA, 18 nt, Human
accuccccaccuccucca

SEQ ID NO: 1040804 - RNA, 20 nt, Human
agaaaugccauguuaaccau

SEQ ID NO: 1040805 - RNA, 19 nt, Human
agcccuggcccaacaccuc

SEQ ID NO: 1040806 - RNA, 28 nt, Human
aggacuaaaagucgcaggacuacaaacc

SEQ ID NO: 1040807 - RNA, 23 nt, Human
agggacagacucccuccuaccuc

SEQ ID NO: 1040808 - RNA, 21 nt, Human
caaagccuggucgacagcuau

SEQ ID NO: 1040809 - RNA, 23 nt, Human
caacaccuccccaccuccuccac

SEQ ID NO: 1040810 - RNA, 18 nt, Human
cacagugcggagcagaac

SEQ ID NO: 1040811 - RNA, 27 nt, Human
caccucuaaucuucauauugcugauuu

SEQ ID NO: 1040812 - RNA, 23 nt, Human
ccaacaccuccccaccuccucca

SEQ ID NO: 1040813 - RNA, 22 nt, Human
cccaacaccuccccaccuccuc

SEQ ID NO: 1040814 - RNA, 21 nt, Human
cccuccuaccucagcccuggc

SEQ ID NO: 1040815 - RNA, 20 nt, Human
ccuccacagugcggagcaga

SEQ ID NO: 1040816 - RNA, 24 nt, Human
cgcaggacuacaaaccacacaaca

SEQ ID NO: 1040817 - RNA, 21 nt, Human
cguucauuuuuuccaaagccu

SEQ ID NO: 1040818 - RNA, 22 nt, Human
cuacuugcaaacugugguccac

SEQ ID NO: 1040819 - RNA, 26 nt, Human
cuacuugcaaacugugguccacaaaa

SEQ ID NO: 1040820 - RNA, 26 nt, Human
cucagcccuggcccaacaccgguucc

SEQ ID NO: 1040821 - RNA, 18 nt, Human
cucccuccuaccucagcc

SEQ ID NO: 1040822 - RNA, 19 nt, Human
cuugcaaacugugguccac

SEQ ID NO: 1040823 - RNA, 22 nt, Human
gcagaacgccggggucgccucc

SEQ ID NO: 1040824 - RNA, 31 nt, Human
uagaaagcuuaaaauccauacagauaaggag

SEQ ID NO: 1040825 - RNA, 29 nt, Human
uagcuccauagguaaggacgggggaaccc

SEQ ID NO: 1040826 - RNA, 23 nt, Human
ucagcccuggcccaacaccuccc

SEQ ID NO: 1040827 - RNA, 20 nt, Human
uccacagugcggagcagaac

SEQ ID NO: 1040828 - RNA, 28 nt, Human
uccacagugcggagcagaaccggggucc

SEQ ID NO: 1040829 - RNA, 20 nt, Human
uccauacagauaaggacugg

SEQ ID NO: 1040830 - RNA, 23 nt, Human
ucuccugugaggcaccagagcug

SEQ ID NO: 1040831 - RNA, 21 nt, Human
ugaaaaucaucuuaugucccc

SEQ ID NO: 1040832 - RNA, 20 nt, Human
uggcccaacaccuccccacc

SEQ ID NO: 1040833 - RNA, 24 nt, Human
ugugaggcaccagagcaccgcgga

SEQ ID NO: 1040834 - RNA, 20 nt, Human
uuaaaguuuccaaaaugcaa

SEQ ID NO: 1040835 - RNA, 18 nt, Human
uuggcuccgaaaaaaguc

SEQ ID NO: 1040836 - RNA, 26 nt, Human
uuuguaaacaauaaaacauuucauua

SEQ ID NO: 1040837 - RNA, 19 nt, Human
ggagggggacggcgggggc

SEQ ID NO: 1040838 - RNA, 18 nt, Human
gguggguggggguggugc

SEQ ID NO: 1040839 - RNA, 18 nt, Human
ugccgacuuccuucuugu

SEQ ID NO: 1040840 - RNA, 20 nt, Human
ugggagagaguuggaggggg

SEQ ID NO: 1040841 - RNA, 22 nt, Human
uggguggggguggugcgacggc

SEQ ID NO: 1040842 - RNA, 23 nt, Human
uggguggggguggugcgacggcc

SEQ ID NO: 1040843 - RNA, 19 nt, Human
uuggagggggacggcgggg

SEQ ID NO: 1040844 - RNA, 18 nt, Human
agagcucuggggccccuc

SEQ ID NO: 1040845 - RNA, 19 nt, Human
aaaccgacagaccuggguu

SEQ ID NO: 1040846 - RNA, 19 nt, Human
aaagucccaagaaugccag

SEQ ID NO: 1040847 - RNA, 19 nt, Human
accuagaggaagcugagcu

SEQ ID NO: 1040848 - RNA, 22 nt, Human
acggaccucagaagggugagug

SEQ ID NO: 1040849 - RNA, 19 nt, Human
agagagcugggggcugacc

SEQ ID NO: 1040850 - RNA, 22 nt, Human
agaggaagcugagcugauggug

SEQ ID NO: 1040851 - RNA, 18 nt, Human
aggaagcugagcugaugg

SEQ ID NO: 1040852 - RNA, 21 nt, Human
aggcaguggggacaagucaag

SEQ ID NO: 1040853 - RNA, 20 nt, Human
aggccccuggccaggacccu

SEQ ID NO: 1040854 - RNA, 20 nt, Human
aggcggagagagcugggggc

SEQ ID NO: 1040855 - RNA, 20 nt, Human
auccugagggcaggagguga

SEQ ID NO: 1040856 - RNA, 23 nt, Human
caccuguggagagaccucugccc

SEQ ID NO: 1040857 - RNA, 19 nt, Human
ccccuggccaggcccucug

SEQ ID NO: 1040858 - RNA, 19 nt, Human
cccgccacucaccagggag

SEQ ID NO: 1040859 - RNA, 21 nt, Human
cccugcuggcuuuacgaggga

SEQ ID NO: 1040860 - RNA, 20 nt, Human
cccuggccaggcccucuggg

SEQ ID NO: 1040861 - RNA, 20 nt, Human
ccucagggcugccacugugc

SEQ ID NO: 1040862 - RNA, 20 nt, Human
ccuccuguucuccuucuucc

SEQ ID NO: 1040863 - RNA, 22 nt, Human
ccucugggauccugagggcagg

SEQ ID NO: 1040864 - RNA, 24 nt, Human
ccucugggauccugagggcaggag

SEQ ID NO: 1040865 - RNA, 18 nt, Human
ccugagggcaggagguga

SEQ ID NO: 1040866 - RNA, 25 nt, Human
ccuggccaggcccucugggauccug

SEQ ID NO: 1040867 - RNA, 21 nt, Human
cggccaggccaacccgcagga

SEQ ID NO: 1040868 - RNA, 21 nt, Human
cgggaugaacccuccaggucc

SEQ ID NO: 1040869 - RNA, 22 nt, Human
cguaaaccgacagaccuggguu

SEQ ID NO: 1040870 - RNA, 21 nt, Human
cuauauugugcuugaaagugg

SEQ ID NO: 1040871 - RNA, 23 nt, Human
cucucugaaaggugccauaagaa

SEQ ID NO: 1040872 - RNA, 22 nt, Human
cucugaaaggugccauaagaag

SEQ ID NO: 1040873 - RNA, 22 nt, Human
cugauggugacaggcaguucuc

SEQ ID NO: 1040874 - RNA, 29 nt, Human
cugauggugacaggcaguucucagagguu

SEQ ID NO: 1040875 - RNA, 23 nt, Human
cugccuacaguugcuuggcaaag

SEQ ID NO: 1040876 - RNA, 25 nt, Human
cugcuccccuggaacaguccuuugu

SEQ ID NO: 1040877 - RNA, 22 nt, Human
gaaaggaucaaagguguugcuc

SEQ ID NO: 1040878 - RNA, 22 nt, Human
gagccggcugcccaggccccug

SEQ ID NO: 1040879 - RNA, 21 nt, Human
gccauaagaagccugcucccc

SEQ ID NO: 1040880 - RNA, 22 nt, Human
gcccaggccccuggccaggccc

SEQ ID NO: 1040881 - RNA, 21 nt, Human
gcccgccacucaccagggaga

SEQ ID NO: 1040882 - RNA, 19 nt, Human
gccuggagccugcccgucc

SEQ ID NO: 1040883 - RNA, 22 nt, Human
ggaaacugcauucucguaaacc

SEQ ID NO: 1040884 - RNA, 23 nt, Human
ggcaguggggacaagucaaggaa

SEQ ID NO: 1040885 - RNA, 19 nt, Human
ggcggagagagcugggggc

SEQ ID NO: 1040886 - RNA, 23 nt, Human
gggaagaccaaggugacacucaa

SEQ ID NO: 1040887 - RNA, 18 nt, Human
gggcccugcuggcuuuac

SEQ ID NO: 1040888 - RNA, 24 nt, Human
ggggacaagucaaggaagaucuau

SEQ ID NO: 1040889 - RNA, 24 nt, Human
guaagguuuucuuucgaccuaaag

SEQ ID NO: 1040890 - RNA, 19 nt, Human
gugacacucaagaaccucg

SEQ ID NO: 1040891 - RNA, 22 nt, Human
uaagaagccugcuccccuggaa

SEQ ID NO: 1040892 - RNA, 19 nt, Human
uacaagacaacggguuucc

SEQ ID NO: 1040893 - RNA, 18 nt, Human
uacacgauccagcaacca

SEQ ID NO: 1040894 - RNA, 18 nt, Human
uagaggaagcugagcuga

SEQ ID NO: 1040895 - RNA, 20 nt, Human
uagggacacacacaggaaag

SEQ ID NO: 1040896 - RNA, 28 nt, Human
uccauggcagggcucagcccgccacucu

SEQ ID NO: 1040897 - RNA, 18 nt, Human
uccucagggcugccacug

SEQ ID NO: 1040898 - RNA, 19 nt, Human
uccucagggcugccacugu

SEQ ID NO: 1040899 - RNA, 19 nt, Human
ucgaccuaaagaaagagug

SEQ ID NO: 1040900 - RNA, 24 nt, Human
ucucgagccggcugcccaggcccc

SEQ ID NO: 1040901 - RNA, 22 nt, Human
ugaaaguggcuuugcacaaagc

SEQ ID NO: 1040902 - RNA, 24 nt, Human
ugacaugcccagugcacugccucu

SEQ ID NO: 1040903 - RNA, 18 nt, Human
ugagccuggagccugccc

SEQ ID NO: 1040904 - RNA, 22 nt, Human
ugcugggaauugccuuggaacu

SEQ ID NO: 1040905 - RNA, 28 nt, Human
uggccaggcccucugggauccugagggc

SEQ ID NO: 1040906 - RNA, 20 nt, Human
ugggauccugagggcaggag

SEQ ID NO: 1040907 - RNA, 24 nt, Human
ugggauccugagggcaggagguga

SEQ ID NO: 1040908 - RNA, 22 nt, Human
uggguuucgccgcugcuccugu

SEQ ID NO: 1040909 - RNA, 18 nt, Human
uggugacaggcaguucuc

SEQ ID NO: 1040910 - RNA, 18 nt, Human
ccuccuccucuuccucac

SEQ ID NO: 1040911 - RNA, 22 nt, Human
cgggggcuucgggcaaaaaugg

SEQ ID NO: 1040912 - RNA, 26 nt, Human
cuccucgccggaccccgggggcuucc

SEQ ID NO: 1040913 - RNA, 20 nt, Human
cuccucuuccucacgcuccc

SEQ ID NO: 1040914 - RNA, 23 nt, Human
ggcaaaaauggagagcaggcaga

SEQ ID NO: 1040915 - RNA, 22 nt, Human
ggcagaggucacauccuccucc

SEQ ID NO: 1040916 - RNA, 19 nt, Human
gguuuggaggugugaagug

SEQ ID NO: 1040917 - RNA, 21 nt, Human
uccuccuccucuuccucacgc

SEQ ID NO: 1040918 - RNA, 18 nt, Human
ugugaagugggcggugga

SEQ ID NO: 1040919 - RNA, 21 nt, Human
auagucuuggggccugggcua

SEQ ID NO: 1040920 - RNA, 23 nt, Human
cauauagucuuggggccugggcu

SEQ ID NO: 1040921 - RNA, 19 nt, Human
ggcuaaagagcagcuucag

SEQ ID NO: 1040922 - RNA, 22 nt, Human
ugccacagggaccauauagucu

SEQ ID NO: 1040923 - RNA, 25 nt, Human
aagcagggaagagauagaaaucuag

SEQ ID NO: 1040924 - RNA, 23 nt, Human
aagcuuaaggcaggacccucuga

SEQ ID NO: 1040925 - RNA, 24 nt, Human
aaggaggggcaaaagacagaaggu

SEQ ID NO: 1040926 - RNA, 20 nt, Human
aaucaguagucaccaggaca

SEQ ID NO: 1040927 - RNA, 22 nt, Human
acccugagaacagauggggagu

SEQ ID NO: 1040928 - RNA, 18 nt, Human
accugggucccagacgcc

SEQ ID NO: 1040929 - RNA, 19 nt, Human
agaaaucuaggagauucug

SEQ ID NO: 1040930 - RNA, 19 nt, Human
agaagaaaaggauccggga

SEQ ID NO: 1040931 - RNA, 21 nt, Human
agaagaaaaggauccgggaga

SEQ ID NO: 1040932 - RNA, 22 nt, Human
agaagaaaaggauccgggagaa

SEQ ID NO: 1040933 - RNA, 26 nt, Human
agagaagaaaaggauccgggagaaga

SEQ ID NO: 1040934 - RNA, 22 nt, Human
agauggaagccagggaggcagg

SEQ ID NO: 1040935 - RNA, 19 nt, Human
agauggggagugggguugg

SEQ ID NO: 1040936 - RNA, 27 nt, Human
agcaacgagaucucgauccgagaaaga

SEQ ID NO: 1040937 - RNA, 22 nt, Human
agcaagugagagaagaaaagga

SEQ ID NO: 1040938 - RNA, 20 nt, Human
agcacgggaguagaggaggg

SEQ ID NO: 1040939 - RNA, 21 nt, Human
agcacgggaguagaggaggga

SEQ ID NO: 1040940 - RNA, 26 nt, Human
agcgucccugagcguccccaggcagc

SEQ ID NO: 1040941 - RNA, 21 nt, Human
aggcaggaagaagaaagccag

SEQ ID NO: 1040942 - RNA, 23 nt, Human
agggaagagauagaaaucuagga

SEQ ID NO: 1040943 - RNA, 19 nt, Human
auagcuguagcaggaacug

SEQ ID NO: 1040944 - RNA, 20 nt, Human
auuugcagucaaggguguca

SEQ ID NO: 1040945 - RNA, 21 nt, Human
caccaggacauagugguggag

SEQ ID NO: 1040946 - RNA, 23 nt, Human
caccugggucccagacgccuggg

SEQ ID NO: 1040947 - RNA, 23 nt, Human
caggaagaagaaagccagcaagu

SEQ ID NO: 1040948 - RNA, 21 nt, Human
caggacaccugggucccagac

SEQ ID NO: 1040949 - RNA, 19 nt, Human
caggacccucugaggucaa

SEQ ID NO: 1040950 - RNA, 22 nt, Human
caggagggacucaaggguggca

SEQ ID NO: 1040951 - RNA, 19 nt, Human
cagggaauggguagggaag

SEQ ID NO: 1040952 - RNA, 23 nt, Human
cagggaggcaggaagaagaaagc

SEQ ID NO: 1040953 - RNA, 23 nt, Human
ccaaggaaagaagggaaacucau

SEQ ID NO: 1040954 - RNA, 24 nt, Human
ccagcaacgagaucucgauccgag

SEQ ID NO: 1040955 - RNA, 18 nt, Human
ccaggcagccaccggagc

SEQ ID NO: 1040956 - RNA, 22 nt, Human
ccucugaggucaaggaggggca

SEQ ID NO: 1040957 - RNA, 26 nt, Human
cgggagaagagccggugauuuccucg

SEQ ID NO: 1040958 - RNA, 18 nt, Human
gaaagaagucaggacucu

SEQ ID NO: 1040959 - RNA, 19 nt, Human
gaagguugcaggugggaug

SEQ ID NO: 1040960 - RNA, 19 nt, Human
gacccucugaggucaagga

SEQ ID NO: 1040961 - RNA, 26 nt, Human
gagaacagauggggagugggguuggc

SEQ ID NO: 1040962 - RNA, 22 nt, Human
gagauggaagccagggaggcag

SEQ ID NO: 1040963 - RNA, 21 nt, Human
gagcacgggaguagaggaggg

SEQ ID NO: 1040964 - RNA, 22 nt, Human
gaggcaggaagaagaaagccag

SEQ ID NO: 1040965 - RNA, 19 nt, Human
gcaagugagagaagaaaag

SEQ ID NO: 1040966 - RNA, 21 nt, Human
gcuguagcaggaacugaccca

SEQ ID NO: 1040967 - RNA, 25 nt, Human
ggaaacucaucucuuguagugauuc

SEQ ID NO: 1040968 - RNA, 19 nt, Human
ggacaccugggucccagac

SEQ ID NO: 1040969 - RNA, 18 nt, Human
ggagauggaagccaggga

SEQ ID NO: 1040970 - RNA, 23 nt, Human
ggagauggaagccagggaggcag

SEQ ID NO: 1040971 - RNA, 20 nt, Human
ggagcaggagggacucaagg

SEQ ID NO: 1040972 - RNA, 23 nt, Human
ggcaaaagacagaagguugcagg

SEQ ID NO: 1040973 - RNA, 23 nt, Human
gggaagagauagaaaucuaggag

SEQ ID NO: 1040974 - RNA, 23 nt, Human
gggagcacgggaguagaggaggg

SEQ ID NO: 1040975 - RNA, 23 nt, Human
uaagaaaguaaaaauggguguca

SEQ ID NO: 1040976 - RNA, 21 nt, Human
uaaggcaggacccucugaggu

SEQ ID NO: 1040977 - RNA, 21 nt, Human
uaaucucugugccuuugaauc

SEQ ID NO: 1040978 - RNA, 21 nt, Human
uagaggagggaaucgcggggu

SEQ ID NO: 1040979 - RNA, 18 nt, Human
uccccaggcagccaccgg

SEQ ID NO: 1040980 - RNA, 24 nt, Human
uccccaggcagccaccggagcucu

SEQ ID NO: 1040981 - RNA, 19 nt, Human
ucccugagcguccccaggc

SEQ ID NO: 1040982 - RNA, 22 nt, Human
ucccugagcguccccaggcagc

SEQ ID NO: 1040983 - RNA, 22 nt, Human
uccgggagaagagccggugauu

SEQ ID NO: 1040984 - RNA, 20 nt, Human
ugagugggaggaaauacacu

SEQ ID NO: 1040985 - RNA, 20 nt, Human
ugauucaacccugagaacag

SEQ ID NO: 1040986 - RNA, 23 nt, Human
ugauucaacccugagaacagaug

SEQ ID NO: 1040987 - RNA, 27 nt, Human
ugcaggugggauggcucaggauggcgg

SEQ ID NO: 1040988 - RNA, 20 nt, Human
ugcagucaagggugucaggg

SEQ ID NO: 1040989 - RNA, 19 nt, Human
uggaagacagggggaaggc

SEQ ID NO: 1040990 - RNA, 19 nt, Human
uggaauuugggagucaaga

SEQ ID NO: 1040991 - RNA, 23 nt, Human
uggcucaggauggcgggcgacgg

SEQ ID NO: 1040992 - RNA, 21 nt, Human
ugggguuggcugucccccaug

SEQ ID NO: 1040993 - RNA, 22 nt, Human
ugggucucucaauucccuuugg

SEQ ID NO: 1040994 - RNA, 20 nt, Human
uuacccagggaauggguagg

SEQ ID NO: 1040995 - RNA, 23 nt, Human
uugggagauggaagccagggagg

SEQ ID NO: 1040996 - RNA, 22 nt, Human
uugggaugacucguucagcccu

SEQ ID NO: 1040997 - RNA, 18 nt, Human
agggacccgaggccgagg

SEQ ID NO: 1040998 - RNA, 19 nt, Human
cccgaggccgagggcggaa

SEQ ID NO: 1040999 - RNA, 19 nt, Human
cgagggcggaaacgcggug

SEQ ID NO: 1041000 - RNA, 19 nt, Human
cucugagagccaggacaag

SEQ ID NO: 1041001 - RNA, 21 nt, Human
cuuuuuggucuccauuccccg

SEQ ID NO: 1041002 - RNA, 23 nt, Human
ggacccgaggccgagggcggaaa

SEQ ID NO: 1041003 - RNA, 23 nt, Human
gucacccgcgagcccuccaggga

SEQ ID NO: 1041004 - RNA, 23 nt, Human
ucacccgcgagcccuccagggac

SEQ ID NO: 1041005 - RNA, 22 nt, Human
ucccaccucauuuauuccuaau

SEQ ID NO: 1041006 - RNA, 20 nt, Human
ucucuagcagggcuggcgcu

SEQ ID NO: 1041007 - RNA, 21 nt, Human
uggcgcuggagcuugucucca

SEQ ID NO: 1041008 - RNA, 22 nt, Human
uuugauaaggacaauucuuuuc

SEQ ID NO: 1041009 - RNA, 19 nt, Human
gcucuguccuggaggcggg

SEQ ID NO: 1041010 - RNA, 21 nt, Human
ucuuuggcugagggacuggug

SEQ ID NO: 1041011 - RNA, 19 nt, Human
aaaaaaaaaaaaaagaaaa

SEQ ID NO: 1041012 - RNA, 24 nt, Human
aaaaaaaaaaggaaggggaaagag

SEQ ID NO: 1041013 - RNA, 24 nt, Human
aaaaagaaaaaaaaaggaaaagaa

SEQ ID NO: 1041014 - RNA, 18 nt, Human
aaaaagaaaaaagaaaaa

SEQ ID NO: 1041015 - RNA, 23 nt, Human
aaaagaaaaaaaaaggaaaagaa

SEQ ID NO: 1041016 - RNA, 23 nt, Human
aaacagaauggcaggaacaaacu

SEQ ID NO: 1041017 - RNA, 19 nt, Human
aaaggacagcaggagaaga

SEQ ID NO: 1041018 - RNA, 21 nt, Human
aagaaucucuugcaccaaguc

SEQ ID NO: 1041019 - RNA, 26 nt, Human
aauggcaggaacaaacuaggaaagga

SEQ ID NO: 1041020 - RNA, 19 nt, Human
aauuaaaaaaaaaaggaag

SEQ ID NO: 1041021 - RNA, 24 nt, Human
acaacuagcaaaaacagucugccu

SEQ ID NO: 1041022 - RNA, 27 nt, Human
agaaaaaaaaaggaaaagaaaacaaaa

SEQ ID NO: 1041023 - RNA, 21 nt, Human
agaaaaaagaaaaaaaaagga

SEQ ID NO: 1041024 - RNA, 18 nt, Human
agaggcacaggagaaagg

SEQ ID NO: 1041025 - RNA, 23 nt, Human
agcaaaaggacagcaggagaaga

SEQ ID NO: 1041026 - RNA, 24 nt, Human
agcgggcgaaagccgggcccccag

SEQ ID NO: 1041027 - RNA, 25 nt, Human
aggcagagggagaauccugagguuu

SEQ ID NO: 1041028 - RNA, 19 nt, Human
aggggaguugggguggggc

SEQ ID NO: 1041029 - RNA, 22 nt, Human
aggugacuguuccagaagaggg

SEQ ID NO: 1041030 - RNA, 21 nt, Human
agguuuucugcucauuggcug

SEQ ID NO: 1041031 - RNA, 24 nt, Human
caaaaggacagcaggagaagagaa

SEQ ID NO: 1041032 - RNA, 21 nt, Human
caaaguucgcagcaagaaucu

SEQ ID NO: 1041033 - RNA, 23 nt, Human
caacaggacauauaggaucccuu

SEQ ID NO: 1041034 - RNA, 25 nt, Human
caaccagacaaacuggugggcuaaa

SEQ ID NO: 1041035 - RNA, 24 nt, Human
caagccaugcccugugcaaaaaaa

SEQ ID NO: 1041036 - RNA, 18 nt, Human
cacuggcucuacaaaguu

SEQ ID NO: 1041037 - RNA, 19 nt, Human
cagaggcacaggagaaagg

SEQ ID NO: 1041038 - RNA, 23 nt, Human
cagcaagaaucucuugcaccaag

SEQ ID NO: 1041039 - RNA, 21 nt, Human
caggagacugccugaaggcac

SEQ ID NO: 1041040 - RNA, 22 nt, Human
caucaggaacccucaaagccaa

SEQ ID NO: 1041041 - RNA, 25 nt, Human
cauuuuuauuuucagagggaugagg

SEQ ID NO: 1041042 - RNA, 20 nt, Human
ccacccccaaagcucuagcc

SEQ ID NO: 1041043 - RNA, 19 nt, Human
cccaccccacccccaaagc

SEQ ID NO: 1041044 - RNA, 21 nt, Human
ccccaaagcucuagccaguca

SEQ ID NO: 1041045 - RNA, 23 nt, Human
ccccaccccacccccaaagcucu

SEQ ID NO: 1041046 - RNA, 24 nt, Human
ccccaccccacccccaaagcucua

SEQ ID NO: 1041047 - RNA, 18 nt, Human
ccccagugagcgccgcga

SEQ ID NO: 1041048 - RNA, 23 nt, Human
cccugugcaaaaaaaaaaaaaaa

SEQ ID NO: 1041049 - RNA, 21 nt, Human
ccgcggccggcggcggcggcg

SEQ ID NO: 1041050 - RNA, 20 nt, Human
ccugggcuaguggcucugga

SEQ ID NO: 1041051 - RNA, 26 nt, Human
cgcggccggcggcggcggcggcagca

SEQ ID NO: 1041052 - RNA, 25 nt, Human
cggcggcggcggcagcagcgggcga

SEQ ID NO: 1041053 - RNA, 19 nt, Human
cuaaaguccagaaauucuu

SEQ ID NO: 1041054 - RNA, 22 nt, Human
cuaaauaauacuaaaaaaaaaa

SEQ ID NO: 1041055 - RNA, 25 nt, Human
cuaucugcacacuggcucuacaaag

SEQ ID NO: 1041056 - RNA, 18 nt, Human
cuccgcugaagccaccac

SEQ ID NO: 1041057 - RNA, 25 nt, Human
cugaagccaccaccagcgccuccuu

SEQ ID NO: 1041058 - RNA, 22 nt, Human
cugccuccgcugaagccaccac

SEQ ID NO: 1041059 - RNA, 23 nt, Human
cugugcaaaaaaaaaaaaaaaaa

SEQ ID NO: 1041060 - RNA, 20 nt, Human
cuguuagucaaguaaugauu

SEQ ID NO: 1041061 - RNA, 20 nt, Human
cuuauaaaaacagaauggca

SEQ ID NO: 1041062 - RNA, 25 nt, Human
cuucauaggcauuuguauugucacu

SEQ ID NO: 1041063 - RNA, 26 nt, Human
gaaaaaaaaaggaaaagaaaacaaaa

SEQ ID NO: 1041064 - RNA, 25 nt, Human
gaaauucuuuccagguuuucugcuc

SEQ ID NO: 1041065 - RNA, 18 nt, Human
gaaggcagggcuugaauu

SEQ ID NO: 1041066 - RNA, 18 nt, Human
gaauggcaggaacaaacu

SEQ ID NO: 1041067 - RNA, 22 nt, Human
gagcacauacaaacugucauaa

SEQ ID NO: 1041068 - RNA, 22 nt, Human
gagcgugcuugcgucacacgcc

SEQ ID NO: 1041069 - RNA, 24 nt, Human
gcaagaagcagaaaauauuuagag

SEQ ID NO: 1041070 - RNA, 20 nt, Human
gccacuuauaaaaacagaau

SEQ ID NO: 1041071 - RNA, 21 nt, Human
gccggcggcggcggcggcagc

SEQ ID NO: 1041072 - RNA, 25 nt, Human
gccugccuccgcugaagccaccacc

SEQ ID NO: 1041073 - RNA, 19 nt, Human
gccuggcgcugguuggggc

SEQ ID NO: 1041074 - RNA, 19 nt, Human
gcggccggcggcggcggcg

SEQ ID NO: 1041075 - RNA, 19 nt, Human
gcggcggcagcagcgggcg

SEQ ID NO: 1041076 - RNA, 24 nt, Human
gcuaaaguccagaaauucuuucca

SEQ ID NO: 1041077 - RNA, 19 nt, Human
gcucuacaaaguucgcagc

SEQ ID NO: 1041078 - RNA, 25 nt, Human
ggaagaacagccaugaucuaguaaa

SEQ ID NO: 1041079 - RNA, 19 nt, Human
ggacuccagguuucuuauc

SEQ ID NO: 1041080 - RNA, 18 nt, Human
ggcguaagagcaaaagga

SEQ ID NO: 1041081 - RNA, 20 nt, Human
gugagacguuugcugcucug

SEQ ID NO: 1041082 - RNA, 24 nt, Human
gugcaaaaaaaaaaaaaaaaaaaa

SEQ ID NO: 1041083 - RNA, 21 nt, Human
guucuuccugcagaggcacag

SEQ ID NO: 1041084 - RNA, 21 nt, Human
uaaaaagagaccugcaagaag

SEQ ID NO: 1041085 - RNA, 31 nt, Human
uaaaaagccaucaggaacccucaaagccaaa

SEQ ID NO: 1041086 - RNA, 19 nt, Human
uaacccccaccccaccccc

SEQ ID NO: 1041087 - RNA, 23 nt, Human
uaagacaggcagagggagaaucc

SEQ ID NO: 1041088 - RNA, 22 nt, Human
uaagagccaacaggacauauag

SEQ ID NO: 1041089 - RNA, 18 nt, Human
uaaggggaguuggggugg

SEQ ID NO: 1041090 - RNA, 22 nt, Human
uaggaucccuucccucccccgg

SEQ ID NO: 1041091 - RNA, 22 nt, Human
ucaaaaauaaaauuaacaaggu

SEQ ID NO: 1041092 - RNA, 21 nt, Human
ucaaagccaaauucuaucugc

SEQ ID NO: 1041093 - RNA, 20 nt, Human
ucaaccagacaaacuggugg

SEQ ID NO: 1041094 - RNA, 22 nt, Human
ucaaccagacaaacuggugggc

SEQ ID NO: 1041095 - RNA, 23 nt, Human
ucaaucauucagaaggcaagugu

SEQ ID NO: 1041096 - RNA, 18 nt, Human
ucagugccugauauucgg

SEQ ID NO: 1041097 - RNA, 21 nt, Human
ucauuuugaaggcagggcuug

SEQ ID NO: 1041098 - RNA, 20 nt, Human
uccacgguuccacaacuagc

SEQ ID NO: 1041099 - RNA, 20 nt, Human
uccagaagagggcugugaaa

SEQ ID NO: 1041100 - RNA, 19 nt, Human
uccuguuucuucauaggca

SEQ ID NO: 1041101 - RNA, 21 nt, Human
ucuaagauuuggaaaugcuga

SEQ ID NO: 1041102 - RNA, 18 nt, Human
ucuacaaaguucgcagcc

SEQ ID NO: 1041103 - RNA, 23 nt, Human
ugacuguuccagaagagggcugu

SEQ ID NO: 1041104 - RNA, 23 nt, Human
ugagcacauacaaacugucauaa

SEQ ID NO: 1041105 - RNA, 19 nt, Human
ugaggagcugagaugugcc

SEQ ID NO: 1041106 - RNA, 19 nt, Human
ugaggugggaagaacagcc

SEQ ID NO: 1041107 - RNA, 24 nt, Human
ugcaaaaaaaaaaaaaaaaaagaa

SEQ ID NO: 1041108 - RNA, 18 nt, Human
ugccuauuuccaaggacg

SEQ ID NO: 1041109 - RNA, 25 nt, Human
uggcaggaacaaacuaggaaaggaa

SEQ ID NO: 1041110 - RNA, 20 nt, Human
uggcauacucugccccagga

SEQ ID NO: 1041111 - RNA, 22 nt, Human
uggcauacucugccccaggaga

SEQ ID NO: 1041112 - RNA, 19 nt, Human
uggccuggcgcugguuggg

SEQ ID NO: 1041113 - RNA, 21 nt, Human
uggccuggcgcugguuggggc

SEQ ID NO: 1041114 - RNA, 21 nt, Human
uggccuggcuaugauggaugg

SEQ ID NO: 1041115 - RNA, 20 nt, Human
uggcgaggaaggucuucuag

SEQ ID NO: 1041116 - RNA, 21 nt, Human
ugggcuaaaguccagaaauuc

SEQ ID NO: 1041117 - RNA, 23 nt, Human
uggggcgggauccugauccuguu

SEQ ID NO: 1041118 - RNA, 23 nt, Human
uggugggcuaaaguccagaaauu

SEQ ID NO: 1041119 - RNA, 22 nt, Human
uguagccacuuauaaaaacaga

SEQ ID NO: 1041120 - RNA, 24 nt, Human
uguagccacuuauaaaaacagaau

SEQ ID NO: 1041121 - RNA, 21 nt, Human
ugugcaaaaaaaaaaaaaaaa

SEQ ID NO: 1041122 - RNA, 18 nt, Human
uuaaaaaaaaaaggaagg

SEQ ID NO: 1041123 - RNA, 22 nt, Human
uuaaaaaaaaaaggaaggggaa

SEQ ID NO: 1041124 - RNA, 23 nt, Human
uuaaaaaaaaaaggaaggggaaa

SEQ ID NO: 1041125 - RNA, 20 nt, Human
uuaacccccaccccaccccc

SEQ ID NO: 1041126 - RNA, 21 nt, Human
uuaacccccaccccaccccca

SEQ ID NO: 1041127 - RNA, 19 nt, Human
uucaagucuaagauuugga

SEQ ID NO: 1041128 - RNA, 24 nt, Human
uucagaaggcaaguguagccacuu

SEQ ID NO: 1041129 - RNA, 20 nt, Human
uuccugggcuaguggcucug

SEQ ID NO: 1041130 - RNA, 18 nt, Human
uuggcuggaugcuggaag

SEQ ID NO: 1041131 - RNA, 18 nt, Human
uuguauugucacuucuug

SEQ ID NO: 1041132 - RNA, 19 nt, Human
uuugcugcucuggucucaa

SEQ ID NO: 1041133 - RNA, 18 nt, Human
aaaaucaauucagccgcc

SEQ ID NO: 1041134 - RNA, 23 nt, Human
aaauggcugugggaugggguagg

SEQ ID NO: 1041135 - RNA, 18 nt, Human
aagcugcaggggcaggga

SEQ ID NO: 1041136 - RNA, 20 nt, Human
aaggagguccccaggccucu

SEQ ID NO: 1041137 - RNA, 23 nt, Human
aaggggcccuggcccucccuggg

SEQ ID NO: 1041138 - RNA, 20 nt, Human
aauggcugugggauggggua

SEQ ID NO: 1041139 - RNA, 24 nt, Human
agcauucccuggugcccucuacuc

SEQ ID NO: 1041140 - RNA, 19 nt, Human
agccaagcugcaggggcag

SEQ ID NO: 1041141 - RNA, 21 nt, Human
aggaaggugccuggcuuggca

SEQ ID NO: 1041142 - RNA, 21 nt, Human
aggacagaaaucccugaauau

SEQ ID NO: 1041143 - RNA, 24 nt, Human
aggggcccuggcccucccuggggg

SEQ ID NO: 1041144 - RNA, 23 nt, Human
aguaguguugaccuugcuguggg

SEQ ID NO: 1041145 - RNA, 20 nt, Human
agucagcucccagguccugg

SEQ ID NO: 1041146 - RNA, 24 nt, Human
agucagcucccagguccugggagg

SEQ ID NO: 1041147 - RNA, 19 nt, Human
caaaaucaauucagccgcc

SEQ ID NO: 1041148 - RNA, 20 nt, Human
caaaaucaauucagccgccc

SEQ ID NO: 1041149 - RNA, 21 nt, Human
caagacccccacagaaccccc

SEQ ID NO: 1041150 - RNA, 19 nt, Human
cacaagacccccacagaac

SEQ ID NO: 1041151 - RNA, 20 nt, Human
cacagcauucccuggugccc

SEQ ID NO: 1041152 - RNA, 21 nt, Human
cacagcauucccuggugcccu

SEQ ID NO: 1041153 - RNA, 21 nt, Human
cacccugaagucccucacagc

SEQ ID NO: 1041154 - RNA, 23 nt, Human
caccuccagucugaccgcuucca

SEQ ID NO: 1041155 - RNA, 23 nt, Human
cacucuuggggcaggggguugcu

SEQ ID NO: 1041156 - RNA, 25 nt, Human
cagcagcuccgaggucacaugccac

SEQ ID NO: 1041157 - RNA, 19 nt, Human
cagcucccagguccuggga

SEQ ID NO: 1041158 - RNA, 19 nt, Human
cagcugccaccuccccacc

SEQ ID NO: 1041159 - RNA, 24 nt, Human
cagggcaggcagcugccaccuccc

SEQ ID NO: 1041160 - RNA, 22 nt, Human
ccacagaacccccugcacaggg

SEQ ID NO: 1041161 - RNA, 22 nt, Human
ccagcagaugcuacaacugucc

SEQ ID NO: 1041162 - RNA, 19 nt, Human
cccacagaacccccugcac

SEQ ID NO: 1041163 - RNA, 21 nt, Human
cccaccugaccccaagcugga

SEQ ID NO: 1041164 - RNA, 23 nt, Human
ccccaagcuggaccuccuugccu

SEQ ID NO: 1041165 - RNA, 24 nt, Human
ccccaagcuggaccuccuugccuc

SEQ ID NO: 1041166 - RNA, 23 nt, Human
ccccacagaacccccugcacagg

SEQ ID NO: 1041167 - RNA, 22 nt, Human
cccccacagaacccccugcaca

SEQ ID NO: 1041168 - RNA, 18 nt, Human
ccccguuggggggggggg

SEQ ID NO: 1041169 - RNA, 18 nt, Human
cccuggggggcaggggug

SEQ ID NO: 1041170 - RNA, 18 nt, Human
cccuuggggcagaggugg

SEQ ID NO: 1041171 - RNA, 19 nt, Human
ccguugggggggggggucc

SEQ ID NO: 1041172 - RNA, 21 nt, Human
ccucacucuuggggcaggggg

SEQ ID NO: 1041173 - RNA, 23 nt, Human
ccuccagucugaccgcuuccauu

SEQ ID NO: 1041174 - RNA, 22 nt, Human
ccuccccacccugcaggacagg

SEQ ID NO: 1041175 - RNA, 19 nt, Human
ccucccuggggggcagggg

SEQ ID NO: 1041176 - RNA, 22 nt, Human
ccucucuguagagucagcuccc

SEQ ID NO: 1041177 - RNA, 22 nt, Human
ccuggggggcaggggugugcuc

SEQ ID NO: 1041178 - RNA, 26 nt, Human
ccugugacacaagacccccacagaac

SEQ ID NO: 1041179 - RNA, 20 nt, Human
ccugugcugcagagggaagu

SEQ ID NO: 1041180 - RNA, 20 nt, Human
cgagggaaggcccagacacu

SEQ ID NO: 1041181 - RNA, 24 nt, Human
cuccaaggggcccuggcccucccu

SEQ ID NO: 1041182 - RNA, 20 nt, Human
cucccuggggggcaggggug

SEQ ID NO: 1041183 - RNA, 26 nt, Human
cucccuggggggcaggggugugcucu

SEQ ID NO: 1041184 - RNA, 19 nt, Human
cugcugcccccaccuccag

SEQ ID NO: 1041185 - RNA, 22 nt, Human
cuuggcagggcaggcagcugcc

SEQ ID NO: 1041186 - RNA, 20 nt, Human
gacacagcgugggcccaccu

SEQ ID NO: 1041187 - RNA, 18 nt, Human
gagcugcugcccccaccu

SEQ ID NO: 1041188 - RNA, 22 nt, Human
gagucagcucccagguccuggg

SEQ ID NO: 1041189 - RNA, 26 nt, Human
gcagaacagaggcugggguugcuuuc

SEQ ID NO: 1041190 - RNA, 18 nt, Human
gcaggcagcugccaccuc

SEQ ID NO: 1041191 - RNA, 19 nt, Human
gcagucagcagggugacgg

SEQ ID NO: 1041192 - RNA, 22 nt, Human
gcccaccugaccccaagcugga

SEQ ID NO: 1041193 - RNA, 23 nt, Human
gcccuuggggcagaggugggagu

SEQ ID NO: 1041194 - RNA, 24 nt, Human
gccucuggcucuggggugugauuu

SEQ ID NO: 1041195 - RNA, 21 nt, Human
gcuacaacugucccccuaacc

SEQ ID NO: 1041196 - RNA, 20 nt, Human
ggaguacaaaaucaauucag

SEQ ID NO: 1041197 - RNA, 22 nt, Human
ggaugggguaggggcgacacug

SEQ ID NO: 1041198 - RNA, 21 nt, Human
ggcagaggugggaguccugag

SEQ ID NO: 1041199 - RNA, 19 nt, Human
ggcgggcccgggacacagc

SEQ ID NO: 1041200 - RNA, 21 nt, Human
ggggcaggggugugcucugag

SEQ ID NO: 1041201 - RNA, 18 nt, Human
ggggcccuggcccucccu

SEQ ID NO: 1041202 - RNA, 22 nt, Human
ggggcccuggcccucccugggg

SEQ ID NO: 1041203 - RNA, 22 nt, Human
gguggcuaaggcguaguagugu

SEQ ID NO: 1041204 - RNA, 19 nt, Human
gguuccgucuuguggggca

SEQ ID NO: 1041205 - RNA, 21 nt, Human
gucgcagucagcagggugacg

SEQ ID NO: 1041206 - RNA, 21 nt, Human
uaagaaaaauccgacacagug

SEQ ID NO: 1041207 - RNA, 21 nt, Human
uaggucccugcccaaagcccu

SEQ ID NO: 1041208 - RNA, 19 nt, Human
ucagcagggugacgggugg

SEQ ID NO: 1041209 - RNA, 23 nt, Human
uccacgguggcuguugagugccg

SEQ ID NO: 1041210 - RNA, 23 nt, Human
uccagcugcaagaucuccaaggg

SEQ ID NO: 1041211 - RNA, 22 nt, Human
ucccagguccugggaggcaccc

SEQ ID NO: 1041212 - RNA, 20 nt, Human
uccccaggccucuggcucug

SEQ ID NO: 1041213 - RNA, 23 nt, Human
ucccggguuccgucuuguggggc

SEQ ID NO: 1041214 - RNA, 18 nt, Human
ucccugcccaaagcccuu

SEQ ID NO: 1041215 - RNA, 19 nt, Human
ucuccaaggggcccuggcc

SEQ ID NO: 1041216 - RNA, 19 nt, Human
ucuuggggcaggggguugc

SEQ ID NO: 1041217 - RNA, 21 nt, Human
ugaagucccucacagcauucc

SEQ ID NO: 1041218 - RNA, 22 nt, Human
ugacacaagacccccacagaac

SEQ ID NO: 1041219 - RNA, 25 nt, Human
ugacacaagacccccacagaacccc

SEQ ID NO: 1041220 - RNA, 21 nt, Human
ugaccccaagcuggaccuccu

SEQ ID NO: 1041221 - RNA, 22 nt, Human
ugaccccguugggggggggggu

SEQ ID NO: 1041222 - RNA, 18 nt, Human
ugcagagggaagucgcag

SEQ ID NO: 1041223 - RNA, 18 nt, Human
ugcuacaacugucccccu

SEQ ID NO: 1041224 - RNA, 22 nt, Human
uggaaagggcagaacagaggcu

SEQ ID NO: 1041225 - RNA, 19 nt, Human
uggaggaagagcccuccac

SEQ ID NO: 1041226 - RNA, 19 nt, Human
uggcagggcaggcagcugc

SEQ ID NO: 1041227 - RNA, 19 nt, Human
uggcugccugcccugugcu

SEQ ID NO: 1041228 - RNA, 19 nt, Human
uggcugugggaugggguag

SEQ ID NO: 1041229 - RNA, 25 nt, Human
ugggagcugcugcccccaccuccag

SEQ ID NO: 1041230 - RNA, 21 nt, Human
ugggaggagguuuggaaaggg

SEQ ID NO: 1041231 - RNA, 20 nt, Human
uggggcagaggugggagucc

SEQ ID NO: 1041232 - RNA, 19 nt, Human
ugggggacggggaaggcaa

SEQ ID NO: 1041233 - RNA, 22 nt, Human
uuccccuuuaggucccugccca

SEQ ID NO: 1041234 - RNA, 23 nt, Human
uuugcccacccugaagucccuca

SEQ ID NO: 1041235 - RNA, 26 nt, Human
uuugcccacccugaagucccucacag

SEQ ID NO: 1041236 - RNA, 23 nt, Human
aaaaaaaaaaaaagaagcuggaa

SEQ ID NO: 1041237 - RNA, 20 nt, Human
aaaaaaaaaagaagcuggaa

SEQ ID NO: 1041238 - RNA, 23 nt, Human
aaggggggaaaaaaaaaaaaaga

SEQ ID NO: 1041239 - RNA, 19 nt, Human
aggggcugcagacaccugc

SEQ ID NO: 1041240 - RNA, 18 nt, Human
cacaggcaggcugcuggc

SEQ ID NO: 1041241 - RNA, 24 nt, Human
caccagggccuucuucucaggggc

SEQ ID NO: 1041242 - RNA, 22 nt, Human
cagcagguuuccugcucaggcu

SEQ ID NO: 1041243 - RNA, 20 nt, Human
ccacagcaggggcccgcgcc

SEQ ID NO: 1041244 - RNA, 20 nt, Human
ccagcagguuuccugcucag

SEQ ID NO: 1041245 - RNA, 23 nt, Human
ccagggccuucuucucaggggcu

SEQ ID NO: 1041246 - RNA, 21 nt, Human
ccuccccugaaacgaugccag

SEQ ID NO: 1041247 - RNA, 23 nt, Human
ccugucacaggcaggcugcuggc

SEQ ID NO: 1041248 - RNA, 26 nt, Human
cgcccggauuuauauccugggcgcgc

SEQ ID NO: 1041249 - RNA, 18 nt, Human
cugccgggcugugcggcu

SEQ ID NO: 1041250 - RNA, 24 nt, Human
cugcucugccgcugcugccuccac

SEQ ID NO: 1041251 - RNA, 24 nt, Human
cuggggcggcuagagaccuccccu

SEQ ID NO: 1041252 - RNA, 22 nt, Human
gaagcuggaagcaguuuaggca

SEQ ID NO: 1041253 - RNA, 18 nt, Human
gacuuauugcagaagggg

SEQ ID NO: 1041254 - RNA, 23 nt, Human
uauugcagaaggggggaaaaaaa

SEQ ID NO: 1041255 - RNA, 21 nt, Human
ucacaggcaggcugcuggcgc

SEQ ID NO: 1041256 - RNA, 18 nt, Human
ugcagacaccugcccucc

SEQ ID NO: 1041257 - RNA, 21 nt, Human
ugcagggagaggagccacagc

SEQ ID NO: 1041258 - RNA, 18 nt, Human
ugccagggucuggggccc

SEQ ID NO: 1041259 - RNA, 28 nt, Human
uggggcccaccagggccuucccuggggg

SEQ ID NO: 1041260 - RNA, 27 nt, Human
ugugcagggagaggagccacagcaggg

SEQ ID NO: 1041261 - RNA, 19 nt, Human
uuccugcucaggcugcugc

SEQ ID NO: 1041262 - RNA, 23 nt, Human
uuccugcucaggcugcugcucag

SEQ ID NO: 1041263 - RNA, 19 nt, Human
aacauagugagacccgucu

SEQ ID NO: 1041264 - RNA, 20 nt, Human
aacauagugagacccgucuc

SEQ ID NO: 1041265 - RNA, 24 nt, Human
aacuugagaccagccugggcaaca

SEQ ID NO: 1041266 - RNA, 23 nt, Human
acuuugagaagccaaggcaagaa

SEQ ID NO: 1041267 - RNA, 22 nt, Human
agccugggcaacauagugagac

SEQ ID NO: 1041268 - RNA, 23 nt, Human
agccugggcaacauagugagacc

SEQ ID NO: 1041269 - RNA, 24 nt, Human
agccugggcaacauagugagaccc

SEQ ID NO: 1041270 - RNA, 23 nt, Human
aggaacuugagaccagccugggc

SEQ ID NO: 1041271 - RNA, 20 nt, Human
aggcaagaacauugaaucca

SEQ ID NO: 1041272 - RNA, 24 nt, Human
aguggcucaugccuauaauccugg

SEQ ID NO: 1041273 - RNA, 22 nt, Human
auccugguacuuugagaagcca

SEQ ID NO: 1041274 - RNA, 19 nt, Human
augccuauaauccugguac

SEQ ID NO: 1041275 - RNA, 23 nt, Human
caacauagugagacccgucucuu

SEQ ID NO: 1041276 - RNA, 24 nt, Human
caugccuauaauccugguacuuug

SEQ ID NO: 1041277 - RNA, 26 nt, Human
cccugccuggacaucguucuccucuu

SEQ ID NO: 1041278 - RNA, 18 nt, Human
ccggccccugccuggaca

SEQ ID NO: 1041279 - RNA, 20 nt, Human
ccggccccugccuggacauc

SEQ ID NO: 1041280 - RNA, 18 nt, Human
ccugccuggacaucguuc

SEQ ID NO: 1041281 - RNA, 19 nt, Human
cguauuaucucugcaucac

SEQ ID NO: 1041282 - RNA, 24 nt, Human
cucaugccuauaauccugguacuu

SEQ ID NO: 1041283 - RNA, 20 nt, Human
cugaagcugguggggcagca

SEQ ID NO: 1041284 - RNA, 26 nt, Human
cugaagcugguggggcagcagaaauu

SEQ ID NO: 1041285 - RNA, 25 nt, Human
cugguggggcagcagaaauuuuucc

SEQ ID NO: 1041286 - RNA, 22 nt, Human
gaaauuuuuccacucagggcac

SEQ ID NO: 1041287 - RNA, 20 nt, Human
gacaucguucuccucuucac

SEQ ID NO: 1041288 - RNA, 20 nt, Human
gagaagccaaggcaagaaca

SEQ ID NO: 1041289 - RNA, 24 nt, Human
gccuggacaucguucuccucuuca

SEQ ID NO: 1041290 - RNA, 19 nt, Human
gccuggcacaguggcucau

SEQ ID NO: 1041291 - RNA, 20 nt, Human
ucagugccuuggcacgagcu

SEQ ID NO: 1041292 - RNA, 18 nt, Human
uccugguacuuugagaag

SEQ ID NO: 1041293 - RNA, 23 nt, Human
ucucugcaucaccacagugacua

SEQ ID NO: 1041294 - RNA, 23 nt, Human
ugaauccaggaacuugagaccag

SEQ ID NO: 1041295 - RNA, 21 nt, Human
ugagaagccaaggcaagaaca

SEQ ID NO: 1041296 - RNA, 24 nt, Human
ugagaccagccugggcaacauagu

SEQ ID NO: 1041297 - RNA, 18 nt, Human
uggcacaguggcucaugc

SEQ ID NO: 1041298 - RNA, 24 nt, Human
uggcacaguggcucaugccuauaa

SEQ ID NO: 1041299 - RNA, 22 nt, Human
uggcucaugccuauaauccugg

SEQ ID NO: 1041300 - RNA, 24 nt, Human
uggcucaugccuauaauccuggua

SEQ ID NO: 1041301 - RNA, 19 nt, Human
ugggccuggcacaguggcu

SEQ ID NO: 1041302 - RNA, 22 nt, Human
uggggcagcagaaauuuuucca

SEQ ID NO: 1041303 - RNA, 22 nt, Human
uuuuccacucagaagcuagguu

SEQ ID NO: 1041304 - RNA, 19 nt, Human
uuccgcacgcgccgucacc

SEQ ID NO: 1041305 - RNA, 20 nt, Human
ucccuuggccacccccuccc

SEQ ID NO: 1041306 - RNA, 21 nt, Human
aagcagcucuguggucucccg

SEQ ID NO: 1041307 - RNA, 25 nt, Human
aaggcgggggauguggcggcucugg

SEQ ID NO: 1041308 - RNA, 18 nt, Human
acuccgugaguaaaggcc

SEQ ID NO: 1041309 - RNA, 25 nt, Human
agcuggauuuuuuuuuuuuuuuuuu

SEQ ID NO: 1041310 - RNA, 18 nt, Human
aggugccagaagccgagu

SEQ ID NO: 1041311 - RNA, 20 nt, Human
caaccucuaggcggcgcccu

SEQ ID NO: 1041312 - RNA, 20 nt, Human
ccacgccgucccccgcgcgu

SEQ ID NO: 1041313 - RNA, 20 nt, Human
ccaugcuggaggguuuagag

SEQ ID NO: 1041314 - RNA, 20 nt, Human
cccaaggcgggggauguggc

SEQ ID NO: 1041315 - RNA, 27 nt, Human
cccagcuggauuuuuuuuuuuuuuuuu

SEQ ID NO: 1041316 - RNA, 23 nt, Human
ccccaaacguuuuccaaacacuu

SEQ ID NO: 1041317 - RNA, 18 nt, Human
cccuuucuuccuugaaga

SEQ ID NO: 1041318 - RNA, 22 nt, Human
cccuuucuuccuugaagauaaa

SEQ ID NO: 1041319 - RNA, 19 nt, Human
cggcucugggucgccgccu

SEQ ID NO: 1041320 - RNA, 24 nt, Human
cgggggauguggcggcucuggguc

SEQ ID NO: 1041321 - RNA, 23 nt, Human
cuccccacucccuuucuuccuug

SEQ ID NO: 1041322 - RNA, 21 nt, Human
cucggggcucggccuggagcu

SEQ ID NO: 1041323 - RNA, 24 nt, Human
cugggucgccgccuucugcccccg

SEQ ID NO: 1041324 - RNA, 22 nt, Human
gaguccagggcgucuggggacu

SEQ ID NO: 1041325 - RNA, 26 nt, Human
gcagaacacaaguuccuuaaagaaac

SEQ ID NO: 1041326 - RNA, 21 nt, Human
gcggcuggggaagcagcucug

SEQ ID NO: 1041327 - RNA, 18 nt, Human
ggaguccagggcgucugg

SEQ ID NO: 1041328 - RNA, 18 nt, Human
ggauuuuuuuuuuuuuuu

SEQ ID NO: 1041329 - RNA, 19 nt, Human
ggcucggccuggagcuggc

SEQ ID NO: 1041330 - RNA, 19 nt, Human
gggcucggccuggagcugg

SEQ ID NO: 1041331 - RNA, 19 nt, Human
gggggauguggcggcucug

SEQ ID NO: 1041332 - RNA, 18 nt, Human
guuuuccaaacacuuuuc

SEQ ID NO: 1041333 - RNA, 21 nt, Human
uaacuggaggggggcuagaca

SEQ ID NO: 1041334 - RNA, 18 nt, Human
uaacuucuccccacuccc

SEQ ID NO: 1041335 - RNA, 21 nt, Human
ucacuccgugaguaaaggcca

SEQ ID NO: 1041336 - RNA, 22 nt, Human
ucccggcgggugaggccgagac

SEQ ID NO: 1041337 - RNA, 19 nt, Human
ucccuuucuuccuugaaga

SEQ ID NO: 1041338 - RNA, 19 nt, Human
uccuuaaagaaacaaaaau

SEQ ID NO: 1041339 - RNA, 21 nt, Human
ucuccccacucccuuucuucc

SEQ ID NO: 1041340 - RNA, 19 nt, Human
ucuucguagacugcaggag

SEQ ID NO: 1041341 - RNA, 21 nt, Human
ugaggccgagacagagaccaa

SEQ ID NO: 1041342 - RNA, 19 nt, Human
ugaggccucucgaggcagu

SEQ ID NO: 1041343 - RNA, 25 nt, Human
ugaguaaaggccaguuaggcaacau

SEQ ID NO: 1041344 - RNA, 22 nt, Human
ugcccccgccucugugaggccu

SEQ ID NO: 1041345 - RNA, 25 nt, Human
uucacccccaaacguuuuccaaaca

SEQ ID NO: 1041346 - RNA, 24 nt, Human
uuuagagguaacuucuccccacuc

SEQ ID NO: 1041347 - RNA, 23 nt, Human
uuuccaaacacuuuuccaaaagc

SEQ ID NO: 1041348 - RNA, 23 nt, Human
uuucugggacuuccuggccuguc

SEQ ID NO: 1041349 - RNA, 26 nt, Human
uuuuuuuuuuuuuuuuuuuccaauuu

SEQ ID NO: 1041350 - RNA, 23 nt, Human
uuuuuuuuuuuuuuuuuuuucca

SEQ ID NO: 1041351 - RNA, 24 nt, Human
uuuuuuuuuuuuuuuuuuuuuccu

SEQ ID NO: 1041352 - RNA, 24 nt, Human
aagccuaggucaggaaccaaacca

SEQ ID NO: 1041353 - RNA, 18 nt, Human
acauuucccagccugcug

SEQ ID NO: 1041354 - RNA, 21 nt, Human
aguggcucaaaacccugcuuc

SEQ ID NO: 1041355 - RNA, 23 nt, Human
caggaaccaaaccacauuuccca

SEQ ID NO: 1041356 - RNA, 20 nt, Human
ccaaaccacauuucccagcc

SEQ ID NO: 1041357 - RNA, 24 nt, Human
ccaaaccacauuucccagccugcu

SEQ ID NO: 1041358 - RNA, 22 nt, Human
ccaagccuaggucaggaaccaa

SEQ ID NO: 1041359 - RNA, 20 nt, Human
cccagccugcugugcauggu

SEQ ID NO: 1041360 - RNA, 24 nt, Human
cucaaaacccugcuucagcucaag

SEQ ID NO: 1041361 - RNA, 20 nt, Human
gcucaaaacccugcuucagc

SEQ ID NO: 1041362 - RNA, 24 nt, Human
ucaaccauccuuuauucgcuggcu

SEQ ID NO: 1041363 - RNA, 23 nt, Human
uggcagcagcagcaguggcucaa

SEQ ID NO: 1041364 - RNA, 20 nt, Human
uggcucaaaacccugcuuca

SEQ ID NO: 1041365 - RNA, 24 nt, Human
uggcuugucuucccaagccuaggu

SEQ ID NO: 1041366 - RNA, 20 nt, Human
uucaaccauccuuuauucgc

SEQ ID NO: 1041367 - RNA, 24 nt, Human
aggaagccguaggagacuugccaa

SEQ ID NO: 1041368 - RNA, 20 nt, Human
aggcagccgugcaggcccag

SEQ ID NO: 1041369 - RNA, 19 nt, Human
aggcccaggaagccguagg

SEQ ID NO: 1041370 - RNA, 27 nt, Human
caagaagaaggcagccgugcaggccca

SEQ ID NO: 1041371 - RNA, 19 nt, Human
cacuggauccccagggccc

SEQ ID NO: 1041372 - RNA, 22 nt, Human
cagaagaggccaggaaugcggc

SEQ ID NO: 1041373 - RNA, 25 nt, Human
cagcuuggaaaacucacggacgaug

SEQ ID NO: 1041374 - RNA, 21 nt, Human
cagggccaagaagaaggcagc

SEQ ID NO: 1041375 - RNA, 25 nt, Human
ccccagggcccagcuuggaaaacuc

SEQ ID NO: 1041376 - RNA, 22 nt, Human
ccuccaggagggggccagcccu

SEQ ID NO: 1041377 - RNA, 19 nt, Human
gccagcccuggacccugca

SEQ ID NO: 1041378 - RNA, 18 nt, Human
gggcagggccaagaagaa

SEQ ID NO: 1041379 - RNA, 22 nt, Human
guaggagacuugccaaccucca

SEQ ID NO: 1041380 - RNA, 18 nt, Human
uccaggagggggccagcc

SEQ ID NO: 1041381 - RNA, 21 nt, Human
cagugcgccugucugaagcuc

SEQ ID NO: 1041382 - RNA, 21 nt, Human
cuccuuguugccacuggccga

SEQ ID NO: 1041383 - RNA, 25 nt, Human
gaggcgguggcggacaggugggcga

SEQ ID NO: 1041384 - RNA, 20 nt, Human
ggcgggggcggggccucggc

SEQ ID NO: 1041385 - RNA, 22 nt, Human
ucucguucuucaugcucagcuc

SEQ ID NO: 1041386 - RNA, 19 nt, Human
ugcaaggcgggggcggggc

SEQ ID NO: 1041387 - RNA, 18 nt, Human
ugccacuggccgaacagu

SEQ ID NO: 1041388 - RNA, 19 nt, Human
ugccacuggccgaacagug

SEQ ID NO: 1041389 - RNA, 21 nt, Human
uggauuggcuagggcagccgg

SEQ ID NO: 1041390 - RNA, 18 nt, Human
uggcccaggauuggaggc

SEQ ID NO: 1041391 - RNA, 20 nt, Human
uggcccaggauuggaggcgg

SEQ ID NO: 1041392 - RNA, 23 nt, Human
ugucugaagcuccuggcccagga

SEQ ID NO: 1041393 - RNA, 18 nt, Human
uucuucaugcucagcucc

SEQ ID NO: 1041394 - RNA, 21 nt, Human
uucuucaugcucagcuccuug

SEQ ID NO: 1041395 - RNA, 23 nt, Human
aaaaaaaaaaaaaaugugccuug

SEQ ID NO: 1041396 - RNA, 20 nt, Human
aagcagugacacagcacgcg

SEQ ID NO: 1041397 - RNA, 21 nt, Human
aaggagaagcuggaaccaccc

SEQ ID NO: 1041398 - RNA, 24 nt, Human
acacucccugaucacaaaaaaaaa

SEQ ID NO: 1041399 - RNA, 26 nt, Human
agagagcagccucuccuccaaaaccc

SEQ ID NO: 1041400 - RNA, 18 nt, Human
agcagggggaccaggccg

SEQ ID NO: 1041401 - RNA, 19 nt, Human
agccucuccuccaaaaccc

SEQ ID NO: 1041402 - RNA, 25 nt, Human
aggaacaggggagggaaccgguacc

SEQ ID NO: 1041403 - RNA, 22 nt, Human
aggagaagcuggaaccacccug

SEQ ID NO: 1041404 - RNA, 23 nt, Human
aggcccgggacaagggugugcgg

SEQ ID NO: 1041405 - RNA, 20 nt, Human
aggcgcgcaggccgggguuu

SEQ ID NO: 1041406 - RNA, 23 nt, Human
agggguggggguggcgccagggc

SEQ ID NO: 1041407 - RNA, 26 nt, Human
agguggggcaggggagagccgggggu

SEQ ID NO: 1041408 - RNA, 19 nt, Human
auacagcaaagcaggggga

SEQ ID NO: 1041409 - RNA, 25 nt, Human
aucuuggacaccaggggcacuggug

SEQ ID NO: 1041410 - RNA, 22 nt, Human
caaagcagggggaccaggccgu

SEQ ID NO: 1041411 - RNA, 19 nt, Human
caauaugcuccccacucuc

SEQ ID NO: 1041412 - RNA, 20 nt, Human
caauaugcuccccacucucc

SEQ ID NO: 1041413 - RNA, 21 nt, Human
cacccugagacccaggacggg

SEQ ID NO: 1041414 - RNA, 20 nt, Human
cagaagagcaaccugagguc

SEQ ID NO: 1041415 - RNA, 21 nt, Human
cagggcccugggcgagcccuu

SEQ ID NO: 1041416 - RNA, 19 nt, Human
cagguucuggccgcucuuc

SEQ ID NO: 1041417 - RNA, 18 nt, Human
caucucccccucaggacc

SEQ ID NO: 1041418 - RNA, 24 nt, Human
ccacagaggcuagcagcagcuggu

SEQ ID NO: 1041419 - RNA, 18 nt, Human
ccauacucacacagaaga

SEQ ID NO: 1041420 - RNA, 19 nt, Human
ccaugccgaaucccucccc

SEQ ID NO: 1041421 - RNA, 18 nt, Human
cccaggagugaagagcag

SEQ ID NO: 1041422 - RNA, 21 nt, Human
cccucagguucuggccgcucu

SEQ ID NO: 1041423 - RNA, 18 nt, Human
ccggccagaaggagcaag

SEQ ID NO: 1041424 - RNA, 18 nt, Human
ccgugccugcugugcugc

SEQ ID NO: 1041425 - RNA, 19 nt, Human
ccgugugggggcaaguggg

SEQ ID NO: 1041426 - RNA, 20 nt, Human
ccucaggaccgccuggcucc

SEQ ID NO: 1041427 - RNA, 19 nt, Human
ccuccaaaacccccucccu

SEQ ID NO: 1041428 - RNA, 24 nt, Human
ccugaucacaaaaaaaaaaaaaaa

SEQ ID NO: 1041429 - RNA, 22 nt, Human
cgaggcgguggcuccagucucc

SEQ ID NO: 1041430 - RNA, 20 nt, Human
cggggucugugcuucucugg

SEQ ID NO: 1041431 - RNA, 18 nt, Human
cucagguucuggccgcuc

SEQ ID NO: 1041432 - RNA, 22 nt, Human
cuccaaaacccccucccuggcc

SEQ ID NO: 1041433 - RNA, 19 nt, Human
cuccuggcccugggcgugg

SEQ ID NO: 1041434 - RNA, 23 nt, Human
cugaagagagagcagccucuccu

SEQ ID NO: 1041435 - RNA, 18 nt, Human
cuggugccccuggcauca

SEQ ID NO: 1041436 - RNA, 22 nt, Human
cuggugggaaggggugggggug

SEQ ID NO: 1041437 - RNA, 22 nt, Human
cuuccaucccucuuuguguccc

SEQ ID NO: 1041438 - RNA, 21 nt, Human
cuucugagccucacuggcuga

SEQ ID NO: 1041439 - RNA, 25 nt, Human
cuuuguguccagucuacuugggucu

SEQ ID NO: 1041440 - RNA, 19 nt, Human
gaagccucuuuuauuugug

SEQ ID NO: 1041441 - RNA, 19 nt, Human
gaagcggagguuggaggug

SEQ ID NO: 1041442 - RNA, 20 nt, Human
gagcaaccugaggucgggac

SEQ ID NO: 1041443 - RNA, 24 nt, Human
gcagcagcuggugggaaggggugg

SEQ ID NO: 1041444 - RNA, 21 nt, Human
gccagucccagacaggcccgg

SEQ ID NO: 1041445 - RNA, 23 nt, Human
gccccuggcggggucugugcuuc

SEQ ID NO: 1041446 - RNA, 21 nt, Human
ggaaccacccugagacccagg

SEQ ID NO: 1041447 - RNA, 18 nt, Human
ggcaggggagagccgggg

SEQ ID NO: 1041448 - RNA, 20 nt, Human
ggcaugggguuugggauccg

SEQ ID NO: 1041449 - RNA, 23 nt, Human
gggagcucagcugccccccagga

SEQ ID NO: 1041450 - RNA, 22 nt, Human
gggcaugggguuugggauccgu

SEQ ID NO: 1041451 - RNA, 18 nt, Human
gggcguggcgcgcguggc

SEQ ID NO: 1041452 - RNA, 18 nt, Human
ggggagcggguuggggaa

SEQ ID NO: 1041453 - RNA, 23 nt, Human
gggguggcgccagggcccugggc

SEQ ID NO: 1041454 - RNA, 22 nt, Human
ggguggggguggcgccagggcc

SEQ ID NO: 1041455 - RNA, 22 nt, Human
gggugugcggugggccccugcc

SEQ ID NO: 1041456 - RNA, 20 nt, Human
uacacggccuggaccagcuc

SEQ ID NO: 1041457 - RNA, 21 nt, Human
uagcaccauuggaugaagggu

SEQ ID NO: 1041458 - RNA, 23 nt, Human
uaggacaggacagaucugagccc

SEQ ID NO: 1041459 - RNA, 18 nt, Human
ucagaaucagucuggugc

SEQ ID NO: 1041460 - RNA, 26 nt, Human
ucccugaucacaaaaaaaaaaaaaaa

SEQ ID NO: 1041461 - RNA, 23 nt, Human
uccuccaaaacccccucccuggc

SEQ ID NO: 1041462 - RNA, 19 nt, Human
uccuggcccugggcguggc

SEQ ID NO: 1041463 - RNA, 18 nt, Human
ucuagugcuuaccccagc

SEQ ID NO: 1041464 - RNA, 19 nt, Human
ucugcaggcgcgcaggccg

SEQ ID NO: 1041465 - RNA, 20 nt, Human
ucugugcuucucuggguggg

SEQ ID NO: 1041466 - RNA, 23 nt, Human
ucuuccaucccucuuuguguccc

SEQ ID NO: 1041467 - RNA, 18 nt, Human
ugcaaaggcuucaggggc

SEQ ID NO: 1041468 - RNA, 18 nt, Human
ugcccaaggagaagcugg

SEQ ID NO: 1041469 - RNA, 18 nt, Human
ugccugcugugcugcugc

SEQ ID NO: 1041470 - RNA, 20 nt, Human
uggaagcggagguuggaggu

SEQ ID NO: 1041471 - RNA, 20 nt, Human
uggacaccaggggcacuggu

SEQ ID NO: 1041472 - RNA, 19 nt, Human
uggagguggcuuugacugg

SEQ ID NO: 1041473 - RNA, 23 nt, Human
uggaugaaggguuuuagagucag

SEQ ID NO: 1041474 - RNA, 19 nt, Human
uggcgcuggcgaggguccc

SEQ ID NO: 1041475 - RNA, 22 nt, Human
uggcugcccaaggagaagcugg

SEQ ID NO: 1041476 - RNA, 18 nt, Human
ugggaaggggugggggug

SEQ ID NO: 1041477 - RNA, 21 nt, Human
ugggaagggguggggguggcg

SEQ ID NO: 1041478 - RNA, 20 nt, Human
uggggaaucagaauacagca

SEQ ID NO: 1041479 - RNA, 25 nt, Human
uggggcaggggagagccggggguua

SEQ ID NO: 1041480 - RNA, 20 nt, Human
ugggggaugggacuccaacu

SEQ ID NO: 1041481 - RNA, 20 nt, Human
ugggggcugggggagccggg

SEQ ID NO: 1041482 - RNA, 24 nt, Human
uggggguggcgccagggcccuggg

SEQ ID NO: 1041483 - RNA, 22 nt, Human
ugggugggugagguggggcagg

SEQ ID NO: 1041484 - RNA, 24 nt, Human
ugguggaagcggagguuggaggug

SEQ ID NO: 1041485 - RNA, 21 nt, Human
uggugggaaggggugggggug

SEQ ID NO: 1041486 - RNA, 21 nt, Human
uggugggaaggggugggggug

SEQ ID NO: 1041487 - RNA, 21 nt, Human
ugugccuugggggaugggacu

SEQ ID NO: 1041488 - RNA, 19 nt, Human
ugugggggcugggggagcc

SEQ ID NO: 1041489 - RNA, 22 nt, Human
ugugggggcugggggagccggg

SEQ ID NO: 1041490 - RNA, 22 nt, Human
uuagugaacagaaaugcggacc

SEQ ID NO: 1041491 - RNA, 23 nt, Human
uuccacacuuuguaggugucacu

SEQ ID NO: 1041492 - RNA, 19 nt, Human
uugucuggcuccuggcccu

SEQ ID NO: 1041493 - RNA, 26 nt, Human
uugucuggcuccuggcccugggcgug

SEQ ID NO: 1041494 - RNA, 25 nt, Human
aagcacagacacagggcugaagaga

SEQ ID NO: 1041495 - RNA, 19 nt, Human
acacggugcagggagucuu

SEQ ID NO: 1041496 - RNA, 20 nt, Human
acauugaaaaauauuccgag

SEQ ID NO: 1041497 - RNA, 20 nt, Human
accacggagagcagggagac

SEQ ID NO: 1041498 - RNA, 18 nt, Human
acuucguaaaccccuccc

SEQ ID NO: 1041499 - RNA, 18 nt, Human
agcggauaggcucaaccc

SEQ ID NO: 1041500 - RNA, 18 nt, Human
aggagaggaggaucagca

SEQ ID NO: 1041501 - RNA, 21 nt, Human
aggaggaucagcagaggucau

SEQ ID NO: 1041502 - RNA, 19 nt, Human
aggcaccugaccucauguu

SEQ ID NO: 1041503 - RNA, 20 nt, Human
agggguugggggcagaugcc

SEQ ID NO: 1041504 - RNA, 20 nt, Human
agucccgcccuccccgcagc

SEQ ID NO: 1041505 - RNA, 19 nt, Human
agucuuuaaauagaggagg

SEQ ID NO: 1041506 - RNA, 21 nt, Human
caagcacagacacagggcuga

SEQ ID NO: 1041507 - RNA, 19 nt, Human
cacagcgaaggguggagaa

SEQ ID NO: 1041508 - RNA, 19 nt, Human
cacuucguaaaccccuccc

SEQ ID NO: 1041509 - RNA, 21 nt, Human
cagccccccagccucagcccu

SEQ ID NO: 1041510 - RNA, 25 nt, Human
cagcccucucucgugcaggccuugc

SEQ ID NO: 1041511 - RNA, 19 nt, Human
cauuaucuggaaaagggga

SEQ ID NO: 1041512 - RNA, 23 nt, Human
ccagcagccuuucagcccucucu

SEQ ID NO: 1041513 - RNA, 22 nt, Human
cccagcagccuuucagcccucu

SEQ ID NO: 1041514 - RNA, 29 nt, Human
cccagccucagcccucuccacgggggccu

SEQ ID NO: 1041515 - RNA, 20 nt, Human
ccccagccucagcccucucc

SEQ ID NO: 1041516 - RNA, 20 nt, Human
cccccagccucagcccucuc

SEQ ID NO: 1041517 - RNA, 24 nt, Human
ccccccagccucagcccucuccac

SEQ ID NO: 1041518 - RNA, 25 nt, Human
ccccgcgcaggaagucccgcccucc

SEQ ID NO: 1041519 - RNA, 20 nt, Human
ccuagcgcaccauguauucc

SEQ ID NO: 1041520 - RNA, 19 nt, Human
ccugcagcgaugaaacagu

SEQ ID NO: 1041521 - RNA, 20 nt, Human
cgaccucuagucucagcccc

SEQ ID NO: 1041522 - RNA, 21 nt, Human
cgccgccgccgccgcuacacg

SEQ ID NO: 1041523 - RNA, 22 nt, Human
cggcggcuccccgccccaucag

SEQ ID NO: 1041524 - RNA, 26 nt, Human
cggcucgggcccccgcgcaggaaguc

SEQ ID NO: 1041525 - RNA, 23 nt, Human
cgggggccggaugccagagaugg

SEQ ID NO: 1041526 - RNA, 22 nt, Human
cguaaaccccucccauuuccaa

SEQ ID NO: 1041527 - RNA, 21 nt, Human
gagcggcucgggcccccgcgc

SEQ ID NO: 1041528 - RNA, 19 nt, Human
gcagaaagagaagccuccg

SEQ ID NO: 1041529 - RNA, 23 nt, Human
gcccccacucaagcacagacaca

SEQ ID NO: 1041530 - RNA, 18 nt, Human
gccccccagccucagccc

SEQ ID NO: 1041531 - RNA, 25 nt, Human
gccccccagccucagcccucuccac

SEQ ID NO: 1041532 - RNA, 20 nt, Human
gccuccgaggaggagguaaa

SEQ ID NO: 1041533 - RNA, 20 nt, Human
gcgccggggcccuagcgcac

SEQ ID NO: 1041534 - RNA, 18 nt, Human
gcuacaacacccgagccu

SEQ ID NO: 1041535 - RNA, 21 nt, Human
gcucggagucccaggagaucc

SEQ ID NO: 1041536 - RNA, 23 nt, Human
ggaacagccccccagccucagcc

SEQ ID NO: 1041537 - RNA, 23 nt, Human
ggaggagguaaaggccugcagcg

SEQ ID NO: 1041538 - RNA, 21 nt, Human
ggcagaaagagaagccuccga

SEQ ID NO: 1041539 - RNA, 19 nt, Human
gggaaacgcgccggggccc

SEQ ID NO: 1041540 - RNA, 26 nt, Human
gggaauagcgagguggcagccccagc

SEQ ID NO: 1041541 - RNA, 21 nt, Human
gggcccccgcgcaggaagucc

SEQ ID NO: 1041542 - RNA, 24 nt, Human
gggccggaugccagagaugggaga

SEQ ID NO: 1041543 - RNA, 19 nt, Human
uacaacacccgagccugag

SEQ ID NO: 1041544 - RNA, 20 nt, Human
uacacgcgagccgggaccac

SEQ ID NO: 1041545 - RNA, 22 nt, Human
uagacuguugaauucaggcacc

SEQ ID NO: 1041546 - RNA, 20 nt, Human
uagaggaggggcuggagcgg

SEQ ID NO: 1041547 - RNA, 21 nt, Human
ucaacccggcggcuccccgcc

SEQ ID NO: 1041548 - RNA, 19 nt, Human
ucagagguggaaggcucag

SEQ ID NO: 1041549 - RNA, 21 nt, Human
ucagagguggaaggcucagca

SEQ ID NO: 1041550 - RNA, 19 nt, Human
ucagaugaaggucaaaggg

SEQ ID NO: 1041551 - RNA, 20 nt, Human
ucagaugaaggucaaagggg

SEQ ID NO: 1041552 - RNA, 23 nt, Human
ucagcccucuccacgggggccgg

SEQ ID NO: 1041553 - RNA, 19 nt, Human
ucccgcccuccccgcagcg

SEQ ID NO: 1041554 - RNA, 23 nt, Human
uccgagcauuaucuggaaaaggg

SEQ ID NO: 1041555 - RNA, 22 nt, Human
ugaagagagcagauucucuuua

SEQ ID NO: 1041556 - RNA, 19 nt, Human
uggaaaaggggaaugggua

SEQ ID NO: 1041557 - RNA, 18 nt, Human
uggaaggcucagcaggag

SEQ ID NO: 1041558 - RNA, 22 nt, Human
uggcagaaagagaagccuccga

SEQ ID NO: 1041559 - RNA, 22 nt, Human
ugggggccauucucaaaaucuu

SEQ ID NO: 1041560 - RNA, 18 nt, Human
uugagauacgggacacag

SEQ ID NO: 1041561 - RNA, 26 nt, Human
aaacagaaggaaaagagaagggaccc

SEQ ID NO: 1041562 - RNA, 22 nt, Human
aaccaacuauuuaaaaucagug

SEQ ID NO: 1041563 - RNA, 21 nt, Human
aagucgaagagggaggcaaac

SEQ ID NO: 1041564 - RNA, 24 nt, Human
acucccaaguaagucgaagaggga

SEQ ID NO: 1041565 - RNA, 23 nt, Human
cccgcagcuguugucccgguguc

SEQ ID NO: 1041566 - RNA, 18 nt, Human
ccucaucuucuucaacca

SEQ ID NO: 1041567 - RNA, 21 nt, Human
ccugagauaucuggguaagac

SEQ ID NO: 1041568 - RNA, 22 nt, Human
cucacaaucgcaggccgcuacu

SEQ ID NO: 1041569 - RNA, 21 nt, Human
cucgcacagagcccgcagcug

SEQ ID NO: 1041570 - RNA, 22 nt, Human
gagcccgcagcuguugucccgg

SEQ ID NO: 1041571 - RNA, 25 nt, Human
gcauagcuucaaaaauucugaaggg

SEQ ID NO: 1041572 - RNA, 25 nt, Human
gcguauauguaccuaauaagauaca

SEQ ID NO: 1041573 - RNA, 19 nt, Human
ggaggacagaggagguucu

SEQ ID NO: 1041574 - RNA, 20 nt, Human
gggaggacagaggagguucu

SEQ ID NO: 1041575 - RNA, 21 nt, Human
uaaugggucuaaaauuaagac

SEQ ID NO: 1041576 - RNA, 22 nt, Human
uaaugggucuaaaauuaagaca

SEQ ID NO: 1041577 - RNA, 22 nt, Human
uaccagucacgacuguggucag

SEQ ID NO: 1041578 - RNA, 21 nt, Human
uacugccccgcgcucgcucac

SEQ ID NO: 1041579 - RNA, 21 nt, Human
ucagaugcugacucccaagua

SEQ ID NO: 1041580 - RNA, 20 nt, Human
ucagugggaggacagaggag

SEQ ID NO: 1041581 - RNA, 19 nt, Human
ucgcaggccgcuacugccc

SEQ ID NO: 1041582 - RNA, 19 nt, Human
ucugaaggguauuucuggg

SEQ ID NO: 1041583 - RNA, 27 nt, Human
ugagguuaaggauuugcguauauguac

SEQ ID NO: 1041584 - RNA, 20 nt, Human
uguggucagaugcugacucc

SEQ ID NO: 1041585 - RNA, 27 nt, Human
uuuaaaaucagugggaggacagaggag

SEQ ID NO: 1041586 - RNA, 18 nt, Human
uuugcacaaaucaucauu

SEQ ID NO: 1041587 - RNA, 22 nt, Human
aagcagcagcagcggcagcagc

SEQ ID NO: 1041588 - RNA, 19 nt, Human
agcagcggcagcagcuugg

SEQ ID NO: 1041589 - RNA, 27 nt, Human
cacaucucaggccaggcccagucgccc

SEQ ID NO: 1041590 - RNA, 19 nt, Human
cagcagcagcggcagcagc

SEQ ID NO: 1041591 - RNA, 22 nt, Human
cagcagcagcggcagcagcuug

SEQ ID NO: 1041592 - RNA, 21 nt, Human
cagcagcggcagcagcuuggc

SEQ ID NO: 1041593 - RNA, 18 nt, Human
cagcagcuuggcuccugc

SEQ ID NO: 1041594 - RNA, 20 nt, Human
cagcggcagcagcuuggcuc

SEQ ID NO: 1041595 - RNA, 24 nt, Human
caggcccagucgccccagggaccc

SEQ ID NO: 1041596 - RNA, 24 nt, Human
ccaggcccagucgccccagggacc

SEQ ID NO: 1041597 - RNA, 22 nt, Human
ccccagggacccccgcugguca

SEQ ID NO: 1041598 - RNA, 19 nt, Human
cccgcagaagcagcagcag

SEQ ID NO: 1041599 - RNA, 18 nt, Human
cgggagagagcggcggcg

SEQ ID NO: 1041600 - RNA, 18 nt, Human
gagcggcggcggcggcgc

SEQ ID NO: 1041601 - RNA, 19 nt, Human
gcagcagcuuggcuccugc

SEQ ID NO: 1041602 - RNA, 18 nt, Human
gccccagggacccccgcu

SEQ ID NO: 1041603 - RNA, 24 nt, Human
gccccagggacccccgcuggucac

SEQ ID NO: 1041604 - RNA, 22 nt, Human
gcccgcagaagcagcagcagcg

SEQ ID NO: 1041605 - RNA, 24 nt, Human
gcggcagcagcuuggcuccugcgc

SEQ ID NO: 1041606 - RNA, 22 nt, Human
ggcagcagcuuggcuccugcgc

SEQ ID NO: 1041607 - RNA, 21 nt, Human
gggagagagcggcggcggcgg

SEQ ID NO: 1041608 - RNA, 26 nt, Human
gggagagagcggcggcggcggcgacg

SEQ ID NO: 1041609 - RNA, 20 nt, Human
uaauagcaagaggugggacu

SEQ ID NO: 1041610 - RNA, 20 nt, Human
ucagagaagcuuuaauagca

SEQ ID NO: 1041611 - RNA, 18 nt, Human
ucaggccaggcccagucg

SEQ ID NO: 1041612 - RNA, 19 nt, Human
ucgcccgcagaagcagcag

SEQ ID NO: 1041613 - RNA, 21 nt, Human
ugaaaccagucgcccgcagaa

SEQ ID NO: 1041614 - RNA, 21 nt, Human
uggcccgggagagagcggcgg

SEQ ID NO: 1041615 - RNA, 23 nt, Human
uggcuccugcgccccgcuccauc

SEQ ID NO: 1041616 - RNA, 22 nt, Human
aagaggaggcaacacucggacc

SEQ ID NO: 1041617 - RNA, 19 nt, Human
aauaaaggagcaguuuggc

SEQ ID NO: 1041618 - RNA, 22 nt, Human
accucccagacgaggugggagu

SEQ ID NO: 1041619 - RNA, 22 nt, Human
agcaaguugugugggaaagucc

SEQ ID NO: 1041620 - RNA, 23 nt, Human
agcccccuggcccuucguuccag

SEQ ID NO: 1041621 - RNA, 23 nt, Human
agcccuggcuacugccccaugga

SEQ ID NO: 1041622 - RNA, 23 nt, Human
agcucuaaaaaauaaaggagcag

SEQ ID NO: 1041623 - RNA, 19 nt, Human
aggccugggccagagaggg

SEQ ID NO: 1041624 - RNA, 23 nt, Human
agggagugggugacgcagggggc

SEQ ID NO: 1041625 - RNA, 21 nt, Human
caacccgagacagugagacag

SEQ ID NO: 1041626 - RNA, 26 nt, Human
caccagaaccaccuugauugcagcag

SEQ ID NO: 1041627 - RNA, 23 nt, Human
cacccacuuggggcugucuucuu

SEQ ID NO: 1041628 - RNA, 19 nt, Human
caccccauccucuugucag

SEQ ID NO: 1041629 - RNA, 22 nt, Human
caccccccaccccacccccgca

SEQ ID NO: 1041630 - RNA, 23 nt, Human
caccccccaccccacccccgcac

SEQ ID NO: 1041631 - RNA, 18 nt, Human
cagcagccaguguuuggg

SEQ ID NO: 1041632 - RNA, 21 nt, Human
cagcagcucuaaaaaauaaag

SEQ ID NO: 1041633 - RNA, 24 nt, Human
cagcaggccugggccagagagggu

SEQ ID NO: 1041634 - RNA, 20 nt, Human
cagccucagcucuggggcag

SEQ ID NO: 1041635 - RNA, 22 nt, Human
cagcuugucagaacagucccca

SEQ ID NO: 1041636 - RNA, 18 nt, Human
cagggccuucaccccugg

SEQ ID NO: 1041637 - RNA, 20 nt, Human
caguuuggcuuccggaagga

SEQ ID NO: 1041638 - RNA, 18 nt, Human
caucugggaccuccaggc

SEQ ID NO: 1041639 - RNA, 18 nt, Human
cauggaugggaggugggu

SEQ ID NO: 1041640 - RNA, 22 nt, Human
cauuugccagguugcguccaau

SEQ ID NO: 1041641 - RNA, 25 nt, Human
ccacccccaccccauccucuuguca

SEQ ID NO: 1041642 - RNA, 19 nt, Human
ccagcccccuggcccuucg

SEQ ID NO: 1041643 - RNA, 26 nt, Human
ccaggguaacugaggacacagccucu

SEQ ID NO: 1041644 - RNA, 20 nt, Human
ccccaagguccgaggcccag

SEQ ID NO: 1041645 - RNA, 23 nt, Human
ccccaccccacccccgcaccaga

SEQ ID NO: 1041646 - RNA, 18 nt, Human
ccccacccccgcaccaga

SEQ ID NO: 1041647 - RNA, 20 nt, Human
ccccaggggcccugcggccc

SEQ ID NO: 1041648 - RNA, 22 nt, Human
ccccaggggcccugcggcccaa

SEQ ID NO: 1041649 - RNA, 23 nt, Human
ccccauuggccacaaggccucac

SEQ ID NO: 1041650 - RNA, 18 nt, Human
cccccaccccacccccgc

SEQ ID NO: 1041651 - RNA, 22 nt, Human
cccccaccccacccccgcaccc

SEQ ID NO: 1041652 - RNA, 27 nt, Human
ccccccaccccacccccgcaccagaac

SEQ ID NO: 1041653 - RNA, 19 nt, Human
cccccgcaccagaaccacc

SEQ ID NO: 1041654 - RNA, 21 nt, Human
ccccuggaaaaggcucagcuc

SEQ ID NO: 1041655 - RNA, 20 nt, Human
cccggggccucagccucagc

SEQ ID NO: 1041656 - RNA, 19 nt, Human
cccuggggucacuuggugg

SEQ ID NO: 1041657 - RNA, 24 nt, Human
ccgcaccagaaccaccuugauugc

SEQ ID NO: 1041658 - RNA, 23 nt, Human
ccggaaggaagaggaggcaacaa

SEQ ID NO: 1041659 - RNA, 24 nt, Human
ccucagcucuggggcaggaagcuu

SEQ ID NO: 1041660 - RNA, 23 nt, Human
ccuccaggcugggagccaacccu

SEQ ID NO: 1041661 - RNA, 21 nt, Human
ccugcggcccaaaccuagggc

SEQ ID NO: 1041662 - RNA, 22 nt, Human
ccugcggcccaaaccuagggcu

SEQ ID NO: 1041663 - RNA, 19 nt, Human
ccugggccaccugcucucc

SEQ ID NO: 1041664 - RNA, 23 nt, Human
ccuuggccccaggggcccugcgg

SEQ ID NO: 1041665 - RNA, 21 nt, Human
cgagacagugagacagugucc

SEQ ID NO: 1041666 - RNA, 24 nt, Human
cguguggcuccaacacacacaucc

SEQ ID NO: 1041667 - RNA, 18 nt, Human
cuccguaugguccagggu

SEQ ID NO: 1041668 - RNA, 18 nt, Human
cuccugggcccugccccu

SEQ ID NO: 1041669 - RNA, 26 nt, Human
cugaagccacagccagccaguaacua

SEQ ID NO: 1041670 - RNA, 18 nt, Human
gagacaguguccuccagg

SEQ ID NO: 1041671 - RNA, 23 nt, Human
gagcaguuuggcuuccggaagga

SEQ ID NO: 1041672 - RNA, 23 nt, Human
gcaccagaaccaccuugauugca

SEQ ID NO: 1041673 - RNA, 18 nt, Human
gcccugaggccugggccc

SEQ ID NO: 1041674 - RNA, 22 nt, Human
gccggagcccuggcuacugccc

SEQ ID NO: 1041675 - RNA, 20 nt, Human
gccucucccggggccucagc

SEQ ID NO: 1041676 - RNA, 20 nt, Human
gccugggccaccugcucucc

SEQ ID NO: 1041677 - RNA, 18 nt, Human
gcugcuuccuccagcagc

SEQ ID NO: 1041678 - RNA, 20 nt, Human
ggaguggggguggaggcugg

SEQ ID NO: 1041679 - RNA, 21 nt, Human
ggcagcugcauccuggugugu

SEQ ID NO: 1041680 - RNA, 18 nt, Human
ggccagagagggugggug

SEQ ID NO: 1041681 - RNA, 22 nt, Human
ggccuggccccccccugggguc

SEQ ID NO: 1041682 - RNA, 19 nt, Human
gggaaggagugggguccug

SEQ ID NO: 1041683 - RNA, 20 nt, Human
gggaaggagugggguccugg

SEQ ID NO: 1041684 - RNA, 21 nt, Human
gguggaaugccagcagccagu

SEQ ID NO: 1041685 - RNA, 22 nt, Human
ggugguggcagggagagaagcc

SEQ ID NO: 1041686 - RNA, 18 nt, Human
guccaagcuggcucuugg

SEQ ID NO: 1041687 - RNA, 24 nt, Human
gugcagggagugggugacgcaggg

SEQ ID NO: 1041688 - RNA, 19 nt, Human
gugggugaguauuccaccu

SEQ ID NO: 1041689 - RNA, 27 nt, Human
uaacugaggacacagccucuucuugau

SEQ ID NO: 1041690 - RNA, 22 nt, Human
uaccaggcccucgcgugagccu

SEQ ID NO: 1041691 - RNA, 22 nt, Human
uaccccagagcuugguggguga

SEQ ID NO: 1041692 - RNA, 20 nt, Human
ucaccccccaccccaccccc

SEQ ID NO: 1041693 - RNA, 25 nt, Human
ucaccccccaccccacccccgcacc

SEQ ID NO: 1041694 - RNA, 25 nt, Human
uccaggcugggagccaacccgagac

SEQ ID NO: 1041695 - RNA, 20 nt, Human
uccagggaguacccagagac

SEQ ID NO: 1041696 - RNA, 18 nt, Human
uccccaagguccgaggcc

SEQ ID NO: 1041697 - RNA, 20 nt, Human
uccccggacacccacuuggg

SEQ ID NO: 1041698 - RNA, 23 nt, Human
uccuccagcagccggagcccugg

SEQ ID NO: 1041699 - RNA, 18 nt, Human
uccuggcuuggggggugg

SEQ ID NO: 1041700 - RNA, 21 nt, Human
uccuuccaggguaacugagga

SEQ ID NO: 1041701 - RNA, 20 nt, Human
uccuuggccccaggggcccu

SEQ ID NO: 1041702 - RNA, 18 nt, Human
ucgcuggggccccgcuga

SEQ ID NO: 1041703 - RNA, 21 nt, Human
ucuccugggcccugccccugg

SEQ ID NO: 1041704 - RNA, 19 nt, Human
ucuuccuuggccccagggg

SEQ ID NO: 1041705 - RNA, 21 nt, Human
ucuuguacaacaagaaaacau

SEQ ID NO: 1041706 - RNA, 21 nt, Human
ugcauaccaggcccucgcgug

SEQ ID NO: 1041707 - RNA, 20 nt, Human
uggaaugccagcagccagug

SEQ ID NO: 1041708 - RNA, 19 nt, Human
uggaggcuggucuuuggag

SEQ ID NO: 1041709 - RNA, 18 nt, Human
uggaguggggguggaggc

SEQ ID NO: 1041710 - RNA, 19 nt, Human
uggaguggggguggaggcu

SEQ ID NO: 1041711 - RNA, 18 nt, Human
uggaucacacagaaagcu

SEQ ID NO: 1041712 - RNA, 19 nt, Human
uggccccaggggcccugcg

SEQ ID NO: 1041713 - RNA, 27 nt, Human
uggcuuccggaaggaagaggaggcaac

SEQ ID NO: 1041714 - RNA, 21 nt, Human
ugggaaaguccagcccccugg

SEQ ID NO: 1041715 - RNA, 21 nt, Human
ugggaggugggugaucgaagg

SEQ ID NO: 1041716 - RNA, 23 nt, Human
ugggugaucgaaggccuggcccc

SEQ ID NO: 1041717 - RNA, 21 nt, Human
ugguggcaggccaggcucucc

SEQ ID NO: 1041718 - RNA, 21 nt, Human
ugguggcagggagagaagccc

SEQ ID NO: 1041719 - RNA, 19 nt, Human
ugguguacagcugcagcca

SEQ ID NO: 1041720 - RNA, 22 nt, Human
uguccaagcuggcucuuggggg

SEQ ID NO: 1041721 - RNA, 23 nt, Human
ugucuucuuccuuggccccaggg

SEQ ID NO: 1041722 - RNA, 24 nt, Human
ugugugcauggaugggaggugggu

SEQ ID NO: 1041723 - RNA, 20 nt, Human
uucauugucccaauggcacc

SEQ ID NO: 1041724 - RNA, 21 nt, Human
uugaugccagggccacucagc

SEQ ID NO: 1041725 - RNA, 22 nt, Human
uugaugccagggccacucagca

SEQ ID NO: 1041726 - RNA, 21 nt, Human
uugcccagcaaguuguguggg

SEQ ID NO: 1041727 - RNA, 18 nt, Human
acggcagcuucaccagug

SEQ ID NO: 1041728 - RNA, 22 nt, Human
agcagaaacuugggggcccaga

SEQ ID NO: 1041729 - RNA, 26 nt, Human
cacccccacccuggggacuggacaac

SEQ ID NO: 1041730 - RNA, 26 nt, Human
cagugcgauuuccccaucgucagccu

SEQ ID NO: 1041731 - RNA, 18 nt, Human
cccagaaccccagggcuc

SEQ ID NO: 1041732 - RNA, 28 nt, Human
cccagaaccccagggcuccagucacaaa

SEQ ID NO: 1041733 - RNA, 20 nt, Human
cccccacccuggggacugga

SEQ ID NO: 1041734 - RNA, 20 nt, Human
cccgugaaccacgcgugccu

SEQ ID NO: 1041735 - RNA, 20 nt, Human
ccucugagaccugcuacgga

SEQ ID NO: 1041736 - RNA, 26 nt, Human
ccucugagaccugcuacggaggacaa

SEQ ID NO: 1041737 - RNA, 22 nt, Human
ccugcagcucuuggccugagac

SEQ ID NO: 1041738 - RNA, 21 nt, Human
ccugcuacggaggacaagggc

SEQ ID NO: 1041739 - RNA, 22 nt, Human
ccuggcacccccacccugggga

SEQ ID NO: 1041740 - RNA, 23 nt, Human
cgaaacuccaguuuuuccccagg

SEQ ID NO: 1041741 - RNA, 21 nt, Human
cuggacaacucuguggucccc

SEQ ID NO: 1041742 - RNA, 19 nt, Human
gccagccugcagcucuugg

SEQ ID NO: 1041743 - RNA, 22 nt, Human
gcuccuggcacccccacccugg

SEQ ID NO: 1041744 - RNA, 18 nt, Human
ggacaagggcuccuggca

SEQ ID NO: 1041745 - RNA, 19 nt, Human
gggcuccuggcacccccac

SEQ ID NO: 1041746 - RNA, 21 nt, Human
gggcuccuggcacccccaccc

SEQ ID NO: 1041747 - RNA, 26 nt, Human
gggggcccagaaccccagggcuccag

SEQ ID NO: 1041748 - RNA, 21 nt, Human
gucccaggcuccaaaccucaa

SEQ ID NO: 1041749 - RNA, 24 nt, Human
ucccaggcuccaaaccucaaagca

SEQ ID NO: 1041750 - RNA, 24 nt, Human
uccuggaagcagggaggcugcagc

SEQ ID NO: 1041751 - RNA, 21 nt, Human
uccuguggggucccaggcucc

SEQ ID NO: 1041752 - RNA, 22 nt, Human
ugaagcaacauuagcucagcac

SEQ ID NO: 1041753 - RNA, 21 nt, Human
ugaccccacggcagcuucacc

SEQ ID NO: 1041754 - RNA, 18 nt, Human
ugcagcccgugaaccacg

SEQ ID NO: 1041755 - RNA, 22 nt, Human
ugcugcacggcuccuggaagca

SEQ ID NO: 1041756 - RNA, 21 nt, Human
uggcacccccacccuggggac

SEQ ID NO: 1041757 - RNA, 24 nt, Human
uggcacccccacccuggggacugg

SEQ ID NO: 1041758 - RNA, 19 nt, Human
uggcugcagugaggaaggg

SEQ ID NO: 1041759 - RNA, 21 nt, Human
uggggacuggacaacucugug

SEQ ID NO: 1041760 - RNA, 22 nt, Human
ugggggcccagaaccccagggc

SEQ ID NO: 1041761 - RNA, 23 nt, Human
uggggucccaggcuccaaaccuc

SEQ ID NO: 1041762 - RNA, 19 nt, Human
uguggggucccaggcucca

SEQ ID NO: 1041763 - RNA, 21 nt, Human
uuagcucagcacgaagucacu

SEQ ID NO: 1041764 - RNA, 20 nt, Human
uuccccagguaucugacguc

SEQ ID NO: 1041765 - RNA, 20 nt, Human
acggggcggggcgagggcgg

SEQ ID NO: 1041766 - RNA, 25 nt, Human
acucugugugcagcugccccuuggc

SEQ ID NO: 1041767 - RNA, 20 nt, Human
agggcgguggggccaauggg

SEQ ID NO: 1041768 - RNA, 18 nt, Human
aguuguccagaaaggcug

SEQ ID NO: 1041769 - RNA, 20 nt, Human
aguuguccagaaaggcuggg

SEQ ID NO: 1041770 - RNA, 24 nt, Human
cacacuggaagauguccacauuca

SEQ ID NO: 1041771 - RNA, 22 nt, Human
cagggcccuucuugcgcuccuc

SEQ ID NO: 1041772 - RNA, 22 nt, Human
ccacguccuccucugagcuccg

SEQ ID NO: 1041773 - RNA, 20 nt, Human
ccuucuugcgcuccucucuu

SEQ ID NO: 1041774 - RNA, 21 nt, Human
cuaggcccaucagaggcuuuc

SEQ ID NO: 1041775 - RNA, 26 nt, Human
cuucucuguucuaggcccaucagagg

SEQ ID NO: 1041776 - RNA, 19 nt, Human
cuugcgcuccucucuucug

SEQ ID NO: 1041777 - RNA, 18 nt, Human
gagcaaaagcagcccagg

SEQ ID NO: 1041778 - RNA, 18 nt, Human
gcccggggcuggggagcc

SEQ ID NO: 1041779 - RNA, 23 nt, Human
gcggggcgagggcgguugcuggg

SEQ ID NO: 1041780 - RNA, 18 nt, Human
ggcggggcgagggcggug

SEQ ID NO: 1041781 - RNA, 19 nt, Human
ggcgguggggccaaugggg

SEQ ID NO: 1041782 - RNA, 26 nt, Human
ggcgguggggccaauggggcgggggg

SEQ ID NO: 1041783 - RNA, 23 nt, Human
gggcggggcgagggcgguggggc

SEQ ID NO: 1041784 - RNA, 24 nt, Human
gggcggggcgagggcgguggggcc

SEQ ID NO: 1041785 - RNA, 21 nt, Human
ggggccaauggggcggggggc

SEQ ID NO: 1041786 - RNA, 21 nt, Human
ggggcgagggcgguggggcca

SEQ ID NO: 1041787 - RNA, 19 nt, Human
ggggcggggcgagggcggu

SEQ ID NO: 1041788 - RNA, 24 nt, Human
ggggcggggcgagggcgguggggc

SEQ ID NO: 1041789 - RNA, 22 nt, Human
ggucaguuggguccccaggaag

SEQ ID NO: 1041790 - RNA, 18 nt, Human
uaggccgaccccgcaggg

SEQ ID NO: 1041791 - RNA, 18 nt, Human
uccacauucaucuucaca

SEQ ID NO: 1041792 - RNA, 25 nt, Human
ucccaaucuccuccuuucccagcgc

SEQ ID NO: 1041793 - RNA, 19 nt, Human
uccgcgacggggcggggcg

SEQ ID NO: 1041794 - RNA, 26 nt, Human
ucgccgcccggggcuggggagccucc

SEQ ID NO: 1041795 - RNA, 19 nt, Human
ucuucugaaucacacugga

SEQ ID NO: 1041796 - RNA, 21 nt, Human
ugcaaggaacuugccaucugc

SEQ ID NO: 1041797 - RNA, 21 nt, Human
ugccgugugcaaagugaaggg

SEQ ID NO: 1041798 - RNA, 22 nt, Human
uuccgcgacggggcggggcgag

SEQ ID NO: 1041799 - RNA, 19 nt, Human
uucuucagggucaguuggg

SEQ ID NO: 1041800 - RNA, 21 nt, Human
uuuggccugcaaggaacuugc

SEQ ID NO: 1041801 - RNA, 22 nt, Human
auaauagugaugguuuuuucuu

SEQ ID NO: 1041802 - RNA, 21 nt, Human
ccugccccugcccgccuaaga

SEQ ID NO: 1041803 - RNA, 20 nt, Human
gaaaaagacugaaaauuuac

SEQ ID NO: 1041804 - RNA, 24 nt, Human
gauguguucagaugcagucaccuu

SEQ ID NO: 1041805 - RNA, 20 nt, Human
uaauagugaugguuuuuucu

SEQ ID NO: 1041806 - RNA, 19 nt, Human
uaucuauaauagugauggu

SEQ ID NO: 1041807 - RNA, 21 nt, Human
ucagucuauucauaagaaauc

SEQ ID NO: 1041808 - RNA, 23 nt, Human
uccaagaugaaaaagacugaaaa

SEQ ID NO: 1041809 - RNA, 21 nt, Human
ugauuuugcuugccauccaag

SEQ ID NO: 1041810 - RNA, 20 nt, Human
ugcccaauaguucuugccuc

SEQ ID NO: 1041811 - RNA, 20 nt, Human
ugccccugcccgccuaagac

SEQ ID NO: 1041812 - RNA, 24 nt, Human
uuuucuucagucuauucauaagaa

SEQ ID NO: 1041813 - RNA, 20 nt, Human
aagggcagcaggaucuccag

SEQ ID NO: 1041814 - RNA, 24 nt, Human
aagucuuccucuggcagagacccg

SEQ ID NO: 1041815 - RNA, 20 nt, Human
accagcucgcgccccugggc

SEQ ID NO: 1041816 - RNA, 18 nt, Human
acccuugcccggccagcu

SEQ ID NO: 1041817 - RNA, 20 nt, Human
agccuccuucuuccuucccg

SEQ ID NO: 1041818 - RNA, 22 nt, Human
aggaggaugaaucugugcagug

SEQ ID NO: 1041819 - RNA, 18 nt, Human
agggguucagggcccaga

SEQ ID NO: 1041820 - RNA, 20 nt, Human
cagcugaaggcacaaacacu

SEQ ID NO: 1041821 - RNA, 18 nt, Human
cagcugcugccacagagc

SEQ ID NO: 1041822 - RNA, 21 nt, Human
cagcuucccuguccuagaggg

SEQ ID NO: 1041823 - RNA, 21 nt, Human
ccacuuaaaccccagacccaa

SEQ ID NO: 1041824 - RNA, 21 nt, Human
ccagacccaagcccuuaacuc

SEQ ID NO: 1041825 - RNA, 23 nt, Human
cccaagcccuuaacuccuggacc

SEQ ID NO: 1041826 - RNA, 21 nt, Human
ccccacuccauuugcaggccc

SEQ ID NO: 1041827 - RNA, 23 nt, Human
ccccagacccaagcccuuaacuc

SEQ ID NO: 1041828 - RNA, 22 nt, Human
cccccugcuccuagccuccuuc

SEQ ID NO: 1041829 - RNA, 24 nt, Human
cccugcuccuagccuccuucuucc

SEQ ID NO: 1041830 - RNA, 19 nt, Human
ccucuggcagagacccgag

SEQ ID NO: 1041831 - RNA, 18 nt, Human
ccuucccgucccgguccc

SEQ ID NO: 1041832 - RNA, 19 nt, Human
cgccccugggccucguccu

SEQ ID NO: 1041833 - RNA, 19 nt, Human
cucccccacuccauuugca

SEQ ID NO: 1041834 - RNA, 19 nt, Human
cugccacagagcaaacacc

SEQ ID NO: 1041835 - RNA, 20 nt, Human
cugcccccucagcugaaggc

SEQ ID NO: 1041836 - RNA, 22 nt, Human
cuggcagagacccgaggugcag

SEQ ID NO: 1041837 - RNA, 24 nt, Human
cuggcaggcuugguggcucuggug

SEQ ID NO: 1041838 - RNA, 20 nt, Human
cugugcagugccgggaagua

SEQ ID NO: 1041839 - RNA, 24 nt, Human
cuugcuaggagcccugugucccca

SEQ ID NO: 1041840 - RNA, 24 nt, Human
gaaggcacaaacacugugguaggg

SEQ ID NO: 1041841 - RNA, 21 nt, Human
gaccacggccagccuuccuua

SEQ ID NO: 1041842 - RNA, 23 nt, Human
gaccggcugggcagggccagucu

SEQ ID NO: 1041843 - RNA, 23 nt, Human
gagaccccucuggcaggcuuggu

SEQ ID NO: 1041844 - RNA, 18 nt, Human
gcagggccagucucccuu

SEQ ID NO: 1041845 - RNA, 22 nt, Human
gcgcccgcagaugucuucccac

SEQ ID NO: 1041846 - RNA, 19 nt, Human
gcugcugcucagggaacag

SEQ ID NO: 1041847 - RNA, 18 nt, Human
ggccaggacucccccacu

SEQ ID NO: 1041848 - RNA, 20 nt, Human
gggcagagcuggggagaagu

SEQ ID NO: 1041849 - RNA, 18 nt, Human
gucgcagggaugcuuaag

SEQ ID NO: 1041850 - RNA, 19 nt, Human
gugagcggacacgcgcccg

SEQ ID NO: 1041851 - RNA, 22 nt, Human
guucagggcccagaggcugccc

SEQ ID NO: 1041852 - RNA, 22 nt, Human
uaagucuuccucuggcagagac

SEQ ID NO: 1041853 - RNA, 23 nt, Human
uaggcuggaauccaagcaccauc

SEQ ID NO: 1041854 - RNA, 23 nt, Human
uauugcaaauugugagaaggcag

SEQ ID NO: 1041855 - RNA, 18 nt, Human
ucagggaacagggugagc

SEQ ID NO: 1041856 - RNA, 23 nt, Human
ucagggcccagaggcugcccccu

SEQ ID NO: 1041857 - RNA, 18 nt, Human
ucauguggacccagaggg

SEQ ID NO: 1041858 - RNA, 22 nt, Human
uccccaagccaugaaugagacc

SEQ ID NO: 1041859 - RNA, 23 nt, Human
uccccaagccaugaaugagaccc

SEQ ID NO: 1041860 - RNA, 22 nt, Human
ucccuggagggagcugcugcuc

SEQ ID NO: 1041861 - RNA, 22 nt, Human
uccucauguggacccagagggc

SEQ ID NO: 1041862 - RNA, 19 nt, Human
uccucuggcagagacccga

SEQ ID NO: 1041863 - RNA, 21 nt, Human
uccuggaccacggccagccuu

SEQ ID NO: 1041864 - RNA, 22 nt, Human
ucuuccuucccgucccgguccc

SEQ ID NO: 1041865 - RNA, 19 nt, Human
ugaagguagcaacgcuucc

SEQ ID NO: 1041866 - RNA, 23 nt, Human
ugccacagagcaaacaccagcuc

SEQ ID NO: 1041867 - RNA, 18 nt, Human
ugcccagcgggggcugag

SEQ ID NO: 1041868 - RNA, 19 nt, Human
ugcccuggaccaggccagc

SEQ ID NO: 1041869 - RNA, 18 nt, Human
ugccugguacaggaggau

SEQ ID NO: 1041870 - RNA, 19 nt, Human
uggaccaggccagcuuccc

SEQ ID NO: 1041871 - RNA, 20 nt, Human
uggagggagcugcugcucag

SEQ ID NO: 1041872 - RNA, 21 nt, Human
uggcaggcuugguggcucugg

SEQ ID NO: 1041873 - RNA, 19 nt, Human
uggccagggccuggauggg

SEQ ID NO: 1041874 - RNA, 22 nt, Human
uggcucuggugauucaggggcc

SEQ ID NO: 1041875 - RNA, 24 nt, Human
ugggacccagggccucccuggagg

SEQ ID NO: 1041876 - RNA, 20 nt, Human
uuaacuccuggaccacggcc

SEQ ID NO: 1041877 - RNA, 20 nt, Human
uucaggggccaggacucccc

SEQ ID NO: 1041878 - RNA, 21 nt, Human
uucaggggccaggacuccccc

SEQ ID NO: 1041879 - RNA, 24 nt, Human
uucccacccuugcccggccagcuc

SEQ ID NO: 1041880 - RNA, 22 nt, Human
uuccucuggcagagacccgagg

SEQ ID NO: 1041881 - RNA, 19 nt, Human
uuggcaggccaugugggca

SEQ ID NO: 1041882 - RNA, 22 nt, Human
aaacggauaaacauuacaagcg

SEQ ID NO: 1041883 - RNA, 21 nt, Human
acccccagcaaagaaaaaggc

SEQ ID NO: 1041884 - RNA, 21 nt, Human
accuuaaacaacgccaaggaa

SEQ ID NO: 1041885 - RNA, 22 nt, Human
agaagacccccagcaaagaaaa

SEQ ID NO: 1041886 - RNA, 18 nt, Human
agaggaagugugucuggc

SEQ ID NO: 1041887 - RNA, 23 nt, Human
agcccagccagccugcgucucag

SEQ ID NO: 1041888 - RNA, 24 nt, Human
agccccacccccucccgugcccag

SEQ ID NO: 1041889 - RNA, 23 nt, Human
aggaggacgaaauguuuaaacgg

SEQ ID NO: 1041890 - RNA, 21 nt, Human
aggcuccugggcagacaguuc

SEQ ID NO: 1041891 - RNA, 20 nt, Human
augccuuuccaucggcaucc

SEQ ID NO: 1041892 - RNA, 23 nt, Human
caaccccuguccggugucggggg

SEQ ID NO: 1041893 - RNA, 19 nt, Human
caacgccaaggaaccucac

SEQ ID NO: 1041894 - RNA, 23 nt, Human
cacccccucccgugcccagggcc

SEQ ID NO: 1041895 - RNA, 19 nt, Human
cacgcccagccccaccccc

SEQ ID NO: 1041896 - RNA, 20 nt, Human
cacgcccagccccacccccu

SEQ ID NO: 1041897 - RNA, 24 nt, Human
cagaugccuuuccaucggcauccc

SEQ ID NO: 1041898 - RNA, 18 nt, Human
cagcaggagagcccagcc

SEQ ID NO: 1041899 - RNA, 19 nt, Human
cagcuccucaagccugacu

SEQ ID NO: 1041900 - RNA, 23 nt, Human
caggcuccugggcagacaguucc

SEQ ID NO: 1041901 - RNA, 18 nt, Human
cagugggugagugaggcc

SEQ ID NO: 1041902 - RNA, 21 nt, Human
caucccagcuguggcugggga

SEQ ID NO: 1041903 - RNA, 22 nt, Human
ccacccccucccgugcccaggg

SEQ ID NO: 1041904 - RNA, 23 nt, Human
ccagcaaagaaaaaggcaucaga

SEQ ID NO: 1041905 - RNA, 22 nt, Human
ccagccccacccccucccgugc

SEQ ID NO: 1041906 - RNA, 18 nt, Human
ccagcuguggcuggggac

SEQ ID NO: 1041907 - RNA, 18 nt, Human
ccccacccccucccgugc

SEQ ID NO: 1041908 - RNA, 23 nt, Human
ccccacccccucccgugcccagg

SEQ ID NO: 1041909 - RNA, 19 nt, Human
cccccucccgugcccaggg

SEQ ID NO: 1041910 - RNA, 20 nt, Human
ccccuguccccuucacgccc

SEQ ID NO: 1041911 - RNA, 19 nt, Human
cccgcuguguucugcagcc

SEQ ID NO: 1041912 - RNA, 24 nt, Human
ccucuccugucucugcuuuccuca

SEQ ID NO: 1041913 - RNA, 24 nt, Human
ccucugaggagguccccucaaccc

SEQ ID NO: 1041914 - RNA, 21 nt, Human
ccucuggguggcuguagaucu

SEQ ID NO: 1041915 - RNA, 22 nt, Human
cgacgcagugggugagugaggc

SEQ ID NO: 1041916 - RNA, 20 nt, Human
cucaagccugacugcucuuc

SEQ ID NO: 1041917 - RNA, 24 nt, Human
cuucacgcccagccccacccccuc

SEQ ID NO: 1041918 - RNA, 22 nt, Human
gacugcucuuccgccucucuau

SEQ ID NO: 1041919 - RNA, 22 nt, Human
gagaacgaggucucaagaggaa

SEQ ID NO: 1041920 - RNA, 18 nt, Human
gaggagguccccucaacc

SEQ ID NO: 1041921 - RNA, 18 nt, Human
gcccagccccacccccuc

SEQ ID NO: 1041922 - RNA, 20 nt, Human
gcccgggcagggcucgucaa

SEQ ID NO: 1041923 - RNA, 20 nt, Human
ggagagcccagccagccugc

SEQ ID NO: 1041924 - RNA, 21 nt, Human
gggccucugaggagguccccu

SEQ ID NO: 1041925 - RNA, 20 nt, Human
gguggaguugaccuuaaaca

SEQ ID NO: 1041926 - RNA, 21 nt, Human
uacaagcgccagcuccucaag

SEQ ID NO: 1041927 - RNA, 23 nt, Human
uagaagacccccagcaaagaaaa

SEQ ID NO: 1041928 - RNA, 19 nt, Human
uauggcagaugccuuucca

SEQ ID NO: 1041929 - RNA, 28 nt, Human
uccccuguccccuucacgcccagcccca

SEQ ID NO: 1041930 - RNA, 18 nt, Human
uccugggcagacaguucc

SEQ ID NO: 1041931 - RNA, 21 nt, Human
ucuccugucucugcuuuccuc

SEQ ID NO: 1041932 - RNA, 23 nt, Human
ugacuucugucacuuccagacuc

SEQ ID NO: 1041933 - RNA, 20 nt, Human
ugaggagguccccucaaccc

SEQ ID NO: 1041934 - RNA, 18 nt, Human
ugcaaagaugucccuggg

SEQ ID NO: 1041935 - RNA, 20 nt, Human
ugcaaagaugucccugggcc

SEQ ID NO: 1041936 - RNA, 21 nt, Human
ugcccagggccucugaggagg

SEQ ID NO: 1041937 - RNA, 20 nt, Human
uggcuugcaaagaugucccu

SEQ ID NO: 1041938 - RNA, 21 nt, Human
ugggaaguguguuuggcucac

SEQ ID NO: 1041939 - RNA, 19 nt, Human
uguauuugguggaguugac

SEQ ID NO: 1041940 - RNA, 23 nt, Human
uugaccuuaaacaacgccaagga

SEQ ID NO: 1041941 - RNA, 19 nt, Human
uugcuguauuugguggagu

SEQ ID NO: 1041942 - RNA, 21 nt, Human
acucuugccgggcagacagac

SEQ ID NO: 1041943 - RNA, 23 nt, Human
agaauggacucuugccgggcaga

SEQ ID NO: 1041944 - RNA, 22 nt, Human
agacagacacagcaaggcucuc

SEQ ID NO: 1041945 - RNA, 18 nt, Human
agcagguagaugggccag

SEQ ID NO: 1041946 - RNA, 22 nt, Human
ccagcagugagaauggacucuu

SEQ ID NO: 1041947 - RNA, 18 nt, Human
cccagcccuggagcucca

SEQ ID NO: 1041948 - RNA, 21 nt, Human
ccgggcaucucugagcauuga

SEQ ID NO: 1041949 - RNA, 18 nt, Human
cuggagcuccauccaggc

SEQ ID NO: 1041950 - RNA, 22 nt, Human
gacguggagauuuucaugagug

SEQ ID NO: 1041951 - RNA, 24 nt, Human
gagcauugacuugcggacguuccc

SEQ ID NO: 1041952 - RNA, 22 nt, Human
gggugcugggggaaacugaagc

SEQ ID NO: 1041953 - RNA, 18 nt, Human
gugcugggggaaacugaa

SEQ ID NO: 1041954 - RNA, 21 nt, Human
uccccagcccuggagcuccau

SEQ ID NO: 1041955 - RNA, 22 nt, Human
ugacuugcggacguuccccagc

SEQ ID NO: 1041956 - RNA, 22 nt, Human
ugggaugcacguggaccaggcu

SEQ ID NO: 1041957 - RNA, 24 nt, Human
ugggggaaacugaagcugucagug

SEQ ID NO: 1041958 - RNA, 23 nt, Human
agaaagucagcuuuauuagccca

SEQ ID NO: 1041959 - RNA, 18 nt, Human
agcuggugggcaggaggc

SEQ ID NO: 1041960 - RNA, 23 nt, Human
agcuggugggcaggaggcugugg

SEQ ID NO: 1041961 - RNA, 21 nt, Human
aggagcagggagacagcuggg

SEQ ID NO: 1041962 - RNA, 24 nt, Human
aggugaggccagcuggugggcagg

SEQ ID NO: 1041963 - RNA, 19 nt, Human
caccucacugcggcugcuc

SEQ ID NO: 1041964 - RNA, 24 nt, Human
cagcuggugggcaggaggcugugg

SEQ ID NO: 1041965 - RNA, 18 nt, Human
caggcccuggaacacccu

SEQ ID NO: 1041966 - RNA, 18 nt, Human
cuuuauuagcccaucacc

SEQ ID NO: 1041967 - RNA, 19 nt, Human
gagcagggagacagcuggg

SEQ ID NO: 1041968 - RNA, 21 nt, Human
gaggugaggccagcugguggg

SEQ ID NO: 1041969 - RNA, 24 nt, Human
gcccuggaacacccucuggagcuc

SEQ ID NO: 1041970 - RNA, 25 nt, Human
gcuccgucaccucacugcggcugcu

SEQ ID NO: 1041971 - RNA, 20 nt, Human
ggagacagcugggaacugcg

SEQ ID NO: 1041972 - RNA, 18 nt, Human
ggcaggaggcugugguag

SEQ ID NO: 1041973 - RNA, 22 nt, Human
gggagacagcugggaacugcgc

SEQ ID NO: 1041974 - RNA, 23 nt, Human
ggugggcaggaggcugugguaga

SEQ ID NO: 1041975 - RNA, 18 nt, Human
ugcgcugggagagcaggg

SEQ ID NO: 1041976 - RNA, 19 nt, Human
ugcggcugcucuguaccag

SEQ ID NO: 1041977 - RNA, 20 nt, Human
auucauauauauauauauau

SEQ ID NO: 1041978 - RNA, 22 nt, Human
cauuuugggacagagggaguug

SEQ ID NO: 1041979 - RNA, 19 nt, Human
ccauccuccaccuuggcua

SEQ ID NO: 1041980 - RNA, 20 nt, Human
cccauccuccaccuuggcua

SEQ ID NO: 1041981 - RNA, 18 nt, Human
ccuuggcuaacugaaccu

SEQ ID NO: 1041982 - RNA, 23 nt, Human
cucauucauauauauauauauau

SEQ ID NO: 1041983 - RNA, 24 nt, Human
ucucauucauauauauauauauau

SEQ ID NO: 1041984 - RNA, 19 nt, Human
uucauauauauauauauau

SEQ ID NO: 1041985 - RNA, 22 nt, Human
uugguccauccuaacauuuucc

SEQ ID NO: 1041986 - RNA, 20 nt, Human
uuucccauccuccaccuugg

SEQ ID NO: 1041987 - RNA, 23 nt, Human
uuuugggacagagggaguuggua

SEQ ID NO: 1041988 - RNA, 22 nt, Human
acugcagucagcuucagggcag

SEQ ID NO: 1041989 - RNA, 22 nt, Human
agccgugcgacucugucucccu

SEQ ID NO: 1041990 - RNA, 19 nt, Human
aggaagccaauuggauuuc

SEQ ID NO: 1041991 - RNA, 22 nt, Human
caaauuggccuaauacuggaaa

SEQ ID NO: 1041992 - RNA, 18 nt, Human
cacagcagcauuaaauga

SEQ ID NO: 1041993 - RNA, 22 nt, Human
cacgugacacgccugacugccc

SEQ ID NO: 1041994 - RNA, 19 nt, Human
ccuguggcugcgacccgga

SEQ ID NO: 1041995 - RNA, 21 nt, Human
cuagagcucacgguucagggc

SEQ ID NO: 1041996 - RNA, 22 nt, Human
cugccuggcgucucagccgugc

SEQ ID NO: 1041997 - RNA, 20 nt, Human
cuggaauuucuagagcucac

SEQ ID NO: 1041998 - RNA, 20 nt, Human
cuguccgcgauccaggcuua

SEQ ID NO: 1041999 - RNA, 19 nt, Human
gaagccaauuggauuucaa

SEQ ID NO: 1042000 - RNA, 20 nt, Human
gaaguuggaauuuacaaacu

SEQ ID NO: 1042001 - RNA, 19 nt, Human
ggcaggugagguguggacc

SEQ ID NO: 1042002 - RNA, 21 nt, Human
uccgcgauccaggcuuagggc

SEQ ID NO: 1042003 - RNA, 19 nt, Human
ucugcacuacugcugaaag

SEQ ID NO: 1042004 - RNA, 18 nt, Human
ugccacagcagcauuaaa

SEQ ID NO: 1042005 - RNA, 20 nt, Human
ugcccuguggcugcgacccg

SEQ ID NO: 1042006 - RNA, 24 nt, Human
uggcgucucagccgugcgacucug

SEQ ID NO: 1042007 - RNA, 23 nt, Human
aaaaaaacccaaaaaaacucaag

SEQ ID NO: 1042008 - RNA, 20 nt, Human
aaacccaaaaaaacucaaga

SEQ ID NO: 1042009 - RNA, 20 nt, Human
aaagaacuuugcccaccaac

SEQ ID NO: 1042010 - RNA, 19 nt, Human
aaagcuacaacuuggccug

SEQ ID NO: 1042011 - RNA, 21 nt, Human
aagaauugacacccaagacca

SEQ ID NO: 1042012 - RNA, 24 nt, Human
aagcugaggcaggaggaccaucug

SEQ ID NO: 1042013 - RNA, 28 nt, Human
acagcaagacugucucaaaaaaaaaaaa

SEQ ID NO: 1042014 - RNA, 26 nt, Human
accacacuccagccugggcaauacag

SEQ ID NO: 1042015 - RNA, 20 nt, Human
agccugggcaacauagagaa

SEQ ID NO: 1042016 - RNA, 23 nt, Human
agccugggcaacauagagaaucc

SEQ ID NO: 1042017 - RNA, 23 nt, Human
aggaggaauuuacaauuuccagc

SEQ ID NO: 1042018 - RNA, 18 nt, Human
aggcaggaggaccaucug

SEQ ID NO: 1042019 - RNA, 18 nt, Human
aggcaggaggaccaucug

SEQ ID NO: 1042020 - RNA, 24 nt, Human
aggcaggaggaccaucugagccca

SEQ ID NO: 1042021 - RNA, 19 nt, Human
aggcaggaggaccaucugg

SEQ ID NO: 1042022 - RNA, 22 nt, Human
aggugggaggauugcuuaggcc

SEQ ID NO: 1042023 - RNA, 20 nt, Human
auagaaccucuuguugggca

SEQ ID NO: 1042024 - RNA, 19 nt, Human
auugcuuaggccuggguga

SEQ ID NO: 1042025 - RNA, 24 nt, Human
auugugccaccacacuccagccug

SEQ ID NO: 1042026 - RNA, 24 nt, Human
caacauagagaauccgucucaaca

SEQ ID NO: 1042027 - RNA, 22 nt, Human
caagaccauccuuuauuguagu

SEQ ID NO: 1042028 - RNA, 25 nt, Human
caccacacuccagccugggcaauac

SEQ ID NO: 1042029 - RNA, 20 nt, Human
cagcuuaaagaacuuugccc

SEQ ID NO: 1042030 - RNA, 25 nt, Human
cagcuuaaagaacuuugcccaccaa

SEQ ID NO: 1042031 - RNA, 24 nt, Human
ccaaaaaaacucaagaauguaaug

SEQ ID NO: 1042032 - RNA, 18 nt, Human
cccccagcuacuacuccc

SEQ ID NO: 1042033 - RNA, 20 nt, Human
ccucugauacauaaggcaag

SEQ ID NO: 1042034 - RNA, 22 nt, Human
ccugagaccagccugggcaaca

SEQ ID NO: 1042035 - RNA, 19 nt, Human
ccuuuauuguaguauuagu

SEQ ID NO: 1042036 - RNA, 18 nt, Human
cucaaaaaaaaaaaaaaa

SEQ ID NO: 1042037 - RNA, 24 nt, Human
cucaaaaaaaaaaaaaaaaaccca

SEQ ID NO: 1042038 - RNA, 23 nt, Human
cugggcaacauagagaauccguc

SEQ ID NO: 1042039 - RNA, 22 nt, Human
cugucucaaaaaaaaaaaaaaa

SEQ ID NO: 1042040 - RNA, 24 nt, Human
cuuaggccugggugauugaggaug

SEQ ID NO: 1042041 - RNA, 24 nt, Human
gaccaucugagcccaggagccuga

SEQ ID NO: 1042042 - RNA, 19 nt, Human
gcaugauggcaagggacaa

SEQ ID NO: 1042043 - RNA, 22 nt, Human
gccaccacacuccagccugggc

SEQ ID NO: 1042044 - RNA, 22 nt, Human
gcccaggagccugagaccagcc

SEQ ID NO: 1042045 - RNA, 19 nt, Human
gccugggugauugaggaug

SEQ ID NO: 1042046 - RNA, 19 nt, Human
gccugugccuuuggaagcu

SEQ ID NO: 1042047 - RNA, 24 nt, Human
gcuguagucccagcuacaaggugg

SEQ ID NO: 1042048 - RNA, 19 nt, Human
gggacugacauccucuggu

SEQ ID NO: 1042049 - RNA, 22 nt, Human
gucucaaaaaaaaaaaaaaaaa

SEQ ID NO: 1042050 - RNA, 21 nt, Human
uacaacuuggccugugccuuu

SEQ ID NO: 1042051 - RNA, 28 nt, Human
uaguuuucagaauccaaacugauggagu

SEQ ID NO: 1042052 - RNA, 22 nt, Human
uccccagagaccacagaagcuc

SEQ ID NO: 1042053 - RNA, 20 nt, Human
ucucuuggaucugcugagca

SEQ ID NO: 1042054 - RNA, 18 nt, Human
ucuuuauuugcucuugcc

SEQ ID NO: 1042055 - RNA, 19 nt, Human
ugaaaaaacauuucaggag

SEQ ID NO: 1042056 - RNA, 21 nt, Human
ugaaaaaacauuucaggagga

SEQ ID NO: 1042057 - RNA, 23 nt, Human
ugagcccaggagccugagaccag

SEQ ID NO: 1042058 - RNA, 20 nt, Human
ugaggcaggaggaccaucug

SEQ ID NO: 1042059 - RNA, 24 nt, Human
ugaggcaggaggaccaucugagcc

SEQ ID NO: 1042060 - RNA, 25 nt, Human
ugaggcaggaggaccaucugagccc

SEQ ID NO: 1042061 - RNA, 22 nt, Human
ugcaaugagcugugauugugcc

SEQ ID NO: 1042062 - RNA, 24 nt, Human
ugccaccacacuccagccugggca

SEQ ID NO: 1042063 - RNA, 19 nt, Human
ugccuuuggaagcugaggc

SEQ ID NO: 1042064 - RNA, 21 nt, Human
uggcaagggacaaagcuacaa

SEQ ID NO: 1042065 - RNA, 25 nt, Human
uguagucccagcuacaaggugggag

SEQ ID NO: 1042066 - RNA, 21 nt, Human
uuccagcuuaaagaacuuugc

SEQ ID NO: 1042067 - RNA, 21 nt, Human
uucuagaaaaaguugccaaau

SEQ ID NO: 1042068 - RNA, 24 nt, Human
uuggaagcugaggcaggaggacca

SEQ ID NO: 1042069 - RNA, 19 nt, Human
uuugcccaccaacauaacc

SEQ ID NO: 1042070 - RNA, 24 nt, Human
aaacccuccacagcccacggcucc

SEQ ID NO: 1042071 - RNA, 19 nt, Human
agcugacugcgccuaccug

SEQ ID NO: 1042072 - RNA, 21 nt, Human
aggacacgcccuccacgaccg

SEQ ID NO: 1042073 - RNA, 21 nt, Human
aggauccugaccccccgccgg

SEQ ID NO: 1042074 - RNA, 20 nt, Human
auccugaccccccgccgggg

SEQ ID NO: 1042075 - RNA, 19 nt, Human
cacaaacccuccacagccc

SEQ ID NO: 1042076 - RNA, 22 nt, Human
cacaaacccuccacagcccacg

SEQ ID NO: 1042077 - RNA, 23 nt, Human
ccaacccacagcaccuccugcag

SEQ ID NO: 1042078 - RNA, 21 nt, Human
ccauccagggacauuuuuuac

SEQ ID NO: 1042079 - RNA, 21 nt, Human
cccacagcaccuccugcaguc

SEQ ID NO: 1042080 - RNA, 22 nt, Human
ccuccacagcccacggcuccaa

SEQ ID NO: 1042081 - RNA, 22 nt, Human
cuccacagcccacggcuccaac

SEQ ID NO: 1042082 - RNA, 23 nt, Human
gggcuucucaucauacacaaacc

SEQ ID NO: 1042083 - RNA, 21 nt, Human
ggguauuucuugacaagacug

SEQ ID NO: 1042084 - RNA, 20 nt, Human
guggaggauccugacccccc

SEQ ID NO: 1042085 - RNA, 19 nt, Human
uaccgaagcgucucagaga

SEQ ID NO: 1042086 - RNA, 25 nt, Human
ucagagacuggcucaggguauuucu

SEQ ID NO: 1042087 - RNA, 23 nt, Human
uccacagcccacggcuccaaccc

SEQ ID NO: 1042088 - RNA, 20 nt, Human
ugauuccauccagggacauu

SEQ ID NO: 1042089 - RNA, 18 nt, Human
uggcucaggguauuucuu

SEQ ID NO: 1042090 - RNA, 23 nt, Human
uggcucaggguauuucuugacaa

SEQ ID NO: 1042091 - RNA, 20 nt, Human
uguggaggauccugaccccc

SEQ ID NO: 1042092 - RNA, 21 nt, Human
aacacagcgagacacccaucu

SEQ ID NO: 1042093 - RNA, 19 nt, Human
aagcacugggaguagugca

SEQ ID NO: 1042094 - RNA, 20 nt, Human
acacagcgagacacccaucu

SEQ ID NO: 1042095 - RNA, 21 nt, Human
acagcgagacacccaucuaaa

SEQ ID NO: 1042096 - RNA, 23 nt, Human
acugcagcuuccaagcuguuggc

SEQ ID NO: 1042097 - RNA, 19 nt, Human
agacucaaagauucggcag

SEQ ID NO: 1042098 - RNA, 24 nt, Human
agcacuuugggaggccaauauggg

SEQ ID NO: 1042099 - RNA, 20 nt, Human
aggaguuugagaucagccug

SEQ ID NO: 1042100 - RNA, 24 nt, Human
aggaucacuugaagccaggaguuu

SEQ ID NO: 1042101 - RNA, 24 nt, Human
aggcaggagaagguuucucucuag

SEQ ID NO: 1042102 - RNA, 22 nt, Human
aucccagcacuuugggaggcca

SEQ ID NO: 1042103 - RNA, 19 nt, Human
aucuaaagcacuuauagag

SEQ ID NO: 1042104 - RNA, 24 nt, Human
cacaccuguaaucccagcacuuug

SEQ ID NO: 1042105 - RNA, 19 nt, Human
caccuguaaucccagcacu

SEQ ID NO: 1042106 - RNA, 24 nt, Human
caccuguaaucccagcacuuuggg

SEQ ID NO: 1042107 - RNA, 21 nt, Human
cacuugaagccaggaguuuga

SEQ ID NO: 1042108 - RNA, 24 nt, Human
cagcacuuugggaggccaauaugg

SEQ ID NO: 1042109 - RNA, 23 nt, Human
cagcgagacacccaucuaaagca

SEQ ID NO: 1042110 - RNA, 23 nt, Human
ccaggcaccauuccaagcacugg

SEQ ID NO: 1042111 - RNA, 19 nt, Human
cccaggcaccauuccaagc

SEQ ID NO: 1042112 - RNA, 19 nt, Human
ccccucucucccucucccc

SEQ ID NO: 1042113 - RNA, 25 nt, Human
cccucucucccucuccccuucuccc

SEQ ID NO: 1042114 - RNA, 19 nt, Human
ccuucucucccccucucuc

SEQ ID NO: 1042115 - RNA, 22 nt, Human
cgaaacccccugccuccaugaa

SEQ ID NO: 1042116 - RNA, 18 nt, Human
cgagacacccaucuaaag

SEQ ID NO: 1042117 - RNA, 24 nt, Human
cguggcucacaccuguaaucccag

SEQ ID NO: 1042118 - RNA, 22 nt, Human
cucacaccuguaaucccagcac

SEQ ID NO: 1042119 - RNA, 24 nt, Human
cucacaccuguaaucccagcacuu

SEQ ID NO: 1042120 - RNA, 18 nt, Human
cugcggcaggcaggagaa

SEQ ID NO: 1042121 - RNA, 25 nt, Human
gaggaucacuugaagccaggaguuu

SEQ ID NO: 1042122 - RNA, 19 nt, Human
gauaacacagcgagacacc

SEQ ID NO: 1042123 - RNA, 24 nt, Human
gaucacuugaagccaggaguuuga

SEQ ID NO: 1042124 - RNA, 22 nt, Human
ggaucacuugaagccaggaguu

SEQ ID NO: 1042125 - RNA, 23 nt, Human
ggugccguggcucacaccuguaa

SEQ ID NO: 1042126 - RNA, 21 nt, Human
uaauuacugcagcuuccaagc

SEQ ID NO: 1042127 - RNA, 21 nt, Human
uagagucccaggcaccauucc

SEQ ID NO: 1042128 - RNA, 21 nt, Human
uagugcaaugaacgaaacccc

SEQ ID NO: 1042129 - RNA, 19 nt, Human
ucacuugaagccaggaguu

SEQ ID NO: 1042130 - RNA, 22 nt, Human
uccccuucuaauuacugcagcu

SEQ ID NO: 1042131 - RNA, 21 nt, Human
ucuagagcuugcuuucgcucu

SEQ ID NO: 1042132 - RNA, 22 nt, Human
ugacagaaaaggaaauugucuu

SEQ ID NO: 1042133 - RNA, 21 nt, Human
uggcucacaccuguaauccca

SEQ ID NO: 1042134 - RNA, 22 nt, Human
uggcucacaccuguaaucccag

SEQ ID NO: 1042135 - RNA, 24 nt, Human
uggcucacaccuguaaucccagca

SEQ ID NO: 1042136 - RNA, 18 nt, Human
ugggaggccaauauggga

SEQ ID NO: 1042137 - RNA, 24 nt, Human
ugggaggccaauaugggaggauca

SEQ ID NO: 1042138 - RNA, 18 nt, Human
uuacugcagcuuccaagc

SEQ ID NO: 1042139 - RNA, 21 nt, Human
uugaagccaggaguuugagau

SEQ ID NO: 1042140 - RNA, 20 nt, Human
cccaugagggaaaugggugg

SEQ ID NO: 1042141 - RNA, 19 nt, Human
gcugacugcuuuggugcug

SEQ ID NO: 1042142 - RNA, 19 nt, Human
ggcucccgcuuugcuggcu

SEQ ID NO: 1042143 - RNA, 22 nt, Human
ugacugcuuuggugcuguuuuu

SEQ ID NO: 1042144 - RNA, 23 nt, Human
ugcuggcuuggccaguucuuggg

SEQ ID NO: 1042145 - RNA, 22 nt, Human
ugcuuuggugcuguuuuugaaa

SEQ ID NO: 1042146 - RNA, 21 nt, Human
uuugcuggcuuggccaguucu

SEQ ID NO: 1042147 - RNA, 21 nt, Human
caccagggccuccgggccccc

SEQ ID NO: 1042148 - RNA, 18 nt, Human
ccaccagggccuccgggc

SEQ ID NO: 1042149 - RNA, 18 nt, Human
ccuccgggcccccccgcu

SEQ ID NO: 1042150 - RNA, 19 nt, Human
aaacaaggcauaugcugug

SEQ ID NO: 1042151 - RNA, 24 nt, Human
aaggaaacuuuuucuuugguuucu

SEQ ID NO: 1042152 - RNA, 19 nt, Human
agaaagacuaaacaccuua

SEQ ID NO: 1042153 - RNA, 27 nt, Human
agaaagacuaaacaccuuauuuacagg

SEQ ID NO: 1042154 - RNA, 18 nt, Human
agagcagcccgacaaagc

SEQ ID NO: 1042155 - RNA, 24 nt, Human
agagguuuauguuugaggugauca

SEQ ID NO: 1042156 - RNA, 20 nt, Human
agcagagcagcccgacaaag

SEQ ID NO: 1042157 - RNA, 18 nt, Human
agcccccugccgcccccg

SEQ ID NO: 1042158 - RNA, 20 nt, Human
aggcaccuuauuccacuuuu

SEQ ID NO: 1042159 - RNA, 24 nt, Human
aguauauuucggcaacuaaccaaa

SEQ ID NO: 1042160 - RNA, 33 nt, Human
caaagcguggguccgcgugcaggaacccgccuu

SEQ ID NO: 1042161 - RNA, 21 nt, Human
caaauucuuaaacuggguuca

SEQ ID NO: 1042162 - RNA, 23 nt, Human
caacuaaccaaaaaaauaaucag

SEQ ID NO: 1042163 - RNA, 22 nt, Human
cacauguaucuuugcccauagu

SEQ ID NO: 1042164 - RNA, 18 nt, Human
cacuggauauucaaggag

SEQ ID NO: 1042165 - RNA, 22 nt, Human
caggcuggaccacagcucccuc

SEQ ID NO: 1042166 - RNA, 21 nt, Human
cagugagucuaucuuuuguuu

SEQ ID NO: 1042167 - RNA, 22 nt, Human
cauccuguccugcagauacucc

SEQ ID NO: 1042168 - RNA, 23 nt, Human
ccacagcucccucggaaugccac

SEQ ID NO: 1042169 - RNA, 18 nt, Human
cccauaguuuccaaaggg

SEQ ID NO: 1042170 - RNA, 23 nt, Human
cccccugccgcccccggccccgc

SEQ ID NO: 1042171 - RNA, 24 nt, Human
ccccgccagccgcgcccacuagca

SEQ ID NO: 1042172 - RNA, 20 nt, Human
ccccugccgcccccggcccc

SEQ ID NO: 1042173 - RNA, 22 nt, Human
ccgccgccgccgcuucccgccg

SEQ ID NO: 1042174 - RNA, 19 nt, Human
ccgccgcuucccgccgcgc

SEQ ID NO: 1042175 - RNA, 21 nt, Human
ccggacgcuagcccccugccg

SEQ ID NO: 1042176 - RNA, 19 nt, Human
ccggccccgccagccgcgc

SEQ ID NO: 1042177 - RNA, 30 nt, Human
cgcagauacuucacagugacagauguuccu

SEQ ID NO: 1042178 - RNA, 19 nt, Human
cgcccccggccccgccagc

SEQ ID NO: 1042179 - RNA, 20 nt, Human
cgcuggagccgccgccgccg

SEQ ID NO: 1042180 - RNA, 23 nt, Human
cuccuugacggguggcggcgugg

SEQ ID NO: 1042181 - RNA, 24 nt, Human
cucugugauaagcuccuuugucuc

SEQ ID NO: 1042182 - RNA, 18 nt, Human
gcaaauucuuaaacuggg

SEQ ID NO: 1042183 - RNA, 19 nt, Human
gcaaucuuaaacaaggcau

SEQ ID NO: 1042184 - RNA, 22 nt, Human
gugaagcuucugcaugccgcgc

SEQ ID NO: 1042185 - RNA, 22 nt, Human
guuaaagugcaggaauuuucua

SEQ ID NO: 1042186 - RNA, 23 nt, Human
guugauagguuucagcuuccucu

SEQ ID NO: 1042187 - RNA, 18 nt, Human
uaacugcucuauucuguu

SEQ ID NO: 1042188 - RNA, 25 nt, Human
uaugggucacacuggauauucaagg

SEQ ID NO: 1042189 - RNA, 19 nt, Human
ucagcugccuaguaugugu

SEQ ID NO: 1042190 - RNA, 18 nt, Human
ucccgccgcgcaggcugg

SEQ ID NO: 1042191 - RNA, 19 nt, Human
ucuauacugcuauauaagg

SEQ ID NO: 1042192 - RNA, 20 nt, Human
ugauggcaaauucuuaaacu

SEQ ID NO: 1042193 - RNA, 19 nt, Human
ugcaacaaaacagaaauca

SEQ ID NO: 1042194 - RNA, 20 nt, Human
ugcgcagauacuucacaguu

SEQ ID NO: 1042195 - RNA, 21 nt, Human
ugggucacacuggauauucaa

SEQ ID NO: 1042196 - RNA, 23 nt, Human
uguagccaugacugcgcagauac

SEQ ID NO: 1042197 - RNA, 22 nt, Human
ugugagggcauuuccacucugg

SEQ ID NO: 1042198 - RNA, 23 nt, Human
ugugagggcauuuccacucuggg

SEQ ID NO: 1042199 - RNA, 18 nt, Human
ugugguucugaagaccuu

SEQ ID NO: 1042200 - RNA, 26 nt, Human
uucccgccgcgcaggcuggaccacag

SEQ ID NO: 1042201 - RNA, 20 nt, Human
uugcccauaguuuccaaagg

SEQ ID NO: 1042202 - RNA, 21 nt, Human
aaauccaccuccaccagggcc

SEQ ID NO: 1042203 - RNA, 21 nt, Human
aaauccaccuccaccagggcc

SEQ ID NO: 1042204 - RNA, 19 nt, Human
aacgagagccccucccaca

SEQ ID NO: 1042205 - RNA, 20 nt, Human
aagggcgccguccaggcagg

SEQ ID NO: 1042206 - RNA, 21 nt, Human
aauagagccagcugcuuggcg

SEQ ID NO: 1042207 - RNA, 20 nt, Human
aaugcucuguccugagccuc

SEQ ID NO: 1042208 - RNA, 19 nt, Human
aauguccacuagaaggugg

SEQ ID NO: 1042209 - RNA, 19 nt, Human
acacugauagugaggcugg

SEQ ID NO: 1042210 - RNA, 19 nt, Human
accaccucaaucccgagcc

SEQ ID NO: 1042211 - RNA, 22 nt, Human
acggagcugugugcacauggcc

SEQ ID NO: 1042212 - RNA, 19 nt, Human
agaaaauccaccuccacca

SEQ ID NO: 1042213 - RNA, 19 nt, Human
agaaaauccaccuccacca

SEQ ID NO: 1042214 - RNA, 24 nt, Human
agacaccaagggccccguagcccc

SEQ ID NO: 1042215 - RNA, 23 nt, Human
agaccaccaucacagacgugcga

SEQ ID NO: 1042216 - RNA, 18 nt, Human
agaccugccagccuccag

SEQ ID NO: 1042217 - RNA, 22 nt, Human
agcagugcugcuggaacaggcc

SEQ ID NO: 1042218 - RNA, 23 nt, Human
agccgguaccagugcucguggca

SEQ ID NO: 1042219 - RNA, 22 nt, Human
aggacuagaaacugagcaggac

SEQ ID NO: 1042220 - RNA, 23 nt, Human
aggcauuggcaguucuucagaag

SEQ ID NO: 1042221 - RNA, 21 nt, Human
agggaacuggagagcagaggg

SEQ ID NO: 1042222 - RNA, 21 nt, Human
agggaggggagaagacuguuu

SEQ ID NO: 1042223 - RNA, 23 nt, Human
aggggcucugaagugagcauugc

SEQ ID NO: 1042224 - RNA, 21 nt, Human
aggggcugggagggggugggg

SEQ ID NO: 1042225 - RNA, 18 nt, Human
aggugguguaggcugggc

SEQ ID NO: 1042226 - RNA, 22 nt, Human
aggugguguaggcugggcagag

SEQ ID NO: 1042227 - RNA, 18 nt, Human
augaucguccugacugau

SEQ ID NO: 1042228 - RNA, 19 nt, Human
auggagcugcagagcgggc

SEQ ID NO: 1042229 - RNA, 24 nt, Human
caaagugaggaauaccugucucuc

SEQ ID NO: 1042230 - RNA, 23 nt, Human
caaggccgaguccaaaagccaca

SEQ ID NO: 1042231 - RNA, 18 nt, Human
caagggccccguagcccc

SEQ ID NO: 1042232 - RNA, 21 nt, Human
cacagcccugccuggggcccu

SEQ ID NO: 1042233 - RNA, 24 nt, Human
cacagcccugccuggggcccugac

SEQ ID NO: 1042234 - RNA, 21 nt, Human
caccaagggccccguagcccc

SEQ ID NO: 1042235 - RNA, 20 nt, Human
caccuccaccagggccucca

SEQ ID NO: 1042236 - RNA, 21 nt, Human
caccuccaccagggccuccac

SEQ ID NO: 1042237 - RNA, 20 nt, Human
caccuccaccagggccugac

SEQ ID NO: 1042238 - RNA, 19 nt, Human
cagcagcaucugagcagcc

SEQ ID NO: 1042239 - RNA, 18 nt, Human
cagcagggagcccccguc

SEQ ID NO: 1042240 - RNA, 22 nt, Human
cagccaggcccaggucuagcca

SEQ ID NO: 1042241 - RNA, 20 nt, Human
caggcaccuggccaguucuc

SEQ ID NO: 1042242 - RNA, 18 nt, Human
caggccaccuggucucuc

SEQ ID NO: 1042243 - RNA, 18 nt, Human
caugacucagcccagcag

SEQ ID NO: 1042244 - RNA, 22 nt, Human
ccacagcagagccuggagacac

SEQ ID NO: 1042245 - RNA, 23 nt, Human
ccacagcagagccuggagacaca

SEQ ID NO: 1042246 - RNA, 18 nt, Human
ccaccagggccuccaccu

SEQ ID NO: 1042247 - RNA, 22 nt, Human
ccacgcaucuggcuucugugcc

SEQ ID NO: 1042248 - RNA, 18 nt, Human
ccacugggugggcaggag

SEQ ID NO: 1042249 - RNA, 23 nt, Human
ccagcagcaucugagcagccagg

SEQ ID NO: 1042250 - RNA, 18 nt, Human
ccagcagggccccagagu

SEQ ID NO: 1042251 - RNA, 23 nt, Human
ccagcaguccaagugcuagacgg

SEQ ID NO: 1042252 - RNA, 21 nt, Human
ccaggacucuggccucagcuc

SEQ ID NO: 1042253 - RNA, 18 nt, Human
ccaugcgugccugggaga

SEQ ID NO: 1042254 - RNA, 21 nt, Human
cccccaggucuccacugccac

SEQ ID NO: 1042255 - RNA, 25 nt, Human
cccccaggucuccacugccacaacc

SEQ ID NO: 1042256 - RNA, 24 nt, Human
ccccguagccccgugccaggacuc

SEQ ID NO: 1042257 - RNA, 23 nt, Human
ccccgugccaggacucuggccuc

SEQ ID NO: 1042258 - RNA, 18 nt, Human
ccccuggcuucggugugg

SEQ ID NO: 1042259 - RNA, 19 nt, Human
cccugaguccgaggcucug

SEQ ID NO: 1042260 - RNA, 20 nt, Human
cccugaguccgaggcucugg

SEQ ID NO: 1042261 - RNA, 18 nt, Human
cccuggaugugcggaugg

SEQ ID NO: 1042262 - RNA, 18 nt, Human
ccgcuggccaccccccag

SEQ ID NO: 1042263 - RNA, 18 nt, Human
ccgugcaggggcugggag

SEQ ID NO: 1042264 - RNA, 24 nt, Human
ccucuggccagaggugggugaggc

SEQ ID NO: 1042265 - RNA, 18 nt, Human
ccuggagacacagaggcu

SEQ ID NO: 1042266 - RNA, 19 nt, Human
ccugugcgaggccagggag

SEQ ID NO: 1042267 - RNA, 21 nt, Human
cgagcagagcggaaagugagc

SEQ ID NO: 1042268 - RNA, 25 nt, Human
cgcacggcucccacguggcuuccca

SEQ ID NO: 1042269 - RNA, 20 nt, Human
cgcagccuggugagaaugga

SEQ ID NO: 1042270 - RNA, 18 nt, Human
cggcauggguaagcuugg

SEQ ID NO: 1042271 - RNA, 24 nt, Human
cgguacaccacuggccucuccgau

SEQ ID NO: 1042272 - RNA, 27 nt, Human
cucacuuccaaaacuuccuugacugcu

SEQ ID NO: 1042273 - RNA, 20 nt, Human
cuccaaguaacgcagcugga

SEQ ID NO: 1042274 - RNA, 25 nt, Human
cuccacacuggugccaguuggcccc

SEQ ID NO: 1042275 - RNA, 21 nt, Human
cuccaccaccuccaucaggac

SEQ ID NO: 1042276 - RNA, 23 nt, Human
cuccugcccacaucuccugggcu

SEQ ID NO: 1042277 - RNA, 19 nt, Human
cucuccacacuggugccag

SEQ ID NO: 1042278 - RNA, 21 nt, Human
cugcagcccccgacucagcgg

SEQ ID NO: 1042279 - RNA, 20 nt, Human
cugcaguggcaccugggaga

SEQ ID NO: 1042280 - RNA, 26 nt, Human
cugcgucuugaaggggggagagaucu

SEQ ID NO: 1042281 - RNA, 21 nt, Human
cugcugggugcaggggggcag

SEQ ID NO: 1042282 - RNA, 27 nt, Human
cuggaacaggccaccuggucucucugu

SEQ ID NO: 1042283 - RNA, 22 nt, Human
cugggugcaggggggcagucca

SEQ ID NO: 1042284 - RNA, 21 nt, Human
gaaccccuggccugugcacag

SEQ ID NO: 1042285 - RNA, 18 nt, Human
gagcaggguuccagcagc

SEQ ID NO: 1042286 - RNA, 18 nt, Human
gagggcccuccggcgggg

SEQ ID NO: 1042287 - RNA, 19 nt, Human
gaguuuccugacugcugac

SEQ ID NO: 1042288 - RNA, 20 nt, Human
gcaaugcucuguccugagcc

SEQ ID NO: 1042289 - RNA, 18 nt, Human
gcaugcugcaggugggac

SEQ ID NO: 1042290 - RNA, 18 nt, Human
gccggaaaacagaacuca

SEQ ID NO: 1042291 - RNA, 21 nt, Human
gccggccccaguggccucccu

SEQ ID NO: 1042292 - RNA, 23 nt, Human
gcuccugcccacaucuccugggc

SEQ ID NO: 1042293 - RNA, 19 nt, Human
gcuggaggcaggagacgca

SEQ ID NO: 1042294 - RNA, 23 nt, Human
gcugggugcaggggggcagucca

SEQ ID NO: 1042295 - RNA, 22 nt, Human
ggaaaucaggggcagaggacac

SEQ ID NO: 1042296 - RNA, 19 nt, Human
ggagaagcgcaccugcucc

SEQ ID NO: 1042297 - RNA, 18 nt, Human
ggagacccugauguggug

SEQ ID NO: 1042298 - RNA, 19 nt, Human
ggagaugggaccucagucc

SEQ ID NO: 1042299 - RNA, 18 nt, Human
ggcgaggccgagccccuc

SEQ ID NO: 1042300 - RNA, 21 nt, Human
gggcagaggacacuguguucu

SEQ ID NO: 1042301 - RNA, 24 nt, Human
gggcaggaguggggcaggcgaggg

SEQ ID NO: 1042302 - RNA, 20 nt, Human
gggcaguccagggacugagc

SEQ ID NO: 1042303 - RNA, 21 nt, Human
gggcaguccagggacugagca

SEQ ID NO: 1042304 - RNA, 20 nt, Human
ggggaaagcuccugcccaca

SEQ ID NO: 1042305 - RNA, 20 nt, Human
gggugcugucucauggaugg

SEQ ID NO: 1042306 - RNA, 19 nt, Human
ggugcugucucauggaugg

SEQ ID NO: 1042307 - RNA, 20 nt, Human
gucacagcagugaaagacac

SEQ ID NO: 1042308 - RNA, 22 nt, Human
gucacagcagugaaagacacca

SEQ ID NO: 1042309 - RNA, 20 nt, Human
gugaucuuuggccuucaugg

SEQ ID NO: 1042310 - RNA, 21 nt, Human
gugcaggggcugggagggggu

SEQ ID NO: 1042311 - RNA, 20 nt, Human
gugcggcaucacuugcugcu

SEQ ID NO: 1042312 - RNA, 19 nt, Human
guggcggaggggcucugaa

SEQ ID NO: 1042313 - RNA, 23 nt, Human
guuucagguucuuuuuuucacag

SEQ ID NO: 1042314 - RNA, 20 nt, Human
uaaauaagcacaguggagac

SEQ ID NO: 1042315 - RNA, 19 nt, Human
uaccagugcucguggcagg

SEQ ID NO: 1042316 - RNA, 19 nt, Human
uagaaggacuuaaccucac

SEQ ID NO: 1042317 - RNA, 21 nt, Human
uagacggagagcugcucccau

SEQ ID NO: 1042318 - RNA, 20 nt, Human
ucacuuucagccagcagggc

SEQ ID NO: 1042319 - RNA, 20 nt, Human
ucauggcagcgagugcaggc

SEQ ID NO: 1042320 - RNA, 22 nt, Human
uccaaaaaaggaaaaagaaaca

SEQ ID NO: 1042321 - RNA, 22 nt, Human
uccaaaacuuccuugacugcuc

SEQ ID NO: 1042322 - RNA, 19 nt, Human
uccacacugauagugaggc

SEQ ID NO: 1042323 - RNA, 25 nt, Human
uccaccagggccuccaccaccucca

SEQ ID NO: 1042324 - RNA, 22 nt, Human
uccccugcaaugcucuguccug

SEQ ID NO: 1042325 - RNA, 21 nt, Human
ucccuccaggugcaaagcccc

SEQ ID NO: 1042326 - RNA, 22 nt, Human
ucccuccgugcaggggcuggga

SEQ ID NO: 1042327 - RNA, 24 nt, Human
ucccuccgugcaggggcugggagg

SEQ ID NO: 1042328 - RNA, 20 nt, Human
ucccugcaguggcaccuggg

SEQ ID NO: 1042329 - RNA, 19 nt, Human
uccugcccacaucuccugg

SEQ ID NO: 1042330 - RNA, 28 nt, Human
uccugcccacaucuccugggcucugcgg

SEQ ID NO: 1042331 - RNA, 22 nt, Human
uccugcuucuccaaguaacgca

SEQ ID NO: 1042332 - RNA, 18 nt, Human
ucucucugggcccccagc

SEQ ID NO: 1042333 - RNA, 20 nt, Human
ucugcagcccccgacucagc

SEQ ID NO: 1042334 - RNA, 21 nt, Human
ucugugccucuggugaccagg

SEQ ID NO: 1042335 - RNA, 19 nt, Human
ugaaagacaccaagggccc

SEQ ID NO: 1042336 - RNA, 20 nt, Human
ugaaagacaccaagggcccc

SEQ ID NO: 1042337 - RNA, 23 nt, Human
ugaagugagcauugcugaugccc

SEQ ID NO: 1042338 - RNA, 24 nt, Human
ugacauaaaaugugaagagggagu

SEQ ID NO: 1042339 - RNA, 22 nt, Human
ugacucccacuugcuguccaag

SEQ ID NO: 1042340 - RNA, 20 nt, Human
ugacugcucaggguucaggc

SEQ ID NO: 1042341 - RNA, 20 nt, Human
ugagcagccaggcccagguc

SEQ ID NO: 1042342 - RNA, 23 nt, Human
ugagcaggacugugccacgguga

SEQ ID NO: 1042343 - RNA, 20 nt, Human
ugagggaggugguguaggcu

SEQ ID NO: 1042344 - RNA, 19 nt, Human
ugauguggugguggucaag

SEQ ID NO: 1042345 - RNA, 24 nt, Human
ugccaggacucuggccucagcucc

SEQ ID NO: 1042346 - RNA, 28 nt, Human
ugccaggacucuggccucagcuccugca

SEQ ID NO: 1042347 - RNA, 19 nt, Human
ugccccgggugcugccgcg

SEQ ID NO: 1042348 - RNA, 22 nt, Human
ugccuggggcccugacacgcac

SEQ ID NO: 1042349 - RNA, 22 nt, Human
ugcucccagcaggcgcacacgu

SEQ ID NO: 1042350 - RNA, 18 nt, Human
ugcugccgcgggugcugc

SEQ ID NO: 1042351 - RNA, 20 nt, Human
ugcugggugcaggggggcag

SEQ ID NO: 1042352 - RNA, 19 nt, Human
uggaauggggcggcuuccu

SEQ ID NO: 1042353 - RNA, 19 nt, Human
uggagacccugauguggug

SEQ ID NO: 1042354 - RNA, 20 nt, Human
uggagagcagagggagagac

SEQ ID NO: 1042355 - RNA, 19 nt, Human
uggagccguguggcaacug

SEQ ID NO: 1042356 - RNA, 19 nt, Human
uggaugggcuugaguucug

SEQ ID NO: 1042357 - RNA, 19 nt, Human
uggcaggcaggagggccug

SEQ ID NO: 1042358 - RNA, 20 nt, Human
uggcaggcaggagggccugu

SEQ ID NO: 1042359 - RNA, 19 nt, Human
uggccaaggcccgcaggug

SEQ ID NO: 1042360 - RNA, 19 nt, Human
uggccacgcaucuggcuuc

SEQ ID NO: 1042361 - RNA, 22 nt, Human
uggccacgcaucuggcuucugu

SEQ ID NO: 1042362 - RNA, 18 nt, Human
uggcccaucgcuguagcu

SEQ ID NO: 1042363 - RNA, 21 nt, Human
uggcggaggggcucugaagug

SEQ ID NO: 1042364 - RNA, 18 nt, Human
ugggacaggaauuaccug

SEQ ID NO: 1042365 - RNA, 18 nt, Human
ugggaggggguggggcag

SEQ ID NO: 1042366 - RNA, 18 nt, Human
ugggcucugcggccugug

SEQ ID NO: 1042367 - RNA, 24 nt, Human
ugggugcaggggggcaguccaggg

SEQ ID NO: 1042368 - RNA, 21 nt, Human
ugggugcugucucauggaugg

SEQ ID NO: 1042369 - RNA, 19 nt, Human
uggucucucuguaccuguc

SEQ ID NO: 1042370 - RNA, 25 nt, Human
ugguggaauggggcggcuuccuuuu

SEQ ID NO: 1042371 - RNA, 19 nt, Human
uguagaaggacuuaaccuc

SEQ ID NO: 1042372 - RNA, 23 nt, Human
ugucucauggaugggcuugaguu

SEQ ID NO: 1042373 - RNA, 20 nt, Human
ugugaagggacucagacgca

SEQ ID NO: 1042374 - RNA, 25 nt, Human
ugugcacaggacauggagccgugug

SEQ ID NO: 1042375 - RNA, 21 nt, Human
ugugcacauggccacgucgug

SEQ ID NO: 1042376 - RNA, 20 nt, Human
ugugggugcacgugggcggc

SEQ ID NO: 1042377 - RNA, 19 nt, Human
uguggugguggucaagagc

SEQ ID NO: 1042378 - RNA, 22 nt, Human
uuacuggaaaagaggccacuuu

SEQ ID NO: 1042379 - RNA, 20 nt, Human
uucaugggucgggggcaggg

SEQ ID NO: 1042380 - RNA, 21 nt, Human
uucccggggggcacugugagg

SEQ ID NO: 1042381 - RNA, 23 nt, Human
uugcugcuuggcaggcaggaggg

SEQ ID NO: 1042382 - RNA, 23 nt, Human
uuguguccacaccagccuggguc

SEQ ID NO: 1042383 - RNA, 20 nt, Human
uuucauaucaggugggcuuc

SEQ ID NO: 1042384 - RNA, 22 nt, Human
uuuccagcgcuggccacggagc

SEQ ID NO: 1042385 - RNA, 18 nt, Human
uuuugcugcugauguggu

SEQ ID NO: 1042386 - RNA, 23 nt, Human
caggaagggcuggaggagaggcg

SEQ ID NO: 1042387 - RNA, 19 nt, Human
ggcuggaggagaggcgugg

SEQ ID NO: 1042388 - RNA, 25 nt, Human
ggcuggaggagaggcguggguccca

SEQ ID NO: 1042389 - RNA, 22 nt, Human
gggcuggaggagaggcgugggu

SEQ ID NO: 1042390 - RNA, 18 nt, Human
ucccugacauggcucugg

SEQ ID NO: 1042391 - RNA, 19 nt, Human
ugacauggcucuggaucuc

SEQ ID NO: 1042392 - RNA, 23 nt, Human
aacaguuuuccaaaauaagggca

SEQ ID NO: 1042393 - RNA, 26 nt, Human
uccaaaauaagggcacguggugagaa

SEQ ID NO: 1042394 - RNA, 18 nt, Human
ugaaaugaacaguuuucc

SEQ ID NO: 1042395 - RNA, 21 nt, Human
ugaaaugaacaguuuuccaaa

SEQ ID NO: 1042396 - RNA, 18 nt, Human
uggaagcuugccgauguu

SEQ ID NO: 1042397 - RNA, 23 nt, Human
uggugagaaauccuaaguccguu

SEQ ID NO: 1042398 - RNA, 18 nt, Human
uuccaaaauaagggcacg

SEQ ID NO: 1042399 - RNA, 19 nt, Human
aagggcgccuccuccuuga

SEQ ID NO: 1042400 - RNA, 22 nt, Human
cccgcgcggccaggggcgccuc

SEQ ID NO: 1042401 - RNA, 19 nt, Human
cgccuccuccuugaugccc

SEQ ID NO: 1042402 - RNA, 24 nt, Human
cugcccggggcggcggcugggcug

SEQ ID NO: 1042403 - RNA, 18 nt, Human
gccuccuccuugaugccc

SEQ ID NO: 1042404 - RNA, 20 nt, Human
ggcggcggcugggcuguccg

SEQ ID NO: 1042405 - RNA, 24 nt, Human
aaaaaaggaaaaagaaagacaaaa

SEQ ID NO: 1042406 - RNA, 25 nt, Human
aaaaagaaagacaaaggaaaaaaga

SEQ ID NO: 1042407 - RNA, 21 nt, Human
aaaaaggaaaaagaaagacaa

SEQ ID NO: 1042408 - RNA, 19 nt, Human
aaaaauuguaggaaagcag

SEQ ID NO: 1042409 - RNA, 21 nt, Human
aaaccaccaccaccgcaucca

SEQ ID NO: 1042410 - RNA, 21 nt, Human
aaaguucacaucugugaggug

SEQ ID NO: 1042411 - RNA, 19 nt, Human
aagaagaggcagggggucg

SEQ ID NO: 1042412 - RNA, 24 nt, Human
aagcagcagacuugaacuggagca

SEQ ID NO: 1042413 - RNA, 21 nt, Human
accaccaccaccgcauccaca

SEQ ID NO: 1042414 - RNA, 19 nt, Human
agacaaaggaaaaaagaaa

SEQ ID NO: 1042415 - RNA, 22 nt, Human
aggaaaaaagaaauauggaugg

SEQ ID NO: 1042416 - RNA, 21 nt, Human
aggaaaaagaaagacaaagga

SEQ ID NO: 1042417 - RNA, 20 nt, Human
aggcccaggacacuucacgg

SEQ ID NO: 1042418 - RNA, 19 nt, Human
caccaccgcauccacaggc

SEQ ID NO: 1042419 - RNA, 18 nt, Human
caccuuuuuuuuuuuucu

SEQ ID NO: 1042420 - RNA, 21 nt, Human
cacggaaaccaccaccaccgc

SEQ ID NO: 1042421 - RNA, 20 nt, Human
cacuucacggccaucacagc

SEQ ID NO: 1042422 - RNA, 25 nt, Human
ccacauguguguuucacacagaccu

SEQ ID NO: 1042423 - RNA, 18 nt, Human
ccaccaccaccgcaucca

SEQ ID NO: 1042424 - RNA, 23 nt, Human
ccaggacacuucacggccaucac

SEQ ID NO: 1042425 - RNA, 23 nt, Human
cccccacauguguguuucacaca

SEQ ID NO: 1042426 - RNA, 20 nt, Human
ccuaaagaaagacguggaac

SEQ ID NO: 1042427 - RNA, 20 nt, Human
cuggagcaauucuaacaagg

SEQ ID NO: 1042428 - RNA, 22 nt, Human
cuguacaaacuacauuuaaaau

SEQ ID NO: 1042429 - RNA, 23 nt, Human
gaaguccugccuggucccugccu

SEQ ID NO: 1042430 - RNA, 24 nt, Human
gaggguuuuucugaaguccugccu

SEQ ID NO: 1042431 - RNA, 21 nt, Human
gccuaaagaaagacguggaac

SEQ ID NO: 1042432 - RNA, 25 nt, Human
gcugucaccuuuuuuuuuuuucuuu

SEQ ID NO: 1042433 - RNA, 25 nt, Human
gcuuguuuauuugucagaggccucg

SEQ ID NO: 1042434 - RNA, 23 nt, Human
ggaaaaagaaagacaaaggaaaa

SEQ ID NO: 1042435 - RNA, 23 nt, Human
ggaaacuguaaggagacuguguc

SEQ ID NO: 1042436 - RNA, 18 nt, Human
ggaagaagaggcaggggg

SEQ ID NO: 1042437 - RNA, 18 nt, Human
gggggaaacaauagcagg

SEQ ID NO: 1042438 - RNA, 23 nt, Human
guuuguuuuguuuuuuuaaaaaa

SEQ ID NO: 1042439 - RNA, 23 nt, Human
uaaagaaagacguggaaccucca

SEQ ID NO: 1042440 - RNA, 22 nt, Human
uagcaggugaaacuauuguggg

SEQ ID NO: 1042441 - RNA, 23 nt, Human
ucacggaaaccaccaccaccgca

SEQ ID NO: 1042442 - RNA, 20 nt, Human
ucugaaguccugccuggucc

SEQ ID NO: 1042443 - RNA, 19 nt, Human
ugaguuauugguugugugu

SEQ ID NO: 1042444 - RNA, 20 nt, Human
ugcauuuccuaccuuuugac

SEQ ID NO: 1042445 - RNA, 19 nt, Human
ugccuaaagaaagacgugg

SEQ ID NO: 1042446 - RNA, 21 nt, Human
ugccuaaagaaagacguggaa

SEQ ID NO: 1042447 - RNA, 21 nt, Human
uggaagaagaggcaggggguc

SEQ ID NO: 1042448 - RNA, 22 nt, Human
uggcaaaacugaucaguuuuaa

SEQ ID NO: 1042449 - RNA, 19 nt, Human
uggcuuguuuauuugucag

SEQ ID NO: 1042450 - RNA, 24 nt, Human
uggcuuguuuauuugucagaggcc

SEQ ID NO: 1042451 - RNA, 22 nt, Human
ugguuugcugucccaacugcac

SEQ ID NO: 1042452 - RNA, 20 nt, Human
ugucagaggccucggaaggc

SEQ ID NO: 1042453 - RNA, 22 nt, Human
ugucccaacugcacauaaaugu

SEQ ID NO: 1042454 - RNA, 22 nt, Human
uguccugggugggggaaacaau

SEQ ID NO: 1042455 - RNA, 19 nt, Human
uguuuguuuuguuuuuuua

SEQ ID NO: 1042456 - RNA, 25 nt, Human
uuaauccagccucacccccacaugu

SEQ ID NO: 1042457 - RNA, 18 nt, Human
uucacggaaaccaccacc

SEQ ID NO: 1042458 - RNA, 18 nt, Human
uucacggaaaccaccacc

SEQ ID NO: 1042459 - RNA, 26 nt, Human
uucccauaugaauacagguguggucu

SEQ ID NO: 1042460 - RNA, 27 nt, Human
uugguuguguguguuuuccuuuuugca

SEQ ID NO: 1042461 - RNA, 20 nt, Human
uuugacauauauauauauau

SEQ ID NO: 1042462 - RNA, 24 nt, Human
uuuuccuuuuugcauaagaaauau

SEQ ID NO: 1042463 - RNA, 21 nt, Human
uuuugacauauauauauauau

SEQ ID NO: 1042464 - RNA, 18 nt, Human
uuuuguuuguuuuguuuu

SEQ ID NO: 1042465 - RNA, 21 nt, Human
uuuuguuuguuuuguuuuuuu

SEQ ID NO: 1042466 - RNA, 23 nt, Human
uuuuucuuuuuugcauuuccuac

SEQ ID NO: 1042467 - RNA, 24 nt, Human
uuuuuuuuuuucuuuuuugcauuu

SEQ ID NO: 1042468 - RNA, 21 nt, Human
uuuuuuuuuuuucuuuuuugg

SEQ ID NO: 1042469 - RNA, 19 nt, Human
agcgcagcucuaaaacacu

SEQ ID NO: 1042470 - RNA, 19 nt, Human
cagcgcaagaaguguccag

SEQ ID NO: 1042471 - RNA, 19 nt, Human
cagcuccugacuuggcacu

SEQ ID NO: 1042472 - RNA, 19 nt, Human
ccuuuaaaaugggaacaag

SEQ ID NO: 1042473 - RNA, 22 nt, Human
cgacagaagcagaugggccaaa

SEQ ID NO: 1042474 - RNA, 21 nt, Human
cuuggcacugaggcaccgaca

SEQ ID NO: 1042475 - RNA, 24 nt, Human
gaaccuggcagcacuucccuuuaa

SEQ ID NO: 1042476 - RNA, 22 nt, Human
gacagaagcagaugggccaaac

SEQ ID NO: 1042477 - RNA, 18 nt, Human
gaggcaccgacagaagca

SEQ ID NO: 1042478 - RNA, 22 nt, Human
ugaggaaccuggcagcacuucc

SEQ ID NO: 1042479 - RNA, 19 nt, Human
ugggaacaagcagcuccug

SEQ ID NO: 1042480 - RNA, 24 nt, Human
uucccuuuaaaaugggaacaagca

SEQ ID NO: 1042481 - RNA, 23 nt, Human
uuuaaaaugggaacaagcagcuc

SEQ ID NO: 1042482 - RNA, 23 nt, Human
uuuagaacugcagcgcaagaagu

SEQ ID NO: 1042483 - RNA, 19 nt, Human
aagccaaacauucuuucca

SEQ ID NO: 1042484 - RNA, 21 nt, Human
acacuaaaaaaaaaaaaaacc

SEQ ID NO: 1042485 - RNA, 20 nt, Human
acccuuaaauuaaagccaaa

SEQ ID NO: 1042486 - RNA, 20 nt, Human
accuuuuucccagcgcgggc

SEQ ID NO: 1042487 - RNA, 21 nt, Human
agccaaacauucuuuccaagg

SEQ ID NO: 1042488 - RNA, 21 nt, Human
cagcgcgggccuuggaacuuc

SEQ ID NO: 1042489 - RNA, 22 nt, Human
cagcgcgggccuuggaacuucc

SEQ ID NO: 1042490 - RNA, 19 nt, Human
ccccccaccuuuuucccag

SEQ ID NO: 1042491 - RNA, 21 nt, Human
ccccccaccuuuuucccagcg

SEQ ID NO: 1042492 - RNA, 18 nt, Human
cuuaaauuaaagccaaac

SEQ ID NO: 1042493 - RNA, 18 nt, Human
gugaaacaaaaucaugag

SEQ ID NO: 1042494 - RNA, 23 nt, Human
uaaagccaaacauucuuuccaag

SEQ ID NO: 1042495 - RNA, 22 nt, Human
uccagagucuguuuuugaaaca

SEQ ID NO: 1042496 - RNA, 19 nt, Human
uccccugguccccccaccu

SEQ ID NO: 1042497 - RNA, 19 nt, Human
ugaaacaaaaucaugaguc

SEQ ID NO: 1042498 - RNA, 23 nt, Human
uuccuuuccgcuguuacuuccgu

SEQ ID NO: 1042499 - RNA, 18 nt, Human
uugaggcaacaacugaag

SEQ ID NO: 1042500 - RNA, 18 nt, Human
aaaagaggagaucuuuaa

SEQ ID NO: 1042501 - RNA, 18 nt, Human
aaagcccaucuucacaag

SEQ ID NO: 1042502 - RNA, 23 nt, Human
aaagcccaucuucacaagagcuu

SEQ ID NO: 1042503 - RNA, 19 nt, Human
aagagcuuuguccucugcu

SEQ ID NO: 1042504 - RNA, 19 nt, Human
aaguuccaaagcagugugg

SEQ ID NO: 1042505 - RNA, 21 nt, Human
agaaaagcccaucuucacaag

SEQ ID NO: 1042506 - RNA, 21 nt, Human
caaaacacaaauauaaaugcu

SEQ ID NO: 1042507 - RNA, 22 nt, Human
caaaacuaaaacguuugagcaa

SEQ ID NO: 1042508 - RNA, 20 nt, Human
caaguuccaaagcagugugg

SEQ ID NO: 1042509 - RNA, 23 nt, Human
caaguuccaaagcaguguggaaa

SEQ ID NO: 1042510 - RNA, 24 nt, Human
cacaaaacuaaaacguuugagcaa

SEQ ID NO: 1042511 - RNA, 22 nt, Human
cagaagaaaagcccaucuucac

SEQ ID NO: 1042512 - RNA, 18 nt, Human
cagcuuaacugggaaaau

SEQ ID NO: 1042513 - RNA, 20 nt, Human
caucaucauccuccucaaca

SEQ ID NO: 1042514 - RNA, 23 nt, Human
ccaaagcaguguggaaagauguc

SEQ ID NO: 1042515 - RNA, 23 nt, Human
ccuccucaacaucauuauuacuu

SEQ ID NO: 1042516 - RNA, 20 nt, Human
ccuggcacaggugguuuuca

SEQ ID NO: 1042517 - RNA, 23 nt, Human
ccuugcucaggugguaagggcuc

SEQ ID NO: 1042518 - RNA, 18 nt, Human
cuacugcaaguuccaaag

SEQ ID NO: 1042519 - RNA, 23 nt, Human
cuccuuugcucagguguuaaggg

SEQ ID NO: 1042520 - RNA, 19 nt, Human
cucgcgccgccuucuccuc

SEQ ID NO: 1042521 - RNA, 20 nt, Human
cucgcgccgccuucuccucc

SEQ ID NO: 1042522 - RNA, 22 nt, Human
gaaaagcccaucuucacaagag

SEQ ID NO: 1042523 - RNA, 20 nt, Human
gucacuuaacccucucccca

SEQ ID NO: 1042524 - RNA, 20 nt, Human
uaugugcuuaagguaggugu

SEQ ID NO: 1042525 - RNA, 22 nt, Human
ugcaaguuccaaagcagugugg

SEQ ID NO: 1042526 - RNA, 19 nt, Human
ugggaaaaugugucccugg

SEQ ID NO: 1042527 - RNA, 21 nt, Human
uggggagggacggagcgggug

SEQ ID NO: 1042528 - RNA, 22 nt, Human
uugcucaggugguaagggcuca

SEQ ID NO: 1042529 - RNA, 20 nt, Human
uuuaaaagaggagaucuuua

SEQ ID NO: 1042530 - RNA, 21 nt, Human
uuugacacucuccuugcucag

SEQ ID NO: 1042531 - RNA, 24 nt, Human
uuuuacagguaccucaucauguua

SEQ ID NO: 1042532 - RNA, 26 nt, Human
uuuuacagguaccucaucauguuacc

SEQ ID NO: 1042533 - RNA, 21 nt, Human
uuuucagaagaaaagcccauc

SEQ ID NO: 1042534 - RNA, 21 nt, Human
uggaagccacuagcugcucuu

SEQ ID NO: 1042535 - RNA, 18 nt, Human
uguggaagccacuagcug

SEQ ID NO: 1042536 - RNA, 27 nt, Human
aaacagucaaagaaauugcagucuuca

SEQ ID NO: 1042537 - RNA, 18 nt, Human
aacacacucaccugccca

SEQ ID NO: 1042538 - RNA, 21 nt, Human
aacacgcuggaggcugcucuc

SEQ ID NO: 1042539 - RNA, 19 nt, Human
aaccagguacaagugcucu

SEQ ID NO: 1042540 - RNA, 21 nt, Human
aagcuuccagaacacgcugga

SEQ ID NO: 1042541 - RNA, 24 nt, Human
acacacaugcagacacucaugggc

SEQ ID NO: 1042542 - RNA, 19 nt, Human
acacgcuggaggcugcucu

SEQ ID NO: 1042543 - RNA, 18 nt, Human
acaggaaagaacagcugg

SEQ ID NO: 1042544 - RNA, 21 nt, Human
accacacucaccugugcacac

SEQ ID NO: 1042545 - RNA, 23 nt, Human
accagguacaagugcucucccau

SEQ ID NO: 1042546 - RNA, 21 nt, Human
accccagagagcacaggggaa

SEQ ID NO: 1042547 - RNA, 20 nt, Human
acccuaacccacauccccaa

SEQ ID NO: 1042548 - RNA, 21 nt, Human
acccuaacccacauccccaac

SEQ ID NO: 1042549 - RNA, 21 nt, Human
accugugcacacucacacaca

SEQ ID NO: 1042550 - RNA, 22 nt, Human
acucaccugugcacacucacac

SEQ ID NO: 1042551 - RNA, 22 nt, Human
acuccucaugagcacaccacac

SEQ ID NO: 1042552 - RNA, 23 nt, Human
acuccucaugagcacaccacacu

SEQ ID NO: 1042553 - RNA, 25 nt, Human
agaacacgcuggaggcugcucuccg

SEQ ID NO: 1042554 - RNA, 18 nt, Human
agaacggcaccccagaga

SEQ ID NO: 1042555 - RNA, 18 nt, Human
agaagaaauccagccaag

SEQ ID NO: 1042556 - RNA, 20 nt, Human
agaggcgcggaaaaccaaug

SEQ ID NO: 1042557 - RNA, 18 nt, Human
agcacaccacacucaccu

SEQ ID NO: 1042558 - RNA, 25 nt, Human
agcauguuuaaggccagagaguggc

SEQ ID NO: 1042559 - RNA, 22 nt, Human
aggaaagaacagcuggaacucg

SEQ ID NO: 1042560 - RNA, 20 nt, Human
aggccagagaguggcuacuu

SEQ ID NO: 1042561 - RNA, 20 nt, Human
aggcgacaggucagaggcca

SEQ ID NO: 1042562 - RNA, 22 nt, Human
aggcgacaggucagaggccagg

SEQ ID NO: 1042563 - RNA, 21 nt, Human
agggaggucuguaccuccucc

SEQ ID NO: 1042564 - RNA, 22 nt, Human
caaggcgacaggucagaggcca

SEQ ID NO: 1042565 - RNA, 23 nt, Human
caauguggagaccagaacggcac

SEQ ID NO: 1042566 - RNA, 20 nt, Human
cacaauguggagaccagaac

SEQ ID NO: 1042567 - RNA, 23 nt, Human
cacacaaucacauacacaugccc

SEQ ID NO: 1042568 - RNA, 21 nt, Human
cacaccacacucaccugugca

SEQ ID NO: 1042569 - RNA, 28 nt, Human
cacaggcauacacaucauuuguaugcac

SEQ ID NO: 1042570 - RNA, 21 nt, Human
cacagguccucgcagaggucc

SEQ ID NO: 1042571 - RNA, 24 nt, Human
cacaugcucacaugcucauuugca

SEQ ID NO: 1042572 - RNA, 18 nt, Human
cacccuaacccacauccc

SEQ ID NO: 1042573 - RNA, 20 nt, Human
cacccuaacccacaucccca

SEQ ID NO: 1042574 - RNA, 22 nt, Human
caccugcccacacucacacaau

SEQ ID NO: 1042575 - RNA, 19 nt, Human
cacucacacaugcucacau

SEQ ID NO: 1042576 - RNA, 18 nt, Human
cacuccccacccuaaccc

SEQ ID NO: 1042577 - RNA, 24 nt, Human
cagaggccagggugggacgagagc

SEQ ID NO: 1042578 - RNA, 19 nt, Human
cagcacccagcccgcgguc

SEQ ID NO: 1042579 - RNA, 22 nt, Human
cagcacccagcccgcgguccac

SEQ ID NO: 1042580 - RNA, 23 nt, Human
cagcagcgcggccgccagcaccc

SEQ ID NO: 1042581 - RNA, 20 nt, Human
caggcauacacaucauuugu

SEQ ID NO: 1042582 - RNA, 26 nt, Human
cauacacaugcccacacuuauauaca

SEQ ID NO: 1042583 - RNA, 26 nt, Human
cauccccaacacacucaccugcccac

SEQ ID NO: 1042584 - RNA, 18 nt, Human
ccacccuaacccacaucc

SEQ ID NO: 1042585 - RNA, 21 nt, Human
ccacuccccacccuaacccac

SEQ ID NO: 1042586 - RNA, 25 nt, Human
ccagaacggcaccccagagagcaca

SEQ ID NO: 1042587 - RNA, 22 nt, Human
ccaggaugcgccggcucuucuc

SEQ ID NO: 1042588 - RNA, 20 nt, Human
cccacacucacacaaucaca

SEQ ID NO: 1042589 - RNA, 22 nt, Human
cccacccuaacccacaucccca

SEQ ID NO: 1042590 - RNA, 20 nt, Human
ccccaacacacucaccugcc

SEQ ID NO: 1042591 - RNA, 25 nt, Human
ccccacccuaacccacauccccaac

SEQ ID NO: 1042592 - RNA, 24 nt, Human
ccccagagagcacaggggaaaugg

SEQ ID NO: 1042593 - RNA, 19 nt, Human
ccccgcgcgcccgccgccc

SEQ ID NO: 1042594 - RNA, 20 nt, Human
ccccggccagcgugccgccc

SEQ ID NO: 1042595 - RNA, 20 nt, Human
cccggccagcgugccgcccu

SEQ ID NO: 1042596 - RNA, 18 nt, Human
ccgcgccagucggccugc

SEQ ID NO: 1042597 - RNA, 19 nt, Human
ccgcgccagucggccugca

SEQ ID NO: 1042598 - RNA, 21 nt, Human
ccuccccugccuccucuucca

SEQ ID NO: 1042599 - RNA, 20 nt, Human
ccugcaccacccggcagggc

SEQ ID NO: 1042600 - RNA, 21 nt, Human
ccugcagcaccuucuugccuc

SEQ ID NO: 1042601 - RNA, 24 nt, Human
ccugugcacacucaccugugcaca

SEQ ID NO: 1042602 - RNA, 19 nt, Human
cgcccugguaguccuggca

SEQ ID NO: 1042603 - RNA, 18 nt, Human
cgcggcgaaggcgaggag

SEQ ID NO: 1042604 - RNA, 26 nt, Human
cggcaccccagagagcacaggggaaa

SEQ ID NO: 1042605 - RNA, 22 nt, Human
cuaacccacauccccaacacac

SEQ ID NO: 1042606 - RNA, 28 nt, Human
cuaacccacauccccaacacacucaccu

SEQ ID NO: 1042607 - RNA, 21 nt, Human
cucacacaaucacauacacau

SEQ ID NO: 1042608 - RNA, 21 nt, Human
cucacacacaugcagacacuc

SEQ ID NO: 1042609 - RNA, 23 nt, Human
cucaugagcacaccacacucacc

SEQ ID NO: 1042610 - RNA, 22 nt, Human
cucccucaucucauuuuacaca

SEQ ID NO: 1042611 - RNA, 23 nt, Human
cucccucaucucauuuuacacaa

SEQ ID NO: 1042612 - RNA, 22 nt, Human
cugaagcuggaaagagaccgca

SEQ ID NO: 1042613 - RNA, 24 nt, Human
cugcagcucccucaguguggcuug

SEQ ID NO: 1042614 - RNA, 21 nt, Human
cuggaaagagaccgcagagcc

SEQ ID NO: 1042615 - RNA, 21 nt, Human
cuguaacugcagcugaagcug

SEQ ID NO: 1042616 - RNA, 19 nt, Human
cuucucugccuccugcagc

SEQ ID NO: 1042617 - RNA, 22 nt, Human
cuuuaaaacaauggcagaagaa

SEQ ID NO: 1042618 - RNA, 21 nt, Human
gaacggcaccccagagagcac

SEQ ID NO: 1042619 - RNA, 26 nt, Human
gaagcuuccagaacacgcuggaggcu

SEQ ID NO: 1042620 - RNA, 18 nt, Human
gagcagcagcgcggccgc

SEQ ID NO: 1042621 - RNA, 18 nt, Human
gaggggcgggaagcugga

SEQ ID NO: 1042622 - RNA, 20 nt, Human
gcagcaccuucuugccucug

SEQ ID NO: 1042623 - RNA, 21 nt, Human
gcccgcgccuccugcaccacc

SEQ ID NO: 1042624 - RNA, 19 nt, Human
gcccugguaguccuggcac

SEQ ID NO: 1042625 - RNA, 18 nt, Human
gccgccagcacccagccc

SEQ ID NO: 1042626 - RNA, 18 nt, Human
gcuacuucucugccuccu

SEQ ID NO: 1042627 - RNA, 18 nt, Human
ggaagcuggagaaggccu

SEQ ID NO: 1042628 - RNA, 21 nt, Human
ggcauacacaucauuuguaug

SEQ ID NO: 1042629 - RNA, 18 nt, Human
ggcgggaagcuggagaag

SEQ ID NO: 1042630 - RNA, 20 nt, Human
gggaggucuguaccuccucc

SEQ ID NO: 1042631 - RNA, 26 nt, Human
ggggaccccagggucugcacauuccu

SEQ ID NO: 1042632 - RNA, 21 nt, Human
gguaacgauuuacaggaaaga

SEQ ID NO: 1042633 - RNA, 18 nt, Human
uaaccagguacaagugcu

SEQ ID NO: 1042634 - RNA, 23 nt, Human
uaacccacauccccaacacacuc

SEQ ID NO: 1042635 - RNA, 23 nt, Human
uaacugcagcugaagcuggaaag

SEQ ID NO: 1042636 - RNA, 24 nt, Human
uauacacaugcugacacccgugca

SEQ ID NO: 1042637 - RNA, 26 nt, Human
uauauacacaugcugacacccgugca

SEQ ID NO: 1042638 - RNA, 23 nt, Human
ucacaugcucauuugcacccaga

SEQ ID NO: 1042639 - RNA, 19 nt, Human
ucccacuggggaccccagg

SEQ ID NO: 1042640 - RNA, 24 nt, Human
uccccaacacacucaccugcccac

SEQ ID NO: 1042641 - RNA, 22 nt, Human
uccccacccuaacccacauccc

SEQ ID NO: 1042642 - RNA, 21 nt, Human
uccucuuccaacaggcugagg

SEQ ID NO: 1042643 - RNA, 23 nt, Human
uccuuggacuugaggaccacggg

SEQ ID NO: 1042644 - RNA, 25 nt, Human
ucucuggcagcagcacuugccacuc

SEQ ID NO: 1042645 - RNA, 19 nt, Human
ugaaaaacagucaaagaaa

SEQ ID NO: 1042646 - RNA, 22 nt, Human
ugaaaaacagucaaagaaauug

SEQ ID NO: 1042647 - RNA, 23 nt, Human
ugaagcuggaaagagaccgcaga

SEQ ID NO: 1042648 - RNA, 25 nt, Human
ugcacacucacacacaugcagacac

SEQ ID NO: 1042649 - RNA, 19 nt, Human
ugcaggcagcguuggaaca

SEQ ID NO: 1042650 - RNA, 25 nt, Human
ugcccacacuuauauacacaugcug

SEQ ID NO: 1042651 - RNA, 22 nt, Human
ugcuagguaggcaagauguucc

SEQ ID NO: 1042652 - RNA, 21 nt, Human
uggagaccagaacggcacccc

SEQ ID NO: 1042653 - RNA, 21 nt, Human
uggccacccuccccugccucc

SEQ ID NO: 1042654 - RNA, 18 nt, Human
ugggauaaccagguacaa

SEQ ID NO: 1042655 - RNA, 21 nt, Human
ugggauaaccagguacaagug

SEQ ID NO: 1042656 - RNA, 21 nt, Human
uguaccuccucccucaucuca

SEQ ID NO: 1042657 - RNA, 22 nt, Human
ugugcacacucacacacaugca

SEQ ID NO: 1042658 - RNA, 25 nt, Human
ugugcacacucacacacaugcagac

SEQ ID NO: 1042659 - RNA, 20 nt, Human
ugugcacacucaccugugca

SEQ ID NO: 1042660 - RNA, 19 nt, Human
ugugcaguuuugcucaagg

SEQ ID NO: 1042661 - RNA, 24 nt, Human
uuaacgugguaacgauuuacagga

SEQ ID NO: 1042662 - RNA, 23 nt, Human
uucaucuccugugcaguuuugcu

SEQ ID NO: 1042663 - RNA, 18 nt, Human
uuuaaggccagagagugg

SEQ ID NO: 1042664 - RNA, 20 nt, Human
uuuacaggaaagaacagcug

SEQ ID NO: 1042665 - RNA, 23 nt, Human
aaaagccguuccuuuauucugcc

SEQ ID NO: 1042666 - RNA, 21 nt, Human
aaccuccucccuccagaccuc

SEQ ID NO: 1042667 - RNA, 27 nt, Human
aaccugucuucccagagaccucccccg

SEQ ID NO: 1042668 - RNA, 20 nt, Human
aauguccuccccagacaccc

SEQ ID NO: 1042669 - RNA, 19 nt, Human
accccccucccucaacaac

SEQ ID NO: 1042670 - RNA, 25 nt, Human
accccgaggcccccagcugaggagc

SEQ ID NO: 1042671 - RNA, 18 nt, Human
acuccugccugagguccc

SEQ ID NO: 1042672 - RNA, 27 nt, Human
agacaccccuccacacaggcccaccuu

SEQ ID NO: 1042673 - RNA, 22 nt, Human
agccgaacgcccuuucagccca

SEQ ID NO: 1042674 - RNA, 20 nt, Human
cacacaggcccaccuaagug

SEQ ID NO: 1042675 - RNA, 20 nt, Human
caccccuccacacaggccca

SEQ ID NO: 1042676 - RNA, 21 nt, Human
cagcccagccuguucaauguc

SEQ ID NO: 1042677 - RNA, 23 nt, Human
cagccuguucaauguccucccca

SEQ ID NO: 1042678 - RNA, 26 nt, Human
caggaugggcccaggccuuuccuacc

SEQ ID NO: 1042679 - RNA, 21 nt, Human
ccaccuaagugacucacaccc

SEQ ID NO: 1042680 - RNA, 22 nt, Human
ccagacaccccuccacacaggc

SEQ ID NO: 1042681 - RNA, 24 nt, Human
ccagagaccucccccgacagccga

SEQ ID NO: 1042682 - RNA, 22 nt, Human
cccagccuguucaauguccucc

SEQ ID NO: 1042683 - RNA, 22 nt, Human
cccuccacacaggcccaccuaa

SEQ ID NO: 1042684 - RNA, 19 nt, Human
cccuuucagcccagccugu

SEQ ID NO: 1042685 - RNA, 19 nt, Human
ccuccucccuccagaccuc

SEQ ID NO: 1042686 - RNA, 22 nt, Human
ccucugagaccuucaccacagg

SEQ ID NO: 1042687 - RNA, 22 nt, Human
ccugaggauccacaaccuccuc

SEQ ID NO: 1042688 - RNA, 19 nt, Human
ccuggagaccccccucccu

SEQ ID NO: 1042689 - RNA, 21 nt, Human
ccuggagaccccccucccuca

SEQ ID NO: 1042690 - RNA, 26 nt, Human
ccuggagaccccccucccucaacaac

SEQ ID NO: 1042691 - RNA, 19 nt, Human
cuccacacaggcccaccuu

SEQ ID NO: 1042692 - RNA, 20 nt, Human
cucccccgacagccgaacgc

SEQ ID NO: 1042693 - RNA, 21 nt, Human
cugaggcugcagccgggggcc

SEQ ID NO: 1042694 - RNA, 20 nt, Human
cuggagaccccccucccuca

SEQ ID NO: 1042695 - RNA, 21 nt, Human
cuggagaccccccucccucaa

SEQ ID NO: 1042696 - RNA, 19 nt, Human
gauccacaaccuccucccu

SEQ ID NO: 1042697 - RNA, 23 nt, Human
gauccacaaccuccucccuccag

SEQ ID NO: 1042698 - RNA, 19 nt, Human
gcccccagcugaggagccc

SEQ ID NO: 1042699 - RNA, 21 nt, Human
gcccccagcugaggagcccgc

SEQ ID NO: 1042700 - RNA, 23 nt, Human
gcugcagccgggggccacaaggg

SEQ ID NO: 1042701 - RNA, 20 nt, Human
ggagaccuugagacuucccc

SEQ ID NO: 1042702 - RNA, 19 nt, Human
ggcaggaugggcccaggcc

SEQ ID NO: 1042703 - RNA, 24 nt, Human
ggcugcagccgggggccacaaggg

SEQ ID NO: 1042704 - RNA, 18 nt, Human
gggcaggaugggcccagg

SEQ ID NO: 1042705 - RNA, 23 nt, Human
gggcaggaugggcccaggccuuu

SEQ ID NO: 1042706 - RNA, 18 nt, Human
uaccccgaggcccccagc

SEQ ID NO: 1042707 - RNA, 20 nt, Human
uccacaaccuccucccucca

SEQ ID NO: 1042708 - RNA, 24 nt, Human
uccacaaccuccucccuccagacc

SEQ ID NO: 1042709 - RNA, 30 nt, Human
uccccagacaccccuccacacaggcccacu

SEQ ID NO: 1042710 - RNA, 19 nt, Human
uccccugguacuccugccu

SEQ ID NO: 1042711 - RNA, 23 nt, Human
uccccugguacuccugccugagg

SEQ ID NO: 1042712 - RNA, 19 nt, Human
ucccuccagaccucguucc

SEQ ID NO: 1042713 - RNA, 20 nt, Human
uccugccugaggucccugcu

SEQ ID NO: 1042714 - RNA, 21 nt, Human
ugaggucccugcuucugggga

SEQ ID NO: 1042715 - RNA, 22 nt, Human
ugcccuagggcuccuuagacac

SEQ ID NO: 1042716 - RNA, 23 nt, Human
uguccuccccagacaccccucca

SEQ ID NO: 1042717 - RNA, 28 nt, Human
uucagcccagccuguucaauguccuccu

SEQ ID NO: 1042718 - RNA, 22 nt, Human
uuccuccacacuccuccccugg

SEQ ID NO: 1042719 - RNA, 23 nt, Human
uuugcugugaggaaccugucuuc

SEQ ID NO: 1042720 - RNA, 19 nt, Human
ccuggguuaauuuugccaa

SEQ ID NO: 1042721 - RNA, 22 nt, Human
aaguauaugauggcauugaagg

SEQ ID NO: 1042722 - RNA, 19 nt, Human
caguaugaauucucugaug

SEQ ID NO: 1042723 - RNA, 21 nt, Human
cauaggaugaagcuugacuga

SEQ ID NO: 1042724 - RNA, 19 nt, Human
cucuccuguaugaauucua

SEQ ID NO: 1042725 - RNA, 23 nt, Human
gaacaugaaguaaaggcuuugcc

SEQ ID NO: 1042726 - RNA, 24 nt, Human
gaaguauaugauggcauugaaggg

SEQ ID NO: 1042727 - RNA, 18 nt, Human
gaccacagagugaagacc

SEQ ID NO: 1042728 - RNA, 18 nt, Human
ugaaguaaaggcuuugcc

SEQ ID NO: 1042729 - RNA, 20 nt, Human
ugcauggaaugaccacagag

SEQ ID NO: 1042730 - RNA, 18 nt, Human
ugucacagucaugauauu

SEQ ID NO: 1042731 - RNA, 22 nt, Human
ugucacauucuucacauuugua

SEQ ID NO: 1042732 - RNA, 19 nt, Human
uguccaguaugaauucucu

SEQ ID NO: 1042733 - RNA, 21 nt, Human
ugugagguuucucuccuguau

SEQ ID NO: 1042734 - RNA, 19 nt, Human
uuuguaagguuucucucca

SEQ ID NO: 1042735 - RNA, 19 nt, Human
uuuguaagguuucucucca

SEQ ID NO: 1042736 - RNA, 23 nt, Human
auaaaguuucucuccaaugugaa

SEQ ID NO: 1042737 - RNA, 19 nt, Human
caaugugaauuuuccagug

SEQ ID NO: 1042738 - RNA, 24 nt, Human
caguguauaauaaggugugcuuuu

SEQ ID NO: 1042739 - RNA, 22 nt, Human
aaagacguuggcugaacugaag

SEQ ID NO: 1042740 - RNA, 22 nt, Human
aacacagaugaaguagugaccc

SEQ ID NO: 1042741 - RNA, 24 nt, Human
aacuacaaccacuaccacaaaacc

SEQ ID NO: 1042742 - RNA, 19 nt, Human
aagcagccuccaaggucac

SEQ ID NO: 1042743 - RNA, 19 nt, Human
aagccucuaucaucuggaa

SEQ ID NO: 1042744 - RNA, 26 nt, Human
acacagcacugccucugccacacccu

SEQ ID NO: 1042745 - RNA, 19 nt, Human
auggaaaaccuggguacua

SEQ ID NO: 1042746 - RNA, 24 nt, Human
caacacagaugaaguagugaccuu

SEQ ID NO: 1042747 - RNA, 23 nt, Human
caaccacuaccacaaaaccaccc

SEQ ID NO: 1042748 - RNA, 27 nt, Human
cacuaccacaaaaccacccauuuguca

SEQ ID NO: 1042749 - RNA, 21 nt, Human
caucccaauuagaauuuccuu

SEQ ID NO: 1042750 - RNA, 21 nt, Human
ccacuaccacaaaaccaccca

SEQ ID NO: 1042751 - RNA, 22 nt, Human
ccagucuggaauaagcagccuc

SEQ ID NO: 1042752 - RNA, 19 nt, Human
cccacaggcugaguaagcc

SEQ ID NO: 1042753 - RNA, 21 nt, Human
ccuccacgauucugggguaag

SEQ ID NO: 1042754 - RNA, 20 nt, Human
ccucccacaggcugaguaag

SEQ ID NO: 1042755 - RNA, 25 nt, Human
ccuugccuggcacacuucagugcug

SEQ ID NO: 1042756 - RNA, 23 nt, Human
cuagaacucaaucacaugggcac

SEQ ID NO: 1042757 - RNA, 23 nt, Human
cugggguaagaaccugugucagg

SEQ ID NO: 1042758 - RNA, 23 nt, Human
cuuauuugcaaggaaauggaacc

SEQ ID NO: 1042759 - RNA, 22 nt, Human
cuucacugagggaaacaucuuc

SEQ ID NO: 1042760 - RNA, 23 nt, Human
cuuccuggacacacccuuuaaug

SEQ ID NO: 1042761 - RNA, 19 nt, Human
gaaaugccugcccacucuu

SEQ ID NO: 1042762 - RNA, 21 nt, Human
gagaagccugaggauguuugu

SEQ ID NO: 1042763 - RNA, 20 nt, Human
gagaaucucauggaaaaccu

SEQ ID NO: 1042764 - RNA, 23 nt, Human
gcagggauagagaagccugagga

SEQ ID NO: 1042765 - RNA, 18 nt, Human
gcuuuccuccacgauucu

SEQ ID NO: 1042766 - RNA, 18 nt, Human
gucaccuuggcagggaua

SEQ ID NO: 1042767 - RNA, 20 nt, Human
uaacuacaaccacuaccaca

SEQ ID NO: 1042768 - RNA, 21 nt, Human
uagacuucuuauuugcaagga

SEQ ID NO: 1042769 - RNA, 22 nt, Human
ucaaaugccacuucuauggagc

SEQ ID NO: 1042770 - RNA, 27 nt, Human
ucaacccagucuggaauaagcagccuc

SEQ ID NO: 1042771 - RNA, 18 nt, Human
ucacacuccauuggcuag

SEQ ID NO: 1042772 - RNA, 24 nt, Human
ucacaugggcacacucuuaacugc

SEQ ID NO: 1042773 - RNA, 19 nt, Human
ucagugcugcaggcugaca

SEQ ID NO: 1042774 - RNA, 22 nt, Human
uccaacacagaugaaguaguga

SEQ ID NO: 1042775 - RNA, 24 nt, Human
ucccacaggcugaguaagccucua

SEQ ID NO: 1042776 - RNA, 21 nt, Human
ucuggaauaagcagccuccaa

SEQ ID NO: 1042777 - RNA, 22 nt, Human
ucugggguaagaaccuguguca

SEQ ID NO: 1042778 - RNA, 24 nt, Human
ucuuuugcuccccuagcccuccca

SEQ ID NO: 1042779 - RNA, 19 nt, Human
ugccugcccacucuucacu

SEQ ID NO: 1042780 - RNA, 24 nt, Human
uggaauaagcagccuccaagguca

SEQ ID NO: 1042781 - RNA, 19 nt, Human
uggcuagaacucaaucaca

SEQ ID NO: 1042782 - RNA, 19 nt, Human
uggcugaacugaagaccuu

SEQ ID NO: 1042783 - RNA, 23 nt, Human
ugugauaaacacagcacugccuc

SEQ ID NO: 1042784 - RNA, 23 nt, Human
aaccccggcccuucccacuucac

SEQ ID NO: 1042785 - RNA, 25 nt, Human
aagauaucuguccccagcccuagcc

SEQ ID NO: 1042786 - RNA, 24 nt, Human
accaugaaaaguacuuuauugagg

SEQ ID NO: 1042787 - RNA, 24 nt, Human
caauggcuucuuuuccgcggugac

SEQ ID NO: 1042788 - RNA, 19 nt, Human
ccccagcccuagccucagc

SEQ ID NO: 1042789 - RNA, 24 nt, Human
ccccagcccuagccucagccucuc

SEQ ID NO: 1042790 - RNA, 23 nt, Human
cuguccccagcccuagccucagc

SEQ ID NO: 1042791 - RNA, 20 nt, Human
cuguggggcgcaauggcuuc

SEQ ID NO: 1042792 - RNA, 24 nt, Human
cuguggggcgcaauggcuucuuuu

SEQ ID NO: 1042793 - RNA, 18 nt, Human
gccccaacgaaccccggc

SEQ ID NO: 1042794 - RNA, 24 nt, Human
uaucuguccccagcccuagccuca

SEQ ID NO: 1042795 - RNA, 21 nt, Human
ucucgccccaacgaaccccgg

SEQ ID NO: 1042796 - RNA, 18 nt, Human
cagcagcagggugagacu

SEQ ID NO: 1042797 - RNA, 18 nt, Human
cagcuggaaucuccggga

SEQ ID NO: 1042798 - RNA, 22 nt, Human
cugcagaaccuggaucuugcgc

SEQ ID NO: 1042799 - RNA, 20 nt, Human
gagcagcagcagggugagac

SEQ ID NO: 1042800 - RNA, 19 nt, Human
gggaagagggaggagcagc

SEQ ID NO: 1042801 - RNA, 23 nt, Human
ugcucagccucuagcccagcugg

SEQ ID NO: 1042802 - RNA, 24 nt, Human
uuaaagacauuaugcauugugcuc

SEQ ID NO: 1042803 - RNA, 21 nt, Human
aagauucuccacucucugccc

SEQ ID NO: 1042804 - RNA, 23 nt, Human
accaagauucuccacucucugcc

SEQ ID NO: 1042805 - RNA, 21 nt, Human
acgcaacacaaccagaaagaa

SEQ ID NO: 1042806 - RNA, 20 nt, Human
agguccccaagccuccugcc

SEQ ID NO: 1042807 - RNA, 20 nt, Human
ccaggaaggggaaggguucc

SEQ ID NO: 1042808 - RNA, 18 nt, Human
ccccaagccuccugccug

SEQ ID NO: 1042809 - RNA, 27 nt, Human
cccuggaagguccccaagccuccugcc

SEQ ID NO: 1042810 - RNA, 22 nt, Human
ccucauccaccaagauucucca

SEQ ID NO: 1042811 - RNA, 22 nt, Human
cgcccgaagagcgguggccagg

SEQ ID NO: 1042812 - RNA, 21 nt, Human
cuccugccgccgccgcagccu

SEQ ID NO: 1042813 - RNA, 21 nt, Human
gguccccaagccuccugccug

SEQ ID NO: 1042814 - RNA, 19 nt, Human
uccccaagccuccugccug

SEQ ID NO: 1042815 - RNA, 20 nt, Human
uccccaagccuccugccugc

SEQ ID NO: 1042816 - RNA, 19 nt, Human
ucucguccuacgauccccc

SEQ ID NO: 1042817 - RNA, 22 nt, Human
ugccgccgccgcagccucaucc

SEQ ID NO: 1042818 - RNA, 21 nt, Human
ugcuccugccgccgccgcagc

SEQ ID NO: 1042819 - RNA, 18 nt, Human
uggccaggaaggggaagg

SEQ ID NO: 1042820 - RNA, 21 nt, Human
uggccaggaaggggaaggguu

SEQ ID NO: 1042821 - RNA, 18 nt, Human
aaggcugucugggaaaug

SEQ ID NO: 1042822 - RNA, 25 nt, Human
agagaagggcugcggucucgcagcg

SEQ ID NO: 1042823 - RNA, 22 nt, Human
ccucggaguggggucccagucc

SEQ ID NO: 1042824 - RNA, 24 nt, Human
ccugucgcggcgccgcagaggcug

SEQ ID NO: 1042825 - RNA, 18 nt, Human
cgcaagguccucugggag

SEQ ID NO: 1042826 - RNA, 23 nt, Human
cggaguggggucccaguccggag

SEQ ID NO: 1042827 - RNA, 18 nt, Human
cgggagcugcccucggag

SEQ ID NO: 1042828 - RNA, 20 nt, Human
cggggcaggcggccccugcu

SEQ ID NO: 1042829 - RNA, 22 nt, Human
cucgcccgccgcuuccugucgc

SEQ ID NO: 1042830 - RNA, 21 nt, Human
cucugagacuccagagaaggg

SEQ ID NO: 1042831 - RNA, 21 nt, Human
gaaaacaagucagagcccgag

SEQ ID NO: 1042832 - RNA, 18 nt, Human
gcagcggagggccgcugg

SEQ ID NO: 1042833 - RNA, 20 nt, Human
gcggcgccgcagaggccucu

SEQ ID NO: 1042834 - RNA, 21 nt, Human
gcucugagacuccagagaagg

SEQ ID NO: 1042835 - RNA, 21 nt, Human
ggccgggagcugcccucggag

SEQ ID NO: 1042836 - RNA, 23 nt, Human
ggggucccaguccggagucuuca

SEQ ID NO: 1042837 - RNA, 19 nt, Human
ucaggucaguggcagcccu

SEQ ID NO: 1042838 - RNA, 23 nt, Human
uccggagucuucaggucaguggc

SEQ ID NO: 1042839 - RNA, 23 nt, Human
ugaagccugaaggugacccgaaa

SEQ ID NO: 1042840 - RNA, 19 nt, Human
ugacccgaaaacaagucag

SEQ ID NO: 1042841 - RNA, 20 nt, Human
ugccuggcugaagccugaag

SEQ ID NO: 1042842 - RNA, 21 nt, Human
uggugucuugcggcucugaga

SEQ ID NO: 1042843 - RNA, 19 nt, Human
caggaaccgcagcagucug

SEQ ID NO: 1042844 - RNA, 19 nt, Human
ccgcagcagucugcucggc

SEQ ID NO: 1042845 - RNA, 20 nt, Human
agccuccggcaaguacccca

SEQ ID NO: 1042846 - RNA, 23 nt, Human
cagaaguacucacacuccaccac

SEQ ID NO: 1042847 - RNA, 18 nt, Human
ccccagaaguacucacac

SEQ ID NO: 1042848 - RNA, 21 nt, Human
ccccagaaguacucacacucc

SEQ ID NO: 1042849 - RNA, 24 nt, Human
ccccagaaguacucacacuccacc

SEQ ID NO: 1042850 - RNA, 23 nt, Human
cccuccacaaauccccagccucc

SEQ ID NO: 1042851 - RNA, 19 nt, Human
ccuccggcaaguaccccag

SEQ ID NO: 1042852 - RNA, 22 nt, Human
cucgagggugguggucuucccu

SEQ ID NO: 1042853 - RNA, 19 nt, Human
ggucuucccuccacaaauc

SEQ ID NO: 1042854 - RNA, 20 nt, Human
uaccccagaaguacucacac

SEQ ID NO: 1042855 - RNA, 24 nt, Human
uaccccagaaguacucacacucca

SEQ ID NO: 1042856 - RNA, 22 nt, Human
uccacaaauccccagccuccgg

SEQ ID NO: 1042857 - RNA, 24 nt, Human
uccccagccuccggcaaguacccc

SEQ ID NO: 1042858 - RNA, 30 nt, Human
ucccuccacaaauccccagccuccggcaaa

SEQ ID NO: 1042859 - RNA, 18 nt, Human
ucugugaucgcaacagcc

SEQ ID NO: 1042860 - RNA, 24 nt, Human
ugaggguucagccucgaggguggu

SEQ ID NO: 1042861 - RNA, 22 nt, Human
accccagggacucucaggugug

SEQ ID NO: 1042862 - RNA, 20 nt, Human
accucgcugugcccagcagc

SEQ ID NO: 1042863 - RNA, 21 nt, Human
augguggguagggggcagggg

SEQ ID NO: 1042864 - RNA, 24 nt, Human
caaauccccagcucaugccccauc

SEQ ID NO: 1042865 - RNA, 27 nt, Human
caagcuuaagccccauaaagaucaucc

SEQ ID NO: 1042866 - RNA, 20 nt, Human
cacccaagcuuaagccccau

SEQ ID NO: 1042867 - RNA, 20 nt, Human
ccagauaauuguuugcccac

SEQ ID NO: 1042868 - RNA, 23 nt, Human
cccaaauccccagcucaugcccc

SEQ ID NO: 1042869 - RNA, 23 nt, Human
cccagugccagagagggccuuuu

SEQ ID NO: 1042870 - RNA, 23 nt, Human
ccccaaauccccagcucaugccc

SEQ ID NO: 1042871 - RNA, 20 nt, Human
ccccauccccaaauccccag

SEQ ID NO: 1042872 - RNA, 21 nt, Human
ccccauccccaaauccccagc

SEQ ID NO: 1042873 - RNA, 24 nt, Human
cccccauccccaaauccccagcuc

SEQ ID NO: 1042874 - RNA, 18 nt, Human
ccccccauccccaaaucc

SEQ ID NO: 1042875 - RNA, 18 nt, Human
ccucugccccggcccagu

SEQ ID NO: 1042876 - RNA, 19 nt, Human
cuggcaugguggguagggg

SEQ ID NO: 1042877 - RNA, 19 nt, Human
gacccaggaugccucaggc

SEQ ID NO: 1042878 - RNA, 21 nt, Human
gagcuuggaccucgcugugcc

SEQ ID NO: 1042879 - RNA, 21 nt, Human
gcagggcgaccugagcuugga

SEQ ID NO: 1042880 - RNA, 20 nt, Human
ggggcagggcgaccugagcu

SEQ ID NO: 1042881 - RNA, 23 nt, Human
guggauuccccccauccccaaau

SEQ ID NO: 1042882 - RNA, 23 nt, Human
uccagucacuuuucugcuggccu

SEQ ID NO: 1042883 - RNA, 19 nt, Human
ucugcucccacccaagcuu

SEQ ID NO: 1042884 - RNA, 19 nt, Human
ugacuggaccccagggacu

SEQ ID NO: 1042885 - RNA, 22 nt, Human
ugagacccaggaugccucagaa

SEQ ID NO: 1042886 - RNA, 19 nt, Human
ugcuggccucugccccggc

SEQ ID NO: 1042887 - RNA, 26 nt, Human
ugcuggccucugccccggcccagugc

SEQ ID NO: 1042888 - RNA, 19 nt, Human
uggaccucgcugugcccag

SEQ ID NO: 1042889 - RNA, 25 nt, Human
uggauuccccccauccccaaauccc

SEQ ID NO: 1042890 - RNA, 21 nt, Human
ugguggguagggggcagggcg

SEQ ID NO: 1042891 - RNA, 24 nt, Human
uguuuuauucuuuuaucaguuuuu

SEQ ID NO: 1042892 - RNA, 24 nt, Human
uuaagccccauaaagaucauccag

SEQ ID NO: 1042893 - RNA, 19 nt, Human
uuccccccauccccaaauc

SEQ ID NO: 1042894 - RNA, 23 nt, Human
uuccccccauccccaaaucccca

SEQ ID NO: 1042895 - RNA, 18 nt, Human
uuggaccucgcugugccc

SEQ ID NO: 1042896 - RNA, 25 nt, Human
uuuuauucuuuuaucaguuuuuggg

SEQ ID NO: 1042897 - RNA, 20 nt, Human
accaggaggaacgucugaga

SEQ ID NO: 1042898 - RNA, 23 nt, Human
accccccacauucugcagaacga

SEQ ID NO: 1042899 - RNA, 18 nt, Human
agcgggcagcggaagggc

SEQ ID NO: 1042900 - RNA, 22 nt, Human
aggugcgggagggggcggaggu

SEQ ID NO: 1042901 - RNA, 22 nt, Human
cacggccgcccccagccccagc

SEQ ID NO: 1042902 - RNA, 23 nt, Human
cagccagaccacucccgcccccu

SEQ ID NO: 1042903 - RNA, 20 nt, Human
caggaugagcuugggaggug

SEQ ID NO: 1042904 - RNA, 19 nt, Human
ccacugcccgcgggcccug

SEQ ID NO: 1042905 - RNA, 19 nt, Human
ccagaccacucccgccccc

SEQ ID NO: 1042906 - RNA, 20 nt, Human
ccagccugcggcacccugcc

SEQ ID NO: 1042907 - RNA, 18 nt, Human
ccagggccuggcagccag

SEQ ID NO: 1042908 - RNA, 19 nt, Human
cccaccccccacauucugc

SEQ ID NO: 1042909 - RNA, 21 nt, Human
cccagccccagcacuggagga

SEQ ID NO: 1042910 - RNA, 25 nt, Human
cccagccccagcacuggaggagggc

SEQ ID NO: 1042911 - RNA, 20 nt, Human
ccccaccccccacauucugc

SEQ ID NO: 1042912 - RNA, 21 nt, Human
ccccaccccccacauucugca

SEQ ID NO: 1042913 - RNA, 21 nt, Human
ccccacugcccgcgggcccug

SEQ ID NO: 1042914 - RNA, 18 nt, Human
cccuagacccccagggcc

SEQ ID NO: 1042915 - RNA, 21 nt, Human
cccugccuccccaccccccac

SEQ ID NO: 1042916 - RNA, 18 nt, Human
ccgcuuuccccacugccc

SEQ ID NO: 1042917 - RNA, 18 nt, Human
ccggcuggcagugagucg

SEQ ID NO: 1042918 - RNA, 19 nt, Human
ccgugccccccgccaccuc

SEQ ID NO: 1042919 - RNA, 25 nt, Human
ccuccccaccccccacauucugcag

SEQ ID NO: 1042920 - RNA, 21 nt, Human
ccugucccgcuggccccagcc

SEQ ID NO: 1042921 - RNA, 20 nt, Human
ccuguggcccugccucccca

SEQ ID NO: 1042922 - RNA, 18 nt, Human
ccuugcacggccgccccc

SEQ ID NO: 1042923 - RNA, 25 nt, Human
cuccccaccccccacauucugcuga

SEQ ID NO: 1042924 - RNA, 19 nt, Human
cucccgcccccuggcccgc

SEQ ID NO: 1042925 - RNA, 21 nt, Human
cugcaccccuagacccccagg

SEQ ID NO: 1042926 - RNA, 24 nt, Human
cugcaccccuagacccccagggcc

SEQ ID NO: 1042927 - RNA, 21 nt, Human
cuggccccaagcucggggccu

SEQ ID NO: 1042928 - RNA, 22 nt, Human
cuggccccaagcucggggccug

SEQ ID NO: 1042929 - RNA, 24 nt, Human
cuggccccaagcucggggccuggg

SEQ ID NO: 1042930 - RNA, 18 nt, Human
gcagcaggaugagcuugg

SEQ ID NO: 1042931 - RNA, 18 nt, Human
gcccugccuccccacccc

SEQ ID NO: 1042932 - RNA, 19 nt, Human
gcgcuggccgcucccugca

SEQ ID NO: 1042933 - RNA, 21 nt, Human
gcguggccuggagguggggca

SEQ ID NO: 1042934 - RNA, 21 nt, Human
ggagagcguggccuggaggug

SEQ ID NO: 1042935 - RNA, 22 nt, Human
ggccuggagguggggcaggacg

SEQ ID NO: 1042936 - RNA, 20 nt, Human
ggggcccgcgcagcagcagg

SEQ ID NO: 1042937 - RNA, 24 nt, Human
ggguggcuggcggggcccgcgcag

SEQ ID NO: 1042938 - RNA, 21 nt, Human
ucccugcaccccuagaccccc

SEQ ID NO: 1042939 - RNA, 22 nt, Human
ucccugcaccccuagaccccca

SEQ ID NO: 1042940 - RNA, 18 nt, Human
ugagcuugggaggugcgg

SEQ ID NO: 1042941 - RNA, 19 nt, Human
ugcaccccuagacccccag

SEQ ID NO: 1042942 - RNA, 21 nt, Human
ugcccugucccgcuggcccca

SEQ ID NO: 1042943 - RNA, 20 nt, Human
uggaggagggcagcaggaug

SEQ ID NO: 1042944 - RNA, 26 nt, Human
uggcagccagaccacucccgcccccu

SEQ ID NO: 1042945 - RNA, 18 nt, Human
uggcccugccuccccacc

SEQ ID NO: 1042946 - RNA, 21 nt, Human
uggcccugccuccccaccccc

SEQ ID NO: 1042947 - RNA, 22 nt, Human
uggcccugccuccccacccccc

SEQ ID NO: 1042948 - RNA, 18 nt, Human
uggcggggcccgcgcagc

SEQ ID NO: 1042949 - RNA, 18 nt, Human
uggguggcuggcggggcc

SEQ ID NO: 1042950 - RNA, 21 nt, Human
uguagggggcugcacgcugcu

SEQ ID NO: 1042951 - RNA, 21 nt, Human
uguagggggcugcacgcugcu

SEQ ID NO: 1042952 - RNA, 18 nt, Human
uuggaggagugggugaag

SEQ ID NO: 1042953 - RNA, 28 nt, Human
cuuacgcacgcgcacacauacacacagu

SEQ ID NO: 1042954 - RNA, 25 nt, Human
gcacgcgcacacauacacacacuca

SEQ ID NO: 1042955 - RNA, 22 nt, Human
gccuuacgcacgcgcacacaua

SEQ ID NO: 1042956 - RNA, 20 nt, Human
uuuucugacgccagccaagg

SEQ ID NO: 1042957 - RNA, 22 nt, Human
aaguucacagccacauccucaa

SEQ ID NO: 1042958 - RNA, 19 nt, Human
aggcaggauuucccccaug

SEQ ID NO: 1042959 - RNA, 19 nt, Human
cagaggaugcuacagacac

SEQ ID NO: 1042960 - RNA, 22 nt, Human
ccagugugacagaggaugcuac

SEQ ID NO: 1042961 - RNA, 21 nt, Human
cccaugacccucuaguggccc

SEQ ID NO: 1042962 - RNA, 20 nt, Human
ccccauacucgaggcaggau

SEQ ID NO: 1042963 - RNA, 21 nt, Human
cccccguacaaucaauuccug

SEQ ID NO: 1042964 - RNA, 18 nt, Human
cccuacggcuccugcugc

SEQ ID NO: 1042965 - RNA, 19 nt, Human
cuccucucacacgaacccc

SEQ ID NO: 1042966 - RNA, 20 nt, Human
cugggaaggacccagcaaag

SEQ ID NO: 1042967 - RNA, 23 nt, Human
gucagcuccucucacacgaaccc

SEQ ID NO: 1042968 - RNA, 23 nt, Human
gucccagugugacagaggaugcu

SEQ ID NO: 1042969 - RNA, 22 nt, Human
ucacacgaaccccauacucgag

SEQ ID NO: 1042970 - RNA, 21 nt, Human
ucugggaaggacccagcaaag

SEQ ID NO: 1042971 - RNA, 27 nt, Human
uggcuuccaggugucccaguccucccu

SEQ ID NO: 1042972 - RNA, 20 nt, Human
ugggaaggacccagcaaagc

SEQ ID NO: 1042973 - RNA, 23 nt, Human
ugggaaggacccagcaaagccca

SEQ ID NO: 1042974 - RNA, 25 nt, Human
ugggaaggacccagcaaagcccacu

SEQ ID NO: 1042975 - RNA, 18 nt, Human
ugugacagaggaugcuac

SEQ ID NO: 1042976 - RNA, 18 nt, Human
uucccccaugacccucua

SEQ ID NO: 1042977 - RNA, 22 nt, Human
uucccccaugacccucuagugg

SEQ ID NO: 1042978 - RNA, 18 nt, Human
caagauaaugcuauacuu

SEQ ID NO: 1042979 - RNA, 24 nt, Human
uacaagauaaugcuauacuuuuaa

SEQ ID NO: 1042980 - RNA, 19 nt, Human
uaugucccugagguaagua

SEQ ID NO: 1042981 - RNA, 20 nt, Human
ucugcauaugucccugaggu

SEQ ID NO: 1042982 - RNA, 26 nt, Human
ugggaaacugaagcacagagagguag

SEQ ID NO: 1042983 - RNA, 28 nt, Human
ugggaaacugaagcacagagagguaguc

SEQ ID NO: 1042984 - RNA, 22 nt, Human
gggucuucagggagagcagucc

SEQ ID NO: 1042985 - RNA, 24 nt, Human
uggaggggucuucagggagagcag

SEQ ID NO: 1042986 - RNA, 18 nt, Human
cugcccgcugcacaaggc

SEQ ID NO: 1042987 - RNA, 19 nt, Human
ggccuggcucccugggcug

SEQ ID NO: 1042988 - RNA, 24 nt, Human
gggggaggcagcggugaucuuuac

SEQ ID NO: 1042989 - RNA, 26 nt, Human
ggggggaggcagcggugaucuuuacu

SEQ ID NO: 1042990 - RNA, 22 nt, Human
ucccugggcugcucgcugcccg

SEQ ID NO: 1042991 - RNA, 21 nt, Human
ugcggugucuggggccuggcu

SEQ ID NO: 1042992 - RNA, 21 nt, Human
agcagaaagggaggccccugg

SEQ ID NO: 1042993 - RNA, 21 nt, Human
aggcagaggacaaggggcugg

SEQ ID NO: 1042994 - RNA, 22 nt, Human
cagcagaaggcagaggacaagg

SEQ ID NO: 1042995 - RNA, 21 nt, Human
cagccugggcccucaccggcc

SEQ ID NO: 1042996 - RNA, 20 nt, Human
ccagcagaaagggaggcccc

SEQ ID NO: 1042997 - RNA, 21 nt, Human
ccccugggugugcaagacggg

SEQ ID NO: 1042998 - RNA, 20 nt, Human
ggcccagguggccucguggg

SEQ ID NO: 1042999 - RNA, 21 nt, Human
gggacggggggaaaggaggga

SEQ ID NO: 1043000 - RNA, 18 nt, Human
gggggaaaggagggacca

SEQ ID NO: 1043001 - RNA, 19 nt, Human
gugggacggggggaaagga

SEQ ID NO: 1043002 - RNA, 21 nt, Human
uugggauggcugaggacacag

SEQ ID NO: 1043003 - RNA, 19 nt, Human
agccuccgggggcgcccaa

SEQ ID NO: 1043004 - RNA, 22 nt, Human
cagcacggccccggcgcgcgcc

SEQ ID NO: 1043005 - RNA, 21 nt, Human
cugcaggcagccccagccucc

SEQ ID NO: 1043006 - RNA, 18 nt, Human
gcgcgcgccugcagcugc

SEQ ID NO: 1043007 - RNA, 19 nt, Human
gcggagcgcaggugaccca

SEQ ID NO: 1043008 - RNA, 21 nt, Human
ggggaugagggcggagcgcag

SEQ ID NO: 1043009 - RNA, 19 nt, Human
uuacccccaaaccaccguc

SEQ ID NO: 1043010 - RNA, 18 nt, Human
uuuccuuucuccuuaccc

SEQ ID NO: 1043011 - RNA, 19 nt, Human
accccgagaucaccgucac

SEQ ID NO: 1043012 - RNA, 18 nt, Human
ccaaacccgaguccaccu

SEQ ID NO: 1043013 - RNA, 24 nt, Human
cccgagaucaccgucacccagaaa

SEQ ID NO: 1043014 - RNA, 22 nt, Human
ccgcuugcauauguccaauccc

SEQ ID NO: 1043015 - RNA, 20 nt, Human
ccugcccaccccgagaucac

SEQ ID NO: 1043016 - RNA, 21 nt, Human
ccuuuggaguccugcccaccc

SEQ ID NO: 1043017 - RNA, 23 nt, Human
cgagaucaccgucacccagaaac

SEQ ID NO: 1043018 - RNA, 25 nt, Human
cgagaucaccgucacccagaaaccc

SEQ ID NO: 1043019 - RNA, 22 nt, Human
cggccccaaaucucccgcuugc

SEQ ID NO: 1043020 - RNA, 21 nt, Human
cugcccaccccgagaucaccg

SEQ ID NO: 1043021 - RNA, 23 nt, Human
uccaaacccgaguccacccccgc

SEQ ID NO: 1043022 - RNA, 18 nt, Human
ucccagugcaaggagucc

SEQ ID NO: 1043023 - RNA, 20 nt, Human
uccugcccaccccgagauca

SEQ ID NO: 1043024 - RNA, 20 nt, Human
ucuuuauuggccuggaugug

SEQ ID NO: 1043025 - RNA, 19 nt, Human
uugccaaaccaguugcccc

SEQ ID NO: 1043026 - RNA, 19 nt, Human
aaaaaaaaaaaaaagaaaa

SEQ ID NO: 1043027 - RNA, 21 nt, Human
aaccagaaggggaaaguccca

SEQ ID NO: 1043028 - RNA, 20 nt, Human
aagaagauaugagaguccua

SEQ ID NO: 1043029 - RNA, 20 nt, Human
aagcacagcuaggguugguc

SEQ ID NO: 1043030 - RNA, 24 nt, Human
acagagccagacguugucucaaaa

SEQ ID NO: 1043031 - RNA, 22 nt, Human
acagcagccgcuggugcuucug

SEQ ID NO: 1043032 - RNA, 28 nt, Human
acguugucucaaaaaaaaaaaaaaaaaa

SEQ ID NO: 1043033 - RNA, 24 nt, Human
acugcgcuccagccugggugacag

SEQ ID NO: 1043034 - RNA, 26 nt, Human
acugcgcuccagccugggugacagag

SEQ ID NO: 1043035 - RNA, 18 nt, Human
agcaccgguccugggugu

SEQ ID NO: 1043036 - RNA, 21 nt, Human
agccaggugugguggugcaug

SEQ ID NO: 1043037 - RNA, 24 nt, Human
aggcugaggcaugaggaucccuug

SEQ ID NO: 1043038 - RNA, 22 nt, Human
aggcugcagugggccgagauug

SEQ ID NO: 1043039 - RNA, 24 nt, Human
aggucgaggcugcagugggccgag

SEQ ID NO: 1043040 - RNA, 20 nt, Human
augagaguccuaaggcccug

SEQ ID NO: 1043041 - RNA, 23 nt, Human
auucacauaguggcccaagcacc

SEQ ID NO: 1043042 - RNA, 24 nt, Human
auugugccacugcgcuccagccug

SEQ ID NO: 1043043 - RNA, 20 nt, Human
caaaaugcaguagguggcgg

SEQ ID NO: 1043044 - RNA, 23 nt, Human
cacagcaccgugcuggagccggc

SEQ ID NO: 1043045 - RNA, 21 nt, Human
caccgguccguacuccagcga

SEQ ID NO: 1043046 - RNA, 19 nt, Human
cacugcgcuccagccuggg

SEQ ID NO: 1043047 - RNA, 19 nt, Human
cacugcgcuccagccuggg

SEQ ID NO: 1043048 - RNA, 21 nt, Human
cacugcgcuccagccugggug

SEQ ID NO: 1043049 - RNA, 22 nt, Human
cacugcgcuccagccuggguga

SEQ ID NO: 1043050 - RNA, 23 nt, Human
cacugcgcuccagccugggugac

SEQ ID NO: 1043051 - RNA, 24 nt, Human
cacugcgcuccagccugggugaca

SEQ ID NO: 1043052 - RNA, 24 nt, Human
cacugcgcuccagccugggugaca

SEQ ID NO: 1043053 - RNA, 18 nt, Human
cagaagcacagcuagggu

SEQ ID NO: 1043054 - RNA, 18 nt, Human
cagaaggggaaaguccca

SEQ ID NO: 1043055 - RNA, 24 nt, Human
cagaggucgaggcugcagugggcc

SEQ ID NO: 1043056 - RNA, 19 nt, Human
cauaugaggcugaggcaug

SEQ ID NO: 1043057 - RNA, 20 nt, Human
ccacugcgcuccagccuggg

SEQ ID NO: 1043058 - RNA, 20 nt, Human
ccacugcgcuccagccuggg

SEQ ID NO: 1043059 - RNA, 21 nt, Human
ccacugcgcuccagccugggu

SEQ ID NO: 1043060 - RNA, 21 nt, Human
ccacugcgcuccagccugggu

SEQ ID NO: 1043061 - RNA, 24 nt, Human
ccacugcgcuccagccugggugac

SEQ ID NO: 1043062 - RNA, 18 nt, Human
ccaggccagugcgcaugg

SEQ ID NO: 1043063 - RNA, 24 nt, Human
cccagccugccagugccuccuccu

SEQ ID NO: 1043064 - RNA, 20 nt, Human
cccgaacgcuuuccgcgaag

SEQ ID NO: 1043065 - RNA, 20 nt, Human
cccugcacgcgucgcagcca

SEQ ID NO: 1043066 - RNA, 23 nt, Human
ccggcuccugagcugcucaaccu

SEQ ID NO: 1043067 - RNA, 19 nt, Human
ccucggccagccugugaug

SEQ ID NO: 1043068 - RNA, 21 nt, Human
ccugccagugccuccuccugg

SEQ ID NO: 1043069 - RNA, 24 nt, Human
ccugugaugggauccuggcaaggc

SEQ ID NO: 1043070 - RNA, 19 nt, Human
cgaacagcccgcccaguca

SEQ ID NO: 1043071 - RNA, 22 nt, Human
cgcuccagccugggugacagag

SEQ ID NO: 1043072 - RNA, 19 nt, Human
cggcuccugagcugcucaa

SEQ ID NO: 1043073 - RNA, 22 nt, Human
cggcuccugagcugcucaaccu

SEQ ID NO: 1043074 - RNA, 23 nt, Human
cggcuccugagcugcucaaccuc

SEQ ID NO: 1043075 - RNA, 18 nt, Human
cucaaaaaaaaaaaaaaa

SEQ ID NO: 1043076 - RNA, 19 nt, Human
cucaaaaaaaaaaaaaaag

SEQ ID NO: 1043077 - RNA, 18 nt, Human
cuccagccugggugacag

SEQ ID NO: 1043078 - RNA, 20 nt, Human
cuccagccugggugacagag

SEQ ID NO: 1043079 - RNA, 19 nt, Human
cucgaaccucucgaacagc

SEQ ID NO: 1043080 - RNA, 22 nt, Human
cugcagugggccgagauugugc

SEQ ID NO: 1043081 - RNA, 19 nt, Human
cuugagccccagaggucga

SEQ ID NO: 1043082 - RNA, 24 nt, Human
gaaccucucgaacagcccgcccag

SEQ ID NO: 1043083 - RNA, 18 nt, Human
gagaguccuaaggcccug

SEQ ID NO: 1043084 - RNA, 23 nt, Human
gagauugugccacugcgcuccag

SEQ ID NO: 1043085 - RNA, 21 nt, Human
gaggcugcagugggccgagau

SEQ ID NO: 1043086 - RNA, 24 nt, Human
gaggcugcagugggccgagauugg

SEQ ID NO: 1043087 - RNA, 25 nt, Human
gcacagcuaggguuggucagagagu

SEQ ID NO: 1043088 - RNA, 24 nt, Human
gccaccagauggagaagacaagaa

SEQ ID NO: 1043089 - RNA, 19 nt, Human
gccacugcgcuccagccug

SEQ ID NO: 1043090 - RNA, 24 nt, Human
gccacugcgcuccagccuggguga

SEQ ID NO: 1043091 - RNA, 24 nt, Human
gccccagaggucgaggcugcagug

SEQ ID NO: 1043092 - RNA, 20 nt, Human
gccuaccccgaacgcuuucc

SEQ ID NO: 1043093 - RNA, 19 nt, Human
gcgcggggcccugcacgcg

SEQ ID NO: 1043094 - RNA, 24 nt, Human
gcgcuccagccugggugacagagc

SEQ ID NO: 1043095 - RNA, 21 nt, Human
gcuggugcuucuggaucaccu

SEQ ID NO: 1043096 - RNA, 19 nt, Human
ggggugcaucuccccuugg

SEQ ID NO: 1043097 - RNA, 18 nt, Human
gucccaggugucuguggg

SEQ ID NO: 1043098 - RNA, 21 nt, Human
uaaaauggccucgagccaggu

SEQ ID NO: 1043099 - RNA, 18 nt, Human
uaugagaguccuaaggcc

SEQ ID NO: 1043100 - RNA, 20 nt, Human
uaugaggcugaggcaugagg

SEQ ID NO: 1043101 - RNA, 23 nt, Human
ucaaaaaaaaaaaaaaaaaagaa

SEQ ID NO: 1043102 - RNA, 24 nt, Human
uccagccugggugacagagccaga

SEQ ID NO: 1043103 - RNA, 19 nt, Human
ucccaggugucuguggggu

SEQ ID NO: 1043104 - RNA, 18 nt, Human
uccguacuccagcgaggu

SEQ ID NO: 1043105 - RNA, 21 nt, Human
uccuaaggcccugucuggggu

SEQ ID NO: 1043106 - RNA, 20 nt, Human
uccucggggguccccuuucu

SEQ ID NO: 1043107 - RNA, 18 nt, Human
uccugagcugcucaaccu

SEQ ID NO: 1043108 - RNA, 24 nt, Human
ucgagccaggugugguggugcaug

SEQ ID NO: 1043109 - RNA, 19 nt, Human
ucucaaaaaaaaaaaaaaa

SEQ ID NO: 1043110 - RNA, 23 nt, Human
ugagaguccuaaggcccugucug

SEQ ID NO: 1043111 - RNA, 23 nt, Human
ugcagugggccgagauugugcca

SEQ ID NO: 1043112 - RNA, 20 nt, Human
ugccuccuccuggguggaug

SEQ ID NO: 1043113 - RNA, 19 nt, Human
ugcucaaccucagaacuaa

SEQ ID NO: 1043114 - RNA, 22 nt, Human
ugggccgagauugugccacugc

SEQ ID NO: 1043115 - RNA, 21 nt, Human
ugggguccucggggguccccu

SEQ ID NO: 1043116 - RNA, 24 nt, Human
ugguggugcaugucuguggcccca

SEQ ID NO: 1043117 - RNA, 18 nt, Human
uguccaaaaugcaguagg

SEQ ID NO: 1043118 - RNA, 21 nt, Human
ugucugggguccucggggguc

SEQ ID NO: 1043119 - RNA, 19 nt, Human
ugucuguggccccagcuac

SEQ ID NO: 1043120 - RNA, 19 nt, Human
ugugaugggauccuggcaa

SEQ ID NO: 1043121 - RNA, 23 nt, Human
ugugguggugcaugucuguggcc

SEQ ID NO: 1043122 - RNA, 20 nt, Human
uucacaaacacagcaccgug

SEQ ID NO: 1043123 - RNA, 23 nt, Human
uugugccacugcgcuccagccug

SEQ ID NO: 1043124 - RNA, 24 nt, Human
aaacuccagacgaccccagcuccu

SEQ ID NO: 1043125 - RNA, 21 nt, Human
aaaugucccuccugaugaccc

SEQ ID NO: 1043126 - RNA, 19 nt, Human
aacccagcgagcuccgcag

SEQ ID NO: 1043127 - RNA, 21 nt, Human
aacccagcgagcuccgcagcc

SEQ ID NO: 1043128 - RNA, 22 nt, Human
aacccagcgagcuccgcagccc

SEQ ID NO: 1043129 - RNA, 20 nt, Human
aaggagaucacauuuggcuu

SEQ ID NO: 1043130 - RNA, 24 nt, Human
acacucucuuccuuccccaucgca

SEQ ID NO: 1043131 - RNA, 19 nt, Human
agcuggucugaaauguccc

SEQ ID NO: 1043132 - RNA, 24 nt, Human
auuuggcuuaguaucagaaagccc

SEQ ID NO: 1043133 - RNA, 20 nt, Human
caccgcccccuucggcgucc

SEQ ID NO: 1043134 - RNA, 22 nt, Human
cagggcucuuucuucugcucca

SEQ ID NO: 1043135 - RNA, 19 nt, Human
ccaaacucccaaucuggac

SEQ ID NO: 1043136 - RNA, 18 nt, Human
ccauccagggcucuuucu

SEQ ID NO: 1043137 - RNA, 19 nt, Human
ccaucgcacagcccugacc

SEQ ID NO: 1043138 - RNA, 21 nt, Human
cccuguugucucuccaccugg

SEQ ID NO: 1043139 - RNA, 27 nt, Human
ccugaugacccuguugucucuccaccu

SEQ ID NO: 1043140 - RNA, 22 nt, Human
ccuguugucucuccaccuggca

SEQ ID NO: 1043141 - RNA, 26 nt, Human
cucccaaucuggacaccauucuuuug

SEQ ID NO: 1043142 - RNA, 19 nt, Human
gcacagcccugaccucccc

SEQ ID NO: 1043143 - RNA, 19 nt, Human
gcccgggacguuccagccc

SEQ ID NO: 1043144 - RNA, 21 nt, Human
gcgagcuccgcagcccgggac

SEQ ID NO: 1043145 - RNA, 23 nt, Human
uaggacaugacugguaccuaaaa

SEQ ID NO: 1043146 - RNA, 18 nt, Human
ucacaggauuucucucca

SEQ ID NO: 1043147 - RNA, 19 nt, Human
ucaggucugaacgagucca

SEQ ID NO: 1043148 - RNA, 22 nt, Human
ucaugaagcgucugaugcuuaa

SEQ ID NO: 1043149 - RNA, 23 nt, Human
ucccaacccagcgagcuccgcag

SEQ ID NO: 1043150 - RNA, 22 nt, Human
ucugauaacucuggccuucucc

SEQ ID NO: 1043151 - RNA, 20 nt, Human
ucuugguuucucuuccaaac

SEQ ID NO: 1043152 - RNA, 24 nt, Human
ugaaaugucccuccugaugacccu

SEQ ID NO: 1043153 - RNA, 22 nt, Human
ugaacgaguccaucccaaccca

SEQ ID NO: 1043154 - RNA, 19 nt, Human
ugaagccacugauauucuc

SEQ ID NO: 1043155 - RNA, 19 nt, Human
uucacaggauuucucucca

SEQ ID NO: 1043156 - RNA, 24 nt, Human
uuccucuuaaccauccagggcucu

SEQ ID NO: 1043157 - RNA, 20 nt, Human
agggcuuugugagaaucaga

SEQ ID NO: 1043158 - RNA, 18 nt, Human
caacguagagugaacaca

SEQ ID NO: 1043159 - RNA, 19 nt, Human
gagggcuuugugagaauca

SEQ ID NO: 1043160 - RNA, 21 nt, Human
gggugugaguggggcagguuu

SEQ ID NO: 1043161 - RNA, 23 nt, Human
uagccuucaaauccaguaaccaa

SEQ ID NO: 1043162 - RNA, 18 nt, Human
ucuccaucuuugagaaga

SEQ ID NO: 1043163 - RNA, 22 nt, Human
uuaaaguuccuccaucagaugg

SEQ ID NO: 1043164 - RNA, 22 nt, Human
aaaagaaaauucuaaaagagaa

SEQ ID NO: 1043165 - RNA, 19 nt, Human
accccccacccccgccccg

SEQ ID NO: 1043166 - RNA, 22 nt, Human
accccccacccccgccccggac

SEQ ID NO: 1043167 - RNA, 24 nt, Human
acgccccagugcccccccacggac

SEQ ID NO: 1043168 - RNA, 18 nt, Human
agagaaaagggccccugg

SEQ ID NO: 1043169 - RNA, 24 nt, Human
agaggagggcggggagccggggau

SEQ ID NO: 1043170 - RNA, 18 nt, Human
aggaagagcagggaaaau

SEQ ID NO: 1043171 - RNA, 21 nt, Human
aggaagagcagggaaaauggc

SEQ ID NO: 1043172 - RNA, 18 nt, Human
aggcagaaaaaaauaaug

SEQ ID NO: 1043173 - RNA, 19 nt, Human
agugcccccccacggacgg

SEQ ID NO: 1043174 - RNA, 19 nt, Human
caccacgcccaggccuggg

SEQ ID NO: 1043175 - RNA, 22 nt, Human
cacccccgccccggacaacuga

SEQ ID NO: 1043176 - RNA, 23 nt, Human
caccccuuccuccaccacgccca

SEQ ID NO: 1043177 - RNA, 22 nt, Human
cagcaccccccacccccgcccc

SEQ ID NO: 1043178 - RNA, 26 nt, Human
ccacccccgccccggacaacugagga

SEQ ID NO: 1043179 - RNA, 21 nt, Human
cccacccccgccccggacaac

SEQ ID NO: 1043180 - RNA, 19 nt, Human
ccccagugcccccccacgg

SEQ ID NO: 1043181 - RNA, 22 nt, Human
ccccccacggacggcgcaggga

SEQ ID NO: 1043182 - RNA, 19 nt, Human
cccgcccccccccccgggc

SEQ ID NO: 1043183 - RNA, 19 nt, Human
cccguccgcuucucccugg

SEQ ID NO: 1043184 - RNA, 18 nt, Human
cccugggucucuuggucu

SEQ ID NO: 1043185 - RNA, 24 nt, Human
ccucugcuacccggaauccaggag

SEQ ID NO: 1043186 - RNA, 25 nt, Human
cgccccagugcccccccacggacgg

SEQ ID NO: 1043187 - RNA, 19 nt, Human
cgcuuggggccuggucgcc

SEQ ID NO: 1043188 - RNA, 20 nt, Human
cggcgcugccucugcuaccc

SEQ ID NO: 1043189 - RNA, 19 nt, Human
cucgagcucuaaggauggg

SEQ ID NO: 1043190 - RNA, 19 nt, Human
cucuuggucuugcacgucu

SEQ ID NO: 1043191 - RNA, 23 nt, Human
cugggauccucuaaagggccugg

SEQ ID NO: 1043192 - RNA, 19 nt, Human
gaagggcgggccaggcuga

SEQ ID NO: 1043193 - RNA, 22 nt, Human
gacaaacgggcacccgccuccu

SEQ ID NO: 1043194 - RNA, 23 nt, Human
gacggcgcagggacagaggaggg

SEQ ID NO: 1043195 - RNA, 18 nt, Human
gcaccccuuccuccacca

SEQ ID NO: 1043196 - RNA, 22 nt, Human
gcccccccccccgggccccucc

SEQ ID NO: 1043197 - RNA, 21 nt, Human
gcccgcccccccccccgggcc

SEQ ID NO: 1043198 - RNA, 23 nt, Human
ggacaaacgggcacccgccuccu

SEQ ID NO: 1043199 - RNA, 21 nt, Human
ggccugguuucuccauuccuc

SEQ ID NO: 1043200 - RNA, 21 nt, Human
gggagccggggaugccgcggg

SEQ ID NO: 1043201 - RNA, 19 nt, Human
gggcggggagccggggaug

SEQ ID NO: 1043202 - RNA, 23 nt, Human
uaaaagaaaauucuaaaagagaa

SEQ ID NO: 1043203 - RNA, 20 nt, Human
uaauacgccccagugccccc

SEQ ID NO: 1043204 - RNA, 19 nt, Human
uauuguuccagcaccccuu

SEQ ID NO: 1043205 - RNA, 19 nt, Human
ucccucucugggauccucu

SEQ ID NO: 1043206 - RNA, 22 nt, Human
ucccucucugggauccucuaaa

SEQ ID NO: 1043207 - RNA, 19 nt, Human
ucccugggucucuuggucu

SEQ ID NO: 1043208 - RNA, 22 nt, Human
ucgcagcaccccccacccccgc

SEQ ID NO: 1043209 - RNA, 18 nt, Human
ucgcucccgccaagcccg

SEQ ID NO: 1043210 - RNA, 19 nt, Human
ucuccauugucucuccggc

SEQ ID NO: 1043211 - RNA, 26 nt, Human
ugcaguucucuccauugucucuccgg

SEQ ID NO: 1043212 - RNA, 24 nt, Human
ugcccgcccccccccccgggcccc

SEQ ID NO: 1043213 - RNA, 20 nt, Human
ugccgcgggguccaucgcac

SEQ ID NO: 1043214 - RNA, 21 nt, Human
ugggacaaacgggcacccgcc

SEQ ID NO: 1043215 - RNA, 26 nt, Human
ugggauccucuaaagggccugguuuc

SEQ ID NO: 1043216 - RNA, 27 nt, Human
ugggauccucuaaagggccugguuucu

SEQ ID NO: 1043217 - RNA, 19 nt, Human
uuguuccagcaccccuucc

SEQ ID NO: 1043218 - RNA, 26 nt, Human
aacguucccucacggguuggccgcuc

SEQ ID NO: 1043219 - RNA, 24 nt, Human
acuaauuccugaaacuucaggagg

SEQ ID NO: 1043220 - RNA, 21 nt, Human
aucauuucucaccagugugga

SEQ ID NO: 1043221 - RNA, 20 nt, Human
cagguuccacucagacucgc

SEQ ID NO: 1043222 - RNA, 23 nt, Human
cccuguauaagucccucugauua

SEQ ID NO: 1043223 - RNA, 22 nt, Human
cgagagaagucuauggccacau

SEQ ID NO: 1043224 - RNA, 21 nt, Human
cuagcgucagaaacguucccu

SEQ ID NO: 1043225 - RNA, 20 nt, Human
cugaaacuucaggaguuuau

SEQ ID NO: 1043226 - RNA, 22 nt, Human
cugaugaugaauggcgcgcucu

SEQ ID NO: 1043227 - RNA, 21 nt, Human
gaaugucacuaauuccugaaa

SEQ ID NO: 1043228 - RNA, 20 nt, Human
ggcaagaucugcauuuugaa

SEQ ID NO: 1043229 - RNA, 20 nt, Human
uaagaacacaggaacaccgc

SEQ ID NO: 1043230 - RNA, 22 nt, Human
uaagaacacaggaacaccgccc

SEQ ID NO: 1043231 - RNA, 22 nt, Human
uaccuauaagacuaacauucca

SEQ ID NO: 1043232 - RNA, 25 nt, Human
uagcgucagaaacguucccucacgg

SEQ ID NO: 1043233 - RNA, 21 nt, Human
uccagguauucccacuccugc

SEQ ID NO: 1043234 - RNA, 23 nt, Human
ucccugaaugucacuaauuccug

SEQ ID NO: 1043235 - RNA, 21 nt, Human
ucccuguauaagucccucuga

SEQ ID NO: 1043236 - RNA, 19 nt, Human
ucggggucacagcacugau

SEQ ID NO: 1043237 - RNA, 27 nt, Human
ucuauggccacaucccugaaugucacu

SEQ ID NO: 1043238 - RNA, 21 nt, Human
uuaaaacaggacugacauuga

SEQ ID NO: 1043239 - RNA, 19 nt, Human
agaaagccccugcaaagcc

SEQ ID NO: 1043240 - RNA, 21 nt, Human
agggcuuggguccugccccag

SEQ ID NO: 1043241 - RNA, 19 nt, Human
aggggccuguggcugucag

SEQ ID NO: 1043242 - RNA, 21 nt, Human
augaaaacggaaaguguucac

SEQ ID NO: 1043243 - RNA, 21 nt, Human
caaagccccgaaaccuacaug

SEQ ID NO: 1043244 - RNA, 22 nt, Human
caagagaaagccccugcaaagc

SEQ ID NO: 1043245 - RNA, 25 nt, Human
cacuccccaagcugagagcugagga

SEQ ID NO: 1043246 - RNA, 19 nt, Human
ccagccagggcuugggucc

SEQ ID NO: 1043247 - RNA, 19 nt, Human
ccccagucugacaggccug

SEQ ID NO: 1043248 - RNA, 20 nt, Human
ccccugcaaagccccgaaac

SEQ ID NO: 1043249 - RNA, 19 nt, Human
ccgaugaugaugaugacga

SEQ ID NO: 1043250 - RNA, 23 nt, Human
ccugugcuggagucacucaaagg

SEQ ID NO: 1043251 - RNA, 19 nt, Human
cgcccgcgcccgcgcccgc

SEQ ID NO: 1043252 - RNA, 20 nt, Human
cugcaaagccccgaaaccua

SEQ ID NO: 1043253 - RNA, 18 nt, Human
cugucagucauccuugcu

SEQ ID NO: 1043254 - RNA, 18 nt, Human
gaggugucacucuugaag

SEQ ID NO: 1043255 - RNA, 19 nt, Human
gcaaagccccgaaaccuac

SEQ ID NO: 1043256 - RNA, 18 nt, Human
gcacugugcugaguccag

SEQ ID NO: 1043257 - RNA, 21 nt, Human
gcuuccccuuggcggcgguga

SEQ ID NO: 1043258 - RNA, 19 nt, Human
ucagagcaagucaaaugca

SEQ ID NO: 1043259 - RNA, 26 nt, Human
ucgaagcccgguccgccgguggccgc

SEQ ID NO: 1043260 - RNA, 21 nt, Human
ugagccugggaggggcccaag

SEQ ID NO: 1043261 - RNA, 21 nt, Human
ugcugagccugggaggggccc

SEQ ID NO: 1043262 - RNA, 21 nt, Human
uggagucacucaaaggggccu

SEQ ID NO: 1043263 - RNA, 22 nt, Human
uucagaagaggugucacucuug

SEQ ID NO: 1043264 - RNA, 20 nt, Human
uugcuuccccuuggcggcgg

SEQ ID NO: 1043265 - RNA, 19 nt, Human
acgcugcaccuggaagacc

SEQ ID NO: 1043266 - RNA, 18 nt, Human
agccacugggccuggccu

SEQ ID NO: 1043267 - RNA, 21 nt, Human
agccggucugcaaggggccug

SEQ ID NO: 1043268 - RNA, 20 nt, Human
agcuggggguggucgggcag

SEQ ID NO: 1043269 - RNA, 20 nt, Human
aucacagucuccgguggugg

SEQ ID NO: 1043270 - RNA, 23 nt, Human
cagaaugccuuuauuccugggcu

SEQ ID NO: 1043271 - RNA, 22 nt, Human
ccgagagcgccacgcugcaccg

SEQ ID NO: 1043272 - RNA, 21 nt, Human
ccgccgucccagcuccuccag

SEQ ID NO: 1043273 - RNA, 22 nt, Human
ccgucccagcuccuccagcugc

SEQ ID NO: 1043274 - RNA, 25 nt, Human
ccucacgcugcaccuggaagaccuc

SEQ ID NO: 1043275 - RNA, 19 nt, Human
cgcagccgggcggccuccu

SEQ ID NO: 1043276 - RNA, 23 nt, Human
cgcagccgggcggccuccuugcc

SEQ ID NO: 1043277 - RNA, 24 nt, Human
cgcuccagcuccgcgcgcagccgg

SEQ ID NO: 1043278 - RNA, 21 nt, Human
cugcacacacgcucccgcucc

SEQ ID NO: 1043279 - RNA, 22 nt, Human
cugcaccuggaagaccucugcc

SEQ ID NO: 1043280 - RNA, 23 nt, Human
cugggccacguuggccugcaggg

SEQ ID NO: 1043281 - RNA, 22 nt, Human
cuucucaugccgccgucccagc

SEQ ID NO: 1043282 - RNA, 19 nt, Human
gcaccuggaagaccucugc

SEQ ID NO: 1043283 - RNA, 22 nt, Human
gcagccgggcggccuccuugcc

SEQ ID NO: 1043284 - RNA, 19 nt, Human
gcuggggguggucgggcag

SEQ ID NO: 1043285 - RNA, 21 nt, Human
ggggccugcaggggggugagg

SEQ ID NO: 1043286 - RNA, 24 nt, Human
ggggccugcaggggggugaggucc

SEQ ID NO: 1043287 - RNA, 19 nt, Human
gguggugggggaggggcag

SEQ ID NO: 1043288 - RNA, 19 nt, Human
uccgcgcgcagccgggcgg

SEQ ID NO: 1043289 - RNA, 20 nt, Human
uccgcgcgcagccgggcggc

SEQ ID NO: 1043290 - RNA, 20 nt, Human
ucugcgcuggucuucucaug

SEQ ID NO: 1043291 - RNA, 26 nt, Human
ugcagagaccagguggggugauggag

SEQ ID NO: 1043292 - RNA, 22 nt, Human
ugcguggguguggucaguguag

SEQ ID NO: 1043293 - RNA, 18 nt, Human
uggagccagcugggggug

SEQ ID NO: 1043294 - RNA, 21 nt, Human
uggauguggaggacacaggga

SEQ ID NO: 1043295 - RNA, 22 nt, Human
uggauguggaggacacagggaa

SEQ ID NO: 1043296 - RNA, 23 nt, Human
uggugggggaggggcagucacgg

SEQ ID NO: 1043297 - RNA, 18 nt, Human
uguagccacugggccugg

SEQ ID NO: 1043298 - RNA, 19 nt, Human
ucaugcugcugucugcugu

SEQ ID NO: 1043299 - RNA, 19 nt, Human
ugcgaaugaucaagaucua

SEQ ID NO: 1043300 - RNA, 20 nt, Human
aaaguccucucaauagccuu

SEQ ID NO: 1043301 - RNA, 22 nt, Human
aacaaaaaacaaguuuauucca

SEQ ID NO: 1043302 - RNA, 20 nt, Human
aacaaguuuauuccacaccu

SEQ ID NO: 1043303 - RNA, 23 nt, Human
acaaaaaacaaguuuauuccaca

SEQ ID NO: 1043304 - RNA, 21 nt, Human
accaaugucaucaucacagcc

SEQ ID NO: 1043305 - RNA, 20 nt, Human
agacuugaaaacacugauca

SEQ ID NO: 1043306 - RNA, 24 nt, Human
agcacuuugggaggccgaagcggg

SEQ ID NO: 1043307 - RNA, 22 nt, Human
agcgggaggaucgcucgggucc

SEQ ID NO: 1043308 - RNA, 20 nt, Human
aggccgaagcgggaggaucg

SEQ ID NO: 1043309 - RNA, 23 nt, Human
agucagaagugucuugggaccug

SEQ ID NO: 1043310 - RNA, 24 nt, Human
auggguucuguuauuggcauuuuu

SEQ ID NO: 1043311 - RNA, 25 nt, Human
auuucggagugugcuuccuccuuca

SEQ ID NO: 1043312 - RNA, 23 nt, Human
caaaguccucucaauagccuucc

SEQ ID NO: 1043313 - RNA, 21 nt, Human
caaagugcuaagucagaagug

SEQ ID NO: 1043314 - RNA, 19 nt, Human
cacagccugccuguucuuu

SEQ ID NO: 1043315 - RNA, 24 nt, Human
cagcacuuugggaggccgaagcgg

SEQ ID NO: 1043316 - RNA, 21 nt, Human
cccuuccaguuugcauucccc

SEQ ID NO: 1043317 - RNA, 23 nt, Human
ccuguucuuuugaucccaaaagg

SEQ ID NO: 1043318 - RNA, 26 nt, Human
ccuucaauugcacauugccguauucc

SEQ ID NO: 1043319 - RNA, 18 nt, Human
cgcucggguccaagcguu

SEQ ID NO: 1043320 - RNA, 30 nt, Human
cucacgccuguaaaguaaucccagcacuuu

SEQ ID NO: 1043321 - RNA, 24 nt, Human
cuguaaaguaaucccagcacuuug

SEQ ID NO: 1043322 - RNA, 28 nt, Human
cuucacaaaugcaggaaaaugcauugcu

SEQ ID NO: 1043323 - RNA, 20 nt, Human
cuuccaguuugcauucccuu

SEQ ID NO: 1043324 - RNA, 27 nt, Human
ggcucacgccuguaaaguaaucccagg

SEQ ID NO: 1043325 - RNA, 24 nt, Human
gggcgcgguggcucacgccuguaa

SEQ ID NO: 1043326 - RNA, 30 nt, Human
gguggcucacgccuguaaaguaaucccagg

SEQ ID NO: 1043327 - RNA, 20 nt, Human
gugaaagucaugaaggauuc

SEQ ID NO: 1043328 - RNA, 20 nt, Human
uaacucagguacaccuggau

SEQ ID NO: 1043329 - RNA, 24 nt, Human
ucaaaguccucucaauagccuucc

SEQ ID NO: 1043330 - RNA, 21 nt, Human
ucaacagucuugucuguuucc

SEQ ID NO: 1043331 - RNA, 21 nt, Human
ucuaaaguaccucagaaaaca

SEQ ID NO: 1043332 - RNA, 18 nt, Human
ugaaagucaugaaggauu

SEQ ID NO: 1043333 - RNA, 22 nt, Human
ugaguuaacuaaacuggcacag

SEQ ID NO: 1043334 - RNA, 20 nt, Human
ugccuguucuuuugauccca

SEQ ID NO: 1043335 - RNA, 23 nt, Human
ugccuguucuuuugaucccaaaa

SEQ ID NO: 1043336 - RNA, 22 nt, Human
uggcacagccugccuguucuuu

SEQ ID NO: 1043337 - RNA, 30 nt, Human
uggcucacgccuguaaaguaaucccagcaa

SEQ ID NO: 1043338 - RNA, 28 nt, Human
uggcucacgccuguaaaguaaucccagg

SEQ ID NO: 1043339 - RNA, 19 nt, Human
ugggaggccgaagcgggag

SEQ ID NO: 1043340 - RNA, 23 nt, Human
ugggaggccgaagcgggaggauc

SEQ ID NO: 1043341 - RNA, 24 nt, Human
ugggaggccgaagcgggaggaucg

SEQ ID NO: 1043342 - RNA, 18 nt, Human
uguuuucuuucaucacuu

SEQ ID NO: 1043343 - RNA, 30 nt, Human
uucaaaguccucucaauagccuuccaaucu

SEQ ID NO: 1043344 - RNA, 21 nt, Human
uucaucacuuagguucauuuc

SEQ ID NO: 1043345 - RNA, 24 nt, Human
uucggccgggcgcgguggcucacg

SEQ ID NO: 1043346 - RNA, 24 nt, Human
uugggaggccgaagcgggaggauc

SEQ ID NO: 1043347 - RNA, 19 nt, Human
aaaaaacccacaaacccca

SEQ ID NO: 1043348 - RNA, 21 nt, Human
aaaaacccacaaaccccaccc

SEQ ID NO: 1043349 - RNA, 23 nt, Human
aaaccccacccgcgcccagcagg

SEQ ID NO: 1043350 - RNA, 24 nt, Human
aaagugcuggaauuagaguaguga

SEQ ID NO: 1043351 - RNA, 24 nt, Human
aaagugcugggauuacaggcguga

SEQ ID NO: 1043352 - RNA, 24 nt, Human
aaagugcugggauuacagguguga

SEQ ID NO: 1043353 - RNA, 21 nt, Human
aaccuccgccucccugcaacc

SEQ ID NO: 1043354 - RNA, 25 nt, Human
aagcaaucuuccugccucggccucc

SEQ ID NO: 1043355 - RNA, 19 nt, Human
aagcagaguccguacgucc

SEQ ID NO: 1043356 - RNA, 21 nt, Human
aagcgacccaggggucggcgu

SEQ ID NO: 1043357 - RNA, 25 nt, Human
aagcgauucuccugccucagccucc

SEQ ID NO: 1043358 - RNA, 19 nt, Human
aaguagcugggacuacagg

SEQ ID NO: 1043359 - RNA, 20 nt, Human
aaguagcugggacuacaggc

SEQ ID NO: 1043360 - RNA, 24 nt, Human
aaguagcugggacuacaggcacgc

SEQ ID NO: 1043361 - RNA, 22 nt, Human
aaguagcugggauuauacgugu

SEQ ID NO: 1043362 - RNA, 26 nt, Human
aagugcuggaauuagaguagugagcc

SEQ ID NO: 1043363 - RNA, 18 nt, Human
aagugcugggauuacagg

SEQ ID NO: 1043364 - RNA, 19 nt, Human
aagugcugggauuacaggc

SEQ ID NO: 1043365 - RNA, 19 nt, Human
aagugcugggauuacaggc

SEQ ID NO: 1043366 - RNA, 26 nt, Human
aagugcugggauuacaggcgugagcc

SEQ ID NO: 1043367 - RNA, 19 nt, Human
aagugcugggauuacaggu

SEQ ID NO: 1043368 - RNA, 26 nt, Human
aagugcugggauuacaggugugagcc

SEQ ID NO: 1043369 - RNA, 18 nt, Human
aauuagaguagugagcca

SEQ ID NO: 1043370 - RNA, 23 nt, Human
aauuagaguagugagccacugca

SEQ ID NO: 1043371 - RNA, 27 nt, Human
accacagucacuuuuuuuuuuuuuuuu

SEQ ID NO: 1043372 - RNA, 25 nt, Human
accauguugcccagacuggucuuga

SEQ ID NO: 1043373 - RNA, 24 nt, Human
accauguuggccaggauggucucg

SEQ ID NO: 1043374 - RNA, 24 nt, Human
acccaagcuggagugcaguggcau

SEQ ID NO: 1043375 - RNA, 22 nt, Human
acccacaaaccccacccgcgcc

SEQ ID NO: 1043376 - RNA, 19 nt, Human
acccaggcuggagugcagu

SEQ ID NO: 1043377 - RNA, 24 nt, Human
accuugugaucugcccgccucagc

SEQ ID NO: 1043378 - RNA, 22 nt, Human
acgcccggcccaccacgauaau

SEQ ID NO: 1043379 - RNA, 18 nt, Human
acgggguuucaccauguu

SEQ ID NO: 1043380 - RNA, 23 nt, Human
acgggguuucaccauguuggcca

SEQ ID NO: 1043381 - RNA, 24 nt, Human
acgggguuucaccauguuggccag

SEQ ID NO: 1043382 - RNA, 18 nt, Human
acgugaguuuauggaagg

SEQ ID NO: 1043383 - RNA, 28 nt, Human
acuugcccccuaacacuucccuuccccc

SEQ ID NO: 1043384 - RNA, 22 nt, Human
acuuuuuuuuuuuuuuuuuuuu

SEQ ID NO: 1043385 - RNA, 27 nt, Human
agaaaagagguggaaaaaaagggaccc

SEQ ID NO: 1043386 - RNA, 22 nt, Human
agaaaguacaaacgggugaaag

SEQ ID NO: 1043387 - RNA, 19 nt, Human
agagaugggguuucaccgu

SEQ ID NO: 1043388 - RNA, 18 nt, Human
agaggugacauugguguu

SEQ ID NO: 1043389 - RNA, 18 nt, Human
agaugccucagcauccuc

SEQ ID NO: 1043390 - RNA, 24 nt, Human
agcgauucuccugccucagccucc

SEQ ID NO: 1043391 - RNA, 22 nt, Human
aggcagcagcuuuuggcuuuua

SEQ ID NO: 1043392 - RNA, 26 nt, Human
aggcgacaugauccaagugggaggca

SEQ ID NO: 1043393 - RNA, 24 nt, Human
aggcugaagugcaguggugcaauc

SEQ ID NO: 1043394 - RNA, 25 nt, Human
aggcuggagugcaguggcacaaucu

SEQ ID NO: 1043395 - RNA, 19 nt, Human
aguagcugggacuacaggc

SEQ ID NO: 1043396 - RNA, 23 nt, Human
aguagcugggacuacaggcaugu

SEQ ID NO: 1043397 - RNA, 23 nt, Human
agucacuuuuuuuuuuuuuuuuu

SEQ ID NO: 1043398 - RNA, 24 nt, Human
agugauuauccugccucagccucc

SEQ ID NO: 1043399 - RNA, 20 nt, Human
agugcaguggcacaaucucg

SEQ ID NO: 1043400 - RNA, 24 nt, Human
agugcaguggcacaaucucggcuc

SEQ ID NO: 1043401 - RNA, 18 nt, Human
agugcaguggcaugauca

SEQ ID NO: 1043402 - RNA, 20 nt, Human
agugcaguggcaugaucauc

SEQ ID NO: 1043403 - RNA, 21 nt, Human
agugcaguggcaugaucaucg

SEQ ID NO: 1043404 - RNA, 20 nt, Human
agugcaguggugcaaucucg

SEQ ID NO: 1043405 - RNA, 24 nt, Human
agugcaguggugcaaucucggcuc

SEQ ID NO: 1043406 - RNA, 18 nt, Human
agugcugggauuacaggc

SEQ ID NO: 1043407 - RNA, 18 nt, Human
augggguuucaccguguu

SEQ ID NO: 1043408 - RNA, 19 nt, Human
augggguuucaccguguua

SEQ ID NO: 1043409 - RNA, 20 nt, Human
augggguuucaccguguuag

SEQ ID NO: 1043410 - RNA, 24 nt, Human
augggguuucaccguguuagccag

SEQ ID NO: 1043411 - RNA, 20 nt, Human
caaaccccacccgcgcccag

SEQ ID NO: 1043412 - RNA, 21 nt, Human
caaagugcuggaauuagagua

SEQ ID NO: 1043413 - RNA, 19 nt, Human
caaagugcugggauuacag

SEQ ID NO: 1043414 - RNA, 21 nt, Human
caaagugcugggauuacaggc

SEQ ID NO: 1043415 - RNA, 24 nt, Human
caaagugcugggauuacaggcgug

SEQ ID NO: 1043416 - RNA, 24 nt, Human
caaagugcugggauuacaggugug

SEQ ID NO: 1043417 - RNA, 23 nt, Human
caaccuccuccuccugguucaag

SEQ ID NO: 1043418 - RNA, 22 nt, Human
caagcaaucuuccugccucggc

SEQ ID NO: 1043419 - RNA, 27 nt, Human
caagcaaucuuccugccucggccuccc

SEQ ID NO: 1043420 - RNA, 22 nt, Human
caagcgauucuccugccucagc

SEQ ID NO: 1043421 - RNA, 24 nt, Human
caagugaucuucccucgucaucuc

SEQ ID NO: 1043422 - RNA, 22 nt, Human
caagugauuauccugccucagc

SEQ ID NO: 1043423 - RNA, 19 nt, Human
cacagucacuuuuuuuuuu

SEQ ID NO: 1043424 - RNA, 24 nt, Human
caccaugcccggcuaauuuuugua

SEQ ID NO: 1043425 - RNA, 22 nt, Human
caccauguugcccagacugguc

SEQ ID NO: 1043426 - RNA, 23 nt, Human
caccauguugcccagacuggucu

SEQ ID NO: 1043427 - RNA, 24 nt, Human
caccauguugcccagacuggucuu

SEQ ID NO: 1043428 - RNA, 18 nt, Human
caccauguuggccaggau

SEQ ID NO: 1043429 - RNA, 22 nt, Human
caccauguuggccaggaugguc

SEQ ID NO: 1043430 - RNA, 24 nt, Human
caccauguuggccaggauggucuc

SEQ ID NO: 1043431 - RNA, 19 nt, Human
caccgugugaacccguagu

SEQ ID NO: 1043432 - RNA, 18 nt, Human
caccguguuagccaggau

SEQ ID NO: 1043433 - RNA, 24 nt, Human
caccguguuagccaggauggucuc

SEQ ID NO: 1043434 - RNA, 20 nt, Human
cacucucacccaagcuggag

SEQ ID NO: 1043435 - RNA, 21 nt, Human
cacugcaaccuccuccuccug

SEQ ID NO: 1043436 - RNA, 19 nt, Human
cagaguagggccccaaauu

SEQ ID NO: 1043437 - RNA, 18 nt, Human
cagcaggagagccccaaa

SEQ ID NO: 1043438 - RNA, 21 nt, Human
cagccucuuaacuccugggcu

SEQ ID NO: 1043439 - RNA, 24 nt, Human
cagccucuuaacuccugggcucaa

SEQ ID NO: 1043440 - RNA, 21 nt, Human
caggcacgcaacaccaugccc

SEQ ID NO: 1043441 - RNA, 21 nt, Human
caguagagaugggguuucacc

SEQ ID NO: 1043442 - RNA, 24 nt, Human
caguagagaugggguuucaccgug

SEQ ID NO: 1043443 - RNA, 26 nt, Human
caguagagaugggguuucaccguguu

SEQ ID NO: 1043444 - RNA, 20 nt, Human
cauguugcccagacuggucu

SEQ ID NO: 1043445 - RNA, 24 nt, Human
cauguugcccagacuggucuugaa

SEQ ID NO: 1043446 - RNA, 21 nt, Human
cauugguguuugaaacagcug

SEQ ID NO: 1043447 - RNA, 20 nt, Human
ccaaagugcuggaauuagag

SEQ ID NO: 1043448 - RNA, 21 nt, Human
ccaaagugcuggaauuagagu

SEQ ID NO: 1043449 - RNA, 21 nt, Human
ccaaagugcugggauuacagg

SEQ ID NO: 1043450 - RNA, 21 nt, Human
ccaaagugcugggauuacagg

SEQ ID NO: 1043451 - RNA, 24 nt, Human
ccaaagugcugggauuacaggugu

SEQ ID NO: 1043452 - RNA, 23 nt, Human
ccacccuacuccaagaugagauc

SEQ ID NO: 1043453 - RNA, 20 nt, Human
ccacgcccggcccaccacga

SEQ ID NO: 1043454 - RNA, 22 nt, Human
ccaucuguaaugauccuauuuc

SEQ ID NO: 1043455 - RNA, 21 nt, Human
ccauugggcgggggccaggag

SEQ ID NO: 1043456 - RNA, 23 nt, Human
cccaagcuggagugcaguggcau

SEQ ID NO: 1043457 - RNA, 23 nt, Human
cccaaguagcugggacuacaggc

SEQ ID NO: 1043458 - RNA, 24 nt, Human
cccaaguagcugggacuacaggca

SEQ ID NO: 1043459 - RNA, 22 nt, Human
cccacaaaccccacccgcgccc

SEQ ID NO: 1043460 - RNA, 25 nt, Human
cccacaaaccccacccgcgcccagc

SEQ ID NO: 1043461 - RNA, 21 nt, Human
cccacccgcgcccagcaggag

SEQ ID NO: 1043462 - RNA, 24 nt, Human
cccacccuacuccaagaugagauc

SEQ ID NO: 1043463 - RNA, 20 nt, Human
cccagguucaagcgauucuc

SEQ ID NO: 1043464 - RNA, 23 nt, Human
cccagguucaagcgauucuccug

SEQ ID NO: 1043465 - RNA, 21 nt, Human
ccccaaaaggcgcgaggggcg

SEQ ID NO: 1043466 - RNA, 19 nt, Human
cccccuaacacuucccuuc

SEQ ID NO: 1043467 - RNA, 21 nt, Human
cccccuuuuuuuaaggacccc

SEQ ID NO: 1043468 - RNA, 22 nt, Human
ccccuaacacuucccuuccccc

SEQ ID NO: 1043469 - RNA, 24 nt, Human
ccccuaacacuucccuucccccag

SEQ ID NO: 1043470 - RNA, 23 nt, Human
cccgaguagcugggacuacaggc

SEQ ID NO: 1043471 - RNA, 24 nt, Human
cccgaguagcugggacuacaggca

SEQ ID NO: 1043472 - RNA, 22 nt, Human
cccgcgcccagcaggagagccc

SEQ ID NO: 1043473 - RNA, 19 nt, Human
ccgcccgccucagccucuc

SEQ ID NO: 1043474 - RNA, 24 nt, Human
ccgccucagccucccaaagugcug

SEQ ID NO: 1043475 - RNA, 23 nt, Human
ccgccucagccucucaaagugcu

SEQ ID NO: 1043476 - RNA, 26 nt, Human
ccgcgacuugcccccuaacacuuccc

SEQ ID NO: 1043477 - RNA, 20 nt, Human
ccgcggcggugggagcagcg

SEQ ID NO: 1043478 - RNA, 24 nt, Human
ccucccagguucaagcgauucucc

SEQ ID NO: 1043479 - RNA, 22 nt, Human
ccucuccccauugggcgggggc

SEQ ID NO: 1043480 - RNA, 22 nt, Human
ccugcaaccugcgccucccagg

SEQ ID NO: 1043481 - RNA, 23 nt, Human
ccugccucagccucccaaguagc

SEQ ID NO: 1043482 - RNA, 23 nt, Human
ccugccucagccucccgaguagc

SEQ ID NO: 1043483 - RNA, 24 nt, Human
ccugccucagccucccgaguagcu

SEQ ID NO: 1043484 - RNA, 22 nt, Human
ccugggcucaagugaucuuccc

SEQ ID NO: 1043485 - RNA, 19 nt, Human
ccugguucaagugauuauc

SEQ ID NO: 1043486 - RNA, 22 nt, Human
ccugguucaagugauuauccug

SEQ ID NO: 1043487 - RNA, 21 nt, Human
cgcaacaccaugcccggcuaa

SEQ ID NO: 1043488 - RNA, 24 nt, Human
cgggguuucaccauguuggccagg

SEQ ID NO: 1043489 - RNA, 22 nt, Human
cguccaaccgucggggguccgu

SEQ ID NO: 1043490 - RNA, 24 nt, Human
cgugauccgcccgccucagccucu

SEQ ID NO: 1043491 - RNA, 20 nt, Human
cucaaaggagacaggucacc

SEQ ID NO: 1043492 - RNA, 20 nt, Human
cucaagugaucuucccucgu

SEQ ID NO: 1043493 - RNA, 19 nt, Human
cucacugcaaccuccuccu

SEQ ID NO: 1043494 - RNA, 23 nt, Human
cucacugcaaccuccuccuccug

SEQ ID NO: 1043495 - RNA, 24 nt, Human
cucacugcaaccuccuccuccugg

SEQ ID NO: 1043496 - RNA, 25 nt, Human
cucagcauccucucaaaggagacag

SEQ ID NO: 1043497 - RNA, 24 nt, Human
cucagccucccaaguagcugggac

SEQ ID NO: 1043498 - RNA, 24 nt, Human
cucagccucccgaguagcugggac

SEQ ID NO: 1043499 - RNA, 24 nt, Human
cuccugaccucgugauccgcccgc

SEQ ID NO: 1043500 - RNA, 23 nt, Human
cuccugggcucaagugaucuucc

SEQ ID NO: 1043501 - RNA, 22 nt, Human
cucgcucugucaccaggcugaa

SEQ ID NO: 1043502 - RNA, 18 nt, Human
cugcaaccuccgccuccc

SEQ ID NO: 1043503 - RNA, 23 nt, Human
cugcaaccuccuccuccugguuc

SEQ ID NO: 1043504 - RNA, 23 nt, Human
cugcaaccugcgccucccagguu

SEQ ID NO: 1043505 - RNA, 24 nt, Human
cugcagccucuuaacuccugggcu

SEQ ID NO: 1043506 - RNA, 23 nt, Human
cugccucagccucccaaguagcu

SEQ ID NO: 1043507 - RNA, 23 nt, Human
cugccucggccucccaaagugcu

SEQ ID NO: 1043508 - RNA, 19 nt, Human
cugucaccaggcugaagug

SEQ ID NO: 1043509 - RNA, 18 nt, Human
cugucacccaggcuggag

SEQ ID NO: 1043510 - RNA, 25 nt, Human
cuuuuggcuuuuacaucaagcgacc

SEQ ID NO: 1043511 - RNA, 23 nt, Human
gacccaggggucggcguggccca

SEQ ID NO: 1043512 - RNA, 22 nt, Human
gaccucgugauccgcccgccuc

SEQ ID NO: 1043513 - RNA, 24 nt, Human
gaccucgugauccgcccgccucag

SEQ ID NO: 1043514 - RNA, 24 nt, Human
gaccuugugaucugcccgccucag

SEQ ID NO: 1043515 - RNA, 22 nt, Human
gacuacaggcacgcaacaccau

SEQ ID NO: 1043516 - RNA, 24 nt, Human
gacuacaggcaugugccaccaugc

SEQ ID NO: 1043517 - RNA, 24 nt, Human
gacuugcccccuaacacuucccuu

SEQ ID NO: 1043518 - RNA, 24 nt, Human
gagacgggguuucaccauguuggc

SEQ ID NO: 1043519 - RNA, 18 nt, Human
gagaugggguuucaccgu

SEQ ID NO: 1043520 - RNA, 24 nt, Human
gagaugggguuucaccguguuagc

SEQ ID NO: 1043521 - RNA, 20 nt, Human
gagcagcgccggagccgggg

SEQ ID NO: 1043522 - RNA, 25 nt, Human
gaguagcugggacuacaggcaugug

SEQ ID NO: 1043523 - RNA, 18 nt, Human
gagugcaguggcaugauc

SEQ ID NO: 1043524 - RNA, 20 nt, Human
gaguucaagcaaucuuccug

SEQ ID NO: 1043525 - RNA, 18 nt, Human
gauuacaggcgugagcca

SEQ ID NO: 1043526 - RNA, 22 nt, Human
gauuacaggcgugagccaccgc

SEQ ID NO: 1043527 - RNA, 22 nt, Human
gauuacaggcgugagccaccgc

SEQ ID NO: 1043528 - RNA, 18 nt, Human
gauuacaggugugagcca

SEQ ID NO: 1043529 - RNA, 21 nt, Human
gauuacaggugugagccacca

SEQ ID NO: 1043530 - RNA, 22 nt, Human
gauuacaggugugagccaccac

SEQ ID NO: 1043531 - RNA, 20 nt, Human
gauugggagaaaagaggugg

SEQ ID NO: 1043532 - RNA, 21 nt, Human
gcaaccuccuccuccugguuc

SEQ ID NO: 1043533 - RNA, 21 nt, Human
gcaaccugcgccucccagguu

SEQ ID NO: 1043534 - RNA, 22 nt, Human
gcaaccugcgccucccagguuc

SEQ ID NO: 1043535 - RNA, 23 nt, Human
gcccagcuaauuuuuuguauuuu

SEQ ID NO: 1043536 - RNA, 18 nt, Human
gccccaaaaggcgcgagg

SEQ ID NO: 1043537 - RNA, 22 nt, Human
gcccggcccaccacgauaauuu

SEQ ID NO: 1043538 - RNA, 22 nt, Human
gcccggcuaauuuuuguauuuu

SEQ ID NO: 1043539 - RNA, 23 nt, Human
gccucagccucccaaagugcugg

SEQ ID NO: 1043540 - RNA, 23 nt, Human
gccucagccucucaaagugcugg

SEQ ID NO: 1043541 - RNA, 24 nt, Human
gcgauucuccugccucagccuccc

SEQ ID NO: 1043542 - RNA, 20 nt, Human
gcucacugcaaccuccuccu

SEQ ID NO: 1043543 - RNA, 22 nt, Human
gcucacugcaaccuccuccucc

SEQ ID NO: 1043544 - RNA, 25 nt, Human
gcucugucacccaggcuggagugca

SEQ ID NO: 1043545 - RNA, 19 nt, Human
gcuggagugcaguggcaca

SEQ ID NO: 1043546 - RNA, 24 nt, Human
ggacuacaggcaugugccaccaug

SEQ ID NO: 1043547 - RNA, 27 nt, Human
ggagagccccaaaaggcgcgaggggcg

SEQ ID NO: 1043548 - RNA, 24 nt, Human
ggauggucucgaucuccugaccuc

SEQ ID NO: 1043549 - RNA, 20 nt, Human
ggccaggaggagaggugaca

SEQ ID NO: 1043550 - RNA, 22 nt, Human
ggcggugggagcagcgccggaa

SEQ ID NO: 1043551 - RNA, 19 nt, Human
gggcucaagugaucuuccc

SEQ ID NO: 1043552 - RNA, 24 nt, Human
ggggccaggaggagaggugacauu

SEQ ID NO: 1043553 - RNA, 19 nt, Human
ggggcccacccuacuccaa

SEQ ID NO: 1043554 - RNA, 23 nt, Human
gggguuucaccauguuggccagg

SEQ ID NO: 1043555 - RNA, 22 nt, Human
gggguuucaccguguuagccag

SEQ ID NO: 1043556 - RNA, 22 nt, Human
ggguuucaccguguuagccagg

SEQ ID NO: 1043557 - RNA, 24 nt, Human
gguuucaccauguuggccaggaug

SEQ ID NO: 1043558 - RNA, 23 nt, Human
guagagacgagggucucaccaug

SEQ ID NO: 1043559 - RNA, 23 nt, Human
guagagacgggguuucaccaugu

SEQ ID NO: 1043560 - RNA, 23 nt, Human
gucccacucucacccaagcugga

SEQ ID NO: 1043561 - RNA, 24 nt, Human
gucucgcucugucaccaggcugaa

SEQ ID NO: 1043562 - RNA, 24 nt, Human
gucuugcucugucacccaggcugg

SEQ ID NO: 1043563 - RNA, 22 nt, Human
gugagccacugcacguggccuc

SEQ ID NO: 1043564 - RNA, 22 nt, Human
gugauccgcccgccucagccuc

SEQ ID NO: 1043565 - RNA, 24 nt, Human
gugaucugcccgccucagccuccc

SEQ ID NO: 1043566 - RNA, 24 nt, Human
gugauuauccugccucagccuccc

SEQ ID NO: 1043567 - RNA, 24 nt, Human
guggaaaaaaacccacaaacccca

SEQ ID NO: 1043568 - RNA, 18 nt, Human
guggcccagaaaguacaa

SEQ ID NO: 1043569 - RNA, 21 nt, Human
guucaagugauuauccugccu

SEQ ID NO: 1043570 - RNA, 24 nt, Human
uaauuuuuguauuuuuaguagaga

SEQ ID NO: 1043571 - RNA, 24 nt, Human
uaauuuuuuguauuuucaguagag

SEQ ID NO: 1043572 - RNA, 25 nt, Human
uaauuuuuuguauuuucaguagaga

SEQ ID NO: 1043573 - RNA, 23 nt, Human
uacaggcacgcaacaccaugccc

SEQ ID NO: 1043574 - RNA, 24 nt, Human
uacaggcaugugccaccaugccca

SEQ ID NO: 1043575 - RNA, 23 nt, Human
uacaggcgugagccaccgcgccc

SEQ ID NO: 1043576 - RNA, 24 nt, Human
uacaggcgugagccaccgcgcccu

SEQ ID NO: 1043577 - RNA, 23 nt, Human
uacaggugugagccaccacgccc

SEQ ID NO: 1043578 - RNA, 22 nt, Human
uagagacgggguuucaccaugu

SEQ ID NO: 1043579 - RNA, 24 nt, Human
uaguagagacgggguuucaccaug

SEQ ID NO: 1043580 - RNA, 26 nt, Human
uaguagagacgggguuucaccauguu

SEQ ID NO: 1043581 - RNA, 22 nt, Human
ucaaagugcugggauuacaggc

SEQ ID NO: 1043582 - RNA, 24 nt, Human
ucaaagugcugggauuacaggcgu

SEQ ID NO: 1043583 - RNA, 24 nt, Human
ucaccauguuggccaggauggucu

SEQ ID NO: 1043584 - RNA, 22 nt, Human
ucacccaggcuggagugcagug

SEQ ID NO: 1043585 - RNA, 24 nt, Human
ucaccguguuagccaggauggucu

SEQ ID NO: 1043586 - RNA, 19 nt, Human
ucacugcaaccuccgccuc

SEQ ID NO: 1043587 - RNA, 21 nt, Human
ucacugcaaccuccgccuccc

SEQ ID NO: 1043588 - RNA, 23 nt, Human
ucacugcaaccuccgccucccug

SEQ ID NO: 1043589 - RNA, 24 nt, Human
ucacugcaaccuccgccucccugc

SEQ ID NO: 1043590 - RNA, 24 nt, Human
ucacugcaaccuccgccucccugc

SEQ ID NO: 1043591 - RNA, 23 nt, Human
ucacugcaaccuccuccuccugg

SEQ ID NO: 1043592 - RNA, 24 nt, Human
ucacugcaaccuccuccuccuggu

SEQ ID NO: 1043593 - RNA, 27 nt, Human
ucacugcaaccuccuccuccugguuca

SEQ ID NO: 1043594 - RNA, 25 nt, Human
ucacugcagccucuuaacuccuggg

SEQ ID NO: 1043595 - RNA, 18 nt, Human
ucagccucccaaguagcu

SEQ ID NO: 1043596 - RNA, 20 nt, Human
ucagccucccaaguagcugg

SEQ ID NO: 1043597 - RNA, 23 nt, Human
ucagccucccgaguagcugggac

SEQ ID NO: 1043598 - RNA, 18 nt, Human
ucaguagagaugggguuu

SEQ ID NO: 1043599 - RNA, 22 nt, Human
ucaguagagaugggguuucacc

SEQ ID NO: 1043600 - RNA, 24 nt, Human
ucaguagagaugggguuucaccgu

SEQ ID NO: 1043601 - RNA, 22 nt, Human
uccaagugggaggcagcagcuu

SEQ ID NO: 1043602 - RNA, 18 nt, Human
ucccaaagugcuggaauu

SEQ ID NO: 1043603 - RNA, 23 nt, Human
ucccaaagugcugggauuacagg

SEQ ID NO: 1043604 - RNA, 24 nt, Human
ucccaaguagcugggacuacaggc

SEQ ID NO: 1043605 - RNA, 22 nt, Human
ucccacucucacccaagcugga

SEQ ID NO: 1043606 - RNA, 21 nt, Human
ucccagguucaagcgauucuc

SEQ ID NO: 1043607 - RNA, 24 nt, Human
ucccagguucaagcgauucuccug

SEQ ID NO: 1043608 - RNA, 24 nt, Human
ucccgaguagcugggacuacaggc

SEQ ID NO: 1043609 - RNA, 24 nt, Human
ucccugcaaccugcgccucccagg

SEQ ID NO: 1043610 - RNA, 21 nt, Human
uccgcccgccucagccucuca

SEQ ID NO: 1043611 - RNA, 20 nt, Human
uccugggcucaagugaucuu

SEQ ID NO: 1043612 - RNA, 23 nt, Human
uccugguucaagugauuauccuc

SEQ ID NO: 1043613 - RNA, 23 nt, Human
uccugguucaagugauuauccug

SEQ ID NO: 1043614 - RNA, 22 nt, Human
uccuugugcgagggaugaaaau

SEQ ID NO: 1043615 - RNA, 24 nt, Human
ucucaaagugcugggauuacaggc

SEQ ID NO: 1043616 - RNA, 18 nt, Human
ucucaaguagcugggauu

SEQ ID NO: 1043617 - RNA, 22 nt, Human
ucucaaguagcugggauuauac

SEQ ID NO: 1043618 - RNA, 26 nt, Human
ucucaccauguugcccagacuggucu

SEQ ID NO: 1043619 - RNA, 26 nt, Human
ucuccugccucagccucccaaguagc

SEQ ID NO: 1043620 - RNA, 23 nt, Human
ucucgcucugucaccaggcugaa

SEQ ID NO: 1043621 - RNA, 23 nt, Human
ucugaguucaagcaaucuuccug

SEQ ID NO: 1043622 - RNA, 21 nt, Human
ucugcccgccucagccuccca

SEQ ID NO: 1043623 - RNA, 24 nt, Human
ucugucacccaggcuggagugcag

SEQ ID NO: 1043624 - RNA, 22 nt, Human
ucuuaacuccugggcucaagug

SEQ ID NO: 1043625 - RNA, 18 nt, Human
ucuugaacuucugaguuc

SEQ ID NO: 1043626 - RNA, 23 nt, Human
ucuugaacuucugaguucaagca

SEQ ID NO: 1043627 - RNA, 23 nt, Human
ucuugcucugucacccaggcugg

SEQ ID NO: 1043628 - RNA, 24 nt, Human
ucuugcucugucacccaggcugga

SEQ ID NO: 1043629 - RNA, 18 nt, Human
ucuuuuuuugagacagag

SEQ ID NO: 1043630 - RNA, 19 nt, Human
ugaaaggugguccccagag

SEQ ID NO: 1043631 - RNA, 24 nt, Human
ugaacuucugaguucaagcaaucu

SEQ ID NO: 1043632 - RNA, 19 nt, Human
ugaagugcaguggugcaau

SEQ ID NO: 1043633 - RNA, 24 nt, Human
ugaagugcaguggugcaaucucgg

SEQ ID NO: 1043634 - RNA, 18 nt, Human
ugagacagagucuugcuc

SEQ ID NO: 1043635 - RNA, 22 nt, Human
ugagacagagucuugcucuguc

SEQ ID NO: 1043636 - RNA, 21 nt, Human
ugaguucaagcaaucuuccug

SEQ ID NO: 1043637 - RNA, 24 nt, Human
ugaguucaagcaaucuuccugccu

SEQ ID NO: 1043638 - RNA, 18 nt, Human
ugcacguggccucaaucc

SEQ ID NO: 1043639 - RNA, 22 nt, Human
ugcaguggugcaaucucggcuc

SEQ ID NO: 1043640 - RNA, 24 nt, Human
ugcccagacuggucuugaacuucu

SEQ ID NO: 1043641 - RNA, 24 nt, Human
ugcccggcuaauuuuuguauuuuu

SEQ ID NO: 1043642 - RNA, 24 nt, Human
ugccucagccucccaaguagcugg

SEQ ID NO: 1043643 - RNA, 24 nt, Human
ugccucagccucccgaguagcugg

SEQ ID NO: 1043644 - RNA, 21 nt, Human
ugccucggccucccaaagugc

SEQ ID NO: 1043645 - RNA, 24 nt, Human
ugccucggccucccaaagugcugg

SEQ ID NO: 1043646 - RNA, 24 nt, Human
ugcucugucacccaggcuggagug

SEQ ID NO: 1043647 - RNA, 24 nt, Human
ugcugggauuacaggcgugagcca

SEQ ID NO: 1043648 - RNA, 24 nt, Human
ugcugggauuacaggugugagcca

SEQ ID NO: 1043649 - RNA, 19 nt, Human
uggaaaaaaacccacaaac

SEQ ID NO: 1043650 - RNA, 20 nt, Human
uggaaaaaaacccacaaacc

SEQ ID NO: 1043651 - RNA, 23 nt, Human
uggaaaaaaacccacaaacccca

SEQ ID NO: 1043652 - RNA, 24 nt, Human
uggaaaaaaacccacaaaccccac

SEQ ID NO: 1043653 - RNA, 22 nt, Human
uggaauuagaguagugagccac

SEQ ID NO: 1043654 - RNA, 22 nt, Human
uggaauuagaguagugagccac

SEQ ID NO: 1043655 - RNA, 24 nt, Human
uggaauuagaguagugagccacug

SEQ ID NO: 1043656 - RNA, 23 nt, Human
uggagugcaguggcacaaucucg

SEQ ID NO: 1043657 - RNA, 24 nt, Human
uggagugcaguggcacaaucucgg

SEQ ID NO: 1043658 - RNA, 19 nt, Human
uggagugcaguggcaugau

SEQ ID NO: 1043659 - RNA, 25 nt, Human
uggagugcaguggcaugaucaucgg

SEQ ID NO: 1043660 - RNA, 24 nt, Human
uggcacaaucucggcucacugcaa

SEQ ID NO: 1043661 - RNA, 24 nt, Human
uggccaggauggucucgaucucuu

SEQ ID NO: 1043662 - RNA, 22 nt, Human
uggcccagaaaguacaaacggg

SEQ ID NO: 1043663 - RNA, 21 nt, Human
uggccucaaucccccacuccc

SEQ ID NO: 1043664 - RNA, 24 nt, Human
ugggacuacaggcacgcaacacca

SEQ ID NO: 1043665 - RNA, 18 nt, Human
ugggacuacaggcaugug

SEQ ID NO: 1043666 - RNA, 21 nt, Human
ugggacuacaggcaugugcca

SEQ ID NO: 1043667 - RNA, 22 nt, Human
ugggacuacaggcaugugccac

SEQ ID NO: 1043668 - RNA, 24 nt, Human
ugggacuacaggcaugugccacca

SEQ ID NO: 1043669 - RNA, 20 nt, Human
ugggagcagcgccggagccg

SEQ ID NO: 1043670 - RNA, 18 nt, Human
ugggauuacaggcgugag

SEQ ID NO: 1043671 - RNA, 19 nt, Human
ugggauuacaggcgugagc

SEQ ID NO: 1043672 - RNA, 21 nt, Human
ugggauuacaggcgugagcca

SEQ ID NO: 1043673 - RNA, 22 nt, Human
ugggauuacaggcgugagccac

SEQ ID NO: 1043674 - RNA, 23 nt, Human
ugggauuacaggcgugagccacc

SEQ ID NO: 1043675 - RNA, 24 nt, Human
ugggauuacaggcgugagccaccg

SEQ ID NO: 1043676 - RNA, 18 nt, Human
ugggauuacaggugugag

SEQ ID NO: 1043677 - RNA, 19 nt, Human
ugggauuacaggugugagc

SEQ ID NO: 1043678 - RNA, 22 nt, Human
ugggauuacaggugugagccac

SEQ ID NO: 1043679 - RNA, 23 nt, Human
ugggauuacaggugugagccacc

SEQ ID NO: 1043680 - RNA, 24 nt, Human
ugggauuacaggugugagccacca

SEQ ID NO: 1043681 - RNA, 22 nt, Human
ugggauuauacgugugcaccac

SEQ ID NO: 1043682 - RNA, 24 nt, Human
ugggauuauacgugugcaccacca

SEQ ID NO: 1043683 - RNA, 20 nt, Human
ugggcucaagugaucuuccc

SEQ ID NO: 1043684 - RNA, 24 nt, Human
ugggguuucaccguguuagccagg

SEQ ID NO: 1043685 - RNA, 25 nt, Human
uguagagacgagggucucaccaugu

SEQ ID NO: 1043686 - RNA, 21 nt, Human
uguauuuuuaguagagacggg

SEQ ID NO: 1043687 - RNA, 22 nt, Human
ugugagccaccacgcccggccc

SEQ ID NO: 1043688 - RNA, 18 nt, Human
uuaguagagacgggguuu

SEQ ID NO: 1043689 - RNA, 22 nt, Human
uuaguagagacgggguuucacc

SEQ ID NO: 1043690 - RNA, 24 nt, Human
uuaguagagacgggguuucaccau

SEQ ID NO: 1043691 - RNA, 21 nt, Human
uucaagcaaucuuccugccuc

SEQ ID NO: 1043692 - RNA, 24 nt, Human
uucaagcaaucuuccugccucggc

SEQ ID NO: 1043693 - RNA, 21 nt, Human
uucaagcgauucuccugccuc

SEQ ID NO: 1043694 - RNA, 23 nt, Human
uucaagcgauucuccugccucag

SEQ ID NO: 1043695 - RNA, 24 nt, Human
uucaagcgauucuccugccucagc

SEQ ID NO: 1043696 - RNA, 18 nt, Human
uucaagugauuauccugc

SEQ ID NO: 1043697 - RNA, 21 nt, Human
uucaagugauuauccugccuc

SEQ ID NO: 1043698 - RNA, 23 nt, Human
uucaagugauuauccugccucag

SEQ ID NO: 1043699 - RNA, 24 nt, Human
uugcucugucacccaggcuggagu

SEQ ID NO: 1043700 - RNA, 19 nt, Human
uuucaccauguuggccagg

SEQ ID NO: 1043701 - RNA, 20 nt, Human
uuucaccauguuggccagga

SEQ ID NO: 1043702 - RNA, 19 nt, Human
uuucaccguguuagccagg

SEQ ID NO: 1043703 - RNA, 24 nt, Human
uuuucaguagagaugggguuucac

SEQ ID NO: 1043704 - RNA, 21 nt, Human
uuuuguauuuuuaguagagac

SEQ ID NO: 1043705 - RNA, 24 nt, Human
uuuuuaguagagacgggguuucac

SEQ ID NO: 1043706 - RNA, 21 nt, Human
uuuuuguauuuucaguagaga

SEQ ID NO: 1043707 - RNA, 20 nt, Human
uuuuuguauuuuuaguagag

SEQ ID NO: 1043708 - RNA, 24 nt, Human
uuuuuuguauuuucaguagagaug

SEQ ID NO: 1043709 - RNA, 28 nt, Human
uuuuuuuuuuguagagacgagggucuca

SEQ ID NO: 1043710 - RNA, 25 nt, Human
uuuuuuuuuuuuugagacgagucuc

SEQ ID NO: 1043711 - RNA, 18 nt, Human
uuuuuuuuuuuuuuuuug

SEQ ID NO: 1043712 - RNA, 19 nt, Human
aagagcuggaaauucacga

SEQ ID NO: 1043713 - RNA, 19 nt, Human
cagcugaaagguacaggua

SEQ ID NO: 1043714 - RNA, 19 nt, Human
cccugcuccugggcucucc

SEQ ID NO: 1043715 - RNA, 22 nt, Human
cuuguaagauuucucuccuggu

SEQ ID NO: 1043716 - RNA, 21 nt, Human
gaauuuucuggagcauuauac

SEQ ID NO: 1043717 - RNA, 21 nt, Human
uauuuuugaaagagcuggaaa

SEQ ID NO: 1043718 - RNA, 18 nt, Human
uccguggccucgcggccg

SEQ ID NO: 1043719 - RNA, 24 nt, Human
ugaauuuucuggagcauuauacau

SEQ ID NO: 1043720 - RNA, 24 nt, Human
ugugaauuuucuggagcauuauac

SEQ ID NO: 1043721 - RNA, 21 nt, Human
uugaaagagcuggaaauucac

SEQ ID NO: 1043722 - RNA, 21 nt, Human
uuuauuuuugaaagagcugga

SEQ ID NO: 1043723 - RNA, 22 nt, Human
aacccuaggccuccccaacccc

SEQ ID NO: 1043724 - RNA, 19 nt, Human
agcaguccugggaccugau

SEQ ID NO: 1043725 - RNA, 23 nt, Human
agugcaauggcgcgaucuuggcu

SEQ ID NO: 1043726 - RNA, 24 nt, Human
agugcaauggcgcgaucuuggcuc

SEQ ID NO: 1043727 - RNA, 18 nt, Human
caaccuccaccucccgag

SEQ ID NO: 1043728 - RNA, 21 nt, Human
cacugcaaccuccaccucccg

SEQ ID NO: 1043729 - RNA, 23 nt, Human
ccaccucccgaguagcugcgauc

SEQ ID NO: 1043730 - RNA, 19 nt, Human
ccacucccuggcuucaacc

SEQ ID NO: 1043731 - RNA, 23 nt, Human
cccaaccccacaacuuccuggga

SEQ ID NO: 1043732 - RNA, 18 nt, Human
cccaggcuggagugcaau

SEQ ID NO: 1043733 - RNA, 22 nt, Human
cccaggcuggagugcaauggcg

SEQ ID NO: 1043734 - RNA, 19 nt, Human
ccccaaccccacaacuucc

SEQ ID NO: 1043735 - RNA, 19 nt, Human
cccuaggccuccccaaccc

SEQ ID NO: 1043736 - RNA, 23 nt, Human
cccucugugggauggggacaggc

SEQ ID NO: 1043737 - RNA, 22 nt, Human
ccuaacccuaggccuccccaac

SEQ ID NO: 1043738 - RNA, 22 nt, Human
ccucaaggucuugccuaacccu

SEQ ID NO: 1043739 - RNA, 24 nt, Human
cucacugcaaccuccaccucccga

SEQ ID NO: 1043740 - RNA, 22 nt, Human
cuccccaaccccacaacuuccu

SEQ ID NO: 1043741 - RNA, 18 nt, Human
cucccuggcuucaacccc

SEQ ID NO: 1043742 - RNA, 18 nt, Human
cugaggacaaauggggac

SEQ ID NO: 1043743 - RNA, 18 nt, Human
cugcaaccuccaccuccc

SEQ ID NO: 1043744 - RNA, 18 nt, Human
gccuccccaaccccacaa

SEQ ID NO: 1043745 - RNA, 19 nt, Human
gcuggagugcaauggcgcg

SEQ ID NO: 1043746 - RNA, 24 nt, Human
ggaguugcccaggcuggagugcaa

SEQ ID NO: 1043747 - RNA, 19 nt, Human
gggauggggacaggcaggg

SEQ ID NO: 1043748 - RNA, 20 nt, Human
gucucuuucuuuuuuuucuu

SEQ ID NO: 1043749 - RNA, 21 nt, Human
ucacacuacauuaucuuccuc

SEQ ID NO: 1043750 - RNA, 18 nt, Human
ucacugcaaccuccaccu

SEQ ID NO: 1043751 - RNA, 19 nt, Human
ucacugcaaccuccaccuc

SEQ ID NO: 1043752 - RNA, 22 nt, Human
ucacugcaaccuccaccucccg

SEQ ID NO: 1043753 - RNA, 26 nt, Human
ucacugcaaccuccaccucccgagua

SEQ ID NO: 1043754 - RNA, 24 nt, Human
uccccaaccccacaacuuccuggg

SEQ ID NO: 1043755 - RNA, 24 nt, Human
ucccgaguagcugcgaucacaggc

SEQ ID NO: 1043756 - RNA, 19 nt, Human
uccuugcccucugugggau

SEQ ID NO: 1043757 - RNA, 20 nt, Human
ucucuuucuuuuuuuucuuu

SEQ ID NO: 1043758 - RNA, 20 nt, Human
ucuuuauaggcacacgggga

SEQ ID NO: 1043759 - RNA, 18 nt, Human
ugaugcagcccuuguagg

SEQ ID NO: 1043760 - RNA, 18 nt, Human
ugcccaggcuggagugca

SEQ ID NO: 1043761 - RNA, 21 nt, Human
ugcccaggcuggagugcaaug

SEQ ID NO: 1043762 - RNA, 21 nt, Human
ugcccaggcuggagugcaaug

SEQ ID NO: 1043763 - RNA, 24 nt, Human
ugccuaacccuaggccuccccaac

SEQ ID NO: 1043764 - RNA, 19 nt, Human
ugccucaaggucuugccua

SEQ ID NO: 1043765 - RNA, 23 nt, Human
uggagugcaauggcgcgaucuug

SEQ ID NO: 1043766 - RNA, 24 nt, Human
uggagugcaauggcgcgaucuugg

SEQ ID NO: 1043767 - RNA, 24 nt, Human
ugggauggucucuuucuuuuuuuu

SEQ ID NO: 1043768 - RNA, 18 nt, Human
uuccugggauggucucuu

SEQ ID NO: 1043769 - RNA, 22 nt, Human
uuucuuuuuuuucuuucuuuuu

SEQ ID NO: 1043770 - RNA, 20 nt, Human
uuuuuuuucuuucuuuucuu

SEQ ID NO: 1043771 - RNA, 23 nt, Human
acaacacagaccggcaguacccc

SEQ ID NO: 1043772 - RNA, 25 nt, Human
acacaucuacuucuaagacaacaca

SEQ ID NO: 1043773 - RNA, 20 nt, Human
acaucuacuucuaagacaac

SEQ ID NO: 1043774 - RNA, 18 nt, Human
accacugucacaacccca

SEQ ID NO: 1043775 - RNA, 18 nt, Human
accccaccccuucugcca

SEQ ID NO: 1043776 - RNA, 21 nt, Human
agacaggagcagagcagcagc

SEQ ID NO: 1043777 - RNA, 19 nt, Human
agcccccuccucccacccc

SEQ ID NO: 1043778 - RNA, 18 nt, Human
aggagacaggagcagagc

SEQ ID NO: 1043779 - RNA, 21 nt, Human
caaccccaauuuccucagccc

SEQ ID NO: 1043780 - RNA, 18 nt, Human
cacaaccccaauuuccuc

SEQ ID NO: 1043781 - RNA, 26 nt, Human
cacagaccggcaguaccccauccccc

SEQ ID NO: 1043782 - RNA, 21 nt, Human
caccccaccccuucugccaag

SEQ ID NO: 1043783 - RNA, 22 nt, Human
caccccuucugccaagcucccc

SEQ ID NO: 1043784 - RNA, 20 nt, Human
cacgcccagccucugcgccu

SEQ ID NO: 1043785 - RNA, 22 nt, Human
cagccacaccuccggccacaag

SEQ ID NO: 1043786 - RNA, 24 nt, Human
cagcccccuccucccaccccaccc

SEQ ID NO: 1043787 - RNA, 18 nt, Human
cagcugagcagcgucccu

SEQ ID NO: 1043788 - RNA, 19 nt, Human
ccccaccccuucugccaag

SEQ ID NO: 1043789 - RNA, 18 nt, Human
cccccuccucccacccca

SEQ ID NO: 1043790 - RNA, 19 nt, Human
ccccuccucccaccccacc

SEQ ID NO: 1043791 - RNA, 24 nt, Human
cccgcggcccaaaggaaccggggc

SEQ ID NO: 1043792 - RNA, 24 nt, Human
ccggcaguaccccaucccccauga

SEQ ID NO: 1043793 - RNA, 27 nt, Human
ccucccaccccaccccuucugccaagc

SEQ ID NO: 1043794 - RNA, 18 nt, Human
cgcugugggaagaggggc

SEQ ID NO: 1043795 - RNA, 19 nt, Human
cgcugugggaagaggggcu

SEQ ID NO: 1043796 - RNA, 18 nt, Human
cggcccaaaggaacaaga

SEQ ID NO: 1043797 - RNA, 26 nt, Human
cuccucccaccccaccccuucugcca

SEQ ID NO: 1043798 - RNA, 20 nt, Human
gacaggagacaggagcagag

SEQ ID NO: 1043799 - RNA, 24 nt, Human
gaccacugucacaaccccaauuuc

SEQ ID NO: 1043800 - RNA, 18 nt, Human
gagcagcagcugagcagc

SEQ ID NO: 1043801 - RNA, 18 nt, Human
gcaaguaggguaggacag

SEQ ID NO: 1043802 - RNA, 20 nt, Human
gcccccuccucccaccccac

SEQ ID NO: 1043803 - RNA, 24 nt, Human
gcggcccaaaggaacaagaagcug

SEQ ID NO: 1043804 - RNA, 22 nt, Human
gcgucgggccgucgacgagacc

SEQ ID NO: 1043805 - RNA, 22 nt, Human
ggaagaggggcuaugcgcgucg

SEQ ID NO: 1043806 - RNA, 18 nt, Human
ggcggcccccgcuccggc

SEQ ID NO: 1043807 - RNA, 19 nt, Human
guacagcccgcggcccaaa

SEQ ID NO: 1043808 - RNA, 26 nt, Human
uacagcccgcggcccaaaggaacaag

SEQ ID NO: 1043809 - RNA, 23 nt, Human
uccacagccacaccuccggccac

SEQ ID NO: 1043810 - RNA, 21 nt, Human
ucccaccccaccccuucugcc

SEQ ID NO: 1043811 - RNA, 22 nt, Human
ucccccaugaccacugucacaa

SEQ ID NO: 1043812 - RNA, 20 nt, Human
uccccggccagcucuccaca

SEQ ID NO: 1043813 - RNA, 21 nt, Human
uccucagcccccuccucccac

SEQ ID NO: 1043814 - RNA, 23 nt, Human
uccucagcccccuccucccaccc

SEQ ID NO: 1043815 - RNA, 24 nt, Human
uccucagcccccuccucccacccc

SEQ ID NO: 1043816 - RNA, 25 nt, Human
uccucccaccccaccccuucugcca

SEQ ID NO: 1043817 - RNA, 19 nt, Human
ucuccacagccacaccucc

SEQ ID NO: 1043818 - RNA, 19 nt, Human
ugaccacugucacaacccc

SEQ ID NO: 1043819 - RNA, 21 nt, Human
ugagcagcgucccuccccggc

SEQ ID NO: 1043820 - RNA, 26 nt, Human
ugccaagcuccccguaugggggcucu

SEQ ID NO: 1043821 - RNA, 24 nt, Human
ugguacagcccgcggcccaaagga

SEQ ID NO: 1043822 - RNA, 19 nt, Human
uguagcgcugugggaagag

SEQ ID NO: 1043823 - RNA, 24 nt, Human
ugucacaaccccaauuuccucagc

SEQ ID NO: 1043824 - RNA, 21 nt, Human
uuuccucagcccccuccuccc

SEQ ID NO: 1043825 - RNA, 21 nt, Human
aagaacauggucaagcaugug

SEQ ID NO: 1043826 - RNA, 23 nt, Human
aaguguccugcacucaugaaagu

SEQ ID NO: 1043827 - RNA, 21 nt, Human
aauugcucuucaucggggcac

SEQ ID NO: 1043828 - RNA, 21 nt, Human
acucacccacagucucugcag

SEQ ID NO: 1043829 - RNA, 18 nt, Human
aggcucuggagggagagc

SEQ ID NO: 1043830 - RNA, 19 nt, Human
auugggcuucucaugauga

SEQ ID NO: 1043831 - RNA, 21 nt, Human
caaaaagcaugugaaagaaca

SEQ ID NO: 1043832 - RNA, 21 nt, Human
caaaguaggugugcucaaagc

SEQ ID NO: 1043833 - RNA, 24 nt, Human
caagaaugaggugugugagcccug

SEQ ID NO: 1043834 - RNA, 20 nt, Human
caagcucaaccaagugcuuu

SEQ ID NO: 1043835 - RNA, 20 nt, Human
caaguaacucacccacaguc

SEQ ID NO: 1043836 - RNA, 24 nt, Human
caaguaacucacccacagucucug

SEQ ID NO: 1043837 - RNA, 23 nt, Human
caccuccaccuuauaggugagaa

SEQ ID NO: 1043838 - RNA, 24 nt, Human
cacugggccacugcugugucccaa

SEQ ID NO: 1043839 - RNA, 22 nt, Human
cagagccuggccuacuaacugu

SEQ ID NO: 1043840 - RNA, 18 nt, Human
caucggggcacgacaugg

SEQ ID NO: 1043841 - RNA, 19 nt, Human
caucucguugaauccucac

SEQ ID NO: 1043842 - RNA, 20 nt, Human
caugaguccgcaacgcccuc

SEQ ID NO: 1043843 - RNA, 19 nt, Human
cauggucaagcaugugcac

SEQ ID NO: 1043844 - RNA, 22 nt, Human
cauguguuuaggaggugggguu

SEQ ID NO: 1043845 - RNA, 22 nt, Human
ccagagccuggccuacuaacug

SEQ ID NO: 1043846 - RNA, 24 nt, Human
cccaaguacuaaauguucaucucg

SEQ ID NO: 1043847 - RNA, 24 nt, Human
ccuccaggaagucuucccugaucu

SEQ ID NO: 1043848 - RNA, 19 nt, Human
ccuccugcuucuuuuugcc

SEQ ID NO: 1043849 - RNA, 21 nt, Human
ccuccugcuucuuuuugccag

SEQ ID NO: 1043850 - RNA, 27 nt, Human
ccucgcccugcuucgaugucuccuucc

SEQ ID NO: 1043851 - RNA, 20 nt, Human
ccugcacucaugaaaguguc

SEQ ID NO: 1043852 - RNA, 22 nt, Human
ccuugugcuccuuccucccuca

SEQ ID NO: 1043853 - RNA, 21 nt, Human
cuaaaggaucccaucucuaug

SEQ ID NO: 1043854 - RNA, 27 nt, Human
cucaaguaacucacccacagucucugc

SEQ ID NO: 1043855 - RNA, 24 nt, Human
cucccucagaccuuuguccaggcu

SEQ ID NO: 1043856 - RNA, 19 nt, Human
cuccuugugcuccuuccuc

SEQ ID NO: 1043857 - RNA, 19 nt, Human
cucuguaggcugaaugcug

SEQ ID NO: 1043858 - RNA, 18 nt, Human
cugaaugguggagcuggg

SEQ ID NO: 1043859 - RNA, 24 nt, Human
cugcuucuuuuugccagcuacuau

SEQ ID NO: 1043860 - RNA, 21 nt, Human
cuguuuugcccuccccgggga

SEQ ID NO: 1043861 - RNA, 21 nt, Human
cuuacuuuuuugcuucucuca

SEQ ID NO: 1043862 - RNA, 22 nt, Human
cuuauugggcuucucaugauga

SEQ ID NO: 1043863 - RNA, 26 nt, Human
cuuccgaaacuacacgcggaacccaa

SEQ ID NO: 1043864 - RNA, 19 nt, Human
gaacauggucaagcaugug

SEQ ID NO: 1043865 - RNA, 20 nt, Human
gagggagagcacaggaagcc

SEQ ID NO: 1043866 - RNA, 23 nt, Human
gcccugcuucgaugucuccuucc

SEQ ID NO: 1043867 - RNA, 24 nt, Human
gcccugcuucgaugucuccuuccg

SEQ ID NO: 1043868 - RNA, 19 nt, Human
gccuuguguguuuuucugu

SEQ ID NO: 1043869 - RNA, 19 nt, Human
gcgcuuccuccugcuucuu

SEQ ID NO: 1043870 - RNA, 24 nt, Human
gggugccuggugccuggcuggugc

SEQ ID NO: 1043871 - RNA, 20 nt, Human
guccccagcauccuggaggg

SEQ ID NO: 1043872 - RNA, 20 nt, Human
uaaagacaucauuguauagc

SEQ ID NO: 1043873 - RNA, 21 nt, Human
uaacucacccacagucucugc

SEQ ID NO: 1043874 - RNA, 21 nt, Human
uacugugaaguaguucuuguc

SEQ ID NO: 1043875 - RNA, 21 nt, Human
ucaaaggggccaaaguaggug

SEQ ID NO: 1043876 - RNA, 20 nt, Human
uccaguuucuuccaguacug

SEQ ID NO: 1043877 - RNA, 21 nt, Human
uccccagcauccuggaggggc

SEQ ID NO: 1043878 - RNA, 18 nt, Human
ucguggggcugggaaucu

SEQ ID NO: 1043879 - RNA, 19 nt, Human
ucugcaggcugaauggugg

SEQ ID NO: 1043880 - RNA, 19 nt, Human
ucugcaggcugaauggugg

SEQ ID NO: 1043881 - RNA, 22 nt, Human
ucugcaggcugaaugguggagc

SEQ ID NO: 1043882 - RNA, 22 nt, Human
ucuguaggcugaaugcuggagc

SEQ ID NO: 1043883 - RNA, 21 nt, Human
ugaaaguguccugcacuccuu

SEQ ID NO: 1043884 - RNA, 21 nt, Human
ugaagcagcaagaaugaggug

SEQ ID NO: 1043885 - RNA, 19 nt, Human
ugaaugguggagcugggau

SEQ ID NO: 1043886 - RNA, 19 nt, Human
ugaaugguggagcugggau

SEQ ID NO: 1043887 - RNA, 22 nt, Human
ugagaaaauauuggcacagaga

SEQ ID NO: 1043888 - RNA, 20 nt, Human
ugagcccuguccccagcauc

SEQ ID NO: 1043889 - RNA, 18 nt, Human
ugaguccgcaacgcccuc

SEQ ID NO: 1043890 - RNA, 20 nt, Human
ugauaggggcugaagcagca

SEQ ID NO: 1043891 - RNA, 26 nt, Human
ugcacagagaacaugcuaaaggaucc

SEQ ID NO: 1043892 - RNA, 22 nt, Human
ugccuggcuggugcucagugag

SEQ ID NO: 1043893 - RNA, 23 nt, Human
uggcaaaaagcaugugaaagaaa

SEQ ID NO: 1043894 - RNA, 22 nt, Human
uggcacagagagcucaaguaac

SEQ ID NO: 1043895 - RNA, 23 nt, Human
ugucccaaguacuaaauguucau

SEQ ID NO: 1043896 - RNA, 19 nt, Human
ugucuccuuccgaaacuac

SEQ ID NO: 1043897 - RNA, 19 nt, Human
ugugagcccuguccccagc

SEQ ID NO: 1043898 - RNA, 20 nt, Human
uucaugcaguuaugaaagug

SEQ ID NO: 1043899 - RNA, 22 nt, Human
uuccuccugcuucuuuuugcca

SEQ ID NO: 1043900 - RNA, 21 nt, Human
uucuuacuuuaacaucauuuu

SEQ ID NO: 1043901 - RNA, 19 nt, Human
uugcuucucucacugaguu

SEQ ID NO: 1043902 - RNA, 24 nt, Human
uuuccagugagcuaugugauaggg

SEQ ID NO: 1043903 - RNA, 20 nt, Human
uuuguccaggcugucuccuc

SEQ ID NO: 1043904 - RNA, 23 nt, Human
cggggcccguggcagguuguacc

SEQ ID NO: 1043905 - RNA, 18 nt, Human
uaccaggcuucccaggcg

SEQ ID NO: 1043906 - RNA, 20 nt, Human
aacuccaggcaagcuuggcc

SEQ ID NO: 1043907 - RNA, 20 nt, Human
acucccaaggacacugacag

SEQ ID NO: 1043908 - RNA, 19 nt, Human
agagggugcccugaacucc

SEQ ID NO: 1043909 - RNA, 21 nt, Human
auugccagguuuuuagcaagg

SEQ ID NO: 1043910 - RNA, 23 nt, Human
auuugaaaacuuuuugacuguuc

SEQ ID NO: 1043911 - RNA, 27 nt, Human
caaggacacugacagcaguuggagacc

SEQ ID NO: 1043912 - RNA, 23 nt, Human
caggcaagcuuggccaagucuug

SEQ ID NO: 1043913 - RNA, 21 nt, Human
guggcuuucugucuccauucu

SEQ ID NO: 1043914 - RNA, 19 nt, Human
uaaaaacaaacaagaacac

SEQ ID NO: 1043915 - RNA, 18 nt, Human
uagggucccccugcaggg

SEQ ID NO: 1043916 - RNA, 20 nt, Human
uccaggcaagcuuggccaag

SEQ ID NO: 1043917 - RNA, 19 nt, Human
ucccaaggacacugacagc

SEQ ID NO: 1043918 - RNA, 21 nt, Human
ugccagaaauccagaucuuug

SEQ ID NO: 1043919 - RNA, 21 nt, Human
ugcccugaacuccaggcaagc

SEQ ID NO: 1043920 - RNA, 23 nt, Human
ugcccugaacuccaggcaagcuu

SEQ ID NO: 1043921 - RNA, 22 nt, Human
ugcuguacaggcccggccacgc

SEQ ID NO: 1043922 - RNA, 22 nt, Human
ugcuuagacaggacuuuggcuc

SEQ ID NO: 1043923 - RNA, 22 nt, Human
uggccaagucuugccagaaauc

SEQ ID NO: 1043924 - RNA, 20 nt, Human
uggcucugccguaggguccc

SEQ ID NO: 1043925 - RNA, 19 nt, Human
uggguuaaacgucugcacc

SEQ ID NO: 1043926 - RNA, 19 nt, Human
uucaaagcuuaaaaacaaa

SEQ ID NO: 1043927 - RNA, 20 nt, Human
uucaaagcuuaaaaacaaac

SEQ ID NO: 1043928 - RNA, 18 nt, Human
agugcagacagauuucgc

SEQ ID NO: 1043929 - RNA, 28 nt, Human
caggccgauuccuagagggugaaacuga

SEQ ID NO: 1043930 - RNA, 25 nt, Human
cauggacauggaucgcgcgcacgcg

SEQ ID NO: 1043931 - RNA, 23 nt, Human
ccgcaccacggaccccgccagcu

SEQ ID NO: 1043932 - RNA, 22 nt, Human
cgcaaucucgaucccgcaccac

SEQ ID NO: 1043933 - RNA, 23 nt, Human
cgcaaucucgaucccgcaccacg

SEQ ID NO: 1043934 - RNA, 20 nt, Human
cgcgcacgcgccggggaccg

SEQ ID NO: 1043935 - RNA, 18 nt, Human
gcgggccggcaacaagug

SEQ ID NO: 1043936 - RNA, 20 nt, Human
uagagggugaaacugaggac

SEQ ID NO: 1043937 - RNA, 20 nt, Human
ucagugcagacagauuucgc

SEQ ID NO: 1043938 - RNA, 23 nt, Human
ucucgggcugcgcgcgcaaccuu

SEQ ID NO: 1043939 - RNA, 25 nt, Human
aaacccaacagucccaaaugugccc

SEQ ID NO: 1043940 - RNA, 21 nt, Human
aagcagaaagaaucagcaggg

SEQ ID NO: 1043941 - RNA, 23 nt, Human
aaggaagauagaaacggaaacga

SEQ ID NO: 1043942 - RNA, 18 nt, Human
agacccagggcauuuggc

SEQ ID NO: 1043943 - RNA, 21 nt, Human
cacagggacccccagcacugg

SEQ ID NO: 1043944 - RNA, 26 nt, Human
cacccucuuugaccggucccucugcc

SEQ ID NO: 1043945 - RNA, 22 nt, Human
caccugaaaguggaggagcggg

SEQ ID NO: 1043946 - RNA, 22 nt, Human
cagacccgcagccccucaaggu

SEQ ID NO: 1043947 - RNA, 24 nt, Human
caggugaaggggaccauccucaug

SEQ ID NO: 1043948 - RNA, 25 nt, Human
cccaaaagcuuuagaccccaaaggc

SEQ ID NO: 1043949 - RNA, 20 nt, Human
cccacgagggucagggcagg

SEQ ID NO: 1043950 - RNA, 18 nt, Human
cccaggguuggaaagggg

SEQ ID NO: 1043951 - RNA, 22 nt, Human
ccccaaaggcagaaacauuucu

SEQ ID NO: 1043952 - RNA, 19 nt, Human
cccucugcccucagacuag

SEQ ID NO: 1043953 - RNA, 19 nt, Human
ccgcagccccucaaggugc

SEQ ID NO: 1043954 - RNA, 23 nt, Human
ccucagacccgcagccccucaag

SEQ ID NO: 1043955 - RNA, 21 nt, Human
ccucagacuagcggaagcaaa

SEQ ID NO: 1043956 - RNA, 19 nt, Human
ccuccagcuccuaaacugg

SEQ ID NO: 1043957 - RNA, 18 nt, Human
ccuccucccucagacugg

SEQ ID NO: 1043958 - RNA, 20 nt, Human
ccucugggcuuacugccggc

SEQ ID NO: 1043959 - RNA, 20 nt, Human
cgaaaaacccaacaguccca

SEQ ID NO: 1043960 - RNA, 19 nt, Human
cggcucccggcuccacagu

SEQ ID NO: 1043961 - RNA, 19 nt, Human
cucagacccgcagccccuc

SEQ ID NO: 1043962 - RNA, 21 nt, Human
cuuuguguccaccaggugugg

SEQ ID NO: 1043963 - RNA, 23 nt, Human
gaaaaacccaacagucccaaagg

SEQ ID NO: 1043964 - RNA, 19 nt, Human
gacccagggcauuuggcaa

SEQ ID NO: 1043965 - RNA, 24 nt, Human
gcaccaaggugaaggguuugaggg

SEQ ID NO: 1043966 - RNA, 19 nt, Human
gcagggcagggggugggcg

SEQ ID NO: 1043967 - RNA, 21 nt, Human
gcagggggugggcgccccauc

SEQ ID NO: 1043968 - RNA, 22 nt, Human
gcaguuugggggugggggacaa

SEQ ID NO: 1043969 - RNA, 22 nt, Human
gggcagggcagggggugggcgc

SEQ ID NO: 1043970 - RNA, 19 nt, Human
gggguggagaccucugggc

SEQ ID NO: 1043971 - RNA, 19 nt, Human
ggugcaccaaggugaaggg

SEQ ID NO: 1043972 - RNA, 19 nt, Human
uagacccagggcauuuggc

SEQ ID NO: 1043973 - RNA, 24 nt, Human
ucagacccgcagccccucaaggug

SEQ ID NO: 1043974 - RNA, 21 nt, Human
ucagacuggaugguuucccag

SEQ ID NO: 1043975 - RNA, 27 nt, Human
uccagguuuauuucagggcaguuuggg

SEQ ID NO: 1043976 - RNA, 22 nt, Human
ucccgugggguggagaccucug

SEQ ID NO: 1043977 - RNA, 21 nt, Human
uccucccucagacuggauggu

SEQ ID NO: 1043978 - RNA, 20 nt, Human
ucucagagggaggagcugag

SEQ ID NO: 1043979 - RNA, 21 nt, Human
uggcaaagucuuagaagcaga

SEQ ID NO: 1043980 - RNA, 18 nt, Human
uggcaguucccacgaggg

SEQ ID NO: 1043981 - RNA, 23 nt, Human
ugggaguuuggccuccucccuca

SEQ ID NO: 1043982 - RNA, 26 nt, Human
ugggauuguuggcagaugagcugugg

SEQ ID NO: 1043983 - RNA, 22 nt, Human
ugggguggagaccucugggcuu

SEQ ID NO: 1043984 - RNA, 21 nt, Human
ugugccacccucuuugaccgg

SEQ ID NO: 1043985 - RNA, 22 nt, Human
uucuuagacccagggcauuugg

SEQ ID NO: 1043986 - RNA, 19 nt, Human
uuggcaaagucuuagaagc

SEQ ID NO: 1043987 - RNA, 21 nt, Human
uuucuaaaggaagauagaaac

SEQ ID NO: 1043988 - RNA, 20 nt, Human
aaaaaaaaacagggauggga

SEQ ID NO: 1043989 - RNA, 25 nt, Human
aaacaaacaaacaaacaacaacaac

SEQ ID NO: 1043990 - RNA, 28 nt, Human
aaacaaacaacaacaacaaaaaaaaaca

SEQ ID NO: 1043991 - RNA, 23 nt, Human
aaacaacaacaacaaaaaaaaac

SEQ ID NO: 1043992 - RNA, 19 nt, Human
aaauacaaaaauuagcucg

SEQ ID NO: 1043993 - RNA, 24 nt, Human
aacaaacaaacaaacaacaacaac

SEQ ID NO: 1043994 - RNA, 22 nt, Human
aacaaacaaacaacaacaacaa

SEQ ID NO: 1043995 - RNA, 21 nt, Human
aacaaacaacaacaacaaaaa

SEQ ID NO: 1043996 - RNA, 21 nt, Human
aacaacaaaaaaaaacaggga

SEQ ID NO: 1043997 - RNA, 19 nt, Human
aacauggcgaaaccccauc

SEQ ID NO: 1043998 - RNA, 20 nt, Human
aacauggcgaaaccccaucu

SEQ ID NO: 1043999 - RNA, 21 nt, Human
aacauggcgaaaccccaucuc

SEQ ID NO: 1044000 - RNA, 21 nt, Human
aacauggcgaaaccccaucuc

SEQ ID NO: 1044001 - RNA, 21 nt, Human
aagcaaccuuuugggucccac

SEQ ID NO: 1044002 - RNA, 24 nt, Human
aaucacuugaacccaggaggcgga

SEQ ID NO: 1044003 - RNA, 23 nt, Human
acaacaacaaaaaaaaacaggga

SEQ ID NO: 1044004 - RNA, 31 nt, Human
acacucaguuucaaaaacaaacaaacaaacc

SEQ ID NO: 1044005 - RNA, 20 nt, Human
acagugaccguccugucccc

SEQ ID NO: 1044006 - RNA, 22 nt, Human
acccacgcacccugagccagca

SEQ ID NO: 1044007 - RNA, 24 nt, Human
accgcagcauugcacuccagccug

SEQ ID NO: 1044008 - RNA, 19 nt, Human
accguccuguccccuuguu

SEQ ID NO: 1044009 - RNA, 24 nt, Human
acuccagccugggugacagaguga

SEQ ID NO: 1044010 - RNA, 19 nt, Human
agaucagggaccugggaag

SEQ ID NO: 1044011 - RNA, 23 nt, Human
agaucgcuugaggucaggaguuc

SEQ ID NO: 1044012 - RNA, 22 nt, Human
agccagcagccucaucagccuc

SEQ ID NO: 1044013 - RNA, 24 nt, Human
agccuggccaacauggcgaaaccc

SEQ ID NO: 1044014 - RNA, 24 nt, Human
agccugggugacagagugacacuc

SEQ ID NO: 1044015 - RNA, 20 nt, Human
agcguccaugccagggugcc

SEQ ID NO: 1044016 - RNA, 23 nt, Human
agcucggcaugguggcgggugcu

SEQ ID NO: 1044017 - RNA, 24 nt, Human
aggaccucaagcuucugcaggugg

SEQ ID NO: 1044018 - RNA, 22 nt, Human
aggaggccgaggcgggcagauc

SEQ ID NO: 1044019 - RNA, 23 nt, Human
aggaggcugaggcaggagaauca

SEQ ID NO: 1044020 - RNA, 18 nt, Human
aggcacguggcacugaac

SEQ ID NO: 1044021 - RNA, 18 nt, Human
aggcaggagaaucacuug

SEQ ID NO: 1044022 - RNA, 23 nt, Human
aggcaggagaaucacuugaaccc

SEQ ID NO: 1044023 - RNA, 24 nt, Human
aggcaggagaaucacuugaaccca

SEQ ID NO: 1044024 - RNA, 21 nt, Human
aggccgaggcgggcagaucgc

SEQ ID NO: 1044025 - RNA, 24 nt, Human
aggccgaggcgggcagaucgcuug

SEQ ID NO: 1044026 - RNA, 24 nt, Human
aggcggagguugcagugagcugag

SEQ ID NO: 1044027 - RNA, 21 nt, Human
aggcgggcagaucgcuugagg

SEQ ID NO: 1044028 - RNA, 22 nt, Human
aggcgggcagaucgcuugaggu

SEQ ID NO: 1044029 - RNA, 26 nt, Human
aggcgggcagaucgcuugaggucagg

SEQ ID NO: 1044030 - RNA, 24 nt, Human
aggcugaggcaggagaaucacuug

SEQ ID NO: 1044031 - RNA, 18 nt, Human
aggcugggaagccagguc

SEQ ID NO: 1044032 - RNA, 19 nt, Human
agggaugggagguggggag

SEQ ID NO: 1044033 - RNA, 21 nt, Human
agggaugggagguggggagca

SEQ ID NO: 1044034 - RNA, 18 nt, Human
aggggcccugagaggggc

SEQ ID NO: 1044035 - RNA, 24 nt, Human
agggugccccccauucaagcaacc

SEQ ID NO: 1044036 - RNA, 23 nt, Human
aguggccacgccuguaaucccag

SEQ ID NO: 1044037 - RNA, 20 nt, Human
auagucgggaguggaggggc

SEQ ID NO: 1044038 - RNA, 24 nt, Human
aucgcuugaggucaggaguucgag

SEQ ID NO: 1044039 - RNA, 18 nt, Human
auugcacuccagccuggg

SEQ ID NO: 1044040 - RNA, 21 nt, Human
auugcacuccagccuggguga

SEQ ID NO: 1044041 - RNA, 24 nt, Human
auugcacuccagccugggugacag

SEQ ID NO: 1044042 - RNA, 27 nt, Human
caaaaacaaacaaacaaacaacaaccg

SEQ ID NO: 1044043 - RNA, 21 nt, Human
caacaaaaaaaaacagggaug

SEQ ID NO: 1044044 - RNA, 22 nt, Human
cacagugaccguccuguccccu

SEQ ID NO: 1044045 - RNA, 22 nt, Human
cacgcacccugagccagcagcc

SEQ ID NO: 1044046 - RNA, 23 nt, Human
cacgccuguaaucccagcacuuc

SEQ ID NO: 1044047 - RNA, 22 nt, Human
cacuccagccugggugacagag

SEQ ID NO: 1044048 - RNA, 24 nt, Human
cacuccagccugggugacagagug

SEQ ID NO: 1044049 - RNA, 19 nt, Human
cacugccacgcuuuugccu

SEQ ID NO: 1044050 - RNA, 24 nt, Human
cagaucgcuugaggucaggaguuc

SEQ ID NO: 1044051 - RNA, 24 nt, Human
cagcacuucaggaggccgaggcgg

SEQ ID NO: 1044052 - RNA, 23 nt, Human
cagcagcagcggcaacagcagcg

SEQ ID NO: 1044053 - RNA, 27 nt, Human
cagcagccucaucagccucgaagcauu

SEQ ID NO: 1044054 - RNA, 23 nt, Human
cagcggcaacagcagcguccaug

SEQ ID NO: 1044055 - RNA, 24 nt, Human
cagcuacucaggaggcugaggcag

SEQ ID NO: 1044056 - RNA, 21 nt, Human
cagguuacaguagacaggcug

SEQ ID NO: 1044057 - RNA, 24 nt, Human
caguggccacgccuguaaucccag

SEQ ID NO: 1044058 - RNA, 19 nt, Human
cauugcacuccagccuggg

SEQ ID NO: 1044059 - RNA, 19 nt, Human
cauugcacuccagccuggg

SEQ ID NO: 1044060 - RNA, 19 nt, Human
cauugcacuccagccuggg

SEQ ID NO: 1044061 - RNA, 20 nt, Human
cauugcacuccagccugggu

SEQ ID NO: 1044062 - RNA, 21 nt, Human
cauugcacuccagccugggug

SEQ ID NO: 1044063 - RNA, 22 nt, Human
cauugcacuccagccuggguga

SEQ ID NO: 1044064 - RNA, 23 nt, Human
cauugcacuccagccugggugac

SEQ ID NO: 1044065 - RNA, 24 nt, Human
cauugcacuccagccugggugaca

SEQ ID NO: 1044066 - RNA, 24 nt, Human
cauugcacuccagccugggugaca

SEQ ID NO: 1044067 - RNA, 21 nt, Human
ccaccuggacacgggggccgc

SEQ ID NO: 1044068 - RNA, 19 nt, Human
ccacgccuguaaucccagc

SEQ ID NO: 1044069 - RNA, 23 nt, Human
ccacgccuguaaucccagcacuu

SEQ ID NO: 1044070 - RNA, 22 nt, Human
ccaggaggcggagguugcagug

SEQ ID NO: 1044071 - RNA, 22 nt, Human
ccaggucgauguccuuguaguu

SEQ ID NO: 1044072 - RNA, 24 nt, Human
cccacgcacccugagccagcagcc

SEQ ID NO: 1044073 - RNA, 18 nt, Human
cccauucuucagaugggg

SEQ ID NO: 1044074 - RNA, 24 nt, Human
cccgcagagacugguugugaggca

SEQ ID NO: 1044075 - RNA, 21 nt, Human
cccggggaucacguacuccuc

SEQ ID NO: 1044076 - RNA, 20 nt, Human
ccgcagcauugcacuccagc

SEQ ID NO: 1044077 - RNA, 18 nt, Human
ccgcagcggccacggcca

SEQ ID NO: 1044078 - RNA, 21 nt, Human
ccguggcugcaagccuaaacc

SEQ ID NO: 1044079 - RNA, 20 nt, Human
ccucuucccccucuaggagc

SEQ ID NO: 1044080 - RNA, 24 nt, Human
ccuggccaacauggcgaaacccca

SEQ ID NO: 1044081 - RNA, 18 nt, Human
ccuggcccagugacugca

SEQ ID NO: 1044082 - RNA, 22 nt, Human
ccugggugacagagugacacuc

SEQ ID NO: 1044083 - RNA, 21 nt, Human
cgagaccagccuggccaacau

SEQ ID NO: 1044084 - RNA, 24 nt, Human
cgaggcgggcagaucgcuugaggu

SEQ ID NO: 1044085 - RNA, 26 nt, Human
cgaggcgggcagaucgcuugagguca

SEQ ID NO: 1044086 - RNA, 22 nt, Human
cgccuguaaucccagcacuuca

SEQ ID NO: 1044087 - RNA, 23 nt, Human
cgcuccggcugccguaccguggc

SEQ ID NO: 1044088 - RNA, 26 nt, Human
cgcuuuugccucugcgaugcuggaaa

SEQ ID NO: 1044089 - RNA, 24 nt, Human
cgggcagaucgcuugaggucagga

SEQ ID NO: 1044090 - RNA, 23 nt, Human
cgguucuaggcugucugacuccc

SEQ ID NO: 1044091 - RNA, 22 nt, Human
cguccaugccagggugcccccc

SEQ ID NO: 1044092 - RNA, 19 nt, Human
cucgaagcauuuauugagc

SEQ ID NO: 1044093 - RNA, 23 nt, Human
cugcucuggaggccaagccugga

SEQ ID NO: 1044094 - RNA, 23 nt, Human
cuggccaacauggcgaaacccca

SEQ ID NO: 1044095 - RNA, 20 nt, Human
cuggcccgcagagacugguu

SEQ ID NO: 1044096 - RNA, 21 nt, Human
cuguaaucccagcuacucagg

SEQ ID NO: 1044097 - RNA, 24 nt, Human
cugucugacucccgcagcagcagc

SEQ ID NO: 1044098 - RNA, 19 nt, Human
cuugggggcgcuccggcug

SEQ ID NO: 1044099 - RNA, 22 nt, Human
gacagggagggggcggcagagc

SEQ ID NO: 1044100 - RNA, 23 nt, Human
gagaaucacuugaacccaggagg

SEQ ID NO: 1044101 - RNA, 19 nt, Human
gagcggcaugagggacagg

SEQ ID NO: 1044102 - RNA, 22 nt, Human
gagcuuccuggggccucaagga

SEQ ID NO: 1044103 - RNA, 23 nt, Human
gagguugcagugagcugagaccg

SEQ ID NO: 1044104 - RNA, 24 nt, Human
gaucgcuugaggucaggaguucga

SEQ ID NO: 1044105 - RNA, 23 nt, Human
gcacuccagccugggugacagag

SEQ ID NO: 1044106 - RNA, 24 nt, Human
gcacuccagccugggugacagagu

SEQ ID NO: 1044107 - RNA, 18 nt, Human
gcagcagcggcaacagca

SEQ ID NO: 1044108 - RNA, 22 nt, Human
gcaggagaaucacuugaaccca

SEQ ID NO: 1044109 - RNA, 18 nt, Human
gcauugcacuccagccug

SEQ ID NO: 1044110 - RNA, 21 nt, Human
gcauugcacuccagccugggu

SEQ ID NO: 1044111 - RNA, 24 nt, Human
gcauugcacuccagccugggugac

SEQ ID NO: 1044112 - RNA, 24 nt, Human
gccaacauggcgaaaccccaucuc

SEQ ID NO: 1044113 - RNA, 19 nt, Human
gcgcaguggccacgccugu

SEQ ID NO: 1044114 - RNA, 24 nt, Human
gcuugaggucaggaguucgagacc

SEQ ID NO: 1044115 - RNA, 20 nt, Human
ggaggacacggugcacgacg

SEQ ID NO: 1044116 - RNA, 22 nt, Human
ggaggcggagguugcagugagc

SEQ ID NO: 1044117 - RNA, 22 nt, Human
ggagguugcagugagcugagac

SEQ ID NO: 1044118 - RNA, 23 nt, Human
ggagguugcagugagcugagacc

SEQ ID NO: 1044119 - RNA, 24 nt, Human
ggagguugcagugagcugagaccg

SEQ ID NO: 1044120 - RNA, 25 nt, Human
ggcagaucgcuugaggucaggaguu

SEQ ID NO: 1044121 - RNA, 18 nt, Human
ggcccacaaacauguucu

SEQ ID NO: 1044122 - RNA, 23 nt, Human
ggcugcuggcuggcccacaaaca

SEQ ID NO: 1044123 - RNA, 21 nt, Human
gggacugaagggguucugggu

SEQ ID NO: 1044124 - RNA, 18 nt, Human
gggagggggcggcagagc

SEQ ID NO: 1044125 - RNA, 26 nt, Human
gggugccccccauucaagcaaccuuu

SEQ ID NO: 1044126 - RNA, 19 nt, Human
ggugaugacaggauuggca

SEQ ID NO: 1044127 - RNA, 19 nt, Human
guacccauucuucagaugg

SEQ ID NO: 1044128 - RNA, 24 nt, Human
gugcuguaaucccagcuacucagg

SEQ ID NO: 1044129 - RNA, 24 nt, Human
guggccacgccuguaaucccagca

SEQ ID NO: 1044130 - RNA, 18 nt, Human
guucuggguggagguuag

SEQ ID NO: 1044131 - RNA, 19 nt, Human
guugcagugagcugagacc

SEQ ID NO: 1044132 - RNA, 22 nt, Human
uaaaagucauuguccucugaag

SEQ ID NO: 1044133 - RNA, 19 nt, Human
uagacaggcugggaagcca

SEQ ID NO: 1044134 - RNA, 21 nt, Human
uaggagcugagggagcugagg

SEQ ID NO: 1044135 - RNA, 26 nt, Human
ucaaaaacaaacaaacaaacaacaac

SEQ ID NO: 1044136 - RNA, 22 nt, Human
uccagccugggugacagaguga

SEQ ID NO: 1044137 - RNA, 21 nt, Human
uccccaccuugaggaacccac

SEQ ID NO: 1044138 - RNA, 21 nt, Human
uccgcagcgcugcuggggucg

SEQ ID NO: 1044139 - RNA, 21 nt, Human
ucucagauggagacuuggucu

SEQ ID NO: 1044140 - RNA, 18 nt, Human
ucucauagucgggagugg

SEQ ID NO: 1044141 - RNA, 20 nt, Human
ugaaauucaggcacguggca

SEQ ID NO: 1044142 - RNA, 23 nt, Human
ugaaauucaggcacguggcacug

SEQ ID NO: 1044143 - RNA, 18 nt, Human
ugacagagugacacucag

SEQ ID NO: 1044144 - RNA, 18 nt, Human
ugacucccgcagcagcag

SEQ ID NO: 1044145 - RNA, 21 nt, Human
ugagaggggcagaagggagga

SEQ ID NO: 1044146 - RNA, 20 nt, Human
ugaggcaggagaaucacuug

SEQ ID NO: 1044147 - RNA, 24 nt, Human
ugaggcaggagaaucacuugaacc

SEQ ID NO: 1044148 - RNA, 25 nt, Human
ugaggcaggagaaucacuugaaccc

SEQ ID NO: 1044149 - RNA, 20 nt, Human
ugagggacagggagggggcg

SEQ ID NO: 1044150 - RNA, 21 nt, Human
ugagggagcugaggagcggca

SEQ ID NO: 1044151 - RNA, 22 nt, Human
ugagucacccagcagggacuga

SEQ ID NO: 1044152 - RNA, 21 nt, Human
ugaugacaggauuggcacagu

SEQ ID NO: 1044153 - RNA, 21 nt, Human
ugaugacaggauuggcacagu

SEQ ID NO: 1044154 - RNA, 24 nt, Human
ugcacuccagccugggugacagag

SEQ ID NO: 1044155 - RNA, 22 nt, Human
ugcaggugggcaaagaagguca

SEQ ID NO: 1044156 - RNA, 22 nt, Human
ugccucugcgaugcuggaaaag

SEQ ID NO: 1044157 - RNA, 19 nt, Human
ugcgaugcuggaaaagcga

SEQ ID NO: 1044158 - RNA, 23 nt, Human
ugcuguaaucccagcuacucagg

SEQ ID NO: 1044159 - RNA, 30 nt, Human
uggaaaagcgacggcgcccagaggcugcgg

SEQ ID NO: 1044160 - RNA, 23 nt, Human
uggcacggccacuuggggcuugg

SEQ ID NO: 1044161 - RNA, 20 nt, Human
uggccacgccuguaauccca

SEQ ID NO: 1044162 - RNA, 21 nt, Human
uggccacgccuguaaucccag

SEQ ID NO: 1044163 - RNA, 23 nt, Human
uggcgggugcuguaaucccagcu

SEQ ID NO: 1044164 - RNA, 22 nt, Human
ugggagguggggagcaauuugg

SEQ ID NO: 1044165 - RNA, 23 nt, Human
ugggcaaagaaggucacuggaag

SEQ ID NO: 1044166 - RNA, 24 nt, Human
ugggcgcaguggccacgccuguaa

SEQ ID NO: 1044167 - RNA, 19 nt, Human
uggggaaacugaggccaug

SEQ ID NO: 1044168 - RNA, 23 nt, Human
ugguggcgggugcuguaauccca

SEQ ID NO: 1044169 - RNA, 24 nt, Human
ugguggcgggugcuguaaucccag

SEQ ID NO: 1044170 - RNA, 24 nt, Human
uuagcucggcaugguggcgggugc

SEQ ID NO: 1044171 - RNA, 24 nt, Human
uucaagcaaccuuuugggucccac

SEQ ID NO: 1044172 - RNA, 18 nt, Human
uucaggaggccgaggcgg

SEQ ID NO: 1044173 - RNA, 26 nt, Human
uuccuggggccucaaggacaauccuu

SEQ ID NO: 1044174 - RNA, 24 nt, Human
uugaacccaggaggcggagguugc

SEQ ID NO: 1044175 - RNA, 19 nt, Human
uugcagugagcugagaccg

SEQ ID NO: 1044176 - RNA, 20 nt, Human
uugcagugagcugagaccgc

SEQ ID NO: 1044177 - RNA, 24 nt, Human
uugggagucucagauggagacuug

SEQ ID NO: 1044178 - RNA, 19 nt, Human
uuggucuuagaacucagaa

SEQ ID NO: 1044179 - RNA, 24 nt, Human
aacugauuggagggagcuccccug

SEQ ID NO: 1044180 - RNA, 25 nt, Human
acccggaguacaggaaguccuccug

SEQ ID NO: 1044181 - RNA, 19 nt, Human
cacccacacccaccccggc

SEQ ID NO: 1044182 - RNA, 21 nt, Human
ccacacccaccccggcccagg

SEQ ID NO: 1044183 - RNA, 19 nt, Human
cccacacccaccccggccc

SEQ ID NO: 1044184 - RNA, 24 nt, Human
cccacacccaccccggcccaggga

SEQ ID NO: 1044185 - RNA, 21 nt, Human
cccacgcgggcccucccucca

SEQ ID NO: 1044186 - RNA, 19 nt, Human
ccccugcagacagcagcuc

SEQ ID NO: 1044187 - RNA, 20 nt, Human
ccccugcagacagcagcucg

SEQ ID NO: 1044188 - RNA, 21 nt, Human
cccucccuccacacccacacc

SEQ ID NO: 1044189 - RNA, 19 nt, Human
ccggccccugcagacagca

SEQ ID NO: 1044190 - RNA, 20 nt, Human
ccuccacacccacacccacc

SEQ ID NO: 1044191 - RNA, 30 nt, Human
cgcgggcccucccuccacacccacacccaa

SEQ ID NO: 1044192 - RNA, 21 nt, Human
cggcccagggacggguuuucc

SEQ ID NO: 1044193 - RNA, 25 nt, Human
cuccacacccacacccaccccggcc

SEQ ID NO: 1044194 - RNA, 28 nt, Human
cucggugggaaacugauuggagggagcu

SEQ ID NO: 1044195 - RNA, 21 nt, Human
cugcuggaacccggaguacag

SEQ ID NO: 1044196 - RNA, 19 nt, Human
gcccucccuccacacccac

SEQ ID NO: 1044197 - RNA, 20 nt, Human
gcuggaacccggaguacagg

SEQ ID NO: 1044198 - RNA, 21 nt, Human
ggccccugcagacagcagcuc

SEQ ID NO: 1044199 - RNA, 19 nt, Human
gggaaacugauuggaggga

SEQ ID NO: 1044200 - RNA, 26 nt, Human
uccacacacgcugcauuugucggccg

SEQ ID NO: 1044201 - RNA, 18 nt, Human
ucccacacgagucgcagg

SEQ ID NO: 1044202 - RNA, 22 nt, Human
aggccaggccuuucacaggaaa

SEQ ID NO: 1044203 - RNA, 18 nt, Human
cacaagaccucgcagggc

SEQ ID NO: 1044204 - RNA, 21 nt, Human
cagggcuuaggauugggcaca

SEQ ID NO: 1044205 - RNA, 24 nt, Human
cagggcuuaggauugggcacagcc

SEQ ID NO: 1044206 - RNA, 19 nt, Human
cccgcggguuucgggggcg

SEQ ID NO: 1044207 - RNA, 21 nt, Human
ccucgcccaccccaguccuaa

SEQ ID NO: 1044208 - RNA, 18 nt, Human
cgaauagcucuuggagcc

SEQ ID NO: 1044209 - RNA, 18 nt, Human
cgggggcgguggcuuuuu

SEQ ID NO: 1044210 - RNA, 25 nt, Human
gaaccgccacucccucgcccacccc

SEQ ID NO: 1044211 - RNA, 19 nt, Human
gccuugguucgaaucccgg

SEQ ID NO: 1044212 - RNA, 24 nt, Human
ucaccuguaacuugggacgagaac

SEQ ID NO: 1044213 - RNA, 27 nt, Human
ucgcagggcuuaggauugggcacagcc

SEQ ID NO: 1044214 - RNA, 20 nt, Human
ugggagagaggaucagggaa

SEQ ID NO: 1044215 - RNA, 23 nt, Human
uucacaggaaacagauuucccgc

SEQ ID NO: 1044216 - RNA, 21 nt, Human
uuucccgcggguuucgggggc

SEQ ID NO: 1044217 - RNA, 21 nt, Human
agggaggguccgggcuccgcg

SEQ ID NO: 1044218 - RNA, 19 nt, Human
cgggucuggcggccgcugg

SEQ ID NO: 1044219 - RNA, 19 nt, Human
aagagcgcugucugccccu

SEQ ID NO: 1044220 - RNA, 21 nt, Human
aagggcugcgagggcaucugu

SEQ ID NO: 1044221 - RNA, 18 nt, Human
accugcggccaggcccuc

SEQ ID NO: 1044222 - RNA, 20 nt, Human
agaguucuccccguccaccu

SEQ ID NO: 1044223 - RNA, 22 nt, Human
agguggugcagacggcccaccu

SEQ ID NO: 1044224 - RNA, 19 nt, Human
cagcuccacugggaagcgc

SEQ ID NO: 1044225 - RNA, 22 nt, Human
caggagccuggccgggccccau

SEQ ID NO: 1044226 - RNA, 23 nt, Human
cauccugggcccccagccacagc

SEQ ID NO: 1044227 - RNA, 19 nt, Human
ccccauccugggcccccag

SEQ ID NO: 1044228 - RNA, 18 nt, Human
ccuggccgggccccaucc

SEQ ID NO: 1044229 - RNA, 18 nt, Human
cgagaggaagagcgcugu

SEQ ID NO: 1044230 - RNA, 18 nt, Human
cucuuggagcccagcucc

SEQ ID NO: 1044231 - RNA, 19 nt, Human
gcgcgaaagggcugcgagg

SEQ ID NO: 1044232 - RNA, 24 nt, Human
ggagccuggccgggccccauccug

SEQ ID NO: 1044233 - RNA, 18 nt, Human
uccgcaggagccuggccg

SEQ ID NO: 1044234 - RNA, 21 nt, Human
ucuagaucccucuuggagccc

SEQ ID NO: 1044235 - RNA, 21 nt, Human
ucugccccucagaguucuccc

SEQ ID NO: 1044236 - RNA, 23 nt, Human
ugcggccaggcccucaccucucc

SEQ ID NO: 1044237 - RNA, 22 nt, Human
uggccgggccccauccugggcc

SEQ ID NO: 1044238 - RNA, 18 nt, Human
ugggaagcgcgaaagggc

SEQ ID NO: 1044239 - RNA, 20 nt, Human
aaagacacacaacucuuucc

SEQ ID NO: 1044240 - RNA, 20 nt, Human
aagcauacugucagcuuugu

SEQ ID NO: 1044241 - RNA, 23 nt, Human
aggcggagcggaagggaccccaa

SEQ ID NO: 1044242 - RNA, 21 nt, Human
auggucccugcuuggucucuc

SEQ ID NO: 1044243 - RNA, 20 nt, Human
caugcuuuucagcuccucuu

SEQ ID NO: 1044244 - RNA, 18 nt, Human
ccccaaagacacacaacu

SEQ ID NO: 1044245 - RNA, 22 nt, Human
ccccaaagacacacaacucuuu

SEQ ID NO: 1044246 - RNA, 22 nt, Human
ccccaacgcguguguccuggcu

SEQ ID NO: 1044247 - RNA, 21 nt, Human
ccccgcagcuugacgcucugc

SEQ ID NO: 1044248 - RNA, 23 nt, Human
ccgggaacccuaggcggagcgga

SEQ ID NO: 1044249 - RNA, 21 nt, Human
cucucuccauuuuccucuuca

SEQ ID NO: 1044250 - RNA, 19 nt, Human
gcgcacuucgcugagccug

SEQ ID NO: 1044251 - RNA, 19 nt, Human
gcguguguccuggcugcgc

SEQ ID NO: 1044252 - RNA, 23 nt, Human
uaggcggagcggaagggacccca

SEQ ID NO: 1044253 - RNA, 19 nt, Human
uggcugcgcucagccgggg

SEQ ID NO: 1044254 - RNA, 20 nt, Human
ugggccuguagccccgcagc

SEQ ID NO: 1044255 - RNA, 19 nt, Human
uguccuggcugcgcucagc

SEQ ID NO: 1044256 - RNA, 25 nt, Human
uucucccauguaagcauacugucag

SEQ ID NO: 1044257 - RNA, 18 nt, Human
uuuccauaucucucucca

SEQ ID NO: 1044258 - RNA, 22 nt, Human
caggacaggugcgagaagucag

SEQ ID NO: 1044259 - RNA, 19 nt, Human
caggugcgagaagucaggg

SEQ ID NO: 1044260 - RNA, 20 nt, Human
gacaggugcgagaagucagg

SEQ ID NO: 1044261 - RNA, 19 nt, Human
gcccucgggaucuuugggg

SEQ ID NO: 1044262 - RNA, 25 nt, Human
ggagccuugccuugaggggcguggc

SEQ ID NO: 1044263 - RNA, 22 nt, Human
ggccuggacccucgggagccgc

SEQ ID NO: 1044264 - RNA, 23 nt, Human
gggcggggccugagcccaagggg

SEQ ID NO: 1044265 - RNA, 24 nt, Human
gggcggggccugagcccaaggggg

SEQ ID NO: 1044266 - RNA, 22 nt, Human
uaccaccaggcugcucaacagc

SEQ ID NO: 1044267 - RNA, 21 nt, Human
ucaggcccccuaaggggagga

SEQ ID NO: 1044268 - RNA, 21 nt, Human
ucauccaggagcugaaccuga

SEQ ID NO: 1044269 - RNA, 20 nt, Human
uccuuugggggcggggccug

SEQ ID NO: 1044270 - RNA, 21 nt, Human
ucgacccuggucccucaaaca

SEQ ID NO: 1044271 - RNA, 20 nt, Human
ucuuuggggcgaguccuggu

SEQ ID NO: 1044272 - RNA, 20 nt, Human
uggccaguaccaccaggcug

SEQ ID NO: 1044273 - RNA, 21 nt, Human
aaaaugcuuugccacauucuu

SEQ ID NO: 1044274 - RNA, 22 nt, Human
aaaaugcuuugccacauucuuc

SEQ ID NO: 1044275 - RNA, 22 nt, Human
cugacacucauccacacuuuua

SEQ ID NO: 1044276 - RNA, 23 nt, Human
guaaaguuuuucuucagcacaaa

SEQ ID NO: 1044277 - RNA, 21 nt, Human
guaaggguugaguguugcuua

SEQ ID NO: 1044278 - RNA, 22 nt, Human
ugccacauucuucacauuugua

SEQ ID NO: 1044279 - RNA, 26 nt, Human
uuuuacagccauuucucaacaguaau

SEQ ID NO: 1044280 - RNA, 19 nt, Human
aaaaggccagggugcgggg

SEQ ID NO: 1044281 - RNA, 18 nt, Human
aagucccugacacccuuc

SEQ ID NO: 1044282 - RNA, 21 nt, Human
accucacggcuggcaccccca

SEQ ID NO: 1044283 - RNA, 21 nt, Human
agagcaccccaggaggccacc

SEQ ID NO: 1044284 - RNA, 19 nt, Human
agagcagggugcgacaggg

SEQ ID NO: 1044285 - RNA, 19 nt, Human
aggaacgaucggcgccccc

SEQ ID NO: 1044286 - RNA, 18 nt, Human
aggaggccaccucacggc

SEQ ID NO: 1044287 - RNA, 25 nt, Human
caaccgccagccaggaaaaggccag

SEQ ID NO: 1044288 - RNA, 27 nt, Human
caccaaauaccuuggcgagagcacccc

SEQ ID NO: 1044289 - RNA, 18 nt, Human
caggaaaaggccagggug

SEQ ID NO: 1044290 - RNA, 19 nt, Human
cauggcaagucccugacac

SEQ ID NO: 1044291 - RNA, 19 nt, Human
cauggcaagucccugacac

SEQ ID NO: 1044292 - RNA, 21 nt, Human
ccaaauaccuuggcgagagca

SEQ ID NO: 1044293 - RNA, 19 nt, Human
cccccauggcaagucccug

SEQ ID NO: 1044294 - RNA, 20 nt, Human
cccgcugcccccucgacgcc

SEQ ID NO: 1044295 - RNA, 18 nt, Human
ccgcugcccccucgacgc

SEQ ID NO: 1044296 - RNA, 19 nt, Human
ccucgacgccaguguccuc

SEQ ID NO: 1044297 - RNA, 18 nt, Human
cugcccccucgacgccag

SEQ ID NO: 1044298 - RNA, 18 nt, Human
ggaagaucaaauccgcag

SEQ ID NO: 1044299 - RNA, 22 nt, Human
ggccacaacacaaccgccagcc

SEQ ID NO: 1044300 - RNA, 23 nt, Human
ucggcgcccccauggcaaguccc

SEQ ID NO: 1044301 - RNA, 23 nt, Human
uggcgagagcaccccaggaggcc

SEQ ID NO: 1044302 - RNA, 23 nt, Human
uuuccugugugccuuagguggua

SEQ ID NO: 1044303 - RNA, 24 nt, Human
aaaauguugggauuacaggcauga

SEQ ID NO: 1044304 - RNA, 19 nt, Human
aaauguugggauuacaggc

SEQ ID NO: 1044305 - RNA, 25 nt, Human
aagcaauccucccaccuuggccucc

SEQ ID NO: 1044306 - RNA, 18 nt, Human
acuguuuugcccaggcug

SEQ ID NO: 1044307 - RNA, 18 nt, Human
aggcgggggcggggcucu

SEQ ID NO: 1044308 - RNA, 20 nt, Human
auccucguccuucuugggga

SEQ ID NO: 1044309 - RNA, 24 nt, Human
caaaauguugggauuacaggcaug

SEQ ID NO: 1044310 - RNA, 25 nt, Human
caaacuccugggcucaagcaauccu

SEQ ID NO: 1044311 - RNA, 19 nt, Human
caagaggagcgccaccuug

SEQ ID NO: 1044312 - RNA, 27 nt, Human
caagcaauccucccaccuuggccuccc

SEQ ID NO: 1044313 - RNA, 27 nt, Human
caagcaauccucccaccuuggccuccc

SEQ ID NO: 1044314 - RNA, 22 nt, Human
cacaccuccaagaggagcgcca

SEQ ID NO: 1044315 - RNA, 24 nt, Human
cacuguuuugcccaggcuggucuc

SEQ ID NO: 1044316 - RNA, 25 nt, Human
caucucugcacaccuccaagagggg

SEQ ID NO: 1044317 - RNA, 23 nt, Human
ccaaaauguugggauuacaggca

SEQ ID NO: 1044318 - RNA, 24 nt, Human
ccaaaauguugggauuacaggcau

SEQ ID NO: 1044319 - RNA, 24 nt, Human
cccaaaauguugggauuacaggca

SEQ ID NO: 1044320 - RNA, 21 nt, Human
cccaggaccccugcuuccaaa

SEQ ID NO: 1044321 - RNA, 19 nt, Human
cccccaggggaucuugguu

SEQ ID NO: 1044322 - RNA, 20 nt, Human
cccccggaggccccgccccc

SEQ ID NO: 1044323 - RNA, 18 nt, Human
ccccugcuuccaaagaca

SEQ ID NO: 1044324 - RNA, 21 nt, Human
cccguggggacccccagaauc

SEQ ID NO: 1044325 - RNA, 20 nt, Human
cccugugcccccggaggccc

SEQ ID NO: 1044326 - RNA, 20 nt, Human
ccgcaaggcgggggcggggc

SEQ ID NO: 1044327 - RNA, 24 nt, Human
ccgcauagacaucucugcacaccu

SEQ ID NO: 1044328 - RNA, 20 nt, Human
ccgggcuccagaugaguucc

SEQ ID NO: 1044329 - RNA, 22 nt, Human
ccuccaagaggagcgccaccuu

SEQ ID NO: 1044330 - RNA, 19 nt, Human
ccucccaccuuggccuccc

SEQ ID NO: 1044331 - RNA, 19 nt, Human
ccugaagcagcuccguggc

SEQ ID NO: 1044332 - RNA, 18 nt, Human
ccuggaggucaguaagga

SEQ ID NO: 1044333 - RNA, 19 nt, Human
ccuggauccucguccuucu

SEQ ID NO: 1044334 - RNA, 24 nt, Human
ccuggauccucguccuucuugggg

SEQ ID NO: 1044335 - RNA, 18 nt, Human
cgcggggcgcaggcagcg

SEQ ID NO: 1044336 - RNA, 19 nt, Human
cguggccggguccccagac

SEQ ID NO: 1044337 - RNA, 24 nt, Human
cucaagcaauccucccaccuuggc

SEQ ID NO: 1044338 - RNA, 20 nt, Human
cuccaagaggagcgccaccu

SEQ ID NO: 1044339 - RNA, 23 nt, Human
cuccugggcucaagcaauccucc

SEQ ID NO: 1044340 - RNA, 22 nt, Human
cuucaggggcgccagcaccgcc

SEQ ID NO: 1044341 - RNA, 24 nt, Human
gaccccugcuuccaaagacagccc

SEQ ID NO: 1044342 - RNA, 25 nt, Human
gcacaccuccaagaggaggggaacc

SEQ ID NO: 1044343 - RNA, 24 nt, Human
gcgcggggcgcaggcagcguggag

SEQ ID NO: 1044344 - RNA, 18 nt, Human
ggauuacaggcaugaacg

SEQ ID NO: 1044345 - RNA, 20 nt, Human
gggcgcaggcagcguggagg

SEQ ID NO: 1044346 - RNA, 18 nt, Human
guggccggguccccagac

SEQ ID NO: 1044347 - RNA, 27 nt, Human
guuuuuuuuuuuuuuugguagaugggg

SEQ ID NO: 1044348 - RNA, 24 nt, Human
ucaagcaauccucccaccuuggcc

SEQ ID NO: 1044349 - RNA, 18 nt, Human
uccaagaggagcgccacc

SEQ ID NO: 1044350 - RNA, 24 nt, Human
ucccaaaauguugggauuacaggc

SEQ ID NO: 1044351 - RNA, 19 nt, Human
ucccacuguuuugcccagg

SEQ ID NO: 1044352 - RNA, 23 nt, Human
ucccacuguuuugcccaggcugg

SEQ ID NO: 1044353 - RNA, 21 nt, Human
uccccagacccguggggaccc

SEQ ID NO: 1044354 - RNA, 23 nt, Human
uccccagacccguggggaccccc

SEQ ID NO: 1044355 - RNA, 21 nt, Human
uccguggccggguccccagac

SEQ ID NO: 1044356 - RNA, 18 nt, Human
uccugggcucaagcaauc

SEQ ID NO: 1044357 - RNA, 21 nt, Human
uccugggcucaagcaauccuc

SEQ ID NO: 1044358 - RNA, 24 nt, Human
uccugggcucaagcaauccuccca

SEQ ID NO: 1044359 - RNA, 18 nt, Human
ucgccgccgcagccgccg

SEQ ID NO: 1044360 - RNA, 27 nt, Human
ucgccgccgcagccgccgcagcuccgg

SEQ ID NO: 1044361 - RNA, 23 nt, Human
ucucaaacuccugggcucaagca

SEQ ID NO: 1044362 - RNA, 25 nt, Human
ucugcacaccuccaagaggagcgcc

SEQ ID NO: 1044363 - RNA, 24 nt, Human
ugcccaggcuggucucaaacuccu

SEQ ID NO: 1044364 - RNA, 28 nt, Human
ugcccaggcuggucucaaacuccugggc

SEQ ID NO: 1044365 - RNA, 23 nt, Human
ugcggagucguguccacagggcc

SEQ ID NO: 1044366 - RNA, 19 nt, Human
ugggauuacaggcaugaac

SEQ ID NO: 1044367 - RNA, 19 nt, Human
ugggauuacaggcaugaac

SEQ ID NO: 1044368 - RNA, 19 nt, Human
ugggauuacaggcaugaac

SEQ ID NO: 1044369 - RNA, 20 nt, Human
ugggauuacaggcaugaacg

SEQ ID NO: 1044370 - RNA, 21 nt, Human
ugggauuacaggcaugaacgg

SEQ ID NO: 1044371 - RNA, 22 nt, Human
ugggauuacaggcaugaacgga

SEQ ID NO: 1044372 - RNA, 18 nt, Human
uggggagcccaggacccc

SEQ ID NO: 1044373 - RNA, 24 nt, Human
uguuuugcccaggcuggucucaaa

SEQ ID NO: 1044374 - RNA, 19 nt, Human
ccaacgcccacguccuugc

SEQ ID NO: 1044375 - RNA, 18 nt, Human
ucugaaagaaaagccucc

SEQ ID NO: 1044376 - RNA, 21 nt, Human
ugaaagaaaagccuccaugug

SEQ ID NO: 1044377 - RNA, 19 nt, Human
aggcaccuggacagagccc

SEQ ID NO: 1044378 - RNA, 22 nt, Human
caccuggacagagcccagggac

SEQ ID NO: 1044379 - RNA, 22 nt, Human
aaaaggaagagaucccagcaaa

SEQ ID NO: 1044380 - RNA, 24 nt, Human
aacccaccucccgugugcccccca

SEQ ID NO: 1044381 - RNA, 25 nt, Human
aacccaccucccgugugccccccag

SEQ ID NO: 1044382 - RNA, 23 nt, Human
aagaacccaccucccgugugccc

SEQ ID NO: 1044383 - RNA, 24 nt, Human
aagaacccaccucccgugugcccc

SEQ ID NO: 1044384 - RNA, 18 nt, Human
aaggcgcccuugccgauc

SEQ ID NO: 1044385 - RNA, 23 nt, Human
acgcuccaccuuucccugcgggc

SEQ ID NO: 1044386 - RNA, 23 nt, Human
agacaaccucaggguccaggaag

SEQ ID NO: 1044387 - RNA, 19 nt, Human
agccacccggccccagccc

SEQ ID NO: 1044388 - RNA, 18 nt, Human
aggaaggcggcgaccagg

SEQ ID NO: 1044389 - RNA, 19 nt, Human
aggcaagaacccaccuccc

SEQ ID NO: 1044390 - RNA, 20 nt, Human
agucccaggucuccaaucuu

SEQ ID NO: 1044391 - RNA, 20 nt, Human
caaggcaagaacccaccucc

SEQ ID NO: 1044392 - RNA, 20 nt, Human
cacaggaauggaaauggagc

SEQ ID NO: 1044393 - RNA, 21 nt, Human
cacgauguugcggggucgcag

SEQ ID NO: 1044394 - RNA, 23 nt, Human
cacgugggccaaagacuggcggc

SEQ ID NO: 1044395 - RNA, 23 nt, Human
cacuucuggcuccgucaggaucu

SEQ ID NO: 1044396 - RNA, 23 nt, Human
cagccgggccgagaccaccgcgc

SEQ ID NO: 1044397 - RNA, 18 nt, Human
ccaccgcgcugcggccgc

SEQ ID NO: 1044398 - RNA, 19 nt, Human
ccaccgcgcugcggccgcu

SEQ ID NO: 1044399 - RNA, 18 nt, Human
ccacucugacccucaggg

SEQ ID NO: 1044400 - RNA, 23 nt, Human
ccagcccucccccaggacagccc

SEQ ID NO: 1044401 - RNA, 23 nt, Human
cccaggucuccaaucuucaccuc

SEQ ID NO: 1044402 - RNA, 23 nt, Human
cccccuggccccaccuuggccgc

SEQ ID NO: 1044403 - RNA, 25 nt, Human
cccggccccagccccgccacacggc

SEQ ID NO: 1044404 - RNA, 19 nt, Human
ccgccgccgcggccggggc

SEQ ID NO: 1044405 - RNA, 21 nt, Human
ccucccgugugccccccagcc

SEQ ID NO: 1044406 - RNA, 23 nt, Human
ccugcgccgccgccgcggccggg

SEQ ID NO: 1044407 - RNA, 24 nt, Human
ccugcgggcgaagccacccggccc

SEQ ID NO: 1044408 - RNA, 20 nt, Human
ccuggccccaccuuggccgc

SEQ ID NO: 1044409 - RNA, 21 nt, Human
ccuugagggcgaacacggcgc

SEQ ID NO: 1044410 - RNA, 21 nt, Human
cgcgcccucagcacgugggcc

SEQ ID NO: 1044411 - RNA, 18 nt, Human
cgcugaccaggccccgca

SEQ ID NO: 1044412 - RNA, 23 nt, Human
cggcccccuggccccaccuuggc

SEQ ID NO: 1044413 - RNA, 20 nt, Human
cggccgcuccggggccgcuc

SEQ ID NO: 1044414 - RNA, 27 nt, Human
cggggucgcaggcggcuaugcagggca

SEQ ID NO: 1044415 - RNA, 23 nt, Human
cuccaaucuucaccuccauguuc

SEQ ID NO: 1044416 - RNA, 21 nt, Human
cuccugcgccgccgccgcggc

SEQ ID NO: 1044417 - RNA, 21 nt, Human
cugcaguacuccagcaccaug

SEQ ID NO: 1044418 - RNA, 21 nt, Human
cuguacacgcggcccgagccc

SEQ ID NO: 1044419 - RNA, 21 nt, Human
gaacagucaugccacaaggca

SEQ ID NO: 1044420 - RNA, 22 nt, Human
gcuaugcagggcaaucucacgc

SEQ ID NO: 1044421 - RNA, 23 nt, Human
ggcccccuggccccaccuuggcc

SEQ ID NO: 1044422 - RNA, 18 nt, Human
uacacguggucgcgguca

SEQ ID NO: 1044423 - RNA, 21 nt, Human
ucaugccacaaggcaagaacc

SEQ ID NO: 1044424 - RNA, 18 nt, Human
uccaccuuucccugcggg

SEQ ID NO: 1044425 - RNA, 22 nt, Human
uccugcgccgccgccgcggccg

SEQ ID NO: 1044426 - RNA, 22 nt, Human
ugaccaggccccgcagguaguc

SEQ ID NO: 1044427 - RNA, 19 nt, Human
uggaaagccacgauguugc

SEQ ID NO: 1044428 - RNA, 21 nt, Human
uggagccugggucccuggcac

SEQ ID NO: 1044429 - RNA, 23 nt, Human
uggagccugggucccuggcacua

SEQ ID NO: 1044430 - RNA, 22 nt, Human
uggcaggagugaccguuucugg

SEQ ID NO: 1044431 - RNA, 19 nt, Human
ugggucccuggcacuacca

SEQ ID NO: 1044432 - RNA, 18 nt, Human
uggugcagguagcgcagg

SEQ ID NO: 1044433 - RNA, 23 nt, Human
ugugccccccagcccucccccag

SEQ ID NO: 1044434 - RNA, 20 nt, Human
uguugcggggucgcaggcgg

SEQ ID NO: 1044435 - RNA, 23 nt, Human
aaaaguggguucugccaaggcca

SEQ ID NO: 1044436 - RNA, 21 nt, Human
aaacagaagagaaaugaacaa

SEQ ID NO: 1044437 - RNA, 23 nt, Human
aaacagaagagaaaugaacaaag

SEQ ID NO: 1044438 - RNA, 23 nt, Human
aagaaggggaauguaggagagga

SEQ ID NO: 1044439 - RNA, 20 nt, Human
accacccgccauacacuuuc

SEQ ID NO: 1044440 - RNA, 21 nt, Human
accaucgucucccuggcccug

SEQ ID NO: 1044441 - RNA, 23 nt, Human
accgggcccgcgcccacucgcgc

SEQ ID NO: 1044442 - RNA, 21 nt, Human
agaaagcacagaggacaugag

SEQ ID NO: 1044443 - RNA, 21 nt, Human
agagagagaagucacagcagu

SEQ ID NO: 1044444 - RNA, 21 nt, Human
agaggacaugagagaagggga

SEQ ID NO: 1044445 - RNA, 19 nt, Human
aggaagaagcccccuggca

SEQ ID NO: 1044446 - RNA, 21 nt, Human
aggcagcagacccugcucagg

SEQ ID NO: 1044447 - RNA, 23 nt, Human
aggcgugaugaagccaggagccu

SEQ ID NO: 1044448 - RNA, 24 nt, Human
aggggaagaaggggaauguaggag

SEQ ID NO: 1044449 - RNA, 19 nt, Human
agggggccgcugggaggcc

SEQ ID NO: 1044450 - RNA, 19 nt, Human
aguggggagugggggaagg

SEQ ID NO: 1044451 - RNA, 18 nt, Human
aguggggggaggcgcaga

SEQ ID NO: 1044452 - RNA, 23 nt, Human
auacacuuucagagacagaugcc

SEQ ID NO: 1044453 - RNA, 19 nt, Human
caacaggcucgacgccacc

SEQ ID NO: 1044454 - RNA, 21 nt, Human
cacagccagagaagaaagcac

SEQ ID NO: 1044455 - RNA, 22 nt, Human
cagaugcccgcaggcucugcug

SEQ ID NO: 1044456 - RNA, 20 nt, Human
caggagccuggggcggccag

SEQ ID NO: 1044457 - RNA, 18 nt, Human
caggagcuggugggaggc

SEQ ID NO: 1044458 - RNA, 19 nt, Human
caggcuaggagaaaugggg

SEQ ID NO: 1044459 - RNA, 21 nt, Human
ccaccacccgccauacacuuu

SEQ ID NO: 1044460 - RNA, 24 nt, Human
ccaggccagcugcgacgaccaucc

SEQ ID NO: 1044461 - RNA, 18 nt, Human
ccagggcaggaaaacgga

SEQ ID NO: 1044462 - RNA, 18 nt, Human
cccagugccccuugcccc

SEQ ID NO: 1044463 - RNA, 24 nt, Human
cccccgaaugcucgggccuagcuc

SEQ ID NO: 1044464 - RNA, 24 nt, Human
cccgccauacacuuucagagacag

SEQ ID NO: 1044465 - RNA, 19 nt, Human
cccugacacugcucccugg

SEQ ID NO: 1044466 - RNA, 20 nt, Human
cccuggcccugacacugcuc

SEQ ID NO: 1044467 - RNA, 24 nt, Human
ccgcgcccacucgcgccgcccgcc

SEQ ID NO: 1044468 - RNA, 23 nt, Human
cgcccucccucccggcggcgcca

SEQ ID NO: 1044469 - RNA, 18 nt, Human
cuaggagaaaugggguga

SEQ ID NO: 1044470 - RNA, 21 nt, Human
cucccuggcccugacacugcu

SEQ ID NO: 1044471 - RNA, 18 nt, Human
cugcaccccgcccacagg

SEQ ID NO: 1044472 - RNA, 19 nt, Human
cuucacucuaggcacuggc

SEQ ID NO: 1044473 - RNA, 19 nt, Human
cuucccagugccccuugcc

SEQ ID NO: 1044474 - RNA, 22 nt, Human
cuugcccaccacccgccauaca

SEQ ID NO: 1044475 - RNA, 20 nt, Human
gaagaagcccccuggcacuu

SEQ ID NO: 1044476 - RNA, 20 nt, Human
gaagccaggagccuggggcg

SEQ ID NO: 1044477 - RNA, 21 nt, Human
gaggcgugaugaagccaggag

SEQ ID NO: 1044478 - RNA, 18 nt, Human
gaggcugaugagcugggg

SEQ ID NO: 1044479 - RNA, 22 nt, Human
gcacuugggagagguagaaaag

SEQ ID NO: 1044480 - RNA, 22 nt, Human
gcccagggcaggaaaacggaug

SEQ ID NO: 1044481 - RNA, 19 nt, Human
gcccgcgcccacucgcgcc

SEQ ID NO: 1044482 - RNA, 23 nt, Human
ggaagaaggggaauguaggagag

SEQ ID NO: 1044483 - RNA, 20 nt, Human
ggaagggaggcccaccaggu

SEQ ID NO: 1044484 - RNA, 20 nt, Human
ggagagagagaagucacagc

SEQ ID NO: 1044485 - RNA, 20 nt, Human
ggagagguagaaaagugggu

SEQ ID NO: 1044486 - RNA, 18 nt, Human
ggcccaccaggugacacc

SEQ ID NO: 1044487 - RNA, 23 nt, Human
ggcucugcugccugcaccccgcc

SEQ ID NO: 1044488 - RNA, 19 nt, Human
gggaagaaggggaauguag

SEQ ID NO: 1044489 - RNA, 18 nt, Human
gggaagggaggcccacca

SEQ ID NO: 1044490 - RNA, 19 nt, Human
gggaauguaggagaggaag

SEQ ID NO: 1044491 - RNA, 23 nt, Human
gggaauguaggagaggaagaagc

SEQ ID NO: 1044492 - RNA, 24 nt, Human
gggacagggaggcugaugagcugg

SEQ ID NO: 1044493 - RNA, 22 nt, Human
gggaggcccaccaggugacacc

SEQ ID NO: 1044494 - RNA, 20 nt, Human
gggagugggggaagggaggc

SEQ ID NO: 1044495 - RNA, 21 nt, Human
gggcagaugcccgcaggcucu

SEQ ID NO: 1044496 - RNA, 21 nt, Human
ggggaagggaggcccaccagg

SEQ ID NO: 1044497 - RNA, 20 nt, Human
ggggacagggaggcugauga

SEQ ID NO: 1044498 - RNA, 19 nt, Human
gggggaggcgcagaggagu

SEQ ID NO: 1044499 - RNA, 24 nt, Human
uagucacggagaccaucgucuccc

SEQ ID NO: 1044500 - RNA, 24 nt, Human
ucacagcaguggggggaggcgccg

SEQ ID NO: 1044501 - RNA, 21 nt, Human
ucacggagaccaucgucuccc

SEQ ID NO: 1044502 - RNA, 19 nt, Human
ucaguggggagugggggaa

SEQ ID NO: 1044503 - RNA, 19 nt, Human
uccaggagcuggugggagg

SEQ ID NO: 1044504 - RNA, 20 nt, Human
ucgacgccaccgccgacgag

SEQ ID NO: 1044505 - RNA, 23 nt, Human
ucucccuggcccugacacugcuc

SEQ ID NO: 1044506 - RNA, 18 nt, Human
ugagggaggucagugggg

SEQ ID NO: 1044507 - RNA, 19 nt, Human
ugccaaggccacagccaga

SEQ ID NO: 1044508 - RNA, 21 nt, Human
ugccacggggacagaaaacag

SEQ ID NO: 1044509 - RNA, 19 nt, Human
ugcccagggcaggaaaacg

SEQ ID NO: 1044510 - RNA, 21 nt, Human
ugcugccugcaccccgcccac

SEQ ID NO: 1044511 - RNA, 23 nt, Human
uggcacuugggagagguagaaaa

SEQ ID NO: 1044512 - RNA, 18 nt, Human
uggcccugacacugcucc

SEQ ID NO: 1044513 - RNA, 19 nt, Human
ugggagagguagaaaagug

SEQ ID NO: 1044514 - RNA, 22 nt, Human
ugggagagguagaaaagugggu

SEQ ID NO: 1044515 - RNA, 19 nt, Human
ugggaggccggagguacag

SEQ ID NO: 1044516 - RNA, 19 nt, Human
ugggaggccggagguacag

SEQ ID NO: 1044517 - RNA, 25 nt, Human
ugggaggccggagguacaggagggu

SEQ ID NO: 1044518 - RNA, 20 nt, Human
uggggagugggggaagggag

SEQ ID NO: 1044519 - RNA, 24 nt, Human
aaaggacaccuggcagggaaaaug

SEQ ID NO: 1044520 - RNA, 19 nt, Human
aaccagagcaacaaaaaac

SEQ ID NO: 1044521 - RNA, 22 nt, Human
acagugggagaaguguaggcac

SEQ ID NO: 1044522 - RNA, 23 nt, Human
accagagcaacaaaaaacgucug

SEQ ID NO: 1044523 - RNA, 25 nt, Human
accccacccacgggcaccacguaca

SEQ ID NO: 1044524 - RNA, 26 nt, Human
agacucagagaucagaggccgguggu

SEQ ID NO: 1044525 - RNA, 20 nt, Human
agagugaggugccuuaagga

SEQ ID NO: 1044526 - RNA, 22 nt, Human
agauuuuaaagguuuaagagcu

SEQ ID NO: 1044527 - RNA, 25 nt, Human
aggacaccuggcagggaaaauggcc

SEQ ID NO: 1044528 - RNA, 19 nt, Human
aggaggacuggagaccccu

SEQ ID NO: 1044529 - RNA, 18 nt, Human
aggcccggcagcucaggg

SEQ ID NO: 1044530 - RNA, 22 nt, Human
agggcuaaagauucggagaacu

SEQ ID NO: 1044531 - RNA, 19 nt, Human
aggucaaaaaggacaccug

SEQ ID NO: 1044532 - RNA, 24 nt, Human
agguguugagagguucagaaagcg

SEQ ID NO: 1044533 - RNA, 24 nt, Human
aguacccccucacaucccaggccc

SEQ ID NO: 1044534 - RNA, 18 nt, Human
auagugccaacucuugcc

SEQ ID NO: 1044535 - RNA, 20 nt, Human
augcgacuuagggacccagg

SEQ ID NO: 1044536 - RNA, 18 nt, Human
caaaaaggacaccuggca

SEQ ID NO: 1044537 - RNA, 18 nt, Human
caccacguacacccggcc

SEQ ID NO: 1044538 - RNA, 18 nt, Human
cagaggucaagaggucaa

SEQ ID NO: 1044539 - RNA, 19 nt, Human
cagcagguagacagcuccc

SEQ ID NO: 1044540 - RNA, 19 nt, Human
cagcucccggggagcccuc

SEQ ID NO: 1044541 - RNA, 21 nt, Human
cagcucccggggagcccuccu

SEQ ID NO: 1044542 - RNA, 23 nt, Human
cagcugauagugccaacucuugc

SEQ ID NO: 1044543 - RNA, 23 nt, Human
cagggcuaaagauucggagaacu

SEQ ID NO: 1044544 - RNA, 22 nt, Human
ccagggcuaaagauucggagaa

SEQ ID NO: 1044545 - RNA, 23 nt, Human
cccacgggcaccacguacacccg

SEQ ID NO: 1044546 - RNA, 22 nt, Human
ccccugagaccuagcuucaauc

SEQ ID NO: 1044547 - RNA, 22 nt, Human
ccgcagccgcagcuaauggcug

SEQ ID NO: 1044548 - RNA, 24 nt, Human
ccuggaaccagagcaacaaaaaac

SEQ ID NO: 1044549 - RNA, 23 nt, Human
cgaguucggaaccuuugagcuga

SEQ ID NO: 1044550 - RNA, 22 nt, Human
cggaaccggaucugugguaccg

SEQ ID NO: 1044551 - RNA, 23 nt, Human
cggaaccggaucugugguaccgg

SEQ ID NO: 1044552 - RNA, 22 nt, Human
cguaccccacccacgggcacca

SEQ ID NO: 1044553 - RNA, 19 nt, Human
cuagagggaccagcuggug

SEQ ID NO: 1044554 - RNA, 24 nt, Human
cucccuagagggaccagcuggugc

SEQ ID NO: 1044555 - RNA, 21 nt, Human
cuggagaccccugagaccuag

SEQ ID NO: 1044556 - RNA, 21 nt, Human
cuggcagggauggugguuggc

SEQ ID NO: 1044557 - RNA, 22 nt, Human
cuguugucaaucucucccuaga

SEQ ID NO: 1044558 - RNA, 21 nt, Human
gaaucuggggacugagcagug

SEQ ID NO: 1044559 - RNA, 22 nt, Human
gaccccugagaccuagcuucaa

SEQ ID NO: 1044560 - RNA, 18 nt, Human
gagggaccagcuggugcu

SEQ ID NO: 1044561 - RNA, 21 nt, Human
gagugaggugccuuaaggaug

SEQ ID NO: 1044562 - RNA, 21 nt, Human
gaucagaggccggugggcgcc

SEQ ID NO: 1044563 - RNA, 19 nt, Human
gcagggauggugguuggca

SEQ ID NO: 1044564 - RNA, 18 nt, Human
gccagcccguaccccacc

SEQ ID NO: 1044565 - RNA, 21 nt, Human
gcugcaguccuguggugugag

SEQ ID NO: 1044566 - RNA, 19 nt, Human
ggaaccagagcaacaaaaa

SEQ ID NO: 1044567 - RNA, 20 nt, Human
ggaaccggaucugugguacg

SEQ ID NO: 1044568 - RNA, 18 nt, Human
ggaaggauccuccaacgg

SEQ ID NO: 1044569 - RNA, 18 nt, Human
ggacaccuggcagggaaa

SEQ ID NO: 1044570 - RNA, 25 nt, Human
ggcuaaagauucggagaacuuaggu

SEQ ID NO: 1044571 - RNA, 21 nt, Human
gucagaggucaagaggucaaa

SEQ ID NO: 1044572 - RNA, 22 nt, Human
uaauauuugaaaccacgggagc

SEQ ID NO: 1044573 - RNA, 24 nt, Human
ucccaggcccgaguucggaaccuu

SEQ ID NO: 1044574 - RNA, 21 nt, Human
uccuccaacggagaacggucu

SEQ ID NO: 1044575 - RNA, 20 nt, Human
ucggaaccuuugagcugacc

SEQ ID NO: 1044576 - RNA, 21 nt, Human
ugaccuuugagucagagguca

SEQ ID NO: 1044577 - RNA, 21 nt, Human
ugagaccgcagccgcagcuaa

SEQ ID NO: 1044578 - RNA, 18 nt, Human
ugagcagugggugugaaa

SEQ ID NO: 1044579 - RNA, 25 nt, Human
ugagcagugggugugaaaggaccag

SEQ ID NO: 1044580 - RNA, 19 nt, Human
ugagucagaggucaagagg

SEQ ID NO: 1044581 - RNA, 18 nt, Human
uggaaccagagcaacaaa

SEQ ID NO: 1044582 - RNA, 21 nt, Human
uggacagcagguagacagcuc

SEQ ID NO: 1044583 - RNA, 21 nt, Human
uggagaccccugagaccuagc

SEQ ID NO: 1044584 - RNA, 19 nt, Human
uggcagggauggugguugg

SEQ ID NO: 1044585 - RNA, 19 nt, Human
uggggucuacaggaggugu

SEQ ID NO: 1044586 - RNA, 23 nt, Human
uggugugaggagcagggccuggc

SEQ ID NO: 1044587 - RNA, 25 nt, Human
uuaaauccggaaccggaucuguggu

SEQ ID NO: 1044588 - RNA, 19 nt, Human
uugagucagaggucaagag

SEQ ID NO: 1044589 - RNA, 22 nt, Human
uugcgaggcugacucaagucau

SEQ ID NO: 1044590 - RNA, 21 nt, Human
uuggcagggcgugcccagcac

SEQ ID NO: 1044591 - RNA, 23 nt, Human
agacacauuugcugaaaucuuca

SEQ ID NO: 1044592 - RNA, 20 nt, Human
caaaauguuuccugggagga

SEQ ID NO: 1044593 - RNA, 22 nt, Human
cacagcucaaggcuuguugucc

SEQ ID NO: 1044594 - RNA, 21 nt, Human
caucuuuguccuguuuuccga

SEQ ID NO: 1044595 - RNA, 22 nt, Human
caucuuuguccuguuuuccgau

SEQ ID NO: 1044596 - RNA, 18 nt, Human
ccucccugggccagggau

SEQ ID NO: 1044597 - RNA, 22 nt, Human
ccucuggcuggacucuugguuc

SEQ ID NO: 1044598 - RNA, 19 nt, Human
ccugcccguguccucuccu

SEQ ID NO: 1044599 - RNA, 18 nt, Human
ccuggaauccucccuggg

SEQ ID NO: 1044600 - RNA, 23 nt, Human
cucuccuggaauccucccugggc

SEQ ID NO: 1044601 - RNA, 24 nt, Human
cugcccguguccucuccuggaauc

SEQ ID NO: 1044602 - RNA, 23 nt, Human
cuggcuggacucuugguucuggc

SEQ ID NO: 1044603 - RNA, 23 nt, Human
uagccgccucuggcuggacucuu

SEQ ID NO: 1044604 - RNA, 21 nt, Human
uagcugccugcuuacuucauu

SEQ ID NO: 1044605 - RNA, 21 nt, Human
ucagcaacuuauucaaaaugu

SEQ ID NO: 1044606 - RNA, 26 nt, Human
ucagcaacuuauucaaaauguuuccu

SEQ ID NO: 1044607 - RNA, 22 nt, Human
uccaucaggcacuucagcaacu

SEQ ID NO: 1044608 - RNA, 18 nt, Human
ucuccuggaauccucccu

SEQ ID NO: 1044609 - RNA, 24 nt, Human
ucuccuggaauccucccugggcca

SEQ ID NO: 1044610 - RNA, 18 nt, Human
ucuugguucuggcucugg

SEQ ID NO: 1044611 - RNA, 24 nt, Human
ugaagaggugaugcucuagccgcc

SEQ ID NO: 1044612 - RNA, 24 nt, Human
ugcuuacuucauugaugaggcacu

SEQ ID NO: 1044613 - RNA, 20 nt, Human
uggcucugggccagggcucc

SEQ ID NO: 1044614 - RNA, 21 nt, Human
uggcucugggccagggcuccu

SEQ ID NO: 1044615 - RNA, 22 nt, Human
uggcuggacucuugguucuggc

SEQ ID NO: 1044616 - RNA, 18 nt, Human
ugggacaccaccaagcuc

SEQ ID NO: 1044617 - RNA, 18 nt, Human
uuccugggaggaccgucc

SEQ ID NO: 1044618 - RNA, 19 nt, Human
uuguccuguuuuccgauga

SEQ ID NO: 1044619 - RNA, 20 nt, Human
uuuccugggaggaccguccu

SEQ ID NO: 1044620 - RNA, 21 nt, Human
aacaccgcaaccacuggccca

SEQ ID NO: 1044621 - RNA, 24 nt, Human
acaccgcaaccacuggcccagaug

SEQ ID NO: 1044622 - RNA, 20 nt, Human
acagcgaccacgugcuggaa

SEQ ID NO: 1044623 - RNA, 21 nt, Human
accgcaaccacuggcccagau

SEQ ID NO: 1044624 - RNA, 21 nt, Human
agacacaguggagacuggccg

SEQ ID NO: 1044625 - RNA, 25 nt, Human
agcuagacuucacgacccccucccg

SEQ ID NO: 1044626 - RNA, 18 nt, Human
aguucuaggcugugcccu

SEQ ID NO: 1044627 - RNA, 20 nt, Human
auacacgccucccguguaua

SEQ ID NO: 1044628 - RNA, 24 nt, Human
aucccuagggcuuccacaauacac

SEQ ID NO: 1044629 - RNA, 21 nt, Human
aucugggcuucuuccagcugc

SEQ ID NO: 1044630 - RNA, 21 nt, Human
caacaccgcaaccacuggccc

SEQ ID NO: 1044631 - RNA, 22 nt, Human
caacaccgcaaccacuggccca

SEQ ID NO: 1044632 - RNA, 24 nt, Human
caacaccgcaaccacuggcccaga

SEQ ID NO: 1044633 - RNA, 22 nt, Human
cacaauacacgccucccgugua

SEQ ID NO: 1044634 - RNA, 25 nt, Human
caccgcaaccacuggcccagauguc

SEQ ID NO: 1044635 - RNA, 19 nt, Human
caccuuggggcaggccugg

SEQ ID NO: 1044636 - RNA, 26 nt, Human
caccuuggggcaggccugguggggcu

SEQ ID NO: 1044637 - RNA, 21 nt, Human
cagcaacuccaagucagacac

SEQ ID NO: 1044638 - RNA, 21 nt, Human
cagugcccuugcuucugguug

SEQ ID NO: 1044639 - RNA, 23 nt, Human
ccaagucagacacaguggagacu

SEQ ID NO: 1044640 - RNA, 18 nt, Human
ccaccuccuggcaggauc

SEQ ID NO: 1044641 - RNA, 18 nt, Human
cccccucccgccaccucc

SEQ ID NO: 1044642 - RNA, 22 nt, Human
cccguccgcagggcugcagcca

SEQ ID NO: 1044643 - RNA, 22 nt, Human
cccuagggcuuccacaauacac

SEQ ID NO: 1044644 - RNA, 20 nt, Human
ccgcagggcugcagccaguu

SEQ ID NO: 1044645 - RNA, 24 nt, Human
ccucccgccaccuccuggcaggau

SEQ ID NO: 1044646 - RNA, 21 nt, Human
ccucccguguauaagccucca

SEQ ID NO: 1044647 - RNA, 20 nt, Human
ccuggcaggaucuggcugcu

SEQ ID NO: 1044648 - RNA, 21 nt, Human
cgacccccucccgccaccucc

SEQ ID NO: 1044649 - RNA, 21 nt, Human
cgcccauggugaccaagggcc

SEQ ID NO: 1044650 - RNA, 21 nt, Human
cucccguguauaagccuccac

SEQ ID NO: 1044651 - RNA, 23 nt, Human
cugugcccugaaaacucugggcc

SEQ ID NO: 1044652 - RNA, 22 nt, Human
gacacaguggagacuggcaggu

SEQ ID NO: 1044653 - RNA, 19 nt, Human
gacccccucccgccaccuc

SEQ ID NO: 1044654 - RNA, 18 nt, Human
gagacuggcaggugccgg

SEQ ID NO: 1044655 - RNA, 23 nt, Human
gcagccaguucuaggcugugccc

SEQ ID NO: 1044656 - RNA, 21 nt, Human
gccuggacaucuggaauacag

SEQ ID NO: 1044657 - RNA, 24 nt, Human
gccuggugaagggugugauggggu

SEQ ID NO: 1044658 - RNA, 19 nt, Human
ggagucccuucagcaacuc

SEQ ID NO: 1044659 - RNA, 26 nt, Human
gggccaggagcaaucugggcuucuuc

SEQ ID NO: 1044660 - RNA, 19 nt, Human
gguccugagucucccuggg

SEQ ID NO: 1044661 - RNA, 20 nt, Human
ggugguacaacugccuggug

SEQ ID NO: 1044662 - RNA, 23 nt, Human
gugaagcuagacuucacgacccc

SEQ ID NO: 1044663 - RNA, 22 nt, Human
gugagaaggcucgggcuggcag

SEQ ID NO: 1044664 - RNA, 19 nt, Human
guggagacuggcaggugcc

SEQ ID NO: 1044665 - RNA, 20 nt, Human
uauggccgggcccucguccc

SEQ ID NO: 1044666 - RNA, 19 nt, Human
ugcccugaaaacucugggc

SEQ ID NO: 1044667 - RNA, 22 nt, Human
ugcucggagucccuucagcaac

SEQ ID NO: 1044668 - RNA, 19 nt, Human
ugcuggaagcaauguaggg

SEQ ID NO: 1044669 - RNA, 18 nt, Human
ugcugggccagcgcgucu

SEQ ID NO: 1044670 - RNA, 20 nt, Human
uggaucccuagggcuuccac

SEQ ID NO: 1044671 - RNA, 21 nt, Human
uggcaggugccggcaagggcc

SEQ ID NO: 1044672 - RNA, 19 nt, Human
uggggcuguuuucuugacc

SEQ ID NO: 1044673 - RNA, 25 nt, Human
uguagagcuugccucauccucuguc

SEQ ID NO: 1044674 - RNA, 24 nt, Human
uguauaagccuccacagcgaccac

SEQ ID NO: 1044675 - RNA, 21 nt, Human
uucugguuggugagcgucugg

SEQ ID NO: 1044676 - RNA, 22 nt, Human
agccaguaacagugguggcacg

SEQ ID NO: 1044677 - RNA, 18 nt, Human
agcuugggguuggcuccu

SEQ ID NO: 1044678 - RNA, 21 nt, Human
agugguggcacggcggccuuu

SEQ ID NO: 1044679 - RNA, 18 nt, Human
cccagagcuugggguugg

SEQ ID NO: 1044680 - RNA, 19 nt, Human
ccugcacagccaguaacag

SEQ ID NO: 1044681 - RNA, 28 nt, Human
aaccacgaagucuccuucaaacacagaa

SEQ ID NO: 1044682 - RNA, 18 nt, Human
aagcagugacaaagaggc

SEQ ID NO: 1044683 - RNA, 24 nt, Human
acacagaaaguggagcuugcagga

SEQ ID NO: 1044684 - RNA, 21 nt, Human
acacgauggggagugaaccuc

SEQ ID NO: 1044685 - RNA, 19 nt, Human
acgaagucuccuucaaaca

SEQ ID NO: 1044686 - RNA, 25 nt, Human
acgaagucuccuucaaacacagaaa

SEQ ID NO: 1044687 - RNA, 24 nt, Human
acugcgcuggggaccaaagccauu

SEQ ID NO: 1044688 - RNA, 19 nt, Human
agcgaagcagugacaaaga

SEQ ID NO: 1044689 - RNA, 20 nt, Human
aggagaugauacuucacaaa

SEQ ID NO: 1044690 - RNA, 18 nt, Human
aggagcugaaggagauga

SEQ ID NO: 1044691 - RNA, 22 nt, Human
aggaucagcgaagcagugacaa

SEQ ID NO: 1044692 - RNA, 20 nt, Human
agugcucugaagcuuguggg

SEQ ID NO: 1044693 - RNA, 21 nt, Human
auccucaugauaaaacaccuc

SEQ ID NO: 1044694 - RNA, 24 nt, Human
cacugcgcuggggaccaaagcugg

SEQ ID NO: 1044695 - RNA, 24 nt, Human
cacugugcugggggccaaagcugg

SEQ ID NO: 1044696 - RNA, 21 nt, Human
cagaggguguugagcugcucc

SEQ ID NO: 1044697 - RNA, 21 nt, Human
cagcgaagcagugacaaagga

SEQ ID NO: 1044698 - RNA, 21 nt, Human
cagugcucugaagcuuguggg

SEQ ID NO: 1044699 - RNA, 24 nt, Human
cccucaaaauucaaguccuuagca

SEQ ID NO: 1044700 - RNA, 21 nt, Human
ccucagaaccacgaagucucc

SEQ ID NO: 1044701 - RNA, 22 nt, Human
cugaaggacacucuucccacag

SEQ ID NO: 1044702 - RNA, 18 nt, Human
cuucacagugaagugucc

SEQ ID NO: 1044703 - RNA, 22 nt, Human
gaagucuccuucaaacacagaa

SEQ ID NO: 1044704 - RNA, 19 nt, Human
gacaggaugagacacgggg

SEQ ID NO: 1044705 - RNA, 22 nt, Human
gagaugauacuucacaaaacca

SEQ ID NO: 1044706 - RNA, 19 nt, Human
gagcugaaggagaugauac

SEQ ID NO: 1044707 - RNA, 23 nt, Human
gaggguguugagcugcuccccag

SEQ ID NO: 1044708 - RNA, 20 nt, Human
gccacuccucuccccagggu

SEQ ID NO: 1044709 - RNA, 23 nt, Human
gccuuugcccggcaccucagaac

SEQ ID NO: 1044710 - RNA, 27 nt, Human
gcgaagcagugacaaagaggcucacca

SEQ ID NO: 1044711 - RNA, 22 nt, Human
ggagugaaccucucugggcuuc

SEQ ID NO: 1044712 - RNA, 21 nt, Human
ggccacuccucuccccagggu

SEQ ID NO: 1044713 - RNA, 20 nt, Human
gggagugaaccucucugggc

SEQ ID NO: 1044714 - RNA, 21 nt, Human
guggagcuugcaggaucagcg

SEQ ID NO: 1044715 - RNA, 18 nt, Human
uaaaacaccucacugugc

SEQ ID NO: 1044716 - RNA, 22 nt, Human
uaccauaacaguguccaggaag

SEQ ID NO: 1044717 - RNA, 18 nt, Human
uaugacaguuccauggcu

SEQ ID NO: 1044718 - RNA, 19 nt, Human
uccuuagcagagcugaggg

SEQ ID NO: 1044719 - RNA, 18 nt, Human
uccuucagucagagagaa

SEQ ID NO: 1044720 - RNA, 23 nt, Human
ucucugggcuucacagucgacuu

SEQ ID NO: 1044721 - RNA, 24 nt, Human
ugaagugucaccuuggcucccuca

SEQ ID NO: 1044722 - RNA, 23 nt, Human
ugacaggagcugaaggagaugau

SEQ ID NO: 1044723 - RNA, 18 nt, Human
ugaggacaggaugagaca

SEQ ID NO: 1044724 - RNA, 18 nt, Human
uggaaagaauguaaaaug

SEQ ID NO: 1044725 - RNA, 18 nt, Human
uguggccagugcucugaa

SEQ ID NO: 1044726 - RNA, 20 nt, Human
uguggccagugcucugaagc

SEQ ID NO: 1044727 - RNA, 20 nt, Human
uugcaggaucagcgaagcag

SEQ ID NO: 1044728 - RNA, 20 nt, Human
uuugcccggcaccucagaac

SEQ ID NO: 1044729 - RNA, 22 nt, Human
aaaaaaaaaaaaggauaagaca

SEQ ID NO: 1044730 - RNA, 21 nt, Human
aagaaauaaacaugcaaauua

SEQ ID NO: 1044731 - RNA, 21 nt, Human
aauuugcagaugcuaauccuc

SEQ ID NO: 1044732 - RNA, 21 nt, Human
acaacuugccuuuguucccgg

SEQ ID NO: 1044733 - RNA, 20 nt, Human
agaagaggcacacggcugcg

SEQ ID NO: 1044734 - RNA, 20 nt, Human
agggagccaggcagccagag

SEQ ID NO: 1044735 - RNA, 22 nt, Human
cacggcugcggcaccguagaaa

SEQ ID NO: 1044736 - RNA, 24 nt, Human
cagaagaggcacacggcugcggca

SEQ ID NO: 1044737 - RNA, 20 nt, Human
cauaaagaauaauaauagcu

SEQ ID NO: 1044738 - RNA, 23 nt, Human
ccuuuguucccggacacuugggg

SEQ ID NO: 1044739 - RNA, 24 nt, Human
gguuuuuuuuuuaaaaaaaaaaaa

SEQ ID NO: 1044740 - RNA, 21 nt, Human
uaaaaaaaaaaaaggauaaga

SEQ ID NO: 1044741 - RNA, 24 nt, Human
uaacugcaugucagucacccaagu

SEQ ID NO: 1044742 - RNA, 20 nt, Human
ucagucacccaaguuuuaag

SEQ ID NO: 1044743 - RNA, 21 nt, Human
uccuagggagccaggcagcca

SEQ ID NO: 1044744 - RNA, 22 nt, Human
ucuaagaaauaaacaugcaaau

SEQ ID NO: 1044745 - RNA, 21 nt, Human
ugcaugucagucacccaaguu

SEQ ID NO: 1044746 - RNA, 20 nt, Human
uguacaaaugaaauggaaaa

SEQ ID NO: 1044747 - RNA, 24 nt, Human
uuucccuuagaaggaaacuugguc

SEQ ID NO: 1044748 - RNA, 24 nt, Human
agggcccaucuauuccuguagagc

SEQ ID NO: 1044749 - RNA, 19 nt, Human
ggagcagcugcugagggcc

SEQ ID NO: 1044750 - RNA, 25 nt, Human
uccuguagagccuucuccuaauccu

SEQ ID NO: 1044751 - RNA, 21 nt, Human
uguagagccuucuccuaaucc

SEQ ID NO: 1044752 - RNA, 22 nt, Human
aaaaaaaaaaaaaaaggcagaa

SEQ ID NO: 1044753 - RNA, 20 nt, Human
aaaaaaaaggcagaagcugg

SEQ ID NO: 1044754 - RNA, 19 nt, Human
aaacagacauggugaaggu

SEQ ID NO: 1044755 - RNA, 20 nt, Human
aacauggugaaaaccugucu

SEQ ID NO: 1044756 - RNA, 19 nt, Human
aacauggugaaaccccauc

SEQ ID NO: 1044757 - RNA, 20 nt, Human
aacauggugaaaccccaucu

SEQ ID NO: 1044758 - RNA, 21 nt, Human
aacauggugaaaccccaucuc

SEQ ID NO: 1044759 - RNA, 21 nt, Human
aacauggugaaaccccaucuc

SEQ ID NO: 1044760 - RNA, 24 nt, Human
aaccugugccagugacaacugccg

SEQ ID NO: 1044761 - RNA, 27 nt, Human
aacugccgccgccggguucaaaacuuc

SEQ ID NO: 1044762 - RNA, 25 nt, Human
aagagaccagggaagaggcugcuac

SEQ ID NO: 1044763 - RNA, 23 nt, Human
aagaucaugccacugcacuccag

SEQ ID NO: 1044764 - RNA, 20 nt, Human
aagaugcugggcuccagguu

SEQ ID NO: 1044765 - RNA, 19 nt, Human
aagcaguagaagcuggggc

SEQ ID NO: 1044766 - RNA, 22 nt, Human
aagcaguagaagcuggggcuag

SEQ ID NO: 1044767 - RNA, 24 nt, Human
aagcggaggcugcagugagccaag

SEQ ID NO: 1044768 - RNA, 18 nt, Human
aaggugccagaaccuggu

SEQ ID NO: 1044769 - RNA, 24 nt, Human
aauugcuugaaccugggaggcgga

SEQ ID NO: 1044770 - RNA, 18 nt, Human
acagggccuuggagggga

SEQ ID NO: 1044771 - RNA, 24 nt, Human
accccaucucuacuaaaaauacaa

SEQ ID NO: 1044772 - RNA, 18 nt, Human
accucauucuacucacca

SEQ ID NO: 1044773 - RNA, 28 nt, Human
accuugccucaaaaaaaaaaaaaaaaaa

SEQ ID NO: 1044774 - RNA, 18 nt, Human
acugcacuccagccuggg

SEQ ID NO: 1044775 - RNA, 22 nt, Human
acugcacuccagccugggcaac

SEQ ID NO: 1044776 - RNA, 26 nt, Human
acugcacuccagccugggcaacugag

SEQ ID NO: 1044777 - RNA, 24 nt, Human
acuggccaacauggugaaacccca

SEQ ID NO: 1044778 - RNA, 23 nt, Human
agaaguucaagaccagacuggcc

SEQ ID NO: 1044779 - RNA, 20 nt, Human
agacauggugaagguagugg

SEQ ID NO: 1044780 - RNA, 21 nt, Human
agaccagacuggccaacaugg

SEQ ID NO: 1044781 - RNA, 18 nt, Human
agacugaaagaagagacc

SEQ ID NO: 1044782 - RNA, 18 nt, Human
agacugaaagaagagacc

SEQ ID NO: 1044783 - RNA, 24 nt, Human
agacuggccaacauggugaaaccc

SEQ ID NO: 1044784 - RNA, 25 nt, Human
agaucacuugaggucagaaguucaa

SEQ ID NO: 1044785 - RNA, 20 nt, Human
agaugccaaagagagccuca

SEQ ID NO: 1044786 - RNA, 19 nt, Human
agaugcugggcuccagguu

SEQ ID NO: 1044787 - RNA, 24 nt, Human
agauggggggcaaggaugggcagg

SEQ ID NO: 1044788 - RNA, 21 nt, Human
agcaguagaagcuggggcuag

SEQ ID NO: 1044789 - RNA, 23 nt, Human
agccaggcaugauagcgugugcc

SEQ ID NO: 1044790 - RNA, 19 nt, Human
agccugggcaacaugguga

SEQ ID NO: 1044791 - RNA, 24 nt, Human
agccugggcaacauggugaaaacc

SEQ ID NO: 1044792 - RNA, 25 nt, Human
agccugggcaacauggugaaaaccu

SEQ ID NO: 1044793 - RNA, 24 nt, Human
agccugggcaacugaguaagaccu

SEQ ID NO: 1044794 - RNA, 21 nt, Human
agcgcacaccuguaaucccag

SEQ ID NO: 1044795 - RNA, 23 nt, Human
agcugagauggggggcaaggaug

SEQ ID NO: 1044796 - RNA, 18 nt, Human
agcuugcacucagaaggu

SEQ ID NO: 1044797 - RNA, 23 nt, Human
aggaguucgagaccagccugggc

SEQ ID NO: 1044798 - RNA, 22 nt, Human
aggcaggacaauugcuugaacc

SEQ ID NO: 1044799 - RNA, 24 nt, Human
aggcaggacaauugcuugaaccug

SEQ ID NO: 1044800 - RNA, 20 nt, Human
aggcggagguugcagugagc

SEQ ID NO: 1044801 - RNA, 24 nt, Human
aggcggagguugcagugagcugag

SEQ ID NO: 1044802 - RNA, 21 nt, Human
aggcgggcagaucacuugagg

SEQ ID NO: 1044803 - RNA, 21 nt, Human
aggcgggcagaucacuugagg

SEQ ID NO: 1044804 - RNA, 22 nt, Human
aggcgggcagaucacuugaggu

SEQ ID NO: 1044805 - RNA, 23 nt, Human
aggcgggcagaucacuugagguc

SEQ ID NO: 1044806 - RNA, 26 nt, Human
aggcgggcagaucacuugaggucaga

SEQ ID NO: 1044807 - RNA, 21 nt, Human
aggcugaggcaggacaauugc

SEQ ID NO: 1044808 - RNA, 24 nt, Human
aggcugaggcaggacaauugcuug

SEQ ID NO: 1044809 - RNA, 23 nt, Human
aggcugcagugagccaagaucau

SEQ ID NO: 1044810 - RNA, 24 nt, Human
agggaaguggggaugcaacacugg

SEQ ID NO: 1044811 - RNA, 21 nt, Human
agggccuuggaggggagggug

SEQ ID NO: 1044812 - RNA, 23 nt, Human
agggccuuggaggggaggguggg

SEQ ID NO: 1044813 - RNA, 18 nt, Human
agugacaacugccgccgc

SEQ ID NO: 1044814 - RNA, 22 nt, Human
aguugagcccaggaguucgaga

SEQ ID NO: 1044815 - RNA, 24 nt, Human
aucaugccacugcacuccagccug

SEQ ID NO: 1044816 - RNA, 22 nt, Human
aucugaacacuuugggaggcca

SEQ ID NO: 1044817 - RNA, 24 nt, Human
augccacugcacuccagccugggc

SEQ ID NO: 1044818 - RNA, 22 nt, Human
caacauggugaaaaccugucuc

SEQ ID NO: 1044819 - RNA, 24 nt, Human
caacauggugaaaaccugucucua

SEQ ID NO: 1044820 - RNA, 24 nt, Human
caacauggugaaaccccaucucua

SEQ ID NO: 1044821 - RNA, 23 nt, Human
caacuguaaucccagcacuuugg

SEQ ID NO: 1044822 - RNA, 24 nt, Human
caacuguaaucccagcacuuuggg

SEQ ID NO: 1044823 - RNA, 24 nt, Human
caagaccagacuggccaacauggu

SEQ ID NO: 1044824 - RNA, 24 nt, Human
caaguucaacugagcuugcacuca

SEQ ID NO: 1044825 - RNA, 24 nt, Human
cacaacuguaaucccagcacuuug

SEQ ID NO: 1044826 - RNA, 21 nt, Human
cacacauauuuacuaggucac

SEQ ID NO: 1044827 - RNA, 24 nt, Human
cacaccuguaaucccagcuacuug

SEQ ID NO: 1044828 - RNA, 24 nt, Human
cacaccuguaaucugaacacuuug

SEQ ID NO: 1044829 - RNA, 23 nt, Human
cacagccaaaaaauucuuaaagc

SEQ ID NO: 1044830 - RNA, 23 nt, Human
caccuguaaucccagcuacuugg

SEQ ID NO: 1044831 - RNA, 24 nt, Human
caccuguaaucccagcuacuuggg

SEQ ID NO: 1044832 - RNA, 23 nt, Human
caccuguaaucugaacacuuugg

SEQ ID NO: 1044833 - RNA, 24 nt, Human
caccuguaaucugaacacuuuggg

SEQ ID NO: 1044834 - RNA, 19 nt, Human
cacuacugcccuagagcag

SEQ ID NO: 1044835 - RNA, 18 nt, Human
cacucagaagguacagcu

SEQ ID NO: 1044836 - RNA, 22 nt, Human
cacuccagccugggcaacugag

SEQ ID NO: 1044837 - RNA, 18 nt, Human
cacugcacuccagccugg

SEQ ID NO: 1044838 - RNA, 19 nt, Human
cacugcacuccagccuggg

SEQ ID NO: 1044839 - RNA, 21 nt, Human
cacugcacuccagccugggca

SEQ ID NO: 1044840 - RNA, 23 nt, Human
cacugcacuccagccugggcaac

SEQ ID NO: 1044841 - RNA, 25 nt, Human
cacugcacuccagccugggcaacug

SEQ ID NO: 1044842 - RNA, 24 nt, Human
cagcacuuugggagggcgaggcgg

SEQ ID NO: 1044843 - RNA, 21 nt, Human
cagcgccaccugggaaacuga

SEQ ID NO: 1044844 - RNA, 24 nt, Human
cagcuacuugggaggcugaggcag

SEQ ID NO: 1044845 - RNA, 21 nt, Human
caggaaaggccaccacguuag

SEQ ID NO: 1044846 - RNA, 21 nt, Human
caguagaagcuggggcuaggc

SEQ ID NO: 1044847 - RNA, 22 nt, Human
ccaccugggaaacugaggucgc

SEQ ID NO: 1044848 - RNA, 20 nt, Human
ccacugcacuccagccuggg

SEQ ID NO: 1044849 - RNA, 20 nt, Human
ccacugcacuccagccuggg

SEQ ID NO: 1044850 - RNA, 21 nt, Human
ccacugcacuccagccugggc

SEQ ID NO: 1044851 - RNA, 23 nt, Human
ccacugcacuccagccugggcaa

SEQ ID NO: 1044852 - RNA, 24 nt, Human
ccacugcacuccagccugggcaac

SEQ ID NO: 1044853 - RNA, 19 nt, Human
ccacuggauuagaggcaga

SEQ ID NO: 1044854 - RNA, 18 nt, Human
ccagaaccugguugagac

SEQ ID NO: 1044855 - RNA, 27 nt, Human
ccagaaccugguugagaccuccccaga

SEQ ID NO: 1044856 - RNA, 25 nt, Human
ccaggaguucgagaccagccugggc

SEQ ID NO: 1044857 - RNA, 21 nt, Human
ccaggcaugauagcgugugcc

SEQ ID NO: 1044858 - RNA, 19 nt, Human
cccaaaggaauagguccuc

SEQ ID NO: 1044859 - RNA, 23 nt, Human
cccauauauuauuacuugggggg

SEQ ID NO: 1044860 - RNA, 20 nt, Human
cccauuacuuuccaaguuca

SEQ ID NO: 1044861 - RNA, 23 nt, Human
ccccagcacuacugcccuagagc

SEQ ID NO: 1044862 - RNA, 19 nt, Human
ccugggaggcggagguugc

SEQ ID NO: 1044863 - RNA, 22 nt, Human
ccugggcaacauggugaaaacc

SEQ ID NO: 1044864 - RNA, 24 nt, Human
ccugggcaacauggugaaaaccug

SEQ ID NO: 1044865 - RNA, 21 nt, Human
ccuguaaucccagcuacuugg

SEQ ID NO: 1044866 - RNA, 24 nt, Human
ccuguaaucugaacacuuugggag

SEQ ID NO: 1044867 - RNA, 24 nt, Human
ccugugacuagggaaaggaaggac

SEQ ID NO: 1044868 - RNA, 24 nt, Human
ccuugccucaaaaaaaaaaaaaaa

SEQ ID NO: 1044869 - RNA, 24 nt, Human
cgagaccagccugggcaacauggu

SEQ ID NO: 1044870 - RNA, 24 nt, Human
cgaggcgggcagaucacuugaggu

SEQ ID NO: 1044871 - RNA, 26 nt, Human
cgaggcgggcagaucacuugagguca

SEQ ID NO: 1044872 - RNA, 19 nt, Human
cgcagcgccaccugggaaa

SEQ ID NO: 1044873 - RNA, 24 nt, Human
cgggcagaucacuugaggucagaa

SEQ ID NO: 1044874 - RNA, 22 nt, Human
cuaggcaugguagcagcucaca

SEQ ID NO: 1044875 - RNA, 18 nt, Human
cucaaaaaaaaaaaaaaa

SEQ ID NO: 1044876 - RNA, 24 nt, Human
cucacaacuguaaucccagcacuu

SEQ ID NO: 1044877 - RNA, 20 nt, Human
cucacaccuguaaucugaac

SEQ ID NO: 1044878 - RNA, 24 nt, Human
cucacaccuguaaucugaacacuu

SEQ ID NO: 1044879 - RNA, 20 nt, Human
cuccucuggggaucuggcuu

SEQ ID NO: 1044880 - RNA, 21 nt, Human
cucuccuagcgggggauaccc

SEQ ID NO: 1044881 - RNA, 23 nt, Human
cuggccaacauggugaaacccca

SEQ ID NO: 1044882 - RNA, 22 nt, Human
cuggcucccuggugucuugugc

SEQ ID NO: 1044883 - RNA, 22 nt, Human
cugggaaacugaggucgccucu

SEQ ID NO: 1044884 - RNA, 21 nt, Human
cuguaaucccagcuacuuggg

SEQ ID NO: 1044885 - RNA, 19 nt, Human
cuugaaccugggaggcgga

SEQ ID NO: 1044886 - RNA, 25 nt, Human
cuuuccaaguucaacugagcuugca

SEQ ID NO: 1044887 - RNA, 21 nt, Human
gaagaaacagacauggugaag

SEQ ID NO: 1044888 - RNA, 19 nt, Human
gaccagggaagaggcugcu

SEQ ID NO: 1044889 - RNA, 18 nt, Human
gaggcugcagugagccaa

SEQ ID NO: 1044890 - RNA, 19 nt, Human
gaggcugcagugagccaag

SEQ ID NO: 1044891 - RNA, 21 nt, Human
gagguugcagugagcugagau

SEQ ID NO: 1044892 - RNA, 23 nt, Human
gaucacuugaggucagaaguuca

SEQ ID NO: 1044893 - RNA, 24 nt, Human
gaucacuugaggucagaaguucaa

SEQ ID NO: 1044894 - RNA, 24 nt, Human
gaucaguugagcccaggaguucga

SEQ ID NO: 1044895 - RNA, 21 nt, Human
gcagugaaaagccucaguaga

SEQ ID NO: 1044896 - RNA, 24 nt, Human
gccaacauggugaaaccccaucuc

SEQ ID NO: 1044897 - RNA, 20 nt, Human
gccaagaucaugccacugca

SEQ ID NO: 1044898 - RNA, 22 nt, Human
gccacugcacuccagccugggc

SEQ ID NO: 1044899 - RNA, 24 nt, Human
gccacugcacuccagccugggcaa

SEQ ID NO: 1044900 - RNA, 22 nt, Human
gcccaggaguucgagaccagcc

SEQ ID NO: 1044901 - RNA, 18 nt, Human
gccucaguagauaagaca

SEQ ID NO: 1044902 - RNA, 18 nt, Human
gcuaggcaugguagcagc

SEQ ID NO: 1044903 - RNA, 24 nt, Human
ggaaggacgcucuuggggaacugg

SEQ ID NO: 1044904 - RNA, 20 nt, Human
ggaggcugcagugagccaag

SEQ ID NO: 1044905 - RNA, 24 nt, Human
ggaggcugcagugagccaagauca

SEQ ID NO: 1044906 - RNA, 22 nt, Human
ggagguugcagugagcugagau

SEQ ID NO: 1044907 - RNA, 23 nt, Human
ggagguugcagugagcugagaug

SEQ ID NO: 1044908 - RNA, 24 nt, Human
ggagguugcagugagcugagaugg

SEQ ID NO: 1044909 - RNA, 20 nt, Human
gggcaaggaugggcaggcag

SEQ ID NO: 1044910 - RNA, 24 nt, Human
gggcaugguggcucacaacuguaa

SEQ ID NO: 1044911 - RNA, 18 nt, Human
gggcgggcagcccagaac

SEQ ID NO: 1044912 - RNA, 20 nt, Human
gggcuaaggugggaggauug

SEQ ID NO: 1044913 - RNA, 23 nt, Human
ggggucuggcucccuggugucuu

SEQ ID NO: 1044914 - RNA, 20 nt, Human
ggugaagguagugggcagag

SEQ ID NO: 1044915 - RNA, 24 nt, Human
gguggaucaguugagcccaggagu

SEQ ID NO: 1044916 - RNA, 24 nt, Human
gguggcucacaacuguaaucccag

SEQ ID NO: 1044917 - RNA, 19 nt, Human
guaguacacuggcgccacc

SEQ ID NO: 1044918 - RNA, 18 nt, Human
guugcagugagcugagau

SEQ ID NO: 1044919 - RNA, 24 nt, Human
uaaggaugauguguggagaugcca

SEQ ID NO: 1044920 - RNA, 18 nt, Human
uaaggugggaggauugcu

SEQ ID NO: 1044921 - RNA, 23 nt, Human
uagaaagggugcuccucugggga

SEQ ID NO: 1044922 - RNA, 22 nt, Human
uagccaggcaugauagcgugug

SEQ ID NO: 1044923 - RNA, 22 nt, Human
uagcgcacaccuguaaucccag

SEQ ID NO: 1044924 - RNA, 22 nt, Human
uagcgugugccuguagucccau

SEQ ID NO: 1044925 - RNA, 23 nt, Human
uaggcugggcaugguggcucaca

SEQ ID NO: 1044926 - RNA, 18 nt, Human
uaggucacaauguaaauu

SEQ ID NO: 1044927 - RNA, 23 nt, Human
uaucagaccaaaacugcgauccu

SEQ ID NO: 1044928 - RNA, 24 nt, Human
uaucucauccuccuuugcaucccc

SEQ ID NO: 1044929 - RNA, 26 nt, Human
uaucucauccuccuuugcauccccca

SEQ ID NO: 1044930 - RNA, 27 nt, Human
uaucucauccuccuuugcaucccccag

SEQ ID NO: 1044931 - RNA, 23 nt, Human
ucaguugagcccaggaguucgag

SEQ ID NO: 1044932 - RNA, 23 nt, Human
ucaugccacugcacuccagccug

SEQ ID NO: 1044933 - RNA, 24 nt, Human
ucauucuacucaccagaaugggaa

SEQ ID NO: 1044934 - RNA, 25 nt, Human
ucccaccagaauaucucauccuccu

SEQ ID NO: 1044935 - RNA, 21 nt, Human
ucuacucaccagaaugggaac

SEQ ID NO: 1044936 - RNA, 21 nt, Human
ucucuacuaaaaauacaaaaa

SEQ ID NO: 1044937 - RNA, 19 nt, Human
ucuggcucccuggugucuu

SEQ ID NO: 1044938 - RNA, 19 nt, Human
ugaaaccccaucucuacua

SEQ ID NO: 1044939 - RNA, 24 nt, Human
ugaaagaagagaccagggaagagg

SEQ ID NO: 1044940 - RNA, 24 nt, Human
ugaaccugggaggcggagguugca

SEQ ID NO: 1044941 - RNA, 23 nt, Human
ugagcccaggaguucgagaccag

SEQ ID NO: 1044942 - RNA, 21 nt, Human
ugaggaaagguagccuccuac

SEQ ID NO: 1044943 - RNA, 24 nt, Human
ugaggcaggacaauugcuugaacc

SEQ ID NO: 1044944 - RNA, 25 nt, Human
ugaggcaggacaauugcuugaaccu

SEQ ID NO: 1044945 - RNA, 19 nt, Human
ugaguaagaccuugccuca

SEQ ID NO: 1044946 - RNA, 24 nt, Human
ugauagcgugugccuguaguccca

SEQ ID NO: 1044947 - RNA, 18 nt, Human
ugcagugagcugagaugg

SEQ ID NO: 1044948 - RNA, 24 nt, Human
ugccacugcacuccagccugggca

SEQ ID NO: 1044949 - RNA, 20 nt, Human
ugccagugacaacugccgcc

SEQ ID NO: 1044950 - RNA, 18 nt, Human
ugccgcagcgccaccugg

SEQ ID NO: 1044951 - RNA, 20 nt, Human
ugccgcagcgccaccuggga

SEQ ID NO: 1044952 - RNA, 21 nt, Human
ugcuaaggaugauguguggag

SEQ ID NO: 1044953 - RNA, 24 nt, Human
uggagcugaaagaugcugggccgg

SEQ ID NO: 1044954 - RNA, 24 nt, Human
uggaucaguugagcccaggaguuc

SEQ ID NO: 1044955 - RNA, 23 nt, Human
uggaugaagaaacagacauggug

SEQ ID NO: 1044956 - RNA, 24 nt, Human
uggccaacauggugaaaccccauc

SEQ ID NO: 1044957 - RNA, 24 nt, Human
uggcucacaacuguaaucccagca

SEQ ID NO: 1044958 - RNA, 21 nt, Human
uggcuuccauaaaaguucccu

SEQ ID NO: 1044959 - RNA, 24 nt, Human
ugggaggccaaaguugguggauca

SEQ ID NO: 1044960 - RNA, 29 nt, Human
ugggaggcggagguugcagugacaacggu

SEQ ID NO: 1044961 - RNA, 24 nt, Human
ugggaggcggagguugcagugagc

SEQ ID NO: 1044962 - RNA, 20 nt, Human
ugggaggcugaggcaggaca

SEQ ID NO: 1044963 - RNA, 22 nt, Human
ugggaggcugaggcaggacaau

SEQ ID NO: 1044964 - RNA, 24 nt, Human
ugggagggcgaggcgggcagauca

SEQ ID NO: 1044965 - RNA, 22 nt, Human
uggggggcuaaggugggaggau

SEQ ID NO: 1044966 - RNA, 23 nt, Human
ugggguagguggaugcacuauca

SEQ ID NO: 1044967 - RNA, 24 nt, Human
ugguggcucacaacuguaauccca

SEQ ID NO: 1044968 - RNA, 24 nt, Human
ugugcuugcucuccuagcggggga

SEQ ID NO: 1044969 - RNA, 26 nt, Human
uuacuaggucacaauguaaauuguau

SEQ ID NO: 1044970 - RNA, 21 nt, Human
uuagauggaaagagggaagug

SEQ ID NO: 1044971 - RNA, 22 nt, Human
uuccaaguucaacugagcuugc

SEQ ID NO: 1044972 - RNA, 24 nt, Human
uugaaccugggaggcggagguugc

SEQ ID NO: 1044973 - RNA, 22 nt, Human
uugagcccaggaguucgagacc

SEQ ID NO: 1044974 - RNA, 18 nt, Human
uugcagugagcugagaug

SEQ ID NO: 1044975 - RNA, 24 nt, Human
uugcagugagcugagauggggggc

SEQ ID NO: 1044976 - RNA, 24 nt, Human
uugcuugaaccugggaggcggagg

SEQ ID NO: 1044977 - RNA, 23 nt, Human
uugggaggcugaggcaggacaau

SEQ ID NO: 1044978 - RNA, 25 nt, Human
uuggggggcuaaggugggaggauug

SEQ ID NO: 1044979 - RNA, 23 nt, Human
uuuggacuggcugccgcagcgcc

SEQ ID NO: 1044980 - RNA, 23 nt, Human
aaacaggagagggaacaugcuga

SEQ ID NO: 1044981 - RNA, 21 nt, Human
aaagaagagacacaagaaaga

SEQ ID NO: 1044982 - RNA, 19 nt, Human
aaagaccaucccagcugcc

SEQ ID NO: 1044983 - RNA, 20 nt, Human
aagaagagacacaagaaaga

SEQ ID NO: 1044984 - RNA, 21 nt, Human
aaguuggggaacugaagacac

SEQ ID NO: 1044985 - RNA, 26 nt, Human
acagucuggccuuuuucaccucccag

SEQ ID NO: 1044986 - RNA, 21 nt, Human
agaaagaccaucccagcugcc

SEQ ID NO: 1044987 - RNA, 25 nt, Human
agggaacaugcugagggaagccccc

SEQ ID NO: 1044988 - RNA, 22 nt, Human
aucagggguccucuuggggggc

SEQ ID NO: 1044989 - RNA, 22 nt, Human
cacagucuggccuuuuucaccu

SEQ ID NO: 1044990 - RNA, 22 nt, Human
cagggguccucuuggggggccu

SEQ ID NO: 1044991 - RNA, 22 nt, Human
ccucccaggccucaagagugaa

SEQ ID NO: 1044992 - RNA, 21 nt, Human
ccucuggauccguggcaaaca

SEQ ID NO: 1044993 - RNA, 24 nt, Human
cucuuuugagagggaagcugggag

SEQ ID NO: 1044994 - RNA, 19 nt, Human
gaguuuaccauucagcucc

SEQ ID NO: 1044995 - RNA, 22 nt, Human
gcacagucuggccuuuuucacc

SEQ ID NO: 1044996 - RNA, 21 nt, Human
ggaaugccaggaaaaccagca

SEQ ID NO: 1044997 - RNA, 22 nt, Human
ggccucuggauccguggcaaac

SEQ ID NO: 1044998 - RNA, 24 nt, Human
uaaaagcaaaauugaaucaauccu

SEQ ID NO: 1044999 - RNA, 24 nt, Human
ucaagagugaaagggguacgagaa

SEQ ID NO: 1045000 - RNA, 19 nt, Human
ucaccucccaggccucaag

SEQ ID NO: 1045001 - RNA, 30 nt, Human
uccauuauccagaaucuguuaggaccacuu

SEQ ID NO: 1045002 - RNA, 22 nt, Human
ucuggccuuuuucaccucccag

SEQ ID NO: 1045003 - RNA, 23 nt, Human
ugacaaaugagacuucacucucu

SEQ ID NO: 1045004 - RNA, 25 nt, Human
ugcaaagaagagacacaagaaagac

SEQ ID NO: 1045005 - RNA, 24 nt, Human
uggccuuuuucaccucccaggccu

SEQ ID NO: 1045006 - RNA, 23 nt, Human
uggggugcaaagaagagacacaa

SEQ ID NO: 1045007 - RNA, 18 nt, Human
uuaaauauucucuaccua

SEQ ID NO: 1045008 - RNA, 24 nt, Human
aaaaacuccuggcugccccuauca

SEQ ID NO: 1045009 - RNA, 23 nt, Human
aaacaaaacaaaucacucucuga

SEQ ID NO: 1045010 - RNA, 22 nt, Human
aaagacauucuucucaccagag

SEQ ID NO: 1045011 - RNA, 18 nt, Human
aaaguaaauagcaagguc

SEQ ID NO: 1045012 - RNA, 20 nt, Human
aaauauuaaagccccugaca

SEQ ID NO: 1045013 - RNA, 24 nt, Human
aaauuguugggauuacgugcauga

SEQ ID NO: 1045014 - RNA, 20 nt, Human
aacacagcgagacuucgucu

SEQ ID NO: 1045015 - RNA, 21 nt, Human
aacacagcgagacuucgucuc

SEQ ID NO: 1045016 - RNA, 27 nt, Human
aaccaggucauaaggcccuggaacgcc

SEQ ID NO: 1045017 - RNA, 20 nt, Human
aaccuccaccuccugggcuc

SEQ ID NO: 1045018 - RNA, 19 nt, Human
aaccugggguaucuuccuu

SEQ ID NO: 1045019 - RNA, 22 nt, Human
aacuaaccccacuuaacccgca

SEQ ID NO: 1045020 - RNA, 23 nt, Human
aagaaaauagcucacuaacgccc

SEQ ID NO: 1045021 - RNA, 18 nt, Human
aagacaaaaugacaaaaa

SEQ ID NO: 1045022 - RNA, 20 nt, Human
aagacaaaaugacaaaaagc

SEQ ID NO: 1045023 - RNA, 19 nt, Human
aagacggcgaaaccccauc

SEQ ID NO: 1045024 - RNA, 20 nt, Human
aagacggcgaaaccccaucu

SEQ ID NO: 1045025 - RNA, 23 nt, Human
aagauugcgccauugcacuccag

SEQ ID NO: 1045026 - RNA, 22 nt, Human
aagcaaaucuaauuuuagagac

SEQ ID NO: 1045027 - RNA, 18 nt, Human
aagcaaguauuuuuuuua

SEQ ID NO: 1045028 - RNA, 18 nt, Human
aaucacuuuaagaccaaa

SEQ ID NO: 1045029 - RNA, 21 nt, Human
aaugaaccaauacacacugaa

SEQ ID NO: 1045030 - RNA, 22 nt, Human
aaugacacuucugcccccaaca

SEQ ID NO: 1045031 - RNA, 23 nt, Human
acacagcgagacuucgucucaaa

SEQ ID NO: 1045032 - RNA, 23 nt, Human
acacuucugcccccaacagagag

SEQ ID NO: 1045033 - RNA, 19 nt, Human
acagacaggguuucaccau

SEQ ID NO: 1045034 - RNA, 18 nt, Human
acaggguuucaccauguu

SEQ ID NO: 1045035 - RNA, 23 nt, Human
acaggguuucaccauguuggcca

SEQ ID NO: 1045036 - RNA, 24 nt, Human
acaggguuucaccauguuggccag

SEQ ID NO: 1045037 - RNA, 21 nt, Human
accagguauuccagguaacaa

SEQ ID NO: 1045038 - RNA, 18 nt, Human
accauguuggccaggcug

SEQ ID NO: 1045039 - RNA, 21 nt, Human
accccagagcuggaggcaaca

SEQ ID NO: 1045040 - RNA, 24 nt, Human
accccaucucuacuaaaaauacaa

SEQ ID NO: 1045041 - RNA, 19 nt, Human
accuugugaugauaguugu

SEQ ID NO: 1045042 - RNA, 18 nt, Human
acggcgaaaccccaucuc

SEQ ID NO: 1045043 - RNA, 19 nt, Human
acucaggcuggagugcaau

SEQ ID NO: 1045044 - RNA, 18 nt, Human
acucugucacucaggcug

SEQ ID NO: 1045045 - RNA, 18 nt, Human
agaauacagacacaucug

SEQ ID NO: 1045046 - RNA, 21 nt, Human
agaauacagacacaucugcug

SEQ ID NO: 1045047 - RNA, 22 nt, Human
agacaaaaugacaaaaagccag

SEQ ID NO: 1045048 - RNA, 23 nt, Human
agacaaaaugacaaaaagccaga

SEQ ID NO: 1045049 - RNA, 24 nt, Human
agacaaaaugacaaaaagccagag

SEQ ID NO: 1045050 - RNA, 18 nt, Human
agagaccagguauuccag

SEQ ID NO: 1045051 - RNA, 21 nt, Human
agaggugauccaccuaccuca

SEQ ID NO: 1045052 - RNA, 24 nt, Human
agauguugcagugagccaagauug

SEQ ID NO: 1045053 - RNA, 18 nt, Human
agccaccgcacccagccu

SEQ ID NO: 1045054 - RNA, 18 nt, Human
agccucccgaauagcugg

SEQ ID NO: 1045055 - RNA, 22 nt, Human
agccugggcaacacagcgagac

SEQ ID NO: 1045056 - RNA, 24 nt, Human
agccugggcaacacagcgagacuu

SEQ ID NO: 1045057 - RNA, 20 nt, Human
aggaguuugagaccagccug

SEQ ID NO: 1045058 - RNA, 22 nt, Human
aggggugcggggaagggaaaug

SEQ ID NO: 1045059 - RNA, 18 nt, Human
aggugauccaccuaccuc

SEQ ID NO: 1045060 - RNA, 24 nt, Human
aggugauccaccuaccucagccuc

SEQ ID NO: 1045061 - RNA, 23 nt, Human
agguggguggaucauuugagguc

SEQ ID NO: 1045062 - RNA, 24 nt, Human
agucagauguugcagugagccaag

SEQ ID NO: 1045063 - RNA, 24 nt, Human
agugauucucgugccucagccucc

SEQ ID NO: 1045064 - RNA, 20 nt, Human
agugcaauggugcgaucaug

SEQ ID NO: 1045065 - RNA, 23 nt, Human
agugcaauggugcgaucauggcu

SEQ ID NO: 1045066 - RNA, 24 nt, Human
agugcagugacauaaucuuggcuc

SEQ ID NO: 1045067 - RNA, 23 nt, Human
aguggcucaugccuguaauccag

SEQ ID NO: 1045068 - RNA, 22 nt, Human
auaaaggcuuucuaaaaugcuu

SEQ ID NO: 1045069 - RNA, 24 nt, Human
aucauuugaggucaggaguuugag

SEQ ID NO: 1045070 - RNA, 18 nt, Human
aucuggccuguuuucaag

SEQ ID NO: 1045071 - RNA, 21 nt, Human
augaaacaaaagacaucgaag

SEQ ID NO: 1045072 - RNA, 24 nt, Human
augaaacaaaagacaucgaaguuc

SEQ ID NO: 1045073 - RNA, 21 nt, Human
augaacuccagagcugaauua

SEQ ID NO: 1045074 - RNA, 18 nt, Human
auuagcugggaguggugg

SEQ ID NO: 1045075 - RNA, 23 nt, Human
auugcacuccagccugggcaaca

SEQ ID NO: 1045076 - RNA, 25 nt, Human
auugcacuccagccugggcaacaca

SEQ ID NO: 1045077 - RNA, 24 nt, Human
auugcgccauugcacuccagccug

SEQ ID NO: 1045078 - RNA, 24 nt, Human
auuugaggucaggaguuugagacc

SEQ ID NO: 1045079 - RNA, 22 nt, Human
caaaacaaaacaaaucacucuc

SEQ ID NO: 1045080 - RNA, 26 nt, Human
caaaauaauccuuaggccacacucug

SEQ ID NO: 1045081 - RNA, 20 nt, Human
caaacugaacggcuaagaac

SEQ ID NO: 1045082 - RNA, 19 nt, Human
caaaguaaauagcaagguc

SEQ ID NO: 1045083 - RNA, 21 nt, Human
caaaugaccaaccccagaaua

SEQ ID NO: 1045084 - RNA, 20 nt, Human
caacaaaauaauccuuaggc

SEQ ID NO: 1045085 - RNA, 24 nt, Human
caacaaaauaauccuuaggccaca

SEQ ID NO: 1045086 - RNA, 24 nt, Human
caaccuccaccuccugggcucaag

SEQ ID NO: 1045087 - RNA, 25 nt, Human
caacuguaaagcaacuggacaauau

SEQ ID NO: 1045088 - RNA, 22 nt, Human
caagguccuuuacucucucuuc

SEQ ID NO: 1045089 - RNA, 22 nt, Human
caagugauucucgugccucagc

SEQ ID NO: 1045090 - RNA, 21 nt, Human
caccauguuggccaggcuggu

SEQ ID NO: 1045091 - RNA, 24 nt, Human
caccauguuggccaggcuggucuc

SEQ ID NO: 1045092 - RNA, 27 nt, Human
caccauguuggccaggcuggucucaaa

SEQ ID NO: 1045093 - RNA, 18 nt, Human
caccgcacccagccuaca

SEQ ID NO: 1045094 - RNA, 24 nt, Human
caccgugcccagcuaauuuuugua

SEQ ID NO: 1045095 - RNA, 23 nt, Human
cacucugucacucaggcuggagu

SEQ ID NO: 1045096 - RNA, 24 nt, Human
cacucugucacucaggcuggagug

SEQ ID NO: 1045097 - RNA, 21 nt, Human
cacugcaaccuccaccuccug

SEQ ID NO: 1045098 - RNA, 23 nt, Human
cacugcaaccuccaccuccuggg

SEQ ID NO: 1045099 - RNA, 26 nt, Human
cacuuuaagaccaaagacuuggccgg

SEQ ID NO: 1045100 - RNA, 21 nt, Human
cagaacagaaacuaaccccac

SEQ ID NO: 1045101 - RNA, 18 nt, Human
cagccugacgaagacggc

SEQ ID NO: 1045102 - RNA, 24 nt, Human
caggguuucaccauguuggccagg

SEQ ID NO: 1045103 - RNA, 19 nt, Human
caggugcccgccaccgugc

SEQ ID NO: 1045104 - RNA, 19 nt, Human
cauacaaucuucaaacauu

SEQ ID NO: 1045105 - RNA, 18 nt, Human
caucgcaagcaaguauuu

SEQ ID NO: 1045106 - RNA, 21 nt, Human
caucucucuucacacaggguc

SEQ ID NO: 1045107 - RNA, 24 nt, Human
caucugacagaacagaaacuaacc

SEQ ID NO: 1045108 - RNA, 23 nt, Human
cauggcucgcugcagccuugacc

SEQ ID NO: 1045109 - RNA, 24 nt, Human
cauguuggccaggcuggucucaaa

SEQ ID NO: 1045110 - RNA, 18 nt, Human
cauugcacuccagccugg

SEQ ID NO: 1045111 - RNA, 19 nt, Human
cauugcacuccagccuggg

SEQ ID NO: 1045112 - RNA, 21 nt, Human
cauugcacuccagccugggca

SEQ ID NO: 1045113 - RNA, 24 nt, Human
cauugcacuccagccugggcaaca

SEQ ID NO: 1045114 - RNA, 25 nt, Human
cauugcacuccagccugggcaacac

SEQ ID NO: 1045115 - RNA, 20 nt, Human
ccaaauuguugggauuacgu

SEQ ID NO: 1045116 - RNA, 24 nt, Human
ccaaauuguugggauuacgugcau

SEQ ID NO: 1045117 - RNA, 22 nt, Human
ccacacagcugugaacucccug

SEQ ID NO: 1045118 - RNA, 21 nt, Human
ccauucaccauaguacucuuc

SEQ ID NO: 1045119 - RNA, 20 nt, Human
ccauugcacuccagccuggg

SEQ ID NO: 1045120 - RNA, 21 nt, Human
ccauugcacuccagccugggc

SEQ ID NO: 1045121 - RNA, 22 nt, Human
ccauugcacuccagccugggca

SEQ ID NO: 1045122 - RNA, 23 nt, Human
ccauugcacuccagccugggcaa

SEQ ID NO: 1045123 - RNA, 24 nt, Human
ccauugcacuccagccugggcaac

SEQ ID NO: 1045124 - RNA, 20 nt, Human
cccaccaccugccucaaaaa

SEQ ID NO: 1045125 - RNA, 21 nt, Human
cccagaauacagacacaucug

SEQ ID NO: 1045126 - RNA, 19 nt, Human
cccaugguuuuuuucacag

SEQ ID NO: 1045127 - RNA, 19 nt, Human
cccuaaacccuggaaggag

SEQ ID NO: 1045128 - RNA, 19 nt, Human
ccucaaaaacuccuggcug

SEQ ID NO: 1045129 - RNA, 22 nt, Human
ccuccaccuccugggcucaagu

SEQ ID NO: 1045130 - RNA, 21 nt, Human
ccucuccucuacuuuuaauuc

SEQ ID NO: 1045131 - RNA, 21 nt, Human
ccucugagaugcugguugugc

SEQ ID NO: 1045132 - RNA, 23 nt, Human
ccugaccucacgugaucugccug

SEQ ID NO: 1045133 - RNA, 24 nt, Human
ccugagcagaggugauccaccuac

SEQ ID NO: 1045134 - RNA, 21 nt, Human
ccuggcuuuugucagcuugug

SEQ ID NO: 1045135 - RNA, 20 nt, Human
ccugggcaacacagcgagac

SEQ ID NO: 1045136 - RNA, 20 nt, Human
ccugggcucaagugauucuc

SEQ ID NO: 1045137 - RNA, 20 nt, Human
ccugggcucaagugauucuc

SEQ ID NO: 1045138 - RNA, 19 nt, Human
cgaaaccccaucucuacua

SEQ ID NO: 1045139 - RNA, 18 nt, Human
cgacucucucugcauccc

SEQ ID NO: 1045140 - RNA, 19 nt, Human
cgacucucucugcaucccu

SEQ ID NO: 1045141 - RNA, 31 nt, Human
cgcaagcaaguauuuuuuuuaaagaaggugg

SEQ ID NO: 1045142 - RNA, 24 nt, Human
cgugaucugccugccucagccucc

SEQ ID NO: 1045143 - RNA, 23 nt, Human
cuaauaaugaugccaaugccuaa

SEQ ID NO: 1045144 - RNA, 24 nt, Human
cucaagacaaaaugacaaaaagcc

SEQ ID NO: 1045145 - RNA, 23 nt, Human
cucaagugauucucgugccucag

SEQ ID NO: 1045146 - RNA, 24 nt, Human
cucacucugucacucaggcuggag

SEQ ID NO: 1045147 - RNA, 24 nt, Human
cucacugcaaccuccaccuccugg

SEQ ID NO: 1045148 - RNA, 27 nt, Human
cucacugcaaccuccaccuccugggcu

SEQ ID NO: 1045149 - RNA, 18 nt, Human
cucaugccuguaauccag

SEQ ID NO: 1045150 - RNA, 26 nt, Human
cuccugaccucacgugaucugccugc

SEQ ID NO: 1045151 - RNA, 20 nt, Human
cuccugggcucaagugauuc

SEQ ID NO: 1045152 - RNA, 21 nt, Human
cuccugggcucaagugauucu

SEQ ID NO: 1045153 - RNA, 20 nt, Human
cugaaaaaaacauuccuuuu

SEQ ID NO: 1045154 - RNA, 23 nt, Human
cugcaaccuccaccuccugggcu

SEQ ID NO: 1045155 - RNA, 24 nt, Human
cugcaaccuccaccuccugggcuc

SEQ ID NO: 1045156 - RNA, 19 nt, Human
cugccucagccucccaaau

SEQ ID NO: 1045157 - RNA, 21 nt, Human
cuggaaggagggagaaacaag

SEQ ID NO: 1045158 - RNA, 22 nt, Human
cuucagaaagcccuacccuuaa

SEQ ID NO: 1045159 - RNA, 21 nt, Human
cuuguccucugagaugcuggu

SEQ ID NO: 1045160 - RNA, 26 nt, Human
gaccucacgugaucugccugccucag

SEQ ID NO: 1045161 - RNA, 19 nt, Human
gagacccaaaugaccaacc

SEQ ID NO: 1045162 - RNA, 23 nt, Human
gagguggguggaucauuugaggu

SEQ ID NO: 1045163 - RNA, 19 nt, Human
gaucauggcucgcugcagc

SEQ ID NO: 1045164 - RNA, 24 nt, Human
gaucauuugaggucaggaguuuga

SEQ ID NO: 1045165 - RNA, 18 nt, Human
gauuacgugcaugagcca

SEQ ID NO: 1045166 - RNA, 21 nt, Human
gauucuaaauuacacgaucca

SEQ ID NO: 1045167 - RNA, 24 nt, Human
gcagaggcuaguacacaaauacca

SEQ ID NO: 1045168 - RNA, 22 nt, Human
gccauugcacuccagccugggc

SEQ ID NO: 1045169 - RNA, 24 nt, Human
gccauugcacuccagccugggcaa

SEQ ID NO: 1045170 - RNA, 22 nt, Human
gcccagcuaauuuuuguauuuu

SEQ ID NO: 1045171 - RNA, 19 nt, Human
gcccagggcuugcaguggc

SEQ ID NO: 1045172 - RNA, 21 nt, Human
gccuguaauccaggcacucgg

SEQ ID NO: 1045173 - RNA, 20 nt, Human
gcucgcugcagccuugaccu

SEQ ID NO: 1045174 - RNA, 20 nt, Human
gcuggaaccacaggcaucca

SEQ ID NO: 1045175 - RNA, 25 nt, Human
ggaaaaguuccucuuaaauuuuuaa

SEQ ID NO: 1045176 - RNA, 23 nt, Human
ggacaggccacaaacaaaguguc

SEQ ID NO: 1045177 - RNA, 23 nt, Human
ggaguuucgcucuugucacccag

SEQ ID NO: 1045178 - RNA, 22 nt, Human
ggaucauuugaggucaggaguu

SEQ ID NO: 1045179 - RNA, 18 nt, Human
ggcaacacagcgagacuu

SEQ ID NO: 1045180 - RNA, 24 nt, Human
ggcuggucucaaacuccugaccuc

SEQ ID NO: 1045181 - RNA, 23 nt, Human
gggcaguuuugagacccaaauga

SEQ ID NO: 1045182 - RNA, 22 nt, Human
gggcucaagugauucucgugcc

SEQ ID NO: 1045183 - RNA, 24 nt, Human
gggugcaguggcucaugccuguaa

SEQ ID NO: 1045184 - RNA, 22 nt, Human
ggguuucaccauguuggccagg

SEQ ID NO: 1045185 - RNA, 19 nt, Human
ggucaggaguuugagacca

SEQ ID NO: 1045186 - RNA, 21 nt, Human
gguggaucauuugaggucagg

SEQ ID NO: 1045187 - RNA, 23 nt, Human
gucagcuugugucacaaccucaa

SEQ ID NO: 1045188 - RNA, 24 nt, Human
gugauccaccuaccucagccuccc

SEQ ID NO: 1045189 - RNA, 24 nt, Human
gugaucugccugccucagccuccc

SEQ ID NO: 1045190 - RNA, 24 nt, Human
gugauucucgugccucagccuccc

SEQ ID NO: 1045191 - RNA, 19 nt, Human
guggggcacaaaaauugga

SEQ ID NO: 1045192 - RNA, 24 nt, Human
uaaaaaaugagaaaauccacagag

SEQ ID NO: 1045193 - RNA, 21 nt, Human
uaacaacagccaauaacagac

SEQ ID NO: 1045194 - RNA, 19 nt, Human
uaacaaguaggcacauuuc

SEQ ID NO: 1045195 - RNA, 21 nt, Human
uaaccaggucauaaggccaaa

SEQ ID NO: 1045196 - RNA, 19 nt, Human
uaacugcuguauucccuuu

SEQ ID NO: 1045197 - RNA, 21 nt, Human
uaaguaaugguauuuaagaga

SEQ ID NO: 1045198 - RNA, 24 nt, Human
uaauuuuuguauuuuuacuacaga

SEQ ID NO: 1045199 - RNA, 22 nt, Human
uacagacaggguuucaccaugu

SEQ ID NO: 1045200 - RNA, 18 nt, Human
uaccccagagcuggaggc

SEQ ID NO: 1045201 - RNA, 23 nt, Human
uaccccagagcuggaggcaacag

SEQ ID NO: 1045202 - RNA, 24 nt, Human
uaccccagagcuggaggcaacagc

SEQ ID NO: 1045203 - RNA, 27 nt, Human
uaccucagccucccgaauagcuggaac

SEQ ID NO: 1045204 - RNA, 24 nt, Human
uacgugcaugagccaccgcaccca

SEQ ID NO: 1045205 - RNA, 27 nt, Human
uacuugggaggcugauggggaagaaaa

SEQ ID NO: 1045206 - RNA, 22 nt, Human
uagaagaagcauaauacugggc

SEQ ID NO: 1045207 - RNA, 22 nt, Human
uagagaacucugaugcuccuga

SEQ ID NO: 1045208 - RNA, 22 nt, Human
uaggucuuuucaaacacuucug

SEQ ID NO: 1045209 - RNA, 23 nt, Human
uauggaaaaauaggagacaacua

SEQ ID NO: 1045210 - RNA, 22 nt, Human
uauuaacacuucuccauuauuu

SEQ ID NO: 1045211 - RNA, 22 nt, Human
ucaaacaaaacaaaacaaauca

SEQ ID NO: 1045212 - RNA, 25 nt, Human
ucacacaaccuuuuggccgguccuc

SEQ ID NO: 1045213 - RNA, 19 nt, Human
ucacaccauaaaaagaaca

SEQ ID NO: 1045214 - RNA, 18 nt, Human
ucacucaggcuggagugc

SEQ ID NO: 1045215 - RNA, 24 nt, Human
ucacucugucacucaggcuggagu

SEQ ID NO: 1045216 - RNA, 23 nt, Human
ucacugcaaccuccaccuccugg

SEQ ID NO: 1045217 - RNA, 24 nt, Human
ucacugcaaccuccaccuccuggg

SEQ ID NO: 1045218 - RNA, 25 nt, Human
ucacugcaaccuccaccuccugggc

SEQ ID NO: 1045219 - RNA, 27 nt, Human
ucacugcaaccuccaccuccugggcuc

SEQ ID NO: 1045220 - RNA, 18 nt, Human
ucacugcacucccuaaac

SEQ ID NO: 1045221 - RNA, 20 nt, Human
ucagaauucuaauaaugaug

SEQ ID NO: 1045222 - RNA, 18 nt, Human
ucagccucccaagcagcu

SEQ ID NO: 1045223 - RNA, 20 nt, Human
ucagccucccaagcagcugg

SEQ ID NO: 1045224 - RNA, 20 nt, Human
ucagccucccgaauagcugg

SEQ ID NO: 1045225 - RNA, 24 nt, Human
uccagccugggcaacacagcgaga

SEQ ID NO: 1045226 - RNA, 20 nt, Human
ucccaaauuguugggauuac

SEQ ID NO: 1045227 - RNA, 20 nt, Human
ucccgaauagcuggaaccac

SEQ ID NO: 1045228 - RNA, 21 nt, Human
uccugggcucaagugauucuc

SEQ ID NO: 1045229 - RNA, 24 nt, Human
uccugggcucaagugauucucgug

SEQ ID NO: 1045230 - RNA, 19 nt, Human
ucgcugcagccuugaccug

SEQ ID NO: 1045231 - RNA, 23 nt, Human
ucucacucugucacucaggcugg

SEQ ID NO: 1045232 - RNA, 24 nt, Human
ucucacucugucacucaggcugga

SEQ ID NO: 1045233 - RNA, 27 nt, Human
ucucuacuaaaaauacaaaaaaaaaaa

SEQ ID NO: 1045234 - RNA, 24 nt, Human
ucugcccccaacagagaguagaua

SEQ ID NO: 1045235 - RNA, 20 nt, Human
ucugccucuccucuacuuuu

SEQ ID NO: 1045236 - RNA, 21 nt, Human
ugaaacuaaccaacugaacuu

SEQ ID NO: 1045237 - RNA, 24 nt, Human
ugaaagacauucuucucaccagag

SEQ ID NO: 1045238 - RNA, 19 nt, Human
ugaacagaaggcccacugc

SEQ ID NO: 1045239 - RNA, 20 nt, Human
ugaacuccagagcugaauua

SEQ ID NO: 1045240 - RNA, 21 nt, Human
ugaauggaugcugaaaaaacc

SEQ ID NO: 1045241 - RNA, 24 nt, Human
ugaccaaccccagaauacagacac

SEQ ID NO: 1045242 - RNA, 18 nt, Human
ugaccucacgugaucugc

SEQ ID NO: 1045243 - RNA, 24 nt, Human
ugaccucacgugaucugccugccu

SEQ ID NO: 1045244 - RNA, 20 nt, Human
ugagacagggucucacucug

SEQ ID NO: 1045245 - RNA, 22 nt, Human
ugagacccaaaugaccaacccc

SEQ ID NO: 1045246 - RNA, 22 nt, Human
ugagccaagauugcgccauugc

SEQ ID NO: 1045247 - RNA, 18 nt, Human
ugaggucaggaguuugag

SEQ ID NO: 1045248 - RNA, 23 nt, Human
ugagguggguggaucauuugagg

SEQ ID NO: 1045249 - RNA, 24 nt, Human
ugagguggguggaucauuugaggu

SEQ ID NO: 1045250 - RNA, 18 nt, Human
ugaugaugaaacaaaaga

SEQ ID NO: 1045251 - RNA, 22 nt, Human
ugcagugacauaaucuuggcuc

SEQ ID NO: 1045252 - RNA, 23 nt, Human
ugcagugacauaaucuuggcuca

SEQ ID NO: 1045253 - RNA, 23 nt, Human
ugccagaggcccagggcuugcag

SEQ ID NO: 1045254 - RNA, 24 nt, Human
ugccucagccucccaaauuguugg

SEQ ID NO: 1045255 - RNA, 22 nt, Human
ugccucagccucccaagcagcu

SEQ ID NO: 1045256 - RNA, 24 nt, Human
ugccucagccucccaagcagcugg

SEQ ID NO: 1045257 - RNA, 22 nt, Human
ugccuguaauccaggcacucgg

SEQ ID NO: 1045258 - RNA, 23 nt, Human
ugccuguaauccaggcacucggg

SEQ ID NO: 1045259 - RNA, 24 nt, Human
uggaaaaauaggagacaacuagug

SEQ ID NO: 1045260 - RNA, 24 nt, Human
uggaaccacaggcauccaccacca

SEQ ID NO: 1045261 - RNA, 24 nt, Human
uggaacuacaggugcccgccaccg

SEQ ID NO: 1045262 - RNA, 21 nt, Human
uggagugcaauggugcgauca

SEQ ID NO: 1045263 - RNA, 24 nt, Human
uggagugcaauggugcgaucaugg

SEQ ID NO: 1045264 - RNA, 23 nt, Human
uggagugcagugacauaaucuug

SEQ ID NO: 1045265 - RNA, 24 nt, Human
uggagugcagugacauaaucuugg

SEQ ID NO: 1045266 - RNA, 23 nt, Human
uggaucauuugaggucaggaguu

SEQ ID NO: 1045267 - RNA, 24 nt, Human
uggaucauuugaggucaggaguuu

SEQ ID NO: 1045268 - RNA, 24 nt, Human
uggccaggcuggucucaaacuccu

SEQ ID NO: 1045269 - RNA, 24 nt, Human
uggccgggugcaguggcucaugcc

SEQ ID NO: 1045270 - RNA, 24 nt, Human
uggcucaugccuguaauccaggca

SEQ ID NO: 1045271 - RNA, 20 nt, Human
uggcugagaucuuaucugaa

SEQ ID NO: 1045272 - RNA, 22 nt, Human
ugggauuacgugcaugagccac

SEQ ID NO: 1045273 - RNA, 23 nt, Human
ugggauuacgugcaugagccacc

SEQ ID NO: 1045274 - RNA, 24 nt, Human
ugggauuacgugcaugagccaccg

SEQ ID NO: 1045275 - RNA, 18 nt, Human
ugggcucaagugauucuc

SEQ ID NO: 1045276 - RNA, 22 nt, Human
uggggaagaacugcuugaaccc

SEQ ID NO: 1045277 - RNA, 24 nt, Human
uggugcgaucauggcucgcugcag

SEQ ID NO: 1045278 - RNA, 24 nt, Human
uguaauccaggcacucggggagac

SEQ ID NO: 1045279 - RNA, 21 nt, Human
uguauacauauuaacacuucu

SEQ ID NO: 1045280 - RNA, 20 nt, Human
ugucacagagcuucagauca

SEQ ID NO: 1045281 - RNA, 20 nt, Human
ugucacagagcuucagaucc

SEQ ID NO: 1045282 - RNA, 22 nt, Human
ugucacucaggcuggagugcaa

SEQ ID NO: 1045283 - RNA, 21 nt, Human
ugucucaagacaaaaugacaa

SEQ ID NO: 1045284 - RNA, 20 nt, Human
uuagcugggagugguggugc

SEQ ID NO: 1045285 - RNA, 20 nt, Human
uuagcugggagugguggugc

SEQ ID NO: 1045286 - RNA, 24 nt, Human
uucgcucuugucacccaggaugga

SEQ ID NO: 1045287 - RNA, 21 nt, Human
uucgucucaaacaaaacaaaa

SEQ ID NO: 1045288 - RNA, 19 nt, Human
uucuuaaaccugggguauc

SEQ ID NO: 1045289 - RNA, 18 nt, Human
uugaacccaggagucaga

SEQ ID NO: 1045290 - RNA, 22 nt, Human
uugacccuuuguccguuuggca

SEQ ID NO: 1045291 - RNA, 22 nt, Human
uugagacagggucucacucugu

SEQ ID NO: 1045292 - RNA, 22 nt, Human
uugcagugagccaagauugcgc

SEQ ID NO: 1045293 - RNA, 23 nt, Human
uugcgccauugcacuccagccug

SEQ ID NO: 1045294 - RNA, 23 nt, Human
uugucacccaggauggagugcag

SEQ ID NO: 1045295 - RNA, 24 nt, Human
uuguccagucaucgcaagcaagua

SEQ ID NO: 1045296 - RNA, 18 nt, Human
uuguccguuuggcaucau

SEQ ID NO: 1045297 - RNA, 19 nt, Human
uuguugguuuguuuagaga

SEQ ID NO: 1045298 - RNA, 23 nt, Human
uuuauaagcuacaaagguuaacu

SEQ ID NO: 1045299 - RNA, 24 nt, Human
uuucaccauguuggccaggcuggu

SEQ ID NO: 1045300 - RNA, 23 nt, Human
uuugaggucaggaguuugagacc

SEQ ID NO: 1045301 - RNA, 20 nt, Human
uuuuuguauuuuuacuacag

SEQ ID NO: 1045302 - RNA, 23 nt, Human
uuuuuguauuuuuacuacagaca

SEQ ID NO: 1045303 - RNA, 22 nt, Human
agcaggaaggaaggggcccugg

SEQ ID NO: 1045304 - RNA, 25 nt, Human
aggguucacucccagaagguaaugc

SEQ ID NO: 1045305 - RNA, 21 nt, Human
auagagugggcccugcccacc

SEQ ID NO: 1045306 - RNA, 22 nt, Human
aucagccaagaaccagaaccaa

SEQ ID NO: 1045307 - RNA, 22 nt, Human
cagagugggcacugcuucaggu

SEQ ID NO: 1045308 - RNA, 20 nt, Human
caggaggagccagagugggc

SEQ ID NO: 1045309 - RNA, 22 nt, Human
caggccaccugaagaccaugag

SEQ ID NO: 1045310 - RNA, 22 nt, Human
caggucuaagccucucccacag

SEQ ID NO: 1045311 - RNA, 23 nt, Human
caugaucaggccaccugaagacc

SEQ ID NO: 1045312 - RNA, 20 nt, Human
ccaugagcaggaaggaaggg

SEQ ID NO: 1045313 - RNA, 22 nt, Human
cccagaagguaaugccuaacuc

SEQ ID NO: 1045314 - RNA, 22 nt, Human
cccagugaaaugcacauggucc

SEQ ID NO: 1045315 - RNA, 22 nt, Human
cccugcccaccccccaauacaa

SEQ ID NO: 1045316 - RNA, 18 nt, Human
cugcccaccccccaauac

SEQ ID NO: 1045317 - RNA, 18 nt, Human
gaaggaaggggcccuggc

SEQ ID NO: 1045318 - RNA, 24 nt, Human
gaccagcuggggaugcaaggagau

SEQ ID NO: 1045319 - RNA, 22 nt, Human
gagcaggaaggaaggggcccug

SEQ ID NO: 1045320 - RNA, 25 nt, Human
gaucagaccagcuggggaugcaagg

SEQ ID NO: 1045321 - RNA, 19 nt, Human
gccaugcuucucccagaaa

SEQ ID NO: 1045322 - RNA, 23 nt, Human
gcccugcccaccccccaauacaa

SEQ ID NO: 1045323 - RNA, 22 nt, Human
ggaaggaaggggcccuggcagg

SEQ ID NO: 1045324 - RNA, 22 nt, Human
ggagauguagaucccauggccc

SEQ ID NO: 1045325 - RNA, 19 nt, Human
ggguucacucccagaaggu

SEQ ID NO: 1045326 - RNA, 18 nt, Human
uaacauaacauagagugg

SEQ ID NO: 1045327 - RNA, 23 nt, Human
uaagccucucccacagggguucc

SEQ ID NO: 1045328 - RNA, 24 nt, Human
uagagugggcccugcccacccccc

SEQ ID NO: 1045329 - RNA, 22 nt, Human
uccaugaucaggccaccugaag

SEQ ID NO: 1045330 - RNA, 22 nt, Human
ucccagaaaggguguggcagcu

SEQ ID NO: 1045331 - RNA, 19 nt, Human
uggcagcugggccuggcag

SEQ ID NO: 1045332 - RNA, 22 nt, Human
uggcagggaucagaccagcugg

SEQ ID NO: 1045333 - RNA, 21 nt, Human
ugguuaggguggcaauagggg

SEQ ID NO: 1045334 - RNA, 19 nt, Human
uguggcagcugggccuggc

SEQ ID NO: 1045335 - RNA, 19 nt, Human
uguggcagcugggccuggc

SEQ ID NO: 1045336 - RNA, 18 nt, Human
uguggucauguuaagaua

SEQ ID NO: 1045337 - RNA, 23 nt, Human
uucaggucuaagccucucccaca

SEQ ID NO: 1045338 - RNA, 22 nt, Human
aaaagaauacugaacuguaagc

SEQ ID NO: 1045339 - RNA, 23 nt, Human
aaaauaaaacaaucuuuuacaaa

SEQ ID NO: 1045340 - RNA, 21 nt, Human
aaccuugcauaaucaguuggu

SEQ ID NO: 1045341 - RNA, 19 nt, Human
aacugucugcccuacugcc

SEQ ID NO: 1045342 - RNA, 24 nt, Human
aacugucugcccuacugccgaggu

SEQ ID NO: 1045343 - RNA, 19 nt, Human
aagagacccucgcccagcc

SEQ ID NO: 1045344 - RNA, 21 nt, Human
aagagacccucgcccagccca

SEQ ID NO: 1045345 - RNA, 25 nt, Human
accuuauaagaauaucaaagauuua

SEQ ID NO: 1045346 - RNA, 22 nt, Human
auggaaucaguaguagugcuga

SEQ ID NO: 1045347 - RNA, 19 nt, Human
caaaacggcauauaaggaa

SEQ ID NO: 1045348 - RNA, 19 nt, Human
cccuaaaaaaaaccuugca

SEQ ID NO: 1045349 - RNA, 26 nt, Human
ccgccgccucgagcgccagccgcucc

SEQ ID NO: 1045350 - RNA, 18 nt, Human
cuaaaaaaaaccuugcau

SEQ ID NO: 1045351 - RNA, 21 nt, Human
cucgagcgccagccgcuccuc

SEQ ID NO: 1045352 - RNA, 19 nt, Human
cuuuugaugguuuuuguuu

SEQ ID NO: 1045353 - RNA, 21 nt, Human
gagguaggugaccaauauuca

SEQ ID NO: 1045354 - RNA, 25 nt, Human
gguuuuuguuuuguuuuuccuuuca

SEQ ID NO: 1045355 - RNA, 21 nt, Human
uaauaggcucuaccuaagcuu

SEQ ID NO: 1045356 - RNA, 22 nt, Human
uauucaucaaaauaaaacaauc

SEQ ID NO: 1045357 - RNA, 23 nt, Human
ucaggaacuagcaaaguucuacu

SEQ ID NO: 1045358 - RNA, 23 nt, Human
ugaacuguaagcaucuguugcca

SEQ ID NO: 1045359 - RNA, 19 nt, Human
ugcacuucgucuauuggaa

SEQ ID NO: 1045360 - RNA, 23 nt, Human
ugguuucuuaaaccuguguccgu

SEQ ID NO: 1045361 - RNA, 24 nt, Human
uguacacacauauuguguugugug

SEQ ID NO: 1045362 - RNA, 26 nt, Human
uguacacacauauuguguugugugca

SEQ ID NO: 1045363 - RNA, 22 nt, Human
uguuuuuccuuucagucauuua

SEQ ID NO: 1045364 - RNA, 23 nt, Human
uuaaauaucacaaucuacauaaa

SEQ ID NO: 1045365 - RNA, 18 nt, Human
uuuuuuuuuuuuuuuuug

SEQ ID NO: 1045366 - RNA, 22 nt, Human
aacaaaguccuccacacucugg

SEQ ID NO: 1045367 - RNA, 25 nt, Human
cagugaugggccccucggggucacu

SEQ ID NO: 1045368 - RNA, 23 nt, Human
cgggaacaaaguccuccacacuc

SEQ ID NO: 1045369 - RNA, 19 nt, Human
cuggcucaaucucagcagg

SEQ ID NO: 1045370 - RNA, 20 nt, Human
cuggcucaaucucagcaggg

SEQ ID NO: 1045371 - RNA, 23 nt, Human
cuggggccucugcggcugggacu

SEQ ID NO: 1045372 - RNA, 22 nt, Human
cuguugcuggggccucugcggc

SEQ ID NO: 1045373 - RNA, 22 nt, Human
gaggaggccugcucacccuucc

SEQ ID NO: 1045374 - RNA, 18 nt, Human
gccucugcggcugggacu

SEQ ID NO: 1045375 - RNA, 21 nt, Human
gucggggucauccaugacgaa

SEQ ID NO: 1045376 - RNA, 18 nt, Human
ugcuggggccucugcggc

SEQ ID NO: 1045377 - RNA, 21 nt, Human
uggacuguugcuggggccucu

SEQ ID NO: 1045378 - RNA, 30 nt, Human
aaacaacagacauuuauuuauuucucccaa

SEQ ID NO: 1045379 - RNA, 21 nt, Human
aaagccccaccuccaaauacc

SEQ ID NO: 1045380 - RNA, 19 nt, Human
aagcauugaaggggugaag

SEQ ID NO: 1045381 - RNA, 18 nt, Human
agcauugaaggggugaag

SEQ ID NO: 1045382 - RNA, 21 nt, Human
agccccaccuccaaauaccau

SEQ ID NO: 1045383 - RNA, 19 nt, Human
aggcaggagggaggaggug

SEQ ID NO: 1045384 - RNA, 23 nt, Human
aggucagaaaaagaauggcguaa

SEQ ID NO: 1045385 - RNA, 19 nt, Human
aucugggugccagcauggc

SEQ ID NO: 1045386 - RNA, 18 nt, Human
auuuucagcauuucccuc

SEQ ID NO: 1045387 - RNA, 31 nt, Human
caaacaacagacauuuauuuauuucucccaa

SEQ ID NO: 1045388 - RNA, 20 nt, Human
caugggcagcugauuucuug

SEQ ID NO: 1045389 - RNA, 20 nt, Human
cauuugggccccauccucau

SEQ ID NO: 1045390 - RNA, 23 nt, Human
ccagcagguguacccaggggcca

SEQ ID NO: 1045391 - RNA, 20 nt, Human
cccaaaagccccaccuccaa

SEQ ID NO: 1045392 - RNA, 25 nt, Human
cccaaaagccccaccuccaaauacc

SEQ ID NO: 1045393 - RNA, 22 nt, Human
cccaggggccaagacacggaac

SEQ ID NO: 1045394 - RNA, 18 nt, Human
cccuccauccuuccuggg

SEQ ID NO: 1045395 - RNA, 19 nt, Human
ccggccgcggcgagaagga

SEQ ID NO: 1045396 - RNA, 24 nt, Human
ccucccaaaagccccaccuccaaa

SEQ ID NO: 1045397 - RNA, 19 nt, Human
ccucgaucugagaggcagg

SEQ ID NO: 1045398 - RNA, 21 nt, Human
ccuuccugggcuucugugcuc

SEQ ID NO: 1045399 - RNA, 20 nt, Human
cggcgagaaggaagcggcuc

SEQ ID NO: 1045400 - RNA, 19 nt, Human
cuaaacucugagaucagug

SEQ ID NO: 1045401 - RNA, 21 nt, Human
cuaaucaccucccaaaagccc

SEQ ID NO: 1045402 - RNA, 18 nt, Human
cucccaaaagccccaccu

SEQ ID NO: 1045403 - RNA, 24 nt, Human
cucccccaacacacaccucgaucu

SEQ ID NO: 1045404 - RNA, 19 nt, Human
cugguucggugcuggagag

SEQ ID NO: 1045405 - RNA, 18 nt, Human
cuguucaguucacagaug

SEQ ID NO: 1045406 - RNA, 23 nt, Human
gagaguaagaggcaggagggagg

SEQ ID NO: 1045407 - RNA, 24 nt, Human
gccccaccuccaaauaccaucaca

SEQ ID NO: 1045408 - RNA, 18 nt, Human
ggcuggguucuggugagg

SEQ ID NO: 1045409 - RNA, 24 nt, Human
gguucggugcuggagaguaagagg

SEQ ID NO: 1045410 - RNA, 20 nt, Human
gguucuggugagggccugcu

SEQ ID NO: 1045411 - RNA, 19 nt, Human
gugcuuuuccauuuucagc

SEQ ID NO: 1045412 - RNA, 21 nt, Human
guguacccaggggccaagaca

SEQ ID NO: 1045413 - RNA, 20 nt, Human
guucaguucacagauggugg

SEQ ID NO: 1045414 - RNA, 20 nt, Human
uaaaccuaaucaccucccaa

SEQ ID NO: 1045415 - RNA, 25 nt, Human
uaagaggcaggagggaggagguggc

SEQ ID NO: 1045416 - RNA, 21 nt, Human
ucccaaaagccccaccuccaa

SEQ ID NO: 1045417 - RNA, 22 nt, Human
ucccagcagguguacccagggg

SEQ ID NO: 1045418 - RNA, 20 nt, Human
ucccccaacacacaccucga

SEQ ID NO: 1045419 - RNA, 23 nt, Human
ucccccaacacacaccucgaucu

SEQ ID NO: 1045420 - RNA, 18 nt, Human
ucccuccauccuuccugg

SEQ ID NO: 1045421 - RNA, 21 nt, Human
ucccucucgucuuggagagag

SEQ ID NO: 1045422 - RNA, 18 nt, Human
uccugggcuucugugcuc

SEQ ID NO: 1045423 - RNA, 26 nt, Human
ucuaaaccuaaucaccucccaaaagc

SEQ ID NO: 1045424 - RNA, 21 nt, Human
ucucccaguucuggaggcugg

SEQ ID NO: 1045425 - RNA, 22 nt, Human
ucucccaguucuggaggcugga

SEQ ID NO: 1045426 - RNA, 24 nt, Human
ugagaucaguggucccagcaggug

SEQ ID NO: 1045427 - RNA, 22 nt, Human
ugagggccugcuucucgguuca

SEQ ID NO: 1045428 - RNA, 21 nt, Human
uggagagagcuucugguucgg

SEQ ID NO: 1045429 - RNA, 18 nt, Human
ugggggaacauaaacauu

SEQ ID NO: 1045430 - RNA, 24 nt, Human
uucagcauuucccucucgucuugg

SEQ ID NO: 1045431 - RNA, 19 nt, Human
uuccugggcuucugugcuc

SEQ ID NO: 1045432 - RNA, 24 nt, Human
aaccucuaccuccucccuagcccc

SEQ ID NO: 1045433 - RNA, 18 nt, Human
acaucaggagcaugcauu

SEQ ID NO: 1045434 - RNA, 20 nt, Human
accaccaccaccucacagca

SEQ ID NO: 1045435 - RNA, 23 nt, Human
accaccaccaccucacagcagcc

SEQ ID NO: 1045436 - RNA, 21 nt, Human
accacguccucuggacaucag

SEQ ID NO: 1045437 - RNA, 19 nt, Human
accuccucccuagccccac

SEQ ID NO: 1045438 - RNA, 23 nt, Human
accucuaccuccucccuagcccc

SEQ ID NO: 1045439 - RNA, 20 nt, Human
accucuaccuccucccuagg

SEQ ID NO: 1045440 - RNA, 20 nt, Human
acucccacaaauggccacug

SEQ ID NO: 1045441 - RNA, 20 nt, Human
acucccaccuccaaaccugu

SEQ ID NO: 1045442 - RNA, 21 nt, Human
agaaacagcgggaaaagucac

SEQ ID NO: 1045443 - RNA, 22 nt, Human
agaacacucaggcugcugcgag

SEQ ID NO: 1045444 - RNA, 24 nt, Human
agcccagguuuucccaacagagaa

SEQ ID NO: 1045445 - RNA, 21 nt, Human
aggcugagaaacagcgggaaa

SEQ ID NO: 1045446 - RNA, 21 nt, Human
caaaugacccacagagugacc

SEQ ID NO: 1045447 - RNA, 18 nt, Human
caaccgcugcagggaugu

SEQ ID NO: 1045448 - RNA, 22 nt, Human
caagucaaauggacgaaaguca

SEQ ID NO: 1045449 - RNA, 24 nt, Human
cacaugcugcuuccagcucagagc

SEQ ID NO: 1045450 - RNA, 28 nt, Human
caccaccaccaccaccucacagcagccu

SEQ ID NO: 1045451 - RNA, 25 nt, Human
caccaccaccaccucacagcagccu

SEQ ID NO: 1045452 - RNA, 25 nt, Human
caccaccaccucacagcagccuaga

SEQ ID NO: 1045453 - RNA, 19 nt, Human
caccaccucacagcagccu

SEQ ID NO: 1045454 - RNA, 21 nt, Human
cagagaauagagacagccaca

SEQ ID NO: 1045455 - RNA, 20 nt, Human
cagcaacagagagcccugug

SEQ ID NO: 1045456 - RNA, 22 nt, Human
cagcagcuggaagaugcaaugg

SEQ ID NO: 1045457 - RNA, 23 nt, Human
cagccacacucccaccuccaaac

SEQ ID NO: 1045458 - RNA, 24 nt, Human
cagccacacucccaccuccaaacc

SEQ ID NO: 1045459 - RNA, 22 nt, Human
cagcucagagcgggcugagagg

SEQ ID NO: 1045460 - RNA, 28 nt, Human
ccacaaauggccacugaauauugucagc

SEQ ID NO: 1045461 - RNA, 23 nt, Human
ccaccaccaccaccaccucacag

SEQ ID NO: 1045462 - RNA, 21 nt, Human
ccagaggcugagaaacagcgg

SEQ ID NO: 1045463 - RNA, 27 nt, Human
ccagcccagacagugaagacucugauc

SEQ ID NO: 1045464 - RNA, 23 nt, Human
ccuaaaucagcaacagagagccc

SEQ ID NO: 1045465 - RNA, 18 nt, Human
ccuccucccuagccccac

SEQ ID NO: 1045466 - RNA, 21 nt, Human
ccucuaccuccucccuagccc

SEQ ID NO: 1045467 - RNA, 21 nt, Human
ccugaacugccccuuagagag

SEQ ID NO: 1045468 - RNA, 22 nt, Human
ccuggaccagaaaggugacagc

SEQ ID NO: 1045469 - RNA, 23 nt, Human
ccugucuuuucuaccacguccuc

SEQ ID NO: 1045470 - RNA, 21 nt, Human
cucacagcagccuagagcauc

SEQ ID NO: 1045471 - RNA, 23 nt, Human
cuccaaaccugucuuuucuacca

SEQ ID NO: 1045472 - RNA, 18 nt, Human
cuggaccagaaaggugac

SEQ ID NO: 1045473 - RNA, 25 nt, Human
gaauccacaccgcaguaccagcaga

SEQ ID NO: 1045474 - RNA, 19 nt, Human
gagaauagagacagccaca

SEQ ID NO: 1045475 - RNA, 23 nt, Human
gaggacucucaguuucacagggu

SEQ ID NO: 1045476 - RNA, 22 nt, Human
gagugaccccuagugagaacac

SEQ ID NO: 1045477 - RNA, 18 nt, Human
gaucccagaggcugagaa

SEQ ID NO: 1045478 - RNA, 19 nt, Human
gcccagacagugaagacuc

SEQ ID NO: 1045479 - RNA, 22 nt, Human
gggugaagccaguuucuccacc

SEQ ID NO: 1045480 - RNA, 23 nt, Human
gugacagcaaccucuaccuccuc

SEQ ID NO: 1045481 - RNA, 19 nt, Human
ucacagcagccuagagcau

SEQ ID NO: 1045482 - RNA, 19 nt, Human
uccacaccgcaguaccagc

SEQ ID NO: 1045483 - RNA, 21 nt, Human
uccacaccgcaguaccagcag

SEQ ID NO: 1045484 - RNA, 19 nt, Human
uccaccaccaccaccaccu

SEQ ID NO: 1045485 - RNA, 20 nt, Human
uccaccaccaccaccaccuc

SEQ ID NO: 1045486 - RNA, 22 nt, Human
uccaccaccaccaccaccucac

SEQ ID NO: 1045487 - RNA, 18 nt, Human
ucccaacagagaauagag

SEQ ID NO: 1045488 - RNA, 19 nt, Human
ucccacaugcugcuuccag

SEQ ID NO: 1045489 - RNA, 24 nt, Human
ucccuagccccacuaugcaccacc

SEQ ID NO: 1045490 - RNA, 24 nt, Human
ugaacugccccuuagagaggcuga

SEQ ID NO: 1045491 - RNA, 19 nt, Human
ugacccacagagugacccc

SEQ ID NO: 1045492 - RNA, 20 nt, Human
ugacccacagagugaccccu

SEQ ID NO: 1045493 - RNA, 19 nt, Human
ugaccccuagugagaacac

SEQ ID NO: 1045494 - RNA, 19 nt, Human
ugagaacacucaggcugcu

SEQ ID NO: 1045495 - RNA, 21 nt, Human
ugagaacacucaggcugcugc

SEQ ID NO: 1045496 - RNA, 18 nt, Human
ugggaaagccucgugaag

SEQ ID NO: 1045497 - RNA, 19 nt, Human
ugggagccugaacugcccc

SEQ ID NO: 1045498 - RNA, 24 nt, Human
ugucuuuucuaccacguccucugg

SEQ ID NO: 1045499 - RNA, 20 nt, Human
uucacaggguggccaaccgc

SEQ ID NO: 1045500 - RNA, 19 nt, Human
uuucuccaccaccaccacc

SEQ ID NO: 1045501 - RNA, 19 nt, Human
aaaaucccuucugcaggcu

SEQ ID NO: 1045502 - RNA, 20 nt, Human
cagggggugggagaacacag

SEQ ID NO: 1045503 - RNA, 21 nt, Human
ccaccucggcccacugcgucc

SEQ ID NO: 1045504 - RNA, 19 nt, Human
cccugggccaggcugaggc

SEQ ID NO: 1045505 - RNA, 20 nt, Human
ccgaggcucagccuggugac

SEQ ID NO: 1045506 - RNA, 22 nt, Human
ccuggggcaggucccccucagg

SEQ ID NO: 1045507 - RNA, 21 nt, Human
cucagccuggugacccucuuc

SEQ ID NO: 1045508 - RNA, 19 nt, Human
cuuucugcucuggcugagg

SEQ ID NO: 1045509 - RNA, 19 nt, Human
gcagaguggggcuggcccc

SEQ ID NO: 1045510 - RNA, 21 nt, Human
gcagcuucagccuugcagggg

SEQ ID NO: 1045511 - RNA, 18 nt, Human
gcaggucccccucaggca

SEQ ID NO: 1045512 - RNA, 21 nt, Human
gcccugccuucgggcacagcc

SEQ ID NO: 1045513 - RNA, 22 nt, Human
gcucuggcugaggguccucugu

SEQ ID NO: 1045514 - RNA, 27 nt, Human
ggaaggcccugccuucgggcacagccc

SEQ ID NO: 1045515 - RNA, 22 nt, Human
ggcagcuucagccuugcagggg

SEQ ID NO: 1045516 - RNA, 18 nt, Human
gggggugggagaacacag

SEQ ID NO: 1045517 - RNA, 19 nt, Human
ggggugggagaacacagcu

SEQ ID NO: 1045518 - RNA, 24 nt, Human
ggguucuggccgaggcucagccug

SEQ ID NO: 1045519 - RNA, 23 nt, Human
uagacggguucuggccgaggcuc

SEQ ID NO: 1045520 - RNA, 19 nt, Human
ucccccucaggcaucuggg

SEQ ID NO: 1045521 - RNA, 19 nt, Human
ucugcaggcuuuggggugg

SEQ ID NO: 1045522 - RNA, 20 nt, Human
ucugcaggcuuuggggugga

SEQ ID NO: 1045523 - RNA, 21 nt, Human
ucugcaggcuuugggguggag

SEQ ID NO: 1045524 - RNA, 18 nt, Human
ucuggccgaggcucagcc

SEQ ID NO: 1045525 - RNA, 23 nt, Human
ucuggcugaggguccucuguaga

SEQ ID NO: 1045526 - RNA, 24 nt, Human
ugaaaagcugaaugguggcagcuu

SEQ ID NO: 1045527 - RNA, 23 nt, Human
ugcucuggcugaggguccucugu

SEQ ID NO: 1045528 - RNA, 20 nt, Human
uggagugucugcugcugaaa

SEQ ID NO: 1045529 - RNA, 19 nt, Human
ugggguggagugucugcug

SEQ ID NO: 1045530 - RNA, 22 nt, Human
ugguggcagcuucagccuugca

SEQ ID NO: 1045531 - RNA, 23 nt, Human
agggugcugggacccgggcaggg

SEQ ID NO: 1045532 - RNA, 18 nt, Human
cagcacaggguugggccu

SEQ ID NO: 1045533 - RNA, 21 nt, Human
caggugguccuagacagcagu

SEQ ID NO: 1045534 - RNA, 21 nt, Human
ccagggugcugggacccgggc

SEQ ID NO: 1045535 - RNA, 20 nt, Human
ccgccugggacagagacggg

SEQ ID NO: 1045536 - RNA, 18 nt, Human
ccuuuauuccugguuagg

SEQ ID NO: 1045537 - RNA, 19 nt, Human
gcuacuguggagaccaggc

SEQ ID NO: 1045538 - RNA, 20 nt, Human
ggugguccuagacagcaguu

SEQ ID NO: 1045539 - RNA, 18 nt, Human
gugguccuagacagcagu

SEQ ID NO: 1045540 - RNA, 19 nt, Human
uccagggugcugggacccg

SEQ ID NO: 1045541 - RNA, 18 nt, Human
uccuagacagcaguuucc

SEQ ID NO: 1045542 - RNA, 21 nt, Human
uccugcacugugccccauccc

SEQ ID NO: 1045543 - RNA, 21 nt, Human
ucucuucuugguguacauggc

SEQ ID NO: 1045544 - RNA, 24 nt, Human
ugaccagcacaggguugggccugg

SEQ ID NO: 1045545 - RNA, 20 nt, Human
ugggccccaagcagcuguga

SEQ ID NO: 1045546 - RNA, 25 nt, Human
ugggccccaagcagcugugacugcc

SEQ ID NO: 1045547 - RNA, 21 nt, Human
ugguguggccuaacuuuggcu

SEQ ID NO: 1045548 - RNA, 24 nt, Human
uguacauggcuguguccugcacug

SEQ ID NO: 1045549 - RNA, 20 nt, Human
uguggagaccaggcagcagu

SEQ ID NO: 1045550 - RNA, 18 nt, Human
ugagccuaugggccaagg

SEQ ID NO: 1045551 - RNA, 20 nt, Human
agacuuccgaaguccuucac

SEQ ID NO: 1045552 - RNA, 21 nt, Human
agccagacuuccgaaguccuu

SEQ ID NO: 1045553 - RNA, 19 nt, Human
uagccagacuuccgaaguc

SEQ ID NO: 1045554 - RNA, 19 nt, Human
acaaagcaaaacaaaacga

SEQ ID NO: 1045555 - RNA, 18 nt, Human
agccugagccugcggccc

SEQ ID NO: 1045556 - RNA, 18 nt, Human
agggccgcacagugaccu

SEQ ID NO: 1045557 - RNA, 22 nt, Human
auaccgcccucccggccagcca

SEQ ID NO: 1045558 - RNA, 22 nt, Human
caacaaagcaaaacaaaacgag

SEQ ID NO: 1045559 - RNA, 21 nt, Human
caacgcccguccacgggugcc

SEQ ID NO: 1045560 - RNA, 20 nt, Human
caccacgcagagccaacgcc

SEQ ID NO: 1045561 - RNA, 19 nt, Human
caccguaucgcugcugggc

SEQ ID NO: 1045562 - RNA, 18 nt, Human
cagccaccugcagcucuc

SEQ ID NO: 1045563 - RNA, 20 nt, Human
caggcccagccugagccugc

SEQ ID NO: 1045564 - RNA, 23 nt, Human
cagugcggucacuguggccaagc

SEQ ID NO: 1045565 - RNA, 26 nt, Human
cccaccacgcagagccaacgcccguc

SEQ ID NO: 1045566 - RNA, 24 nt, Human
cccagccugagccugcggcccgac

SEQ ID NO: 1045567 - RNA, 21 nt, Human
ccccgggaaccucccccuacc

SEQ ID NO: 1045568 - RNA, 18 nt, Human
ccccgggcucccaaucgu

SEQ ID NO: 1045569 - RNA, 21 nt, Human
ccccggggagagggagggcgg

SEQ ID NO: 1045570 - RNA, 23 nt, Human
cccgacccgggggcacggccacc

SEQ ID NO: 1045571 - RNA, 18 nt, Human
ccgcgucguggugacugc

SEQ ID NO: 1045572 - RNA, 21 nt, Human
ccuccaggcccagccugagcc

SEQ ID NO: 1045573 - RNA, 24 nt, Human
ccuuccgcgggcuuccccgggaac

SEQ ID NO: 1045574 - RNA, 19 nt, Human
cgccacuggccuccaggcc

SEQ ID NO: 1045575 - RNA, 25 nt, Human
cuagcugggucgaaaaccaccguau

SEQ ID NO: 1045576 - RNA, 23 nt, Human
cuccaggcccagccugagccugc

SEQ ID NO: 1045577 - RNA, 18 nt, Human
cucccggccagccaccug

SEQ ID NO: 1045578 - RNA, 20 nt, Human
cucucgcuccuccugcuagg

SEQ ID NO: 1045579 - RNA, 24 nt, Human
cucucucgcuccuccugcuaggag

SEQ ID NO: 1045580 - RNA, 20 nt, Human
cuggaugggguccaggaguu

SEQ ID NO: 1045581 - RNA, 20 nt, Human
cuguggccaagcggcgagac

SEQ ID NO: 1045582 - RNA, 20 nt, Human
gagccugcggcccgacccgg

SEQ ID NO: 1045583 - RNA, 22 nt, Human
gagcgugaggcuguguggcagc

SEQ ID NO: 1045584 - RNA, 20 nt, Human
gcagggccgcacagugaccu

SEQ ID NO: 1045585 - RNA, 22 nt, Human
gccaugggccccggggagaggg

SEQ ID NO: 1045586 - RNA, 18 nt, Human
gggcgguggggucugcgg

SEQ ID NO: 1045587 - RNA, 19 nt, Human
ggggagagggagggcggug

SEQ ID NO: 1045588 - RNA, 22 nt, Human
gggugcaggugugacuacugag

SEQ ID NO: 1045589 - RNA, 22 nt, Human
ggucagagauucgggugcaggu

SEQ ID NO: 1045590 - RNA, 21 nt, Human
gugaagcagauagcucuggug

SEQ ID NO: 1045591 - RNA, 21 nt, Human
gugcaugaauggaaagcucua

SEQ ID NO: 1045592 - RNA, 18 nt, Human
gugcgggcgcuggggucc

SEQ ID NO: 1045593 - RNA, 19 nt, Human
uaccggacgccagccgggg

SEQ ID NO: 1045594 - RNA, 21 nt, Human
uagcugaugaccuggaugggg

SEQ ID NO: 1045595 - RNA, 19 nt, Human
uccacgccucccacacacc

SEQ ID NO: 1045596 - RNA, 19 nt, Human
uccauagcgucgcugagug

SEQ ID NO: 1045597 - RNA, 18 nt, Human
ucccacacaccgcgcucu

SEQ ID NO: 1045598 - RNA, 18 nt, Human
ucccagccgcccaccacg

SEQ ID NO: 1045599 - RNA, 18 nt, Human
ucccaugacuccaaugcc

SEQ ID NO: 1045600 - RNA, 19 nt, Human
ucugcggcuuggaacgagc

SEQ ID NO: 1045601 - RNA, 18 nt, Human
ugaagugaagcagauagc

SEQ ID NO: 1045602 - RNA, 20 nt, Human
ugaagugaagcagauagcuc

SEQ ID NO: 1045603 - RNA, 23 nt, Human
ugcaacaaagcaaaacaaaacga

SEQ ID NO: 1045604 - RNA, 22 nt, Human
ugccccgggcucccaaucguac

SEQ ID NO: 1045605 - RNA, 19 nt, Human
uggaacgagccccuacaug

SEQ ID NO: 1045606 - RNA, 25 nt, Human
uggcaggccaggcaccucgccuucc

SEQ ID NO: 1045607 - RNA, 19 nt, Human
uggccuccaggcccagccu

SEQ ID NO: 1045608 - RNA, 19 nt, Human
uggggucugcggcuuggaa

SEQ ID NO: 1045609 - RNA, 18 nt, Human
uguggcagccuucuugcu

SEQ ID NO: 1045610 - RNA, 22 nt, Human
uucuugcuuguagcaauaggug

SEQ ID NO: 1045611 - RNA, 20 nt, Human
cagaauccugaaacccuggc

SEQ ID NO: 1045612 - RNA, 20 nt, Human
cagagccggacauccaccgc

SEQ ID NO: 1045613 - RNA, 23 nt, Human
caggggacagaauccugaaaccc

SEQ ID NO: 1045614 - RNA, 19 nt, Human
ccuggcucugggguccggg

SEQ ID NO: 1045615 - RNA, 20 nt, Human
cucaggggacagaauccuga

SEQ ID NO: 1045616 - RNA, 21 nt, Human
cuggcucugggguccggggca

SEQ ID NO: 1045617 - RNA, 24 nt, Human
gcucugggguccggggcaggggug

SEQ ID NO: 1045618 - RNA, 24 nt, Human
ucaggacagacggugaaacugagg

SEQ ID NO: 1045619 - RNA, 25 nt, Human
ugaaacugagguccagagccggaca

SEQ ID NO: 1045620 - RNA, 21 nt, Human
accauagcuuauuggaaaacc

SEQ ID NO: 1045621 - RNA, 21 nt, Human
gggcaagucuuccagaauggu

SEQ ID NO: 1045622 - RNA, 24 nt, Human
uauuggaaaacccagagccuucug

SEQ ID NO: 1045623 - RNA, 23 nt, Human
uggaaaacccagagccuucugga

SEQ ID NO: 1045624 - RNA, 22 nt, Human
uggaugggcaagucuuccagaa

SEQ ID NO: 1045625 - RNA, 20 nt, Human
uuccagaaugguauccccau

SEQ ID NO: 1045626 - RNA, 19 nt, Human
aaacaagaaacagacuugg

SEQ ID NO: 1045627 - RNA, 25 nt, Human
aacaagaaacagacuugguuucaaa

SEQ ID NO: 1045628 - RNA, 23 nt, Human
agagagaaaauacaaaacaagaa

SEQ ID NO: 1045629 - RNA, 20 nt, Human
caaaugcauaaccaggugcu

SEQ ID NO: 1045630 - RNA, 27 nt, Human
caacuuccagagagaaaauacaaaaca

SEQ ID NO: 1045631 - RNA, 19 nt, Human
caagaaacagacuugguuu

SEQ ID NO: 1045632 - RNA, 19 nt, Human
ccagagagaaaauacaaaa

SEQ ID NO: 1045633 - RNA, 19 nt, Human
ccccacccgcgccuccagc

SEQ ID NO: 1045634 - RNA, 24 nt, Human
gaccaccuccuuacaacuuccaga

SEQ ID NO: 1045635 - RNA, 18 nt, Human
gcgccuccagcuuuccuc

SEQ ID NO: 1045636 - RNA, 26 nt, Human
uccagagagaaaauacaaaacaagaa

SEQ ID NO: 1045637 - RNA, 27 nt, Human
uccagagagaaaauacaaaacaagaaa

SEQ ID NO: 1045638 - RNA, 19 nt, Human
uccccacccgcgccuccag

SEQ ID NO: 1045639 - RNA, 19 nt, Human
ugcauaaccaggugcugga

SEQ ID NO: 1045640 - RNA, 19 nt, Human
uuccccacccgcgccucca

SEQ ID NO: 1045641 - RNA, 26 nt, Human
aaaacccccaaaaacaggagacagag

SEQ ID NO: 1045642 - RNA, 21 nt, Human
aaagauauaucugucacccuc

SEQ ID NO: 1045643 - RNA, 20 nt, Human
aaagucucccuggguggggc

SEQ ID NO: 1045644 - RNA, 20 nt, Human
aacacagugaggcucugccu

SEQ ID NO: 1045645 - RNA, 19 nt, Human
aaccccagccucaugacca

SEQ ID NO: 1045646 - RNA, 23 nt, Human
aacccccaaaaacaggagacaga

SEQ ID NO: 1045647 - RNA, 21 nt, Human
aagaagccaauauacaggaua

SEQ ID NO: 1045648 - RNA, 20 nt, Human
aagcaagcggucagggaggc

SEQ ID NO: 1045649 - RNA, 18 nt, Human
aagcaugugguggagagg

SEQ ID NO: 1045650 - RNA, 23 nt, Human
aagcugcucauggguguggauga

SEQ ID NO: 1045651 - RNA, 21 nt, Human
aaggagcugaggggucagagg

SEQ ID NO: 1045652 - RNA, 18 nt, Human
aaggaucccuccgccccc

SEQ ID NO: 1045653 - RNA, 22 nt, Human
aauggguuccauucaauccagc

SEQ ID NO: 1045654 - RNA, 18 nt, Human
acacagcccacccugagc

SEQ ID NO: 1045655 - RNA, 24 nt, Human
acacagugcccuucaacgcagucc

SEQ ID NO: 1045656 - RNA, 24 nt, Human
accaaccagggagccaaaaggaug

SEQ ID NO: 1045657 - RNA, 19 nt, Human
acccacccaguccccucca

SEQ ID NO: 1045658 - RNA, 21 nt, Human
acccacccccucagaucccca

SEQ ID NO: 1045659 - RNA, 23 nt, Human
acccacccccucagauccccacc

SEQ ID NO: 1045660 - RNA, 20 nt, Human
accccuguccuaggaaaccc

SEQ ID NO: 1045661 - RNA, 22 nt, Human
acccugcuucucuccugccagc

SEQ ID NO: 1045662 - RNA, 21 nt, Human
acccuguaaccuuuagaacaa

SEQ ID NO: 1045663 - RNA, 20 nt, Human
acgaggccgggggacaggaa

SEQ ID NO: 1045664 - RNA, 22 nt, Human
acugcagcccaggcuuggccug

SEQ ID NO: 1045665 - RNA, 25 nt, Human
agaaaauucuaaaauaccaguguca

SEQ ID NO: 1045666 - RNA, 22 nt, Human
agaccagagucagaguaacuaa

SEQ ID NO: 1045667 - RNA, 23 nt, Human
agagaagggagggcagagaaagu

SEQ ID NO: 1045668 - RNA, 19 nt, Human
agagggcagcgcaggagag

SEQ ID NO: 1045669 - RNA, 22 nt, Human
agcaccccaagcuccaggccga

SEQ ID NO: 1045670 - RNA, 24 nt, Human
agccaaaagcaggcaacugccgga

SEQ ID NO: 1045671 - RNA, 22 nt, Human
agcggucagggaggccagugcc

SEQ ID NO: 1045672 - RNA, 18 nt, Human
agcuccuccucccaccuc

SEQ ID NO: 1045673 - RNA, 21 nt, Human
aggaaacggaaaaucuuuuua

SEQ ID NO: 1045674 - RNA, 22 nt, Human
aggaauaauucuuuggagcuca

SEQ ID NO: 1045675 - RNA, 19 nt, Human
aggagaauggggugaagug

SEQ ID NO: 1045676 - RNA, 21 nt, Human
aggaggaagggagggcauagc

SEQ ID NO: 1045677 - RNA, 19 nt, Human
aggcaaggcagagggaccc

SEQ ID NO: 1045678 - RNA, 18 nt, Human
aggcaggcaggcaggcag

SEQ ID NO: 1045679 - RNA, 18 nt, Human
aggcaggcaggcaggcag

SEQ ID NO: 1045680 - RNA, 22 nt, Human
aggcaggcaggcaggccggacc

SEQ ID NO: 1045681 - RNA, 22 nt, Human
aggcaggcaggccggacccagg

SEQ ID NO: 1045682 - RNA, 19 nt, Human
aggcaggccggacccagga

SEQ ID NO: 1045683 - RNA, 24 nt, Human
agggcccacugacauuaacugaaa

SEQ ID NO: 1045684 - RNA, 23 nt, Human
agggccuccagagaagggagggc

SEQ ID NO: 1045685 - RNA, 19 nt, Human
aggggucagaggagaggag

SEQ ID NO: 1045686 - RNA, 24 nt, Human
agggugagugaggagagagaaggg

SEQ ID NO: 1045687 - RNA, 18 nt, Human
agguauguuugaacccug

SEQ ID NO: 1045688 - RNA, 22 nt, Human
agucaaacccagagcccccucc

SEQ ID NO: 1045689 - RNA, 23 nt, Human
auaauaauaaagcaaagccugcu

SEQ ID NO: 1045690 - RNA, 18 nt, Human
auacaggauauaaagggc

SEQ ID NO: 1045691 - RNA, 21 nt, Human
auuacaucacacauagucacu

SEQ ID NO: 1045692 - RNA, 24 nt, Human
caaacccagagcccccuccuucug

SEQ ID NO: 1045693 - RNA, 25 nt, Human
caaagccugcucagcuggcuccaag

SEQ ID NO: 1045694 - RNA, 19 nt, Human
caacccucucccaacgcaa

SEQ ID NO: 1045695 - RNA, 19 nt, Human
caagaccaccaggcucgca

SEQ ID NO: 1045696 - RNA, 18 nt, Human
cacagcccacccugagcc

SEQ ID NO: 1045697 - RNA, 22 nt, Human
cacagugcccuucaacgcaguc

SEQ ID NO: 1045698 - RNA, 23 nt, Human
caccaagaccaccaggcucgcag

SEQ ID NO: 1045699 - RNA, 19 nt, Human
caccccaagcuccaggccg

SEQ ID NO: 1045700 - RNA, 19 nt, Human
cacccccucagauccccac

SEQ ID NO: 1045701 - RNA, 21 nt, Human
cacccccucagauccccaccc

SEQ ID NO: 1045702 - RNA, 22 nt, Human
cacccccucagauccccacccc

SEQ ID NO: 1045703 - RNA, 19 nt, Human
cacccccucuccucccacu

SEQ ID NO: 1045704 - RNA, 24 nt, Human
cacccccucuccucccacuccaag

SEQ ID NO: 1045705 - RNA, 30 nt, Human
cacccucccaccaccuuggggaacaacccc

SEQ ID NO: 1045706 - RNA, 23 nt, Human
caccgauaaccacaguaaccuuu

SEQ ID NO: 1045707 - RNA, 24 nt, Human
cacgacacgccggggcccugcacg

SEQ ID NO: 1045708 - RNA, 18 nt, Human
cacuagagggagcuccug

SEQ ID NO: 1045709 - RNA, 18 nt, Human
cacuccgaggggccuucc

SEQ ID NO: 1045710 - RNA, 19 nt, Human
cagaaaccacauuacacca

SEQ ID NO: 1045711 - RNA, 21 nt, Human
cagaaagaggauggcccucac

SEQ ID NO: 1045712 - RNA, 18 nt, Human
cagagcaccccaagcucc

SEQ ID NO: 1045713 - RNA, 20 nt, Human
cagcaaaagaaaacaaagga

SEQ ID NO: 1045714 - RNA, 21 nt, Human
cagcagcccacccugcuucuc

SEQ ID NO: 1045715 - RNA, 19 nt, Human
cagccagaagggacucuca

SEQ ID NO: 1045716 - RNA, 22 nt, Human
cagccagacugccacaggggac

SEQ ID NO: 1045717 - RNA, 20 nt, Human
cagcgagcguuggggucuuu

SEQ ID NO: 1045718 - RNA, 18 nt, Human
cagcuggcagacaacagc

SEQ ID NO: 1045719 - RNA, 18 nt, Human
caggaaccagcccaggag

SEQ ID NO: 1045720 - RNA, 22 nt, Human
caggaaccagcccaggaggcag

SEQ ID NO: 1045721 - RNA, 19 nt, Human
cagggcccuggggggaaca

SEQ ID NO: 1045722 - RNA, 24 nt, Human
caguuaacacugcaaaguccgcac

SEQ ID NO: 1045723 - RNA, 18 nt, Human
cauaguaguuuaaacaca

SEQ ID NO: 1045724 - RNA, 21 nt, Human
caugaccaaccucggccaaac

SEQ ID NO: 1045725 - RNA, 18 nt, Human
cauuuugcuaccuugacc

SEQ ID NO: 1045726 - RNA, 20 nt, Human
ccaacccucucccaacgcaa

SEQ ID NO: 1045727 - RNA, 21 nt, Human
ccacacagaucacccuaaccc

SEQ ID NO: 1045728 - RNA, 26 nt, Human
ccacccccucuccucccacuccaagc

SEQ ID NO: 1045729 - RNA, 24 nt, Human
ccaccugccccaaguccucacucc

SEQ ID NO: 1045730 - RNA, 22 nt, Human
ccacgauggauuuggcccuuca

SEQ ID NO: 1045731 - RNA, 18 nt, Human
ccaggccuagaaagcuca

SEQ ID NO: 1045732 - RNA, 19 nt, Human
ccaggccuagaaagcucac

SEQ ID NO: 1045733 - RNA, 21 nt, Human
ccagggggaagccaggagccc

SEQ ID NO: 1045734 - RNA, 18 nt, Human
ccauucaauccagcaaca

SEQ ID NO: 1045735 - RNA, 23 nt, Human
cccacgaaacucccauaccacaa

SEQ ID NO: 1045736 - RNA, 23 nt, Human
cccacgccgucggggugcaccca

SEQ ID NO: 1045737 - RNA, 27 nt, Human
cccagcacccugaucccuccccccagg

SEQ ID NO: 1045738 - RNA, 21 nt, Human
ccccaaguccucacucccaag

SEQ ID NO: 1045739 - RNA, 23 nt, Human
ccccaauccucuguuuguauaaa

SEQ ID NO: 1045740 - RNA, 22 nt, Human
ccccacccaccacauuucugaa

SEQ ID NO: 1045741 - RNA, 19 nt, Human
ccccacccccucuccuccc

SEQ ID NO: 1045742 - RNA, 21 nt, Human
ccccacccccucuccucccac

SEQ ID NO: 1045743 - RNA, 23 nt, Human
ccccacuccgaggggccuuccug

SEQ ID NO: 1045744 - RNA, 25 nt, Human
ccccagagcccagcuuguucccucc

SEQ ID NO: 1045745 - RNA, 21 nt, Human
cccccaccccacccccucucc

SEQ ID NO: 1045746 - RNA, 22 nt, Human
cccccaccccacccccucuccc

SEQ ID NO: 1045747 - RNA, 24 nt, Human
cccccagcacccugaucccucccc

SEQ ID NO: 1045748 - RNA, 25 nt, Human
cccccagcacccugaucccuccccc

SEQ ID NO: 1045749 - RNA, 21 nt, Human
cccccucuccucccacuccaa

SEQ ID NO: 1045750 - RNA, 23 nt, Human
cccgcaaaggcccaggcuccaag

SEQ ID NO: 1045751 - RNA, 19 nt, Human
cccuaggucaucugagcuc

SEQ ID NO: 1045752 - RNA, 20 nt, Human
cccuaggucaucugagcucu

SEQ ID NO: 1045753 - RNA, 24 nt, Human
cccucagauccccaccccaagacc

SEQ ID NO: 1045754 - RNA, 18 nt, Human
cccuccagacuccccacu

SEQ ID NO: 1045755 - RNA, 21 nt, Human
cccuccgcccccgcccugaac

SEQ ID NO: 1045756 - RNA, 19 nt, Human
cccucuccucccacuccaa

SEQ ID NO: 1045757 - RNA, 18 nt, Human
cccugaucccucccccca

SEQ ID NO: 1045758 - RNA, 21 nt, Human
ccgcaaaggcccaggcuccaa

SEQ ID NO: 1045759 - RNA, 18 nt, Human
ccgcccccgcccugaacc

SEQ ID NO: 1045760 - RNA, 26 nt, Human
ccgccgccgcccgugcgccgcaccug

SEQ ID NO: 1045761 - RNA, 19 nt, Human
ccggacccaggaaccagcc

SEQ ID NO: 1045762 - RNA, 24 nt, Human
ccggacccaggaaccagcccagga

SEQ ID NO: 1045763 - RNA, 25 nt, Human
ccggcccucagcuuagaguucugua

SEQ ID NO: 1045764 - RNA, 21 nt, Human
ccuaggaaacccccagcaccc

SEQ ID NO: 1045765 - RNA, 18 nt, Human
ccuccuucccuuccuucc

SEQ ID NO: 1045766 - RNA, 18 nt, Human
ccuccuucccuuccuucc

SEQ ID NO: 1045767 - RNA, 19 nt, Human
ccuuccuuccaccuuucuc

SEQ ID NO: 1045768 - RNA, 18 nt, Human
cgaaacucccauaccaca

SEQ ID NO: 1045769 - RNA, 20 nt, Human
cgagcuccuccucccaccuc

SEQ ID NO: 1045770 - RNA, 25 nt, Human
cgagcuccuccucccaccuccgcuu

SEQ ID NO: 1045771 - RNA, 22 nt, Human
cgccgccgccgcccgugcgccg

SEQ ID NO: 1045772 - RNA, 22 nt, Human
cggaucuccggcgugauggugu

SEQ ID NO: 1045773 - RNA, 24 nt, Human
cgggaaccccagccucaugaccaa

SEQ ID NO: 1045774 - RNA, 23 nt, Human
cuagaguacccuaguccucaaag

SEQ ID NO: 1045775 - RNA, 19 nt, Human
cucagaacuaacacacagc

SEQ ID NO: 1045776 - RNA, 20 nt, Human
cucccccaccccacccccuc

SEQ ID NO: 1045777 - RNA, 21 nt, Human
cuccgcccccgcccugaaccu

SEQ ID NO: 1045778 - RNA, 23 nt, Human
cuccuacccaccugccccaaguc

SEQ ID NO: 1045779 - RNA, 19 nt, Human
cuccugggacaauaaaaaa

SEQ ID NO: 1045780 - RNA, 21 nt, Human
cuccuuccuggggguuggcag

SEQ ID NO: 1045781 - RNA, 22 nt, Human
cucuccuacccaccugccccaa

SEQ ID NO: 1045782 - RNA, 18 nt, Human
cucuccucccacuccaag

SEQ ID NO: 1045783 - RNA, 25 nt, Human
cucugccuuccccucacagugccuu

SEQ ID NO: 1045784 - RNA, 21 nt, Human
cugcagcccacccacccccuc

SEQ ID NO: 1045785 - RNA, 21 nt, Human
cugcauuuguaauguggagaa

SEQ ID NO: 1045786 - RNA, 22 nt, Human
cugccucccaacccucucccaa

SEQ ID NO: 1045787 - RNA, 24 nt, Human
cugcugccucccaacccucuccca

SEQ ID NO: 1045788 - RNA, 20 nt, Human
cuuaaaggccacggaccccu

SEQ ID NO: 1045789 - RNA, 22 nt, Human
cuuccaaaaccauugucccucc

SEQ ID NO: 1045790 - RNA, 23 nt, Human
cuuccuggccccaugaggagagg

SEQ ID NO: 1045791 - RNA, 19 nt, Human
cuuccuggggguuggcaga

SEQ ID NO: 1045792 - RNA, 24 nt, Human
cuuggcgagcuccuccucccaccu

SEQ ID NO: 1045793 - RNA, 21 nt, Human
cuuugccucauuucuuugagg

SEQ ID NO: 1045794 - RNA, 22 nt, Human
gaacauagcaaggacugcagcc

SEQ ID NO: 1045795 - RNA, 18 nt, Human
gaagugggaccuacacuc

SEQ ID NO: 1045796 - RNA, 21 nt, Human
gaccacuagagggagcuccug

SEQ ID NO: 1045797 - RNA, 18 nt, Human
gagagguccugccuucca

SEQ ID NO: 1045798 - RNA, 20 nt, Human
gaggagcagaaagaggaugg

SEQ ID NO: 1045799 - RNA, 26 nt, Human
gaggcaggcaggcaggcaggcaggcc

SEQ ID NO: 1045800 - RNA, 20 nt, Human
gagggacccaaguucuaguc

SEQ ID NO: 1045801 - RNA, 20 nt, Human
gaggggucagaggagaggag

SEQ ID NO: 1045802 - RNA, 23 nt, Human
gagugugugugugugugugugug

SEQ ID NO: 1045803 - RNA, 20 nt, Human
gcaggagagcccaucugaga

SEQ ID NO: 1045804 - RNA, 18 nt, Human
gccaaucagaggagcagg

SEQ ID NO: 1045805 - RNA, 18 nt, Human
gccagcagcccacccugc

SEQ ID NO: 1045806 - RNA, 23 nt, Human
gccuugucccuucccccacccac

SEQ ID NO: 1045807 - RNA, 21 nt, Human
gcggguagaagggagcagaga

SEQ ID NO: 1045808 - RNA, 20 nt, Human
gcucagcuggcuccaagcug

SEQ ID NO: 1045809 - RNA, 19 nt, Human
gcuccuccucccaccuccg

SEQ ID NO: 1045810 - RNA, 22 nt, Human
gcuccuuccuggggguuggcag

SEQ ID NO: 1045811 - RNA, 21 nt, Human
ggaaaaucuuuuuagcagcug

SEQ ID NO: 1045812 - RNA, 19 nt, Human
ggcccaucacacucuggcu

SEQ ID NO: 1045813 - RNA, 24 nt, Human
ggcccucacuccagcuccugcacu

SEQ ID NO: 1045814 - RNA, 18 nt, Human
gggaaacagaaaagagag

SEQ ID NO: 1045815 - RNA, 20 nt, Human
gggaagggucuuggugaggg

SEQ ID NO: 1045816 - RNA, 19 nt, Human
gggauggagacggggcacc

SEQ ID NO: 1045817 - RNA, 20 nt, Human
gggcugggcuaugagcaucu

SEQ ID NO: 1045818 - RNA, 18 nt, Human
ggggaugcuggcucagau

SEQ ID NO: 1045819 - RNA, 24 nt, Human
gggucuuucuuggcaagcuguggg

SEQ ID NO: 1045820 - RNA, 19 nt, Human
ggucuuucuuggcaagcug

SEQ ID NO: 1045821 - RNA, 18 nt, Human
gucacccucccaccaccu

SEQ ID NO: 1045822 - RNA, 18 nt, Human
guggaugaccaaaaguga

SEQ ID NO: 1045823 - RNA, 18 nt, Human
guggaugaccaaaaguga

SEQ ID NO: 1045824 - RNA, 20 nt, Human
gugugugugugugugugugu

SEQ ID NO: 1045825 - RNA, 24 nt, Human
uaaaaaauuaaaauuggcaacaga

SEQ ID NO: 1045826 - RNA, 18 nt, Human
uaaaauuggcaacagacc

SEQ ID NO: 1045827 - RNA, 18 nt, Human
uaacaagagaugcugacu

SEQ ID NO: 1045828 - RNA, 23 nt, Human
uaagacauuucacuuuauuuaaa

SEQ ID NO: 1045829 - RNA, 19 nt, Human
uacaacaguacaguaaaca

SEQ ID NO: 1045830 - RNA, 20 nt, Human
uaccacaacugccuacccua

SEQ ID NO: 1045831 - RNA, 19 nt, Human
uaccacauuguccaaugcc

SEQ ID NO: 1045832 - RNA, 21 nt, Human
uaccacauuguccaaugccuc

SEQ ID NO: 1045833 - RNA, 20 nt, Human
uacccaggccuagaaagcuc

SEQ ID NO: 1045834 - RNA, 21 nt, Human
uacccuaguccucaaagacaa

SEQ ID NO: 1045835 - RNA, 24 nt, Human
uacucgucgcgcucgcgcuucacc

SEQ ID NO: 1045836 - RNA, 18 nt, Human
uagaaagcucacagaggc

SEQ ID NO: 1045837 - RNA, 21 nt, Human
uagaugcaaaaacauccacaa

SEQ ID NO: 1045838 - RNA, 22 nt, Human
uaggaaacccccagcacccuga

SEQ ID NO: 1045839 - RNA, 23 nt, Human
uauaaaaacaccugcuaggaaua

SEQ ID NO: 1045840 - RNA, 21 nt, Human
uauaaaacccccaaaaacagg

SEQ ID NO: 1045841 - RNA, 21 nt, Human
ucaaagacaaaugaccuaugu

SEQ ID NO: 1045842 - RNA, 20 nt, Human
ucaacaacaauaacaacaag

SEQ ID NO: 1045843 - RNA, 19 nt, Human
ucacacucuggcuuucccu

SEQ ID NO: 1045844 - RNA, 21 nt, Human
ucacagaggcaagcggcuccu

SEQ ID NO: 1045845 - RNA, 24 nt, Human
ucacagaggcaagcggcuccuucc

SEQ ID NO: 1045846 - RNA, 19 nt, Human
ucagggaggccagugccuu

SEQ ID NO: 1045847 - RNA, 20 nt, Human
uccaaaaccauugucccucc

SEQ ID NO: 1045848 - RNA, 18 nt, Human
uccaagcugagauuugga

SEQ ID NO: 1045849 - RNA, 26 nt, Human
uccacaaugauauaaggcaagcugcu

SEQ ID NO: 1045850 - RNA, 22 nt, Human
uccacgccgccgccgcccgugc

SEQ ID NO: 1045851 - RNA, 23 nt, Human
uccacgccgccgccgcccgugcg

SEQ ID NO: 1045852 - RNA, 21 nt, Human
uccacuucugcuccagcugcc

SEQ ID NO: 1045853 - RNA, 22 nt, Human
uccagacuccccacuccaggag

SEQ ID NO: 1045854 - RNA, 21 nt, Human
uccagggggaagccaggagcc

SEQ ID NO: 1045855 - RNA, 19 nt, Human
uccaugaguauaaaucccc

SEQ ID NO: 1045856 - RNA, 20 nt, Human
uccccagagcccagcuuguu

SEQ ID NO: 1045857 - RNA, 19 nt, Human
ucccuagaguacccuaguc

SEQ ID NO: 1045858 - RNA, 21 nt, Human
uccuccuucccuuccuucccc

SEQ ID NO: 1045859 - RNA, 21 nt, Human
uccuggccccaugaggagagg

SEQ ID NO: 1045860 - RNA, 19 nt, Human
ucgaucugcacgcccacgc

SEQ ID NO: 1045861 - RNA, 18 nt, Human
ucgcgcucgcgcuucacc

SEQ ID NO: 1045862 - RNA, 22 nt, Human
ucuccacgccgccgccgcccgu

SEQ ID NO: 1045863 - RNA, 18 nt, Human
ucucccccaccccacccc

SEQ ID NO: 1045864 - RNA, 19 nt, Human
ucucccccaccccaccccc

SEQ ID NO: 1045865 - RNA, 22 nt, Human
ucucuuucuggcuccugcaguu

SEQ ID NO: 1045866 - RNA, 18 nt, Human
ugaggagagagaagggcc

SEQ ID NO: 1045867 - RNA, 20 nt, Human
ugagggauuugcucagaacu

SEQ ID NO: 1045868 - RNA, 20 nt, Human
ugaggggucagaggagagga

SEQ ID NO: 1045869 - RNA, 21 nt, Human
ugaggggucagaggagaggag

SEQ ID NO: 1045870 - RNA, 21 nt, Human
ugagguccaagcccaacuggc

SEQ ID NO: 1045871 - RNA, 19 nt, Human
ugcagcccacccacccccu

SEQ ID NO: 1045872 - RNA, 22 nt, Human
ugccacaggggacccgugggag

SEQ ID NO: 1045873 - RNA, 23 nt, Human
ugcccacgaaacucccauaccac

SEQ ID NO: 1045874 - RNA, 20 nt, Human
ugccccagcgagcguugggg

SEQ ID NO: 1045875 - RNA, 24 nt, Human
ugccuacccuagauuaaaaaaccc

SEQ ID NO: 1045876 - RNA, 23 nt, Human
ugccuuacagucuuaagucuaaa

SEQ ID NO: 1045877 - RNA, 20 nt, Human
ugccuugcgggaaccccagc

SEQ ID NO: 1045878 - RNA, 20 nt, Human
ugccuugucccuucaacuuu

SEQ ID NO: 1045879 - RNA, 20 nt, Human
uggagaggcaggcaggcagg

SEQ ID NO: 1045880 - RNA, 21 nt, Human
uggcaagcugugggcucaugg

SEQ ID NO: 1045881 - RNA, 20 nt, Human
uggcagagcaccccaagcuc

SEQ ID NO: 1045882 - RNA, 22 nt, Human
uggcgagcuccuccucccaccu

SEQ ID NO: 1045883 - RNA, 21 nt, Human
uggcucagaucaauaccccga

SEQ ID NO: 1045884 - RNA, 20 nt, Human
uggcucagcuuaagggagaa

SEQ ID NO: 1045885 - RNA, 25 nt, Human
uggcuccugcaguuuucaaacuccc

SEQ ID NO: 1045886 - RNA, 23 nt, Human
uggcuggcgagggagggaagaac

SEQ ID NO: 1045887 - RNA, 19 nt, Human
uggcuucgaaccccacucc

SEQ ID NO: 1045888 - RNA, 24 nt, Human
ugggcuggcucaggaggaagggag

SEQ ID NO: 1045889 - RNA, 22 nt, Human
uggggaccacaaucccagucaa

SEQ ID NO: 1045890 - RNA, 25 nt, Human
uggguguggaugaccaaaagugagg

SEQ ID NO: 1045891 - RNA, 20 nt, Human
uggguuggaaauggaucucg

SEQ ID NO: 1045892 - RNA, 22 nt, Human
uggguuggaaauggaucucggc

SEQ ID NO: 1045893 - RNA, 21 nt, Human
uggugaggggacaagcagggc

SEQ ID NO: 1045894 - RNA, 22 nt, Human
ugguguggcuucgaaccccacu

SEQ ID NO: 1045895 - RNA, 24 nt, Human
uguauacaaggaggaaaguaaaaa

SEQ ID NO: 1045896 - RNA, 21 nt, Human
ugucaaagggaacuguuuggc

SEQ ID NO: 1045897 - RNA, 21 nt, Human
ugucaauaugacacugggcuu

SEQ ID NO: 1045898 - RNA, 21 nt, Human
ugucgaucugcacgcccacgc

SEQ ID NO: 1045899 - RNA, 22 nt, Human
ugugucgaggagcagaaagagg

SEQ ID NO: 1045900 - RNA, 18 nt, Human
ugugugugugugugugug

SEQ ID NO: 1045901 - RNA, 18 nt, Human
ugugugugugugugugug

SEQ ID NO: 1045902 - RNA, 18 nt, Human
ugugugugugugugugug

SEQ ID NO: 1045903 - RNA, 18 nt, Human
ugugugugugugugugug

SEQ ID NO: 1045904 - RNA, 18 nt, Human
ugugugugugugugugug

SEQ ID NO: 1045905 - RNA, 18 nt, Human
ugugugugugugugugug

SEQ ID NO: 1045906 - RNA, 18 nt, Human
ugugugugugugugugug

SEQ ID NO: 1045907 - RNA, 21 nt, Human
ugugugugugugugugugugu

SEQ ID NO: 1045908 - RNA, 21 nt, Human
ugugugugugugugugugugu

SEQ ID NO: 1045909 - RNA, 21 nt, Human
ugugugugugugugugugugu

SEQ ID NO: 1045910 - RNA, 21 nt, Human
ugugugugugugugugugugu

SEQ ID NO: 1045911 - RNA, 21 nt, Human
ugugugugugugugugugugu

SEQ ID NO: 1045912 - RNA, 21 nt, Human
ugugugugugugugugugugu

SEQ ID NO: 1045913 - RNA, 21 nt, Human
ugugugugugugugugugugu

SEQ ID NO: 1045914 - RNA, 21 nt, Human
ugugugugugugugugugugu

SEQ ID NO: 1045915 - RNA, 21 nt, Human
ugugugugugugugugugugu

SEQ ID NO: 1045916 - RNA, 21 nt, Human
ugugugugugugugugugugu

SEQ ID NO: 1045917 - RNA, 21 nt, Human
ugugugugugugugugugugu

SEQ ID NO: 1045918 - RNA, 22 nt, Human
ugugugugugugugugugugua

SEQ ID NO: 1045919 - RNA, 22 nt, Human
ugugugugugugugugugugug

SEQ ID NO: 1045920 - RNA, 22 nt, Human
ugugugugugugugugugugug

SEQ ID NO: 1045921 - RNA, 22 nt, Human
ugugugugugugugugugugug

SEQ ID NO: 1045922 - RNA, 22 nt, Human
ugugugugugugugugugugug

SEQ ID NO: 1045923 - RNA, 22 nt, Human
ugugugugugugugugugugug

SEQ ID NO: 1045924 - RNA, 22 nt, Human
uguuguuuguuuuguuuuuugc

SEQ ID NO: 1045925 - RNA, 18 nt, Human
uguuuuccugcccucgag

SEQ ID NO: 1045926 - RNA, 18 nt, Human
uguuuuguuuuuugcaua

SEQ ID NO: 1045927 - RNA, 18 nt, Human
uuaaaauguguccuccuu

SEQ ID NO: 1045928 - RNA, 18 nt, Human
uucaacuuugccacucga

SEQ ID NO: 1045929 - RNA, 19 nt, Human
uucaagucuugggggaugc

SEQ ID NO: 1045930 - RNA, 21 nt, Human
uucauagaaaauucccuucca

SEQ ID NO: 1045931 - RNA, 22 nt, Human
uucauagaaaauucccuuccag

SEQ ID NO: 1045932 - RNA, 19 nt, Human
uuccacgcugcccacgaaa

SEQ ID NO: 1045933 - RNA, 22 nt, Human
uuccacgcugcccacgaaacuc

SEQ ID NO: 1045934 - RNA, 19 nt, Human
uucucuccugccagcagcc

SEQ ID NO: 1045935 - RNA, 19 nt, Human
uucucuguucggagucuca

SEQ ID NO: 1045936 - RNA, 20 nt, Human
uucuuuggagcucaaagugg

SEQ ID NO: 1045937 - RNA, 22 nt, Human
uugggagggaagggucuuggug

SEQ ID NO: 1045938 - RNA, 20 nt, Human
uugguuaaaauaaaaauuca

SEQ ID NO: 1045939 - RNA, 27 nt, Human
uuguucccucccuaaugcgccuugucc

SEQ ID NO: 1045940 - RNA, 21 nt, Human
uuucuuggcaagcugugggcu

SEQ ID NO: 1045941 - RNA, 20 nt, Human
uuugccacucgaucccccca

SEQ ID NO: 1045942 - RNA, 22 nt, Human
uuuguauaaaacccccaaaaac

SEQ ID NO: 1045943 - RNA, 25 nt, Human
aaaauuccgcccacaccccgugccc

SEQ ID NO: 1045944 - RNA, 23 nt, Human
aaacaacguaaaggaacuacuga

SEQ ID NO: 1045945 - RNA, 21 nt, Human
aaacagaaaaccgaagcccug

SEQ ID NO: 1045946 - RNA, 22 nt, Human
aagcccgcgagccggcgcccag

SEQ ID NO: 1045947 - RNA, 18 nt, Human
acagcuucuuccaagugc

SEQ ID NO: 1045948 - RNA, 19 nt, Human
acuucccagcucccagaga

SEQ ID NO: 1045949 - RNA, 19 nt, Human
agccggaccgccaaagccc

SEQ ID NO: 1045950 - RNA, 23 nt, Human
agcucaagacggcaccgcagcag

SEQ ID NO: 1045951 - RNA, 24 nt, Human
aggaacuacugagucuggacagaa

SEQ ID NO: 1045952 - RNA, 19 nt, Human
aggcuuaccagcgcagcgg

SEQ ID NO: 1045953 - RNA, 23 nt, Human
augaaacaaacagaaaaccgaag

SEQ ID NO: 1045954 - RNA, 20 nt, Human
caaaacacaggcuuaccagc

SEQ ID NO: 1045955 - RNA, 23 nt, Human
caaaacacaggcuuaccagcgca

SEQ ID NO: 1045956 - RNA, 20 nt, Human
caaagcccgcgagccggcgc

SEQ ID NO: 1045957 - RNA, 18 nt, Human
caaaggccagccgcgcuc

SEQ ID NO: 1045958 - RNA, 18 nt, Human
caaauaaaugaccgagaa

SEQ ID NO: 1045959 - RNA, 22 nt, Human
caccccgugcccccgggaauuu

SEQ ID NO: 1045960 - RNA, 20 nt, Human
caggauauggggguuaccac

SEQ ID NO: 1045961 - RNA, 19 nt, Human
ccagugcggauaggccaau

SEQ ID NO: 1045962 - RNA, 21 nt, Human
ccccccgccacgcagggcccc

SEQ ID NO: 1045963 - RNA, 22 nt, Human
cccccgccacgcagggccccgg

SEQ ID NO: 1045964 - RNA, 21 nt, Human
ccccuagugaccccuggccuc

SEQ ID NO: 1045965 - RNA, 20 nt, Human
cccuucuccccucuuaauuc

SEQ ID NO: 1045966 - RNA, 21 nt, Human
cccuucuccccucuuaauucu

SEQ ID NO: 1045967 - RNA, 19 nt, Human
ccgcccacaccccgugccc

SEQ ID NO: 1045968 - RNA, 26 nt, Human
ccgcccacaccccgugcccccgggaa

SEQ ID NO: 1045969 - RNA, 21 nt, Human
ccggcccccccgccacgcagg

SEQ ID NO: 1045970 - RNA, 20 nt, Human
ccgucucuccugccccggcc

SEQ ID NO: 1045971 - RNA, 19 nt, Human
ccuccugucacgauuuccu

SEQ ID NO: 1045972 - RNA, 18 nt, Human
ccucgugcccgacgcccc

SEQ ID NO: 1045973 - RNA, 20 nt, Human
cgaaaacaacguaaaggaac

SEQ ID NO: 1045974 - RNA, 24 nt, Human
cgccacgcagggccccggucacgc

SEQ ID NO: 1045975 - RNA, 22 nt, Human
cggaggcccacguucuuccugu

SEQ ID NO: 1045976 - RNA, 21 nt, Human
cucaggaccgcgagcccugag

SEQ ID NO: 1045977 - RNA, 21 nt, Human
cuccggccgaaccgccacuuc

SEQ ID NO: 1045978 - RNA, 24 nt, Human
cugcaagacccugccucacuuucc

SEQ ID NO: 1045979 - RNA, 23 nt, Human
cuuccccgcucuaaugccggagg

SEQ ID NO: 1045980 - RNA, 23 nt, Human
cuucuaagaggaccgagugccuu

SEQ ID NO: 1045981 - RNA, 21 nt, Human
gaaaacaacguaaaggaaccg

SEQ ID NO: 1045982 - RNA, 21 nt, Human
gacccugccucacuuucccac

SEQ ID NO: 1045983 - RNA, 21 nt, Human
gagaagguguuaucuaagacc

SEQ ID NO: 1045984 - RNA, 24 nt, Human
gagcuucauuugcccaacggaggc

SEQ ID NO: 1045985 - RNA, 19 nt, Human
gccgggugaggccgguuug

SEQ ID NO: 1045986 - RNA, 18 nt, Human
gcgaaccaaaacacaggc

SEQ ID NO: 1045987 - RNA, 23 nt, Human
gcucaggaccgcgagcccugagc

SEQ ID NO: 1045988 - RNA, 22 nt, Human
gcugcagugaaugcuuuuaacc

SEQ ID NO: 1045989 - RNA, 18 nt, Human
ggaggagcacggagggca

SEQ ID NO: 1045990 - RNA, 24 nt, Human
ggccguguguagagugggcucugc

SEQ ID NO: 1045991 - RNA, 23 nt, Human
ggucacgcgcggggggagccgga

SEQ ID NO: 1045992 - RNA, 24 nt, Human
uacgauggaaccuccggccgaacc

SEQ ID NO: 1045993 - RNA, 18 nt, Human
uagugaaucuccuucugu

SEQ ID NO: 1045994 - RNA, 19 nt, Human
uaucuggccguguguagag

SEQ ID NO: 1045995 - RNA, 25 nt, Human
uauuccauuuccccuucuccccucu

SEQ ID NO: 1045996 - RNA, 18 nt, Human
ucacgcgcggggggagcc

SEQ ID NO: 1045997 - RNA, 22 nt, Human
uccagacauaccaugcagcuuc

SEQ ID NO: 1045998 - RNA, 24 nt, Human
ucccagagacuguagagaucaccu

SEQ ID NO: 1045999 - RNA, 21 nt, Human
uccgcaaaggccagccgcgcu

SEQ ID NO: 1046000 - RNA, 21 nt, Human
uccgcagaaccccggcgaggc

SEQ ID NO: 1046001 - RNA, 24 nt, Human
uccgcagaaccccggcgaggccga

SEQ ID NO: 1046002 - RNA, 24 nt, Human
ucgauaaagcccagauucacaaaa

SEQ ID NO: 1046003 - RNA, 21 nt, Human
ucggcaaagcucaagacggca

SEQ ID NO: 1046004 - RNA, 22 nt, Human
ucuaagaccucuacagccauuu

SEQ ID NO: 1046005 - RNA, 24 nt, Human
ucuacugucuucccaaggaucuga

SEQ ID NO: 1046006 - RNA, 20 nt, Human
ucugcaagacccugccucac

SEQ ID NO: 1046007 - RNA, 26 nt, Human
ucuguggccuccugucacgauuuccu

SEQ ID NO: 1046008 - RNA, 18 nt, Human
ugaaacaaacagaaaacc

SEQ ID NO: 1046009 - RNA, 25 nt, Human
ugaaacaaacagaaaaccgaagccc

SEQ ID NO: 1046010 - RNA, 20 nt, Human
ugaccccuggccucgugccc

SEQ ID NO: 1046011 - RNA, 22 nt, Human
ugagcgucccccuagugacccc

SEQ ID NO: 1046012 - RNA, 27 nt, Human
ugcccgacgccccgucucuccugcccc

SEQ ID NO: 1046013 - RNA, 18 nt, Human
ugccggaggagcacggag

SEQ ID NO: 1046014 - RNA, 23 nt, Human
ugcuuuuaaccugucaacuguga

SEQ ID NO: 1046015 - RNA, 23 nt, Human
uggacauggacagggaacggcuc

SEQ ID NO: 1046016 - RNA, 21 nt, Human
uggguggcucugaaaagagcc

SEQ ID NO: 1046017 - RNA, 21 nt, Human
uuaccacugugcuaguggagg

SEQ ID NO: 1046018 - RNA, 19 nt, Human
uugggcgcgaagcacgggc

SEQ ID NO: 1046019 - RNA, 26 nt, Human
uuugggcgcgaagcacgggcgugugg

SEQ ID NO: 1046020 - RNA, 20 nt, Human
aaaaagcuauaaggccuaaa

SEQ ID NO: 1046021 - RNA, 21 nt, Human
aaaaagcuauaaggccuaaag

SEQ ID NO: 1046022 - RNA, 23 nt, Human
aaaagagaaauccaaacacagaa

SEQ ID NO: 1046023 - RNA, 18 nt, Human
aaacaaacaugauacaag

SEQ ID NO: 1046024 - RNA, 19 nt, Human
aaacaaauacaauuaaaga

SEQ ID NO: 1046025 - RNA, 19 nt, Human
aaagcuauaaggccuaaag

SEQ ID NO: 1046026 - RNA, 25 nt, Human
aacccaguaaccaagauaaauacua

SEQ ID NO: 1046027 - RNA, 23 nt, Human
aagaaaaaggaaaauuggcccag

SEQ ID NO: 1046028 - RNA, 24 nt, Human
aagaaccacuuaaguaggagggaa

SEQ ID NO: 1046029 - RNA, 20 nt, Human
aaguuccucccuuucccauc

SEQ ID NO: 1046030 - RNA, 26 nt, Human
aauguuuuugcuugcuggggucuuuu

SEQ ID NO: 1046031 - RNA, 22 nt, Human
acaugacggcuguucucaccac

SEQ ID NO: 1046032 - RNA, 19 nt, Human
acccaguaacgacaugggc

SEQ ID NO: 1046033 - RNA, 26 nt, Human
acccccaccuccuaacaggcacccau

SEQ ID NO: 1046034 - RNA, 28 nt, Human
acccuaagaauuaauagccauaggaaau

SEQ ID NO: 1046035 - RNA, 24 nt, Human
acuaucuccuauaaaaaauaucca

SEQ ID NO: 1046036 - RNA, 21 nt, Human
acuuagaugaggaaaagacag

SEQ ID NO: 1046037 - RNA, 24 nt, Human
agagagcacagcagggagggagua

SEQ ID NO: 1046038 - RNA, 23 nt, Human
agaggaaaaggauuucccucuua

SEQ ID NO: 1046039 - RNA, 18 nt, Human
agauuuggaaaauaggug

SEQ ID NO: 1046040 - RNA, 21 nt, Human
aggaaauaaaccuuaagagga

SEQ ID NO: 1046041 - RNA, 21 nt, Human
aggaacuaagugcacuuaaau

SEQ ID NO: 1046042 - RNA, 20 nt, Human
aggcgcacacagugguguuc

SEQ ID NO: 1046043 - RNA, 23 nt, Human
aggugagcugugcaaauucaggg

SEQ ID NO: 1046044 - RNA, 23 nt, Human
agguuuuucaaugccucaauaaa

SEQ ID NO: 1046045 - RNA, 22 nt, Human
auacugcauuuuuuauaguauc

SEQ ID NO: 1046046 - RNA, 24 nt, Human
aucaaaaagggaaaaacaagaacc

SEQ ID NO: 1046047 - RNA, 19 nt, Human
augaggaaaagacaggggg

SEQ ID NO: 1046048 - RNA, 23 nt, Human
augucuguccucccaccccuccc

SEQ ID NO: 1046049 - RNA, 20 nt, Human
caaaauaccacaaaccaagc

SEQ ID NO: 1046050 - RNA, 24 nt, Human
caaaauaccacaaaccaagcugaa

SEQ ID NO: 1046051 - RNA, 21 nt, Human
caaacggaauugggauuggcu

SEQ ID NO: 1046052 - RNA, 24 nt, Human
cacaaaauuuaaggagugccaaag

SEQ ID NO: 1046053 - RNA, 18 nt, Human
cacacuucucacuccacc

SEQ ID NO: 1046054 - RNA, 20 nt, Human
caccaaaacccuccccgaaa

SEQ ID NO: 1046055 - RNA, 24 nt, Human
caccacacucuucccuuuaaacaa

SEQ ID NO: 1046056 - RNA, 23 nt, Human
caccccuagaccaccccucaaaa

SEQ ID NO: 1046057 - RNA, 21 nt, Human
caccccuccuuaacuaaggaa

SEQ ID NO: 1046058 - RNA, 19 nt, Human
cagcagccacagaggccug

SEQ ID NO: 1046059 - RNA, 22 nt, Human
cagccccuagagaacagggaag

SEQ ID NO: 1046060 - RNA, 24 nt, Human
cagggaaagggagaaaccuaaaga

SEQ ID NO: 1046061 - RNA, 19 nt, Human
caguuaauacucuggacac

SEQ ID NO: 1046062 - RNA, 24 nt, Human
caucccaccaaaacccuccccgaa

SEQ ID NO: 1046063 - RNA, 27 nt, Human
cauuaaaaacuucaguagguaccccag

SEQ ID NO: 1046064 - RNA, 21 nt, Human
cauuuuuuaaauguuuuugcu

SEQ ID NO: 1046065 - RNA, 19 nt, Human
cccaaaauaccacaaacca

SEQ ID NO: 1046066 - RNA, 28 nt, Human
cccaucccaccaaaacccuccccgaaag

SEQ ID NO: 1046067 - RNA, 23 nt, Human
ccccaccuccuaacaggcaccca

SEQ ID NO: 1046068 - RNA, 22 nt, Human
ccccauuuuaccauauucaccc

SEQ ID NO: 1046069 - RNA, 21 nt, Human
ccccuucuucacaugcacccg

SEQ ID NO: 1046070 - RNA, 23 nt, Human
cccucaaaauuuccaucuuuuuu

SEQ ID NO: 1046071 - RNA, 19 nt, Human
cccucuuaaguuccucccu

SEQ ID NO: 1046072 - RNA, 23 nt, Human
ccgaaagaaugaagcaaaacaaa

SEQ ID NO: 1046073 - RNA, 18 nt, Human
ccgcauccccacucccag

SEQ ID NO: 1046074 - RNA, 23 nt, Human
ccuacaguaauacuuacuccauu

SEQ ID NO: 1046075 - RNA, 20 nt, Human
ccucacuucccuccuccuaa

SEQ ID NO: 1046076 - RNA, 21 nt, Human
ccuccccccaucccaccaaaa

SEQ ID NO: 1046077 - RNA, 20 nt, Human
ccugaaaaucuccccucucc

SEQ ID NO: 1046078 - RNA, 21 nt, Human
ccuggauuaaaggaacuaagu

SEQ ID NO: 1046079 - RNA, 25 nt, Human
cggaaaaaaauauaaagaaaaagga

SEQ ID NO: 1046080 - RNA, 27 nt, Human
cuagaccaccccucaaaauuuccaucu

SEQ ID NO: 1046081 - RNA, 22 nt, Human
cuagagaacagggaagggucag

SEQ ID NO: 1046082 - RNA, 21 nt, Human
cucaucuucccaaaauaccac

SEQ ID NO: 1046083 - RNA, 24 nt, Human
cucccaaauaaaaaaaauaauuua

SEQ ID NO: 1046084 - RNA, 22 nt, Human
cuccccccaucccaccaaaacc

SEQ ID NO: 1046085 - RNA, 23 nt, Human
cuguuguuuggugugugaugggg

SEQ ID NO: 1046086 - RNA, 24 nt, Human
cuuccccuccacacuucucacucc

SEQ ID NO: 1046087 - RNA, 18 nt, Human
gacacauuacugccuugu

SEQ ID NO: 1046088 - RNA, 20 nt, Human
gagcacagcagggagggagu

SEQ ID NO: 1046089 - RNA, 19 nt, Human
gcccuggauuaaaggaacu

SEQ ID NO: 1046090 - RNA, 20 nt, Human
ggagaagcggaggccuaucc

SEQ ID NO: 1046091 - RNA, 25 nt, Human
ggagcucccccuacuguguccgcau

SEQ ID NO: 1046092 - RNA, 18 nt, Human
ggaggaaaaacuucuggu

SEQ ID NO: 1046093 - RNA, 22 nt, Human
ggcauuauuccuucaccucccc

SEQ ID NO: 1046094 - RNA, 25 nt, Human
gggaaaaaaaucauuuuuuaaaugu

SEQ ID NO: 1046095 - RNA, 24 nt, Human
gggagugcucaucucauaccaggu

SEQ ID NO: 1046096 - RNA, 20 nt, Human
gucagggaaagggagaaacc

SEQ ID NO: 1046097 - RNA, 18 nt, Human
gucuaccuucccccuuca

SEQ ID NO: 1046098 - RNA, 19 nt, Human
gucuguccucccaccccuc

SEQ ID NO: 1046099 - RNA, 19 nt, Human
gucuuuuuauuucuuuucc

SEQ ID NO: 1046100 - RNA, 19 nt, Human
uaaagcaaacggaauuggg

SEQ ID NO: 1046101 - RNA, 23 nt, Human
uaacaacagaucaaauccaaaca

SEQ ID NO: 1046102 - RNA, 19 nt, Human
uaacuaaggaauuuuucug

SEQ ID NO: 1046103 - RNA, 19 nt, Human
uaaguucauucuccaaaag

SEQ ID NO: 1046104 - RNA, 22 nt, Human
uaaguuccucccuuucccaucc

SEQ ID NO: 1046105 - RNA, 21 nt, Human
uacagaaacgcagcagccaca

SEQ ID NO: 1046106 - RNA, 26 nt, Human
uaccucaaaagagaaauccaaacaca

SEQ ID NO: 1046107 - RNA, 18 nt, Human
uaggaaagcuaggugagc

SEQ ID NO: 1046108 - RNA, 21 nt, Human
uagguaccccaguugcccugg

SEQ ID NO: 1046109 - RNA, 20 nt, Human
uauaaagaaaaaggaaaauu

SEQ ID NO: 1046110 - RNA, 24 nt, Human
ucaaaaagggaaaaacaagaaccc

SEQ ID NO: 1046111 - RNA, 26 nt, Human
ucaaacuguaacagauggugggaaac

SEQ ID NO: 1046112 - RNA, 20 nt, Human
ucaccccuagaccaccccuc

SEQ ID NO: 1046113 - RNA, 23 nt, Human
ucacucacacaccccuccuuaac

SEQ ID NO: 1046114 - RNA, 21 nt, Human
uccaguggagaaucaaaacuu

SEQ ID NO: 1046115 - RNA, 23 nt, Human
ucccaaaauaccacaaaccaagc

SEQ ID NO: 1046116 - RNA, 19 nt, Human
ucccaccaaaacccucccc

SEQ ID NO: 1046117 - RNA, 22 nt, Human
uccccccaucccaccaaaaccc

SEQ ID NO: 1046118 - RNA, 26 nt, Human
ucccucaucuucccaaaauaccacaa

SEQ ID NO: 1046119 - RNA, 23 nt, Human
uccgcauccccacucccagcccc

SEQ ID NO: 1046120 - RNA, 23 nt, Human
ucuaacaacagaucaaauccaaa

SEQ ID NO: 1046121 - RNA, 23 nt, Human
ucuauucccucaucuucccaaaa

SEQ ID NO: 1046122 - RNA, 22 nt, Human
ucucaccacacucuucccuuua

SEQ ID NO: 1046123 - RNA, 24 nt, Human
ucucaccacacucuucccuuuaaa

SEQ ID NO: 1046124 - RNA, 23 nt, Human
ucuccauuaaaaacuucaguagg

SEQ ID NO: 1046125 - RNA, 20 nt, Human
ucucucauccuuagaaugga

SEQ ID NO: 1046126 - RNA, 22 nt, Human
ucucugggaaaaccccuggucu

SEQ ID NO: 1046127 - RNA, 20 nt, Human
ugaaaauaaagcaaacggaa

SEQ ID NO: 1046128 - RNA, 22 nt, Human
ugaaaaucuccccucuccauua

SEQ ID NO: 1046129 - RNA, 25 nt, Human
ugaaaaucuccccucuccauuaaaa

SEQ ID NO: 1046130 - RNA, 23 nt, Human
ugaaucuauauuaauuucccagg

SEQ ID NO: 1046131 - RNA, 19 nt, Human
ugaggagaaaauaaccuuu

SEQ ID NO: 1046132 - RNA, 22 nt, Human
ugaggugagcaaagcacucacc

SEQ ID NO: 1046133 - RNA, 21 nt, Human
ugccaaaaaacccaguaacca

SEQ ID NO: 1046134 - RNA, 25 nt, Human
ugccaaaaaacccaguaaccaagau

SEQ ID NO: 1046135 - RNA, 24 nt, Human
ugccuugucuuuccagauccuuca

SEQ ID NO: 1046136 - RNA, 22 nt, Human
ugcuuggaaggaaauaaaccuu

SEQ ID NO: 1046137 - RNA, 21 nt, Human
uggaaaauaggugacuucuga

SEQ ID NO: 1046138 - RNA, 21 nt, Human
uggacaauguaucaaaaauuu

SEQ ID NO: 1046139 - RNA, 23 nt, Human
uggggguggaggcgcacacagug

SEQ ID NO: 1046140 - RNA, 22 nt, Human
ugguuuuguuugaaacagccuc

SEQ ID NO: 1046141 - RNA, 23 nt, Human
uguccucccaccccucccaaggu

SEQ ID NO: 1046142 - RNA, 22 nt, Human
uguccuuaguuuuuaaaaacaa

SEQ ID NO: 1046143 - RNA, 18 nt, Human
uguugaggagaaaauaac

SEQ ID NO: 1046144 - RNA, 25 nt, Human
uuaaacaaauacaauuaaagacuua

SEQ ID NO: 1046145 - RNA, 22 nt, Human
uucccaaaauaccacaaaccaa

SEQ ID NO: 1046146 - RNA, 31 nt, Human
uucccacuuccccuccacacuucucacuccc

SEQ ID NO: 1046147 - RNA, 19 nt, Human
uucccaucuaaacaaacgg

SEQ ID NO: 1046148 - RNA, 25 nt, Human
uucccggaaaaaaauauaaagaaaa

SEQ ID NO: 1046149 - RNA, 21 nt, Human
uuccuucaccuccccccaucc

SEQ ID NO: 1046150 - RNA, 23 nt, Human
uugguuuuguuugaaacagccuc

SEQ ID NO: 1046151 - RNA, 18 nt, Human
uuuggugugugauggggg

SEQ ID NO: 1046152 - RNA, 20 nt, Human
uuuugcuugcuggggucuuu

SEQ ID NO: 1046153 - RNA, 20 nt, Human
uuuuuuguucauuuguccuu

SEQ ID NO: 1046154 - RNA, 21 nt, Human
aaacaauaaugacaaagacaa

SEQ ID NO: 1046155 - RNA, 20 nt, Human
aaacaccuggaggugcaccu

SEQ ID NO: 1046156 - RNA, 24 nt, Human
aaugacaaagacaaugaggaagaa

SEQ ID NO: 1046157 - RNA, 19 nt, Human
accuggaggugcaccugag

SEQ ID NO: 1046158 - RNA, 21 nt, Human
caccuggaggugcaccugagg

SEQ ID NO: 1046159 - RNA, 19 nt, Human
cccagcacuggagcagggu

SEQ ID NO: 1046160 - RNA, 19 nt, Human
cccccgccuccgccccagc

SEQ ID NO: 1046161 - RNA, 18 nt, Human
cucccccgccuccgcccc

SEQ ID NO: 1046162 - RNA, 21 nt, Human
gaccccaaguuugcgccccgc

SEQ ID NO: 1046163 - RNA, 23 nt, Human
gaggacgaccccaaguuugcgcc

SEQ ID NO: 1046164 - RNA, 19 nt, Human
guguacuuuguaaguugau

SEQ ID NO: 1046165 - RNA, 22 nt, Human
ucaaacaauaaugacaaagaca

SEQ ID NO: 1046166 - RNA, 21 nt, Human
ugacaaagacaaugaggaaga

SEQ ID NO: 1046167 - RNA, 28 nt, Human
uggagcaggguccagguuccuccccgcc

SEQ ID NO: 1046168 - RNA, 18 nt, Human
aaaguuauaaaaagcggc

SEQ ID NO: 1046169 - RNA, 23 nt, Human
aacaggccuggguccccaucacc

SEQ ID NO: 1046170 - RNA, 20 nt, Human
aagaggacagagggaaggga

SEQ ID NO: 1046171 - RNA, 20 nt, Human
acagaacagggagacagucu

SEQ ID NO: 1046172 - RNA, 21 nt, Human
accuggaagggccaaaaggga

SEQ ID NO: 1046173 - RNA, 19 nt, Human
acucgcucaacccccuucu

SEQ ID NO: 1046174 - RNA, 23 nt, Human
agacagagagacugcucccaagg

SEQ ID NO: 1046175 - RNA, 19 nt, Human
agagggaagggaaggacag

SEQ ID NO: 1046176 - RNA, 19 nt, Human
agagggaagggaaggacag

SEQ ID NO: 1046177 - RNA, 20 nt, Human
agguauuuuaaagagcuuuu

SEQ ID NO: 1046178 - RNA, 20 nt, Human
aguaggggcauccuugaacc

SEQ ID NO: 1046179 - RNA, 22 nt, Human
aguaggggcauccuugaaccug

SEQ ID NO: 1046180 - RNA, 31 nt, Human
auaaaaagcggcagcagccuggggcccggag

SEQ ID NO: 1046181 - RNA, 22 nt, Human
auagcagcaacagaacagggag

SEQ ID NO: 1046182 - RNA, 27 nt, Human
cagaguaggggcauccuugaaccugcc

SEQ ID NO: 1046183 - RNA, 22 nt, Human
cagcagccuggggcccggaucu

SEQ ID NO: 1046184 - RNA, 23 nt, Human
cagcagccuggggcccggaucug

SEQ ID NO: 1046185 - RNA, 19 nt, Human
cccagccccuucaccuccc

SEQ ID NO: 1046186 - RNA, 20 nt, Human
ccucccagccccuuccuccu

SEQ ID NO: 1046187 - RNA, 22 nt, Human
ccugccgagcucaaagagcagg

SEQ ID NO: 1046188 - RNA, 21 nt, Human
cggcagcagccuggggcccgg

SEQ ID NO: 1046189 - RNA, 22 nt, Human
cuccccagccccuucaccuccc

SEQ ID NO: 1046190 - RNA, 21 nt, Human
cucuccccagccccuucaccu

SEQ ID NO: 1046191 - RNA, 24 nt, Human
cucuggucagcccagucaacucgc

SEQ ID NO: 1046192 - RNA, 22 nt, Human
cugcagggcaaucagaagagga

SEQ ID NO: 1046193 - RNA, 24 nt, Human
cuuucucguuaaugggcuuuugac

SEQ ID NO: 1046194 - RNA, 18 nt, Human
gaggacagagggaaggga

SEQ ID NO: 1046195 - RNA, 22 nt, Human
gaguaagagacagagagacugc

SEQ ID NO: 1046196 - RNA, 25 nt, Human
gcagggcaaucagaagaggacagag

SEQ ID NO: 1046197 - RNA, 21 nt, Human
ggaggaggcccgggaccugga

SEQ ID NO: 1046198 - RNA, 21 nt, Human
ggaggugcuggcggcuccguu

SEQ ID NO: 1046199 - RNA, 24 nt, Human
ggcaaucagaagaggacagaggga

SEQ ID NO: 1046200 - RNA, 20 nt, Human
ggcccgggaccuggaagggc

SEQ ID NO: 1046201 - RNA, 21 nt, Human
ggcggcuccguugcagugggc

SEQ ID NO: 1046202 - RNA, 21 nt, Human
ucaaagagcagggcaccaggg

SEQ ID NO: 1046203 - RNA, 26 nt, Human
ucagcccagucaacucgcucaacccc

SEQ ID NO: 1046204 - RNA, 22 nt, Human
uccccagccccuucaccuccca

SEQ ID NO: 1046205 - RNA, 26 nt, Human
uccccagccccuucaccucccagccc

SEQ ID NO: 1046206 - RNA, 20 nt, Human
uccccaucaccaccacaggg

SEQ ID NO: 1046207 - RNA, 18 nt, Human
uccguugcagugggcagg

SEQ ID NO: 1046208 - RNA, 19 nt, Human
ucuccccagccccuucacc

SEQ ID NO: 1046209 - RNA, 19 nt, Human
ugggcuuuugacuugcugc

SEQ ID NO: 1046210 - RNA, 19 nt, Human
uggguccccaucaccacca

SEQ ID NO: 1046211 - RNA, 25 nt, Human
uuccuccucaggggauaaucugcug

SEQ ID NO: 1046212 - RNA, 23 nt, Human
uuccugugagccugucugugagc

SEQ ID NO: 1046213 - RNA, 19 nt, Human
uucuugcaucacauauucc

SEQ ID NO: 1046214 - RNA, 21 nt, Human
aaaauaaccccuggcccgaaa

SEQ ID NO: 1046215 - RNA, 20 nt, Human
cacuguguucuucacacgag

SEQ ID NO: 1046216 - RNA, 20 nt, Human
ccccgggccugccuguuggg

SEQ ID NO: 1046217 - RNA, 19 nt, Human
cgaaagggcaguagaaaaa

SEQ ID NO: 1046218 - RNA, 23 nt, Human
gccccgggccugccuguugggcc

SEQ ID NO: 1046219 - RNA, 22 nt, Human
uaaaauaaccccuggcccgaaa

SEQ ID NO: 1046220 - RNA, 24 nt, Human
uaaaauaaccccuggcccgaaagg

SEQ ID NO: 1046221 - RNA, 23 nt, Human
uggaagugggccgcaguauguuu

SEQ ID NO: 1046222 - RNA, 24 nt, Human
cauuaacaaaucacucuugauuca

SEQ ID NO: 1046223 - RNA, 25 nt, Human
ucacuuuucacaaagacauuacacu

SEQ ID NO: 1046224 - RNA, 18 nt, Human
uucacaaagacauuacac

SEQ ID NO: 1046225 - RNA, 22 nt, Human
uuggcaguaaaaaucacuuuuc

SEQ ID NO: 1046226 - RNA, 24 nt, Human
aaaacaaaacaaaagugcaugugg

SEQ ID NO: 1046227 - RNA, 24 nt, Human
aaacaaaaacaaaacaaaagugca

SEQ ID NO: 1046228 - RNA, 22 nt, Human
acaaaacaaaaacaaaacaaaa

SEQ ID NO: 1046229 - RNA, 22 nt, Human
acaaaacaaaagugcauguguu

SEQ ID NO: 1046230 - RNA, 18 nt, Human
acccggacccaucagcaa

SEQ ID NO: 1046231 - RNA, 21 nt, Human
accuuccacaaacccucauca

SEQ ID NO: 1046232 - RNA, 27 nt, Human
agaaagaauacuuucaaucuuuaugaa

SEQ ID NO: 1046233 - RNA, 24 nt, Human
cauccucuaauuaaaaacaaaaca

SEQ ID NO: 1046234 - RNA, 21 nt, Human
caucugccuacuacccauccu

SEQ ID NO: 1046235 - RNA, 24 nt, Human
ccacgcgcgccccacccggaccca

SEQ ID NO: 1046236 - RNA, 22 nt, Human
ccccacccggacccaucagcaa

SEQ ID NO: 1046237 - RNA, 21 nt, Human
cccucaucauuucucacuugg

SEQ ID NO: 1046238 - RNA, 22 nt, Human
cgccccacccggacccaucagc

SEQ ID NO: 1046239 - RNA, 24 nt, Human
cuuauaaaccuuccacaaacccuc

SEQ ID NO: 1046240 - RNA, 21 nt, Human
cuucugguucuugaucaucuu

SEQ ID NO: 1046241 - RNA, 21 nt, Human
gccccacccggacccaucagc

SEQ ID NO: 1046242 - RNA, 25 nt, Human
uaaaaacaaaacaaaaacaaaacaa

SEQ ID NO: 1046243 - RNA, 28 nt, Human
uaaguucacccuucuuccuuauaaaccu

SEQ ID NO: 1046244 - RNA, 19 nt, Human
uccacgcgcgccccacccg

SEQ ID NO: 1046245 - RNA, 23 nt, Human
uccucuaauuaaaaacaaaacaa

SEQ ID NO: 1046246 - RNA, 25 nt, Human
uuaaaaacaaaacaaaaacaaaaca

SEQ ID NO: 1046247 - RNA, 22 nt, Human
uucaauguccagaaagaauacu

SEQ ID NO: 1046248 - RNA, 21 nt, Human
uuuaaguucacccuucuuccu

SEQ ID NO: 1046249 - RNA, 22 nt, Human
aaagaggcauacaucaauucuu

SEQ ID NO: 1046250 - RNA, 21 nt, Human
acaaagcagaggcaaagaggc

SEQ ID NO: 1046251 - RNA, 23 nt, Human
accagaauacagaacucagucuc

SEQ ID NO: 1046252 - RNA, 19 nt, Human
cacagcauggcaacagcuu

SEQ ID NO: 1046253 - RNA, 21 nt, Human
cacauuugagaauuaaaucuc

SEQ ID NO: 1046254 - RNA, 20 nt, Human
caccagaauacagaacucag

SEQ ID NO: 1046255 - RNA, 23 nt, Human
cagaauacagaacucagucucac

SEQ ID NO: 1046256 - RNA, 18 nt, Human
cccagggcaaauauggaa

SEQ ID NO: 1046257 - RNA, 23 nt, Human
cccguuaacucaccagaauacag

SEQ ID NO: 1046258 - RNA, 24 nt, Human
cuccucucaaacguuuuccucaaa

SEQ ID NO: 1046259 - RNA, 18 nt, Human
cucucaaacguuuuccuc

SEQ ID NO: 1046260 - RNA, 25 nt, Human
gauaacagcauuuccuaauuuuaaa

SEQ ID NO: 1046261 - RNA, 19 nt, Human
gcaacagcuuugcagaugc

SEQ ID NO: 1046262 - RNA, 25 nt, Human
uaacucaccagaauacagaacucag

SEQ ID NO: 1046263 - RNA, 21 nt, Human
uaagagaagaaggcuauccac

SEQ ID NO: 1046264 - RNA, 19 nt, Human
uaccuguuauuucuucguu

SEQ ID NO: 1046265 - RNA, 21 nt, Human
uauucagaaguauuccaagca

SEQ ID NO: 1046266 - RNA, 18 nt, Human
ucagagcuuccacagcau

SEQ ID NO: 1046267 - RNA, 20 nt, Human
ucccagggcaaauauggaag

SEQ ID NO: 1046268 - RNA, 24 nt, Human
ugaaauagcaaagcccaguaaagg

SEQ ID NO: 1046269 - RNA, 18 nt, Human
ugacaaagcagaggcaaa

SEQ ID NO: 1046270 - RNA, 20 nt, Human
ugacaaagcagaggcaaaga

SEQ ID NO: 1046271 - RNA, 18 nt, Human
ugagauaacagcauuucc

SEQ ID NO: 1046272 - RNA, 20 nt, Human
ugugauuaagagaagaaggc

SEQ ID NO: 1046273 - RNA, 23 nt, Human
uuaaaucucaguuuacaauuggu

SEQ ID NO: 1046274 - RNA, 22 nt, Human
uuuaagagauugauaaauuaaa

SEQ ID NO: 1046275 - RNA, 24 nt, Human
uuucuucguuauugugggcuuaau

SEQ ID NO: 1046276 - RNA, 25 nt, Human
uuugcagaugcccacaucgugauag

SEQ ID NO: 1046277 - RNA, 19 nt, Human
gggaauagguuccagcagc

SEQ ID NO: 1046278 - RNA, 23 nt, Human
aaaaaaguagggauaacuauagc

SEQ ID NO: 1046279 - RNA, 19 nt, Human
aagacacaucagaaccaaa

SEQ ID NO: 1046280 - RNA, 26 nt, Human
agaaacugguaaaaaaguagggauaa

SEQ ID NO: 1046281 - RNA, 23 nt, Human
caacugcacauccucugggcaac

SEQ ID NO: 1046282 - RNA, 24 nt, Human
caacugcacauccucugggcaaca

SEQ ID NO: 1046283 - RNA, 19 nt, Human
caagacacaucagaaccaa

SEQ ID NO: 1046284 - RNA, 21 nt, Human
caagacacaucagaaccaaag

SEQ ID NO: 1046285 - RNA, 25 nt, Human
ccucugggcaacaaaguuauaguuu

SEQ ID NO: 1046286 - RNA, 19 nt, Human
gcuuagaugacaacugcac

SEQ ID NO: 1046287 - RNA, 24 nt, Human
uacugcugagagcuuagaugacaa

SEQ ID NO: 1046288 - RNA, 23 nt, Human
ucuuugauuuauuaagcaggugc

SEQ ID NO: 1046289 - RNA, 23 nt, Human
uuacggccaagacacaucagaac

SEQ ID NO: 1046290 - RNA, 22 nt, Human
cagaggccccucuucacugucu

SEQ ID NO: 1046291 - RNA, 21 nt, Human
ccagaggccccucuucacuga

SEQ ID NO: 1046292 - RNA, 21 nt, Human
ccccuguagguggggagugga

SEQ ID NO: 1046293 - RNA, 23 nt, Human
cuugaagggccagaggccccucu

SEQ ID NO: 1046294 - RNA, 20 nt, Human
gaagggccagaggccccucu

SEQ ID NO: 1046295 - RNA, 21 nt, Human
gaguggauuuuucccaaaggg

SEQ ID NO: 1046296 - RNA, 21 nt, Human
uccucuggcaacaucagcccc

SEQ ID NO: 1046297 - RNA, 22 nt, Human
uggaagaaauagcucagacuug

SEQ ID NO: 1046298 - RNA, 24 nt, Human
uggauccucuggcaacaucagccc

SEQ ID NO: 1046299 - RNA, 23 nt, Human
uggggaguggauuuuucccaaag

SEQ ID NO: 1046300 - RNA, 19 nt, Human
uuccuaggccuuguccugg

SEQ ID NO: 1046301 - RNA, 23 nt, Human
aaagaugcgacauccucuuuacc

SEQ ID NO: 1046302 - RNA, 18 nt, Human
aacauccaaguucuccag

SEQ ID NO: 1046303 - RNA, 24 nt, Human
aacuaugaccccaagcaaauacuc

SEQ ID NO: 1046304 - RNA, 18 nt, Human
aagacaacauccaaguuc

SEQ ID NO: 1046305 - RNA, 20 nt, Human
acaaaaugagacagugcccc

SEQ ID NO: 1046306 - RNA, 19 nt, Human
acugcaagcuauugaaauu

SEQ ID NO: 1046307 - RNA, 21 nt, Human
agccccaacacagucagacaa

SEQ ID NO: 1046308 - RNA, 19 nt, Human
auaaaaaauucuuccaaua

SEQ ID NO: 1046309 - RNA, 20 nt, Human
caaaaugagacagugccccc

SEQ ID NO: 1046310 - RNA, 23 nt, Human
cacaaaaugagacagugccccaa

SEQ ID NO: 1046311 - RNA, 23 nt, Human
caccacaauuucauguccaacaa

SEQ ID NO: 1046312 - RNA, 23 nt, Human
caccucaugacucauuugcuguc

SEQ ID NO: 1046313 - RNA, 24 nt, Human
cacucaaaucucugcacugucugu

SEQ ID NO: 1046314 - RNA, 21 nt, Human
cauguccaacaacugcaagcu

SEQ ID NO: 1046315 - RNA, 25 nt, Human
ccacaaaaugagacagugccccaag

SEQ ID NO: 1046316 - RNA, 22 nt, Human
ccaccacaauuucauguccaac

SEQ ID NO: 1046317 - RNA, 22 nt, Human
ccagccccaacacagucagaca

SEQ ID NO: 1046318 - RNA, 22 nt, Human
cccagccccaacacagucagac

SEQ ID NO: 1046319 - RNA, 19 nt, Human
ccguugcuagagaaacaag

SEQ ID NO: 1046320 - RNA, 26 nt, Human
cuagagaaacaagacaacauccaagu

SEQ ID NO: 1046321 - RNA, 18 nt, Human
guugcuagagaaacaaga

SEQ ID NO: 1046322 - RNA, 23 nt, Human
uaacccaccacaauuucaugucc

SEQ ID NO: 1046323 - RNA, 18 nt, Human
uaacuaugaccccaagca

SEQ ID NO: 1046324 - RNA, 20 nt, Human
uaacuaugaccccaagcaaa

SEQ ID NO: 1046325 - RNA, 24 nt, Human
uauauaacccaccacaauuucaug

SEQ ID NO: 1046326 - RNA, 21 nt, Human
ucaauuauccuuuaucuucau

SEQ ID NO: 1046327 - RNA, 18 nt, Human
ucagacaaaucgcugggc

SEQ ID NO: 1046328 - RNA, 21 nt, Human
ucagacaaaucgcugggcggc

SEQ ID NO: 1046329 - RNA, 20 nt, Human
uccacacucagugugaaaag

SEQ ID NO: 1046330 - RNA, 26 nt, Human
uccacacuuauucuucuccucuuucc

SEQ ID NO: 1046331 - RNA, 20 nt, Human
ucccaguuauccagcuucaa

SEQ ID NO: 1046332 - RNA, 18 nt, Human
ucgcugggcggccaucug

SEQ ID NO: 1046333 - RNA, 22 nt, Human
ucgcugggcggccaucugcucu

SEQ ID NO: 1046334 - RNA, 22 nt, Human
ugaaauucuaaagaugcgacau

SEQ ID NO: 1046335 - RNA, 24 nt, Human
ugaauuggagacaaguggcccaau

SEQ ID NO: 1046336 - RNA, 22 nt, Human
ugaccaaacuuaucuuuucacc

SEQ ID NO: 1046337 - RNA, 21 nt, Human
ugaccccaagcaaauacuccu

SEQ ID NO: 1046338 - RNA, 21 nt, Human
ugaccccaagcaaauacuccu

SEQ ID NO: 1046339 - RNA, 28 nt, Human
ugaccccaagcaaauacuccugaauuua

SEQ ID NO: 1046340 - RNA, 18 nt, Human
ugucccaguuauccagcu

SEQ ID NO: 1046341 - RNA, 22 nt, Human
uguccuuaguuuucagccuuua

SEQ ID NO: 1046342 - RNA, 20 nt, Human
uuuuuuuuuuuuuuuucucu

SEQ ID NO: 1046343 - RNA, 23 nt, Human
uuuuuuuuuuuuuuuuucucuuu

SEQ ID NO: 1046344 - RNA, 24 nt, Human
aaaaugcugggauuacaggcauga

SEQ ID NO: 1046345 - RNA, 18 nt, Human
aaagcuuucugggucugg

SEQ ID NO: 1046346 - RNA, 20 nt, Human
aaaguccucugucuacacca

SEQ ID NO: 1046347 - RNA, 26 nt, Human
aaaugcugggauuacaggcaugagcc

SEQ ID NO: 1046348 - RNA, 20 nt, Human
aacacagaggcuagaguccc

SEQ ID NO: 1046349 - RNA, 24 nt, Human
aacauccauccacuucuuaauguc

SEQ ID NO: 1046350 - RNA, 20 nt, Human
aaccuccgccuccugggcuc

SEQ ID NO: 1046351 - RNA, 20 nt, Human
aacugcaggcacucgagaua

SEQ ID NO: 1046352 - RNA, 21 nt, Human
aaggggugugcuauggguccc

SEQ ID NO: 1046353 - RNA, 21 nt, Human
aaguagcugggaccacagaug

SEQ ID NO: 1046354 - RNA, 23 nt, Human
aaguccuagagcugaagaacugg

SEQ ID NO: 1046355 - RNA, 21 nt, Human
aagugucacuucaggucaccc

SEQ ID NO: 1046356 - RNA, 19 nt, Human
acaaaguccucugucuaca

SEQ ID NO: 1046357 - RNA, 25 nt, Human
accauguugcccaggcugcucugca

SEQ ID NO: 1046358 - RNA, 20 nt, Human
accgaccccgacccugacgc

SEQ ID NO: 1046359 - RNA, 24 nt, Human
accgaccccgacccugacgccgac

SEQ ID NO: 1046360 - RNA, 23 nt, Human
acggguuucaccauguugcccag

SEQ ID NO: 1046361 - RNA, 23 nt, Human
acuuuacgauucuaauugugcug

SEQ ID NO: 1046362 - RNA, 21 nt, Human
agaagccaaguagauacucaa

SEQ ID NO: 1046363 - RNA, 18 nt, Human
agagcugaagaacuggca

SEQ ID NO: 1046364 - RNA, 20 nt, Human
agcagcagggcagcaugaag

SEQ ID NO: 1046365 - RNA, 21 nt, Human
agccaaguagauacucaagga

SEQ ID NO: 1046366 - RNA, 21 nt, Human
agcccccacaucccuuggccu

SEQ ID NO: 1046367 - RNA, 18 nt, Human
aggaucugguagauggag

SEQ ID NO: 1046368 - RNA, 19 nt, Human
aggccucccagucccccag

SEQ ID NO: 1046369 - RNA, 23 nt, Human
agggacagcgagagucuuuuggc

SEQ ID NO: 1046370 - RNA, 25 nt, Human
agggacagcgagagucuuuuggcuu

SEQ ID NO: 1046371 - RNA, 19 nt, Human
agggaggugcguggguccc

SEQ ID NO: 1046372 - RNA, 23 nt, Human
aguagcugggaccacagaugugc

SEQ ID NO: 1046373 - RNA, 18 nt, Human
auccagagagguguaaaa

SEQ ID NO: 1046374 - RNA, 24 nt, Human
caaaaugcugggauuacaggcaug

SEQ ID NO: 1046375 - RNA, 23 nt, Human
caaccuccgccuccugggcucaa

SEQ ID NO: 1046376 - RNA, 21 nt, Human
caacuucaaaaaaggaacaac

SEQ ID NO: 1046377 - RNA, 28 nt, Human
caagcaaaguacccgauuccccugaaag

SEQ ID NO: 1046378 - RNA, 20 nt, Human
cacagaugugccaccacgcc

SEQ ID NO: 1046379 - RNA, 18 nt, Human
caccaaggggcccacagc

SEQ ID NO: 1046380 - RNA, 20 nt, Human
caccagagugguaggaacca

SEQ ID NO: 1046381 - RNA, 22 nt, Human
caccauguugcccaggcugcuc

SEQ ID NO: 1046382 - RNA, 21 nt, Human
cacugcaaccuccgccuccug

SEQ ID NO: 1046383 - RNA, 23 nt, Human
cacugcaaccuccgccuccuggg

SEQ ID NO: 1046384 - RNA, 23 nt, Human
cagcagcagcagggcagcaugaa

SEQ ID NO: 1046385 - RNA, 19 nt, Human
cagcagggcagcaugaaga

SEQ ID NO: 1046386 - RNA, 18 nt, Human
cagccaccgccaccaccc

SEQ ID NO: 1046387 - RNA, 18 nt, Human
cagcccccacaucccuug

SEQ ID NO: 1046388 - RNA, 24 nt, Human
cagcccccacaucccuuggccuuc

SEQ ID NO: 1046389 - RNA, 19 nt, Human
cagcuucugaggcagcccu

SEQ ID NO: 1046390 - RNA, 20 nt, Human
cagggaggugcguggguccc

SEQ ID NO: 1046391 - RNA, 20 nt, Human
cauccacuucuuaaugucuu

SEQ ID NO: 1046392 - RNA, 21 nt, Human
caugagccaccaugcuggccu

SEQ ID NO: 1046393 - RNA, 22 nt, Human
cauguugcccaggcugcucugc

SEQ ID NO: 1046394 - RNA, 24 nt, Human
cauguugcccaggcugcucugcaa

SEQ ID NO: 1046395 - RNA, 21 nt, Human
cauguuuagugugagacuugg

SEQ ID NO: 1046396 - RNA, 23 nt, Human
ccaaaaugcugggauuacaggca

SEQ ID NO: 1046397 - RNA, 24 nt, Human
ccaaaaugcugggauuacaggcau

SEQ ID NO: 1046398 - RNA, 22 nt, Human
ccacacucaacccaugccacaa

SEQ ID NO: 1046399 - RNA, 24 nt, Human
cccaaaaugcugggauuacaggca

SEQ ID NO: 1046400 - RNA, 19 nt, Human
cccagccagcuucugaggc

SEQ ID NO: 1046401 - RNA, 19 nt, Human
cccagcccccacaucccuu

SEQ ID NO: 1046402 - RNA, 22 nt, Human
cccagcccccacaucccuuggc

SEQ ID NO: 1046403 - RNA, 23 nt, Human
cccgacccugacgccgacgcgac

SEQ ID NO: 1046404 - RNA, 19 nt, Human
ccgacccugacgccgacgc

SEQ ID NO: 1046405 - RNA, 28 nt, Human
ccgacgcgaccgccgucgccgcagccag

SEQ ID NO: 1046406 - RNA, 24 nt, Human
ccgccuccugggcucaagcgaucc

SEQ ID NO: 1046407 - RNA, 22 nt, Human
ccggucugcuggcugcuuuugg

SEQ ID NO: 1046408 - RNA, 19 nt, Human
ccuccgccuccugggcuca

SEQ ID NO: 1046409 - RNA, 26 nt, Human
ccuccuggcucagccucucaaguagc

SEQ ID NO: 1046410 - RNA, 20 nt, Human
ccugaaguauuaacacaacu

SEQ ID NO: 1046411 - RNA, 24 nt, Human
ccugcagguggccacacucaaccc

SEQ ID NO: 1046412 - RNA, 23 nt, Human
ccuggcucagccucucaaguagc

SEQ ID NO: 1046413 - RNA, 20 nt, Human
ccugggcucaagcgauccuc

SEQ ID NO: 1046414 - RNA, 23 nt, Human
ccugggcucaagcgauccuccug

SEQ ID NO: 1046415 - RNA, 18 nt, Human
cgacccugacgccgacgc

SEQ ID NO: 1046416 - RNA, 24 nt, Human
cgacgcgaccgccgucgccgcagc

SEQ ID NO: 1046417 - RNA, 24 nt, Human
cgccuccugggcucaagcgauccu

SEQ ID NO: 1046418 - RNA, 24 nt, Human
cgcucugucgcccgggcuggagug

SEQ ID NO: 1046419 - RNA, 23 nt, Human
cggguuucaccauguugcccagg

SEQ ID NO: 1046420 - RNA, 24 nt, Human
cucacugcaaccuccgccuccugg

SEQ ID NO: 1046421 - RNA, 24 nt, Human
cucagccucucaaguagcugggac

SEQ ID NO: 1046422 - RNA, 20 nt, Human
cuccaggcacaucgaagccc

SEQ ID NO: 1046423 - RNA, 25 nt, Human
cuccugggcucaagcgauccuccug

SEQ ID NO: 1046424 - RNA, 19 nt, Human
cucgcucugucgcccgggc

SEQ ID NO: 1046425 - RNA, 21 nt, Human
cucgcucugucgcccgggcug

SEQ ID NO: 1046426 - RNA, 24 nt, Human
cucgcucugucgcccgggcuggag

SEQ ID NO: 1046427 - RNA, 21 nt, Human
cugagccucccaaaaugcugg

SEQ ID NO: 1046428 - RNA, 23 nt, Human
cugcaaccuccgccuccugggcu

SEQ ID NO: 1046429 - RNA, 24 nt, Human
cugccugagccucccaaaaugcug

SEQ ID NO: 1046430 - RNA, 21 nt, Human
cuuuuugucuguuugguagag

SEQ ID NO: 1046431 - RNA, 19 nt, Human
gaagggggaggagcuccca

SEQ ID NO: 1046432 - RNA, 18 nt, Human
gaccgccgucgccgcagc

SEQ ID NO: 1046433 - RNA, 22 nt, Human
gagaagccaaguagauacucaa

SEQ ID NO: 1046434 - RNA, 23 nt, Human
gagacggguuucaccauguugcc

SEQ ID NO: 1046435 - RNA, 18 nt, Human
gauuacaggcaugagcca

SEQ ID NO: 1046436 - RNA, 21 nt, Human
gauuacaggcaugagccacca

SEQ ID NO: 1046437 - RNA, 22 nt, Human
gauuacaggcaugagccaccau

SEQ ID NO: 1046438 - RNA, 18 nt, Human
gauucccuuuaacuauga

SEQ ID NO: 1046439 - RNA, 22 nt, Human
gcaaccuccgccuccugggcuc

SEQ ID NO: 1046440 - RNA, 21 nt, Human
gcagcagcagggcagcaugaa

SEQ ID NO: 1046441 - RNA, 18 nt, Human
gcaggcacucgagauacc

SEQ ID NO: 1046442 - RNA, 19 nt, Human
gcccgggcuggagugcaau

SEQ ID NO: 1046443 - RNA, 18 nt, Human
gccgcagccaccgccacc

SEQ ID NO: 1046444 - RNA, 24 nt, Human
gcgauuugucugccugagccuccc

SEQ ID NO: 1046445 - RNA, 27 nt, Human
gcuggagugcaauaaguggugccaguc

SEQ ID NO: 1046446 - RNA, 18 nt, Human
ggaggagcucccagaagg

SEQ ID NO: 1046447 - RNA, 24 nt, Human
ggaggagcucccagaagggggagg

SEQ ID NO: 1046448 - RNA, 24 nt, Human
ggauuacaggcaugagccaccaug

SEQ ID NO: 1046449 - RNA, 25 nt, Human
gggcagcaugaagacugccaggccu

SEQ ID NO: 1046450 - RNA, 25 nt, Human
ggggaggagcucccagaacgcagcg

SEQ ID NO: 1046451 - RNA, 20 nt, Human
gggucccuguggggaaaucc

SEQ ID NO: 1046452 - RNA, 21 nt, Human
ggguuucaccauguugcccag

SEQ ID NO: 1046453 - RNA, 22 nt, Human
ggguuucaccauguugcccagg

SEQ ID NO: 1046454 - RNA, 20 nt, Human
gguagagacggguuucacca

SEQ ID NO: 1046455 - RNA, 20 nt, Human
guagagacggguuucaccau

SEQ ID NO: 1046456 - RNA, 21 nt, Human
guagagacggguuucaccaug

SEQ ID NO: 1046457 - RNA, 22 nt, Human
guagauacucaaggaaaacacc

SEQ ID NO: 1046458 - RNA, 19 nt, Human
gugccucccuguuuucagc

SEQ ID NO: 1046459 - RNA, 19 nt, Human
gugcgugggucccuguggg

SEQ ID NO: 1046460 - RNA, 18 nt, Human
uacaggcaugagccacca

SEQ ID NO: 1046461 - RNA, 19 nt, Human
uagagacggguuucaccau

SEQ ID NO: 1046462 - RNA, 21 nt, Human
uagagacggguuucaccaugu

SEQ ID NO: 1046463 - RNA, 20 nt, Human
uagaguccccagccagcuuc

SEQ ID NO: 1046464 - RNA, 22 nt, Human
uagauacucaaggaaaacacca

SEQ ID NO: 1046465 - RNA, 21 nt, Human
uagauggagucucgcucuguc

SEQ ID NO: 1046466 - RNA, 21 nt, Human
uaggaaccaaggcaggcauca

SEQ ID NO: 1046467 - RNA, 23 nt, Human
ucacugcaaccuccgccuccugg

SEQ ID NO: 1046468 - RNA, 24 nt, Human
ucacugcaaccuccgccuccuggg

SEQ ID NO: 1046469 - RNA, 25 nt, Human
ucacugcaaccuccgccuccugggc

SEQ ID NO: 1046470 - RNA, 26 nt, Human
ucacugcaaccuccgccuccugggcu

SEQ ID NO: 1046471 - RNA, 23 nt, Human
ucacuuuacgauucuaauugugc

SEQ ID NO: 1046472 - RNA, 22 nt, Human
uccaaaagagcagcgggucacc

SEQ ID NO: 1046473 - RNA, 18 nt, Human
uccaggcacaucgaagcc

SEQ ID NO: 1046474 - RNA, 24 nt, Human
ucccaaaaugcugggauuacaggc

SEQ ID NO: 1046475 - RNA, 19 nt, Human
ucccccagcccccacaucc

SEQ ID NO: 1046476 - RNA, 23 nt, Human
ucccuaaaggugaaagaucccca

SEQ ID NO: 1046477 - RNA, 21 nt, Human
ucccuuggccuucuggggagg

SEQ ID NO: 1046478 - RNA, 21 nt, Human
uccugggcucaagcgauccuc

SEQ ID NO: 1046479 - RNA, 22 nt, Human
uccugggcucaagcgauccucc

SEQ ID NO: 1046480 - RNA, 24 nt, Human
uccugggcucaagcgauccuccug

SEQ ID NO: 1046481 - RNA, 18 nt, Human
ucgcccgggcuggagugc

SEQ ID NO: 1046482 - RNA, 24 nt, Human
ucgcucugucgcccgggcuggagu

SEQ ID NO: 1046483 - RNA, 18 nt, Human
ucucaaguagcugggacc

SEQ ID NO: 1046484 - RNA, 18 nt, Human
ucucgcucugucgcccgg

SEQ ID NO: 1046485 - RNA, 19 nt, Human
ucucgcucugucgcccggg

SEQ ID NO: 1046486 - RNA, 23 nt, Human
ucucgcucugucgcccgggcugg

SEQ ID NO: 1046487 - RNA, 24 nt, Human
ucucgcucugucgcccgggcugga

SEQ ID NO: 1046488 - RNA, 22 nt, Human
ucugcaacuucugagcuagagc

SEQ ID NO: 1046489 - RNA, 24 nt, Human
ucugucgcccgggcuggagugcaa

SEQ ID NO: 1046490 - RNA, 20 nt, Human
ucuuuaugaacacagaggcu

SEQ ID NO: 1046491 - RNA, 20 nt, Human
ugaagcuuaucgacagcgcu

SEQ ID NO: 1046492 - RNA, 22 nt, Human
ugaauacaauacaaacuucgaa

SEQ ID NO: 1046493 - RNA, 24 nt, Human
ugacaacuucaaaaaaggaacaac

SEQ ID NO: 1046494 - RNA, 18 nt, Human
ugagcuagagcgauuugu

SEQ ID NO: 1046495 - RNA, 20 nt, Human
ugcaaagaacugucaaggug

SEQ ID NO: 1046496 - RNA, 18 nt, Human
ugccaggccucccagucc

SEQ ID NO: 1046497 - RNA, 24 nt, Human
ugccugagccucccaaaaugcugg

SEQ ID NO: 1046498 - RNA, 24 nt, Human
ugcuaugggucccgcgugcugggg

SEQ ID NO: 1046499 - RNA, 22 nt, Human
ugcuuaaagcuacaaguccuag

SEQ ID NO: 1046500 - RNA, 24 nt, Human
uggagucucgcucugucgcccggg

SEQ ID NO: 1046501 - RNA, 21 nt, Human
uggaugagcugaaguaaaaau

SEQ ID NO: 1046502 - RNA, 21 nt, Human
uggccacacucaacccaugcc

SEQ ID NO: 1046503 - RNA, 18 nt, Human
uggccuucuggggagggg

SEQ ID NO: 1046504 - RNA, 23 nt, Human
uggcucagccucucaaguagcug

SEQ ID NO: 1046505 - RNA, 23 nt, Human
ugggaaaaaccacgagaagccaa

SEQ ID NO: 1046506 - RNA, 19 nt, Human
ugggaccacagaugugcca

SEQ ID NO: 1046507 - RNA, 22 nt, Human
ugggaccacagaugugccacca

SEQ ID NO: 1046508 - RNA, 18 nt, Human
ugggauuacaggcaugag

SEQ ID NO: 1046509 - RNA, 22 nt, Human
ugggauuacaggcaugagccac

SEQ ID NO: 1046510 - RNA, 23 nt, Human
ugggauuacaggcaugagccacc

SEQ ID NO: 1046511 - RNA, 24 nt, Human
ugggauuacaggcaugagccacca

SEQ ID NO: 1046512 - RNA, 25 nt, Human
ugggauuacaggcaugagccaccau

SEQ ID NO: 1046513 - RNA, 26 nt, Human
ugggauuacaggcaugagccaccaug

SEQ ID NO: 1046514 - RNA, 23 nt, Human
ugguagagacggguuucaccaug

SEQ ID NO: 1046515 - RNA, 24 nt, Human
uggugccaucucagcucacugcaa

SEQ ID NO: 1046516 - RNA, 22 nt, Human
ugucugccugagccucccaaaa

SEQ ID NO: 1046517 - RNA, 18 nt, Human
ugugcaaagaacugucaa

SEQ ID NO: 1046518 - RNA, 22 nt, Human
uguugcccaggcugcucugcaa

SEQ ID NO: 1046519 - RNA, 23 nt, Human
uguuugguagagacggguuucac

SEQ ID NO: 1046520 - RNA, 22 nt, Human
uuaaugacaacuucaaaaaagg

SEQ ID NO: 1046521 - RNA, 23 nt, Human
uucaggucacccauuuccaaaag

SEQ ID NO: 1046522 - RNA, 23 nt, Human
uuggacaaaguccucugucuaca

SEQ ID NO: 1046523 - RNA, 24 nt, Human
uugguagagacggguuucaccaug

SEQ ID NO: 1046524 - RNA, 22 nt, Human
uugucuguuugguagagacggg

SEQ ID NO: 1046525 - RNA, 24 nt, Human
uugugugcaaagaacugucaaggu

SEQ ID NO: 1046526 - RNA, 21 nt, Human
uuucaccauguugcccaggcu

SEQ ID NO: 1046527 - RNA, 24 nt, Human
uuugguagagacggguuucaccau

SEQ ID NO: 1046528 - RNA, 23 nt, Human
uuuuugucuguuugguagagacg

SEQ ID NO: 1046529 - RNA, 23 nt, Human
aaccaugccaagccugccugcca

SEQ ID NO: 1046530 - RNA, 23 nt, Human
aaggcgggggcuguggaggaugc

SEQ ID NO: 1046531 - RNA, 19 nt, Human
aaggggcucugcucugggc

SEQ ID NO: 1046532 - RNA, 21 nt, Human
aaggggcucugcucugggccu

SEQ ID NO: 1046533 - RNA, 23 nt, Human
aagugcccacccccagggaccac

SEQ ID NO: 1046534 - RNA, 22 nt, Human
aaguggacuuccagcacaccua

SEQ ID NO: 1046535 - RNA, 18 nt, Human
acccaguguacgucccgc

SEQ ID NO: 1046536 - RNA, 25 nt, Human
acccugcccgcccugagggcccaac

SEQ ID NO: 1046537 - RNA, 24 nt, Human
agacacaggcacugaccccgaccc

SEQ ID NO: 1046538 - RNA, 21 nt, Human
agaggccuugcuugucuggga

SEQ ID NO: 1046539 - RNA, 20 nt, Human
agaugcggggagccccacug

SEQ ID NO: 1046540 - RNA, 22 nt, Human
agauggggguuuaucucauggu

SEQ ID NO: 1046541 - RNA, 18 nt, Human
agccaaggcccugccgcg

SEQ ID NO: 1046542 - RNA, 19 nt, Human
aggcacugaccccgacccu

SEQ ID NO: 1046543 - RNA, 24 nt, Human
agggagccaguuccagucaggucu

SEQ ID NO: 1046544 - RNA, 19 nt, Human
agggccagcagugaccagg

SEQ ID NO: 1046545 - RNA, 18 nt, Human
aggguccacccaccccac

SEQ ID NO: 1046546 - RNA, 24 nt, Human
augcccccaagugcccacccccag

SEQ ID NO: 1046547 - RNA, 22 nt, Human
auuagacuaagacccucccggg

SEQ ID NO: 1046548 - RNA, 23 nt, Human
auucucaggauuggcauguuucu

SEQ ID NO: 1046549 - RNA, 24 nt, Human
caaaacagcugcccggggguggga

SEQ ID NO: 1046550 - RNA, 24 nt, Human
caaaggccauacccagcaggugca

SEQ ID NO: 1046551 - RNA, 19 nt, Human
caaccaugccaagccugcc

SEQ ID NO: 1046552 - RNA, 20 nt, Human
caagaagcuggacacaccua

SEQ ID NO: 1046553 - RNA, 22 nt, Human
cacccaccccaccagguggaau

SEQ ID NO: 1046554 - RNA, 25 nt, Human
cacccccaugcaccccaaggagcga

SEQ ID NO: 1046555 - RNA, 21 nt, Human
cacccugcccgcccugagggc

SEQ ID NO: 1046556 - RNA, 23 nt, Human
caccgggggacccagagagcugc

SEQ ID NO: 1046557 - RNA, 19 nt, Human
cacugugcccggggcaccc

SEQ ID NO: 1046558 - RNA, 20 nt, Human
cagccacccugcccgcccug

SEQ ID NO: 1046559 - RNA, 19 nt, Human
cagcugcccggggguggga

SEQ ID NO: 1046560 - RNA, 23 nt, Human
cagugaccaggaugcccccaagu

SEQ ID NO: 1046561 - RNA, 22 nt, Human
cauacccagcaggugcaaacaa

SEQ ID NO: 1046562 - RNA, 21 nt, Human
caucaccugagagucuccagg

SEQ ID NO: 1046563 - RNA, 19 nt, Human
ccacccagauccucggagg

SEQ ID NO: 1046564 - RNA, 18 nt, Human
ccaccugccugacaccca

SEQ ID NO: 1046565 - RNA, 18 nt, Human
ccacgcccacccgcugcu

SEQ ID NO: 1046566 - RNA, 21 nt, Human
ccagaggaggggcugaacgca

SEQ ID NO: 1046567 - RNA, 20 nt, Human
ccagggaugagcagugucca

SEQ ID NO: 1046568 - RNA, 19 nt, Human
ccagugccccacaggccaa

SEQ ID NO: 1046569 - RNA, 18 nt, Human
cccaacagugagcaaggc

SEQ ID NO: 1046570 - RNA, 19 nt, Human
cccaacucuccugaguggc

SEQ ID NO: 1046571 - RNA, 18 nt, Human
cccaagugcccaccccca

SEQ ID NO: 1046572 - RNA, 19 nt, Human
cccacagugguccccaggu

SEQ ID NO: 1046573 - RNA, 22 nt, Human
ccccacaggccaaaggcccaag

SEQ ID NO: 1046574 - RNA, 18 nt, Human
ccccagggaaagguggcc

SEQ ID NO: 1046575 - RNA, 18 nt, Human
ccccaggucuggacuagg

SEQ ID NO: 1046576 - RNA, 22 nt, Human
ccccaugcaccccaaggagcga

SEQ ID NO: 1046577 - RNA, 25 nt, Human
ccccggccaaccaugccaagccugc

SEQ ID NO: 1046578 - RNA, 23 nt, Human
cccugcccgcccugagggcccaa

SEQ ID NO: 1046579 - RNA, 19 nt, Human
ccugcuggagcugacccca

SEQ ID NO: 1046580 - RNA, 20 nt, Human
ccuguuaggguccccaggga

SEQ ID NO: 1046581 - RNA, 18 nt, Human
ccuuggggcaggcuggcc

SEQ ID NO: 1046582 - RNA, 20 nt, Human
cggagaacuuaaaauggcca

SEQ ID NO: 1046583 - RNA, 18 nt, Human
cggccgcugccagcccug

SEQ ID NO: 1046584 - RNA, 19 nt, Human
cgugugguagccaaggccc

SEQ ID NO: 1046585 - RNA, 21 nt, Human
cuccaaggugcauugucuucc

SEQ ID NO: 1046586 - RNA, 20 nt, Human
cuccaggguccacccacccc

SEQ ID NO: 1046587 - RNA, 19 nt, Human
cucccgggccggccgcccc

SEQ ID NO: 1046588 - RNA, 25 nt, Human
cucccgggccggccgccccaaaggc

SEQ ID NO: 1046589 - RNA, 22 nt, Human
cucugcgccuggccuagggugc

SEQ ID NO: 1046590 - RNA, 20 nt, Human
cucugcucugggccuguuag

SEQ ID NO: 1046591 - RNA, 21 nt, Human
cugcuggagcugaccccacgc

SEQ ID NO: 1046592 - RNA, 18 nt, Human
cugucgccuuugaaggga

SEQ ID NO: 1046593 - RNA, 20 nt, Human
cuguguccugcccacccucc

SEQ ID NO: 1046594 - RNA, 25 nt, Human
cuugggcaaaacagcugcccggggg

SEQ ID NO: 1046595 - RNA, 18 nt, Human
cuugggucugucgccuuu

SEQ ID NO: 1046596 - RNA, 21 nt, Human
gaacuuaaaauggccauguuu

SEQ ID NO: 1046597 - RNA, 18 nt, Human
gaagggagccgggagacc

SEQ ID NO: 1046598 - RNA, 19 nt, Human
gaccugggagguaaggggc

SEQ ID NO: 1046599 - RNA, 18 nt, Human
gacgccacccagauccuc

SEQ ID NO: 1046600 - RNA, 23 nt, Human
gagccaguuccagucaggucucc

SEQ ID NO: 1046601 - RNA, 21 nt, Human
gagcugcagcugggaaccuga

SEQ ID NO: 1046602 - RNA, 23 nt, Human
gcagugggucaccugcuaugcau

SEQ ID NO: 1046603 - RNA, 23 nt, Human
gcauguuucuggucagauggggg

SEQ ID NO: 1046604 - RNA, 20 nt, Human
gccagcagugaccaggaugc

SEQ ID NO: 1046605 - RNA, 22 nt, Human
gccccaaaggccauacccagca

SEQ ID NO: 1046606 - RNA, 20 nt, Human
gccgcgugugguagccaagg

SEQ ID NO: 1046607 - RNA, 26 nt, Human
ggaccggagcccccuccaaccggagg

SEQ ID NO: 1046608 - RNA, 21 nt, Human
ggaccggagcccccuccacag

SEQ ID NO: 1046609 - RNA, 25 nt, Human
ggagcccccuccacagacacccuuc

SEQ ID NO: 1046610 - RNA, 19 nt, Human
ggcaggaagggagccggga

SEQ ID NO: 1046611 - RNA, 20 nt, Human
ggcauugggggcaggaaggg

SEQ ID NO: 1046612 - RNA, 20 nt, Human
ggccgccccaaaggccauac

SEQ ID NO: 1046613 - RNA, 22 nt, Human
ggcuccccgacucccuguuccc

SEQ ID NO: 1046614 - RNA, 24 nt, Human
gggagcugauggggagggagccag

SEQ ID NO: 1046615 - RNA, 22 nt, Human
gggcucggagccugcgaagcag

SEQ ID NO: 1046616 - RNA, 20 nt, Human
gguggaaucaagcccaucuc

SEQ ID NO: 1046617 - RNA, 21 nt, Human
gguggcauugggggcaggaag

SEQ ID NO: 1046618 - RNA, 20 nt, Human
gucacacccacccacccacg

SEQ ID NO: 1046619 - RNA, 22 nt, Human
gucuggacuagggagugcagag

SEQ ID NO: 1046620 - RNA, 20 nt, Human
uaaaauggccauguuugucc

SEQ ID NO: 1046621 - RNA, 24 nt, Human
uaagggcauuuaaggguuuaggaa

SEQ ID NO: 1046622 - RNA, 28 nt, Human
uaccuggaccggagcccccuccacagac

SEQ ID NO: 1046623 - RNA, 22 nt, Human
uagcuugguguaacugaaagcc

SEQ ID NO: 1046624 - RNA, 23 nt, Human
uagggagugcagagagggcugca

SEQ ID NO: 1046625 - RNA, 20 nt, Human
uagggugcagccaccugccu

SEQ ID NO: 1046626 - RNA, 18 nt, Human
ucacagccacccugcccg

SEQ ID NO: 1046627 - RNA, 19 nt, Human
ucagggacauucucuuaca

SEQ ID NO: 1046628 - RNA, 23 nt, Human
uccccagugccccacaggccaaa

SEQ ID NO: 1046629 - RNA, 21 nt, Human
ucccgggccggccgccccaaa

SEQ ID NO: 1046630 - RNA, 20 nt, Human
ucuccaggguccacccaccc

SEQ ID NO: 1046631 - RNA, 22 nt, Human
ucugaccugggagguaaggggc

SEQ ID NO: 1046632 - RNA, 24 nt, Human
ucuggccgauuucggucagggaca

SEQ ID NO: 1046633 - RNA, 21 nt, Human
ucuuccaguaucuacagcuuc

SEQ ID NO: 1046634 - RNA, 22 nt, Human
ugaaggagaguuuuauugcaga

SEQ ID NO: 1046635 - RNA, 19 nt, Human
ugaguggcccccaccagac

SEQ ID NO: 1046636 - RNA, 18 nt, Human
ugcaaggguggcauuggg

SEQ ID NO: 1046637 - RNA, 23 nt, Human
ugcccacccccagggaccacaca

SEQ ID NO: 1046638 - RNA, 21 nt, Human
ugcccccaagugcccaccccc

SEQ ID NO: 1046639 - RNA, 20 nt, Human
ugcggcccacgcccacccgc

SEQ ID NO: 1046640 - RNA, 19 nt, Human
uggaauaucucuggcugga

SEQ ID NO: 1046641 - RNA, 22 nt, Human
uggaaucaagcccaucucugcc

SEQ ID NO: 1046642 - RNA, 21 nt, Human
uggaccggagcccccuccaca

SEQ ID NO: 1046643 - RNA, 18 nt, Human
ugggagggaccagggugg

SEQ ID NO: 1046644 - RNA, 26 nt, Human
ugggagguaaggggcucugcucuggg

SEQ ID NO: 1046645 - RNA, 18 nt, Human
uggggagggagccaguuc

SEQ ID NO: 1046646 - RNA, 19 nt, Human
uggggagggagccaguucc

SEQ ID NO: 1046647 - RNA, 23 nt, Human
ugggggcaggaagggagccggga

SEQ ID NO: 1046648 - RNA, 19 nt, Human
uguggaggaugcagggcuc

SEQ ID NO: 1046649 - RNA, 19 nt, Human
uuaaaauggccauguuugu

SEQ ID NO: 1046650 - RNA, 22 nt, Human
uuccagcacaccuagggcagca

SEQ ID NO: 1046651 - RNA, 26 nt, Human
uuccaguaucuacagcuucagacuug

SEQ ID NO: 1046652 - RNA, 18 nt, Human
uuccccgcucccggcucc

SEQ ID NO: 1046653 - RNA, 19 nt, Human
uucccggcuccccgacucc

SEQ ID NO: 1046654 - RNA, 18 nt, Human
uucgcagacacguuccac

SEQ ID NO: 1046655 - RNA, 23 nt, Human
uucugugugaaggagaguuuuau

SEQ ID NO: 1046656 - RNA, 24 nt, Human
aaacuacugggauuacaggcguga

SEQ ID NO: 1046657 - RNA, 22 nt, Human
aaagaucuuugcuucuccacuu

SEQ ID NO: 1046658 - RNA, 23 nt, Human
aagccacucaggaccccagaaag

SEQ ID NO: 1046659 - RNA, 28 nt, Human
aagcccuggagguuaccagcuccaagcc

SEQ ID NO: 1046660 - RNA, 21 nt, Human
acaggcaccugccaccaugcc

SEQ ID NO: 1046661 - RNA, 24 nt, Human
accggguuucgucauguuggccag

SEQ ID NO: 1046662 - RNA, 20 nt, Human
accucggccuucugaauagc

SEQ ID NO: 1046663 - RNA, 24 nt, Human
acggauucucccaccucggccuuc

SEQ ID NO: 1046664 - RNA, 25 nt, Human
acuaauuuuucagggcccaacacca

SEQ ID NO: 1046665 - RNA, 19 nt, Human
agcccuggagguuaccagc

SEQ ID NO: 1046666 - RNA, 24 nt, Human
aggugaucugcccgccuuggccuc

SEQ ID NO: 1046667 - RNA, 20 nt, Human
aguuggggggcagagaaaug

SEQ ID NO: 1046668 - RNA, 23 nt, Human
aucagcugccuuuguguucccag

SEQ ID NO: 1046669 - RNA, 21 nt, Human
aucuuguccccuuuccuucug

SEQ ID NO: 1046670 - RNA, 25 nt, Human
augaauugaaacuaugggauccuaa

SEQ ID NO: 1046671 - RNA, 24 nt, Human
caaacuacugggauuacaggcgug

SEQ ID NO: 1046672 - RNA, 23 nt, Human
cacaaccuccgccucccagguuc

SEQ ID NO: 1046673 - RNA, 18 nt, Human
caccagacccugcuccug

SEQ ID NO: 1046674 - RNA, 24 nt, Human
caccaugccuggcuaauuuuugua

SEQ ID NO: 1046675 - RNA, 24 nt, Human
caccucggccuucugaauagccgg

SEQ ID NO: 1046676 - RNA, 21 nt, Human
caccuugcacgucagcugcac

SEQ ID NO: 1046677 - RNA, 20 nt, Human
caggguucaucccgcucucc

SEQ ID NO: 1046678 - RNA, 19 nt, Human
cagguucaacggauucucc

SEQ ID NO: 1046679 - RNA, 21 nt, Human
caucacaaccuccgccuccca

SEQ ID NO: 1046680 - RNA, 22 nt, Human
caucacaaccuccgccucccag

SEQ ID NO: 1046681 - RNA, 24 nt, Human
cauccucagccucccacaugcuag

SEQ ID NO: 1046682 - RNA, 21 nt, Human
cauguagacuagacucagacu

SEQ ID NO: 1046683 - RNA, 21 nt, Human
cauguccugccuuguccugga

SEQ ID NO: 1046684 - RNA, 18 nt, Human
cauguuggccaggcuggu

SEQ ID NO: 1046685 - RNA, 19 nt, Human
cauguuggccaggcugguc

SEQ ID NO: 1046686 - RNA, 22 nt, Human
ccaaacuacugggauuacaggc

SEQ ID NO: 1046687 - RNA, 24 nt, Human
ccaaacuacugggauuacaggcgu

SEQ ID NO: 1046688 - RNA, 21 nt, Human
cccacaugcuagacuucaggu

SEQ ID NO: 1046689 - RNA, 21 nt, Human
cccacccucacauccuggguu

SEQ ID NO: 1046690 - RNA, 23 nt, Human
ccccuguagccugugccaggcug

SEQ ID NO: 1046691 - RNA, 19 nt, Human
ccccuuuccuucugcccca

SEQ ID NO: 1046692 - RNA, 21 nt, Human
cccucacauccuggguucuau

SEQ ID NO: 1046693 - RNA, 22 nt, Human
cccuguuuucucuuccaguccc

SEQ ID NO: 1046694 - RNA, 18 nt, Human
ccgccucccagguucaac

SEQ ID NO: 1046695 - RNA, 24 nt, Human
ccggguuucgucauguuggccagg

SEQ ID NO: 1046696 - RNA, 21 nt, Human
ccucccaccagacccugcucc

SEQ ID NO: 1046697 - RNA, 24 nt, Human
ccucccagguucaacggauucucc

SEQ ID NO: 1046698 - RNA, 23 nt, Human
ccuccuccuucccuuuccuccca

SEQ ID NO: 1046699 - RNA, 19 nt, Human
ccuccuucccuuuccuccc

SEQ ID NO: 1046700 - RNA, 19 nt, Human
ccucgcccagccuggauga

SEQ ID NO: 1046701 - RNA, 26 nt, Human
ccucuggaagaaccacugaaagcgag

SEQ ID NO: 1046702 - RNA, 22 nt, Human
ccugaccucaggugaucugccc

SEQ ID NO: 1046703 - RNA, 19 nt, Human
ccugggauguccuucuccc

SEQ ID NO: 1046704 - RNA, 19 nt, Human
ccuucugccccaccccugu

SEQ ID NO: 1046705 - RNA, 23 nt, Human
ccuucugccccaccccuguagcc

SEQ ID NO: 1046706 - RNA, 21 nt, Human
cgggauuacaggcaccugcca

SEQ ID NO: 1046707 - RNA, 22 nt, Human
cgggauuacaggcaccugccac

SEQ ID NO: 1046708 - RNA, 24 nt, Human
cgggauuacaggcaccugccacca

SEQ ID NO: 1046709 - RNA, 22 nt, Human
cggguuucgucauguuggccag

SEQ ID NO: 1046710 - RNA, 23 nt, Human
cggguuucgucauguuggccagg

SEQ ID NO: 1046711 - RNA, 27 nt, Human
cgucauguuggccaggcuggucuaaaa

SEQ ID NO: 1046712 - RNA, 21 nt, Human
cucccaaacuacugggauuac

SEQ ID NO: 1046713 - RNA, 21 nt, Human
cucccacaugcuagacuucag

SEQ ID NO: 1046714 - RNA, 21 nt, Human
cucccaccucggccuucugaa

SEQ ID NO: 1046715 - RNA, 23 nt, Human
cucccagguucaacggauucucc

SEQ ID NO: 1046716 - RNA, 26 nt, Human
cuccugaccucaggugaucugcccgc

SEQ ID NO: 1046717 - RNA, 23 nt, Human
cuccugggcagccuuagccuccu

SEQ ID NO: 1046718 - RNA, 18 nt, Human
cuccuuggaccacuggcg

SEQ ID NO: 1046719 - RNA, 24 nt, Human
cuggacugaggccucuuugcaagc

SEQ ID NO: 1046720 - RNA, 27 nt, Human
cuuccagucccuucucuuaggggccgc

SEQ ID NO: 1046721 - RNA, 24 nt, Human
cuucugaauagccgggauuacagg

SEQ ID NO: 1046722 - RNA, 24 nt, Human
gaagcccuggagguuaccagcucc

SEQ ID NO: 1046723 - RNA, 25 nt, Human
gaauagccgggauuacaggcaccug

SEQ ID NO: 1046724 - RNA, 24 nt, Human
gacccuguuuucucuuccaguccc

SEQ ID NO: 1046725 - RNA, 23 nt, Human
gaccucaggugaucugcccgccu

SEQ ID NO: 1046726 - RNA, 24 nt, Human
gauuacaggcaccugccaccaugc

SEQ ID NO: 1046727 - RNA, 18 nt, Human
gauuacaggcgugagcca

SEQ ID NO: 1046728 - RNA, 20 nt, Human
gauuacaggcgugagccacc

SEQ ID NO: 1046729 - RNA, 20 nt, Human
gauuacaggcgugagccacc

SEQ ID NO: 1046730 - RNA, 21 nt, Human
gcacuuuugacaucugggguc

SEQ ID NO: 1046731 - RNA, 18 nt, Human
gccuccuccuucccuuuc

SEQ ID NO: 1046732 - RNA, 24 nt, Human
gccugguauccaaggccuccuggg

SEQ ID NO: 1046733 - RNA, 23 nt, Human
gcuggucuaaaacuccugaccuc

SEQ ID NO: 1046734 - RNA, 21 nt, Human
ggauucucccaccucggccuu

SEQ ID NO: 1046735 - RNA, 24 nt, Human
ggcuggucuaaaacuccugaccuc

SEQ ID NO: 1046736 - RNA, 23 nt, Human
gggauuacaggcaccugccacca

SEQ ID NO: 1046737 - RNA, 24 nt, Human
gggauuacaggcaccugccaccau

SEQ ID NO: 1046738 - RNA, 22 nt, Human
ggggcagagaaaugcccagcuc

SEQ ID NO: 1046739 - RNA, 23 nt, Human
guauccaaggccuccugggcagc

SEQ ID NO: 1046740 - RNA, 20 nt, Human
gugcauccgcuccaccccca

SEQ ID NO: 1046741 - RNA, 23 nt, Human
uaaaaagaaaaaaguuggggggc

SEQ ID NO: 1046742 - RNA, 24 nt, Human
uaaaaagaaaaaaguuggggggca

SEQ ID NO: 1046743 - RNA, 24 nt, Human
uaauuuuuguauuuuuaguagaga

SEQ ID NO: 1046744 - RNA, 22 nt, Human
uacaggcaccugccaccaugcc

SEQ ID NO: 1046745 - RNA, 18 nt, Human
uacaggcgugagccaccu

SEQ ID NO: 1046746 - RNA, 25 nt, Human
uaccucccccuguugggacgacccu

SEQ ID NO: 1046747 - RNA, 24 nt, Human
uacugggauuacaggcgugagcca

SEQ ID NO: 1046748 - RNA, 24 nt, Human
uaguagagaccggguuucgucaug

SEQ ID NO: 1046749 - RNA, 19 nt, Human
uaucuuguccccuuuccuu

SEQ ID NO: 1046750 - RNA, 27 nt, Human
uaucuuguccccuuuccuucugcccca

SEQ ID NO: 1046751 - RNA, 23 nt, Human
ucacaaccuccgccucccagguu

SEQ ID NO: 1046752 - RNA, 24 nt, Human
ucacaaccuccgccucccagguuc

SEQ ID NO: 1046753 - RNA, 26 nt, Human
ucagccucccacaugcuagacuucag

SEQ ID NO: 1046754 - RNA, 19 nt, Human
ucaggugucuguugaacuu

SEQ ID NO: 1046755 - RNA, 22 nt, Human
ucaguacugagauccaucaagu

SEQ ID NO: 1046756 - RNA, 24 nt, Human
ucaucacaaccuccgccucccagg

SEQ ID NO: 1046757 - RNA, 25 nt, Human
ucaucacaaccuccgccucccaggu

SEQ ID NO: 1046758 - RNA, 27 nt, Human
ucaucccgcucuccuggaagccacuca

SEQ ID NO: 1046759 - RNA, 22 nt, Human
uccacccccacccucacauccu

SEQ ID NO: 1046760 - RNA, 19 nt, Human
uccagucccuucucuuagc

SEQ ID NO: 1046761 - RNA, 24 nt, Human
ucccaaacuacugggauuacaggc

SEQ ID NO: 1046762 - RNA, 21 nt, Human
ucccagguucaacggauucuc

SEQ ID NO: 1046763 - RNA, 22 nt, Human
ucccauuaccaccacaaaaucg

SEQ ID NO: 1046764 - RNA, 21 nt, Human
uccgcuccacccccacccuca

SEQ ID NO: 1046765 - RNA, 19 nt, Human
uccgggucuccuacuccag

SEQ ID NO: 1046766 - RNA, 20 nt, Human
uccuccuucccuuuccuccc

SEQ ID NO: 1046767 - RNA, 19 nt, Human
uccugggcagccuuagccu

SEQ ID NO: 1046768 - RNA, 21 nt, Human
uccuuggaccacuggcggcac

SEQ ID NO: 1046769 - RNA, 23 nt, Human
ucgcccagccuggaugaaggugu

SEQ ID NO: 1046770 - RNA, 22 nt, Human
ucgucauguuggccaggcuggu

SEQ ID NO: 1046771 - RNA, 25 nt, Human
ucuaaaacuccugaccucaggugau

SEQ ID NO: 1046772 - RNA, 23 nt, Human
ucucccauuaccaccacaaaauc

SEQ ID NO: 1046773 - RNA, 24 nt, Human
ucugaauagccgggauuacaggca

SEQ ID NO: 1046774 - RNA, 23 nt, Human
ucugucacaccaggcagaggcug

SEQ ID NO: 1046775 - RNA, 18 nt, Human
ugaccucaggugaucugc

SEQ ID NO: 1046776 - RNA, 20 nt, Human
ugaccucaggugaucugccc

SEQ ID NO: 1046777 - RNA, 24 nt, Human
ugaccucaggugaucugcccgccu

SEQ ID NO: 1046778 - RNA, 18 nt, Human
ugcaacggccgcucaaaa

SEQ ID NO: 1046779 - RNA, 24 nt, Human
ugcaguguuuagcagcguaccuga

SEQ ID NO: 1046780 - RNA, 18 nt, Human
ugcauccgcuccaccccc

SEQ ID NO: 1046781 - RNA, 20 nt, Human
ugccaggcugugacccuggu

SEQ ID NO: 1046782 - RNA, 22 nt, Human
ugccccaccccuguagccugug

SEQ ID NO: 1046783 - RNA, 20 nt, Human
uggaagaaccacugaaagcg

SEQ ID NO: 1046784 - RNA, 23 nt, Human
uggaagaaccacugaaagcgagu

SEQ ID NO: 1046785 - RNA, 21 nt, Human
uggaagccacucaggacccca

SEQ ID NO: 1046786 - RNA, 22 nt, Human
uggacugaggccucuuugcaag

SEQ ID NO: 1046787 - RNA, 22 nt, Human
uggaugaagguguuuucaaagc

SEQ ID NO: 1046788 - RNA, 18 nt, Human
uggcagggcucauggccc

SEQ ID NO: 1046789 - RNA, 24 nt, Human
uggccaggcuggucuaaaacuccu

SEQ ID NO: 1046790 - RNA, 22 nt, Human
uggcggcacuuuccuuggaccu

SEQ ID NO: 1046791 - RNA, 19 nt, Human
ugggagcugcaguguuuag

SEQ ID NO: 1046792 - RNA, 18 nt, Human
ugggauuacaggcgugag

SEQ ID NO: 1046793 - RNA, 19 nt, Human
ugggauuacaggcgugagc

SEQ ID NO: 1046794 - RNA, 21 nt, Human
ugggauuacaggcgugagcca

SEQ ID NO: 1046795 - RNA, 22 nt, Human
ugggauuacaggcgugagccac

SEQ ID NO: 1046796 - RNA, 23 nt, Human
ugggauuacaggcgugagccacc

SEQ ID NO: 1046797 - RNA, 23 nt, Human
ugggauuacaggcgugagccacc

SEQ ID NO: 1046798 - RNA, 26 nt, Human
ugggauuacaggcgugagccaccucg

SEQ ID NO: 1046799 - RNA, 27 nt, Human
ugggauuacaggcgugagccaccucgc

SEQ ID NO: 1046800 - RNA, 23 nt, Human
uggucuaaaacuccugaccucag

SEQ ID NO: 1046801 - RNA, 23 nt, Human
uguccugccuuguccuggaguug

SEQ ID NO: 1046802 - RNA, 25 nt, Human
uguuuucucuuccagucccuucucu

SEQ ID NO: 1046803 - RNA, 21 nt, Human
uuaguagagaccggguuucgu

SEQ ID NO: 1046804 - RNA, 24 nt, Human
uuaguagagaccggguuucgucau

SEQ ID NO: 1046805 - RNA, 23 nt, Human
uucccagcuccauccucagccuc

SEQ ID NO: 1046806 - RNA, 19 nt, Human
uuccuuggaccugcuuuau

SEQ ID NO: 1046807 - RNA, 20 nt, Human
uuggaccugcuuuauaaucu

SEQ ID NO: 1046808 - RNA, 23 nt, Human
uuggcaguccuccgugaccuucc

SEQ ID NO: 1046809 - RNA, 24 nt, Human
uuucgucauguuggccaggcuggu

SEQ ID NO: 1046810 - RNA, 22 nt, Human
uuuuccaaaauuuuacaacaaa

SEQ ID NO: 1046811 - RNA, 24 nt, Human
uuuuuaguagagaccggguuucgu

SEQ ID NO: 1046812 - RNA, 20 nt, Human
uuuuuguauuuuuaguagag

SEQ ID NO: 1046813 - RNA, 20 nt, Human
agcuuugguaccuggccgau

SEQ ID NO: 1046814 - RNA, 19 nt, Human
cacccaucugcccagccag

SEQ ID NO: 1046815 - RNA, 24 nt, Human
ccagccaaucagagucuccagaau

SEQ ID NO: 1046816 - RNA, 21 nt, Human
gaacucacccacccaucugcc

SEQ ID NO: 1046817 - RNA, 21 nt, Human
gauggcucuggggagagggaa

SEQ ID NO: 1046818 - RNA, 23 nt, Human
gggaacucacccacccaucugcc

SEQ ID NO: 1046819 - RNA, 20 nt, Human
ucauagcaugacauccaggu

SEQ ID NO: 1046820 - RNA, 19 nt, Human
ugucaauaccaccuuccuu

SEQ ID NO: 1046821 - RNA, 20 nt, Human
cuguggguuucaccagaucc

SEQ ID NO: 1046822 - RNA, 26 nt, Human
uaacugagaauaaagcuaucaugcag

SEQ ID NO: 1046823 - RNA, 19 nt, Human
uauuauauuuauccuucca

SEQ ID NO: 1046824 - RNA, 22 nt, Human
ucagguguuucuguggguuuca

SEQ ID NO: 1046825 - RNA, 22 nt, Human
ugacuggagccuugaucaaacu

SEQ ID NO: 1046826 - RNA, 22 nt, Human
uuaaaaccagucagaaguaucc

SEQ ID NO: 1046827 - RNA, 22 nt, Human
uugaaagccacucuaccacuag

SEQ ID NO: 1046828 - RNA, 22 nt, Human
agggaaacagugcuuuccugga

SEQ ID NO: 1046829 - RNA, 20 nt, Human
uaagcagcagcucuaggaac

SEQ ID NO: 1046830 - RNA, 19 nt, Human
ugagggaaacagugcuuuc

SEQ ID NO: 1046831 - RNA, 18 nt, Human
ugauacaccacugcacac

SEQ ID NO: 1046832 - RNA, 23 nt, Human
ugauacaccacugcacacauggu

SEQ ID NO: 1046833 - RNA, 23 nt, Human
aaugaaaugaaacuucuuuuuga

SEQ ID NO: 1046834 - RNA, 21 nt, Human
aauguauaagcauauauuuua

SEQ ID NO: 1046835 - RNA, 21 nt, Human
acagucauugcauucaaaagg

SEQ ID NO: 1046836 - RNA, 20 nt, Human
agaaacacugucaugcccau

SEQ ID NO: 1046837 - RNA, 26 nt, Human
caaaagguuuuuuccuuguaugauuu

SEQ ID NO: 1046838 - RNA, 27 nt, Human
caaagggucucucuccauuaugaauuu

SEQ ID NO: 1046839 - RNA, 19 nt, Human
cagaaacacugucaugccc

SEQ ID NO: 1046840 - RNA, 18 nt, Human
cagaacaugauuggcauu

SEQ ID NO: 1046841 - RNA, 19 nt, Human
cagaauacaagugccuuuc

SEQ ID NO: 1046842 - RNA, 21 nt, Human
cauuaugaauuuucugaugag

SEQ ID NO: 1046843 - RNA, 23 nt, Human
cccacaaucauugcacacaaagg

SEQ ID NO: 1046844 - RNA, 20 nt, Human
ccucaacugaauacuuacug

SEQ ID NO: 1046845 - RNA, 24 nt, Human
cuucccacaaucauugcacacaaa

SEQ ID NO: 1046846 - RNA, 24 nt, Human
cuucucauauucauaaagugaaua

SEQ ID NO: 1046847 - RNA, 23 nt, Human
guaauacagaauacaagugccuu

SEQ ID NO: 1046848 - RNA, 23 nt, Human
gugccagcaaauggaugaaaaua

SEQ ID NO: 1046849 - RNA, 22 nt, Human
gugccuuucucuccucaauuag

SEQ ID NO: 1046850 - RNA, 20 nt, Human
uaaauuagguggcaaacacu

SEQ ID NO: 1046851 - RNA, 19 nt, Human
uaauaaggccuucucauau

SEQ ID NO: 1046852 - RNA, 20 nt, Human
uagcaaauauuuaauaaggc

SEQ ID NO: 1046853 - RNA, 21 nt, Human
uauuauaaaaauuaaaaguca

SEQ ID NO: 1046854 - RNA, 22 nt, Human
ucaugcccauuaaaagugccag

SEQ ID NO: 1046855 - RNA, 24 nt, Human
ugcaaggugugccuuccugcuaua

SEQ ID NO: 1046856 - RNA, 24 nt, Human
uguaaaaaguuuauuaucacuucc

SEQ ID NO: 1046857 - RNA, 21 nt, Human
ugucuaaugaaaugaaacuuc

SEQ ID NO: 1046858 - RNA, 23 nt, Human
ugucuuguuuuuuguucugguau

SEQ ID NO: 1046859 - RNA, 24 nt, Human
uuacuguaauacagaauacaagug

SEQ ID NO: 1046860 - RNA, 24 nt, Human
uuccugcuauaggcuuuuccacag

SEQ ID NO: 1046861 - RNA, 24 nt, Human
uuucccgcauucacugcauucaua

SEQ ID NO: 1046862 - RNA, 22 nt, Human
aaaaaaugaaaacaacaauacc

SEQ ID NO: 1046863 - RNA, 18 nt, Human
aaacagccacaaauaaca

SEQ ID NO: 1046864 - RNA, 21 nt, Human
aaacagccacaaauaacacag

SEQ ID NO: 1046865 - RNA, 21 nt, Human
aaaccacaauuacuuuugcac

SEQ ID NO: 1046866 - RNA, 25 nt, Human
aaacuaaacagacgcuuccucccag

SEQ ID NO: 1046867 - RNA, 22 nt, Human
aaagccuuuuugauaagggaaa

SEQ ID NO: 1046868 - RNA, 19 nt, Human
aaagcgcugggauuauagg

SEQ ID NO: 1046869 - RNA, 24 nt, Human
aaagcgcugggauuauaggcauga

SEQ ID NO: 1046870 - RNA, 20 nt, Human
aaauuucaccaacuguaccc

SEQ ID NO: 1046871 - RNA, 24 nt, Human
aacacagccugcuuuccaaaucuc

SEQ ID NO: 1046872 - RNA, 19 nt, Human
aaccuaaucaaaccaccag

SEQ ID NO: 1046873 - RNA, 21 nt, Human
aacgugcuccagucuccccua

SEQ ID NO: 1046874 - RNA, 23 nt, Human
aagccuuuuugauaagggaaaga

SEQ ID NO: 1046875 - RNA, 19 nt, Human
aagcgcugggauuauaggc

SEQ ID NO: 1046876 - RNA, 20 nt, Human
aaggagaaaacagccacaaa

SEQ ID NO: 1046877 - RNA, 22 nt, Human
aaggagaaaacagccacaaaua

SEQ ID NO: 1046878 - RNA, 23 nt, Human
aagguaggcaauaauguuagucc

SEQ ID NO: 1046879 - RNA, 20 nt, Human
aaguagcugggauuacaggc

SEQ ID NO: 1046880 - RNA, 26 nt, Human
aaguagcugggauuacaggcgccugc

SEQ ID NO: 1046881 - RNA, 19 nt, Human
aaucuccaaagcacaucuc

SEQ ID NO: 1046882 - RNA, 19 nt, Human
aaugaagcacauuccugca

SEQ ID NO: 1046883 - RNA, 20 nt, Human
acagacaggguuucgccaug

SEQ ID NO: 1046884 - RNA, 18 nt, Human
acaggguuucgccauguu

SEQ ID NO: 1046885 - RNA, 21 nt, Human
acaggguuucgccauguuggc

SEQ ID NO: 1046886 - RNA, 24 nt, Human
acaggguuucgccauguuggccag

SEQ ID NO: 1046887 - RNA, 19 nt, Human
acaugaagcuugcuacuuc

SEQ ID NO: 1046888 - RNA, 18 nt, Human
accccuucucaacucaaa

SEQ ID NO: 1046889 - RNA, 18 nt, Human
acccugaggugugggagg

SEQ ID NO: 1046890 - RNA, 20 nt, Human
accucagccuuccaaguagc

SEQ ID NO: 1046891 - RNA, 23 nt, Human
acuccaccuuuuguuuuagaaaa

SEQ ID NO: 1046892 - RNA, 24 nt, Human
acucuguugcccaggcuggagugc

SEQ ID NO: 1046893 - RNA, 22 nt, Human
acugcagccuccaucucccagg

SEQ ID NO: 1046894 - RNA, 22 nt, Human
acugcagcuaaugaagcacauu

SEQ ID NO: 1046895 - RNA, 22 nt, Human
agaaaacagccacaaauaacac

SEQ ID NO: 1046896 - RNA, 18 nt, Human
agacaggguuucgccaug

SEQ ID NO: 1046897 - RNA, 25 nt, Human
agagaaguaagcaauauuuuuacaa

SEQ ID NO: 1046898 - RNA, 23 nt, Human
agaugucuauggggcaucuagga

SEQ ID NO: 1046899 - RNA, 19 nt, Human
agauuacaaacgugcucca

SEQ ID NO: 1046900 - RNA, 18 nt, Human
agcaaagagaacagacag

SEQ ID NO: 1046901 - RNA, 19 nt, Human
agcaaaugcaaagaaguaa

SEQ ID NO: 1046902 - RNA, 18 nt, Human
agccacaaauaacacagc

SEQ ID NO: 1046903 - RNA, 19 nt, Human
agccacaaauaacacagcc

SEQ ID NO: 1046904 - RNA, 18 nt, Human
agccucacuuuucucaug

SEQ ID NO: 1046905 - RNA, 19 nt, Human
agccucaggcucccauuug

SEQ ID NO: 1046906 - RNA, 18 nt, Human
agcgcugggauuauaggc

SEQ ID NO: 1046907 - RNA, 22 nt, Human
aggcagcaccagcgcacugcag

SEQ ID NO: 1046908 - RNA, 25 nt, Human
aggcuggagugcagugguacaaucu

SEQ ID NO: 1046909 - RNA, 20 nt, Human
aggcuuucagccagagagcc

SEQ ID NO: 1046910 - RNA, 22 nt, Human
agguaucagcuccuccaggaag

SEQ ID NO: 1046911 - RNA, 20 nt, Human
aguaauggcaaaaaccacaa

SEQ ID NO: 1046912 - RNA, 20 nt, Human
agugcagugguacaaucuug

SEQ ID NO: 1046913 - RNA, 24 nt, Human
agugcagugguacaaucuuggcuu

SEQ ID NO: 1046914 - RNA, 19 nt, Human
auacuguacauccacaacc

SEQ ID NO: 1046915 - RNA, 25 nt, Human
auagagcaaagagaacagacagggg

SEQ ID NO: 1046916 - RNA, 18 nt, Human
aucacccuuucaccaugu

SEQ ID NO: 1046917 - RNA, 26 nt, Human
aucacccuuucaccauguugggugaa

SEQ ID NO: 1046918 - RNA, 18 nt, Human
aucucuccccuucuacca

SEQ ID NO: 1046919 - RNA, 24 nt, Human
caaagcgcugggauuauaggcaug

SEQ ID NO: 1046920 - RNA, 24 nt, Human
caaaugcaaagaaguaauauauua

SEQ ID NO: 1046921 - RNA, 23 nt, Human
caaccagucacucaacuauccaa

SEQ ID NO: 1046922 - RNA, 23 nt, Human
caaccucguaggcucccaagccc

SEQ ID NO: 1046923 - RNA, 19 nt, Human
caacgcagaaggucuucca

SEQ ID NO: 1046924 - RNA, 24 nt, Human
caacuaucaccacugaaggcuuuc

SEQ ID NO: 1046925 - RNA, 25 nt, Human
caacuguaccccuucucaacucaaa

SEQ ID NO: 1046926 - RNA, 27 nt, Human
caagcgauucucauaccucagccuucc

SEQ ID NO: 1046927 - RNA, 21 nt, Human
caagcuuccuucccuucagca

SEQ ID NO: 1046928 - RNA, 21 nt, Human
cacaugcaucaaggagaaaac

SEQ ID NO: 1046929 - RNA, 24 nt, Human
cacauuccugcaggccugucuccu

SEQ ID NO: 1046930 - RNA, 21 nt, Human
caccaaccuaaucaaaccacc

SEQ ID NO: 1046931 - RNA, 22 nt, Human
cacucuguugcccaggcuggag

SEQ ID NO: 1046932 - RNA, 24 nt, Human
cagagucucacucuguugcccagg

SEQ ID NO: 1046933 - RNA, 24 nt, Human
cagauaucuccacuucuggguuuu

SEQ ID NO: 1046934 - RNA, 24 nt, Human
cagccagcaucagccaucacccaa

SEQ ID NO: 1046935 - RNA, 22 nt, Human
cagccaucacccaaacucaaaa

SEQ ID NO: 1046936 - RNA, 23 nt, Human
cagccuccaucucccagguucaa

SEQ ID NO: 1046937 - RNA, 22 nt, Human
cagcgaaccacauuccccagaa

SEQ ID NO: 1046938 - RNA, 25 nt, Human
caggcgccugccaucauaucugggg

SEQ ID NO: 1046939 - RNA, 24 nt, Human
caggguuucgccauguuggccagg

SEQ ID NO: 1046940 - RNA, 20 nt, Human
cagugaacgaacuccaccuu

SEQ ID NO: 1046941 - RNA, 21 nt, Human
cauaucuggcuaauuuuugua

SEQ ID NO: 1046942 - RNA, 18 nt, Human
caucaaggagaaaacagc

SEQ ID NO: 1046943 - RNA, 24 nt, Human
caucaaggagaaaacagccacaaa

SEQ ID NO: 1046944 - RNA, 20 nt, Human
caugcaucaaggagaaaaca

SEQ ID NO: 1046945 - RNA, 23 nt, Human
cauguuggccaggcugguuucaa

SEQ ID NO: 1046946 - RNA, 21 nt, Human
ccaaagcacaucucugcaauc

SEQ ID NO: 1046947 - RNA, 24 nt, Human
ccaaagcgcugggauuauaggcau

SEQ ID NO: 1046948 - RNA, 22 nt, Human
ccaaguagcugggauuacaggc

SEQ ID NO: 1046949 - RNA, 23 nt, Human
ccacagcgaaccacauuccccag

SEQ ID NO: 1046950 - RNA, 24 nt, Human
ccaccaggacuugguuggcugagg

SEQ ID NO: 1046951 - RNA, 25 nt, Human
ccagcaucagccaucacccaaacuc

SEQ ID NO: 1046952 - RNA, 19 nt, Human
ccagggcgguaguuccucu

SEQ ID NO: 1046953 - RNA, 24 nt, Human
ccagggcgguaguuccucugaaga

SEQ ID NO: 1046954 - RNA, 23 nt, Human
ccaugggaaaaucuagcacagcc

SEQ ID NO: 1046955 - RNA, 19 nt, Human
ccauguuggccaggcuggu

SEQ ID NO: 1046956 - RNA, 18 nt, Human
ccccacuuccuugagucu

SEQ ID NO: 1046957 - RNA, 19 nt, Human
cccugguagcugcuguugg

SEQ ID NO: 1046958 - RNA, 18 nt, Human
cccuucuccccuugcuuu

SEQ ID NO: 1046959 - RNA, 19 nt, Human
ccggccucaaccuuuucau

SEQ ID NO: 1046960 - RNA, 20 nt, Human
ccuaaacugagagcgccagc

SEQ ID NO: 1046961 - RNA, 21 nt, Human
ccucaucuccagcuacucucc

SEQ ID NO: 1046962 - RNA, 21 nt, Human
ccucgcgccucugggccacag

SEQ ID NO: 1046963 - RNA, 21 nt, Human
ccugaccucaggugaucugcc

SEQ ID NO: 1046964 - RNA, 23 nt, Human
ccugaccucaggugaucugccug

SEQ ID NO: 1046965 - RNA, 20 nt, Human
ccugccaguguccucuacuc

SEQ ID NO: 1046966 - RNA, 21 nt, Human
ccugccucgaccucccaaagc

SEQ ID NO: 1046967 - RNA, 22 nt, Human
ccuugaguaaguuacuauaccu

SEQ ID NO: 1046968 - RNA, 22 nt, Human
ccuugagucuucuacauuccuc

SEQ ID NO: 1046969 - RNA, 18 nt, Human
ccuugaguuccuagcugg

SEQ ID NO: 1046970 - RNA, 24 nt, Human
cgccauguuggccaggcugguuuc

SEQ ID NO: 1046971 - RNA, 31 nt, Human
cgccauguuggccaggcugguuucaaacucc

SEQ ID NO: 1046972 - RNA, 20 nt, Human
cuaauuuuuguauuuuuaga

SEQ ID NO: 1046973 - RNA, 19 nt, Human
cucaagacccuucaaaccu

SEQ ID NO: 1046974 - RNA, 24 nt, Human
cucacucuguugcccaggcuggag

SEQ ID NO: 1046975 - RNA, 23 nt, Human
cucagccuuccaaguagcuggga

SEQ ID NO: 1046976 - RNA, 18 nt, Human
cucagugugugggcaaga

SEQ ID NO: 1046977 - RNA, 26 nt, Human
cuccugaccucaggugaucugccugc

SEQ ID NO: 1046978 - RNA, 23 nt, Human
cuccugccucaucuccagcuacu

SEQ ID NO: 1046979 - RNA, 23 nt, Human
cugcagccuccaucucccagguu

SEQ ID NO: 1046980 - RNA, 22 nt, Human
cuguacauccacaaccagucac

SEQ ID NO: 1046981 - RNA, 21 nt, Human
cuuacugcagccuccaucucc

SEQ ID NO: 1046982 - RNA, 24 nt, Human
cuucaaaucagucuaacgccuuca

SEQ ID NO: 1046983 - RNA, 20 nt, Human
cuuccugucucccuacccca

SEQ ID NO: 1046984 - RNA, 19 nt, Human
cuugguuggcugagggugg

SEQ ID NO: 1046985 - RNA, 22 nt, Human
cuuucagauuacaaacgugcuc

SEQ ID NO: 1046986 - RNA, 24 nt, Human
cuuucagccagagagcaauuuguu

SEQ ID NO: 1046987 - RNA, 18 nt, Human
cuuuucaacucaucuucc

SEQ ID NO: 1046988 - RNA, 18 nt, Human
gaacggcagagacaggcc

SEQ ID NO: 1046989 - RNA, 24 nt, Human
gaccucaggugaucugccugccuc

SEQ ID NO: 1046990 - RNA, 20 nt, Human
gacuugguuggcugagggug

SEQ ID NO: 1046991 - RNA, 20 nt, Human
gagaaaacagccacaaauaa

SEQ ID NO: 1046992 - RNA, 21 nt, Human
gagauagacaauaaagaaaua

SEQ ID NO: 1046993 - RNA, 20 nt, Human
gagccucacuuuucucaugg

SEQ ID NO: 1046994 - RNA, 20 nt, Human
gagccucacuuuucucaugu

SEQ ID NO: 1046995 - RNA, 21 nt, Human
gagugucuggcuugcugguac

SEQ ID NO: 1046996 - RNA, 18 nt, Human
gauuacaggcgccugcca

SEQ ID NO: 1046997 - RNA, 24 nt, Human
gauuacaggcgccugccaucauau

SEQ ID NO: 1046998 - RNA, 18 nt, Human
gauuauaggcaugaacca

SEQ ID NO: 1046999 - RNA, 23 nt, Human
gauuauaggcaugaaccaaugca

SEQ ID NO: 1047000 - RNA, 19 nt, Human
gauucucauaccucagccu

SEQ ID NO: 1047001 - RNA, 22 nt, Human
gcagccuccaucucccagguuc

SEQ ID NO: 1047002 - RNA, 20 nt, Human
gcccaggcuggagugcagug

SEQ ID NO: 1047003 - RNA, 21 nt, Human
gccucugggccacagcgaacc

SEQ ID NO: 1047004 - RNA, 22 nt, Human
gcuccgaguuacuucucagugu

SEQ ID NO: 1047005 - RNA, 28 nt, Human
gcucugggaagaagggguaguuggcugg

SEQ ID NO: 1047006 - RNA, 23 nt, Human
gcugguuucaaacuccugaccuc

SEQ ID NO: 1047007 - RNA, 21 nt, Human
gcuuacugcagccuccaucuc

SEQ ID NO: 1047008 - RNA, 21 nt, Human
ggcccagggcuggaaccgucc

SEQ ID NO: 1047009 - RNA, 24 nt, Human
ggcugguuucaaacuccugaccuc

SEQ ID NO: 1047010 - RNA, 18 nt, Human
gggaagaagggguaguug

SEQ ID NO: 1047011 - RNA, 23 nt, Human
gggaagaagggguaguuggcugg

SEQ ID NO: 1047012 - RNA, 21 nt, Human
ggggucuaggcugacuccuug

SEQ ID NO: 1047013 - RNA, 22 nt, Human
ggguuucgccauguuggccagg

SEQ ID NO: 1047014 - RNA, 18 nt, Human
gugaucugccugccucga

SEQ ID NO: 1047015 - RNA, 23 nt, Human
uaaucuaauccccacuuccuuga

SEQ ID NO: 1047016 - RNA, 24 nt, Human
uaauuuuuguauuuuuaguacaga

SEQ ID NO: 1047017 - RNA, 22 nt, Human
uacagacaggguuucgccaugu

SEQ ID NO: 1047018 - RNA, 22 nt, Human
uaccacagugcugggcccaggg

SEQ ID NO: 1047019 - RNA, 19 nt, Human
uaccccuucucaacucaaa

SEQ ID NO: 1047020 - RNA, 24 nt, Human
uaccucagccuuccaaguagcugg

SEQ ID NO: 1047021 - RNA, 18 nt, Human
uacuuuuuucuacugcag

SEQ ID NO: 1047022 - RNA, 19 nt, Human
uacuuuuuucuacugcagu

SEQ ID NO: 1047023 - RNA, 22 nt, Human
uagcaaccguauggcgcuuccu

SEQ ID NO: 1047024 - RNA, 20 nt, Human
uaggcaugaaccaaugcacc

SEQ ID NO: 1047025 - RNA, 18 nt, Human
uagggcucuccgaauccu

SEQ ID NO: 1047026 - RNA, 19 nt, Human
uagggcucuccgaauccuc

SEQ ID NO: 1047027 - RNA, 24 nt, Human
uaguacagacaggguuucgccaug

SEQ ID NO: 1047028 - RNA, 18 nt, Human
uauaacagggaacagaac

SEQ ID NO: 1047029 - RNA, 21 nt, Human
uauacaccuaccccacagaau

SEQ ID NO: 1047030 - RNA, 21 nt, Human
uauauaaagauccagguaaag

SEQ ID NO: 1047031 - RNA, 22 nt, Human
ucaaauagacccggauuuugaa

SEQ ID NO: 1047032 - RNA, 23 nt, Human
ucaaaucagucuaacgccuucac

SEQ ID NO: 1047033 - RNA, 21 nt, Human
ucaacucaucuuccuuuuuuu

SEQ ID NO: 1047034 - RNA, 23 nt, Human
ucaccaacuguaccccuucucaa

SEQ ID NO: 1047035 - RNA, 24 nt, Human
ucacucuguugcccaggcuggagu

SEQ ID NO: 1047036 - RNA, 25 nt, Human
ucaguauacaccuaccccacagaau

SEQ ID NO: 1047037 - RNA, 20 nt, Human
uccaaaucuccaaagcacau

SEQ ID NO: 1047038 - RNA, 23 nt, Human
uccaaguagcugggauuacaggc

SEQ ID NO: 1047039 - RNA, 23 nt, Human
uccaaguagcugggauuacaggc

SEQ ID NO: 1047040 - RNA, 24 nt, Human
uccaaguagcugggauuacaggcg

SEQ ID NO: 1047041 - RNA, 24 nt, Human
ucccaaagcgcugggauuauaggc

SEQ ID NO: 1047042 - RNA, 19 nt, Human
ucccagguucaagcgauuc

SEQ ID NO: 1047043 - RNA, 21 nt, Human
ucccagguucaagcgauucuc

SEQ ID NO: 1047044 - RNA, 21 nt, Human
uccccuauccaaacuccugcc

SEQ ID NO: 1047045 - RNA, 19 nt, Human
uccuaaguuagcagaacuc

SEQ ID NO: 1047046 - RNA, 22 nt, Human
ucgccauguuggccaggcuggu

SEQ ID NO: 1047047 - RNA, 24 nt, Human
ucgccauguuggccaggcugguuu

SEQ ID NO: 1047048 - RNA, 25 nt, Human
ucuaaaaaaugaaaacaacaauacc

SEQ ID NO: 1047049 - RNA, 19 nt, Human
ucuacagagcccuaaacug

SEQ ID NO: 1047050 - RNA, 23 nt, Human
ucuaccagcucuuuccuuucaga

SEQ ID NO: 1047051 - RNA, 22 nt, Human
ucuauuaacuaacauuccccua

SEQ ID NO: 1047052 - RNA, 23 nt, Human
ucucacucuguugcccaggcugg

SEQ ID NO: 1047053 - RNA, 24 nt, Human
ucucacucuguugcccaggcugga

SEQ ID NO: 1047054 - RNA, 26 nt, Human
ucucacucuguugcccaggcuggagu

SEQ ID NO: 1047055 - RNA, 27 nt, Human
ucucacucuguugcccaggcuggagug

SEQ ID NO: 1047056 - RNA, 22 nt, Human
ucucccagguucaagcgauucu

SEQ ID NO: 1047057 - RNA, 18 nt, Human
ucugcacaugcaucaagg

SEQ ID NO: 1047058 - RNA, 18 nt, Human
ucuguugcccaggcugga

SEQ ID NO: 1047059 - RNA, 24 nt, Human
ucuguugcccaggcuggagugcag

SEQ ID NO: 1047060 - RNA, 28 nt, Human
ucuuccacauagccuauuaacacaaaag

SEQ ID NO: 1047061 - RNA, 26 nt, Human
ucuucuacagagcccuaaacugagag

SEQ ID NO: 1047062 - RNA, 23 nt, Human
ucuuuaaacaugaagcuugcuac

SEQ ID NO: 1047063 - RNA, 21 nt, Human
ugaaauauaguaguaacuuca

SEQ ID NO: 1047064 - RNA, 21 nt, Human
ugaaaucauccaaggcaacca

SEQ ID NO: 1047065 - RNA, 21 nt, Human
ugaaggcuuucagccagagag

SEQ ID NO: 1047066 - RNA, 18 nt, Human
ugaccucaggugaucugc

SEQ ID NO: 1047067 - RNA, 20 nt, Human
ugaccucaggugaucugccu

SEQ ID NO: 1047068 - RNA, 24 nt, Human
ugaccucaggugaucugccugccu

SEQ ID NO: 1047069 - RNA, 21 nt, Human
ugacuccuugaguuccuagcu

SEQ ID NO: 1047070 - RNA, 23 nt, Human
ugagaguagaugaaaucauccaa

SEQ ID NO: 1047071 - RNA, 21 nt, Human
ugcaacuggaacagcaaaugc

SEQ ID NO: 1047072 - RNA, 18 nt, Human
ugcccaggcuggagugca

SEQ ID NO: 1047073 - RNA, 21 nt, Human
ugcccaggcuggagugcagug

SEQ ID NO: 1047074 - RNA, 21 nt, Human
ugcccaggcuggagugcagug

SEQ ID NO: 1047075 - RNA, 22 nt, Human
ugcccaggcuggagugcagugg

SEQ ID NO: 1047076 - RNA, 24 nt, Human
ugccucgaccucccaaagcgcugg

SEQ ID NO: 1047077 - RNA, 21 nt, Human
ugccugccucgaccucccaaa

SEQ ID NO: 1047078 - RNA, 24 nt, Human
ugcucaagacccuucaaaccugau

SEQ ID NO: 1047079 - RNA, 21 nt, Human
uggaacagcaaaugcaaagaa

SEQ ID NO: 1047080 - RNA, 24 nt, Human
uggaacagcaaaugcaaagaagua

SEQ ID NO: 1047081 - RNA, 21 nt, Human
uggaaugucaucagcauguaa

SEQ ID NO: 1047082 - RNA, 23 nt, Human
uggagugcagugguacaaucuug

SEQ ID NO: 1047083 - RNA, 24 nt, Human
uggagugcagugguacaaucuugg

SEQ ID NO: 1047084 - RNA, 21 nt, Human
uggcauauucacagugaaauc

SEQ ID NO: 1047085 - RNA, 24 nt, Human
uggccaggcugguuucaaacuccu

SEQ ID NO: 1047086 - RNA, 24 nt, Human
uggcugagggugggagaugugggg

SEQ ID NO: 1047087 - RNA, 18 nt, Human
ugggagauguggggucua

SEQ ID NO: 1047088 - RNA, 21 nt, Human
ugggaggcuucgggccaguuc

SEQ ID NO: 1047089 - RNA, 19 nt, Human
ugggauuacaggcgccugc

SEQ ID NO: 1047090 - RNA, 21 nt, Human
ugggauuacaggcgccugcca

SEQ ID NO: 1047091 - RNA, 21 nt, Human
ugggauuacaggcgccugcca

SEQ ID NO: 1047092 - RNA, 22 nt, Human
ugggauuacaggcgccugccau

SEQ ID NO: 1047093 - RNA, 24 nt, Human
ugggauuacaggcgccugccauca

SEQ ID NO: 1047094 - RNA, 19 nt, Human
ugggauuauaggcaugaac

SEQ ID NO: 1047095 - RNA, 21 nt, Human
ugggauuauaggcaugaacca

SEQ ID NO: 1047096 - RNA, 21 nt, Human
ugggauuauaggcaugaacca

SEQ ID NO: 1047097 - RNA, 21 nt, Human
ugggauuauaggcaugaacca

SEQ ID NO: 1047098 - RNA, 24 nt, Human
ugggauuauaggcaugaaccaaug

SEQ ID NO: 1047099 - RNA, 31 nt, Human
ugggauuauaggcaugaaccaaugcacccgg

SEQ ID NO: 1047100 - RNA, 21 nt, Human
uggggaaagagcauugcaacu

SEQ ID NO: 1047101 - RNA, 25 nt, Human
uggggaaagagcauugcaacuggaa

SEQ ID NO: 1047102 - RNA, 25 nt, Human
ugggggcucuggagaccaacgcaga

SEQ ID NO: 1047103 - RNA, 21 nt, Human
ugggugagagaaguaagcaau

SEQ ID NO: 1047104 - RNA, 23 nt, Human
ugggugagagaaguaagcaauau

SEQ ID NO: 1047105 - RNA, 26 nt, Human
ugguagcugcuguuggcgcccuccag

SEQ ID NO: 1047106 - RNA, 22 nt, Human
ugguuggcugagggugggagau

SEQ ID NO: 1047107 - RNA, 23 nt, Human
ugucccaggcucuguuccagaug

SEQ ID NO: 1047108 - RNA, 27 nt, Human
ugucucccuaccccagcuucucuucca

SEQ ID NO: 1047109 - RNA, 21 nt, Human
ugugcguucuguuaggcagca

SEQ ID NO: 1047110 - RNA, 22 nt, Human
uguuagucccgucccuucuccc

SEQ ID NO: 1047111 - RNA, 24 nt, Human
uuacugcagccuccaucucccagg

SEQ ID NO: 1047112 - RNA, 20 nt, Human
uuagaaguaauggcaaaaac

SEQ ID NO: 1047113 - RNA, 22 nt, Human
uuagaugcuuauacuguacauc

SEQ ID NO: 1047114 - RNA, 24 nt, Human
uuagcagaacucuuugguucuuua

SEQ ID NO: 1047115 - RNA, 24 nt, Human
uuaguacagacaggguuucgccau

SEQ ID NO: 1047116 - RNA, 23 nt, Human
uucaagcgauucucauaccucag

SEQ ID NO: 1047117 - RNA, 24 nt, Human
uucaagcgauucucauaccucagc

SEQ ID NO: 1047118 - RNA, 19 nt, Human
uucauuuuaacauauauau

SEQ ID NO: 1047119 - RNA, 21 nt, Human
uucauuuuuaacagacuguag

SEQ ID NO: 1047120 - RNA, 24 nt, Human
uuccaaaucuccaaagcacaucuc

SEQ ID NO: 1047121 - RNA, 24 nt, Human
uuccaaguagcugggauuacaggc

SEQ ID NO: 1047122 - RNA, 18 nt, Human
uuccccuauccaaacucc

SEQ ID NO: 1047123 - RNA, 18 nt, Human
uuccucugaagaaacucc

SEQ ID NO: 1047124 - RNA, 18 nt, Human
uugaaggugauguuucug

SEQ ID NO: 1047125 - RNA, 19 nt, Human
uugaaggugauguuucugu

SEQ ID NO: 1047126 - RNA, 27 nt, Human
uuuaagacugaacacagguaucagcuc

SEQ ID NO: 1047127 - RNA, 25 nt, Human
uuucauuuuaacauauauauguaug

SEQ ID NO: 1047128 - RNA, 24 nt, Human
uuucgccauguuggccaggcuggu

SEQ ID NO: 1047129 - RNA, 25 nt, Human
uuuuaaauuucaccaacuguacccc

SEQ ID NO: 1047130 - RNA, 23 nt, Human
uuuuuaguacagacaggguuucg

SEQ ID NO: 1047131 - RNA, 24 nt, Human
uuuuuaguacagacaggguuucgc

SEQ ID NO: 1047132 - RNA, 20 nt, Human
uuuuuguauuuuuaguacag

SEQ ID NO: 1047133 - RNA, 23 nt, Human
uuuuuguauuuuuaguacagaca

SEQ ID NO: 1047134 - RNA, 24 nt, Human
aaagaauaaaaaauaaaggcaccc

SEQ ID NO: 1047135 - RNA, 24 nt, Human
aaaggcacccggaacuucccccac

SEQ ID NO: 1047136 - RNA, 20 nt, Human
aaagugccuguguccugcca

SEQ ID NO: 1047137 - RNA, 20 nt, Human
aaugcuuuuauauuaguuuu

SEQ ID NO: 1047138 - RNA, 18 nt, Human
acccggaacuucccccac

SEQ ID NO: 1047139 - RNA, 21 nt, Human
acccggaacuucccccacagg

SEQ ID NO: 1047140 - RNA, 19 nt, Human
acgcggcgaggcaggccac

SEQ ID NO: 1047141 - RNA, 19 nt, Human
acuccugccccaaggcccc

SEQ ID NO: 1047142 - RNA, 22 nt, Human
acuccugccccaaggccccagc

SEQ ID NO: 1047143 - RNA, 20 nt, Human
aggcacccggaacuuccccc

SEQ ID NO: 1047144 - RNA, 23 nt, Human
aggccccagcagcacccaggggg

SEQ ID NO: 1047145 - RNA, 22 nt, Human
agugggggugugacagagacug

SEQ ID NO: 1047146 - RNA, 21 nt, Human
auguguguguguguggugugu

SEQ ID NO: 1047147 - RNA, 21 nt, Human
caaggccccagcagcacccag

SEQ ID NO: 1047148 - RNA, 22 nt, Human
caccaaacucuaaguugccuuc

SEQ ID NO: 1047149 - RNA, 25 nt, Human
cacccggaacuucccccacaggccu

SEQ ID NO: 1047150 - RNA, 22 nt, Human
cacuccugccccaaggccccag

SEQ ID NO: 1047151 - RNA, 18 nt, Human
cagcagggggagggaaug

SEQ ID NO: 1047152 - RNA, 25 nt, Human
cagcuggguccuuccucccuggcuc

SEQ ID NO: 1047153 - RNA, 19 nt, Human
cagcuuugagauuuuuauc

SEQ ID NO: 1047154 - RNA, 19 nt, Human
cagggggcucucccauccu

SEQ ID NO: 1047155 - RNA, 23 nt, Human
cauguguguguguguggugugua

SEQ ID NO: 1047156 - RNA, 18 nt, Human
ccacugggcuugcccauu

SEQ ID NO: 1047157 - RNA, 24 nt, Human
ccagcagcacccagggggcucucc

SEQ ID NO: 1047158 - RNA, 22 nt, Human
ccaggccaggccagcaguccug

SEQ ID NO: 1047159 - RNA, 21 nt, Human
ccauuggaaaagugccugugu

SEQ ID NO: 1047160 - RNA, 21 nt, Human
cccaaggccccagcagcaccc

SEQ ID NO: 1047161 - RNA, 24 nt, Human
ccccaaggccccagcagcacccag

SEQ ID NO: 1047162 - RNA, 28 nt, Human
ccccaucaccucugcuucacuccugccc

SEQ ID NO: 1047163 - RNA, 24 nt, Human
cccccacaggccugaagaacaaag

SEQ ID NO: 1047164 - RNA, 20 nt, Human
ccuccuccucuuccuccucc

SEQ ID NO: 1047165 - RNA, 18 nt, Human
ccuccuccuuuuccuucc

SEQ ID NO: 1047166 - RNA, 24 nt, Human
ccuccuccuuuuccuuccccaagc

SEQ ID NO: 1047167 - RNA, 18 nt, Human
ccuccucuuccuccuccu

SEQ ID NO: 1047168 - RNA, 20 nt, Human
ccuccucuuccuccuccucc

SEQ ID NO: 1047169 - RNA, 21 nt, Human
ccuccucuuccuccuccuccu

SEQ ID NO: 1047170 - RNA, 22 nt, Human
cgcacaugacuugugcaugugu

SEQ ID NO: 1047171 - RNA, 26 nt, Human
cucagcccagccccaucaccgguucc

SEQ ID NO: 1047172 - RNA, 23 nt, Human
cucagcccagccccaucaccucu

SEQ ID NO: 1047173 - RNA, 19 nt, Human
cuccuccuccuccucuucc

SEQ ID NO: 1047174 - RNA, 22 nt, Human
cuccuccucuuccuccuccucc

SEQ ID NO: 1047175 - RNA, 22 nt, Human
cugauucuggcuggggcaagag

SEQ ID NO: 1047176 - RNA, 18 nt, Human
cugcaugauucagagggc

SEQ ID NO: 1047177 - RNA, 21 nt, Human
cugccccaaggccccagcagc

SEQ ID NO: 1047178 - RNA, 18 nt, Human
cuuccuccuccuccuuuu

SEQ ID NO: 1047179 - RNA, 21 nt, Human
cuuggaaaugucaccaaacuc

SEQ ID NO: 1047180 - RNA, 19 nt, Human
cuugugcaugugugugugu

SEQ ID NO: 1047181 - RNA, 18 nt, Human
gacagauggacagggcag

SEQ ID NO: 1047182 - RNA, 20 nt, Human
gacuguggugguuuggaggg

SEQ ID NO: 1047183 - RNA, 19 nt, Human
gccccaaggccccagcagc

SEQ ID NO: 1047184 - RNA, 18 nt, Human
gcugagcuggguguuuga

SEQ ID NO: 1047185 - RNA, 18 nt, Human
gggcaagagcugucugug

SEQ ID NO: 1047186 - RNA, 18 nt, Human
gggccaggccaggccagc

SEQ ID NO: 1047187 - RNA, 20 nt, Human
gggccaggccaggccagcag

SEQ ID NO: 1047188 - RNA, 22 nt, Human
gugggccaggccaggccagcag

SEQ ID NO: 1047189 - RNA, 31 nt, Human
gugugugguguguaugcauacgcauacacag

SEQ ID NO: 1047190 - RNA, 24 nt, Human
uaaaggcacccggaacuuccccca

SEQ ID NO: 1047191 - RNA, 21 nt, Human
uagaaaagaauaaaaaauaaa

SEQ ID NO: 1047192 - RNA, 24 nt, Human
uaugcauacgcauacacaugucag

SEQ ID NO: 1047193 - RNA, 19 nt, Human
ucaauguccaagaccugca

SEQ ID NO: 1047194 - RNA, 18 nt, Human
ucaccucugcuucacucc

SEQ ID NO: 1047195 - RNA, 19 nt, Human
ucagcagggggagggaaug

SEQ ID NO: 1047196 - RNA, 18 nt, Human
uccacugggcuugcccau

SEQ ID NO: 1047197 - RNA, 27 nt, Human
ucccccacaggccugaagaacaaaggu

SEQ ID NO: 1047198 - RNA, 18 nt, Human
ucccuggcucagcccagc

SEQ ID NO: 1047199 - RNA, 19 nt, Human
ucccuggcucagcccagcc

SEQ ID NO: 1047200 - RNA, 20 nt, Human
ucccuggcucagcccagccc

SEQ ID NO: 1047201 - RNA, 24 nt, Human
ucuuccuccuccuccuccucuucc

SEQ ID NO: 1047202 - RNA, 22 nt, Human
ucuuccuccuccuccuuuuccu

SEQ ID NO: 1047203 - RNA, 18 nt, Human
ugaaggcuccugucccca

SEQ ID NO: 1047204 - RNA, 21 nt, Human
ugacuugugcaugugugugug

SEQ ID NO: 1047205 - RNA, 19 nt, Human
ugagcuggguguuugaggg

SEQ ID NO: 1047206 - RNA, 19 nt, Human
ugccccaaggccccagcag

SEQ ID NO: 1047207 - RNA, 22 nt, Human
ugccccaaggccccagcagcac

SEQ ID NO: 1047208 - RNA, 21 nt, Human
uggaaaagugccuguguccug

SEQ ID NO: 1047209 - RNA, 24 nt, Human
uggacagggcagacggcgagcugc

SEQ ID NO: 1047210 - RNA, 18 nt, Human
uggaggguaguugugugu

SEQ ID NO: 1047211 - RNA, 24 nt, Human
uggcaggcaccuggccacagagca

SEQ ID NO: 1047212 - RNA, 23 nt, Human
uggcagggagggacucuuagcag

SEQ ID NO: 1047213 - RNA, 21 nt, Human
ugggaaaggaauaaaagccag

SEQ ID NO: 1047214 - RNA, 22 nt, Human
uguaugcauacgcauacacaug

SEQ ID NO: 1047215 - RNA, 23 nt, Human
ugugaugugugugcaugugucug

SEQ ID NO: 1047216 - RNA, 20 nt, Human
ugugcaugugugugugugug

SEQ ID NO: 1047217 - RNA, 22 nt, Human
uguggugguuuggaggguaguu

SEQ ID NO: 1047218 - RNA, 18 nt, Human
ugugguguguaugcauac

SEQ ID NO: 1047219 - RNA, 19 nt, Human
ugugugccagggcaggggc

SEQ ID NO: 1047220 - RNA, 18 nt, Human
uguguggcugagcugggu

SEQ ID NO: 1047221 - RNA, 20 nt, Human
uguguggcugagcugggugu

SEQ ID NO: 1047222 - RNA, 23 nt, Human
uguguggcugagcuggguguuug

SEQ ID NO: 1047223 - RNA, 22 nt, Human
ugugugguguguaugcauacgc

SEQ ID NO: 1047224 - RNA, 18 nt, Human
uguguguguguggugugu

SEQ ID NO: 1047225 - RNA, 19 nt, Human
uguguguguguguggugug

SEQ ID NO: 1047226 - RNA, 19 nt, Human
uguguguguguguggugug

SEQ ID NO: 1047227 - RNA, 25 nt, Human
uguucgcacaugacuugugcaugug

SEQ ID NO: 1047228 - RNA, 21 nt, Human
uuccagaggguggcaggcacc

SEQ ID NO: 1047229 - RNA, 20 nt, Human
uuccuccuccuccuccucuu

SEQ ID NO: 1047230 - RNA, 27 nt, Human
uucgcacaugacuugugcaugugugug

SEQ ID NO: 1047231 - RNA, 19 nt, Human
ggaucucuccuuaccacau

SEQ ID NO: 1047232 - RNA, 21 nt, Human
uaagugacaaacccaaagccc

SEQ ID NO: 1047233 - RNA, 21 nt, Human
uccaccuccuccacaguggca

SEQ ID NO: 1047234 - RNA, 22 nt, Human
uccaccuccuccacaguggcau

SEQ ID NO: 1047235 - RNA, 20 nt, Human
ugacaaacccaaagccccuc

SEQ ID NO: 1047236 - RNA, 22 nt, Human
ugacaaacccaaagccccugga

SEQ ID NO: 1047237 - RNA, 18 nt, Human
ugcauccaccuccuccac

SEQ ID NO: 1047238 - RNA, 18 nt, Human
aaacuacccccaaccucc

SEQ ID NO: 1047239 - RNA, 19 nt, Human
aaccucccuccccugaggc

SEQ ID NO: 1047240 - RNA, 21 nt, Human
aaccucccuccccugaggcuc

SEQ ID NO: 1047241 - RNA, 22 nt, Human
aagcugggaugagguggggagg

SEQ ID NO: 1047242 - RNA, 24 nt, Human
acaagggaccuuucagcucagaca

SEQ ID NO: 1047243 - RNA, 21 nt, Human
acaccacaugacgugucugcc

SEQ ID NO: 1047244 - RNA, 19 nt, Human
acccuccucaccacccugc

SEQ ID NO: 1047245 - RNA, 19 nt, Human
acugggaaaaucauauuua

SEQ ID NO: 1047246 - RNA, 21 nt, Human
agaggccccuggaguagccuc

SEQ ID NO: 1047247 - RNA, 20 nt, Human
agcugggugaauagcugugu

SEQ ID NO: 1047248 - RNA, 23 nt, Human
aggaagagcagauucagguggca

SEQ ID NO: 1047249 - RNA, 19 nt, Human
aggcauguuaggguggagg

SEQ ID NO: 1047250 - RNA, 22 nt, Human
agggcagaugggggagguccag

SEQ ID NO: 1047251 - RNA, 19 nt, Human
agggggcaggucuggguga

SEQ ID NO: 1047252 - RNA, 22 nt, Human
agguggggaggucagcgggggc

SEQ ID NO: 1047253 - RNA, 22 nt, Human
aguagcugcuuccuuguccuug

SEQ ID NO: 1047254 - RNA, 20 nt, Human
aguggcagagggacaagcga

SEQ ID NO: 1047255 - RNA, 18 nt, Human
augacaccacaugacgug

SEQ ID NO: 1047256 - RNA, 21 nt, Human
caaagaguaagugaaggccca

SEQ ID NO: 1047257 - RNA, 21 nt, Human
cacagacugauagggagacac

SEQ ID NO: 1047258 - RNA, 20 nt, Human
cacuguguguguuggggggu

SEQ ID NO: 1047259 - RNA, 25 nt, Human
cagccgugacccucccaccgucaga

SEQ ID NO: 1047260 - RNA, 21 nt, Human
cagcugggugaauagcugugu

SEQ ID NO: 1047261 - RNA, 18 nt, Human
caggacccagggaccaaa

SEQ ID NO: 1047262 - RNA, 18 nt, Human
caggugguugcacaaccc

SEQ ID NO: 1047263 - RNA, 19 nt, Human
cagugggcccuggccugua

SEQ ID NO: 1047264 - RNA, 20 nt, Human
caugacaaaggcacgaggaa

SEQ ID NO: 1047265 - RNA, 21 nt, Human
cauguucugggggcacacacu

SEQ ID NO: 1047266 - RNA, 24 nt, Human
ccacugccccugccuuuuuuccug

SEQ ID NO: 1047267 - RNA, 18 nt, Human
ccccaaccucccacauug

SEQ ID NO: 1047268 - RNA, 21 nt, Human
ccccaaccucccacauuggcc

SEQ ID NO: 1047269 - RNA, 19 nt, Human
ccccacagccacccuccuc

SEQ ID NO: 1047270 - RNA, 19 nt, Human
ccccacagccacccuccuc

SEQ ID NO: 1047271 - RNA, 20 nt, Human
ccccacagccacccuccuca

SEQ ID NO: 1047272 - RNA, 22 nt, Human
ccccacagccacccuccucacc

SEQ ID NO: 1047273 - RNA, 23 nt, Human
ccccaguagcuaucaaccucccu

SEQ ID NO: 1047274 - RNA, 24 nt, Human
cccccacagccacccuccucacca

SEQ ID NO: 1047275 - RNA, 25 nt, Human
cccccacagccacccuccucaccac

SEQ ID NO: 1047276 - RNA, 19 nt, Human
ccccccugccccccguuuu

SEQ ID NO: 1047277 - RNA, 19 nt, Human
ccccugccccccguuuucc

SEQ ID NO: 1047278 - RNA, 18 nt, Human
cccuccucaccacccugc

SEQ ID NO: 1047279 - RNA, 20 nt, Human
ccuaauccccccugcccccc

SEQ ID NO: 1047280 - RNA, 20 nt, Human
ccucccacauuggccccugg

SEQ ID NO: 1047281 - RNA, 22 nt, Human
ccucccacauuggccccugggc

SEQ ID NO: 1047282 - RNA, 23 nt, Human
ccugcccacucaggccuugggag

SEQ ID NO: 1047283 - RNA, 21 nt, Human
ccuggaguagccucugccuuu

SEQ ID NO: 1047284 - RNA, 23 nt, Human
ccugugcugggcagggcuaggga

SEQ ID NO: 1047285 - RNA, 20 nt, Human
ccuuuuuuccuggguggccu

SEQ ID NO: 1047286 - RNA, 23 nt, Human
cgggaccugugcugggcagggcu

SEQ ID NO: 1047287 - RNA, 18 nt, Human
cucagugaccugcccauu

SEQ ID NO: 1047288 - RNA, 21 nt, Human
cucagugggcccuggccugua

SEQ ID NO: 1047289 - RNA, 23 nt, Human
cucucagccgugacccucccacc

SEQ ID NO: 1047290 - RNA, 22 nt, Human
cugaguagucuuggcauccucu

SEQ ID NO: 1047291 - RNA, 20 nt, Human
cuugggcagcugggugaaua

SEQ ID NO: 1047292 - RNA, 21 nt, Human
gagcccccacagccacccucc

SEQ ID NO: 1047293 - RNA, 21 nt, Human
gagcuuccugagcccccacag

SEQ ID NO: 1047294 - RNA, 22 nt, Human
gaucacugagaacugacuccug

SEQ ID NO: 1047295 - RNA, 19 nt, Human
gaucuuaucugcugaucuc

SEQ ID NO: 1047296 - RNA, 24 nt, Human
gauucccaucccuggcuugcucuc

SEQ ID NO: 1047297 - RNA, 18 nt, Human
gauuuggugccagugggg

SEQ ID NO: 1047298 - RNA, 22 nt, Human
gcacaacccagaggccccugga

SEQ ID NO: 1047299 - RNA, 18 nt, Human
gccccccguuuuccuauc

SEQ ID NO: 1047300 - RNA, 29 nt, Human
gccccugggcgagcuuccugagcccccag

SEQ ID NO: 1047301 - RNA, 18 nt, Human
gcuagggaggcccaaccc

SEQ ID NO: 1047302 - RNA, 22 nt, Human
gcuggugaugguggaagaaauu

SEQ ID NO: 1047303 - RNA, 21 nt, Human
ggaauuccucuccuccugcuu

SEQ ID NO: 1047304 - RNA, 19 nt, Human
ggaccuggaugacucagug

SEQ ID NO: 1047305 - RNA, 24 nt, Human
ggagaggaagagcagauucaggug

SEQ ID NO: 1047306 - RNA, 19 nt, Human
ggaggaagcugggaugagg

SEQ ID NO: 1047307 - RNA, 20 nt, Human
ggauuuggugccaguggggg

SEQ ID NO: 1047308 - RNA, 19 nt, Human
ggcagcugggugaauagcu

SEQ ID NO: 1047309 - RNA, 23 nt, Human
ggcauccucucugagguccaccu

SEQ ID NO: 1047310 - RNA, 24 nt, Human
gggaauugucuagugggcauuugg

SEQ ID NO: 1047311 - RNA, 18 nt, Human
gggacaagcgaggcuggc

SEQ ID NO: 1047312 - RNA, 18 nt, Human
gggaggucagcgggggcc

SEQ ID NO: 1047313 - RNA, 23 nt, Human
gggcauucuagccagaggaaaua

SEQ ID NO: 1047314 - RNA, 18 nt, Human
ggggaaccuggagauggg

SEQ ID NO: 1047315 - RNA, 19 nt, Human
gggggaaccuggagauggg

SEQ ID NO: 1047316 - RNA, 22 nt, Human
gggggccucccagggaauuguc

SEQ ID NO: 1047317 - RNA, 21 nt, Human
ggggugggaagggcauucuag

SEQ ID NO: 1047318 - RNA, 19 nt, Human
gggugugagggacaaggau

SEQ ID NO: 1047319 - RNA, 19 nt, Human
gguagggauugccccuguc

SEQ ID NO: 1047320 - RNA, 22 nt, Human
gguggaggugugguucugggag

SEQ ID NO: 1047321 - RNA, 21 nt, Human
guagucuuggcauccucucug

SEQ ID NO: 1047322 - RNA, 24 nt, Human
guggugguggggugggggaguaac

SEQ ID NO: 1047323 - RNA, 23 nt, Human
gugucugccuggggaaccaggag

SEQ ID NO: 1047324 - RNA, 22 nt, Human
guguguguuggggggugauggg

SEQ ID NO: 1047325 - RNA, 25 nt, Human
uaaagcagguggaaugacaugguca

SEQ ID NO: 1047326 - RNA, 24 nt, Human
uagccucugccuuugggcacagcc

SEQ ID NO: 1047327 - RNA, 25 nt, Human
uauacaaaauccccaguagcuauca

SEQ ID NO: 1047328 - RNA, 24 nt, Human
uaucggccacuccccaccuggucu

SEQ ID NO: 1047329 - RNA, 26 nt, Human
ucacaaagaguaagugaaggcccaga

SEQ ID NO: 1047330 - RNA, 21 nt, Human
ucacaaucaccgugucaucau

SEQ ID NO: 1047331 - RNA, 20 nt, Human
uccacagauggaaguagcag

SEQ ID NO: 1047332 - RNA, 22 nt, Human
uccacagauggaaguagcagag

SEQ ID NO: 1047333 - RNA, 22 nt, Human
ucccuggcuugcucucagccgu

SEQ ID NO: 1047334 - RNA, 20 nt, Human
uccugagcccccacagccac

SEQ ID NO: 1047335 - RNA, 21 nt, Human
ucucugagguccaccuaaucc

SEQ ID NO: 1047336 - RNA, 21 nt, Human
ugacauggucaguugcauaga

SEQ ID NO: 1047337 - RNA, 21 nt, Human
ugagaacugacuccugcuggg

SEQ ID NO: 1047338 - RNA, 22 nt, Human
ugagaugggguggggcaucuuc

SEQ ID NO: 1047339 - RNA, 24 nt, Human
ugagaugggguggggcaucuucaa

SEQ ID NO: 1047340 - RNA, 22 nt, Human
ugagcccccacagccacccucc

SEQ ID NO: 1047341 - RNA, 22 nt, Human
ugagcugaugaggucagcuugg

SEQ ID NO: 1047342 - RNA, 23 nt, Human
ugagcugaugaggucagcuugga

SEQ ID NO: 1047343 - RNA, 18 nt, Human
ugagguggggaggucagc

SEQ ID NO: 1047344 - RNA, 24 nt, Human
ugagguggggaggucagcgggggc

SEQ ID NO: 1047345 - RNA, 25 nt, Human
ugagguggggaggucagcgggggcc

SEQ ID NO: 1047346 - RNA, 22 nt, Human
ugaugaggucagcuugggagug

SEQ ID NO: 1047347 - RNA, 21 nt, Human
ugcacaacccagaggccccug

SEQ ID NO: 1047348 - RNA, 22 nt, Human
ugcccacucaggccuugggagc

SEQ ID NO: 1047349 - RNA, 20 nt, Human
ugcuuuggccaggugguugc

SEQ ID NO: 1047350 - RNA, 21 nt, Human
uggaaggucuauaccugggug

SEQ ID NO: 1047351 - RNA, 23 nt, Human
uggaaggucuauaccugggugcu

SEQ ID NO: 1047352 - RNA, 18 nt, Human
uggcagagggacaagcga

SEQ ID NO: 1047353 - RNA, 21 nt, Human
uggcagagggacaagcgaggc

SEQ ID NO: 1047354 - RNA, 23 nt, Human
uggcagagggacaagcgaggcug

SEQ ID NO: 1047355 - RNA, 20 nt, Human
uggccccugggcgagcuucc

SEQ ID NO: 1047356 - RNA, 21 nt, Human
uggccccugggcgagcuuccu

SEQ ID NO: 1047357 - RNA, 22 nt, Human
uggccccugggcgagcuuccug

SEQ ID NO: 1047358 - RNA, 22 nt, Human
uggccuguaggaugugccucuu

SEQ ID NO: 1047359 - RNA, 21 nt, Human
uggcggguaugagaugccugg

SEQ ID NO: 1047360 - RNA, 24 nt, Human
ugggaagggcauucuagccagagg

SEQ ID NO: 1047361 - RNA, 21 nt, Human
ugggaguugccaaagucugag

SEQ ID NO: 1047362 - RNA, 18 nt, Human
ugggaugagguggggagg

SEQ ID NO: 1047363 - RNA, 21 nt, Human
ugggcacagcccaucauguuc

SEQ ID NO: 1047364 - RNA, 23 nt, Human
ugggggagguccaggagguaguu

SEQ ID NO: 1047365 - RNA, 24 nt, Human
ugggggcacacacuguguguguug

SEQ ID NO: 1047366 - RNA, 21 nt, Human
uggugguggggugggggagua

SEQ ID NO: 1047367 - RNA, 23 nt, Human
uuccuucuuggguccaguagcug

SEQ ID NO: 1047368 - RNA, 21 nt, Human
uuguuguaaggagaggaagag

SEQ ID NO: 1047369 - RNA, 18 nt, Human
acuguuguucccacacuc

SEQ ID NO: 1047370 - RNA, 19 nt, Human
agagaacucuuuaaagcca

SEQ ID NO: 1047371 - RNA, 22 nt, Human
agagaacucuuuaaagccaaca

SEQ ID NO: 1047372 - RNA, 22 nt, Human
ccgaacacuuucuagagaacuc

SEQ ID NO: 1047373 - RNA, 21 nt, Human
cgggcuuugucgaguuuggcc

SEQ ID NO: 1047374 - RNA, 21 nt, Human
cugcuccuugaauuuguuucu

SEQ ID NO: 1047375 - RNA, 19 nt, Human
gaauuuguuucuuuuuucu

SEQ ID NO: 1047376 - RNA, 19 nt, Human
gacuguuguucccacacuc

SEQ ID NO: 1047377 - RNA, 21 nt, Human
uagagaacucuuuaaagccaa

SEQ ID NO: 1047378 - RNA, 25 nt, Human
ugaauuuguuucuuuuuucuggauu

SEQ ID NO: 1047379 - RNA, 24 nt, Human
uggauucaguaacguggacaggag

SEQ ID NO: 1047380 - RNA, 25 nt, Human
uuuucuggauucaguaacguggaca

SEQ ID NO: 1047381 - RNA, 26 nt, Human
aaaaaaaaaaaaaaaaauuccaaaag

SEQ ID NO: 1047382 - RNA, 21 nt, Human
aaagagggaggggaggggagg

SEQ ID NO: 1047383 - RNA, 21 nt, Human
aagagggaggggaggggaggg

SEQ ID NO: 1047384 - RNA, 19 nt, Human
agagggaggggaggggagg

SEQ ID NO: 1047385 - RNA, 18 nt, Human
agggaggggaggggaggg

SEQ ID NO: 1047386 - RNA, 23 nt, Human
agggaggggaggggaggggaacu

SEQ ID NO: 1047387 - RNA, 19 nt, Human
aggggaggggaggggaacu

SEQ ID NO: 1047388 - RNA, 21 nt, Human
auauacacacauacauauggu

SEQ ID NO: 1047389 - RNA, 19 nt, Human
caagugugcuucucagaac

SEQ ID NO: 1047390 - RNA, 19 nt, Human
ccaaaagaugcaguuacaa

SEQ ID NO: 1047391 - RNA, 23 nt, Human
cucagaauuucccugggcaaaaa

SEQ ID NO: 1047392 - RNA, 18 nt, Human
gaggggaggggaggggaa

SEQ ID NO: 1047393 - RNA, 30 nt, Human
gcauucaauauacacacauacauauguaca

SEQ ID NO: 1047394 - RNA, 19 nt, Human
ggaaaaaaaaaaaaaaaaa

SEQ ID NO: 1047395 - RNA, 23 nt, Human
uacacacauacauauguacacuc

SEQ ID NO: 1047396 - RNA, 24 nt, Human
uauguacacucuuugacacaccuu

SEQ ID NO: 1047397 - RNA, 21 nt, Human
ucagaauuucccugggcaaaa

SEQ ID NO: 1047398 - RNA, 23 nt, Human
ucccugggcaaaaaccugugacc

SEQ ID NO: 1047399 - RNA, 27 nt, Human
ucucuaccccuuggaaaaaaaaaaaaa

SEQ ID NO: 1047400 - RNA, 26 nt, Human
ugaaauaaaauacauaaaucucuacc

SEQ ID NO: 1047401 - RNA, 19 nt, Human
uggaaaaaaaaaaaaaaaa

SEQ ID NO: 1047402 - RNA, 19 nt, Human
uucaauauacacacauaca

SEQ ID NO: 1047403 - RNA, 18 nt, Human
uuccaaaagaugcaguua

SEQ ID NO: 1047404 - RNA, 21 nt, Human
aacagguuuuuauuuuugcuu

SEQ ID NO: 1047405 - RNA, 24 nt, Human
auuuucucuucaaauuuggaugug

SEQ ID NO: 1047406 - RNA, 22 nt, Human
ccaggggcccuuaguccuccuu

SEQ ID NO: 1047407 - RNA, 21 nt, Human
cucaaugccauguuuucuucg

SEQ ID NO: 1047408 - RNA, 23 nt, Human
cuucuacaccaaaguagugcuca

SEQ ID NO: 1047409 - RNA, 19 nt, Human
cuucugguagaucuccugg

SEQ ID NO: 1047410 - RNA, 18 nt, Human
gucuacccaggggcccuu

SEQ ID NO: 1047411 - RNA, 20 nt, Human
uagaacuuugcaacagguuu

SEQ ID NO: 1047412 - RNA, 20 nt, Human
aaagaagaaagcugggagcc

SEQ ID NO: 1047413 - RNA, 24 nt, Human
agcaagaaaggcuuguggaaagaa

SEQ ID NO: 1047414 - RNA, 18 nt, Human
agggacauugcacaguca

SEQ ID NO: 1047415 - RNA, 18 nt, Human
auggaauagacugcuucc

SEQ ID NO: 1047416 - RNA, 19 nt, Human
auuguucucugaauccuca

SEQ ID NO: 1047417 - RNA, 22 nt, Human
ccaaccacagggacauugcacu

SEQ ID NO: 1047418 - RNA, 28 nt, Human
cuagagcccaaccacagggacauugcac

SEQ ID NO: 1047419 - RNA, 21 nt, Human
gaaggaaacccuucaaagaaa

SEQ ID NO: 1047420 - RNA, 23 nt, Human
gauuagagucaaaaauuaaaaug

SEQ ID NO: 1047421 - RNA, 19 nt, Human
guggaaagaagaaagcugg

SEQ ID NO: 1047422 - RNA, 23 nt, Human
guugaaguuuucauguacaaaug

SEQ ID NO: 1047423 - RNA, 22 nt, Human
uaagucugauuagagucaaaaa

SEQ ID NO: 1047424 - RNA, 18 nt, Human
uagacugcaccugcccag

SEQ ID NO: 1047425 - RNA, 21 nt, Human
uagucuugaagcacagcagca

SEQ ID NO: 1047426 - RNA, 21 nt, Human
ugaaauagacugcaccugccc

SEQ ID NO: 1047427 - RNA, 22 nt, Human
ugauggaauagacugcuuccaa

SEQ ID NO: 1047428 - RNA, 22 nt, Human
ugcccagucuggcugaacacac

SEQ ID NO: 1047429 - RNA, 18 nt, Human
ugguguuggaaaucacau

SEQ ID NO: 1047430 - RNA, 24 nt, Human
uguacaaaugaaauagacugcacc

SEQ ID NO: 1047431 - RNA, 21 nt, Human
uguacuagagcccaaccacag

SEQ ID NO: 1047432 - RNA, 19 nt, Human
uguggaaagaagaaagcug

SEQ ID NO: 1047433 - RNA, 19 nt, Human
uugaagcacagcagcaaga

SEQ ID NO: 1047434 - RNA, 21 nt, Human
uuggcuaguugauggaauaga

SEQ ID NO: 1047435 - RNA, 18 nt, Human
uccuguggccaaagcugu

SEQ ID NO: 1047436 - RNA, 24 nt, Human
agcacugcuuucagccaggaugaa

SEQ ID NO: 1047437 - RNA, 23 nt, Human
caccgccccccuuucggccgccc

SEQ ID NO: 1047438 - RNA, 24 nt, Human
caucuccgcuugcgcggcccgacc

SEQ ID NO: 1047439 - RNA, 19 nt, Human
ccaaguaccagccacugcc

SEQ ID NO: 1047440 - RNA, 23 nt, Human
ccaccggucuccuucaauccucc

SEQ ID NO: 1047441 - RNA, 21 nt, Human
ccagugaagacuggccccuuu

SEQ ID NO: 1047442 - RNA, 24 nt, Human
cccccauagcaggccagaccacuc

SEQ ID NO: 1047443 - RNA, 22 nt, Human
ccccccuuucggccgccccccu

SEQ ID NO: 1047444 - RNA, 22 nt, Human
ccccgccccguccccaccgguc

SEQ ID NO: 1047445 - RNA, 19 nt, Human
ccgaccaccgccccccuuu

SEQ ID NO: 1047446 - RNA, 19 nt, Human
ccgccccccuuucggccgc

SEQ ID NO: 1047447 - RNA, 26 nt, Human
cgccccguccccaccggucuccuuca

SEQ ID NO: 1047448 - RNA, 22 nt, Human
cgcggcccgaccaccgcccccc

SEQ ID NO: 1047449 - RNA, 22 nt, Human
cggccgccccccuccccagcgc

SEQ ID NO: 1047450 - RNA, 21 nt, Human
cugcgccccgccccgucccca

SEQ ID NO: 1047451 - RNA, 19 nt, Human
gaaauggacauguaacacc

SEQ ID NO: 1047452 - RNA, 25 nt, Human
gcagguuuccuuuuaaucaaggcuc

SEQ ID NO: 1047453 - RNA, 21 nt, Human
gcccccaaaacaugaaaugga

SEQ ID NO: 1047454 - RNA, 23 nt, Human
gccccccuuucggccgccccccu

SEQ ID NO: 1047455 - RNA, 25 nt, Human
gccccguccccaccggucuccuuca

SEQ ID NO: 1047456 - RNA, 19 nt, Human
gcgagcacugcuggucugc

SEQ ID NO: 1047457 - RNA, 20 nt, Human
uaaaagcccccaaaacauga

SEQ ID NO: 1047458 - RNA, 21 nt, Human
uaaaagcccccaaaacaugaa

SEQ ID NO: 1047459 - RNA, 21 nt, Human
uccccagcgcugcguuagggc

SEQ ID NO: 1047460 - RNA, 19 nt, Human
ucccccauagcaggccaga

SEQ ID NO: 1047461 - RNA, 23 nt, Human
ucccccauagcaggccagaccac

SEQ ID NO: 1047462 - RNA, 21 nt, Human
ugaaauggacauguaacacca

SEQ ID NO: 1047463 - RNA, 21 nt, Human
ugaaauggacauguaacaccc

SEQ ID NO: 1047464 - RNA, 23 nt, Human
ugaagacuggccccuuuacugaa

SEQ ID NO: 1047465 - RNA, 19 nt, Human
ugaagguguuuuguggggc

SEQ ID NO: 1047466 - RNA, 21 nt, Human
uucagccaggaugaaguggga

SEQ ID NO: 1047467 - RNA, 18 nt, Human
uucauuggcugcauuuca

SEQ ID NO: 1047468 - RNA, 20 nt, Human
uucggccgccccccucccca

SEQ ID NO: 1047469 - RNA, 20 nt, Human
agccagcgcccgccgcgugg

SEQ ID NO: 1047470 - RNA, 18 nt, Human
cagcgcccgccgcguggg

SEQ ID NO: 1047471 - RNA, 19 nt, Human
ccaggccuggcucuccugg

SEQ ID NO: 1047472 - RNA, 19 nt, Human
cccacagugcccacgucug

SEQ ID NO: 1047473 - RNA, 20 nt, Human
cccgccgcgugggagccgcg

SEQ ID NO: 1047474 - RNA, 18 nt, Human
cccgggcuccgugcccuc

SEQ ID NO: 1047475 - RNA, 18 nt, Human
cggcgggcgcgucuccuc

SEQ ID NO: 1047476 - RNA, 22 nt, Human
cgugggagccgcgaggccaggc

SEQ ID NO: 1047477 - RNA, 22 nt, Human
cucaaaagcgaggacacagagc

SEQ ID NO: 1047478 - RNA, 22 nt, Human
cuccacgccuggcucccgggcu

SEQ ID NO: 1047479 - RNA, 21 nt, Human
cugguccggccgcugggcugc

SEQ ID NO: 1047480 - RNA, 20 nt, Human
gggcggguggggacgucugg

SEQ ID NO: 1047481 - RNA, 21 nt, Human
ggguggggacgucugggaagc

SEQ ID NO: 1047482 - RNA, 20 nt, Human
gucccaauacguggaaugcu

SEQ ID NO: 1047483 - RNA, 25 nt, Human
gucuccuccagcugguccggccgcu

SEQ ID NO: 1047484 - RNA, 18 nt, Human
guggaaugcuccguuucc

SEQ ID NO: 1047485 - RNA, 21 nt, Human
uagaagggacuggggccggcg

SEQ ID NO: 1047486 - RNA, 21 nt, Human
ucccaauacguggaaugcucc

SEQ ID NO: 1047487 - RNA, 19 nt, Human
ucccggucucgcugcuccc

SEQ ID NO: 1047488 - RNA, 21 nt, Human
uccgcagacggcgggcucccg

SEQ ID NO: 1047489 - RNA, 22 nt, Human
uccuccagcugguccggccgcu

SEQ ID NO: 1047490 - RNA, 22 nt, Human
ucucgcgcuccacgccuggcuc

SEQ ID NO: 1047491 - RNA, 22 nt, Human
uggcucccgggcuccgugcccu

SEQ ID NO: 1047492 - RNA, 21 nt, Human
uggggccggcggggcgggugg

SEQ ID NO: 1047493 - RNA, 29 nt, Human
ugucccgcgagcuccucaaaagcgaggac

SEQ ID NO: 1047494 - RNA, 26 nt, Human
aaaaauaggaaucaauauaaaaaugc

SEQ ID NO: 1047495 - RNA, 18 nt, Human
aaacagccagagcuggcg

SEQ ID NO: 1047496 - RNA, 20 nt, Human
aacagguuuuauugaggaug

SEQ ID NO: 1047497 - RNA, 19 nt, Human
aagggcugugagggaggcc

SEQ ID NO: 1047498 - RNA, 18 nt, Human
aauguccaccacucccag

SEQ ID NO: 1047499 - RNA, 23 nt, Human
acagacauuugggggaaagaaac

SEQ ID NO: 1047500 - RNA, 21 nt, Human
acagggcagaaacguccagag

SEQ ID NO: 1047501 - RNA, 21 nt, Human
acuuggagcagugcaacgaga

SEQ ID NO: 1047502 - RNA, 24 nt, Human
agaaauccaccaggaaccccagcc

SEQ ID NO: 1047503 - RNA, 22 nt, Human
agagccaacucauucccaaggg

SEQ ID NO: 1047504 - RNA, 21 nt, Human
agaggccaggacucacaaggg

SEQ ID NO: 1047505 - RNA, 24 nt, Human
agaguccuuaguugguuuucuugg

SEQ ID NO: 1047506 - RNA, 20 nt, Human
agccaaaaccuucucaagug

SEQ ID NO: 1047507 - RNA, 20 nt, Human
agccagagcuggcgggggca

SEQ ID NO: 1047508 - RNA, 21 nt, Human
agcgcgaggcccugcagcugc

SEQ ID NO: 1047509 - RNA, 22 nt, Human
agcuggaggagccccagccaag

SEQ ID NO: 1047510 - RNA, 19 nt, Human
agcuggcgggggcagcccg

SEQ ID NO: 1047511 - RNA, 27 nt, Human
aggaaauuggaaccagaggguggaagg

SEQ ID NO: 1047512 - RNA, 19 nt, Human
aggaguggggcuggccugg

SEQ ID NO: 1047513 - RNA, 18 nt, Human
agguaguaagaaauccac

SEQ ID NO: 1047514 - RNA, 18 nt, Human
aguaagaaauccaccagg

SEQ ID NO: 1047515 - RNA, 22 nt, Human
aguggacaccugcaacucaaau

SEQ ID NO: 1047516 - RNA, 24 nt, Human
augccacagcaucaccaugggggc

SEQ ID NO: 1047517 - RNA, 21 nt, Human
caacagguuuuauugaggaug

SEQ ID NO: 1047518 - RNA, 22 nt, Human
caagcuaaacagccagagcugg

SEQ ID NO: 1047519 - RNA, 22 nt, Human
caccacucccagcacucaucuc

SEQ ID NO: 1047520 - RNA, 20 nt, Human
cacuaaaggggaggaggcca

SEQ ID NO: 1047521 - RNA, 24 nt, Human
cagaagucagcagccauccuccau

SEQ ID NO: 1047522 - RNA, 23 nt, Human
cagccaaaaccuucucaaguguc

SEQ ID NO: 1047523 - RNA, 18 nt, Human
cagcccagcccgcagcag

SEQ ID NO: 1047524 - RNA, 20 nt, Human
cagcccgggagagacaggga

SEQ ID NO: 1047525 - RNA, 19 nt, Human
cagccugcaugcagggaga

SEQ ID NO: 1047526 - RNA, 25 nt, Human
caggccagccccuuccagaaacaaa

SEQ ID NO: 1047527 - RNA, 23 nt, Human
cagggccuauggggugcagcccu

SEQ ID NO: 1047528 - RNA, 21 nt, Human
caggggccucugugcugcccu

SEQ ID NO: 1047529 - RNA, 19 nt, Human
ccaagcccucacaaacugc

SEQ ID NO: 1047530 - RNA, 21 nt, Human
ccaaggccacggccgccucug

SEQ ID NO: 1047531 - RNA, 25 nt, Human
ccaccaggaaccccagccaaaaccu

SEQ ID NO: 1047532 - RNA, 30 nt, Human
ccaggaaccccagccaaaaccuucucaagg

SEQ ID NO: 1047533 - RNA, 21 nt, Human
cccagccuuagccuccugggc

SEQ ID NO: 1047534 - RNA, 21 nt, Human
cccauaaacauuuuagaaacg

SEQ ID NO: 1047535 - RNA, 22 nt, Human
cccaucccuaacacaucagaug

SEQ ID NO: 1047536 - RNA, 19 nt, Human
cccauggcugccacuggag

SEQ ID NO: 1047537 - RNA, 24 nt, Human
ccccaggucugugccccaagcccu

SEQ ID NO: 1047538 - RNA, 25 nt, Human
ccccucuuguacacacauacaccca

SEQ ID NO: 1047539 - RNA, 22 nt, Human
cccguuuuuuuucuugggaccc

SEQ ID NO: 1047540 - RNA, 20 nt, Human
ccucacaaacugccuucccc

SEQ ID NO: 1047541 - RNA, 28 nt, Human
ccuccugccccaggucugugccccaagc

SEQ ID NO: 1047542 - RNA, 21 nt, Human
ccuccugggcccuaguccugc

SEQ ID NO: 1047543 - RNA, 22 nt, Human
ccuuagccuccugggcccuagu

SEQ ID NO: 1047544 - RNA, 20 nt, Human
cgaaugaccccaguucacac

SEQ ID NO: 1047545 - RNA, 21 nt, Human
cucacaaacugccuuccccau

SEQ ID NO: 1047546 - RNA, 24 nt, Human
cucccagccuuagccuccugggcc

SEQ ID NO: 1047547 - RNA, 24 nt, Human
cugccccaggucugugccccaagc

SEQ ID NO: 1047548 - RNA, 24 nt, Human
cugcccucaagcuaaacagccaga

SEQ ID NO: 1047549 - RNA, 20 nt, Human
cuggagcagugaaagggagg

SEQ ID NO: 1047550 - RNA, 28 nt, Human
cuuguacacacauacacccaccauaugg

SEQ ID NO: 1047551 - RNA, 18 nt, Human
gaacaggaaauuggaacc

SEQ ID NO: 1047552 - RNA, 21 nt, Human
gaagaagagguugagcgaaga

SEQ ID NO: 1047553 - RNA, 21 nt, Human
gacacugcacagacauuuggg

SEQ ID NO: 1047554 - RNA, 24 nt, Human
gaccgaaugaccccaguucacacu

SEQ ID NO: 1047555 - RNA, 19 nt, Human
gaccuagggaagaagaggu

SEQ ID NO: 1047556 - RNA, 25 nt, Human
gagaguccuuaguugguuuucuugg

SEQ ID NO: 1047557 - RNA, 24 nt, Human
gagaucacagaccgaaugacccca

SEQ ID NO: 1047558 - RNA, 19 nt, Human
gagcaaacagccugcuuug

SEQ ID NO: 1047559 - RNA, 21 nt, Human
gagcugccuccugccccaggu

SEQ ID NO: 1047560 - RNA, 18 nt, Human
gaggagccccagccaagg

SEQ ID NO: 1047561 - RNA, 22 nt, Human
gaggucccagggggagcuggag

SEQ ID NO: 1047562 - RNA, 18 nt, Human
gagguugaucuuucuggc

SEQ ID NO: 1047563 - RNA, 18 nt, Human
gcacccuuucucucccag

SEQ ID NO: 1047564 - RNA, 22 nt, Human
gcacccuuucucucccagccuu

SEQ ID NO: 1047565 - RNA, 20 nt, Human
gcagaaacguccagagccaa

SEQ ID NO: 1047566 - RNA, 20 nt, Human
gcauccugccuguuuccugc

SEQ ID NO: 1047567 - RNA, 19 nt, Human
gccagagcuggcgggggca

SEQ ID NO: 1047568 - RNA, 23 nt, Human
gcccaccacggacaugucugaug

SEQ ID NO: 1047569 - RNA, 21 nt, Human
gcccccacagaugaaccccuc

SEQ ID NO: 1047570 - RNA, 24 nt, Human
gcccucacaaacugccuuccccau

SEQ ID NO: 1047571 - RNA, 23 nt, Human
gccuuggggauaccuggcugggg

SEQ ID NO: 1047572 - RNA, 24 nt, Human
ggaaaaccccacaguccuuagucc

SEQ ID NO: 1047573 - RNA, 24 nt, Human
ggaaggagaggaagcccccacaga

SEQ ID NO: 1047574 - RNA, 23 nt, Human
ggacugagggguugggaggggca

SEQ ID NO: 1047575 - RNA, 19 nt, Human
ggagaaagggaagagugcu

SEQ ID NO: 1047576 - RNA, 22 nt, Human
ggagaggaagcccccacagaug

SEQ ID NO: 1047577 - RNA, 24 nt, Human
ggauaccuggcuggggugacaagg

SEQ ID NO: 1047578 - RNA, 22 nt, Human
ggcagaaacguccagagccaac

SEQ ID NO: 1047579 - RNA, 20 nt, Human
ggccaggacucacaaggggc

SEQ ID NO: 1047580 - RNA, 18 nt, Human
ggcugcaguccuggcagg

SEQ ID NO: 1047581 - RNA, 18 nt, Human
ggcugggcugugugccuc

SEQ ID NO: 1047582 - RNA, 22 nt, Human
gggaacagggcagaaacgucca

SEQ ID NO: 1047583 - RNA, 19 nt, Human
gggcaggggaggaggguug

SEQ ID NO: 1047584 - RNA, 18 nt, Human
ggggccucugugcugccc

SEQ ID NO: 1047585 - RNA, 18 nt, Human
gggguugggaggggcauc

SEQ ID NO: 1047586 - RNA, 21 nt, Human
ggucccagggggagcuggagg

SEQ ID NO: 1047587 - RNA, 19 nt, Human
gguuugagaguccuuaguu

SEQ ID NO: 1047588 - RNA, 22 nt, Human
guggaaggagaggaagccccca

SEQ ID NO: 1047589 - RNA, 24 nt, Human
guggggcuggccuggcgagggccg

SEQ ID NO: 1047590 - RNA, 23 nt, Human
guugcccuuucccagggcaacag

SEQ ID NO: 1047591 - RNA, 18 nt, Human
uaagaaauccaccaggaa

SEQ ID NO: 1047592 - RNA, 23 nt, Human
uaagaaauccaccaggaacccca

SEQ ID NO: 1047593 - RNA, 18 nt, Human
uaaguggacaccugcaac

SEQ ID NO: 1047594 - RNA, 25 nt, Human
uacacccaccauaugguucuuauua

SEQ ID NO: 1047595 - RNA, 26 nt, Human
uagaacaggaaauuggaaccagaggg

SEQ ID NO: 1047596 - RNA, 21 nt, Human
uagccuccugggcccuagucc

SEQ ID NO: 1047597 - RNA, 22 nt, Human
uagccuccugggcccuaguccu

SEQ ID NO: 1047598 - RNA, 23 nt, Human
uagcucccguuuuuuuucuuggg

SEQ ID NO: 1047599 - RNA, 23 nt, Human
uagggacugagggguugggaggg

SEQ ID NO: 1047600 - RNA, 23 nt, Human
uauaccaaguuagaagugaaaug

SEQ ID NO: 1047601 - RNA, 21 nt, Human
ucaauauaaaaaugcacaagg

SEQ ID NO: 1047602 - RNA, 24 nt, Human
ucacuugggcagauuuggguuauc

SEQ ID NO: 1047603 - RNA, 21 nt, Human
ucagagggccaaacgagaggu

SEQ ID NO: 1047604 - RNA, 22 nt, Human
uccaccacucccagcacucauc

SEQ ID NO: 1047605 - RNA, 23 nt, Human
uccaccacucccagcacucaucc

SEQ ID NO: 1047606 - RNA, 22 nt, Human
uccuuaguugguuuucuugggc

SEQ ID NO: 1047607 - RNA, 20 nt, Human
ucgauucugccuccgccacu

SEQ ID NO: 1047608 - RNA, 20 nt, Human
ucucccagccuuagccuccu

SEQ ID NO: 1047609 - RNA, 21 nt, Human
ucugcacuagauacuucuaga

SEQ ID NO: 1047610 - RNA, 20 nt, Human
ucugccuuggggauaccugg

SEQ ID NO: 1047611 - RNA, 24 nt, Human
ucuguucagcuuuuguuuuuuuuu

SEQ ID NO: 1047612 - RNA, 21 nt, Human
ucuugggacccuacuuaguuc

SEQ ID NO: 1047613 - RNA, 22 nt, Human
ugaacgugaagagcugccuccu

SEQ ID NO: 1047614 - RNA, 18 nt, Human
ugaaggaacccacugcuc

SEQ ID NO: 1047615 - RNA, 23 nt, Human
ugaccccaguucacacuugguac

SEQ ID NO: 1047616 - RNA, 20 nt, Human
ugacguagggacugaggggu

SEQ ID NO: 1047617 - RNA, 21 nt, Human
ugagaaaaccagcccagcccg

SEQ ID NO: 1047618 - RNA, 22 nt, Human
ugagcgaagaacccccaccagg

SEQ ID NO: 1047619 - RNA, 25 nt, Human
ugagcgaagaacccccaccagguau

SEQ ID NO: 1047620 - RNA, 19 nt, Human
ugagcucccucucagcucc

SEQ ID NO: 1047621 - RNA, 26 nt, Human
ugagcucccucucagcuccuucaggg

SEQ ID NO: 1047622 - RNA, 18 nt, Human
ugauaguggcuuugaccu

SEQ ID NO: 1047623 - RNA, 18 nt, Human
ugcaacgagaucacagac

SEQ ID NO: 1047624 - RNA, 23 nt, Human
ugcacuagauacuucuagacacu

SEQ ID NO: 1047625 - RNA, 21 nt, Human
ugcagaggagcucugaucggg

SEQ ID NO: 1047626 - RNA, 21 nt, Human
ugccacagcaucaccaugggg

SEQ ID NO: 1047627 - RNA, 20 nt, Human
ugccccaagcccucacaaac

SEQ ID NO: 1047628 - RNA, 22 nt, Human
ugcccucaagcuaaacagccag

SEQ ID NO: 1047629 - RNA, 21 nt, Human
uggaaggagaggaagccccca

SEQ ID NO: 1047630 - RNA, 22 nt, Human
uggaaggagaggaagcccccac

SEQ ID NO: 1047631 - RNA, 20 nt, Human
uggagcagugcaacgagauc

SEQ ID NO: 1047632 - RNA, 24 nt, Human
uggaggucccagggggagcuggag

SEQ ID NO: 1047633 - RNA, 22 nt, Human
uggcgggggcagcccggggucc

SEQ ID NO: 1047634 - RNA, 18 nt, Human
uggcuggggugacaagga

SEQ ID NO: 1047635 - RNA, 18 nt, Human
ugggcaggggaggagggu

SEQ ID NO: 1047636 - RNA, 23 nt, Human
ugggcaggggaggaggguuggca

SEQ ID NO: 1047637 - RNA, 23 nt, Human
ugucguuuucauaguuaaaaucu

SEQ ID NO: 1047638 - RNA, 18 nt, Human
uuaaaaaaaaaauaggaa

SEQ ID NO: 1047639 - RNA, 20 nt, Human
uuaaucuuaaaaaaaaaaua

SEQ ID NO: 1047640 - RNA, 21 nt, Human
uuagguaguaagaaauccacc

SEQ ID NO: 1047641 - RNA, 20 nt, Human
uuaguuccgugggcucccau

SEQ ID NO: 1047642 - RNA, 19 nt, Human
uuaguugguuuucuugggc

SEQ ID NO: 1047643 - RNA, 21 nt, Human
uucugccuccgccaccaucug

SEQ ID NO: 1047644 - RNA, 22 nt, Human
uuggaaccagaggguggaagga

SEQ ID NO: 1047645 - RNA, 21 nt, Human
uuugaccuagggaagaagagg

SEQ ID NO: 1047646 - RNA, 22 nt, Human
uuugaccuagggaagaagaggu

SEQ ID NO: 1047647 - RNA, 21 nt, Human
uuuggagaaguugugggcagg

SEQ ID NO: 1047648 - RNA, 19 nt, Human
aaaagucuucagggcccac

SEQ ID NO: 1047649 - RNA, 19 nt, Human
aaacaugugcaccccugca

SEQ ID NO: 1047650 - RNA, 24 nt, Human
aaagggaaaggagagguggccugg

SEQ ID NO: 1047651 - RNA, 18 nt, Human
aacauacaccucccaugc

SEQ ID NO: 1047652 - RNA, 21 nt, Human
aagagccccccacuuugccga

SEQ ID NO: 1047653 - RNA, 22 nt, Human
aauacaagccugcacacucaaa

SEQ ID NO: 1047654 - RNA, 19 nt, Human
acaaagcagagagcuaagc

SEQ ID NO: 1047655 - RNA, 23 nt, Human
acagggaagcgauauuuuccuca

SEQ ID NO: 1047656 - RNA, 22 nt, Human
accaauucaacauccaaugcug

SEQ ID NO: 1047657 - RNA, 26 nt, Human
acccucccacacgccccuuuccgcca

SEQ ID NO: 1047658 - RNA, 18 nt, Human
accugcaaucaugccagc

SEQ ID NO: 1047659 - RNA, 23 nt, Human
acuacuccugguucccuuuccug

SEQ ID NO: 1047660 - RNA, 25 nt, Human
acucuguaacucgcggagccugcca

SEQ ID NO: 1047661 - RNA, 19 nt, Human
agcagccacuaaaccuccu

SEQ ID NO: 1047662 - RNA, 22 nt, Human
agcagccacuaaaccuccuaca

SEQ ID NO: 1047663 - RNA, 22 nt, Human
agccaaccucuggcuccuccug

SEQ ID NO: 1047664 - RNA, 23 nt, Human
agccccgcgccaggccccugcgc

SEQ ID NO: 1047665 - RNA, 22 nt, Human
agcgauauuuuccucaucggcc

SEQ ID NO: 1047666 - RNA, 18 nt, Human
agcuacagacaaaaaguc

SEQ ID NO: 1047667 - RNA, 21 nt, Human
aggcugggguaggccaugagg

SEQ ID NO: 1047668 - RNA, 23 nt, Human
agucaccaccuuccggcguuaaa

SEQ ID NO: 1047669 - RNA, 18 nt, Human
aguggagaagaaaggcug

SEQ ID NO: 1047670 - RNA, 25 nt, Human
augcuuauucacacaugccuacaca

SEQ ID NO: 1047671 - RNA, 18 nt, Human
augugcccaaaggcagag

SEQ ID NO: 1047672 - RNA, 25 nt, Human
caaauauauacauauacccuugcac

SEQ ID NO: 1047673 - RNA, 26 nt, Human
caaccucuggcuccuccugacagucc

SEQ ID NO: 1047674 - RNA, 24 nt, Human
caagacucacccacucuguaacuc

SEQ ID NO: 1047675 - RNA, 20 nt, Human
cacacaugccuacacacacc

SEQ ID NO: 1047676 - RNA, 23 nt, Human
cacacugccaaaauugcagccaa

SEQ ID NO: 1047677 - RNA, 27 nt, Human
cacauacaccuaauacaagccugcaca

SEQ ID NO: 1047678 - RNA, 29 nt, Human
cacaugccuacacacaccagccuacaugg

SEQ ID NO: 1047679 - RNA, 21 nt, Human
caccagccuacauguuagcac

SEQ ID NO: 1047680 - RNA, 18 nt, Human
cacgccccuuuccgccac

SEQ ID NO: 1047681 - RNA, 25 nt, Human
cacgccccuuuccgccacgcggcuu

SEQ ID NO: 1047682 - RNA, 27 nt, Human
cacucaugcgcauauacacacacugcu

SEQ ID NO: 1047683 - RNA, 21 nt, Human
cacucuguaacucgcggagcc

SEQ ID NO: 1047684 - RNA, 22 nt, Human
cacugccaaaauugcagccaaa

SEQ ID NO: 1047685 - RNA, 18 nt, Human
cacuguuaucaucuuucc

SEQ ID NO: 1047686 - RNA, 18 nt, Human
cagaagcuuaaaugaaca

SEQ ID NO: 1047687 - RNA, 23 nt, Human
cagagcagccacuaaaccuccua

SEQ ID NO: 1047688 - RNA, 21 nt, Human
cagcgcgcccagccccagucc

SEQ ID NO: 1047689 - RNA, 18 nt, Human
cagugacuuccaugccac

SEQ ID NO: 1047690 - RNA, 24 nt, Human
cauacacacucaugccuaccugca

SEQ ID NO: 1047691 - RNA, 22 nt, Human
caucagggacaauagccucagc

SEQ ID NO: 1047692 - RNA, 19 nt, Human
caucuucaucacuacuccu

SEQ ID NO: 1047693 - RNA, 28 nt, Human
caugcgcauauacacacacugcugggua

SEQ ID NO: 1047694 - RNA, 21 nt, Human
caugugcacacagcacacuua

SEQ ID NO: 1047695 - RNA, 19 nt, Human
caugugcccaaaggcagag

SEQ ID NO: 1047696 - RNA, 20 nt, Human
caugugcccaaaggcagagu

SEQ ID NO: 1047697 - RNA, 19 nt, Human
ccaccaguguccccucuuc

SEQ ID NO: 1047698 - RNA, 21 nt, Human
cccacacgccccuuuccgcca

SEQ ID NO: 1047699 - RNA, 26 nt, Human
cccaccgccgggacaaccccuaaggc

SEQ ID NO: 1047700 - RNA, 23 nt, Human
cccaucucccaugugcccaaagg

SEQ ID NO: 1047701 - RNA, 19 nt, Human
ccccgcgccaggccccugc

SEQ ID NO: 1047702 - RNA, 22 nt, Human
ccccgcgccaggccccugcgcc

SEQ ID NO: 1047703 - RNA, 19 nt, Human
ccccucacccccacucucu

SEQ ID NO: 1047704 - RNA, 20 nt, Human
cccgcgccaggccccugcgc

SEQ ID NO: 1047705 - RNA, 24 nt, Human
cccugcgccggaaccgcuucgccc

SEQ ID NO: 1047706 - RNA, 19 nt, Human
ccggaaccgcuucgccccc

SEQ ID NO: 1047707 - RNA, 23 nt, Human
ccggcuucguccucuacccuccc

SEQ ID NO: 1047708 - RNA, 18 nt, Human
ccuaacauacaccuccca

SEQ ID NO: 1047709 - RNA, 22 nt, Human
ccucuccgcaguuacccuccca

SEQ ID NO: 1047710 - RNA, 22 nt, Human
ccugcaaucaugccagcaaauu

SEQ ID NO: 1047711 - RNA, 21 nt, Human
ccugggcgucuccgcggucca

SEQ ID NO: 1047712 - RNA, 22 nt, Human
cgcccagccccagucccggacu

SEQ ID NO: 1047713 - RNA, 19 nt, Human
cggagccccgcgccaggcc

SEQ ID NO: 1047714 - RNA, 18 nt, Human
cuaaagccagagaggcac

SEQ ID NO: 1047715 - RNA, 21 nt, Human
cuaaagccagagaggcacagc

SEQ ID NO: 1047716 - RNA, 18 nt, Human
cuagucccugggcugggg

SEQ ID NO: 1047717 - RNA, 25 nt, Human
cucacacaugccugcaaauauauac

SEQ ID NO: 1047718 - RNA, 22 nt, Human
cuccacacacugccaaaauugc

SEQ ID NO: 1047719 - RNA, 24 nt, Human
cucucagaucugucuucagcccag

SEQ ID NO: 1047720 - RNA, 19 nt, Human
cucuccgcaguuacccucc

SEQ ID NO: 1047721 - RNA, 20 nt, Human
cucugugcguccugcccuuc

SEQ ID NO: 1047722 - RNA, 21 nt, Human
cugcagauaaauuagcugugu

SEQ ID NO: 1047723 - RNA, 18 nt, Human
cuggcucuggcuccgccc

SEQ ID NO: 1047724 - RNA, 28 nt, Human
cuguucccucggucuagcauucucuucc

SEQ ID NO: 1047725 - RNA, 30 nt, Human
cuuacauacuacacacacacacauauggug

SEQ ID NO: 1047726 - RNA, 24 nt, Human
cuucagagaaaugaaccaaaccaa

SEQ ID NO: 1047727 - RNA, 24 nt, Human
cuucagggcccaccccucaccccc

SEQ ID NO: 1047728 - RNA, 19 nt, Human
cuuccagguccggugcucu

SEQ ID NO: 1047729 - RNA, 27 nt, Human
cuugcaagcuuauaaacauacauugcc

SEQ ID NO: 1047730 - RNA, 22 nt, Human
gaacacgguuugcaacagcucc

SEQ ID NO: 1047731 - RNA, 25 nt, Human
gaccucauucucugcuguagcuuca

SEQ ID NO: 1047732 - RNA, 19 nt, Human
gacuucagagaaaugaacc

SEQ ID NO: 1047733 - RNA, 25 nt, Human
gaggcgcccgcuccggcgcgucugg

SEQ ID NO: 1047734 - RNA, 21 nt, Human
gcccugguggugucuaguccc

SEQ ID NO: 1047735 - RNA, 22 nt, Human
gcgucuggcucuggcuccgccc

SEQ ID NO: 1047736 - RNA, 18 nt, Human
gcuuccucacauacaccu

SEQ ID NO: 1047737 - RNA, 20 nt, Human
gggguuccucggccugggcg

SEQ ID NO: 1047738 - RNA, 20 nt, Human
guccaggcgugggugcgggg

SEQ ID NO: 1047739 - RNA, 23 nt, Human
uaaacuccucaauggcuucccca

SEQ ID NO: 1047740 - RNA, 21 nt, Human
uaacucgcggagccugccaau

SEQ ID NO: 1047741 - RNA, 22 nt, Human
uacacacacacacauauguuca

SEQ ID NO: 1047742 - RNA, 23 nt, Human
uacacacaccagccuacauguua

SEQ ID NO: 1047743 - RNA, 23 nt, Human
uacacaugugcacacagcacacu

SEQ ID NO: 1047744 - RNA, 21 nt, Human
uagacacacacaucuucugcc

SEQ ID NO: 1047745 - RNA, 22 nt, Human
uauacaugcuuauucacacaug

SEQ ID NO: 1047746 - RNA, 18 nt, Human
uauccaaccggcguagag

SEQ ID NO: 1047747 - RNA, 30 nt, Human
ucacccaccaguguccccucuucauaccag

SEQ ID NO: 1047748 - RNA, 19 nt, Human
ucagagaaaugaaccaaac

SEQ ID NO: 1047749 - RNA, 19 nt, Human
ucagcugagcaagucuggg

SEQ ID NO: 1047750 - RNA, 22 nt, Human
ucaugcgcauauacacacagug

SEQ ID NO: 1047751 - RNA, 21 nt, Human
uccaacugcuauccaaccggc

SEQ ID NO: 1047752 - RNA, 26 nt, Human
uccaagacucacccacucuguaacuc

SEQ ID NO: 1047753 - RNA, 20 nt, Human
uccaauggagagaugguuug

SEQ ID NO: 1047754 - RNA, 21 nt, Human
uccacacacugccaaaauugc

SEQ ID NO: 1047755 - RNA, 26 nt, Human
uccacacacugccaaaauugcagcca

SEQ ID NO: 1047756 - RNA, 20 nt, Human
uccacuguuaucaucuuucc

SEQ ID NO: 1047757 - RNA, 25 nt, Human
ucccaugugcccaaaggcagaguuc

SEQ ID NO: 1047758 - RNA, 22 nt, Human
uccccauccccaccaucaucuu

SEQ ID NO: 1047759 - RNA, 21 nt, Human
uccccuauguccucugucccc

SEQ ID NO: 1047760 - RNA, 22 nt, Human
ucccgggcagcgcgcccagccc

SEQ ID NO: 1047761 - RNA, 23 nt, Human
ucccucuccgcaguuacccuccc

SEQ ID NO: 1047762 - RNA, 19 nt, Human
uccucaauggcuuccccac

SEQ ID NO: 1047763 - RNA, 21 nt, Human
ucgcugcagacaccgugccau

SEQ ID NO: 1047764 - RNA, 19 nt, Human
ucuagucccugggcugggg

SEQ ID NO: 1047765 - RNA, 19 nt, Human
ucucagucuccugcaaagg

SEQ ID NO: 1047766 - RNA, 20 nt, Human
ucuccaagacucacccacuc

SEQ ID NO: 1047767 - RNA, 21 nt, Human
ucuccagggaacagugggacc

SEQ ID NO: 1047768 - RNA, 19 nt, Human
ucugccuacaaacacacau

SEQ ID NO: 1047769 - RNA, 25 nt, Human
ucuugcauucucuuggcucccaaga

SEQ ID NO: 1047770 - RNA, 19 nt, Human
ugaaagaagggguuaaaau

SEQ ID NO: 1047771 - RNA, 23 nt, Human
ugacacuguccccuucacauccc

SEQ ID NO: 1047772 - RNA, 19 nt, Human
ugaggaacacaaggugugg

SEQ ID NO: 1047773 - RNA, 20 nt, Human
ugaggaacacaagguguggg

SEQ ID NO: 1047774 - RNA, 24 nt, Human
ugcacacacaagggcuuccucaca

SEQ ID NO: 1047775 - RNA, 24 nt, Human
ugccuacacacaccagccuacaug

SEQ ID NO: 1047776 - RNA, 19 nt, Human
ugcucacccaccaggaucu

SEQ ID NO: 1047777 - RNA, 22 nt, Human
uggcauucgcugggcccuuccc

SEQ ID NO: 1047778 - RNA, 22 nt, Human
uggcucuggcuccgcccggccc

SEQ ID NO: 1047779 - RNA, 22 nt, Human
ugggaacugguauuuuagaauu

SEQ ID NO: 1047780 - RNA, 18 nt, Human
ugucagagcacauuccuu

SEQ ID NO: 1047781 - RNA, 19 nt, Human
uguccucuguccccauccc

SEQ ID NO: 1047782 - RNA, 19 nt, Human
uguggccaaacaugugcac

SEQ ID NO: 1047783 - RNA, 18 nt, Human
uguggguggacacccaca

SEQ ID NO: 1047784 - RNA, 19 nt, Human
uguguguacacaugugcac

SEQ ID NO: 1047785 - RNA, 20 nt, Human
uguguguacacaugugcaca

SEQ ID NO: 1047786 - RNA, 22 nt, Human
uguguguacacaugugcacaca

SEQ ID NO: 1047787 - RNA, 24 nt, Human
uguucacucuuacaugcucacaua

SEQ ID NO: 1047788 - RNA, 23 nt, Human
uuccucacauacaccuaauacaa

SEQ ID NO: 1047789 - RNA, 20 nt, Human
uucgcccccgcgcggggccg

SEQ ID NO: 1047790 - RNA, 21 nt, Human
uucgcugggcccuucccauca

SEQ ID NO: 1047791 - RNA, 18 nt, Human
uugacccaggccuuccag

SEQ ID NO: 1047792 - RNA, 22 nt, Human
aagaggccacaacgcccaagca

SEQ ID NO: 1047793 - RNA, 24 nt, Human
aaggacccaaaacucuggaaagga

SEQ ID NO: 1047794 - RNA, 24 nt, Human
acagacaggaaagcauuggcuucg

SEQ ID NO: 1047795 - RNA, 26 nt, Human
accuugguaacuugccaguuacgcug

SEQ ID NO: 1047796 - RNA, 18 nt, Human
aggcacagacuucacugc

SEQ ID NO: 1047797 - RNA, 19 nt, Human
auggaacagcuggaaggga

SEQ ID NO: 1047798 - RNA, 22 nt, Human
cacaguucacuguaaaggcaag

SEQ ID NO: 1047799 - RNA, 22 nt, Human
cagagacccaggaccucagcuc

SEQ ID NO: 1047800 - RNA, 19 nt, Human
caguuacgcugguggugga

SEQ ID NO: 1047801 - RNA, 23 nt, Human
ccguuccgcuccauccgccgccu

SEQ ID NO: 1047802 - RNA, 20 nt, Human
cuccauccgccgccugcgcc

SEQ ID NO: 1047803 - RNA, 21 nt, Human
cuccauccgccgccugcgccc

SEQ ID NO: 1047804 - RNA, 23 nt, Human
cuguccugcugguaaacaacccu

SEQ ID NO: 1047805 - RNA, 22 nt, Human
cuucccagcugcaccagguccc

SEQ ID NO: 1047806 - RNA, 23 nt, Human
gagaauggaacagcuggaaggga

SEQ ID NO: 1047807 - RNA, 21 nt, Human
gagagaauggaacagcuggaa

SEQ ID NO: 1047808 - RNA, 18 nt, Human
gcuccauccgccgccugc

SEQ ID NO: 1047809 - RNA, 18 nt, Human
gugguggagagaauggaa

SEQ ID NO: 1047810 - RNA, 18 nt, Human
ucacaguucacuguaaag

SEQ ID NO: 1047811 - RNA, 19 nt, Human
ucagaggacacgcagugca

SEQ ID NO: 1047812 - RNA, 19 nt, Human
ucccaagcuucccagcugc

SEQ ID NO: 1047813 - RNA, 21 nt, Human
ucccaagcuucccagcugcac

SEQ ID NO: 1047814 - RNA, 19 nt, Human
uccugcaucaaauacagac

SEQ ID NO: 1047815 - RNA, 23 nt, Human
ucucaagaccccuagccguuccg

SEQ ID NO: 1047816 - RNA, 20 nt, Human
ugaucacugcuguuucagga

SEQ ID NO: 1047817 - RNA, 30 nt, Human
uggagagaauggaacagcuggaagggagaa

SEQ ID NO: 1047818 - RNA, 20 nt, Human
ugggaaguguuuaauccugc

SEQ ID NO: 1047819 - RNA, 25 nt, Human
ugggaaguguuuaauccugcaucaa

SEQ ID NO: 1047820 - RNA, 19 nt, Human
uggugguggagagaaugga

SEQ ID NO: 1047821 - RNA, 24 nt, Human
uuggcuucgagagaaucacaguuc

SEQ ID NO: 1047822 - RNA, 21 nt, Human
aaaaucccuucagaucccgcu

SEQ ID NO: 1047823 - RNA, 18 nt, Human
aaacagaaggagauucua

SEQ ID NO: 1047824 - RNA, 21 nt, Human
aguuuuauuaaaacagaagga

SEQ ID NO: 1047825 - RNA, 19 nt, Human
aucccuucagaucccgcua

SEQ ID NO: 1047826 - RNA, 22 nt, Human
caaaucaaaagcaucuacaaua

SEQ ID NO: 1047827 - RNA, 18 nt, Human
cagcucagaggugcgcgg

SEQ ID NO: 1047828 - RNA, 22 nt, Human
cauagccagaaacuaaguccaa

SEQ ID NO: 1047829 - RNA, 24 nt, Human
caucauagccagaaacuaagucca

SEQ ID NO: 1047830 - RNA, 21 nt, Human
ccagaaacuaaguccaaauca

SEQ ID NO: 1047831 - RNA, 21 nt, Human
ccgccacuacacuuaggcugg

SEQ ID NO: 1047832 - RNA, 19 nt, Human
uccgugcuucuccccagga

SEQ ID NO: 1047833 - RNA, 21 nt, Human
uggguaaaaagggagauaagg

SEQ ID NO: 1047834 - RNA, 20 nt, Human
uucaaaaucccuucagaucc

SEQ ID NO: 1047835 - RNA, 21 nt, Human
uuucaaaaucccuucagaucc

SEQ ID NO: 1047836 - RNA, 21 nt, Human
aagagaaagcagacgcgugca

SEQ ID NO: 1047837 - RNA, 25 nt, Human
aggcagaagagaugaucucucugca

SEQ ID NO: 1047838 - RNA, 19 nt, Human
gcuugaggcagaagagaug

SEQ ID NO: 1047839 - RNA, 20 nt, Human
gcuugaggcagaagagauga

SEQ ID NO: 1047840 - RNA, 18 nt, Human
ggcagaagagaugaucuc

SEQ ID NO: 1047841 - RNA, 21 nt, Human
ggcuugaggcagaagagauga

SEQ ID NO: 1047842 - RNA, 21 nt, Human
uggcuugaggcagaagagaug

SEQ ID NO: 1047843 - RNA, 22 nt, Human
aaacaggaguucaaaccucagc

SEQ ID NO: 1047844 - RNA, 23 nt, Human
aaaccucagcagaacaggacucu

SEQ ID NO: 1047845 - RNA, 18 nt, Human
agguccccgccgccccuc

SEQ ID NO: 1047846 - RNA, 26 nt, Human
caauaaaaacaggaguucaaaccuca

SEQ ID NO: 1047847 - RNA, 22 nt, Human
cagaacaggacucugggguccc

SEQ ID NO: 1047848 - RNA, 18 nt, Human
ccccagagggcccuccuc

SEQ ID NO: 1047849 - RNA, 18 nt, Human
ccccagagggcccuccuc

SEQ ID NO: 1047850 - RNA, 19 nt, Human
ccccgccgccccucgcugc

SEQ ID NO: 1047851 - RNA, 28 nt, Human
cccggugccagguccccgccgccccucc

SEQ ID NO: 1047852 - RNA, 27 nt, Human
cccucgcugcccucgcgcugcggcccg

SEQ ID NO: 1047853 - RNA, 21 nt, Human
ccgcccggugccagguccccg

SEQ ID NO: 1047854 - RNA, 18 nt, Human
ccgccgccccucgcugcc

SEQ ID NO: 1047855 - RNA, 19 nt, Human
ccgccgccccucgcugccc

SEQ ID NO: 1047856 - RNA, 20 nt, Human
ccgccgccccucgcugcccu

SEQ ID NO: 1047857 - RNA, 31 nt, Human
ccucgcgcugcggcccggagcggccccuccu

SEQ ID NO: 1047858 - RNA, 20 nt, Human
ccucgcugcccucgcgcugc

SEQ ID NO: 1047859 - RNA, 18 nt, Human
cgcugccgccggccccgc

SEQ ID NO: 1047860 - RNA, 24 nt, Human
cugcggcccggagcggccccuccc

SEQ ID NO: 1047861 - RNA, 22 nt, Human
gacucugggguccccagagggc

SEQ ID NO: 1047862 - RNA, 23 nt, Human
gacucugggguccccagagggcc

SEQ ID NO: 1047863 - RNA, 21 nt, Human
gccccuccccgguacggcccg

SEQ ID NO: 1047864 - RNA, 18 nt, Human
gcugcggcccggagcggc

SEQ ID NO: 1047865 - RNA, 19 nt, Human
ggacucugggguccccaga

SEQ ID NO: 1047866 - RNA, 21 nt, Human
gggcaauuuauuuuacaauaa

SEQ ID NO: 1047867 - RNA, 19 nt, Human
gggcggggagcucggcuuc

SEQ ID NO: 1047868 - RNA, 22 nt, Human
ggguccccagagggcccuccuc

SEQ ID NO: 1047869 - RNA, 22 nt, Human
uagggggacgacaggggugggc

SEQ ID NO: 1047870 - RNA, 18 nt, Human
uauuuuacaauaaaaaca

SEQ ID NO: 1047871 - RNA, 19 nt, Human
ucacacugggugaggaggg

SEQ ID NO: 1047872 - RNA, 22 nt, Human
uccccgccgccccucgcugccc

SEQ ID NO: 1047873 - RNA, 23 nt, Human
uccccgccgccccucgcugcccc

SEQ ID NO: 1047874 - RNA, 21 nt, Human
uccccgguacggcccgggucc

SEQ ID NO: 1047875 - RNA, 22 nt, Human
uuaggggaccagaauggggggc

SEQ ID NO: 1047876 - RNA, 20 nt, Human
uuuuuuuuuuuaggggacca

SEQ ID NO: 1047877 - RNA, 20 nt, Human
uuuuuuuuuuuuaggggacc

SEQ ID NO: 1047878 - RNA, 22 nt, Human
aaaaaaaaaauuauccauggaa

SEQ ID NO: 1047879 - RNA, 23 nt, Human
aaacagaggcccagacagguuca

SEQ ID NO: 1047880 - RNA, 23 nt, Human
aaacagggcagccagcaagccca

SEQ ID NO: 1047881 - RNA, 20 nt, Human
aacauuuucgccgauaacaa

SEQ ID NO: 1047882 - RNA, 19 nt, Human
aagcuaugcacuuugccuc

SEQ ID NO: 1047883 - RNA, 25 nt, Human
agaaucauaaauaauucugccacug

SEQ ID NO: 1047884 - RNA, 22 nt, Human
agcugcccucgcggcaagcucc

SEQ ID NO: 1047885 - RNA, 21 nt, Human
aggaagugucugggccgggau

SEQ ID NO: 1047886 - RNA, 24 nt, Human
aggcagcugcccucgcggcaagcu

SEQ ID NO: 1047887 - RNA, 23 nt, Human
agugucugggccgggaugugagu

SEQ ID NO: 1047888 - RNA, 22 nt, Human
caaaacagggcagccagcaagc

SEQ ID NO: 1047889 - RNA, 24 nt, Human
caaaacagggcagccagcaagccc

SEQ ID NO: 1047890 - RNA, 24 nt, Human
caccuaucacaccagcuaccacuu

SEQ ID NO: 1047891 - RNA, 24 nt, Human
cacucuuuccucugugccgcucca

SEQ ID NO: 1047892 - RNA, 22 nt, Human
cagcaagcccagcuccugccag

SEQ ID NO: 1047893 - RNA, 21 nt, Human
cagccagcaagcccagcuccu

SEQ ID NO: 1047894 - RNA, 20 nt, Human
caggagggcguggguuggca

SEQ ID NO: 1047895 - RNA, 18 nt, Human
cagggcagccagcaagcc

SEQ ID NO: 1047896 - RNA, 19 nt, Human
caguauggauuaugucccc

SEQ ID NO: 1047897 - RNA, 21 nt, Human
cauagcaacauuauacaauag

SEQ ID NO: 1047898 - RNA, 27 nt, Human
ccaaagcccacacucuuuccucugugc

SEQ ID NO: 1047899 - RNA, 21 nt, Human
ccacacugcccucucugccug

SEQ ID NO: 1047900 - RNA, 24 nt, Human
ccacacugcccucucugccugggc

SEQ ID NO: 1047901 - RNA, 21 nt, Human
ccagacagguucaucaacugg

SEQ ID NO: 1047902 - RNA, 21 nt, Human
cccaccuaucacaccagcuac

SEQ ID NO: 1047903 - RNA, 24 nt, Human
cccagccuuagacaaccaguuggc

SEQ ID NO: 1047904 - RNA, 19 nt, Human
ccccucugucucuguggga

SEQ ID NO: 1047905 - RNA, 19 nt, Human
ccuccacacugcccucucu

SEQ ID NO: 1047906 - RNA, 28 nt, Human
cuagcaacuucccuccacacugcccucu

SEQ ID NO: 1047907 - RNA, 21 nt, Human
cucuaagcuaugcacuuugcc

SEQ ID NO: 1047908 - RNA, 19 nt, Human
cugcccucucugccugggc

SEQ ID NO: 1047909 - RNA, 23 nt, Human
cugcuggucugacugucuccugc

SEQ ID NO: 1047910 - RNA, 29 nt, Human
cuuaaccccuucccagccuuagacaacca

SEQ ID NO: 1047911 - RNA, 21 nt, Human
cuuggcccaccuaucacacca

SEQ ID NO: 1047912 - RNA, 23 nt, Human
cuuggcccaccuaucacaccagc

SEQ ID NO: 1047913 - RNA, 24 nt, Human
gagugcccgcugaggcagcugccc

SEQ ID NO: 1047914 - RNA, 25 nt, Human
ggcaucuuaaccccuucccagccuu

SEQ ID NO: 1047915 - RNA, 24 nt, Human
ggggagcagugccuggguucugca

SEQ ID NO: 1047916 - RNA, 18 nt, Human
uagcgaguacuuccuucc

SEQ ID NO: 1047917 - RNA, 18 nt, Human
ucacaccagcuaccacuu

SEQ ID NO: 1047918 - RNA, 19 nt, Human
uccccaaguagagggaucc

SEQ ID NO: 1047919 - RNA, 19 nt, Human
ucccuccacacugcccucu

SEQ ID NO: 1047920 - RNA, 23 nt, Human
ucugacugucuccugccauguua

SEQ ID NO: 1047921 - RNA, 19 nt, Human
ucugccacugugaugugcc

SEQ ID NO: 1047922 - RNA, 20 nt, Human
ugaggaaacagaggcccaga

SEQ ID NO: 1047923 - RNA, 24 nt, Human
ugaugugccugggaaagaggccag

SEQ ID NO: 1047924 - RNA, 21 nt, Human
ugcugugcugucuccaaagcc

SEQ ID NO: 1047925 - RNA, 18 nt, Human
uggcucaaggucacacag

SEQ ID NO: 1047926 - RNA, 19 nt, Human
ugucuccaaagcccacacu

SEQ ID NO: 1047927 - RNA, 24 nt, Human
ugugaugugccugggaaagaggcc

SEQ ID NO: 1047928 - RNA, 21 nt, Human
ugugccugggaaagaggccag

SEQ ID NO: 1047929 - RNA, 22 nt, Human
uugccauucaggagggcguggg

SEQ ID NO: 1047930 - RNA, 21 nt, Human
uuguuccccucugucucugug

SEQ ID NO: 1047931 - RNA, 25 nt, Human
uuuauucaccuguauuuaucaaggg

SEQ ID NO: 1047932 - RNA, 20 nt, Human
aacucucccuccagcccccg

SEQ ID NO: 1047933 - RNA, 22 nt, Human
accagccccagcccagucuccu

SEQ ID NO: 1047934 - RNA, 25 nt, Human
acucucccuccagcccccgcuccac

SEQ ID NO: 1047935 - RNA, 20 nt, Human
auagagugagggugugauac

SEQ ID NO: 1047936 - RNA, 21 nt, Human
caaccaaugauccaaguucaa

SEQ ID NO: 1047937 - RNA, 25 nt, Human
cagcccccgcuccacccccgcacac

SEQ ID NO: 1047938 - RNA, 24 nt, Human
caugccgcacucagccuggggggc

SEQ ID NO: 1047939 - RNA, 24 nt, Human
cccauucucccucuagcccccuca

SEQ ID NO: 1047940 - RNA, 18 nt, Human
cccccgcuccacccccgc

SEQ ID NO: 1047941 - RNA, 21 nt, Human
ccuccagcccccgcuccaccc

SEQ ID NO: 1047942 - RNA, 25 nt, Human
ccucccauaaauauagagugagggu

SEQ ID NO: 1047943 - RNA, 19 nt, Human
cucccucuagcccccucaa

SEQ ID NO: 1047944 - RNA, 19 nt, Human
gauuugacgucaguugcuc

SEQ ID NO: 1047945 - RNA, 20 nt, Human
gcccccucaaccaaugauca

SEQ ID NO: 1047946 - RNA, 18 nt, Human
ggagaucaugccgcacuc

SEQ ID NO: 1047947 - RNA, 20 nt, Human
gucaguugcucagcuccauu

SEQ ID NO: 1047948 - RNA, 21 nt, Human
ucccauucucccucuagcccc

SEQ ID NO: 1047949 - RNA, 23 nt, Human
ugcucagcuccauuccuuccuuc

SEQ ID NO: 1047950 - RNA, 21 nt, Human
uggcagccucuugagucgacu

SEQ ID NO: 1047951 - RNA, 24 nt, Human
cucucuaggcucgggcagaccagc

SEQ ID NO: 1047952 - RNA, 23 nt, Human
cugaugaugggaaugcuguuucc

SEQ ID NO: 1047953 - RNA, 18 nt, Human
cuguguggccuugaguaa

SEQ ID NO: 1047954 - RNA, 23 nt, Human
uacuugcuguguggccuugagua

SEQ ID NO: 1047955 - RNA, 19 nt, Human
uagguaccaagucugauga

SEQ ID NO: 1047956 - RNA, 22 nt, Human
ucaccuacuugcuguguggccu

SEQ ID NO: 1047957 - RNA, 18 nt, Human
ucucuaggcucgggcaga

SEQ ID NO: 1047958 - RNA, 20 nt, Human
ccacugcggggguacagaga

SEQ ID NO: 1047959 - RNA, 18 nt, Human
ugacuaacuuuauuggca

SEQ ID NO: 1047960 - RNA, 22 nt, Human
ugcucuggagaggcuggcuggu

SEQ ID NO: 1047961 - RNA, 20 nt, Human
aaacucaucaguaauaggac

SEQ ID NO: 1047962 - RNA, 18 nt, Human
aaccacagcaaaacacaa

SEQ ID NO: 1047963 - RNA, 18 nt, Human
aaggaugcaaacagaugg

SEQ ID NO: 1047964 - RNA, 21 nt, Human
acaggaguggucucugggguu

SEQ ID NO: 1047965 - RNA, 25 nt, Human
acaggaguggucucugggguucccg

SEQ ID NO: 1047966 - RNA, 20 nt, Human
accacagcaaaacacaagga

SEQ ID NO: 1047967 - RNA, 22 nt, Human
agaguaaauucauuaugaauaa

SEQ ID NO: 1047968 - RNA, 18 nt, Human
agcacugguagcgcccgc

SEQ ID NO: 1047969 - RNA, 20 nt, Human
caaaacacaaggaugcaaac

SEQ ID NO: 1047970 - RNA, 22 nt, Human
caaaacacaaggaugcaaacag

SEQ ID NO: 1047971 - RNA, 19 nt, Human
caaacagauggcuuugaaa

SEQ ID NO: 1047972 - RNA, 19 nt, Human
cauggugcccgagcacugg

SEQ ID NO: 1047973 - RNA, 22 nt, Human
ccacagcaaaacacaaggaugc

SEQ ID NO: 1047974 - RNA, 20 nt, Human
ccagccgauuguuccaaggg

SEQ ID NO: 1047975 - RNA, 24 nt, Human
ccccucagcucuccacaggaguug

SEQ ID NO: 1047976 - RNA, 24 nt, Human
ccccugagcucccggagggccugu

SEQ ID NO: 1047977 - RNA, 19 nt, Human
cccgcagucggggcgccgc

SEQ ID NO: 1047978 - RNA, 20 nt, Human
cccugagcucccggagggcc

SEQ ID NO: 1047979 - RNA, 21 nt, Human
ccuguaacacaguguaguugg

SEQ ID NO: 1047980 - RNA, 22 nt, Human
ccugugcugaaauauguacugg

SEQ ID NO: 1047981 - RNA, 22 nt, Human
cgcagucggggcgccgcucgcc

SEQ ID NO: 1047982 - RNA, 18 nt, Human
cgccgggaacugcagccc

SEQ ID NO: 1047983 - RNA, 20 nt, Human
cggggccccuggucucuccc

SEQ ID NO: 1047984 - RNA, 24 nt, Human
cucaauguacuuaaauaccaaaaa

SEQ ID NO: 1047985 - RNA, 19 nt, Human
gaccaacgggaccgaucug

SEQ ID NO: 1047986 - RNA, 23 nt, Human
gaggggaagcaggagaccaagga

SEQ ID NO: 1047987 - RNA, 25 nt, Human
gcccgcugucgcuggcacgcgccug

SEQ ID NO: 1047988 - RNA, 18 nt, Human
gcgucggcggagcgcagg

SEQ ID NO: 1047989 - RNA, 23 nt, Human
gcuccuuuaaaaaccacagcaaa

SEQ ID NO: 1047990 - RNA, 23 nt, Human
gcucgccgggaacugcagcccgg

SEQ ID NO: 1047991 - RNA, 19 nt, Human
ggacgguagccgcccccuc

SEQ ID NO: 1047992 - RNA, 20 nt, Human
ggaggaaugagccugcagag

SEQ ID NO: 1047993 - RNA, 21 nt, Human
ggaugcaaacagauggcuuug

SEQ ID NO: 1047994 - RNA, 18 nt, Human
gggaagcaggagaccaag

SEQ ID NO: 1047995 - RNA, 21 nt, Human
gggaagcaggagaccaaggag

SEQ ID NO: 1047996 - RNA, 21 nt, Human
guaguuggcgcuggaguggaa

SEQ ID NO: 1047997 - RNA, 20 nt, Human
uaaaauauucucaagugcuc

SEQ ID NO: 1047998 - RNA, 27 nt, Human
uaacagguuucuacuucuugcugaauu

SEQ ID NO: 1047999 - RNA, 20 nt, Human
uaccaaaaaaacugccugug

SEQ ID NO: 1048000 - RNA, 22 nt, Human
uaccaaaaaaacugccugugcu

SEQ ID NO: 1048001 - RNA, 23 nt, Human
uccaggaccacccggcucagaag

SEQ ID NO: 1048002 - RNA, 23 nt, Human
ucugggguucccgggcucacagc

SEQ ID NO: 1048003 - RNA, 19 nt, Human
ugaaaucgucagccacuac

SEQ ID NO: 1048004 - RNA, 18 nt, Human
ugacuaaauucacaucca

SEQ ID NO: 1048005 - RNA, 21 nt, Human
ugagaggugggggucucgggc

SEQ ID NO: 1048006 - RNA, 24 nt, Human
ugagaggugggggucucgggccga

SEQ ID NO: 1048007 - RNA, 24 nt, Human
ugagaggugggggucucgggcguu

SEQ ID NO: 1048008 - RNA, 23 nt, Human
ugaggggaagcaggagaccaagg

SEQ ID NO: 1048009 - RNA, 24 nt, Human
ugaggggaagcaggagaccaagga

SEQ ID NO: 1048010 - RNA, 25 nt, Human
ugaggggaagcaggagaccaaggag

SEQ ID NO: 1048011 - RNA, 19 nt, Human
uggaggugguguuccggac

SEQ ID NO: 1048012 - RNA, 23 nt, Human
uggcacgcgccuguaacacagug

SEQ ID NO: 1048013 - RNA, 28 nt, Human
uuaaauaccaaaaaaacugccugugcuu

SEQ ID NO: 1048014 - RNA, 23 nt, Human
uuugacccuaaaauauucucaag

SEQ ID NO: 1048015 - RNA, 22 nt, Human
cccucgcaggcuggacaugguc

SEQ ID NO: 1048016 - RNA, 24 nt, Human
ccgguagugaugucaucauccucc

SEQ ID NO: 1048017 - RNA, 22 nt, Human
cguagcaggucaucuccaggga

SEQ ID NO: 1048018 - RNA, 21 nt, Human
gucaccugggacccucgcagg

SEQ ID NO: 1048019 - RNA, 23 nt, Human
aaccugccucuccacagcugaca

SEQ ID NO: 1048020 - RNA, 21 nt, Human
accugccucuccacagcugac

SEQ ID NO: 1048021 - RNA, 19 nt, Human
aggaugucugucagaagcc

SEQ ID NO: 1048022 - RNA, 23 nt, Human
caaaccugccucuccacagcuga

SEQ ID NO: 1048023 - RNA, 22 nt, Human
ccugcaguugcaaaccugccuc

SEQ ID NO: 1048024 - RNA, 21 nt, Human
cugacaguguucaguuucuuc

SEQ ID NO: 1048025 - RNA, 23 nt, Human
cugcaguugcaaaccugccucuc

SEQ ID NO: 1048026 - RNA, 21 nt, Human
gcaguugcaaaccugccucuc

SEQ ID NO: 1048027 - RNA, 22 nt, Human
ggguccugcaguugcaaaccug

SEQ ID NO: 1048028 - RNA, 24 nt, Human
ugacaguguucaguuucuucagga

SEQ ID NO: 1048029 - RNA, 25 nt, Human
ugcaguugcaaaccugccucuccac

SEQ ID NO: 1048030 - RNA, 18 nt, Human
aaacuguauuacaagcaa

SEQ ID NO: 1048031 - RNA, 22 nt, Human
aaucacuuuucaguggguucac

SEQ ID NO: 1048032 - RNA, 19 nt, Human
accaugaagcagacacuuc

SEQ ID NO: 1048033 - RNA, 23 nt, Human
agacacuucggcaacuagaaaug

SEQ ID NO: 1048034 - RNA, 21 nt, Human
caagcaaaugcaccaaauacc

SEQ ID NO: 1048035 - RNA, 19 nt, Human
caccaugaagcagacacuu

SEQ ID NO: 1048036 - RNA, 24 nt, Human
cguucagcaccaugaagcagacac

SEQ ID NO: 1048037 - RNA, 21 nt, Human
cuagcauuuacaaaacaguaa

SEQ ID NO: 1048038 - RNA, 18 nt, Human
gaaaaagcagucugugaa

SEQ ID NO: 1048039 - RNA, 20 nt, Human
gcaaaugcaccaaauaccag

SEQ ID NO: 1048040 - RNA, 24 nt, Human
guucacuucacauucaugcugcac

SEQ ID NO: 1048041 - RNA, 20 nt, Human
uaaaaaacuguauuacaagc

SEQ ID NO: 1048042 - RNA, 24 nt, Human
uaaacuacuagcauuuacaaaaca

SEQ ID NO: 1048043 - RNA, 21 nt, Human
uacaagcaaaugcaccaaaua

SEQ ID NO: 1048044 - RNA, 21 nt, Human
uagauuuuguacacaugguag

SEQ ID NO: 1048045 - RNA, 19 nt, Human
uccagggccgcugcaguug

SEQ ID NO: 1048046 - RNA, 24 nt, Human
ugaaaaagcagucugugaaaugcg

SEQ ID NO: 1048047 - RNA, 19 nt, Human
ugaaguuugcuggagaaca

SEQ ID NO: 1048048 - RNA, 23 nt, Human
uuaaaaaucacuuuucagugggu

SEQ ID NO: 1048049 - RNA, 20 nt, Human
uucacauucaugcugcacug

SEQ ID NO: 1048050 - RNA, 22 nt, Human
uuugcuggagaacauuaaaaau

SEQ ID NO: 1048051 - RNA, 21 nt, Human
aaaaaaaaaaaaaaccacaca

SEQ ID NO: 1048052 - RNA, 24 nt, Human
aaaaaaaaaagaaaaacacacaaa

SEQ ID NO: 1048053 - RNA, 22 nt, Human
aaaaaaaaagaaaaacacacaa

SEQ ID NO: 1048054 - RNA, 21 nt, Human
aaaaaaagaaaaacacacaaa

SEQ ID NO: 1048055 - RNA, 18 nt, Human
aaaaaaccacacacacac

SEQ ID NO: 1048056 - RNA, 25 nt, Human
aaaaaaccacacacacacacaaaua

SEQ ID NO: 1048057 - RNA, 20 nt, Human
aaaaaagaaaaacacacaaa

SEQ ID NO: 1048058 - RNA, 30 nt, Human
aaaaaagaaaaacacacaaauaguuugggg

SEQ ID NO: 1048059 - RNA, 24 nt, Human
aaaaaaggcuguggaaagccuggg

SEQ ID NO: 1048060 - RNA, 26 nt, Human
aaaaacaaaaacaaaaccaaaaaaaa

SEQ ID NO: 1048061 - RNA, 25 nt, Human
aaaacaaaaacaaaaacaaaaccaa

SEQ ID NO: 1048062 - RNA, 26 nt, Human
aaaacaaaaacaaaaacaaaaccaaa

SEQ ID NO: 1048063 - RNA, 22 nt, Human
aaaacaaaaccaaaaaaaaacc

SEQ ID NO: 1048064 - RNA, 24 nt, Human
aaaaccaaaaaaaaaccacaaaua

SEQ ID NO: 1048065 - RNA, 19 nt, Human
aaaaggcuguggaaagccu

SEQ ID NO: 1048066 - RNA, 22 nt, Human
aaacaaaaacaaaaacaaaacc

SEQ ID NO: 1048067 - RNA, 23 nt, Human
aaacaaaaacaaaaacaaaacca

SEQ ID NO: 1048068 - RNA, 25 nt, Human
aaacaaaaacaaaaacaaaaccaaa

SEQ ID NO: 1048069 - RNA, 26 nt, Human
aaacaaaaacaaaaacaaaaccaaaa

SEQ ID NO: 1048070 - RNA, 23 nt, Human
aaacaaaaacaaaaccaaaaaaa

SEQ ID NO: 1048071 - RNA, 20 nt, Human
aaagagaaaacaaaugagaa

SEQ ID NO: 1048072 - RNA, 24 nt, Human
aaauaguuugggaggccgaggcag

SEQ ID NO: 1048073 - RNA, 22 nt, Human
aacaaaaccaaaaaaaaaccac

SEQ ID NO: 1048074 - RNA, 21 nt, Human
aacaaagcugcaaagacaagc

SEQ ID NO: 1048075 - RNA, 26 nt, Human
aacaaaguggcaauuuggaggcagag

SEQ ID NO: 1048076 - RNA, 27 nt, Human
aacaaaguggcaauuuggaggcagaga

SEQ ID NO: 1048077 - RNA, 19 nt, Human
aacauggugaaaccccguc

SEQ ID NO: 1048078 - RNA, 20 nt, Human
aacauggugaaaccccgucu

SEQ ID NO: 1048079 - RNA, 21 nt, Human
aacauggugaaaccccgucuc

SEQ ID NO: 1048080 - RNA, 20 nt, Human
aacauggugaaacccugucu

SEQ ID NO: 1048081 - RNA, 21 nt, Human
aacauggugaaacccugucuc

SEQ ID NO: 1048082 - RNA, 20 nt, Human
aagaaaagggaucucuuagc

SEQ ID NO: 1048083 - RNA, 24 nt, Human
aagcaggaaugagaguaagggugg

SEQ ID NO: 1048084 - RNA, 20 nt, Human
aaggugucaauuaggaagug

SEQ ID NO: 1048085 - RNA, 22 nt, Human
aagugccaaaauacuaaagucu

SEQ ID NO: 1048086 - RNA, 18 nt, Human
aaucgcuugaacccugga

SEQ ID NO: 1048087 - RNA, 24 nt, Human
aaucgcuugaacccuggaggcaga

SEQ ID NO: 1048088 - RNA, 24 nt, Human
acaaaaacaaaaacaaaaccaaaa

SEQ ID NO: 1048089 - RNA, 21 nt, Human
acaaaaccaaaaaaaaaccac

SEQ ID NO: 1048090 - RNA, 24 nt, Human
acaaaaccaaaaaaaaaccacaaa

SEQ ID NO: 1048091 - RNA, 19 nt, Human
acaaagcugcaaagacaag

SEQ ID NO: 1048092 - RNA, 26 nt, Human
acaaaguggcaauuuggaggcagaga

SEQ ID NO: 1048093 - RNA, 20 nt, Human
acagagcaagacuccgucuc

SEQ ID NO: 1048094 - RNA, 24 nt, Human
acagagcaagacuccgucucaaaa

SEQ ID NO: 1048095 - RNA, 19 nt, Human
accacaaauaggccaggcu

SEQ ID NO: 1048096 - RNA, 24 nt, Human
accccgucucuacuaaaaauacaa

SEQ ID NO: 1048097 - RNA, 24 nt, Human
acccugucucuacuaaaaauauaa

SEQ ID NO: 1048098 - RNA, 20 nt, Human
accuuaugucaggaguucaa

SEQ ID NO: 1048099 - RNA, 22 nt, Human
acgccacugcacuccagccugg

SEQ ID NO: 1048100 - RNA, 24 nt, Human
acgccacugcacuccagccugggc

SEQ ID NO: 1048101 - RNA, 18 nt, Human
acugcacuccagccuggg

SEQ ID NO: 1048102 - RNA, 24 nt, Human
acugcacuccagccugggcaaaag

SEQ ID NO: 1048103 - RNA, 24 nt, Human
acugcacucuagccugggcgacag

SEQ ID NO: 1048104 - RNA, 26 nt, Human
acugcacucuagccugggcgacagag

SEQ ID NO: 1048105 - RNA, 22 nt, Human
acuuagcgggaauaaggggaac

SEQ ID NO: 1048106 - RNA, 20 nt, Human
agaaaggagacauaaaaaaa

SEQ ID NO: 1048107 - RNA, 25 nt, Human
agaaaggagacauaaaaaaaggcug

SEQ ID NO: 1048108 - RNA, 26 nt, Human
agaaaggagacauaaaaaaaggcugu

SEQ ID NO: 1048109 - RNA, 21 nt, Human
agacauaaaaaaaggcugugg

SEQ ID NO: 1048110 - RNA, 25 nt, Human
agagcuaacaaagcugcaaagacaa

SEQ ID NO: 1048111 - RNA, 19 nt, Human
agaggaagcaggaaugaga

SEQ ID NO: 1048112 - RNA, 18 nt, Human
agagguugcagugagccg

SEQ ID NO: 1048113 - RNA, 23 nt, Human
agagguugcagugagccgagauc

SEQ ID NO: 1048114 - RNA, 24 nt, Human
agagguugcagugagccgagauca

SEQ ID NO: 1048115 - RNA, 24 nt, Human
agcacuuugggaggcugaggcggg

SEQ ID NO: 1048116 - RNA, 22 nt, Human
agcaggaaugagaguaagggug

SEQ ID NO: 1048117 - RNA, 22 nt, Human
agccuggccaacauggugaaac

SEQ ID NO: 1048118 - RNA, 24 nt, Human
agccuggccaacauggugaaaccc

SEQ ID NO: 1048119 - RNA, 24 nt, Human
agccugggcaaaagugugagacuc

SEQ ID NO: 1048120 - RNA, 24 nt, Human
agccugggcgacagagcaagacuc

SEQ ID NO: 1048121 - RNA, 23 nt, Human
agccuggggaguuaugugggugg

SEQ ID NO: 1048122 - RNA, 20 nt, Human
agcugggcgugguggugggc

SEQ ID NO: 1048123 - RNA, 19 nt, Human
aggaaagaaagagaaaaca

SEQ ID NO: 1048124 - RNA, 19 nt, Human
aggagaggaaagaaagaga

SEQ ID NO: 1048125 - RNA, 18 nt, Human
aggcaagagaaucgcuug

SEQ ID NO: 1048126 - RNA, 20 nt, Human
aggcagagaaggaauaaggu

SEQ ID NO: 1048127 - RNA, 25 nt, Human
aggcagagaaggaauaagguagggu

SEQ ID NO: 1048128 - RNA, 21 nt, Human
aggcagagguugcagugagcc

SEQ ID NO: 1048129 - RNA, 24 nt, Human
aggcagagguugcagugagccgag

SEQ ID NO: 1048130 - RNA, 18 nt, Human
aggcaggagaauggugug

SEQ ID NO: 1048131 - RNA, 20 nt, Human
aggcaggagaauggugugaa

SEQ ID NO: 1048132 - RNA, 20 nt, Human
aggcaggagaauggugugaa

SEQ ID NO: 1048133 - RNA, 24 nt, Human
aggcaggagaauggugugaaucug

SEQ ID NO: 1048134 - RNA, 24 nt, Human
aggcagguggaucacgaggucagg

SEQ ID NO: 1048135 - RNA, 26 nt, Human
aggcagguggaucacgaggucaggag

SEQ ID NO: 1048136 - RNA, 21 nt, Human
aggccgaggcagguggaucac

SEQ ID NO: 1048137 - RNA, 21 nt, Human
aggcggagguugcagugagcc

SEQ ID NO: 1048138 - RNA, 24 nt, Human
aggcggagguugcagugagccgag

SEQ ID NO: 1048139 - RNA, 24 nt, Human
aggcguuguggcgugugccuguaa

SEQ ID NO: 1048140 - RNA, 24 nt, Human
aggcucagugccucacgccuguaa

SEQ ID NO: 1048141 - RNA, 19 nt, Human
aggcugaggcaggagaaug

SEQ ID NO: 1048142 - RNA, 19 nt, Human
aggcugaggcggguggauu

SEQ ID NO: 1048143 - RNA, 21 nt, Human
aggcugaggcggguggauuac

SEQ ID NO: 1048144 - RNA, 19 nt, Human
agguaguaaacagcagcaa

SEQ ID NO: 1048145 - RNA, 18 nt, Human
agguaguaaacucccauc

SEQ ID NO: 1048146 - RNA, 24 nt, Human
agguggaucacgaggucaggagau

SEQ ID NO: 1048147 - RNA, 19 nt, Human
aguaagaaaagggaucucu

SEQ ID NO: 1048148 - RNA, 24 nt, Human
agugccucacgccuguaaucccag

SEQ ID NO: 1048149 - RNA, 19 nt, Human
agugguggggaggaaaggg

SEQ ID NO: 1048150 - RNA, 25 nt, Human
aguuucaaccauaacccccaucuac

SEQ ID NO: 1048151 - RNA, 24 nt, Human
aucacgccacugcacuccagccug

SEQ ID NO: 1048152 - RNA, 20 nt, Human
aucauccuaaaucuuagaaa

SEQ ID NO: 1048153 - RNA, 24 nt, Human
aucgcgccacugcacucuagccug

SEQ ID NO: 1048154 - RNA, 24 nt, Human
auuaccuuaugucaggaguucaag

SEQ ID NO: 1048155 - RNA, 23 nt, Human
caaaaaaaaaccacaaauaggcc

SEQ ID NO: 1048156 - RNA, 24 nt, Human
caaaaaaaaaccacaaauaggcca

SEQ ID NO: 1048157 - RNA, 26 nt, Human
caaaaacaaaaacaaaaacaaaacca

SEQ ID NO: 1048158 - RNA, 24 nt, Human
caacauggugaaacccugucucua

SEQ ID NO: 1048159 - RNA, 18 nt, Human
caagaacagccuggccaa

SEQ ID NO: 1048160 - RNA, 24 nt, Human
caagaacagccuggccaacauggu

SEQ ID NO: 1048161 - RNA, 21 nt, Human
caccuguaaucccagcuacuc

SEQ ID NO: 1048162 - RNA, 24 nt, Human
caccuguaaucccagcuacucggg

SEQ ID NO: 1048163 - RNA, 24 nt, Human
cacgccuguaaucccagcacuuug

SEQ ID NO: 1048164 - RNA, 20 nt, Human
cacuccagccugggcaaaag

SEQ ID NO: 1048165 - RNA, 20 nt, Human
cacuccagccugggcaaaag

SEQ ID NO: 1048166 - RNA, 22 nt, Human
cacuccagccugggcaaaagug

SEQ ID NO: 1048167 - RNA, 19 nt, Human
cacugcacuccagccuggg

SEQ ID NO: 1048168 - RNA, 21 nt, Human
cacugcacuccagccugggca

SEQ ID NO: 1048169 - RNA, 22 nt, Human
cacugcacuccagccugggcaa

SEQ ID NO: 1048170 - RNA, 23 nt, Human
cacugcacuccagccugggcaaa

SEQ ID NO: 1048171 - RNA, 19 nt, Human
cacugcacucuagccuggg

SEQ ID NO: 1048172 - RNA, 20 nt, Human
cacugcacucuagccugggc

SEQ ID NO: 1048173 - RNA, 22 nt, Human
cacugcacucuagccugggcga

SEQ ID NO: 1048174 - RNA, 23 nt, Human
cacugcacucuagccugggcgac

SEQ ID NO: 1048175 - RNA, 24 nt, Human
cacugcacucuagccugggcgaca

SEQ ID NO: 1048176 - RNA, 24 nt, Human
cagcacuuugggaggcugaggcgg

SEQ ID NO: 1048177 - RNA, 24 nt, Human
cagcuacucgggaggcugaggcag

SEQ ID NO: 1048178 - RNA, 25 nt, Human
caggaagguccaaacgcaggguuua

SEQ ID NO: 1048179 - RNA, 20 nt, Human
caggguuuaacuaagcuggg

SEQ ID NO: 1048180 - RNA, 19 nt, Human
ccaaccaccccagucagcu

SEQ ID NO: 1048181 - RNA, 20 nt, Human
ccacugcacuccagccuggg

SEQ ID NO: 1048182 - RNA, 21 nt, Human
ccacugcacuccagccugggc

SEQ ID NO: 1048183 - RNA, 24 nt, Human
ccacugcacuccagccugggcaaa

SEQ ID NO: 1048184 - RNA, 20 nt, Human
ccacugcacucuagccuggg

SEQ ID NO: 1048185 - RNA, 20 nt, Human
ccacugcacucuagccuggg

SEQ ID NO: 1048186 - RNA, 21 nt, Human
ccacugcacucuagccugggc

SEQ ID NO: 1048187 - RNA, 21 nt, Human
ccacugcacucuagccugggc

SEQ ID NO: 1048188 - RNA, 21 nt, Human
ccacugcacucuagccugggc

SEQ ID NO: 1048189 - RNA, 23 nt, Human
ccacugcacucuagccugggcga

SEQ ID NO: 1048190 - RNA, 24 nt, Human
ccacugcacucuagccugggcgac

SEQ ID NO: 1048191 - RNA, 22 nt, Human
ccccggagccugccagccugcc

SEQ ID NO: 1048192 - RNA, 20 nt, Human
ccgucucaaaaacaaaaaca

SEQ ID NO: 1048193 - RNA, 23 nt, Human
ccgucucaaaaacaaaaacaaaa

SEQ ID NO: 1048194 - RNA, 27 nt, Human
ccgucucaaaaacaaaaacaaaaacaa

SEQ ID NO: 1048195 - RNA, 22 nt, Human
ccuggccaacauggugaaaccc

SEQ ID NO: 1048196 - RNA, 24 nt, Human
ccuggccaacauggugaaacccug

SEQ ID NO: 1048197 - RNA, 22 nt, Human
ccuggcuaacauggugaaaccc

SEQ ID NO: 1048198 - RNA, 23 nt, Human
ccuggcuaacauggugaaacccc

SEQ ID NO: 1048199 - RNA, 24 nt, Human
ccuggcuaacauggugaaaccccg

SEQ ID NO: 1048200 - RNA, 22 nt, Human
ccugggcgacagagcaagacuc

SEQ ID NO: 1048201 - RNA, 22 nt, Human
ccuguaaucccagcacuuuggg

SEQ ID NO: 1048202 - RNA, 21 nt, Human
ccuguaaucccagcuacucgg

SEQ ID NO: 1048203 - RNA, 21 nt, Human
ccuguaaucccagcuacucgg

SEQ ID NO: 1048204 - RNA, 24 nt, Human
cgagaucacgccacugcacuccag

SEQ ID NO: 1048205 - RNA, 24 nt, Human
cgaggcagguggaucacgagguca

SEQ ID NO: 1048206 - RNA, 24 nt, Human
cgccacugcacuccagccugggca

SEQ ID NO: 1048207 - RNA, 25 nt, Human
cgcuuccaaaaaauaaaauguuagg

SEQ ID NO: 1048208 - RNA, 21 nt, Human
cggccgccaauggaguagcgc

SEQ ID NO: 1048209 - RNA, 19 nt, Human
cuaaaggcaaaaucuucau

SEQ ID NO: 1048210 - RNA, 21 nt, Human
cuaaaucuuagaaaggagaca

SEQ ID NO: 1048211 - RNA, 24 nt, Human
cuaguaugguauacauaugcccua

SEQ ID NO: 1048212 - RNA, 27 nt, Human
cucaaaaacaaaaacaaaaacaaaacc

SEQ ID NO: 1048213 - RNA, 22 nt, Human
cucacgccuguaaucccagcac

SEQ ID NO: 1048214 - RNA, 24 nt, Human
cucacgccuguaaucccagcacuu

SEQ ID NO: 1048215 - RNA, 22 nt, Human
cucagugccucacgccuguaau

SEQ ID NO: 1048216 - RNA, 25 nt, Human
cugcaggcaggaagguccaaacgca

SEQ ID NO: 1048217 - RNA, 24 nt, Human
cuggaaguuuaagagcuaacaaag

SEQ ID NO: 1048218 - RNA, 24 nt, Human
cuggccaacauggugaaacccugu

SEQ ID NO: 1048219 - RNA, 21 nt, Human
cuguaaucccagcuacucggg

SEQ ID NO: 1048220 - RNA, 26 nt, Human
cugucuuccaaaaaaaaaaaaaaacc

SEQ ID NO: 1048221 - RNA, 19 nt, Human
gaaacccugucucuacuaa

SEQ ID NO: 1048222 - RNA, 24 nt, Human
gaagugccaaaauacuaaagucuc

SEQ ID NO: 1048223 - RNA, 21 nt, Human
gaauaauaagguagggaagga

SEQ ID NO: 1048224 - RNA, 24 nt, Human
gacagagcaagacuccgucucaaa

SEQ ID NO: 1048225 - RNA, 20 nt, Human
gagaucgcgccacugcacuc

SEQ ID NO: 1048226 - RNA, 23 nt, Human
gagcaagacuccgucucaaaaac

SEQ ID NO: 1048227 - RNA, 20 nt, Human
gaggcagguggaucacgagg

SEQ ID NO: 1048228 - RNA, 23 nt, Human
gagguugcagugagccgagaucg

SEQ ID NO: 1048229 - RNA, 18 nt, Human
gaucauugauucucuuuc

SEQ ID NO: 1048230 - RNA, 24 nt, Human
gcacucuagccugggcgacagagc

SEQ ID NO: 1048231 - RNA, 24 nt, Human
gccaacauggugaaacccugucuc

SEQ ID NO: 1048232 - RNA, 22 nt, Human
gccacugcacuccagccugggc

SEQ ID NO: 1048233 - RNA, 24 nt, Human
gccacugcacuccagccugggcaa

SEQ ID NO: 1048234 - RNA, 24 nt, Human
gccacugcacucuagccugggcga

SEQ ID NO: 1048235 - RNA, 18 nt, Human
gccccggagccugccagc

SEQ ID NO: 1048236 - RNA, 20 nt, Human
gccccggagccugccagccu

SEQ ID NO: 1048237 - RNA, 20 nt, Human
gccgagaucacgccacugca

SEQ ID NO: 1048238 - RNA, 20 nt, Human
gccgagaucgcgccacugca

SEQ ID NO: 1048239 - RNA, 24 nt, Human
gcuaacauggugaaaccccgucuc

SEQ ID NO: 1048240 - RNA, 19 nt, Human
ggagacauaaaaaaaggcu

SEQ ID NO: 1048241 - RNA, 18 nt, Human
ggaggcagagaaggaaua

SEQ ID NO: 1048242 - RNA, 20 nt, Human
ggagguugcagugagccgag

SEQ ID NO: 1048243 - RNA, 22 nt, Human
ggagguugcagugagccgagau

SEQ ID NO: 1048244 - RNA, 23 nt, Human
ggagguugcagugagccgagauc

SEQ ID NO: 1048245 - RNA, 24 nt, Human
ggagguugcagugagccgagaucg

SEQ ID NO: 1048246 - RNA, 19 nt, Human
gggaagcugaggcaagaga

SEQ ID NO: 1048247 - RNA, 18 nt, Human
gggaggcggagguugcag

SEQ ID NO: 1048248 - RNA, 24 nt, Human
gggcgugguggugggcaccuguaa

SEQ ID NO: 1048249 - RNA, 24 nt, Human
gguggugggcaccuguaaucccag

SEQ ID NO: 1048250 - RNA, 24 nt, Human
gugaaucugggaggcggagguugc

SEQ ID NO: 1048251 - RNA, 22 nt, Human
guggcgugugccuguaauccca

SEQ ID NO: 1048252 - RNA, 23 nt, Human
guggugggcaccuguaaucccag

SEQ ID NO: 1048253 - RNA, 19 nt, Human
guugcagugagccgagauc

SEQ ID NO: 1048254 - RNA, 19 nt, Human
guugcagugagccgagauc

SEQ ID NO: 1048255 - RNA, 21 nt, Human
guugcagugagccgagaucgc

SEQ ID NO: 1048256 - RNA, 20 nt, Human
guuugggaggccgaggcagg

SEQ ID NO: 1048257 - RNA, 22 nt, Human
uaacauggugaaaccccgucuc

SEQ ID NO: 1048258 - RNA, 24 nt, Human
uaacauggugaaaccccgucucua

SEQ ID NO: 1048259 - RNA, 22 nt, Human
uaaggguggggcacauaauccu

SEQ ID NO: 1048260 - RNA, 21 nt, Human
uagaaaggagacauaaaaaaa

SEQ ID NO: 1048261 - RNA, 19 nt, Human
uaguaagaaaagggaucuc

SEQ ID NO: 1048262 - RNA, 21 nt, Human
uaguaugguauacauaugccc

SEQ ID NO: 1048263 - RNA, 21 nt, Human
uaugucaggaguucaagaaca

SEQ ID NO: 1048264 - RNA, 19 nt, Human
ucaaaaaaaaaaaaaaaga

SEQ ID NO: 1048265 - RNA, 23 nt, Human
ucaaaaaaaaaaaaaaagaaaaa

SEQ ID NO: 1048266 - RNA, 21 nt, Human
ucaaaaacaaaaacaaaaaca

SEQ ID NO: 1048267 - RNA, 24 nt, Human
ucaaauaaaacuacauccaaaaac

SEQ ID NO: 1048268 - RNA, 24 nt, Human
ucacgaggucaggagauggagacc

SEQ ID NO: 1048269 - RNA, 23 nt, Human
ucacgccacugcacuccagccug

SEQ ID NO: 1048270 - RNA, 18 nt, Human
uccugcagucucccaagg

SEQ ID NO: 1048271 - RNA, 18 nt, Human
ucgcuugaacccuggagg

SEQ ID NO: 1048272 - RNA, 24 nt, Human
ucuacuguagaguauauccagaaa

SEQ ID NO: 1048273 - RNA, 24 nt, Human
ucuagccugggcgacagagcaaga

SEQ ID NO: 1048274 - RNA, 22 nt, Human
ucucuacuaaaaauacaaaaaa

SEQ ID NO: 1048275 - RNA, 23 nt, Human
ucucuacuaaaaauauaaaaauu

SEQ ID NO: 1048276 - RNA, 23 nt, Human
ucucuuagcaaauaggaaucuag

SEQ ID NO: 1048277 - RNA, 25 nt, Human
ucugucuuccaaaaaaaaaaaaaaa

SEQ ID NO: 1048278 - RNA, 21 nt, Human
ugaaaagaaggacacaugaac

SEQ ID NO: 1048279 - RNA, 19 nt, Human
ugaagggaaauauggaaau

SEQ ID NO: 1048280 - RNA, 22 nt, Human
ugaagggaaauauggaaauaug

SEQ ID NO: 1048281 - RNA, 19 nt, Human
ugaaucugggaggcggagg

SEQ ID NO: 1048282 - RNA, 22 nt, Human
ugagccgagaucacgccacugc

SEQ ID NO: 1048283 - RNA, 22 nt, Human
ugagccgagaucgcgccacugc

SEQ ID NO: 1048284 - RNA, 20 nt, Human
ugaggcaagagaaucgcuug

SEQ ID NO: 1048285 - RNA, 24 nt, Human
ugaggcaagagaaucgcuugaacc

SEQ ID NO: 1048286 - RNA, 25 nt, Human
ugaggcaagagaaucgcuugaaccc

SEQ ID NO: 1048287 - RNA, 22 nt, Human
ugaggcaggagaauggugugaa

SEQ ID NO: 1048288 - RNA, 22 nt, Human
ugaggcaggagaauggugugaa

SEQ ID NO: 1048289 - RNA, 19 nt, Human
ugaggcggguggauuaccu

SEQ ID NO: 1048290 - RNA, 26 nt, Human
ugaggcggguggauuaccuuauguca

SEQ ID NO: 1048291 - RNA, 21 nt, Human
ugccucacgccuguaauccca

SEQ ID NO: 1048292 - RNA, 22 nt, Human
ugccucacgccuguaaucccag

SEQ ID NO: 1048293 - RNA, 24 nt, Human
ugccucacgccuguaaucccagca

SEQ ID NO: 1048294 - RNA, 23 nt, Human
ugccuguaaucccagcuacucgg

SEQ ID NO: 1048295 - RNA, 24 nt, Human
ugccuguaaucccagcuacucggg

SEQ ID NO: 1048296 - RNA, 22 nt, Human
uggaaagccuggggaguuaugu

SEQ ID NO: 1048297 - RNA, 19 nt, Human
uggaaggagaggaaagaaa

SEQ ID NO: 1048298 - RNA, 20 nt, Human
uggaaggagaggaaagaaag

SEQ ID NO: 1048299 - RNA, 23 nt, Human
uggaaggagaggaaagaaagaga

SEQ ID NO: 1048300 - RNA, 25 nt, Human
uggaggcagagaaggaauaagguag

SEQ ID NO: 1048301 - RNA, 23 nt, Human
uggaggcagagguugcagugagc

SEQ ID NO: 1048302 - RNA, 24 nt, Human
uggauuaccuuaugucaggaguuc

SEQ ID NO: 1048303 - RNA, 24 nt, Human
uggccaacauggugaaacccuguc

SEQ ID NO: 1048304 - RNA, 21 nt, Human
uggcgugugccuguaauccca

SEQ ID NO: 1048305 - RNA, 24 nt, Human
uggcgugugccuguaaucccagcu

SEQ ID NO: 1048306 - RNA, 24 nt, Human
ugggaggccgaggcagguggauca

SEQ ID NO: 1048307 - RNA, 29 nt, Human
ugggaggcggagguugcagugacaacggu

SEQ ID NO: 1048308 - RNA, 24 nt, Human
ugggaggcggagguugcagugagc

SEQ ID NO: 1048309 - RNA, 20 nt, Human
ugggaggcugaggcgggugg

SEQ ID NO: 1048310 - RNA, 22 nt, Human
ugggaggcugaggcggguggau

SEQ ID NO: 1048311 - RNA, 23 nt, Human
ugggaggcugaggcggguggauu

SEQ ID NO: 1048312 - RNA, 24 nt, Human
ugguggugggcaccuguaauccca

SEQ ID NO: 1048313 - RNA, 24 nt, Human
uggugugaaucugggaggcggagg

SEQ ID NO: 1048314 - RNA, 24 nt, Human
uguggcgugugccuguaaucccag

SEQ ID NO: 1048315 - RNA, 18 nt, Human
uguuuagagggaauacug

SEQ ID NO: 1048316 - RNA, 18 nt, Human
uuagcugggcgugguggu

SEQ ID NO: 1048317 - RNA, 24 nt, Human
uuagcugggcgugguggugggcac

SEQ ID NO: 1048318 - RNA, 22 nt, Human
uucucuuucccuuccugcaguc

SEQ ID NO: 1048319 - RNA, 18 nt, Human
uugcagugagccgagauc

SEQ ID NO: 1048320 - RNA, 18 nt, Human
uugcagugagccgagauc

SEQ ID NO: 1048321 - RNA, 19 nt, Human
uugcagugagccgagauca

SEQ ID NO: 1048322 - RNA, 20 nt, Human
uugcagugagccgagaucac

SEQ ID NO: 1048323 - RNA, 19 nt, Human
uugcagugagccgagaucg

SEQ ID NO: 1048324 - RNA, 22 nt, Human
uugcagugagccgagaucgcgc

SEQ ID NO: 1048325 - RNA, 25 nt, Human
uugggaggccgaggcagguggauca

SEQ ID NO: 1048326 - RNA, 18 nt, Human
agagucagcccauuagcc

SEQ ID NO: 1048327 - RNA, 18 nt, Human
agcacagccuucucagca

SEQ ID NO: 1048328 - RNA, 22 nt, Human
agcacagccuucucagcaagcu

SEQ ID NO: 1048329 - RNA, 18 nt, Human
agcguaccauguguuuuc

SEQ ID NO: 1048330 - RNA, 25 nt, Human
cagaggcucuucuucaugaccguuc

SEQ ID NO: 1048331 - RNA, 22 nt, Human
caugaccguucugaaugauuuc

SEQ ID NO: 1048332 - RNA, 24 nt, Human
ccacaugcacaucucugucauccu

SEQ ID NO: 1048333 - RNA, 23 nt, Human
ggccuggcuaccucuaggguacu

SEQ ID NO: 1048334 - RNA, 26 nt, Human
uaacaauacccacaugcacaucucug

SEQ ID NO: 1048335 - RNA, 22 nt, Human
ucagagucagcccauuagccgc

SEQ ID NO: 1048336 - RNA, 18 nt, Human
ucuccuaacaauacccac

SEQ ID NO: 1048337 - RNA, 20 nt, Human
aaucauagcaaguauauuuc

SEQ ID NO: 1048338 - RNA, 24 nt, Human
cuuucagaacuguuaaguuuuaaa

SEQ ID NO: 1048339 - RNA, 19 nt, Human
gauggcuucaguuucuucu

SEQ ID NO: 1048340 - RNA, 21 nt, Human
uggccuuggguuuacaacucc

SEQ ID NO: 1048341 - RNA, 25 nt, Human
caaaaggucucucuucagugcgaau

SEQ ID NO: 1048342 - RNA, 20 nt, Human
cagugcgaauuuucugacug

SEQ ID NO: 1048343 - RNA, 21 nt, Human
ccacagucuuuacucucaaaa

SEQ ID NO: 1048344 - RNA, 20 nt, Human
cccacagucuuuacucucaa

SEQ ID NO: 1048345 - RNA, 24 nt, Human
cugacugguagggagacuuuccuu

SEQ ID NO: 1048346 - RNA, 19 nt, Human
uuccuucuggcaaaaggau

SEQ ID NO: 1048347 - RNA, 25 nt, Human
agaaagaccaugaacaacuuuccca

SEQ ID NO: 1048348 - RNA, 22 nt, Human
ccaguugcaagaauauggccuc

SEQ ID NO: 1048349 - RNA, 20 nt, Human
ggaagaaagaccaugaacac

SEQ ID NO: 1048350 - RNA, 19 nt, Human
uauaagcuuuuccgcaguu

SEQ ID NO: 1048351 - RNA, 24 nt, Human
uauggucgauaucugguguguacc

SEQ ID NO: 1048352 - RNA, 22 nt, Human
ucagaacggaagaaagaccaug

SEQ ID NO: 1048353 - RNA, 24 nt, Human
ugaacucccggcugcacugaucac

SEQ ID NO: 1048354 - RNA, 18 nt, Human
ugagauggucagaccuca

SEQ ID NO: 1048355 - RNA, 18 nt, Human
ugcuugagauggucagac

SEQ ID NO: 1048356 - RNA, 23 nt, Human
ugugugcuugcgcugguggcuca

SEQ ID NO: 1048357 - RNA, 20 nt, Human
uucccaguugcaagaauaug

SEQ ID NO: 1048358 - RNA, 18 nt, Human
agagucccauuuucuccu

SEQ ID NO: 1048359 - RNA, 18 nt, Human
cacagacuugcacgccgu

SEQ ID NO: 1048360 - RNA, 23 nt, Human
cauccuaccaggccacacacaga

SEQ ID NO: 1048361 - RNA, 18 nt, Human
ccacacacagacuugcac

SEQ ID NO: 1048362 - RNA, 23 nt, Human
ccaggccacacacagacuugcac

SEQ ID NO: 1048363 - RNA, 20 nt, Human
cccuggcuccaucucccucc

SEQ ID NO: 1048364 - RNA, 19 nt, Human
cucugguuccacugacauc

SEQ ID NO: 1048365 - RNA, 23 nt, Human
cuggcuccaucucccucccugcc

SEQ ID NO: 1048366 - RNA, 20 nt, Human
gaacccagaaagcugugucu

SEQ ID NO: 1048367 - RNA, 26 nt, Human
uccccacaucucuucaggaaccccuc

SEQ ID NO: 1048368 - RNA, 20 nt, Human
ucccugccuuccucccugca

SEQ ID NO: 1048369 - RNA, 22 nt, Human
uuagggucccuccucugguucc

SEQ ID NO: 1048370 - RNA, 23 nt, Human
uuuuagggucccuccucugguuc

SEQ ID NO: 1048371 - RNA, 23 nt, Human
acccgcugguugguccacaccac

SEQ ID NO: 1048372 - RNA, 19 nt, Human
cacagcaccauggacgccg

SEQ ID NO: 1048373 - RNA, 21 nt, Human
cagcacagcaccauggacgcc

SEQ ID NO: 1048374 - RNA, 20 nt, Human
cagcaccauggacgccgcug

SEQ ID NO: 1048375 - RNA, 18 nt, Human
cuggagggccucccugcu

SEQ ID NO: 1048376 - RNA, 22 nt, Human
cuggggccaucuggcuucucuu

SEQ ID NO: 1048377 - RNA, 19 nt, Human
ggcccggcgcuccuggagg

SEQ ID NO: 1048378 - RNA, 21 nt, Human
uacagcagcucgauccccagc

SEQ ID NO: 1048379 - RNA, 20 nt, Human
uccuggagggccucccugcu

SEQ ID NO: 1048380 - RNA, 19 nt, Human
uuccugggucucucacguu

SEQ ID NO: 1048381 - RNA, 22 nt, Human
uugguacagcagcucgaucccc

SEQ ID NO: 1048382 - RNA, 19 nt, Human
aaggaggaacaaggcggcg

SEQ ID NO: 1048383 - RNA, 19 nt, Human
aaggaggaacaaggcggcg

SEQ ID NO: 1048384 - RNA, 23 nt, Human
ccagugcccagaauauguccucc

SEQ ID NO: 1048385 - RNA, 18 nt, Human
ucccugcaguagucuacc

SEQ ID NO: 1048386 - RNA, 18 nt, Human
uggcucaggucccugcag

SEQ ID NO: 1048387 - RNA, 22 nt, Human
uggcucaggucccugcaguagu

SEQ ID NO: 1048388 - RNA, 20 nt, Human
aaggaccaagagucaggcag

SEQ ID NO: 1048389 - RNA, 26 nt, Human
aaggaccaagagucaggcagugggca

SEQ ID NO: 1048390 - RNA, 22 nt, Human
acccugggggcucugggguugc

SEQ ID NO: 1048391 - RNA, 21 nt, Human
accuggcccucagccagggag

SEQ ID NO: 1048392 - RNA, 18 nt, Human
acugaggagcaugaggac

SEQ ID NO: 1048393 - RNA, 18 nt, Human
aggaccauccaggagcca

SEQ ID NO: 1048394 - RNA, 18 nt, Human
agucaggcaggauugagg

SEQ ID NO: 1048395 - RNA, 20 nt, Human
auggagacacugcaggcccc

SEQ ID NO: 1048396 - RNA, 24 nt, Human
caagaccccagauauauauaaaua

SEQ ID NO: 1048397 - RNA, 19 nt, Human
cacccugggggcucugggg

SEQ ID NO: 1048398 - RNA, 18 nt, Human
caggagccaggcauggag

SEQ ID NO: 1048399 - RNA, 19 nt, Human
caggagccaggcauggagg

SEQ ID NO: 1048400 - RNA, 22 nt, Human
caggagccaggcauggaggugg

SEQ ID NO: 1048401 - RNA, 27 nt, Human
cauggccccagagccgagcaaggcaag

SEQ ID NO: 1048402 - RNA, 23 nt, Human
ccagaaggaccaagagucaggca

SEQ ID NO: 1048403 - RNA, 24 nt, Human
ccagcugccagcacgguccaggac

SEQ ID NO: 1048404 - RNA, 18 nt, Human
cccccauuccugugucca

SEQ ID NO: 1048405 - RNA, 24 nt, Human
cccucaaugccaaggccacagaag

SEQ ID NO: 1048406 - RNA, 24 nt, Human
ccuccaggaccauccaggagccag

SEQ ID NO: 1048407 - RNA, 20 nt, Human
gacauagaaaggagagggcc

SEQ ID NO: 1048408 - RNA, 21 nt, Human
gagccgagcaaggcaagcucc

SEQ ID NO: 1048409 - RNA, 25 nt, Human
gagccgagcaaggcaagcuccuggg

SEQ ID NO: 1048410 - RNA, 22 nt, Human
gaucaccuguuaugguccccau

SEQ ID NO: 1048411 - RNA, 22 nt, Human
gcaccagaacguuccccagcca

SEQ ID NO: 1048412 - RNA, 18 nt, Human
gcccucagccagggagcu

SEQ ID NO: 1048413 - RNA, 20 nt, Human
ggccacagaagcgaagugcc

SEQ ID NO: 1048414 - RNA, 20 nt, Human
guuaugguccccaugucaga

SEQ ID NO: 1048415 - RNA, 18 nt, Human
uagacaagaccccagaua

SEQ ID NO: 1048416 - RNA, 21 nt, Human
uccaggagccaggcauggagg

SEQ ID NO: 1048417 - RNA, 21 nt, Human
ucccagcaccaucagcaccag

SEQ ID NO: 1048418 - RNA, 21 nt, Human
ugccaaggccacagaagcgaa

SEQ ID NO: 1048419 - RNA, 21 nt, Human
ugccagaaggaccaagaguca

SEQ ID NO: 1048420 - RNA, 19 nt, Human
ugcccucaaugccaaggcc

SEQ ID NO: 1048421 - RNA, 24 nt, Human
uggggaauggagacacugcaggcc

SEQ ID NO: 1048422 - RNA, 23 nt, Human
uguccagccugugcccucaaugc

SEQ ID NO: 1048423 - RNA, 20 nt, Human
uugcucugccacccaccugg

SEQ ID NO: 1048424 - RNA, 23 nt, Human
uuugccagguaucagugaucacc

SEQ ID NO: 1048425 - RNA, 22 nt, Human
uuuugcucugccacccaccugg

SEQ ID NO: 1048426 - RNA, 18 nt, Human
aaagcucccucuccuuuc

SEQ ID NO: 1048427 - RNA, 22 nt, Human
agcucccucuccuuuccugcua

SEQ ID NO: 1048428 - RNA, 23 nt, Human
agguggucaguacaggcccuggc

SEQ ID NO: 1048429 - RNA, 19 nt, Human
ggaaagcucccucuccuuu

SEQ ID NO: 1048430 - RNA, 19 nt, Human
ggcacguggagguggucag

SEQ ID NO: 1048431 - RNA, 20 nt, Human
uacaggcccuggcgugcaac

SEQ ID NO: 1048432 - RNA, 22 nt, Human
uacaggcccuggcgugcaacca

SEQ ID NO: 1048433 - RNA, 21 nt, Human
ucggggaaagcucccucuccu

SEQ ID NO: 1048434 - RNA, 27 nt, Human
uggggcugguccaggagggucgagagc

SEQ ID NO: 1048435 - RNA, 20 nt, Human
gcucagaggaugcccagcaa

SEQ ID NO: 1048436 - RNA, 22 nt, Human
aaaaggagacagggcugggcca

SEQ ID NO: 1048437 - RNA, 21 nt, Human
aaacaugaucuacaauaauuu

SEQ ID NO: 1048438 - RNA, 25 nt, Human
aacccaguucuaaaggauuuacuga

SEQ ID NO: 1048439 - RNA, 21 nt, Human
aacucccauuucaaaacccag

SEQ ID NO: 1048440 - RNA, 19 nt, Human
accgacuagcgcuggccgc

SEQ ID NO: 1048441 - RNA, 19 nt, Human
acggcaccgaggagcgcgc

SEQ ID NO: 1048442 - RNA, 20 nt, Human
acggcaccgaggagcgcgcc

SEQ ID NO: 1048443 - RNA, 19 nt, Human
acuaaugcugauuauuuag

SEQ ID NO: 1048444 - RNA, 22 nt, Human
auccaaggagaaacaauccaau

SEQ ID NO: 1048445 - RNA, 22 nt, Human
auccaaucauuugcauacccag

SEQ ID NO: 1048446 - RNA, 25 nt, Human
auguaucacacuuauuuugcaugua

SEQ ID NO: 1048447 - RNA, 18 nt, Human
caaaacccaguucuaaag

SEQ ID NO: 1048448 - RNA, 20 nt, Human
caaaaucucuugggcaacac

SEQ ID NO: 1048449 - RNA, 24 nt, Human
caauccaaucauuugcauacccag

SEQ ID NO: 1048450 - RNA, 18 nt, Human
ccgcuggcgccgaagccc

SEQ ID NO: 1048451 - RNA, 21 nt, Human
ccggccccggggcgcgcucac

SEQ ID NO: 1048452 - RNA, 21 nt, Human
ccuaacaaaacaugaucuaca

SEQ ID NO: 1048453 - RNA, 23 nt, Human
ccuaugcuaaaaggagacagggc

SEQ ID NO: 1048454 - RNA, 23 nt, Human
ccuauuaaaaaggcucaauauuu

SEQ ID NO: 1048455 - RNA, 24 nt, Human
ccuguacauacagagauccaagga

SEQ ID NO: 1048456 - RNA, 21 nt, Human
ccuuuuguaaauccuuaccag

SEQ ID NO: 1048457 - RNA, 18 nt, Human
cuucaugaaacuacugca

SEQ ID NO: 1048458 - RNA, 25 nt, Human
cuucugugaaccuuuccccaauccc

SEQ ID NO: 1048459 - RNA, 26 nt, Human
gcauuguggccagaaaaaaaaaaauc

SEQ ID NO: 1048460 - RNA, 22 nt, Human
gccauggaagagcccacaugaa

SEQ ID NO: 1048461 - RNA, 21 nt, Human
ggccggccccggggcgcgcuc

SEQ ID NO: 1048462 - RNA, 20 nt, Human
ggcugggccacggggcgcgc

SEQ ID NO: 1048463 - RNA, 22 nt, Human
ggcugggccacggggcgcgcuc

SEQ ID NO: 1048464 - RNA, 20 nt, Human
gggcaacacuuaagccaugg

SEQ ID NO: 1048465 - RNA, 19 nt, Human
uaagacuacaagaaaugau

SEQ ID NO: 1048466 - RNA, 22 nt, Human
uaagccauggaagagcccacaa

SEQ ID NO: 1048467 - RNA, 20 nt, Human
uacaugaauacuaacccuug

SEQ ID NO: 1048468 - RNA, 23 nt, Human
uacccagaaaaaaugagaacacu

SEQ ID NO: 1048469 - RNA, 22 nt, Human
uaccuguacauacagagaucca

SEQ ID NO: 1048470 - RNA, 18 nt, Human
uacugcaagcauguguau

SEQ ID NO: 1048471 - RNA, 21 nt, Human
uagaauuugggcucuacaaag

SEQ ID NO: 1048472 - RNA, 21 nt, Human
uaguaucuggcauuguggcca

SEQ ID NO: 1048473 - RNA, 21 nt, Human
uagucauggaaaaugucucuc

SEQ ID NO: 1048474 - RNA, 21 nt, Human
ucacacuuauuuugcauguag

SEQ ID NO: 1048475 - RNA, 21 nt, Human
ucacggcaccgaggagcgcgc

SEQ ID NO: 1048476 - RNA, 25 nt, Human
ucauagucuuuugacuuuauuuucu

SEQ ID NO: 1048477 - RNA, 24 nt, Human
uccuauuaaaaaggcucaauauuu

SEQ ID NO: 1048478 - RNA, 21 nt, Human
ucucuccuucauuggugauua

SEQ ID NO: 1048479 - RNA, 24 nt, Human
uguaauuauaacuugccauaaaug

SEQ ID NO: 1048480 - RNA, 20 nt, Human
uguggccagaaaaaaaaaaa

SEQ ID NO: 1048481 - RNA, 21 nt, Human
uuaaaauuucacgccagagac

SEQ ID NO: 1048482 - RNA, 25 nt, Human
uuaauagucuucuugaugauauccu

SEQ ID NO: 1048483 - RNA, 22 nt, Human
uuccugauuaucagcauucauc

SEQ ID NO: 1048484 - RNA, 24 nt, Human
uucugugaaccuuuccccaauccc

SEQ ID NO: 1048485 - RNA, 23 nt, Human
uuguggccagaaaaaaaaaaauc

SEQ ID NO: 1048486 - RNA, 18 nt, Human
caucagagaauccagcug

SEQ ID NO: 1048487 - RNA, 21 nt, Human
caucagagaauccagcugcag

SEQ ID NO: 1048488 - RNA, 23 nt, Human
aaaaaaaaacauuaaaugcuaaa

SEQ ID NO: 1048489 - RNA, 19 nt, Human
aaacccacagacccagaca

SEQ ID NO: 1048490 - RNA, 22 nt, Human
aaagucaaccaaaucaagaccu

SEQ ID NO: 1048491 - RNA, 22 nt, Human
aacccacagacccagacaugca

SEQ ID NO: 1048492 - RNA, 20 nt, Human
aacuagagagcaggggccca

SEQ ID NO: 1048493 - RNA, 24 nt, Human
aacucagcacccaacagaaaccca

SEQ ID NO: 1048494 - RNA, 26 nt, Human
aacucagcacccaacagaaacccaca

SEQ ID NO: 1048495 - RNA, 20 nt, Human
aagaacuugaagcagaaaaa

SEQ ID NO: 1048496 - RNA, 21 nt, Human
aagaccuucccacuccacacu

SEQ ID NO: 1048497 - RNA, 24 nt, Human
aagauguucuauccccaccuccag

SEQ ID NO: 1048498 - RNA, 18 nt, Human
aaggagggagguguacag

SEQ ID NO: 1048499 - RNA, 22 nt, Human
aaucacccaacucagcacccaa

SEQ ID NO: 1048500 - RNA, 21 nt, Human
acagaaacccacagacccaga

SEQ ID NO: 1048501 - RNA, 24 nt, Human
accucuugcuagcccuuuccccag

SEQ ID NO: 1048502 - RNA, 22 nt, Human
accuucccacuccacacugagc

SEQ ID NO: 1048503 - RNA, 19 nt, Human
acuaaaaugaaaucaccca

SEQ ID NO: 1048504 - RNA, 19 nt, Human
acuagagagcaggggccca

SEQ ID NO: 1048505 - RNA, 22 nt, Human
acucagcacccaacagaaaccc

SEQ ID NO: 1048506 - RNA, 19 nt, Human
agacaugcacguguacacc

SEQ ID NO: 1048507 - RNA, 21 nt, Human
agcacccaacagaaacccaca

SEQ ID NO: 1048508 - RNA, 19 nt, Human
agcuauaagccccuguccc

SEQ ID NO: 1048509 - RNA, 19 nt, Human
aucaggggguggccaugag

SEQ ID NO: 1048510 - RNA, 21 nt, Human
aucccauccaaacccuugaca

SEQ ID NO: 1048511 - RNA, 22 nt, Human
auccccaccuccacccccauca

SEQ ID NO: 1048512 - RNA, 21 nt, Human
auccccagugcuuacugcucu

SEQ ID NO: 1048513 - RNA, 23 nt, Human
caaacccuugacauguauaggcu

SEQ ID NO: 1048514 - RNA, 18 nt, Human
caacucagcacccaacag

SEQ ID NO: 1048515 - RNA, 22 nt, Human
cacauuuagugccaauccugaa

SEQ ID NO: 1048516 - RNA, 18 nt, Human
cacuccacacugagcaac

SEQ ID NO: 1048517 - RNA, 24 nt, Human
cagacaagagggccacaguaacgu

SEQ ID NO: 1048518 - RNA, 25 nt, Human
cagacaugcacguguacaccacaau

SEQ ID NO: 1048519 - RNA, 22 nt, Human
cagcuauaagccccugucccuc

SEQ ID NO: 1048520 - RNA, 24 nt, Human
cagcucuguccucaguccuggaga

SEQ ID NO: 1048521 - RNA, 19 nt, Human
ccaacagaaacccacagac

SEQ ID NO: 1048522 - RNA, 22 nt, Human
ccaauccugaacaaacuauaua

SEQ ID NO: 1048523 - RNA, 20 nt, Human
cccaacagaaacccacagac

SEQ ID NO: 1048524 - RNA, 19 nt, Human
cccacagacccagacaugc

SEQ ID NO: 1048525 - RNA, 22 nt, Human
cccacuccacacugagcaacac

SEQ ID NO: 1048526 - RNA, 21 nt, Human
cccccaucaauauccuccaaa

SEQ ID NO: 1048527 - RNA, 19 nt, Human
cccugggcuccaggcugcc

SEQ ID NO: 1048528 - RNA, 21 nt, Human
cccuggggaguccuccucuga

SEQ ID NO: 1048529 - RNA, 22 nt, Human
ccucugacuucaggccaggccc

SEQ ID NO: 1048530 - RNA, 22 nt, Human
ccuucccacuccacacugagca

SEQ ID NO: 1048531 - RNA, 23 nt, Human
cuaagaacuugaagcagaaaaaa

SEQ ID NO: 1048532 - RNA, 23 nt, Human
cuagcugcccuggggaguccucc

SEQ ID NO: 1048533 - RNA, 21 nt, Human
cuagggggucauucagauugg

SEQ ID NO: 1048534 - RNA, 20 nt, Human
cuagucuuuauguucucaua

SEQ ID NO: 1048535 - RNA, 21 nt, Human
cugcccuggggaguccuccuc

SEQ ID NO: 1048536 - RNA, 18 nt, Human
cugcucugcucaacacau

SEQ ID NO: 1048537 - RNA, 22 nt, Human
cuggaaagaaaggggucuaucu

SEQ ID NO: 1048538 - RNA, 21 nt, Human
cuugacauguauaggcuaaca

SEQ ID NO: 1048539 - RNA, 22 nt, Human
gaaaucacccaacucagcaccc

SEQ ID NO: 1048540 - RNA, 24 nt, Human
gacuaaauggaugaugucauagga

SEQ ID NO: 1048541 - RNA, 20 nt, Human
gagagcuccaauacauguuu

SEQ ID NO: 1048542 - RNA, 21 nt, Human
gagcagcucuguccucagucc

SEQ ID NO: 1048543 - RNA, 23 nt, Human
gaggcuucaccucuugcuagccc

SEQ ID NO: 1048544 - RNA, 22 nt, Human
gaggugauaacaguuaauccug

SEQ ID NO: 1048545 - RNA, 21 nt, Human
gcccaaaucccauccaaaccc

SEQ ID NO: 1048546 - RNA, 24 nt, Human
gggcuccaggcugccagacaagag

SEQ ID NO: 1048547 - RNA, 19 nt, Human
gguguccagacacaugcag

SEQ ID NO: 1048548 - RNA, 27 nt, Human
guggguacaaaggagaaaaaggaggga

SEQ ID NO: 1048549 - RNA, 24 nt, Human
uaacagccuccuaugaccagggcu

SEQ ID NO: 1048550 - RNA, 18 nt, Human
uaagaggagcacgugaag

SEQ ID NO: 1048551 - RNA, 20 nt, Human
uacaaaggagaaaaaggagg

SEQ ID NO: 1048552 - RNA, 21 nt, Human
uacaggagaggugauaacagu

SEQ ID NO: 1048553 - RNA, 25 nt, Human
uaccaaacagugugaaagauguucu

SEQ ID NO: 1048554 - RNA, 23 nt, Human
uagaagaagaagagcagcucugu

SEQ ID NO: 1048555 - RNA, 19 nt, Human
uagagagcaggggcccaca

SEQ ID NO: 1048556 - RNA, 21 nt, Human
uagugccaauccugaacaagg

SEQ ID NO: 1048557 - RNA, 19 nt, Human
uauacuugauuauuucagc

SEQ ID NO: 1048558 - RNA, 23 nt, Human
uauuagguauguucuugcugagg

SEQ ID NO: 1048559 - RNA, 25 nt, Human
uauuucagcuagugcuggaaagaaa

SEQ ID NO: 1048560 - RNA, 18 nt, Human
ucacccaacucagcaccc

SEQ ID NO: 1048561 - RNA, 22 nt, Human
ucagcacccaacagaaacccac

SEQ ID NO: 1048562 - RNA, 18 nt, Human
ucaggccaggcccaagga

SEQ ID NO: 1048563 - RNA, 26 nt, Human
ucauucagauuggagggcagacccaa

SEQ ID NO: 1048564 - RNA, 22 nt, Human
ucauuuguacuuuauuacuuuu

SEQ ID NO: 1048565 - RNA, 23 nt, Human
uccacccccaucaauauccucca

SEQ ID NO: 1048566 - RNA, 18 nt, Human
ucccacuccacacugagc

SEQ ID NO: 1048567 - RNA, 27 nt, Human
uccccaccuccacccccaucaauaucc

SEQ ID NO: 1048568 - RNA, 23 nt, Human
uccccuagcugcccuggggaguc

SEQ ID NO: 1048569 - RNA, 18 nt, Human
ucccugggcuccaggcug

SEQ ID NO: 1048570 - RNA, 22 nt, Human
ucccugggcuccaggcugccag

SEQ ID NO: 1048571 - RNA, 20 nt, Human
uccuaugaccagggcuagug

SEQ ID NO: 1048572 - RNA, 20 nt, Human
uccugccauauccccagugc

SEQ ID NO: 1048573 - RNA, 20 nt, Human
ucucucaggccugagugucu

SEQ ID NO: 1048574 - RNA, 23 nt, Human
ucuguaccaaacagugugaaaga

SEQ ID NO: 1048575 - RNA, 18 nt, Human
ugaaaaaaucugcacaug

SEQ ID NO: 1048576 - RNA, 24 nt, Human
ugaccaggaggcuucaccucuugc

SEQ ID NO: 1048577 - RNA, 19 nt, Human
ugacuuguaagguucuagg

SEQ ID NO: 1048578 - RNA, 18 nt, Human
ugauuccugccauauccc

SEQ ID NO: 1048579 - RNA, 19 nt, Human
ugcagccacuggcagcuuc

SEQ ID NO: 1048580 - RNA, 18 nt, Human
ugccaaggaaacgaaggc

SEQ ID NO: 1048581 - RNA, 20 nt, Human
ugcccuggggaguccuccuc

SEQ ID NO: 1048582 - RNA, 21 nt, Human
uggagagucuguguauaagag

SEQ ID NO: 1048583 - RNA, 21 nt, Human
uggagauagcacugugcacua

SEQ ID NO: 1048584 - RNA, 21 nt, Human
uguguacugcguugccaagga

SEQ ID NO: 1048585 - RNA, 22 nt, Human
uguuaugaucuuuauaacccca

SEQ ID NO: 1048586 - RNA, 18 nt, Human
uguucuauccccaccucc

SEQ ID NO: 1048587 - RNA, 22 nt, Human
caagccucauuggaaaagcuga

SEQ ID NO: 1048588 - RNA, 22 nt, Human
cacaggcugucaguucaagugg

SEQ ID NO: 1048589 - RNA, 20 nt, Human
caggaaaagacugaccauug

SEQ ID NO: 1048590 - RNA, 21 nt, Human
caucuaaacaacuccgacugc

SEQ ID NO: 1048591 - RNA, 24 nt, Human
cauugccagaucacaucuaaacaa

SEQ ID NO: 1048592 - RNA, 21 nt, Human
ccacugccagcaucacauugu

SEQ ID NO: 1048593 - RNA, 18 nt, Human
cccaaggggcucacaggc

SEQ ID NO: 1048594 - RNA, 27 nt, Human
ccucuggccaggaaaagaccggggucc

SEQ ID NO: 1048595 - RNA, 22 nt, Human
cucccaaguugauucaugaugc

SEQ ID NO: 1048596 - RNA, 23 nt, Human
cugcaguuucacacagguggugg

SEQ ID NO: 1048597 - RNA, 27 nt, Human
cugcaguuucacacaggugguggucca

SEQ ID NO: 1048598 - RNA, 25 nt, Human
gcaguuucacacaggugguggucca

SEQ ID NO: 1048599 - RNA, 19 nt, Human
gggagggccaucaaucuuu

SEQ ID NO: 1048600 - RNA, 20 nt, Human
ggggguuugacuuuauuuga

SEQ ID NO: 1048601 - RNA, 18 nt, Human
gucauagcacgacgcagu

SEQ ID NO: 1048602 - RNA, 21 nt, Human
guccaaaauuuguaaaaaagu

SEQ ID NO: 1048603 - RNA, 19 nt, Human
uaaaaaagugaaagugaug

SEQ ID NO: 1048604 - RNA, 23 nt, Human
uaugcccccaaggggcucacagg

SEQ ID NO: 1048605 - RNA, 18 nt, Human
ucaaucuuuccucuggcc

SEQ ID NO: 1048606 - RNA, 19 nt, Human
ucacaucuaaacaacuccg

SEQ ID NO: 1048607 - RNA, 22 nt, Human
ucacaucuaaacaacuccgacu

SEQ ID NO: 1048608 - RNA, 21 nt, Human
ucaguucaagugggagggcca

SEQ ID NO: 1048609 - RNA, 24 nt, Human
ucuguaccacacacuuuggaaggg

SEQ ID NO: 1048610 - RNA, 22 nt, Human
ugaagauagggcugagaugaga

SEQ ID NO: 1048611 - RNA, 22 nt, Human
ugagaggaaauggauucaagcc

SEQ ID NO: 1048612 - RNA, 18 nt, Human
ugagaugagaggaaaugg

SEQ ID NO: 1048613 - RNA, 23 nt, Human
uggugguccaaaauuuguaaaaa

SEQ ID NO: 1048614 - RNA, 21 nt, Human
uuguaaaaaagugaaagugau

SEQ ID NO: 1048615 - RNA, 23 nt, Human
cucuuguuccuuggugucagggg

SEQ ID NO: 1048616 - RNA, 24 nt, Human
ugaguuucugcauauagcucacaa

SEQ ID NO: 1048617 - RNA, 21 nt, Human
uuaguagucgcucuuguuccu

SEQ ID NO: 1048618 - RNA, 21 nt, Human
uucaaaucucucuuuuaguag

SEQ ID NO: 1048619 - RNA, 19 nt, Human
aaacuccaucaaaaaaaaa

SEQ ID NO: 1048620 - RNA, 24 nt, Human
aacuccaucaaaaaaaaaaaaaag

SEQ ID NO: 1048621 - RNA, 23 nt, Human
aagaucgugccauugcacuccag

SEQ ID NO: 1048622 - RNA, 24 nt, Human
aaguggagguugcagugagccaag

SEQ ID NO: 1048623 - RNA, 19 nt, Human
acaacagcgaaacuccauc

SEQ ID NO: 1048624 - RNA, 24 nt, Human
aucgugccauugcacuccagccug

SEQ ID NO: 1048625 - RNA, 24 nt, Human
auugcacuccagccugggcaacaa

SEQ ID NO: 1048626 - RNA, 18 nt, Human
caacaacagcgaaacucc

SEQ ID NO: 1048627 - RNA, 21 nt, Human
caacaacagcgaaacuccauc

SEQ ID NO: 1048628 - RNA, 25 nt, Human
caacaacagcgaaacuccaucaaaa

SEQ ID NO: 1048629 - RNA, 22 nt, Human
cagcagagccggagccggaacg

SEQ ID NO: 1048630 - RNA, 24 nt, Human
caugccuguaaucccagcuacuug

SEQ ID NO: 1048631 - RNA, 20 nt, Human
cauucugugucgucacuucu

SEQ ID NO: 1048632 - RNA, 18 nt, Human
cauugcacuccagccugg

SEQ ID NO: 1048633 - RNA, 19 nt, Human
cauugcacuccagccuggg

SEQ ID NO: 1048634 - RNA, 21 nt, Human
cauugcacuccagccugggca

SEQ ID NO: 1048635 - RNA, 24 nt, Human
cauugcacuccagccugggcaaca

SEQ ID NO: 1048636 - RNA, 26 nt, Human
cauugcacuccagccugggcaacaac

SEQ ID NO: 1048637 - RNA, 20 nt, Human
ccauugcacuccagccuggg

SEQ ID NO: 1048638 - RNA, 21 nt, Human
ccauugcacuccagccugggc

SEQ ID NO: 1048639 - RNA, 23 nt, Human
ccauugcacuccagccugggcaa

SEQ ID NO: 1048640 - RNA, 24 nt, Human
ccauugcacuccagccugggcaac

SEQ ID NO: 1048641 - RNA, 21 nt, Human
ccugggaaguggagguugcag

SEQ ID NO: 1048642 - RNA, 18 nt, Human
ccuguaaucccagcuacu

SEQ ID NO: 1048643 - RNA, 21 nt, Human
ccuguaaucccagcuacuugg

SEQ ID NO: 1048644 - RNA, 21 nt, Human
cggcuaauugaaaagcagcac

SEQ ID NO: 1048645 - RNA, 21 nt, Human
cuagaaccugggaaguggagg

SEQ ID NO: 1048646 - RNA, 21 nt, Human
cuccaucaaaaaaaaaaaaaa

SEQ ID NO: 1048647 - RNA, 24 nt, Human
cuuauacucuuccugugggagcca

SEQ ID NO: 1048648 - RNA, 18 nt, Human
gaaguggagguugcagug

SEQ ID NO: 1048649 - RNA, 23 nt, Human
gagguugcagugagccaagaucg

SEQ ID NO: 1048650 - RNA, 20 nt, Human
gccagcagagccggagccgg

SEQ ID NO: 1048651 - RNA, 22 nt, Human
gccauugcacuccagccugggc

SEQ ID NO: 1048652 - RNA, 24 nt, Human
gccauugcacuccagccugggcaa

SEQ ID NO: 1048653 - RNA, 21 nt, Human
ggagacucgcuagaaccuggg

SEQ ID NO: 1048654 - RNA, 22 nt, Human
ggagcaagugucggagcuuagg

SEQ ID NO: 1048655 - RNA, 20 nt, Human
ggagguugcagugagccaag

SEQ ID NO: 1048656 - RNA, 23 nt, Human
ggagguugcagugagccaagauc

SEQ ID NO: 1048657 - RNA, 24 nt, Human
ggagguugcagugagccaagaucg

SEQ ID NO: 1048658 - RNA, 22 nt, Human
uaaaagggcaauguaagaagua

SEQ ID NO: 1048659 - RNA, 25 nt, Human
uacaaucuucuauaacccuauaaaa

SEQ ID NO: 1048660 - RNA, 22 nt, Human
uacuuuagcuuacuccauccuc

SEQ ID NO: 1048661 - RNA, 18 nt, Human
ucaaaaaaaaaaaaaagu

SEQ ID NO: 1048662 - RNA, 25 nt, Human
ucacaguagugcuuauacucuuccu

SEQ ID NO: 1048663 - RNA, 26 nt, Human
ucagguggugguucuauauaaaaggg

SEQ ID NO: 1048664 - RNA, 19 nt, Human
uccacugagaucccuuuca

SEQ ID NO: 1048665 - RNA, 23 nt, Human
uccaucaaaaaaaaaaaaaagua

SEQ ID NO: 1048666 - RNA, 23 nt, Human
ucgugccauugcacuccagccug

SEQ ID NO: 1048667 - RNA, 23 nt, Human
ugaaaagcagcacaaggcuagaa

SEQ ID NO: 1048668 - RNA, 22 nt, Human
ugagccaagaucgugccauugc

SEQ ID NO: 1048669 - RNA, 24 nt, Human
ugagggaggagacucgcuagaacc

SEQ ID NO: 1048670 - RNA, 22 nt, Human
ugcacuccagccugggcaacaa

SEQ ID NO: 1048671 - RNA, 24 nt, Human
ugccauugcacuccagccugggca

SEQ ID NO: 1048672 - RNA, 19 nt, Human
ugcccccugcaguugauuc

SEQ ID NO: 1048673 - RNA, 24 nt, Human
ugccuguaaucccagcuacuuggg

SEQ ID NO: 1048674 - RNA, 24 nt, Human
ugggaaguggagguugcagugagc

SEQ ID NO: 1048675 - RNA, 18 nt, Human
uuagcuuacuccauccuc

SEQ ID NO: 1048676 - RNA, 22 nt, Human
uugcagugagccaagaucgugc

SEQ ID NO: 1048677 - RNA, 22 nt, Human
cgagaaggugggcugggcagug

SEQ ID NO: 1048678 - RNA, 23 nt, Human
cgccagggcagcccuugagaaga

SEQ ID NO: 1048679 - RNA, 19 nt, Human
gaccguaggcagaggccag

SEQ ID NO: 1048680 - RNA, 20 nt, Human
gagaaggugggcugggcagu

SEQ ID NO: 1048681 - RNA, 19 nt, Human
gcagcccuugagaagagug

SEQ ID NO: 1048682 - RNA, 19 nt, Human
gcccuuggcaggauuccag

SEQ ID NO: 1048683 - RNA, 18 nt, Human
guggcgagaaggugggcu

SEQ ID NO: 1048684 - RNA, 22 nt, Human
ucccugcaguggcccuuggcag

SEQ ID NO: 1048685 - RNA, 18 nt, Human
ucuggccucuguggcagg

SEQ ID NO: 1048686 - RNA, 19 nt, Human
ucuguggcagggccaggag

SEQ ID NO: 1048687 - RNA, 22 nt, Human
ugagaagaguggcgagaaggug

SEQ ID NO: 1048688 - RNA, 25 nt, Human
ugagaagaguggcgagaaggugggc

SEQ ID NO: 1048689 - RNA, 23 nt, Human
ugcgggguucccgccagggcagc

SEQ ID NO: 1048690 - RNA, 20 nt, Human
uggcgagaaggugggcuggg

SEQ ID NO: 1048691 - RNA, 18 nt, Human
aaagccaucagacaggug

SEQ ID NO: 1048692 - RNA, 19 nt, Human
aagggcaaguagggggucc

SEQ ID NO: 1048693 - RNA, 21 nt, Human
acccugccucagggccucagc

SEQ ID NO: 1048694 - RNA, 18 nt, Human
accuuggggucccugcgc

SEQ ID NO: 1048695 - RNA, 21 nt, Human
agauaggcuggggcaaagcca

SEQ ID NO: 1048696 - RNA, 22 nt, Human
aggcuggggggucaccccaggg

SEQ ID NO: 1048697 - RNA, 22 nt, Human
agggacccugccucagggccuc

SEQ ID NO: 1048698 - RNA, 19 nt, Human
aggggcuuggcggcuggug

SEQ ID NO: 1048699 - RNA, 23 nt, Human
agggugguagacaguuggggugc

SEQ ID NO: 1048700 - RNA, 19 nt, Human
agugucugggacagaagug

SEQ ID NO: 1048701 - RNA, 24 nt, Human
augacugaggggcagggugggcgg

SEQ ID NO: 1048702 - RNA, 19 nt, Human
auguccccuccuggucagc

SEQ ID NO: 1048703 - RNA, 19 nt, Human
cagaguccagcgccugcug

SEQ ID NO: 1048704 - RNA, 20 nt, Human
cagggccucagcaaagccug

SEQ ID NO: 1048705 - RNA, 22 nt, Human
caguuggggugcaggcuggggg

SEQ ID NO: 1048706 - RNA, 18 nt, Human
caugacucuugaugugcc

SEQ ID NO: 1048707 - RNA, 20 nt, Human
ccaggguggaaaagggugga

SEQ ID NO: 1048708 - RNA, 22 nt, Human
ccaucuugcuccccuucccgug

SEQ ID NO: 1048709 - RNA, 22 nt, Human
cccagacacaugcugacugaaa

SEQ ID NO: 1048710 - RNA, 20 nt, Human
ccccagaguccagcgccugc

SEQ ID NO: 1048711 - RNA, 20 nt, Human
ccccagggacccugccucag

SEQ ID NO: 1048712 - RNA, 21 nt, Human
cccccagaguccagcgccugc

SEQ ID NO: 1048713 - RNA, 25 nt, Human
cccccagcacuagacuuggacaauu

SEQ ID NO: 1048714 - RNA, 24 nt, Human
cccguggcccccugggaguuuucu

SEQ ID NO: 1048715 - RNA, 19 nt, Human
cccugccucagggccucag

SEQ ID NO: 1048716 - RNA, 25 nt, Human
ccgccugccuccgacucccggccgc

SEQ ID NO: 1048717 - RNA, 22 nt, Human
ccggcccugccggccuugaccg

SEQ ID NO: 1048718 - RNA, 25 nt, Human
ccucagggccucagcaaagccugga

SEQ ID NO: 1048719 - RNA, 23 nt, Human
ccuccuggucagcagcuugauuu

SEQ ID NO: 1048720 - RNA, 23 nt, Human
ccucugggacucacggcugcgcu

SEQ ID NO: 1048721 - RNA, 21 nt, Human
ccugguggcagacgcugccuc

SEQ ID NO: 1048722 - RNA, 19 nt, Human
cgggacgggggccaggauc

SEQ ID NO: 1048723 - RNA, 20 nt, Human
cuccacccgucccugccagg

SEQ ID NO: 1048724 - RNA, 20 nt, Human
cuccugccugggaagggcca

SEQ ID NO: 1048725 - RNA, 18 nt, Human
cugccucagggccucagc

SEQ ID NO: 1048726 - RNA, 23 nt, Human
cugggaguuuucugcaggcaugg

SEQ ID NO: 1048727 - RNA, 21 nt, Human
cuguccuuucuccugccuggg

SEQ ID NO: 1048728 - RNA, 23 nt, Human
cuuguucccuggacaccuugggg

SEQ ID NO: 1048729 - RNA, 23 nt, Human
gacucccggccgccgcgcagccc

SEQ ID NO: 1048730 - RNA, 21 nt, Human
gaugggacugcucccucugcc

SEQ ID NO: 1048731 - RNA, 20 nt, Human
ggaggggcuuggcggcuggu

SEQ ID NO: 1048732 - RNA, 20 nt, Human
gggacagaaguggaauucca

SEQ ID NO: 1048733 - RNA, 23 nt, Human
gggcagcgcccaugaugccccca

SEQ ID NO: 1048734 - RNA, 19 nt, Human
gggcagggugggcggugcu

SEQ ID NO: 1048735 - RNA, 18 nt, Human
gggcuuggcggcuggugg

SEQ ID NO: 1048736 - RNA, 20 nt, Human
gggguccggcccugccggcc

SEQ ID NO: 1048737 - RNA, 18 nt, Human
gguccggcccugccggcc

SEQ ID NO: 1048738 - RNA, 20 nt, Human
gucgcagggaggccuccugg

SEQ ID NO: 1048739 - RNA, 19 nt, Human
gucuggagcgccuccuccc

SEQ ID NO: 1048740 - RNA, 18 nt, Human
uaccugagaccccagaca

SEQ ID NO: 1048741 - RNA, 19 nt, Human
ucaccccagggacccugcc

SEQ ID NO: 1048742 - RNA, 20 nt, Human
ucagcaaagccuggaggggc

SEQ ID NO: 1048743 - RNA, 22 nt, Human
ucagcaaagccuggaggggcuu

SEQ ID NO: 1048744 - RNA, 21 nt, Human
uccacagcgucaccucugccc

SEQ ID NO: 1048745 - RNA, 24 nt, Human
uccccugugcccuugcguguccac

SEQ ID NO: 1048746 - RNA, 21 nt, Human
ucccucugccacucauaccug

SEQ ID NO: 1048747 - RNA, 21 nt, Human
ucccuggacaccuuggggucc

SEQ ID NO: 1048748 - RNA, 24 nt, Human
ucccuggacaccuuggggucccug

SEQ ID NO: 1048749 - RNA, 25 nt, Human
uccuggcuggggcuggggagcucau

SEQ ID NO: 1048750 - RNA, 21 nt, Human
ucugccacucauaccugagac

SEQ ID NO: 1048751 - RNA, 23 nt, Human
ucugggacagaaguggaauucca

SEQ ID NO: 1048752 - RNA, 22 nt, Human
ugaaaggcgggcugguuguggc

SEQ ID NO: 1048753 - RNA, 19 nt, Human
ugccucagggccucagcaa

SEQ ID NO: 1048754 - RNA, 22 nt, Human
ugccucagggccucagcaaagc

SEQ ID NO: 1048755 - RNA, 19 nt, Human
uggcucuggggcagcgccc

SEQ ID NO: 1048756 - RNA, 21 nt, Human
uggggcaaagccaucagacag

SEQ ID NO: 1048757 - RNA, 21 nt, Human
uggggcagcgcccaugaugcc

SEQ ID NO: 1048758 - RNA, 21 nt, Human
uggggcccacccagguccaca

SEQ ID NO: 1048759 - RNA, 19 nt, Human
uggggugcaggcugggggg

SEQ ID NO: 1048760 - RNA, 23 nt, Human
ugguggggccgucgcagggaggc

SEQ ID NO: 1048761 - RNA, 19 nt, Human
ugguggguuugaggggcag

SEQ ID NO: 1048762 - RNA, 18 nt, Human
uguccuggcuggggcugg

SEQ ID NO: 1048763 - RNA, 20 nt, Human
uuccucugggacucacggcu

SEQ ID NO: 1048764 - RNA, 18 nt, Human
aaaagcagcuuugggggc

SEQ ID NO: 1048765 - RNA, 24 nt, Human
aaagucgcgaggucucuagccccc

SEQ ID NO: 1048766 - RNA, 23 nt, Human
acagggguaaccgcgcggaggag

SEQ ID NO: 1048767 - RNA, 22 nt, Human
acaugacaacucccaugccucu

SEQ ID NO: 1048768 - RNA, 22 nt, Human
acucauccggagcgccaggacg

SEQ ID NO: 1048769 - RNA, 21 nt, Human
agacccaaggcagcaucccuc

SEQ ID NO: 1048770 - RNA, 23 nt, Human
agcaaagccauccaagggagagc

SEQ ID NO: 1048771 - RNA, 25 nt, Human
agcccgcgugcaaggccccgggcac

SEQ ID NO: 1048772 - RNA, 21 nt, Human
agcguagggaaggggcuuagu

SEQ ID NO: 1048773 - RNA, 24 nt, Human
agcugaagggucuucaacucugga

SEQ ID NO: 1048774 - RNA, 21 nt, Human
aggaaaaaugggggcgcuggc

SEQ ID NO: 1048775 - RNA, 20 nt, Human
aggaggcugaggggcaggcc

SEQ ID NO: 1048776 - RNA, 19 nt, Human
agggaaaagucgaauaaug

SEQ ID NO: 1048777 - RNA, 20 nt, Human
agguccuggcaaaggagucu

SEQ ID NO: 1048778 - RNA, 18 nt, Human
caacaggaacaaauucuu

SEQ ID NO: 1048779 - RNA, 23 nt, Human
caacaugacaacucccaugccuc

SEQ ID NO: 1048780 - RNA, 24 nt, Human
caaccgaaaagcagcuuugggggc

SEQ ID NO: 1048781 - RNA, 21 nt, Human
caacucuggaucccaaguccc

SEQ ID NO: 1048782 - RNA, 22 nt, Human
caagggagagcugucaucuguc

SEQ ID NO: 1048783 - RNA, 24 nt, Human
cacagcccacgaggccuaggcagg

SEQ ID NO: 1048784 - RNA, 21 nt, Human
cagaaaaagucaacaggaaca

SEQ ID NO: 1048785 - RNA, 27 nt, Human
cagacccaaggcagcaucccucaagga

SEQ ID NO: 1048786 - RNA, 19 nt, Human
cagagccacagggcuuuuc

SEQ ID NO: 1048787 - RNA, 18 nt, Human
caggaacaaauucuuggu

SEQ ID NO: 1048788 - RNA, 26 nt, Human
caugacaacucccaugccucugcaca

SEQ ID NO: 1048789 - RNA, 21 nt, Human
cccaaggcagcaucccucaag

SEQ ID NO: 1048790 - RNA, 22 nt, Human
cccaaggcagcaucccucaagg

SEQ ID NO: 1048791 - RNA, 18 nt, Human
ccccagagccacagggcu

SEQ ID NO: 1048792 - RNA, 22 nt, Human
cccccaaacaaucaugaggagg

SEQ ID NO: 1048793 - RNA, 25 nt, Human
cccccaaacaaucaugaggaggccc

SEQ ID NO: 1048794 - RNA, 30 nt, Human
cccccaaacaaucaugaggaggccccucca

SEQ ID NO: 1048795 - RNA, 21 nt, Human
ccuagggggguuugacgucug

SEQ ID NO: 1048796 - RNA, 20 nt, Human
ccucaaggauacugaggucu

SEQ ID NO: 1048797 - RNA, 19 nt, Human
ccuccauuuaaaccucagc

SEQ ID NO: 1048798 - RNA, 23 nt, Human
ccugcaccucuugggguuuccuc

SEQ ID NO: 1048799 - RNA, 21 nt, Human
cgccaggacggauggcggcga

SEQ ID NO: 1048800 - RNA, 23 nt, Human
cgcuggcuggugcggaaccagca

SEQ ID NO: 1048801 - RNA, 19 nt, Human
cggaggaggcugaggggca

SEQ ID NO: 1048802 - RNA, 21 nt, Human
cuagauggaagaaaaccuguc

SEQ ID NO: 1048803 - RNA, 20 nt, Human
cucuguggcacuggcagggc

SEQ ID NO: 1048804 - RNA, 21 nt, Human
gaccccaggucauuguccuga

SEQ ID NO: 1048805 - RNA, 18 nt, Human
gaggacaaugguccauag

SEQ ID NO: 1048806 - RNA, 20 nt, Human
gaggucuagcauguucccaa

SEQ ID NO: 1048807 - RNA, 19 nt, Human
gcagcaucccucaaggaua

SEQ ID NO: 1048808 - RNA, 22 nt, Human
gccacagggcuuuuccucugcc

SEQ ID NO: 1048809 - RNA, 21 nt, Human
gcgcggaggaggcugaggggc

SEQ ID NO: 1048810 - RNA, 21 nt, Human
gcggaggaggcugaggggcag

SEQ ID NO: 1048811 - RNA, 19 nt, Human
ggaaaagucgaauaauguu

SEQ ID NO: 1048812 - RNA, 18 nt, Human
ggacguggcacaaugacc

SEQ ID NO: 1048813 - RNA, 23 nt, Human
ggagcguccuccauuuaaaccuc

SEQ ID NO: 1048814 - RNA, 20 nt, Human
ggaggaggcugaggggcagg

SEQ ID NO: 1048815 - RNA, 23 nt, Human
ggaggaggcugaggggcaggccg

SEQ ID NO: 1048816 - RNA, 22 nt, Human
ggcggguacagggguaaccgcc

SEQ ID NO: 1048817 - RNA, 20 nt, Human
gggcagagccagcugaaggg

SEQ ID NO: 1048818 - RNA, 23 nt, Human
gggccauggcacucuguggcacu

SEQ ID NO: 1048819 - RNA, 19 nt, Human
ggguuuccucuaacaguuu

SEQ ID NO: 1048820 - RNA, 21 nt, Human
ggugcugcaggaaaaaugggg

SEQ ID NO: 1048821 - RNA, 21 nt, Human
ucaggagucggagaucggggu

SEQ ID NO: 1048822 - RNA, 20 nt, Human
ucagggugcugcaggaaaaa

SEQ ID NO: 1048823 - RNA, 18 nt, Human
uccaagggagagcuguca

SEQ ID NO: 1048824 - RNA, 24 nt, Human
ucuaacaguuuccagacccaaggc

SEQ ID NO: 1048825 - RNA, 23 nt, Human
ucuccaggauagccgcacagccc

SEQ ID NO: 1048826 - RNA, 26 nt, Human
ucugcacacaguggacuauccaggga

SEQ ID NO: 1048827 - RNA, 22 nt, Human
ugacaacucccaugccucugca

SEQ ID NO: 1048828 - RNA, 25 nt, Human
ugagggaaaagucgaauaauguugu

SEQ ID NO: 1048829 - RNA, 27 nt, Human
ugagggaaaagucgaauaauguugugc

SEQ ID NO: 1048830 - RNA, 21 nt, Human
ugagugggugagaggacaaug

SEQ ID NO: 1048831 - RNA, 24 nt, Human
ugcacacaguggacuauccaggga

SEQ ID NO: 1048832 - RNA, 24 nt, Human
ugcggaaccagcaaagccauccaa

SEQ ID NO: 1048833 - RNA, 18 nt, Human
ugcugcaggaaaaauggg

SEQ ID NO: 1048834 - RNA, 19 nt, Human
uggcacaaugaccgacacu

SEQ ID NO: 1048835 - RNA, 20 nt, Human
uggcacaaugaccgacacuu

SEQ ID NO: 1048836 - RNA, 19 nt, Human
uggcuggugcggaaccagc

SEQ ID NO: 1048837 - RNA, 26 nt, Human
ugggggcuuccaaagucaggagucgg

SEQ ID NO: 1048838 - RNA, 23 nt, Human
uguugugcugagacaauaggggc

SEQ ID NO: 1048839 - RNA, 24 nt, Human
uuuuuuuuuuuuuuuuucauguuu

SEQ ID NO: 1048840 - RNA, 23 nt, Human
cucuggggcagguuuuggcuccu

SEQ ID NO: 1048841 - RNA, 24 nt, Human
cuggggcagguuuuggcuccuuuc

SEQ ID NO: 1048842 - RNA, 22 nt, Human
gggcagguuuuggcuccuuucu

SEQ ID NO: 1048843 - RNA, 22 nt, Human
guuuuggcuccuuucuccauuu

SEQ ID NO: 1048844 - RNA, 26 nt, Human
ucagucucuggggcagguuuuggcuc

SEQ ID NO: 1048845 - RNA, 22 nt, Human
ucucuggggcagguuuuggcuc

SEQ ID NO: 1048846 - RNA, 18 nt, Human
ugacucuuucagaaaagc

SEQ ID NO: 1048847 - RNA, 23 nt, Human
uuuaaagcuuucuuuucauugac

SEQ ID NO: 1048848 - RNA, 21 nt, Human
uuuggcuccuuucuccauuug

SEQ ID NO: 1048849 - RNA, 27 nt, Human
aggcagggaggccaguggagaggaugu

SEQ ID NO: 1048850 - RNA, 22 nt, Human
agggcgaugaugacagaggggg

SEQ ID NO: 1048851 - RNA, 22 nt, Human
ccuuuauuuugcaagugauggg

SEQ ID NO: 1048852 - RNA, 19 nt, Human
ggaaaggagccaggcggcc

SEQ ID NO: 1048853 - RNA, 19 nt, Human
ggacuggaggcagggaggc

SEQ ID NO: 1048854 - RNA, 18 nt, Human
ggaggccaguggagagga

SEQ ID NO: 1048855 - RNA, 22 nt, Human
ggccaguggagaggaugugguc

SEQ ID NO: 1048856 - RNA, 21 nt, Human
ggcuagggaaggacuggaggc

SEQ ID NO: 1048857 - RNA, 24 nt, Human
ggggggcuucuguggaggagggcu

SEQ ID NO: 1048858 - RNA, 21 nt, Human
uggaggagggcuagggaagga

SEQ ID NO: 1048859 - RNA, 22 nt, Human
uggaggcagggaggccagugga

SEQ ID NO: 1048860 - RNA, 26 nt, Human
uuaaggcuuuggccuuuauuuugcaa

SEQ ID NO: 1048861 - RNA, 25 nt, Human
cacagucaggccugaucgacugccc

SEQ ID NO: 1048862 - RNA, 23 nt, Human
cucccuggcacagucaggccuga

SEQ ID NO: 1048863 - RNA, 19 nt, Human
ucaggccugaucgacugcc

SEQ ID NO: 1048864 - RNA, 24 nt, Human
ucgacugcccuuggaguuccuggu

SEQ ID NO: 1048865 - RNA, 24 nt, Human
ugggcucccuggcacagucaggcc

SEQ ID NO: 1048866 - RNA, 19 nt, Human
ugggguugggcucccuggc

SEQ ID NO: 1048867 - RNA, 22 nt, Human
accgcccauaagcagagaagug

SEQ ID NO: 1048868 - RNA, 18 nt, Human
aggcucgaggcaaacugg

SEQ ID NO: 1048869 - RNA, 23 nt, Human
augaaaaucuaauaccgcccaua

SEQ ID NO: 1048870 - RNA, 21 nt, Human
auggcuggggugauuuuuuuu

SEQ ID NO: 1048871 - RNA, 25 nt, Human
auuuuuuuuuuuuuuuuuuuuuggc

SEQ ID NO: 1048872 - RNA, 26 nt, Human
auuuuuuuuuuuuuuuuuuuuugggg

SEQ ID NO: 1048873 - RNA, 24 nt, Human
ccaguuggacugccggccuuuucu

SEQ ID NO: 1048874 - RNA, 20 nt, Human
cccauaagcagagaagugga

SEQ ID NO: 1048875 - RNA, 26 nt, Human
ccgcccauaagcagagaaguggaaau

SEQ ID NO: 1048876 - RNA, 20 nt, Human
cuucucagagccaggguguc

SEQ ID NO: 1048877 - RNA, 24 nt, Human
gaagcaggauggugcaacgaagaa

SEQ ID NO: 1048878 - RNA, 18 nt, Human
gacgagacagccccauug

SEQ ID NO: 1048879 - RNA, 21 nt, Human
ggcucgaggcaaacugggcuu

SEQ ID NO: 1048880 - RNA, 19 nt, Human
gugaaaaggguacugugga

SEQ ID NO: 1048881 - RNA, 23 nt, Human
ucagagccagggugucaggagga

SEQ ID NO: 1048882 - RNA, 19 nt, Human
uccaggcuggaaaguggaa

SEQ ID NO: 1048883 - RNA, 21 nt, Human
ucgguggcacuuuguuuucuu

SEQ ID NO: 1048884 - RNA, 18 nt, Human
ugaggaugaagagaaaug

SEQ ID NO: 1048885 - RNA, 22 nt, Human
uggaaaguggaaacuaaggcau

SEQ ID NO: 1048886 - RNA, 18 nt, Human
uggaagaggcucgaggca

SEQ ID NO: 1048887 - RNA, 25 nt, Human
uggaagaggcucgaggcaaacuggg

SEQ ID NO: 1048888 - RNA, 30 nt, Human
uggcuggggugauuuuuuuuuuuuuuuuuu

SEQ ID NO: 1048889 - RNA, 32 nt, Human
uggcuggggugauuuuuuuuuuuuuuuuuuuu

SEQ ID NO: 1048890 - RNA, 19 nt, Human
ugggccagaucagacagca

SEQ ID NO: 1048891 - RNA, 25 nt, Human
uggggugauuuuuuuuuuuuuuuuu

SEQ ID NO: 1048892 - RNA, 21 nt, Human
uguagaaucagaagaugcuga

SEQ ID NO: 1048893 - RNA, 20 nt, Human
ugucuggaagaggcucgagg

SEQ ID NO: 1048894 - RNA, 19 nt, Human
ugugacagugaaaagggua

SEQ ID NO: 1048895 - RNA, 19 nt, Human
ugugacagugaaaagggua

SEQ ID NO: 1048896 - RNA, 20 nt, Human
ugugaggggauccaggcugg

SEQ ID NO: 1048897 - RNA, 20 nt, Human
uucaaugucagaagcaggau

SEQ ID NO: 1048898 - RNA, 25 nt, Human
uuuuuuuuuuuuggcagucuucuca

SEQ ID NO: 1048899 - RNA, 18 nt, Human
uuuuuuuuuuuuuuuuug

SEQ ID NO: 1048900 - RNA, 22 nt, Human
uuuuuuuuuuuuuuuuuggcag

SEQ ID NO: 1048901 - RNA, 21 nt, Human
agccugaugccacuaccaucc

SEQ ID NO: 1048902 - RNA, 24 nt, Human
aggaagacugaaggcaaagguggu

SEQ ID NO: 1048903 - RNA, 22 nt, Human
caucccacagcugccccccacc

SEQ ID NO: 1048904 - RNA, 23 nt, Human
ccacagcugccccccaccaggaa

SEQ ID NO: 1048905 - RNA, 21 nt, Human
ccacuaccaucccacagcugc

SEQ ID NO: 1048906 - RNA, 21 nt, Human
cccagaaccucugcacucaga

SEQ ID NO: 1048907 - RNA, 20 nt, Human
cucagaagccugaugccacu

SEQ ID NO: 1048908 - RNA, 22 nt, Human
ucccagaaccucugcacucaga

SEQ ID NO: 1048909 - RNA, 21 nt, Human
ugcacucagaagccugaugcc

SEQ ID NO: 1048910 - RNA, 24 nt, Human
accuggcaauaagagcccacacua

SEQ ID NO: 1048911 - RNA, 22 nt, Human
caauaagagcccacacuaaaag

SEQ ID NO: 1048912 - RNA, 25 nt, Human
cagggcacaccacguucacauucuc

SEQ ID NO: 1048913 - RNA, 20 nt, Human
ccacguucacauucucguag

SEQ ID NO: 1048914 - RNA, 22 nt, Human
gggugaagccuugucacagggc

SEQ ID NO: 1048915 - RNA, 26 nt, Human
aagacgcccacgccccuuggcccuca

SEQ ID NO: 1048916 - RNA, 22 nt, Human
cacgccccuuggcccucagcgg

SEQ ID NO: 1048917 - RNA, 23 nt, Human
cccgcccucucccccgagucucu

SEQ ID NO: 1048918 - RNA, 20 nt, Human
ccucccgcccucucccccga

SEQ ID NO: 1048919 - RNA, 22 nt, Human
cucccgcccucucccccgaguc

SEQ ID NO: 1048920 - RNA, 19 nt, Human
cucggucacucgcuggugc

SEQ ID NO: 1048921 - RNA, 26 nt, Human
gaagacgcccacgccccuuggcccuc

SEQ ID NO: 1048922 - RNA, 21 nt, Human
ucccccgagucucucggucac

SEQ ID NO: 1048923 - RNA, 18 nt, Human
ucggucacucgcuggugc

SEQ ID NO: 1048924 - RNA, 24 nt, Human
aacuccgcuagcucuccaacaaga

SEQ ID NO: 1048925 - RNA, 22 nt, Human
aagaagugacuugacgcagccc

SEQ ID NO: 1048926 - RNA, 20 nt, Human
acagagaagcaagagauaag

SEQ ID NO: 1048927 - RNA, 23 nt, Human
auguggccaagaggaugugaggu

SEQ ID NO: 1048928 - RNA, 19 nt, Human
cagagaagcaagagauaag

SEQ ID NO: 1048929 - RNA, 22 nt, Human
gugacauuccacacagcacugg

SEQ ID NO: 1048930 - RNA, 22 nt, Human
uagcucuccaacaagaagugac

SEQ ID NO: 1048931 - RNA, 20 nt, Human
ugaggugacauuccacacag

SEQ ID NO: 1048932 - RNA, 20 nt, Human
ugaugcaaggugcuggcagu

SEQ ID NO: 1048933 - RNA, 19 nt, Human
uggcagugacacuaucaca

SEQ ID NO: 1048934 - RNA, 22 nt, Human
agcuggguuuccacaagguggg

SEQ ID NO: 1048935 - RNA, 18 nt, Human
caugacaucucccugccc

SEQ ID NO: 1048936 - RNA, 19 nt, Human
ccaugacaucucccugccc

SEQ ID NO: 1048937 - RNA, 22 nt, Human
cccggacagcgaagaguugagg

SEQ ID NO: 1048938 - RNA, 22 nt, Human
ccuaugaugguggcgggguuuu

SEQ ID NO: 1048939 - RNA, 24 nt, Human
cuacacagguagccggaacugcag

SEQ ID NO: 1048940 - RNA, 21 nt, Human
cuagcguagcuccgcuuucuc

SEQ ID NO: 1048941 - RNA, 18 nt, Human
gaacugcagccaaccuuc

SEQ ID NO: 1048942 - RNA, 19 nt, Human
uagauccuacuagccagga

SEQ ID NO: 1048943 - RNA, 24 nt, Human
ucuagauccuacuagccaggagac

SEQ ID NO: 1048944 - RNA, 24 nt, Human
uggggucaaagggagggagaaauc

SEQ ID NO: 1048945 - RNA, 24 nt, Human
uuuauauguuuuguuacuguccag

SEQ ID NO: 1048946 - RNA, 23 nt, Human
cagcgugugagggucugugucuc

SEQ ID NO: 1048947 - RNA, 22 nt, Human
gcgugugagggucugugucucc

SEQ ID NO: 1048948 - RNA, 24 nt, Human
ccuccagugaccuugcagggacug

SEQ ID NO: 1048949 - RNA, 19 nt, Human
cuggauuccugaugauguu

SEQ ID NO: 1048950 - RNA, 22 nt, Human
cuggauuccugaugauguucgu

SEQ ID NO: 1048951 - RNA, 22 nt, Human
cuucaggaaccuccagugaccu

SEQ ID NO: 1048952 - RNA, 21 nt, Human
gagcggcucaaaguccucguc

SEQ ID NO: 1048953 - RNA, 21 nt, Human
ugucugaacuucaggaaccuc

SEQ ID NO: 1048954 - RNA, 24 nt, Human
aaauguccucccgcgcugggcucc

SEQ ID NO: 1048955 - RNA, 18 nt, Human
aacagcggggacacagau

SEQ ID NO: 1048956 - RNA, 22 nt, Human
accagagccccggcaacagcgg

SEQ ID NO: 1048957 - RNA, 24 nt, Human
aggaggcuaugaaaauguccuccc

SEQ ID NO: 1048958 - RNA, 21 nt, Human
auagggcgcgcaaguggauac

SEQ ID NO: 1048959 - RNA, 22 nt, Human
cagcucaggauuccauccuccc

SEQ ID NO: 1048960 - RNA, 22 nt, Human
cagugcaccugcuuuugucugg

SEQ ID NO: 1048961 - RNA, 23 nt, Human
cccaggcucgggcuccggucccu

SEQ ID NO: 1048962 - RNA, 21 nt, Human
ccucagggagugggacugagg

SEQ ID NO: 1048963 - RNA, 18 nt, Human
ccucggacuguaggaccc

SEQ ID NO: 1048964 - RNA, 18 nt, Human
cgugcgcgcaggcagccg

SEQ ID NO: 1048965 - RNA, 20 nt, Human
cgugcgcgcaggcagccgcg

SEQ ID NO: 1048966 - RNA, 22 nt, Human
cuccucccucgcugcgggaccu

SEQ ID NO: 1048967 - RNA, 22 nt, Human
cugcuuuugucuggauuccuac

SEQ ID NO: 1048968 - RNA, 21 nt, Human
gaaaguuugaugucaaguuca

SEQ ID NO: 1048969 - RNA, 21 nt, Human
gaggugagaguagugacugug

SEQ ID NO: 1048970 - RNA, 22 nt, Human
uaucagaaaguuugaugucaag

SEQ ID NO: 1048971 - RNA, 21 nt, Human
ucagaaaguuugaugucaagu

SEQ ID NO: 1048972 - RNA, 24 nt, Human
uccccaauguucccagcugagguu

SEQ ID NO: 1048973 - RNA, 23 nt, Human
ugcagcucaggauuccauccucc

SEQ ID NO: 1048974 - RNA, 22 nt, Human
ugcgugcgcgcaggcagccgcg

SEQ ID NO: 1048975 - RNA, 18 nt, Human
uggauccccaccacauag

SEQ ID NO: 1048976 - RNA, 24 nt, Human
ugggcuccugccaccgccacguuu

SEQ ID NO: 1048977 - RNA, 19 nt, Human
uucccagcugaggugagag

SEQ ID NO: 1048978 - RNA, 18 nt, Human
uuccuauugucucaggag

SEQ ID NO: 1048979 - RNA, 18 nt, Human
cagcagacccagucucug

SEQ ID NO: 1048980 - RNA, 23 nt, Human
cagggccuggagauguccuugag

SEQ ID NO: 1048981 - RNA, 21 nt, Human
ccagccuucuugcucuggggc

SEQ ID NO: 1048982 - RNA, 23 nt, Human
cccgacugccgucuguccagaag

SEQ ID NO: 1048983 - RNA, 24 nt, Human
gccuccccaccacuguguggagac

SEQ ID NO: 1048984 - RNA, 23 nt, Human
ggccuggagauguccuugagggc

SEQ ID NO: 1048985 - RNA, 21 nt, Human
ucuguccagaaggccucccca

SEQ ID NO: 1048986 - RNA, 21 nt, Human
aggcugcaccggggaccccag

SEQ ID NO: 1048987 - RNA, 23 nt, Human
cacacagcugacgaggcugcacc

SEQ ID NO: 1048988 - RNA, 21 nt, Human
caccggggaccccagcugcag

SEQ ID NO: 1048989 - RNA, 23 nt, Human
caggagccccugcacaaggccca

SEQ ID NO: 1048990 - RNA, 23 nt, Human
ccccagcugcaggcuaaauccaa

SEQ ID NO: 1048991 - RNA, 21 nt, Human
gagccccugcacaaggcccag

SEQ ID NO: 1048992 - RNA, 22 nt, Human
gccacaccgcacacagcugacg

SEQ ID NO: 1048993 - RNA, 22 nt, Human
ggagccccugcacaaggcccuu

SEQ ID NO: 1048994 - RNA, 22 nt, Human
ggcccacaccgccacaccgcac

SEQ ID NO: 1048995 - RNA, 22 nt, Human
gggugggagggauuugcagggc

SEQ ID NO: 1048996 - RNA, 20 nt, Human
ugggacggcccacaccgcca

SEQ ID NO: 1048997 - RNA, 18 nt, Human
caugcuuguccuccaggg

SEQ ID NO: 1048998 - RNA, 18 nt, Human
ccucggugaucuccggcc

SEQ ID NO: 1048999 - RNA, 20 nt, Human
cucggauuccucggugaucu

SEQ ID NO: 1049000 - RNA, 19 nt, Human
gagaagaagcugcaaggug

SEQ ID NO: 1049001 - RNA, 18 nt, Human
gcucggauuccucgguga

SEQ ID NO: 1049002 - RNA, 20 nt, Human
ggagaagaagcugcaaggug

SEQ ID NO: 1049003 - RNA, 22 nt, Human
ggagaagaagcugcaaggugcc

SEQ ID NO: 1049004 - RNA, 23 nt, Human
uccucggugaucuccggccucac

SEQ ID NO: 1049005 - RNA, 18 nt, Human
uucaugcuuguccuccag

SEQ ID NO: 1049006 - RNA, 18 nt, Human
aaaccagcguuuccucca

SEQ ID NO: 1049007 - RNA, 20 nt, Human
aaaccagcguuuccuccagg

SEQ ID NO: 1049008 - RNA, 19 nt, Human
aacacagcuaucaccagca

SEQ ID NO: 1049009 - RNA, 22 nt, Human
aaccccauggauggggccccuc

SEQ ID NO: 1049010 - RNA, 22 nt, Human
acacagcuaucaccagcaagaa

SEQ ID NO: 1049011 - RNA, 23 nt, Human
acacagugagacaccgggggcuc

SEQ ID NO: 1049012 - RNA, 21 nt, Human
acagugaaagaaacacagcua

SEQ ID NO: 1049013 - RNA, 24 nt, Human
acucauucauguccucccuggucu

SEQ ID NO: 1049014 - RNA, 21 nt, Human
acuguccuggccccacucugg

SEQ ID NO: 1049015 - RNA, 19 nt, Human
agaaaguggcgagcccagu

SEQ ID NO: 1049016 - RNA, 24 nt, Human
agaacagacucccucaugcaugga

SEQ ID NO: 1049017 - RNA, 26 nt, Human
agaaggcagcacagaccaugcaccau

SEQ ID NO: 1049018 - RNA, 26 nt, Human
agaaggcagcacaggccaugcaccau

SEQ ID NO: 1049019 - RNA, 26 nt, Human
agaaggcagcacaggccgugcaccau

SEQ ID NO: 1049020 - RNA, 20 nt, Human
agaagugccccagccaggaa

SEQ ID NO: 1049021 - RNA, 22 nt, Human
agacucccucaugcauggacuc

SEQ ID NO: 1049022 - RNA, 21 nt, Human
agaguggaaaucuguugggag

SEQ ID NO: 1049023 - RNA, 21 nt, Human
agcaagaaaguggcgagccca

SEQ ID NO: 1049024 - RNA, 24 nt, Human
agcaagaacaagauaggaaugaga

SEQ ID NO: 1049025 - RNA, 24 nt, Human
agccaggaaccccauggauggggc

SEQ ID NO: 1049026 - RNA, 24 nt, Human
agcucucaggaccccuuggggucc

SEQ ID NO: 1049027 - RNA, 21 nt, Human
agcugcccucagaagcaaugc

SEQ ID NO: 1049028 - RNA, 22 nt, Human
aggacagugaaagaaacacagc

SEQ ID NO: 1049029 - RNA, 26 nt, Human
aggcaagaaaaaaaugagaugucugg

SEQ ID NO: 1049030 - RNA, 22 nt, Human
aggcacaggugggccccaagca

SEQ ID NO: 1049031 - RNA, 20 nt, Human
aggcacuguccuggccccac

SEQ ID NO: 1049032 - RNA, 19 nt, Human
aggcagaaggcagcacaga

SEQ ID NO: 1049033 - RNA, 21 nt, Human
aggcagaaggcagcacagacc

SEQ ID NO: 1049034 - RNA, 19 nt, Human
aggcagaaggcagcacagg

SEQ ID NO: 1049035 - RNA, 19 nt, Human
aggcagaaggcagcacagg

SEQ ID NO: 1049036 - RNA, 19 nt, Human
aggcagcacagaccaugca

SEQ ID NO: 1049037 - RNA, 24 nt, Human
agggagcagcaagaaaguggcgag

SEQ ID NO: 1049038 - RNA, 22 nt, Human
agggaguaagaggagagagggu

SEQ ID NO: 1049039 - RNA, 21 nt, Human
aggggucagacuuuggagcag

SEQ ID NO: 1049040 - RNA, 18 nt, Human
aggugcagggaugggcca

SEQ ID NO: 1049041 - RNA, 22 nt, Human
aggugcagggaugggccaggug

SEQ ID NO: 1049042 - RNA, 20 nt, Human
agguguggcucagcacccaa

SEQ ID NO: 1049043 - RNA, 18 nt, Human
agucuggccccuccgcag

SEQ ID NO: 1049044 - RNA, 20 nt, Human
aguggcuggguccacucagg

SEQ ID NO: 1049045 - RNA, 22 nt, Human
aucucuggccacugacugaagc

SEQ ID NO: 1049046 - RNA, 21 nt, Human
augcagauguggccucgagac

SEQ ID NO: 1049047 - RNA, 18 nt, Human
augguccauuuaaaggga

SEQ ID NO: 1049048 - RNA, 19 nt, Human
caagggggugaaggugggg

SEQ ID NO: 1049049 - RNA, 22 nt, Human
caaguccugacucggcacuggc

SEQ ID NO: 1049050 - RNA, 20 nt, Human
caauguccacguggguuucc

SEQ ID NO: 1049051 - RNA, 21 nt, Human
cacacagugagacaccggggg

SEQ ID NO: 1049052 - RNA, 20 nt, Human
cacagcugcccucagaagca

SEQ ID NO: 1049053 - RNA, 21 nt, Human
cacagcugcccucagaagcaa

SEQ ID NO: 1049054 - RNA, 19 nt, Human
cacaucagaugucuuggcc

SEQ ID NO: 1049055 - RNA, 23 nt, Human
caccagguaaaagguacgcucac

SEQ ID NO: 1049056 - RNA, 18 nt, Human
caccaugcagauguggcc

SEQ ID NO: 1049057 - RNA, 19 nt, Human
cagaucugacagaugcucu

SEQ ID NO: 1049058 - RNA, 20 nt, Human
cagcaagaaaguggcgagcc

SEQ ID NO: 1049059 - RNA, 21 nt, Human
cagcacccaauguccacucag

SEQ ID NO: 1049060 - RNA, 19 nt, Human
caggaagagacugaggaug

SEQ ID NO: 1049061 - RNA, 18 nt, Human
caggaccccuuggggucc

SEQ ID NO: 1049062 - RNA, 19 nt, Human
caggcccugaucaaggcaa

SEQ ID NO: 1049063 - RNA, 22 nt, Human
caggggcuucuuggagccauca

SEQ ID NO: 1049064 - RNA, 18 nt, Human
caugacacagucaacaug

SEQ ID NO: 1049065 - RNA, 19 nt, Human
cccagccaggaaccccaug

SEQ ID NO: 1049066 - RNA, 19 nt, Human
cccaggaaagaacagacuc

SEQ ID NO: 1049067 - RNA, 21 nt, Human
ccccauggauggggccccucu

SEQ ID NO: 1049068 - RNA, 22 nt, Human
cccugauauuacagagcuuuag

SEQ ID NO: 1049069 - RNA, 19 nt, Human
ccggcuggcauucccucca

SEQ ID NO: 1049070 - RNA, 22 nt, Human
ccgggucugaggggcaggaaga

SEQ ID NO: 1049071 - RNA, 26 nt, Human
ccuccaggcaaagagccucagcuuuu

SEQ ID NO: 1049072 - RNA, 21 nt, Human
ccucgagacccaucauccacc

SEQ ID NO: 1049073 - RNA, 22 nt, Human
ccucugggcagccucagggguc

SEQ ID NO: 1049074 - RNA, 22 nt, Human
ccuggccccacucugguuuugg

SEQ ID NO: 1049075 - RNA, 21 nt, Human
cuaucaccagcaagaacaaga

SEQ ID NO: 1049076 - RNA, 21 nt, Human
cucagguuucuggaugcuggg

SEQ ID NO: 1049077 - RNA, 19 nt, Human
cucauucauguccucccug

SEQ ID NO: 1049078 - RNA, 22 nt, Human
cucccuggucucagccaccagg

SEQ ID NO: 1049079 - RNA, 18 nt, Human
cuucacagccggcagggu

SEQ ID NO: 1049080 - RNA, 20 nt, Human
cuugcuucacagccggcagg

SEQ ID NO: 1049081 - RNA, 19 nt, Human
gaccuuggaaagacucuga

SEQ ID NO: 1049082 - RNA, 19 nt, Human
gacuaaguccucugccucu

SEQ ID NO: 1049083 - RNA, 21 nt, Human
gagacaccccggaggugcagg

SEQ ID NO: 1049084 - RNA, 21 nt, Human
gagagaggguggcaacuggaa

SEQ ID NO: 1049085 - RNA, 23 nt, Human
gagcccagucugcugcauggggg

SEQ ID NO: 1049086 - RNA, 19 nt, Human
gagccucagcuucuucucg

SEQ ID NO: 1049087 - RNA, 21 nt, Human
gaggggcaggaagagacugag

SEQ ID NO: 1049088 - RNA, 20 nt, Human
gaugccggagccaggcagaa

SEQ ID NO: 1049089 - RNA, 19 nt, Human
gcauguucugcucucuggc

SEQ ID NO: 1049090 - RNA, 18 nt, Human
gcugcugucuucagcagc

SEQ ID NO: 1049091 - RNA, 20 nt, Human
ggaaagaacagacucccuca

SEQ ID NO: 1049092 - RNA, 18 nt, Human
ggagcagcucugaggcac

SEQ ID NO: 1049093 - RNA, 21 nt, Human
ggagcagcucugaggcacugu

SEQ ID NO: 1049094 - RNA, 22 nt, Human
ggagcagcugggcucagcugug

SEQ ID NO: 1049095 - RNA, 19 nt, Human
ggcaggaagagacugagga

SEQ ID NO: 1049096 - RNA, 20 nt, Human
ggcugggggcugcugucuuc

SEQ ID NO: 1049097 - RNA, 18 nt, Human
gggaugggccaggugggc

SEQ ID NO: 1049098 - RNA, 19 nt, Human
gggucagacuuuggagcag

SEQ ID NO: 1049099 - RNA, 27 nt, Human
gucagcaucucaggcccugaucaaggc

SEQ ID NO: 1049100 - RNA, 20 nt, Human
uaagaggagagaggguggca

SEQ ID NO: 1049101 - RNA, 21 nt, Human
uaccagacccaggcagaaggc

SEQ ID NO: 1049102 - RNA, 24 nt, Human
uaccagacccaggcagaaggcagc

SEQ ID NO: 1049103 - RNA, 19 nt, Human
uaggaagaggacagugaaa

SEQ ID NO: 1049104 - RNA, 21 nt, Human
ucacaucaacauccagcugcu

SEQ ID NO: 1049105 - RNA, 19 nt, Human
uccaccucaaguccugacu

SEQ ID NO: 1049106 - RNA, 19 nt, Human
ucccuggucucagccaccu

SEQ ID NO: 1049107 - RNA, 24 nt, Human
ucuggacccacucauucauguccu

SEQ ID NO: 1049108 - RNA, 18 nt, Human
ugaccuuggaaagacucu

SEQ ID NO: 1049109 - RNA, 20 nt, Human
ugagaguggaaaucuguugg

SEQ ID NO: 1049110 - RNA, 21 nt, Human
ugaggggcaggaagagacuga

SEQ ID NO: 1049111 - RNA, 18 nt, Human
ugaugggagcagcugggc

SEQ ID NO: 1049112 - RNA, 19 nt, Human
ugaugggagcagcugggcu

SEQ ID NO: 1049113 - RNA, 23 nt, Human
ugcauggacucagcaggccggcu

SEQ ID NO: 1049114 - RNA, 19 nt, Human
ugccugaagccacagaucu

SEQ ID NO: 1049115 - RNA, 22 nt, Human
ugccugaagccacagaucugac

SEQ ID NO: 1049116 - RNA, 22 nt, Human
ugccuggaugguccauuuaaag

SEQ ID NO: 1049117 - RNA, 24 nt, Human
ugccuggaugguccauuuaaaggg

SEQ ID NO: 1049118 - RNA, 20 nt, Human
ugcuagucuggccccuccgc

SEQ ID NO: 1049119 - RNA, 24 nt, Human
ugcugggcccaggcagaaggcagc

SEQ ID NO: 1049120 - RNA, 20 nt, Human
ugcuucacagccggcagggu

SEQ ID NO: 1049121 - RNA, 22 nt, Human
uggaaaucuguugggagcccgg

SEQ ID NO: 1049122 - RNA, 20 nt, Human
uggcgugcuggugcgagcgg

SEQ ID NO: 1049123 - RNA, 23 nt, Human
uggcucagcacccaauguccacg

SEQ ID NO: 1049124 - RNA, 19 nt, Human
uggggugugggaucacuua

SEQ ID NO: 1049125 - RNA, 20 nt, Human
uuagaguguggcggagcagg

SEQ ID NO: 1049126 - RNA, 23 nt, Human
uuccuccaggcaaagagccucag

SEQ ID NO: 1049127 - RNA, 22 nt, Human
uuccuccugccugaagccacag

SEQ ID NO: 1049128 - RNA, 19 nt, Human
uugaucaccuuggcugggg

SEQ ID NO: 1049129 - RNA, 23 nt, Human
uugcauguucugcucucuggcug

SEQ ID NO: 1049130 - RNA, 21 nt, Human
uuggaaagacucugaaaucaa

SEQ ID NO: 1049131 - RNA, 18 nt, Human
uuggagcagcuuccauga

SEQ ID NO: 1049132 - RNA, 20 nt, Human
uuuugaucaccuuggcuggg

SEQ ID NO: 1049133 - RNA, 22 nt, Human
cuggugccccuuaggugcuggg

SEQ ID NO: 1049134 - RNA, 24 nt, Human
ugcugggcccuuggaaaucggcgc

SEQ ID NO: 1049135 - RNA, 18 nt, Human
uggugccccuuaggugcu

SEQ ID NO: 1049136 - RNA, 23 nt, Human
uuggaaaucggcgcguggggggc

SEQ ID NO: 1049137 - RNA, 18 nt, Human
acaugacacucuguccuc

SEQ ID NO: 1049138 - RNA, 18 nt, Human
acugaucugacacagccu

SEQ ID NO: 1049139 - RNA, 18 nt, Human
cacagccucacaugacac

SEQ ID NO: 1049140 - RNA, 18 nt, Human
caggacacagacugaucu

SEQ ID NO: 1049141 - RNA, 22 nt, Human
caggacacagacugaucugaca

SEQ ID NO: 1049142 - RNA, 23 nt, Human
cccaggacacagacugaucugac

SEQ ID NO: 1049143 - RNA, 24 nt, Human
aaaaccagagucuccaggggccga

SEQ ID NO: 1049144 - RNA, 23 nt, Human
aaacagacugaggaagcugcaca

SEQ ID NO: 1049145 - RNA, 21 nt, Human
aacaggacgagcaaccaauag

SEQ ID NO: 1049146 - RNA, 20 nt, Human
aagcgccgacaaacaggacg

SEQ ID NO: 1049147 - RNA, 22 nt, Human
aagcugcacaggccaauggcag

SEQ ID NO: 1049148 - RNA, 22 nt, Human
acaaauuucuaauacuguccag

SEQ ID NO: 1049149 - RNA, 21 nt, Human
acaacccccacccccaccccc

SEQ ID NO: 1049150 - RNA, 24 nt, Human
acacaaaaucuaacaagugugaac

SEQ ID NO: 1049151 - RNA, 18 nt, Human
acagacccagccuagccc

SEQ ID NO: 1049152 - RNA, 23 nt, Human
acaggacgagcaaccaauagcaa

SEQ ID NO: 1049153 - RNA, 23 nt, Human
acaggagaaaacacacucaagca

SEQ ID NO: 1049154 - RNA, 20 nt, Human
accaugcccagccugaccug

SEQ ID NO: 1049155 - RNA, 21 nt, Human
accaugcccagccugaccugg

SEQ ID NO: 1049156 - RNA, 20 nt, Human
acccccacccccacccccac

SEQ ID NO: 1049157 - RNA, 22 nt, Human
acccccacccccacccccacug

SEQ ID NO: 1049158 - RNA, 26 nt, Human
acccccacccccacccccacuguuca

SEQ ID NO: 1049159 - RNA, 22 nt, Human
agacuguguaggcuggucacag

SEQ ID NO: 1049160 - RNA, 22 nt, Human
agaucugcagcuccagcagucu

SEQ ID NO: 1049161 - RNA, 23 nt, Human
agcaaccgagggcggcugcggcc

SEQ ID NO: 1049162 - RNA, 21 nt, Human
agcacaacccccacccccacc

SEQ ID NO: 1049163 - RNA, 19 nt, Human
agcagagugugagcacuca

SEQ ID NO: 1049164 - RNA, 24 nt, Human
aggagaaaacacacucaagcaggg

SEQ ID NO: 1049165 - RNA, 22 nt, Human
aggguauccugcaugcagguga

SEQ ID NO: 1049166 - RNA, 22 nt, Human
caacagcaacuugaaacagacu

SEQ ID NO: 1049167 - RNA, 18 nt, Human
caagagaauaagcauaca

SEQ ID NO: 1049168 - RNA, 23 nt, Human
caauagcaaccgagggcggcugc

SEQ ID NO: 1049169 - RNA, 26 nt, Human
cacaacagggccaccauaggaugaga

SEQ ID NO: 1049170 - RNA, 21 nt, Human
cacaggucagggcuacccuuc

SEQ ID NO: 1049171 - RNA, 25 nt, Human
cacccccacccccacuguucacaga

SEQ ID NO: 1049172 - RNA, 19 nt, Human
caccugccugcaugugcag

SEQ ID NO: 1049173 - RNA, 21 nt, Human
cacuguucacagacacagggg

SEQ ID NO: 1049174 - RNA, 19 nt, Human
cagcaucacacaacagggc

SEQ ID NO: 1049175 - RNA, 21 nt, Human
cagcaucacacaacagggcca

SEQ ID NO: 1049176 - RNA, 18 nt, Human
cagcgaaccucccagauc

SEQ ID NO: 1049177 - RNA, 18 nt, Human
caggcgggcauccugggc

SEQ ID NO: 1049178 - RNA, 26 nt, Human
caguucuuuucagcagcuuuaugaga

SEQ ID NO: 1049179 - RNA, 25 nt, Human
cauuaugacccaccuguguguccag

SEQ ID NO: 1049180 - RNA, 21 nt, Human
ccagagucuccaggggccgac

SEQ ID NO: 1049181 - RNA, 21 nt, Human
ccaggaagagagcagggaggg

SEQ ID NO: 1049182 - RNA, 20 nt, Human
ccauaugucuuggacuugga

SEQ ID NO: 1049183 - RNA, 18 nt, Human
cccagccuagcccucagc

SEQ ID NO: 1049184 - RNA, 18 nt, Human
ccccacccccacccccac

SEQ ID NO: 1049185 - RNA, 21 nt, Human
ccccacccccacuguucacag

SEQ ID NO: 1049186 - RNA, 24 nt, Human
cccccacccccacccccacuguuc

SEQ ID NO: 1049187 - RNA, 23 nt, Human
ccucucaaaucacacggcucugg

SEQ ID NO: 1049188 - RNA, 25 nt, Human
cgccgacaaacaggacgagcaacca

SEQ ID NO: 1049189 - RNA, 19 nt, Human
cggcgcgcgcggagggccg

SEQ ID NO: 1049190 - RNA, 20 nt, Human
cuaccuuacgucagccgccu

SEQ ID NO: 1049191 - RNA, 19 nt, Human
cucacaaugcucaccaaac

SEQ ID NO: 1049192 - RNA, 24 nt, Human
cuccuaugcuaccaugcccagccu

SEQ ID NO: 1049193 - RNA, 18 nt, Human
cuggccaguucuuuucag

SEQ ID NO: 1049194 - RNA, 23 nt, Human
cugggacguggcaggcaguuucc

SEQ ID NO: 1049195 - RNA, 22 nt, Human
cuuacgucagccgccucucaaa

SEQ ID NO: 1049196 - RNA, 19 nt, Human
cuuagggagcacaggagaa

SEQ ID NO: 1049197 - RNA, 24 nt, Human
cuucgagaagcgccgacaaacagg

SEQ ID NO: 1049198 - RNA, 19 nt, Human
cuucgcccccuucuucgag

SEQ ID NO: 1049199 - RNA, 19 nt, Human
gaaaacacacucaagcagg

SEQ ID NO: 1049200 - RNA, 21 nt, Human
gaaagacauucacaguggcac

SEQ ID NO: 1049201 - RNA, 22 nt, Human
gaaaucagaugaaauagcuuuu

SEQ ID NO: 1049202 - RNA, 18 nt, Human
gagagcagggagggugcu

SEQ ID NO: 1049203 - RNA, 19 nt, Human
gagcagggagggugcuggg

SEQ ID NO: 1049204 - RNA, 21 nt, Human
gaguggagcagagugugagca

SEQ ID NO: 1049205 - RNA, 20 nt, Human
gaugggggaacgcuggcucc

SEQ ID NO: 1049206 - RNA, 20 nt, Human
gcacaacuguuuagcuaccu

SEQ ID NO: 1049207 - RNA, 18 nt, Human
gggcggcugcggcgcgcg

SEQ ID NO: 1049208 - RNA, 18 nt, Human
ggguauccugcaugcagg

SEQ ID NO: 1049209 - RNA, 19 nt, Human
gugaacuuaauuuucagcu

SEQ ID NO: 1049210 - RNA, 22 nt, Human
gugagcacaacccccaccccca

SEQ ID NO: 1049211 - RNA, 19 nt, Human
guucuuuucagcagcuuua

SEQ ID NO: 1049212 - RNA, 26 nt, Human
uaaacagaccucuucaagaaauagug

SEQ ID NO: 1049213 - RNA, 22 nt, Human
uacaacacuguuacacacaaaa

SEQ ID NO: 1049214 - RNA, 28 nt, Human
uacacacaaaaucuaacaagugugaacc

SEQ ID NO: 1049215 - RNA, 20 nt, Human
uacugagcaucaagguggug

SEQ ID NO: 1049216 - RNA, 19 nt, Human
uauucaacuugcugccugu

SEQ ID NO: 1049217 - RNA, 20 nt, Human
ucaaaucucaacaauccggu

SEQ ID NO: 1049218 - RNA, 19 nt, Human
ucacgucuucgcccccuuc

SEQ ID NO: 1049219 - RNA, 23 nt, Human
ucagcagcuuuaugagauuuucu

SEQ ID NO: 1049220 - RNA, 22 nt, Human
uccugggccgcgcagcuaccuu

SEQ ID NO: 1049221 - RNA, 26 nt, Human
uccugugagcaagagcucacagggac

SEQ ID NO: 1049222 - RNA, 19 nt, Human
ucuccaggggccgaccugg

SEQ ID NO: 1049223 - RNA, 20 nt, Human
ucuccaggggccgaccuggg

SEQ ID NO: 1049224 - RNA, 24 nt, Human
ucuucagcugaguccacaaacccu

SEQ ID NO: 1049225 - RNA, 19 nt, Human
ugcaacagcaacuugaaac

SEQ ID NO: 1049226 - RNA, 21 nt, Human
ugcaacagcaacuugaaacag

SEQ ID NO: 1049227 - RNA, 19 nt, Human
ugcccagccugaccuggcu

SEQ ID NO: 1049228 - RNA, 18 nt, Human
ugcuaccaugcccagccu

SEQ ID NO: 1049229 - RNA, 19 nt, Human
uggcgcgaagccuacgcga

SEQ ID NO: 1049230 - RNA, 23 nt, Human
ugggcaaguagggcuagcaaugu

SEQ ID NO: 1049231 - RNA, 18 nt, Human
uguccagguacaacacug

SEQ ID NO: 1049232 - RNA, 20 nt, Human
ugucuuggacuuggauuucu

SEQ ID NO: 1049233 - RNA, 21 nt, Human
uucauacauuuuaaaacacuu

SEQ ID NO: 1049234 - RNA, 23 nt, Human
aaagaccuacuggccagaagcac

SEQ ID NO: 1049235 - RNA, 19 nt, Human
aacauggugaaaccccguc

SEQ ID NO: 1049236 - RNA, 20 nt, Human
aacauggugaaaccccgucu

SEQ ID NO: 1049237 - RNA, 21 nt, Human
aacauggugaaaccccgucuc

SEQ ID NO: 1049238 - RNA, 20 nt, Human
aaccacagggcccugauccg

SEQ ID NO: 1049239 - RNA, 21 nt, Human
aagaagaugaugcacauggug

SEQ ID NO: 1049240 - RNA, 18 nt, Human
aaucccagcuaaucagga

SEQ ID NO: 1049241 - RNA, 20 nt, Human
aaucuagcaaugagucugca

SEQ ID NO: 1049242 - RNA, 21 nt, Human
aaugcaguauggcaaaggaag

SEQ ID NO: 1049243 - RNA, 24 nt, Human
aauugcuugaacuugggaggcgga

SEQ ID NO: 1049244 - RNA, 20 nt, Human
acagagcaagacuccgucuc

SEQ ID NO: 1049245 - RNA, 24 nt, Human
acagagcaagacuccgucucaaaa

SEQ ID NO: 1049246 - RNA, 24 nt, Human
acagggcgaggaucaaacuuaaag

SEQ ID NO: 1049247 - RNA, 24 nt, Human
accaacauggugaaaccccgucuc

SEQ ID NO: 1049248 - RNA, 24 nt, Human
accccgucucuacuaaaaacacaa

SEQ ID NO: 1049249 - RNA, 19 nt, Human
acccugaacugggcauggg

SEQ ID NO: 1049250 - RNA, 24 nt, Human
acuccugucguuggaccagaacaa

SEQ ID NO: 1049251 - RNA, 24 nt, Human
acugcacuccagccugggugacag

SEQ ID NO: 1049252 - RNA, 26 nt, Human
acugcacuccagccugggugacagag

SEQ ID NO: 1049253 - RNA, 21 nt, Human
agaggcauggucuccagcugg

SEQ ID NO: 1049254 - RNA, 18 nt, Human
agagggagagagcagggc

SEQ ID NO: 1049255 - RNA, 18 nt, Human
agagucgcccuucugccu

SEQ ID NO: 1049256 - RNA, 24 nt, Human
agcacuuugggaggccgaggcagg

SEQ ID NO: 1049257 - RNA, 24 nt, Human
agccugaccaacauggugaaaccc

SEQ ID NO: 1049258 - RNA, 24 nt, Human
agccugggugacagagcaagacuc

SEQ ID NO: 1049259 - RNA, 23 nt, Human
agcugggcaugguggcacacgcc

SEQ ID NO: 1049260 - RNA, 24 nt, Human
aggcagguggaucaccacgucagg

SEQ ID NO: 1049261 - RNA, 21 nt, Human
aggccgaggcagguggaucac

SEQ ID NO: 1049262 - RNA, 24 nt, Human
aggcggagguugcagugagccgag

SEQ ID NO: 1049263 - RNA, 24 nt, Human
aggcgugguggcucacgccuguaa

SEQ ID NO: 1049264 - RNA, 24 nt, Human
aggcuggggcaggagaauugcuug

SEQ ID NO: 1049265 - RNA, 24 nt, Human
agguggaucaccacgucaggaguu

SEQ ID NO: 1049266 - RNA, 20 nt, Human
agguguauccacauguucau

SEQ ID NO: 1049267 - RNA, 24 nt, Human
agguuuccuguccacagugccccu

SEQ ID NO: 1049268 - RNA, 22 nt, Human
aucaccacgucaggaguucaag

SEQ ID NO: 1049269 - RNA, 24 nt, Human
aucgugccacugcacuccagccug

SEQ ID NO: 1049270 - RNA, 23 nt, Human
augguggugcagggcggcucugc

SEQ ID NO: 1049271 - RNA, 20 nt, Human
auuagcugggcaugguggcc

SEQ ID NO: 1049272 - RNA, 23 nt, Human
caaacacagaggaccucuggcac

SEQ ID NO: 1049273 - RNA, 24 nt, Human
caacauggugaaaccccgucucua

SEQ ID NO: 1049274 - RNA, 21 nt, Human
caagacuccgucucaaaaaaa

SEQ ID NO: 1049275 - RNA, 20 nt, Human
caagaguccaagcacgccug

SEQ ID NO: 1049276 - RNA, 28 nt, Human
cacacggagccuccuggcacacacagga

SEQ ID NO: 1049277 - RNA, 24 nt, Human
cacagauggguaacacgcaaacca

SEQ ID NO: 1049278 - RNA, 23 nt, Human
cacaggauugucucaaacacaga

SEQ ID NO: 1049279 - RNA, 18 nt, Human
cacgccuguaaucccagc

SEQ ID NO: 1049280 - RNA, 24 nt, Human
cacgccuguaaucccagcacuuug

SEQ ID NO: 1049281 - RNA, 19 nt, Human
cacgccuguaaucccagcu

SEQ ID NO: 1049282 - RNA, 22 nt, Human
cacuccagccugggugacagag

SEQ ID NO: 1049283 - RNA, 19 nt, Human
cacugcacuccagccuggg

SEQ ID NO: 1049284 - RNA, 21 nt, Human
cacugcacuccagccugggug

SEQ ID NO: 1049285 - RNA, 22 nt, Human
cacugcacuccagccuggguga

SEQ ID NO: 1049286 - RNA, 23 nt, Human
cacugcacuccagccugggugac

SEQ ID NO: 1049287 - RNA, 24 nt, Human
cacugcacuccagccugggugaca

SEQ ID NO: 1049288 - RNA, 24 nt, Human
cacugcacuccagccugggugaca

SEQ ID NO: 1049289 - RNA, 18 nt, Human
cagaacaaagaccuacug

SEQ ID NO: 1049290 - RNA, 26 nt, Human
cagaacaaagaccuacuggccagaag

SEQ ID NO: 1049291 - RNA, 24 nt, Human
cagcacuuugggaggccgaggcag

SEQ ID NO: 1049292 - RNA, 26 nt, Human
cagcacuuugggaggccgaggcaggu

SEQ ID NO: 1049293 - RNA, 24 nt, Human
cagcuaaucaggaggcuggggcag

SEQ ID NO: 1049294 - RNA, 21 nt, Human
caggagcucacauucagguac

SEQ ID NO: 1049295 - RNA, 21 nt, Human
caggaguguaugugugugcca

SEQ ID NO: 1049296 - RNA, 23 nt, Human
cagggcgaggaucaaacuuaaag

SEQ ID NO: 1049297 - RNA, 23 nt, Human
cagggcgcagcagaugcagagcg

SEQ ID NO: 1049298 - RNA, 22 nt, Human
cagguggaucaccacgucagga

SEQ ID NO: 1049299 - RNA, 20 nt, Human
ccaaauguggcugucuccuc

SEQ ID NO: 1049300 - RNA, 20 nt, Human
ccacugcacuccagccuggg

SEQ ID NO: 1049301 - RNA, 20 nt, Human
ccacugcacuccagccuggg

SEQ ID NO: 1049302 - RNA, 21 nt, Human
ccacugcacuccagccugggu

SEQ ID NO: 1049303 - RNA, 21 nt, Human
ccacugcacuccagccugggu

SEQ ID NO: 1049304 - RNA, 24 nt, Human
ccacugcacuccagccugggugac

SEQ ID NO: 1049305 - RNA, 21 nt, Human
ccccucaaggcagggcccccc

SEQ ID NO: 1049306 - RNA, 27 nt, Human
ccccucaaggcagggccccccaggagc

SEQ ID NO: 1049307 - RNA, 23 nt, Human
ccucugcaggagcaggucugcuu

SEQ ID NO: 1049308 - RNA, 18 nt, Human
ccugaacugggcaugggg

SEQ ID NO: 1049309 - RNA, 23 nt, Human
ccugaccaacauggugaaacccc

SEQ ID NO: 1049310 - RNA, 24 nt, Human
ccugaccaacauggugaaaccccg

SEQ ID NO: 1049311 - RNA, 22 nt, Human
ccugggugacagagcaagacuc

SEQ ID NO: 1049312 - RNA, 21 nt, Human
ccuguaaucccagcuaaucag

SEQ ID NO: 1049313 - RNA, 18 nt, Human
ccuguguacaugugcaag

SEQ ID NO: 1049314 - RNA, 24 nt, Human
cgagaucgugccacugcacuccag

SEQ ID NO: 1049315 - RNA, 24 nt, Human
cgaggcagguggaucaccacguca

SEQ ID NO: 1049316 - RNA, 23 nt, Human
cgccuguaaucccagcacuuugg

SEQ ID NO: 1049317 - RNA, 24 nt, Human
cgccuguaaucccagcacuuuggg

SEQ ID NO: 1049318 - RNA, 24 nt, Human
cgccuguaaucccagcuaaucagg

SEQ ID NO: 1049319 - RNA, 24 nt, Human
cggccaggcgugguggcucacgcc

SEQ ID NO: 1049320 - RNA, 25 nt, Human
cgugugugugcaccugugugugugu

SEQ ID NO: 1049321 - RNA, 22 nt, Human
cucaaaaaaaaaaaaaagagag

SEQ ID NO: 1049322 - RNA, 22 nt, Human
cucacgccuguaaucccagcac

SEQ ID NO: 1049323 - RNA, 24 nt, Human
cucacgccuguaaucccagcacuu

SEQ ID NO: 1049324 - RNA, 19 nt, Human
cuccgucucaaaaaaaaaa

SEQ ID NO: 1049325 - RNA, 19 nt, Human
cugccuuguucggcaucgu

SEQ ID NO: 1049326 - RNA, 24 nt, Human
cugcugcuccucacuggcauaaag

SEQ ID NO: 1049327 - RNA, 24 nt, Human
cugugugugugugucugugcaacu

SEQ ID NO: 1049328 - RNA, 19 nt, Human
cuucuguuaugagaguggg

SEQ ID NO: 1049329 - RNA, 19 nt, Human
cuugaacuugggaggcgga

SEQ ID NO: 1049330 - RNA, 24 nt, Human
gacagagcaagacuccgucucaaa

SEQ ID NO: 1049331 - RNA, 23 nt, Human
gagaauugcuugaacuugggagg

SEQ ID NO: 1049332 - RNA, 18 nt, Human
gaggcuggggcaggagaa

SEQ ID NO: 1049333 - RNA, 23 nt, Human
gagguugcagugagccgagaucg

SEQ ID NO: 1049334 - RNA, 22 nt, Human
gaucaccacgucaggaguucaa

SEQ ID NO: 1049335 - RNA, 24 nt, Human
gaucaccacgucaggaguucaaga

SEQ ID NO: 1049336 - RNA, 20 nt, Human
gcacacggagccuccuggca

SEQ ID NO: 1049337 - RNA, 20 nt, Human
gcacauguguagcacaccug

SEQ ID NO: 1049338 - RNA, 24 nt, Human
gcacuccagccugggugacagagc

SEQ ID NO: 1049339 - RNA, 19 nt, Human
gccacugcacuccagccug

SEQ ID NO: 1049340 - RNA, 24 nt, Human
gccacugcacuccagccuggguga

SEQ ID NO: 1049341 - RNA, 20 nt, Human
gccgagaucgugccacugca

SEQ ID NO: 1049342 - RNA, 21 nt, Human
gcugucuccucugcaggagca

SEQ ID NO: 1049343 - RNA, 21 nt, Human
ggaagagggagagagcagggc

SEQ ID NO: 1049344 - RNA, 24 nt, Human
ggaagagggagagagcagggcugg

SEQ ID NO: 1049345 - RNA, 19 nt, Human
ggaagguuuccuguccaca

SEQ ID NO: 1049346 - RNA, 20 nt, Human
ggagguugcagugagccgag

SEQ ID NO: 1049347 - RNA, 22 nt, Human
ggagguugcagugagccgagau

SEQ ID NO: 1049348 - RNA, 24 nt, Human
ggagguugcagugagccgagaucg

SEQ ID NO: 1049349 - RNA, 20 nt, Human
ggcaggagaauugcuugaac

SEQ ID NO: 1049350 - RNA, 20 nt, Human
ggcaugguggcacacgccug

SEQ ID NO: 1049351 - RNA, 23 nt, Human
ggcaugguggcacacgccuguaa

SEQ ID NO: 1049352 - RNA, 21 nt, Human
ggccaggcgugguggcucacg

SEQ ID NO: 1049353 - RNA, 21 nt, Human
ggcucacgccuguaaucccag

SEQ ID NO: 1049354 - RNA, 24 nt, Human
gggcaggagaauugcuugaacuug

SEQ ID NO: 1049355 - RNA, 19 nt, Human
gggcggcucugcugacaca

SEQ ID NO: 1049356 - RNA, 24 nt, Human
ggggcaggagaauugcuugaacuu

SEQ ID NO: 1049357 - RNA, 24 nt, Human
gguggcacacgccuguaaucccag

SEQ ID NO: 1049358 - RNA, 24 nt, Human
gguggcucacgccuguaaucccag

SEQ ID NO: 1049359 - RNA, 20 nt, Human
gucucaaaaaaaaaaaaaag

SEQ ID NO: 1049360 - RNA, 23 nt, Human
guggaucaccacgucaggaguuc

SEQ ID NO: 1049361 - RNA, 23 nt, Human
guggcacacgccuguaaucccag

SEQ ID NO: 1049362 - RNA, 21 nt, Human
gugugugcaccugugugugug

SEQ ID NO: 1049363 - RNA, 19 nt, Human
gugugugccaugugagugc

SEQ ID NO: 1049364 - RNA, 24 nt, Human
guugcagugagccgagaucgugcc

SEQ ID NO: 1049365 - RNA, 18 nt, Human
uaaaggcagacccugaac

SEQ ID NO: 1049366 - RNA, 24 nt, Human
uaagcgggauucugagagccccug

SEQ ID NO: 1049367 - RNA, 22 nt, Human
uagcugggcaugguggcacacg

SEQ ID NO: 1049368 - RNA, 24 nt, Human
ucaaaaaaaaaaaaaagagagagu

SEQ ID NO: 1049369 - RNA, 24 nt, Human
ucaccacgucaggaguucaagacc

SEQ ID NO: 1049370 - RNA, 19 nt, Human
ucagaguuuuauuaucagg

SEQ ID NO: 1049371 - RNA, 19 nt, Human
uccaagcacgccuguguuc

SEQ ID NO: 1049372 - RNA, 24 nt, Human
uccagccugggugacagagcaaga

SEQ ID NO: 1049373 - RNA, 22 nt, Human
uccgucucaaaaaaaaaaaaaa

SEQ ID NO: 1049374 - RNA, 23 nt, Human
uccgucucaaaaaaaaaaaaaag

SEQ ID NO: 1049375 - RNA, 23 nt, Human
ucgugccacugcacuccagccug

SEQ ID NO: 1049376 - RNA, 22 nt, Human
ucgugugugugcaccugugugu

SEQ ID NO: 1049377 - RNA, 19 nt, Human
ucucaaacacagaggaccu

SEQ ID NO: 1049378 - RNA, 23 nt, Human
ucucuacuaaaaacacaaaaauu

SEQ ID NO: 1049379 - RNA, 24 nt, Human
ucugugcaacugugcaugugugca

SEQ ID NO: 1049380 - RNA, 24 nt, Human
ugaccaacauggugaaaccccguc

SEQ ID NO: 1049381 - RNA, 22 nt, Human
ugagauggggcugccagaggca

SEQ ID NO: 1049382 - RNA, 22 nt, Human
ugagccgagaucgugccacugc

SEQ ID NO: 1049383 - RNA, 22 nt, Human
ugagugccuguguacaugugca

SEQ ID NO: 1049384 - RNA, 21 nt, Human
ugaugcacaugguggugcagg

SEQ ID NO: 1049385 - RNA, 21 nt, Human
ugcacacgcaggaguguaugu

SEQ ID NO: 1049386 - RNA, 18 nt, Human
ugcagagcgaggggguua

SEQ ID NO: 1049387 - RNA, 18 nt, Human
ugccuguguacaugugca

SEQ ID NO: 1049388 - RNA, 19 nt, Human
ugccugugucgguguccau

SEQ ID NO: 1049389 - RNA, 22 nt, Human
uggaucaccacgucaggaguuc

SEQ ID NO: 1049390 - RNA, 21 nt, Human
uggcacacgccuguaauccca

SEQ ID NO: 1049391 - RNA, 24 nt, Human
uggcucacgccuguaaucccagca

SEQ ID NO: 1049392 - RNA, 24 nt, Human
ugggaggccgaggcagguggauca

SEQ ID NO: 1049393 - RNA, 29 nt, Human
ugggaggcggagguugcagugacaacggu

SEQ ID NO: 1049394 - RNA, 24 nt, Human
ugggaggcggagguugcagugagc

SEQ ID NO: 1049395 - RNA, 24 nt, Human
uggggcaggagaauugcuugaacu

SEQ ID NO: 1049396 - RNA, 20 nt, Human
uggguaacacgcaaaccaca

SEQ ID NO: 1049397 - RNA, 23 nt, Human
uggugcagggcggcucugggagg

SEQ ID NO: 1049398 - RNA, 24 nt, Human
ugguggcacacgccuguaauccca

SEQ ID NO: 1049399 - RNA, 24 nt, Human
ugguggcucacgccuguaauccca

SEQ ID NO: 1049400 - RNA, 23 nt, Human
uguauauggcuugcaugugugug

SEQ ID NO: 1049401 - RNA, 22 nt, Human
uguaugugugugccaugugagu

SEQ ID NO: 1049402 - RNA, 19 nt, Human
ugugcaacugugcaugugu

SEQ ID NO: 1049403 - RNA, 20 nt, Human
ugugcaagagugggcucagg

SEQ ID NO: 1049404 - RNA, 22 nt, Human
ugugcacacgcaggaguguaug

SEQ ID NO: 1049405 - RNA, 27 nt, Human
ugugcacauguguagcacaccugugca

SEQ ID NO: 1049406 - RNA, 19 nt, Human
ugugcaccugugugugugu

SEQ ID NO: 1049407 - RNA, 20 nt, Human
ugugcacguacaugugccug

SEQ ID NO: 1049408 - RNA, 22 nt, Human
ugugcaugugugcacaugugua

SEQ ID NO: 1049409 - RNA, 23 nt, Human
ugugccaugugagugccugugua

SEQ ID NO: 1049410 - RNA, 23 nt, Human
uguguagcacaccugugcacgua

SEQ ID NO: 1049411 - RNA, 20 nt, Human
ugugugcaccugugugugug

SEQ ID NO: 1049412 - RNA, 20 nt, Human
ugugugcuugugcacacgca

SEQ ID NO: 1049413 - RNA, 20 nt, Human
ugugugugcaccugugugug

SEQ ID NO: 1049414 - RNA, 21 nt, Human
ugugugugcaccugugugugu

SEQ ID NO: 1049415 - RNA, 23 nt, Human
ugugugugugucugugcaacugu

SEQ ID NO: 1049416 - RNA, 18 nt, Human
ugugugugugugucugug

SEQ ID NO: 1049417 - RNA, 24 nt, Human
uuagcugggcaugguggcacacgc

SEQ ID NO: 1049418 - RNA, 24 nt, Human
uugaacuugggaggcggagguugc

SEQ ID NO: 1049419 - RNA, 21 nt, Human
uugcagugagccgagaucgug

SEQ ID NO: 1049420 - RNA, 22 nt, Human
uugcagugagccgagaucgugc

SEQ ID NO: 1049421 - RNA, 24 nt, Human
uugcuugaacuugggaggcggagg

SEQ ID NO: 1049422 - RNA, 25 nt, Human
uugggaggccgaggcagguggauca

SEQ ID NO: 1049423 - RNA, 25 nt, Human
uugugcacacgcaggaguguaugug

SEQ ID NO: 1049424 - RNA, 23 nt, Human
aaaaaaaaaaaaaaauacaaaag

SEQ ID NO: 1049425 - RNA, 25 nt, Human
aaaaaaaaaaaaaauacaaaaguca

SEQ ID NO: 1049426 - RNA, 19 nt, Human
aaaaaccaaagugcccaaa

SEQ ID NO: 1049427 - RNA, 19 nt, Human
aaaccaaacuuaucuggga

SEQ ID NO: 1049428 - RNA, 24 nt, Human
aaauguugaaaaccaaacuuaucu

SEQ ID NO: 1049429 - RNA, 21 nt, Human
aacuguuuccccuaguccccg

SEQ ID NO: 1049430 - RNA, 23 nt, Human
aagcccaacaaaaaaaaagugau

SEQ ID NO: 1049431 - RNA, 22 nt, Human
aagggcuggcgguguggccaga

SEQ ID NO: 1049432 - RNA, 21 nt, Human
aauagcacuuccccugaagcc

SEQ ID NO: 1049433 - RNA, 24 nt, Human
acaaaaaaaaaaaaaaauacaaaa

SEQ ID NO: 1049434 - RNA, 22 nt, Human
acaaaagacaguacaaaaacca

SEQ ID NO: 1049435 - RNA, 26 nt, Human
acaguacaaaaaccaaagugcccaaa

SEQ ID NO: 1049436 - RNA, 25 nt, Human
accuccaacuguuuccccuaguccc

SEQ ID NO: 1049437 - RNA, 22 nt, Human
agacuagccuugucugaaggca

SEQ ID NO: 1049438 - RNA, 20 nt, Human
agagggugguggauaugguc

SEQ ID NO: 1049439 - RNA, 19 nt, Human
agccuugucugaaggcagc

SEQ ID NO: 1049440 - RNA, 19 nt, Human
aggcaugcugugugugggc

SEQ ID NO: 1049441 - RNA, 24 nt, Human
aggcaugcugugugugggcaguga

SEQ ID NO: 1049442 - RNA, 22 nt, Human
agggcugaagucgggggaggug

SEQ ID NO: 1049443 - RNA, 22 nt, Human
caaagagauggcacccaaaggc

SEQ ID NO: 1049444 - RNA, 18 nt, Human
caagggcuggcggugugg

SEQ ID NO: 1049445 - RNA, 24 nt, Human
cacagcccagugccugccuggacc

SEQ ID NO: 1049446 - RNA, 20 nt, Human
cacucuugccccuagacuag

SEQ ID NO: 1049447 - RNA, 21 nt, Human
cacugugccauuuauaacccu

SEQ ID NO: 1049448 - RNA, 21 nt, Human
cagagccacuugccaggcuga

SEQ ID NO: 1049449 - RNA, 23 nt, Human
cagcgaacuugcccaaaacagag

SEQ ID NO: 1049450 - RNA, 18 nt, Human
caggccaccaaggaccuu

SEQ ID NO: 1049451 - RNA, 18 nt, Human
cagggcaggggacaggcc

SEQ ID NO: 1049452 - RNA, 18 nt, Human
caggggaagcugaaggcc

SEQ ID NO: 1049453 - RNA, 19 nt, Human
cagugagcucgagugggca

SEQ ID NO: 1049454 - RNA, 18 nt, Human
cauuccuacagcaaaugc

SEQ ID NO: 1049455 - RNA, 21 nt, Human
ccaaaacagaaaagcucuaaa

SEQ ID NO: 1049456 - RNA, 20 nt, Human
ccaaauagaaggagcagcga

SEQ ID NO: 1049457 - RNA, 21 nt, Human
ccaaauagaaggagcagcgaa

SEQ ID NO: 1049458 - RNA, 27 nt, Human
ccagggcaggggacaggccaccaagga

SEQ ID NO: 1049459 - RNA, 21 nt, Human
cccaaaacagaaaagcucuaa

SEQ ID NO: 1049460 - RNA, 18 nt, Human
cccacaugggagaggaau

SEQ ID NO: 1049461 - RNA, 21 nt, Human
ccccucggucccccugccugc

SEQ ID NO: 1049462 - RNA, 20 nt, Human
ccccugccugcccucugccc

SEQ ID NO: 1049463 - RNA, 25 nt, Human
cccgugcuugagcucggagggguac

SEQ ID NO: 1049464 - RNA, 23 nt, Human
ccuccaacuguuuccccuagucc

SEQ ID NO: 1049465 - RNA, 18 nt, Human
ccugcccucugcccugag

SEQ ID NO: 1049466 - RNA, 18 nt, Human
cucacacagauaaggacc

SEQ ID NO: 1049467 - RNA, 19 nt, Human
cuccuaucugcugccccuc

SEQ ID NO: 1049468 - RNA, 22 nt, Human
cugccuggaccgcaggucuggg

SEQ ID NO: 1049469 - RNA, 20 nt, Human
cugcugccccucgguccccc

SEQ ID NO: 1049470 - RNA, 19 nt, Human
cuugcagugaagccaccau

SEQ ID NO: 1049471 - RNA, 19 nt, Human
gacggcacgaaccuccaac

SEQ ID NO: 1049472 - RNA, 23 nt, Human
gagggugguggauaugguccugu

SEQ ID NO: 1049473 - RNA, 20 nt, Human
gcaaagagauggcacccaaa

SEQ ID NO: 1049474 - RNA, 23 nt, Human
gcaaaugaagguuuacauuucug

SEQ ID NO: 1049475 - RNA, 18 nt, Human
gcacccaaaggcaugcug

SEQ ID NO: 1049476 - RNA, 21 nt, Human
gcgaacuugcccaaaacagaa

SEQ ID NO: 1049477 - RNA, 21 nt, Human
ggcaaagagauggcacccaaa

SEQ ID NO: 1049478 - RNA, 23 nt, Human
ggcagcuucagagccacuugcca

SEQ ID NO: 1049479 - RNA, 18 nt, Human
ggcagguggccacguucu

SEQ ID NO: 1049480 - RNA, 19 nt, Human
gggcagguggccacguucu

SEQ ID NO: 1049481 - RNA, 21 nt, Human
gggcagugagcucgagugggc

SEQ ID NO: 1049482 - RNA, 18 nt, Human
guggccagaggacagggg

SEQ ID NO: 1049483 - RNA, 18 nt, Human
uaaaaaauguucaaucaa

SEQ ID NO: 1049484 - RNA, 22 nt, Human
uaaauaacuuaaauagaagucc

SEQ ID NO: 1049485 - RNA, 19 nt, Human
uaaauguugaaaaccaaac

SEQ ID NO: 1049486 - RNA, 23 nt, Human
uaacccugacaucaccucccaag

SEQ ID NO: 1049487 - RNA, 24 nt, Human
uagccuugucugaaggcagcuuca

SEQ ID NO: 1049488 - RNA, 18 nt, Human
uaggaagggcugaagucg

SEQ ID NO: 1049489 - RNA, 26 nt, Human
uaggaagggcugaagucgggggaggu

SEQ ID NO: 1049490 - RNA, 18 nt, Human
uaguuuguuuguuuuaga

SEQ ID NO: 1049491 - RNA, 19 nt, Human
uauccgggcucagugcucu

SEQ ID NO: 1049492 - RNA, 23 nt, Human
uccauguaagugaagcaucuuga

SEQ ID NO: 1049493 - RNA, 19 nt, Human
ucccagggcaggggacagg

SEQ ID NO: 1049494 - RNA, 23 nt, Human
ucggcaguccugcuccuugcagu

SEQ ID NO: 1049495 - RNA, 21 nt, Human
ugacaucaccucccaaggcuc

SEQ ID NO: 1049496 - RNA, 22 nt, Human
ugacaucaccucccaaggcucu

SEQ ID NO: 1049497 - RNA, 24 nt, Human
ugaccuccauccucugcaaagugg

SEQ ID NO: 1049498 - RNA, 20 nt, Human
ugagggaagggcuucagggc

SEQ ID NO: 1049499 - RNA, 22 nt, Human
ugagggaagggcuucagggcca

SEQ ID NO: 1049500 - RNA, 24 nt, Human
ugagggcaucagguaaauuaaagg

SEQ ID NO: 1049501 - RNA, 22 nt, Human
ugcagaagcccaacaaaaaaaa

SEQ ID NO: 1049502 - RNA, 18 nt, Human
ugcccaaaacagaaaagc

SEQ ID NO: 1049503 - RNA, 25 nt, Human
ugcccugagacaaguuacuaaaugu

SEQ ID NO: 1049504 - RNA, 26 nt, Human
uggcaaaugaagguuuacauuucugu

SEQ ID NO: 1049505 - RNA, 24 nt, Human
ugggcagugagcucgagugggcac

SEQ ID NO: 1049506 - RNA, 22 nt, Human
uggguuuaggaagggcugaagu

SEQ ID NO: 1049507 - RNA, 23 nt, Human
ugguuuuugaccuccauccucug

SEQ ID NO: 1049508 - RNA, 21 nt, Human
ugucugaaggcagcuucagag

SEQ ID NO: 1049509 - RNA, 23 nt, Human
uuagaaguuucuuccauguaagu

SEQ ID NO: 1049510 - RNA, 21 nt, Human
uugagucacucaggacuuggc

SEQ ID NO: 1049511 - RNA, 21 nt, Human
uuuaggaagggcugaagucgg

SEQ ID NO: 1049512 - RNA, 23 nt, Human
uuuggcaaaugaagguuuacauu

SEQ ID NO: 1049513 - RNA, 22 nt, Human
aaaccuccucacuuccaauccc

SEQ ID NO: 1049514 - RNA, 20 nt, Human
auugcacauuugugucuugg

SEQ ID NO: 1049515 - RNA, 19 nt, Human
cccccgagucugcaccgac

SEQ ID NO: 1049516 - RNA, 22 nt, Human
cccccgagucugcaccgaccuc

SEQ ID NO: 1049517 - RNA, 19 nt, Human
cgagucugcaccgaccucu

SEQ ID NO: 1049518 - RNA, 18 nt, Human
cggcggugggacccgggc

SEQ ID NO: 1049519 - RNA, 22 nt, Human
cucacuuccaaucccagcuauc

SEQ ID NO: 1049520 - RNA, 19 nt, Human
cuuccaaucccagcuaucu

SEQ ID NO: 1049521 - RNA, 19 nt, Human
gaaaccuccucacuuccaa

SEQ ID NO: 1049522 - RNA, 21 nt, Human
gacccgggcgaccuuagagac

SEQ ID NO: 1049523 - RNA, 22 nt, Human
gcggcagcggugcugucgcggg

SEQ ID NO: 1049524 - RNA, 24 nt, Human
gcggcagcggugcugucgcgggga

SEQ ID NO: 1049525 - RNA, 18 nt, Human
gucgcggggacaaaugcc

SEQ ID NO: 1049526 - RNA, 23 nt, Human
guggcggcggugggacccgggcg

SEQ ID NO: 1049527 - RNA, 20 nt, Human
uacaaucugguguugugguc

SEQ ID NO: 1049528 - RNA, 22 nt, Human
ucuaaaauaaacuuuuaauugc

SEQ ID NO: 1049529 - RNA, 23 nt, Human
ucuaaaauaaacuuuuaauugca

SEQ ID NO: 1049530 - RNA, 25 nt, Human
ucuaaaauaaacuuuuaauugcaca

SEQ ID NO: 1049531 - RNA, 24 nt, Human
ucuuggguuaucuguggggugaga

SEQ ID NO: 1049532 - RNA, 19 nt, Human
uggcccccgagucugcacc

SEQ ID NO: 1049533 - RNA, 25 nt, Human
uggucuaaaauaaacuuuuaauugc

SEQ ID NO: 1049534 - RNA, 24 nt, Human
ugucgcggggacaaaugccgcagc

SEQ ID NO: 1049535 - RNA, 23 nt, Human
uuaucuguggggugagaaaccuc

SEQ ID NO: 1049536 - RNA, 18 nt, Human
aggagccccgaggaugac

SEQ ID NO: 1049537 - RNA, 19 nt, Human
auuugauuuuuuuuucucc

SEQ ID NO: 1049538 - RNA, 20 nt, Human
auuuuuuuuucucccccucc

SEQ ID NO: 1049539 - RNA, 19 nt, Human
cugguggcugcaggggaag

SEQ ID NO: 1049540 - RNA, 23 nt, Human
ggccgcccggccaggagccccga

SEQ ID NO: 1049541 - RNA, 22 nt, Human
guugguggauuugauuuuuuuu

SEQ ID NO: 1049542 - RNA, 23 nt, Human
uaaggcaaagaaugguuggugga

SEQ ID NO: 1049543 - RNA, 23 nt, Human
ugagaaagcgcuucggaaucuug

SEQ ID NO: 1049544 - RNA, 21 nt, Human
uggaauaaccuuccuaaggca

SEQ ID NO: 1049545 - RNA, 18 nt, Human
uuuuuuuucucccccucc

SEQ ID NO: 1049546 - RNA, 20 nt, Human
accccugauguccuggaggg

SEQ ID NO: 1049547 - RNA, 19 nt, Human
cagcagguucugggaggcc

SEQ ID NO: 1049548 - RNA, 21 nt, Human
cccucccucugauccuccaaa

SEQ ID NO: 1049549 - RNA, 22 nt, Human
cccucccucugauccuccaaaa

SEQ ID NO: 1049550 - RNA, 19 nt, Human
ccuccccucccucugaucc

SEQ ID NO: 1049551 - RNA, 21 nt, Human
cgacagcagccagcuguggcg

SEQ ID NO: 1049552 - RNA, 22 nt, Human
cugccuccccucccucugaucc

SEQ ID NO: 1049553 - RNA, 22 nt, Human
cuuggcugccuccccucccucu

SEQ ID NO: 1049554 - RNA, 19 nt, Human
uacgaccccugauguccug

SEQ ID NO: 1049555 - RNA, 20 nt, Human
uggaggguggaacaaggcuc

SEQ ID NO: 1049556 - RNA, 18 nt, Human
ugggaggccccaaaggug

SEQ ID NO: 1049557 - RNA, 23 nt, Human
ugggguugaggcuacgacccccu

SEQ ID NO: 1049558 - RNA, 24 nt, Human
uguccugcagaccagcagguucug

SEQ ID NO: 1049559 - RNA, 18 nt, Human
aagcccccggugauccag

SEQ ID NO: 1049560 - RNA, 18 nt, Human
aaggagggaggggcacag

SEQ ID NO: 1049561 - RNA, 24 nt, Human
aaggagggaggggcacaggagggc

SEQ ID NO: 1049562 - RNA, 20 nt, Human
acccugaggacauuaauaaa

SEQ ID NO: 1049563 - RNA, 21 nt, Human
agcacacaucuaccuccuggc

SEQ ID NO: 1049564 - RNA, 22 nt, Human
aggcggccccuuccucuccaug

SEQ ID NO: 1049565 - RNA, 20 nt, Human
augcgggagggccugggggc

SEQ ID NO: 1049566 - RNA, 22 nt, Human
cagagggaaacugaggcccaag

SEQ ID NO: 1049567 - RNA, 21 nt, Human
caggagggcuccccgagguuu

SEQ ID NO: 1049568 - RNA, 23 nt, Human
cccccugcccugucaucucugca

SEQ ID NO: 1049569 - RNA, 22 nt, Human
cccucagugccuuugggccugg

SEQ ID NO: 1049570 - RNA, 18 nt, Human
cccuuccucuccaugucc

SEQ ID NO: 1049571 - RNA, 19 nt, Human
ccgagccccagcuccugac

SEQ ID NO: 1049572 - RNA, 20 nt, Human
ccgagccccagcuccugacc

SEQ ID NO: 1049573 - RNA, 21 nt, Human
ccucaggggccgccaccaccc

SEQ ID NO: 1049574 - RNA, 25 nt, Human
ccuccccccacuucacagagggaaa

SEQ ID NO: 1049575 - RNA, 22 nt, Human
ccucucagcccuugcucagccu

SEQ ID NO: 1049576 - RNA, 18 nt, Human
ccugaccucggggugggg

SEQ ID NO: 1049577 - RNA, 23 nt, Human
ccuuguaccucuaucccuccuug

SEQ ID NO: 1049578 - RNA, 21 nt, Human
cucagagggaagaacugaggc

SEQ ID NO: 1049579 - RNA, 23 nt, Human
cucuccauguccccauccccaac

SEQ ID NO: 1049580 - RNA, 20 nt, Human
cugucaucucugcaugugcc

SEQ ID NO: 1049581 - RNA, 21 nt, Human
cuuaccccuaaggccuagaug

SEQ ID NO: 1049582 - RNA, 25 nt, Human
cuugaaggccugccuccccccacuu

SEQ ID NO: 1049583 - RNA, 18 nt, Human
cuuguaccucuaucccuc

SEQ ID NO: 1049584 - RNA, 21 nt, Human
gagaugcgggagggccugggg

SEQ ID NO: 1049585 - RNA, 22 nt, Human
gccccuuccucuccaugucccc

SEQ ID NO: 1049586 - RNA, 21 nt, Human
gccuagauggcagaagggacc

SEQ ID NO: 1049587 - RNA, 20 nt, Human
gccuggucugccucaggggc

SEQ ID NO: 1049588 - RNA, 21 nt, Human
ggaagaacugaggcaagaagc

SEQ ID NO: 1049589 - RNA, 23 nt, Human
ggagggccugggggcucagaggg

SEQ ID NO: 1049590 - RNA, 21 nt, Human
ggucccuggaggcagcuggcc

SEQ ID NO: 1049591 - RNA, 20 nt, Human
uaccccuaaggccuagaugg

SEQ ID NO: 1049592 - RNA, 25 nt, Human
uagauggcagaagggacccugagga

SEQ ID NO: 1049593 - RNA, 18 nt, Human
uccccgagguuuggucgg

SEQ ID NO: 1049594 - RNA, 22 nt, Human
uccuugaaggccugccuccccc

SEQ ID NO: 1049595 - RNA, 24 nt, Human
ucugucacaagcauuugcaggagu

SEQ ID NO: 1049596 - RNA, 21 nt, Human
ugagaccugcuuaccccuaag

SEQ ID NO: 1049597 - RNA, 19 nt, Human
ugagaugcgggagggccug

SEQ ID NO: 1049598 - RNA, 21 nt, Human
ugcccccugcccugucaucuc

SEQ ID NO: 1049599 - RNA, 23 nt, Human
ugccgagccccagcuccugacuc

SEQ ID NO: 1049600 - RNA, 24 nt, Human
uggacaacaaggagggaggggcac

SEQ ID NO: 1049601 - RNA, 23 nt, Human
uggccuggucugccucaggggcc

SEQ ID NO: 1049602 - RNA, 22 nt, Human
uucacagagggaaacugaggcc

SEQ ID NO: 1049603 - RNA, 24 nt, Human
uugcaggaguaggcggccccuucc

SEQ ID NO: 1049604 - RNA, 18 nt, Human
acaccuuccucauggggu

SEQ ID NO: 1049605 - RNA, 21 nt, Human
cagaagugaacugaugcagcg

SEQ ID NO: 1049606 - RNA, 18 nt, Human
cagcggaugcagcagaca

SEQ ID NO: 1049607 - RNA, 23 nt, Human
cggaugcagcagacacauccacg

SEQ ID NO: 1049608 - RNA, 23 nt, Human
uacaccuuccucaugggguuccu

SEQ ID NO: 1049609 - RNA, 19 nt, Human
uccuucagaagugaacuga

SEQ ID NO: 1049610 - RNA, 23 nt, Human
caagacagcacagauggcugggg

SEQ ID NO: 1049611 - RNA, 23 nt, Human
ucugccccuaucaagacagcacc

SEQ ID NO: 1049612 - RNA, 24 nt, Human
uggcuggggcuggaguggggcugu

SEQ ID NO: 1049613 - RNA, 21 nt, Human
aguaguggcuguagccuugac

SEQ ID NO: 1049614 - RNA, 27 nt, Human
gaguggaacaauucaagacuucagagg

SEQ ID NO: 1049615 - RNA, 24 nt, Human
ucaguaguggcuguagccuugacc

SEQ ID NO: 1049616 - RNA, 21 nt, Human
aaauuagccucacugagccag

SEQ ID NO: 1049617 - RNA, 23 nt, Human
aacaacacaaauuuauucccuua

SEQ ID NO: 1049618 - RNA, 19 nt, Human
aagaagcugggagcugugg

SEQ ID NO: 1049619 - RNA, 22 nt, Human
acaccuccaaccuccucucccg

SEQ ID NO: 1049620 - RNA, 22 nt, Human
acaugggcaucuugggaggcca

SEQ ID NO: 1049621 - RNA, 23 nt, Human
accacaacugggcagcaaaacua

SEQ ID NO: 1049622 - RNA, 22 nt, Human
agagaagggucugaggccugga

SEQ ID NO: 1049623 - RNA, 20 nt, Human
agagcaucucugccccacgg

SEQ ID NO: 1049624 - RNA, 20 nt, Human
agaggcacaggaccaacuga

SEQ ID NO: 1049625 - RNA, 20 nt, Human
agcccuccugaacaagcugg

SEQ ID NO: 1049626 - RNA, 19 nt, Human
aggacggaacacagagaag

SEQ ID NO: 1049627 - RNA, 19 nt, Human
aggccauggggcaagugag

SEQ ID NO: 1049628 - RNA, 22 nt, Human
aggccauggggcaagugagguc

SEQ ID NO: 1049629 - RNA, 19 nt, Human
agggcuggggccuuccagg

SEQ ID NO: 1049630 - RNA, 21 nt, Human
agguggccuggacucuguggc

SEQ ID NO: 1049631 - RNA, 19 nt, Human
caacaagcccauggccagg

SEQ ID NO: 1049632 - RNA, 21 nt, Human
cacaacugggcagcaaaacua

SEQ ID NO: 1049633 - RNA, 20 nt, Human
caccuccaaccuccucuccc

SEQ ID NO: 1049634 - RNA, 20 nt, Human
caucgcuacaccuccaaccu

SEQ ID NO: 1049635 - RNA, 20 nt, Human
cauuacaucugcaaagcccc

SEQ ID NO: 1049636 - RNA, 26 nt, Human
ccacagggugcccgccuaagcccaca

SEQ ID NO: 1049637 - RNA, 18 nt, Human
ccagacaagugcagcucc

SEQ ID NO: 1049638 - RNA, 21 nt, Human
cccgccuaagcccacaccugc

SEQ ID NO: 1049639 - RNA, 18 nt, Human
ccucguucccgaccgacc

SEQ ID NO: 1049640 - RNA, 22 nt, Human
ccucucccgucaccugcucuuc

SEQ ID NO: 1049641 - RNA, 21 nt, Human
ccuggacucuguggcuugagc

SEQ ID NO: 1049642 - RNA, 19 nt, Human
ccugggauuaggacauggg

SEQ ID NO: 1049643 - RNA, 22 nt, Human
ccuuaacuucauuacaucugca

SEQ ID NO: 1049644 - RNA, 19 nt, Human
cgagaacuggaagaagcug

SEQ ID NO: 1049645 - RNA, 18 nt, Human
cgccaugaaggccauggg

SEQ ID NO: 1049646 - RNA, 18 nt, Human
cuaagcccacaccugcug

SEQ ID NO: 1049647 - RNA, 21 nt, Human
cuaagcccacaccugcugacu

SEQ ID NO: 1049648 - RNA, 21 nt, Human
cucaccaacccuccccuucca

SEQ ID NO: 1049649 - RNA, 24 nt, Human
cucaccaacccuccccuuccaacc

SEQ ID NO: 1049650 - RNA, 20 nt, Human
cucacugcaguaucuccuug

SEQ ID NO: 1049651 - RNA, 21 nt, Human
cucacugcaguaucuccuuga

SEQ ID NO: 1049652 - RNA, 18 nt, Human
cuccgcgcgggccuggcc

SEQ ID NO: 1049653 - RNA, 22 nt, Human
cuggagcgcgccaugaaggcca

SEQ ID NO: 1049654 - RNA, 22 nt, Human
cugggacucaccaacccucccc

SEQ ID NO: 1049655 - RNA, 25 nt, Human
cuguggcugggaguggcucugaggc

SEQ ID NO: 1049656 - RNA, 22 nt, Human
gacggaacacagagaagggucu

SEQ ID NO: 1049657 - RNA, 19 nt, Human
gagaugcuggaaacugugg

SEQ ID NO: 1049658 - RNA, 19 nt, Human
gaggaugcauuuccuggcu

SEQ ID NO: 1049659 - RNA, 20 nt, Human
gaggaugcauuuccuggcuc

SEQ ID NO: 1049660 - RNA, 19 nt, Human
gcaguggggcagggugggg

SEQ ID NO: 1049661 - RNA, 19 nt, Human
gccaugaaggccauggggc

SEQ ID NO: 1049662 - RNA, 21 nt, Human
gcccauggccaggacggaaca

SEQ ID NO: 1049663 - RNA, 18 nt, Human
gcuggugagaggcacagg

SEQ ID NO: 1049664 - RNA, 25 nt, Human
ggauaaucuuccuggcgaaagaucc

SEQ ID NO: 1049665 - RNA, 24 nt, Human
ggccuggagcgcgccaugaaggcc

SEQ ID NO: 1049666 - RNA, 19 nt, Human
gggcaguggcaggaaggca

SEQ ID NO: 1049667 - RNA, 20 nt, Human
guggcuugagcugcccuccu

SEQ ID NO: 1049668 - RNA, 21 nt, Human
ucacgcaguaccccuggccac

SEQ ID NO: 1049669 - RNA, 22 nt, Human
ucacgcaguaccccuggccaca

SEQ ID NO: 1049670 - RNA, 20 nt, Human
ucacugagccaguccaggug

SEQ ID NO: 1049671 - RNA, 21 nt, Human
ucacugagccaguccaggugg

SEQ ID NO: 1049672 - RNA, 23 nt, Human
ucacugagccaguccagguggga

SEQ ID NO: 1049673 - RNA, 19 nt, Human
uccaaccagagaaacucac

SEQ ID NO: 1049674 - RNA, 23 nt, Human
uccaaccagagaaacucacugca

SEQ ID NO: 1049675 - RNA, 19 nt, Human
uccagggcucugugggagg

SEQ ID NO: 1049676 - RNA, 22 nt, Human
uccaucgcuacaccuccaaccu

SEQ ID NO: 1049677 - RNA, 23 nt, Human
uccgcgcgggccuggccgccuga

SEQ ID NO: 1049678 - RNA, 26 nt, Human
uccuugaaagucuggugacgugucug

SEQ ID NO: 1049679 - RNA, 25 nt, Human
ucugccccacggcaugugcggguga

SEQ ID NO: 1049680 - RNA, 23 nt, Human
ucuguggcuugagcugcccuccu

SEQ ID NO: 1049681 - RNA, 20 nt, Human
ugaggccuggagcgcgccau

SEQ ID NO: 1049682 - RNA, 19 nt, Human
ugagguggccuggacucug

SEQ ID NO: 1049683 - RNA, 18 nt, Human
ugcuggaaacuguggcug

SEQ ID NO: 1049684 - RNA, 19 nt, Human
ugcuggugagaggcacagg

SEQ ID NO: 1049685 - RNA, 19 nt, Human
uggaagaagcugggagcug

SEQ ID NO: 1049686 - RNA, 24 nt, Human
uggcucugagguggccuggacucu

SEQ ID NO: 1049687 - RNA, 20 nt, Human
uggcuugagcugcccuccuc

SEQ ID NO: 1049688 - RNA, 22 nt, Human
uggcuugagcugcccuccucaa

SEQ ID NO: 1049689 - RNA, 19 nt, Human
ugggaggaaaaggguugga

SEQ ID NO: 1049690 - RNA, 24 nt, Human
ugggaggaugcauuuccuggcucu

SEQ ID NO: 1049691 - RNA, 20 nt, Human
ugggaguggcucugaggccc

SEQ ID NO: 1049692 - RNA, 19 nt, Human
ugggcaucuugggaggcca

SEQ ID NO: 1049693 - RNA, 20 nt, Human
uggggcaguggcaggaaggc

SEQ ID NO: 1049694 - RNA, 21 nt, Human
uguggucccuguccacagaga

SEQ ID NO: 1049695 - RNA, 18 nt, Human
uuccuggcgaaagauccu

SEQ ID NO: 1049696 - RNA, 21 nt, Human
uuccuggcucugagguggccu

SEQ ID NO: 1049697 - RNA, 24 nt, Human
uuuccugcuccaucgcuacaccuc

SEQ ID NO: 1049698 - RNA, 18 nt, Human
uuuuuuuuuuuuuuuuug

SEQ ID NO: 1049699 - RNA, 18 nt, Human
acccccccuccccccucc

SEQ ID NO: 1049700 - RNA, 21 nt, Human
cccccccuccccccucccgga

SEQ ID NO: 1049701 - RNA, 22 nt, Human
cccccccuccccccucccggac

SEQ ID NO: 1049702 - RNA, 25 nt, Human
aaaaauccauagauccacacuccca

SEQ ID NO: 1049703 - RNA, 23 nt, Human
agauccacacucccaacaaggcg

SEQ ID NO: 1049704 - RNA, 26 nt, Human
caacacgaaaaauccauagauccaca

SEQ ID NO: 1049705 - RNA, 30 nt, Human
caacacgaaaaauccauagauccacacucc

SEQ ID NO: 1049706 - RNA, 18 nt, Human
cauagauccacacucccu

SEQ ID NO: 1049707 - RNA, 18 nt, Human
ccauggcagcagccacgg

SEQ ID NO: 1049708 - RNA, 19 nt, Human
ugccucccugcugcagccc

SEQ ID NO: 1049709 - RNA, 20 nt, Human
ugccucccugcugcagcccc

SEQ ID NO: 1049710 - RNA, 20 nt, Human
uugccucccugcugcagccc

SEQ ID NO: 1049711 - RNA, 19 nt, Human
agccgugcuccugggguug

SEQ ID NO: 1049712 - RNA, 18 nt, Human
aguugugauaacaugacc

SEQ ID NO: 1049713 - RNA, 19 nt, Human
cagcccagggcggcaggug

SEQ ID NO: 1049714 - RNA, 19 nt, Human
cagcccagggcggcaggug

SEQ ID NO: 1049715 - RNA, 19 nt, Human
cagcccagggcggcaggug

SEQ ID NO: 1049716 - RNA, 19 nt, Human
cagcccagggcggcaggug

SEQ ID NO: 1049717 - RNA, 19 nt, Human
cuccugggguugggcguuu

SEQ ID NO: 1049718 - RNA, 22 nt, Human
gcauugggguggucccagccag

SEQ ID NO: 1049719 - RNA, 22 nt, Human
gcauugggguggucccagccag

SEQ ID NO: 1049720 - RNA, 20 nt, Human
ucccagccagcccagggcgg

SEQ ID NO: 1049721 - RNA, 20 nt, Human
ucccagccagcccagggcgg

SEQ ID NO: 1049722 - RNA, 20 nt, Human
ucccagccagcccagggcgg

SEQ ID NO: 1049723 - RNA, 23 nt, Human
ugaggaguugugauaacaugacc

SEQ ID NO: 1049724 - RNA, 20 nt, Human
uggucccagcccagggcggc

SEQ ID NO: 1049725 - RNA, 23 nt, Human
aaagaucucgagguccacgagga

SEQ ID NO: 1049726 - RNA, 21 nt, Human
aagaaaagcaggaacuaccaa

SEQ ID NO: 1049727 - RNA, 24 nt, Human
aagaagaaaagcaggaacuaccaa

SEQ ID NO: 1049728 - RNA, 22 nt, Human
aagauaagcuuaaaaaucaaga

SEQ ID NO: 1049729 - RNA, 23 nt, Human
aagcaggaacuaccaacaggaga

SEQ ID NO: 1049730 - RNA, 18 nt, Human
aaggacaugccagugaca

SEQ ID NO: 1049731 - RNA, 19 nt, Human
aaguagcggcuuccuggag

SEQ ID NO: 1049732 - RNA, 24 nt, Human
aaucacuuguaugaaagcauucga

SEQ ID NO: 1049733 - RNA, 22 nt, Human
agacaggagggaggucacaggg

SEQ ID NO: 1049734 - RNA, 23 nt, Human
agacaggagggaggucacagggc

SEQ ID NO: 1049735 - RNA, 20 nt, Human
agcagcuucuucucaagggg

SEQ ID NO: 1049736 - RNA, 20 nt, Human
aggagcugcaagacaggagg

SEQ ID NO: 1049737 - RNA, 21 nt, Human
aggaggguggcggcgggaagc

SEQ ID NO: 1049738 - RNA, 18 nt, Human
agggccuggggagucacu

SEQ ID NO: 1049739 - RNA, 20 nt, Human
agggguccuccccgaggccu

SEQ ID NO: 1049740 - RNA, 21 nt, Human
agguccacgaggaauuuccaa

SEQ ID NO: 1049741 - RNA, 19 nt, Human
auggcagcgaggagggugg

SEQ ID NO: 1049742 - RNA, 22 nt, Human
caaaguagcggcuuccuggagc

SEQ ID NO: 1049743 - RNA, 21 nt, Human
caagacaggagggaggucaca

SEQ ID NO: 1049744 - RNA, 21 nt, Human
caagagaaauggacacaaagu

SEQ ID NO: 1049745 - RNA, 27 nt, Human
caauuuacauugccagggugaaauuca

SEQ ID NO: 1049746 - RNA, 21 nt, Human
cagcccagagaauggcagcga

SEQ ID NO: 1049747 - RNA, 20 nt, Human
cagcgaggaggguggcggcg

SEQ ID NO: 1049748 - RNA, 20 nt, Human
caggaugauguccugaggaa

SEQ ID NO: 1049749 - RNA, 25 nt, Human
cagggugaaauucaacagaacuauu

SEQ ID NO: 1049750 - RNA, 23 nt, Human
cauacaaaacauucaaaagaaaa

SEQ ID NO: 1049751 - RNA, 18 nt, Human
cauggagcggggcuucuc

SEQ ID NO: 1049752 - RNA, 23 nt, Human
ccacugagcuugucgggccccug

SEQ ID NO: 1049753 - RNA, 19 nt, Human
ccccagaccuagaaacuag

SEQ ID NO: 1049754 - RNA, 18 nt, Human
ccucgcccauccucuuuc

SEQ ID NO: 1049755 - RNA, 23 nt, Human
ccucgcccauccucuuuccacuc

SEQ ID NO: 1049756 - RNA, 21 nt, Human
ccugggccugcacugacauca

SEQ ID NO: 1049757 - RNA, 24 nt, Human
ccuugggugguccguguggccgcc

SEQ ID NO: 1049758 - RNA, 21 nt, Human
cucaggaugauguccugagga

SEQ ID NO: 1049759 - RNA, 28 nt, Human
cugggguugggugggggaugcugagggg

SEQ ID NO: 1049760 - RNA, 23 nt, Human
gaaaauucuucauuuagagugac

SEQ ID NO: 1049761 - RNA, 21 nt, Human
gagcaaagcugagggguccuc

SEQ ID NO: 1049762 - RNA, 21 nt, Human
gagcagaggacugauggugag

SEQ ID NO: 1049763 - RNA, 19 nt, Human
gagcagcuucuucucaagg

SEQ ID NO: 1049764 - RNA, 20 nt, Human
gagcagcuucuucucaaggg

SEQ ID NO: 1049765 - RNA, 20 nt, Human
gaggaauuuccaagaagaaa

SEQ ID NO: 1049766 - RNA, 24 nt, Human
gaggauaugugcccaagguggucg

SEQ ID NO: 1049767 - RNA, 18 nt, Human
gaugcugaggggggugcc

SEQ ID NO: 1049768 - RNA, 18 nt, Human
ggaggguggcggcgggaa

SEQ ID NO: 1049769 - RNA, 23 nt, Human
ggggguggugggcagcucgcagg

SEQ ID NO: 1049770 - RNA, 22 nt, Human
ggguccuccccgaggccugccc

SEQ ID NO: 1049771 - RNA, 23 nt, Human
ggguggugggcagcucgcagguc

SEQ ID NO: 1049772 - RNA, 21 nt, Human
gguaaagaucucgagguccac

SEQ ID NO: 1049773 - RNA, 22 nt, Human
ggucacagggccuggggaguca

SEQ ID NO: 1049774 - RNA, 22 nt, Human
ggugguaaguuuccucaagaga

SEQ ID NO: 1049775 - RNA, 18 nt, Human
gguugggugggggaugcu

SEQ ID NO: 1049776 - RNA, 22 nt, Human
uagccuuacugauuagagugau

SEQ ID NO: 1049777 - RNA, 18 nt, Human
uagcggcuuccuggagcu

SEQ ID NO: 1049778 - RNA, 19 nt, Human
uaguguccagguaagcccg

SEQ ID NO: 1049779 - RNA, 22 nt, Human
uauuuuacauacaaaacauuca

SEQ ID NO: 1049780 - RNA, 20 nt, Human
ucaaaagaaaauucuucauu

SEQ ID NO: 1049781 - RNA, 20 nt, Human
ucacagggccuggggaguca

SEQ ID NO: 1049782 - RNA, 18 nt, Human
uccaagaagaaaagcagg

SEQ ID NO: 1049783 - RNA, 25 nt, Human
uccaagaagaaaagcaggaacuacc

SEQ ID NO: 1049784 - RNA, 19 nt, Human
uccaucaccuuagugucca

SEQ ID NO: 1049785 - RNA, 23 nt, Human
uccccgaggccugcccagcagac

SEQ ID NO: 1049786 - RNA, 23 nt, Human
uccguguggccgccaccuuccgg

SEQ ID NO: 1049787 - RNA, 24 nt, Human
ucgcccauccucuuuccacucaua

SEQ ID NO: 1049788 - RNA, 18 nt, Human
ucuggcucagugaaucug

SEQ ID NO: 1049789 - RNA, 18 nt, Human
ugagaggcagguagagga

SEQ ID NO: 1049790 - RNA, 18 nt, Human
ugaggauaugugcccaag

SEQ ID NO: 1049791 - RNA, 19 nt, Human
ugccuaguaacaauuacua

SEQ ID NO: 1049792 - RNA, 19 nt, Human
ugccuuagucuggcucagu

SEQ ID NO: 1049793 - RNA, 18 nt, Human
uggcagcgaggagggugg

SEQ ID NO: 1049794 - RNA, 20 nt, Human
uggcggcgggaagcagaggc

SEQ ID NO: 1049795 - RNA, 19 nt, Human
ugggggaugcugagggggg

SEQ ID NO: 1049796 - RNA, 24 nt, Human
uggggguggugggcagcucgcagg

SEQ ID NO: 1049797 - RNA, 25 nt, Human
ugggguugggugggggaugcugagg

SEQ ID NO: 1049798 - RNA, 24 nt, Human
ugggugggggaugcugaggggggu

SEQ ID NO: 1049799 - RNA, 24 nt, Human
ugguaaguuuccucaagagaaaug

SEQ ID NO: 1049800 - RNA, 22 nt, Human
uguaucugggggcgggccuggg

SEQ ID NO: 1049801 - RNA, 20 nt, Human
ugucucaggugagcagagga

SEQ ID NO: 1049802 - RNA, 18 nt, Human
uuacuaggcuggccccag

SEQ ID NO: 1049803 - RNA, 19 nt, Human
uucacauaaacaauagggc

SEQ ID NO: 1049804 - RNA, 21 nt, Human
uuccagcccagagaauggcag

SEQ ID NO: 1049805 - RNA, 24 nt, Human
uuccggagucugggguuggguggg

SEQ ID NO: 1049806 - RNA, 20 nt, Human
uuuaaaaauagccacuugcu

SEQ ID NO: 1049807 - RNA, 22 nt, Human
uuuugccaagguuaaggacaug

SEQ ID NO: 1049808 - RNA, 21 nt, Human
aaguccugucucccuguccgg

SEQ ID NO: 1049809 - RNA, 19 nt, Human
accacccuggguugagccc

SEQ ID NO: 1049810 - RNA, 18 nt, Human
caggagccccaggggagg

SEQ ID NO: 1049811 - RNA, 19 nt, Human
ccacaccuccccuugaagc

SEQ ID NO: 1049812 - RNA, 18 nt, Human
ccggaagcgguggccuuc

SEQ ID NO: 1049813 - RNA, 19 nt, Human
ccuugcugagacggccuuu

SEQ ID NO: 1049814 - RNA, 20 nt, Human
cucccuguccuugcugagac

SEQ ID NO: 1049815 - RNA, 25 nt, Human
gacacacgugugucgguguugugga

SEQ ID NO: 1049816 - RNA, 20 nt, Human
gacuccugaaguccugucuc

SEQ ID NO: 1049817 - RNA, 20 nt, Human
gcagggccacaccuccccuu

SEQ ID NO: 1049818 - RNA, 22 nt, Human
ggcaucaggagccccaggggag

SEQ ID NO: 1049819 - RNA, 18 nt, Human
ggccuuuuggccccuugg

SEQ ID NO: 1049820 - RNA, 20 nt, Human
gugugucgguguuguggaag

SEQ ID NO: 1049821 - RNA, 19 nt, Human
uacuggggguugggggcag

SEQ ID NO: 1049822 - RNA, 22 nt, Human
ucucccuguccggaagcggugg

SEQ ID NO: 1049823 - RNA, 18 nt, Human
ugagacggccuuuuggcc

SEQ ID NO: 1049824 - RNA, 18 nt, Human
ugagggcacagguaccuu

SEQ ID NO: 1049825 - RNA, 21 nt, Human
uggaaggucaggacuugggca

SEQ ID NO: 1049826 - RNA, 23 nt, Human
uggccccuuggcaucaggagccc

SEQ ID NO: 1049827 - RNA, 19 nt, Human
ugggaugaggaugggguca

SEQ ID NO: 1049828 - RNA, 23 nt, Human
ugggaugaggauggggucagcug

SEQ ID NO: 1049829 - RNA, 19 nt, Human
uugaagcagacacacgugu

SEQ ID NO: 1049830 - RNA, 21 nt, Human
uugaagcagacacacgugugu

SEQ ID NO: 1049831 - RNA, 19 nt, Human
cuucaaaggacaccaaccc

SEQ ID NO: 1049832 - RNA, 27 nt, Human
aaaaacagcauaaggaaaccgguaccc

SEQ ID NO: 1049833 - RNA, 27 nt, Human
aagagcugaagauaaugauacuaaacc

SEQ ID NO: 1049834 - RNA, 20 nt, Human
agagagagagaaauaugaac

SEQ ID NO: 1049835 - RNA, 19 nt, Human
agccagcauggacgugguc

SEQ ID NO: 1049836 - RNA, 22 nt, Human
aggagcaggucuggaaagaaca

SEQ ID NO: 1049837 - RNA, 22 nt, Human
auauaucuauuccauagauacc

SEQ ID NO: 1049838 - RNA, 23 nt, Human
auuuacugccgacaucaacuucu

SEQ ID NO: 1049839 - RNA, 22 nt, Human
caacaauacuuuagcuuccuga

SEQ ID NO: 1049840 - RNA, 23 nt, Human
gacguggucucagcccugcggcu

SEQ ID NO: 1049841 - RNA, 21 nt, Human
gugcagcaggagcaggucugg

SEQ ID NO: 1049842 - RNA, 21 nt, Human
uggagggcucccucucccuca

SEQ ID NO: 1049843 - RNA, 24 nt, Human
uuuggagggcucccucucccucag

SEQ ID NO: 1049844 - RNA, 19 nt, Human
aaaacuguacaccugcccc

SEQ ID NO: 1049845 - RNA, 21 nt, Human
aaaacuguacaccugccccca

SEQ ID NO: 1049846 - RNA, 22 nt, Human
aauggccauucuucaaguccga

SEQ ID NO: 1049847 - RNA, 23 nt, Human
acuauguuacaaaacuguacacc

SEQ ID NO: 1049848 - RNA, 22 nt, Human
aggcggcuccgaggcccggaac

SEQ ID NO: 1049849 - RNA, 18 nt, Human
agguucuuagccuggugc

SEQ ID NO: 1049850 - RNA, 21 nt, Human
auguggaguacaggaauggcc

SEQ ID NO: 1049851 - RNA, 24 nt, Human
cagguucuuagccuggugcuucca

SEQ ID NO: 1049852 - RNA, 27 nt, Human
cauacaacucauuuauaauuuauuuuc

SEQ ID NO: 1049853 - RNA, 18 nt, Human
ccaacaaggcuagaccag

SEQ ID NO: 1049854 - RNA, 18 nt, Human
ccccaaaguuggauaacc

SEQ ID NO: 1049855 - RNA, 22 nt, Human
ccucaaggcggcuccgaggccc

SEQ ID NO: 1049856 - RNA, 22 nt, Human
gaaagagaagaaucaacacugg

SEQ ID NO: 1049857 - RNA, 24 nt, Human
gggcccaacaaggcuagaccagaa

SEQ ID NO: 1049858 - RNA, 21 nt, Human
guggaguacaggaauggccag

SEQ ID NO: 1049859 - RNA, 21 nt, Human
uuucacacaacucacuauguu

SEQ ID NO: 1049860 - RNA, 18 nt, Human
uuuucacacaacucacua

SEQ ID NO: 1049861 - RNA, 20 nt, Human
aaaaguacuaaaauacccac

SEQ ID NO: 1049862 - RNA, 20 nt, Human
aaaggaagugaggggcagag

SEQ ID NO: 1049863 - RNA, 22 nt, Human
aaaguacuaaaauacccacgug

SEQ ID NO: 1049864 - RNA, 25 nt, Human
aaccccaguggucuggcuuuggcac

SEQ ID NO: 1049865 - RNA, 31 nt, Human
accuccaccagacuucuauccccucugcugg

SEQ ID NO: 1049866 - RNA, 28 nt, Human
accugaagggcuggcugggugagugagg

SEQ ID NO: 1049867 - RNA, 21 nt, Human
acgaaauaaauggaaagaaga

SEQ ID NO: 1049868 - RNA, 18 nt, Human
agauggggaagugggggc

SEQ ID NO: 1049869 - RNA, 19 nt, Human
agauggggaagugggggcg

SEQ ID NO: 1049870 - RNA, 20 nt, Human
agccaggguggugguggugu

SEQ ID NO: 1049871 - RNA, 19 nt, Human
auggcacaggugggcaugg

SEQ ID NO: 1049872 - RNA, 20 nt, Human
cccacuccaccuccaccaga

SEQ ID NO: 1049873 - RNA, 25 nt, Human
cccccaacucuccagaacaggcuac

SEQ ID NO: 1049874 - RNA, 21 nt, Human
ccccgccgccgccgcacccug

SEQ ID NO: 1049875 - RNA, 25 nt, Human
cccucugcuguucccagcccccaau

SEQ ID NO: 1049876 - RNA, 18 nt, Human
ccgcacccugcucggccc

SEQ ID NO: 1049877 - RNA, 18 nt, Human
ccgcacccugcucggccc

SEQ ID NO: 1049878 - RNA, 20 nt, Human
ccucugcuguucccagcccc

SEQ ID NO: 1049879 - RNA, 19 nt, Human
cgccccgccgccgccgcac

SEQ ID NO: 1049880 - RNA, 19 nt, Human
cuauccccucugcuguucc

SEQ ID NO: 1049881 - RNA, 23 nt, Human
cuccaccagacuucuauccccuc

SEQ ID NO: 1049882 - RNA, 21 nt, Human
cugcuguucccagcccccaau

SEQ ID NO: 1049883 - RNA, 23 nt, Human
cuguggcagcuggcagggcccac

SEQ ID NO: 1049884 - RNA, 20 nt, Human
gaaagaagauaugggguggg

SEQ ID NO: 1049885 - RNA, 18 nt, Human
gaacaggcuacaaacaug

SEQ ID NO: 1049886 - RNA, 22 nt, Human
gaacaggcuacaaacaugcaaa

SEQ ID NO: 1049887 - RNA, 23 nt, Human
gaacaggcuacaaacaugcaaau

SEQ ID NO: 1049888 - RNA, 21 nt, Human
gcaggaaaccccaguggucug

SEQ ID NO: 1049889 - RNA, 22 nt, Human
gccacaaccaucagcuguccug

SEQ ID NO: 1049890 - RNA, 24 nt, Human
gccacuucuccagaagugaggaag

SEQ ID NO: 1049891 - RNA, 20 nt, Human
gcuggcagggcccacuccuc

SEQ ID NO: 1049892 - RNA, 18 nt, Human
ggaagcaggucaugcagc

SEQ ID NO: 1049893 - RNA, 19 nt, Human
ggacaagagguagaugggg

SEQ ID NO: 1049894 - RNA, 20 nt, Human
ggacaagagguagaugggga

SEQ ID NO: 1049895 - RNA, 19 nt, Human
ggcggaccagcuaccuuga

SEQ ID NO: 1049896 - RNA, 18 nt, Human
gggugcuguggaggccgg

SEQ ID NO: 1049897 - RNA, 18 nt, Human
ggguggggugcuguggag

SEQ ID NO: 1049898 - RNA, 21 nt, Human
gggugguggugguguuggggg

SEQ ID NO: 1049899 - RNA, 24 nt, Human
gguguuggggggaggacaagaggu

SEQ ID NO: 1049900 - RNA, 20 nt, Human
guggggugcuguggaggccg

SEQ ID NO: 1049901 - RNA, 18 nt, Human
uaaaggaagugaggggca

SEQ ID NO: 1049902 - RNA, 24 nt, Human
uaugggguggggugcuguggaggc

SEQ ID NO: 1049903 - RNA, 22 nt, Human
ucaugcagcuguggcagcuggc

SEQ ID NO: 1049904 - RNA, 22 nt, Human
uccagaagugaggaagcccaga

SEQ ID NO: 1049905 - RNA, 23 nt, Human
uggaaagaagauauggggugggg

SEQ ID NO: 1049906 - RNA, 19 nt, Human
uggcagggcccacuccucc

SEQ ID NO: 1049907 - RNA, 19 nt, Human
uggccacuucuccagaagu

SEQ ID NO: 1049908 - RNA, 22 nt, Human
uggcugggugagugaggacagg

SEQ ID NO: 1049909 - RNA, 21 nt, Human
ugggauggccacuucuccaga

SEQ ID NO: 1049910 - RNA, 18 nt, Human
uggggaagugggggcgga

SEQ ID NO: 1049911 - RNA, 20 nt, Human
ugggguggggugcuguggag

SEQ ID NO: 1049912 - RNA, 23 nt, Human
uucccagcccccaauuccugcag

SEQ ID NO: 1049913 - RNA, 22 nt, Human
uuccugcagcaggaaaccccag

SEQ ID NO: 1049914 - RNA, 18 nt, Human
uuucugccacaaccauca

SEQ ID NO: 1049915 - RNA, 22 nt, Human
acagcggagacgggcaaccaga

SEQ ID NO: 1049916 - RNA, 19 nt, Human
aggcagggucugcaggcgc

SEQ ID NO: 1049917 - RNA, 23 nt, Human
ccuccaugguccccacuugaccc

SEQ ID NO: 1049918 - RNA, 22 nt, Human
cuccuccaugguccccacuuga

SEQ ID NO: 1049919 - RNA, 23 nt, Human
ugaggaaacacauuuugaaacca

SEQ ID NO: 1049920 - RNA, 22 nt, Human
uggguuggggagcggucagggu

SEQ ID NO: 1049921 - RNA, 20 nt, Human
uugcugggcuuguacagcag

SEQ ID NO: 1049922 - RNA, 25 nt, Human
uuggggagcggucaggguugcuggg

SEQ ID NO: 1049923 - RNA, 18 nt, Human
aaaaagcacaaaauccua

SEQ ID NO: 1049924 - RNA, 20 nt, Human
aagcaucuuuuaaagugcga

SEQ ID NO: 1049925 - RNA, 21 nt, Human
accacaauuucaguuauuuaa

SEQ ID NO: 1049926 - RNA, 22 nt, Human
cacuguuacaaaaagcacaaaa

SEQ ID NO: 1049927 - RNA, 26 nt, Human
cagcagcacucuugcuaacuucuggu

SEQ ID NO: 1049928 - RNA, 25 nt, Human
cgaaggaaccagcagcacuggagac

SEQ ID NO: 1049929 - RNA, 22 nt, Human
cuaaaagaaguaugagauagcu

SEQ ID NO: 1049930 - RNA, 19 nt, Human
gcuacaaauagguuguauc

SEQ ID NO: 1049931 - RNA, 19 nt, Human
gguuuuagguguagcaacu

SEQ ID NO: 1049932 - RNA, 18 nt, Human
uaaaaccaguaccuuccc

SEQ ID NO: 1049933 - RNA, 20 nt, Human
uagcaaccuccuucuuuggu

SEQ ID NO: 1049934 - RNA, 24 nt, Human
uagcaaccuccuucuuugguguuu

SEQ ID NO: 1049935 - RNA, 24 nt, Human
ucccacggguaacggcgugcuacc

SEQ ID NO: 1049936 - RNA, 18 nt, Human
ucuaaaagaaguaugaga

SEQ ID NO: 1049937 - RNA, 21 nt, Human
ugaagcaugcacuguuacaaa

SEQ ID NO: 1049938 - RNA, 19 nt, Human
ugagauagcuauccauacu

SEQ ID NO: 1049939 - RNA, 21 nt, Human
uuaaugaaaaaggcuucuuuc

SEQ ID NO: 1049940 - RNA, 18 nt, Human
uuuacaauaaucaaugcu

SEQ ID NO: 1049941 - RNA, 24 nt, Human
ccgcuccucgcucgccggggccga

SEQ ID NO: 1049942 - RNA, 21 nt, Human
cagcaguaguuuaaugaccga

SEQ ID NO: 1049943 - RNA, 20 nt, Human
ggaaagaggaaccagcagua

SEQ ID NO: 1049944 - RNA, 24 nt, Human
uucugguuuggccuaguagaaggc

SEQ ID NO: 1049945 - RNA, 19 nt, Human
aagagggugagcggauguu

SEQ ID NO: 1049946 - RNA, 22 nt, Human
acgcggguccagagggccuggc

SEQ ID NO: 1049947 - RNA, 24 nt, Human
agagggugagcggauguuggccag

SEQ ID NO: 1049948 - RNA, 21 nt, Human
aggcagccacccucugcgaag

SEQ ID NO: 1049949 - RNA, 23 nt, Human
agggugagcggauguuggccagg

SEQ ID NO: 1049950 - RNA, 23 nt, Human
aucucagccucuuccugcuucag

SEQ ID NO: 1049951 - RNA, 21 nt, Human
augaaccaggccaaggaaugg

SEQ ID NO: 1049952 - RNA, 23 nt, Human
cagccagccacacagucuuccca

SEQ ID NO: 1049953 - RNA, 21 nt, Human
caggaagcuggggaugaacca

SEQ ID NO: 1049954 - RNA, 23 nt, Human
caggagcucuugggggagcccca

SEQ ID NO: 1049955 - RNA, 23 nt, Human
caggauggcauccaggagcagcu

SEQ ID NO: 1049956 - RNA, 18 nt, Human
ccacacagucuucccagg

SEQ ID NO: 1049957 - RNA, 18 nt, Human
cccccagggaugcccagg

SEQ ID NO: 1049958 - RNA, 20 nt, Human
gaagcuggggaugaaccagg

SEQ ID NO: 1049959 - RNA, 19 nt, Human
gcucccaggagcucuuggg

SEQ ID NO: 1049960 - RNA, 20 nt, Human
ggcccagggccaggcagcca

SEQ ID NO: 1049961 - RNA, 19 nt, Human
ucagggagcagaacuuugc

SEQ ID NO: 1049962 - RNA, 19 nt, Human
ugaugggugggcuguggau

SEQ ID NO: 1049963 - RNA, 19 nt, Human
ugcccaggaucccacucac

SEQ ID NO: 1049964 - RNA, 20 nt, Human
uggcauagguacugcuguuu

SEQ ID NO: 1049965 - RNA, 19 nt, Human
uggccaggauggcauccag

SEQ ID NO: 1049966 - RNA, 18 nt, Human
uggcccagggccaggcag

SEQ ID NO: 1049967 - RNA, 21 nt, Human
ugggggagccccaauuccccc

SEQ ID NO: 1049968 - RNA, 23 nt, Human
uggugcucccaggagcucuuggg

SEQ ID NO: 1049969 - RNA, 24 nt, Human
uuggcauuaaucucagccucuucc

SEQ ID NO: 1049970 - RNA, 22 nt, Human
uaccuuugucagagcuguccuc

SEQ ID NO: 1049971 - RNA, 19 nt, Human
ugcauaccuuugucagagc

SEQ ID NO: 1049972 - RNA, 18 nt, Human
aaagugccauuugaaugg

SEQ ID NO: 1049973 - RNA, 18 nt, Human
aaauacuucccaagucac

SEQ ID NO: 1049974 - RNA, 18 nt, Human
aagaaauaucccauugag

SEQ ID NO: 1049975 - RNA, 19 nt, Human
aagauccauagcacuuuuc

SEQ ID NO: 1049976 - RNA, 24 nt, Human
aauaaauugugaaaaaaaugacaa

SEQ ID NO: 1049977 - RNA, 22 nt, Human
aauacaagaaauaucccauuga

SEQ ID NO: 1049978 - RNA, 22 nt, Human
accauaaggccucugcugaggc

SEQ ID NO: 1049979 - RNA, 23 nt, Human
acucauuuugagcucuuccucaa

SEQ ID NO: 1049980 - RNA, 20 nt, Human
agaaaagaaaaaguguaaag

SEQ ID NO: 1049981 - RNA, 23 nt, Human
aggaaaagaaagauuuguucugu

SEQ ID NO: 1049982 - RNA, 21 nt, Human
aggaaauuacagagaaguuau

SEQ ID NO: 1049983 - RNA, 24 nt, Human
aggaauaaaguccacugaucugcu

SEQ ID NO: 1049984 - RNA, 20 nt, Human
aguauuuuauuuuuuccagc

SEQ ID NO: 1049985 - RNA, 24 nt, Human
aguuuacuguugcaaugguggcau

SEQ ID NO: 1049986 - RNA, 20 nt, Human
auaauacugugccuucaguu

SEQ ID NO: 1049987 - RNA, 18 nt, Human
aucaucccgcugggauuc

SEQ ID NO: 1049988 - RNA, 19 nt, Human
auuuuauuuuuuccagcau

SEQ ID NO: 1049989 - RNA, 18 nt, Human
caaggguaauagaucaag

SEQ ID NO: 1049990 - RNA, 21 nt, Human
caagguuuaacauccuuucca

SEQ ID NO: 1049991 - RNA, 22 nt, Human
caaguaacucugagauucuaga

SEQ ID NO: 1049992 - RNA, 23 nt, Human
cacacccaugauguuuuacagga

SEQ ID NO: 1049993 - RNA, 24 nt, Human
cagcagcaguauaaaaaucacacc

SEQ ID NO: 1049994 - RNA, 19 nt, Human
caucaaguuccucaaaagg

SEQ ID NO: 1049995 - RNA, 22 nt, Human
cauccugggauaguauuuaaua

SEQ ID NO: 1049996 - RNA, 23 nt, Human
ccaccgugaguuguucugacugc

SEQ ID NO: 1049997 - RNA, 25 nt, Human
ccaccgugaguuguucugacugcac

SEQ ID NO: 1049998 - RNA, 19 nt, Human
ccccuaauuuucucaaauc

SEQ ID NO: 1049999 - RNA, 23 nt, Human
ccucaagacaaauacuucccaag

SEQ ID NO: 1050000 - RNA, 23 nt, Human
ccuuccuucuuuucaucuuuucu

SEQ ID NO: 1050001 - RNA, 26 nt, Human
cucaaaaggguauccaaauucauaaa

SEQ ID NO: 1050002 - RNA, 22 nt, Human
cucaagacaaauacuucccaag

SEQ ID NO: 1050003 - RNA, 21 nt, Human
cugaggcuugguuuuggagca

SEQ ID NO: 1050004 - RNA, 18 nt, Human
cuucagcuucacucggcc

SEQ ID NO: 1050005 - RNA, 24 nt, Human
cuuccuuccuucuuuucaucuuuu

SEQ ID NO: 1050006 - RNA, 24 nt, Human
gaaaaugaaaauguuacacuuucu

SEQ ID NO: 1050007 - RNA, 19 nt, Human
gagcaggcugcacaggacu

SEQ ID NO: 1050008 - RNA, 20 nt, Human
gaucugcuuugguuuuugca

SEQ ID NO: 1050009 - RNA, 24 nt, Human
gccaagguuuaacauccuuuccaa

SEQ ID NO: 1050010 - RNA, 19 nt, Human
ggacugccagcagcugcuc

SEQ ID NO: 1050011 - RNA, 19 nt, Human
gucuucagcuucacucggc

SEQ ID NO: 1050012 - RNA, 18 nt, Human
uaaaagagaaaaugaaaa

SEQ ID NO: 1050013 - RNA, 22 nt, Human
uaaguguggacugucaguggcc

SEQ ID NO: 1050014 - RNA, 24 nt, Human
uacaagaaauaucccauugagaua

SEQ ID NO: 1050015 - RNA, 22 nt, Human
uaccaaguaacucugagauucu

SEQ ID NO: 1050016 - RNA, 23 nt, Human
uaccauaaggccucugcugaggc

SEQ ID NO: 1050017 - RNA, 26 nt, Human
uaccauaaggccucugcugaggcuug

SEQ ID NO: 1050018 - RNA, 22 nt, Human
uagcagagauucacuuuuaaau

SEQ ID NO: 1050019 - RNA, 24 nt, Human
uaguauuuaauagugucugaaaug

SEQ ID NO: 1050020 - RNA, 20 nt, Human
uauaaaaaucacacccauga

SEQ ID NO: 1050021 - RNA, 24 nt, Human
uaucaggagagaugauugaacuuc

SEQ ID NO: 1050022 - RNA, 18 nt, Human
uaucuuuaaaauguagag

SEQ ID NO: 1050023 - RNA, 20 nt, Human
uaugauaauuuaauauaggu

SEQ ID NO: 1050024 - RNA, 21 nt, Human
uauuuugguuugcaccucagg

SEQ ID NO: 1050025 - RNA, 21 nt, Human
ucacaaggaguauauguacuu

SEQ ID NO: 1050026 - RNA, 21 nt, Human
ucacacccaugauguuuuaca

SEQ ID NO: 1050027 - RNA, 24 nt, Human
ucagauaugagacugcuacauaau

SEQ ID NO: 1050028 - RNA, 21 nt, Human
ucuaacaucuucuagcagaga

SEQ ID NO: 1050029 - RNA, 24 nt, Human
ucuaacaucuucuagcagagauuc

SEQ ID NO: 1050030 - RNA, 23 nt, Human
ucuccagguacaaggguguuuuc

SEQ ID NO: 1050031 - RNA, 22 nt, Human
ucucucagugccuaagugugga

SEQ ID NO: 1050032 - RNA, 24 nt, Human
ucugcuucaaacuguuucacucuc

SEQ ID NO: 1050033 - RNA, 20 nt, Human
ucugucagucuguuucuuca

SEQ ID NO: 1050034 - RNA, 24 nt, Human
ugccaagguuuaacauccuuucca

SEQ ID NO: 1050035 - RNA, 22 nt, Human
ugcccuugacuucgagacauuu

SEQ ID NO: 1050036 - RNA, 20 nt, Human
ugcugaggcuugguuuugga

SEQ ID NO: 1050037 - RNA, 20 nt, Human
uggagcaggcugcacaggac

SEQ ID NO: 1050038 - RNA, 19 nt, Human
uggaguucuaacaucuucu

SEQ ID NO: 1050039 - RNA, 20 nt, Human
uguucuguguaaucucuugc

SEQ ID NO: 1050040 - RNA, 21 nt, Human
uguuucaucucuucauuccag

SEQ ID NO: 1050041 - RNA, 23 nt, Human
uuagagaagacuuguuucucuug

SEQ ID NO: 1050042 - RNA, 22 nt, Human
uucaggggauagcaggguuguc

SEQ ID NO: 1050043 - RNA, 20 nt, Human
uuccccccuuuaccauaagg

SEQ ID NO: 1050044 - RNA, 21 nt, Human
uucugcaauauuuuuacacau

SEQ ID NO: 1050045 - RNA, 23 nt, Human
uuggagcaggcugcacaggacug

SEQ ID NO: 1050046 - RNA, 23 nt, Human
uuggcucugcuucaaacuguuuc

SEQ ID NO: 1050047 - RNA, 23 nt, Human
uugugaaaaaaaugacaaggugu

SEQ ID NO: 1050048 - RNA, 18 nt, Human
uuguucuguguaaucucu

SEQ ID NO: 1050049 - RNA, 20 nt, Human
uuuacaggaaaacagaacaa

SEQ ID NO: 1050050 - RNA, 21 nt, Human
uuuacaucaaguuccucaaaa

SEQ ID NO: 1050051 - RNA, 23 nt, Human
uuuauagacacauucuaugauaa

SEQ ID NO: 1050052 - RNA, 21 nt, Human
uuucucuuguaugcccuugac

SEQ ID NO: 1050053 - RNA, 20 nt, Human
uuuuccaucaucccgcuggg

SEQ ID NO: 1050054 - RNA, 21 nt, Human
uuuugcucuuugaauggcuuc

SEQ ID NO: 1050055 - RNA, 24 nt, Human
uuuugcucuuugaauggcuuccuu

SEQ ID NO: 1050056 - RNA, 27 nt, Human
aaaaacacuggaaaagaaccgguaccc

SEQ ID NO: 1050057 - RNA, 18 nt, Human
aaacacugcagcacauuc

SEQ ID NO: 1050058 - RNA, 22 nt, Human
aagaugcacaaggcuccaacug

SEQ ID NO: 1050059 - RNA, 20 nt, Human
aauccuggugaacuaauucg

SEQ ID NO: 1050060 - RNA, 18 nt, Human
accgggaggugcugcccg

SEQ ID NO: 1050061 - RNA, 21 nt, Human
accgggaggugcugcccggcc

SEQ ID NO: 1050062 - RNA, 19 nt, Human
agaauucuuuauguuucuc

SEQ ID NO: 1050063 - RNA, 18 nt, Human
agcaacaugaaucuuuac

SEQ ID NO: 1050064 - RNA, 23 nt, Human
agccuuaggaugaugccaauguu

SEQ ID NO: 1050065 - RNA, 22 nt, Human
agcugcccucuggaccaacugg

SEQ ID NO: 1050066 - RNA, 18 nt, Human
agggggugggguguggag

SEQ ID NO: 1050067 - RNA, 20 nt, Human
caaaaucuuuaauuuauauc

SEQ ID NO: 1050068 - RNA, 23 nt, Human
caacaugaaucuuuacuucuuuc

SEQ ID NO: 1050069 - RNA, 20 nt, Human
caauagauuucauguauugu

SEQ ID NO: 1050070 - RNA, 21 nt, Human
cacacaaacaccccuucguac

SEQ ID NO: 1050071 - RNA, 25 nt, Human
caccccuucguacuuacauaaucug

SEQ ID NO: 1050072 - RNA, 19 nt, Human
cagccgggguaccgggagg

SEQ ID NO: 1050073 - RNA, 19 nt, Human
ccucuuugaagaauucugg

SEQ ID NO: 1050074 - RNA, 18 nt, Human
cuccaacugcuacuggca

SEQ ID NO: 1050075 - RNA, 19 nt, Human
cucuucagcugcccucugg

SEQ ID NO: 1050076 - RNA, 20 nt, Human
cugcucccgagaaacgcccu

SEQ ID NO: 1050077 - RNA, 18 nt, Human
gaaaagaacuguuccucu

SEQ ID NO: 1050078 - RNA, 21 nt, Human
gaaucauuggaucagaaacac

SEQ ID NO: 1050079 - RNA, 20 nt, Human
gggggugggguguggaggcg

SEQ ID NO: 1050080 - RNA, 23 nt, Human
uaauucgaaaaacacuggaaaag

SEQ ID NO: 1050081 - RNA, 21 nt, Human
uagccagccuuaggaugaugc

SEQ ID NO: 1050082 - RNA, 20 nt, Human
ucagaaacacugcagcacau

SEQ ID NO: 1050083 - RNA, 18 nt, Human
ucagcugcccucuggacc

SEQ ID NO: 1050084 - RNA, 21 nt, Human
ucaucccaugaccacgagggu

SEQ ID NO: 1050085 - RNA, 27 nt, Human
ucccgagaaacgcccuccagccggggu

SEQ ID NO: 1050086 - RNA, 20 nt, Human
ucuccaagugaccguaagua

SEQ ID NO: 1050087 - RNA, 25 nt, Human
ucuccaagugaccguaaguaguauu

SEQ ID NO: 1050088 - RNA, 25 nt, Human
ucuguggguagaggugcugcaugaa

SEQ ID NO: 1050089 - RNA, 21 nt, Human
ugcacaaggcuccaacugcua

SEQ ID NO: 1050090 - RNA, 23 nt, Human
ugcaugaacugcucccgagaaac

SEQ ID NO: 1050091 - RNA, 22 nt, Human
ugcugcccggccaugguugcuc

SEQ ID NO: 1050092 - RNA, 21 nt, Human
uggguagaggugcugcaugaa

SEQ ID NO: 1050093 - RNA, 21 nt, Human
uuacuucuuucuucccuccaa

SEQ ID NO: 1050094 - RNA, 23 nt, Human
uucgaaaaacacuggaaaagaag

SEQ ID NO: 1050095 - RNA, 18 nt, Human
uucucuguggguagaggu

SEQ ID NO: 1050096 - RNA, 21 nt, Human
uucuggaaacuuaauaucucc

SEQ ID NO: 1050097 - RNA, 25 nt, Human
uuguacauggccccaaaucaauccc

SEQ ID NO: 1050098 - RNA, 22 nt, Human
uugugguugaaaaggggguggg

SEQ ID NO: 1050099 - RNA, 21 nt, Human
uuuacuucuuucuucccucca

SEQ ID NO: 1050100 - RNA, 18 nt, Human
aacauucuuuuacaaaug

SEQ ID NO: 1050101 - RNA, 19 nt, Human
agaauuuaguaauucuggg

SEQ ID NO: 1050102 - RNA, 19 nt, Human
augguacuguguguugguu

SEQ ID NO: 1050103 - RNA, 20 nt, Human
auugcucugcccuccucugg

SEQ ID NO: 1050104 - RNA, 28 nt, Human
ccucgcaacagcacuugccuuuaggcuu

SEQ ID NO: 1050105 - RNA, 24 nt, Human
cuccaugagucaccccagauccau

SEQ ID NO: 1050106 - RNA, 20 nt, Human
guggauugcucugcccuccu

SEQ ID NO: 1050107 - RNA, 20 nt, Human
uaaaugcaauauacccucua

SEQ ID NO: 1050108 - RNA, 23 nt, Human
uacaaauguaaaugcaauauacc

SEQ ID NO: 1050109 - RNA, 23 nt, Human
ugccuuuaggcuugguugcgcuu

SEQ ID NO: 1050110 - RNA, 20 nt, Human
ugguuccuggaugucgaccu

SEQ ID NO: 1050111 - RNA, 21 nt, Human
uguccauucuggccaccacuc

SEQ ID NO: 1050112 - RNA, 21 nt, Human
uuccuccaugagucaccccag

SEQ ID NO: 1050113 - RNA, 24 nt, Human
uucuguggauugcucugcccuccu

SEQ ID NO: 1050114 - RNA, 23 nt, Human
uuuaaaagauacauggggaaaca

SEQ ID NO: 1050115 - RNA, 22 nt, Human
aaacaaaaaauuuaacauaguc

SEQ ID NO: 1050116 - RNA, 22 nt, Human
aaacaaaagaaaaaccaugaaa

SEQ ID NO: 1050117 - RNA, 23 nt, Human
aaacaaaugugcaaaagguaacc

SEQ ID NO: 1050118 - RNA, 19 nt, Human
aaaccacaaaacaaaagaa

SEQ ID NO: 1050119 - RNA, 21 nt, Human
aaaccacaaaacaaaagaaaa

SEQ ID NO: 1050120 - RNA, 22 nt, Human
aaauauaauacacauaagcaua

SEQ ID NO: 1050121 - RNA, 23 nt, Human
aagcgaaaaucaagauuaugguc

SEQ ID NO: 1050122 - RNA, 19 nt, Human
acaaaacaaaagaaaaacc

SEQ ID NO: 1050123 - RNA, 19 nt, Human
acaaaagaaaaaccaugaa

SEQ ID NO: 1050124 - RNA, 24 nt, Human
acaaugacagaaauaaguggacgc

SEQ ID NO: 1050125 - RNA, 21 nt, Human
accacaaaacaaaagaaaaac

SEQ ID NO: 1050126 - RNA, 25 nt, Human
acuuuaagagguguuucaccaagag

SEQ ID NO: 1050127 - RNA, 21 nt, Human
acuuuugcaccaacuucauaa

SEQ ID NO: 1050128 - RNA, 25 nt, Human
caaaacaaaagaaaaaccaugaaaa

SEQ ID NO: 1050129 - RNA, 18 nt, Human
caagacagaacagucaac

SEQ ID NO: 1050130 - RNA, 26 nt, Human
cacaaaacaaaagaaaaaccaugaaa

SEQ ID NO: 1050131 - RNA, 20 nt, Human
cccccccuuccauucaucac

SEQ ID NO: 1050132 - RNA, 23 nt, Human
cccccccuuccauucaucacucc

SEQ ID NO: 1050133 - RNA, 22 nt, Human
ccccccuuccauucaucacucc

SEQ ID NO: 1050134 - RNA, 18 nt, Human
cccccuaacaacaaaagc

SEQ ID NO: 1050135 - RNA, 27 nt, Human
cuucucuuugcugucacugagagagau

SEQ ID NO: 1050136 - RNA, 24 nt, Human
gcaaaagguaacccagacuuaaag

SEQ ID NO: 1050137 - RNA, 26 nt, Human
gcgaaaaucaagauuauggucaaaug

SEQ ID NO: 1050138 - RNA, 19 nt, Human
gcuccaugauggagacaga

SEQ ID NO: 1050139 - RNA, 28 nt, Human
uaaaaaagcccccuaacaacaaaagccc

SEQ ID NO: 1050140 - RNA, 19 nt, Human
uaaaauaaacacguacagc

SEQ ID NO: 1050141 - RNA, 18 nt, Human
uaaaggccucuuccuagu

SEQ ID NO: 1050142 - RNA, 24 nt, Human
uaagagguguuucaccaagaguac

SEQ ID NO: 1050143 - RNA, 19 nt, Human
uaggaauauauaugcggca

SEQ ID NO: 1050144 - RNA, 23 nt, Human
uaugcagaacagccauauguaac

SEQ ID NO: 1050145 - RNA, 24 nt, Human
ucaagaaaguaagaagcugaggau

SEQ ID NO: 1050146 - RNA, 22 nt, Human
uccaaaaagucauguugaauac

SEQ ID NO: 1050147 - RNA, 22 nt, Human
uccaugauggagacagagaggc

SEQ ID NO: 1050148 - RNA, 18 nt, Human
uccgcgccgccaccagca

SEQ ID NO: 1050149 - RNA, 24 nt, Human
ucuaaaccacaaaacaaaagaaaa

SEQ ID NO: 1050150 - RNA, 21 nt, Human
ucuggcaagggacuaagaggg

SEQ ID NO: 1050151 - RNA, 24 nt, Human
ugaaaauauuaccuuuucuccaug

SEQ ID NO: 1050152 - RNA, 25 nt, Human
ugacagaaauaaguggacgcucaaa

SEQ ID NO: 1050153 - RNA, 18 nt, Human
ugagagagauaaauggcu

SEQ ID NO: 1050154 - RNA, 19 nt, Human
ugcaccaacuucauaaaaa

SEQ ID NO: 1050155 - RNA, 23 nt, Human
uggagacagagaggcccccccuu

SEQ ID NO: 1050156 - RNA, 18 nt, Human
ugggaagccacuggcucu

SEQ ID NO: 1050157 - RNA, 18 nt, Human
uguagaggacgacggccg

SEQ ID NO: 1050158 - RNA, 23 nt, Human
uuacuuuugcaccaacuucauaa

SEQ ID NO: 1050159 - RNA, 21 nt, Human
cacuguguaaguuuguaaggc

SEQ ID NO: 1050160 - RNA, 21 nt, Human
ccugaaacaccucucuccacu

SEQ ID NO: 1050161 - RNA, 23 nt, Human
ccugaaacaccucucuccacuga

SEQ ID NO: 1050162 - RNA, 21 nt, Human
cuccugaaacaccucucucca

SEQ ID NO: 1050163 - RNA, 21 nt, Human
gcaggucaaaauucuuccuuu

SEQ ID NO: 1050164 - RNA, 21 nt, Human
ucuucaguucaucaauuuuuc

SEQ ID NO: 1050165 - RNA, 22 nt, Human
ugaaacaccucucuccacugag

SEQ ID NO: 1050166 - RNA, 20 nt, Human
uggaauucccaaagcacugu

SEQ ID NO: 1050167 - RNA, 19 nt, Human
uuacaggugcccuuggcua

SEQ ID NO: 1050168 - RNA, 22 nt, Human
aacccaggaugaaguugagcgg

SEQ ID NO: 1050169 - RNA, 19 nt, Human
auucuggaaguucuccucc

SEQ ID NO: 1050170 - RNA, 21 nt, Human
cuccgccucaacccaggauga

SEQ ID NO: 1050171 - RNA, 23 nt, Human
cuggaaguucuccuccgccucaa

SEQ ID NO: 1050172 - RNA, 23 nt, Human
uuaaaguagacauaauacaaauu

SEQ ID NO: 1050173 - RNA, 21 nt, Human
accaaauuaaaaaccccccuc

SEQ ID NO: 1050174 - RNA, 23 nt, Human
acugaguugcugaaaccccccca

SEQ ID NO: 1050175 - RNA, 18 nt, Human
agccccacccucuccccu

SEQ ID NO: 1050176 - RNA, 21 nt, Human
aggcaggcggggcaggcgggg

SEQ ID NO: 1050177 - RNA, 22 nt, Human
aggcaggcggggcaggcggggc

SEQ ID NO: 1050178 - RNA, 18 nt, Human
agggcccagaaaaaaggg

SEQ ID NO: 1050179 - RNA, 23 nt, Human
agggcccagaaaaaaggggggcc

SEQ ID NO: 1050180 - RNA, 24 nt, Human
agggcccagaaaaaaggggggcca

SEQ ID NO: 1050181 - RNA, 23 nt, Human
auucugcugcccaggcuucccag

SEQ ID NO: 1050182 - RNA, 21 nt, Human
caacagguccuaaagccagug

SEQ ID NO: 1050183 - RNA, 21 nt, Human
cacccucuccccugcaguuug

SEQ ID NO: 1050184 - RNA, 20 nt, Human
cagaaugagacuccaguauc

SEQ ID NO: 1050185 - RNA, 22 nt, Human
cagcucugaaucguguuggaac

SEQ ID NO: 1050186 - RNA, 18 nt, Human
caggcaggcggggcaggc

SEQ ID NO: 1050187 - RNA, 19 nt, Human
caguaucaaucaucugcca

SEQ ID NO: 1050188 - RNA, 24 nt, Human
cauucugcugcccaggcuucccag

SEQ ID NO: 1050189 - RNA, 24 nt, Human
ccaggccucagccuuccuuccagc

SEQ ID NO: 1050190 - RNA, 19 nt, Human
ccaguaucaaucaucugcc

SEQ ID NO: 1050191 - RNA, 23 nt, Human
cccagaggcgcccuacacaccag

SEQ ID NO: 1050192 - RNA, 21 nt, Human
cccaggaggacuggggccugc

SEQ ID NO: 1050193 - RNA, 19 nt, Human
ccccacccucuccccugca

SEQ ID NO: 1050194 - RNA, 22 nt, Human
ccucccaggaggacuggggccu

SEQ ID NO: 1050195 - RNA, 22 nt, Human
cugaaacccccccauuuccugg

SEQ ID NO: 1050196 - RNA, 18 nt, Human
cugaccaggccucagccu

SEQ ID NO: 1050197 - RNA, 21 nt, Human
cugcccaggcuucccagaggc

SEQ ID NO: 1050198 - RNA, 22 nt, Human
gaaacccccccauuuccugggc

SEQ ID NO: 1050199 - RNA, 23 nt, Human
gccucagccuuccuuccagcccc

SEQ ID NO: 1050200 - RNA, 23 nt, Human
gccugcucugcuggggucacugc

SEQ ID NO: 1050201 - RNA, 21 nt, Human
ggaacugacaggaaaguucca

SEQ ID NO: 1050202 - RNA, 20 nt, Human
ggagggcaguagggcccaga

SEQ ID NO: 1050203 - RNA, 21 nt, Human
ggcaguagggcccagaaaaaa

SEQ ID NO: 1050204 - RNA, 20 nt, Human
gggcaggcggggcaggcggc

SEQ ID NO: 1050205 - RNA, 21 nt, Human
gggcaggcggggcaggcggcu

SEQ ID NO: 1050206 - RNA, 19 nt, Human
ggggcaggcggcuggugga

SEQ ID NO: 1050207 - RNA, 20 nt, Human
ggggccagccucccaggagg

SEQ ID NO: 1050208 - RNA, 23 nt, Human
uaaaaauaaaaacaaaccccuga

SEQ ID NO: 1050209 - RNA, 19 nt, Human
uaaaaauaaaaacaaaccu

SEQ ID NO: 1050210 - RNA, 21 nt, Human
uagcucagaguucccgccuug

SEQ ID NO: 1050211 - RNA, 22 nt, Human
uagcucagaguucccgccuuga

SEQ ID NO: 1050212 - RNA, 20 nt, Human
ucagcagcgaggggugaagc

SEQ ID NO: 1050213 - RNA, 22 nt, Human
ucccagaggcgcccuacacacc

SEQ ID NO: 1050214 - RNA, 23 nt, Human
uccgugucaacagguccuaaagc

SEQ ID NO: 1050215 - RNA, 19 nt, Human
uccugggcagaggagggca

SEQ ID NO: 1050216 - RNA, 19 nt, Human
ucugugacacugaguugcu

SEQ ID NO: 1050217 - RNA, 21 nt, Human
ugacaggaaaguuccaggugu

SEQ ID NO: 1050218 - RNA, 19 nt, Human
ugacaucggcucagcagcg

SEQ ID NO: 1050219 - RNA, 20 nt, Human
ugacaucggcucagcagcga

SEQ ID NO: 1050220 - RNA, 19 nt, Human
ugccaggcagccagcucug

SEQ ID NO: 1050221 - RNA, 19 nt, Human
ugcccugggugcaaggggc

SEQ ID NO: 1050222 - RNA, 21 nt, Human
uggaacugacaggaaaguucc

SEQ ID NO: 1050223 - RNA, 23 nt, Human
ugggcagaggagggcaguagggc

SEQ ID NO: 1050224 - RNA, 24 nt, Human
ugggcagaggagggcaguagggcc

SEQ ID NO: 1050225 - RNA, 18 nt, Human
uuccagccccacccucuc

SEQ ID NO: 1050226 - RNA, 21 nt, Human
uuccagccccacccucucccc

SEQ ID NO: 1050227 - RNA, 21 nt, Human
uuccugggcagaggagggcag

SEQ ID NO: 1050228 - RNA, 23 nt, Human
uuggaacugacaggaaaguucca

SEQ ID NO: 1050229 - RNA, 18 nt, Human
aagccugcccgcacccag

SEQ ID NO: 1050230 - RNA, 20 nt, Human
aagccugcccgcacccaggc

SEQ ID NO: 1050231 - RNA, 23 nt, Human
accuccuccgcuugcuccccccg

SEQ ID NO: 1050232 - RNA, 20 nt, Human
acuggcaccuccuccgcuug

SEQ ID NO: 1050233 - RNA, 24 nt, Human
agcccggucagugucuuggagccc

SEQ ID NO: 1050234 - RNA, 22 nt, Human
aggccccucggagacccugccc

SEQ ID NO: 1050235 - RNA, 18 nt, Human
aggcucagaacaggucag

SEQ ID NO: 1050236 - RNA, 18 nt, Human
aggggcacaccccgcagg

SEQ ID NO: 1050237 - RNA, 18 nt, Human
agguacccggcgcagagc

SEQ ID NO: 1050238 - RNA, 18 nt, Human
agugcucggacgccucuc

SEQ ID NO: 1050239 - RNA, 21 nt, Human
caccggcguccacagcugcac

SEQ ID NO: 1050240 - RNA, 18 nt, Human
cacgaugcggccgugggc

SEQ ID NO: 1050241 - RNA, 23 nt, Human
cagagcauggugcuggggcgcag

SEQ ID NO: 1050242 - RNA, 19 nt, Human
cagcugcaccagggccagg

SEQ ID NO: 1050243 - RNA, 22 nt, Human
cagcugggcucgcggcuggagg

SEQ ID NO: 1050244 - RNA, 30 nt, Human
caggaaggacaggggcacaccccgcaggcu

SEQ ID NO: 1050245 - RNA, 18 nt, Human
caggcgguuccggcaggg

SEQ ID NO: 1050246 - RNA, 20 nt, Human
cagggucccucgggcucccc

SEQ ID NO: 1050247 - RNA, 21 nt, Human
cauccagggucccucgggcuc

SEQ ID NO: 1050248 - RNA, 20 nt, Human
ccaagccugcccgcacccag

SEQ ID NO: 1050249 - RNA, 21 nt, Human
ccagaagcucccugcagcugg

SEQ ID NO: 1050250 - RNA, 21 nt, Human
ccagaagcucccugcagcugg

SEQ ID NO: 1050251 - RNA, 18 nt, Human
ccagcccgggccccugcc

SEQ ID NO: 1050252 - RNA, 21 nt, Human
ccaggcccaccaggccgcuga

SEQ ID NO: 1050253 - RNA, 19 nt, Human
cccaagccugcccgcaccc

SEQ ID NO: 1050254 - RNA, 19 nt, Human
ccccaagccugcccgcacc

SEQ ID NO: 1050255 - RNA, 21 nt, Human
ccccagggcucuucggcaggu

SEQ ID NO: 1050256 - RNA, 19 nt, Human
cccccaagccugcccgcac

SEQ ID NO: 1050257 - RNA, 20 nt, Human
cccccaagccugcccgcacc

SEQ ID NO: 1050258 - RNA, 21 nt, Human
ccccccgggaccccucugcca

SEQ ID NO: 1050259 - RNA, 19 nt, Human
cccccgggaccccucugcc

SEQ ID NO: 1050260 - RNA, 21 nt, Human
cccccgggaccccucugccag

SEQ ID NO: 1050261 - RNA, 24 nt, Human
cccccgggcucaccggcguccaca

SEQ ID NO: 1050262 - RNA, 23 nt, Human
ccccucugccagcgucacagucc

SEQ ID NO: 1050263 - RNA, 18 nt, Human
ccccuuccucuccagccc

SEQ ID NO: 1050264 - RNA, 18 nt, Human
cccgcagccgucccccca

SEQ ID NO: 1050265 - RNA, 21 nt, Human
ccgcaggccccucggagaccc

SEQ ID NO: 1050266 - RNA, 22 nt, Human
ccuccuccgcuugcuccccccg

SEQ ID NO: 1050267 - RNA, 20 nt, Human
ccucggagacccugccccuc

SEQ ID NO: 1050268 - RNA, 21 nt, Human
ccucggagacccugccccucc

SEQ ID NO: 1050269 - RNA, 19 nt, Human
ccucgggcuccccuucugc

SEQ ID NO: 1050270 - RNA, 18 nt, Human
ccugcagcuccugggggg

SEQ ID NO: 1050271 - RNA, 18 nt, Human
ccugcagggccugcacca

SEQ ID NO: 1050272 - RNA, 25 nt, Human
ccugcccgcacccaggcucugaaaa

SEQ ID NO: 1050273 - RNA, 18 nt, Human
ccuggggggggucccagg

SEQ ID NO: 1050274 - RNA, 20 nt, Human
cgcagagccgggcggcgucu

SEQ ID NO: 1050275 - RNA, 20 nt, Human
cgcagcccgggccccagggc

SEQ ID NO: 1050276 - RNA, 19 nt, Human
cggcgcagagcauggugcu

SEQ ID NO: 1050277 - RNA, 20 nt, Human
cggcuggaggaggcugcgcu

SEQ ID NO: 1050278 - RNA, 20 nt, Human
cgggcuccccuucugccagg

SEQ ID NO: 1050279 - RNA, 22 nt, Human
cgggggccaggcucagaacagg

SEQ ID NO: 1050280 - RNA, 20 nt, Human
cucaucugcuccuggagcca

SEQ ID NO: 1050281 - RNA, 22 nt, Human
cuccccccgggaccccucugcc

SEQ ID NO: 1050282 - RNA, 22 nt, Human
cuccccuucugccagggcagcc

SEQ ID NO: 1050283 - RNA, 24 nt, Human
cuccuggggcuccuggggcaggca

SEQ ID NO: 1050284 - RNA, 23 nt, Human
cucucucacugcuucagccucag

SEQ ID NO: 1050285 - RNA, 20 nt, Human
cugccugcagcuccuggggg

SEQ ID NO: 1050286 - RNA, 18 nt, Human
cuggggcuccuggggcag

SEQ ID NO: 1050287 - RNA, 18 nt, Human
gagcggcagcugagacgc

SEQ ID NO: 1050288 - RNA, 20 nt, Human
gagcggcagcugagacgcag

SEQ ID NO: 1050289 - RNA, 19 nt, Human
gaggaggcugcgcucaucu

SEQ ID NO: 1050290 - RNA, 18 nt, Human
gagggguagcagcagcag

SEQ ID NO: 1050291 - RNA, 19 nt, Human
gcacaccccgcaggccccu

SEQ ID NO: 1050292 - RNA, 19 nt, Human
gcccaacacagucucugcc

SEQ ID NO: 1050293 - RNA, 20 nt, Human
gcccccaagaggagagugaa

SEQ ID NO: 1050294 - RNA, 23 nt, Human
gcccccaagaggagagugaagac

SEQ ID NO: 1050295 - RNA, 18 nt, Human
gcccgugggcaaaccaug

SEQ ID NO: 1050296 - RNA, 18 nt, Human
gcgcagcccgggccccag

SEQ ID NO: 1050297 - RNA, 21 nt, Human
gcgucugccugcagcuccugg

SEQ ID NO: 1050298 - RNA, 19 nt, Human
gcuccuggggcuccugggg

SEQ ID NO: 1050299 - RNA, 20 nt, Human
gcucugaaaagcccggucag

SEQ ID NO: 1050300 - RNA, 26 nt, Human
ggaaggacaggggcacaccccgcagg

SEQ ID NO: 1050301 - RNA, 20 nt, Human
ggaccccucugccagcguca

SEQ ID NO: 1050302 - RNA, 21 nt, Human
ggagacccugccccuccgccc

SEQ ID NO: 1050303 - RNA, 22 nt, Human
ggccagaagcucccugcagcug

SEQ ID NO: 1050304 - RNA, 20 nt, Human
ggcggcgucugccugcagcu

SEQ ID NO: 1050305 - RNA, 18 nt, Human
ggcuccaggcccaccagg

SEQ ID NO: 1050306 - RNA, 23 nt, Human
gggccccugcccuacauccaucc

SEQ ID NO: 1050307 - RNA, 25 nt, Human
gggccucucucacugcuucagccuc

SEQ ID NO: 1050308 - RNA, 21 nt, Human
gggcgggggccaggcucagaa

SEQ ID NO: 1050309 - RNA, 22 nt, Human
ggggcacaccccgcaggccccu

SEQ ID NO: 1050310 - RNA, 21 nt, Human
ggggggggucccaggccagaa

SEQ ID NO: 1050311 - RNA, 20 nt, Human
gguucacuggcaccuccucc

SEQ ID NO: 1050312 - RNA, 19 nt, Human
guucacuggcaccuccucc

SEQ ID NO: 1050313 - RNA, 18 nt, Human
uagcagcagcagcacagc

SEQ ID NO: 1050314 - RNA, 18 nt, Human
uagggcgggggccaggcu

SEQ ID NO: 1050315 - RNA, 22 nt, Human
ucaccggcguccacagcugcac

SEQ ID NO: 1050316 - RNA, 18 nt, Human
uccagcccgggccccugc

SEQ ID NO: 1050317 - RNA, 18 nt, Human
uccccgcagccguccccc

SEQ ID NO: 1050318 - RNA, 23 nt, Human
ucccucgggcuccccuucugcca

SEQ ID NO: 1050319 - RNA, 18 nt, Human
ucccugcagcugggcucg

SEQ ID NO: 1050320 - RNA, 24 nt, Human
uccggcagggggcuccuggggcuc

SEQ ID NO: 1050321 - RNA, 20 nt, Human
uccuggggcuccuggggcag

SEQ ID NO: 1050322 - RNA, 19 nt, Human
uccuggggggggucccagg

SEQ ID NO: 1050323 - RNA, 19 nt, Human
ucgaagagggcgccccagc

SEQ ID NO: 1050324 - RNA, 22 nt, Human
ucuccagcccgggccccugccc

SEQ ID NO: 1050325 - RNA, 23 nt, Human
ucucgccgcacggcccuucacaa

SEQ ID NO: 1050326 - RNA, 21 nt, Human
ucugccaggaccucaugaaag

SEQ ID NO: 1050327 - RNA, 20 nt, Human
ugagcaggggaacacgggcc

SEQ ID NO: 1050328 - RNA, 19 nt, Human
ugagcuugggagggguagg

SEQ ID NO: 1050329 - RNA, 23 nt, Human
ugcagggccugcaccagcagccg

SEQ ID NO: 1050330 - RNA, 19 nt, Human
ugcagggcgcuggggggca

SEQ ID NO: 1050331 - RNA, 20 nt, Human
ugcagggcgcuggggggcag

SEQ ID NO: 1050332 - RNA, 20 nt, Human
ugccaggaccucaugaaagu

SEQ ID NO: 1050333 - RNA, 23 nt, Human
ugcgguucacuggcaccuccucc

SEQ ID NO: 1050334 - RNA, 18 nt, Human
ugcuggggcgcagcccgg

SEQ ID NO: 1050335 - RNA, 19 nt, Human
ugcuggggcgcagcccggg

SEQ ID NO: 1050336 - RNA, 22 nt, Human
uggcaccuccuccgcuugcucc

SEQ ID NO: 1050337 - RNA, 20 nt, Human
uggcacgagucaacgccccc

SEQ ID NO: 1050338 - RNA, 18 nt, Human
uggccggcuccaggccca

SEQ ID NO: 1050339 - RNA, 21 nt, Human
ugggagggguagcagcagcag

SEQ ID NO: 1050340 - RNA, 21 nt, Human
ugggguggggcaggaugcggu

SEQ ID NO: 1050341 - RNA, 18 nt, Human
uguguacagugggugccc

SEQ ID NO: 1050342 - RNA, 21 nt, Human
uucacaaacguagucuagguu

SEQ ID NO: 1050343 - RNA, 19 nt, Human
uucacuggcaccuccuccg

SEQ ID NO: 1050344 - RNA, 23 nt, Human
aaaagggcucugagccucagaca

SEQ ID NO: 1050345 - RNA, 20 nt, Human
aaauaagcaaaauauaauuc

SEQ ID NO: 1050346 - RNA, 22 nt, Human
aaaugguagauaggauaaaaua

SEQ ID NO: 1050347 - RNA, 20 nt, Human
aacaugcuuguagaacagaa

SEQ ID NO: 1050348 - RNA, 19 nt, Human
aagaacccuaaugcuauuu

SEQ ID NO: 1050349 - RNA, 18 nt, Human
aagaagccaaugugggca

SEQ ID NO: 1050350 - RNA, 20 nt, Human
accaagaaaucccacuccaa

SEQ ID NO: 1050351 - RNA, 20 nt, Human
accacagcaaaguuuauuca

SEQ ID NO: 1050352 - RNA, 24 nt, Human
agaaaagaaauauaaauaagcaaa

SEQ ID NO: 1050353 - RNA, 25 nt, Human
agaaaagaaauauaaauaagcaaaa

SEQ ID NO: 1050354 - RNA, 18 nt, Human
aggguacgauggcugaag

SEQ ID NO: 1050355 - RNA, 21 nt, Human
agguugguauauuugcaguug

SEQ ID NO: 1050356 - RNA, 19 nt, Human
aguucaauggaaaaugugc

SEQ ID NO: 1050357 - RNA, 21 nt, Human
auuuaucugccuuugaacugg

SEQ ID NO: 1050358 - RNA, 18 nt, Human
caaacaacaucuaaucua

SEQ ID NO: 1050359 - RNA, 22 nt, Human
caauaauacagcuagauaccac

SEQ ID NO: 1050360 - RNA, 19 nt, Human
cacaacaugcuuguagaac

SEQ ID NO: 1050361 - RNA, 22 nt, Human
cacugcauaacaaaugguggau

SEQ ID NO: 1050362 - RNA, 18 nt, Human
cagaagaggguacgaugg

SEQ ID NO: 1050363 - RNA, 20 nt, Human
cagccaggacacauagacag

SEQ ID NO: 1050364 - RNA, 22 nt, Human
cagcgagcccaucaugacgagu

SEQ ID NO: 1050365 - RNA, 18 nt, Human
ccagauauuugguaguga

SEQ ID NO: 1050366 - RNA, 22 nt, Human
ccucugcaggaacacuuggcuc

SEQ ID NO: 1050367 - RNA, 21 nt, Human
ccuggucuccaguuuucugcc

SEQ ID NO: 1050368 - RNA, 24 nt, Human
ccuuacccaaaaauggcucugcag

SEQ ID NO: 1050369 - RNA, 21 nt, Human
cucuauaauuucccccucacu

SEQ ID NO: 1050370 - RNA, 23 nt, Human
cugcugcuucuguacaccuggug

SEQ ID NO: 1050371 - RNA, 18 nt, Human
cuggaagaucuugucugc

SEQ ID NO: 1050372 - RNA, 19 nt, Human
cuuggcucuagaauuuggg

SEQ ID NO: 1050373 - RNA, 26 nt, Human
gaaaaugugcauucuauucagagccc

SEQ ID NO: 1050374 - RNA, 24 nt, Human
gaacagaaauuugggaacacugca

SEQ ID NO: 1050375 - RNA, 19 nt, Human
gaagaagccaaugugggca

SEQ ID NO: 1050376 - RNA, 21 nt, Human
gacauaaagauacauuaauug

SEQ ID NO: 1050377 - RNA, 19 nt, Human
gagccauacuuuagaaaaa

SEQ ID NO: 1050378 - RNA, 21 nt, Human
gcgagcccaucaugacgagug

SEQ ID NO: 1050379 - RNA, 20 nt, Human
gcucuauaauuucccccuca

SEQ ID NO: 1050380 - RNA, 20 nt, Human
ggaaaaugugcauucuauuc

SEQ ID NO: 1050381 - RNA, 20 nt, Human
ggagaagcagaggcuccggg

SEQ ID NO: 1050382 - RNA, 23 nt, Human
ggagaagcagaggcuccgggguc

SEQ ID NO: 1050383 - RNA, 21 nt, Human
ggugcugucugaguaagacag

SEQ ID NO: 1050384 - RNA, 18 nt, Human
uaagaaaugguagauagg

SEQ ID NO: 1050385 - RNA, 23 nt, Human
uaagugaaacauauguuccaaga

SEQ ID NO: 1050386 - RNA, 22 nt, Human
uagacagccucugcaggaacac

SEQ ID NO: 1050387 - RNA, 22 nt, Human
uaucaaaagggcucugagccuc

SEQ ID NO: 1050388 - RNA, 19 nt, Human
uauguuccaagaaaauguu

SEQ ID NO: 1050389 - RNA, 21 nt, Human
ucaaaagggcucugagccuca

SEQ ID NO: 1050390 - RNA, 24 nt, Human
ucagacacaagaucaaugccuucu

SEQ ID NO: 1050391 - RNA, 22 nt, Human
ucagucagaagaggguacgaug

SEQ ID NO: 1050392 - RNA, 23 nt, Human
uccaagaaaauguuuacuaugcc

SEQ ID NO: 1050393 - RNA, 19 nt, Human
uccagauauuugguaguga

SEQ ID NO: 1050394 - RNA, 19 nt, Human
ucucccugcugaucuggaa

SEQ ID NO: 1050395 - RNA, 24 nt, Human
ucugcaggaacacuuggcucuaga

SEQ ID NO: 1050396 - RNA, 18 nt, Human
ucugcaggaguguccuug

SEQ ID NO: 1050397 - RNA, 28 nt, Human
ucugcaggaguguccuuggggcggcggc

SEQ ID NO: 1050398 - RNA, 19 nt, Human
ucuugucugcugcuucugu

SEQ ID NO: 1050399 - RNA, 18 nt, Human
ugaaaauacacaacaaac

SEQ ID NO: 1050400 - RNA, 24 nt, Human
ugaaacauauguuccaagaaaaug

SEQ ID NO: 1050401 - RNA, 20 nt, Human
ugagagggaccuuugugaug

SEQ ID NO: 1050402 - RNA, 20 nt, Human
uggaagaagccaaugugggc

SEQ ID NO: 1050403 - RNA, 20 nt, Human
uggaagaagccaaugugggc

SEQ ID NO: 1050404 - RNA, 21 nt, Human
uguaaguguuccuuacccaaa

SEQ ID NO: 1050405 - RNA, 18 nt, Human
uguccuugggcagccagg

SEQ ID NO: 1050406 - RNA, 21 nt, Human
ugugaugacggguccaucagu

SEQ ID NO: 1050407 - RNA, 24 nt, Human
uguggaagaagccaaugugggcag

SEQ ID NO: 1050408 - RNA, 20 nt, Human
uuccaagaaaauguuuacua

SEQ ID NO: 1050409 - RNA, 21 nt, Human
uuccuuacccaaaaauggcuc

SEQ ID NO: 1050410 - RNA, 26 nt, Human
uuuaagauucuauaugcagaccuuuu

SEQ ID NO: 1050411 - RNA, 24 nt, Human
aaaaaaaaaaaacagcccucagag

SEQ ID NO: 1050412 - RNA, 22 nt, Human
aaaaaaaaaacagcccucagag

SEQ ID NO: 1050413 - RNA, 21 nt, Human
aaaacagcccucagagccuuc

SEQ ID NO: 1050414 - RNA, 23 nt, Human
aaacagcccucagagccuucccg

SEQ ID NO: 1050415 - RNA, 25 nt, Human
aacugcuuuuccaacaaacucaaac

SEQ ID NO: 1050416 - RNA, 22 nt, Human
aagugcugagguugggagugcc

SEQ ID NO: 1050417 - RNA, 25 nt, Human
acaucaaaaaaaaaaaacagcccuc

SEQ ID NO: 1050418 - RNA, 20 nt, Human
acgcgugugacccuacggaa

SEQ ID NO: 1050419 - RNA, 19 nt, Human
agcaggguggagcccgugg

SEQ ID NO: 1050420 - RNA, 20 nt, Human
aggaaauagaggguuuaagg

SEQ ID NO: 1050421 - RNA, 21 nt, Human
auccacacucuuaaauauccu

SEQ ID NO: 1050422 - RNA, 18 nt, Human
auggcaugggagggcuug

SEQ ID NO: 1050423 - RNA, 22 nt, Human
auggcaugggagggcuuguuuc

SEQ ID NO: 1050424 - RNA, 22 nt, Human
caaaaaaaaaaaacagcccuca

SEQ ID NO: 1050425 - RNA, 23 nt, Human
caacaaacucaaaccccuugaaa

SEQ ID NO: 1050426 - RNA, 23 nt, Human
cacacaacaucaacuacugcagg

SEQ ID NO: 1050427 - RNA, 23 nt, Human
cagcggcgcgcccgccccugggc

SEQ ID NO: 1050428 - RNA, 26 nt, Human
cagcuaaaucccucugugaggaaguc

SEQ ID NO: 1050429 - RNA, 21 nt, Human
ccacggggacauggcauggga

SEQ ID NO: 1050430 - RNA, 21 nt, Human
cccccaguuaacugcuuuucc

SEQ ID NO: 1050431 - RNA, 20 nt, Human
ccccuugaaaaggugcuaag

SEQ ID NO: 1050432 - RNA, 19 nt, Human
ccuuaucuauaacugucca

SEQ ID NO: 1050433 - RNA, 22 nt, Human
cgauuauuuuuccaccucuuca

SEQ ID NO: 1050434 - RNA, 20 nt, Human
cgcccgcgccgcucgcccgc

SEQ ID NO: 1050435 - RNA, 21 nt, Human
cuaaaauccuuuacagcacac

SEQ ID NO: 1050436 - RNA, 18 nt, Human
cuccggccgcccgcgccg

SEQ ID NO: 1050437 - RNA, 22 nt, Human
cucugcgcggggaaggcccccc

SEQ ID NO: 1050438 - RNA, 24 nt, Human
cuggugguggccauggccgggccu

SEQ ID NO: 1050439 - RNA, 22 nt, Human
cuguuaacaucaaaaaaaaaaa

SEQ ID NO: 1050440 - RNA, 23 nt, Human
cuucauccuuccgaaacauccca

SEQ ID NO: 1050441 - RNA, 18 nt, Human
gacaagugcugagguugg

SEQ ID NO: 1050442 - RNA, 18 nt, Human
gcaacauacauucagcaa

SEQ ID NO: 1050443 - RNA, 19 nt, Human
gcggcgcgcccgccccugg

SEQ ID NO: 1050444 - RNA, 19 nt, Human
gcugaggggcugcagcagg

SEQ ID NO: 1050445 - RNA, 22 nt, Human
gcugaggggcugcagcagggug

SEQ ID NO: 1050446 - RNA, 20 nt, Human
gcuggugguggccauggccg

SEQ ID NO: 1050447 - RNA, 24 nt, Human
ggaaauuccuuaucuauaacuguc

SEQ ID NO: 1050448 - RNA, 20 nt, Human
ggaugcagcggcgcgcccgc

SEQ ID NO: 1050449 - RNA, 21 nt, Human
ggcugcagcaggguggagccc

SEQ ID NO: 1050450 - RNA, 23 nt, Human
gggcugcagcaggguggagcccg

SEQ ID NO: 1050451 - RNA, 19 nt, Human
gguggagcccguggugcug

SEQ ID NO: 1050452 - RNA, 23 nt, Human
ucggagcucugcgcggggaaggc

SEQ ID NO: 1050453 - RNA, 21 nt, Human
ugaaaaggugcuaagauuggu

SEQ ID NO: 1050454 - RNA, 22 nt, Human
ugcugaggggcugcagcagggu

SEQ ID NO: 1050455 - RNA, 23 nt, Human
ugcugaggggcugcagcagggug

SEQ ID NO: 1050456 - RNA, 24 nt, Human
ugcugaggggcugcagcagggugg

SEQ ID NO: 1050457 - RNA, 21 nt, Human
uggagcccguggugcuggugg

SEQ ID NO: 1050458 - RNA, 22 nt, Human
uggcaugggagggcuuguuuca

SEQ ID NO: 1050459 - RNA, 21 nt, Human
uguuaacaucaaaaaaaaaaa

SEQ ID NO: 1050460 - RNA, 23 nt, Human
uguuaacaucaaaaaaaaaaaac

SEQ ID NO: 1050461 - RNA, 21 nt, Human
uuauugcauuuuaaaaauauc

SEQ ID NO: 1050462 - RNA, 23 nt, Human
uucagcaacagggcacgcgugug

SEQ ID NO: 1050463 - RNA, 22 nt, Human
uugaaaaggugcuaagauuggu

SEQ ID NO: 1050464 - RNA, 21 nt, Human
uugcugaggggcugcagcagg

SEQ ID NO: 1050465 - RNA, 23 nt, Human
uuuaggaaauagaggguuuaagg

SEQ ID NO: 1050466 - RNA, 19 nt, Human
uagauaacaagcagauuug

SEQ ID NO: 1050467 - RNA, 24 nt, Human
aaaacccgcccagaaucucuacuu

SEQ ID NO: 1050468 - RNA, 19 nt, Human
aaacaaaugcuguccucca

SEQ ID NO: 1050469 - RNA, 19 nt, Human
aaccuuuucagaggagcug

SEQ ID NO: 1050470 - RNA, 20 nt, Human
aagcacugagauugagucug

SEQ ID NO: 1050471 - RNA, 19 nt, Human
aaguuuucccgcccagccu

SEQ ID NO: 1050472 - RNA, 19 nt, Human
acaaagagcugcugccucu

SEQ ID NO: 1050473 - RNA, 23 nt, Human
acacagaaagcuccugacucagc

SEQ ID NO: 1050474 - RNA, 22 nt, Human
accccaugcucuggcaaaacca

SEQ ID NO: 1050475 - RNA, 20 nt, Human
accuggcccgcucuuccugg

SEQ ID NO: 1050476 - RNA, 22 nt, Human
acgcugagcuccugggccggag

SEQ ID NO: 1050477 - RNA, 18 nt, Human
acucccguccaagcacuc

SEQ ID NO: 1050478 - RNA, 20 nt, Human
agaaacugggucuuaucuuu

SEQ ID NO: 1050479 - RNA, 23 nt, Human
agaggauuugcauuugcagcagg

SEQ ID NO: 1050480 - RNA, 22 nt, Human
agcagacacuaauggccagcca

SEQ ID NO: 1050481 - RNA, 19 nt, Human
agccaccaccugcaccuug

SEQ ID NO: 1050482 - RNA, 22 nt, Human
agcuguuucucgucgaugcugg

SEQ ID NO: 1050483 - RNA, 19 nt, Human
aggaauccuagacauaacc

SEQ ID NO: 1050484 - RNA, 21 nt, Human
aggauuugcauuugcagcagg

SEQ ID NO: 1050485 - RNA, 28 nt, Human
aggccguggccaggccagccacggagga

SEQ ID NO: 1050486 - RNA, 21 nt, Human
aggggcacgaaggacugaguc

SEQ ID NO: 1050487 - RNA, 22 nt, Human
auagaacccuccucugaucuua

SEQ ID NO: 1050488 - RNA, 18 nt, Human
auagaaccuuguucucuc

SEQ ID NO: 1050489 - RNA, 27 nt, Human
auagaaccuuguucucucucuacugag

SEQ ID NO: 1050490 - RNA, 23 nt, Human
auggggcuggcuuuacgggaagc

SEQ ID NO: 1050491 - RNA, 21 nt, Human
caaaucgcaagucgcagcuga

SEQ ID NO: 1050492 - RNA, 22 nt, Human
caccgccugccucucagaagaa

SEQ ID NO: 1050493 - RNA, 22 nt, Human
caccugcaccuugugcucuucc

SEQ ID NO: 1050494 - RNA, 18 nt, Human
cacugggcagccuugucu

SEQ ID NO: 1050495 - RNA, 19 nt, Human
cagaaagcuccugacucag

SEQ ID NO: 1050496 - RNA, 23 nt, Human
cagaagaaucuccucuucugcga

SEQ ID NO: 1050497 - RNA, 19 nt, Human
cagccuucacaaggaguug

SEQ ID NO: 1050498 - RNA, 19 nt, Human
caggagcccacgucacacc

SEQ ID NO: 1050499 - RNA, 20 nt, Human
cagguggaaaaggaucaacg

SEQ ID NO: 1050500 - RNA, 18 nt, Human
ccacacccucugcugccu

SEQ ID NO: 1050501 - RNA, 23 nt, Human
ccacuucgagcucucugggggag

SEQ ID NO: 1050502 - RNA, 18 nt, Human
ccaugguuagagccgagc

SEQ ID NO: 1050503 - RNA, 21 nt, Human
ccauuugccacccgucacucc

SEQ ID NO: 1050504 - RNA, 18 nt, Human
cccaggccggggauggag

SEQ ID NO: 1050505 - RNA, 23 nt, Human
cccagugaugaccacaagguacc

SEQ ID NO: 1050506 - RNA, 21 nt, Human
ccccagcuauguggauauucc

SEQ ID NO: 1050507 - RNA, 21 nt, Human
ccccaggcugcugggaacccc

SEQ ID NO: 1050508 - RNA, 24 nt, Human
cccccauucuggguaccacacuca

SEQ ID NO: 1050509 - RNA, 23 nt, Human
cccgcccagaaucucuacuucca

SEQ ID NO: 1050510 - RNA, 21 nt, Human
cccuuuuccucuuucucucuc

SEQ ID NO: 1050511 - RNA, 25 nt, Human
ccggaguccgagacucagccgaguc

SEQ ID NO: 1050512 - RNA, 19 nt, Human
ccucucagaagaaucuccu

SEQ ID NO: 1050513 - RNA, 21 nt, Human
ccugcaggaguucugugggag

SEQ ID NO: 1050514 - RNA, 19 nt, Human
ccugggccggaguccgaga

SEQ ID NO: 1050515 - RNA, 23 nt, Human
ccuuaguuugguuuccucuuugg

SEQ ID NO: 1050516 - RNA, 19 nt, Human
ccuucccuuuuccucuuuc

SEQ ID NO: 1050517 - RNA, 19 nt, Human
ccuuucuucccacucuccu

SEQ ID NO: 1050518 - RNA, 24 nt, Human
cgagccaccaccugcaccuugugc

SEQ ID NO: 1050519 - RNA, 19 nt, Human
cgauguaacagccuucaca

SEQ ID NO: 1050520 - RNA, 18 nt, Human
cgggaagcaggcaggugg

SEQ ID NO: 1050521 - RNA, 21 nt, Human
cgggaugaagugccagcccag

SEQ ID NO: 1050522 - RNA, 18 nt, Human
cgggggugggcacugggc

SEQ ID NO: 1050523 - RNA, 19 nt, Human
cucaggagaugaacauacc

SEQ ID NO: 1050524 - RNA, 22 nt, Human
cuccacacccucugcugccugu

SEQ ID NO: 1050525 - RNA, 18 nt, Human
cuccaggucugcggucug

SEQ ID NO: 1050526 - RNA, 19 nt, Human
cucguagcucccaggggcu

SEQ ID NO: 1050527 - RNA, 23 nt, Human
cucugcgcugcaccgccugccuc

SEQ ID NO: 1050528 - RNA, 25 nt, Human
cucugcuccuuucuucccacucucc

SEQ ID NO: 1050529 - RNA, 19 nt, Human
cugaccugucugccaaaac

SEQ ID NO: 1050530 - RNA, 19 nt, Human
cugccaaaacccgcccaga

SEQ ID NO: 1050531 - RNA, 21 nt, Human
cugccgagccaccaccugcac

SEQ ID NO: 1050532 - RNA, 18 nt, Human
cugcugccucuccccuug

SEQ ID NO: 1050533 - RNA, 19 nt, Human
cugcugcuguggcugcugc

SEQ ID NO: 1050534 - RNA, 19 nt, Human
cuggaaagcucccuguguc

SEQ ID NO: 1050535 - RNA, 18 nt, Human
cugggugaccuguggggc

SEQ ID NO: 1050536 - RNA, 22 nt, Human
cuggugaggacaauggggcugg

SEQ ID NO: 1050537 - RNA, 20 nt, Human
cugugugcaugcuccuugcc

SEQ ID NO: 1050538 - RNA, 23 nt, Human
cuuuuccucuuucucucucucug

SEQ ID NO: 1050539 - RNA, 18 nt, Human
gaaccugagagcugagcg

SEQ ID NO: 1050540 - RNA, 24 nt, Human
gaagcagacacuaauggccagcca

SEQ ID NO: 1050541 - RNA, 19 nt, Human
gcaagcacugagauugagu

SEQ ID NO: 1050542 - RNA, 18 nt, Human
gcagcaggcucuggccuc

SEQ ID NO: 1050543 - RNA, 23 nt, Human
gcccagaaucucuacuuccacac

SEQ ID NO: 1050544 - RNA, 21 nt, Human
gcccugcggcucugccagggg

SEQ ID NO: 1050545 - RNA, 18 nt, Human
gcuccugggccggagucc

SEQ ID NO: 1050546 - RNA, 20 nt, Human
gcugaggaggagcuggaccc

SEQ ID NO: 1050547 - RNA, 22 nt, Human
gcugggaaccccaugcucuggc

SEQ ID NO: 1050548 - RNA, 19 nt, Human
ggacaaagagcugcugccu

SEQ ID NO: 1050549 - RNA, 22 nt, Human
ggagauggcugaauucugggcc

SEQ ID NO: 1050550 - RNA, 18 nt, Human
ggagcuggggaagagggc

SEQ ID NO: 1050551 - RNA, 20 nt, Human
ggaggaaccugagagcugag

SEQ ID NO: 1050552 - RNA, 23 nt, Human
ggaugguggguguuaagcuuguu

SEQ ID NO: 1050553 - RNA, 19 nt, Human
ggcugcucgcacugacauu

SEQ ID NO: 1050554 - RNA, 24 nt, Human
gggauggagcccugcggcucugcc

SEQ ID NO: 1050555 - RNA, 20 nt, Human
gggcagccuugucugacucu

SEQ ID NO: 1050556 - RNA, 18 nt, Human
gggccucaucaccaccug

SEQ ID NO: 1050557 - RNA, 22 nt, Human
guagaagacagauuuauucuga

SEQ ID NO: 1050558 - RNA, 21 nt, Human
gucagcagagcccguguuacu

SEQ ID NO: 1050559 - RNA, 23 nt, Human
gugaggacaauggggcuggcuuu

SEQ ID NO: 1050560 - RNA, 20 nt, Human
guggcugcugcauagccugc

SEQ ID NO: 1050561 - RNA, 20 nt, Human
guggcugggccacuucgagc

SEQ ID NO: 1050562 - RNA, 20 nt, Human
gugggagcgaggaggcuggg

SEQ ID NO: 1050563 - RNA, 19 nt, Human
uaccagaacuaaagaccaa

SEQ ID NO: 1050564 - RNA, 21 nt, Human
uaccugagcuggugcaaggac

SEQ ID NO: 1050565 - RNA, 18 nt, Human
uaguuugguuuccucuuu

SEQ ID NO: 1050566 - RNA, 19 nt, Human
ucacaaggaguuggcacuu

SEQ ID NO: 1050567 - RNA, 22 nt, Human
ucagcagagcccguguuacuga

SEQ ID NO: 1050568 - RNA, 18 nt, Human
ucaggcacugcugcagcu

SEQ ID NO: 1050569 - RNA, 25 nt, Human
ucauauucuucauccucgggcagaa

SEQ ID NO: 1050570 - RNA, 21 nt, Human
uccaggguggcaagcacugag

SEQ ID NO: 1050571 - RNA, 21 nt, Human
ucccaggggcucugaacaccc

SEQ ID NO: 1050572 - RNA, 23 nt, Human
ucccaggggcucugaacacccag

SEQ ID NO: 1050573 - RNA, 22 nt, Human
uccccuugucuggaaagcuccc

SEQ ID NO: 1050574 - RNA, 21 nt, Human
ucccugugucugcaggcugag

SEQ ID NO: 1050575 - RNA, 21 nt, Human
ucuccacacccucugcugccu

SEQ ID NO: 1050576 - RNA, 25 nt, Human
ucuccacacccucugcugccuguca

SEQ ID NO: 1050577 - RNA, 21 nt, Human
ucucuccagccuuaguuuggu

SEQ ID NO: 1050578 - RNA, 22 nt, Human
ucucugggggagaggauuugca

SEQ ID NO: 1050579 - RNA, 24 nt, Human
ucugaccugucugccaaaacccgc

SEQ ID NO: 1050580 - RNA, 19 nt, Human
ucugccaaaacccgcccag

SEQ ID NO: 1050581 - RNA, 24 nt, Human
ucuggaaaacgucaccaaggcugg

SEQ ID NO: 1050582 - RNA, 22 nt, Human
ucugucaaagggcauggccacu

SEQ ID NO: 1050583 - RNA, 21 nt, Human
ucugugggaggaacucaggag

SEQ ID NO: 1050584 - RNA, 21 nt, Human
ucuuccaagauggaauuccgg

SEQ ID NO: 1050585 - RNA, 18 nt, Human
ucuugcugacuaggguug

SEQ ID NO: 1050586 - RNA, 23 nt, Human
ucuuucucucucucugcuccuuu

SEQ ID NO: 1050587 - RNA, 26 nt, Human
ugaacagucacccccagcuaugugga

SEQ ID NO: 1050588 - RNA, 18 nt, Human
ugagauauuucagacacc

SEQ ID NO: 1050589 - RNA, 21 nt, Human
ugagcuccugggccggagucc

SEQ ID NO: 1050590 - RNA, 23 nt, Human
ugaggacaauggggcuggcuuua

SEQ ID NO: 1050591 - RNA, 23 nt, Human
ugagggggcugcacgcgcagcau

SEQ ID NO: 1050592 - RNA, 21 nt, Human
ugaggugcuuguaauaucuug

SEQ ID NO: 1050593 - RNA, 21 nt, Human
ugccagggggaugcucccucc

SEQ ID NO: 1050594 - RNA, 26 nt, Human
ugccccagacacucccguccaagcac

SEQ ID NO: 1050595 - RNA, 20 nt, Human
ugcccgugaacgcugagcuc

SEQ ID NO: 1050596 - RNA, 23 nt, Human
ugccgagccaccaccugcaccuu

SEQ ID NO: 1050597 - RNA, 20 nt, Human
ugccucaacaagguacuugc

SEQ ID NO: 1050598 - RNA, 18 nt, Human
ugccucaagcagaaaaca

SEQ ID NO: 1050599 - RNA, 22 nt, Human
ugcggucugccgagccaccacc

SEQ ID NO: 1050600 - RNA, 27 nt, Human
uggaaagcucccugugucgugagacca

SEQ ID NO: 1050601 - RNA, 19 nt, Human
uggaauagaaccuuguucu

SEQ ID NO: 1050602 - RNA, 21 nt, Human
uggaauuccgggggugggcac

SEQ ID NO: 1050603 - RNA, 26 nt, Human
uggacacuugagauccuuuguagccc

SEQ ID NO: 1050604 - RNA, 23 nt, Human
uggaggggaggaacaucuccuga

SEQ ID NO: 1050605 - RNA, 21 nt, Human
uggcacugggacuuuucuauc

SEQ ID NO: 1050606 - RNA, 22 nt, Human
uggcaggcacacucucugcuca

SEQ ID NO: 1050607 - RNA, 23 nt, Human
uggccuccuggguguggcccggg

SEQ ID NO: 1050608 - RNA, 23 nt, Human
uggccuccuggguguggcccucc

SEQ ID NO: 1050609 - RNA, 18 nt, Human
ugggagcgaggaggcugg

SEQ ID NO: 1050610 - RNA, 21 nt, Human
ugggaggaacucaggagccca

SEQ ID NO: 1050611 - RNA, 18 nt, Human
ugggcuaagucauacacu

SEQ ID NO: 1050612 - RNA, 20 nt, Human
uggggccucaucaccaccug

SEQ ID NO: 1050613 - RNA, 24 nt, Human
uguaauaucuugcccugcugcaga

SEQ ID NO: 1050614 - RNA, 19 nt, Human
ugugcggaugagcauaaag

SEQ ID NO: 1050615 - RNA, 23 nt, Human
ugugugcagggcugaggaggagc

SEQ ID NO: 1050616 - RNA, 22 nt, Human
uuagagccgagccaucugcugc

SEQ ID NO: 1050617 - RNA, 19 nt, Human
uucauuggcaauucgcugg

SEQ ID NO: 1050618 - RNA, 19 nt, Human
uucccccuucccuuuuccu

SEQ ID NO: 1050619 - RNA, 24 nt, Human
uucugggcccacaagcgaaggcuc

SEQ ID NO: 1050620 - RNA, 23 nt, Human
uugcaauccaugggaaggaggcu

SEQ ID NO: 1050621 - RNA, 21 nt, Human
uugcagcaggcucuggccucc

SEQ ID NO: 1050622 - RNA, 18 nt, Human
aaaacaaaacaaccccaa

SEQ ID NO: 1050623 - RNA, 19 nt, Human
aaaacaaaacaaccccaaa

SEQ ID NO: 1050624 - RNA, 24 nt, Human
aaaacaaaacaaccccaaaacaaa

SEQ ID NO: 1050625 - RNA, 24 nt, Human
aaaacaaccccaaaacaaaacuaa

SEQ ID NO: 1050626 - RNA, 20 nt, Human
aaacaaaacaaccccaaaac

SEQ ID NO: 1050627 - RNA, 26 nt, Human
aaacaaaacuaaauaaaacuccccaa

SEQ ID NO: 1050628 - RNA, 18 nt, Human
aaacaaccccaaaacaaa

SEQ ID NO: 1050629 - RNA, 23 nt, Human
aaacaaccccaaaacaaaacuaa

SEQ ID NO: 1050630 - RNA, 25 nt, Human
aaacaaccccaaaacaaaacuaaau

SEQ ID NO: 1050631 - RNA, 28 nt, Human
aaacaaccccaaaacaaaagggaacgcc

SEQ ID NO: 1050632 - RNA, 20 nt, Human
aaagaacauuccgcaccccc

SEQ ID NO: 1050633 - RNA, 20 nt, Human
aaagaagcugaaaagaacau

SEQ ID NO: 1050634 - RNA, 22 nt, Human
aacaaaacaaccccaaaacaag

SEQ ID NO: 1050635 - RNA, 22 nt, Human
aacuucgaucagguuaccaaaa

SEQ ID NO: 1050636 - RNA, 19 nt, Human
aagaacauuccgcaccccc

SEQ ID NO: 1050637 - RNA, 18 nt, Human
aaguggaauugcugaguc

SEQ ID NO: 1050638 - RNA, 19 nt, Human
acaaaaaacccugcccucu

SEQ ID NO: 1050639 - RNA, 18 nt, Human
acaaaacaaccccaaaac

SEQ ID NO: 1050640 - RNA, 23 nt, Human
acaaaacaaccccaaaacaaaac

SEQ ID NO: 1050641 - RNA, 22 nt, Human
accccaaccgcuaucuacauaa

SEQ ID NO: 1050642 - RNA, 23 nt, Human
acccgaaugcaggagccucacug

SEQ ID NO: 1050643 - RNA, 18 nt, Human
acucauuucauuucccca

SEQ ID NO: 1050644 - RNA, 18 nt, Human
agccucacugcucuuugc

SEQ ID NO: 1050645 - RNA, 21 nt, Human
aggagguccaucagaucuagg

SEQ ID NO: 1050646 - RNA, 18 nt, Human
agucucaccccauucaga

SEQ ID NO: 1050647 - RNA, 28 nt, Human
caaaacaaaacaaccccaaaacaaaacu

SEQ ID NO: 1050648 - RNA, 21 nt, Human
caaaacaaaacuaaauaaaac

SEQ ID NO: 1050649 - RNA, 23 nt, Human
caaaacaaccccaaaacaaaacu

SEQ ID NO: 1050650 - RNA, 25 nt, Human
caaaacaaccccaaaacaaaacuaa

SEQ ID NO: 1050651 - RNA, 26 nt, Human
caaaacaaccccaaaacaaaacuaaa

SEQ ID NO: 1050652 - RNA, 22 nt, Human
caaagcucggcuuuagacacuc

SEQ ID NO: 1050653 - RNA, 23 nt, Human
caaauugcauaaauuguugcuga

SEQ ID NO: 1050654 - RNA, 24 nt, Human
caacugugauccagagcuuccucc

SEQ ID NO: 1050655 - RNA, 25 nt, Human
cacccccccgaccccaaccgcuauc

SEQ ID NO: 1050656 - RNA, 19 nt, Human
cacuacuccuguccccugc

SEQ ID NO: 1050657 - RNA, 19 nt, Human
cacugcucuuugcuucugc

SEQ ID NO: 1050658 - RNA, 25 nt, Human
cagagcuuccuccaaauugcauaaa

SEQ ID NO: 1050659 - RNA, 26 nt, Human
caguagcuuguuuugugugacuuucu

SEQ ID NO: 1050660 - RNA, 19 nt, Human
cauagugcagcuucagggc

SEQ ID NO: 1050661 - RNA, 22 nt, Human
ccaaaacaaaacuaaauaaaac

SEQ ID NO: 1050662 - RNA, 18 nt, Human
ccaaacaaaaaacccugc

SEQ ID NO: 1050663 - RNA, 19 nt, Human
ccaaacaaaaaacccugcc

SEQ ID NO: 1050664 - RNA, 21 nt, Human
ccaagcgguugagccaauuug

SEQ ID NO: 1050665 - RNA, 22 nt, Human
ccacccgaaugcaggagccuca

SEQ ID NO: 1050666 - RNA, 26 nt, Human
ccagagcuuccuccaaauugcauaaa

SEQ ID NO: 1050667 - RNA, 24 nt, Human
cccaaaacaaaacuaaauaaaacu

SEQ ID NO: 1050668 - RNA, 20 nt, Human
cccccccgaccccaaccgcu

SEQ ID NO: 1050669 - RNA, 24 nt, Human
cccccccgaccccaaccgcuaucu

SEQ ID NO: 1050670 - RNA, 18 nt, Human
ccccugccaaaacaaaac

SEQ ID NO: 1050671 - RNA, 22 nt, Human
cccugccaaaacaaaacaaccc

SEQ ID NO: 1050672 - RNA, 22 nt, Human
ccuguccccugccaaaacaaaa

SEQ ID NO: 1050673 - RNA, 22 nt, Human
cgcacccccccgaccccaaccg

SEQ ID NO: 1050674 - RNA, 20 nt, Human
cuaagacaucuuucugugcu

SEQ ID NO: 1050675 - RNA, 21 nt, Human
cuacugagcugaaugccgcau

SEQ ID NO: 1050676 - RNA, 24 nt, Human
cuccaaauugcauaaauuguugcu

SEQ ID NO: 1050677 - RNA, 23 nt, Human
cuccuguccccugccaaaacaaa

SEQ ID NO: 1050678 - RNA, 25 nt, Human
gaacauucugaguuuuaaaagauuc

SEQ ID NO: 1050679 - RNA, 19 nt, Human
gagccucacugcucuuugc

SEQ ID NO: 1050680 - RNA, 22 nt, Human
gcagcuucagggccacucaaga

SEQ ID NO: 1050681 - RNA, 20 nt, Human
gccaaaacaaaacaacccca

SEQ ID NO: 1050682 - RNA, 19 nt, Human
gccaauuugcaucagcagu

SEQ ID NO: 1050683 - RNA, 18 nt, Human
gccaccgcugcugucuca

SEQ ID NO: 1050684 - RNA, 23 nt, Human
gcugaugugcagaggcuaagaca

SEQ ID NO: 1050685 - RNA, 24 nt, Human
gcugguugcuuuuguucaacauua

SEQ ID NO: 1050686 - RNA, 19 nt, Human
ggaguuucagcaggagcuu

SEQ ID NO: 1050687 - RNA, 24 nt, Human
gguaaacuucgaucagguuaccaa

SEQ ID NO: 1050688 - RNA, 22 nt, Human
gucaccuuugucauucauacuc

SEQ ID NO: 1050689 - RNA, 22 nt, Human
gucugccaccgcugcugucuca

SEQ ID NO: 1050690 - RNA, 18 nt, Human
gugauccagagcuuccuc

SEQ ID NO: 1050691 - RNA, 18 nt, Human
guggucaaagguguuaga

SEQ ID NO: 1050692 - RNA, 22 nt, Human
gugucugccaccgcugcugucu

SEQ ID NO: 1050693 - RNA, 22 nt, Human
guugcugacuuggguuauucca

SEQ ID NO: 1050694 - RNA, 21 nt, Human
uaaaacuccccaaacaaaaaa

SEQ ID NO: 1050695 - RNA, 28 nt, Human
uaacaguagcuuguuuugugugacuggu

SEQ ID NO: 1050696 - RNA, 20 nt, Human
uaacugggaauccuacagca

SEQ ID NO: 1050697 - RNA, 19 nt, Human
uaagggacuuccuugcaau

SEQ ID NO: 1050698 - RNA, 22 nt, Human
uaaguaagugcugauauaauau

SEQ ID NO: 1050699 - RNA, 21 nt, Human
uacuccuguccccugccaaaa

SEQ ID NO: 1050700 - RNA, 21 nt, Human
uaugucaccuuugucauucau

SEQ ID NO: 1050701 - RNA, 22 nt, Human
uaugucaccuuugucauucaua

SEQ ID NO: 1050702 - RNA, 18 nt, Human
ucaaacauuuucccaagc

SEQ ID NO: 1050703 - RNA, 21 nt, Human
ucaaagcucggcuuuagacac

SEQ ID NO: 1050704 - RNA, 23 nt, Human
ucaaagcucggcuuuagacacuc

SEQ ID NO: 1050705 - RNA, 23 nt, Human
ucacacccaagccuuugccggcu

SEQ ID NO: 1050706 - RNA, 24 nt, Human
ucacacugucaccaguacuuggua

SEQ ID NO: 1050707 - RNA, 21 nt, Human
uccacccgaaugcaggagccu

SEQ ID NO: 1050708 - RNA, 21 nt, Human
uccagagcuuccuccaaauug

SEQ ID NO: 1050709 - RNA, 25 nt, Human
uccccaaacaaaaaacccugcccuc

SEQ ID NO: 1050710 - RNA, 21 nt, Human
uccccugccaaaacaaaacaa

SEQ ID NO: 1050711 - RNA, 19 nt, Human
uccgcacccccccgacccc

SEQ ID NO: 1050712 - RNA, 18 nt, Human
ucgaggguauacauaugu

SEQ ID NO: 1050713 - RNA, 21 nt, Human
ucugccaccgcugcugucuca

SEQ ID NO: 1050714 - RNA, 21 nt, Human
ucuuuuaugacuccccuacug

SEQ ID NO: 1050715 - RNA, 18 nt, Human
ucuuuugugaagugcuug

SEQ ID NO: 1050716 - RNA, 18 nt, Human
ugaaucuauccacuacuc

SEQ ID NO: 1050717 - RNA, 18 nt, Human
ugccaaaacaaaacaacc

SEQ ID NO: 1050718 - RNA, 27 nt, Human
ugccaaaacaaaacaaccccaaaacaa

SEQ ID NO: 1050719 - RNA, 22 nt, Human
ugccagcauaacuuuaagucuc

SEQ ID NO: 1050720 - RNA, 23 nt, Human
ugcuuucagcucuuccacagcuu

SEQ ID NO: 1050721 - RNA, 20 nt, Human
uggaaaaaauaacugauaau

SEQ ID NO: 1050722 - RNA, 21 nt, Human
uggaaguacaacaucugucug

SEQ ID NO: 1050723 - RNA, 20 nt, Human
ugguacauauauguacacaa

SEQ ID NO: 1050724 - RNA, 20 nt, Human
uguaguuuuaaugagcaguu

SEQ ID NO: 1050725 - RNA, 22 nt, Human
ugucuggauuugaggcaacugu

SEQ ID NO: 1050726 - RNA, 20 nt, Human
ugugcagaggcuaagacauc

SEQ ID NO: 1050727 - RNA, 19 nt, Human
ugugcugguuaugucaccu

SEQ ID NO: 1050728 - RNA, 20 nt, Human
uuccgcacccccccgacccc

SEQ ID NO: 1050729 - RNA, 24 nt, Human
uuuguuggauauaugcuuagaagu

SEQ ID NO: 1050730 - RNA, 22 nt, Human
aaguaaaugugagggccaagau

SEQ ID NO: 1050731 - RNA, 24 nt, Human
aauuuccacuaccagagccaaaag

SEQ ID NO: 1050732 - RNA, 20 nt, Human
acugauaacagaaaaguaaa

SEQ ID NO: 1050733 - RNA, 24 nt, Human
agaaaaguaaaugugagggccaag

SEQ ID NO: 1050734 - RNA, 28 nt, Human
agggccaagaugaugauugugaaauuuu

SEQ ID NO: 1050735 - RNA, 21 nt, Human
cccuggauaacggaaaaagaa

SEQ ID NO: 1050736 - RNA, 18 nt, Human
gagggccaagaugaugau

SEQ ID NO: 1050737 - RNA, 27 nt, Human
gauaacggaaaaagaaaagggagggcc

SEQ ID NO: 1050738 - RNA, 22 nt, Human
gauaacggaaaaagaaaagucc

SEQ ID NO: 1050739 - RNA, 24 nt, Human
ggcaucugucauaguaacucacgc

SEQ ID NO: 1050740 - RNA, 21 nt, Human
gugagggccaagaugaugauu

SEQ ID NO: 1050741 - RNA, 24 nt, Human
uaaauuguauguucugaaguuacu

SEQ ID NO: 1050742 - RNA, 18 nt, Human
uaacucacgcauuucccu

SEQ ID NO: 1050743 - RNA, 22 nt, Human
uccacuaccagagccaaaaguc

SEQ ID NO: 1050744 - RNA, 24 nt, Human
ucccuggauaacggaaaaagaaaa

SEQ ID NO: 1050745 - RNA, 19 nt, Human
ugucauaguaacucacgca

SEQ ID NO: 1050746 - RNA, 25 nt, Human
uuaauugucuuuuuucucuuuuucc

SEQ ID NO: 1050747 - RNA, 22 nt, Human
acuaaaguacaaaaaagccugg

SEQ ID NO: 1050748 - RNA, 21 nt, Human
caaaaaagccugaacaguaug

SEQ ID NO: 1050749 - RNA, 19 nt, Human
caguaaguuuucuuaaucc

SEQ ID NO: 1050750 - RNA, 20 nt, Human
gaguucccaaacaguaaguu

SEQ ID NO: 1050751 - RNA, 24 nt, Human
gcuuucggaaguccccaaagccag

SEQ ID NO: 1050752 - RNA, 19 nt, Human
uacaaaaaagccugaacag

SEQ ID NO: 1050753 - RNA, 21 nt, Human
uauaucuauguucucaccaaa

SEQ ID NO: 1050754 - RNA, 24 nt, Human
uauauggaguucccaaacaguaag

SEQ ID NO: 1050755 - RNA, 21 nt, Human
ucaacagugaagggcucccuu

SEQ ID NO: 1050756 - RNA, 18 nt, Human
ugacacuaaaguacaaaa

SEQ ID NO: 1050757 - RNA, 27 nt, Human
uuuuuuuuugccuuuuacaaauuuuuu

SEQ ID NO: 1050758 - RNA, 24 nt, Human
uuuuuuuuuuuuuuuuuugccuuu

SEQ ID NO: 1050759 - RNA, 25 nt, Human
uuuuuuuuuuuuuuuuuuugccuuu

SEQ ID NO: 1050760 - RNA, 21 nt, Human
uuuuuuuuuuuuuuuuuuugg

SEQ ID NO: 1050761 - RNA, 20 nt, Human
aacucccgccaaagcagcag

SEQ ID NO: 1050762 - RNA, 23 nt, Human
caaagcagcagcuccgcaaagcc

SEQ ID NO: 1050763 - RNA, 22 nt, Human
ccucacaccagcuuccaacucc

SEQ ID NO: 1050764 - RNA, 21 nt, Human
cucccgccaaagcagcagcuc

SEQ ID NO: 1050765 - RNA, 21 nt, Human
ucccgccaaagcagcagcucc

SEQ ID NO: 1050766 - RNA, 19 nt, Human
uccgcaaagccgccacaag

SEQ ID NO: 1050767 - RNA, 22 nt, Human
uccgcaaagccgccacaaggcg

SEQ ID NO: 1050768 - RNA, 22 nt, Human
aaaccccgucuccaccaaaaaa

SEQ ID NO: 1050769 - RNA, 19 nt, Human
aacacagcgaaaccccguc

SEQ ID NO: 1050770 - RNA, 20 nt, Human
aacacagcgaaaccccgucu

SEQ ID NO: 1050771 - RNA, 21 nt, Human
aacacagcgaaaccccgucuc

SEQ ID NO: 1050772 - RNA, 23 nt, Human
aacucauuacuucccaaaguccc

SEQ ID NO: 1050773 - RNA, 22 nt, Human
aagcacuuuaaagggggggguu

SEQ ID NO: 1050774 - RNA, 21 nt, Human
acacagcgaaaccccgucucc

SEQ ID NO: 1050775 - RNA, 21 nt, Human
acacguagaucaccaguccuc

SEQ ID NO: 1050776 - RNA, 21 nt, Human
agccagcgccgcggccggacg

SEQ ID NO: 1050777 - RNA, 21 nt, Human
aggaauccagcuacccucgcc

SEQ ID NO: 1050778 - RNA, 21 nt, Human
aggccgaggcuggcggaucac

SEQ ID NO: 1050779 - RNA, 21 nt, Human
aggcugaggcaggagaaucag

SEQ ID NO: 1050780 - RNA, 24 nt, Human
agguguggcggcgcgcgccuguaa

SEQ ID NO: 1050781 - RNA, 18 nt, Human
aguaagugaaccagacuc

SEQ ID NO: 1050782 - RNA, 23 nt, Human
agucagguguggcggcgcgcgcc

SEQ ID NO: 1050783 - RNA, 20 nt, Human
aguuuuuacaaaaaugacag

SEQ ID NO: 1050784 - RNA, 21 nt, Human
auuuugggaagaaguucuuua

SEQ ID NO: 1050785 - RNA, 18 nt, Human
caaaauagcauccaaagc

SEQ ID NO: 1050786 - RNA, 23 nt, Human
caaucaacucauuacuucccaaa

SEQ ID NO: 1050787 - RNA, 18 nt, Human
cacucggcaggcugaggc

SEQ ID NO: 1050788 - RNA, 20 nt, Human
cacucggcaggcugaggcag

SEQ ID NO: 1050789 - RNA, 24 nt, Human
cacugcuguaggagcgcccgggcc

SEQ ID NO: 1050790 - RNA, 21 nt, Human
cagcaguacaguccagcuucg

SEQ ID NO: 1050791 - RNA, 21 nt, Human
caggaucucuccacagccgug

SEQ ID NO: 1050792 - RNA, 23 nt, Human
cccggccaacacagcgaaacccc

SEQ ID NO: 1050793 - RNA, 24 nt, Human
cccggccaacacagcgaaaccccg

SEQ ID NO: 1050794 - RNA, 22 nt, Human
cccuugaaaaagcacacguaga

SEQ ID NO: 1050795 - RNA, 21 nt, Human
ccucaaucauuaaaaaaacuc

SEQ ID NO: 1050796 - RNA, 18 nt, Human
ccucgggaggccgaggcu

SEQ ID NO: 1050797 - RNA, 19 nt, Human
ccucgggaggccgaggcug

SEQ ID NO: 1050798 - RNA, 26 nt, Human
ccuguaaucgcaggcacucggcaggc

SEQ ID NO: 1050799 - RNA, 23 nt, Human
cgccuguaaucgcaggcacucgg

SEQ ID NO: 1050800 - RNA, 23 nt, Human
cgcggccggacgguuacuaggcc

SEQ ID NO: 1050801 - RNA, 18 nt, Human
cgcgguuaggagcuggag

SEQ ID NO: 1050802 - RNA, 24 nt, Human
cggcaggcugaggcaggagaauca

SEQ ID NO: 1050803 - RNA, 23 nt, Human
cgucugcaaucccggcaccucgg

SEQ ID NO: 1050804 - RNA, 24 nt, Human
cgucugcaaucccggcaccucggg

SEQ ID NO: 1050805 - RNA, 21 nt, Human
cucaaggucaaucaacucauu

SEQ ID NO: 1050806 - RNA, 24 nt, Human
cuccacagccgugcaggccuagcu

SEQ ID NO: 1050807 - RNA, 23 nt, Human
cucuguugcccaagcuggagugc

SEQ ID NO: 1050808 - RNA, 23 nt, Human
cugcuguaggagcgcccgggccu

SEQ ID NO: 1050809 - RNA, 18 nt, Human
cuguaggagcgcccgggc

SEQ ID NO: 1050810 - RNA, 21 nt, Human
gcagcaguacaguccagcuuc

SEQ ID NO: 1050811 - RNA, 22 nt, Human
gcggccggacgguuacuaggcc

SEQ ID NO: 1050812 - RNA, 31 nt, Human
gcuaugugauuauuuauuuauuuauuuauuu

SEQ ID NO: 1050813 - RNA, 26 nt, Human
gcuggagugcaguaagugaaccaguc

SEQ ID NO: 1050814 - RNA, 18 nt, Human
ggagguugcagugagcca

SEQ ID NO: 1050815 - RNA, 18 nt, Human
ggagguugcagugagcca

SEQ ID NO: 1050816 - RNA, 19 nt, Human
ggagguugcagugagccag

SEQ ID NO: 1050817 - RNA, 25 nt, Human
ggagguugcagugagccagagaugg

SEQ ID NO: 1050818 - RNA, 23 nt, Human
gggaggccgaggcuggcggauca

SEQ ID NO: 1050819 - RNA, 24 nt, Human
gggagguugcagugagccagagau

SEQ ID NO: 1050820 - RNA, 22 nt, Human
uacaaaauagcauccaaagcac

SEQ ID NO: 1050821 - RNA, 19 nt, Human
uagaaauccaucucaacuc

SEQ ID NO: 1050822 - RNA, 21 nt, Human
ucaaucaacucauuacuuccc

SEQ ID NO: 1050823 - RNA, 22 nt, Human
ucagcucccuugaaaaagcaca

SEQ ID NO: 1050824 - RNA, 19 nt, Human
ucaggcagggagguugcag

SEQ ID NO: 1050825 - RNA, 24 nt, Human
ucaggcagggagguugcagugagc

SEQ ID NO: 1050826 - RNA, 21 nt, Human
uccaccaaaaaaauacgaaaa

SEQ ID NO: 1050827 - RNA, 21 nt, Human
ucccaaagucccuguagggug

SEQ ID NO: 1050828 - RNA, 22 nt, Human
ucccuguagggugaauccaucc

SEQ ID NO: 1050829 - RNA, 18 nt, Human
ucgcgguuaggagcugga

SEQ ID NO: 1050830 - RNA, 21 nt, Human
ucuccacagccgugcaggccu

SEQ ID NO: 1050831 - RNA, 24 nt, Human
ucuguugcccaagcuggagugcag

SEQ ID NO: 1050832 - RNA, 23 nt, Human
ucuugcucuguugcccaagcugg

SEQ ID NO: 1050833 - RNA, 24 nt, Human
ucuugcucuguugcccaagcugga

SEQ ID NO: 1050834 - RNA, 22 nt, Human
ugagauggagucuugcucuguu

SEQ ID NO: 1050835 - RNA, 19 nt, Human
ugaggcaggagaaucaggc

SEQ ID NO: 1050836 - RNA, 24 nt, Human
ugcucuguugcccaagcuggagug

SEQ ID NO: 1050837 - RNA, 23 nt, Human
uggcaggugacuaguaucuuuaa

SEQ ID NO: 1050838 - RNA, 22 nt, Human
uuaggagcuggagaccagcccg

SEQ ID NO: 1050839 - RNA, 22 nt, Human
uuauuuauuuauuuauuuauug

SEQ ID NO: 1050840 - RNA, 20 nt, Human
uuccaugacuuauggcaggu

SEQ ID NO: 1050841 - RNA, 19 nt, Human
uugcagugagccagagauc

SEQ ID NO: 1050842 - RNA, 18 nt, Human
uugcccaagcuggagugc

SEQ ID NO: 1050843 - RNA, 22 nt, Human
uuuauuuauugagauggagucu

SEQ ID NO: 1050844 - RNA, 22 nt, Human
augaagaacagcuuuauuaacu

SEQ ID NO: 1050845 - RNA, 22 nt, Human
cuuagucuucucaauguuaaaa

SEQ ID NO: 1050846 - RNA, 18 nt, Human
gaacagcuuuauuaacug

SEQ ID NO: 1050847 - RNA, 24 nt, Human
uagaugaagaacagcuuuauuaac

SEQ ID NO: 1050848 - RNA, 19 nt, Human
ugaaauccauuuauauuug

SEQ ID NO: 1050849 - RNA, 19 nt, Human
uggaaaagugacuguggcg

SEQ ID NO: 1050850 - RNA, 23 nt, Human
uggaaaagugacuguggcgccaa

SEQ ID NO: 1050851 - RNA, 22 nt, Human
uaccuuugucagagcuguccuc

SEQ ID NO: 1050852 - RNA, 19 nt, Human
ucagaaaguaacuggcaaa

SEQ ID NO: 1050853 - RNA, 19 nt, Human
ugcauaccuuugucagagc

SEQ ID NO: 1050854 - RNA, 22 nt, Human
aaaauacaaauugagucauaaa

SEQ ID NO: 1050855 - RNA, 22 nt, Human
aaaggccaccucccaucuuuac

SEQ ID NO: 1050856 - RNA, 22 nt, Human
aagcggcaaaggccaccuccca

SEQ ID NO: 1050857 - RNA, 23 nt, Human
aagcggcaaaggccaccucccau

SEQ ID NO: 1050858 - RNA, 24 nt, Human
aaucuguagacaaauuggagcugg

SEQ ID NO: 1050859 - RNA, 21 nt, Human
acagcacauucuuauaaacag

SEQ ID NO: 1050860 - RNA, 21 nt, Human
agaagauggaaagcggcaaag

SEQ ID NO: 1050861 - RNA, 18 nt, Human
agaguguguacaaaacug

SEQ ID NO: 1050862 - RNA, 18 nt, Human
aucuauucuauggaagag

SEQ ID NO: 1050863 - RNA, 19 nt, Human
caucuuuaccagcagucuc

SEQ ID NO: 1050864 - RNA, 20 nt, Human
cgugaagaaacugcagugag

SEQ ID NO: 1050865 - RNA, 20 nt, Human
uaaaacuauaaaacaaauuu

SEQ ID NO: 1050866 - RNA, 25 nt, Human
uacaaauugagucauaaaacuauaa

SEQ ID NO: 1050867 - RNA, 19 nt, Human
ucuccugauaugaugaagg

SEQ ID NO: 1050868 - RNA, 23 nt, Human
ugagucauaaaacuauaaaacaa

SEQ ID NO: 1050869 - RNA, 18 nt, Human
uggaaagcggcaaaggcc

SEQ ID NO: 1050870 - RNA, 22 nt, Human
uggggaaguaaaaagaauaaau

SEQ ID NO: 1050871 - RNA, 20 nt, Human
aaacuucccacauccaugca

SEQ ID NO: 1050872 - RNA, 21 nt, Human
aauucagugagagaggauuca

SEQ ID NO: 1050873 - RNA, 23 nt, Human
acagcaauguaagcaauggcauc

SEQ ID NO: 1050874 - RNA, 18 nt, Human
acuccuauaaccaagaag

SEQ ID NO: 1050875 - RNA, 22 nt, Human
acuucccacauccaugcacucc

SEQ ID NO: 1050876 - RNA, 26 nt, Human
agaagaaacaucuuggcucugaaaag

SEQ ID NO: 1050877 - RNA, 25 nt, Human
ccuauaaccaagaagcagaagaaac

SEQ ID NO: 1050878 - RNA, 24 nt, Human
cgugacuaaugucaaaaggguaaa

SEQ ID NO: 1050879 - RNA, 19 nt, Human
ggcucugaaaagacuggca

SEQ ID NO: 1050880 - RNA, 23 nt, Human
uacaacaaauagaacagcaaugu

SEQ ID NO: 1050881 - RNA, 20 nt, Human
ucaaagugguaucaaguaga

SEQ ID NO: 1050882 - RNA, 20 nt, Human
uccaugcacuccuauaacca

SEQ ID NO: 1050883 - RNA, 23 nt, Human
aaaaacauuacauuuuagccucc

SEQ ID NO: 1050884 - RNA, 21 nt, Human
aaacaaacacacacuugggaa

SEQ ID NO: 1050885 - RNA, 18 nt, Human
aaacugaccccaaaccac

SEQ ID NO: 1050886 - RNA, 22 nt, Human
aaacugaccccaaaccacaacc

SEQ ID NO: 1050887 - RNA, 22 nt, Human
aaagaggucagcagggaagcac

SEQ ID NO: 1050888 - RNA, 18 nt, Human
aaagauguguacuuauuc

SEQ ID NO: 1050889 - RNA, 18 nt, Human
aaagugcugggauuacaa

SEQ ID NO: 1050890 - RNA, 24 nt, Human
aaagugcugggauuacaagcguga

SEQ ID NO: 1050891 - RNA, 18 nt, Human
aacaaacacacacuuggg

SEQ ID NO: 1050892 - RNA, 19 nt, Human
aagugcugggauuacaagc

SEQ ID NO: 1050893 - RNA, 19 nt, Human
aagugcugggauuacaagc

SEQ ID NO: 1050894 - RNA, 26 nt, Human
aagugcugggauuacaagcgugagcc

SEQ ID NO: 1050895 - RNA, 18 nt, Human
acgggguuucaccauguu

SEQ ID NO: 1050896 - RNA, 19 nt, Human
acgggguuucaccauguua

SEQ ID NO: 1050897 - RNA, 20 nt, Human
acgggguuucaccauguuag

SEQ ID NO: 1050898 - RNA, 24 nt, Human
acgggguuucaccauguuagccag

SEQ ID NO: 1050899 - RNA, 18 nt, Human
acugcaagcuccgccucc

SEQ ID NO: 1050900 - RNA, 22 nt, Human
acuggaugacaaauauaaaaca

SEQ ID NO: 1050901 - RNA, 23 nt, Human
agaaaaaugagacacucccuuau

SEQ ID NO: 1050902 - RNA, 18 nt, Human
agaaagagggaaguagaa

SEQ ID NO: 1050903 - RNA, 22 nt, Human
agaaagagggaaguagaaaaau

SEQ ID NO: 1050904 - RNA, 23 nt, Human
agaaauaagcucaacuccauauu

SEQ ID NO: 1050905 - RNA, 25 nt, Human
aggcuggagugcaguggcgccaucu

SEQ ID NO: 1050906 - RNA, 22 nt, Human
aguagagacgggguuucaccau

SEQ ID NO: 1050907 - RNA, 19 nt, Human
aguagcugggacuacaggc

SEQ ID NO: 1050908 - RNA, 23 nt, Human
aguagcugggacuacaggcacgu

SEQ ID NO: 1050909 - RNA, 23 nt, Human
aguagcugggacuacaggcacgu

SEQ ID NO: 1050910 - RNA, 21 nt, Human
agugcaguggcgccaucucag

SEQ ID NO: 1050911 - RNA, 21 nt, Human
augacaaauauaaaacaaaca

SEQ ID NO: 1050912 - RNA, 22 nt, Human
augacaaauauaaaacaaacac

SEQ ID NO: 1050913 - RNA, 19 nt, Human
augguguuuuccaaaacag

SEQ ID NO: 1050914 - RNA, 20 nt, Human
auucucacagccagcaaggc

SEQ ID NO: 1050915 - RNA, 22 nt, Human
caaaacagaaaauccuccucgc

SEQ ID NO: 1050916 - RNA, 22 nt, Human
caaaauugaugucucaaggcca

SEQ ID NO: 1050917 - RNA, 24 nt, Human
caaagugcugggauuacaagcgug

SEQ ID NO: 1050918 - RNA, 22 nt, Human
cacaacccaauuuacaugcuau

SEQ ID NO: 1050919 - RNA, 24 nt, Human
cacaacccaauuuacaugcuaucu

SEQ ID NO: 1050920 - RNA, 18 nt, Human
caccauguuagccaggau

SEQ ID NO: 1050921 - RNA, 22 nt, Human
caccauguuagccaggaugguc

SEQ ID NO: 1050922 - RNA, 24 nt, Human
caccauguuagccaggauggucuc

SEQ ID NO: 1050923 - RNA, 22 nt, Human
caccgcacccagccagucaaaa

SEQ ID NO: 1050924 - RNA, 22 nt, Human
cacgccauucuccugccucagc

SEQ ID NO: 1050925 - RNA, 18 nt, Human
cagcucacugcaagcucc

SEQ ID NO: 1050926 - RNA, 23 nt, Human
caggaauacuauugccaguugcu

SEQ ID NO: 1050927 - RNA, 22 nt, Human
caggauggucuccaucuccuga

SEQ ID NO: 1050928 - RNA, 23 nt, Human
cauagaaguuucuaauauuuucc

SEQ ID NO: 1050929 - RNA, 22 nt, Human
ccaaagugcugggauuacaagc

SEQ ID NO: 1050930 - RNA, 24 nt, Human
ccaaagugcugggauuacaagcgu

SEQ ID NO: 1050931 - RNA, 20 nt, Human
ccaccacgccuggcuaauuu

SEQ ID NO: 1050932 - RNA, 22 nt, Human
ccagccagucaaaaugucuucu

SEQ ID NO: 1050933 - RNA, 21 nt, Human
ccccaaaccacaacccaauuu

SEQ ID NO: 1050934 - RNA, 24 nt, Human
ccgagggaaaucacccaaacgaac

SEQ ID NO: 1050935 - RNA, 22 nt, Human
ccgcacccagccagucaaaaug

SEQ ID NO: 1050936 - RNA, 26 nt, Human
ccgccugccucagccucccaaagugc

SEQ ID NO: 1050937 - RNA, 24 nt, Human
ccggaguagcugggacuacaggca

SEQ ID NO: 1050938 - RNA, 20 nt, Human
ccuccucgcuacuauuucau

SEQ ID NO: 1050939 - RNA, 21 nt, Human
ccugaccucgugauccgccug

SEQ ID NO: 1050940 - RNA, 24 nt, Human
ccugccucagccucccaaagugcu

SEQ ID NO: 1050941 - RNA, 23 nt, Human
ccugccucagccuccggaguagc

SEQ ID NO: 1050942 - RNA, 19 nt, Human
cgccucccggguucacgcc

SEQ ID NO: 1050943 - RNA, 24 nt, Human
cgugauccgccugccucagccucc

SEQ ID NO: 1050944 - RNA, 18 nt, Human
cucacagccagcaaggca

SEQ ID NO: 1050945 - RNA, 24 nt, Human
cucagccuccggaguagcugggac

SEQ ID NO: 1050946 - RNA, 24 nt, Human
cuccccucauuuuauuuucaggaa

SEQ ID NO: 1050947 - RNA, 21 nt, Human
cucccggguucacgccauucu

SEQ ID NO: 1050948 - RNA, 24 nt, Human
cuccugaccucgugauccgccugc

SEQ ID NO: 1050949 - RNA, 19 nt, Human
cugaaggcuguucggguga

SEQ ID NO: 1050950 - RNA, 24 nt, Human
cugccucagccucccaaagugcug

SEQ ID NO: 1050951 - RNA, 23 nt, Human
cugccucagccuccggaguagcu

SEQ ID NO: 1050952 - RNA, 24 nt, Human
cuugcucuguugccuaggcuggag

SEQ ID NO: 1050953 - RNA, 21 nt, Human
gaagcaccugaaggcuguucg

SEQ ID NO: 1050954 - RNA, 18 nt, Human
gaaggaaauacguugcaa

SEQ ID NO: 1050955 - RNA, 22 nt, Human
gaccucgugauccgccugccuc

SEQ ID NO: 1050956 - RNA, 24 nt, Human
gaccucgugauccgccugccucag

SEQ ID NO: 1050957 - RNA, 21 nt, Human
gagacggagucuugcucuguu

SEQ ID NO: 1050958 - RNA, 24 nt, Human
gagacgggguuucaccauguuagc

SEQ ID NO: 1050959 - RNA, 18 nt, Human
gaguguccauuauuuugu

SEQ ID NO: 1050960 - RNA, 22 nt, Human
gaugacaaauauaaaacaaaca

SEQ ID NO: 1050961 - RNA, 18 nt, Human
gauuacaagcgugagcca

SEQ ID NO: 1050962 - RNA, 25 nt, Human
gccucccggguucacgccauucucc

SEQ ID NO: 1050963 - RNA, 23 nt, Human
gccuggcuaauuuuuuguauuuu

SEQ ID NO: 1050964 - RNA, 20 nt, Human
gcuggagugcaguggcgcca

SEQ ID NO: 1050965 - RNA, 21 nt, Human
gcugggauuacaagcgugagc

SEQ ID NO: 1050966 - RNA, 18 nt, Human
ggacaggaaauugaguga

SEQ ID NO: 1050967 - RNA, 23 nt, Human
gggguuucaccauguuagccagg

SEQ ID NO: 1050968 - RNA, 22 nt, Human
ggguuucaccauguuagccagg

SEQ ID NO: 1050969 - RNA, 20 nt, Human
ggucuccaucuccugaccuc

SEQ ID NO: 1050970 - RNA, 24 nt, Human
gguuucaccauguuagccaggaug

SEQ ID NO: 1050971 - RNA, 23 nt, Human
guagagacgggguuucaccaugu

SEQ ID NO: 1050972 - RNA, 19 nt, Human
guaguuucuaauauuuucc

SEQ ID NO: 1050973 - RNA, 24 nt, Human
gugauccgccugccucagccuccc

SEQ ID NO: 1050974 - RNA, 24 nt, Human
uaaaacaaacacacacuugggaaa

SEQ ID NO: 1050975 - RNA, 19 nt, Human
uaaagggugggcaauuuaa

SEQ ID NO: 1050976 - RNA, 19 nt, Human
uaacccaaaacaaagcugg

SEQ ID NO: 1050977 - RNA, 20 nt, Human
uaagugucucccucauucuu

SEQ ID NO: 1050978 - RNA, 24 nt, Human
uaauuuuuuguauuuuuaguagag

SEQ ID NO: 1050979 - RNA, 25 nt, Human
uaauuuuuuguauuuuuaguagaga

SEQ ID NO: 1050980 - RNA, 25 nt, Human
uacaagccuuaaguauuacugugca

SEQ ID NO: 1050981 - RNA, 24 nt, Human
uacaagcgugagccaccgcaccca

SEQ ID NO: 1050982 - RNA, 22 nt, Human
uacaggcacgugccaccacgcc

SEQ ID NO: 1050983 - RNA, 22 nt, Human
uagagacgggguuucaccaugu

SEQ ID NO: 1050984 - RNA, 24 nt, Human
uagccaggauggucuccaucuccu

SEQ ID NO: 1050985 - RNA, 19 nt, Human
uaggagcgaccuccaccgc

SEQ ID NO: 1050986 - RNA, 24 nt, Human
uaguagagacgggguuucaccaug

SEQ ID NO: 1050987 - RNA, 26 nt, Human
uaguagagacgggguuucaccauguu

SEQ ID NO: 1050988 - RNA, 21 nt, Human
uauagcaaguguaugaaaaag

SEQ ID NO: 1050989 - RNA, 21 nt, Human
uauccugcuacuuccccuuca

SEQ ID NO: 1050990 - RNA, 27 nt, Human
uaucuaucuaucuuuguuauccacaua

SEQ ID NO: 1050991 - RNA, 20 nt, Human
uauggaaaugcaauggacug

SEQ ID NO: 1050992 - RNA, 24 nt, Human
ucaccauguuagccaggauggucu

SEQ ID NO: 1050993 - RNA, 18 nt, Human
ucacugcaagcuccgccu

SEQ ID NO: 1050994 - RNA, 19 nt, Human
ucacugcaagcuccgccuc

SEQ ID NO: 1050995 - RNA, 24 nt, Human
ucacugcaagcuccgccucccggg

SEQ ID NO: 1050996 - RNA, 23 nt, Human
ucaggaauaauauaaauacugca

SEQ ID NO: 1050997 - RNA, 19 nt, Human
uccaaaugaagaaaaacaa

SEQ ID NO: 1050998 - RNA, 21 nt, Human
uccacauauaaaauucucaca

SEQ ID NO: 1050999 - RNA, 23 nt, Human
uccacauauaaaauucucacagc

SEQ ID NO: 1051000 - RNA, 18 nt, Human
ucccaaagugcugggauu

SEQ ID NO: 1051001 - RNA, 24 nt, Human
ucccaaagugcugggauuacaagc

SEQ ID NO: 1051002 - RNA, 21 nt, Human
ucccggguucacgccauucuc

SEQ ID NO: 1051003 - RNA, 24 nt, Human
ucccggguucacgccauucuccug

SEQ ID NO: 1051004 - RNA, 24 nt, Human
uccggaguagcugggacuacaggc

SEQ ID NO: 1051005 - RNA, 22 nt, Human
ucuaaugguguuuuccaaaaca

SEQ ID NO: 1051006 - RNA, 21 nt, Human
ucucaaaucuuacucucucua

SEQ ID NO: 1051007 - RNA, 24 nt, Human
ucucaaaucuuacucucucuaacc

SEQ ID NO: 1051008 - RNA, 24 nt, Human
ucuccugccucagccuccggagua

SEQ ID NO: 1051009 - RNA, 28 nt, Human
ucugccagaaaguauucuggucccguga

SEQ ID NO: 1051010 - RNA, 24 nt, Human
ucuguugccuaggcuggagugcag

SEQ ID NO: 1051011 - RNA, 20 nt, Human
ucuugcucuguugccuaggc

SEQ ID NO: 1051012 - RNA, 23 nt, Human
ucuugcucuguugccuaggcugg

SEQ ID NO: 1051013 - RNA, 24 nt, Human
ucuugcucuguugccuaggcugga

SEQ ID NO: 1051014 - RNA, 19 nt, Human
ugaccccaaaccacaaccc

SEQ ID NO: 1051015 - RNA, 22 nt, Human
ugcaguggcgccaucucagcuc

SEQ ID NO: 1051016 - RNA, 24 nt, Human
ugccaguugcuuagggaauauucu

SEQ ID NO: 1051017 - RNA, 19 nt, Human
ugccuaggcuggagugcag

SEQ ID NO: 1051018 - RNA, 20 nt, Human
ugccuaggcuggagugcagu

SEQ ID NO: 1051019 - RNA, 22 nt, Human
ugccuaggcuggagugcagugg

SEQ ID NO: 1051020 - RNA, 24 nt, Human
ugccuaggcuggagugcaguggcg

SEQ ID NO: 1051021 - RNA, 24 nt, Human
ugccucagccucccaaagugcugg

SEQ ID NO: 1051022 - RNA, 24 nt, Human
ugccucagccuccggaguagcugg

SEQ ID NO: 1051023 - RNA, 27 nt, Human
ugcugggauuacaagcgugagccaccg

SEQ ID NO: 1051024 - RNA, 18 nt, Human
uggagugcaguggcgcca

SEQ ID NO: 1051025 - RNA, 28 nt, Human
uggagugcaguggcgccauccuagcacg

SEQ ID NO: 1051026 - RNA, 23 nt, Human
uggagugcaguggcgccaucuca

SEQ ID NO: 1051027 - RNA, 28 nt, Human
uggagugcaguggcgccauggcucuagc

SEQ ID NO: 1051028 - RNA, 24 nt, Human
uggcgccaucucagcucacugcaa

SEQ ID NO: 1051029 - RNA, 21 nt, Human
ugggacuacaggcacgugcca

SEQ ID NO: 1051030 - RNA, 22 nt, Human
ugggacuacaggcacgugccac

SEQ ID NO: 1051031 - RNA, 24 nt, Human
ugggacuacaggcacgugccacca

SEQ ID NO: 1051032 - RNA, 19 nt, Human
ugggauuacaagcgugagc

SEQ ID NO: 1051033 - RNA, 21 nt, Human
ugggauuacaagcgugagcca

SEQ ID NO: 1051034 - RNA, 22 nt, Human
ugggauuacaagcgugagccac

SEQ ID NO: 1051035 - RNA, 23 nt, Human
ugggauuacaagcgugagccacc

SEQ ID NO: 1051036 - RNA, 24 nt, Human
ugggauuacaagcgugagccaccg

SEQ ID NO: 1051037 - RNA, 18 nt, Human
ugucucccucauucagau

SEQ ID NO: 1051038 - RNA, 20 nt, Human
uguggucuuuaccaucuguc

SEQ ID NO: 1051039 - RNA, 20 nt, Human
uguugccuaggcuggagugc

SEQ ID NO: 1051040 - RNA, 22 nt, Human
uguuucugcagaggaugggcuu

SEQ ID NO: 1051041 - RNA, 18 nt, Human
uuaguagagacgggguuu

SEQ ID NO: 1051042 - RNA, 22 nt, Human
uuaguagagacgggguuucacc

SEQ ID NO: 1051043 - RNA, 24 nt, Human
uuaguagagacgggguuucaccau

SEQ ID NO: 1051044 - RNA, 20 nt, Human
uuccacauaguaccaacagc

SEQ ID NO: 1051045 - RNA, 24 nt, Human
uucuaaugguguuuuccaaaacag

SEQ ID NO: 1051046 - RNA, 21 nt, Human
uucuggguuaaauaauuaugu

SEQ ID NO: 1051047 - RNA, 24 nt, Human
uugccuaggcuggagugcaguggc

SEQ ID NO: 1051048 - RNA, 24 nt, Human
uugcucuguugccuaggcuggagu

SEQ ID NO: 1051049 - RNA, 23 nt, Human
uuguauuuuuaguagagacgggg

SEQ ID NO: 1051050 - RNA, 19 nt, Human
uuucaccauguuagccagg

SEQ ID NO: 1051051 - RNA, 20 nt, Human
uuucaccauguuagccagga

SEQ ID NO: 1051052 - RNA, 24 nt, Human
uuuuuaguagagacgggguuucac

SEQ ID NO: 1051053 - RNA, 21 nt, Human
uuuuuguauuuuuaguagaga

SEQ ID NO: 1051054 - RNA, 24 nt, Human
uuuuuuguauuuuuaguagagacg

SEQ ID NO: 1051055 - RNA, 25 nt, Human
aaaguuucucuuuuucucccuuguc

SEQ ID NO: 1051056 - RNA, 19 nt, Human
agauaggaaaaggaacuga

SEQ ID NO: 1051057 - RNA, 21 nt, Human
cggcaaaagauaggaaaagga

SEQ ID NO: 1051058 - RNA, 27 nt, Human
cugucaccaaaaggaggauggaaaauc

SEQ ID NO: 1051059 - RNA, 20 nt, Human
ggcaaaagauaggaaaagga

SEQ ID NO: 1051060 - RNA, 21 nt, Human
uacggcaaaagauaggaaaag

SEQ ID NO: 1051061 - RNA, 19 nt, Human
ugcugucaccaaaaggagg

SEQ ID NO: 1051062 - RNA, 22 nt, Human
uggaaugaguuugggauuccuc

SEQ ID NO: 1051063 - RNA, 19 nt, Human
cuucaauaaaguguaguau

SEQ ID NO: 1051064 - RNA, 23 nt, Human
uaccagaugaauuaacgcaggaa

SEQ ID NO: 1051065 - RNA, 18 nt, Human
uaguauagugaauggaug

SEQ ID NO: 1051066 - RNA, 19 nt, Human
uaguauagugaauggaugg

SEQ ID NO: 1051067 - RNA, 24 nt, Human
ugugaaacaaacagauuuauuuga

SEQ ID NO: 1051068 - RNA, 26 nt, Human
agaaaagaaaauaguaauggagagga

SEQ ID NO: 1051069 - RNA, 25 nt, Human
auaguaauggagaggaugaaguuua

SEQ ID NO: 1051070 - RNA, 19 nt, Human
caccacagaaucaaagaug

SEQ ID NO: 1051071 - RNA, 24 nt, Human
gucaccaccaccugagcuucugga

SEQ ID NO: 1051072 - RNA, 23 nt, Human
uacugaaaauacauugaaagaca

SEQ ID NO: 1051073 - RNA, 21 nt, Human
aaaaauaagguuaccaaaggc

SEQ ID NO: 1051074 - RNA, 23 nt, Human
aaaacuaaaauguccacaucccu

SEQ ID NO: 1051075 - RNA, 20 nt, Human
aaacaagaccuccaugagca

SEQ ID NO: 1051076 - RNA, 20 nt, Human
aaacagauggaauuaccaac

SEQ ID NO: 1051077 - RNA, 18 nt, Human
aaacugcagcggcugaac

SEQ ID NO: 1051078 - RNA, 19 nt, Human
aaaggcucaguggucaggu

SEQ ID NO: 1051079 - RNA, 20 nt, Human
aaaugaagaggagcagagcc

SEQ ID NO: 1051080 - RNA, 21 nt, Human
aaauuccauuccuuggcaugg

SEQ ID NO: 1051081 - RNA, 22 nt, Human
aacacucacaaaugcagaggua

SEQ ID NO: 1051082 - RNA, 18 nt, Human
aacacuguucucaaaugu

SEQ ID NO: 1051083 - RNA, 19 nt, Human
aaccaccccccucgcccca

SEQ ID NO: 1051084 - RNA, 24 nt, Human
aaccguuagaaccuacuaauccug

SEQ ID NO: 1051085 - RNA, 26 nt, Human
aaccuacuaauccugccaaccaucca

SEQ ID NO: 1051086 - RNA, 22 nt, Human
aaccuccuccugaaccccaaga

SEQ ID NO: 1051087 - RNA, 18 nt, Human
aacuagauaugauucaga

SEQ ID NO: 1051088 - RNA, 18 nt, Human
aagaccaacccacagagc

SEQ ID NO: 1051089 - RNA, 18 nt, Human
aagacuccagcccucaca

SEQ ID NO: 1051090 - RNA, 21 nt, Human
aagagucugcugcccuucagg

SEQ ID NO: 1051091 - RNA, 20 nt, Human
aagccacaccccugccaccu

SEQ ID NO: 1051092 - RNA, 23 nt, Human
aaugcucagccgccagcacagau

SEQ ID NO: 1051093 - RNA, 24 nt, Human
acacaaaaagcaaauuucucagaa

SEQ ID NO: 1051094 - RNA, 19 nt, Human
acaccccugccaccugcug

SEQ ID NO: 1051095 - RNA, 27 nt, Human
acacuaccauaaucuuucaugaugagc

SEQ ID NO: 1051096 - RNA, 19 nt, Human
acagggacucaugggcaca

SEQ ID NO: 1051097 - RNA, 19 nt, Human
acagucagugccaaagaaa

SEQ ID NO: 1051098 - RNA, 22 nt, Human
acaucccuaacuggcaacccac

SEQ ID NO: 1051099 - RNA, 22 nt, Human
acccaaauaggccacauacccc

SEQ ID NO: 1051100 - RNA, 18 nt, Human
acccaccucaagccacac

SEQ ID NO: 1051101 - RNA, 19 nt, Human
acccaggccuuacaucccc

SEQ ID NO: 1051102 - RNA, 20 nt, Human
acucuggcccucacagagcg

SEQ ID NO: 1051103 - RNA, 21 nt, Human
agaauuugcuuuaagaccaac

SEQ ID NO: 1051104 - RNA, 23 nt, Human
agagacccucucagaaagcacca

SEQ ID NO: 1051105 - RNA, 19 nt, Human
agaggagcagagcccccuc

SEQ ID NO: 1051106 - RNA, 21 nt, Human
agaggaggaccagacgcugcc

SEQ ID NO: 1051107 - RNA, 19 nt, Human
agagggaacacucacaaau

SEQ ID NO: 1051108 - RNA, 25 nt, Human
agccaaacuggcgacaauggacaca

SEQ ID NO: 1051109 - RNA, 23 nt, Human
aggaccuacugauaaagcauguc

SEQ ID NO: 1051110 - RNA, 24 nt, Human
aggacuuuuccaauaaagacauau

SEQ ID NO: 1051111 - RNA, 19 nt, Human
aggccugcagcaccagcug

SEQ ID NO: 1051112 - RNA, 30 nt, Human
agggacccaggccuuacaucccccaccccu

SEQ ID NO: 1051113 - RNA, 23 nt, Human
auaaaccaccccccucgccccaa

SEQ ID NO: 1051114 - RNA, 23 nt, Human
auaaagcagaggacaauaccucc

SEQ ID NO: 1051115 - RNA, 19 nt, Human
auccugccaaccauccacu

SEQ ID NO: 1051116 - RNA, 19 nt, Human
augccuaccuguuuucagc

SEQ ID NO: 1051117 - RNA, 23 nt, Human
caaacaagaccuccaugagcaga

SEQ ID NO: 1051118 - RNA, 18 nt, Human
caaaccacaccaagaaga

SEQ ID NO: 1051119 - RNA, 23 nt, Human
caaaccucgcaacucccucccag

SEQ ID NO: 1051120 - RNA, 24 nt, Human
caaaccucgcaacucccucccagg

SEQ ID NO: 1051121 - RNA, 21 nt, Human
caacagacacuggccuccccc

SEQ ID NO: 1051122 - RNA, 18 nt, Human
caacccacagagucagcu

SEQ ID NO: 1051123 - RNA, 28 nt, Human
caacccacaucaaccccaaaagguugaa

SEQ ID NO: 1051124 - RNA, 19 nt, Human
caagacuccagcccucaca

SEQ ID NO: 1051125 - RNA, 18 nt, Human
caagauaaggcuaucccc

SEQ ID NO: 1051126 - RNA, 21 nt, Human
cacagcaacccugcuaggagc

SEQ ID NO: 1051127 - RNA, 23 nt, Human
cacagcaacccugcuaggagcac

SEQ ID NO: 1051128 - RNA, 23 nt, Human
cacauaaaccaccccccucgccc

SEQ ID NO: 1051129 - RNA, 20 nt, Human
caccagaaagagcaagguac

SEQ ID NO: 1051130 - RNA, 18 nt, Human
caccagagcccacagcac

SEQ ID NO: 1051131 - RNA, 23 nt, Human
cacugaccaggugcccaccccaa

SEQ ID NO: 1051132 - RNA, 22 nt, Human
cagaaugcuagugggcauccuc

SEQ ID NO: 1051133 - RNA, 23 nt, Human
cagagggaacacucacaaaugca

SEQ ID NO: 1051134 - RNA, 21 nt, Human
cagagucagcuggagacuaac

SEQ ID NO: 1051135 - RNA, 30 nt, Human
cagcacagauccaaacaagaccuccaugag

SEQ ID NO: 1051136 - RNA, 21 nt, Human
cagcaccagcuguggaauccc

SEQ ID NO: 1051137 - RNA, 21 nt, Human
cagcacucaaaccaccacugc

SEQ ID NO: 1051138 - RNA, 24 nt, Human
cagcugccuugcccacuggucugc

SEQ ID NO: 1051139 - RNA, 23 nt, Human
caggagaggcucgcagacaacag

SEQ ID NO: 1051140 - RNA, 23 nt, Human
cauaacaauucuuguuacaauaa

SEQ ID NO: 1051141 - RNA, 18 nt, Human
caugagcagagaaacugc

SEQ ID NO: 1051142 - RNA, 19 nt, Human
caugggcacagccuguggu

SEQ ID NO: 1051143 - RNA, 21 nt, Human
ccaaacaagaccuccaugagc

SEQ ID NO: 1051144 - RNA, 26 nt, Human
ccaagcaagccugaagagaugccugu

SEQ ID NO: 1051145 - RNA, 20 nt, Human
ccacaauaaacccugccagc

SEQ ID NO: 1051146 - RNA, 19 nt, Human
ccaccccccucgccccaaa

SEQ ID NO: 1051147 - RNA, 19 nt, Human
ccaccccccucgccccaaa

SEQ ID NO: 1051148 - RNA, 18 nt, Human
ccaccucaagccacaccc

SEQ ID NO: 1051149 - RNA, 18 nt, Human
ccacugacuccaccaagc

SEQ ID NO: 1051150 - RNA, 19 nt, Human
ccagcgcacgccggcccgc

SEQ ID NO: 1051151 - RNA, 21 nt, Human
ccagcgcacgccggcccgcgg

SEQ ID NO: 1051152 - RNA, 19 nt, Human
ccaggacagucagugccaa

SEQ ID NO: 1051153 - RNA, 19 nt, Human
cccaaauaggccacauacc

SEQ ID NO: 1051154 - RNA, 26 nt, Human
cccacaauaaacccugccagggcccc

SEQ ID NO: 1051155 - RNA, 22 nt, Human
cccacagcacucaaaccaccac

SEQ ID NO: 1051156 - RNA, 24 nt, Human
cccaccagagcccacagcacucaa

SEQ ID NO: 1051157 - RNA, 24 nt, Human
cccaccucaagccacaccccugcc

SEQ ID NO: 1051158 - RNA, 24 nt, Human
cccaggccuuacaucccccacccc

SEQ ID NO: 1051159 - RNA, 23 nt, Human
ccccaagacuccagcccucacag

SEQ ID NO: 1051160 - RNA, 24 nt, Human
ccccacccccacucugacccucac

SEQ ID NO: 1051161 - RNA, 22 nt, Human
ccccaggccaaccacacucugc

SEQ ID NO: 1051162 - RNA, 21 nt, Human
cccccacccccacucugaccc

SEQ ID NO: 1051163 - RNA, 18 nt, Human
ccccgcgucuccgccgcc

SEQ ID NO: 1051164 - RNA, 19 nt, Human
ccccgcgucuccgccgccu

SEQ ID NO: 1051165 - RNA, 21 nt, Human
ccccgcgucuccgccgccucc

SEQ ID NO: 1051166 - RNA, 18 nt, Human
ccccuccccaccagagcc

SEQ ID NO: 1051167 - RNA, 19 nt, Human
cccugccaccugcugcugc

SEQ ID NO: 1051168 - RNA, 24 nt, Human
cccugccaccugcugcugcgccca

SEQ ID NO: 1051169 - RNA, 22 nt, Human
ccgcggcggcgaccugggccuc

SEQ ID NO: 1051170 - RNA, 24 nt, Human
ccuacucucucccaaaccucgcaa

SEQ ID NO: 1051171 - RNA, 19 nt, Human
ccucagcagacaagucacc

SEQ ID NO: 1051172 - RNA, 22 nt, Human
ccucagugaccagcgcacgccg

SEQ ID NO: 1051173 - RNA, 23 nt, Human
ccuccgagccccgcgucuccgcc

SEQ ID NO: 1051174 - RNA, 22 nt, Human
ccugacccagcuaccagcaaau

SEQ ID NO: 1051175 - RNA, 18 nt, Human
ccuggcccucucugcugu

SEQ ID NO: 1051176 - RNA, 24 nt, Human
cgacccaaauaggccacauacccc

SEQ ID NO: 1051177 - RNA, 18 nt, Human
cgccgcgcucccgcucgc

SEQ ID NO: 1051178 - RNA, 26 nt, Human
cucaagccacaccccugccaccugcu

SEQ ID NO: 1051179 - RNA, 21 nt, Human
cucacagagcggcaaguucau

SEQ ID NO: 1051180 - RNA, 21 nt, Human
cucaugggcacagccuguggu

SEQ ID NO: 1051181 - RNA, 22 nt, Human
cucccacaauaaacccugccag

SEQ ID NO: 1051182 - RNA, 21 nt, Human
cucccggacgccgcgcucccg

SEQ ID NO: 1051183 - RNA, 18 nt, Human
cuccgcagcccgcgcucc

SEQ ID NO: 1051184 - RNA, 23 nt, Human
cuccugaaccccaagacuccagc

SEQ ID NO: 1051185 - RNA, 25 nt, Human
cucgcaacucccucccaggacaguc

SEQ ID NO: 1051186 - RNA, 21 nt, Human
cucugcuuuagagacccucuc

SEQ ID NO: 1051187 - RNA, 19 nt, Human
cugcugcccuucagaaagc

SEQ ID NO: 1051188 - RNA, 21 nt, Human
cugcugcgcccaauggagguc

SEQ ID NO: 1051189 - RNA, 21 nt, Human
cuucccuacucucucccaaac

SEQ ID NO: 1051190 - RNA, 22 nt, Human
cuugcuuugugccaagugcccu

SEQ ID NO: 1051191 - RNA, 19 nt, Human
cuuucaccagcacucacug

SEQ ID NO: 1051192 - RNA, 23 nt, Human
cuuugugccaagugcccucagcu

SEQ ID NO: 1051193 - RNA, 18 nt, Human
gacaccaauacuuacaua

SEQ ID NO: 1051194 - RNA, 20 nt, Human
gacaccuaacugaacuggcu

SEQ ID NO: 1051195 - RNA, 21 nt, Human
gacauauccacggcccugccu

SEQ ID NO: 1051196 - RNA, 19 nt, Human
gaggaauuuuaaauaaagu

SEQ ID NO: 1051197 - RNA, 24 nt, Human
gcacagauccaaacaagaccucca

SEQ ID NO: 1051198 - RNA, 20 nt, Human
gcccccuccccaccagagcc

SEQ ID NO: 1051199 - RNA, 19 nt, Human
gcccgccucuccgcagccc

SEQ ID NO: 1051200 - RNA, 22 nt, Human
gccgcgcucccgcucgcucggc

SEQ ID NO: 1051201 - RNA, 22 nt, Human
gccuuacaucccccacccccac

SEQ ID NO: 1051202 - RNA, 20 nt, Human
gcgggcuuggccguggggcg

SEQ ID NO: 1051203 - RNA, 18 nt, Human
gcugaaccccuggaaccg

SEQ ID NO: 1051204 - RNA, 20 nt, Human
gcuuugugccaagugcccuc

SEQ ID NO: 1051205 - RNA, 18 nt, Human
ggacuuuuccaauaaaga

SEQ ID NO: 1051206 - RNA, 19 nt, Human
ggagcagagcccccucccc

SEQ ID NO: 1051207 - RNA, 18 nt, Human
ggcucaguggucaggugu

SEQ ID NO: 1051208 - RNA, 21 nt, Human
gggcacaaacugugugccugc

SEQ ID NO: 1051209 - RNA, 20 nt, Human
gggcacagccuguggugagg

SEQ ID NO: 1051210 - RNA, 18 nt, Human
guccuuugcuuaccugcu

SEQ ID NO: 1051211 - RNA, 25 nt, Human
uaaaauacguuuccauuccuuugga

SEQ ID NO: 1051212 - RNA, 18 nt, Human
uaaagcagacaccaauac

SEQ ID NO: 1051213 - RNA, 19 nt, Human
uaaccuccuccugaacccc

SEQ ID NO: 1051214 - RNA, 18 nt, Human
uaacuguaagacuuugca

SEQ ID NO: 1051215 - RNA, 20 nt, Human
uaagagaacuguaaugaaaa

SEQ ID NO: 1051216 - RNA, 21 nt, Human
uagaaccuacuaauccugcca

SEQ ID NO: 1051217 - RNA, 20 nt, Human
uagauagcagagaaacugcu

SEQ ID NO: 1051218 - RNA, 20 nt, Human
uaggccuacaaaccacacca

SEQ ID NO: 1051219 - RNA, 20 nt, Human
uauaaaauaagaugugaaaa

SEQ ID NO: 1051220 - RNA, 18 nt, Human
uaugacaguuuugugacu

SEQ ID NO: 1051221 - RNA, 24 nt, Human
ucaaacacacaaaaagcaaauuuc

SEQ ID NO: 1051222 - RNA, 26 nt, Human
ucacagccagaugaugccaccagaaa

SEQ ID NO: 1051223 - RNA, 19 nt, Human
ucacugagaaccgacaugc

SEQ ID NO: 1051224 - RNA, 21 nt, Human
ucaggaauaaagaaucugcug

SEQ ID NO: 1051225 - RNA, 18 nt, Human
uccacggcccugccuuuc

SEQ ID NO: 1051226 - RNA, 23 nt, Human
uccaggaaaaaaaaaaaaaaagg

SEQ ID NO: 1051227 - RNA, 18 nt, Human
ucccgcucgcucggcucc

SEQ ID NO: 1051228 - RNA, 24 nt, Human
uccugaaccccaagacuccagccc

SEQ ID NO: 1051229 - RNA, 23 nt, Human
uccugcaagcauggcuguuucuc

SEQ ID NO: 1051230 - RNA, 22 nt, Human
ucgcaacucccucccaggacag

SEQ ID NO: 1051231 - RNA, 23 nt, Human
ucuaaccuccuccugaaccccaa

SEQ ID NO: 1051232 - RNA, 20 nt, Human
ucuccaggaaaaaaaaaaaa

SEQ ID NO: 1051233 - RNA, 21 nt, Human
ucugcccccacacauagacac

SEQ ID NO: 1051234 - RNA, 18 nt, Human
ugaaccccaagacuccag

SEQ ID NO: 1051235 - RNA, 18 nt, Human
ugaagguggcccaacugc

SEQ ID NO: 1051236 - RNA, 18 nt, Human
ugacccagcuaccagcaa

SEQ ID NO: 1051237 - RNA, 21 nt, Human
ugaugccaccagaaagagcaa

SEQ ID NO: 1051238 - RNA, 18 nt, Human
ugcacagggacucauggg

SEQ ID NO: 1051239 - RNA, 20 nt, Human
ugccaaguaccaagcaagcc

SEQ ID NO: 1051240 - RNA, 19 nt, Human
ugccuggcccucucugcug

SEQ ID NO: 1051241 - RNA, 19 nt, Human
ugcuuaccugcugucucaa

SEQ ID NO: 1051242 - RNA, 18 nt, Human
uggaagugccuucaggcc

SEQ ID NO: 1051243 - RNA, 18 nt, Human
uggcaggagaggcucgca

SEQ ID NO: 1051244 - RNA, 18 nt, Human
uggccagcacagcaaccc

SEQ ID NO: 1051245 - RNA, 24 nt, Human
uggcccaacugcucagaguaacac

SEQ ID NO: 1051246 - RNA, 20 nt, Human
uggcccucacagagcggcaa

SEQ ID NO: 1051247 - RNA, 20 nt, Human
uggccugagaucuggcccag

SEQ ID NO: 1051248 - RNA, 19 nt, Human
uggcguguggggggugcag

SEQ ID NO: 1051249 - RNA, 19 nt, Human
uggcguguggggggugcag

SEQ ID NO: 1051250 - RNA, 20 nt, Human
ugggaaaaaagacuucucug

SEQ ID NO: 1051251 - RNA, 19 nt, Human
uggggcagaaugcuagugg

SEQ ID NO: 1051252 - RNA, 22 nt, Human
ugggggcgggguggagggaagc

SEQ ID NO: 1051253 - RNA, 18 nt, Human
uggggggugcagcccacu

SEQ ID NO: 1051254 - RNA, 22 nt, Human
ugguuggaggcgcaaggccugc

SEQ ID NO: 1051255 - RNA, 19 nt, Human
uguacauguauguuuccau

SEQ ID NO: 1051256 - RNA, 21 nt, Human
ugugcuugcuuugugccaagu

SEQ ID NO: 1051257 - RNA, 19 nt, Human
uuaaaaaaacaaaaaggaa

SEQ ID NO: 1051258 - RNA, 22 nt, Human
uucacuggccacacuaccauaa

SEQ ID NO: 1051259 - RNA, 20 nt, Human
uucacuuuaacacuuauaac

SEQ ID NO: 1051260 - RNA, 18 nt, Human
uuccuuggcauggauacg

SEQ ID NO: 1051261 - RNA, 19 nt, Human
uucuaaccuccuccugaac

SEQ ID NO: 1051262 - RNA, 19 nt, Human
uugaaaacugcaguauuaa

SEQ ID NO: 1051263 - RNA, 24 nt, Human
uuuccagacauauccacggcccug

SEQ ID NO: 1051264 - RNA, 18 nt, Human
gacccaggaucucaggca

SEQ ID NO: 1051265 - RNA, 26 nt, Human
ggcucuguugcgguggucgcagcacg

SEQ ID NO: 1051266 - RNA, 18 nt, Human
uauuccaagcaagccagg

SEQ ID NO: 1051267 - RNA, 19 nt, Human
ucaggcaucaggcucugcu

SEQ ID NO: 1051268 - RNA, 19 nt, Human
uccaagcaagccaggcugg

SEQ ID NO: 1051269 - RNA, 25 nt, Human
uggaaguacuugagggugguggugc

SEQ ID NO: 1051270 - RNA, 18 nt, Human
uggcuaaagauuuuauuc

SEQ ID NO: 1051271 - RNA, 22 nt, Human
ugguccuggaaguacuugaggg

SEQ ID NO: 1051272 - RNA, 18 nt, Human
accagcucccuccagugc

SEQ ID NO: 1051273 - RNA, 19 nt, Human
caugucagguguuugccgc

SEQ ID NO: 1051274 - RNA, 18 nt, Human
cuggaggggguucgauuc

SEQ ID NO: 1051275 - RNA, 19 nt, Human
gauuccuguggucucccuc

SEQ ID NO: 1051276 - RNA, 18 nt, Human
ucccuccagugcuggagg

SEQ ID NO: 1051277 - RNA, 25 nt, Human
ugagugugggcccaguacaaaguca

SEQ ID NO: 1051278 - RNA, 20 nt, Human
ugccaugucagguguuugcc

SEQ ID NO: 1051279 - RNA, 22 nt, Human
aaaugaaggugaagaaaaagga

SEQ ID NO: 1051280 - RNA, 22 nt, Human
acagagaaaagccugaaaugaa

SEQ ID NO: 1051281 - RNA, 30 nt, Human
acuggucucauguccaugaugagcugcacc

SEQ ID NO: 1051282 - RNA, 27 nt, Human
auuauucucugagaucucaagacaugg

SEQ ID NO: 1051283 - RNA, 21 nt, Human
cagcaaagacuggguuuuuua

SEQ ID NO: 1051284 - RNA, 23 nt, Human
cucaagacauggaagacagagaa

SEQ ID NO: 1051285 - RNA, 25 nt, Human
cuuccagggugagucuucacacugg

SEQ ID NO: 1051286 - RNA, 23 nt, Human
cuuugucuggucagcaaagacug

SEQ ID NO: 1051287 - RNA, 18 nt, Human
gaaaaaggaaaaagaagg

SEQ ID NO: 1051288 - RNA, 21 nt, Human
gacauggaagacagagaaaag

SEQ ID NO: 1051289 - RNA, 18 nt, Human
ggugaagaaaaaggaaaa

SEQ ID NO: 1051290 - RNA, 24 nt, Human
ugaagaaaaaggaaaaagaaggag

SEQ ID NO: 1051291 - RNA, 18 nt, Human
uggaagacagagaaaagc

SEQ ID NO: 1051292 - RNA, 19 nt, Human
aaagugcugggauuacaga

SEQ ID NO: 1051293 - RNA, 24 nt, Human
aaagugcugggauuacagacauga

SEQ ID NO: 1051294 - RNA, 23 nt, Human
aaaugaccauauggggaaaagga

SEQ ID NO: 1051295 - RNA, 27 nt, Human
aaccacuucuuaugacauauuuuccau

SEQ ID NO: 1051296 - RNA, 21 nt, Human
aagugcugggauuacagacau

SEQ ID NO: 1051297 - RNA, 26 nt, Human
aagugcugggauuacagacaugagcu

SEQ ID NO: 1051298 - RNA, 18 nt, Human
acaagcucccucagcugg

SEQ ID NO: 1051299 - RNA, 21 nt, Human
acaugagcuaccuugcccagc

SEQ ID NO: 1051300 - RNA, 22 nt, Human
acguuaaaaucaguuuuuccca

SEQ ID NO: 1051301 - RNA, 24 nt, Human
agcuggucucaaacuccugggcuc

SEQ ID NO: 1051302 - RNA, 24 nt, Human
agugcugggauuacagacaugagc

SEQ ID NO: 1051303 - RNA, 25 nt, Human
caaacuccugggcucaagcgauccu

SEQ ID NO: 1051304 - RNA, 24 nt, Human
caaagugcugggauuacagacaug

SEQ ID NO: 1051305 - RNA, 19 nt, Human
caacaaagccaaaacuuug

SEQ ID NO: 1051306 - RNA, 23 nt, Human
caagcgauccuccugccucgacc

SEQ ID NO: 1051307 - RNA, 28 nt, Human
caagcgauccuccugccucgaccuccca

SEQ ID NO: 1051308 - RNA, 23 nt, Human
cacuguguuaccuagcuggucuc

SEQ ID NO: 1051309 - RNA, 22 nt, Human
cagagacgggaucucacugugu

SEQ ID NO: 1051310 - RNA, 19 nt, Human
cagcaguacaaaauuacua

SEQ ID NO: 1051311 - RNA, 19 nt, Human
cagcuuuuauacuagaagc

SEQ ID NO: 1051312 - RNA, 23 nt, Human
cauggcacagaacuuucagaguu

SEQ ID NO: 1051313 - RNA, 19 nt, Human
ccaaagugcugggauuaca

SEQ ID NO: 1051314 - RNA, 24 nt, Human
ccaaagugcugggauuacagacau

SEQ ID NO: 1051315 - RNA, 18 nt, Human
ccucaguucuugcuauca

SEQ ID NO: 1051316 - RNA, 22 nt, Human
ccuccugccucgaccucccaaa

SEQ ID NO: 1051317 - RNA, 26 nt, Human
ccuccugccucgaccucccaaagugc

SEQ ID NO: 1051318 - RNA, 20 nt, Human
ccugggcucaagcgauccuc

SEQ ID NO: 1051319 - RNA, 23 nt, Human
ccugggcucaagcgauccuccug

SEQ ID NO: 1051320 - RNA, 23 nt, Human
cuaacacacaggauacuacccac

SEQ ID NO: 1051321 - RNA, 24 nt, Human
cucaagcgauccuccugccucgac

SEQ ID NO: 1051322 - RNA, 23 nt, Human
cuccugggcucaagcgauccucc

SEQ ID NO: 1051323 - RNA, 25 nt, Human
cuccugggcucaagcgauccuccug

SEQ ID NO: 1051324 - RNA, 24 nt, Human
cugccucgaccucccaaagugcug

SEQ ID NO: 1051325 - RNA, 18 nt, Human
gauuacagacaugagcua

SEQ ID NO: 1051326 - RNA, 19 nt, Human
gauuacagacaugagcuac

SEQ ID NO: 1051327 - RNA, 20 nt, Human
gauuacagacaugagcuacc

SEQ ID NO: 1051328 - RNA, 25 nt, Human
gcgcaucuuuaaaucagcaguacaa

SEQ ID NO: 1051329 - RNA, 24 nt, Human
ggauuacagacaugagcuaccuug

SEQ ID NO: 1051330 - RNA, 22 nt, Human
gggcucaagcgauccuccugcc

SEQ ID NO: 1051331 - RNA, 18 nt, Human
ggggaaaaggaagcaaua

SEQ ID NO: 1051332 - RNA, 24 nt, Human
uaacagagacgggaucucacugug

SEQ ID NO: 1051333 - RNA, 19 nt, Human
uaccuugcccagccagcag

SEQ ID NO: 1051334 - RNA, 21 nt, Human
uagguuuuugccagcaagucc

SEQ ID NO: 1051335 - RNA, 20 nt, Human
uaugacauauuuuccauacc

SEQ ID NO: 1051336 - RNA, 18 nt, Human
ucaaagacaaaucuaaau

SEQ ID NO: 1051337 - RNA, 25 nt, Human
ucagacacuugaaauaauccaaaac

SEQ ID NO: 1051338 - RNA, 24 nt, Human
uccauggucaaggaugaccggggc

SEQ ID NO: 1051339 - RNA, 18 nt, Human
ucccaaagugcugggauu

SEQ ID NO: 1051340 - RNA, 24 nt, Human
ucccaaagugcugggauuacagac

SEQ ID NO: 1051341 - RNA, 20 nt, Human
uccucaguucuugcuaucau

SEQ ID NO: 1051342 - RNA, 21 nt, Human
uccugggcucaagcgauccuc

SEQ ID NO: 1051343 - RNA, 24 nt, Human
uccugggcucaagcgauccuccug

SEQ ID NO: 1051344 - RNA, 23 nt, Human
ucucaaacuccugggcucaagcg

SEQ ID NO: 1051345 - RNA, 25 nt, Human
ucugagaucuucuuacucuagauuu

SEQ ID NO: 1051346 - RNA, 18 nt, Human
ugagaucuucuuacucua

SEQ ID NO: 1051347 - RNA, 24 nt, Human
ugccucgaccucccaaagugcugg

SEQ ID NO: 1051348 - RNA, 20 nt, Human
ugcugggauuacagacauga

SEQ ID NO: 1051349 - RNA, 18 nt, Human
ugggauuacagacaugag

SEQ ID NO: 1051350 - RNA, 19 nt, Human
ugggauuacagacaugagc

SEQ ID NO: 1051351 - RNA, 21 nt, Human
ugggauuacagacaugagcua

SEQ ID NO: 1051352 - RNA, 22 nt, Human
ugggauuacagacaugagcuac

SEQ ID NO: 1051353 - RNA, 26 nt, Human
ugggauuacagacaugagcuaccuug

SEQ ID NO: 1051354 - RNA, 24 nt, Human
ugggcucaagcgauccuccugccu

SEQ ID NO: 1051355 - RNA, 23 nt, Human
uguguuaccuagcuggucucaaa

SEQ ID NO: 1051356 - RNA, 19 nt, Human
uuccugcuuuucuggucaa

SEQ ID NO: 1051357 - RNA, 22 nt, Human
uuguacaagcucccucagcugg

SEQ ID NO: 1051358 - RNA, 18 nt, Human
uagaaugacgauuucccu

SEQ ID NO: 1051359 - RNA, 22 nt, Human
uagaaugacgauuucccuuaau

SEQ ID NO: 1051360 - RNA, 22 nt, Human
ucaggguggcggugugcucuuc

SEQ ID NO: 1051361 - RNA, 19 nt, Human
agcuggucaacucaggacc

SEQ ID NO: 1051362 - RNA, 20 nt, Human
auauuuguagcuccugucac

SEQ ID NO: 1051363 - RNA, 20 nt, Human
caccauccccaaggucacca

SEQ ID NO: 1051364 - RNA, 22 nt, Human
cauauuaggguccagggugaag

SEQ ID NO: 1051365 - RNA, 21 nt, Human
cauauuuguagcuccugucac

SEQ ID NO: 1051366 - RNA, 22 nt, Human
ccagggugaagaugcuuuccuc

SEQ ID NO: 1051367 - RNA, 19 nt, Human
ccugaccuacgucuugaaa

SEQ ID NO: 1051368 - RNA, 18 nt, Human
ccugcaguuaaggagggg

SEQ ID NO: 1051369 - RNA, 26 nt, Human
gaaagaagcuggucaacucaggaccu

SEQ ID NO: 1051370 - RNA, 19 nt, Human
gagggccccggccaucauc

SEQ ID NO: 1051371 - RNA, 26 nt, Human
gcuacaugaauuagucaccuuugacu

SEQ ID NO: 1051372 - RNA, 20 nt, Human
guguugggcuuuugaagacc

SEQ ID NO: 1051373 - RNA, 19 nt, Human
uaucuuucuugcuagcuag

SEQ ID NO: 1051374 - RNA, 23 nt, Human
uccagggugaagaugcuuuccuc

SEQ ID NO: 1051375 - RNA, 18 nt, Human
ugaagaugcuuuccucuc

SEQ ID NO: 1051376 - RNA, 21 nt, Human
ugcuuuccucucuugcacugu

SEQ ID NO: 1051377 - RNA, 21 nt, Human
uucuugcuagcuagucaaagg

SEQ ID NO: 1051378 - RNA, 20 nt, Human
uugcacugucucucucaacg

SEQ ID NO: 1051379 - RNA, 18 nt, Human
uuuguagcuccugucaca

SEQ ID NO: 1051380 - RNA, 28 nt, Human
aacugcucuucagaacagccaucucuau

SEQ ID NO: 1051381 - RNA, 22 nt, Human
caugcccugcuggaguugagaa

SEQ ID NO: 1051382 - RNA, 20 nt, Human
gaaagucgcuggcaaagcug

SEQ ID NO: 1051383 - RNA, 18 nt, Human
ugaauguucaggcucccc

SEQ ID NO: 1051384 - RNA, 19 nt, Human
ugcccugcuggaguugaga

SEQ ID NO: 1051385 - RNA, 19 nt, Human
uggaauaccgguguguggc

SEQ ID NO: 1051386 - RNA, 23 nt, Human
uucaaaaucuccaaucucuaccu

SEQ ID NO: 1051387 - RNA, 23 nt, Human
uuugauucacuuugcacugauug

SEQ ID NO: 1051388 - RNA, 21 nt, Human
aaacaucugggccaagaaaca

SEQ ID NO: 1051389 - RNA, 20 nt, Human
cacccagcuuuucccucuga

SEQ ID NO: 1051390 - RNA, 22 nt, Human
cagcuuuucccucugggagccc

SEQ ID NO: 1051391 - RNA, 18 nt, Human
ccuccuucuuccuuugcc

SEQ ID NO: 1051392 - RNA, 21 nt, Human
cgccagaccccaggaggucag

SEQ ID NO: 1051393 - RNA, 21 nt, Human
cucccagggcacacccagcuu

SEQ ID NO: 1051394 - RNA, 21 nt, Human
gccagaccccaggaggucagc

SEQ ID NO: 1051395 - RNA, 23 nt, Human
gcccugagacucccagggcacac

SEQ ID NO: 1051396 - RNA, 21 nt, Human
ggaugcuggggcuuggagagg

SEQ ID NO: 1051397 - RNA, 18 nt, Human
ggccaagaaacagggugg

SEQ ID NO: 1051398 - RNA, 23 nt, Human
guuccaggcccugagacucccag

SEQ ID NO: 1051399 - RNA, 20 nt, Human
ucagucagggaauaggugug

SEQ ID NO: 1051400 - RNA, 23 nt, Human
ucccuggggaugcuggggcuugg

SEQ ID NO: 1051401 - RNA, 21 nt, Human
ucugcacgccagaccccagga

SEQ ID NO: 1051402 - RNA, 19 nt, Human
ugagacucccagggcacac

SEQ ID NO: 1051403 - RNA, 20 nt, Human
ugccuccuucuuccuuugcc

SEQ ID NO: 1051404 - RNA, 19 nt, Human
ugcuggggcuuggagaggu

SEQ ID NO: 1051405 - RNA, 20 nt, Human
ugcuggggcuuggagagguc

SEQ ID NO: 1051406 - RNA, 22 nt, Human
uuacugccuccuucuuccuuug

SEQ ID NO: 1051407 - RNA, 20 nt, Human
uucccuggggaugcuggggc

SEQ ID NO: 1051408 - RNA, 23 nt, Human
uuuacugccuccuucuuccuuug

SEQ ID NO: 1051409 - RNA, 19 nt, Human
uuucccaguaccuuuacug

SEQ ID NO: 1051410 - RNA, 22 nt, Human
aaagaaagagagaaggaaagac

SEQ ID NO: 1051411 - RNA, 20 nt, Human
aacaacaaagaaaaagaaag

SEQ ID NO: 1051412 - RNA, 21 nt, Human
aacuuccggccucuucaggcc

SEQ ID NO: 1051413 - RNA, 18 nt, Human
aagggaggagcggguccc

SEQ ID NO: 1051414 - RNA, 21 nt, Human
aauacagguaugcaaaaagga

SEQ ID NO: 1051415 - RNA, 20 nt, Human
acaaagaaaaagaaagagag

SEQ ID NO: 1051416 - RNA, 21 nt, Human
acaaagaaaaagaaagagaga

SEQ ID NO: 1051417 - RNA, 21 nt, Human
acaacaaagaaaaagaaagag

SEQ ID NO: 1051418 - RNA, 21 nt, Human
acaacgggccaggacugaacc

SEQ ID NO: 1051419 - RNA, 21 nt, Human
accaguccagcuuuccaccau

SEQ ID NO: 1051420 - RNA, 20 nt, Human
agaaaaagaaagagagaagg

SEQ ID NO: 1051421 - RNA, 21 nt, Human
agaaaaagaaagagagaagga

SEQ ID NO: 1051422 - RNA, 23 nt, Human
agaaauuccuauccacugcaauc

SEQ ID NO: 1051423 - RNA, 22 nt, Human
agaaggaaagaccugaagagaa

SEQ ID NO: 1051424 - RNA, 19 nt, Human
agagaagcaggacggccga

SEQ ID NO: 1051425 - RNA, 19 nt, Human
agagaagcaggacggccga

SEQ ID NO: 1051426 - RNA, 24 nt, Human
agagaaggaaagaccugaagagaa

SEQ ID NO: 1051427 - RNA, 21 nt, Human
aggaaagaaaagaaacauaag

SEQ ID NO: 1051428 - RNA, 21 nt, Human
caaaaguucagaggaagaagc

SEQ ID NO: 1051429 - RNA, 21 nt, Human
caaacacacagcagacacacg

SEQ ID NO: 1051430 - RNA, 24 nt, Human
caacaacaaagaaaaagaaagaga

SEQ ID NO: 1051431 - RNA, 25 nt, Human
caagauuuaaggaaagaaaagaaac

SEQ ID NO: 1051432 - RNA, 22 nt, Human
cagaguacagaagaugaaccaa

SEQ ID NO: 1051433 - RNA, 19 nt, Human
cagcagacacacgccuauu

SEQ ID NO: 1051434 - RNA, 21 nt, Human
caucagggaccaucuccgggg

SEQ ID NO: 1051435 - RNA, 23 nt, Human
ccacaacgggccaggacugaacc

SEQ ID NO: 1051436 - RNA, 24 nt, Human
ccacaacgggccaggacugaaccc

SEQ ID NO: 1051437 - RNA, 18 nt, Human
ccaguccagcuuuccacc

SEQ ID NO: 1051438 - RNA, 20 nt, Human
cccuauguccgugggccccu

SEQ ID NO: 1051439 - RNA, 21 nt, Human
cccuauguccgugggccccuc

SEQ ID NO: 1051440 - RNA, 19 nt, Human
ccgaacacaaacacacagc

SEQ ID NO: 1051441 - RNA, 22 nt, Human
ccucuagaccccaagggaggag

SEQ ID NO: 1051442 - RNA, 22 nt, Human
ccuggacagcucugucacaguc

SEQ ID NO: 1051443 - RNA, 27 nt, Human
cgggcaagauuuaaggaaagaaaagaa

SEQ ID NO: 1051444 - RNA, 18 nt, Human
cuauguccgugggccccu

SEQ ID NO: 1051445 - RNA, 19 nt, Human
cugaccagcagaaaacuga

SEQ ID NO: 1051446 - RNA, 24 nt, Human
cugaccagcagaaaacugacagag

SEQ ID NO: 1051447 - RNA, 24 nt, Human
gaaauaaccagauuuuagcucaaa

SEQ ID NO: 1051448 - RNA, 22 nt, Human
gaagcaggacggccgaacacag

SEQ ID NO: 1051449 - RNA, 19 nt, Human
gaccagcagaaaacugaca

SEQ ID NO: 1051450 - RNA, 21 nt, Human
gcagaaaacugacagaguaca

SEQ ID NO: 1051451 - RNA, 22 nt, Human
gcucaucagggaccaucuccgg

SEQ ID NO: 1051452 - RNA, 22 nt, Human
ggaaacagagaagcaggacggc

SEQ ID NO: 1051453 - RNA, 22 nt, Human
ggacagcucugucacagucaca

SEQ ID NO: 1051454 - RNA, 22 nt, Human
ggcuucgccuuucgggagacca

SEQ ID NO: 1051455 - RNA, 23 nt, Human
gggcaagauuuaaggaaagaaaa

SEQ ID NO: 1051456 - RNA, 20 nt, Human
gucacagucacagauguucu

SEQ ID NO: 1051457 - RNA, 20 nt, Human
guccagcuuuccaccaucac

SEQ ID NO: 1051458 - RNA, 21 nt, Human
uaacacaggggcauguguacg

SEQ ID NO: 1051459 - RNA, 24 nt, Human
uauauuauuuuacaacaacaaaga

SEQ ID NO: 1051460 - RNA, 24 nt, Human
uauccacugcaauccuggacagcc

SEQ ID NO: 1051461 - RNA, 21 nt, Human
ucacagauguucugaccagca

SEQ ID NO: 1051462 - RNA, 22 nt, Human
ucccgcccgccauucccagguc

SEQ ID NO: 1051463 - RNA, 20 nt, Human
ucuccgggggucuccucuag

SEQ ID NO: 1051464 - RNA, 23 nt, Human
ugaaccaaaguaacacaggggca

SEQ ID NO: 1051465 - RNA, 19 nt, Human
ugcaaaaaggaagcccucg

SEQ ID NO: 1051466 - RNA, 23 nt, Human
ugcaaaaaggaagcccucgagau

SEQ ID NO: 1051467 - RNA, 21 nt, Human
ugggccccucagcuggcccaa

SEQ ID NO: 1051468 - RNA, 19 nt, Human
ugucacagucacagauguu

SEQ ID NO: 1051469 - RNA, 23 nt, Human
uuaauacagguaugcaaaaagga

SEQ ID NO: 1051470 - RNA, 23 nt, Human
uucccaggucucagaguuuacuu

SEQ ID NO: 1051471 - RNA, 18 nt, Human
accgccacucccgccucg

SEQ ID NO: 1051472 - RNA, 26 nt, Human
acuuuuuguuguuguuaaagaaaaau

SEQ ID NO: 1051473 - RNA, 23 nt, Human
agcaucauuuaucugguaguagc

SEQ ID NO: 1051474 - RNA, 21 nt, Human
cagcagcaucauuuaucuggu

SEQ ID NO: 1051475 - RNA, 20 nt, Human
ccgccgccgcugccacgccg

SEQ ID NO: 1051476 - RNA, 20 nt, Human
cgcuccgccgccgcugccac

SEQ ID NO: 1051477 - RNA, 21 nt, Human
cgggccggugcccuccgcugg

SEQ ID NO: 1051478 - RNA, 25 nt, Human
cgggccggugcccuccgcuggcacc

SEQ ID NO: 1051479 - RNA, 20 nt, Human
cuccgccgccgcugccacgc

SEQ ID NO: 1051480 - RNA, 18 nt, Human
cuggcaccgccacucccg

SEQ ID NO: 1051481 - RNA, 21 nt, Human
cugguaguagcaagacagccu

SEQ ID NO: 1051482 - RNA, 18 nt, Human
cuuggcuuucauguccag

SEQ ID NO: 1051483 - RNA, 18 nt, Human
guuguuaaagaaaaauaa

SEQ ID NO: 1051484 - RNA, 22 nt, Human
ugucaagauuugccuaccaaua

SEQ ID NO: 1051485 - RNA, 24 nt, Human
ugucuuggcuuucauguccagugg

SEQ ID NO: 1051486 - RNA, 19 nt, Human
agguaguagagcucccggc

SEQ ID NO: 1051487 - RNA, 23 nt, Human
augcccccaggcauaguuauggg

SEQ ID NO: 1051488 - RNA, 25 nt, Human
caaugaucuugccaaugucgugaug

SEQ ID NO: 1051489 - RNA, 18 nt, Human
cagaaccaguuucuccac

SEQ ID NO: 1051490 - RNA, 20 nt, Human
cagaaccaguuucuccacca

SEQ ID NO: 1051491 - RNA, 23 nt, Human
ccaaagcuguggaaaaccgagaa

SEQ ID NO: 1051492 - RNA, 20 nt, Human
ccaguggucuugucacuugg

SEQ ID NO: 1051493 - RNA, 23 nt, Human
cuccaccaaagcuguggaaaacc

SEQ ID NO: 1051494 - RNA, 19 nt, Human
cucccggcagcauugccaa

SEQ ID NO: 1051495 - RNA, 18 nt, Human
gcacuggugaaccagcuu

SEQ ID NO: 1051496 - RNA, 21 nt, Human
gccaauccagacaucagccuc

SEQ ID NO: 1051497 - RNA, 21 nt, Human
guagagcucccggcagcauug

SEQ ID NO: 1051498 - RNA, 20 nt, Human
guggucuugucacuuggcau

SEQ ID NO: 1051499 - RNA, 20 nt, Human
ucuccaccaaagcuguggaa

SEQ ID NO: 1051500 - RNA, 19 nt, Human
ucuuccuugucugugauga

SEQ ID NO: 1051501 - RNA, 19 nt, Human
uggucuugucacuuggcau

SEQ ID NO: 1051502 - RNA, 18 nt, Human
ugucugugaugagcugcu

SEQ ID NO: 1051503 - RNA, 19 nt, Human
ugucugugaugagcugcuc

SEQ ID NO: 1051504 - RNA, 20 nt, Human
ugugaugagcugcucagggu

SEQ ID NO: 1051505 - RNA, 22 nt, Human
uguggaaaaccgagaagcccug

SEQ ID NO: 1051506 - RNA, 22 nt, Human
uuccagguuuauaaacacugcc

SEQ ID NO: 1051507 - RNA, 20 nt, Human
uugucugugaugagcugcuc

SEQ ID NO: 1051508 - RNA, 21 nt, Human
aaaacaguacuauaaagcuca

SEQ ID NO: 1051509 - RNA, 19 nt, Human
aaacaguacuauaaagcuc

SEQ ID NO: 1051510 - RNA, 23 nt, Human
aacaggaucaacucugaaaagaa

SEQ ID NO: 1051511 - RNA, 20 nt, Human
acuauaaagcucaacaggau

SEQ ID NO: 1051512 - RNA, 19 nt, Human
caacaggaucaacucugaa

SEQ ID NO: 1051513 - RNA, 20 nt, Human
ucccugaucugucaagaaaa

SEQ ID NO: 1051514 - RNA, 21 nt, Human
ucugucaagaaaaacaguacu

SEQ ID NO: 1051515 - RNA, 18 nt, Human
acaggaagaaacuucugg

SEQ ID NO: 1051516 - RNA, 23 nt, Human
aggaagaaacuucuggaucacuc

SEQ ID NO: 1051517 - RNA, 22 nt, Human
gacccagggcgccccuagagac

SEQ ID NO: 1051518 - RNA, 18 nt, Human
ucuggaucacuccuggaa

SEQ ID NO: 1051519 - RNA, 18 nt, Human
aaaaaacccaacaacuga

SEQ ID NO: 1051520 - RNA, 22 nt, Human
aaaagaaaauauaaaagcaaaa

SEQ ID NO: 1051521 - RNA, 24 nt, Human
aaaagaaaauauaaaagcaaaaaa

SEQ ID NO: 1051522 - RNA, 23 nt, Human
aaacacauaaauuaucuucauca

SEQ ID NO: 1051523 - RNA, 19 nt, Human
aagcaaaaaacccaacaac

SEQ ID NO: 1051524 - RNA, 20 nt, Human
acuacuucccucaaacauua

SEQ ID NO: 1051525 - RNA, 26 nt, Human
agaaaagaaaauauaaaagcaaaaaa

SEQ ID NO: 1051526 - RNA, 21 nt, Human
auuugaggugucugacuauuc

SEQ ID NO: 1051527 - RNA, 21 nt, Human
caaaacaaaaccaugcuucaa

SEQ ID NO: 1051528 - RNA, 23 nt, Human
cacaaaacaaaaccaugcuucaa

SEQ ID NO: 1051529 - RNA, 23 nt, Human
cacaaaacaaaaccaugcuucaa

SEQ ID NO: 1051530 - RNA, 25 nt, Human
caccacaaaacaaaaccaugcuuca

SEQ ID NO: 1051531 - RNA, 19 nt, Human
ccacaaaacaaaaccaugc

SEQ ID NO: 1051532 - RNA, 21 nt, Human
ccacaccacaaaacaaaacca

SEQ ID NO: 1051533 - RNA, 23 nt, Human
ccaugcuucaacuacuucccuca

SEQ ID NO: 1051534 - RNA, 27 nt, Human
cugguaacaauaauacaucccacaauu

SEQ ID NO: 1051535 - RNA, 22 nt, Human
cuucaucauuccuuaaguccaa

SEQ ID NO: 1051536 - RNA, 22 nt, Human
gguaacaauaauacaucccaca

SEQ ID NO: 1051537 - RNA, 22 nt, Human
uaaaagcaaaaaacccaacaac

SEQ ID NO: 1051538 - RNA, 20 nt, Human
uacuacauggauuccacacc

SEQ ID NO: 1051539 - RNA, 24 nt, Human
ucuccaaaggaucuugcuguccau

SEQ ID NO: 1051540 - RNA, 27 nt, Human
ucucuaaaguuccaugauacuuaauuu

SEQ ID NO: 1051541 - RNA, 22 nt, Human
ucuucuccaaaggaucuugcug

SEQ ID NO: 1051542 - RNA, 22 nt, Human
ugaggugucugacuauucaaga

SEQ ID NO: 1051543 - RNA, 21 nt, Human
ugauggaucuguguguucccu

SEQ ID NO: 1051544 - RNA, 22 nt, Human
uggaucuguguguucccucuua

SEQ ID NO: 1051545 - RNA, 20 nt, Human
uucaucauuccuuaagucca

SEQ ID NO: 1051546 - RNA, 23 nt, Human
uuccacaccacaaaacaaaacca

SEQ ID NO: 1051547 - RNA, 24 nt, Human
gaggcugcgucuuucaggaggcca

SEQ ID NO: 1051548 - RNA, 24 nt, Human
uacauuuuuuuuucuuucucauga

SEQ ID NO: 1051549 - RNA, 23 nt, Human
uguuuuguucuuucagcucguua

SEQ ID NO: 1051550 - RNA, 19 nt, Human
aaguaauaaaaauugcucc

SEQ ID NO: 1051551 - RNA, 22 nt, Human
acaguaagcaagcuugcucucu

SEQ ID NO: 1051552 - RNA, 27 nt, Human
acccugagaaaugucuuggauaaagag

SEQ ID NO: 1051553 - RNA, 28 nt, Human
acccugagaaaugucuuggauaaagagu

SEQ ID NO: 1051554 - RNA, 18 nt, Human
agcaagguguguaggagu

SEQ ID NO: 1051555 - RNA, 22 nt, Human
agcaagguguguaggaguacaa

SEQ ID NO: 1051556 - RNA, 21 nt, Human
agccuuggaccccccucauca

SEQ ID NO: 1051557 - RNA, 20 nt, Human
aggcggggcaggggguggug

SEQ ID NO: 1051558 - RNA, 20 nt, Human
agggagcggacgccaccccg

SEQ ID NO: 1051559 - RNA, 20 nt, Human
aggggguggugagcggugaa

SEQ ID NO: 1051560 - RNA, 24 nt, Human
aguacaagagccucacagaaagga

SEQ ID NO: 1051561 - RNA, 25 nt, Human
caacacuuauuaaaaaacaguugau

SEQ ID NO: 1051562 - RNA, 20 nt, Human
caaggacccggcgaccaagg

SEQ ID NO: 1051563 - RNA, 23 nt, Human
caggacccaaggcggggcagggg

SEQ ID NO: 1051564 - RNA, 20 nt, Human
caucaggaccuccggcacag

SEQ ID NO: 1051565 - RNA, 19 nt, Human
cccaaggcggggcaggggg

SEQ ID NO: 1051566 - RNA, 23 nt, Human
ccccaagccuuggaccccccuca

SEQ ID NO: 1051567 - RNA, 23 nt, Human
cccgcaaggacccggcgaccaag

SEQ ID NO: 1051568 - RNA, 22 nt, Human
cucacagaaaggagccucccaa

SEQ ID NO: 1051569 - RNA, 26 nt, Human
cuggaaguaauaaaaauugcucccuu

SEQ ID NO: 1051570 - RNA, 19 nt, Human
cuuggauaaagagugguga

SEQ ID NO: 1051571 - RNA, 21 nt, Human
gauaaagaguggugagagccu

SEQ ID NO: 1051572 - RNA, 20 nt, Human
gcacaggcgcccguuucccg

SEQ ID NO: 1051573 - RNA, 24 nt, Human
gcggggcaggggguggugagcggu

SEQ ID NO: 1051574 - RNA, 18 nt, Human
ggacccaaggcggggcag

SEQ ID NO: 1051575 - RNA, 18 nt, Human
ggaccccccucaucagga

SEQ ID NO: 1051576 - RNA, 20 nt, Human
ggaccccccucaucaggacc

SEQ ID NO: 1051577 - RNA, 21 nt, Human
ggcaggggguggugagcggug

SEQ ID NO: 1051578 - RNA, 23 nt, Human
ggggcaggggguggugagcggug

SEQ ID NO: 1051579 - RNA, 23 nt, Human
guaauuccagugaaagaagagga

SEQ ID NO: 1051580 - RNA, 23 nt, Human
uaaagaguggugagagccuugca

SEQ ID NO: 1051581 - RNA, 22 nt, Human
uauuacaggagggguaacacug

SEQ ID NO: 1051582 - RNA, 19 nt, Human
ucccuggcaccgaggacuc

SEQ ID NO: 1051583 - RNA, 18 nt, Human
ugcauucuuggcauacuu

SEQ ID NO: 1051584 - RNA, 22 nt, Human
uggaaguaauaaaaauugcucc

SEQ ID NO: 1051585 - RNA, 20 nt, Human
uggcauacuuagcaaggugu

SEQ ID NO: 1051586 - RNA, 19 nt, Human
ugucuuggauaaagagugg

SEQ ID NO: 1051587 - RNA, 18 nt, Human
uuaauucauucuucuuuu

SEQ ID NO: 1051588 - RNA, 20 nt, Human
uucccgcacaaguccccaag

SEQ ID NO: 1051589 - RNA, 22 nt, Human
uucccuggcaccgaggacucga

SEQ ID NO: 1051590 - RNA, 20 nt, Human
uuucccgccacugccuucca

SEQ ID NO: 1051591 - RNA, 24 nt, Human
acacccuucuucuugggccaugcc

SEQ ID NO: 1051592 - RNA, 21 nt, Human
accgccauuucucccuccucc

SEQ ID NO: 1051593 - RNA, 23 nt, Human
agaaaucucagggggaaaagccc

SEQ ID NO: 1051594 - RNA, 22 nt, Human
agaaucccucaggccagcuccg

SEQ ID NO: 1051595 - RNA, 21 nt, Human
agccugaggccaccgccauuu

SEQ ID NO: 1051596 - RNA, 23 nt, Human
aguggcagaagggcaaaggcccg

SEQ ID NO: 1051597 - RNA, 27 nt, Human
augccuccuccgcccuugggugcccca

SEQ ID NO: 1051598 - RNA, 19 nt, Human
caaaggcccgggcgaaggc

SEQ ID NO: 1051599 - RNA, 20 nt, Human
caaaggcccgggcgaaggcg

SEQ ID NO: 1051600 - RNA, 19 nt, Human
caccucggaaggacaggau

SEQ ID NO: 1051601 - RNA, 24 nt, Human
ccugucugacagggagggcugugg

SEQ ID NO: 1051602 - RNA, 18 nt, Human
cuccucuucacacccuuc

SEQ ID NO: 1051603 - RNA, 21 nt, Human
cugcagugcugagccugaggc

SEQ ID NO: 1051604 - RNA, 23 nt, Human
gaaagugggguccaggucccaca

SEQ ID NO: 1051605 - RNA, 18 nt, Human
gagcggcgacggagaaag

SEQ ID NO: 1051606 - RNA, 20 nt, Human
gcucccccgaggccgcgucc

SEQ ID NO: 1051607 - RNA, 23 nt, Human
gggccaugccuccuccgcccuug

SEQ ID NO: 1051608 - RNA, 18 nt, Human
gggcgaaggcgcugaaga

SEQ ID NO: 1051609 - RNA, 19 nt, Human
uaaggagaacaccaucuuu

SEQ ID NO: 1051610 - RNA, 22 nt, Human
uaggaaaguggcagaagggcaa

SEQ ID NO: 1051611 - RNA, 24 nt, Human
ucacacccuucuucuugggccaug

SEQ ID NO: 1051612 - RNA, 23 nt, Human
ucagagcugcagugcugagccug

SEQ ID NO: 1051613 - RNA, 18 nt, Human
ucgcaggccccgcggcuc

SEQ ID NO: 1051614 - RNA, 24 nt, Human
ucucagggggaaaagccccugugg

SEQ ID NO: 1051615 - RNA, 23 nt, Human
ucucccuccuccucuucacaccc

SEQ ID NO: 1051616 - RNA, 22 nt, Human
ucuccggaaagugggguccagg

SEQ ID NO: 1051617 - RNA, 21 nt, Human
ucuucacacccuucuucuugg

SEQ ID NO: 1051618 - RNA, 19 nt, Human
ugacagggagggcuguggc

SEQ ID NO: 1051619 - RNA, 23 nt, Human
ugcugagccugaggccaccgcca

SEQ ID NO: 1051620 - RNA, 24 nt, Human
uuaccacuugucugaguuucuuca

SEQ ID NO: 1051621 - RNA, 21 nt, Human
uucaaaaacuucccaccaguu

SEQ ID NO: 1051622 - RNA, 19 nt, Human
uucacacccuucuucuugg

SEQ ID NO: 1051623 - RNA, 18 nt, Human
cccacacucagugugggg

SEQ ID NO: 1051624 - RNA, 20 nt, Human
aacgcccggcucuuggcugg

SEQ ID NO: 1051625 - RNA, 18 nt, Human
aagacaaaaauaaaaaag

SEQ ID NO: 1051626 - RNA, 18 nt, Human
aagagcugggagggggcu

SEQ ID NO: 1051627 - RNA, 19 nt, Human
aagagcugggagggggcug

SEQ ID NO: 1051628 - RNA, 21 nt, Human
accccaggcccgagguccccg

SEQ ID NO: 1051629 - RNA, 21 nt, Human
agacaaaaauaaaaaagaaaa

SEQ ID NO: 1051630 - RNA, 19 nt, Human
agcgcucagcagccccgga

SEQ ID NO: 1051631 - RNA, 23 nt, Human
agcugaaggggacuggggaagcc

SEQ ID NO: 1051632 - RNA, 20 nt, Human
aggaggaggugggagcugcc

SEQ ID NO: 1051633 - RNA, 21 nt, Human
aggcuccgggggugggggcag

SEQ ID NO: 1051634 - RNA, 21 nt, Human
aguuaaaaaaaaaaaaaacuc

SEQ ID NO: 1051635 - RNA, 22 nt, Human
auaacaauagaaaaaguaauac

SEQ ID NO: 1051636 - RNA, 19 nt, Human
cagagguccuggggcugag

SEQ ID NO: 1051637 - RNA, 18 nt, Human
ccccaggcccgagguccc

SEQ ID NO: 1051638 - RNA, 23 nt, Human
ccccgucccgcucuccuaguccc

SEQ ID NO: 1051639 - RNA, 21 nt, Human
cccgccagagucaggcuucug

SEQ ID NO: 1051640 - RNA, 19 nt, Human
ccgggggugggggcagggg

SEQ ID NO: 1051641 - RNA, 23 nt, Human
ccgggggugggggcaggggcggg

SEQ ID NO: 1051642 - RNA, 19 nt, Human
ccucgcucgcggcucccuc

SEQ ID NO: 1051643 - RNA, 19 nt, Human
ccucuccucucuccacuca

SEQ ID NO: 1051644 - RNA, 21 nt, Human
ccugcagaccccaggcccgag

SEQ ID NO: 1051645 - RNA, 20 nt, Human
ccuggagcccacaggcgccc

SEQ ID NO: 1051646 - RNA, 20 nt, Human
ccuugugacccacagguucu

SEQ ID NO: 1051647 - RNA, 26 nt, Human
cgucccgcucuccuagucccggagcc

SEQ ID NO: 1051648 - RNA, 21 nt, Human
cgugcgccagggacccagggg

SEQ ID NO: 1051649 - RNA, 19 nt, Human
cuagggcaggaggcugaag

SEQ ID NO: 1051650 - RNA, 22 nt, Human
cuccucucuccacucacucucc

SEQ ID NO: 1051651 - RNA, 20 nt, Human
cucgcagugucgcggcagcg

SEQ ID NO: 1051652 - RNA, 18 nt, Human
cucgcugggucugaacca

SEQ ID NO: 1051653 - RNA, 19 nt, Human
cucucuccacucacucucc

SEQ ID NO: 1051654 - RNA, 24 nt, Human
cugcagaccccaggcccgaggucc

SEQ ID NO: 1051655 - RNA, 22 nt, Human
cuggagcccacaggcgccccug

SEQ ID NO: 1051656 - RNA, 26 nt, Human
cuucguugccucuccucucuccacuc

SEQ ID NO: 1051657 - RNA, 19 nt, Human
gaaccaggagcagcugaga

SEQ ID NO: 1051658 - RNA, 18 nt, Human
gaagugccgcgugcgcca

SEQ ID NO: 1051659 - RNA, 20 nt, Human
gagcagcagggacggucggg

SEQ ID NO: 1051660 - RNA, 21 nt, Human
gagcagcagggacggucgggg

SEQ ID NO: 1051661 - RNA, 19 nt, Human
gagcccacaggcgccccug

SEQ ID NO: 1051662 - RNA, 21 nt, Human
gagcccacggccgccagcuga

SEQ ID NO: 1051663 - RNA, 20 nt, Human
gagcugggagggggcugccc

SEQ ID NO: 1051664 - RNA, 19 nt, Human
gaggaggugggagcugcca

SEQ ID NO: 1051665 - RNA, 24 nt, Human
gcagggacggucggggucgcggcc

SEQ ID NO: 1051666 - RNA, 22 nt, Human
gcccgagguccccgucccgcuc

SEQ ID NO: 1051667 - RNA, 23 nt, Human
gcccuggagcccacaggcgcccc

SEQ ID NO: 1051668 - RNA, 19 nt, Human
gccgcugggccuagggucc

SEQ ID NO: 1051669 - RNA, 19 nt, Human
gcggccccgggcggggcuc

SEQ ID NO: 1051670 - RNA, 21 nt, Human
ggaggagagggccgcugggcc

SEQ ID NO: 1051671 - RNA, 19 nt, Human
ggaggaggaggugggagcu

SEQ ID NO: 1051672 - RNA, 21 nt, Human
ggccaagaguuuagccgcguc

SEQ ID NO: 1051673 - RNA, 23 nt, Human
ggcuggcugcucccucgcagugu

SEQ ID NO: 1051674 - RNA, 18 nt, Human
gggagcgagcgcucagca

SEQ ID NO: 1051675 - RNA, 20 nt, Human
gggcccccugcagaccccag

SEQ ID NO: 1051676 - RNA, 21 nt, Human
gggcggggcucugaagugccg

SEQ ID NO: 1051677 - RNA, 22 nt, Human
gggcggggcucugaagugccgc

SEQ ID NO: 1051678 - RNA, 24 nt, Human
guuaaaaaaaaaaaaaacuccagu

SEQ ID NO: 1051679 - RNA, 19 nt, Human
guugccucuccucucucca

SEQ ID NO: 1051680 - RNA, 19 nt, Human
uaaugcaguuucccuuccg

SEQ ID NO: 1051681 - RNA, 26 nt, Human
uacacuuuugcaggcuccgggggugg

SEQ ID NO: 1051682 - RNA, 26 nt, Human
uauggucaaagacaaaaauaaaaaag

SEQ ID NO: 1051683 - RNA, 22 nt, Human
ucaaagacaaaaauaaaaaaga

SEQ ID NO: 1051684 - RNA, 21 nt, Human
ucccgagcgagcgccucuccc

SEQ ID NO: 1051685 - RNA, 21 nt, Human
ucccgcucuccuagucccgga

SEQ ID NO: 1051686 - RNA, 22 nt, Human
ucccuauggaggagagggccgc

SEQ ID NO: 1051687 - RNA, 18 nt, Human
uccucucuccacucacuc

SEQ ID NO: 1051688 - RNA, 26 nt, Human
ucgguaguugcaguggcuucucaauc

SEQ ID NO: 1051689 - RNA, 19 nt, Human
ucuccacucacucuccgca

SEQ ID NO: 1051690 - RNA, 21 nt, Human
ugaaccaggagcagcugagaa

SEQ ID NO: 1051691 - RNA, 24 nt, Human
ugaaccaggagcagcugagaacgu

SEQ ID NO: 1051692 - RNA, 18 nt, Human
ugaaggggacuggggaag

SEQ ID NO: 1051693 - RNA, 24 nt, Human
ugagaacgugccggggagaggccg

SEQ ID NO: 1051694 - RNA, 18 nt, Human
ugagcugcaagagcuggg

SEQ ID NO: 1051695 - RNA, 24 nt, Human
ugagcugcaagagcugggaggggg

SEQ ID NO: 1051696 - RNA, 23 nt, Human
ugcaagagcugggagggggcugc

SEQ ID NO: 1051697 - RNA, 20 nt, Human
ugccccgcggucccuagggc

SEQ ID NO: 1051698 - RNA, 19 nt, Human
ugggagggggcugccccgc

SEQ ID NO: 1051699 - RNA, 20 nt, Human
ugggagggggcugccccgcg

SEQ ID NO: 1051700 - RNA, 21 nt, Human
ugggagggggcugccccgcgg

SEQ ID NO: 1051701 - RNA, 24 nt, Human
uuaauaguuaaaaaaaaaaaaaaa

SEQ ID NO: 1051702 - RNA, 22 nt, Human
uucguugccucuccucucucca

SEQ ID NO: 1051703 - RNA, 21 nt, Human
uucugggagaggcgccgcugc

SEQ ID NO: 1051704 - RNA, 22 nt, Human
aaaaaaacccauucaaccugaa

SEQ ID NO: 1051705 - RNA, 22 nt, Human
acuuuuuuuuuuuuuuuuuuua

SEQ ID NO: 1051706 - RNA, 22 nt, Human
cacaaagccacuuccacacccu

SEQ ID NO: 1051707 - RNA, 22 nt, Human
caccacaaagccacuuccacac

SEQ ID NO: 1051708 - RNA, 22 nt, Human
cauuaaaaaaaacccauucaac

SEQ ID NO: 1051709 - RNA, 18 nt, Human
cuagaugcagauguaagg

SEQ ID NO: 1051710 - RNA, 24 nt, Human
cuuaaauauaaaucaaaauagcuc

SEQ ID NO: 1051711 - RNA, 20 nt, Human
cuugacagccaaccuuggcg

SEQ ID NO: 1051712 - RNA, 24 nt, Human
uaaacacacuauuuaacuuucagu

SEQ ID NO: 1051713 - RNA, 21 nt, Human
uacacuuauacauugguauua

SEQ ID NO: 1051714 - RNA, 22 nt, Human
uagagguggcaccacaaagcca

SEQ ID NO: 1051715 - RNA, 23 nt, Human
ucauuaaaaaaaacccauucaac

SEQ ID NO: 1051716 - RNA, 23 nt, Human
uguagaauggggguugaccuccg

SEQ ID NO: 1051717 - RNA, 24 nt, Human
uguagaauggggguugaccuccga

SEQ ID NO: 1051718 - RNA, 24 nt, Human
uuuuuuuuuuuuuuuuuacuauaa

SEQ ID NO: 1051719 - RNA, 24 nt, Human
aaaaaaaaaaauuauaccauuaac

SEQ ID NO: 1051720 - RNA, 23 nt, Human
aaaaguaugacaggcugaacuua

SEQ ID NO: 1051721 - RNA, 21 nt, Human
aaacacacagacagaaagaag

SEQ ID NO: 1051722 - RNA, 21 nt, Human
aaauaaguaguaaucaaaguc

SEQ ID NO: 1051723 - RNA, 21 nt, Human
aaauaguucacuuaucacaaa

SEQ ID NO: 1051724 - RNA, 24 nt, Human
aacacacagacagaaagaggaaag

SEQ ID NO: 1051725 - RNA, 24 nt, Human
aauaguagugauuacacugcacaa

SEQ ID NO: 1051726 - RNA, 22 nt, Human
aauccuguaacaguauuuacua

SEQ ID NO: 1051727 - RNA, 19 nt, Human
acacacagacagaaagaag

SEQ ID NO: 1051728 - RNA, 18 nt, Human
acacagacagaaagaagc

SEQ ID NO: 1051729 - RNA, 23 nt, Human
acagcaguuucuaagaagaaugc

SEQ ID NO: 1051730 - RNA, 21 nt, Human
acauaugccccccaaaaugua

SEQ ID NO: 1051731 - RNA, 24 nt, Human
accacacuuacaaauggucuggua

SEQ ID NO: 1051732 - RNA, 22 nt, Human
acugcgccuuuuuuuuccuuuu

SEQ ID NO: 1051733 - RNA, 18 nt, Human
agacagaaagaagcagua

SEQ ID NO: 1051734 - RNA, 19 nt, Human
agaugcaaauuaaaacaca

SEQ ID NO: 1051735 - RNA, 24 nt, Human
aucauucauacaagauaucacacc

SEQ ID NO: 1051736 - RNA, 24 nt, Human
augcauguauguauucaaguacaa

SEQ ID NO: 1051737 - RNA, 24 nt, Human
caaaauaaacacuaucaaacaccc

SEQ ID NO: 1051738 - RNA, 24 nt, Human
caaaguaccagggauugcuugaua

SEQ ID NO: 1051739 - RNA, 24 nt, Human
cacacagacagaaagaagcaguaa

SEQ ID NO: 1051740 - RNA, 24 nt, Human
cacacaucacucuaacuuggaccu

SEQ ID NO: 1051741 - RNA, 19 nt, Human
cacauaugccccccaaaau

SEQ ID NO: 1051742 - RNA, 22 nt, Human
cagcaaagcuuuaaacuuuuaa

SEQ ID NO: 1051743 - RNA, 23 nt, Human
cauguuuuacauuuuuuucuaau

SEQ ID NO: 1051744 - RNA, 22 nt, Human
ccaaaauuuaugguucauuucu

SEQ ID NO: 1051745 - RNA, 19 nt, Human
ccauaugcacaaccauaaa

SEQ ID NO: 1051746 - RNA, 25 nt, Human
ccccccaaccacacauaugcccccc

SEQ ID NO: 1051747 - RNA, 20 nt, Human
ccugaguuccuucuucaugg

SEQ ID NO: 1051748 - RNA, 18 nt, Human
cugcucugcuuuccauau

SEQ ID NO: 1051749 - RNA, 19 nt, Human
cugcuuaauuauaaagauc

SEQ ID NO: 1051750 - RNA, 21 nt, Human
cuuuuaacagauuccucacaa

SEQ ID NO: 1051751 - RNA, 23 nt, Human
gauagguaaucuuuugacuuucu

SEQ ID NO: 1051752 - RNA, 23 nt, Human
gcaaagcuuuaaacuuuuaacag

SEQ ID NO: 1051753 - RNA, 19 nt, Human
ggcagaugcaaauuaaaaa

SEQ ID NO: 1051754 - RNA, 23 nt, Human
guuuagcagcaugcauguaugua

SEQ ID NO: 1051755 - RNA, 20 nt, Human
guuuucuuuuucucccucag

SEQ ID NO: 1051756 - RNA, 20 nt, Human
uaaaaaaugaccacuaaaga

SEQ ID NO: 1051757 - RNA, 24 nt, Human
uaaacuuuuaacagauuccucaca

SEQ ID NO: 1051758 - RNA, 20 nt, Human
uaacagcagcuaucuacuua

SEQ ID NO: 1051759 - RNA, 25 nt, Human
uaacaguauuuacuagagaugucaa

SEQ ID NO: 1051760 - RNA, 22 nt, Human
uaacauaucuuacaauguugau

SEQ ID NO: 1051761 - RNA, 21 nt, Human
uaaguaguaaucaaagucuga

SEQ ID NO: 1051762 - RNA, 23 nt, Human
uacacacaucacucuaacuugga

SEQ ID NO: 1051763 - RNA, 20 nt, Human
uaccuggggagaagauuuau

SEQ ID NO: 1051764 - RNA, 22 nt, Human
uagcugaaccucuugagcugaa

SEQ ID NO: 1051765 - RNA, 23 nt, Human
uaguaauucauccaacugaaaug

SEQ ID NO: 1051766 - RNA, 18 nt, Human
uaguagugauuacacugc

SEQ ID NO: 1051767 - RNA, 21 nt, Human
uauaacaagccauggaagucc

SEQ ID NO: 1051768 - RNA, 22 nt, Human
uaucaaacacccaaauuuuaaa

SEQ ID NO: 1051769 - RNA, 18 nt, Human
uaucacaaagcucaguaa

SEQ ID NO: 1051770 - RNA, 19 nt, Human
uaucuacuuauuuuacagc

SEQ ID NO: 1051771 - RNA, 23 nt, Human
uaugcacaaccauaaaacauucc

SEQ ID NO: 1051772 - RNA, 22 nt, Human
uauuuuauuguagaacgauagg

SEQ ID NO: 1051773 - RNA, 23 nt, Human
uauuuuauuguagaacgauaggu

SEQ ID NO: 1051774 - RNA, 21 nt, Human
ucaaauaaaucacacccacuc

SEQ ID NO: 1051775 - RNA, 24 nt, Human
ucaaauaaaucacacccacucuaa

SEQ ID NO: 1051776 - RNA, 18 nt, Human
ucagaguuucaaacugua

SEQ ID NO: 1051777 - RNA, 26 nt, Human
uccagauauuaaaaaaaaaaaauuau

SEQ ID NO: 1051778 - RNA, 23 nt, Human
uccugaguuccuucuucauggag

SEQ ID NO: 1051779 - RNA, 22 nt, Human
ucguaagacuuuucugcaucac

SEQ ID NO: 1051780 - RNA, 20 nt, Human
ucuacuuauuuuacagcuau

SEQ ID NO: 1051781 - RNA, 24 nt, Human
ugaauacauuauaccauguauaua

SEQ ID NO: 1051782 - RNA, 22 nt, Human
ugacaggcugaacuuaugauac

SEQ ID NO: 1051783 - RNA, 18 nt, Human
ugagcugaaaggaaguuc

SEQ ID NO: 1051784 - RNA, 24 nt, Human
ugagggucaucaccacugcgccuu

SEQ ID NO: 1051785 - RNA, 21 nt, Human
ugcucugcuuuccauauuuua

SEQ ID NO: 1051786 - RNA, 21 nt, Human
uggaaguccaaaguaccaggg

SEQ ID NO: 1051787 - RNA, 25 nt, Human
uggaaguccaaaguaccagggauug

SEQ ID NO: 1051788 - RNA, 25 nt, Human
uguagaacgauagguaaucuuuuga

SEQ ID NO: 1051789 - RNA, 20 nt, Human
ugugaacaaguugugcuucu

SEQ ID NO: 1051790 - RNA, 21 nt, Human
ugugcacuuaaaaaaugacca

SEQ ID NO: 1051791 - RNA, 22 nt, Human
uguuuaguuuauuuuuacaugu

SEQ ID NO: 1051792 - RNA, 19 nt, Human
uguuuucuuuuucucccuc

SEQ ID NO: 1051793 - RNA, 24 nt, Human
uuaaaaaaguagcaauguguugga

SEQ ID NO: 1051794 - RNA, 22 nt, Human
uuaugauacaguauuuaaaaaa

SEQ ID NO: 1051795 - RNA, 23 nt, Human
uucacauaaaucauguuuuacau

SEQ ID NO: 1051796 - RNA, 22 nt, Human
uucacauccauaugcacaacca

SEQ ID NO: 1051797 - RNA, 20 nt, Human
uuccuuuaaauaguucacuu

SEQ ID NO: 1051798 - RNA, 21 nt, Human
uuguuauuaauguucuccaga

SEQ ID NO: 1051799 - RNA, 18 nt, Human
uuuaugaaauuccugaga

SEQ ID NO: 1051800 - RNA, 19 nt, Human
uuuccauguauuuuauugu

SEQ ID NO: 1051801 - RNA, 18 nt, Human
aaagugcugggauuacaa

SEQ ID NO: 1051802 - RNA, 24 nt, Human
aaagugcugggauuacaaguguga

SEQ ID NO: 1051803 - RNA, 18 nt, Human
aacagacacucaauacau

SEQ ID NO: 1051804 - RNA, 18 nt, Human
aacagcauuauuauuacc

SEQ ID NO: 1051805 - RNA, 21 nt, Human
aagaaaaaaaaugcuuaggca

SEQ ID NO: 1051806 - RNA, 19 nt, Human
aaggaaggaaagugagggg

SEQ ID NO: 1051807 - RNA, 20 nt, Human
aaggugcugggauuacaggc

SEQ ID NO: 1051808 - RNA, 24 nt, Human
aaggugcugggauuacaggcauga

SEQ ID NO: 1051809 - RNA, 19 nt, Human
aaguaaacugccucagugu

SEQ ID NO: 1051810 - RNA, 22 nt, Human
aaguagcugggaucacaggcau

SEQ ID NO: 1051811 - RNA, 24 nt, Human
aaguagcugggaucacaggcaugc

SEQ ID NO: 1051812 - RNA, 18 nt, Human
aagugcugggauuacaag

SEQ ID NO: 1051813 - RNA, 19 nt, Human
aagugcugggauuacaagu

SEQ ID NO: 1051814 - RNA, 24 nt, Human
aauuuuuuguauuuaguagagaug

SEQ ID NO: 1051815 - RNA, 26 nt, Human
acaaagagagacacagagaacaccau

SEQ ID NO: 1051816 - RNA, 24 nt, Human
acaauaggugcaugacaccaggcc

SEQ ID NO: 1051817 - RNA, 21 nt, Human
acagcaaccucugccucccgg

SEQ ID NO: 1051818 - RNA, 21 nt, Human
acagcaaccucugccucccgg

SEQ ID NO: 1051819 - RNA, 22 nt, Human
acagcaaccucugccucccggg

SEQ ID NO: 1051820 - RNA, 19 nt, Human
acaggguuucaccaugcug

SEQ ID NO: 1051821 - RNA, 20 nt, Human
acaggguuucaccaugcugg

SEQ ID NO: 1051822 - RNA, 24 nt, Human
acaggguuucaccaugcuggccag

SEQ ID NO: 1051823 - RNA, 23 nt, Human
acccaggcuggagugcaguggug

SEQ ID NO: 1051824 - RNA, 24 nt, Human
acccaggcuggagugcaguggugu

SEQ ID NO: 1051825 - RNA, 23 nt, Human
accucagccucucaaguagcugg

SEQ ID NO: 1051826 - RNA, 24 nt, Human
accugaauuuuugccgcccaacac

SEQ ID NO: 1051827 - RNA, 19 nt, Human
acuacaggcgugugccacc

SEQ ID NO: 1051828 - RNA, 20 nt, Human
acugcacccagccaaugcag

SEQ ID NO: 1051829 - RNA, 18 nt, Human
aggaaagugaggggggcc

SEQ ID NO: 1051830 - RNA, 18 nt, Human
aggaaggaaagugagggg

SEQ ID NO: 1051831 - RNA, 18 nt, Human
aggaaggaaagugagggg

SEQ ID NO: 1051832 - RNA, 18 nt, Human
aggcaauccuccugccuc

SEQ ID NO: 1051833 - RNA, 25 nt, Human
aggcaauccuccugccucagccucc

SEQ ID NO: 1051834 - RNA, 19 nt, Human
aggcagugggcuccuggac

SEQ ID NO: 1051835 - RNA, 24 nt, Human
aggcgugugccaccacacccagcu

SEQ ID NO: 1051836 - RNA, 19 nt, Human
agggguaugacuggaaagg

SEQ ID NO: 1051837 - RNA, 24 nt, Human
aggugauccaccugccucggccuu

SEQ ID NO: 1051838 - RNA, 26 nt, Human
aggugcugggauuacaggcaugagcc

SEQ ID NO: 1051839 - RNA, 22 nt, Human
aguaaagacaggguuucaccau

SEQ ID NO: 1051840 - RNA, 22 nt, Human
aguagagaugggguuucgccau

SEQ ID NO: 1051841 - RNA, 23 nt, Human
aguagcugggacuacaggcgugu

SEQ ID NO: 1051842 - RNA, 28 nt, Human
agugaggggggcaaaguugaggaaagga

SEQ ID NO: 1051843 - RNA, 23 nt, Human
agugcaguggugugauaacagcu

SEQ ID NO: 1051844 - RNA, 24 nt, Human
agugcaguggugugauaacagcuc

SEQ ID NO: 1051845 - RNA, 24 nt, Human
agugcugggauuacaagugugagu

SEQ ID NO: 1051846 - RNA, 23 nt, Human
aguugaggaaaggaagaaggacu

SEQ ID NO: 1051847 - RNA, 21 nt, Human
auccuccugccucagccuccc

SEQ ID NO: 1051848 - RNA, 24 nt, Human
augauccaccugccucggccuccc

SEQ ID NO: 1051849 - RNA, 20 nt, Human
augggguuucgccauguugg

SEQ ID NO: 1051850 - RNA, 23 nt, Human
augggguuucgccauguugguca

SEQ ID NO: 1051851 - RNA, 24 nt, Human
augggguuucgccauguuggucau

SEQ ID NO: 1051852 - RNA, 23 nt, Human
auucuuguugcccaggcuggagu

SEQ ID NO: 1051853 - RNA, 24 nt, Human
auucuuguugcccaggcuggagug

SEQ ID NO: 1051854 - RNA, 22 nt, Human
auuuucccaccucagccucuca

SEQ ID NO: 1051855 - RNA, 25 nt, Human
caaacuccugggcucaggcaauccu

SEQ ID NO: 1051856 - RNA, 24 nt, Human
caaagugcugggauuacaagugug

SEQ ID NO: 1051857 - RNA, 21 nt, Human
caacacuuucagaaacuucaa

SEQ ID NO: 1051858 - RNA, 21 nt, Human
caaggugcugggauuacaggc

SEQ ID NO: 1051859 - RNA, 23 nt, Human
caaggugcugggauuacaggcau

SEQ ID NO: 1051860 - RNA, 24 nt, Human
caaggugcugggauuacaggcaug

SEQ ID NO: 1051861 - RNA, 26 nt, Human
caaugcacaguagguacuaaaugaac

SEQ ID NO: 1051862 - RNA, 23 nt, Human
cacaggcaugcgccaccaugccc

SEQ ID NO: 1051863 - RNA, 24 nt, Human
caccacacccagcuaauuuuugua

SEQ ID NO: 1051864 - RNA, 22 nt, Human
caccaugcuggccaggaugguc

SEQ ID NO: 1051865 - RNA, 24 nt, Human
caccaugcuggccaggauggucuc

SEQ ID NO: 1051866 - RNA, 24 nt, Human
cacccaggcuggagugcaguggug

SEQ ID NO: 1051867 - RNA, 21 nt, Human
cacccucaaacuccugggcuc

SEQ ID NO: 1051868 - RNA, 18 nt, Human
caccgugcccagcccucc

SEQ ID NO: 1051869 - RNA, 23 nt, Human
caccugccucggccucccaaagu

SEQ ID NO: 1051870 - RNA, 24 nt, Human
cacuccacccucaaacuccugggc

SEQ ID NO: 1051871 - RNA, 21 nt, Human
cacugcaacuucugccuccug

SEQ ID NO: 1051872 - RNA, 23 nt, Human
cacugcaacuucugccuccuggg

SEQ ID NO: 1051873 - RNA, 21 nt, Human
cagcccuccuucagcuuucua

SEQ ID NO: 1051874 - RNA, 20 nt, Human
cagccuccugaguagcuggg

SEQ ID NO: 1051875 - RNA, 22 nt, Human
caggcaauccuccugccucagc

SEQ ID NO: 1051876 - RNA, 24 nt, Human
caggguuucaccaugcuggccagg

SEQ ID NO: 1051877 - RNA, 22 nt, Human
caggugauccaccugccucggc

SEQ ID NO: 1051878 - RNA, 23 nt, Human
cagugggcuccuggacaucuugc

SEQ ID NO: 1051879 - RNA, 22 nt, Human
caugcuggucucaaacuccuga

SEQ ID NO: 1051880 - RNA, 23 nt, Human
cauucuuguugcccaggcuggag

SEQ ID NO: 1051881 - RNA, 18 nt, Human
cauugugugacuggcagu

SEQ ID NO: 1051882 - RNA, 21 nt, Human
ccaaagugcugggauuacaag

SEQ ID NO: 1051883 - RNA, 24 nt, Human
ccaaagugcugggauuacaagugu

SEQ ID NO: 1051884 - RNA, 20 nt, Human
ccaccacacccagcuaauuu

SEQ ID NO: 1051885 - RNA, 21 nt, Human
ccacugcacccagccaaugca

SEQ ID NO: 1051886 - RNA, 24 nt, Human
ccagaggcacaaagagagacacag

SEQ ID NO: 1051887 - RNA, 18 nt, Human
ccagcccuccuucagcuu

SEQ ID NO: 1051888 - RNA, 22 nt, Human
ccauguuggucaugcuggucuc

SEQ ID NO: 1051889 - RNA, 23 nt, Human
ccuaccucagccuccugaguagc

SEQ ID NO: 1051890 - RNA, 24 nt, Human
ccuccuggguucaagcgauucucc

SEQ ID NO: 1051891 - RNA, 21 nt, Human
ccugaccucaggugauccacc

SEQ ID NO: 1051892 - RNA, 23 nt, Human
ccugaccucaggugauccaccug

SEQ ID NO: 1051893 - RNA, 23 nt, Human
ccugaccucaggugauccaccug

SEQ ID NO: 1051894 - RNA, 23 nt, Human
ccugaguagcugggacuacaggc

SEQ ID NO: 1051895 - RNA, 24 nt, Human
ccugaguagcugggacuacaggcg

SEQ ID NO: 1051896 - RNA, 24 nt, Human
ccugccucggccucccaaagugcu

SEQ ID NO: 1051897 - RNA, 18 nt, Human
ccuucagcuuucuaaggc

SEQ ID NO: 1051898 - RNA, 24 nt, Human
cgccauguuggucaugcuggucuc

SEQ ID NO: 1051899 - RNA, 20 nt, Human
cgugugccaccacacccagc

SEQ ID NO: 1051900 - RNA, 21 nt, Human
cuaacagacacucaauacaug

SEQ ID NO: 1051901 - RNA, 20 nt, Human
cuaauuuuuguauuuuuaga

SEQ ID NO: 1051902 - RNA, 23 nt, Human
cuaccucagccuccugaguagcu

SEQ ID NO: 1051903 - RNA, 18 nt, Human
cucacuccacccucaaac

SEQ ID NO: 1051904 - RNA, 24 nt, Human
cucacugcaacuucugccuccugg

SEQ ID NO: 1051905 - RNA, 24 nt, Human
cucagccuccugaguagcugggac

SEQ ID NO: 1051906 - RNA, 24 nt, Human
cucagccucucaaguagcugggau

SEQ ID NO: 1051907 - RNA, 23 nt, Human
cuccacccucaaacuccugggcu

SEQ ID NO: 1051908 - RNA, 22 nt, Human
cuccuaccucagccuccugagu

SEQ ID NO: 1051909 - RNA, 23 nt, Human
cuccugggcucaggcaauccucc

SEQ ID NO: 1051910 - RNA, 21 nt, Human
cuccuggguucaagcgauucu

SEQ ID NO: 1051911 - RNA, 20 nt, Human
cucugucacccaggcuggag

SEQ ID NO: 1051912 - RNA, 23 nt, Human
cugcaacuucugccuccuggguu

SEQ ID NO: 1051913 - RNA, 24 nt, Human
cugcaacuucugccuccuggguuc

SEQ ID NO: 1051914 - RNA, 20 nt, Human
cuggaaaggaaaaaggaagg

SEQ ID NO: 1051915 - RNA, 24 nt, Human
cuuacagcaaccucugccucccgg

SEQ ID NO: 1051916 - RNA, 19 nt, Human
cuuccucuccuuuuauguc

SEQ ID NO: 1051917 - RNA, 24 nt, Human
cuugcucugucacccaggcuggag

SEQ ID NO: 1051918 - RNA, 24 nt, Human
gaccucaggugauccaccugccuc

SEQ ID NO: 1051919 - RNA, 22 nt, Human
gaccucaugauccaccugccuc

SEQ ID NO: 1051920 - RNA, 22 nt, Human
gaccucaugauccaccugccuc

SEQ ID NO: 1051921 - RNA, 20 nt, Human
gacgccgcggggcggacgcc

SEQ ID NO: 1051922 - RNA, 18 nt, Human
gagacaauaggugcauga

SEQ ID NO: 1051923 - RNA, 19 nt, Human
gagacucaguuuccucauc

SEQ ID NO: 1051924 - RNA, 24 nt, Human
gagaugggguuucgccauguuggu

SEQ ID NO: 1051925 - RNA, 20 nt, Human
gaguagcugggacuacaggc

SEQ ID NO: 1051926 - RNA, 25 nt, Human
gaguagcugggacuacaggcgugug

SEQ ID NO: 1051927 - RNA, 22 nt, Human
gaucacaggcaugcgccaccau

SEQ ID NO: 1051928 - RNA, 18 nt, Human
gauuacaagugugaguca

SEQ ID NO: 1051929 - RNA, 24 nt, Human
gauuacaagugugagucaccgugc

SEQ ID NO: 1051930 - RNA, 18 nt, Human
gauuacaggcaugagcca

SEQ ID NO: 1051931 - RNA, 22 nt, Human
gauuacaggcaugagccacugc

SEQ ID NO: 1051932 - RNA, 23 nt, Human
gauuacaggcaugagccacugca

SEQ ID NO: 1051933 - RNA, 21 nt, Human
gauucuccuaccucagccucc

SEQ ID NO: 1051934 - RNA, 22 nt, Human
gcaaccucugccucccggguuc

SEQ ID NO: 1051935 - RNA, 19 nt, Human
gcacgacaccugaaggaag

SEQ ID NO: 1051936 - RNA, 23 nt, Human
gccauguuggucaugcuggucuc

SEQ ID NO: 1051937 - RNA, 19 nt, Human
gcccaggcuggagugcaau

SEQ ID NO: 1051938 - RNA, 25 nt, Human
gcucugucacccaggcuggagugca

SEQ ID NO: 1051939 - RNA, 23 nt, Human
gcuggucucaaacuccugaccuc

SEQ ID NO: 1051940 - RNA, 19 nt, Human
ggacuacaggcgugugcca

SEQ ID NO: 1051941 - RNA, 22 nt, Human
ggauuacaggcaugagccacug

SEQ ID NO: 1051942 - RNA, 22 nt, Human
ggcuggagugcaguggugugau

SEQ ID NO: 1051943 - RNA, 22 nt, Human
gggcucaggcaauccuccugcc

SEQ ID NO: 1051944 - RNA, 21 nt, Human
gggguuucgccauguugguca

SEQ ID NO: 1051945 - RNA, 18 nt, Human
ggugcugggauuacaggc

SEQ ID NO: 1051946 - RNA, 23 nt, Human
guagagaugggguuucgccaugu

SEQ ID NO: 1051947 - RNA, 23 nt, Human
gucaugcuggucucaaacuccug

SEQ ID NO: 1051948 - RNA, 22 nt, Human
gucuuauuuaucuuuggaucca

SEQ ID NO: 1051949 - RNA, 22 nt, Human
gugauccaccugccucggccuu

SEQ ID NO: 1051950 - RNA, 21 nt, Human
gugcugggauuacaggcauga

SEQ ID NO: 1051951 - RNA, 19 nt, Human
gugugccaccacacccagc

SEQ ID NO: 1051952 - RNA, 22 nt, Human
uaacagaaacauaccuaguuac

SEQ ID NO: 1051953 - RNA, 22 nt, Human
uaacagacacucaauacauggu

SEQ ID NO: 1051954 - RNA, 24 nt, Human
uaacagcucacuccacccucaaac

SEQ ID NO: 1051955 - RNA, 21 nt, Human
uaagagauacugaauguaaac

SEQ ID NO: 1051956 - RNA, 24 nt, Human
uaauuuuuguauuuuuaguaaaga

SEQ ID NO: 1051957 - RNA, 22 nt, Human
uaauuuuuuguauuuaguagag

SEQ ID NO: 1051958 - RNA, 23 nt, Human
uacagcaaccucugccucccggg

SEQ ID NO: 1051959 - RNA, 24 nt, Human
uacaggcaugagccacugcaccca

SEQ ID NO: 1051960 - RNA, 24 nt, Human
uacaggcgugugccaccacaccca

SEQ ID NO: 1051961 - RNA, 24 nt, Human
uaccucagccuccugaguagcugg

SEQ ID NO: 1051962 - RNA, 22 nt, Human
uagagaugggguuucgccaugu

SEQ ID NO: 1051963 - RNA, 21 nt, Human
uaggugcaugacaccaggccc

SEQ ID NO: 1051964 - RNA, 24 nt, Human
uaguaaagacaggguuucaccaug

SEQ ID NO: 1051965 - RNA, 25 nt, Human
uaguaaagacaggguuucaccaugc

SEQ ID NO: 1051966 - RNA, 24 nt, Human
uaguagagaugggguuucgccaug

SEQ ID NO: 1051967 - RNA, 24 nt, Human
uauuuaguagagaugggguuucgc

SEQ ID NO: 1051968 - RNA, 28 nt, Human
ucaaaacaaugaugucuuggucucccuc

SEQ ID NO: 1051969 - RNA, 22 nt, Human
ucaaggugcugggauuacaggc

SEQ ID NO: 1051970 - RNA, 23 nt, Human
ucaaggugcugggauuacaggca

SEQ ID NO: 1051971 - RNA, 24 nt, Human
ucaaggugcugggauuacaggcau

SEQ ID NO: 1051972 - RNA, 24 nt, Human
ucaccaugcuggccaggauggucu

SEQ ID NO: 1051973 - RNA, 22 nt, Human
ucacccaggcuggagugcagug

SEQ ID NO: 1051974 - RNA, 24 nt, Human
ucacugcaacuucugccuccuggg

SEQ ID NO: 1051975 - RNA, 25 nt, Human
ucacugcaacuucugccuccugggu

SEQ ID NO: 1051976 - RNA, 23 nt, Human
ucagccuccugaguagcugggac

SEQ ID NO: 1051977 - RNA, 22 nt, Human
ucagcuuucuaaggcagugggc

SEQ ID NO: 1051978 - RNA, 21 nt, Human
ucaggugauccaccugccucg

SEQ ID NO: 1051979 - RNA, 24 nt, Human
ucauacuuugcaccuaacagacac

SEQ ID NO: 1051980 - RNA, 21 nt, Human
ucauucuuguugcccaggcug

SEQ ID NO: 1051981 - RNA, 23 nt, Human
ucauucuuguugcccaggcugga

SEQ ID NO: 1051982 - RNA, 20 nt, Human
uccauuauuggaacacuaag

SEQ ID NO: 1051983 - RNA, 18 nt, Human
ucccaaagugcugggauu

SEQ ID NO: 1051984 - RNA, 23 nt, Human
ucccaaagugcugggauuacaag

SEQ ID NO: 1051985 - RNA, 25 nt, Human
ucccccaggcaccugaauuuuugcc

SEQ ID NO: 1051986 - RNA, 18 nt, Human
ucccggguucaagccauu

SEQ ID NO: 1051987 - RNA, 18 nt, Human
ucccggguucaagccauu

SEQ ID NO: 1051988 - RNA, 21 nt, Human
ucccggguucaagccauuuuc

SEQ ID NO: 1051989 - RNA, 20 nt, Human
ucccucugcggcccgccaga

SEQ ID NO: 1051990 - RNA, 27 nt, Human
uccuccugccucagccucccaaguaac

SEQ ID NO: 1051991 - RNA, 24 nt, Human
uccugaguagcugggacuacaggc

SEQ ID NO: 1051992 - RNA, 18 nt, Human
uccugggcucaggcaauc

SEQ ID NO: 1051993 - RNA, 24 nt, Human
uccugggcucaggcaauccuccug

SEQ ID NO: 1051994 - RNA, 21 nt, Human
uccuggguucaagcgauucuc

SEQ ID NO: 1051995 - RNA, 23 nt, Human
uccuggguucaagcgauucuccu

SEQ ID NO: 1051996 - RNA, 22 nt, Human
ucgccauguuggucaugcuggu

SEQ ID NO: 1051997 - RNA, 24 nt, Human
ucucaaguagcugggaucacaggc

SEQ ID NO: 1051998 - RNA, 18 nt, Human
ucucacucuguaguuuga

SEQ ID NO: 1051999 - RNA, 24 nt, Human
ucugucacccaggcuggagugcag

SEQ ID NO: 1052000 - RNA, 23 nt, Human
ucuugcucugucacccaggcugg

SEQ ID NO: 1052001 - RNA, 24 nt, Human
ucuugcucugucacccaggcugga

SEQ ID NO: 1052002 - RNA, 22 nt, Human
ucuuguugcccaggcuggagug

SEQ ID NO: 1052003 - RNA, 24 nt, Human
ugaccucaggugauccaccugccu

SEQ ID NO: 1052004 - RNA, 25 nt, Human
ugaccucaugauccaccugccucgg

SEQ ID NO: 1052005 - RNA, 21 nt, Human
ugaggggggcaaaguugagga

SEQ ID NO: 1052006 - RNA, 25 nt, Human
ugcaccuaacagacacucaauacau

SEQ ID NO: 1052007 - RNA, 18 nt, Human
ugcccaggcuggagugca

SEQ ID NO: 1052008 - RNA, 21 nt, Human
ugcccaggcuggagugcaaug

SEQ ID NO: 1052009 - RNA, 21 nt, Human
ugcccaggcuggagugcaaug

SEQ ID NO: 1052010 - RNA, 23 nt, Human
ugcccggcuaauuuuuuguauuu

SEQ ID NO: 1052011 - RNA, 24 nt, Human
ugccucagccucccaaguaacuga

SEQ ID NO: 1052012 - RNA, 19 nt, Human
ugccucccggguucaagcc

SEQ ID NO: 1052013 - RNA, 21 nt, Human
ugccucggccucccaaagugc

SEQ ID NO: 1052014 - RNA, 24 nt, Human
ugccucggccucccaaagugcugg

SEQ ID NO: 1052015 - RNA, 24 nt, Human
ugcugggauuacaagugugaguca

SEQ ID NO: 1052016 - RNA, 22 nt, Human
ugcuuaggcauagaacagaaca

SEQ ID NO: 1052017 - RNA, 23 nt, Human
uggagugcaaugguacaaucuca

SEQ ID NO: 1052018 - RNA, 24 nt, Human
uggagugcaaugguacaaucucag

SEQ ID NO: 1052019 - RNA, 19 nt, Human
uggagugcaguggugugau

SEQ ID NO: 1052020 - RNA, 23 nt, Human
uggagugcaguggugugauaaca

SEQ ID NO: 1052021 - RNA, 28 nt, Human
uggagugcaguggugugauggcucuagc

SEQ ID NO: 1052022 - RNA, 21 nt, Human
uggccaggauggucucaaucu

SEQ ID NO: 1052023 - RNA, 18 nt, Human
ugggacuacaggcgugug

SEQ ID NO: 1052024 - RNA, 21 nt, Human
ugggacuacaggcgugugcca

SEQ ID NO: 1052025 - RNA, 22 nt, Human
ugggacuacaggcgugugccac

SEQ ID NO: 1052026 - RNA, 24 nt, Human
ugggacuacaggcgugugccacca

SEQ ID NO: 1052027 - RNA, 21 nt, Human
ugggaucacaggcaugcgcca

SEQ ID NO: 1052028 - RNA, 22 nt, Human
ugggaucacaggcaugcgccac

SEQ ID NO: 1052029 - RNA, 24 nt, Human
ugggaucacaggcaugcgccacca

SEQ ID NO: 1052030 - RNA, 21 nt, Human
ugggauuacaagugugaguca

SEQ ID NO: 1052031 - RNA, 22 nt, Human
ugggauuacaagugugagucac

SEQ ID NO: 1052032 - RNA, 23 nt, Human
ugggauuacaagugugagucacc

SEQ ID NO: 1052033 - RNA, 23 nt, Human
ugggauuacaagugugagucacc

SEQ ID NO: 1052034 - RNA, 24 nt, Human
ugggauuacaagugugagucaccg

SEQ ID NO: 1052035 - RNA, 19 nt, Human
ugggauuacaggcaugagc

SEQ ID NO: 1052036 - RNA, 21 nt, Human
ugggauuacaggcaugagcca

SEQ ID NO: 1052037 - RNA, 22 nt, Human
ugggauuacaggcaugagccac

SEQ ID NO: 1052038 - RNA, 22 nt, Human
ugggauuacaggcaugagccac

SEQ ID NO: 1052039 - RNA, 24 nt, Human
ugggauuacaggcaugagccacug

SEQ ID NO: 1052040 - RNA, 26 nt, Human
ugggauuacaggcaugagccacugca

SEQ ID NO: 1052041 - RNA, 24 nt, Human
ugggcucaggcaauccuccugccu

SEQ ID NO: 1052042 - RNA, 21 nt, Human
ugggcuccuggacaucuugcc

SEQ ID NO: 1052043 - RNA, 22 nt, Human
ugggguuucgccauguugguca

SEQ ID NO: 1052044 - RNA, 24 nt, Human
ugggguuucgccauguuggucaug

SEQ ID NO: 1052045 - RNA, 23 nt, Human
uggguucaagcgauucuccuacc

SEQ ID NO: 1052046 - RNA, 24 nt, Human
ugguacaaucucagcuuacagcaa

SEQ ID NO: 1052047 - RNA, 24 nt, Human
uggucaugcuggucucaaacuccu

SEQ ID NO: 1052048 - RNA, 20 nt, Human
uguugcccaggcuggagugc

SEQ ID NO: 1052049 - RNA, 22 nt, Human
uguugcccaggcuggagugcaa

SEQ ID NO: 1052050 - RNA, 25 nt, Human
uguuuuguuuuguuuuguuuugauu

SEQ ID NO: 1052051 - RNA, 24 nt, Human
uuacagcaaccucugccucccggg

SEQ ID NO: 1052052 - RNA, 25 nt, Human
uuacauauuuuaugcuuaauuugaa

SEQ ID NO: 1052053 - RNA, 24 nt, Human
uuaguaaagacaggguuucaccau

SEQ ID NO: 1052054 - RNA, 18 nt, Human
uuaguagagaugggguuu

SEQ ID NO: 1052055 - RNA, 22 nt, Human
uuaguagagaugggguuucgcc

SEQ ID NO: 1052056 - RNA, 24 nt, Human
uuaguagagaugggguuucgccau

SEQ ID NO: 1052057 - RNA, 20 nt, Human
uucaagccauuuucccaccu

SEQ ID NO: 1052058 - RNA, 24 nt, Human
uucaagccauuuucccaccucagc

SEQ ID NO: 1052059 - RNA, 23 nt, Human
uucaagcgauucuccuaccucag

SEQ ID NO: 1052060 - RNA, 24 nt, Human
uucaagcgauucuccuaccucagc

SEQ ID NO: 1052061 - RNA, 24 nt, Human
uucaaggugcugggauuacaggca

SEQ ID NO: 1052062 - RNA, 24 nt, Human
uucauucuuguugcccaggcugga

SEQ ID NO: 1052063 - RNA, 23 nt, Human
uucccaccucagccucucaagua

SEQ ID NO: 1052064 - RNA, 24 nt, Human
uuccuugauuacauauuuuaugcu

SEQ ID NO: 1052065 - RNA, 18 nt, Human
uucuuguugcccaggcug

SEQ ID NO: 1052066 - RNA, 18 nt, Human
uugcccaggcuggagugc

SEQ ID NO: 1052067 - RNA, 24 nt, Human
uugcucugucacccaggcuggagu

SEQ ID NO: 1052068 - RNA, 18 nt, Human
uuggaacacuaagcaugu

SEQ ID NO: 1052069 - RNA, 21 nt, Human
uuuaguagagaugggguuucg

SEQ ID NO: 1052070 - RNA, 19 nt, Human
uuucaccaugcuggccagg

SEQ ID NO: 1052071 - RNA, 24 nt, Human
uuucauucuuguugcccaggcugg

SEQ ID NO: 1052072 - RNA, 20 nt, Human
uuugaaguauuuuuccaaug

SEQ ID NO: 1052073 - RNA, 19 nt, Human
uuuguuuuguuuuguuuug

SEQ ID NO: 1052074 - RNA, 22 nt, Human
uuuuguauuuuuaguaaagaca

SEQ ID NO: 1052075 - RNA, 24 nt, Human
uuuuuaguaaagacaggguuucac

SEQ ID NO: 1052076 - RNA, 19 nt, Human
uuuuuguauuuaguagaga

SEQ ID NO: 1052077 - RNA, 20 nt, Human
uuuuuguauuuuuaguaaag

SEQ ID NO: 1052078 - RNA, 19 nt, Human
acccaggggugauggcagc

SEQ ID NO: 1052079 - RNA, 18 nt, Human
accugcaggccaggaucu

SEQ ID NO: 1052080 - RNA, 21 nt, Human
agccucggcaaugccacagcc

SEQ ID NO: 1052081 - RNA, 18 nt, Human
agcgccuggacuuuggcc

SEQ ID NO: 1052082 - RNA, 26 nt, Human
cagcuggccuucuccagcagggagac

SEQ ID NO: 1052083 - RNA, 20 nt, Human
cagcugggccagugcuggca

SEQ ID NO: 1052084 - RNA, 19 nt, Human
ccagcaugggucacccagg

SEQ ID NO: 1052085 - RNA, 20 nt, Human
ccaggggugauggcagcaag

SEQ ID NO: 1052086 - RNA, 25 nt, Human
ccagugcuggcagcuggccuucucc

SEQ ID NO: 1052087 - RNA, 19 nt, Human
ccucuguagccagcagccc

SEQ ID NO: 1052088 - RNA, 21 nt, Human
ccugcaggccaggaucuugcc

SEQ ID NO: 1052089 - RNA, 19 nt, Human
cgccuggacuuuggccuug

SEQ ID NO: 1052090 - RNA, 20 nt, Human
cucuguagccagcagccccc

SEQ ID NO: 1052091 - RNA, 22 nt, Human
cuuggagcucgccagccucggc

SEQ ID NO: 1052092 - RNA, 19 nt, Human
gccugcugcgcagugcccu

SEQ ID NO: 1052093 - RNA, 18 nt, Human
gcgccuggacuuuggccu

SEQ ID NO: 1052094 - RNA, 25 nt, Human
ggcaauguugcucacuuucagcaac

SEQ ID NO: 1052095 - RNA, 20 nt, Human
ggccuucuccagcagggaga

SEQ ID NO: 1052096 - RNA, 19 nt, Human
gugauggcagcaaggggcu

SEQ ID NO: 1052097 - RNA, 18 nt, Human
uaccugcaggccaggauc

SEQ ID NO: 1052098 - RNA, 23 nt, Human
uccgugauguugcagucccucuc

SEQ ID NO: 1052099 - RNA, 22 nt, Human
uccugcugugugcuuggccugc

SEQ ID NO: 1052100 - RNA, 24 nt, Human
ugauggcagcaaggggcuacauga

SEQ ID NO: 1052101 - RNA, 19 nt, Human
ugauguugcagucccucuc

SEQ ID NO: 1052102 - RNA, 19 nt, Human
ugccucuguagccagcagc

SEQ ID NO: 1052103 - RNA, 19 nt, Human
ugcugggucucgcgggccu

SEQ ID NO: 1052104 - RNA, 23 nt, Human
uguugcagucccucucguugucc

SEQ ID NO: 1052105 - RNA, 19 nt, Human
aaagaagcacuugcuggug

SEQ ID NO: 1052106 - RNA, 24 nt, Human
aaggccuuccaaagaagcacuugc

SEQ ID NO: 1052107 - RNA, 22 nt, Human
acgcagguggcccuccuccagc

SEQ ID NO: 1052108 - RNA, 18 nt, Human
agcccccgagucaguccu

SEQ ID NO: 1052109 - RNA, 21 nt, Human
agccgagcccccgagucaguc

SEQ ID NO: 1052110 - RNA, 18 nt, Human
cauuuuuaccuuggcaca

SEQ ID NO: 1052111 - RNA, 22 nt, Human
ccuccagccgagcccccgaguc

SEQ ID NO: 1052112 - RNA, 18 nt, Human
cuccuccagccgagcccc

SEQ ID NO: 1052113 - RNA, 18 nt, Human
cuuuuucuuaggacgacu

SEQ ID NO: 1052114 - RNA, 21 nt, Human
gagcccccgagucaggacccu

SEQ ID NO: 1052115 - RNA, 20 nt, Human
ucaagagguagccuugucuu

SEQ ID NO: 1052116 - RNA, 21 nt, Human
ucagagggccuucgaccagca

SEQ ID NO: 1052117 - RNA, 19 nt, Human
ucauuuuuaccuuggcaca

SEQ ID NO: 1052118 - RNA, 18 nt, Human
ugguguguuuuuuguucu

SEQ ID NO: 1052119 - RNA, 19 nt, Human
uucaagagguagccuuguc

SEQ ID NO: 1052120 - RNA, 23 nt, Human
uuccugcccuucuacuccuauaa

SEQ ID NO: 1052121 - RNA, 19 nt, Human
uuaguuccuugcccuucac

SEQ ID NO: 1052122 - RNA, 26 nt, Human
uugaauaguuuguugcaguccuuccc

SEQ ID NO: 1052123 - RNA, 18 nt, Human
ccauuuuauuuucuaaaa

SEQ ID NO: 1052124 - RNA, 19 nt, Human
aacacugcggcgcccccag

SEQ ID NO: 1052125 - RNA, 19 nt, Human
acucauacagagggccugg

SEQ ID NO: 1052126 - RNA, 23 nt, Human
agagugugcaaugcggcgccccc

SEQ ID NO: 1052127 - RNA, 23 nt, Human
augagucucgguuagacucaaaa

SEQ ID NO: 1052128 - RNA, 19 nt, Human
cacgaacacugcggcgccc

SEQ ID NO: 1052129 - RNA, 21 nt, Human
cacgaacacugcggcgccccc

SEQ ID NO: 1052130 - RNA, 22 nt, Human
cagagggccugggagugggcac

SEQ ID NO: 1052131 - RNA, 20 nt, Human
cagcccgcugccccauccca

SEQ ID NO: 1052132 - RNA, 26 nt, Human
cccacgaacacugcggcgcccccaga

SEQ ID NO: 1052133 - RNA, 20 nt, Human
ccccaucccacgaacacugc

SEQ ID NO: 1052134 - RNA, 20 nt, Human
ccccgccagcccgcugccgg

SEQ ID NO: 1052135 - RNA, 25 nt, Human
cccgccagcccgcugccggagcccg

SEQ ID NO: 1052136 - RNA, 22 nt, Human
cccgcugccggagcccgggagc

SEQ ID NO: 1052137 - RNA, 20 nt, Human
cucagggcaacaggagagaa

SEQ ID NO: 1052138 - RNA, 20 nt, Human
gaaggagcgagggagcgcag

SEQ ID NO: 1052139 - RNA, 19 nt, Human
gagcucagggaaggagcga

SEQ ID NO: 1052140 - RNA, 21 nt, Human
gagucucgguuagacucaaaa

SEQ ID NO: 1052141 - RNA, 25 nt, Human
ggagcccgggagcucaggaccaaag

SEQ ID NO: 1052142 - RNA, 22 nt, Human
gggcacucagggcaacaggaga

SEQ ID NO: 1052143 - RNA, 22 nt, Human
gggcacucagggcaacaggaga

SEQ ID NO: 1052144 - RNA, 19 nt, Human
uaagaaccccagaucucga

SEQ ID NO: 1052145 - RNA, 20 nt, Human
uacugcaucucaugcaugua

SEQ ID NO: 1052146 - RNA, 22 nt, Human
ucaugcauguauucuuccaaau

SEQ ID NO: 1052147 - RNA, 18 nt, Human
uggaccaucgagaucccc

SEQ ID NO: 1052148 - RNA, 20 nt, Human
aacaagaggguuugaccugg

SEQ ID NO: 1052149 - RNA, 18 nt, Human
aagccuggaagucagacc

SEQ ID NO: 1052150 - RNA, 18 nt, Human
aaucaugguacccagccu

SEQ ID NO: 1052151 - RNA, 22 nt, Human
agagacugcacccccugguagu

SEQ ID NO: 1052152 - RNA, 18 nt, Human
agcaggcagaaguguggc

SEQ ID NO: 1052153 - RNA, 20 nt, Human
agcucucuuugaccaggaag

SEQ ID NO: 1052154 - RNA, 21 nt, Human
aggcagaaguguggcauaucu

SEQ ID NO: 1052155 - RNA, 19 nt, Human
aggcagucaaggaggucaa

SEQ ID NO: 1052156 - RNA, 19 nt, Human
aucuucucaggcccugcca

SEQ ID NO: 1052157 - RNA, 26 nt, Human
auuaacaagagcagccuaguccagga

SEQ ID NO: 1052158 - RNA, 22 nt, Human
cacuccaaaguucaccguucac

SEQ ID NO: 1052159 - RNA, 19 nt, Human
cagcaggcagaaguguggc

SEQ ID NO: 1052160 - RNA, 19 nt, Human
cccaaacguagcucucuuu

SEQ ID NO: 1052161 - RNA, 19 nt, Human
ccccagagacugcaccccc

SEQ ID NO: 1052162 - RNA, 23 nt, Human
cccccauaauuugcaaauagauu

SEQ ID NO: 1052163 - RNA, 19 nt, Human
cucgguagugguggucccc

SEQ ID NO: 1052164 - RNA, 20 nt, Human
cuggaaguuuucuucguaca

SEQ ID NO: 1052165 - RNA, 22 nt, Human
cuucguacaguugccuuucuca

SEQ ID NO: 1052166 - RNA, 23 nt, Human
gaaauccuuucagcuaaaggccu

SEQ ID NO: 1052167 - RNA, 18 nt, Human
gagcagccuaguccagga

SEQ ID NO: 1052168 - RNA, 21 nt, Human
gcagaaguguggcauaucugg

SEQ ID NO: 1052169 - RNA, 21 nt, Human
gccuugagguccaaugugcac

SEQ ID NO: 1052170 - RNA, 23 nt, Human
ggaaaacugcuuucucaugaggg

SEQ ID NO: 1052171 - RNA, 21 nt, Human
ggaggucaagaaauccuuuca

SEQ ID NO: 1052172 - RNA, 21 nt, Human
guugccaacagcaggcagaag

SEQ ID NO: 1052173 - RNA, 21 nt, Human
guugccaggauccucucugca

SEQ ID NO: 1052174 - RNA, 21 nt, Human
uaaaagcuuuauuucccccca

SEQ ID NO: 1052175 - RNA, 23 nt, Human
uaaucacauaaacaagaggguuu

SEQ ID NO: 1052176 - RNA, 21 nt, Human
uaauuugcaaauagauuucau

SEQ ID NO: 1052177 - RNA, 20 nt, Human
uccaagcaaaccacuggcuu

SEQ ID NO: 1052178 - RNA, 22 nt, Human
ucccauccucaguccuguggcc

SEQ ID NO: 1052179 - RNA, 21 nt, Human
uccccagagacugcacccccu

SEQ ID NO: 1052180 - RNA, 21 nt, Human
ugaccaggaagccuggaaguc

SEQ ID NO: 1052181 - RNA, 23 nt, Human
ugccaaauucccauccucagucc

SEQ ID NO: 1052182 - RNA, 19 nt, Human
uggcuugugcuuuagaggc

SEQ ID NO: 1052183 - RNA, 21 nt, Human
uucauauuaguuccacuggaa

SEQ ID NO: 1052184 - RNA, 23 nt, Human
uucccauccucaguccuguggcc

SEQ ID NO: 1052185 - RNA, 25 nt, Human
uuuuuggcuugugcuuuagaggcug

SEQ ID NO: 1052186 - RNA, 24 nt, Human
aaagugcugggauuacaggcguga

SEQ ID NO: 1052187 - RNA, 25 nt, Human
aaaucaauacccagacugauucuca

SEQ ID NO: 1052188 - RNA, 22 nt, Human
aaguagcuggaacuacgggugc

SEQ ID NO: 1052189 - RNA, 19 nt, Human
aagugcugggauuacaggc

SEQ ID NO: 1052190 - RNA, 19 nt, Human
aagugcugggauuacaggc

SEQ ID NO: 1052191 - RNA, 26 nt, Human
aagugcugggauuacaggcgugagcc

SEQ ID NO: 1052192 - RNA, 18 nt, Human
accacacccagcuaauuu

SEQ ID NO: 1052193 - RNA, 18 nt, Human
acgggguuucaccguguu

SEQ ID NO: 1052194 - RNA, 19 nt, Human
acgggguuucaccguguua

SEQ ID NO: 1052195 - RNA, 20 nt, Human
acgggguuucaccguguuag

SEQ ID NO: 1052196 - RNA, 24 nt, Human
acgggguuucaccguguuagccag

SEQ ID NO: 1052197 - RNA, 18 nt, Human
agacagguggcugagccu

SEQ ID NO: 1052198 - RNA, 19 nt, Human
agagacgggguuucaccgu

SEQ ID NO: 1052199 - RNA, 24 nt, Human
agcgauucuccugcuucagccucc

SEQ ID NO: 1052200 - RNA, 23 nt, Human
aggcgugagccaccgugcccggc

SEQ ID NO: 1052201 - RNA, 20 nt, Human
agugcaguggcaugaucucg

SEQ ID NO: 1052202 - RNA, 21 nt, Human
agugcaguggcaugaucucgg

SEQ ID NO: 1052203 - RNA, 23 nt, Human
agugcaguggcaugaucucggcu

SEQ ID NO: 1052204 - RNA, 24 nt, Human
agugcaguggcaugaucucggcuc

SEQ ID NO: 1052205 - RNA, 18 nt, Human
agugcugggauuacaggc

SEQ ID NO: 1052206 - RNA, 24 nt, Human
aguggcaugaucucggcucacugc

SEQ ID NO: 1052207 - RNA, 21 nt, Human
auagagacagguccaucuccu

SEQ ID NO: 1052208 - RNA, 24 nt, Human
auguagagacgggguuucaccgug

SEQ ID NO: 1052209 - RNA, 24 nt, Human
caaagugcugggauuacaggcgug

SEQ ID NO: 1052210 - RNA, 23 nt, Human
caaccuccaccucccagguucaa

SEQ ID NO: 1052211 - RNA, 22 nt, Human
caagcgauucuccugcuucagc

SEQ ID NO: 1052212 - RNA, 18 nt, Human
caccguguuagccaggau

SEQ ID NO: 1052213 - RNA, 24 nt, Human
caccguguuagccaggauggucuc

SEQ ID NO: 1052214 - RNA, 19 nt, Human
caccuuuuuucuggacagg

SEQ ID NO: 1052215 - RNA, 21 nt, Human
cacugcaaccuccaccuccca

SEQ ID NO: 1052216 - RNA, 23 nt, Human
cagcagcaugggagucccuggcu

SEQ ID NO: 1052217 - RNA, 18 nt, Human
cagcaugggagucccugg

SEQ ID NO: 1052218 - RNA, 18 nt, Human
caggagacagguggcuga

SEQ ID NO: 1052219 - RNA, 22 nt, Human
ccaaagugcugggauuacaggc

SEQ ID NO: 1052220 - RNA, 22 nt, Human
ccaaagugcugggauuacaggc

SEQ ID NO: 1052221 - RNA, 24 nt, Human
ccaaagugcugggauuacaggcgu

SEQ ID NO: 1052222 - RNA, 24 nt, Human
ccaccucccagguucaagcgauuc

SEQ ID NO: 1052223 - RNA, 20 nt, Human
cccagguucaagcgauucuc

SEQ ID NO: 1052224 - RNA, 23 nt, Human
cccagguucaagcgauucuccug

SEQ ID NO: 1052225 - RNA, 24 nt, Human
cccagugcaguggcaugaucucgg

SEQ ID NO: 1052226 - RNA, 24 nt, Human
ccucccagguucaagcgauucucc

SEQ ID NO: 1052227 - RNA, 21 nt, Human
ccugaccucgugauccgccug

SEQ ID NO: 1052228 - RNA, 24 nt, Human
cucacugcaaccuccaccucccag

SEQ ID NO: 1052229 - RNA, 24 nt, Human
cuccugaccucgugauccgccugc

SEQ ID NO: 1052230 - RNA, 21 nt, Human
cugacagugguuggaggugaa

SEQ ID NO: 1052231 - RNA, 23 nt, Human
cugcaaccuccaccucccagguu

SEQ ID NO: 1052232 - RNA, 24 nt, Human
cugcaaccuccaccucccagguuc

SEQ ID NO: 1052233 - RNA, 23 nt, Human
cugcuucagccucccaaguagcu

SEQ ID NO: 1052234 - RNA, 22 nt, Human
gaccucgugauccgccugccuc

SEQ ID NO: 1052235 - RNA, 22 nt, Human
gaccucgugauccgccugccuc

SEQ ID NO: 1052236 - RNA, 24 nt, Human
gaccucgugauccgccugccucgg

SEQ ID NO: 1052237 - RNA, 24 nt, Human
gagacgggguuucaccguguuagc

SEQ ID NO: 1052238 - RNA, 22 nt, Human
gagugcugcugacagugguugg

SEQ ID NO: 1052239 - RNA, 18 nt, Human
gauuacaggcgugagcca

SEQ ID NO: 1052240 - RNA, 20 nt, Human
gauuacaggcgugagccacc

SEQ ID NO: 1052241 - RNA, 21 nt, Human
gauuacaggcgugagccaccg

SEQ ID NO: 1052242 - RNA, 22 nt, Human
gcaaccuccaccucccagguuc

SEQ ID NO: 1052243 - RNA, 21 nt, Human
gccagucacuggaaaaggaaa

SEQ ID NO: 1052244 - RNA, 24 nt, Human
gcgauucuccugcuucagccuccc

SEQ ID NO: 1052245 - RNA, 21 nt, Human
gcucuguugcccagugcagug

SEQ ID NO: 1052246 - RNA, 21 nt, Human
ggaaauaaaagcaaugugaga

SEQ ID NO: 1052247 - RNA, 23 nt, Human
gggguuucaccguguuagccagg

SEQ ID NO: 1052248 - RNA, 22 nt, Human
ggguuucaccguguuagccagg

SEQ ID NO: 1052249 - RNA, 20 nt, Human
ggucucgaucuccugaccuc

SEQ ID NO: 1052250 - RNA, 19 nt, Human
guagagacgggguuucacc

SEQ ID NO: 1052251 - RNA, 21 nt, Human
gugaggcuaaugugacauuug

SEQ ID NO: 1052252 - RNA, 23 nt, Human
uacaggcgugagccaccgugccc

SEQ ID NO: 1052253 - RNA, 24 nt, Human
uacgggugcgugcuaccacaccca

SEQ ID NO: 1052254 - RNA, 18 nt, Human
uagagacgggguuucacc

SEQ ID NO: 1052255 - RNA, 21 nt, Human
uagcuuuaaagaaaggaaggg

SEQ ID NO: 1052256 - RNA, 24 nt, Human
uauguagagacgggguuucaccgu

SEQ ID NO: 1052257 - RNA, 24 nt, Human
ucaccguguuagccaggauggucu

SEQ ID NO: 1052258 - RNA, 24 nt, Human
ucacugcaaccuccaccucccagg

SEQ ID NO: 1052259 - RNA, 25 nt, Human
ucacugcaaccuccaccucccaggu

SEQ ID NO: 1052260 - RNA, 27 nt, Human
ucacugcaaccuccaccucccagguuc

SEQ ID NO: 1052261 - RNA, 20 nt, Human
ucagccucccaaguagcugg

SEQ ID NO: 1052262 - RNA, 23 nt, Human
uccaaagugcugggauuacaggc

SEQ ID NO: 1052263 - RNA, 24 nt, Human
uccaaagugcugggauuacaggcg

SEQ ID NO: 1052264 - RNA, 24 nt, Human
ucccaaguagcuggaacuacgggu

SEQ ID NO: 1052265 - RNA, 21 nt, Human
ucccagguucaagcgauucuc

SEQ ID NO: 1052266 - RNA, 24 nt, Human
ucccagguucaagcgauucuccug

SEQ ID NO: 1052267 - RNA, 19 nt, Human
ucccuggcuagggucaggg

SEQ ID NO: 1052268 - RNA, 21 nt, Human
ucugaaagcuucuuaaucuuc

SEQ ID NO: 1052269 - RNA, 19 nt, Human
ugagccuagcccuggacug

SEQ ID NO: 1052270 - RNA, 22 nt, Human
ugagccuagcccuggacuggau

SEQ ID NO: 1052271 - RNA, 22 nt, Human
ugcaguggcaugaucucggcuc

SEQ ID NO: 1052272 - RNA, 22 nt, Human
ugcccgcucuucaaacuccagc

SEQ ID NO: 1052273 - RNA, 24 nt, Human
ugcugggauuacaggcgugagcca

SEQ ID NO: 1052274 - RNA, 24 nt, Human
ugcuucagccucccaaguagcugg

SEQ ID NO: 1052275 - RNA, 24 nt, Human
uggaacuacgggugcgugcuacca

SEQ ID NO: 1052276 - RNA, 18 nt, Human
uggacaggagacaggugg

SEQ ID NO: 1052277 - RNA, 19 nt, Human
uggaggugaaggaggagga

SEQ ID NO: 1052278 - RNA, 19 nt, Human
uggcgugugcagccacugc

SEQ ID NO: 1052279 - RNA, 18 nt, Human
ugggauuacaggcgugag

SEQ ID NO: 1052280 - RNA, 21 nt, Human
ugggauuacaggcgugagcca

SEQ ID NO: 1052281 - RNA, 22 nt, Human
ugggauuacaggcgugagccac

SEQ ID NO: 1052282 - RNA, 23 nt, Human
ugggauuacaggcgugagccacc

SEQ ID NO: 1052283 - RNA, 23 nt, Human
ugggauuacaggcgugagccacc

SEQ ID NO: 1052284 - RNA, 24 nt, Human
ugggauuacaggcgugagccaccg

SEQ ID NO: 1052285 - RNA, 23 nt, Human
uguagagacgggguuucaccgug

SEQ ID NO: 1052286 - RNA, 24 nt, Human
uguagagacgggguuucaccgugu

SEQ ID NO: 1052287 - RNA, 30 nt, Human
uucaaccucuguaagccucaguuuccucaa

SEQ ID NO: 1052288 - RNA, 23 nt, Human
uucaagcgauucuccugcuucag

SEQ ID NO: 1052289 - RNA, 24 nt, Human
uucaagcgauucuccugcuucagc

SEQ ID NO: 1052290 - RNA, 19 nt, Human
uuucaccguguuagccagg

SEQ ID NO: 1052291 - RNA, 21 nt, Human
uuuuauguagagacgggguuu

SEQ ID NO: 1052292 - RNA, 18 nt, Human
uuuugcucuguugcccag

SEQ ID NO: 1052293 - RNA, 21 nt, Human
uuuugcucuguugcccagugc

SEQ ID NO: 1052294 - RNA, 18 nt, Human
uuuuuuuuuuuuuuuuug

SEQ ID NO: 1052295 - RNA, 20 nt, Human
aagagcugucuggcugcggu

SEQ ID NO: 1052296 - RNA, 21 nt, Human
acucagggcucuggcagcagc

SEQ ID NO: 1052297 - RNA, 25 nt, Human
agccuguuuggaaggcuccagcccc

SEQ ID NO: 1052298 - RNA, 19 nt, Human
aggcaaucaaucaaaagag

SEQ ID NO: 1052299 - RNA, 20 nt, Human
caaaagagaccuucccacgc

SEQ ID NO: 1052300 - RNA, 21 nt, Human
caccccacacagauccugugc

SEQ ID NO: 1052301 - RNA, 21 nt, Human
cacucagggcucuggcagcag

SEQ ID NO: 1052302 - RNA, 22 nt, Human
cacuccccucucucucuccuca

SEQ ID NO: 1052303 - RNA, 24 nt, Human
cacuccccucucucucuccucacc

SEQ ID NO: 1052304 - RNA, 20 nt, Human
cacugagcuuucuuccagcu

SEQ ID NO: 1052305 - RNA, 22 nt, Human
cagcugccgcucugucuccccu

SEQ ID NO: 1052306 - RNA, 25 nt, Human
ccacgcggaacagccgccgccccuc

SEQ ID NO: 1052307 - RNA, 23 nt, Human
ccacuccccucucucucuccuca

SEQ ID NO: 1052308 - RNA, 18 nt, Human
ccacuuuccuccucuccu

SEQ ID NO: 1052309 - RNA, 22 nt, Human
ccacuuuccuccucuccuccca

SEQ ID NO: 1052310 - RNA, 20 nt, Human
cccccuccuaucagucuggg

SEQ ID NO: 1052311 - RNA, 23 nt, Human
ccccucucucucuccucacccca

SEQ ID NO: 1052312 - RNA, 22 nt, Human
cccuccaccagacugcugccuc

SEQ ID NO: 1052313 - RNA, 26 nt, Human
cccuccaccagacugcugccucugac

SEQ ID NO: 1052314 - RNA, 19 nt, Human
ccgccgccccuccaccaga

SEQ ID NO: 1052315 - RNA, 27 nt, Human
ccgccgccccuccaccagacugcugcc

SEQ ID NO: 1052316 - RNA, 28 nt, Human
ccgccgccccuccaccagacugcugccu

SEQ ID NO: 1052317 - RNA, 18 nt, Human
ccucaccccacacagauc

SEQ ID NO: 1052318 - RNA, 19 nt, Human
ccuccucuccucccacucc

SEQ ID NO: 1052319 - RNA, 21 nt, Human
ccucucucucuccucacccca

SEQ ID NO: 1052320 - RNA, 21 nt, Human
ccuuccugcucugcagggugg

SEQ ID NO: 1052321 - RNA, 18 nt, Human
cucucucuccucacccca

SEQ ID NO: 1052322 - RNA, 21 nt, Human
gaacagccgccgccccuccac

SEQ ID NO: 1052323 - RNA, 23 nt, Human
gccgccccuccaccagacugcug

SEQ ID NO: 1052324 - RNA, 19 nt, Human
gcggaacagccgccgcccc

SEQ ID NO: 1052325 - RNA, 21 nt, Human
gcggaacagccgccgccccuc

SEQ ID NO: 1052326 - RNA, 19 nt, Human
uaggaccccaggcagucgc

SEQ ID NO: 1052327 - RNA, 19 nt, Human
ucaaaagagaccuucccac

SEQ ID NO: 1052328 - RNA, 18 nt, Human
ucagcaggggucuucagc

SEQ ID NO: 1052329 - RNA, 21 nt, Human
ucagggcucuggcagcagcug

SEQ ID NO: 1052330 - RNA, 23 nt, Human
uccaccagacugcugccucugac

SEQ ID NO: 1052331 - RNA, 21 nt, Human
uccuaucagucugggcacuca

SEQ ID NO: 1052332 - RNA, 23 nt, Human
uccucccacuccccucucucucu

SEQ ID NO: 1052333 - RNA, 18 nt, Human
uccugcucugcagggugg

SEQ ID NO: 1052334 - RNA, 23 nt, Human
ucgcucccuuggagauggguccc

SEQ ID NO: 1052335 - RNA, 21 nt, Human
ucucucucuccucaccccaca

SEQ ID NO: 1052336 - RNA, 25 nt, Human
ucuguaccaggcaaucaaucaaaag

SEQ ID NO: 1052337 - RNA, 21 nt, Human
ucuuccagcugauggcucugg

SEQ ID NO: 1052338 - RNA, 25 nt, Human
ugccaagugacaacuuggcaccaua

SEQ ID NO: 1052339 - RNA, 27 nt, Human
ugccuggacugagccuguuuggaaggc

SEQ ID NO: 1052340 - RNA, 23 nt, Human
uggaagcugggugccaagugaca

SEQ ID NO: 1052341 - RNA, 23 nt, Human
uggaaggcuccagcccccuccua

SEQ ID NO: 1052342 - RNA, 22 nt, Human
ugggcauaagagcugucuggcu

SEQ ID NO: 1052343 - RNA, 18 nt, Human
ugguaccuggccagugcc

SEQ ID NO: 1052344 - RNA, 20 nt, Human
uuccacuuuccuccucuccu

SEQ ID NO: 1052345 - RNA, 26 nt, Human
uuccuccucuccucccacuccccucu

SEQ ID NO: 1052346 - RNA, 19 nt, Human
uuccuuguauugcuuuggc

SEQ ID NO: 1052347 - RNA, 27 nt, Human
uuguauugcuuuggcauaugcaucgua

SEQ ID NO: 1052348 - RNA, 23 nt, Human
uuuggaaggcuccagcccccucc

SEQ ID NO: 1052349 - RNA, 25 nt, Human
aacccagcccagagcagcacccccc

SEQ ID NO: 1052350 - RNA, 20 nt, Human
aagccugcccacccccacac

SEQ ID NO: 1052351 - RNA, 22 nt, Human
acaaggacaagaacccuuagau

SEQ ID NO: 1052352 - RNA, 22 nt, Human
acacacucacaacccugagcac

SEQ ID NO: 1052353 - RNA, 31 nt, Human
acaguuugccccauagacaaggacaagaacu

SEQ ID NO: 1052354 - RNA, 21 nt, Human
agagcagcacccccccacccc

SEQ ID NO: 1052355 - RNA, 24 nt, Human
agaggcccgaggggccgggguugc

SEQ ID NO: 1052356 - RNA, 21 nt, Human
agcccagagcagcaccccccc

SEQ ID NO: 1052357 - RNA, 22 nt, Human
agcguccccuccaagccugccc

SEQ ID NO: 1052358 - RNA, 22 nt, Human
agggacagccaaagccaggagg

SEQ ID NO: 1052359 - RNA, 23 nt, Human
caacacacucacaacccugagca

SEQ ID NO: 1052360 - RNA, 18 nt, Human
caacccugagcacacccc

SEQ ID NO: 1052361 - RNA, 23 nt, Human
cacagacacacgggcaacacacu

SEQ ID NO: 1052362 - RNA, 27 nt, Human
cacauacacacagacacacgggcaaca

SEQ ID NO: 1052363 - RNA, 19 nt, Human
cacccccaucuccugccac

SEQ ID NO: 1052364 - RNA, 19 nt, Human
cacccccccacccccaucu

SEQ ID NO: 1052365 - RNA, 23 nt, Human
cacccccccacccccaucuccug

SEQ ID NO: 1052366 - RNA, 21 nt, Human
caccccgaguuccucaggagc

SEQ ID NO: 1052367 - RNA, 21 nt, Human
cagaaccgcggccccaugccc

SEQ ID NO: 1052368 - RNA, 22 nt, Human
cagagcagcacccccccacccc

SEQ ID NO: 1052369 - RNA, 18 nt, Human
cagcacccccccaccccc

SEQ ID NO: 1052370 - RNA, 21 nt, Human
cagcuccggccucugcuccug

SEQ ID NO: 1052371 - RNA, 23 nt, Human
caugcaccgugcauuuaaacccc

SEQ ID NO: 1052372 - RNA, 22 nt, Human
ccaaugggguucacaccccgag

SEQ ID NO: 1052373 - RNA, 25 nt, Human
ccacacacauacacacagacacacg

SEQ ID NO: 1052374 - RNA, 25 nt, Human
ccacccccacacacauacacacaga

SEQ ID NO: 1052375 - RNA, 24 nt, Human
ccagaaccgcggccccaugcccug

SEQ ID NO: 1052376 - RNA, 18 nt, Human
ccagaggcuccaacugac

SEQ ID NO: 1052377 - RNA, 20 nt, Human
ccagcccagagcagcacccc

SEQ ID NO: 1052378 - RNA, 22 nt, Human
ccagucccgcggcguccgggaa

SEQ ID NO: 1052379 - RNA, 21 nt, Human
cccaacccagcccagagcagc

SEQ ID NO: 1052380 - RNA, 18 nt, Human
cccacacacauacacaca

SEQ ID NO: 1052381 - RNA, 19 nt, Human
cccacccccacacacauac

SEQ ID NO: 1052382 - RNA, 20 nt, Human
cccacccccacacacauaca

SEQ ID NO: 1052383 - RNA, 18 nt, Human
cccagagcagcacccccc

SEQ ID NO: 1052384 - RNA, 21 nt, Human
cccagagcagcacccccccac

SEQ ID NO: 1052385 - RNA, 22 nt, Human
cccagagcagcacccccccacc

SEQ ID NO: 1052386 - RNA, 23 nt, Human
cccagcguccccuccaagccugc

SEQ ID NO: 1052387 - RNA, 22 nt, Human
cccauagacaaggacaagaacc

SEQ ID NO: 1052388 - RNA, 21 nt, Human
cccccccacccccaucuccug

SEQ ID NO: 1052389 - RNA, 23 nt, Human
ccccuccccaacucccuucccaa

SEQ ID NO: 1052390 - RNA, 18 nt, Human
cccuccaagccugcccac

SEQ ID NO: 1052391 - RNA, 22 nt, Human
cccugagcccgcccgcggccuu

SEQ ID NO: 1052392 - RNA, 21 nt, Human
ccggcuggcacuccagucccg

SEQ ID NO: 1052393 - RNA, 21 nt, Human
cgaggaagggggcugcugggc

SEQ ID NO: 1052394 - RNA, 20 nt, Human
cgccccagaaccgcggcccc

SEQ ID NO: 1052395 - RNA, 20 nt, Human
cguccccuccaagccugccc

SEQ ID NO: 1052396 - RNA, 25 nt, Human
cguccccuccaagccugcccacccc

SEQ ID NO: 1052397 - RNA, 21 nt, Human
cuccaagccugcccacccccc

SEQ ID NO: 1052398 - RNA, 19 nt, Human
cucugcuccugacgucacu

SEQ ID NO: 1052399 - RNA, 23 nt, Human
cucuugggagcuugggagggggc

SEQ ID NO: 1052400 - RNA, 20 nt, Human
cugcccacccccacacacau

SEQ ID NO: 1052401 - RNA, 18 nt, Human
cuggaggcgaccugagcu

SEQ ID NO: 1052402 - RNA, 23 nt, Human
gaaacccuaccagucagaaaucu

SEQ ID NO: 1052403 - RNA, 20 nt, Human
gaaccgcggccccaugcccu

SEQ ID NO: 1052404 - RNA, 19 nt, Human
gaacucgggcugggccuga

SEQ ID NO: 1052405 - RNA, 26 nt, Human
gagcacaccccaaugggguucacacc

SEQ ID NO: 1052406 - RNA, 18 nt, Human
gagcagcacccccccacc

SEQ ID NO: 1052407 - RNA, 24 nt, Human
gaggccaggggaccagggugaggg

SEQ ID NO: 1052408 - RNA, 24 nt, Human
gcacauuuauaaaagauguaaaac

SEQ ID NO: 1052409 - RNA, 23 nt, Human
gcccagagcagcacccccccacc

SEQ ID NO: 1052410 - RNA, 20 nt, Human
gccccauagacaaggacaag

SEQ ID NO: 1052411 - RNA, 23 nt, Human
gcccugagcccgcccgcggccuu

SEQ ID NO: 1052412 - RNA, 22 nt, Human
gcuacaguuugccccauagaca

SEQ ID NO: 1052413 - RNA, 21 nt, Human
ggaaaguccgucgugcgagga

SEQ ID NO: 1052414 - RNA, 18 nt, Human
ggacaagaacccuuagau

SEQ ID NO: 1052415 - RNA, 23 nt, Human
ggcccgaggggccgggguugcgg

SEQ ID NO: 1052416 - RNA, 19 nt, Human
ggcugggccugaggaaggg

SEQ ID NO: 1052417 - RNA, 22 nt, Human
ggcugguggcuuuacagaggcc

SEQ ID NO: 1052418 - RNA, 21 nt, Human
gggcugggccugaggaagggg

SEQ ID NO: 1052419 - RNA, 22 nt, Human
ggggagacagaagcaugaggug

SEQ ID NO: 1052420 - RNA, 22 nt, Human
gugcagaggcccgaggggccgg

SEQ ID NO: 1052421 - RNA, 20 nt, Human
gugcugggcuggaggcgacc

SEQ ID NO: 1052422 - RNA, 20 nt, Human
uccaagccugcccacccccc

SEQ ID NO: 1052423 - RNA, 19 nt, Human
uccaggcuggggagaggga

SEQ ID NO: 1052424 - RNA, 24 nt, Human
ucccaacccagcccagagcagcac

SEQ ID NO: 1052425 - RNA, 23 nt, Human
uccgcggagacaugcaggaggug

SEQ ID NO: 1052426 - RNA, 22 nt, Human
ucuccugccacugcccucaggc

SEQ ID NO: 1052427 - RNA, 24 nt, Human
ucugcuccugacgucacucagggc

SEQ ID NO: 1052428 - RNA, 23 nt, Human
ugacugcagagucuagacagaca

SEQ ID NO: 1052429 - RNA, 22 nt, Human
ugacugggguccagggaaaguc

SEQ ID NO: 1052430 - RNA, 23 nt, Human
ugagccuggagaaacccuaccag

SEQ ID NO: 1052431 - RNA, 21 nt, Human
ugaggaaggggaaggcgcagg

SEQ ID NO: 1052432 - RNA, 22 nt, Human
ugagugaaagaggcugugcaga

SEQ ID NO: 1052433 - RNA, 18 nt, Human
ugcccacccccacacaca

SEQ ID NO: 1052434 - RNA, 26 nt, Human
ugcccacccccacacacauacacaca

SEQ ID NO: 1052435 - RNA, 18 nt, Human
ugcccugagcccgcccgc

SEQ ID NO: 1052436 - RNA, 23 nt, Human
ugcccugagcccgcccgcggccu

SEQ ID NO: 1052437 - RNA, 19 nt, Human
ugcgaggaagggggcugcu

SEQ ID NO: 1052438 - RNA, 18 nt, Human
uggcacauuuauaaaaga

SEQ ID NO: 1052439 - RNA, 18 nt, Human
uggcagaggccacacagu

SEQ ID NO: 1052440 - RNA, 22 nt, Human
ugggagcuugggagggggcuuu

SEQ ID NO: 1052441 - RNA, 23 nt, Human
ugggcuggaggcgaccugagcuu

SEQ ID NO: 1052442 - RNA, 20 nt, Human
uggggugggggagacagaag

SEQ ID NO: 1052443 - RNA, 22 nt, Human
ugucggcgcgguggcggcgccg

SEQ ID NO: 1052444 - RNA, 21 nt, Human
ugugcagaggcccgaggggcc

SEQ ID NO: 1052445 - RNA, 20 nt, Human
uuccucaggagccucuuggg

SEQ ID NO: 1052446 - RNA, 27 nt, Human
uuccucaggagccucuugggagcuuuc

SEQ ID NO: 1052447 - RNA, 19 nt, Human
uugcggggcgccagaggcu

SEQ ID NO: 1052448 - RNA, 24 nt, Human
uugggagggggcuuuccucucagg

SEQ ID NO: 1052449 - RNA, 24 nt, Human
aaccagggaacaguugcuagccgc

SEQ ID NO: 1052450 - RNA, 19 nt, Human
aaccucccuccccaagccc

SEQ ID NO: 1052451 - RNA, 19 nt, Human
accucccuccccaagccca

SEQ ID NO: 1052452 - RNA, 20 nt, Human
aggccccuuccugcccacuc

SEQ ID NO: 1052453 - RNA, 25 nt, Human
caaccagggaacaguugcuagccgc

SEQ ID NO: 1052454 - RNA, 22 nt, Human
caccgcgaccccgcacucuggc

SEQ ID NO: 1052455 - RNA, 24 nt, Human
cagcuccagcauaagggagaugac

SEQ ID NO: 1052456 - RNA, 20 nt, Human
caggugaaccucccucccca

SEQ ID NO: 1052457 - RNA, 25 nt, Human
caggugaaccucccuccccaagccc

SEQ ID NO: 1052458 - RNA, 23 nt, Human
caguugcuagccgcucucuucca

SEQ ID NO: 1052459 - RNA, 22 nt, Human
caucacucccgcuugucucugc

SEQ ID NO: 1052460 - RNA, 19 nt, Human
ccaagccgggcagggucug

SEQ ID NO: 1052461 - RNA, 19 nt, Human
ccacaucggggcagcucca

SEQ ID NO: 1052462 - RNA, 20 nt, Human
ccacugagggcccaaccagg

SEQ ID NO: 1052463 - RNA, 23 nt, Human
ccagggugcuccgggccuccucu

SEQ ID NO: 1052464 - RNA, 21 nt, Human
cccaaccagggaacaguugcu

SEQ ID NO: 1052465 - RNA, 23 nt, Human
ccccgcccagcccggguuaccgg

SEQ ID NO: 1052466 - RNA, 24 nt, Human
ccccgcccagcccggguuaccgga

SEQ ID NO: 1052467 - RNA, 18 nt, Human
ccccgccccuuccucucc

SEQ ID NO: 1052468 - RNA, 20 nt, Human
ccccgccccuuccucucccc

SEQ ID NO: 1052469 - RNA, 20 nt, Human
ccccgcgccagccggccccc

SEQ ID NO: 1052470 - RNA, 20 nt, Human
cccugccccgccccuuccuc

SEQ ID NO: 1052471 - RNA, 22 nt, Human
cccugccccgccccuuccucuc

SEQ ID NO: 1052472 - RNA, 19 nt, Human
ccgccccuuccucuccccc

SEQ ID NO: 1052473 - RNA, 19 nt, Human
ccgcucucuuccaugcagc

SEQ ID NO: 1052474 - RNA, 22 nt, Human
ccgcucucuuccaugcagcugg

SEQ ID NO: 1052475 - RNA, 21 nt, Human
ccuuuauuuuuuccaggcccc

SEQ ID NO: 1052476 - RNA, 20 nt, Human
cgcccagcccggguuaccgg

SEQ ID NO: 1052477 - RNA, 24 nt, Human
cgggccuccucucccuguguaccc

SEQ ID NO: 1052478 - RNA, 22 nt, Human
cuccacaucggggcagcuccag

SEQ ID NO: 1052479 - RNA, 20 nt, Human
cuccucaggugaaccucccu

SEQ ID NO: 1052480 - RNA, 24 nt, Human
cugcccacuccacaucggggcagc

SEQ ID NO: 1052481 - RNA, 24 nt, Human
gaccuccacaucacucccgcuugu

SEQ ID NO: 1052482 - RNA, 20 nt, Human
gcgaccuccacaucacuccc

SEQ ID NO: 1052483 - RNA, 18 nt, Human
ggagaagcgacgagugcu

SEQ ID NO: 1052484 - RNA, 23 nt, Human
ggcgggcucccugccccgccccu

SEQ ID NO: 1052485 - RNA, 21 nt, Human
gggcagcuccagcauaaggga

SEQ ID NO: 1052486 - RNA, 18 nt, Human
ggugugagggccacaguc

SEQ ID NO: 1052487 - RNA, 21 nt, Human
uaccggagcccccgcgccagc

SEQ ID NO: 1052488 - RNA, 23 nt, Human
uaccggagcccccgcgccagccg

SEQ ID NO: 1052489 - RNA, 22 nt, Human
uagcaaggccuuccagaggcuc

SEQ ID NO: 1052490 - RNA, 18 nt, Human
uaggagaagcgacgagug

SEQ ID NO: 1052491 - RNA, 22 nt, Human
uccacaucggggcagcuccagc

SEQ ID NO: 1052492 - RNA, 22 nt, Human
uccaggccccuuccugcccacu

SEQ ID NO: 1052493 - RNA, 21 nt, Human
ucccgcuugucucugcccucc

SEQ ID NO: 1052494 - RNA, 24 nt, Human
ucccugccccgccccuuccucucc

SEQ ID NO: 1052495 - RNA, 23 nt, Human
ugcagcuggagcacuagcaaggc

SEQ ID NO: 1052496 - RNA, 20 nt, Human
ugcucgaaguccgcaccgcg

SEQ ID NO: 1052497 - RNA, 19 nt, Human
uuaccggagcccccgcgcc

SEQ ID NO: 1052498 - RNA, 23 nt, Human
uuaccggagcccccgcgccagcc

SEQ ID NO: 1052499 - RNA, 28 nt, Human
uuuauuuuuuccaggccccuuccugccc

SEQ ID NO: 1052500 - RNA, 19 nt, Human
uuuccaggccccuuccugc

SEQ ID NO: 1052501 - RNA, 21 nt, Human
uuuuuuccuuuuuuuuuuuuu

SEQ ID NO: 1052502 - RNA, 23 nt, Human
uuuuuuuuuuuuuuuuuuccuuu

SEQ ID NO: 1052503 - RNA, 25 nt, Human
uuuuuuuuuuuuuuuuuuccuuuuu

SEQ ID NO: 1052504 - RNA, 21 nt, Human
aaaaauaauggauuauagccg

SEQ ID NO: 1052505 - RNA, 25 nt, Human
augguacaggcacacauugggacac

SEQ ID NO: 1052506 - RNA, 19 nt, Human
ccacaaugaaaaauaaugg

SEQ ID NO: 1052507 - RNA, 18 nt, Human
uaccacaaugaaaaauaa

SEQ ID NO: 1052508 - RNA, 22 nt, Human
acuaaaguacaaaaaagccugg

SEQ ID NO: 1052509 - RNA, 22 nt, Human
auagcaauaaaaaugaagugac

SEQ ID NO: 1052510 - RNA, 21 nt, Human
caaaaaagccugaacaguaug

SEQ ID NO: 1052511 - RNA, 19 nt, Human
caauaaaaaugaagugaca

SEQ ID NO: 1052512 - RNA, 19 nt, Human
caguaaguuuucuuaaucc

SEQ ID NO: 1052513 - RNA, 20 nt, Human
gaguucccaaacaguaaguu

SEQ ID NO: 1052514 - RNA, 24 nt, Human
gcuuucggaaguccccaaagccag

SEQ ID NO: 1052515 - RNA, 19 nt, Human
uacaaaaaagccugaacag

SEQ ID NO: 1052516 - RNA, 21 nt, Human
uauaucuauguucucaccaaa

SEQ ID NO: 1052517 - RNA, 24 nt, Human
uauauggaguucccaaacaguaag

SEQ ID NO: 1052518 - RNA, 21 nt, Human
ucaacagugaagggcucccuu

SEQ ID NO: 1052519 - RNA, 18 nt, Human
ugacacuaaaguacaaaa

SEQ ID NO: 1052520 - RNA, 20 nt, Human
accuuggaaaacacuuggag

SEQ ID NO: 1052521 - RNA, 20 nt, Human
acggaaccuuggaaaacacu

SEQ ID NO: 1052522 - RNA, 24 nt, Human
acuugaggucaggaguucgaggcc

SEQ ID NO: 1052523 - RNA, 24 nt, Human
agcacucggggaggcugagguggg

SEQ ID NO: 1052524 - RNA, 21 nt, Human
aggaaaauucaggccaggugc

SEQ ID NO: 1052525 - RNA, 23 nt, Human
aggaucacuugaggucaggaguu

SEQ ID NO: 1052526 - RNA, 24 nt, Human
aggaucacuugaggucaggaguuc

SEQ ID NO: 1052527 - RNA, 20 nt, Human
aggcaggacugaagggcugu

SEQ ID NO: 1052528 - RNA, 24 nt, Human
aggcaggacugaagggcugugggg

SEQ ID NO: 1052529 - RNA, 24 nt, Human
aggcugaggugggaggaucacuug

SEQ ID NO: 1052530 - RNA, 24 nt, Human
aggugccguggcucacgucuuuaa

SEQ ID NO: 1052531 - RNA, 18 nt, Human
aggugggaggaucacuug

SEQ ID NO: 1052532 - RNA, 23 nt, Human
aggugggaggaucacuugagguc

SEQ ID NO: 1052533 - RNA, 24 nt, Human
agugcagugucaggcaggacuucc

SEQ ID NO: 1052534 - RNA, 24 nt, Human
aucacuugaggucaggaguucgag

SEQ ID NO: 1052535 - RNA, 20 nt, Human
caacaccaggggcuaagcuc

SEQ ID NO: 1052536 - RNA, 21 nt, Human
caacaccaggggcuaagcuca

SEQ ID NO: 1052537 - RNA, 23 nt, Human
cacaacaccaggggcuaagcuca

SEQ ID NO: 1052538 - RNA, 23 nt, Human
cacgucuuuaaucccagcacucg

SEQ ID NO: 1052539 - RNA, 23 nt, Human
cacuugaggucaggaguucgagg

SEQ ID NO: 1052540 - RNA, 21 nt, Human
cagcacucggggaggcugagg

SEQ ID NO: 1052541 - RNA, 24 nt, Human
cagcacucggggaggcugaggugg

SEQ ID NO: 1052542 - RNA, 18 nt, Human
cagcagagaacaaagaag

SEQ ID NO: 1052543 - RNA, 23 nt, Human
caggcaggacugaagggcugugg

SEQ ID NO: 1052544 - RNA, 21 nt, Human
ccccauugcucuaggggcaag

SEQ ID NO: 1052545 - RNA, 22 nt, Human
cgucuuuaaucccagcacucgg

SEQ ID NO: 1052546 - RNA, 23 nt, Human
cgucuuuaaucccagcacucggg

SEQ ID NO: 1052547 - RNA, 24 nt, Human
cguggcucacgucuuuaaucccag

SEQ ID NO: 1052548 - RNA, 23 nt, Human
cucacgucuuuaaucccagcacu

SEQ ID NO: 1052549 - RNA, 22 nt, Human
cuugaggucaggaguucgaggc

SEQ ID NO: 1052550 - RNA, 20 nt, Human
gacccccgacucuuggaucc

SEQ ID NO: 1052551 - RNA, 23 nt, Human
gaggugggaggaucacuugaggu

SEQ ID NO: 1052552 - RNA, 24 nt, Human
gaucacuugaggucaggaguucga

SEQ ID NO: 1052553 - RNA, 19 nt, Human
gaucuccaccccauugcuc

SEQ ID NO: 1052554 - RNA, 25 nt, Human
gaucuccaccccauugcucuagggg

SEQ ID NO: 1052555 - RNA, 24 nt, Human
gaugggucauacggaaacuuugga

SEQ ID NO: 1052556 - RNA, 18 nt, Human
gcucugcucaucuuugcc

SEQ ID NO: 1052557 - RNA, 23 nt, Human
ggaaacauagggagacccccgac

SEQ ID NO: 1052558 - RNA, 23 nt, Human
ggaucacuugaggucaggaguuc

SEQ ID NO: 1052559 - RNA, 23 nt, Human
gggaggcugaggugggaggauca

SEQ ID NO: 1052560 - RNA, 22 nt, Human
gggcuguggggagcugcucuuc

SEQ ID NO: 1052561 - RNA, 20 nt, Human
guuuuuuugugugucucucu

SEQ ID NO: 1052562 - RNA, 19 nt, Human
uacggaaccuuggaaaaca

SEQ ID NO: 1052563 - RNA, 22 nt, Human
uagccaaaccuucaucaggauu

SEQ ID NO: 1052564 - RNA, 24 nt, Human
ucaggccaggugccguggcucacg

SEQ ID NO: 1052565 - RNA, 20 nt, Human
ucugcaagcaucugaaguuc

SEQ ID NO: 1052566 - RNA, 23 nt, Human
ugaggaaaauucaggccaggugc

SEQ ID NO: 1052567 - RNA, 19 nt, Human
ugaggugggaggaucacuu

SEQ ID NO: 1052568 - RNA, 23 nt, Human
ugaggugggaggaucacuugagg

SEQ ID NO: 1052569 - RNA, 24 nt, Human
ugaggugggaggaucacuugaggu

SEQ ID NO: 1052570 - RNA, 26 nt, Human
ugaggugggaggaucacuugagguca

SEQ ID NO: 1052571 - RNA, 22 nt, Human
ugcagugucaggcaggacugaa

SEQ ID NO: 1052572 - RNA, 21 nt, Human
uggcucacgucuuuaauccca

SEQ ID NO: 1052573 - RNA, 24 nt, Human
uggcucacgucuuuaaucccagca

SEQ ID NO: 1052574 - RNA, 22 nt, Human
uggcucugcucaucuuugccuu

SEQ ID NO: 1052575 - RNA, 21 nt, Human
ugucacagagcauucaugaag

SEQ ID NO: 1052576 - RNA, 19 nt, Human
uucagaauugugccaccau

SEQ ID NO: 1052577 - RNA, 18 nt, Human
uucaugaagugucugcaa

SEQ ID NO: 1052578 - RNA, 24 nt, Human
uugugugucucucuuuguaaugga

SEQ ID NO: 1052579 - RNA, 24 nt, Human
uuugaaccugaugcaaaugcagca

SEQ ID NO: 1052580 - RNA, 22 nt, Human
uuugccagaggagaucuccaac

SEQ ID NO: 1052581 - RNA, 19 nt, Human
agacagaagugagaacuaa

SEQ ID NO: 1052582 - RNA, 27 nt, Human
agacagaagugagaacuaaaggagcug

SEQ ID NO: 1052583 - RNA, 23 nt, Human
ccaguaaugucuuuauugcuucu

SEQ ID NO: 1052584 - RNA, 27 nt, Human
cuaaaggagcugaaucuauuguaaugg

SEQ ID NO: 1052585 - RNA, 20 nt, Human
ggagcugaaucuauuguaaa

SEQ ID NO: 1052586 - RNA, 24 nt, Human
ggggaguuuuuccuggcuuuucuc

SEQ ID NO: 1052587 - RNA, 22 nt, Human
ucaaugucaguauuuuaucuug

SEQ ID NO: 1052588 - RNA, 28 nt, Human
ucuugacguggagacagaagugagaacu

SEQ ID NO: 1052589 - RNA, 21 nt, Human
ugacguggagacagaagugag

SEQ ID NO: 1052590 - RNA, 23 nt, Human
uggcggcuuacucuguaaucugc

SEQ ID NO: 1052591 - RNA, 19 nt, Human
uuuccuggcuuuucucugg

SEQ ID NO: 1052592 - RNA, 18 nt, Human
uuucucuggaacuguugu

SEQ ID NO: 1052593 - RNA, 21 nt, Human
aaaagagagaguggaaaaaga

SEQ ID NO: 1052594 - RNA, 22 nt, Human
aaacaagaaggaaacagcagag

SEQ ID NO: 1052595 - RNA, 22 nt, Human
aaacacuaggugaacauggacc

SEQ ID NO: 1052596 - RNA, 21 nt, Human
aaagccucagggcuccccagg

SEQ ID NO: 1052597 - RNA, 24 nt, Human
aacaaaagagagaguggaaaaaga

SEQ ID NO: 1052598 - RNA, 21 nt, Human
aacaggaaaccuagaaaagaa

SEQ ID NO: 1052599 - RNA, 24 nt, Human
aaccaacaggaaaccuagaaaaga

SEQ ID NO: 1052600 - RNA, 24 nt, Human
aagaaaaccaacaggaaaccuaga

SEQ ID NO: 1052601 - RNA, 18 nt, Human
aagaaggaaacagcagag

SEQ ID NO: 1052602 - RNA, 18 nt, Human
aagagaccuggccuugac

SEQ ID NO: 1052603 - RNA, 19 nt, Human
aaggaaagaaaaggggagg

SEQ ID NO: 1052604 - RNA, 27 nt, Human
aaggggaggaggggagauagggaagag

SEQ ID NO: 1052605 - RNA, 22 nt, Human
aaguacacacugacuaaggcac

SEQ ID NO: 1052606 - RNA, 22 nt, Human
acaaaacaagaaggaaacagca

SEQ ID NO: 1052607 - RNA, 19 nt, Human
acacaaguacacacugacu

SEQ ID NO: 1052608 - RNA, 25 nt, Human
acaggaacauagcaccgagcaggga

SEQ ID NO: 1052609 - RNA, 21 nt, Human
acccgccaccccguggaacag

SEQ ID NO: 1052610 - RNA, 23 nt, Human
accuagaaaagaauugagaggaa

SEQ ID NO: 1052611 - RNA, 22 nt, Human
acggagaaaaggucuggcugug

SEQ ID NO: 1052612 - RNA, 21 nt, Human
acuggaaauuauugacuucca

SEQ ID NO: 1052613 - RNA, 20 nt, Human
agaacaaaacaagaaggaaa

SEQ ID NO: 1052614 - RNA, 21 nt, Human
agaaggaaacagcagaggaaa

SEQ ID NO: 1052615 - RNA, 19 nt, Human
agagguuggagaggcaaac

SEQ ID NO: 1052616 - RNA, 21 nt, Human
aggaaacagcagaggaaaggg

SEQ ID NO: 1052617 - RNA, 19 nt, Human
aggagaagaaaagccucag

SEQ ID NO: 1052618 - RNA, 20 nt, Human
aggagaagaaaagccucagg

SEQ ID NO: 1052619 - RNA, 23 nt, Human
aggaggggagauagggaagagga

SEQ ID NO: 1052620 - RNA, 21 nt, Human
aggcggaggaggcccaggggc

SEQ ID NO: 1052621 - RNA, 26 nt, Human
agugacaaggccacgcagguggacac

SEQ ID NO: 1052622 - RNA, 18 nt, Human
agugcgaugaauugggaa

SEQ ID NO: 1052623 - RNA, 18 nt, Human
caacagaacaaaacaaga

SEQ ID NO: 1052624 - RNA, 23 nt, Human
caagaaggaaacagcagaggaaa

SEQ ID NO: 1052625 - RNA, 23 nt, Human
cacacacaaguacacacugacua

SEQ ID NO: 1052626 - RNA, 19 nt, Human
caccggcauggcagcaguc

SEQ ID NO: 1052627 - RNA, 22 nt, Human
cagcugcaaugggugugggggu

SEQ ID NO: 1052628 - RNA, 22 nt, Human
caggcggaggaggcccaggggc

SEQ ID NO: 1052629 - RNA, 21 nt, Human
caguggguuuucuguaagucu

SEQ ID NO: 1052630 - RNA, 20 nt, Human
ccaaacacacacaaguacac

SEQ ID NO: 1052631 - RNA, 27 nt, Human
ccaauucccacucccccaaacacacac

SEQ ID NO: 1052632 - RNA, 20 nt, Human
ccaccccguggaacaggaac

SEQ ID NO: 1052633 - RNA, 21 nt, Human
ccauaggccccuuccaggcgc

SEQ ID NO: 1052634 - RNA, 22 nt, Human
cccacucccccaaacacacaca

SEQ ID NO: 1052635 - RNA, 19 nt, Human
cccccaaacacacacaagu

SEQ ID NO: 1052636 - RNA, 27 nt, Human
cccccaaacacacacaaguacacacug

SEQ ID NO: 1052637 - RNA, 20 nt, Human
cguggaacaggaacauagca

SEQ ID NO: 1052638 - RNA, 22 nt, Human
cuagggacccagggucugcgcu

SEQ ID NO: 1052639 - RNA, 23 nt, Human
cuguaagucuggcacaaauucug

SEQ ID NO: 1052640 - RNA, 18 nt, Human
gaaagaaaaggggaggag

SEQ ID NO: 1052641 - RNA, 24 nt, Human
gaagaacaguugggaugaaaggga

SEQ ID NO: 1052642 - RNA, 22 nt, Human
gaagagaccuggccuugacccg

SEQ ID NO: 1052643 - RNA, 23 nt, Human
gaggaggggagauagggaagagg

SEQ ID NO: 1052644 - RNA, 19 nt, Human
gaggggagauagggaagag

SEQ ID NO: 1052645 - RNA, 25 nt, Human
gcaacagaacaaaacaagaaggaaa

SEQ ID NO: 1052646 - RNA, 18 nt, Human
gcacagcacaccuuccuc

SEQ ID NO: 1052647 - RNA, 18 nt, Human
gcagaggaaagggaagaa

SEQ ID NO: 1052648 - RNA, 18 nt, Human
gcagcaguccuggcugag

SEQ ID NO: 1052649 - RNA, 18 nt, Human
gccuggaaaaggcuggga

SEQ ID NO: 1052650 - RNA, 20 nt, Human
ggaaagaaaaggggaggagg

SEQ ID NO: 1052651 - RNA, 18 nt, Human
ggaaagaaacaaaagaga

SEQ ID NO: 1052652 - RNA, 24 nt, Human
ggaaauaggcagauaagaaaacca

SEQ ID NO: 1052653 - RNA, 22 nt, Human
ggaggggagauagggaagagga

SEQ ID NO: 1052654 - RNA, 24 nt, Human
ggcaacagaacaaaacaagaagga

SEQ ID NO: 1052655 - RNA, 24 nt, Human
ggcaggagaagaaaagccucaggg

SEQ ID NO: 1052656 - RNA, 21 nt, Human
gggaagaacauacaucagaga

SEQ ID NO: 1052657 - RNA, 25 nt, Human
gggcaggagaagaaaagccucaggg

SEQ ID NO: 1052658 - RNA, 19 nt, Human
gggcccaauucccacuccc

SEQ ID NO: 1052659 - RNA, 25 nt, Human
gggcgggcagaaggccccuugggag

SEQ ID NO: 1052660 - RNA, 21 nt, Human
ggggaggaggggagauagggg

SEQ ID NO: 1052661 - RNA, 18 nt, Human
gguggucgugacgguugg

SEQ ID NO: 1052662 - RNA, 18 nt, Human
gucuggcacaaauucugg

SEQ ID NO: 1052663 - RNA, 23 nt, Human
guggaacaggaacauagcaccga

SEQ ID NO: 1052664 - RNA, 20 nt, Human
guggacaccagcugcagcag

SEQ ID NO: 1052665 - RNA, 23 nt, Human
uaagucacacgccuggaaaaggc

SEQ ID NO: 1052666 - RNA, 21 nt, Human
uaccgcgaagaacaguuggga

SEQ ID NO: 1052667 - RNA, 22 nt, Human
ucagagaacugggaaagugcga

SEQ ID NO: 1052668 - RNA, 22 nt, Human
ucccucccaggacccgccaccc

SEQ ID NO: 1052669 - RNA, 23 nt, Human
ucuaggcaguggguuuucuguaa

SEQ ID NO: 1052670 - RNA, 23 nt, Human
ucuggcaaggcagagugcuaggc

SEQ ID NO: 1052671 - RNA, 21 nt, Human
uggaaaaggcugggaacagcg

SEQ ID NO: 1052672 - RNA, 22 nt, Human
uggaccaguuacccauaggccc

SEQ ID NO: 1052673 - RNA, 21 nt, Human
uggagaggcaaacggggcccu

SEQ ID NO: 1052674 - RNA, 19 nt, Human
uggccaccagugacaaggc

SEQ ID NO: 1052675 - RNA, 25 nt, Human
uggccucuaggcaguggguuuucug

SEQ ID NO: 1052676 - RNA, 27 nt, Human
ugggaaggaaagaaaaggggaggaggg

SEQ ID NO: 1052677 - RNA, 30 nt, Human
ugggaaggaaagaaaaggggaggaggggag

SEQ ID NO: 1052678 - RNA, 22 nt, Human
ugggaggacguggcgccacagc

SEQ ID NO: 1052679 - RNA, 24 nt, Human
ugggggcaggagaagaaaagccuc

SEQ ID NO: 1052680 - RNA, 22 nt, Human
ugugggcaacagaacaaaacaa

SEQ ID NO: 1052681 - RNA, 20 nt, Human
uucccacucccccaaacaca

SEQ ID NO: 1052682 - RNA, 25 nt, Human
uugggaaggaaagaaaaggggaggg

SEQ ID NO: 1052683 - RNA, 22 nt, Human
uuuucuguaagucuggcacaaa

SEQ ID NO: 1052684 - RNA, 21 nt, Human
gagcauccucacccacccaaa

SEQ ID NO: 1052685 - RNA, 18 nt, Human
uagaauggcuggccuuac

SEQ ID NO: 1052686 - RNA, 18 nt, Human
ugcuccuggaccgcuccc

SEQ ID NO: 1052687 - RNA, 19 nt, Human
uggugcugagaaaauggug

SEQ ID NO: 1052688 - RNA, 22 nt, Human
ugguuguuuuccccacaggucu

SEQ ID NO: 1052689 - RNA, 19 nt, Human
ugugguuguuuuccccaca

SEQ ID NO: 1052690 - RNA, 28 nt, Human
aaaaaaaaaaaacaauaaggcaacagaa

SEQ ID NO: 1052691 - RNA, 32 nt, Human
aaaaaaaaaaaacaauaaggcaacagaagagg

SEQ ID NO: 1052692 - RNA, 18 nt, Human
aaaaacaauaaggcaacc

SEQ ID NO: 1052693 - RNA, 22 nt, Human
aacaauaaggcaacagaagaag

SEQ ID NO: 1052694 - RNA, 24 nt, Human
aagaugcugcauuaaaauuuaaca

SEQ ID NO: 1052695 - RNA, 20 nt, Human
aauaaauggaaaucauacaa

SEQ ID NO: 1052696 - RNA, 21 nt, Human
aauaaggcaacagaagaagaa

SEQ ID NO: 1052697 - RNA, 19 nt, Human
acaaauaaugcacaaauau

SEQ ID NO: 1052698 - RNA, 28 nt, Human
acuuaaaaaaaaaaaaacaauaaggcaa

SEQ ID NO: 1052699 - RNA, 23 nt, Human
agaaagguugggagguuuugcau

SEQ ID NO: 1052700 - RNA, 21 nt, Human
caaagacagagaagagacuua

SEQ ID NO: 1052701 - RNA, 18 nt, Human
caauaagacaccaucagg

SEQ ID NO: 1052702 - RNA, 19 nt, Human
cuagaaaugucccauggca

SEQ ID NO: 1052703 - RNA, 18 nt, Human
cuccgcgcuguuccccuc

SEQ ID NO: 1052704 - RNA, 27 nt, Human
cuuaaaaaaaaaaaaacaauaaggcaa

SEQ ID NO: 1052705 - RNA, 22 nt, Human
gaaagguugggagguuuugcau

SEQ ID NO: 1052706 - RNA, 24 nt, Human
gaccgcuuugugcuuggacuccug

SEQ ID NO: 1052707 - RNA, 22 nt, Human
gcacugcucccuauucucacag

SEQ ID NO: 1052708 - RNA, 23 nt, Human
gucccauggcacugcucccuauu

SEQ ID NO: 1052709 - RNA, 22 nt, Human
uacaaugacaagaaaauuauac

SEQ ID NO: 1052710 - RNA, 18 nt, Human
uccacaguagucuugucc

SEQ ID NO: 1052711 - RNA, 21 nt, Human
uccauugcaguuucuucuuuc

SEQ ID NO: 1052712 - RNA, 24 nt, Human
uccuuuugcaaguagaaaugacuc

SEQ ID NO: 1052713 - RNA, 22 nt, Human
ugaauccacaguagucuugucc

SEQ ID NO: 1052714 - RNA, 19 nt, Human
ugacaaggaacguccacaa

SEQ ID NO: 1052715 - RNA, 22 nt, Human
uuaaugcagaaauccaguuaac

SEQ ID NO: 1052716 - RNA, 22 nt, Human
uuagaaagguugggagguuuug

SEQ ID NO: 1052717 - RNA, 22 nt, Human
aaaaaauagcauuugacaccaa

SEQ ID NO: 1052718 - RNA, 22 nt, Human
aaaaugcaauuauuaugaaaca

SEQ ID NO: 1052719 - RNA, 21 nt, Human
aaacaaacaugaguggauaca

SEQ ID NO: 1052720 - RNA, 24 nt, Human
aagaaaaugcaauuauuaugaaac

SEQ ID NO: 1052721 - RNA, 20 nt, Human
accaccauuaaccugaccca

SEQ ID NO: 1052722 - RNA, 22 nt, Human
agagaaaauaugauugguucuc

SEQ ID NO: 1052723 - RNA, 19 nt, Human
agagagaaaauaugauugg

SEQ ID NO: 1052724 - RNA, 20 nt, Human
auugguucuccuugagugaa

SEQ ID NO: 1052725 - RNA, 21 nt, Human
auuugagcaaacauggccacu

SEQ ID NO: 1052726 - RNA, 18 nt, Human
caaggagcagaaaccuau

SEQ ID NO: 1052727 - RNA, 18 nt, Human
cacauaguucaccaccau

SEQ ID NO: 1052728 - RNA, 19 nt, Human
caccaccauuaaccugacc

SEQ ID NO: 1052729 - RNA, 22 nt, Human
cauuaaccugacccagacacca

SEQ ID NO: 1052730 - RNA, 21 nt, Human
ccagacaccaacuuacucacu

SEQ ID NO: 1052731 - RNA, 22 nt, Human
ccucugugcugucacagugauu

SEQ ID NO: 1052732 - RNA, 19 nt, Human
cuuuauacaaagcacacuc

SEQ ID NO: 1052733 - RNA, 23 nt, Human
gaaggaagcagguucucucagaa

SEQ ID NO: 1052734 - RNA, 24 nt, Human
gaggcaggucuuaugaagguggug

SEQ ID NO: 1052735 - RNA, 18 nt, Human
ggucuuaugaagguggug

SEQ ID NO: 1052736 - RNA, 21 nt, Human
gugaaguacaucuguuuggcc

SEQ ID NO: 1052737 - RNA, 25 nt, Human
uaaaaaauagcauuugacaccaaaa

SEQ ID NO: 1052738 - RNA, 24 nt, Human
uaaauauagacauucauauaaauu

SEQ ID NO: 1052739 - RNA, 18 nt, Human
uaaccugacccagacacc

SEQ ID NO: 1052740 - RNA, 24 nt, Human
uaugaaacaaacaugaguggauac

SEQ ID NO: 1052741 - RNA, 24 nt, Human
ucaccaccauuaaccugacccaga

SEQ ID NO: 1052742 - RNA, 22 nt, Human
ucucuugucaaggagcagaaac

SEQ ID NO: 1052743 - RNA, 19 nt, Human
ugaacccaaccagcucuga

SEQ ID NO: 1052744 - RNA, 25 nt, Human
ugacugacaacucuauuuuaaugua

SEQ ID NO: 1052745 - RNA, 18 nt, Human
ugaggacauuugagcaaa

SEQ ID NO: 1052746 - RNA, 19 nt, Human
ugaguggauacaaguaaug

SEQ ID NO: 1052747 - RNA, 21 nt, Human
uggucucaguucaauuuuuuu

SEQ ID NO: 1052748 - RNA, 18 nt, Human
uuaguugaggccaaggug

SEQ ID NO: 1052749 - RNA, 22 nt, Human
uuauucaggccauaucucuugu

SEQ ID NO: 1052750 - RNA, 22 nt, Human
uuauugugcuaucaaguaauua

SEQ ID NO: 1052751 - RNA, 19 nt, Human
uugguucuccuugagugaa

SEQ ID NO: 1052752 - RNA, 20 nt, Human
uuuauacaaagcacacucaa

SEQ ID NO: 1052753 - RNA, 19 nt, Human
uuucaaauuauucuuccuu

SEQ ID NO: 1052754 - RNA, 21 nt, Human
aaaaaagagagagagagagaa

SEQ ID NO: 1052755 - RNA, 22 nt, Human
aaaaguucaagaccagccuggu

SEQ ID NO: 1052756 - RNA, 22 nt, Human
aacacucugucccuccuaaccc

SEQ ID NO: 1052757 - RNA, 20 nt, Human
aacauagugagacccuaucu

SEQ ID NO: 1052758 - RNA, 19 nt, Human
aacauggagaaaccccauc

SEQ ID NO: 1052759 - RNA, 20 nt, Human
aacauggagaaaccccaucu

SEQ ID NO: 1052760 - RNA, 21 nt, Human
aacauggagaaaccccaucuc

SEQ ID NO: 1052761 - RNA, 19 nt, Human
aaccaagggaaaccacagc

SEQ ID NO: 1052762 - RNA, 18 nt, Human
aagcaggagaauugccug

SEQ ID NO: 1052763 - RNA, 24 nt, Human
aagcaggagaauugccuggaccua

SEQ ID NO: 1052764 - RNA, 21 nt, Human
aaguccucucccuucuucagc

SEQ ID NO: 1052765 - RNA, 20 nt, Human
acacuguugcacuccagccu

SEQ ID NO: 1052766 - RNA, 23 nt, Human
acagugcgagacucugucuggaa

SEQ ID NO: 1052767 - RNA, 21 nt, Human
accagaugccuguaaucccag

SEQ ID NO: 1052768 - RNA, 24 nt, Human
accccaucucuacuaaaaauacaa

SEQ ID NO: 1052769 - RNA, 19 nt, Human
acccuagaagugugggcua

SEQ ID NO: 1052770 - RNA, 20 nt, Human
acccuagaagugugggcuau

SEQ ID NO: 1052771 - RNA, 24 nt, Human
acugcccucuagccuaggugacag

SEQ ID NO: 1052772 - RNA, 21 nt, Human
agaaacuggaaaaaaugugga

SEQ ID NO: 1052773 - RNA, 19 nt, Human
agaaagaaaagaugaagga

SEQ ID NO: 1052774 - RNA, 22 nt, Human
agaccagccugaccaacaugga

SEQ ID NO: 1052775 - RNA, 22 nt, Human
agacggaggcacagaguguugc

SEQ ID NO: 1052776 - RNA, 21 nt, Human
agacggaguaaggagcugcca

SEQ ID NO: 1052777 - RNA, 23 nt, Human
agaggagaaugcggauguuugaa

SEQ ID NO: 1052778 - RNA, 24 nt, Human
agcaagcgauagagacugauuuga

SEQ ID NO: 1052779 - RNA, 25 nt, Human
agcacagcucugcaacaugucaccc

SEQ ID NO: 1052780 - RNA, 24 nt, Human
agcacuuugggaggcugaggcagg

SEQ ID NO: 1052781 - RNA, 23 nt, Human
agccaggcauggcggcacaugcc

SEQ ID NO: 1052782 - RNA, 24 nt, Human
agccuaggcgacagugcgagacuc

SEQ ID NO: 1052783 - RNA, 22 nt, Human
agccuggucaacauagugagac

SEQ ID NO: 1052784 - RNA, 24 nt, Human
agccuggucaacauagugagaccc

SEQ ID NO: 1052785 - RNA, 23 nt, Human
agcgauagagacugauuugaaga

SEQ ID NO: 1052786 - RNA, 24 nt, Human
agcuacuugggaggcugagguggg

SEQ ID NO: 1052787 - RNA, 22 nt, Human
aggaagaagaggagaaugcgga

SEQ ID NO: 1052788 - RNA, 18 nt, Human
aggagagagcaagcgaua

SEQ ID NO: 1052789 - RNA, 22 nt, Human
aggcacagaguguugcagcagc

SEQ ID NO: 1052790 - RNA, 18 nt, Human
aggcaggcggaucaccug

SEQ ID NO: 1052791 - RNA, 22 nt, Human
aggcaggcggaucaccugaagg

SEQ ID NO: 1052792 - RNA, 22 nt, Human
aggcaggcggaucaccugaagu

SEQ ID NO: 1052793 - RNA, 26 nt, Human
aggcaggcggaucaccugaaguuggg

SEQ ID NO: 1052794 - RNA, 22 nt, Human
aggcauggccgggcgcaguggc

SEQ ID NO: 1052795 - RNA, 24 nt, Human
aggcauggcggcacaugccuguaa

SEQ ID NO: 1052796 - RNA, 20 nt, Human
aggccaaggugggaggauca

SEQ ID NO: 1052797 - RNA, 24 nt, Human
aggcggagguugcggugagccaag

SEQ ID NO: 1052798 - RNA, 21 nt, Human
aggcugaggcaggcggaucac

SEQ ID NO: 1052799 - RNA, 24 nt, Human
aggcugaggcaggcggaucaccug

SEQ ID NO: 1052800 - RNA, 24 nt, Human
aggcugaggugggaggauugcuug

SEQ ID NO: 1052801 - RNA, 23 nt, Human
agggcucuccgggcuggggagag

SEQ ID NO: 1052802 - RNA, 19 nt, Human
agugcagacccaagcugcc

SEQ ID NO: 1052803 - RNA, 24 nt, Human
agugcuuugggaggccaagguggg

SEQ ID NO: 1052804 - RNA, 24 nt, Human
aguggcucacaccuguaaucccag

SEQ ID NO: 1052805 - RNA, 28 nt, Human
auagauucuuccccagauacuccuaaaa

SEQ ID NO: 1052806 - RNA, 20 nt, Human
aucacacuguugcacuccag

SEQ ID NO: 1052807 - RNA, 22 nt, Human
aucccagugcuuugggaggcca

SEQ ID NO: 1052808 - RNA, 24 nt, Human
auggcucugucacaugcuccaccc

SEQ ID NO: 1052809 - RNA, 21 nt, Human
auuuauaauugcaucacugcc

SEQ ID NO: 1052810 - RNA, 22 nt, Human
caacauagugagacccuaucuc

SEQ ID NO: 1052811 - RNA, 24 nt, Human
caagaccagccuggucaacauagu

SEQ ID NO: 1052812 - RNA, 19 nt, Human
caaguccucucccuucuuc

SEQ ID NO: 1052813 - RNA, 24 nt, Human
cacaccuguaaucccagcacuuug

SEQ ID NO: 1052814 - RNA, 21 nt, Human
cacacuguugcacuccagccu

SEQ ID NO: 1052815 - RNA, 22 nt, Human
cacagaguguugcagcagccag

SEQ ID NO: 1052816 - RNA, 20 nt, Human
cacagcagcugcaaggagug

SEQ ID NO: 1052817 - RNA, 26 nt, Human
cacccaaaccaagggaaaccacagcc

SEQ ID NO: 1052818 - RNA, 18 nt, Human
caccucucugaaucucag

SEQ ID NO: 1052819 - RNA, 23 nt, Human
caccuguaaucccagcacuuugg

SEQ ID NO: 1052820 - RNA, 24 nt, Human
caccuguaaucccagcacuuuggg

SEQ ID NO: 1052821 - RNA, 21 nt, Human
cacucugucccuccuaacccc

SEQ ID NO: 1052822 - RNA, 18 nt, Human
cacugcccucuagccuag

SEQ ID NO: 1052823 - RNA, 19 nt, Human
cacugcccucuagccuagg

SEQ ID NO: 1052824 - RNA, 19 nt, Human
cacugcccucuagccuagg

SEQ ID NO: 1052825 - RNA, 20 nt, Human
cacugcccucuagccuaggu

SEQ ID NO: 1052826 - RNA, 23 nt, Human
cacugcccucuagccuaggugac

SEQ ID NO: 1052827 - RNA, 21 nt, Human
cagagcacccaggaagaagag

SEQ ID NO: 1052828 - RNA, 18 nt, Human
cagaugccuguaauccca

SEQ ID NO: 1052829 - RNA, 24 nt, Human
cagcacuuugggaggcugaggcag

SEQ ID NO: 1052830 - RNA, 26 nt, Human
cagcacuuugggaggcugaggcaggc

SEQ ID NO: 1052831 - RNA, 27 nt, Human
cagcagcugcaaggagugaacacaccg

SEQ ID NO: 1052832 - RNA, 24 nt, Human
cagccugaccaacauggagaaacc

SEQ ID NO: 1052833 - RNA, 21 nt, Human
cagggucccuuucauggggca

SEQ ID NO: 1052834 - RNA, 24 nt, Human
cagugcgagacucugucuggaaua

SEQ ID NO: 1052835 - RNA, 24 nt, Human
cagugcuuugggaggccaaggugg

SEQ ID NO: 1052836 - RNA, 19 nt, Human
caucagggucacaagcugg

SEQ ID NO: 1052837 - RNA, 22 nt, Human
cauggcucugucacaugcucca

SEQ ID NO: 1052838 - RNA, 18 nt, Human
ccaugugucuguaucccu

SEQ ID NO: 1052839 - RNA, 23 nt, Human
cccaaaccaagggaaaccacagc

SEQ ID NO: 1052840 - RNA, 24 nt, Human
cccagugcuuugggaggccaaggu

SEQ ID NO: 1052841 - RNA, 20 nt, Human
ccccucucuucccugcaucc

SEQ ID NO: 1052842 - RNA, 21 nt, Human
ccgauggggacagggcucucc

SEQ ID NO: 1052843 - RNA, 22 nt, Human
ccuaggguuuuugcucccauuc

SEQ ID NO: 1052844 - RNA, 23 nt, Human
ccuccuaaccccgggagagccug

SEQ ID NO: 1052845 - RNA, 18 nt, Human
ccugacaugcucccucca

SEQ ID NO: 1052846 - RNA, 24 nt, Human
ccugaccaacauggagaaacccca

SEQ ID NO: 1052847 - RNA, 19 nt, Human
ccuggaagggagaccuagg

SEQ ID NO: 1052848 - RNA, 19 nt, Human
ccuggcagagcacccagga

SEQ ID NO: 1052849 - RNA, 22 nt, Human
ccuggucaacauagugagaccc

SEQ ID NO: 1052850 - RNA, 23 nt, Human
ccuggucaacauagugagacccu

SEQ ID NO: 1052851 - RNA, 21 nt, Human
ccuguaauuccagcuacucag

SEQ ID NO: 1052852 - RNA, 20 nt, Human
ccuuaaaagguggaggaagu

SEQ ID NO: 1052853 - RNA, 22 nt, Human
cgagcucacucagggcuccagg

SEQ ID NO: 1052854 - RNA, 24 nt, Human
cggaucaccugaaguugggaguuu

SEQ ID NO: 1052855 - RNA, 21 nt, Human
cucaaaccuccuccuggaaca

SEQ ID NO: 1052856 - RNA, 22 nt, Human
cucacaccuguaaucccagcac

SEQ ID NO: 1052857 - RNA, 24 nt, Human
cucacaccuguaaucccagcacuu

SEQ ID NO: 1052858 - RNA, 23 nt, Human
cucagcucaaaccuccuccugga

SEQ ID NO: 1052859 - RNA, 21 nt, Human
cuccgggcuggggagagcauu

SEQ ID NO: 1052860 - RNA, 20 nt, Human
cucuagccuaggugacagag

SEQ ID NO: 1052861 - RNA, 20 nt, Human
cuggaccuaggaggcggagg

SEQ ID NO: 1052862 - RNA, 24 nt, Human
cuggaccuaggaggcggagguugc

SEQ ID NO: 1052863 - RNA, 19 nt, Human
cuguugcacuccagccuag

SEQ ID NO: 1052864 - RNA, 21 nt, Human
cuguugcacuccagccuaggc

SEQ ID NO: 1052865 - RNA, 24 nt, Human
cuguugcacuccagccuaggcgac

SEQ ID NO: 1052866 - RNA, 20 nt, Human
cuugagcccgggaguucaag

SEQ ID NO: 1052867 - RNA, 24 nt, Human
gaaaccagaugccuguaaucccag

SEQ ID NO: 1052868 - RNA, 18 nt, Human
gagagagagagagagacc

SEQ ID NO: 1052869 - RNA, 21 nt, Human
gagcacccaggaagaagagga

SEQ ID NO: 1052870 - RNA, 24 nt, Human
gaggugggaggauugcuugagccc

SEQ ID NO: 1052871 - RNA, 22 nt, Human
gagguugcggugagccaagauc

SEQ ID NO: 1052872 - RNA, 18 nt, Human
gaucaccugaaguuggga

SEQ ID NO: 1052873 - RNA, 24 nt, Human
gaucauuugagcccaaaaguucaa

SEQ ID NO: 1052874 - RNA, 24 nt, Human
gaugaaggagugaggcaggagaga

SEQ ID NO: 1052875 - RNA, 24 nt, Human
gaugccuguaaucccagugcuuug

SEQ ID NO: 1052876 - RNA, 18 nt, Human
gauugcuugagcccggga

SEQ ID NO: 1052877 - RNA, 24 nt, Human
gauugcuugagcccgggaguucaa

SEQ ID NO: 1052878 - RNA, 20 nt, Human
gcaagugugugugugugugu

SEQ ID NO: 1052879 - RNA, 31 nt, Human
gccaggcauggccgggcgcaguggcucacag

SEQ ID NO: 1052880 - RNA, 19 nt, Human
gccuguaaucccagugcuu

SEQ ID NO: 1052881 - RNA, 18 nt, Human
gcgcaguggcucacaccu

SEQ ID NO: 1052882 - RNA, 21 nt, Human
gcggaucaccugaaguuggga

SEQ ID NO: 1052883 - RNA, 21 nt, Human
ggaaauagauucuuccccaga

SEQ ID NO: 1052884 - RNA, 24 nt, Human
ggaacggacagcuccuaggaaagg

SEQ ID NO: 1052885 - RNA, 20 nt, Human
ggagagcauuugagcccagu

SEQ ID NO: 1052886 - RNA, 27 nt, Human
ggaggcagaagcaggagaauugccugg

SEQ ID NO: 1052887 - RNA, 20 nt, Human
ggagguugcggugagccaag

SEQ ID NO: 1052888 - RNA, 24 nt, Human
ggagguugcggugagccaagauca

SEQ ID NO: 1052889 - RNA, 18 nt, Human
ggaguucaaggcuacaau

SEQ ID NO: 1052890 - RNA, 22 nt, Human
ggaucaccugaaguugggaguu

SEQ ID NO: 1052891 - RNA, 23 nt, Human
ggaucaccugaaguugggaguuu

SEQ ID NO: 1052892 - RNA, 22 nt, Human
ggcaggguccuccucacugucc

SEQ ID NO: 1052893 - RNA, 19 nt, Human
ggccauggcucugucacau

SEQ ID NO: 1052894 - RNA, 23 nt, Human
ggcgcaguggcucacaccuguaa

SEQ ID NO: 1052895 - RNA, 24 nt, Human
ggcggcacaugccuguaauuccag

SEQ ID NO: 1052896 - RNA, 19 nt, Human
ggcuacaaugauuuauaau

SEQ ID NO: 1052897 - RNA, 21 nt, Human
gggagagcauuugagcccagu

SEQ ID NO: 1052898 - RNA, 25 nt, Human
gggcacccaugaguucccaagcugg

SEQ ID NO: 1052899 - RNA, 21 nt, Human
ggugcaagugugugugugugu

SEQ ID NO: 1052900 - RNA, 25 nt, Human
ggugcaagugugugugugugugugg

SEQ ID NO: 1052901 - RNA, 19 nt, Human
guccccacccacacccacc

SEQ ID NO: 1052902 - RNA, 19 nt, Human
gugauauaaucacaagggu

SEQ ID NO: 1052903 - RNA, 22 nt, Human
gugcaagugugugugugugugu

SEQ ID NO: 1052904 - RNA, 20 nt, Human
gugcucacuugucacagcag

SEQ ID NO: 1052905 - RNA, 20 nt, Human
gugugugugugugugugcgc

SEQ ID NO: 1052906 - RNA, 22 nt, Human
guguuuuaaccaacaaagagga

SEQ ID NO: 1052907 - RNA, 24 nt, Human
guugcacuccagccuaggcgacag

SEQ ID NO: 1052908 - RNA, 19 nt, Human
guuuuuguuuuggccaguu

SEQ ID NO: 1052909 - RNA, 19 nt, Human
uaaaagagcacagcucugc

SEQ ID NO: 1052910 - RNA, 26 nt, Human
uaaaagagcacagcucugcaacaugg

SEQ ID NO: 1052911 - RNA, 24 nt, Human
uaaucacaaggguccuuaaaaggu

SEQ ID NO: 1052912 - RNA, 24 nt, Human
uagcuacuugggaggcugaggugg

SEQ ID NO: 1052913 - RNA, 21 nt, Human
uaggaggcggagguugcggug

SEQ ID NO: 1052914 - RNA, 24 nt, Human
uaggaggcggagguugcggugagc

SEQ ID NO: 1052915 - RNA, 24 nt, Human
ucacaaggguccuuaaaaggugga

SEQ ID NO: 1052916 - RNA, 31 nt, Human
ucacacuguugcacuccagccuaggcgacaa

SEQ ID NO: 1052917 - RNA, 21 nt, Human
ucacugcccucuagccuaggu

SEQ ID NO: 1052918 - RNA, 24 nt, Human
ucacugcccucuagccuaggugac

SEQ ID NO: 1052919 - RNA, 19 nt, Human
uccuaaccccgggagagcc

SEQ ID NO: 1052920 - RNA, 19 nt, Human
ucucuaaaaaaaaaagaga

SEQ ID NO: 1052921 - RNA, 24 nt, Human
ucucuacuaaaaauacaaaaaauu

SEQ ID NO: 1052922 - RNA, 28 nt, Human
ugaauccauuuguguuuuaaccaacaaa

SEQ ID NO: 1052923 - RNA, 20 nt, Human
ugaaucgcaggaggggagac

SEQ ID NO: 1052924 - RNA, 18 nt, Human
ugaccccuuggguccccu

SEQ ID NO: 1052925 - RNA, 23 nt, Human
ugacuggugcuguugugggcugg

SEQ ID NO: 1052926 - RNA, 19 nt, Human
ugagaaaauaaauuuaaaa

SEQ ID NO: 1052927 - RNA, 23 nt, Human
ugagcccaaaaguucaagaccag

SEQ ID NO: 1052928 - RNA, 20 nt, Human
ugaggcaggcggaucaccug

SEQ ID NO: 1052929 - RNA, 20 nt, Human
ugaggugggaggauugcuug

SEQ ID NO: 1052930 - RNA, 22 nt, Human
ugaggugggaggauugcuugag

SEQ ID NO: 1052931 - RNA, 23 nt, Human
ugaggugggaggauugcuugagc

SEQ ID NO: 1052932 - RNA, 24 nt, Human
ugaggugggaggauugcuugagcc

SEQ ID NO: 1052933 - RNA, 22 nt, Human
ugcacuccagccuaggcgacag

SEQ ID NO: 1052934 - RNA, 23 nt, Human
ugccuguaaucccagugcuuugg

SEQ ID NO: 1052935 - RNA, 24 nt, Human
ugccuguaaucccagugcuuuggg

SEQ ID NO: 1052936 - RNA, 24 nt, Human
ugccuguaauuccagcuacucagg

SEQ ID NO: 1052937 - RNA, 18 nt, Human
ugcuguguugacuguugu

SEQ ID NO: 1052938 - RNA, 24 nt, Human
uggaaauagauucuuccccagaua

SEQ ID NO: 1052939 - RNA, 18 nt, Human
uggcagagcacccaggaa

SEQ ID NO: 1052940 - RNA, 24 nt, Human
uggcagagcacccaggaagaagag

SEQ ID NO: 1052941 - RNA, 26 nt, Human
uggcagagcacccaggaagaagagga

SEQ ID NO: 1052942 - RNA, 24 nt, Human
uggcggcacaugccuguaauucca

SEQ ID NO: 1052943 - RNA, 21 nt, Human
uggcucacaccuguaauccca

SEQ ID NO: 1052944 - RNA, 24 nt, Human
uggcucacaccuguaaucccagca

SEQ ID NO: 1052945 - RNA, 19 nt, Human
uggcucugucacaugcucc

SEQ ID NO: 1052946 - RNA, 19 nt, Human
ugggaggccaaggugggag

SEQ ID NO: 1052947 - RNA, 24 nt, Human
ugggaggccaaggugggaggauca

SEQ ID NO: 1052948 - RNA, 18 nt, Human
ugggaggcugaggcaggc

SEQ ID NO: 1052949 - RNA, 20 nt, Human
ugggaggcugaggcaggcgg

SEQ ID NO: 1052950 - RNA, 24 nt, Human
ugggaggcugaggcaggcggauca

SEQ ID NO: 1052951 - RNA, 22 nt, Human
ugggaggcugaggugggaggau

SEQ ID NO: 1052952 - RNA, 24 nt, Human
ugggaggcugaggugggaggauug

SEQ ID NO: 1052953 - RNA, 23 nt, Human
ugggcaggguccuccucacuguc

SEQ ID NO: 1052954 - RNA, 19 nt, Human
uggggagagcauuugagcc

SEQ ID NO: 1052955 - RNA, 31 nt, Human
ugucacagcagcugcaaggagugaacacacc

SEQ ID NO: 1052956 - RNA, 19 nt, Human
ugucagaguugugaucuuc

SEQ ID NO: 1052957 - RNA, 18 nt, Human
uguccccacccacaccca

SEQ ID NO: 1052958 - RNA, 18 nt, Human
uguccugggaacggacag

SEQ ID NO: 1052959 - RNA, 24 nt, Human
ugucuguaucccuagcuacuuggg

SEQ ID NO: 1052960 - RNA, 22 nt, Human
uguguaagagugaccccuuggg

SEQ ID NO: 1052961 - RNA, 21 nt, Human
ugugugugugugugcgcuugu

SEQ ID NO: 1052962 - RNA, 19 nt, Human
ugugugugugugugugcgc

SEQ ID NO: 1052963 - RNA, 19 nt, Human
uguugauucucuuggguug

SEQ ID NO: 1052964 - RNA, 24 nt, Human
uguugcacuccagccuaggcgaca

SEQ ID NO: 1052965 - RNA, 19 nt, Human
uguuuuggccaguuuuugu

SEQ ID NO: 1052966 - RNA, 19 nt, Human
uucaccucucugaaucuca

SEQ ID NO: 1052967 - RNA, 22 nt, Human
uucuuccccagauacuccuaaa

SEQ ID NO: 1052968 - RNA, 20 nt, Human
uugagaaacuggaaaaaaug

SEQ ID NO: 1052969 - RNA, 20 nt, Human
uugcacuccagccuaggcga

SEQ ID NO: 1052970 - RNA, 27 nt, Human
uugcaucacugcccucuagccuaggug

SEQ ID NO: 1052971 - RNA, 24 nt, Human
uugccuggaccuaggaggcggagg

SEQ ID NO: 1052972 - RNA, 20 nt, Human
uugcggugagccaagaucac

SEQ ID NO: 1052973 - RNA, 24 nt, Human
uugcuugagcccgggaguucaagg

SEQ ID NO: 1052974 - RNA, 25 nt, Human
uugggaggcugaggcaggcggauca

SEQ ID NO: 1052975 - RNA, 20 nt, Human
uugggaggcugaggugggag

SEQ ID NO: 1052976 - RNA, 24 nt, Human
uuguacggccguggaccaguuacu

SEQ ID NO: 1052977 - RNA, 21 nt, Human
uuguuuuuguuuuggccaguu

SEQ ID NO: 1052978 - RNA, 19 nt, Human
uuuguuuuggccaguuuuu

SEQ ID NO: 1052979 - RNA, 23 nt, Human
uuuuaagcuaugcaguuugugcu

SEQ ID NO: 1052980 - RNA, 20 nt, Human
aaagauucugaaagccaaca

SEQ ID NO: 1052981 - RNA, 18 nt, Human
aaauggccucaaaauggg

SEQ ID NO: 1052982 - RNA, 22 nt, Human
aaaugggcuucuuggaugacuu

SEQ ID NO: 1052983 - RNA, 26 nt, Human
aaccuuuggcuuuaaagauuauaaac

SEQ ID NO: 1052984 - RNA, 22 nt, Human
aacuggacagaaccuaccuaac

SEQ ID NO: 1052985 - RNA, 23 nt, Human
acaaaacauauuuuguaccaaau

SEQ ID NO: 1052986 - RNA, 24 nt, Human
agaagaaaauacaguauauaauaa

SEQ ID NO: 1052987 - RNA, 18 nt, Human
agccagcuacauguaugc

SEQ ID NO: 1052988 - RNA, 19 nt, Human
aggaggaggcaaauuggua

SEQ ID NO: 1052989 - RNA, 20 nt, Human
aguaauuacuuaaggcacag

SEQ ID NO: 1052990 - RNA, 21 nt, Human
agugcaaaguugaaggacugu

SEQ ID NO: 1052991 - RNA, 25 nt, Human
agugcaaaguugaaggacuguuuug

SEQ ID NO: 1052992 - RNA, 22 nt, Human
aucagucccagaaagugaaccc

SEQ ID NO: 1052993 - RNA, 19 nt, Human
caaaaugggcuucuuggau

SEQ ID NO: 1052994 - RNA, 21 nt, Human
caacaucauguuuaggguaaa

SEQ ID NO: 1052995 - RNA, 23 nt, Human
cacaacaaggccacccuguugua

SEQ ID NO: 1052996 - RNA, 18 nt, Human
cagcuacauguaugcuuc

SEQ ID NO: 1052997 - RNA, 21 nt, Human
cccggccagggcccgccccuc

SEQ ID NO: 1052998 - RNA, 21 nt, Human
ccggccagggcccgccccucc

SEQ ID NO: 1052999 - RNA, 21 nt, Human
ccucggcggcgcagcucugcc

SEQ ID NO: 1053000 - RNA, 23 nt, Human
cgagaagggaccgcucagccucg

SEQ ID NO: 1053001 - RNA, 23 nt, Human
cggcggcgcagcucugccgaagc

SEQ ID NO: 1053002 - RNA, 27 nt, Human
cuacauguaugcuugccuugguauccu

SEQ ID NO: 1053003 - RNA, 24 nt, Human
cugguaaacaucauuacugcaucu

SEQ ID NO: 1053004 - RNA, 18 nt, Human
cuuacugggauuuccuca

SEQ ID NO: 1053005 - RNA, 19 nt, Human
gaaccuaccuaacaacacc

SEQ ID NO: 1053006 - RNA, 20 nt, Human
gaagccuuccgccuucccgg

SEQ ID NO: 1053007 - RNA, 20 nt, Human
gagauugcagcuaauccuag

SEQ ID NO: 1053008 - RNA, 26 nt, Human
gcaaaguugaaggacuguuuugguac

SEQ ID NO: 1053009 - RNA, 20 nt, Human
gcauaggaaacaauaaucuc

SEQ ID NO: 1053010 - RNA, 19 nt, Human
ggcccuuuaaaaaauggca

SEQ ID NO: 1053011 - RNA, 19 nt, Human
ggccgcagcgagaagggac

SEQ ID NO: 1053012 - RNA, 21 nt, Human
gggcgcgggcaccugggcggc

SEQ ID NO: 1053013 - RNA, 22 nt, Human
guggcccuuuaaaaaauggcag

SEQ ID NO: 1053014 - RNA, 27 nt, Human
guuacaauuaaacaucagucccagaaa

SEQ ID NO: 1053015 - RNA, 24 nt, Human
uaaaagaccuuaauuuagcaaaga

SEQ ID NO: 1053016 - RNA, 22 nt, Human
uaaaagauucugaaagccaaca

SEQ ID NO: 1053017 - RNA, 22 nt, Human
uagaagaaaauacaguauauaa

SEQ ID NO: 1053018 - RNA, 20 nt, Human
uauaaugugaaaaaaguccc

SEQ ID NO: 1053019 - RNA, 23 nt, Human
ucgaaaguagagauugcagcuaa

SEQ ID NO: 1053020 - RNA, 22 nt, Human
ucggcggcgcagcucugccgaa

SEQ ID NO: 1053021 - RNA, 24 nt, Human
ucugccgaagccuuccgccuuccc

SEQ ID NO: 1053022 - RNA, 24 nt, Human
ugaggaaggaggaggcaaauuggu

SEQ ID NO: 1053023 - RNA, 22 nt, Human
uggaacaaaaugccacuccauu

SEQ ID NO: 1053024 - RNA, 18 nt, Human
uggaugacuuccaacagu

SEQ ID NO: 1053025 - RNA, 21 nt, Human
uggcccuuuaaaaaauggcag

SEQ ID NO: 1053026 - RNA, 20 nt, Human
ugggauuuccucaucgaaag

SEQ ID NO: 1053027 - RNA, 22 nt, Human
ugguaauucuauaguuguggcc

SEQ ID NO: 1053028 - RNA, 26 nt, Human
uuaaaaaauggcagcauuguacuuga

SEQ ID NO: 1053029 - RNA, 20 nt, Human
uucaagucuaaaaaaaccuu

SEQ ID NO: 1053030 - RNA, 23 nt, Human
uucauguucauuuuuguccugga

SEQ ID NO: 1053031 - RNA, 24 nt, Human
uucauguucauuuuuguccuggag

SEQ ID NO: 1053032 - RNA, 20 nt, Human
uucauuuuuguccuggagag

SEQ ID NO: 1053033 - RNA, 21 nt, Human
uuccucaucgaaaguagagau

SEQ ID NO: 1053034 - RNA, 27 nt, Human
uuuugcauaggaaacaauaaucucugg

SEQ ID NO: 1053035 - RNA, 18 nt, Human
ucucugcucaucucccca

SEQ ID NO: 1053036 - RNA, 20 nt, Human
ucucugcucaucuccccaca

SEQ ID NO: 1053037 - RNA, 25 nt, Human
ugacugcuuucugucuggugcuuug

SEQ ID NO: 1053038 - RNA, 18 nt, Human
ugagaaagaauaaucagg

SEQ ID NO: 1053039 - RNA, 20 nt, Human
ugagaaagaauaaucaggug

SEQ ID NO: 1053040 - RNA, 22 nt, Human
ugagaaguggugucucugcuca

SEQ ID NO: 1053041 - RNA, 21 nt, Human
uguagccuguguugcguuugc

SEQ ID NO: 1053042 - RNA, 19 nt, Human
ugucauggugccuccagaa

SEQ ID NO: 1053043 - RNA, 24 nt, Human
uugagaaguggugucucugcucau

SEQ ID NO: 1053044 - RNA, 25 nt, Human
ccacagugggaauccuuacaccccc

SEQ ID NO: 1053045 - RNA, 22 nt, Human
gggaauccuuacacccagugcc

SEQ ID NO: 1053046 - RNA, 18 nt, Human
agaaaaggagacagaaga

SEQ ID NO: 1053047 - RNA, 23 nt, Human
agagaaacacagccaugccugag

SEQ ID NO: 1053048 - RNA, 18 nt, Human
cacuggggagccagacuc

SEQ ID NO: 1053049 - RNA, 24 nt, Human
cagaagagauuuggacacugaaga

SEQ ID NO: 1053050 - RNA, 22 nt, Human
cagccaugccugagcucccuga

SEQ ID NO: 1053051 - RNA, 20 nt, Human
ggagacagaagagauuugga

SEQ ID NO: 1053052 - RNA, 23 nt, Human
ggagccagacucugcugcauuug

SEQ ID NO: 1053053 - RNA, 18 nt, Human
uacaauagaaaccucuuu

SEQ ID NO: 1053054 - RNA, 21 nt, Human
uccacgcaucaacaaaaccuc

SEQ ID NO: 1053055 - RNA, 19 nt, Human
ugggauaaggaugaugaug

SEQ ID NO: 1053056 - RNA, 25 nt, Human
uuaguucuuaagaaaaggagacaga

SEQ ID NO: 1053057 - RNA, 22 nt, Human
aagguaacccuacccucccuca

SEQ ID NO: 1053058 - RNA, 22 nt, Human
accccauauugaggaaaggcug

SEQ ID NO: 1053059 - RNA, 19 nt, Human
agacaagggucuucugaac

SEQ ID NO: 1053060 - RNA, 22 nt, Human
agacaagggucuucugaaccca

SEQ ID NO: 1053061 - RNA, 24 nt, Human
agacuuggcaacggaagcuagcag

SEQ ID NO: 1053062 - RNA, 22 nt, Human
agccauugguggccacgggggg

SEQ ID NO: 1053063 - RNA, 27 nt, Human
agcgggaggcagacuuggaggucgacc

SEQ ID NO: 1053064 - RNA, 21 nt, Human
agcuuccagcguguggccaau

SEQ ID NO: 1053065 - RNA, 24 nt, Human
aggcuugggccccucaaguucugu

SEQ ID NO: 1053066 - RNA, 19 nt, Human
aguaauagaaguaacugga

SEQ ID NO: 1053067 - RNA, 21 nt, Human
aguaauagaaguaacuggacc

SEQ ID NO: 1053068 - RNA, 23 nt, Human
caagguaacccuacccucccuca

SEQ ID NO: 1053069 - RNA, 23 nt, Human
caauccaacggaaccccauauug

SEQ ID NO: 1053070 - RNA, 22 nt, Human
cagacugccaggggaauacacc

SEQ ID NO: 1053071 - RNA, 21 nt, Human
cauugguggccacgggggggu

SEQ ID NO: 1053072 - RNA, 20 nt, Human
cguugcccagacugccaggg

SEQ ID NO: 1053073 - RNA, 23 nt, Human
cuguuucguucaagguaacccua

SEQ ID NO: 1053074 - RNA, 18 nt, Human
gccccaauccaacggaac

SEQ ID NO: 1053075 - RNA, 24 nt, Human
ggaaaggcugagauaaggcuuggg

SEQ ID NO: 1053076 - RNA, 19 nt, Human
ggccaauaccccauguggc

SEQ ID NO: 1053077 - RNA, 24 nt, Human
gggaauacaccuacuucaucuggg

SEQ ID NO: 1053078 - RNA, 21 nt, Human
uaacuggaccaggaagaggag

SEQ ID NO: 1053079 - RNA, 22 nt, Human
ucuccguugcccagacugccag

SEQ ID NO: 1053080 - RNA, 23 nt, Human
uggaccaggaagaggaggcaucu

SEQ ID NO: 1053081 - RNA, 19 nt, Human
uggcaacggaagcuagcau

SEQ ID NO: 1053082 - RNA, 18 nt, Human
ugucauagccauuggugg

SEQ ID NO: 1053083 - RNA, 20 nt, Human
ugucauagccauugguggcc

SEQ ID NO: 1053084 - RNA, 18 nt, Human
ugucccgcccugucuucc

SEQ ID NO: 1053085 - RNA, 18 nt, Human
uucaucuggggaggcugc

SEQ ID NO: 1053086 - RNA, 19 nt, Human
uucccacuagucauggagg

SEQ ID NO: 1053087 - RNA, 23 nt, Human
uucuuggucuccguugcccagac

SEQ ID NO: 1053088 - RNA, 23 nt, Human
uggcagcaguuacggcgccggaa

SEQ ID NO: 1053089 - RNA, 20 nt, Human
aaacaaaaauaaaaaguuag

SEQ ID NO: 1053090 - RNA, 24 nt, Human
aaacaaaaauaaaaaguuaguguc

SEQ ID NO: 1053091 - RNA, 22 nt, Human
aaaguuagugucaaaagucuac

SEQ ID NO: 1053092 - RNA, 26 nt, Human
aagccugccccagauuucagagccag

SEQ ID NO: 1053093 - RNA, 20 nt, Human
acaaaaauaaaaaguuagug

SEQ ID NO: 1053094 - RNA, 20 nt, Human
acgccagggacaaacccuac

SEQ ID NO: 1053095 - RNA, 18 nt, Human
aggaaaagugaaacgccc

SEQ ID NO: 1053096 - RNA, 21 nt, Human
aucucccuguccucuccgcca

SEQ ID NO: 1053097 - RNA, 20 nt, Human
caaagggcauagccucaggg

SEQ ID NO: 1053098 - RNA, 21 nt, Human
cagggguacaucuaagggcuc

SEQ ID NO: 1053099 - RNA, 20 nt, Human
ccaaacgcaggaaaagugaa

SEQ ID NO: 1053100 - RNA, 23 nt, Human
ccacccccucccgcgcccgagac

SEQ ID NO: 1053101 - RNA, 26 nt, Human
ccacccccucccgcgcccgagacccu

SEQ ID NO: 1053102 - RNA, 21 nt, Human
cccgcgcccgagaccugagac

SEQ ID NO: 1053103 - RNA, 22 nt, Human
ccgccacccccucccgcgcccg

SEQ ID NO: 1053104 - RNA, 21 nt, Human
ccgcgcccgagaccugagaca

SEQ ID NO: 1053105 - RNA, 23 nt, Human
ccgcgcccgagaccugagacacc

SEQ ID NO: 1053106 - RNA, 24 nt, Human
gcauagccucagggacuccccaaa

SEQ ID NO: 1053107 - RNA, 18 nt, Human
gccagggacaaacccuac

SEQ ID NO: 1053108 - RNA, 18 nt, Human
gcgcccgagaccugagac

SEQ ID NO: 1053109 - RNA, 22 nt, Human
gugaucccaaacaaaaauaaaa

SEQ ID NO: 1053110 - RNA, 19 nt, Human
uacacaggacucaguuuua

SEQ ID NO: 1053111 - RNA, 25 nt, Human
uaccuuugacgccagggacaaaccc

SEQ ID NO: 1053112 - RNA, 18 nt, Human
ugaaacgcccacuccugg

SEQ ID NO: 1053113 - RNA, 22 nt, Human
ugauuguauuccaguuacauag

SEQ ID NO: 1053114 - RNA, 22 nt, Human
ugggcucucgccgucaggggua

SEQ ID NO: 1053115 - RNA, 19 nt, Human
uguccucuccgccaccccc

SEQ ID NO: 1053116 - RNA, 24 nt, Human
uuauugauuguauuccaguuacau

SEQ ID NO: 1053117 - RNA, 23 nt, Human
uucagagccagcgcuggggaauc

SEQ ID NO: 1053118 - RNA, 20 nt, Human
uuuuuuuuuuuuuuugucag

SEQ ID NO: 1053119 - RNA, 20 nt, Human
uuuuuuuuuuuuuuugucag

SEQ ID NO: 1053120 - RNA, 21 nt, Human
aaaggugaucugaccucaucc

SEQ ID NO: 1053121 - RNA, 24 nt, Human
aaaguguugggauuacagguguga

SEQ ID NO: 1053122 - RNA, 21 nt, Human
aaguguugggauuacaggugu

SEQ ID NO: 1053123 - RNA, 26 nt, Human
aaguguugggauuacaggugugagcc

SEQ ID NO: 1053124 - RNA, 18 nt, Human
acagcacugaaacaggac

SEQ ID NO: 1053125 - RNA, 23 nt, Human
acaggaagguugguacauguggg

SEQ ID NO: 1053126 - RNA, 21 nt, Human
acaggcucugaaaugaggcuu

SEQ ID NO: 1053127 - RNA, 24 nt, Human
acaguguugcucaggcuggucucg

SEQ ID NO: 1053128 - RNA, 23 nt, Human
accucagccucucaaaguguugg

SEQ ID NO: 1053129 - RNA, 26 nt, Human
accucauccuuguuccugagguccag

SEQ ID NO: 1053130 - RNA, 18 nt, Human
agaaaggacaggcucggg

SEQ ID NO: 1053131 - RNA, 18 nt, Human
agaagcuuacuggguguu

SEQ ID NO: 1053132 - RNA, 19 nt, Human
agcuuucaaaaccucaucc

SEQ ID NO: 1053133 - RNA, 22 nt, Human
aggcuggucucgaacuccuggc

SEQ ID NO: 1053134 - RNA, 24 nt, Human
aguguugcucaggcuggucucgaa

SEQ ID NO: 1053135 - RNA, 22 nt, Human
auagagagcaagucugaccaca

SEQ ID NO: 1053136 - RNA, 19 nt, Human
caaaguguugggauuacag

SEQ ID NO: 1053137 - RNA, 20 nt, Human
caaaguguugggauuacagg

SEQ ID NO: 1053138 - RNA, 24 nt, Human
caaaguguugggauuacaggugug

SEQ ID NO: 1053139 - RNA, 19 nt, Human
cacaggcucugaaaugagg

SEQ ID NO: 1053140 - RNA, 24 nt, Human
cacaguguugcucaggcuggucuc

SEQ ID NO: 1053141 - RNA, 19 nt, Human
caccccccagcacacacac

SEQ ID NO: 1053142 - RNA, 24 nt, Human
cagagcuacaagaagaaauucuga

SEQ ID NO: 1053143 - RNA, 22 nt, Human
cagcacacacacuuugcaugua

SEQ ID NO: 1053144 - RNA, 20 nt, Human
cagcagcccggcccucgggc

SEQ ID NO: 1053145 - RNA, 22 nt, Human
cagcccucccaccccccagcac

SEQ ID NO: 1053146 - RNA, 23 nt, Human
caucccaccucagccucucaaag

SEQ ID NO: 1053147 - RNA, 21 nt, Human
ccaaaggugaucugaccucau

SEQ ID NO: 1053148 - RNA, 23 nt, Human
ccacagauagccauuaugugaac

SEQ ID NO: 1053149 - RNA, 19 nt, Human
ccacugcucccagcccaga

SEQ ID NO: 1053150 - RNA, 19 nt, Human
cccggcccucgggccuggg

SEQ ID NO: 1053151 - RNA, 21 nt, Human
cccuguucugggcagcccucc

SEQ ID NO: 1053152 - RNA, 19 nt, Human
ccgcggaggaagcuccagg

SEQ ID NO: 1053153 - RNA, 22 nt, Human
ccuggccucaagugaucauccc

SEQ ID NO: 1053154 - RNA, 24 nt, Human
ccuggccucaagugaucaucccac

SEQ ID NO: 1053155 - RNA, 18 nt, Human
ccuugcuggagaaaggac

SEQ ID NO: 1053156 - RNA, 18 nt, Human
cuaaagaaaaugaaaguc

SEQ ID NO: 1053157 - RNA, 24 nt, Human
cucaagugaucaucccaccucagc

SEQ ID NO: 1053158 - RNA, 20 nt, Human
cucauccaccugcuuacaca

SEQ ID NO: 1053159 - RNA, 22 nt, Human
cuccuggccucaagugaucauc

SEQ ID NO: 1053160 - RNA, 19 nt, Human
cugcuuacacagagcuaca

SEQ ID NO: 1053161 - RNA, 18 nt, Human
gacuugaggagugggaca

SEQ ID NO: 1053162 - RNA, 19 nt, Human
gacuugaggagugggacag

SEQ ID NO: 1053163 - RNA, 24 nt, Human
gauggcgggggggucucacagugu

SEQ ID NO: 1053164 - RNA, 18 nt, Human
gauuacaggugugagcca

SEQ ID NO: 1053165 - RNA, 21 nt, Human
gauuacaggugugagccacug

SEQ ID NO: 1053166 - RNA, 22 nt, Human
gauuacaggugugagccacugc

SEQ ID NO: 1053167 - RNA, 23 nt, Human
gcuggucucgaacuccuggccuc

SEQ ID NO: 1053168 - RNA, 21 nt, Human
ggagaggguaacaggaaagga

SEQ ID NO: 1053169 - RNA, 24 nt, Human
ggccucaagugaucaucccaccuc

SEQ ID NO: 1053170 - RNA, 24 nt, Human
ggcuggucucgaacuccuggccuc

SEQ ID NO: 1053171 - RNA, 20 nt, Human
gggaagggcacaggcucuga

SEQ ID NO: 1053172 - RNA, 21 nt, Human
gggagcaacaggaagguuggu

SEQ ID NO: 1053173 - RNA, 23 nt, Human
gguagcuauuauucuguggaugg

SEQ ID NO: 1053174 - RNA, 21 nt, Human
gguuaagcugggcagcugggc

SEQ ID NO: 1053175 - RNA, 24 nt, Human
gugaucaucccaccucagccucuc

SEQ ID NO: 1053176 - RNA, 20 nt, Human
uacaggugugagccacugcu

SEQ ID NO: 1053177 - RNA, 24 nt, Human
uacaggugugagccacugcuccca

SEQ ID NO: 1053178 - RNA, 21 nt, Human
uacauguggggagaggguaac

SEQ ID NO: 1053179 - RNA, 24 nt, Human
uacauguggggagaggguaacagg

SEQ ID NO: 1053180 - RNA, 23 nt, Human
uauguagagauggcggggggguc

SEQ ID NO: 1053181 - RNA, 21 nt, Human
uaugugaaccugagcauggau

SEQ ID NO: 1053182 - RNA, 21 nt, Human
ucaaaguguugggauuacagg

SEQ ID NO: 1053183 - RNA, 24 nt, Human
ucaaaguguugggauuacaggugu

SEQ ID NO: 1053184 - RNA, 18 nt, Human
ucacagaggcucaggcgg

SEQ ID NO: 1053185 - RNA, 23 nt, Human
ucucaaaguguugggauuacagg

SEQ ID NO: 1053186 - RNA, 24 nt, Human
ucucaaaguguugggauuacaggu

SEQ ID NO: 1053187 - RNA, 21 nt, Human
ucucacaguguugcucaggcu

SEQ ID NO: 1053188 - RNA, 23 nt, Human
ucucacaguguugcucaggcugg

SEQ ID NO: 1053189 - RNA, 21 nt, Human
ucucgaacuccuggccucaag

SEQ ID NO: 1053190 - RNA, 23 nt, Human
ucugaaaugaggcuuggauuuca

SEQ ID NO: 1053191 - RNA, 19 nt, Human
ucuuuuuuuacaccauccu

SEQ ID NO: 1053192 - RNA, 21 nt, Human
ugagccacugcucccagccca

SEQ ID NO: 1053193 - RNA, 19 nt, Human
ugccuggcggaucagcagc

SEQ ID NO: 1053194 - RNA, 24 nt, Human
ugcucaggcuggucucgaacuccu

SEQ ID NO: 1053195 - RNA, 22 nt, Human
ugcuggagaaaggacaggcucg

SEQ ID NO: 1053196 - RNA, 18 nt, Human
ugggauuacaggugugag

SEQ ID NO: 1053197 - RNA, 19 nt, Human
ugggauuacaggugugagc

SEQ ID NO: 1053198 - RNA, 21 nt, Human
ugggauuacaggugugagcca

SEQ ID NO: 1053199 - RNA, 22 nt, Human
ugggauuacaggugugagccac

SEQ ID NO: 1053200 - RNA, 22 nt, Human
ugggauuacaggugugagccac

SEQ ID NO: 1053201 - RNA, 24 nt, Human
ugggauuacaggugugagccacug

SEQ ID NO: 1053202 - RNA, 20 nt, Human
ugggcagcccucccaccccc

SEQ ID NO: 1053203 - RNA, 21 nt, Human
uguguaaacaguagcaaauga

SEQ ID NO: 1053204 - RNA, 22 nt, Human
uucccagucagcccucacucac

SEQ ID NO: 1053205 - RNA, 21 nt, Human
uuggaggcugaagccuggugg

SEQ ID NO: 1053206 - RNA, 21 nt, Human
uugggauuacaggugugagcc

SEQ ID NO: 1053207 - RNA, 23 nt, Human
uuucaaaaccucauccuuguucc

SEQ ID NO: 1053208 - RNA, 22 nt, Human
uuuuuuuuuuuuuuuuguuuuu

SEQ ID NO: 1053209 - RNA, 27 nt, Human
aagcccugcaggcccagugugugggga

SEQ ID NO: 1053210 - RNA, 18 nt, Human
caccugaggggacagagc

SEQ ID NO: 1053211 - RNA, 19 nt, Human
cccccgaggagcugugccu

SEQ ID NO: 1053212 - RNA, 22 nt, Human
cggcaacgggggcaggaggggg

SEQ ID NO: 1053213 - RNA, 22 nt, Human
cggccugggccccccgaggagc

SEQ ID NO: 1053214 - RNA, 22 nt, Human
gauaaagggguuaauggaagga

SEQ ID NO: 1053215 - RNA, 20 nt, Human
gcaggaggggguuccugaug

SEQ ID NO: 1053216 - RNA, 25 nt, Human
ggcccaguguguggggacagagagg

SEQ ID NO: 1053217 - RNA, 19 nt, Human
gggacagagaggccaacac

SEQ ID NO: 1053218 - RNA, 23 nt, Human
gggcaggaggggguuccugaugc

SEQ ID NO: 1053219 - RNA, 20 nt, Human
gugcugccucggcaacgggg

SEQ ID NO: 1053220 - RNA, 18 nt, Human
uccugaagcugcccucug

SEQ ID NO: 1053221 - RNA, 22 nt, Human
ugcagccuuggagcuccccagg

SEQ ID NO: 1053222 - RNA, 19 nt, Human
uguggggacagagaggcca

SEQ ID NO: 1053223 - RNA, 19 nt, Human
aaaagaagaaacugccuuu

SEQ ID NO: 1053224 - RNA, 25 nt, Human
aaacaagacaacuguuaaaaaaaaa

SEQ ID NO: 1053225 - RNA, 22 nt, Human
aacagcucuuuuuuguucuucu

SEQ ID NO: 1053226 - RNA, 25 nt, Human
aagaaucugcuauuaauuucuucag

SEQ ID NO: 1053227 - RNA, 22 nt, Human
aagauuguuacauuagaaguga

SEQ ID NO: 1053228 - RNA, 18 nt, Human
aauacaaaaguauaaaga

SEQ ID NO: 1053229 - RNA, 21 nt, Human
aauuucuucuugaaagauugu

SEQ ID NO: 1053230 - RNA, 18 nt, Human
acacuguuuggucacucu

SEQ ID NO: 1053231 - RNA, 23 nt, Human
agaaaacaguagagaaaaugaga

SEQ ID NO: 1053232 - RNA, 20 nt, Human
agaaauuucuucuugaaaga

SEQ ID NO: 1053233 - RNA, 21 nt, Human
agaacccugucuucccugccg

SEQ ID NO: 1053234 - RNA, 24 nt, Human
aggcuuccaaagguucagcaauuu

SEQ ID NO: 1053235 - RNA, 23 nt, Human
auguacuuguacuccuagaugac

SEQ ID NO: 1053236 - RNA, 24 nt, Human
augucuuguucuuccauuguuuca

SEQ ID NO: 1053237 - RNA, 18 nt, Human
auucuucucacuugguca

SEQ ID NO: 1053238 - RNA, 25 nt, Human
cagaagaaaaaacaagacaacuguu

SEQ ID NO: 1053239 - RNA, 25 nt, Human
cauaauaguacaguaaaucuuuaga

SEQ ID NO: 1053240 - RNA, 22 nt, Human
ccauuuuccagguggaaaaacc

SEQ ID NO: 1053241 - RNA, 24 nt, Human
ccgaagcccuuucuuuuaacuagg

SEQ ID NO: 1053242 - RNA, 25 nt, Human
ccuugcccccuuucuccuaagaucc

SEQ ID NO: 1053243 - RNA, 18 nt, Human
ccuuuuuuuuuaaaacuc

SEQ ID NO: 1053244 - RNA, 18 nt, Human
cuaaacugugggaaagga

SEQ ID NO: 1053245 - RNA, 22 nt, Human
cuagaagggcugccuacuagug

SEQ ID NO: 1053246 - RNA, 21 nt, Human
cucuauuccaagaguacaaag

SEQ ID NO: 1053247 - RNA, 22 nt, Human
cuucugcuccuccguuucuuua

SEQ ID NO: 1053248 - RNA, 21 nt, Human
cuuuaauugaagacugagaag

SEQ ID NO: 1053249 - RNA, 18 nt, Human
gaaaaugagaacguuccu

SEQ ID NO: 1053250 - RNA, 24 nt, Human
gcuucuugucaccauuauuuucac

SEQ ID NO: 1053251 - RNA, 23 nt, Human
ggcagucuaccuccaacuguaaa

SEQ ID NO: 1053252 - RNA, 19 nt, Human
ggggugggguggguagggg

SEQ ID NO: 1053253 - RNA, 20 nt, Human
guauuuuucaucaacagcuc

SEQ ID NO: 1053254 - RNA, 28 nt, Human
guuucucuuaccgguuuuuuuuuggggg

SEQ ID NO: 1053255 - RNA, 22 nt, Human
uacacuuaccacuaaguuuuua

SEQ ID NO: 1053256 - RNA, 21 nt, Human
uaccuccaacuguaaaugaaa

SEQ ID NO: 1053257 - RNA, 22 nt, Human
uaccuccaacuguaaaugaaau

SEQ ID NO: 1053258 - RNA, 18 nt, Human
uacuacauuuggcagucu

SEQ ID NO: 1053259 - RNA, 23 nt, Human
uacuuuaauugaagacugagaag

SEQ ID NO: 1053260 - RNA, 25 nt, Human
uauacaguguuucucuuaccgguuc

SEQ ID NO: 1053261 - RNA, 21 nt, Human
ucacucuuucuaauuuuggcu

SEQ ID NO: 1053262 - RNA, 22 nt, Human
ucagaauuacagugaaauacag

SEQ ID NO: 1053263 - RNA, 18 nt, Human
ucaggaaaggaggaaaaa

SEQ ID NO: 1053264 - RNA, 23 nt, Human
ucuaacacuacgaacaucagaau

SEQ ID NO: 1053265 - RNA, 19 nt, Human
ucugcuauuaauuucuuca

SEQ ID NO: 1053266 - RNA, 22 nt, Human
ucuucccugcagcaugccuugc

SEQ ID NO: 1053267 - RNA, 21 nt, Human
ugaguuuugcacacuguuugg

SEQ ID NO: 1053268 - RNA, 23 nt, Human
ugcagaagaaaaaacaagacaac

SEQ ID NO: 1053269 - RNA, 22 nt, Human
ugccaaauguucuauaacaucu

SEQ ID NO: 1053270 - RNA, 21 nt, Human
ugcuucacugugggacuccuu

SEQ ID NO: 1053271 - RNA, 21 nt, Human
uggaugucuucuugaaguucu

SEQ ID NO: 1053272 - RNA, 24 nt, Human
uguaaaugaaauuucuauugcaaa

SEQ ID NO: 1053273 - RNA, 23 nt, Human
uguagccuugucaagaaucugcu

SEQ ID NO: 1053274 - RNA, 23 nt, Human
ugucuuguucuuccauuguuuca

SEQ ID NO: 1053275 - RNA, 22 nt, Human
uguugaaaguauguuugaagga

SEQ ID NO: 1053276 - RNA, 23 nt, Human
uguuucaucuuuugugucuuuca

SEQ ID NO: 1053277 - RNA, 18 nt, Human
uucaaaagacggauuucc

SEQ ID NO: 1053278 - RNA, 18 nt, Human
uucaggaaaggaggaaaa

SEQ ID NO: 1053279 - RNA, 20 nt, Human
uucaucuuuugugucuuuca

SEQ ID NO: 1053280 - RNA, 23 nt, Human
uucccugcagcaugccuugcuua

SEQ ID NO: 1053281 - RNA, 19 nt, Human
uugcugcucuuuuugcucu

SEQ ID NO: 1053282 - RNA, 22 nt, Human
uugggcacauguuauaaugaag

SEQ ID NO: 1053283 - RNA, 25 nt, Human
uuggucagaacuacacauuauuuca

SEQ ID NO: 1053284 - RNA, 22 nt, Human
uuugcacacuguuuggucacuc

SEQ ID NO: 1053285 - RNA, 19 nt, Human
uuugugaguuuugcacacu

SEQ ID NO: 1053286 - RNA, 19 nt, Human
uuuucacauugcaauacgc

SEQ ID NO: 1053287 - RNA, 23 nt, Human
uuuuccaugcucuggaugucuuc

SEQ ID NO: 1053288 - RNA, 23 nt, Human
uuuuuuggggggguggggugggu

SEQ ID NO: 1053289 - RNA, 24 nt, Human
aaaauacaguccaugcaucugcca

SEQ ID NO: 1053290 - RNA, 18 nt, Human
aagagaaggggacgagcg

SEQ ID NO: 1053291 - RNA, 18 nt, Human
aagagggagggaguggag

SEQ ID NO: 1053292 - RNA, 27 nt, Human
aagagggagggaguggaguggagcgag

SEQ ID NO: 1053293 - RNA, 19 nt, Human
acaauacaagggcuuaaca

SEQ ID NO: 1053294 - RNA, 22 nt, Human
agaaaagagggagggaguggag

SEQ ID NO: 1053295 - RNA, 21 nt, Human
agagggagggaguggagugga

SEQ ID NO: 1053296 - RNA, 21 nt, Human
agcgagggaggaaggaaagga

SEQ ID NO: 1053297 - RNA, 18 nt, Human
aggaggguacugagaaaa

SEQ ID NO: 1053298 - RNA, 18 nt, Human
agggcuuaacagauccag

SEQ ID NO: 1053299 - RNA, 24 nt, Human
auaaaaaauggauacagauaccau

SEQ ID NO: 1053300 - RNA, 20 nt, Human
augggggugggggaagaggg

SEQ ID NO: 1053301 - RNA, 19 nt, Human
caggaguaguagaaguauu

SEQ ID NO: 1053302 - RNA, 21 nt, Human
cccaggaugcaaaauccggcu

SEQ ID NO: 1053303 - RNA, 20 nt, Human
ccucagggcuacacaugcaa

SEQ ID NO: 1053304 - RNA, 22 nt, Human
gagaaggggacgagcggguggc

SEQ ID NO: 1053305 - RNA, 22 nt, Human
gaggaggguacugagaaaagag

SEQ ID NO: 1053306 - RNA, 23 nt, Human
gaggaggguacugagaaaagagg

SEQ ID NO: 1053307 - RNA, 25 nt, Human
gcggggagauggcagcuucucacag

SEQ ID NO: 1053308 - RNA, 24 nt, Human
ggaaaggaggguggcagaaagaga

SEQ ID NO: 1053309 - RNA, 21 nt, Human
ggagcgagggaggaaggaaag

SEQ ID NO: 1053310 - RNA, 20 nt, Human
gggacgaggucugucccgcc

SEQ ID NO: 1053311 - RNA, 21 nt, Human
guaaauguuucaaaaugcuuu

SEQ ID NO: 1053312 - RNA, 22 nt, Human
uaaaaaguuaacaauacaaggg

SEQ ID NO: 1053313 - RNA, 21 nt, Human
uaacucggagaguaaagagga

SEQ ID NO: 1053314 - RNA, 21 nt, Human
uacugagaaaagagggaggga

SEQ ID NO: 1053315 - RNA, 19 nt, Human
uagaaguauuaaauaugaa

SEQ ID NO: 1053316 - RNA, 19 nt, Human
uagcaacagcggcugggaa

SEQ ID NO: 1053317 - RNA, 21 nt, Human
uagcaggaauaguauuucaga

SEQ ID NO: 1053318 - RNA, 23 nt, Human
uaguaaguuauuguuaucugugu

SEQ ID NO: 1053319 - RNA, 24 nt, Human
ucaguaaauguuucaaaaugcuuu

SEQ ID NO: 1053320 - RNA, 18 nt, Human
ucaguuaacucggagagu

SEQ ID NO: 1053321 - RNA, 21 nt, Human
ucaguuaacucggagaguaaa

SEQ ID NO: 1053322 - RNA, 18 nt, Human
uccggcuuugaaguggag

SEQ ID NO: 1053323 - RNA, 23 nt, Human
ucuaucaacauucaguaaauguu

SEQ ID NO: 1053324 - RNA, 19 nt, Human
ucuccggaaacccugacuc

SEQ ID NO: 1053325 - RNA, 18 nt, Human
ugacuccauucucgguga

SEQ ID NO: 1053326 - RNA, 20 nt, Human
ugagaaaagagggagggagu

SEQ ID NO: 1053327 - RNA, 23 nt, Human
ugagaaaagagggagggagugga

SEQ ID NO: 1053328 - RNA, 25 nt, Human
uggagcgagggaggaaggaaaggag

SEQ ID NO: 1053329 - RNA, 18 nt, Human
uggcagaaagagaagggg

SEQ ID NO: 1053330 - RNA, 19 nt, Human
uggcagaaagagaagggga

SEQ ID NO: 1053331 - RNA, 20 nt, Human
ugggaaaggugcugagagca

SEQ ID NO: 1053332 - RNA, 22 nt, Human
ugggaaaggugcugagagcaga

SEQ ID NO: 1053333 - RNA, 23 nt, Human
uuuuuuuuuuuuuuuuuuauuuu

SEQ ID NO: 1053334 - RNA, 19 nt, Human
aaaaaaaaaaaaaaaaaga

SEQ ID NO: 1053335 - RNA, 24 nt, Human
aucauccuagaaagcccgcccugu

SEQ ID NO: 1053336 - RNA, 23 nt, Human
auuuuuuuuuuuuuuuuuuacag

SEQ ID NO: 1053337 - RNA, 20 nt, Human
cagaaucaguauaaaauagc

SEQ ID NO: 1053338 - RNA, 28 nt, Human
ccaguccuuaaaaaaaaaaaaaaaaaaa

SEQ ID NO: 1053339 - RNA, 22 nt, Human
ccauaauuaucagaauuauuua

SEQ ID NO: 1053340 - RNA, 19 nt, Human
ccgcccuguugauaucugu

SEQ ID NO: 1053341 - RNA, 24 nt, Human
cuccauaauuaucagaauuauuua

SEQ ID NO: 1053342 - RNA, 18 nt, Human
cuuaaaaaaaaaaaaaaa

SEQ ID NO: 1053343 - RNA, 18 nt, Human
cuuaaaaaaaaaaaaaaa

SEQ ID NO: 1053344 - RNA, 30 nt, Human
uaguuacaaaaauuuuuuuuuuuuuuuuuu

SEQ ID NO: 1053345 - RNA, 21 nt, Human
ucaguauaaaauagcaguuga

SEQ ID NO: 1053346 - RNA, 20 nt, Human
uccuuaaaaaaaaaaaaaaa

SEQ ID NO: 1053347 - RNA, 20 nt, Human
uuaaaaaaaaaaaaaaaaaa

SEQ ID NO: 1053348 - RNA, 22 nt, Human
uugauaucugucaugcuuagcu

SEQ ID NO: 1053349 - RNA, 24 nt, Human
aaacuaauacgaacuuaaaauuca

SEQ ID NO: 1053350 - RNA, 21 nt, Human
agcgacgcaacccccaaccuc

SEQ ID NO: 1053351 - RNA, 20 nt, Human
cagcucagaggccgcggcca

SEQ ID NO: 1053352 - RNA, 25 nt, Human
ccaacaccugcacgccuuuaccaga

SEQ ID NO: 1053353 - RNA, 21 nt, Human
cgcggccaacaccugcacgcc

SEQ ID NO: 1053354 - RNA, 21 nt, Human
cucccuugcuuccaccgggag

SEQ ID NO: 1053355 - RNA, 20 nt, Human
gaggccgcggccaacaccug

SEQ ID NO: 1053356 - RNA, 21 nt, Human
gcaacccccaaccucaagcac

SEQ ID NO: 1053357 - RNA, 23 nt, Human
aaaauacaaguagaauauacguc

SEQ ID NO: 1053358 - RNA, 23 nt, Human
aaaugaaaauuauaaagcaaccc

SEQ ID NO: 1053359 - RNA, 20 nt, Human
aacaagucauuaauacacuu

SEQ ID NO: 1053360 - RNA, 24 nt, Human
aacauuuucccacagggagugcua

SEQ ID NO: 1053361 - RNA, 19 nt, Human
aaccuggccaacgugacaa

SEQ ID NO: 1053362 - RNA, 23 nt, Human
aagauugugccacugcacuccag

SEQ ID NO: 1053363 - RNA, 24 nt, Human
aagcagagguugcagugagcuaag

SEQ ID NO: 1053364 - RNA, 18 nt, Human
aagcucaagugaaaggug

SEQ ID NO: 1053365 - RNA, 19 nt, Human
aagcucaagugaaaggugc

SEQ ID NO: 1053366 - RNA, 19 nt, Human
aauacacuguauuguagua

SEQ ID NO: 1053367 - RNA, 19 nt, Human
aaugguuuguggauguuag

SEQ ID NO: 1053368 - RNA, 24 nt, Human
aauuguuugaacccaggaagcaga

SEQ ID NO: 1053369 - RNA, 24 nt, Human
acccaggaagcagagguugcagug

SEQ ID NO: 1053370 - RNA, 18 nt, Human
acugcacuccagccugag

SEQ ID NO: 1053371 - RNA, 20 nt, Human
agagguugcagugagcuaag

SEQ ID NO: 1053372 - RNA, 22 nt, Human
agagguugcagugagcuaagau

SEQ ID NO: 1053373 - RNA, 24 nt, Human
agagguugcagugagcuaagauug

SEQ ID NO: 1053374 - RNA, 24 nt, Human
agcaaccaaacaagucauuaauac

SEQ ID NO: 1053375 - RNA, 23 nt, Human
agccaggcauggcgguacaugcc

SEQ ID NO: 1053376 - RNA, 19 nt, Human
agcggcucaugccuguaac

SEQ ID NO: 1053377 - RNA, 21 nt, Human
aggaagcagagguugcaguga

SEQ ID NO: 1053378 - RNA, 18 nt, Human
aggcugaggcaugagaau

SEQ ID NO: 1053379 - RNA, 24 nt, Human
aggcugguggaucacuugaguccg

SEQ ID NO: 1053380 - RNA, 29 nt, Human
agguggaggcugguggaucacuugaggaa

SEQ ID NO: 1053381 - RNA, 24 nt, Human
auacaagaaaaaaacauuagccag

SEQ ID NO: 1053382 - RNA, 20 nt, Human
auucagggcucaccauucug

SEQ ID NO: 1053383 - RNA, 19 nt, Human
auucccagagcugcaucuc

SEQ ID NO: 1053384 - RNA, 20 nt, Human
auucccagagcugcaucucu

SEQ ID NO: 1053385 - RNA, 25 nt, Human
auugcaaccuaauauuuuucugauu

SEQ ID NO: 1053386 - RNA, 18 nt, Human
auuucuugguaaagcggc

SEQ ID NO: 1053387 - RNA, 20 nt, Human
caaguagaauauacgucaaa

SEQ ID NO: 1053388 - RNA, 19 nt, Human
cacauguccaaaggcagag

SEQ ID NO: 1053389 - RNA, 20 nt, Human
cacauguccaaaggcagagu

SEQ ID NO: 1053390 - RNA, 19 nt, Human
cacuccagccugagugaca

SEQ ID NO: 1053391 - RNA, 23 nt, Human
cacuccagccugagugacauagc

SEQ ID NO: 1053392 - RNA, 19 nt, Human
cacugcacuccagccugag

SEQ ID NO: 1053393 - RNA, 19 nt, Human
cacugcacuccagccugag

SEQ ID NO: 1053394 - RNA, 22 nt, Human
cacugcacuccagccugaguga

SEQ ID NO: 1053395 - RNA, 24 nt, Human
cacugcacuccagccugagugaca

SEQ ID NO: 1053396 - RNA, 24 nt, Human
cauagcaagacugucucaaaaaaa

SEQ ID NO: 1053397 - RNA, 20 nt, Human
ccacugcacuccagccugag

SEQ ID NO: 1053398 - RNA, 20 nt, Human
ccacugcacuccagccugag

SEQ ID NO: 1053399 - RNA, 21 nt, Human
ccacugcacuccagccugagu

SEQ ID NO: 1053400 - RNA, 24 nt, Human
ccacugcacuccagccugagugac

SEQ ID NO: 1053401 - RNA, 20 nt, Human
ccauggguucaggcuggaag

SEQ ID NO: 1053402 - RNA, 24 nt, Human
cccaccacgucgggagguggaggc

SEQ ID NO: 1053403 - RNA, 21 nt, Human
ccugcaauacaguacaaucaa

SEQ ID NO: 1053404 - RNA, 20 nt, Human
ccuggccaacgugacaaaac

SEQ ID NO: 1053405 - RNA, 23 nt, Human
ccuguaaccccaccacgucggga

SEQ ID NO: 1053406 - RNA, 18 nt, Human
ccuguagucccagcuacu

SEQ ID NO: 1053407 - RNA, 21 nt, Human
ccuguagucccagcuacuugg

SEQ ID NO: 1053408 - RNA, 22 nt, Human
ccuguagucccagcuacuuggg

SEQ ID NO: 1053409 - RNA, 21 nt, Human
cgaggccaaccuggccaacgu

SEQ ID NO: 1053410 - RNA, 18 nt, Human
cuacuaacaauacaagaa

SEQ ID NO: 1053411 - RNA, 22 nt, Human
cucaaguuucuuuccuaugacu

SEQ ID NO: 1053412 - RNA, 19 nt, Human
cucaugccuguaaccccac

SEQ ID NO: 1053413 - RNA, 25 nt, Human
cugucucaaaaaaaaaaagagcaua

SEQ ID NO: 1053414 - RNA, 24 nt, Human
gaggcaugagaauuguuugaaccc

SEQ ID NO: 1053415 - RNA, 20 nt, Human
gaguccgaggccaaccuggc

SEQ ID NO: 1053416 - RNA, 19 nt, Human
gccacugcacuccagccug

SEQ ID NO: 1053417 - RNA, 21 nt, Human
gccacugcacuccagccugag

SEQ ID NO: 1053418 - RNA, 20 nt, Human
ggcucaugccuguaacccca

SEQ ID NO: 1053419 - RNA, 23 nt, Human
gguaaagcggcucaugccuguaa

SEQ ID NO: 1053420 - RNA, 19 nt, Human
guccuuguucucauuccca

SEQ ID NO: 1053421 - RNA, 28 nt, Human
uagcaagacugucucaaaaaaaaaaaga

SEQ ID NO: 1053422 - RNA, 21 nt, Human
uaugugaugaaaucuccauau

SEQ ID NO: 1053423 - RNA, 24 nt, Human
uccagccugagugacauagcaaga

SEQ ID NO: 1053424 - RNA, 21 nt, Human
ucccagagcugcaucucugcu

SEQ ID NO: 1053425 - RNA, 18 nt, Human
ucgggagguggaggcugg

SEQ ID NO: 1053426 - RNA, 24 nt, Human
ucuacuaacaauacaagaaaaaaa

SEQ ID NO: 1053427 - RNA, 21 nt, Human
ucucucacauguccaaaggcu

SEQ ID NO: 1053428 - RNA, 21 nt, Human
ugaaauaaaacaugaggcaga

SEQ ID NO: 1053429 - RNA, 20 nt, Human
ugagaagaagcagguccuug

SEQ ID NO: 1053430 - RNA, 22 nt, Human
ugagcuaagauugugccacugc

SEQ ID NO: 1053431 - RNA, 24 nt, Human
ugccuguagucccagcuacuuggg

SEQ ID NO: 1053432 - RNA, 27 nt, Human
uggaucacuugaguccgaggccaaccu

SEQ ID NO: 1053433 - RNA, 24 nt, Human
uggcgguacaugccuguaguccca

SEQ ID NO: 1053434 - RNA, 22 nt, Human
ugggaggcugaggcaugagaau

SEQ ID NO: 1053435 - RNA, 24 nt, Human
uucucauucccagagcugcaucuc

SEQ ID NO: 1053436 - RNA, 19 nt, Human
uugcagugagcuaagauug

SEQ ID NO: 1053437 - RNA, 22 nt, Human
uugcagugagcuaagauugugc

SEQ ID NO: 1053438 - RNA, 23 nt, Human
uugggaggcugaggcaugagaau

SEQ ID NO: 1053439 - RNA, 23 nt, Human
uugugccacugcacuccagccug

SEQ ID NO: 1053440 - RNA, 24 nt, Human
uuguuugaacccaggaagcagagg

SEQ ID NO: 1053441 - RNA, 20 nt, Human
agagcuacugaaagccacug

SEQ ID NO: 1053442 - RNA, 23 nt, Human
agcuacugaaagccacuguagcc

SEQ ID NO: 1053443 - RNA, 20 nt, Human
agcuucuggcaaucaccccu

SEQ ID NO: 1053444 - RNA, 22 nt, Human
cacuguagccagcagcuucugg

SEQ ID NO: 1053445 - RNA, 19 nt, Human
cagaaccuccaaaggcuuc

SEQ ID NO: 1053446 - RNA, 22 nt, Human
cagaaccuccaaaggcuucuga

SEQ ID NO: 1053447 - RNA, 20 nt, Human
cagacuuucgaaugccuccc

SEQ ID NO: 1053448 - RNA, 19 nt, Human
caucagaaccuccaaaggc

SEQ ID NO: 1053449 - RNA, 18 nt, Human
ccagccuucagagcuacu

SEQ ID NO: 1053450 - RNA, 24 nt, Human
cccugcuggaaacugccagcauca

SEQ ID NO: 1053451 - RNA, 21 nt, Human
cuccaaaggcuucugaggccu

SEQ ID NO: 1053452 - RNA, 18 nt, Human
gacaaauuguaaaggcag

SEQ ID NO: 1053453 - RNA, 20 nt, Human
ucccugcuggaaacugccag

SEQ ID NO: 1053454 - RNA, 20 nt, Human
ucugaggccugcaacugcuc

SEQ ID NO: 1053455 - RNA, 25 nt, Human
uucugaggccugcaacugcucucuu

SEQ ID NO: 1053456 - RNA, 19 nt, Human
aaagaaauuauccagagac

SEQ ID NO: 1053457 - RNA, 19 nt, Human
aaaguuauuuuaaaguaac

SEQ ID NO: 1053458 - RNA, 19 nt, Human
aaaugccauuaaugcuuaa

SEQ ID NO: 1053459 - RNA, 21 nt, Human
aaauuguuaaaaacccuucua

SEQ ID NO: 1053460 - RNA, 19 nt, Human
aagaaaacugaucgcagcc

SEQ ID NO: 1053461 - RNA, 23 nt, Human
aagaacaaaguuguaaaaaacag

SEQ ID NO: 1053462 - RNA, 21 nt, Human
aagaagauaccuuaaaaagaa

SEQ ID NO: 1053463 - RNA, 22 nt, Human
acaaaaagcaacauuuauucua

SEQ ID NO: 1053464 - RNA, 24 nt, Human
acaaauauugaauguggacugaca

SEQ ID NO: 1053465 - RNA, 21 nt, Human
acagcaauugcuuauaguuaa

SEQ ID NO: 1053466 - RNA, 19 nt, Human
agaauugaaaaggccaaca

SEQ ID NO: 1053467 - RNA, 21 nt, Human
agaguuaacaugugcuggugu

SEQ ID NO: 1053468 - RNA, 19 nt, Human
agcacagucccuaaauacu

SEQ ID NO: 1053469 - RNA, 26 nt, Human
aggaaaaagggaaucuaaauuguuaa

SEQ ID NO: 1053470 - RNA, 25 nt, Human
caaauugacaaaacagcuuaaauga

SEQ ID NO: 1053471 - RNA, 21 nt, Human
cacagcugcaacagcagcuga

SEQ ID NO: 1053472 - RNA, 21 nt, Human
cacagucccuaaauacuuuuc

SEQ ID NO: 1053473 - RNA, 23 nt, Human
caccugaaccagaagaagaaaac

SEQ ID NO: 1053474 - RNA, 21 nt, Human
cacugcuggaagcacagcugc

SEQ ID NO: 1053475 - RNA, 23 nt, Human
cacuuagcaguagccuuggaagc

SEQ ID NO: 1053476 - RNA, 18 nt, Human
cagagagcaggaaucugu

SEQ ID NO: 1053477 - RNA, 23 nt, Human
cagcagcugaacuguuuaccugg

SEQ ID NO: 1053478 - RNA, 24 nt, Human
cagcuuguuuucacaugugaugau

SEQ ID NO: 1053479 - RNA, 21 nt, Human
cagguuaagagauauguccca

SEQ ID NO: 1053480 - RNA, 22 nt, Human
ccaacaaucaaaagaaaacuga

SEQ ID NO: 1053481 - RNA, 20 nt, Human
ccaacaauguucugcaaacu

SEQ ID NO: 1053482 - RNA, 20 nt, Human
ccugaagugcaaaaaacagu

SEQ ID NO: 1053483 - RNA, 24 nt, Human
ccuggcaucgaaaauaugggggaa

SEQ ID NO: 1053484 - RNA, 25 nt, Human
ccugggaggagaguuaacaugugcu

SEQ ID NO: 1053485 - RNA, 22 nt, Human
ccuguaagcccuaaguccugaa

SEQ ID NO: 1053486 - RNA, 18 nt, Human
cuaaauacuccauauaac

SEQ ID NO: 1053487 - RNA, 21 nt, Human
cuauaauaacuguaaaauuca

SEQ ID NO: 1053488 - RNA, 20 nt, Human
cucuuuucacaacuacagcu

SEQ ID NO: 1053489 - RNA, 19 nt, Human
cugaaacagcagccguucc

SEQ ID NO: 1053490 - RNA, 24 nt, Human
gaaacccucuccugauuauugccu

SEQ ID NO: 1053491 - RNA, 20 nt, Human
gaagugcaaaaaacaguuug

SEQ ID NO: 1053492 - RNA, 20 nt, Human
gagaauguugauuuuuuuug

SEQ ID NO: 1053493 - RNA, 23 nt, Human
gagaugcuauuuuagcacagucc

SEQ ID NO: 1053494 - RNA, 21 nt, Human
gaucccacuuuacuuggcaac

SEQ ID NO: 1053495 - RNA, 18 nt, Human
gcaguagccuuggaagcu

SEQ ID NO: 1053496 - RNA, 18 nt, Human
ggaaaaagggaaucuaaa

SEQ ID NO: 1053497 - RNA, 18 nt, Human
ggaauauccggauuaaaa

SEQ ID NO: 1053498 - RNA, 24 nt, Human
ggcaucgaaaauaugggggaagga

SEQ ID NO: 1053499 - RNA, 21 nt, Human
ggggaaggaauaucuuuuuau

SEQ ID NO: 1053500 - RNA, 21 nt, Human
guaaaaaacagaccugguuua

SEQ ID NO: 1053501 - RNA, 22 nt, Human
guacauaagugacaauagcaau

SEQ ID NO: 1053502 - RNA, 19 nt, Human
guauagaauugaaaaggcc

SEQ ID NO: 1053503 - RNA, 20 nt, Human
gugaagccuucuccagagag

SEQ ID NO: 1053504 - RNA, 19 nt, Human
uaaaaaacagaccugguuu

SEQ ID NO: 1053505 - RNA, 21 nt, Human
uaaaaaguugaugcaauuaua

SEQ ID NO: 1053506 - RNA, 20 nt, Human
uaaacaaagagaauguugau

SEQ ID NO: 1053507 - RNA, 24 nt, Human
uaaccaacaaucaaaagaaaacug

SEQ ID NO: 1053508 - RNA, 23 nt, Human
uaagaacaaaguuguaaaaaaca

SEQ ID NO: 1053509 - RNA, 23 nt, Human
uacacuuaaccuaaguuuccuuu

SEQ ID NO: 1053510 - RNA, 23 nt, Human
uacauaagugacaauagcaauau

SEQ ID NO: 1053511 - RNA, 23 nt, Human
uagcaguagccuuggaagcuaac

SEQ ID NO: 1053512 - RNA, 23 nt, Human
uauaaaauggaguauagaauuga

SEQ ID NO: 1053513 - RNA, 23 nt, Human
uauaaacacuuccuccugaaaua

SEQ ID NO: 1053514 - RNA, 28 nt, Human
uauaacuaaauacuccauauaacugcag

SEQ ID NO: 1053515 - RNA, 21 nt, Human
uauaauauaaacacuuccucc

SEQ ID NO: 1053516 - RNA, 18 nt, Human
uccaaaagcauaaaaauc

SEQ ID NO: 1053517 - RNA, 20 nt, Human
uccuauuaaaacacauccug

SEQ ID NO: 1053518 - RNA, 24 nt, Human
ucggccaaaaacacaggaggucau

SEQ ID NO: 1053519 - RNA, 23 nt, Human
ucuaguaacuucacaugcugggu

SEQ ID NO: 1053520 - RNA, 22 nt, Human
ucuccagagagcaggaaucugu

SEQ ID NO: 1053521 - RNA, 24 nt, Human
ucugcaaacuacacuuaaccuaag

SEQ ID NO: 1053522 - RNA, 23 nt, Human
ugaaaaggccaacagcugaaaca

SEQ ID NO: 1053523 - RNA, 20 nt, Human
ugaaaaucggccaaaaacac

SEQ ID NO: 1053524 - RNA, 21 nt, Human
ugaaauucagacggaacacug

SEQ ID NO: 1053525 - RNA, 22 nt, Human
ugaaccagaagaagaaaacuga

SEQ ID NO: 1053526 - RNA, 19 nt, Human
ugaauauuuuucacuuauu

SEQ ID NO: 1053527 - RNA, 19 nt, Human
ugaauguggacugacauga

SEQ ID NO: 1053528 - RNA, 22 nt, Human
ugaauuaaaaauaaucuuugca

SEQ ID NO: 1053529 - RNA, 19 nt, Human
ugacugcagucacacauag

SEQ ID NO: 1053530 - RNA, 23 nt, Human
ugauacuuacguugcuucccaag

SEQ ID NO: 1053531 - RNA, 18 nt, Human
ugccauagcaagcuugga

SEQ ID NO: 1053532 - RNA, 21 nt, Human
ugggcugcuuaaagcuugcuu

SEQ ID NO: 1053533 - RNA, 22 nt, Human
ugugcaaaucuaaaugccauua

SEQ ID NO: 1053534 - RNA, 21 nt, Human
uguuuuguuuguucagugcau

SEQ ID NO: 1053535 - RNA, 22 nt, Human
uuaaaacugaagaaacauuugc

SEQ ID NO: 1053536 - RNA, 21 nt, Human
uuaagggggaaaugcaacaca

SEQ ID NO: 1053537 - RNA, 24 nt, Human
uucacuuauugucaauauauucac

SEQ ID NO: 1053538 - RNA, 21 nt, Human
uucuacacaaaagggugcccc

SEQ ID NO: 1053539 - RNA, 19 nt, Human
uugcaguuuacuguuagag

SEQ ID NO: 1053540 - RNA, 20 nt, Human
uuguaagguuuuucacacua

SEQ ID NO: 1053541 - RNA, 25 nt, Human
uuuaaaaugaauauggucagacaug

SEQ ID NO: 1053542 - RNA, 21 nt, Human
acucuggccucuccuagccuc

SEQ ID NO: 1053543 - RNA, 19 nt, Human
agaaggagacauaucugca

SEQ ID NO: 1053544 - RNA, 21 nt, Human
cacccucccauuucuucuccu

SEQ ID NO: 1053545 - RNA, 23 nt, Human
cacccuugcccaaaaguccagga

SEQ ID NO: 1053546 - RNA, 19 nt, Human
cacuuuauucuuccuaaag

SEQ ID NO: 1053547 - RNA, 21 nt, Human
cagcacacggccugggauacc

SEQ ID NO: 1053548 - RNA, 22 nt, Human
cccaaaaguccaggacuaagca

SEQ ID NO: 1053549 - RNA, 18 nt, Human
ccccacaaggccaggcca

SEQ ID NO: 1053550 - RNA, 26 nt, Human
cggaaagacgagaaggcugaguccug

SEQ ID NO: 1053551 - RNA, 18 nt, Human
cggugccaagggggcucc

SEQ ID NO: 1053552 - RNA, 19 nt, Human
cuucccuuuccuuggcuga

SEQ ID NO: 1053553 - RNA, 21 nt, Human
gaaggcacuuuauucuuccua

SEQ ID NO: 1053554 - RNA, 18 nt, Human
gacgcagccccugaggca

SEQ ID NO: 1053555 - RNA, 24 nt, Human
gcaacacuggagaagccucuaguu

SEQ ID NO: 1053556 - RNA, 21 nt, Human
gcacugguaggaagguggcac

SEQ ID NO: 1053557 - RNA, 19 nt, Human
gccagcacacggccuggga

SEQ ID NO: 1053558 - RNA, 21 nt, Human
ggaaccagcucuccagacucc

SEQ ID NO: 1053559 - RNA, 21 nt, Human
gggauaccgcccugugguucu

SEQ ID NO: 1053560 - RNA, 23 nt, Human
gggccagcacacggccugggaua

SEQ ID NO: 1053561 - RNA, 24 nt, Human
gggcuccucucuguaccccugcuu

SEQ ID NO: 1053562 - RNA, 22 nt, Human
uagggggauauggcaacacugg

SEQ ID NO: 1053563 - RNA, 18 nt, Human
uauggcaacacuggagaa

SEQ ID NO: 1053564 - RNA, 19 nt, Human
uccuaaagaaggagacaua

SEQ ID NO: 1053565 - RNA, 20 nt, Human
ucuccuagccucuuuucugg

SEQ ID NO: 1053566 - RNA, 23 nt, Human
ucugugggaaccagcucuccaga

SEQ ID NO: 1053567 - RNA, 18 nt, Human
ugaggcaccauaacugga

SEQ ID NO: 1053568 - RNA, 21 nt, Human
ugcccaaaaguccaggacuaa

SEQ ID NO: 1053569 - RNA, 22 nt, Human
ugcccaaaaguccaggacuaag

SEQ ID NO: 1053570 - RNA, 19 nt, Human
ugcgguggcggugccaagg

SEQ ID NO: 1053571 - RNA, 21 nt, Human
uggagaagccucuaguuucuc

SEQ ID NO: 1053572 - RNA, 23 nt, Human
uggggcagggccagcacacggcc

SEQ ID NO: 1053573 - RNA, 21 nt, Human
uuggcugacgcagccccugag

SEQ ID NO: 1053574 - RNA, 20 nt, Human
ccaccgucugggccugcucg

SEQ ID NO: 1053575 - RNA, 19 nt, Human
cgucugggccugcucgaug

SEQ ID NO: 1053576 - RNA, 24 nt, Human
accccccggugccccuucccacug

SEQ ID NO: 1053577 - RNA, 26 nt, Human
acuggccuuguccacacagggccacg

SEQ ID NO: 1053578 - RNA, 27 nt, Human
acuggccuuguccacacagggccacgc

SEQ ID NO: 1053579 - RNA, 22 nt, Human
agaguccuggggcuugaguccu

SEQ ID NO: 1053580 - RNA, 18 nt, Human
cagcccuuguccuggguc

SEQ ID NO: 1053581 - RNA, 18 nt, Human
ccagcccagggcucuggg

SEQ ID NO: 1053582 - RNA, 24 nt, Human
ccagcccagggcucuggggggcaa

SEQ ID NO: 1053583 - RNA, 25 nt, Human
cccccgcuguugccaagagugugac

SEQ ID NO: 1053584 - RNA, 22 nt, Human
ccugugggccccagcccagggc

SEQ ID NO: 1053585 - RNA, 21 nt, Human
ccugugucuggggucuggggu

SEQ ID NO: 1053586 - RNA, 20 nt, Human
ccuugggccugccaguuugc

SEQ ID NO: 1053587 - RNA, 23 nt, Human
cguuccuccugugggccccagcc

SEQ ID NO: 1053588 - RNA, 18 nt, Human
cugaacgcuaccagggag

SEQ ID NO: 1053589 - RNA, 21 nt, Human
cugguuccugugucugggguc

SEQ ID NO: 1053590 - RNA, 20 nt, Human
cuucugaacgcuaccaggga

SEQ ID NO: 1053591 - RNA, 21 nt, Human
gagccuugggccugccaguuu

SEQ ID NO: 1053592 - RNA, 21 nt, Human
gcccagggcucuggggggcaa

SEQ ID NO: 1053593 - RNA, 21 nt, Human
gggccccagcccagggcucug

SEQ ID NO: 1053594 - RNA, 24 nt, Human
gggcuugaguccuggaucuggggu

SEQ ID NO: 1053595 - RNA, 23 nt, Human
guuccuccugugggccccagccc

SEQ ID NO: 1053596 - RNA, 20 nt, Human
uccuggguccugggucuggg

SEQ ID NO: 1053597 - RNA, 23 nt, Human
uccugggucugggguuuggguuu

SEQ ID NO: 1053598 - RNA, 24 nt, Human
uccugggucugggguuuggguuug

SEQ ID NO: 1053599 - RNA, 22 nt, Human
uccugugggccccagcccaggg

SEQ ID NO: 1053600 - RNA, 18 nt, Human
ugaccccccggugccccu

SEQ ID NO: 1053601 - RNA, 19 nt, Human
ugccaagcagcuacccccg

SEQ ID NO: 1053602 - RNA, 22 nt, Human
ugggagucugaaaaccugaagg

SEQ ID NO: 1053603 - RNA, 22 nt, Human
uggguccugggucugggguuug

SEQ ID NO: 1053604 - RNA, 23 nt, Human
uuggguuugcaguccuggaaguc

SEQ ID NO: 1053605 - RNA, 24 nt, Human
uuucucuccucgagccuugggccc

SEQ ID NO: 1053606 - RNA, 22 nt, Human
aaucccuucuccacugacccac

SEQ ID NO: 1053607 - RNA, 23 nt, Human
cacugacccacuuuccaucccuc

SEQ ID NO: 1053608 - RNA, 21 nt, Human
cagcagccgcagcugggucug

SEQ ID NO: 1053609 - RNA, 20 nt, Human
cugcagcagccgcagcuggg

SEQ ID NO: 1053610 - RNA, 18 nt, Human
gaauguggguaaaacuca

SEQ ID NO: 1053611 - RNA, 21 nt, Human
uacugguccaggccccuugac

SEQ ID NO: 1053612 - RNA, 20 nt, Human
uggggaagaaugugucauuu

SEQ ID NO: 1053613 - RNA, 20 nt, Human
uggguaaaacucacgcagca

SEQ ID NO: 1053614 - RNA, 18 nt, Human
ugggucuggcuggagucu

SEQ ID NO: 1053615 - RNA, 23 nt, Human
acaaugacagauguguuuccuuc

SEQ ID NO: 1053616 - RNA, 26 nt, Human
agaaccuuuccaagauaucauaauau

SEQ ID NO: 1053617 - RNA, 22 nt, Human
agagaaaauaaacacuucagga

SEQ ID NO: 1053618 - RNA, 22 nt, Human
agucaaaucagaaguuucuucu

SEQ ID NO: 1053619 - RNA, 26 nt, Human
caagacaaugacagauguguuuccuu

SEQ ID NO: 1053620 - RNA, 22 nt, Human
caguagcuuccuuuccacgucc

SEQ ID NO: 1053621 - RNA, 30 nt, Human
ccaggagugugaggacaguagcuuccuuuu

SEQ ID NO: 1053622 - RNA, 18 nt, Human
cugcucagugauccagga

SEQ ID NO: 1053623 - RNA, 21 nt, Human
cuucuuugcucuuucuaggga

SEQ ID NO: 1053624 - RNA, 24 nt, Human
cuucuuugcucuuucuagggaucu

SEQ ID NO: 1053625 - RNA, 25 nt, Human
gaaaauaaacacuucaggaaacuug

SEQ ID NO: 1053626 - RNA, 18 nt, Human
gaaacuugcucaccacag

SEQ ID NO: 1053627 - RNA, 18 nt, Human
uaauggcaagaauauuuu

SEQ ID NO: 1053628 - RNA, 24 nt, Human
uaucauaauauuuucuuuauagga

SEQ ID NO: 1053629 - RNA, 21 nt, Human
uaugagagaaaauaaacacuu

SEQ ID NO: 1053630 - RNA, 24 nt, Human
ucaggaacaggauucacguuuggu

SEQ ID NO: 1053631 - RNA, 26 nt, Human
ugguggauaugagagaaaauaaacac

SEQ ID NO: 1053632 - RNA, 21 nt, Human
ugguuaagagcgauagucuca

SEQ ID NO: 1053633 - RNA, 19 nt, Human
uguuuccuucuuugcucuu

SEQ ID NO: 1053634 - RNA, 21 nt, Human
aaaaauacuucacaacagugc

SEQ ID NO: 1053635 - RNA, 18 nt, Human
aaacaggaaacuggccag

SEQ ID NO: 1053636 - RNA, 19 nt, Human
aaacauucagcucugagaa

SEQ ID NO: 1053637 - RNA, 23 nt, Human
aaagugcuggggcgggagcgggg

SEQ ID NO: 1053638 - RNA, 22 nt, Human
aaccccuccuccucaggcccca

SEQ ID NO: 1053639 - RNA, 24 nt, Human
aagcaacaaaaugcaagggagaaa

SEQ ID NO: 1053640 - RNA, 25 nt, Human
aagugaaccccuccuccucaggccc

SEQ ID NO: 1053641 - RNA, 21 nt, Human
aaugucaggaaaaaagcuaga

SEQ ID NO: 1053642 - RNA, 27 nt, Human
aauucuugcaccaaaaagaaccaaggg

SEQ ID NO: 1053643 - RNA, 18 nt, Human
acacgcgcgcacacagaa

SEQ ID NO: 1053644 - RNA, 22 nt, Human
accccuccuccucaggccccag

SEQ ID NO: 1053645 - RNA, 21 nt, Human
acggauggguagccacggugg

SEQ ID NO: 1053646 - RNA, 20 nt, Human
acucucuuucaucucccccc

SEQ ID NO: 1053647 - RNA, 19 nt, Human
agaacaggggacgggcaug

SEQ ID NO: 1053648 - RNA, 18 nt, Human
agaaccagaacagugcua

SEQ ID NO: 1053649 - RNA, 24 nt, Human
agagccaaaagugcuggggcggga

SEQ ID NO: 1053650 - RNA, 21 nt, Human
agauauuggaugucuuuaacu

SEQ ID NO: 1053651 - RNA, 18 nt, Human
agccaaccuucccucacc

SEQ ID NO: 1053652 - RNA, 26 nt, Human
aggaggaagugaaccccuccuccuca

SEQ ID NO: 1053653 - RNA, 22 nt, Human
agggaguuggggggaggggagc

SEQ ID NO: 1053654 - RNA, 23 nt, Human
aggguguguguguuucuaaagga

SEQ ID NO: 1053655 - RNA, 18 nt, Human
agugugccuaggggccgg

SEQ ID NO: 1053656 - RNA, 21 nt, Human
auaaagagagccccagcaaca

SEQ ID NO: 1053657 - RNA, 18 nt, Human
aucuccccccacccccca

SEQ ID NO: 1053658 - RNA, 19 nt, Human
caaaaagaaccaagggcua

SEQ ID NO: 1053659 - RNA, 22 nt, Human
caaaaagaaccaagggcuaaag

SEQ ID NO: 1053660 - RNA, 21 nt, Human
caaaucuccccgcauccccac

SEQ ID NO: 1053661 - RNA, 18 nt, Human
caacagcacccgggaugg

SEQ ID NO: 1053662 - RNA, 21 nt, Human
caacagugcaaaaauauuuua

SEQ ID NO: 1053663 - RNA, 25 nt, Human
caagaucgaagaauaaaacuacugg

SEQ ID NO: 1053664 - RNA, 24 nt, Human
cacagaauuaccccagccugggca

SEQ ID NO: 1053665 - RNA, 27 nt, Human
cacaguaucauggagugagaucuuuug

SEQ ID NO: 1053666 - RNA, 20 nt, Human
cacuggcgugcaaacagaac

SEQ ID NO: 1053667 - RNA, 20 nt, Human
cagaaccagaacagugcuag

SEQ ID NO: 1053668 - RNA, 18 nt, Human
caguaucauggagugaga

SEQ ID NO: 1053669 - RNA, 27 nt, Human
cauccccacgcgcaacagagccaaaag

SEQ ID NO: 1053670 - RNA, 20 nt, Human
caucuccccccaccccccaa

SEQ ID NO: 1053671 - RNA, 21 nt, Human
caucuccccccaccccccaaa

SEQ ID NO: 1053672 - RNA, 22 nt, Human
caucuccccccaccccccaaac

SEQ ID NO: 1053673 - RNA, 19 nt, Human
cauuucccccuuccugggg

SEQ ID NO: 1053674 - RNA, 18 nt, Human
ccaaaaagaaccaagggc

SEQ ID NO: 1053675 - RNA, 24 nt, Human
ccaaaaagaaccaagggcuaaagg

SEQ ID NO: 1053676 - RNA, 29 nt, Human
ccaccccccaaacaguuauuugaagaauu

SEQ ID NO: 1053677 - RNA, 21 nt, Human
ccagaacagugcuacuuuuaa

SEQ ID NO: 1053678 - RNA, 27 nt, Human
ccagcaacagcacccgggauggugcaa

SEQ ID NO: 1053679 - RNA, 18 nt, Human
cccaaacaguuauuugaa

SEQ ID NO: 1053680 - RNA, 21 nt, Human
cccacaaacaggaaacuggcc

SEQ ID NO: 1053681 - RNA, 19 nt, Human
cccacgcgcaacagagcca

SEQ ID NO: 1053682 - RNA, 19 nt, Human
cccagggggugggaggagg

SEQ ID NO: 1053683 - RNA, 25 nt, Human
ccccagccugggcaagggcgagagc

SEQ ID NO: 1053684 - RNA, 18 nt, Human
ccccauuucccccuuccu

SEQ ID NO: 1053685 - RNA, 21 nt, Human
cccccaccccccaaacaguua

SEQ ID NO: 1053686 - RNA, 19 nt, Human
ccccccaccccccaaacag

SEQ ID NO: 1053687 - RNA, 19 nt, Human
cccccguuugggcuggucu

SEQ ID NO: 1053688 - RNA, 25 nt, Human
ccccgcauccccacgcgcaacagag

SEQ ID NO: 1053689 - RNA, 22 nt, Human
cccgcugagccaccggccccug

SEQ ID NO: 1053690 - RNA, 19 nt, Human
ccggcgacgcgcggaggag

SEQ ID NO: 1053691 - RNA, 22 nt, Human
ccuacggccugagacuaggaac

SEQ ID NO: 1053692 - RNA, 22 nt, Human
ccucaaacaccuugagagcaaa

SEQ ID NO: 1053693 - RNA, 19 nt, Human
ccucaggccccagcugccc

SEQ ID NO: 1053694 - RNA, 22 nt, Human
ccuccgaggcgguguccagcuc

SEQ ID NO: 1053695 - RNA, 24 nt, Human
ccuccgaggggugcuggagaugga

SEQ ID NO: 1053696 - RNA, 23 nt, Human
ccucucaaaucuccccgcauccc

SEQ ID NO: 1053697 - RNA, 23 nt, Human
ccugggggcgggcaagggacagg

SEQ ID NO: 1053698 - RNA, 21 nt, Human
cgcagggccgcucccaggggg

SEQ ID NO: 1053699 - RNA, 23 nt, Human
cgccuuugcagugcgcccucucc

SEQ ID NO: 1053700 - RNA, 18 nt, Human
cggcccgggcaagaucga

SEQ ID NO: 1053701 - RNA, 19 nt, Human
cucacccgcaucccagagg

SEQ ID NO: 1053702 - RNA, 20 nt, Human
cuccccccaccccccaaaca

SEQ ID NO: 1053703 - RNA, 24 nt, Human
cuccgaggggugcuggagauggaa

SEQ ID NO: 1053704 - RNA, 19 nt, Human
cuccgcucccgggcucucc

SEQ ID NO: 1053705 - RNA, 22 nt, Human
cucucaaaucuccccgcauccc

SEQ ID NO: 1053706 - RNA, 19 nt, Human
cucucuuucaucucccccc

SEQ ID NO: 1053707 - RNA, 19 nt, Human
cugagguaaacagccagaa

SEQ ID NO: 1053708 - RNA, 19 nt, Human
cugcugcccgccuuugcag

SEQ ID NO: 1053709 - RNA, 20 nt, Human
cuggccaggcaccuacggcc

SEQ ID NO: 1053710 - RNA, 26 nt, Human
cugggcuccaaguguaggucugggcc

SEQ ID NO: 1053711 - RNA, 18 nt, Human
cuggucucaagucagcaa

SEQ ID NO: 1053712 - RNA, 23 nt, Human
gaaagaacgagcguagaguggaa

SEQ ID NO: 1053713 - RNA, 20 nt, Human
gacucucuuucaucuccccc

SEQ ID NO: 1053714 - RNA, 20 nt, Human
gagaacaggggacgggcaug

SEQ ID NO: 1053715 - RNA, 22 nt, Human
gagaacaggggacgggcauggc

SEQ ID NO: 1053716 - RNA, 24 nt, Human
gagagcaaauuuuuuuuuuuuuuu

SEQ ID NO: 1053717 - RNA, 19 nt, Human
gagauggaaagccccccgu

SEQ ID NO: 1053718 - RNA, 21 nt, Human
gagcaaagagucucaggcaag

SEQ ID NO: 1053719 - RNA, 20 nt, Human
gagcaaauuuuuuuuuuuuu

SEQ ID NO: 1053720 - RNA, 24 nt, Human
gagcgggggccgggagguagggga

SEQ ID NO: 1053721 - RNA, 21 nt, Human
gaggcgguguccagcuccgcu

SEQ ID NO: 1053722 - RNA, 20 nt, Human
gagugugccuaggggccggu

SEQ ID NO: 1053723 - RNA, 22 nt, Human
gcagcugggcggcggcggcggc

SEQ ID NO: 1053724 - RNA, 19 nt, Human
gccccauuucccccuuccu

SEQ ID NO: 1053725 - RNA, 20 nt, Human
gccccgcgcagcagucccgc

SEQ ID NO: 1053726 - RNA, 20 nt, Human
gcgccccggcgcagcugggc

SEQ ID NO: 1053727 - RNA, 19 nt, Human
gcgccggcgacgcgcggag

SEQ ID NO: 1053728 - RNA, 18 nt, Human
gcggcggcggcggcggag

SEQ ID NO: 1053729 - RNA, 18 nt, Human
gcgggagcgggggccggg

SEQ ID NO: 1053730 - RNA, 22 nt, Human
gcucaguguccgggcuggccug

SEQ ID NO: 1053731 - RNA, 20 nt, Human
gcuccaaguguaggucuggg

SEQ ID NO: 1053732 - RNA, 21 nt, Human
gcuccgagaacaggggacggg

SEQ ID NO: 1053733 - RNA, 25 nt, Human
ggacuggggccaaaacccgcggaaa

SEQ ID NO: 1053734 - RNA, 20 nt, Human
ggagauggaaagccccccgu

SEQ ID NO: 1053735 - RNA, 20 nt, Human
ggcggcggcggcggcggagc

SEQ ID NO: 1053736 - RNA, 19 nt, Human
gggaguuggggggagggga

SEQ ID NO: 1053737 - RNA, 22 nt, Human
gggcaagggacagggagguugu

SEQ ID NO: 1053738 - RNA, 23 nt, Human
gggcaagggacagggagguuguc

SEQ ID NO: 1053739 - RNA, 18 nt, Human
gggcggcggcggcggcgg

SEQ ID NO: 1053740 - RNA, 21 nt, Human
gggcggcggcggcggcggagc

SEQ ID NO: 1053741 - RNA, 22 nt, Human
ggggaaagcggucgggggaacg

SEQ ID NO: 1053742 - RNA, 19 nt, Human
ggggcgggagcgggggccg

SEQ ID NO: 1053743 - RNA, 20 nt, Human
ggugcuggagauggaaagcc

SEQ ID NO: 1053744 - RNA, 21 nt, Human
gugcgggggagacacgcgcgc

SEQ ID NO: 1053745 - RNA, 18 nt, Human
guggagcgccggcgacgg

SEQ ID NO: 1053746 - RNA, 24 nt, Human
gugguagggaguuggggggagggg

SEQ ID NO: 1053747 - RNA, 20 nt, Human
uaaaaaagaaaauauucagc

SEQ ID NO: 1053748 - RNA, 21 nt, Human
uaacacacacaacccucagga

SEQ ID NO: 1053749 - RNA, 20 nt, Human
uaacuguaaacaaaacgcga

SEQ ID NO: 1053750 - RNA, 22 nt, Human
uaccccagccugggcaagggcg

SEQ ID NO: 1053751 - RNA, 22 nt, Human
uaccucauuucuucccuccgag

SEQ ID NO: 1053752 - RNA, 24 nt, Human
uacuucacaacagugcaaaaauau

SEQ ID NO: 1053753 - RNA, 23 nt, Human
uagaguggaaaaugucaggaaaa

SEQ ID NO: 1053754 - RNA, 19 nt, Human
ucaaaucuccccgcauccc

SEQ ID NO: 1053755 - RNA, 18 nt, Human
ucacugcaucuucgcucc

SEQ ID NO: 1053756 - RNA, 19 nt, Human
ucacugcaucuucgcuccg

SEQ ID NO: 1053757 - RNA, 28 nt, Human
ucacugcaucuucgcuccgggguccucc

SEQ ID NO: 1053758 - RNA, 23 nt, Human
ucagcagcucgcccaaagugcgg

SEQ ID NO: 1053759 - RNA, 21 nt, Human
ucagccaaccuucccucaccc

SEQ ID NO: 1053760 - RNA, 19 nt, Human
ucaggccccagcugcccca

SEQ ID NO: 1053761 - RNA, 22 nt, Human
ucaucuccccccaccccccaaa

SEQ ID NO: 1053762 - RNA, 25 nt, Human
ucauuucuucccuccgaggcgguga

SEQ ID NO: 1053763 - RNA, 19 nt, Human
uccccacgcgcaacagagc

SEQ ID NO: 1053764 - RNA, 19 nt, Human
uccccccaccccccaaaca

SEQ ID NO: 1053765 - RNA, 19 nt, Human
uccccuaacacacacaacc

SEQ ID NO: 1053766 - RNA, 20 nt, Human
uccccuaacacacacaaccc

SEQ ID NO: 1053767 - RNA, 18 nt, Human
uccggugcugcgagcggc

SEQ ID NO: 1053768 - RNA, 20 nt, Human
uccucaggccccagcugccc

SEQ ID NO: 1053769 - RNA, 20 nt, Human
uccuccucaggccccagcug

SEQ ID NO: 1053770 - RNA, 23 nt, Human
uccucuuuauucucuccccacug

SEQ ID NO: 1053771 - RNA, 18 nt, Human
ucuccacggucugcugcc

SEQ ID NO: 1053772 - RNA, 21 nt, Human
ucucuuucaucuccccccacc

SEQ ID NO: 1053773 - RNA, 18 nt, Human
ucugggccccaaaugccc

SEQ ID NO: 1053774 - RNA, 23 nt, Human
ugagacuaggaacuucagccaac

SEQ ID NO: 1053775 - RNA, 21 nt, Human
ugagccaccggccccugccag

SEQ ID NO: 1053776 - RNA, 19 nt, Human
ugcaaacagaaccagaaca

SEQ ID NO: 1053777 - RNA, 21 nt, Human
ugccccacaaacaggaaacug

SEQ ID NO: 1053778 - RNA, 19 nt, Human
ugcggucggaugcuggguc

SEQ ID NO: 1053779 - RNA, 22 nt, Human
ugcuggggcgggagcgggggcc

SEQ ID NO: 1053780 - RNA, 22 nt, Human
uggaaaaugucaggaaaaaagc

SEQ ID NO: 1053781 - RNA, 24 nt, Human
uggaaagccccccguuugggcugg

SEQ ID NO: 1053782 - RNA, 21 nt, Human
uggccggguccgggaaccgcc

SEQ ID NO: 1053783 - RNA, 18 nt, Human
ugggccccaaaugcccca

SEQ ID NO: 1053784 - RNA, 19 nt, Human
ugggcggcggcggcggcgg

SEQ ID NO: 1053785 - RNA, 24 nt, Human
uggguccccuaacacacacaaccc

SEQ ID NO: 1053786 - RNA, 21 nt, Human
ugguagggaguuggggggagg

SEQ ID NO: 1053787 - RNA, 28 nt, Human
uggugcgggggagacacgcgcgcacaca

SEQ ID NO: 1053788 - RNA, 18 nt, Human
uguccagcuccgcucccg

SEQ ID NO: 1053789 - RNA, 23 nt, Human
uucaucuccccccaccccccaaa

SEQ ID NO: 1053790 - RNA, 25 nt, Human
uucaucuccccccaccccccaaaca

SEQ ID NO: 1053791 - RNA, 23 nt, Human
uuccccucucaaaucuccccgca

SEQ ID NO: 1053792 - RNA, 20 nt, Human
uuuugagcaagaggaagggu

SEQ ID NO: 1053793 - RNA, 20 nt, Human
uuuuuuuuuuuuaaugagau

SEQ ID NO: 1053794 - RNA, 22 nt, Human
uaggcagccggagggcacacag

SEQ ID NO: 1053795 - RNA, 23 nt, Human
aaaaaauagaaacgccauauuuc

SEQ ID NO: 1053796 - RNA, 23 nt, Human
aaaaagcuggugucuagagcuaa

SEQ ID NO: 1053797 - RNA, 19 nt, Human
aaagguuuuuuuuuuuuuu

SEQ ID NO: 1053798 - RNA, 18 nt, Human
aaagugcuuuuccuauca

SEQ ID NO: 1053799 - RNA, 18 nt, Human
aaccucugccuccccagu

SEQ ID NO: 1053800 - RNA, 22 nt, Human
acagugcugggauuacaggcau

SEQ ID NO: 1053801 - RNA, 24 nt, Human
acagugcugggauuacaggcauga

SEQ ID NO: 1053802 - RNA, 22 nt, Human
accauguuggucaggcuggucu

SEQ ID NO: 1053803 - RNA, 19 nt, Human
acccaggcuggaguacagu

SEQ ID NO: 1053804 - RNA, 25 nt, Human
acucugucacccaggcuggaguaca

SEQ ID NO: 1053805 - RNA, 23 nt, Human
agaaagaaggcaggugccaauua

SEQ ID NO: 1053806 - RNA, 19 nt, Human
agaaggcaggugccaauua

SEQ ID NO: 1053807 - RNA, 24 nt, Human
agauguaguaugugcuagacacuu

SEQ ID NO: 1053808 - RNA, 19 nt, Human
agccuguuugguuugauac

SEQ ID NO: 1053809 - RNA, 21 nt, Human
agggugagaaaacaaaacuau

SEQ ID NO: 1053810 - RNA, 23 nt, Human
aguagaaaugggguuucaccaug

SEQ ID NO: 1053811 - RNA, 19 nt, Human
agugcugggauuacaggca

SEQ ID NO: 1053812 - RNA, 20 nt, Human
agugcugggauuacaggcau

SEQ ID NO: 1053813 - RNA, 22 nt, Human
agugcugggauuacaggcauga

SEQ ID NO: 1053814 - RNA, 20 nt, Human
aucauuuuuccuaacucucc

SEQ ID NO: 1053815 - RNA, 22 nt, Human
auggaguaucacucugucaccc

SEQ ID NO: 1053816 - RNA, 21 nt, Human
augggguuucaccauguuggu

SEQ ID NO: 1053817 - RNA, 23 nt, Human
augggguuucaccauguugguca

SEQ ID NO: 1053818 - RNA, 24 nt, Human
augggguuucaccauguuggucag

SEQ ID NO: 1053819 - RNA, 20 nt, Human
auucacccaccucggccgcc

SEQ ID NO: 1053820 - RNA, 24 nt, Human
caaaaagcuggugucuagagcuaa

SEQ ID NO: 1053821 - RNA, 21 nt, Human
caccauguuggucaggcuggu

SEQ ID NO: 1053822 - RNA, 23 nt, Human
caccauguuggucaggcuggucu

SEQ ID NO: 1053823 - RNA, 22 nt, Human
cacucugucacccaggcuggag

SEQ ID NO: 1053824 - RNA, 23 nt, Human
cacucugucacccaggcuggagu

SEQ ID NO: 1053825 - RNA, 23 nt, Human
cacugcaaccucugccuccccag

SEQ ID NO: 1053826 - RNA, 20 nt, Human
cagugcugggauuacaggca

SEQ ID NO: 1053827 - RNA, 25 nt, Human
cagugcugggauuacaggcaugagc

SEQ ID NO: 1053828 - RNA, 24 nt, Human
cauguuggucaggcuggucuugaa

SEQ ID NO: 1053829 - RNA, 23 nt, Human
ccuacagugcugggauuacaggc

SEQ ID NO: 1053830 - RNA, 20 nt, Human
cgccuggaugccuuuuccca

SEQ ID NO: 1053831 - RNA, 24 nt, Human
cuacagugcugggauuacaggcau

SEQ ID NO: 1053832 - RNA, 22 nt, Human
cuagaauuucaacuacuaauuu

SEQ ID NO: 1053833 - RNA, 21 nt, Human
cucacugcaaccucugccucc

SEQ ID NO: 1053834 - RNA, 22 nt, Human
cucacugcaaccucugccuccc

SEQ ID NO: 1053835 - RNA, 25 nt, Human
cucacugcaaccucugccuccccag

SEQ ID NO: 1053836 - RNA, 21 nt, Human
cuccccuagccuguuugguuu

SEQ ID NO: 1053837 - RNA, 20 nt, Human
cucuuagauguaguaugugc

SEQ ID NO: 1053838 - RNA, 19 nt, Human
cuugucucacugcaaccuc

SEQ ID NO: 1053839 - RNA, 21 nt, Human
cuugucucacugcaaccucug

SEQ ID NO: 1053840 - RNA, 24 nt, Human
gaaaugggguuucaccauguuggu

SEQ ID NO: 1053841 - RNA, 24 nt, Human
gaccucaugugauucacccaccuc

SEQ ID NO: 1053842 - RNA, 26 nt, Human
gagaaaacaaaacuaucagccauuga

SEQ ID NO: 1053843 - RNA, 18 nt, Human
gauuacaggcaugagcca

SEQ ID NO: 1053844 - RNA, 20 nt, Human
gauuacaggcaugagccacc

SEQ ID NO: 1053845 - RNA, 23 nt, Human
gauuacaggcaugagccaccgca

SEQ ID NO: 1053846 - RNA, 18 nt, Human
gcaaccucugccucccca

SEQ ID NO: 1053847 - RNA, 23 nt, Human
gcuggucuugaacuccugaccuc

SEQ ID NO: 1053848 - RNA, 23 nt, Human
gcuuuguaugcaaggauguuuuc

SEQ ID NO: 1053849 - RNA, 22 nt, Human
ggauuacaggcaugagccaccg

SEQ ID NO: 1053850 - RNA, 27 nt, Human
ggcaccaaagguuuuuuuuuuuuuuuu

SEQ ID NO: 1053851 - RNA, 24 nt, Human
ggcuggucuugaacuccugaccuc

SEQ ID NO: 1053852 - RNA, 18 nt, Human
gggccucuggucugucuc

SEQ ID NO: 1053853 - RNA, 22 nt, Human
gggguuucaccauguuggucag

SEQ ID NO: 1053854 - RNA, 19 nt, Human
ggucuugaacuccugaccu

SEQ ID NO: 1053855 - RNA, 21 nt, Human
guagaaaugggguuucaccau

SEQ ID NO: 1053856 - RNA, 24 nt, Human
gucacaauuagaccuauucucccc

SEQ ID NO: 1053857 - RNA, 22 nt, Human
gucaucaucaucaucuucuucu

SEQ ID NO: 1053858 - RNA, 23 nt, Human
gugauucacccaccucggccgcc

SEQ ID NO: 1053859 - RNA, 25 nt, Human
guucuugggccucuggucugucucu

SEQ ID NO: 1053860 - RNA, 19 nt, Human
guuuaaagugcuuuuccua

SEQ ID NO: 1053861 - RNA, 22 nt, Human
uacaggcaugagccaccgcacc

SEQ ID NO: 1053862 - RNA, 18 nt, Human
uacagugcugggauuaca

SEQ ID NO: 1053863 - RNA, 21 nt, Human
uagaaaugggguuucaccaug

SEQ ID NO: 1053864 - RNA, 22 nt, Human
uagaaaugggguuucaccaugu

SEQ ID NO: 1053865 - RNA, 24 nt, Human
uaucacucugucacccaggcugga

SEQ ID NO: 1053866 - RNA, 24 nt, Human
uauugagcuuuucuucucggauuu

SEQ ID NO: 1053867 - RNA, 19 nt, Human
ucacaaaggugacaggaac

SEQ ID NO: 1053868 - RNA, 18 nt, Human
ucacucucuucaccauca

SEQ ID NO: 1053869 - RNA, 22 nt, Human
ucacucugucacccaggcugga

SEQ ID NO: 1053870 - RNA, 24 nt, Human
ucacucugucacccaggcuggagu

SEQ ID NO: 1053871 - RNA, 19 nt, Human
ucacugcaaccucugccuc

SEQ ID NO: 1053872 - RNA, 24 nt, Human
ucacugcaaccucugccuccccag

SEQ ID NO: 1053873 - RNA, 19 nt, Human
ucagguaaagaagagagaa

SEQ ID NO: 1053874 - RNA, 22 nt, Human
ucccauggcuugucuuuccaaa

SEQ ID NO: 1053875 - RNA, 18 nt, Human
ucugucacccaggcugga

SEQ ID NO: 1053876 - RNA, 24 nt, Human
ucugucacccaggcuggaguacag

SEQ ID NO: 1053877 - RNA, 19 nt, Human
ucuuaaaaaaauagaaacg

SEQ ID NO: 1053878 - RNA, 19 nt, Human
ucuuccagcaugcgccugg

SEQ ID NO: 1053879 - RNA, 21 nt, Human
ucuugaacuccugaccucaug

SEQ ID NO: 1053880 - RNA, 18 nt, Human
ucuuucccauggcuuguc

SEQ ID NO: 1053881 - RNA, 20 nt, Human
ugaagggugagaaaacaaaa

SEQ ID NO: 1053882 - RNA, 22 nt, Human
ugagaaaacaaaacuaucagcc

SEQ ID NO: 1053883 - RNA, 19 nt, Human
uggaguacagugacgugau

SEQ ID NO: 1053884 - RNA, 23 nt, Human
uggaguacagugacgugaucuug

SEQ ID NO: 1053885 - RNA, 18 nt, Human
ugggauuacaggcaugag

SEQ ID NO: 1053886 - RNA, 19 nt, Human
ugggauuacaggcaugagc

SEQ ID NO: 1053887 - RNA, 21 nt, Human
ugggauuacaggcaugagcca

SEQ ID NO: 1053888 - RNA, 22 nt, Human
ugggauuacaggcaugagccac

SEQ ID NO: 1053889 - RNA, 23 nt, Human
ugggauuacaggcaugagccacc

SEQ ID NO: 1053890 - RNA, 24 nt, Human
ugggauuacaggcaugagccaccg

SEQ ID NO: 1053891 - RNA, 24 nt, Human
ugggauuacaggcaugagccaccg

SEQ ID NO: 1053892 - RNA, 26 nt, Human
ugggauuacaggcaugagccaccgca

SEQ ID NO: 1053893 - RNA, 24 nt, Human
ugggguuucaccauguuggucagg

SEQ ID NO: 1053894 - RNA, 24 nt, Human
uggucaggcuggucuugaacuccu

SEQ ID NO: 1053895 - RNA, 20 nt, Human
uggucugucucucuguucuu

SEQ ID NO: 1053896 - RNA, 21 nt, Human
uucaaaaagcuggugucuaga

SEQ ID NO: 1053897 - RNA, 21 nt, Human
uucuaauuuguuccuuugcuu

SEQ ID NO: 1053898 - RNA, 21 nt, Human
uucucacuuuguucuugggcc

SEQ ID NO: 1053899 - RNA, 22 nt, Human
uucucacuuuguucuugggccu

SEQ ID NO: 1053900 - RNA, 19 nt, Human
uucuucaucuguuucuugg

SEQ ID NO: 1053901 - RNA, 23 nt, Human
uugcuuugccuuccucuucucug

SEQ ID NO: 1053902 - RNA, 22 nt, Human
uuguuccuuugcuuugccuucc

SEQ ID NO: 1053903 - RNA, 24 nt, Human
uuucaccauguuggucaggcuggu

SEQ ID NO: 1053904 - RNA, 21 nt, Human
uuucuagaaauauugaagggu

SEQ ID NO: 1053905 - RNA, 19 nt, Human
uuucucacuuuguucuugg

SEQ ID NO: 1053906 - RNA, 22 nt, Human
uuuuuuuuuuuuuugagaugga

SEQ ID NO: 1053907 - RNA, 18 nt, Human
uuuuuuuuuuuuuuuuug

SEQ ID NO: 1053908 - RNA, 20 nt, Human
aaccuggcuuccgguuguag

SEQ ID NO: 1053909 - RNA, 21 nt, Human
aagcgaagcuccucuucuugu

SEQ ID NO: 1053910 - RNA, 18 nt, Human
accugggcagugauggcu

SEQ ID NO: 1053911 - RNA, 18 nt, Human
agcagucauagaacggag

SEQ ID NO: 1053912 - RNA, 19 nt, Human
cacagcacugaaagggugc

SEQ ID NO: 1053913 - RNA, 19 nt, Human
cagcuccugagugucagga

SEQ ID NO: 1053914 - RNA, 19 nt, Human
caggagagacacagaagua

SEQ ID NO: 1053915 - RNA, 22 nt, Human
caucugucauguuccucacccu

SEQ ID NO: 1053916 - RNA, 21 nt, Human
cccaucagcuuggaccaccau

SEQ ID NO: 1053917 - RNA, 21 nt, Human
ccgccgccgcucagcaagcgc

SEQ ID NO: 1053918 - RNA, 23 nt, Human
ccucugaagguucaaccuggcuu

SEQ ID NO: 1053919 - RNA, 23 nt, Human
cuaagcgaagcuccucuucuugu

SEQ ID NO: 1053920 - RNA, 22 nt, Human
cuccucuucuuguucuuccuuc

SEQ ID NO: 1053921 - RNA, 18 nt, Human
cucuccacagaacgcuca

SEQ ID NO: 1053922 - RNA, 21 nt, Human
cuuccuucuuucuuugcucuu

SEQ ID NO: 1053923 - RNA, 19 nt, Human
gagcagucauagaacggag

SEQ ID NO: 1053924 - RNA, 26 nt, Human
gauaacucuuuaaugaaucaaagugc

SEQ ID NO: 1053925 - RNA, 22 nt, Human
gucaucuucuauuugcuuauuc

SEQ ID NO: 1053926 - RNA, 20 nt, Human
guucuuccuucuuucuuugc

SEQ ID NO: 1053927 - RNA, 18 nt, Human
uacuguuuccucuaaagu

SEQ ID NO: 1053928 - RNA, 19 nt, Human
uccacagaacgcucaagcc

SEQ ID NO: 1053929 - RNA, 23 nt, Human
uccugugcuaagcgaagcuccuc

SEQ ID NO: 1053930 - RNA, 20 nt, Human
ucuaccugggcagugauggc

SEQ ID NO: 1053931 - RNA, 22 nt, Human
ucuccacagaacgcucaagccc

SEQ ID NO: 1053932 - RNA, 22 nt, Human
ucuuccuucuuucuuugcucuu

SEQ ID NO: 1053933 - RNA, 24 nt, Human
ucuuccuucuuucuuugcucuucc

SEQ ID NO: 1053934 - RNA, 19 nt, Human
ucuuucuuugcucuuccuc

SEQ ID NO: 1053935 - RNA, 22 nt, Human
ugacugagagaacagcugagau

SEQ ID NO: 1053936 - RNA, 18 nt, Human
ugagagaacagcugagau

SEQ ID NO: 1053937 - RNA, 19 nt, Human
ugagagaacagcugagauu

SEQ ID NO: 1053938 - RNA, 20 nt, Human
ugagagaacagcugagauug

SEQ ID NO: 1053939 - RNA, 24 nt, Human
ugcuaagcgaagcuccucuucuug

SEQ ID NO: 1053940 - RNA, 23 nt, Human
ugcuauaugcuccuccucugaag

SEQ ID NO: 1053941 - RNA, 18 nt, Human
ugucaggagagacacaga

SEQ ID NO: 1053942 - RNA, 19 nt, Human
ugucaggagagacacagaa

SEQ ID NO: 1053943 - RNA, 27 nt, Human
ugucauguuccucacccuuugaauaua

SEQ ID NO: 1053944 - RNA, 20 nt, Human
uugcuauaugcuccuccucu

SEQ ID NO: 1053945 - RNA, 22 nt, Human
uugcucuuccuccaguuguuuc

SEQ ID NO: 1053946 - RNA, 20 nt, Human
uuugcaguucuuguuucaca

SEQ ID NO: 1053947 - RNA, 27 nt, Human
uuugcucuuccuccaguuguuucuucc

SEQ ID NO: 1053948 - RNA, 23 nt, Human
aacuccuccucugacuccuucug

SEQ ID NO: 1053949 - RNA, 18 nt, Human
accucuuccuccuccucc

SEQ ID NO: 1053950 - RNA, 19 nt, Human
aggcgagcgcaagugggcc

SEQ ID NO: 1053951 - RNA, 18 nt, Human
ccccgggucuccgaagcc

SEQ ID NO: 1053952 - RNA, 22 nt, Human
ccgcuaggcgagcgcaaguggg

SEQ ID NO: 1053953 - RNA, 23 nt, Human
ccuccuccucuaacuccuccucu

SEQ ID NO: 1053954 - RNA, 19 nt, Human
ccuccucuaacuccuccuc

SEQ ID NO: 1053955 - RNA, 20 nt, Human
ccucugacuccuucuggucc

SEQ ID NO: 1053956 - RNA, 23 nt, Human
cuccuccuccuccuccucuaacu

SEQ ID NO: 1053957 - RNA, 24 nt, Human
cuccucuaacuccuccucugacuc

SEQ ID NO: 1053958 - RNA, 20 nt, Human
cucuuuggccgcggccccgg

SEQ ID NO: 1053959 - RNA, 27 nt, Human
cuuccuccuccuccuccuccucuaacu

SEQ ID NO: 1053960 - RNA, 18 nt, Human
uccucugacuccuucugg

SEQ ID NO: 1053961 - RNA, 25 nt, Human
ucugacuccuucugguccuucuucc

SEQ ID NO: 1053962 - RNA, 23 nt, Human
uuccccgggucuccgaagccgcu

SEQ ID NO: 1053963 - RNA, 21 nt, Human
aaaaagcaaauuuaauacgaa

SEQ ID NO: 1053964 - RNA, 20 nt, Human
aaaaggcucucaccugggag

SEQ ID NO: 1053965 - RNA, 24 nt, Human
aaacagggaggaggcaggcucuga

SEQ ID NO: 1053966 - RNA, 20 nt, Human
aaagggucaguggcucugau

SEQ ID NO: 1053967 - RNA, 21 nt, Human
aaauaggcugggcuagacccu

SEQ ID NO: 1053968 - RNA, 21 nt, Human
aacacacuccacccacaacua

SEQ ID NO: 1053969 - RNA, 20 nt, Human
aagcuuccagaccacugccc

SEQ ID NO: 1053970 - RNA, 19 nt, Human
aauguccauuuccugcagc

SEQ ID NO: 1053971 - RNA, 18 nt, Human
acaaagcacagaugaagc

SEQ ID NO: 1053972 - RNA, 22 nt, Human
acacacacaccugagugcccag

SEQ ID NO: 1053973 - RNA, 22 nt, Human
acauuucaucacuacaauuucu

SEQ ID NO: 1053974 - RNA, 23 nt, Human
acccaucccagcuccugaauccu

SEQ ID NO: 1053975 - RNA, 23 nt, Human
accuguuuuccaacaccuaggaa

SEQ ID NO: 1053976 - RNA, 19 nt, Human
agaaaacauucccacgucc

SEQ ID NO: 1053977 - RNA, 21 nt, Human
agacagagcggaaccuuccaa

SEQ ID NO: 1053978 - RNA, 21 nt, Human
agagacaccaguccucacagg

SEQ ID NO: 1053979 - RNA, 18 nt, Human
aggagaccuagccacuuc

SEQ ID NO: 1053980 - RNA, 21 nt, Human
aggcaggguggugcuagacug

SEQ ID NO: 1053981 - RNA, 21 nt, Human
aggcugggcuagacccuggag

SEQ ID NO: 1053982 - RNA, 22 nt, Human
aucaauauuggcaugcucuacc

SEQ ID NO: 1053983 - RNA, 22 nt, Human
augaggggaagacaggugugug

SEQ ID NO: 1053984 - RNA, 24 nt, Human
caacacacacacaccugagugccc

SEQ ID NO: 1053985 - RNA, 21 nt, Human
caacaucugucgguuucuugc

SEQ ID NO: 1053986 - RNA, 19 nt, Human
caagcacucugcauagucc

SEQ ID NO: 1053987 - RNA, 18 nt, Human
cacacuccacccacaacu

SEQ ID NO: 1053988 - RNA, 19 nt, Human
cacccucccuuccucaaag

SEQ ID NO: 1053989 - RNA, 19 nt, Human
cacccugcccuccagccuc

SEQ ID NO: 1053990 - RNA, 22 nt, Human
cacucaacacacacacaccuga

SEQ ID NO: 1053991 - RNA, 21 nt, Human
cagaccacugcccacccuccc

SEQ ID NO: 1053992 - RNA, 27 nt, Human
cagaugagcugcccaguaggcaggcac

SEQ ID NO: 1053993 - RNA, 18 nt, Human
cagccugccuuccauacc

SEQ ID NO: 1053994 - RNA, 23 nt, Human
caggacugugucucuuccuacaa

SEQ ID NO: 1053995 - RNA, 21 nt, Human
caggcuguguguuguuacaga

SEQ ID NO: 1053996 - RNA, 21 nt, Human
cagggccuuguccugagcccu

SEQ ID NO: 1053997 - RNA, 20 nt, Human
caguuuucauggguccaugg

SEQ ID NO: 1053998 - RNA, 23 nt, Human
caugccugcuuuccccucuggca

SEQ ID NO: 1053999 - RNA, 24 nt, Human
caugccugcuuuccccucuggcag

SEQ ID NO: 1054000 - RNA, 25 nt, Human
ccagcaaccccaggucauacccucu

SEQ ID NO: 1054001 - RNA, 19 nt, Human
ccaugcucaguccaaggag

SEQ ID NO: 1054002 - RNA, 20 nt, Human
ccauuuccugcagccugccu

SEQ ID NO: 1054003 - RNA, 22 nt, Human
cccacccucccuuccucaaaag

SEQ ID NO: 1054004 - RNA, 19 nt, Human
cccacucaacacacacaca

SEQ ID NO: 1054005 - RNA, 21 nt, Human
cccaucccuccuucuuucuca

SEQ ID NO: 1054006 - RNA, 24 nt, Human
ccccaacacugcaguaaguguacc

SEQ ID NO: 1054007 - RNA, 20 nt, Human
ccccaacuuuccauucacuc

SEQ ID NO: 1054008 - RNA, 24 nt, Human
ccccaggggccacuggaaugucca

SEQ ID NO: 1054009 - RNA, 24 nt, Human
ccccaggggccacuggaauguccu

SEQ ID NO: 1054010 - RNA, 25 nt, Human
ccccaggucauacccucuauuuugc

SEQ ID NO: 1054011 - RNA, 23 nt, Human
cccuccagccucgccaacccuag

SEQ ID NO: 1054012 - RNA, 21 nt, Human
cccucuucuuuuucucucucc

SEQ ID NO: 1054013 - RNA, 21 nt, Human
cccugcccaaccccucaccau

SEQ ID NO: 1054014 - RNA, 21 nt, Human
cccuuccucaaaaggcucuca

SEQ ID NO: 1054015 - RNA, 23 nt, Human
cccuuccugcucaguuucagaag

SEQ ID NO: 1054016 - RNA, 25 nt, Human
ccuagccacuuccuuacccuuccug

SEQ ID NO: 1054017 - RNA, 18 nt, Human
ccucccuaacaaauaggc

SEQ ID NO: 1054018 - RNA, 23 nt, Human
ccugagcccucuucuuuuucucu

SEQ ID NO: 1054019 - RNA, 22 nt, Human
ccugcccaaccccucaccaugc

SEQ ID NO: 1054020 - RNA, 25 nt, Human
ccugccuuccauaccgcccuuccug

SEQ ID NO: 1054021 - RNA, 19 nt, Human
ccuuguggccacuccucuu

SEQ ID NO: 1054022 - RNA, 25 nt, Human
cucacaagcacucugcauaguccgc

SEQ ID NO: 1054023 - RNA, 18 nt, Human
cucacacguucuacuccc

SEQ ID NO: 1054024 - RNA, 23 nt, Human
cucaucacaccaucuugacuguu

SEQ ID NO: 1054025 - RNA, 24 nt, Human
cuccagccucgccaacccuagauu

SEQ ID NO: 1054026 - RNA, 22 nt, Human
cuccagucuauguuuuuauacc

SEQ ID NO: 1054027 - RNA, 24 nt, Human
cuccucccuggcucuggccagcaa

SEQ ID NO: 1054028 - RNA, 22 nt, Human
cucucaauuuccaaagcacucc

SEQ ID NO: 1054029 - RNA, 24 nt, Human
cugcccacccucccuuccucaaaa

SEQ ID NO: 1054030 - RNA, 19 nt, Human
cugggagaugcuauccugu

SEQ ID NO: 1054031 - RNA, 21 nt, Human
cuuccuuacccuuccugcuca

SEQ ID NO: 1054032 - RNA, 22 nt, Human
cuucucacacguucuacucccc

SEQ ID NO: 1054033 - RNA, 23 nt, Human
gaaaacaucuacuucauaccuuc

SEQ ID NO: 1054034 - RNA, 22 nt, Human
gacccaucuuucucucaacucc

SEQ ID NO: 1054035 - RNA, 26 nt, Human
gacugugucucuuccuacaaaggucc

SEQ ID NO: 1054036 - RNA, 20 nt, Human
gagaacacacuccacccaca

SEQ ID NO: 1054037 - RNA, 18 nt, Human
gcaaaaccccaacacugc

SEQ ID NO: 1054038 - RNA, 19 nt, Human
gcccacccucccuuccuca

SEQ ID NO: 1054039 - RNA, 18 nt, Human
gcccugcccuucugcugu

SEQ ID NO: 1054040 - RNA, 18 nt, Human
gccugccuuccauaccgc

SEQ ID NO: 1054041 - RNA, 21 nt, Human
gcucacccugcccuccagccu

SEQ ID NO: 1054042 - RNA, 20 nt, Human
gcucagccuugcccugcccu

SEQ ID NO: 1054043 - RNA, 20 nt, Human
ggaaaacaucuacuucauac

SEQ ID NO: 1054044 - RNA, 21 nt, Human
ggaggaggcaggcucugagaa

SEQ ID NO: 1054045 - RNA, 20 nt, Human
ggaggcaggcucugagaacc

SEQ ID NO: 1054046 - RNA, 24 nt, Human
ggaggcaggcucugagaaccugcc

SEQ ID NO: 1054047 - RNA, 19 nt, Human
gggguccuccucuuugugc

SEQ ID NO: 1054048 - RNA, 18 nt, Human
guccucugcucaaaacau

SEQ ID NO: 1054049 - RNA, 23 nt, Human
guuucuugcuucagcacccaugu

SEQ ID NO: 1054050 - RNA, 21 nt, Human
uaagaaaacauucccacgucc

SEQ ID NO: 1054051 - RNA, 18 nt, Human
uaagaccaagggcugcca

SEQ ID NO: 1054052 - RNA, 28 nt, Human
uacagccugccuuccauaccgcccuucu

SEQ ID NO: 1054053 - RNA, 19 nt, Human
uacgcauauaaacagggag

SEQ ID NO: 1054054 - RNA, 22 nt, Human
uacuucccuggcaaaaccccaa

SEQ ID NO: 1054055 - RNA, 25 nt, Human
uagacccuggagggcaaccauggag

SEQ ID NO: 1054056 - RNA, 21 nt, Human
uagaugaagugaaggcagggu

SEQ ID NO: 1054057 - RNA, 20 nt, Human
uaggucacaccauucuccuc

SEQ ID NO: 1054058 - RNA, 23 nt, Human
uauuuugccuuuaccugagauug

SEQ ID NO: 1054059 - RNA, 26 nt, Human
uauuuugccuuuaccugagauugcuc

SEQ ID NO: 1054060 - RNA, 23 nt, Human
ucaccacucaagacaagagcaag

SEQ ID NO: 1054061 - RNA, 26 nt, Human
ucaccuccuguuuucaauuccaauuu

SEQ ID NO: 1054062 - RNA, 25 nt, Human
ucaccugggagaugcuauccuguca

SEQ ID NO: 1054063 - RNA, 18 nt, Human
ucacuacaauuucuccug

SEQ ID NO: 1054064 - RNA, 25 nt, Human
ucagaaagcacagggggugcucugu

SEQ ID NO: 1054065 - RNA, 22 nt, Human
ucagagcucagccuugcccugc

SEQ ID NO: 1054066 - RNA, 18 nt, Human
ucagcacccauguggagg

SEQ ID NO: 1054067 - RNA, 18 nt, Human
ucaguggcucugaucucc

SEQ ID NO: 1054068 - RNA, 22 nt, Human
ucauguaucaucucucagaucc

SEQ ID NO: 1054069 - RNA, 18 nt, Human
ucccucccuagucaccuc

SEQ ID NO: 1054070 - RNA, 24 nt, Human
uccugagcccucuucuuuuucucu

SEQ ID NO: 1054071 - RNA, 19 nt, Human
ucucauggacucugcuccu

SEQ ID NO: 1054072 - RNA, 19 nt, Human
ucuccauggauuaccuccu

SEQ ID NO: 1054073 - RNA, 20 nt, Human
ucucccaccuuuuaagagcc

SEQ ID NO: 1054074 - RNA, 22 nt, Human
ucucggagucucaggcauccca

SEQ ID NO: 1054075 - RNA, 23 nt, Human
ucugagaacacacuccacccaca

SEQ ID NO: 1054076 - RNA, 18 nt, Human
ucuguuucucuauccucc

SEQ ID NO: 1054077 - RNA, 20 nt, Human
ucuucuuuuucucucucccc

SEQ ID NO: 1054078 - RNA, 27 nt, Human
ugacuccuaggucacaccauucuccuu

SEQ ID NO: 1054079 - RNA, 19 nt, Human
ugacugagaaccaagugca

SEQ ID NO: 1054080 - RNA, 22 nt, Human
ugacugagaaccaagugcacaa

SEQ ID NO: 1054081 - RNA, 22 nt, Human
ugagaacacacuccacccacaa

SEQ ID NO: 1054082 - RNA, 23 nt, Human
ugagaacacacuccacccacaac

SEQ ID NO: 1054083 - RNA, 22 nt, Human
ugagcccucuucuuuuucucuc

SEQ ID NO: 1054084 - RNA, 23 nt, Human
ugaggggaagacaggugugugca

SEQ ID NO: 1054085 - RNA, 21 nt, Human
ugauaauuaaccucuaggagu

SEQ ID NO: 1054086 - RNA, 18 nt, Human
ugccacuggccuuguggc

SEQ ID NO: 1054087 - RNA, 25 nt, Human
ugccagggugccugggauaagcugu

SEQ ID NO: 1054088 - RNA, 18 nt, Human
ugccauaaagggucagug

SEQ ID NO: 1054089 - RNA, 21 nt, Human
ugcccagcauccuacucuaaa

SEQ ID NO: 1054090 - RNA, 23 nt, Human
ugccccucccaucucucucauca

SEQ ID NO: 1054091 - RNA, 21 nt, Human
ugccugggauaagcugugacu

SEQ ID NO: 1054092 - RNA, 19 nt, Human
ugccuggggguuaccaggc

SEQ ID NO: 1054093 - RNA, 21 nt, Human
ugccuggggguuaccaggcug

SEQ ID NO: 1054094 - RNA, 23 nt, Human
ugcuccaccucucaauuuccaaa

SEQ ID NO: 1054095 - RNA, 19 nt, Human
ugcuucagaagcuccuugc

SEQ ID NO: 1054096 - RNA, 20 nt, Human
ugcuuuggucaccacucaag

SEQ ID NO: 1054097 - RNA, 19 nt, Human
uggaaccccaggggccacu

SEQ ID NO: 1054098 - RNA, 24 nt, Human
uggccagcaaccccaggucauacc

SEQ ID NO: 1054099 - RNA, 19 nt, Human
uggccuuguggccacuccu

SEQ ID NO: 1054100 - RNA, 18 nt, Human
ugggaaggauucacccuu

SEQ ID NO: 1054101 - RNA, 21 nt, Human
ugggauacucaagcagaguga

SEQ ID NO: 1054102 - RNA, 19 nt, Human
ugguauuaguguugaccug

SEQ ID NO: 1054103 - RNA, 19 nt, Human
uggucaccacucaagacaa

SEQ ID NO: 1054104 - RNA, 20 nt, Human
ugguucccucugcccaaacu

SEQ ID NO: 1054105 - RNA, 22 nt, Human
uguuucucuauccucccuaaca

SEQ ID NO: 1054106 - RNA, 21 nt, Human
uuaccuccuccagucuauguu

SEQ ID NO: 1054107 - RNA, 19 nt, Human
uucccuggcaaaaccccaa

SEQ ID NO: 1054108 - RNA, 21 nt, Human
uucuuggucagauuaaaccuu

SEQ ID NO: 1054109 - RNA, 21 nt, Human
uugggcugcucucccaccuuu

SEQ ID NO: 1054110 - RNA, 22 nt, Human
uuuaggauugggccuccucagg

SEQ ID NO: 1054111 - RNA, 21 nt, Human
uuugccuuuaccugagauugc

SEQ ID NO: 1054112 - RNA, 20 nt, Human
aaaaacaaaaaugcagauga

SEQ ID NO: 1054113 - RNA, 23 nt, Human
aaaagaaaggaguucgugcuuaa

SEQ ID NO: 1054114 - RNA, 23 nt, Human
aacauuggguguuucguuguuga

SEQ ID NO: 1054115 - RNA, 20 nt, Human
aagcuccaucaaaauggcag

SEQ ID NO: 1054116 - RNA, 23 nt, Human
aaucagcagguccauccagagca

SEQ ID NO: 1054117 - RNA, 22 nt, Human
acaaaaaugcagaugaggacac

SEQ ID NO: 1054118 - RNA, 19 nt, Human
acacccuuacguccaggag

SEQ ID NO: 1054119 - RNA, 18 nt, Human
acacuaccauaaccugga

SEQ ID NO: 1054120 - RNA, 26 nt, Human
accuccuuuuucuccuuucacaccag

SEQ ID NO: 1054121 - RNA, 20 nt, Human
accugauaaccuacaaacug

SEQ ID NO: 1054122 - RNA, 23 nt, Human
accuggacugccaucauugcccu

SEQ ID NO: 1054123 - RNA, 18 nt, Human
acugguccaggggcuccu

SEQ ID NO: 1054124 - RNA, 20 nt, Human
acuugcagaacaaacagcag

SEQ ID NO: 1054125 - RNA, 19 nt, Human
agaaaacuuccagcucaaa

SEQ ID NO: 1054126 - RNA, 22 nt, Human
agaaaauuacccucuucucauc

SEQ ID NO: 1054127 - RNA, 23 nt, Human
agaaaauuacccucuucucauca

SEQ ID NO: 1054128 - RNA, 23 nt, Human
agaacaaacagcagcauguccuu

SEQ ID NO: 1054129 - RNA, 20 nt, Human
agagagcuguguccuguacu

SEQ ID NO: 1054130 - RNA, 20 nt, Human
agagugcuggaauugucagg

SEQ ID NO: 1054131 - RNA, 20 nt, Human
agauaucauuuugccucuag

SEQ ID NO: 1054132 - RNA, 24 nt, Human
agccuggugucccgggggggccug

SEQ ID NO: 1054133 - RNA, 24 nt, Human
agggagccuucaaguccaucuggu

SEQ ID NO: 1054134 - RNA, 23 nt, Human
aguaagcuuccuaaugaagagaa

SEQ ID NO: 1054135 - RNA, 20 nt, Human
aguauccaucugcuccaugc

SEQ ID NO: 1054136 - RNA, 18 nt, Human
agugcuggaauugucagg

SEQ ID NO: 1054137 - RNA, 19 nt, Human
agugcuggaauugucagga

SEQ ID NO: 1054138 - RNA, 22 nt, Human
auaugcauacaucauauaaauu

SEQ ID NO: 1054139 - RNA, 24 nt, Human
aucaaaaugggggcuucaagcucc

SEQ ID NO: 1054140 - RNA, 22 nt, Human
auccagagcaacaguuaugagg

SEQ ID NO: 1054141 - RNA, 24 nt, Human
aucccaucucuccuggaagcccag

SEQ ID NO: 1054142 - RNA, 24 nt, Human
auccccucgcaggcccuuugcucc

SEQ ID NO: 1054143 - RNA, 26 nt, Human
aucucccuuuucuccuuuucuuccag

SEQ ID NO: 1054144 - RNA, 23 nt, Human
augaagccaagccuuuggcuccu

SEQ ID NO: 1054145 - RNA, 21 nt, Human
augccaauagagagcuguguc

SEQ ID NO: 1054146 - RNA, 22 nt, Human
auggguuugcagaaaaugaacu

SEQ ID NO: 1054147 - RNA, 24 nt, Human
auguacacauaugcauacaucaua

SEQ ID NO: 1054148 - RNA, 22 nt, Human
auuuugccucuagcucccuuca

SEQ ID NO: 1054149 - RNA, 19 nt, Human
caaaaaugcagaugaggac

SEQ ID NO: 1054150 - RNA, 22 nt, Human
caaaaaugcagaugaggacaca

SEQ ID NO: 1054151 - RNA, 29 nt, Human
caaaaaugcagaugaggacacagccauca

SEQ ID NO: 1054152 - RNA, 19 nt, Human
caaaaugggggcuucaagc

SEQ ID NO: 1054153 - RNA, 19 nt, Human
caagccacgaggaccagga

SEQ ID NO: 1054154 - RNA, 22 nt, Human
caagccuuuggcuccuuucaca

SEQ ID NO: 1054155 - RNA, 22 nt, Human
caccugauaaccuacaaacugu

SEQ ID NO: 1054156 - RNA, 26 nt, Human
cacguucuccuuucaagccugugggu

SEQ ID NO: 1054157 - RNA, 21 nt, Human
cacuugcagaacaaacagcag

SEQ ID NO: 1054158 - RNA, 23 nt, Human
cagaagucguuuuaaaaaaauac

SEQ ID NO: 1054159 - RNA, 23 nt, Human
cagacuagaaguccaucaaaaug

SEQ ID NO: 1054160 - RNA, 21 nt, Human
cagaguuaacuagaaaaaucc

SEQ ID NO: 1054161 - RNA, 20 nt, Human
cagcagcauguccuuucagc

SEQ ID NO: 1054162 - RNA, 25 nt, Human
cagcucaaaagcaauaauuuauguu

SEQ ID NO: 1054163 - RNA, 21 nt, Human
cagcucuuagacugagguaag

SEQ ID NO: 1054164 - RNA, 19 nt, Human
caggaaagacagacuagaa

SEQ ID NO: 1054165 - RNA, 24 nt, Human
caggaucucccauugugccaucuc

SEQ ID NO: 1054166 - RNA, 23 nt, Human
cauguagaaaaugaagccaagcc

SEQ ID NO: 1054167 - RNA, 22 nt, Human
ccagagucuuaccaugcuuccu

SEQ ID NO: 1054168 - RNA, 20 nt, Human
ccaggagucccucucuuccc

SEQ ID NO: 1054169 - RNA, 19 nt, Human
ccauugcuaccaacugugg

SEQ ID NO: 1054170 - RNA, 20 nt, Human
cccacaccuccuuuuucucc

SEQ ID NO: 1054171 - RNA, 22 nt, Human
cccagggagccuucaaguccau

SEQ ID NO: 1054172 - RNA, 21 nt, Human
cccauguacacauaugcauag

SEQ ID NO: 1054173 - RNA, 24 nt, Human
ccccaaucucacccuuagguccac

SEQ ID NO: 1054174 - RNA, 25 nt, Human
cccuuugcuccacggucaccaggag

SEQ ID NO: 1054175 - RNA, 20 nt, Human
cccuuugcucccuugcgucc

SEQ ID NO: 1054176 - RNA, 20 nt, Human
ccucaucucccuuuucuccu

SEQ ID NO: 1054177 - RNA, 20 nt, Human
ccugguuccccaggggaucc

SEQ ID NO: 1054178 - RNA, 19 nt, Human
ccuuaagucccagggagcc

SEQ ID NO: 1054179 - RNA, 19 nt, Human
ccuuaguaccuugcucucc

SEQ ID NO: 1054180 - RNA, 21 nt, Human
ccuucuugucccuuugcuccc

SEQ ID NO: 1054181 - RNA, 20 nt, Human
ccuugaacuucuugcuccuc

SEQ ID NO: 1054182 - RNA, 19 nt, Human
cgaggaccaggaaagccaa

SEQ ID NO: 1054183 - RNA, 20 nt, Human
cguuuuaaaaaaauacugca

SEQ ID NO: 1054184 - RNA, 21 nt, Human
cucacauguagaaaaugaagc

SEQ ID NO: 1054185 - RNA, 22 nt, Human
cucagaguuaacuagaaaaauc

SEQ ID NO: 1054186 - RNA, 23 nt, Human
cucaucaguccaagcaaacaacu

SEQ ID NO: 1054187 - RNA, 19 nt, Human
cucccuugaaaucgagacu

SEQ ID NO: 1054188 - RNA, 23 nt, Human
cuccuggaccaccagggucccca

SEQ ID NO: 1054189 - RNA, 18 nt, Human
cugcugucuuucuucugg

SEQ ID NO: 1054190 - RNA, 22 nt, Human
cuggagguccccuuuucccugg

SEQ ID NO: 1054191 - RNA, 19 nt, Human
cuuacgggauccccucgca

SEQ ID NO: 1054192 - RNA, 24 nt, Human
cuucagcccagucucuccuggacc

SEQ ID NO: 1054193 - RNA, 25 nt, Human
cuuccaggaagaccauuaucacccu

SEQ ID NO: 1054194 - RNA, 19 nt, Human
cuugcagaacaaacagcag

SEQ ID NO: 1054195 - RNA, 20 nt, Human
cuugcucucccacuggucca

SEQ ID NO: 1054196 - RNA, 23 nt, Human
gaaaaacagacaaauacaucuua

SEQ ID NO: 1054197 - RNA, 20 nt, Human
gaacaaacagcagcaugucc

SEQ ID NO: 1054198 - RNA, 22 nt, Human
gaacaaacagcagcauguccuu

SEQ ID NO: 1054199 - RNA, 23 nt, Human
gagaaaacuuccagcucaaaagc

SEQ ID NO: 1054200 - RNA, 23 nt, Human
gagcauuagacauuacuaaauua

SEQ ID NO: 1054201 - RNA, 24 nt, Human
gagccagcucuuagacugagguaa

SEQ ID NO: 1054202 - RNA, 18 nt, Human
gaucagccaagucacuug

SEQ ID NO: 1054203 - RNA, 19 nt, Human
gcagcagauuuaguuacua

SEQ ID NO: 1054204 - RNA, 23 nt, Human
gccuggugucccgggggggccug

SEQ ID NO: 1054205 - RNA, 22 nt, Human
gcugucuuucuucuggagccug

SEQ ID NO: 1054206 - RNA, 22 nt, Human
ggacagagauaaaagaauuaac

SEQ ID NO: 1054207 - RNA, 18 nt, Human
ggaccaggaaagccaaca

SEQ ID NO: 1054208 - RNA, 23 nt, Human
ggagguccugguuccccagggga

SEQ ID NO: 1054209 - RNA, 19 nt, Human
gggauccccucgcaggccc

SEQ ID NO: 1054210 - RNA, 21 nt, Human
gggccuggccagccucuucug

SEQ ID NO: 1054211 - RNA, 23 nt, Human
guaaaaguaacucagagcuucau

SEQ ID NO: 1054212 - RNA, 25 nt, Human
guaccuugcucucccacugguccaa

SEQ ID NO: 1054213 - RNA, 28 nt, Human
guacucaaauccuuucccaaccggaggg

SEQ ID NO: 1054214 - RNA, 19 nt, Human
guccuggaggccccugggg

SEQ ID NO: 1054215 - RNA, 28 nt, Human
uaaaaaaauacgacauauaaacagcauc

SEQ ID NO: 1054216 - RNA, 24 nt, Human
uaacaaaagaaaggaguucgugcu

SEQ ID NO: 1054217 - RNA, 24 nt, Human
uaacuagaaaaaucccuuuuauua

SEQ ID NO: 1054218 - RNA, 24 nt, Human
uaacuagaaaaaucccuuuuauua

SEQ ID NO: 1054219 - RNA, 24 nt, Human
uaacuccuugaacuucuugcuccu

SEQ ID NO: 1054220 - RNA, 20 nt, Human
uaagagcucugcuaauccug

SEQ ID NO: 1054221 - RNA, 24 nt, Human
uaauccgucaauuccauuuucccc

SEQ ID NO: 1054222 - RNA, 18 nt, Human
uaccauaaccuggacugc

SEQ ID NO: 1054223 - RNA, 20 nt, Human
uacuaaauuaggaaaggagg

SEQ ID NO: 1054224 - RNA, 18 nt, Human
uacucaaauccuuuccca

SEQ ID NO: 1054225 - RNA, 24 nt, Human
uagacauuacuaaauuaggaaagg

SEQ ID NO: 1054226 - RNA, 21 nt, Human
uagagauggagaaaauuaccc

SEQ ID NO: 1054227 - RNA, 24 nt, Human
ucaagucaccugauaaccuacaaa

SEQ ID NO: 1054228 - RNA, 19 nt, Human
ucagagcuucaucuaugac

SEQ ID NO: 1054229 - RNA, 18 nt, Human
uccaagcaaacaacuccc

SEQ ID NO: 1054230 - RNA, 20 nt, Human
uccagagcaacaguuaugag

SEQ ID NO: 1054231 - RNA, 18 nt, Human
uccaggagcucccuugaa

SEQ ID NO: 1054232 - RNA, 18 nt, Human
uccaggggcuccucuuuc

SEQ ID NO: 1054233 - RNA, 25 nt, Human
uccagguucuccuuuauuuccuugg

SEQ ID NO: 1054234 - RNA, 19 nt, Human
uccaucugguccugggaug

SEQ ID NO: 1054235 - RNA, 20 nt, Human
ucccagaucuccagguucuc

SEQ ID NO: 1054236 - RNA, 18 nt, Human
ucccagguagccuucacc

SEQ ID NO: 1054237 - RNA, 19 nt, Human
ucccauugugccaucuccu

SEQ ID NO: 1054238 - RNA, 25 nt, Human
uccccaacuucucccuccuguccau

SEQ ID NO: 1054239 - RNA, 23 nt, Human
ucccugccucuccuccggguccc

SEQ ID NO: 1054240 - RNA, 23 nt, Human
ucccugugggccuguaugucccc

SEQ ID NO: 1054241 - RNA, 21 nt, Human
ucccuuaggaccuuuggugcc

SEQ ID NO: 1054242 - RNA, 20 nt, Human
ucccuucagcccagucucuc

SEQ ID NO: 1054243 - RNA, 21 nt, Human
ucccuuugcucccuugcgucc

SEQ ID NO: 1054244 - RNA, 24 nt, Human
uccucugaagacaugaggugcuau

SEQ ID NO: 1054245 - RNA, 18 nt, Human
uccucuguuucccuuagg

SEQ ID NO: 1054246 - RNA, 20 nt, Human
uccuggaccaccaggguccc

SEQ ID NO: 1054247 - RNA, 21 nt, Human
uccuggaccaccagggucccc

SEQ ID NO: 1054248 - RNA, 19 nt, Human
uccuggaggccccugggga

SEQ ID NO: 1054249 - RNA, 26 nt, Human
uccuucuaugcuacugucaacuccag

SEQ ID NO: 1054250 - RNA, 22 nt, Human
uccuucuugucccuuugcuccc

SEQ ID NO: 1054251 - RNA, 21 nt, Human
ucuaaagaauauauggauuag

SEQ ID NO: 1054252 - RNA, 25 nt, Human
ucuaugcuacugucaacuccaggag

SEQ ID NO: 1054253 - RNA, 20 nt, Human
ucucccacugguccaggggc

SEQ ID NO: 1054254 - RNA, 23 nt, Human
ucuccuggaccaccagggucccc

SEQ ID NO: 1054255 - RNA, 19 nt, Human
ucuugggcccugagggccc

SEQ ID NO: 1054256 - RNA, 21 nt, Human
ugaaaauuaauaaaugaccau

SEQ ID NO: 1054257 - RNA, 18 nt, Human
ugaagagaaaacuuccag

SEQ ID NO: 1054258 - RNA, 19 nt, Human
ugagaucccucaucucccu

SEQ ID NO: 1054259 - RNA, 18 nt, Human
ugauaaccuacaaacugu

SEQ ID NO: 1054260 - RNA, 18 nt, Human
ugaucucuuuugcaucuc

SEQ ID NO: 1054261 - RNA, 18 nt, Human
ugcagaacaaacagcagc

SEQ ID NO: 1054262 - RNA, 20 nt, Human
ugcuaccaacuguggagcca

SEQ ID NO: 1054263 - RNA, 19 nt, Human
uggacugccaucauugccc

SEQ ID NO: 1054264 - RNA, 18 nt, Human
uggaggccccuggggacc

SEQ ID NO: 1054265 - RNA, 22 nt, Human
ugggcuucccugagaucccuca

SEQ ID NO: 1054266 - RNA, 18 nt, Human
uggugucccgggggggcc

SEQ ID NO: 1054267 - RNA, 25 nt, Human
uguacacauaugcauacaucauaau

SEQ ID NO: 1054268 - RNA, 25 nt, Human
uguacacauaugcauacaucauaua

SEQ ID NO: 1054269 - RNA, 21 nt, Human
uguacucaaauccuuucccaa

SEQ ID NO: 1054270 - RNA, 18 nt, Human
uguauuuaaggcuguuuu

SEQ ID NO: 1054271 - RNA, 19 nt, Human
ugucuuucuucuggagccu

SEQ ID NO: 1054272 - RNA, 20 nt, Human
uuaaugguauuuccaacaau

SEQ ID NO: 1054273 - RNA, 22 nt, Human
uuccauuuuccccaacuucucc

SEQ ID NO: 1054274 - RNA, 26 nt, Human
uuccccaacuucucccuccuguccau

SEQ ID NO: 1054275 - RNA, 22 nt, Human
uucuccuuuauuuccuuggcuu

SEQ ID NO: 1054276 - RNA, 23 nt, Human
uugaaacauuuuuucugaacccc

SEQ ID NO: 1054277 - RNA, 19 nt, Human
uuuucuaaguucaucagau

SEQ ID NO: 1054278 - RNA, 19 nt, Human
uuuucugaaccccuaagca

SEQ ID NO: 1054279 - RNA, 22 nt, Human
auccauucguucucagagaagu

SEQ ID NO: 1054280 - RNA, 21 nt, Human
cagggcucucugagcagggcc

SEQ ID NO: 1054281 - RNA, 24 nt, Human
gagcagggcccaggccgauccauu

SEQ ID NO: 1054282 - RNA, 20 nt, Human
ucucugagcagggcccaggc

SEQ ID NO: 1054283 - RNA, 19 nt, Human
agagcggggcacuggccag

SEQ ID NO: 1054284 - RNA, 19 nt, Human
cacuggccaggucccucug

SEQ ID NO: 1054285 - RNA, 25 nt, Human
cccucugauaaugaauugcugcucu

SEQ ID NO: 1054286 - RNA, 23 nt, Human
ccucugauaaugaauugcugcuc

SEQ ID NO: 1054287 - RNA, 18 nt, Human
aaacaucuccaugaccaa

SEQ ID NO: 1054288 - RNA, 20 nt, Human
acagcagugacacaucaaaa

SEQ ID NO: 1054289 - RNA, 18 nt, Human
cgaauuguccuuccucag

SEQ ID NO: 1054290 - RNA, 24 nt, Human
uacagcagugacacaucaaaaaga

SEQ ID NO: 1054291 - RNA, 24 nt, Human
uccucagacuauaugaauagaucu

SEQ ID NO: 1054292 - RNA, 24 nt, Human
ucgaauuguccuuccucagacuau

SEQ ID NO: 1054293 - RNA, 20 nt, Human
ugaccaaaauuuuuuccaac

SEQ ID NO: 1054294 - RNA, 18 nt, Human
uggaauuacagaugucgu

SEQ ID NO: 1054295 - RNA, 22 nt, Human
uuaaauugauaauccacaccua

SEQ ID NO: 1054296 - RNA, 21 nt, Human
uuuaaaggacagucaacuuag

SEQ ID NO: 1054297 - RNA, 27 nt, Human
aaacaacccuaaaccaauucugaggac

SEQ ID NO: 1054298 - RNA, 23 nt, Human
aaacagcacagggggcccacagc

SEQ ID NO: 1054299 - RNA, 19 nt, Human
aaagugcugggguuauagg

SEQ ID NO: 1054300 - RNA, 24 nt, Human
aaagugcugggguuauaggcauga

SEQ ID NO: 1054301 - RNA, 19 nt, Human
aagugcugggauuacaggc

SEQ ID NO: 1054302 - RNA, 21 nt, Human
aagugcugggauuacaggcau

SEQ ID NO: 1054303 - RNA, 22 nt, Human
aagugcugggauuacaggcaug

SEQ ID NO: 1054304 - RNA, 23 nt, Human
aagugcugggauuacaggcauga

SEQ ID NO: 1054305 - RNA, 26 nt, Human
aagugcugggauuacaggcaugagcc

SEQ ID NO: 1054306 - RNA, 18 nt, Human
acaccacugcacuccagc

SEQ ID NO: 1054307 - RNA, 20 nt, Human
acaccacugcacuccagccu

SEQ ID NO: 1054308 - RNA, 21 nt, Human
acacuggucuugaacuccugg

SEQ ID NO: 1054309 - RNA, 19 nt, Human
acagaguuucaccauguug

SEQ ID NO: 1054310 - RNA, 21 nt, Human
acaggcacucgccacuaugcc

SEQ ID NO: 1054311 - RNA, 18 nt, Human
accauguuggccaggcug

SEQ ID NO: 1054312 - RNA, 22 nt, Human
accgcacccagacgaaagagug

SEQ ID NO: 1054313 - RNA, 27 nt, Human
acucugucgcccaggcuggagugcaau

SEQ ID NO: 1054314 - RNA, 23 nt, Human
agcuacucaggaggcugaggcag

SEQ ID NO: 1054315 - RNA, 24 nt, Human
aggcaggaagacugcuugagccca

SEQ ID NO: 1054316 - RNA, 24 nt, Human
aggcaugguggcuuacaccuguag

SEQ ID NO: 1054317 - RNA, 24 nt, Human
aggcugaggcaggaagacugcuug

SEQ ID NO: 1054318 - RNA, 23 nt, Human
agggaucugcuggccuuggccuc

SEQ ID NO: 1054319 - RNA, 21 nt, Human
aguagcugggauuacaggcac

SEQ ID NO: 1054320 - RNA, 24 nt, Human
agugcaauggcaugaucuuggcuc

SEQ ID NO: 1054321 - RNA, 18 nt, Human
agugcugggauuacaggc

SEQ ID NO: 1054322 - RNA, 24 nt, Human
aucacacaccacugcacuccagcc

SEQ ID NO: 1054323 - RNA, 18 nt, Human
auggggucucaccauguu

SEQ ID NO: 1054324 - RNA, 20 nt, Human
auggggucucaccauguugg

SEQ ID NO: 1054325 - RNA, 23 nt, Human
caaagugcugggguuauaggcau

SEQ ID NO: 1054326 - RNA, 24 nt, Human
caaagugcugggguuauaggcaug

SEQ ID NO: 1054327 - RNA, 21 nt, Human
caaauaauaugaauccacgcu

SEQ ID NO: 1054328 - RNA, 23 nt, Human
caacccuaaaccaauucugagga

SEQ ID NO: 1054329 - RNA, 18 nt, Human
caaccucggccucccgaa

SEQ ID NO: 1054330 - RNA, 22 nt, Human
caagcgauucucuugccucagc

SEQ ID NO: 1054331 - RNA, 24 nt, Human
cacacaccacugcacuccagccug

SEQ ID NO: 1054332 - RNA, 21 nt, Human
cacaccacugcacuccagccu

SEQ ID NO: 1054333 - RNA, 23 nt, Human
cacagccagccccacugggccuc

SEQ ID NO: 1054334 - RNA, 24 nt, Human
caccacauuuggcuaauuuuugua

SEQ ID NO: 1054335 - RNA, 24 nt, Human
caccauguugcccacacuggucuu

SEQ ID NO: 1054336 - RNA, 27 nt, Human
caccauguugcccacacuggucuugaa

SEQ ID NO: 1054337 - RNA, 21 nt, Human
caccauguuggccaggcuggu

SEQ ID NO: 1054338 - RNA, 24 nt, Human
caccauguuggccaggcuggucuc

SEQ ID NO: 1054339 - RNA, 27 nt, Human
caccauguuggccaggcuggucucaaa

SEQ ID NO: 1054340 - RNA, 21 nt, Human
cacccagacgaaagagugauu

SEQ ID NO: 1054341 - RNA, 24 nt, Human
caccuguaguccuagcuacucagg

SEQ ID NO: 1054342 - RNA, 18 nt, Human
cacgccucaaacagcaca

SEQ ID NO: 1054343 - RNA, 22 nt, Human
cacucugucgcccaggcuggag

SEQ ID NO: 1054344 - RNA, 18 nt, Human
cacugcacuccagccugc

SEQ ID NO: 1054345 - RNA, 19 nt, Human
cacugcacuccagccugcg

SEQ ID NO: 1054346 - RNA, 26 nt, Human
cacugcacuccagccugcguaccaca

SEQ ID NO: 1054347 - RNA, 23 nt, Human
cacugcagucuccgccucuuggg

SEQ ID NO: 1054348 - RNA, 21 nt, Human
cacuggucuugaacuccuggg

SEQ ID NO: 1054349 - RNA, 18 nt, Human
cagaguuucaccauguug

SEQ ID NO: 1054350 - RNA, 20 nt, Human
cagccuccugaguagcuggg

SEQ ID NO: 1054351 - RNA, 24 nt, Human
cagggucucacucugucgcccagg

SEQ ID NO: 1054352 - RNA, 24 nt, Human
caugccaccacauuuggcuaauuu

SEQ ID NO: 1054353 - RNA, 25 nt, Human
caugcucauuaaaaaaaauuaaggg

SEQ ID NO: 1054354 - RNA, 20 nt, Human
cauguugcccacacuggucu

SEQ ID NO: 1054355 - RNA, 24 nt, Human
cauguugcccacacuggucuugaa

SEQ ID NO: 1054356 - RNA, 24 nt, Human
cauguuggccaggcuggucucaaa

SEQ ID NO: 1054357 - RNA, 18 nt, Human
ccacugcacuccagccug

SEQ ID NO: 1054358 - RNA, 18 nt, Human
ccacugcacuccagccug

SEQ ID NO: 1054359 - RNA, 19 nt, Human
ccacugcacuccagccugc

SEQ ID NO: 1054360 - RNA, 24 nt, Human
ccacugcacuccagccugcguacc

SEQ ID NO: 1054361 - RNA, 18 nt, Human
cccacagccagccccacu

SEQ ID NO: 1054362 - RNA, 19 nt, Human
cccaggggaggucgaggcu

SEQ ID NO: 1054363 - RNA, 24 nt, Human
cccgaagugcugggauuacaggca

SEQ ID NO: 1054364 - RNA, 21 nt, Human
cccuaaaccaauucugaggac

SEQ ID NO: 1054365 - RNA, 24 nt, Human
ccgaagugcugggauuacaggcau

SEQ ID NO: 1054366 - RNA, 18 nt, Human
ccgcgaaacaacccuaaa

SEQ ID NO: 1054367 - RNA, 22 nt, Human
ccucagaugaucccccaaccuu

SEQ ID NO: 1054368 - RNA, 24 nt, Human
ccucuuggguucaagcgauucucu

SEQ ID NO: 1054369 - RNA, 22 nt, Human
ccugaccucagaugauccccca

SEQ ID NO: 1054370 - RNA, 32 nt, Human
ccugaccucagaugaucccccaaccucggccg

SEQ ID NO: 1054371 - RNA, 23 nt, Human
ccugaguagcugggauuacaggc

SEQ ID NO: 1054372 - RNA, 24 nt, Human
ccugaguagcugggauuacaggca

SEQ ID NO: 1054373 - RNA, 18 nt, Human
ccugggcucaagggaucu

SEQ ID NO: 1054374 - RNA, 21 nt, Human
cgggaagaaccgcgaaacaac

SEQ ID NO: 1054375 - RNA, 22 nt, Human
cgggaagaaccgcgaaacaacc

SEQ ID NO: 1054376 - RNA, 23 nt, Human
cucaaacagcacagggggcccac

SEQ ID NO: 1054377 - RNA, 24 nt, Human
cucacucugucgcccaggcuggag

SEQ ID NO: 1054378 - RNA, 20 nt, Human
cucacugcagucuccgccuc

SEQ ID NO: 1054379 - RNA, 24 nt, Human
cucacugcagucuccgccucuugg

SEQ ID NO: 1054380 - RNA, 23 nt, Human
cucagccuccugaguagcuggga

SEQ ID NO: 1054381 - RNA, 25 nt, Human
cugaagauucuccaucaccaaauaa

SEQ ID NO: 1054382 - RNA, 23 nt, Human
cugaguagcugggauuacaggca

SEQ ID NO: 1054383 - RNA, 20 nt, Human
cugcuugagcccaggggagg

SEQ ID NO: 1054384 - RNA, 24 nt, Human
cuggagugcaauggcaugaucuug

SEQ ID NO: 1054385 - RNA, 24 nt, Human
cuguagagacagaguuucaccaug

SEQ ID NO: 1054386 - RNA, 24 nt, Human
cuugccucagccuccugaguagcu

SEQ ID NO: 1054387 - RNA, 24 nt, Human
cuuggccucucaaagugcuggggu

SEQ ID NO: 1054388 - RNA, 24 nt, Human
gaaacaacccuaaaccaauucuga

SEQ ID NO: 1054389 - RNA, 24 nt, Human
gaagugcugggauuacaggcauga

SEQ ID NO: 1054390 - RNA, 24 nt, Human
gaccucagaugaucccccaaccuc

SEQ ID NO: 1054391 - RNA, 21 nt, Human
gagacagaguuucaccauguu

SEQ ID NO: 1054392 - RNA, 19 nt, Human
gaggucgaggcuacaauga

SEQ ID NO: 1054393 - RNA, 25 nt, Human
gaguagcugggauuacaggcacucg

SEQ ID NO: 1054394 - RNA, 21 nt, Human
gaucugcuggccuuggccucu

SEQ ID NO: 1054395 - RNA, 24 nt, Human
gauuacaggcacucgccacuaugc

SEQ ID NO: 1054396 - RNA, 18 nt, Human
gauuacaggcaugagcca

SEQ ID NO: 1054397 - RNA, 22 nt, Human
gauuacaggcaugagccaccgc

SEQ ID NO: 1054398 - RNA, 23 nt, Human
gauuacaggcaugagccaccgca

SEQ ID NO: 1054399 - RNA, 21 nt, Human
gauucucuugccucagccucc

SEQ ID NO: 1054400 - RNA, 18 nt, Human
gcaugguggcuuacaccu

SEQ ID NO: 1054401 - RNA, 24 nt, Human
gcccagcuaauuuuuuuguauuuu

SEQ ID NO: 1054402 - RNA, 23 nt, Human
gcccaggcuggagugcaauggca

SEQ ID NO: 1054403 - RNA, 24 nt, Human
gcccaggcuggagugcaauggcau

SEQ ID NO: 1054404 - RNA, 20 nt, Human
gccucagccuccugaguagc

SEQ ID NO: 1054405 - RNA, 22 nt, Human
gccuuggccucucaaagugcug

SEQ ID NO: 1054406 - RNA, 24 nt, Human
gcgauucucuugccucagccuccu

SEQ ID NO: 1054407 - RNA, 21 nt, Human
gcucacugcagucuccgccuc

SEQ ID NO: 1054408 - RNA, 19 nt, Human
gcuggagugcaauggcaug

SEQ ID NO: 1054409 - RNA, 23 nt, Human
gcuggucucaaacuccugaccuc

SEQ ID NO: 1054410 - RNA, 22 nt, Human
ggaucugcuggccuuggccucu

SEQ ID NO: 1054411 - RNA, 22 nt, Human
ggauuacaggcaugagccaccg

SEQ ID NO: 1054412 - RNA, 24 nt, Human
ggcuggucucaaacuccugaccuc

SEQ ID NO: 1054413 - RNA, 22 nt, Human
ggggucucaccauguuggccag

SEQ ID NO: 1054414 - RNA, 22 nt, Human
gggucucaccauguuggccagg

SEQ ID NO: 1054415 - RNA, 18 nt, Human
ggguucaagcgauucucu

SEQ ID NO: 1054416 - RNA, 18 nt, Human
ggucucaccauguuggcc

SEQ ID NO: 1054417 - RNA, 24 nt, Human
gguggcuuacaccuguaguccuag

SEQ ID NO: 1054418 - RNA, 22 nt, Human
guagagacagaguuucaccaug

SEQ ID NO: 1054419 - RNA, 23 nt, Human
guagagauggggucucaccaugu

SEQ ID NO: 1054420 - RNA, 18 nt, Human
guagcugggauuacaggc

SEQ ID NO: 1054421 - RNA, 22 nt, Human
uaauuuuuguauuuucuguaga

SEQ ID NO: 1054422 - RNA, 24 nt, Human
uaauuuuuguauuuucuguagaga

SEQ ID NO: 1054423 - RNA, 26 nt, Human
uaauuuuuuuguauuuuuaguagaga

SEQ ID NO: 1054424 - RNA, 19 nt, Human
uacaccuguaguccuagcu

SEQ ID NO: 1054425 - RNA, 20 nt, Human
uacaggcacaugccaccaca

SEQ ID NO: 1054426 - RNA, 24 nt, Human
uacaggcacucgccacuaugccca

SEQ ID NO: 1054427 - RNA, 24 nt, Human
uacaggcaugagccaccgcaccca

SEQ ID NO: 1054428 - RNA, 22 nt, Human
uagagacagaguuucaccaugu

SEQ ID NO: 1054429 - RNA, 22 nt, Human
uagagauggggucucaccaugu

SEQ ID NO: 1054430 - RNA, 24 nt, Human
uaguagagauggggucucaccaug

SEQ ID NO: 1054431 - RNA, 26 nt, Human
uaguagagauggggucucaccauguu

SEQ ID NO: 1054432 - RNA, 19 nt, Human
uauaaaguaaaaagaguga

SEQ ID NO: 1054433 - RNA, 22 nt, Human
uauuuaugaaacagggucucac

SEQ ID NO: 1054434 - RNA, 24 nt, Human
ucaaagugcugggguuauaggcau

SEQ ID NO: 1054435 - RNA, 19 nt, Human
ucaagcgauucucuugccu

SEQ ID NO: 1054436 - RNA, 24 nt, Human
ucacucugucgcccaggcuggagu

SEQ ID NO: 1054437 - RNA, 23 nt, Human
ucacugcagucuccgccucuugg

SEQ ID NO: 1054438 - RNA, 23 nt, Human
ucacugcagucuccgccucuugg

SEQ ID NO: 1054439 - RNA, 24 nt, Human
ucacugcagucuccgccucuuggg

SEQ ID NO: 1054440 - RNA, 20 nt, Human
ucagccuccugaguagcugg

SEQ ID NO: 1054441 - RNA, 19 nt, Human
ucccccaaccucggccucc

SEQ ID NO: 1054442 - RNA, 19 nt, Human
ucccgaagugcugggauua

SEQ ID NO: 1054443 - RNA, 24 nt, Human
ucccgaagugcugggauuacaggc

SEQ ID NO: 1054444 - RNA, 19 nt, Human
uccgccucuuggguucaag

SEQ ID NO: 1054445 - RNA, 24 nt, Human
uccugaguagcugggauuacaggc

SEQ ID NO: 1054446 - RNA, 18 nt, Human
uccugggcucaagggauc

SEQ ID NO: 1054447 - RNA, 18 nt, Human
ucgcccaggcuggagugc

SEQ ID NO: 1054448 - RNA, 18 nt, Human
ucggccucccgaagugcu

SEQ ID NO: 1054449 - RNA, 24 nt, Human
ucucaaagugcugggguuauaggc

SEQ ID NO: 1054450 - RNA, 24 nt, Human
ucucaccauguuggccaggcuggu

SEQ ID NO: 1054451 - RNA, 22 nt, Human
ucucacucugucgcccaggcug

SEQ ID NO: 1054452 - RNA, 23 nt, Human
ucucacucugucgcccaggcugg

SEQ ID NO: 1054453 - RNA, 24 nt, Human
ucucacucugucgcccaggcugga

SEQ ID NO: 1054454 - RNA, 26 nt, Human
ucucacucugucgcccaggcuggagu

SEQ ID NO: 1054455 - RNA, 27 nt, Human
ucucacucugucgcccaggcuggagug

SEQ ID NO: 1054456 - RNA, 24 nt, Human
ucugucgcccaggcuggagugcaa

SEQ ID NO: 1054457 - RNA, 22 nt, Human
ucuugaacuccugggcucaagg

SEQ ID NO: 1054458 - RNA, 22 nt, Human
ugaaacagggucucacucuguc

SEQ ID NO: 1054459 - RNA, 20 nt, Human
ugaccucagaugauccccca

SEQ ID NO: 1054460 - RNA, 18 nt, Human
ugacgguaacacuuaaca

SEQ ID NO: 1054461 - RNA, 24 nt, Human
ugaggcaggaagacugcuugagcc

SEQ ID NO: 1054462 - RNA, 25 nt, Human
ugaggcaggaagacugcuugagccc

SEQ ID NO: 1054463 - RNA, 24 nt, Human
ugcccacacuggucuugaacuccu

SEQ ID NO: 1054464 - RNA, 24 nt, Human
ugccucagccuccugaguagcugg

SEQ ID NO: 1054465 - RNA, 19 nt, Human
uggagugcaauggcaugau

SEQ ID NO: 1054466 - RNA, 24 nt, Human
uggagugcaauggcaugaucuugg

SEQ ID NO: 1054467 - RNA, 19 nt, Human
uggcaugaucuuggcucac

SEQ ID NO: 1054468 - RNA, 21 nt, Human
uggcaugaucuuggcucacug

SEQ ID NO: 1054469 - RNA, 24 nt, Human
uggccaggcuggucucaaacuccu

SEQ ID NO: 1054470 - RNA, 19 nt, Human
uggcuuacaccuguagucc

SEQ ID NO: 1054471 - RNA, 21 nt, Human
uggcuuacaccuguaguccua

SEQ ID NO: 1054472 - RNA, 21 nt, Human
ugggacuacaggcacaugcca

SEQ ID NO: 1054473 - RNA, 22 nt, Human
ugggacuacaggcacaugccac

SEQ ID NO: 1054474 - RNA, 24 nt, Human
ugggacuacaggcacaugccacca

SEQ ID NO: 1054475 - RNA, 21 nt, Human
ugggauuacaggcacucgcca

SEQ ID NO: 1054476 - RNA, 22 nt, Human
ugggauuacaggcacucgccac

SEQ ID NO: 1054477 - RNA, 22 nt, Human
ugggauuacaggcacucgccac

SEQ ID NO: 1054478 - RNA, 22 nt, Human
ugggauuacaggcacucgccac

SEQ ID NO: 1054479 - RNA, 24 nt, Human
ugggauuacaggcacucgccacua

SEQ ID NO: 1054480 - RNA, 18 nt, Human
ugggauuacaggcaugag

SEQ ID NO: 1054481 - RNA, 19 nt, Human
ugggauuacaggcaugagc

SEQ ID NO: 1054482 - RNA, 21 nt, Human
ugggauuacaggcaugagcca

SEQ ID NO: 1054483 - RNA, 22 nt, Human
ugggauuacaggcaugagccac

SEQ ID NO: 1054484 - RNA, 23 nt, Human
ugggauuacaggcaugagccacc

SEQ ID NO: 1054485 - RNA, 24 nt, Human
ugggauuacaggcaugagccaccg

SEQ ID NO: 1054486 - RNA, 24 nt, Human
ugggauuacaggcaugagccaccg

SEQ ID NO: 1054487 - RNA, 26 nt, Human
ugggauuacaggcaugagccaccgca

SEQ ID NO: 1054488 - RNA, 19 nt, Human
ugggcucaagggaucugcu

SEQ ID NO: 1054489 - RNA, 24 nt, Human
uggggucucaccauguuggccagg

SEQ ID NO: 1054490 - RNA, 18 nt, Human
ugggguuauaggcaugag

SEQ ID NO: 1054491 - RNA, 22 nt, Human
ugggguuauaggcaugagccua

SEQ ID NO: 1054492 - RNA, 23 nt, Human
ugggguuauaggcaugagccuau

SEQ ID NO: 1054493 - RNA, 20 nt, Human
uggguucaagcgauucucuu

SEQ ID NO: 1054494 - RNA, 23 nt, Human
uggguucaagcgauucucuugcc

SEQ ID NO: 1054495 - RNA, 24 nt, Human
uggguucaagcgauucucuugccu

SEQ ID NO: 1054496 - RNA, 22 nt, Human
ugguggcuuacaccuguagucc

SEQ ID NO: 1054497 - RNA, 23 nt, Human
uguagagacagaguuucaccaug

SEQ ID NO: 1054498 - RNA, 20 nt, Human
ugucgcccaggcuggagugc

SEQ ID NO: 1054499 - RNA, 18 nt, Human
uuaguagagauggggucu

SEQ ID NO: 1054500 - RNA, 24 nt, Human
uuaguagagauggggucucaccau

SEQ ID NO: 1054501 - RNA, 23 nt, Human
uucaagcgauucucuugccucag

SEQ ID NO: 1054502 - RNA, 22 nt, Human
uucaagggaagguauaaaugcc

SEQ ID NO: 1054503 - RNA, 23 nt, Human
uuguauuuuuaguagagaugggg

SEQ ID NO: 1054504 - RNA, 21 nt, Human
uuucaccauguugcccacacu

SEQ ID NO: 1054505 - RNA, 23 nt, Human
uuuuaaauuuuccucuucaaggg

SEQ ID NO: 1054506 - RNA, 25 nt, Human
uuuuauuuauuuaugaaacaggguc

SEQ ID NO: 1054507 - RNA, 20 nt, Human
uuuuguauuuuuaguagaga

SEQ ID NO: 1054508 - RNA, 24 nt, Human
uuuuuaguagagauggggucucac

SEQ ID NO: 1054509 - RNA, 20 nt, Human
uuuuuguauuuucuguagag

SEQ ID NO: 1054510 - RNA, 23 nt, Human
uuuuuguauuuucuguagagaca

SEQ ID NO: 1054511 - RNA, 21 nt, Human
uuuuuguauuuuuaguagaga

SEQ ID NO: 1054512 - RNA, 21 nt, Human
uuuuuuguauuuuuaguagag

SEQ ID NO: 1054513 - RNA, 19 nt, Human
gacguggcaccugcccuca

SEQ ID NO: 1054514 - RNA, 22 nt, Human
gcucaaucccgggcgccgcgac

SEQ ID NO: 1054515 - RNA, 19 nt, Human
aaaaaggaucaaacacuuu

SEQ ID NO: 1054516 - RNA, 19 nt, Human
aacaggggacacucagcgc

SEQ ID NO: 1054517 - RNA, 18 nt, Human
cacucagcgcagcagggc

SEQ ID NO: 1054518 - RNA, 21 nt, Human
cgaagagcagcggcgagaaga

SEQ ID NO: 1054519 - RNA, 19 nt, Human
gggucgaggcuaacagggg

SEQ ID NO: 1054520 - RNA, 24 nt, Human
uaacauauauaaaagcaagcaaaa

SEQ ID NO: 1054521 - RNA, 23 nt, Human
uacacauaacauauauaaaagca

SEQ ID NO: 1054522 - RNA, 20 nt, Human
uaggcucgggugggcggcgg

SEQ ID NO: 1054523 - RNA, 18 nt, Human
ucgcacaggcagagccuc

SEQ ID NO: 1054524 - RNA, 19 nt, Human
ugaguguggggugggacug

SEQ ID NO: 1054525 - RNA, 20 nt, Human
ugggacugcaagcacacgca

SEQ ID NO: 1054526 - RNA, 20 nt, Human
ugggccacgaagagcagcgg

SEQ ID NO: 1054527 - RNA, 22 nt, Human
uguggggugggacugcaagcac

SEQ ID NO: 1054528 - RNA, 19 nt, Human
uuuuuuuuuuuuuuuuugu

SEQ ID NO: 1054529 - RNA, 20 nt, Human
uuuuuuuuuuuuuuuuuugg

SEQ ID NO: 1054530 - RNA, 18 nt, Human
aacccacgucucuccucu

SEQ ID NO: 1054531 - RNA, 23 nt, Human
aacccacgucucuccucuacccu

SEQ ID NO: 1054532 - RNA, 23 nt, Human
aacuggcacccucgacaggcucu

SEQ ID NO: 1054533 - RNA, 29 nt, Human
aagcaagaggaggagguaggagggacccc

SEQ ID NO: 1054534 - RNA, 18 nt, Human
agaucaggaguuggagac

SEQ ID NO: 1054535 - RNA, 20 nt, Human
aggaggaagcaggacccagc

SEQ ID NO: 1054536 - RNA, 20 nt, Human
aggaggagguaggaguugga

SEQ ID NO: 1054537 - RNA, 29 nt, Human
agguaggaguuggaggauggggggacccc

SEQ ID NO: 1054538 - RNA, 20 nt, Human
auaaaccaaugaucuugccc

SEQ ID NO: 1054539 - RNA, 21 nt, Human
aucuugcccaaacccugaguu

SEQ ID NO: 1054540 - RNA, 22 nt, Human
caaaagucccugaggcaccuac

SEQ ID NO: 1054541 - RNA, 18 nt, Human
caggcucugggcccaacc

SEQ ID NO: 1054542 - RNA, 19 nt, Human
cccacuagcuuagccuacu

SEQ ID NO: 1054543 - RNA, 23 nt, Human
ccucgcaucagcuaacuggcacc

SEQ ID NO: 1054544 - RNA, 19 nt, Human
ccugaggcaccuacgcaga

SEQ ID NO: 1054545 - RNA, 20 nt, Human
gagucagugacaucaccagc

SEQ ID NO: 1054546 - RNA, 22 nt, Human
uaaauggaacccuaucuaaagu

SEQ ID NO: 1054547 - RNA, 21 nt, Human
uaauuuguccaagauccccac

SEQ ID NO: 1054548 - RNA, 20 nt, Human
uaggaguuggaggaugggug

SEQ ID NO: 1054549 - RNA, 21 nt, Human
ucucaacccacgucucuccuc

SEQ ID NO: 1054550 - RNA, 19 nt, Human
ugacaucaccagcgcuaga

SEQ ID NO: 1054551 - RNA, 22 nt, Human
ugggguccuggguuucacuaug

SEQ ID NO: 1054552 - RNA, 19 nt, Human
ugguacaaaaaucuuaaau

SEQ ID NO: 1054553 - RNA, 20 nt, Human
uuaaauggaacccuaucuaa

SEQ ID NO: 1054554 - RNA, 22 nt, Human
caaauccccucacaucuguguu

SEQ ID NO: 1054555 - RNA, 22 nt, Human
ucaaauccccucacaucugugu

SEQ ID NO: 1054556 - RNA, 19 nt, Human
uucaaauccccucacaucu

SEQ ID NO: 1054557 - RNA, 25 nt, Human
aaagaaacagggugaggggcucaag

SEQ ID NO: 1054558 - RNA, 21 nt, Human
aaccaaacagccaaggccaag

SEQ ID NO: 1054559 - RNA, 25 nt, Human
agggugaggggcucaagagagaggc

SEQ ID NO: 1054560 - RNA, 22 nt, Human
augguccuauuuauuuucagac

SEQ ID NO: 1054561 - RNA, 21 nt, Human
caaggagaggaggggcccuaa

SEQ ID NO: 1054562 - RNA, 18 nt, Human
cauucucgcuucacagaa

SEQ ID NO: 1054563 - RNA, 23 nt, Human
cauucucgcuucacagaaagaaa

SEQ ID NO: 1054564 - RNA, 24 nt, Human
ccacugcucucagcacugccuggc

SEQ ID NO: 1054565 - RNA, 24 nt, Human
ccccacugcucucagcacugccug

SEQ ID NO: 1054566 - RNA, 19 nt, Human
cccuaaggcuuagagaggc

SEQ ID NO: 1054567 - RNA, 19 nt, Human
ccucauccucagggguagg

SEQ ID NO: 1054568 - RNA, 22 nt, Human
ccucugaacucccaaaauguga

SEQ ID NO: 1054569 - RNA, 22 nt, Human
gaccaaccuugcucugccaucu

SEQ ID NO: 1054570 - RNA, 23 nt, Human
gagaagcacgggaacgcugaacu

SEQ ID NO: 1054571 - RNA, 22 nt, Human
gaggaccaaccuugcucugcca

SEQ ID NO: 1054572 - RNA, 25 nt, Human
gaggggcuuguccucauccucaggg

SEQ ID NO: 1054573 - RNA, 20 nt, Human
ggccaaggagaggaggggcc

SEQ ID NO: 1054574 - RNA, 19 nt, Human
ggugaggggcucaagagag

SEQ ID NO: 1054575 - RNA, 19 nt, Human
guaggccuccucugaacuc

SEQ ID NO: 1054576 - RNA, 23 nt, Human
guaggccuccucugaacucccaa

SEQ ID NO: 1054577 - RNA, 24 nt, Human
guaggccuccucugaacucccaaa

SEQ ID NO: 1054578 - RNA, 19 nt, Human
uaaccaaacagccaaggcc

SEQ ID NO: 1054579 - RNA, 22 nt, Human
uagggggaagcccccaucugcc

SEQ ID NO: 1054580 - RNA, 22 nt, Human
ucauccucagggguagggggaa

SEQ ID NO: 1054581 - RNA, 18 nt, Human
ucugaacucccaaaaugu

SEQ ID NO: 1054582 - RNA, 21 nt, Human
ugacaguuaaccaaacagcca

SEQ ID NO: 1054583 - RNA, 20 nt, Human
ugccagcccacagcuccggc

SEQ ID NO: 1054584 - RNA, 19 nt, Human
ugcccaagggagaagcacg

SEQ ID NO: 1054585 - RNA, 23 nt, Human
uguaggccuccucugaacuccca

SEQ ID NO: 1054586 - RNA, 23 nt, Human
aaacacauacccccaaccuggua

SEQ ID NO: 1054587 - RNA, 23 nt, Human
aaauauaaaagucaaacagcaua

SEQ ID NO: 1054588 - RNA, 23 nt, Human
aagaaagcauuccgguuccaacu

SEQ ID NO: 1054589 - RNA, 23 nt, Human
acucgguggucggacacggggca

SEQ ID NO: 1054590 - RNA, 24 nt, Human
acugucacaacucauaaaaccagc

SEQ ID NO: 1054591 - RNA, 22 nt, Human
agagacagcaagaggagcagag

SEQ ID NO: 1054592 - RNA, 25 nt, Human
agagacagcaagaggagccgguacc

SEQ ID NO: 1054593 - RNA, 26 nt, Human
agcaagaggagcagagguagaaagga

SEQ ID NO: 1054594 - RNA, 24 nt, Human
agcccacaccccaugaaaggcaaa

SEQ ID NO: 1054595 - RNA, 18 nt, Human
aggaaauaaacacauacc

SEQ ID NO: 1054596 - RNA, 19 nt, Human
aggaagggcagagagaggg

SEQ ID NO: 1054597 - RNA, 21 nt, Human
caaacaaacacagcuccuucc

SEQ ID NO: 1054598 - RNA, 21 nt, Human
cacccacggucugugugccug

SEQ ID NO: 1054599 - RNA, 21 nt, Human
caccccaugaaaggcaaauaa

SEQ ID NO: 1054600 - RNA, 23 nt, Human
cagagacagcaagaggagcagag

SEQ ID NO: 1054601 - RNA, 22 nt, Human
cccacaccccaugaaaggcaaa

SEQ ID NO: 1054602 - RNA, 25 nt, Human
cccacagccacggugaggagaccca

SEQ ID NO: 1054603 - RNA, 18 nt, Human
cccccaaccugguaacac

SEQ ID NO: 1054604 - RNA, 23 nt, Human
cccucgggcgcuggcuccucuuc

SEQ ID NO: 1054605 - RNA, 21 nt, Human
ccuccagccgccaguggcccc

SEQ ID NO: 1054606 - RNA, 22 nt, Human
ccucccgucacccccagcaugg

SEQ ID NO: 1054607 - RNA, 28 nt, Human
ccuccugccagcccacaccccaugaaag

SEQ ID NO: 1054608 - RNA, 22 nt, Human
cgagucacuuuuagcccgaggg

SEQ ID NO: 1054609 - RNA, 19 nt, Human
cgcacugcccacagccacg

SEQ ID NO: 1054610 - RNA, 19 nt, Human
cggccucgcugccugccgg

SEQ ID NO: 1054611 - RNA, 28 nt, Human
cgggcgcuggcuccucuucccucuuuuu

SEQ ID NO: 1054612 - RNA, 19 nt, Human
cucaucuuaucauagggca

SEQ ID NO: 1054613 - RNA, 21 nt, Human
cugugcuuccuuccaccuugc

SEQ ID NO: 1054614 - RNA, 22 nt, Human
cuuaaaaaucucuguuuugccc

SEQ ID NO: 1054615 - RNA, 19 nt, Human
cuugcauauuuggucagug

SEQ ID NO: 1054616 - RNA, 19 nt, Human
cuuuggggacuaaaaagag

SEQ ID NO: 1054617 - RNA, 19 nt, Human
gaaauaaacacauaccccc

SEQ ID NO: 1054618 - RNA, 19 nt, Human
gaccuccagccgccagugg

SEQ ID NO: 1054619 - RNA, 19 nt, Human
gcccagggcccgcccggcc

SEQ ID NO: 1054620 - RNA, 18 nt, Human
gcuccucuucccucuuuu

SEQ ID NO: 1054621 - RNA, 19 nt, Human
ggaaauaaacacauacccc

SEQ ID NO: 1054622 - RNA, 22 nt, Human
ggaaauaaacacauacccccaa

SEQ ID NO: 1054623 - RNA, 24 nt, Human
ggacuaaaaagaguuuuuaaauac

SEQ ID NO: 1054624 - RNA, 18 nt, Human
ggcaaauaaacccauuuc

SEQ ID NO: 1054625 - RNA, 18 nt, Human
ggcagagacagcaagagg

SEQ ID NO: 1054626 - RNA, 23 nt, Human
gggaggggcgcgagggcccaggg

SEQ ID NO: 1054627 - RNA, 24 nt, Human
uagggcaucaucuaauaauauucc

SEQ ID NO: 1054628 - RNA, 21 nt, Human
uaguuacaaaagccauuuuga

SEQ ID NO: 1054629 - RNA, 21 nt, Human
ucaggucccucacaacacugu

SEQ ID NO: 1054630 - RNA, 24 nt, Human
ucaguguuuguagugcaacugaau

SEQ ID NO: 1054631 - RNA, 21 nt, Human
ucaucuaauaauauuccaaau

SEQ ID NO: 1054632 - RNA, 20 nt, Human
ucgcacugcccacagccacg

SEQ ID NO: 1054633 - RNA, 19 nt, Human
ucuuuggggacuaaaaaga

SEQ ID NO: 1054634 - RNA, 22 nt, Human
ucuuuggggacuaaaaagaguu

SEQ ID NO: 1054635 - RNA, 24 nt, Human
ugaguaagaaagcauuccgguucc

SEQ ID NO: 1054636 - RNA, 25 nt, Human
ugccagcccacaccccaugaaaggc

SEQ ID NO: 1054637 - RNA, 21 nt, Human
ugccugugcuuccuuccaccu

SEQ ID NO: 1054638 - RNA, 20 nt, Human
ugggacgacaacaaacaaac

SEQ ID NO: 1054639 - RNA, 22 nt, Human
uucagaaaucaauaguuacaaa

SEQ ID NO: 1054640 - RNA, 21 nt, Human
uucgcacugcccacagccacg

SEQ ID NO: 1054641 - RNA, 21 nt, Human
uucuuuggggacuaaaaagag

SEQ ID NO: 1054642 - RNA, 19 nt, Human
aagcaggacagcuugaagg

SEQ ID NO: 1054643 - RNA, 20 nt, Human
aagguggggggugggaagga

SEQ ID NO: 1054644 - RNA, 21 nt, Human
agaaaagcaggacagcuugaa

SEQ ID NO: 1054645 - RNA, 22 nt, Human
cacagcaucaggagguccugag

SEQ ID NO: 1054646 - RNA, 23 nt, Human
caggcagacaucaaugaauacac

SEQ ID NO: 1054647 - RNA, 21 nt, Human
cuugaagguggggggugggaa

SEQ ID NO: 1054648 - RNA, 18 nt, Human
gugguugaauuacagcug

SEQ ID NO: 1054649 - RNA, 18 nt, Human
uacagaaaagcaggacag

SEQ ID NO: 1054650 - RNA, 19 nt, Human
ucugaagaccuuuuccugu

SEQ ID NO: 1054651 - RNA, 20 nt, Human
ugaagguggggggugggaag

SEQ ID NO: 1054652 - RNA, 23 nt, Human
ugccaagguuaaagacaugccac

SEQ ID NO: 1054653 - RNA, 22 nt, Human
uucaccuguaguagccguuuug

SEQ ID NO: 1054654 - RNA, 18 nt, Human
uugaauuacagcugauuu

SEQ ID NO: 1054655 - RNA, 23 nt, Human
aaugucuaucucuucugcuagac

SEQ ID NO: 1054656 - RNA, 20 nt, Human
caaugucuaucucuucugcu

SEQ ID NO: 1054657 - RNA, 24 nt, Human
cagcaaucagaaccauccuaggcc

SEQ ID NO: 1054658 - RNA, 23 nt, Human
ccgaucaggugauaaucucuuuu

SEQ ID NO: 1054659 - RNA, 18 nt, Human
ccuaggcaauuucagaug

SEQ ID NO: 1054660 - RNA, 22 nt, Human
cugaauaccagcaaucagaacc

SEQ ID NO: 1054661 - RNA, 20 nt, Human
gaaggaaggaauugccuggc

SEQ ID NO: 1054662 - RNA, 22 nt, Human
ggcugcagaaggauugggaucu

SEQ ID NO: 1054663 - RNA, 19 nt, Human
uaccagcaaucagaaccau

SEQ ID NO: 1054664 - RNA, 23 nt, Human
uaccagcaaucagaaccauccua

SEQ ID NO: 1054665 - RNA, 23 nt, Human
uaugcaauuauuuaaaaauuguu

SEQ ID NO: 1054666 - RNA, 20 nt, Human
ucuauccuauuguaaagcac

SEQ ID NO: 1054667 - RNA, 21 nt, Human
ugaaggaaggaauugccuggc

SEQ ID NO: 1054668 - RNA, 19 nt, Human
uggauguuggggcugcaga

SEQ ID NO: 1054669 - RNA, 23 nt, Human
uuacuguauccucagcaguucca

SEQ ID NO: 1054670 - RNA, 20 nt, Human
uucuugaaguguauggguaa

SEQ ID NO: 1054671 - RNA, 23 nt, Human
uucuugaaguguauggguaaaua

SEQ ID NO: 1054672 - RNA, 25 nt, Human
uugccuggccaauucauuacuguau

SEQ ID NO: 1054673 - RNA, 22 nt, Human
uuuucugaccuuugaacuccga

SEQ ID NO: 1054674 - RNA, 19 nt, Human
aaacagaacggucagccuu

SEQ ID NO: 1054675 - RNA, 20 nt, Human
aacacacacccccaggcccc

SEQ ID NO: 1054676 - RNA, 21 nt, Human
aauggauuugugugcugauuu

SEQ ID NO: 1054677 - RNA, 21 nt, Human
acacacacccccaggccccag

SEQ ID NO: 1054678 - RNA, 18 nt, Human
acacccccaggccccaga

SEQ ID NO: 1054679 - RNA, 24 nt, Human
acacccccaggccccagauccaaa

SEQ ID NO: 1054680 - RNA, 25 nt, Human
accaguauuugucacuuuauuuuuu

SEQ ID NO: 1054681 - RNA, 21 nt, Human
acccucacugggagcccuggc

SEQ ID NO: 1054682 - RNA, 18 nt, Human
aggagccaggaggcuggu

SEQ ID NO: 1054683 - RNA, 23 nt, Human
aggcuggacccucacugggagcc

SEQ ID NO: 1054684 - RNA, 21 nt, Human
aguguugacaggccacaggag

SEQ ID NO: 1054685 - RNA, 24 nt, Human
aguuaacaacagguucuuguacaa

SEQ ID NO: 1054686 - RNA, 25 nt, Human
caacacacacccccaggccccagau

SEQ ID NO: 1054687 - RNA, 20 nt, Human
cacccccaggccccagaucc

SEQ ID NO: 1054688 - RNA, 21 nt, Human
cacccccaggccccagaucca

SEQ ID NO: 1054689 - RNA, 22 nt, Human
cacccccaggccccagauccaa

SEQ ID NO: 1054690 - RNA, 19 nt, Human
cagcccuguggccccuucc

SEQ ID NO: 1054691 - RNA, 21 nt, Human
cagcccuguggccccuuccug

SEQ ID NO: 1054692 - RNA, 21 nt, Human
cagccuucuguggucuuaacc

SEQ ID NO: 1054693 - RNA, 23 nt, Human
caggaggagccaggaggcuggug

SEQ ID NO: 1054694 - RNA, 23 nt, Human
caggccacaggaggagccaggag

SEQ ID NO: 1054695 - RNA, 23 nt, Human
ccaacuggucuuccacgauguca

SEQ ID NO: 1054696 - RNA, 18 nt, Human
ccaggcuaaauaugugcc

SEQ ID NO: 1054697 - RNA, 21 nt, Human
ccagguggugccucucccccu

SEQ ID NO: 1054698 - RNA, 24 nt, Human
cccaccaacacacacccccaggcc

SEQ ID NO: 1054699 - RNA, 25 nt, Human
cccaccaacacacacccccaggccc

SEQ ID NO: 1054700 - RNA, 19 nt, Human
cccccaccaacacacaccc

SEQ ID NO: 1054701 - RNA, 19 nt, Human
cccccaggccccagaucca

SEQ ID NO: 1054702 - RNA, 18 nt, Human
cccccuacucagagccca

SEQ ID NO: 1054703 - RNA, 19 nt, Human
cccccuacucagagcccag

SEQ ID NO: 1054704 - RNA, 27 nt, Human
cccugcacucagcccuguggccccuuc

SEQ ID NO: 1054705 - RNA, 18 nt, Human
cccuuccuuuccuuucuc

SEQ ID NO: 1054706 - RNA, 19 nt, Human
ccucacugggagcccuggc

SEQ ID NO: 1054707 - RNA, 23 nt, Human
ccuccccaucuacuaucccaggc

SEQ ID NO: 1054708 - RNA, 24 nt, Human
ccuuucccuuccuuuccuuucuca

SEQ ID NO: 1054709 - RNA, 23 nt, Human
cggacacuugggacccugacccc

SEQ ID NO: 1054710 - RNA, 22 nt, Human
cucccuccccaucuacuauccc

SEQ ID NO: 1054711 - RNA, 20 nt, Human
cuguggucuuaaccccuggg

SEQ ID NO: 1054712 - RNA, 18 nt, Human
cuugggacccugaccccu

SEQ ID NO: 1054713 - RNA, 21 nt, Human
gaccccuuugucccugcacuc

SEQ ID NO: 1054714 - RNA, 22 nt, Human
gaggcuuuggcaccagaggcuu

SEQ ID NO: 1054715 - RNA, 18 nt, Human
gccaucugggguggccag

SEQ ID NO: 1054716 - RNA, 20 nt, Human
gccuucuguggucuuaaccc

SEQ ID NO: 1054717 - RNA, 19 nt, Human
ggaaauaguguagaugugg

SEQ ID NO: 1054718 - RNA, 20 nt, Human
ggaaggagagaccugcccau

SEQ ID NO: 1054719 - RNA, 24 nt, Human
ggacccugaccccuuugucccugc

SEQ ID NO: 1054720 - RNA, 19 nt, Human
ggcaccagaggcuuggcua

SEQ ID NO: 1054721 - RNA, 18 nt, Human
gggcagcuauuucuagac

SEQ ID NO: 1054722 - RNA, 23 nt, Human
ggggggugguggcaucuggacaa

SEQ ID NO: 1054723 - RNA, 22 nt, Human
ggguggguagcugggggcccgg

SEQ ID NO: 1054724 - RNA, 18 nt, Human
guggccccuuccuguccu

SEQ ID NO: 1054725 - RNA, 21 nt, Human
uaaccccuggguauuuuucug

SEQ ID NO: 1054726 - RNA, 23 nt, Human
uaccuggaauggauuugugugcu

SEQ ID NO: 1054727 - RNA, 19 nt, Human
uccaaggcagucuucccca

SEQ ID NO: 1054728 - RNA, 22 nt, Human
ucccccaccaacacacaccccc

SEQ ID NO: 1054729 - RNA, 22 nt, Human
ucccccaccaacacacaccccc

SEQ ID NO: 1054730 - RNA, 18 nt, Human
ucccccuacucagagccc

SEQ ID NO: 1054731 - RNA, 22 nt, Human
ucccuuccuuuccuuucucagg

SEQ ID NO: 1054732 - RNA, 23 nt, Human
uccucagggcuguggggcaggca

SEQ ID NO: 1054733 - RNA, 23 nt, Human
ucuuaggggggugguggcaucug

SEQ ID NO: 1054734 - RNA, 19 nt, Human
ugacaaaaccaaaaacaga

SEQ ID NO: 1054735 - RNA, 19 nt, Human
uggauuugugugcugauuu

SEQ ID NO: 1054736 - RNA, 22 nt, Human
uggccagagaguguugacaggc

SEQ ID NO: 1054737 - RNA, 21 nt, Human
uggggcaggcacuagggggcc

SEQ ID NO: 1054738 - RNA, 19 nt, Human
ugggguggguagcuggggg

SEQ ID NO: 1054739 - RNA, 20 nt, Human
uguacaaaaaucucaccaag

SEQ ID NO: 1054740 - RNA, 20 nt, Human
uuccccagguggugccucuc

SEQ ID NO: 1054741 - RNA, 18 nt, Human
uuccccugaccuugggcc

SEQ ID NO: 1054742 - RNA, 18 nt, Human
uuccucagggcugugggg

SEQ ID NO: 1054743 - RNA, 19 nt, Human
uuccucagggcuguggggc

SEQ ID NO: 1054744 - RNA, 20 nt, Human
uuccucagggcuguggggca

SEQ ID NO: 1054745 - RNA, 20 nt, Human
uuccuuuccuuucucaggcc

SEQ ID NO: 1054746 - RNA, 22 nt, Human
uucuguggucuuaaccccuggg

SEQ ID NO: 1054747 - RNA, 22 nt, Human
uuuaagagcugaggcuggaccc

SEQ ID NO: 1054748 - RNA, 23 nt, Human
aaacagaggcaggcuccccagga

SEQ ID NO: 1054749 - RNA, 24 nt, Human
aaaccccaacauuauuaaaaccau

SEQ ID NO: 1054750 - RNA, 20 nt, Human
aaauaaaaugugacauuucu

SEQ ID NO: 1054751 - RNA, 23 nt, Human
aacauuauuaaaaccauacugaa

SEQ ID NO: 1054752 - RNA, 19 nt, Human
aagcaagaauaggguccag

SEQ ID NO: 1054753 - RNA, 20 nt, Human
aagcugcuccagauggguga

SEQ ID NO: 1054754 - RNA, 21 nt, Human
acacaguuucccugcugggcc

SEQ ID NO: 1054755 - RNA, 21 nt, Human
acuucagagauuccaaagaag

SEQ ID NO: 1054756 - RNA, 21 nt, Human
agagaaugaagggcuggcaca

SEQ ID NO: 1054757 - RNA, 19 nt, Human
agaggcaggcuccccagga

SEQ ID NO: 1054758 - RNA, 22 nt, Human
agcucguuggcaguuggugcug

SEQ ID NO: 1054759 - RNA, 20 nt, Human
aggaugugcagcaaaucugg

SEQ ID NO: 1054760 - RNA, 22 nt, Human
aggcacucagaaaaacaguuuu

SEQ ID NO: 1054761 - RNA, 30 nt, Human
aggccaaagugugugugugugugugugugg

SEQ ID NO: 1054762 - RNA, 19 nt, Human
aggcgauagcacagagcuu

SEQ ID NO: 1054763 - RNA, 19 nt, Human
agggcuggcacacucugcc

SEQ ID NO: 1054764 - RNA, 21 nt, Human
aucagcccuaccccaaaccaa

SEQ ID NO: 1054765 - RNA, 24 nt, Human
caaaccaacuaugugacccagggc

SEQ ID NO: 1054766 - RNA, 23 nt, Human
caacuaugugacccagggcaagu

SEQ ID NO: 1054767 - RNA, 25 nt, Human
caagaauaggguccagaguaggauu

SEQ ID NO: 1054768 - RNA, 23 nt, Human
cagaaaaacaguuucuuuaccau

SEQ ID NO: 1054769 - RNA, 22 nt, Human
cagagauuccaaagaagcagag

SEQ ID NO: 1054770 - RNA, 24 nt, Human
cagcaagggaugucaugaccaaua

SEQ ID NO: 1054771 - RNA, 21 nt, Human
cagcaggccucaaagaaccga

SEQ ID NO: 1054772 - RNA, 22 nt, Human
caggaaaaggugaauuacagca

SEQ ID NO: 1054773 - RNA, 24 nt, Human
caucuucaucccuaggcuugggag

SEQ ID NO: 1054774 - RNA, 23 nt, Human
ccaaagaagcagaggguccucca

SEQ ID NO: 1054775 - RNA, 18 nt, Human
ccagaucagauaccucac

SEQ ID NO: 1054776 - RNA, 24 nt, Human
ccccauaccagauuggccuccuaa

SEQ ID NO: 1054777 - RNA, 21 nt, Human
ccuaucagcugggacaggaau

SEQ ID NO: 1054778 - RNA, 18 nt, Human
cucaaagaaccgaaacau

SEQ ID NO: 1054779 - RNA, 21 nt, Human
cucaguuuccccacaagugau

SEQ ID NO: 1054780 - RNA, 19 nt, Human
cuccuguauguaaacuaca

SEQ ID NO: 1054781 - RNA, 22 nt, Human
cugaaugcuuaacacugauugc

SEQ ID NO: 1054782 - RNA, 18 nt, Human
gaauggucaggccaaagu

SEQ ID NO: 1054783 - RNA, 23 nt, Human
gacaggaauggguuagcagcagc

SEQ ID NO: 1054784 - RNA, 18 nt, Human
gacucugggcagcugcuc

SEQ ID NO: 1054785 - RNA, 24 nt, Human
gagaaugugaggagaaccgguacc

SEQ ID NO: 1054786 - RNA, 18 nt, Human
gcucugucccguucuuga

SEQ ID NO: 1054787 - RNA, 19 nt, Human
gcuggaauuggaaauccca

SEQ ID NO: 1054788 - RNA, 21 nt, Human
gugugugcgugcgugcgugcg

SEQ ID NO: 1054789 - RNA, 21 nt, Human
gugugugugugugugugcgug

SEQ ID NO: 1054790 - RNA, 20 nt, Human
gugugugugugugugugugu

SEQ ID NO: 1054791 - RNA, 21 nt, Human
gugugugugugugugugugug

SEQ ID NO: 1054792 - RNA, 21 nt, Human
gugugugugugugugugugug

SEQ ID NO: 1054793 - RNA, 21 nt, Human
gugugugugugugugugugug

SEQ ID NO: 1054794 - RNA, 21 nt, Human
gugugugugugugugugugug

SEQ ID NO: 1054795 - RNA, 22 nt, Human
uaacauguauuauauuacuguu

SEQ ID NO: 1054796 - RNA, 20 nt, Human
uaaggcacucagaaaaacag

SEQ ID NO: 1054797 - RNA, 26 nt, Human
uacaagugaccacuccagggaaacag

SEQ ID NO: 1054798 - RNA, 22 nt, Human
uacucagggcagugaaggcuga

SEQ ID NO: 1054799 - RNA, 18 nt, Human
uacuucagagauuccaaa

SEQ ID NO: 1054800 - RNA, 22 nt, Human
uagaaggagggaacaccagagg

SEQ ID NO: 1054801 - RNA, 20 nt, Human
uagaaugcacacaguuuccc

SEQ ID NO: 1054802 - RNA, 21 nt, Human
uagaaugcacacaguuucccu

SEQ ID NO: 1054803 - RNA, 25 nt, Human
uagaaugcacacaguuucccugcug

SEQ ID NO: 1054804 - RNA, 23 nt, Human
uaggaaaacacuauugccaaaag

SEQ ID NO: 1054805 - RNA, 23 nt, Human
uagggcccucucccuuuccccag

SEQ ID NO: 1054806 - RNA, 23 nt, Human
uauugccaaaagaugagugagag

SEQ ID NO: 1054807 - RNA, 20 nt, Human
ucaagaaaguagcuaggacu

SEQ ID NO: 1054808 - RNA, 23 nt, Human
ucagagauuccaaagaagcagag

SEQ ID NO: 1054809 - RNA, 24 nt, Human
ucagagauuccaaagaagcagagg

SEQ ID NO: 1054810 - RNA, 18 nt, Human
ucagggcagugaaggcug

SEQ ID NO: 1054811 - RNA, 20 nt, Human
uccaaagaagcagagggucc

SEQ ID NO: 1054812 - RNA, 19 nt, Human
ucccugcugggccuuccac

SEQ ID NO: 1054813 - RNA, 22 nt, Human
ucucagauacccuaucagcugg

SEQ ID NO: 1054814 - RNA, 19 nt, Human
ucucccuuuccccagcagg

SEQ ID NO: 1054815 - RNA, 25 nt, Human
ugaaagacuggauuuuuguugcaga

SEQ ID NO: 1054816 - RNA, 24 nt, Human
ugaagagaaugaagggcuggcaca

SEQ ID NO: 1054817 - RNA, 21 nt, Human
ugaagagacuaaaacuggcca

SEQ ID NO: 1054818 - RNA, 22 nt, Human
ugagaaaacuucaggguguggc

SEQ ID NO: 1054819 - RNA, 23 nt, Human
ugaggagaacaagaguuuuuggc

SEQ ID NO: 1054820 - RNA, 23 nt, Human
ugagugagagauugaagagaaug

SEQ ID NO: 1054821 - RNA, 24 nt, Human
ugcgugcgugcgugcgugcgugug

SEQ ID NO: 1054822 - RNA, 24 nt, Human
ugcgugcgugcgugcgugugugug

SEQ ID NO: 1054823 - RNA, 25 nt, Human
ugcgugcgugcgugugugugugugu

SEQ ID NO: 1054824 - RNA, 21 nt, Human
ugcgugcgugugugugugugu

SEQ ID NO: 1054825 - RNA, 19 nt, Human
ugcgugugugugugugugu

SEQ ID NO: 1054826 - RNA, 21 nt, Human
uggaaagggugcuagcuggaa

SEQ ID NO: 1054827 - RNA, 20 nt, Human
uggcauuugcuguugaccuu

SEQ ID NO: 1054828 - RNA, 23 nt, Human
ugggagcagugcacacugugcug

SEQ ID NO: 1054829 - RNA, 23 nt, Human
ugugauaggcucggagaaagaau

SEQ ID NO: 1054830 - RNA, 24 nt, Human
ugugugcgugcgugcgugcgugcg

SEQ ID NO: 1054831 - RNA, 19 nt, Human
ugugugugugugcgugcgu

SEQ ID NO: 1054832 - RNA, 20 nt, Human
ugugugugugugcgugcgug

SEQ ID NO: 1054833 - RNA, 22 nt, Human
ugugugugugugcgugcgugcg

SEQ ID NO: 1054834 - RNA, 18 nt, Human
ugugugugugugugugug

SEQ ID NO: 1054835 - RNA, 18 nt, Human
ugugugugugugugugug

SEQ ID NO: 1054836 - RNA, 18 nt, Human
ugugugugugugugugug

SEQ ID NO: 1054837 - RNA, 18 nt, Human
ugugugugugugugugug

SEQ ID NO: 1054838 - RNA, 18 nt, Human
ugugugugugugugugug

SEQ ID NO: 1054839 - RNA, 18 nt, Human
ugugugugugugugugug

SEQ ID NO: 1054840 - RNA, 18 nt, Human
ugugugugugugugugug

SEQ ID NO: 1054841 - RNA, 19 nt, Human
ugugugugugugugugugc

SEQ ID NO: 1054842 - RNA, 21 nt, Human
ugugugugugugugugugugc

SEQ ID NO: 1054843 - RNA, 21 nt, Human
ugugugugugugugugugugu

SEQ ID NO: 1054844 - RNA, 21 nt, Human
ugugugugugugugugugugu

SEQ ID NO: 1054845 - RNA, 21 nt, Human
ugugugugugugugugugugu

SEQ ID NO: 1054846 - RNA, 21 nt, Human
ugugugugugugugugugugu

SEQ ID NO: 1054847 - RNA, 21 nt, Human
ugugugugugugugugugugu

SEQ ID NO: 1054848 - RNA, 21 nt, Human
ugugugugugugugugugugu

SEQ ID NO: 1054849 - RNA, 21 nt, Human
ugugugugugugugugugugu

SEQ ID NO: 1054850 - RNA, 21 nt, Human
ugugugugugugugugugugu

SEQ ID NO: 1054851 - RNA, 21 nt, Human
ugugugugugugugugugugu

SEQ ID NO: 1054852 - RNA, 21 nt, Human
ugugugugugugugugugugu

SEQ ID NO: 1054853 - RNA, 21 nt, Human
ugugugugugugugugugugu

SEQ ID NO: 1054854 - RNA, 21 nt, Human
ugugugugugugugugugugu

SEQ ID NO: 1054855 - RNA, 22 nt, Human
ugugugugugugugugugugug

SEQ ID NO: 1054856 - RNA, 22 nt, Human
ugugugugugugugugugugug

SEQ ID NO: 1054857 - RNA, 18 nt, Human
uguguuaguagaaggagg

SEQ ID NO: 1054858 - RNA, 26 nt, Human
uuauagggcccucucccuuuccccag

SEQ ID NO: 1054859 - RNA, 19 nt, Human
aaaaauucaaaaauuagcc

SEQ ID NO: 1054860 - RNA, 21 nt, Human
aaaacaaacaaacaaacaaac

SEQ ID NO: 1054861 - RNA, 22 nt, Human
aaacaaacaaacaaacaaacuc

SEQ ID NO: 1054862 - RNA, 23 nt, Human
aaacaaacaaacaaacaaacuca

SEQ ID NO: 1054863 - RNA, 23 nt, Human
aaacaaacaaacaaacucaccga

SEQ ID NO: 1054864 - RNA, 22 nt, Human
aaacaaacaaacucaccgagca

SEQ ID NO: 1054865 - RNA, 24 nt, Human
aaacaaacaaacucaccgagcagg

SEQ ID NO: 1054866 - RNA, 22 nt, Human
aaacccugacucuacuaaaaaa

SEQ ID NO: 1054867 - RNA, 18 nt, Human
aacauagugaaacccacu

SEQ ID NO: 1054868 - RNA, 20 nt, Human
aacauagugaaacccacucu

SEQ ID NO: 1054869 - RNA, 21 nt, Human
aacauagugaaacccacucuc

SEQ ID NO: 1054870 - RNA, 22 nt, Human
aagcagagaaguaggcucagag

SEQ ID NO: 1054871 - RNA, 18 nt, Human
aauugcuugaaccaggga

SEQ ID NO: 1054872 - RNA, 18 nt, Human
acaaacaaacaaacaaac

SEQ ID NO: 1054873 - RNA, 19 nt, Human
acagcuacugcuaccccuc

SEQ ID NO: 1054874 - RNA, 18 nt, Human
acccugacucuacuaaaa

SEQ ID NO: 1054875 - RNA, 20 nt, Human
accgagcaggaaaaagaagc

SEQ ID NO: 1054876 - RNA, 19 nt, Human
accuagagcuggaaagacc

SEQ ID NO: 1054877 - RNA, 20 nt, Human
accuagagcuggaaagaccc

SEQ ID NO: 1054878 - RNA, 19 nt, Human
acuccagcacagccgaccu

SEQ ID NO: 1054879 - RNA, 24 nt, Human
acuccagccugggaagcaaaguga

SEQ ID NO: 1054880 - RNA, 28 nt, Human
acucugucucaaaaacaaacaaacaaac

SEQ ID NO: 1054881 - RNA, 18 nt, Human
acugcacuccagccuggg

SEQ ID NO: 1054882 - RNA, 26 nt, Human
agacaggcagaucaguugaggccagg

SEQ ID NO: 1054883 - RNA, 19 nt, Human
agagaaguaggcucagagc

SEQ ID NO: 1054884 - RNA, 24 nt, Human
agcaaagugagacucugucucaaa

SEQ ID NO: 1054885 - RNA, 22 nt, Human
agcagcccccuuuccacaaaga

SEQ ID NO: 1054886 - RNA, 23 nt, Human
agcagcccccuuuccacaaagau

SEQ ID NO: 1054887 - RNA, 18 nt, Human
agcaggaaaaagaagcac

SEQ ID NO: 1054888 - RNA, 23 nt, Human
agccaggcgugguggugggcgcc

SEQ ID NO: 1054889 - RNA, 22 nt, Human
agccuggccaacauagugaaac

SEQ ID NO: 1054890 - RNA, 24 nt, Human
agccuggccaacauagugaaaccc

SEQ ID NO: 1054891 - RNA, 24 nt, Human
agccugggaagcaaagugagacuc

SEQ ID NO: 1054892 - RNA, 19 nt, Human
agccugguccucuuccuuu

SEQ ID NO: 1054893 - RNA, 23 nt, Human
agcugggugugguggcgcaugcc

SEQ ID NO: 1054894 - RNA, 23 nt, Human
aggaauucucacgccuuggccuc

SEQ ID NO: 1054895 - RNA, 24 nt, Human
aggaauucucacgccuuggccucc

SEQ ID NO: 1054896 - RNA, 24 nt, Human
aggcacggugccucaugccuguaa

SEQ ID NO: 1054897 - RNA, 23 nt, Human
aggcaggagaaucgcuugaaccc

SEQ ID NO: 1054898 - RNA, 23 nt, Human
aggcaggagaaucgcuugaaccc

SEQ ID NO: 1054899 - RNA, 25 nt, Human
aggcaggagaaucgcuugaaccccg

SEQ ID NO: 1054900 - RNA, 21 nt, Human
aggccgaggcggacggaucac

SEQ ID NO: 1054901 - RNA, 26 nt, Human
aggcggacggaucacuugaggucagg

SEQ ID NO: 1054902 - RNA, 20 nt, Human
aggcugaggcaggagaaucg

SEQ ID NO: 1054903 - RNA, 24 nt, Human
aggcugaggcaggagaaucgcuug

SEQ ID NO: 1054904 - RNA, 24 nt, Human
aucgcaccacugcacuccagccug

SEQ ID NO: 1054905 - RNA, 22 nt, Human
caaacaaacaaacucaccgagc

SEQ ID NO: 1054906 - RNA, 23 nt, Human
caaagugagacucugucucaaaa

SEQ ID NO: 1054907 - RNA, 26 nt, Human
caccacugcacuccagccugggaagc

SEQ ID NO: 1054908 - RNA, 23 nt, Human
caccuucaccccagacauuauuc

SEQ ID NO: 1054909 - RNA, 20 nt, Human
cacgccuguaaucccagaac

SEQ ID NO: 1054910 - RNA, 24 nt, Human
cacgccuguaaucccagaacuuug

SEQ ID NO: 1054911 - RNA, 23 nt, Human
cacucucuacuaaaaauucaaaa

SEQ ID NO: 1054912 - RNA, 18 nt, Human
cacugcacuccagccugg

SEQ ID NO: 1054913 - RNA, 19 nt, Human
cacugcacuccagccuggg

SEQ ID NO: 1054914 - RNA, 19 nt, Human
cacugcacuccagccuggg

SEQ ID NO: 1054915 - RNA, 24 nt, Human
cacugcacuccagccugggaagca

SEQ ID NO: 1054916 - RNA, 23 nt, Human
cacugugccgugcuuugcagggu

SEQ ID NO: 1054917 - RNA, 24 nt, Human
cagaacuuuggaaggccgaggcgg

SEQ ID NO: 1054918 - RNA, 24 nt, Human
cagaucaguugaggccaggaguuu

SEQ ID NO: 1054919 - RNA, 18 nt, Human
cagcacagccgaccuaga

SEQ ID NO: 1054920 - RNA, 19 nt, Human
cagccgaccuagagcugga

SEQ ID NO: 1054921 - RNA, 24 nt, Human
cagcuacuugggaggcuggggcag

SEQ ID NO: 1054922 - RNA, 21 nt, Human
caggaagccugguccucuucc

SEQ ID NO: 1054923 - RNA, 24 nt, Human
caggcagaucaguugaggccagga

SEQ ID NO: 1054924 - RNA, 18 nt, Human
caguucuuugggaggccg

SEQ ID NO: 1054925 - RNA, 20 nt, Human
caguucuuugggaggccgag

SEQ ID NO: 1054926 - RNA, 18 nt, Human
caucaggggaccauaggg

SEQ ID NO: 1054927 - RNA, 24 nt, Human
caugccuguaaucccaguucuuug

SEQ ID NO: 1054928 - RNA, 24 nt, Human
ccacaaagauggcuggagcccaga

SEQ ID NO: 1054929 - RNA, 22 nt, Human
ccaccccugcucaugcucagac

SEQ ID NO: 1054930 - RNA, 19 nt, Human
ccacugcacuccagccugg

SEQ ID NO: 1054931 - RNA, 20 nt, Human
ccacugcacuccagccuggg

SEQ ID NO: 1054932 - RNA, 21 nt, Human
ccacugcacuccagccuggga

SEQ ID NO: 1054933 - RNA, 22 nt, Human
ccacugcacuccagccugggaa

SEQ ID NO: 1054934 - RNA, 23 nt, Human
ccacugcacuccagccugggaag

SEQ ID NO: 1054935 - RNA, 24 nt, Human
ccacugcacuccagccugggaagc

SEQ ID NO: 1054936 - RNA, 25 nt, Human
ccacugcacuccagccugggaagca

SEQ ID NO: 1054937 - RNA, 24 nt, Human
ccagaccagccuggccaacauagu

SEQ ID NO: 1054938 - RNA, 25 nt, Human
ccgaggcggacggaucacuugaggu

SEQ ID NO: 1054939 - RNA, 21 nt, Human
ccgguagucccagcuacuugg

SEQ ID NO: 1054940 - RNA, 24 nt, Human
ccgguagucccagcuacuuggcag

SEQ ID NO: 1054941 - RNA, 21 nt, Human
ccucugaauuguggaggggga

SEQ ID NO: 1054942 - RNA, 19 nt, Human
ccuggccaaaguaaaaccc

SEQ ID NO: 1054943 - RNA, 22 nt, Human
ccuggccaacauagugaaaccc

SEQ ID NO: 1054944 - RNA, 23 nt, Human
ccuggccaacauagugaaaccca

SEQ ID NO: 1054945 - RNA, 22 nt, Human
ccuguaaucccaguucuuuggg

SEQ ID NO: 1054946 - RNA, 21 nt, Human
ccuguagucccagcuacuugg

SEQ ID NO: 1054947 - RNA, 18 nt, Human
ccuuucccucucggccac

SEQ ID NO: 1054948 - RNA, 26 nt, Human
cgaggcggacggaucacuugagguca

SEQ ID NO: 1054949 - RNA, 21 nt, Human
cgcaccacugcacuccagccu

SEQ ID NO: 1054950 - RNA, 23 nt, Human
cgccgguagucccagcuacuugg

SEQ ID NO: 1054951 - RNA, 18 nt, Human
cgccuguaaucccagaac

SEQ ID NO: 1054952 - RNA, 23 nt, Human
cgccuguaaucccagaacuuugg

SEQ ID NO: 1054953 - RNA, 23 nt, Human
cgcugccucccaccccugcucau

SEQ ID NO: 1054954 - RNA, 24 nt, Human
cggaucacuugaggucaggcguuc

SEQ ID NO: 1054955 - RNA, 21 nt, Human
cguuccagaccagccuggcca

SEQ ID NO: 1054956 - RNA, 18 nt, Human
cucaaaaacaaacaaaca

SEQ ID NO: 1054957 - RNA, 22 nt, Human
cucacgccuguaaucccagaac

SEQ ID NO: 1054958 - RNA, 24 nt, Human
cucacgccuguaaucccagaacuu

SEQ ID NO: 1054959 - RNA, 19 nt, Human
cucacgccuuggccuccac

SEQ ID NO: 1054960 - RNA, 19 nt, Human
cucagucucugacaggaag

SEQ ID NO: 1054961 - RNA, 24 nt, Human
cucaugccuguaaucccaguucuu

SEQ ID NO: 1054962 - RNA, 22 nt, Human
cucccaccccugcucaugcuca

SEQ ID NO: 1054963 - RNA, 19 nt, Human
cuggagcccagaagcagag

SEQ ID NO: 1054964 - RNA, 19 nt, Human
cuguuccuuagcccaugug

SEQ ID NO: 1054965 - RNA, 24 nt, Human
cuuaacgcugccucccaccccugc

SEQ ID NO: 1054966 - RNA, 20 nt, Human
cuuggccuccacuuuucugu

SEQ ID NO: 1054967 - RNA, 22 nt, Human
gaaggaacuuggaaacagauuu

SEQ ID NO: 1054968 - RNA, 25 nt, Human
gagacaggcagaucaguugaggcca

SEQ ID NO: 1054969 - RNA, 22 nt, Human
gagucuugggcugggugcuuca

SEQ ID NO: 1054970 - RNA, 19 nt, Human
gaucacuugaggucaggcg

SEQ ID NO: 1054971 - RNA, 25 nt, Human
gaucacuugaggucaggcguuccag

SEQ ID NO: 1054972 - RNA, 24 nt, Human
gaucaguugaggccaggaguuuaa

SEQ ID NO: 1054973 - RNA, 21 nt, Human
gcaaagugagacucugucuca

SEQ ID NO: 1054974 - RNA, 20 nt, Human
gcaccacugcacuccagccu

SEQ ID NO: 1054975 - RNA, 22 nt, Human
gccaacauagugaaacccacuc

SEQ ID NO: 1054976 - RNA, 21 nt, Human
gccucaugccuguaaucccag

SEQ ID NO: 1054977 - RNA, 20 nt, Human
gcugagaucgcaccacugca

SEQ ID NO: 1054978 - RNA, 20 nt, Human
gcuggagcccagaagcagag

SEQ ID NO: 1054979 - RNA, 21 nt, Human
gcuggagcccagaagcagaga

SEQ ID NO: 1054980 - RNA, 24 nt, Human
ggacaggggccgagacauguuucu

SEQ ID NO: 1054981 - RNA, 23 nt, Human
ggaggcugcaguaagcugagauc

SEQ ID NO: 1054982 - RNA, 24 nt, Human
ggaggcugcaguaagcugagaucg

SEQ ID NO: 1054983 - RNA, 23 nt, Human
ggaucacuugaggucaggcguuc

SEQ ID NO: 1054984 - RNA, 18 nt, Human
ggccgaggcggacggauc

SEQ ID NO: 1054985 - RNA, 21 nt, Human
ggcucacgccuguaaucccag

SEQ ID NO: 1054986 - RNA, 24 nt, Human
gggcgcgguggcucacgccuguaa

SEQ ID NO: 1054987 - RNA, 23 nt, Human
ggugccucaugccuguaauccca

SEQ ID NO: 1054988 - RNA, 24 nt, Human
ggugccucaugccuguaaucccag

SEQ ID NO: 1054989 - RNA, 23 nt, Human
gguggcucacgccuguaauccca

SEQ ID NO: 1054990 - RNA, 24 nt, Human
gguggcucacgccuguaaucccag

SEQ ID NO: 1054991 - RNA, 19 nt, Human
ggugugguggcgcaugccu

SEQ ID NO: 1054992 - RNA, 18 nt, Human
gugggcgccgguaguccc

SEQ ID NO: 1054993 - RNA, 20 nt, Human
uaacgcugccucccaccccu

SEQ ID NO: 1054994 - RNA, 19 nt, Human
uagacuccagcacagccga

SEQ ID NO: 1054995 - RNA, 23 nt, Human
uauaacaccugcagcuuggcaca

SEQ ID NO: 1054996 - RNA, 26 nt, Human
ucaggccgggcgcgguggcucacgcc

SEQ ID NO: 1054997 - RNA, 20 nt, Human
ucaugccuguaaucccaguu

SEQ ID NO: 1054998 - RNA, 20 nt, Human
uccagccugggaagcaaagu

SEQ ID NO: 1054999 - RNA, 21 nt, Human
uccguguucuccaggcaucug

SEQ ID NO: 1055000 - RNA, 23 nt, Human
ucgcaccacugcacuccagccug

SEQ ID NO: 1055001 - RNA, 22 nt, Human
ucgcuugaaccccggaagcgga

SEQ ID NO: 1055002 - RNA, 18 nt, Human
ucucacgccuuggccucc

SEQ ID NO: 1055003 - RNA, 19 nt, Human
ucuccaggcaucugguuca

SEQ ID NO: 1055004 - RNA, 21 nt, Human
ucucuacuaaaaauucaaaaa

SEQ ID NO: 1055005 - RNA, 22 nt, Human
ucucugacaggaagccuggucc

SEQ ID NO: 1055006 - RNA, 20 nt, Human
ucugacaggaagccuggucc

SEQ ID NO: 1055007 - RNA, 21 nt, Human
ucugugugaauuccugcaccc

SEQ ID NO: 1055008 - RNA, 20 nt, Human
ucuuugggaggccgagacag

SEQ ID NO: 1055009 - RNA, 19 nt, Human
ugacucugaugccucccuu

SEQ ID NO: 1055010 - RNA, 24 nt, Human
ugagaucgcaccacugcacuccag

SEQ ID NO: 1055011 - RNA, 27 nt, Human
ugaggaauucucacgccuuggccucca

SEQ ID NO: 1055012 - RNA, 20 nt, Human
ugaggcaggagaaucgcuug

SEQ ID NO: 1055013 - RNA, 24 nt, Human
ugaggcaggagaaucgcuugaacc

SEQ ID NO: 1055014 - RNA, 25 nt, Human
ugaggcaggagaaucgcuugaaccc

SEQ ID NO: 1055015 - RNA, 21 nt, Human
ugaggucaggcguuccagacc

SEQ ID NO: 1055016 - RNA, 18 nt, Human
ugccucaugccuguaauc

SEQ ID NO: 1055017 - RNA, 21 nt, Human
ugccucaugccuguaauccca

SEQ ID NO: 1055018 - RNA, 22 nt, Human
ugccucaugccuguaaucccag

SEQ ID NO: 1055019 - RNA, 22 nt, Human
ugccucccaccccugcucaugc

SEQ ID NO: 1055020 - RNA, 23 nt, Human
ugccuguaaucccaguucuuugg

SEQ ID NO: 1055021 - RNA, 23 nt, Human
ugccuguagucccagcuacuugg

SEQ ID NO: 1055022 - RNA, 24 nt, Human
ugccuguagucccagcuacuuggg

SEQ ID NO: 1055023 - RNA, 24 nt, Human
uggaaggccgaggcggacggauca

SEQ ID NO: 1055024 - RNA, 18 nt, Human
uggagggggacaggggcc

SEQ ID NO: 1055025 - RNA, 24 nt, Human
uggcacaacagcuacugcuacccc

SEQ ID NO: 1055026 - RNA, 21 nt, Human
uggcucacgccuguaauccca

SEQ ID NO: 1055027 - RNA, 22 nt, Human
uggcucacgccuguaaucccag

SEQ ID NO: 1055028 - RNA, 24 nt, Human
ugggaggccgagacaggcagauca

SEQ ID NO: 1055029 - RNA, 20 nt, Human
ugggcaaauccuagacucca

SEQ ID NO: 1055030 - RNA, 21 nt, Human
uggggcagaauugcuugaacc

SEQ ID NO: 1055031 - RNA, 18 nt, Human
ugggugugguggcgcaug

SEQ ID NO: 1055032 - RNA, 19 nt, Human
ugguauaaagagcgcuggg

SEQ ID NO: 1055033 - RNA, 24 nt, Human
ugguggcgcaugccuguaguccca

SEQ ID NO: 1055034 - RNA, 21 nt, Human
uggugggcgccgguaguccca

SEQ ID NO: 1055035 - RNA, 24 nt, Human
uuagccaggcgugguggugggcgc

SEQ ID NO: 1055036 - RNA, 18 nt, Human
uuagcugggugugguggc

SEQ ID NO: 1055037 - RNA, 20 nt, Human
uuagcugggugugguggcgc

SEQ ID NO: 1055038 - RNA, 24 nt, Human
uuagcugggugugguggcgcaugc

SEQ ID NO: 1055039 - RNA, 19 nt, Human
uucaccuucaccccagaca

SEQ ID NO: 1055040 - RNA, 18 nt, Human
uucauagucggagagcuc

SEQ ID NO: 1055041 - RNA, 26 nt, Human
uuccacaaagauggcuggagcccaga

SEQ ID NO: 1055042 - RNA, 19 nt, Human
uuccuggguccucagucuc

SEQ ID NO: 1055043 - RNA, 22 nt, Human
uucuucacaaacacuuguuugc

SEQ ID NO: 1055044 - RNA, 22 nt, Human
uugaggccaggaguuuaagacc

SEQ ID NO: 1055045 - RNA, 24 nt, Human
uugcuugaaccagggagacagagg

SEQ ID NO: 1055046 - RNA, 25 nt, Human
uuggaaggccgaggcggacggauca

SEQ ID NO: 1055047 - RNA, 24 nt, Human
uuggcaggcugaggcaggagaauc

SEQ ID NO: 1055048 - RNA, 25 nt, Human
uuuucugugugaauuccugcacccg

SEQ ID NO: 1055049 - RNA, 21 nt, Human
acccagugucuguguggucug

SEQ ID NO: 1055050 - RNA, 18 nt, Human
accccaccugucuccccg

SEQ ID NO: 1055051 - RNA, 24 nt, Human
accugucuccccggcuuccuuccg

SEQ ID NO: 1055052 - RNA, 20 nt, Human
aggccucgcucccccgugac

SEQ ID NO: 1055053 - RNA, 25 nt, Human
cagcaggccucgcucccccgugacu

SEQ ID NO: 1055054 - RNA, 18 nt, Human
cagcuucccgaguacccc

SEQ ID NO: 1055055 - RNA, 22 nt, Human
ccagugucuguguggucugggu

SEQ ID NO: 1055056 - RNA, 18 nt, Human
cccccgugacugcaccgc

SEQ ID NO: 1055057 - RNA, 28 nt, Human
cccccgugacugcaccgccggcccgcuc

SEQ ID NO: 1055058 - RNA, 24 nt, Human
cccggcuuccuuccggcccuuugu

SEQ ID NO: 1055059 - RNA, 19 nt, Human
cuccccggcuuccuuccgg

SEQ ID NO: 1055060 - RNA, 18 nt, Human
cuugacccagugucugug

SEQ ID NO: 1055061 - RNA, 20 nt, Human
cuugacccagugucugugug

SEQ ID NO: 1055062 - RNA, 21 nt, Human
cuugacccagugucugugugg

SEQ ID NO: 1055063 - RNA, 18 nt, Human
cuuugugcuugcucuccu

SEQ ID NO: 1055064 - RNA, 20 nt, Human
gacuuugugcuugcucuccu

SEQ ID NO: 1055065 - RNA, 20 nt, Human
guguggucugggucgccucc

SEQ ID NO: 1055066 - RNA, 22 nt, Human
ucagagguuuaaaaaacuucga

SEQ ID NO: 1055067 - RNA, 23 nt, Human
uccauuagaaguauuuuauuuua

SEQ ID NO: 1055068 - RNA, 24 nt, Human
uccauuagaaguauuuuauuuuaa

SEQ ID NO: 1055069 - RNA, 23 nt, Human
uggucugggucgccuccgaggcc

SEQ ID NO: 1055070 - RNA, 21 nt, Human
ugucuccccggcuuccuuccg

SEQ ID NO: 1055071 - RNA, 18 nt, Human
uguguuuucuucucuugc

SEQ ID NO: 1055072 - RNA, 20 nt, Human
uuguguuuucuucucuugcu

SEQ ID NO: 1055073 - RNA, 21 nt, Human
aaacauacagcaugaggaaug

SEQ ID NO: 1055074 - RNA, 18 nt, Human
aagaugccuaacacugcc

SEQ ID NO: 1055075 - RNA, 21 nt, Human
aaguggcuuuaauauaaaagu

SEQ ID NO: 1055076 - RNA, 24 nt, Human
aaugaaaugguugaaucacaaggu

SEQ ID NO: 1055077 - RNA, 18 nt, Human
acaagguagugcaagaca

SEQ ID NO: 1055078 - RNA, 20 nt, Human
acaagguagugcaagacagu

SEQ ID NO: 1055079 - RNA, 21 nt, Human
agauuugagaaagcucacaag

SEQ ID NO: 1055080 - RNA, 19 nt, Human
agguggccuuggacaaccu

SEQ ID NO: 1055081 - RNA, 21 nt, Human
aucuaaacauacagcaugagg

SEQ ID NO: 1055082 - RNA, 24 nt, Human
auuuccucaggccccuuuuccauu

SEQ ID NO: 1055083 - RNA, 19 nt, Human
auuugaauucccugcccuc

SEQ ID NO: 1055084 - RNA, 18 nt, Human
cacaagguagugcaagac

SEQ ID NO: 1055085 - RNA, 22 nt, Human
cacaguguucgauucgcuucua

SEQ ID NO: 1055086 - RNA, 19 nt, Human
ccacagauacuauauuuuc

SEQ ID NO: 1055087 - RNA, 19 nt, Human
ccauucguaucuaaaacag

SEQ ID NO: 1055088 - RNA, 24 nt, Human
ccauucguaucuaaaacaggcaga

SEQ ID NO: 1055089 - RNA, 21 nt, Human
ccggaaaauuuccucaggccc

SEQ ID NO: 1055090 - RNA, 19 nt, Human
ccucuagguggccuuggac

SEQ ID NO: 1055091 - RNA, 18 nt, Human
cgauaagccacauuuaac

SEQ ID NO: 1055092 - RNA, 21 nt, Human
cggcuuuaggcuccacccagc

SEQ ID NO: 1055093 - RNA, 22 nt, Human
cucaacuuaauguuuuugagau

SEQ ID NO: 1055094 - RNA, 19 nt, Human
gaaagcucacaagcuacaa

SEQ ID NO: 1055095 - RNA, 18 nt, Human
ggauggaaauuucacugu

SEQ ID NO: 1055096 - RNA, 24 nt, Human
guaaacuugaaguuaauuccauuu

SEQ ID NO: 1055097 - RNA, 24 nt, Human
gugauuguaucuaucauauuugug

SEQ ID NO: 1055098 - RNA, 20 nt, Human
uaaaacaggcagaucguuuc

SEQ ID NO: 1055099 - RNA, 19 nt, Human
uaaaaucacaaaucuaaac

SEQ ID NO: 1055100 - RNA, 18 nt, Human
uaagaugccuaacacugc

SEQ ID NO: 1055101 - RNA, 20 nt, Human
uaagaugccuaacacugcca

SEQ ID NO: 1055102 - RNA, 22 nt, Human
uaagaugccuaacacugccacc

SEQ ID NO: 1055103 - RNA, 25 nt, Human
uacauauaguaaaaucacaaaucua

SEQ ID NO: 1055104 - RNA, 21 nt, Human
uagauaguauguuauguuugg

SEQ ID NO: 1055105 - RNA, 23 nt, Human
uaguaaaaucacaaaucuaaaca

SEQ ID NO: 1055106 - RNA, 21 nt, Human
uaguauguuauguuugguuug

SEQ ID NO: 1055107 - RNA, 24 nt, Human
uauacaauuugccacagauacuau

SEQ ID NO: 1055108 - RNA, 22 nt, Human
uaucauauuugugcuucauuuu

SEQ ID NO: 1055109 - RNA, 19 nt, Human
uaucuuaaaagguauagag

SEQ ID NO: 1055110 - RNA, 27 nt, Human
uaucuuguuuuuauuuugauaguuuua

SEQ ID NO: 1055111 - RNA, 18 nt, Human
uauggauggaaauuucac

SEQ ID NO: 1055112 - RNA, 19 nt, Human
ucagcaguccuuuuuuaaa

SEQ ID NO: 1055113 - RNA, 22 nt, Human
ucaguauuuuauauuguuguga

SEQ ID NO: 1055114 - RNA, 19 nt, Human
uccucuagguggccuugga

SEQ ID NO: 1055115 - RNA, 22 nt, Human
ucuaagcagccacuguucuggu

SEQ ID NO: 1055116 - RNA, 18 nt, Human
ugaaaucaucuacaaaga

SEQ ID NO: 1055117 - RNA, 26 nt, Human
ugaaaugguugaaucacaagguagug

SEQ ID NO: 1055118 - RNA, 22 nt, Human
ugacaaauauaugcagcuacau

SEQ ID NO: 1055119 - RNA, 21 nt, Human
ugagaaagcucacaagcuaca

SEQ ID NO: 1055120 - RNA, 21 nt, Human
uggaagaaaaggaaaugccuu

SEQ ID NO: 1055121 - RNA, 21 nt, Human
uggcuucuucuuuucagccga

SEQ ID NO: 1055122 - RNA, 21 nt, Human
ugguauuggaagaaaaggaaa

SEQ ID NO: 1055123 - RNA, 25 nt, Human
uguagucaggauacuuaauaauacc

SEQ ID NO: 1055124 - RNA, 18 nt, Human
ugugcugggaaugcaaca

SEQ ID NO: 1055125 - RNA, 18 nt, Human
ugugcuucauuuuuaucc

SEQ ID NO: 1055126 - RNA, 25 nt, Human
uuaaaaaacaucuaaacaaauuuua

SEQ ID NO: 1055127 - RNA, 18 nt, Human
uuaaaugaacaguauucc

SEQ ID NO: 1055128 - RNA, 24 nt, Human
uuuuugagauucauacagguuguu

SEQ ID NO: 1055129 - RNA, 23 nt, Human
aaauuuaaauuuuccuuccucag

SEQ ID NO: 1055130 - RNA, 19 nt, Human
acaccaacccuccacaaag

SEQ ID NO: 1055131 - RNA, 25 nt, Human
accaagcccaugacugacccacacc

SEQ ID NO: 1055132 - RNA, 23 nt, Human
acccuccacaaagagguuacggc

SEQ ID NO: 1055133 - RNA, 25 nt, Human
agaggucagcccugucaagaguuuu

SEQ ID NO: 1055134 - RNA, 19 nt, Human
agcagcucggcuccugcac

SEQ ID NO: 1055135 - RNA, 19 nt, Human
agcuagaauagugaagacc

SEQ ID NO: 1055136 - RNA, 19 nt, Human
aggaagaaugaugggcagg

SEQ ID NO: 1055137 - RNA, 21 nt, Human
aguaaggaucaccgggaggaa

SEQ ID NO: 1055138 - RNA, 20 nt, Human
auaaaguauaccgugcuauc

SEQ ID NO: 1055139 - RNA, 24 nt, Human
auuacaaaaauaaaaugacacaga

SEQ ID NO: 1055140 - RNA, 21 nt, Human
caaauacacaaacccagacuc

SEQ ID NO: 1055141 - RNA, 23 nt, Human
caagaaagagaauaaaguauacc

SEQ ID NO: 1055142 - RNA, 23 nt, Human
caagcuagaauagugaagaccag

SEQ ID NO: 1055143 - RNA, 20 nt, Human
cacagaaaguucuuuuagac

SEQ ID NO: 1055144 - RNA, 22 nt, Human
cacccugacuuuucaauagucu

SEQ ID NO: 1055145 - RNA, 26 nt, Human
cacugcagauauagaacauuucuguc

SEQ ID NO: 1055146 - RNA, 21 nt, Human
cagccuucuuuuugcaggccc

SEQ ID NO: 1055147 - RNA, 24 nt, Human
caggauauuccuagacugguggug

SEQ ID NO: 1055148 - RNA, 23 nt, Human
cagggcccucuagaaaauccuga

SEQ ID NO: 1055149 - RNA, 20 nt, Human
caugacugacccacaccucu

SEQ ID NO: 1055150 - RNA, 23 nt, Human
ccaaaauauaacugacaggaaaa

SEQ ID NO: 1055151 - RNA, 22 nt, Human
ccaagcccaugacugacccaca

SEQ ID NO: 1055152 - RNA, 19 nt, Human
cccguuguuccagccuucu

SEQ ID NO: 1055153 - RNA, 18 nt, Human
cugcugagucacucugac

SEQ ID NO: 1055154 - RNA, 24 nt, Human
gaaaauccugaugugggacaagga

SEQ ID NO: 1055155 - RNA, 21 nt, Human
gaaggaacuagaguuuugauc

SEQ ID NO: 1055156 - RNA, 21 nt, Human
gaccaggggauaccaagccca

SEQ ID NO: 1055157 - RNA, 22 nt, Human
gagucacucugacuaggaacac

SEQ ID NO: 1055158 - RNA, 24 nt, Human
gaucaccgggaggaagggauuccu

SEQ ID NO: 1055159 - RNA, 20 nt, Human
gcagcagcucggcuccugca

SEQ ID NO: 1055160 - RNA, 21 nt, Human
gcagcagcucggcuccugcac

SEQ ID NO: 1055161 - RNA, 21 nt, Human
ggacacugcagauauagaaca

SEQ ID NO: 1055162 - RNA, 21 nt, Human
ggcagguuaaauucauggaua

SEQ ID NO: 1055163 - RNA, 20 nt, Human
gggagcagugcugcuuggag

SEQ ID NO: 1055164 - RNA, 22 nt, Human
ggugguggagucacagaaagga

SEQ ID NO: 1055165 - RNA, 19 nt, Human
uaaaauguuaguuguccuc

SEQ ID NO: 1055166 - RNA, 20 nt, Human
uaaauugcacaagagaacaa

SEQ ID NO: 1055167 - RNA, 22 nt, Human
uaacacaauagcuaguagcccc

SEQ ID NO: 1055168 - RNA, 19 nt, Human
uaaggaucaccgggaggaa

SEQ ID NO: 1055169 - RNA, 19 nt, Human
uaauuccaaauaccauucu

SEQ ID NO: 1055170 - RNA, 18 nt, Human
uacaacacaagaaagaga

SEQ ID NO: 1055171 - RNA, 19 nt, Human
uacaccaacccuccacaaa

SEQ ID NO: 1055172 - RNA, 21 nt, Human
uaccauucuuucuuuuccucu

SEQ ID NO: 1055173 - RNA, 19 nt, Human
uaggaacacauaauaguca

SEQ ID NO: 1055174 - RNA, 23 nt, Human
uaggcugcuuauagaagcagcuu

SEQ ID NO: 1055175 - RNA, 24 nt, Human
ucagcccugucaagaguuuuguga

SEQ ID NO: 1055176 - RNA, 25 nt, Human
uccucagucacacuagccacauuuc

SEQ ID NO: 1055177 - RNA, 23 nt, Human
ucuaacacaauagcuaguagccc

SEQ ID NO: 1055178 - RNA, 21 nt, Human
ucuacaacacaagaaagagaa

SEQ ID NO: 1055179 - RNA, 22 nt, Human
ugacacagaauaaauugcacaa

SEQ ID NO: 1055180 - RNA, 21 nt, Human
ugacaugccuucacucugcuc

SEQ ID NO: 1055181 - RNA, 22 nt, Human
ugacugacccacaccucuccca

SEQ ID NO: 1055182 - RNA, 23 nt, Human
ugacugacccacaccucucccag

SEQ ID NO: 1055183 - RNA, 19 nt, Human
ugagagaggucagcccugu

SEQ ID NO: 1055184 - RNA, 27 nt, Human
ugaucaauuaucacuaaaaucagucac

SEQ ID NO: 1055185 - RNA, 19 nt, Human
ugcacaagagaacaaaaua

SEQ ID NO: 1055186 - RNA, 20 nt, Human
ugcuuagcuaggauguaggc

SEQ ID NO: 1055187 - RNA, 21 nt, Human
ugggaaguguuucuucuuugc

SEQ ID NO: 1055188 - RNA, 21 nt, Human
ugggcagguuaaauucaugga

SEQ ID NO: 1055189 - RNA, 24 nt, Human
uggugguggagucacagaaaggag

SEQ ID NO: 1055190 - RNA, 18 nt, Human
ugucagaggggagcagug

SEQ ID NO: 1055191 - RNA, 21 nt, Human
uuaguuguccucccaagaucc

SEQ ID NO: 1055192 - RNA, 21 nt, Human
uugcacaagagaacaaaauaa

SEQ ID NO: 1055193 - RNA, 20 nt, Human
uuuaaaaaauauaagccacc

SEQ ID NO: 1055194 - RNA, 21 nt, Human
uuuauuuuuauuucauagccu

SEQ ID NO: 1055195 - RNA, 23 nt, Human
uuugcagaaagcuuccaucuccc

SEQ ID NO: 1055196 - RNA, 24 nt, Human
agcugguccugcaguuaccauugg

SEQ ID NO: 1055197 - RNA, 21 nt, Human
ccaucugggcacugggagagg

SEQ ID NO: 1055198 - RNA, 18 nt, Human
cccaugacacugccugca

SEQ ID NO: 1055199 - RNA, 20 nt, Human
cucuucccugcagcuggucc

SEQ ID NO: 1055200 - RNA, 18 nt, Human
gcacagugcuggcacagg

SEQ ID NO: 1055201 - RNA, 21 nt, Human
ggcacugggagaggcacugcc

SEQ ID NO: 1055202 - RNA, 24 nt, Human
uaagaucagcacaguaucccacga

SEQ ID NO: 1055203 - RNA, 25 nt, Human
uaugugggcuuuucccugcacaucu

SEQ ID NO: 1055204 - RNA, 20 nt, Human
ucagacuccaacggcccaug

SEQ ID NO: 1055205 - RNA, 18 nt, Human
ugaaaguagccaucuggg

SEQ ID NO: 1055206 - RNA, 23 nt, Human
uggcacaggugauggcagucuca

SEQ ID NO: 1055207 - RNA, 19 nt, Human
agccauguaaaagcacaac

SEQ ID NO: 1055208 - RNA, 21 nt, Human
caacuaucuccggacuuccaa

SEQ ID NO: 1055209 - RNA, 23 nt, Human
cauguaaaagcacaacuaucucc

SEQ ID NO: 1055210 - RNA, 20 nt, Human
ccggacuuccaaccacaccc

SEQ ID NO: 1055211 - RNA, 22 nt, Human
cuuccaaccacacccacaaugu

SEQ ID NO: 1055212 - RNA, 23 nt, Human
cuuccaaccacacccacaauguc

SEQ ID NO: 1055213 - RNA, 20 nt, Human
gaagauacgcagucccuugu

SEQ ID NO: 1055214 - RNA, 18 nt, Human
gccugcucaaauauggaa

SEQ ID NO: 1055215 - RNA, 22 nt, Human
guagcuggauguuggaaagcca

SEQ ID NO: 1055216 - RNA, 21 nt, Human
ucuggagccccagaugcccca

SEQ ID NO: 1055217 - RNA, 20 nt, Human
ugauguggucucuguuuguc

SEQ ID NO: 1055218 - RNA, 22 nt, Human
uggagccccagaugccccaaag

SEQ ID NO: 1055219 - RNA, 25 nt, Human
accccggccgaccucaaagcgaccg

SEQ ID NO: 1055220 - RNA, 21 nt, Human
acucccgugaaccugcuccuc

SEQ ID NO: 1055221 - RNA, 19 nt, Human
agaccccggccgaccucaa

SEQ ID NO: 1055222 - RNA, 22 nt, Human
agggacccgccccccagacccc

SEQ ID NO: 1055223 - RNA, 20 nt, Human
agggcgcuggggaugcgcga

SEQ ID NO: 1055224 - RNA, 21 nt, Human
aggguguccucagcaacggug

SEQ ID NO: 1055225 - RNA, 22 nt, Human
caccggggucaccgccacagcc

SEQ ID NO: 1055226 - RNA, 23 nt, Human
cagcggucagggacccgcccccc

SEQ ID NO: 1055227 - RNA, 23 nt, Human
cagggacccgccccccagacccc

SEQ ID NO: 1055228 - RNA, 20 nt, Human
ccagacccccaggaccgcgc

SEQ ID NO: 1055229 - RNA, 20 nt, Human
ccccaggagcuccugggaac

SEQ ID NO: 1055230 - RNA, 21 nt, Human
ccccaggagcuccugggaacc

SEQ ID NO: 1055231 - RNA, 21 nt, Human
cccccagacccccaggaccgc

SEQ ID NO: 1055232 - RNA, 20 nt, Human
cccccaggaccgcgcuuccg

SEQ ID NO: 1055233 - RNA, 22 nt, Human
cccgccccccagacccccagga

SEQ ID NO: 1055234 - RNA, 18 nt, Human
cccggccgaccucaaagc

SEQ ID NO: 1055235 - RNA, 22 nt, Human
cccuccucaccggggucaccgc

SEQ ID NO: 1055236 - RNA, 20 nt, Human
ccgcaccaaagcccuccuca

SEQ ID NO: 1055237 - RNA, 20 nt, Human
ccgccccccagacccccagg

SEQ ID NO: 1055238 - RNA, 20 nt, Human
ccgggggaggaggguguccu

SEQ ID NO: 1055239 - RNA, 19 nt, Human
cgaggcccgcagggcgcug

SEQ ID NO: 1055240 - RNA, 20 nt, Human
cgcagggcgcuggggaugcg

SEQ ID NO: 1055241 - RNA, 23 nt, Human
cgccacagccggugcgaggcccg

SEQ ID NO: 1055242 - RNA, 22 nt, Human
cggccgaccucaaagcgaccgc

SEQ ID NO: 1055243 - RNA, 25 nt, Human
cggcggggcccccaggagcuccugg

SEQ ID NO: 1055244 - RNA, 20 nt, Human
gaaccgaggguccuggggcg

SEQ ID NO: 1055245 - RNA, 21 nt, Human
gacccgccccccagaccccca

SEQ ID NO: 1055246 - RNA, 18 nt, Human
gccacagccggugcgagg

SEQ ID NO: 1055247 - RNA, 24 nt, Human
gcggggcccccaggagcuccuggg

SEQ ID NO: 1055248 - RNA, 22 nt, Human
ggaccgcgcuuccgggggagga

SEQ ID NO: 1055249 - RNA, 18 nt, Human
ggcagaccccggccgacc

SEQ ID NO: 1055250 - RNA, 18 nt, Human
ggccuggggugggggcgg

SEQ ID NO: 1055251 - RNA, 18 nt, Human
gggacuggggcugcgcag

SEQ ID NO: 1055252 - RNA, 19 nt, Human
gggcagaccccggccgacc

SEQ ID NO: 1055253 - RNA, 22 nt, Human
gggugggggcggcggggccccc

SEQ ID NO: 1055254 - RNA, 19 nt, Human
ucaccgccacagccggugc

SEQ ID NO: 1055255 - RNA, 23 nt, Human
ugacccgcaccaaagcccuccuc

SEQ ID NO: 1055256 - RNA, 19 nt, Human
ugcgaggcccgcagggcgc

SEQ ID NO: 1055257 - RNA, 20 nt, Human
uggggaugcgcgaccgacuc

SEQ ID NO: 1055258 - RNA, 19 nt, Human
uggggccggcggggacugg

SEQ ID NO: 1055259 - RNA, 22 nt, Human
ugggggcggcggggcccccagg

SEQ ID NO: 1055260 - RNA, 20 nt, Human
uggggugggggcggcggggc

SEQ ID NO: 1055261 - RNA, 21 nt, Human
uggggugggggcggcggggcc

SEQ ID NO: 1055262 - RNA, 20 nt, Human
agccccgcaccccccggaac

SEQ ID NO: 1055263 - RNA, 18 nt, Human
aggauguugaaaagggga

SEQ ID NO: 1055264 - RNA, 24 nt, Human
cagccccgcaccccccggaaccag

SEQ ID NO: 1055265 - RNA, 23 nt, Human
cccccggaaccagccagacaacc

SEQ ID NO: 1055266 - RNA, 27 nt, Human
cccccggaaccagccagacaaccgcag

SEQ ID NO: 1055267 - RNA, 18 nt, Human
ccccgcaccccccggaac

SEQ ID NO: 1055268 - RNA, 19 nt, Human
ccccgcaccccccggaacc

SEQ ID NO: 1055269 - RNA, 21 nt, Human
ccccgcaccccccggaaccag

SEQ ID NO: 1055270 - RNA, 23 nt, Human
cccgcaccccccggaaccagcca

SEQ ID NO: 1055271 - RNA, 21 nt, Human
ccgcaggauguugaaaagggg

SEQ ID NO: 1055272 - RNA, 19 nt, Human
ccggcaccaggcacgucag

SEQ ID NO: 1055273 - RNA, 19 nt, Human
gccgggggggcgggcgggc

SEQ ID NO: 1055274 - RNA, 24 nt, Human
gcggcgggcaggcgggcaaaggcc

SEQ ID NO: 1055275 - RNA, 23 nt, Human
ggaaacccaacacaaacgccagu

SEQ ID NO: 1055276 - RNA, 18 nt, Human
ggaaccagccagacaacc

SEQ ID NO: 1055277 - RNA, 19 nt, Human
gggcggcgggcaggcgggc

SEQ ID NO: 1055278 - RNA, 26 nt, Human
gggggcgggcgggcgagcggcggcgg

SEQ ID NO: 1055279 - RNA, 19 nt, Human
gugcagcgcgcacuccagg

SEQ ID NO: 1055280 - RNA, 20 nt, Human
gugcagcgcgcacuccaggu

SEQ ID NO: 1055281 - RNA, 18 nt, Human
uaguaguagcgcaggccc

SEQ ID NO: 1055282 - RNA, 24 nt, Human
uccgugugcagcgcgcacuccagg

SEQ ID NO: 1055283 - RNA, 21 nt, Human
uugcggcuguaguaguagcgc

SEQ ID NO: 1055284 - RNA, 20 nt, Human
ccacaggaaauaucucuaau

SEQ ID NO: 1055285 - RNA, 21 nt, Human
aaaaauugaauauuucaugcu

SEQ ID NO: 1055286 - RNA, 23 nt, Human
aaagaaacaagucuccgguugag

SEQ ID NO: 1055287 - RNA, 23 nt, Human
aacccugguaacaaacuccccug

SEQ ID NO: 1055288 - RNA, 19 nt, Human
aagagccagagcagggagc

SEQ ID NO: 1055289 - RNA, 23 nt, Human
aagcacaagaaccacuguuccca

SEQ ID NO: 1055290 - RNA, 24 nt, Human
aagcacucaucaguauuuccauca

SEQ ID NO: 1055291 - RNA, 24 nt, Human
aagcggugacgguaguggccccgg

SEQ ID NO: 1055292 - RNA, 20 nt, Human
aauucaaaugaagcaccugg

SEQ ID NO: 1055293 - RNA, 23 nt, Human
acacagugacuagugugccaaau

SEQ ID NO: 1055294 - RNA, 20 nt, Human
acacugaugccugguaaaug

SEQ ID NO: 1055295 - RNA, 22 nt, Human
acacugaugccugguaaaugcu

SEQ ID NO: 1055296 - RNA, 25 nt, Human
acagaacagagacuugagaacaaag

SEQ ID NO: 1055297 - RNA, 24 nt, Human
acagggcucucuucgacuuucaaa

SEQ ID NO: 1055298 - RNA, 22 nt, Human
accacgccgcucagcuccucca

SEQ ID NO: 1055299 - RNA, 21 nt, Human
accguggcaaccucaggcucg

SEQ ID NO: 1055300 - RNA, 18 nt, Human
acgcugggggccaagugg

SEQ ID NO: 1055301 - RNA, 20 nt, Human
acgcuguagcgcacgaagcc

SEQ ID NO: 1055302 - RNA, 21 nt, Human
acggucgaggguguugcuggu

SEQ ID NO: 1055303 - RNA, 24 nt, Human
acucccucacuuuuggcugugauc

SEQ ID NO: 1055304 - RNA, 21 nt, Human
acuggaaacaauaaacucugg

SEQ ID NO: 1055305 - RNA, 19 nt, Human
acuggaagaacgggccugc

SEQ ID NO: 1055306 - RNA, 19 nt, Human
agaacauugaugaucucgg

SEQ ID NO: 1055307 - RNA, 19 nt, Human
agaaggacuguggucauug

SEQ ID NO: 1055308 - RNA, 21 nt, Human
agacaaaaggaaauauaauag

SEQ ID NO: 1055309 - RNA, 19 nt, Human
agacauacaccaggguucc

SEQ ID NO: 1055310 - RNA, 22 nt, Human
agagagugggggcucuccgagg

SEQ ID NO: 1055311 - RNA, 18 nt, Human
agaggaggcacucccugg

SEQ ID NO: 1055312 - RNA, 20 nt, Human
agccaggcgugaucacugcc

SEQ ID NO: 1055313 - RNA, 22 nt, Human
agcuccuagguggaucucccag

SEQ ID NO: 1055314 - RNA, 22 nt, Human
aggcagguggcagagagugggg

SEQ ID NO: 1055315 - RNA, 23 nt, Human
aggcagguggcagagaguggggg

SEQ ID NO: 1055316 - RNA, 18 nt, Human
aggcugcacgcugggggc

SEQ ID NO: 1055317 - RNA, 24 nt, Human
aggucagagcacagaaugacaagg

SEQ ID NO: 1055318 - RNA, 18 nt, Human
aggugcuucauagcucag

SEQ ID NO: 1055319 - RNA, 22 nt, Human
aguacucgaagggugaagacuu

SEQ ID NO: 1055320 - RNA, 20 nt, Human
aguccuggucaguggcaaga

SEQ ID NO: 1055321 - RNA, 18 nt, Human
agucgguagcaaaaaccu

SEQ ID NO: 1055322 - RNA, 18 nt, Human
agugcugaucgcaccgcu

SEQ ID NO: 1055323 - RNA, 21 nt, Human
auaacuggaaacaauaaacuc

SEQ ID NO: 1055324 - RNA, 20 nt, Human
aucaagcuguaggagcuggu

SEQ ID NO: 1055325 - RNA, 18 nt, Human
aucacugaugcucgucac

SEQ ID NO: 1055326 - RNA, 21 nt, Human
aucauugucauuaacaucagu

SEQ ID NO: 1055327 - RNA, 21 nt, Human
aucauuuacaucaagaacagu

SEQ ID NO: 1055328 - RNA, 19 nt, Human
auccuggaaagauggggaa

SEQ ID NO: 1055329 - RNA, 19 nt, Human
auccuguaucaagacugcu

SEQ ID NO: 1055330 - RNA, 26 nt, Human
aucuucauuuccacuaaaaauugaau

SEQ ID NO: 1055331 - RNA, 18 nt, Human
auuccugugguggaguca

SEQ ID NO: 1055332 - RNA, 21 nt, Human
auugcagggagccgagauugc

SEQ ID NO: 1055333 - RNA, 24 nt, Human
auugugguuguucuuauuucacca

SEQ ID NO: 1055334 - RNA, 21 nt, Human
caaccggggcaugcucugcaa

SEQ ID NO: 1055335 - RNA, 24 nt, Human
cacagccacacgugcaccaagagc

SEQ ID NO: 1055336 - RNA, 23 nt, Human
cacagcugaaagcacaagaacca

SEQ ID NO: 1055337 - RNA, 25 nt, Human
cacaucaucuacggugaugcucacc

SEQ ID NO: 1055338 - RNA, 19 nt, Human
caccacagcgcccagcagc

SEQ ID NO: 1055339 - RNA, 20 nt, Human
caccagaucuagaggcuccg

SEQ ID NO: 1055340 - RNA, 22 nt, Human
caccugaauauuaacaacugcc

SEQ ID NO: 1055341 - RNA, 23 nt, Human
cacguguaacuccuuuccaggga

SEQ ID NO: 1055342 - RNA, 19 nt, Human
cacucugaaaagauaauga

SEQ ID NO: 1055343 - RNA, 18 nt, Human
cacugucccauauauccc

SEQ ID NO: 1055344 - RNA, 23 nt, Human
cagaaaauacucaguuugcccau

SEQ ID NO: 1055345 - RNA, 24 nt, Human
cagaaagaagccgcuccccuccug

SEQ ID NO: 1055346 - RNA, 23 nt, Human
cagcagcacuuaucacuuucuaa

SEQ ID NO: 1055347 - RNA, 19 nt, Human
cagcgcccagcagcguggc

SEQ ID NO: 1055348 - RNA, 21 nt, Human
cagcgcccagcagcguggcgg

SEQ ID NO: 1055349 - RNA, 19 nt, Human
cagcgugagcucccgcugc

SEQ ID NO: 1055350 - RNA, 19 nt, Human
cagcuccuugggaaggcuc

SEQ ID NO: 1055351 - RNA, 28 nt, Human
cagcuccuugggaaggcucucggguaac

SEQ ID NO: 1055352 - RNA, 22 nt, Human
cagggcucucuucgacuuucaa

SEQ ID NO: 1055353 - RNA, 19 nt, Human
cagggcugccugaggaugc

SEQ ID NO: 1055354 - RNA, 22 nt, Human
caguaacugagacguaaaccgc

SEQ ID NO: 1055355 - RNA, 20 nt, Human
caguguccaaccggggcaug

SEQ ID NO: 1055356 - RNA, 22 nt, Human
caguuucuuccaacaaaucuug

SEQ ID NO: 1055357 - RNA, 22 nt, Human
cauagaguccugaaucugcauc

SEQ ID NO: 1055358 - RNA, 18 nt, Human
caucaguauuuccaucaa

SEQ ID NO: 1055359 - RNA, 20 nt, Human
caugcaagaaggugggggaa

SEQ ID NO: 1055360 - RNA, 25 nt, Human
cauucacguccuccagguccacacg

SEQ ID NO: 1055361 - RNA, 25 nt, Human
cauuucuccuccagcuccuugggaa

SEQ ID NO: 1055362 - RNA, 20 nt, Human
ccacagccacacgugcacca

SEQ ID NO: 1055363 - RNA, 22 nt, Human
ccacagcugaaagcacaagaac

SEQ ID NO: 1055364 - RNA, 22 nt, Human
ccagagcuucaacccugguaac

SEQ ID NO: 1055365 - RNA, 24 nt, Human
ccaugguggcguuucguggugggg

SEQ ID NO: 1055366 - RNA, 26 nt, Human
cccacagccacacgugcaccaagagc

SEQ ID NO: 1055367 - RNA, 19 nt, Human
cccacccgacgaggaauac

SEQ ID NO: 1055368 - RNA, 22 nt, Human
cccaugccucgaucugcagccg

SEQ ID NO: 1055369 - RNA, 24 nt, Human
cccauucaggccuucauccuuguc

SEQ ID NO: 1055370 - RNA, 23 nt, Human
ccccaaguccaggucaucagcuc

SEQ ID NO: 1055371 - RNA, 18 nt, Human
cccgaggccgcccacagc

SEQ ID NO: 1055372 - RNA, 20 nt, Human
cccguguaagggcggauucc

SEQ ID NO: 1055373 - RNA, 19 nt, Human
ccgccgcuacccgccccag

SEQ ID NO: 1055374 - RNA, 22 nt, Human
ccgccgucccaugccucgaucu

SEQ ID NO: 1055375 - RNA, 24 nt, Human
ccgcggucugucacuagcacaguc

SEQ ID NO: 1055376 - RNA, 20 nt, Human
ccgcgucgcccagugccccg

SEQ ID NO: 1055377 - RNA, 20 nt, Human
ccuccagaagaugggcucau

SEQ ID NO: 1055378 - RNA, 18 nt, Human
ccucggacacugaggccu

SEQ ID NO: 1055379 - RNA, 18 nt, Human
ccucggcgcccggcuggg

SEQ ID NO: 1055380 - RNA, 24 nt, Human
ccucggugcugcugcaggcugggg

SEQ ID NO: 1055381 - RNA, 19 nt, Human
ccugaucagaugcuguuac

SEQ ID NO: 1055382 - RNA, 19 nt, Human
ccugcaccacagcgcccag

SEQ ID NO: 1055383 - RNA, 21 nt, Human
ccugcaccacagcgcccagca

SEQ ID NO: 1055384 - RNA, 22 nt, Human
ccugcuccugucugugucucga

SEQ ID NO: 1055385 - RNA, 18 nt, Human
ccuggcuggaaugcccug

SEQ ID NO: 1055386 - RNA, 19 nt, Human
ccuggcuggaaugcccugg

SEQ ID NO: 1055387 - RNA, 22 nt, Human
ccugugccucgcgguccagagg

SEQ ID NO: 1055388 - RNA, 19 nt, Human
ccuuccuuucuucuuuugc

SEQ ID NO: 1055389 - RNA, 18 nt, Human
cgaagcuguagugguccc

SEQ ID NO: 1055390 - RNA, 20 nt, Human
cgacagaaagaagccgcucc

SEQ ID NO: 1055391 - RNA, 18 nt, Human
cgacagaccucggcgccc

SEQ ID NO: 1055392 - RNA, 19 nt, Human
cgagauugcagggagccga

SEQ ID NO: 1055393 - RNA, 23 nt, Human
cgcagcuccacgcucaggaggcc

SEQ ID NO: 1055394 - RNA, 20 nt, Human
cgcccacagccacacgugca

SEQ ID NO: 1055395 - RNA, 18 nt, Human
cgcccgcgcccaggcugc

SEQ ID NO: 1055396 - RNA, 24 nt, Human
cgccgagaucaccagaagaaaucc

SEQ ID NO: 1055397 - RNA, 21 nt, Human
cgccggggucggccgccgucc

SEQ ID NO: 1055398 - RNA, 21 nt, Human
cgccuccaucgcgggccucca

SEQ ID NO: 1055399 - RNA, 18 nt, Human
cgccuguguuugcagcau

SEQ ID NO: 1055400 - RNA, 18 nt, Human
cgcgacagaccucggcgc

SEQ ID NO: 1055401 - RNA, 20 nt, Human
cggaaugccugaggugcuuc

SEQ ID NO: 1055402 - RNA, 22 nt, Human
cggcaucggaggcgcugaccca

SEQ ID NO: 1055403 - RNA, 20 nt, Human
cggcgcccggcugggcgucc

SEQ ID NO: 1055404 - RNA, 19 nt, Human
cgggggaaagaaacacauc

SEQ ID NO: 1055405 - RNA, 20 nt, Human
cgucguccccuuccacagcc

SEQ ID NO: 1055406 - RNA, 20 nt, Human
cuaccucuccagugucagaa

SEQ ID NO: 1055407 - RNA, 23 nt, Human
cucaaagaccggcggguugucgu

SEQ ID NO: 1055408 - RNA, 25 nt, Human
cuccaaacaccuugucauggguucc

SEQ ID NO: 1055409 - RNA, 20 nt, Human
cuccacacucgcaccacgcc

SEQ ID NO: 1055410 - RNA, 23 nt, Human
cuccacacucgcaccacgccgcu

SEQ ID NO: 1055411 - RNA, 21 nt, Human
cucccgcugcucgcccgcgcc

SEQ ID NO: 1055412 - RNA, 19 nt, Human
cuccugcugcugcgcggcc

SEQ ID NO: 1055413 - RNA, 23 nt, Human
cuccugcugcugcgcggccggca

SEQ ID NO: 1055414 - RNA, 22 nt, Human
cucuccucccggggagcagaag

SEQ ID NO: 1055415 - RNA, 19 nt, Human
cugaauauuaacaacugcc

SEQ ID NO: 1055416 - RNA, 18 nt, Human
cugaaugcaaagucuguc

SEQ ID NO: 1055417 - RNA, 18 nt, Human
cugacccacaugacuaca

SEQ ID NO: 1055418 - RNA, 18 nt, Human
cugcaccgugagcacaac

SEQ ID NO: 1055419 - RNA, 18 nt, Human
cugcagaaagcagugucc

SEQ ID NO: 1055420 - RNA, 23 nt, Human
cugcagcagcacuuaucacuuuc

SEQ ID NO: 1055421 - RNA, 23 nt, Human
cugcagccggugcgccgccgccu

SEQ ID NO: 1055422 - RNA, 18 nt, Human
cugccgagcugcgccugc

SEQ ID NO: 1055423 - RNA, 19 nt, Human
cugccucacaauuuucagu

SEQ ID NO: 1055424 - RNA, 18 nt, Human
cugcucaaagaccggcgg

SEQ ID NO: 1055425 - RNA, 18 nt, Human
cugcucaaagaccggcgg

SEQ ID NO: 1055426 - RNA, 22 nt, Human
cugcugcaggcuggggcgcugc

SEQ ID NO: 1055427 - RNA, 21 nt, Human
cugguaacaaacuccccugga

SEQ ID NO: 1055428 - RNA, 23 nt, Human
cuggugccaggccugugccucgc

SEQ ID NO: 1055429 - RNA, 20 nt, Human
cuguccauucuuuccagagu

SEQ ID NO: 1055430 - RNA, 21 nt, Human
cuucaucauuuacaucaagaa

SEQ ID NO: 1055431 - RNA, 19 nt, Human
cuucgcccaucuuccgccc

SEQ ID NO: 1055432 - RNA, 20 nt, Human
cuugaaguucaucagaacug

SEQ ID NO: 1055433 - RNA, 26 nt, Human
cuugguccucggcccugagagucagc

SEQ ID NO: 1055434 - RNA, 18 nt, Human
gaaagaaauaaaaguggg

SEQ ID NO: 1055435 - RNA, 21 nt, Human
gaacagcacccccagggcucu

SEQ ID NO: 1055436 - RNA, 18 nt, Human
gaaguaggccgcgucgcc

SEQ ID NO: 1055437 - RNA, 19 nt, Human
gacaaugaagggaaucccc

SEQ ID NO: 1055438 - RNA, 19 nt, Human
gacauccucuuugacaugg

SEQ ID NO: 1055439 - RNA, 24 nt, Human
gacugucagcaccagcagggcugc

SEQ ID NO: 1055440 - RNA, 19 nt, Human
gagcagaaggagcuucccg

SEQ ID NO: 1055441 - RNA, 18 nt, Human
gagcagagaccaucaacg

SEQ ID NO: 1055442 - RNA, 20 nt, Human
gagcccgaggccgcccacag

SEQ ID NO: 1055443 - RNA, 21 nt, Human
gagcuccuagguggaucuccc

SEQ ID NO: 1055444 - RNA, 18 nt, Human
gagguuggucuucagggc

SEQ ID NO: 1055445 - RNA, 21 nt, Human
gagucaaugguaaaaagggac

SEQ ID NO: 1055446 - RNA, 22 nt, Human
gauagugcugaucgcaccgcuu

SEQ ID NO: 1055447 - RNA, 25 nt, Human
gcagaggagcccgaggccgcccaca

SEQ ID NO: 1055448 - RNA, 20 nt, Human
gcagccggugcgccgccgcc

SEQ ID NO: 1055449 - RNA, 21 nt, Human
gccaccacuuucagcuccacc

SEQ ID NO: 1055450 - RNA, 25 nt, Human
gccaugguggcguuucguggugggg

SEQ ID NO: 1055451 - RNA, 20 nt, Human
gcccgcgcccaggcugccgu

SEQ ID NO: 1055452 - RNA, 18 nt, Human
gccgcaaauaaauccagc

SEQ ID NO: 1055453 - RNA, 21 nt, Human
gccgcaaauaaauccagcccg

SEQ ID NO: 1055454 - RNA, 24 nt, Human
gccgcuacccgccccaggcacuug

SEQ ID NO: 1055455 - RNA, 19 nt, Human
gccgguguccgggugcacg

SEQ ID NO: 1055456 - RNA, 21 nt, Human
gccuccaucgcgggccuccac

SEQ ID NO: 1055457 - RNA, 21 nt, Human
gcgaaguaggccgcgucgccc

SEQ ID NO: 1055458 - RNA, 22 nt, Human
gcgcggccggcagcccggcgcg

SEQ ID NO: 1055459 - RNA, 21 nt, Human
gcggucccuggcgggcugagc

SEQ ID NO: 1055460 - RNA, 22 nt, Human
gcugacccacaugacuacagug

SEQ ID NO: 1055461 - RNA, 18 nt, Human
gcugcguccuggcgccgc

SEQ ID NO: 1055462 - RNA, 19 nt, Human
ggaaagaaacacaucaaaa

SEQ ID NO: 1055463 - RNA, 22 nt, Human
ggaauugacuccugaaucucug

SEQ ID NO: 1055464 - RNA, 28 nt, Human
ggacagguugugguuaguaacgaccucg

SEQ ID NO: 1055465 - RNA, 19 nt, Human
ggagcgcugcguccuggcg

SEQ ID NO: 1055466 - RNA, 24 nt, Human
ggagucgaggggaaagcggggcga

SEQ ID NO: 1055467 - RNA, 21 nt, Human
ggcgauggacacgcgcaccgu

SEQ ID NO: 1055468 - RNA, 23 nt, Human
ggcugugaucccuaaaggcuguu

SEQ ID NO: 1055469 - RNA, 19 nt, Human
gggaaagaaacacaucaaa

SEQ ID NO: 1055470 - RNA, 19 nt, Human
gggaaucccccaucucgua

SEQ ID NO: 1055471 - RNA, 18 nt, Human
gggcguccucgcgcaccg

SEQ ID NO: 1055472 - RNA, 23 nt, Human
gggcguggucugggauauucuaa

SEQ ID NO: 1055473 - RNA, 21 nt, Human
ggggaaagaaauaaaaguggg

SEQ ID NO: 1055474 - RNA, 18 nt, Human
ggggaaagcccugcugga

SEQ ID NO: 1055475 - RNA, 21 nt, Human
gggguggaugagaaauggauu

SEQ ID NO: 1055476 - RNA, 18 nt, Human
ggucauugaggucagcga

SEQ ID NO: 1055477 - RNA, 20 nt, Human
ggucuucagggccuacaaag

SEQ ID NO: 1055478 - RNA, 18 nt, Human
ggugacgaggagccuggc

SEQ ID NO: 1055479 - RNA, 18 nt, Human
guauuagaaagccugggc

SEQ ID NO: 1055480 - RNA, 21 nt, Human
gucccaugccucgaucugcag

SEQ ID NO: 1055481 - RNA, 20 nt, Human
gugcgccgccgccuccucuc

SEQ ID NO: 1055482 - RNA, 26 nt, Human
gugcugcugcaggcuggggcgcugcc

SEQ ID NO: 1055483 - RNA, 19 nt, Human
gugguugucauugacaucc

SEQ ID NO: 1055484 - RNA, 23 nt, Human
gugguuguccuggcuggaaugcc

SEQ ID NO: 1055485 - RNA, 18 nt, Human
guguagcccugagugcug

SEQ ID NO: 1055486 - RNA, 20 nt, Human
guucaaaaaacugccgucau

SEQ ID NO: 1055487 - RNA, 18 nt, Human
uaaaacgaugaguugaac

SEQ ID NO: 1055488 - RNA, 21 nt, Human
uaaauccagcccguguaaggg

SEQ ID NO: 1055489 - RNA, 23 nt, Human
uaacuccuuuccagggagacacu

SEQ ID NO: 1055490 - RNA, 18 nt, Human
uaacugccagcuuaauau

SEQ ID NO: 1055491 - RNA, 20 nt, Human
uaacuggaaacaauaaacuc

SEQ ID NO: 1055492 - RNA, 20 nt, Human
uaacuucugcauuauuuccu

SEQ ID NO: 1055493 - RNA, 20 nt, Human
uaacuugcagguguauuaca

SEQ ID NO: 1055494 - RNA, 18 nt, Human
uaagaaaguguacuuagg

SEQ ID NO: 1055495 - RNA, 20 nt, Human
uaagccacugucccauauau

SEQ ID NO: 1055496 - RNA, 20 nt, Human
uaaguaaauaauuccugugg

SEQ ID NO: 1055497 - RNA, 23 nt, Human
uacaggugcugcuuaaauacugg

SEQ ID NO: 1055498 - RNA, 19 nt, Human
uacagugccaggggccgcg

SEQ ID NO: 1055499 - RNA, 19 nt, Human
uacgcuggguuccagcgag

SEQ ID NO: 1055500 - RNA, 21 nt, Human
uacuuaggccuuucaaacuca

SEQ ID NO: 1055501 - RNA, 20 nt, Human
uagcucaggaauccaucaua

SEQ ID NO: 1055502 - RNA, 18 nt, Human
uaguggccccggaguccg

SEQ ID NO: 1055503 - RNA, 23 nt, Human
uauaucccagaguccuggucagu

SEQ ID NO: 1055504 - RNA, 24 nt, Human
uaucaucugcaacaauacuaaaau

SEQ ID NO: 1055505 - RNA, 19 nt, Human
uaucccagaguccugguca

SEQ ID NO: 1055506 - RNA, 18 nt, Human
uaugggaacauucuccuc

SEQ ID NO: 1055507 - RNA, 18 nt, Human
uauuacagagcuccuagg

SEQ ID NO: 1055508 - RNA, 21 nt, Human
ucaaucuuaaagugaucagaa

SEQ ID NO: 1055509 - RNA, 23 nt, Human
ucacaaugacaguugucugguuu

SEQ ID NO: 1055510 - RNA, 28 nt, Human
ucaguaacugagacguaaaccggggucc

SEQ ID NO: 1055511 - RNA, 21 nt, Human
ucagucagaaaauacucaguu

SEQ ID NO: 1055512 - RNA, 25 nt, Human
uccaaaaucacuauuugugcuguca

SEQ ID NO: 1055513 - RNA, 24 nt, Human
uccaaacaccuugucauggguucc

SEQ ID NO: 1055514 - RNA, 22 nt, Human
uccaccugcaccacagcgccca

SEQ ID NO: 1055515 - RNA, 26 nt, Human
uccagaaccuucacguguaacucccu

SEQ ID NO: 1055516 - RNA, 20 nt, Human
uccagaguccaugucaauag

SEQ ID NO: 1055517 - RNA, 21 nt, Human
uccagggagacacugggggaa

SEQ ID NO: 1055518 - RNA, 19 nt, Human
ucccaggaucauuagcagc

SEQ ID NO: 1055519 - RNA, 20 nt, Human
ucccaugccucgaucugcag

SEQ ID NO: 1055520 - RNA, 21 nt, Human
ucccuggcgggcugagcucgg

SEQ ID NO: 1055521 - RNA, 20 nt, Human
ucccuggucaguggcaauga

SEQ ID NO: 1055522 - RNA, 20 nt, Human
uccucgcgcaccgcggcgcg

SEQ ID NO: 1055523 - RNA, 23 nt, Human
uccugcagcagcacuuaucacuu

SEQ ID NO: 1055524 - RNA, 23 nt, Human
uccugggccaccacuuucagcuc

SEQ ID NO: 1055525 - RNA, 20 nt, Human
uccuucaggccucugguguc

SEQ ID NO: 1055526 - RNA, 23 nt, Human
ucgauacuaaggaagacugugcu

SEQ ID NO: 1055527 - RNA, 19 nt, Human
ucgcccgcgcccaggcugc

SEQ ID NO: 1055528 - RNA, 24 nt, Human
ucggaguccuccgacagaaagaag

SEQ ID NO: 1055529 - RNA, 19 nt, Human
ucggugagagagacucacu

SEQ ID NO: 1055530 - RNA, 23 nt, Human
ucuccagugucagaauuuaucuc

SEQ ID NO: 1055531 - RNA, 19 nt, Human
ucuccgagguccugggcca

SEQ ID NO: 1055532 - RNA, 20 nt, Human
ucucggguaacugccagcuu

SEQ ID NO: 1055533 - RNA, 24 nt, Human
ucucuugcuuucacuguuccaaug

SEQ ID NO: 1055534 - RNA, 18 nt, Human
ucugaggaguucaagggc

SEQ ID NO: 1055535 - RNA, 22 nt, Human
ucugcauuauuuccuucaucag

SEQ ID NO: 1055536 - RNA, 24 nt, Human
ucuuuacaucuucuccuuccaugu

SEQ ID NO: 1055537 - RNA, 24 nt, Human
ucuuugauugcagggagccgacca

SEQ ID NO: 1055538 - RNA, 19 nt, Human
ugaaagcacaagaaccacu

SEQ ID NO: 1055539 - RNA, 18 nt, Human
ugaaauugaauuucuccu

SEQ ID NO: 1055540 - RNA, 18 nt, Human
ugaagaaagugcuggugu

SEQ ID NO: 1055541 - RNA, 23 nt, Human
ugaagacuucuugaauuucucug

SEQ ID NO: 1055542 - RNA, 22 nt, Human
ugaagaggaggcacucccuggu

SEQ ID NO: 1055543 - RNA, 22 nt, Human
ugaagcaccuggcaugauuuca

SEQ ID NO: 1055544 - RNA, 24 nt, Human
ugaagcgcccccaccucgcauccc

SEQ ID NO: 1055545 - RNA, 19 nt, Human
ugacauccaugacuguuau

SEQ ID NO: 1055546 - RNA, 20 nt, Human
ugacuccugaaucucugucc

SEQ ID NO: 1055547 - RNA, 28 nt, Human
ugacugggucucugcaaaacuaaaaacc

SEQ ID NO: 1055548 - RNA, 22 nt, Human
ugacuguuauguugaccucggu

SEQ ID NO: 1055549 - RNA, 23 nt, Human
ugagaugcuaccugcuccugucu

SEQ ID NO: 1055550 - RNA, 22 nt, Human
ugagcauuguagaguuggcuuu

SEQ ID NO: 1055551 - RNA, 21 nt, Human
ugaggaacgcugggugguugu

SEQ ID NO: 1055552 - RNA, 21 nt, Human
ugagggguggaugagaaaugg

SEQ ID NO: 1055553 - RNA, 22 nt, Human
ugagguugaacaacugggcaga

SEQ ID NO: 1055554 - RNA, 18 nt, Human
ugauggguuaaacacagg

SEQ ID NO: 1055555 - RNA, 18 nt, Human
ugcaaaacuaaaaaccac

SEQ ID NO: 1055556 - RNA, 20 nt, Human
ugcaaaacuaaaaaccacag

SEQ ID NO: 1055557 - RNA, 23 nt, Human
ugcaccaggguguagcccugagu

SEQ ID NO: 1055558 - RNA, 24 nt, Human
ugcacgccuugguccucggcccug

SEQ ID NO: 1055559 - RNA, 21 nt, Human
ugcagccggugcgccgccgcc

SEQ ID NO: 1055560 - RNA, 19 nt, Human
ugccaggggccgcggccuc

SEQ ID NO: 1055561 - RNA, 21 nt, Human
ugccaucauccagugccagaa

SEQ ID NO: 1055562 - RNA, 23 nt, Human
ugcccagccgcgggugaauggag

SEQ ID NO: 1055563 - RNA, 24 nt, Human
ugcccaggccacagagguuggucu

SEQ ID NO: 1055564 - RNA, 24 nt, Human
ugcccagguuaugacauagauggu

SEQ ID NO: 1055565 - RNA, 23 nt, Human
ugccugaggugcuucauagcuca

SEQ ID NO: 1055566 - RNA, 21 nt, Human
ugcuccugucugugucucgcc

SEQ ID NO: 1055567 - RNA, 21 nt, Human
ugcugcaggcuggggcgcugc

SEQ ID NO: 1055568 - RNA, 25 nt, Human
ugcugcugcaggcuggggcgcugcc

SEQ ID NO: 1055569 - RNA, 19 nt, Human
ugcuguuuguuuccugcag

SEQ ID NO: 1055570 - RNA, 23 nt, Human
ugcuucagaggggagaaaagcug

SEQ ID NO: 1055571 - RNA, 18 nt, Human
ugcuucgugaacccugga

SEQ ID NO: 1055572 - RNA, 23 nt, Human
uggaauaagcucauaagccacug

SEQ ID NO: 1055573 - RNA, 21 nt, Human
uggaaugcuucuucuugguug

SEQ ID NO: 1055574 - RNA, 18 nt, Human
uggaugagaaauggauuc

SEQ ID NO: 1055575 - RNA, 21 nt, Human
uggcaaaagaugguccacacu

SEQ ID NO: 1055576 - RNA, 22 nt, Human
uggcagagagugggggcucucc

SEQ ID NO: 1055577 - RNA, 21 nt, Human
uggcauugaagacauacacca

SEQ ID NO: 1055578 - RNA, 24 nt, Human
uggcgauggaguaccggaugaguc

SEQ ID NO: 1055579 - RNA, 19 nt, Human
uggcugcgggcuggcgaug

SEQ ID NO: 1055580 - RNA, 18 nt, Human
uggcugggucucaucacu

SEQ ID NO: 1055581 - RNA, 21 nt, Human
uggcuuggacaaucaagcugu

SEQ ID NO: 1055582 - RNA, 22 nt, Human
uggcuuucagacacugaugccu

SEQ ID NO: 1055583 - RNA, 25 nt, Human
uggcuuucagacacugaugccuggu

SEQ ID NO: 1055584 - RNA, 18 nt, Human
ugggaaggcucucgggua

SEQ ID NO: 1055585 - RNA, 22 nt, Human
ugggcagaggagcccgaggccg

SEQ ID NO: 1055586 - RNA, 19 nt, Human
ugggcauuggggaaagaaa

SEQ ID NO: 1055587 - RNA, 25 nt, Human
uggggaaagaaauaaaaguggggaa

SEQ ID NO: 1055588 - RNA, 22 nt, Human
uggggaacagggcucucuucga

SEQ ID NO: 1055589 - RNA, 23 nt, Human
ugggugguugucauugacaucca

SEQ ID NO: 1055590 - RNA, 27 nt, Human
uguaaccaacauauuuacugguugacc

SEQ ID NO: 1055591 - RNA, 18 nt, Human
ugucaaagucugggauga

SEQ ID NO: 1055592 - RNA, 18 nt, Human
ugucaccuuccuuucuuc

SEQ ID NO: 1055593 - RNA, 20 nt, Human
ugucauggguuccagcaggg

SEQ ID NO: 1055594 - RNA, 22 nt, Human
uguccgggugcacguggaaguc

SEQ ID NO: 1055595 - RNA, 18 nt, Human
uguuauuaaaucuucagg

SEQ ID NO: 1055596 - RNA, 21 nt, Human
uguuggacaacauugucaauu

SEQ ID NO: 1055597 - RNA, 22 nt, Human
uuacugucaggaugacaguugg

SEQ ID NO: 1055598 - RNA, 20 nt, Human
uuagcccacccccauccuuc

SEQ ID NO: 1055599 - RNA, 23 nt, Human
uucacuguuccaaugggacuauc

SEQ ID NO: 1055600 - RNA, 23 nt, Human
uuccuuagaaagaaacaagucuc

SEQ ID NO: 1055601 - RNA, 22 nt, Human
uucuuuuucuuuuccuucaggc

SEQ ID NO: 1055602 - RNA, 18 nt, Human
uugagaguucuccugaca

SEQ ID NO: 1055603 - RNA, 19 nt, Human
uugauggguuaaacacagg

SEQ ID NO: 1055604 - RNA, 18 nt, Human
uugcagggagccgagagu

SEQ ID NO: 1055605 - RNA, 25 nt, Human
uugcagggagccgagaguuggacua

SEQ ID NO: 1055606 - RNA, 20 nt, Human
uugcagggagccgagauugc

SEQ ID NO: 1055607 - RNA, 25 nt, Human
uugccagacagaauagaauacucaa

SEQ ID NO: 1055608 - RNA, 21 nt, Human
uuguagaguuggcuuucagac

SEQ ID NO: 1055609 - RNA, 22 nt, Human
uuuacaucaagaacaguaacug

SEQ ID NO: 1055610 - RNA, 19 nt, Human
uuucccaauggcaucugac

SEQ ID NO: 1055611 - RNA, 20 nt, Human
uuuuccauuccuuccuucgu

SEQ ID NO: 1055612 - RNA, 30 nt, Human
aaaacaaauaaaagaaaaaaaaaugcaccc

SEQ ID NO: 1055613 - RNA, 21 nt, Human
aaaagaaaaaaaaaugcacca

SEQ ID NO: 1055614 - RNA, 22 nt, Human
aaaguguugggauuacaggcau

SEQ ID NO: 1055615 - RNA, 24 nt, Human
aaaguguugggauuacaggcauca

SEQ ID NO: 1055616 - RNA, 19 nt, Human
aacauggugaaaccccauc

SEQ ID NO: 1055617 - RNA, 20 nt, Human
aacauggugaaaccccaucu

SEQ ID NO: 1055618 - RNA, 21 nt, Human
aacauggugaaaccccaucuc

SEQ ID NO: 1055619 - RNA, 21 nt, Human
aacauggugaaaccccaucuc

SEQ ID NO: 1055620 - RNA, 18 nt, Human
aacguaaaacaaaggaga

SEQ ID NO: 1055621 - RNA, 25 nt, Human
aagcuaagaaauggaaacuacacaa

SEQ ID NO: 1055622 - RNA, 19 nt, Human
aaguguugggauuacaggc

SEQ ID NO: 1055623 - RNA, 21 nt, Human
aaguguugggauuacaggcau

SEQ ID NO: 1055624 - RNA, 24 nt, Human
aaucacuugaacccgggaggugga

SEQ ID NO: 1055625 - RNA, 19 nt, Human
acaaaguguugggauuaca

SEQ ID NO: 1055626 - RNA, 23 nt, Human
acaaaguguugggauuacaggca

SEQ ID NO: 1055627 - RNA, 24 nt, Human
acaaaguguugggauuacaggcau

SEQ ID NO: 1055628 - RNA, 29 nt, Human
acacaaaguucuaaauaaaacaaauaaag

SEQ ID NO: 1055629 - RNA, 20 nt, Human
acaccaggauauaucaacca

SEQ ID NO: 1055630 - RNA, 24 nt, Human
acacuagacuccagccugggugac

SEQ ID NO: 1055631 - RNA, 18 nt, Human
acagcucacuguagccuc

SEQ ID NO: 1055632 - RNA, 21 nt, Human
acaggcaucagucacuaugcc

SEQ ID NO: 1055633 - RNA, 22 nt, Human
acaggcguaugcaaccaggccu

SEQ ID NO: 1055634 - RNA, 24 nt, Human
accccaucucuacuaaaaauacaa

SEQ ID NO: 1055635 - RNA, 21 nt, Human
acuagacuccagccuggguga

SEQ ID NO: 1055636 - RNA, 24 nt, Human
acuagacuccagccugggugacag

SEQ ID NO: 1055637 - RNA, 24 nt, Human
acuauguugcccaggcuggucugg

SEQ ID NO: 1055638 - RNA, 22 nt, Human
acuccagccugggugacagagc

SEQ ID NO: 1055639 - RNA, 23 nt, Human
acuccagccugggugacagagcg

SEQ ID NO: 1055640 - RNA, 24 nt, Human
acuggaggucaggaguuugagacu

SEQ ID NO: 1055641 - RNA, 20 nt, Human
agaaauuccuuccuagaaac

SEQ ID NO: 1055642 - RNA, 22 nt, Human
agaaucacuugaacccgggagg

SEQ ID NO: 1055643 - RNA, 24 nt, Human
agcacuuugggaggccgagguggg

SEQ ID NO: 1055644 - RNA, 22 nt, Human
agccuggccaacauggugaaac

SEQ ID NO: 1055645 - RNA, 24 nt, Human
agccuggccaacauggugaaaccc

SEQ ID NO: 1055646 - RNA, 23 nt, Human
agcuauccuccugcuuuggccuc

SEQ ID NO: 1055647 - RNA, 19 nt, Human
aggaauauuuaacuacuga

SEQ ID NO: 1055648 - RNA, 19 nt, Human
aggcaaaagcuaagaaaug

SEQ ID NO: 1055649 - RNA, 24 nt, Human
aggcacaguggcucacaccuguaa

SEQ ID NO: 1055650 - RNA, 24 nt, Human
aggccagagaaucacuugaacccg

SEQ ID NO: 1055651 - RNA, 21 nt, Human
aggccgaggugggcagaucac

SEQ ID NO: 1055652 - RNA, 24 nt, Human
agguggagguugcagugagccaag

SEQ ID NO: 1055653 - RNA, 22 nt, Human
aggugggcagaucacuggaggu

SEQ ID NO: 1055654 - RNA, 26 nt, Human
aggugggcagaucacuggaggucagg

SEQ ID NO: 1055655 - RNA, 21 nt, Human
aguacaguggugcaaucacag

SEQ ID NO: 1055656 - RNA, 23 nt, Human
aguacaguggugcaaucacagcu

SEQ ID NO: 1055657 - RNA, 24 nt, Human
aguggcucacaccuguaaucccag

SEQ ID NO: 1055658 - RNA, 24 nt, Human
aucacgacacuagacuccagccug

SEQ ID NO: 1055659 - RNA, 20 nt, Human
aucacuggaggucaggaguu

SEQ ID NO: 1055660 - RNA, 24 nt, Human
aucacuggaggucaggaguuugag

SEQ ID NO: 1055661 - RNA, 20 nt, Human
auccuccugcuucagccucc

SEQ ID NO: 1055662 - RNA, 22 nt, Human
auguugcccaggcuggucugga

SEQ ID NO: 1055663 - RNA, 19 nt, Human
auuuaucacugaccuuccu

SEQ ID NO: 1055664 - RNA, 25 nt, Human
caaacuccugggcucaagcuauccu

SEQ ID NO: 1055665 - RNA, 21 nt, Human
caaaguguugggauuacaggc

SEQ ID NO: 1055666 - RNA, 22 nt, Human
caaaguguugggauuacaggca

SEQ ID NO: 1055667 - RNA, 23 nt, Human
caaaguguugggauuacaggcau

SEQ ID NO: 1055668 - RNA, 24 nt, Human
caacauggugaaaccccaucucua

SEQ ID NO: 1055669 - RNA, 22 nt, Human
caagcuauccuccugcuucagc

SEQ ID NO: 1055670 - RNA, 22 nt, Human
caagcuauccuccugcuuuggc

SEQ ID NO: 1055671 - RNA, 24 nt, Human
cacaccuguaaucccagcacuuug

SEQ ID NO: 1055672 - RNA, 24 nt, Human
cacaccuguagucccagcuacuug

SEQ ID NO: 1055673 - RNA, 23 nt, Human
caccuguaaucccagcacuuugg

SEQ ID NO: 1055674 - RNA, 24 nt, Human
caccuguaaucccagcacuuuggg

SEQ ID NO: 1055675 - RNA, 23 nt, Human
caccuguagucccagcuacuugg

SEQ ID NO: 1055676 - RNA, 24 nt, Human
caccuguagucccagcuacuuggg

SEQ ID NO: 1055677 - RNA, 23 nt, Human
cacuagacuccagccugggugac

SEQ ID NO: 1055678 - RNA, 24 nt, Human
cacuagacuccagccugggugaca

SEQ ID NO: 1055679 - RNA, 19 nt, Human
cacuauguugcccaggcug

SEQ ID NO: 1055680 - RNA, 22 nt, Human
cacuauguugcccaggcugguc

SEQ ID NO: 1055681 - RNA, 26 nt, Human
cacucugcuauuuccaaugccaccuc

SEQ ID NO: 1055682 - RNA, 23 nt, Human
cacuggaggucaggaguuugaga

SEQ ID NO: 1055683 - RNA, 24 nt, Human
cagaucacuggaggucaggaguuu

SEQ ID NO: 1055684 - RNA, 24 nt, Human
cagcacuuugggaggccgaggugg

SEQ ID NO: 1055685 - RNA, 20 nt, Human
cagccuccugaguagcuggg

SEQ ID NO: 1055686 - RNA, 24 nt, Human
caggaucucacuauguugcccagg

SEQ ID NO: 1055687 - RNA, 24 nt, Human
ccaccuccucccaaacguaaaaca

SEQ ID NO: 1055688 - RNA, 21 nt, Human
cccgggagguggagguugcag

SEQ ID NO: 1055689 - RNA, 18 nt, Human
ccgcgaagcacucugcua

SEQ ID NO: 1055690 - RNA, 24 nt, Human
ccuccugcuucagccuccugagua

SEQ ID NO: 1055691 - RNA, 25 nt, Human
ccuccugcuuuggccucccaacaaa

SEQ ID NO: 1055692 - RNA, 18 nt, Human
ccugccugugcccuucuu

SEQ ID NO: 1055693 - RNA, 18 nt, Human
ccugccugugcccuucuu

SEQ ID NO: 1055694 - RNA, 23 nt, Human
ccuggccaacauggugaaacccc

SEQ ID NO: 1055695 - RNA, 24 nt, Human
ccuggccaacauggugaaacccca

SEQ ID NO: 1055696 - RNA, 20 nt, Human
ccuggccucaagcuauccuc

SEQ ID NO: 1055697 - RNA, 20 nt, Human
ccugggcucaagcuauccuc

SEQ ID NO: 1055698 - RNA, 23 nt, Human
ccugggcucaagcuauccuccug

SEQ ID NO: 1055699 - RNA, 20 nt, Human
ccugggugacagagcgagac

SEQ ID NO: 1055700 - RNA, 21 nt, Human
ccuguagucccagcuacuugg

SEQ ID NO: 1055701 - RNA, 18 nt, Human
ccugugcccuucuugaag

SEQ ID NO: 1055702 - RNA, 24 nt, Human
cgaggugggcagaucacuggaggu

SEQ ID NO: 1055703 - RNA, 26 nt, Human
cgaggugggcagaucacuggagguca

SEQ ID NO: 1055704 - RNA, 29 nt, Human
cgggagguggagguugcagugacaacggu

SEQ ID NO: 1055705 - RNA, 24 nt, Human
cgggagguggagguugcagugagc

SEQ ID NO: 1055706 - RNA, 19 nt, Human
cuagagugaaggccucuuc

SEQ ID NO: 1055707 - RNA, 18 nt, Human
cucaagcuauccuccugc

SEQ ID NO: 1055708 - RNA, 21 nt, Human
cucaagcuauccuccugcuuc

SEQ ID NO: 1055709 - RNA, 22 nt, Human
cucacaccuguaaucccagcac

SEQ ID NO: 1055710 - RNA, 24 nt, Human
cucacaccuguaaucccagcacuu

SEQ ID NO: 1055711 - RNA, 24 nt, Human
cucacuguagccucaaacuccugg

SEQ ID NO: 1055712 - RNA, 23 nt, Human
cugcuucagccuccugaguagcu

SEQ ID NO: 1055713 - RNA, 23 nt, Human
cuggccaacauggugaaacccca

SEQ ID NO: 1055714 - RNA, 22 nt, Human
cuucagcaaacaccugcuggac

SEQ ID NO: 1055715 - RNA, 21 nt, Human
cuugaacccgggagguggagg

SEQ ID NO: 1055716 - RNA, 23 nt, Human
cuuugggaggccgaggugggcag

SEQ ID NO: 1055717 - RNA, 21 nt, Human
gaaaauuuaucacugaccuuc

SEQ ID NO: 1055718 - RNA, 19 nt, Human
gaagcacacuuuaagaaca

SEQ ID NO: 1055719 - RNA, 22 nt, Human
gacuccagccugggugacagag

SEQ ID NO: 1055720 - RNA, 23 nt, Human
gacuccagccugggugacagagc

SEQ ID NO: 1055721 - RNA, 23 nt, Human
gagacuagccuggccaacauggu

SEQ ID NO: 1055722 - RNA, 19 nt, Human
gaggucaggaguuugagac

SEQ ID NO: 1055723 - RNA, 18 nt, Human
gagguugcagugagccaa

SEQ ID NO: 1055724 - RNA, 22 nt, Human
gagguugcagugagccaagauc

SEQ ID NO: 1055725 - RNA, 24 nt, Human
gaucacuggaggucaggaguuuga

SEQ ID NO: 1055726 - RNA, 19 nt, Human
gauuacaggcaucagucac

SEQ ID NO: 1055727 - RNA, 21 nt, Human
gauuacaggcaucagucacua

SEQ ID NO: 1055728 - RNA, 24 nt, Human
gccaacauggugaaaccccaucuc

SEQ ID NO: 1055729 - RNA, 24 nt, Human
gccaccuccucccaaacguaaaac

SEQ ID NO: 1055730 - RNA, 20 nt, Human
gccuaccaacaaaaacaaaa

SEQ ID NO: 1055731 - RNA, 21 nt, Human
gcgaagcacucugcuauuucc

SEQ ID NO: 1055732 - RNA, 21 nt, Human
gcgagacgccuaccaacaaaa

SEQ ID NO: 1055733 - RNA, 23 nt, Human
gcuggucuggaacuccuggccuc

SEQ ID NO: 1055734 - RNA, 20 nt, Human
ggagguugcagugagccaag

SEQ ID NO: 1055735 - RNA, 24 nt, Human
ggagguugcagugagccaagauca

SEQ ID NO: 1055736 - RNA, 24 nt, Human
ggauuacaggcaucagucacuaug

SEQ ID NO: 1055737 - RNA, 25 nt, Human
ggcagaucacuggaggucaggaguu

SEQ ID NO: 1055738 - RNA, 21 nt, Human
ggccaggcacaguggcucaca

SEQ ID NO: 1055739 - RNA, 22 nt, Human
ggcguggugacacacaccugua

SEQ ID NO: 1055740 - RNA, 24 nt, Human
ggcuggucuggaacuccuggccuc

SEQ ID NO: 1055741 - RNA, 19 nt, Human
gggcucaagcuauccuccu

SEQ ID NO: 1055742 - RNA, 24 nt, Human
ggugacacacaccuguagucccag

SEQ ID NO: 1055743 - RNA, 20 nt, Human
guuaaucugcuucauccugu

SEQ ID NO: 1055744 - RNA, 21 nt, Human
uaaaaagaaaacaaaaaucac

SEQ ID NO: 1055745 - RNA, 23 nt, Human
uaaaaagaaaacaaaaaucacaa

SEQ ID NO: 1055746 - RNA, 18 nt, Human
uaaaacaaaggagaaacu

SEQ ID NO: 1055747 - RNA, 22 nt, Human
uaaaacaaauaaaagaaaaaaa

SEQ ID NO: 1055748 - RNA, 22 nt, Human
uaagcugucuucagcaaacacc

SEQ ID NO: 1055749 - RNA, 21 nt, Human
uacaccaggauauaucaacca

SEQ ID NO: 1055750 - RNA, 22 nt, Human
uacaggcaucagucacuaugcc

SEQ ID NO: 1055751 - RNA, 22 nt, Human
uagagacaggaucucacuaugu

SEQ ID NO: 1055752 - RNA, 22 nt, Human
uagagugaaggccucuucuguu

SEQ ID NO: 1055753 - RNA, 24 nt, Human
uagccuggccaacauggugaaacc

SEQ ID NO: 1055754 - RNA, 19 nt, Human
uaggagcaucuuaguaacu

SEQ ID NO: 1055755 - RNA, 19 nt, Human
uauguugcccaggcugguc

SEQ ID NO: 1055756 - RNA, 20 nt, Human
uauguugcccaggcuggucu

SEQ ID NO: 1055757 - RNA, 22 nt, Human
uauguugcccaggcuggucugg

SEQ ID NO: 1055758 - RNA, 23 nt, Human
uauguugcccaggcuggucugga

SEQ ID NO: 1055759 - RNA, 24 nt, Human
uauguugcccaggcuggucuggaa

SEQ ID NO: 1055760 - RNA, 24 nt, Human
ucacuguagccucaaacuccuggg

SEQ ID NO: 1055761 - RNA, 24 nt, Human
ucacuugaacccgggagguggagg

SEQ ID NO: 1055762 - RNA, 21 nt, Human
ucagcaaacaccugcuggacu

SEQ ID NO: 1055763 - RNA, 20 nt, Human
ucagccuccugaguagcugg

SEQ ID NO: 1055764 - RNA, 22 nt, Human
uccaacagauaauauauugaag

SEQ ID NO: 1055765 - RNA, 23 nt, Human
uccagccugggugacagagcgag

SEQ ID NO: 1055766 - RNA, 24 nt, Human
uccagccugggugacagagcgaga

SEQ ID NO: 1055767 - RNA, 20 nt, Human
uccucccaaacguaaaacaa

SEQ ID NO: 1055768 - RNA, 23 nt, Human
uccuccugcuuuggccucccaac

SEQ ID NO: 1055769 - RNA, 24 nt, Human
uccuccugcuuuggccucccaaca

SEQ ID NO: 1055770 - RNA, 24 nt, Human
uccugaguagcugggaacacaggc

SEQ ID NO: 1055771 - RNA, 22 nt, Human
uccugggcucaagcuauccucc

SEQ ID NO: 1055772 - RNA, 22 nt, Human
uccugggcucaagcuauccucc

SEQ ID NO: 1055773 - RNA, 24 nt, Human
uccugggcucaagcuauccuccug

SEQ ID NO: 1055774 - RNA, 19 nt, Human
ucucacuauguugcccagg

SEQ ID NO: 1055775 - RNA, 23 nt, Human
ucucacuauguugcccaggcugg

SEQ ID NO: 1055776 - RNA, 24 nt, Human
ucucacuauguugcccaggcuggu

SEQ ID NO: 1055777 - RNA, 26 nt, Human
ucucacuauguugcccaggcuggucu

SEQ ID NO: 1055778 - RNA, 27 nt, Human
ucucacuauguugcccaggcuggucug

SEQ ID NO: 1055779 - RNA, 21 nt, Human
ucucuacuaaaaauacaaaaa

SEQ ID NO: 1055780 - RNA, 20 nt, Human
ugaaaauaagucuuauaucc

SEQ ID NO: 1055781 - RNA, 19 nt, Human
ugaaaccccaucucuacua

SEQ ID NO: 1055782 - RNA, 23 nt, Human
ugagacuagccuggccaacaugg

SEQ ID NO: 1055783 - RNA, 20 nt, Human
ugaggccagagaaucacuug

SEQ ID NO: 1055784 - RNA, 24 nt, Human
ugaggccagagaaucacuugaacc

SEQ ID NO: 1055785 - RNA, 23 nt, Human
ugaucugaguaagcugucuucag

SEQ ID NO: 1055786 - RNA, 24 nt, Human
ugcccaggcuggucuggaacuccu

SEQ ID NO: 1055787 - RNA, 24 nt, Human
ugcuucagccuccugaguagcugg

SEQ ID NO: 1055788 - RNA, 20 nt, Human
ugcuuuggccucccaacaaa

SEQ ID NO: 1055789 - RNA, 21 nt, Human
uggaagcacacuuuaagaaca

SEQ ID NO: 1055790 - RNA, 26 nt, Human
uggaagcacacuuuaagaacacacaa

SEQ ID NO: 1055791 - RNA, 19 nt, Human
uggaguacaguggugcaau

SEQ ID NO: 1055792 - RNA, 24 nt, Human
uggccaacauggugaaaccccauc

SEQ ID NO: 1055793 - RNA, 20 nt, Human
uggccucaagcuauccuccu

SEQ ID NO: 1055794 - RNA, 21 nt, Human
uggccucaagcuauccuccug

SEQ ID NO: 1055795 - RNA, 24 nt, Human
uggccucaagcuauccuccugcuu

SEQ ID NO: 1055796 - RNA, 21 nt, Human
uggcucacaccuguaauccca

SEQ ID NO: 1055797 - RNA, 24 nt, Human
uggcucacaccuguaaucccagca

SEQ ID NO: 1055798 - RNA, 24 nt, Human
ugggaacacaggcguaugcaacca

SEQ ID NO: 1055799 - RNA, 19 nt, Human
ugggaggccgaggugggca

SEQ ID NO: 1055800 - RNA, 20 nt, Human
ugggaggccgaggugggcag

SEQ ID NO: 1055801 - RNA, 24 nt, Human
ugggaggccgaggugggcagauca

SEQ ID NO: 1055802 - RNA, 24 nt, Human
ugggaggcugaggccagagaauca

SEQ ID NO: 1055803 - RNA, 18 nt, Human
ugggauuacaggcaucag

SEQ ID NO: 1055804 - RNA, 21 nt, Human
ugggauuacaggcaucaguca

SEQ ID NO: 1055805 - RNA, 22 nt, Human
ugggauuacaggcaucagucac

SEQ ID NO: 1055806 - RNA, 22 nt, Human
ugggauuacaggcaucagucac

SEQ ID NO: 1055807 - RNA, 24 nt, Human
ugggauuacaggcaucagucacua

SEQ ID NO: 1055808 - RNA, 24 nt, Human
ugggcagaucacuggaggucagga

SEQ ID NO: 1055809 - RNA, 24 nt, Human
ugggcucaagcuauccuccugcuu

SEQ ID NO: 1055810 - RNA, 23 nt, Human
uggugacacacaccuguaguccc

SEQ ID NO: 1055811 - RNA, 24 nt, Human
uggugacacacaccuguaguccca

SEQ ID NO: 1055812 - RNA, 24 nt, Human
uggugcaaucacagcucacuguag

SEQ ID NO: 1055813 - RNA, 23 nt, Human
ugucacugaucacucuucuguua

SEQ ID NO: 1055814 - RNA, 21 nt, Human
uguucuguucacacaggcucc

SEQ ID NO: 1055815 - RNA, 19 nt, Human
uguugcccaggcuggucug

SEQ ID NO: 1055816 - RNA, 20 nt, Human
uuagccgggcguggugacac

SEQ ID NO: 1055817 - RNA, 21 nt, Human
uucagcaaacaccugcuggac

SEQ ID NO: 1055818 - RNA, 20 nt, Human
uuccaaugccaccuccuccc

SEQ ID NO: 1055819 - RNA, 24 nt, Human
uugaacccgggagguggagguugc

SEQ ID NO: 1055820 - RNA, 20 nt, Human
uugcagugagccaagaucac

SEQ ID NO: 1055821 - RNA, 25 nt, Human
uugggaggccgaggugggcagauca

SEQ ID NO: 1055822 - RNA, 25 nt, Human
uugggaggcugaggccagagaauca

SEQ ID NO: 1055823 - RNA, 24 nt, Human
uuguagagacaggaucucacuaug

SEQ ID NO: 1055824 - RNA, 20 nt, Human
uuuccaaugccaccuccucc

SEQ ID NO: 1055825 - RNA, 21 nt, Human
uuuggccucccaacaaagugu

SEQ ID NO: 1055826 - RNA, 18 nt, Human
uuuuuuuguagagacagg

SEQ ID NO: 1055827 - RNA, 21 nt, Human
aacauacugagcuggaagcac

SEQ ID NO: 1055828 - RNA, 18 nt, Human
aagcagauuuaacuaaga

SEQ ID NO: 1055829 - RNA, 21 nt, Human
auacugagcuggaagcacugc

SEQ ID NO: 1055830 - RNA, 25 nt, Human
caagugucccugcaccuuaaauuuu

SEQ ID NO: 1055831 - RNA, 19 nt, Human
cacccuuugcuaugacguc

SEQ ID NO: 1055832 - RNA, 20 nt, Human
ccaguaaagguagaguugcu

SEQ ID NO: 1055833 - RNA, 23 nt, Human
cuaauuuccucauuuaaaauuuc

SEQ ID NO: 1055834 - RNA, 21 nt, Human
cucauagcauucacaguaguu

SEQ ID NO: 1055835 - RNA, 19 nt, Human
cucccuccuuuccuuuccc

SEQ ID NO: 1055836 - RNA, 19 nt, Human
cuuccagaaaaucaagugu

SEQ ID NO: 1055837 - RNA, 20 nt, Human
gcuuucggggccgacuggcc

SEQ ID NO: 1055838 - RNA, 21 nt, Human
uaaaggcuucuggauuucugu

SEQ ID NO: 1055839 - RNA, 22 nt, Human
uaagcagauuuaacuaagauuu

SEQ ID NO: 1055840 - RNA, 25 nt, Human
uacaauuacagggcuuucggggccc

SEQ ID NO: 1055841 - RNA, 23 nt, Human
uacaauugcaguuguugcaaaau

SEQ ID NO: 1055842 - RNA, 20 nt, Human
uacagggcuuucggggccga

SEQ ID NO: 1055843 - RNA, 21 nt, Human
uaccagauguuccaguaaagg

SEQ ID NO: 1055844 - RNA, 23 nt, Human
uaggcuuaaaggcuucuggauuu

SEQ ID NO: 1055845 - RNA, 21 nt, Human
uaucagucuuuugugcaagag

SEQ ID NO: 1055846 - RNA, 19 nt, Human
uauugcuuuuugccuuuca

SEQ ID NO: 1055847 - RNA, 23 nt, Human
uccuuuccuuucccuaucuuagg

SEQ ID NO: 1055848 - RNA, 20 nt, Human
ucucccuccuuuccuuuccc

SEQ ID NO: 1055849 - RNA, 25 nt, Human
ucucuuguuuuucuuccagaaaauc

SEQ ID NO: 1055850 - RNA, 23 nt, Human
ugagcuggaagcacugcauaacc

SEQ ID NO: 1055851 - RNA, 19 nt, Human
ugauacauaugaagacugc

SEQ ID NO: 1055852 - RNA, 19 nt, Human
uggaagccgugccuggguc

SEQ ID NO: 1055853 - RNA, 23 nt, Human
uuaaaauguacuaauuuccucau

SEQ ID NO: 1055854 - RNA, 21 nt, Human
uucacaguaguuuuuaagaca

SEQ ID NO: 1055855 - RNA, 22 nt, Human
uuccaguaaagguagaguugcu

SEQ ID NO: 1055856 - RNA, 22 nt, Human
aaaauucaacucauacuucaga

SEQ ID NO: 1055857 - RNA, 23 nt, Human
aaacagcaaguggccaggcaggg

SEQ ID NO: 1055858 - RNA, 24 nt, Human
aaacuaacauuuacccagguuaca

SEQ ID NO: 1055859 - RNA, 19 nt, Human
aaagcaagccaaccaauaa

SEQ ID NO: 1055860 - RNA, 20 nt, Human
aaagggaacauugagucuuc

SEQ ID NO: 1055861 - RNA, 25 nt, Human
aacacuugaauuuuccaggaaugug

SEQ ID NO: 1055862 - RNA, 23 nt, Human
aaccaaacugggcacucucaaaa

SEQ ID NO: 1055863 - RNA, 19 nt, Human
aagcaagcugaugaccagg

SEQ ID NO: 1055864 - RNA, 21 nt, Human
aagcagcuguuuccacgcacu

SEQ ID NO: 1055865 - RNA, 20 nt, Human
aaugcaauauaucuaaaguu

SEQ ID NO: 1055866 - RNA, 20 nt, Human
acagugaagaagucaaggga

SEQ ID NO: 1055867 - RNA, 18 nt, Human
acccuaugauaaaaccaa

SEQ ID NO: 1055868 - RNA, 23 nt, Human
accuccucacccuaugauaaaac

SEQ ID NO: 1055869 - RNA, 23 nt, Human
accuggccggguucgggaagcca

SEQ ID NO: 1055870 - RNA, 23 nt, Human
acuaacaugagcuccccaaccug

SEQ ID NO: 1055871 - RNA, 24 nt, Human
acugggucaaaggagcaggucugg

SEQ ID NO: 1055872 - RNA, 23 nt, Human
agaaacuuuuauauauaacacau

SEQ ID NO: 1055873 - RNA, 25 nt, Human
agaaagaacauuacuuauugcaaga

SEQ ID NO: 1055874 - RNA, 18 nt, Human
agaaggaaagcauuuuau

SEQ ID NO: 1055875 - RNA, 22 nt, Human
agaagugaaguaacuugcucag

SEQ ID NO: 1055876 - RNA, 21 nt, Human
agacacagaagacagauggcg

SEQ ID NO: 1055877 - RNA, 23 nt, Human
agauauuagugaagaccuuucaa

SEQ ID NO: 1055878 - RNA, 23 nt, Human
aggggcaggcacugaagaggucc

SEQ ID NO: 1055879 - RNA, 20 nt, Human
aggguagaaagcaaauaaac

SEQ ID NO: 1055880 - RNA, 24 nt, Human
aggugcugguucuggcacuaagcu

SEQ ID NO: 1055881 - RNA, 20 nt, Human
agugaagaccuuucaacgua

SEQ ID NO: 1055882 - RNA, 18 nt, Human
auggugccccuaguuuuu

SEQ ID NO: 1055883 - RNA, 22 nt, Human
auuaucuucuacacuuagccuu

SEQ ID NO: 1055884 - RNA, 23 nt, Human
caaacugggcacucucaaaauca

SEQ ID NO: 1055885 - RNA, 24 nt, Human
caaagcaagcugaugaccagguca

SEQ ID NO: 1055886 - RNA, 21 nt, Human
caaaugcgccaagccaaaaca

SEQ ID NO: 1055887 - RNA, 25 nt, Human
caacuaaaccaaacugggcacucuc

SEQ ID NO: 1055888 - RNA, 27 nt, Human
caacuaaaccaaacugggcacucucaa

SEQ ID NO: 1055889 - RNA, 18 nt, Human
cacacaguucccauaaaa

SEQ ID NO: 1055890 - RNA, 19 nt, Human
caccugaaaagcaucaggu

SEQ ID NO: 1055891 - RNA, 22 nt, Human
cacuauuccucucggccccacg

SEQ ID NO: 1055892 - RNA, 19 nt, Human
cacugcauugcuucaaagu

SEQ ID NO: 1055893 - RNA, 20 nt, Human
cagaacggaaaagcaagcca

SEQ ID NO: 1055894 - RNA, 25 nt, Human
cagaacggaaaagcaagccaaccaa

SEQ ID NO: 1055895 - RNA, 25 nt, Human
cagaacggaaaagcaagccaaccaa

SEQ ID NO: 1055896 - RNA, 21 nt, Human
cagcaugguagaugcuuucca

SEQ ID NO: 1055897 - RNA, 19 nt, Human
cagccgccugagcccggcc

SEQ ID NO: 1055898 - RNA, 22 nt, Human
cagcucaaauuagaaacugaag

SEQ ID NO: 1055899 - RNA, 23 nt, Human
ccaaccuccucacccuaugauaa

SEQ ID NO: 1055900 - RNA, 29 nt, Human
ccaaccuccucacccuaugauaaaaccaa

SEQ ID NO: 1055901 - RNA, 20 nt, Human
ccaucugcaaacuaaaauga

SEQ ID NO: 1055902 - RNA, 19 nt, Human
ccccagcagccgccugagc

SEQ ID NO: 1055903 - RNA, 23 nt, Human
ccgccgcgccucauccgccgucc

SEQ ID NO: 1055904 - RNA, 23 nt, Human
cgccgucccgcgcggucuccugg

SEQ ID NO: 1055905 - RNA, 18 nt, Human
cggaaaagcaagccaacc

SEQ ID NO: 1055906 - RNA, 19 nt, Human
gaaaguagauguuugugag

SEQ ID NO: 1055907 - RNA, 24 nt, Human
gaaauucucucaacuaaguagcuu

SEQ ID NO: 1055908 - RNA, 18 nt, Human
gaacaaggaaauucucuc

SEQ ID NO: 1055909 - RNA, 21 nt, Human
gaagaggucccucaaaccucc

SEQ ID NO: 1055910 - RNA, 22 nt, Human
gauccaucugcaaacuaaaaug

SEQ ID NO: 1055911 - RNA, 24 nt, Human
gccgccgcgccucauccgccgucc

SEQ ID NO: 1055912 - RNA, 24 nt, Human
gggcucagagcgcggcagguguuu

SEQ ID NO: 1055913 - RNA, 18 nt, Human
ggggaggugcccugggcc

SEQ ID NO: 1055914 - RNA, 18 nt, Human
guauaugugcuuggcucc

SEQ ID NO: 1055915 - RNA, 19 nt, Human
gucugaggcagacacagaa

SEQ ID NO: 1055916 - RNA, 19 nt, Human
uaacacaugcauuaaaaca

SEQ ID NO: 1055917 - RNA, 20 nt, Human
uaagccgaaaaucuagaaac

SEQ ID NO: 1055918 - RNA, 20 nt, Human
uaagccgaaaaucuagaaac

SEQ ID NO: 1055919 - RNA, 23 nt, Human
uaagccgaaaaucuagaaacuaa

SEQ ID NO: 1055920 - RNA, 22 nt, Human
uacaaaugcgccaagccaaaac

SEQ ID NO: 1055921 - RNA, 27 nt, Human
uagaaagcaaauaaacugagcuaccug

SEQ ID NO: 1055922 - RNA, 20 nt, Human
uagaacaggugaagagcaug

SEQ ID NO: 1055923 - RNA, 21 nt, Human
uagaaugcaauauaucuaaag

SEQ ID NO: 1055924 - RNA, 22 nt, Human
uagaugcuuuccacuucaguuc

SEQ ID NO: 1055925 - RNA, 19 nt, Human
uagauguuugugaggcaug

SEQ ID NO: 1055926 - RNA, 19 nt, Human
uauaaaagggaacauugag

SEQ ID NO: 1055927 - RNA, 23 nt, Human
uauauaacacaugcauuaaaaca

SEQ ID NO: 1055928 - RNA, 23 nt, Human
uaugcaaagagggcaaaaaauuc

SEQ ID NO: 1055929 - RNA, 22 nt, Human
ucaaagugaugacuaauguaaa

SEQ ID NO: 1055930 - RNA, 22 nt, Human
ucacccuaugauaaaaccaagg

SEQ ID NO: 1055931 - RNA, 22 nt, Human
ucaccugaaaagcaucaggugc

SEQ ID NO: 1055932 - RNA, 21 nt, Human
ucagaacggaaaagcaagcca

SEQ ID NO: 1055933 - RNA, 19 nt, Human
ucagagaagugaaguaacu

SEQ ID NO: 1055934 - RNA, 24 nt, Human
uccaaccuccucacccuaugauaa

SEQ ID NO: 1055935 - RNA, 24 nt, Human
uccacgcacugggucaaaggagca

SEQ ID NO: 1055936 - RNA, 21 nt, Human
uccaucugcaaacuaaaauga

SEQ ID NO: 1055937 - RNA, 27 nt, Human
uccuuccagcacacugcauugcuucaa

SEQ ID NO: 1055938 - RNA, 23 nt, Human
ucgaaugaauaugauccuaaaug

SEQ ID NO: 1055939 - RNA, 20 nt, Human
ucuucuacacuuagccuuaa

SEQ ID NO: 1055940 - RNA, 21 nt, Human
ugaaaaaaaggcagaaagaac

SEQ ID NO: 1055941 - RNA, 23 nt, Human
ugaaaaaaaggcagaaagaacau

SEQ ID NO: 1055942 - RNA, 20 nt, Human
ugacuuaaaagugaaaaaaa

SEQ ID NO: 1055943 - RNA, 21 nt, Human
ugacuuaaaagugaaaaaaag

SEQ ID NO: 1055944 - RNA, 20 nt, Human
ugagauggaaaucuugaacc

SEQ ID NO: 1055945 - RNA, 18 nt, Human
ugaggcagacacagaaga

SEQ ID NO: 1055946 - RNA, 24 nt, Human
ugaggcagacacagaagacagaug

SEQ ID NO: 1055947 - RNA, 24 nt, Human
ugauaaaaccaaggcucagagaag

SEQ ID NO: 1055948 - RNA, 18 nt, Human
ugcccaccacuucagaaa

SEQ ID NO: 1055949 - RNA, 20 nt, Human
ugcuccuuccagcacacugg

SEQ ID NO: 1055950 - RNA, 23 nt, Human
ugcuuuccacuucaguucacaca

SEQ ID NO: 1055951 - RNA, 21 nt, Human
uggauucuuuccaaaaauuuu

SEQ ID NO: 1055952 - RNA, 24 nt, Human
uggccaggcaggguagaaagcaaa

SEQ ID NO: 1055953 - RNA, 18 nt, Human
uggccggguucgggaagc

SEQ ID NO: 1055954 - RNA, 21 nt, Human
uggccggguucgggaagccag

SEQ ID NO: 1055955 - RNA, 24 nt, Human
uggggggcucagagcgcggcaggu

SEQ ID NO: 1055956 - RNA, 19 nt, Human
uggggugauauggcgggaa

SEQ ID NO: 1055957 - RNA, 18 nt, Human
uggucagacagaguucaa

SEQ ID NO: 1055958 - RNA, 19 nt, Human
ugguuauacccaagcuuuu

SEQ ID NO: 1055959 - RNA, 23 nt, Human
ugugccuuuuuccaaaucaguau

SEQ ID NO: 1055960 - RNA, 20 nt, Human
uuauauauaacacaugcauu

SEQ ID NO: 1055961 - RNA, 18 nt, Human
uucaccugaaaagcauca

SEQ ID NO: 1055962 - RNA, 23 nt, Human
uugcucagugccacaaagcaagc

SEQ ID NO: 1055963 - RNA, 21 nt, Human
uuugacagugaagaagucaaa

SEQ ID NO: 1055964 - RNA, 23 nt, Human
uuuuauuuucaccugaaaagcau

SEQ ID NO: 1055965 - RNA, 20 nt, Human
aaaaaaaaauacacugaaaa

SEQ ID NO: 1055966 - RNA, 30 nt, Human
aaaagcaauaaaaacacaauaucguacaaa

SEQ ID NO: 1055967 - RNA, 23 nt, Human
aaacaccuuuucaaacaacuugc

SEQ ID NO: 1055968 - RNA, 25 nt, Human
aaacagccagcacaugauuugaaac

SEQ ID NO: 1055969 - RNA, 22 nt, Human
aaguuauauuuaaccugggagc

SEQ ID NO: 1055970 - RNA, 19 nt, Human
aaugagaagacacuaagaa

SEQ ID NO: 1055971 - RNA, 20 nt, Human
acaauaucguacaaagucuu

SEQ ID NO: 1055972 - RNA, 23 nt, Human
accagcccggccccuccugucac

SEQ ID NO: 1055973 - RNA, 19 nt, Human
acugccccaauuucugaaa

SEQ ID NO: 1055974 - RNA, 21 nt, Human
agcuuguuucauacuuuuucu

SEQ ID NO: 1055975 - RNA, 24 nt, Human
aucugauuuuuuuccugaaaacaa

SEQ ID NO: 1055976 - RNA, 22 nt, Human
aucuuuacugauuuucaucaca

SEQ ID NO: 1055977 - RNA, 24 nt, Human
augaaagaacuauaaaauuauaaa

SEQ ID NO: 1055978 - RNA, 21 nt, Human
cacaauaucguacaaagucuu

SEQ ID NO: 1055979 - RNA, 18 nt, Human
cacaguagugaaacaaga

SEQ ID NO: 1055980 - RNA, 19 nt, Human
cagagguuuagaaauaaga

SEQ ID NO: 1055981 - RNA, 21 nt, Human
cagccaacuccuaccgccccg

SEQ ID NO: 1055982 - RNA, 23 nt, Human
cauauauggcuaccaaaugucaa

SEQ ID NO: 1055983 - RNA, 21 nt, Human
ccaaagauacaaaugccugac

SEQ ID NO: 1055984 - RNA, 20 nt, Human
ccacgccgcgacgcaccagg

SEQ ID NO: 1055985 - RNA, 20 nt, Human
ccccccuuuccuuuauaauc

SEQ ID NO: 1055986 - RNA, 21 nt, Human
ccccccuuuccuuuauaaucu

SEQ ID NO: 1055987 - RNA, 21 nt, Human
ccccgccggccugggcgccug

SEQ ID NO: 1055988 - RNA, 18 nt, Human
ccccggacagccgccgga

SEQ ID NO: 1055989 - RNA, 23 nt, Human
ccccggacagccgccggaggacc

SEQ ID NO: 1055990 - RNA, 20 nt, Human
ccgcacccgccgcugacagg

SEQ ID NO: 1055991 - RNA, 20 nt, Human
ccgccgcccgaaggcugccc

SEQ ID NO: 1055992 - RNA, 21 nt, Human
ccgccgcccgaaggcugcccu

SEQ ID NO: 1055993 - RNA, 18 nt, Human
ccuaccgccccggacagc

SEQ ID NO: 1055994 - RNA, 22 nt, Human
ccucacaauucuauugugcacu

SEQ ID NO: 1055995 - RNA, 21 nt, Human
ccugaaaacaacaguaaaaua

SEQ ID NO: 1055996 - RNA, 22 nt, Human
cgcagccaacuccuaccgcccc

SEQ ID NO: 1055997 - RNA, 23 nt, Human
cuaauaaaaacaccuuuucaaac

SEQ ID NO: 1055998 - RNA, 19 nt, Human
cucgcccaacccccggccg

SEQ ID NO: 1055999 - RNA, 23 nt, Human
cugaaaacaacaguaaaauacaa

SEQ ID NO: 1056000 - RNA, 21 nt, Human
gacaccuuaauaacauggcua

SEQ ID NO: 1056001 - RNA, 20 nt, Human
gcauuagaaaaaaauguacu

SEQ ID NO: 1056002 - RNA, 21 nt, Human
gccaacuccuaccgccccgga

SEQ ID NO: 1056003 - RNA, 20 nt, Human
gcccgaaggcugcccuggga

SEQ ID NO: 1056004 - RNA, 21 nt, Human
gccggaggaccacgccgcgac

SEQ ID NO: 1056005 - RNA, 19 nt, Human
gggagaaguuuucuaagug

SEQ ID NO: 1056006 - RNA, 18 nt, Human
guggggagugugaguggg

SEQ ID NO: 1056007 - RNA, 20 nt, Human
guucacuuucuggugguguu

SEQ ID NO: 1056008 - RNA, 21 nt, Human
uaaaaaaaaauacacugaaaa

SEQ ID NO: 1056009 - RNA, 23 nt, Human
uaaaaacacaauaucguacaaag

SEQ ID NO: 1056010 - RNA, 20 nt, Human
uaaaaauauugcaaaagcag

SEQ ID NO: 1056011 - RNA, 18 nt, Human
uaaaaccugaaaaugcug

SEQ ID NO: 1056012 - RNA, 23 nt, Human
uaaaaccugaaaaugcugaauua

SEQ ID NO: 1056013 - RNA, 20 nt, Human
uaaaauuuccaguagcauuu

SEQ ID NO: 1056014 - RNA, 19 nt, Human
uaacaaaacccaaaauauc

SEQ ID NO: 1056015 - RNA, 21 nt, Human
uaagacaccuuaauaacaugg

SEQ ID NO: 1056016 - RNA, 24 nt, Human
uaauuagcaccaaaauugucugaa

SEQ ID NO: 1056017 - RNA, 19 nt, Human
uacaaaugccugacugccc

SEQ ID NO: 1056018 - RNA, 18 nt, Human
uaccaaagauacaaaugg

SEQ ID NO: 1056019 - RNA, 24 nt, Human
uaguguaugcuaauuaucauuuac

SEQ ID NO: 1056020 - RNA, 22 nt, Human
uauauauucaacccuguuauga

SEQ ID NO: 1056021 - RNA, 23 nt, Human
uaugagauuauuugguggggagu

SEQ ID NO: 1056022 - RNA, 21 nt, Human
uaugaucaagaguuuaguuuu

SEQ ID NO: 1056023 - RNA, 19 nt, Human
uauguagauauacaaaauc

SEQ ID NO: 1056024 - RNA, 21 nt, Human
ucaacccuguuaugaucaaga

SEQ ID NO: 1056025 - RNA, 23 nt, Human
uccuaccgccccggacagccgcc

SEQ ID NO: 1056026 - RNA, 23 nt, Human
ucuacauguuuuacuuguugccc

SEQ ID NO: 1056027 - RNA, 19 nt, Human
ucuaggaaaaaauaugcaa

SEQ ID NO: 1056028 - RNA, 25 nt, Human
ugaauucuaaaucuuaacuaccccc

SEQ ID NO: 1056029 - RNA, 20 nt, Human
ugacaggagccgccggagcg

SEQ ID NO: 1056030 - RNA, 23 nt, Human
ugacaggagccgccggagcgcgc

SEQ ID NO: 1056031 - RNA, 23 nt, Human
ugacaguauacuaaauaguuagu

SEQ ID NO: 1056032 - RNA, 24 nt, Human
ugacuuuagccuuagaaaaagauu

SEQ ID NO: 1056033 - RNA, 19 nt, Human
ugagaagacacuaagaaug

SEQ ID NO: 1056034 - RNA, 19 nt, Human
uggcauggggauagaggug

SEQ ID NO: 1056035 - RNA, 20 nt, Human
uggggagugugaguggggag

SEQ ID NO: 1056036 - RNA, 19 nt, Human
uggguaaaagcuuuaugaa

SEQ ID NO: 1056037 - RNA, 22 nt, Human
uguacaucauaucauuuaugug

SEQ ID NO: 1056038 - RNA, 26 nt, Human
ugucaaaaagugaaauauauaacuuc

SEQ ID NO: 1056039 - RNA, 19 nt, Human
ugucaaacaauucaauucg

SEQ ID NO: 1056040 - RNA, 26 nt, Human
ugucaagauaggaaauacauuguuuc

SEQ ID NO: 1056041 - RNA, 21 nt, Human
ugugaaaaaauccaugucaag

SEQ ID NO: 1056042 - RNA, 21 nt, Human
uuacuuaagauuuggcauggg

SEQ ID NO: 1056043 - RNA, 22 nt, Human
uucccuguucacuuucuggugg

SEQ ID NO: 1056044 - RNA, 21 nt, Human
uuccugaaaacaacaguaaaa

SEQ ID NO: 1056045 - RNA, 25 nt, Human
uucuucaauuacauauauggcuacc

SEQ ID NO: 1056046 - RNA, 21 nt, Human
uuggcauggggauagaggugu

SEQ ID NO: 1056047 - RNA, 19 nt, Human
uuuccaguagcauuagaaa

SEQ ID NO: 1056048 - RNA, 25 nt, Human
uuucuggugguguuacuuaagauuu

SEQ ID NO: 1056049 - RNA, 22 nt, Human
aaacaaaacuauaaaccacuga

SEQ ID NO: 1056050 - RNA, 19 nt, Human
caaaacuauaaaccacuga

SEQ ID NO: 1056051 - RNA, 18 nt, Human
cacucaguugcuggguca

SEQ ID NO: 1056052 - RNA, 21 nt, Human
ccacugaaauucuauuuugaa

SEQ ID NO: 1056053 - RNA, 23 nt, Human
ucccaaacaaaacuauaaaccac

SEQ ID NO: 1056054 - RNA, 22 nt, Human
acucguacuccccgcaucgcgg

SEQ ID NO: 1056055 - RNA, 21 nt, Human
agccagggggggaagaggggc

SEQ ID NO: 1056056 - RNA, 21 nt, Human
agccagggggggaagaggggc

SEQ ID NO: 1056057 - RNA, 24 nt, Human
agccagggggggaagaggggcugg

SEQ ID NO: 1056058 - RNA, 19 nt, Human
ccagggggggaagaggggc

SEQ ID NO: 1056059 - RNA, 20 nt, Human
ccagggggggaagaggggcu

SEQ ID NO: 1056060 - RNA, 23 nt, Human
ccugcgauggggguccuaagagc

SEQ ID NO: 1056061 - RNA, 24 nt, Human
cugacucguacuccccgcaucgcg

SEQ ID NO: 1056062 - RNA, 18 nt, Human
cugagggaauaguuuaga

SEQ ID NO: 1056063 - RNA, 22 nt, Human
gagccaggggaggagaagggcu

SEQ ID NO: 1056064 - RNA, 24 nt, Human
gauaggugcccuaagagccagggg

SEQ ID NO: 1056065 - RNA, 24 nt, Human
gauggggguccuaagagccagggg

SEQ ID NO: 1056066 - RNA, 20 nt, Human
gccagggggggaagaggggc

SEQ ID NO: 1056067 - RNA, 21 nt, Human
ggaagaggggcuggcucuuac

SEQ ID NO: 1056068 - RNA, 19 nt, Human
ggagaagggcugacucgua

SEQ ID NO: 1056069 - RNA, 19 nt, Human
ggggggaagaggggcuggc

SEQ ID NO: 1056070 - RNA, 21 nt, Human
gucaccagcagcaucgccagg

SEQ ID NO: 1056071 - RNA, 22 nt, Human
uaggagaccgcggccgccacca

SEQ ID NO: 1056072 - RNA, 22 nt, Human
uaggugcccuaagagccagggg

SEQ ID NO: 1056073 - RNA, 21 nt, Human
uccgcagguaggagaccgcgg

SEQ ID NO: 1056074 - RNA, 29 nt, Human
ugccucaccccccugcgauaggugcccua

SEQ ID NO: 1056075 - RNA, 30 nt, Human
ugccucaccccccugcgauggggguccuaa

SEQ ID NO: 1056076 - RNA, 22 nt, Human
ugcgauaggugcccuaagagcc

SEQ ID NO: 1056077 - RNA, 23 nt, Human
ugcgauaggugcccuaagagcca

SEQ ID NO: 1056078 - RNA, 18 nt, Human
ugcgauggggguccuaag

SEQ ID NO: 1056079 - RNA, 18 nt, Human
uggggguccuaagagcca

SEQ ID NO: 1056080 - RNA, 22 nt, Human
uggggguccuaagagccagggg

SEQ ID NO: 1056081 - RNA, 20 nt, Human
gcagagaucuugcccuuugg

SEQ ID NO: 1056082 - RNA, 19 nt, Human
ucugcacgucugcccaaag

SEQ ID NO: 1056083 - RNA, 18 nt, Human
ugacagggacuucugggu

SEQ ID NO: 1056084 - RNA, 21 nt, Human
ugcccaaagaaggcauaagca

SEQ ID NO: 1056085 - RNA, 23 nt, Human
ugcccaaagaaggcauaagcaga

SEQ ID NO: 1056086 - RNA, 21 nt, Human
uucuucucugcacgucugccc

SEQ ID NO: 1056087 - RNA, 20 nt, Human
uucuucuuauguucuucucu

SEQ ID NO: 1056088 - RNA, 20 nt, Human
aaaugucaaccccacaagag

SEQ ID NO: 1056089 - RNA, 26 nt, Human
aaauuguugaagguuaucugcacuuc

SEQ ID NO: 1056090 - RNA, 20 nt, Human
ucaaguacugcaaaugucaa

SEQ ID NO: 1056091 - RNA, 19 nt, Human
ucugcacugaggcaaaggg

SEQ ID NO: 1056092 - RNA, 21 nt, Human
uuguucgugucucuuuccugu

SEQ ID NO: 1056093 - RNA, 21 nt, Human
aaaucaacccuaauuuuuagu

SEQ ID NO: 1056094 - RNA, 19 nt, Human
aagcagaagaaugcacuua

SEQ ID NO: 1056095 - RNA, 23 nt, Human
agaaaauacaaaaaaacauuuua

SEQ ID NO: 1056096 - RNA, 25 nt, Human
agacacaguaagccacaugcacccu

SEQ ID NO: 1056097 - RNA, 18 nt, Human
cacuauauagcagcagac

SEQ ID NO: 1056098 - RNA, 19 nt, Human
cacuauauagcagcagacu

SEQ ID NO: 1056099 - RNA, 18 nt, Human
cacuauuauuuugcuacc

SEQ ID NO: 1056100 - RNA, 24 nt, Human
gcagcagacuguguugccccuacg

SEQ ID NO: 1056101 - RNA, 18 nt, Human
ggagaaaauacaaaaaaa

SEQ ID NO: 1056102 - RNA, 20 nt, Human
uagcuggggugaaaagcaga

SEQ ID NO: 1056103 - RNA, 26 nt, Human
uauagcagcagacuguguugccccua

SEQ ID NO: 1056104 - RNA, 24 nt, Human
uauuuugcuaccuuugguaaauua

SEQ ID NO: 1056105 - RNA, 18 nt, Human
uccuuguuaaacagaggc

SEQ ID NO: 1056106 - RNA, 23 nt, Human
ugaaaagcagaagaaugcacuua

SEQ ID NO: 1056107 - RNA, 19 nt, Human
ugaaaauaucacaaaaauu

SEQ ID NO: 1056108 - RNA, 20 nt, Human
ugaaaauaucacaaaaauua

SEQ ID NO: 1056109 - RNA, 23 nt, Human
ugauagcuggggugaaaagcaga

SEQ ID NO: 1056110 - RNA, 22 nt, Human
cagcuuccaacuuccagacccu

SEQ ID NO: 1056111 - RNA, 19 nt, Human
ccagacccugcauacccca

SEQ ID NO: 1056112 - RNA, 24 nt, Human
cuuccagacccugcauaccccauu

SEQ ID NO: 1056113 - RNA, 24 nt, Human
uccagacccugcauaccccauuuc

SEQ ID NO: 1056114 - RNA, 20 nt, Human
uccuugaggagagguuccca

SEQ ID NO: 1056115 - RNA, 18 nt, Human
ugccauggaaugcugggu

SEQ ID NO: 1056116 - RNA, 19 nt, Human
uggaaugcugggucaggau

SEQ ID NO: 1056117 - RNA, 24 nt, Human
aaacccuccuuuggacccuugagg

SEQ ID NO: 1056118 - RNA, 22 nt, Human
aagcacugaaugaggaaggccg

SEQ ID NO: 1056119 - RNA, 21 nt, Human
aagggucuuuccagcuggugc

SEQ ID NO: 1056120 - RNA, 24 nt, Human
augaggaaggccggggugcucuuc

SEQ ID NO: 1056121 - RNA, 21 nt, Human
caaaagaagggucuuuccagc

SEQ ID NO: 1056122 - RNA, 24 nt, Human
caagcacugaaugaggaaggccgg

SEQ ID NO: 1056123 - RNA, 22 nt, Human
caggccuuugucaagugguggc

SEQ ID NO: 1056124 - RNA, 19 nt, Human
caggucgucugccaggugu

SEQ ID NO: 1056125 - RNA, 21 nt, Human
ccaaagcucaacuuucauguu

SEQ ID NO: 1056126 - RNA, 24 nt, Human
ccaguuaagagauguuaaagggag

SEQ ID NO: 1056127 - RNA, 21 nt, Human
cccucacacagacagugaagu

SEQ ID NO: 1056128 - RNA, 19 nt, Human
ccucacacagacagugaag

SEQ ID NO: 1056129 - RNA, 22 nt, Human
ccuccuuuggacccuugaggau

SEQ ID NO: 1056130 - RNA, 22 nt, Human
cgucugccagguguccugguag

SEQ ID NO: 1056131 - RNA, 21 nt, Human
gaagugccuuagccucugccc

SEQ ID NO: 1056132 - RNA, 18 nt, Human
gcaaaauaaacccuccuu

SEQ ID NO: 1056133 - RNA, 24 nt, Human
ggagggaguggaggcucugaagga

SEQ ID NO: 1056134 - RNA, 22 nt, Human
uaaagggagcuaacuacgaaug

SEQ ID NO: 1056135 - RNA, 22 nt, Human
uauuggguugggcaggcagccc

SEQ ID NO: 1056136 - RNA, 18 nt, Human
ugaagugccuuagccucu

SEQ ID NO: 1056137 - RNA, 24 nt, Human
ugccagguguccugguagcacucc

SEQ ID NO: 1056138 - RNA, 18 nt, Human
uggcuggaguccaguuaa

SEQ ID NO: 1056139 - RNA, 25 nt, Human
ugugugcagugucugugcccaaaag

SEQ ID NO: 1056140 - RNA, 27 nt, Human
uguuccaacacgcugcaggucgucugc

SEQ ID NO: 1056141 - RNA, 21 nt, Human
uguuucuucaucuacaagcac

SEQ ID NO: 1056142 - RNA, 21 nt, Human
aaggagacagagaaauagcca

SEQ ID NO: 1056143 - RNA, 24 nt, Human
cacgugccacaaaaauaugagaag

SEQ ID NO: 1056144 - RNA, 20 nt, Human
cuagcuucgcggccaccguc

SEQ ID NO: 1056145 - RNA, 21 nt, Human
cuuuaaaaggagacagagaaa

SEQ ID NO: 1056146 - RNA, 23 nt, Human
cuuuauuuauuuuuaccaauagu

SEQ ID NO: 1056147 - RNA, 22 nt, Human
ggagacagagaaauagccaagu

SEQ ID NO: 1056148 - RNA, 24 nt, Human
uaaacucuguuuaaucuuuaaaag

SEQ ID NO: 1056149 - RNA, 20 nt, Human
uaaaguauacaaaauguuga

SEQ ID NO: 1056150 - RNA, 20 nt, Human
ugagaaaugcuuauaaccau

SEQ ID NO: 1056151 - RNA, 20 nt, Human
uuuaaaaggagacagagaaa

SEQ ID NO: 1056152 - RNA, 23 nt, Human
aaacagcucccgccuuccccccc

SEQ ID NO: 1056153 - RNA, 22 nt, Human
cagcucccgccuuccccccccu

SEQ ID NO: 1056154 - RNA, 24 nt, Human
ccagcgccaaacagcucccgccuu

SEQ ID NO: 1056155 - RNA, 23 nt, Human
ccccccagcagaacccgacacuc

SEQ ID NO: 1056156 - RNA, 22 nt, Human
ccgacacucgaagaagggcuuu

SEQ ID NO: 1056157 - RNA, 21 nt, Human
ccuucccccccagcagaaccc

SEQ ID NO: 1056158 - RNA, 24 nt, Human
cgccaaacagcucccgccuucccc

SEQ ID NO: 1056159 - RNA, 19 nt, Human
cuuugcuuuuucuuggcau

SEQ ID NO: 1056160 - RNA, 18 nt, Human
ggcaaaaauuccgggccu

SEQ ID NO: 1056161 - RNA, 21 nt, Human
uccccagcgccaaacagcucc

SEQ ID NO: 1056162 - RNA, 22 nt, Human
uccgaaaacucaagcucgaacg

SEQ ID NO: 1056163 - RNA, 18 nt, Human
agguuccgggaggauucu

SEQ ID NO: 1056164 - RNA, 23 nt, Human
aucccgagaccggccagccugug

SEQ ID NO: 1056165 - RNA, 21 nt, Human
caggacacugguuuuuccugc

SEQ ID NO: 1056166 - RNA, 19 nt, Human
caggcccagcacuaggauu

SEQ ID NO: 1056167 - RNA, 22 nt, Human
cccuggggcgucagaauccaga

SEQ ID NO: 1056168 - RNA, 21 nt, Human
cgucuccggcuucaaucccga

SEQ ID NO: 1056169 - RNA, 24 nt, Human
gagccgcacagugggcugaguccu

SEQ ID NO: 1056170 - RNA, 21 nt, Human
gauuugcuuguuuuucuccuc

SEQ ID NO: 1056171 - RNA, 21 nt, Human
ggauuugcuuguuuuucuccu

SEQ ID NO: 1056172 - RNA, 21 nt, Human
gugccacacugugcuggacuc

SEQ ID NO: 1056173 - RNA, 21 nt, Human
gugcuggacucuguuugaagc

SEQ ID NO: 1056174 - RNA, 22 nt, Human
ucaacacugaugacaucucagu

SEQ ID NO: 1056175 - RNA, 21 nt, Human
ucaaucccgagaccggccagc

SEQ ID NO: 1056176 - RNA, 19 nt, Human
uggcuaagagccuuccacg

SEQ ID NO: 1056177 - RNA, 19 nt, Human
uguuugaagcuagagagug

SEQ ID NO: 1056178 - RNA, 20 nt, Human
uugaugcaaacugcauggaa

SEQ ID NO: 1056179 - RNA, 25 nt, Human
uugggugggugccacacugugcugg

SEQ ID NO: 1056180 - RNA, 21 nt, Human
uuuccugcuccauccaggccc

SEQ ID NO: 1056181 - RNA, 18 nt, Human
uuugcuuguuuuucuccu

SEQ ID NO: 1056182 - RNA, 23 nt, Human
aacacuccucacaacaauuacuc

SEQ ID NO: 1056183 - RNA, 21 nt, Human
aagcagcagcucccagaagcc

SEQ ID NO: 1056184 - RNA, 19 nt, Human
aauucuucaguguugcuga

SEQ ID NO: 1056185 - RNA, 20 nt, Human
aauuuguagcacagaaccuu

SEQ ID NO: 1056186 - RNA, 25 nt, Human
acagaguuucuugguuauaucuuug

SEQ ID NO: 1056187 - RNA, 23 nt, Human
acagcgaagcagcagcucccaga

SEQ ID NO: 1056188 - RNA, 22 nt, Human
acauuuagcagacuuaggaauc

SEQ ID NO: 1056189 - RNA, 25 nt, Human
accaauucuugccccaaaaacagag

SEQ ID NO: 1056190 - RNA, 21 nt, Human
acugaaguuuaucuaaacauc

SEQ ID NO: 1056191 - RNA, 19 nt, Human
agcagcucccagaagccga

SEQ ID NO: 1056192 - RNA, 18 nt, Human
agccccucugggggacaa

SEQ ID NO: 1056193 - RNA, 21 nt, Human
auucuugccccaaaaacagag

SEQ ID NO: 1056194 - RNA, 28 nt, Human
caauaaauuuacuuuucuggaaagaucu

SEQ ID NO: 1056195 - RNA, 18 nt, Human
cacaacaauuacucaacc

SEQ ID NO: 1056196 - RNA, 21 nt, Human
cacagaaccuuagcaagucuc

SEQ ID NO: 1056197 - RNA, 23 nt, Human
cacauuuagcagacuuaggaauc

SEQ ID NO: 1056198 - RNA, 21 nt, Human
cacuccucacaacaauuacuc

SEQ ID NO: 1056199 - RNA, 18 nt, Human
cagaauaguggcucacaa

SEQ ID NO: 1056200 - RNA, 21 nt, Human
cagcagcucccagaagccgua

SEQ ID NO: 1056201 - RNA, 23 nt, Human
cagcgaagcagcagcucccagaa

SEQ ID NO: 1056202 - RNA, 21 nt, Human
ccaaaaacagaguuucuuggu

SEQ ID NO: 1056203 - RNA, 25 nt, Human
cucacaacaauuacucaacccuaaa

SEQ ID NO: 1056204 - RNA, 24 nt, Human
cuguucauacuacagaauaguggc

SEQ ID NO: 1056205 - RNA, 26 nt, Human
gcauucggcccuuucccggauagcuc

SEQ ID NO: 1056206 - RNA, 21 nt, Human
gcgaagcagcagcucccagaa

SEQ ID NO: 1056207 - RNA, 20 nt, Human
ggaaagaucuccucuaagua

SEQ ID NO: 1056208 - RNA, 24 nt, Human
uagcaagucucgcggauuagguuu

SEQ ID NO: 1056209 - RNA, 22 nt, Human
uauaucuuugguuggcaaucau

SEQ ID NO: 1056210 - RNA, 25 nt, Human
uauuauaaaauuuugcaguauagga

SEQ ID NO: 1056211 - RNA, 21 nt, Human
uccagaugggagaaggaagga

SEQ ID NO: 1056212 - RNA, 21 nt, Human
ucccagaagccguaaagcuuc

SEQ ID NO: 1056213 - RNA, 26 nt, Human
ucuguucauacuacagaauaguggcu

SEQ ID NO: 1056214 - RNA, 21 nt, Human
ugagggguggagagccccucu

SEQ ID NO: 1056215 - RNA, 23 nt, Human
uggaaagagaaauucaaaacaau

SEQ ID NO: 1056216 - RNA, 23 nt, Human
uguucuuccccuuuaguaaaaca

SEQ ID NO: 1056217 - RNA, 22 nt, Human
uugaucgcauucggcccuuucc

SEQ ID NO: 1056218 - RNA, 24 nt, Human
uuguuaugacugggaggugcuacu

SEQ ID NO: 1056219 - RNA, 22 nt, Human
uuuauaauguucuuccccuuua

SEQ ID NO: 1056220 - RNA, 21 nt, Human
aagaacuggagaauuuaagcc

SEQ ID NO: 1056221 - RNA, 22 nt, Human
acuucccaauaagaacuggaga

SEQ ID NO: 1056222 - RNA, 18 nt, Human
agaaggacaggcugaaga

SEQ ID NO: 1056223 - RNA, 27 nt, Human
aucacaccuaauuaaacaaaagugcua

SEQ ID NO: 1056224 - RNA, 25 nt, Human
caacacaggauggaucuuuugacuu

SEQ ID NO: 1056225 - RNA, 24 nt, Human
caagcugacauauaaauaaaguua

SEQ ID NO: 1056226 - RNA, 22 nt, Human
cagaaggacaggcugaagagca

SEQ ID NO: 1056227 - RNA, 19 nt, Human
cccagaaauaauguuuuac

SEQ ID NO: 1056228 - RNA, 25 nt, Human
ggaauucagagacaaaauuugacuc

SEQ ID NO: 1056229 - RNA, 18 nt, Human
ucccaauaagaacugggg

SEQ ID NO: 1056230 - RNA, 27 nt, Human
ucgcagguuuccccucuucagaaacuu

SEQ ID NO: 1056231 - RNA, 23 nt, Human
ugacauauaaauaaaguuaacca

SEQ ID NO: 1056232 - RNA, 23 nt, Human
uguuuuguucucuaacuccuugu

SEQ ID NO: 1056233 - RNA, 23 nt, Human
ugcucugccccucaagagcccgc

SEQ ID NO: 1056234 - RNA, 24 nt, Human
aaaaaaaauaaaucaaaggcgagg

SEQ ID NO: 1056235 - RNA, 24 nt, Human
aaaauaaauucuaacaauuacaga

SEQ ID NO: 1056236 - RNA, 18 nt, Human
acaguucaauaacaaaaa

SEQ ID NO: 1056237 - RNA, 23 nt, Human
accccaaagcaagcauuaaacaa

SEQ ID NO: 1056238 - RNA, 23 nt, Human
agcacgaacuauuuucaaaaaca

SEQ ID NO: 1056239 - RNA, 27 nt, Human
augaaacacuggugggaguaagaacca

SEQ ID NO: 1056240 - RNA, 23 nt, Human
auucauaauaauccuccuccccu

SEQ ID NO: 1056241 - RNA, 21 nt, Human
caaaaaccgaagagcacgaac

SEQ ID NO: 1056242 - RNA, 23 nt, Human
caaagagcagauuccuuugcaga

SEQ ID NO: 1056243 - RNA, 25 nt, Human
caaagcaagcauuaaacacauaauc

SEQ ID NO: 1056244 - RNA, 21 nt, Human
caaccaaaaucuuuuuuuccc

SEQ ID NO: 1056245 - RNA, 23 nt, Human
cagcugccucccccuggcugcuc

SEQ ID NO: 1056246 - RNA, 23 nt, Human
caguucaauaacaaaaaccgaag

SEQ ID NO: 1056247 - RNA, 25 nt, Human
caguucaauaacaaaaaccgaagag

SEQ ID NO: 1056248 - RNA, 21 nt, Human
cauaauaauccuccuccccuc

SEQ ID NO: 1056249 - RNA, 22 nt, Human
cauaauaauccuccuccccuca

SEQ ID NO: 1056250 - RNA, 22 nt, Human
cccgaagucagucccgggucgc

SEQ ID NO: 1056251 - RNA, 24 nt, Human
ccgccgccacgguagcagcuccgg

SEQ ID NO: 1056252 - RNA, 22 nt, Human
ccuccccucaaaugucuuuaaa

SEQ ID NO: 1056253 - RNA, 19 nt, Human
ccuccuccccucaaauguc

SEQ ID NO: 1056254 - RNA, 23 nt, Human
cgcccagaaaaaaaauaaaucaa

SEQ ID NO: 1056255 - RNA, 18 nt, Human
cuucccggauacucaccg

SEQ ID NO: 1056256 - RNA, 20 nt, Human
gagccgcagcugccuccccc

SEQ ID NO: 1056257 - RNA, 23 nt, Human
gagccgcagcugccucccccugg

SEQ ID NO: 1056258 - RNA, 21 nt, Human
gcagacauuaaucaaugcgcu

SEQ ID NO: 1056259 - RNA, 22 nt, Human
guagcagcuccgggggcuccac

SEQ ID NO: 1056260 - RNA, 19 nt, Human
guuaaaaaucaaaacaaaa

SEQ ID NO: 1056261 - RNA, 22 nt, Human
guuguaaguucuuaaaaaauaa

SEQ ID NO: 1056262 - RNA, 27 nt, Human
uaaaaaauaaauucuaacaauuacaga

SEQ ID NO: 1056263 - RNA, 24 nt, Human
uaaaaaauacaugaaacaguucaa

SEQ ID NO: 1056264 - RNA, 22 nt, Human
uaaaguaauauuuaauuucaug

SEQ ID NO: 1056265 - RNA, 22 nt, Human
uaacaaaaaccgaagagcacga

SEQ ID NO: 1056266 - RNA, 19 nt, Human
uaauuuagucucaaccaaa

SEQ ID NO: 1056267 - RNA, 20 nt, Human
uaccccaaagcaagcauuaa

SEQ ID NO: 1056268 - RNA, 19 nt, Human
uagcaaucuuuucugaguu

SEQ ID NO: 1056269 - RNA, 18 nt, Human
uagcagcuccgggggcuc

SEQ ID NO: 1056270 - RNA, 18 nt, Human
uaggaaaauguugaaagg

SEQ ID NO: 1056271 - RNA, 21 nt, Human
uaggaaaauguugaaagguua

SEQ ID NO: 1056272 - RNA, 23 nt, Human
uaggagagaccaucuuguuagua

SEQ ID NO: 1056273 - RNA, 20 nt, Human
uauaguggugauccccaaaa

SEQ ID NO: 1056274 - RNA, 18 nt, Human
uaugcaaaauugugcagu

SEQ ID NO: 1056275 - RNA, 19 nt, Human
ucccauuuacaaguggaau

SEQ ID NO: 1056276 - RNA, 22 nt, Human
ucccgggucgcagcggccgccc

SEQ ID NO: 1056277 - RNA, 21 nt, Human
uccuccuccccucaaaugucu

SEQ ID NO: 1056278 - RNA, 24 nt, Human
ugauccccaaaacuauuuugacau

SEQ ID NO: 1056279 - RNA, 19 nt, Human
uuaccccaaagcaagcauu

SEQ ID NO: 1056280 - RNA, 21 nt, Human
uucaauaacaaaaaccgaaga

SEQ ID NO: 1056281 - RNA, 20 nt, Human
uuuaaaaaauacaugaaaca

SEQ ID NO: 1056282 - RNA, 23 nt, Human
aaauaucucaaucgaaaucucac

SEQ ID NO: 1056283 - RNA, 23 nt, Human
aucucacagcacccagugacagc

SEQ ID NO: 1056284 - RNA, 18 nt, Human
cucaaucgaaaucucaca

SEQ ID NO: 1056285 - RNA, 27 nt, Human
gaaaauaucucaaucgaaaucucacag

SEQ ID NO: 1056286 - RNA, 20 nt, Human
gaaaucucacagcacccagu

SEQ ID NO: 1056287 - RNA, 22 nt, Human
aaaaaaaccaagcccccacuag

SEQ ID NO: 1056288 - RNA, 23 nt, Human
aaaaaaaccaagcccccacuaga

SEQ ID NO: 1056289 - RNA, 18 nt, Human
aaaaccaagcccccacua

SEQ ID NO: 1056290 - RNA, 24 nt, Human
aagugaccacuuauugauaagaau

SEQ ID NO: 1056291 - RNA, 19 nt, Human
aaucauuacuuuggccucc

SEQ ID NO: 1056292 - RNA, 20 nt, Human
acaaagagcaagccugugua

SEQ ID NO: 1056293 - RNA, 19 nt, Human
acagccucucacauagcuu

SEQ ID NO: 1056294 - RNA, 19 nt, Human
aggaaaaaaaccaagcccc

SEQ ID NO: 1056295 - RNA, 23 nt, Human
aggaaaaaaaccaagcccccacu

SEQ ID NO: 1056296 - RNA, 20 nt, Human
aggacccuuccaaacucagc

SEQ ID NO: 1056297 - RNA, 19 nt, Human
auucucauuucuuugucca

SEQ ID NO: 1056298 - RNA, 23 nt, Human
caaggaaaaaaaccaagccccca

SEQ ID NO: 1056299 - RNA, 25 nt, Human
cagaggucucuucaugaauaagcuu

SEQ ID NO: 1056300 - RNA, 23 nt, Human
cagugcuuuucaacaaaggaaag

SEQ ID NO: 1056301 - RNA, 18 nt, Human
caucauggaaaaacaaac

SEQ ID NO: 1056302 - RNA, 21 nt, Human
caucauggaaaaacaaaccca

SEQ ID NO: 1056303 - RNA, 19 nt, Human
ccaagcccccacuagaaug

SEQ ID NO: 1056304 - RNA, 24 nt, Human
ccaagcccccacuagaaugucagc

SEQ ID NO: 1056305 - RNA, 22 nt, Human
ccaaggaaaaaaaccaagcccc

SEQ ID NO: 1056306 - RNA, 24 nt, Human
ccaguacccaaggaaaaaaaccaa

SEQ ID NO: 1056307 - RNA, 25 nt, Human
ccaguacccaaggaaaaaaaccaag

SEQ ID NO: 1056308 - RNA, 21 nt, Human
cccacuagaaugucagcucca

SEQ ID NO: 1056309 - RNA, 25 nt, Human
cucaaaggcuucaaacuagacaacu

SEQ ID NO: 1056310 - RNA, 18 nt, Human
cucaucauggaaaaacaa

SEQ ID NO: 1056311 - RNA, 19 nt, Human
cuccauaagggcagggauu

SEQ ID NO: 1056312 - RNA, 22 nt, Human
cuccuucagacuaucugcacaa

SEQ ID NO: 1056313 - RNA, 25 nt, Human
cugauauaauaauggcuucaugucc

SEQ ID NO: 1056314 - RNA, 21 nt, Human
cugcucuccacucucuccuac

SEQ ID NO: 1056315 - RNA, 23 nt, Human
gcagaggucucuucaugaauaag

SEQ ID NO: 1056316 - RNA, 24 nt, Human
ggaaaaacaaacccaguacccaag

SEQ ID NO: 1056317 - RNA, 23 nt, Human
ggacaggaguaggaaagcaucug

SEQ ID NO: 1056318 - RNA, 19 nt, Human
guacccaaggaaaaaaacc

SEQ ID NO: 1056319 - RNA, 24 nt, Human
uaagcuucacacugaggucccaca

SEQ ID NO: 1056320 - RNA, 22 nt, Human
uacccaaggaaaaaaaccaagc

SEQ ID NO: 1056321 - RNA, 22 nt, Human
uagaaugucagcuccauaaggg

SEQ ID NO: 1056322 - RNA, 19 nt, Human
uagugaugucucccaaguu

SEQ ID NO: 1056323 - RNA, 24 nt, Human
uauuuuguuuagugaugucuccca

SEQ ID NO: 1056324 - RNA, 23 nt, Human
ucagcuacuggacaaagagcaag

SEQ ID NO: 1056325 - RNA, 19 nt, Human
ucaggacaggaguaggaaa

SEQ ID NO: 1056326 - RNA, 23 nt, Human
uccugauauaauaauggcuucau

SEQ ID NO: 1056327 - RNA, 24 nt, Human
ucucugcacggucaggacaggagu

SEQ ID NO: 1056328 - RNA, 20 nt, Human
ucucuucaugaauaagcuuc

SEQ ID NO: 1056329 - RNA, 19 nt, Human
ucugcacggucaggacagg

SEQ ID NO: 1056330 - RNA, 18 nt, Human
ugaaauggugaacuguag

SEQ ID NO: 1056331 - RNA, 24 nt, Human
ugaauaagcuucacacugaggucc

SEQ ID NO: 1056332 - RNA, 23 nt, Human
ugaccacuuauugauaagaaucu

SEQ ID NO: 1056333 - RNA, 20 nt, Human
ugauaagaaucucugcacgg

SEQ ID NO: 1056334 - RNA, 19 nt, Human
ugcacggucaggacaggag

SEQ ID NO: 1056335 - RNA, 19 nt, Human
ugcuauagugcaucauagg

SEQ ID NO: 1056336 - RNA, 19 nt, Human
ugcugcaccagccuccuuc

SEQ ID NO: 1056337 - RNA, 24 nt, Human
ugucagcuccauaagggcagggau

SEQ ID NO: 1056338 - RNA, 22 nt, Human
uguccucuaggacccuuccaaa

SEQ ID NO: 1056339 - RNA, 19 nt, Human
uuacagggcugaaauggug

SEQ ID NO: 1056340 - RNA, 22 nt, Human
uuagugaugucucccaaguucu

SEQ ID NO: 1056341 - RNA, 20 nt, Human
uuccugauauaauaauggcu

SEQ ID NO: 1056342 - RNA, 19 nt, Human
uuugcuguauguucaggca

SEQ ID NO: 1056343 - RNA, 23 nt, Human
aacgugaaaagaaaggagaaaau

SEQ ID NO: 1056344 - RNA, 25 nt, Human
aacgugaaaagaaaggagaaaauga

SEQ ID NO: 1056345 - RNA, 24 nt, Human
acaguacaggauuguggccacaga

SEQ ID NO: 1056346 - RNA, 21 nt, Human
acuccaaguuugguugcugca

SEQ ID NO: 1056347 - RNA, 18 nt, Human
acugaggauggcuccugg

SEQ ID NO: 1056348 - RNA, 24 nt, Human
agaaaaugacauauaacugcacaa

SEQ ID NO: 1056349 - RNA, 20 nt, Human
agaauuauccaagaauaaug

SEQ ID NO: 1056350 - RNA, 22 nt, Human
agcccggcuggcacagcugucg

SEQ ID NO: 1056351 - RNA, 22 nt, Human
aggaacaguacaggauuguggc

SEQ ID NO: 1056352 - RNA, 18 nt, Human
agggauggaaggaacagu

SEQ ID NO: 1056353 - RNA, 19 nt, Human
aguaacgugaaaagaaagg

SEQ ID NO: 1056354 - RNA, 19 nt, Human
caaauggaaagcuaggauu

SEQ ID NO: 1056355 - RNA, 22 nt, Human
cacgucugucugcaauaaccac

SEQ ID NO: 1056356 - RNA, 21 nt, Human
cagagaggggcccagagccac

SEQ ID NO: 1056357 - RNA, 28 nt, Human
cagagaggggcccagagccacgucuguc

SEQ ID NO: 1056358 - RNA, 23 nt, Human
cagagcccggcuggcacagcugu

SEQ ID NO: 1056359 - RNA, 21 nt, Human
cuaccuucuggaaaaacaagg

SEQ ID NO: 1056360 - RNA, 21 nt, Human
gaccuccuuuuaucagggaug

SEQ ID NO: 1056361 - RNA, 23 nt, Human
gaggggcccagagccacgucugu

SEQ ID NO: 1056362 - RNA, 23 nt, Human
ggacagggcacagacaagggccu

SEQ ID NO: 1056363 - RNA, 21 nt, Human
uaagaugaaaaaauuccauga

SEQ ID NO: 1056364 - RNA, 18 nt, Human
uauaacugcacaaaugga

SEQ ID NO: 1056365 - RNA, 18 nt, Human
ugaaaagaaaggagaaaa

SEQ ID NO: 1056366 - RNA, 20 nt, Human
ugcaaggugggacagagagg

SEQ ID NO: 1056367 - RNA, 20 nt, Human
ugcucagagaguucauccug

SEQ ID NO: 1056368 - RNA, 18 nt, Human
ugggucagaaauagacag

SEQ ID NO: 1056369 - RNA, 22 nt, Human
ugugcaaggugggacagagagg

SEQ ID NO: 1056370 - RNA, 23 nt, Human
ugugcaaggugggacagagaggg

SEQ ID NO: 1056371 - RNA, 20 nt, Human
uuccuaccuucuggaaaaac

SEQ ID NO: 1056372 - RNA, 20 nt, Human
uugguugcugcaggagcagg

SEQ ID NO: 1056373 - RNA, 26 nt, Human
acaaaaugaguaacaauaccaauugc

SEQ ID NO: 1056374 - RNA, 23 nt, Human
acuccuuucuauaaacucucuug

SEQ ID NO: 1056375 - RNA, 18 nt, Human
acuuuaaaagaggcaagg

SEQ ID NO: 1056376 - RNA, 21 nt, Human
cuuucuauaaacucucuugaa

SEQ ID NO: 1056377 - RNA, 19 nt, Human
uaaaagaggcaagguaaua

SEQ ID NO: 1056378 - RNA, 23 nt, Human
uaaaagaggcaagguaauagaaa

SEQ ID NO: 1056379 - RNA, 25 nt, Human
ucugaugacuccuuucuauaaacuc

SEQ ID NO: 1056380 - RNA, 28 nt, Human
ugaaaagagcuagccguacugaguccca

SEQ ID NO: 1056381 - RNA, 23 nt, Human
uuccuaugauugcuacaauugcu

SEQ ID NO: 1056382 - RNA, 23 nt, Human
gaaccuucucccagauaucacaa

SEQ ID NO: 1056383 - RNA, 19 nt, Human
uacauuggaagacucaagu

SEQ ID NO: 1056384 - RNA, 23 nt, Human
uaucuuacuuccuuuggcaguga

SEQ ID NO: 1056385 - RNA, 24 nt, Human
ucacaaggaucaucuacauuggaa

SEQ ID NO: 1056386 - RNA, 21 nt, Human
ucucccagauaucacaaggau

SEQ ID NO: 1056387 - RNA, 18 nt, Human
ugaagaugaggcuaaugu

SEQ ID NO: 1056388 - RNA, 24 nt, Human
uggaagacucaaguucauugcaga

SEQ ID NO: 1056389 - RNA, 19 nt, Human
aggaagagcuucacccaaa

SEQ ID NO: 1056390 - RNA, 20 nt, Human
aggaagagcuucacccaaag

SEQ ID NO: 1056391 - RNA, 24 nt, Human
aggaagagcuucacccaaagcuuc

SEQ ID NO: 1056392 - RNA, 18 nt, Human
ccccaggaagagcuucac

SEQ ID NO: 1056393 - RNA, 19 nt, Human
ccccaggaagagcuucacc

SEQ ID NO: 1056394 - RNA, 19 nt, Human
uucauggugcauuucgaca

SEQ ID NO: 1056395 - RNA, 20 nt, Human
aaagucagcuuaaagugcaa

SEQ ID NO: 1056396 - RNA, 24 nt, Human
aagaagaugacacagggaagagga

SEQ ID NO: 1056397 - RNA, 18 nt, Human
acaccgcgagaggagcac

SEQ ID NO: 1056398 - RNA, 19 nt, Human
acagcgcaggcuccucggg

SEQ ID NO: 1056399 - RNA, 25 nt, Human
accuuugugaguuuuuuuuuuuuuu

SEQ ID NO: 1056400 - RNA, 20 nt, Human
agcacggucucuccccaaga

SEQ ID NO: 1056401 - RNA, 23 nt, Human
agcgcaggcuccucgggacuccg

SEQ ID NO: 1056402 - RNA, 18 nt, Human
agugcucgggacugcaug

SEQ ID NO: 1056403 - RNA, 24 nt, Human
aguuuuuuuuuuuuuuccgcauga

SEQ ID NO: 1056404 - RNA, 22 nt, Human
auuaagaagaugacacagggaa

SEQ ID NO: 1056405 - RNA, 19 nt, Human
caaugguagaagagcacgg

SEQ ID NO: 1056406 - RNA, 19 nt, Human
caccgcguguagucggccc

SEQ ID NO: 1056407 - RNA, 21 nt, Human
cagcgagcucccgggaaagcu

SEQ ID NO: 1056408 - RNA, 22 nt, Human
cagcgagcucccgggaaagcuu

SEQ ID NO: 1056409 - RNA, 21 nt, Human
caggaccagcgagcucccggg

SEQ ID NO: 1056410 - RNA, 24 nt, Human
caucuucccaggcugagccgggag

SEQ ID NO: 1056411 - RNA, 22 nt, Human
ccaggccgaccaugggcccacg

SEQ ID NO: 1056412 - RNA, 19 nt, Human
cccacgucccggggccucg

SEQ ID NO: 1056413 - RNA, 19 nt, Human
cccacgucccggggccucg

SEQ ID NO: 1056414 - RNA, 20 nt, Human
cccaggcugagccgggaggc

SEQ ID NO: 1056415 - RNA, 22 nt, Human
cccccggaaagguggcgccagg

SEQ ID NO: 1056416 - RNA, 20 nt, Human
ccccgugugcccuccgccgg

SEQ ID NO: 1056417 - RNA, 19 nt, Human
ccccuaaagucagcuuaaa

SEQ ID NO: 1056418 - RNA, 19 nt, Human
ccgcgcggucuuucagcug

SEQ ID NO: 1056419 - RNA, 23 nt, Human
ccgcgcucugggguucccgauuc

SEQ ID NO: 1056420 - RNA, 18 nt, Human
ccgcugggcgacaccgcg

SEQ ID NO: 1056421 - RNA, 21 nt, Human
cgagaggagcacagcgcaggc

SEQ ID NO: 1056422 - RNA, 24 nt, Human
cgcgugcgaugccuggugcgcgug

SEQ ID NO: 1056423 - RNA, 22 nt, Human
cgcucugggguucccgauucgc

SEQ ID NO: 1056424 - RNA, 19 nt, Human
cggcgcaggccgggcagcc

SEQ ID NO: 1056425 - RNA, 24 nt, Human
gaaguaaacuugucaaaacucaga

SEQ ID NO: 1056426 - RNA, 18 nt, Human
gagguugucuucucaucu

SEQ ID NO: 1056427 - RNA, 19 nt, Human
gaugacacagggaagagga

SEQ ID NO: 1056428 - RNA, 20 nt, Human
gcaccgcguguagucggccc

SEQ ID NO: 1056429 - RNA, 19 nt, Human
gcaggcuccucgggacucc

SEQ ID NO: 1056430 - RNA, 22 nt, Human
gcgcgggugcagagccgcgugc

SEQ ID NO: 1056431 - RNA, 18 nt, Human
gcgcugucacuugcuagc

SEQ ID NO: 1056432 - RNA, 23 nt, Human
gcggguccgcaggcuucuggggc

SEQ ID NO: 1056433 - RNA, 18 nt, Human
ggaaagcuuacccagaga

SEQ ID NO: 1056434 - RNA, 22 nt, Human
ggacugcaugugccagaaguaa

SEQ ID NO: 1056435 - RNA, 19 nt, Human
ggccaggaccagcgagcuc

SEQ ID NO: 1056436 - RNA, 18 nt, Human
ggcugugggggaggcggc

SEQ ID NO: 1056437 - RNA, 28 nt, Human
gggccaggaccagcgagcucccgggaaa

SEQ ID NO: 1056438 - RNA, 23 nt, Human
guaaacacuuaauauacuguuau

SEQ ID NO: 1056439 - RNA, 20 nt, Human
guaaaggacgcugugguggu

SEQ ID NO: 1056440 - RNA, 18 nt, Human
guccggggcccgcagcgg

SEQ ID NO: 1056441 - RNA, 18 nt, Human
guggcuucccccggaaag

SEQ ID NO: 1056442 - RNA, 21 nt, Human
uaaaagacuuguucugccccc

SEQ ID NO: 1056443 - RNA, 22 nt, Human
uagccaaaaagcagugcucggg

SEQ ID NO: 1056444 - RNA, 18 nt, Human
ucaguauaaaaccuuugu

SEQ ID NO: 1056445 - RNA, 22 nt, Human
uccccaagacggccugagcuuu

SEQ ID NO: 1056446 - RNA, 18 nt, Human
ucccgaaaccaaccucua

SEQ ID NO: 1056447 - RNA, 18 nt, Human
ucccugagguugucuucu

SEQ ID NO: 1056448 - RNA, 26 nt, Human
ucccugggcggguccgcaggcuucug

SEQ ID NO: 1056449 - RNA, 22 nt, Human
ucuggggccaggaccagcgagc

SEQ ID NO: 1056450 - RNA, 23 nt, Human
ugagaauaaaugagacauggcaa

SEQ ID NO: 1056451 - RNA, 18 nt, Human
ugagacauggcaaguguc

SEQ ID NO: 1056452 - RNA, 19 nt, Human
ugagacauggcaagugucu

SEQ ID NO: 1056453 - RNA, 18 nt, Human
ugcaaugguagaagagca

SEQ ID NO: 1056454 - RNA, 18 nt, Human
uggugugagaauaaauga

SEQ ID NO: 1056455 - RNA, 22 nt, Human
ugugaguuuuuuuuuuuuuucc

SEQ ID NO: 1056456 - RNA, 25 nt, Human
uuguucugccccccuuuaucgcuua

SEQ ID NO: 1056457 - RNA, 20 nt, Human
agccagaagccagaggccug

SEQ ID NO: 1056458 - RNA, 19 nt, Human
agccagccagaagccagag

SEQ ID NO: 1056459 - RNA, 24 nt, Human
cagccagccagaagccagaggccu

SEQ ID NO: 1056460 - RNA, 20 nt, Human
ccagccagaagccagaggcc

SEQ ID NO: 1056461 - RNA, 23 nt, Human
ccagccagccagaagccagaggc

SEQ ID NO: 1056462 - RNA, 21 nt, Human
gaggugcuccuggacccagag

SEQ ID NO: 1056463 - RNA, 18 nt, Human
aacucagggcaucagcag

SEQ ID NO: 1056464 - RNA, 18 nt, Human
aagcaauaggcccaauga

SEQ ID NO: 1056465 - RNA, 22 nt, Human
accaaagucagaaucagccccg

SEQ ID NO: 1056466 - RNA, 22 nt, Human
aggaggaaacugguuccgccug

SEQ ID NO: 1056467 - RNA, 21 nt, Human
aggcagcucuugcuccugugu

SEQ ID NO: 1056468 - RNA, 23 nt, Human
aggcagcucuugcuccugugugg

SEQ ID NO: 1056469 - RNA, 22 nt, Human
caauaggcccaaugacaucacc

SEQ ID NO: 1056470 - RNA, 20 nt, Human
caccuugaaacaggcagcuc

SEQ ID NO: 1056471 - RNA, 19 nt, Human
cagggcaucagcagugaag

SEQ ID NO: 1056472 - RNA, 23 nt, Human
cccaggaggaaacugguuccgcc

SEQ ID NO: 1056473 - RNA, 19 nt, Human
ccugcuguggaacucaggg

SEQ ID NO: 1056474 - RNA, 24 nt, Human
gcagcucuugcuccuguguggggg

SEQ ID NO: 1056475 - RNA, 21 nt, Human
gcccaaugacaucaccuugaa

SEQ ID NO: 1056476 - RNA, 18 nt, Human
gggggccugaccccugcu

SEQ ID NO: 1056477 - RNA, 18 nt, Human
uacccaggaggaaacugg

SEQ ID NO: 1056478 - RNA, 24 nt, Human
ugugugggggccugaccccugcug

SEQ ID NO: 1056479 - RNA, 24 nt, Human
aaauauaauaucaacaaaaacaua

SEQ ID NO: 1056480 - RNA, 23 nt, Human
agcaaguagcuuuuaucaugaaa

SEQ ID NO: 1056481 - RNA, 19 nt, Human
agggggccgcgcucggccg

SEQ ID NO: 1056482 - RNA, 19 nt, Human
cccccgagaccgcguccca

SEQ ID NO: 1056483 - RNA, 24 nt, Human
cccccgagaccgcgucccaggagc

SEQ ID NO: 1056484 - RNA, 18 nt, Human
cccgagaccgcgucccag

SEQ ID NO: 1056485 - RNA, 20 nt, Human
cccgccccggcccgggagga

SEQ ID NO: 1056486 - RNA, 18 nt, Human
ccgcccucaguguuccug

SEQ ID NO: 1056487 - RNA, 18 nt, Human
ccucaguguuccuggcac

SEQ ID NO: 1056488 - RNA, 25 nt, Human
cgcucggccgccuuccccuggcuuc

SEQ ID NO: 1056489 - RNA, 28 nt, Human
cucuggggcuucguccuuccccuuuccu

SEQ ID NO: 1056490 - RNA, 29 nt, Human
gcccccgagaccgcgucccaggagcggag

SEQ ID NO: 1056491 - RNA, 18 nt, Human
gcccgggaggagaggggg

SEQ ID NO: 1056492 - RNA, 21 nt, Human
gggccgugaccaggacggcgc

SEQ ID NO: 1056493 - RNA, 27 nt, Human
gggccgugaccaggacggcgcggggaa

SEQ ID NO: 1056494 - RNA, 22 nt, Human
gugcuuccgugggcgcacacaa

SEQ ID NO: 1056495 - RNA, 18 nt, Human
guuccuggcaccgccuga

SEQ ID NO: 1056496 - RNA, 23 nt, Human
uaagaaauuccuauuccaauuaa

SEQ ID NO: 1056497 - RNA, 22 nt, Human
uagaaaaccuaauaauuucuga

SEQ ID NO: 1056498 - RNA, 19 nt, Human
ugaccaggacggcgcgggg

SEQ ID NO: 1056499 - RNA, 19 nt, Human
uuggaacauaaauauaaua

SEQ ID NO: 1056500 - RNA, 21 nt, Human
aaaaacccuauuuaagacuaa

SEQ ID NO: 1056501 - RNA, 27 nt, Human
aaaaagccaaaagucaaccguuaugaa

SEQ ID NO: 1056502 - RNA, 20 nt, Human
aaaagacugcaaaaggagaa

SEQ ID NO: 1056503 - RNA, 24 nt, Human
aaaccaugagccacaaaagcauca

SEQ ID NO: 1056504 - RNA, 23 nt, Human
aaacccuauuuaagacuaagaag

SEQ ID NO: 1056505 - RNA, 21 nt, Human
aaacucagaggcucuuaacag

SEQ ID NO: 1056506 - RNA, 18 nt, Human
aaauaacuuucuaagaca

SEQ ID NO: 1056507 - RNA, 18 nt, Human
aacacaaauaaaugugga

SEQ ID NO: 1056508 - RNA, 22 nt, Human
aagaaaaggcggaaugggaggg

SEQ ID NO: 1056509 - RNA, 18 nt, Human
aagacaaauggcaaaggc

SEQ ID NO: 1056510 - RNA, 22 nt, Human
aagagagagaccaacaaaugua

SEQ ID NO: 1056511 - RNA, 22 nt, Human
aagaugaccuuuacauaaaaau

SEQ ID NO: 1056512 - RNA, 24 nt, Human
aaggagacugagguaggaaaauca

SEQ ID NO: 1056513 - RNA, 22 nt, Human
aauaauccaagagagagaccaa

SEQ ID NO: 1056514 - RNA, 21 nt, Human
aaugcauacugcagauggguu

SEQ ID NO: 1056515 - RNA, 19 nt, Human
aauuaauacagaagaagaa

SEQ ID NO: 1056516 - RNA, 19 nt, Human
acagagauuccaaaguugc

SEQ ID NO: 1056517 - RNA, 18 nt, Human
accacucuuugcuucugu

SEQ ID NO: 1056518 - RNA, 24 nt, Human
acccaaguaauguugucaaaauaa

SEQ ID NO: 1056519 - RNA, 22 nt, Human
acccuauuuaagacuaagaagc

SEQ ID NO: 1056520 - RNA, 21 nt, Human
acuaaaauaaauguauggccc

SEQ ID NO: 1056521 - RNA, 19 nt, Human
agaagaagaaaauaucaga

SEQ ID NO: 1056522 - RNA, 18 nt, Human
agaauuccccaaggugcc

SEQ ID NO: 1056523 - RNA, 22 nt, Human
agacuaagagaauuccccaagg

SEQ ID NO: 1056524 - RNA, 24 nt, Human
agaucagauuaaagucuugaaaga

SEQ ID NO: 1056525 - RNA, 22 nt, Human
agcaaaggcagaaaguauucau

SEQ ID NO: 1056526 - RNA, 26 nt, Human
agcuauuaaaaaggucaaaggagcag

SEQ ID NO: 1056527 - RNA, 23 nt, Human
aggcuuucuuuuucaugaauucc

SEQ ID NO: 1056528 - RNA, 20 nt, Human
aguaauaaacacaaauaaau

SEQ ID NO: 1056529 - RNA, 21 nt, Human
aguuguugcccuuugagcagu

SEQ ID NO: 1056530 - RNA, 18 nt, Human
augaaguuugccauuacc

SEQ ID NO: 1056531 - RNA, 21 nt, Human
augcaauagaaacgaaguauc

SEQ ID NO: 1056532 - RNA, 21 nt, Human
augcucuaccagguauggggg

SEQ ID NO: 1056533 - RNA, 23 nt, Human
auggcccugagaccagaauaaaa

SEQ ID NO: 1056534 - RNA, 23 nt, Human
auggguuacacauuuguuugugu

SEQ ID NO: 1056535 - RNA, 23 nt, Human
auuaaaaacuccauuuacuauag

SEQ ID NO: 1056536 - RNA, 23 nt, Human
caagucacaaauacacugcuuug

SEQ ID NO: 1056537 - RNA, 22 nt, Human
caagucuaguucaagagacugg

SEQ ID NO: 1056538 - RNA, 19 nt, Human
cacucgcagguggcccggc

SEQ ID NO: 1056539 - RNA, 23 nt, Human
cacuuuagccugguggggaaagc

SEQ ID NO: 1056540 - RNA, 20 nt, Human
cagaguuggggaggcaaugg

SEQ ID NO: 1056541 - RNA, 20 nt, Human
cagcuuccaagucacuaccu

SEQ ID NO: 1056542 - RNA, 21 nt, Human
cagcuuccaagucacuaccuu

SEQ ID NO: 1056543 - RNA, 22 nt, Human
caggaagccagguguuaaauca

SEQ ID NO: 1056544 - RNA, 18 nt, Human
ccaacagugguaauuuuc

SEQ ID NO: 1056545 - RNA, 23 nt, Human
ccagagagacuacaaaaagccaa

SEQ ID NO: 1056546 - RNA, 19 nt, Human
ccuuuaaauucccuagucg

SEQ ID NO: 1056547 - RNA, 21 nt, Human
cggccgccuugccccacuccc

SEQ ID NO: 1056548 - RNA, 19 nt, Human
cuaaaauaaauguauggcc

SEQ ID NO: 1056549 - RNA, 27 nt, Human
cuaaaauaaauguauggcccugagacc

SEQ ID NO: 1056550 - RNA, 21 nt, Human
cuauauggaccugcacccuaa

SEQ ID NO: 1056551 - RNA, 19 nt, Human
cuaucauuagcaaaggcag

SEQ ID NO: 1056552 - RNA, 22 nt, Human
gaaccaggaaaccaugagccac

SEQ ID NO: 1056553 - RNA, 21 nt, Human
gaagccagguguuaaaucaaa

SEQ ID NO: 1056554 - RNA, 19 nt, Human
gaccugcacccuaaaacau

SEQ ID NO: 1056555 - RNA, 19 nt, Human
gagcagcuagauguuggga

SEQ ID NO: 1056556 - RNA, 20 nt, Human
gaggggcccggccgccuugc

SEQ ID NO: 1056557 - RNA, 19 nt, Human
gcaaacuuauauguguagu

SEQ ID NO: 1056558 - RNA, 23 nt, Human
gcagcaggugugggcagaguugg

SEQ ID NO: 1056559 - RNA, 18 nt, Human
gcugaaauacgaacucug

SEQ ID NO: 1056560 - RNA, 20 nt, Human
ggaaugggaggggcccggcc

SEQ ID NO: 1056561 - RNA, 20 nt, Human
ggcccggccgccuugcccca

SEQ ID NO: 1056562 - RNA, 24 nt, Human
gggcagaguuggggaggcaauggg

SEQ ID NO: 1056563 - RNA, 18 nt, Human
ggugugggcagaguuggg

SEQ ID NO: 1056564 - RNA, 19 nt, Human
guaaagcacuaauaaugca

SEQ ID NO: 1056565 - RNA, 18 nt, Human
gugggcagaguuggggag

SEQ ID NO: 1056566 - RNA, 23 nt, Human
guuaucuaguaucuugugguaug

SEQ ID NO: 1056567 - RNA, 22 nt, Human
uaaaaacccuauuuaagacuaa

SEQ ID NO: 1056568 - RNA, 20 nt, Human
uaaaaaggucaaaggagcag

SEQ ID NO: 1056569 - RNA, 24 nt, Human
uaaaaugaaaaccaagaauaaaau

SEQ ID NO: 1056570 - RNA, 26 nt, Human
uaaaauggaagaaugcauacugcaga

SEQ ID NO: 1056571 - RNA, 26 nt, Human
uaaaucaaagaaccaggaaaccauga

SEQ ID NO: 1056572 - RNA, 25 nt, Human
uaaauguauggcccugagaccagaa

SEQ ID NO: 1056573 - RNA, 24 nt, Human
uaaauucccuagucgccaagaauc

SEQ ID NO: 1056574 - RNA, 22 nt, Human
uaagaagcacuuuagccuggug

SEQ ID NO: 1056575 - RNA, 22 nt, Human
uaagaugcuuuacaacaaaaua

SEQ ID NO: 1056576 - RNA, 19 nt, Human
uaagcagaaauuuacaaaa

SEQ ID NO: 1056577 - RNA, 23 nt, Human
uacacauuucaagaaagcuguau

SEQ ID NO: 1056578 - RNA, 25 nt, Human
uacagaaugaaaauauaccuuuaga

SEQ ID NO: 1056579 - RNA, 19 nt, Human
uaccagguaugggggcuuc

SEQ ID NO: 1056580 - RNA, 19 nt, Human
uaccuuugggaagcaaugc

SEQ ID NO: 1056581 - RNA, 22 nt, Human
uagaaaaggagacugagguagg

SEQ ID NO: 1056582 - RNA, 25 nt, Human
uagaauaacuaucauuagcaaaggc

SEQ ID NO: 1056583 - RNA, 26 nt, Human
uagaauaacuaucauuagcaaaggca

SEQ ID NO: 1056584 - RNA, 19 nt, Human
uaguggugguaaaauggaa

SEQ ID NO: 1056585 - RNA, 20 nt, Human
uauaucguugaugaagcucc

SEQ ID NO: 1056586 - RNA, 23 nt, Human
uaucauuagcaaaggcagaaagu

SEQ ID NO: 1056587 - RNA, 23 nt, Human
uaugcaauagaaacgaaguaucc

SEQ ID NO: 1056588 - RNA, 18 nt, Human
uauggcccugagaccaga

SEQ ID NO: 1056589 - RNA, 23 nt, Human
uauggcccugagaccagaauaaa

SEQ ID NO: 1056590 - RNA, 23 nt, Human
uauguaacauaauuacagaauga

SEQ ID NO: 1056591 - RNA, 25 nt, Human
uauuauauuuuucuuagccaauaca

SEQ ID NO: 1056592 - RNA, 22 nt, Human
uauugcacccuuucagugguag

SEQ ID NO: 1056593 - RNA, 22 nt, Human
ucaaagaaccaggaaaccauga

SEQ ID NO: 1056594 - RNA, 21 nt, Human
ucacuaccaaaauuuuauuau

SEQ ID NO: 1056595 - RNA, 20 nt, Human
uccaaaguugcauagugagg

SEQ ID NO: 1056596 - RNA, 26 nt, Human
uccaagucacaaauacacugcuuuga

SEQ ID NO: 1056597 - RNA, 18 nt, Human
ucuaaauuagggccugag

SEQ ID NO: 1056598 - RNA, 18 nt, Human
ugaaaauccuuguuagcu

SEQ ID NO: 1056599 - RNA, 18 nt, Human
ugaagagcacuuucugag

SEQ ID NO: 1056600 - RNA, 20 nt, Human
ugaagagcacuuucugagcg

SEQ ID NO: 1056601 - RNA, 24 nt, Human
ugaaguauuaagugauucugcuga

SEQ ID NO: 1056602 - RNA, 24 nt, Human
ugagaaaguggacucaggcagcca

SEQ ID NO: 1056603 - RNA, 18 nt, Human
ugagguaggaaaaucaag

SEQ ID NO: 1056604 - RNA, 20 nt, Human
ugagguaggaaaaucaaggc

SEQ ID NO: 1056605 - RNA, 22 nt, Human
ugauucagauuuuauaagauuu

SEQ ID NO: 1056606 - RNA, 20 nt, Human
ugauucucgacaugauguuu

SEQ ID NO: 1056607 - RNA, 19 nt, Human
ugccccacucccccgagac

SEQ ID NO: 1056608 - RNA, 24 nt, Human
ugccuaauauauaaacuuggagua

SEQ ID NO: 1056609 - RNA, 21 nt, Human
ugcuuuaguauuucuggacuu

SEQ ID NO: 1056610 - RNA, 18 nt, Human
uggaagauaagucuaagg

SEQ ID NO: 1056611 - RNA, 22 nt, Human
uggaauaaagacuggaaaauuu

SEQ ID NO: 1056612 - RNA, 18 nt, Human
ugggaggggcccggccgc

SEQ ID NO: 1056613 - RNA, 24 nt, Human
ugggauaauaacaaaaagacugca

SEQ ID NO: 1056614 - RNA, 25 nt, Human
uguuugagaaaguggacucaggcag

SEQ ID NO: 1056615 - RNA, 21 nt, Human
uuaauuaauacagaagaagaa

SEQ ID NO: 1056616 - RNA, 26 nt, Human
uuaguaaagacauauuuuuucacuau

SEQ ID NO: 1056617 - RNA, 27 nt, Human
uuaguauucauucaagcauugacaacu

SEQ ID NO: 1056618 - RNA, 28 nt, Human
uuaguauucauucaagcauugacaacuu

SEQ ID NO: 1056619 - RNA, 24 nt, Human
uucaaaguaaaagaagcaaauacu

SEQ ID NO: 1056620 - RNA, 21 nt, Human
uugcagucaauuuauauuugg

SEQ ID NO: 1056621 - RNA, 27 nt, Human
uugccccacucccccgagacgcucuua

SEQ ID NO: 1056622 - RNA, 22 nt, Human
uuucuggaaguccuccagagag

SEQ ID NO: 1056623 - RNA, 19 nt, Human
uuuucaugaauucuuuggu

SEQ ID NO: 1056624 - RNA, 22 nt, Human
aaaacaccagccgccguccccc

SEQ ID NO: 1056625 - RNA, 24 nt, Human
aagcggacuuuccaaaggaagggg

SEQ ID NO: 1056626 - RNA, 22 nt, Human
aagggggugggagauagggaaa

SEQ ID NO: 1056627 - RNA, 24 nt, Human
acaaaacaccagccgccguccccc

SEQ ID NO: 1056628 - RNA, 18 nt, Human
accagccgccguccccca

SEQ ID NO: 1056629 - RNA, 19 nt, Human
agaggcgccggcggaggcu

SEQ ID NO: 1056630 - RNA, 19 nt, Human
cccccaaaacaaaaaguga

SEQ ID NO: 1056631 - RNA, 23 nt, Human
cgaauuagacagagcuagaggcg

SEQ ID NO: 1056632 - RNA, 20 nt, Human
uagggccauacaaaacacca

SEQ ID NO: 1056633 - RNA, 20 nt, Human
ucccccaaaacaaaaaguga

SEQ ID NO: 1056634 - RNA, 21 nt, Human
ucccccaaaacaaaaagugac

SEQ ID NO: 1056635 - RNA, 23 nt, Human
uuagacagagcuagaggcgccgg

SEQ ID NO: 1056636 - RNA, 18 nt, Human
uuccaaaggaagggggug

SEQ ID NO: 1056637 - RNA, 19 nt, Human
uuccaaaggaagggggugg

SEQ ID NO: 1056638 - RNA, 19 nt, Human
uucggcagccuucaaaucg

SEQ ID NO: 1056639 - RNA, 19 nt, Human
acagugcaaaauuuuugaa

SEQ ID NO: 1056640 - RNA, 20 nt, Human
agcuaggcauaugagcacug

SEQ ID NO: 1056641 - RNA, 20 nt, Human
aggcaaaaauucagaagcuc

SEQ ID NO: 1056642 - RNA, 19 nt, Human
aguguaguugccacagugg

SEQ ID NO: 1056643 - RNA, 25 nt, Human
ccacagggcugcuccaaacugucau

SEQ ID NO: 1056644 - RNA, 18 nt, Human
cccuuggcccuccugucc

SEQ ID NO: 1056645 - RNA, 24 nt, Human
ccuccuguccuuagcaggcugggc

SEQ ID NO: 1056646 - RNA, 22 nt, Human
cggaaaccgccgaaccuuauca

SEQ ID NO: 1056647 - RNA, 23 nt, Human
cggccuccagcggcucuacuccc

SEQ ID NO: 1056648 - RNA, 22 nt, Human
cuccaauaauaacuaaauauuc

SEQ ID NO: 1056649 - RNA, 20 nt, Human
cuccagcggcucuacucccc

SEQ ID NO: 1056650 - RNA, 19 nt, Human
cugaggacuuggcuuuuuu

SEQ ID NO: 1056651 - RNA, 21 nt, Human
cuuggcccuccuguccuuagc

SEQ ID NO: 1056652 - RNA, 20 nt, Human
gaaacugaggacuuggcuuu

SEQ ID NO: 1056653 - RNA, 18 nt, Human
gacuuggcuuuuuuccuu

SEQ ID NO: 1056654 - RNA, 18 nt, Human
gaggacuucgggguuccc

SEQ ID NO: 1056655 - RNA, 22 nt, Human
gcuucgaggacuucgggguucc

SEQ ID NO: 1056656 - RNA, 19 nt, Human
ggaaacugaggacuuggcu

SEQ ID NO: 1056657 - RNA, 18 nt, Human
ggguucccuuggcccucc

SEQ ID NO: 1056658 - RNA, 19 nt, Human
uaagcagcccaaaccacag

SEQ ID NO: 1056659 - RNA, 18 nt, Human
uaaguacauacaauaaga

SEQ ID NO: 1056660 - RNA, 19 nt, Human
uccuguccuuagcaggcug

SEQ ID NO: 1056661 - RNA, 23 nt, Human
ugcaaguguaguugccacagugg

SEQ ID NO: 1056662 - RNA, 20 nt, Human
ugcuccaaacugucauccac

SEQ ID NO: 1056663 - RNA, 20 nt, Human
uuggaaacugaggacuuggc

SEQ ID NO: 1056664 - RNA, 19 nt, Human
aacaaauaauuaugauuca

SEQ ID NO: 1056665 - RNA, 24 nt, Human
aagaagagaugaacaaaggggacc

SEQ ID NO: 1056666 - RNA, 18 nt, Human
acgccacaggcgccagac

SEQ ID NO: 1056667 - RNA, 27 nt, Human
auaaaacacaucaaaauuaacaaauaa

SEQ ID NO: 1056668 - RNA, 19 nt, Human
caaagcagcaguuguagac

SEQ ID NO: 1056669 - RNA, 19 nt, Human
cagccucagucaacggcag

SEQ ID NO: 1056670 - RNA, 20 nt, Human
caucuaaaagaagagaugaa

SEQ ID NO: 1056671 - RNA, 22 nt, Human
cgacuacuaaagucccaauucu

SEQ ID NO: 1056672 - RNA, 23 nt, Human
uaaaacacaucaaaauuaacaaa

SEQ ID NO: 1056673 - RNA, 19 nt, Human
uaacacuugcaugcauaug

SEQ ID NO: 1056674 - RNA, 24 nt, Human
uaacacuugcaugcauaugguuaa

SEQ ID NO: 1056675 - RNA, 24 nt, Human
uagaauaagcauuaauucugaaaa

SEQ ID NO: 1056676 - RNA, 19 nt, Human
uagauucuucauacucuuc

SEQ ID NO: 1056677 - RNA, 24 nt, Human
ucagucaacggcagccgggcccuc

SEQ ID NO: 1056678 - RNA, 24 nt, Human
ugcaugcauaugguuaacaauauu

SEQ ID NO: 1056679 - RNA, 23 nt, Human
uguagaauaagcauuaauucuga

SEQ ID NO: 1056680 - RNA, 24 nt, Human
uuaacaauauuuaacuaaagguau

SEQ ID NO: 1056681 - RNA, 18 nt, Human
uuaauguuucaucuuuag

SEQ ID NO: 1056682 - RNA, 18 nt, Human
agcacaaccaguccuccc

SEQ ID NO: 1056683 - RNA, 22 nt, Human
aggcccggcggccccggcggaa

SEQ ID NO: 1056684 - RNA, 25 nt, Human
aggccugggccaggaccuuagggga

SEQ ID NO: 1056685 - RNA, 22 nt, Human
augccaucgccuucuccagccc

SEQ ID NO: 1056686 - RNA, 23 nt, Human
caaagcggcagcaugccaucgcc

SEQ ID NO: 1056687 - RNA, 21 nt, Human
ccgaccauccugggcuucucu

SEQ ID NO: 1056688 - RNA, 22 nt, Human
ccugcaccgcgacugcuaggga

SEQ ID NO: 1056689 - RNA, 22 nt, Human
cggcagcaugccaucgccuucu

SEQ ID NO: 1056690 - RNA, 25 nt, Human
cggcuucucagccuuaaccucggcc

SEQ ID NO: 1056691 - RNA, 18 nt, Human
cuagggacugucaaagcg

SEQ ID NO: 1056692 - RNA, 22 nt, Human
cucagccuuaaccucggcgggc

SEQ ID NO: 1056693 - RNA, 22 nt, Human
cucccaucaccugcaccgcgac

SEQ ID NO: 1056694 - RNA, 18 nt, Human
gacaggccugggccagga

SEQ ID NO: 1056695 - RNA, 19 nt, Human
gccuucuccagcccuucuc

SEQ ID NO: 1056696 - RNA, 26 nt, Human
ggcagcaugccaucgccuucuccagc

SEQ ID NO: 1056697 - RNA, 18 nt, Human
ucaaagcggcagcaugcc

SEQ ID NO: 1056698 - RNA, 18 nt, Human
ucccaucaccugcaccgc

SEQ ID NO: 1056699 - RNA, 22 nt, Human
ucgccuucuccagcccuucucc

SEQ ID NO: 1056700 - RNA, 18 nt, Human
ucuccagcccuucuccag

SEQ ID NO: 1056701 - RNA, 21 nt, Human
ucucuuuggacaggccugggc

SEQ ID NO: 1056702 - RNA, 19 nt, Human
aaacaaaaaugacagugac

SEQ ID NO: 1056703 - RNA, 22 nt, Human
aaacaaaaaugacagugaccua

SEQ ID NO: 1056704 - RNA, 25 nt, Human
aaacaagucucucuugggagaaauu

SEQ ID NO: 1056705 - RNA, 23 nt, Human
aaagagaauggucagcuccccaa

SEQ ID NO: 1056706 - RNA, 23 nt, Human
aacauuuaccaaaagagaauggu

SEQ ID NO: 1056707 - RNA, 24 nt, Human
aagcucugcccgagaguccagaac

SEQ ID NO: 1056708 - RNA, 19 nt, Human
acaccacaaaaggcccaaa

SEQ ID NO: 1056709 - RNA, 20 nt, Human
accacaaaaggcccaaacaa

SEQ ID NO: 1056710 - RNA, 24 nt, Human
acugacaccacaaaaggcccaaac

SEQ ID NO: 1056711 - RNA, 22 nt, Human
agccagugaggaguggaagggg

SEQ ID NO: 1056712 - RNA, 20 nt, Human
aggaaacacaccuggucccu

SEQ ID NO: 1056713 - RNA, 18 nt, Human
aggcagggucugagggcc

SEQ ID NO: 1056714 - RNA, 24 nt, Human
aggcagggucugagggccccuggg

SEQ ID NO: 1056715 - RNA, 21 nt, Human
aguggaagggguuaauccgaa

SEQ ID NO: 1056716 - RNA, 21 nt, Human
aguucccacacucugcccggu

SEQ ID NO: 1056717 - RNA, 24 nt, Human
aguuuacuauagauacucccccca

SEQ ID NO: 1056718 - RNA, 25 nt, Human
auagauacuccccccaacucuuaaa

SEQ ID NO: 1056719 - RNA, 21 nt, Human
aucccaauuacucugguugca

SEQ ID NO: 1056720 - RNA, 24 nt, Human
auucugcugggucagcucguggag

SEQ ID NO: 1056721 - RNA, 23 nt, Human
caacucuuaaaacaaaaaugaca

SEQ ID NO: 1056722 - RNA, 23 nt, Human
cacaaaaggcccaaacaagucuc

SEQ ID NO: 1056723 - RNA, 22 nt, Human
cacacagucauucugcugucag

SEQ ID NO: 1056724 - RNA, 18 nt, Human
cacauacaaaaguacagc

SEQ ID NO: 1056725 - RNA, 19 nt, Human
cacccaaacuuccaaaagu

SEQ ID NO: 1056726 - RNA, 21 nt, Human
caccuggucccugggccucug

SEQ ID NO: 1056727 - RNA, 21 nt, Human
cacugacaccacaaaaggccc

SEQ ID NO: 1056728 - RNA, 25 nt, Human
cagaucacuugaagccagccuuguu

SEQ ID NO: 1056729 - RNA, 19 nt, Human
cagcaggaaaggccaccca

SEQ ID NO: 1056730 - RNA, 25 nt, Human
cagggucugagggccccugggauuc

SEQ ID NO: 1056731 - RNA, 22 nt, Human
cauacaaaaguacagcuacaaa

SEQ ID NO: 1056732 - RNA, 21 nt, Human
cauccacccaaacuuccaaaa

SEQ ID NO: 1056733 - RNA, 22 nt, Human
cccccaacucuuaaaacaaaaa

SEQ ID NO: 1056734 - RNA, 22 nt, Human
ccccugggauucucagaauaga

SEQ ID NO: 1056735 - RNA, 24 nt, Human
cccgagaguccagaacggcggacc

SEQ ID NO: 1056736 - RNA, 24 nt, Human
cugcugggucagcucguggagugu

SEQ ID NO: 1056737 - RNA, 22 nt, Human
cuugauccugacacccucuuca

SEQ ID NO: 1056738 - RNA, 20 nt, Human
gaggaaacacaccugguccc

SEQ ID NO: 1056739 - RNA, 24 nt, Human
gcccaaacaagucucucuugggag

SEQ ID NO: 1056740 - RNA, 20 nt, Human
gcuccccaaguugcccaccc

SEQ ID NO: 1056741 - RNA, 19 nt, Human
uaccaaaagagaaugguca

SEQ ID NO: 1056742 - RNA, 21 nt, Human
uaccaaaagagaauggucagc

SEQ ID NO: 1056743 - RNA, 20 nt, Human
uaccuauccauuccacugac

SEQ ID NO: 1056744 - RNA, 22 nt, Human
uacuaugaaucacaacacaguc

SEQ ID NO: 1056745 - RNA, 18 nt, Human
uacucugguugcagauca

SEQ ID NO: 1056746 - RNA, 19 nt, Human
uacuguguggacaaucugc

SEQ ID NO: 1056747 - RNA, 22 nt, Human
uauucauccucuugagccguca

SEQ ID NO: 1056748 - RNA, 22 nt, Human
ucagaacacagugaaccagcca

SEQ ID NO: 1056749 - RNA, 18 nt, Human
uccacugacaccacaaaa

SEQ ID NO: 1056750 - RNA, 25 nt, Human
uccacugacaccacaaaaggcccaa

SEQ ID NO: 1056751 - RNA, 18 nt, Human
ucccaauuacucugguug

SEQ ID NO: 1056752 - RNA, 27 nt, Human
ucuaugaucguauugaggccggggucc

SEQ ID NO: 1056753 - RNA, 26 nt, Human
ucucucacaaagcucugcccgagagu

SEQ ID NO: 1056754 - RNA, 19 nt, Human
ucucucuuuuuaauguacu

SEQ ID NO: 1056755 - RNA, 23 nt, Human
ucugcuuaucuuggaaagcuuca

SEQ ID NO: 1056756 - RNA, 19 nt, Human
ucuugguucucaguuucuc

SEQ ID NO: 1056757 - RNA, 20 nt, Human
ugaaagagaacagggagagu

SEQ ID NO: 1056758 - RNA, 23 nt, Human
ugaggcaguaguucccacacucu

SEQ ID NO: 1056759 - RNA, 19 nt, Human
uggaagggguuaauccgaa

SEQ ID NO: 1056760 - RNA, 23 nt, Human
uggacaaucugcagcuauaaaaa

SEQ ID NO: 1056761 - RNA, 18 nt, Human
uggagugucagcaggaaa

SEQ ID NO: 1056762 - RNA, 19 nt, Human
ugggccucugcauauagca

SEQ ID NO: 1056763 - RNA, 25 nt, Human
ugugaaguucaaggucacacaguca

SEQ ID NO: 1056764 - RNA, 18 nt, Human
uuccaaaaguauacugug

SEQ ID NO: 1056765 - RNA, 20 nt, Human
uucuaugaucguauugaggc

SEQ ID NO: 1056766 - RNA, 20 nt, Human
uucucucacaaagcucugcc

SEQ ID NO: 1056767 - RNA, 23 nt, Human
uucuuucucucucucucucuuuu

SEQ ID NO: 1056768 - RNA, 22 nt, Human
uugaagccagccuuguuucucu

SEQ ID NO: 1056769 - RNA, 23 nt, Human
uugaagccagccuuguuucucuc

SEQ ID NO: 1056770 - RNA, 25 nt, Human
uugaagccagccuuguuucucucac

SEQ ID NO: 1056771 - RNA, 19 nt, Human
aaugauaaaaacuacugga

SEQ ID NO: 1056772 - RNA, 23 nt, Human
aauuaugguauacuggggaccgg

SEQ ID NO: 1056773 - RNA, 21 nt, Human
acaacgaaggcgcacccugga

SEQ ID NO: 1056774 - RNA, 22 nt, Human
agagugugguaugauagggagg

SEQ ID NO: 1056775 - RNA, 23 nt, Human
agagugugguaugauagggaggu

SEQ ID NO: 1056776 - RNA, 21 nt, Human
cacccuggaaguuaccuccgc

SEQ ID NO: 1056777 - RNA, 24 nt, Human
ccacuucuuuaacaucaagcuaaa

SEQ ID NO: 1056778 - RNA, 20 nt, Human
cugcacaugaauuuccaccu

SEQ ID NO: 1056779 - RNA, 23 nt, Human
cuggaaugacaugaugccuuucu

SEQ ID NO: 1056780 - RNA, 19 nt, Human
gaaggcgcacccuggaagu

SEQ ID NO: 1056781 - RNA, 23 nt, Human
gacaacgaaggcgcacccuggaa

SEQ ID NO: 1056782 - RNA, 20 nt, Human
gagugugguaugauagggag

SEQ ID NO: 1056783 - RNA, 19 nt, Human
ggaaaaugauaaaaacuac

SEQ ID NO: 1056784 - RNA, 22 nt, Human
ggaaaaugauaaaaacuacugg

SEQ ID NO: 1056785 - RNA, 22 nt, Human
uaaaaaggauuuguuucuuuuu

SEQ ID NO: 1056786 - RNA, 24 nt, Human
uaaaugucucugcacaugaauuuc

SEQ ID NO: 1056787 - RNA, 18 nt, Human
uagauuuguauauuuucu

SEQ ID NO: 1056788 - RNA, 23 nt, Human
uaggugaaaugguaugacuauaa

SEQ ID NO: 1056789 - RNA, 18 nt, Human
uaugacuauaaaaaggau

SEQ ID NO: 1056790 - RNA, 20 nt, Human
ucucugcacaugaauuucca

SEQ ID NO: 1056791 - RNA, 22 nt, Human
uggagaagacaacgaaggcgca

SEQ ID NO: 1056792 - RNA, 21 nt, Human
uuuuuuuuuuuuuugcuuuua

SEQ ID NO: 1056793 - RNA, 24 nt, Human
uuuuuuuuuuuuuuuuuugcuuuu

SEQ ID NO: 1056794 - RNA, 27 nt, Human
uuuuuuuuuuuuuuuuuuuuuuugggg

SEQ ID NO: 1056795 - RNA, 21 nt, Human
aaaaauaaacaggucaaagaa

SEQ ID NO: 1056796 - RNA, 18 nt, Human
aaaagcagguggccugac

SEQ ID NO: 1056797 - RNA, 24 nt, Human
aaacacagccagcgacaguugaaa

SEQ ID NO: 1056798 - RNA, 21 nt, Human
aaagcagguggccugaccuac

SEQ ID NO: 1056799 - RNA, 27 nt, Human
aaguacaaaggccacaacaagugagcu

SEQ ID NO: 1056800 - RNA, 23 nt, Human
acagaggaagagguuucuccaaa

SEQ ID NO: 1056801 - RNA, 21 nt, Human
acagccagcgacaguugaaac

SEQ ID NO: 1056802 - RNA, 24 nt, Human
accagugcacuggagaugaagaaa

SEQ ID NO: 1056803 - RNA, 22 nt, Human
accggaugucgucuuugccauc

SEQ ID NO: 1056804 - RNA, 22 nt, Human
agccagcgacaguugaaacaca

SEQ ID NO: 1056805 - RNA, 22 nt, Human
aggggcccgggaaauccacugg

SEQ ID NO: 1056806 - RNA, 23 nt, Human
auucagagccuugacugagcggc

SEQ ID NO: 1056807 - RNA, 22 nt, Human
caaagugcugaaucccucugca

SEQ ID NO: 1056808 - RNA, 21 nt, Human
caacaagugagcucaggcucu

SEQ ID NO: 1056809 - RNA, 19 nt, Human
caagcugcugaguggcuga

SEQ ID NO: 1056810 - RNA, 21 nt, Human
caaggacacuguguaagucac

SEQ ID NO: 1056811 - RNA, 22 nt, Human
caagugagcucaggcucuucag

SEQ ID NO: 1056812 - RNA, 24 nt, Human
cacagcggcaguugaaacacagcc

SEQ ID NO: 1056813 - RNA, 19 nt, Human
cacaggaccucagcgacag

SEQ ID NO: 1056814 - RNA, 20 nt, Human
cacaggaccucagcgacagg

SEQ ID NO: 1056815 - RNA, 20 nt, Human
cacucuaaauucuccuuacc

SEQ ID NO: 1056816 - RNA, 22 nt, Human
cagagaauguucaaaugaacac

SEQ ID NO: 1056817 - RNA, 19 nt, Human
caggaccucagcgacaggu

SEQ ID NO: 1056818 - RNA, 18 nt, Human
cauagccauucuuaucuc

SEQ ID NO: 1056819 - RNA, 23 nt, Human
ccagcauaaguacaaaggccaca

SEQ ID NO: 1056820 - RNA, 24 nt, Human
ccaggaaagucaaaagcauauaca

SEQ ID NO: 1056821 - RNA, 18 nt, Human
ccccaaggagagaaucaa

SEQ ID NO: 1056822 - RNA, 18 nt, Human
ccuacgaugguccugggg

SEQ ID NO: 1056823 - RNA, 23 nt, Human
ccuacgaugguccuggggcauuc

SEQ ID NO: 1056824 - RNA, 20 nt, Human
ccucugugcaaccacuugcc

SEQ ID NO: 1056825 - RNA, 21 nt, Human
ccucugugcaaccacuugccc

SEQ ID NO: 1056826 - RNA, 22 nt, Human
cgacucaucaaucaacacccag

SEQ ID NO: 1056827 - RNA, 19 nt, Human
cgcaccggaugucgucuuu

SEQ ID NO: 1056828 - RNA, 20 nt, Human
cggcuggggcugaauccaca

SEQ ID NO: 1056829 - RNA, 20 nt, Human
cgggagagggcuuguuggua

SEQ ID NO: 1056830 - RNA, 22 nt, Human
cguacacuccagagggcugagg

SEQ ID NO: 1056831 - RNA, 23 nt, Human
cucccgggccugccggggucauc

SEQ ID NO: 1056832 - RNA, 21 nt, Human
cugccgcucucuagaccagug

SEQ ID NO: 1056833 - RNA, 24 nt, Human
cuggggcugaauccacagcaaggg

SEQ ID NO: 1056834 - RNA, 23 nt, Human
gaaacucucugguguccggggcu

SEQ ID NO: 1056835 - RNA, 19 nt, Human
gaaucaugcuaaaaaccua

SEQ ID NO: 1056836 - RNA, 21 nt, Human
gagcggccaagggcgccacag

SEQ ID NO: 1056837 - RNA, 20 nt, Human
gagcucaggcucuucagcag

SEQ ID NO: 1056838 - RNA, 22 nt, Human
gagguuucuccaaaacucguac

SEQ ID NO: 1056839 - RNA, 23 nt, Human
gcucaggcucuucagcagccuca

SEQ ID NO: 1056840 - RNA, 20 nt, Human
ggagaugaagaaaaaagaag

SEQ ID NO: 1056841 - RNA, 27 nt, Human
gggauuuuccccacuuuuucugcaggu

SEQ ID NO: 1056842 - RNA, 21 nt, Human
guugggguggaagacaggaua

SEQ ID NO: 1056843 - RNA, 24 nt, Human
uaaauucuccuuaccaaggacacu

SEQ ID NO: 1056844 - RNA, 19 nt, Human
uaagcugacacaaucacau

SEQ ID NO: 1056845 - RNA, 18 nt, Human
ucaacacccagucauagc

SEQ ID NO: 1056846 - RNA, 20 nt, Human
ucacaggaccucagcgacag

SEQ ID NO: 1056847 - RNA, 19 nt, Human
ucacucccgggccugccgg

SEQ ID NO: 1056848 - RNA, 23 nt, Human
ucagagccuugacugagcggcca

SEQ ID NO: 1056849 - RNA, 21 nt, Human
ucaggcucuucagcagccuca

SEQ ID NO: 1056850 - RNA, 23 nt, Human
ucaguccaggaaagucaaaagca

SEQ ID NO: 1056851 - RNA, 19 nt, Human
uccaaaacucguacacucc

SEQ ID NO: 1056852 - RNA, 22 nt, Human
uccaacugccgcucucuagacc

SEQ ID NO: 1056853 - RNA, 24 nt, Human
uccacgggauccucugugcaacca

SEQ ID NO: 1056854 - RNA, 21 nt, Human
uccagagggcugaggggcccg

SEQ ID NO: 1056855 - RNA, 19 nt, Human
uccccaaaagacacaacaa

SEQ ID NO: 1056856 - RNA, 26 nt, Human
uccccaaaagacacaacaacggcugg

SEQ ID NO: 1056857 - RNA, 18 nt, Human
uccuucagcucacuaggu

SEQ ID NO: 1056858 - RNA, 22 nt, Human
ucggcuggaggaccuacaggaa

SEQ ID NO: 1056859 - RNA, 23 nt, Human
ucucugguguccggggcuuccaa

SEQ ID NO: 1056860 - RNA, 23 nt, Human
ucugcaggugccgggagagggcu

SEQ ID NO: 1056861 - RNA, 23 nt, Human
ucugccucuucggggauuuuccc

SEQ ID NO: 1056862 - RNA, 24 nt, Human
ucugccucuucggggauuuucccc

SEQ ID NO: 1056863 - RNA, 21 nt, Human
ucugggguccaacugccgcuc

SEQ ID NO: 1056864 - RNA, 18 nt, Human
ugacaaaagcagguggcc

SEQ ID NO: 1056865 - RNA, 23 nt, Human
ugagcucaggcucuucagcagcc

SEQ ID NO: 1056866 - RNA, 21 nt, Human
ugaguggcugaugaugucauu

SEQ ID NO: 1056867 - RNA, 23 nt, Human
ugccgggagagggcuuguuggua

SEQ ID NO: 1056868 - RNA, 18 nt, Human
ugcuuggcaauuaaguga

SEQ ID NO: 1056869 - RNA, 21 nt, Human
uggggaguucugauaaccuca

SEQ ID NO: 1056870 - RNA, 18 nt, Human
ugggguccaacugccgcc

SEQ ID NO: 1056871 - RNA, 24 nt, Human
uguauacaggucuuuucuucaguu

SEQ ID NO: 1056872 - RNA, 21 nt, Human
uguccuguguauacaggucuu

SEQ ID NO: 1056873 - RNA, 20 nt, Human
uguuucugccucuucgggga

SEQ ID NO: 1056874 - RNA, 18 nt, Human
uuccccacuuuuucugca

SEQ ID NO: 1056875 - RNA, 19 nt, Human
uuugccauccccagugggc

SEQ ID NO: 1056876 - RNA, 19 nt, Human
acagcgggguccuccagga

SEQ ID NO: 1056877 - RNA, 22 nt, Human
auggugcuugccgcugccgcug

SEQ ID NO: 1056878 - RNA, 18 nt, Human
cagcaggcgacagcgggg

SEQ ID NO: 1056879 - RNA, 24 nt, Human
cagcaggcgacagcgggguccucc

SEQ ID NO: 1056880 - RNA, 24 nt, Human
caggaaggguagcgggcagcaggc

SEQ ID NO: 1056881 - RNA, 21 nt, Human
caggcgacagcgggguccucc

SEQ ID NO: 1056882 - RNA, 18 nt, Human
ccgcugccgcugcagcgc

SEQ ID NO: 1056883 - RNA, 19 nt, Human
cgcugcugcucagcugugg

SEQ ID NO: 1056884 - RNA, 18 nt, Human
cuccaggagcgcugcugc

SEQ ID NO: 1056885 - RNA, 24 nt, Human
gagcgcugcugcucagcugugggc

SEQ ID NO: 1056886 - RNA, 19 nt, Human
gugcuugccgcugccgcug

SEQ ID NO: 1056887 - RNA, 22 nt, Human
ucagcagcaggaaggguagcgg

SEQ ID NO: 1056888 - RNA, 20 nt, Human
ugcucagguagcucagcagc

SEQ ID NO: 1056889 - RNA, 21 nt, Human
ugcugcucagcugugggcgca

SEQ ID NO: 1056890 - RNA, 19 nt, Human
aaaaaaaaaaaaaaaaaga

SEQ ID NO: 1056891 - RNA, 18 nt, Human
aaauguuagaaauuauau

SEQ ID NO: 1056892 - RNA, 20 nt, Human
aacauggugaauccccauau

SEQ ID NO: 1056893 - RNA, 23 nt, Human
aacgacaggaucuuuuggcaaaa

SEQ ID NO: 1056894 - RNA, 22 nt, Human
aagcagucucaacaauaaccaa

SEQ ID NO: 1056895 - RNA, 21 nt, Human
aauaugaugucguucaagaag

SEQ ID NO: 1056896 - RNA, 18 nt, Human
aaucgcuugaaccuggga

SEQ ID NO: 1056897 - RNA, 25 nt, Human
acaaagcaagacuccguucucaaaa

SEQ ID NO: 1056898 - RNA, 18 nt, Human
acuagagccuuucaaugc

SEQ ID NO: 1056899 - RNA, 18 nt, Human
acugcaguccagccuggg

SEQ ID NO: 1056900 - RNA, 23 nt, Human
acugcaguccagccugggugaca

SEQ ID NO: 1056901 - RNA, 24 nt, Human
acuuauuggauaacuaauacauuu

SEQ ID NO: 1056902 - RNA, 22 nt, Human
agaaucgcuugaaccugggaga

SEQ ID NO: 1056903 - RNA, 23 nt, Human
agaucaaucucugggaaaacacu

SEQ ID NO: 1056904 - RNA, 19 nt, Human
agauggagguugcagagcc

SEQ ID NO: 1056905 - RNA, 21 nt, Human
agauggagguugcagagccga

SEQ ID NO: 1056906 - RNA, 24 nt, Human
agcacauauacaaacauauuuacc

SEQ ID NO: 1056907 - RNA, 18 nt, Human
agccaggcauaguggugc

SEQ ID NO: 1056908 - RNA, 24 nt, Human
agccugggugacaaagcaagacuc

SEQ ID NO: 1056909 - RNA, 24 nt, Human
aggcagaucacaaggucaggaguu

SEQ ID NO: 1056910 - RNA, 22 nt, Human
aggcaggagaaucgcuugaacc

SEQ ID NO: 1056911 - RNA, 24 nt, Human
aggcaggagaaucgcuugaaccug

SEQ ID NO: 1056912 - RNA, 24 nt, Human
aggcaggcagaucacaaggucagg

SEQ ID NO: 1056913 - RNA, 24 nt, Human
aggcauaguggugccugccuguaa

SEQ ID NO: 1056914 - RNA, 23 nt, Human
aggccgaggcaggcagaucacaa

SEQ ID NO: 1056915 - RNA, 20 nt, Human
aggcugaggcaggagaaucg

SEQ ID NO: 1056916 - RNA, 24 nt, Human
aggcugaggcaggagaaucgcuug

SEQ ID NO: 1056917 - RNA, 24 nt, Human
aguggugccugccuguaaucccag

SEQ ID NO: 1056918 - RNA, 21 nt, Human
auaaguagaucaauaauuaga

SEQ ID NO: 1056919 - RNA, 29 nt, Human
auaucaaaaaaaaaaagccagaucaaucu

SEQ ID NO: 1056920 - RNA, 25 nt, Human
aucaaaauucucugucuugaaaauu

SEQ ID NO: 1056921 - RNA, 21 nt, Human
aucacaaggucaggaguucga

SEQ ID NO: 1056922 - RNA, 24 nt, Human
aucaugccacugcaguccagccug

SEQ ID NO: 1056923 - RNA, 19 nt, Human
augccuguaaucccaauac

SEQ ID NO: 1056924 - RNA, 20 nt, Human
caaaaaaaaaaagccagauc

SEQ ID NO: 1056925 - RNA, 25 nt, Human
caaaugaaagaaacacaugacuuug

SEQ ID NO: 1056926 - RNA, 18 nt, Human
caacggcacgagaauacc

SEQ ID NO: 1056927 - RNA, 22 nt, Human
caacggcacgagaauaccaacu

SEQ ID NO: 1056928 - RNA, 22 nt, Human
caagacuccguucucaaaaaaa

SEQ ID NO: 1056929 - RNA, 19 nt, Human
caaucucugggaaaacacu

SEQ ID NO: 1056930 - RNA, 19 nt, Human
cacugcaguccagccuggg

SEQ ID NO: 1056931 - RNA, 24 nt, Human
cacugcaguccagccugggugaca

SEQ ID NO: 1056932 - RNA, 23 nt, Human
cagaagaauaaugcaaaucucac

SEQ ID NO: 1056933 - RNA, 22 nt, Human
cagcaccaaaugaaagaaacac

SEQ ID NO: 1056934 - RNA, 24 nt, Human
cagcuacuugggaggcugaggcag

SEQ ID NO: 1056935 - RNA, 20 nt, Human
caugccuguaaucccaauac

SEQ ID NO: 1056936 - RNA, 22 nt, Human
caugccuguaaucccaauacug

SEQ ID NO: 1056937 - RNA, 22 nt, Human
cauucaaacacauuuuugcuau

SEQ ID NO: 1056938 - RNA, 23 nt, Human
ccaauacugggaggccgaggcag

SEQ ID NO: 1056939 - RNA, 24 nt, Human
ccaauacugggaggccgaggcagg

SEQ ID NO: 1056940 - RNA, 20 nt, Human
ccacugcaguccagccuggg

SEQ ID NO: 1056941 - RNA, 20 nt, Human
ccacugcaguccagccuggg

SEQ ID NO: 1056942 - RNA, 21 nt, Human
ccacugcaguccagccugggu

SEQ ID NO: 1056943 - RNA, 24 nt, Human
ccacugcaguccagccugggugac

SEQ ID NO: 1056944 - RNA, 19 nt, Human
ccagcaccugacauaguuu

SEQ ID NO: 1056945 - RNA, 21 nt, Human
ccccgcaccacacgcuucccc

SEQ ID NO: 1056946 - RNA, 21 nt, Human
cccgcccccaggcuaacucua

SEQ ID NO: 1056947 - RNA, 24 nt, Human
ccugaccaacauggugaaucccca

SEQ ID NO: 1056948 - RNA, 23 nt, Human
ccugcagcuaugacagcaucugc

SEQ ID NO: 1056949 - RNA, 22 nt, Human
ccugccccucuaaauuuaaaaa

SEQ ID NO: 1056950 - RNA, 21 nt, Human
ccugggagauggagguugcag

SEQ ID NO: 1056951 - RNA, 22 nt, Human
ccugggugacaaagcaagacuc

SEQ ID NO: 1056952 - RNA, 19 nt, Human
ccuguaaucccagcuacuu

SEQ ID NO: 1056953 - RNA, 21 nt, Human
ccuguaaucccagcuacuugg

SEQ ID NO: 1056954 - RNA, 22 nt, Human
ccuuuauuuaagccugccccuc

SEQ ID NO: 1056955 - RNA, 26 nt, Human
cgaacagucucuucaucauauucucu

SEQ ID NO: 1056956 - RNA, 19 nt, Human
cgacuauccguccagcuuu

SEQ ID NO: 1056957 - RNA, 24 nt, Human
cgagaccagccugaccaacauggu

SEQ ID NO: 1056958 - RNA, 26 nt, Human
cgaggcaggcagaucacaaggucagg

SEQ ID NO: 1056959 - RNA, 25 nt, Human
cuauaaaaaauaugcacuaaucaaa

SEQ ID NO: 1056960 - RNA, 23 nt, Human
cucaaaaaaaaaaaaaaaaaaaa

SEQ ID NO: 1056961 - RNA, 20 nt, Human
cucaugccuguaaucccaau

SEQ ID NO: 1056962 - RNA, 25 nt, Human
cuccguucucaaaaaaaaaaaaaaa

SEQ ID NO: 1056963 - RNA, 28 nt, Human
cuccguucucaaaaaaaaaaaaaaaaaa

SEQ ID NO: 1056964 - RNA, 20 nt, Human
cucuuuacuagacgaaccuc

SEQ ID NO: 1056965 - RNA, 23 nt, Human
gagaucaugccacugcaguccag

SEQ ID NO: 1056966 - RNA, 24 nt, Human
gagcccacgggcaagcagucucaa

SEQ ID NO: 1056967 - RNA, 21 nt, Human
gaucacaaggucaggaguucg

SEQ ID NO: 1056968 - RNA, 22 nt, Human
gaucacaaggucaggaguucga

SEQ ID NO: 1056969 - RNA, 24 nt, Human
gaucacaaggucaggaguucgaga

SEQ ID NO: 1056970 - RNA, 19 nt, Human
gcagaucacaaggucagga

SEQ ID NO: 1056971 - RNA, 19 nt, Human
gccacugcaguccagccug

SEQ ID NO: 1056972 - RNA, 24 nt, Human
gccacugcaguccagccuggguga

SEQ ID NO: 1056973 - RNA, 22 nt, Human
gcccacgggcaagcagucucaa

SEQ ID NO: 1056974 - RNA, 20 nt, Human
gccgagaucaugccacugca

SEQ ID NO: 1056975 - RNA, 22 nt, Human
gccgggcaugguggcucaugcc

SEQ ID NO: 1056976 - RNA, 18 nt, Human
gccugccuguaaucccag

SEQ ID NO: 1056977 - RNA, 23 nt, Human
ggcaugguggcucaugccuguaa

SEQ ID NO: 1056978 - RNA, 23 nt, Human
ggccgggcaugguggcucaugcc

SEQ ID NO: 1056979 - RNA, 23 nt, Human
gguggcucaugccuguaauccca

SEQ ID NO: 1056980 - RNA, 18 nt, Human
guauaucaaaaaaaaaaa

SEQ ID NO: 1056981 - RNA, 20 nt, Human
uaaaaaauugauaagaacaa

SEQ ID NO: 1056982 - RNA, 26 nt, Human
uaaaagcuauucuguaaaucuuggaa

SEQ ID NO: 1056983 - RNA, 19 nt, Human
uaaagauggaagaaaccug

SEQ ID NO: 1056984 - RNA, 24 nt, Human
uaacagaucuauuuggacaaucag

SEQ ID NO: 1056985 - RNA, 21 nt, Human
uaagagcacucaauucgacua

SEQ ID NO: 1056986 - RNA, 19 nt, Human
uaaggauagagucuguuuc

SEQ ID NO: 1056987 - RNA, 24 nt, Human
uaaggccgggcaugguggcucaug

SEQ ID NO: 1056988 - RNA, 23 nt, Human
uaauuuccuccaaaaauaaagga

SEQ ID NO: 1056989 - RNA, 23 nt, Human
uacuauaaaaaauaugcacuaau

SEQ ID NO: 1056990 - RNA, 18 nt, Human
uagcacauauacaaacau

SEQ ID NO: 1056991 - RNA, 23 nt, Human
uaguauggagcuucuuuauaaag

SEQ ID NO: 1056992 - RNA, 24 nt, Human
uaguggugccugccuguaauccca

SEQ ID NO: 1056993 - RNA, 24 nt, Human
uaguuuuacauggcacagaguggg

SEQ ID NO: 1056994 - RNA, 19 nt, Human
uaucaaaaaaaaaaagcca

SEQ ID NO: 1056995 - RNA, 23 nt, Human
uaucaaaaaaaaaaagccagauc

SEQ ID NO: 1056996 - RNA, 21 nt, Human
uaucacaaauggagcacaaua

SEQ ID NO: 1056997 - RNA, 22 nt, Human
uauuucacccagaacugcugaa

SEQ ID NO: 1056998 - RNA, 23 nt, Human
ucaaaaaaaaaaaaaaaaaaaaa

SEQ ID NO: 1056999 - RNA, 24 nt, Human
ucacaaggucaggaguucgagacc

SEQ ID NO: 1057000 - RNA, 23 nt, Human
ucagcaccaaaugaaagaaacac

SEQ ID NO: 1057001 - RNA, 22 nt, Human
ucagcacucuugguuaccaauu

SEQ ID NO: 1057002 - RNA, 21 nt, Human
ucaguucauccuuuuaguccc

SEQ ID NO: 1057003 - RNA, 21 nt, Human
ucaugccacugcaguccagcc

SEQ ID NO: 1057004 - RNA, 23 nt, Human
ucaugccacugcaguccagccug

SEQ ID NO: 1057005 - RNA, 22 nt, Human
ucaugccuguaaucccaauacu

SEQ ID NO: 1057006 - RNA, 24 nt, Human
uccagccugggugacaaagcaaga

SEQ ID NO: 1057007 - RNA, 24 nt, Human
ucgcuugaaccugggagauggagg

SEQ ID NO: 1057008 - RNA, 25 nt, Human
ucgcuugaaccugggagauggaggu

SEQ ID NO: 1057009 - RNA, 20 nt, Human
ucuacuaaaaauacaaaaaa

SEQ ID NO: 1057010 - RNA, 20 nt, Human
ucuauaguauggagcuucuu

SEQ ID NO: 1057011 - RNA, 21 nt, Human
ucucgccaguaaucaaaauuu

SEQ ID NO: 1057012 - RNA, 18 nt, Human
ucuggauauacaucaaaa

SEQ ID NO: 1057013 - RNA, 18 nt, Human
ugaaaaccacaauacuaa

SEQ ID NO: 1057014 - RNA, 18 nt, Human
ugaaagaaacacaugacu

SEQ ID NO: 1057015 - RNA, 23 nt, Human
ugaaagcauucaucuauaauuuc

SEQ ID NO: 1057016 - RNA, 21 nt, Human
ugaacagaaauuuucagcacc

SEQ ID NO: 1057017 - RNA, 24 nt, Human
ugaaccugggagauggagguugca

SEQ ID NO: 1057018 - RNA, 20 nt, Human
ugaggcaggagaaucgcuug

SEQ ID NO: 1057019 - RNA, 24 nt, Human
ugaggcaggagaaucgcuugaacc

SEQ ID NO: 1057020 - RNA, 25 nt, Human
ugaggcaggagaaucgcuugaaccu

SEQ ID NO: 1057021 - RNA, 21 nt, Human
ugccuguaaucccaauacugg

SEQ ID NO: 1057022 - RNA, 22 nt, Human
ugccuguaaucccaauacuggg

SEQ ID NO: 1057023 - RNA, 23 nt, Human
ugccuguaaucccagcuacuugg

SEQ ID NO: 1057024 - RNA, 24 nt, Human
ugccuguaaucccagcuacuuggg

SEQ ID NO: 1057025 - RNA, 23 nt, Human
ugcuaugcuaacauuccuuugcc

SEQ ID NO: 1057026 - RNA, 19 nt, Human
uggaagaaaccuguaagac

SEQ ID NO: 1057027 - RNA, 21 nt, Human
uggcucaugccuguaauccca

SEQ ID NO: 1057028 - RNA, 22 nt, Human
uggcucaugccuguaaucccaa

SEQ ID NO: 1057029 - RNA, 24 nt, Human
uggcucaugccuguaaucccaaua

SEQ ID NO: 1057030 - RNA, 24 nt, Human
ugggaaaacacuacauuuuaaugu

SEQ ID NO: 1057031 - RNA, 23 nt, Human
ugggagauggagguugcagagcc

SEQ ID NO: 1057032 - RNA, 20 nt, Human
ugggaggccgaggcaggcag

SEQ ID NO: 1057033 - RNA, 24 nt, Human
ugggaggccgaggcaggcagauca

SEQ ID NO: 1057034 - RNA, 19 nt, Human
ugggaggcugaggcaggag

SEQ ID NO: 1057035 - RNA, 23 nt, Human
ugggaggcugaggcaggagaauc

SEQ ID NO: 1057036 - RNA, 21 nt, Human
ugggugacaaagcaagacucc

SEQ ID NO: 1057037 - RNA, 24 nt, Human
ugguggcucaugccuguaauccca

SEQ ID NO: 1057038 - RNA, 19 nt, Human
uguauaucaaaaaaaaaaa

SEQ ID NO: 1057039 - RNA, 19 nt, Human
ugugccaucaccuccugca

SEQ ID NO: 1057040 - RNA, 19 nt, Human
uuaaauauuggcaaaacua

SEQ ID NO: 1057041 - RNA, 21 nt, Human
uuacagaaugaaacucaaaug

SEQ ID NO: 1057042 - RNA, 21 nt, Human
uuagccaggcauaguggugcc

SEQ ID NO: 1057043 - RNA, 24 nt, Human
uuaggucaaugucaggauuuauca

SEQ ID NO: 1057044 - RNA, 23 nt, Human
uucaagaaguccacuguaacuag

SEQ ID NO: 1057045 - RNA, 24 nt, Human
uucaucaacauauccagcaccuga

SEQ ID NO: 1057046 - RNA, 18 nt, Human
uuccuugagauuaaggau

SEQ ID NO: 1057047 - RNA, 19 nt, Human
uucugagcccacaagacuc

SEQ ID NO: 1057048 - RNA, 24 nt, Human
uugaaccugggagauggagguugc

SEQ ID NO: 1057049 - RNA, 24 nt, Human
uugggaggcugaggcaggagaauc

SEQ ID NO: 1057050 - RNA, 20 nt, Human
aacagagggguggcgugugc

SEQ ID NO: 1057051 - RNA, 22 nt, Human
aaccuucaaaggaccagggaug

SEQ ID NO: 1057052 - RNA, 20 nt, Human
aagaaagaugaaacaaauga

SEQ ID NO: 1057053 - RNA, 21 nt, Human
aagaagcaaguugcaggauca

SEQ ID NO: 1057054 - RNA, 21 nt, Human
aagaaggcaacuguaaaaacu

SEQ ID NO: 1057055 - RNA, 21 nt, Human
aagaugaaacaaaugaacaaa

SEQ ID NO: 1057056 - RNA, 24 nt, Human
aagcaaauaaaaagguacaaucau

SEQ ID NO: 1057057 - RNA, 18 nt, Human
aagguaaaauauuucaug

SEQ ID NO: 1057058 - RNA, 23 nt, Human
acuccaaaggcacuggcuguggg

SEQ ID NO: 1057059 - RNA, 21 nt, Human
acugggaagucaucuaaacaa

SEQ ID NO: 1057060 - RNA, 22 nt, Human
agaaagaagcaaguugcaggaa

SEQ ID NO: 1057061 - RNA, 19 nt, Human
agaaaggaggaggcagggc

SEQ ID NO: 1057062 - RNA, 22 nt, Human
agaaaggaggaggcagggcugg

SEQ ID NO: 1057063 - RNA, 21 nt, Human
agccugggcugcgcgcccugc

SEQ ID NO: 1057064 - RNA, 24 nt, Human
aggaggaggcagggcuggcaggug

SEQ ID NO: 1057065 - RNA, 25 nt, Human
aggcagagaauagaaagaagggacc

SEQ ID NO: 1057066 - RNA, 23 nt, Human
aggcagagaauagaagggacccc

SEQ ID NO: 1057067 - RNA, 23 nt, Human
aggcagugagcaaaggucuuggc

SEQ ID NO: 1057068 - RNA, 22 nt, Human
agggcuggcaggugaaaauuug

SEQ ID NO: 1057069 - RNA, 23 nt, Human
agguaggagacggauccugccaa

SEQ ID NO: 1057070 - RNA, 22 nt, Human
augaaacaaaugaacaaaaacu

SEQ ID NO: 1057071 - RNA, 25 nt, Human
caacuguaaaaacugaaauaaagca

SEQ ID NO: 1057072 - RNA, 19 nt, Human
cagaacucuaaagcaaaua

SEQ ID NO: 1057073 - RNA, 25 nt, Human
cagaacucuaaagcaaauaaaaagg

SEQ ID NO: 1057074 - RNA, 26 nt, Human
caggcagugagcaaaggucuuggcag

SEQ ID NO: 1057075 - RNA, 18 nt, Human
cagggguucuccuucccu

SEQ ID NO: 1057076 - RNA, 20 nt, Human
caguacuccaaaggcacugg

SEQ ID NO: 1057077 - RNA, 21 nt, Human
caucuaaacaaggaggaugaa

SEQ ID NO: 1057078 - RNA, 23 nt, Human
ccccucacccaaggcuacaccua

SEQ ID NO: 1057079 - RNA, 22 nt, Human
cccugcgccgggcuaaggacuc

SEQ ID NO: 1057080 - RNA, 24 nt, Human
ccuaggaagagguaggagacggau

SEQ ID NO: 1057081 - RNA, 23 nt, Human
ccuuagccacugguaccugaagc

SEQ ID NO: 1057082 - RNA, 25 nt, Human
cuaaagcaaauaaaaagguacaauc

SEQ ID NO: 1057083 - RNA, 21 nt, Human
cuccaaaggcacuggcugugg

SEQ ID NO: 1057084 - RNA, 22 nt, Human
cuccaaaggcacuggcuguggg

SEQ ID NO: 1057085 - RNA, 20 nt, Human
cugaagccacaaagccuuac

SEQ ID NO: 1057086 - RNA, 21 nt, Human
cugccaauucucucgcccuuc

SEQ ID NO: 1057087 - RNA, 23 nt, Human
gagaacagagggguggccgguac

SEQ ID NO: 1057088 - RNA, 19 nt, Human
gagagaacagagggguggc

SEQ ID NO: 1057089 - RNA, 19 nt, Human
gagcagaccagguuuccug

SEQ ID NO: 1057090 - RNA, 19 nt, Human
gcagagaauagaaagaagc

SEQ ID NO: 1057091 - RNA, 22 nt, Human
gcagguggagcugaagagagaa

SEQ ID NO: 1057092 - RNA, 23 nt, Human
gcgccgggcuaaggacucugugc

SEQ ID NO: 1057093 - RNA, 21 nt, Human
gggaagucaucuaaacaagga

SEQ ID NO: 1057094 - RNA, 19 nt, Human
ggggacuggaaacugggaa

SEQ ID NO: 1057095 - RNA, 24 nt, Human
ggggguguuuacgccaugguuuuu

SEQ ID NO: 1057096 - RNA, 24 nt, Human
gucaaauauuuccugaguuuuuuu

SEQ ID NO: 1057097 - RNA, 26 nt, Human
uaaaaagguacaaucauuugaaggua

SEQ ID NO: 1057098 - RNA, 20 nt, Human
uaagacgggaaucuuaagaa

SEQ ID NO: 1057099 - RNA, 19 nt, Human
uaagguaaucucuaagguu

SEQ ID NO: 1057100 - RNA, 24 nt, Human
uaccugaagccacaaagccuuaca

SEQ ID NO: 1057101 - RNA, 18 nt, Human
uagaaggguauuaacugc

SEQ ID NO: 1057102 - RNA, 28 nt, Human
uaggaaaagggagaaaggaggaggcagg

SEQ ID NO: 1057103 - RNA, 20 nt, Human
uaggaagagguaggagacgg

SEQ ID NO: 1057104 - RNA, 25 nt, Human
uaucaagaaagaugaaacaaaugaa

SEQ ID NO: 1057105 - RNA, 20 nt, Human
uauuucagaacucuaaagca

SEQ ID NO: 1057106 - RNA, 24 nt, Human
uccaugucugaccagcaaaggagg

SEQ ID NO: 1057107 - RNA, 23 nt, Human
ucuaggaaaagggagaaaggagg

SEQ ID NO: 1057108 - RNA, 21 nt, Human
ucuguuccuagcagauuaagg

SEQ ID NO: 1057109 - RNA, 18 nt, Human
ugaaaagugauagaagga

SEQ ID NO: 1057110 - RNA, 18 nt, Human
ugaaauggaagauauguc

SEQ ID NO: 1057111 - RNA, 21 nt, Human
ugaaauggaagauaugucaaa

SEQ ID NO: 1057112 - RNA, 23 nt, Human
ugaaauggaagauaugucaaaua

SEQ ID NO: 1057113 - RNA, 26 nt, Human
ugaacaaaaacucuggggguguuuac

SEQ ID NO: 1057114 - RNA, 19 nt, Human
ugacaugauggagcaacca

SEQ ID NO: 1057115 - RNA, 23 nt, Human
ugcaggaucaguggcagguggag

SEQ ID NO: 1057116 - RNA, 19 nt, Human
uggcagggguucuccuucc

SEQ ID NO: 1057117 - RNA, 23 nt, Human
uggcagggguucuccuucccuaa

SEQ ID NO: 1057118 - RNA, 21 nt, Human
ugucaaauauuuccugaguuu

SEQ ID NO: 1057119 - RNA, 19 nt, Human
ugugaccaacugcaggcuc

SEQ ID NO: 1057120 - RNA, 23 nt, Human
ugugaccaacugcaggcuccaug

SEQ ID NO: 1057121 - RNA, 19 nt, Human
uucagaacucuaaagcaaa

SEQ ID NO: 1057122 - RNA, 22 nt, Human
uuccugaguuuuuuuaugaaaa

SEQ ID NO: 1057123 - RNA, 24 nt, Human
agcggcggcagccugaagccugga

SEQ ID NO: 1057124 - RNA, 20 nt, Human
aggugguggcggcggcccug

SEQ ID NO: 1057125 - RNA, 22 nt, Human
caggugguggcggcggcccugc

SEQ ID NO: 1057126 - RNA, 18 nt, Human
ccgcuccaaaccucgacc

SEQ ID NO: 1057127 - RNA, 19 nt, Human
ccucccagcggcggcagcc

SEQ ID NO: 1057128 - RNA, 20 nt, Human
ccugaagccuggaugcuagg

SEQ ID NO: 1057129 - RNA, 23 nt, Human
cgccucccagcggcggcagccug

SEQ ID NO: 1057130 - RNA, 23 nt, Human
cuccuugcacuuccgguggcacu

SEQ ID NO: 1057131 - RNA, 19 nt, Human
cuggaugcuagggcggagg

SEQ ID NO: 1057132 - RNA, 21 nt, Human
gacccacacugguccuggcgc

SEQ ID NO: 1057133 - RNA, 19 nt, Human
gcagggguugggcaggcag

SEQ ID NO: 1057134 - RNA, 21 nt, Human
gcggcccugcaggcagggagc

SEQ ID NO: 1057135 - RNA, 21 nt, Human
guccgcuccaaaccucgaccc

SEQ ID NO: 1057136 - RNA, 20 nt, Human
gugguggcggcggcccugca

SEQ ID NO: 1057137 - RNA, 24 nt, Human
gugguggcggcggcccugcaggca

SEQ ID NO: 1057138 - RNA, 21 nt, Human
uccuugcacuuccgguggcac

SEQ ID NO: 1057139 - RNA, 19 nt, Human
ucuacagcuccuugcacuu

SEQ ID NO: 1057140 - RNA, 20 nt, Human
ugacugccaacacuuucccc

SEQ ID NO: 1057141 - RNA, 21 nt, Human
ugcacuuccgguggcacuccu

SEQ ID NO: 1057142 - RNA, 20 nt, Human
uggcgcccaggccgccuccc

SEQ ID NO: 1057143 - RNA, 24 nt, Human
uggcggcagucccacgagggccgg

SEQ ID NO: 1057144 - RNA, 23 nt, Human
uggcgguugcagcuccggggguc

SEQ ID NO: 1057145 - RNA, 24 nt, Human
uugacaccuuccaucuacagcucc

SEQ ID NO: 1057146 - RNA, 21 nt, Human
cggcgggaggauccccgggcc

SEQ ID NO: 1057147 - RNA, 23 nt, Human
uccccgggccgcuuucgccuccg

SEQ ID NO: 1057148 - RNA, 23 nt, Human
aaggugcuuguucuugccaaccg

SEQ ID NO: 1057149 - RNA, 22 nt, Human
acccuugagaccaucagaugca

SEQ ID NO: 1057150 - RNA, 21 nt, Human
caaaucagcaagacucacuuc

SEQ ID NO: 1057151 - RNA, 22 nt, Human
cagcaagacucacuucaaacac

SEQ ID NO: 1057152 - RNA, 20 nt, Human
cuggugaugagcaucuuucc

SEQ ID NO: 1057153 - RNA, 23 nt, Human
gaugagcaucuuuccaauauuuc

SEQ ID NO: 1057154 - RNA, 18 nt, Human
gccauggaaguuaggcag

SEQ ID NO: 1057155 - RNA, 20 nt, Human
gccauggaaguuaggcaguu

SEQ ID NO: 1057156 - RNA, 19 nt, Human
uagaaaauggaucaaccac

SEQ ID NO: 1057157 - RNA, 24 nt, Human
uagaaaauggaucaaccacuuucu

SEQ ID NO: 1057158 - RNA, 21 nt, Human
ucuucuuggcccccuuuuugc

SEQ ID NO: 1057159 - RNA, 23 nt, Human
ucuucuuggcccccuuuuugcug

SEQ ID NO: 1057160 - RNA, 23 nt, Human
uucguaaggugcuuguucuugcc

SEQ ID NO: 1057161 - RNA, 19 nt, Human
uugguuccuuggguccugg

SEQ ID NO: 1057162 - RNA, 21 nt, Human
uuugguuccuuggguccuggu

SEQ ID NO: 1057163 - RNA, 25 nt, Human
agagaagcaaaugaaguauauucaa

SEQ ID NO: 1057164 - RNA, 24 nt, Human
cauugacaagauuauacagagaag

SEQ ID NO: 1057165 - RNA, 23 nt, Human
ccucacugucaucuucaucauua

SEQ ID NO: 1057166 - RNA, 21 nt, Human
cuucaucauuaucuggcuucu

SEQ ID NO: 1057167 - RNA, 20 nt, Human
uauacagagaagcaaaugaa

SEQ ID NO: 1057168 - RNA, 19 nt, Human
uauucaacagcuccuguca

SEQ ID NO: 1057169 - RNA, 22 nt, Human
ucaacagcuccugucaguccca

SEQ ID NO: 1057170 - RNA, 25 nt, Human
uccacauuauuuucuguuucuuuag

SEQ ID NO: 1057171 - RNA, 21 nt, Human
uucuucuugagauuccccuuu

SEQ ID NO: 1057172 - RNA, 20 nt, Human
uugagauuccccuuuguuuu

SEQ ID NO: 1057173 - RNA, 19 nt, Human
caaccgucaccgagguucu

SEQ ID NO: 1057174 - RNA, 22 nt, Human
cacuguaaaaaaacuggccaac

SEQ ID NO: 1057175 - RNA, 20 nt, Human
cagggagccgacggugaagg

SEQ ID NO: 1057176 - RNA, 19 nt, Human
uaaaacagaaacucauaac

SEQ ID NO: 1057177 - RNA, 27 nt, Human
uaaaacagaaacucauaacaaauaaga

SEQ ID NO: 1057178 - RNA, 20 nt, Human
uacaaauuaguaaacucaac

SEQ ID NO: 1057179 - RNA, 25 nt, Human
uacaaauuaguaaacucaacucucc

SEQ ID NO: 1057180 - RNA, 20 nt, Human
ugacaggagcagggagccga

SEQ ID NO: 1057181 - RNA, 21 nt, Human
uguaaaaaaacuggccaaccg

SEQ ID NO: 1057182 - RNA, 24 nt, Human
aaaaauacuaggggcugagguggc

SEQ ID NO: 1057183 - RNA, 21 nt, Human
aaacaggaacagaauagcugg

SEQ ID NO: 1057184 - RNA, 23 nt, Human
acaggcugcuuugaggcugauaa

SEQ ID NO: 1057185 - RNA, 22 nt, Human
accucugaguuuucagggaagg

SEQ ID NO: 1057186 - RNA, 18 nt, Human
aggcccuggaguucaaca

SEQ ID NO: 1057187 - RNA, 21 nt, Human
agugagguuaguuguccuggg

SEQ ID NO: 1057188 - RNA, 18 nt, Human
caaggcauugauagaaaa

SEQ ID NO: 1057189 - RNA, 19 nt, Human
cacagaccgugacucagag

SEQ ID NO: 1057190 - RNA, 21 nt, Human
ccucacagaccgugacucaga

SEQ ID NO: 1057191 - RNA, 19 nt, Human
cuaggggcugagguggcug

SEQ ID NO: 1057192 - RNA, 19 nt, Human
cucugauuucaggccagac

SEQ ID NO: 1057193 - RNA, 19 nt, Human
uagacagcagaauugaaga

SEQ ID NO: 1057194 - RNA, 19 nt, Human
uagagugaagguuagugag

SEQ ID NO: 1057195 - RNA, 18 nt, Human
uagccucacagaccguga

SEQ ID NO: 1057196 - RNA, 20 nt, Human
uagcugggagcuccaagauu

SEQ ID NO: 1057197 - RNA, 21 nt, Human
uagcugggagcuccaagauuc

SEQ ID NO: 1057198 - RNA, 21 nt, Human
uauaggcccuggaguucaaca

SEQ ID NO: 1057199 - RNA, 22 nt, Human
uauuuugccuuuuagcauggca

SEQ ID NO: 1057200 - RNA, 20 nt, Human
ucagagcuucauugcaggac

SEQ ID NO: 1057201 - RNA, 20 nt, Human
ucucuguaauguagacacag

SEQ ID NO: 1057202 - RNA, 22 nt, Human
ugaagaggaauaugaacccauc

SEQ ID NO: 1057203 - RNA, 19 nt, Human
ugacagaaacaggaacaga

SEQ ID NO: 1057204 - RNA, 21 nt, Human
ugacucagagcuucauugcag

SEQ ID NO: 1057205 - RNA, 19 nt, Human
ugaguaacaggaaccgcaa

SEQ ID NO: 1057206 - RNA, 21 nt, Human
ugaguaacaggaaccgcaguc

SEQ ID NO: 1057207 - RNA, 24 nt, Human
ugauagaaaaaauacuaggggcug

SEQ ID NO: 1057208 - RNA, 22 nt, Human
ugggagcuccaagauucacauu

SEQ ID NO: 1057209 - RNA, 19 nt, Human
uuacugucucucccaggga

SEQ ID NO: 1057210 - RNA, 20 nt, Human
uuagagugaagguuagugag

SEQ ID NO: 1057211 - RNA, 21 nt, Human
uuaguuguccugggguucaca

SEQ ID NO: 1057212 - RNA, 22 nt, Human
uucuguagugcuugcucugauu

SEQ ID NO: 1057213 - RNA, 23 nt, Human
uugcaggagcuggugugaguuuu

SEQ ID NO: 1057214 - RNA, 23 nt, Human
uuggaaaguccucauuaaagcug

SEQ ID NO: 1057215 - RNA, 22 nt, Human
uuucaaauuacugucucuccca

SEQ ID NO: 1057216 - RNA, 24 nt, Human
aaaccaggcuggggaacgcaccuc

SEQ ID NO: 1057217 - RNA, 25 nt, Human
aaagcauaauucuacuugauuauag

SEQ ID NO: 1057218 - RNA, 19 nt, Human
aaagcgcugggauuacagg

SEQ ID NO: 1057219 - RNA, 24 nt, Human
aaagcgcugggauuacaggcauga

SEQ ID NO: 1057220 - RNA, 19 nt, Human
aagcgcugggauuacaggc

SEQ ID NO: 1057221 - RNA, 26 nt, Human
aagcgcugggauuacaggcaugagcc

SEQ ID NO: 1057222 - RNA, 22 nt, Human
aauuagaauucaaaucaaagca

SEQ ID NO: 1057223 - RNA, 22 nt, Human
aauucaaaucaaagcauaauuc

SEQ ID NO: 1057224 - RNA, 18 nt, Human
acagaggaaauccucccu

SEQ ID NO: 1057225 - RNA, 23 nt, Human
acagaggaaauccucccuccucc

SEQ ID NO: 1057226 - RNA, 19 nt, Human
acaggcgccugccaccacg

SEQ ID NO: 1057227 - RNA, 23 nt, Human
accucagccucccaaagcgcugg

SEQ ID NO: 1057228 - RNA, 20 nt, Human
agaggaaauccucccuccuc

SEQ ID NO: 1057229 - RNA, 18 nt, Human
agcgcugggauuacaggc

SEQ ID NO: 1057230 - RNA, 22 nt, Human
agcggagauucgcggcggcggg

SEQ ID NO: 1057231 - RNA, 20 nt, Human
aggcccggaguuacgagcgg

SEQ ID NO: 1057232 - RNA, 25 nt, Human
aggcuggagugcaguagcaugaucu

SEQ ID NO: 1057233 - RNA, 18 nt, Human
aguagcugggacuacagg

SEQ ID NO: 1057234 - RNA, 19 nt, Human
aguagcugggacuacaggc

SEQ ID NO: 1057235 - RNA, 24 nt, Human
agugcaguagcaugaucucggcuc

SEQ ID NO: 1057236 - RNA, 18 nt, Human
aucacaacuggaacugau

SEQ ID NO: 1057237 - RNA, 21 nt, Human
auucuccugccucagccuccc

SEQ ID NO: 1057238 - RNA, 24 nt, Human
caaagcgcugggauuacaggcaug

SEQ ID NO: 1057239 - RNA, 20 nt, Human
caaccucugccuccuggguu

SEQ ID NO: 1057240 - RNA, 22 nt, Human
caccgcguccggcccucauuuu

SEQ ID NO: 1057241 - RNA, 18 nt, Human
caccguguuagccaggau

SEQ ID NO: 1057242 - RNA, 24 nt, Human
caccguguuagccaggauggucuc

SEQ ID NO: 1057243 - RNA, 22 nt, Human
cacgccauucuccugccucagc

SEQ ID NO: 1057244 - RNA, 21 nt, Human
cacugcaaccucugccuccug

SEQ ID NO: 1057245 - RNA, 23 nt, Human
cacugcaaccucugccuccuggg

SEQ ID NO: 1057246 - RNA, 19 nt, Human
cacugcaucacaacuggaa

SEQ ID NO: 1057247 - RNA, 21 nt, Human
cacugcaucacaacuggaacc

SEQ ID NO: 1057248 - RNA, 21 nt, Human
caggcgccugccaccacgccc

SEQ ID NO: 1057249 - RNA, 23 nt, Human
caggcgccugccaccacgcccgg

SEQ ID NO: 1057250 - RNA, 19 nt, Human
ccaaagcgcugggauuaca

SEQ ID NO: 1057251 - RNA, 23 nt, Human
ccaaagcgcugggauuacaggca

SEQ ID NO: 1057252 - RNA, 24 nt, Human
ccaaagcgcugggauuacaggcau

SEQ ID NO: 1057253 - RNA, 20 nt, Human
ccaccacgcccggcuaauuu

SEQ ID NO: 1057254 - RNA, 19 nt, Human
ccaccgcguccggcccuca

SEQ ID NO: 1057255 - RNA, 24 nt, Human
cccaaagcgcugggauuacaggca

SEQ ID NO: 1057256 - RNA, 18 nt, Human
cccccagcaucgcccgaa

SEQ ID NO: 1057257 - RNA, 26 nt, Human
cccccagcaucgcccgaaggaaucgc

SEQ ID NO: 1057258 - RNA, 23 nt, Human
cccgaguagcugggacuacaggc

SEQ ID NO: 1057259 - RNA, 24 nt, Human
cccgaguagcugggacuacaggcg

SEQ ID NO: 1057260 - RNA, 27 nt, Human
ccucgcccgcggcuccggaagcggcug

SEQ ID NO: 1057261 - RNA, 19 nt, Human
ccucugccuccuggguuca

SEQ ID NO: 1057262 - RNA, 23 nt, Human
ccugccucagccucccgaguagc

SEQ ID NO: 1057263 - RNA, 18 nt, Human
cgcucgaaagcugcacag

SEQ ID NO: 1057264 - RNA, 24 nt, Human
cgcucugucgcccaggcuggagug

SEQ ID NO: 1057265 - RNA, 24 nt, Human
cgggucagagcccagagcaaaccu

SEQ ID NO: 1057266 - RNA, 22 nt, Human
cggguuucaccguguuagccag

SEQ ID NO: 1057267 - RNA, 23 nt, Human
cggguuucaccguguuagccagg

SEQ ID NO: 1057268 - RNA, 21 nt, Human
cgugauccguccaccucagcc

SEQ ID NO: 1057269 - RNA, 24 nt, Human
cgugauccguccaccucagccucc

SEQ ID NO: 1057270 - RNA, 24 nt, Human
cucacugcaaccucugccuccugg

SEQ ID NO: 1057271 - RNA, 24 nt, Human
cucagccucccgaguagcugggac

SEQ ID NO: 1057272 - RNA, 22 nt, Human
cuccugaccucgugauccgucc

SEQ ID NO: 1057273 - RNA, 21 nt, Human
cuccuggguucacgccauucu

SEQ ID NO: 1057274 - RNA, 24 nt, Human
cucgcucugucgcccaggcuggag

SEQ ID NO: 1057275 - RNA, 23 nt, Human
cucucacuggauccagauuuuau

SEQ ID NO: 1057276 - RNA, 23 nt, Human
cucugucgcccaggcuggagugc

SEQ ID NO: 1057277 - RNA, 19 nt, Human
cugcaaccucugccuccug

SEQ ID NO: 1057278 - RNA, 24 nt, Human
cugcaaccucugccuccuggguuc

SEQ ID NO: 1057279 - RNA, 23 nt, Human
cugccucagccucccgaguagcu

SEQ ID NO: 1057280 - RNA, 24 nt, Human
cuggagugcaguagcaugaucucg

SEQ ID NO: 1057281 - RNA, 22 nt, Human
gaccucgugauccguccaccuc

SEQ ID NO: 1057282 - RNA, 24 nt, Human
gaccucgugauccguccaccucag

SEQ ID NO: 1057283 - RNA, 26 nt, Human
gaguagcugggacuacaggcgccugc

SEQ ID NO: 1057284 - RNA, 18 nt, Human
gauuacaggcaugagcca

SEQ ID NO: 1057285 - RNA, 22 nt, Human
gauuacaggcaugagccaccgc

SEQ ID NO: 1057286 - RNA, 22 nt, Human
gauuacaggcaugagccaccgc

SEQ ID NO: 1057287 - RNA, 19 nt, Human
gcccaggcuggagugcagu

SEQ ID NO: 1057288 - RNA, 22 nt, Human
gcccgcggcuccggaagcggcu

SEQ ID NO: 1057289 - RNA, 23 nt, Human
gcccggcuaauuuuuuguauuuu

SEQ ID NO: 1057290 - RNA, 23 nt, Human
gcucagacuuuccuuuucuuguu

SEQ ID NO: 1057291 - RNA, 22 nt, Human
ggauuacaggcaugagccaccg

SEQ ID NO: 1057292 - RNA, 20 nt, Human
ggcgggucagagcccagagc

SEQ ID NO: 1057293 - RNA, 21 nt, Human
ggguuucaccguguuagccag

SEQ ID NO: 1057294 - RNA, 22 nt, Human
ggucucccaccuguagucccag

SEQ ID NO: 1057295 - RNA, 20 nt, Human
ggucucgaucuccugaccuc

SEQ ID NO: 1057296 - RNA, 24 nt, Human
gucucgcucugucgcccaggcugg

SEQ ID NO: 1057297 - RNA, 24 nt, Human
gugauccguccaccucagccuccc

SEQ ID NO: 1057298 - RNA, 22 nt, Human
uaauuuuuuguauuuuuaguag

SEQ ID NO: 1057299 - RNA, 25 nt, Human
uaauuuuuuguauuuuuaguaggga

SEQ ID NO: 1057300 - RNA, 23 nt, Human
uacaggcaugagccaccgcgucc

SEQ ID NO: 1057301 - RNA, 23 nt, Human
uacaggcgccugccaccacgccc

SEQ ID NO: 1057302 - RNA, 21 nt, Human
uaguagggaucggguuucacc

SEQ ID NO: 1057303 - RNA, 24 nt, Human
uaguagggaucggguuucaccgug

SEQ ID NO: 1057304 - RNA, 24 nt, Human
ucaccguguuagccaggauggucu

SEQ ID NO: 1057305 - RNA, 24 nt, Human
ucacugcaaccucugccuccuggg

SEQ ID NO: 1057306 - RNA, 25 nt, Human
ucacugcaaccucugccuccugggu

SEQ ID NO: 1057307 - RNA, 23 nt, Human
ucagccucccgaguagcugggac

SEQ ID NO: 1057308 - RNA, 24 nt, Human
ucccaaagcgcugggauuacaggc

SEQ ID NO: 1057309 - RNA, 24 nt, Human
ucccgaguagcugggacuacaggc

SEQ ID NO: 1057310 - RNA, 18 nt, Human
ucccuccuccagguucag

SEQ ID NO: 1057311 - RNA, 18 nt, Human
uccggaagcggcugcggc

SEQ ID NO: 1057312 - RNA, 21 nt, Human
uccguccaccucagccuccca

SEQ ID NO: 1057313 - RNA, 21 nt, Human
uccuggguucacgccauucuc

SEQ ID NO: 1057314 - RNA, 24 nt, Human
uccuggguucacgccauucuccug

SEQ ID NO: 1057315 - RNA, 24 nt, Human
ucgcccaggcuggagugcaguagc

SEQ ID NO: 1057316 - RNA, 24 nt, Human
ucgcucugucgcccaggcuggagu

SEQ ID NO: 1057317 - RNA, 24 nt, Human
ucggguuucaccguguuagccagg

SEQ ID NO: 1057318 - RNA, 24 nt, Human
ucuccugccucagccucccgagua

SEQ ID NO: 1057319 - RNA, 19 nt, Human
ucucgcucugucgcccagg

SEQ ID NO: 1057320 - RNA, 22 nt, Human
ucucgcucugucgcccaggcug

SEQ ID NO: 1057321 - RNA, 23 nt, Human
ucucgcucugucgcccaggcugg

SEQ ID NO: 1057322 - RNA, 24 nt, Human
ucucgcucugucgcccaggcugga

SEQ ID NO: 1057323 - RNA, 26 nt, Human
ucucgcucugucgcccaggcuggagu

SEQ ID NO: 1057324 - RNA, 24 nt, Human
ucugucgcccaggcuggagugcag

SEQ ID NO: 1057325 - RNA, 19 nt, Human
ucuguggaggucucccacc

SEQ ID NO: 1057326 - RNA, 19 nt, Human
ugaauuagaauucaaauca

SEQ ID NO: 1057327 - RNA, 24 nt, Human
ugauccguccaccucagccuccca

SEQ ID NO: 1057328 - RNA, 22 nt, Human
ugcaguagcaugaucucggcuc

SEQ ID NO: 1057329 - RNA, 24 nt, Human
ugccucagccucccgaguagcugg

SEQ ID NO: 1057330 - RNA, 19 nt, Human
ugccuccuggguucacgcc

SEQ ID NO: 1057331 - RNA, 24 nt, Human
ugcucagacuuuccuuuucuuguu

SEQ ID NO: 1057332 - RNA, 24 nt, Human
uggaggucucccaccuguaguccc

SEQ ID NO: 1057333 - RNA, 28 nt, Human
uggaggucucccaccuguagucccaggg

SEQ ID NO: 1057334 - RNA, 19 nt, Human
uggagugcaguagcaugau

SEQ ID NO: 1057335 - RNA, 24 nt, Human
uggagugcaguagcaugaucucgg

SEQ ID NO: 1057336 - RNA, 20 nt, Human
uggcaagggcugaugcugua

SEQ ID NO: 1057337 - RNA, 21 nt, Human
ugggacuacaggcgccugcca

SEQ ID NO: 1057338 - RNA, 22 nt, Human
ugggacuacaggcgccugccac

SEQ ID NO: 1057339 - RNA, 24 nt, Human
ugggacuacaggcgccugccacca

SEQ ID NO: 1057340 - RNA, 18 nt, Human
ugggauuacaggcaugag

SEQ ID NO: 1057341 - RNA, 19 nt, Human
ugggauuacaggcaugagc

SEQ ID NO: 1057342 - RNA, 21 nt, Human
ugggauuacaggcaugagcca

SEQ ID NO: 1057343 - RNA, 22 nt, Human
ugggauuacaggcaugagccac

SEQ ID NO: 1057344 - RNA, 23 nt, Human
ugggauuacaggcaugagccacc

SEQ ID NO: 1057345 - RNA, 24 nt, Human
ugggauuacaggcaugagccaccg

SEQ ID NO: 1057346 - RNA, 24 nt, Human
ugggauuacaggcaugagccaccg

SEQ ID NO: 1057347 - RNA, 20 nt, Human
uggguucacgccauucuccu

SEQ ID NO: 1057348 - RNA, 25 nt, Human
uguguagacacccacugcaucacaa

SEQ ID NO: 1057349 - RNA, 21 nt, Human
uuagaagacagcuugcuggaa

SEQ ID NO: 1057350 - RNA, 18 nt, Human
uuaguagggaucggguuu

SEQ ID NO: 1057351 - RNA, 22 nt, Human
uuaguagggaucggguuucacc

SEQ ID NO: 1057352 - RNA, 24 nt, Human
uuaguagggaucggguuucaccgu

SEQ ID NO: 1057353 - RNA, 18 nt, Human
uuauuuauuuauuuauuu

SEQ ID NO: 1057354 - RNA, 19 nt, Human
uuauuuauuuauuuauuua

SEQ ID NO: 1057355 - RNA, 19 nt, Human
uuauuuauuuauuuauuua

SEQ ID NO: 1057356 - RNA, 25 nt, Human
uuauuuauuuauuuauuuauuuauu

SEQ ID NO: 1057357 - RNA, 19 nt, Human
uuucaccguguuagccagg

SEQ ID NO: 1057358 - RNA, 21 nt, Human
uuucaugaauuauucccaugg

SEQ ID NO: 1057359 - RNA, 21 nt, Human
uuuguauuuuuaguagggauc

SEQ ID NO: 1057360 - RNA, 23 nt, Human
uuuguuuguagauuggauuuuca

SEQ ID NO: 1057361 - RNA, 23 nt, Human
uuuguuuuguuucuuuuuucaug

SEQ ID NO: 1057362 - RNA, 19 nt, Human
uuuuaagaacgugagaaau

SEQ ID NO: 1057363 - RNA, 21 nt, Human
uuuuaagaacgugagaaauga

SEQ ID NO: 1057364 - RNA, 20 nt, Human
uuuucaugaauuauucccau

SEQ ID NO: 1057365 - RNA, 24 nt, Human
uuuuuaguagggaucggguuucac

SEQ ID NO: 1057366 - RNA, 21 nt, Human
uuuuuguauuuuuaguaggga

SEQ ID NO: 1057367 - RNA, 18 nt, Human
uuuuuuguauuuuuagua

SEQ ID NO: 1057368 - RNA, 25 nt, Human
caaguaacucuuuaacagcuauaau

SEQ ID NO: 1057369 - RNA, 18 nt, Human
cagggcaaagugaccuuc

SEQ ID NO: 1057370 - RNA, 22 nt, Human
gaccuucagcuuuaugggguuc

SEQ ID NO: 1057371 - RNA, 22 nt, Human
ggcaaagugaccuucagcuuua

SEQ ID NO: 1057372 - RNA, 18 nt, Human
aaacagacagaaaauuac

SEQ ID NO: 1057373 - RNA, 24 nt, Human
aaaccauuuuuacccuggagcuaa

SEQ ID NO: 1057374 - RNA, 24 nt, Human
acaauacuggcagccuaaaaaugc

SEQ ID NO: 1057375 - RNA, 21 nt, Human
accaguauuguauuugacuuu

SEQ ID NO: 1057376 - RNA, 21 nt, Human
acgggcagcacgggaacggaa

SEQ ID NO: 1057377 - RNA, 18 nt, Human
agacccucugucucugag

SEQ ID NO: 1057378 - RNA, 20 nt, Human
agugaugaaacagacagaaa

SEQ ID NO: 1057379 - RNA, 24 nt, Human
caagaaaccauauccccaacagcg

SEQ ID NO: 1057380 - RNA, 20 nt, Human
cagcggcagagcaucgggag

SEQ ID NO: 1057381 - RNA, 19 nt, Human
cccccacucaguacccgga

SEQ ID NO: 1057382 - RNA, 22 nt, Human
ccucgagucacuaaaagcaguu

SEQ ID NO: 1057383 - RNA, 22 nt, Human
ccucggucggggagcgcgggac

SEQ ID NO: 1057384 - RNA, 21 nt, Human
cggcagagcaucgggaggaga

SEQ ID NO: 1057385 - RNA, 18 nt, Human
cgggaggagacccucugu

SEQ ID NO: 1057386 - RNA, 22 nt, Human
cgggaggagacccucugucucu

SEQ ID NO: 1057387 - RNA, 22 nt, Human
cuaaaaaugcuucaagaaacca

SEQ ID NO: 1057388 - RNA, 22 nt, Human
cugaggcuucggugcacuucug

SEQ ID NO: 1057389 - RNA, 23 nt, Human
cuuugcgcaggcgcggcgccccc

SEQ ID NO: 1057390 - RNA, 18 nt, Human
gaagacgccggagacccg

SEQ ID NO: 1057391 - RNA, 24 nt, Human
gaccaguauuguauuugacuuuuu

SEQ ID NO: 1057392 - RNA, 28 nt, Human
uaaaaaaccauuuuuacccuggagcuaa

SEQ ID NO: 1057393 - RNA, 22 nt, Human
uaaaaaugcuucaagaaaccau

SEQ ID NO: 1057394 - RNA, 23 nt, Human
ucucugaggcuucggugcacuuc

SEQ ID NO: 1057395 - RNA, 26 nt, Human
ugaggagaaaguauuuagggagugau

SEQ ID NO: 1057396 - RNA, 22 nt, Human
ugaugaaacagacagaaaauua

SEQ ID NO: 1057397 - RNA, 19 nt, Human
ugccuggccucgagucacu

SEQ ID NO: 1057398 - RNA, 20 nt, Human
uggccaugacacgggcagca

SEQ ID NO: 1057399 - RNA, 23 nt, Human
ugguaaggaccaguauuguauuu

SEQ ID NO: 1057400 - RNA, 23 nt, Human
uucugcucagacgguggcgggag

SEQ ID NO: 1057401 - RNA, 23 nt, Human
agagcccgcggaccccucugccc

SEQ ID NO: 1057402 - RNA, 24 nt, Human
aggggccgggagaggcucgcgagg

SEQ ID NO: 1057403 - RNA, 23 nt, Human
aucucggcgccgacucuccucca

SEQ ID NO: 1057404 - RNA, 19 nt, Human
cagagcccgcggaccccuc

SEQ ID NO: 1057405 - RNA, 23 nt, Human
cagagcccgcggaccccucugcc

SEQ ID NO: 1057406 - RNA, 21 nt, Human
cagcagccuggagaccuuagc

SEQ ID NO: 1057407 - RNA, 24 nt, Human
ccagagcccgcggaccccucugcc

SEQ ID NO: 1057408 - RNA, 22 nt, Human
ccccuuguccacauggugucug

SEQ ID NO: 1057409 - RNA, 22 nt, Human
cccgcggaccccucugcccgga

SEQ ID NO: 1057410 - RNA, 22 nt, Human
cccucacuucaucagcagccug

SEQ ID NO: 1057411 - RNA, 23 nt, Human
ccuccagagcccgcggaccccuc

SEQ ID NO: 1057412 - RNA, 22 nt, Human
ccucugauuucucuccuccccc

SEQ ID NO: 1057413 - RNA, 21 nt, Human
ccuuacucucgccucucccuc

SEQ ID NO: 1057414 - RNA, 21 nt, Human
cgacucuccuccacuuucccu

SEQ ID NO: 1057415 - RNA, 19 nt, Human
cguccagcaccuccagagc

SEQ ID NO: 1057416 - RNA, 20 nt, Human
cguccagcaccuccagagcc

SEQ ID NO: 1057417 - RNA, 23 nt, Human
cuccagagcccgcggaccccucu

SEQ ID NO: 1057418 - RNA, 22 nt, Human
gccuucgcgcgccaccucugau

SEQ ID NO: 1057419 - RNA, 21 nt, Human
gggcgcucagccuucgcgcgc

SEQ ID NO: 1057420 - RNA, 23 nt, Human
uccaguaagcauuuaaaacacag

SEQ ID NO: 1057421 - RNA, 20 nt, Human
uccccuuguccacauggugu

SEQ ID NO: 1057422 - RNA, 18 nt, Human
ucgcgcgccaccucugau

SEQ ID NO: 1057423 - RNA, 20 nt, Human
uuucucuccuccccuugucc

SEQ ID NO: 1057424 - RNA, 21 nt, Human
ccccugcgcucccaaucuccg

SEQ ID NO: 1057425 - RNA, 18 nt, Human
cucaguggguuuccagga

SEQ ID NO: 1057426 - RNA, 22 nt, Human
cugccccugcgcucccaaucuc

SEQ ID NO: 1057427 - RNA, 19 nt, Human
gccccugcgcucccaaucu

SEQ ID NO: 1057428 - RNA, 20 nt, Human
ugccccugcgcucccaaucu

SEQ ID NO: 1057429 - RNA, 18 nt, Human
uggguuuccaggaggagc

SEQ ID NO: 1057430 - RNA, 20 nt, Human
uguucucaguggguuuccag

SEQ ID NO: 1057431 - RNA, 20 nt, Human
uuuuucagauguucucagug

SEQ ID NO: 1057432 - RNA, 18 nt, Human
aaaacagagauacagagc

SEQ ID NO: 1057433 - RNA, 19 nt, Human
aaacagagauacagagcac

SEQ ID NO: 1057434 - RNA, 21 nt, Human
aagaaaaacagagauacagag

SEQ ID NO: 1057435 - RNA, 22 nt, Human
aaggcgcggccguaggaccauu

SEQ ID NO: 1057436 - RNA, 23 nt, Human
agaagacaggaacacaaaggcgc

SEQ ID NO: 1057437 - RNA, 22 nt, Human
agagcacagcaaacacgugccg

SEQ ID NO: 1057438 - RNA, 19 nt, Human
agagcacguuuucaccaag

SEQ ID NO: 1057439 - RNA, 19 nt, Human
agagggcgcaccugguguc

SEQ ID NO: 1057440 - RNA, 21 nt, Human
agcagcacaccacaaaucagc

SEQ ID NO: 1057441 - RNA, 21 nt, Human
agcucagggcaaugugaccgg

SEQ ID NO: 1057442 - RNA, 18 nt, Human
aggaacacaaaggcgcgg

SEQ ID NO: 1057443 - RNA, 19 nt, Human
augggccacagaaagacac

SEQ ID NO: 1057444 - RNA, 20 nt, Human
cagagcacagcaaacacgug

SEQ ID NO: 1057445 - RNA, 19 nt, Human
caugcaaaucaucguauga

SEQ ID NO: 1057446 - RNA, 24 nt, Human
caugggccacagaaagacacauuu

SEQ ID NO: 1057447 - RNA, 19 nt, Human
cauucaggaugcaguucug

SEQ ID NO: 1057448 - RNA, 20 nt, Human
cauuuacauggaaauggagc

SEQ ID NO: 1057449 - RNA, 19 nt, Human
ccaaaggucauagcacaaa

SEQ ID NO: 1057450 - RNA, 20 nt, Human
ccagggguggucgcaguauc

SEQ ID NO: 1057451 - RNA, 21 nt, Human
ccccagagggcgcaccuggug

SEQ ID NO: 1057452 - RNA, 19 nt, Human
cggggacgcacggcggaga

SEQ ID NO: 1057453 - RNA, 20 nt, Human
cuacgccaccgucugccagg

SEQ ID NO: 1057454 - RNA, 21 nt, Human
cucacccaucccaauuucggg

SEQ ID NO: 1057455 - RNA, 18 nt, Human
cuggcuggaguaaaaacg

SEQ ID NO: 1057456 - RNA, 19 nt, Human
cuguacacacaucuuuuca

SEQ ID NO: 1057457 - RNA, 24 nt, Human
cuuccaucuaauggcacugguuua

SEQ ID NO: 1057458 - RNA, 18 nt, Human
gaggaugcacagcauuga

SEQ ID NO: 1057459 - RNA, 18 nt, Human
gcauugaggagaugucag

SEQ ID NO: 1057460 - RNA, 21 nt, Human
ggaccaugggccacagaaaga

SEQ ID NO: 1057461 - RNA, 23 nt, Human
ggcagaggggcaggcaggcuggg

SEQ ID NO: 1057462 - RNA, 22 nt, Human
ggcaggcaggcugggaaauguc

SEQ ID NO: 1057463 - RNA, 22 nt, Human
gggcaaugugaccggggugggc

SEQ ID NO: 1057464 - RNA, 21 nt, Human
ggggugggcagaggggcaggc

SEQ ID NO: 1057465 - RNA, 21 nt, Human
uaaaugucaucacagcggacc

SEQ ID NO: 1057466 - RNA, 20 nt, Human
uaagacuugccacuuggaau

SEQ ID NO: 1057467 - RNA, 23 nt, Human
uagaaccuggcaauguuaaauuu

SEQ ID NO: 1057468 - RNA, 24 nt, Human
uagaaccuggcaauguuaaauuug

SEQ ID NO: 1057469 - RNA, 22 nt, Human
uagcacaaaugaggucuaaaug

SEQ ID NO: 1057470 - RNA, 23 nt, Human
ucuacgccaccgucugccagggg

SEQ ID NO: 1057471 - RNA, 24 nt, Human
ucuguggacagcagcacaccacaa

SEQ ID NO: 1057472 - RNA, 23 nt, Human
ugaaauagacccgaucaugcaaa

SEQ ID NO: 1057473 - RNA, 20 nt, Human
ugaccggggugggcagaggg

SEQ ID NO: 1057474 - RNA, 23 nt, Human
ugagccccagagggcgcaccugg

SEQ ID NO: 1057475 - RNA, 22 nt, Human
ugcagugaaugggaaaucaacu

SEQ ID NO: 1057476 - RNA, 22 nt, Human
uggaaagaagcucagggcaaug

SEQ ID NO: 1057477 - RNA, 20 nt, Human
uggcuggaguaaaaacgggu

SEQ ID NO: 1057478 - RNA, 21 nt, Human
ugggcagaggggcaggcaggc

SEQ ID NO: 1057479 - RNA, 21 nt, Human
ugggggagauuaaauaacagg

SEQ ID NO: 1057480 - RNA, 20 nt, Human
uggucgcaguauccucugcc

SEQ ID NO: 1057481 - RNA, 18 nt, Human
ugguggagagaagacagg

SEQ ID NO: 1057482 - RNA, 24 nt, Human
ugucacuagcacagauauuaaaau

SEQ ID NO: 1057483 - RNA, 21 nt, Human
uuagaaacaguauuuccucau

SEQ ID NO: 1057484 - RNA, 23 nt, Human
uucaaguuauguugaccuuccag

SEQ ID NO: 1057485 - RNA, 23 nt, Human
aaaacaaaaauggaguuucuaga

SEQ ID NO: 1057486 - RNA, 21 nt, Human
aaacaaaaauggaguuucuag

SEQ ID NO: 1057487 - RNA, 18 nt, Human
aaccagugauggagcgau

SEQ ID NO: 1057488 - RNA, 25 nt, Human
aacggagcaggccuuguccacagga

SEQ ID NO: 1057489 - RNA, 25 nt, Human
aaggaggcuccagaugccaccuucu

SEQ ID NO: 1057490 - RNA, 25 nt, Human
acccggagcugcccugcagcauucc

SEQ ID NO: 1057491 - RNA, 26 nt, Human
accucacuccugugacugccucccca

SEQ ID NO: 1057492 - RNA, 27 nt, Human
acuggguggggcacacacuggguaccu

SEQ ID NO: 1057493 - RNA, 25 nt, Human
agaaaccaacccaacaguuaccaag

SEQ ID NO: 1057494 - RNA, 21 nt, Human
agagagccagugaacagaaac

SEQ ID NO: 1057495 - RNA, 22 nt, Human
agagccagugaacagaaaccaa

SEQ ID NO: 1057496 - RNA, 19 nt, Human
agccagugaacagaaacca

SEQ ID NO: 1057497 - RNA, 21 nt, Human
agcgacugcuuccaaaaagaa

SEQ ID NO: 1057498 - RNA, 26 nt, Human
agcucauugccucccgcaugaacucc

SEQ ID NO: 1057499 - RNA, 18 nt, Human
aggccucagguugcucag

SEQ ID NO: 1057500 - RNA, 21 nt, Human
aggcuccuaacccagcaaccu

SEQ ID NO: 1057501 - RNA, 19 nt, Human
agggcuccuggucccuacu

SEQ ID NO: 1057502 - RNA, 21 nt, Human
agggcuccuggucccuacugc

SEQ ID NO: 1057503 - RNA, 22 nt, Human
augaacuccucuagguuuggaa

SEQ ID NO: 1057504 - RNA, 26 nt, Human
auggaguuucuagaguucaauugugc

SEQ ID NO: 1057505 - RNA, 19 nt, Human
caaccagaauuuuacccaa

SEQ ID NO: 1057506 - RNA, 21 nt, Human
cacuggguggggcacacacug

SEQ ID NO: 1057507 - RNA, 22 nt, Human
cacuggguggggcacacacugg

SEQ ID NO: 1057508 - RNA, 24 nt, Human
cagcaaccagaauuuuacccaagu

SEQ ID NO: 1057509 - RNA, 19 nt, Human
cagcagcucauugccuccc

SEQ ID NO: 1057510 - RNA, 20 nt, Human
cagcccgcucaccuuuccca

SEQ ID NO: 1057511 - RNA, 23 nt, Human
cagugaacagaaaccaacccaac

SEQ ID NO: 1057512 - RNA, 21 nt, Human
cauucccgcuccaggguggag

SEQ ID NO: 1057513 - RNA, 18 nt, Human
ccagaauuuuacccaagu

SEQ ID NO: 1057514 - RNA, 19 nt, Human
ccagcgucuagcccgcguc

SEQ ID NO: 1057515 - RNA, 22 nt, Human
ccaggguggagcgacccucccc

SEQ ID NO: 1057516 - RNA, 20 nt, Human
cccaugcagcagccccugcu

SEQ ID NO: 1057517 - RNA, 25 nt, Human
cccuagaacacaaaucuagaaaaug

SEQ ID NO: 1057518 - RNA, 24 nt, Human
ccucacuccugugacugccucccc

SEQ ID NO: 1057519 - RNA, 19 nt, Human
ccuccucccucccggcccc

SEQ ID NO: 1057520 - RNA, 24 nt, Human
ccucgacuacaccuggggucucuc

SEQ ID NO: 1057521 - RNA, 22 nt, Human
ccucuggaaaaacaaaaaugga

SEQ ID NO: 1057522 - RNA, 20 nt, Human
ccuggucccuacugcacaaa

SEQ ID NO: 1057523 - RNA, 19 nt, Human
ccugugacugccuccccaa

SEQ ID NO: 1057524 - RNA, 22 nt, Human
ccugugacugccuccccaaaga

SEQ ID NO: 1057525 - RNA, 19 nt, Human
ccuugaacggagcaggccu

SEQ ID NO: 1057526 - RNA, 21 nt, Human
cgacccggagcugcccugcag

SEQ ID NO: 1057527 - RNA, 23 nt, Human
cgccuggcgacccggagcugccc

SEQ ID NO: 1057528 - RNA, 23 nt, Human
cgucccgcccgcccaggggccca

SEQ ID NO: 1057529 - RNA, 24 nt, Human
cguugccuggaaaccgccgccugg

SEQ ID NO: 1057530 - RNA, 19 nt, Human
cuacaccuggggucucucc

SEQ ID NO: 1057531 - RNA, 22 nt, Human
cuagaaaaugcagcaaccagaa

SEQ ID NO: 1057532 - RNA, 21 nt, Human
cuccagcagcucauugccucc

SEQ ID NO: 1057533 - RNA, 23 nt, Human
cuccaggguggagcgacccuccc

SEQ ID NO: 1057534 - RNA, 18 nt, Human
cuccucccucccggcccc

SEQ ID NO: 1057535 - RNA, 18 nt, Human
cugcagcauucccgcucc

SEQ ID NO: 1057536 - RNA, 20 nt, Human
gacccuccccuccucccucc

SEQ ID NO: 1057537 - RNA, 21 nt, Human
gagaaggggaaaggaggcucc

SEQ ID NO: 1057538 - RNA, 20 nt, Human
gccagcgucuagcccgcguc

SEQ ID NO: 1057539 - RNA, 22 nt, Human
gcccccgccuuggccgcggucc

SEQ ID NO: 1057540 - RNA, 18 nt, Human
ggaaaaacaaaaauggag

SEQ ID NO: 1057541 - RNA, 20 nt, Human
ggaaaagcaacugcaccuca

SEQ ID NO: 1057542 - RNA, 19 nt, Human
ggagcaggccuuguccaca

SEQ ID NO: 1057543 - RNA, 19 nt, Human
ggggaaaggaggcuccaga

SEQ ID NO: 1057544 - RNA, 20 nt, Human
gucaggguuguuuguguuca

SEQ ID NO: 1057545 - RNA, 18 nt, Human
uaccaaggggaaacaaag

SEQ ID NO: 1057546 - RNA, 18 nt, Human
uagaaaaugcagcaacca

SEQ ID NO: 1057547 - RNA, 23 nt, Human
uagagaauccuuuuuccauauuc

SEQ ID NO: 1057548 - RNA, 26 nt, Human
uagaugauaugacuugcccccugaag

SEQ ID NO: 1057549 - RNA, 21 nt, Human
uaggcgucaugagaaggggaa

SEQ ID NO: 1057550 - RNA, 20 nt, Human
ucccaugcagcagccccugc

SEQ ID NO: 1057551 - RNA, 19 nt, Human
ucccggccccucgacuaca

SEQ ID NO: 1057552 - RNA, 21 nt, Human
uccgucccgcccgcccagggg

SEQ ID NO: 1057553 - RNA, 20 nt, Human
ucuggaaaaacaaaaaugga

SEQ ID NO: 1057554 - RNA, 21 nt, Human
ugacugccuccccaaagaauc

SEQ ID NO: 1057555 - RNA, 19 nt, Human
ugagaaggggaaaggaggc

SEQ ID NO: 1057556 - RNA, 20 nt, Human
ugaggaaaugucugcucaug

SEQ ID NO: 1057557 - RNA, 21 nt, Human
ugaggaaaugucugcucaugu

SEQ ID NO: 1057558 - RNA, 21 nt, Human
ugcccugugggccacggggau

SEQ ID NO: 1057559 - RNA, 19 nt, Human
uuacuagggcuccuggucc

SEQ ID NO: 1057560 - RNA, 26 nt, Human
uucaaaacaauaaaaccagugaugga

SEQ ID NO: 1057561 - RNA, 18 nt, Human
uuccaagggauccauuca

SEQ ID NO: 1057562 - RNA, 21 nt, Human
aaaacauugcugaaaauccac

SEQ ID NO: 1057563 - RNA, 20 nt, Human
aaacgccucucugaauccuu

SEQ ID NO: 1057564 - RNA, 20 nt, Human
aaagccaaggcucagaggca

SEQ ID NO: 1057565 - RNA, 18 nt, Human
aacaaugcguccgucccc

SEQ ID NO: 1057566 - RNA, 23 nt, Human
aacagacuuuucgaagggcuggc

SEQ ID NO: 1057567 - RNA, 21 nt, Human
aagaacccccaguugcuuuuc

SEQ ID NO: 1057568 - RNA, 22 nt, Human
aagaugugaccaucuuacuuca

SEQ ID NO: 1057569 - RNA, 19 nt, Human
aagggcuggcguuacaaac

SEQ ID NO: 1057570 - RNA, 19 nt, Human
acagaaagccaaggcucag

SEQ ID NO: 1057571 - RNA, 21 nt, Human
aggcaguaagucauggguccg

SEQ ID NO: 1057572 - RNA, 21 nt, Human
agggcuggcguuacaaacggc

SEQ ID NO: 1057573 - RNA, 21 nt, Human
auacaacuuaaguaugaacaa

SEQ ID NO: 1057574 - RNA, 26 nt, Human
auaugcaauaaaaauaacaaugcguc

SEQ ID NO: 1057575 - RNA, 23 nt, Human
caaauguacacauauacagcuua

SEQ ID NO: 1057576 - RNA, 23 nt, Human
caagcccaguaaguaagaacccc

SEQ ID NO: 1057577 - RNA, 24 nt, Human
cacaagcccaguaaguaagaaccc

SEQ ID NO: 1057578 - RNA, 21 nt, Human
cacagaaagccaaggcucaga

SEQ ID NO: 1057579 - RNA, 19 nt, Human
cacagcagcagugaaauga

SEQ ID NO: 1057580 - RNA, 21 nt, Human
cacagcagcagugaaaugaaa

SEQ ID NO: 1057581 - RNA, 25 nt, Human
cacauacauguauacaaauguacac

SEQ ID NO: 1057582 - RNA, 21 nt, Human
cacuaccgauguccacaaggg

SEQ ID NO: 1057583 - RNA, 18 nt, Human
cagaggcaguaagucaug

SEQ ID NO: 1057584 - RNA, 19 nt, Human
cagccaccagggugccacc

SEQ ID NO: 1057585 - RNA, 19 nt, Human
caggugcauggaaaggcag

SEQ ID NO: 1057586 - RNA, 24 nt, Human
caguaagucauggguccgaggccu

SEQ ID NO: 1057587 - RNA, 19 nt, Human
caucucuccaucagugggc

SEQ ID NO: 1057588 - RNA, 20 nt, Human
cauuaucccaguggcagaga

SEQ ID NO: 1057589 - RNA, 18 nt, Human
ccacaagggauccucuuc

SEQ ID NO: 1057590 - RNA, 24 nt, Human
ccaccagggugccacccacaagcc

SEQ ID NO: 1057591 - RNA, 25 nt, Human
ccacccacaagcccaguaaguaaga

SEQ ID NO: 1057592 - RNA, 26 nt, Human
ccacccacaagcccaguaaguaagaa

SEQ ID NO: 1057593 - RNA, 27 nt, Human
ccacccacaagcccaguaaguaagaac

SEQ ID NO: 1057594 - RNA, 23 nt, Human
ccaguugcuuuucugcaaacugu

SEQ ID NO: 1057595 - RNA, 24 nt, Human
cccacaagcccaguaaguaagaac

SEQ ID NO: 1057596 - RNA, 22 nt, Human
cccauaaccaugaccaucacuu

SEQ ID NO: 1057597 - RNA, 25 nt, Human
cccauaaccaugaccaucacuuauu

SEQ ID NO: 1057598 - RNA, 21 nt, Human
cucaagaaauaaaaaagugac

SEQ ID NO: 1057599 - RNA, 24 nt, Human
cuuucuucuuuaaguguuucuagg

SEQ ID NO: 1057600 - RNA, 20 nt, Human
guagaacaugucuugacuga

SEQ ID NO: 1057601 - RNA, 27 nt, Human
uaagaaaauagcaucaaaagcagauuu

SEQ ID NO: 1057602 - RNA, 22 nt, Human
uaaggaaaguaauaguaauuuc

SEQ ID NO: 1057603 - RNA, 19 nt, Human
uaaguacgaaugacucaag

SEQ ID NO: 1057604 - RNA, 22 nt, Human
uacaaaaaggaaagagauacaa

SEQ ID NO: 1057605 - RNA, 22 nt, Human
uacacagccaccagggugccac

SEQ ID NO: 1057606 - RNA, 21 nt, Human
uacaguaaucuagugguggaa

SEQ ID NO: 1057607 - RNA, 24 nt, Human
uacauuuacacauacauguauaca

SEQ ID NO: 1057608 - RNA, 19 nt, Human
uaggugccaugaguuuuag

SEQ ID NO: 1057609 - RNA, 21 nt, Human
uauaaaauauaaacgccucuc

SEQ ID NO: 1057610 - RNA, 24 nt, Human
uauaaaauauaaacgccucucuga

SEQ ID NO: 1057611 - RNA, 24 nt, Human
uauuaaaugaguggcagcucucaa

SEQ ID NO: 1057612 - RNA, 20 nt, Human
ucagguucacuuggaacacc

SEQ ID NO: 1057613 - RNA, 22 nt, Human
uccccacuaccgauguccacaa

SEQ ID NO: 1057614 - RNA, 20 nt, Human
ugacuucaaaacuugcaggu

SEQ ID NO: 1057615 - RNA, 23 nt, Human
ugauucuaggucagccaaccccc

SEQ ID NO: 1057616 - RNA, 22 nt, Human
ugccaugaguuuuagaaauugg

SEQ ID NO: 1057617 - RNA, 18 nt, Human
ugcuaaggacacagcugu

SEQ ID NO: 1057618 - RNA, 24 nt, Human
uggcagagauacacagaaagccaa

SEQ ID NO: 1057619 - RNA, 18 nt, Human
uguauacaaauguacaca

SEQ ID NO: 1057620 - RNA, 22 nt, Human
uguguaccauuaucccaguggc

SEQ ID NO: 1057621 - RNA, 23 nt, Human
uguguaccauuaucccaguggcu

SEQ ID NO: 1057622 - RNA, 19 nt, Human
uuucacaacauuuucaauc

SEQ ID NO: 1057623 - RNA, 21 nt, Human
uuuuaagaaaauagcaucaaa

SEQ ID NO: 1057624 - RNA, 19 nt, Human
aaagugcuggaauuacagg

SEQ ID NO: 1057625 - RNA, 24 nt, Human
aaagugcuggaauuacaggcauga

SEQ ID NO: 1057626 - RNA, 24 nt, Human
aaagugcugggauuacaggcguga

SEQ ID NO: 1057627 - RNA, 19 nt, Human
aaccucgacucacugcaac

SEQ ID NO: 1057628 - RNA, 20 nt, Human
aaguagcugggacuacaggc

SEQ ID NO: 1057629 - RNA, 20 nt, Human
aaguagcugggacuacaggc

SEQ ID NO: 1057630 - RNA, 24 nt, Human
aaguagcugggacuacaggcgugc

SEQ ID NO: 1057631 - RNA, 19 nt, Human
aagugcuggaauuacaggc

SEQ ID NO: 1057632 - RNA, 19 nt, Human
aagugcugggauuacaggc

SEQ ID NO: 1057633 - RNA, 19 nt, Human
aagugcugggauuacaggc

SEQ ID NO: 1057634 - RNA, 26 nt, Human
aagugcugggauuacaggcgugagcc

SEQ ID NO: 1057635 - RNA, 18 nt, Human
aauuacaggcaugaggca

SEQ ID NO: 1057636 - RNA, 22 nt, Human
aauuacaggcaugaggcacuac

SEQ ID NO: 1057637 - RNA, 21 nt, Human
acaccaggcuaauuuuuguau

SEQ ID NO: 1057638 - RNA, 24 nt, Human
acaguaguggcacaaucuuggcuc

SEQ ID NO: 1057639 - RNA, 18 nt, Human
accauguuggccaggcug

SEQ ID NO: 1057640 - RNA, 22 nt, Human
accauguuggccaggcuggucu

SEQ ID NO: 1057641 - RNA, 25 nt, Human
acccacuuuggccucccaaagugcu

SEQ ID NO: 1057642 - RNA, 25 nt, Human
acucugcugcccaggcuagaguaca

SEQ ID NO: 1057643 - RNA, 19 nt, Human
agacagagucucccucugu

SEQ ID NO: 1057644 - RNA, 19 nt, Human
agccaccgcacccggccug

SEQ ID NO: 1057645 - RNA, 24 nt, Human
aggaggcggcguggcgccgggcgg

SEQ ID NO: 1057646 - RNA, 24 nt, Human
aggugauccacccacuuuggccuc

SEQ ID NO: 1057647 - RNA, 23 nt, Human
aguagcugggauuacaggcacau

SEQ ID NO: 1057648 - RNA, 19 nt, Human
agugauccacccaccucgg

SEQ ID NO: 1057649 - RNA, 18 nt, Human
agugcugggauuacaggc

SEQ ID NO: 1057650 - RNA, 18 nt, Human
auggggucucaccauguu

SEQ ID NO: 1057651 - RNA, 24 nt, Human
auggggucucaccauguuggccag

SEQ ID NO: 1057652 - RNA, 22 nt, Human
augggguuucaccauguuggcc

SEQ ID NO: 1057653 - RNA, 23 nt, Human
augggguuucaccauguuggcca

SEQ ID NO: 1057654 - RNA, 24 nt, Human
augggguuucaccauguuggccag

SEQ ID NO: 1057655 - RNA, 24 nt, Human
auugauucuugugccucagccucc

SEQ ID NO: 1057656 - RNA, 22 nt, Human
auuuuuauauuuuuaguagaga

SEQ ID NO: 1057657 - RNA, 24 nt, Human
caaagugcuggaauuacaggcaug

SEQ ID NO: 1057658 - RNA, 24 nt, Human
caaagugcugggauuacaggcgug

SEQ ID NO: 1057659 - RNA, 24 nt, Human
caccacaccaggcuaauuuuugua

SEQ ID NO: 1057660 - RNA, 21 nt, Human
caccauguuggccaggcuggu

SEQ ID NO: 1057661 - RNA, 21 nt, Human
caccauguuggccaggcuggu

SEQ ID NO: 1057662 - RNA, 23 nt, Human
caccauguuggccaggcuggucu

SEQ ID NO: 1057663 - RNA, 24 nt, Human
caccauguuggccaggcuggucuc

SEQ ID NO: 1057664 - RNA, 27 nt, Human
caccauguuggccaggcuggucucaaa

SEQ ID NO: 1057665 - RNA, 24 nt, Human
caccauguuggccaggcuggucuu

SEQ ID NO: 1057666 - RNA, 27 nt, Human
caccauguuggccaggcuggucuugaa

SEQ ID NO: 1057667 - RNA, 22 nt, Human
cacccaccucggccucccaaag

SEQ ID NO: 1057668 - RNA, 23 nt, Human
cacccaccucggccucccaaagu

SEQ ID NO: 1057669 - RNA, 21 nt, Human
caccgcgcggaggccgaaccc

SEQ ID NO: 1057670 - RNA, 24 nt, Human
caccucggccucccaaagugcugg

SEQ ID NO: 1057671 - RNA, 18 nt, Human
cacuacaccuggucagac

SEQ ID NO: 1057672 - RNA, 22 nt, Human
cacucugcugcccaggcuagag

SEQ ID NO: 1057673 - RNA, 18 nt, Human
cacugcaaccucugccuc

SEQ ID NO: 1057674 - RNA, 23 nt, Human
cacugcagucuccaccuccuggg

SEQ ID NO: 1057675 - RNA, 19 nt, Human
caggcuagaguacaguagu

SEQ ID NO: 1057676 - RNA, 24 nt, Human
cagggucucacucugcugcccagg

SEQ ID NO: 1057677 - RNA, 24 nt, Human
cauguuggccaggcuggucucaaa

SEQ ID NO: 1057678 - RNA, 24 nt, Human
cauguuggccaggcuggucuugaa

SEQ ID NO: 1057679 - RNA, 19 nt, Human
ccaaagugcuggaauuaca

SEQ ID NO: 1057680 - RNA, 24 nt, Human
ccaaagugcuggaauuacaggcau

SEQ ID NO: 1057681 - RNA, 22 nt, Human
ccaaagugcugggauuacaggc

SEQ ID NO: 1057682 - RNA, 22 nt, Human
ccaaagugcugggauuacaggc

SEQ ID NO: 1057683 - RNA, 24 nt, Human
ccaaagugcugggauuacaggcgu

SEQ ID NO: 1057684 - RNA, 22 nt, Human
ccacccacuuuggccucccaaa

SEQ ID NO: 1057685 - RNA, 24 nt, Human
ccaccuccuggguucuauugauuc

SEQ ID NO: 1057686 - RNA, 21 nt, Human
ccaggcuggagugcaguagcg

SEQ ID NO: 1057687 - RNA, 19 nt, Human
ccagguucaagugauucuc

SEQ ID NO: 1057688 - RNA, 23 nt, Human
cccaaguagcugggacuacaggc

SEQ ID NO: 1057689 - RNA, 24 nt, Human
cccaaguagcugggacuacaggcg

SEQ ID NO: 1057690 - RNA, 23 nt, Human
cccggcugauuuuuauauuuuua

SEQ ID NO: 1057691 - RNA, 18 nt, Human
ccgcgcggaggccgaacc

SEQ ID NO: 1057692 - RNA, 22 nt, Human
ccuccagguucaagugauucuc

SEQ ID NO: 1057693 - RNA, 23 nt, Human
ccuccagguucaagugauucucc

SEQ ID NO: 1057694 - RNA, 24 nt, Human
ccugaccucaagugauccacccac

SEQ ID NO: 1057695 - RNA, 24 nt, Human
ccugaccucaggugauccacccac

SEQ ID NO: 1057696 - RNA, 23 nt, Human
ccugaguagcugggauuacaggc

SEQ ID NO: 1057697 - RNA, 24 nt, Human
ccugaguagcugggauuacaggca

SEQ ID NO: 1057698 - RNA, 22 nt, Human
cgagagggacguggacgcggcg

SEQ ID NO: 1057699 - RNA, 24 nt, Human
cucaagugauccacccaccucggc

SEQ ID NO: 1057700 - RNA, 20 nt, Human
cucacugcaaccucugccuc

SEQ ID NO: 1057701 - RNA, 24 nt, Human
cucacugcaaccucugccuccagg

SEQ ID NO: 1057702 - RNA, 21 nt, Human
cucacugcagucuccaccucc

SEQ ID NO: 1057703 - RNA, 24 nt, Human
cucacugcagucuccaccuccugg

SEQ ID NO: 1057704 - RNA, 24 nt, Human
cucagccucccaaguagcugggac

SEQ ID NO: 1057705 - RNA, 24 nt, Human
cucaggugauccacccacuuuggc

SEQ ID NO: 1057706 - RNA, 18 nt, Human
cuccagguucaagugauu

SEQ ID NO: 1057707 - RNA, 19 nt, Human
cucccucuguuguccaggc

SEQ ID NO: 1057708 - RNA, 24 nt, Human
cucccucuguuguccaggcuggag

SEQ ID NO: 1057709 - RNA, 21 nt, Human
cuccuggguucuauugauucu

SEQ ID NO: 1057710 - RNA, 23 nt, Human
cugaguagcugggauuacaggca

SEQ ID NO: 1057711 - RNA, 23 nt, Human
cugcaaccucugccuccagguuc

SEQ ID NO: 1057712 - RNA, 24 nt, Human
cugcagucuccaccuccuggguuc

SEQ ID NO: 1057713 - RNA, 25 nt, Human
cuugugccucagccucccaaguagc

SEQ ID NO: 1057714 - RNA, 24 nt, Human
gaccucaagugauccacccaccuc

SEQ ID NO: 1057715 - RNA, 21 nt, Human
gaccucaggugauccacccac

SEQ ID NO: 1057716 - RNA, 20 nt, Human
gagaugggguuucaccaugu

SEQ ID NO: 1057717 - RNA, 24 nt, Human
gagaugggguuucaccauguuggc

SEQ ID NO: 1057718 - RNA, 19 nt, Human
gaggacgcggggauccugc

SEQ ID NO: 1057719 - RNA, 21 nt, Human
gaggcggcguggcgccgggcg

SEQ ID NO: 1057720 - RNA, 25 nt, Human
gaguagcugggauuacaggcacaug

SEQ ID NO: 1057721 - RNA, 24 nt, Human
gauuacaggcacaugccaccaugc

SEQ ID NO: 1057722 - RNA, 18 nt, Human
gauuacaggcgugagcca

SEQ ID NO: 1057723 - RNA, 22 nt, Human
gauuacaggcgugagccaccgc

SEQ ID NO: 1057724 - RNA, 23 nt, Human
gauuacaggcgugagccaccgca

SEQ ID NO: 1057725 - RNA, 21 nt, Human
gcaaccucugccuccagguuc

SEQ ID NO: 1057726 - RNA, 22 nt, Human
gcccggcugauuuuuauauuuu

SEQ ID NO: 1057727 - RNA, 18 nt, Human
gcgcugcaccgcgcggag

SEQ ID NO: 1057728 - RNA, 21 nt, Human
gcguggcgccgggcggggacg

SEQ ID NO: 1057729 - RNA, 21 nt, Human
gcucacugcagucuccaccuc

SEQ ID NO: 1057730 - RNA, 19 nt, Human
gcuggagugcaguagcgca

SEQ ID NO: 1057731 - RNA, 23 nt, Human
gcuggucucaaacuccugaccuc

SEQ ID NO: 1057732 - RNA, 23 nt, Human
gcuggucuugaacuccugaccuc

SEQ ID NO: 1057733 - RNA, 24 nt, Human
ggcuggucucaaacuccugaccuc

SEQ ID NO: 1057734 - RNA, 24 nt, Human
ggcuggucuugaacuccugaccuc

SEQ ID NO: 1057735 - RNA, 20 nt, Human
gggacguggacgcggcgacc

SEQ ID NO: 1057736 - RNA, 18 nt, Human
ggggucucaccauguugg

SEQ ID NO: 1057737 - RNA, 22 nt, Human
ggggucucaccauguuggccag

SEQ ID NO: 1057738 - RNA, 22 nt, Human
gggguuucaccauguuggccag

SEQ ID NO: 1057739 - RNA, 22 nt, Human
gggucucaccauguuggccagg

SEQ ID NO: 1057740 - RNA, 22 nt, Human
ggguuucaccauguuggccagg

SEQ ID NO: 1057741 - RNA, 18 nt, Human
ggucucaccauguuggcc

SEQ ID NO: 1057742 - RNA, 19 nt, Human
ggucuugaacuccugaccu

SEQ ID NO: 1057743 - RNA, 22 nt, Human
guagagauggggucucaccaug

SEQ ID NO: 1057744 - RNA, 23 nt, Human
guagagaugggguuucaccaugu

SEQ ID NO: 1057745 - RNA, 18 nt, Human
guagcugggauuacaggc

SEQ ID NO: 1057746 - RNA, 19 nt, Human
guauuuuuuguagagaugg

SEQ ID NO: 1057747 - RNA, 24 nt, Human
gugauccacccaccucggccuccc

SEQ ID NO: 1057748 - RNA, 24 nt, Human
gugauccacccacuuuggccuccc

SEQ ID NO: 1057749 - RNA, 22 nt, Human
gugccucagccucccaaguagc

SEQ ID NO: 1057750 - RNA, 18 nt, Human
guuguccaggcuggagug

SEQ ID NO: 1057751 - RNA, 24 nt, Human
uaauuuuuguauuuuuuguagaga

SEQ ID NO: 1057752 - RNA, 23 nt, Human
uacaggcacaugccaccaugccc

SEQ ID NO: 1057753 - RNA, 22 nt, Human
uacaggcaugaggcacuacacc

SEQ ID NO: 1057754 - RNA, 23 nt, Human
uacaggcgugagccaccgcaccc

SEQ ID NO: 1057755 - RNA, 22 nt, Human
uagagauggggucucaccaugu

SEQ ID NO: 1057756 - RNA, 22 nt, Human
uagagaugggguuucaccaugu

SEQ ID NO: 1057757 - RNA, 27 nt, Human
uagaguacaguaguggcacaaucuugg

SEQ ID NO: 1057758 - RNA, 24 nt, Human
uaguagagaugggguuucaccaug

SEQ ID NO: 1057759 - RNA, 26 nt, Human
uaguagagaugggguuucaccauguu

SEQ ID NO: 1057760 - RNA, 20 nt, Human
ucaagugauccacccaccuc

SEQ ID NO: 1057761 - RNA, 19 nt, Human
ucacugcaaccucugccuc

SEQ ID NO: 1057762 - RNA, 23 nt, Human
ucacugcaaccucugccuccagg

SEQ ID NO: 1057763 - RNA, 27 nt, Human
ucacugcaaccucugccuccagguuca

SEQ ID NO: 1057764 - RNA, 23 nt, Human
ucacugcagucuccaccuccugg

SEQ ID NO: 1057765 - RNA, 24 nt, Human
ucacugcagucuccaccuccuggg

SEQ ID NO: 1057766 - RNA, 25 nt, Human
ucacugcagucuccaccuccugggg

SEQ ID NO: 1057767 - RNA, 25 nt, Human
ucacugcagucuccaccuccugggu

SEQ ID NO: 1057768 - RNA, 20 nt, Human
ucagccucccaaguagcugg

SEQ ID NO: 1057769 - RNA, 23 nt, Human
uccagguucaagugauucuccuc

SEQ ID NO: 1057770 - RNA, 24 nt, Human
ucccaaagugcuggaauuacaggc

SEQ ID NO: 1057771 - RNA, 24 nt, Human
ucccaaagugcugggauuacaggc

SEQ ID NO: 1057772 - RNA, 24 nt, Human
ucccaaguagcugggacuacaggc

SEQ ID NO: 1057773 - RNA, 20 nt, Human
ucccucuguuguccaggcug

SEQ ID NO: 1057774 - RNA, 24 nt, Human
ucccucuguuguccaggcuggagu

SEQ ID NO: 1057775 - RNA, 24 nt, Human
uccugaguagcugggauuacaggc

SEQ ID NO: 1057776 - RNA, 21 nt, Human
uccuggguucuauugauucuu

SEQ ID NO: 1057777 - RNA, 23 nt, Human
ucuaggaaggcuugcccuugauu

SEQ ID NO: 1057778 - RNA, 24 nt, Human
ucucaccauguuggccaggcuggu

SEQ ID NO: 1057779 - RNA, 24 nt, Human
ucucacucugcugcccaggcuaga

SEQ ID NO: 1057780 - RNA, 25 nt, Human
ucucacucugcugcccaggcuagag

SEQ ID NO: 1057781 - RNA, 26 nt, Human
ucucacucugcugcccaggcuagagu

SEQ ID NO: 1057782 - RNA, 19 nt, Human
ucuccaccuccuggguucu

SEQ ID NO: 1057783 - RNA, 22 nt, Human
ucuccagguacugaccugguuu

SEQ ID NO: 1057784 - RNA, 22 nt, Human
ucucccucuguuguccaggcug

SEQ ID NO: 1057785 - RNA, 23 nt, Human
ucucccucuguuguccaggcugg

SEQ ID NO: 1057786 - RNA, 24 nt, Human
ucucccucuguuguccaggcugga

SEQ ID NO: 1057787 - RNA, 24 nt, Human
ucugcugcccaggcuagaguacag

SEQ ID NO: 1057788 - RNA, 24 nt, Human
ucuguuguccaggcuggagugcag

SEQ ID NO: 1057789 - RNA, 21 nt, Human
ucuugaacuccugaccucaag

SEQ ID NO: 1057790 - RNA, 21 nt, Human
ugaccucaggugauccaccca

SEQ ID NO: 1057791 - RNA, 22 nt, Human
ugaccucaggugauccacccac

SEQ ID NO: 1057792 - RNA, 24 nt, Human
ugaccucaggugauccacccacuu

SEQ ID NO: 1057793 - RNA, 22 nt, Human
ugagacagagucucccucuguu

SEQ ID NO: 1057794 - RNA, 24 nt, Human
ugagacagagucucccucuguugu

SEQ ID NO: 1057795 - RNA, 20 nt, Human
ugagacagggucucacucug

SEQ ID NO: 1057796 - RNA, 22 nt, Human
ugagacagggucucacucugcu

SEQ ID NO: 1057797 - RNA, 24 nt, Human
ugauccacccaccucggccuccca

SEQ ID NO: 1057798 - RNA, 20 nt, Human
ugauucuugugccucagccu

SEQ ID NO: 1057799 - RNA, 23 nt, Human
ugauucuugugccucagccuccc

SEQ ID NO: 1057800 - RNA, 24 nt, Human
ugauuuuuauauuuuuaguagaga

SEQ ID NO: 1057801 - RNA, 18 nt, Human
ugcaccaccacaccaggc

SEQ ID NO: 1057802 - RNA, 21 nt, Human
ugcccaggcuagaguacagua

SEQ ID NO: 1057803 - RNA, 24 nt, Human
ugcccggcugauuuuuauauuuuu

SEQ ID NO: 1057804 - RNA, 22 nt, Human
ugccucagccucccaaguagcu

SEQ ID NO: 1057805 - RNA, 24 nt, Human
ugccucagccucccaaguagcugg

SEQ ID NO: 1057806 - RNA, 22 nt, Human
ugccuccagguucaagugauuc

SEQ ID NO: 1057807 - RNA, 19 nt, Human
ugcgcugcaccgcgcggag

SEQ ID NO: 1057808 - RNA, 24 nt, Human
ugcuggaauuacaggcaugaggca

SEQ ID NO: 1057809 - RNA, 24 nt, Human
ugcugggauuacaggcgugagcca

SEQ ID NO: 1057810 - RNA, 18 nt, Human
uggaauuacaggcaugag

SEQ ID NO: 1057811 - RNA, 19 nt, Human
uggaauuacaggcaugagg

SEQ ID NO: 1057812 - RNA, 21 nt, Human
uggaauuacaggcaugaggca

SEQ ID NO: 1057813 - RNA, 24 nt, Human
uggaauuacaggcaugaggcacua

SEQ ID NO: 1057814 - RNA, 24 nt, Human
uggaauuacaggcaugaggcacua

SEQ ID NO: 1057815 - RNA, 19 nt, Human
uggagugcaguagcgcaac

SEQ ID NO: 1057816 - RNA, 23 nt, Human
uggcacaaucuuggcucacugca

SEQ ID NO: 1057817 - RNA, 24 nt, Human
uggccaggcuggucucaaacuccu

SEQ ID NO: 1057818 - RNA, 24 nt, Human
uggccaggcuggucuugaacuccu

SEQ ID NO: 1057819 - RNA, 21 nt, Human
ugggacuacaggcgugcacca

SEQ ID NO: 1057820 - RNA, 24 nt, Human
ugggacuacaggcgugcaccacca

SEQ ID NO: 1057821 - RNA, 21 nt, Human
ugggauuacaggcacaugcca

SEQ ID NO: 1057822 - RNA, 22 nt, Human
ugggauuacaggcacaugccac

SEQ ID NO: 1057823 - RNA, 24 nt, Human
ugggauuacaggcacaugccacca

SEQ ID NO: 1057824 - RNA, 25 nt, Human
ugggauuacaggcacaugccaccau

SEQ ID NO: 1057825 - RNA, 18 nt, Human
ugggauuacaggcgugag

SEQ ID NO: 1057826 - RNA, 19 nt, Human
ugggauuacaggcgugagc

SEQ ID NO: 1057827 - RNA, 21 nt, Human
ugggauuacaggcgugagcca

SEQ ID NO: 1057828 - RNA, 22 nt, Human
ugggauuacaggcgugagccac

SEQ ID NO: 1057829 - RNA, 23 nt, Human
ugggauuacaggcgugagccacc

SEQ ID NO: 1057830 - RNA, 24 nt, Human
ugggauuacaggcgugagccaccg

SEQ ID NO: 1057831 - RNA, 24 nt, Human
uggggucucaccauguuggccagg

SEQ ID NO: 1057832 - RNA, 24 nt, Human
ugggguuucaccauguuggccagg

SEQ ID NO: 1057833 - RNA, 24 nt, Human
uguagagauggggucucaccaugu

SEQ ID NO: 1057834 - RNA, 19 nt, Human
uguccaggcuggagugcag

SEQ ID NO: 1057835 - RNA, 20 nt, Human
uguccaggcuggagugcagu

SEQ ID NO: 1057836 - RNA, 21 nt, Human
uguguuucaaaugaaauaauc

SEQ ID NO: 1057837 - RNA, 20 nt, Human
uuacaggcaugaggcacuac

SEQ ID NO: 1057838 - RNA, 18 nt, Human
uuaguagagaugggguuu

SEQ ID NO: 1057839 - RNA, 22 nt, Human
uuaguagagaugggguuucacc

SEQ ID NO: 1057840 - RNA, 24 nt, Human
uuaguagagaugggguuucaccau

SEQ ID NO: 1057841 - RNA, 22 nt, Human
uuauuuacuuauuuauuuuugg

SEQ ID NO: 1057842 - RNA, 25 nt, Human
uuauuuauuuauuuacuuauuuauu

SEQ ID NO: 1057843 - RNA, 19 nt, Human
uuauuuauuuauuuauuua

SEQ ID NO: 1057844 - RNA, 25 nt, Human
uuauuuauuuauuuauuuacuuauu

SEQ ID NO: 1057845 - RNA, 22 nt, Human
uucaagugauucuccuccucag

SEQ ID NO: 1057846 - RNA, 22 nt, Human
uucaagugauucuccuccucag

SEQ ID NO: 1057847 - RNA, 23 nt, Human
uucuauugauucuugugccucag

SEQ ID NO: 1057848 - RNA, 24 nt, Human
uuguagagauggggucucaccaug

SEQ ID NO: 1057849 - RNA, 24 nt, Human
uuguccaggcuggagugcaguagc

SEQ ID NO: 1057850 - RNA, 24 nt, Human
uuucaccauguuggccaggcuggu

SEQ ID NO: 1057851 - RNA, 19 nt, Human
uuuggccucccaaagugcu

SEQ ID NO: 1057852 - RNA, 18 nt, Human
uuuguagagauggggucu

SEQ ID NO: 1057853 - RNA, 24 nt, Human
uuuguagagauggggucucaccau

SEQ ID NO: 1057854 - RNA, 20 nt, Human
uuuuauauuuuuaguagaga

SEQ ID NO: 1057855 - RNA, 24 nt, Human
uuuuuaguagagaugggguuucac

SEQ ID NO: 1057856 - RNA, 20 nt, Human
uuuuuauauuuuuaguagag

SEQ ID NO: 1057857 - RNA, 20 nt, Human
uuuuuguauuuuuuguagag

SEQ ID NO: 1057858 - RNA, 23 nt, Human
uuuuuguauuuuuuguagagaug

SEQ ID NO: 1057859 - RNA, 24 nt, Human
uuuuuuguagagauggggucucac

SEQ ID NO: 1057860 - RNA, 20 nt, Human
uuuuuuuuuuugagacagag

SEQ ID NO: 1057861 - RNA, 24 nt, Human
aaaaacaaagggaaaacacaaaac

SEQ ID NO: 1057862 - RNA, 20 nt, Human
aaacacaaaacugcaauaaa

SEQ ID NO: 1057863 - RNA, 21 nt, Human
aacaaagggaaaacacaaaac

SEQ ID NO: 1057864 - RNA, 21 nt, Human
aaccaaugcuagggaaaaaca

SEQ ID NO: 1057865 - RNA, 22 nt, Human
aaccaaugcuagggaaaaacaa

SEQ ID NO: 1057866 - RNA, 21 nt, Human
aaccgugccgugaagggcaag

SEQ ID NO: 1057867 - RNA, 25 nt, Human
aauacuaaaagcccucaaaugaacc

SEQ ID NO: 1057868 - RNA, 19 nt, Human
aauucccacccccauuccc

SEQ ID NO: 1057869 - RNA, 23 nt, Human
acaauucccacccccauucccua

SEQ ID NO: 1057870 - RNA, 21 nt, Human
acccuagggacauuuccuggg

SEQ ID NO: 1057871 - RNA, 19 nt, Human
agggaaaaacaaagggaaa

SEQ ID NO: 1057872 - RNA, 25 nt, Human
agggaaaacacaaaacugcaauaaa

SEQ ID NO: 1057873 - RNA, 30 nt, Human
caauaaacuucaucuucucucccagguuuu

SEQ ID NO: 1057874 - RNA, 18 nt, Human
ccacugccuggaaggggg

SEQ ID NO: 1057875 - RNA, 18 nt, Human
cccuucuucuccccucuc

SEQ ID NO: 1057876 - RNA, 19 nt, Human
cccuucuucuccccucucc

SEQ ID NO: 1057877 - RNA, 24 nt, Human
cuaaaagcccucaaaugaaccccu

SEQ ID NO: 1057878 - RNA, 21 nt, Human
cuagggaaaaacaaagggaaa

SEQ ID NO: 1057879 - RNA, 20 nt, Human
cuagggacauuuccuggguu

SEQ ID NO: 1057880 - RNA, 24 nt, Human
cuugaacaauucccacccccauuc

SEQ ID NO: 1057881 - RNA, 18 nt, Human
gcagaagugguuugaggg

SEQ ID NO: 1057882 - RNA, 21 nt, Human
ggcagaagugguuugagggcc

SEQ ID NO: 1057883 - RNA, 23 nt, Human
ggcagaagugguuugagggccug

SEQ ID NO: 1057884 - RNA, 26 nt, Human
gggaaaaacaaagggaaaacacaaaa

SEQ ID NO: 1057885 - RNA, 28 nt, Human
gggaaaaacaaagggaaaaccgguaccc

SEQ ID NO: 1057886 - RNA, 20 nt, Human
uagacagugaaugagaaauu

SEQ ID NO: 1057887 - RNA, 23 nt, Human
uagggacauuuccuggguuuucc

SEQ ID NO: 1057888 - RNA, 22 nt, Human
ucccuucuucuccccucuccaa

SEQ ID NO: 1057889 - RNA, 24 nt, Human
ucccuucuucuccccucuccaacc

SEQ ID NO: 1057890 - RNA, 22 nt, Human
ucucccagguuuuucuugaaca

SEQ ID NO: 1057891 - RNA, 22 nt, Human
ugccgugaagggcaagccccuc

SEQ ID NO: 1057892 - RNA, 19 nt, Human
ugccuggaagggggcagaa

SEQ ID NO: 1057893 - RNA, 23 nt, Human
ugccuggaagggggcagaagugg

SEQ ID NO: 1057894 - RNA, 23 nt, Human
ugccuggaagggggcagaagugg

SEQ ID NO: 1057895 - RNA, 18 nt, Human
uggaagggggcagaagug

SEQ ID NO: 1057896 - RNA, 19 nt, Human
uggaagggggcagaagugg

SEQ ID NO: 1057897 - RNA, 19 nt, Human
uggaagggggcagaagugg

SEQ ID NO: 1057898 - RNA, 20 nt, Human
uggaagggggcagaagugga

SEQ ID NO: 1057899 - RNA, 22 nt, Human
uuaauacuaaaagcccucaaau

SEQ ID NO: 1057900 - RNA, 24 nt, Human
uucccacccccauucccuacuaug

SEQ ID NO: 1057901 - RNA, 20 nt, Human
uugaacaauucccaccccca

SEQ ID NO: 1057902 - RNA, 21 nt, Human
uuucccuucuucuccccucuc

SEQ ID NO: 1057903 - RNA, 23 nt, Human
uuucccuucuucuccccucucca

SEQ ID NO: 1057904 - RNA, 23 nt, Human
uuugagggccuguguccggccau

SEQ ID NO: 1057905 - RNA, 24 nt, Human
aaaagcacaggcagaauuggagac

SEQ ID NO: 1057906 - RNA, 19 nt, Human
aaacaaaagcacaggcaga

SEQ ID NO: 1057907 - RNA, 19 nt, Human
aauuaauugcagaucacug

SEQ ID NO: 1057908 - RNA, 23 nt, Human
augcuuuuuaaaagauccgaguu

SEQ ID NO: 1057909 - RNA, 24 nt, Human
auuucaguucaguuuuuugguuuc

SEQ ID NO: 1057910 - RNA, 24 nt, Human
uaaacaucaagaauacacacuuua

SEQ ID NO: 1057911 - RNA, 22 nt, Human
uaacaaaacacaaaagcauuaa

SEQ ID NO: 1057912 - RNA, 28 nt, Human
uauuaugaaguauuaacaaaacacaaaa

SEQ ID NO: 1057913 - RNA, 20 nt, Human
ucagauggcaaaaguagaau

SEQ ID NO: 1057914 - RNA, 25 nt, Human
ucuagagacagucaaacaaaagcac

SEQ ID NO: 1057915 - RNA, 20 nt, Human
uggaaaaaugaucuaugaug

SEQ ID NO: 1057916 - RNA, 24 nt, Human
uguaauucucccuguacauuucug

SEQ ID NO: 1057917 - RNA, 23 nt, Human
aaaauauguaaccccuauagcaa

SEQ ID NO: 1057918 - RNA, 22 nt, Human
acccauagcuccaagagccuca

SEQ ID NO: 1057919 - RNA, 23 nt, Human
acugcaccaccaaugcuucagca

SEQ ID NO: 1057920 - RNA, 23 nt, Human
acuuguucccuccccauaucccc

SEQ ID NO: 1057921 - RNA, 18 nt, Human
agacaauaaaggcuggua

SEQ ID NO: 1057922 - RNA, 21 nt, Human
agccucagugucagaacauag

SEQ ID NO: 1057923 - RNA, 19 nt, Human
agcgguccuccugccucag

SEQ ID NO: 1057924 - RNA, 24 nt, Human
agcgguccuccugccucagccucc

SEQ ID NO: 1057925 - RNA, 18 nt, Human
agcugguauuuccuuugg

SEQ ID NO: 1057926 - RNA, 20 nt, Human
aggcuggagugcaguggcaa

SEQ ID NO: 1057927 - RNA, 19 nt, Human
aguagcugggacuacaggc

SEQ ID NO: 1057928 - RNA, 19 nt, Human
aguagcugggacuacaggc

SEQ ID NO: 1057929 - RNA, 21 nt, Human
aguggccacgguuauucuggg

SEQ ID NO: 1057930 - RNA, 24 nt, Human
auaaaaccuuuacagcugugcaga

SEQ ID NO: 1057931 - RNA, 21 nt, Human
auaaccccuaaguccuacgcu

SEQ ID NO: 1057932 - RNA, 25 nt, Human
auaaccccuaaguccuacgcucugc

SEQ ID NO: 1057933 - RNA, 18 nt, Human
auguguuaaagacagacu

SEQ ID NO: 1057934 - RNA, 25 nt, Human
caaacuccugggcucaagcgguccu

SEQ ID NO: 1057935 - RNA, 20 nt, Human
caagcgguccuccugccuca

SEQ ID NO: 1057936 - RNA, 27 nt, Human
caagcgguccuccugccucagccuccu

SEQ ID NO: 1057937 - RNA, 24 nt, Human
caagugacuuucccaaggucaccc

SEQ ID NO: 1057938 - RNA, 21 nt, Human
caaucaagugacuuucccaag

SEQ ID NO: 1057939 - RNA, 23 nt, Human
caaucuugggagaaaaguaacaa

SEQ ID NO: 1057940 - RNA, 23 nt, Human
cacaagugugaucagaugaucag

SEQ ID NO: 1057941 - RNA, 22 nt, Human
cacccagcuggucauuagaggc

SEQ ID NO: 1057942 - RNA, 22 nt, Human
cacuaaucagugggugauuacu

SEQ ID NO: 1057943 - RNA, 24 nt, Human
cagcacugccucccuuugccuuaa

SEQ ID NO: 1057944 - RNA, 20 nt, Human
cagccuccugaguagcuggg

SEQ ID NO: 1057945 - RNA, 20 nt, Human
caggcgaguaccaccaugcc

SEQ ID NO: 1057946 - RNA, 22 nt, Human
cagugggugauuacuggucagg

SEQ ID NO: 1057947 - RNA, 18 nt, Human
ccagcuggucauuagagg

SEQ ID NO: 1057948 - RNA, 18 nt, Human
ccccggggagcgggccgc

SEQ ID NO: 1057949 - RNA, 22 nt, Human
ccccuaaguccuacgcucugcc

SEQ ID NO: 1057950 - RNA, 23 nt, Human
cccucuucccuucuacuuguucc

SEQ ID NO: 1057951 - RNA, 23 nt, Human
cccuuugccuuaaggacugggag

SEQ ID NO: 1057952 - RNA, 23 nt, Human
ccggcccgguccccggggagcgg

SEQ ID NO: 1057953 - RNA, 24 nt, Human
ccuccugccucagccuccugagua

SEQ ID NO: 1057954 - RNA, 18 nt, Human
ccucuucccuucuacuug

SEQ ID NO: 1057955 - RNA, 23 nt, Human
ccugaguagcugggacuacaggc

SEQ ID NO: 1057956 - RNA, 23 nt, Human
ccugaguagcugggacuacaggc

SEQ ID NO: 1057957 - RNA, 23 nt, Human
ccugccucagccuccugaguagc

SEQ ID NO: 1057958 - RNA, 24 nt, Human
ccugccucagccuccugaguagcu

SEQ ID NO: 1057959 - RNA, 20 nt, Human
ccugggcucaagcgguccuc

SEQ ID NO: 1057960 - RNA, 23 nt, Human
ccugggcucaagcgguccuccug

SEQ ID NO: 1057961 - RNA, 19 nt, Human
ccuguggacauuagagcuc

SEQ ID NO: 1057962 - RNA, 22 nt, Human
ccuucuacuuguucccucccca

SEQ ID NO: 1057963 - RNA, 23 nt, Human
cgaguaccaccaugccuggcuaa

SEQ ID NO: 1057964 - RNA, 23 nt, Human
cgcagggcgcaggggcuccggcg

SEQ ID NO: 1057965 - RNA, 22 nt, Human
cggcccgguccccggggagcgg

SEQ ID NO: 1057966 - RNA, 18 nt, Human
cuaauaauagccacuuuu

SEQ ID NO: 1057967 - RNA, 19 nt, Human
cuacaacauccuguggacu

SEQ ID NO: 1057968 - RNA, 18 nt, Human
cuacuuccuagucuucuc

SEQ ID NO: 1057969 - RNA, 18 nt, Human
cucaagcgguccuccugc

SEQ ID NO: 1057970 - RNA, 24 nt, Human
cucagccuccugaguagcugggac

SEQ ID NO: 1057971 - RNA, 23 nt, Human
cuccauccucauuuccacccuuc

SEQ ID NO: 1057972 - RNA, 23 nt, Human
cuccugggcucaagcgguccucc

SEQ ID NO: 1057973 - RNA, 22 nt, Human
cugguauuuugggugcccugga

SEQ ID NO: 1057974 - RNA, 21 nt, Human
cuuauaaccccuaaguccuac

SEQ ID NO: 1057975 - RNA, 26 nt, Human
cuuuuuuuuuuuaauagauggggucu

SEQ ID NO: 1057976 - RNA, 24 nt, Human
gacaagcugguauuuccuuuggaa

SEQ ID NO: 1057977 - RNA, 24 nt, Human
gacuacaggcgaguaccaccaugc

SEQ ID NO: 1057978 - RNA, 25 nt, Human
gaguagcugggacuacaggcgagua

SEQ ID NO: 1057979 - RNA, 22 nt, Human
gaguaucacugugagcuuaaaa

SEQ ID NO: 1057980 - RNA, 21 nt, Human
gagugcaagaugaggacuuca

SEQ ID NO: 1057981 - RNA, 24 nt, Human
gcgguccuccugccucagccuccu

SEQ ID NO: 1057982 - RNA, 22 nt, Human
gcuggagugcaguggcaauuca

SEQ ID NO: 1057983 - RNA, 21 nt, Human
ggagacugcccaggacuugag

SEQ ID NO: 1057984 - RNA, 22 nt, Human
gggauuuuccuucuuuccucuu

SEQ ID NO: 1057985 - RNA, 22 nt, Human
ggggagcgggccgcagggcgca

SEQ ID NO: 1057986 - RNA, 21 nt, Human
gggucuugcuauuugcuuagg

SEQ ID NO: 1057987 - RNA, 24 nt, Human
gucuugcuauuugcuuaggcugga

SEQ ID NO: 1057988 - RNA, 23 nt, Human
uaaaauauguaaccccuauagca

SEQ ID NO: 1057989 - RNA, 20 nt, Human
uaaaaucaugcagacaauaa

SEQ ID NO: 1057990 - RNA, 22 nt, Human
uaaagucauaaggaugcucucc

SEQ ID NO: 1057991 - RNA, 18 nt, Human
uaaggagacugcccagga

SEQ ID NO: 1057992 - RNA, 19 nt, Human
uaagggacuugauuuacug

SEQ ID NO: 1057993 - RNA, 22 nt, Human
uacccuacaacauccuguggac

SEQ ID NO: 1057994 - RNA, 24 nt, Human
uacuucuucccuuccucagaaggg

SEQ ID NO: 1057995 - RNA, 26 nt, Human
uacuuguucccuccccauauccccua

SEQ ID NO: 1057996 - RNA, 22 nt, Human
uagaauaaagacauugccuccu

SEQ ID NO: 1057997 - RNA, 24 nt, Human
uagcacccaugugacagaaagaag

SEQ ID NO: 1057998 - RNA, 22 nt, Human
uaucaaguguuuguaaaagguu

SEQ ID NO: 1057999 - RNA, 23 nt, Human
uaucuggaucugggcuuauaacc

SEQ ID NO: 1058000 - RNA, 21 nt, Human
ucagaagggaaggcaaagaca

SEQ ID NO: 1058001 - RNA, 21 nt, Human
ucagacacuaugcaagaugcc

SEQ ID NO: 1058002 - RNA, 19 nt, Human
ucagcacugccucccuuug

SEQ ID NO: 1058003 - RNA, 23 nt, Human
ucagccuccugaguagcugggac

SEQ ID NO: 1058004 - RNA, 19 nt, Human
ucagugucagaacauaggu

SEQ ID NO: 1058005 - RNA, 24 nt, Human
ucagugucagaacauagguaaggg

SEQ ID NO: 1058006 - RNA, 20 nt, Human
ucaugcagacaauaaaggcu

SEQ ID NO: 1058007 - RNA, 21 nt, Human
uccaagagccucagugucaga

SEQ ID NO: 1058008 - RNA, 24 nt, Human
uccugaguagcugggacuacaggc

SEQ ID NO: 1058009 - RNA, 22 nt, Human
uccugggcucaagcgguccucc

SEQ ID NO: 1058010 - RNA, 24 nt, Human
uccugggcucaagcgguccuccug

SEQ ID NO: 1058011 - RNA, 19 nt, Human
ucuacuuguucccucccca

SEQ ID NO: 1058012 - RNA, 24 nt, Human
ucucaaacuccugggcucaagcgg

SEQ ID NO: 1058013 - RNA, 19 nt, Human
ucuccagcuaccucagagg

SEQ ID NO: 1058014 - RNA, 21 nt, Human
ucuugcuauuugcuuaggcug

SEQ ID NO: 1058015 - RNA, 22 nt, Human
ucuugcuauuugcuuaggcugg

SEQ ID NO: 1058016 - RNA, 23 nt, Human
ucuugcuauuugcuuaggcugga

SEQ ID NO: 1058017 - RNA, 25 nt, Human
ugagagacccuacccuacaacaucc

SEQ ID NO: 1058018 - RNA, 20 nt, Human
ugagguccuuggucccucua

SEQ ID NO: 1058019 - RNA, 21 nt, Human
ugagugaggcuaaagucugua

SEQ ID NO: 1058020 - RNA, 18 nt, Human
ugcccuggagaacgaggg

SEQ ID NO: 1058021 - RNA, 19 nt, Human
ugcccuggagaacgagggc

SEQ ID NO: 1058022 - RNA, 24 nt, Human
ugccucagccuccugaguagcugg

SEQ ID NO: 1058023 - RNA, 21 nt, Human
ugccuccuggauuucuaaccc

SEQ ID NO: 1058024 - RNA, 18 nt, Human
ugccuuaaggacugggag

SEQ ID NO: 1058025 - RNA, 18 nt, Human
ugcuccauuucucuuucc

SEQ ID NO: 1058026 - RNA, 20 nt, Human
ugcugugaaugggauggaag

SEQ ID NO: 1058027 - RNA, 21 nt, Human
ugcugugaaugggauggaagg

SEQ ID NO: 1058028 - RNA, 20 nt, Human
ugcuuaggcuggagugcagu

SEQ ID NO: 1058029 - RNA, 21 nt, Human
ugcuuaggcuggagugcagug

SEQ ID NO: 1058030 - RNA, 22 nt, Human
ugcuuaggcuggagugcagugg

SEQ ID NO: 1058031 - RNA, 24 nt, Human
ugcuuaggcuggagugcaguggca

SEQ ID NO: 1058032 - RNA, 23 nt, Human
uggagugcaguggcaauucacag

SEQ ID NO: 1058033 - RNA, 24 nt, Human
uggagugcaguggcaauucacagg

SEQ ID NO: 1058034 - RNA, 21 nt, Human
ugggacuacaggcgaguacca

SEQ ID NO: 1058035 - RNA, 24 nt, Human
ugggacuacaggcgaguaccacca

SEQ ID NO: 1058036 - RNA, 25 nt, Human
ugggacuacaggcgaguaccaccau

SEQ ID NO: 1058037 - RNA, 24 nt, Human
ugggcucaagcgguccuccugccu

SEQ ID NO: 1058038 - RNA, 23 nt, Human
uggggucuugcuauuugcuuagg

SEQ ID NO: 1058039 - RNA, 21 nt, Human
ugguagcggccggcgcgcugc

SEQ ID NO: 1058040 - RNA, 19 nt, Human
ugucagaacauagguaagg

SEQ ID NO: 1058041 - RNA, 18 nt, Human
ugucuaaagcauaugagg

SEQ ID NO: 1058042 - RNA, 19 nt, Human
ugugacagaaagaagccau

SEQ ID NO: 1058043 - RNA, 24 nt, Human
uguucccuccccauauccccuaaa

SEQ ID NO: 1058044 - RNA, 20 nt, Human
uuacacugcaccaccaaugc

SEQ ID NO: 1058045 - RNA, 19 nt, Human
uuagagcucugugcuccug

SEQ ID NO: 1058046 - RNA, 23 nt, Human
uuccuagucuucucuuggugucu

SEQ ID NO: 1058047 - RNA, 19 nt, Human
uugagguccuuggucccuc

SEQ ID NO: 1058048 - RNA, 24 nt, Human
uugcuuaggcuggagugcaguggc

SEQ ID NO: 1058049 - RNA, 19 nt, Human
uuguucccuccccauaucc

SEQ ID NO: 1058050 - RNA, 24 nt, Human
aaaaaaaaaaaaaauugccaagag

SEQ ID NO: 1058051 - RNA, 25 nt, Human
aaaaaaaaaccaaaaaccaaaaacc

SEQ ID NO: 1058052 - RNA, 23 nt, Human
aaaaaaaccaaaaaccaaaaacc

SEQ ID NO: 1058053 - RNA, 24 nt, Human
aaaaaaaccaaaaaccaaaaacca

SEQ ID NO: 1058054 - RNA, 22 nt, Human
aaaaaacacacagagaguaauu

SEQ ID NO: 1058055 - RNA, 21 nt, Human
aaaaaaccaaaaaccaaaaac

SEQ ID NO: 1058056 - RNA, 19 nt, Human
aaaaacaaaacaaaaggua

SEQ ID NO: 1058057 - RNA, 23 nt, Human
aaaaacaacaaaaaaacuuugcg

SEQ ID NO: 1058058 - RNA, 21 nt, Human
aaaaaccaaaaaccaaaaacc

SEQ ID NO: 1058059 - RNA, 21 nt, Human
aaaaaccaaaaaccaaaaacc

SEQ ID NO: 1058060 - RNA, 22 nt, Human
aaaaaccaaaaaccaaaaacca

SEQ ID NO: 1058061 - RNA, 19 nt, Human
aacaaaacaaaagguaaag

SEQ ID NO: 1058062 - RNA, 22 nt, Human
aacauuccauaccuaaaauuau

SEQ ID NO: 1058063 - RNA, 20 nt, Human
aaccaaaaaaaaaaaaccaa

SEQ ID NO: 1058064 - RNA, 27 nt, Human
aaccaaaaaccaaaaaacaaaacuagc

SEQ ID NO: 1058065 - RNA, 19 nt, Human
aaccaaaaaccaaaaacca

SEQ ID NO: 1058066 - RNA, 19 nt, Human
aaccaaaaaccaaaaacca

SEQ ID NO: 1058067 - RNA, 20 nt, Human
aaccaaaaaccaaaaaccaa

SEQ ID NO: 1058068 - RNA, 30 nt, Human
aaccaaaaaccaaaaaccaaaaaacaagac

SEQ ID NO: 1058069 - RNA, 18 nt, Human
aacuagccagucauggug

SEQ ID NO: 1058070 - RNA, 25 nt, Human
aagccaauaugacuaaauccaaaac

SEQ ID NO: 1058071 - RNA, 18 nt, Human
aaguaacauaaauagagc

SEQ ID NO: 1058072 - RNA, 24 nt, Human
aaguaacauaaauagagccagagg

SEQ ID NO: 1058073 - RNA, 24 nt, Human
aauagagccagaggaaacuuaaaa

SEQ ID NO: 1058074 - RNA, 20 nt, Human
acaaaauacaagauacuaca

SEQ ID NO: 1058075 - RNA, 20 nt, Human
acaacaaaaaaacuuugcgg

SEQ ID NO: 1058076 - RNA, 23 nt, Human
acacaauuccuguuauagagacc

SEQ ID NO: 1058077 - RNA, 22 nt, Human
accaaccaaccaaaaaaaaaaa

SEQ ID NO: 1058078 - RNA, 19 nt, Human
acgaagcuuuauccucuaa

SEQ ID NO: 1058079 - RNA, 20 nt, Human
agacagccauaaaaaggcag

SEQ ID NO: 1058080 - RNA, 21 nt, Human
agaggaguaaaggcuggugga

SEQ ID NO: 1058081 - RNA, 22 nt, Human
agaugcucccgcuuaaaaacca

SEQ ID NO: 1058082 - RNA, 20 nt, Human
agccagucaugguggugcac

SEQ ID NO: 1058083 - RNA, 22 nt, Human
agccuggacaauauagugagac

SEQ ID NO: 1058084 - RNA, 23 nt, Human
agccuggacaauauagugagacc

SEQ ID NO: 1058085 - RNA, 20 nt, Human
aggauugcuugggcccagga

SEQ ID NO: 1058086 - RNA, 19 nt, Human
aggcaggauugcuugggcc

SEQ ID NO: 1058087 - RNA, 21 nt, Human
aggcugaggcaggauugcuug

SEQ ID NO: 1058088 - RNA, 24 nt, Human
aggcugaggugggaggaucacuug

SEQ ID NO: 1058089 - RNA, 18 nt, Human
aggugggaggaucacuug

SEQ ID NO: 1058090 - RNA, 23 nt, Human
aggugggaggaucacuugagcuc

SEQ ID NO: 1058091 - RNA, 21 nt, Human
aguggugaacgccuguagucc

SEQ ID NO: 1058092 - RNA, 26 nt, Human
auaacauuccauaccuaaaauuauug

SEQ ID NO: 1058093 - RNA, 24 nt, Human
auaagacugaaaaaaaaccacaua

SEQ ID NO: 1058094 - RNA, 19 nt, Human
auaauugacugccuuccua

SEQ ID NO: 1058095 - RNA, 23 nt, Human
auagagccagaggaaacuuaaaa

SEQ ID NO: 1058096 - RNA, 23 nt, Human
auugcuugggcccaggaguugga

SEQ ID NO: 1058097 - RNA, 25 nt, Human
caaaaaaaaaaaaccaaaaaccaaa

SEQ ID NO: 1058098 - RNA, 20 nt, Human
caaaaaccaaaaaacaaaac

SEQ ID NO: 1058099 - RNA, 25 nt, Human
caaaaaccaaaaaacaaaacuagcc

SEQ ID NO: 1058100 - RNA, 24 nt, Human
caacaaaaaaacuuugcgggcgca

SEQ ID NO: 1058101 - RNA, 26 nt, Human
caacuuaaaaaaaaaacaacaaaaaa

SEQ ID NO: 1058102 - RNA, 23 nt, Human
caagucucaucuagaccuuuagc

SEQ ID NO: 1058103 - RNA, 25 nt, Human
caagugagagugagccaaagcuucc

SEQ ID NO: 1058104 - RNA, 24 nt, Human
caccaagauccccucuucaaguga

SEQ ID NO: 1058105 - RNA, 22 nt, Human
cagaacaccagcuauaagacug

SEQ ID NO: 1058106 - RNA, 24 nt, Human
cagaauggaaggcaaaaaaagaca

SEQ ID NO: 1058107 - RNA, 19 nt, Human
cagucuucccuuuucccua

SEQ ID NO: 1058108 - RNA, 22 nt, Human
ccaaaaaccaaaaaacaaaacu

SEQ ID NO: 1058109 - RNA, 23 nt, Human
ccaaauaacauaucaauacccaa

SEQ ID NO: 1058110 - RNA, 24 nt, Human
ccaaaugaucuaaauuuauacgac

SEQ ID NO: 1058111 - RNA, 18 nt, Human
ccaagucucaucuagacc

SEQ ID NO: 1058112 - RNA, 23 nt, Human
ccagcuauaagacugaaaaaaaa

SEQ ID NO: 1058113 - RNA, 23 nt, Human
cccaaugguaagacuucugauga

SEQ ID NO: 1058114 - RNA, 28 nt, Human
cccgccuguaaaaaacaaccaaccaacc

SEQ ID NO: 1058115 - RNA, 24 nt, Human
cccuaccauuuccuuuuuccacaa

SEQ ID NO: 1058116 - RNA, 19 nt, Human
ccgcuuaaaaaccagccuu

SEQ ID NO: 1058117 - RNA, 21 nt, Human
ccuagcuacuuggcaggcuga

SEQ ID NO: 1058118 - RNA, 19 nt, Human
ccugcaggugacugagcug

SEQ ID NO: 1058119 - RNA, 22 nt, Human
ccuggcuacuugguaggcugag

SEQ ID NO: 1058120 - RNA, 27 nt, Human
ccuguaaaaaacaaccaaccaaccaaa

SEQ ID NO: 1058121 - RNA, 21 nt, Human
ccugugguccuggcuacuugg

SEQ ID NO: 1058122 - RNA, 24 nt, Human
ccuucaacuugagauucuuacuac

SEQ ID NO: 1058123 - RNA, 21 nt, Human
cgaugcuccuugccuuccaag

SEQ ID NO: 1058124 - RNA, 23 nt, Human
cgccuguaguccuagcuacuugg

SEQ ID NO: 1058125 - RNA, 24 nt, Human
cuaaaaggaaaaaaacaaaacaaa

SEQ ID NO: 1058126 - RNA, 24 nt, Human
cuccccaaagcccuucaacuugag

SEQ ID NO: 1058127 - RNA, 18 nt, Human
cuuuccaccacuccacug

SEQ ID NO: 1058128 - RNA, 22 nt, Human
cuuugcgggcguuucccucuca

SEQ ID NO: 1058129 - RNA, 22 nt, Human
gagagaauacuuauguuaagug

SEQ ID NO: 1058130 - RNA, 19 nt, Human
gagaugcucccgcuuaaaa

SEQ ID NO: 1058131 - RNA, 21 nt, Human
gaggugggaggaucacuugag

SEQ ID NO: 1058132 - RNA, 24 nt, Human
gauugcuugggcccaggaguugga

SEQ ID NO: 1058133 - RNA, 20 nt, Human
gcaauaaaaaaacacacaga

SEQ ID NO: 1058134 - RNA, 23 nt, Human
gccccugcaaauggggaugagaa

SEQ ID NO: 1058135 - RNA, 23 nt, Human
gcuacuugguaggcugagguggg

SEQ ID NO: 1058136 - RNA, 19 nt, Human
gcuccccaaagcccuucaa

SEQ ID NO: 1058137 - RNA, 22 nt, Human
gcucugggagaacauccaguuc

SEQ ID NO: 1058138 - RNA, 22 nt, Human
ggaguuggaggucagccugggc

SEQ ID NO: 1058139 - RNA, 24 nt, Human
ggcgcaguggugaacgccuguagu

SEQ ID NO: 1058140 - RNA, 20 nt, Human
gggcgcaguggugaacgccc

SEQ ID NO: 1058141 - RNA, 24 nt, Human
gggcgcaguggugaacgccuguag

SEQ ID NO: 1058142 - RNA, 25 nt, Human
gguccuggcuacuugguaggcugag

SEQ ID NO: 1058143 - RNA, 22 nt, Human
gguuuccugugguguggcuaau

SEQ ID NO: 1058144 - RNA, 18 nt, Human
guaaaaaacaaccaacca

SEQ ID NO: 1058145 - RNA, 18 nt, Human
guaaaggcugguggaaua

SEQ ID NO: 1058146 - RNA, 24 nt, Human
guccuggcuacuugguaggcugag

SEQ ID NO: 1058147 - RNA, 20 nt, Human
guggugaacgccuguagucc

SEQ ID NO: 1058148 - RNA, 21 nt, Human
uaaaaaaacacacagagagua

SEQ ID NO: 1058149 - RNA, 19 nt, Human
uaaaaaacaaccaaccaac

SEQ ID NO: 1058150 - RNA, 21 nt, Human
uaaaaaacaaccaaccaacca

SEQ ID NO: 1058151 - RNA, 24 nt, Human
uaaaaaacaaccaaccaaccaaaa

SEQ ID NO: 1058152 - RNA, 23 nt, Human
uaaacauguuuugauaaaggcca

SEQ ID NO: 1058153 - RNA, 23 nt, Human
uaacagauacaaagaauaggaaa

SEQ ID NO: 1058154 - RNA, 23 nt, Human
uaacauaucaauacccaacugcc

SEQ ID NO: 1058155 - RNA, 24 nt, Human
uaacauaucaauacccaacugccu

SEQ ID NO: 1058156 - RNA, 20 nt, Human
uaacuaagagcacugacaca

SEQ ID NO: 1058157 - RNA, 21 nt, Human
uaacuaagagcacugacacaa

SEQ ID NO: 1058158 - RNA, 19 nt, Human
uaacuuuccaccacuccac

SEQ ID NO: 1058159 - RNA, 19 nt, Human
uaagacugaaaaaaaaccc

SEQ ID NO: 1058160 - RNA, 19 nt, Human
uaauugacugccuuccuaa

SEQ ID NO: 1058161 - RNA, 19 nt, Human
uacaauauauacuuagugg

SEQ ID NO: 1058162 - RNA, 23 nt, Human
uacaguccaaguacuacaacacc

SEQ ID NO: 1058163 - RNA, 21 nt, Human
uaccauuaagaugaaaauaac

SEQ ID NO: 1058164 - RNA, 23 nt, Human
uacuacacaauuccuguuauaga

SEQ ID NO: 1058165 - RNA, 18 nt, Human
uacuguaguaggcauuua

SEQ ID NO: 1058166 - RNA, 22 nt, Human
uacuguaguaggcauuuaacac

SEQ ID NO: 1058167 - RNA, 18 nt, Human
uacuucagaagcagaaag

SEQ ID NO: 1058168 - RNA, 23 nt, Human
uacuugguaggcugaggugggag

SEQ ID NO: 1058169 - RNA, 20 nt, Human
uagaauuaucuauaauguaa

SEQ ID NO: 1058170 - RNA, 25 nt, Human
uagcuagcaauaaaaaaacacacag

SEQ ID NO: 1058171 - RNA, 22 nt, Human
uaggugacugcgcucugggaga

SEQ ID NO: 1058172 - RNA, 20 nt, Human
uaguaucaucucaagucaau

SEQ ID NO: 1058173 - RNA, 20 nt, Human
uaucacaguaccaauuuucc

SEQ ID NO: 1058174 - RNA, 24 nt, Human
uauuuuauaacuucaaccuaaacc

SEQ ID NO: 1058175 - RNA, 20 nt, Human
ucauaacauuccauaccuaa

SEQ ID NO: 1058176 - RNA, 22 nt, Human
ucauuuuacgaauaaagaaaca

SEQ ID NO: 1058177 - RNA, 23 nt, Human
uccacaaaauacaagauacuaca

SEQ ID NO: 1058178 - RNA, 21 nt, Human
uccauaauugacugccuuccu

SEQ ID NO: 1058179 - RNA, 24 nt, Human
ucuagccuggacaauauagugaga

SEQ ID NO: 1058180 - RNA, 19 nt, Human
ucuugcuugaaaggguccu

SEQ ID NO: 1058181 - RNA, 24 nt, Human
ugaaaaaaaaccacauaggcccau

SEQ ID NO: 1058182 - RNA, 28 nt, Human
ugacuaaauccaaaacauaucacaugaa

SEQ ID NO: 1058183 - RNA, 22 nt, Human
ugagaaagggguggguauggga

SEQ ID NO: 1058184 - RNA, 25 nt, Human
ugagaccaaacaggucacauuaaau

SEQ ID NO: 1058185 - RNA, 22 nt, Human
ugaggcaggauugcuugggccc

SEQ ID NO: 1058186 - RNA, 19 nt, Human
ugaggugggaggaucacuu

SEQ ID NO: 1058187 - RNA, 21 nt, Human
ugaggugggaggaucacuuga

SEQ ID NO: 1058188 - RNA, 22 nt, Human
ugaggugggaggaucacuugag

SEQ ID NO: 1058189 - RNA, 23 nt, Human
ugaggugggaggaucacuugagc

SEQ ID NO: 1058190 - RNA, 21 nt, Human
ugccaugaaugagagcaccaa

SEQ ID NO: 1058191 - RNA, 26 nt, Human
ugccaugaaugagagcaccaaauaac

SEQ ID NO: 1058192 - RNA, 18 nt, Human
ugccuaaaguccugcagg

SEQ ID NO: 1058193 - RNA, 22 nt, Human
ugcuggagacuucauugcaugc

SEQ ID NO: 1058194 - RNA, 20 nt, Human
uggaaugccaaaagauguuc

SEQ ID NO: 1058195 - RNA, 21 nt, Human
uggcaggcugaggcaggauug

SEQ ID NO: 1058196 - RNA, 19 nt, Human
uggcuaaaaggaaaaaaac

SEQ ID NO: 1058197 - RNA, 18 nt, Human
ugggauuacaagaacaaa

SEQ ID NO: 1058198 - RNA, 23 nt, Human
ugggcccaggaguuggaggucag

SEQ ID NO: 1058199 - RNA, 20 nt, Human
uggggaugagaaaggggugg

SEQ ID NO: 1058200 - RNA, 24 nt, Human
ugguaggcugaggugggaggauca

SEQ ID NO: 1058201 - RNA, 19 nt, Human
uggugaacgccuguagucc

SEQ ID NO: 1058202 - RNA, 24 nt, Human
ugguggugcacuugccuguggucc

SEQ ID NO: 1058203 - RNA, 20 nt, Human
uguccugaucaccaccuccc

SEQ ID NO: 1058204 - RNA, 19 nt, Human
uuaaccagucuucccuuuu

SEQ ID NO: 1058205 - RNA, 19 nt, Human
uuaaguucaagccuaugcu

SEQ ID NO: 1058206 - RNA, 22 nt, Human
uuacaagaacaaaagauggcua

SEQ ID NO: 1058207 - RNA, 24 nt, Human
uuacaagaacaaaagauggcuaaa

SEQ ID NO: 1058208 - RNA, 18 nt, Human
uuacacagaugugacuua

SEQ ID NO: 1058209 - RNA, 21 nt, Human
uuagaaaauucuucuagccug

SEQ ID NO: 1058210 - RNA, 22 nt, Human
uuccaagucucaucuagaccuu

SEQ ID NO: 1058211 - RNA, 23 nt, Human
uucuacucaucauuaaccagucu

SEQ ID NO: 1058212 - RNA, 24 nt, Human
uugcuugggcccaggaguuggagg

SEQ ID NO: 1058213 - RNA, 19 nt, Human
uuggcaggcugaggcagga

SEQ ID NO: 1058214 - RNA, 25 nt, Human
uugguaggcugaggugggaggauca

SEQ ID NO: 1058215 - RNA, 22 nt, Human
uuuauaacuucaaccuaaaccu

SEQ ID NO: 1058216 - RNA, 24 nt, Human
uuuuccacaaaauacaagauacua

SEQ ID NO: 1058217 - RNA, 21 nt, Human
aagcuggguccggcgccuggc

SEQ ID NO: 1058218 - RNA, 25 nt, Human
auguguuuucuucccuccaagauuu

SEQ ID NO: 1058219 - RNA, 22 nt, Human
cagcagcucugaagcugggucc

SEQ ID NO: 1058220 - RNA, 19 nt, Human
ccccuucccggaggcaggg

SEQ ID NO: 1058221 - RNA, 21 nt, Human
ccccuucccggaggcagggug

SEQ ID NO: 1058222 - RNA, 21 nt, Human
ccgcccugcacccuacccacc

SEQ ID NO: 1058223 - RNA, 18 nt, Human
ccgccuccgcacgcggcc

SEQ ID NO: 1058224 - RNA, 18 nt, Human
cgcccugcacccuaccca

SEQ ID NO: 1058225 - RNA, 24 nt, Human
cggcguccgccuccgcacgcggcc

SEQ ID NO: 1058226 - RNA, 18 nt, Human
cggcugcgccggccgccc

SEQ ID NO: 1058227 - RNA, 21 nt, Human
cugaagcuggguccggcgccu

SEQ ID NO: 1058228 - RNA, 19 nt, Human
gccccuucccggaggcagg

SEQ ID NO: 1058229 - RNA, 26 nt, Human
ggcacuggcugggcgcggcguccgcc

SEQ ID NO: 1058230 - RNA, 18 nt, Human
uguguuuucuucccucca

SEQ ID NO: 1058231 - RNA, 22 nt, Human
acccagaguccucagagaggcc

SEQ ID NO: 1058232 - RNA, 20 nt, Human
agaaauugcaccucccacuu

SEQ ID NO: 1058233 - RNA, 24 nt, Human
agaauuuccccagcccagccuaau

SEQ ID NO: 1058234 - RNA, 20 nt, Human
agagaggccagauggcagcu

SEQ ID NO: 1058235 - RNA, 18 nt, Human
caaggacagccaccagga

SEQ ID NO: 1058236 - RNA, 19 nt, Human
cagaguccucagagaggcc

SEQ ID NO: 1058237 - RNA, 21 nt, Human
cagccaccaggaaaucuccag

SEQ ID NO: 1058238 - RNA, 22 nt, Human
cagccaccaggaaaucuccagc

SEQ ID NO: 1058239 - RNA, 21 nt, Human
ccagaguccucagagaggcca

SEQ ID NO: 1058240 - RNA, 25 nt, Human
cccacuuccccuuuccccccuugaa

SEQ ID NO: 1058241 - RNA, 23 nt, Human
ccccagcccagccuaauuuuuac

SEQ ID NO: 1058242 - RNA, 23 nt, Human
ccccuuuccccccuugaaugauc

SEQ ID NO: 1058243 - RNA, 25 nt, Human
cucaccucuguggaaacucccaaaa

SEQ ID NO: 1058244 - RNA, 25 nt, Human
cuccagcugggccugcuuucucuuc

SEQ ID NO: 1058245 - RNA, 24 nt, Human
cucucaccucuguggaaacuccca

SEQ ID NO: 1058246 - RNA, 23 nt, Human
cugcuuucucuucccugcuuccu

SEQ ID NO: 1058247 - RNA, 21 nt, Human
cuguggaaacucccaaagucu

SEQ ID NO: 1058248 - RNA, 19 nt, Human
gagaagggggaggguggug

SEQ ID NO: 1058249 - RNA, 18 nt, Human
gagccaccaaugccuucc

SEQ ID NO: 1058250 - RNA, 24 nt, Human
gcugggccugcuuucucuucccug

SEQ ID NO: 1058251 - RNA, 24 nt, Human
gggccaaggacagccaccaggaaa

SEQ ID NO: 1058252 - RNA, 18 nt, Human
guggaaacucccaaaguc

SEQ ID NO: 1058253 - RNA, 23 nt, Human
guuaaaauugagccaccaaugcc

SEQ ID NO: 1058254 - RNA, 21 nt, Human
uaccaaucugagaaauugcac

SEQ ID NO: 1058255 - RNA, 19 nt, Human
ucagagaggccagauggca

SEQ ID NO: 1058256 - RNA, 20 nt, Human
ucagagaggccagauggcag

SEQ ID NO: 1058257 - RNA, 18 nt, Human
ucccacuuccccuuuccc

SEQ ID NO: 1058258 - RNA, 19 nt, Human
uccccagcccagccuaauu

SEQ ID NO: 1058259 - RNA, 26 nt, Human
uccccuuuccccccuugaaugaucuc

SEQ ID NO: 1058260 - RNA, 21 nt, Human
ucccugagcugagcauugugu

SEQ ID NO: 1058261 - RNA, 21 nt, Human
uccggaggagaauuuccccag

SEQ ID NO: 1058262 - RNA, 20 nt, Human
uccuacagagaagggggagg

SEQ ID NO: 1058263 - RNA, 22 nt, Human
ucugagaaauugcaccucccac

SEQ ID NO: 1058264 - RNA, 18 nt, Human
ucugucaggcugccugga

SEQ ID NO: 1058265 - RNA, 21 nt, Human
ucuguggaaacucccaaaguc

SEQ ID NO: 1058266 - RNA, 22 nt, Human
ugcuccuugugggcucacccug

SEQ ID NO: 1058267 - RNA, 21 nt, Human
uggggccaaggacagccacca

SEQ ID NO: 1058268 - RNA, 22 nt, Human
ugggguuaaaauugagccacca

SEQ ID NO: 1058269 - RNA, 22 nt, Human
ugguggaugaaaaagugaaauu

SEQ ID NO: 1058270 - RNA, 23 nt, Human
uuacaacauagaacaccacgguu

SEQ ID NO: 1058271 - RNA, 20 nt, Human
uucccacccgacucucaccu

SEQ ID NO: 1058272 - RNA, 21 nt, Human
aaacaaaaaccgaucagaaaa

SEQ ID NO: 1058273 - RNA, 22 nt, Human
aagagggaccauaggcgcggug

SEQ ID NO: 1058274 - RNA, 22 nt, Human
aagcagaggugaccaaacgcca

SEQ ID NO: 1058275 - RNA, 20 nt, Human
aagcaggaaacaaaaaccga

SEQ ID NO: 1058276 - RNA, 23 nt, Human
aagcaggaaacaaaaaccgauca

SEQ ID NO: 1058277 - RNA, 26 nt, Human
aagcaggaaacaaaaaccgaucagaa

SEQ ID NO: 1058278 - RNA, 19 nt, Human
acaaaaaccgaucagaaaa

SEQ ID NO: 1058279 - RNA, 24 nt, Human
acaaaaaccgaucagaaaacaccg

SEQ ID NO: 1058280 - RNA, 19 nt, Human
acaaaguaauaaauuuggc

SEQ ID NO: 1058281 - RNA, 18 nt, Human
acgcuggcuccaagaggg

SEQ ID NO: 1058282 - RNA, 21 nt, Human
agaaaacaccguuuuauagua

SEQ ID NO: 1058283 - RNA, 27 nt, Human
agauauaauaaaaggauaccgguaccc

SEQ ID NO: 1058284 - RNA, 19 nt, Human
agguggcagaagcuacagc

SEQ ID NO: 1058285 - RNA, 21 nt, Human
agguggcagaagcuacagcag

SEQ ID NO: 1058286 - RNA, 22 nt, Human
augaagcagaggugaccaaacg

SEQ ID NO: 1058287 - RNA, 22 nt, Human
caaaaauaauuagcauuaacug

SEQ ID NO: 1058288 - RNA, 19 nt, Human
caggaaacaaaaaccgauc

SEQ ID NO: 1058289 - RNA, 22 nt, Human
cccgccacgcuggcuccaagag

SEQ ID NO: 1058290 - RNA, 24 nt, Human
cgcuggcuccaagagggaccauag

SEQ ID NO: 1058291 - RNA, 25 nt, Human
cuacagcaguggcagcugcccggag

SEQ ID NO: 1058292 - RNA, 18 nt, Human
gaaacaaaaaccgaucag

SEQ ID NO: 1058293 - RNA, 24 nt, Human
gcaggaaacaaaaaccgaucagaa

SEQ ID NO: 1058294 - RNA, 18 nt, Human
gcuggcuccaagagggac

SEQ ID NO: 1058295 - RNA, 19 nt, Human
ggagccgccaggcccgcca

SEQ ID NO: 1058296 - RNA, 21 nt, Human
gggagaggcccggucguggca

SEQ ID NO: 1058297 - RNA, 21 nt, Human
guaauaaauuuggcuucuuuu

SEQ ID NO: 1058298 - RNA, 22 nt, Human
uaaaauauauguaacuuaaaua

SEQ ID NO: 1058299 - RNA, 18 nt, Human
uaacagaguacuucuaua

SEQ ID NO: 1058300 - RNA, 21 nt, Human
uaagcaggaaacaaaaaccga

SEQ ID NO: 1058301 - RNA, 21 nt, Human
uagaaagauaaaguucuuuca

SEQ ID NO: 1058302 - RNA, 22 nt, Human
uagcucuuuaacauaugacauc

SEQ ID NO: 1058303 - RNA, 24 nt, Human
uauuuuaaaaaccccaacacaaag

SEQ ID NO: 1058304 - RNA, 21 nt, Human
ucagaaaacaccguuuuauag

SEQ ID NO: 1058305 - RNA, 22 nt, Human
ucauuguagaaagauaaaguuu

SEQ ID NO: 1058306 - RNA, 22 nt, Human
uccccaacaucucugagcccau

SEQ ID NO: 1058307 - RNA, 19 nt, Human
ucucagcggccacugcugc

SEQ ID NO: 1058308 - RNA, 25 nt, Human
ugacaucagcaaaaauaauuagcau

SEQ ID NO: 1058309 - RNA, 23 nt, Human
ugcuaaggacgccuucgguugcu

SEQ ID NO: 1058310 - RNA, 20 nt, Human
uggcagaagcuacagcagug

SEQ ID NO: 1058311 - RNA, 21 nt, Human
uguaacuuaaauaccccccca

SEQ ID NO: 1058312 - RNA, 19 nt, Human
uuaaaaaccccaacacaaa

SEQ ID NO: 1058313 - RNA, 18 nt, Human
aagccgcccuggaagcug

SEQ ID NO: 1058314 - RNA, 24 nt, Human
cagagauccgggaaccagagcccc

SEQ ID NO: 1058315 - RNA, 25 nt, Human
caggcccccggacuccaagccgccc

SEQ ID NO: 1058316 - RNA, 22 nt, Human
cauagacucuggcugugcugcu

SEQ ID NO: 1058317 - RNA, 18 nt, Human
ccccgcggccaggccccc

SEQ ID NO: 1058318 - RNA, 20 nt, Human
ccccggacuccaagccgccc

SEQ ID NO: 1058319 - RNA, 21 nt, Human
ccccggacuccaagccgcccu

SEQ ID NO: 1058320 - RNA, 24 nt, Human
ccccggacuccaagccgcccugga

SEQ ID NO: 1058321 - RNA, 20 nt, Human
cccgcggccaggcccccgga

SEQ ID NO: 1058322 - RNA, 23 nt, Human
ccggcgccugcauagacucuggc

SEQ ID NO: 1058323 - RNA, 22 nt, Human
cgccuggacagagcccagggac

SEQ ID NO: 1058324 - RNA, 22 nt, Human
cgcggccaggcccccggacucc

SEQ ID NO: 1058325 - RNA, 19 nt, Human
cuccaagccgcccuggaag

SEQ ID NO: 1058326 - RNA, 21 nt, Human
gacacagagauccgggaacca

SEQ ID NO: 1058327 - RNA, 23 nt, Human
gccgcccuggaagcugguggagc

SEQ ID NO: 1058328 - RNA, 18 nt, Human
ggacagagcccagggacc

SEQ ID NO: 1058329 - RNA, 18 nt, Human
guagcuggucgccuggac

SEQ ID NO: 1058330 - RNA, 22 nt, Human
ugaccagccgggcgccguagcu

SEQ ID NO: 1058331 - RNA, 20 nt, Human
uggagcgggacacagagauc

SEQ ID NO: 1058332 - RNA, 19 nt, Human
gaggcgcuggaugcgcucg

SEQ ID NO: 1058333 - RNA, 18 nt, Human
gcagcaauucaugcacuu

SEQ ID NO: 1058334 - RNA, 22 nt, Human
gcucgggguccggggcgggcgc

SEQ ID NO: 1058335 - RNA, 18 nt, Human
uucaugcacuuuauuucu

SEQ ID NO: 1058336 - RNA, 21 nt, Human
aacccuugguaagaccagagg

SEQ ID NO: 1058337 - RNA, 19 nt, Human
aaccugacaguuucaaacu

SEQ ID NO: 1058338 - RNA, 21 nt, Human
aguuaaaaccaaaagacuucu

SEQ ID NO: 1058339 - RNA, 20 nt, Human
caaaagacuucuaacccuug

SEQ ID NO: 1058340 - RNA, 22 nt, Human
caaagcaugguagagcuugaaa

SEQ ID NO: 1058341 - RNA, 24 nt, Human
caauauggaaaaguuaaaaccaaa

SEQ ID NO: 1058342 - RNA, 23 nt, Human
cacaaccgcuaccuagacggcaa

SEQ ID NO: 1058343 - RNA, 21 nt, Human
cagccucagcaagcacaaccg

SEQ ID NO: 1058344 - RNA, 20 nt, Human
ccccacuauggacauauuca

SEQ ID NO: 1058345 - RNA, 24 nt, Human
cgaccaaaucccgacuccucgcuc

SEQ ID NO: 1058346 - RNA, 22 nt, Human
cgcgaccaaaucccgacuccuc

SEQ ID NO: 1058347 - RNA, 18 nt, Human
cuuguaauuuugaacaga

SEQ ID NO: 1058348 - RNA, 19 nt, Human
gaggaauuaaggaccgccc

SEQ ID NO: 1058349 - RNA, 26 nt, Human
gagggauuaaaagaccccacuaugga

SEQ ID NO: 1058350 - RNA, 20 nt, Human
uaaaagaccccacuauggac

SEQ ID NO: 1058351 - RNA, 19 nt, Human
ucgcagcugcagugucagc

SEQ ID NO: 1058352 - RNA, 22 nt, Human
ucgcucugcgccucuuagccgc

SEQ ID NO: 1058353 - RNA, 20 nt, Human
ucuacauauaguuacaaagc

SEQ ID NO: 1058354 - RNA, 19 nt, Human
ugaacagaugaacaugaug

SEQ ID NO: 1058355 - RNA, 24 nt, Human
uuaaaaccaaaagacuucuaaccc

SEQ ID NO: 1058356 - RNA, 25 nt, Human
aaacaaguccaaaacaacuuuacca

SEQ ID NO: 1058357 - RNA, 19 nt, Human
aggcauccgcauuuuucuu

SEQ ID NO: 1058358 - RNA, 21 nt, Human
auaaaacuucaugcugagcaa

SEQ ID NO: 1058359 - RNA, 18 nt, Human
caaaacaacuuuaccaua

SEQ ID NO: 1058360 - RNA, 22 nt, Human
caaguccaaaacaacuuuacca

SEQ ID NO: 1058361 - RNA, 22 nt, Human
caugaucuauacucuaauguuc

SEQ ID NO: 1058362 - RNA, 24 nt, Human
cccaaaggcacccuucauuucaca

SEQ ID NO: 1058363 - RNA, 23 nt, Human
gagcaaaaacaaguccaaaacaa

SEQ ID NO: 1058364 - RNA, 18 nt, Human
gcggagccgagcgcacgc

SEQ ID NO: 1058365 - RNA, 23 nt, Human
uauauccauagaauaguucccac

SEQ ID NO: 1058366 - RNA, 23 nt, Human
uaucaaaagaaaaaguuaauuuu

SEQ ID NO: 1058367 - RNA, 20 nt, Human
uauggaauuaguaaaaugca

SEQ ID NO: 1058368 - RNA, 25 nt, Human
uccacagaaugcaggaaaaaaagca

SEQ ID NO: 1058369 - RNA, 20 nt, Human
ugagcaaaaacaaguccaaa

SEQ ID NO: 1058370 - RNA, 22 nt, Human
ugagcaaaaacaaguccaaaac

SEQ ID NO: 1058371 - RNA, 21 nt, Human
uguaggcauccgcauuuuucu

SEQ ID NO: 1058372 - RNA, 20 nt, Human
uuccccaaaggcacccuuca

SEQ ID NO: 1058373 - RNA, 21 nt, Human
uuuuuuuuuuuuuuuuuauuu

SEQ ID NO: 1058374 - RNA, 18 nt, Human
acaaggaaaacauggaac

SEQ ID NO: 1058375 - RNA, 21 nt, Human
aggcaugggagggaacaagga

SEQ ID NO: 1058376 - RNA, 25 nt, Human
cgagcaaaugggguggaaggguguu

SEQ ID NO: 1058377 - RNA, 19 nt, Human
gaacaaggaaaacauggaa

SEQ ID NO: 1058378 - RNA, 22 nt, Human
gagggaacaaggaaaacaugga

SEQ ID NO: 1058379 - RNA, 19 nt, Human
gggaacaaggaaaacaugg

SEQ ID NO: 1058380 - RNA, 21 nt, Human
ggugguuaagauaaaacacaa

SEQ ID NO: 1058381 - RNA, 22 nt, Human
uaacucugcaauccagcuaggc

SEQ ID NO: 1058382 - RNA, 19 nt, Human
uaagauaaaacacaaguca

SEQ ID NO: 1058383 - RNA, 19 nt, Human
ugggagggaacaaggaaaa

SEQ ID NO: 1058384 - RNA, 19 nt, Human
aaacaggaaaacaaauuug

SEQ ID NO: 1058385 - RNA, 18 nt, Human
aaaugccaaagcauacaa

SEQ ID NO: 1058386 - RNA, 18 nt, Human
aagcaggaaaaaaaccaa

SEQ ID NO: 1058387 - RNA, 18 nt, Human
aagcaggaaaaaaaccaa

SEQ ID NO: 1058388 - RNA, 24 nt, Human
aagcaggaaaaaaaccaaacagga

SEQ ID NO: 1058389 - RNA, 22 nt, Human
aagcaucuauuuagaacagccc

SEQ ID NO: 1058390 - RNA, 21 nt, Human
aaucuuccuucuaaaccuggc

SEQ ID NO: 1058391 - RNA, 22 nt, Human
acaagcugcuuaaaccuaaaac

SEQ ID NO: 1058392 - RNA, 19 nt, Human
acaaucuuccuucuaaacc

SEQ ID NO: 1058393 - RNA, 23 nt, Human
acagccccaaaguaguaaugaaa

SEQ ID NO: 1058394 - RNA, 18 nt, Human
acucuaaaggaaaaggaa

SEQ ID NO: 1058395 - RNA, 19 nt, Human
agcaaaagcaggaaaaaaa

SEQ ID NO: 1058396 - RNA, 20 nt, Human
agcaaaagcaggaaaaaaac

SEQ ID NO: 1058397 - RNA, 21 nt, Human
agccgcucguagcccggcccc

SEQ ID NO: 1058398 - RNA, 23 nt, Human
aggaaaaaaaccaaacaggaaaa

SEQ ID NO: 1058399 - RNA, 23 nt, Human
aucacugcucaaaggcaaacacu

SEQ ID NO: 1058400 - RNA, 20 nt, Human
caaaauaaaaccaagaagcu

SEQ ID NO: 1058401 - RNA, 21 nt, Human
caaauacaaugccgcugcuca

SEQ ID NO: 1058402 - RNA, 23 nt, Human
cacugaagaauuauuucagguau

SEQ ID NO: 1058403 - RNA, 22 nt, Human
cagccccaaaguaguaaugaaa

SEQ ID NO: 1058404 - RNA, 23 nt, Human
caggaaaaaaaccaaacaggaaa

SEQ ID NO: 1058405 - RNA, 18 nt, Human
ccagcccgccgccucugg

SEQ ID NO: 1058406 - RNA, 20 nt, Human
ccccagcccgccgccucugc

SEQ ID NO: 1058407 - RNA, 18 nt, Human
ccgccgcgcacgguccug

SEQ ID NO: 1058408 - RNA, 21 nt, Human
ccgccgcgcacgguccugccc

SEQ ID NO: 1058409 - RNA, 18 nt, Human
ccgcucccuccccagccc

SEQ ID NO: 1058410 - RNA, 18 nt, Human
ccgcucccuccccagccc

SEQ ID NO: 1058411 - RNA, 23 nt, Human
ccucgugcuggcgccgcucccuc

SEQ ID NO: 1058412 - RNA, 22 nt, Human
ccuggcccucuuuuccugccuc

SEQ ID NO: 1058413 - RNA, 26 nt, Human
cgaggcaggcgcuggcuccccaaggg

SEQ ID NO: 1058414 - RNA, 21 nt, Human
cgagggcggcggcgaggcagg

SEQ ID NO: 1058415 - RNA, 21 nt, Human
cgccgcggccgccgcgcacgg

SEQ ID NO: 1058416 - RNA, 19 nt, Human
cguagcccggccccucggc

SEQ ID NO: 1058417 - RNA, 21 nt, Human
cucaaaggcaaacacugaaga

SEQ ID NO: 1058418 - RNA, 24 nt, Human
cucccagcacccgccgcggccgcc

SEQ ID NO: 1058419 - RNA, 24 nt, Human
gagcaaaagcaggaaaaaaaccaa

SEQ ID NO: 1058420 - RNA, 22 nt, Human
gcaggaaaaaaaccaaacagga

SEQ ID NO: 1058421 - RNA, 18 nt, Human
gcggcggcgaggcaggcg

SEQ ID NO: 1058422 - RNA, 19 nt, Human
ggccaagacggaguggcag

SEQ ID NO: 1058423 - RNA, 20 nt, Human
ggcggcggcgaggcaggcgc

SEQ ID NO: 1058424 - RNA, 22 nt, Human
gggcggcggcgaggcaggcgcu

SEQ ID NO: 1058425 - RNA, 19 nt, Human
uaaagcaucuauuuagaac

SEQ ID NO: 1058426 - RNA, 23 nt, Human
uaaaucaauuaaugccauguaga

SEQ ID NO: 1058427 - RNA, 23 nt, Human
uaccucaaguaauccugauucau

SEQ ID NO: 1058428 - RNA, 26 nt, Human
uagguguuacacuugaaccccugaag

SEQ ID NO: 1058429 - RNA, 23 nt, Human
uaguuugcuuuuuugcuccauca

SEQ ID NO: 1058430 - RNA, 19 nt, Human
uauaugcucuuaggcaauu

SEQ ID NO: 1058431 - RNA, 18 nt, Human
ucuaaaggaaaaggaaaa

SEQ ID NO: 1058432 - RNA, 18 nt, Human
ugaccauaacucuaaagg

SEQ ID NO: 1058433 - RNA, 18 nt, Human
ugcccugagugcaucugu

SEQ ID NO: 1058434 - RNA, 19 nt, Human
ugccgcugcucaugcccug

SEQ ID NO: 1058435 - RNA, 18 nt, Human
uggcucccagcacccgcc

SEQ ID NO: 1058436 - RNA, 22 nt, Human
ugggaaccucgugcuggcgccg

SEQ ID NO: 1058437 - RNA, 20 nt, Human
uguagaucaauaaauuacaa

SEQ ID NO: 1058438 - RNA, 24 nt, Human
uguauaucaaaauaaaaccaagaa

SEQ ID NO: 1058439 - RNA, 21 nt, Human
uguuacaaaaacucacacagc

SEQ ID NO: 1058440 - RNA, 21 nt, Human
uguuacacuugaaccuaugua

SEQ ID NO: 1058441 - RNA, 22 nt, Human
uucacaaacuaauagguauaau

SEQ ID NO: 1058442 - RNA, 22 nt, Human
uuuagaacagccccaaaguagu

SEQ ID NO: 1058443 - RNA, 20 nt, Human
uuuaucacauaaagcaucua

SEQ ID NO: 1058444 - RNA, 22 nt, Human
uuuuugcuccaucaguuaaaaa

SEQ ID NO: 1058445 - RNA, 23 nt, Human
cauucuuccucuucccacauugu

SEQ ID NO: 1058446 - RNA, 18 nt, Human
uguacugucacuuuacag

SEQ ID NO: 1058447 - RNA, 18 nt, Human
uuguacugucacuuuaca

SEQ ID NO: 1058448 - RNA, 19 nt, Human
uuugugacacucauucuuc

SEQ ID NO: 1058449 - RNA, 20 nt, Human
aaaacaaacaagucagagac

SEQ ID NO: 1058450 - RNA, 23 nt, Human
aaaaguaugcauuuuuucuaaau

SEQ ID NO: 1058451 - RNA, 21 nt, Human
aaaauacuuucaccacaauua

SEQ ID NO: 1058452 - RNA, 20 nt, Human
aaacaaacaagucagagaca

SEQ ID NO: 1058453 - RNA, 21 nt, Human
aagaagucagcacuugccugg

SEQ ID NO: 1058454 - RNA, 31 nt, Human
aaugcaguuaaacacacacacacacacacag

SEQ ID NO: 1058455 - RNA, 18 nt, Human
acaaacaagucagagaca

SEQ ID NO: 1058456 - RNA, 18 nt, Human
acacacaaaaccaagcaa

SEQ ID NO: 1058457 - RNA, 20 nt, Human
acacacacacacacacaaaa

SEQ ID NO: 1058458 - RNA, 23 nt, Human
acacacacacacacacacacaca

SEQ ID NO: 1058459 - RNA, 23 nt, Human
acacacacacacacacacacaca

SEQ ID NO: 1058460 - RNA, 23 nt, Human
acacacacacacacacacacaca

SEQ ID NO: 1058461 - RNA, 23 nt, Human
acacacacacacacacacacaca

SEQ ID NO: 1058462 - RNA, 23 nt, Human
acacacacacacacacacacaca

SEQ ID NO: 1058463 - RNA, 23 nt, Human
acacacacacacacacacacaca

SEQ ID NO: 1058464 - RNA, 23 nt, Human
acacacacacacacacacacaca

SEQ ID NO: 1058465 - RNA, 28 nt, Human
acacacacacacacacacacacaaaacc

SEQ ID NO: 1058466 - RNA, 19 nt, Human
acccuuuccaguguugugu

SEQ ID NO: 1058467 - RNA, 18 nt, Human
acugaagaaaugcaacug

SEQ ID NO: 1058468 - RNA, 18 nt, Human
agaggcacacagugcgcc

SEQ ID NO: 1058469 - RNA, 22 nt, Human
agaggcacacagugcgcccaga

SEQ ID NO: 1058470 - RNA, 24 nt, Human
agcagccccuccagggccuggagc

SEQ ID NO: 1058471 - RNA, 20 nt, Human
aggagcagcagccccuccag

SEQ ID NO: 1058472 - RNA, 20 nt, Human
auaaaaauacuuucaccaca

SEQ ID NO: 1058473 - RNA, 21 nt, Human
caaaaccaagcaauuauaagu

SEQ ID NO: 1058474 - RNA, 20 nt, Human
cacacacacacacacacaca

SEQ ID NO: 1058475 - RNA, 20 nt, Human
cacacacacacacacacaca

SEQ ID NO: 1058476 - RNA, 20 nt, Human
cacacacacacacacacaca

SEQ ID NO: 1058477 - RNA, 20 nt, Human
cacacacacacacacacaca

SEQ ID NO: 1058478 - RNA, 20 nt, Human
cacacacacacacacacaca

SEQ ID NO: 1058479 - RNA, 20 nt, Human
cacacacacacacacacaca

SEQ ID NO: 1058480 - RNA, 20 nt, Human
cacacacacacacacacaca

SEQ ID NO: 1058481 - RNA, 20 nt, Human
cacacacacacacacacaca

SEQ ID NO: 1058482 - RNA, 20 nt, Human
cacacacacacacacacaca

SEQ ID NO: 1058483 - RNA, 20 nt, Human
cacacacacacacacacaca

SEQ ID NO: 1058484 - RNA, 27 nt, Human
cacacacacacacacacacaaaaccaa

SEQ ID NO: 1058485 - RNA, 22 nt, Human
cacacacacacacacacacaca

SEQ ID NO: 1058486 - RNA, 22 nt, Human
cacacacacacacacacacaca

SEQ ID NO: 1058487 - RNA, 22 nt, Human
cacacacacacacacacacaca

SEQ ID NO: 1058488 - RNA, 22 nt, Human
cacacacacacacacacacaca

SEQ ID NO: 1058489 - RNA, 22 nt, Human
cacacacacacacacacacaca

SEQ ID NO: 1058490 - RNA, 22 nt, Human
cacacacacacacacacacaca

SEQ ID NO: 1058491 - RNA, 26 nt, Human
cacacacacacacacacacacacaca

SEQ ID NO: 1058492 - RNA, 22 nt, Human
cacacuccaggucccugggucu

SEQ ID NO: 1058493 - RNA, 23 nt, Human
caccacaauuacauuccagccug

SEQ ID NO: 1058494 - RNA, 21 nt, Human
cagaaccaacaaauacagaug

SEQ ID NO: 1058495 - RNA, 30 nt, Human
cagauuaaaaacaauauauaaacauaugaa

SEQ ID NO: 1058496 - RNA, 18 nt, Human
cagcccccagugcccugg

SEQ ID NO: 1058497 - RNA, 21 nt, Human
ccaccaaauggcaccuauccc

SEQ ID NO: 1058498 - RNA, 24 nt, Human
ccaccaaauggcaccuauccccuu

SEQ ID NO: 1058499 - RNA, 24 nt, Human
ccccaucuuaaaaugggaaucagc

SEQ ID NO: 1058500 - RNA, 23 nt, Human
cccccagugcccuggaagaacau

SEQ ID NO: 1058501 - RNA, 18 nt, Human
ccccuucugggcagaggc

SEQ ID NO: 1058502 - RNA, 24 nt, Human
ccccuucugggcagaggcacacag

SEQ ID NO: 1058503 - RNA, 19 nt, Human
ccuggagaagguguucuca

SEQ ID NO: 1058504 - RNA, 22 nt, Human
ccuugcuagaauauaagcucca

SEQ ID NO: 1058505 - RNA, 22 nt, Human
cgcucaaaugacagaaccaaca

SEQ ID NO: 1058506 - RNA, 23 nt, Human
cggcgaggcccccuucugggcag

SEQ ID NO: 1058507 - RNA, 23 nt, Human
cugaagaaaugcaacugaggagc

SEQ ID NO: 1058508 - RNA, 21 nt, Human
cugugcaaagcugcccuguag

SEQ ID NO: 1058509 - RNA, 23 nt, Human
gaacaucguagcugcaaaaaaug

SEQ ID NO: 1058510 - RNA, 23 nt, Human
gaaucagcuucuggaaaagcuaa

SEQ ID NO: 1058511 - RNA, 19 nt, Human
gagcagcagccccuccagg

SEQ ID NO: 1058512 - RNA, 18 nt, Human
gcaaagucuuuucuaagg

SEQ ID NO: 1058513 - RNA, 19 nt, Human
gcacacagugcgcccagag

SEQ ID NO: 1058514 - RNA, 21 nt, Human
gcagcagccccuccagggccu

SEQ ID NO: 1058515 - RNA, 33 nt, Human
gcaguuaaacacacacacacacacacacacagu

SEQ ID NO: 1058516 - RNA, 21 nt, Human
gcccuguagucauggagguga

SEQ ID NO: 1058517 - RNA, 19 nt, Human
gcuuuauaaaagcaaaguc

SEQ ID NO: 1058518 - RNA, 18 nt, Human
gggacuuccugcugugga

SEQ ID NO: 1058519 - RNA, 26 nt, Human
guuaaacacacacacacacacacaca

SEQ ID NO: 1058520 - RNA, 31 nt, Human; identical to SEQ ID NO: 995755

SEQ ID NO: 1058521 - RNA, 24 nt, Human
guuaaacacacacacacacacagg

SEQ ID NO: 1058522 - RNA, 24 nt, Human
uaaaaucaugcauauucuccauaa

SEQ ID NO: 1058523 - RNA, 22 nt, Human
uaacagagcaaaugaugagaga

SEQ ID NO: 1058524 - RNA, 23 nt, Human
uacccuguguuccuuuugcuuuu

SEQ ID NO: 1058525 - RNA, 25 nt, Human
uacccuguguuccuuuugcuuuuug

SEQ ID NO: 1058526 - RNA, 22 nt, Human
uagaauauaagcuccaugaggg

SEQ ID NO: 1058527 - RNA, 23 nt, Human
uauaagcuccaugagggugggau

SEQ ID NO: 1058528 - RNA, 18 nt, Human
uauauacacaacuuauau

SEQ ID NO: 1058529 - RNA, 19 nt, Human
uaucauauccaucuccccu

SEQ ID NO: 1058530 - RNA, 22 nt, Human
ucaaaacaaacaagucagagac

SEQ ID NO: 1058531 - RNA, 18 nt, Human
ucaaaugacagaaccaac

SEQ ID NO: 1058532 - RNA, 21 nt, Human
ucaaaugacagaaccaacaaa

SEQ ID NO: 1058533 - RNA, 24 nt, Human
ucaaggaaaugaaucuacugaaga

SEQ ID NO: 1058534 - RNA, 22 nt, Human
ucagacuucuaaaaagugcuaa

SEQ ID NO: 1058535 - RNA, 21 nt, Human
ucagcaauauaaaaauacuuu

SEQ ID NO: 1058536 - RNA, 18 nt, Human
ucagcuucuggaaaagcu

SEQ ID NO: 1058537 - RNA, 20 nt, Human
uccaucuccccuugcuagaa

SEQ ID NO: 1058538 - RNA, 21 nt, Human
ucccccaucuuaaaaugggaa

SEQ ID NO: 1058539 - RNA, 22 nt, Human
ucccccaucuuaaaaugggaau

SEQ ID NO: 1058540 - RNA, 20 nt, Human
ucccugggucuggccacaca

SEQ ID NO: 1058541 - RNA, 24 nt, Human
ucuaaaaccucaaaccuuaauuuu

SEQ ID NO: 1058542 - RNA, 24 nt, Human
ugcauauucuccauaaaacuuuuc

SEQ ID NO: 1058543 - RNA, 19 nt, Human
ugcccuguagucauggagg

SEQ ID NO: 1058544 - RNA, 21 nt, Human
uggaagaacaucguagcugca

SEQ ID NO: 1058545 - RNA, 23 nt, Human
uggaggugaacuggggacuuccu

SEQ ID NO: 1058546 - RNA, 19 nt, Human
ugggcagaggcacacagug

SEQ ID NO: 1058547 - RNA, 24 nt, Human
uuuagagagaagucacagccccca

SEQ ID NO: 1058548 - RNA, 25 nt, Human
aacaaccucuccacucuuccugcag

SEQ ID NO: 1058549 - RNA, 19 nt, Human
agccgaacugccggcgccc

SEQ ID NO: 1058550 - RNA, 21 nt, Human
caccagcagccgaacugccgg

SEQ ID NO: 1058551 - RNA, 22 nt, Human
caccagcagccgaacugccggc

SEQ ID NO: 1058552 - RNA, 22 nt, Human
cagcagccgaacugccggcgcc

SEQ ID NO: 1058553 - RNA, 21 nt, Human
ccgccgggaacaaccucucca

SEQ ID NO: 1058554 - RNA, 18 nt, Human
cgccagggccgcuccggg

SEQ ID NO: 1058555 - RNA, 23 nt, Human
cgggaacaaccucuccacucuuc

SEQ ID NO: 1058556 - RNA, 21 nt, Human
cuccccgccgggaacaaccuc

SEQ ID NO: 1058557 - RNA, 24 nt, Human
uccggccgggaugcggccgguacc

SEQ ID NO: 1058558 - RNA, 24 nt, Human
ugcggccgguacccgcuccccgcc

SEQ ID NO: 1058559 - RNA, 24 nt, Human
aaaauaauuaugauacauuuguac

SEQ ID NO: 1058560 - RNA, 19 nt, Human
aaaccccacaagcuuugga

SEQ ID NO: 1058561 - RNA, 24 nt, Human
acgccgcagagcugggcggaaggc

SEQ ID NO: 1058562 - RNA, 25 nt, Human
acgccgcagagcugggcggaaggcc

SEQ ID NO: 1058563 - RNA, 20 nt, Human
acuaaauuuaaaccccacaa

SEQ ID NO: 1058564 - RNA, 18 nt, Human
agcccucgcggccugcug

SEQ ID NO: 1058565 - RNA, 18 nt, Human
caaucuugaccaguucca

SEQ ID NO: 1058566 - RNA, 19 nt, Human
ccaguagguccgagacccg

SEQ ID NO: 1058567 - RNA, 24 nt, Human
ccgagacccgagcuuuauauagcc

SEQ ID NO: 1058568 - RNA, 19 nt, Human
ccucuccgccccucucccu

SEQ ID NO: 1058569 - RNA, 19 nt, Human
cugcugcacauugagaggu

SEQ ID NO: 1058570 - RNA, 21 nt, Human
ucgcugccucuccgccccucu

SEQ ID NO: 1058571 - RNA, 23 nt, Human
ucgcugccucuccgccccucucc

SEQ ID NO: 1058572 - RNA, 18 nt, Human
uggauauaaucaaaagua

SEQ ID NO: 1058573 - RNA, 24 nt, Human
acaggccgcgccgugacugauuug

SEQ ID NO: 1058574 - RNA, 22 nt, Human
acauacagcccaggaccucacg

SEQ ID NO: 1058575 - RNA, 27 nt, Human
auccgcacauacagcccaggaccucac

SEQ ID NO: 1058576 - RNA, 19 nt, Human
caguauccgcacauacagc

SEQ ID NO: 1058577 - RNA, 23 nt, Human
cgggcgcacacaguauccgcaca

SEQ ID NO: 1058578 - RNA, 22 nt, Human
cugcugggcuagucagcugcgu

SEQ ID NO: 1058579 - RNA, 22 nt, Human
gcugggcuagucagcugcgugc

SEQ ID NO: 1058580 - RNA, 21 nt, Human
ggcgcacacaguauccgcaca

SEQ ID NO: 1058581 - RNA, 18 nt, Human
gugacugauuugcgugca

SEQ ID NO: 1058582 - RNA, 21 nt, Human
uccgcacauacagcccaggac

SEQ ID NO: 1058583 - RNA, 22 nt, Human
uccgcacauacagcccaggacc

SEQ ID NO: 1058584 - RNA, 23 nt, Human
ugccgaucuuccacaggccgcgc

SEQ ID NO: 1058585 - RNA, 19 nt, Human
aacccaccucacagcuucu

SEQ ID NO: 1058586 - RNA, 22 nt, Human
caacccaccucacagcuucugc

SEQ ID NO: 1058587 - RNA, 26 nt, Human
caagccaggauccuugccaacccacc

SEQ ID NO: 1058588 - RNA, 18 nt, Human
cacagcuucugcccgggc

SEQ ID NO: 1058589 - RNA, 18 nt, Human
caggauccuugccaaccc

SEQ ID NO: 1058590 - RNA, 20 nt, Human
ccucacagcuucugcccggg

SEQ ID NO: 1058591 - RNA, 21 nt, Human
ccuugccaacccaccucacag

SEQ ID NO: 1058592 - RNA, 22 nt, Human
cuucugcccgggcuguggcucc

SEQ ID NO: 1058593 - RNA, 19 nt, Human
aaacucacaggucgacccc

SEQ ID NO: 1058594 - RNA, 21 nt, Human
cacucucucccgccuuugaga

SEQ ID NO: 1058595 - RNA, 22 nt, Human
cagaaacucacaggucgacccc

SEQ ID NO: 1058596 - RNA, 25 nt, Human
ccggcaucggcggcugcauccuucu

SEQ ID NO: 1058597 - RNA, 24 nt, Human
cgaccccaagacuccacucucucc

SEQ ID NO: 1058598 - RNA, 18 nt, Human
gcugcauccuucuccucc

SEQ ID NO: 1058599 - RNA, 20 nt, Human
ucacaggucgaccccaagac

SEQ ID NO: 1058600 - RNA, 24 nt, Human
ucacaggucgaccccaagacucca

SEQ ID NO: 1058601 - RNA, 18 nt, Human
ucggcggcugcauccuuc

SEQ ID NO: 1058602 - RNA, 21 nt, Human
ugagaagccggaccggcaucg

SEQ ID NO: 1058603 - RNA, 18 nt, Human
aacccugcaacucuuguc

SEQ ID NO: 1058604 - RNA, 18 nt, Human
aacucuugucuccucaaa

SEQ ID NO: 1058605 - RNA, 22 nt, Human
aagcaccugccaccaggaaaua

SEQ ID NO: 1058606 - RNA, 22 nt, Human
acucuugucuccucaaagcuga

SEQ ID NO: 1058607 - RNA, 25 nt, Human
acucuugucuccucaaagcugaaag

SEQ ID NO: 1058608 - RNA, 23 nt, Human
caccugccaccaggaaauaaucc

SEQ ID NO: 1058609 - RNA, 22 nt, Human
ccagugcccauacucucccaag

SEQ ID NO: 1058610 - RNA, 18 nt, Human
cccaaagagguaaucacc

SEQ ID NO: 1058611 - RNA, 24 nt, Human
cuaaacccugcaacucuugucucc

SEQ ID NO: 1058612 - RNA, 18 nt, Human
cugguccuaagaucuaaa

SEQ ID NO: 1058613 - RNA, 19 nt, Human
gaaagcaccugccaccagg

SEQ ID NO: 1058614 - RNA, 23 nt, Human
guccuaagaucuaaacccugcaa

SEQ ID NO: 1058615 - RNA, 21 nt, Human
uaaagucaggauucacacuca

SEQ ID NO: 1058616 - RNA, 18 nt, Human
ucuccucaaagcugaaag

SEQ ID NO: 1058617 - RNA, 26 nt, Human
ugccaccaggaaauaaucccaaagag

SEQ ID NO: 1058618 - RNA, 23 nt, Human
aagcaaaauuuaaaacacagcca

SEQ ID NO: 1058619 - RNA, 22 nt, Human
acacagaccggcuccugaaggc

SEQ ID NO: 1058620 - RNA, 18 nt, Human
acugaugaccagucagug

SEQ ID NO: 1058621 - RNA, 18 nt, Human
aguguuaagagagggaaa

SEQ ID NO: 1058622 - RNA, 24 nt, Human
auuaaugagaacaaggacaaggga

SEQ ID NO: 1058623 - RNA, 21 nt, Human
caagaguagcucauacacaag

SEQ ID NO: 1058624 - RNA, 23 nt, Human
caccacaauggagguuuuucuca

SEQ ID NO: 1058625 - RNA, 25 nt, Human
cagaccggcuccugaaggcugucga

SEQ ID NO: 1058626 - RNA, 19 nt, Human
caggucuccucagcagccc

SEQ ID NO: 1058627 - RNA, 25 nt, Human
cauacacaagucaacuauguguaug

SEQ ID NO: 1058628 - RNA, 20 nt, Human
ccaggauuagucccugcacc

SEQ ID NO: 1058629 - RNA, 19 nt, Human
ccuaaagaauguaauaaaa

SEQ ID NO: 1058630 - RNA, 18 nt, Human
ccucagcagcccccuugg

SEQ ID NO: 1058631 - RNA, 25 nt, Human
cucacuuuccacacugcauagccac

SEQ ID NO: 1058632 - RNA, 22 nt, Human
cucagcagcccccuugguuucu

SEQ ID NO: 1058633 - RNA, 19 nt, Human
cuucuuguuuugcuuuuga

SEQ ID NO: 1058634 - RNA, 19 nt, Human
gaacaacagucccuucacu

SEQ ID NO: 1058635 - RNA, 21 nt, Human
gauccucuggaacaacagucc

SEQ ID NO: 1058636 - RNA, 23 nt, Human
gcugucgagauuuacgaggagau

SEQ ID NO: 1058637 - RNA, 19 nt, Human
ggagaucgggguucucucc

SEQ ID NO: 1058638 - RNA, 19 nt, Human
ggucaaauccaccuuuagc

SEQ ID NO: 1058639 - RNA, 22 nt, Human
guauguuuuuauuauuuaaagc

SEQ ID NO: 1058640 - RNA, 23 nt, Human
uaaaaauggaaaacuuuuuuccu

SEQ ID NO: 1058641 - RNA, 21 nt, Human
uaaaacacagccaauuucaac

SEQ ID NO: 1058642 - RNA, 23 nt, Human
uaaagccacaugacugagguaaa

SEQ ID NO: 1058643 - RNA, 20 nt, Human
uaaagcccaccauucagcuu

SEQ ID NO: 1058644 - RNA, 19 nt, Human
uaauccaguccaaugacac

SEQ ID NO: 1058645 - RNA, 18 nt, Human
uaaugauacugaugacca

SEQ ID NO: 1058646 - RNA, 21 nt, Human
uauaauccaguccaaugacac

SEQ ID NO: 1058647 - RNA, 20 nt, Human
uauugccucugcccuaaaca

SEQ ID NO: 1058648 - RNA, 26 nt, Human
ucaucugucacgugugaccuguuuaa

SEQ ID NO: 1058649 - RNA, 26 nt, Human
uccaaugacacacauauaacuauuuc

SEQ ID NO: 1058650 - RNA, 24 nt, Human
uccucagcagcccccuugguuucu

SEQ ID NO: 1058651 - RNA, 19 nt, Human
ucuacaaauuuaaccagca

SEQ ID NO: 1058652 - RNA, 22 nt, Human
ucuauaauaacaagaauccaag

SEQ ID NO: 1058653 - RNA, 21 nt, Human
ucuccucaccacaauggaggu

SEQ ID NO: 1058654 - RNA, 21 nt, Human
ucuucuuguuuugcuuuugac

SEQ ID NO: 1058655 - RNA, 22 nt, Human
ugcaccaggucuccucagcagc

SEQ ID NO: 1058656 - RNA, 21 nt, Human
uggagguuuuucucacuuucc

SEQ ID NO: 1058657 - RNA, 21 nt, Human
uucaacuucaagacuucugac

SEQ ID NO: 1058658 - RNA, 23 nt, Human
uucaagacuucugacuuauugcc

SEQ ID NO: 1058659 - RNA, 22 nt, Human
uuccuaaagaauguaauaaaaa

SEQ ID NO: 1058660 - RNA, 21 nt, Human
uugguuucuucaucugucacg

SEQ ID NO: 1058661 - RNA, 22 nt, Human
uuguuuugcuuuugacaaaaua

SEQ ID NO: 1058662 - RNA, 19 nt, Human
uuugacaaaauaugaacua

SEQ ID NO: 1058663 - RNA, 24 nt, Human
uuuuuccuucuggcugaaguugga

SEQ ID NO: 1058664 - RNA, 20 nt, Human
aggcagguguuugugucucc

SEQ ID NO: 1058665 - RNA, 19 nt, Human
cucaaacuugaacaagggc

SEQ ID NO: 1058666 - RNA, 21 nt, Human
cuccucgcuuuaauccugagg

SEQ ID NO: 1058667 - RNA, 19 nt, Human
gagacggucugaaauacag

SEQ ID NO: 1058668 - RNA, 20 nt, Human
ggaugaggacacccagcugg

SEQ ID NO: 1058669 - RNA, 23 nt, Human
ucugaaauacagcuccucgcuuu

SEQ ID NO: 1058670 - RNA, 19 nt, Human
ugagacggucugaaauaca

SEQ ID NO: 1058671 - RNA, 19 nt, Human
ugaggcagguguuuguguc

SEQ ID NO: 1058672 - RNA, 24 nt, Human
ugucuuauccuucuuaaugccuca

SEQ ID NO: 1058673 - RNA, 22 nt, Human
aaagcaacagagacagaugauc

SEQ ID NO: 1058674 - RNA, 21 nt, Human
aacaaauaagcacaguacacu

SEQ ID NO: 1058675 - RNA, 20 nt, Human
aagggagcuggacccuaggg

SEQ ID NO: 1058676 - RNA, 21 nt, Human
acgggagguuucaagucccag

SEQ ID NO: 1058677 - RNA, 24 nt, Human
agaaaagaaagcuguggaagucac

SEQ ID NO: 1058678 - RNA, 22 nt, Human
agaugcuaaaagcaacagagac

SEQ ID NO: 1058679 - RNA, 20 nt, Human
agcuggacccuaggggcggg

SEQ ID NO: 1058680 - RNA, 20 nt, Human
caacagagacagaugauccc

SEQ ID NO: 1058681 - RNA, 23 nt, Human
ccuagaaaaugucuuguucucau

SEQ ID NO: 1058682 - RNA, 19 nt, Human
cucuuagaacaaauaagca

SEQ ID NO: 1058683 - RNA, 21 nt, Human
cuguagaaaagaaagcugugg

SEQ ID NO: 1058684 - RNA, 24 nt, Human
cuguauaaagaagcaauucuucuc

SEQ ID NO: 1058685 - RNA, 20 nt, Human
gaugcuaaaagcaacagaga

SEQ ID NO: 1058686 - RNA, 22 nt, Human
gcuccuaggugaagggagcugg

SEQ ID NO: 1058687 - RNA, 19 nt, Human
gcuggacccuaggggcggg

SEQ ID NO: 1058688 - RNA, 20 nt, Human
ggcaggaccuuggcuagagc

SEQ ID NO: 1058689 - RNA, 22 nt, Human
uaaaagcaacagagacagauga

SEQ ID NO: 1058690 - RNA, 22 nt, Human
uacacuauuguaaucuaagaaa

SEQ ID NO: 1058691 - RNA, 18 nt, Human
uccaauggcccauaagcc

SEQ ID NO: 1058692 - RNA, 19 nt, Human
ucccaacaccaacgggagg

SEQ ID NO: 1058693 - RNA, 18 nt, Human
ucucuuagaacaaauaag

SEQ ID NO: 1058694 - RNA, 23 nt, Human
ucugucggagcuguauaaagaag

SEQ ID NO: 1058695 - RNA, 21 nt, Human
uguagaaaagaaagcugugga

SEQ ID NO: 1058696 - RNA, 20 nt, Human
ugucuuguucucauaaaaag

SEQ ID NO: 1058697 - RNA, 22 nt, Human
uuuauugucuauacaacugaag

SEQ ID NO: 1058698 - RNA, 25 nt, Human
aaaaauauuuucccuuuccuaucuu

SEQ ID NO: 1058699 - RNA, 21 nt, Human
aaacacauuauacaaacuaca

SEQ ID NO: 1058700 - RNA, 19 nt, Human
aacauggugaaaccuuguc

SEQ ID NO: 1058701 - RNA, 20 nt, Human
aacauggugaaaccuugucu

SEQ ID NO: 1058702 - RNA, 21 nt, Human
aacauggugaaaccuugucuu

SEQ ID NO: 1058703 - RNA, 24 nt, Human
aacugaggucaggaguucgagacc

SEQ ID NO: 1058704 - RNA, 20 nt, Human
aagaaagaaaauaaucagaa

SEQ ID NO: 1058705 - RNA, 22 nt, Human
aagaaagaaaauaaucagaaau

SEQ ID NO: 1058706 - RNA, 18 nt, Human
aagccauucuccugccuc

SEQ ID NO: 1058707 - RNA, 21 nt, Human
aagccauucuccugccucagc

SEQ ID NO: 1058708 - RNA, 24 nt, Human
aauggugggugucuguaaucccag

SEQ ID NO: 1058709 - RNA, 19 nt, Human
aauugcuugaaccuggcgg

SEQ ID NO: 1058710 - RNA, 25 nt, Human
aauugcuugaaccuggcggggcgga

SEQ ID NO: 1058711 - RNA, 24 nt, Human
aauuuuguauuuuuaguaaaggcg

SEQ ID NO: 1058712 - RNA, 24 nt, Human
accuugucuuuacuaaaaauacaa

SEQ ID NO: 1058713 - RNA, 18 nt, Human
acuccacuccagccuggg

SEQ ID NO: 1058714 - RNA, 24 nt, Human
acuccacuccagccugggugagag

SEQ ID NO: 1058715 - RNA, 24 nt, Human
agagagagagacucugucucaaaa

SEQ ID NO: 1058716 - RNA, 24 nt, Human
agcacuuugggaggcugaggcagg

SEQ ID NO: 1058717 - RNA, 18 nt, Human
agcauauuuucuuccaaa

SEQ ID NO: 1058718 - RNA, 18 nt, Human
agccuccagaguaguugg

SEQ ID NO: 1058719 - RNA, 23 nt, Human
agccuggcuaacauggugaaacc

SEQ ID NO: 1058720 - RNA, 23 nt, Human
agccuggcuaacauggugaaacc

SEQ ID NO: 1058721 - RNA, 24 nt, Human
agccugggugagagagagagacuc

SEQ ID NO: 1058722 - RNA, 22 nt, Human
aggcaggagaauugcuugaacc

SEQ ID NO: 1058723 - RNA, 24 nt, Human
aggcaggagaauugcuugaaccug

SEQ ID NO: 1058724 - RNA, 26 nt, Human
aggcagguggaucaacugaggucagg

SEQ ID NO: 1058725 - RNA, 21 nt, Human
aggcugaggcaggagaauugc

SEQ ID NO: 1058726 - RNA, 24 nt, Human
aggcugaggcaggagaauugcuug

SEQ ID NO: 1058727 - RNA, 18 nt, Human
aggcugaggcagguggau

SEQ ID NO: 1058728 - RNA, 24 nt, Human
aggcugaggcagguggaucaacug

SEQ ID NO: 1058729 - RNA, 18 nt, Human
aguaguugggauuacagg

SEQ ID NO: 1058730 - RNA, 24 nt, Human
auagugccacuccacuccagccug

SEQ ID NO: 1058731 - RNA, 24 nt, Human
auauauauauuuaaacacauuaua

SEQ ID NO: 1058732 - RNA, 19 nt, Human
auuacaggugcaugccacc

SEQ ID NO: 1058733 - RNA, 23 nt, Human
auuauacaaacuacacgacauaa

SEQ ID NO: 1058734 - RNA, 22 nt, Human
caaaaauuagccaggcgcaaug

SEQ ID NO: 1058735 - RNA, 24 nt, Human
caaccuccaccuccuggguuuaag

SEQ ID NO: 1058736 - RNA, 22 nt, Human
caacugauuaauuuaaacugaa

SEQ ID NO: 1058737 - RNA, 24 nt, Human
cacaccugcaaucccagcacuuug

SEQ ID NO: 1058738 - RNA, 21 nt, Human
caccgcaaccuccaccuccug

SEQ ID NO: 1058739 - RNA, 23 nt, Human
caccgcaaccuccaccuccuggg

SEQ ID NO: 1058740 - RNA, 23 nt, Human
caccugcaaucccagcacuuugg

SEQ ID NO: 1058741 - RNA, 24 nt, Human
caccugcaaucccagcacuuuggg

SEQ ID NO: 1058742 - RNA, 24 nt, Human
cacgacauaaaggauauaaagaaa

SEQ ID NO: 1058743 - RNA, 19 nt, Human
cacuccacuccagccuggg

SEQ ID NO: 1058744 - RNA, 22 nt, Human
cacuccacuccagccuggguga

SEQ ID NO: 1058745 - RNA, 24 nt, Human
cacuccacuccagccugggugaga

SEQ ID NO: 1058746 - RNA, 18 nt, Human
cacuccagccugggugag

SEQ ID NO: 1058747 - RNA, 24 nt, Human
cagcacuuugggaggcugaggcag

SEQ ID NO: 1058748 - RNA, 26 nt, Human
cagcacuuugggaggcugaggcaggu

SEQ ID NO: 1058749 - RNA, 24 nt, Human
cagcuacucaggaggcugaggcag

SEQ ID NO: 1058750 - RNA, 24 nt, Human
cauauauauauauauuuaaacaca

SEQ ID NO: 1058751 - RNA, 24 nt, Human
caugccaccacgccuggcuaauuu

SEQ ID NO: 1058752 - RNA, 21 nt, Human
cauuauacaaacuacacgaca

SEQ ID NO: 1058753 - RNA, 18 nt, Human
cauuucuaggcugggcgu

SEQ ID NO: 1058754 - RNA, 20 nt, Human
ccacuccacuccagccuggg

SEQ ID NO: 1058755 - RNA, 21 nt, Human
ccacuccacuccagccugggu

SEQ ID NO: 1058756 - RNA, 21 nt, Human
ccacuccacuccagccugggu

SEQ ID NO: 1058757 - RNA, 23 nt, Human
ccacuccacuccagccuggguga

SEQ ID NO: 1058758 - RNA, 19 nt, Human
ccagaguaguugggauuac

SEQ ID NO: 1058759 - RNA, 22 nt, Human
ccagaguaguugggauuacagg

SEQ ID NO: 1058760 - RNA, 23 nt, Human
ccagaguaguugggauuacaggu

SEQ ID NO: 1058761 - RNA, 24 nt, Human
ccagaguaguugggauuacaggug

SEQ ID NO: 1058762 - RNA, 19 nt, Human
ccauauuggucaggcuggu

SEQ ID NO: 1058763 - RNA, 22 nt, Human
ccauauuggucaggcuggucuc

SEQ ID NO: 1058764 - RNA, 18 nt, Human
ccgcaaccuccaccuccu

SEQ ID NO: 1058765 - RNA, 23 nt, Human
ccgcaaccuccaccuccuggguu

SEQ ID NO: 1058766 - RNA, 24 nt, Human
ccgcaaccuccaccuccuggguuu

SEQ ID NO: 1058767 - RNA, 22 nt, Human
ccuaauuuacagcagcauauuu

SEQ ID NO: 1058768 - RNA, 21 nt, Human
ccuggcuaacauggugaaacc

SEQ ID NO: 1058769 - RNA, 24 nt, Human
ccuggcuaacauggugaaaccuug

SEQ ID NO: 1058770 - RNA, 20 nt, Human
cgacauaaaggauauaaaga

SEQ ID NO: 1058771 - RNA, 24 nt, Human
cgagaccagccuggcuaacauggu

SEQ ID NO: 1058772 - RNA, 23 nt, Human
cgcaauggugggugucuguaauc

SEQ ID NO: 1058773 - RNA, 24 nt, Human
cgcucuuguugcccaggcuggagu

SEQ ID NO: 1058774 - RNA, 24 nt, Human
cuaggcugggcgugguggcucaca

SEQ ID NO: 1058775 - RNA, 22 nt, Human
cucacaccugcaaucccagcac

SEQ ID NO: 1058776 - RNA, 24 nt, Human
cucacaccugcaaucccagcacuu

SEQ ID NO: 1058777 - RNA, 24 nt, Human
cucaccgcaaccuccaccuccugg

SEQ ID NO: 1058778 - RNA, 21 nt, Human
cugccucagccuccagaguag

SEQ ID NO: 1058779 - RNA, 24 nt, Human
cuggcuaacauggugaaaccuugu

SEQ ID NO: 1058780 - RNA, 18 nt, Human
cuguaaucccagcuacuc

SEQ ID NO: 1058781 - RNA, 24 nt, Human
cuuguugcccaggcuggagugcaa

SEQ ID NO: 1058782 - RNA, 19 nt, Human
gaaaccuugucuuuacuaa

SEQ ID NO: 1058783 - RNA, 21 nt, Human
gaaguugcagugaguugggau

SEQ ID NO: 1058784 - RNA, 19 nt, Human
gaccucagcucaccgcaac

SEQ ID NO: 1058785 - RNA, 19 nt, Human
gagagagacucugucucaa

SEQ ID NO: 1058786 - RNA, 26 nt, Human
gaguaguugggauuacaggugcaugc

SEQ ID NO: 1058787 - RNA, 24 nt, Human
gaucaacugaggucaggaguucga

SEQ ID NO: 1058788 - RNA, 18 nt, Human
gauuacaggugcaugcca

SEQ ID NO: 1058789 - RNA, 19 nt, Human
gcaauggcgcgaccucagc

SEQ ID NO: 1058790 - RNA, 19 nt, Human
gccacuccacuccagccug

SEQ ID NO: 1058791 - RNA, 24 nt, Human
gccacuccacuccagccuggguga

SEQ ID NO: 1058792 - RNA, 19 nt, Human
gcccaggcuggagugcaau

SEQ ID NO: 1058793 - RNA, 19 nt, Human
gccgacuccccgagccucc

SEQ ID NO: 1058794 - RNA, 24 nt, Human
gcuaacauggugaaaccuugucuu

SEQ ID NO: 1058795 - RNA, 24 nt, Human
gcucuuguugcccaggcuggagug

SEQ ID NO: 1058796 - RNA, 19 nt, Human
gcuggagugcaauggcgcg

SEQ ID NO: 1058797 - RNA, 18 nt, Human
ggaaguugcagugaguug

SEQ ID NO: 1058798 - RNA, 22 nt, Human
ggaaguugcagugaguugggau

SEQ ID NO: 1058799 - RNA, 23 nt, Human
ggaaguugcagugaguugggaua

SEQ ID NO: 1058800 - RNA, 22 nt, Human
ggaucaacugaggucaggaguu

SEQ ID NO: 1058801 - RNA, 18 nt, Human
ggcggaaguugcagugag

SEQ ID NO: 1058802 - RNA, 23 nt, Human
ggcgugguggcucacaccugcaa

SEQ ID NO: 1058803 - RNA, 24 nt, Human
gggcggaaguugcagugaguuggg

SEQ ID NO: 1058804 - RNA, 21 nt, Human
gugccacuccacuccagccug

SEQ ID NO: 1058805 - RNA, 21 nt, Human
guggaucaacugaggucagga

SEQ ID NO: 1058806 - RNA, 22 nt, Human
guggaucaacugaggucaggag

SEQ ID NO: 1058807 - RNA, 24 nt, Human
guugcagugaguugggauagugcc

SEQ ID NO: 1058808 - RNA, 21 nt, Human
uaaaaauacaaaaauuagcca

SEQ ID NO: 1058809 - RNA, 21 nt, Human
uaacauggugaaaccuugucu

SEQ ID NO: 1058810 - RNA, 21 nt, Human
uaacauggugaaaccuugucu

SEQ ID NO: 1058811 - RNA, 22 nt, Human
uaacauggugaaaccuugucuu

SEQ ID NO: 1058812 - RNA, 18 nt, Human
uaaguuaauucagaugua

SEQ ID NO: 1058813 - RNA, 21 nt, Human
uacagcagcauauuuucuucc

SEQ ID NO: 1058814 - RNA, 22 nt, Human
uacaggugcaugccaccacgcc

SEQ ID NO: 1058815 - RNA, 24 nt, Human
uaguaaaggcgagauuucuccaua

SEQ ID NO: 1058816 - RNA, 19 nt, Human
uauauauauuuaaacacau

SEQ ID NO: 1058817 - RNA, 22 nt, Human
uauuuucccuuuccuaucuuuu

SEQ ID NO: 1058818 - RNA, 24 nt, Human
ucaccgcaaccuccaccuccuggg

SEQ ID NO: 1058819 - RNA, 18 nt, Human
ucaggcuggucucccuuu

SEQ ID NO: 1058820 - RNA, 24 nt, Human
uccagaguaguugggauuacaggu

SEQ ID NO: 1058821 - RNA, 18 nt, Human
uccagccugggugagaga

SEQ ID NO: 1058822 - RNA, 19 nt, Human
uccagccugggugagagag

SEQ ID NO: 1058823 - RNA, 24 nt, Human
uccuggguuuaagccauucuccug

SEQ ID NO: 1058824 - RNA, 22 nt, Human
ucgcucuuguugcccaggcugg

SEQ ID NO: 1058825 - RNA, 23 nt, Human
ucgcucuuguugcccaggcugga

SEQ ID NO: 1058826 - RNA, 21 nt, Human
ucucaaaaaaacaagaaucau

SEQ ID NO: 1058827 - RNA, 18 nt, Human
ucuccugccucagccucc

SEQ ID NO: 1058828 - RNA, 21 nt, Human
ucuguaaucccagcuacucag

SEQ ID NO: 1058829 - RNA, 22 nt, Human
ucuuguugcccaggcuggagug

SEQ ID NO: 1058830 - RNA, 22 nt, Human
ucuuuuuuuuugagacggaguu

SEQ ID NO: 1058831 - RNA, 18 nt, Human
ugaaaaaugaugaaguaa

SEQ ID NO: 1058832 - RNA, 24 nt, Human
ugaggcaggagaauugcuugaacc

SEQ ID NO: 1058833 - RNA, 25 nt, Human
ugaggcaggagaauugcuugaaccu

SEQ ID NO: 1058834 - RNA, 20 nt, Human
ugaggcagguggaucaacug

SEQ ID NO: 1058835 - RNA, 26 nt, Human
ugaggcagguggaucaacugagguca

SEQ ID NO: 1058836 - RNA, 18 nt, Human
ugcccaggcuggagugca

SEQ ID NO: 1058837 - RNA, 21 nt, Human
ugcccaggcuggagugcaaug

SEQ ID NO: 1058838 - RNA, 21 nt, Human
ugcccaggcuggagugcaaug

SEQ ID NO: 1058839 - RNA, 24 nt, Human
ugcccaggcuggagugcaauggcg

SEQ ID NO: 1058840 - RNA, 20 nt, Human
ugccucagccuccagaguag

SEQ ID NO: 1058841 - RNA, 19 nt, Human
uggagugcaauggcgcgac

SEQ ID NO: 1058842 - RNA, 23 nt, Human
uggagugcaauggcgcgaccuca

SEQ ID NO: 1058843 - RNA, 24 nt, Human
uggaucaacugaggucaggaguuc

SEQ ID NO: 1058844 - RNA, 24 nt, Human
uggcgcgaccucagcucaccgcaa

SEQ ID NO: 1058845 - RNA, 22 nt, Human
uggcucacaccugcaaucccag

SEQ ID NO: 1058846 - RNA, 24 nt, Human
uggcucacaccugcaaucccagca

SEQ ID NO: 1058847 - RNA, 18 nt, Human
ugggaggcugaggcaggu

SEQ ID NO: 1058848 - RNA, 24 nt, Human
ugggaggcugaggcagguggauca

SEQ ID NO: 1058849 - RNA, 21 nt, Human
ugggauuacaggugcaugcca

SEQ ID NO: 1058850 - RNA, 22 nt, Human
ugggauuacaggugcaugccac

SEQ ID NO: 1058851 - RNA, 24 nt, Human
ugggauuacaggugcaugccacca

SEQ ID NO: 1058852 - RNA, 24 nt, Human
uggucaggcuggucucccuuuccu

SEQ ID NO: 1058853 - RNA, 21 nt, Human
uggugggugucuguaauccca

SEQ ID NO: 1058854 - RNA, 24 nt, Human
uggugggugucuguaaucccagcu

SEQ ID NO: 1058855 - RNA, 24 nt, Human
ugucuguaaucccagcuacucagg

SEQ ID NO: 1058856 - RNA, 20 nt, Human
uguugcccaggcuggagugc

SEQ ID NO: 1058857 - RNA, 25 nt, Human
uuaagccauucuccugccucagccu

SEQ ID NO: 1058858 - RNA, 23 nt, Human
uuacagcagcauauuuucuuccc

SEQ ID NO: 1058859 - RNA, 24 nt, Human
uuagccaggcgcaauggugggugu

SEQ ID NO: 1058860 - RNA, 19 nt, Human
uuaguaaaggcgagauuuc

SEQ ID NO: 1058861 - RNA, 23 nt, Human
uuauacaaacuacacgacauaaa

SEQ ID NO: 1058862 - RNA, 24 nt, Human
uuccuaauuuacagcagcauauuu

SEQ ID NO: 1058863 - RNA, 24 nt, Human
uucgcucuuguugcccaggcugga

SEQ ID NO: 1058864 - RNA, 24 nt, Human
uucuaggcugggcgugguggcuca

SEQ ID NO: 1058865 - RNA, 22 nt, Human
uugcagugaguugggauagugc

SEQ ID NO: 1058866 - RNA, 25 nt, Human
uugggaggcugaggcagguggauca

SEQ ID NO: 1058867 - RNA, 24 nt, Human
uuucgcucuuguugcccaggcugg

SEQ ID NO: 1058868 - RNA, 19 nt, Human
uuuuguauuuuuaguaaag

SEQ ID NO: 1058869 - RNA, 22 nt, Human
aaaaaaagaaagaauggcauca

SEQ ID NO: 1058870 - RNA, 25 nt, Human
aaaaagacacuggcaggccgggugc

SEQ ID NO: 1058871 - RNA, 20 nt, Human
aaaacaaagauaccucaagc

SEQ ID NO: 1058872 - RNA, 18 nt, Human
aaaaggcauacuaaauau

SEQ ID NO: 1058873 - RNA, 23 nt, Human
aaaagguuucaguacagggugug

SEQ ID NO: 1058874 - RNA, 18 nt, Human
aaaauuagcugggcaugg

SEQ ID NO: 1058875 - RNA, 19 nt, Human
aaacauguuuauuguagau

SEQ ID NO: 1058876 - RNA, 19 nt, Human
aaagauaccucaagcaggg

SEQ ID NO: 1058877 - RNA, 18 nt, Human
aaccuuuuuaaaaaaugg

SEQ ID NO: 1058878 - RNA, 21 nt, Human
aacucugaugauuccaagcaa

SEQ ID NO: 1058879 - RNA, 24 nt, Human
aaucacuugaaccugggaggcaga

SEQ ID NO: 1058880 - RNA, 25 nt, Human
aaucucgugagaacuuaccacccac

SEQ ID NO: 1058881 - RNA, 19 nt, Human
aauuucuuuuguucaaaau

SEQ ID NO: 1058882 - RNA, 24 nt, Human
aauuuuauuuggauaacaaagggu

SEQ ID NO: 1058883 - RNA, 21 nt, Human
acaaaaccaaauaagcaagcc

SEQ ID NO: 1058884 - RNA, 18 nt, Human
acaccacugcacuccagc

SEQ ID NO: 1058885 - RNA, 24 nt, Human
acacuucagccugggcaacagagc

SEQ ID NO: 1058886 - RNA, 24 nt, Human
acagagcgaggcucuaucuuaaaa

SEQ ID NO: 1058887 - RNA, 24 nt, Human
acccagugcuuagaaauaggcacc

SEQ ID NO: 1058888 - RNA, 18 nt, Human
accugaaaucccaacacu

SEQ ID NO: 1058889 - RNA, 21 nt, Human
accugaaaucccaacacuuug

SEQ ID NO: 1058890 - RNA, 24 nt, Human
accugaggucaggaguucgagacc

SEQ ID NO: 1058891 - RNA, 18 nt, Human
acuacacuucagccuggg

SEQ ID NO: 1058892 - RNA, 24 nt, Human
acuacacuucagccugggcaacag

SEQ ID NO: 1058893 - RNA, 22 nt, Human
acuccagccugggagagcaaga

SEQ ID NO: 1058894 - RNA, 18 nt, Human
acugcacuccagccuggg

SEQ ID NO: 1058895 - RNA, 26 nt, Human
agaaauaggcacuccucaaccagugu

SEQ ID NO: 1058896 - RNA, 18 nt, Human
agaaauguauaaaacacc

SEQ ID NO: 1058897 - RNA, 23 nt, Human
agacaggaggauugcuugagccc

SEQ ID NO: 1058898 - RNA, 22 nt, Human
agagguugcagugagccgagau

SEQ ID NO: 1058899 - RNA, 24 nt, Human
agagguugcagugagccgagauug

SEQ ID NO: 1058900 - RNA, 18 nt, Human
agccuggaagcuacagcg

SEQ ID NO: 1058901 - RNA, 19 nt, Human
agccuggccaacaugguga

SEQ ID NO: 1058902 - RNA, 22 nt, Human
agccugggagagcaagaaccug

SEQ ID NO: 1058903 - RNA, 24 nt, Human
agccugggcaacagagcgaggcuc

SEQ ID NO: 1058904 - RNA, 20 nt, Human
aggaggccgaggcaggugca

SEQ ID NO: 1058905 - RNA, 24 nt, Human
aggauugcuugagcccaggaguuu

SEQ ID NO: 1058906 - RNA, 21 nt, Human
aggcagagguugcagugagcc

SEQ ID NO: 1058907 - RNA, 24 nt, Human
aggcagagguugcagugagccgag

SEQ ID NO: 1058908 - RNA, 22 nt, Human
aggcaggagaaucacuugaacc

SEQ ID NO: 1058909 - RNA, 24 nt, Human
aggcaggagaaucacuugaaccug

SEQ ID NO: 1058910 - RNA, 22 nt, Human
aggcaggugcaucaccugaggu

SEQ ID NO: 1058911 - RNA, 26 nt, Human
aggcaggugcaucaccugaggucagg

SEQ ID NO: 1058912 - RNA, 24 nt, Human
aggccaagacaggaggauugcuug

SEQ ID NO: 1058913 - RNA, 21 nt, Human
aggccgaggcaggugcaucac

SEQ ID NO: 1058914 - RNA, 24 nt, Human
aggcugaggcaggagaaucacuug

SEQ ID NO: 1058915 - RNA, 24 nt, Human
aggcugaggugggaggacugcuug

SEQ ID NO: 1058916 - RNA, 18 nt, Human
agggugugaacaaugaaa

SEQ ID NO: 1058917 - RNA, 24 nt, Human
aggugcagugccucaagccuguaa

SEQ ID NO: 1058918 - RNA, 24 nt, Human
agugcuuuaggaggcugagguggg

SEQ ID NO: 1058919 - RNA, 19 nt, Human
auaggcacuccucaaccag

SEQ ID NO: 1058920 - RNA, 23 nt, Human
aucaccugaggucaggaguucga

SEQ ID NO: 1058921 - RNA, 19 nt, Human
augccuguaaucccagcac

SEQ ID NO: 1058922 - RNA, 24 nt, Human
auuacaccacugcacuccagccug

SEQ ID NO: 1058923 - RNA, 24 nt, Human
auugugccacuacacuucagccug

SEQ ID NO: 1058924 - RNA, 23 nt, Human
caaaacacucucaugggugucaa

SEQ ID NO: 1058925 - RNA, 19 nt, Human
caaaaugcuugauaugaag

SEQ ID NO: 1058926 - RNA, 23 nt, Human
caaaaugcuugauaugaaguaug

SEQ ID NO: 1058927 - RNA, 20 nt, Human
caacacuuugggaggccaag

SEQ ID NO: 1058928 - RNA, 24 nt, Human
caacauggugaaaugccgucucua

SEQ ID NO: 1058929 - RNA, 23 nt, Human
caagacaggaggauugcuugagc

SEQ ID NO: 1058930 - RNA, 20 nt, Human
caagagaugacuguaaacac

SEQ ID NO: 1058931 - RNA, 18 nt, Human
caagcaaggaagcaauau

SEQ ID NO: 1058932 - RNA, 23 nt, Human
caagccuguaaucccagugcuuu

SEQ ID NO: 1058933 - RNA, 23 nt, Human
cacaccuguaaucccagcuacuu

SEQ ID NO: 1058934 - RNA, 26 nt, Human
caccacugcacuccagccugggagag

SEQ ID NO: 1058935 - RNA, 23 nt, Human
caccugaggucaggaguucgaga

SEQ ID NO: 1058936 - RNA, 23 nt, Human
caccuguaaucccagcuacuugg

SEQ ID NO: 1058937 - RNA, 24 nt, Human
cacuacacuucagccugggcaaca

SEQ ID NO: 1058938 - RNA, 18 nt, Human
cacuccagccugggagag

SEQ ID NO: 1058939 - RNA, 18 nt, Human
cacugcacuccagccugg

SEQ ID NO: 1058940 - RNA, 19 nt, Human
cacugcacuccagccuggg

SEQ ID NO: 1058941 - RNA, 22 nt, Human
cacugcacuccagccugggaga

SEQ ID NO: 1058942 - RNA, 25 nt, Human
cacugcacuccagccugggagagca

SEQ ID NO: 1058943 - RNA, 24 nt, Human
cacuucagccugggcaacagagcg

SEQ ID NO: 1058944 - RNA, 20 nt, Human
cagaguaagcaauaugcuag

SEQ ID NO: 1058945 - RNA, 18 nt, Human
cagcacuuuaggaggccg

SEQ ID NO: 1058946 - RNA, 24 nt, Human
cagcacuuuaggaggccgaggcag

SEQ ID NO: 1058947 - RNA, 21 nt, Human
cagccugggcaacagagcgag

SEQ ID NO: 1058948 - RNA, 21 nt, Human
cagccugggcaacagagcgag

SEQ ID NO: 1058949 - RNA, 23 nt, Human
caggccgggugcgguggcucaug

SEQ ID NO: 1058950 - RNA, 24 nt, Human
caggugcaucaccugaggucagga

SEQ ID NO: 1058951 - RNA, 24 nt, Human
cagugcuuuaggaggcugaggugg

SEQ ID NO: 1058952 - RNA, 24 nt, Human
cauacauaucaaaauacaccaucc

SEQ ID NO: 1058953 - RNA, 24 nt, Human
caucaccugaggucaggaguucga

SEQ ID NO: 1058954 - RNA, 20 nt, Human
caugccuguaaucccagcac

SEQ ID NO: 1058955 - RNA, 23 nt, Human
caugccuguaaucccagcacuuu

SEQ ID NO: 1058956 - RNA, 22 nt, Human
cauuaacugauugcuuuccuaa

SEQ ID NO: 1058957 - RNA, 20 nt, Human
ccacuacacuucagccuggg

SEQ ID NO: 1058958 - RNA, 23 nt, Human
ccacuacacuucagccugggcaa

SEQ ID NO: 1058959 - RNA, 24 nt, Human
ccacuacacuucagccugggcaac

SEQ ID NO: 1058960 - RNA, 19 nt, Human
ccacugcacuccagccugg

SEQ ID NO: 1058961 - RNA, 20 nt, Human
ccacugcacuccagccuggg

SEQ ID NO: 1058962 - RNA, 22 nt, Human
ccacugcacuccagccugggag

SEQ ID NO: 1058963 - RNA, 25 nt, Human
ccacugcacuccagccugggagagc

SEQ ID NO: 1058964 - RNA, 26 nt, Human
ccacugcacuccagccugggagagca

SEQ ID NO: 1058965 - RNA, 25 nt, Human
ccaggaguucgagacugcagugagc

SEQ ID NO: 1058966 - RNA, 21 nt, Human
cccucagucccaauguugcuc

SEQ ID NO: 1058967 - RNA, 21 nt, Human
ccgucucuacuaaaaauacaa

SEQ ID NO: 1058968 - RNA, 24 nt, Human
ccuaaccuuuuuaaaaaaugguca

SEQ ID NO: 1058969 - RNA, 26 nt, Human
ccuauaccacaaaacacucucauggg

SEQ ID NO: 1058970 - RNA, 26 nt, Human
ccuauuauuacaaaaaagcuuauaau

SEQ ID NO: 1058971 - RNA, 22 nt, Human
ccugaggucaggaguucgagac

SEQ ID NO: 1058972 - RNA, 19 nt, Human
ccuggaagcuacagcgagc

SEQ ID NO: 1058973 - RNA, 23 nt, Human
ccuggccaacauggugaaaugcc

SEQ ID NO: 1058974 - RNA, 24 nt, Human
ccuggccaacauggugaaaugccg

SEQ ID NO: 1058975 - RNA, 25 nt, Human
ccugggaggcagagguugcagugag

SEQ ID NO: 1058976 - RNA, 22 nt, Human
ccugggcaacagagcgaggcuc

SEQ ID NO: 1058977 - RNA, 24 nt, Human
ccuguaaucccagcuacuugguag

SEQ ID NO: 1058978 - RNA, 24 nt, Human
cgagaccagccuggccaacauggu

SEQ ID NO: 1058979 - RNA, 20 nt, Human
cgaggcaggugcaucaccug

SEQ ID NO: 1058980 - RNA, 26 nt, Human
cgaggcaggugcaucaccugagguca

SEQ ID NO: 1058981 - RNA, 19 nt, Human
cuaaagagauaacucaggu

SEQ ID NO: 1058982 - RNA, 22 nt, Human
cucaagcagguccaccuauacc

SEQ ID NO: 1058983 - RNA, 24 nt, Human
cucaagccuguaaucccagugcuu

SEQ ID NO: 1058984 - RNA, 24 nt, Human
cucaugccuguaaucccagcacuu

SEQ ID NO: 1058985 - RNA, 28 nt, Human
cugaaaucccaacacuuugggaggccaa

SEQ ID NO: 1058986 - RNA, 21 nt, Human
cugcuugaguccaggaguucg

SEQ ID NO: 1058987 - RNA, 23 nt, Human
cugcuugaguccaggaguucgag

SEQ ID NO: 1058988 - RNA, 22 nt, Human
cuuugcacuaagccuaaccuuu

SEQ ID NO: 1058989 - RNA, 21 nt, Human
gacacuggcaggccgggugcg

SEQ ID NO: 1058990 - RNA, 22 nt, Human
gacaggaggauugcuugagccc

SEQ ID NO: 1058991 - RNA, 23 nt, Human
gagaaucacuugaaccugggagg

SEQ ID NO: 1058992 - RNA, 23 nt, Human
gagauugugccacuacacuucag

SEQ ID NO: 1058993 - RNA, 18 nt, Human
gagcccaggaguuugagg

SEQ ID NO: 1058994 - RNA, 23 nt, Human
gaggccagccuggaagcuacagc

SEQ ID NO: 1058995 - RNA, 18 nt, Human
gauaacaaagggucucca

SEQ ID NO: 1058996 - RNA, 22 nt, Human
gauugcuugagcccaggaguuu

SEQ ID NO: 1058997 - RNA, 24 nt, Human
gauugcuugagcccaggaguuuga

SEQ ID NO: 1058998 - RNA, 21 nt, Human
gauuuaaugaucaaaaaacua

SEQ ID NO: 1058999 - RNA, 18 nt, Human
gcaauagaaaaaccaaag

SEQ ID NO: 1059000 - RNA, 19 nt, Human
gcacuccagccugggagag

SEQ ID NO: 1059001 - RNA, 23 nt, Human
gcaggagaaucacuugaaccugg

SEQ ID NO: 1059002 - RNA, 19 nt, Human
gccaacauggugaaaugcc

SEQ ID NO: 1059003 - RNA, 24 nt, Human
gccaacauggugaaaugccgucuc

SEQ ID NO: 1059004 - RNA, 21 nt, Human
gccacacaccuguaaucccag

SEQ ID NO: 1059005 - RNA, 21 nt, Human
gccucaagccuguaaucccag

SEQ ID NO: 1059006 - RNA, 20 nt, Human
gcucuuauugggaagaacau

SEQ ID NO: 1059007 - RNA, 22 nt, Human
gcuugaguccaggaguucgaga

SEQ ID NO: 1059008 - RNA, 22 nt, Human
ggauugcuugagcccaggaguu

SEQ ID NO: 1059009 - RNA, 23 nt, Human
ggcaggccgggugcgguggcuca

SEQ ID NO: 1059010 - RNA, 23 nt, Human
ggccgggugcgguggcucaugcc

SEQ ID NO: 1059011 - RNA, 24 nt, Human
gggcauggugccacacaccuguaa

SEQ ID NO: 1059012 - RNA, 24 nt, Human
gggugcgguggcucaugccuguaa

SEQ ID NO: 1059013 - RNA, 24 nt, Human
ggugccacacaccuguaaucccag

SEQ ID NO: 1059014 - RNA, 23 nt, Human
gguggcucaugccuguaauccca

SEQ ID NO: 1059015 - RNA, 24 nt, Human
gguggcucaugccuguaaucccag

SEQ ID NO: 1059016 - RNA, 24 nt, Human
gugcaucaccugaggucaggaguu

SEQ ID NO: 1059017 - RNA, 23 nt, Human
guggcucaugccuguaaucccag

SEQ ID NO: 1059018 - RNA, 24 nt, Human
guugcagugagccgagauugugcc

SEQ ID NO: 1059019 - RNA, 22 nt, Human
uaaaaaacaacauauuacaaaa

SEQ ID NO: 1059020 - RNA, 26 nt, Human
uaaaaaacaagcaugccuucauuaaa

SEQ ID NO: 1059021 - RNA, 23 nt, Human
uaaaaggcauacuaaauauuagc

SEQ ID NO: 1059022 - RNA, 27 nt, Human
uaagcaauaugcuagauacccugaaag

SEQ ID NO: 1059023 - RNA, 24 nt, Human
uaauaaauaaacauuccuuuggga

SEQ ID NO: 1059024 - RNA, 18 nt, Human
uacaaaaagguuuacuaa

SEQ ID NO: 1059025 - RNA, 21 nt, Human
uacaccacugcacuccagccu

SEQ ID NO: 1059026 - RNA, 18 nt, Human
uaccacauauuuuacuuu

SEQ ID NO: 1059027 - RNA, 19 nt, Human
uaccugaaaucccaacacu

SEQ ID NO: 1059028 - RNA, 21 nt, Human
uaccugaaaucccaacacuuu

SEQ ID NO: 1059029 - RNA, 24 nt, Human
uaccugaaaucccaacacuuuggg

SEQ ID NO: 1059030 - RNA, 23 nt, Human
uacuugguaggcugaggcaggag

SEQ ID NO: 1059031 - RNA, 24 nt, Human
uaggaggccgaggcaggugcauca

SEQ ID NO: 1059032 - RNA, 19 nt, Human
uaggaggcugaggugggag

SEQ ID NO: 1059033 - RNA, 23 nt, Human
uaguaaguauaucuuuucuucuc

SEQ ID NO: 1059034 - RNA, 25 nt, Human
uauguaaaaaaauaagcaguuuauu

SEQ ID NO: 1059035 - RNA, 23 nt, Human
uauuacaaaauuagacaaucauc

SEQ ID NO: 1059036 - RNA, 26 nt, Human
uauuacaaaauuagacaaucauccuu

SEQ ID NO: 1059037 - RNA, 22 nt, Human
ucaagccuguaaucccagugcu

SEQ ID NO: 1059038 - RNA, 20 nt, Human
ucaccugaggucaggaguuc

SEQ ID NO: 1059039 - RNA, 25 nt, Human
ucacuugaaccugggaggcagaggu

SEQ ID NO: 1059040 - RNA, 22 nt, Human
ucaugccuguaaucccagcacu

SEQ ID NO: 1059041 - RNA, 21 nt, Human
ucucuacuaaaaauacaaaaa

SEQ ID NO: 1059042 - RNA, 24 nt, Human
ugaaccugggaggcagagguugca

SEQ ID NO: 1059043 - RNA, 18 nt, Human
ugacaaaaccaaauaagc

SEQ ID NO: 1059044 - RNA, 26 nt, Human
ugacugacuuaaguauuuuuaaauau

SEQ ID NO: 1059045 - RNA, 20 nt, Human
ugacuguaaacacaaaauuu

SEQ ID NO: 1059046 - RNA, 22 nt, Human
ugagcacacuuuucacaaacaa

SEQ ID NO: 1059047 - RNA, 23 nt, Human
ugagcccaggaguuugaggccag

SEQ ID NO: 1059048 - RNA, 19 nt, Human
ugagccgagauugugccac

SEQ ID NO: 1059049 - RNA, 20 nt, Human
ugaggcaggagaaucacuug

SEQ ID NO: 1059050 - RNA, 24 nt, Human
ugaggcaggagaaucacuugaacc

SEQ ID NO: 1059051 - RNA, 25 nt, Human
ugaggcaggagaaucacuugaaccu

SEQ ID NO: 1059052 - RNA, 22 nt, Human
ugaggugggaggacugcuugag

SEQ ID NO: 1059053 - RNA, 23 nt, Human
ugaggugggaggacugcuugagu

SEQ ID NO: 1059054 - RNA, 24 nt, Human
ugauuacaccacugcacuccagcc

SEQ ID NO: 1059055 - RNA, 18 nt, Human
ugcaagugucuuuucuuc

SEQ ID NO: 1059056 - RNA, 24 nt, Human
ugcaucaccugaggucaggaguuc

SEQ ID NO: 1059057 - RNA, 21 nt, Human
ugccacacaccuguaauccca

SEQ ID NO: 1059058 - RNA, 22 nt, Human
ugccucaagccuguaaucccag

SEQ ID NO: 1059059 - RNA, 24 nt, Human
ugccucaagccuguaaucccagug

SEQ ID NO: 1059060 - RNA, 22 nt, Human
ugccuguaaucccagcacuuua

SEQ ID NO: 1059061 - RNA, 24 nt, Human
ugccuguaaucccagcacuuuagg

SEQ ID NO: 1059062 - RNA, 24 nt, Human
ugcgggguaaaaaaaaagaaagaa

SEQ ID NO: 1059063 - RNA, 18 nt, Human
ugcuugagcccaggaguu

SEQ ID NO: 1059064 - RNA, 18 nt, Human
uggcaggccgggugcggu

SEQ ID NO: 1059065 - RNA, 18 nt, Human
uggccaacauggugaaau

SEQ ID NO: 1059066 - RNA, 22 nt, Human
uggcucaugccuguaaucccag

SEQ ID NO: 1059067 - RNA, 24 nt, Human
uggcucaugccuguaaucccagca

SEQ ID NO: 1059068 - RNA, 19 nt, Human
ugggaagaacauuguaaua

SEQ ID NO: 1059069 - RNA, 24 nt, Human
ugggaggcagagguugcagugagc

SEQ ID NO: 1059070 - RNA, 22 nt, Human
ugggaggccaagacaggaggau

SEQ ID NO: 1059071 - RNA, 24 nt, Human
ugguaggcugaggcaggagaauca

SEQ ID NO: 1059072 - RNA, 21 nt, Human
ugguauuugagaaaaagguuu

SEQ ID NO: 1059073 - RNA, 24 nt, Human
uggugccacacaccuguaauccca

SEQ ID NO: 1059074 - RNA, 20 nt, Human
uguaaaaaaauaagcaguuu

SEQ ID NO: 1059075 - RNA, 21 nt, Human
uguggagaauuuguuaaaacc

SEQ ID NO: 1059076 - RNA, 21 nt, Human
uuaaaaaacaacauauuacaa

SEQ ID NO: 1059077 - RNA, 23 nt, Human
uuacaccacugcacuccagccug

SEQ ID NO: 1059078 - RNA, 18 nt, Human
uuagcugggcauggugcc

SEQ ID NO: 1059079 - RNA, 19 nt, Human
uuauuuggauaacaaaggg

SEQ ID NO: 1059080 - RNA, 24 nt, Human
uugaaccugggaggcagagguugc

SEQ ID NO: 1059081 - RNA, 22 nt, Human
uugagcccaggaguuugaggcc

SEQ ID NO: 1059082 - RNA, 21 nt, Human
uugaguccaggaguucgagac

SEQ ID NO: 1059083 - RNA, 18 nt, Human
uugcagugagccgagauu

SEQ ID NO: 1059084 - RNA, 19 nt, Human
uugcagugagccgagauug

SEQ ID NO: 1059085 - RNA, 22 nt, Human
uugcagugagccgagauugugc

SEQ ID NO: 1059086 - RNA, 24 nt, Human
uugcuugagcccaggaguuugagg

SEQ ID NO: 1059087 - RNA, 25 nt, Human
uugguaggcugaggcaggagaauca

SEQ ID NO: 1059088 - RNA, 24 nt, Human
uuuaaaccauuaauuuagauaaca

SEQ ID NO: 1059089 - RNA, 23 nt, Human
uuuccaaaagacuaaagagauaa

SEQ ID NO: 1059090 - RNA, 21 nt, Human
uuuucaagaugguagcuuuca

SEQ ID NO: 1059091 - RNA, 21 nt, Human
acugcagccaucagggucauc

SEQ ID NO: 1059092 - RNA, 24 nt, Human
agacugcagccaucagggucauca

SEQ ID NO: 1059093 - RNA, 22 nt, Human
agcuaugguauagacugcagcc

SEQ ID NO: 1059094 - RNA, 20 nt, Human
aggcacuguagacgagacca

SEQ ID NO: 1059095 - RNA, 20 nt, Human
caacaguaggaaccuaggag

SEQ ID NO: 1059096 - RNA, 22 nt, Human
uagcuucauuggaaaggggagc

SEQ ID NO: 1059097 - RNA, 27 nt, Human
uagcuucauuggaaaggggagcuggag

SEQ ID NO: 1059098 - RNA, 23 nt, Human
ucucucaucacaacaguaggaac

SEQ ID NO: 1059099 - RNA, 18 nt, Human
uggaaaggggagcuggag

SEQ ID NO: 1059100 - RNA, 18 nt, Human
agcuugcaaccuccuccg

SEQ ID NO: 1059101 - RNA, 24 nt, Human
agcuugcaaccuccuccgaagccc

SEQ ID NO: 1059102 - RNA, 22 nt, Human
cuugcaaccuccuccgaagccc

SEQ ID NO: 1059103 - RNA, 20 nt, Human
ucgcucucuucuaguuccug

SEQ ID NO: 1059104 - RNA, 18 nt, Human
agagaaggcaauuccugg

SEQ ID NO: 1059105 - RNA, 21 nt, Human
agagaaggcaauuccugguga

SEQ ID NO: 1059106 - RNA, 21 nt, Human
aggagugugugcauguaaaag

SEQ ID NO: 1059107 - RNA, 21 nt, Human
agguuucaccaugagagaagg

SEQ ID NO: 1059108 - RNA, 20 nt, Human
ccaugagagaaggcaauucc

SEQ ID NO: 1059109 - RNA, 19 nt, Human
ggugaugaggggaugugau

SEQ ID NO: 1059110 - RNA, 24 nt, Human
ugagagaaggcaauuccuggugau

SEQ ID NO: 1059111 - RNA, 20 nt, Human
uuuuccagguuucaccauga

SEQ ID NO: 1059112 - RNA, 21 nt, Human
aaaaaaaauuaacaaaaaaga

SEQ ID NO: 1059113 - RNA, 21 nt, Human
aacacaguucuuaaucugccu

SEQ ID NO: 1059114 - RNA, 24 nt, Human
aacacaguucuuaaucugccuccc

SEQ ID NO: 1059115 - RNA, 19 nt, Human
aagcgcgggaccaccaagc

SEQ ID NO: 1059116 - RNA, 21 nt, Human
agcaagcgccugcugagcucc

SEQ ID NO: 1059117 - RNA, 25 nt, Human
agccaaggaguuucaggcugcagug

SEQ ID NO: 1059118 - RNA, 23 nt, Human
agccaggcaugguagcuugugcc

SEQ ID NO: 1059119 - RNA, 24 nt, Human
agcuacuugggaggcugagguggg

SEQ ID NO: 1059120 - RNA, 21 nt, Human
agcuugugccuauaguuccag

SEQ ID NO: 1059121 - RNA, 24 nt, Human
aggaucacuuaagccaaggaguuu

SEQ ID NO: 1059122 - RNA, 19 nt, Human
aggcugaggugggaggauc

SEQ ID NO: 1059123 - RNA, 24 nt, Human
aggcugggugacagagugagacuc

SEQ ID NO: 1059124 - RNA, 20 nt, Human
aggugggaggaucacuuaag

SEQ ID NO: 1059125 - RNA, 24 nt, Human
augccacuacauuccaggcugggu

SEQ ID NO: 1059126 - RNA, 20 nt, Human
caaaaaagaauagccaggca

SEQ ID NO: 1059127 - RNA, 25 nt, Human
caaaaaagaauagccaggcauggua

SEQ ID NO: 1059128 - RNA, 22 nt, Human
cagcaagcgccugcugagcucc

SEQ ID NO: 1059129 - RNA, 24 nt, Human
cagcuacuugggaggcugaggugg

SEQ ID NO: 1059130 - RNA, 23 nt, Human
cauuccaggcugggugacagagu

SEQ ID NO: 1059131 - RNA, 24 nt, Human
cauuccaggcugggugacagagug

SEQ ID NO: 1059132 - RNA, 27 nt, Human
ccaaguuucacuuuggaugcacuccca

SEQ ID NO: 1059133 - RNA, 20 nt, Human
ccacuacauuccaggcuggg

SEQ ID NO: 1059134 - RNA, 21 nt, Human
ccacuacauuccaggcugggu

SEQ ID NO: 1059135 - RNA, 24 nt, Human
ccacuacauuccaggcugggugac

SEQ ID NO: 1059136 - RNA, 21 nt, Human
ccuauaguuccagcuacuugg

SEQ ID NO: 1059137 - RNA, 22 nt, Human
ccuauaguuccagcuacuuggg

SEQ ID NO: 1059138 - RNA, 18 nt, Human
cgggaccaccaagcccug

SEQ ID NO: 1059139 - RNA, 19 nt, Human
cugcaccagccucucaaaa

SEQ ID NO: 1059140 - RNA, 20 nt, Human
cugcugcagcuccggacucc

SEQ ID NO: 1059141 - RNA, 21 nt, Human
cugggugacagagugagacuc

SEQ ID NO: 1059142 - RNA, 18 nt, Human
cuuggaucaggaacacag

SEQ ID NO: 1059143 - RNA, 21 nt, Human
cuuuggaugcacucccaggac

SEQ ID NO: 1059144 - RNA, 20 nt, Human
gagcuccggaaagcgcggga

SEQ ID NO: 1059145 - RNA, 21 nt, Human
gguaagaucaaagagccaaga

SEQ ID NO: 1059146 - RNA, 22 nt, Human
uaaaaaaaauuaacaaaaaaga

SEQ ID NO: 1059147 - RNA, 24 nt, Human
uaacaaaaaagaauagccaggcau

SEQ ID NO: 1059148 - RNA, 24 nt, Human
uagcuugugccuauaguuccagcu

SEQ ID NO: 1059149 - RNA, 24 nt, Human
ucauccaccaucccggaacauuuc

SEQ ID NO: 1059150 - RNA, 19 nt, Human
uccaggcugggugacagag

SEQ ID NO: 1059151 - RNA, 24 nt, Human
uccaggcugggugacagagugaga

SEQ ID NO: 1059152 - RNA, 18 nt, Human
ugaggugggaggaucacu

SEQ ID NO: 1059153 - RNA, 20 nt, Human
ugaggugggaggaucacuua

SEQ ID NO: 1059154 - RNA, 25 nt, Human
ugaggugggaggaucacuuaagcca

SEQ ID NO: 1059155 - RNA, 23 nt, Human
ugccuauaguuccagcuacuugg

SEQ ID NO: 1059156 - RNA, 24 nt, Human
ugccuauaguuccagcuacuuggg

SEQ ID NO: 1059157 - RNA, 19 nt, Human
uggagcucccagaauagca

SEQ ID NO: 1059158 - RNA, 20 nt, Human
ugggaggaucacuuaagcca

SEQ ID NO: 1059159 - RNA, 19 nt, Human
ugggaggcugaggugggag

SEQ ID NO: 1059160 - RNA, 24 nt, Human
ugggaggcugaggugggaggauca

SEQ ID NO: 1059161 - RNA, 23 nt, Human
ugguagcuugugccuauaguucc

SEQ ID NO: 1059162 - RNA, 18 nt, Human
uguggccucugcugcagc

SEQ ID NO: 1059163 - RNA, 23 nt, Human
uucucaggcucuucaaauaacag

SEQ ID NO: 1059164 - RNA, 20 nt, Human
uugaccgguucaagcagcaa

SEQ ID NO: 1059165 - RNA, 25 nt, Human
uugggaggcugaggugggaggauca

SEQ ID NO: 1059166 - RNA, 24 nt, Human
uuuggaugcacucccaggacauuu

SEQ ID NO: 1059167 - RNA, 21 nt, Human
cagagacuuggccgaguccug

SEQ ID NO: 1059168 - RNA, 22 nt, Human
ccuguaggugaccuuggagucc

SEQ ID NO: 1059169 - RNA, 18 nt, Human
gagacuuggccgaguccu

SEQ ID NO: 1059170 - RNA, 19 nt, Human
uccuguaggugaccuugga

SEQ ID NO: 1059171 - RNA, 23 nt, Human
aaagccucuccccauccccaccu

SEQ ID NO: 1059172 - RNA, 25 nt, Human
aagccucuccccauccccaccucag

SEQ ID NO: 1059173 - RNA, 20 nt, Human
agcgggcgggcagcgcgacc

SEQ ID NO: 1059174 - RNA, 21 nt, Human
cauccccaccucaguuuuagg

SEQ ID NO: 1059175 - RNA, 22 nt, Human
ccagaucccuccauggcagauc

SEQ ID NO: 1059176 - RNA, 26 nt, Human
cggccgacgccgagcgggcgggcagc

SEQ ID NO: 1059177 - RNA, 18 nt, Human
cucuccccauccccaccu

SEQ ID NO: 1059178 - RNA, 20 nt, Human
cucuccccauccccaccuca

SEQ ID NO: 1059179 - RNA, 18 nt, Human
gcgacgggcggcguggac

SEQ ID NO: 1059180 - RNA, 22 nt, Human
ggaacaucaggaaaagcuccau

SEQ ID NO: 1059181 - RNA, 21 nt, Human
gggagcuaagggaggaggcca

SEQ ID NO: 1059182 - RNA, 19 nt, Human
gugcacacgucuggaggca

SEQ ID NO: 1059183 - RNA, 21 nt, Human
uggaacaucaggaaaagcucc

SEQ ID NO: 1059184 - RNA, 22 nt, Human
uggagaauaauucaguuggggc

SEQ ID NO: 1059185 - RNA, 27 nt, Human
uggcagauccaagaacagggagcuaag

SEQ ID NO: 1059186 - RNA, 18 nt, Human
ccccggcgucugaugccu

SEQ ID NO: 1059187 - RNA, 22 nt, Human
cgccuccugaauuaacugaccu

SEQ ID NO: 1059188 - RNA, 21 nt, Human
cgucugaugccugcgccuccu

SEQ ID NO: 1059189 - RNA, 30 nt, Human
uaacugaccuccaucaguguaggugacauu

SEQ ID NO: 1059190 - RNA, 21 nt, Human
uccccggcgucugaugccugc

SEQ ID NO: 1059191 - RNA, 19 nt, Human
ugccugcgccuccugaauu

SEQ ID NO: 1059192 - RNA, 24 nt, Human
aaucgcuugaacccaggaggcgga

SEQ ID NO: 1059193 - RNA, 20 nt, Human
acauggugcacucaggcucu

SEQ ID NO: 1059194 - RNA, 20 nt, Human
accuuuguggcugcucuccu

SEQ ID NO: 1059195 - RNA, 22 nt, Human
acugcacuccagccugggugac

SEQ ID NO: 1059196 - RNA, 24 nt, Human
acugcacuccagccugggugacgg

SEQ ID NO: 1059197 - RNA, 26 nt, Human
acugcacuccagccugggugacggag

SEQ ID NO: 1059198 - RNA, 23 nt, Human
agacaagcugaggacacacuccc

SEQ ID NO: 1059199 - RNA, 18 nt, Human
agaguuccagagcguucu

SEQ ID NO: 1059200 - RNA, 22 nt, Human
agaucuugccacugcacuccag

SEQ ID NO: 1059201 - RNA, 24 nt, Human
agccugggugacggagcgagacuc

SEQ ID NO: 1059202 - RNA, 22 nt, Human
agcuuagggcaaagucucacaa

SEQ ID NO: 1059203 - RNA, 19 nt, Human
aggaggcugaggcuggaga

SEQ ID NO: 1059204 - RNA, 24 nt, Human
aggcggagguugcagugagccaag

SEQ ID NO: 1059205 - RNA, 20 nt, Human
aggcucucgagggagggcuc

SEQ ID NO: 1059206 - RNA, 24 nt, Human
aggcugaggcuggagaaucgcuug

SEQ ID NO: 1059207 - RNA, 23 nt, Human
aggcuggagaaucgcuugaaccc

SEQ ID NO: 1059208 - RNA, 24 nt, Human
aucuugccacugcacuccagccug

SEQ ID NO: 1059209 - RNA, 19 nt, Human
caccagcaagggcuggaag

SEQ ID NO: 1059210 - RNA, 22 nt, Human
cacuccagccugggugacggag

SEQ ID NO: 1059211 - RNA, 23 nt, Human
cacuccagccugggugacggagc

SEQ ID NO: 1059212 - RNA, 24 nt, Human
cacuccagccugggugacggagcg

SEQ ID NO: 1059213 - RNA, 19 nt, Human
cacugcacuccagccuggg

SEQ ID NO: 1059214 - RNA, 19 nt, Human
cacugcacuccagccuggg

SEQ ID NO: 1059215 - RNA, 22 nt, Human
cacugcacuccagccuggguga

SEQ ID NO: 1059216 - RNA, 23 nt, Human
cacugcacuccagccugggugac

SEQ ID NO: 1059217 - RNA, 23 nt, Human
cacugcacuccagccugggugac

SEQ ID NO: 1059218 - RNA, 24 nt, Human
cacugcacuccagccugggugacg

SEQ ID NO: 1059219 - RNA, 20 nt, Human
cacugugcagggcuuugggu

SEQ ID NO: 1059220 - RNA, 20 nt, Human
cagaauccuccuguaauucc

SEQ ID NO: 1059221 - RNA, 24 nt, Human
cagacaagcugaggacacacuccc

SEQ ID NO: 1059222 - RNA, 20 nt, Human
cagagccuggguuugcuucc

SEQ ID NO: 1059223 - RNA, 24 nt, Human
cagagcguucugugaagccagagg

SEQ ID NO: 1059224 - RNA, 23 nt, Human
caggcccugugaggagaagcagg

SEQ ID NO: 1059225 - RNA, 22 nt, Human
ccacaagacauggugcacucag

SEQ ID NO: 1059226 - RNA, 20 nt, Human
ccacugcacuccagccuggg

SEQ ID NO: 1059227 - RNA, 20 nt, Human
ccacugcacuccagccuggg

SEQ ID NO: 1059228 - RNA, 21 nt, Human
ccacugcacuccagccugggu

SEQ ID NO: 1059229 - RNA, 21 nt, Human
ccacugcacuccagccugggu

SEQ ID NO: 1059230 - RNA, 23 nt, Human
ccacugcacuccagccuggguga

SEQ ID NO: 1059231 - RNA, 24 nt, Human
ccacugcacuccagccugggugac

SEQ ID NO: 1059232 - RNA, 22 nt, Human
ccaggaggcggagguugcagug

SEQ ID NO: 1059233 - RNA, 27 nt, Human
cccgauggcugcgccuggcccgucacc

SEQ ID NO: 1059234 - RNA, 23 nt, Human
ccuccuccagacaagcugaggac

SEQ ID NO: 1059235 - RNA, 23 nt, Human
ccucuggguuggcugaaugaccu

SEQ ID NO: 1059236 - RNA, 18 nt, Human
ccugcggaucuugggcuu

SEQ ID NO: 1059237 - RNA, 22 nt, Human
ccugggugacggagcgagacuc

SEQ ID NO: 1059238 - RNA, 19 nt, Human
ccuggugaccgaucuccuu

SEQ ID NO: 1059239 - RNA, 21 nt, Human
ccuguaauuccagcuacucag

SEQ ID NO: 1059240 - RNA, 22 nt, Human
ccuguaauuccagcuacucagg

SEQ ID NO: 1059241 - RNA, 21 nt, Human
cgcccugcacuucuugaggac

SEQ ID NO: 1059242 - RNA, 21 nt, Human
cgccuggcccgucaccugggc

SEQ ID NO: 1059243 - RNA, 21 nt, Human
cgugugugucuuucuugaccu

SEQ ID NO: 1059244 - RNA, 20 nt, Human
cuuuguggcugcucuccugg

SEQ ID NO: 1059245 - RNA, 19 nt, Human
gaaggagcacagagccugg

SEQ ID NO: 1059246 - RNA, 21 nt, Human
gaccuuuguggcugcucuccu

SEQ ID NO: 1059247 - RNA, 18 nt, Human
gagcacagagccuggguu

SEQ ID NO: 1059248 - RNA, 18 nt, Human
gaggcugaggcuggagaa

SEQ ID NO: 1059249 - RNA, 18 nt, Human
gagguugcagugagccaa

SEQ ID NO: 1059250 - RNA, 22 nt, Human
gagguugcagugagccaagauc

SEQ ID NO: 1059251 - RNA, 23 nt, Human
gcaaagucucacaauucucuaga

SEQ ID NO: 1059252 - RNA, 27 nt, Human
gcaccuccaagagcucaggauacaaua

SEQ ID NO: 1059253 - RNA, 24 nt, Human
gcacuccagccugggugacggagc

SEQ ID NO: 1059254 - RNA, 23 nt, Human
gcaggacagagguguucuccuuc

SEQ ID NO: 1059255 - RNA, 20 nt, Human
gcaggccuccuccagacaag

SEQ ID NO: 1059256 - RNA, 23 nt, Human
gcagggcuuuggguuggagcugg

SEQ ID NO: 1059257 - RNA, 19 nt, Human
gccacugcacuccagccug

SEQ ID NO: 1059258 - RNA, 24 nt, Human
gccacugcacuccagccuggguga

SEQ ID NO: 1059259 - RNA, 18 nt, Human
gcuuuggguuggagcugg

SEQ ID NO: 1059260 - RNA, 19 nt, Human
ggacagggucuacauccuc

SEQ ID NO: 1059261 - RNA, 22 nt, Human
ggaggcggagguugcagugagc

SEQ ID NO: 1059262 - RNA, 18 nt, Human
ggagguugcagugagcca

SEQ ID NO: 1059263 - RNA, 20 nt, Human
ggagguugcagugagccaag

SEQ ID NO: 1059264 - RNA, 22 nt, Human
gggagcacuuggcagcuuaggg

SEQ ID NO: 1059265 - RNA, 20 nt, Human
gguagcaucugcaccagcaa

SEQ ID NO: 1059266 - RNA, 21 nt, Human
ggugaggcacugugcagggcu

SEQ ID NO: 1059267 - RNA, 26 nt, Human
uaucgaugauguucuccuccccauuc

SEQ ID NO: 1059268 - RNA, 23 nt, Human
uccagccugggugacggagcgag

SEQ ID NO: 1059269 - RNA, 24 nt, Human
uccagccugggugacggagcgaga

SEQ ID NO: 1059270 - RNA, 19 nt, Human
uccgugugugucuuucuug

SEQ ID NO: 1059271 - RNA, 20 nt, Human
uccuccagacaagcugagga

SEQ ID NO: 1059272 - RNA, 22 nt, Human
uccugggcaccuccaagagcuc

SEQ ID NO: 1059273 - RNA, 24 nt, Human
ucgcuugaacccaggaggcggagg

SEQ ID NO: 1059274 - RNA, 20 nt, Human
ucugcugcaggacagagguu

SEQ ID NO: 1059275 - RNA, 22 nt, Human
ugacaagcuugugggguagcau

SEQ ID NO: 1059276 - RNA, 19 nt, Human
ugaggagaagcaggguucc

SEQ ID NO: 1059277 - RNA, 19 nt, Human
ugaggagaagcaggguucc

SEQ ID NO: 1059278 - RNA, 23 nt, Human
ugaggagagaccaggagaaggga

SEQ ID NO: 1059279 - RNA, 24 nt, Human
ugaggcuggagaaucgcuugaacc

SEQ ID NO: 1059280 - RNA, 24 nt, Human
ugggcuucuucaccggccgcagau

SEQ ID NO: 1059281 - RNA, 18 nt, Human
uguuuuauucuuuuguaa

SEQ ID NO: 1059282 - RNA, 19 nt, Human
uucucuagaauguaucugg

SEQ ID NO: 1059283 - RNA, 24 nt, Human
uugaacccaggaggcggagguugc

SEQ ID NO: 1059284 - RNA, 18 nt, Human
uugaggagagaccaggag

SEQ ID NO: 1059285 - RNA, 23 nt, Human
uugaggagagaccaggagaaggg

SEQ ID NO: 1059286 - RNA, 22 nt, Human
uugcagugagccaagaucuugc

SEQ ID NO: 1059287 - RNA, 20 nt, Human
uuugaggagagaccaggaga

SEQ ID NO: 1059288 - RNA, 22 nt, Human
aaaccccaucucuacuaaaaaa

SEQ ID NO: 1059289 - RNA, 19 nt, Human
aacccugucucaaaaaaaa

SEQ ID NO: 1059290 - RNA, 24 nt, Human
aaccgauugaaccugggaggcgga

SEQ ID NO: 1059291 - RNA, 20 nt, Human
aacuacaugcuacuccaucu

SEQ ID NO: 1059292 - RNA, 23 nt, Human
aagagcaaaacccugucucaaaa

SEQ ID NO: 1059293 - RNA, 21 nt, Human
aauaucuacaucauccucuau

SEQ ID NO: 1059294 - RNA, 19 nt, Human
aauaugagaaaccccaucu

SEQ ID NO: 1059295 - RNA, 23 nt, Human
aauuguugggucaaauaggucug

SEQ ID NO: 1059296 - RNA, 18 nt, Human
accccaucucuacuaaaa

SEQ ID NO: 1059297 - RNA, 24 nt, Human
acccuauugcccaggcuggaguag

SEQ ID NO: 1059298 - RNA, 24 nt, Human
accugaggucaggaguucaagacc

SEQ ID NO: 1059299 - RNA, 23 nt, Human
agaucaccugaggucaggaguuc

SEQ ID NO: 1059300 - RNA, 24 nt, Human
agcaguuugggaggccgagguggg

SEQ ID NO: 1059301 - RNA, 23 nt, Human
agccaggcgugguggcgcaugcc

SEQ ID NO: 1059302 - RNA, 21 nt, Human
agccaggugugguggcucacg

SEQ ID NO: 1059303 - RNA, 23 nt, Human
agcuuuugacuccuggguucggg

SEQ ID NO: 1059304 - RNA, 23 nt, Human
aggcacgcaccacgacacccagc

SEQ ID NO: 1059305 - RNA, 22 nt, Human
aggcaggaaaaccgauugaacc

SEQ ID NO: 1059306 - RNA, 24 nt, Human
aggcaggaaaaccgauugaaccug

SEQ ID NO: 1059307 - RNA, 21 nt, Human
aggccgaggugggcagaucac

SEQ ID NO: 1059308 - RNA, 20 nt, Human
aggcggagguuguggugagc

SEQ ID NO: 1059309 - RNA, 24 nt, Human
aggcgugguggcgcaugccuguaa

SEQ ID NO: 1059310 - RNA, 22 nt, Human
aggcugaggcaggaaaaccgau

SEQ ID NO: 1059311 - RNA, 24 nt, Human
aggguagccaggugugguggcuca

SEQ ID NO: 1059312 - RNA, 22 nt, Human
aggugggcagaucaccugaggu

SEQ ID NO: 1059313 - RNA, 26 nt, Human
aggugggcagaucaccugaggucagg

SEQ ID NO: 1059314 - RNA, 24 nt, Human
aggugugguggcucacgccuguaa

SEQ ID NO: 1059315 - RNA, 23 nt, Human
aguaccuaucuccccauucaggc

SEQ ID NO: 1059316 - RNA, 18 nt, Human
aguagcuaggauuauagg

SEQ ID NO: 1059317 - RNA, 19 nt, Human
aucacaguagcucacugca

SEQ ID NO: 1059318 - RNA, 24 nt, Human
aucacgcuauugcacuccaggcug

SEQ ID NO: 1059319 - RNA, 22 nt, Human
aucauccucuaucaguauuuuc

SEQ ID NO: 1059320 - RNA, 19 nt, Human
auccuccauaaagacuguc

SEQ ID NO: 1059321 - RNA, 18 nt, Human
auugcacuccaggcuggg

SEQ ID NO: 1059322 - RNA, 23 nt, Human
auugcacuccaggcugggcaaca

SEQ ID NO: 1059323 - RNA, 20 nt, Human
caagugauccucuugccuca

SEQ ID NO: 1059324 - RNA, 22 nt, Human
caagugauccucuugccucagc

SEQ ID NO: 1059325 - RNA, 27 nt, Human
caagugauccucuugccucagccuccu

SEQ ID NO: 1059326 - RNA, 21 nt, Human
cacaguagcacaccgagggaa

SEQ ID NO: 1059327 - RNA, 24 nt, Human
caccuacuugggaggcugaggcag

SEQ ID NO: 1059328 - RNA, 23 nt, Human
caccugaggucaggaguucaaga

SEQ ID NO: 1059329 - RNA, 24 nt, Human
caccugaguagcuaggauuauagg

SEQ ID NO: 1059330 - RNA, 24 nt, Human
cacgccuguaaucccagcaguuug

SEQ ID NO: 1059331 - RNA, 24 nt, Human
cacuccaggcugggcaacaagagc

SEQ ID NO: 1059332 - RNA, 20 nt, Human
cagagacaggaucuuacccu

SEQ ID NO: 1059333 - RNA, 24 nt, Human
cagaucaccugaggucaggaguuc

SEQ ID NO: 1059334 - RNA, 27 nt, Human
cagaucaccugaggucaggaguucaag

SEQ ID NO: 1059335 - RNA, 21 nt, Human
cagcaguuugggaggccgagg

SEQ ID NO: 1059336 - RNA, 24 nt, Human
cagcaguuugggaggccgaggugg

SEQ ID NO: 1059337 - RNA, 24 nt, Human
caggaucuuacccuauugcccagg

SEQ ID NO: 1059338 - RNA, 21 nt, Human
caucauguacauuuaucucuc

SEQ ID NO: 1059339 - RNA, 24 nt, Human
caugccuguaaucccaccuacuug

SEQ ID NO: 1059340 - RNA, 28 nt, Human
ccacacaaaauucaaguaccuaucuccc

SEQ ID NO: 1059341 - RNA, 18 nt, Human
cccagcccaauuucaugu

SEQ ID NO: 1059342 - RNA, 21 nt, Human
cccaggcuggaguagagaggc

SEQ ID NO: 1059343 - RNA, 23 nt, Human
cccaggcuggaguagagaggcau

SEQ ID NO: 1059344 - RNA, 23 nt, Human
cccaucucuacuaaaaaaauaca

SEQ ID NO: 1059345 - RNA, 25 nt, Human
cccugucucaaaaaaaaaaaaauau

SEQ ID NO: 1059346 - RNA, 24 nt, Human
ccgauugaaccugggaggcggagg

SEQ ID NO: 1059347 - RNA, 19 nt, Human
ccucaaacggcagcaaaac

SEQ ID NO: 1059348 - RNA, 20 nt, Human
ccuccuaaagcacugggauu

SEQ ID NO: 1059349 - RNA, 21 nt, Human
ccucucaccuccgccaccuga

SEQ ID NO: 1059350 - RNA, 24 nt, Human
ccucuugccucagccuccuaaagc

SEQ ID NO: 1059351 - RNA, 23 nt, Human
ccugaccaauaugagaaacccca

SEQ ID NO: 1059352 - RNA, 19 nt, Human
ccugaguagcuaggauuau

SEQ ID NO: 1059353 - RNA, 24 nt, Human
ccugaguagcuaggauuauaggca

SEQ ID NO: 1059354 - RNA, 18 nt, Human
ccuggccucaagugaucc

SEQ ID NO: 1059355 - RNA, 18 nt, Human
ccuggccucaagugaucc

SEQ ID NO: 1059356 - RNA, 20 nt, Human
ccuggccucaagugauccuc

SEQ ID NO: 1059357 - RNA, 22 nt, Human
ccuggccucaagugauccucuu

SEQ ID NO: 1059358 - RNA, 19 nt, Human
ccugggaggcggagguugu

SEQ ID NO: 1059359 - RNA, 22 nt, Human
ccuguaaucccaccuacuuggg

SEQ ID NO: 1059360 - RNA, 20 nt, Human
cgaggugggcagaucaccug

SEQ ID NO: 1059361 - RNA, 24 nt, Human
cgaggugggcagaucaccugaggu

SEQ ID NO: 1059362 - RNA, 26 nt, Human
cgaggugggcagaucaccugagguca

SEQ ID NO: 1059363 - RNA, 23 nt, Human
cgauugaaccugggaggcggagg

SEQ ID NO: 1059364 - RNA, 24 nt, Human
cgccuguaaucccagcaguuuggg

SEQ ID NO: 1059365 - RNA, 27 nt, Human
cgcuacauuacccaggcuggucuggaa

SEQ ID NO: 1059366 - RNA, 24 nt, Human
cuauugcacuccaggcugggcaac

SEQ ID NO: 1059367 - RNA, 21 nt, Human
cucacgccuguaaucccagca

SEQ ID NO: 1059368 - RNA, 21 nt, Human
cucacgccuguaaucccagca

SEQ ID NO: 1059369 - RNA, 21 nt, Human
cucacugcagcuuuugacucc

SEQ ID NO: 1059370 - RNA, 24 nt, Human
cucacugcagcuuuugacuccugg

SEQ ID NO: 1059371 - RNA, 21 nt, Human
cucaucauguacauuuaucuc

SEQ ID NO: 1059372 - RNA, 18 nt, Human
cuccuuucuccucaaacg

SEQ ID NO: 1059373 - RNA, 24 nt, Human
gaguagcuaggauuauaggcacgc

SEQ ID NO: 1059374 - RNA, 24 nt, Human
gagugagccaucgugcccagccca

SEQ ID NO: 1059375 - RNA, 18 nt, Human
gaguuuuacuuuuuuccc

SEQ ID NO: 1059376 - RNA, 18 nt, Human
gauaacaggagugagcca

SEQ ID NO: 1059377 - RNA, 23 nt, Human
gaucaccugaggucaggaguuca

SEQ ID NO: 1059378 - RNA, 24 nt, Human
gaucaccugaggucaggaguucaa

SEQ ID NO: 1059379 - RNA, 19 nt, Human
gcacgcaccacgacaccca

SEQ ID NO: 1059380 - RNA, 21 nt, Human
gcagcuuuugacuccuggguu

SEQ ID NO: 1059381 - RNA, 18 nt, Human
gcaugaucacaguagcuc

SEQ ID NO: 1059382 - RNA, 20 nt, Human
gccuguaaucccaccuacuu

SEQ ID NO: 1059383 - RNA, 24 nt, Human
gcuauugcacuccaggcugggcaa

SEQ ID NO: 1059384 - RNA, 19 nt, Human
gcuggaguagagaggcaug

SEQ ID NO: 1059385 - RNA, 23 nt, Human
gcuggucuggaacuccuggccuc

SEQ ID NO: 1059386 - RNA, 21 nt, Human
ggaaaaccgauugaaccuggg

SEQ ID NO: 1059387 - RNA, 22 nt, Human
ggagguuguggugagcugagau

SEQ ID NO: 1059388 - RNA, 23 nt, Human
ggagguuguggugagcugagauc

SEQ ID NO: 1059389 - RNA, 24 nt, Human
ggagguuguggugagcugagauca

SEQ ID NO: 1059390 - RNA, 25 nt, Human
ggcagaucaccugaggucaggaguu

SEQ ID NO: 1059391 - RNA, 22 nt, Human
ggccucaagugauccucuugcc

SEQ ID NO: 1059392 - RNA, 24 nt, Human
ggccucaagugauccucuugccuc

SEQ ID NO: 1059393 - RNA, 21 nt, Human
ggcucacgccuguaaucccag

SEQ ID NO: 1059394 - RNA, 24 nt, Human
ggcuggucuggaacuccuggccuc

SEQ ID NO: 1059395 - RNA, 22 nt, Human
gguagccaggugugguggcuca

SEQ ID NO: 1059396 - RNA, 19 nt, Human
gugagcaccucaccuucuc

SEQ ID NO: 1059397 - RNA, 23 nt, Human
gugauccucuugccucagccucc

SEQ ID NO: 1059398 - RNA, 21 nt, Human
gugcccagcccaauuucaugu

SEQ ID NO: 1059399 - RNA, 23 nt, Human
guggcucacgccuguaaucccag

SEQ ID NO: 1059400 - RNA, 21 nt, Human
guuugggaggccgaggugggc

SEQ ID NO: 1059401 - RNA, 19 nt, Human
uaaagcacugggauaacag

SEQ ID NO: 1059402 - RNA, 24 nt, Human
uaaagcacugggauaacaggagug

SEQ ID NO: 1059403 - RNA, 21 nt, Human
uaauaucuacaucauccucua

SEQ ID NO: 1059404 - RNA, 18 nt, Human
uacaucuuguggaguuuu

SEQ ID NO: 1059405 - RNA, 24 nt, Human
uacauuacccaggcuggucuggaa

SEQ ID NO: 1059406 - RNA, 22 nt, Human
uacccuauugcccaggcuggag

SEQ ID NO: 1059407 - RNA, 18 nt, Human
uagagacagggucucgcu

SEQ ID NO: 1059408 - RNA, 21 nt, Human
uagagaggcaugaucacagua

SEQ ID NO: 1059409 - RNA, 24 nt, Human
uagccaggugugguggcucacgcc

SEQ ID NO: 1059410 - RNA, 23 nt, Human
uagcucacugcagcuuuugacuc

SEQ ID NO: 1059411 - RNA, 21 nt, Human
uaggauuauaggcacgcacca

SEQ ID NO: 1059412 - RNA, 24 nt, Human
uauugcacuccaggcugggcaaca

SEQ ID NO: 1059413 - RNA, 23 nt, Human
ucaccugaggucaggaguucaag

SEQ ID NO: 1059414 - RNA, 24 nt, Human
ucacugcagcuuuugacuccuggg

SEQ ID NO: 1059415 - RNA, 26 nt, Human
ucacugcagcuuuugacuccuggguc

SEQ ID NO: 1059416 - RNA, 24 nt, Human
uccauccacaaauguuguaugcau

SEQ ID NO: 1059417 - RNA, 25 nt, Human
ucuauaaugaacauuuagcuuguuu

SEQ ID NO: 1059418 - RNA, 27 nt, Human
ucuccuuucuccucaaacggcagcaaa

SEQ ID NO: 1059419 - RNA, 26 nt, Human
ucucgcuacauuacccaggcuggucu

SEQ ID NO: 1059420 - RNA, 27 nt, Human
ucucgcuacauuacccaggcuggucug

SEQ ID NO: 1059421 - RNA, 24 nt, Human
ucucuacuaaaaaaauacaaaauu

SEQ ID NO: 1059422 - RNA, 20 nt, Human
ucucuuauaaaucaagugag

SEQ ID NO: 1059423 - RNA, 21 nt, Human
ucuguauuuucuccuuucucc

SEQ ID NO: 1059424 - RNA, 22 nt, Human
ucuuacccuauugcccaggcug

SEQ ID NO: 1059425 - RNA, 23 nt, Human
ucuuacccuauugcccaggcugg

SEQ ID NO: 1059426 - RNA, 24 nt, Human
ucuuacccuauugcccaggcugga

SEQ ID NO: 1059427 - RNA, 22 nt, Human
ugaaccugggaggcggagguug

SEQ ID NO: 1059428 - RNA, 24 nt, Human
ugacuccuggguucgggcaauccu

SEQ ID NO: 1059429 - RNA, 24 nt, Human
ugagaucacgcuauugcacuccag

SEQ ID NO: 1059430 - RNA, 22 nt, Human
ugagcugagaucacgcuauugc

SEQ ID NO: 1059431 - RNA, 20 nt, Human
ugaggcaggaaaaccgauug

SEQ ID NO: 1059432 - RNA, 24 nt, Human
ugaggcaggaaaaccgauugaacc

SEQ ID NO: 1059433 - RNA, 25 nt, Human
ugaggcaggaaaaccgauugaaccu

SEQ ID NO: 1059434 - RNA, 22 nt, Human
ugcacuccaggcugggcaacaa

SEQ ID NO: 1059435 - RNA, 25 nt, Human
ugcacuccaggcugggcaacaagag

SEQ ID NO: 1059436 - RNA, 20 nt, Human
ugcagcuuuugacuccuggg

SEQ ID NO: 1059437 - RNA, 21 nt, Human
ugcauacauaagcaacauaua

SEQ ID NO: 1059438 - RNA, 26 nt, Human
ugcauacauaagcaacauauaaauau

SEQ ID NO: 1059439 - RNA, 24 nt, Human
ugcauuuauaaaucugauggauuc

SEQ ID NO: 1059440 - RNA, 23 nt, Human
ugcccaggcuggaguagagaggc

SEQ ID NO: 1059441 - RNA, 24 nt, Human
ugcccaggcuggaguagagaggca

SEQ ID NO: 1059442 - RNA, 24 nt, Human
ugccucagccuccuaaagcacugg

SEQ ID NO: 1059443 - RNA, 23 nt, Human
ugccuguaaucccaccuacuugg

SEQ ID NO: 1059444 - RNA, 24 nt, Human
ugccuguaaucccaccuacuuggg

SEQ ID NO: 1059445 - RNA, 18 nt, Human
uggccucaagugauccuc

SEQ ID NO: 1059446 - RNA, 19 nt, Human
uggccucaagugauccucu

SEQ ID NO: 1059447 - RNA, 24 nt, Human
uggccucaagugauccucuugccu

SEQ ID NO: 1059448 - RNA, 21 nt, Human
uggcgcaugccuguaauccca

SEQ ID NO: 1059449 - RNA, 22 nt, Human
uggcucacgccuguaaucccag

SEQ ID NO: 1059450 - RNA, 24 nt, Human
uggcucacgccuguaaucccagca

SEQ ID NO: 1059451 - RNA, 19 nt, Human
ugggaggccgaggugggca

SEQ ID NO: 1059452 - RNA, 20 nt, Human
ugggaggccgaggugggcag

SEQ ID NO: 1059453 - RNA, 24 nt, Human
ugggaggccgaggugggcagauca

SEQ ID NO: 1059454 - RNA, 24 nt, Human
ugggaggcggagguuguggugagc

SEQ ID NO: 1059455 - RNA, 18 nt, Human
ugggaggcugaggcagga

SEQ ID NO: 1059456 - RNA, 24 nt, Human
ugggaggcugaggcaggaaaaccg

SEQ ID NO: 1059457 - RNA, 21 nt, Human
ugggauaacaggagugagcca

SEQ ID NO: 1059458 - RNA, 24 nt, Human
ugggcagaucaccugaggucagga

SEQ ID NO: 1059459 - RNA, 24 nt, Human
ugguggcgcaugccuguaauccca

SEQ ID NO: 1059460 - RNA, 24 nt, Human
ugguggcucacgccuguaauccca

SEQ ID NO: 1059461 - RNA, 18 nt, Human
uguaaucccaccuacuug

SEQ ID NO: 1059462 - RNA, 25 nt, Human
uguaugcauacauaagcaacauaua

SEQ ID NO: 1059463 - RNA, 25 nt, Human
uguccuugucccucaguuugucuca

SEQ ID NO: 1059464 - RNA, 25 nt, Human
uguggaguuuuacuuuuuuccccaa

SEQ ID NO: 1059465 - RNA, 24 nt, Human
uguucuacaucuuguggaguuuua

SEQ ID NO: 1059466 - RNA, 24 nt, Human
uuacccuauugcccaggcuggagu

SEQ ID NO: 1059467 - RNA, 24 nt, Human
uugaaccugggaggcggagguugu

SEQ ID NO: 1059468 - RNA, 18 nt, Human
uugacuccuggguucggg

SEQ ID NO: 1059469 - RNA, 25 nt, Human
uugggaggccgaggugggcagauca

SEQ ID NO: 1059470 - RNA, 24 nt, Human
uuguagagacagggucucgcuaca

SEQ ID NO: 1059471 - RNA, 21 nt, Human
uuguggugagcugagaucacg

SEQ ID NO: 1059472 - RNA, 23 nt, Human
cccccaccuacuccagcugggag

SEQ ID NO: 1059473 - RNA, 18 nt, Human
cucccccaccuacuccag

SEQ ID NO: 1059474 - RNA, 19 nt, Human
aaagggacugggguccugu

SEQ ID NO: 1059475 - RNA, 23 nt, Human
agcaaguggcaggaaccaugggg

SEQ ID NO: 1059476 - RNA, 23 nt, Human
aggcgggacccagcagaagcccg

SEQ ID NO: 1059477 - RNA, 23 nt, Human
aguugaaaguucacaguaauaug

SEQ ID NO: 1059478 - RNA, 18 nt, Human
cagaagcccgcgaguccc

SEQ ID NO: 1059479 - RNA, 23 nt, Human
cccauccugccccgcgagcucca

SEQ ID NO: 1059480 - RNA, 23 nt, Human
cccuuggcugaggggaaagggac

SEQ ID NO: 1059481 - RNA, 22 nt, Human
ccgugccucaucaugacccgca

SEQ ID NO: 1059482 - RNA, 21 nt, Human
ccuaaccccccacguccgugc

SEQ ID NO: 1059483 - RNA, 18 nt, Human
ccuuggcugaggggaaag

SEQ ID NO: 1059484 - RNA, 24 nt, Human
cgccgggaugggccugugggccgg

SEQ ID NO: 1059485 - RNA, 22 nt, Human
cgcuaugguuacaugccccgcc

SEQ ID NO: 1059486 - RNA, 18 nt, Human
cgggaugggccugugggc

SEQ ID NO: 1059487 - RNA, 23 nt, Human
cugaggggaaagggacugggguc

SEQ ID NO: 1059488 - RNA, 22 nt, Human
cugcccgggccagccuccggcc

SEQ ID NO: 1059489 - RNA, 20 nt, Human
gauaguaguugaaaguucac

SEQ ID NO: 1059490 - RNA, 18 nt, Human
ggccugggggccgaaguu

SEQ ID NO: 1059491 - RNA, 20 nt, Human
guaauauggaaaagguauac

SEQ ID NO: 1059492 - RNA, 23 nt, Human
gucccuggcugccaaggccuggg

SEQ ID NO: 1059493 - RNA, 19 nt, Human
gugcucucugucgcuccag

SEQ ID NO: 1059494 - RNA, 19 nt, Human
guggcaggaaccaugggga

SEQ ID NO: 1059495 - RNA, 24 nt, Human
uaauauggaaaagguauacauuuu

SEQ ID NO: 1059496 - RNA, 23 nt, Human
ucacugcccgggccagccuccgg

SEQ ID NO: 1059497 - RNA, 19 nt, Human
ucccuggcugccaaggccu

SEQ ID NO: 1059498 - RNA, 21 nt, Human
uccggccccuguaagugcccc

SEQ ID NO: 1059499 - RNA, 22 nt, Human
ugccaaggccugggggccgaag

SEQ ID NO: 1059500 - RNA, 26 nt, Human
ugccccauccugccccgcgagcucca

SEQ ID NO: 1059501 - RNA, 23 nt, Human
caaagguuuucagggugagguuu

SEQ ID NO: 1059502 - RNA, 22 nt, Human
ccuuucacacaccaaaucucag

SEQ ID NO: 1059503 - RNA, 27 nt, Human
uggaaacaaugaaaaaugugaaacucc

SEQ ID NO: 1059504 - RNA, 25 nt, Human
uggaaccuuucacacaccaaaucuc

SEQ ID NO: 1059505 - RNA, 23 nt, Human
uguaaagaaaacauuuuuuuuuc

SEQ ID NO: 1059506 - RNA, 18 nt, Human
uuuguuguaaagaaaaca

SEQ ID NO: 1059507 - RNA, 24 nt, Human
aaacucaguuugcaaauuuccugc

SEQ ID NO: 1059508 - RNA, 20 nt, Human
acaggcaaaggcccagcaca

SEQ ID NO: 1059509 - RNA, 24 nt, Human
accaaagccacagggacacaacug

SEQ ID NO: 1059510 - RNA, 21 nt, Human
acccgaggcagcccauacccc

SEQ ID NO: 1059511 - RNA, 21 nt, Human
acccucugcugauccuaacuu

SEQ ID NO: 1059512 - RNA, 22 nt, Human
accuacaucacagccgcagcac

SEQ ID NO: 1059513 - RNA, 24 nt, Human
agacagggauugggagacaugcag

SEQ ID NO: 1059514 - RNA, 21 nt, Human
agcacaauggccggaggcccu

SEQ ID NO: 1059515 - RNA, 22 nt, Human
aggcagaagcuguuagagacuc

SEQ ID NO: 1059516 - RNA, 18 nt, Human
aggcgcaccaaagccaca

SEQ ID NO: 1059517 - RNA, 20 nt, Human
agguagcccaguggcuggga

SEQ ID NO: 1059518 - RNA, 22 nt, Human
aguucacauguuucacuccuuc

SEQ ID NO: 1059519 - RNA, 19 nt, Human
aucugccagggcccuccuc

SEQ ID NO: 1059520 - RNA, 24 nt, Human
auucuguuuauaggaagucuucca

SEQ ID NO: 1059521 - RNA, 23 nt, Human
caacccgaggcagcccauacccc

SEQ ID NO: 1059522 - RNA, 19 nt, Human
caagagggagucuccucgc

SEQ ID NO: 1059523 - RNA, 26 nt, Human
caauaauaacucacaaagcugucaag

SEQ ID NO: 1059524 - RNA, 19 nt, Human
cacacaggcgcaccaaagc

SEQ ID NO: 1059525 - RNA, 21 nt, Human
caccuggaacagaagcaauag

SEQ ID NO: 1059526 - RNA, 19 nt, Human
cagaagcaauagccgccac

SEQ ID NO: 1059527 - RNA, 19 nt, Human
cagcaccuggaacagaagc

SEQ ID NO: 1059528 - RNA, 21 nt, Human
cagcccauaccccagaaacag

SEQ ID NO: 1059529 - RNA, 24 nt, Human
cagcccauaccccagaaacagccu

SEQ ID NO: 1059530 - RNA, 21 nt, Human
cagccugucagaaguugccag

SEQ ID NO: 1059531 - RNA, 19 nt, Human
caggaggcuggggacaugc

SEQ ID NO: 1059532 - RNA, 19 nt, Human
caggagguagcccaguggc

SEQ ID NO: 1059533 - RNA, 20 nt, Human
caggcugcgaaggagacuga

SEQ ID NO: 1059534 - RNA, 25 nt, Human
caucacagccgcagcacacaauucc

SEQ ID NO: 1059535 - RNA, 23 nt, Human
cauccucaaucuaacgcuggaaa

SEQ ID NO: 1059536 - RNA, 19 nt, Human
ccaaagccacagggacaca

SEQ ID NO: 1059537 - RNA, 22 nt, Human
ccagggcccuccucuacccucu

SEQ ID NO: 1059538 - RNA, 19 nt, Human
cccauaucucagcugggaa

SEQ ID NO: 1059539 - RNA, 20 nt, Human
ccccacaucugccagggccc

SEQ ID NO: 1059540 - RNA, 23 nt, Human
cccucgcacccacaccugucuca

SEQ ID NO: 1059541 - RNA, 22 nt, Human
ccggcggcuggggugaaagccg

SEQ ID NO: 1059542 - RNA, 22 nt, Human
ccuaacuuguuaaacucaguuu

SEQ ID NO: 1059543 - RNA, 18 nt, Human
ccucccuaccucauccuc

SEQ ID NO: 1059544 - RNA, 24 nt, Human
ccuggacagaugcccgcgcggggg

SEQ ID NO: 1059545 - RNA, 24 nt, Human
cgacaaggcccuggacagaugccc

SEQ ID NO: 1059546 - RNA, 24 nt, Human
cgaggcagcccauaccccagaaac

SEQ ID NO: 1059547 - RNA, 22 nt, Human
cgcaccaaagccacagggacac

SEQ ID NO: 1059548 - RNA, 21 nt, Human
cgcagcacacaauuccaggaa

SEQ ID NO: 1059549 - RNA, 18 nt, Human
cucacaccucggucccaa

SEQ ID NO: 1059550 - RNA, 19 nt, Human
cuccagguggagggagaaa

SEQ ID NO: 1059551 - RNA, 21 nt, Human
cuccucugacucuuggaaucc

SEQ ID NO: 1059552 - RNA, 18 nt, Human
cugccaggagguagccca

SEQ ID NO: 1059553 - RNA, 30 nt, Human
cuggaagucccuccaccuggggucacugag

SEQ ID NO: 1059554 - RNA, 23 nt, Human
cuuccauccugcaccagcagcug

SEQ ID NO: 1059555 - RNA, 25 nt, Human
cuucuggccuucauaccaacccauu

SEQ ID NO: 1059556 - RNA, 24 nt, Human
gaacagcaccuggaacagaagcaa

SEQ ID NO: 1059557 - RNA, 22 nt, Human
gaagagaaaucuugggagaguc

SEQ ID NO: 1059558 - RNA, 19 nt, Human
gaagggcuuaccguggccu

SEQ ID NO: 1059559 - RNA, 19 nt, Human
gagaagagaaaucuuggga

SEQ ID NO: 1059560 - RNA, 25 nt, Human
gcgcaccaaagccacagggacacaa

SEQ ID NO: 1059561 - RNA, 24 nt, Human
ggaaaccuggugcucaauauuggu

SEQ ID NO: 1059562 - RNA, 23 nt, Human
ggaagucuuccauccugcaccag

SEQ ID NO: 1059563 - RNA, 18 nt, Human
ggaccggcggcuggggug

SEQ ID NO: 1059564 - RNA, 23 nt, Human
ggaggcggugggcaggggaacuc

SEQ ID NO: 1059565 - RNA, 21 nt, Human
gggaacucuuuucuuuccuug

SEQ ID NO: 1059566 - RNA, 24 nt, Human
gggcaggagaggcacagacacugc

SEQ ID NO: 1059567 - RNA, 18 nt, Human
gucagagcuuaggaguga

SEQ ID NO: 1059568 - RNA, 23 nt, Human
guugaacgguuggggccaggcug

SEQ ID NO: 1059569 - RNA, 26 nt, Human
uaacagcaacaacccgaggcagccca

SEQ ID NO: 1059570 - RNA, 25 nt, Human
uaacuccuguccucuucuagacccc

SEQ ID NO: 1059571 - RNA, 23 nt, Human
uaccccagaaacagccugucaga

SEQ ID NO: 1059572 - RNA, 22 nt, Human
uagcccaguggcugggaggcgg

SEQ ID NO: 1059573 - RNA, 24 nt, Human
uaggucaccaaauguugccagaag

SEQ ID NO: 1059574 - RNA, 22 nt, Human
ucaccucccuaccucauccuca

SEQ ID NO: 1059575 - RNA, 19 nt, Human
uccagguggagggagaaag

SEQ ID NO: 1059576 - RNA, 26 nt, Human
uccccaggcucccugucugacucugu

SEQ ID NO: 1059577 - RNA, 22 nt, Human
uccucaggguccaaguccccau

SEQ ID NO: 1059578 - RNA, 19 nt, Human
uccucuucuagaccccaca

SEQ ID NO: 1059579 - RNA, 20 nt, Human
ucugccagggcccuccucua

SEQ ID NO: 1059580 - RNA, 23 nt, Human
ucugccagggcccuccucuaccc

SEQ ID NO: 1059581 - RNA, 22 nt, Human
ucuggaucaccucccuaccuca

SEQ ID NO: 1059582 - RNA, 21 nt, Human
ucuucuagaccccacaucugc

SEQ ID NO: 1059583 - RNA, 23 nt, Human
ugaaaacacaauaggcuuuggga

SEQ ID NO: 1059584 - RNA, 25 nt, Human
ugagagcgcgacaaggcccuggaca

SEQ ID NO: 1059585 - RNA, 22 nt, Human
ugaggcagaagcuguuagagac

SEQ ID NO: 1059586 - RNA, 22 nt, Human
ugccagggcccuccucuacccu

SEQ ID NO: 1059587 - RNA, 23 nt, Human
uggaaaauguuagucaaaugaac

SEQ ID NO: 1059588 - RNA, 25 nt, Human
uggagacugcucucuagccccuggg

SEQ ID NO: 1059589 - RNA, 20 nt, Human
uggagagaagagaaaucuug

SEQ ID NO: 1059590 - RNA, 20 nt, Human
uggcuuccuauuaccuugug

SEQ ID NO: 1059591 - RNA, 18 nt, Human
ugggaagggcuuaccgug

SEQ ID NO: 1059592 - RNA, 18 nt, Human
ugggaggcggugggcagg

SEQ ID NO: 1059593 - RNA, 22 nt, Human
uguaacagcaacaacccgaggc

SEQ ID NO: 1059594 - RNA, 18 nt, Human
ugucucagaaguucgucg

SEQ ID NO: 1059595 - RNA, 26 nt, Human
ugucucagaaguucgucgaccgacgg

SEQ ID NO: 1059596 - RNA, 19 nt, Human
uguuagcccaugcuccagg

SEQ ID NO: 1059597 - RNA, 23 nt, Human
uguuucacuccuucuggccuuca

SEQ ID NO: 1059598 - RNA, 19 nt, Human
uuagcccaugcuccaggug

SEQ ID NO: 1059599 - RNA, 21 nt, Human
uucauaccaacccauuguuaa

SEQ ID NO: 1059600 - RNA, 21 nt, Human
uucccuccucacaccucgguc

SEQ ID NO: 1059601 - RNA, 24 nt, Human
uuccuucuccgccuucucuggauc

SEQ ID NO: 1059602 - RNA, 23 nt, Human
uugcaaauuuccugccaggaggu

SEQ ID NO: 1059603 - RNA, 23 nt, Human
uuggggccaggcugcgaaggaga

SEQ ID NO: 1059604 - RNA, 19 nt, Human
uuugcaaauuuccugccag

SEQ ID NO: 1059605 - RNA, 19 nt, Human
aaaagggaggagagcagaa

SEQ ID NO: 1059606 - RNA, 22 nt, Human
aaaccguacggugaaggaacac

SEQ ID NO: 1059607 - RNA, 20 nt, Human
aaagguaaacauuucugcag

SEQ ID NO: 1059608 - RNA, 23 nt, Human
aacaaugacaauccauugccccc

SEQ ID NO: 1059609 - RNA, 22 nt, Human
aacacuuuuuauuacagaaacc

SEQ ID NO: 1059610 - RNA, 21 nt, Human
aagaaacuaugaguaacaagc

SEQ ID NO: 1059611 - RNA, 21 nt, Human
aagcuauaacauaguucacca

SEQ ID NO: 1059612 - RNA, 19 nt, Human
acauucuaaagccaaguaa

SEQ ID NO: 1059613 - RNA, 18 nt, Human
accgaaaaaaugaucaaa

SEQ ID NO: 1059614 - RNA, 21 nt, Human
acggugaaggaacacaacaga

SEQ ID NO: 1059615 - RNA, 21 nt, Human
agcgcugacgggaacaucugc

SEQ ID NO: 1059616 - RNA, 20 nt, Human
auauacaauaugcauaugug

SEQ ID NO: 1059617 - RNA, 23 nt, Human
caagacuaauauaaauucacucc

SEQ ID NO: 1059618 - RNA, 18 nt, Human
caaugggacccccccccc

SEQ ID NO: 1059619 - RNA, 20 nt, Human
cacauaggaaaaagagguac

SEQ ID NO: 1059620 - RNA, 24 nt, Human
cacccuacaguuaguaauauuaca

SEQ ID NO: 1059621 - RNA, 18 nt, Human
cagaaaccguacggugaa

SEQ ID NO: 1059622 - RNA, 20 nt, Human
ccacaaugggaccccccccc

SEQ ID NO: 1059623 - RNA, 19 nt, Human
ccccccccccuuuuucuca

SEQ ID NO: 1059624 - RNA, 19 nt, Human
cccccccccuuuuucucac

SEQ ID NO: 1059625 - RNA, 20 nt, Human
ccugaauucaugagcaguug

SEQ ID NO: 1059626 - RNA, 22 nt, Human
cgaaaaaaugaucaaaaagaaa

SEQ ID NO: 1059627 - RNA, 25 nt, Human
cgagaaaauacuguugcacgcaaua

SEQ ID NO: 1059628 - RNA, 22 nt, Human
cuaaagccaaguaaaauauccc

SEQ ID NO: 1059629 - RNA, 25 nt, Human
gaaaaagagguacacgagaaaauac

SEQ ID NO: 1059630 - RNA, 23 nt, Human
gaccgacugacucagggcagcgc

SEQ ID NO: 1059631 - RNA, 20 nt, Human
gagaugacccuggggaggga

SEQ ID NO: 1059632 - RNA, 19 nt, Human
gagugagucuuucuauccu

SEQ ID NO: 1059633 - RNA, 21 nt, Human
gcacgcaauaauuuucacaca

SEQ ID NO: 1059634 - RNA, 19 nt, Human
gcuugggguggggcggggc

SEQ ID NO: 1059635 - RNA, 20 nt, Human
ggcggggcgggggugugcuc

SEQ ID NO: 1059636 - RNA, 19 nt, Human
gggguggggcggggcgggg

SEQ ID NO: 1059637 - RNA, 19 nt, Human
ggguggggcggggcggggg

SEQ ID NO: 1059638 - RNA, 23 nt, Human
gguuaaaaaaaugcacacacaga

SEQ ID NO: 1059639 - RNA, 21 nt, Human
uaacauaguucaccacaaugg

SEQ ID NO: 1059640 - RNA, 22 nt, Human
uaauuuucacacagauuaacaa

SEQ ID NO: 1059641 - RNA, 23 nt, Human
uagacauuuauaaauaaaaaaga

SEQ ID NO: 1059642 - RNA, 23 nt, Human
uauaacauaguucaccacaaugg

SEQ ID NO: 1059643 - RNA, 18 nt, Human
ucaaaaagaaacuaugag

SEQ ID NO: 1059644 - RNA, 29 nt, Human
ucaacaaugacaauccauugccccuuuuu

SEQ ID NO: 1059645 - RNA, 19 nt, Human
uccaguguccugaauucau

SEQ ID NO: 1059646 - RNA, 21 nt, Human
ucccuguucucauuuugggga

SEQ ID NO: 1059647 - RNA, 23 nt, Human
ucuacacauauacaauaugcaua

SEQ ID NO: 1059648 - RNA, 20 nt, Human
ugaaggaacacaacagacca

SEQ ID NO: 1059649 - RNA, 21 nt, Human
ugaccugggagagaaagaucu

SEQ ID NO: 1059650 - RNA, 22 nt, Human
ugacucagggcagcgcugacgg

SEQ ID NO: 1059651 - RNA, 23 nt, Human
ugacucagggcagcgcugacggg

SEQ ID NO: 1059652 - RNA, 19 nt, Human
ugacugugcccuggaaagu

SEQ ID NO: 1059653 - RNA, 23 nt, Human
ugagaugacccuggggagggagc

SEQ ID NO: 1059654 - RNA, 22 nt, Human
ugagaugaccugggagagaaaa

SEQ ID NO: 1059655 - RNA, 25 nt, Human
ugaguaacaagcuauaacauaguuc

SEQ ID NO: 1059656 - RNA, 19 nt, Human
ugcacgcaauaauuuucac

SEQ ID NO: 1059657 - RNA, 20 nt, Human
ugcuugggguggggcggggc

SEQ ID NO: 1059658 - RNA, 21 nt, Human
uggaagaagcuugaagugagc

SEQ ID NO: 1059659 - RNA, 22 nt, Human
uggaccuggugacuuagugucg

SEQ ID NO: 1059660 - RNA, 19 nt, Human
uggggagggagccacguuc

SEQ ID NO: 1059661 - RNA, 20 nt, Human
uggggagggagccacguucc

SEQ ID NO: 1059662 - RNA, 21 nt, Human
uguaaaacauucuaaagccaa

SEQ ID NO: 1059663 - RNA, 23 nt, Human
uguugcacgcaauaauuuucaca

SEQ ID NO: 1059664 - RNA, 23 nt, Human
uuaacauggauuaacacuuuuua

SEQ ID NO: 1059665 - RNA, 26 nt, Human
uuagaaauucugcugccccaaaguau

SEQ ID NO: 1059666 - RNA, 19 nt, Human
aggcugaggggcagaucgu

SEQ ID NO: 1059667 - RNA, 22 nt, Human
aguggguguggacucgagaggc

SEQ ID NO: 1059668 - RNA, 28 nt, Human
caaaaaacacccaaugcuuaggagccuc

SEQ ID NO: 1059669 - RNA, 18 nt, Human
caaaacagcagcaaggac

SEQ ID NO: 1059670 - RNA, 21 nt, Human
caaaacuucuagaccaaucau

SEQ ID NO: 1059671 - RNA, 22 nt, Human
cacuccacuuccuuuccacgca

SEQ ID NO: 1059672 - RNA, 19 nt, Human
cagcagcaaggacggugag

SEQ ID NO: 1059673 - RNA, 22 nt, Human
ccguguguccacuccacuuccu

SEQ ID NO: 1059674 - RNA, 21 nt, Human
cugggggugaggcugaggggc

SEQ ID NO: 1059675 - RNA, 24 nt, Human
gcaaaacagcagcaaggacgguga

SEQ ID NO: 1059676 - RNA, 24 nt, Human
uaggagccucagucucaaaacuuc

SEQ ID NO: 1059677 - RNA, 22 nt, Human
ucaaaaaacacccaaugcuuag

SEQ ID NO: 1059678 - RNA, 19 nt, Human
ucucaaaacuucuagacca

SEQ ID NO: 1059679 - RNA, 23 nt, Human
ugcaaaacagcagcaaggacggu

SEQ ID NO: 1059680 - RNA, 21 nt, Human
ugcuuaggagccucagucuca

SEQ ID NO: 1059681 - RNA, 20 nt, Human
uugcaaaacagcagcaagga

SEQ ID NO: 1059682 - RNA, 26 nt, Human
uugcaaaacagcagcaaggacgguga

SEQ ID NO: 1059683 - RNA, 22 nt, Human
aaaaggagagggcccaaggcua

SEQ ID NO: 1059684 - RNA, 22 nt, Human
aaaaggagagggcccaaggcua

SEQ ID NO: 1059685 - RNA, 18 nt, Human
aaggagagggcccaaggc

SEQ ID NO: 1059686 - RNA, 18 nt, Human
cagcagccagguugaugg

SEQ ID NO: 1059687 - RNA, 19 nt, Human
cagcagccagguugauggc

SEQ ID NO: 1059688 - RNA, 18 nt, Human
cagccgaaggccacggug

SEQ ID NO: 1059689 - RNA, 19 nt, Human
cagccucucggcccggccc

SEQ ID NO: 1059690 - RNA, 23 nt, Human
ccagccucgggccgggcgcgccc

SEQ ID NO: 1059691 - RNA, 21 nt, Human
cccccagccucgggccgggcg

SEQ ID NO: 1059692 - RNA, 19 nt, Human
ccccgaguccgcccggccc

SEQ ID NO: 1059693 - RNA, 23 nt, Human
ccccgcgccugacccugcgcgcc

SEQ ID NO: 1059694 - RNA, 25 nt, Human
ccccgcgccugacccugcgcgcccg

SEQ ID NO: 1059695 - RNA, 25 nt, Human
cccggcccggccugggguccucggc

SEQ ID NO: 1059696 - RNA, 26 nt, Human
cccugcgcgcccgcgccccgcucccc

SEQ ID NO: 1059697 - RNA, 23 nt, Human
ccgagagaagagcugcagccaca

SEQ ID NO: 1059698 - RNA, 19 nt, Human
ccgcgccccgcucccccag

SEQ ID NO: 1059699 - RNA, 21 nt, Human
ccgcgccccgcucccccagcc

SEQ ID NO: 1059700 - RNA, 21 nt, Human
ccucucggcccggcccggccu

SEQ ID NO: 1059701 - RNA, 20 nt, Human
ccugcgcgcccgcgccccgc

SEQ ID NO: 1059702 - RNA, 23 nt, Human
cgagagaagagcugcagccacac

SEQ ID NO: 1059703 - RNA, 25 nt, Human
cgccaugccgccccgcgccugaccc

SEQ ID NO: 1059704 - RNA, 22 nt, Human
cgcccggccccgguccaggagc

SEQ ID NO: 1059705 - RNA, 20 nt, Human
cggcccggcccggccugggg

SEQ ID NO: 1059706 - RNA, 24 nt, Human
cgguccccgaguccgcccggcccc

SEQ ID NO: 1059707 - RNA, 21 nt, Human
cggugcccacagcagccaggu

SEQ ID NO: 1059708 - RNA, 20 nt, Human
gagagaagagcugcagccac

SEQ ID NO: 1059709 - RNA, 22 nt, Human
gccgaaggccacggugcccaca

SEQ ID NO: 1059710 - RNA, 18 nt, Human
gccucgggccgggcgcgc

SEQ ID NO: 1059711 - RNA, 21 nt, Human
gcgccccgcucccccagccuc

SEQ ID NO: 1059712 - RNA, 22 nt, Human
ggcuaagagguagccugcggug

SEQ ID NO: 1059713 - RNA, 18 nt, Human
gggucagucucuccaccg

SEQ ID NO: 1059714 - RNA, 18 nt, Human
uaagagguagccugcggu

SEQ ID NO: 1059715 - RNA, 19 nt, Human
uaagagguagccugcggug

SEQ ID NO: 1059716 - RNA, 22 nt, Human
ugcagccgaaggccacggugcc

SEQ ID NO: 1059717 - RNA, 23 nt, Human
ugccagcgccaccaagauguagg

SEQ ID NO: 1059718 - RNA, 25 nt, Human
ugccgccccgcgccugacccugcgc

SEQ ID NO: 1059719 - RNA, 18 nt, Human
uguucaggagcacggcug

SEQ ID NO: 1059720 - RNA, 22 nt, Human
aaucaugcccaugaaaaacuaa

SEQ ID NO: 1059721 - RNA, 24 nt, Human
aucaugcccaugaaaaacuaaagu

SEQ ID NO: 1059722 - RNA, 20 nt, Human
augcccaugaaaaacuaaag

SEQ ID NO: 1059723 - RNA, 24 nt, Human
cccacagaugcacccaagaucugg

SEQ ID NO: 1059724 - RNA, 24 nt, Human
cuccacugcccacagaugcaccca

SEQ ID NO: 1059725 - RNA, 18 nt, Human
cugggggcuggcugugga

SEQ ID NO: 1059726 - RNA, 18 nt, Human
cugggggcuggcugugga

SEQ ID NO: 1059727 - RNA, 23 nt, Human
gcauucuuguagguaguuagaag

SEQ ID NO: 1059728 - RNA, 18 nt, Human
ucaugcccaugaaaaacu

SEQ ID NO: 1059729 - RNA, 18 nt, Human
uccacugcccacagaugc

SEQ ID NO: 1059730 - RNA, 23 nt, Human
ugcacccaagaucugggggcugg

SEQ ID NO: 1059731 - RNA, 24 nt, Human
uggaaucaugcccaugaaaaacua

SEQ ID NO: 1059732 - RNA, 23 nt, Human
uggcuguggaagacaaagagcau

SEQ ID NO: 1059733 - RNA, 18 nt, Human
uguggaagacaaagagca

SEQ ID NO: 1059734 - RNA, 19 nt, Human
uuguagguaguuagaagua

SEQ ID NO: 1059735 - RNA, 21 nt, Human
cagagccaguggaaugcagag

SEQ ID NO: 1059736 - RNA, 18 nt, Human
gagccaguggaaugcaga

SEQ ID NO: 1059737 - RNA, 18 nt, Human
guauaguccauggcagag

SEQ ID NO: 1059738 - RNA, 23 nt, Human
guggaaugcagagggagaaguag

SEQ ID NO: 1059739 - RNA, 21 nt, Human
aaaauacauacacucaaggca

SEQ ID NO: 1059740 - RNA, 21 nt, Human
aaaauauauacacucaaggca

SEQ ID NO: 1059741 - RNA, 21 nt, Human
aauugugugagauuuuaccuc

SEQ ID NO: 1059742 - RNA, 22 nt, Human
aauugugugagauuuuaccucu

SEQ ID NO: 1059743 - RNA, 20 nt, Human
acuuuguuguaaaagucucc

SEQ ID NO: 1059744 - RNA, 26 nt, Human
agaauugugugagauuuuaccucuug

SEQ ID NO: 1059745 - RNA, 24 nt, Human
auaauacauuuucaaagagcuuuc

SEQ ID NO: 1059746 - RNA, 22 nt, Human
auagcucuggugauuuuucaug

SEQ ID NO: 1059747 - RNA, 25 nt, Human
caaaauacauacacucaaggcacaa

SEQ ID NO: 1059748 - RNA, 21 nt, Human
caaaauauauacacucaaggc

SEQ ID NO: 1059749 - RNA, 26 nt, Human
cacaaaauauauacacucaaggcaca

SEQ ID NO: 1059750 - RNA, 21 nt, Human
caccuauagcucuggugauuu

SEQ ID NO: 1059751 - RNA, 26 nt, Human
cucuuggguuccaaguauguuuuugu

SEQ ID NO: 1059752 - RNA, 20 nt, Human
uagcucuggugauuuuucau

SEQ ID NO: 1059753 - RNA, 21 nt, Human
ucuuucauuuggcuucaagug

SEQ ID NO: 1059754 - RNA, 18 nt, Human
ugaaggaagaacgugaua

SEQ ID NO: 1059755 - RNA, 22 nt, Human
uguuuuauucaucucuuucauu

SEQ ID NO: 1059756 - RNA, 20 nt, Human
uucaucucuuucauuuggcu

SEQ ID NO: 1059757 - RNA, 21 nt, Human
uuuuuuuuuuuugguuucuca

SEQ ID NO: 1059758 - RNA, 18 nt, Human
aaaaaccaacaccugccc

SEQ ID NO: 1059759 - RNA, 25 nt, Human
aaaaagccucagaaauauagcuaua

SEQ ID NO: 1059760 - RNA, 18 nt, Human
aaaauacaaaaaaagccu

SEQ ID NO: 1059761 - RNA, 18 nt, Human
aaccaaacccaaacuccc

SEQ ID NO: 1059762 - RNA, 20 nt, Human
aagaauccaguagcaaugcc

SEQ ID NO: 1059763 - RNA, 23 nt, Human
aagcaaaugcaugauaaguuuau

SEQ ID NO: 1059764 - RNA, 21 nt, Human
aaugcaagaaacaaaaaccaa

SEQ ID NO: 1059765 - RNA, 25 nt, Human
aaugcaagaaacaaaaaccaacacc

SEQ ID NO: 1059766 - RNA, 24 nt, Human
acaucccagagaaaugcaagaaac

SEQ ID NO: 1059767 - RNA, 20 nt, Human
accaaacccaaacucccagc

SEQ ID NO: 1059768 - RNA, 20 nt, Human
acgcugcgggaaaagacaga

SEQ ID NO: 1059769 - RNA, 19 nt, Human
acgcugcgggaaaagacca

SEQ ID NO: 1059770 - RNA, 21 nt, Human
agacagaugcugccggaccug

SEQ ID NO: 1059771 - RNA, 24 nt, Human
agagaacuaauuugaaacuuaaau

SEQ ID NO: 1059772 - RNA, 27 nt, Human
aguagcaaugccugcuaagagugguuc

SEQ ID NO: 1059773 - RNA, 23 nt, Human
augcaugauaaguuuauucuggg

SEQ ID NO: 1059774 - RNA, 24 nt, Human
caaaacauaaaacuauauuuuuaa

SEQ ID NO: 1059775 - RNA, 21 nt, Human
caaacucccagcgcgccgcgg

SEQ ID NO: 1059776 - RNA, 21 nt, Human
caaccaaacccaaacucccag

SEQ ID NO: 1059777 - RNA, 24 nt, Human
ccaaacccaaacucccagcgcgcc

SEQ ID NO: 1059778 - RNA, 21 nt, Human
ccuucuaugcagcaaugucaa

SEQ ID NO: 1059779 - RNA, 24 nt, Human
cuaaauauuggaaaaggcuuaaca

SEQ ID NO: 1059780 - RNA, 20 nt, Human
cugggaaagaagcuaaaaua

SEQ ID NO: 1059781 - RNA, 18 nt, Human
gaauaucaguuugugaaa

SEQ ID NO: 1059782 - RNA, 23 nt, Human
gcaagaaacaaaaaccaacaccu

SEQ ID NO: 1059783 - RNA, 21 nt, Human
gcagggcagaggguaccagag

SEQ ID NO: 1059784 - RNA, 23 nt, Human
gcugcacgcugcgggaaaagaca

SEQ ID NO: 1059785 - RNA, 20 nt, Human
gcugcgggaaaagacagaug

SEQ ID NO: 1059786 - RNA, 18 nt, Human
ggacaucaccaggccagc

SEQ ID NO: 1059787 - RNA, 22 nt, Human
ggacgcugccugcuugaccagu

SEQ ID NO: 1059788 - RNA, 18 nt, Human
gggaaagaagcuaaaaua

SEQ ID NO: 1059789 - RNA, 19 nt, Human
gggacaucaccaggccagc

SEQ ID NO: 1059790 - RNA, 20 nt, Human
uaaaacagcaaauguuauaa

SEQ ID NO: 1059791 - RNA, 23 nt, Human
uaauuacuuaaauauaaacaauu

SEQ ID NO: 1059792 - RNA, 25 nt, Human
uauaaaacaagguaauucaguuuga

SEQ ID NO: 1059793 - RNA, 21 nt, Human
uauucaaugcauacagccauu

SEQ ID NO: 1059794 - RNA, 21 nt, Human
uauucuggaguuaaauuuuuc

SEQ ID NO: 1059795 - RNA, 22 nt, Human
uauuuggcuuuuugaaaacauu

SEQ ID NO: 1059796 - RNA, 20 nt, Human
uccccgcgggucuccguggg

SEQ ID NO: 1059797 - RNA, 19 nt, Human
ucuguaacuagaaaugauu

SEQ ID NO: 1059798 - RNA, 23 nt, Human
ugcaagaaacaaaaaccaacacc

SEQ ID NO: 1059799 - RNA, 21 nt, Human
ugcauuuuuuacacauugcau

SEQ ID NO: 1059800 - RNA, 18 nt, Human
ugcgcuggacgcugccug

SEQ ID NO: 1059801 - RNA, 20 nt, Human
uggaaaaggcuuaacaccug

SEQ ID NO: 1059802 - RNA, 23 nt, Human
uuaaaaauuauccuaaauacaua

SEQ ID NO: 1059803 - RNA, 28 nt, Human
uuaacaccuguucuguaaguuuucucua

SEQ ID NO: 1059804 - RNA, 21 nt, Human
uucaguuugacuauuaaaaag

SEQ ID NO: 1059805 - RNA, 25 nt, Human
uucucacauaaaauuauuauuuuau

SEQ ID NO: 1059806 - RNA, 24 nt, Human
uugcauacauucuccuguagcaua

SEQ ID NO: 1059807 - RNA, 22 nt, Human
uugcauuuuuuacacauugcau

SEQ ID NO: 1059808 - RNA, 21 nt, Human
uuucuguaacuagaaaugauu

SEQ ID NO: 1059809 - RNA, 23 nt, Human
accuaccccauucccauauaugc

SEQ ID NO: 1059810 - RNA, 23 nt, Human
agaaaagccaucuucccccccac

SEQ ID NO: 1059811 - RNA, 21 nt, Human
aucacuuuacuaauuaccgag

SEQ ID NO: 1059812 - RNA, 18 nt, Human
aucucccucucacacccc

SEQ ID NO: 1059813 - RNA, 23 nt, Human
caaggaagagaucaauauacagu

SEQ ID NO: 1059814 - RNA, 18 nt, Human
caccccuuugaaagcuua

SEQ ID NO: 1059815 - RNA, 21 nt, Human
caccgcaguucugaagauaga

SEQ ID NO: 1059816 - RNA, 19 nt, Human
caucucccucucacacccu

SEQ ID NO: 1059817 - RNA, 23 nt, Human
ccaccaucucccucucacacccc

SEQ ID NO: 1059818 - RNA, 20 nt, Human
cccccaccaucucccucuca

SEQ ID NO: 1059819 - RNA, 21 nt, Human
cccccaccaucucccucucac

SEQ ID NO: 1059820 - RNA, 21 nt, Human
cuugauuucaaugaagaaaag

SEQ ID NO: 1059821 - RNA, 19 nt, Human
gccaucuucccccccacca

SEQ ID NO: 1059822 - RNA, 27 nt, Human
uaaaaaaaugcaccgcaguucugaaga

SEQ ID NO: 1059823 - RNA, 24 nt, Human
uaaaaccaaguuuuaaaaaaaugc

SEQ ID NO: 1059824 - RNA, 18 nt, Human
uaaagguuuacagacuug

SEQ ID NO: 1059825 - RNA, 21 nt, Human
uaugccuuuaaaaaaaaaauc

SEQ ID NO: 1059826 - RNA, 20 nt, Human
uauucauauaaagguuuaca

SEQ ID NO: 1059827 - RNA, 23 nt, Human
ucaucugguagacauagcuuugc

SEQ ID NO: 1059828 - RNA, 18 nt, Human
ucucccucucacaccccu

SEQ ID NO: 1059829 - RNA, 24 nt, Human
ugcaccgcaguucugaagauagaa

SEQ ID NO: 1059830 - RNA, 18 nt, Human
uucccccccaccaucucc

SEQ ID NO: 1059831 - RNA, 19 nt, Human
uucccccccaccaucuccc

SEQ ID NO: 1059832 - RNA, 22 nt, Human
aaacaguaaaucucaccccagu

SEQ ID NO: 1059833 - RNA, 18 nt, Human
aaacccaacugcgucaaa

SEQ ID NO: 1059834 - RNA, 18 nt, Human
aaagcacuagucuuccuc

SEQ ID NO: 1059835 - RNA, 26 nt, Human
aacaauuuuuuuuuucugggggggcc

SEQ ID NO: 1059836 - RNA, 23 nt, Human
aacacugcaauugcuuauuuaug

SEQ ID NO: 1059837 - RNA, 21 nt, Human
aacuaugccaggaaaucccca

SEQ ID NO: 1059838 - RNA, 18 nt, Human
aacuuccucuuccucuuc

SEQ ID NO: 1059839 - RNA, 25 nt, Human
aacuuccucuuccucuucuccuccg

SEQ ID NO: 1059840 - RNA, 23 nt, Human
aagcuuucacauaaagcuuaaag

SEQ ID NO: 1059841 - RNA, 21 nt, Human
acaaagcacuagucuuccucc

SEQ ID NO: 1059842 - RNA, 20 nt, Human
acaguuagggcuaccaaaua

SEQ ID NO: 1059843 - RNA, 19 nt, Human
accauuuuagggcacugua

SEQ ID NO: 1059844 - RNA, 26 nt, Human
acuaagcuuucacauaaagcuuaaag

SEQ ID NO: 1059845 - RNA, 20 nt, Human
agaaggaggguuaggcugcc

SEQ ID NO: 1059846 - RNA, 20 nt, Human
agcagaagccuaucaacaac

SEQ ID NO: 1059847 - RNA, 20 nt, Human
agccggagaggagaagaaga

SEQ ID NO: 1059848 - RNA, 24 nt, Human
auaagaacaccauuuuagggcacu

SEQ ID NO: 1059849 - RNA, 21 nt, Human
auuuucugcaggucauaagaa

SEQ ID NO: 1059850 - RNA, 18 nt, Human
auuuugcaugcaaaacac

SEQ ID NO: 1059851 - RNA, 28 nt, Human
caaaacacugcaauugcuuauuuaugug

SEQ ID NO: 1059852 - RNA, 24 nt, Human
caaaacuuaaaacacaguauuauu

SEQ ID NO: 1059853 - RNA, 19 nt, Human
caacuuccucuuccucuuc

SEQ ID NO: 1059854 - RNA, 23 nt, Human
caagaacagagaauacauuuuga

SEQ ID NO: 1059855 - RNA, 22 nt, Human
caaugcuauauaaauguaugaa

SEQ ID NO: 1059856 - RNA, 25 nt, Human
caccauuuuagggcacuguauucca

SEQ ID NO: 1059857 - RNA, 20 nt, Human
caccccagugauagcuuugg

SEQ ID NO: 1059858 - RNA, 18 nt, Human
cacuuccgguucacuccc

SEQ ID NO: 1059859 - RNA, 19 nt, Human
cagacagacaggcagcagu

SEQ ID NO: 1059860 - RNA, 20 nt, Human
cagcaaauaaagaaaauccc

SEQ ID NO: 1059861 - RNA, 20 nt, Human
cagcagcaagcggaugccgc

SEQ ID NO: 1059862 - RNA, 18 nt, Human
cagccacuacugcucaga

SEQ ID NO: 1059863 - RNA, 22 nt, Human
cagggccgcgcgaagccggaga

SEQ ID NO: 1059864 - RNA, 22 nt, Human
ccaaaguucagucauccagcaa

SEQ ID NO: 1059865 - RNA, 26 nt, Human
ccccuuuuacuaccagcaggaguugg

SEQ ID NO: 1059866 - RNA, 19 nt, Human
ccgcuaggacccuccccca

SEQ ID NO: 1059867 - RNA, 24 nt, Human
ccgguucacuccccgcuaggaccc

SEQ ID NO: 1059868 - RNA, 20 nt, Human
ccucccccaacuuccucuuc

SEQ ID NO: 1059869 - RNA, 24 nt, Human
cgaagccggagaggagaagaagag

SEQ ID NO: 1059870 - RNA, 20 nt, Human
cgccuggccgaggagaggca

SEQ ID NO: 1059871 - RNA, 19 nt, Human
cggagaggagaagaagaga

SEQ ID NO: 1059872 - RNA, 20 nt, Human
cgguggcagcagcaagcgga

SEQ ID NO: 1059873 - RNA, 20 nt, Human
cuccccucaccccucuuaaa

SEQ ID NO: 1059874 - RNA, 23 nt, Human
cucuccccucaccccucuuaaag

SEQ ID NO: 1059875 - RNA, 23 nt, Human
cucucuccccucaccccucuuaa

SEQ ID NO: 1059876 - RNA, 24 nt, Human
cugggaaaccugguuacaagugua

SEQ ID NO: 1059877 - RNA, 22 nt, Human
gaccguucgggcgggagaaaga

SEQ ID NO: 1059878 - RNA, 19 nt, Human
gagagaggcauuucaaaga

SEQ ID NO: 1059879 - RNA, 22 nt, Human
gaggagaggcaggaaccuuuac

SEQ ID NO: 1059880 - RNA, 19 nt, Human
gaggcgguggcagcagcaa
